United States Patent Application Publication US 2004/0214272 A1 - sequence listing, part 56

SEQ ID NO: 304524 - protein, 121 aa, Zea mays
  unsure (1)..(121): unsure at all Xaa locations
  Clone ID: MRT4577_40796C.1.pep
MLLTVGVTALLSSMDSLDFKYWNKRAHYPDKXRDRDLTDXPIKRGAPVSFSINTYDGETICNGKLVIDLDXLNXHVYKETXNACTKTFCPNATGEFVISHKQTLSSFIPPGLDTLTKNLLR

SEQ ID NO: 304525 - protein, 143 aa, Zea mays
  Clone ID: MRT4577_40797C.1.pep
MGTLGRAIYTVGKWIRGTGQAMDRLGSTIQGGLRTEEQVSRHRTVMSIFDKEPRINKDVFVAPSASVIGDVEIGHGSSIWYGSVLRGDVNSIRIGSGSNIQDNSLVHVAKTNISGKVLPTIIGSNVTVGHSAVLHACTIEDEA

SEQ ID NO: 304526 - protein, 134 aa, Zea mays
  Clone ID: MRT4577_40798C.1.pep
LAICSSWMEQLQKVFKFLSDPLQTPLSGVFFLKDPLNLGGSTNHSGRPGWVHCLPNPKFLICQLQGNVSAKQLRHPDLAPCWINPIVDCIGGTSHLRQHCRTLVTGVVYPCFDSLSTCQTDTLSKPSRRRWATR

SEQ ID NO: 304527 - protein, 99 aa, Zea mays
  Clone ID: MRT4577_40799C.1.pep
KFPPPIRQCLNPETHAASFSFHHSRFNPRSAKELFSFHADMLEVLAHDQASFHATTEDAVRKLTSTAAAAYAQVTFQRPTEQRKPDAHPHLFNHIARVQ

SEQ ID NO: 304528 - protein, 97 aa, Zea mays
  Clone ID: MRT4577_4079C.1.pep
VVTSSDQDFMVRKRLGYSSRGHRIPTMPRVPNSARGKRSTRRKKDENDDMCAMDLLATVAGKLLADQDNSSSVPNTSAAKAKKRKSVKEEHFDEIPL

SEQ ID NO: 304529 - protein, 85 aa, Zea mays
  Clone ID: MRT4577_407C.1.pep
SGVPIYFVIRTVHMNTENRYSPLLVLAWYQLEDPEIAPFLIMSDTHSSVHSVTTHHRRSSQQFLPSTWHATVAGFQLLIFMSMFK

SEQ ID NO: 304530 - protein, 198 aa, Zea mays
  unsure (1)..(198): unsure at all Xaa locations
  Clone ID: MRT4577_40800C.1.pep
XRSVFSDRMVFVRAVHEANWMNEMEISIYDSWFDPVVSSLPGLIPDGFIYLRASPDTCHKRMMHRRRSEEGGVTLDYLQGLHEKHESWLLPSKGSGPGVLSVSQLPMHMEGSLPPEIRDRVFYLEGNHMHSSIQKVPALIMDCEPDIDFSKDIEAKRQYARQVAEFFEFVKKKQERAPSGQTSNDKDRMNPQVLLPNS

SEQ ID NO: 304531 - protein, 110 aa, Zea mays
  Clone ID: MRT4577_40801C.1.pep
PCILLMLCEGVNMGSIVPDLFQKQIKEHRTYNYTLKQATKTARRWLGCHARASFCETAIHHGGGGHPLFGSQVEPLHEGPGPLSRCQYSCRMNLTMESPPPPTAGASSAS

SEQ ID NO: 304532 - protein, 38 aa, Zea mays
  unsure (1)..(38): unsure at all Xaa locations
  Clone ID: MRT4577_40802C.1.pep
RSXSAIDSGELYVXVAKRXXARXCRESGLRSREPQRWX

SEQ ID NO: 304533 - protein, 61 aa, Zea mays
  Clone ID: MRT4577_40803C.1.pep
SRSRADGLFFFFLNTRVLNITKYNIECSCKMHFNLSPLIKSVRPNNYTVALYNTKTMNANS

SEQ ID NO: 304534 - protein, 62 aa, Zea mays
  unsure (1)..(62): unsure at all Xaa locations
  Clone ID: MRT4577_40804C.1.pep
XQFRWFTTASRSGSRAALYRVGGTPRPCMAASLLGSQQIIRCTVITRLQALHARTQVADHNA

SEQ ID NO: 304535 - protein, 394 aa, Zea mays
  Clone ID: MRT4577_40805C.1.pep
SDNNDAALGEGASPGASYSTPRLPSKHLNNELHSDSEMLKSAMKSSSVGSRGSSDSVSPLPRESWNNKSFKGSAEAPRSLRMTMKLRDFYKTPKVDPELLKEIEQWNEALKNDVIKFCQENNFHSGFFDGTENNMVADAYELKVRLEHIIERIALISDAANTERPSLVVNNLFIGGALAARSKYTLQHLGITHVLCLCSNEIGQSDSQFPDLFEYKNFSISDDDDANISDLFEEASDFIDHVDHVGGKVLVHCFEGKSRSATVVLAYLMLREGFTLAKAWNLLKKVHRRAQPNDGFAKALLALDKRLHGKVSMDWQHKRPEMKVCPICSKNVGLSTSSLKLHLQKAHKRLSAGSVDSAMTMEIQKSIESLQISRGGSLSPSQKLTKVFSNELSF

SEQ ID NO: 304536 - protein, 162 aa, Zea mays
  Clone ID: MRT4577_40806C.1.pep
PRVRKDEIETQVRDMLSQGVIQKSHSLFASPVLLVKKKDQTWRFCIDYRYLNAITVKSSYPVPIFDQLMDELSSAQWFSKLDLKAGYHQICLVPGEEPKTAFQTHLGHFEFRVMAFGLTGAPNTFLGAMNDTLAPVLRRRALVFFDDILIYSPTFESHLQHL

SEQ ID NO: 304537 - protein, 512 aa, Zea mays
  Clone ID: MRT4577_40807C.1.pep
YPQWPTTPWTRPRRRPPPPLLAESPPAPAQRSGPGGRHLSTALGEDGSGSADLRDLLLFLYIQSYKRLVPRVHKDSPAVTDVWPSTSAFDGYLSALSPIQFVRSNSRRFMPSQADEEAHQLSYLQKHMANILTLLADSIDGEGDDSMVLTMETFEHLGFFLQLSEGTPLSQAATFFANSDPDMPAAPVPAALVHDWVLQHIASALEFMAEKTVAKENSQHNAFDPDVTMSDAVTNTRIHSSSPTGSSAPNYPGYYRNASFVEGCSKTSVVKQASDLKGHSIKVLNCHDSVIYILAPLKYATVYGCSDTTIILGAIGKVVKVEHCERVQIIAASKRICIANCRECIFYLGVNHQPLIVGDNHKLQVAPFNTYYPQLGEHLAQVGVDPNVNKWDQPFVLGVVDLHDSLSHPAGVSDVQAESTTCLDPDLFTNFLIPSWFEVEGPTKYNPFTLPEVYWASQRKKHASLEDIQKNIRELEIDDIRKKELACALHAQFKDWLYASGNIRQLYCLQGE

SEQ ID NO: 304538 - protein, 164 aa, Zea mays
  Clone ID: MRT4577_40808C.1.pep
VYGCSDTTIILGAIGKVAPFNTYYPQLGEHLAQVGVDPNVNKWDQPFVLGVVDLHDSLSHPAGVSDVQAESTTCLDPDLFTNFLIPSWFEVEGPTKYNPFTLPEVYWASQRKKHASLEDIQKNIRELEIDDIRKKELACALHAQFKDWLYASGNIRQLYCLQGE

SEQ ID NO: 304539 - protein, 169 aa, Zea mays
  Clone ID: MRT4577_40809C.1.pep
MPGGSSGPDGEVDAGFAKLQGEDFEYYMQTYSIMLGRNSKKSTVDVDLSSLGGGMNISRHHARIFYDFQRRRFALDVIGKNGCLVEGVLHLPGNPPVKLDSQDLLQIGDKKFYFLLPTRSIFASAAAARHAPIIPQQLPPPPYAHARAGRPRLSEFHDRSFEGDYGPGG

SEQ ID NO: 304540 - protein, 449 aa, Zea mays
  Clone ID: MRT4577_4080C.1.pep
FRQEDETPDRIDRCCQKEKIRKSCSAAAVPPAPGRSSATCAETISCSTCTGTRRRGRCRGAVAGPASGLPASARHVTSSAEGHRGSVARAAKPRPAAAPPRGLPSRRYRQCRAHPCCHELRVPRGGGGLGPPCQSASRRRCYRRLPGSAARALKPRQAAAPPPRGLPSRRYRQCRAHPCCHGVEPRSCRHGHGCCRHHGQPEWSSCRGYCCRPRAQPPAAKDPKRRLAPRNHCRPVLKGAPFIVCSSCFKLVQVPADFAVSSRTVRKLRCGSCSTVLSYSYRDPARKKAYQDSVDRCSTVGSELHGGKGDEGPDPFAPFIDGFGLSSYSTEDEQRLPVSRNTSFDTLDGTKGVGRLHRLMGYGSASELLRHSPDLYESFSERTTPDVRQHDRKGKAVCIDDDDDNYDVDDSDEEEYIGALKRSAGKGSGWSLPWMPGKGTPATGGIRIR

SEQ ID NO: 304541 - protein, 82 aa, Zea mays
  Clone ID: MRT4577_40810C.1.pep
MQIPSWFEVEGPTKYNPFTLPEVYWASQRKKHASLEDIQKNIRELEIDDIRKKELACALHAQFKDWLYASGNIRQLYCLQGE

SEQ ID NO: 304542 - protein, 258 aa, Zea mays
  Clone ID: MRT4577_40811C.1.pep
MADDPLDSSPSASAAAAAGGVSSGPRPALRPRREAFEYGLLPIPKLVFPEGALTQTLSQLKERLAPGGPRVGAAALAEALQIPAEQAALALGTLAAVLPAEDSALGEDGSGSADLRDLLLFLYIQSYKRLVPRVHKDSPAVTDVWPSTSAFDGYLSALSPIQFVRSNSRRFMPSQADEEAHQLSYLQKHMANILTLLADSIDGEGDDSMVLTMETFEHLGFFLQLSEGTPLSQAATFFANSDPDMPAAPVPAALVHDW

SEQ ID NO: 304543 - protein, 50 aa, Zea mays
  Clone ID: MRT4577_40812C.1.pep
NIAQNYKMIDVTERPKDRVNASTHKHYPSTQDIRTLGPKKKKKKKKKKKK

SEQ ID NO: 304544 - protein, 93 aa, Zea mays
  unsure (1)..(93): unsure at all Xaa locations
  Clone ID: MRT4577_40813C.1.pep
VGHHEAVAVHRDFDLEMETLGLESYEECRGGVLVDYPYGEADADSLTVDXLAKQELNCHVAAGNADPIKPITASVKGDLAXKFKXTSGTGIDF

SEQ ID NO: 304545 - protein, 65 aa, Zea mays
  Clone ID: MRT4577_40814C.1.pep
MTTRGASFDCGLQNQHAPSLCLRPWVRAVMTRRYLYDGTSWLGLDLLRRLSTYDGFFSCKRPGHT

SEQ ID NO: 304546 - protein, 80 aa, Zea mays
  Clone ID: MRT4577_40815C.1.pep
MSCTSGKCDCGSSCSCGISCNCMSTNVVTTAASSINTIVHSAPITTASSSRFEARTDGRRCDCQICNCCTRFRCSCCSCN

SEQ ID NO: 304547 - protein, 92 aa, Zea mays
  Clone ID: MRT4577_40816C.1.pep
PRVFGPPFFQGLGAQPMRERAMFLRTSRCPKKFFVLGVLPDFVVKGSKIYAQGPSFWFSVGAHFLFQKAMWPTFQFVVIWSGLFQSATSGGF

SEQ ID NO: 304548 - protein, 111 aa, Zea mays
  Clone ID: MRT4577_40817C.1.pep
PQHWSFTRRVVSRHSPHEAERPVDQPTEPEARLIHPPGTVTERVRTSPLPEPEGNPGLTSPKDSTKTGERTHRPSVAGLPPPAERGTGSGWVGVGTGDGEEEGPGRPRGTQ

SEQ ID NO: 304549 - protein, 122 aa, Zea mays
  Clone ID: MRT4577_40818C.1.pep
KTRAISLPASGLFTGPMLAPVPVRLFVQRWPVWGPPVSARVVHAGRPQSRSPRFHRLASPRGPEWLGVEQSAAEHGGFIKIGVASMRYEYGRPRGALSPNEKKAGLVAPVTARRLQPGQQPI

SEQ ID NO: 304550 - protein, 106 aa, Zea mays
  Clone ID: MRT4577_40819C.1.pep
NLPGNKGTNKKMWYRGHARPNLNQGGGGGAQPLTTRRNLSFQNKKRKEEALRGGGPPPSTGTSGWGPPGTGPDQQEGPAGSGRPQHQGQPPQQINDGWLAWEPCHS

SEQ ID NO: 304551 - protein, 142 aa, Zea mays
  Clone ID: MRT4577_4081C.1.pep
MASKRILKELKDLQRDPPTTCSAGPVAEDMFHWQATIMGPSESPYAGGVFLVTIHFPPDYPFKPPKVFHPNINSNGSICLDILKEQWSPALTVSKVLLSICSLLTDPNPDDPLVPEIAHMYKSDRAKYESTARSWTQKYAMG

SEQ ID NO: 304552 - protein, 87 aa, Zea mays
  Clone ID: MRT4577_40820C.1.pep
ALSTVAYCKAMLNEDTIDSRLNKQKQFIHAEVFFKALSSLIVKGVECQFTLLSCNNPSKDRYITQLFKQSKEFIDLACLAYLSVLAC

SEQ ID NO: 304553 - protein, 80 aa, Zea mays
  Clone ID: MRT4577_40821C.1.pep
DCACLVRCSVHRRVNRGACVCVCCCSVYVVQLHSRLIICLSTGHSLVVPVIYYQQFFSIFKIMEKVDFIKKRRKNKKEES

SEQ ID NO: 304554 - protein, 59 aa, Zea mays
  Clone ID: MRT4577_40822C.1.pep
HADICDIIPHHILLGDLLLNLGNSSCHDPIVYLDCSLCVTIQTLRMNAAVDNPEKYTQG

SEQ ID NO: 304555 - protein, 52 aa, Zea mays
  Clone ID: MRT4577_40823C.1.pep
CSVWLFRVIRSCVVGQVTLLRLLCMCRYPRCGLKKPQWKGRPPASGLVDPRI

SEQ ID NO: 304556 - protein, 110 aa, Zea mays
  Clone ID: MRT4577_40824C.1.pep
MPNKPLSALTLQDRNAEVQIQVHRKWEFRGAVDNGPILHIDMILADCTGNAIHCQIPSFLAATRGDEFQVGKIYKMTRFSVARAKSTYKPVDGDLMLYVKPYTTLELCHT

SEQ ID NO: 304557 - protein, 61 aa, Zea mays
  Clone ID: MRT4577_40825C.1.pep
DSGAHSTVWMERHTQLGHRARHMSDADCDSYDRIFCMTLNYKPGVWATVLAHMRNVQERLQ

SEQ ID NO: 304558 - protein, 649 aa, Zea mays
  Clone ID: MRT4577_40826C.1.pep
MKPVPSALTVDKATSVRGNCSITPNNSSKVADSLPDRNFEPSDRSGSTTNNLATSLKKMVRQQTAPKVVRHYPSESTLFPYELFVRLYVKVELRPFGLHNLGNSCYANAVLQCLMFTRPLTTYLLEGLHSKNCSQNGWCFMCEFEKLIVEGKRRKIALSPTGILSHLNDIGSSFGPGKQEDAHEFLRYAIDAMQSVCTKEARKGGVLRSAEETTLVQLIFGGYLRSKIKCSRCHVSSEQCEPMLDLTVEIDGDISSLDEALVRFTSTEALDGENKYHCSRCKSYERAKKKLTIEEAPNILTIALKRYQSGKFGKISKAIRFPETLNIVCYMNPDTDDISPVYSLYAVVVHHDVMNAAFSGHYVCYVKDTHGKWFKADDSQVKPVSLDNVMSKCAYMLLYARCSPRAPSSVRQAISDPARPKKAKQKVVPGGTTWRGGSFNRHQDGQRHSNHTADDLTHAFDEYRNAPYSPSDSPSPSESSSLFSNSDAGSHSTVSTDSSESTRNSTSTEEYEYVFGAADQMYPGGPMGGAPVESDQMYPGGPMGGAPVESDYSTYSRSRSSLNTSSSGRDAYSAASSADHKHQVVGSGGQVEGDESTSLLYTDRSNQQLSSKLTDQYRQLDGSGHDPGETRGGVLLRRPSRDRTAQTFY

SEQ ID NO: 304559 - protein, 178 aa, Zea mays
  unsure (1)..(178): unsure at all Xaa locations
  Clone ID: MRT4577_40827C.1.pep
KGLFWPPSLPFLVAVATSSASRVRPRLLAASPTRSTRTRPSAPRPSQRPPARVHDLVGFRRRPDPPSLSAPADRAAALSAVPRPLPSRLPPAAGQPADVATSGRPDPLYHLQTPAADRPDPLLHQGESPAATSSRRSRRSPAPPGSGXPRSPAPPGRATSRSTTVSQPYAEGLRASLT

SEQ ID NO: 304560 - protein, 198 aa, Zea mays
  unsure (1)..(198): unsure at all Xaa locations
  Clone ID: MRT4577_40828C.1.pep
PSSPPPVPPPPAHVGPPLPVDRPPSPPPLPSSPPPVPPPPAHVGPPLPVDRPPSPPPLPSSPPPVPPPPAHVGPPLPVDRPPSPPPLPSSPPPVPPPPAHVGPPLPVDRPPSPPPLPSSPPPVPPPPAHVGPPLPVDRPPSPPPLPSSPPPVPPPPAHVGPPLPVDRPPSPPPLPSSPPPVPPPPXPCNPPLPWIGLR

SEQ ID NO: 304561 - protein, 278 aa, Zea mays
  unsure (1)..(278): unsure at all Xaa locations
  Clone ID: MRT4577_40829C.1.pep
TKQISEQKLIVKRTSSNNTNLVLSRYAIDAMQSVCTKEARKGGVLRSAEETTLVQLIFGGYLRSKIKCSRCHVSSEQCEPMLDLTVEIDGDISSLDEALVRFTSTEALDGENKYHCSXLTSSSIPLSLGSTDPKYLXCKSYERAKKKLTIEEAPNILTIALKRYQSGKFGKISKAIRFPETLNIVCYMNPDTDDISPVYSLYAVVVHHDVMNAAFSGHYVCYVKDTHGKWFKADDSQVKPVSLDNVMSKCAYMLLYARCSPRAPSSVRQAISDPARPK

SEQ ID NO: 304562 - protein, 170 aa, Zea mays
  Clone ID: MRT4577_4082C.1.pep
VGGGGQLGWGRRAAQEQRPRESSVPIHSPDVPWQFRTPERFAASDARGATASSRSPAPQCTSAVDAALAFEVTSRRSHSDFIWMVALLCSSRQRFFLSFWFGFSVSDGFSRTCSAKNRTGPSAGDTDLPSPPQSSHLDASDVATTSWSRSSSPSPPAVGSSGRSGLPPPP

SEQ ID NO: 304563 - protein, 196 aa, Zea mays
  Clone ID: MRT4577_40830C.1.pep
PCNSHSSPNINGHSSFVNKEFCNHSKEHQRAKDASVVEDCSQTSSTRELEDSSIPHAAASVVLESKSSRTPIHVELERSKTKSAGNDSIQSTKPVPSALTVDKATSVRGSLSITPNNSSKVADSLPDRSFKPSDRSGSTTNNLATSLKKMVRQQTAPKVVRHYPSESTLFPYELFVKLYSKVELHPFGLHNLGNSC

SEQ ID NO: 304564 - protein, 63 aa, Zea mays
  Clone ID: MRT4577_40831C.1.pep
HTAYLTQHSVPRSHWEHQFSLSRVSLALYCYFAFLLVMHFCWYLHCQCVWVVSLCKTYIHKHT

SEQ ID NO: 304565 - protein, 54 aa, Zea mays
  unsure (1)..(54): unsure at all Xaa locations
  Clone ID: MRT4577_40832C.1.pep
GVIWLYNIGFYLPVDIIKGLIRYALSGRGXTLALDQRIVYTRKKILDTKKGEPR

SEQ ID NO: 304566 - protein, 617 aa, Zea mays
  unsure (1)..(617): unsure at all Xaa locations
  Clone ID: MRT4577_40833C.1.pep
QSKQYCGICKKIWHHTDGGNWVCCDECQIWVHVECDXMQQRRGFGKCRLFLSGLQIXKSKTVPATENLNTSTSECASTSKGKLTAMIAVCCNGEDALYVPEKHMILCQCKSCKERMMSLNEWEKHTGSRKKNWKMSIRQKSTGELLINLLDDIPCGTSKYSNPGIKKEELLQLQANPYSPVCAKWTTERCAVCRWVEDWDYNKIIICNRCQIAVHQECYGACAVQDLTTWLCRACESPQQKRECCLCPVKGGALKPTDIDGLWVHVTCAWFQPKVSFPVDETMEPAMGIMSIPVEYFKKTCVICKQMHGACTQCYKCSTYYHAICASRAGYCMELQCSERSGRHITKMVSYCDFHSTPDPDNVLIVKTPEGVFSTKFFLQNGEKQTAARLVRKENHQEKVLPPIISDCLVAKCLTYEMSKYKKQPGEAIAHRIMGPRHHSQDFIDGLNACMDRKDDQSFSTFKERLRYLQKTENLRVSCGRSGIHGWGLFAARNIQEGQMVIEYRGEQVRRCVADLREAQYHREKKDCYLFKISEDVVIDATDKGNIARLINHSCMSNCYARIMTVSDDRSEIILIAKRDVSAGEELTYDYLFDPDESEDCRVPCLCKAPNCRGYMN

SEQ ID NO: 304567 - protein, 59 aa, Zea mays
  Clone ID: MRT4577_40834C.1.pep
LCGSGERRCRIKRGHLLPMGSMVDDLTSWRRPSLTVRWERMERRTPGNRERGGERSHGD

SEQ ID NO: 304568 - protein, 144 aa, Zea mays
  Clone ID: MRT4577_40835C.1.pep
DISALTNLLQLGLIISLIMRRRGRDHGTATVDALHLVVLLDTLRVGVQSLGCASCIFLVSHRSCNLGSGRPGGILLYTSVAPVSGVAAALGFGLGVGEAHADAPSPEDASCGGGGVVYEVSGVENHVGAGQVDQDDREVGCWRQ

SEQ ID NO: 304569 - protein, 74 aa, Zea mays
  Clone ID: MRT4577_40837C.1.pep
HPWCANLSVFFSFQILLLLLALIAVPWMLFPKPFILKKLHKERFQGHTYRFLGTSEMDPDSEPDFVRARHDDFP

SEQ ID NO: 304570 - protein, 53 aa, Zea mays
  Clone ID: MRT4577_40838C.1.pep
RRKPPVHNIIGTCSTPQALRLLFTARDTCTGVTIDDFNDDYTYTNNKTIAIFT

SEQ ID NO: 304571 - protein, 90 aa, Zea mays
  Clone ID: MRT4577_40839C.1.pep
SDLGGVSQLTSAPTILSSFYTHYFYFVISLPLCNKYSDYYDIYLYTLCYYICCLLWRMYEMHPALFFKTGCYTLQFGLVININKVSHLVG

SEQ ID NO: 304572 - protein, 93 aa, Zea mays
  Clone ID: MRT4577_4083C.1.pep
DGAFVSGEFCGGKLLRWCLVTDFPPDSCTTCSYSRRSTPGCSPGGSRGLSEGEGSSVSLQRSRVLSAMKHVLNLYLLGVVLTLLSIFVRVMKS

SEQ ID NO: 304573 - protein, 72 aa, Zea mays
  Clone ID: MRT4577_40840C.1.pep
LITHQLAPRRLPLSANAPINKHDAHQRASFNPAGSVRARTNRHAHLSLQTSQNLFTQFEQGGQRASHVLQPS

SEQ ID NO: 304574 - protein, 96 aa, Zea mays
  Clone ID: MRT4577_40841C.1.pep
EKQGPPRPARKRKAPPPPRGGGGPQKGGPSRGVGRPHAQKSGGPRWRGRQGPHPGVGGQGLFSFFWDWEEHPKKGCLLRVKQIGVGFCGLLRGVLF

SEQ ID NO: 304575 - protein, 76 aa, Zea mays
  unsure (1)..(76): unsure at all Xaa locations
  Clone ID: MRT4577_40842C.1.pep
KNFEYAIYSAISCLDPNQFPEAVEFYFKIKELESLSPPIIPKMYQGAGXNIRGSGGMEKNAPVGTGGPGPKIEKVD

SEQ ID NO: 304576 - protein, 128 aa, Zea mays
  unsure (1)..(128): unsure at all Xaa locations
  Clone ID: MRT4577_40843C.1.pep
SIARDLRHDFLCSPPGRRNSYDGPXTRRGSRRGYGAVHHSGPLRWGQRRXHKGYYVLCTLCEIEAGXGHTVLEKSERRXDGXLVVGAVARRXTLLRXXDFXXMXXVSXTPXXDRRGXRSSXXYEASTI

SEQ ID NO: 304577 - protein, 146 aa, Zea mays
  unsure (1)..(146): unsure at all Xaa locations
  Clone ID: MRT4577_40844C.1.pep
CNXIAISHSKQLCALFCPPLLPLLVRLGGSVGGSGLLFPVSHRGLSWAPSMRSWGGPSPPAVPPLGSPVCSSSVLVWRAWCLWVFASVVSRVCSALLVWPGVAPGRSLGPAPWPPSPSPPPRAFSPEFVPLFDVFFLRLFPAAFGG

SEQ ID NO: 304578 - protein, 278 aa, Zea mays
  Clone ID: MRT4577_40845C.1.pep
MSSHLIAQVQNTVIDLHCQSTSTVVVMKMNMSLVLRVAFSACLASLAAAGWSPGTATFYGGAHGSGTMGGACGYDNLYNAGYGVNNAALSATLFNDGASCGQCYLITCDTSRPGGQSCKPGSSITVSATNLCPANYALPNGGWCGPGRPHFDMSQPAWEHIGIYGAGVIPVLYQQVKCSRTGGVRFSLAGSQYFLLVNVQNLGGSGSVGAAWVEGDRTNWIQMSRNWGANWHALAGLVGQGLSFAVTTTGGQYIQFWNVAPGWWQFGQTYTTNLYFYY

SEQ ID NO: 304579 - protein, 85 aa, Zea mays
  Clone ID: MRT4577_40846C.1.pep
KNPWKSYSNGDGSTTPEFDDNASLVGAAPLLKSFVTQVGTKFGENTSRWGSMLSDGQVGKLSDILLGPAAGFFSSFTSGARYDSA

SEQ ID NO: 304580 - protein, 60 aa, Zea mays
  Clone ID: MRT4577_40847C.1.pep
RYRSSHPMNTRHNTRTTSRMALILEVTGGTAHCMTEQSAGNSPIVTRTTNKKGRSCSWFA

SEQ ID NO: 304581 - protein, 199 aa, Zea mays
  unsure (1)..(199): unsure at all Xaa locations
  Clone ID: MRT4577_40848C.1.pep
MHAPRRFKKAFMAQLLLSLRAAGQASKSMGLRERRDAVRLSSDVAMAXVRAGXAAPRSTVWARALIARHAAEQRNEALMRRIMGGAGYEMAAAAVRARKEARCRRIVRRSRWVCSGVGRKRRSLLAAEGGGGIRCSAMAAARRMVKARLQVLRSLVPGGEAMGGLSLLTETLDYVVCLKAQVELMQRLCKGSCSQSQLG

SEQ ID NO: 304582 - protein, 45 aa, Zea mays
  Clone ID: MRT4577_40849C.1.pep
GRAGYSQQREEPRTSYSGTRSVSLLNSRSLARPKRKKLAFSTPPL

SEQ ID NO: 304583 - protein, 148 aa, Zea mays
  Clone ID: MRT4577_4084C.1.pep
MASKRILKELKDLQRDPPTSCSAGPVAEDMFYWQATIMGPSDSPYAGGVFLVTIHFPPDYPFKPPKVAFKTKVFHPNINSNGSICLDILKEQWSPALTVSKVLLSICSLLTDPNPDDPLVPEIAHMYKSDRAKYESTARSWTQKYAMG

SEQ ID NO: 304584 - protein, 118 aa, Zea mays
  Clone ID: MRT4577_40850C.1.pep
WFWKQINSNKGKLAKEKQLGPRKTGFLILQGGDFLGGTTRGGWGGLITTNFFLRWKDWGFIPPLKGLEFWINPPFKVGVWIFQGLPMGNGGQGHNAGKGLPPKRGGIGIAPFFQVGFW

SEQ ID NO: 304585 - protein, 119 aa, Zea mays
  Clone ID: MRT4577_40851C.1.pep
MSTPGAPSLATTAAAVLCVLAAALAVTVASGQQCGQQAGGATCRDCLCCSRFGFCGDTSEYCGAGCQSQCTGCGPRPAGPGVASVVPRDLFERLLLHRNDAACPARGFYTYDAFLAAAA

SEQ ID NO: 304586 - protein, 63 aa, Zea mays
  Clone ID: MRT4577_40852C.1.pep
MYLYVLPGSEQTKARQLSDGQARKRRLSDGQARFLELSFGKERKLETPRKVQLAAELGLDAKQ

SEQ ID NO: 304587 - protein, 37 aa, Zea mays
  Clone ID: MRT4577_40853C.1.pep
KKKKKKKKKKKNKKKKKNKKKKKKILKKNKKKKKNIK

SEQ ID NO: 304588 - protein, 70 aa, Zea mays
  Clone ID: MRT4577_40854C.1.pep
PRFYSASYKENLVAFRERVGIYFRGGEVPRRGPAPPKLAFFPFGLGDTSVRNFDSSHISSMHSCDMLFGF

SEQ ID NO: 304589 - protein, 480 aa, Zea mays
  Clone ID: MRT4577_40855C.1.pep
MVTSIPHIFINMPVHYRDSTLNLDAFHRPALNLHDLDQNFSEEEVWNTIKALPSDKAPGPDGYTGRFYKKAWPVIKGDLMTAINRLLHGDISKLHLLNSAYVTLLPKKEALEVKDFRPISLIHSFAKIITKLLAIRLAPRLPVLVSKNQSAFVKGRSIHENFISVQQTARAIHRQKVPRILLKLDIGKAFDSVSWSLFEIFRHLGFGPVWCSIISKLLYSSSTRVLVNGEPGEIIKHHRGLRQGDPLSPMLFILVMDALDSLILKAQERGLLLPVLRHGNGQQISLYADDVVLFLQPNRREITVIKEILRIFGEASGLKTNVSKCSMTPIQCNDLCVGEAQSLFPCKGVSEPRQGGRQQRTRLRWSRCPRPRQKRRGVSDPAGKATTATDPDGETRSSQRDGGSSREGRSNVDPAGKAAAATDPTKARKGRATGRFQPGRGLRRTWQRMGDAGDKRSVRRHCSVTAQSEDAAAARIRATL

SEQ ID NO: 304590 - protein, 53 aa, Zea mays
  Clone ID: MRT4577_40857C.1.pep
ALSTQSGDNRTDTMRVKLDTLYLLALIANCTFSIKREVQVPANARGLSTVGHA

SEQ ID NO: 304591 - protein, 92 aa, Zea mays
  Clone ID: MRT4577_40858C.1.pep
VGFSYPSGSCSDSIGCAGFGFVVERIETAAYDVEYRCFIGRLDCTTDDHSLHNAFNTYGEALWFKIMLHRKTPWPRCKGFVTYYTEDTITKR

SEQ ID NO: 304592 - protein, 222 aa, Zea mays
  Clone ID: MRT4577_40859C.1.pep
MAIVYALVARGTVVLAEFAAVSGNAGAVARRILEKLPPDAESRLCFAQDRYIFHVLRSDAAGITFLCMANDTFGRRIPFLYLEDIQMRFMKNYGRVAHSALAYAMNDEFSRVLHQQMEFFSSNPSADTLNRLRGEVSEIHTVMVDNIEKILDRGDRISLLVDKTSTMQDSAFHFRKQSKRLRRALWMKNAKLLVVLTVVIVVLLYLIISAFCGGLSLSSCRS

SEQ ID NO: 304593 - protein, 165 aa, Zea mays
  Clone ID: MRT4577_4085C.1.pep
RATRAPTSSSQTRRLRVPRGGGGGLGPPCQSASRRRCYRRLPWQRSSCAEAPSSRSSSFTWLAVPALPPVQSAPVLPWRGAQVVPSRARLLPPPRQAGVQQLPRVLLQAQSAGAGRQGHQAAPGAPEPLPAGAQGRAVHRLLQLLQAGAGARRLRRLVQDGAQAP

SEQ ID NO: 304594 - protein, 56 aa, Zea mays
  Clone ID: MRT4577_40860C.1.pep
LSSYHRCMSVAHNCNLHKAVTFPLVPCKICHAVICESCLTMLHLLKPRPEFPASSL

SEQ ID NO: 304595 - protein, 62 aa, Zea mays
  Clone ID: MRT4577_40861C.1.pep
GNHNATHLLTKWGNCYGLDHYKSAINRLVFMHTGNCLNNRDLVRRGNSHNHGISLPRLGCKN

SEQ ID NO: 304596 - protein, 119 aa, Zea mays
  unsure (1)..(119): unsure at all Xaa locations
  Clone ID: MRT4577_40862C.1.pep
AXGXQXXDXENXGXTQXXRXAAQPXXASXXXSGEARTXRXXQQKRSPKGEGDAPXSGAXSAXXXXXTRXXTXTXASAQAPXXXXXXXXXXATXAGXPXQXXKRGRPEGXRXXXXRHPDP

SEQ ID NO: 304597 - protein, 233 aa, Zea mays
  unsure (1)..(233): unsure at all Xaa locations
  Clone ID: MRT4577_40863C.1.pep
MLLPTRRLPAAPSGPAVHPYISPARPSLRFRRQHGRAATARATSATPPVFGDTLLGLYEKERLGLSRYADEESREDVFWETLDADLQYWTRSLRPVQWYPGHIAKTEKELKGQLKLMDVVIEVRDARIPLATTHPKMDSWLGNRRRIIVMNREDMVSADDRNAWATYFSSQGIXVIYSNGQLXMGTMKLGRMAKSAASTVNTRRREKGLLPRPVRAGIVGYPNVGKSSLINRL

SEQ ID NO: 304598 - protein, 443 aa, Zea mays
  Clone ID: MRT4577_40864C.1.pep
MFKLARSSQFASALKGAYSAPIRQSAFQQRRNLSIHEWRSAQLLDSYGIKVAKGNVAHNAKEAEEVAKTIEGDDMVIKAQVLAGGRGKGHFDNGFKGGVRIVYSPREASILADQMIGHKLITKQTGERGRICNSVYIVERKFARREFYLAILMDRATQSPIIVASSQGGMDIEAVAKESPESIITTPVDIHVGVTDEMAKKISTELGFSPQCIDAGADTIQKLYKLFMEKDATQIEINPLSETSDHQVMCMDAKLGFDDNADFRQKEVFEWRDVTQEDADEVKAAEQGLNFIKLDGDIGCLVNGAGLAMATMDIIKLNGGAPANFLDVGGGATPKAIKSAFDLITADPKVTAIFVNIFGGIVRCDDIAKGLISVAETMNLRIPIIARLQGTNMEAAQKLIDESGLKIFSINDLQSAAEKSVQFSKIVKTARDIDVGVEFNLGI

SEQ ID NO: 304599 - protein, 42 aa, Zea mays
  Clone ID: MRT4577_40865C.1.pep
ASLSYSMARAARLGFLQLLWSGQSGRLVLNTQTESVLLSKPP

SEQ ID NO: 304600 - protein, 75 aa, Zea mays
  unsure (1)..(75): unsure at all Xaa locations
  Clone ID: MRT4577_40866C.1.pep
MGISRQXFHKRGATFXKHNAWRKKRMYELGRXSTNTKLSSINTVMRVSVSECNVKWRALSLDTGYYLWRSESFTL

SEQ ID NO: 304601 - protein, 48 aa, Zea mays
  Clone ID: MRT4577_40867C.1.pep
SSRRAVSPVKIETSYYTKQAAPREQLAMPPYDSEPPPLITPWKLMSFT

SEQ ID NO: 304602 - protein, 145 aa, Zea mays
  unsure (1)..(145): unsure at all Xaa locations
  Clone ID: MRT4577_40868C.1.pep
GEEKRKGRRGGGRQGTGXIGHPGGDXRKGGCKGALKGQSKGQNGEKAEGKGDRGCPGIYQGGGGEQGRKTRGKRGVKGGLGQSQGGKKGAXEAGKGALQGEGGREKAPPEVVAIVRNSLKVLSLCFGLIFIFNFFLFFFLFFFFF

SEQ ID NO: 304603 - protein, 91 aa, Zea mays
  Clone ID: MRT4577_40869C.1.pep
MAAHLASAFFFAAEPVGEPGVHALDACALCAMPLARDSDIFMYRGFSPFCSEECRYEQMQLDAIRARQPYASGTEARRGPREASKVSAVAT

SEQ ID NO: 304604 - protein, 84 aa, Zea mays
  Clone ID: MRT4577_4086C.1.pep
HAWADSWAEEVMDEVRRLMDKYTGQELIITVVGHRLCAALALLVADEVGTFIPDAPPVAVKCFWGPKVGNAAFVDRLASSGKVN

SEQ ID NO: 304605 - protein, 189 aa, Zea mays
  Clone ID: MRT4577_40870C.1.pep
MSMALALIIKNGNHSVVLPGLSAPSMRAGGIARSPSETACTPSASARPVPDSQPAIYTAPQFASELSSNRPSRPLQSLVLSLHSCSAASSARRAKTKAMAAHLASAFFFAAEPVGEPGVHALDACALCAKPLARDSDIFMYRGDTPFCSEECRYEQMQLDAIRARQPYASGTEARRGHREASKVSAVAT

SEQ ID NO: 304606 - protein, 64 aa, Zea mays
  Clone ID: MRT4577_40871C.1.pep
SVRRFVGYGTGIDIRECAMHSDTLHIRCVACQLAELIIIADSCIDDYVVCSELQIGILLAHLYT

SEQ ID NO: 304607 - protein, 37 aa, Zea mays
  Clone ID: MRT4577_40872C.1.pep
MARRAVALLVGGALATVLLRTGGVAAVPYRAATDAWR

SEQ ID NO: 304608 - protein, 81 aa, Zea mays
  unsure (1)..(81): unsure at all Xaa locations
  Clone ID: MRT4577_40873C.1.pep
XSGNXRWHPNLGQLESGGNSHSSFTVTTCVXASNIFPRTXXQLXNNFKFVPILSSFXKAFNLXEASQXAQXXCNXKPLILP

SEQ ID NO: 304609 - protein, 253 aa, Zea mays
  Clone ID: MRT4577_40874C.1.pep
MPDNTVVVSAETIIQIRRFSSCDVADALIKLHHPNGGYLPDINLQTGAGHDFKLCGPAFTVQMVPASDTESPHLAQHFVDAGEKNTVMVISSPKNSKNAVWGGLMTARAKVRGIKGVVIDGRCRDLAEHRAADYPVFARGHSILGQSTFTRPSRIQVPITIHPAMNAESNLECDPEIKTLEGKQNLRSFPPTTVNPYDIILGDEDGVVVIPHQEIDQVLDICTRNTRVDQQCLEALKAGHNIADTFIQFRGKP

SEQ ID NO: 304610 - protein, 92 aa, Zea mays
  unsure (1)..(92): unsure at all Xaa locations
  Clone ID: MRT4577_40875C.1.pep
SARALSGWFVRMLIVGTLVLPYAASILIGTLGDRDATEGTGPEGKRCMAGLQILGIXCVSCQSTDWESSNRPSGGAXRGQSSEPDVIEAESE

SEQ ID NO: 304611 - protein, 162 aa, Zea mays
  unsure (1)..(162): unsure at all Xaa locations
  Clone ID: MRT4577_40876C.1.pep
PVCTPEGGATPTSLCWLSLGALPLLXMAASATSTHTRGGIYCQPPMWHHLPTXASANFGSPAHLGASVNVGPPVHVGPPVNVXHEPATILLNPPPFHFITKHTHAQANSQIQPCASXQEHAXPCQLQRTCSAGSTPSLSPGRQLLTNDCITAGTPYCWADSQ

SEQ ID NO: 304612 - protein, 73 aa, Zea mays
  Clone ID: MRT4577_40877C.1.pep
THLPGTWPCVCPVPGVMPKDYYNDYWCNHKHFHRHVYWTTFIHTKIHTKMLNQRLWQIERILRTMLHYLYQHL

SEQ ID NO: 304613 - protein, 161 aa, Zea mays
  unsure (1)..(161): unsure at all Xaa locations
  Clone ID: MRT4577_40878C.1.pep
MAQNDQMPEFQQTYTNDLPHDSDKTFERQTTAAHQAAHPHLYPNPNHIHPAFGGAMQPGLWKPVEAHRKFANPAPLGLCAFALTTFVLSCINMHARGQTSPAIAIPVAFXYGGLVQLLAGMXEMAVGNTFGATALXSYGGFWISYGLLQTPHWNVLGADGP

SEQ ID NO: 304614 - protein, 68 aa, Zea mays
  Clone ID: MRT4577_40879C.1.pep
QHKGGQQVYKGSVTCVSAVVASGVGNFGTWASPPGQCQRGGGENTRTMRLHPNDSENDDVHYVKACVF

SEQ ID NO: 304615 - protein, 51 aa, Zea mays
  Clone ID: MRT4577_4087C.1.pep
DGGDLQVHTRSIIKVVPPCRKARSPLRLHGLITSYIYPRWSTGPTRITTFH

SEQ ID NO: 304616 - protein, 184 aa, Zea mays
  Clone ID: MRT4577_40880C.1.pep
MKYSVAFVALAAVAAQAQSLADVPKCAIPCLDKAIASETSCDKTDLACVCKGFSAVRSKATSCVIDECGTDVAINEVLPATENLCKNPPKESEAKSTAEEEKPTTTAAATSTLVVVTTSAEVVETTAAATTTVAPIIPTTAAEEPATSTPAAATPTKGPEQANGAAGLKGLGALAMAAFAALAL

SEQ ID NO: 304617 - protein, 416 aa, Zea mays
  unsure (1)..(416): unsure at all Xaa locations
  Clone ID: MRT4577_40881C.1.pep
MQGNLGVRSRASCGSLRVLLPRQLTARARWLQGSGRTGGSEEDEAAVPYVDVPRPGRKWERKPYVTPMKVLIRRAKEERQARRENPCRVLEHPPDNGLVVPHLVDVARRVHAAREGLLGGLTRLVEGAVPVKRCRFCSEVHVGRVGHEIRTCEGRNSGARNSLHVWRPGTVRDVVGFPYCYHLFDRVGKPRVVHKEKYDVPRLPAVLELCIQAGVDVQRYPTKRRTRPVYSIEGRIVDFEPDVDDDEAARTLXTASVHTIAASSGGCXGEGEEAEITVPELASRTLQSWLDMKSGAAKLMKKYSVHTCGYCPEVQVGPKGHKVRMCRATKHQQRDGQHAWQEATVDDLVPPNYVWHVADPAGEESPLANELKRYYGKAPAVVELCVQAGAPVPVAYRSMMRLDVVPPARDEYDLVA

SEQ ID NO: 304618 - protein, 39 aa, Zea mays
  Clone ID: MRT4577_40882C.1.pep
GEPHKGTDFTEPNSRKLDRAYKAKDLNLSGHHCRRTIPT

SEQ ID NO: 304619 - protein, 98 aa, Zea mays
  Clone ID: MRT4577_40883C.1.pep
KNKPLFLKKKEEGAQGGKHTGQAEENKMHRKRAHYIHIVPQHTEQPIWGTNGAVTDQRNWWEHFRLQQQTISPTKGGPRTPGSTREFRTGPWRRTNFP

SEQ ID NO: 304620 - protein, 162 aa, Zea mays
  Clone ID: MRT4577_40884C.1.pep
MSLIRRGSAFDPFSLDLWDPFQGFPFGSGSSSSSSLFPSFGGTTTSSETAAFAGARVDWKETPEAHVFKTDVPGLKKEEVKVELEDGNVLQISGERSKEQEEKTDTWHRVERSSGKFLRRFRLPENARTEQISASMENGVLTVTVPKEEAKKADVKSIQISG

SEQ ID NO: 304621 - protein, 127 aa, Zea mays
  unsure (1)..(127): unsure at all Xaa locations
  Clone ID: MRT4577_40885C.1.pep
MSLIRRSNVFDPFSLDLWDPFEGFPFGSGSSSSLFPSFPRTSSETAAFAGARIDWKETPEAHVFKADVPGXWHRVERSSGRFLRRFRLPENAKTEQITAAMENGVLTVTVPKEDAKKPEVKSIQISG

SEQ ID NO: 304622 - protein, 82 aa, Zea mays
  Clone ID: MRT4577_40886C.1.pep
MTVQQWRRCRRCGYILCKIKSIVAKLDTRYLPVTIRGKLKRVKQLIPSSLCTSTFSSRCSSGRREMVVELRHRCCRIDLHIC

SEQ ID NO: 304623 - protein, 60 aa, Zea mays
  unsure (1)..(60): unsure at all Xaa locations
  Clone ID: MRT4577_40887C.1.pep
DTWHRVERSSGSFLRRFXRLPENAXKTEQIRAAMENGVLTVTVPKENVKKPEVKSIQISG

SEQ ID NO: 304624 - protein, 203 aa, Zea mays
  Clone ID: MRT4577_40888C.1.pep
EGPGREKKKKKKKKKKKKTQSIHSNLFPKSSIRFSLTGRLEPNLTLSLIRRSNVFDPFSLDLWDPFEGFPFGSGSSSSLFPSFPRTSSETAAFAGARIDWKETPEAHVFKADVPGLKKEEVKVEVEDGNVLQISGERNKEQEEKTDTWHRVERSSGRFLRRFRLPENAKTEQIRAAMENGVLTVTVPKEDAKKPEVKSIQISG

SEQ ID NO: 304625 - protein, 44 aa, Zea mays
  Clone ID: MRT4577_40889C.1.pep
SLTFLAPSIYYLSSLCALIVVFCFVTSNNECISSSSYLSFFFHY

SEQ ID NO: 304626 - protein, 194 aa, Zea mays
  unsure (1)..(194): unsure at all Xaa locations
  Clone ID: MRT4577_4088C.1.pep
DARGATAFSRSPARRCTSAADAALAFEQRTVPAPAPAARETRPGPSPAXAGCLLRAGTWTPATSRAPAGPAPRPLLVSPAPAGPAPTPPRTPGPAGTETPTRQAPGMVPVISLSCRPGRVGPVTSRAPAVLLLPPREAGAAKAPTRRAVAPATSPAPAVLLTPPREAGAKTPTRRPLAPATLPAPAAHRTPVPT

SEQ ID NO: 304627 - protein, 158 aa, Zea mays
  Clone ID: MRT4577_40890C.1.pep
MSLIRRSNVFDPFSLDLWDPFEGFPFGSGNSSSLFPSFPRTSSETAAFAGARIDWKETPEAHVFKADVPGLKKEEVKVEVEDGNVLQISGERNKEQEEKTDTWHRVERSSGRFLRRFRLPENAKTEQITAAMENGVLTVTVPKEDAKKPEVKSIQISG

SEQ ID NO: 304628 - protein, 105 aa, Zea mays
  Clone ID: MRT4577_40891C.1.pep
IWFTPIRTWKLKMLHQSFTCRKVNEIDQDMMYSWNMSDNIFDKICKQLKDYKDIPCRKAQITLKYCKELPHPRLLSHTFQRIACQGRTCPRTSDLDYKVRSLGPW

SEQ ID NO: 304629 - protein, 44 aa, Zea mays
  Clone ID: MRT4577_40892C.1.pep
PKLTKGLCTWLWTPVFNGETVNHTLRLQLTMTTTNNSLLSYIRP

SEQ ID NO: 304630 - protein, 158 aa, Zea mays
  Clone ID: MRT4577_40893C.1.pep
MSLIRRSNVFDPFSLDLWDPFEGFPFGSGSSSSLFPSFPRTSSETAAFAGARIDWKETPEAHVFKADVPGLKKEEVKVEVEDGNVLQISGERNKEQEEKTDTWHRVERSSGRFLRRFRLPENAKTEQIRAAMENGVLTVTVPKEDAKKPEVKSIQISG

SEQ ID NO: 304631 - protein, 78 aa, Zea mays
  Clone ID: MRT4577_40894C.1.pep
PREGKNPSFWIRYQGRRKRGNHPGFWFPFPPGPWLFGPPLGDGPSRKGPFRKPGFLRAFYPKAVGWAFLTAAKFGGKG

SEQ ID NO: 304632 - protein, 158 aa, Zea mays
  Clone ID: MRT4577_40895C.1.pep
MSLIRRSNVFDPFSLDLWDPFEGFPFGSGSSSSLFPSFPRTSSETAAFAGARIDWKETPEAHVFKADVPGLKKEEVKVEVEDGNVLQISGERSKEQEEKTDTWHRVERSSGKFLRRFRLPENARTEQISASMENGVLTVTVPKEEAKKADVKSIQISG

SEQ ID NO: 304633 - protein, 158 aa, Zea mays
  Clone ID: MRT4577_40896C.1.pep
MSLIRRSNVFDPFSLDLWDPFEGFPFGSGNSSSLFHSFPRTSSETAAFAGARIDWKETPEAHVFKADVPGLKKEEVKVEVEDGNVLQISGERNKEQEEKTDTWHRVERSSGRFLRRFRLPENAKTEQITAAMENGVLTVTVPKEDAKKPEVKSIQISG

SEQ ID NO: 304634 - protein, 158 aa, Zea mays
  Clone ID: MRT4577_40897C.1.pep
MSLIRRSNVFDPFSLDLWDPFEGFPFGSGSSSSLFPSFPRTSSETAAFAGARIDWKETPEAHVFKADVPGLKKEEVKVEVEDGNVLQISGERNKEQEEKTDTWHRVERSSGRFLRRFRLPENAKTEQITAAMENGVLTVTVPKEDAKKPEVKSIQISG

SEQ ID NO: 304635 - protein, 84 aa, Zea mays
  Clone ID: MRT4577_40898C.1.pep
TICPLQKGLLIPALDNSWNWCFLVPPFRDATRRRYTWVVLALLYDKSASFYSVSILPSFVPLALNYFISQPFTHYPGSKPGFHV

SEQ ID NO: 304636 - protein, 84 aa, Zea mays
  Clone ID: MRT4577_40899C.1.pep
SEHILLAYGRQHSSLLRTILINGETRVPVYTVLEVYRVSDMELVRVLPSVGEEVNVACFHPSPGSGLVYGTKVSSKLRSATKME

SEQ ID NO: 304637 - protein, 174 aa, Zea mays
  Clone ID: MRT4577_4089C.1.pep
MKCDPGEFWCHVSEIALHDRKPAPSLPLASNVGIAREMSQVPKKAIPLFPKADDDKSKESKCDVEKPAATESSKPKVSLEETKDPEKHEVDVGGTDDDESDEDFVDSEEGESDDDESTKSKNRPSSLTLEDTSREKGKDHNTVCGQKKPAEKCYIRSQTCIAHSSFPWHWNLNL

SEQ ID NO: 304638 - protein, 932 aa, Zea mays
  unsure (1)..(932): unsure at all Xaa locations
  Clone ID: MRT4577_408C.1.pep
MTSHGSSEGGNTHSHTDGLAREGFPHILLEVLQGAGYTTPPQYTVQLFEKHRVPRCRPGWRSLDSESFGYRTEDTIEAIALHGLTTFCGFHPLELSTHPIGLFPTEKEDDPKWKDRVEHAKDVWALYPGQTAHLTVRCMNALYLYRLQVMRGEAMSQLMASLEATKITLDNREELVVDLSTEMVEKDLQLRVVESKFPLLNGVCSDVAKVRFATQQLRGPAWTWWDHFLAMQPIDHVVEWGKFKATFRGHHIPTGIMDRKLNEFLALTQGNRIVLQYAQAFNDLCQYAGYHADTDEKKRGKFRRGLSTKLHDRLNAVRANSYNELVNLAISQEDCITSRQAEKKRKTPMEGPSVQPHRFRIASDTQNRGPQQQNQQRQGQNSNQNQGKRQKVQVRQGRLNFTTMADIPEGAPVLTARAIEIHSPLDGEITLYLPDQGCTRSCAFTMIESPVERIPVVCEYPDVFPDELPGMPPDRNIEFAIELQPGTAPISKRPYRMPPAELAELKKQLQELLDKGFIRPSTSPWGCPALFVKKKEESLRLCVDYCPLNAVTIKNKYLLPRINVLFDQLVGAKVFSKIDLRSGYHQIKIRASDIPKIAFSTRYGLYEYLVMSFGQTNAPAYFMYLMNSMFMPELDKFVVVFIDDILXYSKNEDEHTEHLHIVLQRLHDHRLYAKLSKXDGILVDPEKVQEVMNWKPPTTVRQIQSFLGLAGYYRRFIPDFSRIAKPMTELLKKGVKYEWSQKCEEAFHALRQHLTTTPVLAQPDNTKPFEVYCDASGTGLGCVLMQDNRVIAYASRALRPHEQNYPTHDLELAAVVHALKIWRHYLMGAYCNIYTDHKSLKYIFTQADLNMRQRRWLELIKDYDLEVHYHPGKANVVADALSRKAQCNCVSIDSKIATLCDELCKLNIEVVSSGALSYILVEPTLHEQIVMA

SEQ ID NO: 304639 - protein, 124 aa, Zea mays
  Clone ID: MRT4577_40900C.1.pep
FPRFPQRKQVDRGPPGGSWSGGPGLFSRRPPGRSSPPIMGSPFLFSVPAPLLAIYCSCLFLGFPSAPKAVWVECPASTYVRFQVPLWRPAARVFVLEQSPLVRCPSIIIVFGAGVFYGLVNPAP

SEQ ID NO: 304640 - protein, 48 aa, Zea mays
  Clone ID: MRT4577_40901C.1.pep
WILPRPFHVQAVKFFFPRHFLHSNNLICRWHMFLALLVSSICSSFHLH

SEQ ID NO: 304641 - protein, 89 aa, Zea mays
  Clone ID: MRT4577_40902C.1.pep
MACMTWQCNVGLVCLNFTFLSETGFGFCPTRFQLSHVVQNYRCPICSQTSLLGCWYTYYQWSVSFVWNDFLLVNNCKQYIIHVTCAGVG

SEQ ID NO: 304642 - protein, 84 aa, Zea mays
  Clone ID: MRT4577_40903C.1.pep
IEGVTFGVTKPGRCGSVDHSVHWICTPHSRQSTNSRLNRETAYQTQVLEPKAACKQVISKSFLKNPSLNRHYVVLPEFVQTRPF

SEQ ID NO: 304643 - protein, 125 aa, Zea mays
  Clone ID: MRT4577_40904C.1.pep
QKPGTLQKGTGLFTFKKRARRWAPPGGSKVPKPGEFFRRGGNISPKTPRTWFRKTRGRKKFWAPTMGSTGAPPNRPKKVLLKGGGPPPRKPQRIFCFPQVGPKPGGPLRKVNFRNFGNRLGGDFF

SEQ ID NO: 304644 - protein, 47 aa, Zea mays
  Clone ID: MRT4577_40905C.1.pep
LLVRSRQEIGAGDQGHMFGVIHNLSLGAIPMSHVLSTKLGARLTEVR

SEQ ID NO: 304645 - protein, 65 aa, Zea mays
  Clone ID: MRT4577_40906C.1.pep
CFISLDDVIEIARTMRHRCMAIELAGTVMEILCTCFSFFCTCVGMYPMDLHHEIDDSLVVFPFVN

SEQ ID NO: 304646 - protein, 109 aa, Zea mays
  Clone ID: MRT4577_40907C.1.pep
KQNPGQKYDKGGSGPPNWAVLEDLPEIKTPSRKGACPPNKCNLTSGRHIDGGAYICVYINELEVMHTLNILPSPKLTTAFPTKLGKKTPSLPLQKGGSPELKKKTLPPG

SEQ ID NO: 304647 - protein, 100 aa, Zea mays
  Clone ID: MRT4577_40908C.1.pep
TPLNLLRLFIPSDPRSPYRFLVLSLHFFPSPPLSLSLLSSPLSHHGLRWLQRSGGHRQLRQQQMQPIQEEIQRRRRHPAIVPCAPAIPRQCVRRRRRSCK

SEQ ID NO: 304648 - protein, 877 aa, Zea mays
  Clone ID: MRT4577_40909C.1.pep
YDCPLGSINTSKGKGKAVLKLSLDEPKGPHTRNAARRKATSEKDVELKPSHGHITSEDEDLDASPVEIDDALILDDDDEDVPDDEDDDHEAVLRGSLPSCVPERVHDVKLGDADDSSVASLANDNQAQPSSGSSTKNTSSRGLDTAEFRSPATFGSRGAMSFAAAAMAGLTPVGGRGIRGSRDRNGLPLGARATEHYNKLIFTAAGKQLNKHLTVYQAVQRQVVHAEDDEDRFGGSDLPDDGNHFWDDIRGDVFTITYQKADNTAEKGSVGGSASVPKSSKSDSCRTLSEKQCTSLLDSILQGELPCDLEKSNQTYNILSLLHVLEGLNQLSPRLRLQSACDDFAEGKVATLNGLYDVGAKVPSKEFINSKMTPKLARQIQDVLALCSGSLPSWCYQLTKACPFLFPFETRRQYFYSTAFGLSRALHRLQQQPGNDNNTAFEREVRIGRLQRQKVRVSRNRILDSAAKVMEMFSNQKAVLEVEYFGEVGTGLGPTLEFYTLLSRELQRVDLGLWRSHSSDNSGMQIDANADDLIRSKNHESESLTESRNIVQSPLGLFPQPWPPTAAASEGSKFFKVVEYFRLVGRVMAKALQDGRLLDLPLSTAFYKLLLGQELDLYDILSFDTEFGKTLQELQILVARKQFLDSCSSESQKIDLCFRGAPVEDLYLDFTLPGYPEYVLKEGGENAEVNICNLEEYISLVVDATVKTGIMRQVEAFKAGFNQVFDISSLQIFSPQELDYLICGRCELWEPETLPEHIKFDHGYTSKSPAIINFLEIMAEFTPEQQHAFCQFVTGAPRLPPGGLAALNPKLTIVRKHSSVANNNSNATGATESADDDLPSVMTCANYLKLPPYSTKAIMLKKLLYAINEGQGSFDLS

SEQ ID NO: 304649 - protein, 200 aa, Zea mays
  unsure (1)..(200): unsure at all Xaa locations
  Clone ID: MRT4577_40910C.1.pep
MDLVAGAVGSIIRKLGELLLAEYQLQACLPEEIESLKNELESAHVALRTVAEVPPEHLDQQVQLWAREVREASYDMEDILDTFLVNDAPAEKKDGLGKRRRLGRRLLDNIAGAMEKMRKLFKKSKECHTIAGAIEKMKERLREVADRRDRYRRSGXAAPAPAXTLDPRLAYMHREAAQLVGMDRSKAEVMAMLLPXAVVP

SEQ ID NO: 304650 - protein, 108 aa, Zea mays
  Clone ID: MRT4577_40911C.1.pep
RTPCMALGEFSRGRYTRRINPWAPGVVGVEAARSGALSQGIRCQQPSQVHGAAPANLARTSAVRSGFRGDGGDQRQGHVRPRSRQFCCVRFGGRMDRGRGNQIHHWIC

SEQ ID NO: 304651 - protein, 54 aa, Zea mays
  Clone ID: MRT4577_40912C.1.pep
GHNGQLSKTHGTANTRYNYPSIKTYIVLKTSTQDVRSSYILILIDSLLFFASMR

SEQ ID NO: 304652 - protein, 44 aa, Zea mays
  Clone ID: MRT4577_40913C.1.pep
SSLLQTENIHRVIDMYTGIMGIKSASKLNIANYFFWILGINLIR

SEQ ID NO: 304653 - protein, 342 aa, Zea mays
  Clone ID: MRT4577_40914C.1.pep
MWFGGGPIDAAGALRGFVREAGGCAVVDGGLGTELEAHGADLHDALWSAKCLASAPHLIRKVHLDYLEAGADVIISASYQATIEGFQSRGFSRDESEELLRRSVHVAQEARRVFAAEGDRSSRRGRPPALVAASVGSYGAYRADGSEYSGDYGKSMTKEDLKNFHRRRLQVLAGAGPDLIAFETIPNKLEAQVYAELLEENGIRIPAWFSFTSKDGVNAASGDPINECAAVADSCPGVAAVGVNCTAPRFIHGLILSIKKVTSKPIVVYPNSGETYVAETNEWVDSDGATGTDDFVSRVGEWRRAGAALIGGCCRTSPATVRAIARAVREAEYDDIPAVAVL

SEQ ID NO: 304654 - protein, 76 aa, Zea mays
  unsure (1)..(76): unsure at all Xaa locations
  Clone ID: MRT4577_40915C.1.pep
GKRSAXPRNRGCPLPXXPLEGEHGGLXTQPPQPRAVGVAGPVVAPQERFPPRVGAHPHPXAAPPAPHATRAWTAGG

SEQ ID NO: 304655 - protein, 69 aa, Zea mays
  Clone ID: MRT4577_40916C.1.pep
LCGGSTGFFVNGYCLVYYYGRSDMFGFKQTFFFFGYMACICYAFFFKLGKGGFRAPLFFVPPIYKSIKC

SEQ ID NO: 304656 - protein, 53 aa, Zea mays
  unsure (1)..(53): unsure at all Xaa locations
  Clone ID: MRT4577_40917C.1.pep
KKKKIKKIYYKKKKKKXKKARKKKKKKKKKIKKKKIKKKQQKKRAVPKHFTQL

SEQ ID NO: 304657 - protein, 82 aa, Zea mays
  unsure (1)..(82): unsure at all Xaa locations
  Clone ID: MRT4577_40918C.1.pep
MSASRFIMCTTGGARAGGKTCVLVSYASNTFPNEYIKNVFDNLNDNVVVAXSTAHFPLWDTXGKKIXNRLTAVNYEGDDPFL

SEQ ID NO: 304658 - protein, 77 aa, Zea mays
  Clone ID: MRT4577_40919C.1.pep
LLFLFLTIFPSFTPYPTGGAYTPTHLICSPLKAKVTILTSRSPSFSPGFSPRLISRILMLALSAPGTTTLLYMLKLA

SEQ ID NO: 304659 - protein, 70 aa, Zea mays
  Clone ID: MRT4577_4091C.1.pep
TCLQSDGSSVSFCATEGWGSISSQDGSPVKSRLRCAANATCSACYSARGGVQLAWDVSPTSHGQLGVGKT

SEQ ID NO: 304660 - protein, 78 aa, Zea mays
  Clone ID: MRT4577_40920C.1.pep
SLGRSSSRVGIKGVDVDAGRCARYSKHGLLAVDNYTGLWYGELHSFSKVRCCFHPRPVWFLICSGCVICGACGIPKTY

SEQ ID NO: 304661 - protein, 487 aa, Zea mays
  Clone ID: MRT4577_40921C.1.pep
GRVVAQKMTTTALRHLRQIAQETSGEVVYALGRQPAVLRTFSQRLSRGFNDAISGFNDDGWSVMCGDGMEDVIIACNSKKIRSSSNPATGFGAPGPGGIICAKASMLLQSVPPAVLVRFLREHRSEWADYNFDAYSASALKTSPCSLPGLRPMRFSGSQIIMPLAHTVENEEILEVVRLEGQTLTHDEGLLSRDIHLLQLCTGMDEKSMGSCFQLVFAPIDELFPDDAPLVSSGFRVIPLDIKTDGPPSGRTLDLASSLEVGATTQQVAGDGSQDVCNLRSVLTIAFQFPYETHLQDTVAAMARQYVRSIVSAVQRVSMAISPSHSGLNTAGQKLISGSPEAATLVRWICQSYRYHLGVDLVSHSDQAGESLLTMFWDHQDAVLCCSFKEKPVFTFGNQMGVDMLETTLVALQDLTLDKIFDEPGRKALHAEVPKLMEQGYAYLPAGVCLSGMGRHVSYEQAVAWKVLGEDGNVHCLAFCFVNWSFV

SEQ ID NO: 304662 - protein, 165 aa, Zea mays
  unsure (1)..(165): unsure at all Xaa locations
  Clone ID: MRT4577_40922C.1.pep
PGSPRGPCPALLATDVAXTPAPLVDAAPEAPANTPAAPAAGANXGQANKARPKIAPPAQALIQEVSEAITSLXEDGGQLXFAIAKIGXDNHKDKLTINLRKLMEXVHLKKLXISVRKLTMVKIPYNLSVDVTKQDSNLNALTIKPRTRTKKPKAAAXKTKAKTHY

SEQ ID NO: 304663 - protein, 122 aa, Zea mays
  Clone ID: MRT4577_40923C.1.pep
TSPSAACRRWWAPSSLSLAASLALAAAVQLRVGAYWRAAARLRRDRGDARALARAVQELRLKGAAFDLSKEPQYGVTRAKCASVEGAGLWAPLRWFRQNVVTACLLAVAAAALPSGKFILCA

SEQ ID NO: 304664 - protein, 48 aa, Zea mays
  Clone ID: MRT4577_40924C.1.pep
MSFMPEFLCISYQFIEDSCEQLAYENRMLERFDKKLTINLHWIQTLVR

SEQ ID NO: 304665 - protein, 64 aa, Zea mays
  Clone ID: MRT4577_40925C.1.pep
LYIPSTSNTPGGFMKKQGVTNTNREHMGPNEYLFPLCALVIQDCHTISINRPSGLWTNVDILCT

SEQ ID NO: 304666 - protein, 1233 aa, Zea mays
  unsure (1)..(1233): unsure at all Xaa locations
  Clone ID: MRT4577_40926C.1.pep
MVVDPPPPPPLTHQEDTVAALTAARAEHAARQARLREAALAWERERAAADAIAAQIAAAEQHLASPAAHDGGATSANTMGDVYGVSTVPTVGTGPRTIPAVLWHDPADPLVAQLHLQAGSVQNIRLMVPVVLESESPSYTRWRDLLLLTLRRYALDDHVLCDPIGVAPTAAWVRLDSIVLTWIVGTISVDLHSLLRNLPHARAVWLAIESQFMGNAEARALRLDAAFRTFVQGDLSVSAYCRQMKTMADSLGDLGCPVEDRILVLNVLRGLGDRYTHLRSLLMRQRPFPTFLQVRDDLALEEITLGAQAASISGPGSSSSSTALAAFTPTRPPTPSQSALGPRPLGPSMGGGGRGGGGGGGGGRRRRGGRGGGGGVRGHASTPGPQQSAPWPTFHHPWSGRISMWPFQGPGSEARPPAAMFAGAQPGFAFASPSPWTSTPAVSSWPTPPASPPSGLVGWDAAALAAFQTPTLTPPMGPEWIADTGATYHTTPDPGYKYYLVVLDDFSHYVWTFPLRAKSETFPALRHFFAWVSTQFGLTIKAVQCDNGREFDNSTSRDFFLSHGMQLRMSCPYTSSQNGKAERMIRTTNDTIRTLLLQAHLPARFWAEALHTSTYLLNRLPSTACPAPTPHQALFGTPPRYDHLRVFGCACYPNTAATAPHKLAPRSTLCVFLGYSPDHKGYRCFDLCSRRVLISRHVVFDESVFPYSSTTTPPYSDPDLDLFTLFQTDAVVEPPLLPLSAGTRSPPVGPTPGPVPCSXGGVASPRSPVSXAPGPSEGGGTAPPPGPSVTTPPAXSPSRCGXPAPAAATGVRTSTVAAPAAVTAGGPVPXGTPTPPPRPPAARVATPVYHPPLLHRDPRHVHPMVTRHAAGTPPPRVLAATTADSQVSPVPSSVRTALLDPHWRQAMEEEYAALVANQTWDLVPRPPGTNVVTGKWIWTHKRRADGTLDRYKARWVLRGFTQRPGVDYDETFSPVVKPATVRTVLSLALARSWPVHQLDVKNAFLHGALTETVYCCQPAGFVDSSRPDMVCRLNRSLYGLKQAPRAWHSRLATFLVTLGFVEAKSDTSLFVHHHGAETAYLLLYVDDIVLTASSPSLLRRFVDALQREFPVKDLGVLHHFLGVTAEPRPSGLLLHQRQYTLDILERAQMSDCKPCSTPVDTQAKLSEATGDPVADPTGYRSLAGALQYLTFTRPDISYAVQQVCLHMHDPREPHLAALKRLTPINGSQNSTHK

SEQ ID NO: 304667 - protein, 97 aa, Zea mays
  unsure (1)..(97): unsure at all Xaa locations
  Clone ID: MRT4577_40927C.1.pep
FPFLKTQFRVIFFXPINSPKWLHKQVQFFVVPSLKPTRSTQGSNAWGGFALKAKSQPEMALQNKGLCLVPVSCPPQVYRDNTGPDFWTPPYKTSFSP

SEQ ID NO: 304668 - protein, 376 aa, Zea mays
  unsure (1)..(376): unsure at all Xaa locations
  Clone ID: MRT4577_40928C.1.pep
MANPPKTEFFWRHMVTLERYKARWVLRGFTQRPGVDYDETFSPVVKLATVRTXHQLDVKNAFVHDALIETVYCCQPAGFVDSSRPDMVCRLNRSLYXYGLKQAPRVWHSRLATFLVTLGFVEAKSDTSLFVHLHGAETTYLLLYVDDIVLTTSSQSLLRRLIDALQREFPVKDLDVLHHFLGVTAEPRPSGLLHQRKYTLDIMERAKMIDCKPCSTPVDTQAKLSEVEGDPVDDPTRYMSLAGALQYLTFTRPNISNTVQQVCLHMHDTREPHLAALKRLLRYLRGTVDYRLLLHRSTASELVVYTDADWAGCTDTRRSTSGYAVFLGGNLVSWSSKCQPVVSRSSAKAEYRAVANGVAXTVWLCQLLTELHSPLS

SEQ ID NO: 304669 - protein, 289 aa, Zea mays
  unsure (1)..(289): unsure at all Xaa locations
  Clone ID: MRT4577_40929C.1.pep
MEEYAALVANQTWDLVPRPPGANVVTGKWIWTHKXGGPMVPWSGHXLNVKNAFLHAXLTETVYCCQAAGFVDSSRPDMVCRLNRSFYGLKQAPRAWHSRLASFLVTLDFVEAKSDTSLFIHHHGAETAYLLLYVDDIVLTASSQSLLXRLIDALQREFPIKDLGVLHHFLGVTAEPHPSRLLLHQRQRQPGVLVVEAPAXVVSRSSAEVEYRAVANGVAEAAWLRQLLAELHSTLSRSTLVYCDNVSAVYLSTNPVQHQRTKHVEIDLHFVRDRVAVGDVRVLHVPTTS

SEQ ID NO: 304670 - protein, 533 aa, Zea mays
  Clone ID: MRT4577_4092C.1.pep
MTRRGESGGPVPARNRVPEQAAAALIEKRGREQSAAGQEVRDDSEGRGTRDASGAESGVGGVGFSGGNRYATPELQDDTEKGMKRQNESADAARKERRGEAAEQPRYDHDRRQELAPKSSAQPAAAQLAREDEAATAGEKAPSPSRHEVQEEHLRPLRKKILKTVDELKGDLSELFSKSPELNAPRARPPRLPRQEGYVSHAVAGPASGLPASARHVTSSAEGHRGSVARAAKPRPAAAPPRGLPSRRYRQCRAHPCCHDVDPRPCHHGHGCCGHHGKPECSSCRGYCCRPRALEPSAPRKPTAAKEPKRRLPPRNHCRPVLKGAPFIVCSSCFKLVQVPADFAVSTKTVRKMRCGSCSTILSYSYRDPARKKAYQDSVNRCSTDGSELHGGTGDQRSDPFAPFIDGFGLSSYSTEDERRLPVSRNTSFDTLDGTKGVGRLHRLMGYGSASELLRHSPDLYESFSERTTPDVRQHDTKGKGVCIDDDDYDYDLDDTDDEDIGALKRSARKGSGWTLPWIPGKRQGDSGAIRIK

SEQ ID NO: 304671 - protein, 127 aa, Zea mays
  Clone ID: MRT4577_40930C.1.pep
CLPLTMQDARGRDPSACQVCRPGLASIRLHAPMRAARGREISRHTLPSNPTCLYRNTPFAPTAAARHVAVCQSQRRDTICQREGARLYLALMQGHHIRIADHSLHYDESRIFESAVRLYHSIQNLRR

SEQ ID NO: 304672 - protein, 1367 aa, Zea mays
  unsure (1)..(1367): unsure at all Xaa locations
  Clone ID: MRT4577_40931C.1.pep
MGNAEARALRLDAAFRTFVQGDLSVSAYCRKMKTMADSLGDLGCPVEDRILVLNVLRGLGDRYTHLRSLIMRQRPFPTFLQVRDDLALEEITLGAQAASISGTGSSSSSTALAAFTPTRPPTPSQSALGPRPPGPSMGGGGRGGRGGGGGGRRRRGGRGGGSGGGARGHAPTPGPQQGAPWPTFHHPWSGRISMWPFQGPGSEARPPAAMFAGAQPGFAFASPSPWTSTPAASSWPTPPATPPSGLVGWDAATLAAFQTPTLTPPMGPEWIADTGATYHTTPDPGILTSVRPPSSSLPSSIMVANGSCLPVTSVGAAGPPGSFRVPDVLVAPSLVHNLLSIRRFTADNSCSVEFDSFGLTVKDSATRRPLLRCDSTGPLYTLRLPYATSSLSSSPDTAAVFAAATSSTTWHRRLGHPGRDALMQLTRSATIPCTRSHDEHLCHACQLGRHVHLPFSSSSSHATHAFDLVHCDLWTSPITSMSGYKYYLVVLDDFSHYVWTFPLRAKSETFPALRHFFAWVSTQFGLTIKAVQCDNGREFDNSTSRDFFLSHGMQLRMSCPYTSSQNGKAERMIRTTNDTIRTLLLQAHLPARFWAEALHTSTYLLNRLPSTACPAPTPHQALFGTPPRYDHLRVFGCACYPNTAATAPHKLAPRSTLCVFLGYSPDHKGYRCFDLSSRRVLISRHVVFDESVFPYSTTTTPPSSDPDLDLFTLFPTDAVVEPPLLPLSAGTRSPPVGPTPGPVPCSXGGVASPRSPVSXAPGPSEGGGTAPPPGPSVTTPPAXSPSRCGXPAPAAATGVRTSTVAAPAAVTAGGPVPXGTPTPPPRPPAARVATPVYHPPLLHRDPRHVHPMVTRHAAGTPPPRVLAATTADSQVSPVPSSVRTALLDPHWRQAMEEEYAALVANQTWDLVPRPPGTNVVTGKWIWTHKRRADGTLDRYKARWVLRGFTQRPGVDYDETFSPVVKPATVRTVLSLALARSWPVHQLDVKNAFLHGALTETVYCCQPAGFVDSSRPDMVCRLNRSLYGLKQAPRAWHSRLATFLVTLGFVEAKSDTSLFVHHHGAETAYLLLYVDDIVLTASSPSLLRRFVDALQREFPVKDLGVLHHFLGVTAEPRPSGLLLHQRQYTLDILERAQMSDCKPCSTPVDTQAKLSEATGDPVADPTGYRSLAGALQYLTFTRPDISYAVQQSRPLRAGSTLEVSLVEIPKIIKKDASTSCFDLNNDSNHCNQVLVKNVIIETCSDDIAMEIEQLKQEVAHLGKYLYDKKSKAKQTQPPQDNTTMGVNKPMKGETVICRLCLKEDHKSFQCKASTEDKQKTTSKISNTYIKRVDKKVATLYLIKKKKNGKVIAIKANKQANKGKGAKRI

SEQ ID NO: 304673 - protein, 108 aa, Zea mays
  unsure (1)..(108): unsure at all Xaa locations
  Clone ID: MRT4577_40932C.1.pep
PLIPLSIPPDMFKIIMGRALTPTPINIVLAPKFKGPFIELFHLLIPKPIKFLPFRKAFYRQNLPNLTNFFATAWDFLIVIFFQAFLFGLPGGSKIALVHQGXFPINLF

SEQ ID NO: 304674 - protein, 68 aa, Zea mays
  Clone ID: MRT4577_40933C.1.pep
VCLLSRVCLVCPVLCALVFAVPRFPGAGGSARLLLCWSCCCPRSSPRSAVSAPGSYRSRGSSRVFRSG

SEQ ID NO: 304675 - protein, 114 aa, Zea mays
  unsure (1)..(114): unsure at all Xaa locations
  Clone ID: MRT4577_40934C.1.pep
MCLGFEASPLPSPSPPSSAMPGSATDTVQPRAACMTAPSCRKRWRHAQGATDGCDGFVLTTDDWDVHRGTFLAWMVSSHGNGSSLVLLNTRPGPAADSAXLAEHLKLHLGQVSL

SEQ ID NO: 304676 - protein, 221 aa, Zea mays
  unsure (1)..(221): unsure at all Xaa locations
  Clone ID: MRT4577_40935C.1.pep
KKKKIKYKKKKKKKKXKKKKKKKKKITKKKTKKKKNIKKKNKKKKKTKKKKKKKKXKKRKKKKKKKEKKKKQKKKKKKKKKKKIKKQIKNKKKKKKNKKKYKKKKKKKKKKKKKKKKKKKKIKKXKKNKKKKKKKKKXKIKKKKKKKKKKKXKKKKKKKLKKKKKKKKKKKKKKTKKKKKNKKKKKKKKKKKKKKKKXKINKKNKKXKKKNKRSRNKKKKL

SEQ ID NO: 304677 - protein, 96 aa, Zea mays
  Clone ID: MRT4577_40936C.1.pep
FGTRAHFFCPSSPSDTTEAYHGSSLRDVAHTSLCLCRSQTTGMAGRSSSPWVRVSTRGDSRLGAGGGQERSITNEIYPHNSEGQICPEPTPNLRIL

SEQ ID NO: 304678 - protein, 42 aa, Zea mays
  Clone ID: MRT4577_40937C.1.pep
VYHSNIRPSESVELGQHRPCIRHLRVPTGHQIRWIPDSNRSW

SEQ ID NO: 304679 - protein, 62 aa, Zea mays
  Clone ID: MRT4577_40938C.1.pep
RGLHLVKEHGLGHDVIMTENRDSSAPKVPTSEHAKLCDQNFCIGADVNMFTMSGDDDGEDTM

SEQ ID NO: 304680 - protein, 63 aa, Zea mays
  Clone ID: MRT4577_40939C.1.pep
LGDDGLDLSQTRHSILHAPYPAVPVLDLWGCETARVSSHTFIAQQVVGNNVAMNSPKVGVHEV

SEQ ID NO: 304681 - protein, 71 aa, Zea mays
  Clone ID: MRT4577_4093C.1.pep
TNQTTRMPVPMSSTTQQTSSTTAETAQNVENPSTQSVASATQTQKTEEEKEAERRYEEAIEEEYAKREGGA

SEQ ID NO: 304682 - protein, 89 aa, Zea mays
  Clone ID: MRT4577_40940C.1.pep
AYTLQSGELDTMKALIGYPYSPGAYCERCLYIKLLARDARLHGYMYRLLSYAALALSDDRLEVGNLRLPNLYTAAKPWPAAHILMGLEG

SEQ ID NO: 304683 - protein, 84 aa, Zea mays
  unsure (1)..(84): unsure at all Xaa locations
  Clone ID: MRT4577_40941C.1.pep
HPAPQEPQSPEAERDTGGQAPARVRTSQSAADDTRRRAEGPRTSSRRSRXQREGHLGLQHGPPLQQRAQLEDTREGHLGLQHGP

SEQ ID NO: 304684 - protein, 98 aa, Zea mays
  Clone ID: MRT4577_40942C.1.pep
QGVVHVKIKTPDRYETSCDRLKGGTSPKLPLSQERLHVEMKAPDRYGAVRVSETRSRISNLTNIIYGIVPQIISPSARHHFEFLHHNLYHYLKCKCNS

SEQ ID NO: 304685 - protein, 90 aa, Zea mays
  unsure (1)..(90): unsure at all Xaa locations
  Clone ID: MRT4577_40943C.1.pep
KVWGFGFQKPVVGEFPRXNINPTVFAPEFIASNMTPDLGEELKKKILSTIPLGPYGRPKVVPGLVEFLAPSPVASYIPGQVPPLDGGMVM

SEQ ID NO: 304686 - protein, 201 aa, Zea mays
  Clone ID: MRT4577_40944C.1.pep
AAWAAASGRGGGFGGNVGLCSAPLPPCKDEAPQPNASAAGDCPPASAMVASSPSGKPAGAEAAGGVKGKMSRAAVVAIVAGDFAVVGLVAGLLFCYFWPRLSGRRSARRLQQGEKIVYSSSPYGAAGVVAAAAGGATFERGKMVFLEDLSCSDGRTRRFELEELLRASAEMLGKGGCGTAYKAVLDDGTVVTVKRLRDAAT

SEQ ID NO: 304687 - protein, 174 aa, Zea mays
  Clone ID: MRT4577_40945C.1.pep
AEETWGCDGRCRIHTYGGPLLARTSISLQHQMGRRHTRASTPAQKHYGFTKRAAALTTTVDTAAHRDAVGETYPPSTRPPPHVEGVDANGPHEHLRASPPAAPSHRITVPPRRAWVPLLAVIDKVAASRSDCRVTRASLRLRASASARAPLRIAVGNNAGEPPGKREGGLATGN

SEQ ID NO: 304688 - protein, 73 aa, Zea mays
  Clone ID: MRT4577_40946C.1.pep
FFFFFFLKHLGGVNSSMGDTHKICMCFPHRALLRDGSLDRTLYMINTLRPNEPENNCLICYNHVEYARPFIGL

SEQ ID NO: 304689 - protein, 196 aa, Zea mays
  Clone ID: MRT4577_40947C.1.pep
MALLAPAISGEVGLRLLLAPLSSNIVMRTASCAVGIGLPVYSTFRAIEKKDEQEKERMLLYWAAYGSFSIAEVFADKLLSSVPLYYHVKFAILVWLQFPSNSGSKHVYKRYLRPFFLKHQAKIDRFLNILSKELTKFVSSHEDEIRFIENMAIRGATTANHIVNGLDQPEETQAVNTIEGPNTTVTEEAGVSGTET

SEQ ID NO: 304690 - protein, 80 aa, Zea mays
  unsure (1)..(80): unsure at all Xaa locations
  Clone ID: MRT4577_40948C.1.pep
MIAVQPSXMMCYYAKKMVLSNVSRDLAKAQHQSTQIAIDAVYNHRMVTSFGCSSKVLQLFEHAQDEPMKKARXKSWVAGI

SEQ ID NO: 304691 - protein, 248 aa, Zea mays
  unsure (1)..(248): unsure at all Xaa locations
  Clone ID: MRT4577_40949C.1.pep
MKNVAKCDTWCELQNPANHRVFERKLRPKPSGGGHVCLGVTQQLQTSPEAPTTPPAADPVTRLLPAAERLQPCPVPAQMANAASGMAVDDDCKRRFLELKAKRTHRFIIYRIDEKKKMVVVEQVGKPVLGYDDFAASLPANECRYAIFDYDFVTEENCQKSKIFFIAWYATSFLAAVQSTLAFEVLATHGRSCMMCVNEXPDTARVRSKMIYASSKERFKRELDGIQVDLQATDSAEVGLDVIQGRAS

SEQ ID NO: 304692 - protein, 101 aa, Zea mays
  unsure (1)..(101): unsure at all Xaa locations
  Clone ID: MRT4577_4094C.1.pep
NFGEGGSPGRTRPEFPGSHHSLRGRLGMPGPEGDIGLTGSKXIISTYCGWRAHXGGGAFYRRDRSKVDQKGAYVXRQAGKSIEASGLDHRCLVQVSYAIGV

SEQ ID NO: 304693 - protein, 158 aa, Zea mays
  unsure (1)..(158): unsure at all Xaa locations
  Clone ID: MRT4577_40950C.1.pep
MSQTNWEADKMLDVYIYDYFMKRNLQATAKAFQAEGKVSSDPVAIDAPGGFLFEWWSVFWDIFIARTNEKHSDVAASYIETQLMKAREQQHQQQQQIPQQRQQQPQHIQMQQMLLQRAVQQQQQQQQQPLQQXQQPQQHQQQXQQQHHSSCHSNSCNS

SEQ ID NO: 304694 - protein, 244 aa, Zea mays
  unsure (1)..(244): unsure at all Xaa locations
  Clone ID: MRT4577_40951C.1.pep
AGRDRYTRSLQQYSTLPLCTALFCLHRPTAMPIRNPFRRAGAPDQADDAQRNAPENDFKTATVSGATPLQLEDPAEYKLSEINDSGVYLPPSPHNEKPTFWHTKSNVSTTSSNHRSLLAENEPFSISRESFDSYRRSFDISARSPITDSVHETYPRQSLDARRSMDTRRSFDARRSRATPRSSMQQGRSSESRDQVPEEGFEDVGLNDEPKPQPQKRGIFSXLGDNTTPMIAPKDVLPRVTTFS

SEQ ID NO: 304695 - protein, 139 aa, Zea mays
  Clone ID: MRT4577_40952C.1.pep
MANAASGMAVDDDCKRRFLELKAKRTHRFIIYRIDEKKKMVVVEQVGKPVLGYDDFAASLPANECRYAIFDYDFVTEENCQKSKIFFIAWSPDTARVRSKMIYASSKERFKRELDGIQVDLQATDSAEVGLDVIQGRAS

SEQ ID NO: 304696 - protein, 49 aa, Zea mays
  Clone ID: MRT4577_40953C.1.pep
ALQRQRLCIKDPFMKLGVPRHVYIEIVPCNKYHGVYIEDIQELANAIPL

SEQ ID NO: 304697 - protein, 135 aa, Zea mays
  Clone ID: MRT4577_40954C.1.pep
TATNQSSVQLVPKPPRREQAMCGTGMASPAIQIFLSCRVSRTGGFGSPCASSCPLVTENYCPGLVTCVPEPPVPPNHAHASSPDVQIYFFRLPVKLYRFVSLLDSIEKKILVMIKDSRGWLAKLHRGISWRDCSR

SEQ ID NO: 304698 - protein, 505 aa, Zea mays
  Clone ID: MRT4577_40955C.1.pep
LESKQPQDPLTTSYTCNGSSSLTPSSKEALLKNISSGKKGGSAGKVTNKDNRLHKLVFNVLLDGTEVAYYVDGQRKVDGYIKDQRIYCNHCNKVVSPSAFEAHAGEGSRRKPYDNIFTSNGVSLHELAMKISKDMELSERETDDLCRECGQGGDIFPCKICPRSFHPACVGLSKVPSEWYCDNCRNLVQKEKALAENKNAKAAGRQAGVDSIEQIMKRAIRIVPISDDLGGCALCKQKDFNNAVFDERTVILCDQCEKEYHVGCLKNQWQVELKELPEGEWFCCSSCSETRSSLDKIISDGAQLLVEPDLEIIKKKHVTRGLCMDTSKDLKWQLLSGKRTTEDGSILLSAAVPIFHQSFDPIREALTGRDLIPEMVNGRGPKEGMPGQDYSGMYCALLTVGSTVVSAALLRVMGGDVAELPLVATSQDVQGLGYFQALFSCIERMLVSLKIKHFVLPAAHEAEGIWMKKFGFSRTTPEELEAYLNGAHLTIFHGTSYLYKAVPMS

SEQ ID NO: 304699 - protein, 115 aa, Zea mays
  Clone ID: MRT4577_40956C.1.pep
WQFESDSKFEGGFAKEHIIRDNRLHKLVFNVLLDGTEVAYYVDGQRKVDGYIKDQRIYCNHCNKVVSPSAFEAHAGEGSRRKPYDNIFTSNGVSLHELAMKISKDMELSERETDD

SEQ ID NO: 304700 - protein, 44 aa, Zea mays
  Clone ID: MRT4577_40957C.1.pep
KKTAYFLITTHTSSVLSYILLKRNHSPPMESILLFITFKTFYGP

SEQ ID NO: 304701 - protein, 177 aa, Zea mays
  unsure (1)..(177): unsure at all Xaa locations
  Clone ID: MRT4577_40958C.1.pep
QTSWDNRLHKLVFNVLLDGTEVAYYVDGQRKVDGYIKDHRIYCNHCNRVVSPSAFEAHAGMXNIFTSNGVSLHELAMKISKDMELSERETDDLCRECGQGGDIFPCKICPRSFHPACVGLSKVPAEWYCDSCRNLVQKEKALAXNKNAKAAGRQAGVDSIEQXMKRAIRIVPISDDL

SEQ ID NO: 304702 - protein, 165 aa, Zea mays
  Clone ID: MRT4577_40959C.1.pep
KKKKKKKKRERRKKKKKKKKKKRTKNYKRIQFVLVWGAAVFRGFLIYGPWAFPWFCLFFRVPWGGIAWAALFQRLWLGKPLAFPTFFALRPFPFCPVGGLANGPGPVAFPAVARSVGGWDPPFCGPFSARGLVFPPFFARLPCRGLSVPFFFFVSFLGGAGCAGF

SEQ ID NO: 304703 - protein, 40 aa, Zea mays
  Clone ID: MRT4577_4095C.1.pep
SKQREQGDIAKNWLLTEKENLLHVKCHYIWGANDHMFVEI

SEQ ID NO: 304704 - protein, 245 aa, Zea mays
  unsure (1)..(245): unsure at all Xaa locations
  Clone ID: MRT4577_40960C.1.pep
SRGLCMDTSKDLKWQLLSGKRATEDGSILLSAAVPIFHQSFDPIREALTGRDLIPEMVNGXITEQHFVLEVCRRSSSXKCTRRGPKEGMPGQDYSGMYCALLTVGSTVVSAALLRVMGGDVAELPLVATSQDVQGLVGLRIALQLKLDCLFWSCGLVLCSLLDVSPIAVIXQGYFQALFSCIERVLVSLKIKHFVLPAAHEAEGIWMNKFGFSRISPEELEAYLNGAHLTIFHGTSYMYKAVPVS

SEQ ID NO: 304705 - protein, 104 aa, Zea mays
  Clone ID: MRT4577_40961C.1.pep
DAWADAWAMTKNPYSSVDVGPLMRDVKNKICNQLDLNGLLEDDYGMELLVGGSIISLDLSISQVYEQVWRKHHGQTQHCLSNVSAITGASSIRDCPPMTVTYRL

SEQ ID NO: 304706 - protein, 183 aa, Zea mays
  Clone ID: MRT4577_40962C.1.pep
LSIALVYPPPTGLRQSAMAAASSVHGFTVKDASGEDVHLSTFKGKVLLIVNVASQCGLTNSNYTELAQLHEMYKDQDFEILAFPCNQFGGQEPGTSEEIVQLVCARFKAKYPILHKVDVNGEDAAPIYKFLKSSKTGPMGEDIKWNFAKFLVDRQGHVAERYAPTTYPLSIQKDIKKLLGGSY

SEQ ID NO: 304707 - protein, 28 aa, Zea mays
  Clone ID: MRT4577_40963C.1.pep
LRRVLQVILVYPTLKSQVYGSNPVVCAI

SEQ ID NO: 304708 - protein, 99 aa, Zea mays
  Clone ID: MRT4577_40964C.1.pep
NLIVQICEKSPGCLITLSTRPGQILGSRLRVVLRPCLIMQWRQRWATGLTPNFGQVGGSMAVPSRCWHLMSLAFASVTKRQVKTDCQKGSCCHRLGPDI

SEQ ID NO: 304709 - protein, 102 aa, Zea mays
  Clone ID: MRT4577_40965C.1.pep
LPGGGSVWWLLLHTVVPFSVGAARSAMSSLRPVLFASGLSDYPSFLLVSWGVVLFPFWVLPSGFTVPVSCRCVFGALVCSVCFPRLSVGLPLTFNVFIKSHP

SEQ ID NO: 304710 - protein, 104 aa, Zea mays
  Clone ID: MRT4577_40966C.1.pep
TTQPPISPLPLLIPLSRPWGGIIPMLQLTPSSSLIQVPNSSKAPSPATSTHLKPGLTSTFHDIIAPVIMALSKATLHAVPWMYNVTTSFCIIIDNNDLMTTHGF

SEQ ID NO: 304711 - protein, 131 aa, Zea mays
  Clone ID: MRT4577_40968C.1.pep
PGPQGAGEKGLPRQAHLHPARVPRGLRGGRQLPGHHRHACGAGQVLQGVAQTRPVISVVVGLGLGLFPPVIFHFSLLRRLLSHGPMICPETSIGTHPWGAGWGNKLSGRSRYAFLSPHILSIEIDCYFDGP

SEQ ID NO: 304712 - protein, 62 aa, Zea mays
  unsure (1)..(62): unsure at all Xaa locations
  Clone ID: MRT4577_40969C.1.pep
EPLRLDSAWQLVLIIRAVSSAEGIFAGFLTLIILAAAXCTMMIRIYELRMSFVSRLNQYRLL

SEQ ID NO: 304713 - protein, 121 aa, Zea mays
  Clone ID: MRT4577_4096C.1.pep
LCGARGGRFEIKYVDAALCICQCICNGRPPPKEACTCLWCDVTPRANAGAALARGYRGATLHGTHSHPLYDQRAAPERRPTIPLISLNPLRCQCHPIRADAISSTARLTEPTPWIPSECGS

SEQ ID NO: 304714 - protein, 114 aa, Zea mays
  Clone ID: MRT4577_40970C.1.pep
ILIELLQRSGGGGGGGHRFGARDGPAPLCTSCQLQSWAIPRTRTERRRQCPAACHIRTQNLARQYALDIRFSWPIRTAKTPKHTLARAVRTPADRPACPWRARAVRTPADQCPP

SEQ ID NO: 304715 - protein, 95 aa, Zea mays
  Clone ID: MRT4577_40971C.1.pep
GPLLGPGRWSKTQNLFLPGSEAPEGAPPLERGVFWCPVLRTLARGNRQSGWFSVCPKSSPKCSPAPERTFRCRPGLTPPGRRIIFFKPDPPKTLQ

SEQ ID NO: 304716 - protein, 74 aa, Zea mays
  Clone ID: MRT4577_40972C.1.pep
KTLKILIHSDVSTVDGQDRDNNPRGGYCKYMPSLGRSVLSDFPDDPYSGCQRITSFLSVCNRESYEEIAHPSPS

SEQ ID NO: 304717 - protein, 84 aa, Zea mays
  Clone ID: MRT4577_40973C.1.pep
GVVRAQLAPSLRGRQSPLRSRLHKRGGEVVYQGTTLCSPRIVLQVCVRERKLFYRDLVIGGNKIFIRYSMFLAGINPQRGLIPV

SEQ ID NO: 304718 - protein, 56 aa, Zea mays
  Clone ID: MRT4577_40974C.1.pep
CDDIFEFEDMCFVQIEYERLTGFEPNSHTKLLNDIAKSTKTYQKVETSTLNEVTLN

SEQ ID NO: 304719 - protein, 65 aa, Zea mays
  unsure (1)..(65): unsure at all Xaa locations
  Clone ID: MRT4577_40975C.1.pep
RAVCMISNSTSVVEVFSRIDHKFDLMYAKRAFVHWXXGXVRGMEEGEFSEAREDLAALRRLRGRC

SEQ ID NO: 304720 - protein, 89 aa, Zea mays
  Clone ID: MRT4577_40976C.1.pep
DDTTSEALPSTDDLVAEIEELKASLASQDKLLRQAAFERRQDTRGHICMAMEIEKVSNNLIQHPMKQMMSSTSSKYERCFETKKRRGTN

SEQ ID NO: 304721 - protein, 143 aa, Zea mays
  unsure (1)..(143): unsure at all Xaa locations
  Clone ID: MRT4577_40977C.1.pep
DRARTLGLPPHWDRNFITLLLQGSVAALQVSYRGDWIRVQPVPGALVVNFGPQLEIXVPASRSTNGLLKSIEPRAVASAAVPPPSVATFIMPTDDCLVAPPAELAGGGDKPPPRYRAVTFREFMRVYKTVGARRESVEKAFKI

SEQ ID NO: 304722 - protein, 166 aa, Zea mays
  unsure (1)..(166): unsure at all Xaa locations
  Clone ID: MRT4577_40978C.1.pep
YPPCPDPARTLGLPPHCDRNLITLLLQGSVAGLQVSYRGDWIRVQPVPGAFVVNFGHQLEVXTRLSTISLSACAVLMENDDDACXTTNGLLKSIEHRAVASAAVPRTSVATFIMPTDDCLVAPAAELAGGGDKPPPRYRAVTFREFMRVYKTVGARRESVEKAFKI

SEQ ID NO: 304723 - protein, 103 aa, Zea mays
  Clone ID: MRT4577_40979C.1.pep
VTPFLPLGTSFCLLWSMSMRFFYTFFLRHWSGGFSPASRRPKTLEPWSASLTRRKKNIPPRVAKSHRHLVLKKYLLYVRKQGPNRHKQEPKLNTLHEHPKRRL

SEQ ID NO: 304724 - protein, 170 aa, Zea mays
  unsure (1)..(170): unsure at all Xaa locations
  Clone ID: MRT4577_4097C.1.pep
MALVSHSGAGNKNAFKALIAAEYRGIKXHRPMMFEMGVSNTTPESLTMNPLVKDPVLQTPDGPVFESNAIPRYVXRLTDDNPLFGSSRIEQAHVEHWMDFASTDADPGVAWYLYPTLVYLPYGSTTDETAMSLLKRTLGALNTHTCSNTYLGVHAVTLADIAMTXCNLYH

SEQ ID NO: 304725 - protein, 87 aa, Zea mays
  Clone ID: MRT4577_40980C.1.pep
KTRTHAELVNYLRYIHISYMGMMVWMIIKQTRYAPSMPLVLLSDCEPAISSHKFMHGMPQEADLKLAQPLLTCFPEIIVSMGACEYI

SEQ ID NO: 304726 - protein, 117 aa, Zea mays
  Clone ID: MRT4577_40981C.1.pep
TRISSLLCRIDPAQQSSLRRPASNDCGPANSSGLAAAAVSTWPAPSSRWVRSGCSPAGTPGKDMDKPPPQFAFYHLIPALTFSCLSMYTFYFFCSKYIKHYSLCVCNCPCSASLFGH

SEQ ID NO: 304727 - protein, 72 aa, Zea mays
  Clone ID: MRT4577_40982C.1.pep
KPKKRNPPAKFTPNFVMPKEFPKMAKVVKNRVGDNFYRLVLTKWALGRLSFLSPTLQVSKFGVKKKNRQPPP

SEQ ID NO: 304728 - protein, 53 aa, Zea mays
  unsure (1)..(53): unsure at all Xaa locations
  Clone ID: MRT4577_40983C.1.pep
RXIFCGKQQNDGRTLDCYNIHKESTLHLVLRLRGGMHIFVKTLTVKTITLVVE

SEQ ID NO: 304729 - protein, 66 aa, Zea mays
  Clone ID: MRT4577_40984C.1.pep
VNWDLGLLRTPPVLKFYLPFYFSCLDLETKTWRGGCPVIFVKMNWSPFFVTERFAQCVRLFLGGFF

SEQ ID NO: 304730 - protein, 84 aa, Zea mays
  unsure (1)..(84): unsure at all Xaa locations
  Clone ID: MRT4577_40985C.1.pep
FPNKLCSSSGASKVTVRGVTCXSISGTSSTRXAVSLLSIAKVPCTGVSMHYVGVEYNVTNVEPMAICSTPKGSTEGSLNELACF

SEQ ID NO: 304731 - protein, 70 aa, Zea mays
  Clone ID: MRT4577_40986C.1.pep
FAPLWEIPARDPLGYSDLMSFGFRIGLMSGPINSSSNMNIFASFFLGNVAVDFPEAFRSHLLWLRDRPLR

SEQ ID NO: 304732 - protein, 88 aa, Zea mays
  Clone ID: MRT4577_40987C.1.pep
PKAGGKRKKKKGRSRSHSPPGPRADLPDMASADAPTEDTAHKVGSNKNGGAAPPVSLAAWVASVALAVASLLLSRPAGGPLRAPVALS

SEQ ID NO: 304733 - protein, 109 aa, Zea mays
  unsure (1)..(109): unsure at all Xaa locations
  Clone ID: MRT4577_40988C.1.pep
PSLQLLIFRLRVCSRFPAYLFGFGFCSASQVLVGVLYSPERAKFFLFSCPPLPRASCPPWPPPXPPFPXPPSRPPFFGPPXPPSGPPPXPPPPPPLPGPPLPPFWHSPI

SEQ ID NO: 304734 - protein, 100 aa, Zea mays
  Clone ID: MRT4577_40989C.1.pep
PPQVWKKKRVFFQKKVRHCFPNFPEILLRKTLWGVLKVLQFSPPFPTPHFFFFSPGYFPPRALRKGGLGPFNPTGGFFFPPKFLFFFGPQIFISQKIFSP

SEQ ID NO: 304735 - protein, 128 aa, Zea mays
  unsure (1)..(128): unsure at all Xaa locations
  Clone ID: MRT4577_4098C.1.pep
MVEAGDDTEQAILKLQRVSLAIKSVINLWSMEGGNLGFSQYDYSHIKEATNNFSVDNKLGEGGFGPVYKGQLRSGIXIAAKKLEAWSLQGLLXFQNEIQLIXKLQHKNLVKLLXCCTRGDXEKMLIYE

SEQ ID NO: 304736 - protein, 80 aa, Zea mays
  Clone ID: MRT4577_40990C.1.pep
RAGEPRRPPRWVGRAGCTPRTAQDARRAGRASYTRRGPRWLRAVLTARATHAAGRAGRPAPPPRRVSYAGHHAGLAAPGS

SEQ ID NO: 304737 - protein, 59 aa, Zea mays
  Clone ID: MRT4577_40991C.1.pep
NVAHVRRQPRYLHCFFIPHSHCNQVAEEVVVTASLIAGSAASIPREAGTLATVLTCDYS

SEQ ID NO: 304738 - protein, 91 aa, Zea mays
  Clone ID: MRT4577_40992C.1.pep
MQFSKIFAIVSLSATAYSAAMPTGATDVPTTIAACNAAGNTSVQCCSGGLLNLLGCVNLLGSTCSNNGNAYCCKQNQQGVLIGLNTCGPIL

SEQ ID NO: 304739 - protein, 476 aa, Zea mays
  Clone ID: MRT4577_40993C.1.pep
MRGWGLLVLSLHVLSCLVSGVASGRTSSYVRTEFPSTDIPLESEWFAIPKGYNAPQQVHITQGDYDGKAVIVSWVTPEEPGPSEVFYGKEKLYDQKAEGTTTNYTFYDYKSGYIHHCLVDGLEYNTKYYYKIGSGNSAREFWFQTPPAIDPDASYTFGIIGDLGQTFNSLSTLQHYEKTGGQTVLFVGDLSYADRYEHNDGIRWDSWGRFVEHSTAYQPWIWNTGNHEIEYRPDLGETSVFKPYLHRYMTPYLASKSSSPMWYAVRRASAHIIVLSSYSPFVKYTPQWLWLKNEFKRVDREKTPWLIVLMHSPMYNSNEAHYMEGESMRAAFEKWFVKYKVDLVFAGHVHAYERSYRISNVNYNITSGNRYPVPDKSAPVYITVGDGGNQEGLASRFYNPQPDYSAFREASYGHSVLQLKNRTHAIYQWNRNDDGNPVPADTVMFHNQYWTSSTRRRRLKKNHLHLEDLEDLISLL

SEQ ID NO: 304740 - protein, 115 aa, Zea mays
  unsure (1)..(115): unsure at all Xaa locations
  Clone ID: MRT4577_40994C.1.pep
FFFFFFFFFFFFFFFFFKGKGGPFIHHQLSHVEELGCFFFPRLLVPKLGGGVSSFGSPXPPPTLVLWGTNPPPSVKQSPPKHKVCCPLALVPQTAGLGGLMCLIFDGAYQVWEPL

SEQ ID NO: 304741 - protein, 27 aa, Zea mays
  Clone ID: MRT4577_40995C.1.pep
MKDKRGLEDAGDGRPDAKRPRPPAVAR

SEQ ID NO: 304742 - protein, 253 aa, Zea mays
  unsure (1)..(253): unsure at all Xaa locations
  Clone ID: MRT4577_40996C.1.pep
SRLWPGSXVLNTCLKEAKGYFNDKISNSSIVDQTLAAVFGIDLRFLRCVNDYSYRSKLFWAMVAMISTVGIVKFVIVFGILSRFVFAPLTVLTFLAYKYWKTRISIDAVEKFLQMQQALSPARYAYTDITAITGHFREKLGQGGYGSVYRGVLPGDVSVAVKMLSNSLCNGDEFISEVSTIGSIHHVNVVRLVGFCSEETKRALIYEYMPRGSLDKHIFSSEQSFSWDKLNGIALGIXRGINYLHQGCEMQIL

SEQ ID NO: 304743 - protein, 101 aa, Zea mays
  Clone ID: MRT4577_40997C.1.pep
MVSTSKSHLNLASEIDSFPFALLSSFFSRSLTALRAFACWANPPSCRFYNPQPDYSAFREASYGHSGLQLKNRTHAIYQWNRNDDGNPVPADTVMFHNQYW

SEQ ID NO: 304744 - protein, 158 aa, Zea mays
  Clone ID: MRT4577_40998C.1.pep
MAAAVVDDAGMDAVQKRLMFENECILVDEQDNVVGHESKYNCHLMEKIDSENLLHRAFSVFLFNSKYELLLQQRSATKVTFPLVWTNTCCSHPLYRESELIQENYLGVRNAAQRKLLDELGIPAEDAPVDQFTPLGRGGVCCLFVCLFGDRIASWTPV

SEQ ID NO: 304745 - protein, 83 aa, Zea mays
  Clone ID: MRT4577_4099C.1.pep
SCWFPTLAVHSSHVLLVVLLRYLSLYSACPCGARPHPCMRCLCVLKNLAGKRLVLFWQQAVHSVQPLIEHAAVNAVAIIRKAA

SEQ ID NO: 304746 - protein, 101 aa, Zea mays
  unsure (1)..(101): unsure at all Xaa locations
  Clone ID: MRT4577_409C.1.pep
EGKEGGFTGREETAEINRFSWGVANPGGLVGVGRETEQNGKGXFEDRRRGFKMDPXVVPSMFAETPFFWKPLAPGPFGLRVPKGIAKPLFLRFGLFIIVFI

SEQ ID NO: 304747 - protein, 85 aa, Zea mays
  Clone ID: MRT4577_40C.1.pep
MLRQSSSRNHRSKGLKLKKALQISLLVLVSVWLLYQVKHSYEKKTAYNENDATSHEAGDEHKDGQSQVVVIKLGRKDLPAKEADS

SEQ ID NO: 304748 - protein, 352 aa, Zea mays
  Clone ID: MRT4577_41000C.1.pep
MEVLSTMTPIIVIGKIAAFEMSGKMGRQEEPTSSRPYAFACDERKDKKKAPTPSSSSEEESRIFTLTLTRKSKEREDASHVGRRATLGTIVQIWPNPQRGGAKARSLQVSKLGMTLQAKMNLQGRATTDPHHGHRTSALWQELSTKIEQLESSAPSTATDDGLIKKNEKLKAKLASSQEAIENLLEKMEILSIHNDELTTKLENIGSTPEVSLVEIPEIIKKDASTSCLDVIDNSNHCNQVLVKNVVIETYSDEIAMENEQLKQEVYHLGNALYDKKGKAKQIQPPQDNTTAGVNKPMEGETVICRLCHKENHKSFQCKAKTGISKSSNKIRQAKSPTPTSTRWTKRLLHHT

SEQ ID NO: 304749 - protein, 69 aa, Zea mays
  Clone ID: MRT4577_41001C.1.pep
RNLIFIKPTLINYKIISIEGNHTPSMTSILHHPFISRRAKCFFTYIPRGHLAIAPLVITSYDPYRIILP

SEQ ID NO: 304750 - protein, 100 aa, Zea mays
  Clone ID: MRT4577_41002C.1.pep
HASARVERWLLGEEVKNIVACDGADRRERHERLDRWAARMEGAGFARVPLSYYALLQARRAAQGLGCDGFKVREEKGAFFLCWQERAIFSVSAWRGRRFD

SEQ ID NO: 304751 - protein, 249 aa, Zea mays
  Clone ID: MRT4577_41003C.1.pep
GLILALLTGAFDTSSAVFLAYRLIYQATDGDFTPKKFFLVYLVVPAYIFLVQIFFMPGTSYKTVGELVQHVEEATHDVIHDSDEEIEDDSLVSRLQEARRGHRESVVSQITELLGTKDATQQTEEEEKKKNISGVWGALHGRTAAQQIRTPWFIFIALFTVLQMLRINYFVATIRSQYSYLFHSYPKAIEINNFFDVALPLGGVISVPFIGLLLDNTSTTTCLTLLVTIATTIGVLGIVPEAWAAYISI

SEQ ID NO: 304752 - protein, 85 aa, Zea mays
  unsure (1)..(85): unsure at all Xaa locations
  Clone ID: MRT4577_41004C.1.pep
RTRGWEIALLLATVACXYLPTVAFSGVLFMWLNPYSHGWGLNALLICTTLILAFAYGIGALHPHVHGSVMPACCTFVYCAYLGYT

SEQ ID NO: 304753 - protein, 103 aa, Zea mays
  unsure (1)..(103): unsure at all Xaa locations
  Clone ID: MRT4577_41005C.1.pep
SGERLPVWATLSAEASQQVVVVVVARVSEPGRLAWPTKRQRWWRCLLASCSCAEVQKSRIFYILWTPSSAKVKTEMLYRSXNQKFXSGLNGIQVELQATDASE

SEQ ID NO: 304754 - protein, 246 aa, Zea mays
  Clone ID: MRT4577_41006C.1.pep
FLITNAVLYGRTIFKSIRKFVVFQSTINLASTLIVFLGPFMGFDFPLTIIQLLWVNLVMDTLAALAFGGEPALKSYMKEHPTKRNEAIISPEMWSYILFNGSFIAALSVIFLTWDPVAEHFTRDGKPSDPVFLTAFFSFFIFISVINAFNVRTPRLNVFNHLWQNSGFVRVITLIFFVQITFSYFGGSVLRTVPLTMNEWLTIIGASLVIIPWDSIRKIFIAPLLPKKFKDLSWLEEYEKQDKKDD

SEQ ID NO: 304755 - protein, 93 aa, Zea mays
  Clone ID: MRT4577_41007C.1.pep
SRPVQQQATTGPGPQYRVLGKQNQAPHHRTDMHESTQAAAGNRDPHYPQPHHLHLTDQANTTNAPTHRANKPHTPPTLLSLYITAATETGYKH

SEQ ID NO: 304756 - protein, 82 aa, Zea mays
  Clone ID: MRT4577_41008C.1.pep
SEENTPMAVAEGVQEVNYPSQMRLSPPTPSSLCKEITVTDADALLREDSSTPWRIPRNQTQSTDIVNKCAYCCQCPYQRKKH

SEQ ID NO: 304757 - protein, 153 aa, Zea mays
  unsure (1)..(153): unsure at all Xaa locations
  Clone ID: MRT4577_41009C.1.pep
MCPSWVKTXSSXYSTVGTXTSTSTAVGACPRLSIPNPCLKDLRSLLSPNSSASPAPRVFHRLRVAASALRVLRAIQHPASQSPAXGKEPAPGACDGGRVVLYFTSLRVVRGTYKDXRAVRAILRGLRAAVDERDLAMDPVYLPELASLLPHAP

SEQ ID NO: 304758 - protein, 41 aa, Zea mays
  Clone ID: MRT4577_4100C.1.pep
SRSNVNGVSEAYKSSSRSSCPRCCYGVSDDGRHRLCAEHAA

SEQ ID NO: 304759 - protein, 100 aa, Zea mays
  Clone ID: MRT4577_41010C.1.pep
KWWNKGEGCGHSRPFQQFGKKEKKGHPPLNKATREKLPNSPRCKKLGKGKGLTTQKKGKKGPQKILKKPPKRGKRPQKTTQKGPPGRKKNSKISLKGGVA

SEQ ID NO: 304760 - protein, 84 aa, Zea mays
  Clone ID: MRT4577_41011C.1.pep
AWILNDPPCRPTPTFVYLKRDKNTHPHKLYYQKKVIRSHRKALRLQDHPNSQSTTLRSRSAHAPPTVPTLATLGDAWADAGSTG

SEQ ID NO: 304761 - protein, 91 aa, Zea mays
  unsure (1)..(91): unsure at all Xaa locations
  Clone ID: MRT4577_41012C.1.pep
LLVSCFFFNRSFRSRAELNGNLQGRLGXSNGVLELAVSRKVNXVVLVIKIGQFQDGVSVKTKQGAYGCSKVAVGNFGKDEAAEFIVTLDFN

SEQ ID NO: 304762 - protein, 72 aa, Zea mays
  Clone ID: MRT4577_41013C.1.pep
EFLQQKLKQSQLLALKKELMVQKQQEALEEQAALEPKLDLLLEKTKELQKLIEADISKRYSGRPVNLMGTSL

SEQ ID NO: 304763 - protein, 189 aa, Zea mays
  unsure (1)..(189): unsure at all Xaa locations
  Clone ID: MRT4577_41014C.1.pep
MALVDHMQDTARFFDRWSFYDDQAYHISLNNYLAGDASKHAMHVAHTARRYSHNGIRWEQXPIVQRLSKSLMMNGRNNDQNVLSARXIIPNTHXIVHLLADDNPIQGTYDWIINRXXPREDGTRIGSGGXLRGEXVHISPLRSVNQTIYLLTXTVAIDSAFHNIKTIVERLAXDLSDSAEDSCNSYAIK

SEQ ID NO: 304764 - protein, 50 aa, Zea mays
  unsure (1)..(50): unsure at all Xaa locations
  Clone ID: MRT4577_41015C.1.pep
SLDTVAPDQYSRNNTCLTPLVPXXXYXXXXXNGGINFKVGMVNGRHAYIP

SEQ ID NO: 304765 - protein, 63 aa, Zea mays
  Clone ID: MRT4577_41016C.1.pep
VFCLELKNNPPKFASGLVWAAPPPNALPGPICWPAQLLLPKKGPPLAGKINYQVVPDANLWRA

SEQ ID NO: 304766 - protein, 208 aa, Zea mays
  Clone ID: MRT4577_41017C.1.pep
MNLKFKAPWKKELVALGKANVNGEDKTITIRNDYPDYPVPYFQVTEGFNLRKVKELMLERNVKIAKSIANDIIIPDPAPQWVADNFLDKYAELEPILVKDSARCFLQLFQNCRGRGMSSDLTITAQTLTFIVSFNALRCAKVVLEGMAPELYGMHANPNCINKYGYFPLHEAAERFSLDMIKLLLRHGASPNVRTVGNDVIFDVIENL

SEQ ID NO: 304767 - protein, 114 aa, Zea mays
  Clone ID: MRT4577_41018C.1.pep
MAFNSPFHCYHWKRGLPSSGKEAIELLDILLRWIVLRFCESNTTCLLKVLDFLPELFDILKDQSYMLTEAEAAIFLPCLIMKSRFVARNQKITLMVMRRLSHRSQKPLSQRVGH

SEQ ID NO: 304768 - protein, 87 aa, Zea mays
  Clone ID: MRT4577_41019C.1.pep
SSLIAYSMILAKKHPTLRINCLTPVAGKTNMRMHMGVLSLEEGARTPVKVALSPDDGPTGAIFRSRRGAKLMMTVTRPFCLRKHRRS

SEQ ID NO: 304769 - protein, 197 aa, Zea mays
  Clone ID: MRT4577_4101C.1.pep
KSPAQRDACDEAGALLVFDEVQCGFGRTGHLWAHEAYGVEPDIMTLAKPLANGIPIGVVLVKEKVAAAINYGDHGTTFGGGPLACQTAITVFDKITRPGFLAEVSRKGESFKQLLRAKLSGNPHVREVRGVGLLVGVELDVPAGPLVDACLDAGVIVLTAGKGNVVRLVPPLNAGEKELEHAADVIRDCLPALDVRI

SEQ ID NO: 304770 - protein, 231 aa, Zea mays
  Clone ID: MRT4577_41020C.1.pep
MGGGGGSPAASGGSSSSEDDGDAAWKAAIDSIASVGFSVPSSNGVAKAASSGSREVNNRADLEEPREGKPKSPGLKLYQVKVRNMLDDMLEKNLEIVKAPCLNLVDPMETGGGIKLFKKAPPGISMDSTDKWHVQLKRPRIVPGEEVDEKSKKFRHMLRSVVVDGSDIVVSAKKASERSLARLEVREAAAKAKAKREEERVQELKKVRGEKWLPSVARQMKEEKAWELRRQ

SEQ ID NO: 304771 - protein, 202 aa, Zea mays
  Clone ID: MRT4577_41021C.1.pep
MAGESCVPKPLFGGAIFTTFPDRFQDVSNIREVPDHQEVLVDPSRDESLIFELLDLKGEVDDAGSALWFLQDIANEQDAGDNLVVEHSGTLELAALHLGEAPAVAATAVGQLAVSKGRQGREAQNIVRIYLANIRLKNAATDVLITAYEPLLINPLSESAVAVAAGPAIPAEQVGCLPMSEVFKLAVTNFNVRDWNLFDGGP

SEQ ID NO: 304772 - protein, 95 aa, Zea mays
  unsure (1)..(95): unsure at all Xaa locations
  Clone ID: MRT4577_41022C.1.pep
MSRFWKPGSSKPSTLLVDDEEGGVVFLPSSSSVSSSGFGYASLERQRQRLPVYKYRKAILYLVERHATTIVVGETGSGKSTQILQYLNEAXWADF

SEQ ID NO: 304773 - protein, 54 aa, Zea mays
  Clone ID: MRT4577_41023C.1.pep
FNFPFFRHITLFYFPSIFFLIRDSIKAYAWEKPAVKKLIGFEDISPFYRCGVFT

SEQ ID NO: 304774 - protein, 49 aa, Zea mays
  Clone ID: MRT4577_41024C.1.pep
VRQIRQNATGLSTIIIFKRYNYGEIILLCCNLRFNPLTSIDLDSTSLLS

SEQ ID NO: 304775 - protein, 87 aa, Zea mays
  unsure (1)..(87): unsure at all Xaa locations
  Clone ID: MRT4577_41026C.1.pep
WPPLLSRPREPAVSFTIRAETTSTTENHXMQRKPTRKLRAQATYNETLITXNGKVEMRETDNVYILEYAEDEGLNLHYSCPAADCSS

SEQ ID NO: 304776 - protein, 114 aa, Zea mays
  Clone ID: MRT4577_41027C.1.pep
FLPSHFSFHLLIYSTQPRPARFFFISSSSPPTFSLIPNPPYLLSPCPSFTSPSSVTFFFSPSSNPSITSSSSTYLTTTSPFILFITFITYSIISFFFLRITCLFLTLITLLYQP

SEQ ID NO: 304777 - protein, 126 aa, Zea mays
  Clone ID: MRT4577_41028C.1.pep
PAGPWEGVIATNRGAGRGEPGPRPRGAEAGKHGHPRGKGETGKSPHNLTTESTKRKSGGPKGGKKKTKTGGPTGATNPPKNRESQPPKRNHQPPEKGGKGKGRHSASTSTNTLGTGGQTGRPGTRQ

SEQ ID NO: 304778 - protein, 114 aa, Zea mays
  unsure (1)..(114): unsure at all Xaa locations
  Clone ID: MRT4577_41029C.1.pep
SQGLKFPSSPALSFPPPDFIKGVLFKKTEYRLGFFKGTFXIKRPPFFKGFKWAFIRGGFPPKPPKKFFFSPPLPGTPKKKKGQSLGFRVKGGAPEFGLFLWGRGGGAPRNIRPP

SEQ ID NO: 304779 - protein, 428 aa, Zea mays
  Clone ID: MRT4577_4102C.1.pep
MASLQSFLAVKPTTATRREMSVASLSAWDGGGRPHPYTTAPSPGGFAPGRSPDRYGYEGPTYLDMAAGIAVTALGHADPDVCATIAEQAGKVVHVSNVFYTKPQVELAKRLVEVSFADRAFFASTGTEANEAAIKFSRKFQRAAHPESGDPPTEFLAFSSSFHGRTMGAVALTSKSQYREPFAPVMPGVTFVDYGDLEAAKKFVRSGRVAAVFVEPVQGEGGIHSATREFLQGLRDACDEAGALLVFDEVQCGFGRTGHLWAHEAYGVEPDIMTLAKPLANGIPIGVVLVKEKVAAAINYGDHGTTFGGGPLACQTAITVFDKITRPGFLAEVSRKGESFKQLLRAKLSGNPHVREVRGVGLLVGVELDVPAGPLVDACLDAGVVVLTAGKGNVVRLVPPLIVSEKELEHAADVIRDCLPALDVVAAA

SEQ ID NO: 304780 - protein, 63 aa, Zea mays
  Clone ID: MRT4577_41030C.1.pep
NNAIVSPHPALSTFITLHIYQFDVTSYLALATSICTTNFIKPSISCMKMLEPTWITGCSNEES

SEQ ID NO: 304781 - protein, 276 aa, Zea mays
  unsure (1)..(276): unsure at all Xaa locations
  Clone ID: MRT4577_41031C.1.pep
MSVRSLLAQPIPSLFAPAPAPSRAHRNRTSRRRFLAATKLTMDGTSFDLTEHEGSNLSPFLLKHFNEYKHERSLQWDDRKTRGLFHHDISSCETKVLPGVHNFVATLIEGRDQKKRPTEFTMNQVLQPFVSEKFNFTKVSPLEVIFRFNDTEKDPAQYFDGVPDTVSASSSAILINVSPIGYCHVLLTPKIQDCLPQRIDQESFLIAMYVARGAKTPFFRVGYNSLXGFATINHLHFQAYYLKVQYPVEKAITEKLKTLXNSVSIFHLVDYXVNGF

SEQ ID NO: 304782 - protein, 42 aa, Zea mays
  Clone ID: MRT4577_41032C.1.pep
GANPTRAETSMGSQGGSRPPPALGDGLLASGSRAGGGQTGLR

SEQ ID NO: 304783 - protein, 218 aa, Zea mays
  Clone ID: MRT4577_41033C.1.pep
ALHWAAFCGRERTVVALIALGAAPGALTDPTPIFPTGSTPADLASANGYKGISGFLAESSLTSHLQTLDLKEGKGSNPPEISGLPGIGDVTERRASPLAGEGLQAGSMGDSLGAIRNAAQAAARIYQVFRVQSFQRKQAVQYEDDNGAVSDDRAISLLSVKPSKPVQLDPLHAAATRIQNKYRGWKGKKEFLLIRQRIVKIQAHVRGHQVRKAYRKII

SEQ ID NO: 304784 - protein, 188 aa, Zea mays
  Clone ID: MRT4577_41034C.1.pep
MKSVVEPRVAAGWLLDFWNAWATEILVILSLLLQGVLLFFSGTRRRQGRSPKRLLLWLAYQLADSTAMYALGNLSLSSTLRQHRLVAFWAPFLLLHLAGPDNITAYSLEDNKLWKRHLLTLVVQVLGAGYVIYNHIAGGGILFSLGAALTTAIAVAKFCEKTWALRCANFGVIRESVGGGGHRAARKM

SEQ ID NO: 304785 - protein, 49 aa, Zea mays
  Clone ID: MRT4577_41035C.1.pep
LKGWPIFHQGAFNDDPKQLSFFLEGLLRPPKNPPTKTNELFHPVNGASL

SEQ ID NO: 304786 - protein, 45 aa, Zea mays
  Clone ID: MRT4577_41036C.1.pep
GPNEPACITFRNLVATFLSFEISQGVFSSPIQNLMDASLLQALVI

SEQ ID NO: 304787 - protein, 248 aa, Zea mays
  Clone ID: MRT4577_41037C.1.pep
MAASSSFKPNPLSLSVPDPALDRWLRDTGYLDLLDSTPTGGPSSASAPSTSSPAAGPDSSGVAVDILTFARTLASLLALNPFARLSATDLAAPTPSWSLAFLGTPGAASYSWPPTPTQARLRVQENVRRYARNYAALTILVFACCLYRMPMALLGMLVSLAVWEGVRYCRDHWGLTTRAPGVAQALLHCAQIATAILLYVCNLQFALVYAIGLSYALMMLHASLRKLTPSSLPDPSSKKNRRAQPRRI

SEQ ID NO: 304788 - protein, 252 aa, Zea mays
  Clone ID: MRT4577_41038C.1.pep
MPMTPLECDMAPAASRNKHLSRSWPLPRCGLLVLVLALAATAAVGSAQLSSEDYYDASCPAALLTIRTAVSTAVLLEPRMGASLLRLHFHDCFVQGCDASVLLDDTASFTGEKGAGPNAGSLRGFDVIDNIKMLLELLCPQTVSCADILAIAARDSVAQLGGPSWAVPLGRRDATTASASLANSDLPGPTSSLNGLLNAFSNKGLSSTDMVALSGAHTVGRAQCKNCRARIYNDTDIDASFAASLRASCPAQ

SEQ ID NO: 304789 - protein, 191 aa, Zea mays
  Clone ID: MRT4577_41039C.1.pep
MVSTGLSLEMTKKVLGLALWVWIAIGVVALLVAILLMICIWAASRRKTKRTMENLSQTQIPIYSKEIPVDRVGGGRSLAQTMHEREQPSFPTQDKHAVNREPGKTVGHMALSKSSDHDNVSQGSSVCNVDRVGSVHSGEDGGSGHGRKPYSPAAFVSASPLVGLPESLIFGWGHWFTLRDLEFATNRFSKE

SEQ ID NO: 304790 - protein, 142 aa, Zea mays
  unsure (1)..(142): unsure at all Xaa locations
  Clone ID: MRT4577_4103C.1.pep
THSASYPPPTPVLLPLLLTSESVRASSQELAMASTTLSSDFTLLSRPSTSPCPXLAPEVLPRRAPXIRRGRRAVSVTCTATESPKILNLENPIPGLTLKEARNLLDHLQNRFGVTAVDFGPAALEGAPGSNAWPASKKEPPF

SEQ ID NO: 304791 - protein, 46 aa, Zea mays
  Clone ID: MRT4577_41040C.1.pep
VKFFIFFFILYFFFYIIFFFFIIFIFLFFFFFFFFFYFFFFFFFFF

SEQ ID NO: 304792 - protein, 39 aa, Zea mays
  unsure (1)..(39): unsure at all Xaa locations
  Clone ID: MRT4577_41041C.1.pep
FCICLLEKHLCWEIQLTVGEINTNXXLKFNAPIILMMCT

SEQ ID NO: 304793 - protein, 373 aa, Zea mays
  unsure (1)..(373): unsure at all Xaa locations
  Clone ID: MRT4577_41042C.1.pep
MPMTPLECDMAPAASRNKHLSRSWPLPRCGLLVLVLALAATAAVGSAQLSSEDYYDASCPAALLTIRTAVSTAVLLEPRMGASLLRLHFHDCFVQVSHXGLNQTETTDXVSDHMHGSALCICMHLPTXQGCDASVLLDDTASFTGEKGAGPNAGSLRGFDVIDNIKMLLELLCPQTVSCADILAIAARDSVAQLGGPSWAVPRGRPGHACDSTASFSLRASPVTAHGSPRGRGHMQMQCXGAHTVGRAQCKNCRARIYNDTDIDASFAASLRASCPAQAGAGDGALEPLDGSTPDAFDNAYFGNLLSQRGLLHSDQALFGGGGGGATDGLVSAYASNAGQWGADFAAAMVKMGSISPLTGTDGEIRVNCRRVN

SEQ ID NO: 304794 - protein, 212 aa, Zea mays
  unsure (1)..(212): unsure at all Xaa locations
  Clone ID: MRT4577_41043C.1.pep
MSYPCIGETAFYANRRGNTEKKNYKEIYYLTVHAMPMTPLECDMAPAASRQSWPLPRCGLLVLALALATTAAVGSAQLSSESYYDASCPAALLTIRTAVSTAVLLEPRMGASLLRLHFHDCFVQVSXSRLNLTETTDSEXEXDHGSALCICMHLLYVRQGCDASVLLDDTASFTGEKGAGPNAGSLRGFDVIDNIKMLLELLCPQTVSCADI

SEQ ID NO: 304795 - protein, 361 aa, Zea mays
  Clone ID: MRT4577_41044C.1.pep
MASLAAGRETRINYLTVHAMPMTPLECDMAPAASRQSWPLPRCGLLVLALALATTAAVGSAQLSSESYYDASCPAALLTIRTAVSTAVLLEPRMGASLLRLHFHDCFVQGCDASVLLDDTASFTGEKGAGPNAGSLRGFDVIDNIKMLLELLCPQTVSCADILAVAARDSVAQLGGPSWAVPLGRRDATTASASLANSDLPGPTSSLNGLLNAFSNKGLSSTDMVALSGAHTVGRAQCKNCRARIYNDTDIDASFAASLRASCPAQAGAGDGALEPLDGSTPDAFDNAYFGDLLSQRGLLHSDQALFGGGGGGATDGLVSAYASNAGQWGADFAAAMVKMGSISPLTGTDGEIRVNCRRVN

SEQ ID NO: 304796 - protein, 70 aa, Zea mays
  unsure (1)..(70): unsure at all Xaa locations
  Clone ID: MRT4577_41045C.1.pep
LYMERVRKSSKSCHGSITIDSAPDYARLLYARRLERVGSETGGGGTALEETLDKRAPPAQRDIWXGPRRX

SEQ ID NO: 304797 - protein, 31 aa, Zea mays
  Clone ID: MRT4577_41046C.1.pep
RILRAMDGLLPTIKLLDPQTQQVPSLKELHV

SEQ ID NO: 304798 - protein, 42 aa, Zea mays
  Clone ID: MRT4577_41047C.1.pep
PVCFEFHFQSGNVIKHLFLQYRQFIVTVTGLCNQRLAIFSNE

SEQ ID NO: 304799 - protein, 64 aa, Zea mays
  Clone ID: MRT4577_41048C.1.pep
LCRDGLRLGDPARRLLLPRRLLPLFHYPSDRCSRPTSNSAPSHHPRRRHRHSLGRPTECDRTRK

SEQ ID NO: 304800 - protein, 76 aa, Zea mays
  unsure (1)..(76): unsure at all Xaa locations
  Clone ID: MRT4577_41049C.1.pep
YPSSRRDRTLADLGGTTXGGAPAGRIVMELYANEVPKTAENFRALCTGEKGVGKSGKPLHYKGFTFHRVIPEIMCQ

SEQ ID NO: 304801 - protein, 210 aa, Zea mays
  unsure (1)..(210): unsure at all Xaa locations
  Clone ID: MRT4577_4104C.1.pep
FGSRKKCFSYFSLFPDDYKFDKSEIIRLWDSIGIIGSSIQQKKIEDIGSDYFDELLDSGFLIKGSNDFYVMHDLIKKKKKKKXGHDCAYIDCSSFEANNIPRSIRYLSISMQDHCAQNFEEEMGKLKEKIDIKNLRSLMIFGKYIRLHLLNILRDTFKEIRRLRVLSIFIYSHSSLPNNFSELLHLRYLKLLSPYYSKMSLPNTAQGFIT

SEQ ID NO: 304802 - protein, 70 aa, Zea mays
  Clone ID: MRT4577_41050C.1.pep
SSLVGGRPFFFFLYQLIQIQTYVNGVSHDIQRTSTKSAMYSLSRRDPKGIKDINRADTRRMGILALMLIQ

SEQ ID NO: 304803 - protein, 89 aa, Zea mays
  Clone ID: MRT4577_41051C.1.pep
IFIHINNTNTYYIYTPCSPLELLINHLHPISSLNMSLSSKVILVTGSASGLGRCIAETLLSRGASVTISDINPDRLAATASELSATFSP

SEQ ID NO: 304804 - protein, 94 aa, Zea mays
  Clone ID: MRT4577_41052C.1.pep
LHHRPFFFILPYFLSRSHLTLIMSEPIRNKKADFPVAPTPQNTPATNAPISSHAQQPGVASISEENLDAAAAASLFAKNPALVSMIQGRLGSLI

SEQ ID NO: 304805 - protein, 224 aa, Zea mays
  Clone ID: MRT4577_41053C.1.pep
MAASSASLLARRLIMSRRFLSSPLGSLSTTTATRSFSISSPGFKSFVVESDLENEHDQPPADQNRQQTSNSPRPPDTTRPLENGLDPGIYKAILVGKVGQEPMQKRLRSGKTVVLFSLGTGGIRNNRRPLDREEPHQYADRCSVQWHRVCVYPDRLGTVALNNVKTGTILYLEGNLETKVFCDPITGLVRRIREIAVRSSGRLLFLGNDANAPKLGEVKGVGYF

SEQ ID NO: 304806 - protein, 91 aa, Zea mays
  Clone ID: MRT4577_41054C.1.pep
NSIFPGQGFLFFPPPLFYHIKGWNQKGGSLVFFPLYPPWQNPPPSPPKKKVGALKKKTKKKKKKKKKKKKKKKKKKKKKKKKKKNKKKKKK

SEQ ID NO: 304807 - protein, 145 aa, Zea mays
  Clone ID: MRT4577_41055C.1.pep
AGVTTQSTFFFFFFFFFLFFFFFFFFFFLGKPNHPTKKKPIKQGPKGKQKGKKAFWVGGGGKTRRPHKQMTGPPTAPKRGGVPTAKGRIPSPWGAGNGGTKGGTKPGVYRVLYGAGGKMHPRTDSPPLSARRQAVRSGGAPRGGP

SEQ ID NO: 304808 - protein, 68 aa, Zea mays
  Clone ID: MRT4577_41056C.1.pep
PASFIYAQAYCIHETDPPTFLSEHKGGLQARVQTKSQTHLRASHTDPYTNACSTLPAEKGLKKAIMTS

SEQ ID NO: 304809 - protein, 672 aa, Zea mays
  unsure (1)..(672): unsure at all Xaa locations
  Clone ID: MRT4577_41057C.1.pep
MVNVNLDWRAAVPHPDDRVEYELWTNSNDECGPRCKLHRNLLRWASLPMRRSSHAMGAQAFRLLLLLLLAAAAAEARFVVEKNSLMVTSPTSLRGRHDSAIGNFGIPQYGGSMAGAVVYPKDNAKACDDFDGRHPFRAKPGAMPTFLLIDRGECLFAKKVWNAQNAGASAVLVVDDKDEPLITMDLPREDDEASKYIQNITIPSALIDEKFGDQLKKAVKDGEMVNVNLDWREAVPHPDDRVEYELWTNSNDECGPKCDMLMNFLKEFKGAAQLLEKGGYSQFTPHYITWYCPQAFVISKQCKSQCINHGRYCAPDPEQDFSIGYEGKDVVVENLRQLCVFKVANENKKPWVWWDYVTDFHIRCPMKEKKYNKKCAETVIKSLGLDVKKVDKCMGDPNADSLIVVADVAAGSYVVYKYRXGHTWTPRLELSWRSICHLTIKERSQIIHMTKIVHKCADHYVVGPYGLXDTNADRRELYKQKLQANNSLIFRVQKSVICLIVYLEQFHFTYDCNXCENAXLRFLLTSIHRFLVSNVXCWPVASPCNTSPPVFLRTARLKLTTFCSTFYFVXTCSIHEFSWNIGNNNXSSILDLLYIREHDTCISKTAVQAKAAWAAVWGILIVVAVVAAGSYVVYKYRLRSYMDSEIRAIMAQYMPLDNQGEVPNHTHDEDRS

SEQ ID NO: 304810 - protein, 451 aa, Zea mays
  Clone ID: MRT4577_41058C.1.pep
QGPRAGPHPDDRVEYELWTNSNDECGPKCDMLMNFLKEFKGAAQLLEKGGYSQFTPHYITWYCPQAFVISKQCKSQCINHGRYCAPDPEQDFSTGYEGKDVVVENLRQLCVFKVANENKKPWVWWDYVTDFHIRCPMKEKKYNKKCAETVIKSLGLDVKKVDKCMGDPNADSDHPLLKMEQDAQIGKGSRGDVTILPTLVVNNRQYRGKLERKAVLKAICAGFEETTEPNVCLSDDIETNECLNDNGGCWQDKSANVTACRDTFRGRVCECPTFNGVQFKGDGYSNCEPAGPGKCLINHGGCWHETRNGKTFSACQESGDGKCLCPAGFRGDGVKKCEDIDECKEKKACQCPECNCKDTWGGYDCTCSGDLLYIREHDTCISKTAVQAKAAWAAVWGILIVVAVVAAGSYVVYKYRLRSYMDSEIRAIMAQYMPLDNQGEVPNHTHDEDRS

SEQ ID NO: 304811 - protein, 101 aa, Zea mays
  unsure (1)..(101): unsure at all Xaa locations
  Clone ID: MRT4577_41059C.1.pep
FPLPXXFXXCPLPXXXLLLXXXXXFPPXCCXGFXPCPXSLPSRPVXLXPXXSXPXSCXSPPGVXXFXAXLSLXXXALXXSLXXXXXPASXXXXCCXXGPPL

SEQ ID NO: 304812 - protein, 143 aa, Zea mays
  Clone ID: MRT4577_4105C.1.pep
GRVGKKKLRMAQQSNSHVQQSKIGSGEGDCVATPAPPSIEASPALPVDCDDGEPSLNLKSASLSSSAGSKGLDELPPAFKEANQTVDGSEAVAAKSDAPEIGCQVPGSSPLHDKGSESSGSPVKDTPEAGIRLPGSDNSTIAF

SEQ ID NO: 304813 - protein, 41 aa, Zea mays
  Clone ID: MRT4577_41060C.1.pep
NRSCPLKKKKKKKKKKKKKKKEKKKKKKKKKKKKYSALLPL

SEQ ID NO: 304814 - protein, 63 aa, Zea mays
  Clone ID: MRT4577_41061C.1.pep
NELQPVSTPRRLHICSPRGEKSGMAYSYVVHTLVEVEFSSWGSSLILHISFGTAHAHRLTRAD

SEQ ID NO: 304815 - protein, 98 aa, Zea mays
  Clone ID: MRT4577_41062C.1.pep
VITTRMVLRDEERMANFMDGFLPGMKAQGTMPMVNKRFYGGGSPQRGIRPHVAGDALVLLDSGRGGVVISLLNLTAQPIGLGTLQDSTPQGRKSRPGR

SEQ ID NO: 304816 - protein, 54 aa, Zea mays
  Clone ID: MRT4577_41063C.1.pep
HRCRSAGTDHSRYRSAGTEHRCRSAGTEAQRRQMMWRQPAATKQRTLLDWRLSA

SEQ ID NO: 304817 - protein, 275 aa, Zea mays
  unsure (1)..(275): unsure at all Xaa locations
  Clone ID: MRT4577_41064C.1.pep
ARIRLLAKHRSDIRELIGVSGAIPALVPLLRSTDPVAQESAVTALLNLSLEERNRSAITAAGAIKPLVYALRTGTAPAKQNAACALISLSGIEENRATVGAPSAKPXSPRVGRFINAAGTTGFPTGKRAVSATQLIXERAVSAGAIVPLVHLIGERGSGTCEKAMVVLGSLAGIAEGREAVVEAGGIPALVEAIEDGPAKEKEFAVVALLQMCSDSPHNRALLVREGAIPPLVALSQSGSARAKHKAETLLGYLREQRQGVACRAGAVAATSLAR

SEQ ID NO: 304818 - protein, 85 aa, Zea mays
  unsure (1)..(85): unsure at all Xaa locations
  Clone ID: MRT4577_41065C.1.pep
TQRPWRGRRSIDILGDVHAAKXRGRPYVIVFVGVNGVGKSTNLAKVAYWLLQHNLSVTLAACDTFRSGAVEQLRTHARRLQNLAS

SEQ ID NO: 304819 - protein, 301 aa, Zea mays
  unsure (1)..(301): unsure at all Xaa locations
  Clone ID: MRT4577_41066C.1.pep
MVSLAGSQIPSPSPGQSPCAAARPQRRQGHSMRTIRSALLQPDSSPGSPSPRDGGADAGDSDIENLTDSVIDFHLRELAATAGPAGAIKPLVYALRTGTAPAKQNAACALLSLSGIEENRATIGACGAIAPLVALLSAGSTRGKKDALTTLYRLCSARRNKERAVSAGAVVPLVHLIGERGSGTCEKAMVVLGSLAGIAEGREAVVEAGGIPAXLVEGIEXDGPAKEKEFAVVALLQVCSDSPRNRALLVREGAIPPLVALSQSGSARAKHKAETLLGYLREQRQGFGCRAGAVVATSLAR

SEQ ID NO: 304820 - protein, 71 aa, Zea mays
  Clone ID: MRT4577_41067C.1.pep
MLRQIIGQAKKHPSLIPLFVFIGTGATGATLYLLRLALFNPDVCWDRNNPEPWNKLGPNDQYKFYSVNVDY

SEQ ID NO: 304821 - protein, 81 aa, Zea mays
  Clone ID: MRT4577_41068C.1.pep
TRQGTRESVFSFIAKPQNQAPGALVPYTHQNREAKTPRRGRAKQILKNHGPGVINSTQGPGTPRGGPLSGTGWAPTVCTPL

SEQ ID NO: 304822 - protein, 84 aa, Zea mays
  Clone ID: MRT4577_41069C.1.pep
EIFKNPPPGVSAGGKEGEKFFLGGVSPGGTPLGGAPPPPRGGPQGPPPPFFLGVFFPPRGGVKKSEPLHSSAYILFICSKRHLV

SEQ ID NO: 304823 - protein, 137 aa, Zea mays
  Clone ID: MRT4577_4106C.1.pep
MQYGAAAAEQAWSYMPVVAPSSAVETAAERVERLASESAVVVFSVSTCCMCHAVKRLFCGMGVHPTVHELDHDPRGRELERALACLLGASGASAAGAPVVPVVFIGGRLVGAMDRVMAAHINGTLVPLLKDAGALWL

SEQ ID NO: 304824 - protein, 138 aa, Zea mays
  unsure (1)..(138): unsure at all Xaa locations
  Clone ID: MRT4577_41070C.1.pep
CVLLARPPFFCFFFFFFPRVCPALXXGPFPPSLSRWVPXXGXAFLXPRRAGPXXXFVXXXLLXXGXXXXXLAARPSXAXXXRXLXXPLXGFPXGALXVXALRFCPVFFXXGXXXFPLXWLFCWLCLSSSXXLPXATPV

SEQ ID NO: 304825 - protein, 106 aa, Zea mays
  Clone ID: MRT4577_41071C.1.pep
KKKKKKKRKKPFTISGSGRRLTISFPESILAYRDTTVIDCLIPALLPSDSGSGSMRLWSPFLLPLLCLPGRVGSEDYSDAPVIVRGSETIASTSDEFVCASFAWGP

SEQ ID NO: 304826 - protein, 302 aa, Zea mays
  unsure (1)..(302): unsure at all Xaa locations
  Clone ID: MRT4577_41072C.1.pep
HALRALQYMDEKVTYPGATNQKEGRSNSILRDVFIAHVPVKNGNLRPKCIYTALMLRRMMDAIVNSDTFDDKDYVGNKRFELSGQLISLLFEDLFKTMNSQAVERMNKNSDKTHSSPLDFSQLIMQDSITFGLERAISTGNWDIKRFRMHRKGVSQVLSRLSYMASLGYMTRITPQFEKTRKTSGPRALQPSQWGMLCPCDTPEGEACGLTKNLALLSHVTTDQEEGPLIYLCYSLGVEDLLSLSSEEIHTPGSFLVMFNGLILGKHKDPQRLXIDLRNLRRSNVIGEFVSIFINEKQHCVH

SEQ ID NO: 304827 - protein, 72 aa, Zea mays
  Clone ID: MRT4577_41073C.1.pep
KSAKSSKPGEPRYHVGFTNKWKMLPESPRLGVKTGNDLLSLRVVGGQRFLGGKCSKRAGWECSKQTLVNGQK

SEQ ID NO: 304828 - protein, 149 aa, Zea mays
  unsure (1)..(149): unsure at all Xaa locations
  Clone ID: MRT4577_41074C.1.pep
PILGSALFPPWLSPVAGRAPKAPGPAGLPGGKRELAPXPPPSLSPPALGPPGLPPLAGGPXGGPFCPGPXFSGAPPLARPPPGLXVSGPPLVGPXPPGGVPPPGGPPPAXPPWGPPGGGPQGKTPPKKKKPQKKKKKIKKKKKKKKKSL

SEQ ID NO: 304829 - protein, 107 aa, Zea mays
  Clone ID: MRT4577_41075C.1.pep
SQERCILGKLRHGRRRRRPGERPREDPAWPRMKERKRRRQECGVVVVRVVGGRPQKKLRCIRCHRVKWFVPGKTGGFFLAWSGMGFSLRGGLMVPRLFCVCQFQADP

SEQ ID NO: 304830 - protein, 73 aa, Zea mays
  Clone ID: MRT4577_41076C.1.pep
QQTLSCPTLARGCCVIAVPCPTETAVERRRPQWSLFARVAARQLADSHCRERNLRQTQPFIVFSFSPPQAQRA

SEQ ID NO: 304831 - protein, 530 aa, Zea mays
  Clone ID: MRT4577_41077C.1.pep
MNGDGSKEDANRRLEWATLNLERGVVVSETTKGDGNGNAGRKAPISIVRLFLACMVSGGIQYGWALQLSLLSPYSQTLGISHSYVSLTWICGPIAGFVVQPIVGYYSDRCTSKMGRRRPFILAGCIIICLSVLVIGFSADIGRRLGDTKEHCSTFTGSRWSAAAVYIVGFWFLDFANNTVQGPARAMMADLAAGQHGPNVGQAIFSLWMALGSVLGYLSGANAKWHDWLPWLKTAACCDACANLKGAFLTAVVLIIISMSVTLWLAGEERLDKESVDTSGGACSAFMDLFKTLKKLPPAMFSVLAVTAVTWLSWFPFFQYNTDWMGREIFHGEPQGAGGKADLYEAGVREGAIGLLFCSVALGVTSFFIPRLCRKLTSRVVWSVSSLMVFVLMTAMVVLGMVSMKGYRPSLAASLSGPDHSFKGGALAIFALIGIPQAVLYSVPWAVASEVATEDGGGQGLTIGVLNIAIVLPQLVIALGAGPIDGAFNKGNTPAFGIGAAFALICAVLALILLPKTRGVSNATVMAGGH

SEQ ID NO: 304832 - protein, 112 aa, Zea mays
  Clone ID: MRT4577_41078C.1.pep
GEPSLAIRHKSGVPQDIVGIETVREILMSFGVAYGLQTNLQKSFFLPIRYDEEMVELAVQTLGCATKSIPTTYFGLTFEYKRLNAGDLLLWIQKTADRLTWWKTNLLNLSKE

SEQ ID NO: 304833 - protein, 67 aa, Zea mays
  Clone ID: MRT4577_41079C.1.pep
MAKRAGTPIPASPDGGMARQARLAKLPCPDRPACRCRGPGTAREPVSRAGPARWHYGPSEYIVEFSK

SEQ ID NO: 304834 - protein, 35 aa, Zea mays
  Clone ID: MRT4577_4107C.1.pep
NQYSDMRGQSSMVQVHHDQGLQTVPYVVDLHRRSG

SEQ ID NO: 304835 - protein, 134 aa, Zea mays
  Clone ID: MRT4577_41080C.1.pep
GVLFVLFFEKDAPFLTRFLLVVYGGLSLDGLSVDGGRLSATLGALGAGNVHFARCSSDVPGVFVHRDLMVSMGFGGHGDLSNAFISRPVWSPLASGHDAIVLCRDGSVELGGIQILQGKRARPSVFDRMGVTGG

SEQ ID NO: 304836 - protein, 109 aa, Zea mays
  Clone ID: MRT4577_41081C.1.pep
FKWTTLLIPPTTVLVINLVGIVAGVSYAINSGYQSWGPLFGKLFFAIWVILHLYPFLKGLMGKQNRTPTIVIVWSVLLASIFSLLWVKIDPFISPTQKALSRGQCGVNC

SEQ ID NO: 304837 - protein, 151 aa, Zea mays
  unsure (1)..(151): unsure at all Xaa locations
  Clone ID: MRT4577_41082C.1.pep
PRTSLLEPQGGGTSTRGAEAEQHTPHQACPAHNRPPNHPTADDRSRNGHHTTPAPDRDAGGDRPKGRRPARRPPPGRGDEPWHPAGLGRHGRGVQQHDXKEKFEEXDTXSRAGANHHHHHXHHXGHRXXGRETRXRGGXQHXDRRXPXAQG

SEQ ID NO: 304838 - protein, 43 aa, Zea mays
  Clone ID: MRT4577_41084C.1.pep
VVFLGSSVHIEQSNPNQSLSNQSSAALMRSTPEQDNATTVNLP

SEQ ID NO: 304839 - protein, 89 aa, Zea mays
  Clone ID: MRT4577_41085C.1.pep
RVQATAMRSANRRYSSAMLQTKIRQREPPCHSRSKCISRGGERTVSHSQSVNSPRRRSAARMWRRWRTWSWGWGLHISPRDARACNQQP

SEQ ID NO: 304840 - protein, 126 aa, Zea mays
  Clone ID: MRT4577_41086C.1.pep
ILYDCINSYKLSTAIFFFFFYVSLFCTFFFLAGGGQRPVLSVSFLCLCYLFLFYDSVSCGSGFIGVVSFFSCGCFYFLLFFYILNPHFSCCTVILRNVWGLSHSYNLLNIPSFFFTKDLAFTFFLV

SEQ ID NO: 304841 - protein, 114 aa, Zea mays
  Clone ID: MRT4577_41087C.1.pep
AWRAHHYSVTGVSLRPQGVKNQDLSARDTSSSCYAPKRSVPCYALSSGSAPQCAVNISATPCLLLTDSVTGDYIHDYTDHLIHAFIHGPPRRHIRASLDDHIHGGGGEPLHTHL

SEQ ID NO: 304842 - protein, 86 aa, Zea mays
  Clone ID: MRT4577_41088C.1.pep
RTRGSGAPAPASTASRWRRAAPAATAASTRTAATRGQGAATARTMVGSGRRRRGVRGATASSELCYARHRQRGLVCSGQDGGTYVS

SEQ ID NO: 304843 - protein, 53 aa, Zea mays
  unsure (1)..(53): unsure at all Xaa locations
  Clone ID: MRT4577_41089C.1.pep
MCGVLGGFFLFFPGSGRYVAPFGWVSSCVGTFHXXGXXGCVSSTLIFPFXLGI

SEQ ID NO: 304844 - protein, 57 aa, Zea mays
  Clone ID: MRT4577_4108C.1.pep
FFFFFFFGLETVPKKPLTSPPQKKSSKLEPQLKAGDFKQTLGSNRVHRNWPNQRGKL

SEQ ID NO: 304845 - protein, 57 aa, Zea mays
  Clone ID: MRT4577_41090C.1.pep
GLRFLYVQADDLLVLAVHLNPRLFRLYKINASAHYVWSQSVYGGGFVAPMDFKKKTK

SEQ ID NO: 304846 - protein, 203 aa, Zea mays
  Clone ID: MRT4577_41091C.1.pep
SPPKFQKGVLRTNCIDCLDRTNVAQYAYGLAALGYQLHALGSVESPEVHLDSPLSRHLMHFYERMGDTLALQYGGSAAHNKIFSAKRGHLKFAIQSQEFFRTLQRYYSNAYMDAYKQAAINLFLGYFQPQVGKPALWEPESGDEHVLDDETSKLMKRARSDGSILNKSKPSISSNGPNGILNLAFTGSKNEGQHPNRSSDTAL

SEQ ID NO: 304847 - protein, 450 aa, Zea mays
  unsure (1)..(450): unsure at all Xaa locations
  Clone ID: MRT4577_41092C.1.pep
GLVGGRVGAICGKDIMLTLIARRSRHYAGTRYLKRGVNEEGRVANDVETEQIVYENMLGPWQISSVVQNRXAIPLFWSQETSKLNLKPDIILHEKDKNYEATRLHFENLRKRYGNPIIILNLIKTREKRPREIILRWEFDRAIKIINSGLPGEDHLRYLHWDLHKNSQSKSTNALQVLLKVAFEALNLTEFFYCQVSPDQRAKGSPNLSPTLKIGFGHHACDDKNCGNADYVDDLDDISQEDTCGSSDPGNGIAEDKSEVNGSAQIKPPKFQKGVLRTNCIDCLDRTNVAQYAYGLAALGHQLHALGSVESPEVHLDSPLSRHLMHFYERMGDTLALQYGGSAAHNKIFSAKRGHLKFAIQSQEFFRTLQRYYSNAYMDAYKQAAINLFLGYFQPQVGKPALWEPESGDEHVLDDETCKLMKRARSDGSILNKSKPSISSNGPNGATVLQ

SEQ ID NO: 304848 - protein, 54 aa, Zea mays
  Clone ID: MRT4577_41093C.1.pep
MELEVGAPSPARYLVGAAIMMAGVVLPLAYMIFRSKRSPSSASAAGPSSFSKQT

SEQ ID NO: 304849 - protein, 54 aa, Zea mays; identical to SEQ ID NO: 304848
  Clone ID: MRT4577_41094C.1.pep

SEQ ID NO: 304850 - protein, 99 aa, Zea mays
  Clone ID: MRT4577_41095C.1.pep
SERELTHTLLLSALVCYLIIHTSRCALYVCVPYKLAPIELSVFLHMKVVNKSVCCPRKVRWIDCFCGYMKGLRLALWLVIKMVILMEATGYSGPTLPQY

SEQ ID NO: 304851 - protein, 237 aa, Zea mays
  Clone ID: MRT4577_41096C.1.pep
MAVRWPSPAVAALWIGASLLVLCTLMASSASAQAPPPQVRKVPKGSNLVVIKPGVGKRNSKFTCTDTKKKRPGCEATCPSRCPKECLVLCPSCMTFCLCDFYAGASCGDPRFTGGDGNNFYFHGKKNQDFCILSDDDLHINAHFIGNHNPATSRDFTWIQAVGVMFAHHRLHLGAVRSAHWDSAVDHLDLAFDDERIDLAPADGARWSSASVPGLSITRTAQANNVVVELKGVFRIV

SEQ ID NO: 304852 - protein, 136 aa, Zea mays
  Clone ID: MRT4577_41097C.1.pep
NNSSLARSPLPPSLCPGFPGKPTPRSKSSEATEIKDGAGGGCAFAGEVPGGGSDHDGRRGAPAGVHDLPQQAFAVLRLRRGALLLLQADVGTKGSSDLSEWVNRSPSPDACHSVCFGTARSSNCFSRLGIITSNTS

SEQ ID NO: 304853 - protein, 236 aa, Zea mays
  Clone ID: MRT4577_41098C.1.pep
MAVRWPSTAVAAFVIGASLLVLCMLMAPSASAQQHKVVPKVPKGSSVVVIRPQFGKRNSQFTCTDTKKKRPGCQATCPNRCPKECLVLCPTCMTFCLCDFYAGVSCGDPRFTGGDGNNFYFHGKKNQDFCILSDDDLHINAHFIGNHNPATSRDFTWIQAVGVLFAHHRLHLGAVRSARWDSAVDHLDLAFDDERIDLAPADGARWSSASVPGLSITRTAQANNVVVELKGVFRIV

SEQ ID NO: 304854 - protein, 95 aa, Zea mays
  Clone ID: MRT4577_41099C.1.pep
GSRLAKGPLEKMLLDKLHTQQALLYCALMKHPLKKVANLMLADFYVCSNSRCSSLPPSVYRFCLPYCMKVTNPISSWQLILLRHCVQSLSFMLCL

SEQ ID NO: 304855 - protein, 637 aa, Zea mays
  Clone ID: MRT4577_4109C.1.pep
MVYRKREKSVCWLQPSRMLSLPRTAAAVTVYALVALIAGAGAVAAAAGGGEQPLSRIAIHRATVAPQPGAFVDASPALLGREGEDREWVTVTYSNPRPSKDDWIGVFSPANFNDSICPPENEWVEPPLLCTAPIKFQFANYTNRDYGNTGKGSLRLQLINQREGFSFALFSGGLSNPKLIAHSKSVTFINPKTPVYPRLAQGKSWNEMIVTWTSGYGTNEATPFVRWGIEGQIQTLSPAGTLTFSRDTMCGPPARTVGWRDPGFIHTSFLKDLWPNLLYTYQVGHRIFNGSIVWGHQYSFKAPPYPGEDSLQRVVILGDMGKAEVDGSNEFNDFEPGSLNTTNQLIKDLKNIDVVFHIGDITYANGYLSQWDQFTAQVEPIASTVPYMVGSGNHERDWPGSGSFYANLDSGGECGVPAQNMFYVPAENREQFWYSTDYGMFRFCVANTELDWRPGTEQYRFIEHCLSSVDRQKQPWLIFLAHRVLGYSSATFYADEGTTEEPMGRESLQPLWQKYKVDIAMYGHVHGYERTCPVYENACVAKGSDLYAGAFTATTHVVVGGGGASLADYTAARARWSHVRDRDFGFVKLTAFNHTRLLLEYKKSRDGSVHDHFTISRDYRDVLACGVDNCPSTTLAS

SEQ ID NO: 304856 - protein, 43 aa, Zea mays
  Clone ID: MRT4577_410C.1.pep
NKNDICECWRNHSKIINYCAFLSIIGLGVHTTHLITIRWSLKY

SEQ ID NO: 304857 - protein, 61 aa, Zea mays
  Clone ID: MRT4577_41100C.1.pep
YSEVVEAPLIPAFGHPNSVLTQSPIHTVKSKRIVFISICILGSCRKLCSDCVVVRVSSLVR

SEQ ID NO: 304858 - protein, 36 aa, Zea mays
  Clone ID: MRT4577_41101C.1.pep
FPNRSLDSSAVTERTHCSHTFSQYICLDISCLAKNK

SEQ ID NO: 304859 - protein, 79 aa, Zea mays
  unsure (1)..(79): unsure at all Xaa locations
  Clone ID: MRT4577_41102C.1.pep
IPYGKGRARALPXGCVXGVKSLKRGGGTRGDPQGGCRFLKSLAKRVKRVKMGPVAPIPGKWGVSVGFPIRMSPDCNKIS

SEQ ID NO: 304860 - protein, 49 aa, Zea mays
  Clone ID: MRT4577_41103C.1.pep
ELYCLEHGIHADGQMPGDKTIGGGDDALNTLLSETVAEKHAPRAGYVER

SEQ ID NO: 304861 - protein, 59 aa, Zea mays
  unsure (1)..(59): unsure at all Xaa locations
  Clone ID: MRT4577_41104C.1.pep
EVVRWLANRHGVAVXPGSASGGPXHIRISFGGLKEEDTRLAAERLRRGLQELVADGPVQ

SEQ ID NO: 304862 - protein, 156 aa, Zea mays
  Clone ID: MRT4577_41106C.1.pep
MNRLLQIAFPNEVDGFHDQLLKVQDNIPICASIIGQRLALYSLEAGPEWIKERVRDLVKNRALLVDALSPLGDGNVRGGQGAIYLWAKLPDTCSDDFEVVRWLANRHGVAVIPGSASGGPGHIRVSFGGLKEEDTRLAAERLRRGLQELVADGTVQ

SEQ ID NO: 304863 - protein, 49 aa, Zea mays
  Clone ID: MRT4577_41107C.1.pep
PGPFPPLGFLKKKKKKKKKKKKKKKKKKKKKKKKKKKKKKKKYSALLPL

SEQ ID NO: 304864 - protein, 129 aa, Zea mays
  unsure (1)..(129): unsure at all Xaa locations
  Clone ID: MRT4577_41108C.1.pep
AAATNQNQAAGGARESRQRAGRAPGRPTGSEEPAKGXXPXXQRAXEXQKHEPXXAXDGRRXAXEKGXRXPQKERTKTTNXXXXTXRNQXEKDKKXGXXGPDDKXQREGXAXNEXGKAGKQDRXGRXDKN

SEQ ID NO: 304865 - protein, 194 aa, Zea mays
  unsure (1)..(194): unsure at all Xaa locations
  Clone ID: MRT4577_41109C.1.pep
MTSTYAYNCFMYDGMEHYCLXYAHIVNLFSFSKAYGMMGWRVGYIAFPNEADGFHDQLLKVQDNIPICASIIGQRLALYSLEAGPEWIKERVRDLVKNRALLVDALSPLGDDNVRGGQGAIYLWAKLPDTCSDDFEVVRWLANRHGVAVIPGSASGGPGHIRISFGGLKEEDTRLAAERLRRGLQELVADGTVQ

SEQ ID NO: 304866 - protein, 99 aa, Zea mays
  unsure (1)..(99): unsure at all Xaa locations
  Clone ID: MRT4577_4110C.1.pep
TLTNSWYEDALHTTAPEDKELAVEQTELLMCTFCRPNRQGQHGHILNQSARAIVXNLRCFTGLQLTTFRVGLAEANTDFELVSKDCMPITGKTAFHLLS

SEQ ID NO: 304867 - protein, 232 aa, Zea mays
  Clone ID: MRT4577_41110C.1.pep
MGSFVKLARRAVETDAPVMVKIQELLRGAKDVMSLAQGVVYWQPPESAMAKVEKIIREPTLSKYGSDDGLPELREALFEKLRRENKLTKSSVMVTAGANQAFVNLVLTLCDAGDSVVMFAPYYFNAYMSFQMTGVTDILVGGSDPKTLHPDVDWLEKVLKENDPIPKLVTVVNPGNPSGAFIPRPMLERISDLCKNAGAWLVVDHTYEYFMYDGKEHYWLEGTHIVTSSHLK

SEQ ID NO: 304868 - protein, 72 aa, Zea mays
  Clone ID: MRT4577_41111C.1.pep
RTGERDSTRSGTGDHCAYSSKSWSASSPPPPKLTRSRGCRSGRPDRPYTPPSYDYAPETSTAISPSSQSGYG

SEQ ID NO: 304869 - protein, 65 aa, Zea mays
  Clone ID: MRT4577_41112C.1.pep
FVQYLTDTNHNQSLDLKKPISCGGLPCLLRSSLRALTTPAAHVPFQQRRRGPAPPPAAARPRCCR

SEQ ID NO: 304870 - protein, 395 aa, Zea mays
  Clone ID: MRT4577_41113C.1.pep
MGSFAKLARRAVETDAPVMVKIQELLRGAKDVMSLAQGVVYWQPPESAMDKIEKIIREPIVSKYGSDDGLPELREALLEKLSRENKLTKSSVMVTAGANQAFVNLVLTLCDAGDSVVMFAPYYFNAYMSFQMTGVTDILVGGCDPKTLHPDVDWLEKVLKENEPIPKLVTVVNPDAWADAWVIPRPMLERISDLCKNAGAWLVVDNTYEYFMYDGMEHYCLEDAHIVNLFSFSKAYGMMGWRVGYIAFPNEADGFHDQLLKVQDNIPICASIIGQRLALYSLEAGPEWIKERVKDLVKNRALLVEALSPLGEDNVKGGEGAIYLWAKLPDSCSDDFEAVRWLANKHGVAVIPGSASGGPGYIRVSFGGLKEEDTRLAAERLRRGLQELVTDGMVK

SEQ ID NO: 304871 - protein, 65 aa, Zea mays
  Clone ID: MRT4577_41114C.1.pep
RPGTHFAIPHHAEAERPTQNPTPPPATASSDSLPTTAYTSDQVTTAQTADPKPRESGASRDPAMC

SEQ ID NO: 304872 - protein, 130 aa, Zea mays; identical to SEQ ID NO: 255009
  Clone ID: MRT4577_41115C.1.pep

SEQ ID NO: 304873 - protein, 60 aa, Zea mays
  unsure (1)..(60): unsure at all Xaa locations
  Clone ID: MRT4577_41117C.1.pep
DEXQHVMPITITAIMAHSSGRRSVSYLSSQRFIHGERNWPLPLFYNIFCNKNPYFFNSIK

SEQ ID NO: 304874 - protein, 62 aa, Zea mays
  Clone ID: MRT4577_41118C.1.pep
GEYGNTLLEKSDYLTSEAKASNIENRLPADTTNSLNYSKYDRVKTTPLSLLSNTNVQPSERQ

SEQ ID NO: 304875 - protein, 116 aa, Zea mays
  Clone ID: MRT4577_41119C.1.pep
RACGRPDASRSGRARAWSSRRCRRWRRTSNFRVRAFQAVEVAVRGFFFAYRQLVAVMGTAEALGNRALFVPAEGMDPLAQMFLEPPYYPSLDAAKTFLADYWVQQMAEASAPSRQS

SEQ ID NO: 304876 - protein, 863 aa, Zea mays
  unsure (1)..(863): unsure at all Xaa locations
  Clone ID: MRT4577_4111C.1.pep
MSFGGMFDGAGSGVFSYDATGGGTGMHNPGRLVPAPPLPKPGGFGATGLSLGLQTNMEGAQLGDLGRMGLIGGGGSGSGGDGDSLGRGREDEIDSRSGSDNVDGASGDEIDPDNSNPRRKKKRYHRHTPQQIQELEAVFKECPHPDEKQRMELSKRLNLESRQVKFWFQNRRTQMKTQIERHENALLRQENDKLRAENMTIREAMRNPICANCGGAAVLGEVSLEEQHLRIENARLKDELDRVCALAGKFLGRPISSGSSMSSSLQGCSGLELGVGSNNGYGLGPLGASALQPLPDLPSSHGGIPDPGEQLRLPMGIGALDVARQQPALLGIDRTVLLELALAAMEELMKVAQMDEPXWLRRPDGSGLEALNLDEYHRAFARVFGPSPTGYVTEATREAGVAITSSVDLVDSLMDAARWSEMFPCIVARASTTDIISSGMGGTRSGSIQLMHAELQVLSPLVPIREVVFLRFCKQHAKGLWAVVDVSVDAILRPDGGHHHAQNGGGAGYMGCRLLPTGCIVQDMNNGYSKVTWVVHAEYDEAVVHQLYRPLLQSGQALGARRWLASLQRQCQYLAILCSNSLPARDHAAITPVGRRSMLKLAQRMTDNFCAGVCASAAQKWRRLDEWRSGEGGDAAGNGGSAAAGEGEEKVRMMARHSVGAPGDPPGVVLSATTSVRLPATSPQRVFDYLRDEQRRGEWDILANGEAMQEMDHIAKGQHHGNAVSLLRPNATSGNQNNMLILQETCTDPSGSLVVYAPVDVQSMHVVMNGGDSAYVSLLPSGFAILPDGHCQSPNTAHQGSPSCGGSSSSSSTGSLVTVAFQILVNNLPTAKLTVESVETVSNLLSCTIQKIKSALQASIVTP

SEQ ID NO: 304877 - protein, 496 aa, Zea mays
  unsure (1)..(496): unsure at all Xaa locations
  Clone ID: MRT4577_41120C.1.pep
MATPKLSPVSPVRRDGNDEPCAPSSPSSSPVSPVQRDGNDKPCAPSSXLLLLVDRSXAQDAYEQHLRLPELSSLWTAGCFPEWAGEGLVKPALQALEVTFRLASLALSDPRGHAGRRELARRLESLAAREVELVSALCEGDDRGAPLAELSASGGVLPRERSASEVVVWQLPGSAAAVVCRASEASLLPRLAAWEKSEALAARITYAVEGQMQGCAFTLGLGEPNLAGKPVLEYDRVVRPHELHALKPDPAPEPMSGYRNRELETLFTMYQILESWLRVASQLLTRLXERIEDKCWEAAAGDCWILERVWKLLADVEDLHLLMDPDEFLRLKSQLAVRAAPGSESASFCFRSTALLHVASATRDLKKRVPWVLGVEADPSGGPRVQEAAMKLYHSRRRGEGEEAGKVDLLQAFQAVEVAVRAFFFGYRQLVAAVMGTAEASGNRALFVPAEEMDPLAQMFLEPPYYPSLDAAKTFLADYWVQLQQMAEASAPSRQS

SEQ ID NO: 304878 - protein, 133 aa, Zea mays
  Clone ID: MRT4577_41121C.1.pep
KQSDINSTVTTNAHKQHHMSKGHMTYTSASFAYRLSHISPNPDSSDHDLLTARTEVDKAARASPYIYSGGRRLVCLGEHLAYLHIKAIWTHLLRNFELELVYPFQENDCHDMVDGIKADVMVHYKRRKLDVDN

SEQ ID NO: 304879 - protein, 468 aa, Zea mays
  Clone ID: MRT4577_41122C.1.pep
MATPDLSPVSPVRRDDKQCAPSSSSCTILRVQDASAAEAYEQYLRLPELSSLWEAGCFPEWAGEGLVKPALQALEVTFRLASLALSDPRGYASRRELARRLESLAAREVGLVSALCEGDRSAPLAELGASGGVLPRERSASEVWQLPGSAAAVVCQVSEASLLPRLAAWDKSETLAAKIMYAIESQMQGCAFTLGLGEPNLAGKPVLEYDRVVRPHGLHALKPKPAPEPKSGYRNRENETLFTMYQILESWLRAASQLLARLNERIEAKNWEAAAADCWILERVWKLLADVEDLHLLMDPDDFLRLKGQLAVRAAPWSDASFCFRSRALLHVASATRDLKKRVPWVLGVEVDPNGGPRVQEAAMMLYHSRRRGEGEEAGKVELLQAFQAVEVAVRGFFFAYRQLVAAVMGTAEASGNRALFVPAEGMDPLAQMFLEPPYYPSLDAAKTFLADYWVQQMAGASDPSIQS

SEQ ID NO: 304880 - protein, 86 aa, Zea mays
  Clone ID: MRT4577_41123C.1.pep
MFWRLQICFFIEEMRKYPVHSNGLLDPPKVLCDIVESLIGAIYLDSNFDQEEVWRVFRTLADPLIGLETLGKHPVSELFEFCQKTH

SEQ ID NO: 304881 - protein, 88 aa, Zea mays
  Clone ID: MRT4577_41124C.1.pep
MAKGSGLIWATAEDLARNRPVVLSLYRQILRALNSPELPLGHAARLAKKAECRAIFIFGAEERSLHNIRDLVEAARHTLGLLNRGRLP

SEQ ID NO: 304882 - protein, 59 aa, Zea mays
  Clone ID: MRT4577_41125C.1.pep
LQRGLEDIPAWTKVLSCKEVGLCAGRVLCCLYPFVTALTYLPGGGGGGGGKEPLTVSST

SEQ ID NO: 304883 - protein, 61 aa, Zea mays
  Clone ID: MRT4577_41126C.1.pep
HHLLLFVTMHIVHIKSACSVPTSHMTDCCTASSILNLDIYGVLQTKTKSRQIYMIDYMAFL

SEQ ID NO: 304884 - protein, 45 aa, Zea mays
  Clone ID: MRT4577_41127C.1.pep
RCDRGHQGVLVNLARADQAMRSHRRPDHQGRALVEGHYYFTDRSC

SEQ ID NO: 304885 - protein, 160 aa, Zea mays
  unsure (1)..(160): unsure at all Xaa locations
  Clone ID: MRT4577_41128C.1.pep
MTKRCMRESAWQKLRMSLDLPVPVTVNXSYNTXSKNLYIISNKVIKERLNHLPTACDDHMVMCTAKKTNTDLRNKAMPSFIVRQSKTGHRKXDISYMYFYXNAGMIANPKAEMKRYDITGPIYKEXLILWPMIASHRKSYLLTHMRNMHILQYHHLIISC

SEQ ID NO: 304886 - protein, 129 aa, Zea mays
  Clone ID: MRT4577_41129C.1.pep
GRQFPGTPARPKNPRWGETFAVLSSFVVPGPSPGVGVIWLALVVIEGPLCLPFVSVFSLPLVVSFSFHELEPGLHPFDLGPAYLFFPPGWGWTPVPFVPICLGHFAISFFALQDEVELKKDQRNKEISG

SEQ ID NO: 304887 - protein, 65 aa, Zea mays
  Clone ID: MRT4577_4112C.1.pep
CIFFLFFSFFFFKKGKTIPQKNEEKQTVKKKLEPLLVSVMTLTRELGGYDRWATRTPYPGNERST

SEQ ID NO: 304888 - protein, 132 aa, Zea mays
  Clone ID: MRT4577_41130C.1.pep
KSLPPSICLSTLSWSPFPCLRRRRSHGVSVLPPPPTLESPRSSEISTFCTGIDREQNPDHFVRGPRPPSSQVSSPPARMDYRHVLPVADPILRRRGRGIWRRRRLLLTERIERCNESTMTGLGGDNTAHGRN

SEQ ID NO: 304889 - protein, 154 aa, Zea mays
  unsure (1)..(154): unsure at all Xaa locations
  Clone ID: MRT4577_41131C.1.pep
MAEGSSSHRRSAFSPGLAVLLSGDEAKISSQKSHLVSYHDEIGHQAVERTIEHIFDLPHKSVVRPPGPIDTGFVHSVVRNQARKFDLDWENCIRGYHRSVFIVDKGAGQRKVVLDDSSICGSFRNVRXPSLVEXSAPFSSXRANACVWKXKWMY

SEQ ID NO: 304890 - protein, 117 aa, Zea mays
  Clone ID: MRT4577_41132C.1.pep
WDPRGRPGRLPIQRQPSSHTQQRKTRRRSPDTPFSIIVTSRTHKVIDGLPGQPITIRQCLQRPASTSPRAKRHHLSRELPHRHPACYHWCHYILTDHQTASSTVAPRVEGLVPLRHT

SEQ ID NO: 304891 - protein, 127 aa, Zea mays
  unsure (1)..(127): unsure at all Xaa locations
  Clone ID: MRT4577_41133C.1.pep
DNTPQQATPHAQGAQHRTHGPPQSXPGTDQKATRXQSTKSPGRTAEQSRTEGAPPQXPXRARAKPXPRRAANXRPPPPRXXGSXVKKKKEGRRGGDGKQQRQRPPRPRQGKNHNDARAAQGDGPPPP

SEQ ID NO: 304892 - protein, 63 aa, Zea mays
  Clone ID: MRT4577_41134C.1.pep
LIKLSKSTTHSNACKLIDGSPVNQFAPGPPSRLRGGGGSTDGQIILFGRALLEDGVALEEARP

SEQ ID NO: 304893 - protein, 51 aa, Zea mays
  Clone ID: MRT4577_41135C.1.pep
PSFSHALLRLMAGPYEFVSVLLAVIMSPQDDCFSVDMSLQSMFLIPSSSQS

SEQ ID NO: 304894 - protein, 487 aa, Zea mays
  Clone ID: MRT4577_41136C.1.pep
SARGQMHFSRMFVAIRACVDGFLTGCRPYLGVDSTHLTGKYKGQLATATAIDGHNWMYPVAYGIFGKETNSNWAWFMAQLKRAIGNSPGLTIHTDACKGLAYAVNKVFKGDVEHRECFRHLMANFRKKIKGDVLKYMWPCAWACTDHMYDTLMEKIAASSPKAIHFLNNNHKLKWSRSKFSKECKVDYVNNNISECFNNWIKDYKDLPVADLMDKIREKIMEKIYTRQEIANRMEGRILQSVIRELNMKSRGLHYEIVKSGLLSAEISGITKEGKNWRVAADIKKRTCGCGQWQISGKPCTHAIALFGKLRNLNIEDFVDDYYSIERFKMAYQFVVAPMGDKTQWPKFDPGFKMVPPKLERPAGRPRKKRIKASGEAGKRGPYQCKRCFQFGHIEKGCTATQAELEQELPPPHPKKPKKQRKSKSEAVEVSMVDVEPSQTDGVPKVMSSPGVTTRSMSSASPTSPGPTTRRKASISPGGINRRLIIS

SEQ ID NO: 304895 - protein, 115 aa, Zea mays
  unsure (1)..(115): unsure at all Xaa locations
  Clone ID: MRT4577_41137C.1.pep
QNGLSVCVAPMGDKTQWPKIDPGFKMXPPKLERPAGRPRKKRIKASGEAGKRGPYQCKRCFQFGHIEKGCTATQAELEQELPPPHPKKPKKQRYCNTTCSLCSALFPMSNPCCTS

SEQ ID NO: 304896 - protein, 77 aa, Zea mays
  Clone ID: MRT4577_41138C.1.pep
LLKRKTLMDDTCTADIRQARRMHLAHKLGRHHGPRGGPAKERLRRGSRILLLNKLRIYALDRLPVLLSETREPVNRL

SEQ ID NO: 304897 - protein, 82 aa, Zea mays
  Clone ID: MRT4577_41139C.1.pep
YPRCRPVAGLLQFLKFRICISLSLKSTISDSFTLDQVFSKFQTVLGPGDLTKLILLIYLYNFVIWIIFKMLIDQNLPEFKVG

SEQ ID NO: 304898 - protein, 466 aa, Zea mays
  unsure (1)..(466): unsure at all Xaa locations
  Clone ID: MRT4577_4113C.1.pep
CSNSLPARDHAAITPVGRRSMLKLAQRMTDNFCAGVCASAAQKWRRLDEWRSGEGGDAAGNGGSAAAGEGEEKVRMMARHSVGAPGDPPGVVLSATTSVRLPATSPQRVFDYLRDEQRRGEWDILANGEAMQEMDHIAKGQHHGNAVSLLRPNVSTTTALLLTSIFTAVFTVAINESSLXFFWSHIVMQYCFSSSVVQYRGAGFVFICMHCSIAWVEGHHDTEKRTNRKRLKHWQFTRNWSMVDICEGKLLSLLCVWNHAGCPCPCLHHPSLIYXTQQSIFRILSFNXQFKSLINTKIVXILYISKQHAVXKFAIHIFYSLHYPXEFLMRCVXATSGNQNNMLILQETCTDPSGSLVVYAPVDVQSMHVVMNGGDSAYVSLLPSGFAILPDGHCQSPNTAHQGSPSCGGSSSSSSTGSLVTVAFQILVNNLPTAKLTVESVETVSNLLSCTIQKIKSALQASIVTP

SEQ ID NO: 304899 - protein, 105 aa, Zea mays
  Clone ID: MRT4577_41140C.1.pep
GCCTGDALCAYCLPAHRDHHVVQIRRSSYHNVIRVSEVGKLIDISHVQTYVINSAKIVFLNGRPHARHGKGVTNTCQICCLSLPDSFRFCYLGCQPVGCSGTRAD

SEQ ID NO: 304900 - protein, 69 aa, Zea mays
  unsure (1)..(69): unsure at all Xaa locations
  Clone ID: MRT4577_41141C.1.pep
RSGRLVLGPVRGVPPPGLCAGAGVEVGRREDLESHAVLVHRVHLGRDARREPSAXGKRRGENPRWKTGP

SEQ ID NO: 304901 - protein, 90 aa, Zea mays
  Clone ID: MRT4577_41142C.1.pep
GLAGPFPRGAHAPPLLCWPLHCCVGATKPSAPTTAHSRCRLALSVRRAQIWPHRPAWVYYRVATARSRARAASRLPGDLPPTPGSMIWLG

SEQ ID NO: 304902 - protein, 51 aa, Zea mays
  Clone ID: MRT4577_41143C.1.pep
ASTIHQSGYLQLHEPMTTCLTWRIPSLIIHYHMLQRDITCTGLTLIIYNAY

SEQ ID NO: 304903 - protein, 61 aa, Zea mays
  Clone ID: MRT4577_41144C.1.pep
TTAVCISRAHFYRQFRVFVIIIFIAYISIERLSCNNLSQCIYVCALLRRHMNDTASMIHRR

SEQ ID NO: 304904 - protein, 221 aa, Zea mays
  unsure (1)..(221): unsure at all Xaa locations
  Clone ID: MRT4577_41146C.1.pep
MESIDLKVQVVESSFIAPSEPTPSKGLWLSSLDILLVNIGHTPTIYLYSSNDVAAADFFDVGRLKKAMAKALVPFYPLAGRLGNNSDNGRTEISCNGEGALFVVAHADGDLTIDDIKKLKPSPELRRLFIPLIEPSSIIMAIQVTSLKCGGXVVLGTAIHHAAADASSAFHFFQTWSAFCKHGDRAAVAVELPCHDRTLLRARSPPTVHPDALLTLLPRLT

SEQ ID NO: 304905 - protein, 69 aa, Zea mays
  Clone ID: MRT4577_41147C.1.pep
FLKKKKKKKKKKNKKKKKKKKKKKKKKKKKKKKKKIKKKKKKKKKKSFYLPGGPLKGANFENFNKIGGG

SEQ ID NO: 304906 - protein, 40 aa, Zea mays
  Clone ID: MRT4577_41148C.1.pep
MPRPNLQAVAPAYVLTGSVMHSARFWSVPVPETIDLDEET

SEQ ID NO: 304907 - protein, 56 aa, Zea mays
  Clone ID: MRT4577_41149C.1.pep
PTRPATSATKDTCKPSTPVNIFSLRRSDVPHFDCDLDSDPSSLTLLYRFLTASILY

SEQ ID NO: 304908 - protein, 263 aa, Zea mays
  unsure (1)..(263): unsure at all Xaa locations
  Clone ID: MRT4577_4114C.1.pep
MSASPSEGDEALINEVLTDDELRAVLTRLRPESERDAFGLVCRRWLRIQSSERRRLRARAGPSMLRRLAARFPGILELDLSQSPSRSFYPGVIDGDLDVIAGGFCNLRVLALQNCKGITDVGMVKLGEGLQCLQTLDVSHCKKLSDKGLKVVASGCQKLRQLHIAGCRLITDLLHAVSKKXCLNLEELGAAGCNSITDAGISALADGCHKMKSLDISKCNKVGDPGICKIAEVSSSSLVSLKLLDCSKVGNKSIYSLAKFCCN

SEQ ID NO: 304909 - protein, 62 aa, Zea mays
  Clone ID: MRT4577_41150C.1.pep
IRDFTCIVTVHFVNGFIMYTASIMSWVFPVQSTSFISLSLVSHNGESEMVVFLSALSLDVHT

SEQ ID NO: 304910 - protein, 69 aa, Zea mays
  unsure (1)..(69): unsure at all Xaa locations
  Clone ID: MRT4577_41151C.1.pep
VFNNTLVFTPFSVLNRPGKRFFLFXXXALNMGGGGCXHXVSLTPTLYLPDTSLLVCGGLGHLGSXWVLL

SEQ ID NO: 304911 - protein, 99 aa, Zea mays
  Clone ID: MRT4577_41152C.1.pep
DLWADLCAWARQESSVRSPSEFRRPQSRRVLAHVARYRPRVTLRYAYKLVHHASRLVRLNNRAPRSRRPLIPVNFNNDALLPSRQRQLNDALGLLALAP

SEQ ID NO: 304912 - protein, 59 aa, Zea mays
  Clone ID: MRT4577_41153C.1.pep
CEQFGIGSLNQNKISWMKHLHIGPPSSCVREPPPQKYACQISVNGCILPPPKKKKKKRP

SEQ ID NO: 304913 - protein, 77 aa, Zea mays
  Clone ID: MRT4577_41154C.1.pep
GAVDVCSWCAWVVFRHSWLVLGVGPDSGGGDCLRSWVVRVCGRWGWVPPRVSSTGPSWGFGCCGGDTRGGKVGLEPN

SEQ ID NO: 304914 - protein, 57 aa, Zea mays
  Clone ID: MRT4577_41155C.1.pep
IQSDTKIVSLWFVQFTSEHYSDRKQKPARPERTAIFSALKERAEDCRPRGVMAARNA

SEQ ID NO: 304915 - protein, 101 aa, Zea mays
  Clone ID: MRT4577_41156C.1.pep
MLGPFAAIDCSHSLLGRFAFSDITDMFEGNDRYLFFHGWLLCFWFMVVLLFGLIPLISFFDDQHSISFPSFLAMFSIPFNLAHIACTFVLFKQCVCPLTKR

SEQ ID NO: 304916 - protein, 82 aa, Zea mays
  Clone ID: MRT4577_41157C.1.pep
TTKWSGPTETQQLKASGCYRDFGQSDKVLMKTWDYKHKDASWAIEHGATRHLLRSCTHTARCRAAGSSPMHCLPLRDDSIEG

SEQ ID NO: 304917 - protein, 110 aa, Zea mays
  unsure (1)..(110): unsure at all Xaa locations
  Clone ID: MRT4577_41158C.1.pep
MLVENHWLGGGLAWAIYFPGFHNAFNTCGGGGXSKIILXLYTQRGGGFPFPNISTXERXMRNAILGMNGKELDGRNITANEAHSRRGRGGVGHGGYCGGPGGGGYRGGGR

SEQ ID NO: 304918 - protein, 84 aa, Zea mays
  Clone ID: MRT4577_41159C.1.pep
MKATIILLLLAQVSWAGPFQQRGLFDFMLEDEASGIGPEVPDDRDFEPSLGPVCPFRCQCHLRVVQCSDLGLDKVPKDLPPDTT

SEQ ID NO: 304919 - protein, 325 aa, Zea mays
  Clone ID: MRT4577_4115C.1.pep
MSFGGMFDGAGSGVFSYDATGGGTGMHNPGRLVPAPPLPKPGGFGATGLSLGLQTNMEGAQLGDLGRMGLIGGGGSGSGGDGDSLGRGREDEIDSRSGSDNVDGASGDEIDPDNSNPRRKKKRYHRHTPQQIQELEAVFKECPHPDEKQRMELSKRLNLESRQVKFWFQNRRTQMKTQIERHENALLRQENDKLRAENMTIREAMRNPICANCGGAAVLGEVSLEEQHLRIENARLKDELDRVCALAGKFLGRPISSGSSMSSSLQGCSGLELAVGSNNGYGPGPLGASALQPLPDLLGAGLPGPVGSAAMRLPMGIGALDVALH

SEQ ID NO: 304920 - protein, 67 aa, Zea mays
  Clone ID: MRT4577_41160C.1.pep
LLKDQLSCNPHHAELQTQTTTYTTFPNIMLQCKNLNSYHAISTNNTYTNSYAPYTLNLNDLHSYNIY

SEQ ID NO: 304921 - protein, 93 aa, Zea mays
  Clone ID: MRT4577_41161C.1.pep
CELVTPLIMYKLVKLRFSSGITEVKVLVENTKKELCYWSFFFIYSVSQRWMALGFAGISRSRPSQQSFRWTSLTSSPSCQSRSLDHPSFRLGA

SEQ ID NO: 304922 - protein, 84 aa, Zea mays
  unsure (1)..(84): unsure at all Xaa locations
  Clone ID: MRT4577_41163C.1.pep
VLVWEPRGVGARLAVLVPGPLVCGVRWAVLRLSALLRGLEXRRLRPRRPALRRAXSLRPFRRPPRGPRENARRARPRAGFRAYV

SEQ ID NO: 304923 - protein, 181 aa, Zea mays
  unsure (1)..(181): unsure at all Xaa locations
  Clone ID: MRT4577_41164C.1.pep
MCDAAAVAAPRYRGVRKRPWGRFAAEIRDPAKRARVWLGTFDSAEAAARAYDVAARALRGPLARTNFPXAHLPPSRRPAPTCSSGSTVESSSGPRXGTPGPXAHRGRAAAKPRPPRQAPPPPTDADCHSDCASSASVVDDGDDASTVRSRARPSLDLNLPAPLDLDGGHDLGFCSDLRLCL

SEQ ID NO: 304924 - protein, 178 aa, Zea mays
  unsure (1)..(178): unsure at all Xaa locations
  Clone ID: MRT4577_41165C.1.pep
MCDAAPRYRGVRKRPWGRFAAEIRDPAKRARVWLGTFDSAEAAARAYDVAARALRGPLARTNFPALATTSRRPAPTCSSGSTVESSSGPRXPGTPGQAAHRGRAAAKPRRPPRQAPPPSTDADCHSDCASSASVVDDGDDASTVRSRARPSLDLNLPAPLDLDGGHDLGFCTDLRLCL

SEQ ID NO: 304925 - protein, 35 aa, Zea mays
  Clone ID: MRT4577_41166C.1.pep
SSCNKQVFSLFFRLIGSFKEILVVTKLCYCIFQKS

SEQ ID NO: 304926 - protein, 98 aa, Zea mays
  Clone ID: MRT4577_41167C.1.pep
GKGEAERRLLGSSPQPEKGGCRSSPLRWPKPGGAQSARVIHQVSQMNFRCTHQRPMLPHARASQLGLLQSGPLGSRDCLSPRAPQYSTVTEPCAGRRG

SEQ ID NO: 304927 - protein, 79 aa, Zea mays
  Clone ID: MRT4577_41168C.1.pep
SVLHVILLTENMKQKRTQAGGGHMGHQAPLPPPDQTTPTLFSPRHWQAGPGSPRNSHCYSYDTLAHTQRWRETDTFAED

SEQ ID NO: 304928 - protein, 49 aa, Zea mays
  unsure (1)..(49): unsure at all Xaa locations
  Clone ID: MRT4577_41169C.1.pep
LGVVIPLKENFVFVVYEXXIYIVFKRITFNCFLPPFFFTKTKKKKKKNK

SEQ ID NO: 304929 - protein, 53 aa, Zea mays
  Clone ID: MRT4577_4116C.1.pep
KQKMERQGGLITELTHNNLRALTGRLAVCKHGLPPASQNTTTHRERRCAYRSP

SEQ ID NO: 304930 - protein, 414 aa, Zea mays
  Clone ID: MRT4577_41170C.1.pep
MVQIVEHRTGTSVDFLVEEEAAYSTPQVPNRPVPGTAAVHAARQHTTAQTSRTLSRAAPGALSAARELLRHPPSSTASLGARKQWRDDVDRLLGMAHSTSTRARERRQNIEGRNLDQDFTAVAPQTPVGARFQTGVPLAGVGCAALADHLSAASWPSKFQPHLLEKYDGTSSPLEFLQVYVTAIIAAGGNTAVMATYFHVALSGPTRTWLMNLAPGSIYSWEELCAWFTANFTSAYQQHSVEAHLHAVRQEPREALWMFISRFTKVRGTIPRISYASIIMAFRQGVRDEKMLEKLATHDVETVSTLFALADKCARATEGRAWHSAPQTGAAQTGGSGAVPRDGKNKKKGRGHEKPRSTALVVAAATGGRGDHNKRPRPQRGNSGSCPVHPNSRHSTTECREIINLTKRVSERRE

SEQ ID NO: 304931 - protein, 44 aa, Zea mays
  Clone ID: MRT4577_41171C.1.pep
FIVGCFSVYLCFRLSKVHVFQYGCPRCLVICPHFVSVFVVKKKE

SEQ ID NO: 304932 - protein, 161 aa, Zea mays
  unsure (1)..(161): unsure at all Xaa locations
  Clone ID: MRT4577_41172C.1.pep
MNGMPISASSAASVDSGAVAAGTPMKNATAADALAEMARHLTVDTEDTFAGLLELAADDDAEGLRLALERAPPAAADEAGLWYGRRKVLEHRTPLMVAATYGSLAALRLLVSISYVDVNRRSGTDGTTALHCAXSGGSRTAVESVKLLLGAGADANTMDDA

SEQ ID NO: 304933 - protein, 48 aa, Zea mays
  Clone ID: MRT4577_41173C.1.pep
GLDARFRRAGPARERVGIPVDGRSPPAKDGTGSSPKGSAKTWCTSRRA

SEQ ID NO: 304934 - protein, 191 aa, Zea mays
  unsure (1)..(191): unsure at all Xaa locations
  Clone ID: MRT4577_41174C.1.pep
MNGMPISASSAASVDSGAVAAGTPMKNATAADALAEMARHLTVDTEDTFAGLLELAADDDAEGLRLALERAPPAAADEAGLWYGRRKVLEHRTPLMVAATYGSLAALRLLVSISYVDVNRRSGTDGTTALHCAASGGSRTAVESVKLLLGAXADANXMDDAXRRRADVISVAPEMFDAKFXPSDLLGFPQS

SEQ ID NO: 304935 - protein, 95 aa, Zea mays
  Clone ID: MRT4577_41175C.1.pep
FFFVSFFDSTGWGVPCFLFVQLLPFNQVVFAYFVVFLRKSGGGFFHWGGGGNARKRGQGPKMLAFFQTILMKGGGAPQLARGIFFSSEITNDTCP

SEQ ID NO: 304936 - protein, 85 aa, Zea mays
  Clone ID: MRT4577_41176C.1.pep
CQLQGSDGIPANNFLFRYLNPVDVAFKKIVAEDQQVCSSKQCLSLESEANCLLLRCFRLNLACSCNCKERITCGELDLLMNLSSS

SEQ ID NO: 304937 - protein, 99 aa, Zea mays
  unsure (1)..(99): unsure at all Xaa locations
  Clone ID: MRT4577_41177C.1.pep
SGFGRPSVGSTTSILIRIYEAHDVVHIWAVLCLWREPDGNGHPQTDRRECFLSIEKNTGSRVLHLNTIIQTPAAILXWNGYMHKAPRRSLNSTHSKVAS

SEQ ID NO: 304938 - protein, 62 aa, Zea mays
  Clone ID: MRT4577_41178C.1.pep
FWAWAPTLIFRGPKLPRLKMVVLSPPKKVLVNFPGPPLFETVVQESGKVYWGPKNGVFRGPP

SEQ ID NO: 304939 - protein, 74 aa, Zea mays
  Clone ID: MRT4577_41179C.1.pep
LLHGVIGAQRLSTLNTLMVWSLSVNNGHGWPMYIARFDGSISFTILSNSVCFQFSRGYSEISGHSVSQAPHERR

SEQ ID NO: 304940 - protein, 83 aa, Zea mays
  unsure (1)..(83): unsure at all Xaa locations
  Clone ID: MRT4577_4117C.1.pep
ACCXCLLAPXGLXXWVFXXXXXLCWXVWGXXXCXXXLCALRXPCRVXFSCXXXLGLAXXXSLRRPRCSXVAPXFPFLCCLLVS

SEQ ID NO: 304941 - protein, 70 aa, Zea mays
  unsure (1)..(70): unsure at all Xaa locations
  Clone ID: MRT4577_41180C.1.pep
MLNLGGGAKCGACEKTVYHAEEIQCNGRSFHKTCFHCMACRKALDSTTVAAHESEIYCKAGYGRRXGPKG

SEQ ID NO: 304942 - protein, 88 aa, Zea mays
  Clone ID: MRT4577_41181C.1.pep
FQTFRGEKLFWEALFSGGGEDNWGGSPDLGFFIILGGAGHGGGQGDHPGAGSPLGGGPGHGLYKIAVQGNAPLSIKDAGPGVPPERGE

SEQ ID NO: 304943 - protein, 98 aa, Zea mays
  unsure (1)..(98): unsure at all Xaa locations
  Clone ID: MRT4577_41182C.1.pep
NAPPPWEKGKFNTFWRPPPLAIIGDQFXYGDKICGHIVSVRGNQKKISIWPKNAPNXPPQVSIGNQWKELLASKDPIGFIVHDDPKKMDKGLKTRYPV

SEQ ID NO: 304944 - protein, 247 aa, Zea mays
  unsure (1)..(247): unsure at all Xaa locations
  Clone ID: MRT4577_41183C.1.pep
MALSKPLLSRLLPLSLRLRPQARFLCLATPPLTPTPTQIDDQPPADAAAERRRRKRRLRVEPPLSRGPAPQRAPGAPRPASNPNAPKIPEPASVLSGKRLDLHRRILTLIRENDLDEAALLTRHSIYSNCRPTVFTCNAVLAAXLRQARYADLLSLHRFVTQASVAPTVATYNLLLQAYCDCRRPDVALEHFRLLLKDDSPVLPSPTTYRILARSLAENGKLDQALELKDGMLERGLIAPDTRCMLH

SEQ ID NO: 304945 - protein, 167 aa, Zea mays
  unsure (1)..(167): unsure at all Xaa locations
  Clone ID: MRT4577_41184C.1.pep
PTVLPINPLTSLPPPSLPPPRHTSPSPRTGPGGIINGPRRRXSRPPPPPTPRPPPPTSTPSVPPVGSRRRRLPARRAATPAQQRRRHAKGVGVGPSVAHSLHASPPSKVVQLRSSMAPPLLQTRAGALPAKVEALKEARNRRAATKPQKTERWAARSMGLMRNGVVR

SEQ ID NO: 304946 - protein, 81 aa, Zea mays
  Clone ID: MRT4577_41185C.1.pep
LLDQLPRLQSRWSCSPAPVRVLGVCSGGFVRWIRPSFGAGHPGLSVVFIPGLGSFISREFILYAQHFLASAVFHANSTCSP

SEQ ID NO: 304947 - protein, 112 aa, Zea mays
  Clone ID: MRT4577_41186C.1.pep
MDAAAVSSLLCAPGVRAAAKEGGVLNGQHEPEQKKHQGEGDGAFEPDQVGHQVWLKGGQNIKPIQNLEAPPPPPPEKPKKGETPPPPPKKKEEPGPPPPAKGEPPPKEKTPP

SEQ ID NO: 304948 - protein, 69 aa, Zea mays
  Clone ID: MRT4577_41187C.1.pep
CHGKERFPVAAFFLSLSMVPKKSGPGGFPPARLGWTFGLLIRRTFCFTVPLGGRTFFGCPADKRTRAPG

SEQ ID NO: 304949 - protein, 127 aa, Zea mays
  Clone ID: MRT4577_41188C.1.pep
RLGGPCGRLLNASQSLEREGPPGKLYSVSQLVLPSGGFMPIEAAKKAMPKAISVFRKDFLRLVFRKESTVLSPRKGLFWKMFKILPLFFFQNCGFTSPKKMVSPGKPVGHEPLKVQNSPTFWSSSPR

SEQ ID NO: 304950 - protein, 84 aa, Zea mays
  Clone ID: MRT4577_41189C.1.pep
AVAACAVPVMVLHGEERRSDARFAVASPRPRCCARWSRRWGSSCCRGRSRGWQWARPAPRGESAPPRQQRVVMAGSYRVSCCCC

SEQ ID NO: 304951 - protein, 55 aa, Zea mays
  Clone ID: MRT4577_4118C.1.pep
GVAPPPWGSGPLGFLVRTVVSLSSKCHHPYTLCRMIWLENRGVKDCILQQIPPPS

SEQ ID NO: 304952 - protein, 112 aa, Zea mays
  Clone ID: MRT4577_41190C.1.pep
HRSTFHARRQNLYHIVYISHLTTNCYYILIKELHHSILSWLCTHLTQIILIYSTHTFYFMTNLSYIIKILRSVTSFTMSTPNVLIIYILPSYNYYRIFPLSPLNLSYLIPTF

SEQ ID NO: 304953 - protein, 51 aa, Zea mays
  Clone ID: MRT4577_41191C.1.pep
EIVNFCVSHTARGNMLFVWAYTFYYLRTHLRINCVPHSNCKAFLWVKKIQN

SEQ ID NO: 304954 - protein, 188 aa, Zea mays
  unsure (1)..(188): unsure at all Xaa locations
  Clone ID: MRT4577_41192C.1.pep
MPETHPPPPRPVMLADLNFEPAESDGEDRPPTPAPNPPAAAAAPADAADSSTKSGNEEGGLTKTVIATKDTDTVECEDVDQHCQGASAPREEKVXNLKAALVHVARKMPKNAHAHFMLGLMYQRLGQAQKAIASYEKSTEILLQDEEEVRRPDLLSSVRIHHAQCILQASMGDSFDEELETGELDDIL

SEQ ID NO: 304955 - protein, 65 aa, Zea mays
  Clone ID: MRT4577_41193C.1.pep
TCKKGRPARRLSGFCKHSEELGPGIKIFAWRPQVGKPHSSCSHVSIYGGYEILYMRGAPDINWIL

SEQ ID NO: 304956 - protein, 112 aa, Zea mays
  Clone ID: MRT4577_41194C.1.pep
ISPDESSCMSVAATYIYVGKQAFKNRNCHISFFSKFMCMQGNVFDSCMISYFLHAQTWGLGCTRQPGLASGCNGRIGLDQVAGVVGLGLLIYLPYIYNHNSCCCPLFKLKIP

SEQ ID NO: 304957 - protein, 157 aa, Zea mays
  unsure (1)..(157): unsure at all Xaa locations
  Clone ID: MRT4577_41195C.1.pep
ALFPVVEVVVIRKCPKLPTLLRAPKVKELRIYEENGHISVGGIRCMTSLSTLHLIGVKPDGMERWDHPSSVVDMKLWRCNLFLQVPTTCTXALWVCFGQLQDLSVTGCKELVYWPEKVFQSLISLRMLCIRYCNNLIGYAVANGPDQATSRKEPAFA

SEQ ID NO: 304958 - protein, 104 aa, Zea mays
  Clone ID: MRT4577_41196C.1.pep
ALEGVKVLTLGPAFIFLDFHVGKNNDGVSSFSSTECAREFSRGHTQRNFNLRSSLETKIPWGFLRFFSVSQSRTYYSYKIFSYLWVVLSPWVCLPLFQTNLNIE

SEQ ID NO: 304959 - protein, 45 aa, Zea mays
  Clone ID: MRT4577_41197C.1.pep
CVLSKSSALMVAVLRVGEDAIILLQPPHCFDACFIYVQIPYIICF

SEQ ID NO: 304960 - protein, 55 aa, Zea mays
  Clone ID: MRT4577_41198C.1.pep
MDAFLQRLKRLDAYPKVNEDFYKRTLSGGIVTLVAAVVMLLLFISETSKRLSGGW

SEQ ID NO: 304961 - protein, 66 aa, Zea mays
  Clone ID: MRT4577_41199C.1.pep
KKKKNKKKYKKRQQKKIYRFKKYTKSKIEQKLKLGAFFKGTIFIFSWLRIISFIKVSPKINLRDVF

SEQ ID NO: 304962 - protein, 124 aa, Zea mays
  Clone ID: MRT4577_4119C.1.pep
SRAAPAGGFGLGCPPGLFPGGSCWAFCGAALLVGFAPWPAGCPCAGFLWVSGSRCGMLPLGARVASGYSLVCVGCVVLAVPGVAFRFAQGSFRDLVLLGCALGGWLRPLFFKSPPGRPLAIWPI

SEQ ID NO: 304963 - protein, 96 aa, Zea mays
  Clone ID: MRT4577_411C.1.pep
PLSILAATKPYQPPSIPSSQGANPCRSDHRLMVRISNRFGGGKEGGRKGGEPKVVDFRIVLRDFAQTSVKWGVTVITGNKSNVTGVPMNMTATVTE

SEQ ID NO: 304964 - protein, 78 aa, Zea mays
  Clone ID: MRT4577_41200C.1.pep
GRVGFSIFFLVYIQLLLAGVYLIDGGFNIVEYIQYPTGTSRTPHAEANEKPFAEKERVPSRNCVQKIWDHIITTETRT

SEQ ID NO: 304965 - protein, 141 aa, Zea mays
  unsure (1)..(141): unsure at all Xaa locations
  Clone ID: MRT4577_41201C.1.pep
IRHEERANLIRCCSYAHSLSVTRPRPHQIALRESINRPPTPSAVEDRDKEPSLVEIINIKFVESGYXEKLTELLRERLVECGWMDEMKAFCRDYVRKKGRNNVRVDDLIHVIVPKGRASVPASVKAELLQRIRSFMATTLR

SEQ ID NO: 304966 - protein, 55 aa, Zea mays
  Clone ID: MRT4577_41202C.1.pep
VHRQMLATEICNVVACTDRVPLRIYQLLIAVKPGGMSPHSPRSVIHDTSRRGELS

SEQ ID NO: 304967 - protein, 79 aa, Zea mays
  Clone ID: MRT4577_41203C.1.pep
SSFLSSNTTQGCIYSSTSSSYRRAFFYIRAPKSNSTSTNHIRFYSPIHIPLCTFYTFILSCQIHHIISLLNAITLLTLT

SEQ ID NO: 304968 - protein, 139 aa, Zea mays
  Clone ID: MRT4577_41204C.1.pep
MLRSKFCSCPFFRLRKRILILMRWGDGFRRESINRPPTPSAVEDRDKEPSLVEIINIKFVESGEKEKLTELLRERLVECGWMDEMKAFCRDYVRKKGRNNVRVDDLIHVIVPKGRASVPASVKAELLQRIRSFMATTLR

SEQ ID NO: 304969 - protein, 252 aa, Zea mays
  Clone ID: MRT4577_41205C.1.pep
RPGYTKLLASNEKLTAMADERSPLIQRVDVRPHRDRYPYHRLRFFCTTLLSATIIAGGLAAIFFLAVAPPTQDDEASVSRVSALLSSSAKQVPEGWARKTALDFEDLQKTLLQTPSAEKAEYWSRYYTSGPHLAGKNFSQALWTRERWEEWGVASTIVDYEVYINYPKGHRLALMERIGDRHEKKDVSAGSEGAWKVTYEALLEEDVLDEDKSSQLADRVPTFHGYSASGNVTAPYVFVTMAHTRILRKLRQ

SEQ ID NO: 304970 - protein, 81 aa, Zea mays
  Clone ID: MRT4577_41206C.1.pep
LRRSHGQAPPAPFLLPRRKHSPSPFDHLLPTHHLLGDYNHYLYPSALEARHPIHAALVNAIAFLYLLGARITTGRSIPMPH

SEQ ID NO: 304971 - protein, 146 aa, Zea mays
  Clone ID: MRT4577_41207C.1.pep
GPSRPAGLTQLLHYFPNKQPPNHPSKCLLPMPTSPTRVSSVRSATPSPTPPTTSPRPSRVTPLRLPRRPTSSRPRATSLERTPSPTASPALLVPLATRSTRPSTRALLRPTSVPSKRLTRITCERQHNTSSTYGRRLHNAVRLEYR

SEQ ID NO: 304972 - protein, 57 aa, Zea mays
  Clone ID: MRT4577_41208C.1.pep
REHILVLILITTTRLQPVAGLQNSFLHIQTCNCINCIIIKAKLTSNLPNYTTTIILK

SEQ ID NO: 304973 - protein, 231 aa, Zea mays
  Clone ID: MRT4577_41209C.1.pep
MNYLRSRSLKRLLSLGRRSNADECAEECVDVDPPPNKPTWRCFSYEELNQATNGFHQDNMVGKGGYGEVYRGVLDDGSAVAVKRLAPTAAADEKKEKDFLTELGTVGHVRHPNVSALLGCCVDRGLHLVFHFSTRGSVSANLHDLKLPAMSWKQRHGIAVGTARGLRYLHKGCARRIIHRDIKASNILLTADYEPHISDFGLARWLPSEWTHHAIAPIEGTFGCLAPEYFT

SEQ ID NO: 304974 - protein, 45 aa, Zea mays
  Clone ID: MRT4577_4120C.1.pep
MDPKGKGMVVNDNEKESIFNEPRDDKANDSGLSQKKKDGKKKRRI

SEQ ID NO: 304975 - protein, 97 aa, Zea mays
  unsure (1)..(97): unsure at all Xaa locations
  Clone ID: MRT4577_41210C.1.pep
DGQQTRRRADDADLCCCGENDVFINGAGTAENEEETGTGTSSSGHVRGACAVCGDNTADVLLLPXXHLCACAPCXAPARACPACGCAKNGSVCVNFS

SEQ ID NO: 304976 - protein, 162 aa, Zea mays
  unsure (1)..(162): unsure at all Xaa locations
  Clone ID: MRT4577_41211C.1.pep
ARRWPSLVLPARPYLCPLPGRHPQAAPLCSAMAXAHHAVRIPAPALAHLRHHXHHFSPMAPGSPTPLPPCPLLQLAVAASLSPWPRLCGCVLSSECSICRGPALSARFGVGFSCRSNAPLFPLSCRRRSVTSPRLVFTLTKESQEDVKKQAPGRYLKCSAKG

SEQ ID NO: 304977 - protein, 294 aa, Zea mays
  Clone ID: MRT4577_41212C.1.pep
IGTLEAGRALRISSLFCQPLFIPRTTNAAQPWAQLQLGSVQQYVLGLAIASRTVDTQNPIAEGEKAETVATASCGGPMDPSYHGGGAAGGSADDHGQTLWDWTVEHCEPNDSSHADATKFVWDCLNQDDDELMGLLGNQTPLRDCRDFFADLGDFTCKETLDLEESRESKRRRTLEYPLESSQSEVGTHETGSPFVTPEVAEISLLCTDKPQSLNCDMHHTLNNLDLSDEAPYQQEDILLEHCSYGTAVYLEPDQTPCSQQSIACINDQAGISGTSEIGPMTESFIMQETRKLS

SEQ ID NO: 304978 - protein, 89 aa, Zea mays
  Clone ID: MRT4577_41213C.1.pep
LASTPRVCRTLPLSLLGHAVHPLDLRLAHQVKHAPPHSSVRVMDSEAHRTHGDLGQSTVSLMLRHVLPPIRFEGQMLVDQPDGNRIALA

SEQ ID NO: 304979 - protein, 125 aa, Zea mays
  Clone ID: MRT4577_41214C.1.pep
IRGGSMQGGRGHPHRLLEHHSLQPHHPHNFYRPHHTLISCLQCNQHSIGNLLWRTYPPLTRVYWVSSLNIDASFSISLAASWGGTYSEHFCAFAGTISPYGHTVRSPLMPGKPSHSLFNIHTINA

SEQ ID NO: 304980 - protein, 70 aa, Zea mays
  Clone ID: MRT4577_41215C.1.pep
SRNHPSQHTLTTHVAGAADHAMGQDRVGPRQASCSRVACQDVMGQTHQVLKGSRVANTYTRSLADTQKQA

SEQ ID NO: 304981 - protein, 74 aa, Zea mays
  Clone ID: MRT4577_41216C.1.pep
AAPFVSVTSSELCVVSGVRRLHVRICCLCVGSARRRCLRAGAGLPAGAWVKSCHRRHTSAIQSSAIQRKEMLTY

SEQ ID NO: 304982 - protein, 120 aa, Zea mays
  Clone ID: MRT4577_41217C.1.pep
CGARGGRSSIPSTPLVFSRRHPLIFPHSPLTMSRVRMGRTTKPRRSGNNVALEGKGQDANEKSLTITSTAQLKILMNRYCDYLNEDLNALGVLTDAPMFLADDMHDYARTMDQEVRDQMP

SEQ ID NO: 304983 - protein, 107 aa, Zea mays
  Clone ID: MRT4577_41218C.1.pep
PLFFFFFSLFPFYFFFFIFFFFFLFFVLFFLLIFFSCLMPEERKRDINLRGLFLEPTSGKKDEPSLNCSPQPQVGEKKRGIPTQPPPPRRGERVITPKKEFPPPQRT

SEQ ID NO: 304984 - protein, 48 aa, Zea mays
  Clone ID: MRT4577_41219C.1.pep
GFIAYLGKELRVFLKQDENHPFRNGITTYASSDLETNALQIEESLDKL

SEQ ID NO: 304985 - protein, 91 aa, Zea mays
  Clone ID: MRT4577_4121C.1.pep
PAVRSESGSPPTNERDLATWARAEHEHRGGGKEVSHQILHGYCRTKELSRFKVPRSYYQWRQPFPATTTGKIRREELKRELLAAIRLPSNL

SEQ ID NO: 304986 - protein, 712 aa, Zea mays
  unsure (1)..(712): unsure at all Xaa locations
  Clone ID: MRT4577_41220C.1.pep
MAALLQSSFLFPHATFPNPKPHHLAAAAATRPESPNVAPNPASARLRRLIAREDLAGAARLVELSASRDGEAPDVYLCTKLIRNLCRRGRTSDAARVLRAAEGSGSPVDVFAYNTLVAGYCRYGHLDAARRLIGSMPVAPDAYTYTPLIRVLCDRGRVADALSLLDDMLLCGCQPNVVRYTVLLEAMCKNSGFEQAMAVLDEMRAKGCTPNIVMYNVITNDVFREGCVDDARDILNRLFSYGCQPDTVSYTTLLKGLCASKRWDDVEELFAEMMEKNCMPNEVTFDMLIRFFCRGGMVERAIQVLQQMTEHECATNTTLCNIVINSICKQGRVDDAFKFLNNMGSYGCNPDTISYTTVLKGLCRAERWNDAKELLKEMVRNNCPPNEVTFNTFICILCQKGLIEQAIMLIEQMQEHGCTVGVVTYNALVNGFCVQGHIDSALELFRSMPCKPNTITYTTLLTGLCNAERLDAAAELVAEMLHRDCPPNVVTFNVLVNFFCQKGFLDEAIELVEQMMEHGCTPNLITYNTLFDGITKDCSSEDALELLHGLVSKGVSPDVITFSSIIGILSKEDRVEEAIQMFHLAQDIGMRPKALVYNKILLGLCKRHEIDNAIDFLAYMVSNGCMPNESTYIILIEGLAREGLLKEAQDLLSMLCSRGVVSKNLIEEXSTEVEDQTVHTLWLMMNPGIKCLFIIHSEWIDSLVSFKLQCFM

SEQ ID NO: 304987 - protein, 87 aa, Zea mays
  unsure (1)..(87): unsure at all Xaa locations
  Clone ID: MRT4577_41221C.1.pep
MALPNQGTVDHPRFKLVIXRDGGTGKTTFDKRPLFGEVEKKSEPTLGGEVHPVDLTTNCGKIRFYCWDPAGQEKFGGLKDGYYIRGP

SEQ ID NO: 304988 - protein, 104 aa, Zea mays
  unsure (1)..(104): unsure at all Xaa locations
  Clone ID: MRT4577_41222C.1.pep
HLDXRYSEYKRLRAAIDQHEGGLDAFSRGYEKLGFTRSAEGITYREWAPGAYVCSPQVWQSPFKHMIVFMIHLLPCAQYRQIVYTNITILFKAIVYLPDQLIKI

SEQ ID NO: 304989 - protein, 80 aa, Zea mays
  Clone ID: MRT4577_41223C.1.pep
TPSTVHTPGSSIAAFICYSKRRQTKTVWEGGGHAQATAEWDLLLSIYIKAGPPSLRMPTRTLELALLAPMLSSATTTISP

SEQ ID NO: 304990 - protein, 274 aa, Zea mays
  Clone ID: MRT4577_41224C.1.pep
MAAATAAASTMSLLPISQLRQQHGAGAMRRRPWVARRRRYVVPTARLFGPAIFEASKLKVLFLGVDDEAGSKQHGPLPRTYTLTHSDVTARLTLAVSHTINRAQLQGWYNRLQRDEVVAEWKKVRGRMSLHVHCHISGGHFLLDLIAGLRYVIFRKELPVVLKAFVHGDGDLFSRHPELEEATVWVYFHSNLARFNHVECWGPLRDAAAPAEDDSTAPPDASNSKEAGQMMAMCEWPHRCPQQCDCCFPPHSLIPWPNEHDMAAADASGSAQQQ

SEQ ID NO: 304991 - protein, 325 aa, Zea mays
  unsure (1)..(325): unsure at all Xaa locations
  Clone ID: MRT4577_41225C.1.pep
PPAELLRRTGRFAWCPRFACYSWRAAPRRREGSDSTWPPPLLPCPCSRSPSPGSSSSKARAPWSCSGGGGDTSTHSDVTASLTLAVSHTINRAQLQGWYNRLQRDEVVAEWKKVRGRMSLHVHCHISGGHLLLDLIAGLRYYIFRKELPVVXVYVSTCSAAPHAWKHVHDEDAADCDLISPQGPCCVHIIRSFKSSVTGTAQASYLASLLLVQVLEAFVHGDGDLFSRHPELEEATVWVYFHSNLARFNRVECWGPLRDAAAPAPAEDDSTAPAAASIAMEGQMPVGEWPHRCPQQCDCCFPPHSLIPWPNEQDMAAAAGQVRQQ

SEQ ID NO: 304992 - protein, 77 aa, Zea mays
  Clone ID: MRT4577_41226C.1.pep
TIQHQLKRNEETEGVLPIQRRRACRSGAERAKLSYQLKNRQRGPGMQMQVLWCWRHTTARARLQLRTQPNNTLVLVV

SEQ ID NO: 304993 - protein, 62 aa, Zea mays
  Clone ID: MRT4577_41227C.1.pep
NTMLLLIVNFKRRDLLYLSSLIPLTKTWLYILPSIANPAYAILYRMQADEPSFKMCTLEWSS

SEQ ID NO: 304994 - protein, 285 aa, Zea mays
  Clone ID: MRT4577_41228C.1.pep
MAAAASTMSLLPISQPRKQQQQGAGAVVVFQRRPWDARRRRYVVPTARLFGPAIFEASKLKVLFLGVDEGSSKHLHAHHPAPAPLLPRTYTLTHSDVTASLTLAVSHTINRAQLQGWYNRLQRDEVVAEWKKVRGRMSLHVHCHISGGHLLLDLIAGLRYYIFRKELPVVLKAFVHGDGDLFSRHPELEEATVWVYFHSNLARFNRVECWGPLRDAAAPAEDDSAAPADSSNSKDGQMMAMCEWPHRCPQQCDCCFPPHSLIPWPNEHDMATAAAADASGSAQQQ

SEQ ID NO: 304995 - protein, 147 aa, Zea mays
  unsure (1)..(147): unsure at all Xaa locations
  Clone ID: MRT4577_41229C.1.pep
MAAAASTMSLLPISQPRKQQQQGAGAVVVFRRRRRYVVPTARLFGPAIFEASKLKVLFLGVDEGSSKHLHAHHPAPAALLPRTYTLTHSDVTASLTLAVSHTINRAQLQGWYNRLQRDEVVAEWKKVRGRMSLHVHWHISXGGHLLL

SEQ ID NO: 304996 - protein, 50 aa, Zea mays
  Clone ID: MRT4577_4122C.1.pep
TWGKWLFESQDGLGFLLRSPLQWPFLSISLTIMRGSWMGITMVVRPNNVF

SEQ ID NO: 304997 - protein, 46 aa, Zea mays
  Clone ID: MRT4577_41230C.1.pep
IESSRPGHYDIKCAQMRGISPCHTVTKTLTKSLIHTRNNLMYYVST

SEQ ID NO: 304998 - protein, 122 aa, Zea mays
  Clone ID: MRT4577_41231C.1.pep
TVEQTINHIQFCTSLHKSRTCSSRILRMMILCLQHMCVPCRFSIQRSSVLAICTRPCSSPTLTKLLLPIQRRKACKSGAERAKLSYQLKNRQRGPGMQVLCGVGATLLHARGCSYELQLPNQ

SEQ ID NO: 304999 - protein, 60 aa, Zea mays
  Clone ID: MRT4577_41232C.1.pep
RLFVLTGLLLLSFGQHSCCPVPVSASCCPVLVRITAQLCFQCTCTYIHILTTKQQWCTYI

SEQ ID NO: 305000 - protein, 59 aa, Zea mays
  Clone ID: MRT4577_41233C.1.pep
TSSLLKVFRFELIVDWINKIREEGFFTDVWRARVDQILLNSVQKVANVLVYILNPDSLS

SEQ ID NO: 305001 - protein, 45 aa, Zea mays
  Clone ID: MRT4577_41234C.1.pep
KMRQLKDRGTCNRENTPGSSAGPAHANSVPAPGGKGPRSIPSHEL

SEQ ID NO: 305002 - protein, 132 aa, Zea mays
  unsure (1)..(132): unsure at all Xaa locations
  Clone ID: MRT4577_41235C.1.pep
NAIXLKLTWGSRTLETVKREAKRRFAGEARRETXDEVATSSAGCSXXHAGSAVQRICCXGQLPLLLTLQKXXGLSHVEPAYTGKATSLXKXGEENRALGSXSSTXTVRCXMWGGNRXPIGVDTRRRGWCREG

SEQ ID NO: 305003 - protein, 394 aa, Zea mays
  Clone ID: MRT4577_41236C.1.pep
VAFASLSLTHTQTWFFRTRGSVPKKCSLAVAAKDTAFLSVSQKKVQAASLSVRTRVATTAPVATPGSSTAAKDGKKTVRQGVVVITGASSGLGLAAAKALAETGKWHVVMACRDFLKAAKAAKGAGMADGSYTIMHLDLASLDSVRQFVDSFRRAGMPLDSLVCNAAIYRPTARTPTFTADGYEMSVGVNHLGHFLLARLLLDDMQKSDYPSRRLVILGSITGNTNTLAGNIPPKAGLGDLRGLAAGLRGQNGSAMIDGSESFDGAKAYKDSKICNMLTMQELHRRYHEETGITFASLYPGCIATTGLFREHIPLFRLLFPPFQKFVTKGFVSEAESGKRLAHVVSDPTLPKVGVYWSWNKDSGSFENPLSQEAPDPEKAKKLWGITEKLVGVA

SEQ ID NO: 305004 - protein, 59 aa, Zea mays
  Clone ID: MRT4577_41237C.1.pep
ERARVRVPFLSTHRASPKSQTLSQGGGKRRGGSCSGNSYTTMAATLIYFSRPVSTCGPF

SEQ ID NO: 305005 - protein, 231 aa, Zea mays
  unsure (1)..(231): unsure at all Xaa locations
  Clone ID: MRT4577_41238C.1.pep
MVRTKQTARNPSVTCHRLHSLKCRRAGPIVPAVAAAAAGSSSPTSAVFHGECFVVGDNIDTDQIIPAEHLTLVPSKPDEYRKVGSFAFAGLASAAYPTAFVAPAEESSRYAMIVGGATFGRGSSREHAPXVALGAAGARAMFAEGYARIFFRNSVATGEVYPLELTDVGAWKECKTGDVVTVDLANSVFINHTSGKEYKLKPIGDAGPVIEAGGIFAYARKTGMIASKAAA

SEQ ID NO: 305006 - protein, 249 aa, Zea mays
  Clone ID: MRT4577_41239C.1.pep
MAAALSGTAVSTAALLAPIRAPTSAFIRRSQLTCHRLHSLKCRRAGPIVPAAAAAAAGSSSPSSAVFHGECFVVGDNIDTDQIIPAEHLTLVPSKPDEYRKLGSFAFAGLPSAAYPTPFVAPGEESSRYAIIVGGANFGCGSSREHAPVALGAAGARAIVAEGYARIFFRNSVATGEVYPLELTDVGAWKECKTGDVVTVDLANSVFINHTSGKEYKLKPIGDAGPVIEAGGIFAYARKTGMIASKAAA

SEQ ID NO: 305007 - protein, 147 aa, Zea mays
  unsure (1)..(147): unsure at all Xaa locations
  Clone ID: MRT4577_4123C.1.pep
MEGKEEDVRLGANKXTERQPIGTEEYGTDDKDYKEPPPGPLFXAGEIKSWSFYRAXIAEIVATFLFLYISILSDMRVSKSTSXCCTGGIQGIDWPLXRMIFCLVYCIXGSHGGNINPAETCGLVLERNVTLTREELHVVMKSLRAVC

SEQ ID NO: 305008 - protein, 232 aa, Zea mays
  Clone ID: MRT4577_41240C.1.pep
MEGPAAAEAENGGAGKGSGSRFRRVCVFCGSSSGKRSSYRDAAVELGKELVSRKVDLVYGGGSLGLMGEVSEAVHRGGGHVIGIIPTSLMGKEITGETVGEVRAVAGMHQRKAEMARNSDAFIALPGGYGTLDELLEVIAWAQLGIHSKPVGLLNVDGYYDFLLAFIDKAVDDGFIKPSQRHIFVSAPDARELVQKLEGYEAVQDEDPATPKLRWEIEQVGYNASLLAEIAR

SEQ ID NO: 305009 - protein, 116 aa, Zea mays
  Clone ID: MRT4577_41241C.1.pep
KKKYWVLRPPQKTPPGRKTQKSFFFWGKKNKTLGELFFNFSTGHKFIFMGKKNLWGGARQKNICQRFLQFTPKTKRPRVSLFLLLKAKVNKAQIFAILAVTVSKKFGGGARSPTCF

SEQ ID NO: 305010 - protein, 368 aa, Zea mays
  unsure (1)..(368): unsure at all Xaa locations
  Clone ID: MRT4577_41242C.1.pep
GSLAQPGASSAAAFPLSRSHACRPASSIANHRRACSSLVASSVQRHLWPAAPPARHRHALLIFVVVTAAAAGADAQHPPSPGFYPSKRYRARPFSRDFRTLWGAQHQSVSGGGGGVTIWLDSTSGSGFKSRRAFRSGYFGASVKLQAGYTAGVITAFYLSNADAHPGFHDEVDMEFLGTTPGQPYTLQTNVYVLGSGDGGPGRVVGREVKFRLDWFDPTADFHXNYAILWSPTHIIFYVDDVPIRRYPRRSETFPRRPMWVYGSIWDASSWATDDGRYKADYRYSPFVARFSGLLLRACSPRAPPRCRAPSGGPTGGGGGDALSPQQEAAMRWVQRNHMVYNYCLDPKRDHSLTPECIIHHAAAGDTY

SEQ ID NO: 305011 - protein, 109 aa, Zea mays
  Clone ID: MRT4577_41243C.1.pep
MSNGGNRSRGGARFELQLHLSPPPPVARRVEVDGGGDGSDSSSSPSSCVSSDGSPGSKSPMVIGACTRCMMYCMVAKKDFPTCINCKQPCLVDLLHCSGAGGSGTGKAK

SEQ ID NO: 305012 - protein, 50 aa, Zea mays
  Clone ID: MRT4577_41244C.1.pep
CRGIEDRKKRTFLILITNYSRGVACIIYTITMALCLIGTQLYLIILIFLP

SEQ ID NO: 305013 - protein, 89 aa, Zea mays
  unsure (1)..(89): unsure at all Xaa locations
  Clone ID: MRT4577_41245C.1.pep
PHCTTATCRRPSRQAPKTTMDRTKQTARMSTGGKAPRKQLVTKAARKSAPTAGVVKKPHRLGGGTVTLRXIRKYQKRTELPIRKLPLQR

SEQ ID NO: 305014 - protein, 66 aa, Zea mays
  Clone ID: MRT4577_41246C.1.pep
GIRVCTRRVSPSCCLLSQWLNDLALRALYVNRSEVKGCWGGTNMVAECGLRQVEKVPSLLETGFPG

SEQ ID NO: 305015 - protein, 87 aa, Zea mays
  Clone ID: MRT4577_41247C.1.pep
MCLFIQVQSGHVNCAVIPRDGSALREEEVLAHCRRNLASFKVPKKVFITDDLPKTATGKIQRRIVAQHFVQPTSALIVDIGACEGMG

SEQ ID NO: 305016 - protein, 93 aa, Zea mays
  Clone ID: MRT4577_41248C.1.pep
CACHEHWTSRSGRPRVVLVLFDDASTRVGECHDTHTPPPSAIRTQRSVELPWKGFQGRKERSSAQKSKRVIWLTTHARRTVEANELVCFASGF

SEQ ID NO: 305017 - protein, 393 aa, Zea mays
  Clone ID: MRT4577_41249C.1.pep
LCSSRRAGASPHEKWEKKKKTSLVATHCTAPPPPSRTRGTGRARSPRVRIAMATTAFAAARFFPAHLDSSPRIAPHRVGPTANLSFSPLSANSSSLLRLHSPCPSGPGGRLPPPPRSYGGAGGSGDAAHSGGGDGRRGGILGLLLAGWAARVAADPQFPFKVLMEELVGVTACVLGDMASRPNFGLNELDFVFSTLVVGSILNFVLMYLLAPTAGVAAAASSAASALPSHMFEPGAYSLGSRVATIMSKGATFAVVGFAAGLTGTAISNGLIAMRKRMDPAFETPNKPPPTLLNAATWALHMGVSSNLRYQTLNGIEYLLGKVAPAPVFKVSVVALRCMNNVLGGMSFVLLARLTGAQKSDKPATVAEEKERLIAVGNAAADAINEARHGEGK

SEQ ID NO: 305018 - protein, 208 aa, Zea mays
  Clone ID: MRT4577_4124C.1.pep
MRGGAMKALRRSSTSSPPSSPHFHSWIHRRYLLVTSSATSSLSASANSAAEGSDSASVVAASSSPSLDPSSPNMDRGVIKSPWSRRKRKRALTCQHWIRLFSANGKFRDGGRKFLKKVRSGGIEPGIRAEVWPFLLGVYDLNSSEEDRNTIKIKKRKEYEKLRRQCHHVLHCNRGNGLNVINEFLDETSLMGLKGQSHIFHGASKRAV

SEQ ID NO: 305019 - protein, 94 aa, Zea mays
  unsure (1)..(94): unsure at all Xaa locations
  Clone ID: MRT4577_41250C.1.pep
RDTVFXXNGMYSSILFITYNFKKNTCYLLKMLPISFVWSSHQFARXSCLSSVIFSLGYMTYYLHSVNSYFFSNGIIWRPITFCVLSFEGAAAGV

SEQ ID NO: 305020 - protein, 85 aa, Zea mays
  Clone ID: MRT4577_41251C.1.pep
RATGLWRLPEAGGFTSGFSVRPGAGGMRNPAMEADHESDDALREGAGELALGQHCCCGVERVHGSVGDGVGGGCGRTGRGEAAGF

SEQ ID NO: 305021 - protein, 59 aa, Zea mays
  Clone ID: MRT4577_41252C.1.pep
LADYVLSESVKLLKFRFGWNRCWNTTMIHGSVHTPSPSCRMPDGCAARAATIASVGDPG

SEQ ID NO: 305022 - protein, 893 aa, Zea mays
  unsure (1)..(893): unsure at all Xaa locations
  Clone ID: MRT4577_41253C.1.pep
MAAAPPLSADVLSFLTSAPAAPTPVVAAAWGAARAGPVRGKAALRTTRGGRGGVLAPLVGRRPRRTPLSVRCNATSRDGRITQQEFTEMAWQAIVSSPEVAKESKHQIVETEHLMKSLLEQRNGLARRIFSKAGVDNTRLLDATEKFIQRQPKVLGEEPGSMLGRDLEALIQRARDFKKEYGDSYVSVEHLVLGFAEDKRFGKQLFKDFQITVKTLKSAIESIRGKQNVIDQDPEGKYEALEKYGKDLTAMARQGKLDPVIGRDDEIRRCIQILSRRTKNNPVLIGEPGVGKTAIAEGLAQRIVQGDVPQALTNRRLIALDMGALIAGAKYRGEFEDRLKAVLKEVTDSDGQTVLFIDEIHTVVGAGATDSSTDAGNLLKPMLGRGDLRCIGAATLDEYRKYIEKDPALERRFQQVFVDQPSVEDTISILRGLRERYELHHGVRISDSALVAAAVLSDRYISGRFLPDKAIDLVDESAAKLKMEITSKPTALDEIDRAVLKLEMERLSLTNDTDKASRGRLSRLEAELSLLKDKQRQLTEQWEHEKAVMTKIQSIKEEIDRVNVEIQQAEREYDLNRAAELKYGSLNALQRQLQATEKELDEYQSSGKSMLREEVTQDDIAEIVSRWTGIPVSKLKQSDREKLLYLEDELHKRVVGQDPAVKAVAEAIQRSRAGLSDPNRPIASFMFMGPTGVGKTELAKALASFMFNTEEAVVRIDMSEYMEKHSVSRLIGAPPGYVGYEEGGQLTEAVRRRPYSVVLFDEIEKAHLDVFNVFLQILDDGRVTDSQGRKVSFTNSIIIMTSNVGSQYILNMDEEDGSSDSAYENIKRRVMDAARSVFRPEFMNRVDEYIVFKPLEREQINSIVKLQLCRVQKRIADRKXKLDVSPGAIEFLG

SEQ ID NO: 305023 - protein, 41 aa, Zea mays
  Clone ID: MRT4577_41254C.1.pep
LLLAQVKASYARRKSRCWITSISGSCSNGTPCVPNSEYRAA

SEQ ID NO: 305024 - protein, 255 aa, Zea mays
  unsure (1)..(255): unsure at all Xaa locations
  Clone ID: MRT4577_41255C.1.pep
TDKASKDRLSRLEAELSLLKDKQRQLTEKWEHEKSVMTKIQSIKEEXGLPSHNDCECIYRVGSGNRLKSTTCCXIDRVNVEIQQAEREYDLNRAAELKYGSLNALQRQLQTTEKELDEYQSSGKSMLREEVTQDDIAEIVSRWTGIPVSKLKQSDREKLLYLEEELHKRVVGQDPAVKAVAEAIQRSRAGLSDPNRPIASFMFMGPTGVGKTELAKALASFMFNTEEAVVRIDMSEYMEKHSVSRLIGAPPGYVG

SEQ ID NO: 305025 - protein, 253 aa, Zea mays
  unsure (1)..(253): unsure at all Xaa locations
  Clone ID: MRT4577_41256C.1.pep
MEKXSVSRLIGAPPGYVGYEEGGQLTEAVRRRPYSVVLFDEIEKAHSDVFNVFLQILDDGRVTDSQGRKVSFTNTIIIMTSNVGSQYILNMDEEVGSSDSAYENIKRRVMDAARSVFRPEFMNRVDEYIVFKPLEREQINSIVKLQLARVQKRIADRKIKLEVSPGAIEFLGSLGYDPNYGARPVKRVIQQHVENELAKGILRGDFKDEDSIFVDTQVTVPSNGQLPQQKLVFRKVGEQSKPAAEGEKFLPAV

SEQ ID NO: 305026 - protein, 74 aa, Zea mays
  Clone ID: MRT4577_41257C.1.pep
SNPCPAKVFKKSSFFMWWEGHTKMFKGAKFMGVLKKIMASKFGANVPANSDVLVELKKINATLCKIIDLNLKPN

SEQ ID NO: 305027 - protein, 49 aa, Zea mays
  Clone ID: MRT4577_41258C.1.pep
CCNKVIQIERVNSALKMFFVYLYMVMDVILSIYSVKTLSPSLLLKKKNK

SEQ ID NO: 305028 - protein, 120 aa, Zea mays
  unsure (1)..(120): unsure at all Xaa locations
  Clone ID: MRT4577_41259C.1.pep
WMDNEVVNLMLRLFTSCNATLVTLIHENPRYEKMTLEEVLXKFLGHEMMVKDSKHIEDLAQGNVTTMEPQPTALKATSKKEEXPRNKETIEDLGLDDEEIALIIKSFRQILWNQKDKDYK

SEQ ID NO: 305029 - protein, 135 aa, Zea mays
  Clone ID: MRT4577_4125C.1.pep
IRTLRGRIRRCRQRGRRRRGNEEVPAVDPRMKMRGRRRRGGAGSPQSLHRSAPHHLHLLLLKSKLGIRRAPSPPRPLPASGRRASPSTPPAAGAGGRWPMRTRSSARRRVRVDGGFWPPSLERELKARPASRYPM

SEQ ID NO: 305030 - protein, 112 aa, Zea mays
  unsure (1)..(112): unsure at all Xaa locations
  Clone ID: MRT4577_41260C.1.pep
MQAAQGNQGRWPPSNRRIRHEPPAPGNSPEXGKRGERGQLLPGPAXPGPGPSQVRPXPHSPPPGTKKTEGGEPPPKGPTDTGPDPPPXGPPHKDXPPPEGAHLPNRGPAPGP

SEQ ID NO: 305031 - protein, 72 aa, Zea mays
  Clone ID: MRT4577_41261C.1.pep
KKLGPCWLPLLFFKRPACSLFFKFFWWPAAPKFLCWPSIPGLPDRPGVPTGHWLLVPLAPPSLSMWKRPVYP

SEQ ID NO: 305032 - protein, 58 aa, Zea mays
  unsure (1)..(58): unsure at all Xaa locations
  Clone ID: MRT4577_41262C.1.pep
LPRRCVLPVRESVSSSGSPSGVPGAVAPVQQPSHPAAAXWLGLXLLFQILLRILPSSL

SEQ ID NO: 305033 - protein, 77 aa, Zea mays
  Clone ID: MRT4577_41263C.1.pep
GPPFFFFWAKKFLGETPIRRGGLGGPLFAPHFIKRSPPSFLAGWGGPHPFFGPKTRSLARLHGFRHLGPLAPISVGG

SEQ ID NO: 305034 - protein, 50 aa, Zea mays
  Clone ID: MRT4577_41264C.1.pep
IRKEISLVQLKWYRRKCDVCMRTTLGRSVPFIHVLCPDGEGANFKEKKLL

SEQ ID NO: 305035 - protein, 52 aa, Zea mays
  Clone ID: MRT4577_41265C.1.pep
KTPGPLSFLKVPDAGHMALMDQPKAALKILKRWTSGTLWEPSSSSQRFFFPM

SEQ ID NO: 305036 - protein, 76 aa, Zea mays
  Clone ID: MRT4577_41266C.1.pep
PVTAARVTYSIENYRLRRMNPTHQTAYRTHTYESKALSAHAMAKNYPTVSAEYKRLWRRPAQVRALIAEKSSPRHA

SEQ ID NO: 305037 - protein, 122 aa, Zea mays
  Clone ID: MRT4577_41267C.1.pep
EDVWFHVDKVSSAHVYLRLEKGETMHTISEALLEDCAQLVKAHSIQGACSISSDLSLSLSLSMGEEPKTEHGVPCPTRLFSSHIAACCGGWNLFSLPPCSHRAGDLSRERLLRLPLFLLTPL

SEQ ID NO: 305038 - protein, 110 aa, Zea mays
  unsure (1)..(110): unsure at all Xaa locations
  Clone ID: MRT4577_41268C.1.pep
KFPKTPPPGFAPPAKPPPGGLVPKTPPLNFPPPEKPPPGXRPPFSRGPQGPXPNNPPPPGAPPXSRPGPAGVPTFPIGGRIKAWRKQGQSWSPGENVIPSQFHPTNQPEA

SEQ ID NO: 305039 - protein, 72 aa, Zea mays
  Clone ID: MRT4577_41269C.1.pep
YSCILWWTFSRNNILCAHSAGVISVETAPCTVTLTVTFKDSLPLRAIASTIMETILIETSTTSAILARERYP

SEQ ID NO: 305040 - protein, 578 aa, Zea mays
  Clone ID: MRT4577_4126C.1.pep
MRGGAMKALRRSSTSSAPSPRVPSSPRSYSWIHRRSLLVTSPASPATSSVSESANLPAEGSDSAPASVVAASSSPSLAASSPNMECTFHSRGGIKSPWSRRKRKRALTCQHWNRLFSANGKFRDGGRKFLKKVRSGGIEPGIRAEVWPFLLGVYDLNSSEEDRNTIKIKKRKEYEKLRRQCHHILHCNRENGLNVINEFMNEDFSDGAEGSESPYSNGVSKRVCVMPKELKSLGSKAEESESSNWDAVECIDEDITSVDPCLVESESSESESSYEEDPDRTPVSTNMEENCGPKPKFARTASSKSEIFISDRTPEDFATWQRIIRVDAIRANTEWVLFARNQAEVSKEKALQSAISVGLKDFDHLEPYMIYHAARLVALLEAYALYDPEIGYCQGMSDLLSPIIAVMEEDHEAFWCFVGFMRKARHNFRLDEVGIKRQLKTVSQIIKRKDSHLYRHLQKLQAEDCFFLYRMVVVLFRRELTFEQTMCLWEVMWADQAAIRAGIGRSTWARIRLHAPPTDDLLLYAIAACVLQKRKLIIEKYSSMDEILRECNSMAGQLDVWKLLDDAHHLVVDLHDKI

SEQ ID NO: 305041 - protein, 95 aa, Zea mays
  unsure (1)..(95): unsure at all Xaa locations
  Clone ID: MRT4577_41270C.1.pep
AQAGCGYKEAILGAMGGVGQTVTLLAKIVPARXEMDLYDIRTNMDGVDIDLSHCNTPWRVYGFTGEHKLTGRLSCANLLVVYGRWPRNLGMTRED

SEQ ID NO: 305042 - protein, 148 aa, Zea mays
  unsure (1)..(148): unsure at all Xaa locations
  Clone ID: MRT4577_41271C.1.pep
HASGMLSIKLHRLVDNLHVNFEESLRAYVPAVESIQASMLARANAFRQHFDLDQERLYLELYLDILPVKYAEEYSEASIXFRELEADTEEATHMFGHIVRLLDQELARFQAQKSLDIGLAFHGFAKGPAKLAEDFPDSLPTFLPKLEA

SEQ ID NO: 305043 - protein, 170 aa, Zea mays
  unsure (1)..(170): unsure at all Xaa locations
  Clone ID: MRT4577_41272C.1.pep
MECVRSGALDLGRSGNFLGKSGSTTSCGKVRCSTNLAGSTKCEQNLHGKVKPLLLSASGKARGTSGLVHRSAVLKHQHHXXSVRSTSTDVCTTFDEDVKGVSSHAVEEKIGVLLLNLGGPETLNDVQPFLFNLFADPDIIRLPRLFRFLQRPLAKLISTFRAPKSKEGYA

SEQ ID NO: 305044 - protein, 70 aa, Zea mays
  Clone ID: MRT4577_41273C.1.pep
MLGNIVVFVKAMPSLFAPFYEDFFVNASDLYQTRALKLEILTTIATESSIPAIFEEFQVIACGCNGQYIC

SEQ ID NO: 305045 - protein, 226 aa, Zea mays
  Clone ID: MRT4577_41274C.1.pep
MSGGASLGLRSSGSYGSLPHQQLGGCQSSSPPLAARKPAKMSLGGTSGPRVCARICKLAGRRQRMLLLLLVSVAVAFCFLFSSLVSKDEDASPGVETMLVFSDHVRSFVNPVWTSSGRPVAQRGSLTVNGLNTPSQMEKQSDSKQVQELMQSSPPAIVVDHHPCENFSLSPPPVDRKRTGPRPCPVCYLPVEQALALRPAKPSLSPVLQSLNYVLEEILIPKESKS

SEQ ID NO: 305046 - protein, 134 aa, Zea mays
  Clone ID: MRT4577_41275C.1.pep
GVRAAGRFRRVRCTVLGRIGGGGAATDGLLVSPRVRDQVAARADDVRFRIVQELLRRIRLHGGMARNLGRRRQRRRGRLLLGGSRLQPQLQLVREWRPGLGVSEVFGLCTVTVKPMLRLHCTLGSFPQQGACTS

SEQ ID NO: 305047 - protein, 68 aa, Zea mays
  Clone ID: MRT4577_41276C.1.pep
QVHSILPRLHTLAHGPDLFEVVRARRVLPQLTLSFHIHANVLLNVSRHDNTTWLKNNITITNDNGRLS

SEQ ID NO: 305048 - protein, 111 aa, Zea mays
  Clone ID: MRT4577_41277C.1.pep
TQGQKSMQWQKQNACWKSKRKPIPGSCLSDVDERVLEVQAQNACWKSKRKSMQWQKQNESMVIDHTPRCVVLAVLLMVLDVFPNCCIYIFCRLVPKKKKKKKKKKKKKKKG

SEQ ID NO: 305049 - protein, 81 aa, Zea mays
  Clone ID: MRT4577_41278C.1.pep
SLVRLTRPGRVRCECAAASRGSVDTWWYIAETQLSEGWADASCWLESLVSMGGLLVSHGCGTCVDRRLHAGWGVVQVVGAG

SEQ ID NO: 305050 - protein, 156 aa, Zea mays
  Clone ID: MRT4577_41279C.1.pep
GREAIFAALAGGTRRCRGGVCPHCLRDRLLRLCPACACTRPCACSCASSPSSSSSGASALGRVHSLIEREHRVARSRSVAAHGVDQRRTMSGLWGWVSFRKPPPRGAGSWSWSTTTRWHWRGRGRCRSRRWRRPRSPRRHGGESHTREDQGAAEPA

SEQ ID NO: 305051 - protein, 92 aa, Zea mays
  Clone ID: MRT4577_4127C.1.pep
RESAELVTPNNDFTPTLPQKIRVHIKPQTSVPTSSSPHMVTLDSQRSLNENQLLQEVLDCYGRGRTRPLGQCGPSHARHQDTRLGSPPSLQP

SEQ ID NO: 305052 - protein, 54 aa, Zea mays
  unsure (1)..(54): unsure at all Xaa locations
  Clone ID: MRT4577_41280C.1.pep
KASRGHFLGNXFXXPRCREELFLGRNPRVSVPRXLVLSVRHPALLLFLIVECGG

SEQ ID NO: 305053 - protein, 68 aa, Zea mays
  Clone ID: MRT4577_41281C.1.pep
IILLLTFFLDHLLKEVFGPLIHCNLMIMISNAEVQTVKSLRISTCSESNWFCSMVPNYKANLNGLHFP

SEQ ID NO: 305054 - protein, 382 aa, Zea mays
  unsure (1)..(382): unsure at all Xaa locations
  Clone ID: MRT4577_41282C.1.pep
QLVIETRSAAAATMAPEKLKLLVGVLALQFLLAGFHIVSRAALNMGISEIVFMVYRNLISLALLAPFAYFLEKKDRPPLTFSLLVEFFLLALCGITANQGFYLLGLYHLSPTYASAIQNTVPAITFAMAAVLRLEQVDLSRRHGLAKVVGTVVSIGGATVITLYKGLPLLHHSDDLHVKSSPVTLSSSSGSPILNWTLGCVFILGHCLSWSGWMVLQVPVLKRYPARLSVLSLTCIFGLLQFLAIAAFTEEDLSRWKVRSGGELFTILYAGLVASGVAFALQIWCIDRGGPLFTXVFQPVQTVAVAVMASAILGDQLYTGGIIGAVLIVIGLYFVLWGKSAEKKGARNLLQDQLAQGADVTRHLLGGEASAKDEEAAPAMLA

SEQ ID NO: 305055 - protein, 118 aa, Zea mays
  Clone ID: MRT4577_41283C.1.pep
AGRFGYGNSSARISSHPSRLQTRTPSRPASMAPKAEKKPAAKKPAEEEPAAEKLRRKMKKQPRPCWRDDRLVVCQLEHSVVLLHLGPYESCDFSCSNLATKNKCAWVAGVEQCVAMLL

SEQ ID NO: 305056 - protein, 259 aa, Zea mays
  Clone ID: MRT4577_41284C.1.pep
QLVIETRSAAAATMAPEKLKLLVGVLALQFLLAGFHIVSRAALNMGISEIVFMVYRNLISLALLAPFAYFLEKKDRPPLTLSLLVEFFLLALCGITANQGFYLLGLYHLSPTYASAIQNTVPAITFAMAAVLRLEQVDLSRRHGLAKVVGTVVSIGGATVITLYKGLPLLHHSDDLHVKSSLFTPVPSIAVPILNSTIVGDQLYTGGIIGAVLIVIGLYFVLWGKSPEKKGARNLLQDQLAQGANVTRPLLGGKASAKN

SEQ ID NO: 305057 - protein, 47 aa, Zea mays
  Clone ID: MRT4577_41285C.1.pep
LSRQIVICESATYRHRYVMLGSTQSSRGHVPTQSIVFRVSSIPYHHI

SEQ ID NO: 305058 - protein, 74 aa, Zea mays
  Clone ID: MRT4577_41286C.1.pep
PHYGQNVIAPPQIVVVFSFHRRPASIRLPRAVSCTHREHGLSELLKEEVEIQKKWFLERSLLLNLFLKWIELSN

SEQ ID NO: 305059 - protein, 59 aa, Zea mays
  Clone ID: MRT4577_41287C.1.pep
PFINFSSHHSQKWNALSKGMGFMCRRLRVHEDGGGPSDKVSQGQFKIVRRLKAGGESDV

SEQ ID NO: 305060 - protein, 41 aa, Zea mays
  Clone ID: MRT4577_41288C.1.pep
VWVTLIGLPVVCSRKCLHQGHILGQPIRRGVVKSCSLYGSR

SEQ ID NO: 305061 - protein, 48 aa, Zea mays
  Clone ID: MRT4577_41289C.1.pep
RRRGRTRGFSETQAEQWWQENRARVYQQYNVRVVDKSTASADNDIAAN

SEQ ID NO: 305062 - protein, 107 aa, Zea mays
  Clone ID: MRT4577_4128C.1.pep
IPGGVRVKGWVIQSHKGPILNAASMQRFEDELQTTHLPEMVFGESFLSLQHTQTGIKFHFNALDALKAWKKEALPPVEVPAAAKWKFRRSSITVIHFSTQFSTTEHL

SEQ ID NO: 305063 - protein, 470 aa, Zea mays
  Clone ID: MRT4577_41290C.1.pep
MEFTESFKQTGPCSFSPDSRFLAIAVDYRLVVRDVLSLKVVQLFSCVDKISSVEWAPDSEYILCGLYKRPMVQAWSLSQPDWTCKIDEGPAGIAYARWSPDSRHILTTSEFQLRLTVWSLVNTACVHVQWPKHGSKGVSFTKDGKFAAICTRRDCKDYINLLSCHSWEIMTVFAIDTVDLAGVEWSPYDSAIVVWDSLLEYKVLIYSPDGRCLFKYLAYESGLGVKTVAWSPCGQFLAVGSYDQAVRTLNHLTWKTFAEFSHAGYIRSPCNAAIYKEVDDPWQLDMSELCLSEGLSRNMPDNGAENGTEGGGSRVKYAVMDVPITLPSLKPAFDKPNPKQGIGMLSWSSDSHYFFTRNDNMPTVLWIWDICRLELAAVLVQKDPIRAAAWDPTCTRLVLCTESPHLYMWTPSGACCVNIPFLNFRIVDLKWSSNGSCLLLKERESFCCATIISALPEEEPDHSDDTSEDE

SEQ ID NO: 305064 - protein, 137 aa, Zea mays
  unsure (1)..(137): unsure at all Xaa locations
  Clone ID: MRT4577_41291C.1.pep
WFFWXSAAPPAAXXXCWPWGPPPPGRCPXLXPSGXXPSXXVALAAXXAAXXSWPSCAARPXXSXPALSXAPWFFXGXRGPXRGXLXLXSXCRGXRVFFXSFGRLPLXSXFXXSXXXXXXXXXAXXPXFLXPCGVFPL

SEQ ID NO: 305065 - protein, 85 aa, Zea mays
  Clone ID: MRT4577_41292C.1.pep
NPLLSPPKGSIQGGGVSPKLGGGPHKWAPFHQTGKSFPPSREPGKGGAHFGMGVPGVKRGPLVHPEKGGQKLFPPPKIEGGVGSP

SEQ ID NO: 305066 - protein, 54 aa, Zea mays
  Clone ID: MRT4577_41293C.1.pep
ALARRNRRSSSSFTPSPQAVKTLWCWPRVTSLTKGTPRVFGQEWKLYASLARRV

SEQ ID NO: 305067 - protein, 48 aa, Zea mays
  Clone ID: MRT4577_41294C.1.pep
RTLDLESEVLQLNSGSIILWYKLGEYHQKLFQILQSSPICTIRIILSV

SEQ ID NO: 305068 - protein, 46 aa, Zea mays
  Clone ID: MRT4577_41295C.1.pep
SGVSACTKYHNKWGLLIVTSSTRPLIPIPGPAERASFPHSTSYKSR

SEQ ID NO: 305069 - protein, 76 aa, Zea mays
  unsure (1)..(76): unsure at all Xaa locations
  Clone ID: MRT4577_41296C.1.pep
IVASWXKTSXPXTTRTNILLFSAKRITPKKIYSHQRNISSPYSRPPRHRYHQLTCSPTNYKSTNTSFSQSMDRQLG

SEQ ID NO: 305070 - protein, 82 aa, Zea mays
  Clone ID: MRT4577_41297C.1.pep
SFCPCEGNSLQLVQALDLIGWMKFNWFTRTMIWNSSFYWPHLTRCRASATAVRTEEIRGLGDGGGSVGRRAAETTGFGKRAR

SEQ ID NO: 305071 - protein, 93 aa, Zea mays
  Clone ID: MRT4577_41298C.1.pep
YTSLQRTSWTLCSINSVYRIIIVQIMKMKIIVSDCLCVMVVWNWSVYLLSFHFGRHPTPGRAQRADPGDGLCNFNRSSFLTCEYYYLVSLGED

SEQ ID NO: 305072 - protein, 49 aa, Zea mays
  Clone ID: MRT4577_41299C.1.pep
SSTRAMRLQSRSRLVQFQLKPVRNNPPVELPALSSQNATTMTIGNAAFR

SEQ ID NO: 305073 - protein, 64 aa, Zea mays
  Clone ID: MRT4577_4129C.1.pep
CFSRGYARPSHVSCHNALLCQRGCSCSSQFRDNDRYANFFWCSMALTQPDFTRNCVSVFVGSWF

SEQ ID NO: 305074 - protein, 159 aa, Zea mays
  unsure (1)..(159): unsure at all Xaa locations
  Clone ID: MRT4577_412C.1.pep
DRVLHAQHPPERYLDARRLNAFDLLSHSRGVHLPRLLLVDREHKDNHSRCMTQMPXSDTVXKVDQIAWTEGFMMTKHDGLENVQGTKTRKDRGRLAXDADDLTQATPRLVTAHQVKKTTXDTLXYEMVCCTGLSPALMDXLCCSSRSEEMMPPSLRQAS

SEQ ID NO: 305075 - protein, 60 aa, Zea mays
  Clone ID: MRT4577_41300C.1.pep
LHDTSTIVISSKNIIFFSKVQESCTSFNYRRNGPKWTKVHSPEQAQQKTPTHTLHPLPTD

SEQ ID NO: 305076 - protein, 81 aa, Zea mays
  unsure (1)..(81): unsure at all Xaa locations
  Clone ID: MRT4577_41301C.1.pep
QAPIASXLVPPYLSPAGFSMCENPIDQPYTIQQAIATSILPLSPLLLQQPSALLQQLPLVHLAAQNIRAQQLQQXVLANLA

SEQ ID NO: 305077 - protein, 95 aa, Zea mays
  unsure (1)..(95): unsure at all Xaa locations
  Clone ID: MRT4577_41302C.1.pep
GGGFSIPGGAPXVRDIVEYIQNVAITEXIQNGTGVEPNVVGVAYRNVIGARRASWRIGSSIEQKGEARKNEXDGNLIKGYRAEIEAXLSNICDGI

SEQ ID NO: 305078 - protein, 109 aa, Zea mays
  Clone ID: MRT4577_41303C.1.pep
SGVVLYSDMSRLLWLSSFCSRMMILGSSSALCVWFWRVISAVPAPSAAGVVPARRSIVFLLASSWRVVTHSQWSKGRLLEAGTPPLSIQTGLRRSHPVHSATAYRRAFQ

SEQ ID NO: 305079 - protein, 78 aa, Zea mays
  Clone ID: MRT4577_41304C.1.pep
VHVYTVFSVTDAKRSGRDSHVPILAPLPIGWDAFALHLATILDSGARINPARTLGAGIVYNRSHAWNDDWIFWVGPLI

SEQ ID NO: 305080 - protein, 60 aa, Zea mays
  unsure (1)..(60): unsure at all Xaa locations
  Clone ID: MRT4577_41305C.1.pep
GQKKIXVVFLPFHRGRVQEQARLGCPRSPEKAQAPAERTPPRKQRPLRVAVVPLRPPPPP

SEQ ID NO: 305081 - protein, 54 aa, Zea mays
  Clone ID: MRT4577_41306C.1.pep
LDRVRHLGILLHAAAAAARRRLRFIRSSASHQSSSHQIVEDNKQQSSVGCMSQQ

SEQ ID NO: 305082 - protein, 152 aa, Zea mays
  unsure (1)..(152): unsure at all Xaa locations
  Clone ID: MRT4577_41307C.1.pep
SFSGRSLQWHLKEAPDTDTGDIVFVLQQKDHSKFKRKGEDLFYEHTLSLTEPLCGLQFVLTHLDNRQFLIKSDPGEVVKPDQFKAINDEGMPIYQRPFMKGKLHIHFTVEFPDSLAPEQRKALETVLXPRSSSKLTDMEIDECEETTMHDVN

SEQ ID NO: 305083 - protein, 82 aa, Zea mays
  Clone ID: MRT4577_41308C.1.pep
AAFSRTGSGRELKRSKERDLWPSPFHGQLVHQCPFTFSCRRVTKAVSNLSAISGEAFWLCCICKRHQEAALITSAGTVVLEP

SEQ ID NO: 305084 - protein, 143 aa, Zea mays
  unsure (1)..(143): unsure at all Xaa locations
  Clone ID: MRT4577_41309C.1.pep
MFGRAPXNSDNTKYYEILGGPKSASQDDLKKAYRKAAIXNHPDKGGDLEKFKELAQAYEVLSDPHKREIYDQYGEDALKEGMGGGGSHVGPFDIXSSFFGPSFGGGGWSTMPSTQTMGEDVAHPLKVFLEDLYKGTSGELCLS

SEQ ID NO: 305085 - protein, 49 aa, Zea mays
  Clone ID: MRT4577_4130C.1.pep
SLSTHSSSHTSFHSPTFFSYHPSSHFTKLLSKFRPNLLFLLISSTNTTP

SEQ ID NO: 305086 - protein, 419 aa, Zea mays
  Clone ID: MRT4577_41310C.1.pep
MFGRAPKKSDNTKYYEILGVPKSASQDDLKKAYRKAAIKNHPDKGGDPEKFKELAQAYEVLSDPEKREIYDQYGEDALKEGMGGGGSHVDPFDIFSSFFGPSFGGGGGSSRGRRQRRGEDVVHPLKVSLEDLYNGTSKKLSLSRNVICSKCKGKGSKSGASMRCPGCQGSGMKVTIRQLGPSMIQQMQQPCNECKGTGESINEKDRCPGCKGEKVIQEKKVLEVHVEKGMQHNQKITFPGEADEAPDTVTGDIVFVLQQKDHSKFKRKGEDLFYEHTLSLTEALCGFQFVLTHLDNRQLLIKSDPGEVVKPDQFKAINDEGMPIYQRPFMKGKLYIHFTVEFPDSLAPEQCKALETVLPPRPSSKLTDMEIDECEETTMHDVNNIEEEMRRKQAHAAQEAYEEDDEMPGGAQRVQCAQQ

SEQ ID NO: 305087 - protein, 191 aa, Zea mays
  Clone ID: MRT4577_41311C.1.pep
MATILENIQKARFLPTRPLKDELPTFQGGGKSKEESHLMGLRKRLSSFSGKIQPISSASAAEWAFRRSKSAPSLGAAFAAGGGSLRQWWQWGVGWLLSKKPGFAGDLEMNEEEVAALGRQSRGTWAHILFKMRSGVRRLVASAHSLPTTHKQQSLPSSSAAAAHSVQCKPAASFAYAQRQSFHHTGHAMAH

SEQ ID NO: 305088 - protein, 101 aa, Zea mays
  unsure (1)..(101): unsure at all Xaa locations
  Clone ID: MRT4577_41312C.1.pep
LRASGSLFSIPAACPSCRRCAGAGPSVTXRHQQRRRRPWPQGVSRRIEHSNSLQLSFRTGRNKPKIWTVLAKPFQQHTLLLIRHLSYFGRIILYVRCDALF

SEQ ID NO: 305089 - protein, 33 aa, Zea mays
  Clone ID: MRT4577_41313C.1.pep
FGSNTGSTNYFGKYPLLLRWSYINIVIFFHELP

SEQ ID NO: 305090 - protein, 88 aa, Zea mays
  unsure (1)..(88): unsure at all Xaa locations
  Clone ID: MRT4577_41314C.1.pep
LPSARHPPPSCRRSSRTTPSPPAAAGRCSSRPPRPCCWGRRLSRACTSVGGACWGHRRRRRSRPAAAAARHLLLEQHRCTXRYYLPDA

SEQ ID NO: 305091 - protein, 77 aa, Zea mays
  Clone ID: MRT4577_41315C.1.pep
THTKKTYPLFPNTHLHYIKYLPTYLETLHNPVHTPHQHLSTLQRKQTLRPPSHITHSNHLLSPNPQNSHFFNHPPNN

SEQ ID NO: 305092 - protein, 69 aa, Zea mays
  Clone ID: MRT4577_41316C.1.pep
INKRVFFFFPLFLGKKRGHCKFFFLGGVKNLTGFFWEKNGFFVKINLGEKNRVFFFFRQNLSWVLWFFN

SEQ ID NO: 305093 - protein, 140 aa, Zea mays
  Clone ID: MRT4577_41317C.1.pep
MRSSSHCESYCAPPLCYLPCLPKSKDVAVGDPESGSPSPAAVAEDKPPVVQKIEESVAATGGDGVGDGDKCYREVAVAPKSCLKRANCEDSSKNAVKGNVKWKDLLGKDLTLTQVKEFEPSESGDSDDEEYAGACACVIQ

SEQ ID NO: 305094 - protein, 74 aa, Zea mays
  Clone ID: MRT4577_41318C.1.pep
RLAVAWYSFRSRSQFSTHSILNSTHVGEIFQIPCARAPFRLSVAPVPIMMPPWPGLGEAEPLPQGARAPVRQKL

SEQ ID NO: 305095 - protein, 38 aa, Zea mays
  Clone ID: MRT4577_41319C.1.pep
LSLQDLAAHLLEGGGWETLLPNTQPRPPTVRAPLPGHG

SEQ ID NO: 305096 - protein, 79 aa, Zea mays
  unsure (1)..(79): unsure at all Xaa locations
  Clone ID: MRT4577_4131C.1.pep
TNRRPARQATERGGLPYYPLPSQPEGQXIYSPVSNPAGRDYRPTSLPSNPVGWDCRPTHPPSNLIGWPTYPPIEQPGGA

SEQ ID NO: 305097 - protein, 46 aa, Zea mays
  Clone ID: MRT4577_41320C.1.pep
IFFSFAGNGSPIAKTLWFWPTRTISISYLLQARLKTQLIFLRHLIE

SEQ ID NO: 305098 - protein, 64 aa, Zea mays
  Clone ID: MRT4577_41321C.1.pep
KKCCLHMLVLETLARRISGHTNMWIGYSCSEVSWGSLKRGKHWFSQMLHMAVFKRLKTFFCPLC

SEQ ID NO: 305099 - protein, 91 aa, Zea mays
  Clone ID: MRT4577_41322C.1.pep
AHAYAHNTSNETLQRLGVCFSRWQVPISITRQGIRTRPRLAASMEYAGLHGTSRNHDINARRYTETRKSFAEPENLYVHCDELKQLRLTME

SEQ ID NO: 305100 - protein, 103 aa, Zea mays
  unsure (1)..(103): unsure at all Xaa locations
  Clone ID: MRT4577_41323C.1.pep
NQRARAANCINTERGSPPPPASRALNINPRHPHMPIFAPAAFQVLNYLDEQSPLAXHSYMPPXQQNFRAGTYPKYNGSVNTTQYIYKTLISYFPFLSILQKKS

SEQ ID NO: 305101 - protein, 102 aa, Zea mays
  Clone ID: MRT4577_41324C.1.pep
YEDGGGYGGRHEGGGVGYARVRFVWKDSCVGPSWVAPSYFIYQEYRVPVRFCPRVSVRSTFGLGVGTPVVPFVCSRYETRREKNEQGFCSQLFLSNDLDTLF

SEQ ID NO: 305102 - protein, 88 aa, Zea mays
  Clone ID: MRT4577_41325C.1.pep
DEENQEMSSCKSARIETSCSLLEQTQPATRSLWKNKEQHLSENEPVDTNSDNNLFTDTDLKSIVKNSASKSHAAEKLKKKKKGGPRLV

SEQ ID NO: 305103 - protein, 52 aa, Zea mays
  Clone ID: MRT4577_41326C.1.pep
SSALIYSYLSSYSSFVHVLFRQGNIDSSPPCPCHYGRLYLPVTAPSARVPVG

SEQ ID NO: 305104 - protein, 115 aa, Zea mays
  Clone ID: MRT4577_41327C.1.pep
MGRACSRRRRTTCPPPPCPGTASRRGACRRRGRPRCRPGGPAPPRSPRRTRSGTATCRCPSPRPSRAARSRPPRRPRSSPRGAPPPPGPAGSWSRCPPGARAGTRPGPASLHTTP

SEQ ID NO: 305105 - protein, 133 aa, Zea mays
  Clone ID: MRT4577_41328C.1.pep
PYRSKRMMIRRTDSRSIRSPDENTTRQRQAIAFYEGGSCRTGQYFAIALAFPIPKSDGGQSGAGLLGSYRTNGRRRAPAGSGFRDRWAAWRVVWRIPHRQRWELGCGAEWSGSDWIGTQRNIQRVFSSSSDES

SEQ ID NO: 305106 - protein, 77 aa, Zea mays
  unsure (1)..(77): unsure at all Xaa locations
  Clone ID: MRT4577_41329C.1.pep
YVAVYEATRGRRFRLYKPGGTPGGGNQGKLPVLVYLHRGGYCGCAYYHPLLHSCCQRFPVEVPAVXLSVQYLLVPEH

SEQ ID NO: 305107 - protein, 290 aa, Zea mays
  Clone ID: MRT4577_4132C.1.pep
MASAAAWEGPTAAELKTAGAEVIPGGVRVKGWVIQSHKGPILNAASLQRFEDELQTTHLPEMVFGESFLSLQHTQTGIKFHFNALDALKAWKKEALPPVEVPAAAKWKFRSKPSDQVILDYDYTFTTPYCGSDAVVVNSGTPQTSLDGCGTLCWEDTNDRIDIVALSAKEPILFYDEVILYEDELADNGISFLTVRVRVMPTGWFLLLRFWLRVDGVLMRLRDTRLHCLFGNGDGAKPVVLRECCWREATFATLSAKGYPSDSAAYADPNLIAHKLPIVTQKTQKLKNLT

SEQ ID NO: 305108 - protein, 106 aa, Zea mays
  Clone ID: MRT4577_41330C.1.pep
GPNAKAGGEIEKQKNGQTFGKRKNRGGDRPKDFPRFSKRQLWNPGEKKNSPGRGFKKPKGFFFETKGGGPAFSGEKKKKFHGQKQIFLKSQKEFRKGGPRTPRGGP

SEQ ID NO: 305109 - protein, 63 aa, Zea mays
  Clone ID: MRT4577_41331C.1.pep
TLLMYPGLRGPLPAMRTRVQRWLAWIDGTGLKQTGCDEAYPLSPELSTPSNNNMGTIGHVAHG

SEQ ID NO: 305110 - protein, 43 aa, Zea mays
  Clone ID: MRT4577_41332C.1.pep
MAIRSTAWISLLLALAVALSARAEEESAAAAKGKDVLNLDVDR

SEQ ID NO: 305111 - protein, 122 aa, Zea mays
  unsure (1)..(122): unsure at all Xaa locations
  Clone ID: MRT4577_41333C.1.pep
ASMRELYILGGGPTGPYFIXCINIDDXDDMNIGMRNTLNILGTLQLCKYYEVQHDEIMCDLLSFEADTRAANITTNEAGSDLTRNDRXELDYNFGLLDPYRHQEFGRYEHPYQALCAMDKYP

SEQ ID NO: 305112 - protein, 89 aa, Zea mays
  Clone ID: MRT4577_41334C.1.pep
STLPRSLISFSFSISFFRPLIMVHSRVIVLHLHAYASCRRGKSGSLARLLRALPASDEGSATPDAQSRGAGWVKKRSSTGSGTRRASRP

SEQ ID NO: 305113 - protein, 57 aa, Zea mays
  Clone ID: MRT4577_41335C.1.pep
SSKYINFTRTLVWIPTINQQETKTPTIAPTWLILVTTPTHHLSMRMQCNKNHTHTCI

SEQ ID NO: 305114 - protein, 106 aa, Zea mays
  unsure (1)..(106): unsure at all Xaa locations
  Clone ID: MRT4577_41336C.1.pep
AASSLCFCVSVCFSSLLVLCVXXVCXFCSCSPFFAFAGPXRRLLSCPVGSFVGSXPXSLPRSCRPRXGVCRFCCASCRGPGFPVAVLPAAGVLLPXACVPFPVVRL

SEQ ID NO: 305115 - protein, 264 aa, Zea mays
  unsure (1)..(264): unsure at all Xaa locations
  Clone ID: MRT4577_41337C.1.pep
MACSRAMVALMGLVLAALLFPAALSSRRPDQLISMTTDGQYHSTRPVVTIADGLTADYHDVSCPDLQGIVRTAVVEALQGDITIAADLLRMFFHDCFPQGCDASILLLGTPWSEMRMPPNLSLDIRRKVAFLMEDIRAKVHEACGPTVSCADIMALATHDAVIASGGKPYHVPLGRLDSFEPAPLRFVEELPPPTFSIGQLIAAFKSRSLDEKDLVVLSGAHTIGXKAHCATFSDRFPNSDSDDFVRRLQDNCTXDVNRRQDLD

SEQ ID NO: 305116 - protein, 65 aa, Zea mays
  Clone ID: MRT4577_41338C.1.pep
PCLSTGAQYTPSYAVQPIRTVKLRPSLVFQAWILHMLYCSFHLMCGVPFFRSKDMLAQTRCILCT

SEQ ID NO: 305117 - protein, 153 aa, Zea mays
  Clone ID: MRT4577_41339C.1.pep
SRNLHVNMITWQSIKLPTKKKKPHKAFLYTERQRPWASADLEQHTRWLRATTPIFGQSIDLAVLVGGLALSGEIISEEALPAGRQPAGGAALMTDRTLNGRNSSQQRQATRRHSRTARKGQDKLLRSCLMRKPAHICFAGKFRVWLLHCFFSW

SEQ ID NO: 305118 - protein, 227 aa, Zea mays
  unsure (1)..(227): unsure at all Xaa locations
  Clone ID: MRT4577_4133C.1.pep
YLEAGRILDYTIXFTTPYCGSDAVVVNSGTPQTSLDGCGTLCWEDTXDRIDIVALSAKEPILFYDEXEMEQMVHNLSGYWFTPDRMYXVILYEDELADNGISFLTVRVRVMPTGWFLLLRFWLRVDGVLMRLRDTRLHCLFGNGDGAKPVVLRECCWREATFATLSAXANRWNQALSLNEIKWAPSFISFLXQKGYPSDSAAYADPNLIAHKLPIVTQKTQKLKNLT

SEQ ID NO: 305119 - protein, 64 aa, Zea mays
  unsure (1)..(64): unsure at all Xaa locations
  Clone ID: MRT4577_41340C.1.pep
TLSRAFLFPSNPKVSVVWCTMHHHVSIKNKHQELHKKHRAPYHCWVKSKSTTLCISSVHHQLLX

SEQ ID NO: 305120 - protein, 366 aa, Zea mays
  unsure (1)..(366): unsure at all Xaa locations
  Clone ID: MRT4577_41341C.1.pep
MHLALIISRIRLLPTAMPSTRSASASRLLVRADNSPVAREIKRESSVSFDTPKPEATVSVKRRRVKRELEVNGQHHKKQVPDIEDFIYEKAKTLTSSSKATTSLVKVEKKVGVSSVIKVGAPDNWEAVLGGIKSMRLSGEAPVDTKGCEKAGSLLPPKERRFAVLISTMMSSQTKDEVTHAAVERLSENGLLDPDAIVRTDETTLANLIKPVGXFXYQRKAQFIKEASKICLERFGGDIPDSLNELLALRGVGPKMAHLVMSIAWKNTQGICVDTHVHRISNRLGWVFREGTRQKTTTPEQTRISLEKWLPKDEWEPINPLLVGFGQTICTPLRPKCDKCGINNLCPSAFKESSSPIPKQKKTRSP

SEQ ID NO: 305121 - protein, 143 aa, Zea mays
  unsure (1)..(143): unsure at all Xaa locations
  Clone ID: MRT4577_41342C.1.pep
YSESWDACRDADPVIDWARAQTHRLPSRHSSRRTPRSGHAPTSSATGSAKATRCSASSRSSAASPWTSRRRCRQTNRWCVPGSCPTXQTSCPSAPRTCFTTEDMIHQPHQRTSGAARWCWERSRQDDMGEYXEHSHLLPTWLC

SEQ ID NO: 305122 - protein, 119 aa, Zea mays
  Clone ID: MRT4577_41343C.1.pep
KRGKIFLLRLPNLKKKLSLVHGAEIFQVFGLKKPLFFSPPITFPKKPAKHDKKIPGGLSWGPRGGVIGFLKKGVNPFLGLPLTVFWGGPWLGQPGGQLLKPFWGPRWDPPQKPFGGAHN

SEQ ID NO: 305123 - protein, 147 aa, Zea mays
  unsure (1)..(147): unsure at all Xaa locations
  Clone ID: MRT4577_41344C.1.pep
MMEVGLMLAHHCDRYVMRQGVGSYDGDSLEQTIARSRCHKGRLLYYFPRQXVVFDEDQLAYQIGETTEILSRGYLCATPHCVQAPSSENASNVDRSTFALFMQPDWNEKLKFPSEIPYHQELIPPNGTLTFGEYSERLVDKYYQTTT

SEQ ID NO: 305124 - protein, 338 aa, Zea mays
  unsure (1)..(338): unsure at all Xaa locations
  Clone ID: MRT4577_41345C.1.pep
PRVCRTKRDLGDKIEEGLGPHGLGIVTIADVPEFPELRKRLLRLAPRIANLPEEVKKQLEDPDSRYNFGWSHGKEKLESGKLDTFKGSFYANPVLDVPTTDDVLVSRYPSYCRPNIWPNDNIPELEIAFXSFETDFKALGKLMMEVGLMLAHHCDRYVMRQGVGSYDGDSLEQTIARSRCHKGRLLYYFPRQFSKQTDFKSNXHGSLTGLTCGLFTKNSMEVPCPDSAAGLYIRTRDNQVVKVVFDEDQLAYQIGETTEILSRGYLCATPHCVQAPSSENASNVDRSTFALFMQPDWNEKLKFPSEIPYHQELIPPNGTLTFGEYSERLVDKYYQTTT

SEQ ID NO: 305125 - protein, 46 aa, Zea mays
  Clone ID: MRT4577_41346C.1.pep
ISIDVKPMPVASPRRQYQHLAAAAYSHKNYQSSCSSSRLGLCLWYW

SEQ ID NO: 305126 - protein, 130 aa, Zea mays
  Clone ID: MRT4577_41347C.1.pep
LASGEKAPAPPKQTGDHHHQRRPRQQTALVEEATWRAYCNGRKCGYALRRDCGADEWRVLRAVEPVSVGAGVLPDGDNVGTGAAAAGEGDLMYMRAKFERVVGSRDSEAFYMLNPDGGTGPELSIYLLRV

SEQ ID NO: 305127 - protein, 104 aa, Zea mays
  Clone ID: MRT4577_41348C.1.pep
PRQVVELGRHGALKGWGSILSLLENNGQTVRVFPSFFLSFGRGVPRFSFLKARRLFCGFGMPKPFGRAKGIFEGRPAGGVGSPLGSSMARCVRRFIGGARMNVG

SEQ ID NO: 305128 - protein, 71 aa, Zea mays
  Clone ID: MRT4577_41349C.1.pep
LFPASNILFVISNITSIVLPFHKQMILCSTSWFLHRHVFCCQVLELVESPIVPVTVMFSVFVRLLQICSSL

SEQ ID NO: 305129 - protein, 84 aa, Zea mays
  Clone ID: MRT4577_4134C.1.pep
NNPNTFDSAFYSHSLTNPLPVLISSLLLSIQPIYFTALSERHNTPLPCAHGPCLISPHSFLGPTESTHMPPHPLIFTNKALEPN

SEQ ID NO: 305130 - protein, 98 aa, Zea mays
  Clone ID: MRT4577_41350C.1.pep
AKPSAHASAHAYDHMGWPYGLPVRLLNRAMRSRHSEIHGIPQGCLARQHSLLRSYKDAGSKLRWRYHLPTSCKAATNLMARQMPLKWNMLANGRVSST

SEQ ID NO: 305131 - protein, 94 aa, Zea mays
  Clone ID: MRT4577_41351C.1.pep
NSSGLLRIKSFVDSSDGSCSRSQSDHVRCSPPIVEAIINDEAVLKESPDGGMKKDIPVRTQNEFVRQNSADKAVTKDDSGMRTLPNGSLSEDMP

SEQ ID NO: 305132 - protein, 55 aa, Zea mays
  Clone ID: MRT4577_41352C.1.pep
EVQQDRVRAGVLLTRKVGISDIMRAANRLGYLKEVTLPICALLLKQLDSNENVDQ

SEQ ID NO: 305133 - protein, 262 aa, Zea mays
  Clone ID: MRT4577_41353C.1.pep
MSYVMHNPMLIQVPVLGTTKTFWRLSEEATRISRKLSLILRNHHSACKYLEAPLQVSNVWIGSTGSVKLRGVSFTGSGFFRIERVRDDYKHLSRVLELLIMISGGDINKLPPDYKEFLSLLRRKNLTRDDEFLIVNNAALLPMKNRTEVFLMLHDRIVNFLGQKNRAKKKKILSNLPYKNNWLDTATANAKINQWVVNVQNEYKRTTIDLLRLNRNVRSHLHQYNHEDDIEEILYCEWPMLLIVMEKMLHSRGELQDTGIHN

SEQ ID NO: 305134 - protein, 267 aa, Zea mays
  Clone ID: MRT4577_41354C.1.pep
MTHKRHAATGLRTGGTILHALSAASAAHLHAHALKVGVLFTCLHLCSGLLKTYASSGRIAAARQLFDEAPRRNVPLWNTLVSAYARCGHPRSALAAASAMARGGGGGAGARPNVVTVAILMSACAKLRRPAPGREVHGYAARNVAALDLHALNALVHMYGRCGRLRDARTAFAGIGAGARNAVSWTAMIDACRENGRPAEALGVFEEMRRLAGAEVDEAALLAAVSACASLDCAAVLGDWVEACAADSGFLRRGTTSARVANALIHM

SEQ ID NO: 305135 - protein, 259 aa, Zea mays
  Clone ID: MRT4577_41355C.1.pep
MGNTLGFGVGVGLGLGLAVGAAALIQAFGPKIDEEVVVSQYQCNTEDIDELSAEELRDAMSYVMHNPMLIQVPVLGTTKTFWRLSEEATRISRKLSLILRNHHSACKYLEAPLQVSNVWIGSTGSVKLRGVSFTGSGFFRIERVRDDYKHLSRVLELLIMISGGDINKLPPDYKEFLSLLRRKNLTRDDEFLIVNNAALLPMKNRTEGFLMLHDRIVNFLGQKNRAKKKKILSNLPYKNNWLDTATANAKINQWCKCSK

SEQ ID NO: 305136 - protein, 97 aa, Zea mays
  unsure (1)..(97): unsure at all Xaa locations
  Clone ID: MRT4577_41356C.1.pep
LLAPKAEKSPAQKSAXENPRKSGSAEKAPAGKKPKXEKRLPAGKSAGKEAATKGRRXAKKSVETYKIYIFKVLKXVHPDIGISSKAMSIMNSFINDI

SEQ ID NO: 305137 - protein, 72 aa, Zea mays
  unsure (1)..(72): unsure at all Xaa locations
  Clone ID: MRT4577_41357C.1.pep
GFGSALYIVSQNCFALSANLICSAVKSWHLTNRSACMIXPGVSYYFSFLLSNVNAHCHTRMHMNNGKAVKMM

SEQ ID NO: 305138 - protein, 80 aa, Zea mays
  unsure (1)..(80): unsure at all Xaa locations
  Clone ID: MRT4577_41358C.1.pep
SRSRVVFIRWAIKLTPGTQSINQSVVEAQAEINDWVGEREERGSGRGKEIRREEAVPAAHRAIGRPRRRRWVAEEREVVX

SEQ ID NO: 305139 - protein, 100 aa, Zea mays
  Clone ID: MRT4577_41359C.1.pep
PKGDWVPRGRPGCHLRPDDDHNDLLVPQGNISAMGSHPLDGKAKLIHTLIHHTKLPNLRNITQPWLIIRTHHDRAFPLPLQHMLQRHLVQSARLRRRTHA

SEQ ID NO: 305140 - protein, 75 aa, Zea mays
  Clone ID: MRT4577_4135C.1.pep
IAFFFRVAGSPSFLAGKGALLERGFFLVRSLFGLPRFLPLGGWLFYGVEFLPVYNFYQLSLLPMNRLCLCLIPNF

SEQ ID NO: 305141 - protein, 122 aa, Zea mays
  Clone ID: MRT4577_41360C.1.pep
AGPPGARAARALPQSHGLLARTPYHVSRRARSTDAPCYLGYCLLDAYTYYAAHELFATVFFNKRAVPLCVYKRPLSLWGISIAGRAYEGGKYNVSQEGINTSHVLFGGEHNTTLCILLFTDM

SEQ ID NO: 305142 - protein, 48 aa, Zea mays
  Clone ID: MRT4577_41361C.1.pep
HCGIMKAFVELTKTSSSARKCNIVISIAANHFSSDPSRHSRPFVRTRG

SEQ ID NO: 305143 - protein, 67 aa, Zea mays
  Clone ID: MRT4577_41362C.1.pep
EPSSRRPPSFFWFVIEAFYSCGGLKIEHGNRQPHTQNILKLLLTNHAGRTKDVRTALMNTEGTRPAA

SEQ ID NO: 305144 - protein, 87 aa, Zea mays
  Clone ID: MRT4577_41363C.1.pep
HTCNNTIIHLIWPHLLFFKHATVDPAWREHLTRHILLKHHNLIKHTIRHRLSNHLPLLNLQLHHLDQATQLRHYHTSLPQTDSIFLL

SEQ ID NO: 305145 - protein, 135 aa, Zea mays
  unsure (1)..(135): unsure at all Xaa locations
  Clone ID: MRT4577_41364C.1.pep
SRSRRRRNGRGPAGGNRAPAPRTRLPARPTWRRRRRRAPWLGRWTPTGRRTRRRSPSWEPAAARTRTRRRXXSATPPGRRRTRCPAPSLSRRSRSCPSLACSTQPLTHTRREESRGAEVAPTSPKVNGRIRDEKG

SEQ ID NO: 305146 - protein, 50 aa, Zea mays
  Clone ID: MRT4577_41365C.1.pep
RPLHLSKGFPFISQKNAQIFKGFSLIYVSVYTHILKKQLISFTLQYLHLL

SEQ ID NO: 305147 - protein, 410 aa, Zea mays
  Clone ID: MRT4577_41366C.1.pep
MAASTAAVVRRLCVAAEVRSALAVLARGTKSGDAALDVAACTALVHVCCQSGDVAEARRVFDVMPRLGVAPNEVTYTALINGYFVRGHREMGFALFAEMRRDGVEPNLYTYNCLIGEWCRTGEFKSARLLFDEMPVKGVVHNVVSYNILIAGLCRHSKLKDAVQLFEAMRREGIRPSIVTFNLLIDGYGKAGKMANALHFFNQMKAAGLPPSVVTYNELICGFCRVRDIARAVRAFLDMKERGLAPTKVTYTILIAAFAKENEMDRAFMMLSEMEKAGLEVDVQSYGVLLHALCMEGKMMHARKLFQSMDLKGVKPNSVLYDMMIYGYGREGSSYKALRLIMEMRKNGLIPNVASYCLTIRLLCNEGKCQEAEALIDDMEHAGLQTSETICRILLDAKARLHGSTDDSFT

SEQ ID NO: 305148 - protein, 125 aa, Zea mays
  Clone ID: MRT4577_41367C.1.pep
TALPFFQMITKLKERAHHPSHSSTHSYSSYPHCGSNHREGKGLNPRPNGWISAPLDGSDKGAAARRRIHGRARACLEGWSEGDRRRRGRGIFSPCNWRGVAEEVAQGPGPNAASRAFGRLHRFFS

SEQ ID NO: 305149 - protein, 82 aa, Zea mays
  Clone ID: MRT4577_41368C.1.pep
NFTKSLPYPPKAWAHAKIPAPHPNKPDKNFTGGKLPLNIRIWVGSVKSGPLFPLTDTLVLLFIMPRINVFGKYTNLTPTVVY

SEQ ID NO: 305150 - protein, 59 aa, Zea mays
  Clone ID: MRT4577_41369C.1.pep
VRVILGQGTSNSQCCKAYRWVSHKLGKWFFYCLHCQPTYRHSLLGGPRGSRPMNNWNAW

SEQ ID NO: 305151 - protein, 93 aa, Zea mays
  Clone ID: MRT4577_4136C.1.pep
PFGLCILESWRSSCFFFQPPDVCYPIYASRMLDYFSIFVSSGCPQLDTFFRNACKFLSFSPMKLLCFRVVSPSLKSGYLAFIDQYIIYVVLLS

SEQ ID NO: 305152 - protein, 66 aa, Zea mays
  Clone ID: MRT4577_41370C.1.pep
AAHGCTGRCVTADITLYSGRDHRLLRAHMLLLLQGIGVCCVHCNLLHSPFLSPIFNSRSLWALARS

SEQ ID NO: 305153 - protein, 212 aa, Zea mays
  unsure (1)..(212): unsure at all Xaa locations
  Clone ID: MRT4577_41371C.1.pep
MAAAAADFTQSKQAMSYALCKHLNLDPKSISSTLVKENDIASLFSHIVTSPQDEVKKWVEFSSNFVLTDGEQHALLGNLNQHLSQMSVLLAGFKPSAADIIVFATVHVFMCHLSDSESQKYPNILRWMDYIQNVVDFGTMLQKINLTKSIFNPPAPAPSHPKKADKGDGEPNSKKAVAGQKIADKSDGAADSKKAAGENKIPXDKANPTSAK

SEQ ID NO: 305154 - protein, 54 aa, Zea mays
  Clone ID: MRT4577_41372C.1.pep
AKVAKRESFVAGTGILTGVGDLRERITHAKESNDMHAGVVFGEKAILTLYARVT

SEQ ID NO: 305155 - protein, 44 aa, Zea mays
  Clone ID: MRT4577_41373C.1.pep
SVCEQSWERLRSRRRRGLCRGGALFRLRRAPEPGTLSDRGAADF

SEQ ID NO: 305156 - protein, 43 aa, Zea mays
  Clone ID: MRT4577_41374C.1.pep
KYYLKLTQQESITNYIKIAFIKDTINIFLNNGSYANFEKMQIP

SEQ ID NO: 305157 - protein, 385 aa, Zea mays
  unsure (1)..(385): unsure at all Xaa locations
  Clone ID: MRT4577_41375C.1.pep
GTCVLRPSNLFGPGDSSLVRFVAGYARSPLGKFVIGSGSNMSDFTYVENVAHANICAEQALSSNAASVAGKPFFVTNDEPMETWEFMNCMMEAMGCQRPRINLPAKMLLFAALFSKMIHHRLGFXAFHPSSSSRYNILXSCTRTFNTSRARRLLGYHPIVSLEDGIMRTLGSFSELADNLGLSRKQGSCGSSKADKLLGSGTAADILLWRDEKRTFSFVTVLFLLFYWFLLSDRTFVSSAAKFLLVLSLALFIHGVLPSEVFGFTVEKVTSDHFEVSHSALRNSLMCVASAWNGSFHKLRLLAEGEDWSLLLKVFAFLYSIKLMLNFQFRFLMGLVLASLFIVFIVYEQCEEEIDSLVANASVKVKWLTDRVVRNLPAFLKAYIA

SEQ ID NO: 305158 - protein, 114 aa, Zea mays
  Clone ID: MRT4577_41376C.1.pep
FWNLNAHRVMYGIRGSARVQVASDNGTTVFDDLLRAGHLLIGPQGYLDATKAQGERYHYIDLETKHDTMVSHIWAKKSDLSDLLHVAIDSYYYICMQEAEHLRNGRKPDLGGHT

SEQ ID NO: 305159 - protein, 90 aa, Zea mays
  Clone ID: MRT4577_41377C.1.pep
LLCNANFPFGVLLPPMVLEVSWFLFLVGVCSFFCNNGDLLARFVLLVDVASYFFTVEAPLLATPEAFSPMVDTTISWLEQLVAESKPCRP

SEQ ID NO: 305160 - protein, 272 aa, Zea mays
  Clone ID: MRT4577_41378C.1.pep
INQPPLPSSISWPPSFQRTQPARLPPPAIFLPLPRFPPHSSRPPALPVLLPRGRAPFIQAADGARTPGTPELSISNPALKVPLPLSSKRVVSSLLLHGAQIRRAPLQIFISTPGSSLLSAQPPWMHTTSSHGRQQQELLLPGRLSPIHGVRPPLLSPPRSELCYGTRKSLPFLCSSPSPVAAMSPSGPVRFHGGRLPHGQELDAASPSAAMAELSLPLLGTSPSLLHFFLSLCSRPLATRALAPAPCCFSSQLPLCSRERRDMLGASAPNLL

SEQ ID NO: 305161 - protein, 154 aa, Zea mays
  unsure (1)..(154): unsure at all Xaa locations
  Clone ID: MRT4577_41379C.1.pep
RRGRPPKPRQADHKGHRREXEEDKTXAXXEQPKRAPKXXERXXXXXARRXXXXXPXXXXEXXXXXXXXXKXXXEXTKGSKXKXEPDKKXGXXKGXRAXXPXXXXXHXXXXXPRXXXEDXDPXDXXXXRAGAPXXXXXGPRARASGPRPXXDQXE

SEQ ID NO: 305162 - protein, 47 aa, Zea mays
  Clone ID: MRT4577_4137C.1.pep
SKHSYCLHSQSTRHHIVVKQHLRIDMHSRSSASISQPSPRSYFPQCS

SEQ ID NO: 305163 - protein, 121 aa, Zea mays
  unsure (1)..(121): unsure at all Xaa locations
  Clone ID: MRT4577_41380C.1.pep
FLGGXPPPPLGXXCPAGWCXRXPXXLFXFWXXXXXXXPXWLPGXXXXFXXXXFLXXXSXXXAVLXRGXVPXVXPARPXAXXXRXXCLRFPCLACCVGPCGLXXWCVCXPLXXXXXGXXCAL

SEQ ID NO: 305164 - protein, 57 aa, Zea mays
  unsure (1)..(57): unsure at all Xaa locations
  Clone ID: MRT4577_41381C.1.pep
VNQAHKQRHRTCRANGGINPXMSSPTYIERILLQKXDPVKKKKGNNVSSRKQLSITA

SEQ ID NO: 305165 - protein, 71 aa, Zea mays
  Clone ID: MRT4577_41382C.1.pep
LIPMCFVSPWFICGNHKSPCTFPGPGNLISQCRSEMFLFSWKKQAWSRSPEINKPAVMEQEGPKKTCIFGC

SEQ ID NO: 305166 - protein, 60 aa, Zea mays
  unsure (1)..(60): unsure at all Xaa locations
  Clone ID: MRT4577_41383C.1.pep
NSHHPSRPPDNRQTAGIKKPPAIKKQKTHYXPNQCSHLPANLLISITIISYNLTSSSNHY

SEQ ID NO: 305167 - protein, 82 aa, Zea mays
  Clone ID: MRT4577_41384C.1.pep
SCFEHLGETAMTCKFAESIARCKRMEGFQTSVLNADFHIPLSLRFHIFNDHNNHLSRHLNCSSWSSCMTTFFCFCRPLFPLP

SEQ ID NO: 305168 - protein, 41 aa, Zea mays
  Clone ID: MRT4577_41385C.1.pep
SSSLKPYARRPFLHLSCSDDQLEVRARPPRRRSLVPPAGRL

SEQ ID NO: 305169 - protein, 87 aa, Zea mays
  Clone ID: MRT4577_41386C.1.pep
LLRATGTTSHEHDRALRTPLDYQKRTRALLQSSTTPNTPSAIECLQSEESRRSETAWRRLKNREGDSGPCHQGPQHRMQQPHQGHDQ

SEQ ID NO: 305170 - protein, 66 aa, Zea mays
  Clone ID: MRT4577_41387C.1.pep
ISINILIIFRKHMPLLGHHYRVHFICNLKDGPPNDGLLPRQGRGFFFFFFFFFFFFFFLKTNYTTS

SEQ ID NO: 305171 - protein, 113 aa, Zea mays
  Clone ID: MRT4577_41388C.1.pep
MLGLQRETSSMYKRTSSRDYAPMIDVEQSSGLLDNDVDNEMETTNPSWKCSLPHVLVATISSFLFGYHLGVVNEPLESISSDLGFSGDTLAEGLVVSVCPGGAFLGSLISGGV

SEQ ID NO: 305172 - protein, 81 aa, Zea mays
  Clone ID: MRT4577_41389C.1.pep
EYSRLCNLVVRRHGGHQQQVVVVLELSAENIAEAVSGSKPGGERMKANDLPIYLIRAHTLRLKAPQPIQITQPVPVQPHPH

SEQ ID NO: 305173 - protein, 77 aa, Zea mays
  unsure (1)..(77): unsure at all Xaa locations
  Clone ID: MRT4577_4138C.1.pep
GDVNVYAQMIDDAEGLDKIENLQSHDNXEIYEKAVKMLESYWLEEEDDAMPSGDNXQNGFNFGNQXXSVPSGGFNFG

SEQ ID NO: 305174 - protein, 138 aa, Zea mays
  Clone ID: MRT4577_41390C.1.pep
GSPVFGKFFKADPDPPVGAMGYIMGGGIKMPLVFIKEGRPRRGGFYAGFVPIGQKAGRYPVFEYRAIFEPFIGQWGVEELWGGLPGKGRGGGDSLGGLPPKIKRMEKKAPDKGVKAQKKPPPIPLNWVFERPLPVLSP

SEQ ID NO: 305175 - protein, 84 aa, Zea mays
  Clone ID: MRT4577_41391C.1.pep
GPVVQKCVTPPSITNAGLRGGGGNDLSKASPGPAGSHVRAPPSPARPSQSPAPGGSVSKGAGPSEVDTSSSDTAKPVYIDHRPR

SEQ ID NO: 305176 - protein, 101 aa, Zea mays
  Clone ID: MRT4577_41392C.1.pep
MLARCASIMFATAHASHASGHPAHCLSELLGVNSGVTRVAASTEVTARGKSIGSLELFTHVTFLSEPALNTPVTERRRDPDCIAVHSSDSGDGKAPEPPKG

SEQ ID NO: 305177 - protein, 49 aa, Zea mays
  Clone ID: MRT4577_41393C.1.pep
KKKKKKKKKKKKKKKKKKKKKKKKKKKKKKKKKKKKKKKKKFPCPGRAF

SEQ ID NO: 305178 - protein, 68 aa, Zea mays
  Clone ID: MRT4577_41394C.1.pep
WAAYYICLSKVILALGMNASSLSAQLRRREENTEKGAAGHLETACLLSSSEEHSQAVRRVLCSLDSCF

SEQ ID NO: 305179 - protein, 117 aa, Zea mays
  unsure (1)..(117): unsure at all Xaa locations
  Clone ID: MRT4577_41395C.1.pep
RFVSLLYVSXFFWLGKILASGGGGEKIKEFKKGPYLGHRNINTRLQPKNLGFWETGGSYPGGDKGYNPKKLVPKAQNLKGGNPPGTFGSLKENLRWVSNPGEGGVFFPSQVYIGGAP

SEQ ID NO: 305180 - protein, 60 aa, Zea mays
  Clone ID: MRT4577_41396C.1.pep
FEAFENKSPTGGEIRLPPGLSCSPQQTGTIQNLFSIIARAVCNSRSTDNSQSSSSMGSTE

SEQ ID NO: 305181 - protein, 59 aa, Zea mays
  Clone ID: MRT4577_41397C.1.pep
TKSRRPRRSQPSRPRLQRRGSCRRCLSSAASRASFAGWGRPRRPAWLLDSSGGSSSGSL

SEQ ID NO: 305182 - protein, 120 aa, Zea mays
  Clone ID: MRT4577_41398C.1.pep
GSGRYFLGHRTINLLGSTPRGFQRISCSGSIKERRFGTDIVRWAYHVKPTHTMVALTKKKKKGEVYMMAAAQTWFQKHHNSQRPLQARRAPSTSTRFACQPSAFSSRPNMMTGLKSRTHC

SEQ ID NO: 305183 - protein, 134 aa, Zea mays
  Clone ID: MRT4577_41399C.1.pep
KPKPGTLDMQAGKLINKHTDKLFGNGKTWGGIAQKTFPAFPKDNFGYPGKKKKALGMVLKNQKGFFLKKKGGALPFQVKKNKSFMYKKKIFLKAIMNSARGGHELQKKVPQRAFGRDFPWGAENKNLSPAKRAR

SEQ ID NO: 305184 - protein, 52 aa, Zea mays
  Clone ID: MRT4577_4139C.1.pep
KTCLPKQLYNHYNIIQFKRHTDPPRKPDVIMRLYLHFTSLHSQNKEHENKNT

SEQ ID NO: 305185 - protein, 53 aa, Zea mays
  Clone ID: MRT4577_413C.1.pep
ILFSRKDTCPECDCAGFIRGAGATLRANAARKDEAQIVCPNCNGLGKLGQIDK

SEQ ID NO: 305186 - protein, 106 aa, Zea mays
  Clone ID: MRT4577_41400C.1.pep
YLGQRTIKLLGSTPRGFQRISCSGSIKERRFGTDIARWAYHVKPSHPMVALAAQTWFQKHHNFQRPLQARRAPSTCTRFACQPSAFSSRPNMMTGLRVAHTVSRLV

SEQ ID NO: 305187 - protein, 72 aa, Zea mays
  Clone ID: MRT4577_41401C.1.pep
TDSFFLFFLFLQNPKGLRGPTLIPKANSRAFQKGGGGGNPQNFPRTQKRVFKPIKWAGSSKNFQGSDKFSFS

SEQ ID NO: 305188 - protein, 97 aa, Zea mays
  Clone ID: MRT4577_41402C.1.pep
QAFFFFFFFLFCYGTAFFFFFVLIIAPSVADWHGDGRPFLFFGRGNVGALLGQRKARLNACLRPCTLWPADCAPTLRPGRKTIQPSRICSLHMVGSP

SEQ ID NO: 305189 - protein, 91 aa, Zea mays
  unsure (1)..(91): unsure at all Xaa locations
  Clone ID: MRT4577_41403C.1.pep
MARDVAAKEGHCGIAMEASYPVKXSPNPRSAPSSSATTTATTSSESHAHTAGTAGAYLLIKPFKIITTHFTLQYRCMYARTGTSLLRSENV

SEQ ID NO: 305190 - protein, 64 aa, Zea mays
  Clone ID: MRT4577_41404C.1.pep
IYPINKSSSQHGLKSIMHCASVKIQNVRTQVTDRLGYNTSRKFIWNKQVFLVENEGESMDNLGD

SEQ ID NO: 305191 - protein, 67 aa, Zea mays
  Clone ID: MRT4577_41405C.1.pep
SFTMINYCKLTPNLSQPFHPPNVPWCPKMTFETPLPQCFLLQIDARVYTLQLCDLSFSKRGKFILSN

SEQ ID NO: 305192 - protein, 103 aa, Zea mays
  Clone ID: MRT4577_41406C.1.pep
ETIKTIGNTRPCSSCIYLEAEKQQQLSQQTQGTPGGPRGGAQIILKGRDQGVDRGSSTRSLMHSIFLSQLRSGVSVGDLARLRSLIFLYARPQVTACAVDAAA

SEQ ID NO: 305193 - protein, 166 aa, Zea mays
  unsure (1)..(166): unsure at all Xaa locations
  Clone ID: MRT4577_41407C.1.pep
MDDIGGGAPGACPKNKKPRHLSRSLTYHHHPYQGRQVLPAPAPNPQRPQSVVLYTTSLRGVRRTFADCCAVRAALRGLRVAVDERDVSMDAALRRELQGILAARGRGFSLPQLLVGGALVGGADEVRRLHESGELRRVLEGAPGQDPAFVCGACGGFRFAPCXACD

SEQ ID NO: 305194 - protein, 83 aa, Zea mays
  Clone ID: MRT4577_41408C.1.pep
WPLCPNWQLENGYRLSSSPSHHYEACRAPLSMVPGSRTSELGSQKGPSTDTSEERRGESKGAGLVSVWDRTIGCGEENRHARA

SEQ ID NO: 305195 - protein, 422 aa, Zea mays
  Clone ID: MRT4577_41409C.1.pep
MSCLGWFKRRSRSGGSAAKRGASAPVSASGPATTTTTTTTATTASAVSTSRSDDSGAARPASKSAGSAGSSSQSHRSISSLYEERGHGQLRVFGYEELQGATADFSRAQKLGEGGFGSVYKGFIRGADGKGDRVPVAVKKLNQRGMQGHKQRLAEVQFLGVLEHPNLVKLLGYCAVDSERGAQRLLVYEFMPNKSLEDHLFRRANPPLPWNRRLQVILGAAEGLAYLHEGEVQVIYRDFKTSNVLLDKDFRAKLSDFGLAREGPTGANTHVSTAVVGTQGYAAPEYMDTGHLTTKSDVWSFGVVLYEILTGRRSLDRNRPAAEQKLLEWVAQFPPDSRNFRMIMDPRLRGEYSVKAAREIAKLADSCLLKNAKERPTMSEVVEVLGRAVQAHAEPDSGAPGPGPGAKGKKTDAATPSRRRRD

SEQ ID NO: 305196 - protein, 83 aa, Zea mays
  Clone ID: MRT4577_4140C.1.pep
FLGDFLRYFCLFPPRRRDIFGSKRSGQTTRPPHGGPKHSKLKQSIKLNKSPISMNYGSKARKTLSPNHFPRMNMLPGQTNGQM

SEQ ID NO: 305197 - protein, 80 aa, Zea mays
  Clone ID: MRT4577_41410C.1.pep
DRPGPPARSSHPKGWSGWSSDMWGRLGVRGPPARHCLMSGVPAWASVSGAQFCAGINCAAGIRRPRRGAWIRWYRGPVGG

SEQ ID NO: 305198 - protein, 420 aa, Zea mays
  Clone ID: MRT4577_41411C.1.pep
MSCLCWFKRRSRKGRSSSSGKRGASSTATVSVSGPATATATTTTTTTASAESTSRSDDSGAVRPVSKSAGSSQSQRSISSLYEERGHGQLRVFDYDELQGATAEFGRAQKLGEGGFGSVYKGFIRAADGKGDRVPVAVKKLNQRGMQGHKQWLAEVQFLGVLEHPNLVKLLGYCAVDSERGAQRLLVYEFMPNKSLEDHLFRRANPPLPWNRRLQVILGAAEGLAYLHEGEVQVIYRDFKTSNVLLDKDFRAKLSDFGLAREGPTGANTHVSTAVVGTHGYAAPEYMDTGHLTAKSDVWSFGVVLYEILTGRRSLDRNRPAAEQKLLEWVAQFPPDSRNFRMIMDPRLRGEYSVKAAREIAKLADSCLLKNAKERPTMSEVVEVLGRAVQAHAEPDSGAPGPGAKGKKTDAATPSRRRRD

SEQ ID NO: 305199 - protein, 85 aa, Zea mays
  unsure (1)..(85): unsure at all Xaa locations
  Clone ID: MRT4577_41412C.1.pep
RPCRWSXAPPACRLFFSSLXPGGSPLPAXRVARLGAAXAPLWAGSRASCLLLRWSAGLAGRAPPRPPLAVFSLPLGGPGGGWRAG

SEQ ID NO: 305200 - protein, 131 aa, Zea mays
  unsure (1)..(131): unsure at all Xaa locations
  Clone ID: MRT4577_41413C.1.pep
RVKLVARGAACVTGHSIGVLKHRSADTYNEKGTRTIRKGAPELYGXLRPPITAVICDRPSSKRSMNMCGRPHWVFDLNFSAGSWILWMXDAGFSQXTVGPVQCSIATVLHASLRTPNVKARLNTIREEFRA

SEQ ID NO: 305201 - protein, 93 aa, Zea mays
  Clone ID: MRT4577_41414C.1.pep
MVMAKSEGPSAAAGLRPRQRGAFLLGEPTWEDTGSGRWRCAETGHELPEREKEAYARSRACRLALIDHAVAHKKPPLNAFKPHPEHKCCCWWW

SEQ ID NO: 305202 - protein, 194 aa, Zea mays
  unsure (1)..(194): unsure at all Xaa locations
  Clone ID: MRT4577_41415C.1.pep
MDDPRMFPSGSDDRSDAERRLYNPYQDLNMPYSYRTLYDLPTSPEFLFQEEALAQRRSWGENITFYTGVGYLSGAVGGAVLGLRDAARGAEPGETAKIRANRVLNACGSSGRRVGNTLGVIGLMYAGIESAXMVAARDRDDWMNSVAAGLGTGTLFRAANGPESAAVAGALGGILAAAXAAGGKQLAKRYVNVI

SEQ ID NO: 305203 - protein, 374 aa, Zea mays
  Clone ID: MRT4577_41416C.1.pep
MALQVTGGVGCCCPPGSARRLPQAAALCRPPRAVVSGATRVVEEDEGKVRLGGSGVAVTKLGIGAWSWGDTTYWNDSEWDDRRLREAQDAFDASIDNGMTFFDTAEVYGTALMGAVNSETLLGGFIKERQQKDQIEVSVATKFAALPWRFGRGSVLSALKKSLDRLGLASVELYQLHWPGIWGNEGYLDGLADAYEQGLVKAVGVSNYNEKRLRDAHARLKKRGVPLAANQVNYSLIYRTPELNGVKAACDELGITLIAYSPIAQGVLTGKYTPENPPTGPRANTYTPEFLAKLQPLMNRIKEIGASYGKSPTQVSLNWLTCQGNVVPIPGAKNASQAKEFAGALGWSLTGDEVEELRTLAREIKGIRMPIEES

SEQ ID NO: 305204 - protein, 185 aa, Zea mays
  Clone ID: MRT4577_41417C.1.pep
MEPARRLLLSDYDGAIESPLPSPPPSSATPFRPGVAVVVGILTSVFSITFLLLLYAKHCKRSAAESSGPYGSAGSGGGFGSSGNGAGGDRRNSGVDRAVVESLPVFRFGALRGQKEGLECAVCLGRFEPTEALRLLPKCRHGFHVECVDTWLDAHSTCPLCRSRVDPEDVLLLPEPPKPSTTGPP

SEQ ID NO: 305205 - protein, 77 aa, Zea mays
  Clone ID: MRT4577_41418C.1.pep
HQLEPVLSLGTLNVTPFTPVVSDQVGTECTPRLQRNPAVSRDLVLYCNFYEVIGSDQSNHKQSSYGLSTLIIMEEFS

SEQ ID NO: 305206 - protein, 114 aa, Zea mays
  unsure (1)..(114): unsure at all Xaa locations
  Clone ID: MRT4577_41419C.1.pep
MISSTMITTFVCDLERPEIVQGLEHGQKQXDMTDITVRVHQMKLLDYLQKISTGQVFGTVVAVVHTVEFQKRGLPHALILVWQQKNSAQGSKLTDVDDGTPATALAKTMETTLA

SEQ ID NO: 305207 - protein, 115 aa, Zea mays
  unsure (1)..(115): unsure at all Xaa locations
  Clone ID: MRT4577_4141C.1.pep
THTAANGGGRGQAGTRGKARGTEGEDSNNRGEQXXXGGGRXXNQSKRAXEDAXATAPKTXXHRXDGENAESAXPPKKKDXKRXKQXRREEEAEAKEEKAGEQEEEDGTTRTKRNR

SEQ ID NO: 305208 - protein, 124 aa, Zea mays
  unsure (1)..(124): unsure at all Xaa locations
  Clone ID: MRT4577_41420C.1.pep
GPTPGSTKERAAKRAGKSPQRGRGRGTKAAPGPAKGXPITAAGKVGGNGYGTGSHSPGSLARPQRQRTNREPRRITPYVSPPTHRERRPTGSQESVKNLPGPXAAARKQWMYASGIMKAPVQSI

SEQ ID NO: 305209 - protein, 59 aa, Zea mays
  Clone ID: MRT4577_41421C.1.pep
KVTCNKCPIVPKHPGSPKMLSCSFIENVLLSIGKYMKVVCKCFTVIVFYGFDSLRFVMR

SEQ ID NO: 305210 - protein, 67 aa, Zea mays
  Clone ID: MRT4577_41422C.1.pep
MSGGAPLLALLLLAAAAMIAPGQGNAAESYDRRAADVPGQDRIRSWGYIHNHHITPKKRDIHDEDGA

SEQ ID NO: 305211 - protein, 48 aa, Zea mays
  Clone ID: MRT4577_41423C.1.pep
EQHVLFFPFLTKVCAIVGGGFPVFGIINLFVYPSQRAIQKKMGIGQFH

SEQ ID NO: 305212 - protein, 34 aa, Zea mays
  Clone ID: MRT4577_41424C.1.pep
LAVCFTTFLLFKPLFFPNLLPFMTYSFFIVAYYL

SEQ ID NO: 305213 - protein, 147 aa, Zea mays
  unsure (1)..(147): unsure at all Xaa locations
  Clone ID: MRT4577_41425C.1.pep
GIPGSDPRPPTRSGHASRIYNIPSPCTELWQRVPRLAHGLTTMIGAGGLDPYAEYLKQXHGTPLAAERYYDLSGQTSAMYQPVRQQCCHHQMKMMDVQSVLHQLQMMMQLERAAAFRNMLNQPALMQQPQQLAADHGLNRMAMMMAH

SEQ ID NO: 305214 - protein, 99 aa, Zea mays
  unsure (1)..(99): unsure at all Xaa locations
  Clone ID: MRT4577_41426C.1.pep
GFCEAAKAIXKHAAQLWVFVEDCGQPDYVKLVKALCFEHXNVPLVPVPAGKTLGEWGGLCKIYSQGKAKKVVGCSCVVVKDYGEKFXGLNIVQEYVKLP

SEQ ID NO: 305215 - protein, 34 aa, Zea mays
  Clone ID: MRT4577_41427C.1.pep
AAVYLSIPPNLTTASDAKIMREPNHDIMGGALVA

SEQ ID NO: 305216 - protein, 66 aa, Zea mays
  Clone ID: MRT4577_41428C.1.pep
HSGGIKKWGGTKIRVSRQNQVLKTTAWRMVHAGLCKSRRRSLNTPICEQGTTHRSSDDGARKSSAM

SEQ ID NO: 305217 - protein, 104 aa, Zea mays
  Clone ID: MRT4577_41429C.1.pep
VLCVAGATVITLFKGPAVFGPAPSVAAAVPVPMPAPGGGNSSNNNNKSWALGCVYLMGHCLSWSGWLVLQAPVLKRYPARLSVTSYTCFFGLLQFLAVAAVFER

SEQ ID NO: 305218 - protein, 529 aa, Zea mays
  Clone ID: MRT4577_4142C.1.pep
MSLRPSEREQMRKGNYKQTVDAEESRRRREGQMVDIRKAKREESLQKKRRDGFPASAAGVPPMGHSTALQQKLDGLPAMVQAVHSNDPSVQLEATTQFRKLLSIERSPPIEEVISTGVVPRFIEFLTREDHPQLQFEAAWALTNIASGTSENTKVVVESGAVPIFVKLLNSLSEDVREQAVWALGNVAGDSPKCRDLVLGHGGLYPLLQQLNEHAKLSMLRNATWTLSNFCRGKPQPNFDQVKPALPALQHLIHSQDEEVLTDACWALSYLSDGTNDKIQAVIESGVFPRLVELLMHPSASVLIPALRTVGNIVTGDDMQTQCVIDNQALPCLLNLLTTNHKKSIKKEACWTISNITAGNKEQIQAVINANIIAPLVQLLQTAEFDIKKEAAWAISNATSGGTHDQIKYLVAQGCIKPLCDLLVCPDPRIVTVCLEGLENILKVGEAEKNLGAGDVNVYAQMIDDAEGLDKIENLQSHDNTEIYEKAVKMLESYWLEEEDDAMPSGDNPQNGFNFGNQPSVPSGGFNFG

SEQ ID NO: 305219 - protein, 102 aa, Zea mays
  Clone ID: MRT4577_41430C.1.pep
MAHPLLSSALVCSRLLPVGNSVTRPRLCAASARPAGRRVRLLSVRCEQGAKGGGGLDVWLSRGAMLGFVGAVAVELTTGKGVLQNVVGVLTAFLIFQSGTRD

SEQ ID NO: 305220 - protein, 115 aa, Zea mays
  Clone ID: MRT4577_41431C.1.pep
MAHPLLSSALVCSRLLPIGNSVTRPRLCAASARPAGRRVRLLSVRCEQGAKGGGGLDVWLSRGAMLGFVGAVAVELTTGKGVLQNVGRRPHGLPHLPVRDAGLMGELSKLPKGHA

SEQ ID NO: 305221 - protein, 118 aa, Zea mays
  Clone ID: MRT4577_41432C.1.pep
MAHPLLSSALVCSRLLPVGNSVTRPRLCVASARPAGRRVRLLSVRCEQGAKGGGGLDVWLSRGAMLGFVGAVAVELTTGKGVLQNVGLTAPVPTLALALTGAVGVLTAFLIFQSGTRD

SEQ ID NO: 305222 - protein, 108 aa, Zea mays
  Clone ID: MRT4577_41433C.1.pep
GRTYFFFFLEHPLFKKALFSWAFAHIFFGFPPKFVPKPFPSPKKHLGLVKIWGQPPRPLGWPGIFGPGPGGVPGFPLGGGIKAGGKHGHKLFPGENGFPPQIHTKFLP

SEQ ID NO: 305223 - protein, 137 aa, Zea mays
  Clone ID: MRT4577_41434C.1.pep
MCTRGHWRPSEDEKLKELVALYGPHNWNAIAEKLQGRSGKSCRLRWFNQLDPRINRSPFSEEEEELLLASHRVHGNRWAVIARLFPGRTDNAVKNHWHVIMARRCRERMRLSNRRAGGAAAAGARRRRHRCCCRRWQ

SEQ ID NO: 305224 - protein, 118 aa, Zea mays; identical to SEQ ID NO: 305221
  Clone ID: MRT4577_41435C.1.pep

SEQ ID NO: 305225 - protein, 66 aa, Zea mays
  Clone ID: MRT4577_41436C.1.pep
MGGVTSTIAARFAFFPPTPPSYTVVVADAATGRLAIPEISRAPSRRRRRDGAGAGGSSSACSVVAA

SEQ ID NO: 305226 - protein, 60 aa, Zea mays
  unsure (1)..(60): unsure at all Xaa locations
  Clone ID: MRT4577_41437C.1.pep
KKKKKPRPAYXTRRRRTTSIQRYLKWLPARSXPAAARLRSHPRRXERCTRPVRPQXXPEA

SEQ ID NO: 305227 - protein, 61 aa, Zea mays
  Clone ID: MRT4577_41438C.1.pep
RSVRSSVLRSGQSWTRARERRMRAGGSSAGAAHELTCLGWSAWRMRRRSQTERFIAARLAT

SEQ ID NO: 305228 - protein, 96 aa, Zea mays
  Clone ID: MRT4577_41439C.1.pep
PAGLLDKYRREFSAAVPFAINHDSNQQQGYCSNTNEEDANKSVEFYDFLQVNANSSDTKCGSSIEEQEAESRDDDQAEGQVQFIDFLEVGASHRRR

SEQ ID NO: 305229 - protein, 91 aa, Zea mays
  Clone ID: MRT4577_4143C.1.pep
GHGIIFLPRLVELLMHPSASVLIPALRTVGNIVTGDDMQTQCVIDNQALPCLLNLLTTNHKKSIKKEACWTISNITAGNKEQIQAVINANI

SEQ ID NO: 305230 - protein, 250 aa, Zea mays
  unsure (1)..(250): unsure at all Xaa locations
  Clone ID: MRT4577_41440C.1.pep
IFSGKSCRLRWFNQLDPRINRSPFSEEEEELLLASHRVHGNRWAVIARLFPGRTDNAVKNHWHVIMARRCRERMRLSNRRAGGAASGAGAGAVVATGAAAEDGSNPRSANKKPRPDASGMASLLDKYRREFSAAVPFAINHDSNQQQGYCSNTNEXNTATTTYCMYASYYHIYKTNFSSTLLITCHFESDXDANKSVEFYDFLQVNANSSDTKCGSSIEEQEAESRDDDQAEGQVQFIDFLEVGASHRRR

SEQ ID NO: 305231 - protein, 56 aa, Zea mays
  Clone ID: MRT4577_41441C.1.pep
KKKKKKKKKKKKKKKKKKKKKKKKKKKKKKKKFKILKKKKKKKSFSFGRTPLRGNF

SEQ ID NO: 305232 - protein, 47 aa, Zea mays
  Clone ID: MRT4577_41442C.1.pep
VIPNKPSLYKKPGMAAWLLHVTFTLSIRVATSQPSKSVSSSQSCRKL

SEQ ID NO: 305233 - protein, 150 aa, Zea mays
  Clone ID: MRT4577_41443C.1.pep
FLPLQRNFFPCGAKQCCPFSAFSRGPAVEANQVFPLSVVKKKPPLVPKIITPFSRGLGNFFSPGAPDFFLFQSGRFFPPPFCWLGFSFGPPAFSFFASGLFFFFTWSPTLFSPGTPFPLFFPHFLFPPPHRKLVPPPLPPPISRVPPRPP

SEQ ID NO: 305234 - protein, 147 aa, Zea mays
  Clone ID: MRT4577_41444C.1.pep
QRDLYRAWKRKKNLLIKQKPSKPWPAFLQTPLKPLLFSLPLQGGGKKKKRSLGIKNPTPQPGLTGGAGFPFLAVWPPWLSKLGGPGLFGGGGYPPFWGPGGCLNVGTTSSLRGLGRTSPERLWGGSPQPFCPWEGESGPPSRGPRRQ

SEQ ID NO: 305235 - protein, 121 aa, Zea mays
  Clone ID: MRT4577_41445C.1.pep
KQQDEIYYYKMNALRDMISRRADHEDDADPHHTKAGQRAGDAAKYHPRMRRSFERVTDAQRSGDRSFSQDQRTAGATTTRRPHRHIYDVRPLPIDVHHPGCLHLTGPREPCTDIWRTLWEA

SEQ ID NO: 305236 - protein, 104 aa, Zea mays
  Clone ID: MRT4577_41446C.1.pep
GTPCQRTSLSARAGVLLHRATSGPPGNLAPAVLLGGLGERRLRWRSLATLSLGEAGTLGGAPGARGTPPLRGGAPCGNCAWAPPDRPAGGAFFSTCSPVAAPER

SEQ ID NO: 305237 - protein, 82 aa, Zea mays
  Clone ID: MRT4577_41447C.1.pep
GHGQDSVSELCHLDHAVDANSGAVRARGGGVGEVRWLWSRVATQDCRSFSLWSFSLYVHCIVGHSYQPELATAAFVFYASVS

SEQ ID NO: 305238 - protein, 217 aa, Zea mays
  unsure (1)..(217): unsure at all Xaa locations
  Clone ID: MRT4577_41448C.1.pep
MYPPPHSFCSTDPNAAMSDTEHDMAVLFTNHNRVLKVARDANPHPDALGRLQQVLLGAVLRCLSDDAGSFRRRMDDFLVKFSNLTRKMDDISARLQATRSPKARRRGISPSPAAQLAGLYGNDLFRALMGVQLPVATPAEVCLEVALAAQRLIVHDQLDFFINLCEKTVFGADTTTIREYNIMAFKDHRKTLEKFVQEHIDLADAAATSHPSTXRAE

SEQ ID NO: 305239 - protein, 92 aa, Zea mays
  Clone ID: MRT4577_41449C.1.pep
MPRARRQRGQPCRFTRSKRGSLLASWAVGTSKKHRAFVASDEQWYNKIFDPSSDFILTWDRIFLFSCFVALFIDPLYFYVPKISYGSPQFCI

SEQ ID NO: 305240 - protein, 528 aa, Zea mays
  Clone ID: MRT4577_4144C.1.pep
MSLRPSEREQMRKGNYKQTVDAEESRRRREGQMVDIRKAKREESLQKKRRDGFPAAGAVPPMGHSTALQQKLDGLPAMVQAVHSNDPTVQLEATTQFRKLLSIERSPPIEEVISTGVVPRFIEFLTREDHPRLQFEAAWALTNIASGTSENTKVVVESGAVPIFVKLLNSNSEDVREQAVWALGNVAGDSPKCRDLVLGHGGLYPLLQQLNEHAKLSMLRNATWTLSNFCRGKPQPNFDQVKPALPALQQLIHSQDEEVLTDACWALSYLSDGTNDKIQAVIESGVFPRLVELLMHPSASVLIPALRTVGNIVTGDDMQTQCVIDNQALPCLLNLLTTNHKKSIKKEACWTISNITAGNKEQIQAVINANIIAPLVQLLQTAEFDIKKEAAWAISNATSGGTHDQIKYLVAQGCIKPLCDLLVCPDPRIVTVCLEGLENILKVGEAEKNLGAGDVNVYAQMIDDAEGLDKIENLQSHDNTEIYEKAVKMLESYWLEEEDDAMPSGDNPQNGFNFGNQPSVPSGGFNFG

SEQ ID NO: 305241 - protein, 148 aa, Zea mays
  Clone ID: MRT4577_41450C.1.pep
PHPPLADPPAACPPARQEFHSPPPTLPGALPGPRVPNDHQVHPCLPPADAPLPRWLGAPFVLPSCAAGRLPQWCYSMGIRALNDGRGATLARIVHPGSTYSDAYGRWPSCSSRKVRCNSGGASLLHLRPHAIGQFHLQIHLPPTPNTQ

SEQ ID NO: 305242 - protein, 138 aa, Zea mays
  Clone ID: MRT4577_41451C.1.pep
DQEYETLNPLLISCIFTRIFWYMLLRKFGLHALAPQGGLTSFLEWWKVAAQAVHGMVKKGLDSLFILGARKIWTLRNKCVFNENTPIPLSNREPILLLKIPWELPGAKGLSYLGYTLAGLRKPRHPRFVYYTRVCGHP

SEQ ID NO: 305243 - protein, 93 aa, Zea mays
  Clone ID: MRT4577_41452C.1.pep
ISKKKKLLHTYRPYTQFYIPQTPYLNTPIILIITKLTPTFQPSPLYSLHTNNHYRHTVPPTTKLTLTLTPPSFLHFIIYHYNSFTDPTFPNQT

SEQ ID NO: 305244 - protein, 116 aa, Zea mays
  unsure (1)..(116): unsure at all Xaa locations
  Clone ID: MRT4577_41453C.1.pep
ELPDGQVITIGNERLRCPXTLFQPSFIGMESAGIHETTYNSILKCDIDIRKDLYANNVLSGGTTMYPGIADRMQKEITALAPSTMKIKIIAPPERKYSVWIGGSILASLSTFQQMW

SEQ ID NO: 305245 - protein, 432 aa, Zea mays
  Clone ID: MRT4577_41454C.1.pep
TQYRICHGCTLHEPCSATFSSKTRNSQAGRLELVNSVFSALPMFFMCTLKISKTIIKEIGTFKKHCLWRGNDINSKRPPLIAWNSVTQRKVNGGLGVLRLETQNEALLIKFLHKFFNHSDLPWVHLIWHNYYLTRGLPGNRSVGSFWWKNIVKLPPNFKGLATPVIGNGRSISFWDDQWSQGIPRHIFPELFSFAKNSKMTIKEVKDQEQFHDLFHLPVSDQAFDQFLVLKGSWEQIILNNVHDRWKYIWGSDKFSSQKAYRSLMGQMQTHPIYKLVWKSKCQPKHRVFYWLWLKNRLNTRNMLRRRNMEIDSYSCENCLWQREETLYHLFLRCNFAKACWNSIGITPPRISNPEEASVNLKHQLNVPFSMEIIILMTWSIWKSRNEWLFSNKDPSVLRCTQEFSRELRLIIHRARGEFDTSIPNWLNLWQI

SEQ ID NO: 305246 - protein, 70 aa, Zea mays
  unsure (1)..(70): unsure at all Xaa locations
  Clone ID: MRT4577_41455C.1.pep
ALGLGNTHRTSLPXSFRGEQKNMSNINLCLFINKKTMSNINLSNQPLLDGRPLPLLDGRPPPWLLRGAWP

SEQ ID NO: 305247 - protein, 194 aa, Zea mays
  Clone ID: MRT4577_41456C.1.pep
MSSNPPQVASSSKASASSGPASPAQTQPATLNTVNFFGQQRGSSGAGVSSRASPTPRSNQPAKKQHKGSKRFRATDEDAMVESHAMRPFNNRKGQTSITHLMNFSLPPRPQNHHSHGYGRNSRRNPTWGLGSGYHAVDKARYVHANYRFIVDPRGDYRAQSVDADIHLDWNNVLQILASELSQEASCPICLGTP

SEQ ID NO: 305248 - protein, 81 aa, Zea mays
  Clone ID: MRT4577_41457C.1.pep
KKKKKKKIKKKKKKKKNNKKGEGVINNGGDIKKQKLGHSWGPIFTCPFLTALSYFLWFHLNLFPWSSFSTLFFKTTSLLPP

SEQ ID NO: 305249 - protein, 87 aa, Zea mays
  Clone ID: MRT4577_41458C.1.pep
PTLPPTRPGVLFVWDGKADRAGFVFPMLRYFPAFFYQLWWPSPRGKSGLFFHMVLLNMVHSAKKKKKKKKKKKKKKKKKNKIKGGPF

SEQ ID NO: 305250 - protein, 71 aa, Zea mays
  Clone ID: MRT4577_41459C.1.pep
GLSQRQAIPGGHLGTSLVAWDLFALTLSQIGVTKSNLKWQGGITNSLVFSGPSRTSRKLLSRIPATLHGRS

SEQ ID NO: 305251 - protein, 87 aa, Zea mays
  unsure (1)..(87): unsure at all Xaa locations
  Clone ID: MRT4577_4145C.1.pep
MSRVGRGSGSMLVCVIPLFSAARCARKPLPHNAFXTYGEVLESKIXLDRETQRSRGFCFVTFFTEEAMRNAIYGMNSNELDGRNITV

SEQ ID NO: 305252 - protein, 69 aa, Zea mays
  Clone ID: MRT4577_41460C.1.pep
LPQGGIRGDHHPDRDLLATSLQEAAVRCSIGAGAGAEQMELRGGWGDLQPAVDSVGLPLTTRVRSSPLP

SEQ ID NO: 305253 - protein, 140 aa, Zea mays
  unsure (1)..(140): unsure at all Xaa locations
  Clone ID: MRT4577_41461C.1.pep
RNSKVKGVKQSADSACVVIPTVVFQISKQPLHEFRGHSGDVLNLSWSNNKHLLSASTDKTVRLWEIGSANCITVFPHSNFVTCVQFNPTNENQFISGSIDGKIXVWDIPRCXVIDWXDIXDIITXXGYXPXGKGAXXXTI

SEQ ID NO: 305254 - protein, 78 aa, Zea mays
  Clone ID: MRT4577_41462C.1.pep
GAAKNTRTRGASTAFTIAGAPAQEHTADKDEAYIKQTEPRLATKQTSPEEDYRPDPRESPRGATYRCTQRNRTGRRGA

SEQ ID NO: 305255 - protein, 92 aa, Zea mays
  Clone ID: MRT4577_41463C.1.pep
KSKKRRDFLSGREIRGGEELVLGGGFVWAVMFPNLLGVWFWLILQGFNFGVCSTSNPCLVVPSVRFLIARSSIIEPPCVMFVASQKKDGSFL

SEQ ID NO: 305256 - protein, 668 aa, Zea mays
  unsure (1)..(668): unsure at all Xaa locations
  Clone ID: MRT4577_41464C.1.pep
RTGPRFTDRPTRRPTRPPTRPVLRQHIPESEAKDKFISKWNNVAHNRNITSGLNSYGLXAYDSVCTVARAADKCCCPEPQTNXSPGSCLEDSNGSTLHLSSLKIFDGGEQMLHQLLLTNFTGVTGPVQFDSEHNLVRPAYDILNVVGSGSRLIGRWSNYSGLSVAAPETLYQMPRNTSTSAQQLHDVVWPGDSTTKPKGWVFPNTGLPLRVGVPIKASFKELVSGRGDNMSGYCIEIFNAAIKLLPYPVPCQFITIGDGTKNPSYIDIIRMVAANSLDAAVGDFAIVRNGTQLAEYTQPYIESGLVIVAPVKHVTSSAWAFLEPFTLEMWCVTVALFILVGIVVWLLEHRTNEEFRGSPRRQVITMLWFSFSTMFFSHRENTVSTLGRFVLIIWLFVVLIITSSYTASLTSILTVQQLSTGITGIDSLVSSSLPIGYQAGKFTKRYLTENFNVPLSRLVPLNSIQEYADALNRGPKNGGVAAIVDEKPYIDIFLSNYCSFRIVGEEFTKEGWGFAFQRDSPLAADLSTAILQLSESGQLQRIHDEWFSRSSCSADDSEVGATRLGLGSFWGLFLVCALICLFALLVFFIRVCRQYNQYSSSEAAGEPSTAAADPVLRQRRPSRLGSFKDLIQFVDKKEEEIKKTMKRRSGEKDSQAAGFSYAQSVASA

SEQ ID NO: 305257 - protein, 226 aa, Zea mays
  unsure (1)..(226): unsure at all Xaa locations
  Clone ID: MRT4577_41465C.1.pep
MARSMGFPKLEAGLCAMTKDDLADSLAYNSLKGLIRSNALRAQKNAEDESCTIALNNLRTEVIKLRNEALEKDKILLTLVDKVKEDEANFKTQSESQKIEIEDLRKQLAEAKEKXQSQKLNEKLAKTGQXLEKNVEELRTSKERCFEKSMDCVKKIKTSFANVGAYSSEENFIQGDPEGVIEWLSGEVEPFEEILSDRGDVCAFSGARVVAAILEKSGCEHVKTLA

SEQ ID NO: 305258 - protein, 673 aa, Zea mays
  Clone ID: MRT4577_41466C.1.pep
MAAALLLRSLRPSVSRAHIHLLSHASSPTALGSFLLPRLYSSAAASTAASPVFTPGGVMDPSRIRNVAVIAHVDHGKTTLMDRLLRQCGADIPHERAMDSISLERERGITIASKVTSVSWKENELNMVDTPGHADFGGEVERVVGMVEGAVLVVDAGEGPLAQTKFVLSKALKYGLRPILLLNKVDRPSVSEETCDEVESLVFDLFANLGATEEQLDFPVLYASAKEGWASLTFTKSPPDNAKNMSSLLDSIVRHVPSPKADLEAPFQMLVSMMERDFYLGRILTGRVRSGVVRVGDKVHGLRSADDGVHKIEDGKVVKLMKKKGTNMVTVEAAGAGDIISMAGLAAPAIGHTVANSEILSALPTIELDPPTISMTFGVNDSPLAGRDGTHLTGAKIGNRLMAEAETNLAINVLPGPLSESYEVQGRGELQLGILIENMRREGFELSVSPPKVMYKTERGERLEPIEEVTVEVGEEHVGFVLETITHRKGEVVDMGPVPGTTGRTRIFMTCPSRGLVGVKGIFSSFTRGTGFMHRAFQAYAKYRGPLGSVRKGVLISVGKGLITSHALMSLEARGILFVSPGMEAYEGMIVGEHSRDSDLEVNPVRTKELTNIRAPGKDENVRLSPPRLMSLEEAIGYVAADELIEVTPKVVRLRKKYLDSTKRKMMKNKPMN

SEQ ID NO: 305259 - protein, 303 aa, Zea mays
  unsure (1)..(303): unsure at all Xaa locations
  Clone ID: MRT4577_41467C.1.pep
MRYKGTQKTTADTALLSIILQLTGAKIGNRLMAEAETNLAINVLPGPLSESYEVQGRGELQLGILIENMRREGFEALVSPXKVMYKTEXELKVXPIEEVTVEVGEEHVGFVLETITHRKGEVVDMGPVPGTTGRTRIFMTCPSRGLVGVKGIFSSFTRGTGFMHRAFQAYAKYRGPLGSVRKGVLISVGKGLITSHALMSLEARGILFVSPGMEAYEGMIVGEHSRDSDLEVNPVRTKELTNIRAPGKDENVRLSPPRLMSLEEAIGYVAADELIEVTPKVVRLRKKYLDSTKRKMMKNKPMN

SEQ ID NO: 305260 - protein, 198 aa, Zea mays
  unsure (1)..(198): unsure at all Xaa locations
  Clone ID: MRT4577_41468C.1.pep
MEVEESFDAGVEDEQAAAEVIGSEKTSADYYFDSYSHFGIHESVCLCSGDANYLHVLTXEMLKDVVRTKTYQNVITQSSFLIKNKVVLDVGAGTGILSLFCAKAGAKHVYAIECSQMADMAQEIVKSNGYSDVITVIKGKVEEIELPVPKVDVIISEWXMGYFLLFENMLNTVLYARDKWLAXGGVVLPDRTSLRLTA

SEQ ID NO: 305261 - protein, 129 aa, Zea mays
  Clone ID: MRT4577_41469C.1.pep
HCGFCSVVFCAFFVLSLLFFFLAKKTKGGVQIGGNPGPFLNPWVWQPLPGNWNGGKPLPPFLPLGFNLGKLTGPPHRRFGWGLFFFFSSRVFTFLKLSPFLGGGRPQLFCSGAFSQNYSNFGLLESAPP

SEQ ID NO: 305262 - protein, 441 aa, Zea mays
  Clone ID: MRT4577_4146C.1.pep
MMFNHAPIDSEPLKNELHKLRLHMDTLNKVHEMKKTQLQTACSQELEKVKRKYDLLIKEHDSTHLQQKKALGDFYEKVQRNQSLAEDFRAKFISLSAAQGAAKGHTPPVRHTPQATQVVSSTSSIALSSACRPPVPRPRVQAPQVDQPLLSLSQFSRPSLQVVQPPNLELGNLFRATSTTLSHMPPQRGSYGVQSELAPRSPAPHLQFRSPRAHSMAPGNQQQSPAISVDAMSSRTQPVLAASTSPSDIHVGPLAASALSSLHSVLPSTSLPSSLHPSHLAQRVPPTPNPTLQAGAPKGSNATMPSIPTGMQLPDSGSLSLDAWLTANLGLNDASTAPAKDTASLGLSSDAPRAAPDTNTASLGLSSDVPRGTAPATNTASLGLSSDVPRGTTPATTTTSLGLISDSPRVIAPASSNSPGAIASATNGGSEIDVVCLSDDE

SEQ ID NO: 305263 - protein, 138 aa, Zea mays
  unsure (1)..(138): unsure at all Xaa locations
  Clone ID: MRT4577_41470C.1.pep
MFFFFFLFLLVFLSPYCLLQQFLPFHQLSTLNPAAYGGGAXLPFSQLATAYSHQQQLLPFNQLAALDPAAYLLLPIFLPFIQLAXSGRASFLTHQQLPPFYSQFAGNPGSLLRLLHLVPFVPLGLAYPAASYLQHVFG

SEQ ID NO: 305264 - protein, 384 aa, Zea mays
  Clone ID: MRT4577_41471C.1.pep
MDRRKGGNRDTNGSLVEATASRLRVESDEEAEEVGMEVEESFDAGVEDEQAAAEVIGSEKTSADYYFDSYSHFGIHEEMLKDVVRTKTYQNVITQSSFLIKNKVVLDVGAGTGILSLFCAKAGAKHVYAIECSQMADMAQEIVKSNGYSDVITVIKGKVEEIELPVPKVDVIISEWMGYFLLFENMLNTVLYARDKWLADGGVVLPDRTSLRLTAIEDAEYKEDKIEFWNNVYGFDMSCIKKQAMMEPLVDTVDANQIVTNCQLLKTMDISKMTPGDASFTVPFKLVAERNDYIHALVAYFDVSFTKCHKLMGFSTGPRSKATHWKQTVLYLEDVITICQGESLSGSMTVTPNKSNPRDIDIKLKYSINGHRCQVSRTQFYKMR

SEQ ID NO: 305265 - protein, 100 aa, Zea mays
  unsure (1)..(100): unsure at all Xaa locations
  Clone ID: MRT4577_41472C.1.pep
PFSQLGXAFFXQQQLFSFYQLAAFNPPVFFQQQILLPFSELVAASCVSFFTQQQFLPFFKQFWANPPTLFQLQQFLPFVQLVFTNPAASFQQHIIGGALF

SEQ ID NO: 305266 - protein, 69 aa, Zea mays
  unsure (1)..(69): unsure at all Xaa locations
  Clone ID: MRT4577_41473C.1.pep
SFPHGPSPPGRRLSLRRTSIPPEPDDDIMNEKNPRPLDXDDIVLLKTYCLEPNKTSIKKVVKDIKDIFN

SEQ ID NO: 305267 - protein, 65 aa, Zea mays
  Clone ID: MRT4577_41474C.1.pep
KVKKLGSGKFRRNCNDLFKRKHSFLGTQKVQLKMLNLWWKKTLELPPLSFLLKQWGNRTFQRICR

SEQ ID NO: 305268 - protein, 88 aa, Zea mays
  Clone ID: MRT4577_41475C.1.pep
MEGFMSYASLVTCEGAMNALSREGCRHYEVFDQADEDFERDIYKVEDPIVKESAGALYDRMWGPHGREVVRERAETARRSGGAWQEGG

SEQ ID NO: 305269 - protein, 43 aa, Zea mays
  Clone ID: MRT4577_41476C.1.pep
RAFIILHSLFRFSYRWIVQNLTIQRQLSTFICSRVSMLYPKVS

SEQ ID NO: 305270 - protein, 34 aa, Zea mays
  Clone ID: MRT4577_41477C.1.pep
HHALNYSPSSARSQMFIQILYCVFMSLHYHQLHL

SEQ ID NO: 305271 - protein, 110 aa, Zea mays
  unsure (1)..(110): unsure at all Xaa locations
  Clone ID: MRT4577_41478C.1.pep
DLGYVLRGSRPPRMNSFRIRKRNRVLSSXDKRALALFYFREKSKREPKVLASFQRLGQKTLGHYVGPSHDPFASTEGWVMIFCSTSPLYQVGFPRLCFPPPLVISVFELA

SEQ ID NO: 305272 - protein, 89 aa, Zea mays
  Clone ID: MRT4577_41479C.1.pep
LGIVVKRTEFSGPPQGWGPADQYNGAKLGPAQNFCPFGLRGSAPCLGNQNPECQLFQALECPLRSPPASYKTVITQRCRSIMWYLVHPF

SEQ ID NO: 305273 - protein, 145 aa, Zea mays
  unsure (1)..(145): unsure at all Xaa locations
  Clone ID: MRT4577_4147C.1.pep
TLPPHSALSPAAAAAADRRRRRASENAALSRPCFLLKLDTSLSTASQLLAGCSNERRGEMPGMEEAEDYESCAFSLTCPEDGAELGDGVVDDGDLFLFLVGGGXDRLRARPPLQPRRQEDQDRRDEPLLHEEPKVQACVMAGTVP

SEQ ID NO: 305274 - protein, 74 aa, Zea mays
  unsure (1)..(74): unsure at all Xaa locations
  Clone ID: MRT4577_41480C.1.pep
GPADQEKAHPPHKAEEEEKAQEDEAEQXHQRAPRQREGRAPEPRARQHAAAVPRAAXPAPARGERHXRQKSGAT

SEQ ID NO: 305275 - protein, 101 aa, Zea mays
  unsure (1)..(101): unsure at all Xaa locations
  Clone ID: MRT4577_41481C.1.pep
SSFLAPPHLKSGLFVGINKGHVVPKRDLPLCPSHRKGKASKRVPMVXGLINEVAGFAPYHKRIPELLKVAQAXLSLRLPKRQLGSHHWPKCHSWELLLVLS

SEQ ID NO: 305276 - protein, 113 aa, Zea mays
  unsure (1)..(113): unsure at all Xaa locations
  Clone ID: MRT4577_41482C.1.pep
SLYLRLVNSHVLMSLYEHKLLDDDHVLMQKGIVAFSAVLHAWPFTLNNFVNMYASMFGVDEPNTMQRLCSENFFDPAIQKWTTKKTGXSPTCEKGFAHFCYEPFLQIIXTCMN

SEQ ID NO: 305277 - protein, 59 aa, Zea mays
  unsure (1)..(59): unsure at all Xaa locations
  Clone ID: MRT4577_41483C.1.pep
STPSSSTSFHVRARPQITYTLYLCISTKAAAAVSSAPSXPCIDKAYKLSVHPRVRPRVR

SEQ ID NO: 305278 - protein, 137 aa, Zea mays
  Clone ID: MRT4577_41484C.1.pep
MAEGEFKPAAMQVEAPAEAAAAASKPRFRMPVDSDNKATEFWLFSFARPHMSAFHMSWFSFFCCFLSTFAAPPLLPLIRDTLGLTATDIGNAGIASVSGAVFARVAMGTACDLVGPRLASAAIILLTTPGVYYSGVI

SEQ ID NO: 305279 - protein, 80 aa, Zea mays
  Clone ID: MRT4577_41485C.1.pep
MDAKPASVCIFLLLLLAQNPSSSSADDQKCFYTTDRVATWCVDWACKFGCLIDAKQYHTKYKNSWCEGSRRGICHCHFCD

SEQ ID NO: 305280 - protein, 77 aa, Zea mays
  Clone ID: MRT4577_41486C.1.pep
QEVHRTGLRLGQLLDSGRSALSTAEPRAVESYYAPPCQVLCMLMCTITRLLSIEEMLDDYISVYSTGYMHDHYASER

SEQ ID NO: 305281 - protein, 63 aa, Zea mays
  Clone ID: MRT4577_41487C.1.pep
ALIVDCWIDRPVSSQGLCWPVLIKEPLFFQFWHTLSGPRCPCCSVSWPLHLALCLCDNLLFGV

SEQ ID NO: 305282 - protein, 99 aa, Zea mays
  unsure (1)..(99): unsure at all Xaa locations
  Clone ID: MRT4577_41488C.1.pep
MGLLFLERLEGEGVFRCRRCRVSKMGDDXIWTLFDHVVNICLGPNEDRYLVTGLHTVNDIYCSCCQQILGWRYEKAYEQSQKYKEGKYILERARMVKDG

SEQ ID NO: 305283 - protein, 112 aa, Zea mays
  Clone ID: MRT4577_41489C.1.pep
ALQTHAEGGFDVNSVDYLGREANTQEGLHCMNHRSATEDIILRRAFRFPYAMLCPCPTPRIPRNLLKKPTGTLLVLERAAERPWANYKQPRMMCESRPQRGSPPGERPWQEG

SEQ ID NO: 305284 - protein, 100 aa, Zea mays
  Clone ID: MRT4577_4148C.1.pep
GNRVPSYQISLGPLSPGFPPRKNPPGFPGFFRAQLTPPLRKPQTKPWKGSGSPPNGSRPFGVGPPLVPPSRNFSRPMGKHLAWKGPVPPGDPFIRAVGAK

SEQ ID NO: 305285 - protein, 108 aa, Zea mays
  Clone ID: MRT4577_41490C.1.pep
SDLHTIICFYSRAHKNPISTIRVWLVALALLALAASATSTHTSGGCCCQPPPPVHLPSSVHLAPPVHLPPSVHIPPPVHLLAPVQLPPSVHVPAAVHMSAPPCHYPTQ

SEQ ID NO: 305286 - protein, 159 aa, Zea mays
  Clone ID: MRT4577_41491C.1.pep
SEAGVHSSQVVLLKASPDACRHSWELKYNKYGPLGLGPHPRCEPPQKIGGLAQTQIYAQGIFVIKKKKGPPLKGKGLFTPGGPTKGSLPNVRGMGVISQGWRPAPKKKKKGPPSCPRKLGICFVHPVGTLCCPTKSKGPKGKFQNCFYFPPEKKKKAGL

SEQ ID NO: 305287 - protein, 61 aa, Zea mays
  Clone ID: MRT4577_41492C.1.pep
ISSSSQRGHSQLWSGALPKHSLHLLISLLQIPYSIFEPSFFNISPLIIQKPTKYKHGYFTS

SEQ ID NO: 305288 - protein, 60 aa, Zea mays
  Clone ID: MRT4577_41493C.1.pep
QHDGVSCGFTGNALLASTDRRSNDRHSRGASDVEGVSALYFGWRAYGDILNGHAIMRARS

SEQ ID NO: 305289 - protein, 36 aa, Zea mays
  Clone ID: MRT4577_41494C.1.pep
YLSIRFECCHILSALHPGAVHLAAADHRLTIGSTCP

SEQ ID NO: 305290 - protein, 92 aa, Zea mays
  Clone ID: MRT4577_41495C.1.pep
WLQWGANNSPRRSLHVGLRSSVVFTSGWDGPLWVLPRPPRRVLPVGRYGPSTRRFGGMPDLKTGTMSGLLILHRWQRWIGTLTNVTLRDYWV

SEQ ID NO: 305291 - protein, 148 aa, Zea mays
  unsure (1)..(148): unsure at all Xaa locations
  Clone ID: MRT4577_41496C.1.pep
KKTMKKKTPKQNKKKQKIQKKKQNQTKNKQKQKKNQKKKKKXKKKTTPNTTPKKPPKKPKPKXQNKPPKNNNPQHKQITKRKQPKQTKQKNKQQTKPTSKQPTLLIPPPPTMVLTLKKKKTRQGTNHNRCIYHKNSCTRTRTCRTNTT

SEQ ID NO: 305292 - protein, 60 aa, Zea mays
  Clone ID: MRT4577_41497C.1.pep
KKKKKKKKKKKKKKKKKKKKKKKKKKKKKKKLKKKKKKKKKKFCPCRGGPRGRKKKNFFF

SEQ ID NO: 305293 - protein, 85 aa, Zea mays
  Clone ID: MRT4577_41498C.1.pep
IGNLYRHIIKRTICLYHANWVLIFRQLARLLDFFLMSQLFGCSFITCAGRTPPNQRKQRSLGYTHSPTRIGKIMGPGHGAFEATQ

SEQ ID NO: 305294 - protein, 85 aa, Zea mays
  Clone ID: MRT4577_41499C.1.pep
PWGGSYGAFAPLFVEPAKKFPQVVFLKVDVDKIKKIPPAFEVEGIPPFPFFKKGKTVPPLLGAKKEKLLALIKKNSGPGPGFGFS

SEQ ID NO: 305295 - protein, 150 aa, Zea mays
  Clone ID: MRT4577_4149C.1.pep
ILRHDFRVSVLSIVLSPAWPISSTAYVPLTSHLMWSFRSTCRSLDRAIVPYYRRAKANATGVRHLLKRPQLQHVAPPLVRPVPEIQSPSELTEGLLLKHHRNNRRPLNLHQEKLTGEDPLPLGHVRLSPMPSRPSRLTESTPARARPVST

SEQ ID NO: 305296 - protein, 58 aa, Zea mays
  Clone ID: MRT4577_414C.1.pep
ERITPNYYLFYTLHSFTSSLIHPTVYSILPPFINLLLPQLNPFHNKIHYPIKLITYPS

SEQ ID NO: 305297 - protein, 134 aa, Zea mays
  Clone ID: MRT4577_41500C.1.pep
RGIPRPPPSTARGKGRQGKSSERRRHRPQLRLRPPPHRPPPPPPIRSPIASLCVASRQYLEPLLPIASCRTTDRSRPVPSDPRLPSATPSRPYLPIGLGCVRWLAAPTRMLPLPRPWPGRPRPIACSGRRRLGR

SEQ ID NO: 305298 - protein, 363 aa, Zea mays
  Clone ID: MRT4577_41501C.1.pep
GPAGATDTRAEHRHRAHSTEAATTTTTTGTHPHRSVTEEWRCFAVAAAAVQCVSVKGLEQGTQRRPHGRGGGGEAQGGGRGGEEEGRQAHGRHRRGFVTAAAEDKPKDAAAAEDKPKDGEPEKEDAPPPPPPPPPEEVEMRVYMHCEGCARKVKKILRRFDGVEDVIADSKAHKVLVKGKKAAADPMKVVERVQKKTGRKVELLSPMPPPPEVEEKKEDEAEKKKDDEKKAEPEPPKPEEKKDAGGAGSEEKKDGKEEEEKKDGGEKNEEKKDGGDGDGDKKDEAGDKDKDPAASLYMHYPRFPFAGGYYQPPAYPPPPGYPYAYQPAYPPPFYAPPHHHLHQQQPMAPQIFSDENPNACSVM

SEQ ID NO: 305299 - protein, 102 aa, Zea mays
  unsure (1)..(102): unsure at all Xaa locations
  Clone ID: MRT4577_41502C.1.pep
MSIAGSALSFAMPVKXINLNSLAFSPVRKGNTFLRAGPVPMRSVFCAGXKDTVDKVCEIVWKLVGLSGHPEVCGXFGFSGPGAGSVGPVVIGMGLVELFGFC

SEQ ID NO: 305300 - protein, 76 aa, Zea mays
  Clone ID: MRT4577_41503C.1.pep
NMSLTVVSPWSFVFRLGFSTVKSGSFSTLGILGLVAVYLLALIFCAVLTTMSVKALTLLYLGSSAFLFSVEQYCIQ

SEQ ID NO: 305301 - protein, 814 aa, Zea mays
  Clone ID: MRT4577_41504C.1.pep
MQHQLSFHQRKAKRRRVSKSGELGTNIDGNYEKTQQKTSGEVSGNFGHSAANVRYEGLSPAELLDGRPSLMAVPCGSQEITILPQQGKEPCVLPQQGKEPSVLPQPGKEPSVLPQQGKEPSMLPQQGKEPSVLPQQGKEPSVLPQQGKEPSELPQQGKESSGDISVNQKDPLKEMNGFPEQEKGLVAGELVSAHHKDPLMDITDAFEMIKKHPAREPSSGHHLDTVDNSDDHKTHDEACDNVVTSLSIDAERKLGVCNSMNVHENISLKDPELSNADYSQKFNRSDETCDVHKEVSSTVNDPDERKCTDDSTRCTNMSCDLLHGKIVSSPEEHDFSNQLESNPLSVSRNEPDLNSIGTEVDGGNITCNAENPRSFKSEKSAELKIMDCEMTSFKDSEIKNDVRVRDVNLNSCLDSISSPISGGNNETSDTPDDAIRSSIIAQCFGTTSNDDTACKDGNFANQNDTCKGENFVNQKNVTMYQSNLTMEPIPRAQINVDCFTSSCSMTPEIKDYGNRGEDRAKEALVNSQNMTSNETGFDAEAYNSDIFNGTITESSLAQLSNVISMKNAFANCYSLSDLNTLTGGTATDDIDMHNIRSSFVSSTSRTEPNEHCTLDFDIKGSMLEALEKSDSDLDNQYNDAGPSCDSLPATGTSGTIDDFMSMQTNFGSFTSLVRAVEDVPLSRIIQDQRCDLQLGFGGPKQQMYPSFEQQLRMASAGAPPYGTIGRHDPIPVPEPTLMLGYAPQLGNCPPPFQLGWGPSYSKMVGMLQSVCVWCNSPFQHFGTVAEQQADSLGYICPSCKGKFSGHLGINGPSI

SEQ ID NO: 305302 - protein, 763 aa, Zea mays
  unsure (1)..(763): unsure at all Xaa locations
  Clone ID: MRT4577_41505C.1.pep
MDPEFGVGTAPQKGRQAWRTTLLLAYQSLGVVYGDLSISPLYVYKSTFAEDITHSETNQEIFGALSFVFWTLTLVPLLKYATIVLRADDSGEGGTFALYSLICRHANVSLLPNRQVADEELSTYRLERPREAAGRSGLLRAWLEKHTRLHTALLVMVMIGTCMVIGDGVLTPAVXGSPLXSXFELSLRKGPYEYAVIPITCAILVFLFALQHYGTHRVGFLFAPIILAWLLCMSAIGLYNIVRWNPQIYQALNPVYMIRFLRKTKKSGWMSLGGILLCMTGSEAMFADLGHFSXKKLQLAFTSLVYPSLILGYMGQAAYLSQHHNLDASYQIGFYIAVPECVRWPVLVLAILASVVGSQAIISGTFSIINQSQSLSCFPRVKVVHTSDKVHGQIYIPEVNWILMILCVAVTVGFRNTKHMGNASGLAVITVMLVTTCLMPLVIMLCWDRSPWLALAFFLFFGSIEALYFSASLIKFLDGAWVPILLALILLAVMFVWHHTTIRKYEYDMHNKVTLEWLLALGDKLGMVRVPGIGLVYTDLTSGVPANFSRFVTNLPAFHQVLVFVCVKSVPVPYVFPAERYLIGRVGPPGHRSYRCIVRYGYRDVHQDVDSFETELVETLATFITLDASYRCSEASERELELDPGEQERRLTVIASNPLRRRVSYAPGPSVQHSAADSHVVSPQARGHTXPADELKASAAAREAGTAFILGHSHVQCKPGSSVLKRLAVDVGYNFLRRNCRGPDVALRVPPASLLEVGMVYVL

SEQ ID NO: 305303 - protein, 131 aa, Zea mays
  Clone ID: MRT4577_41506C.1.pep
MAVPCGSQAITILPQQVGESCVLPQQGKEPSVLPQPGKEPSVLPQQGKEPSMLPQQGKEPSVLPQLGKEPSELPQQGKESSGDISVNQKDPLKEMNGFPEQEKGLVAGELVSAHHKDPLMDITDAFEMIKK

SEQ ID NO: 305304 - protein, 41 aa, Zea mays
  Clone ID: MRT4577_41507C.1.pep
AASLEATARAMGWRRPVSRWEPYFEQVAGTNTQTEWGCCGS

SEQ ID NO: 305305 - protein, 577 aa, Zea mays
  unsure (1)..(577): unsure at all Xaa locations
  Clone ID: MRT4577_41508C.1.pep
MDLEFGRGLRSPKRDSWKTTLLLAYQSLGVVYGDLSISPLYVYKSTFAEDIQHSETNEEIFGVLSFVFWTLTLIPLVKYVSVVLRADDNGEGGTFALYSLICRHANVSLLPNRQIADEELSTYKLECPKKKKKKKKIHPQIYQALNPSYMFKFLKKTRKYGWMSLGGILLCMTGSEAMFADLGHFSYSAIQLAFTCLVYPALILAYMGQAAYLSKHHDFYSSSQVGFYIAVPDKIRWPVLILAILASVVGSQAIISGTFSIINQSLSLSCFPRVKVVHTSEKIHGQIYIPEINWLLMILCIAVTVGFRDTKHMGNASGLAVITVMLVTTFLTSLVIVLCWHRPPLLALAFLLFFGSIEALYFSASLIKFLEGAWLPILLALILMAVMLIWHYTTIKKYEFDLHNKVTLEWLLALGDRLGMVRVPGIGLVYTDLTSGVPXFSRFVTLPAFRVRSVXVPYVXPVVRCIRYVYXCSESERARATRRRRRGRSRIDSHVVSPAENKQVADELEALAAAREAGTAFILGHSHVQCKPGSSVLKRLAVDVGYNFLNRXNCRGPDVALRVPPASLLEVGMVYVL

SEQ ID NO: 305306 - protein, 253 aa, Zea mays
  Clone ID: MRT4577_41509C.1.pep
RPGDHREYAVIPITCVILAFLFALQHYGTHRVGFLSAPIVLAWLFCMSALGLYNIIHWNPQIYQALNPSYMFKFLKKTRKYGWMSLGGILLCMTGSEAMFADLGHFSYSAIQLAFTCLVYPALILAYMGQAAYLSKHHDFYSSSQVGFYIAVPDKIRWPVLILAILASVVGSQAIISGTFSIINQSLSLSCFPRVKVVHTSEKIHGQIYIPEINWLLMILCIAVTVGFRDTKHMGNASGLAVITVMLVTTFLT

SEQ ID NO: 305307 - protein, 208 aa, Zea mays
  unsure (1)..(208): unsure at all Xaa locations
  Clone ID: MRT4577_4150C.1.pep
QVQGEPGGTPNGGTGKNTKGPGGEPPKXSFPRETKTGGPKGPXPPPGGPQKGPKPHPQEGRAPRRPGGIGKKKXGGDGERTPEQGAGGHPQGKVPEXGGPPQHPQKTTPWEKAPPGGEGKKTPQGRPRGSRESPPQAGEGRKPRGGGGGPNPPKNAPPPEPSQPPGGGGGAKKKKKKKKKKKKKKKKKKKKKKKKKKKKKKKKKKNPH

SEQ ID NO: 305308 - protein, 97 aa, Zea mays
  Clone ID: MRT4577_41510C.1.pep
AFFFPFRFGTSTILMLLLKIQFRQTKRGAPCTYREARAWEVAIGEYYASAQENIIKLELDLEPCSASKPPRMAPLGPRPPPLGGALPPRSKPAQAQP

SEQ ID NO: 305309 - protein, 143 aa, Zea mays
  unsure (1)..(143): unsure at all Xaa locations
  Clone ID: MRT4577_41511C.1.pep
SPTQCPGQWGWPFPRPLXGPQTPGLVPPKGNVGADGMVINIASMVPGAVTNPFREGFYQGDKDAPLEAPPACTGVYGKGAYPGFAGNLGVDPPTGGSYNANGGNGRKDLLPALFDPAPSTGWTLGEETTPSGLWSPPVDIGKD

SEQ ID NO: 305310 - protein, 41 aa, Zea mays
  Clone ID: MRT4577_41512C.1.pep
RKVEVEVEVQVREVGVLDEGGDGRSDEEKVVRVGVPFPVPV

SEQ ID NO: 305311 - protein, 822 aa, Zea mays
  unsure (1)..(822): unsure at all Xaa locations
  Clone ID: MRT4577_41513C.1.pep
MDPEFGVGTAPQKGRQAWRTTLLLAYQSLGVVYGDLSISPLYVYKSTFAEDITHSETNQEIFGALSFVFWTLTLVPLLKYATIVLRADDSGEGGTFALYSLICRHANVSLLPNRQVADEELSTYRLERPREAAGRSGLLRAWLEKHTRLHTALLVMVMIGTCMVIGDGVLTPAISVFSAVSGLEFSLSKDHREYAVIPITCVILAFLFALQHYGTHRVGFLFAPIILAWLFCMSALGLYNIIHWNPQIYQALNPSYMFKFLKKTRKYGWMSLGGILLCMTGSEAMFADLVQFSDSAVKASXSLHLFXIERCLSSSEGAPEVPKXTLVTPALFLAYQSLGVVYGDLSIYPLYVYMSTFTXGFYIAVPDKIRWPVLILAILASVVGSQAIISGTFSIINQSLSLSCFPRVKVVHTSEKIHGQIYIPEINWLLMILCIAVTVGFRDTKHMGNASGLAVITVMLVTTFLTSLVIVLCWHRPPLLALAFLLFFGSIEALYFSASLIKFLEGAWLPILLALILMAVMLIWHYTTIKKYEFDLHNKVTLEWLLALGDRLGMVRVPGIGLVYTDLTSGVPDNFARDKIKCPVLILAXCPSVVVSQAIISGTFSIINQSLSLSCFPRVKVVHTSEKIHGQIQDVDSFETELVETLATFITLDASYRCSEASERELELDPGEQERRLTVIASNPLRRRASYDLQDSVQHSAASTVEVRATAADSLSPRDAEISSAAGPKQVRFFIDSHVVSPEAAENKQVADELEALAAAREAGTAFILGHSHVQCKPGSSVLKRLAVDVGYNFLRRNCRGPDVALRVPPASLLEVGMVYVL

SEQ ID NO: 305312 - protein, 77 aa, Zea mays
  Clone ID: MRT4577_41514C.1.pep
NARGGRGHEGITQRRVEWSMARESCERGVTRVAGLAERLHVWVRYIEREPCTGEVQRTVQVLSVYTIILILHASYDW

SEQ ID NO: 305313 - protein, 100 aa, Zea mays
  Clone ID: MRT4577_41515C.1.pep
TRPEDLSYGSNTIHNIPIFAGNGTHAGGELIRFPYAHSSSCYAHDGLEVHHKHHEAHNAQYQTGPPKQPNPVDLVEIQAQENTLTNLNLSENTNRCYVIY

SEQ ID NO: 305314 - protein, 88 aa, Zea mays
  unsure (1)..(88): unsure at all Xaa locations
  Clone ID: MRT4577_41516C.1.pep
SFRGRVCECPVVKGVKFVGDGYTHCEXATQGIRRFIFWHFLLLCVNRASELXVCVXASGSGRCEINNGGCWKDTKNGRTYSACTVSVS

SEQ ID NO: 305315 - protein, 34 aa, Zea mays
  Clone ID: MRT4577_41517C.1.pep
LLFMWTLTASDPSSVSQLDGMTAHKLVRAPEPSQ

SEQ ID NO: 305316 - protein, 91 aa, Zea mays
  unsure (1)..(91): unsure at all Xaa locations
  Clone ID: MRT4577_41518C.1.pep
QAPQAPGFGGGLPVXXXPPGKKGKGKGVSQFVPKXGANVAGYTPFSTGDVCFPPGGVYVGGPPGFLFWAVPLVGVLGGGALFVFNPGPLSG

SEQ ID NO: 305317 - protein, 209 aa, Zea mays
  unsure (1)..(209): unsure at all Xaa locations
  Clone ID: MRT4577_41519C.1.pep
MGVKNLWDILDSCKQKLPLNHLQNKKVCVDLSCWLVQFCTANRSPAFVRDKVYLKNLFHRIRALLALNCSLIFVTDGAIPSIKLATYRRRLGCNSEADCDDTSSQPLTSLKRNKGSEFSRMIKEAKHLGLALGIPCLDGVEEAEAQCALLDLSSLCDGCFTSDSDAFLFGARTVYRDVFIGEXGGYVICYEMEDIEKXLGFGRKSLISF

SEQ ID NO: 305318 - protein, 75 aa, Zea mays
  Clone ID: MRT4577_4151C.1.pep
EEVRENDQREHGRARQPAQKHLVEPVDTQGGVGRRPPAHLYIVHFCCIKRRPVALVMVYYTILRYFVQYMLMTGE

SEQ ID NO: 305319 - protein, 37 aa, Zea mays
  unsure (1)..(37): unsure at all Xaa locations
  Clone ID: MRT4577_41520C.1.pep
LEPMSAREYHVSFMLLQXRXKNCRSTPMRDDARVPSL

SEQ ID NO: 305320 - protein, 176 aa, Zea mays
  Clone ID: MRT4577_41521C.1.pep
RPRARPRAPALPPSRPRPRPLPRPRSPPLSPSLALALAPAPPPVPGSARGGLARACPAPPPTCPGGRVLLRPLASGGHLCPRRWGSPQGPAHDRRGAEVPSFLPPAVAAAPVYAEVGESPKGDSSSGARARRGGVIDPNAKLKTDSEGGKSKDGGSVPKKGSRYVPSFLPPSFAKE

SEQ ID NO: 305321 - protein, 79 aa, Zea mays
  Clone ID: MRT4577_41522C.1.pep
VDSVSWLNSPLSRSLIIRQVACRLERHSIEATWASDYRAAARRRRSSHRSPECEFTQLYMQQSLSLLSWVLSMSHTWHR

SEQ ID NO: 305322 - protein, 50 aa, Zea mays
  Clone ID: MRT4577_41523C.1.pep
SVPLRSCRFHALNRVAQGSLGLTARVPTVFSMSASSFNDSQQTIPFSPPA

SEQ ID NO: 305323 - protein, 68 aa, Zea mays
  Clone ID: MRT4577_41524C.1.pep
FAIPAPRFQFTLSLPLVAQHPLGDYPICRYVEGSVHIQAPRETSPHPRSSLKEAKSLTALIMKLSRQS

SEQ ID NO: 305324 - protein, 53 aa, Zea mays
  Clone ID: MRT4577_41525C.1.pep
GLKNGPLAMFSMLGFLGRAMVPGRGPLETLFGPVADPVATKAGANPPNLVPGN

SEQ ID NO: 305325 - protein, 108 aa, Zea mays
  Clone ID: MRT4577_41526C.1.pep
GIKCISYLAAISDDYSDNIVRADRGVHRAGGPHAGAVCSTIARVPCTWMHPSLMTASSLPLSCSPDVCAPHDSASHPPPYHWSLTIGSIFLSRFSLLPAMAAQPVACA

SEQ ID NO: 305326 - protein, 72 aa, Zea mays
  Clone ID: MRT4577_41527C.1.pep
EHLRELVGIHRLPNSCGYYEATRASHDLQRLGFPMRNLAQATCHIYPLRSSGETQDPALCVILLPRRICYSI

SEQ ID NO: 305327 - protein, 160 aa, Zea mays
  unsure (1)..(160): unsure at all Xaa locations
  Clone ID: MRT4577_41528C.1.pep
MDSTGTRAAGKXKKRAARRXVGRPRKEVVSRSRGAGLQFPVGRIGRYLKEGRYAQRVXTGAPVYLAAVLEYLAAXVLXLAGNAARDNKKXRIIPRHVLLAIRNDXELXKLLGSVTIAHGGVLPNINPXVCFPXXTXEKASSXEMKGGXSPKRAPNSPKKA

SEQ ID NO: 305328 - protein, 197 aa, Zea mays
  unsure (1)..(197): unsure at all Xaa locations
  Clone ID: MRT4577_41529C.1.pep
MDLLEISVLKNSLCYINIRNCFLLTDDGISNLLMKCTKVHSMVLSYTSFGNRSIQMLCAANPSGHNSGHAHVMASYMQELHLDGCKGIDSVALSQLMSIISITKFLSLRETSLTDGALCKFVGSSLEYLDVSETVISMVSLAPVIQRNCKLNCLKTAGCCSLLLQCANVEHINGNKYGDFLHELGTTYCWRIVXMGW

SEQ ID NO: 305329 - protein, 122 aa, Zea mays
  unsure (1)..(122): unsure at all Xaa locations
  Clone ID: MRT4577_4152C.1.pep
SLRAPLGLACGVRSSPLLALLCWSPLRVLLPSLGPSGGVALLFCWGFVPVVGVYSCCWLFPFFGLLLMFSLPALRVRGLSAVSALSWAGGRVLSLPPAIVASPCGCYKCVGXPGFSAPVPAG

SEQ ID NO: 305330 - protein, 104 aa, Zea mays
  Clone ID: MRT4577_41530C.1.pep
HPPNGPKICQSTAPACNIIEIQAKTKLNPGKKQPREKENFKPHTEKKKKGSEPPPPQKTRENQGKKEKKKKSKKKRVKKKKKKKKKKKKKKKKKKKKKNPRVRF

SEQ ID NO: 305331 - protein, 251 aa, Zea mays
  Clone ID: MRT4577_41531C.1.pep
MNGTTGEPKPTTTETNTKQPTGEPTSTETNKKQPAGEPTSTETNKKQPTGEPTSTETNKKQPAGETTKLRPGGVSSAPPYDSMLRSTMYERLRAQHPAEFEPASVFFTHDERSFIDRRKSLRVKAALVYEAVTGRHEDDDQMQSAKILLLALAKKCHSKMHPETAVVHGGGTGTGTAGETGGNAADETGWDDKMMRVLDGIFLVVGFLPKLNEAISSSNADRDSVDQSFRSRHMLEMVADVVKLENQLLWL

SEQ ID NO: 305332 - protein, 62 aa, Zea mays
  unsure (1)..(62): unsure at all Xaa locations
  Clone ID: MRT4577_41532C.1.pep
LGRAIRRQSAETEAESQPWGRARRSXSSSGAEPESEPWVGRVVVRRLPGPSPRKSPGSARAE

SEQ ID NO: 305333 - protein, 230 aa, Zea mays
  Clone ID: MRT4577_41533C.1.pep
MNGTTGEPTSTETNKKQPTGEPTSTETNKKQPAGEPTSTETNKKQPAGEPTKLRPGGVSSAPPYESMLRSTMYGRLRAQHPAEFEPASVFFTHDERSAIDRRKSLRVKAALVYEAVTGRHEDDDQMQSAKILLLALAKKCHSKMHPETAVVHGGGTAGEMGGDAADEAGWDDKMMRVLDGIFLVVGFLPKLNEAISSSNADRDSVDQSFRSRHMLEMVADVVKLENQLLW

SEQ ID NO: 305334 - protein, 201 aa, Zea mays
  Clone ID: MRT4577_41534C.1.pep
APFLPWRPGLLLPSASQGAVAPAPAPSSSRTLQLPAMAPAPCRDAVPWPSSSSSSGQRPWRGALAADAQSFLPWRPPLPPPVSRQQAASPWPSSPSSHESLFPWAPPPATSPCRRPEIAAACSFASRLSARRNAAASSGHEIPSVLLASARSAQFRPKASRGCLDSPTLRRRSARFDRLRVSLRRICAAPTSTPFTPVRRR

SEQ ID NO: 305335 - protein, 90 aa, Zea mays
  Clone ID: MRT4577_41535C.1.pep
RPGRGHETSTPRPIPGPQRPSSSIYHDSCRPTHYMISPPSLLCPSLFLNALQRCKFFGIHGFIGVTSCKRWLPQYHASSLYQKKKKKRPL

SEQ ID NO: 305336 - protein, 48 aa, Zea mays
  Clone ID: MRT4577_41536C.1.pep
CIVWGCGGGHCCLQLRFLLLMCAGSGFCFRSWVCFGIEDTQGRIKIIE

SEQ ID NO: 305337 - protein, 401 aa, Zea mays
  Clone ID: MRT4577_41537C.1.pep
MVAASGLALPRVSAPCPVRTRGGLRPAFLRVAQPVTLPPPQLRCCASTVDDGVVSAAASKSRLPRVVGMGSKLVGCGSAIPTLSVSNDDLSKIVETSDEWIAARTGIRNRRVLSGDETLRGLSIKAAQRALEMAGVKAEDVDLVLLCTSTPDDLFGGAAQVLTDVGCTKAFGFDITAACSGFIVGLITATRFIKGGGFQNILVIGADALSKYVDWTDRGTCILFGDAAGAVLVQACSADEDGMLGFCVQSDGNGQKHLSAITANDESILSNTNGVPGFPPKKATYSCIQMNGKEVFRFAVRCVPQSIEKALQEAGLPASSIDWLLLHQANQRIIDAAASRLDIPSDKVISNLANYGNTSAASIPLALDEAVRSGKVKAGDIIAASGFGAGLTWGSAIVKWG

SEQ ID NO: 305338 - protein, 146 aa, Zea mays
  unsure (1)..(146): unsure at all Xaa locations
  Clone ID: MRT4577_41538C.1.pep
QRRTSAKGTTRSEVWITREGQCVGIVEIPHEHAVLSIDFVLYTNHYEDHYHHANGAYPHLRVPLLHHHDEIYLLVIRPLLPDSVXPTWHLRFTWHRTFHPEPSLSALALFPPAPFSIAVSSSASSFGSGFILGLRYLSIRCDLQLK

SEQ ID NO: 305339 - protein, 92 aa, Zea mays
  unsure (1)..(92): unsure at all Xaa locations
  Clone ID: MRT4577_41539C.1.pep
EKGNGAPGKKAERPPEGRKGAGFAPPPPPPRRGPRKKVHVCPPIIYLGQPRKPIDCLTEKKKKKKKKKKKKKKKKKYSAXXPLLRASPAHGG

SEQ ID NO: 305340 - protein, 57 aa, Zea mays
  Clone ID: MRT4577_4153C.1.pep
RGGRNYKKKKKKKKKKKKKKKKKKKKKKKKKKKKKNPFPKGQFLMGRRSWFQGGGNR

SEQ ID NO: 305341 - protein, 266 aa, Zea mays
  Clone ID: MRT4577_41540C.1.pep
HASEDVDLVLLCTSTPDDLFGGAAQVLSEVGCTKAFGFDITAACSGFLVGLITATRFIKGGGFQNVLVIGADALSKYVDWTDRGTCILFGDAAGAVLVQACSADEDGMLGFCVQSDGNGQKHLSAIAANDESILSNTNGVPGFPPKKATYSCIQMNGKEVFRFAVRCVPQSIEKALQEAGLPASSIDWLLLHQANQRIIDAAASRLDIPSDKVISNLANYGNTSAASIPLALDEAVRSGKVKTGDIIAASGFGAGLTWGSAIVKWG

SEQ ID NO: 305342 - protein, 157 aa, Zea mays
  unsure (1)..(157): unsure at all Xaa locations
  Clone ID: MRT4577_41541C.1.pep
VNLVQFNGVPGFPPKKATYSCIQMIGKEVFRFAVRCVPQSIEKALQEAGLPASSIDWLLLHQXVCLTRNIVDLNHCYYKXLLRXANQRIIDAAAIRLDIPSDKVISNLANYGNTSAASIPLALDEAVRSSKVKAGDIIAASGFGAGLTWGSAIVKWG

SEQ ID NO: 305343 - protein, 185 aa, Zea mays
  unsure (1)..(185): unsure at all Xaa locations
  Clone ID: MRT4577_41542C.1.pep
CVGCVSLSLASAPPDKSALTNLERDKSGGGSRVSSSLSALRWGAASTKTARCVSPPLAARRRSSGESVAAASIMTAAVSTTGENNKTSAAPTEEHHQHAHHMPSYKMESIKXLADWAXRDSILTHSKPAEKXGQPQDXLPDRPSEGWHDGGKELRERAKESPDEYIVCLVGDMTTXEALPSHHTM

SEQ ID NO: 305344 - protein, 91 aa, Zea mays
  Clone ID: MRT4577_41543C.1.pep
WRLAAPWELNRSMCLECLKKVHKAPGGSCSEIYPRSVVCQFFCSWWALHSVVGDCSTQGLIGCVDRVYALDKNVQCDGTIYPAWNKKAPCV

SEQ ID NO: 305345 - protein, 112 aa, Zea mays
  unsure (1)..(112): unsure at all Xaa locations
  Clone ID: MRT4577_41544C.1.pep
KKKKKKKKKKKKKKKKKKKKKKKKKKKKKKKKKKKKKKKKKKKKKKEEKKKKKKKKMKKRGGGEKKXKSAGETKGKRLGEHTTLDRWANTKEAQTERPTEQCPNLNGKRDGP

SEQ ID NO: 305346 - protein, 74 aa, Zea mays
  Clone ID: MRT4577_41545C.1.pep
AALKTNIQSEQLVAFNFTRRVALILVAHKYGPVYPCACTPVIEFRPNKCLQKSKPVTDPYVLRAGPFILTPRIG

SEQ ID NO: 305347 - protein, 45 aa, Zea mays
  Clone ID: MRT4577_41546C.1.pep
PPFFFFFFLYKIAKLMLSIQLTISQRPYLMEDGVLFLQYIINTHC

SEQ ID NO: 305348 - protein, 584 aa, Zea mays
  unsure (1)..(584): unsure at all Xaa locations
  Clone ID: MRT4577_41547C.1.pep
MAASWRAVALAVAAVVWLLAVAGGARAFPAEDLVARLPGQPPVTFRQFAGYVDVDAKAGRSLFYYFAEAREDAAAKPLTLWLNGGPGCSSVGGGAFTELGPFYPRGDGRGLRLNKKSWNRASNLLFVESPAGVGWSYSNTSSDYSTGDVRTAHDMYQFLLGWYAKFPEYRSRALFLTGESYAGHYIPQLADVLITHNEKSKGFKFNIKGVAIGNPLLKLDRDVPATYEYFWSHGMISDEIXQAISHSCDFEDYNLNDPHNESKSCNDAIAEANSVVGDYVNNYDVILDVCYPSIVMQEPDRXALVTHNERSKGFKFNIKGVAIGNPLLKLDRDVPATYEYFWSHGMISDEIFLAISHSCDFEDYTFNDPHNESKSCNDAIAEANSVVGDYVNNYDVILDVCYPSIVMQELRLREYATKISIGVDVCMSYERFFYFNLPEVQQALHANRTHLKHHWSMCSDILNYSNTDGNINILPTLQRIVEHKIPLWVFSGDQDSVVPLLGTRTLVRELAHAMGLHVTVPYSTWFHRGQVGGWVTEYGNFLTFATVRGASHMVPFAQPDRALGLFRSIVLGRRLPNATSPPIG

SEQ ID NO: 305349 - protein, 239 aa, Zea mays
  unsure (1)..(239): unsure at all Xaa locations
  Clone ID: MRT4577_41548C.1.pep
MLDFTCASLFGGKLPSKAIGDGAAAKAFKWLVFQLHPLASKAIRPWPLEDLLLHTFRLPPFLVRRDYAELTAYFADVAAGVLDDAEKAEPGAVPRDELLHNLIFLAIFNAYGGYKIFLPHVVKWLARSGPELHARLADEVRAVVPPGSASAGDAITLSDVEKMPLVKSFVWETLRMNPLVEFQYGRARQDMVVESHDAAYEVKKAEMLFGYQPLATRDERVFQXXGEFVPETGSAVCSD

SEQ ID NO: 305350 - protein, 152 aa, Zea mays
  Clone ID: MRT4577_41549C.1.pep
MSSLCRAPRETDFARFPDSAPIVIDNGASTFRIGWAGEAEPRVSFRNIVQRPRHRSSGETVTVVGDTDPALMKYFDCTRTSIRSAFDDDVVYQFEYMEYILDYAFDRLGATSEVGHPILMTECECNPSFSRARMSELLFETYGVPSVAFGID

SEQ ID NO: 305351 - protein, 43 aa, Zea mays
  Clone ID: MRT4577_4154C.1.pep
KYQITAKLIQHQHIQTMARVIFYEEYASNLTNYQFLSHMSICS

SEQ ID NO: 305352 - protein, 67 aa, Zea mays
  Clone ID: MRT4577_41550C.1.pep
KGFSNVLPIPLDIIRCKKIHCEVVCLPTGVLMNILILQPTLYSLKYHNLQTTVLCFPVYDELASSRR

SEQ ID NO: 305353 - protein, 110 aa, Zea mays
  Clone ID: MRT4577_41551C.1.pep
PSPLYIQKCSFSSATPMTIRSLTLEPATKSRNRILNKSSPTRSYASCWKPLLPSRGGTHSPAQAPLPAIRPRSDPHVHRTRPRVSMFQPPASQLSKPAASLSRPCGRTPG

SEQ ID NO: 305354 - protein, 108 aa, Zea mays
  unsure (1)..(108): unsure at all Xaa locations
  Clone ID: MRT4577_41552C.1.pep
LFVGVLLGXPPLALVVLSXAXVRLSLVXXCXCLPLGAAPPPVXGVLPXXXXRXLLXXXLXXLGXXXLXXXFLVXRPXXXXRFVGGVWXRPLRPLLVXAVKVLPVWRRA

SEQ ID NO: 305355 - protein, 70 aa, Zea mays
  Clone ID: MRT4577_41553C.1.pep
IRYSKHSSRRSTLKNNTSWTVRGSSAGCPGALFENTTWLRTVRFLPADRPRTTMTSDKNYTKCTFLLQTV

SEQ ID NO: 305356 - protein, 62 aa, Zea mays
  Clone ID: MRT4577_41554C.1.pep
LDVANAQSVVYKVLSVVAAAPAYCMSVGGALSDIQENMVNERHPHGVDRVLLRSGVHRANGL

SEQ ID NO: 305357 - protein, 54 aa, Zea mays
  Clone ID: MRT4577_41555C.1.pep
QTLRCPPVGAPFGLGGPPGWGNSGGGKKKKKKKKKKKKKKKKKKKKKKKKKKKK

SEQ ID NO: 305358 - protein, 131 aa, Zea mays
  unsure (1)..(131): unsure at all Xaa locations
  Clone ID: MRT4577_41556C.1.pep
PTRPTLITMYQMLAFWFRHAFQLLTRLDDPMEDKYWKAANRYCWILERVGKLLAHELDLYLLMDXPDTFLPIMSHFAXRAETGPACEGICAPCTGRLPVSSVTRALKMRLPXVIWVKTDPRCGPWLQEAKM

SEQ ID NO: 305359 - protein, 82 aa, Zea mays
  Clone ID: MRT4577_41557C.1.pep
SMSYDARLHACLRLESSRSSQCGKGCSLGMGLPLPGMGLDYMCPMCTSSLLVTYRYVPTRPSLLVNKPYKWTPARPWNRKPA

SEQ ID NO: 305360 - protein, 98 aa, Zea mays
  Clone ID: MRT4577_41558C.1.pep
MASIVGSSDLSIAMPGKEINSNSLAFSPVRKGNTFLRLQPVPMRSDSCADKKDTVCKACDIVNKQLALCEHTEACDESRVSELAADSMDTNEIVMMLE

SEQ ID NO: 305361 - protein, 153 aa, Zea mays
  unsure (1)..(153): unsure at all Xaa locations
  Clone ID: MRT4577_41559C.1.pep
YQSLRPTQMGXXLNIDVSATSFYKAQPVIDFVVEYLNLRDTXKRISDQDRIKLKKALKMVWVATNHMQDKCIHYRITGLTSTPLKDLTFDQEGTRVSVVHYFKQRYNYYLQYTHWPCLQAGRVDKQIYLPIEVCSIVQGQRYSSKLNENQVRN

SEQ ID NO: 305362 - protein, 64 aa, Zea mays
  Clone ID: MRT4577_41560C.1.pep
KKKKKKKKKKKKKKRKKKKKKKKKKKKKKKHKKKKKKKKKKKKKKKKKGAPVLKVPIFLPRAST

SEQ ID NO: 305363 - protein, 89 aa, Zea mays
  Clone ID: MRT4577_41561C.1.pep
GGGGGGSLVYYGGRNFYVPPALSPRERAVLLAYPACASNCDRRVTCVMIHTIPYHCVASHTVSINLLKMPRGSFKPTVGFLQPRKTKRP

SEQ ID NO: 305364 - protein, 66 aa, Zea mays
  Clone ID: MRT4577_41562C.1.pep
PTTRPPTRPPTRSPTRPKKRGLVNLKKGERNTLRFKGSDAPYTGIRPSYLFYSRAKHSFYCPLIYN

SEQ ID NO: 305365 - protein, 188 aa, Zea mays
  Clone ID: MRT4577_41563C.1.pep
MDSSHGGPGCTLLRRGATDAAMAFLLPRSAIAANDAEWHAHAHPVAGAVGHGAPAPHEHAAGLSPLSAPPPTAGADDDLLPPPSRAPVQKAAPHFGFPLQPGDASAAAPSGSEGYPFIGSNPTVPLPTGMTDTSTVLPLPDTGTGDATTKAVGLAASVRAPVSSMIGLGVFLATLFLCATSNHIIHLY

SEQ ID NO: 305366 - protein, 70 aa, Zea mays
  Clone ID: MRT4577_41564C.1.pep
PISHGRPIGHERLRTANVVLRAWCRAMYSHILNFKGGWAETDVSSYFGVRRGPDLDDANTTRRRGHQPQG

SEQ ID NO: 305367 - protein, 85 aa, Zea mays
  unsure (1)..(85): unsure at all Xaa locations
  Clone ID: MRT4577_41565C.1.pep
AGRGLSFRNQDLRTFHERXQDVYKGAWLEFEHLDSRKRESTPSVFPQKICTSNGLCFXKFLTDQSYRGRSITRQCFVKKKKKKKK

SEQ ID NO: 305368 - protein, 115 aa, Zea mays
  Clone ID: MRT4577_41566C.1.pep
EQQEPYAPWTLIGCIEHSQAHTRSIYYTCCSRPTAIGLLVAKRPDSNKDRTYAIIRCWGERDLATDDDAPAPDVADGDEDHHEPKGQPLVDIHELTKKGGLQMLLPRPVELTLPS

SEQ ID NO: 305369 - protein, 90 aa, Zea mays
  Clone ID: MRT4577_41567C.1.pep
TYQMVALVAFINRETVRSQELQDSTEMNDKELTKSIKSLLDVKMINHDSEKEDIDAESSFSLNMNFSSKRTKFKITTSMQKDTPHEMYKG

SEQ ID NO: 305370 - protein, 579 aa, Zea mays
  Clone ID: MRT4577_41568C.1.pep
MAARSLLLYALLLLALATAAPSHGLTQADVAKRLKEVLSERNRGHEMLDSWNGDGDPCSPSTWEGFSCEPKDGAQVVVKLNFSSKKLQGPIPAEIANLTELNEIHLQYNNFTGFIPASFSAFRHLLKLSVICNPLLNNKQPDGFSSGVNFSYGGCATQEYYSSPAEEYQSPPAVASQKVYVIGGVAGGSLACTVALGSFFVCFNKRERRSPKKDCSSTTNPVFQECSIHNTTNPAVQQLSLKAIQTATSNYKTMIGEGGFGAVYRGALANGQEVAVKVRSSSSTQGTREFNNELRLLSAVWHENLVPLIGYCCEKDQQILVYPFMSNGSLQDRLYGEASKRKVLDWPTRLSVCIGAARGLVYLHNFAGRCIIHRDIKSSNILLDHSMCGKVADFGFSKYAPQEGDSNPSMEVRGTAGYLDPEYYSTQVLSTRSDVFSFGVVLLEIVTGREPLDVKRPRHEWSLVEWAKPYIREYKIEEMVDPGIKGQYCSEAMWRVLEVASVCTEPFSTFRPTMEDVLRELEDALIIENNASEYMRSIESTGTLGSNRYLSIDRKMFASGSARIESMKGNLQAMPSLPR

SEQ ID NO: 305371 - protein, 91 aa, Zea mays
  Clone ID: MRT4577_41569C.1.pep
LFPGTGRRPLQQSCGGARPCPCTYFRPGARLISRPALHVKTVYMYLGATDATAMAVPAASASTAAHRDIDDPPLMCVRSPVRAPSFSASDA

SEQ ID NO: 305372 - protein, 110 aa, Zea mays
  Clone ID: MRT4577_4156C.1.pep
MAVGLAWSRPESAEVRDGPTGDQSHVSTRVMGTYGYAAPEYLSTGHLTAKSDVYSFGVVLLEILSGKKAIDKNRPTGEHNLVEWAKPYLTNKRRVFRVLDSRLEGQYLLN

SEQ ID NO: 305373 - protein, 75 aa, Zea mays
  Clone ID: MRT4577_41570C.1.pep
RLIPLPADVGCTIGDQRRARHRRVVLHLRRHPFRTGQDVSRRDLCSRSCTRNSCYMKFSVLVALELEPVIGSSGS

SEQ ID NO: 305374 - protein, 133 aa, Zea mays
  Clone ID: MRT4577_41571C.1.pep
MRIMLTSKLPRRRLEKRIYIPLPDSESRKAPININLRTVQIAADVNIDEVARRTEGYSGDDLTNVCRDASMNGMRRKIAGKTRDEIKNMSKDDIAKDPVAMCDFVEALVKVQKSVSPADIEKHEKWMAEFGSA

SEQ ID NO: 305375 - protein, 80 aa, Zea mays
  Clone ID: MRT4577_41572C.1.pep
QFTYTVGETYKQGPGQILALMIFYSQTEFPFCLNHSQPQGKHPFLLPNRPCNTSEGPFAKIGLVAHVATRDMFLAISILK

SEQ ID NO: 305376 - protein, 221 aa, Zea mays
  unsure (1)..(221): unsure at all Xaa locations
  Clone ID: MRT4577_41573C.1.pep
MADRVHPAPPPLPLSSTPPPPQHPPTTETTPLQQHPSFAAAVYLAYRPRAPSFSVTSLSIRGLDAASLARSSSSSSATLSPRLDAAVRADNGRNAKVGVDYRGSGSVAVSYSGARLAAGPWPAFRQPPRNVTAFAVAMSGRGVRLTEDQATRIAAXAGRRXAVPLQVEATVPVRLRFGSVLRTWTVPVRARCDVSVNRLDGDAVVVNRGCRVRVRPLWWWW

SEQ ID NO: 305377 - protein, 67 aa, Zea mays
  unsure (1)..(67): unsure at all Xaa locations
  Clone ID: MRT4577_41574C.1.pep
PPPCPKPYPAGAATKQTETQXRRGGTASRKPLATKAARKSXPWRGGVKKPNRGGGGTDXFREIRKYK

SEQ ID NO: 305378 - protein, 104 aa, Zea mays
  unsure (1)..(104): unsure at all Xaa locations
  Clone ID: MRT4577_41575C.1.pep
LSQSQTPQASTSNPHSPKDPIREGKTETRGAEQSRARMASISKFSTRARVVWICLLIAFFSLRLFQIPFPRSQSSYSSWPRTRPPXRRTQSRPRSAAASAGCWP

SEQ ID NO: 305379 - protein, 49 aa, Zea mays
  Clone ID: MRT4577_41576C.1.pep
PAAGQGPAPAIPPPIRICRRRRRTPLITPLWGIQQRQLLPKKCPTPPPD

SEQ ID NO: 305380 - protein, 245 aa, Zea mays
  unsure (1)..(245): unsure at all Xaa locations
  Clone ID: MRT4577_41577C.1.pep
MPPKQATASPRDQRPAKSSPVKNAYLLAYNAVSATLWAGVLYKTVTIGAHEIESARKAGSFFGRSDLQSAAAGLASGKVFGELDEYVRLVQSLAGLEVLHSLVGIVRAPLLTTLMQVASRFLLVWGIAYNFPATTSHSPAYSSMLLAWSFTEVVRYGYFVFTLSGLGVPALLSFLRYNTFMILYPLGISSECWLVYQAIPAAKMVDERIPYVLWAILAIYVPGSYVLFSXMLRQRXRIQKQQRQA

SEQ ID NO: 305381 - protein, 340 aa, Zea mays
  Clone ID: MRT4577_41578C.1.pep
MASPPPPRVCVTGGGGYVASWLVKLLLSRGYAVHATVRDPSDPKNAHLQQLDGARERLRLFKADVLDRDALATAVVACEGVFHVASPVPADKVLDPESEVLSPAVKGTLNVLQACSANNVQKVVVVSSTAAVYFNPSWPQGRTKDESCWSDRDLCIKNENWYCAAKTIAEETAVEYGEKNGLIVVTVCPCIVLGPLLQPLINASSELLVYIIKGGPRVLKNLPWNIVDVRDVADALLLVYEKVESSGRYICAPNRISTNNMVNLFKKSYPNYNYVNCDNKDYESEISPVTSEKLKSLGWNPRTMEKTLLDNIEYFEKAGFLRDGEGYPCRLPHIFHFASD

SEQ ID NO: 305382 - protein, 65 aa, Zea mays
  Clone ID: MRT4577_41579C.1.pep
ALFVVSVGRRRLRVVRAGVPACGLVGSSPRFPFPVVARAWSSRSPLLRALDLSLVRRRLARARCC

SEQ ID NO: 305383 - protein, 109 aa, Zea mays
  Clone ID: MRT4577_4157C.1.pep
MSEEKHHHFFNHHKKDEEQPAGEYGYSETEVVTATGEGEYERYKKEEKEHKHKQHLGEAGAIAAGAFALYEKHEAKKDPEHAHRHKITDQNVTHCQTQAKGQRIRMSVA

SEQ ID NO: 305384 - protein, 93 aa, Zea mays
  Clone ID: MRT4577_41580C.1.pep
GRVGPNRISTNNMVNLFKKSYPNYNYVNCDNKDYESEISPVTSEKLKSLGWNPRTMEKTLLDNIEYFEKAGFLRDAEGYPCRLLPHIFHFASD

SEQ ID NO: 305385 - protein, 51 aa, Zea mays
  Clone ID: MRT4577_41581C.1.pep
MDMVVPQLYFDKLSVCMLRSTTYISSNYNHRAVMRRSIFGIFCRLRAKRPK

SEQ ID NO: 305386 - protein, 197 aa, Zea mays
  unsure (1)..(197): unsure at all Xaa locations
  Clone ID: MRT4577_41582C.1.pep
PVRPTLLPASAAAWVQRGGESPPPPRVCVTGGGGYVASWLVKLLLSRGYAVHATVRDPSXNKHAHPMPLSSCFCVCVCVNTRWELGPGDSCMSAGSLLQGDPKNAHLQQLDGARERLRLFKADVLDRDALATAVVACEGVFHVASPVPADKVLDPESEVLSPAVKGTLNVLQACSANNVQKVVVVSSTAAVYFNPSW

SEQ ID NO: 305387 - protein, 52 aa, Zea mays
  Clone ID: MRT4577_41583C.1.pep
TPADLTGVLQQGGMFVFRGKELLYSWRDQGTGDHAPLDDVHSACRKIPSRLT

SEQ ID NO: 305388 - protein, 44 aa, Zea mays
  Clone ID: MRT4577_41584C.1.pep
NSSSECLPYNTIMTNRAGMVSLTPCTMLMINGTKIKERWSPILG

SEQ ID NO: 305389 - protein, 107 aa, Zea mays
  Clone ID: MRT4577_41585C.1.pep
PRGLFGLPKLTQVELQDNYLSGEFPEVGSVAVNLGQITLSNNQLSGVLPPSIGNFSSVQKLLLDGNMFTGRIPPQIGRLQQLSKIDFSGNKFSGPIVPEISQCKLLT

SEQ ID NO: 305390 - protein, 76 aa, Zea mays
  Clone ID: MRT4577_41586C.1.pep
YQQMYTQLASINTLKFPRTEKCSIVIAKRQLCNQEREVKKLIYLENLFMQHSSVLGSSDVRFFLYILAGLPWFIPS

SEQ ID NO: 305391 - protein, 67 aa, Zea mays
  Clone ID: MRT4577_41587C.1.pep
GAWPERGEGFTILYAIAMAAGMDARLGEGTLVFSAWVWVQVLFEETLPLLSLSPSLTSCPKGSAKAS

SEQ ID NO: 305392 - protein, 117 aa, Zea mays
  Clone ID: MRT4577_41588C.1.pep
VSGSNSSRGPWVFLQCITACSPENERLRLTYVQDLVLIRLRSEQMQLPRRRYQADACLVIRLLYCNMSQTHLEMAHVLLSICTIDADEDTVRQTNTDLVRSPSMLVGRAHITNTNQA

SEQ ID NO: 305393 - protein, 133 aa, Zea mays
  unsure (1)..(133): unsure at all Xaa locations
  Clone ID: MRT4577_4158C.1.pep
MFYFKLYGILWFWIVIMFLFWGYGFVGLXNFNFFFFLXLKFFIICFCFLRVVKIVVTFLVGFFXGFLGFFFCCWYXFFRFLKLLVFFKAVFFLFVFXFCLXERCFFLFFKVFVCFLWXLSLVIVFFVEVGVLF

SEQ ID NO: 305394 - protein, 64 aa, Zea mays
  Clone ID: MRT4577_41590C.1.pep
FLLLPLSLNPPRVKLPGGFINKRGRPHNIQYRYFFRPLACSTINNSLNNIFLFLSSTLSYVTKL

SEQ ID NO: 305395 - protein, 159 aa, Zea mays
  unsure (1)..(159): unsure at all Xaa locations
  Clone ID: MRT4577_41591C.1.pep
RLRAHDRPALRRLRGAAPHGRRLRQLQRQLRANNRSAYYEVTRPVAPRAHHFNPFISPDGERVGYHRCRGSGNGDSPLLLESIKGPAPDTFSLFRIDGSFPSFSHDGKRIAFVGLPXLYVVNSDGXGGRXXVFSGNAFPTTWDWKXEGVIYTSVGPDFA

SEQ ID NO: 305396 - protein, 134 aa, Zea mays
  Clone ID: MRT4577_41592C.1.pep
MENCEVLFPGGSSGANAFTRPEQERKRGQPWTEEEHKLFLLGLKKYGRGDWRNISRNFVQTRTPTQVVSHAQKYFMRHNSGGKDKRRSSIHDITTVKLSDDQDQPPSSPSQSSLITDQFNALALTSGAAYSPSN

SEQ ID NO: 305397 - protein, 72 aa, Zea mays
  Clone ID: MRT4577_41593C.1.pep
VILFAPPLILPMENNQKSPSWPLCCVVHPFGLRSILFAKTGLAIPSILCNPLKSALFLCFRKNFKICHLFPN

SEQ ID NO: 305398 - protein, 95 aa, Zea mays
  Clone ID: MRT4577_41594C.1.pep
MAPKPFFFLKPAAPSLLPAQRPFSCASSSKKPSPLSIFPHVSSLCFSCTCAGVWGLPWRPPPWSPLRRAAMAELALASCSPWAWVPILSLLPKCR

SEQ ID NO: 305399 - protein, 655 aa, Zea mays
  unsure (1)..(655): unsure at all Xaa locations
  Clone ID: MRT4577_41595C.1.pep
MACRATLLPLFLFLFLLVAPAPALATSGTIVFTTLGRSRYAFDVFALPIAPLSAASAELRLTDGTSVNYNGNFAPSSSGPPSLLFVSERNGSLNLYLTPVPTSASARRRDALEEEDVTAPPTPLLPWDPIALKDRPSLTPDGAHLVYVSTAEPAGAPRRSWAAVYSTSLAPGGATRRLTPRGVADFSPAVSPSGVWTAAASPGPRGWAGEVEDLRTDIYVFRTSDGSRRALAVPDGGWPTWADDTTVFFHRRDADGWYGVYRARLTFTDDDVASVVDRITPPGFHAFTPAASPGAPGLVAVATRRPGSDYRHIEVIDLSGGGGGANNRSAYYEVTRPVAPRAHHFNPFISPDGERVGYHRCRGSGNGDSPLLLESIKGPAPDTFSLFRIDGSFPSFSHDGKRIAFVGLPGLYVVNSDGSGGRRRVFSGNAFPTTWDWKRKGVIYTSVGPDFASESTEVDVVAVSLGDGDGDDPSVSIKKLTVGGENNAFPSPSPDGKWVVFRSGRSGHKNLYIMDAEDGEAGGIRRLTEGPWSDTMCNWSPDGEWIAFASDRHNPGGGSFAIYMVHPNGTGLRRVVHSADVGRTNHPWFSPDSKTLVFTSDYAAVSAEPISNPHHYQPYXEIFTVNIDGXGIRRLTHNXFSEDGTPARWGRRTTS

SEQ ID NO: 305400 - protein, 58 aa, Zea mays
  Clone ID: MRT4577_41596C.1.pep
NCNFDLDLRMRISILPIVFINLQKVKYREQLRHWVGPVINKIIILYMTNYYISNHIEN

SEQ ID NO: 305401 - protein, 213 aa, Zea mays
  unsure (1)..(213): unsure at all Xaa locations
  Clone ID: MRT4577_41597C.1.pep
MHTQPMASSDEASMFWGPPTEDGHADAYMDAEYRDLVSGDVPMEIQDIEHCGIEVDSKIKCFHGDDPIKKVAFEGVDTGRRFNACKNAKPCXNFXWYEPEWPATLQRALQQLWGMVQTNQKKKEESEALVNQMMLEKMTFAAANASVTQEKNEVVQKKMQLELDVADMKEKYQRKMKRMKRELQCKEKWLLMSVSCNVTVVAVVICLFAMKLL

SEQ ID NO: 305402 - protein, 178 aa, Zea mays
  unsure (1)..(178): unsure at all Xaa locations
  Clone ID: MRT4577_41598C.1.pep
RPGLACKWAAYLLRSVRWRDDXEPLACTLTFLLRGRLPRRGSQGDXTDDLIVXQYKATSLWIFADFXPVPLKQGFVIVTNMKFAEKTIPAKLIXIFLLXIDIPAYTQMTIGGALKVGLMRGRLAADLEKDEQPTYMVISTEPTXHWITAYTALGPLKQMCHYSVADSTLTVMDSTLAK

SEQ ID NO: 305403 - protein, 80 aa, Zea mays
  unsure (1)..(80): unsure at all Xaa locations
  Clone ID: MRT4577_41599C.1.pep
LEDFVSRPDKISAAEIAAICQKVGMHPVPQNPICLPPQGFXKGPRPPVKNLEPAFVFSKWGPLSVGLVFCLPIEYVLAKK

SEQ ID NO: 305404 - protein, 96 aa, Zea mays
  unsure (1)..(96): unsure at all Xaa locations
  Clone ID: MRT4577_4159C.1.pep
GFFFCRPPLRAPPPDSPKPPLSPLRGPPQGGQPGFFLQLSLAGFSRVLSLVFEPISXPXSAPPLPFSLSITTSYTQQSSPSESQFSTPFFSPKLFL

SEQ ID NO: 305405 - protein, 134 aa, Zea mays
  unsure (1)..(134): unsure at all Xaa locations
  Clone ID: MRT4577_415C.1.pep
ARCYTRAVPLFFEVGGRRRLARLMTYEGVPPPCDRTRRLVVPVALGVLRLRPGHMSCLLGALSXAVGWGCXGALRGLAALRMAMAWVAXARRKXLASLRLAAAASAAAALGSLLVVLAPVGCWVCGFVPVGSGG

SEQ ID NO: 305406 - protein, 551 aa, Zea mays
  unsure (1)..(551): unsure at all Xaa locations
  Clone ID: MRT4577_41600C.1.pep
PRLSFESWLEQSRITSGESSSQGFCTPKKRPYVPTVCASFIPICVDRRKPVIGMSFHSCNDAEEFYKSYAHDGGFSVRVGSQNKALGEVINKRYMCSRAGFKKVKEADDPPKNQKNHALTRCGCDANMYVKLGPDKKYHITSMVEEHNHPLCSPNKIPFLRSNRVVSQRAKNTLFTCHKASIGTSQAFRILQVSDGGFNNIGCTKRDLQNYYRGLREKIKNADAQLFVAQLERKKEANSAFXYDFVVDEEGKLLYIFWADATSRKNYSLFGDIVSFDSTYSTNHYNMKFTPFTGVNHHMQSIFLGGGFLINERIESYEWLFKTFLVAMGGRAPXLIITDEDASLKSSIGSILPETIHRFCMWHILEKIPEKVGHTKTAEEDFWKLLNDCVWGSETGDEXLRGEKLNELPLAYFLKRFEKRCKREIVYDEEGNLLDEKPLDANEVETRRKIAAVRNKIEDMIQQAKSSKEGMDFLVSSVMNMEGTLGQIVPSTMQSRQQEYEGFIGCQIPEQVHIHPPTDVRSKGRSKRIKKSKELPKSRKRKNANHEPAAP

SEQ ID NO: 305407 - protein, 76 aa, Zea mays
  unsure (1)..(76): unsure at all Xaa locations
  Clone ID: MRT4577_41601C.1.pep
SSLLPAAISSLQGKGVGLRGQLTKKPFQLLQSKSSIFPTTILPSTXSSSLPHSMSWLPLPTGSGKMEWALDTLLKS

SEQ ID NO: 305408 - protein, 76 aa, Zea mays
  unsure (1)..(76): unsure at all Xaa locations
  Clone ID: MRT4577_41602C.1.pep
CTCGKPKGKLGQWKPIKCKGQPPWDKGDPQINFLEGKKSGQGNFLTPQKGKITSGPENQICDVXWAPQQPKKRKFC

SEQ ID NO: 305409 - protein, 48 aa, Zea mays
  Clone ID: MRT4577_41603C.1.pep
SPPWASSAWGPFRQKPRYPRAHKAQHSSLWNLLTALDTFNTTQIFSMI

SEQ ID NO: 305410 - protein, 70 aa, Zea mays
  Clone ID: MRT4577_41604C.1.pep
VFQVHFGTQISMYCHMMGMAPNGQELSGCYRMQSKHSQSVTSHSWFKPPLAKYSFSALNKMRRKVASKPR

SEQ ID NO: 305411 - protein, 185 aa, Zea mays
  Clone ID: MRT4577_41605C.1.pep
MDTRVPPVPMDPATAERLRRDGHDPDEMEAVFARVLSRIHFALPDQSVSVDARLFGLLPHDSVDCVSRLPDVLLRNIVSRLPVKDGARTAALSRRWRGVWRSAPLVLVDSHILPAGTAAARADARRVTSAVSRILDAHPGPFRCVHLTSSHMEDFPGLLARWLQILAVKGIQDLVLVNRPWALDF

SEQ ID NO: 305412 - protein, 72 aa, Zea mays
  Clone ID: MRT4577_41606C.1.pep
WGVWGTFLLQVHSPSSFLFICSRCYFSRVLRIFPMASEMSTDGVGAYRLEGGEEWRREVGIRTGVAREALPG

SEQ ID NO: 305413 - protein, 143 aa, Zea mays
  Clone ID: MRT4577_41607C.1.pep
AVRLGSAPPDPAAAAAAGKPRGRPGRLRGVLDMIVVPTLDPTHVRPELHPRLEGQSLDGWRRPKRCRGGRWSVILRRKTRTTTHWPDDGGGGGARQARGGESRARGGDRHVEGGDLRPGGRVGQDGCRRRRYARERFSFSCFS

SEQ ID NO: 305414 - protein, 123 aa, Zea mays
  unsure (1)..(123): unsure at all Xaa locations
  Clone ID: MRT4577_41608C.1.pep
ELLLYPSSLSXTSSPFSHRXPVAGSPPPDASCRPRQEAGCSRSALPSLLSSLASWLLCSTCRFLIWRKLFFFFFFFLDQTSVVSSCNGRHYCSCGLPPQHDACFCSEGVQNSSLIGLIPNRSC

SEQ ID NO: 305415 - protein, 120 aa, Zea mays
  unsure (1)..(120): unsure at all Xaa locations
  Clone ID: MRT4577_41609C.1.pep
PGPLPGVAKGPGPKGGRSPHFALGGPGPVPGXKPGPNVGGRLPGGPRGTTPRRHGPGQEHKXPSGPDGRGKPRPAMSPRAPGGAPPRGTREPGTGPPPRPPRAPSPPELTPEGPQAWGPQ

SEQ ID NO: 305416 - protein, 87 aa, Zea mays
  Clone ID: MRT4577_4160C.1.pep
IVCYYHWIPTLILQQQQAATFISGHWETVLYQTLQGGLKKNLPLLWAMALAGTLKQSCEMHERACIFFFKGSPKLAPKGVFCRIFFL

SEQ ID NO: 305417 - protein, 39 aa, Zea mays
  Clone ID: MRT4577_41610C.1.pep
SECVVGKTIIDRNHNGKCISQSHLQGYQWSKSCLIVASC

SEQ ID NO: 305418 - protein, 87 aa, Zea mays
  Clone ID: MRT4577_41611C.1.pep
PPPRPHPARPRPEPTPRPLTPTGQRTLPACGTGATCDANSEAWWANPNRTPPTQMRKLRSWRRGARGDLGCRGGGERRARGSLGFSG

SEQ ID NO: 305419 - protein, 63 aa, Zea mays
  unsure (1)..(63): unsure at all Xaa locations
  Clone ID: MRT4577_41612C.1.pep
VSPTCVTVXGAGNTPSYYKQVHVPHEPTELCPGPGSILDDDSRKKELWDPKCPRTDLSSPCLN

SEQ ID NO: 305420 - protein, 102 aa, Zea mays
  Clone ID: MRT4577_41613C.1.pep
SKGPPGPRGGRGRGSRGASNPGPPAKTGQKKSGLPPPGGGTRPKTQTPGGWGTRSNPPGKTRTRWTGPGPKTPPGRSETPKPGGLRGNQNQPVGVGGNQNIR

SEQ ID NO: 305421 - protein, 41 aa, Zea mays
  Clone ID: MRT4577_41614C.1.pep
LDAEASGHLKRVIVTPPGYPRLAQYLHFDIQSTGQQSHEAA

SEQ ID NO: 305422 - protein, 69 aa, Zea mays
  Clone ID: MRT4577_41615C.1.pep
YGECGRRRGYMGGTGFNSEKKNQVHEAANLSSCLIRGGHKLMNLHLNPPLVGERGRASYHAQRHGVLTY

SEQ ID NO: 305423 - protein, 123 aa, Zea mays
  Clone ID: MRT4577_41616C.1.pep
MKQKIVIKVQMSCDKCRSKAMEVVAATLGVDSVAIDGEGRDKVVVVGDGVDSIKLTGALRKKVGPAHLLQVGEAKKDDKKPPPAVVPAYYPPPHPVNVVYDHPAGYPWYGYQAQHDTTSCSIM

SEQ ID NO: 305424 - protein, 190 aa, Zea mays
  unsure (1)..(190): unsure at all Xaa locations
  Clone ID: MRT4577_41617C.1.pep
KKPCPRSLRPEIHECPKSQDPCASRDDWRCARSMHEFSAKDIDGHMVNLDKYRGFVCIVTNVASQXGKTEVNYTQLVDLHARYAECGLRILAFPCNQFGKQEPGSNEEIKEFAAGYNVKFDMFSKICVNGDDAHPLWKWMKIQPKGKGILXNAIKWNFTKFLIDKNGCVVKRYGPMEEPLVIEKDLPHYF

SEQ ID NO: 305425 - protein, 44 aa, Zea mays
  Clone ID: MRT4577_41618C.1.pep
RAVIKSIGSPNTGVGTSTATETSCSAIYRAVMGILGGCEERSAE

SEQ ID NO: 305426 - protein, 86 aa, Zea mays
  Clone ID: MRT4577_41619C.1.pep
ARMNKNCQRNISQPFLIHLLPKNEDQNLPLVFCEIWTSKIASNGSWLRAYSSRWGERVVLITHSSLAVILTQPPVGRWCNRTASGN

SEQ ID NO: 305427 - protein, 64 aa, Zea mays
  Clone ID: MRT4577_4161C.1.pep
LASSPTLCRHLHPSPLLVARHFGLMQGGGREICCCYPHELELVLRLSPLLGKQLNLGTEGTVNM

SEQ ID NO: 305428 - protein, 101 aa, Zea mays
  unsure (1)..(101): unsure at all Xaa locations
  Clone ID: MRT4577_41620C.1.pep
RGGXASPXAPPGRGLGGWSPXSAPPXSAASXRXCPRXXARLRXGPGRRSRXGVFWRXALXXXPFVPSSXALVVRGXPRAGARPALLGGXGXXXPXWXWGRL

SEQ ID NO: 305429 - protein, 50 aa, Zea mays
  Clone ID: MRT4577_41621C.1.pep
KRGRHWPAGKEETEAGWAGSIAHPVGPGPFGWGRFKALVFHISRQNNSEG

SEQ ID NO: 305430 - protein, 94 aa, Zea mays
  unsure (1)..(94): unsure at all Xaa locations
  Clone ID: MRT4577_41622C.1.pep
XPGXXEEETEEXXXEKXEXXXQTXXKXXXXXPXNKXARXXXNXXEGXXRXXKXQKXXXXXXXXXXEXGRXDKXQXXXXXXEAASPXXQXEXATR

SEQ ID NO: 305431 - protein, 416 aa, Zea mays
  Clone ID: MRT4577_41623C.1.pep
GPHHSGGAGTGHDAHTYGGMSNTFKLLIVLGLLVCSIAFAAMAILKARSLKKASEARAWRLTAFQRLEFTCDDVLDSLKEENIIGKGGAGIVYKGTMPDGEHVAVKRLSSMSRGSSHDHGFSAEIQTLGRIRHRYIVRLLGFCSNNETNLLVYEFMPNGSLGELLHGKKGGHLHWDTRYKIAVEAAKGLSYLHHDCSPPILHRDVKSNNILLDSDFEAHVADFGLAKFLQDSGASQCMSAIAGSYGYIAPEYAYTLKVDEKSDVYSFGVVLLELVTGKKPVGEFGDGVDIVHWVRSTTAGASKEQVVKVMDPRLSSVPVHEVAHVFCVALLCVEEQSVQRPTMREVVQMLGELPKPAAAAAAAGQGDEVPGSGDGDECSAAPSGAPAADESVEAPHGEATKEPSSQSSPTTDLISI

SEQ ID NO: 305432 - protein, 68 aa, Zea mays
  Clone ID: MRT4577_41624C.1.pep
RRRAASNVIRTQATPVPNHGHGRPHYRLPRPPVHPLDQTFYRLDPHVLRASTASTNFHKNPARWRIEN

SEQ ID NO: 305433 - protein, 92 aa, Zea mays
  unsure (1)..(92): unsure at all Xaa locations
  Clone ID: MRT4577_41625C.1.pep
PNGLLAMFSPSADATFXARAQKSCGQESFGEXLLVKKEPXAYPLWDRRFLWIARRAVCACVCLXHDHFLSARFSLSTDIVPLWCVYKNPTPP

SEQ ID NO: 305434 - protein, 101 aa, Zea mays
  Clone ID: MRT4577_41626C.1.pep
CLHRLLVGSSSVLFWGSLSPFSEVAIEHVDGNDSHVAHSFGSGVCVLLSYSLQLYCAGGAGVQQEESFLGMQQACDDDSCADLPLPCVYACFGKGLVASEK

SEQ ID NO: 305435 - protein, 105 aa, Zea mays
  Clone ID: MRT4577_41627C.1.pep
MDMEAITESLPPLPQPREEVEERRLACGGGDLFPDGIGSERQDINKPIVLSRVDSEQENPCLATPVLLSRFRGTRRGVEEGDKGEAGGASSGHSCHGQWGSERRP

SEQ ID NO: 305436 - protein, 115 aa, Zea mays
  unsure (1)..(115): unsure at all Xaa locations
  Clone ID: MRT4577_41628C.1.pep
GPPTRRAQQXXPFTHLVRSPGAFLPQPQLLPFHLQVVAHIAAFLPPPPQLLPFSPQVVGHINAFLPQQQLLPFSPQDVANNVAFLQQPQLLPFTHLALRNNNPPPPQPPIGGAIF

SEQ ID NO: 305437 - protein, 140 aa, Zea mays
  unsure (1)..(140): unsure at all Xaa locations
  Clone ID: MRT4577_41629C.1.pep
IKDFYVDKAEKAAETERGVDSPHXRVTGEHGRTPNMERNMKAQALRDSTRAGYMPSKTTTAINPKNPDMDDHRKRXAEAAKNAQARKDPTTLQMETAPLTCGCSPEDPNTFCNRRHHRLNKRLTKREDDPDEAEADNPKA

SEQ ID NO: 305438 - protein, 99 aa, Zea mays
  Clone ID: MRT4577_4162C.1.pep
FYDLVKLSFFLSAMPGNPVTARPRVRHIWRAGPSATPHFCGLRCQQSHLSGCYLLPEAVSSGLTHPTMGWWLREGGSRTGAVARGPGVAGTALKGRVKA

SEQ ID NO: 305439 - protein, 71 aa, Zea mays
  unsure (1)..(71): unsure at all Xaa locations
  Clone ID: MRT4577_41630C.1.pep
PACHSMLFSKKYLGTPYCYASIIYSNAFXTISYFASSLNEGSTNIPSSADLDFSANYINLKFYTMPPGRSF

SEQ ID NO: 305440 - protein, 70 aa, Zea mays
  Clone ID: MRT4577_41631C.1.pep
NPGTRPGPKSCGMPPPRSPRFWLERRARKMGWKMAVPTMMIYLAQKNSVAEAVIFLFCFSCSYCRQANIL

SEQ ID NO: 305441 - protein, 146 aa, Zea mays
  Clone ID: MRT4577_41632C.1.pep
MKIAVEGCMHGELDKVYDTMQRLEAAEGIKIDLLICCGDFQAVRNESDLQCVNVPPKFRTMNSFWKYYSGQAVAPYPTIFIGGNHEAANYLWELYYGGWAAPNIYFLGFAGVVKFGNIRIGGMSGIHKQHDYHRGHHERPPYDNAT

SEQ ID NO: 305442 - protein, 86 aa, Zea mays
  Clone ID: MRT4577_41633C.1.pep
VFGLCSSSYRRCWRKDVIDYPIAGSPFVFSFAQGWRSPVSTRVWSCYVSMSGPMTLAKGCMVFKCLKSLFEGKLLFLCHVTNIVYC

SEQ ID NO: 305443 - protein, 116 aa, Zea mays
  unsure (1)..(116): unsure at all Xaa locations
  Clone ID: MRT4577_41634C.1.pep
QLSTLYPAENKQGQLLXRTKLTSAYLQHHQFFILKQKSNLVAAAYKQQQRLLPFSELAAARRAIFLTQQQVLPFYKQLAANPATLLQLQQLLTFVQLALTNPAACYQQHIIGGALF

SEQ ID NO: 305444 - protein, 62 aa, Zea mays
  Clone ID: MRT4577_41635C.1.pep
HEMEVIQMIHISEDNQQLNYLNNDMVKTDKRYKVVDGSMGVVIHKIRDTIEADIYVRSRAKD

SEQ ID NO: 305445 - protein, 66 aa, Zea mays
  Clone ID: MRT4577_41636C.1.pep
IKRGGARRRSKLRGRRWVRSARGKRGNALSRARKERFASRGLTGGWGWLAAVSASYYALRATSSRS

SEQ ID NO: 305446 - protein, 126 aa, Zea mays
  unsure (1)..(126): unsure at all Xaa locations
  Clone ID: MRT4577_41637C.1.pep
SCPLCDQEQETLXDHLLIGCVFAQDFXFKLLSQVNLQSMXPLSXDASFMGLWSWLGNQIHGVAGEAVNSLVILRAWTLWKHQNSCVFDRNRPNVNLAVRMADQEREKWELAGARKLSLLTNRIPGL

SEQ ID NO: 305447 - protein, 59 aa, Zea mays
  Clone ID: MRT4577_41638C.1.pep
RGRLHVNRERDSQPPCLQSYQGGSGYAKDITFQNMVMHDVKNSIIIDQNYCDKARTPSS

SEQ ID NO: 305448 - protein, 90 aa, Zea mays
  Clone ID: MRT4577_41639C.1.pep
MHRPPPPPRPPPRPRPMPPPRGQSLSPCPHRHPRPPLQPPRISHQAPPHPHRGRSPPPSSPRQPQPSPRAHVRPPPWPDAWLAWWCVRLT

SEQ ID NO: 305449 - protein, 75 aa, Zea mays
  Clone ID: MRT4577_4163C.1.pep
QLGIKRGVDGADDSAEFSSAFPMTCSEYQWTTSGSFGQAVLVSSMLSTRSSQLTSRPEYAAEVSYAGCCGKAVGG

SEQ ID NO: 305450 - protein, 82 aa, Zea mays
  Clone ID: MRT4577_41640C.1.pep
KGGGGFEGKKEKERGQIRGGCLGPKKKMDRSRCIGPVCKGGRGSGNNLFISSPRFCFPGWVFNWFGKVITLGLFRQMWCVEF

SEQ ID NO: 305451 - protein, 98 aa, Zea mays
  Clone ID: MRT4577_41641C.1.pep
VDQFVSQQRKTGGTRAQTRADARANDQTGKGPQQPAQPDNATTRAERYRMQTGTTGLTGNRTINPNGEARTMTEPPATAAYRANHTPGELGNARKNDV

SEQ ID NO: 305452 - protein, 68 aa, Zea mays
  Clone ID: MRT4577_41642C.1.pep
MCVVQSFWTIGIAAVYSYICSYCNLKYEGKGIHCCRVKKKKKKKNRAKKKKKKKIKKKKKKKKKKKKK

SEQ ID NO: 305453 - protein, 108 aa, Zea mays
  Clone ID: MRT4577_41643C.1.pep
RRGGNRLLNPSFTRSRWCFVDANHISSQGKGRNLWGAEAKQALHWETPFFKTSLGKILDEGNSEVYYRGIIHKISRWPVCHQIPHRGVVIRNPWGLLKCSPNWGFWAT

SEQ ID NO: 305454 - protein, 136 aa, Zea mays
  Clone ID: MRT4577_41644C.1.pep
MLGLVNAERYVRMIAGVYVAKLKAAKHSSVWVWAVFCGQCEIKCKCVLFKKKKKKKKKKKKKKKKKKKKKKKKKKKKKKKKKKTLQKKNESLAPWAPGPLKKKGTPRVAGIQYQVFQTPPHLGGGPGPKFPLKGAN

SEQ ID NO: 305455 - protein, 176 aa, Zea mays
  Clone ID: MRT4577_41645C.1.pep
LVPGRARLNPNLYESGKVCLSLLKTWTGTGNEVWNAESSTVLQLLLSLQALVLNEKPYFNEAGYDKFVGKADGEKNSITYNENAFLLSCKSMMYVLRKPPKHFETLVKEHFTCRAPHIVDACEAYLGGDLVGHAHDKAYVAEDGNKNCSTGFKIMLGKLLPKLVTAFCEAGITSDP

SEQ ID NO: 305456 - protein, 114 aa, Zea mays
  Clone ID: MRT4577_41646C.1.pep
GRWFPVQAFPGAFVVNVGDALEIVSNGGFRSVEPRAVIPPPKEGILGGVFPFPGQDWMLGPFPELVKEGDPVRVATAAFPGFFKRFFAAKVDGKKLIKRFQPPWEVRPFRSDKK

SEQ ID NO: 305457 - protein, 114 aa, Zea mays
  Clone ID: MRT4577_41647C.1.pep
PRVRARPPPAAPAPVRLRLLFENSRLLQRVQRDEGLRRCWLLLSPELGTVADLAAHVAARFRLRRTCPRGVVLSMDGFTLPPFESTCIFRDNDIIRVKQKSCRKQDQRDGRKHQ

SEQ ID NO: 305458 - protein, 672 aa, Zea mays
  unsure (1)..(672): unsure at all Xaa locations
  Clone ID: MRT4577_41648C.1.pep
MARAPPAAPAPVRLRLLFENSHLLQRVQRDEGLRRCWLLLSPELGTVADLAAHVAARFRLRRTCPRGVVLSMDGFTLPPFESTCIFRDNDIIRVKQKSCRKQVGHNDVHCIRDHDIIEKMPLPVDDKILAIQDQKDGRKHQEEEAHDDHQLEENVTASHSIENNGTSSKRKWNDGVAEIPESSKGKRPKVKNSGKHIDCSKEEQRGSKKLKLSVIDIEDKKATLNHETTTTLVDQQKAEGNNKTELKCEANVADYNAQSDTKKLESRSARRKKIKRLMRQRGKLQTDKNVHEDSLIAPDFPSXAIKMACLSHQAIKMDHXCSFFKHQXADEEESDTSDEIVPVVVRPGHIRFEPAGGEPDKSPAKELQGTFQWSATMSKKKGQKWGMNSSNKKNADIGYHAGIAGCSTEVNNHVMDIKVTENGFCAVNNRRNNEGSNIEMSSVQNIANEEKSSEPFNFESLYPLTRLPKEGDLIAYRLVELSSMLCPELSSYRVGKVLVYDPVSLRIILVPVQEYPITTEENENKDESDMLVDLSPYKEDGSLEIEYSSLVDVRLLKGIETCNEVGSAPAGRPVTLHKNEGNIESQKSPLVSNNTKGEERALGKSESTVWEKNGEPSDKVDLLQNGWATWKQNASTSAWSYRALRSSALGPTMAILRGKNSQSKPPNRKNSK

SEQ ID NO: 305459 - protein, 65 aa, Zea mays
  unsure (1)..(65): unsure at all Xaa locations
  Clone ID: MRT4577_41649C.1.pep
SKQLXLSXGQXGGDGQPSPXTPARTHNKPRXAAKPPCAWTGGLRXVAXPLPAKVXLTGPSRPGFL

SEQ ID NO: 305460 - protein, 86 aa, Zea mays
  Clone ID: MRT4577_4164C.1.pep
EVRSALHYRCPHWSFSTAPCHSPDPLRMWDHVEFVRASGNSAWTVAYSLYGASCVIAYMRKTSSSSPNNIPMSGVLNNTVVSSMIR

SEQ ID NO: 305461 - protein, 109 aa, Zea mays
  Clone ID: MRT4577_41650C.1.pep
MARPPPAAPAPVRLRLLFENSRLLQRVQRDEGLRRCWLLLSPELDTVADLAAHVAARFRLRRTCPRGVVLSMDGFTLPPFESTCIFRDNDIIRVKQKSCRKQVGHNDVH

SEQ ID NO: 305462 - protein, 39 aa, Zea mays
  Clone ID: MRT4577_41651C.1.pep
IHPQALSNGRPTVVEFYADWCEVCRELAPDIYKVEQQYK

SEQ ID NO: 305463 - protein, 93 aa, Zea mays
  Clone ID: MRT4577_41652C.1.pep
ATFACLGLGKTCNRKAWDAGLNFGKTKLSHPAISRWEKFWYMISYHCVSFSYPFKSIQSPPRKKKTRTSQICLWICHRTRKMAPWRYQSDFLP

SEQ ID NO: 305464 - protein, 56 aa, Zea mays
  Clone ID: MRT4577_41653C.1.pep
KLSGTVKYQYILCHWDLAVSDTSPNQMIFIVLCLQEKDGLQLISVTLHHSINWQCK

SEQ ID NO: 305465 - protein, 53 aa, Zea mays
  Clone ID: MRT4577_41654C.1.pep
RAARPPPTISPFSPSSAPCYLAGALPSDLLTRTNRCSGTAGKANACRGPAPVA

SEQ ID NO: 305466 - protein, 73 aa, Zea mays
  Clone ID: MRT4577_41655C.1.pep
PRFLFNFFIHFVNLIFPFVTGAINSSHFYLIYVFILPHLFFLFIFPFFFFFFFLKFTLFLLDPVLSFCPLRYI

SEQ ID NO: 305467 - protein, 58 aa, Zea mays
  Clone ID: MRT4577_41656C.1.pep
HSTVGWVLSWDLYLSACDVYELPLPVSIRAFALFGSSVTFCSCSLADFHCVVDICLNI

SEQ ID NO: 305468 - protein, 62 aa, Zea mays
  Clone ID: MRT4577_41657C.1.pep
VQSIDWNPVVLSVSGGFLGFKNSVWVRLSVCGVTGRMDVFSCKTGASFLCYDVFPWIISALV

SEQ ID NO: 305469 - protein, 82 aa, Zea mays
  Clone ID: MRT4577_41658C.1.pep
NIKIGNGSILNKRWIQIHTLHHLPTLPSFTKVPSLASSKHHHPLHSLSSQPSLNSPLHYILFYNHHPSNNIHSYTYKYIIIN

SEQ ID NO: 305470 - protein, 140 aa, Zea mays
  Clone ID: MRT4577_41659C.1.pep
MTTHIHTWWQVQRHLQLRIEAQGRYLQSVLRRAQEVLADHGLGSAAGAEAELASAVDTGSLSSSCCCSPTRRRSADSCVTSSSSEAESQAPVGGATWLHTCAGTRDCSVEQQPVQGEKSTFLQRHGVAFKVGTWGGGPGF

SEQ ID NO: 305471 - protein, 257 aa, Zea mays
  unsure (1)..(257): unsure at all Xaa locations
  Clone ID: MRT4577_4165C.1.pep
LVPRGGREHQSRTHTHFRTQVLEAPLDPGSDTEYQDFQFRFIPEAFELQMGGVPVGGGGARNGDGKVTEKVLEFEFDKVRISIASRDDEADGYAPPRSSFSGASHPPEPVDETDTVFVAVDGREKPVPKPVISWDASRPPSGAASPDSSIDSSGATATVTSIAPSCTVTSRSAKTSVSSSAASDGSGWSNGTSSGCGGSAGKPHKGGDPRWKAILAARAREGPLAMGSFRLLRRLGCGDIGXTVYLSELSGGGPNGD

SEQ ID NO: 305472 - protein, 43 aa, Zea mays
  unsure (1)..(43): unsure at all Xaa locations
  Clone ID: MRT4577_41660C.1.pep
GPKSMLXGGGAHILRAIAGAGVRSGXDQLQIFFFGKKYGSGGA

SEQ ID NO: 305473 - protein, 185 aa, Zea mays
  Clone ID: MRT4577_41661C.1.pep
SPVFDTCDISSIPGHHGSNNVEDNLSEALEHRNLLPRRELIFDWSIDHVGGGRRHNNPDVGVGLGNGVGRGGGVSRGRGTADIGRGTTGLQRGVWRGTAGGLARGTTRGAACGIGRNSAYLKFSTGAPTGVATDGLPLSGIGCGCGSKHHKVHRDLFVQYVNVGVARLRAQSLTTLHALLRSMWI

SEQ ID NO: 305474 - protein, 270 aa, Zea mays
  Clone ID: MRT4577_41662C.1.pep
MASSLGVGGQQQGHGHGHGEARARLRWTRQLHDRFVLAVAQLGGADKATPKSVLRAMAVPGLTLYHLKRHLQKYRLVAVSRGVASPLGDSGDGTDERSSSSSENQPADECDDGTVAEPHGDSSRSVARMQRKLQEQIEVQRHLQLRIEAQGRYLQSVLRRAQEVLADHGLGSAAGAEAELASAVDTGSLSSSCCCSPTRRRSADSCVTSSSSEAESQAPVGGATWLHTCAGTRDCSVEQQPVQGEKSTFLQRHGAAEDGTSSEIDPNGNR

SEQ ID NO: 305475 - protein, 75 aa, Zea mays
  Clone ID: MRT4577_41663C.1.pep
MASSLGVGGQQQGHGHGHGEARARLRWTRQLHDRFVLAVAQLGGADKATPKSVLRAMAVPGLTLYHLKRHLQLVG

SEQ ID NO: 305476 - protein, 142 aa, Zea mays
  Clone ID: MRT4577_41664C.1.pep
MTTHIHTWWQVQRHLQLRIEAQGRYLQSVLRRAQEVLADHGLGSAAGAEAELASAVDTGSLSSSCCCSPTRRRSADSCVTSSSSEAESQAPVGGATWLHTCAGTRDCSVEQQPVQGEKSTFLQRHGAAEDGTSSEIDPNGNR

SEQ ID NO: 305477 - protein, 39 aa, Zea mays
  Clone ID: MRT4577_41665C.1.pep
IAKLIISSDRLLHLFISSCFIYIYRLTRQDKGLLVPDLD

SEQ ID NO: 305478 - protein, 297 aa, Zea mays
  unsure (1)..(297): unsure at all Xaa locations
  Clone ID: MRT4577_41666C.1.pep
MTIARSTLPCLLLPDPSTVCMRCTRTTLPLQKYRLVAVSRGVASADKATPKSVMRAMAVSGLTLYHLKSHLQRYRLAVSQGTASPXARATTEVAPTSGRPPRRASWTSTTTVPWPTCMVILPXSMAARVQREAKRKRHEQMQIEVQRHLQLRIEAQGRYMQSVLRRAQEALADHILGSPAGAEAELSELASAVETGTGCLSSTSCCSTSPSPVRHRSADSCVTSSSSSSSEAESQAPAGANTCAGTRDCSVERPVQDEESTFLQRHEDEDEAEEADVGAAAAAEDEDGTSSEIDLNR

SEQ ID NO: 305479 - protein, 89 aa, Zea mays
  Clone ID: MRT4577_41667C.1.pep
SDPYVVLYDVMQLTLCHSNEHHARPPYVPARSKTTMMCQVNIERHAENFWELIRTRGHKRHGRGPADGGDPDQETLQDASDLDCRQRAI

SEQ ID NO: 305480 - protein, 80 aa, Zea mays
  Clone ID: MRT4577_41668C.1.pep
MDSQDFRDPARSGNRGATGTKDPSGHVVDGSDKGHMERRLNEDGSLPKALTEDRSKAIPHSQASEEEARKLESEHEANKK

SEQ ID NO: 305481 - protein, 63 aa, Zea mays
  Clone ID: MRT4577_41669C.1.pep
GKKFFLGAGGSLLGFYFKQFNILFLLPKKKKTLQTKTWEPPLLAFKPPLKNFKIPPRAFILQP

SEQ ID NO: 305482 - protein, 90 aa, Zea mays
  Clone ID: MRT4577_4166C.1.pep
NPTSQSSHRPHEQPIIHPSIDEVLSTAPIGCTIPVASLTYKELQSAGLRKVPGTAPSCPRPADETLRSTSIRRCWRTRTRRLRRREGARD

SEQ ID NO: 305483 - protein, 49 aa, Zea mays
  Clone ID: MRT4577_41670C.1.pep
NVLSLKTGLTHRRPYHGLNHRDTGGHIIMGGWGSRTTTSCRPRRLGGDD

SEQ ID NO: 305484 - protein, 102 aa, Zea mays
  unsure (1)..(102): unsure at all Xaa locations
  Clone ID: MRT4577_41671C.1.pep
LLMLVDMTTCVANPTIFRECXSQAAIAYVVAAYFGYIIGSVCENPDLEPYGLQPAIVGSNIPLSLLLHEQSPDLFLLKLLVQTIRAQHLQEPVLPGINQVLL

SEQ ID NO: 305485 - protein, 88 aa, Zea mays
  Clone ID: MRT4577_41672C.1.pep
VPRCDQALSRGQKTKTGGKMYVQAKIEGYSPQIFRLLKGGGPIYFCGFKGMIPGIQDPLKKVAEQKGESWAQKLSPLKKNNQWPVEVF

SEQ ID NO: 305486 - protein, 387 aa, Zea mays
  Clone ID: MRT4577_41673C.1.pep
MPKETTADSGEGDLVRLKYTFRLREKFDEPNDNWLKCIKATSDELLGAYSKAKDNALSAAFGGRGKKRLNRVFDAIGFVYPDYRYPLRGQVKKRKIAASVTPAEPMPKSKKAEVEAGPPAPVAAKPAAPKEKTAGQEMAERARSPASEAQAEAADYIYRHALGKKLSEDEIAEARHYAQKLKYSKGALVFNRSNEDDFLYCLPDNKEIFVCREICKSMGSPKLEDGLSILSNDDLTDSLAYNSIKGLILSNALRAQKNIEDEGYTMALNNLRSEVIELRNEGPEKDKILISLVNKVKEDKASFKAQAEAKKTEIEDLRRQLAEAKENCALAQANQEISEYWKNHLEKNVEELRTSKERCFEKSLDCVKKIKASFAKLGAYSSEKNFI

SEQ ID NO: 305487 - protein, 89 aa, Zea mays
  Clone ID: MRT4577_41674C.1.pep
VAARGGFSPFRRAGDLRLPATCGVPSGSFGHAPARSSSGPPSAFAQDELGDLWQASPQPSRLDPVCQMVDLKKKFGVLRPNKKIVIQSL

SEQ ID NO: 305488 - protein, 135 aa, Zea mays
  unsure (1)..(135): unsure at all Xaa locations
  Clone ID: MRT4577_41675C.1.pep
KKILPCYMLYRNSCKLARSFCLVVHALHANAXLASSPASVGVRASSGGLVGERRRETXVVLCDAISASGFPRVFFFLHRSLASLEQRETQRRAESTGGPPPGPGDGDVLALPARSCVLLAYILSRPLLIGAIWPS

SEQ ID NO: 305489 - protein, 45 aa, Zea mays
  Clone ID: MRT4577_41676C.1.pep
NPLFCFHNSQTVKGSTAPHTPFGYSPFYLQNIKQFETRIEKGNNL

SEQ ID NO: 305490 - protein, 93 aa, Zea mays
  Clone ID: MRT4577_41677C.1.pep
VSIGSKGLDEQYTVARTGTNSLTRRTKKRTGIEEAGTTNPWVFDRKQTWPPTDGDKEGRPQSGGDKALLYEPVRRPVVDQNAGHEKAIMISEL

SEQ ID NO: 305491 - protein, 54 aa, Zea mays
  Clone ID: MRT4577_41678C.1.pep
GAAAPDMHVVVGEEKKVVFYPIFFFFQGPRRSEFLTVCQGRKSVFFNCSQSPPL

SEQ ID NO: 305492 - protein, 70 aa, Zea mays
  Clone ID: MRT4577_41679C.1.pep
TRVTIYLVPLREQFDTYTASLISDRFMEKKVQINSSIFGDYKVINISYHGLQSPPSSLSGGSDPSGTEEY

SEQ ID NO: 305493 - protein, 433 aa, Zea mays
  Clone ID: MRT4577_4167C.1.pep
MGRRKMSAAAPPSRSWSNVGGSVIPELRAKHKTDLENLTLTKHPIRTLHFFLLAMLQYLKRLATYILRKSGLFFLLIVLVVASGILLSISDGLHKKHVQEFLNYAKFVLWWISLGVASSIGLGSGLHTFVLYLGPHIALFTIKAVQCGRIDLKMAPYDTIQLKVGPSWLDKKCSEFGPPVYPASAHSVRIPVFDLLPQIQLEAVLWGIGTALGELPPYFISRAARLSGSKSKAVKELDAATSKEDGTVASTLDRSKRWLLSHSQHLNFFSILILASVPNPLFDLAGIMCGQFGVPFWEFFFATLIGKAIIKTHIQTLFIVSLCNNQLLYLMEKELIWIFGHIPGFSATLPSVIAKLHAAKDKYLSPPTPVSASSQMEEKSWNLSFTLVWNSIVWLVLLNFSVKIITSTAQDYLKKQQDMEMERVSDSPPPEQN

SEQ ID NO: 305494 - protein, 135 aa, Zea mays
  Clone ID: MRT4577_41680C.1.pep
VGCFFFFFFFCVFFFSRAKAFFLFPNNSGWEKNFGFGFSNFWAQNSFAQIFRGGGNPALGGDAFGALPSLFFFLSPRGFSFSRDRFFFPALLGPPKTYAGNISSSKFRGFFSLNALGGPFRFGGGPGSSGTKPRP

SEQ ID NO: 305495 - protein, 98 aa, Zea mays
  Clone ID: MRT4577_41681C.1.pep
MSLAKKEEVCSHRLVPRLDEPAVGVPIKKRPFFLSDRSGASGIPVLTKPPSSTNTMPVAATGSGLPEEPFFNIGNLDRNVITKGKGIPDTQIQDHVNT

SEQ ID NO: 305496 - protein, 45 aa, Zea mays
  Clone ID: MRT4577_41682C.1.pep
NQSIERCSRVHYSSSCQHLAGKNFLQLVISLNVYSSYVSFCWLQF

SEQ ID NO: 305497 - protein, 70 aa, Zea mays
  Clone ID: MRT4577_41683C.1.pep
QSKGTKQSLREQGPVPSENQGSPHKNSANFGVVNHWNFAQGCKKGGGKSCMEQGSMFKRSRGRPIRAWDQ

SEQ ID NO: 305498 - protein, 68 aa, Zea mays
  Clone ID: MRT4577_41684C.1.pep
MAYVERGVVKGKRTIWRLSIIPDFFKAIVNFIRMFFLTMFSIEKTDSYKKGYGSGKKWDGGPGGGGPG

SEQ ID NO: 305499 - protein, 173 aa, Zea mays
  unsure (1)..(173): unsure at all Xaa locations
  Clone ID: MRT4577_41685C.1.pep
GSGSEKMRINCCSIWRNKALRRMCFSERGAVSSTQCVLTSDAGPDTLXRPNXSFRRNYADPNEVTAVILGGGTETQLLPLTSTRATHAWGRLLVGSRAQQTSLKNLSRYLRVSAEFGNKHDKRVFTWTVHDISSMKKMLYEHVDAIMTSNPSLLQRLMQETRVEYMEDGFILP

SEQ ID NO: 305500 - protein, 92 aa, Zea mays
  unsure (1)..(92): unsure at all Xaa locations
  Clone ID: MRT4577_41686C.1.pep
REATDVRSXXLXFALFRLLLPSLXFVSFLLVALLLLRCGVPDSASLPGSLFSDAIVSVDAFGQNKDLYRPVVNANKYTSPVLVYIILQGSRC

SEQ ID NO: 305501 - protein, 101 aa, Zea mays
  Clone ID: MRT4577_41687C.1.pep
LISHYPYHASLIGKPSPQILVQALRSMPRQATSSLKVRTHGGTRGSGPSHGSVGGKRRSPISQGKGGQHNEVVQKMPNGNNGSKRNDEARVEANAAKKLGN

SEQ ID NO: 305502 - protein, 958 aa, Zea mays
  Clone ID: MRT4577_41688C.1.pep
MEETGNINSIATDGQQIAQMTQNESITIGPVIPHTSSLSDGANAEGDANMVVDKDGPVVIVPKVGMSFASENDAYEMYNTYAGIVGFSIRKSVIKRRADKTIYNRVIVCSSQGHAEMGSSNATTRTGCKALVKFNVSREGIWTLQKVELDHNHILATPKKKHMLRSQRHVIDADRHLIAQIREAGMKPTQVYEFMKQFYGGADKVPFLRMDCNNEIGRERKKYLESNDAQTLLEYLKNKQIEDPAFFYAMEIDRQDGRIANFFWADGQSIMDYACFGDAISFDTTFQTNKFEMPFAPLLGTNHHKQTIIFGAALLFNETIESFVWLFQTFLKAMSGKHPSTIFTDQDAAMAGAIAYVFPNTCHRLCLWHIYLNAAKHLGHVIHKYPEFLYAFKRCVYEDRSEEYFTKKWNELLTKYGLEENSWMDQLYGLRRKWAAVYRNSFTADMTTTQRSEGMNNVFKKRFRRKLGLSELLVECDKVSASLRENELDEDFKSLSKVPVIYVPELPLLKSALESYTRRMYTEFETEFKKQFEYSCKLLQTEGSISTFTVTHMHSDYGATTILNIADMTITCSCRKFESIGILCKHAFKVFNMNDVFILPSQYILNRWTKYAKRGHYVQKKGRPNENLKARAARISRIATSLALKCATSEPLLDDLERALENLESMADDSLNKMRKNEDSFVGLNDHDICTENSVISFRVPHVVKGPKSKRAKNVVEKNTRKKKKSHQEKASCLLIAAISDAVGEETRNIGDNSGGNVALPNISTNNAINFPIIVQGEYTSLLLGLDQDASAARKLQFDTGANDTTMRYPENFFPLWDPFEGFFPFGSGDVRSLVPSLPRTSSETAAFAGARIDWKETPEAHVFKADVPGLRKEEVKVEVEDGNVLQISGERNKEHEEKNDRWHRVERSSGKFLRRFRLPDNAKADQIKASMENGVLTVTVPKEEAKKADVKNVQITG

SEQ ID NO: 305503 - protein, 41 aa, Zea mays
  Clone ID: MRT4577_41689C.1.pep
HSFRVRCHFTSHLSNAPAIPRPARDSASMVMLASMSRHTQG

SEQ ID NO: 305504 - protein, 109 aa, Zea mays
  Clone ID: MRT4577_4168C.1.pep
MGRRKMSAAAPPSRSWSNVGGSVIPELRAKHKTDLENLTLTKHPIRTLHFFLLAMLQYLKRLATYILRKSGLFFLLIVLVVASGILLSISDGLHRKVWSYANVFLLSVG

SEQ ID NO: 305505 - protein, 78 aa, Zea mays
  Clone ID: MRT4577_41690C.1.pep
PPNSTLLVPAFLKLPNSPPALTLIALKACLSIAKIRNDHWSILSQCHQHAGKSRTCLVYSFPTTSQYFTNYTNVSPYI

SEQ ID NO: 305506 - protein, 56 aa, Zea mays
  Clone ID: MRT4577_41691C.1.pep
IMLLREVATRALTRATIMTPMGSTNIVVYSGAHNGYKGTLLAYLSTTGMEFPIYYS

SEQ ID NO: 305507 - protein, 368 aa, Zea mays
  Clone ID: MRT4577_41692C.1.pep
VAWVKHRPPVISAMEERAKGLGVWTDTNGLASKMYNFKRDPEPLVSLSDSTDQLSDVGDGDTNQESDLGNMDDEYGGVIVNSEIDSLPDPKDQVAWLKLELCRLIEERRSAVLRADELETALMEMVKQDNRRQLSAKVEQFEQEISELRQALSDKQEQEQAMFQVLMRVEQELKIAEEARISAEQDAAAQRYAANVLQEKYEEAMASLAQMENRAVMAETMLEATLQYQSSQQKALSPCPSPRPSMLDASPSQSSQNSSQEFQPRRKNLLGPFSLSWRDKNKEKPNNADDSTNTKSTNNDEMVETSNTNDEKHRETLDLNSEQRAESPKADVKMRAETPEKDNDLPGVQLVTDDLNGHHEQMQEIKLD

SEQ ID NO: 305508 - protein, 37 aa, Zea mays
  Clone ID: MRT4577_41693C.1.pep
SSSAGAYSRKTTGGPREPLPRGVRANLGGISQSPLWR

SEQ ID NO: 305509 - protein, 100 aa, Zea mays
  unsure (1)..(100): unsure at all Xaa locations
  Clone ID: MRT4577_41694C.1.pep
DSCXPPMASWLRGDQXQTFPFSPXGNATSQAVNVTFTARAERTRVAFYSVYYNTRSDDHSSLCGPVIDDVRVWGLNTAAGLKASAGLVLGIVGVVGMVLF

SEQ ID NO: 305510 - protein, 48 aa, Zea mays
  Clone ID: MRT4577_41695C.1.pep
SLLGVSHDEQHRSYFNDRGVLHCFNRWCQSKNVILGGQCKECAKSEYM

SEQ ID NO: 305511 - protein, 84 aa, Zea mays
  Clone ID: MRT4577_41696C.1.pep
SRVRVPFQRTLHFYHTQTFLMWFLVFVRRRQYFVGQSSLPHSRHSFLSGGTAHLSSDIFQLTGHMRKGLIGDRNMLLLCYLSHS

SEQ ID NO: 305512 - protein, 57 aa, Zea mays
  Clone ID: MRT4577_41697C.1.pep
LQVSDILYLSFNGQEETNYKCQVFLPFSIQSSKEIYFKILCCHANTWFHLNLTFLKL

SEQ ID NO: 305513 - protein, 47 aa, Zea mays
  Clone ID: MRT4577_41698C.1.pep
FLFCLSTGSSSPGPMILCQLCGVFLGFTRLSNRRAKGAISPVSKRIR

SEQ ID NO: 305514 - protein, 68 aa, Zea mays
  Clone ID: MRT4577_41699C.1.pep
QTPGCLAHFLYMPDHIAGIIGRVLSGKLHICGVINLHPDDRVYDSEACHGTFFPYRLLGSWTQPVEME

SEQ ID NO: 305515 - protein, 451 aa, Zea mays
  unsure (1)..(451): unsure at all Xaa locations
  Clone ID: MRT4577_4169C.1.pep
MGRRKMSAAAPPSRSWSNVGGSVIPELRAKHKTDLENLTLTKHPIRTLHFFLLAMLQYLKRLATYILRKSGLFFLLIVLVVASGILLSISDGLHKKHVQEFLNYAKFVLGWISXSCGIINWTKLGNTHGCCVMFHIALLKXFDESAARLSGSESKAVQELDAATSKEDGPVASSLNRTKRWLLSHSQHLNFFSILILASVGLLSSILCYQVLQCGYFTPVIYDIWLCVFTIDLFCTFGSCASFSSTFKSCLDKMTPTNKRMEHSLYISCHKFLXDFYSIFKNNCLILMLLLXPNPLFDLAGIMCGQFGVPFWEFLFATLIGKAIIKTHIQTLFIVSLCNNQLLYLIEKELIWIFGHVPGFSATLPSVIARLHAAKDKYLSPPAPVSPSSQMGEKQWNFSFTSVWNSIVWLVLLNFFIKIVTSTAQDYLKKQQDTEMELISDSPIQDHSKTN

SEQ ID NO: 305516 - protein, 124 aa, Zea mays
  Clone ID: MRT4577_416C.1.pep
YDFWGSRKKEVLPLFPPTQIFRMIVYSGNPLQLFKWQTTGPGFVPWKEHLFEIAHLFPRENQGGGPPLSLAKKKKRDPSARRFKEIRVGTTRYLPLAPRAFFLRLVINGNWFSLGRTTPPRGPF

SEQ ID NO: 305517 - protein, 151 aa, Zea mays
  Clone ID: MRT4577_41700C.1.pep
LGVQSHVNPGRALAHRLARLRADGSITATLSVPVTTYRRMFPRSADSAPATAETSDGVISYVAHSDGLDRRRLVVVLGRGRRGQGAQAPRERRQPLRRGRSPGRPRPPGDVHRVHDGVASGARRRAEHAIPSPSLAPAGTGLASVHYSTAR

SEQ ID NO: 305518 - protein, 93 aa, Zea mays
  unsure (1)..(93): unsure at all Xaa locations
  Clone ID: MRT4577_41701C.1.pep
PRXRSENAGGRSRGAKRTDAGTRRHRGAIEPPKSKTPAGGAQRRDGENPGGTQPKRPAAQAPGARRRNGEQARTERPSQQRRTQKGEDAPRSG

SEQ ID NO: 305519 - protein, 56 aa, Zea mays
  Clone ID: MRT4577_41702C.1.pep
CAPHQLPRCCANSLNEYAMLCNVFGYGRLIHSHIFVYGRLVFNNLVSILMESVIAD

SEQ ID NO: 305520 - protein, 87 aa, Zea mays
  unsure (1)..(87): unsure at all Xaa locations
  Clone ID: MRT4577_41703C.1.pep
VYTSXGGSKICDRWPGLLIHSDRPRELLDFASFSFFQIRTRLRVSRTKQRWHHHPCVLRQRGGFPFRNLFKGGLHKGQGQGPFPWGP

SEQ ID NO: 305521 - protein, 294 aa, Zea mays
  unsure (1)..(294): unsure at all Xaa locations
  Clone ID: MRT4577_41704C.1.pep
MRPLRRSSGGLAALGCCLFLLPLLSRGADMPLGSTLSPGNSATWTSPNSTFSLGFTASASSPSLFVAAITYAGGVPVWSAGNGAAVDSGSSFRLSSNGDLQLVNGSGAVLWSSNTGGQNVSAAAVQESGNLVLKDKTGAALWQSFDHPTDTVVMSQNFTSGMNLTSGSYAFSVDRATGNLTLRWTGAGSTVTYFNRGYNTSFTGNKTLTAPTLTMQTNGIVSLTDGTLTSPAVVAYSSNYGESGDMMRFVRLDADGNFRAYSAARGSNAATXEWSAVADQCQVFGYCGSMGVCS

SEQ ID NO: 305522 - protein, 46 aa, Zea mays
  Clone ID: MRT4577_41705C.1.pep
FIGTMLAKVNLIRCSSLGCNKSSVETESPQPKNHGLNLRSSSIYVC

SEQ ID NO: 305523 - protein, 129 aa, Zea mays
  unsure (1)..(129): unsure at all Xaa locations
  Clone ID: MRT4577_41706C.1.pep
LYLLFSILYNYFIVHSVLFQIRGMHTIIRDAATATHDFIFYADRLIRLVXINVFDELSFMWVCMVSXLPVKNXVEHGLGHLPFQEKQVITPTGSVYTGVEFSKRLCGISVIRRYQLFLNDIFFICLFRF

SEQ ID NO: 305524 - protein, 70 aa, Zea mays
  Clone ID: MRT4577_41707C.1.pep
PLPSFYLPEGRVTPVIRLQLSWILTWIITRDMFLTGSTNSRSKRSRPSPNTRVSRWPAYHFTLYTFPHLP

SEQ ID NO: 305525 - protein, 46 aa, Zea mays
  unsure (1)..(46): unsure at all Xaa locations
  Clone ID: MRT4577_41708C.1.pep
THITHSQILTPXPRRRRWRPMAITISAAGLSLLASRSALAADGVRC

SEQ ID NO: 305526 - protein, 149 aa, Zea mays
  unsure (1)..(149): unsure at all Xaa locations
  Clone ID: MRT4577_41709C.1.pep
TPACTGPPIHGRPSRSYGETVQAKDINLTERDVGGQDKTXPVXRHYFHNTQLLIFDVDSXNDWXRVKKXARESSTRMLNEDHLRNAVLLVLENKQKPANALNAAXKHCKLGLFXLQQPLWYIQRTKAACGXEGXYEGLDRLCRNIYTKS

SEQ ID NO: 305527 - protein, 44 aa, Zea mays
  Clone ID: MRT4577_4170C.1.pep
PFSFSGFFHSDTPLIRVSQLVGSMCVMEMSSFLKKKKNLSRYRR

SEQ ID NO: 305528 - protein, 393 aa, Zea mays
  unsure (1)..(393): unsure at all Xaa locations
  Clone ID: MRT4577_41710C.1.pep
MTESEGETEAARAAVLTPPLSLGGGGLAGELRPANLGQRVLSLFRNVRPGSDLSHFQLPATFNLPKSQLQLYGEAVYCGGEDMLARCARGADSLQRMCAVVAWSISTTRPPIFGFAPYNPVLGETHHVSTPAGLNVLLEQVSHRPPVTALHATHARGEVELVWCQSPAPRFHGASVEAAVRGARELRLPRHAETYAVGCPGLVIRLLPSPGCEWAGDVRVSCAESGLEATLSYRRSRRSFLGLGGGDARCVRGRVFRSAAPDDTLCEVDGFWDRQVSLRDVATGEVSVLYDARQTIADLATPVVQDRKGVSASESAVVWAEVSAAILNKDWEAARQAKRRVEETARRLAKERNERGEVWTPSHFSLXRTSXDWECWPLEDSVPPAPIVVPSPS

SEQ ID NO: 305529 - protein, 67 aa, Zea mays
  Clone ID: MRT4577_41711C.1.pep
PAARNQLLSAKHRHGKAQPGQGRATVATETHQSHAVSFDEREDHARCPKKSPLAPSHKRKRKGRGIT

SEQ ID NO: 305530 - protein, 149 aa, Zea mays
  unsure (1)..(149): unsure at all Xaa locations
  Clone ID: MRT4577_41712C.1.pep
EPTNTXRHNIDFAGETNATGGGGSNTHHEHRAQNEAHKQNTQQDHRAPHGHPHGHGYYYHEHRDHGTPHRSRKACKTGARDRPERQTRACVQEKKSKRKHANDARTRRQRTTQEPSAKNDEAHAKATRNDPKKQKGASPPRTNKGLGAG

SEQ ID NO: 305531 - protein, 79 aa, Zea mays
  unsure (1)..(79): unsure at all Xaa locations
  Clone ID: MRT4577_41713C.1.pep
DVITDAPPPSRFSPDKLDNFVDPAEETTTIFVVSPNYRTEDQRLLVAIVSPPPFALLXHPDEQLHCPLLVPVLTLLTRA

SEQ ID NO: 305532 - protein, 132 aa, Zea mays
  Clone ID: MRT4577_41714C.1.pep
LFPPPYPLFAGLGPPWGAPSFSPSWGPVLTALYCFPLCWGNNWSTLGPIGRPPPPGALPVPLFMLGCRFSPRVPGCWPPRFDCAFLPLLGPQGFKLVVLGLFVFGIVCGFVFGLGFYFGNFFGPPPPRLLLG

SEQ ID NO: 305533 - protein, 156 aa, Zea mays
  Clone ID: MRT4577_41715C.1.pep
GSTREQKGIGCQLCATACRAPIFPLSPPQSPSDASDEDPVLLANRRPNKQLPLWEPQYPIEAARAAALLGAAIRNQAALVRQSKQSSGSSPSRSRKSKQSSGSSLSRSRKSKRLPFLVANQSGIKAVLSGLQSETGPLSNSVSESPLVARTERLYM

SEQ ID NO: 305534 - protein, 110 aa, Zea mays
  Clone ID: MRT4577_41716C.1.pep
SPEDVRATHSRSEDNADDNRGSGSRIMSNVLSCSLSLAKNSFRLDKIGGTLGNAAVFAVSMLAFLQLHQITFGSKTPAMECRKRIEYNLQSGSSQPNGKGKLLEVYLARG

SEQ ID NO: 305535 - protein, 134 aa, Zea mays
  Clone ID: MRT4577_41717C.1.pep
NEGTSTFEQFILTLRSTVGAQVLVQAIGIGKGKYDLTGFALDPSRNHGISARPEIPVGKACSALSSGDIIKFLTGDFRMSKARSNDLFWEAVWPRLLSRGWHSEQPKDSSPIGKHALVFLIPGVKKFSRKKLGK

SEQ ID NO: 305536 - protein, 91 aa, Zea mays
  Clone ID: MRT4577_41718C.1.pep
PRRGPFGTFFFFGREHWGGLLKKPRFFLKRMLGLTVGSLALTPHPQTRSYYNFGPLIKGKSFLPKNPPRVCPGPFCFPGGSPTKTGKTPRF

SEQ ID NO: 305537 - protein, 46 aa, Zea mays
  unsure (1)..(46): unsure at all Xaa locations
  Clone ID: MRT4577_41719C.1.pep
GVHADFFTRVLLCLSALEASDYITIRAAGMMIQCDTCDAXADTVVC

SEQ ID NO: 305538 - protein, 74 aa, Zea mays
  Clone ID: MRT4577_4171C.1.pep
MGEAKLNNVTVLLVALLLLSSGVQDAAAMPGTLNYDAIVADEPNGKNKDLYRPVANANKYTRGCEPIERCRGAR

SEQ ID NO: 305539 - protein, 84 aa, Zea mays
  unsure (1)..(84): unsure at all Xaa locations
  Clone ID: MRT4577_41720C.1.pep
NPSTWPPSRISASPWPNIKIGINXFGTMSTLDAKVARHSDDVQLVAVEDPFINTDYXLTYMFKYDIVHGQWEXQELKVKDPKTL

SEQ ID NO: 305540 - protein, 76 aa, Zea mays
  Clone ID: MRT4577_41721C.1.pep
RRQQLRRASYPSQNLARGESPSVVWRPLRTLRPRPIWPRPWRYSAPATSCTVTPMPTRRPTSSVLTRFCIYYLRFF

SEQ ID NO: 305541 - protein, 192 aa, Zea mays
  Clone ID: MRT4577_41722C.1.pep
DASPSIIQYLPVFFYYQTEDLNLEASFLGTARVIGWFSLMLGTYTYNRYFKQKKLRNILVFAHVGLAVITLLDIVLVSRLHVQYGIADKYMVLWGSALADAINQFKMMPFLILSGQLCPPGIEGTLFALFMSINNLGSTLGSFLGAAMASALNLSTAQFDNLALGLGVQMICTLLPIGFLSLIPKEVTGLTS

SEQ ID NO: 305542 - protein, 193 aa, Zea mays
  Clone ID: MRT4577_41723C.1.pep
NSIYSKKKKKKKKKKKKKKKKKKKKKKKKKKKKKKKKNSRAPFDLQGPLRWRGIKKAAGWGRSPLAPPPTAFPGKGGKGPASPPFGEAPGTLGKTGGKGKPGGGSGSPGFGPHRGVYRGPLAGEPPGFLGGEFPGDFGGDPGGLAGDPETFPKNREVGGFPPPWALVGGLGWVFPKLVPRNGANFGEAGGFKG

SEQ ID NO: 305543 - protein, 336 aa, Zea mays
  Clone ID: MRT4577_41724C.1.pep
DAWADAWAVGGIFGSLLGGYALSNLPIHVIYIVFSVLPFFQLVSCMFVEDSPKGFHNASDEHKYVDNQSSVTVFSGKGSSEGTRRRKGTSKSNNSSPQAKRTESNEKHNGSINSLPCLSLRSAFFSLCTAFKQPNILRPMAWFFFSNVTIPNISTVMFYYQTEDLNLEASFLGTARVIGWFSLMLGTYTYNRYFKQKKLRNILVFAHVGLAVITLLDIVLVSRLHVQYGIADKYMVLWGSALADAINQFKMMPFLILSGQLCPPGIEGTLFALFMSINNLGSTLGSFLGAAMASALNLSTAQFDNLALGLGVQMICTLLPIGFLSLIPKEVTGLTS

SEQ ID NO: 305544 - protein, 96 aa, Zea mays
  Clone ID: MRT4577_41725C.1.pep
TLLHLLFFIFPITTPPLPISLTNLSLFVNKFLLLLSYPLSIFIFPFFFPFLYWRTKFFFYIIFKLLIIITILPFFLFFIFSYIFTSSPFFPSLFYL

SEQ ID NO: 305545 - protein, 83 aa, Zea mays
  Clone ID: MRT4577_41726C.1.pep
FTGFSPQKTPGPGGSPKFGGTRNGKTPNPGQRLVQAFFFFSESPGGPLRLGPRGPPGDFRPVPGGGTNFPYGEQIKTWGKQGS

SEQ ID NO: 305546 - protein, 79 aa, Zea mays
  unsure (1)..(79): unsure at all Xaa locations
  Clone ID: MRT4577_41727C.1.pep
NRTPAGAADISRSDAALGPGSFFFFPSPNTNRSSSTFRFSMTGDRLPSRLSLLFFFFFLSFFFFFVNXWPPDSQARPGR

SEQ ID NO: 305547 - protein, 89 aa, Zea mays
  Clone ID: MRT4577_41728C.1.pep
LARFIPKTPPLAGEGQNCPAPTVMTQEPEKKTQQERPLGGGTPRGGQNKNLARKNISPRKGAGVQNIPGPGLKRGPLWENPGSKKNQPR

SEQ ID NO: 305548 - protein, 80 aa, Zea mays
  Clone ID: MRT4577_41729C.1.pep
KENMNINTNHKQCNRVLKAPAAPCLEATLHSSDGRKRRVKQNRRRRRLFSTPVVILLLFSWDCLDQEPNVLLEEQLERAG

SEQ ID NO: 305549 - protein, 43 aa, Zea mays
  unsure (1)..(43): unsure at all Xaa locations
  Clone ID: MRT4577_4172C.1.pep
TLXSIHYTYSFSIDTYKENLRIHSPTGIASIQNTLYSLSNAYS

SEQ ID NO: 305550 - protein, 104 aa, Zea mays
  Clone ID: MRT4577_41730C.1.pep
RKLFRPSGVGRPLVPRSKAPGSLAPGFWASKPLSKSPRAPPCTPMAKEFGFLVGPRSTVWDTLGLTPLRPPRQESTRRGYSGVRLAPRKGNSISGPAAPRNSEP

SEQ ID NO: 305551 - protein, 55 aa, Zea mays
  Clone ID: MRT4577_41731C.1.pep
GGAPFLDPRCMPTSLLCYRVSYIESNWQSIAPPFTGKTTGETPVIPLFNHLPFPP

SEQ ID NO: 305552 - protein, 73 aa, Zea mays
  Clone ID: MRT4577_41732C.1.pep
AGQGITNSGLTSSSCSNECSFQGSAIVQWFLALSLPSQGVTCPGPQVVWQRPLPRMPVRVFRLLMAYVCGGPG

SEQ ID NO: 305553 - protein, 234 aa, Zea mays
  unsure (1)..(234): unsure at all Xaa locations
  Clone ID: MRT4577_41733C.1.pep
KKTACLFFLGQQQSQRKMVVSKKKLIKVGPWGGAGGHPWDDGGYSGIRSITMSYDRFMESISVEYDRDGMPVTGERHGGAAASHTTQARPPPNQSPPSVTISDTAPSAGWFLNRARVRTQIKLGYPDEYLTTVSGHYAPIAPGGSPVIRSLAFRTNQGAYGPFGVAEGTPFEFPVDGGVIVGFCGRSGWQLDAVGLYVAPLRPETVYDRVHKLGLTAYRXFGSGSGPSSSSKNR

SEQ ID NO: 305554 - protein, 51 aa, Zea mays
  Clone ID: MRT4577_41734C.1.pep
YAHATHSSCLRYPVSMAATRLGRLDTHECDTAHQLHPLPSILKILQTPSGL

SEQ ID NO: 305555 - protein, 175 aa, Zea mays
  unsure (1)..(175): unsure at all Xaa locations
  Clone ID: MRT4577_41735C.1.pep
YKESAHARRLRSCIAGAIHAFDHFLPALRHLAMVNPAAYLKHAAAWXNPLALANVGANQPQQQMHQLLPALNKLAMVNPAAYLQQQHLLECSQLAVTNAPTYLQHQSLQQILPTLTHIDVANRTDYLQQLITFNQLTMTNSAAYLQQRQQLLNPLAVANPXALTYYSXQQLLPYN

SEQ ID NO: 305556 - protein, 75 aa, Zea mays
  Clone ID: MRT4577_41736C.1.pep
PMCLKHTSHLLQWLTINLISSSKRLEVIMGRYSGKQELYQYCHAKGISHNISSKYTQRQIGNVKRKDVALFDMAR

SEQ ID NO: 305557 - protein, 155 aa, Zea mays
  Clone ID: MRT4577_41737C.1.pep
DSVAALAVAPPGLVGSGLWKVMAELAVAPAGRALTPTSPAGIGGPAAVDFRICPDESTLVPHQICRYDSASGAIQIFCPCNGTVIDLRASCRHHSFWEHGMPPLATTPTSSSQLPYKKLQPLQVFDSKGGLFVSALAPLHVGHDALHLVPDSSVF

SEQ ID NO: 305558 - protein, 69 aa, Zea mays
  Clone ID: MRT4577_41738C.1.pep
RFTLDHQKSRTSDDRTSSRQINDYTKVFGATCNDLRCKIMEDKIVDRSRTGKMKGSVVAGLISLYSQAP

SEQ ID NO: 305559 - protein, 70 aa, Zea mays
  unsure (1)..(70): unsure at all Xaa locations
  Clone ID: MRT4577_41739C.1.pep
RLXGARPRLGRVGSVGVVARGVAXAVGAVVAVGVALAVALGGXWXXCLSXALVSAVXASGSGVVXXVLVS

SEQ ID NO: 305560 - protein, 74 aa, Zea mays; identical to SEQ ID NO: 305538
  Clone ID: MRT4577_4173C.1.pep

SEQ ID NO: 305561 - protein, 40 aa, Zea mays
  Clone ID: MRT4577_41740C.1.pep
SIITLFVVKLIIVEGNTQGRDWSCNTLFRYGCFWNRCYVK

SEQ ID NO: 305562 - protein, 119 aa, Zea mays
  unsure (1)..(119): unsure at all Xaa locations
  Clone ID: MRT4577_41741C.1.pep
AHRRRVGDLCATCCHSAQSRTLGPVXIVKETRALALQXCRLSSSRCAPXXMDAXNRTCPSSSVSRSTCLRIXRXAYVRTRAPYXRARSXDQKXGGLSVSPCSYILYHYTTPXVLIPXKX

SEQ ID NO: 305563 - protein, 80 aa, Zea mays
  unsure (1)..(80): unsure at all Xaa locations
  Clone ID: MRT4577_41742C.1.pep
ALPSPVCNFKLSPRNGRKTPPAIWRAMVNRAHSSSGTWLSXKDVCSPSTMSQLEIILVTVVCNHQGVTACPGKFTAPVIV

SEQ ID NO: 305564 - protein, 82 aa, Zea mays
  Clone ID: MRT4577_41743C.1.pep
PIGFAIFLFLLATIPLSVPRICPAFNLSFTLIFFHHHALVPLCLCSPGPFIVPALPAIYHQVLRRAIPFFSRSFINRFCCFL

SEQ ID NO: 305565 - protein, 109 aa, Zea mays
  Clone ID: MRT4577_41744C.1.pep
FLLLFIICVSPCQAAAAARLAGRRGARSSHIVVAETGSSETWHGRLGPRITHPDLLLLLLDDCSSQASASATGPVPSPTAAGSLVPRPGPPPQACPTASHARRRRRNRG

SEQ ID NO: 305566 - protein, 274 aa, Zea mays
  unsure (1)..(274): unsure at all Xaa locations
  Clone ID: MRT4577_41745C.1.pep
LGTSRPAGVFGFGSSPSFGQXTVSSGSTPFGXTPSPFGAPVPAFGSQTAAPAFGQPQFANQAGGTRIKPYSQTPDVDSATSGTQPAAKLDSISAMPEYKDKSHEELRWEDYQRGDKGGPNTSGTQAVAPSFPSLIQQNAPNPFSTSNPFSTNNPFAPKPAPTITSPFNTSFNNASVTSSSPFTSSPSTTMFGQTGVSTLSASNSPSLFGNTNPTPVTSSLFATSVTNNPSPFGTGSLFPNTQSAPLFPSAFAQPTSSTPLSPLAAYLAHSGQSV

SEQ ID NO: 305567 - protein, 358 aa, Zea mays
  Clone ID: MRT4577_41746C.1.pep
MVYPAAFLPRTPTLSSMVMQPAPVSNPFGMLPAMPHMSIGNGGSSPSVQYGISSLPVVEKLLPSRSLSMAFPRHLAQRRIKLLPRKYNPISDGKVPFFADDEESPATPKADAFFVPRENPRNLVIRPIEQWPSRRETDRQLTVKNATDLNKYEDASIESERGKSASAMSPSSRPPAVENDNQHEARAMAQHGNGNATSVERLLPKLPRADYFTEPSIEELAAKERAEAGYCGRVRDFVVGRHGYGSIKFLGETDVRCLDLESIVEFNNREVVVYKDDSKKPPVGEGLNKAAEVTLLNIKCVNKKTGEEYCEGTRVERYREMLMKKAEEQGAEFVSFDAAKGEWKFRVKHFSAYGLPCS

SEQ ID NO: 305568 - protein, 144 aa, Zea mays
  unsure (1)..(144): unsure at all Xaa locations
  Clone ID: MRT4577_41747C.1.pep
THSIMVQQLQXVVLPNLITXSHQQQFLPVVDLAAVNNHYNXQQPLVPFSQIPAANPQQFLPFNQLAALNSPAYLQQQQLLPFSQLAGVNHATFFIQPQLLPFFQHDAPNXGTLLQLLLLQPFNLLDLPNPSAFYHHPIIGGALL

SEQ ID NO: 305569 - protein, 745 aa, Zea mays
  Clone ID: MRT4577_41748C.1.pep
DLVFSTAPAFGATTSPAFGSTSTSLFGASSAPMFGSSAFGTSATGFGTSGTTAFGVSSTTPGFGSSSTPSFGTSASAFSFGSSPSFGQTAVSSGSTPFGTTPSPFGAPAPAFGSQTAAPTFGQPQFANQAGGTRIKPYSQTPDVDSATSGTQPAAKLDSISAMPEYKEKSHEELRWEDYQRGDKGGPNTSGTQTLAPSFRSRIQHNTFASTSNPFSTNPFSTNNPFAPKPTTTTSSPFNTSFNNASVASSSLFTSSPGTTMFGQPGVSTLPAPASNSPSLFGNINPAPATSSIFATSVTNNPSPFGTGTSLANTQSAPLFSSAFAQPTSSTPAFSSGSLFGSTNPGSLFTSSGPSLFSTPTFQPSAPAQSSNMFSFQPPIQPASTGGLPFFPNTNQALTGQPTSSLSSMVMQPALVSNPFGMLPAMPQMSIGNGGSSPSVQYGISSLPVAEKPLPSRSLSMAVPRHLSQRRIKLLPRKYNPISDGKVPFFADDEESPATPKADAFFIPRENPRNLVIRPIEQWSSRRETGRQYTAKNVTDSNKYEDASIESERGKSAMSPSSRPPAVENDKQHEARAMAQHANGNATSVERLLPKLPRADYFTEPSIEELAAKERAEPGYCGRVRDFVVGRHDYGSIKFFGETDVRCLDLESIVEFNDREVIVYKDDSKKPPVGEGLNKAAEVTLLNIKCVNKKTGEPCQGARVERYREMLVKKAEEQGAEFVSFDAVKGDWKFRVKHFSAYGLW

SEQ ID NO: 305570 - protein, 120 aa, Zea mays
  Clone ID: MRT4577_41749C.1.pep
MAAVASSKGRVIAGSLVARVLAGKANASPRRAVHASAYDKNVDEQVRPAFVPDDVIGGAGSPDKYWGPHPTTGVFGPAAVDPKLAASLAPASAAANGGASVLDQKVWFRPLEDVEKPPVA

SEQ ID NO: 305571 - protein, 74 aa, Zea mays; identical to SEQ ID NO: 305538
  Clone ID: MRT4577_4174C.1.pep

SEQ ID NO: 305572 - protein, 68 aa, Zea mays
  Clone ID: MRT4577_41750C.1.pep
RGYSLSLSLSDGAPYLRKIDLKTYKNYKDLSTALEKMFSGFSTGEMSRGYSLSLSLSDGASVSNYVSF

SEQ ID NO: 305573 - protein, 61 aa, Zea mays
  unsure (1)..(61): unsure at all Xaa locations
  Clone ID: MRT4577_41751C.1.pep
RSHPRXVTDDDGVVCLVAPASTPSLQLLPPVPTPAPATPASPRPPQPSPWRLTHCLLRRVP

SEQ ID NO: 305574 - protein, 109 aa, Zea mays
  unsure (1)..(109): unsure at all Xaa locations
  Clone ID: MRT4577_41752C.1.pep
MSVNLERNGRITCMTFPRDCLRRDLSDIDCGLLGWMGPYSVPAINGNRLAGLFFSSIIQELVHFPTPPPVISQFWCGILTGHLXLFIVLTFLQIGFEGRTKDYFKKRTG

SEQ ID NO: 305575 - protein, 245 aa, Zea mays
  Clone ID: MRT4577_41753C.1.pep
METKPEPHRQNHVRHEEAQEGEQAAVMEHGALSLQRGVTNLFGRRHDEEQAVGRRGEIREVDFFSRVSRARDQDSGGGRGVPGGGRDDVNIELDLLTTTTATTCAGDEVMQTKNQKIEASAVEAELRRVVEENRRLRGILEELTRSYGALYQQLLLVTQGQHHHPHRLHPADLMISRPSLAHTHLSTTAASQYSASTRLLLEARASSSATAQPRAVEDEVVSGAGGGAGVVEASPSLSNGGKHDT

SEQ ID NO: 305576 - protein, 78 aa, Zea mays
  Clone ID: MRT4577_41754C.1.pep
PELHQMYSGTLSPSSTLYSFKPEQRRPSDPIPQTRVLLLTSRHYSHPTQPCLSLPYQPQCYCTCTHYTSDPKTTLHCS

SEQ ID NO: 305577 - protein, 77 aa, Zea mays
  Clone ID: MRT4577_41755C.1.pep
MAAILLVLQVMGAPPTLMAARSPRGDVPDVSLATTPKAERCMSRHSYRYTGAAHAKTIPASLLLAPATLSSASDTTY

SEQ ID NO: 305578 - protein, 39 aa, Zea mays
  Clone ID: MRT4577_41756C.1.pep
RDGKNRLPVSSNQATDRCFLVFRLTSVTDKKSTRIGAST

SEQ ID NO: 305579 - protein, 91 aa, Zea mays
  Clone ID: MRT4577_41757C.1.pep
RHPGPETSCPSGTRPRRNHSLGGGRLTTLLHPRSVRLLVSHTHTHTTDVLDCPWNELTRGYNTYEFLLLVPGPMKSDRRTVALGELDEGPG

SEQ ID NO: 305580 - protein, 94 aa, Zea mays
  unsure (1)..(94): unsure at all Xaa locations
  Clone ID: MRT4577_41758C.1.pep
AGFAGDDAPRAVFPSIVGRPRHTGVMVGMGQKDAYVGDEAQSKRGILTLKYPIDHGIXNHWXDLEKXWHHXFYKELRVXPXEHXVLXRGXXLNX

SEQ ID NO: 305581 - protein, 45 aa, Zea mays
  Clone ID: MRT4577_41759C.1.pep
YRLVLPNAHKSTAHPQSLALILTDLATIWRTRAVPRGHYTSQERQ

SEQ ID NO: 305582 - protein, 31 aa, Zea mays
  Clone ID: MRT4577_4175C.1.pep
APSHLFGHGTGTYTSVATASTSVSDRTEHCS

SEQ ID NO: 305583 - protein, 106 aa, Zea mays
  Clone ID: MRT4577_41760C.1.pep
NHEKKIVNQGDTSMGLHLPIFHFHIIRNPIDLSISDNRGQIKPLKRHRSSPRTHDKRKKNSANHSEPMDGAQLLHKILQPNHTSIPWNSTIMANPNIALIRLERTE

SEQ ID NO: 305584 - protein, 47 aa, Zea mays
  Clone ID: MRT4577_41761C.1.pep
FREVYKTLRDLSPYPASFMLVQLTDSYSFILFDKSTNSLLVAYDPEG

SEQ ID NO: 305585 - protein, 68 aa, Zea mays
  Clone ID: MRT4577_41762C.1.pep
YLRCQFAPGRVYETKQPLPFKSAEHWWGLEEKHGVFLGAIHNSYHTSRVVIRDMVIRNAREGLQICND

SEQ ID NO: 305586 - protein, 81 aa, Zea mays
  Clone ID: MRT4577_41763C.1.pep
LSKNLHPNKTSLFFLKKRKYRLNYAPLVFITPPLFAPLAQKKKSLLKKKKKSPADVPGQSTSLPRGDPKLHKLLGEPPHRV

SEQ ID NO: 305587 - protein, 167 aa, Zea mays
  unsure (1)..(167): unsure at all Xaa locations
  Clone ID: MRT4577_41764C.1.pep
IRHEAKIELFSPLYQIYNDFSSTIKLCFLYLSIFPKGSTIDKEKLIQQWIALEIIGSKHDSLPPYVNGEMCIQDFLSIYFLQVRDTHSVYGMDNRVVPTTFYIHNFVHEFARHVACDDIIIFDGTKMQKGCAKRQTFQYALLTCXPVQSTFSHSMLTKTKALHIMNS

SEQ ID NO: 305588 - protein, 99 aa, Zea mays
  Clone ID: MRT4577_41765C.1.pep
PGEKPLLGGPAGFAWVFGQPRGTLWGVVVGGGGYVCYGYGCPSSRNRAGEGPGPRLCCGENFGAVTCAARKTLFGLDGKGPPSPGGGRRLDCPGPDLLL

SEQ ID NO: 305589 - protein, 332 aa, Zea mays
  unsure (1)..(332): unsure at all Xaa locations
  Clone ID: MRT4577_41766C.1.pep
MEDFARAVEDGLKLSKRLVLPGGVPPPRPPAGMERTVSAASASGPDPRLLPTAPMAYALVTDPAAVDTPDVPSYQPYVYGDLDPPALIPLQMKEVDLAVDCALDAAHVTLRARWWLHCITRSRDSDVRLVVPLGEXGAEVTVGRRSYNTQVIEVEDHTLEKHAKIESGGLLQPHLFFLTIPQVEGGADICATFQWSQKLLYDSGRFSVDIPFRFPYFVNPLPKVFMKKEKIQLTVHSGFSKEILLQGTSHPLKEKSRQGDKLFFHHEAIVENWSIKDFNFSYNVYSGDLSGGVLVQPATLCDYDDRDMFCIFLLPGXQQKGLTIGVCYERFG

SEQ ID NO: 305590 - protein, 182 aa, Zea mays
  unsure (1)..(182): unsure at all Xaa locations
  Clone ID: MRT4577_41767C.1.pep
VLDCQVEDILKSWAAYLTIXHVGNTVFGEQMNSITVMLKKKYKKYLQAGGDKLASNTQANRNTRLKRILEETREADGESDIRDRMQAVRLQLSDSIHNLHEVFSSRIFVAICRGFWDRLGQIVLRFLESRKENRIWYRGSDYALGILDDVFASEMQKLLGSALQDKDLDPPQSVIDARSILC

SEQ ID NO: 305591 - protein, 80 aa, Zea mays
  unsure (1)..(80): unsure at all Xaa locations
  Clone ID: MRT4577_41768C.1.pep
RGQNGQGIRVAGKKRGKFVLPPKKDHPLSVDKFKSIKAMGFFLGEAVWNPNNCGEDHFPGKKKXVQKIITRGGKQTRQSL

SEQ ID NO: 305592 - protein, 109 aa, Zea mays
  Clone ID: MRT4577_41769C.1.pep
SSGGSSLRQLASTMNYQGFLQKHWRMAPMFFHCVIGKFLRTCVPRRMSDCRSRSPRAGACAIESVIYVHGRLFYSLSFSFPSRAVSLYFTLIKAGMGMGNRTVTSMLFM

SEQ ID NO: 305593 - protein, 36 aa, Zea mays
  Clone ID: MRT4577_4176C.1.pep
PLSSFFFFFFFFFFFFFFFFFFFFFFFFFFSGTQNF

SEQ ID NO: 305594 - protein, 50 aa, Zea mays
  Clone ID: MRT4577_41770C.1.pep
DCSVTHVAVCLSLCYYTAHSENTLLVVLQMKCFFTNFVQPLSVKILSLDF

SEQ ID NO: 305595 - protein, 48 aa, Zea mays
  unsure (1)..(48): unsure at all Xaa locations
  Clone ID: MRT4577_41771C.1.pep
MGDPFXNPIAKKLYDEWLGQPGSENAKKYLHTEYHPVVKSVASQLQNW

SEQ ID NO: 305596 - protein, 63 aa, Zea mays
  unsure (1)..(63): unsure at all Xaa locations
  Clone ID: MRT4577_41772C.1.pep
DIHLDINIRLYKXPGPVXLYCGCCKRPAVTLSMYNIHESITPYAKTSMDIALSKKSDIHTQHQ

SEQ ID NO: 305597 - protein, 73 aa, Zea mays
  unsure (1)..(73): unsure at all Xaa locations
  Clone ID: MRT4577_41773C.1.pep
MANSGEGPPVCRIPEKAPLHLAKLALXFGYPGFHVGSRVALNMGIRKVVFPVYRNIIALWLLVPFAYFLEKKD

SEQ ID NO: 305598 - protein, 155 aa, Zea mays
  unsure (1)..(155): unsure at all Xaa locations
  Clone ID: MRT4577_41774C.1.pep
GRTKWGPTRKKEPVGTGAGEKTRGNNKKGKQRPKGNSKMGGGKKKKKGAKKKQKXKKVKQLTLKNPKGIKRTQKGGGNTKYKXPDGKKLKQRAPKLSEKKRKKATMGEKRKPHPKGKTEGARKQIPKKRGNGKNWARLKPTQNGGKGDRVTLKAG

SEQ ID NO: 305599 - protein, 50 aa, Zea mays
  Clone ID: MRT4577_41775C.1.pep
AMGSYVLPLWHESRESETLGPPRGCLPPWSLLDESPSHPKKNPTRVVLKL

SEQ ID NO: 305600 - protein, 51 aa, Zea mays
  Clone ID: MRT4577_41776C.1.pep
YADPLTIYNELITGPTPLLMHIQRVTPLHILMWHWRSKAAVIKCYNLITHY

SEQ ID NO: 305601 - protein, 131 aa, Zea mays
  unsure (1)..(131): unsure at all Xaa locations
  Clone ID: MRT4577_41777C.1.pep
ILIRVLTVVHSAVHAGAWATFLTPSSSXRSGAKNAVLNDVEDGKGDGKESEPRRESYSYSYFHLIFDLVSMYAGMLLTVWTSASSNSXTXIDVVWTTGWTRICTQRFTDGVNIWTHMGTLIVPDRDSYYAP

SEQ ID NO: 305602 - protein, 38 aa, Zea mays
  Clone ID: MRT4577_41778C.1.pep
SRRQISTPVKMLLCLRKNKFYIFFNGVNKKAYCFKRIF

SEQ ID NO: 305603 - protein, 58 aa, Zea mays
  Clone ID: MRT4577_41779C.1.pep
YHHDLNTYNLLSHEHRHLKVSDFHLSALIDCQKHDRLLHTTCRTSHYIAPEIINNKVY

SEQ ID NO: 305604 - protein, 135 aa, Zea mays
  unsure (1)..(135): unsure at all Xaa locations
  Clone ID: MRT4577_4177C.1.pep
LCSPLSFFSFXCXLFFCPLRFXSFLVLLXSGXXLSGCXXPLPSAPXXXCLALXSFAPXVLRXGCSXGXWXXPSXSSRPSPVAPXXXXLALLXXPLLLVSLSSCGXGGAXAWPRLXXLSAVPAGLVSXAPRLLFGV

SEQ ID NO: 305605 - protein, 70 aa, Zea mays
  unsure (1)..(70): unsure at all Xaa locations
  Clone ID: MRT4577_41780C.1.pep
VILRLDINGRDLTDWLMKNITKRGXNFGETAXRCILRDIEETFEYLAFDYQQEFETEKDRSSEGMSSELP

SEQ ID NO: 305606 - protein, 415 aa, Zea mays
  Clone ID: MRT4577_41781C.1.pep
MESLTLRASTAASPLQRRRLLPGRQRATYVRATASAGEPDLSVRVNGLQMPNPFVIGSGPPGTNYTVMKRAFDEGWGAVIAKTVSLDAEKVINVTPRYAKLRAEPNGAAMGRIIGWQNIELISDRPLETMLNEFKQLKKEYPDRILIGSIMEEYNKAAWHELIERVEESGVDALEINFSCPHGMPERKMGAAVGQDCDLLEEVCGWINEKATVPVWAKMTPNITDITQPARISLKSGCEGVSAINTIMSVMGINLKTLRPEPCVEGYSTPGGYSARAVHPIALAKVMQIARMMKEEFADGQSLSAIGGVETGNDAAEFILLGADTVQVCTGVMIHGYPLVKKLCAELQDFMREHNFSSIEEFRGASLPYFTTHTDLVHRQQEAVRQRKAIKKGLQSDKEWTGDGFVKETESMVSN

SEQ ID NO: 305607 - protein, 54 aa, Zea mays
  Clone ID: MRT4577_41782C.1.pep
CLLSAEVSQCISHVFYFALILSPVLGWYKYFTGQLLVQLQHDHTIAVCMIPAHA

SEQ ID NO: 305608 - protein, 41 aa, Zea mays
  Clone ID: MRT4577_41783C.1.pep
GTGHCCRTYLTYQATYYYLHSWKALVTTEIKITSLTILNNL

SEQ ID NO: 305609 - protein, 196 aa, Zea mays
  Clone ID: MRT4577_41784C.1.pep
MARPSAAAAGGFLLACAALLLFAGQSNAQTTFIFPFASLFPVGYVPPIVRIYSKQNTGLNMAVRYGKVVLVTANSWDQTQLWWKIPPLTSLFDGEGAKYWLVNVATKQAMTCPNGPMQVQLAEFNPYNGAQMWVPSTPRLQDGVFYQIKPYTQDSKALNGLGGYVHDGTEIGIYSDTPVSSNTLWFTSNIFPFPFY

SEQ ID NO: 305610 - protein, 114 aa, Zea mays
  Clone ID: MRT4577_41785C.1.pep
LTIRTRHSASIMNGCLSKRRCSHYIQIRHMVPTYNRTLLYVAAMSNLTVKDSCNNHSPYRHNTAYGCVTSMNTRGTTGYDDIFPNLSDVVVVIKHAMPAAGYLSRQTSTIPSEE

SEQ ID NO: 305611 - protein, 127 aa, Zea mays
  Clone ID: MRT4577_41786C.1.pep
MEYHVAGMATMPRIAMGHDDASDLDSASRLVYFDALCLCLGAWLQAARGADAVNRTFFVLGHCVVDNGNNNYLLTEARAHSPTYGIDTPDHTATVRFSNGENVPDIIREHLGWDPVLSYLSPELDGH

SEQ ID NO: 305612 - protein, 59 aa, Zea mays
  Clone ID: MRT4577_41787C.1.pep
SSGNNAEYAGSRSVVEASELLSGLPVMAYGSNYNWSVISSLYGPALLLTAGGGLPRIIY

SEQ ID NO: 305613 - protein, 561 aa, Zea mays
  unsure (1)..(561): unsure at all Xaa locations
  Clone ID: MRT4577_41788C.1.pep
MHTLVVPASSYSDQSLTGTIGQSEEETEELSKITLENKDIQLDINIRVFDGARAPARLIRAACSFTRSARGMRNLLLPRCLLSAPTTMARASVSGSAAVAKALIPLNPASGGRLPSLLPARLHVPGSSRVLRGASLRCYAAAAAAVAEQSRIKVQNPIVEMDGDEMTRVIWKMIKDKLIFPYLELDVKYYDLGILNRDATNDEVTVESAEATLKYNVAVKCATITPDETRVKEFKLKSMWRSPNGTIRNILNGTVFREPILCKNIPRILSGWKKPICIGRHAFGDQYRATDMIINGPGKLKMVFVPDGADPMELDVYDFKGPGVALSMYNVDESIRAFAESSMXAMALSKKWPLYLSTKNTILKKYDGRFKDIFQEVYEEQWKEKFEENSIWYEHRLIDDMVAYAVKSDGGYVWACKNYDGDVQSDFLAQGFGSLGLMTSVLLSSDGKTLEAEAAHGTVTRHFRLHQKGQETSTNSIASIFAWTRGLEHRAKLDKNDSLLDFTHKLESACVETVESGKMTKDLALLIHGPKVTREFYLSTEEFIDAVAQQLRGKIQLPTTV

SEQ ID NO: 305614 - protein, 65 aa, Zea mays
  unsure (1)..(65): unsure at all Xaa locations
  Clone ID: MRT4577_41789C.1.pep
TQILYNPXPFFFFLYPQLTRSVYILIQPHPHNXTSFSTTQFSSITFNSSFFPPFSLHSFYINFTQ

SEQ ID NO: 305615 - protein, 52 aa, Zea mays
  Clone ID: MRT4577_4178C.1.pep
RSLRRPDHSRLVLYNTVPVYNHLIRRCRQEHLVGRSWLTHLWVSSIQGIRRG

SEQ ID NO: 305616 - protein, 697 aa, Zea mays
  Clone ID: MRT4577_41790C.1.pep
TNRCRNGRNEYDQGADWAEPEAGVPRPGEGRRRDQVLVAGRGRRRTGVVAKQLRHAVQHGGRARDALHQRPRRVELKNPLQIPVAVSGISIICQLSSTLDALSSDVSGLDLDGGEDKVNTEPSISMLETDGDKFTLSKLDIVLGGGESKRVQLDVTPKVEGILKLVGIRWTLSESVVGYQYFEFNAQKKIKKGKRGPHRSWNNSLVVIKGLPKLTGSIDRMPTKAFAGDLKLLTLNLRNHSEYAVKGIKMKLSNPRFLIPGDSSDIGLKFPHCLKRHVQSESSVVSAKTMKDNFKSLGFAFPQDIEIQAGAALSWPIWFHAATPGNVSLYISLYYEMGSSSDIKYRTLRMHFNLEVLPSLDVSFSVSTSSSRLQEYIVRMDVMNKTPSESFVLHQLSCVGDKWAVSALAACSSINSVETVSENQAVSYFFKIKDCEADSCKEAESDSCTSDMALCPGSSTDLFDIARSPFVDFHHQERCRQVKMAKGPCSLLDFVLISKAVDNSSKPTPDFELLSHHTCHCSALSQNPIWWLMEGPRTISHDFSKSYCEANLQLVIHNSEAHKILVRVVTFDVIPEKTVHPHDSTSAQGGWYDVSLESDVKAISSSKSTHQEKRSSKSIPPYVWCSLSCAQIELQPDSCARVPLKVCIFAPGTYNFSNYELQWKVHLSEGPHVGENENRLSGGGLGYPFYVTVLQGV

SEQ ID NO: 305617 - protein, 50 aa, Zea mays
  Clone ID: MRT4577_41791C.1.pep
PRVRFRSFNSGHNIQQLVSTMVPRYPKHSNFRSRRLSARELNMLKRKAKS

SEQ ID NO: 305618 - protein, 68 aa, Zea mays
  Clone ID: MRT4577_41792C.1.pep
FGWVVFKKRTANPHKNVNTGEHGTHVVNRKTLVWIRKQAAILHCHEIKIHTWSIMLYTGCASALHRTE

SEQ ID NO: 305619 - protein, 44 aa, Zea mays
  Clone ID: MRT4577_41793C.1.pep
FVFKWSSNPFFNFPDNITLKLVFCPFTFGTKFFYSNFLLPLKLL

SEQ ID NO: 305620 - protein, 48 aa, Zea mays
  Clone ID: MRT4577_41794C.1.pep
MGGGTLEYLSDLLGGGGGRRRYKKRKQFQTVELKVRMDCDGCEMKVRN

SEQ ID NO: 305621 - protein, 119 aa, Zea mays
  Clone ID: MRT4577_41795C.1.pep
ISPVRTTPGPFLSSPPPKNKKKFGGSPPGVLNPPVFLKFFGPVGLIPCAPIPGFFFFFFYFCLFVWPPGPPNKLFGHNGFPPVSGLFVFFNPSSPFFFSGAWVPPLFWKVYGFLKTGAF

SEQ ID NO: 305622 - protein, 48 aa, Zea mays
  Clone ID: MRT4577_41796C.1.pep
MSTVLQRPNPGKVQCFGRKKTAVAVVYNKPGRRLINVNGVPIELSTPE

SEQ ID NO: 305623 - protein, 370 aa, Zea mays
  unsure (1)..(370): unsure at all Xaa locations
  Clone ID: MRT4577_41797C.1.pep
MGSSRRRGDRHLKLLHRLLALSSLLLLASGEVIFEERFEDGWETRWVKSDWKKSEGKAGMFKHTAGKYSGDPDDKGIQTTIDARHFAISAKIPEFSNKGRTLVVQYSIKFEQEIECGGGYIKLMSGYVNQKKYSGDTPYSLMFGPDICGTQTKKLHLILSYQGQNYPIKKDLQCETDRLTHVYTFILRPDASYSLLVDNRERESGSMYTDWDILPPRKRIKNPNYKGKWKTPWIDNPGKQIKILTADFEXPHLSFKDQXVNCIIFAEFEDDPDLYVLKPLKYIGIEVWQVKAGSVFDNILICDDPEYARNVVEETWGANREAEKEAFEEAEKERKAREDREGQKAKDDGGRRRPRKKHYRDHWDDYHDEL

SEQ ID NO: 305624 - protein, 178 aa, Zea mays
  Clone ID: MRT4577_41798C.1.pep
PRCLPSLVVELALQTHALLRELGNPAGARIVLETERRAALEAAPSAAAARDGGGGASRANNKRGVRAPPPPLLDEPSWTMFCNGKKTGYAVRRQATDDDLAVMETLRAVSMGAGVLPGRAAPSSAPDAAAAAAADDEVPYMRGCFDHFVGSRDSESLYMIAPQGGGTGPELAVFFVRL

SEQ ID NO: 305625 - protein, 242 aa, Zea mays
  unsure (1)..(242): unsure at all Xaa locations
  Clone ID: MRT4577_41799C.1.pep
KKTSIEHLEQFGSAGXRTLWVAYRDLSXEQYESLNEKFVQAXSSLRDRDKKLXEVLXLIEKDLILIGCTAIQDKLQEGVPTCIETLSAVGIKIWVLTGDKMETAINIAYACSLVNNDTKQFIISSETDTIREAEDRGDPVEIARVIKDSVKQNLKRFHEEARHSLISTPERKLALIIDGRCLMYALDPTLRVDLLGLSLSCHSVICCRVSPLQKAQVTSLVRKGAEKITLSIGDGANDVSMT

SEQ ID NO: 305626 - protein, 41 aa, Zea mays
  Clone ID: MRT4577_4179C.1.pep
WKNSKFALRGVTEQGTNFFFFFFFFFFFFFFFFFFFFFFFF

SEQ ID NO: 305627 - protein, 58 aa, Zea mays
  Clone ID: MRT4577_417C.1.pep
GEHKDVNTRSKRLVILRCDTKTKRHSYGADIYNHSNNLLKEWRQLSTWVNNLIELPLL

SEQ ID NO: 305628 - protein, 38 aa, Zea mays
  Clone ID: MRT4577_41800C.1.pep
IPSRHIIIKMSQDKDNLESSKREVIHGIQSALNKINSC

SEQ ID NO: 305629 - protein, 301 aa, Zea mays
  unsure (1)..(301): unsure at all Xaa locations
  Clone ID: MRT4577_41801C.1.pep
MERAVPVRKSHTNTADLLSWSATGPDASASPAASSRPSLKPAAGITPAMFGAPVTEQEAEDLSKSERKFCSGSKLKEMGGSGIFAEKSENGDAEASNPANKTSLRMYQQTVTGIRQISFSAEGRVSPKNASSIPEAANYXELSGTLXEDTDAKIHKQLTEANTKELTGSDIFGPPPEIPARPLAARNMELQGNVDFSLPQRSVHTSXVKVSNPAGGPSNISFSEEPVVKTAKKIHNQKFQELTGNNIFKEDVPSSAEKSLSSAKLKEMSGSDIFADGTPAPREYLGGIRKPPGGESSIALI

SEQ ID NO: 305630 - protein, 83 aa, Zea mays
  unsure (1)..(83): unsure at all Xaa locations
  Clone ID: MRT4577_41802C.1.pep
LPALISRSDLQQQQLLPFSQLAGVSHAAFLTQPQLLPXYYQHGAPNAGTLXMQMQQWLPYXQLGLASPXAFRSIEPISGGALY

SEQ ID NO: 305631 - protein, 74 aa, Zea mays
  Clone ID: MRT4577_41803C.1.pep
MVLAYIVWIIYLMSKKKNYVIFILTEDQAYRKIRLRAEDVQGRNVLTNFWGMNFTTDKLRSLVKKWQTLIEAHV

SEQ ID NO: 305632 - protein, 133 aa, Zea mays
  Clone ID: MRT4577_41804C.1.pep
LLKARTYNLYKASREANTMHVTNQTEDGSADVKKSQAKLPQFMPRMKGELMHHYGCCLLLYYHGPVNLHLGLSRFASSCFLISGCLLLVRFFRWRWGLLFLYRRSRSKACEKSQNHLTCFSFFLSFLPDDNLL

SEQ ID NO: 305633 - protein, 101 aa, Zea mays
  unsure (1)..(101): unsure at all Xaa locations
  Clone ID: MRT4577_41805C.1.pep
MAMDPHVVVKAFVEHYYGTFDNNRAALVALYQETSVLTFEGQTFQGPSAIAGELGSLPFEACQHHIVTVDCQPXGPQVGMLVXFVSXPSRTGPXEHPQYKF

SEQ ID NO: 305634 - protein, 95 aa, Zea mays
  unsure (1)..(95): unsure at all Xaa locations
  Clone ID: MRT4577_41806C.1.pep
GRLGSSEPAGLYDEDALYTDLYRNTNNVEKLLSNRCLTTPAEINLRRCLLRSRRRLRLRCRRAGQGHVDLRVQRERRGGDGGEELXXDXQXXPPR

SEQ ID NO: 305635 - protein, 136 aa, Zea mays
  unsure (1)..(136): unsure at all Xaa locations
  Clone ID: MRT4577_41807C.1.pep
CTDIDAPGHRVFIKNMITVTWQADXTVLIIDSTTGGFXVGIYNDGHTPEHALLAMTLAVKLMTCCCNRMDATTPLFSTAHYHEIVKEVSFXLIKVGYNHDQIVFIPMYGFEGDNMIDRLTNLDWCKCPTLLEGLDQ

SEQ ID NO: 305636 - protein, 99 aa, Zea mays
  Clone ID: MRT4577_41808C.1.pep
HASAFLARALTTPLPAPAALPRRRPASVAVAAAAPERRPPGAVASTTNYFVPLDAAPSGITPPLSWDGGGGIEPRAQPHGAALLPRRLNGCTGYTELPF

SEQ ID NO: 305637 - protein, 109 aa, Zea mays
  Clone ID: MRT4577_41809C.1.pep
KPPARVHEHHRRAPSGAVASRAQLCSARVAREASRPLIGPEAPADPLGAEAKPTIRQPRAPRHGAPGARPSRRGAAMSARGRSATPHGAGSMASPGTPRSASIRRPRRP

SEQ ID NO: 305638 - protein, 46 aa, Zea mays
  Clone ID: MRT4577_4180C.1.pep
LECHRAPIVEFTGPNPCLCDYAFQNPIQHDVSPLSKKWQSRSPRAE

SEQ ID NO: 305639 - protein, 75 aa, Zea mays
  Clone ID: MRT4577_41810C.1.pep
MSHAQPLRLQAQWKHVDIQDNQANAMKEPGTSGGYGSPMKDDKNKDVDTIASNFIKLKHRAWALQKSTTMYQPST

SEQ ID NO: 305640 - protein, 73 aa, Zea mays
  unsure (1)..(73): unsure at all Xaa locations
  Clone ID: MRT4577_41811C.1.pep
KLAQGAQKQVGVSPKPSNSFIFETDKICMQLFFDIQEXARNLGSKEINAKKIDSYKALGQCVAPKDRQENIQF

SEQ ID NO: 305641 - protein, 75 aa, Zea mays; identical to SEQ ID NO: 305639
  Clone ID: MRT4577_41812C.1.pep

SEQ ID NO: 305642 - protein, 75 aa, Zea mays; identical to SEQ ID NO: 305639
  Clone ID: MRT4577_41813C.1.pep

SEQ ID NO: 305643 - protein, 72 aa, Zea mays
  Clone ID: MRT4577_41814C.1.pep
GSSIPDGMVSRTMKQPQNYNLSASLAVPFCMNENIVNKPGNTLNIHINPASHHVHTNRHQHHKRQTPKLNVQ

SEQ ID NO: 305644 - protein, 740 aa, Zea mays
  Clone ID: MRT4577_41815C.1.pep
MASEILGNVTEKAKDLAGSKSTKMAQLAEVTKDVHDDKWRITSDYGVKQNNTDDWLRVATDDQTGPLLLEDQFAREKIHRFDHERIPERVVHARGSGAFGKFTLFESASDVTSAGILTDTSRETPVFLRFSTVLGSRGSADTVRDVRGFAVKFYTEEGNWDIVGNNIPVFFIQDSMKFPDVIHAGKPEPDCEVPQAQSAHNNFWDFQYMHPEATHMFMWAMSDRTIPRSYRMMQGFGVNTYTLINAKGERHFVKFHFTPELGVHSFVWDEALKIAGQDPDFHRKDLWMAIDSGAYPKWKFGIQVIPEAKEHDFEFDILDATKVWPEELVPVRYIGELELNKNPDEFFTQTEQVAFCTSHIVPGIGFSNDPLLQGRNFSYQDTQLSRLGINWEELPINKPVCPVMNFNRDGAMRHTITKGKVNYWPNRFQTVPPATEKEGAYVEFPEKTAGMKVRMQSKKFREHKSQAELFYNSMSENEKMHMKAAFAFELDHCDDPVVYERLCERLCEIDLELAQSVAEMVGGEQPTKQTRPKHNKKAKGLSQMDFQPEKPTIATRMVAILIADGYDKAAYTGMKAALTAAGALPFTISPRRNKIFADGEDKSGSGVVADHHLEGQRSTMYDSVFVPGGAKSIETLSKNGRAVHWVREAFGHLKAIGGTGEAVSFIKQAVDLPGMEFSTSGDVVNSYGVVTATAVQPESFKEAVNMAKEAKDFVSAYMYAISQHKNFERETAGLNAMVAY

SEQ ID NO: 305645 - protein, 126 aa, Zea mays
  Clone ID: MRT4577_41816C.1.pep
FGSAPPFGLVPAQPFNFTSPIEMPHFSLGQDTLAASSAAAGDYSLGFSTSSGFLGASRGTLQSNSQSNFSGHHHHQLQRLDGPLLFGHVHGAAVAHPASENQLTSSAALQLWDGLRHSGMKEKSKN

SEQ ID NO: 305646 - protein, 72 aa, Zea mays
  Clone ID: MRT4577_41817C.1.pep
RTPRTHLYKFLVPFQRLEHFRGGLFMFWVQVRLFKRSFLHQIDCQCGTSKKNIQFQTSGFTRGGGLFHNVTL

SEQ ID NO: 305647 - protein, 181 aa, Zea mays
  Clone ID: MRT4577_41818C.1.pep
VFCCHHLYFVAWCMIKLQQHHQRETKLSVADPVSVIQWSLLAVCLFYMTGHWCTFDGLRYGAAFIGFDHFHIIRQGLLLCIDTFGISHVLPILSLPLIAIVWYNTTSKDNELKDVILNNINKVLLMYGLITTITATLTIICVAIQRRHLMVWGLFAPKYVFDAIGLLLTDLLICLASIYYS

SEQ ID NO: 305648 - protein, 66 aa, Zea mays
  Clone ID: MRT4577_41819C.1.pep
SGAPPHVGGKRVGSSYTPKGTPKEPLEGKGSLLTKLSIGGQAPVVNALFLPIFPRCLDTWVGMKNQ

SEQ ID NO: 305649 - protein, 37 aa, Zea mays
  Clone ID: MRT4577_4181C.1.pep
LRASHLNIMVEMLSRVVYKRTGPYEEVLEKVFESPKS

SEQ ID NO: 305650 - protein, 56 aa, Zea mays
  unsure (1)..(56): unsure at all Xaa locations
  Clone ID: MRT4577_41820C.1.pep
FNFKMISIRLVFVATIVLFASAAFAQEFDSEFDPSAGQLPASGLASYAVQXGVSPY

SEQ ID NO: 305651 - protein, 247 aa, Zea mays
  unsure (1)..(247): unsure at all Xaa locations
  Clone ID: MRT4577_41821C.1.pep
ARNSARERSSVSEELSKETMEMLAEILLLXFYCSVQKVNXAVKRKSRRMVHLLVQFVVLCLDNSKVYPFLPNFPGPGGLTPLHLAASIENAEDIVDALTDDPQQVGLTCWQSALDEDGQSPETYAKLRNHNSYNELVAQKLVDMKNSQVTITVNGDEIHMDQLGNVDDRKKSGVQALQIRSCSQCAILESGVLRQPMRSRGLLARPYIHSMLAIAAVCVCVCVFMRALLRINSGKSFKWERLDYGTI

SEQ ID NO: 305652 - protein, 65 aa, Zea mays
  Clone ID: MRT4577_41822C.1.pep
AGGGFFGGNPKIFGGKNHRGFAKKGINGLKFKGKKLFLALKKRGGIYFFIRGGGFPENLWGPGGN

SEQ ID NO: 305653 - protein, 119 aa, Zea mays
  Clone ID: MRT4577_41823C.1.pep
QKAFFFSAGPCMKKLGFRERASTTGRKYEVPKTTTMVAGPSRREAPKVFACPPREKKGGQKNRHFGRGGEEPIRNGSGREGGGHGRGWSSHNLKNQKYGHHRTGHFFFAPLRREYAFFF

SEQ ID NO: 305654 - protein, 103 aa, Zea mays
  Clone ID: MRT4577_41824C.1.pep
RCLLIVASNTPPADLCKVFSWIERSYFQLGAARKLLVDRTSCISCTEIPRELLMSSRRAPKMAYFNWLMHLCVDLHQMVKGCTLLDSAHYVGIYANMQTRTET

SEQ ID NO: 305655 - protein, 104 aa, Zea mays
  unsure (1)..(104): unsure at all Xaa locations
  Clone ID: MRT4577_41825C.1.pep
VFLLNVKGIWISVGFSALQCCYVSDLACFKVFRLLMMFMVVYLMLQCLCAHGVYDVDVDIDCRGCGVGFGAFVCMGMFAVVLVVGKGLKNFKRFVVXCYALKVC

SEQ ID NO: 305656 - protein, 91 aa, Zea mays
  unsure (1)..(91): unsure at all Xaa locations
  Clone ID: MRT4577_41826C.1.pep
RPTRTYTSSAAAAASNAFLSHVPPCQRGVQNDIGLIILSSKLQKILHSKNTLIQSSNSFLTDVXACEXFSIATALPHSQTVVILPVCQIVL

SEQ ID NO: 305657 - protein, 380 aa, Zea mays
  unsure (1)..(380): unsure at all Xaa locations
  Clone ID: MRT4577_41827C.1.pep
MKQWRDDIDRLLGMAHSTSTRRAGEDARVSLERAREHRQNIEGRNLDQDFAVAVPQAPMGTRSPTGVPLASVGCVALMDHLRAVSWPPKFRPHLPEKYDGTTNPSEFLQVYVTAITAAXTWLMNLVPGSVYSWEELCARFVANFASAYXQHGVEAHLHAVRQEPGETLRTFISHFTKVQGTIPRISDASIITAFRQGVRDEKMLEKLATHDVETIPTLFALADKCSRAAEGRAWHLAPQTGAPQSGGSGVVPRDGKKKKKKDRDYQKSRSTALVVAAMIGGRGDRNKHPRPQRGNSGPCPVHPNGRHSAAECREIIDLVKRVSERREQSSKDDSPPHRRPGKEKVDDGEVAAAERDLGYQSPEGDLKDVFVGGSYSGGDN

SEQ ID NO: 305658 - protein, 67 aa, Zea mays
  Clone ID: MRT4577_41828C.1.pep
RNLFGNSHHQVHAITNLEPQVLFAYPPEKPLPLKYKDTLSFCLPGGVQVHAVERTPSFSELNEILLG

SEQ ID NO: 305659 - protein, 206 aa, Zea mays
  unsure (1)..(206): unsure at all Xaa locations
  Clone ID: MRT4577_41829C.1.pep
MSSAPPDDATIPTSVTLPREGQRIKYSRELLLAVGSSDACKVLPAGVDLSKHPDDVKLWVRAETWSARSVGRQGKSELPHRVREPESFQAGVGSKSKPCIRFFXTRIFQQLLFPLHSAGSVVYPHDVSHXSIAGCRFGDDCHFIHDIPGGYRAVEKLGILSAAAPAPPPAQGEEKPAKHLSTDNATPPPMEPTPTGDHAHRAQMEP

SEQ ID NO: 305660 - protein, 108 aa, Zea mays
  unsure (1)..(108): unsure at all Xaa locations
  Clone ID: MRT4577_4182C.1.pep
MNKGEVVRTLSTRARIEPGFTTLVWQKLEEENSEFFRAYYIRLKLKRQIILFNHLLQRQYNLMKYPAPPNIPLAPIQNGIHHMPVXSNLPMGYPVLQQXIMPAPGRLT

SEQ ID NO: 305661 - protein, 290 aa, Zea mays
  Clone ID: MRT4577_41830C.1.pep
RPTLPQGQKKKKQSAALEARKSCRPEMDKYWEETQRYLEYEELSIYLEAQEDAMSCYDSSSPDGSISHSSSSAAACGNKNILMERDRRRKLNDKLYALRSVVPNITKMDKASIIKDAIEYIQQLQAEERRVLQELRVLDDDTAAAATAQVECCDVDGGLLRREAERAKKMKRAQSVASGAQSAPPPPPPAPPHVEVLELRVSEVGDHVLVVSVTCRKRRDAMARVCRAIEDLRLRVITANVTSVAGCHVHTVFVEVDKIDHIQVKNMIEAALTLLDAPGSPHSSMSYYET

SEQ ID NO: 305662 - protein, 131 aa, Zea mays
  unsure (1)..(131): unsure at all Xaa locations
  Clone ID: MRT4577_41831C.1.pep
MQIFXKTLXXKTITXLEAQSXXDTIXDNVXKANSQHKXEGIPPDQQRLIFAGKQLEDGRTLADYNIQKETTHHPPLRXLRGGAKKRKKKTHTKPNKIKHKHKKAKLSEPQLYNAYDATXTATRLRKERPNT

SEQ ID NO: 305663 - protein, 264 aa, Zea mays
  unsure (1)..(264): unsure at all Xaa locations
  Clone ID: MRT4577_41832C.1.pep
AALEARKSCRPEMDKYWEETQRYLEYEELSIYLEAQEDAMSCYDSSSPDGSISHSSSSAAACGNKNILMERDRRRKLNDKLYALRSVVPNITKXRRSRTHAATDRRSSVPSSSVLSALYYIACMQMDKASIIKDAIEYIQQLQAEERRVLQELRVLDDDTAAAATAQVECCDVDGGLLRREAERAKKMKRAQSVASGAQSAPPPPPPAPPHVEVLELRVSEVGDHVLVVSVTCRKRRDAMARVCRAIEDLRRRLPRAHRLRRGR

SEQ ID NO: 305664 - protein, 109 aa, Zea mays
  Clone ID: MRT4577_41833C.1.pep
KGQKGRAPKPKKRGNPGGFPKPRGEKRGQGKKIRGPKKKGKTRKPRGGKPGPPKRPPPDKTKEKTGQREDESQGPLVQMKLFSGVFFRVFLSFLLTPPPQVHLFTRNIK

SEQ ID NO: 305665 - protein, 545 aa, Zea mays
  unsure (1)..(545): unsure at all Xaa locations
  Clone ID: MRT4577_41834C.1.pep
MEIGQYPASGCSKEHQKIYQEWFALADADGDGRITGPDAIKFFGMSKLSRPDLKQVWAIADTRRQGYLGFSEFVTAMQLVSLAQAGNEITQDSLKRDDLSSLNPPVMEGLDALLAKSKHLVKRVDPEMDGYPQEQSPLTNKWFSSKSSKKIPLTAVTSVIDGLKKLYIEKLKPLEVTYKFNDFVSPLLTSSDFDAKPMVMLLGQYSTGKTTFIKHLLRTSYPGAHIGPEPTTDRFVVVMSGSDERTIPGNTIAVQADMPFSGLTTFGTAFLSKFECSQMRHPLLEHITFVDTPGXVLSGEKQRTQRSYDFTGVTSWFAAKCDLILLLFDPHKLDISDEFKRVIGSLRGHDDKIRVVLNKADQVDTQQLMRVYGALMWSLGKVLNTPEVSRVYIGSFNDKPVNESAVGPLGKELFEREQDDLLSDLKDIPKKACDRRINEFVKRARAAKIHAYIIGHLKKEMPTMMGKAKAQQRLIDNLPDEFAKVQREYHLPSGDFPYVEHFKEVLSGYSFDKFEKVKPKMIQAVDDMLGYDIPELLKNFRNPYE

SEQ ID NO: 305666 - protein, 81 aa, Zea mays
  Clone ID: MRT4577_41835C.1.pep
IRHEAKPHPMRLRVRLGDRQAEQMMRDATKEMNRVIRLDLLLGHRTHNTGNRPRQEDSCIVDVVQSKLDSDTSRYVVLKLS

SEQ ID NO: 305667 - protein, 128 aa, Zea mays
  unsure (1)..(128): unsure at all Xaa locations
  Clone ID: MRT4577_41836C.1.pep
MSSVQAEVGGGWRPKQQQYPLEIREVWADNVEREFKLIRAAIERFPYVSMDTEFPGVIHHPPPSVHHSALTPPQRYALLKSNVDALHLIQVGLAFAPSASFPPALAFQVNLREFDPRLHXHAPDFVRL

SEQ ID NO: 305668 - protein, 51 aa, Zea mays
  Clone ID: MRT4577_41837C.1.pep
RNSWVDPRVRPRVRLCGVKAINLIFLWYFDSALRSISYSLEFLYDSFTFII

SEQ ID NO: 305669 - protein, 106 aa, Zea mays
  unsure (1)..(106): unsure at all Xaa locations
  Clone ID: MRT4577_41838C.1.pep
PIRAVQRLREHQRGVEDEFRAMDPRLRPPKNRPAQIMGFLAKLPDDPGLVLGPMLPKEEELALIPKGSEAHPPKRRRFGAXRGPGAXTRGGGPVPFPFFVFGQVFF

SEQ ID NO: 305670 - protein, 84 aa, Zea mays
  Clone ID: MRT4577_41839C.1.pep
SDTPADYPSIHARKETTAIMPRCARIYARESHLHGSRVRGAASSTLGLMTMTAPFISWIWTFCDLHDIYLDDALGAMCLIDHPG

SEQ ID NO: 305671 - protein, 363 aa, Zea mays
  Clone ID: MRT4577_4183C.1.pep
MKDSQDIQSTTELQSPVQGTNEVQSQQPNSMAADAPAGNSGSLSVASNDNKKVSREDIELVQNLIERCLQLYMNKGEVVRTLSTRARIEPGFTTLVWQKLEEENSEFFRAYYIRLKLKRQIILFNHLLQHQYNLMKYPAPPNIPLAPIQNGIHHMPVSNLPMGYPVLQQPIMPAPGQPHMDPMACGLSSGHVVNGIPAPGGYHPMRMNSGNDMVLDNGAPEAPHAGATGSAMSSEMAVSPSSAASSNHAPFTPSDIPGMTMDVSALDSAFGCDVGNPESLQLGPDGSSRDSIRSLGQLWNFSLSDLTADLTSLGADLDVLENYTGTPFLPSDSDILLDSPDQDDIVEYFADAINGSPSDEEKP

SEQ ID NO: 305672 - protein, 557 aa, Zea mays
  Clone ID: MRT4577_41840C.1.pep
IGYLEAGREGGATQPPTRDPSICRTPPNSQTITRSVDMDKAYIAALSAAALFLLHYLLGRRAGGEGKAKAKGSRRRLPPSPPAIPFLGHLHLVKAPFHGALARLAARHGPVFSMRLGTRRAVVVSSPDCARECFTEHDVNFANRPLFPSMRLASFDGAMLSVSSYGPYWRNLRRVAAVQLLSAHRVACMAPAIEAQVRAMVRRMDRAAAAGGGGVAARVQLKRRLFELSLSVLMETIAHTKTSRADDADSDMSPEAHEFKQIVDEIVPYLGTANLWDYLPVLRWFDVFGVRNKIMDAVGRRDAFLRRLIDAERRRLDGDGDSDEKKSMIAVLLSLQKSEPEVYTDTMIMALCGNLFGAGTETTSTTTEWAMSLLLNHPEALKKAQAEIDAVVGTSRLLTADDVPRLGYLHCVINETLRLHPAAPLLLPHESAADCTVGGYDVPRGTLLLVNAYAIHRDPAVWEDPDRFVPERFEGGKAEGRLLMPFGMGRRKCPGETLALRTVGLVLATLLQCFDWDTVDGAQVDMKASGGLTMPRAVPLEAMCRPRTAMRGVLKRL

SEQ ID NO: 305673 - protein, 120 aa, Zea mays
  unsure (1)..(120): unsure at all Xaa locations
  Clone ID: MRT4577_41841C.1.pep
VCTSGFKTPPPLLDLSRGDSLHNTRMEKVSIYDQIIQSLSKILFLLXRSEFNNSYVHXNIFSICYFVXMLRPILNKKIHPQRSNSIAKKYLESNHKIMDEARSSVDANKWVKTDSECEIF

SEQ ID NO: 305674 - protein, 513 aa, Zea mays
  Clone ID: MRT4577_41842C.1.pep
MDKAYVAVLSVAFLFLVHYLVGRAAPGGGKGRKRLPPSPLAIPFLGHLHLVKTPFHSALGRLAERHGPVFSLRMGCRRAVVVSSPECARACFTEHDMSFANRPRFESMRLVSFDGAMLSVSSYGPYWRTLRRVAAVQLLSAHRVACMSPVICAEVRAMVRRMARLAAGGAARVQLRRRLFELSLGVLMETIARTKTSRSEACAADTDVSPEASELTRISEEIMPYLGTANLWDYLPFLRWFDVFGVRNKLMAAVRWRDAFLRRLIDAERRRMDGDGDGEKKSMIAVLLSLQKSEPELYTDTMIMALCGDLFGAGTETTSVTTEWAMSLLLSHPEALKKAQAEIDAVVGNSRRLITADDVPRLGYLHCVINETLRMYPAAPLLLPHESAADCKVGGYDVPRGTLLIVNAYAIHRDPAVWEDPGSFLPERFEDGKAEGRLLMPFGMGRRKCPGETLALRTVGLVLATLLQCFDWDTVDGAEVDMTESGGLTMPRAVPLEAMCKPRAAMCDVLREL

SEQ ID NO: 305675 - protein, 67 aa, Zea mays
  Clone ID: MRT4577_41843C.1.pep
CDSIFSCCSAHAETARDPDPDPSSRESRRSPPSFLQDVQSLWVWMIRRITPHGYGYKGKSISTGVYK

SEQ ID NO: 305676 - protein, 161 aa, Zea mays
  unsure (1)..(161): unsure at all Xaa locations
  Clone ID: MRT4577_41844C.1.pep
GDRGTTLPTLHLPQCIVDETLRLXPAAPLLLPHESAADCTVGGYDVPRGTMLLVNVHAVHRDPAVWDDPDRFVPERFEGGKAEGRLLMPFGMGRRKCPGETLALRTVGLVLGTLLQCFDWDTVDGAQVDMKASGGLTMPRAVPLEAMCRPRTAMRDVLKRL

SEQ ID NO: 305677 - protein, 46 aa, Zea mays
  Clone ID: MRT4577_41845C.1.pep
FFNHNELLSFSKHGLTHPPTLLQPAHQWGVPSYRFCMIYAVIIKFS

SEQ ID NO: 305678 - protein, 136 aa, Zea mays
  Clone ID: MRT4577_41846C.1.pep
ARRPPRLLIPYLRLPRAVSTLPSPYIDILLPPRSVIQGSTARMASACAVPTLEDNHTRYCSASPKSCLTNWSTTRFTDPTHPLALHLEKIRAVRLSHLSLLYGSRARRARMPSMGSSMRSAVCPNDVPLRSYVASY

SEQ ID NO: 305679 - protein, 53 aa, Zea mays
  Clone ID: MRT4577_41847C.1.pep
RNDSTIPIHNTAIHLSHRMSDMFLKPSLLFQFTATTLLVRDNLRSIHMSATDV

SEQ ID NO: 305680 - protein, 170 aa, Zea mays
  Clone ID: MRT4577_41848C.1.pep
CTGPEFPGRPTRSMLTPAYVDQSEGNNGPANANSSQGAPASTGDGLLDFDMYLSEIQSSQPSKSELEQYLDESLTPRIQEFDILNWWKLNTVKFPTLSKMARDILAIPVSMVSSGSSIFCAGTGSHMLDDYRSSLRPEIVEALVCAKDWLQYSPPATEAPSSALVKAQGS

SEQ ID NO: 305681 - protein, 112 aa, Zea mays
  unsure (1)..(112): unsure at all Xaa locations
  Clone ID: MRT4577_41849C.1.pep
IFPXXXXNTRGRLKXNTVFNTQGNLKEGTKKGPKGDHHSGEPKKIGKKQTRGPETFLTPRIGGTGRKPTNPRRREKPQETMKKRGPQLTRGGEKTAPEGTKSRKLQNPPKTQ

SEQ ID NO: 305682 - protein, 60 aa, Zea mays
  Clone ID: MRT4577_4184C.1.pep
IPSQNTSFYPLNLPPASIIWMILLQRRGLTHQKFFLHRHPLQRYPCFLLINLHHWQAPFP

SEQ ID NO: 305683 - protein, 44 aa, Zea mays
  Clone ID: MRT4577_41850C.1.pep
TIIHPVAQRYSAEVIKSLSSPQSMLCPLPALRLVKSRTQNLFLC

SEQ ID NO: 305684 - protein, 112 aa, Zea mays
  unsure (1)..(112): unsure at all Xaa locations
  Clone ID: MRT4577_41851C.1.pep
VHYVMDTDXXXFLQLHNTAVHMTRLVPIIREQDNSGGAENTCQTPALRCDPCSSCRSSTTIRDAKQRRYYKQVLYGLTGLCPSLRQAVLVASLTDNKLRAHEAPAHTGSGQE

SEQ ID NO: 305685 - protein, 71 aa, Zea mays
  Clone ID: MRT4577_41852C.1.pep
HLLKTAKEMVSASLPHPPQQICYMRQKVWSLDPWALSRWDLSQLQHSLRKHSQRPPLKKKLKDPRPPKAAV

SEQ ID NO: 305686 - protein, 311 aa, Zea mays
  Clone ID: MRT4577_41853C.1.pep
MTTRMAIRRSRPWCSLRTRSTTPPLKRCTGPGMEALVMDEDEQPLEQPIVADALALFEKMRGKGYHADVMRLRDADRAVQVLGEMMEAGFRPWNLTLTYSFVVAVLVKAGRMEEALKLKDQMLLVAGKMDVVLATTLMHGYCLLGEVGKALDLFNEAVRDGVTATNVTYAVLIKGCDAEGMTDKAYELCRQMIEQGLLSSTHGFNLVIKGLLRDKRWEDAIGLLEVMVDIPSAGTAAKWEELDIMTECVVQCNLVTTASSDFHPEFISLFVKNFGGSVAVSSKRVLFLSWGYMEEYEVLIPFQFLQVRESQ

SEQ ID NO: 305687 - protein, 91 aa, Zea mays
  Clone ID: MRT4577_41854C.1.pep
TQYELKHTVVKFLTTLAHEAEPITTPVTNHTLTLKSKTYKGSSGHQPSTMHGGRGTPHQGKGLSQVSPLESQTPGTPIIPNSDGRQRNVAL

SEQ ID NO: 305688 - protein, 85 aa, Zea mays
  Clone ID: MRT4577_41855C.1.pep
VHWAQRNIRSASWFINQRKRHCKPAPLVMALGTPDYSMVQHGDGASISSASSGLRVQRQYFSAGSSYPRGPWRCMRRLQAKRVRC

SEQ ID NO: 305689 - protein, 174 aa, Zea mays
  unsure (1)..(174): unsure at all Xaa locations
  Clone ID: MRT4577_41856C.1.pep
MLQQEENTKREKADRERMQQLCTLITSSINKDLPSNLEKSLKKEISSLGPVVARAITPVVEKSITSVVSDSVQKGVGDKVCNQLEKSITGKLEATLAKQIQMQFHTSGRQALQDALRTSFESLLVPAFEQACKTMFEQVDGAFQKGMSEHSNAIQQQVEAAHTPLALTLKXTIN

SEQ ID NO: 305690 - protein, 136 aa, Zea mays
  Clone ID: MRT4577_41857C.1.pep
LPANSQKIQGLRTPSLQGQTGQTPGPKGLITNKIQLIRLLLPVNLLVFKPSKCSFAKPMFLKKDVGETKAIKPNRVFQKAGQKEGKPFAGEHLYHPGSMFFSQKQNTQHKARKKGALCKGPFPEHFPNNLRKMFTK

SEQ ID NO: 305691 - protein, 438 aa, Zea mays
  unsure (1)..(438): unsure at all Xaa locations
  Clone ID: MRT4577_41858C.1.pep
AFELYIPTSQLLPRSXATQGMLQQLMGRQEDMEKQLSTVVPASIAKEGKRLETSLGRTVEKSIKANIDAFWARLQEENTKREKADRERMQQFVTLITSSINKDLPSNLEKSLKKEISSLGPVVARAITPIIEKCLTSAVSDSVQKGLGDKLFNQLEKSITGKLEATLARQIQIQFHTSGKQALQDALRTSFESLLVPAFEQACKTMFEQIDGAFQKGMSEHSTAIQHQVESSHTPLALTLKETINSASSITQSFSSELLDGNRKLLALVTSGNAMAHNTSALQPINGPMGGPQEVEAPLDPMRELSRLISERKFDEAFTMALQRSDVSIVSWLCSQVDLRALCAMVPVPLNQGVLLALLQQLAIDIHNETSRKVQWMTDVAMAINPADQMIAVHVRPIFEQVYNQLAHQRTLPTMTAADGTSIRVIMHVINSVLLSYK

SEQ ID NO: 305692 - protein, 116 aa, Zea mays
  Clone ID: MRT4577_41859C.1.pep
QRSDVSIVSWLGSQVDLRALCAMVPVPLNQGVLLALLQQLAIDIHNETSRKVQWMTDVAMAINPADQIIAVHVRPIFEQVHSQLAHQRTLPTTTASDGTSIRVIMHVINSVLLSYK

SEQ ID NO: 305693 - protein, 363 aa, Zea mays
  unsure (1)..(363): unsure at all Xaa locations
  Clone ID: MRT4577_4185C.1.pep
MKDSQDIQSTTELQSSAQGTNEVQSQQPNPMTTDAPAGNSGSLSIASNDSKKVSREDIELVQNLIERCLQLYMNKGEVVRTLSTRARIEPGFTTLVWQKLEEENSEFFRAYYIRLKLKRQIILFNHLLQHQYNLMKYPAPPNVPLAPIQNGIHHMXAVSNLPMGYPVLPQPIMPAPGQPHMDPMACGLSNGHVVNGIPAPGGYHPMRMNSGNDMVVDNGAPEAPHAGATGSVMSSEMAVSPSSAASSNHAPFMPPEIPGMAMDVPGLDSTFGSDVGNGPLQLGPDGSSRDSIRSLGQLWNFSLSDLTADLTSLGADLDVLENYTGTPFLPSDSDILLDSPDQDDIVEYFADAINGSQSDEERS

SEQ ID NO: 305694 - protein, 268 aa, Zea mays
  Clone ID: MRT4577_41860C.1.pep
ANAKQFLTSGLQPLQPTLRTSFESLLVPAFEQACKTMFEQVDGAFQKGMSEHSNAIQQQVEASHTPLALTLKETINSASSITQSFSSELLDGNRKLLALVTSGNAKAHNTSALQPINGPMGGPQEVEAPLDPMRELSRLISERKFDEAFTMALQRSDVSIVSWLCSQVDLRALCAMVPVPLNQGVLLALLQQLAIDIHNETSRKVQWMTDVAMAINPADQIIAVHVRPIFEQVYSQLAHQRTLPTTASDGTSIRVIMHVINSVLLSYK

SEQ ID NO: 305695 - protein, 50 aa, Zea mays
  unsure (1)..(50): unsure at all Xaa locations
  Clone ID: MRT4577_41861C.1.pep
QTGFEILDLSSWKXSKLTHTMMAAIQTISKLPDKIFVALQDAMDLNTYIA

SEQ ID NO: 305696 - protein, 153 aa, Zea mays
  unsure (1)..(153): unsure at all Xaa locations
  Clone ID: MRT4577_41862C.1.pep
PITSRALIGKPAAGTREVFGEGRITMRRTDSKPMPAASGSPWYGANRVLYLGPLNGSTPSYLTGEITCDYGWDTKRLSAXPETLPKNRKLVVIHCXWAMLGALGCVFXPELLARNGVKFGEEKWFKAISQIFTEGGLDYLDNPSLDHSQSILT

SEQ ID NO: 305697 - protein, 100 aa, Zea mays
  unsure (1)..(100): unsure at all Xaa locations
  Clone ID: MRT4577_41863C.1.pep
RDEGKEDPIEHGAGXGEFAGKHYXDPPTAPLIDAADLGSWYLYRAEIAEFMATLLYLYIXTQDTVIGYKTQTDAXASDANAGCGHSGVLGIAWAFSGMIL

SEQ ID NO: 305698 - protein, 71 aa, Zea mays
  Clone ID: MRT4577_41864C.1.pep
MVGRRTGRGGGGGGGAATALVWAVVAVAAAVSRAQQQQQQLQVGFYDTLCPAAEIIVQEEVSKAADRNPGG

SEQ ID NO: 305699 - protein, 1308 aa, Zea mays
  unsure (1)..(1308): unsure at all Xaa locations
  Clone ID: MRT4577_41865C.1.pep
MDEAAAAAAKAAEDRRLAKYEAAHEAVWAQATAVVNVKALIPIILDKATNTYTKWRGIFLTVLGKYALTRHVLDDELFHERPAWLQADCVVLTWIYGTVSVDLQQSLLIRQRPAREAWCYLEDEFLGQKESRALLLETQFRNLRQDSLTITEFCRRLETMAASLAEFGDPIGDRQMVLTLLRGLSGKFRHMVSILKMHRPFPTFTEARTHLLLEEMEIDARPPSPPTALVVHQQQAPSGPSSTPRQGNPSATQQHSHGVPTGGQRTNGRRRGRGGRGGGQQPPGRGTPSAGQGSAPPGMHPSFAQPWAGSLQMWPYGRPPPQPAFTVFPQYGGSFGNVPDGGVYGTGYTAPPPYVYGGAVHSLSTFQGPPAPYQAAAQAPWNPTHGGAWNQDSLVQSFNTMTLTPPAPSEWYADSGAGSHMTADAGKLSNILSPSSLTPSSIIVGNGALLPVTATGSHIFSFPHRNLVLNDVLVSPNIIKNLISIRRFTTDNNCSIEFDPFGLSVKDLHTRNVIASVSGYKYYLVILDDCSHYIWTFPLRLKSDTFSTLANFFAYARTQFGTTIKSVHCDNGREFDNSLARTFFLSHGVTLRMSCHYTSQQNGKAERSIRTLNNILRSLLFQASLPPVYWVEALHTATYLVNRLPTKTLASSTPHYHLYSTQPSYEHLKVFGCACYPNMSSTAPHKLAPRSSLCVFLGYSSEHKGYRCLELESNRIITSRHVVFDESFFPFADMSTSPMASSALDFLLDDSDLTAPIPGARFVHAGAPLDGRGATGPPTPPPAPFSVGLRSPASRAGPGAPSSPSATTTTGAAASSTSSPTTSPVGAAAPVSRSQTVASSAAATGRTIVTRPISITPVDNAHSMRTRGKAGIAQPVDRLNLHAVPMSPLPRSVRDALSDPNWRSAMQAEFDALIANDTWSLVPRPPGVNLVTGKWIFRHKLNADGSLDRYKARWVLXGFTQRPXNWPIHQLDVKNAFLHGTLTETVYCVQPFGFAYSSRPDLVCRLNKSLYGLKQAPRVWHHRFASYLSSIGFVETKSDSSLFIYCRGSDTAYLLLYVDDIVLTASSAGFLHTVIGALQREFAMTDLGQLHHFLGISVTRSADDIAFVVQQICLYMHDPREPHLAALKRILRYLQGTMSLGLTMHRSSPTELVVYTDADWAGCPDTRRSTSGYAVFLGDNLVSWSSKRQHTVSRSSAEAEYRAVANGVAEATWLRQLLLELHHLPRRATLVYCDNVSAVYLSSNPVQHQRTKHVEIDLHFVREKVALGHVRVLHVPTTSQYADIFTKGLPTSLYQEFRSSLTVSDAPD

SEQ ID NO: 305700 - protein, 90 aa, Zea mays
  Clone ID: MRT4577_41866C.1.pep
SPASPHHIRPPQLICLAPQLRSSSTSSPSLPSGRARHRQSHRRQVVLPLHRPIHRVHALLQLLPMHPSLLPLELPPLRHLEPPPTPALPL

SEQ ID NO: 305701 - protein, 107 aa, Zea mays
  unsure (1)..(107): unsure at all Xaa locations
  Clone ID: MRT4577_41867C.1.pep
XQRIKHSVTMGHILTYLVFQCILPSMPCARKICMNEIAECSLSATPTWNSLLVDNMDRVQLIEQCGANGEGHGLQESLPIASAHGERDADDSEEHNDGTIPERLDLV

SEQ ID NO: 305702 - protein, 347 aa, Zea mays
  Clone ID: MRT4577_41868C.1.pep
RLSREPKFAGEQGDMSKSRTRRRFHNEATNFGSGAGRTRQQARHNPSRVGRRGIRAAWRGRSSARTTGISAGLRRPWGRAAAKDRTKLGGAVELRASSGMESSQSSKSTTTRVLLQDGPSPAMTGTGAWPHSRGEHTRRPALDLGAGTRASGLEDHDRRRKDMDTVRRASMGDVHGFEAATAKAGAQGEQHRYPDEREVEGRAGGGRWRESARHRRPHQGTAMANREAHARGNSAAGRARQPWRAGAGAGRAGGWQREREAREGAMAGARRIQRNGGEQGKHPGIRTLSASHRSRELGELDHGVEGGHGWGARAGSRAPRNARRKQDAMEKLQQGKNAGDGQEAERQ

SEQ ID NO: 305703 - protein, 193 aa, Zea mays
  Clone ID: MRT4577_41869C.1.pep
AGIFPAEIFPAPISLPCSSSSRALSSSQPWSSPACSSPSQPWFSLSPARLLAPPMELAQRPCTLPHVRSFLLFLVVVELAGDTRVGRPCSPLPPSARTPAVAPACRAHGRGLLPTRADFFSLARSGPLLQLVPMAAAVLPRSLTYARCSSLAMPRRSLSFLPCSDCAALLSRLACSGSEVGRFGVKLPLHPGF

SEQ ID NO: 305704 - protein, 144 aa, Zea mays
  unsure (1)..(144): unsure at all Xaa locations
  Clone ID: MRT4577_4186C.1.pep
MEVSFAHLHSEAGLIKLDECLLTRSYITGYRASKDDLXVYTFFSVATSYMYINVTRWVNHIDALVRLIVITAEGHCAKVEYSAAPSAPTADVAEAQAPVVEEDDNHDVVLFREDNQDEKNGSEQSAGSASAFGKKKVSGESSVL

SEQ ID NO: 305705 - protein, 379 aa, Zea mays
  unsure (1)..(379): unsure at all Xaa locations
  Clone ID: MRT4577_41870C.1.pep
SPCKSVPAKYSSTDKRRLEGMDASDVKSKGPSGIKEKEPVQVRIDLEDKETTPSFQVLNDKTWSPDPKLSSHMDRLKKQHAEAESYQIRTRNENAVETQSPPKNGVSLLSKPYVDRREQNGDSDLLGHGLRETGVKRKRSHHDVEQNDDLSDSSVESLPGMEISPDDVVSAIGPKHFWKARRAIVNQQRVFAVQVFELHRLIKVQKLIAASPHVLIEGDPCLGKSLAVSKKRLAGDVETQLESAKNDDGVRPTQLEHSKEKTEANQPSPSQDEQAATNGDVAASMHTPSDNKQKSWCIPAPPSQWLIPVMSPSEGLVYKPYTGHCPPVGSLLAPPFFAXYPTSSLXQXXGDFMSSACGAQLMSAPVYLPSFSMPAVSGS

SEQ ID NO: 305706 - protein, 689 aa, Zea mays
  unsure (1)..(689): unsure at all Xaa locations
  Clone ID: MRT4577_41871C.1.pep
MRRGATKDDAAPDKVMGPLFPRLHVNDTLKGGPRAPPRNKMALYEQFSVPSHRYSAAXAARAFPGASMGRATTXSAVPSTSASQVGGGDRPIFPLFRVPLTEPVRSSDQTNANSNGQAANGTIAESWRQRQSTHLKSKDTNAAGPPAEGNNSVGKKLANDDDFTVPSVLYSGMPPHSSQEKLTLFPTTSPCKSVPAKYSSTDKRRLEGMDASDVKSKGPSGIKEKEPVQVRIDLEDKETTPSFQVLNDKTWSPDPKLSSHMDRLKKQHAEAESYQIRTRNENAVETQSPPKNGVSLLSKPYVDRREQNGDSDLLGHGLRETGEKRKRSHHDVEQNDDLSDSSVESLPGMEISPDDVVSAIGPKHFWKARRAIVKXIQNLSSCSWCFYLLLNVLCEHTISATXNQIVFTLAFXNVHTVSRGYLLFKXELHRLIKVQKLIAASPHVLIEGDPCLGKSLAVSKKRLAGDVETQLESAKNDDGVRPTQLEHSKEKTEANQPSPSQDEQAATNGDVAASMHTPSDNKQKSWCIPAPPSQWLIPVMSPSEGLVYKPYTGHCPPVGSLLAPPFFASYPTSSSSTAGGDFMSSACGARLMSAPVYFPSFSMPAVSGSAVEQVSHVAASQHKRNSCSEAVLASRDSEVQGSSASSPASSETAAQPRVIRVVPHTARTASESAARIFRSIQMERKQNDP

SEQ ID NO: 305707 - protein, 490 aa, Zea mays
  unsure (1)..(490): unsure at all Xaa locations
  Clone ID: MRT4577_41872C.1.pep
HASAHASAHASAHASAHASGDLTSRLGSDCQQVSRVIGNDLNLISRNLLQGAGALIYLLVLSWPLGLCTMFVCATLSAIMLVHGRFQKRAAKFAQEFTANANNVAQEVITLVRTVRVYGTEKQEFKRYANWLDKLYDVSFRQTVAYGGWSLSLNYLYHSTQLCVXIGVVIGGLAIMSGKLTAEQLTKFTLYAEWLILSTWWIGDNWSSLMQSVGASEKVFRLMDLLPSKQLSSEGLKLEKLKGQIQYADVSFSYPSRPTVPILGGLNLTLNPNEVVAIVGLSGSGKSTIINLLLRLYEPTNGQILIDGVPLTELDIRWFRERIGFVGQEPRLFRMDISSNIKYGCPRDVSHEEVIWAAKQAYAHDFIMALPDGYNTIVDDALLSGGQKQRVAIARALLRDPSILLLDEATSALDAESEHYVKSVITKVSRDSKAKRTVVIIAHRLSTIQTADRIIVMENGNIVEDGKHIDLIEKGGLYSRLARRQNDDLK

SEQ ID NO: 305708 - protein, 115 aa, Zea mays
  Clone ID: MRT4577_41873C.1.pep
ISAERHPRSGGQMGSAPPHDEKTMPRTQQAVHGARTRHWLSARPLCELRLRVRPRLKLKEASHIYMDSWTHALLLYGTNNLQRRSCTSGSKAKKMMTVRKEDRNGQGRRHSSDSV

SEQ ID NO: 305709 - protein, 60 aa, Zea mays
  Clone ID: MRT4577_41874C.1.pep
MGCCSSRSSDSPASRVTRWRFTGIVALRDARLKEVSNEVLPVGNSLRTLDLTNNQLDAIP

SEQ ID NO: 305710 - protein, 90 aa, Zea mays
  unsure (1)..(90): unsure at all Xaa locations
  Clone ID: MRT4577_41875C.1.pep
PLTFAEITTQDTPXPSKTVLAFGLPGNPVSCIDCLNLLDVPAIRLLTGWSNRHLQRVHVRISHAXRAYPHRTEVHRAVLRSVLDDGSGRP

SEQ ID NO: 305711 - protein, 272 aa, Zea mays
  Clone ID: MRT4577_41876C.1.pep
MALSLARSPNPAAALPAPRVPHFALPLLTLRCPRRQNQARLRVAASSPPEAQAAPVAEDEQGEKRRKLYVANLPWSFPAPEIEKLFAQHGTVKDVEVIKGKDGRNRGFAFVTMSTAEEAAAAADKLNSHDVMGRTIKVEFSKSFRRPAPPPPPGTIIERHKLYVSNLPWKARAPNVKEFFANFNPLSANVIFDNGKAAGYGFVSFGTKEEAEAALTELDGKELLGRPVRLNWRESGDDKVEVAKADSEVEAVNIEGACVDDASTDGGEDKQE

SEQ ID NO: 305712 - protein, 183 aa, Zea mays
  unsure (1)..(183): unsure at all Xaa locations
  Clone ID: MRT4577_41877C.1.pep
MASKQIGDLTCFIDITALAFRPCASAGPMDGGWTNGGATWYGPAKGAGSDGGARGNQGAGDQPPFSSMITAGSQSIFQDGKGCGTCYQAKGTGHESGSGSPVTEVITDLCPGAACQAEPXHFDLRGTAVSDMTKAGQADQLRNAGRLQVQYIRMVSNWNGLDIAFKVDAGSNANYLIMAIEYE

SEQ ID NO: 305713 - protein, 134 aa, Zea mays
  unsure (1)..(134): unsure at all Xaa locations
  Clone ID: MRT4577_41878C.1.pep
MASKQIGVLTCFIAITALAFRPCASXRAHGTVXGXXNXGATWNGPAKGAGSDGGARGNQGAGDQPPFSSMMNAXGSESVIKNPKESGSCDDGDGNGQESSAGIPEKEKVAEQRNDGANKVDIADSRQRCAHVCW

SEQ ID NO: 305714 - protein, 91 aa, Zea mays
  Clone ID: MRT4577_41879C.1.pep
MVFGRVNEMECSDLYVPETVGNVTLSLPPGHGPASVTGLYRCELSIEKRVPLPWKLAFWQELSKKSKQPCMPPQHPKATNRSVRCAVITQW

SEQ ID NO: 305715 - protein, 66 aa, Zea mays
  Clone ID: MRT4577_4187C.1.pep
AQIYSLYILSITDRPALKLRTVNLEAASGYKKHFSLIITKTYLSKFLYINLPSHHHFCSRHSNMLS

SEQ ID NO: 305716 - protein, 124 aa, Zea mays
  Clone ID: MRT4577_41880C.1.pep
MASKQIGVLTCFIAITALAFRPCASAVPMGTVGWSNGGATWYGPAKGAGSDGAACGYQGAVDQPPLSSMITAGSQSISHDGNGCPTCYQVKRTGHASCSGSPVTPVTTDLRPAAACHHAPAHSD

SEQ ID NO: 305717 - protein, 177 aa, Zea mays
  unsure (1)..(177): unsure at all Xaa locations
  Clone ID: MRT4577_41881C.1.pep
DTCLTTILDPSKKMXXXDFFYEKMSQYFVDIQINVVLVKQCLTKLFXXYATLVQIDNKSSPFIDIRTSNLGSTVLXXXRLDEEFSQWSQIRGRRFPKSELDTYLEEELVRIDERFEILNWWRTNANKYPVLSAMARDILAIPLSTVPSEFAFSAGGRILDDNRSTMTPETLECFVCS

SEQ ID NO: 305718 - protein, 111 aa, Zea mays
  unsure (1)..(111): unsure at all Xaa locations
  Clone ID: MRT4577_41882C.1.pep
MASKQIGVLTCFIAITALAFRPCASAXWDGGWSNGGATWYGPAKGAGSDGGACGYQGAVDQHPFSSMITAGRQSIFQDGKGCGTCYQENCTGHESCSXSPVTVIITDRCPD

SEQ ID NO: 305719 - protein, 67 aa, Zea mays
  Clone ID: MRT4577_41883C.1.pep
SDFHQTCSTVRHSRKLLPADPFSSVPAPKATVCCRQLIYRAYLLYSSLSMRLHLGDLCIIWRAPVAA

SEQ ID NO: 305720 - protein, 113 aa, Zea mays
  Clone ID: MRT4577_41884C.1.pep
IPNYLYGVTNVNKLKNPTRNFTATRRQKKKKKVTPLQASLVGASRPRAACHPVGDADLAGPLPVPPCAGRLARGAVVAGAGRRRVQPVLAGRFAHVAPARVLGEEAPRGGGRR

SEQ ID NO: 305721 - protein, 88 aa, Zea mays
  unsure (1)..(88): unsure at all Xaa locations
  Clone ID: MRT4577_41885C.1.pep
RRREGKGEQRGEPRVRLXWVKNRGLDXLIERTTSIRASCLLLDHLSRLPGTSPVPARSLARLQKPLGLTAPVLRFLRRHPTLFSERPY

SEQ ID NO: 305722 - protein, 134 aa, Zea mays
  Clone ID: MRT4577_41886C.1.pep
MDCGWTNGRATWYGPANGAGSDGGACGFHGAVEQPPLSSMITAGSQFIFQDGKGCGTCYHVKCSGHDSRSGSPVTVVITDLCPGAACHAEPVHFDLSGTAFGAMAKPGQADQLRNAGRLQVQYIRAACNWNGLD

SEQ ID NO: 305723 - protein, 249 aa, Zea mays
  Clone ID: MRT4577_41887C.1.pep
MGATEGTEYGADQLRQRISQALGGTWRNKGLDEFVVMMDLGVCEGSSTNITSDYHSVQMSTRTTKVWEYFQQELVEVDGVMKAICKYCGTKLTRKRNSCTNSLRNHVADTCPKILVEDRKRFIATMRKKPGEGSFVFDPRKTHECMVKWCISAEVAFNKFDDPFFAPWMESLQPSFSAFNEIAERSGFPSKAGLILDVPNCCNSTHNMIMEAIEYKVVLKRYAEEQLEPSPDDEEWTNSEAIGEFLGGI

SEQ ID NO: 305724 - protein, 122 aa, Zea mays
  Clone ID: MRT4577_41888C.1.pep
LARSSSNLASVLASKQIGVLTCFIAITALAFRPCASAVPMDGGWSNGGATWYGPAKGAGSDGDACGYQGAADQPPLSAMITAGSQSIFQDGNFFVTRYQEKRTGHESCSSIPEEENITELYP

SEQ ID NO: 305725 - protein, 635 aa, Zea mays
  unsure (1)..(635): unsure at all Xaa locations
  Clone ID: MRT4577_41889C.1.pep
MDLGVCEGSSTKTTSDYHSVQMSTRTAKVWEYFQQELVEVDGVMKAICKYCGTKLRRKRNSCTNSLRNHVADTCPKILVEDLKRFIATMRKRPGEGSFVFDPRKTRECMVKWCISAEVAFNKFDDPFFAPWMESLQPSFKGVGPQXMRNRTRGRFKMMRQELRNELQSLNSRICLTTNLWTSNQKLGYLCLTAHYINADFILKKKIIAFKYLKYPHTGLAIKEGITECLKEWGIKEKMFTITLDNVSNNLSVRDLRESGRSNMLFGGDLRIVQCCAHILILLVQDGMAIAHGAIYKIRELVRHINSSPSRIQAFNGIAERSGLPSKDRFXLDVPNRWNSTHDMIMEAIEYKVVLKRYAEEQLEPSPNDEEWTNSEAIGEFLGAFEEATKAFSAHRSPTSHLFLHNVLCIHRTLRNTNWQINCVLKDSARAMDAKFDKYWEKGKYNMTLVLATILDPSKKMDFLDFFYEKMSQYFVDIQINVVLVKQCLTKLFEKYATLVQIDNKSSPFIDIRTSNLGSTVLGKRRLDEEFSQWSQIRGRRFPKSELDTYLEEELVRIDERFEILNWWRTNANKYPVLSAMARDILAIPLSTVPSEFAFSAGGRILDDNRSTMTPETLECFVCCKDWLYEYPNIQA

SEQ ID NO: 305726 - protein, 291 aa, Zea mays
  Clone ID: MRT4577_4188C.1.pep
MNKGEVVRTLSTRARIEPGFTTLVWQKLEEENSEFFRAYYIRLKLKRQIILFNHLLQHQYNLMKYPAPPNIPLAPIQNGIHHMPVSNLPMGYPVLQQPIMPAPGQPHMDPMACGLSSGHVVNGIPAPGGYHPMRMNSGNDMVLDNGAPEAPHAGATGSAMSSEMAVSPSSAASSNHAPFTPSDIPGMTMDVSALDSAFGCDVGNPESLQLGPDGSSRDSIRSLGQLWNFSLSDLTADLTSLGADLDVLENYTGTPFLPSDSDILLDSPDQDDIVEYFADAINGSPSDEEKP

SEQ ID NO: 305727 - protein, 80 aa, Zea mays
  Clone ID: MRT4577_41890C.1.pep
EWKLCEVYRISFGVDLDRRMHLLCQIVSSSCVEQRRAVVRTSASVPCFGIFHSKCMRRSRSTPKEIMRSLSNPTRPPTRP

SEQ ID NO: 305728 - protein, 148 aa, Zea mays
  unsure (1)..(148): unsure at all Xaa locations
  Clone ID: MRT4577_41891C.1.pep
MASKQIGVLTCFIAITALAFRPCASAVPMDGGWSNGGATWYGPAKGAGSDGGACGYQGADDQPPFSSMITAGSQSIFQDGKGCGTCYQVKCTAHESCSGSPATVVITDLCPDATCQAEPVHFDLSGTPLGAHAXPGQSHMLRNAGRLK

SEQ ID NO: 305729 - protein, 86 aa, Zea mays
  Clone ID: MRT4577_41892C.1.pep
MASKQIGVLTCFIAITALAFRPCASAVPMDGGWSNGGATWYGPAKGAGSDGGACGHQGADEQPPATPTSTDRSQGDQDRQGSATCY

SEQ ID NO: 305730 - protein, 245 aa, Zea mays
  unsure (1)..(245): unsure at all Xaa locations
  Clone ID: MRT4577_41893C.1.pep
MASKQIGVLTCFIAITALAFRPCASAVPMDGGWSNGGATWYGPAKGALSYGGACGYQGAVDQPPFSSMITAGSQSIFQDGKGCGTCYQVKCTGHESCSGSPVTVVITDLCPGAACQVEPVHFDLSGTAFGAMAKPGQADQLRNAGRLQVQYTRVACNWNGLDIAFRVDAGSNANYLAMAIEYESGDGDLRAVELKQSGAGXAWAPMQRSXWGAVWQYKSGSXLQGPLSVPLTRAPAGSLVAARHP

SEQ ID NO: 305731 - protein, 72 aa, Zea mays
  Clone ID: MRT4577_41894C.1.pep
RPLASAKFWGSTAQRGLWGSPKIWSSPGSTPPASGPLAPSSSAGRQASPVVMRLPTTLSMAPAAAFLSGKRK

SEQ ID NO: 305732 - protein, 265 aa, Zea mays
  unsure (1)..(265): unsure at all Xaa locations
  Clone ID: MRT4577_41895C.1.pep
MASKQIGVLTCFIAITALAFRPCASAVPMDGGWSNGGATWYGPAKGAGSDGGACGYQGAVDQPPFSSMITAGSQSIFQDGKGCGTCYQVKCTGHESCSGSPVTVVITDLCPGAACQAEPVHFDLSGTAFGAMAKPGQADQLRNAGRLQVQYTRVACNWNGLDIAFRVDAGSNANYLAMAIEYESGDGDLRAVELKQSGAAAWAPMQRSWGAVWQYKSGSTNLQAPLSVRLTSGSGRXLVASNVIPAGWQPGRTYRSVVNFGGNHA

SEQ ID NO: 305733 - protein, 68 aa, Zea mays
  unsure (1)..(68): unsure at all Xaa locations
  Clone ID: MRT4577_41896C.1.pep
RGSPNMSVVITSFYVMCSPINIGLDEVDSLVIGDSXSRGSLHWGKMVHPVTAYRWISSRPCLSRLSRA

SEQ ID NO: 305734 - protein, 34 aa, Zea mays
  Clone ID: MRT4577_41897C.1.pep
RCCGEGLVVRQRDAHGDQQVALVQVALHDLNARC

SEQ ID NO: 305735 - protein, 138 aa, Zea mays
  unsure (1)..(138): unsure at all Xaa locations
  Clone ID: MRT4577_41898C.1.pep
MGSTKGQGIMTQPINLIFRFLQNKAXIQIWFFKQKDLRIGGPIIGFDENMNLALENAGEINGKKNPWGTLGRILLKGDNKTLMKNKGKGKFLWQEPCLGPPLNIFGPLDSIHSNLHGSWHWGLREKLYLLLMTRIKLC

SEQ ID NO: 305736 - protein, 92 aa, Zea mays
  Clone ID: MRT4577_41899C.1.pep
FLHWGGFHFHWVFTNQPHSEDPFQRKTHEAQQKRTIPKTPKKQRNHPHGAKHGTLMKKEEMRTHTQKLEQEKPFLGPPYNRQTGKPSRETLT

SEQ ID NO: 305737 - protein, 85 aa, Zea mays
  unsure (1)..(85): unsure at all Xaa locations
  Clone ID: MRT4577_4189C.1.pep
FPAPDFIKGLLFKKPKYRLGSSKXPLNLXRPPFFEGLNWAFIRWTAPPKTPKNLYIAAALPPPKKKEGQCLEFRLNGAALEFELF

SEQ ID NO: 305738 - protein, 35 aa, Zea mays
  Clone ID: MRT4577_418C.1.pep
FWRKGLSFLTNYMGLATNSTSTFGSRRNWEGPWLG

SEQ ID NO: 305739 - protein, 51 aa, Zea mays
  Clone ID: MRT4577_41900C.1.pep
RVSYIQYIIHGKVRIGVVDLCSCITADIRNLHVPLQWLAILLIFDPNIERV

SEQ ID NO: 305740 - protein, 157 aa, Zea mays
  Clone ID: MRT4577_41901C.1.pep
IRHEGELVPIDLDMLQFVGESLKILRNEIDGKAALLGFVGAPWTIATYIVEGGMTNTYTNIKSMCHTAPDVLKGLLSHLAQAISDYIIYQVNSRAQCIQIFDSWGGQLPPHVWEQWSKPYIKQVTLPYFSCFHVLPTSWCCYVSALSYGITLMTPTE

SEQ ID NO: 305741 - protein, 189 aa, Zea mays
  Clone ID: MRT4577_41902C.1.pep
LGSILLDVAASLFSPVMACARGRGGNKPYNARATAGPEISQPNPLSWPNSSVPRREFCGGEEEQELRRSHTDGAGLACGARPTSQPNKCGQRRNERWPTCQCLMSMPWRMAQVLSGRHGGSQRPVVGPRMVTRMEDGPRGRRAKWAEWDWVQTTFLFFLLYFSPFFFILKSKFLDFKFCDEFVLNYLKV

SEQ ID NO: 305742 - protein, 88 aa, Zea mays
  unsure (1)..(88): unsure at all Xaa locations
  Clone ID: MRT4577_41903C.1.pep
MEGYIRPLDVVIICVADQHSDGVADDHPSDSLFSPTYHHHKEVYVAVSIGLDVKPGSTVKCEPGYGFMLHLSQAALXXSXXSGYALLP

SEQ ID NO: 305743 - protein, 90 aa, Zea mays
  unsure (1)..(90): unsure at all Xaa locations
  Clone ID: MRT4577_41904C.1.pep
LVFGKTFIPFAFSVPTDEEYFLAEVNNLLIIXVFSIWKMNTPFLXPLSPQHPLXYTSITYNFLPHRSFPSRKDHSVHKMTIXSHTSFNKP

SEQ ID NO: 305744 - protein, 64 aa, Zea mays
  Clone ID: MRT4577_41905C.1.pep
TLSKELDLPYGFHIFLLKCASIMPCPQPLNIFLDLVNALRLASLGIFNFLSLHWHLNLFLYKAF

SEQ ID NO: 305745 - protein, 47 aa, Zea mays
  Clone ID: MRT4577_41906C.1.pep
LLRSSSIYSYICIPAGSDIIYVQSDPHRLSIYADSLVYHRLVSASVH

SEQ ID NO: 305746 - protein, 81 aa, Zea mays
  Clone ID: MRT4577_41907C.1.pep
TRFFLRGEGCDTPGVSFVLWREINPNLGYSVKISLSRSRMSLIIQDYSFTLRRIRNLFNLAEGQFLEPVKTFILDECNLDI

SEQ ID NO: 305747 - protein, 140 aa, Zea mays
  Clone ID: MRT4577_41908C.1.pep
DEAGIDHRLSGVVGWQPLPSQSCVRAPSPCSSVARARSHVDPTHGHDRHAARRIGMRPPRRPAGWHHRHAVRQAGVRAHSRRAGTRAHGRPDVAASPSRHVGEQTSPLPRRMVGAGAQDTAAASSRQGVQAPPPYAFSIE

SEQ ID NO: 305748 - protein, 129 aa, Zea mays
  unsure (1)..(129): unsure at all Xaa locations
  Clone ID: MRT4577_41909C.1.pep
MAPMQALRFHARGDIRLDTIPIPICGRDEVRLKVAYCGICGTDLHEYLAGPIFVPPQGTKDPNTGAELPVTLGHEFCGTIXXXGXXXXIVDGFMIGQKVAVNPAMDDRHHGHQSCEQCLAGCPEQMRTF

SEQ ID NO: 305749 - protein, 150 aa, Zea mays
  Clone ID: MRT4577_4190C.1.pep
DPTRVGYLRPKPKFALQVYASGGSSWIIDSGCTNHMTGEKKMFTSYVKNKDSQDSIIFGDGNQGKVKGLGKIAISNEHSISNVFLVESLGYNLLSVSQLCNMGYNCLFTNVDVSVYRRCDGSLAFKGVLDGKLYLVDFAKEEVSLESPCR

SEQ ID NO: 305750 - protein, 95 aa, Zea mays
  Clone ID: MRT4577_41910C.1.pep
KTMEINPENAIMEELRKRAEADKNDKSVKDLVMLLFETALLTSGFSLDDPNTFGSRIHRMLKLGLSIDEDEAPEADTDMPPLEDDAGESKMEEVD

SEQ ID NO: 305751 - protein, 247 aa, Zea mays
  unsure (1)..(247): unsure at all Xaa locations
  Clone ID: MRT4577_41911C.1.pep
MASKQIGVLTCFIAITALAFRPCASAVPMDGGWSNGGATWYGPAKGAGSDGGACGYQGAVDQPPFSSMITAGSQSIFQDGKGCGTCYQVKCTGHESCSGSPVTVVITDLCPDAXCQVEPVHFDLSGTAFGAMAKPGQADKLRNAGRLQVQYTRVACNWNGLDIAFRVDAGSNANYLAMAIEYESGDGDLRAVELKQSGAAAWAPMQRSWGAVRQYKSGSTNLHAPLFVRLPSASGRVLVASHRHPRC

SEQ ID NO: 305752 - protein, 173 aa, Zea mays
  unsure (1)..(173): unsure at all Xaa locations
  Clone ID: MRT4577_41912C.1.pep
MASKQIGVLTCFIAITALAFRPCASAVPMGRXGWSNGGATWDGPAKGAGSDXGAGGNQGADDQPPGXXKNTAGSQTSDQDGNGGGTGNQEKGTGHAXRPGSPGTEGNTDRGPGAAGQEEPEHXDRSGTTXGARAKPGQADQXRNADRRQDQNKQETSNRNSTDTAPREDAGNA

SEQ ID NO: 305753 - protein, 256 aa, Zea mays
  Clone ID: MRT4577_41913C.1.pep
GRWERRIVDAGYVTANPGQSRRVTGIAHHGAAAAVKHKSFAAARRLCPLSFKADCSPQLSVSSIQLIVLSSSLFSPPCKQQSFTDRSSASCMETAAVAAAGAGRRIMVAVDEGEESLHALNWCLANVVSPAGGDTLVLVHARRPRPVYAAMDSAGYMMTSDVLASVERHANAVSAAAVDKAKRVCADHPHVKVETMVESGDPRDVICDAANKMAADLLVMGSHGYGFIQRAFLGSVSNHCAQNCKCPVLIVKRPKE

SEQ ID NO: 305754 - protein, 191 aa, Zea mays
  Clone ID: MRT4577_41914C.1.pep
MASKQIGVLTCFIAITALAFRPCASAVPMDGGWSNGGATWYGPAKGAGSDGGACGYQGAVDQHPFSSMITAGSQSIFQDGKGCGTCYQVKCTGHESCSGSPVTVVITDLCPDATCQVEPVHFDLNGTTYGALAKPGQDDKLRNDGRQQVQNTRVASKWNDLDIAYKQDAGTNANYLGMRIEYESGDGDLRA

SEQ ID NO: 305755 - protein, 129 aa, Zea mays
  Clone ID: MRT4577_41915C.1.pep
PGFRHGFQADRSLDLLHCHHRSRLPSLRIRRAPWTVAGRTHASADKTIEKGKLQIDVKYFFFYVHSETRDICGETSCPATGDFVLSHQQTLPGFTPPGSYTIYMKILGDENEELSCISFGFSIGFVASS

SEQ ID NO: 305756 - protein, 272 aa, Zea mays
  Clone ID: MRT4577_41916C.1.pep
MRTMKEDFIMLCLQQFCKHCHHPILSGKSWVCTSCKNFHLCDKCHAEEQNTAQKDRHPATTKQKHAFERMEVQPLPETDDGDPTMESKYFDSRIDFLKHCQDNQFQFDTIRRAKHSTMMILYYLHNSTCSACHRAVDQCLVWRCLECLGCTFCGQCYKQNGQGLHIHELRQIDTRETSQKHTLQDYIDGLVHASRCYDPRNCTHPLCLTLKKLFAHGARCHVRACNSGGCKKCLFMWKLLFRHSKDCNDGDCAVPRCRDVKAFIAEKMKLKI

SEQ ID NO: 305757 - protein, 58 aa, Zea mays
  Clone ID: MRT4577_41917C.1.pep
TTYHHNVILTKQPVFSRIIISSSRSHHMTDPDPHKNHHTHFKPKHCHPTAPPRTLDIT

SEQ ID NO: 305758 - protein, 266 aa, Zea mays
  unsure (1)..(266): unsure at all Xaa locations
  Clone ID: MRT4577_41918C.1.pep
MASKQIGVLTCFIAITALAFRPCASAVPMDGGWSNGGATWYGPAKGAGSDGGACGYQGAVDQPPFSSMITAGSQSIFQDGKGCGTCYQVKCTGHESCSGSPVTVVITDLCPDATCQVEPVHFDLSGTAFGAMAKPGQADKLRNAGRLQVQYTRVACNWNGLDIXFRVDAGSNANYLAMAIEYESGDGDLRAVELKQSGAAAWAPMQRSXWGAVWQYKSGSTNLQAPLSVRLTSGSGRVLVASNVIPAGWQPGRTYRSVVNFGGNHA

SEQ ID NO: 305759 - protein, 226 aa, Zea mays
  unsure (1)..(226): unsure at all Xaa locations
  Clone ID: MRT4577_41919C.1.pep
PASLPSPLSPSVPAHPPCPWDGGWSNGGATWYGPAKGAGSDGGACGYQGAVDQPPFSSMITAGSQSIFQDGNGCGTCYQVKCTGHASCSGSPVTVVITDLCPGAACQVEPVHFDLSGTAFGAMAXPGQADQLRNAGRLQVQYIRVACNWNGLDIAFRVDAGSNANYLAMAIEYESGDGDLRAVELKHSGAAAWAPMQRSWGAVWQYKSGSTNLQAPLSVRLTSGSG

SEQ ID NO: 305760 - protein, 171 aa, Zea mays
  unsure (1)..(171): unsure at all Xaa locations
  Clone ID: MRT4577_4191C.1.pep
RLVLQDIQSTTELQSSAQGTNEVQSQQPNPMTTDAPAGNSGSLSIASNDSKKVSREDIELVQNLIERCLQLYMNKGEVVRTLSTRARIEPGFTTLVWQKLEEENSEFFRAYYIRLKLKRQIILFNHLLQHQYNLMKYPAPXNVPLAPIXNGIHHMPVSNLPWGIQYFRSLS

SEQ ID NO: 305761 - protein, 247 aa, Zea mays
  unsure (1)..(247): unsure at all Xaa locations
  Clone ID: MRT4577_41920C.1.pep
GRAGVEPDDLMLTACLAASRKKKGIDAIDKGFLKDLKFYPRAKGVLSKYKVLDFHPFDPDSKKVQDVVESPQGERIICVKPAGLFVLKTVEEDHPIPEEVDSAYKNCVAEFATRGFRSLGVARKRGEGAWEILGIMPCSDPPRHDTARTINEAKRLGLSIKMLTGDAVGIARETSRQLGLGTNVYNAERLGLGGGGDMPGSEVYDFLEAADAFAEAFPQHKYNVLEILQQRGYLVAMTXDGVNDDPS

SEQ ID NO: 305762 - protein, 48 aa, Zea mays
  Clone ID: MRT4577_41921C.1.pep
VEPTNRMAWLSLGKVHRSDGRISDAADCFQAAVMLEESDPVESFSSLS

SEQ ID NO: 305763 - protein, 134 aa, Zea mays
  unsure (1)..(134): unsure at all Xaa locations
  Clone ID: MRT4577_41922C.1.pep
YIAHFPRAKQVRDLVAAGRNKKTERTAYLKLLLKLYRFNAVILKRYFISKTNRPXPLSLHRLISFMEGGRSXRFPFRFCLLNXFPVMCQIAVIVGNVTDDKRVYEVSAVKVAAWARILSAGDECLAFDHCPLSG

SEQ ID NO: 305764 - protein, 103 aa, Zea mays
  Clone ID: MRT4577_41923C.1.pep
PQFGQWFGTFQVPAEVTLKSGATCFLYMVTGLGWVVFLLLNVSIDWHGYGLDFSPLAGLDAILSPLPVQSTTAHRSHCLPHLMPYICWSRSANPSALDCFTHL

SEQ ID NO: 305765 - protein, 43 aa, Zea mays
  Clone ID: MRT4577_41924C.1.pep
TLHTQPRLRRLAESASTLSQPLRGMTTKVNHYKKRPDQLTSHY

SEQ ID NO: 305766 - protein, 286 aa, Zea mays
  unsure (1)..(286): unsure at all Xaa locations
  Clone ID: MRT4577_41925C.1.pep
RFVRFVSTREVLELTSTYDLQMSQLEGARKIYAQGXLKTLXGGTAENVTGSAAAVAADITKKELLRAIDVRLSSLKQDLAAACSRASSAGFNPTSVSELILFANHFGASRLSEACTKFMSLCQRRPDISPQTAQPAVSSHWKVFDDGNVRGSSSSDMSIDEPLVDPSESKNKSTVSGSGSQVHRLSNIQGLESAAAQQPKPTIQQAVDKQEAETDASPAPSKGELSRRLSVKDRINMFESQKKEQTPSSGNSNSASTGRVVPGKGEHRRVPSGASMEKLGRRWEQC

SEQ ID NO: 305767 - protein, 73 aa, Zea mays
  Clone ID: MRT4577_41926C.1.pep
KQKGYLNSSKPLFCQQNRCMALHLRNMNSGMLWIVSGTAEYTSCSVIEWRETILFRVLDKYILYLFWYLVAGR

SEQ ID NO: 305768 - protein, 149 aa, Zea mays
  unsure (1)..(149): unsure at all Xaa locations
  Clone ID: MRT4577_41927C.1.pep
MATTATEAAPPQEQQANGNGEKKTRHSEVGHKSLLKSDDLYQYILDTSXYPWQPDSMNELREIGVYTGYSLLTTALVLPEDATILVMHIYRENHELGLPCIQTVGVAPKIDFREGPALTVLDDLIAEDNNHGPPDFIFPDPDKDNYLNY

SEQ ID NO: 305769 - protein, 40 aa, Zea mays
  Clone ID: MRT4577_41928C.1.pep
LFILHFWQGTIRPAHYHVLFDENKFTADALQTLTYKLCYT

SEQ ID NO: 305770 - protein, 49 aa, Zea mays
  Clone ID: MRT4577_41929C.1.pep
LTWRIYGSIVGCCTGPVFATRHATVADGVDTPIMRSVITAWLSSACPAP

SEQ ID NO: 305771 - protein, 56 aa, Zea mays
  Clone ID: MRT4577_4192C.1.pep
HSVLYSTTSSYGHLRVFDCVYYPNTTISAPYKLSPRSTRCLFLDYSPDRRGYLKGN

SEQ ID NO: 305772 - protein, 106 aa, Zea mays
  unsure (1)..(106): unsure at all Xaa locations
  Clone ID: MRT4577_41930C.1.pep
TIGRADPAATTVKEFAGHPTLASWSNYEQARTNRASKQLLRLNGQWNPPCIGALSATGAMVTHSLTATIASVLAPDSFTFVVFLFRKLSCXPYKALHARLPLGLPL

SEQ ID NO: 305773 - protein, 41 aa, Zea mays
  Clone ID: MRT4577_41931C.1.pep
TAQTRGRKKKLGWEGPPPQFSPYKNSTEVQSNPGGNPAESN

SEQ ID NO: 305774 - protein, 65 aa, Zea mays
  Clone ID: MRT4577_41932C.1.pep
FGLLYVLVEAAVVSLEAPSRFSNFLGYRSLSSGYYAHTDVKYCPLGEVNVAFSDAHRTYIDSYSV

SEQ ID NO: 305775 - protein, 70 aa, Zea mays
  Clone ID: MRT4577_41933C.1.pep
LYVRPEMTTDNRAPLRLVRSSRVESQASLAAKAMAAQVCRRTAGMQRQRDHTCPAVDASRQNVSHSRFGY

SEQ ID NO: 305776 - protein, 200 aa, Zea mays
  Clone ID: MRT4577_41934C.1.pep
GTPRVSGREKKKKKKKKRRKKKKKKKKKKKKKNQVQKKKRIKKEGNPLLRGSEKIRRLSRLFVKIWGGASPGACAPGGRRSKMPSCVQGCCCCSSLRLFPRDDALWSPSACAHRLKPWSWGAQSPTWSSIRFCPRPFPTLIYLFLPFPPPFLHLPVAALLLLPQKYSPSIVARACHFVPNADLFAVFAAGFCWIGFVWID

SEQ ID NO: 305777 - protein, 51 aa, Zea mays
  Clone ID: MRT4577_41935C.1.pep
LFHFITITTSSIKHTTFHLPSTTNSFNPTYIYILSCLFTTTSTTTIQTSIF

SEQ ID NO: 305778 - protein, 105 aa, Zea mays
  unsure (1)..(105): unsure at all Xaa locations
  Clone ID: MRT4577_41936C.1.pep
VPLDHHFTLKCASYYMISPRKFNSDHLLLYALTHSXMNMMWGLPIKHAVKAVIESLATMAHLIEQDALTRDFVESDDASVDIYDLNRVPVLINDHVDVAMACYSY

SEQ ID NO: 305779 - protein, 66 aa, Zea mays
  Clone ID: MRT4577_41937C.1.pep
HELIWSGLRSGDSHAAAIWEAVEGAQRPLGGVSRNVILSCWGNQKFGYIALSFFNEFLYLGASRGV

SEQ ID NO: 305780 - protein, 67 aa, Zea mays
  Clone ID: MRT4577_41938C.1.pep
QRGFPLFFFSSPGRPPPLGKKGFVKTGGVGFVPTGFLKLCPLDLFSSLVGPQGFVFPLNSPGFSLGV

SEQ ID NO: 305781 - protein, 83 aa, Zea mays
  Clone ID: MRT4577_41939C.1.pep
LFGGTRTCHWVFMGLAHALSAFSILRTTKASHLLNSVLLTYIEPTQCQIYLRDRLFKKGSFLVPKFFLRDSVDVPWWLHIPRF

SEQ ID NO: 305782 - protein, 76 aa, Zea mays
  Clone ID: MRT4577_4193C.1.pep
SLKAGEPGFLSLVRKDFQGFFGFWGRKKNPRSFCPGMVFGFPPFFVPFAWKKGFCRGYFFFVTKKGRASFCPSPVP

SEQ ID NO: 305783 - protein, 90 aa, Zea mays
  Clone ID: MRT4577_41940C.1.pep
MARTLLWLALLCAALAFCTRAAGLLLELTHVDAKQNCITDDRMLRATERTHRRLASMCDASSPVHWAESQYISEYLICYPLQQAEVIICT

SEQ ID NO: 305784 - protein, 64 aa, Zea mays
  Clone ID: MRT4577_41941C.1.pep
EEAITLSDLVIDSLSRYDKGNAELNQTAWPQNTQLNRPETLSSQSQSRPRHSGQNSVASRCTEC

SEQ ID NO: 305785 - protein, 178 aa, Zea mays
  unsure (1)..(178): unsure at all Xaa locations
  Clone ID: MRT4577_41942C.1.pep
KIRQKGGPCIRAVSPRVFFKIPWRVFWSPPGFFLGNFPNTFFNPPPFGEKKWGAPPPPGGGXKKGGGGIHPPPPFFFFIRGGEKKNFLGGGVFPGEFSPPPPPQRGLKKNKFLSPPPNTFSGGVFFFPPPPRRGGPPPPPPXKKKRGGGGGXPXPPPPSLPFLKNWESTSVKNNLFFF

SEQ ID NO: 305786 - protein, 81 aa, Zea mays
  Clone ID: MRT4577_41943C.1.pep
RPRPPPEVVAAASSGAPAIRGGWPRRNLSCCRPPPPLTTFGRSMDMDELSSMLAWGGTIHMRLPPCWALMDWSPACKISRY

SEQ ID NO: 305787 - protein, 399 aa, Zea mays
  Clone ID: MRT4577_41944C.1.pep
MGILERIKEIEAEMARTQKNKATEYHLGQLKAKLAKLRTQLLEPPKGSSGGGDGFEVTKFGHGRVALIGFPSVGKSTLLTMLTGTHSEAASYEFTTLTCIPGIVHYNDTKIQLLDLPGIIEGASEGKGRGRQVIAVAKSSDLVLMVLDASKSEGHRQILTRELEAVGLRLNKRPPQIYFKRKKTGGISFNTTVPLTHIDEKLCYQILHEYKIHNAEVLFREDATVDDLIDVIEGNRKYIKCVYVYNKIDVVGIDDVDNLARQPNSLVISCNLKLNLDRLLARMWEEMGLVRVYTKPQGQQPDFTDPVVLSTDRGGCTVEDFCNHIHRSLLKDVKYVLVWGTSARHYPQHCGLGHGLNDEDVVQIVKKKEKEEGGRGRFKSHTNAPDRISDRVKKAPLKT

SEQ ID NO: 305788 - protein, 63 aa, Zea mays
  Clone ID: MRT4577_41945C.1.pep
IFNAVAIELRSSVGAIYSSTPLCMAPLNVWLPPPPPRVVLSVKKKKKRLPAVSMQANYRSGVS

SEQ ID NO: 305789 - protein, 83 aa, Zea mays
  Clone ID: MRT4577_41946C.1.pep
SELPLEGNEGTMVETGASTEAKTILITERSASSSSNISFPTAFDTIGNNFTTTSCPAFFDYFLADDTFNSCHAVSILLQNSNS

SEQ ID NO: 305790 - protein, 72 aa, Zea mays
  Clone ID: MRT4577_41947C.1.pep
QGPGRAAWARVRRTVPPGGGGDTHPILVKVDGKGERTWVPYGYPPPAWDLNVLAPKSKQNPPVKSRKELDLN

SEQ ID NO: 305791 - protein, 166 aa, Zea mays
  unsure (1)..(166): unsure at all Xaa locations
  Clone ID: MRT4577_41948C.1.pep
MAGSTRAAHKAFLLCNYTLLGAASACIFLTLSLRLAPSACGLLLVFLHALTAVFAAAGCSAPSTTAAXAGRAHAAHTAGAVLTAIFQGAAALLAFTRTADFLAELRSYVREEDGEVILKLIGGLGTAIFVLEWAALALAFALRLDDDGNEEIDGEHCKSWASAYHV

SEQ ID NO: 305792 - protein, 135 aa, Zea mays
  Clone ID: MRT4577_41949C.1.pep
PAGPGYSTPVPALHPSASSRSLCSLAVAVSQIPIAQGASVEGDRRWRAARAQRTRRSCSATTRRALQELGVSVPCLILLCSDTGDARDTGTQTINGGKFSRLLFTAVDLFRCCYCGHEPKCKGKCFALQCIQFIS

SEQ ID NO: 305793 - protein, 53 aa, Zea mays
  Clone ID: MRT4577_4194C.1.pep
KPKRGGLYPLITHPGKFPPCWEKPNLTPPKLPGLFEKCFTFLYKRDGKISLFF

SEQ ID NO: 305794 - protein, 167 aa, Zea mays
  Clone ID: MRT4577_41950C.1.pep
MAGSTRAAHKAFLLCNYTLLGAASACIFLTLSLRLAPSACGLLLVFLHALTAVFAAAGCSGSFTDGGAGAGRAHAAHTAGAVLTAIFQGAAALLAFTRTADFLAELRSYVREEDGEVILKLIGGLGTAIFVLEWAALALAFALRLDDDGNEEIDGEHCKSWASAYHV

SEQ ID NO: 305795 - protein, 62 aa, Zea mays
  Clone ID: MRT4577_41951C.1.pep
DTGGLDGNPPPKGQTGDHFMPSAQQQEEAIPKKVGGLMAQKAPLISKDHERGHSDSADWALR

SEQ ID NO: 305796 - protein, 179 aa, Zea mays
  unsure (1)..(179): unsure at all Xaa locations
  Clone ID: MRT4577_41952C.1.pep
MAPAAAFLSACAAGSIPRAPFLIPRPLLLPIPLSPARWDRSRSCSLFGVGANTRRAPTLRRNASTETVVPYVPGSGKYIAPDYLVKKVSAEEVQELVRGQRKVPLIVDFYATWCGPCVQMAQDIEMLAVEYEDNALFVKVDTDDEYEFAKDMQTKXXDAIRTEGLIPMDMIRNIIDNEL

SEQ ID NO: 305797 - protein, 69 aa, Zea mays
  Clone ID: MRT4577_41953C.1.pep
CWVCFSSGCFFNPLFPCQKKGFPQVFGRFLCGCPGPLFCLPISSPLFLVSKTRVRLWPVNCLPSVCSWQ

SEQ ID NO: 305798 - protein, 57 aa, Zea mays
  unsure (1)..(57): unsure at all Xaa locations
  Clone ID: MRT4577_41954C.1.pep
NEGHAMKDLDGAELLDSTELLAHVRAVLVPXXLGGVLNKDNAPDVNAKLVIEAXNHP

SEQ ID NO: 305799 - protein, 191 aa, Zea mays
  Clone ID: MRT4577_41955C.1.pep
MAPAAAFLSACAAGSIPRAPFLIPRPLLLPIPLSPARWDRSRSCSLFGVGANTRRAPTLRRNASTETVVPYVPGSGKYIAPDYLVKKVSAEEVQELVRGQRKVPLIVDFYATWCGPCVQMAQDIEMLAVEYEDNALFVKVDTDDEYEFAKDMQVRGLPTLYFFSPDQNKDAIRTEGLIPMDMIRNIIDNEL

SEQ ID NO: 305800 - protein, 51 aa, Zea mays
  Clone ID: MRT4577_41956C.1.pep
AGTYSSSYGGPLGLMKYTTMVMQTYFELERCVGLAMTIKSKRWKERKKMIM

SEQ ID NO: 305801 - protein, 97 aa, Zea mays
  unsure (1)..(97): unsure at all Xaa locations
  Clone ID: MRT4577_41957C.1.pep
IFLKSPGCPSPTXPPPSSTTSAPHLPQLNLAQLSFFSLYAPHSPSRRCTPCTPRLSPLLPATTSFLISQAPYSPILTAPSFLLLLLYISFTTPLFFF

SEQ ID NO: 305802 - protein, 93 aa, Zea mays
  unsure (1)..(93): unsure at all Xaa locations
  Clone ID: MRT4577_41958C.1.pep
GGGAARAPLXEGMSPPQGPPGLYPGTGARSEGARGPGSRLFPPTTGGNTXELVLSPPPPPETXLGGLGGALRGLGPKLSKLACKISIISKLDC

SEQ ID NO: 305803 - protein, 96 aa, Zea mays
  Clone ID: MRT4577_41959C.1.pep
GSSPRLSIVSPLNQRIPFTPKTLAYSNVPLYKSLLFFLPYYFPLLFDHRFSCPFALRRYCSMPLPLRLNVFFLPSAFGTILRQIFSFLTQPSVFSP

SEQ ID NO: 305804 - protein, 38 aa, Zea mays
  Clone ID: MRT4577_4195C.1.pep
LLMAKTVEQAIFINWEKRTIRVWIQACMLNLNTPHVMA

SEQ ID NO: 305805 - protein, 43 aa, Zea mays
  Clone ID: MRT4577_41960C.1.pep
PLRGPLGDPSTFTAVLKWPAFWRCWLAFQCLPGRHMAFPSSDA

SEQ ID NO: 305806 - protein, 83 aa, Zea mays
  Clone ID: MRT4577_41961C.1.pep
SKQIRRLNIHVRMSMSCAHWHTHKSGVRLQQTRCTSLRLNARANTQLITNRYTGTEGSLIRGSAQHTQRDALAALPLGTETFC

SEQ ID NO: 305807 - protein, 178 aa, Zea mays
  Clone ID: MRT4577_41962C.1.pep
QELCLSFKKNGIDPVLRKTRPKTYTEHTNSLENGNPTHKAQLELSLPSSTQGISSSDSIRWADRQQAVGLGHQHGDTIPNSAQRRQSNTPKRTPPTRRSEHHHHANNTPNKTLHHHKLGEEEKEAVVNCAVVANAVPRQKPQPAASLSDTCNSSTMGNHPQATRTVVDRSAHTHLPRT

SEQ ID NO: 305808 - protein, 145 aa, Zea mays
  unsure (1)..(145): unsure at all Xaa locations
  Clone ID: MRT4577_41963C.1.pep
FTINAALSGGANNHXRRIVWHGTRGPMRTFVKKDRHIVASLSKKYSRASITTRTMSANITVSIILSDASCQCFCDILCKVSYDPAWSLHRCGIAAFSVGPEVPLHRKYGRSELPCLLSRGSRDDSSRVGAHSMVVRSSPSSKWRR

SEQ ID NO: 305809 - protein, 229 aa, Zea mays
  Clone ID: MRT4577_41964C.1.pep
MSYVPHTILRPFGVKPFAGGGYLRRHARPCVRRASSVGATNGNELGGGNKRRRKRPAEESRLEVLYDDGFGSVTVKDYREAVRAMPRDDGGPPRWFCPVECGRPEVDRAPLLLFLSGIEGVGMELILHHKSLGKVFEVCCFHIPVNDRTPFEGLLQIVEEYVKHEDALSPSRPIYIIGDPFGGCLAISVAACNPEIDLALTLVNSATSSAKAFLAAVLPLLEQGWPPSI

SEQ ID NO: 305810 - protein, 58 aa, Zea mays
  Clone ID: MRT4577_41965C.1.pep
VRIHPPCGQKADRPDSRTIRKLRSKPPPPWYMIHNLKHLLGVMKKPFPTVNPLSCPWT

SEQ ID NO: 305811 - protein, 113 aa, Zea mays
  Clone ID: MRT4577_41966C.1.pep
CGVQVYFMLSHRLKGKWSLRRKKASTPLHRNIYPSPSLHTALHFGIIFTHILFAKGGEKVKWLIFHSQVSVFGDSCQRGESISPNQKDRTTTNFKNVVFQFVLKEVFQLVSYF

SEQ ID NO: 305812 - protein, 96 aa, Zea mays
  Clone ID: MRT4577_41967C.1.pep
KVPYHNRNNRGAQVDRCSCSPVCDLRVGSTTPAGSTRMPITLQGPSADPHKPLMTHDQDLHEPLQRAHQPQRQPRLCHLYVLPHPDTRIARIDALL

SEQ ID NO: 305813 - protein, 145 aa, Zea mays
  Clone ID: MRT4577_41968C.1.pep
SVPHIVTPRLQRRPTRNEWGMTAYYSCSYERSRKGRIPAMEDEADGRRQSFVLRSLVRAGLKREFALPIDSQARLSSSYAPLGRTRRSYRILNPSAASTPSVDGAGVSTYFSSTPDTKPKAKRPGPPDPAPSTTFPPTPDYAPAP

SEQ ID NO: 305814 - protein, 50 aa, Zea mays
  unsure (1)..(50): unsure at all Xaa locations
  Clone ID: MRT4577_41969C.1.pep
VAAVSPLVXXLLSVGCLXXFAGGWPXXAGCLVVVVVAFCXXXXLXXVGXX

SEQ ID NO: 305815 - protein, 58 aa, Zea mays
  Clone ID: MRT4577_4196C.1.pep
FCLYPRCHPSGGGWFDFHLNRFLIKMVLFPSVMGLPLPCFTKFCLVASVGYNGFGWAQ

SEQ ID NO: 305816 - protein, 220 aa, Zea mays
  Clone ID: MRT4577_41970C.1.pep
MGLTGKQLRLAQLLLVVMPAFVLFGYNQSGVGGLLSLRDWNHNFPEIDTIDAQGAEKSQKSTRQGAVVASFTIGALFGALSCSWSAEKYGHRKIIFTAAFLTLVGEILQCTSFHVAQFVVGRIILGWGVGGMSATVPVWQSECSTTANRGKHVVLDGVFILAGYRLEAWINLGFFEIKDNLPLQWRIPLAIPTLISIVPMVAVFTIPESPRWLCKHLDMK

SEQ ID NO: 305817 - protein, 54 aa, Zea mays
  Clone ID: MRT4577_41971C.1.pep
YTASQIVGDHLGKSPSGLYSVPAMTCIYSRALSLLAPVASRAPSVICAVPVRMA

SEQ ID NO: 305818 - protein, 53 aa, Zea mays
  unsure (1)..(53): unsure at all Xaa locations
  Clone ID: MRT4577_41972C.1.pep
EHGQLAASAGVWTRADALVVHTAGIGRRGSSHSSXRCCTFPGCCRSQAPVTIG

SEQ ID NO: 305819 - protein, 119 aa, Zea mays
  Clone ID: MRT4577_41973C.1.pep
KATHHHHQQAPSARGEAPSATHSRAPVSPAVAREGGVPADAAPPASTTPGGGRQPRRRRAARWGHGRRGGRCGRRRRTRRRQRQWPEQRAELSGLDPAGGPVGAAACRRRRPLDRLASH

SEQ ID NO: 305820 - protein, 79 aa, Zea mays
  unsure (1)..(79): unsure at all Xaa locations
  Clone ID: MRT4577_41974C.1.pep
MSTNIFSLLMLLALSACVANATIFPXCLQAPIAFLLSPYLPSMIAXLCENPSLQSYXRQQAIAASNIPLSPFXFQQSPA

SEQ ID NO: 305821 - protein, 192 aa, Zea mays
  unsure (1)..(192): unsure at all Xaa locations
  Clone ID: MRT4577_41975C.1.pep
IRHEGERQAAASASWPARRCAARKPNPQLRCSLQSPSIHPPRGSRPEKWRQPLPSLPRGAAPAISPSPELTPAAPPKPXPNPRPLGPRPXASLPKPPPPPRPXRGATTTAAAAASPRRATSASAPAPAPAALRRPPPRPGPEGSTGCAAPSPSTRPARRPRRRRSPRWRTSTRRSWTRRPRWTWAPARCQGG

SEQ ID NO: 305822 - protein, 40 aa, Zea mays
  Clone ID: MRT4577_41976C.1.pep
YVFSIVFFVIGSASTYMIYDIACAIYDKKNRMIMSNLNEY

SEQ ID NO: 305823 - protein, 42 aa, Zea mays
  Clone ID: MRT4577_41977C.1.pep
HYGGPDDGHVEHVLYWVGPGPILLVFHVPNVQQRVGATPGER

SEQ ID NO: 305824 - protein, 96 aa, Zea mays
  Clone ID: MRT4577_41978C.1.pep
PAVRQQLFSLPPLHPQSSPPSSETTTPPVVSSVTTTSFQRANDGDELWRTGTGYGSGVPVGQSPSTPPSVPPPVVSVQKAGLLDDMVPHGVRHGTP

SEQ ID NO: 305825 - protein, 97 aa, Zea mays
  Clone ID: MRT4577_41979C.1.pep
FKGAALFFFFFFFFFFWPQKDPHKPGFPLDFLAWGGLFIGTATPLGLNLVPSIPHYQTRVWLTTAKRNPGDTPFFFEGDWVVYPTLSGGGPRKKHTP

SEQ ID NO: 305826 - protein, 259 aa, Zea mays
  Clone ID: MRT4577_4197C.1.pep
MASLVVRAAGAAAAAARLPSLRPRRNGSGVLSGLRVGTGHYGARLALASSTASHKEFKIACLTVDDSSLGPGDEYESDPRMPGEDEFDHFYRVLAKKTDNLLSCYIPMPLALSEEEKAVQKEFKLIASGCIDLLVGAMRRTPAEKRRPLFLVFGELYPVFEFVRWTAEAGCAKWWMALQIIEKLEIVRKMVSSAFGGAPVDRSMVFARKVDLTGVDGEALAGHGLGSNLSVVIFVLMDSVFSNVKSDIDAMVSAASTPY

SEQ ID NO: 305827 - protein, 257 aa, Zea mays
  unsure (1)..(257): unsure at all Xaa locations
  Clone ID: MRT4577_41980C.1.pep
GRRTATATSPAPQEPQPPKTERHPRGQAPTRHRASQGAPDDTRRGAESPGTRARDCAHAXEGQHDLQHDPPLQQCTPVGDLFIPQHGPFIAHAAAFQGINYLDERSPLAPQLQVSPWPANFRAGTYPKYKGSTDPTQYIMSYQVAVASSGGDDATMAKYFIIALEGPALTWYTRLPPLSIDSWKGLRXKFLLNFQGYRPDTDALAKLSLCKQQEKETLREYYRKFLTLKSQLPSVDDHIAIHYAISXSGWRPIHSLH

SEQ ID NO: 305828 - protein, 329 aa, Zea mays
  Clone ID: MRT4577_41981C.1.pep
MAGAAGDRSEEDVGTDWPFGGVDAFTEYSSFFAEPGWPGGLAGELIPVLDLPEAAAPLPAQLSTEEPSEEPAPARSGDAGASSSSSGDGAAPGNGDGDDDRKAAPAAEAAGRKPAAKKGQKRARQPRFAFMTKTELDHLDDGYRWRKYGQKAVKNSPFPRSYYRCTNSKCTVKKRVERSSDDPSVVITTYEGQHCHSIGPFQRGGGGGAAAARYHSAAAVALAEQMYSSSTTSSFIPAARQQLFSLPPLHPQSSPPSSETTPPVVSSVTTTSFQRANDGDELWRTGYGSGVPVAQSPSTPPSVPPPAISVQKAGLLDDMVPHGVRHGTP

SEQ ID NO: 305829 - protein, 46 aa, Zea mays
  Clone ID: MRT4577_41982C.1.pep
NSEITYNILRIDKQHQGKGTNFSLTAEGAKIESLLALLALNANAAD

SEQ ID NO: 305830 - protein, 86 aa, Zea mays
  Clone ID: MRT4577_41983C.1.pep
TVEQLQGSRPSGVFFEVFLKRSFASYYACRGITNVLSEHIFCERVSRTLPVGLHLVHQSTLIFHCLGERSGLFNQNPPYRKKSKVI

SEQ ID NO: 305831 - protein, 134 aa, Zea mays
  unsure (1)..(134): unsure at all Xaa locations
  Clone ID: MRT4577_41984C.1.pep
EGKARQGVERIECSLPPEKQASTGAANPNDRPMCGQGGDSGGLVLTTDPKPRLRWTPELHDRFVDAVAQLGGPDKATPKTIMRVMGVKGXTLYHLKSHLQKFRLGKQHKELGDHTAMEMQRIVASFSGMIARSM

SEQ ID NO: 305832 - protein, 122 aa, Zea mays
  unsure (1)..(122): unsure at all Xaa locations
  Clone ID: MRT4577_41985C.1.pep
IALSGGGTFWVMHRDMSERRLFSIKGAVAGPPLNLYFLRXMRLTCPLNYSPXVFVMLDAVTTRAFNNGYYRTLQQXKGLLAYDQVLFVDRRFHATVFRFASTRPPIWTPLSTPLDNLGRVCV

SEQ ID NO: 305833 - protein, 50 aa, Zea mays
  Clone ID: MRT4577_41986C.1.pep
QNLAECPKKLVLIHMSPAKSPPNHPKVPPLNPVPDRENRPKSNHHSFGPP

SEQ ID NO: 305834 - protein, 44 aa, Zea mays
  unsure (1)..(44): unsure at all Xaa locations
  Clone ID: MRT4577_41987C.1.pep
SNRIESELYTCTRATGSVLLQTSTAYTQVSAAVTLPCHCAVXLR

SEQ ID NO: 305835 - protein, 61 aa, Zea mays
  Clone ID: MRT4577_41988C.1.pep
KMCIAKGCLPSHSHGLSGIFLKRARGSWVLYLPALPLGGVTFRTLYLVGFQVLVLSRINYP

SEQ ID NO: 305836 - protein, 207 aa, Zea mays
  unsure (1)..(207): unsure at all Xaa locations
  Clone ID: MRT4577_41989C.1.pep
IRHEASACAPPPRVRAWNTPADLAHDARLHRAWIPPARPVSARSRGGPRPSPPRSRGLRPPPPPRQVPSSPXPPSDAPTCPPPPCHRNTCPCHRRYASVLPSLAHPGGPRPSPPQPSPVDGRRPSPHPWIRGSPTPLRRISFSLCSRLLPSVRSPRSLWRPHGTASLTLAHHMPWAKPRWKVEDPAHRAGLASAAAWEERYRVFDAA

SEQ ID NO: 305837 - protein, 81 aa, Zea mays
  Clone ID: MRT4577_4198C.1.pep
RHSGRGHILGKGDRLGIDLFTRRGLFLVGDGEHTDLAGPPNSCSVQLPGRGNLRIKNCCASSLSNWMCWDLWLWRASSSYS

SEQ ID NO: 305838 - protein, 592 aa, Zea mays
  unsure (1)..(592): unsure at all Xaa locations
  Clone ID: MRT4577_41990C.1.pep
MEAAVSSAGESAGELLLRAAALVPWTRYFLAALALAAVLLYRFLELHLLGDLLRGLRGGRVSLTFHPESQVYHRVASKCRSLHGRYLTTPWLASPHLQTLFLSISGRPPSFTYRRQLYTVRDGGTIALDWLLASDLEDGNIGTSDGTISKDDSTPLLVVIPGLTSDSSAAYVKHLVFSMAIKGWNVVVSNXHRGLGGISITSDCFYNAGWTADMREVVSFLHQEYPKAPLFTVGTSIGANIVVKYLGEEGENTPVAGAASICSPWDLLVTSKFISRKLVQRCYDRALAFGLXGYAKLHQSVLARLANWEAITSSHSIREFDRHATCVVAKYETGDTFYRKCSSANYIGNVSVPLLCISALDDPLCTREAIPWDECRANKNIVLATTPNGGHLAFFEGLTAGKLWWVRPVSEFLCALHDGPYMHRQKAQEHDLHSSLESSIDKSPYVNFMEDGMVAALTDDGPNNGDSLLNEVLGEIEPNDSVVAQHVKQNQNTRAIQNESDSWLDDKNSSEGNVQAHGGSQEQREVPYANKISDAIGPVKKSINQLSRSQGKSIWLLAYIALVTSWPLLGALGFFFRKRLSNSLLSRKLKKS

SEQ ID NO: 305839 - protein, 71 aa, Zea mays
  Clone ID: MRT4577_41991C.1.pep
VVFFKQEDCFFTRGTRGHIYLLLDCVNYSLAIFELTCGLHHIPKFLGADGGLYRCVHGSTTTSAAYIIISG

SEQ ID NO: 305840 - protein, 152 aa, Zea mays
  Clone ID: MRT4577_41992C.1.pep
KLTLASLSPPPSSAPPLCTPPVPQHHPSSSAVSRRVRGRTRLLRRSKPPLSAGSAPHPLHGRDSSSKTVEGNLQAAAMASRFWGQGDSDSEEEVDEIESEQGSDSEKSEAGDGGRDGSKNRYLNKYTQDSDDSDTESHRVIRSLKDKRNDEM

SEQ ID NO: 305841 - protein, 87 aa, Zea mays
  Clone ID: MRT4577_41993C.1.pep
FFHISDQTDLLRTLCKCPQKEFHPCCSGTSFHFVFPLLGDRKLVAILLDPHVPIIYSQVEDARGPREPWHDLHSKIDGPAAYDVLKN

SEQ ID NO: 305842 - protein, 60 aa, Zea mays
  unsure (1)..(60): unsure at all Xaa locations
  Clone ID: MRT4577_41994C.1.pep
WLPEKAANVYHHTYNLLVYDNLHYVLRPNMSCRLCHLSRNIADDELLRTXYNIPVSTYSM

SEQ ID NO: 305843 - protein, 85 aa, Zea mays
  Clone ID: MRT4577_41995C.1.pep
MAGYTFTVGMVNGRHAYIPFYRVTSPRNKFRITPRIWARFFFLTNQPIFFTQKDINPAKKTDKAATRPKTKKNSKNQFTPVFANV

SEQ ID NO: 305844 - protein, 113 aa, Zea mays
  unsure (1)..(113): unsure at all Xaa locations
  Clone ID: MRT4577_41996C.1.pep
VLIPGRPLVHVIESLLAKVYILILGGGMIXTFYKAQGYSVRKSLLXYDKLKLTNTLITNQISIYSFLLLPNDILFYVKCSNPFHHKTLNFINNIVYIIVLHVYLISYYSNINV

SEQ ID NO: 305845 - protein, 389 aa, Zea mays
  Clone ID: MRT4577_41997C.1.pep
MANRTDPLAKSIHGTNPQNLVEKIVRSKIYQSTYWKEQCFGLTAETLVDKAMELDHTGGTYGGNRKPTPFLCLALKMLQIQPDKDIVVEFIKNEDYKYVRVLGAFYLRLTGTIADVYQYLEPLYNDYRKIRHKLSDGQFTLTHVDEFIDELLTKDYSCDTAMPRIQKRWVLEASGTLEPRRSALEDDFEEEEEDKEEQPMEIDEPNGRENDNHRGRSLARERDRDWDHDRKHERHNRDKDYDRDRDYDRDYGRGRERHRDRDRERDRNRDRDRDRHRLRDDDYNRNRDRDRERDGRERERRDRDRGRHRSRSRSRDRRDRDREDGEYRRRRGRGSVSPRGRGEDGGPREEPKRKKEKKEKGEGNAPDPNDPEIIEMNKLRASLGLKPLK

SEQ ID NO: 305846 - protein, 80 aa, Zea mays
  Clone ID: MRT4577_41998C.1.pep
CLAHTYTKTFRPCLGTQFFQTAVFQILKYTLVMTLLQFTMLQFSNTTVSNTSRGLGKTLVETNQPERDPAGALFAEKNFG

SEQ ID NO: 305847 - protein, 104 aa, Zea mays
  Clone ID: MRT4577_41999C.1.pep
MGNSSSTPDSTDNDAGKKSLYRRYEDKKRGPGVTDEDILKYTGKTRDQLNAWAETAPGVAGNQPAGKLAIGAASGFAGEGAAGGLGGWGVEGTRKMKFPPQPKP

SEQ ID NO: 305848 - protein, 55 aa, Zea mays
  Clone ID: MRT4577_4199C.1.pep
ANRTRRNQRRLQVRGRCFARELGSYLPRGCGGMVWTLAPTVRWPRPALLKKGRQT

SEQ ID NO: 305849 - protein, 168 aa, Zea mays
  unsure (1)..(168): unsure at all Xaa locations
  Clone ID: MRT4577_419C.1.pep
KEGPGFPERVFSPLGPHGPPPRGRGPPKGPPLLLSPPPPKFTPDKGSPYXSKYPPCFPIRGGPEXTRARQIPGPAARTPWGPPPPTPPHWCGGPPGGTPXPKGDPGPLLGDPGPXRGGVPXGPRTPPGEAPPMLPPPVKKPXGSHPPPXWGPPPKTPPPLPERGAPPP

SEQ ID NO: 305850 - protein, 42 aa, Zea mays
  Clone ID: MRT4577_41C.1.pep
RTNPYAPHMYVPGSNFTYMTTQCVIQIVTLVYIHIESSYMCI

SEQ ID NO: 305851 - protein, 218 aa, Zea mays
  unsure (1)..(218): unsure at all Xaa locations
  Clone ID: MRT4577_42000C.1.pep
LIPPPRRGREEEDEAQXLPFIAFEHKRDAYGFAVRPQHLQRYKEYAGIYKEEEEERSDRWKNFLERQPESSGQDAGGNAKDDGSESLHEKTVVGPRKIEIWTPIRPSLSNIEQMMSLRIEKKQSSASKQQAKDVIHPVKVEEGKLSEDSDDEFYDVDKVDPSQEVQPSDTGNADVGSRSQEENYISKEXVECLVHGGLPMALRGELWXQLFVGTGARR

SEQ ID NO: 305852 - protein, 152 aa, Zea mays
  Clone ID: MRT4577_42001C.1.pep
LEFRCCRRAVGGGIGFQLWHPHQQATAAAVPHTSQIFSSGAVATGVVLGFSSHDGAGGIGGAGGAGAGGGRAGTSCQDCGNNAKKDCTHMRCRTCCRSRGFSCPTHVKSTWVPAAKRRERQQQLAALFRGAANSNSAAAAAAAAASKRPREL

SEQ ID NO: 305853 - protein, 161 aa, Zea mays
  unsure (1)..(161): unsure at all Xaa locations
  Clone ID: MRT4577_42002C.1.pep
MMILFDNSCKKRAQADAGDESIGQXTEHPGGRGKTGGMHHQESLFDNDHPGYFDRGHLRCLQKLPNKFNWPTSYIERLWSMAPVKKAXGSLKGXGSRIYLTEISYFKVASPKAMMSSKAITPLVKLMSXVDDKKMKVGGGSSVLTVKVSVLYSTPVSEIYI

SEQ ID NO: 305854 - protein, 111 aa, Zea mays
  Clone ID: MRT4577_42003C.1.pep
PTPDSKPFRLRRRLIAPAPSGTAGRMSSCRYELCICFVDSTWVRHAVCQLARVLKTHTRHLTGPGLTLQDEPCSEQDEYTLPWIMPLSGNMCQEEWHDEHPGCLRSTDQCS

SEQ ID NO: 305855 - protein, 40 aa, Zea mays
  Clone ID: MRT4577_42004C.1.pep
NNRKRSLYTQIHLIMLEHELTHNSGLNNTNASNDTKSKQG

SEQ ID NO: 305856 - protein, 51 aa, Zea mays
  unsure (1)..(51): unsure at all Xaa locations
  Clone ID: MRT4577_42005C.1.pep
LGGVDSGGRQELGVPCGDLIRPQRPNRLLRPXXGALVLYRLXCGASTKLMR

SEQ ID NO: 305857 - protein, 98 aa, Zea mays
  Clone ID: MRT4577_42006C.1.pep
AAFFFFFLNTMVFCFVLLYPACEESPQLGASRPYNLMFTKKHISKAGMSNAHKTQNQSTNTHTSRNSSSQHNPKSSLLKWSSSCYHKESNARNWSLGA

SEQ ID NO: 305858 - protein, 74 aa, Zea mays
  unsure (1)..(74): unsure at all Xaa locations
  Clone ID: MRT4577_42007C.1.pep
GPPTSCRAGSSGXDLFPWEGTLMGPPERPKGGGVFLGNIYFPPGYPFKPPKGFFXTKVFPPPPHCYGGLCFSLF

SEQ ID NO: 305859 - protein, 59 aa, Zea mays
  Clone ID: MRT4577_42008C.1.pep
LQNCFLIAAIKLNLFSPASVFQRRTRFVNLKNEDTCGCHHIVASTSNSAELQAKWQAKC

SEQ ID NO: 305860 - protein, 101 aa, Zea mays
  Clone ID: MRT4577_42009C.1.pep
RPGPEPASHSHRPSAQNYLARPRSAQLLQFRNKLQAITDLAIYPDENIAITSCAMDGYLEEGGDRCKLDIVSGCTDPSSDMFDPLATVDDGSCPLESDSEE

SEQ ID NO: 305861 - protein, 343 aa, Zea mays
  Clone ID: MRT4577_4200C.1.pep
MAAASAAAPTKTANIPATMRAVQYDSCGGGAAGLKHVEVPVPSAKKNELLLKLEAASINPVDWKVQKGMLRPFLPRKLPFIPVTDVAGVVADVGPGINGFQAGDQVVAMLNSFNGGGLAEYAVASENLTVKRPPEVSAAEGAGLPIAAGTALQALRTIGAKFDGTGKPMNVLVTAASGGVGLYAVQLAKRAGLHVTATCGARNVELVKSLGADEVLDYRTPEGATLQSPSGKKYDGVVHCTVGTSWSTFEPVLAATGKVIDITPNLTAILKSALHSVTFARKRLVPLLLSPNKADLEFLVGLLKDGKLKTLIDSRFPLSEVSKAWEKSIEGHATGKIIVEMGD

SEQ ID NO: 305862 - protein, 287 aa, Zea mays
  Clone ID: MRT4577_42010C.1.pep
RPQWVARPRGLGGLFLICILSMGLLTIPVSKIVIQELVKHLKQLIFDRNGRRPLLQLLHPFCSRYLSPDDLACLNYNVPSLSSTEVETSESAIGVITENKLDDVTAQDPNGLEGKQIVFESKKDPLQRRHELLIKSELAEALVQSCIENVGELLRTNFGKEVLYEMAVGGKDNVLDGLTDRIHMLHDAIASDAAQPKIEDMEHAFENFFSSRVIRRMVIDCPAFAVTLWRKALQGKCKIWAEGHSSKVVAGFLESPSTEVKDLAKPELQPLVDAGILKVPDPKVVQK

SEQ ID NO: 305863 - protein, 146 aa, Zea mays
  Clone ID: MRT4577_42011C.1.pep
PPTDLQLQRVSLPTWAEFELGRAPVYWKTSSGLPPSPGEGLTLFYNPAATKMAPNEVFGVAFNGGFNQPIMCGGEPRQMTLQERGKADPPIYTIRIRVPQHAVSLIFSFTNGAEWDGPYTLKFMVPKPWQNKPLSFFNEGLADELN

SEQ ID NO: 305864 - protein, 190 aa, Zea mays
  Clone ID: MRT4577_42012C.1.pep
ENKLDDVIAQDPNGLEGKQIVFESKKDPLQRRHELLIKSELAEALVQSCIENVGELLRTNFGKEVLYEMAVGGKDNVLDGLTDRIHMLHDAIASDAAQPKTEDTEHAFENFFSSRVIRRMVIDCPAFAVTLWRKALQGKCKIWAEGHSSKVVAGFLESPSTEVKDLAKPELQPLVDAGILKVPDPKVVQK

SEQ ID NO: 305865 - protein, 73 aa, Zea mays
  unsure (1)..(73): unsure at all Xaa locations
  Clone ID: MRT4577_42013C.1.pep
RVCWTPGRERTASDRPPTPSRVSVSLPTWAEFELGRAPVYWKTSNGLPSSPGEGLTLFYNPXASKMALNDVFG

SEQ ID NO: 305866 - protein, 52 aa, Zea mays
  unsure (1)..(52): unsure at all Xaa locations
  Clone ID: MRT4577_42014C.1.pep
HIQEPHLLPEPRIIYTCCGRKCRCGSSCSCGNXCNGCGMYPDMETVATSSVK

SEQ ID NO: 305867 - protein, 134 aa, Zea mays
  Clone ID: MRT4577_42015C.1.pep
RHRRRGHPPAAGPCWSRPRRHLQAELLRDRPRRSRCHGGGAGCRRAAEQGTDLQLQRVSLPTWAEFELGRAPVYWKTSSGLPPSPGEGLTLFYNPAATKMAPNEVFGVAFNGGFNQPIMCGGEPRQMTLQERGK

SEQ ID NO: 305868 - protein, 267 aa, Zea mays
  Clone ID: MRT4577_42016C.1.pep
MATLSSCSRLSSGTGAAAIHRQPARAGAVLVVTCRRSSSATVRAAAAATAAAPAAVELQNKGVSLPTWAEFELGRAPVYWKTSSGLPPSPGEGLTLFYNPAATKMAPNEVFGVAFNGGFNQPIMCGGEPRQMTLQERGKADPPIYTIRIRVPQHAVSLIFSFTNGAEWDGPYTLKFRVPKPWQNKPLSFFNEGLADELNREGACDLAIYPDENIAITSCAMDGYLDEGGDRCKLDIVSGCTDPSSDMFDPLATVDDGSCPLESDSEE

SEQ ID NO: 305869 - protein, 239 aa, Zea mays
  unsure (1)..(239): unsure at all Xaa locations
  Clone ID: MRT4577_42017C.1.pep
YARAWDGWQGEGLTLFYNPAATKMAPNEVFGVAFNGGFNQPIMCGGEPRQMTLQERGKADPPIYTIRIRVPQHXERQTSSFISSHLTSYLSLISLAACXAVSLIFSFTNGAEWDGPYTLKFRVPKPWQNKPLSFFNEXCLPSWVMMVTTDRWCRRAASXTGLLQGLADELNREGACDLAIYPDENIAITSCAMDGYLEEGGDRCKLDIVSGCTDPSSDMFDPLATVDDGSCPLESDSEE

SEQ ID NO: 305870 - protein, 106 aa, Zea mays
  unsure (1)..(106): unsure at all Xaa locations
  Clone ID: MRT4577_42018C.1.pep
MTSTMAGVGKEDNKTAEGGAHINLKDEGQDDNEVILRIXKTSTHAXKVMNXAYCDRQSVDMNAIGFLXDGQTASPLMRHPDELHMEDGYXIDAMLHQTVSMGPSTT

SEQ ID NO: 305871 - protein, 86 aa, Zea mays
  Clone ID: MRT4577_42019C.1.pep
MLTTPISIIKMCIPHPVYTITKEVFTSGRKQIFFIRCPWALPFKSLRKSYFNQAVVKNRLYKHYFYKQALMRRPLVKVHLKIKKKL

SEQ ID NO: 305872 - protein, 101 aa, Zea mays
  Clone ID: MRT4577_4201C.1.pep
RTFLGRPWGGYARPVVMDSYLGQIVDRKGWAEWPGAEPGRGDTVYFGEYGNDGPGADTGARVGWAGVRQMEYDEAAQFAVENFIYGDEWLGATSFPYDDDV

SEQ ID NO: 305873 - protein, 227 aa, Zea mays
  Clone ID: MRT4577_42020C.1.pep
MATLSSCSRLSSGTGAAAIRRQPKPTRAGVLFTSRRGSSASIHASAATAAPAAVEQQNTGVSVSLPTWAEFELGRAPVYWKTSNGLPSSPGEGLTLFYNPAASKMAPNDVFGVAFNGGFNQPIMCGGEPRQMTLQVRGKADPPIYTIRIRVPQHATSLIFSFTNGAEWDGPYTLKFRVPKPWQKKPLSFFNEGLADELNREGACDLAIYPDENIAITSCAMDGYLEV

SEQ ID NO: 305874 - protein, 87 aa, Zea mays
  unsure (1)..(87): unsure at all Xaa locations
  Clone ID: MRT4577_42021C.1.pep
GWPPNRVVRHLPLPPTTQGKLNSLHRLAPPSPYRERQRQASEGTERMLATLIVXEELYTPVRPTTQRRSARTARSPRRHWTPPAAPD

SEQ ID NO: 305875 - protein, 123 aa, Zea mays
  unsure (1)..(123): unsure at all Xaa locations
  Clone ID: MRT4577_42022C.1.pep
PQPQGPAPATPRAALHPGQASEAMRIVVLGGQATEEEGVSLTKXKPCSTPNWKEXMTGSGIFAAXGSMEXTVKASATAKTARTSSRLASITVCHISIGDDGTDPTKKPTLLAKATHYGELTGT

SEQ ID NO: 305876 - protein, 90 aa, Zea mays
  Clone ID: MRT4577_42023C.1.pep
PCMAASELCGKSPGPVRLKDASSCLYTVTVKGGHPVVVDLTRPINSLCTGPCCSQNNYGTLNGSTICHRKTRKHLVVNRLLSACHVRSKC

SEQ ID NO: 305877 - protein, 102 aa, Zea mays
  unsure (1)..(102): unsure at all Xaa locations
  Clone ID: MRT4577_42024C.1.pep
LSPFNLIASAYSNXPPRMGLNQLFVLYPSVYSQHPILLPFSELPAARRTYFLTHLHLLPFNXQFAANRATLLQLLQLLTFAQLALTNPAASYQQHIIGGALS

SEQ ID NO: 305878 - protein, 125 aa, Zea mays
  Clone ID: MRT4577_42025C.1.pep
DVCQRGKTEHQILAGLLHPIKIPKWKWEEIGMDIIVGLPRTQKGYDFIWVIEHRLTKVAHFILVKTTYKGSLLAELYMTRIVCLHGVPKKIVSDRGSQITSRFWRSFHENVDTKLSFSSVYHPQT

SEQ ID NO: 305879 - protein, 126 aa, Zea mays
  unsure (1)..(126): unsure at all Xaa locations
  Clone ID: MRT4577_42026C.1.pep
MDRIPAASGATRAPLIILXXNTHAISGSRSLYVLVSESMGASEYLQTAIGTVLISIGTKKTGDSHGYQIPTESMLAIVTTCNSGGVISSLRKASKETGDKHTDATTHAGSAIQFAAYTWQIVKLQK

SEQ ID NO: 305880 - protein, 213 aa, Zea mays
  unsure (1)..(213): unsure at all Xaa locations
  Clone ID: MRT4577_42027C.1.pep
MASRPXFGLXELDFVFSTLVVGSILNFVLMYLLAPTAAASSAASALPSHMFEPGAFSLGSRVATLVSKGATFAVVGFAAGLAGTALSNGLMAMRKRMDPAFETPNKPPPTLLNAATWALHMAGSSNLRYQTLNGVEYMLGKVAPAPVFKASVVVLRCLNNVLGGVSFVLLARLTGAQKSDKPATVAEEKDRLIAVGNAAADAIGEARDGEEGK

SEQ ID NO: 305881 - protein, 73 aa, Zea mays
  Clone ID: MRT4577_42028C.1.pep
ELKESFRLFYKDQNGFISDGEPLHVMTNLGQKLPHDEVDHMIRKADVHAGAQIKFQEFVKVMMRQVRNDPRNQ

SEQ ID NO: 305882 - protein, 86 aa, Zea mays
  Clone ID: MRT4577_42029C.1.pep
SLLLYNTLTLNNPILNSIHHTSHQYTFNTQNPTLQPSHLQQTTPPFHIPPSPSLQQSPHISPKHQLISNHFPLPYTTTPATLHHPK

SEQ ID NO: 305883 - protein, 205 aa, Zea mays
  unsure (1)..(205): unsure at all Xaa locations
  Clone ID: MRT4577_4202C.1.pep
SRRSACSLGIACAVXVXAHVPPPPPETDDEPANNGWWLTEFPLPVXKIVNSKPSPSVLLHHLTWFTDNCVVRWVAXEEINNAETGTRSFLKNGIYMADIGPSFPAHAYRLRSTAFDLLALEDLLGKDASNYVNKYLRLKSTFMYYDFDKLISAAEDKPPFVDLANRLFDSFETLQEAVTAKDDARIGDRYAETKLILQELMAKMA

SEQ ID NO: 305884 - protein, 83 aa, Zea mays
  unsure (1)..(83): unsure at all Xaa locations
  Clone ID: MRT4577_42030C.1.pep
NFLHSQVLDTLQEIQERHDTVKEIERKLLDLQQVMNGQTPKIQVSRTTHSYCMQNSPEXIFLDLAVLVEAQGEMLDNIETQVW

SEQ ID NO: 305885 - protein, 147 aa, Zea mays
  Clone ID: MRT4577_42031C.1.pep
MSHFAAAAVKSPLAVAAPAAGDAKSPLFCPKPRRPAAPLRCHQGGDAGMDLLDLLLSKGEESGLSAASPLFCGSPPRRASNPVVHDSRFGVDCPPLPVPMPVAAAAVHRPSAAPPMSPRGGNGCARARFAFQPAAVRVEGFDCLDRG

SEQ ID NO: 305886 - protein, 141 aa, Zea mays
  Clone ID: MRT4577_42032C.1.pep
MAAVGSLKPGMETLHVQDYKDAPPAKAAVESLQPAMESLHVQDYKDANMSYGAYGGWGEYPYLSHDGAQTPTAGTYADMYYGYAPYGVATMGHDGQIYGSQNYQYPSTYTKQQNSTAKLSSNGISEKLTPAPQTDVSTWCG

SEQ ID NO: 305887 - protein, 168 aa, Zea mays
  unsure (1)..(168): unsure at all Xaa locations
  Clone ID: MRT4577_42033C.1.pep
MLSYLDLLSGDELLSHSFTYKELENGVLWEVKEKWVTLGPVDAYIGVHPSADGDEDESVDDTAVKEIDIVDTFRLHEQPPFDKRIICLLHNEYIKNLTAAVEPEKAYEFQKDVXDATNFLLSXLNDLQFFVVESMNDEASVAFAYYXDGATXXPTFLYFSHELKEIKC

SEQ ID NO: 305888 - protein, 637 aa, Zea mays
  Clone ID: MRT4577_42034C.1.pep
MAAVGSLKPGMETLHVQDYKDAPPAKAAVESLQPAMESLHVQDYKDAPPAKGVAAAAVGSLQPGAENLQVQDYKDGNMYYGAYPAYAYGAYGGWGEYPYLSHDGAQTPTAGTYADMYYGYAPYGVATMGHDGQIYGSQNYQYPSTYTKQQNSTAKLSSNGISEKLTPAPQTDVSTIGVDEVKGLKNSNSVLKTDRNMPGSNGSYGRSSVRSGSYQNQTSWSHYPYYSSEMFSDKQQKFTGNHNSTSNPKTKGQSRNQNTRQYPHLMGLQTPTSSVYSANGIYGYDGSYGPGLWYGSHMYNSGLYGGWNSLYDGKYRTRGRGNNGYYVYGNGSIDGFNELKRGPRSGMYKNQLGLEATTQAPAKEQDLLFANGSHPAMKDQYNQADFAETYSDAKFFIIKSYSEDDVHKSVKYNVWASTPNGNKKLDAAYQEAKEKSSETPVFLLFSVNASGQFVGLAEMVGRVDFEKTVEHWQQDKWTGCFPVKWHIVKDVPNSLLKHIILENNENKPVTNSRDTHEVKLEQGLQVLKIFKDHVCKTSILDDFGFYDNREKMMQERKAKQQQSLKKVIDVKLPSVTDMERSPKGETGSTELTGVGTDVLNKERLLGKAGEKNGEKGNDVAPQDLKTQTEKLAGLNGC

SEQ ID NO: 305889 - protein, 157 aa, Zea mays
  Clone ID: MRT4577_42035C.1.pep
MAMDQCTDDVKYEEEFIVNSRDTKLFTCSWMPHNSEPKALIFICHGIAAECSVSMRDTASRLVRAGYAVYGIDHEGHGRSSGQRCYVPNFSDVVADCSSHFMSVCDKPENRGKKRFLYGISMGGSIALLLHRKEPAYWDGAVLLAPMCKISDDMRPH

SEQ ID NO: 305890 - protein, 83 aa, Zea mays
  Clone ID: MRT4577_42036C.1.pep
GPHTSSSAVIFPRPSPLSYLVCSRNFLWTILECIGTGFSAAGVVPMRRPAVGNATRTGTSLCPTASSIRVSRPYPCHRGLFLG

SEQ ID NO: 305891 - protein, 85 aa, Zea mays
  Clone ID: MRT4577_42037C.1.pep
ALQAMLTPSAEGIYCLCSVTLKTGVTTRRSCRCDFTTDLTQHPLHADWLTPDDVFVRTPPRHHGPSSAICFLCRTSPFSNDEPDC

SEQ ID NO: 305892 - protein, 60 aa, Zea mays
  Clone ID: MRT4577_42038C.1.pep
YIPAAMHHNRYNSCVICVCLADGRCSCSYKVNETLPVSRDLLMNKKVTLFTHWSVYEATL

SEQ ID NO: 305893 - protein, 92 aa, Zea mays
  Clone ID: MRT4577_42039C.1.pep
YKRPLKCYTISLYVPMGPLRGGLKGILFFWFFFVFCFLGFFWFKFFFFFFFFFFFFFFFFFFFLKPKLYYDAYIISPPPPDNVCRLTALLHI

SEQ ID NO: 305894 - protein, 257 aa, Zea mays
  unsure (1)..(257): unsure at all Xaa locations
  Clone ID: MRT4577_4203C.1.pep
HWVPRGRPGCRPARAIHSSLRPHGHLSQRTAGSHHDDCKLPPCLLRWQPPSTPAEPTDAARDVPSRRLLLLLLPAXSSPSRRSACLLGIACAVLLRPRAASAAESDLEPANNGWWLTEFPLPVPKIVNKEINNAETGTRSFLKNGIYMADIGPSFAAHAYRLRSTAFDLLALEDLLGKDASNYVNKYLRLKSTFMYYDFDKLISAAEDKPPFVDLANRLFDSFETLQEAVTAKDDARIGDRYAETKLILQELMAKMA

SEQ ID NO: 305895 - protein, 50 aa, Zea mays
  Clone ID: MRT4577_42040C.1.pep
QEKGSKAPTIFINGAPSHPGNRGSSTPDWTHTSTTNVTSQPTQHTLLTVH

SEQ ID NO: 305896 - protein, 52 aa, Zea mays
  Clone ID: MRT4577_42041C.1.pep
TAAAPGAVEPVTAVPLETHGHHRNRRASFLAGSPDKRSPPAAKFKRLFHGGS

SEQ ID NO: 305897 - protein, 68 aa, Zea mays
  Clone ID: MRT4577_42042C.1.pep
VMIATLSGRITFRLAQNCSPESILYRGTPHRYEQLYYFANFRRRTGGPGGAVQRGVRFDPGGVSQSTL

SEQ ID NO: 305898 - protein, 77 aa, Zea mays
  Clone ID: MRT4577_42043C.1.pep
QTGPRDEIFEENKRSRCRCIKKRSLGIGFPVGQGYKPYLSFRIIPKCIFFINLTGYISKINYIKKIRILQCVRNSSV

SEQ ID NO: 305899 - protein, 81 aa, Zea mays
  unsure (1)..(81): unsure at all Xaa locations
  Clone ID: MRT4577_42044C.1.pep
MRKVHESLARDGKVRDDIPKWAKHDKNNNCRGRWHYRMKHNRRFMTGAIGFAXKRSTNSSKKQASMQLVTGSSSFPLSGCL

SEQ ID NO: 305900 - protein, 98 aa, Zea mays
  Clone ID: MRT4577_42045C.1.pep
WSACGGERIIVFTTNHVEKLGPALIRRGRMDKHIKMSYCCIQAFKFLAKVYLDMDYHSSFDSEAELQLEEDMTPADITYNWTPKAHREDADSCLVKLV

SEQ ID NO: 305901 - protein, 87 aa, Zea mays
  Clone ID: MRT4577_42046C.1.pep
RRTCYNMLRTRCTTTTTTNGGTLDEEITSGCMIYLFIMGQSDDTNGARTFLFRRRLHAFDGHACIQNSYLHLVHRSIDLGAVTEGLM

SEQ ID NO: 305902 - protein, 106 aa, Zea mays
  unsure (1)..(106): unsure at all Xaa locations
  Clone ID: MRT4577_42047C.1.pep
MAFRLTVICPGTRSFGGGDDAENSGFRDTGPGKILPFLIVVFLSFTDYALAGNLLPILTFFSXACWAWHDSITEQHVGSGYHGLRGGAFTLDWGGISAYHGSPLVA

SEQ ID NO: 305903 - protein, 194 aa, Zea mays
  unsure (1)..(194): unsure at all Xaa locations
  Clone ID: MRT4577_42048C.1.pep
MSKTVSRIPSSTLTSLLPRALNPHVAVVDLITTHLTADAEPTKTLDLSGLLPYLGQDELTAVVLHAGHSHPLPTLRFLIALPPPLQPSPPHLAFLAHSLATTRFFSHALDALTHLXLRLHXXHDALPTLLLSYQTAPHPSLPGLLVKALLRRARLRHAFHAGLRASASGFPPDTVAFNALLVALSRTERFHDLW

SEQ ID NO: 305904 - protein, 193 aa, Zea mays
  Clone ID: MRT4577_42049C.1.pep
MAFALLVVPARVESAGSTRRPAARGGGGRGRAMGGGWPRPGGALAAPRFLLRALMLCSLLAQPNPSRAFFFFSGVRTSAHVPQHRGAGRYEKVPMTVCVPEYSTRPGPLALSASAATTPAPAAVLASDCTLKRDADAAVTMEKTRERPRRPATARLTMADRADQSRLHQKQMRRVDHERSHGLLHRPGYGLSR

SEQ ID NO: 305905 - protein, 60 aa, Zea mays
  Clone ID: MRT4577_4204C.1.pep
VKPLLKSLIYKYGHLLNTGIDLVKHHLYHEFVQPHGSTNFACYACLSIATRWIILEHNDT

SEQ ID NO: 305906 - protein, 36 aa, Zea mays
  Clone ID: MRT4577_42050C.1.pep
GMSKLANKLNKWHDRELFMSIDGVVVVVLDRSNEEA

SEQ ID NO: 305907 - protein, 93 aa, Zea mays
  unsure (1)..(93): unsure at all Xaa locations
  Clone ID: MRT4577_42051C.1.pep
VNKKQAGGVLMILRSINHLLQDTIRLVTLELTAAIKHLINCLRLLDRPLVHQTHHEERKAVLNRRTMYKSTQVQACLNGILPHXMMFDMSDSP

SEQ ID NO: 305908 - protein, 512 aa, Zea mays
  Clone ID: MRT4577_42052C.1.pep
MGSGDLSSEMERTVLGLTLWVWIAIGVVALLVAILLMICIWVASRLRTKRTMDSLRQTQIPIYSKEIPIDRVGGRSLAQTMHEREQPSLPPPDKYANREPAGAAVGHLALSKSSDHDNMSQGSSVCNADRAGTGSMHSGEDGSSGPRRKPNSPAAFVSASPLVGLPEFSHLGWGHWFTQRDLELATNRFSKENVLGEGGYGVVYRGRLVNGTEVAIKKIFNNMGQAEKEFRVEVEAIGHVRHKNLVRLLGYCVEGVNRMLVYEFVNNGNLEQWLHGAMHQRGVFSWENRMKVVTGTAKALAYLHEAIEPKVVHRDIKSSNILIDDEFNGKVSDFGLAKLLGSDKSHITTRVMGTFGYVAPEYANTGMLNEKSDVYSFGVLLLETVTGRNPVDYSRSSNEVNLVEWLKTMVANRRAEEVADPSLEARPSIRALKRALLVALRCVDPDSEKRPKMGQVVRMLESEEVPYREDRRNRRSRTGSMDIESIAEGSNSAEFGKKVERTGSSISDRSQP

SEQ ID NO: 305909 - protein, 105 aa, Zea mays
  Clone ID: MRT4577_42053C.1.pep
MWPRLRSLFFNRCIQDAEFYSQEKGEKVPKSSRDPNPIRIPTLDGIKREDSLKHEPLSAARTGPPSTHPTSKEPETGKKKPAELRDRIVVHFPPVPARNSESGQR

SEQ ID NO: 305910 - protein, 257 aa, Zea mays
  Clone ID: MRT4577_42054C.1.pep
EKEFRVEVEAIGHVRHKNLVRLLGYCVEGVNRMLVYEFVNNGNLEQWLHEAIEPKVVHRDIKSSNILIDDEFNGKVSDFGLAKLLGSDKSHITTRVMGTFGYVAPEYANTGMLNEKSDVYSFGVLLLETVTGRNPVDYSRSSNEVNLVEWLKTMVANRRAEEVADPSLEARPSIRALKRALLVALRCVDPDSEKRPKMGQVVRMLESEEVPYREDRRNRRSRTGSMDIESIAEGSNSAEFGKKVERTGSSISDRSQP

SEQ ID NO: 305911 - protein, 55 aa, Zea mays
  Clone ID: MRT4577_42055C.1.pep
ACDVRGYFAWSLLDNWEWTAGYSSRFGLYFVDYKDNLKRYPKSSVQWFKNLLASR

SEQ ID NO: 305912 - protein, 411 aa, Zea mays
  Clone ID: MRT4577_42056C.1.pep
MFVIEDKGGAIALMLASLLFLGSRPAVLTLLERRGRLPQHTYLDYSITNLLAAVLIALTFGQLGDSRRGMPNFFTQLGQDNWPSVLFAMAGGVVLSVGNLSTQYAWAYVGLSVTEVISSSMVVVIGTTLNYFLDNRINRAEILFPGVACFLVAVILGSAVHSSNAADNEQKLGASTNAYKLGTSGTVEPSKQAVDRDAPKDLEESGASGIRQPDKAEAGTAEYLIELEERRSIKVFGSNTFIGLGIVFFAGVCFSLFSPAFNLATNDQWHTLRDGVPHLVGYTAFFYFSISCFVVGVGLNVLFLYRPMAGVPRSSLGAYLRDWDGRQWALLAGLLCGFGNGFQFMGGQAAGYAAADAVQALPLVSTFWGVLLFGEYRKSSRKTYVLLGFMLFMFVAAVAVLMASSGHRSTE

SEQ ID NO: 305913 - protein, 479 aa, Zea mays
  unsure (1)..(479): unsure at all Xaa locations
  Clone ID: MRT4577_42057C.1.pep
MNRVLACASSLLTCREVLQEQVSSTRSRLGMFVIEDKGGAIALMLASLLFLGTWPAVLTLLERRGRLPQHTYLDYSITNLLAAVLIALTFGQLGDSRRGMPNFFTQLGQDNWPSVLFAMAGGVVLSVGNLSTQYAWAYVGLSVTEVISSSMVVVIGTTLNYFLDNRINRAEILFPGVACFLVAVILGSAVHSSNAADNEQKLGASTNAYKLGTRGNVEPSKQAVDRGSITCENCXDLLQIFFPVTYLVSGVHCLSEEERTNLISDAPKDLEESGASGIRQPDKAEAGTAEYLIELEERRSIKVFGSNTFIGLGIVFFAGVCFSLFSPAFNLATNDQWHTLRDGVPHLVVYTXXXXXXXXXFVVGVGLNVLFLYRPXXXXXXXXXXAYLRDWDGRQWALLAGLLCGFGNGFQFMGGQAAGYAAADAVQALPLVSTFWGVLLFGEYRKSSRKTYVLLGFMLFMFVAAVAVLMASSGHRSTE

SEQ ID NO: 305914 - protein, 120 aa, Zea mays
  Clone ID: MRT4577_42058C.1.pep
FLGAPENLQQKQKTCPEKSGETRNRTNPRTGPKALKTRKNPTLRKPGPFTPTRGNPMTLPGGPFKGANPTTLGGRNKGDPSRDPSWGKPGPKRFPGENGNPPKFPHKKQPGRKKGKPGGP

SEQ ID NO: 305915 - protein, 89 aa, Zea mays
  Clone ID: MRT4577_42059C.1.pep
TCMHFFPTLVQVDVFTVLSSLGIPYPYCHVFAGVFAAGAGPVFFWPPVLSLASWISQSPGITKILGFFLGAYRRIMARIEQDPTKYQKT

SEQ ID NO: 305916 - protein, 68 aa, Zea mays
  unsure (1)..(68): unsure at all Xaa locations
  Clone ID: MRT4577_4205C.1.pep
RFETRLGSSGPVGQYILGGENLQGRVXITFDGHVMNGGAWHLESRGYYSLCQATQGIVGHMGPYFITG

SEQ ID NO: 305917 - protein, 73 aa, Zea mays
  Clone ID: MRT4577_42060C.1.pep
SYRQTTAPTNPVCRRSGSSRRVSGAGRHGLRGFVIGGQDDDAVRLFVFPYPVVFYFFVCFALFFYIFLFFLIF

SEQ ID NO: 305918 - protein, 161 aa, Zea mays
  unsure (1)..(161): unsure at all Xaa locations
  Clone ID: MRT4577_42061C.1.pep
MTEVALLRGPTNLASTVSRASASSPSSTLCYLANADSDVLPRSGSPERTAGSARSRRLLELHGQEAVEEEEERWSFLALLFELLQKSLLGCRTVGGGGEGEHGGGXMEIGLPTDVQHVAHVTFDRFHGFLGLPVEFKPEVPLRAPSVRIFEPVDGAQVGSC

SEQ ID NO: 305919 - protein, 151 aa, Zea mays
  Clone ID: MRT4577_42062C.1.pep
MTEVALLRGPTNLASTVSRASVSSPSSTLCYLANADSDVLLRSGSPERTAGSARSRRLLEQRGQEAVEEEDERWSFLALLFELLQKSLLGCRTVGGDGEGEHGGGGMEIGLPTDVQHVAHVTFDRFHGFLGLPVEFKPEVPLRAPSVRYVS

SEQ ID NO: 305920 - protein, 217 aa, Zea mays
  Clone ID: MRT4577_42063C.1.pep
MTEVALLRGPTNLASTVSRASASSPSSTLCYLANADSDVLPRSGSPERTVGSARSRRLLEQRGQEAVEEEEERWSFLALLFELLQKSLLGCRTVGGGEGEHGGCGMEIGLPTDVQHVAHVTFDRFHGFLGLPVEFEPEVPRRAPSARYVSSPSSNCYRVHASRKSGFLFRVYLCNNMDGVCSNLNFRLDGVCTFFCSLLIIPNICGALAPTVADSKY

SEQ ID NO: 305921 - protein, 58 aa, Zea mays
  Clone ID: MRT4577_42064C.1.pep
LSALLQITYRKALIHRIKHFLTGGAHNFYVKSDEALITCLTFLKEFMHAIESKSVGVQ

SEQ ID NO: 305922 - protein, 124 aa, Zea mays
  Clone ID: MRT4577_42065C.1.pep
RRWRSSGARPTSLPPSGSPERTAGSARSRRLLEQHGQEAVEEEEERWSFLALLFELLQKSLLGCRTVGGGGEGEHGGGGMEIGLPTDVQHVAHVTFDRFHGFLGLPVEFKPEVPLRAPSVRYDS

SEQ ID NO: 305923 - protein, 53 aa, Zea mays
  Clone ID: MRT4577_42066C.1.pep
MQAYACVNLVVIIVVWDESYVSQSRAIDRPTHRFPRLLFPLPPTCPLVGIYKN

SEQ ID NO: 305924 - protein, 38 aa, Zea mays
  Clone ID: MRT4577_42067C.1.pep
LSECHGSEPRLLYHLRILSVARQCGIMRLDQTHTASSL

SEQ ID NO: 305925 - protein, 75 aa, Zea mays
  Clone ID: MRT4577_42068C.1.pep
QSRDRCSAADPQSYHLQRCPGCLRQDQPSVPLGVQVSRRPWPCPALIGTGSSSVSAGRRGPVRVFLLRPGQSHLV

SEQ ID NO: 305926 - protein, 386 aa, Zea mays
  Clone ID: MRT4577_42069C.1.pep
MAAPPGGAGIVWQTPANPPESHDYIIRNGRRYVRPYYFEFISHVKNRWAGKTIVDLFTDEFKGRSRDYYVHAVKCGRLQVDGQMVHTDYIVKSSQKISHFLHRHEPPVLAGDISILKNEVDVVTICKPASVPVHPCGQYRKNTVVGILQAEHGLTPLFPVHRLDRLVSGLLIFAKNADRAECFRQQIEAGLLQKEYVAKVVGVFPDGEQTVDANVNFNAREGRSTVEISGGAGEEPNGKQALTRFQRICTDGTHSIVLCKPVTGRTHQIRVHLKQAGYPIANDELYLSGNFCPRSTKGTNASKKIAPSDPDSSAADHGSKDAGTDVEFDIDPMCTNCPNLAPVGYDRDEEGLWLHCVRYTGPDWSYECPYPDWAFLGSVSTKKMKS

SEQ ID NO: 305927 - protein, 113 aa, Zea mays
  Clone ID: MRT4577_4206C.1.pep
FTLFEIRDFEYSGESQVCRKQEMEKLLLEQEVMRTSLLQWCYASYSEVFSFFLHFCSYHILLFVLFFYTLLLFLFLFYSLLFIFFFFSFILFLRGFYVLFFLFSFLSLLLFFS

SEQ ID NO: 305928 - protein, 65 aa, Zea mays
  Clone ID: MRT4577_42070C.1.pep
PLRLTVGYRLVCSPGCASKIRWSSLCFILPPVFFPPYSAPRLSPQTRVRSSAPVWYWISQPLPSA

SEQ ID NO: 305929 - protein, 51 aa, Zea mays
  Clone ID: MRT4577_42071C.1.pep
TSHCQEKSLASSHESTARTATSHNLMERMGKGPYCTSHHTYSSFCGIHYRL

SEQ ID NO: 305930 - protein, 194 aa, Zea mays
  unsure (1)..(194): unsure at all Xaa locations
  Clone ID: MRT4577_42072C.1.pep
MAAPPGGAGIVWQTPANPPESHDYIIRNGRRYVRPYYFEFISHVKNRWAGKTIVDLFTDEFKGRSRDYYXKCGRLQVDGQMVHTDYIVKSSQKISHFLHRXYPLHAYIIKMASESXHEPPVLAGDISILKNEVDVVTICKPASVPVHPCGQYRKNTVVGILQAEHGLTPLFXAAVHRLDRLVXGLLIFAKMPTE

SEQ ID NO: 305931 - protein, 307 aa, Zea mays
  unsure (1)..(307): unsure at all Xaa locations
  Clone ID: MRT4577_42073C.1.pep
MSFSHLQIFSSSLFLKVFFSSRHEPPVLAGDISILKNEVDVVTICKPASVPVHPCGQYRKNTVVGILQAEHGLTPLFXAAVHRLDRLVSGLLIFAKNADRAECFRQQIEAGLLQKEYVAKVVGVFPDGEQTVDANVNFNAREGRSTVEISGGAGEEPNGKQALTRFQRICTDGTHSIVLCKPVTGRTHQIRVHLKQAGYPIANDELYLSGNFCPRSTKGTNASKKIAPSDPDSSAADHGSKDAGTDVEFDIDPMCTNCPNLAPVGYDRDEEGLWLHCVRYTGPDWSYECPYPDWAFLGSVSTKKMKS

SEQ ID NO: 305932 - protein, 100 aa, Zea mays
  Clone ID: MRT4577_42074C.1.pep
VPKMFLNTTPVFDLKKPCPPPWNARRPGAGHFPKKKKSNATHPRPHTVRSIHPKINTEKRSTAPNLDIHVYRFYFFFHEFPPLPPFFLGVFYLTLRGRGL

SEQ ID NO: 305933 - protein, 58 aa, Zea mays
  Clone ID: MRT4577_42075C.1.pep
AKPCFLCVVQLLSIWYYTVKFTFIYSNCILLKIFMHSRFKLLSCTISCAFLHFAAFKR

SEQ ID NO: 305934 - protein, 49 aa, Zea mays
  Clone ID: MRT4577_42076C.1.pep
EKTINICQNPHNAQHIFRQEIPKHDPTTTITRAIEKTKPHPRSNRQAYT

SEQ ID NO: 305935 - protein, 47 aa, Zea mays
  Clone ID: MRT4577_42077C.1.pep
HLQICHQIIGYNHNNFNRGEISSVMFPCLEKENKQTSLTLDRSQWKF

SEQ ID NO: 305936 - protein, 299 aa, Zea mays
  unsure (1)..(299): unsure at all Xaa locations
  Clone ID: MRT4577_42078C.1.pep
MRPRPSRFLQLLLVVVIACAVPGVRCSDRRFPHLDRVRELQRREGSSSAEQEAAARGLLARLLPSHSTSFEFRVISTSTELCGGKTCFVINNYPLFDGEGTPEILILGASGVEISAGFHWYLKHYCAAHISWDKTGGAQLSTIPRPGSLPRVPDGGVLIQRPIDWSYYQNAVTSSYSFAWWDWDRWEKEXDWMALQGINLPLAFTGQESIWQRIFQRYNISKSDLDDFFGGPAFLAWSRMANMHGWGGPLPQTWLDDQLVLQKKILSRMYSFGMFPVLPAFSGNIPAALKSKFPSAKVT

SEQ ID NO: 305937 - protein, 68 aa, Zea mays
  Clone ID: MRT4577_42079C.1.pep
IPFLSTFMLCSLNIICAVSALNEDQIKMIFVLSSLRYMAAYAKLFPNSVATFTSALSIHRLHFVCTVL

SEQ ID NO: 305938 - protein, 76 aa, Zea mays
  Clone ID: MRT4577_4207C.1.pep
NNVSIYFTIDCTDPIMDIIMVVNLLEKLMQDRIKVAGSLADYLSISVTMSSETTNVTVTFDRPYFKSYMKNLSKKY

SEQ ID NO: 305939 - protein, 110 aa, Zea mays
  Clone ID: MRT4577_42080C.1.pep
IYPNNRRGTPHSISFNKNSTTFSPGIPPPWNLNFFFPGPLNAPHFWIWRKPAQNGTGNRKTLPKAPWGGPGGENSPPARKKTTPPGCTGPWAPPRPTTTGGTASFPWGGT

SEQ ID NO: 305940 - protein, 81 aa, Zea mays
  unsure (1)..(81): unsure at all Xaa locations
  Clone ID: MRT4577_42081C.1.pep
RGTKMAKSSVETYMIFIFXVLKQVHPDLSISSXAMSIMNYFIYDIFDNLASEAAKLPRCNWKPTISYREIQTYLRLILSRE

SEQ ID NO: 305941 - protein, 175 aa, Zea mays
  unsure (1)..(175): unsure at all Xaa locations
  Clone ID: MRT4577_42082C.1.pep
GEKTPPKKWIIPRNPPPGGGPPGRAPPKGNQKKGPPNQGVPXPGPRXPGGKGKKMGAPKKGKKVPPTPWGDQREPKCPRVPGPPPPQGRIPTPGGPVQGDPTRDPSWGKTGPKAGPXKMGPPPQFPPTTRPEPKRENPGGPKGGPTPPKRRGPPPPPFPGENRGAPPVYREPPPP

SEQ ID NO: 305942 - protein, 55 aa, Zea mays
  Clone ID: MRT4577_42083C.1.pep
TTTAYSLQPTAAPLKTPQNLSQSAVPPSEAPAAGDPSDPRGPEHLQAPQWHIGPS

SEQ ID NO: 305943 - protein, 96 aa, Zea mays
  Clone ID: MRT4577_42084C.1.pep
FFPTRTRARKGQICRPFGTVRARTAFHSTLPSPSCPILAFNCTSSLSRTFYPSGYDWAITDSLPPAPGWPELACAAAKHRSDHGGGLLHPLLPGLT

SEQ ID NO: 305944 - protein, 48 aa, Zea mays
  Clone ID: MRT4577_42085C.1.pep
NITRCLTLFHLACFDSVADIINSSKYHKITLHGNHALVSNYPSDLEAL

SEQ ID NO: 305945 - protein, 69 aa, Zea mays
  Clone ID: MRT4577_42086C.1.pep
KKEMPPNFGACFALHNPPRDVDFAGHGFCSVFQLFITGHSRKAPNLFGMTNFYVLFNLTRFNHLESFLH

SEQ ID NO: 305946 - protein, 43 aa, Zea mays
  Clone ID: MRT4577_42087C.1.pep
SSRRFWSRNLYRAGMIKAGGLCLYRHGNRVVIKVCMMYCYCHT

SEQ ID NO: 305947 - protein, 141 aa, Zea mays
  unsure (1)..(141): unsure at all Xaa locations
  Clone ID: MRT4577_42088C.1.pep
TKHAWRIALAWTTNNNEYGRCKNILALRDLPVSATHAVIITHCSLANKAMVAQFIRSVTTMGCIQLDVYAIMQHQALAASVLLQPIDWXHHQSSQHITIQAITTYQQLQFLQELSHLSMLNHAAYLHEQLHASYPLALANV

SEQ ID NO: 305948 - protein, 51 aa, Zea mays
  Clone ID: MRT4577_42089C.1.pep
SFSLSRILAFMRERERDGEWSHRGKNCNLQKETSGAEYRKAVLSWGYKIHL

SEQ ID NO: 305949 - protein, 78 aa, Zea mays
  Clone ID: MRT4577_4208C.1.pep
KNLKLIDVDVPDADGHAGITFLPLLSMTRPSVTFTDEGTDELTKRIQNAVTEVVDAKAGAGSATLSMAYAAARFVESS

SEQ ID NO: 305950 - protein, 277 aa, Zea mays
  unsure (1)..(277): unsure at all Xaa locations
  Clone ID: MRT4577_42090C.1.pep
MSVKQPPSSSTAAAFYATLARGLDDLXGAGGVLSXSSSFLSLPTLRAALALLRAAHAGLARLVASLHLPGGAAWLDEYMDEASRLCDACRALRLGAAAVEGYAGSAAQLASLLMQGASSSPHLSRQVARAISVCRREAMAVKEENRALVETRADALALRLSEGVPADAKLGGFNGFRGVLCATRMLTSFLLTLLSWGVLHYWPAPNAGAGDCAAYFGAAFATALSRAQQRAAAEAGRSVAAAGGGGGGGGGVMMHEFRRARAAVEEAKEAVERGGDV

SEQ ID NO: 305951 - protein, 233 aa, Zea mays
  unsure (1)..(233): unsure at all Xaa locations
  Clone ID: MRT4577_42091C.1.pep
MRGSMFCGGDLRWWMLAIFFLCTLIAAAEERVVTHLPGFQGPLPFQLRTGYVEVDEDNGVRLFYYFTLSEGSSADDPVMLWLSGGPGCTSFTGLVYQIGPLSFDLDSYMGGLPKLVYRPESWTKWFDEHPEFLSNPLYIGGDSYXGMIVPTVTSEIAKGFKIVGSKPTMNLKGCLVGNPFTDQSNFDGPSKIPFAHRMALISDQMYKSYKKSCRGGDNRHQSIQCRNSLDAHR

SEQ ID NO: 305952 - protein, 129 aa, Zea mays
  Clone ID: MRT4577_42092C.1.pep
MFYSHQLLARKAPLGQIWMAATLHSKINRKRLDKLDIIKICEEILNPSVPMALRLSGILMGGVVIVYERKVKLLYTDVSRLLTEINEAWRIKPVTDPTVLPKGKTQAKYEAVTLPEINMGGTAHVFLRA

SEQ ID NO: 305953 - protein, 313 aa, Zea mays
  unsure (1)..(313): unsure at all Xaa locations
  Clone ID: MRT4577_42093C.1.pep
MRGSMFCGGDLRWWMLAIFFLCTLIAAAEERVVTHLPGFQGPLPFQLRTGYVEVDEDNGVRLFYYFTLSEGSSADDPVMLWLSGGPGCTSFTGLVYQIGPLSFDLDSYMGGLPKLVYRPESWTKVSNIIFLDSPVGAGFSYSVKEQGYNSSDTKAVSHILVFLKKWFDEHPEFLSNPLYIGGDSYAGMIVPTVTSEIAKGLKIVGSKPTMNLKXENYXQQQKHIEGYFEFPNCYPIFGGQNSPVNFAYGVQGCLVGNPFTDQSNFDGPSKIPFAHRMALISDQMYKVTRVDLIIAIKYSCCNLHDFLCLLGMH

SEQ ID NO: 305954 - protein, 301 aa, Zea mays
  Clone ID: MRT4577_42094C.1.pep
KLYCQQQKHIEGYFEFPNCYPIFGGQNSPVNFAYGVQGCLVGNPFTDQSNFDGPSKIPFAHRMALISDQMYKSYKKSCRGGDNRHQSIQCRNSLDAIDECVKDISEFHVLEPRCAYASPHQYNVLKLKTSLGVQKMQQLPDFTAEGLHLSEISTECRTMLYTLSRIWANNATVREALGIHKGTVPLWLRCNTDIPYLKDIKSSVKYHLDVTTKGYKSLVYSGDHDMGVPYIGTQSWIKSLNFSIVDDWRPWYVDGQVAGYTVLYSNNLTFATVKGAGHTAPEYMPRQCLAMLSRWLAGDTL

SEQ ID NO: 305955 - protein, 70 aa, Zea mays
  Clone ID: MRT4577_42095C.1.pep
NQLRLLWTHGHTSLFTMPHVQVSAAHKMLNRTDHDYQRSPMHLNNIALTKTPDATSLLINTYVFAMLYSY

SEQ ID NO: 305956 - protein, 260 aa, Zea mays
  unsure (1)..(260): unsure at all Xaa locations
  Clone ID: MRT4577_42096C.1.pep
MSQMKYTTATAFFEALWEAGISHVFVNLGSDHPGIMEAIARGKKDPTGSFPKVVTCPHETVALSMADGFARLTGKPQCVIVHVDVGTQCLGAAVHNASVARVPVLIFAGLSPFTLEGEMRGSRTEYIHWLQDAPDQKQIVQQFCRYTGEIKTGTNVKQMVNRALQFATSDPKGPVYLTAGREVLEQEITXQARPNRLXLYPPNPLPXDGVATISDLLVTAKEPLVITGYSGRNHASMRALVALADTVPGLRVIDALGSDV

SEQ ID NO: 305957 - protein, 78 aa, Zea mays
  Clone ID: MRT4577_42097C.1.pep
RYVSRLPALSCFSLSTNTWPDRDLTAKATEASGCGNGHTCLSTCACSTSPPVEWTRLHRPFTDPRAVRNGSLLILTSS

SEQ ID NO: 305958 - protein, 33 aa, Zea mays
  Clone ID: MRT4577_42098C.1.pep
QHSAPGLGPTVRRSLAPSTLVGKQNAGTPPSEP

SEQ ID NO: 305959 - protein, 76 aa, Zea mays
  Clone ID: MRT4577_42099C.1.pep
SDPLYSFLSASVVAVLFHICGVVWCRQGVMKEMPLAAAVHTPHVGGLVSTTGDGRAVATLQRRRRWREGNRMRERR

SEQ ID NO: 305960 - protein, 99 aa, Zea mays
  Clone ID: MRT4577_4209C.1.pep
LLHEMEKRCQTDTSIDLHHTSCCSRSSRPAGTYSGNQITPRKEGQLSSFPHRITNCQQHGRISNNCHWTEPMNFFPPWRCRNSGQKKLWQRGARKIQAS

SEQ ID NO: 305961 - protein, 80 aa, Zea mays
  Clone ID: MRT4577_420C.1.pep
FALVSHRFQTTESSRSSGISCMILVDTLKEPSSGFIVGDSCVFGVELTKLTTAKVKDDSGTLHVQKRNGFCSAREAYTWV

SEQ ID NO: 305962 - protein, 79 aa, Zea mays
  Clone ID: MRT4577_42100C.1.pep
QNYKVEVRCGLWTLPFPTPAKGAKTFACWLGGVGIDQATKKNVGASGLEILPGFHIEFRTEYKGPAACNDRLGIDLFIP

SEQ ID NO: 305963 - protein, 153 aa, Zea mays
  unsure (1)..(153): unsure at all Xaa locations
  Clone ID: MRT4577_42101C.1.pep
KTAGIYPLGNGNFSSSKFYKLSFKSIQPPPSFXWIWQSKVCKKIKIFVWLVFRDRINSKNLLRRKGSLTVDSDFKCILCDLNCEESTYHLLFDCLFSSNCXNYVGIQWNHDLNFFKMIEAAKNAFGHEIFMEIMALVADAWADAWADAWANAW

SEQ ID NO: 305964 - protein, 86 aa, Zea mays
  Clone ID: MRT4577_42102C.1.pep
IWDHKGRHGCNKGAGHVWQTTRSQGNAPEVTGAPLKKGGTWNPFSPTLYKTRPPPTGGSIPRVPGGGLKKTKNTVLLIDGADQWRT

SEQ ID NO: 305965 - protein, 49 aa, Zea mays
  Clone ID: MRT4577_42103C.1.pep
TIWVHGYCSSGPVKMPFVLSKYGACARGLSKLPVRRFGARKKIPGGEGK

SEQ ID NO: 305966 - protein, 170 aa, Zea mays
  Clone ID: MRT4577_42104C.1.pep
MVSGRPHGELDSWFKSLMVTSSSERGQAGSGGPASTLSGWKDLPMELLVRIISTVGDDRMVIVASGVCTGWRDALGWGVTNLSLTWCKLSMNNLMISLAHKFTKLQVLTLRQNKPQLEDSAVEAVANYCHDLRELDLSRSFRLSDRSLYALAHGCPRLTRLNISGCSSFS

SEQ ID NO: 305967 - protein, 158 aa, Zea mays
  Clone ID: MRT4577_42105C.1.pep
MPSVGGGKNKTSWEAFQHIISKEGPKPLFKGRGANFLFTVAGAGVLCAYARPRVLFFEKKYGSVGVEMKKYYGGQEQGVFPALPNQGVVKFFPSLEKKKIFPLGGGFFLHLVGGGVLHLQPLEGILVGGALVPQKLFGSYSLPFVFRSGSFSFIQHLG

SEQ ID NO: 305968 - protein, 78 aa, Zea mays
  unsure (1)..(78): unsure at all Xaa locations
  Clone ID: MRT4577_42106C.1.pep
WRSRSLDSSPAAARSTLLGTRMADPAPYNGLLVDQIGFGLHGQAKAAXEKVAKTSTSSYQPLWFSRTKAPDYLHGSLV

SEQ ID NO: 305969 - protein, 368 aa, Zea mays
  Clone ID: MRT4577_42107C.1.pep
MVSGRPHGELDSWFKSLMVTSSSERGQAGSGGPAPTLSGWKDLPMELLVRIISTVGDDRMVIVASGVCTGWRDALGWGVTNLSLTWCKLSMNNLMISLAHKFTKLQVLTLRQNKPQLEDSAVEAVANYCHDLRELDLSRSFRLSDRSLYALAHGCPRLTRLNISGCSSFSDTALIYLTCRCKNLKCLNLCGCVKAVTDRALQAIAQNCGQLQSLNLGWCDDVTDKGVTSLASGCPDLRAVDLCGCVLITDESVVALANGCPHLRSLGLYFCQNITDRAMYSLANSRVKSKRGRWDAVKDGLANLNIRQCTALTPPAVQAVCDSFPALHTCPERHSLIISGCLSLTSVHCVCALHPHRAVRALMANHAY

SEQ ID NO: 305970 - protein, 92 aa, Zea mays
  unsure (1)..(92): unsure at all Xaa locations
  Clone ID: MRT4577_42108C.1.pep
KGLVQYIILGNVVLMVWXGEVINVXARRIFGVNRAXXAAPGTIGWDYSVEVARNVIHGTDSLEIGNKEIALXFPXEGVAQXKSNLHPWIFKA

SEQ ID NO: 305971 - protein, 385 aa, Zea mays
  unsure (1)..(385): unsure at all Xaa locations
  Clone ID: MRT4577_42109C.1.pep
WRPRFRGLMVTSSSERGQAGSGGPAPTLTGWKDLPMELLVRIISTVGDDRMVIVASGXAPGRVGSGDLGGRAGTCVNIIQYFGVCTGWRDALGWGVTNLSLTWCKQSMNNLMISLAHKFTKLQVLTLRQNKPQLEDSAVEAVANYCHDLRELDLSRSFRLSDRSLYALAHGCPRLTRLNISGCSSFSDTALIYLTCRCKNLKCLNLCGCVKAVTDRALQAIAQNCGQLQSLNLGWCDDVTDKGVTSLASGCPDLRAVDLCGCVLITDESVVALANGCPHLRSLGLYFCQNITDRAMYSLANSRVKSKRGRWDAVKDGLANLNISQCTALTPPAVQAVCDSFPALHTCPERHSLIISGCLSLTSVHCACALHPHRAGRALMANHAY

SEQ ID NO: 305972 - protein, 99 aa, Zea mays
  Clone ID: MRT4577_4210C.1.pep
RTGLSCPEPCRRVLGAVPLQALCFPQGLSSEHPSCSLGLLREPFQLESQVSKTTSPGGQKKTGLASGPHDGFYPPGTLWVYSWALFPSVNSTCATPALI

SEQ ID NO: 305973 - protein, 214 aa, Zea mays
  unsure (1)..(214): unsure at all Xaa locations
  Clone ID: MRT4577_42110C.1.pep
MVSGRPHGELDSWFKSLMVTSSSERGQAGSGGPAPTLSGWKDLPMELLVRIISTVGDDRMVIVASGVCTGWRDALGWGXTNLSLTWCKLSMNNLMISLAHKFTKLQVLTLRQNKPQLEDSAVEAVANYCHDLRELDLSRSFRLSDRSLYALAHGCPRLTRLNISGCSSFSDTALIYLTCRCKNLKCLNLCGCVKAVTDRALQAIAQNCGQLQSL

SEQ ID NO: 305974 - protein, 123 aa, Zea mays
  unsure (1)..(123): unsure at all Xaa locations
  Clone ID: MRT4577_42111C.1.pep
QLSGRYAPLPARCADRLTHPPQPSRQAHLPAADPDAGGSMFGGIRPTIDHRLAIGTDRALAHMASHALLGARPIQHDTVAXNXAAAADPVLPLMNADACSIHPKGYQDCLNNYGSEISRRQLY

SEQ ID NO: 305975 - protein, 86 aa, Zea mays
  Clone ID: MRT4577_42112C.1.pep
NAPSMGFFYWEPGEIPYHHQEEEIHDYQWLKADVLSHLELRTLGVNQGATLRLPVLPLSFWGLFSSFPRALKLPLIHGPNRKHISL

SEQ ID NO: 305976 - protein, 58 aa, Zea mays
  Clone ID: MRT4577_42113C.1.pep
KIGRTLNTKALVRRCFYVFQPEQNYYPLFLSHYLQLGTQRGAAQNLVESWGKSICQFE

SEQ ID NO: 305977 - protein, 59 aa, Zea mays
  Clone ID: MRT4577_42114C.1.pep
SRSSWWRSAGWSLCRATRSCSLWMLGNALSGFLIWAMRPPCGRAQEKRMDGFETSSMRP

SEQ ID NO: 305978 - protein, 77 aa, Zea mays
  Clone ID: MRT4577_42115C.1.pep
NIKPSLFLLVEAFIFFFQIIVRYLIHLLKEIVNGLLLLLHFPISFCVVDSLSSSQHTSNKCVRAGKTSMRDIQVINR

SEQ ID NO: 305979 - protein, 48 aa, Zea mays
  Clone ID: MRT4577_42116C.1.pep
GPYITWVDPGVRPRVRSFAVRMNKLLLTRMNTGGIGHYSVVSLLTNGI

SEQ ID NO: 305980 - protein, 56 aa, Zea mays
  Clone ID: MRT4577_42117C.1.pep
KKVKGPLTPLLFHPQGKRENPSLVKRNLTNRTRLGLNTTQPANFKNKFFPTRFICI

SEQ ID NO: 305981 - protein, 75 aa, Zea mays
  Clone ID: MRT4577_42118C.1.pep
GGHKPFFQQSLPVLMHYTIFPRTGNVPWCLIHIIRSEQGSLHWLWWCYYEHRCTGHWVRLNSINLLALPGLTFRN

SEQ ID NO: 305982 - protein, 145 aa, Zea mays
  unsure (1)..(145): unsure at all Xaa locations
  Clone ID: MRT4577_42119C.1.pep
STLVVAAQFAYMTGGRFPDAWKGFTVRAFDNLGPFVKLSLGSAVMICLEFWYYTTLLGLVGLLKXAKLQIDIMSVCLNFEFLTVMVALGFSTAIGIRVSNELGANRPKEAKFAVLVAVSTSIFMGAAFMCAALICRTSLPKLFSS

SEQ ID NO: 305983 - protein, 61 aa, Zea mays
  Clone ID: MRT4577_4211C.1.pep
KKLLAYNPKKLNLHTIRQNAHISKEPFHLIIYSHESIRGHFKLQTSRLHVIMKIYLEWLNC

SEQ ID NO: 305984 - protein, 106 aa, Zea mays
  Clone ID: MRT4577_42120C.1.pep
PCEAVPIKKMSPPVPLAGHEINAEIPQMYPQPVEAKDQAESPIYSIPVNFHHAVPKRRLRSTRESCGLLQAADPGIHRRDQRRLADESAILSVGGSVVRQLCSYKQ

SEQ ID NO: 305985 - protein, 140 aa, Zea mays
  Clone ID: MRT4577_42121C.1.pep
MESTQSNSVRSHFILVHGLCHGAWCWYKVVAALEAAGHRVTAIDLAASGTHPARVDEVHSFEEYSRPLLDVVAAAPAGDGERLILVGHSHGGLSLALAMERFPGKIAAAVFAAAAMPSVGKHMGVTTEEFMRRTSSKGLL

SEQ ID NO: 305986 - protein, 108 aa, Zea mays
  Clone ID: MRT4577_42122C.1.pep
YSYLFSLYFHFNFTEILLPPHLLPHTLTFTILNPFFITYRFYTVRLSLYFPTQIALLNFPCTFTFNFFYYFVASSLLSPLLLYLTLFPAPPSLFNLSLFPPLLYLSNS

SEQ ID NO: 305987 - protein, 86 aa, Zea mays
  unsure (1)..(86): unsure at all Xaa locations
  Clone ID: MRT4577_42123C.1.pep
MLALLVLVTVALASAHHGGEHXEGEKVFRVNVEDENHINIIRELASTTQIDFWKPDSVTQIKPHSTVDFRVKAEDTVTVENVLKQN

SEQ ID NO: 305988 - protein, 110 aa, Zea mays
  unsure (1)..(110): unsure at all Xaa locations
  Clone ID: MRT4577_42124C.1.pep
MICSCADIYMPTDSNHTENIQDLDQLNRKLNQIDDEVAIFHHMQAKVHKYIHERDPYFISSDATRSCIHQALTXVGNIDYAFTPQXVHHHFQACXTINKVTILTDKFFIQ

SEQ ID NO: 305989 - protein, 50 aa, Zea mays
  Clone ID: MRT4577_42125C.1.pep
HLLKECYFYEIISLEKSVNTIFSYKPNLRGFTCQWSKFRCWIELILAFGV

SEQ ID NO: 305990 - protein, 89 aa, Zea mays
  Clone ID: MRT4577_42126C.1.pep
HNEALWVAGRTHVKQDYMTSLLMWKKLQFIAVSLLVLLTFTRPTESQLCQRWNCKTILCSSCITPNPYNGDVSGILCNERVDIHCSNFT

SEQ ID NO: 305991 - protein, 45 aa, Zea mays
  Clone ID: MRT4577_42127C.1.pep
LGSITMAIGNRSTAPVKTLRQASAAWHSKSLKELCSATGSWFPAE

SEQ ID NO: 305992 - protein, 107 aa, Zea mays
  unsure (1)..(107): unsure at all Xaa locations
  Clone ID: MRT4577_42128C.1.pep
PDGKXQDAESNILLASIENMQYVVTINVLHEVFSALGFVQKRAIFEKNGFHALIQYTDIETAYALGDALEWHIIYEGGYCKXLHITYLRHTELNVNANNERGRDYTM

SEQ ID NO: 305993 - protein, 85 aa, Zea mays
  Clone ID: MRT4577_42129C.1.pep
QQEPLASKHYDLNGLTHNQVTHHAHILFTDNKSPLPIGCINYNLPRTYNHYRVTNNQYPKPNLSNHFLNPIHTAYRRLNNQTLRQ

SEQ ID NO: 305994 - protein, 85 aa, Zea mays
  Clone ID: MRT4577_4212C.1.pep
MGRGKFKGKPTGRRNFSTLEEIGNDAPAHPMVPFIGRIRFHIWSVPRCWYFRSPSHLYEDRQLKKRIDLFMGEVLKMALVKEMSC

SEQ ID NO: 305995 - protein, 145 aa, Zea mays
  unsure (1)..(145): unsure at all Xaa locations
  Clone ID: MRT4577_42130C.1.pep
TRILDVVYDASYNELAXTQTLVKSAIVPTDAAPFKEXYLTLYGDDIGTKNMTPAAKKDNAEVLEADAACDETKKSNHVTRKLDKRKEGRSLDPHIDELFGRARLLACLSSRPVQCGRADEYILEATELAFYMNELQRYNGHSAVA

SEQ ID NO: 305996 - protein, 377 aa, Zea mays
  unsure (1)..(377): unsure at all Xaa locations
  Clone ID: MRT4577_42131C.1.pep
MAEREVVEGGTTTGGGLWRRYAPHVQMVLAQLCYTLMYFITEAAFNQGLNPYVYITYRHLLVAVLIWPFAYYLEKGLRPKMTLMLFVEIFVLSLLGVSLTLNMYFTSLKYTSPTFVTSVVNTIASMTFVIAIILRMEIVDVKSLRGVAKVAGTVVSFAGVTTMTLYKGAAITSLWKSPVQXSPAAAAAAEASXDSWVKGSVLAVASCVCWSIWYIMQASSLKRYPAQLSLTAWMCTVGGIQSTVFTLFMQHEPEEWRIGFGVKFWSIVYSGLACNGFTVFVQLWCTEKKGPVFVTMFNPLSTIMVAILAYFIFGENLYVGSIVGGGVVILGLYMLLWGKEKDQERGTGKEREQLETDCEKQAKKVSDCVYEAPKTTK

SEQ ID NO: 305997 - protein, 157 aa, Zea mays
  Clone ID: MRT4577_42132C.1.pep
RGGRFGSSYKVVVPGGAALAVKRVRDAAVDEEEFRRRMERVGLAKHPAVLPPLAFYCAMQEKLLVYEFQSNGSLTKLLHGSIESSQAPLDWPARLHIAAKVADGMAFMHTTLRGDGGTTNSSSGGPIAHGNLKASNVLFTAGMDPCISEYGVTVPGR

SEQ ID NO: 305998 - protein, 93 aa, Zea mays
  Clone ID: MRT4577_42133C.1.pep
RPSLPDWRMEIVDVKSLRGVAKVAGTVVSFAGVTTMTLYKGAAITSLWKSPVQIAGSGSGGGGVAHDSWVKGSVLAVASCVCWSIWYIMQVFN

SEQ ID NO: 305999 - protein, 46 aa, Zea mays
  Clone ID: MRT4577_42134C.1.pep
GDPEIGMPLTIHESMLVSTSLLIGRVINANHYLQALCIFEYLNVNP

SEQ ID NO: 306000 - protein, 134 aa, Zea mays
  Clone ID: MRT4577_42135C.1.pep
RSRESRQICLFCTEKQQCSTLQAGILASAPKPPTRQHDSVSRQQHCQQWRQGFVQRIPFCPSKIQVSSSLSASRLRALSDASIVFTKLSSERGSPPVVVSAIVIMSSLCLYTIVPSDVFRHYQDQEISGQGHYH

SEQ ID NO: 306001 - protein, 400 aa, Zea mays
  unsure (1)..(400): unsure at all Xaa locations
  Clone ID: MRT4577_42136C.1.pep
MASVTDSFVADLDELLEYRTEKXPGDENAETENLEDDANDSVPDLKSLDLDXVSKXQKAQWYKDIMKMHLKGDSNQGAILQDQXYQLVVDCNASSVDIDNEITIIHNFIRDKFKLKDPLLESCVHYPIDYARVVWKIGNDMDLTLDLXSYLPSADMITMAETTTGGEPLSEDNLVNTIEASDRALNLDAXKKMILEFLKGRMGYVARNLAAIVGSAVASKPSRAAXGGLGALAKMPACNVLXLLLGAKKTNLSGFSTASVQSRIGYLEQTEVLFESTPPSLRFQSSRLIAAKSTLATRIDXKAIFSSLLILISYFNLHSINSAFYSTKQCFTCSYARSAGYSLRDDPTRTVVQNLLEEISKKIENWQQLPPARLPKPIPIPDFMPKKKRGXCWLRKMKER

SEQ ID NO: 306002 - protein, 107 aa, Zea mays
  unsure (1)..(107): unsure at all Xaa locations
  Clone ID: MRT4577_42137C.1.pep
MAASDVASRCYHHGVGWGTDDHMAHDVFNNYREDRQYKIVLDRLTQTSLGLGFMTXPTVEAMLNGIHGMNANALDCRNMTGHDDQSRGGLRGRSGRFGGGHGLGCYG

SEQ ID NO: 306003 - protein, 79 aa, Zea mays
  Clone ID: MRT4577_42138C.1.pep
TLHTPAPPPHHQLASSFSLGLDDHRHLRSLVVSVPPCAEGAPAGPASRQHQRGHEAAHARPPHLCPCRLGSYRCMHRSS

SEQ ID NO: 306004 - protein, 67 aa, Zea mays
  Clone ID: MRT4577_42139C.1.pep
SIWLCVLGFGPSFKMGSGSVCYVSWVSMGLGRDRVSMMSLRYIWFYMFCYFLCIICFLIYMFMHCMI

SEQ ID NO: 306005 - protein, 64 aa, Zea mays
  Clone ID: MRT4577_4213C.1.pep
MGRGKFKGKPTGRRSFSTPEEIDMQLKKRIDLFYGRSVEDGFGEGNVLLASSKWRHHNPYKLVP

SEQ ID NO: 306006 - protein, 158 aa, Zea mays
  Clone ID: MRT4577_42140C.1.pep
LVESLRDRAVRHIACGSNFTSAICQHKWVSGAEQSQCASCRQPFGFTRKRHNCHNCGLVHCNACTSHKVLRAALAPNPAKPYRVCDSCFMKLNSAAYSSTINKKKEVVPRHSGESNHDAKLARAIVPSNLDMIRSLDSKAAKQGKKTDALAFLRTPQM

SEQ ID NO: 306007 - protein, 76 aa, Zea mays
  Clone ID: MRT4577_42141C.1.pep
ALSNPSSHASRENFFTTFPDEFKIPIGAALLALSKFDRSTAIKVRDKLPEFTLPDAVEKEQSSAELLSRGPLVIAF

SEQ ID NO: 306008 - protein, 97 aa, Zea mays
  Clone ID: MRT4577_42142C.1.pep
QIHAFLRIMLLFIHFLISSNSTLLFIYSPPYTADSPVANFLNQPCNLIRMFVTTLRVVWVTKFCPSQILIGYTWLTCSSLSSPVRFLALAGSPKTKI

SEQ ID NO: 306009 - protein, 95 aa, Zea mays
  Clone ID: MRT4577_42143C.1.pep
LSLATPALLTATASRSSCLQSLLCCCTCKSATAHTERATTVSRAYLDQKLALANRCSQEATFGAAKAAAVATIASAIPTLTSPRMLPWPKAIMIP

SEQ ID NO: 306010 - protein, 114 aa, Zea mays
  Clone ID: MRT4577_42144C.1.pep
IGEQQFNFFFRWQFGEIQRVKTPSLKWRALTLTGWFPTNLLKTGFLAPAKGGEHVPPRPPLILRSFPEKAQQQNKLCPPFLFGGFLFTSLKDWALNHYVKEPVGFWFGVGNGAI

SEQ ID NO: 306011 - protein, 642 aa, Zea mays
  unsure (1)..(642): unsure at all Xaa locations
  Clone ID: MRT4577_42145C.1.pep
IKITLLLGSDGVDSLGDMIFGMEVVETSVSKVILFWFRSDTXAAEIKWGGAKHDPSDEDDSRRMHPRLSFKAFLEVVKMKSLPWSDYEMDAIHSLQLILTGTLNLALKQHQSSGXNNQIGDLKLDGLAALQEMRRGALRFMETRNVLSLMNGDIRHLREAGXCQPSSSLLNSLLLLQQHDNEAVTANKCQMLPSSLRVHSESDGGSRRMGNAAACRITECIRNKIXCMVVSQAGHDHVHGKTLXTSALFCLKLVMDKFTRVEGDYRAIIHNPNPLIPPIFGADQFGWCSEWNAAMTKLTGWHRDEVIDRMLLGEVFDSSNASCLLKSKDAFVRLCIIINSALAGEEAEKAPIGFFDRDGKYIECLLSVNRKVNADGVVTGVFCFIHVPSDDLQHALHVQQASEQTALRRLKAFSYMRHAIDKPLSGMLYSRETLKGTGLDEEQMRQVRVADNCHRQLNKILADLDQDNITDKSSCLDLDMAEFVLQDVVVSAVSQVLIGCQGKGIRVACNLPERSMKQKVYGDGIRLQQILSDFLFVSVKFSPAGGSVDISSKLTKNSIGENLHLIDFELRIKHQGAGVPAEILSQMYGEDNREQSEEGLSLLVSRNLLRLMNGDIRHLREAGMSTFILTAELAAAPSAAGH

SEQ ID NO: 306012 - protein, 94 aa, Zea mays
  Clone ID: MRT4577_42146C.1.pep
MTIDRSQATLNPYDNEKKMQFSYDNENLAEIDNYWIMISQNHWLNKAWVPKICGADAKSVEPLVEPMPNSSQSGGMRNRQNRAPSAFWTPTIDT

SEQ ID NO: 306013 - protein, 325 aa, Zea mays
  Clone ID: MRT4577_42147C.1.pep
SSNASCLLKSKDAFVRLCIIINSALAGEEAEKAPIGFFDRDGKYIECLLSVNRKVNADGVVTGVFCFIHVPSDDLQHALHVQQASEQTALRRLKAFSYMRHAIDKPLSGMLYSRETLKGTGLDEEQMRQVRVADNCHRQLNKILADLDQDNITDKSSCLDLDMAEFVLQDVVVSAVSQVLIGCQGKGIRVACNLPERSMKQKVYGDGIRLQQILSDFLFVSVKFSPAGGSVDISSKLTKNSIGENLHLIDFELRIKHQGAGVPAEILSQMYGEDNREQSEEGLSLLVSRNLLRLMNGDIRHLREAGMSTFILTAELAAAPSAAGH

SEQ ID NO: 306014 - protein, 116 aa, Zea mays
  Clone ID: MRT4577_42148C.1.pep
PLGPLKDPPCFFGFPPPSKHLKPFVQVGGGHGFSLTPSPGCSWWGPLYCTAFFFPFFSQILKWPRGGTKILGGEWFFHGPMDPCFCFPWGLKKPRKTPKKPPRGGALRGDELFKGV

SEQ ID NO: 306015 - protein, 82 aa, Zea mays
  unsure (1)..(82): unsure at all Xaa locations
  Clone ID: MRT4577_42149C.1.pep
LQDHLEQKKYCCSLLAVRTLFCCMPLMMLLVTXNHTSICRVLSCVLNVFVCKLGILDHVCQLYELASSYFAPRRDGVLFIFY

SEQ ID NO: 306016 - protein, 47 aa, Zea mays
  Clone ID: MRT4577_4214C.1.pep
MGRGKFKGKPTGRRSFSTPEEIGNDAPARPMVPFIGRIRFHIWSVPR

SEQ ID NO: 306017 - protein, 90 aa, Zea mays
  Clone ID: MRT4577_42150C.1.pep
GRDNLFDLLYKALHNANADALGQQSFIRPPKADLQPDLGSNYARKTRPMPNSEPSDHPHFCPQELVLNRPLLVKEPSNDSKGTQQNLFEN

SEQ ID NO: 306018 - protein, 53 aa, Zea mays
  Clone ID: MRT4577_42151C.1.pep
LAFSQTSLLIFLAMLVSQSCICRSLPCNYTVLLFLPWNIHCPCFGKKKKNLII

SEQ ID NO: 306019 - protein, 62 aa, Zea mays
  Clone ID: MRT4577_42152C.1.pep
PRTYMSAANMGHQLFYKGHASICRRYSVENMTESEASTSPVLAISAFDMHRARWEGEGARRL

SEQ ID NO: 306020 - protein, 83 aa, Zea mays
  unsure (1)..(83): unsure at all Xaa locations
  Clone ID: MRT4577_42153C.1.pep
MDLDIADAQTQRSNAVWKNLKITAMSLSQELAQQLPLDMEPTVASRLKGDYRTAKRINMKNVIPYIASHFXTDKIWLHPTHPN

SEQ ID NO: 306021 - protein, 203 aa, Zea mays
  Clone ID: MRT4577_42154C.1.pep
WYLEAARRRSGLPFANPSRCLLHPRRRLRRRWQNPTAMATKSHENKKPTASKPSVNPKSPSSDKKSKPPKPTEEQREQVPAVKKPKKQKVRDEIDEIFSAAKAGKKRKPPQREEAETHGDGRKKPKERAGGSSSKKKNNKASGSKGKGRVAAADDDEEEEFEEKRPRRRTADGLAIYSADELGFGKADAGGTPMCPFDCECCF

SEQ ID NO: 306022 - protein, 70 aa, Zea mays
  Clone ID: MRT4577_42155C.1.pep
MAVEAQSGGLLAATDLVQPGPFPTAMARGPGDNGFDPLGLSDPEGTGGSSEPKRLAHGEVNKRPIPHAGR

SEQ ID NO: 306023 - protein, 139 aa, Zea mays
  unsure (1)..(139): unsure at all Xaa locations
  Clone ID: MRT4577_42156C.1.pep
MRVATPTTRLATASLAIGAAMAMVGHVLGXVKENTAAANSAESDELGRFTVDEHNKRENALLEFVRVVEVKEXVVAGTLHHLTLEAIKTGKKKIYAAKVWVKPXLDFKNLQEFIHKGEVTTGTNADLSVRAKKGYLSRL

SEQ ID NO: 306024 - protein, 106 aa, Zea mays
  unsure (1)..(106): unsure at all Xaa locations
  Clone ID: MRT4577_42157C.1.pep
MGVRVPGRESKEAAKKKMCPLRVILIFLSAPVGGFFLIRGLNPEAAQXLTPTPTTWGPPGDPCPFISRVGXALKTGFWTMVDMANGRDLWGTPAGQGQPFKLGRGK

SEQ ID NO: 306025 - protein, 63 aa, Zea mays
  Clone ID: MRT4577_42158C.1.pep
HFPLRGLVTLGNFFPGLGNVNLSVSSQQRQPIIARHLNVACGGHIQRTRGVGRAMNSGPVLRA

SEQ ID NO: 306026 - protein, 120 aa, Zea mays
  unsure (1)..(120): unsure at all Xaa locations
  Clone ID: MRT4577_42159C.1.pep
PSSFLQSTHSIPLPTPRIYANAHAPXTXHIPHMLKVFPSPAAAVPTQFYVAPATPAPVVRVAEPRGVYXPVDGPACRSAGKVKEQLIGVAFQPFEEINGELALSPQSPDKCLLRHMFFDD

SEQ ID NO: 306027 - protein, 77 aa, Zea mays
  unsure (1)..(77): unsure at all Xaa locations
  Clone ID: MRT4577_4215C.1.pep
PFPVSSSPHKGVAGXDVYPPVHYPPDCYAPPEXGYPLQGYTAQYELAPQQELKSNGPSFMYGCLDGLCCCCLLYACF

SEQ ID NO: 306028 - protein, 84 aa, Zea mays
  Clone ID: MRT4577_42160C.1.pep
RALPSQCSPCNLKGGRPHGAGCTREQSKVRPREGEDGGRNKSIGASEPSGPKSFHPPSSPELYEPSDNDSYDSDRSTRYSIWNL

SEQ ID NO: 306029 - protein, 93 aa, Zea mays
  Clone ID: MRT4577_42161C.1.pep
SHEFCACETLTHDYEPRPLLEVIRERSSATSSNCCWGRGSGPPPTYGTTKSCQGTQPAIPAHPRAAAPRGSVHNQALDHLVPSADPVRSETVT

SEQ ID NO: 306030 - protein, 147 aa, Zea mays
  unsure (1)..(147): unsure at all Xaa locations
  Clone ID: MRT4577_42162C.1.pep
MSIPNEALQKLVREIESQALVAQQQIGLARTQMTSKQREQRLVKLTMNEMSTLPSDAVVYEGVGKMXYPLFSPKHALLVYPLQHLVRCLTAVVTFSRFVSLPVDSLRQKLEGQTQTLEGEVDKLSQRLLYLETTPKNSREHIEQMLP

SEQ ID NO: 306031 - protein, 135 aa, Zea mays
  unsure (1)..(135): unsure at all Xaa locations
  Clone ID: MRT4577_42163C.1.pep
RFCEARDCLITNDSRENKQGFPECLELLIVLNNHVPXKGNRFSGSFRCLHXPRPXKMRVXMLGDAHHGERPQRPGIDSMHAESLRSMSCNSTLGNTPPKRQPASLGCEAITKMIPRPLGPAITTPELSLAWRHPR

SEQ ID NO: 306032 - protein, 74 aa, Zea mays
  Clone ID: MRT4577_42164C.1.pep
YEIDVRVDLMHWETDVCIEHYVNYFLGPFGIFRTMNLFKLWDMIKLTSFLLKCWKSACCIPIRRCLKYVVMKIG

SEQ ID NO: 306033 - protein, 190 aa, Zea mays
  unsure (1)..(190): unsure at all Xaa locations
  Clone ID: MRT4577_42165C.1.pep
MSAKSILEADGKAILNYHLTRAPVIKPTPLPAQATHNPPPKLASLYFPADEDVKGILDQAEATYPWLLTPGSKFVAKPDQLIKRRGKSGLLALNKTWPEAREWIEARAGKEQRVETVDGVLRQFLVEPFVPHPQDTEYYININSVREGDWILFTHXEGGVDVXGDVDEKAEKLLIPVDPQEYPXNERLPL

SEQ ID NO: 306034 - protein, 59 aa, Zea mays
  Clone ID: MRT4577_42166C.1.pep
ARQKLLPWVLLRTATILTLRRTTPSSIQQSQVMCTLANQRSKRGILRYLINLVILARFD

SEQ ID NO: 306035 - protein, 164 aa, Zea mays
  Clone ID: MRT4577_42167C.1.pep
WAQQGSYISVFKGPAEIQPLKIVADMHHKMKEVRNYWSLRCRLWQLDNSTSYAPACQGMLYEWPVRRGNRRESNGCKVPFTRTVRIEVANVDLRTGRALASDDPVVWPTSCWADTGFPSPPARVAVETLWGVYRKSCLDRQSRKSRRAQQKPAGGDPARASRVP

SEQ ID NO: 306036 - protein, 179 aa, Zea mays
  unsure (1)..(179): unsure at all Xaa locations
  Clone ID: MRT4577_42168C.1.pep
ATFYGGGDASGTMGGACGYGNLYSAGYXGKNTAALSTALFNNGQSCGACFEIRCTGSGSCLPGGSAVVTATNFCPPNYALPNNDGGWCNPPQPHFDLAEPAFTQIAVAGAGVVPVQYRRVACTKQGGIRFTVNGHSYFVLLLITNVGGAGELTAVSVKGSRTGWQTMSHNWGANLQNGA

SEQ ID NO: 306037 - protein, 90 aa, Zea mays
  Clone ID: MRT4577_42169C.1.pep
MSEEKKMIVETKVTEETKLFEEKRTVDPFIAGFVESMSKTNTEKITKEILEGLSEDTDDSDSYDVESGDKDSEDRPWRPSHTVFGKSTIK

SEQ ID NO: 306038 - protein, 46 aa, Zea mays
  Clone ID: MRT4577_4216C.1.pep
LAKTTYPDAYLDTCSVGASFKGQPLLVVHILLALSQAPLSSSPTKP

SEQ ID NO: 306039 - protein, 117 aa, Zea mays
  Clone ID: MRT4577_42170C.1.pep
KGGKGQPSRPIRHKAKRGKAQGHKATNPRTPRFPPSQRCKPPTRQPQTPPPKGQLGPIHRKPGRAPRPQGNLPKFAPKGGTGQKNKPFIFFFFFFYNFFFFFFFFFFFFLFFDSLKP

SEQ ID NO: 306040 - protein, 301 aa, Zea mays
  Clone ID: MRT4577_42171C.1.pep
MATYDHAATPTPQSPGVGGVPFSSCIGDLLRFVLSSHAAAYPGDDTVAFPLSPSYCARLLNDGELFEKLEACIQQCLEEGRLPGPPAVVGIPAEEEGPEERGWKLLLPEKGAELKRMYDAVEFELHVQEPYFTQLRAGVKKVEGRLATGNYNRITQGSLLLFNKCLLLNVEAVRKYNSFSEMLKGEKISNVLPGISSIVEGVKVYRKFYAEEKENSYGVLAISVSKPTSQPYITMNNILAGLGYDGLGRLLGMAKTTGTVPDGLPPPRSALLSSCMGLVQPNFIGFLEPYTPEGYAKGWKH

SEQ ID NO: 306041 - protein, 292 aa, Zea mays
  Clone ID: MRT4577_42172C.1.pep
MPRKHAPAFTPEAASVSSSGGAGQPHNLPVLQAKMKRDPEGYEEELRQLHRHFESSVFLFQQQAALATTSSSGGGGEVAKELGDLALFLAHVAPFYPDDLADLPDQIGGLLDTNARGLPPGLRSHLVQALVLLVNRKIVDLEDTMELFMELQVIGDRAVKKLAFSHIVHSIRRMNQKHKNESTNRKLQNVLFKFLQAEEESRAKRAFTILCDLHRRRVWFDERTTNAICDACFHPSSRIMIAAISFLLGYENAPQEDDSDASSSEDEADQNPQILLSKQDVYKANHKGTSAS

SEQ ID NO: 306042 - protein, 214 aa, Zea mays
  unsure (1)..(214): unsure at all Xaa locations
  Clone ID: MRT4577_42173C.1.pep
MQRKRRTLMVVLAISVSKPTSQPYITMNNILAGLGYDVPGISSIVEGVKVYCSRWDYLLQDLHCFHLVWVSITQMKPYITMNNILAGLGYDGLGRLLGMAKTTGTVPDGLPPPRSALLSSCMGLVQPXVGKDGGAALMGVVKIKSTLIRRSPEFETSVVIYFIVVLXSSDSSKNQAASETIESLLRVCCWMNVHLTQPYGPVFEIRVHEGYGAR

SEQ ID NO: 306043 - protein, 211 aa, Zea mays
  unsure (1)..(211): unsure at all Xaa locations
  Clone ID: MRT4577_42174C.1.pep
LLLNVEAVRKYNSFSEXAEGEKISNVLPGISSIVEGVKVYRKFYAEEKENSYGVLAISVSKPTSQPYITMNNILAGLGYDGLGRLLGMAKTTGTVPDGLPPPRSALLSSCMGLVQPXVGKDGGAALMGVVKIKSTLIRRSPEFETSVVIYFIVVLXSSDSSKNQAASETIESLLRVCCWMNVHLTQPYGPVFEIRVHEGYGARWSQDGSKV

SEQ ID NO: 306044 - protein, 82 aa, Zea mays
  Clone ID: MRT4577_42175C.1.pep
SYLVHNGLAKTWHCKFEQKLLKNNIANDFMLTIFFSPRGSHWDLNTHKKKLFFFSTHKPICKASPGQIIEQRPGSRLFMNIE

SEQ ID NO: 306045 - protein, 451 aa, Zea mays
  unsure (1)..(451): unsure at all Xaa locations
  Clone ID: MRT4577_42176C.1.pep
MEAAAATTAAALLPPARKVFILPLLLLLAASSLVPRASSDGAQYDYRAYTECKPHPEPALYNGGVLRWASKITDFRTEDEGNYSPAFVLYNMSAATAYSFSCWVKIDGPESAHVKAKILTVENAASQCVGTAIARNDCWSFLKGGFTLNSTSQTSVLYLQTASPNASTISIRSPSLQPFSPDQWNQHREERIQQIRKRFVNLHVSDGNGSRVVGADVAVHQITRDFPFGSAISKSILGNRPYQDWFNARFNAAVFENELKWYATEPSPGKEEYAAADQLLRFVQSNDVTARGHNIFWEDPRYTPAWVKNLTGPQLRAAVAGRVQSLLSRYKGDFVHWDVSNEMLHFGFYEDRLGGNATADFFSTARRADPLATLFLNDFNVVEACDDLSSSADSYVSRLRQLADDAGVTFEGIGLEGHFAKPNVPYVRAVLDXLGTLRLPVWXTEVDVSAA

SEQ ID NO: 306046 - protein, 83 aa, Zea mays
  Clone ID: MRT4577_42177C.1.pep
PARWRPPFFFFFFFFLFFIFFFNIMFFICCFAFPAGSVSLTCSGHHPRLTNNYPTDKTTRGEHRLVFSQQMTNIIGFSHATLE

SEQ ID NO: 306047 - protein, 50 aa, Zea mays
  Clone ID: MRT4577_42178C.1.pep
THETLSHSLNIVYVTRSQEVYLPEIIHKSALLNLSTPRTDNILSQYNLYN

SEQ ID NO: 306048 - protein, 66 aa, Zea mays
  Clone ID: MRT4577_42179C.1.pep
IRLESRAGRFFFLIFFLTLGGFFRPNRGANEMSVYNVTIFTFHVVGLNYKTGMDTIKQPFFVHLKI

SEQ ID NO: 306049 - protein, 47 aa, Zea mays
  Clone ID: MRT4577_4217C.1.pep
MGRGKFKGKPTGRRNFSTLEEIGNDAPAHPMVPFIGRIRFHIWSVPR

SEQ ID NO: 306050 - protein, 97 aa, Zea mays
  Clone ID: MRT4577_42180C.1.pep
GWFLKGCTEDPQPPAKPKPPRTSVRSGPLLPPVRLPIPRMSTSVPQRHTWTQRVKKDDEEEDPLDQLISRSGCAASHFAVQECMAQHQDWRQCQPQV

SEQ ID NO: 306051 - protein, 187 aa, Zea mays
  unsure (1)..(187): unsure at all Xaa locations
  Clone ID: MRT4577_42181C.1.pep
MPENVASRSGAPTAGPGSRGKSAYQDRDKPAQIRFSNISAAKAVADAIRTSLGPKGMDKMIQDGKGDVTITNDGATILKQMQVLHPAARMLVELSKAQDIEAGDGTTSVVIIAGSLLDSCTKLLQKGIHPTIISESFQKALEKGXLEILTDMSRPVQLSDRETLXNSATTSLNSKVVSQYSSLLSPM

SEQ ID NO: 306052 - protein, 132 aa, Zea mays
  unsure (1)..(132): unsure at all Xaa locations
  Clone ID: MRT4577_42182C.1.pep
PPPAPPLLPRLARRPLAAXLPPXVWSCPPPATRESPLAPPSXSIXSAPPSPPPXSPVPDIPSQRXTPPSRPPLSSPPHSSPXPRXLFPGPSPAPXPHPPPPLVLRPLSRPSSSLPSSXASSPKSPHSPSLPT

SEQ ID NO: 306053 - protein, 48 aa, Zea mays
  Clone ID: MRT4577_42183C.1.pep
KCKQAISVETSEQLYDRMLLWIQPTLIGGRSKMYSLEAYNCPAIASLP

SEQ ID NO: 306054 - protein, 78 aa, Zea mays
  unsure (1)..(78): unsure at all Xaa locations
  Clone ID: MRT4577_42184C.1.pep
PYEVVVFKLFSFSIXEYPMAEVRVRFMINIYHINKLESGSICIVILKWKXSLAIQIVPVSMSIQVSVSDPNPHVPLYR

SEQ ID NO: 306055 - protein, 38 aa, Zea mays
  Clone ID: MRT4577_42185C.1.pep
VQIRPKPPILNPKSPAHCPVLCARYDQIHLAIVFSSSL

SEQ ID NO: 306056 - protein, 186 aa, Zea mays
  Clone ID: MRT4577_42186C.1.pep
MGRSGHACSVLGSLLLLLLLLPGPAAAQKGSAWKTLSGDAPAVIAKGGFSGLFPDSSDPAYSFAASNQDSAQWCDVRLTKDGVGICLPDIKMDNCTTISDLFPKGKKTYRVNGVSMTGWFSVDYNSIDLTNVTLLRAILSRTNRFDGSFTLVQVEVALSQYKAPAWLNVQHDSFYSQFNLSMRNYI

SEQ ID NO: 306057 - protein, 155 aa, Zea mays
  unsure (1)..(155): unsure at all Xaa locations
  Clone ID: MRT4577_42187C.1.pep
APALVPAVNIEGKDPGAAQQQAPAPAVVRPERRALARWRVIGSVGGGSFRSSSDGVLLXFYMPRSLTRCFTTPRHTRSPSASGCRRPSIVSDCIKRERDXGRXTVKCWSLLWDRRWRKSSRRDPGAPSSESESAIRAASAAILKAAKHSTPPANI

SEQ ID NO: 306058 - protein, 85 aa, Zea mays
  Clone ID: MRT4577_42188C.1.pep
TTKSDEGNLVPFYHTQGEIRHYRGRNKAPRLTTGCSRQPTALEELRVCMEYNCEPPRCTTAPNPAPVSLSVLMTHASPCATILTH

SEQ ID NO: 306059 - protein, 378 aa, Zea mays
  Clone ID: MRT4577_42189C.1.pep
MTLLAAITNPAADSRSGSSERAHPIVLTPGVTPPPPPSSTLPTPIPSSTWSLSPADPTLATAASYLAASLASCSSLPQLRALLTTFITTLSQSLALPTPPAALPAAIRAVAPYFPAAIASLVASKAVSLAGHDILLALAESRLLPHPPPELISSLCDNDRVDLVCVLLRQAADIRSSEILAALRCFLSPASDKAYDAMMDVKCRWKDAAVLAVNRCREKSAVKRKKADAAARHAALLLMMGHDGFTSPEVCLHYLFASGNVDSVVLGAALAELDGGEVVRLMRYLNKWIRKYWSFSEAHTCPEAVGNLRLEQCDSVPSFGAVARALGVLLDNHFSHLVLNADVREDLRAADLMVRELAAEAESSGPILDLLHRFQLDK

SEQ ID NO: 306060 - protein, 113 aa, Zea mays
  Clone ID: MRT4577_4218C.1.pep
APWCIYERGLIGTYTDWCEAFSTYPRTYDLIHGNGIFSSHIHKCGIIDILVEMDRILRPGGAVIVRDRADVVLRVKKDADRLRWHSRVVDTENGPLDPEKLLIVDNSLPLPGS

SEQ ID NO: 306061 - protein, 103 aa, Zea mays
  unsure (1)..(103): unsure at all Xaa locations
  Clone ID: MRT4577_42190C.1.pep
INHPQNPPPKKIITLYSTCIVAISTTINFQLKSPNHLTIPTLTLYNQLTSSLTVPNLPFIQSLSFHLLLQXISTTSPFTPQTLRDNPXLLIHIVISYFLTYLI

SEQ ID NO: 306062 - protein, 141 aa, Zea mays
  unsure (1)..(141): unsure at all Xaa locations
  Clone ID: MRT4577_42191C.1.pep
VGSRYPAPSLNXNRLNHRLAELTRRRQSGKPPARQHGHGRDHLSSGLASLRAPQPRFQRIARELARSSGGCDSGQVRPVGPSRAPTPLAWPSPVLRIVTRASPKRTTTARSRLAGEAWRRAMVLLAIAAAFFIALYVARLR

SEQ ID NO: 306063 - protein, 313 aa, Zea mays
  Clone ID: MRT4577_42192C.1.pep
LSLAHCPSTYRFQVKFKIDKDCRPLPESSLKQAIKENYNAKSKFDPELTTKQVQRLLLLFKPVSAPQSVSNNHLGERRHYEKRRKPRHFEERRPIEAARRPRFDEERRPAVRHVPFEDPYRAPRYAPVPVDSQHGHSLASDHHRYYQPALTPEPRQLPLVLEPRYVPPALDHHHVPELRHAPPAYYRTLAPSGDSYYRSVENLVPERYADRTMADLTTRDPIIRDHTALPGEALARADRLDDLYRSDRVEELYRSDRLVNRAVDRPHPAYFTAAYETNPAYAETSIRPVSARVNGPSAAVSSLYSFSGGPVYR

SEQ ID NO: 306064 - protein, 74 aa, Zea mays
  Clone ID: MRT4577_42193C.1.pep
FSQRYFLLTPSVFLLVGCIMYDRQMLSMSRPCCLKRNVFERTVVFPPAVVMADFSICRDYIAKRKCQCTGLFVS

SEQ ID NO: 306065 - protein, 195 aa, Zea mays
  Clone ID: MRT4577_42194C.1.pep
MVKKPNGVAKATATSADAAAQPSKENPSTPGLVKASKFKKRKVKANRAKQAVAAAAIDEVAPVGAGTGDGDASASAALPQPSDVAEALLVVQTPKSTTFAEASPVAQTQKPATDAEGLVPAPIPTTAVASASLPKPKPAQANADAAAAISASKGNGVGADNSRGDGEMKNKKERAMSDKGKEVMEEGGSKGKGKG

SEQ ID NO: 306066 - protein, 413 aa, Zea mays
  Clone ID: MRT4577_42195C.1.pep
VTRGRRLWRNGGSKGKGKGKGEVGLWVKKEERGDRKVAGFIFMCNAKTKKECYQNRLFGMPGGKIEMVKKIRPGVKLFLYDFDLKLLYGVYKAASHGGLNLVHEAFNGKFPAQVKFKIDKDCRPLPESSLKQAIKENYNAKSKFDPELTTKQVQRLLLLFKPVSAPQSVSNNHLGERRHYEKRRKPRHFEERRPIEAARRPRFDEERRPAVRHVPFEDPYRAPRYAPVPVDSQHGHSLASDHHRYYQPALTPEPRQLPLVLEPRYVPPALDHHHVPELRHAPPAYYRTLAPSGDSYYRSVENLVPERYADRTMADLTTRDPIIRDHTALPGEALARADRLDDLYRSDRVEELYRSDRLVNRAVDRPHPAYFTAAYETNPAYAETSIRPVSARVNGPSAAVSSLYSFSGGPVYR

SEQ ID NO: 306067 - protein, 62 aa, Zea mays
  Clone ID: MRT4577_42196C.1.pep
MYVVIMNILSLFLNEEEKRILDLLYNRLLFNFTNKRSWLLNVFSSMMYYANSMLLKLACNSK

SEQ ID NO: 306068 - protein, 78 aa, Zea mays
  Clone ID: MRT4577_42197C.1.pep
ADILYFTASCMYSTDAMHELLEQEMLSKHFSAAVYLSFFLCFLFPLTLIKVRRKKGGDLLHRFKPQELCTVGTRTASN

SEQ ID NO: 306069 - protein, 85 aa, Zea mays
  Clone ID: MRT4577_42198C.1.pep
DSHALRPSRLPLPACRLASYDEGGDQTIAALIAMHRPSKPTRGAERTPKAAEPATARAALSSKSRNATNRAYHRPTRIQRAPTRS

SEQ ID NO: 306070 - protein, 66 aa, Zea mays
  Clone ID: MRT4577_42199C.1.pep
RNEGSIRWNMISTIFPKVNRVWAHSVTFHSPVVLKQMCKLSVRFFFTPMCSATFFVTVYIASEIMG

SEQ ID NO: 306071 - protein, 55 aa, Zea mays
  Clone ID: MRT4577_4219C.1.pep
LVSPAFPGDSRSSIFDAKAGIALNDPFFKLVFWFATEWGFSHRVVALIPPMFKTP

SEQ ID NO: 306072 - protein, 136 aa, Zea mays
  Clone ID: MRT4577_421C.1.pep
YTFILFNLKKTKKRNKPNNKFEGDGGPGGRKKGPRGGKGRKSKRDPKGGAGETGKGRGNRPPKNRHGAQPKETGAPPRNPGRGGQAGNPGPGPGGGPLGPKGGRGEAGGKQGQSRNRGKMGPGNKTTKTRSGKQKG

SEQ ID NO: 306073 - protein, 68 aa, Zea mays
  unsure (1)..(68): unsure at all Xaa locations
  Clone ID: MRT4577_42200C.1.pep
RATPYGEVISKKGXAPSMGRLTWYDAGTKDMETKTGGANGAMSHEEEDTXGEKAGXKNAKEHLEPIKA

SEQ ID NO: 306074 - protein, 81 aa, Zea mays
  Clone ID: MRT4577_42201C.1.pep
GFPLLFNVFVPPSSYVFPHLDSCSSITLCTDSPLRTYTSSNLVMYPTSQASSSTLLFKAEHLSHILSIDASQSINNQHKKK

SEQ ID NO: 306075 - protein, 80 aa, Zea mays
  Clone ID: MRT4577_42202C.1.pep
INRLVFFQTIKQCVSLCRLVQDTRPVSCSTFKVCLENQAVMLSVVTSCCGYICLFDSMNSNKAISFVWTHNLTLIAPPSV

SEQ ID NO: 306076 - protein, 94 aa, Zea mays
  Clone ID: MRT4577_42203C.1.pep
TLDFLTFGDKGGKTIFYGPPHYQLSPLRSPPFFPPQGFFFMSNMFLLGDYMGSSPPYIFYQPPGRFFFHKEGGGEQNEMGEKRNEILPRKNRIM

SEQ ID NO: 306077 - protein, 40 aa, Zea mays
  Clone ID: MRT4577_42204C.1.pep
DCCCFSFLPLPLLKPNQICSFLYMRAYNGSQNHSFDALLT

SEQ ID NO: 306078 - protein, 133 aa, Zea mays
  Clone ID: MRT4577_42205C.1.pep
RGPNVTPFCRTLQGCRTVLGPDILYGGSTASHPWSAVLDGRHTVPTGLPSAPRGYTRRELTRRRGVSTLTDSALVSNCSKLSPSCERSVPTHVLLTELGRPPTLLRFHRCWLVRRVPFLPVQVTPRLLGDYPR

SEQ ID NO: 306079 - protein, 142 aa, Zea mays
  Clone ID: MRT4577_42206C.1.pep
MSKLQRSSVSFRRQGSSGRIWDDPLRGLDLKGLSSSTTTTTTTPKAAPLHPDASLLAGDPSPRVVSRSLLMRHAGAGASSAGIIVESPEVVVASASPADAASVGVTGADGGERQERPKKLRRRISSAFCACMGHPPASHAQQ

SEQ ID NO: 306080 - protein, 61 aa, Zea mays
  Clone ID: MRT4577_42207C.1.pep
HVKFDIVPVLRVHYRHSSSTKGNGVELKGQCSHVNAIQYLDCGIHATPLTKRMERLFSRTG

SEQ ID NO: 306081 - protein, 45 aa, Zea mays
  Clone ID: MRT4577_42208C.1.pep
LKKHAMVRKSQDLYLAEAVLGPSHIDECCFPLSDVLATVSLDERC

SEQ ID NO: 306082 - protein, 41 aa, Zea mays
  Clone ID: MRT4577_42209C.1.pep
SRSRTSVRVGRERPSFLWFIFVQIRSVPDLGSAHKVRRSRL

SEQ ID NO: 306083 - protein, 137 aa, Zea mays
  Clone ID: MRT4577_4220C.1.pep
MTGASLDLEFIVVDKISIKVSIITLLLKSIMWFVFERIRFFYHTIGFLLQHDELQRDDCNVTNCRGKMKGVDRSGHRLRRRRRTLAGQSTEARPRGLLGQPPTAAVDRGVLAPANSSVGGGFARPANRGTRRMRSSR

SEQ ID NO: 306084 - protein, 49 aa, Zea mays
  Clone ID: MRT4577_42210C.1.pep
NANSNGSMHVHPCFPSKCQTCRQCISLPEYLYPILRCRNKKKKTVVGTI

SEQ ID NO: 306085 - protein, 202 aa, Zea mays
  Clone ID: MRT4577_42211C.1.pep
MVRYEPGYAFEELNPVQWRCSGTPRVLIPVANGSEEMEVLVTVDVLRRAKADVVVASAEEVVVARHGTRIVADALLQDAAGQQFDLIVVPGGMPGVKTTLADKVELMALLKEHAAAGRAYGAIGAATAQVLEPHGLIRGSMKATTCASRADRPSECGSRVVVDGNLATSGSTGTAMEFALAVVEKLLGPEAAREVAEALLFV

SEQ ID NO: 306086 - protein, 168 aa, Zea mays
  Clone ID: MRT4577_42212C.1.pep
MSMSSPTVQVSSSSSSIIATTAVGSHVLKIDGYSRTKGLATGIHLKSCSFRVGGHSWHLAYLPNGDCAQTADYISLYLVLEDAPANRTPALAQLSVGLLDRAGKPVPSLTKTLPVNRFNAPGSYWGFNTFIRREALEKSRHLKDDSFCVRCDVCVVTQFRAEDAAARA

SEQ ID NO: 306087 - protein, 157 aa, Zea mays
  Clone ID: MRT4577_42213C.1.pep
CCYQDPAWRKSGAAMESCSSSVMTAFVLLMEAWRVGQNMSAGHTDSIDAPSSSRGSRSGRSSRCRAGDWRGRRWEHGLDQRRRWVVGARAGRESATGARAGWTRGGSGLDRATVDWTGRRSAGAQDGHATAAVSRSGRAKEQDGHAAAVSRSARTRG

SEQ ID NO: 306088 - protein, 64 aa, Zea mays
  Clone ID: MRT4577_42214C.1.pep
LMAHSQWKDHMFPLSHDICPLLSVSLPWPSTLPLKALHSALSTGECLLYDCNLYWWRITILNRA

SEQ ID NO: 306089 - protein, 65 aa, Zea mays
  Clone ID: MRT4577_42215C.1.pep
SVFFGLSCQASLLKGETQNKINNFQQIKGSGTPELPIQIFFFQLETRAKPHSLREGGLNGGGDSY

SEQ ID NO: 306090 - protein, 58 aa, Zea mays
  unsure (1)..(58): unsure at all Xaa locations
  Clone ID: MRT4577_42216C.1.pep
PDISLFFPEQNLCGGKSLRLITQXRGRGGAFHLSHHHRGLRLAVANKAPLARGLGSQK

SEQ ID NO: 306091 - protein, 189 aa, Zea mays
  unsure (1)..(189): unsure at all Xaa locations
  Clone ID: MRT4577_42218C.1.pep
MGLGGMRGGIGGGGAGSGERWRWILFLSLVSVSFLLSFLFLFLPAYSSXHASASLGSPPPAPPXVRRGPDALPCLAYLLIGARGDGHRLLRLLLAVYHPRNRYILHLSADASHEERRDLAAGVAAAAPAAVSFDNVALVGTPTAGTPXGSSGLAGTLRAAAVLLRLHPDWDWFLTLNAADYPLVTQERF

SEQ ID NO: 306092 - protein, 255 aa, Zea mays
  unsure (1)..(255): unsure at all Xaa locations
  Clone ID: MRT4577_42219C.1.pep
LEAGRAGISPPFPHSASTALLPPPTTTTQKPHTXPESLKASRTSSREATRLTPPRSAPRSPRRSPRSTSDRRSTLRPPRPSTVNDMSSTTSTECSRSRTTRSCPPSTSSRRLLLSSGSTRRTCSPSTRPSSTSSEPPSRTSNTLARLSDRPPTSAPTSASTSTTTSTRPSNRSSSVKPSSPPPSTTPRPSTRRSTTPRSSTRRPPSRPSRTLTSSSSRPRRSPTATRTATTSTRSSRAPPRSAXTTTTPPPPXTA

SEQ ID NO: 306093 - protein, 55 aa, Zea mays
  Clone ID: MRT4577_4221C.1.pep
ICTSIEKPAAADWTGNYTSPGAEIVKLELHLKKQSTAGARLSEFLPVVYPSWSFI

SEQ ID NO: 306094 - protein, 73 aa, Zea mays
  Clone ID: MRT4577_42220C.1.pep
MSKLQSESVKDAISQIGGDAKEKNRKVTETGELQIGLKNYYPQKGKPFNGSGKVAHIPRPKNKGCIPGDSQHC

SEQ ID NO: 306095 - protein, 53 aa, Zea mays
  Clone ID: MRT4577_42221C.1.pep
VCGIAHTHTSYINSEKRNFEMPLTKRNIDYRSAHPNDASSLSYSFSDNRKTRG

SEQ ID NO: 306096 - protein, 117 aa, Zea mays
  unsure (1)..(117): unsure at all Xaa locations
  Clone ID: MRT4577_42222C.1.pep
LRFRPRVRPRVRARVRPRVRADLQKAVEKEYEMALQDRVMEETKEKKNAVEAYVYDMLIRIXDKYSDFVTPFGHGRFDRITFFLFKNLIIYLFCRFKGSKLFLFFFLYIYFINFFFI

SEQ ID NO: 306097 - protein, 91 aa, Zea mays
  unsure (1)..(91): unsure at all Xaa locations
  Clone ID: MRT4577_42223C.1.pep
FSARDNGIGTAKVGPVGDDVLRVAPFSTAGCFCYIGATAGTGXKDVHAGDEVXLKRGTSMSKHLTEYGTASNRDDTEKTRYYIPHNESCAV

SEQ ID NO: 306098 - protein, 249 aa, Zea mays
  unsure (1)..(249): unsure at all Xaa locations
  Clone ID: MRT4577_42225C.1.pep
MRAARQLVNVVMRTGTTYSVSRIKPEKKLFYASVEEARTAAPPMKKIPAMSRMPKPNLRLEAYRLDDMRLDFLPLYGRGGDSSSSSEILSVDSAGHTILCDASSGCVQPAPSLGEPKGDSPISFTIARVGAPAPAAVALYVMDRFPTGRSSCSFESLAYGENNCWEWSRLPPPPYVNDPAYDCTAIHSYTLLNAGSTICISSSGRSPIGTYCFDTASRKWXSRAGRWALPFYXRAEHVPELGNLWXGMA

SEQ ID NO: 306099 - protein, 129 aa, Zea mays
  Clone ID: MRT4577_42226C.1.pep
MRAARQFVNVVMRTGTTYSVSRIKPEEKLFYASVEEARAAAAPKKKIPALSRMPAPKLRLEAYGLDDMRLDFLPLYGRGGGGGGGDSSSGILSVDSAGHTILCDASSGCVQPAPSLGEPKGDSPISFTI

SEQ ID NO: 306100 - protein, 57 aa, Zea mays
  Clone ID: MRT4577_42227C.1.pep
HPLFFNWPYFKKGPHLKTPFQHINKLNGQFNPPFNRALKAMGGGVTPFLTVSHSKCL

SEQ ID NO: 306101 - protein, 107 aa, Zea mays
  Clone ID: MRT4577_42228C.1.pep
VDAGGQAFQFYSEGVFTGDCGTDLDHGVAAVGYGVGDDGTPYWIVKNSWGTSWGEGGYIRMQRGAGNGGLCGIAMEASFPIKTSPNPADPPRKPRRALIARDTSSSQ

SEQ ID NO: 306102 - protein, 75 aa, Zea mays
  Clone ID: MRT4577_42229C.1.pep
PRVRQRLDAMPRGIFVNKGSSASLVASCNSSATGKLSAKILVAPSSSQVGAKTSRTAQVTPKRAAGPTSVNNVSH

SEQ ID NO: 306103 - protein, 49 aa, Zea mays
  Clone ID: MRT4577_4222C.1.pep
LPRASCLFDSSEQAYISSLALLKMLKHARPGVPMKAMGLLLAQPVQPTP

SEQ ID NO: 306104 - protein, 199 aa, Zea mays
  unsure (1)..(199): unsure at all Xaa locations
  Clone ID: MRT4577_42230C.1.pep
SQLXYWVSSXESKSSHPMATALVEYAQSKSIQPEPTSVTDFRIYPGEGISGAINGRQIFIGNTRIMARSSCYAAGAGPEMEGQQGASIGHVIVDGDHVAAFSLTDDCRTGAAEAIRELRSMGIRSVMLTGDSKAAASRAQRQLGGALEEVHSELLPADKVALVGDLKARAGPTLMVGDGMNDAPALATADVGVAMGLSG

SEQ ID NO: 306105 - protein, 153 aa, Zea mays
  Clone ID: MRT4577_42231C.1.pep
PPLPTQFFFFFLPLLPFSPGGAPPPFFPHSSHHSLFQKIPPNFNSPFFHSSSLQKPFPPTFFRSLPLPFQHPFPFFHHPSLLILFLQKFPAQHLQHRFFPPFNQLFPPTLPFYLQQHHFFPFIHLPGLTPFFYFQPQHFLPFTQFFGTPFPFF

SEQ ID NO: 306106 - protein, 103 aa, Zea mays
  Clone ID: MRT4577_42232C.1.pep
CSQRLASHDEFSVFEFEDFDEEKETLLPKLKFPSKVKKANSASRAMKGRCIDQNAVRLMRSMTSTRRKGLIDCIAQQTAKHESNRCPASDPLDKKKRKLVLQY

SEQ ID NO: 306107 - protein, 111 aa, Zea mays
  Clone ID: MRT4577_42233C.1.pep
AVVTTQSTFFFFFFFFLFFFFFFFFLKKTFWFFCSPSQISFYCFKEKTTGGFSPPWQSPSFPPPGEGPPGLQPQGGGTYPPRAPGGLKGAAPRNRAGFPPPGFSESGGGGL

SEQ ID NO: 306108 - protein, 84 aa, Zea mays
  unsure (1)..(84): unsure at all Xaa locations
  Clone ID: MRT4577_42234C.1.pep
SKVEEGEGPELVVMLVRKNKGNGGNEEPKRCREKKSIHGQKKRRSGFPSRQLKKLRRVRRNGSSEKAHCSRXXLRHLGHLCPGI

SEQ ID NO: 306109 - protein, 72 aa, Zea mays
  unsure (1)..(72): unsure at all Xaa locations
  Clone ID: MRT4577_42235C.1.pep
PNGKLSPTICVTKGPLVHPAFXKGFALPVIKSITWGFPPIAPCHGGPPEIIVDGVFGLPLLLRIKMPARSPV

SEQ ID NO: 306110 - protein, 77 aa, Zea mays
  Clone ID: MRT4577_42236C.1.pep
DFHKHNREEKLVDLRAEYLSLPDLKRTSFDFKEPLPALPLGKTISLLLHRHCLYRLWTVVVGGGDERGQVEVETTPA

SEQ ID NO: 306111 - protein, 72 aa, Zea mays
  Clone ID: MRT4577_42237C.1.pep
ASAASTPLPLRQRRKAQAAAMGRVDRPGKAIARRASYGDTPTWLRPRPRVRHDPGARGQASRGALLRTGVSP

SEQ ID NO: 306112 - protein, 102 aa, Zea mays
  Clone ID: MRT4577_42238C.1.pep
MSRRKTNEPKEDIVTLGPTAREGKNVFAVSHIFAYFNDTLIHITDLTRRETLVRITCGMNVKADRHESSLYAAILAAQDEEHGCNELVITALHIKLRATGGN

SEQ ID NO: 306113 - protein, 91 aa, Zea mays
  Clone ID: MRT4577_42239C.1.pep
RNKRCWPQRWKQMSPFQGVQRRTKLPFLLKGWALAGPRSWKGFLGATKKSSWPPTTFWVPSPSLPTMTGSEGPPYEGGFDPSIMRTKAVGP

SEQ ID NO: 306114 - protein, 41 aa, Zea mays
  Clone ID: MRT4577_4223C.1.pep
MVQKDALRQCSAFSDEARTQRDALWQCSAFSDEAPTWIDNR

SEQ ID NO: 306115 - protein, 108 aa, Zea mays
  Clone ID: MRT4577_42240C.1.pep
PCATPPPPRFRAFASSRASPPPSSPSQTGSIASAAAAACEHVAEKPATCTADELHYAPVPGTEWRLALWRYLPPPEAPKRNHPLMLLSGVATNAIGFDLSPGVSEAVS

SEQ ID NO: 306116 - protein, 200 aa, Zea mays
  Clone ID: MRT4577_42241C.1.pep
MWLPHASDLRAFLAAAAVAHLSSSRASRASPCATPPPPRFRAFASSRASPPPSSPSQTGSIASAAAAACEHVAEKPATCTADELHYAPVPGTEWRLALWRYLPPPEAPKRNHPLMLLSGVATNAIGFDLSPGASFARHMSMQGFDTWIVEVRGAGLSMRESELAATNTKSDITPDPNFDESSTTKAVLLFLLSMSSSQLF

SEQ ID NO: 306117 - protein, 90 aa, Zea mays
  Clone ID: MRT4577_42242C.1.pep
FCRKILHGAMQVVFKKNKLNYLNKAASAAPGASVSRVRRSVVRARRGRASAWAPVGACLGVAAWLLSSWTARGACCAARAPWFPGDGVGR

SEQ ID NO: 306118 - protein, 107 aa, Zea mays
  unsure (1)..(107): unsure at all Xaa locations
  Clone ID: MRT4577_42243C.1.pep
GRARILHLFLPSLIFYIITTILXQTSAPPSGAEASIIPVNVSAPNAFIFCLLPFSTGSSINMATAPSFPNSILHLQFGSSFLAFNISGLSTTLNILCNFLVSVFFIL

SEQ ID NO: 306119 - protein, 65 aa, Zea mays
  Clone ID: MRT4577_42244C.1.pep
SRKREAQLHTGNKIPVVALALSNKKRTLNMLRYYIERVTANTHEPSPLGITSLFLDISYHILGER

SEQ ID NO: 306120 - protein, 47 aa, Zea mays
  Clone ID: MRT4577_42245C.1.pep
SFLVIIYRHFQIERAKCSQCKLDCCKLVKHIKPLPLEKREDYIRKVA

SEQ ID NO: 306121 - protein, 46 aa, Zea mays
  Clone ID: MRT4577_42246C.1.pep
MSLCRSCLTTVTERGDKAHESLHQTVNPPMRGTYAHFLRDCAYIAS

SEQ ID NO: 306122 - protein, 55 aa, Zea mays
  Clone ID: MRT4577_42247C.1.pep
AHFCLLISVHWLIESTCVITISFPLISRWSLILRLNIPIYILSICRRRPLAIEID

SEQ ID NO: 306123 - protein, 65 aa, Zea mays
  Clone ID: MRT4577_42248C.1.pep
VQPNVDEFLVGGASFKPEFVEIIKFATVKFLFAKCFYFQSTWKLVGIKAVYFLKLLPFYHLVLVF

SEQ ID NO: 306124 - protein, 155 aa, Zea mays
  Clone ID: MRT4577_42249C.1.pep
VAYAHVVGNPGCLTSELGCFTTVPASLRGWAHPANRFLCDWFSANPLPFPPRRLLLMCSMPTCGRPETRGLEYRRCPVCGIARYCSRSCQSLHWRMGHTRECVPTHQWLMEAIANHAVVNADDGANAAAMPAVNNNSATHHNNLGGAAADAPAPK

SEQ ID NO: 306125 - protein, 61 aa, Zea mays
  unsure (1)..(61): unsure at all Xaa locations
  Clone ID: MRT4577_4224C.1.pep
MGAAGSSTAAAAAAVLVVVLVSLAAAADMSVVSYGERXDEEARRMYAEWMAAXGRTYNAVG

SEQ ID NO: 306126 - protein, 103 aa, Zea mays
  unsure (1)..(103): unsure at all Xaa locations
  Clone ID: MRT4577_42250C.1.pep
PSAAWCPIHFFRNPNPSRRGPPXPGYYMSNPMGSKMLQLFNYRMRLTIHDGRXIVGAFMAFDRHMNLGPRDSDESCAPRRLICLRHYACTLGKRHALSLIPSA

SEQ ID NO: 306127 - protein, 89 aa, Zea mays
  Clone ID: MRT4577_42251C.1.pep
ILNGGMVDKDLVGVSLGVIRCLVVGTDKTKTLLAVEELDDSGLARMVRCRHCSEIRKIKKKVQLHKKNRNVQLKTDKWAKRKEHRRSQV

SEQ ID NO: 306128 - protein, 83 aa, Zea mays
  Clone ID: MRT4577_42252C.1.pep
SALSLRKNQINDSRLPIYYVSERAGLNKNRGLHQSSQVPPTKTCCTPAFATKNHTGLLLVAKAKRRLMHMTGDPSNKGAAPAS

SEQ ID NO: 306129 - protein, 68 aa, Zea mays
  Clone ID: MRT4577_42253C.1.pep
KKTYIEKKKHPKPCRAIKKAMKKPSFVPHPTKGGEKKKEKTPAMKKQTAKAGLTGGEGYPFPANLPNK

SEQ ID NO: 306130 - protein, 67 aa, Zea mays
  Clone ID: MRT4577_42254C.1.pep
MVASTARMVKDVNPHEFVKDYSAHLKRSGKMELPEWVDLVKTARFKELPPYDRDCQYLRPASVALKI

SEQ ID NO: 306131 - protein, 61 aa, Zea mays
  Clone ID: MRT4577_42255C.1.pep
NSQPDVCIFLSVASQIVLIVRFMLRITLIGQNMHTALFRSAMSPSQHCVILSILHFVLCLK

SEQ ID NO: 306132 - protein, 97 aa, Zea mays
  Clone ID: MRT4577_42256C.1.pep
LLGDKPPGERANNMGKGPSSTPQGAGFYKKKGGPRKHNARGDRNYMGTFVFHMQTPPPAGFCILSHDSLPVGFWGRITPKKPFPGPGDRPGGGGTSL

SEQ ID NO: 306133 - protein, 360 aa, Zea mays
  unsure (1)..(360): unsure at all Xaa locations
  Clone ID: MRT4577_42257C.1.pep
PVTHEIPAFQFKHTLPSWLLLSTTRPERRSHGGGAAGAQGALHGDVVVLLLQEGAAGSGERHDVRRLRDASLWNWTYDKAVLLLARAACAIYARIRLVFGDXAGARPAAGHATQRVVEAMRPEPAALRSNNSKXAPSEAISVIAATQGRFRESXDMSRPVNLRSGCGASPGKMLMECLSLSGSASWNDGFEDEXGRFQPHQHDQIRDAGAIQQRAGAVDDDTMTTTPPSKSGRITRKAARFGPKSTVTSLAPPSTVGGSALALHYANVVIIIEKLLRYPHLVGEEARDDLYQMLPSSLKAALRRSLKTHAKSVAIYDAFLAHDWREALEKTLAWLAPMAHDTVRWQAERNFEQQQIVMKG

SEQ ID NO: 306134 - protein, 141 aa, Zea mays
  unsure (1)..(141): unsure at all Xaa locations
  Clone ID: MRT4577_42258C.1.pep
GRGKAKKRPFLIKRAYFYWVPRKKGSFXWFRGVIKQVAXKDKDGVIELPNPCXECGQEGNAPFALIVMLQKLPHTKKGVDILFGTRVKTPFGGPKRGRVFYHVAVNHGNHRVGVFYRGEPVLVPQLRPWSAIFPPQSNPKF

SEQ ID NO: 306135 - protein, 186 aa, Zea mays
  unsure (1)..(186): unsure at all Xaa locations
  Clone ID: MRT4577_42259C.1.pep
ARAGVPKTIDNDIAVIDKSFGFDTAVEEAQRAINAAHVEAESAENGIGVVKLMGRNSXDHFKKKPRFPITLKYIDPTYMIRAVSSNASDNVYCTLLAHSALHGAMAGYTGFIVAPVNGRHAYIPFYRITEKQNKVVITDRMWARVLCSTNQPCFLSHEDVENMKHDDDEHHLHNTLLLDSPENSSK

SEQ ID NO: 306136 - protein, 59 aa, Zea mays
  Clone ID: MRT4577_4225C.1.pep
NMSCLAKIINVKVLMTRRWVQRKEISPIKDRKLLFSTSTRVFCTPKNKGWSVQKAERKW

SEQ ID NO: 306137 - protein, 34 aa, Zea mays
  Clone ID: MRT4577_42260C.1.pep
IAPPQKKKKKKKKKKKKKKKKKKKKKKKKKKKPP

SEQ ID NO: 306138 - protein, 168 aa, Zea mays
  unsure (1)..(168): unsure at all Xaa locations
  Clone ID: MRT4577_42261C.1.pep
QDHFXKKPGGGGTLXYIDPTYMIRAVRSNASDNVYCTLLAHSALHGAMAGYTGFTVAPVTGRHAYIPFYVSRRPNAVEHTASXMACSETLMGNRSLVXRITEKQNKVVITDRMWARVLCSTNQPCFLSHEDVENMKHDDDEHHHMHNTQLLEGGSSPVSKCNGSAAAV

SEQ ID NO: 306139 - protein, 89 aa, Zea mays
  Clone ID: MRT4577_42262C.1.pep
DVDDVPCGELVAHDNVAERGRVDLAICDGAGAEDTAEPAEVHGVWLRPAQADARLVARRIVARAILWLQCAERGSSLSSSGRAPAESSL

SEQ ID NO: 306140 - protein, 260 aa, Zea mays
  Clone ID: MRT4577_42263C.1.pep
RIDKSFGFDTAVEEAQRAINAAHVEAESAENGIGVVKLMGRNSGFIAMYATLASRDVDCCLIPESPFYLEGKGGLLEFVERRLKDNGHMVIVVAEGAGQDLIAKSMNSVDSQDASGNKLLLDVGLWLSQKIKDHFKKKPRFPITLKYIDPTYMIRAVSSNASDNVYCTLLAHSALHGAMAGYTGFTVAPVNGRHAYIPFYRITEKQNKVVITDRMWARVLCSTNQPCFLSHEDVENMKHDDDEHHLHNTLLLDSPENSSK

SEQ ID NO: 306141 - protein, 40 aa, Zea mays
  unsure (1)..(40): unsure at all Xaa locations
  Clone ID: MRT4577_42264C.1.pep
XGSFCPDIFAKRFLTIKGRNAKKAHSRYEMPSWSHSDNPR

SEQ ID NO: 306142 - protein, 95 aa, Zea mays
  unsure (1)..(95): unsure at all Xaa locations
  Clone ID: MRT4577_42265C.1.pep
PGIFTSGASKTKPYVIXSILKXQRGGLFIEILPQTLPNHSPKTQQLLXSTLQTLIKKPHYXHFPLIEASNXCNMHIFSKDQHIICLSFHYSKLLI

SEQ ID NO: 306143 - protein, 198 aa, Zea mays
  unsure (1)..(198): unsure at all Xaa locations
  Clone ID: MRT4577_42266C.1.pep
MVIVVXKGAGQDLIAKSMNSVDTQDASGNKLLLDVGLWLSQKIKDHFKKKPRFPITLKYIDPTYMIRAVSSNASDNVYCTLLAHSALHGAMAGYTGFTVAPVNGRHAYIPFYRITEKQNKVVITDRMWARVLCSTNQPCFLSHEDVENMKHDDDEHHLHNTLLLDSPENSSKCNGAAAAVWGGAQDLFCFFGCWRCRD

SEQ ID NO: 306144 - protein, 53 aa, Zea mays
  Clone ID: MRT4577_42267C.1.pep
MVRRTVLAALLVAAELVGGARAQLKEGFYDYFWPHAEKIVKDYVKAHMPHAPD

SEQ ID NO: 306145 - protein, 133 aa, Zea mays
  unsure (1)..(133): unsure at all Xaa locations
  Clone ID: MRT4577_42268C.1.pep
QDHFKKKPRFPITLKYIDPTYMIRAVSSNASDNVYCTLLAHSALHGAMAGYTGFTVAPVNGRHAYIPFYVSREGLALVQLSFLDIRSWILDKPFSCFXRITEKQNKVVITDRMWARVLCSTNQPCFLSHEDVE

SEQ ID NO: 306146 - protein, 569 aa, Zea mays
  unsure (1)..(569): unsure at all Xaa locations
  Clone ID: MRT4577_42269C.1.pep
MEAVGVTPAPVAAPEKKKLLDLKDPFPAAANGGAKASPARKWAMKKKLVGGDAGYVLEDVPHLTDYMPQLPTYPNPLQDNPAYSVVKXSISSTQTTPSRRRLLFIMSRCAXLAGVVCPWPNTESRXYCTGSARLVARRVXAHKTSARGTHFRRAGPRQRVYFQSDEVNAAIVTCGGLCPGLNTVIRELVCGLYDMYGVSSVVGIEGGYKGFYSKNTVALTPKSVNDIHKRGGTVLGTSRGGHDTAKIVDCLQDRGINQVYIIGGDGTQKGASVIYEEVRRRGLKCSVVGVPKTIDNDIAVIDKSFGFDTAVEEAQRAINAAHVEAESAENGIGVVKLMGRNSGFIAMYATLASRDVDCCLIPESPFYLEGKGGLLEFVERRLKDNGHMVIVVAEGAGQDLIARSMNFVDTQDASGNKLLLDVGLWLSQKIKDHFKKKPSFPITLKYIDPTYMIRAVRSNASDNVYCTLLAHSALHGAMAGYTGFTVAPVNGRHAYIPFYRITEKQNKVVITDRMWARVLCSTNQPCFLSHEDVENMKHDDDEHHHMHNTQLLEGGSSPVSKCNGSAAAV

SEQ ID NO: 306147 - protein, 206 aa, Zea mays
  unsure (1)..(206): unsure at all Xaa locations
  Clone ID: MRT4577_4226C.1.pep
PPGNPPPPKKKKPPGETRPNEGPPPPPKQKGPRPKSKRXPGPGGSGKGGPPGPVKPGNFLDRGAAAGGGARPLPQVGPSSRAGXLSPTRTPMXTRPWHGRRXRPVSGPSXTPGGHQRMPPPPXGNPEQKVHRQPASXXXXAPPTQSXIXPPLVDHTRPTPGPRTNAXXPRAPDRRPPXPGDGAPGARCGRXTAXAPHPRPTSRHGP

SEQ ID NO: 306148 - protein, 76 aa, Zea mays
  Clone ID: MRT4577_42270C.1.pep
NKAKVRSHYQNTDAYTIDVTHTSPLSETNTVSFKTYGRLSMNNVTLLNNRMSAYFPVYQPALPARAVVPDPHYHHA

SEQ ID NO: 306149 - protein, 79 aa, Zea mays
  Clone ID: MRT4577_42271C.1.pep
RGYSCNIVNTHAMVHFLIESLLENAPLISLHVFLSSPLINLASFVVAIMVAAATKHPGPPVGNKPDAPPFESWSKYRSR

SEQ ID NO: 306150 - protein, 247 aa, Zea mays
  Clone ID: MRT4577_42272C.1.pep
RPLKGAGFLLRSHRNPSKLLPPENPPNFGWPKPWTEIDGCRRLPRSHRRRRCLATTTSCARSSSASASPPASSMPPSSPSGGSTTPPTRPSSATSVSATHPASSAFSPATPEHRTSSCRFYSPRSSPPSHAVRPPPSTAPSPPTHTSVSCTAGTAASSPCSCTREHTGTPSSSRCSLGSPKRSSHRPRCPAISRRPAHTQGVFSQTFLPEDGGRDGITLVSLWKVWREVRAEVCVLGSGGWGVPTTA

SEQ ID NO: 306151 - protein, 113 aa, Zea mays
  Clone ID: MRT4577_42273C.1.pep
VFGPRYAPRHHIRLWACHSTPPAVELPICSVSTWLAAEEDAMRRPDGAHLLLAPRGSGRRAGQCPLFRVVAGPPVGTCTTPMSPAHALDAPVLTAHRLGAGVHSPCHTRSRWI

SEQ ID NO: 306152 - protein, 44 aa, Zea mays
  Clone ID: MRT4577_42274C.1.pep
KKKALLAIPLSGMEQHSIAEPIGAPHLSGLTGAPNTMTFYPTLH

SEQ ID NO: 306153 - protein, 60 aa, Zea mays
  unsure (1)..(60): unsure at all Xaa locations
  Clone ID: MRT4577_42275C.1.pep
VSEGARASTGGELEPEPAALTYQELAEXATSTRLLSGMTHLTTKQATSAVELIRAAYAAT

SEQ ID NO: 306154 - protein, 66 aa, Zea mays
  Clone ID: MRT4577_42276C.1.pep
VAQGGPAHREGTAAPVYLAAVLEYLAAEVLELAGNAANDNKKTRIVPRHLLPAIRNDVGLWWLLSG

SEQ ID NO: 306155 - protein, 55 aa, Zea mays
  Clone ID: MRT4577_42277C.1.pep
KGVFTILMPFLQHGKVFFRQVKKKVNKIHLSLFIIHPNPCAPMKTFYSNLILFPN

SEQ ID NO: 306156 - protein, 86 aa, Zea mays
  Clone ID: MRT4577_42278C.1.pep
MFEIEPRSEHYAGGVDSLCRAGMEERAYEIIQGMPMRPSISVWGALLGGCKMHGKTELGRIAADKLFELDPQDLCNHVLLSNMLAS

SEQ ID NO: 306157 - protein, 54 aa, Zea mays
  Clone ID: MRT4577_42279C.1.pep
IYIYRINVRVASYHKRHVDDKPPYAALDDTMTTITNNMVKEQLSYYTFSFIYLP

SEQ ID NO: 306158 - protein, 48 aa, Zea mays
  Clone ID: MRT4577_4227C.1.pep
GKFGCFKLTPASLFLILRTMPSPWFQCRFSKVLSSPRRPPWFFFFPKN

SEQ ID NO: 306159 - protein, 89 aa, Zea mays
  unsure (1)..(89): unsure at all Xaa locations
  Clone ID: MRT4577_42280C.1.pep
NGIGALCSFGVAAATLCVFLVGXGSSSSSTGGRXREETIQLQFYGDDKRIHQVVQQTSRLNQAMSSVMGAGGGASARANISFGGFYDGF

SEQ ID NO: 306160 - protein, 108 aa, Zea mays
  Clone ID: MRT4577_42281C.1.pep
RVRALKELVYYRSTFLTTRNCIREELNAEIDTRSQPSEEGRIDGMTAATPSLCTAARVLCPCTFLALLLCLQLLHTSHAYKLRGVVGGYDDKKVPLAVIAPADPSHEL

SEQ ID NO: 306161 - protein, 85 aa, Zea mays
  Clone ID: MRT4577_42282C.1.pep
EDECLEEFRRISLMVAFEDILPEADRVLAFEIGVVSVILPVLEVLRDDAVGTVHVDGVLIQAGLDIGQRPRTGPQHHRAAAGRVG

SEQ ID NO: 306162 - protein, 77 aa, Zea mays
  unsure (1)..(77): unsure at all Xaa locations
  Clone ID: MRT4577_42283C.1.pep
ELTWDHTHSIITWCISPRADAGSALNFYPSWGGEQRAPRGGSXVIIKQTHPLEPYTYLELKMPNPVAVAAACALSCC

SEQ ID NO: 306163 - protein, 78 aa, Zea mays
  Clone ID: MRT4577_42284C.1.pep
MDSDPSSQNPTDMTAFVQNLLGQMQTRFESMSQNIVSKIDEMGTKIDELEQSINDLKAEMGTETPVKKPDEPKPADSA

SEQ ID NO: 306164 - protein, 52 aa, Zea mays
  Clone ID: MRT4577_42285C.1.pep
MVVYISEQLLGEVALLAGCFFTADHLCYLGSSDRVAADRQSEGLMGQDMTVT

SEQ ID NO: 306165 - protein, 78 aa, Zea mays; identical to SEQ ID NO: 306163
  Clone ID: MRT4577_42286C.1.pep

SEQ ID NO: 306166 - protein, 231 aa, Zea mays
  Clone ID: MRT4577_42287C.1.pep
MAGDNDLKVLGVWTSPFVIRVRIVLNLKGLAYEYVEEDLSNKSALLLGSNPVHKSVPVLLHAGRAINESQVILQYIDEVWAGTGPDVLPDDPYERAVARFWGAYIDDKVESAWLGMLFRCANEEERAAAVARAREALDALEGAFRDCSRGRPFFGGDDIGFVDAVLGGYLGWFGAVGRIIGSRLIDPARTPLLAAWEDRFRAADVAKGVVPDDLDKMLAFLQTLRAMNYAK

SEQ ID NO: 306167 - protein, 78 aa, Zea mays; identical to SEQ ID NO: 306163
  Clone ID: MRT4577_42288C.1.pep

SEQ ID NO: 306168 - protein, 145 aa, Zea mays
  Clone ID: MRT4577_42289C.1.pep
MCPTKKEMSAESSGSASSWTSASTSTSPEHQTVWTSPPKRPAGRTKFRETRHPVFRGVRRRGSAGRWVCEVRVPGRRGCRLWLGTFDAAEAAARAHDAAMLAIAGASACLNFADSAWLLAVPASYASLAEVRRAVAEAVEDFQRR

SEQ ID NO: 306169 - protein, 79 aa, Zea mays
  Clone ID: MRT4577_4228C.1.pep
MESSSSNGSNVPLPASQHPLHVTDADEEDKSVKQLNECATIYLSLQDCLIESNRNWKVCQAYVQALKACQAKRNKSDQT

SEQ ID NO: 306170 - protein, 50 aa, Zea mays
  Clone ID: MRT4577_42290C.1.pep
TSEIRDQGSCGSCWAFGAVEAMSDRICVASKGRVKAHLSAEDLVSCCYSC

SEQ ID NO: 306171 - protein, 73 aa, Zea mays
  Clone ID: MRT4577_42291C.1.pep
EANRWWYVGPVWHRLFHSLTFLNRSCTKQALLQQIINSATSQNELKAGNKQKVFFTSFSDKLFFHRLLSQTGR

SEQ ID NO: 306172 - protein, 324 aa, Zea mays
  Clone ID: MRT4577_42292C.1.pep
TIRQWRRRRKSVCVTGAGGFIASWLVKLLLSRGQYVVRGTVRDPGASKNAHLKELERAGERLQLLQADLLDYSSVASAIAGCEGVFHVACPVPSGRSSNPEVEVIGPAVVGTTNVLKACYEAKVKRVVVVSSVSAVFSNPNWPKDKVFDEDSWSDEDYCRKNEDWYYLSKTLSEREAFAFAAKSGLDVVTICPSLVFGPLMQSIVNTSSKVLLNYFKGDRETVENRLRNMVDVRDVADALVLAYENPEASGRYICSSHPLKVSDMINILKTLYPSYPYPKHFVETDGNITCSSEKLQKLGWTFRAIEETLRDSVESYKAFGILN

SEQ ID NO: 306173 - protein, 220 aa, Zea mays
  unsure (1)..(220): unsure at all Xaa locations
  Clone ID: MRT4577_42293C.1.pep
VRPASGALVLKLFKESSNGSSANGSSADSSCITTLYGCFQNCLDSLLVLSRQASGADELAGEEESSSGSKEQAFRKIGLEADNLLWLAEILSERHAVDELAAIWARQTELAAELHPRIPVMHRHLVSCVTARLLVAVGRGAALPSRETWQWLLDVWLSPLMDDYRWLQHGCRWFDRAAVEDGIGQAVLTTLPLEEQQAVLLAWLGRFLRGXDXCPTCSGV

SEQ ID NO: 306174 - protein, 62 aa, Zea mays
  Clone ID: MRT4577_42294C.1.pep
MAAGGVGPAQHQAANGASGSVSNGGAATPLHGSGADGYDSDGYSFAPPRRELCACAYLLSLL

SEQ ID NO: 306175 - protein, 86 aa, Zea mays
  Clone ID: MRT4577_42295C.1.pep
TPFGTQHEQEPPPHYILFGTQKPASQPAAGPFHDRGRKRTGKKGRNGGVCLKPKRKIPLGKPTPQPITYWGGGGLSYYYLLGETPH

SEQ ID NO: 306176 - protein, 130 aa, Zea mays
  unsure (1)..(130): unsure at all Xaa locations
  Clone ID: MRT4577_42296C.1.pep
MANINLPRCIIKETHGMFTXTMPRITACSSQEKMPNFNGMILEHVKSXPYEGESYNVEHYLPDEYXPMAAPQVRLLTEIYDLRIDKIARRCLHILRGNGSLSISDXTVHRNIHVQVSATEPDRRSCDYVE

SEQ ID NO: 306177 - protein, 109 aa, Zea mays
  unsure (1)..(109): unsure at all Xaa locations
  Clone ID: MRT4577_42297C.1.pep
KRGRRTQKRKKRGTKRKKKRGKNKHHKNLAGTKEKGGRTGEKDDQTNKGGNNKKKRDPKKRNGEXRPXREGTQAKGRELKFVKGVLPTAFRDLXWVGPNEGGKKKLFPP

SEQ ID NO: 306178 - protein, 43 aa, Zea mays
  Clone ID: MRT4577_42298C.1.pep
KKNKIYKGRPIYELKGVILSMSQAYRKLTSVSLDLRLPAIILL

SEQ ID NO: 306179 - protein, 39 aa, Zea mays
  Clone ID: MRT4577_42299C.1.pep
SDLNSRLDATLPMVFFYDVIFLILCFQTLRVECCCLCTI

SEQ ID NO: 306180 - protein, 79 aa, Zea mays; identical to SEQ ID NO: 306169
  Clone ID: MRT4577_4229C.1.pep

SEQ ID NO: 306181 - protein, 136 aa, Zea mays
  Clone ID: MRT4577_422C.1.pep
GPATRGDRGGEGKAAPTGKKRGHDRTRRPGGAQGEKNKAGQGPTKPPAGGADAITTNQAFDRGPPPKTNAGLQGKKAPAGVPGADLPYGAQGPWSGSGDPKKAKRLKKPGGANPLVKTPRKRKGNCRVKNQKGLGP

SEQ ID NO: 306182 - protein, 80 aa, Zea mays
  Clone ID: MRT4577_42300C.1.pep
SFRRRRSRGVLVYHILYSHSLICNRRYLRTIHRRRVKGAVQKFREVAESQAPRRSRGRRCCLLGTRRPSAARTRSQTPPY

SEQ ID NO: 306183 - protein, 449 aa, Zea mays
  Clone ID: MRT4577_42301C.1.pep
MGSAGTICTDKTGTLTTNHMVVDKIWASEVSKSVTDSSSLEDLASAVSPATLSLLLQGIFENTSAEVVNEKDGKQTVLGTPTERAMFEFGLKLEGLGAEDRTCTKVKVEPFNSVKKKMAVLVSLHDGGSYRWFTKGASEIVVEMCDMMIDGDGNSVPLSEAQRKIVLDTINSFASDALRTLCLAYKDVDGLEDDDDDADSPTSGFTLICIFGIKDPLRPGVKDAVEACKSADAWRTRGPTRGINTAKAIAKECGILTDGDLAIEGPEFRSKSPEEMRDIIPKIRVMARSLPLDKHTLVTNLRGMFREVVAVTGDGTNDAPALHEADIGLAMGIAGTEVAKESADVIVLDDNFTTIINVARWGRAVYINIQKFVQFQLTVNIVALVINFVSACITGSAPLTAVQLLWVNMIMDTLGALALATEPPNDDMMKRPPVGRGESFITKVMWRNI

SEQ ID NO: 306184 - protein, 54 aa, Zea mays
  unsure (1)..(54): unsure at all Xaa locations
  Clone ID: MRT4577_42302C.1.pep
QPTNRYIXYAALRADQVPCNKRGRSYYSNCASQQAANPYRRGCSAITRCARNMN

SEQ ID NO: 306185 - protein, 91 aa, Zea mays
  Clone ID: MRT4577_42303C.1.pep
HTLFSPQFGPRRSQAISCTCCCLLHQSTARLGASPRLAADPPRIAQLLVCKARKQDAVVNQRDVSRRAALALLAGVTVAPSAKMGPAFAAY

SEQ ID NO: 306186 - protein, 85 aa, Zea mays
  Clone ID: MRT4577_42304C.1.pep
RVGFFIFLENGKIWIFHNEGRQLASEIQIQAVRLRRTHRSGNRDECLARHAGAQQLTGRGHHSITLLEKMQKPPQDGLLKNIQGR

SEQ ID NO: 306187 - protein, 85 aa, Zea mays
  Clone ID: MRT4577_42305C.1.pep
FLEVLPFARFQLSRTGPSGTLLISECTAGYLAAPLFVVQSRVTEKFVLGAGWCQNALSRSERTLELLSTFPLPGGGCHSVANLVP

SEQ ID NO: 306188 - protein, 146 aa, Zea mays
  Clone ID: MRT4577_42306C.1.pep
MSVPYEKRALESTLRYFPLPRASSSSSKHVLHAARGAPAPASSDRATFLHGSFDSGNRASGGRSLPWRLPLVPHRHLRLLQGGHQARPSCSDADPALSVCLSCTVTETGTPLISTVELRELDGSLYYADYEGDAFLLLSGRMNLGA

SEQ ID NO: 306189 - protein, 243 aa, Zea mays
  Clone ID: MRT4577_42307C.1.pep
MGRSPCCCHDAGVKKGPWTEEEDRALVDHIQRHGGHVSSWRNLPKAAGLNRCGKSCRLRWTNYLRPDIKRGNFTDDEERLIIGLHAQLGNRWSTIATHLDGRTDNEIKNYWNTHIRKKLLRMGVDPVTHQRLPPDDLLLAVSASPTTTILSAAASQLRGLNTALMQVQALQFLLQAVSGVGNDVNAAAAAANGGGGLVPSLSAAADNNAVLNASRSVVPGFQDLQLTTMTRASSRVSRESRVS

SEQ ID NO: 306190 - protein, 35 aa, Zea mays
  Clone ID: MRT4577_42308C.1.pep
GNFITFITYHNIDVFNSIGRIRLALWTYFLEPPVP

SEQ ID NO: 306191 - protein, 137 aa, Zea mays
  Clone ID: MRT4577_42309C.1.pep
MNLKQEFESLRSSYEERCKLLESKKEDVVKLVADKEMNDNIVLQLRQQLEATKKFHEAETKEKEDYRNINMKLKQEFESLRSSYEESSKLLESKKEDVVKLVTDNETNDNIILQLRLELEATKKLHDAETQQLETKA

SEQ ID NO: 306192 - protein, 192 aa, Zea mays
  unsure (1)..(192): unsure at all Xaa locations
  Clone ID: MRT4577_4230C.1.pep
KKLVLKKKKKKKIKKKKKIKKKKKKKINYKXNFKRXXKKEKRKKKXKKKKKXXKKXKXXXGKKRXRKKKKKKKNKKKKXKKKKXFKMXKKQNXKXXPNNKTKRXXKXKKXKKKKXVKNPXXKXGPSPPPPXRPPQPQKKKXXXXKKKKPPPPFFFFLKKKTMRLILFHNKRKLPFLLIMSNTRWHVNSLFGT

SEQ ID NO: 306193 - protein, 97 aa, Zea mays
  unsure (1)..(97): unsure at all Xaa locations
  Clone ID: MRT4577_42310C.1.pep
RGLFFFFFFFFXGXXKXSLXTWGSXXLXTQHTAAALARSRSQAGSPRLGGSAGQHPFPIGTRTCVPRLPRRRLATTARIMTPREPAIHPGNERRRRD

SEQ ID NO: 306194 - protein, 65 aa, Zea mays
  Clone ID: MRT4577_42311C.1.pep
TTIKIFQFHHILYYLFYNCFHSLSNYSYINFSSTKYHYYKLLYKYIQRYSYLLYILKHHYYLYNH

SEQ ID NO: 306195 - protein, 241 aa, Zea mays
  unsure (1)..(241): unsure at all Xaa locations
  Clone ID: MRT4577_42312C.1.pep
AHSATRSPSCHSTRLWSHPWHRRHRXRPTKESFSSQRLSTSSPHTSSRKSNLQLVSTRSERIMTHRNVVQMXSPSXMPQRKXFPSDFTFGAATCSXQIERAWNENXRGXSNCHHFCHNHPKKILDANNSDIGANSYHMYKTXMIALXEMSMDAYRFSISWTRILPKATIEXGLTRHGIKYYRNLINLLLENGIXPYVTIFHCDVPQALEEKYGVFLHKSHKSIVEHYTYFXAKVCFDNFGD

SEQ ID NO: 306196 - protein, 44 aa, Zea mays
  Clone ID: MRT4577_42313C.1.pep
LRRTYFINLNRLTSHTGAFWATNHWWPKHLNKLHIEDLHTRLSL

SEQ ID NO: 306197 - protein, 63 aa, Zea mays
  Clone ID: MRT4577_42314C.1.pep
FWGFFFFFWGVFSPPPFFCFFLSSSGVLVLLFLSGFTKKSSFNTRENGQNLGFLKYGGSEFFI

SEQ ID NO: 306198 - protein, 71 aa, Zea mays
  Clone ID: MRT4577_42315C.1.pep
GFGPNFSSGYHGEGQSPIIKHPFPGVKLQGPVSKKAKLRPGVKPHVKPATAFGSLLALKVNKPHLLASGGS

SEQ ID NO: 306199 - protein, 128 aa, Zea mays
  unsure (1)..(128): unsure at all Xaa locations
  Clone ID: MRT4577_42316C.1.pep
TPPPTGPRRSPQTGRGGEERXDXXXQGGQXGNQXGXKXXEGXXXEHGXDPTGGGRGTXDXQXERXNXNHNEXXXXRXXPRAXXXDXEPGTXDAXRTSPXGQXRRPDNXGXGQAGAGXTRAKGHXTEGA

SEQ ID NO: 306200 - protein, 109 aa, Zea mays
  Clone ID: MRT4577_42317C.1.pep
KLLYSQTEATTGDFSRGGGQQQKISFQLRQGGQHQHLMGADDKSYSTMDAQHTEAQIQKAILTLVTNFNKQVHSLSLECVIRALEKDLDLKKYSLDAHKKFINQFLYKV

SEQ ID NO: 306201 - protein, 157 aa, Zea mays
  Clone ID: MRT4577_42318C.1.pep
IMDSPRQLSSPTLTNVIPLAAGIIVALVGIAAKIQPLQSGIMGFTAGVSGAATASLATKKEREILLLAEQELSKTKINNTLSELQEQKKIIDKDITRLEERRSQSEKIAGELEIRQAKRDSIEAEIKNLQAVQQNLESRVAEINKANPTLENLEIPE

SEQ ID NO: 306202 - protein, 148 aa, Zea mays
  unsure (1)..(148): unsure at all Xaa locations
  Clone ID: MRT4577_42319C.1.pep
VAKIAENFRALCTMDKGAGHSVSPLQYXGSTFHRRLPKIVWHCGDLTRSNGTSGKSIYPEKLPDEKFSCRHSGPAGVSMSSSGXPXSNGSQFVIXTVSISLSTTAEQSIVRQXVVQGXMHVDPAIQKVATREPSISRAPKTCDCGQLL

SEQ ID NO: 306203 - protein, 86 aa, Zea mays
  Clone ID: MRT4577_4231C.1.pep
DPHYETVRTLASSGQEADACSHPRATCPRWEPLVPPHPSSCLRLLCSPLIGHGESDGGGQRQETEFERWRRRKKEESFSWLPLTAG

SEQ ID NO: 306204 - protein, 275 aa, Zea mays
  unsure (1)..(275): unsure at all Xaa locations
  Clone ID: MRT4577_42320C.1.pep
FGTRISTPDAMETGIYIWTWLVSAAPSLGPLVLAELVDAWLWTIDTKRGLFASDMNYCGPDAKLRPHLIAGEPEAPPEKDPVEAIIAHRLWLGFFIDRFEVVRHDSIEQLLLLGRMLQGTMKSPAHFSHHPAATGTFFTAMLLGLKFCSCQSQSNLQKCNMGLQLLEDRVYRAALGWFSYAPEWYESPNKTYAQREAQSVSVFVHFLQNERTSGPVDSVSKLQGREGEPSMADHIHPVXWGCVDNYTNARXEKRKQVLLTLSQNEADRLEVWAQP

SEQ ID NO: 306205 - protein, 44 aa, Zea mays
  Clone ID: MRT4577_42321C.1.pep
CRDSRGQSVASLVLSSRVYPRGFHFLLASVLVSGALGYTVFWFA

SEQ ID NO: 306206 - protein, 115 aa, Zea mays
  unsure (1)..(115): unsure at all Xaa locations
  Clone ID: MRT4577_42322C.1.pep
PSPGKFPPAGSPTPXFLSPPPPNGQGGPPPXSPPPXRFGSPPPQEGGPFLKIGFLLAPGGFPKGVGTGAFVLYPPPPPKXFPFLNGQILFPNFGPPMXHVKSPPPKNPPKWFSPP

SEQ ID NO: 306207 - protein, 99 aa, Zea mays
  Clone ID: MRT4577_42324C.1.pep
GHQLKTWTTPSNSRCLRRRLLLQEDHREVTKTGRPHALQISALPFLLAYARKISFSQAYRQPRRDHLGHGDQAGGLPPVVTIRGRPEPLVREMMTGHCG

SEQ ID NO: 306208 - protein, 105 aa, Zea mays
  unsure (1)..(105): unsure at all Xaa locations
  Clone ID: MRT4577_42326C.1.pep
GGPXEGPPEXQHSGKAXRSXDRRXHAXPXXKKXTXQXXXPPQTHRTXRRRGXRXGXKAGXGXGKGTXTPRGKXXXXQXXXXXTHKNKKQNTPPPPPXXKKKKGRP

SEQ ID NO: 306209 - protein, 177 aa, Zea mays
  unsure (1)..(177): unsure at all Xaa locations
  Clone ID: MRT4577_42327C.1.pep
PDVAMTLAVVALFADGPTAIRDXNILSPTTMPLLHHYLTRLKTIGSLAVASWRVKETERMVAIRTELTKVRLHTSHVSRRLSIARCLLAACLRSLHPRLLSVFSXLGASVEEGPDYCIITPPEKLNVTAIDTYDDHRMAMAFSLAACAEVPVTIRDPGCTRKTFPDYFDVLSTFVKN

SEQ ID NO: 306210 - protein, 80 aa, Zea mays
  Clone ID: MRT4577_42328C.1.pep
PVRFFCALDFRFVLLPLFCSQLLLLFARRVVSLCCLPASSRCCLVVGRFYFPPRALLGILFFLEPVLNVIFSVLCFLPSF

SEQ ID NO: 306211 - protein, 160 aa, Zea mays
  unsure (1)..(160): unsure at all Xaa locations
  Clone ID: MRT4577_42329C.1.pep
PIATTILGTSNHTNHRNTTATTVPTSTEPTRCGEPCRLLATSCCLHPTHLLWETKLHTHHTQQRNLANHGAYSXPRETLPFNHLLALNSAXYLRQHQLPFSLLPAVYPEQFLPFYQLAALSSPAYLXQHXLLPFXQLSGVSPVTFFVHPLLLSFYQCVAA

SEQ ID NO: 306212 - protein, 43 aa, Zea mays
  Clone ID: MRT4577_4232C.1.pep
FQSNNSCYLSAVIQCYIRFVSAHLYTLPLVRSHKDHSLCFWLL

SEQ ID NO: 306213 - protein, 139 aa, Zea mays
  unsure (1)..(139): unsure at all Xaa locations
  Clone ID: MRT4577_42330C.1.pep
IRHEAVIGVSPNPAKRGSAFIQVSGXGKIIEYCSSLNVLNVCPPAQFSAIGSDLCFPASCPCMTAVLCYENGVTEPLLFXLDESGKLYTGKRLLSNSWSSCTLYCRGYGVTETAMSHLLVTTKGDLLLIGDEDEGLLRD

SEQ ID NO: 306214 - protein, 92 aa, Zea mays
  unsure (1)..(92): unsure at all Xaa locations
  Clone ID: MRT4577_42331C.1.pep
AYLPWTQYNLIALTAACAFCAMKEANPTKPRACALKYFRELPSQEDDDQALPIERPXDTRMGYPNDPEFINERIFECLXSTIWKGLKTRXWL

SEQ ID NO: 306215 - protein, 85 aa, Zea mays
  Clone ID: MRT4577_42332C.1.pep
KTSILRLNNQAESLSLPVWVANVLKCAPAHTVVWGRPYVCAALIEYEASIRILSVCYMCEYPCACVCSWFKSQDHVSLFFVYQDK

SEQ ID NO: 306216 - protein, 56 aa, Zea mays
  Clone ID: MRT4577_42333C.1.pep
KKFTYSFLQLPTSFIVPPNFSLLAIFLHSLLMGKPFRYPTYSLSNNISLFHSFLNN

SEQ ID NO: 306217 - protein, 36 aa, Zea mays
  Clone ID: MRT4577_42334C.1.pep
QAQVTGHAPPPVRQPDASLLRELLQLFLINLVSIEY

SEQ ID NO: 306218 - protein, 80 aa, Zea mays
  Clone ID: MRT4577_42335C.1.pep
GPWRTRGRTVEFRACQASPPWRLLLPACISHGALESQLGLLPAAGCGCASCSSSGTLASFQTRSHHRVMRHKTSQVLGED

SEQ ID NO: 306219 - protein, 86 aa, Zea mays
  unsure (1)..(86): unsure at all Xaa locations
  Clone ID: MRT4577_42336C.1.pep
MRTQALFFLALALLGAVLAQSSNRHHHHYHHAHVQSKGQGAGGGGGGELASRAKAAARAWPCCDSCGGCXXSAPPRCLCLAAAPRG

SEQ ID NO: 306220 - protein, 128 aa, Zea mays
  Clone ID: MRT4577_42337C.1.pep
MRTQALFFLALALLGAVLAQSSNRHHHHYHHAHVQGKGQGAGGGGGELASRAKAAARAWPCCDSCGGCTRSEPPRCQCLDAAPRGCHPACRDCVKSSLSADPPVYQCMDRVPNFCQRRCTAAAAAAAH

SEQ ID NO: 306221 - protein, 70 aa, Zea mays
  Clone ID: MRT4577_42339C.1.pep
ACSYMFRLKKWFNSQGVKDYGFTRPCLVRGEPVGSSHLGLGLIDLTVCWSCSTHMRRCRVVIDKDRKRSS

SEQ ID NO: 306222 - protein, 370 aa, Zea mays
  Clone ID: MRT4577_4233C.1.pep
MASKVVDLRSDTVTKPSEAMRAAMAAADVDDDVLGADPTAHRFEAEMAAVMGKEAALFVPSGTMGNLISVLVHCDVRGSEAILGDNSHIHVYENGGISTIGGVHPRTVKNNPDGTMDIDKIVAAIRHPDLHYPTTRLICLENTHGNTGGKCLSVEYTDKVGEIAKSHGLKLHIDGARIFNASVALGVPVDRLVKAADSVSVCLSKGLGAPVGSVIVGSKAFIDKARILRKTLGGGMRQVGVLCAAAHVAVRDTVGKLADDHRKAKALAEGLKKIEQITVDSASVETNMVFFEVMDPRISPDKLCQVLEQDNVLALPANSKSIRFVIHYQISDADVGYALACVEKAIKELLEGSTELGHSINGATKSSYGH

SEQ ID NO: 306223 - protein, 57 aa, Zea mays
  Clone ID: MRT4577_42340C.1.pep
YGWGPPAHVVPLPNLDYIPPCILVNPWGPKPGGRLITQWVPRARVAPFPGGRLDPSC

SEQ ID NO: 306224 - protein, 48 aa, Zea mays
  Clone ID: MRT4577_42341C.1.pep
NLEQVPLFLMHSTVFVDARAEATYLPKRLTLVSFPLVLLLIIPGLIYG

SEQ ID NO: 306225 - protein, 50 aa, Zea mays
  unsure (1)..(50): unsure at all Xaa locations
  Clone ID: MRT4577_42342C.1.pep
XFILISIXFXLXXINLYSEKANPYECGFDPTSSXRLPFSIKFFLVAITFL

SEQ ID NO: 306226 - protein, 61 aa, Zea mays
  Clone ID: MRT4577_42343C.1.pep
WEMKLKAFLGTGGKQNLLFKAWPSYKLFCIKGKLFPRKKKTYFAFLKSSFHQKGDGSKFSG

SEQ ID NO: 306227 - protein, 67 aa, Zea mays
  Clone ID: MRT4577_42344C.1.pep
GWLLIRLRDRSPSREVLRGSVSWVSGSRWRGRTLIYHSFLRRLACATDDHYMTTNLKPTARCLKPRL

SEQ ID NO: 306228 - protein, 46 aa, Zea mays
  Clone ID: MRT4577_42345C.1.pep
RACVRIRVSSSPDPVADRHGCRPRLPRRFLATRLALLTASPSATSS

SEQ ID NO: 306229 - protein, 85 aa, Zea mays
  unsure (1)..(85): unsure at all Xaa locations
  Clone ID: MRT4577_42346C.1.pep
SEVKRGKCCPVVVVVANTIYSAPAPAPACGALFSLTGPRLARAGTDXKINRSHLIFFLLIRWLGAYLTCLADGPGGGPGQAGLRQ

SEQ ID NO: 306230 - protein, 81 aa, Zea mays
  Clone ID: MRT4577_42347C.1.pep
MANAQGVVLPAVVETAGSPTVTCDPRWKDCSSEQIPTPEKVPKSGNQRASSRGSDEVSPARRSQAIAHAEMATGEQARHQV

SEQ ID NO: 306231 - protein, 68 aa, Zea mays
  Clone ID: MRT4577_42348C.1.pep
YFHSLVYCKHKLIRYASFHFIRGKKLLIQKMVGSVPSLMSCMPSSQTVQEICNDNSLSLNLGLLSKGN

SEQ ID NO: 306232 - protein, 304 aa, Zea mays
  Clone ID: MRT4577_42349C.1.pep
MVISCIIKGFLVHNVLVDTGNATGIIFAKAFRQMPRKQRLQKMFEDKAEGARNEVKRLLSAGVIREVTYPEWLANTVMVKKANDRNKACPKDEFPLPRIDSLVDVAASSELMSLLDCYSGYHQIWMKKEDEPKASFITPSGTYCYLRMPEEIKNAGGSFSRMTAKVLHSQIGRNVLTYVDDIIVKSTKQENHIADLQETFANFKQPGLKLNPEKCVFEVKKGKFLGCLVSTKGIEANPNKIEAILQMEPPNTKKGAQRLAGRLASLNRFISRSAERNMPFFEILKSAEVFQLGPVKELECPIFR

SEQ ID NO: 306233 - protein, 226 aa, Zea mays
  unsure (1)..(226): unsure at all Xaa locations
  Clone ID: MRT4577_4234C.1.pep
MQIFVKTLTGKTITLEVESSDTIDNVKSKIQDKEGIPPDQQRLIFAGKQLEDGRTLSDYNIQKESTLHLVLRLRGGMQIFVKTLTGKTITLEVESSDTIDNVKSKIQDKEGIPPDQQRLIFAGKQLEDGRTLSDYNIQKESTLHLVLRLRGGMQIFVKTLTGKTITLEVESSDTIDNVKSKIQDKEGIPPDQQRLIFAGSSFEDGRTLSDYNIQKXESPFHLVLRL

SEQ ID NO: 306234 - protein, 97 aa, Zea mays
  unsure (1)..(97): unsure at all Xaa locations
  Clone ID: MRT4577_42350C.1.pep
MAGPDLTQPTVVHRLXSHIHLXSISSAGAPAPTMCAYCATKARRVTATTFLMHSLWVPTELSPGGLNMADTNTPHCADHPAEERGVSFMRDSLMGGV

SEQ ID NO: 306235 - protein, 95 aa, Zea mays
  Clone ID: MRT4577_42351C.1.pep
PQAQRSHSIRSWHLACHRALPETELGPQVPGVWFSYHHSVVYFVIVLGVVIIFKGMAILYVEHRCHAGYIAAIVRPGRLSPWPCSSVSCLRRSET

SEQ ID NO: 306236 - protein, 81 aa, Zea mays
  Clone ID: MRT4577_42352C.1.pep
YTLLSLISFFFIISIIICLFSQYKITCARYAVALRPSSSSHSIIINYNNNNNYNDVIHEIYRCGWRSTNLFNAFIPVDQLN

SEQ ID NO: 306237 - protein, 74 aa, Zea mays
  Clone ID: MRT4577_42353C.1.pep
KPPYPGGTFLDHHPFYPENYVGHSFFLIYLYCTRSFRSRLKPEISLLKSAQLQQLIDSVHTRWGLVILLILEHS

SEQ ID NO: 306238 - protein, 46 aa, Zea mays
  Clone ID: MRT4577_42354C.1.pep
SINLELPIVVYRATWSVQSNPKGSWPAQGLMQWNILAPCPGGPPPP

SEQ ID NO: 306239 - protein, 88 aa, Zea mays
  Clone ID: MRT4577_42355C.1.pep
SGRSVSFYGLRLSTTRLFEESPLFLFRVHAEVSGIIPMDWALSLSSRPDLPYSSWVICYSINWLSYAISFLPFVLVNSLRPNSRALVL

SEQ ID NO: 306240 - protein, 110 aa, Zea mays
  Clone ID: MRT4577_42356C.1.pep
RVDARVRKKEKEKKEKEEKEKKEEKKPEPNFEILSNPARVMKNQLKVISLVDSGSYVPLKDVSIGGIVMVRHVKAGSEDEQLVEPVAAFGPKADDEKEPDPPEPFEYTEE

SEQ ID NO: 306241 - protein, 139 aa, Zea mays
  Clone ID: MRT4577_42357C.1.pep
IPLKGQGTQLCHVQHWRPQSARHGKCRSFESSKAQSWARQTQIKIERGRREYQGALKHHKNYVITAPAAARINAAVGIPRELGTSVPERTIDPAGGRGTASFGLDINSGTAAGEISGPVVDCGMKCNPGSTFKSRQAST

SEQ ID NO: 306242 - protein, 77 aa, Zea mays
  Clone ID: MRT4577_42358C.1.pep
MQGQARRLQGHLPRGPPHCCSHGSLPFKVNHQCSSGLQAVADVAAAIKAGYYDIGIGAGLESMSINSIARERQVNPK

SEQ ID NO: 306243 - protein, 64 aa, Zea mays
  Clone ID: MRT4577_42359C.1.pep
PRVQHSLLKDDDDPIVATNYSFLLHTGLPFIHGSVMLHCVEVDWFVLCFAAIEVSFFHLSSTPM

SEQ ID NO: 306244 - protein, 122 aa, Zea mays
  Clone ID: MRT4577_4235C.1.pep
VRGNPDQVLDVRERAQAPHVSYAWRGPPHPRQSVLISRPGRDSIRIRPAVVVAVGEGSVGLSVQPRRGGGALRTEELRKNDEHRNAGAGVNNNNQQRQRLSSLVPVYHTLSPLWPPPWDSKD

SEQ ID NO: 306245 - protein, 98 aa, Zea mays
  unsure (1)..(98): unsure at all Xaa locations
  Clone ID: MRT4577_42360C.1.pep
NQGVRAPVRVGRTAXARRGGPAPAKEEKGLGETILGFIFKKDQLVETDPLLNKVGAAPATASRAKTTGGKKATGGDESGNGGGLNLGGLGGFFAKKSS

SEQ ID NO: 306246 - protein, 67 aa, Zea mays
  unsure (1)..(67): unsure at all Xaa locations
  Clone ID: MRT4577_42361C.1.pep
KAQDCLLPXMGITSENVAHRYGVTRQEQDQATSESHRRAAAATTSGKFKDEIVLVPTKARISFSLFA

SEQ ID NO: 306247 - protein, 229 aa, Zea mays
  unsure (1)..(229): unsure at all Xaa locations
  Clone ID: MRT4577_42362C.1.pep
MGSWVLLAVVLGSLVGAARGSEPWSNGTQVYSTNANSGSGSNGAFVALTLIQSAAAKGAVCLDGSLPGYHLHRGSGSGSNNWLVNLEGGGWCNDVKSCVFRKGSRRGSSNHMERQLQFTGIMSNRPEENPDFYNWNRVKVRYCDGGSFTGDGADAASGLYFRGQRIWQAAIDDLMAQGMRSASQALLSGCSAGGASAILHCDEFXRGMFPSNTRVKCLADAGMFLDSVD

SEQ ID NO: 306248 - protein, 158 aa, Zea mays
  unsure (1)..(158): unsure at all Xaa locations
  Clone ID: MRT4577_42363C.1.pep
CSSRLQAVADVVAAIKXNPCGLSGIXGXIPRIGAGLESMSINSIAREGQVNPKISTFXKAQDCLLPXMGITSENVAHRYGVTRQEQDQATSESHRRAAAATTSGKFKDEIVPVPTXGNSSQVSDGAGAVLLMKRSVALKKGLPILGVFRCPARGYSSK

SEQ ID NO: 306249 - protein, 275 aa, Zea mays
  unsure (1)..(275): unsure at all Xaa locations
  Clone ID: MRT4577_42364C.1.pep
RVLLAHLLPSSSTISSQPQLAASTCAAGDSAAYQRSSSFGDDVVAAYRTPICKAKRGGFKDTYPEDLLTVVLMVPFXKVNHQCSSGLQAVADVAAAIKAGYYDIGIGAGLESMSINSIAREGQVNPKISAFQKAQDCLLPMGITSENVAHRYGVTRQEQDQAASESHRRAAAAMASRKLKDEIVPVPTKIVDPKTGEEKEVVISVDDGIRPGTTTSGLAKLKPVLEKHGTTTAGNSSQVSDGAGAVLLMKRSVALKKGLPILGVFRCPVRGYSSK

SEQ ID NO: 306250 - protein, 66 aa, Zea mays
  unsure (1)..(66): unsure at all Xaa locations
  Clone ID: MRT4577_42365C.1.pep
NDKRSASFIPNDSXFNYIEENDEVFIARFGLIGHAVEDIXPCVRFKDVKVSGVSLLALIKENKREP

SEQ ID NO: 306251 - protein, 311 aa, Zea mays
  unsure (1)..(311): unsure at all Xaa locations
  Clone ID: MRT4577_42366C.1.pep
MEKAIYRXRVLLAHLLPSSSTISSQPQLAASACAAGDSAAYQRSSSFGDDVITAYRTPICKAKRGGFKDTYLEDLLTVVLKXLPFKVNRQCSSRLQAVADVVAAIKVGYYDIGTXVXIYMLLSLLCFSLAAESLLSRLVRLALNPCGLXGLIRFKSQVSQISSQFXNPVQSIGNGINRTRPXTGIGAGLESMSINSIAREGQVNPKISTFXKAQDCLLPXMGITSENVAHRYGVTRQEQDQATSESHRRAAAATTSGKFKDEIVPVPTXGNSSQVSDGAGAVLLMKRSVALKKGLPILGVFRCPARGYSSK

SEQ ID NO: 306252 - protein, 83 aa, Zea mays
  Clone ID: MRT4577_42367C.1.pep
ISFRSHGSYEGHILRYGGACSEDAGIAPEIKPMKIERVRRKRRGISPQNVFLPARSQRRRQCGLNSHPGAGLLPIHSAGGEMS

SEQ ID NO: 306253 - protein, 70 aa, Zea mays
  Clone ID: MRT4577_42368C.1.pep
MAGGNLFGRALSYVVNEFFVQGLANNRAFQRLAVKTNKTLESLSSKAKEMREELSEQLKDARGQKDHFKQ

SEQ ID NO: 306254 - protein, 65 aa, Zea mays
  unsure (1)..(65): unsure at all Xaa locations
  Clone ID: MRT4577_42369C.1.pep
PNLNPXTKXATSTTXSRRGVRSLGTKYGRLREQAKDMDSRHPENETCRXLVPGNLRERXLIMIQR

SEQ ID NO: 306255 - protein, 150 aa, Zea mays
  Clone ID: MRT4577_4236C.1.pep
MESSYLPATTESIAMAQEAKDASESISILYRVIQDPSSSADALRTKELAITNLTNYLTEESRAEELRNLLTQLRPFFSLIPKAKTAKIVRGIIDAVSKIPGTSDLQISLCKEMVEWTRAEKRTFLRQRVEARLAALLLENQEYTEALTLL

SEQ ID NO: 306256 - protein, 70 aa, Zea mays
  Clone ID: MRT4577_42370C.1.pep
MAGGKLFGRALNYVVNQFLVEGLANNRAFQRFAVKTNKTLESLSSKAKEMRQELSEQLKDARGQKDHFKQ

SEQ ID NO: 306257 - protein, 85 aa, Zea mays
  Clone ID: MRT4577_42371C.1.pep
NTVPLFPPPSRHKLSRTTFSRQAAQIEALKRVAFLGEWTVAGKQCPHALAHITLRPVLAVSFKPDCRSRVDLAGPIRPFAKLVTI

SEQ ID NO: 306258 - protein, 70 aa, Zea mays
  Clone ID: MRT4577_42372C.1.pep
MAGGKLFGRALSYVVNQFLVEGLANNRAVQRFAVKTNKTLESLSSKAKEMREELSEQFKDARGQKDHFKQ

SEQ ID NO: 306259 - protein, 70 aa, Zea mays
  Clone ID: MRT4577_42373C.1.pep
MAGGNLFGRALSYVVNEFFVQGLANNRAVQRFAVKTNKTLESLSSKAKEMREELSEQFKDARGQKDHFKQ

SEQ ID NO: 306260 - protein, 92 aa, Zea mays
  Clone ID: MRT4577_42374C.1.pep
LYHVVLRPTPYYNHFHDTNCFTNSDHLHRTFPLITYPINPIITLHDEILLISRLLNKPSYQIDIYPNRFMTTYYLRIIQILFFITSLMIILL

SEQ ID NO: 306261 - protein, 62 aa, Zea mays
  unsure (1)..(62): unsure at all Xaa locations
  Clone ID: MRT4577_42375C.1.pep
PRFYQFHEDFDLFDYDGDICITIXEIGTDLPSMSLNPTEDVLQGMDNDVDADGDGTIDFPKI

SEQ ID NO: 306262 - protein, 472 aa, Zea mays
  unsure (1)..(472): unsure at all Xaa locations
  Clone ID: MRT4577_42376C.1.pep
VRNARNSARGRERERERERERERERERERERERESNTQNRPPKVVRGRGPRLYEAVARNSREVVGSQRKQAARFREPVPNAAAARNSGQVSHAQQEAAPPKKNVISSSLNSASPPFYPSGAASQDFPVATQRRDIQTGGSNKIPPSSMKMDDNSILQSGSMVRGRTAMDYGGRDRFHADGPVRSSPGRVPTASLNSGFTSSSVNPSQSTIVRASGGNSNIGISSNNQPTSSLHQTSRISTHPQSHGPVMHQKSMQVQNQSAARIPTQQLSHRTNNSLPAAQHLSVKSTESGENGSYPSLNNSKTASAVVKANSQETGMDSLMYGGAQVIGAAGLSQGDQNFPGTPALLPVMQFGGQHPGGLGVPTVGMALPGYVSQQQMGMGNNEMAWLPLLAGAAGAFGASYPPYITLDPSFYSRSPGQTSSSVPSREPSTNRGSKSPPRNDIGNEELDQRQNKPRRXLRDELQPVKHLVR

SEQ ID NO: 306263 - protein, 158 aa, Zea mays
  unsure (1)..(158): unsure at all Xaa locations
  Clone ID: MRT4577_42377C.1.pep
MEQLVSMGFSSDLAAEALTATGGDSIQKATDWILSHRSSPQSTATLQPKLDRFLGVHPKALAPAMGDDSSKRPNPKTQIHVAADDSNKRHKLSSSSHRQHQPLSERMRPRTLDDVVGQDHLLSPSSLLRSAVESNRLPSIVFXGPPGTGKTSIAKSLI

SEQ ID NO: 306264 - protein, 59 aa, Zea mays
  Clone ID: MRT4577_42378C.1.pep
LLVVQHCASVPWKRVVAQQMLKPPPARIVPGTRSSATSSVAPRGKILQAGGTPNFKTAP

SEQ ID NO: 306265 - protein, 68 aa, Zea mays
  Clone ID: MRT4577_42379C.1.pep
RVRHALLLTHSLNSNASSALLSWGHVTPTCLPTHHRRYHSKAVSRSVVYSGGSHEQRQAPRALAPPYS

SEQ ID NO: 306266 - protein, 84 aa, Zea mays
  Clone ID: MRT4577_4237C.1.pep
FINLCSVKRDKTDILTFCIKNLRHLGDTSELIIVKNAGHAINREKPAELCRLIKHYIVDPSVKCRDDRKGSWKNAIKRFVGSSL

SEQ ID NO: 306267 - protein, 103 aa, Zea mays
  Clone ID: MRT4577_42380C.1.pep
IFDLCGPPRDSNPLECRFQESHRPSPLCPSPKRKNGILTNGPFWPQGNRAHNLGPVFPRLQNSERGFLNQTPPVPVFPLFQKPGRGFFGIINHPNKKTGVSPP

SEQ ID NO: 306268 - protein, 117 aa, Zea mays
  Clone ID: MRT4577_42381C.1.pep
VSPGHRRHKRRLTDLRLLTVICACTVRHSDSRASFYCVHEIVVGQPICQRTHFCTGPSLAQASRTWHLVAGLIVISQRAGRLSRNLVCPDRVVHADRAIHLDKAVSSGLVLISQPTV

SEQ ID NO: 306269 - protein, 75 aa, Zea mays
  Clone ID: MRT4577_42382C.1.pep
MKERRPLAPAVPSKPAPPITEKQASPAPTPVTEAPAFSPNPQSGGRGGSLHGGDVGYQRVDYSGTSSGRGARAPS

SEQ ID NO: 306270 - protein, 264 aa, Zea mays
  unsure (1)..(264): unsure at all Xaa locations
  Clone ID: MRT4577_42383C.1.pep
FQSRIQSAIAQPDQCHSNPTYPLYPNPSAAAASMASIPSNDVSENGHGNGNGPSPPRGKRPRAALISVAQIRDEFAHHDPAVARVNNGSFGCCPASVLEAQARWQRLFLAQPDAFYFDGLQPGLRRSRAAVAALVNAGDVSEISLVDNATTAAAIVLQHAAWSFAEGHFARGDAVLMLHYAYGAVKKSIQAYVARAGATXVVEVPLPFPVTSPDAIIAEFHAALAVAKAGGRKVRLAVIDHITSMPSVLIPVKELVAICRQEGV

SEQ ID NO: 306271 - protein, 64 aa, Zea mays
  Clone ID: MRT4577_42384C.1.pep
IFIIIINITLSYFKLSSTHNFTQHTISKHISYNPSFPNYLTNFTLIILLSLSTLHSSKQSFHLL

SEQ ID NO: 306272 - protein, 58 aa, Zea mays
  unsure (1)..(58): unsure at all Xaa locations
  Clone ID: MRT4577_42385C.1.pep
MWCLKKSGRGSRILIXPKCWRYLVSKACLCVVFFVFIYILFIILFIFFIFSYILLFIY

SEQ ID NO: 306273 - protein, 129 aa, Zea mays
  unsure (1)..(129): unsure at all Xaa locations
  Clone ID: MRT4577_42386C.1.pep
MLPKGAFFLALSLLFTADAHGCKPYCLVPAVPTPPVXATTHSHGRCSIDALKFTACTNTMCLVNALLIHSYEKCCPLSVGXLMDLDSALRLCTALQVKDLGIHLDVPLXLNLILDKXARICPKDFTCPN

SEQ ID NO: 306274 - protein, 488 aa, Zea mays
  unsure (1)..(488): unsure at all Xaa locations
  Clone ID: MRT4577_42387C.1.pep
MMKGGGGKETLTASFLRFLLLLLLPLTALYFFYTLHLLLTSASSAASNCAPDAVSVSRMSANLTAVAEKQLPPSTVAGSTSTTLQHVVFGIAASSRFWDKRKEYIKRGWXREVRESNMSTACTGLLAIRISSDTSAFPYTHRRGNRSAIRISRIIFETFRLGLPGVRWFVMGDDDTVFFPDNLLTVLNKFDHRQPYYIGSLSESHLQNIYFSYGMAYGGGGFAISRPLAEALVRIDDRIQACMAELGVLLTKHLGFHQYDVYGDLLGLLASHPVAPIVMLHHLDVVKPLFPDARSRPSAVRRLFDGPVKLDTAGLMQQSICYDSANRWTVSVAWGFTVLVARGIMSPREMEMPARTFLNWYRRADYTAYAFNTRPLARSPCQKPAVYYLSSARREALRGGETTVTRYERWRHPNETRPACRWDITDPDAHLDHIIVLKKPDPGLWERSPRRNCCRVVSWPKDGKSGEKTMTIDVGVCREGEFSQVAGA

SEQ ID NO: 306275 - protein, 66 aa, Zea mays
  Clone ID: MRT4577_42388C.1.pep
RAYYKPTNIKCRKIGYIIGYALNRGLPLILHLNRDCSGMYSLGGPPKNKKILFWVVNQINHVAGAT

SEQ ID NO: 306276 - protein, 95 aa, Zea mays
  Clone ID: MRT4577_42389C.1.pep
HFFKNRLMYRTAGGSMRNLPKGAGPHKNNNASATFHFLQKVKAGLPVDPLVCAAANTNGTVLNFCSAMFSLNLTEHNKHLKEKLVPIAGDQPSNG

SEQ ID NO: 306277 - protein, 93 aa, Zea mays
  Clone ID: MRT4577_4238C.1.pep
FSPFFFFFFFFFFFFFFFFFLKNKPGINWKIMFQKPKLTVLKRGRGKQSAREIMISIAGKMILMKDSFPFRVRYPLSILYKNRPINKIPSTSI

SEQ ID NO: 306278 - protein, 146 aa, Zea mays
  Clone ID: MRT4577_42390C.1.pep
VNVSPREMEMPARTFLNWYRRADYTAYAFNTRPLARSPCQKPAVYYLSSARRAALRGGVTTETRYDRWRHPNETRPACRWDITDPDAHLDHIVVLKKPDPGLWDRSPRRNCCRVVSSPKDGKNGEKTMTIDVGVCREGEFSQVAGA

SEQ ID NO: 306279 - protein, 495 aa, Zea mays
  Clone ID: MRT4577_42391C.1.pep
MMKGGGGKETLSASFLRFLLLLLLPLTALYFFYTLHLLLTSASSAASNCAPDAVSVSRMSANLTAVAEKQLPPSTVAGSTSTTLQHVVFGIAASSRFWDKRKEYIKVWWRPRGAMRGYVWLDRKVRESNMSTARTGLPAIRISSDTSAFPYTHRRGHRSAIRISRIVSETFRLGLPGVRWFVMGDDDTVFFPDNLLTVLNKFDHRQPYYIGSLSESHLQNIYFSYGMAYGGGGFAISRPLAEALARMQDGCLRRYPALYGSDDRIQACMAELGVPLTKHPGFHQYDVYGDLLGLLASHPVAPIVTLHHLDVVKPLFPDARSRPSAVRRLFDGPVKLDTAGLMQQSICYDSANRWTVSVAWGFTVLVVRGIMSPREMEMPARTFLNWYRRADYTAYAFNTRPLARSPCQKPAVYYLSSARREALRGGETTVTRYERWRHPNETRPACRWDITDPDAHLDHIIVLKKPDPGLWERVIFCATSFLFLILRLASINCNA

SEQ ID NO: 306280 - protein, 71 aa, Zea mays
  Clone ID: MRT4577_42392C.1.pep
HILRRLASSRHTQTDTAHVDMNRGGGAEDLKHILMQSSSLGCPKHHSGSGYEERRGRGRGHCFVLRSAAQP

SEQ ID NO: 306281 - protein, 164 aa, Zea mays
  unsure (1)..(164): unsure at all Xaa locations
  Clone ID: MRT4577_42393C.1.pep
MGPISEGGVLPDSXLGWFDENDLLEEEYDHLFDDDKKDIDFAVXPRTSTPTAEESMCTGLIXRMRYYKEEKEHKILLILGNDGFIMNGGFKIYHKNKDKKDLDDGYGKNITEVDLDVDVADDGVYVXPRRGSIIXADDMTATEGNIEKSANISISDRNDILNAI

SEQ ID NO: 306282 - protein, 64 aa, Zea mays
  Clone ID: MRT4577_42394C.1.pep
FPRPPWGLRMVPLPSPPLVHAFYLEFPAGQTPDKLNMEEAFPPLFQRAVPLMARPGPQLLPSGF

SEQ ID NO: 306283 - protein, 150 aa, Zea mays
  unsure (1)..(150): unsure at all Xaa locations
  Clone ID: MRT4577_42395C.1.pep
PAASHSSCALRQWDEPLATRNANAGLGGREAETPTIILNHDLEGPTHNTGHGSCLPLGLQPIPMPTLGNNPNLCIXAEPLYRPGNKEGETNLDDNRLTPDHVNYTGGNNPTLDRNCFTRIXSAPCQASIINIAMNAYAPPANYAWGDYYH

SEQ ID NO: 306284 - protein, 72 aa, Zea mays
  Clone ID: MRT4577_42396C.1.pep
VGSQKHFPFTGKNKKTPLTGSQQPEPKTNNVPHLMHKPSWNASHKKTQRPGTYTTLLSYRIPCFSLTKKNTG

SEQ ID NO: 306285 - protein, 68 aa, Zea mays
  unsure (1)..(68): unsure at all Xaa locations
  Clone ID: MRT4577_42397C.1.pep
KIILMIIVGFPKKVVFVEDKIPGGVNDSNIXLSKEDFVNAPGEKLSVILCKKEIYIFYCVHQKVFGMF

SEQ ID NO: 306286 - protein, 394 aa, Zea mays
  unsure (1)..(394): unsure at all Xaa locations
  Clone ID: MRT4577_42398C.1.pep
MFGSEFHHLCHNVDNDLTWKAAKPENSNRDVPESSVRLGSSSSFNSVDDKFPYSGIFSLTDTDQLLDAVVSNVNPGGKQISGDSTSCKTSAADIPTTSYCRLKEPKQSESSSPLLIKNELAVSNFVKQSSFQEKAEDGCLSQNNAIQKSQIRLWIENGQNMKCESASASNSKGVDMSSKASRKRSRPGENPKPRPKDRQLIQDRIKELRELVPNGAKCSIDALLEKTIKHMLFLQSVTKHADNLKDSNKSDILGGENGPLKDYFEGGATWALDVGSRSMTCPIIVEDLDRPRQMLVEMLCEDRGIFLEIADFIKGLGLTILRGVMEARKNKIWARFTVEANRXDVTRMEIFLSLMRLLEPSYDGGGAGENPNNNIKMPLGIVQYPVIPVSGHLR

SEQ ID NO: 306287 - protein, 55 aa, Zea mays
  Clone ID: MRT4577_42399C.1.pep
TLTRGRTPGTWSANYSYVCIRDIIRDVLEKQGADFSVCLMSLTCHRRVHQSGCNR

SEQ ID NO: 306288 - protein, 66 aa, Zea mays
  Clone ID: MRT4577_4239C.1.pep
CYCNCMGSKRCDFLTKHSVYDVLRLGAKKIFGSRDTHQDLASVYSYTYRDVYIVIVCSSLTDRFLV

SEQ ID NO: 306289 - protein, 159 aa, Zea mays
  unsure (1)..(159): unsure at all Xaa locations
  Clone ID: MRT4577_423C.1.pep
RVLNILPEGKEPLDCSGHAXCVADSDGFTRAIEENSPSPSLDNPPEYGSSSSXLPRLCTTXLNIHDANXGCKNVLLXTALQALNDHRPDHAPYIHAYNEATSDHNLEPXLYPLLIALQHYHGXPFPKDLPDDRAYCNALCRPSSYVRLLHPKIARLQLC

SEQ ID NO: 306290 - protein, 46 aa, Zea mays
  Clone ID: MRT4577_42400C.1.pep
RRGPLAPSSSVARLVQPPSTDRLPHGFKGFFITTKCKNSISYPTTH

SEQ ID NO: 306291 - protein, 63 aa, Zea mays
  Clone ID: MRT4577_42401C.1.pep
LCKKGAIKIVLNFLDTVCIHCSYFQLLLLYVQLYSNAIVTYESRSQQPTTIYSSPNTLIVVHL

SEQ ID NO: 306292 - protein, 72 aa, Zea mays
  Clone ID: MRT4577_42402C.1.pep
FLHTLEQLQINIPLVGALVQISNYRKFMKDLLSKKKKLTDPDTIALTEGCSTVLINKFPPNLKDPESLSIPT

SEQ ID NO: 306293 - protein, 74 aa, Zea mays
  Clone ID: MRT4577_42403C.1.pep
SLRRDYRSLYCYVLAELLAPGAHAFSSIWVQGLIWFSACHYRIVLDSQTAKFTCLRYSWSRSILSTTTQFEYMC

SEQ ID NO: 306294 - protein, 126 aa, Zea mays
  unsure (1)..(126): unsure at all Xaa locations
  Clone ID: MRT4577_42404C.1.pep
MDDDASSSPAASYIRLVQHLIEKCICYKLNKEECMETLEKHAKIMPVVTSTVWKELEKENREFFETYKKDXGEEEEEAPGTCCSQEPALEQKKHSPSDGVQAHNRVVVEKEMRKQDPPSDRRRLMT

SEQ ID NO: 306295 - protein, 289 aa, Zea mays
  Clone ID: MRT4577_42405C.1.pep
MRPIAPCLPLLPRLYFYSPAGATRRPRSPSIPVPRDRRARPPPAHVPRQHPSEKPASASIPDPCRRRQRGPPPAGCFSQLGRRRSWTTTPPRLRRLRTSDWVCAYYCARMSDIQVQHLIEKCICYKLNKEECMETLEKHAKIMPVVTSTVWKELEKENREFFETYKKDRGGGGGGPRNLQEAAAAGHHPPPRLQVQQSCCSQEPALEQKKHPPSDGVQEHNRVVVEKEKRKQDPPSASASADGQEQRVVEKKEKRKDPPSDGQERRVMAKENSRKDPSASSKRSDKDND

SEQ ID NO: 306296 - protein, 90 aa, Zea mays
  Clone ID: MRT4577_42406C.1.pep
SEVSDSMTCLVISSTSSAASQFISILEYGVISSSSYSTASDLIGTACDEDPCPPSSLLYASHVLASPVESAEAYPPVVRLADEAFTFDFE

SEQ ID NO: 306297 - protein, 129 aa, Zea mays
  Clone ID: MRT4577_42407C.1.pep
LRLLVLPRLYVRLLLLFPLRSSRGSRRRRVVVEVEVEVAPVEVEVVIRTFGSVCLSVGCGVLRCSIGRFVLFHAISVVLSVLVRYWGLMVIRVFVFVIIIGKLRKEGLSVFRRLIVVFACYRFSPLELG

SEQ ID NO: 306298 - protein, 41 aa, Zea mays
  Clone ID: MRT4577_42408C.1.pep
VSTPAWAFLHSDFTSSPPLGFCLLKPLCVSRLPEESRNVYR

SEQ ID NO: 306299 - protein, 58 aa, Zea mays
  Clone ID: MRT4577_42409C.1.pep
VNKIHPKMIRTPQSARSRSRDSREMVRSESLYSSAVHTESSCALSVQRVQVEEVLIHR

SEQ ID NO: 306300 - protein, 116 aa, Zea mays
  Clone ID: MRT4577_4240C.1.pep
MHSSSPSSSAVAYSSSSPSHLSPADGFLCVKEGVDEMIKHVANEPSLGLYFVQQHAQASMPILLDVKGKVTEKTREITLHTEDIEDSICAVRPMAEFGLPIADDMIKDINKSLKIM

SEQ ID NO: 306301 - protein, 49 aa, Zea mays
  Clone ID: MRT4577_42410C.1.pep
LLHILTCVCSKKIVSYSICIRFLGILFQLFGGVKVNFMFNCGCKYHTVR

SEQ ID NO: 306302 - protein, 88 aa, Zea mays
  Clone ID: MRT4577_42411C.1.pep
SPWLLFPFLRQGFHPSMGESGMAPCVLWGVDRIALASLDVSVLLYMLVPPRRPPISRTAVGRLPAGRMRCSGFWGIPRARRSQTARIK

SEQ ID NO: 306303 - protein, 61 aa, Zea mays
  Clone ID: MRT4577_42412C.1.pep
SNGWQGLVVVVVHGTKLRLDNPGLLKQDEWSEAMSVKSYGSVPACLGVQYYRLSFCTLQCP

SEQ ID NO: 306304 - protein, 95 aa, Zea mays
  Clone ID: MRT4577_42413C.1.pep
SARGTVDLHPGVAALLPHHVGLGVFLATISSGLRSRKTLSMPGASSCYCPISSCSSLILSGRSWNITRTQSRLVRNVRNHIIHSRNHCRGLCRPA

SEQ ID NO: 306305 - protein, 161 aa, Zea mays
  Clone ID: MRT4577_42414C.1.pep
MGMLMNNDDSSSMHPRPQVLASLPLLVYEYKDHPNATTRMLIYSLPERSIVYTHNSSRPQMMMMEGNLSFSTPQGWLVILGQASEASIWHPLTGETITLPPIHGDHRIPDSCKCLLTRSSVAHPDCAVVLLDVTDPLMWFCPVNGGADRMWVQHAYDIGDH

SEQ ID NO: 306306 - protein, 609 aa, Zea mays
  unsure (1)..(609): unsure at all Xaa locations
  Clone ID: MRT4577_42415C.1.pep
HCTSIHRLEAVIRFCSVQELAMGSACSRNRGQVVHEDQLYSVKFSKSGSFKWLLHTLSRSSSDVLRKAQGPGPGRRPSLVELCVARVREDISRYSDFSMLPRDLSQQIFNELVRCSYITEELLGAFRDCALQDICLDEYPGVKDAWMEVIASQGQSLLSVDISCSDVTDSGLNLLKDCSNMQSLACNYCDRISEHGLKTVSGLSNLTSLSIKKCAAVTAEGAKAFANLVNLVNLDLERCPKINGGLIHLKGLKKLEKLNLRYCNGITDSDMKYLSDLTNLRELQLSSCKISAFGVSYLRGLHKLGHLNLEGCAVTAVCLEVISELASLVLLNLSRCGICDEGCENLKGLTKLKALSLGFNQITDACLIHLKDLVNLECLNLDSCKIGDEGLFHLKGLIQLKNLELSDTEVGSNGLRHLSGXLKRLQKCLRNLQSINLSFTLVTDIGLKKISGLSSLKSLNLDNRQITDTGLASLTGLTGLTHLDLFGARITDSGMNCFRFFKNIQSLEVCGGLITDAGVKNIKDLKALTLLNLSQNGKLTDKTLELISGLTALVSLNVSNSRVSNSGLHHLKPLQNLRSLSLESCRVTASEMDKLRLVALPNLISVRPE

SEQ ID NO: 306307 - protein, 196 aa, Zea mays
  unsure (1)..(196): unsure at all Xaa locations
  Clone ID: MRT4577_42416C.1.pep
MSWWNVDASRRHRLGLSVIAICRIFVWETTLELLKSLNLDNRQITDTGLSSLTGLTGLTHLDLFGARITDSGMSCFRFFKNIQSLEVCGGLITDAGVKNIKDLKALTLLNLSXNLXLTDKTLDLISVQTLMVSLYIXGLKKLEKLNLRYCNGITDSNMKYLSDLTNLRELQLSSCKISAFGVSYLKGLHKLWYLNL

SEQ ID NO: 306308 - protein, 206 aa, Zea mays
  Clone ID: MRT4577_42417C.1.pep
NDFNLLQIYRGPHFVKVLKLSVSAGLRNLQSINLSFTLVTDIGLKKISGLSSLKSLNLDNRQITDTGLSSLTGLTGLTHLDLFGARITDSGMSCFRFFKNIQSLEVCGGLITDAGVKNIKDLKALTLLNLSQNGKLTDKTLELISGLTALVSLNVSNSRVSNSGLHHLKPLQNLRSLSLESCRVTASEMDKLRLVALPNLISVRPE

SEQ ID NO: 306309 - protein, 69 aa, Zea mays
  Clone ID: MRT4577_42418C.1.pep
REEEEGTMPRTGQEEAPRRAYRDLCDAQRISTKLRADSGAREIFMEEVGRRRPWCSCRVDEIISGQWGS

SEQ ID NO: 306310 - protein, 595 aa, Zea mays
  Clone ID: MRT4577_42419C.1.pep
LIGLSSAHPESVTFMGSACSRKRGQLVQEDDLYSARFSKSGSFKWLLHTLPRSNSADVQRRAQGPAPNRCPSLVELCVAKVCKDINMYSDLSLLPRDLSQQIFNELVECGCLTEASLGAFRDCDLQDICLGDYPGVTDAWMEVVASQGQSLLSVDLSCSDVTDSGFNLLKDCSSMQSLACDYCDQISEHGLKTLSGFSNLTSLSIKKCAAVTAEGAKAFANLVNLVNLDLERCPKINGGLIHLKGLKKLEKLNLRYCNGITDSDMKYLSDLTNLRELQLSSCKISAFGVSYLRGLHKLGHLNLEGCAVTAVCLEVISELASLVLLNLSRCGICDEGCENLKGLTKLKALSLGFNQITDACLIHLKDLVNLECLNLDSCKIGDEGLFHLKGLIQLKNLELSDTEVGSNGLRHLSGLRNLQSINLSFTLVTDIGLKKISGLSSLKSLNLDNRQITDTGLASLTGLTGLTHLDLFGARITDSGMSCFRFFKNIQSLEVCGGLITDAGVKNIKDLKALTLLNLSQNGKLTDKTLELISGLTALVSLNVSNSRVSNSGLHHLKPLQNLRSLSLESCRVTASEMDKLRLVALPNLISVRPE

SEQ ID NO: 306311 - protein, 403 aa, Zea mays
  Clone ID: MRT4577_4241C.1.pep
MSALVSLQELSITDFDQALKDVIPEDMLLEPTDGDMMDVCSDIPDVGLEVSQAVYRASSTLEGSLLYQEVGHDCPTPMEVTEDPSALEVAVAENPAPKGGAGGYPAPEGVAGNDPTRVGSAGCNPAPEGVAGSDPALASSASYNLAPEGVQGVALEASESDAKILISASGTESTPDDALQIVLVDLPSSSYNTASHDLGLPSLFSNLQIWPDGSLSLRRNIFNIKPIQPDGTPSLRRSIPKLDSERVADEEEKRALAASRDNLDKLYRDASNSLTILERSHHFTMIDLDHHRRELQVSQDEILRLRQLVSSKDSIVKDLRASKRSVAQELEAARLATQVVEDNCATLKAQCDKAMDKAIHARRILMRRPSVVVPDDIIADVKAAPDASSRPSSLIPPAKDIAK

SEQ ID NO: 306312 - protein, 77 aa, Zea mays
  Clone ID: MRT4577_42420C.1.pep
VTTLTHEGNRGVIFEAYSSMHFYAAALDVHNLALKGHLKYSHCQMRLGQLGHKHKALDKMSMFKSLSDNGQESAYTM

SEQ ID NO: 306313 - protein, 137 aa, Zea mays
  unsure (1)..(137): unsure at all Xaa locations
  Clone ID: MRT4577_42421C.1.pep
MKLDCKTLDAQVERADVELFDKGFDFXIDPVDVNTVAQEXDDLVDLNDLDYMPDVVDXEESLFEADAIDRYFDSKYAGQEADLLHSKAAGVXLEECVEALVLQFDAYDTTLVLQLVVMTLLRGMQELWAMQKHEENF

SEQ ID NO: 306314 - protein, 139 aa, Zea mays
  unsure (1)..(139): unsure at all Xaa locations
  Clone ID: MRT4577_42422C.1.pep
KLRLLSIIVLNLSILSKILFKSHFNFSLLSFLLSHSFSFLFDYLYSSIFSYIFRIYFHFHIILFFLFIIIFIHFIFFFFXFYYFLLILLLFLXLFLIXLLISFFFFFSFYIILHFSLSLNYLYHFLIFLIFIYFYFIIY

SEQ ID NO: 306315 - protein, 40 aa, Zea mays
  Clone ID: MRT4577_42423C.1.pep
PTYAGHSARRVFGQCVSSTDAAEALQGLNRSLSEKPAVRL

SEQ ID NO: 306316 - protein, 82 aa, Zea mays
  Clone ID: MRT4577_42424C.1.pep
MEPRSAIYRSGALLLLAAILAEVVIPASAIGDKCAACKAVAAELEIGISSVSESITSLPVAFNLGFVWLHPDNQYPYVLFYL

SEQ ID NO: 306317 - protein, 94 aa, Zea mays
  unsure (1)..(94): unsure at all Xaa locations
  Clone ID: MRT4577_42425C.1.pep
WXRXXXXCXCXGLVLXAXXXXXXVLVXLFXXXXVFXVAAPPXXVSXFXXLXLXVXPXXXCXXXVPLLXFFFGCCXXRCSXSRXXFXALRFRSGA

SEQ ID NO: 306318 - protein, 207 aa, Zea mays
  unsure (1)..(207): unsure at all Xaa locations
  Clone ID: MRT4577_42426C.1.pep
KRDRIRHDDKDLDLRKCNPLHLRAVLEDERFAKXQIVLLHASYPFSKEASYLASVYSQVYLDFGLAIPKLSVHGMTSSLKELLELAPIKKVMFSTDGYAFPETYYLGAKRARDVVYRVLSAACEDGDLSIQEAIEAIEDIFRRNALNLYKLNVVNGSISHGTASVGKSVSASAVGQVVLVVRLAWPDPSGHRRSPALPARRVPAPIK

SEQ ID NO: 306319 - protein, 121 aa, Zea mays
  unsure (1)..(121): unsure at all Xaa locations
  Clone ID: MRT4577_42427C.1.pep
MLKTGKRGFFHFLPHPAHKTVRPTPQDSNKLFVRKKPQLDLIDHDLYKELXDYNTTISYASLCNALVFSDAKAIKENSAKLGAGEDLHALSAAVLTMRPMKKLIDPSPDHTVLGKNTPYSK

SEQ ID NO: 306320 - protein, 70 aa, Zea mays
  unsure (1)..(70): unsure at all Xaa locations
  Clone ID: MRT4577_42428C.1.pep
MEDFCAVCSKRLEWVAYRSCRHRQLCSTSIVRLRFVMGDNKCCNCKNVXPILLVTRATGKSTRVITDFSV

SEQ ID NO: 306321 - protein, 142 aa, Zea mays
  unsure (1)..(142): unsure at all Xaa locations
  Clone ID: MRT4577_42429C.1.pep
MKNSHQGQRGHRATGHDHHYGNPVGGEKHGTGGGRHGTFFIGAMGHLAXHGAAGMGRGQFXPEREEHITRCILHRFRRSNSRWADDNRMGAKRXNGINEKIKDNLAGGDNDDQHATCTTGSTYGHXVHTENAYGLNGHTGGT

SEQ ID NO: 306322 - protein, 103 aa, Zea mays
  Clone ID: MRT4577_4242C.1.pep
GLLIFLFFGINQLTLFDFKDPKTRCLQFPIKSASMGLTIFKRGYLLVLGNPLGGKLCIFLKHPFNSGPKGSQKDRGSIAKLYQVGQTGARFSFYLKNIYYAPL

SEQ ID NO: 306323 - protein, 44 aa, Zea mays
  Clone ID: MRT4577_42430C.1.pep
MDYAETASKPYSLRCSPNQHSKRLDSDMPLPCSYTVATSSLKCK

SEQ ID NO: 306324 - protein, 241 aa, Zea mays
  unsure (1)..(241): unsure at all Xaa locations
  Clone ID: MRT4577_42431C.1.pep
IAAGRYVFPASTLGYARGVXAPAMAPKARLAAYNVCWVGGCFDSDILAAFDAAVADGVDVVSLSVGGVVVPYYLDAIAIGAFGATEAGIVVSASAGNGGPGGLTVTNVAPWMATVGAGSMDRAFPANVRLGDGQVLDGVSVYGGPALESGKLYELVYAGASGGGASSASDGYSASMCLDGSLDPAAVRGKIVVCDRGVNSRAAKGDVVRRAGGVGMVLANGAFDGEGLVADCHVLPATAVG

SEQ ID NO: 306325 - protein, 81 aa, Zea mays
  unsure (1)..(81): unsure at all Xaa locations
  Clone ID: MRT4577_42432C.1.pep
STHLPMGGLLLCKGCRVHACTAPIRNPACFWQIDCLRDSSPMFQPPIGSLLSPKAPTVCTLFAPRNKNKAPPAFPSGSWXT

SEQ ID NO: 306326 - protein, 323 aa, Zea mays
  Clone ID: MRT4577_42433C.1.pep
FALFRVQGLKHYCVQAIQVDLVASSLNSSHCYILQDNGLFLTWLGGLSSPSDHNILDMIMSKLCPMEQSLLVREGSEPDHFWKALGGRSEYSKEKRVKGWPADPHLYACRFEQGLLKVKEVFSFCKDDLATEETLILDCNEEIYVWVGLHSDITSKEQALNVGKMFLKDAVHGGRSMETTVYAVTEGDEPGFFTSFFDWDNSKQSYMVGNSFERKLAVLKGVSPKLETPDRSLRRPSRRPGVSSEPTTPEHQQPTARRAFGSTSAGRFARERSPAVAPPTLSPSPKSRSSSSTPTTVARRLFPASVHASEAVHVVSTATARRR

SEQ ID NO: 306327 - protein, 98 aa, Zea mays
  Clone ID: MRT4577_42434C.1.pep
ESYWLVKCFDDGEPGEEFLSSCVSCKKKLDGNDSCIYRGEKAFCSRNCRDQEVLTEEEENITTTVSPLSSAGSSSSFNDDIFMAEMVVLAAPVDVHYP

SEQ ID NO: 306328 - protein, 239 aa, Zea mays
  unsure (1)..(239): unsure at all Xaa locations
  Clone ID: MRT4577_42435C.1.pep
PAKEPESLKRCFHFLNQTSRSFAAVILELHPDLLVPVTLFYLILRGLDTIEDDMTIPLAKKEPLLRNFQDILEQGGWTFTENGPNEKDRQLLVEFNVVIEEFKKIKPAYKDIIKDITTRMGNGMADYANNAEFNAGVKTVKEYELYCHYVAGLVGEGCTRLFVEAGLANAALLKRPELMESMGQFLQQVNITRDIREDFDDGPRFWPKEIWSKHVDHFEEXCSAGNKEKALNASFGMIL

SEQ ID NO: 306329 - protein, 139 aa, Zea mays
  unsure (1)..(139): unsure at all Xaa locations
  Clone ID: MRT4577_42436C.1.pep
SQQWQPPIFLPSLMLLXGLPALAAIATIFTXWSKTPISSLITPELSXRAXSVFENLILKCYMMQXAIAAGILPLSPLFIEESSALLQXINCGEIIVTYIRAQQLQQFELETLLAXTQHQKFRQFNQIGSLNYASYLQQQ

SEQ ID NO: 306330 - protein, 115 aa, Zea mays
  Clone ID: MRT4577_42437C.1.pep
LKHINSSGFRTCKYVKNTLKPCPLEPYPGLNTKRAPLYRYHVGRTIAASINASYQSGVGLHVGVALFDGLEPGVLVQDGMQLDGGGGQGLDDAPEPGARRQQGPARRRFGQALPL

SEQ ID NO: 306331 - protein, 144 aa, Zea mays
  Clone ID: MRT4577_42438C.1.pep
LQPFLSCTQKPYPPSCPGVLRWDLQHATRFPSLAPRLAHLGSHAQTFSHGARRTSSQRCSSLPVFAARSASPRPCRGILLALPPMESCRARVAAHPSDSPSRRAPIHLAAAAALVLPLRAPSSVSAHPAMLSLCACRSSLLWPL

SEQ ID NO: 306332 - protein, 180 aa, Zea mays
  Clone ID: MRT4577_42439C.1.pep
MWFAGRASATAPLPLLLLLLVAGAAATDQIFTTSGVPFGKNSREPRYRVEFHPVDSPYHPENGQESEPMKDHEGRQYTCYLPVEETKTMKSIVPQNATNVIIESERKVKPKEPDELLEVLKDQCFYRHEGWWSYEFCYYGKIRQVHVENEKVIQEYVLGEYEPDATDAYHDNHTSESADE

SEQ ID NO: 306333 - protein, 65 aa, Zea mays
  unsure (1)..(65): unsure at all Xaa locations
  Clone ID: MRT4577_4243C.1.pep
EGKVCLGAVPLAVSLAGLTGDGRVLXRFLLTQRMKHCLLHDAAITDYRIWLQIANKGPGTTQRPW

SEQ ID NO: 306334 - protein, 73 aa, Zea mays
  Clone ID: MRT4577_42440C.1.pep
KAEKYNGPVVGVLEDNSDEGCKRCPCTIHRVKEVRQDIHFHFKADTPVHALKDLTQRAERVLGLHPRVRERVG

SEQ ID NO: 306335 - protein, 191 aa, Zea mays
  unsure (1)..(191): unsure at all Xaa locations
  Clone ID: MRT4577_42441C.1.pep
QNDAIMKQLAESQGEIGELQRKLEDADARYGLLQDSLQRHEENMAALETSLXDLKGSXDAIMKQLAESQGEIGELQRKLEDADARNGLLQDSLQRHEENMAALETSLRSERQQNDAIMKQLAESQGEIGELQRKLEDADARNGLLQDSLQRFHYYLVPISSVMFQLPCYPSVKITHHVSELIWVNYCPVSL

SEQ ID NO: 306336 - protein, 76 aa, Zea mays
  Clone ID: MRT4577_42442C.1.pep
AETNMPLAFSGTTVLPRTGQHINVKRRAPRGLARRLARRSFVMLARKGPPSRMSKLKAHLSLCSSDVEMTIQTCWW

SEQ ID NO: 306337 - protein, 75 aa, Zea mays
  unsure (1)..(75): unsure at all Xaa locations
  Clone ID: MRT4577_42443C.1.pep
MSGARRAPALAAALLLLVAAALASPPASAAATLQCAQVAQLMAPCTPYLTXAPGMTPYGVCCNSLAALSQLAAAR

SEQ ID NO: 306338 - protein, 110 aa, Zea mays
  unsure (1)..(110): unsure at all Xaa locations
  Clone ID: MRT4577_42444C.1.pep
AVFSTDADNQTQVGICVLQSEHEMATYNKCLGEFDLMDIPPAPRGLPQIEVTFDIDANGIVTVSTKDKATRKDQXRSSGGLSEADIXKMVQEAELRAXKNQERKSPHQLI

SEQ ID NO: 306339 - protein, 265 aa, Zea mays
  unsure (1)..(265): unsure at all Xaa locations
  Clone ID: MRT4577_42445C.1.pep
MTIPGGEQRILPVPAVLFIRRPGAPFGNAMHERFRVLELPSPASGEQAAAFLAAAAAEPDPPRAAVVMGGGAVRADAAFLDAVPSVRCLVSTAAGVDHIDLAECARRGVAVANSGTVYAADVADHAVGMLIDVLRRVSAAGRFVRRGLWPLQEGEYPLGSKLGGKRVGIIGLGNIGSLVAKRLEAFGCVICYNSRRRMDSVSYRYFSNVQRLASESHVLVVACALNKETRHIVNEDVLEALRNDGVDINIGRGASIDEAXLISAL

SEQ ID NO: 306340 - protein, 60 aa, Zea mays
  Clone ID: MRT4577_42446C.1.pep
KLHCTKASCSASCGPGHCPHEPAHLLLVSVHCCSVTRLTNLWVSTQSISLPRTVNFSGSS

SEQ ID NO: 306341 - protein, 210 aa, Zea mays
  Clone ID: MRT4577_42447C.1.pep
MEEPVPADPPRIFWKSRRSANGRSLQQEPDKDATEETNEQAQEEPMKTDDATDTAAAAAAATAEPYPKANLSEKRKALFEPLEPINGKRGAAETLLPPPDFEPASYPKGWLVGKKRKLVNVDVVESMRRIAIQEMNRKDREINGLNEQLEEDSRVLELLQKQLADERRKRTEIEKENSMLHEQVTMLMNMLDENEGFDEDGEAPPPDSFD

SEQ ID NO: 306342 - protein, 107 aa, Zea mays
  Clone ID: MRT4577_42448C.1.pep
PGAEKPRGRRSSKAWRSPFRLIPPGFSGSQGVQVQDREINGLNEQLEEDSRVLELLQKQLADERRKRTEIEKENSMLHEQVTMLMNMLDENEGFDEDGEAPPPDSFD

SEQ ID NO: 306343 - protein, 236 aa, Zea mays
  unsure (1)..(236): unsure at all Xaa locations
  Clone ID: MRT4577_42449C.1.pep
MEEPVPADPPRIFWKSRRSANGRSLQQEPDKDATEETNEQAQEEPMKTDDATDTAAAAAAATAEPYPKANLSEKRKALFEPLEPINGKRGAAETLLPPPDFEPASYPKGWLVGKKRKLVNVDVVESMRRIAIQEMNRKXMRNHIFLVVRQCCFFXDRXHRCVQSNREINGLNEQLEEDSRVLELLQKQLADERRKRAEIEKENSMLHEQVTMLMNMLDENEGFDEDGEAPPPDSFD

SEQ ID NO: 306344 - protein, 88 aa, Zea mays
  unsure (1)..(88): unsure at all Xaa locations
  Clone ID: MRT4577_4244C.1.pep
LRPVISLQMGGERVYIXVLNKCAWETGGGVHPRFHLWGPLGWGYVLXIWGXAGGVEGGGXICGGTGRVRLAQEEIPRYQRGDTGXRGL

SEQ ID NO: 306345 - protein, 131 aa, Zea mays
  Clone ID: MRT4577_42450C.1.pep
LFKGAMAVLAPEVLGHNRFFMPLNFLGRPPPPFLFPPGFYPLPPGPGFFWKFFCFGDRSLPFLVFHQEFLVRGSFQLGFVRSLPFLNPARCSSPFNGPVKFLVSGDGGGFPPPPSREVPFPFSFWGRGSCS

SEQ ID NO: 306346 - protein, 151 aa, Zea mays
  unsure (1)..(151): unsure at all Xaa locations
  Clone ID: MRT4577_42451C.1.pep
PRVRTEWCVGRSDNNSEREMDLTRTSRATAXKMPADKYQRLNSYLMNLDDSIEHDQSREXDCNSDLITSXKEMRDQIGLTKRSGFVNISTREETYXALTEKNGKXISGKPLYVASAQCIEDRTAMLQAQFSHMHPAVPMTPTLTLRLAMDS

SEQ ID NO: 306347 - protein, 43 aa, Zea mays
  Clone ID: MRT4577_42452C.1.pep
NSAGGPLRPLFLETRGGSLLQGTLRSHSFLPSSNCTYTKYMVW

SEQ ID NO: 306348 - protein, 63 aa, Zea mays
  Clone ID: MRT4577_42453C.1.pep
NFPLLARGPPLPNGLWGFWVFPHFPKSPRLPYGPAFFLALGLGPLVGVGLDRAPLFIGLINGD

SEQ ID NO: 306349 - protein, 125 aa, Zea mays
  unsure (1)..(125): unsure at all Xaa locations
  Clone ID: MRT4577_42454C.1.pep
MTTRRTANNAKQAEESGSPRDXPDRVLYLLPTADKPPSYLTGDCPREYRWNTVVLSADPXTFDKIRMLYVIHSRWAMLGALVCAFPEVLARHEHEIGKVGWLKVCSQILNDGDLDYLSIPSLMHT

SEQ ID NO: 306350 - protein, 77 aa, Zea mays
  unsure (1)..(77): unsure at all Xaa locations
  Clone ID: MRT4577_42455C.1.pep
MAPYAELNPAANKPADEVPAAEIAPAGKMPKADXRVPTGXFASKEGWQGNRGQDKGXYYGETYKFYIFKELEQGHPG

SEQ ID NO: 306351 - protein, 55 aa, Zea mays
  Clone ID: MRT4577_42456C.1.pep
TVLDLSGALAPASSRSCLVSLALLTCSFRIISWRDCPKRSPTATHSRRVSISLSG

SEQ ID NO: 306352 - protein, 560 aa, Zea mays
  Clone ID: MRT4577_42457C.1.pep
MGTALQQGSTGPMQGALNAQHQSNSNMISNNAMSTMQTNTNAMQANVNSLQQLKQHQEHQMMQNQQMKQRQQMLQQMQQKKILQQQLPIQQLQKQQQQGPIQVQQLHSGNDVNELKVRQGAAIKSGMYQPLNQRNYYQQIKRGDVFPISSPQNLQASSPQISHYSHVDQHSLLQSQVKTGTPLHSANSPFVPSPSPPVAPSPVPLDSDKPLSNLSSLTSAGQAGHQQTSLAPLTQSIAVNTPGISASPLLAEFTSADGGQVSVPTQVPTKSSAAERPLDRLLKALRTTQPESLSAAVSDIGSVVSMIDRIAGSAPGNGSRAAVGEDLVAMTKCRLQARNFITHDGSGASKRMKRDTGAMPLNVSSAGSLNDSLKQSYTVGTPELQSTATSRVKCQRAEVNHVLLEEIQEINKQLIDTELHVSEDDAESFTTSDMAEGTVIKCTFTAVAVSPSLKSMFASAQMSPILPLRLLVPGSYPKCSPVLLDKFPDEQCRNSDDLSTKAKSKFSVLLRGLAEPMSLREIARTWDACARKVIAEYAQQTGGGSFSSSYGCWESCVGAS

SEQ ID NO: 306353 - protein, 68 aa, Zea mays
  Clone ID: MRT4577_42458C.1.pep
RATPLSAICSKHVGFFYLICQRVCACRSSELCSLKSLRSPSFFADKNFFFSSWAPILHDSEIAEKSSC

SEQ ID NO: 306354 - protein, 62 aa, Zea mays
  Clone ID: MRT4577_42459C.1.pep
TTFKRPTACMNPGDMSSHIPLSYRLSPLNFMCLNKAHTLSTSLLTRPTNHAIDATTFTLTEE

SEQ ID NO: 306355 - protein, 66 aa, Zea mays
  Clone ID: MRT4577_4245C.1.pep
YFTDYRRHAVISLIESGHMMGYTTVGAQDLWGERTRPSDLDRWSKVMNRGLTWIVQLASNGPNESI

SEQ ID NO: 306356 - protein, 42 aa, Zea mays
  Clone ID: MRT4577_42460C.1.pep
LNVRNYGFRKYYILYFRKICKVEELWLMIVIEEIVNGYRFML

SEQ ID NO: 306357 - protein, 1055 aa, Zea mays
  unsure (1)..(1055): unsure at all Xaa locations
  Clone ID: MRT4577_42461C.1.pep
STQMQSSQQPMMQMSSGLQPGQTAIPQTQSMTMHSATQSGIQQNPLNSVQQSVQPLLHQPTQSVVRQQQHPQSMHQQSSLQQTQPTQQPNIPLQQQQPQLMNQQSNLQQNQLMNQQSAKFETQQQQRLPVQSNNLLNMQQTQQIRKVLSEYAQQPRGGSFQGNMSSLHQQQHQQNQQQQQLLGTGPNARMSSLIQQKSVCLLEAPSFCYWVNVGFITSXSVYSQVYPSQQLMMSQFQSQPNQMQQQLGMQQRLQTSAGMLLQQNNIDQKQYVQAQRGLQEAPSTSVDSTAQTGHPGIGDLQEELYQMIKSLKDQYFVELNELYNKVSIKIQQIDNQMPAQKSAEQYEKMKGFKGMLERTLHFLQVNKSNIHPGLREKIPIYERQILSILSSQRRKPVQAPGQQTFQQSSGQAPSSNISQQLQTSQGLQQHDSHTSQMPQASLPSMNTGVQTSGAPAPQGTNFGVPTTQQNVTNAPQAGSNLENAQGNNFNHVQHGSMGAALQQERTGPMQGALNAQQQSSSNMISNNAMSTMQTNNNANANSLQQLKQQRQEHQMMQSQQMKQRQQMMQQIQQKQTLQPQLPIQQLKKQQQQGQMQFPQLHSGNDVNELKVRQGAAIKSGMYQQLSQRNYYQQIKQGGVFPISSPQTLQTSSPQISHHSPQVDQHSLLQSQVKTGTPLHSANSPFVPSPSPPVAPSPMPMDSDKPLSNLSSVTSAGQAGHQQTSLAPQTQSIAVNTPGISASPLLAEFTSADGSPANVPTQVPAKSSAAERPLDRLLKALRTTQRESLSAAVSDIGSVVSMIDRIAGSAPGNGSRAAVGEDLVAMTKCRLQARNFITHDGSGASKKMKRDTSAMPLNVSSAGSVNDSLKQSYGVGTPELQSTATSRVKWQRAEVNHALMEEIQEINQQLIDTELHVSEDDAESFTTSEGGKGTVIRCTFTAVAVCPSLKSVFASAQMSPILPLRLLVPASYPKCSPVLLDKFPDEQCRNSDDLSTKAKTKFSVLLRGLAEPMSLREIARTWDACARKVITEYAQQTGGGSFSSSYGCWESCVGAC

SEQ ID NO: 306358 - protein, 87 aa, Zea mays
  unsure (1)..(87): unsure at all Xaa locations
  Clone ID: MRT4577_42462C.1.pep
VRARXTSSGARAXDRXAPWGPGVRAAAAARAGRGTFRWEAKRERWCCRKEAVATSGLEAATQRRGRGSVQDMGAAARGREEHDETLG

SEQ ID NO: 306359 - protein, 103 aa, Zea mays
  Clone ID: MRT4577_42463C.1.pep
SDFFSLLRGTNHTTGSGSIFLSLLQSWEKNRERHGEKERGSAIGLYRRRAGSSCRGATGCFTGAACHHSERHCCLPRTEGKGVDPAKNDQRWRVALTRTCTPH

SEQ ID NO: 306360 - protein, 78 aa, Zea mays
  Clone ID: MRT4577_42464C.1.pep
PPTLPFRFCFDSRTTCRAYFLTCQALIFVELAPHPPPSPLTLRRPCLDPMATILLFLLLITHLFTSILLPSSKLIALT

SEQ ID NO: 306361 - protein, 85 aa, Zea mays
  Clone ID: MRT4577_42465C.1.pep
SPLALGCLSEKQGFFFSGPQGSPGPFKFLRPGGYSPKIFWESFFFFFPKKKKKKKKKKKKKKKKKKKKKKKKKKKKKNSRGGRRY

SEQ ID NO: 306362 - protein, 65 aa, Zea mays
  Clone ID: MRT4577_42466C.1.pep
CNMSSAESSMIIVVFSPPYSARDNNHDWTLILSYQIKCPMARRHRDRRRPGLFSRGGERAPQALL

SEQ ID NO: 306363 - protein, 56 aa, Zea mays
  Clone ID: MRT4577_42467C.1.pep
VFSNYVSFSQFFYLLCYFICFIYFFIFIYYVLYSFHPDCSFRSLLTLTLPLMFMSD

SEQ ID NO: 306364 - protein, 141 aa, Zea mays
  unsure (1)..(141): unsure at all Xaa locations
  Clone ID: MRT4577_42468C.1.pep
QAEQSRAASCVREEDDSQEQNEHRSMAVMAGAASMEVEQGPPGLPVPSHRGGAPRLLPLPRGPRQAAPLRHHRQPQHLPLPPKEDMVICKIYRKATPLKELEQRASAMEEMQTRIGGARATSLVQAXGSTGDDYLSSDDTS

SEQ ID NO: 306365 - protein, 273 aa, Zea mays
  unsure (1)..(273): unsure at all Xaa locations
  Clone ID: MRT4577_42469C.1.pep
MAVMAGAASMEVEQDLPGFRFHPTEEELLGFYLSRVVHGKQLHFDIIGSLNIYRYDPWDLPAMAKIGEREWYFFVPRDRKXGSGGRPNRTTERGFWKATGSDRAIRSSGDAKRVIGLKKTLVFYQGRAPRGTKTDWVMNEYRLPDHSAAGRAAPPPPPKEDMVICKIYRKATPLKELEQRASAMEEMQTRIGGARATSLVQADGSTGDDYLSSDDTSFLQFPVLVLPRAVGRQLRRAQGGQDGGRGRHDGHGSVDVVLPTACRERCRPGGEAR

SEQ ID NO: 306366 - protein, 270 aa, Zea mays
  Clone ID: MRT4577_4246C.1.pep
EAIFVDPALRGKYCVCFDPLDGSSNIDCGVSIGTVCHCHSRWCFKPSYHRDIYTRARCYIRICSLQIFGIYMVKDKDNVTLEDVLQPGTNMLAAGYCMYGSSCTLVLSTGNGVNGFTLDPSLGEFILTHPNIKIPRKGKIYSVNEGNAKNWDVPTAKFVKKCKYPEDGSPPRSLRYIGSMVADVHRTLLYGGIFLYPADQKSPNGKLRVLYEVFPMSFLMEQAGGQAFTGKQRALELAPAKLHDRSPVFLGSYDDVEEIKALYASMSNSG

SEQ ID NO: 306367 - protein, 66 aa, Zea mays
  unsure (1)..(66): unsure at all Xaa locations
  Clone ID: MRT4577_42470C.1.pep
MGGLRKGRKGLGNGGTKHHPKGLLDNIQGITKPAIRKLSXMGGLNRISGLIYEETPGVLXIFLDNL

SEQ ID NO: 306368 - protein, 138 aa, Zea mays
  unsure (1)..(138): unsure at all Xaa locations
  Clone ID: MRT4577_42471C.1.pep
GGPLGEVVDPLSPGGSFDPLGLPXDLXAFPGLKVKELKNGPPPLFSMFGFFVQALVPGKGPLENLSDPLADPVNNNAWAFAPPFVPAKLGGGGAPPPRPPLGIFRCLDARERPLVPVCPLMLISSRPRVPSARKNFCV

SEQ ID NO: 306369 - protein, 348 aa, Zea mays
  Clone ID: MRT4577_42472C.1.pep
WVPRGRPGHLFECYSNRVLPWLLASGGVNELALSFALHLLDETEDLTVLDRISSQGLLDSLMTGMKLLVGVCTEEQQSLIVQKAHSTISSMLSLPMELMTDRLLPVDELVPLHSVSETALISMFSSIIIGLRPQTPVPDMMVMIKLFTVFLLNGKMPAAYALASIFNKYLHNPEFSHENQMDKILDDILERCFSTVLANSCSKTSQSCAGTSDVNFSDVSSRNKLSKINILSSLAWIGKGLLMRGDEKVKDISMFLLKILCSDEILSTVPCHQEEPYGGDSSDTSLAISAASAFHVMMSDSKMCLNKKFHARIKPLYKQRFFSIMMPIFLSKIRETTVVTTKLALYRA

SEQ ID NO: 306370 - protein, 58 aa, Zea mays
  Clone ID: MRT4577_42473C.1.pep
GVWLCLNAITLERQVNHGVYELVPFRVHLPCVQCRLCNKVSRARCFAKGSTGTLFQLA

SEQ ID NO: 306371 - protein, 66 aa, Zea mays
  Clone ID: MRT4577_42474C.1.pep
LSYIPKYQPKAFDDRIDECHKINFFFPICKKNPWDQKLSGGIPFGNSPPVKSKRGTLKKGIFSNNV

SEQ ID NO: 306372 - protein, 93 aa, Zea mays
  unsure (1)..(93): unsure at all Xaa locations
  Clone ID: MRT4577_42476C.1.pep
KKKKKKKKFFFFGRNPPRGGVCRFPSPWGPFGLGLRGPNSPFRGXFYNSLARVFNRGDWKNPGCPPLNPFEDGALFXGWGFGERPPPPPFKLP

SEQ ID NO: 306373 - protein, 56 aa, Zea mays
  Clone ID: MRT4577_42477C.1.pep
PAGPGYRRLQHQAPLTNPTHTPPRPQPQTRLCQASRNNNRVAQIGTLSRDMRSYVR

SEQ ID NO: 306374 - protein, 103 aa, Zea mays
  Clone ID: MRT4577_42478C.1.pep
RAAARAGTSFFFFFFFFFFFFFFFFFFFNKNKAGPPLFIYLLVRMNDPRHAFIFWGGLLFSHELATSSSHMHYAFRSYWGGIVPPPKIRGHSGTPLMGARLHS

SEQ ID NO: 306375 - protein, 90 aa, Zea mays
  unsure (1)..(90): unsure at all Xaa locations
  Clone ID: MRT4577_42479C.1.pep
IXFFFFFFFFEXFLKFFWGYKHYRELQQGPCRQWSTEVDCITIAVVASMHYLPGKKANAWFNNLARQIYTQKTPFCFWRGLRTFPHSHDL

SEQ ID NO: 306376 - protein, 63 aa, Zea mays
  Clone ID: MRT4577_4247C.1.pep
SFTYATASDMINSFIGWRTLSRSCPNFQSETLKLRLSTAQTPGDGLSDGLNTPSSEYTYHNRA

SEQ ID NO: 306377 - protein, 209 aa, Zea mays
  unsure (1)..(209): unsure at all Xaa locations
  Clone ID: MRT4577_42480C.1.pep
LVGWPARKKWKDIKYLESVAGDRTIPVQVGKNYACTELKQELITFSQFLERMWSSDSANLAYIAQHQLFDQIKELHEDIAIPEYCSAGGGKLQSLNAWFGPHGTITPLHHDPHHNLFAQVLGRKYVRLYPASTSVGLYPNTESMLSNTSEVXVVCLDQXEYPKPAALEFVYCVLEEGDLLYIPPKWWRYVRSLSISFSVSFRWRTSQLP

SEQ ID NO: 306378 - protein, 93 aa, Zea mays
  Clone ID: MRT4577_42481C.1.pep
VKEHRNPPRPGDKMNILNTKAAREATPSITDTIHTLGHWQFQHAHSNQLQRGEHYAMHSQAQGLYRFKVEEWESQHRVGGGPSERTKPELCLP

SEQ ID NO: 306379 - protein, 143 aa, Zea mays
  Clone ID: MRT4577_42482C.1.pep
MASLALRPVIPATTASSRTLTIAVGSRSRHAATLHRGFRSRRLITCKAEPSGGNSTLELGAGAAGLASSAVVAWSLVVAGLVGWSVTTKVRTGSGLPAGPYGLLGAAEGVAYLTIAAIAVVFGLQFFQQGSIPGPLPSEQCFG

SEQ ID NO: 306380 - protein, 59 aa, Zea mays
  Clone ID: MRT4577_42483C.1.pep
MQVLIFRELFYKTTQANSKRRRHTHVGELRGRLSKCLSLGSCFTKLLDGHFSSFGHKTN

SEQ ID NO: 306381 - protein, 222 aa, Zea mays
  Clone ID: MRT4577_42484C.1.pep
RFIGRAKTPEMRWPFPFSEGKMFVLTIQAGVEGYHINVGGRHVASFPHRMGFALEDATGLAVTGGIDVHSVYATALPKAHPSFSLQQVLEMSERWKARPVPEEPIHLFIGILSATNHFAERMAIRKTWMQFPAIQSGNAVARFFVALSHRKEINAALKKEAEYFGDIVILPFINGHELVVLKTVAICQYGVHSVTYDYIMSCDDDIYVQKNIVMHQISTYNK

SEQ ID NO: 306382 - protein, 169 aa, Zea mays
  unsure (1)..(169): unsure at all Xaa locations
  Clone ID: MRT4577_42485C.1.pep
MASLALRPVIPATTXHPGPSRSSLAPAPATXTLHRGFRSRRLITCKAEPSGGNSTLELGAGAAGLASSAVVAWSLYTLNTTGCGLPPGPGGALGAAEGVSYLVVAGLVGWSVTTKVRTGSGLPAGPYGLLGAAEGVAYLTIAAIAVVFGLQFFQQGSIPGPLPSEQCFG

SEQ ID NO: 306383 - protein, 86 aa, Zea mays
  Clone ID: MRT4577_42486C.1.pep
ASGQGGPQGGVGGHGRRRHQLINLAFGASGRAWAVDLATSSRDPIIYDYLLKLCKFLDDFRFGSISVPTFIICWFNFHRFTQNPGS

SEQ ID NO: 306384 - protein, 132 aa, Zea mays
  Clone ID: MRT4577_42488C.1.pep
RDQWAKAKRIIVSTREYSVAKYCSGGDMNTHKLQVLQEEDALALFLKKVFNNHTENTNLGTDMLDQAALIIKKCHGLPLAISTIGGFLANKPKTATEWRKVNDRIRAELDMNPELRSIKTVLMRSYDGLPYH

SEQ ID NO: 306385 - protein, 118 aa, Zea mays
  Clone ID: MRT4577_42489C.1.pep
VTNQIYHATTGDASMTNTLYLVLAAEAGASRARIVVLASPGVSMRIMSGVGGRSAHSPSVHPARTEGAGGFNDQSGKASTRDAPAVGQLLLGRRRPRGGGPPPPRAGSRGLLSSAQTL

SEQ ID NO: 306386 - protein, 96 aa, Zea mays
  Clone ID: MRT4577_4248C.1.pep
AGRPLPEIPRHPNCAPIPRLNRGQHLPPTLDRCPQAPRHHAQLHPVQDQGHAPPALFRGPSLTLLPDPQLTDGHPPFSKPKHCHVPLHSPLHRDPT

SEQ ID NO: 306387 - protein, 78 aa, Zea mays
  unsure (1)..(78): unsure at all Xaa locations
  Clone ID: MRT4577_42490C.1.pep
MSXIXRSNVFDPFSLDLWDPFEGFPXGSNRGGGGGXXXPXXXXXTVGLDGARIDWKETXEGHVFKVDVPGLKKEEVKV

SEQ ID NO: 306388 - protein, 51 aa, Zea mays
  Clone ID: MRT4577_42491C.1.pep
KLGLEDSYTASLHLIPYNFYSGKNRSILTHIPCNWREGVNSFISHMMGNKG

SEQ ID NO: 306389 - protein, 123 aa, Zea mays
  Clone ID: MRT4577_42492C.1.pep
GPPSPPSPRVPVGQLPFFSGVFFFFFSTRVSVPFLTGVCFSPRSWSFFFWDFFFFLGPRLGFFFGRVFPPSVAFEKFLSWGFFSPPPGENVFLLPLFSVRIRYMCLGVSGFRPLFSCMKKKTS

SEQ ID NO: 306390 - protein, 78 aa, Zea mays
  Clone ID: MRT4577_42493C.1.pep
FTARVKHLNLRHCTFLIYCARWISGCLDGAVLSSLARRSRRGSRALARSRLDGSSPAPGVPAGKPLGHLAPSGAPFKS

SEQ ID NO: 306391 - protein, 54 aa, Zea mays
  Clone ID: MRT4577_42494C.1.pep
TMVNHLISLYHMLTLPCTKKLRSFMTYGPYIGSKGIVSLFLSKEFYSSLTGRVI

SEQ ID NO: 306392 - protein, 72 aa, Zea mays
  Clone ID: MRT4577_42495C.1.pep
RGFFHSIVWPGLVVLPSLVGLALSLDLSPLWHPCFPARLLARCRFLLACSPPRPAMSLIVPGFNPAPNKKSS

SEQ ID NO: 306393 - protein, 72 aa, Zea mays
  Clone ID: MRT4577_42496C.1.pep
PLLNLSKKCDTTKVELENQVVTGSQSNICDSDAETCYTYDRNKCYTNRVKLSYRGQTKMVETALTPDSCYPD

SEQ ID NO: 306394 - protein, 124 aa, Zea mays
  unsure (1)..(124): unsure at all Xaa locations
  Clone ID: MRT4577_42497C.1.pep
XREGPPXXXXXXXXXXXXXXRXGGPXLGPTGXTREDAPEXRHKGSPRGGGQQGKGPPGPKAGDGXEQRENGPXKPGGPSKGEGXGGPRQSRGGPPPPGEAPGXNSSQKTPEPGGHQPQPRRAQT

SEQ ID NO: 306395 - protein, 238 aa, Zea mays
  Clone ID: MRT4577_42498C.1.pep
MQCLVRNVCRAGSRGAAARLLELAAAGPGATQPSVAVKLLRPPYEFTRPIGVVQPVRVQSRAVSRDGLVPAAATSGFGLCAQVIVAMRGLSTVGSAAEVASDSDDSTSPAVEHPPRIKFKRPDKTARHIMNILNKEAVEKVRSEREIPDVQPGCIIQMRLQVPENKRRESTLKGIVIGRRNAGINTTFRLRRLVAGVGVESVFPLYSPNIKEIKVLDRKKVRRAKLYYLRDRMNALRK

SEQ ID NO: 306396 - protein, 57 aa, Zea mays
  Clone ID: MRT4577_42499C.1.pep
QPAPRVSIPGRAARLEVLHLANVTGCAPNKLSKIKVVRLSIAQVMTEISHKPKAAQR

SEQ ID NO: 306397 - protein, 207 aa, Zea mays
  Clone ID: MRT4577_4249C.1.pep
GAEVQNLIQRLRVMEQNQQQMMALLAIVVQNPDFLNQLVQQQRRSNWWNDDGNRKRRFQALEHGPVDDQETSGGGAQIIQYRPPVPETSNQPIPANEAFYSTPAQPASSPALEMPMDVEMTSNNVNTFDSTGNDFTDTSALCEWDDMDIFGDELEHILQQPEQDFQVDPPLTVEDYGYDHPRLEQDCQMEAQQNCKNPQYADVITEA

SEQ ID NO: 306398 - protein, 93 aa, Zea mays
  Clone ID: MRT4577_424C.1.pep
KIIIEAVPFFKQGMVLVKPFIATVKVFQASSLKRIRGPHFKVSPQPPLSKEFPKNNNSTGLVNLNPSSEYPPGLENPLFLPMKGMAPGIQNLG

SEQ ID NO: 306399 - protein, 68 aa, Zea mays
  unsure (1)..(68): unsure at all Xaa locations
  Clone ID: MRT4577_42500C.1.pep
LTASARRYITKTVHPMGCAWTGGSKAPQAPTVSMVGNTHFXSFQWAERSMNSALETAPKNTACQKNGC

SEQ ID NO: 306400 - protein, 77 aa, Zea mays
  Clone ID: MRT4577_42501C.1.pep
KKHIDITNEIMKHFKKSQPKHKHSMHKEGLKHFLDLVTSFLQTLIYNQKPWWHTTYTQTLKALLNPTWVNSFVKCIP

SEQ ID NO: 306401 - protein, 68 aa, Zea mays
  Clone ID: MRT4577_42502C.1.pep
GRPTRPPTRPAFCFLQGFYCHLGCKGIILSRIIVRSISIQLIVPTLLYIYFYMLAFFVINNAICLISI

SEQ ID NO: 306402 - protein, 117 aa, Zea mays
  Clone ID: MRT4577_42503C.1.pep
ILFMSKVGLRGDRRSEGDEVLDPLRQALDSSMQSHNLYQHPQRLAFHVSAPVASTVQQASGLLGPLPHLSSFALQPAHSLLPPLGSHGAEVSHQPPKLTTRNRSPWLSWRRGFQRNG

SEQ ID NO: 306403 - protein, 85 aa, Zea mays
  Clone ID: MRT4577_42504C.1.pep
LVHAFEHHLVFEVQPVHLFLPVMELIKCGSAFGCSVCIVMRARVSPSEGGCVNTMQIILIVRMSLNQCNDRCYSLYEAHHPPEQA

SEQ ID NO: 306404 - protein, 136 aa, Zea mays
  Clone ID: MRT4577_42505C.1.pep
EIHRFNKGQQDALLPFVESGLVTFIGATTENPSFEVNSALLSRAQVYVLKSLDDDEMRQLLKRAQEIALDGLAFDDKAIDTLVGYADGDARRFLNLLEQAQTAASSAGVATIDAEFVSSAMTLNARRFDKGGDNFY

SEQ ID NO: 306405 - protein, 71 aa, Zea mays
  Clone ID: MRT4577_42506C.1.pep
LHSVHHLDVQFRRGLCLVADDLAAGRQELSCSHFDVALVAIAAARETLESDDVTALPCSRDSVIAPCAGYP

SEQ ID NO: 306406 - protein, 330 aa, Zea mays
  unsure (1)..(330): unsure at all Xaa locations
  Clone ID: MRT4577_42507C.1.pep
MMSSRAGSILLRHAGSRLFTAAAISPAAASRPLLAGGNGVPAVMLRLMSTSSPAAPTEAKDEAAKASKVGGDKKAVVINSYWGIEQNNKLARDDGTEWKWTCFRPWETYTADTSIDLTRHHEPKTLMDKVAYWTVKSLRFPTDIFFQRRYGCRAMMLETVAAVPGMVGGMLLHLRSLRRFEQSGGWIRALLEEAENEXRMHLMTFMEVAKPRWYERALVITVQGVFFNAYFLGYLLSPKFAHRVVGYLEEEAIHSYTEYLKDLEAGKIENVPAPAIAIDYWRLPANATLKDVVTVVRADEAHHRDVNHFASDIHCQGMQLKQSPAPIGYH

SEQ ID NO: 306407 - protein, 72 aa, Zea mays
  Clone ID: MRT4577_42508C.1.pep
TPMSRPPGQEPGEAISEVPRRTHNSPVRVLRALYSMRWCVCERKSIILSLCKTSSSGTPSQKIHNHSAPCQQ

SEQ ID NO: 306408 - protein, 329 aa, Zea mays
  Clone ID: MRT4577_42509C.1.pep
MMSSRAGSILLRHAGSRLFTAAAISPAAASRPLLAGGNGVPAVMLRLMSTSSPAAPTEAKDEAAKASKVGGDKKAVVINSYWGIEQNNKLARDDGTEWKWTCFRPWETYTADTSIDLTRHHEPKTLMDKVAYWTVKSLRFPTDIFFQRRYGCRAMMLETVAAVPGMVGGMLLHLRSLRRFEQSGGWIRALLEEAENERMHLMTFMEVAKPRWYERALVITVQGVFFNAYFLGYLLSPKFAHRVVGYLEEEAIHSYTEYLKDLEAGKIENVPAPAIAIDYWRLPANATLKDVVTVVRADEAHHRDVNHFASDIHCQGMQLKQSPAPIGYH

SEQ ID NO: 306409 - protein, 417 aa, Zea mays
  Clone ID: MRT4577_4250C.1.pep
MGFTKRSPQHPASPAGGEVGAQTAGKVTPVPAAPESAPVAVVPRPPDVAPFLTKVYDMVSDPATDAVISWSAGGGSFVIWDSHAFERDLLPRHFKHNHFTSFIRQLNTYGFHKVDPDRWEWANEGFVKGQKHLLKTIKRKKKSSQDVPSDLQSVPVKTAPGTENIEIGKYGGLEKEVETLKRDKALLMQQLVDLRQYQQSSSAEVQNLIQRLRVMEQNQQQMMALLAIVVQNPDFLNQLVQQQRRSNWWNDDGNRKRRFQALEHGPVDDQETSGGGAQIIQYRPPVPETSNQPIPANEAFYSTPAQPASSPALEMPMDVEMTSNNVDTFDSTGNDFTDTSALCEWDDMDIFGDELEHILQQPEQDFQVDPPLTVEDYGYDHPRLEQDCQMEAQQNCKNPQYVACVLKQRESHASDVH

SEQ ID NO: 306410 - protein, 47 aa, Zea mays
  Clone ID: MRT4577_42510C.1.pep
PLLPKIMELVGPGSPGWFIYRYLFFKENRKKLPHDIESLKKKIVGPK

SEQ ID NO: 306411 - protein, 126 aa, Zea mays
  Clone ID: MRT4577_42511C.1.pep
PQQRGKPGSTLKYRSTLRRGLDFNSFLEDEERALVPTPASDGELTGTGGLSTTTGMRTGGRDVASSSMGRDRAGPGLATASLDMVSTGRGLTTASTTRDRARSRNSSVVCNIGSLSAGRGNGATIA

SEQ ID NO: 306412 - protein, 44 aa, Zea mays
  Clone ID: MRT4577_42512C.1.pep
SSILSSDRGLVSSTPSYFMTDCSLQSYECRLWSGVLYLVVVLTI

SEQ ID NO: 306413 - protein, 71 aa, Zea mays
  unsure (1)..(71): unsure at all Xaa locations
  Clone ID: MRT4577_42513C.1.pep
YAPPPFHSISADIIIPXLSTKLFVILLLLFCYTATQRPPFTMVSPKKNKSHSFHFNAPSSSYANCSNFCLT

SEQ ID NO: 306414 - protein, 87 aa, Zea mays
  Clone ID: MRT4577_42514C.1.pep
ANEWVVTAKLGSAIKMKSANKTGLRNQFFRIWERLPVPELGVAAFLFSWGWYDLGYGRGHFFIYLFFQFVGFFIVGVGYVGPIVPQL

SEQ ID NO: 306415 - protein, 69 aa, Zea mays
  Clone ID: MRT4577_42515C.1.pep
LMYSFNVCCHMNSVLSRYYLSCFFHNTNHNHNDHIHDLFNSCPHCFGEIFGHGLQSKNDPPLVFCFQYI

SEQ ID NO: 306416 - protein, 58 aa, Zea mays
  Clone ID: MRT4577_42516C.1.pep
PKGFWHKGSQPLAMITRLKLRRLRGSGFVLVSTPINSLAAALPWNSIFHLGGRRGRAG

SEQ ID NO: 306417 - protein, 85 aa, Zea mays
  unsure (1)..(85): unsure at all Xaa locations
  Clone ID: MRT4577_42517C.1.pep
LFISPRIFGFYTNIFGHKTKFFFLCEDIHYIVQVPTTLSSMGSPSLVIILXKGQMNEXAKHGAGQLDSXGRLKFHFQSSVSFSGT

SEQ ID NO: 306418 - protein, 46 aa, Zea mays
  Clone ID: MRT4577_42518C.1.pep
AVAIPGSAEAGMYSSLLCTDRATPPAAVKVSPQLIGSHFLQRCRPA

SEQ ID NO: 306419 - protein, 365 aa, Zea mays
  Clone ID: MRT4577_42519C.1.pep
MASAARSTGSLPVANVQALAEACNDDGGDVQVPERYLSKDPSSAEEVVVVAGDDSACRAIPVIDLRRLLDPESSEEETAKLASACLDWGFFQLINHGIPDEVTGNLMKDVAAFFRQPLDAKKECAQQADSLEGYGQAFVVSEDQKLDWADMLFLIVQPREARDTRFWPTRPASFGDSVDSYSLEASRLAYRLLELMARGVGADPASLRRVFEGQTQGMRVNYYPPCRRAADRVLGLSPHTDASGLTLLLQASNGVQGLQVRKDGRWFAVDAIDGALVVNVGDFLEILSNGKFTSVEHRAVVHPTRERMSAALFLYPRQNMRVGPLPEFVNGGEERYGSTDYEEFMKHYFATKLDGRKHLDRLKLE

SEQ ID NO: 306420 - protein, 91 aa, Zea mays
  unsure (1)..(91): unsure at all Xaa locations
  Clone ID: MRT4577_4251C.1.pep
GQSSPFTEKEXRGRQTGPGGTFFTGDGTAELKVLPVRRSEPTPKEHIRATLPFSHGFHEGDRTNTHNEYMMRTENITFFETCPTFGTNDTK

SEQ ID NO: 306421 - protein, 204 aa, Zea mays
  Clone ID: MRT4577_42520C.1.pep
MAMAKATILATFAAVAALAAVQLAAAADHPVGGDGSWDASGTTGYDAWSAKQTFKQGDTLSFKFAPSHDVTEVSKAGYDACSGSNPVKSYTGGSASVKLSAPGKRYFICSVPGHCAAGMKLEVTVAAAAVAAAPAPAKTTKPRHQRSVSPTPAPAPAAAPSTDEMPTVSSPTAAPAPKSSDASTLGAKAVVGLAVATMLTFLAM

SEQ ID NO: 306422 - protein, 65 aa, Zea mays
  Clone ID: MRT4577_42521C.1.pep
SRLPGVVQILCDCCYFRFSLADYSTADRQSPYGVQFMETLGRQLVQHGSSKCNISKDLSMMVAKC

SEQ ID NO: 306423 - protein, 252 aa, Zea mays
  unsure (1)..(252): unsure at all Xaa locations
  Clone ID: MRT4577_42522C.1.pep
MAMAKATILATFAAVAALAAVQLAAAADHPVGGDGSWDASGTTGYDAWSAKQTFKQGDTLCKLALSSVFFSSATNMLSVTTHNKLQVERTDDAAAASALVHAGSLXAAFKFAPSHDVTEVSKAGYHACSGSNPVKSYTGGSASVKLSAPGKRYFICSVPGHCAAGMKLEVTVAAAAVTAAPAPAKTTKPRHQRSVSPTPAPAAAPAAPSTDEMPTVSSPTAAPAPKSSDASTLGANAVVGLAVATMLTFLAM

SEQ ID NO: 306424 - protein, 54 aa, Zea mays
  Clone ID: MRT4577_42523C.1.pep
KRKQGSCDQHARQKRGSSSPIHGRNRHQHLDAARAPRLPKAHGSILGFELLAHV

SEQ ID NO: 306425 - protein, 76 aa, Zea mays
  Clone ID: MRT4577_42524C.1.pep
QRWAPYLARALCLLPVYVWASELLQMRNRLCELDAAVLVPKRLGSILITQGYGSSSAHATVACLNMAPLSKIAEYQ

SEQ ID NO: 306426 - protein, 144 aa, Zea mays
  unsure (1)..(144): unsure at all Xaa locations
  Clone ID: MRT4577_42525C.1.pep
PFWVAFWFGHKKIQGHKQTSKNFVASKTLACPILQQQQVSFHFNQLAXALNSVGYLQQQLPFHQQLLPYPQQLLXPFNQLAALNSAAXYLQQQQLPTFSQLADVSPAAFLTXQQLLSFYXHAAPNAGTLXLQLQQLLPFNQLAL

SEQ ID NO: 306427 - protein, 67 aa, Zea mays
  unsure (1)..(67): unsure at all Xaa locations
  Clone ID: MRT4577_42526C.1.pep
MAKIKIGINGFGWIGRLVARVALHSDYAXLVSVYDPCMSTDYMTYMFKYDTAHGQRKHHEVKVNDSK

SEQ ID NO: 306428 - protein, 153 aa, Zea mays
  unsure (1)..(153): unsure at all Xaa locations
  Clone ID: MRT4577_42527C.1.pep
TGGRTXGXDGDTAADTHRREKRRQXNREXARRXRXRKQQHXDEXXQEXARRRADNARXAARAAXTXRPRTPAXSKRTPSXGPAPPSXATAAAPTTRSTDXTRXXAAXPRTXRRRXRRTTRXSXPGRSPTRRPPXPTAPRTSATTXXGXHQPHH

SEQ ID NO: 306429 - protein, 58 aa, Zea mays
  unsure (1)..(58): unsure at all Xaa locations
  Clone ID: MRT4577_42528C.1.pep
KNGADKHASCTNDYAIESIHDCCXYAYKDEERDITLGDDXFVKXHPLGEKRIAHALNI

SEQ ID NO: 306430 - protein, 129 aa, Zea mays
  unsure (1)..(129): unsure at all Xaa locations
  Clone ID: MRT4577_42529C.1.pep
MRAHRGQHSQPYYANRTRNDLAALATRYIIPFLRLVALLVSAINAYIISHCSLXAPTAIIAQILQQLTSMTYXHPHALAYRLLLALASSALQXPVVYLQQQLLQHITLQPMETHQLPLHNLASLSHLAA

SEQ ID NO: 306431 - protein, 44 aa, Zea mays
  Clone ID: MRT4577_4252C.1.pep
SPVLLTSEPCTPTRCPRFIRFFFKRVVICHRRHSRQHLKGGCRR

SEQ ID NO: 306432 - protein, 186 aa, Zea mays
  Clone ID: MRT4577_42530C.1.pep
MVVLVLESQASASPVLERMIHRARRGWGAADCTVAVFGVPSDAVLAFLHLLYSSRVAPGTEEELVAAHGPQLLALAHAYRVGWLKRAAEAAVSARLTADRAVDMLKLARLCDAPLLYARCARLAAKDFAAVEATDGWRFARRHDPALELELLQLLEGADQRRARWARARASQEAYRQLGEAMGSLD

SEQ ID NO: 306433 - protein, 39 aa, Zea mays
  unsure (1)..(39): unsure at all Xaa locations
  Clone ID: MRT4577_42531C.1.pep
MKVEVMPKPKQGVLEAQXREEXMEMSDLDLWKHEKPTRX

SEQ ID NO: 306434 - protein, 33 aa, Zea mays
  Clone ID: MRT4577_42532C.1.pep
SLCIFELVIPRCLLIHTQTLNPYIGYRFAQSTL

SEQ ID NO: 306435 - protein, 72 aa, Zea mays
  Clone ID: MRT4577_42533C.1.pep
VLILLNQDLLRCTPTALRLSNARGRAAAPLNSLLYEFYLNNFILLVFLEINSSMICSYSILSNNRFSNFEKV

SEQ ID NO: 306436 - protein, 184 aa, Zea mays
  Clone ID: MRT4577_42534C.1.pep
EPDGPVTAVWISILDDMLRFTRPGGTHDDQFLHSISSQDLELHDIRVVVGDEVEGQQRLGEDEQRKRLIARGAAPSRRFAARSMGCDPGTWACSEAIYRRSALCIHRFAISSRSRLTTPDRRPIFHRRRNRGSRTIGIALWLFVMEWKVRCDVSWYGLSGGVFELHAGVESTGDVNVKSRARPA

SEQ ID NO: 306437 - protein, 118 aa, Zea mays
  unsure (1)..(118): unsure at all Xaa locations
  Clone ID: MRT4577_42535C.1.pep
LGGHLLLVDGVVLVGEKKVIFMLLQTSRPATSGAHFAVWCWRMSSSIRSYTLPIPSCSCLLFLSFLWWGVIFLVGXGSCTPFSTCWSHSSLSSFSPPPVVLPAERPLVPVPILRPCLL

SEQ ID NO: 306438 - protein, 89 aa, Zea mays
  unsure (1)..(89): unsure at all Xaa locations
  Clone ID: MRT4577_42536C.1.pep
FHVPGSAARMRPSAAEVARTAAELAASGTLFMGGPDRWPLGVRAHFGGDSAGLPALCLSAGRVAPPEAPGSFHVQFRQTGARTPXQCTY

SEQ ID NO: 306439 - protein, 127 aa, Zea mays
  unsure (1)..(127): unsure at all Xaa locations
  Clone ID: MRT4577_42537C.1.pep
TRFSRFQGGWMARFHLGQGPVLVQAGFQPLPPLVLGGDPRVPWWAGPVFLVVWDPXPRQEKKWGFQGNKKKGFFCGSQNFARPMAKQKWLSWGPHPFFGALLGPRPLFFFKGWAKKNRFLFFGFVWF

SEQ ID NO: 306440 - protein, 121 aa, Zea mays
  Clone ID: MRT4577_42538C.1.pep
SNGGLPVVSHERELSINLLFPSGARAPYLHNIRLIIGDVLLQLSDNGIHLMVPVVSHRGEQPPEGHLHRSVLIVPSLAQFSLLLQRTDLHLPSNRCDPGLEPQQVTYCDDLRGNIRTRGRT

SEQ ID NO: 306441 - protein, 53 aa, Zea mays
  unsure (1)..(53): unsure at all Xaa locations
  Clone ID: MRT4577_42539C.1.pep
GSGLRIHIPPINHXLAQEQQHWFQYFQDKLVHXXCKTLHFKLSTNVRHQQPPW

SEQ ID NO: 306442 - protein, 116 aa, Zea mays
  Clone ID: MRT4577_4253C.1.pep
SAISPSIAQPLPPPLLAAPRFISCRQDLTRTNTAGIVGKYGTRYGALLRQQIRTMEVSHHSKYLCEFCGKFAVKMKAVGIWGCKDCGNVKAGGAYTMNTATAVTFMSTICRLRDHT

SEQ ID NO: 306443 - protein, 86 aa, Zea mays
  Clone ID: MRT4577_42540C.1.pep
YFTRSIYKKNGFQGSQCIKGFPSNSYKPNAHSLDLKCAKIILKTQERGCMHRGLPLLQRRGSRTFVPNTQLDSSIHLMNRHWSRLL

SEQ ID NO: 306444 - protein, 116 aa, Zea mays
  unsure (1)..(116): unsure at all Xaa locations
  Clone ID: MRT4577_42541C.1.pep
MLAILHRLPTLYVTVIIIDKGXYHKLDLKLPLTAPXPHFVWSSIECYIVTHVLKARPLTXIXPENPCKRIFPMYFNFCINTVLLNVRSRYIPVSFMKTIKSITPXTTVILQCLGRI

SEQ ID NO: 306445 - protein, 106 aa, Zea mays
  Clone ID: MRT4577_42543C.1.pep
MASRVLRPAFRAINITARGFQTSAALRQERPLVAPVRRPVGAFRGGLFGFLLGTATAGAGMYYYVVDEYRVSNQLLTEDIYALQSAVQRIEGYVRTLEEKVGEKRR

SEQ ID NO: 306446 - protein, 80 aa, Zea mays
  Clone ID: MRT4577_42544C.1.pep
APTPTPPQRHPTPYQRRVTSPHTLPSAQLRSIMPNVIYTMSPPVMNQQLCHFFLQSPCVVQVVNFSRLDRLFQSKGNGMA

SEQ ID NO: 306447 - protein, 108 aa, Zea mays
  Clone ID: MRT4577_42545C.1.pep
RKYIYGSQPQMVIRCSMYQGFALCMVNSIEIVHVFYNFKLCFADGAHGLQARVARPGAKVPWDRCVSCRVRSWGCGFCPLLGGQCIGSTAGALSQACGGFLLWWLAWG

SEQ ID NO: 306448 - protein, 60 aa, Zea mays
  Clone ID: MRT4577_42546C.1.pep
CHAYGPFHGSGDWTMTTHATTHHLGEGKEWSLPFIPAESDAHATGGGYVRYGLDATLLHG

SEQ ID NO: 306449 - protein, 79 aa, Zea mays
  Clone ID: MRT4577_42547C.1.pep
YTHYRLRSSCTQPTSLAPSVFMVASVLKENRENLLQEARGLDDLIRILNDVNGNLDAKKACAGALKLHKKYLKNVQAKP

SEQ ID NO: 306450 - protein, 33 aa, Zea mays
  Clone ID: MRT4577_42548C.1.pep
MASSKPAPLSIFPCSMAPFLSLLTLDASLLKFK

SEQ ID NO: 306451 - protein, 111 aa, Zea mays
  unsure (1)..(111): unsure at all Xaa locations
  Clone ID: MRT4577_42549C.1.pep
TQTGVLTDGAGDATSYWIVSLPCAVCTRRHRDLALIAACRMSICRHSFDTPLYRINVPDLRVGTLEGVLALSDDLVKSNVFSEGGLHKIRRXIEDLERAGRADSVGLTVGG

SEQ ID NO: 306452 - protein, 126 aa, Zea mays
  Clone ID: MRT4577_4254C.1.pep
LHSSHLPLGILTAKNITNRRPIWVSKMSNNIERRWYKIYGIHGVLLEQTLIHKHLKSFTLTDSSIKGKDSCMYNTQGGGTVWKIEKLSHLLCVYNCIYQMFLKTISELKRYIHDSASYSTKRSNQH

SEQ ID NO: 306453 - protein, 116 aa, Zea mays
  Clone ID: MRT4577_42550C.1.pep
HAIDDRCLAFPSGASGRLPARSSSYCPRNPRARHSPRWRCGTVVPPAPGSGGATPRRTSRSDTATRSGPVCTSRTRQRDSGYACHRRCTAVMRLGPATPRRRVGGRVGRRVSGRVG

SEQ ID NO: 306454 - protein, 107 aa, Zea mays
  Clone ID: MRT4577_42551C.1.pep
NRQLPRLGQRQRARTMSKELDAVANWRSTTGTKGTTPDVVKRRRTQARHGLVRTGGTSMGIPQRRAQRELASTTTSREKATAMGRGTRRWEQTRQVPASSRGESRER

SEQ ID NO: 306455 - protein, 146 aa, Zea mays
  Clone ID: MRT4577_42552C.1.pep
FWKICLYFFWRQFCPCFFPFLRGRLIPPVIFLFFSPQFFPGFCQFFPQPFSHPFCQVVPPLIQQAIHHQPFSFFGFEQPTQTWVSFFSPPQTQPTMGGLSPSLSLNYICGLVHFICFFISRIGYPFRFFSFPRFMQSNPLHFFFCF

SEQ ID NO: 306456 - protein, 82 aa, Zea mays
  Clone ID: MRT4577_42553C.1.pep
PPPKKFGVGGVFPLSLRTFGKLVVPRKLGLGSQQTPALDFTFAQKGYPWREEKNFLPPLIFPSPIPHPWPGRGRPKFPVVLD

SEQ ID NO: 306457 - protein, 49 aa, Zea mays
  Clone ID: MRT4577_42554C.1.pep
RGCTTHSYCKGTRWAKDLGGKLSMSLHIKVLILLMIGCKLLMQLAMSAY

SEQ ID NO: 306458 - protein, 172 aa, Zea mays
  unsure (1)..(172): unsure at all Xaa locations
  Clone ID: MRT4577_42555C.1.pep
TARARPRAGRRRKKSRGAGATPKSHARRQQPFYASSPCCAPASGSPCCXCLPRHAAAHDAEARLLLQIKSAWGDPAPLASWSNATAAAPLAQCSWAYVVCDGAGRVSSLNLTNVTLAGRTIPDAIGGLTALTVLDLXHTSVGSGFPASLYNCAAIARLDLSHNQVXGDLPGD

SEQ ID NO: 306459 - protein, 72 aa, Zea mays
  Clone ID: MRT4577_42556C.1.pep
LLLRKAHVRAIWELNVCLDTALITVSAGIHATYARFDLSLVANGWSVKPPQTKSVWTHLTSIVMPKAACSMR

SEQ ID NO: 306460 - protein, 91 aa, Zea mays
  unsure (1)..(91): unsure at all Xaa locations
  Clone ID: MRT4577_42557C.1.pep
SXXSXXXXITXHFXTQKPETYGIXXLLATMATAFXGYXPAREDQIYMSEGPAVNYKLDYPXMPIXLETXPSXNECXRRLLXXTVPTLQRIL

SEQ ID NO: 306461 - protein, 69 aa, Zea mays
  Clone ID: MRT4577_42558C.1.pep
INFVRPHSLHCVQGITLSASIIQLSLLMKSTLVRELNVFIRHDRMCSFSDTAALHVQAIKSPAIESGCG

SEQ ID NO: 306462 - protein, 265 aa, Zea mays
  unsure (1)..(265): unsure at all Xaa locations
  Clone ID: MRT4577_4255C.1.pep
DPRGRPGRAFRFLPFVEAPAERRGELSRRGDLAPPAARASRAMDPIMKLLEDDEDESLHSGADVEAFTAALNREVEASASASTSTSVPAGSSSQPTDHGAGLLPQEHKSLLNHDPGQWQDPVKNEIVNQESQQQEQTHAFRNDHPSRPEMVSQGSNNCPLPTNTPKECDLLKAKQEPGSTSQQGIVAQQQPMQQMKSEQTPIVSQQQSMQQMKNQQTPVTNQTNSATTTAXAPVVTFHMVIPHXESLSRQAGDIEVQSIFAQCGK

SEQ ID NO: 306463 - protein, 210 aa, Zea mays
  unsure (1)..(210): unsure at all Xaa locations
  Clone ID: MRT4577_42560C.1.pep
MTNLSAMAASQSYVIRFDGHFDEPSPSSAGAEPPGPQPPFAGRMISLEREHQVIVAALLHVVSGYATPPPQVFTPPPAAARCQVCGMERCLGCEFFAAXGGRIGRRRGEGSRDRRRGGAGGGAXRRRRKKKNKYRGVRQRPWGKWAAEIRDPRRAVRKWLGTFDTAEEAARAYDQAAIEFRGPRAKLNFPFPEQPPTGHDEPISSNGDAS

SEQ ID NO: 306464 - protein, 38 aa, Zea mays
  Clone ID: MRT4577_42561C.1.pep
IVYSKNYSFFTVTSDASAHDRVLHKAKPPSLTLLLTQT

SEQ ID NO: 306465 - protein, 138 aa, Zea mays
  Clone ID: MRT4577_42562C.1.pep
MVKGSTGHHSNPIAPVPFEAFHNGSWHGANSIMIRDGGLLVKFVSSGYAVAVQHDIDGSYLRVRSRKATCSDCSHVLKPGADVCVWQAVYRGETKDSVLLCCRDARLIKIKRNHQSDRCLCLFAVIFYKDQCPGSKKK

SEQ ID NO: 306466 - protein, 73 aa, Zea mays
  Clone ID: MRT4577_42563C.1.pep
VAASKPPALALVVGAERTMVLMLLAAAVSTSGHMQLHESTNEQLEQQLHLTMLQDMITAEGEQALAVLRGRRG

SEQ ID NO: 306467 - protein, 68 aa, Zea mays
  unsure (1)..(68): unsure at all Xaa locations
  Clone ID: MRT4577_42564C.1.pep
SKLKLNPYAKTMLRNTILRXAMNHKLRVDNVAAAAAALHARSDDKAAVAGTKPVVGKKRXKAAVGVKK

SEQ ID NO: 306468 - protein, 76 aa, Zea mays
  unsure (1)..(76): unsure at all Xaa locations
  Clone ID: MRT4577_42565C.1.pep
KLFPFNQWGEMNPGVYLEEKIYVPFSQLAAENGVSFLKKQKLMPLYKQFGVNVETFLEIEKVLXFXKLDLIEGRGQ

SEQ ID NO: 306469 - protein, 70 aa, Zea mays
  Clone ID: MRT4577_42566C.1.pep
HYLFLWNEGHPINQATHGFDGSVDISCSKRGLSSKVGPKLICLQSHLNVIHQFFDLNRKNHQPKEQLIKR

SEQ ID NO: 306470 - protein, 69 aa, Zea mays
  Clone ID: MRT4577_42567C.1.pep
PSGWVTVDGSGEGRSQSPPPVFEAQGQGPLLPLLGHRMLAVMPWKGVAGPQWSTVSDAISERSGGRKKQ

SEQ ID NO: 306471 - protein, 53 aa, Zea mays
  Clone ID: MRT4577_42568C.1.pep
CTLSLNLPLLCSFRSPSMAAWSSAGMNWTSEKKTYPRRLAGSPARSMISARVV

SEQ ID NO: 306472 - protein, 161 aa, Zea mays
  Clone ID: MRT4577_42569C.1.pep
MARFENKMGHPSKCHHWWQVVRHEPKWSAKHDPGSGSNGNTNKRTRLGVSGECSSGGTEDIEKEVPRPLGCDRAKAEARNTKTKGKGKEATTSRLVKAKCLKQRNILKGRSTRDMDPAKRHIHAKAVKMVEKELSLTDDEEKDPKVKREEEGDEDETDDSD

SEQ ID NO: 306473 - protein, 106 aa, Zea mays
  Clone ID: MRT4577_4256C.1.pep
RPCRCFLFYYIYGAPSLVSSSFPPPGTRRKRLSPPRLRRRGPFLSSDPNFSCVDSCSSLRWIRVHWLIVYVVLVDLLRSRRAGTRRSSACPVGLFCSCSSSAACFP

SEQ ID NO: 306474 - protein, 115 aa, Zea mays
  unsure (1)..(115): unsure at all Xaa locations
  Clone ID: MRT4577_42570C.1.pep
SGAFNHFLGYWADQFGGKNGAGHFLVGLGQKFVKRLTFFEKFREAVAWFVGKWQQCQNNPYCGRTYFNWLNGPQIYLAPKKKKKKXNQKRKKKNKKKKDSLDKYLKKKINESFAM

SEQ ID NO: 306475 - protein, 158 aa, Zea mays
  unsure (1)..(158): unsure at all Xaa locations
  Clone ID: MRT4577_42571C.1.pep
MMQFTHTAPPPPPLHPNGHAGGLGLGLFLDVGAPRAARPWPGSFPTPASKISLGNLNSTSCMEQLLVHCANAIEANDATLTQQILWVLNNIAPPDGDSNQRLTAAFLCALVARASGTGXVXGFTAAVAXXRRVXRAHVTGFTAVELASFVDLXPWHRF

SEQ ID NO: 306476 - protein, 67 aa, Zea mays
  Clone ID: MRT4577_42572C.1.pep
KRIKPIFFIFDGDNHYKTNPIFKNKTTNKLGPPNNYCTTKYSPMVHKNKKNVTSKKNTHMSNKINLK

SEQ ID NO: 306477 - protein, 69 aa, Zea mays
  Clone ID: MRT4577_42573C.1.pep
MSRAVSILAEDVKVGQVANKPSYITEWQIKGGNTSSFMSSNVSGQSGVAPRSASHASSQFLGSVIEEGR

SEQ ID NO: 306478 - protein, 153 aa, Zea mays
  unsure (1)..(153): unsure at all Xaa locations
  Clone ID: MRT4577_42574C.1.pep
MAMANVKAQADVPTPRKTTITNNGYRTYKLYAICAMTTDDISYLFPARDRTRVHRRLNTWPLSLICTLRKGMLQAPAGQKPETHITHLXTLIIVPEMIVMIATAYKASTFKQSEMKSEIITLYIAASSISYKTTKRPRSGIPASHSSFLIHEM

SEQ ID NO: 306479 - protein, 38 aa, Zea mays
  Clone ID: MRT4577_42577C.1.pep
QITQLSETSNECSNFYCSVQAKLGIIMSSKFSTIKFKN

SEQ ID NO: 306480 - protein, 103 aa, Zea mays
  Clone ID: MRT4577_42578C.1.pep
PRVRKSSGVVRSLTHHQGWSDQAVAPSQSMSTSQPSILSSETLSMKEETSLTPGSTFGTVKPESLNPYQGREENSLQASSSCSSDCTPLSSNIISEISKLRLN

SEQ ID NO: 306481 - protein, 41 aa, Zea mays
  unsure (1)..(41): unsure at all Xaa locations
  Clone ID: MRT4577_42579C.1.pep
PYIXSTTFXXXSXIEXQVLQXXXIXXLILXXILKLLLLGFT

SEQ ID NO: 306482 - protein, 52 aa, Zea mays
  Clone ID: MRT4577_4257C.1.pep
RSTCARTTATRAWLVVWRRMLMMRRLERLVIAESDEISKTSSSRPSSELRRR

SEQ ID NO: 306483 - protein, 92 aa, Zea mays
  Clone ID: MRT4577_42580C.1.pep
RSREPNEETEPPPPAASVPFVPLRGGTVFPPTPTSTTYINTTCPPIHEILLDYTASSVTTSATSDSLYPTTLCTSALYHSCTVLTLLHMIKT

SEQ ID NO: 306484 - protein, 48 aa, Zea mays
  Clone ID: MRT4577_42581C.1.pep
HKYVTAMQSDHQRGDHSTDQTAQMREFLTEDLFFSYTTQYLFGAARPL

SEQ ID NO: 306485 - protein, 107 aa, Zea mays
  Clone ID: MRT4577_42582C.1.pep
PQKKKKRGLKVTPPTNPRVKKKNIFWKQGPKRGPRRTRAQPPEKNPPGGGILTKRPPGLKPSPTGDPHPGKHGGGENPNILPNEKKRKGEPTGPRLRPIGKISSNPR

SEQ ID NO: 306486 - protein, 53 aa, Zea mays
  Clone ID: MRT4577_42583C.1.pep
LAWCISCTRWKSAFVVLPDPVGGAGIGGACLTASSPCAYTGICPEGSAPGWQA

SEQ ID NO: 306487 - protein, 160 aa, Zea mays
  unsure (1)..(160): unsure at all Xaa locations
  Clone ID: MRT4577_42584C.1.pep
ERRAEEAPKPXXAAXRXXAAAAXPAXARADXTHDNXXKNRGGGGQNXXSHDXTQTQEPRANSPPRXAGTXTXHPRSHAEXPXXRXTGRXRAPDAGQGEXHXGXDGGAXNPAPNAQPGQRXPXAGTPHGXPXQGRXPGGGGASQGRGAXHQGPCGDXRNGQ

SEQ ID NO: 306488 - protein, 167 aa, Zea mays
  unsure (1)..(167): unsure at all Xaa locations
  Clone ID: MRT4577_42585C.1.pep
MDDGGALTPAIGQCRELQYGPGIHQLPLPGVNTLHAQGDKLQMPQRLAGKRVDRDHETGAPRVRHGVRLGIGQPHEILADPRENILYMQTEGQYLNNLHDTDFCREQTRAGQHQDNIESTYFNMIFASVHXLVSQLPKFNSMSGVSLGAGVMSLSYCDIAWGASCTR

SEQ ID NO: 306489 - protein, 67 aa, Zea mays
  unsure (1)..(67): unsure at all Xaa locations
  Clone ID: MRT4577_42586C.1.pep
SHQSKRTNINLTTISTKILALLALLALFASATNAYIIPXFSLAFTSIISQFLTPHTLTAFEHTAVQA

SEQ ID NO: 306490 - protein, 180 aa, Zea mays
  unsure (1)..(180): unsure at all Xaa locations
  Clone ID: MRT4577_42587C.1.pep
IGILEAGRELIEIQSTCDNVDIMRFSIASSLLFLTSAASAASSWGFKDGSVTVASKQGHAATAKFSNQEPVKDTLILGKADTIKVSLTTTEGSEAKRPHQAFIVITESTGIEVALPLDVKSSGKAVASISHKDISVPLLLSEEPLKVXPRVGLLRLVQPPHLSRFQHSDLSCTQHSPSRV

SEQ ID NO: 306491 - protein, 46 aa, Zea mays
  Clone ID: MRT4577_42588C.1.pep
YLYATIFAMNLTIQQYNKDKSLYDFLQINSNIQPCSNNKLVTYYII

SEQ ID NO: 306492 - protein, 79 aa, Zea mays
  Clone ID: MRT4577_42589C.1.pep
EIGLESLSPHERRSCLFPVVGPMSVPTPIATREPFYKKKAIRLAAFSLVALKGKVVFGNKVFFRFWKNSTVFSNTAVLF

SEQ ID NO: 306493 - protein, 48 aa, Zea mays
  unsure (1)..(48): unsure at all Xaa locations
  Clone ID: MRT4577_4258C.1.pep
MAEESSRPLPKFGEWDVNDPASVDGFTVIFHKXARDEKKGGNGQDTHL

SEQ ID NO: 306494 - protein, 84 aa, Zea mays
  unsure (1)..(84): unsure at all Xaa locations
  Clone ID: MRT4577_42590C.1.pep
QEFTRPYQSKNMDIKVGGYANYLEESTLYYLDPQGGVSGXSLSADIISWYEDGYFGLDLPVRLSQSPDDVPFRPLVXVMPHLAQ

SEQ ID NO: 306495 - protein, 75 aa, Zea mays
  Clone ID: MRT4577_42591C.1.pep
GQFKPMCITSLNQAYPHLPCYICSHVFDVEQLSPKWLGIMVFCSLQVYLTILQKSDVMLRENLFGDPLTSHFLFS

SEQ ID NO: 306496 - protein, 197 aa, Zea mays
  unsure (1)..(197): unsure at all Xaa locations
  Clone ID: MRT4577_42592C.1.pep
MPKSKRNRSVTLSKTKKKPGLERKGKVVTEIKDAIERHSSAYVFTYNNMRNQKLKDLRDQLKSSSRIFLAGKKVMQIALGRSPADEAKTGLHKLSKFLQGASGLLFTNLPRDDVERLFREFEANDFARTGSIATQTIXVVCEEGKPLSPEAAHTLRVLGTKMATFRLYLVCRWSSDDFEVYKEGLAHLGGEEADESS

SEQ ID NO: 306497 - protein, 222 aa, Zea mays
  Clone ID: MRT4577_42593C.1.pep
RPTARPPPSCCWTFPPPPPPPCCCWHGTSAVTIANIYFPFDMASDTAAEVAQEMVKELDITDRHASEIAAMIQQEIGRLLPGRAQQHEYTYASRGGDYDDEERPPPFYYLSSSPASSHGSHCGVGPYAFGGFSGPCGSAWTKDHDWYALSDNDDDMSSVHSGKYSPVHYASGAGHEEAPASSSGSSKTRFGGGGSGSAAALARQLERQCSVSPQHAGRPPTR

SEQ ID NO: 306498 - protein, 234 aa, Zea mays
  Clone ID: MRT4577_42594C.1.pep
MPKSKRNRSVTLSKTKKKPGLERKGKVVTEIKDAIERHSSAYVFTYNNMRNQKLKDLRDQLKSSSRIFLAGKKVMQIALGRSPADEAKTGLHKLSKFLQGASGLLFTNLPRDDVERLFREFEANDFARTGSIATQTVELKEGPLEQFSHEMEPFLRKQGLPVRLNKGVVELVADHVVCEEGKPLSPEAAHTLRVLGRKMATFRLYLVCRWSSDDFEVYKEGLAHLGGEEADESS

SEQ ID NO: 306499 - protein, 98 aa, Zea mays
  Clone ID: MRT4577_42595C.1.pep
KKLAISPTWKLKTPWGDPFCPSIVNLRPSQKKCPQLCNLLPLGFNVPRPFPICKPPKFSQHIPPELYREIKFVSHGKLKPPKSLIIFKKRPKNLGACL

SEQ ID NO: 306500 - protein, 519 aa, Zea mays
  unsure (1)..(519): unsure at all Xaa locations
  Clone ID: MRT4577_42596C.1.pep
MATARAVAAAAAALAAVVLVALLAPAVRGVDRSEFPPGFLFGAATSAYQIEGAYLEDGKGLCNWDVFTHTHSGGVMDGRTGDVADDHYHRYVGDLEILQSLGVNAYRFSISWARVLPRGRVGGVNAGGVAFYNRLIDALLQKGIQPFVTLNHFDMPRELEVRYGGWLDAGIREEYEHYADVCFGAFGDRVRLWTTFNEPNLLVKFQYMLGAYPPSRCSPPFGSCGSGDSRREPYAAAHNIIMSHAGAVRAYREKYQATQGGSVGIVAAMKWYEPLTNSTDDILGARRAQVSRRTXFLEPXILGDYPGAMREILGSDLPTFTAEEKALLLRYKADFIGLNHYTAIYARDCLRSPCNLGSYEGNAFVSATGERDDGVKIGGDTALAGFFDVPEAIELAIQYVNGRYKGTPVYITENGYSQWSDASREELINDVRRKNYLQGYITYLSKAVRNGANVRGYFVWTLLDNFEWAFGYRLKYGLYHVDFDTQERTPRMSARWYQGFLTARTSQRDEAAQARRADS

SEQ ID NO: 306501 - protein, 115 aa, Zea mays
  Clone ID: MRT4577_42597C.1.pep
RPGRDKLFFFFFFFFLAFFFFFFFSFFFFEFKNRALILSYREAPPFSVQNFIMAGETIKNFKNGPTNGGRTQKGGKNRQTFFANMPSIAVVQKRQPSSPPFLGTTATIGAVAKRH

SEQ ID NO: 306502 - protein, 190 aa, Zea mays
  Clone ID: MRT4577_42598C.1.pep
PAGLRRWFLSPYFPTSPLSCAQLLGGSPGHVPQRRSPLSARPPARHGSRALLLDPLPPPWPSALSSRRCSPSPSPMAPSPVSSAILHQRAPLAAPAHLPRRGARCARPCSRLLHGRTPSTPRRRRLLPLLAMVLSRAPGGLLAEPPASSRSASWYSSSPSRHSPSSPSFSSVLAAHHGIPSLSCRALVVD

SEQ ID NO: 306503 - protein, 699 aa, Zea mays
  unsure (1)..(699): unsure at all Xaa locations
  Clone ID: MRT4577_42599C.1.pep
PNWPHAGALAQSPNIKIGSRRSYLTPGHSSSRSRWLGVLGPIVWDLGRRRMTFQHXGRAISWKGMASSSATTLGATAAGEXLLDKLLDSFGDIFDAPTRMPPKRAHDHRITLKAGVQPVVVRPYRYPTAHKDELERQCAAMIEQGIVRRSDSPFSSPVLVIKKLDGSWRFGVDYQALNALTVKDVFPIPLRQQQLFIKRAKCAFGAPSVAYLGHVISEAGVAMNPAKDDAATAAFTAFKAAVITTLVLAMPDFSKLFVIERDASSHDFGVVLVQDGHQVANFSRPIAPRHHTLAAYEWGLIGLIHAVRHWRSYLWGRRFVVKTDHYSLKYLLDQRLATIPQNHWVGKLLGFDFSVEYRSGATNTVIDALSRRNNVDGELLAISAPRFDFIARLRHAQATDPALVAIHNEVHVGTRMASWAVVDDMVTYDGRLCIPPAAPLLQEILAAVHNNEHEGVHRTLHRLQRDFHFPNMCRLVQDFVCTCATCQRYKSKHLHPVGLLQPLPVPAIVWADIGMDFVEALSRVHGKTVILFVVDRFSKYCHFIPLAHSYIVESVVQAFFTDIVRLHGIPQSIVSDRDPVFTSAFWRELMRLMGTKMHMSSAFHPKTDDQTKAANRVIVMYLRCFTSDRPRQWLRWLPWAEYIYNTSYQSSLHETSFWVVYSHDPPSIRSYEPXETRVAAVAKEMEDREAFLTDVRYRL

SEQ ID NO: 306504 - protein, 113 aa, Zea mays
  Clone ID: MRT4577_4259C.1.pep
MLLPLIEVSHHFVTLTSDPSTCDTPIDGIIHVHVGGRHSRLTDIRDDQRHVAHLTVLDQVHFTDDRAMPPLDVHHRYHRLSSHVNNALELRTVPISGSYPVLEPEFQNRDHDS

SEQ ID NO: 306505 - protein, 57 aa, Zea mays
  Clone ID: MRT4577_425C.1.pep
MVEWPESMWLDDDVVPGLATTPWEFEDDNPFLAYQRNNALFDHQLEAWNNDGRVELF

SEQ ID NO: 306506 - protein, 129 aa, Zea mays
  Clone ID: MRT4577_42600C.1.pep
RPGLAKKKKKKKKKIKKNKKKKKKKKKIKKKKKKKKKKKKKKKKEKKKKKKKKKKKRKKNLPPPRGFLKMGVSPAEKPKTAGAPPGGGLLAPSGVSPPGGPPPPDKKRATGGLKPPGGFFSPAGLLLPH

SEQ ID NO: 306507 - protein, 29 aa, Zea mays
  Clone ID: MRT4577_42601C.1.pep
PDGSASSKGVRPPGRLRPLKVEAERLVQP

SEQ ID NO: 306508 - protein, 54 aa, Zea mays
  Clone ID: MRT4577_42602C.1.pep
VPCYRFWPPSLVASTESHSFCREIHLCNSSASIAHSCRYSESDYSWIPLALDDI

SEQ ID NO: 306509 - protein, 580 aa, Zea mays
  unsure (1)..(580): unsure at all Xaa locations
  Clone ID: MRT4577_42603C.1.pep
MAPQLQGCNWISSWPRLRQMSPWPPRSSESPRWSFLRLATRRRPCAGAVRAVASAGAVGTELLEMEEQAEDVDERERLRRTRISLANKGNTPWNKGRKHSPETLQRIRERTRIAMQDPKVKSXKKKLVNLGHAQSEETRVRISVGVRRGWSLRLQRLMVQDGCFVEWRDMVADAARKGFAGGVSLEWNSYKILSEQMRHDWLENLQKRRSMPRPRGNRRAPKTPEQRRKIAEAIAAKWLDQEYRERVCSGIASYHGSSSATKTPRKPRPAGEPGVKKQTTRKKPMQAKPVILEDAHGKSAALKRKKSATPYKDPMAVEKLEMISKIRAQRTAQEIEKKEAIRRARTLIAEAEKAADALETAAAMNPFAQASLIEARKLVTEARVSLECVDDEEPQETASNDVSGSSVLLNLHDHRHGLEMQNGSNLLKQENKPANGMEFPPSSVNGLAFHLDVSELSGTKQLYQRIENSMERAFLLPSASSKLKSANGDYGIIDLHVRQSMVDDTAKHKGITAETCPPGTLELEEDPPSPRSAEKAGTREDYPGGKPEEDAPSSEEKARMRWVRGRLVKVKTNGPGDLEI

SEQ ID NO: 306510 - protein, 72 aa, Zea mays
  Clone ID: MRT4577_42604C.1.pep
MGGWYSAIAATRLKMLRRGCRGAAAVLPVASHDSVTGKERKRKCRKHASILGDSGTVDPDFSRRYRLGAELG

SEQ ID NO: 306511 - protein, 60 aa, Zea mays
  unsure (1)..(60): unsure at all Xaa locations
  Clone ID: MRT4577_42606C.1.pep
NYCICXLAIISAKAYSSQRIDELNNKRATRKGFLFFMMTEEGMQPNMTFIMSPLPYLRDV

SEQ ID NO: 306512 - protein, 51 aa, Zea mays
  Clone ID: MRT4577_42607C.1.pep
CVTAHNRVTPCNCKHDKRHTQNAVMQELIMFLPNYNVYVLCHNHSTYGREV

SEQ ID NO: 306513 - protein, 171 aa, Zea mays
  unsure (1)..(171): unsure at all Xaa locations
  Clone ID: MRT4577_42608C.1.pep
KRGGGLRPAPPPWSWGLPLKKKRGPSLRRGASLXSPPPAEVGVTAESAAPAIVDPVGLFGFRHAWMSPFFYCLLWAWGGPRIKDGALVWFDSGSPPRMFGVGSVGLGLGQVIVGHRPPPRIFVLFGQERENMSPVTIGPVIEYIPKPVFLKKKKKKKKKKKKKKKKTPHPR

SEQ ID NO: 306514 - protein, 83 aa, Zea mays
  Clone ID: MRT4577_42609C.1.pep
PKAKAEAQGLRFKFNQKPCFFICWGWFLGGRFSPFGFAFKGSPKRIGWGKKRKRAPRGCCQSGFLFFWGVPTPPFSFGVYLRC

SEQ ID NO: 306515 - protein, 92 aa, Zea mays
  Clone ID: MRT4577_4260C.1.pep
GFPHLDFRDTWHNVANSQFRVKEDFVLRFCIIVSFLSYLVENCITDCVRKLGTYLIMHHMAKPHFVSWNRLAQCSQLWRALHRVILKLLRLC

SEQ ID NO: 306516 - protein, 134 aa, Zea mays
  Clone ID: MRT4577_42610C.1.pep
YWFWARALQQLLPERATLPVGDPIANSLQRPDANSSADQLFVTTDDFLLDSAIFNNIQDVFQIAQSRLEILVQLDEDLQYPLSSSLAPLRILCSVTSPSIMSHPVATRGEDRDVRISTRGQSHVDRPSRGRCRL

SEQ ID NO: 306517 - protein, 101 aa, Zea mays
  Clone ID: MRT4577_42611C.1.pep
EIDFSLSNTLQFFDSQTSPNRIHLHWPRFVSTNTAHQHLCVIKSEHKFATLTQTSMQATLLPRVCCINTKPPICTHALYTLTAKPCMSRMHNIQKSCQSLS

SEQ ID NO: 306518 - protein, 60 aa, Zea mays
  Clone ID: MRT4577_42612C.1.pep
EPTHASYISWQVSLRGYLNLRQEVSPSKYYVAEHLYYEKRVLPAWVNVLYIFSFHLSPLE

SEQ ID NO: 306519 - protein, 65 aa, Zea mays
  Clone ID: MRT4577_42613C.1.pep
PFPSGLSFSNNNNGDKNAFLLPITLTPSITDCIKPSTFKPDATPPNLQDLSISVQLLCDADFEPL

SEQ ID NO: 306520 - protein, 313 aa, Zea mays
  unsure (1)..(313): unsure at all Xaa locations
  Clone ID: MRT4577_42614C.1.pep
MVVPVIDFSKLDGAERTETLAQIANGCEEWGFFQLVNHGIPLELLERVKKVCSDCYRLREAGFKASEPVRTLEALVDAERRGEEVAPVDDLDWEDIFFIHDGCQWPSDPSAFKETMREYRAELRKLAERVMEAMDENLGLTKGTIKDAFSAGGRHEPFFGTKVSHYPPCPRPDLITGLRTHTDXAGGVILLFQDDKVGGLEVLKDGEWADVQPLEGAIVVNTGDQIEVLSNGRYRSAWHRVLPMRDGNRRSIASFYNPANEATISPAAVQASGAYPKYLFGDYMDVYVKQKFQAKEPRFEAVKTGAPKSSPAA

SEQ ID NO: 306521 - protein, 264 aa, Zea mays
  Clone ID: MRT4577_42615C.1.pep
MLRSTHPLSPSRSSGGSSAPASSSGEAMVGGAPSGAKLLQILNVRVVGTGERVVVLSHGFGTDQSAWSRVLPYLIREHRVVLYNLVCAGSVNPDHFDFRRYNNLDAYVDDLLAILDALRIPRCALVGHSVSAMIGILASIRRPDLFAKLVLIGASPRFLNDSDYHGGFELEEIQQVFQAMSANYEAWAKGYAPLAVGADVPAAVQEFSRTLFNMRPDISLHVCQSVFKTDLRGVLGMVQAPCVVVQTTRDVSVPVNVAAYLKAP

SEQ ID NO: 306522 - protein, 226 aa, Zea mays
  unsure (1)..(226): unsure at all Xaa locations
  Clone ID: MRT4577_42616C.1.pep
MVPRAARHRRQRPFPRLYLHQLELEKTNPHRLGTRYHRRELDGAERAETLAQIANGCEEWGFFQLVNHGIPLELLERVKKVCSDSYRLREAGFKASEPVRTLEALVDAERRGEVVAPVDDLDWEDIFYIHDGCQWPSDPPAFKETMREYRAELRKLAERVMETMDENLGLARGTIKDAFTGGSQHEPFFGTKVSHYPPCPRPXLITGLRAHTDAGGVILLFQDDKV

SEQ ID NO: 306523 - protein, 266 aa, Zea mays
  unsure (1)..(266): unsure at all Xaa locations
  Clone ID: MRT4577_42617C.1.pep
MAIPVIDFSKLDGPERAETMAALAAGFEHVGFFQLVNTGISTDLLERVKKVCSDSYKLRDEAFKDSXRRSQSSWTRRQXRSRTGGLAAKVGRARCNGKGLLSGRGRHDPFFGTKVSHYPPCPRPDIITGLRAHTDAGGVXFLFQDDKVGGLEVLKDGEWTDVQPLEGAIVVNTGDQIEVLSNGLYRSAWHRVLPMRDGNRRSIASFYNPANEATISPAAVQASGGDAYPKYLFGDYMDVYVKQKFQAKEPRFEAVKTGAPKSSPAA

SEQ ID NO: 306524 - protein, 324 aa, Zea mays
  unsure (1)..(324): unsure at all Xaa locations
  Clone ID: MRT4577_42618C.1.pep
MVVPVIDFSKLDGAERAETLAQIANGCEEWGFFQLVNHGIPLELLERVKKVCSDCYRLREAGFKASEPVRTLEALVDAERRGEVVAPVDDLDWEDIFYIHDGCQWPSDPPAFKETMREYRAELRKLAERVMEAMDENLGLARGTIKDAFSGGGRHEPFFGTKVSHYPPCPRPDLITGLRAHTDAGGVILLFQDDRVGGLEVLKDGQWTDVQPLAGAIVVNTGDQIEVLSNGRYRSXVLSNGRYRSAWHRVLPMRDGNRRSIASFYNPANEATISPAAVQASGGDAYPKYVFGDYMDVYAKHKFQAKEPRFEAVKVAAPKSSPAA

SEQ ID NO: 306525 - protein, 222 aa, Zea mays
  unsure (1)..(222): unsure at all Xaa locations
  Clone ID: MRT4577_42619C.1.pep
MVVPVIDFSKLDGAERTETLAQIANGCEEWGFFQLVNHGIPLELLERVKKVCSDCYRLREAGFKASEPVRTLEALVDAERRGEEVAPVDDLDWEDIFFIHDGCQWPSDPSAFKETMREYRAELRKLAERVMEAMDENLGLTKGTIKDAFSAGGRHEPFFGTKVSHYPPCPRPDLITGLRAHTDAGGVILLFQDDRVXXLEVLKDXQWXDVQXPLAGAIVINT

SEQ ID NO: 306526 - protein, 43 aa, Zea mays
  Clone ID: MRT4577_4261C.1.pep
GANAALVAAWQPPRDGLELKPFLLILMVRFAQWHSYEDGEKGQ

SEQ ID NO: 306527 - protein, 118 aa, Zea mays
  Clone ID: MRT4577_42620C.1.pep
YLWAHARPRTPGESLGRAGTPARHRTTKGATAPTHREDQGQDNAPFAMPRTTYALKAHEHHRYKDVFADNLPVGPTKRSDYTGAQRNNKQTATEPDKRRTLKHHRLRGAATHQPPGPR

SEQ ID NO: 306528 - protein, 314 aa, Zea mays
  Clone ID: MRT4577_42621C.1.pep
MVVPVIDFSKLDGAERAETLAQIANGCEEWGFFQLVNHGIPLELLERVKKVSSDCYRLREAGFKASEPVRTLEALVDAERRGEVVAPVDDLDWEDIFYIHDGCQWPSEPPAFKETMREYRAELRKLAERVMEGMDENLGLARGTIKDAFSSGGRHEPFFGTKVSHYPPCPRPDLITGLRAHTDAGGVILLFQDDRVGGLEVLKDGQWTDVQPLAGAIVVNTGDQIEVLSNGRYRSAWHRVLPMRDGNRRSIASFYNPANEATISPAAVQASGGDAYPKYVFGDYMDVYAKHKFQAKEPRFEAVKVAAPKSSPAA

SEQ ID NO: 306529 - protein, 203 aa, Zea mays
  Clone ID: MRT4577_42622C.1.pep
PEPVAHICTASVARWSKLACTLGQGVAWHGRESSRIDSTRQWRSCTGSSPPSLRPGAAGAAAAAAVIMVTSHETTSLFGIEMEAKYSYTPSFVFFVVAFAVTFAYSLLAVLVRPGTTASRLVLLSDVTVGMLLTGAVAATGAISQVGKSGNEHAGWLPICAQVQAYCGHVMGALIAGFVSLLLYFLIIMYSLHAVAEPLCSCH

SEQ ID NO: 306530 - protein, 87 aa, Zea mays
  unsure (1)..(87): unsure at all Xaa locations
  Clone ID: MRT4577_42623C.1.pep
PLGSPPKXNPPPSRRRRRRRPSDNGSLGGARGLIFWGFATRDKNNLPGGQCAPPRGRETPDNPSGQPQQPKSRLRPLVNGKNPAPPF

SEQ ID NO: 306531 - protein, 68 aa, Zea mays
  Clone ID: MRT4577_42624C.1.pep
WILASGRFRGTQGFSNRYGVGCQCVVGANLGCFFPPSRGPFFYFSMGGLSFLLLKAPVVAPPPPPVAS

SEQ ID NO: 306532 - protein, 92 aa, Zea mays
  unsure (1)..(92): unsure at all Xaa locations
  Clone ID: MRT4577_42625C.1.pep
ESKKGLYDTLVLLVDFNRLYPXIIQEFNICXTTVERSYEGSAPNFVSMKSYCRTALVDESIFRAVPSFRDRQLYRGARDHGSGGGEHRPTDP

SEQ ID NO: 306533 - protein, 154 aa, Zea mays
  unsure (1)..(154): unsure at all Xaa locations
  Clone ID: MRT4577_42626C.1.pep
RPPESRNFSGARRGGQRGDPREHETHAKRTSNDRTTRAKSRTRAPAGSATKARGGHTLVVSPQXXXPXTAGGXKHPAGQAXRPQQAXAASXXEQPRAQXQQQAGAXXTTQTSATQQQQARSHRAGGNPEAXXQXQRPAXNPXXXANAGAHQQQQ

SEQ ID NO: 306534 - protein, 76 aa, Zea mays
  Clone ID: MRT4577_42627C.1.pep
LCFDPHAHLFKVCLFHSFCSSVWTTHDICLTVQLTLAPISLCRLLALLACVSLFFWPPCTNIPINTIVPLCSKPIA

SEQ ID NO: 306535 - protein, 88 aa, Zea mays
  Clone ID: MRT4577_42628C.1.pep
NPEERHSWLLLWPCTLHCRVHCLCFVVLSLEYDATLIARGRITCLYLSSLWSARIMTLLLRHLFILLSGKKKKKKKKKKKKKKKNKKK

SEQ ID NO: 306536 - protein, 55 aa, Zea mays
  unsure (1)..(55): unsure at all Xaa locations
  Clone ID: MRT4577_42629C.1.pep
CIALEIMDAQWLALRTSNMQFNDVLXKRRSRTXKELLLKDLVRIQDMLAYNLLFI

SEQ ID NO: 306537 - protein, 118 aa, Zea mays
  Clone ID: MRT4577_4262C.1.pep
PRPTSRRMLNFFDDYRTKTEEGRADQEGGGGAHPQTTTATIRQRPRGTIQGHIEQRHPSHHTTRSGNDRQGAPQNRRRTQTPLPRDPQLLGPTGTEGARKPQTQEQQRATYRATDDTR

SEQ ID NO: 306538 - protein, 304 aa, Zea mays
  Clone ID: MRT4577_42630C.1.pep
MNYIIGAFKPPCDISITFSDARTRKQVSVKKDNGKTTMVPVFQSLETISGEVSIAPVPGKRIEHTGVKIELLGQIELYFDRGNFYDFTSLVRELDIPGEIYERKTFPFEFSTVEMPYESYNGTNVRLRYILKVTIGRNYVGNIVEYRDFCVRNYSPVPTINNSIKMEVGIEDCLHIEFEYSKSKYHLNDVIIGKIYFLLVRIKIKNMELEIRRRESTGSGSNTYVETETLAKFELMDGAPVRGESIPVRLFLTPYELTPTYRNINNKFSVKYYLNLVLVDEEDRRYFKQQEITMYRLQESPPAS

SEQ ID NO: 306539 - protein, 113 aa, Zea mays
  Clone ID: MRT4577_42631C.1.pep
VQENGYGALFNDSIHDHERAEYLSAYMGSALAALRNGANVKGYFVWSFLDVFELLAGYYSRYGLYHVDFQDPELPRTPKLSALWYSKFLKNEIDIIENVVSDTDDARSHAAEQ

SEQ ID NO: 306540 - protein, 534 aa, Zea mays
  unsure (1)..(534): unsure at all Xaa locations
  Clone ID: MRT4577_42632C.1.pep
MGGPGRPWRRHVFLVVSLQLLLVAXHGXETAARALNFTRQDFPRAFVFGAGTSAYQYEGATDEDGRSPSIWDNFTHAGRMPDKSTGDLGADGYHKYKGDVQLMSDTGLEAYRFSISWSRLIPRGRGAINPKGLEYYNNLINELVKRGIEIHVTLSHLDYPQILEDEYHGWLSPRMVDDFEAYADVCFREFGDRVRHWTTMDEPNVNSIAAYDNGAFPPGRCSPPFGFGTNCTAGGNSSVEPYVVTHNCILAHAAVAALYTRSYRAEQQGVVGINIYTFWNYPFSPAPADVQATQRSLDFMIGWMVNPLVYGDYPQVMKRIVGSRLPRFTKRQSEMVRGTADFIGINHYTSVYVSDRPNDAAADTTGPRDYNADLSATFRFSRDDPATGQFVPINMPSDPQGLQCMLEYLSQTYNNIPVYVQENGYGALFNDSIHDHERAEYLSAYMGSALAALRNGANVKGYFVWSFLDVFELLAGYYSRYGLYHVDFQDPELPRTPKLSALWYGKFLKSEIDDIIENVVVSATDDARSHAAEQ

SEQ ID NO: 306541 - protein, 44 aa, Zea mays
  Clone ID: MRT4577_42633C.1.pep
KKTRRPPAIRCLFFCKPLVSHLSELVPLPNLVPSQLWVKCWVWV

SEQ ID NO: 306542 - protein, 128 aa, Zea mays
  Clone ID: MRT4577_42634C.1.pep
GRSAETRRTLRAYRRSVVARVGARRTAESFEWVWTLESNRLVLTWKLIGQNGQMMLYNRSMVLHQRKNASGTLVALIMAGCRSCVLFRGGCVRSQLPSSGPSSSGGSVKKKCLCGTRGTERVGRPGFP

SEQ ID NO: 306543 - protein, 60 aa, Zea mays
  Clone ID: MRT4577_42635C.1.pep
WQYNKIIKGRWVTGVCLLMFYCKMSSCKINNFFVGKLQAMVKSPLPLHKKKRLKKRKKYR

SEQ ID NO: 306544 - protein, 91 aa, Zea mays
  Clone ID: MRT4577_42636C.1.pep
KPLKPVHPWAPERWTNLVSSMGLNFLFRKHRKNFPFIMCPKRFKTCQNEVKPWPKCLPSPNQFPVHCFCRAPKIVSCGPQGGCFFFSPFCS

SEQ ID NO: 306545 - protein, 197 aa, Zea mays
  unsure (1)..(197): unsure at all Xaa locations
  Clone ID: MRT4577_42637C.1.pep
MRRAKPQQPSPSPEIRYRGVRRRPSGRYAAEIRDPAKKTPIWLGTFDSAEAAARAYDAAARSLRGPTARTNFPXPRLPRRGTGPAPPPPPPPPQPPRRXPATSSHSSTVESWSGGAPRVAAPPRSAAAPMEEDDDEDCHSYCGSSSSVLCEDARGDDDDDAAASHAPLPFDLNLPPPIDAAAEADQMGARYDTLLHL

SEQ ID NO: 306546 - protein, 48 aa, Zea mays
  Clone ID: MRT4577_42638C.1.pep
KKKKKKKKKKKVCRSRRILSYISGAGNINLYFIGWPLLNTLAVRHHLS

SEQ ID NO: 306547 - protein, 106 aa, Zea mays
  Clone ID: MRT4577_42639C.1.pep
TVPDFDAQSAGGDAPVAGTGRRGQHEEAGARRRHRCPPGAEHPDALKALSSEVPYMHHPWRAFRWRWVSQQRLRTRCQRLLRRSQTTSTRCLFAARQPTSGATLTV

SEQ ID NO: 306548 - protein, 86 aa, Zea mays
  Clone ID: MRT4577_4263C.1.pep
RREEPPWIFFFALIYRNWHTNSNNGVRKIFSPVPPSIYFSLQEPKNSHNTLLRKHVLYPWGKKKKNCLEKILTTCTYSVGNSCALD

SEQ ID NO: 306549 - protein, 118 aa, Zea mays
  Clone ID: MRT4577_42640C.1.pep
MMASVLAVCLDALWSSLLLLLLVATASQALNVGDLLGTAAPSGSQGCSRTCESSFCIDDYLNTRCNENLLSCLDGVSPAGPTFPGNECDVGQTASVIRGVIESAVLAGKILHKRDDGQ

SEQ ID NO: 306550 - protein, 102 aa, Zea mays
  unsure (1)..(102): unsure at all Xaa locations
  Clone ID: MRT4577_42641C.1.pep
YAYLFYLSWTPDPLGAMFVSKYWLPKLGGFVRMFPNKIPFPSXAWFPLLTVALFGARQVFPAGLRNNVETRPFVSLCLLFCPVGILAHVLPKVLAGAVAPPP

SEQ ID NO: 306551 - protein, 172 aa, Zea mays
  unsure (1)..(172): unsure at all Xaa locations
  Clone ID: MRT4577_42642C.1.pep
MMASVLAVSRWSSLLLLLLVATASQALNVGDLLGTAAXGKDRTRARKRAESELSGSQGCSRTCQSSFCIVPPLLRYGKYCGILYSGCPSEKPCDALDACCMVHDHCVDTHNNDYLNTRCNENLLSCLDGVSPAGPTFPGNECDVGQTASVIRGVIESAVLAGKILHKRDDGQ

SEQ ID NO: 306552 - protein, 63 aa, Zea mays
  Clone ID: MRT4577_42643C.1.pep
ALDVEPLRVMHATCFILLLVLVMGSLHLMGYVVLSETSVIWYDLGYNRHVLCLVVWTLNIFPS

SEQ ID NO: 306553 - protein, 182 aa, Zea mays
  unsure (1)..(182): unsure at all Xaa locations
  Clone ID: MRT4577_42644C.1.pep
MMMASVLAVSRWTTLLLPLLLLLLLLLVATASQALNVGDLLGTVXLRXQGCSRTCESSFCIVPPLLRYGKYCGILYSGCPGEKPCDALDACCMVHDHCVDTHNNDYLNTRCNENLLSCLDGVSPAGPTFPGNECDVGQTASVIRGVIESAVLAGKILHKRDDGQKPASWPPAVAGQDRSGPT

SEQ ID NO: 306554 - protein, 125 aa, Zea mays
  Clone ID: MRT4577_42645C.1.pep
MMASVLAVSRWSSLLLLLLVTTASQALNVGDLLGTAAPSGSQGCSRTCESSFCIVPPLLRYGKYCGILYSGCPGEKPCDALDACCMVHDHCVDTHNNDYLNTRCNENLLSCLDGVSPAGPTFPGN

SEQ ID NO: 306555 - protein, 92 aa, Zea mays
  unsure (1)..(92): unsure at all Xaa locations
  Clone ID: MRT4577_42646C.1.pep
SSAILYGGLNYQARCIADILAYSHSTTFLPSTLSLKEENXVHLIRLXSXQSQLLFYGLFYHPNQIMDLKXCPSHHKLFSTVYTYCEGYSALN

SEQ ID NO: 306556 - protein, 67 aa, Zea mays
  Clone ID: MRT4577_42647C.1.pep
LQPLIYRPAFTQNTTAPPIHTCVLLLVKPVLRSLPIAMTAMILIISSMGHAWCSGPSPTCVRVSKPF

SEQ ID NO: 306557 - protein, 46 aa, Zea mays
  Clone ID: MRT4577_42648C.1.pep
GWILYSVRYIIVCIISIMCHYYKRSFIGRPQFFLVFVLSVIIRFLF

SEQ ID NO: 306558 - protein, 254 aa, Zea mays
  Clone ID: MRT4577_42649C.1.pep
MGRVIRNQRKGRGSIFTANTRLNKAPAKFRNLDYAERHGYLRGVVREIVHDAGRGAPLAKVVFRHPYRFKQVTETFIANEGMYTGQFIYAGKKAALTVGNVLPLGEMPEGTVVSNVEEKIGDRGTLGRTSGNYITIVGHNPDEGKTRIKLPSGAKKVVHSGSRGMIGIVAGGGRTDKPLLKASRAKHKFAVKRNSWPKTRGVAMNPVDHPHGGGNHQHIGKASTISRYAAQGQKAGLIAARRTGLLRGTQKTKD

SEQ ID NO: 306559 - protein, 113 aa, Zea mays
  Clone ID: MRT4577_4264C.1.pep
IYYRYSIHMQLTATIFSTLKISNGIDDYSTKSVVNHREPSAVRAHELLRDVHVHGEGEAHERDVLPVPLLLGTCGVLLMVNMHREAMHGRSVRSSLWPCGLEMGLLELPSIQG

SEQ ID NO: 306560 - protein, 114 aa, Zea mays
  unsure (1)..(114): unsure at all Xaa locations
  Clone ID: MRT4577_42650C.1.pep
MGKPLLHICGVDDDAFLTQHDMQLNNAILAEEKHLPMYDXLVSKSNAEYIAGRATHNSIRDAQXMLETPDATSYMGCIGKDKSGDEMSINAQPARVTAHSYEDETALTGTCAVC

SEQ ID NO: 306561 - protein, 105 aa, Zea mays
  Clone ID: MRT4577_42651C.1.pep
AQLAFREGSRWSDVMIIWEIMKVGHGSGHDGAHAEYASFNSSQHTEEHVGEDCGRWISQSGIWVGSICRCGSQHACSSMSGGRLAPSQRADLFILRSSRCSCLDL

SEQ ID NO: 306562 - protein, 93 aa, Zea mays
  Clone ID: MRT4577_42652C.1.pep
KKRLLQPKKGPPPMVSGENTLLPGRNKGGPNQSVLKRRLIVPVMGPVGSPGLLIGASPMGNVTFGGLINPFSPCLFVTNWGPGTIPSQNASQI

SEQ ID NO: 306563 - protein, 107 aa, Zea mays
  Clone ID: MRT4577_42653C.1.pep
SLAPPQSSAPRHAPSHAAYTTSGHPAVEHEKECASGRSKIRVLTADESSHGSRAPQDGLREGSERMGRCARASAARSETSGGVLLGYARVSMPPAALPRRWLRTRAS

SEQ ID NO: 306564 - protein, 78 aa, Zea mays
  Clone ID: MRT4577_42654C.1.pep
IFFFFFFFGGGFFNVRVLPQRTTTSIFERGNRACPYEGDSLSDWAGWAGVLFSVQDFGKKWSRIIMGALQHKGLEHFH

SEQ ID NO: 306565 - protein, 49 aa, Zea mays
  Clone ID: MRT4577_42656C.1.pep
FGPVWFWVAKTPKKKKKKKKKKKKKKKKKKKKKKKKKKKKKKKKKKKKK

SEQ ID NO: 306566 - protein, 114 aa, Zea mays
  Clone ID: MRT4577_42657C.1.pep
ILIKLKEEDAILCSDRIIQQQMKRTHNPITTPGGRSQSGLLQHSPLRPETRLPGQESRRRKKKSRRSDIFLSSTPRSTQRTTQKRPLTRWRTWTQDTCTQNSIFGRVHALADLR

SEQ ID NO: 306567 - protein, 145 aa, Zea mays
  Clone ID: MRT4577_42658C.1.pep
PASAAAWAGAWVVALGFEEISVGNATPVWCYMVKQGLIIDPVLSFWFNRHASEGERGERGGGGMDSSHFQGDHTFVPCTRKGYWQFNMGDVLLGGKASGVCAGGWALFVDSGTSLLVGPTGLISGLTANIGACAVFRLEFQNGGS

SEQ ID NO: 306568 - protein, 64 aa, Zea mays
  Clone ID: MRT4577_42659C.1.pep
HQDFQSFEAPLEKLLPKQALKIKRVFLRHEKNPNFPSNGAPFNREHLRVTLLATSYEFAQSNFF

SEQ ID NO: 306569 - protein, 137 aa, Zea mays
  Clone ID: MRT4577_4265C.1.pep
MEAKKSGPAAAGAAAPPPANGYFSTVFSASPAGSANDAKQADLYTMLNKQSSRGQNGSGITDGKSHGRPTYKDGKHAYPNDSSESPYFGSSVHYGGREFYSSTLQKQPANEPQTKYKEDKSDGSATRGDWWQGSLYY

SEQ ID NO: 306570 - protein, 139 aa, Zea mays
  unsure (1)..(139): unsure at all Xaa locations
  Clone ID: MRT4577_42660C.1.pep
MGAARPRRWKLPFHRTTSAPCSPSSRSSAPPPGPASPARSEAWVAQPVPEAFLCPISGALMADPVILPSGNTYERACLQACAELAFLPXAPRPXLRTVIPNAALKAAIGTWCARSGRAGPPPPPLSAEAARQAVLRAMP

SEQ ID NO: 306571 - protein, 53 aa, Zea mays
  unsure (1)..(53): unsure at all Xaa locations
  Clone ID: MRT4577_42661C.1.pep
TTXSLSIIXNLTHQXPXLXFXIXNXLLKFSXXTSYSKTFXNXXQTISSLLLIL

SEQ ID NO: 306572 - protein, 175 aa, Zea mays
  unsure (1)..(175): unsure at all Xaa locations
  Clone ID: MRT4577_42662C.1.pep
NWWERVGFVLFSFTICGVQAVQFCLNPFLSHVYVGPPKGNDWFXKQTAGPLDILGPPWMDWFQGGLQFQIXPPLFPPLPRGPLWKVSPAVGYLFKKHGVTFSPAPLLGANVLSWKTLRGSPFQARSPPRGGGGAPKNFVWGAFYPPGLLTGPGYGLGEGHFWCFNFLPPPMFGCF

SEQ ID NO: 306573 - protein, 90 aa, Zea mays
  Clone ID: MRT4577_42663C.1.pep
SKSRCLSFENQFPYVVFLVCARNPEVPGPNQWCFYKFGAPPPKYGFQKSVVLLLSNPPPIKMWDIMFFPILALSPGVKKSGPGVYAHSVW

SEQ ID NO: 306574 - protein, 731 aa, Zea mays
  Clone ID: MRT4577_42665C.1.pep
MWSRDAATADATRSGMGPAPAARAISPSFRSGGPTPTASHADLPLYVSDDGSAMLTFESLAETAEFARKWVPFCKKYTIEPRAPEFYFSQKIDYLKDKIHPSFVKERRAMKRDYEEYKVRINALVAKAQKTPDEGWIMQDGTPWPWNNPRDHPGMHDPGSFLLTSEISGCDICAHTEQLLYCMMVFLGETGARDFDGNELPRLVYVSREKRPGYQHHKKAGAMNALVRVSAVLTNAPYILNLDCDHYVNNSKAVREAMCFMMDPTVGRDVCYVQFPQRFDGIDRYANRNVVFFDALYGYGPPSLPALPKSTICSWCCCCCPKKKVERSEREIHRDSRREDLESAIFNLREIDNYDEYERSMLISQMSFEKSFGLSSVFIESTLMENGGVPESANPSTLIKEAIHVISCGYEEKTEWGKEIGWIYGSVTEDILTGFKMHCRGWRSIYCMPVRPAFKGSAPINLSDRLHQVLRWALGSVEIFFSRHCPLWYGYGGGRLRWLQRLSYINTIVYPFTSLPLVAYCCLPAICLLTGKFIIPTLSNAATIWFLGLFMSIIVTSVLELRWSGIGIEDWWRNEQFWVIGGVSAHLFAVFQGILKMIAGLDTNFTVTAKATDDTEFGELYLFKWTTVLIPPTSILVLNLVGVVAGFSAALNSGYESWGPLFGKVFFAMWVIMHLYPFLKGLMGRQNRTPTIVVLWSVLLASVFSLLWVKIDPFVGGTETVNTNNCNTIIC

SEQ ID NO: 306575 - protein, 85 aa, Zea mays
  Clone ID: MRT4577_42666C.1.pep
MQFTPMNKSPPCPGMRLQMLIQLQRIARPANGGGWNEPCGWRSPRTRSPGTTSHRSRCHSPCRRSRSGGHEGLHLHDGGGGEASL

SEQ ID NO: 306576 - protein, 186 aa, Zea mays
  unsure (1)..(186): unsure at all Xaa locations
  Clone ID: MRT4577_42667C.1.pep
NLTLPXQNTPLSPPLLGFHSDASSPPPSQRCSPSCPSVRLRPQGLWRPDRRDAVPGDLVRGERHPQGIRHPRRVAAPHHRRILPHCSVSSLRSSLAPPAAVDWSTPSVILTVSRSLRRLAPPTTGGRYVPRFLWILRLVCWCAQIWVAKQVVGRDILPPTMFMFVIYSCFFPPIRSTMVAIIYTNI

SEQ ID NO: 306577 - protein, 293 aa, Zea mays
  Clone ID: MRT4577_42668C.1.pep
MRASALVCFVAVSACIACIAHGGNFYQDTEMTWGQGRGKVVDGGRGLDLSLDRASGSGFQSKDEYLFGKIEMQMKLVPGNSAGTVTTLYLSSQGDAHDEIDLEFLGNVSGEPYTLHTNVFTRGRGQREQQFRLWFDPTADFHTYSVVWNPRHVIFAVDGTPVRDFANREARGVAFPRTQPMRVYASLWNADDWATQGGRVKADWARAPFVASFRGFSADACVWSGGRSQCPVGTMEEAGGGGGGGGWWNQQLSDASYRRMRWVQRKFMIYNYCTDAKRFPQGRGVPAECRLRR

SEQ ID NO: 306578 - protein, 124 aa, Zea mays
  Clone ID: MRT4577_42669C.1.pep
MHSTKQTSRKSTGINAPRKQLATKAARKSYPVTGGVNKPHRFRPVTVALREIRKYQKSTDLLIRMHPYQRLVREIAQDFKTDLRLQSSAAAALQDASDAYLVALFEDTNLCAIHAKRVTIMPKD

SEQ ID NO: 306579 - protein, 57 aa, Zea mays
  Clone ID: MRT4577_4266C.1.pep
APVLHILSQEALNCPLIIVTPDHGTLVCHQSYGLTAGEHRIYDGSFISMLNSTAVQQ

SEQ ID NO: 306580 - protein, 156 aa, Zea mays
  unsure (1)..(156): unsure at all Xaa locations
  Clone ID: MRT4577_42670C.1.pep
LLQRLSQLPDADNVTIAFPDDGAWKRFXKSLANFPVVVCAKVREGDKRIVRIKEGNPEGRHVVIVDDLVQSGGTLRECQKVLAAHGATKVSAYVTHAVFPNQSYERFMTANSAGPGDQFAYFWITDSCPQTVKAISQQPPFEVLSLASSIADALQI

SEQ ID NO: 306581 - protein, 75 aa, Zea mays
  Clone ID: MRT4577_42671C.1.pep
LCMSTFIIIHSNVNRKKRASKELYFGTDGVDYYTMELHPDILNNTNFVWPIPIPLFLLIWSPGILCWNRPQVICV

SEQ ID NO: 306582 - protein, 127 aa, Zea mays
  unsure (1)..(127): unsure at all Xaa locations
  Clone ID: MRT4577_42672C.1.pep
AAGRKYLHNLARAASPTRRLLALASGDARHFLPDKMTKRTMNASIVXNYGTIYGAILRNQIENMEDSHHSKYFCEFCGNFDANRKAVGICGCKDCAKVKAEVAYTMNPASAXTVIHTIRGLREQTEP

SEQ ID NO: 306583 - protein, 36 aa, Zea mays
  Clone ID: MRT4577_42673C.1.pep
SKIFFFPPPPKLKTEVWLRSNRHTSAHLYCRSSLSA

SEQ ID NO: 306584 - protein, 95 aa, Zea mays
  unsure (1)..(95): unsure at all Xaa locations
  Clone ID: MRT4577_42674C.1.pep
SGPETERRRRRERPCRXGAAKXVGGVGGKKRNXRNRPHQPCPPTSATSPQGEGEGELCWRGEGGGQVGVGREDRTGADQTRPGWEWECRHIPRAE

SEQ ID NO: 306585 - protein, 89 aa, Zea mays
  Clone ID: MRT4577_42675C.1.pep
ADETPSIPNASQGGGAQKEHATAMLRWRSTLCHYTGPRSMTCRNIQNGPAPTAATTRWITCSQCRRGNTVTAATSIIQSHRGGTAHGEQ

SEQ ID NO: 306586 - protein, 169 aa, Zea mays
  Clone ID: MRT4577_42676C.1.pep
MRLSSPPLPSLRSSVPAVLLHLLLLLLLLSSCPSPANGRAAPSSPGATAPVARHVRAAGANGTAPVAPAVPAPPPVVIIVERHRHFHRELVIASILASIAIVAIILSTLYAWILWRRSRRLPRGKSADTARGIMLAPILSKFNSLKTSRKGLVAMIEYPSLEAATGGFS

SEQ ID NO: 306587 - protein, 169 aa, Zea mays
  Clone ID: MRT4577_42677C.1.pep
MRLLSPPLPSLRSSVPAVLLHLLLLLLLLSSCPSPANGRAAPSSPGATAPVTRHVRAAGANGTAPVAPAVPAPPPVVIIVERHRHFHRELVIASILASIAIVAIILSTLYAWILWRRSRRLPRGKSADTARGIMLAPILSKFNSLKTSRKGLVAMIEYHSLEAATGGVQ

SEQ ID NO: 306588 - protein, 88 aa, Zea mays
  Clone ID: MRT4577_42678C.1.pep
AHHAIMRSSSAPLDTARYVERVLSQYCCTHRVIPERRPTVVSRHAYWSRRTGTPSASCGDRPCSTRPPARCRRSRQRAAPTSAARCTP

SEQ ID NO: 306589 - protein, 350 aa, Zea mays
  Clone ID: MRT4577_42679C.1.pep
MCSSSLDIDMIDDEVPHVKESLSLNLRLVENSSYFTLRTDALNCNGFSTHRKCTSALHMLTYDNIADSIGEYIKMGKKFHLRMPRNIVELAESNNDINMLNQSLLFNNVPKSDALNVNFMVQPRVLPWTMQMCRFHDWYMKKSAIGKNVTSVYTNDSSKILRRIRQTKLKALQKFTSTYEACFECFVVFEPALASTKQGVSLLQMVEELSALGLSLVPSSDVSELKVKDLSMTVEVAAPQSKVVVDLSEDSDDIDTEEDNTIIRPIKPSGDDLVPKPKEDEVVVFRSFLKAGLRFPWHKMIVAILKRFNIYLHELTPNAIVRLGIFICVVQGQGIEPNVQAFCQIYELYF

SEQ ID NO: 306590 - protein, 147 aa, Zea mays
  Clone ID: MRT4577_4267C.1.pep
MDKPISSPQGHRLDLTDRPCMASLCMFTISSTPHVPQGCRRRCSDAVSSRPRSYLVCQSHLPSGPPASGGGGGGGGEEKTTPWWAATAERLRGDVVKAGMAARESLSPKQKGDWKDVTLMSFSFAVYVYISQKLVCTYCAWLSMINH

SEQ ID NO: 306591 - protein, 77 aa, Zea mays
  Clone ID: MRT4577_42680C.1.pep
KKTRRQNRWAKNPANPPRLGGGFHPAKQQPRGQVRQGQVPVSVPVQNPGPHGGLRLWGAIISRPWISLQPIYPAPSF

SEQ ID NO: 306592 - protein, 71 aa, Zea mays
  Clone ID: MRT4577_42681C.1.pep
ISDFNGLSKNMVSVAPPGLNAGGYILHSLRPGPRNWQSNRMASGFETYRFSGWKFDSSDCDSSVENKRFST

SEQ ID NO: 306593 - protein, 89 aa, Zea mays
  Clone ID: MRT4577_42682C.1.pep
WTSQLNFPNPANMFSSTLPKKSKKKESPPIEGPKERPPSFPILAPLDHGILVVSNSCEGQKRYVTNYNRYHLFMYNFKILRTISESPLP

SEQ ID NO: 306594 - protein, 52 aa, Zea mays
  Clone ID: MRT4577_42683C.1.pep
QVLIQVFPQPNRIETTLNIITTSSRLIHLANPFINQLEKIINQLANPWTPAI

SEQ ID NO: 306595 - protein, 54 aa, Zea mays
  Clone ID: MRT4577_42684C.1.pep
GYALLLTDVITSGKTIVYHTLVYHSMLSLTLHSIYAENAYHEPLSVDVITNSAF

SEQ ID NO: 306596 - protein, 113 aa, Zea mays
  unsure (1)..(113): unsure at all Xaa locations
  Clone ID: MRT4577_42685C.1.pep
GXXXFXXXXVXLXHPLLXFYXPFFSXXXGWGSXLYCXIXXXSYLPVXXXXWGGGATYSNTPXVXGFSVFRSLVXGVXSRFADPGGXXXGXXIPXXILXRNVXXWFXXXFFLCS

SEQ ID NO: 306597 - protein, 49 aa, Zea mays
  Clone ID: MRT4577_42686C.1.pep
HSGGRKVCKGKLRREFRKWKPSGFRNGCSPYIAPYFSPSRKKRICLQKV

SEQ ID NO: 306598 - protein, 50 aa, Zea mays
  Clone ID: MRT4577_42687C.1.pep
LMNLFVGLCYSYWFGCLAAATSDVLVLNKLLKSFGMDKNVLGPCRIISTK

SEQ ID NO: 306599 - protein, 267 aa, Zea mays
  unsure (1)..(267): unsure at all Xaa locations
  Clone ID: MRT4577_42688C.1.pep
LNSARGKFKSDFGGNVVSLERVQPSLDHVPHRXQKAKAHLXYLLAEAGDTLFATFIGTKQDKDIIADVNIFQGTLFHEDTAHDLAPDVDPEQNDTQKGEESHGKSYRETSKKLRKPKPAVHRGFLARANGIPALDLYNLAQKRNRKLVLCGHSLGGAVGTXIIYIISLFAHTSSIQLQVAALATLAILRVIATTSSEEDNRLHVKCITFSQPPVGNAALRDYVHKRXWQDYFKSYCIPEDLVPRILSXAYFHHYNAQTPEASFTIKL

SEQ ID NO: 306600 - protein, 114 aa, Zea mays
  Clone ID: MRT4577_42689C.1.pep
FPGFFFPFWGRSRGRYSEGQGALQTGRGPLLRSWALFFEGGGVFFGVAGFGKPPVWGGVFSRPLCSWRGFFFPAIGWFSAAFWGVVSPFPLVSLGAFQGRGALLFSGNCCMNIV

SEQ ID NO: 306601 - protein, 177 aa, Zea mays
  Clone ID: MRT4577_4268C.1.pep
MDRPKGNHLATTGGVPYPMPKHLCPRPRLPTGGDNEAIKAKESEARRQVALTVSPAEATTSAVGNLTIGGDHLSTNDSSHLRTSVVPANGGHPSVRKEVLASVLTAGVRTRPSKNMGAAPAAYNVLYDPPVQLAAREKPWMWPTCARRDRRPCGGQTATPRPSSRRQRRRRHQSYSG

SEQ ID NO: 306602 - protein, 112 aa, Zea mays
  Clone ID: MRT4577_42690C.1.pep
SKNFKSEKQFFFKKNTPCFKRLLKNSPLLFVNGRSHKSKFQKIAGYFLGRATGGFARLFFFCNQFFRPIFFFLHGLGFSPFKVLKCSKLFFLPVQMCKSFFSPVFYVWANSW

SEQ ID NO: 306603 - protein, 93 aa, Zea mays
  Clone ID: MRT4577_42691C.1.pep
YHIKSIVLDVVGRLLCTISVALTSRSKRSSTHNVTTNVLDTVRSRRSIDPQLHGRDDVIAQLYHAYLVAGSLLPDARVGQLYGAHIVSHDRPH

SEQ ID NO: 306604 - protein, 152 aa, Zea mays
  Clone ID: MRT4577_42692C.1.pep
FLLRHYREEIVPLLGLIPLRRHSGNGFAEVAMGETPYRRRSDVREGARGVRPTVLCVFANLWWPEITTAAEISWMKGSGIVKSSAGASSREVSRIRRITLVIGISSARWFKWSIISRSSIRSRWRLPVDFLAPRMDFRSCYIYLLFCKTSAM

SEQ ID NO: 306605 - protein, 66 aa, Zea mays
  Clone ID: MRT4577_42693C.1.pep
KKNLVKKLLLSKYNLMLCYCGTYFMHALIVFGIFVGWLFFRQQCYKLLERCYQCTMEKLKRIMFVV

SEQ ID NO: 306606 - protein, 140 aa, Zea mays
  Clone ID: MRT4577_42694C.1.pep
AERSMVLSSHNPSHSLVSARDSSPSSPTHGSPTMLRTITMNRATDRHPPLLQTHVLRPPCSSERNKQFHFHSAVRDPCPCHARIDVGRSSAQRTRLLACCTGKRSVLSHVVVDSVVRARPHYHAGSGARSAPPSRPRTRG

SEQ ID NO: 306607 - protein, 70 aa, Zea mays
  Clone ID: MRT4577_42695C.1.pep
RSTGSNFNGVVDVNIHNSSSNLTQTPLFLSTKLNKNACCTTRLGLNSHNTNTDRRIRSHYLCGTPPYSSY

SEQ ID NO: 306608 - protein, 143 aa, Zea mays
  Clone ID: MRT4577_42696C.1.pep
MDDFTFPTLHAGVQLLPSAFPHQLGLGGSPSPWFLAAAAEEEEEEEEKMDMLWEDFNEELASVPPLCPLSPVINKGGLAMKEAAGWLDDDEMIVLDLEKHGKHMHPQDGRVVRRRKWSLMLMLRLVKKLLMVKKYRNPRTAPI

SEQ ID NO: 306609 - protein, 114 aa, Zea mays
  unsure (1)..(114): unsure at all Xaa locations
  Clone ID: MRT4577_42697C.1.pep
HLQHHPRQLTTQXAPEPRTTPTTRAPPSHNPTAXRAQTEERXQACSTPQLRXHGPTLLQPALVGLPPPRPEPRPGPSRHGPAAAPDRRGHGHGAVVARALVGVRERGVRVVQAD

SEQ ID NO: 306610 - protein, 47 aa, Zea mays
  Clone ID: MRT4577_42698C.1.pep
DILMARIIVGICFMGCLKTFEHFFFLLSLDSMFIAVIDTNQCAIPLS

SEQ ID NO: 306611 - protein, 197 aa, Zea mays
  Clone ID: MRT4577_42699C.1.pep
SSASMSLVIWISALDLIASSQCLTTLSNSDINLAVGHFDITRNILSSSCDIAFLLRSSTWSYKRSLVRNPCRVRNESREQACQDQTCSAATPLRAALSQETAGWTFQEDPSIICTAPAAASASPSTLGRWESSHGAWNLRVRRRHPVASAVLWPSAGAATQDLSPARCSSGGYTYGGGVGSDASASTRRGVSIKSGS

SEQ ID NO: 306612 - protein, 143 aa, Zea mays
  Clone ID: MRT4577_4269C.1.pep
MNAAAASSAPDAAAAATGEEGAKEAVDVLVQYVVLRRDLADAWPLGSVVAQGCHAAVAAVWAHRDHPDTAAYCAPDNLDRMHKVTLEVKGETQLNNLAEKLAAAGVRHKLWIEQPENIPTCIATAPCPKSQVSSFFKKLKLCK

SEQ ID NO: 306613 - protein, 61 aa, Zea mays
  Clone ID: MRT4577_426C.1.pep
LFRKKGDPGFFLGIQQTHIFAPSIPLNGFYPNQLYQILLKNPCSLITTWTLIRKYFKRPKQ

SEQ ID NO: 306614 - protein, 169 aa, Zea mays
  Clone ID: MRT4577_42700C.1.pep
VGHNGSEDTCLHQTDAQDLQPRRTRRVRSFGRRSLTVDSSKLGNGSRSCDVARWERWRSPLQRVTNLAWGSSSTRVFNDARRTGAANQRGGGGGVSCVRRRPVAARLPAHGSGHGVAGKVLRRGTTAKPRRGGSLRYAQRGLCVVGQLLLGLKERQLPKPWTHFAARPA

SEQ ID NO: 306615 - protein, 76 aa, Zea mays
  Clone ID: MRT4577_42701C.1.pep
GAYSIEATCHAPKLEEVYAEIFRVLKPGALYVSYEWVTTDKYRGDDPEHVEVIQGIERGDALPGLRNYTDIAETAR

SEQ ID NO: 306616 - protein, 358 aa, Zea mays
  Clone ID: MRT4577_42702C.1.pep
MAAARRGRGDGANGVVRPRPRDRGGSMAGRVAVLAFCVAGIWSAYIYQGVLQETLSTKRFGPDARRFEHLAFLNFAQNVICFVWSFIMIKLWSGGSSSNGSAPIWKYWGVSVTNTIGPTMGIEALKYISYPAQVLAKSSKMIPVMLMGTLLYGVKYTLPEYLCTFLVAGGVSSFALLKTSSKTIKKLANPNAPLGYTLCFLNLAFDGYTNSTQDLIKSRYPKTNPWDIMLGMNLWGTIYNAVIMFVAPLLFSNWPYANGFEALRFCQENPEVAWDIFLFCLCGAVGQNFIFLTISRFGSLTNTTITTTRKFMSIVVSSVISGNPLSLKQWGSVVMVFLGLSIQIYLKWKRKKGREHKE

SEQ ID NO: 306617 - protein, 111 aa, Zea mays
  Clone ID: MRT4577_42703C.1.pep
KKKKQGKTKRKKVLNNKVKQHNVKKRDLSENYSLKQNKESEGIHENQKRKNHELENSEKQHKMGNKQLKNKMTKICDGSLKLLETHLEIEDLGLGGSGRRHKMGPGRPDRN

SEQ ID NO: 306618 - protein, 113 aa, Zea mays
  unsure (1)..(113): unsure at all Xaa locations
  Clone ID: MRT4577_42704C.1.pep
HTRFLFSFSSSYDTCVIGELINRPSQTPHLTMSSSLIGPSKPYLLSKMRFCSPLPTHRISKITFKVLLFHLXPXALTYSTPFKSFHIFQLXFSSTFSFFSLIFPNPFPFALVS

SEQ ID NO: 306619 - protein, 268 aa, Zea mays
  unsure (1)..(268): unsure at all Xaa locations
  Clone ID: MRT4577_42705C.1.pep
MGYAQLVIGPAGSGKSTYCSSLYDHCQTVGRTIHIVNLDPAAEHFDYPVDMDIRELISLDDVMEEIGLGPNGGLIYCMEHLEDSLDDWFDEQLENYLDDDYLVFDCPGQIELFTHVPVLRNFVEHLKRKNFNVCAVYLLDSQFVSDVTKYISGCMASLSAMIQLELPHINILSKMDLVSNKKDVEEXRYLDPNAQVLLSQLNRQMAPRFGKLNKCLAELVDDYSMVNFIPLDLRKESSIQYVLSSIDTCIQYGEDADVKVRDFEEDED

SEQ ID NO: 306620 - protein, 230 aa, Zea mays
  unsure (1)..(230): unsure at all Xaa locations
  Clone ID: MRT4577_42706C.1.pep
IRHEAHPASCRRTHPARHPATFLQRRNPCAIPAPTVSASLAQSMWPNLQSRLRARFPSLAKHQPPSFSTLSWKTIIHGLRRNHASPDVHPGLHHDPAPSPTPPASLHRRWKGAISAIRRPLPPQMPPWMAGAADFASIPLGPLRAQPAACPRHGGSASPSANEHAPAPDPRSLSHALASVPSAHAPNHRSPARSTDPHPPQILPAXQIPMPAAPRLGCSTSIPRPARLES

SEQ ID NO: 306621 - protein, 168 aa, Zea mays
  Clone ID: MRT4577_42707C.1.pep
QISRKWTHHLTTLLFFLFGIWSLWEGFKEDGDSEELAEVEAELDAAFKSNKGESKNKFKANDDMKKQQRPFLMQFFSPIFLKAFSITFFGEWGDKSQIATIGLAADENPFGVVLGGIIAQALCTTAAVLGGKSLASQISEKMVELSSGVLFLLFGIMSLLSGPEGGFT

SEQ ID NO: 306622 - protein, 66 aa, Zea mays
  Clone ID: MRT4577_42709C.1.pep
MPKHYRPAGKKKEGNAAKYITRTKAVNYLQVSLAIFRFVTISQLILYIAGEPSSRRRIMLNKLVGC

SEQ ID NO: 306623 - protein, 57 aa, Zea mays
  Clone ID: MRT4577_4270C.1.pep
HSIFSMPNISKLIVCLYVCIFISIYLNSGLNLSEPEHEWLYLYCAIYIHLLPSWPCE

SEQ ID NO: 306624 - protein, 103 aa, Zea mays
  Clone ID: MRT4577_42711C.1.pep
KDGNYRVDAHSTPTMLNSLMYKLCYYRFVETDGKGFDRVRRYEIGKKHFKLSHWVQVFTTHHWLVRIYKLKPQKNRVRGKLKFKSSLKASFMRKTGGKKNPWK

SEQ ID NO: 306625 - protein, 158 aa, Zea mays
  unsure (1)..(158): unsure at all Xaa locations
  Clone ID: MRT4577_42712C.1.pep
AWSPRCARPSLSLSLGXFXXXXFASSXGSXXAXSPXPSSPXAFSSSXXSXPSSSGASXASSSWGSXXSLFVSXASXXAXRGKKNRRRLAQRRSGAARVDEGRSGRETVGRSLWEGGSAVSAMAMARERRNTVAMANPGGRGXKXRLEXXXPVGFWFWP

SEQ ID NO: 306626 - protein, 96 aa, Zea mays
  unsure (1)..(96): unsure at all Xaa locations
  Clone ID: MRT4577_42715C.1.pep
EEITPSTEDIPRAFEHIENEVDAFDEVITGHRDLCGLVASLSTAATFMKAGCNHVRAVNKPNFNLPSSDLVDVPTEARSIGNRFITQIXAKGGHEL

SEQ ID NO: 306627 - protein, 59 aa, Zea mays
  unsure (1)..(59): unsure at all Xaa locations
  Clone ID: MRT4577_42716C.1.pep
SSFXLTLKRYFDYDMKTPVCRWEANQILRVKVXKIYXSAARNEQTPYMXEIPDIPKVLT

SEQ ID NO: 306628 - protein, 92 aa, Zea mays
  Clone ID: MRT4577_42717C.1.pep
GTSGDAIKRARVVTQSKATSNSGSDDEHNRSQKLSSRRPLRRPINALGVFASPPGPRPPQPFSAHMRSQSMLDVTETDSAAMVTSRDKRMKK

SEQ ID NO: 306629 - protein, 98 aa, Zea mays
  Clone ID: MRT4577_42718C.1.pep
SYGSRCVRPPIIVGDISRPQPMTVKESKYAVSVSKKPMKGMLTGPVTCLRWSFPRDDVHQSVQAEQLALALRDEVVDLEKAGIDVIQVDEPALREGLP

SEQ ID NO: 306630 - protein, 58 aa, Zea mays
  Clone ID: MRT4577_42719C.1.pep
FLCTVLVTSFPVLKVLAGTLFAPSLAIDKSMKTHWLFTGAAPHSYASDRPSRLSRGAS

SEQ ID NO: 306631 - protein, 79 aa, Zea mays
  unsure (1)..(79): unsure at all Xaa locations
  Clone ID: MRT4577_4271C.1.pep
MSPXEKKKKKKKKKKKKKKKKKKKKKKKKKKKKKKKKKKKKKKKKKGGPFLKKPNFTTGGLEEKIFFIGHPKKNKWAGF

SEQ ID NO: 306632 - protein, 138 aa, Zea mays
  Clone ID: MRT4577_42720C.1.pep
LISPRNVDLFSAVSSSSSNDLEQGANVRSNNAERLTLPVQGPLRKLFADMLCHQNIYLPVTSLQEANDNRKEVRVESSQETVSNGFHRPKTGESVISIENGESINDAQTQEITQAIMPTGSSVSDKDAESPVIGDNGA

SEQ ID NO: 306633 - protein, 62 aa, Zea mays
  Clone ID: MRT4577_42721C.1.pep
TRRDSRLLRTEELANVVMIDPRDIYIVLNGWASVVRVIPEATWAALDHSGEGLRPHGEVIAQ

SEQ ID NO: 306634 - protein, 73 aa, Zea mays
  Clone ID: MRT4577_42722C.1.pep
LIQFGRKTLLHFQVRIPVLLHLFKVQKGKGTIAVLQGWCGAIIYHDKKLSIGTREHGSAPLFQHGFQNMKPSR

SEQ ID NO: 306635 - protein, 118 aa, Zea mays
  unsure (1)..(118): unsure at all Xaa locations
  Clone ID: MRT4577_42723C.1.pep
MTRTQSAVSVAEYPCLLLLPAWATTYHSVITSSKLAPTSAXCLSYSHRTTYRPCAFCCITFRNLKXSSATPFDDRNAXCNCLKNITRNVSHLNAGNAGSIHFKCGVSMRYTIITFTHC

SEQ ID NO: 306636 - protein, 81 aa, Zea mays
  Clone ID: MRT4577_42724C.1.pep
LHNGAGPFQGARDLGPTLRGWGSFTPESQMWAGGPLLGNKKAPGVARTTLRNLGLASARISQLGLNLNTPTPAGKVRKGPE

SEQ ID NO: 306637 - protein, 52 aa, Zea mays
  unsure (1)..(52): unsure at all Xaa locations
  Clone ID: MRT4577_42725C.1.pep
SGVWLITHXGSLLNSGYDITDRILCIVVLVANGVIFRCVAFFCMVIFQKNNA

SEQ ID NO: 306638 - protein, 250 aa, Zea mays
  Clone ID: MRT4577_42726C.1.pep
MSGAHAKKEMVTGEKPATSHGKAPSGESGNKKREESPPRVKLHRSGDKKKMKKVVYYETNSSSPSTSNFDTPSVTSKRHERKKFSSKQIIERDATSTPEVQPVTFKAMEEKKEESSSSRLPIDTSKIDNEEMALIIKSFRQILKQRKGRDYKPRSKKVCYKCGKPGHFIAKCPISSDSDRGDDKRGKKEKKRYYKKKDGDAHICREWDSNESSTDSSSDEDAANIAVNKGLLFRNVGHKCLMAKEGKKKP

SEQ ID NO: 306639 - protein, 62 aa, Zea mays
  unsure (1)..(62): unsure at all Xaa locations
  Clone ID: MRT4577_42727C.1.pep
LGSTRRIASSEFILTFLLAIIXPLEGQRLAWSEILSVVTRNFLESLSSYQLPNAGIPKPIEF

SEQ ID NO: 306640 - protein, 115 aa, Zea mays
  unsure (1)..(115): unsure at all Xaa locations
  Clone ID: MRT4577_42728C.1.pep
SALHAPSSSLFRRRPLRCAITCASSPKPRRRRSPEVPAAPPSLVAAYSSAPFXPFSRSDKLLLLAHCTLNPARPGASHAHRDXLFDFRAXRTPSXLXXRTTXPSVSRSHTAVAAP

SEQ ID NO: 306641 - protein, 65 aa, Zea mays
  Clone ID: MRT4577_42729C.1.pep
TRPRRTPTTRSCHIALARRLPEKGRLVEAVVSAGPLLQTLLLAGPLPRWRHPPPPAPADIPPFNP

SEQ ID NO: 306642 - protein, 60 aa, Zea mays
  Clone ID: MRT4577_4272C.1.pep
YRSETCILPYAVSMDKLLPPGTNRRARCGTYDLQKRRDLRCKKNYGDVRTVRKFLQGAYV

SEQ ID NO: 306643 - protein, 82 aa, Zea mays
  unsure (1)..(82): unsure at all Xaa locations
  Clone ID: MRT4577_42730C.1.pep
XRYFYFSQDIFIFLRADFVIMDPLGIPNHQTNFLWENSNPRVAKLNEQFPQAWPSEPIKQVTFASNLPGKAIFGDSKSRLTC

SEQ ID NO: 306644 - protein, 233 aa, Zea mays
  unsure (1)..(233): unsure at all Xaa locations
  Clone ID: MRT4577_42731C.1.pep
MAASLQAAATLMPAKIGGRASSARPSSHVARAFGVDAGARITCSLQSDIREVASKCADAAKMAGFALATSALLVSGASAEGAPKRLTFDEIQSKTYMEVKGTGTANQCPTIDGGVDSFPFKAGKYEMKKFCLEPTSFTVKAEGIQKNEPPAFQKTKLMTRLTYTLDEMEGPLEVGADGTLKFEEXDGIDYAAVTVQLPGGERVPFLFTVKQLVATGKPESFSGPFLVPXYRGS

SEQ ID NO: 306645 - protein, 70 aa, Zea mays
  Clone ID: MRT4577_42732C.1.pep
CQTNKKISVVSPPGIQIVLITHVHRLCVPMSSSINKIRIWVFRLGQKKKVLLPLVILHPNKKKKFIKKKK

SEQ ID NO: 306646 - protein, 135 aa, Zea mays
  Clone ID: MRT4577_42733C.1.pep
MATIATMALLKPARIVARSAPPSTSGSVSLRVPARAKKAAVSASVSSALAGAFFSALASSDAALAAQRVADVAAAADSGSDNRGQLLLFVVAPAIGWVLYNILQPALNQLNRMRSQAVVAGLGLGAAAAGMAAAD

SEQ ID NO: 306647 - protein, 133 aa, Zea mays
  Clone ID: MRT4577_42734C.1.pep
MATIATMALLKPARIVARSAPPSTSGSVSLRVPARAKKAAVSVSVSSALAGAFFSALASSDAALAAQRVADVAAAADAGSDNRGQLLLFVVAPAIGWVLYNILQPALNQLNRMRSQAVVAGLGLGAAAAGMAA

SEQ ID NO: 306648 - protein, 81 aa, Zea mays
  Clone ID: MRT4577_42735C.1.pep
DIPGLTDPTVSRCLGHRRASRIRKLFNCSKEDDVRQYVVRKALNKDGKKPRKKAPKIQRLVTPRVLEHKRRRIALICAYQD

SEQ ID NO: 306649 - protein, 90 aa, Zea mays
  Clone ID: MRT4577_42736C.1.pep
MGSGDGNFLKVLLKNFDVLAGPVISLVYPLYASIRAIEIKSPIDDQQWLTYWVLYSLITLFELTFAKVLEWIPIWPYAKLIVICWLVLPY

SEQ ID NO: 306650 - protein, 46 aa, Zea mays
  Clone ID: MRT4577_42737C.1.pep
FSILFISIFPLPILHFYSNPSRYINNYLYINYKYTKNLSIYTLLNT

SEQ ID NO: 306651 - protein, 86 aa, Zea mays
  Clone ID: MRT4577_42738C.1.pep
ARPTRPKASSASITTYFLPNQHISNMALSKDTKSPHFLIFLLFTSQPPLNSLFFTTTTEPPSIICSTSIQHSPSAPSTLINTTISI

SEQ ID NO: 306652 - protein, 189 aa, Zea mays
  Clone ID: MRT4577_42739C.1.pep
GRDVTPHSYLLTHPSQSCRSSPVRLCCLRYFPSRIHALASGHGVQVLLGSSGQAAALTSVRYSSAARAWRRRSCRPTAFPQMFVAGRRHPCSFYMRGSSTQGAGLHRFLLQPRISALLPQARPPLGLTHPLLHLRPLLAVNDAGIQDGMGKATQGGAGESPAGGEGDAVPAAQARPADHKAQQEEVHRP

SEQ ID NO: 306653 - protein, 75 aa, Zea mays
  unsure (1)..(75): unsure at all Xaa locations
  Clone ID: MRT4577_4273C.1.pep
WNTHMRRKLLLRGMDPYTHRPIASATEGQQHYHLQEPYKPPDGGGPAGHPHKNHLXGGRDLKIAGLGLQXVASTT

SEQ ID NO: 306654 - protein, 197 aa, Zea mays
  Clone ID: MRT4577_42740C.1.pep
SFSCKYPATSRSYLQISTSSSSGCRAHLREIFQRRPCLEKKILPPDRFSLDVCRRRLCSFYMRGSSTQGAGLHRFLLQPRISALLPQARPPLGLTHPLLHLRPLLAMAPAAASGSCCFSSASSRSSPWRLAARPCHLPWRAPAPGARPPAHLQWRGSFSPLHALPSVCCVLSAQPELPWPPCPARLGPCSLLICAPS

SEQ ID NO: 306655 - protein, 40 aa, Zea mays
  Clone ID: MRT4577_42741C.1.pep
MGSDQETEKKKTPVALMPIAKPLAGKKLCKRTLKLVRRGS

SEQ ID NO: 306656 - protein, 54 aa, Zea mays
  Clone ID: MRT4577_42742C.1.pep
GDGKWKLGKNAPLIKAGCVLTFGKKVGAKKSETTKVQILIFKRNKKKASKHSCI

SEQ ID NO: 306657 - protein, 87 aa, Zea mays
  Clone ID: MRT4577_42743C.1.pep
ILYLILLWEKGVINHIQILLHLIEKHSYDLNMSSSTYSSLARLLILITLPTLDNIPDTLLNPIALILNSASSSTLETPMSMTLNILI

SEQ ID NO: 306658 - protein, 92 aa, Zea mays
  Clone ID: MRT4577_42744C.1.pep
MPEKELPRRKKIPLVKQKKKNKHANVKSNHDTADAVVESLSDSKYDAPLKLKKKSKKKQMESSSPAVVYKSSVVTEDAAAPKPEKKKTNVKG

SEQ ID NO: 306659 - protein, 187 aa, Zea mays
  unsure (1)..(187): unsure at all Xaa locations
  Clone ID: MRT4577_42745C.1.pep
GPPGGGGGGFFPSNKHWAAQVLGAPKQXSLGSVSTMPKFFSKEFEFSGGPPVEIAQKIGGGVAKSFLGKGIPKVVFARGGFLFHGRIKALADFSRGPGLEFWVVPGFVHFSRVPRNFFFFFSPYAGQIVVPPLVLQGAKPGPLVGQVPFFFPFGEKKKKKKKKKKKKKKKKKKKKKKKKKKKKKKGP

SEQ ID NO: 306660 - protein, 58 aa, Zea mays
  Clone ID: MRT4577_42746C.1.pep
TFLPPIGSPFFKAFLIALPNGFIFFPPVREGFLSPCPLGAFVGQKIWSFGLEIPPPRA

SEQ ID NO: 306661 - protein, 84 aa, Zea mays
  Clone ID: MRT4577_42747C.1.pep
QLVVCPWRCSNLLPLIGSIKSGRNLGAREYNEGGEGGVGHHVRQPSCLQDRDTASAARWAQANLRLSQGYPRRPLVWLLLPVSR

SEQ ID NO: 306662 - protein, 85 aa, Zea mays
  unsure (1)..(85): unsure at all Xaa locations
  Clone ID: MRT4577_42748C.1.pep
EWXGSTPRDPYQLLTQSSSARLFRDLRRIDERAREPIKEEAVLPLFQPRPARLFERSGTISNSTFPCTSSKAMSRSATHAANFTV

SEQ ID NO: 306663 - protein, 156 aa, Zea mays
  unsure (1)..(156): unsure at all Xaa locations
  Clone ID: MRT4577_42749C.1.pep
PLLQSSLLAPKPEWRPTRQVRAPKEPIPFMRPLHSAYDDEXLAETVIHIRLPPGRHPCTMYESNASXEYLLARALALENTQVNDHRLRTLHGTDAGLHQDLLQDLLFEDTLYHSRVDVLLILDILHDQALLARIIAQNVLVQLAGYNNHVRRHRLH

SEQ ID NO: 306664 - protein, 234 aa, Zea mays
  unsure (1)..(234): unsure at all Xaa locations
  Clone ID: MRT4577_4274C.1.pep
MSSPVFSNVETYKPATFREESGYASAESSQDGLQEIFFTRPHLKFINAQLAKLEPQDILRWCITSLPGLFQTTALGLTGLVTVDMLSKLDGPLKHNIDLIFLDTLYHFDETYALVDRVRRRYGTPVHVYKPAGCDNVNDFTAKHGDKLWETNDELYDYVAKVEPAERAYSELQVKAVLTGRRRSQXGKRGDLDIVEVDEAGLIKINPLANWTFAQXXEYVDANDVPYNELSTGL

SEQ ID NO: 306665 - protein, 45 aa, Zea mays
  Clone ID: MRT4577_42750C.1.pep
QIERRDLSGDQQRQNTTKNQWCCGCGRSPYSGAIKLTICRLALEK

SEQ ID NO: 306666 - protein, 62 aa, Zea mays
  Clone ID: MRT4577_42751C.1.pep
AVTPFLFVLRIMLVDTNSFRLMKMLPQSSHSFPVDPFIERTSHLVLEASDSSKRRQGSEDVI

SEQ ID NO: 306667 - protein, 46 aa, Zea mays
  Clone ID: MRT4577_42752C.1.pep
HCPGLGPKLTKGNLNGHPNVTYRCGLIRLVRCPPTTISSTPREGLT

SEQ ID NO: 306668 - protein, 432 aa, Zea mays
  unsure (1)..(432): unsure at all Xaa locations
  Clone ID: MRT4577_42753C.1.pep
MPTPTPPSPSPSPSSGTCPLLRIGAGRRFAMAFPSWATLFFAGMMVVLAAVEADREAGGGSVCFDRMFGFGDSLTDTGNFLLSVPDDFPDPARNLPYGQTFFGRPSGRYSDGRNLLDFFAEAFGLPYVPPYLGSGDFQNGANFAVGGATALNGSFFRERGVEPTWTPHSLDEQMQWFKKLLPFIAPSETELNEIMSKSLLFVGEIGGNDXGPLIRRDWSVDELHEMVPEXVDIHCTVGHQDLINLGAKKLVVPGQVDAAAVPLYLESFRAKKRITXEQTGCTTRPNEFAEYHNRMLQEELEKLRNLHPDVTIIYADYYGAALNIFRAPLKFGFTVPLNACCGSDAPYNCSPSILCGRPGSTVCPDPSKYISWDGLHFTEASYKVVIQGVLGGYAKPPLSETCKGAEFKVSQLHQCTDNPTNTVSYDALSSFI

SEQ ID NO: 306669 - protein, 85 aa, Zea mays
  Clone ID: MRT4577_42754C.1.pep
DVHHRNVTLLLTVQDLPYSFDFFLFDGPAHNLVKCIPVNTVVLAGINLDLLLLHLLVSCLHRFQELISIHLLTHRCLECFQVPAN

SEQ ID NO: 306670 - protein, 104 aa, Zea mays
  Clone ID: MRT4577_42755C.1.pep
MLLAFSSDTSVSMSIHVYALVAPMALPSGLVAFLTGVCVATCYVRLRSIVTSPCLQSAIKSSGSSTTCYRTRGGMSLSSSVSEATGYQANDLMMKASSAHNRSL

SEQ ID NO: 306671 - protein, 432 aa, Zea mays
  unsure (1)..(432): unsure at all Xaa locations
  Clone ID: MRT4577_42756C.1.pep
MPTPTPPSPSPSPSSGTCPLLRIGAGRRFAMAFPSWATLFFAGMMVVLAAVEAEAEAGGGSVCFDRMFGFGDSLTDTGNFLLSVPDDFPDPARNLPYGQTFFGRPSGRYSDGRNLLDFFAEAFGLPYVPPYLGSGDFQNGANFAVGGATALNGSFFRERGVEPTWTPHSLDEQMQWFKKLLPFIAPSETELNEIMSKSLLFVGESGGNDXRVXIVREKSVDELHEIVPNVVGAISSGITDLINLGAKKLVVPGNFPIGCVPLYLAIFQSQKEGYYEEQTGCIKWLNEFAEYHNRMLQEELEKLRNLHPDVTIIYADYYGAALNIFRAPLKFGFTVPLNACCGSDAPYNCSPSILCGRPGSTVCPDPSKYISWDGLHFTEASYKVVIQGVLGGYAKPPLSEACKGAEFKVSQLHQRTDNPTNTVSYDALSSFI

SEQ ID NO: 306672 - protein, 66 aa, Zea mays
  Clone ID: MRT4577_42757C.1.pep
MATMILALVALSTLFVSATDAFIIAQCSLAPSAISAQFLLPVTSMGLVHLAVYAYMLEQALAASVL

SEQ ID NO: 306673 - protein, 433 aa, Zea mays
  unsure (1)..(433): unsure at all Xaa locations
  Clone ID: MRT4577_42758C.1.pep
MSTATAPSPSPSSSPSSGTRPLLRIGAARRFAMAFPPWAALLFAGVLVVVLAAAGAEAGGGSVCFDRMFSFGDSLTDTGNFLLSVPDDFPDPARNLPYGQTFFGRPSGRYSDGRNLLDFFAEAFGLPYVPPYLGGGDFQNGANFAVGGATALNGSFFRERGVEPTWTPHSLDEQMQWFKKLLXIHCTVGDRAKXIISKSLFFVGEVGGNDYNHLIVRDKSVDELHEVVPNVVGAISSAITDLINLGAKKLVVPGNFPIGCVPLYLAIFQSQKEDYYEEQTGCIKWLNDFAEYHNKMLQEELEKLRNLHPDVTIIYADYYGAALNIFRAPLQFGFTVPLNACCGSDAPYNCSPSILCGRPGSTVCPDPSKYISWDGLHFTEASYKVVIQGVLGGYAKPPLSETCKGAEFKVSQLHQCTDNPTNTVSYDALSSFI

SEQ ID NO: 306674 - protein, 76 aa, Zea mays
  Clone ID: MRT4577_42759C.1.pep
SGCPVQANEEGAQRRDTYPTPSPAPSPRGCGRPPDAKSHKLKAEPSRMPNNTLASYRTLLTMVSATWRTTSTRPRT

SEQ ID NO: 306675 - protein, 49 aa, Zea mays
  Clone ID: MRT4577_4275C.1.pep
KACKNTLFYKIEVQFFFKVKKNSSNHYFLKNLFMCLLKPCQECIFFCLQ

SEQ ID NO: 306676 - protein, 55 aa, Zea mays
  Clone ID: MRT4577_42760C.1.pep
NIGIIYQSAFCNSVHLTSIVGIPRLLDLPIASPSYLTSKQVASQENLLVRIEWSK

SEQ ID NO: 306677 - protein, 144 aa, Zea mays
  Clone ID: MRT4577_42761C.1.pep
PGSSRLWPVACGLGGGWVVSERRRKIFSVACSKGTLLTLDIYPLAVVVLAWCLFLLQLRMRLARFLCTHYTASRSNCTGDIHTTIITNPPHASSVRRSELKKDRMRLNSKINRKRFKPQFPSFYLYTTERNLTSIQHASRTRKK

SEQ ID NO: 306678 - protein, 39 aa, Zea mays
  Clone ID: MRT4577_42762C.1.pep
RIRIRRGCATAASGYTYIIGRKINRAIFVRTTCLVEPRA

SEQ ID NO: 306679 - protein, 76 aa, Zea mays
  Clone ID: MRT4577_42763C.1.pep
GTAKRRQQQISTACGTLEKSTDDPKPPFGTGVANTNKSSQNSGRMDTRSYLHTRIEQSKAFELLDAFVTTRKHVCH

SEQ ID NO: 306680 - protein, 94 aa, Zea mays
  Clone ID: MRT4577_42764C.1.pep
SLDISSVDEDLPSPALSSAKAPAINLSPVVLSYVALNFPSGLLEFPRSWTDTAATDRGCLRVRRPTPPRPTEVQSSLLPLARRRWRGRRRTSEV

SEQ ID NO: 306681 - protein, 86 aa, Zea mays
  Clone ID: MRT4577_42765C.1.pep
RRLGILLLPRAGRQKYLSITLTENMAQWLFTPVTDSTDREAFFRVLLKMAPDERNFRGHRAIRIRTSVMLPLWLRTCRLRRVHNSD

SEQ ID NO: 306682 - protein, 78 aa, Zea mays
  Clone ID: MRT4577_42766C.1.pep
TTHLVGCLHGQLIGVFVYHQASLGSSSHFGRYVREHGMDSQSHCLPSSWMLPSAHTCQKFSLVLQKPYLWHISIPFAL

SEQ ID NO: 306683 - protein, 372 aa, Zea mays
  unsure (1)..(372): unsure at all Xaa locations
  Clone ID: MRT4577_42767C.1.pep
MGVKNLWDILDSCKKKLPLQHLQNKKVCVDLSCWLVQFCSANRSPAFLRDKVYLKNLFHRIRALIALNCSLIFVSDGAIPSVKLATYRRRLGLNAAEATREEANSQPLTSLRRNKSSEFSRMIKEAKHLGLALGIPCLDGMEEAEAQCALLNFSSLCDGCFTSDNSARGFGAKTVYRDVFIGEGGYVICYEMEDIQNKLGFGRNSLISLAVLLGSDYSNGVHGFGPEAACRLVKSLGDDTVLGQILSDGVKPARKCKGKGSGANAGTVGGTCPKASTCEVGINQDSGSQFRDIINAYLEPKCHSPDSEAVQRACSQRPFLRSQLHQICEQYFAWSPVKTDEYILPKIAERELRRXSXLRSTSSDLGMXPSLN

SEQ ID NO: 306684 - protein, 103 aa, Zea mays
  unsure (1)..(103): unsure at all Xaa locations
  Clone ID: MRT4577_42768C.1.pep
MVVLEGGVGDNHIFEELSFHKSTDLCVSSKEMSGRGKGGKGLGKGGAKRXRKVLRDNRGGGTKPAIRRLARRGGVKRISGLIYEETRGVLKIFLKNVIRDAGT

SEQ ID NO: 306685 - protein, 63 aa, Zea mays
  Clone ID: MRT4577_42769C.1.pep
LIHSSQPYSRGGSSLVGAVAHTKQTARKSTGGKAPPKQLATKAARKSAPATGGVKKPHRFRPG

SEQ ID NO: 306686 - protein, 66 aa, Zea mays
  Clone ID: MRT4577_4276C.1.pep
RSLPVDGSRKSDPISASNNPARLPSSLMAVDQRPPPKKRVLKMDHFVYQVQVLFLFSLYRRLAAKS

SEQ ID NO: 306687 - protein, 231 aa, Zea mays
  Clone ID: MRT4577_42770C.1.pep
MSAARAFSTAFRAGAPRAPIAARYAATRSYAAAAPSGSAIKPPVALFSVDGTYASALYTAAAKTNALEPTAKSLSNLQGVFQKDAKLNEILHAPSLSVSDKQQIVQELQKHIGSADKEGIVKNLLNTLAENNRLSVLKGVVEKFDVLMGAHRGEVELTVTSAAPLDNRTISRLETAIKNSQYVTSGQTLKVVPKVNPEIRGGLIVEIADRTIDLSVANKMAKMNKLLTEAL

SEQ ID NO: 306688 - protein, 485 aa, Zea mays
  Clone ID: MRT4577_42771C.1.pep
HASAHAAQGGEGHHQGAPRRALWQVGNARAGKHPFKYVYMWHANHGYLGRKRPVAAGMEHYGSMLERPVRIALGFQKHERCHTLTCVTANGLGLVNPDRVFSFYDELHSYLASAGIDGVKVDVQNVPTRLGAGHGGRVMLARKYQQALEASVARNFPDNGIISCMSHSTDNLYSSKRSAVIRASDDFWPRDPASHTIHVASVAYNTVFLGEFMQPDWDMFHTVHPMAEYHAAARAVGGCAIYVSDKPGSHDFNLLKKLVLPDGSILRAKLPGRPTRDCLFSDPARDGKSVLKIWNLNEHSGVVGAFNCQGAGWCRVAKKNLIHDQQPGTVSGVIRAQDVEHLGRVADHGWNGDVVVYLHVGGEVVYLPKNALLPVTLRSREYEVFTVVPLKHLPNGASFAAIGLLGMFNSGGAVRELRFGGEDADVELRVRGSGTVGAYSSTKPTCVAVDSKAVGFSYDATCGLISFELGIPDQEMYLWTVTVGY

SEQ ID NO: 306689 - protein, 120 aa, Zea mays
  unsure (1)..(120): unsure at all Xaa locations
  Clone ID: MRT4577_42772C.1.pep
GRASAVCQIQLLQPYETQHAIAAGIGPLSPLVVQQXSALLQQVPLEHSLGQNIRAQQLQQIVLANLAAYSQQQQFLPFNQLGSXHSVYYLQQQHLXFMQLPAAYSEPIVPFNQLGALNSA

SEQ ID NO: 306690 - protein, 80 aa, Zea mays
  Clone ID: MRT4577_42773C.1.pep
QKNHGTNPGGAGKRTRTSPGWRYRGPPGDLLKGGWGKKNPQGTGGGPPGFLKGPPGTGAKSLAKKNREEKKPGGGTPPAG

SEQ ID NO: 306691 - protein, 84 aa, Zea mays
  Clone ID: MRT4577_42774C.1.pep
NFVLGMFNSGGAVRELRFGGEDADVELRVRGSGTVGAYSSTKPTCVAVDSKAVGFSYDATCGLISFELGIPDQEMYLWTVTVGY

SEQ ID NO: 306692 - protein, 132 aa, Zea mays
  Clone ID: MRT4577_42775C.1.pep
SEFGSSMQPDWDMFHSVHPMAEYHAAARAVGGCAIYVSDKPGSHDFNLLKKLVLPDGSILRAKLPGRPTRDCLFSDPARDGKRLDSQLSTMAGLFLFTKSRLLAESRLMLFSQRSQDMEPERTLRRRWRLQL

SEQ ID NO: 306693 - protein, 110 aa, Zea mays
  unsure (1)..(110): unsure at all Xaa locations
  Clone ID: MRT4577_42776C.1.pep
ELTNYSGPIFKHTPLNLRXSFPXDYGFYTSGLSSDPETFSRNRHLDVIHSRLSILRSLGCVFPEILSKNSVKFCXTMWFKAFSQIFSXGWLYYLLNTNLVHSHIILTIYS

SEQ ID NO: 306694 - protein, 145 aa, Zea mays
  Clone ID: MRT4577_42777C.1.pep
VSGSQTFDVTECEGRRRVCTAGAVASSPQGRSGKISGGGSTNDSHRRITVAASNIISTPLLIVDATALPSPMAPRLLSFFLGFHVCCEEVVVPCVRERKRCTLRSWEAIYGPDGGLLESAGQMGCFGMCDCWNGHVRSFSAPQFQ

SEQ ID NO: 306695 - protein, 64 aa, Zea mays
  Clone ID: MRT4577_42778C.1.pep
CGFFFFFFFFFGQTEQQHPETLTGRIPLKLALTRSYKPGAKNITLALLVWEPSLWPLRNRTLGF

SEQ ID NO: 306696 - protein, 44 aa, Zea mays
  Clone ID: MRT4577_42779C.1.pep
LVLDRERTTFFLLFSIEGHFNQYSDYFLIITCLIECTIIEYILY

SEQ ID NO: 306697 - protein, 92 aa, Zea mays
  Clone ID: MRT4577_4277C.1.pep
PSTTKYTLCHTQTSYLQAWCSEALEVFHAVLKPRPQSPRFIGATICTSTDPALYVSHNHYTQTASFFMTRTPPYYENPRPCFRSRLIHKCNY

SEQ ID NO: 306698 - protein, 108 aa, Zea mays
  unsure (1)..(108): unsure at all Xaa locations
  Clone ID: MRT4577_42780C.1.pep
MHKATSLSELGFHSGGASSGFFRPVADGCPPPTPTSSAAPHRRLTKVSVIGDDNVSMAIIQTTLTQNLPDEIXLVNRLPDKXLRHKALDLQDEAAFLPRVRIASDPDA

SEQ ID NO: 306699 - protein, 94 aa, Zea mays
  Clone ID: MRT4577_42781C.1.pep
WRHYMEILAEYLFSCHAFLPCWEISKFHCSQAISALLWNLNSGVRAQVAIHAKCTCTVPRRSYELKGTKHVGDFFIRVIIVVPPRHCCVISFSG

SEQ ID NO: 306700 - protein, 119 aa, Zea mays
  Clone ID: MRT4577_42782C.1.pep
LLVSLSGPPQAQKHNTSPRQIDREESRSEPARPPVAYRHGRRGGVREGRWARSPLGVPIVLDVLAGVVSLTSCCQRSSSTTRHGSRTRRSWPDGGTPSVLLRPGCRRRSTGGGDAHPLV

SEQ ID NO: 306701 - protein, 111 aa, Zea mays
  unsure (1)..(111): unsure at all Xaa locations
  Clone ID: MRT4577_42783C.1.pep
SGCDTPLEPLASCPIGAGVFIGSQLXQKLVGETRQVDVDAHVXCHKIRHLSDPAPXSIVRRSLLHTRSYNKNSXRFRALIRMDDXLAVNQLRYAARAEHENTRXPLDAIYS

SEQ ID NO: 306702 - protein, 43 aa, Zea mays
  Clone ID: MRT4577_42784C.1.pep
TVYNIKITFCLQFTKLLLQSLISDNLQSWLHESSKFKIQKLFS

SEQ ID NO: 306703 - protein, 83 aa, Zea mays
  unsure (1)..(83): unsure at all Xaa locations
  Clone ID: MRT4577_42785C.1.pep
RRIRDAFRATFIVTAGFVRQNGIRAISSGYGDLFAFGRLFLASLALPRRLEXTAPFNKYNRVPFYILDPVVAYSGYPFISSEV

SEQ ID NO: 306704 - protein, 98 aa, Zea mays
  Clone ID: MRT4577_42786C.1.pep
VIITFRTIHQYEVIKLLKYSYSTSFTTTGFVMFISSEVRGGAVDDVVVLPIHLQKWAVLRTRFYLNFTQHPAEGSGGSPTGMRPRRGRRGSNPGEFRD

SEQ ID NO: 306705 - protein, 151 aa, Zea mays
  Clone ID: MRT4577_42787C.1.pep
MPASIAFGRFDDSFSLASFKAYIAEFISTLIFVFAGVGSAIAYSKVSGGAPLDPSGLIAVAICHGFGLFVAVAVGANISGGHVNSAVTFGLALGGQITILTGIFYWVAQLLGAIVGAFLVQFCTGVATPTHGLSGGGAFEGVVMEIIVTFG

SEQ ID NO: 306706 - protein, 42 aa, Zea mays
  Clone ID: MRT4577_42788C.1.pep
NGCENCPFLEMDREHDNIVNCTTPNFTRDEHHETSGGETCGI

SEQ ID NO: 306707 - protein, 86 aa, Zea mays
  Clone ID: MRT4577_42789C.1.pep
CWSCKFNLVQFQAESSRCILIVSNLFTLLLVMPATSGSLIMVHPESAVHSVCNGSPEQRCLRVHLVYSGGILSIAPWVAWSTMHKK

SEQ ID NO: 306708 - protein, 94 aa, Zea mays
  Clone ID: MRT4577_4278C.1.pep
NFCIKLQKEGTIFLASFPYSAIKGRRVTYHSDLIISTIESSPMSSAGGGVQRKKAHSNYFSNLHLNKSLKAPVYTANFHPTLLYGTRSIKEPPE

SEQ ID NO: 306709 - protein, 39 aa, Zea mays
  unsure (1)..(39): unsure at all Xaa locations
  Clone ID: MRT4577_42790C.1.pep
VFPYNITCLYXNLHXXHHFKQFVPCVFTICFPSSCRNVI

SEQ ID NO: 306710 - protein, 161 aa, Zea mays
  Clone ID: MRT4577_42791C.1.pep
MSPVHVPELSSGGSGSGSGSLTLNPVQRALTRLSSSSALTPRSPPPSYGSIVTVLSIDGGGVRGIIPGTILAFLEEKLQELDGPDVRIADYFDVIAGTSTGGLVTAMLTAPDAKGRPLFAAKDINNFYLEHCPKIFPAVYGGPLGLLRSMRGPQYDGRYLH

SEQ ID NO: 306711 - protein, 171 aa, Zea mays
  unsure (1)..(171): unsure at all Xaa locations
  Clone ID: MRT4577_42792C.1.pep
ANQTFVCKPIASTFAEPQLNPEEFNKEPFQEPXLPLSRMLIEDSGSSKDLKNLFTSTSDQPFLAPPNNLVPMKHSGSVTIKASFKEDIVRFRFSCSGSVIVLKEEVAKRLRMDVGTFDIKYLDDAHEWVKLACNSDLEECMEISRLSGSHVIRLSVSDIATHFGSSCGSSG

SEQ ID NO: 306712 - protein, 44 aa, Zea mays
  Clone ID: MRT4577_42793C.1.pep
GRPRESADTKKATEFHNRSATSEPTSKVMTHVKSRLVFLIGVSI

SEQ ID NO: 306713 - protein, 262 aa, Zea mays
  Clone ID: MRT4577_42794C.1.pep
HEGEVPPAAAQWAASWELDDWEFADCGDVAPAAVVAEREATAAAAKPRLVFAPPSREEAEEATTELRDAIGRAYFNESPVEVVKEQDKEFNKLATDAIIPSMPGHVVQAFTLLKSSTEAQSVVASLASDRNVWDAVLKNEKVMEFYKTHQTTPVQTFPEEAATAESPGKFEDATSENASNSELPTGSGASFADFVDNAKKKVMDVVHNITDFFRDLFNDSAEAQTGAGPSAEKGFSATEMAVGGSFMALTIAVILVVLFKRA

SEQ ID NO: 306714 - protein, 151 aa, Zea mays
  Clone ID: MRT4577_42795C.1.pep
GRASTEAQSVVASLASDRNVWDAVLKNEKVMEFYKTHQTTLVQTSPNEAVTVELPGKLEDAASENTSSGELPAGSGLSFSDFVDNAKKTVMDVVHNITDFFKDLFDDSAKTQTGAGPSAAEKGPSTADMAVGGSFMALAIAVILVVMFKRA

SEQ ID NO: 306715 - protein, 57 aa, Zea mays
  Clone ID: MRT4577_42796C.1.pep
MIPSMPGHVVQAFTLLKSSTEAQSVVASLASDRNVWDAVLKNEKVMEFYKTHQTSTS

SEQ ID NO: 306716 - protein, 122 aa, Zea mays
  unsure (1)..(122): unsure at all Xaa locations
  Clone ID: MRT4577_42797C.1.pep
KFPAPKYLSKGLIRGVLVKEPQNPLGVKRGAPKIKHPPFFXGVKWGFFRGSPPPQVPRPFXAYPPFKKGGGEAIGSPPQRIIGAHVKLAGKNLGFWFFLKQGGPPGRYFFGPAPGRAGFKFV

SEQ ID NO: 306717 - protein, 99 aa, Zea mays
  Clone ID: MRT4577_42798C.1.pep
RPGTRLLQSFFVSLQTDEFEQLHPERDPLPGKKQLVASLLYGELRPWFHHRPQGRADSYGLSVRRQVQTLRLVLVSASRGLRLRLWPPRRCRRPAAGCG

SEQ ID NO: 306718 - protein, 57 aa, Zea mays
  Clone ID: MRT4577_42799C.1.pep
EHALLALIHDPVHVAIVWSVVIHVNAPDRPCPLDRRSHVGRRGHRRHCEPAGASTRL

SEQ ID NO: 306719 - protein, 119 aa, Zea mays
  Clone ID: MRT4577_4279C.1.pep
IAESTREVENVDGFLIWFDNFFTTARSDPVPPAETTPDTWDKKDQGGVAFTTGPSGTVTHWKQGLLIAPPEANPSKKCPKSLSGEIVFTAADDNARALVLRASWTDSEGDSRQHSWQLK

SEQ ID NO: 306720 - protein, 124 aa, Zea mays
  Clone ID: MRT4577_427C.1.pep
QLLELLSAGQSRVVDWNMVKKGEDEEEKKLNATYIISVARKLGCTVFLLPEDIMEVNPKMILTLTASIMYWSLQNQGPYKSSGPQDALLEEEEGEEEEEEEEEEEEEEEDFEGGVEDGVSETTT

SEQ ID NO: 306721 - protein, 138 aa, Zea mays
  Clone ID: MRT4577_42800C.1.pep
NDTESNTAATIDTTISHMQTEFSSINNMYALLNGGQDGLGTVNTHGNVSEQHPGMGNHQCRAMDSVRTEAMGSVRTDSIGSFEKTISINKDESRIISDMLSSEFNPWDDSYSTANNFVRMLRESENNDVHFAVPSWKS

SEQ ID NO: 306722 - protein, 66 aa, Zea mays
  unsure (1)..(66): unsure at all Xaa locations
  Clone ID: MRT4577_42801C.1.pep
PGTRHRQPAFLSYIPLHVSIHSQHILHSVTIPLKSFIPVHNDQYVESDQVXSQIRAGTSTLHFKKR

SEQ ID NO: 306723 - protein, 37 aa, Zea mays
  Clone ID: MRT4577_42802C.1.pep
TTHTIHYHNLQSYYHSTTNYPFCLTYIQFNRRFITQF

SEQ ID NO: 306724 - protein, 77 aa, Zea mays
  unsure (1)..(77): unsure at all Xaa locations
  Clone ID: MRT4577_42803C.1.pep
TTHALTNNXTGXIAFPFAAPRLFXSRLNDLHTLAPKVAFHVVPNAHPLEGQGRLFSLKQFNFTSAIPFGFVKEKLEF

SEQ ID NO: 306725 - protein, 165 aa, Zea mays
  unsure (1)..(165): unsure at all Xaa locations
  Clone ID: MRT4577_42804C.1.pep
MLLMTLIRRXHTDLLDSAANIIIYRRSITATYXSRVFAMQSGFARDQNXNLATLRLQIALEATEMPVKEQLEKFTLIQPPMLLATALGSYGAYLTESCDNREDYSDTSTKDSLKDXHRXSLQVLAESGPNVNAFETIPXKVVAQAYAELLXGCNINIPSWLSCNS

SEQ ID NO: 306726 - protein, 67 aa, Zea mays
  Clone ID: MRT4577_42805C.1.pep
FLFIFLLIVRGLLFRPFEPWAHPKLKKDFGGDPSSNGKDTSCSQREGILYCVDKPIRHSNPGPAFGI

SEQ ID NO: 306727 - protein, 122 aa, Zea mays
  Clone ID: MRT4577_42806C.1.pep
MAKKGIQYVVVDAFTAQPFKGNPAAVCFLEDDAAAPAGDGRWMQSVAVEFNLSQTAFFSRDSSCAADAATPRFHLRWFTRVTEVALCGHATLATAHFLFTSVLAERHGVVEFVTKSGVLTAK

SEQ ID NO: 306728 - protein, 186 aa, Zea mays
  unsure (1)..(186): unsure at all Xaa locations
  Clone ID: MRT4577_42807C.1.pep
APPSYSSKKKKNPKSPQKPTSWGPRPPPGXSSCLPPPSLPPPLTSKPRRPKKKKRWRSKTGPAAAPPRVPAAAAAAPPPPPGGAAPPPGTMAPPGAPPPPXKPKPMARXTPSRPPPKKKTGTYPPMXELMGTKSPPVAPPXRRSQKKFGPPPPIKXSKKVPPLVGGLGNAPCIPPPQKKNVNENPW

SEQ ID NO: 306729 - protein, 210 aa, Zea mays
  Clone ID: MRT4577_42808C.1.pep
NSARGRGRRFLSPLCSLDRATRTAHGARVPTARSTVGSRFPSASSTAGARVPTARSTTPPGLPAASSTAGGRRPVPLGELQRLILRQPSAICSPQLISTSSSIPDAAPAAARLQRRHFPRPLPVCRCKSTNSSLPRRRPPSPRRLQAHCGTHSRAPASPRQQVAGAQPPARRASQCQAASREVMEGTTICIEIDGEAICLDVAEIMNKEL

SEQ ID NO: 306730 - protein, 143 aa, Zea mays
  Clone ID: MRT4577_42809C.1.pep
MTESLVRNKPGMASIKEMPVLQDGPPPGGFAPVRYARRIPTSGPSATAIFLTAFGAFAYGMYQVGQGNKVRRALKEEKIAARSAILPMLQAEEDERFVKEWKKYLEEEARIMKDVPGWKVGESVYNSGKWMPPATGELRPEVW

SEQ ID NO: 306731 - protein, 40 aa, Zea mays
  Clone ID: MRT4577_4280C.1.pep
FITDLNPSNIPTMRIQGYYGNCIKSNLVIKNMPQNFTHLE

SEQ ID NO: 306732 - protein, 189 aa, Zea mays
  Clone ID: MRT4577_42810C.1.pep
MEGTTISIEIDGEAICLDSVGDNEQEAAENGEMHQTIYTDENGEQVPLGPQEQGREEDLAGNGEEDRDHNSIIPSREELTEELRNKVAYSEEEAYRLYCDYGHRMGFSVRKGKQYYFTGTKTIRTKDYYCSKEGLKDDEQLTEANFNKPETRTNCKAMVRFRVDSEGQWRVIQIIPEHNHELVRPEKIH

SEQ ID NO: 306733 - protein, 143 aa, Zea mays
  Clone ID: MRT4577_42812C.1.pep
MTESLVRNKPGMASIKEMPVVQDGPPPGGFAPVRFARRIPTSGPSATAIFLTTFGAFAYGMYQVGQGNKVRRALKEEKIAARSAILPMLQAEEDERFVKEWKKYLEEEARIMKDVPGWKVGESVYNSGKWMPPATGELRPEVW

SEQ ID NO: 306734 - protein, 62 aa, Zea mays
  Clone ID: MRT4577_42813C.1.pep
PYLSAEFHEEHGNHREGLIHKLHRRPILLLLTVVQRVHYPLPPALQLQPTPLILSRDPPPLQ

SEQ ID NO: 306735 - protein, 121 aa, Zea mays
  Clone ID: MRT4577_42814C.1.pep
PGTNKHVQKAHAVDVNEPSSGHMHTDDATDGEFSAPPAFSARSAPRTYRQSPTHRHAPATHKKKTINRSSPEKRTPEGQTPGSCNFPPTTPGQQLGGGRRAGVKRHSKKKKKNKKKRANHT

SEQ ID NO: 306736 - protein, 115 aa, Zea mays
  Clone ID: MRT4577_42815C.1.pep
GTKATFYNCTIEGGQGALYDQTGLHYFKACAIKGTIDFIFGSAKSFYEECKIVSVLKEALVLPLAPPEQDRSRNPIEIAPGKSGLAFKTCTIEGEGEKIYLGRVGTPVIYSYTNI

SEQ ID NO: 306737 - protein, 69 aa, Zea mays
  Clone ID: MRT4577_42816C.1.pep
KKKKKKKKKKKKKKKKKKKKKKKITPVRFCSKLIIRKKWGFFVLQKKKKKKKKKKKKKFTPVRFCSKLI

SEQ ID NO: 306738 - protein, 44 aa, Zea mays
  Clone ID: MRT4577_42817C.1.pep
SYDGFFKEQGEQRGNVCSGRLGVVRDVRVGGVRSLCPRGGELVL

SEQ ID NO: 306739 - protein, 41 aa, Zea mays
  unsure (1)..(41): unsure at all Xaa locations
  Clone ID: MRT4577_42818C.1.pep
FLSTXXKKKKKKKTXKKKKKKKKKKKKKKKKKKKKKKKKGA

SEQ ID NO: 306740 - protein, 82 aa, Zea mays
  Clone ID: MRT4577_42819C.1.pep
THSSIRLLLHFPIFPILTTTNNILLRSITQSELPLLFQQIHILIQPIPILTIYNPLSSYFITFTYFILLSKNTTQSSLILPF

SEQ ID NO: 306741 - protein, 41 aa, Zea mays
  Clone ID: MRT4577_4281C.1.pep
AETIREARNTARGQDILSFRQLHTGTKIGIQCARTVESIFK

SEQ ID NO: 306742 - protein, 90 aa, Zea mays
  Clone ID: MRT4577_42820C.1.pep
NSRRRSGSVQANRPRPLGNPTPTFHHHLKSEMEMKRILSSVLVAIVVSGIGVLAFTEAAVEGAPTASESSVEAPAGTGAGAIAGASVVEP

SEQ ID NO: 306743 - protein, 154 aa, Zea mays
  Clone ID: MRT4577_42821C.1.pep
AYFYQKSGQFGLINDVHAMANPILLWFSTGAMALLTGTVIWQKIRQFSSQTINAPLRGITLYIEVNYAVNLLPWLGISRCTFFYHYLPAYAFSILALALILETLLDSPRHSHNVIAWAVLTLVAIAFWYWLPVFLGLPLTPRGFALRMLFPSWI

SEQ ID NO: 306744 - protein, 54 aa, Zea mays
  Clone ID: MRT4577_42822C.1.pep
SQSPLSAKWMWQKLFQHRMPRSRFRECTLQVCEKMRTHCHRRIACCERGRETRI

SEQ ID NO: 306745 - protein, 78 aa, Zea mays
  Clone ID: MRT4577_42823C.1.pep
LSTSTVWRGSCSVRLPVHWGCWSTQCLSWASSSCSWPWCAWTESAGPYAVRLALHLLPVQPGPLFVLSIVSRKAQVAR

SEQ ID NO: 306746 - protein, 151 aa, Zea mays
  Clone ID: MRT4577_42824C.1.pep
ETSSTSVGWKRNPGGRLVCAIALRPLLPLALMKDLKTKALDKSLEGSVARLTGPKEMLVKSQKEFVYHNCCREKTWKTKGGCSASREQGNPASRQVFGRECCKIDRTKRDVGQVTERVRRPQLMLRENFGWQDSKETGDQAINRQMFSETR

SEQ ID NO: 306747 - protein, 221 aa, Zea mays
  unsure (1)..(221): unsure at all Xaa locations
  Clone ID: MRT4577_42825C.1.pep
LLVVGVAIGVTRWLRRKAKETTATESPAAKLSSQSSQGGHRQVAAVAAHAHAHGSGTEASGRWSGLYRFTREEIERAVDYASSRIYLGSGSAGQVYQGVLPSGQLVAVKHIHRTAMSGSFTREVEQLCKVRHPNLVCLFGYCDEEGDQYLVYEYCANGNLAQNLLRSDSVLPWETRVKILRDCASVLRFLHTHPDGCIVHRDIKLTNILLTEKXVPKLSDF

SEQ ID NO: 306748 - protein, 445 aa, Zea mays
  Clone ID: MRT4577_42826C.1.pep
MAQTSLPPGFRFHPTDVELVSYYLKRKIMGKKHIVDAIAEVDLYKFPPWDLCEKSSLRSKDLEWFFFCPRDKKYPNGSRTNRATPNGYWKTSGKDRIIMLNSRTVGMKKTLIFHEGKAPKGDRTDWVMYEYRMEDEDLVSAGFSKDAYVLCKIFKKSGLGPRIGEQYGAPFNEDEWDNAEVETSLFPLTCSEVNPTEGQRAQPTVLAGALLEPEPPLHNSSSTCAGEESSFGHATAEDLTFSYTVASSAIQDTPARMSGDGVVSVNNISNVANDMRSPRDCDEFLSELSRFMNDSPLRNTPLGECSGLPPMSEAEAHAFEVNSFGLYNELSELVELGGADNNLNTSNVETTDYLMLPPDRELSANDYMELNDLLAPDPSFPSEFSAQDNQYMQHPLAQYNGHYDLSGPSEPTMPSIFDVFPPNNGVLATDDPANYLDPAMQFPFS

SEQ ID NO: 306749 - protein, 141 aa, Zea mays
  Clone ID: MRT4577_42827C.1.pep
SSHRMQSTECSKGRLKEAAAPAESRAIQPLDKSLEGSVARLTGPKEMLVKSQKEFVYHNCCREKTWKTKGGCSASREQGNPASRQVFGRECCKIDRTKRDVGQVTERVRRPQLMLRENFGWQDSKETGDQAINRQMFSETR

SEQ ID NO: 306750 - protein, 169 aa, Zea mays
  unsure (1)..(169): unsure at all Xaa locations
  Clone ID: MRT4577_42828C.1.pep
XGRGPGVPIPSLHHRAPTSPHARHEHAASSPPTTPFPKPSTRCSRRDPALNTLGFLPGCRDASYARLFPHQQRPFSPTRCGSRDERAAVTEIPRRFDSPVVLATKGIAISFSFPMTNTTEIEEALHSYDLFPGLFLASVVRRGSIFCRALLKDVNETWYITSRNKKQRK

SEQ ID NO: 306751 - protein, 210 aa, Zea mays
  Clone ID: MRT4577_42829C.1.pep
MSAAVTAPPCHSRPSPLNPSSRATPSPSSNGGKPNAVSTTRRHLANLDRLLVKPPPLPLPLPAQPRKQPTGVPVPGDGEASPDDRSGHGGLLNALNLSTFLPFTRKAAVDELSPRSLAYMQRLLTLSPRLSPKGSIAGEWRRYHGEGGWEGLLDPLDQNLRRELLRYGDFVQAAYTAFHSMPSAAEASSSGQQRTLVLPDRTYHPTRSLF

SEQ ID NO: 306752 - protein, 57 aa, Zea mays
  Clone ID: MRT4577_4282C.1.pep
PPSSIIHQGPTIIRGKKTAEFPTKQRAKKKKKEGPLKKNATKERTGSIDKKRRAPPY

SEQ ID NO: 306753 - protein, 115 aa, Zea mays
  unsure (1)..(115): unsure at all Xaa locations
  Clone ID: MRT4577_42830C.1.pep
PPPTPPGPQKPPPRSLQTPXEKQRTTIPSYGKKTSXGPPRENPPRRGPPPKKPRGAPKKHFDTPGALEETHPPADFWPERPGQLEPDPRAGHHKRPPPGGRNPPXPPLARTSPPS

SEQ ID NO: 306754 - protein, 102 aa, Zea mays
  Clone ID: MRT4577_42831C.1.pep
KLKCFKEITSCPGREKLECRNQQRRAEESSFQKCEHRMQQVKTSAGCSASREQGNPTSRQVFGREYCETDRTKRDVGQVTERDERKLLLARLKGSRRPSKRF

SEQ ID NO: 306755 - protein, 489 aa, Zea mays
  unsure (1)..(489): unsure at all Xaa locations
  Clone ID: MRT4577_42832C.1.pep
MAQTSLPPGLRFXDXEIVSYYLKRNMGKKLIVDAISEVDLYKFPPWDLPEKSSLRSKDLEWFFFCPCDKKYPNGSRTNRATPNGYWKTSGKDRIIMLNSRTVGMKKTLIFHEGKPPKGDRTDWVMYEYKMEDEYLVSTGFSKDTYVLCKIFKKSGLGPRIGEQYGAPFDEAEWDNAEAETSIFPLMTSSEVVNPTEGPHTQPVAPAGALQEPLHNSSATCVVEGSPFDHATANTCAEGVTFGYTVASSAIEDMPAQLSGDGVVSMNNISSEVNDMYSPHDCDEFLLEEMSRFLNDPPMRNTPYGECSGLPPMSEAEAHAFEVNSFDLYKELSGLIELGGMDNNFNTSNVETTDYLVLPPDRELSTDGYMELNDLLASDSSFPIPVNFLLRTINLCSILWLSTMCIMMSLLCQVLWNQQCLAFSTIFLPIMDPMSQMRKTTTWTRPSLSRDWSNNMPALFCVLTCLDCSDVATCSSLLLQLYPPWMSRYC

SEQ ID NO: 306756 - protein, 466 aa, Zea mays
  Clone ID: MRT4577_42833C.1.pep
MFFLPNGVLLTDGPATSWAQPCSSLFHDWAAFVMELPVVTTLSPLNVKDVIYVMPGPLKFFVAFLNQTALGWYFWKPTRPKDLEWFFFCPRDKKYPNGSRTNRATPNGYWKTSGKDRIIMLNSRTVGMKKTLIFHEGKAPKGDRTDWVMYEYRMEDEDLVSAGFSKDAYVLCKIFKKSGLGPRIGEQYGAPFNEDEWDNAEVETSLFPLTCSEVNPTEGQRAQPTVLAGALLEPEPPLHNSSSTCAGEESSFGHATAEDLTFSHSVASSAIQDTPARMSGDGVVSVNNISNVANDMRSPRDCDEFLSELSRFMNDSPLRNTPLGECSGLPPMSEAEAHAFEVNSFGLYNELSELVGLGCADNNLNTSNVETTDYLMLPPDRELSANDYMELNDLLAPDPSFPSEFSAQDNQYMQHPLAQYNGHYDLSGPSEPTMPSIFDVFPPNNGVLLTDDPANYLDPAMQFPFS

SEQ ID NO: 306757 - protein, 53 aa, Zea mays
  Clone ID: MRT4577_42834C.1.pep
AFFFFFFFFFFCFRNALSFYFIQREHHTPQLSFTCKRIVPTYRQCQSCDDLPM

SEQ ID NO: 306758 - protein, 45 aa, Zea mays
  Clone ID: MRT4577_42835C.1.pep
LEFHAGGRVFFSLSLPILAYNDCDDFLHFAHSYSIGAGVAMMYMM

SEQ ID NO: 306759 - protein, 54 aa, Zea mays
  Clone ID: MRT4577_42836C.1.pep
DQKGFIPAVEFPHVMPPLGKKLPDEEVDKMTRKPHVGGEGQINYEEFVKVIMPK

SEQ ID NO: 306760 - protein, 127 aa, Zea mays
  unsure (1)..(127): unsure at all Xaa locations
  Clone ID: MRT4577_42837C.1.pep
PWAGGFFFFWVPLWVLGLWVLLWRXPSFAVWLPLFGFGFSPFLGFGSLGLCRFPSGFPVGEKESNPRLAPDNKCNFGTDLIFAFNINIPGPVIFWAEKKKKKKKKKKKPKKFSKTPPPPGVPFRGQK

SEQ ID NO: 306761 - protein, 89 aa, Zea mays
  Clone ID: MRT4577_42838C.1.pep
MPKRNLVEIGRVALINYGPNAGKSCVILDVLDQSRALVDGPQQKTGVARQTIPFRQLSLTKVKLDIARSIGVSSLVKAYDTQKIGELSP

SEQ ID NO: 306762 - protein, 58 aa, Zea mays
  unsure (1)..(58): unsure at all Xaa locations
  Clone ID: MRT4577_42839C.1.pep
MALITIGIASHAVIGQNLAVNIPQCGCLSCMYNKISSHVDXTVLRAKAERNLPVHPLP

SEQ ID NO: 306763 - protein, 116 aa, Zea mays
  Clone ID: MRT4577_4283C.1.pep
MFLVDGQGQLRQLLLLLNVRQILEHHLDPLFCPLDRSANQPASCRRIPDQLHTHTHTHTHTHTHTHTHTRIRSRGRAIRSCEPGLTAAAACGGTCRFAAVALPTPSRGGDASLLES

SEQ ID NO: 306764 - protein, 55 aa, Zea mays
  Clone ID: MRT4577_42840C.1.pep
MEEPAAASALEARGDLRSALPFLPVVLRGGALFWPPAAQESLRALALGPDVSRDT

SEQ ID NO: 306765 - protein, 109 aa, Zea mays
  Clone ID: MRT4577_42841C.1.pep
ALNTAAALPFFFFVFFFFFFCFRQTLSTMLKWGQKIRRLFPPRSKRKQPGPKNRVSTEKPNFHRTLRGPYQGTNKRPKPLKHTLRSTLEPPPPNTQDWVGSQISAEAHG

SEQ ID NO: 306766 - protein, 483 aa, Zea mays
  unsure (1)..(483): unsure at all Xaa locations
  Clone ID: MRT4577_42842C.1.pep
MSSSSASSSAAAHHQQHYRRQTGGSGLVPLAALIKEEARTERQSIAGGESRISARDDDAAGXKLRRRRGGGGGGGGXRLERPLLRYGCAAQCKKGEDFFLLRTDCLRPAISVSSSASPHPIFAVFAILDGHNGNAAAIYTRDNLLNHVLSAMPRGLSREEWLHMLPRALVAGFVKTDKEFQSKGQTSGTTATFVIIDGWTITVASVGDSRCILDAQGGAVSLLTVDHRLEENVEERERVTASGGEVGRLSVVGGAEIGPLRCWPGGLCLSRSIGDIDVGEFIVPVPYVKQVKLSNAGGRLIIASDGIWDALSSEAAAKSCRGLPAELAAKQVVKEALRTRGLKDDTTCIVVDIIPPGQTIRPLSPPKKTSKLKSFIFRKKAKDPSQKLTKQHSAVGIVEEIFEEGSAMLSERLGPDLDGRRTSSLFTCAICQLDLEPSEGISVHAGSIFSSTSRPWEGPFLCSDCREKKDAMEGKRPSGVKVL

SEQ ID NO: 306767 - protein, 115 aa, Zea mays
  Clone ID: MRT4577_42843C.1.pep
SRGNNAEYFFFFFFFFFWRFFFFAFILTYSWTGSSLLKVPVLFRTRPRIYVVPSAACAWGGVPAPLAEGEHVRPRGELAATGEAVAAVGAAGAHTVPSAIGGAGGGRAAAPLAPG

SEQ ID NO: 306768 - protein, 90 aa, Zea mays
  Clone ID: MRT4577_42844C.1.pep
GTSDDDDPGGVSADAPSLVGGGYLRREPEARVAAVAPHARTAARPSSGCHARHRWLRRSRETRLRGSAICMTVWTSFVYQLLRSDGVGLV

SEQ ID NO: 306769 - protein, 77 aa, Zea mays
  unsure (1)..(77): unsure at all Xaa locations
  Clone ID: MRT4577_42845C.1.pep
RGGHLPRGGNGDLHAGRRRPLLRQRGGRDTLPATAHXPHAAVRGGVFGRRPAPGRAAAAAPPPSXTRXGXXXXXGDT

SEQ ID NO: 306770 - protein, 83 aa, Zea mays
  Clone ID: MRT4577_42846C.1.pep
FPGELAFNVEFADLVVFDPDQVEPVAGESFFWNFPGGGFFQGIGGLAPVVEPFLEEEPIEPRGVPPALGVLPDGCPKGPLNPG

SEQ ID NO: 306771 - protein, 42 aa, Zea mays
  Clone ID: MRT4577_42847C.1.pep
IGTSCWYFIPHNKLLNHWNPFSTCNATLTGLIYQREQLNFNK

SEQ ID NO: 306772 - protein, 84 aa, Zea mays
  Clone ID: MRT4577_42848C.1.pep
LGTHAYIFQQLLEEKASTPSLCSKCVIQQEQYPVVKDKEIVSSLCKTVGEQSYHPSEENMTFGRHQLLKDDLKKAAISASDISE

SEQ ID NO: 306773 - protein, 64 aa, Zea mays
  Clone ID: MRT4577_42849C.1.pep
PNAFGFEYTPKHEQLGVVPLETMADHNPVIACNSVGQVQTVVNKVTGCLCDPSITELSNSVPMH

SEQ ID NO: 306774 - protein, 271 aa, Zea mays
  Clone ID: MRT4577_4284C.1.pep
MALSSAGSFVACSLRPSGASIHAPRSTPHLKPGAAAASFTRTPQRRANATKGGVSTVCEPLGPDRPIWFPGSSPPPWLDGSLPGDFGFDPLGLGSEPELLRWFAQAELMHGRWAMLAAAGILIPDLLARWGFIDAGFSWFDAGSREYFADPWTLFVSQMALMGWAEGRRWADYLRPGCVDIEPRFPNRKNPVPDVGYPGGLWFDWANWGRGSPEPVMVLRTKEIKNGRLAMLAFVGFWFQAVYTGQGPIDNLLAHLADPGHCNIFSAFTSH

SEQ ID NO: 306775 - protein, 74 aa, Zea mays
  Clone ID: MRT4577_42850C.1.pep
MSQALPNQQGVDYPSFKLVIVGDGGTGDSLWPSICLECCCYYYYYSYPDVGRYSFWCPRHVYCRDFLEIWRTGY

SEQ ID NO: 306776 - protein, 177 aa, Zea mays
  Clone ID: MRT4577_42851C.1.pep
MAPRSDHAGGSAAAPVATQAHFDSMDPLFHVLRVLPFSFLRPPRTRLRLPSNLALPSPMTVFSLILLTYFAVVSGLVYDVIVEPPGIGSAQDPGTGAVRPVVFLPGRVNGQYIIEGLSSGFMFVLGGVGIILLDLAVDRTRPRSLRASFGSAGAVAVLIAYAMAMLFLRIKIPGYLW

SEQ ID NO: 306777 - protein, 177 aa, Zea mays
  Clone ID: MRT4577_42852C.1.pep
MPPRSDHAAGSGAAAAATQAHFDSIDPLFHVLRVLPFSFLLPPRTRLRLPSNLALPSPMTVFSLILLTYFAVVSGLVYDVIVEPPGIGSAQDPGTGAVRPVVFLPGRVNGQYIIEGLSSGFMFLLGGIGIILLDLAVDRTRPRSLRVSFGSAGAVAVVIAYAMAMLFLRIKIPGYLW

SEQ ID NO: 306778 - protein, 113 aa, Zea mays
  unsure (1)..(113): unsure at all Xaa locations
  Clone ID: MRT4577_42853C.1.pep
SRSSGREGFFFFGFFWFFFFFFFFXKSMCGFHWWSIKKIKGNPLTVSTKGXLYLVATKSSRGQGEKKYFHTPPPPGARGKKKKGPRGHKKSALTKNFLWAASFVTSQKEHFFL

SEQ ID NO: 306779 - protein, 79 aa, Zea mays
  Clone ID: MRT4577_42854C.1.pep
VYSLDYARTRLANDAEAAKGGGERQFNGLVDVYRKTLKSDGIAAGITKKKKKKKKNKKKKKKKKKKYQKQNTIQKTTVL

SEQ ID NO: 306780 - protein, 37 aa, Zea mays
  Clone ID: MRT4577_42855C.1.pep
NASSIFAPGLSLPTISCTAKNRDKARDGLTDYATAWV

SEQ ID NO: 306781 - protein, 75 aa, Zea mays
  Clone ID: MRT4577_42856C.1.pep
LSIVWTNQCSVFARTSAHTVAFSQLTAKIYISRNLRLTRQTLNVQRFTCISHGTTNTLMNQRRIAYNTHGTSDDL

SEQ ID NO: 306782 - protein, 426 aa, Zea mays
  Clone ID: MRT4577_42857C.1.pep
MAAALASSRYCWSRPSLPPQPTRGRRSVTSCALSGREKRNSFSWRECAISVALSVGLITGAPTFGPPAYASSLEPVLPDVSVLISGPPIKDPGALLRYALPIDNKAIREVQKPLEDITDSLKVAGVRALDSVERNVRQASKALNNGRSLILAGLAEPKRANGEELLNKLAVGFEELQRIVEDRNRDAVAPKQKELLQYVGTVEEDMVDGFPFEIPEEYSNMPLLKGRATVDMKVKIKDNPNMEDCVFRIVLDGYNAPVTAGNFVDLVKRKFYDGMEIQRADGFVVQTGDPEGPAEGFIDPSTGKIRTVPLEIMVDGDKAPVYGETLEELGRYKAQTKLPFNAFGTMAMAREEFDDNSASSQVFWLLKESELTPSNANILDGRYAVFGYVTENEDYLADVKVGDVIESIQVVSGLDNLVNPSYKIVG

SEQ ID NO: 306783 - protein, 59 aa, Zea mays
  Clone ID: MRT4577_42858C.1.pep
PVQYQAKQLLWPSRSRVTQQRLHCLSTTLTLDFSNALTNLLGGKTKMTMLKGIANDSYH

SEQ ID NO: 306784 - protein, 81 aa, Zea mays
  Clone ID: MRT4577_42859C.1.pep
KKPSSGIHDVCKRGIRLETSSTSQASPELASDLMIFSSWCLNGLAIRISQDDVVHSIKQLFRFYSVVNILELRPAIDAKKT

SEQ ID NO: 306785 - protein, 144 aa, Zea mays
  Clone ID: MRT4577_4285C.1.pep
FWETDLRCPHLEANLEFYPPEGFFFKGQNKKPPFGEGVNKASKVSFFNLKWVNKKTREPFPGAKIERVQEIFVKKAEEQGPKFFSFSPFQGNLKFKVKPFRPPRVLLKPWELKNFFFFKEKPFSLFFKTQLGFFLPLFYKVSPV

SEQ ID NO: 306786 - protein, 35 aa, Zea mays
  Clone ID: MRT4577_42860C.1.pep
TKKWSIKSYILKHKKYVFLTYKKKKGESFHHFMIN

SEQ ID NO: 306787 - protein, 59 aa, Zea mays
  Clone ID: MRT4577_42861C.1.pep
QHIRRKQTKFQIFCAMMRPLKFLQVCPKIGINVWKMKSPISKPNLGILKTENPAKPERI

SEQ ID NO: 306788 - protein, 57 aa, Zea mays
  Clone ID: MRT4577_42862C.1.pep
HVKVYSLFCRGLVALVSQDQYVRGRVLLDGMTALVVAVSVFKSKSVCSWVPSSRIPS

SEQ ID NO: 306789 - protein, 484 aa, Zea mays
  Clone ID: MRT4577_42863C.1.pep
MPCVPAGEILGSPPCALLLLRLASLLASLLPPSSSSSPLLWFFLVFAGARLGARGGSCAQPELIGATQARCLVCCIAELSGENTEIMEISLLHNESDAGSTSLLPLPLLSYGPRSMVPIQVPPSSDFESILSPEPIYSDLQLKEMNYNAAAMDESTEFLHLILSGNDEGYNSTTELQVWDVVDFYVSENFSALQFDSLMGFTNEVSTSYNDCMNLVDMVERPVARLSLDDTPKLSNSDDAVLADNVTMDPDETSLYLQTKPTDSETESSSAAGDVETEYLDLKLLSRCMPDLMDVDSPNCLPKTPVKKKHVTLVLDLDETLVHSTLDQCDSADFTLEVFFNMKNHTVYVRKRPYLKVFLEKVAQMFELVIFTASQRIYAEQLIDKLDPDGKYISRRIYRESCIFSDGCYTKDLTILGIDLAKVAIVDNTPQVFQLQVDNGIPIKSWFDDPADQELIELLPFLESLVDSDDVRPIISKAFHDKPE

SEQ ID NO: 306790 - protein, 61 aa, Zea mays
  Clone ID: MRT4577_42864C.1.pep
DIYRCEGIIYIHDSYQVHTLQAVREVYEVKPARKWPETESLHEQDSWHMPQSGYQRTARFF

SEQ ID NO: 306791 - protein, 47 aa, Zea mays
  Clone ID: MRT4577_42865C.1.pep
LTKGCYLKTNQGLHKPIARTPTGRYNTKRDTLRESARASDKDRSTQL

SEQ ID NO: 306792 - protein, 172 aa, Zea mays
  unsure (1)..(172): unsure at all Xaa locations
  Clone ID: MRT4577_42866C.1.pep
MCSNDVCCIAELSGENTEIMEISLLHNESDAGSTSLLPLPLLSYGPRSMVPIQVPPSSDFESILSPEPIYSDLQLKEMNYNAAAMDESTEFLHLILSGNDEGYNSTTELQVWDVVDFYVSENFSALQFDSLMGFTNEVSTSXHDCMNLVDMVERPVARLSLDDTPKPSNSDD

SEQ ID NO: 306793 - protein, 164 aa, Zea mays
  Clone ID: MRT4577_42867C.1.pep
MEITLLHDESDAGSTSLLPPLLSYGPRSMVPIQVPSSSDLESILSPDPVCSDLQLKEINYNAAAMDESTELLHLILGGNDEGYNTTTELQVWDVLDFYVSENFSALQFDSLMGFTNEVSTSYNDCMNLVDMVEWPVARLSLDDTPKLSNSDDAVLADNVTTDPD

SEQ ID NO: 306794 - protein, 197 aa, Zea mays
  unsure (1)..(197): unsure at all Xaa locations
  Clone ID: MRT4577_42868C.1.pep
MATTRDVSAASAAAMFHVYQPMPMPSTAAAPAKAGKKEGGKDRHSKVNGRGRRVRMPIVCAARVFQLTRELGLKSDGQTIEWLLRQAEPSIVAATGSGTTPAVFVSSSAPSTSSSSHSHSXTSTSSSSRPXVVLGKRPREEGGEAAASVPAFWAAAPRTTAAADASWGFSPLEQQAAAGYVPMAQAQQQQQQHHHLN

SEQ ID NO: 306795 - protein, 108 aa, Zea mays
  Clone ID: MRT4577_42869C.1.pep
PDTPVCESSGKTEDDAGELHEGLRWHDPTEQLVLVVQVSQSACRAAQYGEDSTKGSREAKLVVGLCWLFGFSSCMHIRPHMSRFCILFVDPETYGAEVLTHEACQGIV

SEQ ID NO: 306796 - protein, 71 aa, Zea mays
  Clone ID: MRT4577_4286C.1.pep
TRRSIQKGRACKGCQRTRDYFIVHQAKSAFGAKTGRAGTKEPASITLDKRNKGTQVPDSNTKGQTNGSYNG

SEQ ID NO: 306797 - protein, 83 aa, Zea mays
  Clone ID: MRT4577_42870C.1.pep
QGQCVRIHPACRCPALVASLPVLWRATREEVVQACSSTAAQGGAAREDQVQQCNSASAQVGAMKLGGAAAPGWKPGTCKEHSR

SEQ ID NO: 306798 - protein, 99 aa, Zea mays
  unsure (1)..(99): unsure at all Xaa locations
  Clone ID: MRT4577_42871C.1.pep
RIEGGDTRFHLIHSGYCYFISGAPGHCDAGQRMTLRAMVPQQQDGGNNPAAPARAPAAMSPGGEDDEGGTFEPPGARSSTPGSDAGXAAAARGGRRRWE

SEQ ID NO: 306799 - protein, 45 aa, Zea mays
  Clone ID: MRT4577_42872C.1.pep
HAPASRVAPATRCKAGTCTPGTGRAASSLRAGWTRQARERRRRPP

SEQ ID NO: 306800 - protein, 590 aa, Zea mays
  Clone ID: MRT4577_42873C.1.pep
MRSWRLLYDLLRRLLKPTDTPGQIRPASHLSTKSGQAAAQSAAADPTRAVSLLAERDWFARINSEFAAPLRQLGPRFVVRALQHAAGEPLLCVRLYVWASRFGQHFARDRSVRRALGDALLRRGPVVLSAALVADVRSCGCEVSEELLCALVESWGRLGLAHYAHEVFVQVPRLGLRPSTAIYNAVIAASVRAGAVDAAYLRFQQMPADGCRPDCFTYNTLVHGVCRRGIVDEALRLVKQMERAGIRPNVVTYTMLVDGFCNASRVEEAVCVLERMKEKGVSATEATYRSLVHGAFRCLEKERAYRMLSEWIESDPTLHSIAYHTLLYCLSKNDMDKEAVELAKKMSKRGYLLGSTTFSIVIPCAVKVLESSDLCELVDDFIKKGGNLGFDMYIMIIKSFLRCKDISKANKYFSQMVSDGLLSSVESYNIVIDCFAKAGEVERALETIKVMQESGFSPNLVTFNTLINGYLKLGNVHDAKAFLKMVMEHGLMPDVITFTSLIDGLCHTHQLDDAFNCFSEMSEWGVRPNVQTYNVLIHGLCSAGHVSKAIELLNKMKMDGITPDAYSFNAPILSFCRMRKKKKKKRPFND

SEQ ID NO: 306801 - protein, 53 aa, Zea mays
  Clone ID: MRT4577_42874C.1.pep
FQQQLFREKKEHKFKHILSYLSMDKSTNGCRTSICNPVTKKQEEEEEQHLRGS

SEQ ID NO: 306802 - protein, 56 aa, Zea mays
  Clone ID: MRT4577_42875C.1.pep
YSKRPLKESNENEKKKKNKEKWGGPLQACPYLYTTRVQLYAYSSTNSLKGSTFPFS

SEQ ID NO: 306803 - protein, 55 aa, Zea mays
  unsure (1)..(55): unsure at all Xaa locations
  Clone ID: MRT4577_42876C.1.pep
FWRXAESAGRINKQGEYIKTWRRRWFVLKXERLFWLKDPEFFCFPPPPPGIPNGT

SEQ ID NO: 306804 - protein, 167 aa, Zea mays
  unsure (1)..(167): unsure at all Xaa locations
  Clone ID: MRT4577_42877C.1.pep
CIEPPKKERXRNYYEWWYFKQELSXRAPAXTRSQCISRMXNLIDWHVFNHQRLSEKPEKEELNLMQANHQXDTMDGXQEDQYEPLSAKEQEEKEQXINXGLASYTTRDLNTFIRTCNKYVGNDIKSISXDMXGXIEDEVQRFAKVINERYTELRDYDRMIKKKKKAK

SEQ ID NO: 306805 - protein, 75 aa, Zea mays
  Clone ID: MRT4577_42878C.1.pep
YPPRPFGSPEGVIVSPVGEGNPSFSSPVNLTPGFNTEVGHALIQISRARAEIPLLRGERAERRPLEGGSPAPVGI

SEQ ID NO: 306806 - protein, 53 aa, Zea mays
  unsure (1)..(53): unsure at all Xaa locations
  Clone ID: MRT4577_42879C.1.pep
QRRVRGGCGSCXKKKKKRKKKKKKKKKKKKKKKKKKKKKXGGXKRVKGEXWKD

SEQ ID NO: 306807 - protein, 173 aa, Zea mays
  Clone ID: MRT4577_4287C.1.pep
DTSIAPTSRYRSVAVPSHVHVPLGREMSSRTSKPLSCLCPSRVGDVQNLRTSAGRQLTLLAAPAAAWSSSAMTSSSACACSASRSSARSRASSSPASTRSQSADLARSDSSGPRWCPWTSSSRSASSGGAGGRDSSTAFYIAGHSDVRRRNGVCCTTRETNPVLYRVPAGSRS

SEQ ID NO: 306808 - protein, 156 aa, Zea mays
  Clone ID: MRT4577_42880C.1.pep
SASTDSRRRTPTLMPPLLPSPLVASPRRRRSTTTRRTSSTPTSTQTQITALVTAVGGGGAAREGGPEVRHGHALRDMLRRNPRPEAAPGRRTALPIGGSRLGYWRDGHSFPEFFRHAPSEVRTRSVTKMRCEMHPFCYPLPYFVAAVAPVVVPSVP

SEQ ID NO: 306809 - protein, 100 aa, Zea mays
  unsure (1)..(100): unsure at all Xaa locations
  Clone ID: MRT4577_42881C.1.pep
FIVCYESFFFVANNIWKMVKILAGQKKYFCHKKTIRPNAKQLYPLFMKKGNMSWDAFASQVRTIHKGYIGEPMEITPXRGEFYANPAACICEKTHRNSAI

SEQ ID NO: 306810 - protein, 242 aa, Zea mays
  Clone ID: MRT4577_42882C.1.pep
MNPNFNSVWSAPEINMMNSLITSHIANNTYTNNNQHVVASRSAIVNHNNFGMPTEVVPPVDNMDMMQGYLMDDTDAMRLVQGQQHMPNVVPNQRRHAVKFWTTDEHRNFLRGLEVFGRGKWKNISKYFVPTRTPVQISSHAQKYFRRQECTTEKQRFSINDVGLYDTQPWVRQNNSSSSWEALTFTAGRAYNSTNYCAFNSLPYASSQASNNQVATWITDQQATASSSIAPPATEESQIYNR

SEQ ID NO: 306811 - protein, 81 aa, Zea mays
  Clone ID: MRT4577_42883C.1.pep
CVGKFVCCRAKNAGYEDYKFPDPIPEFAEQETSKFREHMAWRLEQKKEDYFGDHVEEIVDVCTEARTQFLKFQALSCWFNS

SEQ ID NO: 306812 - protein, 206 aa, Zea mays
  unsure (1)..(206): unsure at all Xaa locations
  Clone ID: MRT4577_42884C.1.pep
MAGGGGVGGGGGQKQDDLAPHPVKDQLPGVSYCITSPPPWPEAILLGFQHYLVMLGTTVIIPTALVPQMGGNNEDKAVVIQTLLFVAGINTLLQSFFGTRLPAVIGGSYTFVLPTISIILAGRYTNEPDPHTKFLKIMRGTQGALIVASALQIIVGFSGLWRNVARYLSPLSAAPLIALVGFGLYELGFPSVAKXVEIGLPGLILL

SEQ ID NO: 306813 - protein, 173 aa, Zea mays
  Clone ID: MRT4577_42885C.1.pep
MATRAWVAAAVALNPQLLPLRSCSPTKSVSPAQRSASMGLRLRSGRPCLGKFVCRRAKNAGYEDYKFPDPIPEFAEQETSKFREHMAWRLEQKKEDYFGDHVEEIVDVCTEIMGTFLENDYRGPGTLLVHPFLDMKGEIKERGLPGAPQAARAAIAWAEKNVDKDWKAWTGEY

SEQ ID NO: 306814 - protein, 510 aa, Zea mays
  Clone ID: MRT4577_42886C.1.pep
MFIESFRVESPHVRYGPTEIESEYRYDTTELVHEGKDGASRWVVRPKSVKYNFRTRTAVPKLGVMLVGWGGNNGSTLTAGVIANREGISWATKDKVQQANYYGSLTQASTIRVGSYNGEEIYAPFKSLLPMVNPDDIVFGGWDISNMNLADSMTRAKVLDIDLQKQLRPYMESMVPLPGIYDPDFIAANQGSRANSVIKGTKKEQVEQIIKDIREFKKKNKVDKIVVLWTANTERYSNVCAGLNDTMENLLASVDKNEAEVSPSTLYAIACVMEGVPFINGSPQNTFVPGLIDLAIKNNCLIGGDDFKSGQTKMKSVLVDFLVGAGIKPTSIVSYNHLGNNDGMNLSAPQTFRSKEISKSNVVDDMVSSNAILYEPGEHPDHVVVIKYVPYVGDSKRAMDEYTSEIFMGGKNTIVLHNTCEDSLLAAPIILDLVLLAELSTRIQLKAEGEDKFHSFHPVATILSYLTKAPLVPPGTPVVNALAKQRAMLENIMRACVGLAPENNMILEYK

SEQ ID NO: 306815 - protein, 174 aa, Zea mays
  Clone ID: MRT4577_42887C.1.pep
MATRAWVAAAVALNPQLLPLRSCSPTKSVSPAQRSASMGLRLRSGRPCLGKFVCRRAKNAGYEDYKFPDPIPEFAEQETSKFREHMAWRLEQKKEDYFGDHVEEIVDVCTEQILGTFLENDYRGPGTLLVHPFLDMKGEIKERGLPGAPQAARAAIAWAEKNVDKDWKAWTGEY

SEQ ID NO: 306816 - protein, 88 aa, Zea mays
  Clone ID: MRT4577_42888C.1.pep
SARGLSRSLSPEATAQSRTFVSEKHALQAQVTAHLMRAAGDQDAHQMASTAKTGSLATIAGSKVLDPTPWNLRPRFFMPPDESDEMAR

SEQ ID NO: 306817 - protein, 103 aa, Zea mays
  unsure (1)..(103): unsure at all Xaa locations
  Clone ID: MRT4577_42889C.1.pep
AVKQHTLGELVAETRMLTYDSGDHTGAAGNTPQNHLRGVKHXPVKRRAQGGLGPHHRGRAPTPAEQVGSPGLRGQKPSAPLLWVTRPGIRGLNPELPIQELLS

SEQ ID NO: 306818 - protein, 75 aa, Zea mays
  Clone ID: MRT4577_4288C.1.pep
GPVGVNPGEYPPLKAPGGKVFFPGEPTIQHNKGFVPGDYFSVFGGEEIFNDCAQKKMCKYKVQGKYVLEGHGDGN

SEQ ID NO: 306819 - protein, 92 aa, Zea mays
  Clone ID: MRT4577_42890C.1.pep
PPCYFQPGAKPLCPGRGAHRVGAPRVGPPRGCGGLGPPVARRVRPPPPGQRRRRGPWNGGPPPGPGVEAPWCPRPPRVCGAPPPPPGHQRCW

SEQ ID NO: 306820 - protein, 84 aa, Zea mays
  Clone ID: MRT4577_42891C.1.pep
VRPSFILTPPLAVATTSLGRQFCNSLFSFQMAAMVKSPKTYPLLPPFKRPLVDLPVSSHALGPWTSRSDTIACSIPSWTVPPQE

SEQ ID NO: 306821 - protein, 120 aa, Zea mays
  Clone ID: MRT4577_42892C.1.pep
DKGKEKERNEEHERRPGGEREREHHDREKEQVREKDKSEKDRDHDKEKEKEKERERQQAERIDKVKHEDDSLAGGGRTPMDVSTTAQEISNTDVTVLERHSSKVFACAWSPSGSLLASGS

SEQ ID NO: 306822 - protein, 100 aa, Zea mays
  Clone ID: MRT4577_42893C.1.pep
SSIARALSIFFLTFVYFFFFSAFFDVTTWPTTRSNNAGVPAGFFNKDIFFWEETKGVFFLYKRQGQKISTTQGGHNLDWYIFGIYHVKWIKYGLDGEWKL

SEQ ID NO: 306823 - protein, 78 aa, Zea mays
  Clone ID: MRT4577_42894C.1.pep
FLLHYRSVTTKFMWFAYMATTLAFATGLYTVLEDRLPWLAIAICVLSVLLPILTMLVGGWPILKLRIQYGNSDFLDMV

SEQ ID NO: 306824 - protein, 73 aa, Zea mays
  Clone ID: MRT4577_42895C.1.pep
LLWLWALAVSPFPTFILNSTTIEPREVLATHDSAPPGLQNQTRSLLVLPPFCPLLPAATRDEKREPTAVEFHH

SEQ ID NO: 306825 - protein, 56 aa, Zea mays
  Clone ID: MRT4577_42896C.1.pep
TGRYIPHANLRAGDLNVWLVLPGKDLRLCSAQERYSSIGGRLGSRFSSYGTCPLIN

SEQ ID NO: 306826 - protein, 172 aa, Zea mays
  Clone ID: MRT4577_42897C.1.pep
KKGGGFRLATNKCTLLVAPTPPAGGALFQGGGFVLFFFGGGCVGGPALGFFFLANPPEGGFCLCCFFFWLARVFPPPVFFLSPTGLLFVAPLGGGGPLPDGGRGGRLSVCLLSSALAGRGVPSFFFFSKRPFSLYFFLSVSLVLPGHCWGCRPWWWGAFGYSSPLIECSSCR

SEQ ID NO: 306827 - protein, 256 aa, Zea mays
  unsure (1)..(256): unsure at all Xaa locations
  Clone ID: MRT4577_42898C.1.pep
MDAASSSAAPLRLVIFPWLGFGHLLPYLELAERLALRGHRVSFVSTPGNVARLPPLRPAAAPRVDIVALPLPRVDGLPDGAESTNSVPHDKFELLFKAFDGLAAPFAEFLGGCCADEGRRPDWVILDSFHYWAATAAVEHKVPCVMLLPSAACLAVGRERQSSSGKPAAAPRYESEQNKQYSAKDGASGVSIAERYFLTRERCTIMAIRSSHEWEPEFLPLVAPLVGKPVLPLGLLPXSPDGWAWRQRQRERARHR

SEQ ID NO: 306828 - protein, 69 aa, Zea mays
  unsure (1)..(69): unsure at all Xaa locations
  Clone ID: MRT4577_42899C.1.pep
VFNFKKIAAWGXIEGCWSYIKTNPEVLIAGFGRKGHAVRDIPGVRIKVVKDYGVFLHSLFKVKKEKPTS

SEQ ID NO: 306829 - protein, 65 aa, Zea mays
  Clone ID: MRT4577_4289C.1.pep
PLTKKNTNNKKKQKKPSQTNTNRVELKHDHHHRHHQRLTVRRVEFILRSKKGFGSQAEAVLLVGL

SEQ ID NO: 306830 - protein, 57 aa, Zea mays
  Clone ID: MRT4577_428C.1.pep
FYLAFAAIVTLLSYITFGIKGNLAKRMLLNTGHPLLDSHAHCQYHEVQLLAQVLAPN

SEQ ID NO: 306831 - protein, 562 aa, Zea mays
  unsure (1)..(562): unsure at all Xaa locations
  Clone ID: MRT4577_42900C.1.pep
MDAASSSAAPLRLVIFPWLGFGHLLPYLELAERLALRGHRVSFVSTPGNVARLPPLRPAAAPRVDIVALPLPRVDGLPDGAESTNSVPHDKFELLFKAFDGLAAPFAEFLGGCCADEGRRPDWVVLDSFHYWAATAAVEHKVRPQSAVPXPNENWLLALFVFSENISMHMKFXHIKSSPLILDLMYXCLIYLLRTLSDVVDVVIEXLFVNYNDNQRRXSNMDNCDLIYMCNMCTKISLACHQVPCAMLLPSAACLAVGRERQSSSGKPAAAPRYESEQNKQYSAKDGASGVSIAERYFLTRERCTIMAIRSSHEWEPEFLPLVAPLVGKPVLPLGLLPPSPDGGRGASANANGEHATVRWLDAQPPSSVLYVALGSEVPLRAEQVHELALGLELAGTGFLWALRNPSGVPDADVLPAGFQERTRGRGLVTTGWVPQPSVLAHAAVGGFLTHCGRNSLIEGLLYGRPLVMLPIFGDQGPNARLMEGKKVGLQVPRDEHDGSFDRHGVAGAARAVMLEEETRGVFVANALKVQAIVADKELQDRYVDEFIQQLLIRGRPCPASS

SEQ ID NO: 306832 - protein, 60 aa, Zea mays
  unsure (1)..(60): unsure at all Xaa locations
  Clone ID: MRT4577_42901C.1.pep
QYQTLLXVXXXLITAVRLXXILXXXAAGITILXTXXNLXTXFFDPAGGGDXILXQXLFXX

SEQ ID NO: 306833 - protein, 47 aa, Zea mays
  Clone ID: MRT4577_42902C.1.pep
VLGLFNQGRKCINCLITQLLSLNALFKVIKLFKSKGGGKCSGAFLDN

SEQ ID NO: 306834 - protein, 49 aa, Zea mays
  Clone ID: MRT4577_42903C.1.pep
LPPDPGAATVHQLPHSPSAADLAAATHMHTSMLDVIYQKRRKRKPENCQ

SEQ ID NO: 306835 - protein, 136 aa, Zea mays
  Clone ID: MRT4577_42904C.1.pep
IRLEGVGRDYFIFLHFPLKVVKLLIRYALRGRAWKLTLEPRILFTSKTNFGALKRELKGAHAERTLQCLQAPAAYIFTSKTRFKELNHLTEEARRRANLARLLDETTLKGRMDSVGKQIVLDIQTIQQNYTGWLTD

SEQ ID NO: 306836 - protein, 53 aa, Zea mays
  Clone ID: MRT4577_42905C.1.pep
RFGLCILVRSSAHSPRLIQNIKTCVASFKRCELEEWACEGIELNRISLICVCY

SEQ ID NO: 306837 - protein, 58 aa, Zea mays
  Clone ID: MRT4577_42906C.1.pep
ASVTLSTSVIHSLPTTTRCASKSLRFSKSPFSNHLNGSIFHFTHQHFKIPFTVVTGAL

SEQ ID NO: 306838 - protein, 148 aa, Zea mays
  unsure (1)..(148): unsure at all Xaa locations
  Clone ID: MRT4577_42907C.1.pep
LALLSLCVNTTXTAXLIATNAHLVANAIVPQLLXPSVASMGFEHPIEQVXYRLQQALAASVLQQPVAQLQQQSLAHVTIQTIATQQQQQFVPALSQLAAENPASYLQQQLVAYNPLALAYTAAYXQQLQLQQKLPALIXLAIVNPATY

SEQ ID NO: 306839 - protein, 146 aa, Zea mays
  Clone ID: MRT4577_42908C.1.pep
MGDANITTSAWRLVEVGRVVLFNEGVYEGRLATVVEIIDHKRVLVDGPTKEAPVPRQEVALAKLSLTPIVIPKLPRATGVGHVAKKWEEHKVQQKFDESAWAKKRAAMQKRRQLNDFERFKVMKLRKQARYEVQKTFAKIRASAKA

SEQ ID NO: 306840 - protein, 37 aa, Zea mays
  Clone ID: MRT4577_42909C.1.pep
PVRASARRRLCSARGPHLGEAMHCDGTLRRFRRPVTK

SEQ ID NO: 306841 - protein, 68 aa, Zea mays
  unsure (1)..(68): unsure at all Xaa locations
  Clone ID: MRT4577_4290C.1.pep
SXSXXPPLSAPPPVPPLLPFVGTQVFGQIRGGSPLNLWSSTMDLVIPPRGPYDSGALRLLARRGGLGD

SEQ ID NO: 306842 - protein, 144 aa, Zea mays
  Clone ID: MRT4577_42910C.1.pep
EQKHPLTHLLTHENGEAKHSANETGRRLTPCEARHVPLEPGLAGTQCIPTIVPGDSTTNCSHALYDPYPSLPSKTSSTSPVDREQPCLVLWLEKLGLHLADLLIGQPLAHDAPEDEHGRPLPAHCEDQTHEPLNGETSLTAHDE

SEQ ID NO: 306843 - protein, 324 aa, Zea mays
  unsure (1)..(324): unsure at all Xaa locations
  Clone ID: MRT4577_42911C.1.pep
MAFLVERCGEMVVSMESPHAKPVPAPFLTKKYQLVDDPCTDHIVSWGDDDTTFVVWRPPEFARDLLPNYFKHNNFSSFVRQLNTYGFRKLVXDRWEFANEFFRKGAKHLLAEIHRRKSSQPLPTPLPPHQPYHHHHHXPPPPQXPFSXAAGTAGAVVPPPLPRXPSPPPPRRTAVLKPPPAAATMKAAAPAPAPXDFLAALSEDNRQLRRRNSLLLSELAHMKKLYNDIIYFLQNHVAPVTSPSSAAHASLPSAGGGGAAASSCRLMELDPADSPSPPRRPEADDGTDTDTVKLFGVALQGKKKKRAHQEDGDDGNHEQGSSDV

SEQ ID NO: 306844 - protein, 75 aa, Zea mays
  Clone ID: MRT4577_42912C.1.pep
MASKKMVLAVAALLLVTLALQVAPPAIAMDCKAGCAEIKNSPLGISIEECLKRCEGIATEQGPRDPYKDNKLDIP

SEQ ID NO: 306845 - protein, 37 aa, Zea mays
  unsure (1)..(37): unsure at all Xaa locations
  Clone ID: MRT4577_42913C.1.pep
SNFGHPNGFAQTXATHCXNTPKYQGXRAFXTILVXXQ

SEQ ID NO: 306846 - protein, 58 aa, Zea mays
  Clone ID: MRT4577_42914C.1.pep
MERFQSCLKRGGTKVVSQGKSAGNFLQNPPGLSFANQFNKSLGFPPKKKKKEKRKKRK

SEQ ID NO: 306847 - protein, 90 aa, Zea mays
  unsure (1)..(90): unsure at all Xaa locations
  Clone ID: MRT4577_42915C.1.pep
LLVLGALPVGVLVVARVAPLLLAALLGRLGVPRLLRPVRRALGACGRAGCVPLLALPSPVVVVGAGLALGGVPLPVGAGVAXGAPRLGGV

SEQ ID NO: 306848 - protein, 96 aa, Zea mays
  Clone ID: MRT4577_42916C.1.pep
DSQDTKGFRLFGSGVSSDVQTSYAARIMAISVLPFIIVQIPQIFRLHSGHRLTVLLGLIAAALLVLAYCLYQVFQPWVQRRRLEYAGLKHVMSGLY

SEQ ID NO: 306849 - protein, 112 aa, Zea mays
  unsure (1)..(112): unsure at all Xaa locations
  Clone ID: MRT4577_42917C.1.pep
ACFFNELFFSISPTPRKKGSILNELGVVIACHSKAEFDSHMTKAQEAGKLVVIDFTAAWCGPCRAIAPLFVEHSKKFXGXFFLKVDVDXVKEVTVAYEVXAMPTFHFVKNGK

SEQ ID NO: 306850 - protein, 129 aa, Zea mays
  unsure (1)..(129): unsure at all Xaa locations
  Clone ID: MRT4577_42918C.1.pep
GDPRGRRIFGRNETRKSTXTKXXXGQAQXEXXXXTXXXKXEDXXDXEPEDRXXAGXXKXXQAXXERAGXSXXXXXXKXXXXRRERXXXPAXGPXEGXXXXXPKGXAXKXDPKXXERXXKEGXSXXERKP

SEQ ID NO: 306851 - protein, 43 aa, Zea mays
  unsure (1)..(43): unsure at all Xaa locations
  Clone ID: MRT4577_42919C.1.pep
ANSALALWRIRYWLILEHSIGRDWXILEAFTSGYELYTKFCLI

SEQ ID NO: 306852 - protein, 68 aa, Zea mays
  unsure (1)..(68): unsure at all Xaa locations
  Clone ID: MRT4577_4291C.1.pep
QPNIVRAQHXALAMSRHVVANVAHLSRLWAASEACHLPGAAMHQGCLWLDHLAVLIFIRVKITLHLFE

SEQ ID NO: 306853 - protein, 136 aa, Zea mays
  Clone ID: MRT4577_42920C.1.pep
TTRQPGGSETLSLCHRSPRVRGIVNSPNPMARRSSSSGPTAGLIVSHIRIPPSPPYKIANIGVGSSTASSMPTGRKSSPPSRRHIDGEDDVLSAVSGDTAAPNAARSQLLVVLVECCGLDCRGDEGIPPGRTCMTT

SEQ ID NO: 306854 - protein, 85 aa, Zea mays
  unsure (1)..(85): unsure at all Xaa locations
  Clone ID: MRT4577_42921C.1.pep
ADQHEQGEAPKKGRRTRRATRNATSQKKQPPPLGERSSKKKEPRRAAPRKKEQGSQSRRTTQGPPNHGRHAPPRSXTRGRSGATG

SEQ ID NO: 306855 - protein, 145 aa, Zea mays
  Clone ID: MRT4577_42922C.1.pep
LHLHRTWTCGHMLHGQRFGILLAFLWLAAAARICVEPWAGLVARYASLSSSDWRRRRGFPLQAFSMMLQHSECMLRSRPYQHMLWAAGDDRIRCSYLLRFSVYRIWIGWDWIWTPLYCTSSLLPCCLALCPCAWLELLLYFFGGQ

SEQ ID NO: 306856 - protein, 63 aa, Zea mays
  Clone ID: MRT4577_42923C.1.pep
IKMYLCKASPRSSEICTSSRCGLTSTPRWLPVKAALCAFLFRTLIYCNGYMEVSNVPCNGLSP

SEQ ID NO: 306857 - protein, 40 aa, Zea mays
  Clone ID: MRT4577_42924C.1.pep
NFAIFLPVICLVVHIRTEASKFRQDTRPQKTHIFFRHISG

SEQ ID NO: 306858 - protein, 146 aa, Zea mays
  Clone ID: MRT4577_42925C.1.pep
WPVICSLLLPQPPRPPMMGSSAQPQNLGPPMPMQFRPVMPSQHPPQFMPPAAQQFRPVGEPMAGANVGMPGQMPHFPQPGQHMPHSNQVPPVSQGVPMVYQPARPMSSAPMQQQQQTAYAWGHFAHHGCFYATPDLYISTNIRSLL

SEQ ID NO: 306859 - protein, 65 aa, Zea mays
  Clone ID: MRT4577_42926C.1.pep
SKCSLQPDFIFTLGFISHQSLIFFFFKIQVFFGQFTTRVFFHSFGKFVFAPLHLNLDSKIPIKLF

SEQ ID NO: 306860 - protein, 284 aa, Zea mays
  Clone ID: MRT4577_42927C.1.pep
KEVPGSGKIPMTTSWTLEEFQTATLEDDALKGISTINIKLIYDDQLERLKEKEQKEAKKRQRLGENFSDLLYSIKEISASSTWDDSKQLFEDSQEFRALDSETYARELFEECVVHLKERLKEKERLREEEKAKREKEREEKEKKKEKEKERKEKERKEKERDHREEREKEKGKDRSRRDEMEFDGADLNTHGAKDKKRDKDKEKKHKRRHHDTDDVSSERDDKDDAKKSRRHSSDRKKSRKHAHGSDSDSENRPKRHKKDRDSSRRNGAHELEDGELGEDGEIY

SEQ ID NO: 306861 - protein, 1040 aa, Zea mays
  unsure (1)..(1040): unsure at all Xaa locations
  Clone ID: MRT4577_42928C.1.pep
MASNMQASGLPQPPRPPMMGSSAQPQNLGPPMPMQFRPVMPSQHPPQFMPPAAQQFRPVGEPMAGANVGMPGQMPHFPQPGQHLPHSNRDHPVWRDVLEFDGADLNTHGAKDKKRHTAYDREHKRRHHDTDDVSSERDDKDDAKKSRRHSSDRKKSRKHAHGSDSDRENHCRAKKTYYYNSRXWQMSWKMVNLERMGRSISLSVCXTRLSSWEKPVELMTPLERADASTEWKEFTTPEGRKYYFNKVTKQSKWTIPDELKVARELAENTSNQQPDRESGIATSALVRSAAFEPSTAPANQSSSAVGIIASSTHDGSSNSVLSGAPLPHNVENTSSSIVGMQNGGSSTAVVPVAASTEVPLVATDAGSSRNNDENSSLTTGADAEDGTSAEDLVEAKKTMPVAGKINVTPVEEKTSEEEPVVYATKMEAKNAFKSLLESVNVESDWTWDQTMRVIINDKRYGALKTLGERKQAFNEYLNQRKKFEAEEKRIKQRKARDDFLAMLEESKELTSSTRWSKAILMFEDDERFKAVERPREREDLFENYLVELHKKEKAKAAEEHKRYVAEYRAFLESCDFIKASTQWRKVQERLEDDERYSRLEKFDRLDIFQEYIRHLEKEEEEQKRVQKDQVRRQERKNRDGFRKMLEEHVADGTLNARTRWRDYCAQIKDSQSYLAVASNTSGSTPKELFDDVIEELGKQYQEDKTQIKEVVKSGKIPMTTSWTLEEFQTATLEDDALKGISTINIKLVYDDQLERLKEKEQKEAKKRQRLGENFSDLLYSIKEISASSTWDDSKQLFEDSQEFRALDSETYARELFEECVVHLKERLKEKERLREEEKAKREKEREEKEKKKEKEKERKEKERXEECVVHLKERLKEKERLREEEXAKREKEREEKEKKKEKEKERKEKERKEKERDHREEREKEKGKDRSRRDEMEFDGADLNTHGTKDKKRDKEKEKKHKRRHHDTDDVSSERDDKDDAKKSRRHSSSDRKKSRKHAHGSDSDSENRHKRHKKDRDSSRRNGAHELEDGELGEDGEIY

SEQ ID NO: 306862 - protein, 286 aa, Zea mays
  unsure (1)..(286): unsure at all Xaa locations
  Clone ID: MRT4577_42929C.1.pep
MASNMQASGLPQPPRPPMMGSSAQPQNLGPPMPMQFRPVMPSQHPPQFVPPAAQQFRPVGEPMAGANVGMPGQMPHFPQPGQHLPHSNQVPPVSQGVPMVYQPARPMSSAPMQQQQQTAYAGGHLPTMGAPMQPLTYTYQPTSIPPVAQPWSTGPGQSVHHVPPLVPSGHQPVSAPTTLPPVNLSEPSSSDWQEHTAAEGKKYYYNKKTRQSSWEKPVELMTPLERADASTEWKEFTTPEGRKYYFNKVTKQSKWTIPDELKVARELAENTSXQQPDRESGIATSA

SEQ ID NO: 306863 - protein, 77 aa, Zea mays
  unsure (1)..(77): unsure at all Xaa locations
  Clone ID: MRT4577_4292C.1.pep
LFTSTLYTLFFSLFFPLXFSRGGGGGGGLFLFPTNDNHISRLNQTKLFSSTHISSPQPTSPFFFTKNKHISFLPPQF

SEQ ID NO: 306864 - protein, 78 aa, Zea mays
  unsure (1)..(78): unsure at all Xaa locations
  Clone ID: MRT4577_42930C.1.pep
AFGXKKKLDNFTSSPHXKGVFLDGRLGGPNYPTLSKNSVDHLKGKLKLKPRVRRVRSEQRATHRRNRTTKDVHARTRP

SEQ ID NO: 306865 - protein, 100 aa, Zea mays
  Clone ID: MRT4577_42931C.1.pep
PLFFFFFSFFFFFFFFFFLHAISVHFHGCQTDESKVHRPLRWIRIHAAHPTLNPRFVVTGFSLSLSPMAQDEGKKKRKHLKSSPFSRNNRKEGALTSYGH

SEQ ID NO: 306866 - protein, 195 aa, Zea mays
  unsure (1)..(195): unsure at all Xaa locations
  Clone ID: MRT4577_42932C.1.pep
XRHGVFKVCVCVTGSGRTPPVLCPAQHSETSKKAMPSAFVYSHLILDLSDASRHLPLPVTHGRTGRTPRLLAIIQHACNFRPFPWLPNGREFGRSVGSAHPTLNPRFVGTGFSLSLSPMAQDEGKKKEKTLEKLALLKEQQEGRSLDKLWTLTGRQVRRRKRRPTPLCTLLHRTTSSAKLLHDGQGARKAGRLEV

SEQ ID NO: 306867 - protein, 107 aa, Zea mays
  Clone ID: MRT4577_42933C.1.pep
PFFFGIPLLLAFHWVLRGVFFLVLIADVARRLFLVDWPIQFVGGVWSSVFGHSPFGVCVFNPFLALALFYSLGCFLSSGYPFVLSRVVTPVCTYTPCRRPLFFASFV

SEQ ID NO: 306868 - protein, 102 aa, Zea mays
  Clone ID: MRT4577_42934C.1.pep
DRKHKACRFHSFIPIPHTLTPSLRLATVRRCSCALPALAGCSVSAPTTLSSSSCLLVSIVDLSRRLCAYLSTISTRAPFFFTCIGFAPFDFHDVSFFLFFCY

SEQ ID NO: 306869 - protein, 68 aa, Zea mays
  Clone ID: MRT4577_42935C.1.pep
LSRGRTRGIKKKKKKKKKKKKKKKKKKKKKNIKKKKNKKKKKKKKNKGCVVLKFSILLPRVFKVLVFF

SEQ ID NO: 306870 - protein, 122 aa, Zea mays
  Clone ID: MRT4577_42936C.1.pep
LKGAPAPPPAEDRAKHGKGPKSHATDEETEKSHTQPKDKGLTQREEEATQHQQEADGNETEAETSARHHQKEADKSTGGQETCEETRENSPEAQGQQKKQTTLWQPKAREHRRIPENAKARQ

SEQ ID NO: 306871 - protein, 57 aa, Zea mays
  Clone ID: MRT4577_42937C.1.pep
RHMGGRMGHPLRPIHGIIAHQHWRSPSIHGALTIGPIISSHHNRQPDSRTTAFTKTL

SEQ ID NO: 306872 - protein, 66 aa, Zea mays
  Clone ID: MRT4577_42938C.1.pep
VGFTPPAAPASDQDAICKNTGLQFKYVTWQLQAALANLPHSCFEISDEVQEEVDLVRAQLRREMEK

SEQ ID NO: 306873 - protein, 322 aa, Zea mays
  unsure (1)..(322): unsure at all Xaa locations
  Clone ID: MRT4577_42939C.1.pep
CRXELYARTEMKGSPTIIVVVVNDVHTCTSSGRKKTTTPSSAWVAAKALPILMKKPQMGAKELQTILQDRFTCAISYDTIWKGKEKALRELFESWEESFQLLFSWKEAVLQKSPDSVIEIDLRVEDDKXFFFSKFFCAFGPCISGFKEGCRPYLSVDSTALNGIWDGHLASATSVDGLNWMYPVAFGFFSSETEENWTWFMTKLHQAVGDLPVLAICSDACNGLTNAVKSVFPNAEKRVCFRHLMNNYVKSYTGSEYMYPAARAYRRDVFEHHIGKVSCDPVIARWLDQYHDLLWYRSGFNTAIKCDYITNNIAXEVFNNWI

SEQ ID NO: 306874 - protein, 108 aa, Zea mays
  unsure (1)..(108): unsure at all Xaa locations
  Clone ID: MRT4577_4293C.1.pep
TACASARPWSPAWASAPPPSTRCPSCTNPSPFARTISSPSSPLSSATYTEHYRIKYLGPFSIEXPIYLTGKFPXTNSXDTDGLSVDPLTLAKNREHEVIHFRCAMLCS

SEQ ID NO: 306875 - protein, 168 aa, Zea mays
  Clone ID: MRT4577_42940C.1.pep
MPRLRLPLVLLLPIALTIILLILFPFSPSPRSPPPQPLPCGAALSDAADGRWVPTPSPAPPPLYSPSCPFHRNAWNCLRNGRPQLAALSWAPARCGGAVVPRVDAAGFLAAARGRRIGLVGDSLSENLVVALLCALRSADDGARKWKRRGAWRGGYFPKEDVVGANHR

SEQ ID NO: 306876 - protein, 70 aa, Zea mays
  Clone ID: MRT4577_42941C.1.pep
PTLSATSGLEGSSLCQTDLRPDNSYITEYLAQRHESSNLCQVHLSTQQTNRKTSAFLRRVQVLNHNRQLY

SEQ ID NO: 306877 - protein, 80 aa, Zea mays
  unsure (1)..(80): unsure at all Xaa locations
  Clone ID: MRT4577_42942C.1.pep
YRLTDMAASDPMTCGLPTSDTCXHGVPDDDIFDGVCXLHIDPYHSDQAADVLCNFFDKCKVDPSYWDMILQXDLNKIYEK

SEQ ID NO: 306878 - protein, 153 aa, Zea mays
  unsure (1)..(153): unsure at all Xaa locations
  Clone ID: MRT4577_42943C.1.pep
QASRVSILKXQLRKTPVASDIELDFIASNTHGXFSGADLGFVTQRAVKLAIKQSIAHDIERRKAAAANGEDVDMMEEGXXDAVPEHHQXLTSRXAMRSARRSVTDVEIRRYEAFAQSMKNSGGSSFFRFPDGEQASNEQNTFGNAGEDEDLYN

SEQ ID NO: 306879 - protein, 77 aa, Zea mays
  Clone ID: MRT4577_42944C.1.pep
TRYPDSDATLVWGALQLVSVEDDALSASCIVPASEVLIGGQVQPLDPDDRVNHRSVPRGSSLGEARKILVMTPLEPN

SEQ ID NO: 306880 - protein, 50 aa, Zea mays
  Clone ID: MRT4577_42945C.1.pep
STPLKRSKDPLEYHSVLLCLGGGGGEESPQLGVSRPYTLMFTKKHGVREG

SEQ ID NO: 306881 - protein, 124 aa, Zea mays
  Clone ID: MRT4577_42946C.1.pep
GLQQQLVSDVPSAVGASAFPFRLFSAEARRNTKSGRGKRSAAKPIKSSAPPRPPYSSFVICGGVAATTFTRIPLRDAPECTQVTLERLPTGPGNPGAPALTLGSVQRLENEEFDVGWRPNSVAR

SEQ ID NO: 306882 - protein, 53 aa, Zea mays
  Clone ID: MRT4577_42947C.1.pep
IPVGINSLLLKSRIFVMSKEGKAVYEKNAPIRHFSGLINFFGFMVTYSFKCYP

SEQ ID NO: 306883 - protein, 62 aa, Zea mays
  Clone ID: MRT4577_42948C.1.pep
CSSIVITKRLIRCGTLQCALTMEGVVMSQVWHYSWVVLGVAKDMLSIHAVGICRARIVKTFV

SEQ ID NO: 306884 - protein, 90 aa, Zea mays
  Clone ID: MRT4577_42949C.1.pep
RILYVILNNVNDDLVTELLLDLLHIHFCCLERENRHHRGCGRNGSANQRLDISLNFVGVGSLLRSHLNGLDCHCELLVGKKKFRRDVGED

SEQ ID NO: 306885 - protein, 81 aa, Zea mays
  Clone ID: MRT4577_4294C.1.pep
GPTTNRDASIATMKKTVFSHCHGRAPKPSRCPRGSGTATASLVFSTPGRVGMRSEDRRSKSLPAPRQKEARCGLTAATTGS

SEQ ID NO: 306886 - protein, 76 aa, Zea mays
  Clone ID: MRT4577_42950C.1.pep
CNLNTSTGIHESSCCYCLYAAGLSMGIYVSVVSTLWYLFLLLVCSMRLPQPVCCMRSSSLPSELAGFLMHSCISFL

SEQ ID NO: 306887 - protein, 188 aa, Zea mays
  Clone ID: MRT4577_42951C.1.pep
TRPLSALGDVISALATKNSHIPYRNSKLTHLLQDSLGGDSKALMFVQISPSDNDVSETLSSLNFASRVRRIELGPAKKHVDTAELQKTKQTLERAKQELRLKDDSLRKLEENLQNLESKAKGKEQLCKNLQEKVKELEGQLDSKAQCQITSEKQQRQLSGKLKEKEEMCNVLQQKIADLECKLRQPQQ

SEQ ID NO: 306888 - protein, 54 aa, Zea mays
  Clone ID: MRT4577_42952C.1.pep
RPENWVLYIQQVEGANSHLTAGACVRVVLSYGQTTFSRYPFCRNTVGAGTTPRV

SEQ ID NO: 306889 - protein, 542 aa, Zea mays
  unsure (1)..(542): unsure at all Xaa locations
  Clone ID: MRT4577_42953C.1.pep
MEVAKMDLANFMVDTRDVHQEETHVGSAQRRFVAVLPLLHLRESPAFSCRPVEDPQNYRRAAAATMPLSHRNLLLFIPSVIVLVVTSAAALSVSTPVELTVTSHPPASVHLPHARPLPGGGTAGPYCTRVLLQGRPSRIRDPSRFFHALRLRANATRPHGLELCFHRNATVGPCKCAASQWQKMPKSGLWMQAISPYDYRILDFRMPADPSRSVVVSTEEEFLLHRVVFFVVGLVLMVVAHTLSESVVFYYGGAMTIGIFLVILIILFQGMKLLPTGRKSSLAIFAYSSVVGMTTYFLHYLSGMLRSVLVEIGIAEDMHNPLGIFALVCVVLAGAWFGYWGVRKLVLAEDGSVDEGVAYFVEWAILIVSAVMILQSSLDYLFAFAALIFCVIIKAIARIEGKSKVLHYIFGNSSRYGDFFEDYXLHESLSQGVAMDSFYSXVSHYPRDDGIHKXNMMHSPEGRRSILXKQLHXTPERRKFSKEEYEAFTREETKKAMKQLLSSPDFNRWALANADRISVAPPGGNYSSSNSNQQRHRFLGLF

SEQ ID NO: 306890 - protein, 242 aa, Zea mays
  Clone ID: MRT4577_42954C.1.pep
MALLSLRQMAAGTAPGCRSRRASRDFDQNPGSYATQLLEDIHNYHQQSTSATPATPSISLPACVAKACSIVEAVADLNSSSSENRAYEHEPGHSADDKGSVNAPVGSGSDGFVEPSAAARKHLLPARDAHAETEPQESAGSNSVSGHPWTPSWEPTSAESTDRTWSTGDEVVEQSGSHGGRCSPMNRHQLSKQRQCQPELSGRSRAGSGNGNGQYRGRSSAHRASGSVASGRSGVRVVSANS

SEQ ID NO: 306891 - protein, 52 aa, Zea mays
  Clone ID: MRT4577_42955C.1.pep
GYSYTFHIVILRAAVWQIPSTGWTLELPATLYFFIFLNTVGKLINSFQGIIY

SEQ ID NO: 306892 - protein, 74 aa, Zea mays
  Clone ID: MRT4577_42957C.1.pep
GGPAPKINHHYDISPHAKHLVHLGLHGTVTLPVQISPAPHPPRRRMIAYSSDSIGRASTPAPWAHSYQLPRTIY

SEQ ID NO: 306893 - protein, 71 aa, Zea mays
  Clone ID: MRT4577_42958C.1.pep
QFCPWKVFPRGCLPRLKGGRVPIFGPLAFYEKPPVGPKKKKKKKKKKKKKPKKKKKKKKKKKKKKKKKKKK

SEQ ID NO: 306894 - protein, 72 aa, Zea mays
  Clone ID: MRT4577_42959C.1.pep
GRKKIFSLPKRGHKKWAPALLTRPRGLNKPANFPGRCFNPQAQPLLWGGVLGLGPLNHAGGGGPPLFFYKNP

SEQ ID NO: 306895 - protein, 134 aa, Zea mays
  Clone ID: MRT4577_4295C.1.pep
SNSTLLYTEIFIQFRHGRNVQTAESKIDHDHRAHMAATSQHMVTPPLPSPNHTTHHNPCCSPTLPDFYSTTTAVSLYVFIGCGSSKIHAETPDPHGFSMTSSKKKGGQTHMLFTRSASRLHHASWRSNRREAHR

SEQ ID NO: 306896 - protein, 254 aa, Zea mays
  Clone ID: MRT4577_42960C.1.pep
MSPGPAVTSLATCFLPLLGASPAVSAFHHRATLLPSPCSFPWCAGHPSLDFLPAFFKSATNAVLDNHIVVRHLVYAYLCATVELVASLCLSSSTFTHLPMVGQPRRLSLSEFALNSHGQVSLVVVPCASRPFIHRAPNRTVAGGCLCGKLFCLEIVNGPDWHTSRLLVLAFNAGGGTGAPSRCHVGEVPFGGQSGGYDPRGIVILLANGEPRTKLSGLGGRLGVQLTSDCSVEGDNPLAFCSLLQGAEQRERCE

SEQ ID NO: 306897 - protein, 84 aa, Zea mays
  unsure (1)..(84): unsure at all Xaa locations
  Clone ID: MRT4577_42961C.1.pep
AAPYTTSLLVTRPFPPFPPYSASLYYFVAVSLFSPSPLPPSFFAANIFLSFSRLTFFLVDRLPXGLQIFILASNPILIILTIHY

SEQ ID NO: 306898 - protein, 86 aa, Zea mays
  Clone ID: MRT4577_42962C.1.pep
MATPTTEQAKRTRERTPTPGKYCGRRGGSQRSPSPYRPRRKERSRSRERRRERSRSRDRRERSRSRDRRERSRSRERRKERSRSRD

SEQ ID NO: 306899 - protein, 94 aa, Zea mays
  unsure (1)..(94): unsure at all Xaa locations
  Clone ID: MRT4577_42963C.1.pep
NYLAWTRHSIPPFKTNQIESYLFSFLVEFNGMQLVWHPCAINELAHNDAARKALNWLTAHGGAIHDCRGAXDHDPMSLLILPRCRRLHIHRRSR

SEQ ID NO: 306900 - protein, 159 aa, Zea mays
  Clone ID: MRT4577_42964C.1.pep
MSQAKEVRYTARSITPPADRNGTSRSPPPKRRSPSRSPPPKSASRSPRPRSPKRRSTSRSPPRRRGRSRSRDRSRSRSPDDRNPGNNLYVTGLSTRVTEDDLEKFFSKEGKVKNCHVVLDPRTKESRGFAFVTMDTLEGARRSIKYLHRTVLEGRLVTV

SEQ ID NO: 306901 - protein, 191 aa, Zea mays
  Clone ID: MRT4577_42965C.1.pep
MSQAKEVRYTARSITPPADRNGTSRSPPPKRRSPSRSPPPKSASRSPRPRSPKRRSTSRSPPRRRGRSRSRDRSRSRSPDDRNPGNNLYVTGLSTRVTEDDLEKFFSKEGKVKNCHVVLDPRTKESRGFAFVTMDTLEGARRSIKYLHRTVLEGRLVTVEKFNMVLGCLYVNLVGPGCAVSNHGCLQRMCS

SEQ ID NO: 306902 - protein, 74 aa, Zea mays
  Clone ID: MRT4577_42966C.1.pep
GASRRFSYRAKSHVAVRTTLESVEQVGGDSWWRASRGRSRDRLSCDQARGASRVISVIGAYDGVIAPSMGPSRQ

SEQ ID NO: 306903 - protein, 152 aa, Zea mays
  Clone ID: MRT4577_42967C.1.pep
MMMACALAVAQPAASLAPPSGKRTLSGGRPPRLPPPRLSGKLIRSRAVVAKAAQDGSESSGTGSIVKYVTSSFSTAEDIFALAGIGFAAVAALWASVNLIEIIDKLPVLPLLFELVGILVAWLFIYNNLLFKPKRKEFLENIKSSGSRILGQ

SEQ ID NO: 306904 - protein, 164 aa, Zea mays
  Clone ID: MRT4577_42968C.1.pep
MMMACALAVAQPAASLAPPSGKRTLSGGRPPRLPPPRLSGKLAFATPCCVRGAGKLIRSRAAVAKAAQDGSESSGSIVKYVTSSFSTAEDIFALAGIGFAAVAALWASVNLIEIIDKLPVLPLLFELVGILVAWLFIYNNLLFKPKRKEFLENIKSSGSRILGQ

SEQ ID NO: 306905 - protein, 69 aa, Zea mays
  Clone ID: MRT4577_42969C.1.pep
APNQEVRHQLSNSKNHEAGACGSCFHCFSIKCFLSTNRRLQLWSHQSLDKNIFHPPISTKHNITTPTSQ

SEQ ID NO: 306906 - protein, 100 aa, Zea mays
  Clone ID: MRT4577_4296C.1.pep
QSELSPFPFQPLPWPPPPSLPIGSIPACLQRAELQSVSLCVCVCGVSCPARPLRSANCTDEELDAARGKPGGEALPRKRGAGERCACTTRANGARASCRI

SEQ ID NO: 306907 - protein, 64 aa, Zea mays
  Clone ID: MRT4577_42970C.1.pep
YPQPCGGRGTGTPRLIIGALNLLVVRLRTARRTGTTSGNKRKQQQRLPLPPFPPGKLAIIGALH

SEQ ID NO: 306908 - protein, 92 aa, Zea mays
  unsure (1)..(92): unsure at all Xaa locations
  Clone ID: MRT4577_42971C.1.pep
WHRNSKAVAWLTSTSRPPTSRFSPTSSKKSLTHSTXITKLTPPSFKPTRSSTATVEATAPPMIITVSSNSSSSSTTSITMPPPATMQVASLP

SEQ ID NO: 306909 - protein, 49 aa, Zea mays
  Clone ID: MRT4577_42972C.1.pep
ITYLSAYFKYHIFILIQLHEDRFSLRLMGASSLHYKNLVFKVGSTLNYL

SEQ ID NO: 306910 - protein, 49 aa, Zea mays
  Clone ID: MRT4577_42973C.1.pep
TMKLCASIIVMCGDPPGLFDGFSMSISVLDSPVRYVDHVNERVLGSEAC

SEQ ID NO: 306911 - protein, 46 aa, Zea mays
  Clone ID: MRT4577_42974C.1.pep
VMCPATNQHFSEFSEFHRPINYILIYHVKSKISSVYIVKYNCQLIK

SEQ ID NO: 306912 - protein, 99 aa, Zea mays
  Clone ID: MRT4577_42975C.1.pep
GNTPLHLACEQGCLASVGVLTQSCTTPHLHSILKATNYNGHTCLHLASIHGYLGIVELLVSLGADVNAQEPCNGRTALHLAVDLQNPDLVSLLLKCGAD

SEQ ID NO: 306913 - protein, 39 aa, Zea mays
  Clone ID: MRT4577_42976C.1.pep
ASSVVIFSLGMLACCAVILYTARFALRRRRKLNLGCWSS

SEQ ID NO: 306914 - protein, 54 aa, Zea mays
  Clone ID: MRT4577_42977C.1.pep
SYKGTKFPGRHPFSSFFWRPGSTAYTMLNLHGGAAARARGRRGARALGYVERPR

SEQ ID NO: 306915 - protein, 37 aa, Zea mays
  Clone ID: MRT4577_42978C.1.pep
ASGVIVCIARNTARQTRAYARVRVNPSAVRVQSAVIR

SEQ ID NO: 306916 - protein, 123 aa, Zea mays
  Clone ID: MRT4577_42979C.1.pep
YERGFGGGPSGRGPAFKRGSWEKGVKGGGPGSFPTRGVNRKALNREPAPFGGVLGPPKCGQRPPARGWNPHPRIRPKGGWPPGGSTPLAYFYFFFLFFFFFFFLVFCFQFFFFACNPRPVSFL

SEQ ID NO: 306917 - protein, 110 aa, Zea mays
  Clone ID: MRT4577_4297C.1.pep
LLRAGGWSDPIRLSLTSPTSLKALPDHSRALRTRIWQSPVPGLTVGFSPAVVGADFLPPWWRAACAGPCSGGLARSASYEPFPLLAARFFLAGRNELRATSGAAGEPRVP

SEQ ID NO: 306918 - protein, 193 aa, Zea mays
  unsure (1)..(193): unsure at all Xaa locations
  Clone ID: MRT4577_42980C.1.pep
MTLLAAITNPATGSSEKAHPIVITPGATPPPLTSSALPTSIPPSAWSLSPADPAIATAASYLAASLDSCSSLPRLRILLTDFITTLSQSLALPTPAAALPAAIRAVAPYFPAAISSLVASKAASLAGHDILLALAESRLLXRNPPPELISSLCKKDQXDLVCALLRQXAEIRSSEILGALRCFLSPASEKAYP

SEQ ID NO: 306919 - protein, 84 aa, Zea mays
  Clone ID: MRT4577_42981C.1.pep
TSVLDTVEDGHPLIENSTRRLHGNYHILVVMVLVMVPVKARLLQHLFRSFANLHHTKRGLQQNFFPPPEEMKHICNLISEISNR

SEQ ID NO: 306920 - protein, 72 aa, Zea mays
  Clone ID: MRT4577_42982C.1.pep
LSHCPEVTKVGLGHLVRGCLQLESCQMVYCGGITSSGVATVVSGCGRLKKVLVEEWKIENVVPDVVSEVMTK

SEQ ID NO: 306921 - protein, 96 aa, Zea mays
  unsure (1)..(96): unsure at all Xaa locations
  Clone ID: MRT4577_42983C.1.pep
VEHVKVDDRWEHSIYKLMVSSELAFCAHKXVGTLDRQCERLASVMANNMATSDISVITNADGRKSMLKLAKRMMMSFXSGVTACATHQTTTLTSTG

SEQ ID NO: 306922 - protein, 198 aa, Zea mays
  unsure (1)..(198): unsure at all Xaa locations
  Clone ID: MRT4577_42984C.1.pep
DDALCHIAQGCKNXTELSIRRGYEVGDRALVSIAENCKSLRELTLQFCERVSDAGLSAIAENCPLHRLNLCGCHLITDTGLTAVARGCPDLVFLDMSVLRIVGDIALAEIGDGCPKLREIALSHCPEVTNVGLGHLVRGCLQLESCQMVYCRRITSSGVATVVSGCGRLKKVLVEEWKVSERTRRRAGPVLSFLCTGL

SEQ ID NO: 306923 - protein, 53 aa, Zea mays
  Clone ID: MRT4577_42985C.1.pep
EQCQQLTPGYEPHQVAHVEVGHPGAHLLDRALRTGARSPSALRPRSARCASPP

SEQ ID NO: 306924 - protein, 107 aa, Zea mays
  Clone ID: MRT4577_42986C.1.pep
RVGFYFTTRQHGWTKMRRETTIHESNTEVQWVFPDPNCCICVHTWAHHAYLLEQMHTGTMQWEVLYLRHTMNKLIYMWPRRKLSGFTNDYWLDGCITDMSNAVHWIE

SEQ ID NO: 306925 - protein, 93 aa, Zea mays
  Clone ID: MRT4577_42987C.1.pep
ASTATISRCRDTILQQLPNRSPIASSTRLARARINPGRSHGAFGPLQVWAGQLSGHRKAALLLNRGATRSASITAAWPDVGIRRGVAVQARDV

SEQ ID NO: 306926 - protein, 130 aa, Zea mays
  unsure (1)..(130): unsure at all Xaa locations
  Clone ID: MRT4577_42988C.1.pep
SALSTEDAVVADVPVTDVPSDVPAAHVADAPKANNAPKENMAPKEKKPSAAINPAAHPPYAEMIVDAIAALMERKGSSSVAIMLYVEGIHGGXLPTIFRMLLTVQLMMLAAAGXLARVMFSFXLPASVAL

SEQ ID NO: 306927 - protein, 122 aa, Zea mays
  unsure (1)..(122): unsure at all Xaa locations
  Clone ID: MRT4577_42989C.1.pep
RFYKRLSGELPNRFCAPPVMNYIFVRSNPLSGEIXNKLCFCGGKDLLNLCLITSYGAALFALLGIENIIYVNVASGAFVGDMPSIVTCGTRFSRLVWSRDRITGPMPASAVNRTSLRLLDLG

SEQ ID NO: 306928 - protein, 179 aa, Zea mays
  Clone ID: MRT4577_4298C.1.pep
CYILKSFIQFRHGRNVPRIKRQQRARATMTTARTWLQHHSTWLHHHFQVPTTDKCHTTHHNSCCSPTLPDFYSTTAVSLYVFIGCGSSKIHAETPEPTWFLHDFQQKPGGQVGCTMLPGGLSEEKHIDEVGAALNFMTTYPDRVHRLTIVWLVNKLADVPSPKVVCCHEMFPASGESHK

SEQ ID NO: 306929 - protein, 86 aa, Zea mays
  unsure (1)..(86): unsure at all Xaa locations
  Clone ID: MRT4577_42990C.1.pep
FXRGYSRCPTFGVLHPTLAAFLSTPAPSSERRVCSCACLWIRSTPQRSPRGGVDSLYCVPDLEQQAMKEHAPIGEGGMGWPARVSM

SEQ ID NO: 306930 - protein, 103 aa, Zea mays
  Clone ID: MRT4577_42991C.1.pep
RASHRYYDPVHLRPAQAMDDDPGYIHTHVPFSSNICFAQIAYIARIKCVLSLPISIKLLVGFRCISLFSVSNLIYVHVSFLFIFPPLWFAGIRFLCNQFIPWR

SEQ ID NO: 306931 - protein, 92 aa, Zea mays
  Clone ID: MRT4577_42992C.1.pep
ILVFFCLSMAIWRPHLSRPHPSLATSSLSLPPSCLPPLPYPSYARYQLPPIHAVQEAGAGLQRDRIDLFSPAACCMRCALPHKISAIPLAFS

SEQ ID NO: 306932 - protein, 83 aa, Zea mays
  Clone ID: MRT4577_42993C.1.pep
SPSLNINRAPAEIWGGGGGARSPPPEADAHPVWTLAGERMDVDGVAHTSQQALVRRQADSVELRVTTIPGHVGTHHPGTPPLS

SEQ ID NO: 306933 - protein, 248 aa, Zea mays
  Clone ID: MRT4577_42994C.1.pep
MMSNFQATTCKPHSRIIVKKPIASLGSTCQYPLYSHALGFHTLQEKVYPRLVLISASHKRLTSVCALSGKGSSGTADDPLMESLKKAVADAKKPRSIQDLLKEQVAKLREQASGGGRGNGNRRGGSGGSGGPDDESFKETLDEVVQVILATVAFILVYIHIIRGEELYRLARDYTRYLVTGKRTARLKRAMQRWRNFSESFMQKAGSEDDQYERPAVSKPAWWQQPQKFVHFVEDLCRGNWRPHAQES

SEQ ID NO: 306934 - protein, 126 aa, Zea mays
  Clone ID: MRT4577_42995C.1.pep
APFASALSPGVGRFLLVAGPPVFPPGQGPVCAPPFLLVGSLFGRPRLFPFWCRLVFWVGLCGGSNFPRGPVLAIVPPCLVPGPAPFVPAPRVLGFALGRARPGRFCFLSCPALGCGSLFPINQVSS

SEQ ID NO: 306935 - protein, 243 aa, Zea mays
  Clone ID: MRT4577_42996C.1.pep
MMSYFQTTTCKPQSRVVVNKPIPGLGSTSQHPLYSHALRFHRLQQKVYPRLLLVAASHKRLTPVCVLSGKGNAGTADDPLMESLKKAMADAKKPRSIQDLLKEQVAKLREQASGGGGGNGNRRGGSGGSGGPDDESFKEALDEVVQVILATVAFILVYIHIIRGEELYRLARDYTRYLVTGKRTARLKRSMQKWHNFSESFMQKEGSEEDQYEKPTWWQQPQKLVHLMEELCRGNWRPHAQES

SEQ ID NO: 306936 - protein, 618 aa, Zea mays
  unsure (1)..(618): unsure at all Xaa locations
  Clone ID: MRT4577_42997C.1.pep
SSEFGSFVDGSAFSSSPHDQLGKSNWNLKNFSWLPNSVLRLLQTPIPGVTDPMLYIGMLFSMFAWHVEDHYLYSINYHHCGAFKTWYGIPGDAAPGFERVASQYVYNKDILIGDGEDAAFDVLLGKTTMFPPNVLLDHNVPVYKAVQRPGEFVITFPRSYHAGFSHGFNCGEAVNFAIGDWFPLGSLASKRYALLNRTPLLAHEELLCRSAVLLSQKLLNCDPRSLDKLEHPYSQNCVKSCFVRLIRFQRRARGLLAKMGSEICYKPKTFPNLSCSICRRDCYITHVLCRCNFDPVCLHHEQELRSCPCKSNRVVYVREDILELEALSRKFEQDVSSYKEGSCISPCKEVEISDTTDEQLPNLGITXISLIXAGSSGFMTVDGGNSSSAVSILTSSAHHEAYKHTEARAINTSMTKGTYTMDESSSGIDGACNEHGSCNASAMECSDNSDSECEIFRVKRRSTSFDKPTSEAKTSTLSEQQVLRRLKKVRPGVQQVSKRPEESGNGSVRSTHMSPSSNHASSDDEIDMAPLFLRIKRRQLETQDATCPGTRPQSYPPSSGGSGEEFVERTRDAAVELRPKRVKIRLPSNASRQIEQQRSSGQRFAREDRLPLGFPRTF

SEQ ID NO: 306937 - protein, 134 aa, Zea mays
  unsure (1)..(134): unsure at all Xaa locations
  Clone ID: MRT4577_42998C.1.pep
GEAEPKPKPQERTEAGHQGSQPSRQGEGVKRATEGRNAKEESQRAAGFKGEKDHRXKVNKKDPAEGGEREPKVGGPGEGHEEQAAELQGDDCRDAGDDFDIVTEDNCQKRKTTGIGRAPAAARTRAKTRHGTSK

SEQ ID NO: 306938 - protein, 325 aa, Zea mays
  unsure (1)..(325): unsure at all Xaa locations
  Clone ID: MRT4577_42999C.1.pep
MDSHAAVSSSVGSGDGAAQPRRNSRKPKYSKFTQQELPACKPILTPKWVISVFVLVGVIFVPIGIVSLRASHQVVEIVDRYDDACIPANVTEKLAYIQNDSIPKTCTRNLTITKDMKQPIFVYYQLDNFYQNHRRYVKSRNDAQLRDKSKASDTTNCDPENXXVDGKPXMPCGLIAWRIVNDTYXLGSDAFQPNFQKGPLKGGKTLDPSIPLSKQEDLIVWMRTAALPTFRKLYGRIYVDLKENDTITVQLDNNYNTYSFGGKKKLVLSTATWLGGKNDFLGLAYLTVGGLCFFLAFAFTLLYLIKPRKMGDNSYLSWNRPPSGR

SEQ ID NO: 306939 - protein, 72 aa, Zea mays
  Clone ID: MRT4577_4299C.1.pep
KYTGPFFFTDGPVRQCSALGDAGLKISGEDRGQHLGKTYLVHMGRRPVDCLKPNLRGLEILSLLNYKSTYVG

SEQ ID NO: 306940 - protein, 256 aa, Zea mays
  unsure (1)..(256): unsure at all Xaa locations
  Clone ID: MRT4577_429C.1.pep
FYTSNMPIILHSALITNLYFIXGTHLISNAAVSYIFCMCVCKCXVFYXSQLLYRKYSGNFLVNLLGKWKESEYSGHSIPVGGLAYYVTAPSXENLVPSVGTGEAFSPXHFCCFCYSIIRYSFDXIAHWKPHSLADVLANPFHALFYVVFMLSACALFSKTWIEVSGSSAKDVAKQLKEQQMVMPGHRESNLQKELNRYIPTAAAFGGVCIGALTVLADFMGAIGSGTGILLAVTIIYQYFETFEKERATELGFFGF

SEQ ID NO: 306941 - protein, 41 aa, Zea mays
  Clone ID: MRT4577_42C.1.pep
GRRSGRSSPMPSSAAWVGFSHAGFTKTLPVFSLSSVVASVL

SEQ ID NO: 306942 - protein, 349 aa, Zea mays
  Clone ID: MRT4577_43000C.1.pep
MDSHAAVSSSVGSGDGAAQPRRNSRKPKYSKFTQQELPACKPILTPKWVISVFVLVGVIFVPIGIVSLRASHQVVEIVDRYDDACVPANVTEKLAYIQNDSIPKTCTRNLTITKDMKQPIFVYYQLDNFYQNHRRYVKSRNDAQLRDKSKASETTNCDPEAKTVDGKPIVPCGLIAWSLFNDTYTLIHNNKTLRVDKKDISWKSDRDHKFGSDVFPTNFQKGPLQGGKILNPKIPLSEQEDLIVWMRTAALPTFRKLYGRIYVDLKENDTITVQLENNYNTYSFSGKKKLVLSTATWIGGKNDFLGLAYLTVGGICFVLAFAFTLLYLIKPRKMGDNNYLSWNRPTLGR

SEQ ID NO: 306943 - protein, 71 aa, Zea mays
  Clone ID: MRT4577_43001C.1.pep
TKNINREYKKKRLWTPGGLSIASNVSSPCQLVHRLCNWVTECRARCHTLYNIIHGQTCAYPKKSALKNIPF

SEQ ID NO: 306944 - protein, 211 aa, Zea mays
  Clone ID: MRT4577_43002C.1.pep
DAWADAWADAWARRCCAFALAAARHRHRCPRSSGPASPGDPPPQPTPPLPSLPLPPLRGGGRPRRRAQRDPTCALNMERLLEARISSAVGLRRSLGLPSTDTNAYRLINSEGDRLSGLIVDIFADVAVIASSAAWVEKYRQEIQFLVSTVNGVSHIKWRPSTDILKEEGLDISEHKEPASPCSTVKVMENGIIYLVSLEGQKTGFYADQRE

SEQ ID NO: 306945 - protein, 460 aa, Zea mays
  Clone ID: MRT4577_43003C.1.pep
MLRLRACGGTAPASVPALVRSRLSRRSSSTAYAAATVASASSSSSTLEDLAAEHRGLAKVILKKGKTQIFRDGSPMVYSGAVDRIIGRPPPKSGDIVLVADGTEKPIGWGLYNSVSMFCVRLMQLEEEARRDPTCALNMERLLEARISSAVGLRRSLGLPSTDTNAYRLINSEGDRLSGLIVDIFADVAVIASSAAWVEKYRQEIQFLVSTVNGVSHIKWRPSTDILKEEGLDISEHKEPASPCSTVKVMENGIIYLVSLEGQKTGFYADQRENRYIISLLSKDQRVLDLCCYSGGFALNAAKGGADNVIGIDSSGSALDLANENIVLNELNQGKVSFVKGDATTFMKGAISENELWDLVILDPPKLAPRKKVLQSASGMYRSLNALAMQVVKPGGLLMTCSCSGAMTQSGMFLKTIQGAASMAGRKVTVLRQAGAACDHPIDPAYPEGQYLSNYLLRVA

SEQ ID NO: 306946 - protein, 29 aa, Zea mays
  Clone ID: MRT4577_43004C.1.pep
AATATTFAFKRTKEACIFHKACMRLKSRF

SEQ ID NO: 306947 - protein, 219 aa, Zea mays
  Clone ID: MRT4577_43005C.1.pep
MDSHAAGSSSGGSGDGGAQPRRSSRKPKYSKFTQQELPACKPILTPKWVISVFVLVGVIFVPIGIVSLRASRQVVEIVDRDDDACVPAGVTDKLAYIRNDSIPKSCTRNLTITKDMKQPIFVYYQLDDFYQNHRRYVKSRNDAQLRDKSKASDFTNCDPEAKTVDGKPIVPCGLIAWSLFNDTYKLIHNNVTLRVENKDISWKSDRDHKFGSDVFPTNF

SEQ ID NO: 306948 - protein, 35 aa, Zea mays
  unsure (1)..(35): unsure at all Xaa locations
  Clone ID: MRT4577_43006C.1.pep
LVVLMELTTPLQRLRGLVLDGVTVEESRGXLIQQS

SEQ ID NO: 306949 - protein, 210 aa, Zea mays
  unsure (1)..(210): unsure at all Xaa locations
  Clone ID: MRT4577_43007C.1.pep
RNDAQLRDKSKATXXTNCDPEAKTVDGKPIVPCGLIAWSLFNDTYKLIHNNVTLRVEKKDISWKSDRDHKFGSDVFPTNFQKGPLKGGKTLDPSIPLSKQEDLIVWMRTAALPTFRKLYGRIYVDLKENDTITVQLDNNYNTYSFGGKKKLVLSTATWLGGKNDFLGLAYLTVGGLCFFLAFAFTLLYLIKPRKMGDNSYLSWNRPPSGR

SEQ ID NO: 306950 - protein, 68 aa, Zea mays
  Clone ID: MRT4577_43008C.1.pep
RSLAASLTTFVPLSSLLGYDRGETAQHGWRASTIELRHTPEPETMAALPVRQWRRQVFWMWSLVVRNS

SEQ ID NO: 306951 - protein, 445 aa, Zea mays
  unsure (1)..(445): unsure at all Xaa locations
  Clone ID: MRT4577_43009C.1.pep
MDSHAAVSSSVGSGDGAAQPRRNSRKPKYSKFTQQELPACKPILTPKWVISVFVLVGVIFVPIGIVSLRASHQVVEIVDRYDDACIPANVTEKLAYIQNDSIPKTCTRNLTVMKLSRCILXPEXGNGKTIVETTLTSDSIHVSYFTSMHLGIRXMNNWLKYLITWSSDYKXMKQPIFVYYQLDNFYQNHRRYVTFSQCSLSLIVLNFVSEKSSCSLRCIFFLLNXTLITFRYVKSRNDAQLRDKSKASDTTNCDPEAKTVDGKPIVPCGLIAWSLFNDTYTLIHNNKTLRVDKKDISWKSDRDHKFGSDVFPTNFQKGPLQGGKILNPKIPLSEQEDLIVWMRTAALPTFRKLYGRIHVDLKENDTITVQLENNYNTYSFSGKKKLVLSTATWIGGKNDFLGLAYLTVGGICFVLAFAFTLLYLIKPRKMGDNNYLSWNRPTLGR

SEQ ID NO: 306952 - protein, 57 aa, Zea mays
  Clone ID: MRT4577_4300C.1.pep
VLTWWATLSHIAAIQMATWQVQNAIKGRTTDYRYKTRRAYAHCAMKPRITNWNTVIK

SEQ ID NO: 306953 - protein, 117 aa, Zea mays
  Clone ID: MRT4577_43010C.1.pep
LHLVGSLCAFSFTVHGYRKTMAGRRISYAVPSGCQDCCAPGGGRAYASSLAGPCAPDSLLVAPTSEPRRQGPGPCLDARTHAVGRALPLPGSLGSLLDLPCAHCSLACCSLLLQSNP

SEQ ID NO: 306954 - protein, 134 aa, Zea mays
  unsure (1)..(134): unsure at all Xaa locations
  Clone ID: MRT4577_43011C.1.pep
AGPHPPTPGPPARTAAATSGQQQPPXSAPPAQGXPGKDAXPPPGGPPAXXXPPAQGXPPQGXPPQGXXPQQGXPQQGXPPQXPQPPPPPRQQQSSGPXXXEGRPAAXXXXRPXEAXXSAQPETPQARPGGRGAK

SEQ ID NO: 306955 - protein, 169 aa, Zea mays
  Clone ID: MRT4577_43012C.1.pep
DFRGHPSLPPTRPQCSNEDLKKGFALKVEPLNAFIPFEQQMMDLSHRKQENAACDDSCSLSKLMLKEDIEAAPSLPTGIQVQNGSKNRRRRQPNVQKTTATPTRSPARGQRRKNNDAMVKSEMGLIEQSKLVLTEQEPELGDVPVKRPVGRPRKARNGPSSDDPGTPAS

SEQ ID NO: 306956 - protein, 91 aa, Zea mays
  Clone ID: MRT4577_43013C.1.pep
RAGGIFEDKQPIFFFPKPEQVACYKNQQDFLLPTRTANFITVAGAPHHFLKKKDTHHFFRTRKQTPGWNPQILPGASRGTTFFFCEGSYYW

SEQ ID NO: 306957 - protein, 87 aa, Zea mays
  unsure (1)..(87): unsure at all Xaa locations
  Clone ID: MRT4577_43014C.1.pep
VRSCARFGERKAGLARGQVCWLCDPFAXTNKESFPNSQLNPFWNYVWWLEACGASLSLVSFSCPATRVCGNALLPSLFFSLRGFGLA

SEQ ID NO: 306958 - protein, 89 aa, Zea mays
  Clone ID: MRT4577_43015C.1.pep
MSDAGRKDFSTKAKEEITPDSSKSTQEKVKESFTDTTDRLARGVQSDDSKSSTQEAFDKTQRSYDNHAHGGATGSIGDKIKDTLGLGNN

SEQ ID NO: 306959 - protein, 103 aa, Zea mays
  Clone ID: MRT4577_43016C.1.pep
SFFSNQNSLPQSPIFMPPNFWAGGPIPPWLGDDLFTGGATRQALWVLRRPVFRPCQTPALPGKSFWPFVFLPPLHCWGPVMGTDKDPPSPIYSFVGAPPLAQG

SEQ ID NO: 306960 - protein, 143 aa, Zea mays
  unsure (1)..(143): unsure at all Xaa locations
  Clone ID: MRT4577_43017C.1.pep
MGANLXWAPVLALVVVVAALGGATSAGDIAVCWGHNGGGGGLADACXSGLYAYVNIAFLTTFGXGQTPVLNLAGHCDPGSGCCAGPGSGFQTCQSLGVRGLLSLGGASGGCGLCSAGDADGVADYLWGNFLGGRGSSRPLGAA

SEQ ID NO: 306961 - protein, 87 aa, Zea mays
  Clone ID: MRT4577_43018C.1.pep
NYSLDLFHTKHLITLEIHNLITITLNLVILVPTITLRCVEYYHAFCFAVWCDVNFCYPMLACIGTSGRASHTGSRCSSSETAEHELV

SEQ ID NO: 306962 - protein, 232 aa, Zea mays
  Clone ID: MRT4577_43019C.1.pep
MGAREYYDYRRAMYGDITHKAILVDAAGTLLAPTGPMAQVYRTIGQKYGVDYSEDEILMRYRWAYAQPWGRSRLRYVNDGRPFWQYIVSSSTGCSNLEYFEELYQYYTTEKAWHLCDPDAGRVFEALRKAGVKTAVVSNFDTRLRPLLQALKCDRWFDAVAVSAEVAAEKPNPTIFLKACELLRVKPEEVVHIGDDRRNDLWGARDAGCDAWLWGSDVYSFKEVAERIGVEV

SEQ ID NO: 306963 - protein, 135 aa, Zea mays
  Clone ID: MRT4577_4301C.1.pep
PTAPTATTAQDLDSQRARGRSRDRHKGNRRAAEQDGRATDRHRERGAMAEGSEAVAEDAAGGWPGGGQRHGVRGLPGLAPRGLAPPPRGEPGRGGAPARKGAGTATPTHPTHEARGMVGALRGRPRSKRKCEVVD

SEQ ID NO: 306964 - protein, 44 aa, Zea mays
  Clone ID: MRT4577_43020C.1.pep
VFLELIEYVRGCILCLAEYVYFRDVTKWTSCSLFEEFVCKSKFE

SEQ ID NO: 306965 - protein, 57 aa, Zea mays
  Clone ID: MRT4577_43022C.1.pep
KNHPPNLSFRLKLLCQGPIIQIGGRGPPTPLKLSTQSKTSKPRISAIKKDWAVFFPR

SEQ ID NO: 306966 - protein, 214 aa, Zea mays
  unsure (1)..(214): unsure at all Xaa locations
  Clone ID: MRT4577_43024C.1.pep
MGICCGKAKAAAGEPDDDEGLGFPWMHDDLFHSHLWASAGVSVHTKQGWKGANQDAMTVCQDFAGQKGHILCGVFDGHGPRGREVARHVRDTLPVELAAALKPRTXTKIPPPRATLRSLNLTKMXGENGEDGSGKNGDASSNADLDSFDKSGGSGSSSDVTSDESQQQQLLLSTWKNVFVRAFEQVDEELRRLSGIDCICSGTTAVAAVRQGDH

SEQ ID NO: 306967 - protein, 68 aa, Zea mays
  Clone ID: MRT4577_43025C.1.pep
ITSNHRPNHKETSFSRVRLKQPSLYIINRLLTPDYNDLKDDKAHNTNLEQIILVDTSTGFPGDQDLQT

SEQ ID NO: 306968 - protein, 88 aa, Zea mays
  unsure (1)..(88): unsure at all Xaa locations
  Clone ID: MRT4577_43026C.1.pep
MAFLYVVCVKPVVIKGLACCSIFGRKLDVARPXGRFMLKPHTSVVLDKYCDKSVYFDLDHIGNTNGQCDLYGFDALXPYDPLQSKFFE

SEQ ID NO: 306969 - protein, 110 aa, Zea mays
  Clone ID: MRT4577_43027C.1.pep
NEPAPICCPSGILWASRRQVFPGAGAEFQRHQGAVFVNERGPFPCFEVFFGSETPSGKKNIWIPPVVFCLMGIPAKSTPFCNKFLIRRPWPLPGFLPRFPLVGGGHVLKI

SEQ ID NO: 306970 - protein, 68 aa, Zea mays
  Clone ID: MRT4577_43028C.1.pep
AGISSLHNRHEHLKQTINHQPSQLINKSECAASRAFGSMMGGEGMTPQRDQPTATITNNSDSGRGNYH

SEQ ID NO: 306971 - protein, 82 aa, Zea mays
  Clone ID: MRT4577_43029C.1.pep
CGHIKWRYTVAIRNNKPWQERMEVPEPLDLPPARLIVPKAPKGSVVHGTSSDITATTSSSGNGTALPPTATTWTSGVPANPQ

SEQ ID NO: 306972 - protein, 80 aa, Zea mays
  Clone ID: MRT4577_4302C.1.pep
KNVAVKDLNLGLGASTSKVNLAKEVATLTSKVLIINNLGQMGTGFPLGLNCQTSKMVVKLVNLITKTNRAFAKDLKKDPK

SEQ ID NO: 306973 - protein, 81 aa, Zea mays
  unsure (1)..(81): unsure at all Xaa locations
  Clone ID: MRT4577_43030C.1.pep
GQLGLLEPYKPVRPTTFNKPKPRGGGGKGHRGGPGPRGPGXGPKAPKGRKGGKGPKXPGPGGKPGNPGPEGPRTPTWGGGK

SEQ ID NO: 306974 - protein, 174 aa, Zea mays
  unsure (1)..(174): unsure at all Xaa locations
  Clone ID: MRT4577_43031C.1.pep
SPPTPSIHPPPRMAYPPPSSKADAYVLLAAYQHPLAKADAXVPPAAYPPAAKADTNPPPIGTYPFAPGKPMKGGEPVXAYLAVGPSTTALYAPPPPQYGEYGYPTIRPPRTXGYGYPSXXQAAGYGYQQQAINLGMGLGGGQLGGAVGGLLIGDLISDSSAYDARFNVGGGFDF

SEQ ID NO: 306975 - protein, 100 aa, Zea mays
  Clone ID: MRT4577_43032C.1.pep
IVRDTNRYIELLNIYNSEFHRVLNLLNCECTHSLNAMAPHAGVACAVHIMFARAMHSLVIRLSSPSNFPRGWPTPIRATGLADAVTSWTASCTMTLAGTE

SEQ ID NO: 306976 - protein, 136 aa, Zea mays
  unsure (1)..(136): unsure at all Xaa locations
  Clone ID: MRT4577_43033C.1.pep
SARRPPPRPCAPPPATGRPXEPPPVADXRPPRSASPPPSLFLSPPQSQPRRPSSPPPQLPEPPPAPARSSPLHKRDGTVVIVATSPAPGRQRRVEERRGGAVVVAGWPPTSSRSHSPVTPHQRYTRPASRNPIALR

SEQ ID NO: 306977 - protein, 78 aa, Zea mays
  Clone ID: MRT4577_43034C.1.pep
AMSVCALDSTRRRGRRNSHSAPFVVELLSTVASCPMRQPTLRVWVLVRFAFRVVWSLGSYILPLFSRKSCKGRPCMVA

SEQ ID NO: 306978 - protein, 70 aa, Zea mays
  Clone ID: MRT4577_43035C.1.pep
LGRRAPNFPRGPHFGPPLYASPSNVVSRTGSAKAGLKVSRKIPPILTVKNVPQPPICLFKFQPRLPLKGG

SEQ ID NO: 306979 - protein, 103 aa, Zea mays
  Clone ID: MRT4577_43036C.1.pep
MHWQTITLNDMSDCLKCTTVINLVVVDDAMTDTTSARNIIEYWSQNGNEWKLLDDWNSRLYTYGNIGIITTVGNVTDTAVINLDRHWDPSSGSCMRHSSNIHT

SEQ ID NO: 306980 - protein, 140 aa, Zea mays
  Clone ID: MRT4577_43037C.1.pep
GLDRTSRAPSSISRSVSQTTAGFPTCPGSRASSTTAAGSSGTSWIPSRPSPSHRVLTTVSPSRCFPFWPHPGFPRSLLGTLKVQVSPLIIYPPPVPMDFALFSHNKNSFPPCLTYTINILHSYSNTHRFLHTPCISPLPN

SEQ ID NO: 306981 - protein, 129 aa, Zea mays
  unsure (1)..(129): unsure at all Xaa locations
  Clone ID: MRT4577_43038C.1.pep
PRVREEEISSSDEEEDQIDTAGFVSGEEGDDDDEDAEEPSAEEAEGEGQQEEEADQEEIEAGTTVAGAEDQEDASADTADEGYDECQSTEDNEXLISRDKDDDYETDAVDGKREKARLKELRKMKKHKI

SEQ ID NO: 306982 - protein, 249 aa, Zea mays
  Clone ID: MRT4577_43039C.1.pep
MEEHGAEDLLCEAMGSAAQVVVVEDCVEAPGAFVLHLLLKRALAGCGSAAFLALAQPFSHYDRVLRKMGCNLSLHRRNERLHFFELLGFPGGAREGTIADSFALLYNEIQRLVEANRAGENEGQFTIVIDDASLLEVVALGSVSDVLDFLHYCFTLTSEMNCKLVILIHEDIYANEENMGLLLHLRYIADLVIKAAPLSTGLAADVHGQLAVVNKGTFSEQRAKAQKVWNFHFKVKENGADFFYPGSRH

SEQ ID NO: 306983 - protein, 57 aa, Zea mays
  Clone ID: MRT4577_4303C.1.pep
LIHAFIFHMLYPLDYLSKVYINILAKKILLEQNYFMMRFLHFLSLYKKLAQCLFLLF

SEQ ID NO: 306984 - protein, 73 aa, Zea mays
  Clone ID: MRT4577_43040C.1.pep
QGESQWDNRIANVCGRDIAVPVLTGRPGRERTVSRNGMKLCNTRAFPITTLCHDDQCNEWWLRRWMSCDVPGT

SEQ ID NO: 306985 - protein, 93 aa, Zea mays
  Clone ID: MRT4577_43041C.1.pep
SRPCPLPPLGVQSSSSGISPQALPCWVPRMCGGGLLCSSRDRRSDLPRRSVCFSTIGRVILDTCCSSFVIFRHAYIKGLPVRSTNNKKKQQNK

SEQ ID NO: 306986 - protein, 82 aa, Zea mays
  Clone ID: MRT4577_43042C.1.pep
GTGSRKQQQQQARVGVAAGSSASPADGAAQVDRRADEFIRRFYEQLRAQRSAASTPDCYGYGVGGASPYAARAPRPVTAGIA

SEQ ID NO: 306987 - protein, 75 aa, Zea mays
  Clone ID: MRT4577_43043C.1.pep
VTSSGLQGTDRREMTELDETRGRAVGARSKLATQTRSRGTTWGQAAWKISAVTPRQNSHAPGQAAPTAMRRVNLT

SEQ ID NO: 306988 - protein, 91 aa, Zea mays
  Clone ID: MRT4577_43044C.1.pep
PLNVLNKGESTLVLARRVPVQPAQELGLSSGVGHNVLGRPGVAADKTHNLELAPPLKPGLRWPVVSSRGPQSSSWPVNLLACLLPWTNKDR

SEQ ID NO: 306989 - protein, 123 aa, Zea mays
  Clone ID: MRT4577_43045C.1.pep
HVYMMVSSLSLTIRYSDVYARITQMKGSSHSPGIDVHQTTTDGDTILMTCMVVRKRRQAGIDLPTVPPYCAFPCSFLTSSSTLPLAELILSLTHAAPFVDRLSSLTVSLERKEETEYGRGRTE

SEQ ID NO: 306990 - protein, 81 aa, Zea mays
  Clone ID: MRT4577_43046C.1.pep
MSSDGETYKPSEHGGKREDGEPDKRVSSEHGFGGDREAASEQGKKGGNAEKSQPDEVYKPSEHDGLKKNGEPDGRMKQNQE

SEQ ID NO: 306991 - protein, 166 aa, Zea mays
  unsure (1)..(166): unsure at all Xaa locations
  Clone ID: MRT4577_43047C.1.pep
MVAANRSLVSVKVLXGDMLTDAPGIXLLPPVFGATIRRDVGRFTHKLLCCTNCQPYAVSRRTGHQTSAESWGTVRAVTRIPRVPGGVTLRDGHGAFGNMCRAGRMFXPSKIWWRRNRHVHINLGRICVVSGIAATAGPDLVQVCVHRHQSCPRDSLLIISDSSEMV

SEQ ID NO: 306992 - protein, 173 aa, Zea mays
  Clone ID: MRT4577_43048C.1.pep
MSPSAIFVFLLVSAVHMLECILDLKRRRGSISDDQLRLRVEITQLLKEASALSTPSTFAQAAKLKRLAGAKEKELAKMQDVDIRGKQSLYEKYRKVLLAAKVVVYGVLVLWFWSTPVTTVPKHLLQPFGRMFSWRGVDASTGRVVVGILPWLFLTSRVSKLLSEKLAPIFLHP

SEQ ID NO: 306993 - protein, 51 aa, Zea mays
  Clone ID: MRT4577_43049C.1.pep
TRPSMPCKPPCSLKFSPPHVLQRGVLGALILVPLGSCMPCLIGAGFLHPNC

SEQ ID NO: 306994 - protein, 168 aa, Zea mays
  Clone ID: MRT4577_4304C.1.pep
TPTPYIIINEKLVWAQPTAACINKELEEVIGGRRRRGHQIEGVGHRRTPEPTTPHVATTAGDDRASRTRRSYPRVPWPPPSLPKPIVPRTITVTTEPRVRRRHSFDSGLPSPLARPPLERRHHSVLGENHRCLPAASGASAWVTHLGAPPPPAPDISTACTPEGTARV

SEQ ID NO: 306995 - protein, 40 aa, Zea mays
  Clone ID: MRT4577_43050C.1.pep
LKNTTIYLVRWAHKQQQQRLRPTRPGQNRRGPKKEPSEAT

SEQ ID NO: 306996 - protein, 89 aa, Zea mays
  Clone ID: MRT4577_43052C.1.pep
LVIRLERDCHPPWYLPPPAKPKRGVFLFLVLLIFDGALLATPTEAQQDHQRPAETASAHHAYAICAVRICTYAIAYHLDKITKHFVIAY

SEQ ID NO: 306997 - protein, 84 aa, Zea mays
  Clone ID: MRT4577_43053C.1.pep
DIYIGSKYFIGGQIIFGYRRRNRINQNGCGHTFMSTKTGPKNGGGDWKLKNFVFFFLKNTPHNTFFWEPPRPPLLLFNHPHKLD

SEQ ID NO: 306998 - protein, 185 aa, Zea mays
  unsure (1)..(185): unsure at all Xaa locations
  Clone ID: MRT4577_43054C.1.pep
PVCPPLLFXPASLRRCPLVVAACGFPSSSPALPASXGSGLWSVGXXASPPLWGSSCXVSXGSSGLLLLLFFFVSAFLRGPCLAVGGXXWGGXVXPPPPSLLWLXXAXXXGKTHPKGLSPPPLVEXGRLRRVAACPRRRGRALASRGPRALVGRXSAVGXAPPRAAPRRLGRAFVXGXPQRGVRSV

SEQ ID NO: 306999 - protein, 53 aa, Zea mays
  Clone ID: MRT4577_43055C.1.pep
SLGTPVFYNKDKAWGAQWFFWVGPLIGAAIAPAYPQYVLRASPPKLGSSRSNP

SEQ ID NO: 307000 - protein, 87 aa, Zea mays
  Clone ID: MRT4577_43056C.1.pep
KSERVLDWLILEEEFLGRARVNLAKNEHEQDEHDERSKVDDFRGSPMSVGNLEEIIDDNHAIVSTSVGSEHYVPILSFVDKQQLEPN

SEQ ID NO: 307001 - protein, 74 aa, Zea mays
  Clone ID: MRT4577_43057C.1.pep
LPFPTRSTLSLLLRRPPPGRGDSPAIPSLLRLYKHTPSSSSYLHRHLILFLSEPTPTALSPSRAGSATLLPRSH

SEQ ID NO: 307002 - protein, 40 aa, Zea mays
  Clone ID: MRT4577_43058C.1.pep
YNDVLGTRVMLVYIVHHSSSQCDRMAIFMLGDWRNPYLPF

SEQ ID NO: 307003 - protein, 82 aa, Zea mays
  Clone ID: MRT4577_43059C.1.pep
MMWLRHRGLAMSAIFNFQSLLTVILLLICTCAYIRSLAPSLLDRNKTGLLGIFWKCARIGERKSPYVAVCCIVMAFSILFIQ

SEQ ID NO: 307004 - protein, 38 aa, Zea mays
  unsure (1)..(38): unsure at all Xaa locations
  Clone ID: MRT4577_4305C.1.pep
IKQDFTFCGGLQPLMDSPXFMSILSIDDFSVCPTVLPV

SEQ ID NO: 307005 - protein, 163 aa, Zea mays
  Clone ID: MRT4577_43060C.1.pep
HGISELTQWWLTGFSPGNAAMAVQSQPYTQQKFMNKLMGLQFRMVYDRGKENIATDAFVQDLWPRVTIYIPYGNVFSVQKDKTRRLPPFWVGRSSTFSTKLIRSFHDSMVWECSVSAAEAWWIGLQTMVEQFGEQWSVTEQEKEEQQYLFAIQDHPRLWKIGG

SEQ ID NO: 307006 - protein, 79 aa, Zea mays
  unsure (1)..(79): unsure at all Xaa locations
  Clone ID: MRT4577_43061C.1.pep
LGALHGLFXSLFSENTELGMDEDSAXEYCIAXISGIMSRTSSKNGMLEVYNSLTDVVERPFIEAXSAGYHPCMAMRYES

SEQ ID NO: 307007 - protein, 92 aa, Zea mays
  Clone ID: MRT4577_43062C.1.pep
KCVCFPRPRVFFFPTLVYPVIPFFWGFSLSPMSPLAFVLVGSAVLFVLPRCRFAVSPVCFGGLPRWVGPGVLWFRCPPLEYTGWFSEKIGRG

SEQ ID NO: 307008 - protein, 113 aa, Zea mays
  Clone ID: MRT4577_43063C.1.pep
MANATSGMAVHDDCKLKFMELKTKRTHRFIIYKIEELQKQVIDEKIGEPGQTHEDLAASLPADECRYAIFDFDFVRSEGVPRSRIFFVAWSPDTARVRSKMIYASSKDRFKRE

SEQ ID NO: 307009 - protein, 49 aa, Zea mays
  Clone ID: MRT4577_43064C.1.pep
EISYASASYCILFIETIHSTWGIFKQGVRCFCCTIAACFAFTSSSINSL

SEQ ID NO: 307010 - protein, 146 aa, Zea mays
  unsure (1)..(146): unsure at all Xaa locations
  Clone ID: MRT4577_43065C.1.pep
ALWRFFLPGVGGAASQCSGCPGCLVFGGAELSLSLCACSFGLPGGRARCLAPPLPFVWFCRLGVWLGCLVPVCCFVFVGSGFGGCGGGGAAALSFWCFVFALVFCLLFFLGVCLGGGGARWFPKXSLLGRPPPRARGLPALVSVRS

SEQ ID NO: 307011 - protein, 68 aa, Zea mays
  unsure (1)..(68): unsure at all Xaa locations
  Clone ID: MRT4577_43066C.1.pep
LYHPTSSRRLSSQPAFAARXXFLHNYPGPPLTFYLTPLPSLSCYCLHVNQHVWQLLSWDVCFPRQALL

SEQ ID NO: 307012 - protein, 95 aa, Zea mays
  Clone ID: MRT4577_43067C.1.pep
RILTLSPSQPSCMMSTFGTQLHSIPSMRTMLGTHTRQHGRMTTYTLRIKKAQCYTMTPDYRARRFEERSSCYTIRSLRDLDERLLLAMTTMVPET

SEQ ID NO: 307013 - protein, 101 aa, Zea mays
  unsure (1)..(101): unsure at all Xaa locations
  Clone ID: MRT4577_43068C.1.pep
SRRPISSGSQTPEPWASNQSAAHRPRSREGAVKATHFPAAVTPGRGRPGRGWGRCSPGRLRGGHAGPGARLGAGPGGVGGGGGGYQSQAAAPPGNMADPLX

SEQ ID NO: 307014 - protein, 94 aa, Zea mays
  Clone ID: MRT4577_43069C.1.pep
IFQPHTLNFIKHRSFQRKRLRPSATVCTANPQGMYTHYLQIEAKIPHGVFNKRPKCTTAQLSIRRKLPCCHGTATDSFFRTWTHPSNTPASKGE

SEQ ID NO: 307015 - protein, 92 aa, Zea mays
  Clone ID: MRT4577_4306C.1.pep
NGARNMVATSKQMTRSWKNGSGSAAEVSVLLFSIHRQKRDRTAVAGKKKQLWKYSRSLEHKVSALLSGPYQLKRSEVIDKDRAQRIAVYIII

SEQ ID NO: 307016 - protein, 123 aa, Zea mays
  Clone ID: MRT4577_43070C.1.pep
MAAATAVGGHDRVEAAASSAGAVLAVAVASQRLIGLLALAVQTVNCVAEIYNEDQQEIYKLLYGRIKSENVPEIKAGSDDDDDDEDDGDDDGNDDDDDEDDDEDEDEEDDDDEEEQPPSKKKK

SEQ ID NO: 307017 - protein, 77 aa, Zea mays
  Clone ID: MRT4577_43071C.1.pep
LEPDEARTGAFRAFHGLHHRGARQSRQLRPNGLRPASKAAHTPQLEDRQGHPADSDGGAPTLGEEFERGKRLPEDSL

SEQ ID NO: 307018 - protein, 109 aa, Zea mays
  unsure (1)..(109): unsure at all Xaa locations
  Clone ID: MRT4577_43072C.1.pep
MKEQITSSSWKVAVLPHRRHPLHLHLRHHLHRRHHRYHHHHHRYHRRHHHSPLHHXLXHHLHHPPLHHHRLHRRRHHPHHHHHHHHHHHLHLHLHLHRLHRHHHHLTQP

SEQ ID NO: 307019 - protein, 225 aa, Zea mays
  Clone ID: MRT4577_43073C.1.pep
GADDLKVLGLWTSPFVIRVRIVLNLKGLAYEYVEDDLGNKSALLLSSNPVHKTVPVLLHAGRPVNESQIILQYIDEVWAGTGPAVLPRDPYERAAARFWAAYIDDKVKSAWLGMLFECRDEGERAEAVARAGEALGTLEGALRGKPFFGGDGVGFVDAVLGGYLGWFGAVGRIIGRRLIDPTKTPLLAAWEDRFRAADVAKGVVPDDVDKMLAFLETLLANYYSK

SEQ ID NO: 307020 - protein, 107 aa, Zea mays
  unsure (1)..(107): unsure at all Xaa locations
  Clone ID: MRT4577_43074C.1.pep
SSWYSLFFVFFNTWLFFCEFFFFFAPRFLDXXXXXXXKXFYFFXXFXFIFLVFFFFFVFXFVXVNFFKFFLXXYIXLFFFISLXXFKYIFVIXLFIFYFVYFLSFFY

SEQ ID NO: 307021 - protein, 267 aa, Zea mays
  unsure (1)..(267): unsure at all Xaa locations
  Clone ID: MRT4577_43075C.1.pep
MAGLARHVDTEELLTTLKDHPMHKAGGRHSENRATSHITPYSSRYAAGTELSKFKIPQDGAPADVVHQLLKDELDLDGRPSLNLASFVGTYMEREGEQLMIENISKNLSDADEYPAMMDMHARCVSIIAHMWGVQKGEKAIGSATTGSSEAIHLGGLAMKRRWQEKRIAEGKDTSKPNIIMGANAQVAXLEKFARYFEVEARILPVSEDSSYRLDPKLVKENIDETLFXXFVILGSHYTGHYEPGEEISEILDEFEKETGVEIPIHV

SEQ ID NO: 307022 - protein, 73 aa, Zea mays
  unsure (1)..(73): unsure at all Xaa locations
  Clone ID: MRT4577_43076C.1.pep
AGXGHVLTAEPLPTIHYPKVLTASPGYHLPLTSLEPAKLAVARCVWRPSSPSQPLTCTPRASSSSPQSRGAEH

SEQ ID NO: 307023 - protein, 667 aa, Zea mays
  unsure (1)..(667): unsure at all Xaa locations
  Clone ID: MRT4577_43077C.1.pep
RYLGKQEYKCRHCDAIFWFNERNKSMTRHNNQEPIYSNCCKNGKIRIPKYKEPPTFLNELIHQKMDTRCKHFLQKIRQYNSMFAFTSMGGNIDKKINDGEGPYVFRVNGQIHHRIGSLLPLPDNCPKFAELYIFDTKNEISNRIRALTNEEPGEQDIDPEIVRGLKKMLDEYNPLVKIFRQARDFLEEHKGIDVSIRIVGADKTDRIQYEMPHQEELAMLIVGDLSLENYKRDIIVSTHQNSLQRISIFHPAYMPLQYPLLFPYGERGFQLGIKYHGQHISQNRDDSKRDRVTLHEFLKYHVHYRPNQPNPWLCYGRLSKQVVVDGRAMEDEDRLDYIVRNQSKLRSEYVQGIFDAVEKGIYDASRIGKKVLLPSSHVGSKRYMIQNYHDGIAICCAYGPPDLFITCTCNPKWPEITTCLLLGEHPNDRPDIIVRVFHMKLQQLLDDLQSGKVFGLVLALLYSIEFQKRGLPHVHTLIWLDKKGCEITTETIDSWISAEIPDPELDPLGYALVAEHMMHGPCGDKNWNCPCMKKGKCSKFYPKDFEENTTFSENGFTIYRRRNNGIFIRREQHNLDNKWVVPHNLKLLKRYQAHINVEYVNKSTVLKYLCKYVNKGPDRAEFIFKKSKKEKNHMXNKEAETIDEIQEYLDCRYICEQDALWRLLGYE

SEQ ID NO: 307024 - protein, 139 aa, Zea mays
  unsure (1)..(139): unsure at all Xaa locations
  Clone ID: MRT4577_43078C.1.pep
LRSVAFFSRSGLRGWAVFVRGVGLVPXGVVFPRGGFCLWGARGXFSLVAVSFPGGSXCLXRGPGGFSARRGLPPPGGCWVSVGVPRLLLRRWAVFSFVFRLFRLRCFLCVPSRLVSRPAFSLVXIWINSRGGRPAPSGS

SEQ ID NO: 307025 - protein, 95 aa, Zea mays
  Clone ID: MRT4577_43079C.1.pep
REEPLAARLRKSTSLSRSSLVLCMRAQRDFPAMVVTKDNRTARYSNTKVAGHDSPAPSIAEMADQPACKGTEPRYKRWLWFVGGNEAGLRRHPGR

SEQ ID NO: 307026 - protein, 56 aa, Zea mays
  unsure (1)..(56): unsure at all Xaa locations
  Clone ID: MRT4577_4307C.1.pep
MDLNRVLCLELGKLQFLLQGTLAADGIILAYVVVLVWXXXVYRPVKDAPPLGEGGK

SEQ ID NO: 307027 - protein, 213 aa, Zea mays
  unsure (1)..(213): unsure at all Xaa locations
  Clone ID: MRT4577_43080C.1.pep
MWLKSDIPYISSSISSIEALCNMKLCLNSERLKKGPLTLMNDEIILDVVERGTWALHMLRYVPSLLFQNTSLLGKLEYKCRHCDAIFWFNERNKSMTRHNNQEPIYSNCCKNGKIRIPKYKDPPTFLNELIQRKMDTRCKHFLQKIRQYNSMFAFTSMGGNIDKXINDGEGPYVFRVNGQIHHRIGSLLPLPXQLPQIAELYIFDTKNEMKMN

SEQ ID NO: 307028 - protein, 44 aa, Zea mays
  Clone ID: MRT4577_43081C.1.pep
QRRVLFFFSFFFFFGKFISKFYFVLYSIFLLLFYLFKVGIKSSI

SEQ ID NO: 307029 - protein, 96 aa, Zea mays
  Clone ID: MRT4577_43082C.1.pep
ARPSLVGVTNAQVFSGFSRACRPIQVSRVLCACSIWCSFFIHAFCHSSLAAPSISVREGLITTCSTSPLSFYTIDWLAMDQASYQTCMELVVMHLV

SEQ ID NO: 307030 - protein, 44 aa, Zea mays
  unsure (1)..(44): unsure at all Xaa locations
  Clone ID: MRT4577_43083C.1.pep
GILPHADNLAHIGGFASGLLIGFVLLERPQFGLMXRSELPQTSQ

SEQ ID NO: 307031 - protein, 89 aa, Zea mays
  unsure (1)..(89): unsure at all Xaa locations
  Clone ID: MRT4577_43084C.1.pep
TQEKKTPPHQKKKKKKPPQPPKKPQTTPPTTTHNHPKNNNNXQXQVAHLPSSGASXSGTDLTRIGFDLSNHTYKPPANFEPYYFIADPY

SEQ ID NO: 307032 - protein, 57 aa, Zea mays
  Clone ID: MRT4577_43085C.1.pep
RSSSVPKPRLEVNGSRLLRSAYLCGVSCSETLMISNDTCLWHSFLGPNNAIACNYLR

SEQ ID NO: 307033 - protein, 170 aa, Zea mays
  Clone ID: MRT4577_43086C.1.pep
KPPTNWRKVLDAPPSTVGGAGLDQQYANVIASAEELLRMEAEGRQEEASAERAEMYEMLPAKLRAAVRSKLREWWRDPGPLDEGLARGWKDAVDRIMAWLGPMARDTVQWQAERNMDRTRRFDGAPRVYALQTLRWADKDKAEAAIVEVLVALSCICWYEERRRGSVRLG

SEQ ID NO: 307034 - protein, 68 aa, Zea mays
  Clone ID: MRT4577_43087C.1.pep
FFFFFFFFFFFFFFFFFFFFFFFFFFFWTKKQINNGEKGGPPKHKTTPGGGGGGKKKEEGGEKKKKFF

SEQ ID NO: 307035 - protein, 53 aa, Zea mays
  Clone ID: MRT4577_43088C.1.pep
VTEKQLQGSPQGNIVGRRMMDTEQTKPLDLVHGKMKCKRKSRGRPLYRIRAYG

SEQ ID NO: 307036 - protein, 213 aa, Zea mays
  Clone ID: MRT4577_43089C.1.pep
FFGRVGETRDLDGHILFIEEDHYIFPNAYRNAQLLVDLKPKKCPQCYAINLAPSDVKSRGEGWESLVAEKMGNIGYAFNRTVWRKIHAKAKQFCAFDEYNWDITMWATVYPSFGAPVYSLRGSRRSAAHFGKCGLHQGQGSSNVCVDNGSGAVELEDADKVPNIKADWPVRVIQRQEGYQAGFKGWGGWGDRRDRELCLSFAYMYHVKDPSSS

SEQ ID NO: 307037 - protein, 83 aa, Zea mays
  Clone ID: MRT4577_4308C.1.pep
TSGRLVIRGARSYGSVARSTVDTQFPLYRGLFPSCGLSITLAPMADQAYSLLALRLLRLAGDESLYLPGLPAEVEDKVHVKLD

SEQ ID NO: 307038 - protein, 42 aa, Zea mays
  Clone ID: MRT4577_43090C.1.pep
PFELCGRITLSKNIINSAGRTHDPIKKLDFAREIIPLAFHLL

SEQ ID NO: 307039 - protein, 122 aa, Zea mays
  unsure (1)..(122): unsure at all Xaa locations
  Clone ID: MRT4577_43091C.1.pep
GGPPPLGGVLKAPALGGFTKSGALSTQKPLGIPPGTPPMVXPRKAPRVAKNAKPAQVFVMFLFXKVFLPPGFSRDAPPPFGPRVPRMLKLGLSPHEDEFFGAQTXIPPLGETPGENKMEGVG

SEQ ID NO: 307040 - protein, 89 aa, Zea mays
  unsure (1)..(89): unsure at all Xaa locations
  Clone ID: MRT4577_43092C.1.pep
FFFFFXXXXXXXXXXXXXXDISVLQGWTNHQRRLTTRKLVCFHASHVILWSWSPCSWGQSLTVNILTASPGCVAYALSIVVAPALRVSG

SEQ ID NO: 307041 - protein, 141 aa, Zea mays
  Clone ID: MRT4577_43093C.1.pep
MVRGKLEVLLVSAKGLDDSDFFNSMDPYVILTCRSHEQKSTVASGAGSEPEWNETFFFAISGDAPELRVKIMDSDALSADDLVGEACIPLEAVLQEGSLPPAVHRVVKDEEYRGEIKIALTFTPAEENEEEESYGGWNQST

SEQ ID NO: 307042 - protein, 86 aa, Zea mays
  unsure (1)..(86): unsure at all Xaa locations
  Clone ID: MRT4577_43094C.1.pep
RITETACLGYRVRLQEVLSQLPRGDNIWDGNWRDYVLVGDYYXTAQYYVTLXVCVVLSGIDDILMYVGYTSVYMHSRNLSMIDFVV

SEQ ID NO: 307043 - protein, 78 aa, Zea mays
  unsure (1)..(78): unsure at all Xaa locations
  Clone ID: MRT4577_43095C.1.pep
FNPLPKAAXKRPKGGAXKPKGASKTKTNTPAKAKPATKPNPAAKPKAVLNPKTPAKPKAKPACKAKPKTAGAKPKPLA

SEQ ID NO: 307044 - protein, 81 aa, Zea mays
  unsure (1)..(81): unsure at all Xaa locations
  Clone ID: MRT4577_43096C.1.pep
CVSVCRSAVASDARTIRLVASRSARATRLVARAGGDDDLPVAGNKASDFXAEAGFEQXFINEMFSDYFGNKYVVLFFYPLD

SEQ ID NO: 307045 - protein, 39 aa, Zea mays
  Clone ID: MRT4577_43097C.1.pep
YHTKHYRYTVYPFFMIRGQPHCFMEHYFLQITSPSSIFI

SEQ ID NO: 307046 - protein, 143 aa, Zea mays
  Clone ID: MRT4577_43098C.1.pep
MHGKGGGPLALQGGEPVGKGVRGGPFPNSPSGKKGKGPQGGKIGKPRGFPKRDVVKSGQVKGKQGFKRGNGAPKREGKRAPRGRKNAKIPPQRGARARAKSFLFFFYGALKGGFVFRFYFFFFFFFFFFFFFFFFFFFFFFFF

SEQ ID NO: 307047 - protein, 42 aa, Zea mays
  Clone ID: MRT4577_43099C.1.pep
NDIVIPRGISIPHYQEIRRQKCSYINWYYLFSYLSLFLSQKK

SEQ ID NO: 307048 - protein, 85 aa, Zea mays
  Clone ID: MRT4577_4309C.1.pep
RQVVLAASPLRCAQIPPESSIVITLVIFLIGTSIHVIFVLRRGGGIHPLPMASATEPAPSSSEQSYACCGKEFSQCQCQSLEDSA

SEQ ID NO: 307049 - protein, 52 aa, Zea mays
  Clone ID: MRT4577_430C.1.pep
SSYKPIMVTMLKHQWDHLQNGPRVHPMPLDTIIQVLGRLTGQLWRADSLIFG

SEQ ID NO: 307050 - protein, 79 aa, Zea mays
  unsure (1)..(79): unsure at all Xaa locations
  Clone ID: MRT4577_43100C.1.pep
YTVAGGIGAQIGEKFTLXRHKCIEPXYTSILKDGXPLERGGXPDDTTPRGGXPDIRVAVYRKGXXLYXTWGRXXSFKVF

SEQ ID NO: 307051 - protein, 130 aa, Zea mays
  Clone ID: MRT4577_43101C.1.pep
QGNGANLRRTTTTTEDKSTETGRVPYTIRAEQREGKAIEKDQIAIKTADEKGMYNKAKKIGKDKGFPVKNTDKRTGNKIEEERRNKKRKEVTSKEKENRDPPKPPPYFFFFFFLNFYFFFFIYFFFRTRG

SEQ ID NO: 307052 - protein, 41 aa, Zea mays
  Clone ID: MRT4577_43102C.1.pep
KPFSSKRLMISPMRPLWRARSAVDHDEESSTFRPLREAAGT

SEQ ID NO: 307053 - protein, 71 aa, Zea mays
  Clone ID: MRT4577_43103C.1.pep
TFLRRLHSAGFSPLRLPPLSLLGRCRPLLFSSMAAWVPPVSVGYCNPDAHLCEYAVGREIVLHASRSASPV

SEQ ID NO: 307054 - protein, 145 aa, Zea mays
  unsure (1)..(145): unsure at all Xaa locations
  Clone ID: MRT4577_43104C.1.pep
LGKGGDGVYVILVMKPAHVNLTSCIYTYAVLDTQVDDHPSGALVFHETDLRAGXKMTVQYASSGTTASKILLRSEGAAIAXSTDXGPVNLARLLGDPDFLEAAVMDPTHLHCXAPTANGENKACASSLECMVDLTTARLWTMHAR

SEQ ID NO: 307055 - protein, 68 aa, Zea mays
  Clone ID: MRT4577_43105C.1.pep
MAPRADGRSQGGRRREHCDKRAQCAARGGEPTVRRTGLGIRRQRADCIECVSVAETPDSDDSVSFAAG

SEQ ID NO: 307056 - protein, 111 aa, Zea mays
  unsure (1)..(111): unsure at all Xaa locations
  Clone ID: MRT4577_43106C.1.pep
MAIQSGTRHASKRILTSLLKPGGEEYSKXFSLAAINEPKXEKLPYATRAXQESSIRNSDSLQATXSETEKIVDWKNTYPKLAHIPWRPDRSIXRDNTGDPGAXDLGAMREM

SEQ ID NO: 307057 - protein, 93 aa, Zea mays
  Clone ID: MRT4577_43107C.1.pep
CLPNFQDDEESLLQARGEAEMMIVEAYAALVLAFLSTESMKVRGAISSCLPDNNLKVLVPVLEKFVSFHLQLNMMTRETHSAVTEVIERCRLS

SEQ ID NO: 307058 - protein, 91 aa, Zea mays
  Clone ID: MRT4577_43108C.1.pep
CGRSVHHDSVMMEAWKRLCHMVDMLVLLVGVGVAWAWHGFDPELCGYEDGHGLVALGMAGGGVRCVLVTVQQRCEMSRKGGKGAGKKTIDG

SEQ ID NO: 307059 - protein, 90 aa, Zea mays
  Clone ID: MRT4577_43109C.1.pep
SVNVDVSVLACNNGSIHYAQAETTDLSTMRRQAGRNNGSSTPDGERVETGTLFLIPLLLFLYIIYYVCLEDLHRPKRSGADPFACLSSIG

SEQ ID NO: 307060 - protein, 72 aa, Zea mays
  Clone ID: MRT4577_4310C.1.pep
IFLFFFFFFFFSLFYPPFFYFFFFFFFSPFFILLSQHLSTKWRLFVGQYSTPYNITGLIVSVLYLLWYPWVT

SEQ ID NO: 307061 - protein, 445 aa, Zea mays
  unsure (1)..(445): unsure at all Xaa locations
  Clone ID: MRT4577_43110C.1.pep
MSPLSLHHTPSTVSEKVDPNHITVCNGAYSAATKGLKFLNSLRKSNKLKKKSPLLNHHRKFLDCLSTKFNGASLKLNVRKDRSKANSTRGSSGWISIKARTSDWNSREMAKKRRLSXENAQTALSNGGDDPFAFDDTDQEPSNWDPFGPKRKSPQKRAKRSNGELVLDDCDTAVTGSPELCQPEGINQSGATSDSKAADESNLLEHCLLASVKVLMNLANDNPSGCEQIASCGGINTMASLIIKHFPSFDFSMDSNNQMKERVSSGDLSSSQNSKSLQIKTKQLRAYELDFLVAILGLLVNLVEKDNLNRVRLANARVSVNLSQSPDTEEVQRDVIPLLCSIFLASQSTGETAEAISPDDEESLLQGEREAEMMIVEAYAALVLAFLSTESMKVRGAISSCLPDNNLKVLVPVLEKFVSFHLQLNMMTRETHSAVTEVIERCRQS

SEQ ID NO: 307062 - protein, 155 aa, Zea mays
  unsure (1)..(155): unsure at all Xaa locations
  Clone ID: MRT4577_43111C.1.pep
KIPDSKEVQRDVIPLLCSIFLASQGTGETAEAISPDDEESLLQGEREAEMMIVEAYAALVLAFLSTEXHSALFHNLFLISYNFNVSPTPLPSAYELMFAXSMKVRGAISSCLPDNNLKVLVPVLEKAVSFHLQLNMMTRETHSAVTEVIERCRQS

SEQ ID NO: 307063 - protein, 49 aa, Zea mays
  Clone ID: MRT4577_43112C.1.pep
PSHKPLVTLPGTVLKILSKPVYIQKGQNPAYLKITALILMPPTRPRSDI

SEQ ID NO: 307064 - protein, 50 aa, Zea mays
  Clone ID: MRT4577_43113C.1.pep
ACATLVLITGLPFDVSTSDLFIILDQIWLIVGLVGPPYATLTRVRPRETA

SEQ ID NO: 307065 - protein, 758 aa, Zea mays
  unsure (1)..(758): unsure at all Xaa locations
  Clone ID: MRT4577_43114C.1.pep
FHQHNKNIDSRLLLQLHLRRRGRGIPGCPVPALPLHAARLLSSSPPTAAAASSSAAGGGGIEKVLVANRGEIACRVMRTARRLGVATVAVYSDADRGALHVRAADEAVRIGPPPARESYLNARAIIEAALRTGAQAIHPGYGFLSESADFAQLCEAEGLKFIGPPASAIRDMGDKSASKRIMGAAGVPLVPGYHGADQDVEPTXVGLIKTGXTDFIKPTHGGGGKGMRIVERPDEFVDSVLSAQREAAASFGVNTLLIEKYITQPRHVEVQVFGDQHGNAIYLYERDCSLQRRHQKIIEEAPAPNVPAEFRSHIGGAAVSAAKAVGYYNAGTVEFIVDTLSGEFYFMEMNTRLQVEHPVTEMIVGQDLVEWQIRVANGERLPLSQEQVPLNGHAFEARIYAENVPRGFLPATGTLHHYRPVPSDPTVRVETGVEEGDTVSMHYDPMIAKLVVWGESRTAALVKLKKCLSTFQIAGLPTNVDFLQELASHSAFEKGLVDTHFIERYKDDLLSISTKSSKESHGVAELGAILAAACICKKEHITSKESLRANKSLSVWYNNPPFRMHHFARHPLDLELEENDGFSEKLLKLFITHKFDGSYFIETEDGTSGLDVKVDHKGDHDFRVDVSGLQTDVTLASYSKGNSKHIHVWHGNHHHHYRQTVRAEHAVEDSSQPSHASEGKSHPKGSVLAPMAGLVVKVLLEDGAQVDAGQPVMVMEAMKMEHVVKAPRAGYVSGLKVTAGQQVFDSSVLFTIKDSSAN

SEQ ID NO: 307066 - protein, 101 aa, Zea mays
  Clone ID: MRT4577_43115C.1.pep
MPLDPDSSSSPPAHRDWFFPPEPTLLGCFMSRTPSAPLPCTYRCCKPYSTYPLDDRRPAPTPRYRSRSADPQAEQKEKTPTPPTTTTRPRRRDPRYAARAT

SEQ ID NO: 307067 - protein, 55 aa, Zea mays
  Clone ID: MRT4577_43116C.1.pep
DQILERHDSFSVKKARSKKSEKTSYVEFQDGQGRTDDSPECICQEYSQKVPHAKL

SEQ ID NO: 307068 - protein, 688 aa, Zea mays
  unsure (1)..(688): unsure at all Xaa locations
  Clone ID: MRT4577_43117C.1.pep
MASRLLLHLHLRRRGRGIPGCPVPALPLHAARLLSSSPPTAAAASSSAAGGGGIEKVLVANRGEIACRVMRTARRLGVATVAVYSDADRGALHVRAADEAVRIGPPPARESYLNARAIIEAALRTGAQAIHPGYGFLSESADFAQLCEAEGLKFIGPPASAIRDMGDKSASKRIMGAAGVPLVPGYHGADQDVELLKLEADKIGYPVLIKPTHGGGGKGMRIVERPDEFVDSVLSAQREAAASFGVNTLLIEKYITQPRHVEVQVFGDQHGNAIYLYERDCSLQRRHQKIIEEAPAPNVPAEFRSHIGGAAVSAAKXMFLNISICLGDKFVALSSLLLVKIFSLSTCQFFRTNIEXKCASNLLHMTASSKLYVLSNGSFXDFFSNNTQQLASYLSFFMLSVIKQVVLSLFSLLICFXVILFNPSVSHIGSFIGLFVLKAVGYYNAGTVEFIVDTLSGEFYFMEMNTRLQVEHPVTEMIVGQDLVEWQIRVANGERLPLSQEQVPLNGHAFEARIYAENVPRGFLPATGTLHHYRPVPSDPXVETGVEEGDTVSMHYDPMIAKLVVWGESRTAALVKLKKCLSTFXGLPTNVDFLQELASHSAFEKGLVDTHFIERYKDDLLSISTKSSKESHGVAELGAILAAACICKKEHITSKESLRANNSIAQCTRTWNCTTLSKRNSCLICAVK

SEQ ID NO: 307069 - protein, 151 aa, Zea mays
  Clone ID: MRT4577_43118C.1.pep
TSLLNTSHHCSPSLHQRPAEPSPPQDGLPPPPPPPPAPPRARDPGLPRARATPPRRAAPLLLPTNRSCGLVVGGGRRGHREGAGLALLKASVLETRAKLMLRGGQYDIGDDLIRKAIFIRTSICGEHHPDTVSARETLSKLTRLLTTVQLS

SEQ ID NO: 307070 - protein, 686 aa, Zea mays
  Clone ID: MRT4577_43119C.1.pep
NDGNWRDCILQAIILLATKLGRRSVVDRVYRGKGRLEKEEFPFARNNDFVGRKKELSELELILFGDVMGDGEREYFELTTKQRRKGLAVRRSANNHEHMNTDDSKGKEPVIWKETEKDIEMQRLGSPLWHGRPLRVKNGVRCGRKKRSRKILYGKGIACISGEPGIGKTDLVLEYAYRFFQRYKMVLWVRGESRYIRQNYLALRTFLEVDLSVDSHLHEKGSDRCFEEQEEEAIAKIRQELMRDIPFLVIIDNLESEKDWWDKRVIMDLLPHFGGETHFIITTRLPRVMNLEPMKLSYLSGAEAMTLMKGGVKDHPLVETDALKIIEEKLGRLPLGLSIVGAILSELPITPTRLLDTLNRTPLIRNFSWNDREVLSLKNHEILVRLLDVCLSIFDHADGPRSLATRMVQVCGWFAPSAVPIHMLARAAHKVPKKQWRGPRWRKWWRPLTCGLATSRMKKSEAEAAAMLMRFGIARCSAKPEHVQFHDLIRLYARKLGGTRTAPAMVQSVYLQGSIKHSSEHLWASCFMVFGFGSDPLLVELRPSELMFYVKQIVMPLAIHTFITYSRCNAALELLRLCTDALERAAESMLAHAGKWRETSFSCFRQAHSEAQYTYLWQELALLKASVLETRAKLMLRGGQYDIGDDLIRKAIFIRTSICGEHHPDTVSARETLSKLTRLLTTVQLS

SEQ ID NO: 307071 - protein, 28 aa, Zea mays
  Clone ID: MRT4577_4311C.1.pep
PPDFQSGLAPGPLPVPPETLLGSFPPAN

SEQ ID NO: 307072 - protein, 122 aa, Zea mays
  unsure (1)..(122): unsure at all Xaa locations
  Clone ID: MRT4577_43120C.1.pep
QVFGDQHGNAIYLYERDCSLQRRHQKIIEEAPAPNVPAEFRSHIGGAAVSAAKXFIGLFVLKAVGYYNAGTVEFIVDTLSGEFYFMEMNTRLQVEHPVTEMIVGQNLWEWQIRVANGERLPL

SEQ ID NO: 307073 - protein, 94 aa, Zea mays
  Clone ID: MRT4577_43121C.1.pep
MASRLLLHLHLRRRGRGIPGSPVPALPLHAARLLSSSPPTAAAASSSAAGGGGIEKVLVANRGEIACRVMRTARRLGVATVAVYSDADRGALHV

SEQ ID NO: 307074 - protein, 116 aa, Zea mays
  Clone ID: MRT4577_43122C.1.pep
PAVPGLPSYAILEAHRRRGTPRMLSPSASTIALLPLGALLLVRGAAAGPARFGPLVSSHITPRRGRSSWRSAAAHTPPLTTHHQRVSLSAHEVRVRPRPAFEEEMYLLWRTLPRTH

SEQ ID NO: 307075 - protein, 130 aa, Zea mays
  unsure (1)..(130): unsure at all Xaa locations
  Clone ID: MRT4577_43123C.1.pep
MELESSDILLTSDRDSLVRNXREQMKISIVEDIPEAIYLFGSWCRACYWLTPKLNAVYQKLAXQSKRYDDDFFTTFLNEAAANEYFAKMPXWVAVHPSDSEGREAVADRLIVYGMPHLSILDAKTDEVYT

SEQ ID NO: 307076 - protein, 108 aa, Zea mays
  Clone ID: MRT4577_43124C.1.pep
FTFLGGGVFFFFFTGSYSRGTAKTFRQLFHQQERERCSPTSEQTKRAASSLFTTNQSCYRTNPKKTLHSPCSPPPTSITQSRHQHPMNFELLIKKHCQNKEIQGFPTL

SEQ ID NO: 307077 - protein, 229 aa, Zea mays
  Clone ID: MRT4577_43125C.1.pep
SGLMKAMEGSEFGANCAPTVVTYTCLVKCLCGKGRAVEALAVLDRMTERRVMPNRVFMRTLVEGFCTEQRVVDAYDVVERVIGDGSVSSTQSSLVLPGSVLEFRCCREAEGLARMMMTKGVQLTPLAGSCMVRELCIRKRSLDACYWLGVIEENGVLCDSDVYGTLLLGLCEEGHIHEASTLGRKVVDRGILIELSCADRLVELLKQYGDEELASNILGLRRRPEGLSF

SEQ ID NO: 307078 - protein, 103 aa, Zea mays
  unsure (1)..(103): unsure at all Xaa locations
  Clone ID: MRT4577_43126C.1.pep
MAAATGMQLALLLCLVVLVASPRVALGNCRDDCMAACNGWHVMCQLSCGSACYGEVGITTLSTPDESSAXEQKRLHXAPAPQQAQEQEEGGGVSGLKPSPARG

SEQ ID NO: 307079 - protein, 87 aa, Zea mays
  unsure (1)..(87): unsure at all Xaa locations
  Clone ID: MRT4577_43127C.1.pep
ILVHFGILRLHGGGGGLTFLVSIKNQVSGGVNLVKNGGAEIKPTPEGEECLEGPYPLDKIPGPGGPNYGGHRPYSVCFSLXRSXXFG

SEQ ID NO: 307080 - protein, 109 aa, Zea mays
  unsure (1)..(109): unsure at all Xaa locations
  Clone ID: MRT4577_43128C.1.pep
KTRKEGGLLXTXXKQNXERXQXXXXNXHXRXPGXXXXFFVFHXGKVXXQNXDXDKKTXXXITTCXPSSTTXXQDCRRSGHPGRLEXPPGNGKQAXWPXXRKKRKXXRTI

SEQ ID NO: 307081 - protein, 70 aa, Zea mays
  Clone ID: MRT4577_4312C.1.pep
TQKAYCSTAGPRIMQYSNIDHWTDIPLVQWRLALLVVLIVVISSTGALELVEPHNQAVNPPLICQHRKLV

SEQ ID NO: 307082 - protein, 102 aa, Zea mays
  Clone ID: MRT4577_43130C.1.pep
EVCLLALLLSHILLPCSLTLYAVHLFTSSTIMSRMKEMCIPDYRSISDLTLDCMWNLTSIIVGKSTMIIILTTSTCPVFIDSQHHVLTSTIAHADRTCYLLL

SEQ ID NO: 307083 - protein, 68 aa, Zea mays
  Clone ID: MRT4577_43131C.1.pep
LLGRKKEKFKKKRGVRINGRHDIKDPCLPTRACDGLAILYCHLNSIHIVVFYKFRTVKTSGVAEKNPL

SEQ ID NO: 307084 - protein, 47 aa, Zea mays
  Clone ID: MRT4577_43132C.1.pep
TIKFGEAVLEVQFSGRRFTTLRLFNSLDLNKLNVFEFIPLLTGKTFV

SEQ ID NO: 307085 - protein, 52 aa, Zea mays
  Clone ID: MRT4577_43133C.1.pep
RGPCPQKKKKKKKKKKKKKKKKKKFKKKKKKKKKKSTLRCYHCLRARFHTGG

SEQ ID NO: 307086 - protein, 81 aa, Zea mays
  unsure (1)..(81): unsure at all Xaa locations
  Clone ID: MRT4577_43134C.1.pep
MSGAIGGAEVHGFRCAXAQLPLSRVLGRPIRVAPAAAARPVCASAGSIRCVSTPGEKDASGVKLTSVDIIEEKSNFLRYPL

SEQ ID NO: 307087 - protein, 65 aa, Zea mays
  Clone ID: MRT4577_43135C.1.pep
KKKKKKKKKNKKKKKKKRKKGKKKKKKKKKKKKKKKKKKKNKKKKKKKKKKKRGGFFKVSKFTYR

SEQ ID NO: 307088 - protein, 113 aa, Zea mays
  unsure (1)..(113): unsure at all Xaa locations
  Clone ID: MRT4577_43136C.1.pep
XYCPTGKKNFTGNISIDCGHIPKQNITYVHHGYVLDLDTIGYGLVQTRRFPAVCMQAPSEDLSAVGEEELPQEYLIARVRDAGEAQVRAVGRAYGEGALLGRRLHPLVFEGLG

SEQ ID NO: 307089 - protein, 70 aa, Zea mays
  Clone ID: MRT4577_43137C.1.pep
LLGGCTQKAHTAKSDKNDLPPNQCHKNQTTTQSLEKRRTSQKEATATRTVSIIATSRQMFVEPTRTTTNR

SEQ ID NO: 307090 - protein, 93 aa, Zea mays
  Clone ID: MRT4577_43138C.1.pep
IPSALVFPPFFVEDPWGSPFFSFLHHSCFFNLPYCALAPPWCPLLTLGRPYWICDPLRPGPLTPEGVFFPPSGPFSFPAPFWRRLFLFSPVFF

SEQ ID NO: 307091 - protein, 42 aa, Zea mays
  Clone ID: MRT4577_43139C.1.pep
HIHKKQFQTYWRGNTILTGAQAHGLPGHQGSYLVHNYFRFEV

SEQ ID NO: 307092 - protein, 188 aa, Zea mays
  Clone ID: MRT4577_4313C.1.pep
FYEAKRKGAKQGPARRQSSSSRSFPGTSRLLTGETVQPDTPQPPEEIVHNIYFWSDGFTVDDGPLRSFNDPEHAAFLESIMKSECPTELAPADGMSKVNVNLIRKEEKCPEPVKRPAPFQGGGRILAAPSENSAPSGISLAAAASSTATTTAPKTITVDDSLPSTSLQIRFADGSRVVGRFNTSHTIS

SEQ ID NO: 307093 - protein, 61 aa, Zea mays
  Clone ID: MRT4577_43140C.1.pep
DQKFLGEQQKKVSPQAGSFNSTPRSPSLKLPSQGSGNHPPFYWPPIAPGGQKGNSPLEGLG

SEQ ID NO: 307094 - protein, 100 aa, Zea mays
  Clone ID: MRT4577_43141C.1.pep
VLALSLSPPKLYFPRLDIHPFFCWINFCFTPFFRLSPHFFLLNLSNKPPPFCALFSPRVVVSSYHVLSPFLVPFFPSPFVLFPSPFCPHSFGFPLLTFYL

SEQ ID NO: 307095 - protein, 70 aa, Zea mays
  unsure (1)..(70): unsure at all Xaa locations
  Clone ID: MRT4577_43142C.1.pep
SILTRAASEISFVASASLALLVSLIHSLAVFTXXFFGGGGPSXLXPFPFSSFLLFPLFFLFPLLLFLLSS

SEQ ID NO: 307096 - protein, 85 aa, Zea mays
  Clone ID: MRT4577_43143C.1.pep
SDYRRTQHEAFVAIFFSFEYMILATSTVSTFVKYIFYVSDMLMEGQWEKKAVYTFYLELISDLVHLSLYMLFFIVIFLNYGDRRP

SEQ ID NO: 307097 - protein, 61 aa, Zea mays
  Clone ID: MRT4577_43144C.1.pep
VSSSLDHVVASYCVITSIDGGGGVKETSQISSISRRAERPWTTPQGLMRHLGSCYLPGPPL

SEQ ID NO: 307098 - protein, 142 aa, Zea mays
  Clone ID: MRT4577_43145C.1.pep
MRKNLEAAQARPKSYHDKRRKPLQFEVGDFVYVKVSPTKGVQRFVIKGKLAPRYIGPYEIVEACGPMAYKLMLPPKMSGIHNVFHVSQLKKCVRLPTKIIAEPEVEIEPDLSNQDYPSKVLDCKERLTQTKSIKMYKIQWSN

SEQ ID NO: 307099 - protein, 60 aa, Zea mays
  Clone ID: MRT4577_43146C.1.pep
RLMSKTIVQHSQPISTGREETAYYLGSMMLGNRVGFWRMSGTVNLATVSSRGAGAGDSPM

SEQ ID NO: 307100 - protein, 78 aa, Zea mays
  Clone ID: MRT4577_43147C.1.pep
SDYRRTQHEAFVAIFFSFEYMILATSTVSTFVKYIFYVSDMLMEGQWEKKAVYTFYLELISDLVHLSLYMLFFIVIFL

SEQ ID NO: 307101 - protein, 98 aa, Zea mays
  Clone ID: MRT4577_43148C.1.pep
LRITVPPIPLTERLSPVPFRSRWCCTFPPLALWSVHRAPAPPPEPWYKSSHLTGLFSRLYHPMSNVNRDALHHGPSHRMQRRPCQCHSVNGGRLKTRR

SEQ ID NO: 307102 - protein, 192 aa, Zea mays
  unsure (1)..(192): unsure at all Xaa locations
  Clone ID: MRT4577_43149C.1.pep
MEGEVFCSLMLXLSLLKATATDTILRQWLQATIASLXLPAYLASATSSSCENSIXQPYRIQHAIAGGILTLSPWFLQQPSALLQKSXWTHSLAQYIXAQQLQLLVLRNLAGYSQLRESSINQLAALNSAAYRQRQLPFSQLGAANAQQFVTFNQLRALNSAGYXQQQQVPPFIQVCDVSPAGFMTQQQLMSF

SEQ ID NO: 307103 - protein, 74 aa, Zea mays
  Clone ID: MRT4577_4314C.1.pep
FFRCVFPSTVTCSWSICGLPATTTNKELTPYTSDISIIIPQAALTNVLVILTSLCFIEVIPRMSVLSSLTLVVI

SEQ ID NO: 307104 - protein, 98 aa, Zea mays
  Clone ID: MRT4577_43150C.1.pep
GIQKTCGFPGYLVGHVSRRKTPFMRAARPKERCGGQAGFTTHAWVRSRGFKPPSNACHPYLFLGGAKLNFLDDAVHPWEGQNLGGPNPNTLHEKQVPQ

SEQ ID NO: 307105 - protein, 121 aa, Zea mays
  Clone ID: MRT4577_43151C.1.pep
MACCFLFGKKAKQTTEGDEDLHSVKVFSYSELRKATQDFSGANKIGEGGFGSVFRGVLKDGTVVAVKVLSATSRQGIREFLTELTAISDIKHENLVTLIGCCAESSRRILVYNYLENNSLA

SEQ ID NO: 307106 - protein, 59 aa, Zea mays
  Clone ID: MRT4577_43152C.1.pep
QTLKIASVKPISHPLHYKSIIYSVTSNNVPKSYKNLAIPFSDNHCIQLFCLCRVSFKCK

SEQ ID NO: 307107 - protein, 373 aa, Zea mays
  unsure (1)..(373): unsure at all Xaa locations
  Clone ID: MRT4577_43153C.1.pep
MACCFLFGKKAKQTTEGDEDLHSVKVFSYSELRKATQDFSGANKIGEGGFGSVFRGVLKDGTVVAVKVLSATSRQGIREFLTELTAISDIKHENLVTLIGCCAQGSRRILVYNYLENNSLAQTLLGSRHSNIRXNWHARARIAAXARGLAFLHEEIPPPIIHRDIKASNILLDKDLTPKISDFGLARLLPPNATHVSTRVAGTLGYLAPEYAIRGQVTKKSDIYSYGVLLLEIVSGRCNTNTRLPSEDQFLLERTWALYEQGRLEDIVDMDIGGDRDVEEACRFLKIGLLCTQDAMARRPNMTNVVRMLSGERRISVEKITRPAMISDFAELKVSSKERRPGEARSPTTAPTTKSFTTTEPFSSSETPTQSSM

SEQ ID NO: 307108 - protein, 78 aa, Zea mays
  Clone ID: MRT4577_43154C.1.pep
ARTWIRRPRERGGCIGADLKTTAAAGSSPTSSCSSKRLEGKVALVTGGATSIAEAIGRRCMEHGAQVCIADHQYEGGH

SEQ ID NO: 307109 - protein, 50 aa, Zea mays
  Clone ID: MRT4577_43155C.1.pep
HPILSRSHMQLTITVLVSQPPYHLTSHNNINIPTYSKFFNIIYINIFYKL

SEQ ID NO: 307110 - protein, 127 aa, Zea mays
  unsure (1)..(127): unsure at all Xaa locations
  Clone ID: MRT4577_43156C.1.pep
LSMLCESYLGNHVTVNSVASTVALAXDRYHAISLKSVSLKSAAENLYPVIRTEGFDYLKHNWPSLQTEILLHSCAPCXEQCNTGVKRHIVWAHLSYGRHTSCTWVRPRVLYTPILRSTNLCNQTVVV

SEQ ID NO: 307111 - protein, 58 aa, Zea mays
  Clone ID: MRT4577_43157C.1.pep
CAVGLAWPSSNVLWPEKLKLALVRVKGQIHPFNVSFIEVQLRKNRNPGNIYTWKLVAY

SEQ ID NO: 307112 - protein, 52 aa, Zea mays
  unsure (1)..(52): unsure at all Xaa locations
  Clone ID: MRT4577_43158C.1.pep
QTSSSVPSREPSTNRGSKYPQNDIGNEELDERQNKPRRXLRDELQPVKHLVR

SEQ ID NO: 307113 - protein, 242 aa, Zea mays
  unsure (1)..(242): unsure at all Xaa locations
  Clone ID: MRT4577_43159C.1.pep
MSVSNMVFFLLKKKKKKKKKKACFKCGKSKLFVENCPKNDVDEEKEKGEKVEKKFYKKKGEAHFGKEWDSDGSSFDSNDEGLATIAXHKYSLFPNKHHTSLMAKERNVCSRNTPKYTSSSXESSDDEEDYSKLFKGLDTTKIDKTNKLINVLNKKDMLLEKKEDLIYEEHDKFVSVENALALETKKNEILSKELSDCYSSINCLKSANDDLEAKIIKLNECLNINCEHVSXCIKCKDIDIDA

SEQ ID NO: 307114 - protein, 221 aa, Zea mays
  unsure (1)..(221): unsure at all Xaa locations
  Clone ID: MRT4577_4315C.1.pep
MSVGQLHTRRLLSHAAAAAAASSAGPPATEVQVPAAHAHAAAPFSSLNTMVITALSLLLCGLVVVLAVHAVVRCAFRVTRRVCYGQDEPHGGGGGADALAVAASXLPGRPQEEARAANXCPRGXYSREVELTGCGAAECAICLTEFVRGDRVRALPHCNHGFHVRCIDRWLAARQTCPTCRRAPFAANPSLSLPDSAEAPESVQLQARVESGAGQHQHETQ

SEQ ID NO: 307115 - protein, 68 aa, Zea mays
  Clone ID: MRT4577_43160C.1.pep
VQFMPGEPGHSIGGCSCSFWPRKLIPTSGERGNRQGGGGTTRVGTASSSERAWAVAEASGCWYTRGTL

SEQ ID NO: 307116 - protein, 101 aa, Zea mays
  unsure (1)..(101): unsure at all Xaa locations
  Clone ID: MRT4577_43161C.1.pep
RELVETNACVRAXGVDRAXVGISSDSLLDPRVAGAVCSAACLRGCPNIVDLYANLAAGEGVAFSELCEVHRANPRRAMAQLQSSGEAHDAPASAPSPTPSP

SEQ ID NO: 307117 - protein, 44 aa, Zea mays
  Clone ID: MRT4577_43162C.1.pep
GDLAQIGLVSIFSFLSFFVDIFMYQFKSGLNFQFMFKGANKIPT

SEQ ID NO: 307118 - protein, 44 aa, Zea mays
  Clone ID: MRT4577_43163C.1.pep
FQVMFYSKGITYYHSGEGEPFQSSHINLTNSSLRLGAFFSPRGT

SEQ ID NO: 307119 - protein, 68 aa, Zea mays
  Clone ID: MRT4577_43164C.1.pep
EPDHCESNTPPGSLTAFVMRGCPPMGLVLGKEQNHPQVYIPSPEGRFRGTKVLLADFFSFKFFFPFKV

SEQ ID NO: 307120 - protein, 183 aa, Zea mays
  unsure (1)..(183): unsure at all Xaa locations
  Clone ID: MRT4577_43165C.1.pep
MRRLHMRDTSRLPAIQCGNACWYLECLKHGIQADGSNGPRXTIVGGEDAINTXLRETGAGKHDRRSWILMTCETTAIDDVRTGTYXDSLAPESYHCQEDEADNFARGHYTIRKEXVDRCLDRIRKLAHNCTGLQGLPLSSDAGXEGTGSGVXSLLLERLAVXYGKKAKLXFPVYPSPQAFTSG

SEQ ID NO: 307121 - protein, 46 aa, Zea mays
  Clone ID: MRT4577_43166C.1.pep
RGSFPSSIDAAAVIPCRLSHAGAETFSSVRHTGRRAQGSHYRYAQV

SEQ ID NO: 307122 - protein, 107 aa, Zea mays
  unsure (1)..(107): unsure at all Xaa locations
  Clone ID: MRT4577_43167C.1.pep
MIAMGAGEKGLSPAPKAPTQHTITNILAPYNEYSKVNDMLSNTSLAYDMNRRQTITALAVANSGMWGLDTLAPGYXIRHILXLHVLLDYYCSNKLKKLAQGSTDFLL

SEQ ID NO: 307123 - protein, 39 aa, Zea mays
  Clone ID: MRT4577_43168C.1.pep
WCERIVGCSHPVFAQSRWCPRKPLSKNSRPCTSELTDDK

SEQ ID NO: 307124 - protein, 90 aa, Zea mays
  Clone ID: MRT4577_43169C.1.pep
TWVQLAIRTPNKQRNGIPMGSTHALDQNDTYNPVTVKLTFGEPDRLLLINMQSISCTRWCGHRRPAGGVPSLLQLMDGVHVHGLSEGAFL

SEQ ID NO: 307125 - protein, 94 aa, Zea mays
  Clone ID: MRT4577_4316C.1.pep
PFLFTGGKGNCFLYATDPSLPSRATNCLLPKYFPRGSGVPPGAGGLFRPIIHPFPFEGFPKIDPQNPSLESPDPNPYCRFSRLRRVLGPTKDPL

SEQ ID NO: 307126 - protein, 99 aa, Zea mays
  unsure (1)..(99): unsure at all Xaa locations
  Clone ID: MRT4577_43170C.1.pep
RTDRGXEFTAAEFTKYCAAEGIHRQHTAPYSPQQNGVIERRNGSVVATARSMLKAKGLPGWFWGEAVSTTVYMLNRYPTKSVDRMTPFXALHGKKPAVK

SEQ ID NO: 307127 - protein, 56 aa, Zea mays
  Clone ID: MRT4577_43171C.1.pep
GTCPRVVASPGGECRPRPRRSDRCVAPPCRRRRCRCSTRCRSRARRRRAGSGSRAE

SEQ ID NO: 307128 - protein, 122 aa, Zea mays
  unsure (1)..(122): unsure at all Xaa locations
  Clone ID: MRT4577_43172C.1.pep
MNGGCGLIVDPASGLPTALSSAAAAATAVSGGSTTENPILTALFKEMVRAMLSXSAAAVAPXLQGLEPPPPIAGVPMEGEKWRQQRIRELEVYLRRMDLLQDQARAALEELRSAPHAGGMNT

SEQ ID NO: 307129 - protein, 74 aa, Zea mays
  Clone ID: MRT4577_43173C.1.pep
FTREFIIGHRWIFCWSLFHQILTINDNHVFILILSRCVQLVYVFFLRNKSVFRLFQSITSLVRNRCTHSLFSDA

SEQ ID NO: 307130 - protein, 60 aa, Zea mays
  Clone ID: MRT4577_43174C.1.pep
RPLDLWPLSKAPALPPESHGQYGLSECKCLSHISQCALVLFPLQLGSACFSEPVGAVFKT

SEQ ID NO: 307131 - protein, 83 aa, Zea mays
  Clone ID: MRT4577_43175C.1.pep
MNHPVWLGMVYCPFDPFAPPEYFQLKMTVYTNNDVYSTGPNQNGVTMTERSNMFTTCVFSWTVADGTTSDANIFHQLQGTSVQ

SEQ ID NO: 307132 - protein, 134 aa, Zea mays
  Clone ID: MRT4577_43176C.1.pep
MSGGSTKREMETGDKATSHGKAPSRESDAKGREESPPRIKSHRSGDKKKEMKKVVYYKTDSSSPSTSGSDDASVTFKRHERKKFSKTPLRYPRISKRAPLLSIPLGKPLYFDGEDYCMWSDKMRHHLTSLHASI

SEQ ID NO: 307133 - protein, 120 aa, Zea mays
  Clone ID: MRT4577_43177C.1.pep
DYSQNVDHPANQLSMSMFPSTVRLSECTLQGRCTACHEIPARPGLAMLVMAEVGGPPPTRSISRLHPVIFVLAGSPKMTCRRDYGILHNPKRHFYVAIKILSCSTTRFQHAPLGKGRFPS

SEQ ID NO: 307134 - protein, 804 aa, Zea mays
  unsure (1)..(804): unsure at all Xaa locations
  Clone ID: MRT4577_43178C.1.pep
MANNRRRKNFIRSLVRDDRLLTSQEDKLHEAHHHFTEAIGRRGERQRAVRWGNLGYSPFDLSDLDFLFNEDEIKNVVMGMHSEKAPGPDGFIGIFYKSCFELIKDDLSSAIHDFYHHRCKNLNLVNEANIALLQKREGADRIDMFRPISLINSFMKILTKILANRLAPRMNEIVSTAQNAFIQKRSIHDNFLYVQKVIQKLHRNNQPALFVKLDISKAFDSINWAYLLEVLRALGFSQKWRNWIATILGSSSSKIIINGQQTNAIKHMRGVRQGDPLSPFLFILAMDPLQRMIDMAADAGLLGRVLPNKAKLRCSLYADDAGVFVRADKEDLKVLKRILEVFEGCSGLKINFNKTEIFPIRYPQTLWPDLMEVFPGKYSKFPGKYLGLPLLFRNVRRIDVQPLIDKINKRLVGWKGRLLSKAGRETLVKAVLSAQPIYHLTVFQAQKWLLNRIDKLRRSFLWKGNSPEFCNGGHCLINWSTTCLPKNKGGLGVLDLERFARALRLRWLWLRWKFKEKAWVGMHLPCDKADVDLFNASTIVTIGNGKMADFWGSSWIEGQAQKNIAPKLYKKARRKNISVFKALRNNYWMQFCAPFTREEEXLREFVLLWLSISSTQGLNDLEDTISWRWSADGEYSSSSAYKIQFTTNFCKIHINPIWKAKTEPKCRFFAWTLLHNKILTSDNLQKRGWPCNQNCSFCNVAPETAAHLCKDCPFAEEVWSMILTWADLRFLDGISKTGSLHTWWFRLRMLCSKQSRKSFDGLLIYFWWSLWLERNNRIFKGQQRTTEQVAQVVKELVGGVLACL

SEQ ID NO: 307135 - protein, 66 aa, Zea mays
  unsure (1)..(66): unsure at all Xaa locations
  Clone ID: MRT4577_43179C.1.pep
PXXPXPKRAFFENQWPPXLCSTQHHSNPLLELNKMLNEQGPKNFPKKNSFFLGPQNTKHGAHLPFT

SEQ ID NO: 307136 - protein, 82 aa, Zea mays
  Clone ID: MRT4577_4317C.1.pep
SSKVSHLCLNYTSPPYNQCINFVVPTGSRSQVQAAVLWTYLIANRYYDRILISLVQNLQPPHSGNPQRSRQHERVLSAVPPP

SEQ ID NO: 307137 - protein, 66 aa, Zea mays
  Clone ID: MRT4577_43180C.1.pep
IQVNSSQQHQPWRPDISIVLYCISHKTGEHSNALKSTNYKDDATSMHATARHSRFRGKLAVTCPPR

SEQ ID NO: 307138 - protein, 325 aa, Zea mays
  unsure (1)..(325): unsure at all Xaa locations
  Clone ID: MRT4577_43181C.1.pep
MATDASGGGKPSLLLSTLPKQLPSDFLKEITDGFSADRKLGQGGFGTVYKGFLQDGQAIAVKKLSDNSPVATEKQFKNEVGNLMAIQHENIVRLYGYCHELQKKVIEHNGRYILVDVVQSMLCYEYAPKGSLDKCIFDISSRPNWATCFKIIKGIXCQGLYFLHKGMDRPIVHLDLQPANILLDDNMVPKIADFGLSRLFGEEQTRINTINVVGAKGYMAPEYLYRGEISTRSDIYSLGVLIMEITTGQKNSPNDKDMCARNFINQVCQTWTDEHMASKYSSLDADSLQQVKACIETGLKCVDIDQKKRPSIVEIVDKLDGRLAL

SEQ ID NO: 307139 - protein, 81 aa, Zea mays
  Clone ID: MRT4577_43182C.1.pep
GCCCTHGREDKSDVTGHTSPGESTHAGYQGDRLRHNWRDPLIVARPEHQPEQIVLASMLETRTHTHSVLLSWSGIHAWRVF

SEQ ID NO: 307140 - protein, 242 aa, Zea mays
  unsure (1)..(242): unsure at all Xaa locations
  Clone ID: MRT4577_43183C.1.pep
MAPLLLLFLLGGLCALLSLATSSRASAKKCDDVKSNGNCGDSGEEARCRDDCAPEETQQQGKMQARPDPEKDLGIVFSTFDHDGDGFITAVELEESLRRLGIAVSADEAAAMVTRVDANSDGLIDIHEFRELYDSIPKKRKHQHPAAGGXAGQQGRCRXGDDEEAEEERDLREAFDVFDGNKDGLISAEELGTVLGSLGLRRQGNARTAVADCRDMIRLVDSDGDGMVSFEEFKRMMAVVKA

SEQ ID NO: 307141 - protein, 97 aa, Zea mays
  unsure (1)..(97): unsure at all Xaa locations
  Clone ID: MRT4577_43184C.1.pep
PTKTLFCPPTPGSXLSETITTARLLSSTCLLISILTHFSISSSSTPLSISLIPDFHVPHSIMWMHFTTSNPNSLARLYNFYLMACLHSQIQFSSHAS

SEQ ID NO: 307142 - protein, 83 aa, Zea mays
  unsure (1)..(83): unsure at all Xaa locations
  Clone ID: MRT4577_43185C.1.pep
MFDVTRLPYVALDVLCVLLAGMPFAILTSRHTLFQRGVFCNDEXSITYPXKEDTIPYALLGGIIIPFRIIGIMLGRTMSVYCN

SEQ ID NO: 307143 - protein, 61 aa, Zea mays
  Clone ID: MRT4577_43186C.1.pep
RGQCQTRRLGRERLGTHRSHKGVRFHSYGRKTRRYLRVRSLGNTRRERNIRAAQYGKIRLY

SEQ ID NO: 307144 - protein, 39 aa, Zea mays
  Clone ID: MRT4577_43187C.1.pep
LAGALTLIFHRIAAFVCNNGSSLLKRCMDEFVAYDSKLP

SEQ ID NO: 307145 - protein, 67 aa, Zea mays
  Clone ID: MRT4577_43188C.1.pep
KGGLLLQFNLPVCQVAPESLKGETKPFWGQNSFFQEAGFFPSFYLGNLVPVKLPMGLSGEWSPFNAG

SEQ ID NO: 307146 - protein, 50 aa, Zea mays
  Clone ID: MRT4577_43189C.1.pep
WWVSFIYISQSRSQYKPIKPTIMQSVGGCLLPARINLHGGRPDRSRLKQR

SEQ ID NO: 307147 - protein, 70 aa, Zea mays
  Clone ID: MRT4577_4318C.1.pep
RNKDYKQRMLSVFSSPLMVSSYIASSSQESREFFTLCPDENIYHHTIQFFKYKKKQILEYAKTITVNIYV

SEQ ID NO: 307148 - protein, 105 aa, Zea mays
  Clone ID: MRT4577_43190C.1.pep
AAASTSTDSSSDEDVANIAVNKGLLFPDVGHKCFLANDSKKKKVHSRDNPKYTTSDDAGSSSDNDDDLTLFFVNLTKEQKNKINELIETINEKDDILECQEDLLV

SEQ ID NO: 307149 - protein, 98 aa, Zea mays
  unsure (1)..(98): unsure at all Xaa locations
  Clone ID: MRT4577_43191C.1.pep
LIPRLSNHPKREIPLELLRKQXCKTRANESHIKVRELXMHSMRALYLLXPIDEEEADGVYYGFSARHRNDAHRRIGLASLEWRVRSGTKERLIREHLP

SEQ ID NO: 307150 - protein, 75 aa, Zea mays
  Clone ID: MRT4577_43192C.1.pep
GWEVANIAVKVWVTTKTGVNDSPITGGFHFPFRVGKCLERSIVRAFLDLHPVVKGGFSSKGLSLVNARFFPLRSF

SEQ ID NO: 307151 - protein, 105 aa, Zea mays
  Clone ID: MRT4577_43193C.1.pep
TLTHYYRWSSVSLLYSWGRSFLTYCGTCGWHSPPGLRHDKTVVLGMKEYVRVQDSALIQYGAPDHSVHPRFLFVYIFAMTGPTRVVSIICNSPLVVLWRCDECSS

SEQ ID NO: 307152 - protein, 138 aa, Zea mays
  unsure (1)..(138): unsure at all Xaa locations
  Clone ID: MRT4577_43194C.1.pep
AALLPLLALGSSIPLQSPSQEHATRATGRKGKNMAAANGDACXARRRGAXPTNPMVTPLLTDLYQFTMAYAYWKAGKHLDRAVLALSPSSSPLLTPRASFVSSILSLDLGCQFTLNLHSICGISLHLPPGSSPRFVVC

SEQ ID NO: 307153 - protein, 109 aa, Zea mays
  Clone ID: MRT4577_43195C.1.pep
RVQAFFFFFFLFFFFFFFFFYFSFCSFLWLNPTTRAAERGKSNPRADLGRGTDLGATWGKMMAKHISREKRSPDQKSKNQRSRKNKLKNLGGLRSTPPYINGKPLTPPF

SEQ ID NO: 307154 - protein, 81 aa, Zea mays
  Clone ID: MRT4577_43196C.1.pep
GVAPPPGPASGRGWPPPNWTRRPCPRTSRPRLSRRSGSGCSRNSRGGRRRPRSRPGSRRSSCSRRLAKRFLEFQMPLLPRR

SEQ ID NO: 307155 - protein, 77 aa, Zea mays
  Clone ID: MRT4577_43197C.1.pep
SSGRHRKVLSYHSFVVAKTATVAACESQSINFFHKQAAQSSLIYNYQLFQPRTTNQSSLQPISRTRCHPATLRCYHC

SEQ ID NO: 307156 - protein, 66 aa, Zea mays
  Clone ID: MRT4577_43198C.1.pep
LPLIRLRIPKVLPHGDQEQEDRYAREAHPPSSPFLHFNFDLTILSTFFQAPCIFIDTYPPDSVHHT

SEQ ID NO: 307157 - protein, 108 aa, Zea mays
  unsure (1)..(108): unsure at all Xaa locations
  Clone ID: MRT4577_43199C.1.pep
NETLKKRTRSAAPCVWENRWRERSSSXLASIEQEPPRCNGTQCCMGALRLLPQLAGGSNILKHDRCXHGHGDSLPDKAGSAVATLRLPDSAGAHNVVTVXTLTSPYND

SEQ ID NO: 307158 - protein, 219 aa, Zea mays
  unsure (1)..(219): unsure at all Xaa locations
  Clone ID: MRT4577_4319C.1.pep
MSSPWSPMSLEEEEEIQELDAEEQQDGEQPQQGDGLQQGSTAEARAQQTGKKRARSVANSSTKSEAKIKVEESAPGAATGVILSLRESLQDCKQSLASCQVELEAAKSEIEKWHSAFQSIPAVPSGTSPDPVSVVSYLSNLKSSEESLKEQLEKAKKREAAFIVTFANREQEIAELKSAVRDLKTQLRPPSMQTRRLLLDPAIHEEFTRXKNLVEEKEK

SEQ ID NO: 307159 - protein, 493 aa, Zea mays
  Clone ID: MRT4577_431C.1.pep
MDQPPNGFAAGGFFTHIDGQNRSPPSIIVIGGGISGIAAARALSTASFNVTLLESRDRLGGRVHTDYSFGCPIDMGASWLHGVCNENSLAPLIRMLGLRLYRTSGDNSVLYDHDLESYALFDKHGQQVPQEIVSKVGETFERILKETVIVRDEHANDMPLFQAIGIVLDRNPHMKLQGLEYEVLQWCICRLEAWFATDMDNISLKTWDQEHVLTGGHGLMVNGYDPVIRALAQGLDIHLNHRVTKIIQRYNKVIVCVEDGASFVADAAIVTVPLGVLKANIIKFEPELPKEKLSAIADLGVGIENKIALKFDTVFWPDVEVIGRVAPTSNACGYFLNLNKATGNPVLVCMVAGRFAYEIEKLSDEESVNFVMSQLRNMLPQATDPVQYLVSRWGSDPNSLGSYSCDLVGKPADLYERFCAPVGSLFFAGEAACIDHSGSVHGAYSSGIAAAEDCRRRLSAQLGISAGLFQVGKAAMREEMTAEAMVPFQISRL

SEQ ID NO: 307160 - protein, 88 aa, Zea mays
  Clone ID: MRT4577_43200C.1.pep
GRHIIVSICWRSQLLAPAAPVAGSPALLVAVSQGEFRKGSSTTSKSEGMGSSGAPASASASASMLRNKSSSSPTISMSSTSSSSSSRA

SEQ ID NO: 307161 - protein, 73 aa, Zea mays
  unsure (1)..(73): unsure at all Xaa locations
  Clone ID: MRT4577_43201C.1.pep
RGLELTLGDAMEMVDSMMDWRDRLCVVMCGVFIVXNAMYLARRVMDNWYHSYLAFHCAEEFARAQGLETVSNS

SEQ ID NO: 307162 - protein, 58 aa, Zea mays
  Clone ID: MRT4577_43202C.1.pep
EVNIVAWVINLNPPAPKRGIPGHVSVRRGTSYLGVRRGACLIRSRWLISLALSTLSLV

SEQ ID NO: 307163 - protein, 96 aa, Zea mays
  Clone ID: MRT4577_43203C.1.pep
NYMTSAVTTLTASQLARQDPQHREASLLTRGISLLLEHTRRTHAPSPGRIHTGTSRSIRAYHGPAGAICYAPLRARRPSRSTCTVPTPPPMARRRS

SEQ ID NO: 307164 - protein, 85 aa, Zea mays
  unsure (1)..(85): unsure at all Xaa locations
  Clone ID: MRT4577_43204C.1.pep
GQHHRQGPQVQLRFWYVHVDRGAVVMXGAEEARGRLVLVIDLSPCRLVARETYRATRRYKLWVLSWCSCCSMVKLCCPVYRVLLA

SEQ ID NO: 307165 - protein, 44 aa, Zea mays
  Clone ID: MRT4577_43205C.1.pep
LRVKPFYMYFPFCLPAIILEIGMAPSVFVALSFDVVGFPADVSL

SEQ ID NO: 307166 - protein, 71 aa, Zea mays
  Clone ID: MRT4577_43206C.1.pep
KGRFLLWLELLLTTQFFTTCANHLFASRNKCNLFCTHCYTKPSSFCNYCRSSYHSTHPFNPVLCFHFTITF

SEQ ID NO: 307167 - protein, 118 aa, Zea mays
  Clone ID: MRT4577_43207C.1.pep
FGNCALQIGVAAGSPEDGNALNVDVQKFIQGSLYKSAMEFKKQSYLANLALYPGRSELPFLPANTQALILQPIGDKGIAIVGGDTIRGFTNIDQAWIAMIADKLDATLSKSSNAGLLI

SEQ ID NO: 307168 - protein, 83 aa, Zea mays
  Clone ID: MRT4577_43208C.1.pep
NERRMAVFHGAVLFLLLLLVASEVGTIDAKMGLAMPMHALIIEKAKHHETEKKEEKSTGNEESQCLLPRIQFEGFCFNKHRCS

SEQ ID NO: 307169 - protein, 130 aa, Zea mays
  Clone ID: MRT4577_43209C.1.pep
CVCSDKQSVSAYRGSFVQNSMIIFICFSLKTQIFLMRPILWGIPPVKGGGCLRRSALFQYRGRLWGHSQSFINQSTGGRRRETPKGWGLLLGMWTGYWKIHTHGGNVVAINKGHGLKTLGSHNMLLLLNK

SEQ ID NO: 307170 - protein, 76 aa, Zea mays
  Clone ID: MRT4577_4320C.1.pep
RQSIITDVHTTTLHVSSDVVRPVLLLITPVRPWMTVRDLPFPPPQTPWLLCFYPTTRCRVLQPGAHHLRCCQRHTR

SEQ ID NO: 307171 - protein, 112 aa, Zea mays
  unsure (1)..(112): unsure at all Xaa locations
  Clone ID: MRT4577_43210C.1.pep
PYRIQEAITAGILALSRLFVKQXSCVLQQLSVVHTLAQNIRAQQLQQLVLAKLVAXSRTVEXLAFNQLSSLNSDYYXHQQQLPCIQLPAAYPQRFLTFNHIATLNSTADLQK

SEQ ID NO: 307172 - protein, 122 aa, Zea mays
  unsure (1)..(122): unsure at all Xaa locations
  Clone ID: MRT4577_43211C.1.pep
NCAPPFRRRRIARREWGTTIGEEKSHINIEVVDHVDXNETTTTRHLIYKLGSTDXHAIVHAVMEAPEMNKRXLKYSYVLNKLNAEHERGITNDITLHKSKTTKYYCTAIDTTRHRDFIKNMI

SEQ ID NO: 307173 - protein, 100 aa, Zea mays
  Clone ID: MRT4577_43212C.1.pep
ASTIFILQWYLRLAKRGKSENGARAITIQHEQYRGTIHLFIGTGRSPSKITSVPLNTCLQVTKTNKALLVIFPSSLGLAEAIKLQHLALSSLLRVFALRI

SEQ ID NO: 307174 - protein, 45 aa, Zea mays
  Clone ID: MRT4577_43213C.1.pep
YHHEDVLLANGHTCSYYIIMKMCYWPMDTHVPIMSGFILTPPTTI

SEQ ID NO: 307175 - protein, 87 aa, Zea mays
  Clone ID: MRT4577_43214C.1.pep
KRLFFLKPKKILGRLTKPRFFLTQKNNPPGQFKWFLIPQFFCEEIPPPGVGVFKKGAQGRAGCQFFYRPWGFFRQPQGFKTLEKICH

SEQ ID NO: 307176 - protein, 44 aa, Zea mays
  Clone ID: MRT4577_43215C.1.pep
VSNFRFIFAPHAGVFFLSLFLKEGCSLGGWHTGLHQPVYKFSWN

SEQ ID NO: 307177 - protein, 74 aa, Zea mays
  Clone ID: MRT4577_43216C.1.pep
RRRAGRRAKGVGVRRSLGGTLVRGAGCGAGRVSTGAALCLRHGEEREIGRRRREIRDSGGQMARSAARLELERD

SEQ ID NO: 307178 - protein, 118 aa, Zea mays
  unsure (1)..(118): unsure at all Xaa locations
  Clone ID: MRT4577_43217C.1.pep
AVHQRHRVNCAHELRAVRRVLGPRLRRAVHGHATRARHLPARHEDLQVLRLPRWCCFQFQLLFYFLLFYIIFFIYIIYLFIFFLFYFIFFFFFYIYWGXVYLFIFLFFFLFFIFYNFF

SEQ ID NO: 307179 - protein, 172 aa, Zea mays
  Clone ID: MRT4577_43218C.1.pep
KFGSPKKVGERVVQKIPRARGKPGKNPSLFYPPLKKDPGRGKVPQPGVPVENPLFRGAKISVFLVKGGGVFPQKAPAPELGGKTGPKKFFGKGGPFGLIKPPFFTTHWGPQFGFGPPKGLSPNFQGFGKKKPGVGGKKIGPKGFWFCLNPPPTRLKVFFETRGVGFSLPCPP

SEQ ID NO: 307180 - protein, 482 aa, Zea mays
  unsure (1)..(482): unsure at all Xaa locations
  Clone ID: MRT4577_43219C.1.pep
MDPYKHRPSSGSNSSFWTTNSGAPVWNNNSALTVGQRGPILLEDYHLIEKLAQFDRERIPERVVHARGASAKGFFEVTHDVSHLTCADFLRAPGVQTPVIVRFSTVVHERGSPETLRDPRGFAVKFYTREGNFDLVGNNMPVFFIRDGMKFPDMVHAFKPNPKTNLQENWRIVDFFSHHPESLHMFTFLFDDVGIPLXTYTLINRDGKPHLVKFHWKPTCGVKCLLDNEAVTVGGTCHSHATKDLYDSIAAGNYPEWKLYIQTIDLDHEDKFDFDPLDVTKTWPEDIIPLQPVGRMVLNKNVDNFFAENEQIAFCPAIIVPGIHYSDDKLLQTRIFSYADTQRHRLGPNYLMLPVNAPKCAHHNNHHDGFMNFMHRDEEVNYFPSRFDPARHAEKVPIPPRVLTGCREKCIIQKENNFKQAGERYRSFDPARQDRFIQRWVDALTDPRVTHEHRTIWISYWSQCDAALGQKLASRLNLKPSM

SEQ ID NO: 307181 - protein, 376 aa, Zea mays
  Clone ID: MRT4577_4321C.1.pep
MSSPWSPLSIEEDEEIQELGADEQQVGEQLRQGDGQQQELTAEARAQETVKKRARSVSSSSTNPSNSRKSEGKIKVEESAPGAATGVILSLRESLQDCKQSLASCQVELEAAKSEIEKWHSAFQSIPAVPSGTIPNPVSVVSYLSTLKSSEGSLKEQLEKAKKREAAFIVTFAKREQEIAELKSAVRDLKTQLRPPSMQTRRLLLDPAIHEEFTRLKNLVEEKEKKIKELQDNVAAVNFTPSSKLGKMLMAKCRTLQEENEEIGAMASEGKIHELGMKIAVLKSQNNELRNQFDVLYKHMDGVTNDVERSNELVAILQEELEAKELEVTRLKEETLSQKEGTPEAPAPAPAPVEEGDGAGNDLKPASDPLQVKLES

SEQ ID NO: 307182 - protein, 84 aa, Zea mays
  Clone ID: MRT4577_43222C.1.pep
MRWSVQEMRGVQETLQNKELAVLSMSLFFACLALFKLACDRVFCLFAGKGREEPDAEEHTRSSRAWMLVLASSSFTTLIVLLYN

SEQ ID NO: 307183 - protein, 413 aa, Zea mays
  Clone ID: MRT4577_43223C.1.pep
PDHAWQVVTMDFISGLPVSHKYNSDAWADAWLDAWAHFLALAHPFTALTVAKLYLSDIYKLHGLPSSIVSDRDPIFTSKLWQELFRLAGTKLCMSSAYHPQSDGQTERVNQCLEAYLRCFVHSCPKQWYSWLSLAEFWYNTCYHTALGKSPFEVLYGHAPSQLGLDTVDQCSVPDLQTWLLGHQQMLQQVKFHLQRAQDRMKKQADKGRVERTYTVGDQVFLKLQPFCQRSVADRPVSKLAFRFFGPFEVIEQINPVAYELALPSGSAIHPVFHVSQLKSANGVRVPSTDSLPDIFTGLQVPEEVLESRLLRKGGKVISQLLIKWSNWPVSLSTWEDEEAIKQKFPQAPAWGQAVVKEGGNVSRADHMDHAEERTQAVQQKAQTEGVKEDNQSPRSRRVPKPNTKYIGAEWRV

SEQ ID NO: 307184 - protein, 78 aa, Zea mays
  unsure (1)..(78): unsure at all Xaa locations
  Clone ID: MRT4577_43224C.1.pep
RLGESVISAPDALPNSAIGVEAYEKRPGITCSVAXMLXDLHGRGWRTVSTAQIDSLMDVGRGTNVNELSSKELDCIWM

SEQ ID NO: 307185 - protein, 29 aa, Zea mays
  Clone ID: MRT4577_43225C.1.pep
SNPCGSTKDPLISDPAHATRRLFWATLTI

SEQ ID NO: 307186 - protein, 190 aa, Zea mays
  Clone ID: MRT4577_43226C.1.pep
MAAAARAIICELAPQKVSSTAPKKRDAGTKVVLQPRLCTLRSYGAGSGVVTRRILTGEEDGSGAADSGGSSASPFFASLANYIESSRKSQDFETISGRLAMVAFAAAVAVETTTGSSLFKKLDTMEIEEAAGVCVAVVACAAAFAWASRARNRIGQMFTLGCNAFVDSLIDNIVEALFSEGELQDWSDDM

SEQ ID NO: 307187 - protein, 620 aa, Zea mays
  Clone ID: MRT4577_43227C.1.pep
MEVDRKKNLQIGSKGKEVQSKNPRREEPLASSEVDMDEPDAPESGDMIVDGNNGCSRESPLQPMDSKNSKGCAVKPTSVSSDFGEELDLDLGGEKSETQQERKLSRQDRVELCRSFQLAVSSHDWESAEGLVGMADAQGLNDVLCVAVDAIWFLSDRDELLAIVGLIKRVVSEGAKDFTRAALRTSFLASCVSACRGRSTSLADAVSFMGQKLHERLQESQGDEVLKAEASAKVHRFTEWALKCIGLHSRVRENRGKGNHDTVIEVQLQLSAFKIFLDLADNELTGKDFTEAFDAACFPLTLFSTTFDQGWASGISAAAVQGLLELLVEGGADNVNQCFLEAARYGSTELVRILLQVAQRNSLDIDVDLALGFAAHYGKIETMGCLVEEGNAIGFLGPLMRAAERGCLQVVEWFVNHGCREMELCLALTAATSNSQIAVAAYLLPLVPQHVLAPLSIEIIKAAGERTTGSLQGVDFLLRSDFLNDPAATYAVADSIARCTDEAVDAKLRSFMNEHWSEAAFCAGFESAQQHFVNFMRIMERGESPIRLGDLPLELVIAMAYLPLYKECMNSNGRLLPQRLRGQLVEAASRLEDRQVERDSQSRELLAILEHHIPRFMIQT

SEQ ID NO: 307188 - protein, 158 aa, Zea mays
  unsure (1)..(158): unsure at all Xaa locations
  Clone ID: MRT4577_43228C.1.pep
QKKHAVAVAVATAAAADSVVASAHAGSAVALLSSRALPRFSPSPCLFYDASAVMIQATFIGYLARSALFALWVIVKLQALVRWQLVRRLSNSTLRCMLALLXAFPSVGTAHAGPPATRPPXPTPSIPLHSSHHPKHRRCYEMVRSCEDNFLIVEVDVV

SEQ ID NO: 307189 - protein, 43 aa, Zea mays
  Clone ID: MRT4577_43229C.1.pep
KLPAEVATHSCGGGPNGPWLAPATLPPKKRKKVLQICLILMLC

SEQ ID NO: 307190 - protein, 112 aa, Zea mays
  Clone ID: MRT4577_4322C.1.pep
SPTGGLVQLGFPQSFFPWPRFRAILAPFGLAPSPLFFVGFLPETLWFFNPPFCPFFGGPVLPEPNPSIGSPQFGPFCPPGRGAVKPFIWPPCSPAGKIFGLGLGLAPTPLFL

SEQ ID NO: 307191 - protein, 41 aa, Zea mays
  Clone ID: MRT4577_43230C.1.pep
RHTAGGSTTRLYLIYHLLARYMLSTHDGGYHRHHQFSCFEL

SEQ ID NO: 307192 - protein, 691 aa, Zea mays
  Clone ID: MRT4577_43231C.1.pep
MEASAGSSPPHSQENPPEHGGDMGGAPAEEIEGEAADDFMFAEDTFPSLPDFPCLSSPSSSTFSSNSSSNSSSAYTNTAGRAGGEPSEPASAGEGFDALDDIDQLLDFASLSMPWDSEPFPGVSMMLENAMSAPPQPVGDGMSEEKAVPEGTTGGEEACMDASEGEELPRFFMEWLTSNRENISAEDLRGIRLRRSTIEAAAARLGGGRQGTMQLLKLILTWVQNHHLQRKRPRDVMEEEAGLHVQLPSPVANPPGYEFPAGGQDMAAGGGTSWMPHQQAFTPPAAYGGDAVYPSAAGQQYSFHQGPSTSSVVVNSQPFSPPPVGDMHGANMAWPQQYVPFPPPGASTGSYPMPQPFSPGFGGQYAGAGAGHLSVAPQRMAGVEASATKEARKKRMARQRRLSCLQQQRSQQLSLGQIQTSVHLQEPSPRSTHSGPVTPSAGGWGFWSPSSQQQVQNPLSKSNSSRAPPSSLEAAAAAPQTKPAPAGARQDDIHHRLAAASDKRQGAKADKNLRFLLQKVLKQSDVGSLGRIVLPKKEAEVHLPELKTRDGISIPMEDIGTSRVWNMRYRFWPNNKSRMYLLENTGEFVRSNELQEGDFIVIYSDVKSGKYLIRGVKVRPPPAQEQGSGSSGGGKHRPLCPAGPGRAAAAGAPEDAVVDGVSGACKGRSPEGVRRVRQQGAGAMSQMAVSI

SEQ ID NO: 307193 - protein, 165 aa, Zea mays
  unsure (1)..(165): unsure at all Xaa locations
  Clone ID: MRT4577_43232C.1.pep
GAPAQEKGPHKKEARKTPGPTEQXGKTRGGKPNNSEGKGPTAPPTGNTTQHEPEGKQEAARGTRPPPAKEPRTAPKPRGPQPRTQEKGPPPXRGRDKPRPKRXRVWAPPXGPPPAPAAQGGGRPGGPPPPAPPGXPPGPPPGAGGGAPPGRPRGGGRARAGGRGG

SEQ ID NO: 307194 - protein, 187 aa, Zea mays
  Clone ID: MRT4577_43233C.1.pep
MALVADDDAELKAKAKAKAEVYYGDEACQLCAQLLLREAGLPNGLLPLEDLTECGYVQETGYVWLKQGRRVDHVFRSLGRLVSYGAEITGYAEKGRIRKVKGIKTRELMLWVPVEEIAALGDPAAGGKLVCKSVAGITRTFPASAFHVPEKAAAAEEVKVDCARAPPATPVLVLMDRSGAPPVVKNN

SEQ ID NO: 307195 - protein, 59 aa, Zea mays
  Clone ID: MRT4577_43234C.1.pep
VIAHFETVQLHEQQQHRENTSIIVHCGPRHAQRLAPSMVGSRHRPKGQRRPRRLAYVGE

SEQ ID NO: 307196 - protein, 83 aa, Zea mays
  Clone ID: MRT4577_43235C.1.pep
DPYQHQLHTQKVGNPCCDHMHHRQRNVGGAAHVETFAKRDLLAARQRPATREAARRRASRAHQNMAVYLDLVPDGALSRRRPR

SEQ ID NO: 307197 - protein, 109 aa, Zea mays
  unsure (1)..(109): unsure at all Xaa locations
  Clone ID: MRT4577_43236C.1.pep
LFGAWFVLDSRTNPXHVDGXATRTARGNAPEPAXIVGDQIRAKGTDELIAMXLDPESIGLYTWLEERKTHTANMXYMXTIRRRITIRMKQSTPTYTYAATRCSELHDTS

SEQ ID NO: 307198 - protein, 542 aa, Zea mays
  Clone ID: MRT4577_43237C.1.pep
MEIETEAPGSEKARSWRANAAAAQQVSNTTKPDGGDQPMKEPAWKRFLAHVGPGFMVSLAYLDPGNLETDLQAGANHRYELLWVILIGLIFALVIQSLAANLGVVTGRHLAEICKSEYPKFVRICLWILAEVAVIAADIPEVIGTAFAFNLLFHIPVWVGVLITGSSTLLLLGLQRYGVRKLEFLISMLVFVMAACFFGELSFVKPPAVDVVKGLFIPRLKGDGATADAIALLGALVMPHNLFLHSALVLSRKTPSSVRGIKDACRFFLYESGFALFVALLINIAVISVSGTVCFSGNLSPEDADKCSDLSLDSSSFLLKNVLGRSSSIVYGVALLASGQSSTITGTYSGQYIMQGFLDIRMKKWLRNLMTRCIAIAPSLVVSIIGGSSGAGRLIIIASMILSFELPFALIPLLKFSSSSSKMGPHKNSIYIMVFSWLLGLMIIGINMYFLSTSFVGWLVHNSLPKYANVLVGLLVFPLMLVYVVAVIYLTFRKDTVVTFVADSAQLAVVDAEKANKATAAGDDDDRPVPFRQDLADIPLPE

SEQ ID NO: 307199 - protein, 97 aa, Zea mays
  Clone ID: MRT4577_43238C.1.pep
MLQQVLELAGNPARDNKKTRIVPGHIQLPVGNDEELTQLLGGAPIASGGVMPNIPQPLLPKKGGLSKASPVDDDDNLSCPLEKRPSPPSCFLGLAPR

SEQ ID NO: 307200 - protein, 80 aa, Zea mays
  Clone ID: MRT4577_43239C.1.pep
AAATLPVGGISLGGESRSCFLWCPGPCVRSHAPSPFFCLLGRNKHVRASEHRGRLSYKGILGDRSRREHEDQGSTWGAEK

SEQ ID NO: 307201 - protein, 206 aa, Zea mays
  Clone ID: MRT4577_4323C.1.pep
MLFLFYHKRGDCHNTKGEKNMCVVGAINNYTAALKDSSSPFDPTESLMFLAHFVGDVHQPLHCGHTDDLGGSTIVVHWYRRKTNLHHVWDVNVIETAMKDFYGNDQSTMIQAIQQNITEEWADEEKKWEACRSRTKTCADKYAAESAKLACTAYEGVDQDSTLEDDYFFAALPVVQKRIAQGGVRLAAILNRIFGGNSRSGFRAVD

SEQ ID NO: 307202 - protein, 38 aa, Zea mays
  Clone ID: MRT4577_43240C.1.pep
DHGRQSTIVSRPMFLSVYVAKMNVSNKYSDEKFQKNQG

SEQ ID NO: 307203 - protein, 63 aa, Zea mays
  Clone ID: MRT4577_43241C.1.pep
CTIHSIMGSYHDYLACIHDQRSVYVSSPRTLKPKRAKNFFLSVLLDICSIISIWNTKNLALKK

SEQ ID NO: 307204 - protein, 69 aa, Zea mays
  Clone ID: MRT4577_43242C.1.pep
ETGYTGQVTNPLAVCSERDLTDYFPYFATLDDIERFLIIAIRCHCLYHMDGTLRLGNCSIVHVLLLSDA

SEQ ID NO: 307205 - protein, 136 aa, Zea mays
  unsure (1)..(136): unsure at all Xaa locations
  Clone ID: MRT4577_43243C.1.pep
MLRLFRIRVGLSTSGLQEPSLLSHQAPFVHAQAQNIYAQQLQQLALXNLAVYSKQLHFLAFNQLAAXDSAAYLQQQLPFTHIAAAYRHQFVPFNQLTPLNSAAHLQQQQLPPFTQLADLSPVAYLTQQQLMPIYLH

SEQ ID NO: 307206 - protein, 61 aa, Zea mays
  Clone ID: MRT4577_43244C.1.pep
KHKAEVTTLTYCFSFTGNTHGNATQCSKLHTITCAYAPTIVLGSRGLDLGIHYGSLALYQI

SEQ ID NO: 307207 - protein, 60 aa, Zea mays
  Clone ID: MRT4577_43245C.1.pep
RSCTSMILPRMRICRRTKTSLASLFSIWLPLLSSRERIQFHIWSRTNPNGRAPAVLTAIV

SEQ ID NO: 307208 - protein, 107 aa, Zea mays
  Clone ID: MRT4577_43246C.1.pep
PAGPEYFDDAWVEQTWWADNCDCVVVQHEHPSRDVDYDDEDLAAPVTPCQSKDDEHQRDQASGDHGTTASLPLFLASTRPTPPNGEGVRDRQHLRAWQGNYIALWRP

SEQ ID NO: 307209 - protein, 82 aa, Zea mays
  unsure (1)..(82): unsure at all Xaa locations
  Clone ID: MRT4577_43247C.1.pep
RLRRLCSFVAGASVPLRWPGPLPCSLGLGVVFPSVAAGRRRAGVWGPWGGACRRWRSRRPPSSPWACALVXVPPWRRCGRRG

SEQ ID NO: 307210 - protein, 89 aa, Zea mays
  Clone ID: MRT4577_43248C.1.pep
PPRFLPGTGRGAGGAPNNAPNQGLSYGLANNPAYKQATLRRPTRPRRANPQTPMKRGTSNLNNGGGRHGHERPLQAPNLSPKADSTRRM

SEQ ID NO: 307211 - protein, 57 aa, Zea mays
  Clone ID: MRT4577_43249C.1.pep
RPQVQRRDSTRVPALCAVDRPTEPRSLVRQASHRPVCMAPPKRRAQYDTAMGATVVP

SEQ ID NO: 307212 - protein, 295 aa, Zea mays
  Clone ID: MRT4577_4324C.1.pep
MGLLLLLHVLLVAAAATAPAADAWGKEGHYMVCKIAEVIAESFLTKEASTAVKELLPGWAGGELAETCSWADTQRFRYRWSSPLHFADTPGDCEFDYARDCHNTKGEKNMCVVGAINNYTAALKDSSSPFDPTESLMFLAHFVGDVHQPLHCGHTDDLGGNTIVVHWYRRKTNLHHVWDVNVIETAMKDFYGNDQSTMIQAIQQNITEEWADEEKKWEACRSRTKTCADKYAAESAKLACTAYEGVDQDSTLEDDYFFAALPVVQKRIAQGGVRLAAILNRIFGGNSRSGFRAVD

SEQ ID NO: 307213 - protein, 64 aa, Zea mays
  Clone ID: MRT4577_43250C.1.pep
KLLLPNTKSSSNLVEFIMVMTNLYLYYTKNQFLWVHDFHRCRALPHFKKVEIMNKWDFEPWLLL

SEQ ID NO: 307214 - protein, 81 aa, Zea mays
  Clone ID: MRT4577_43252C.1.pep
RISIGPSRSQHSIPSSGSCWRSSVLLSGGLPELSSPMGLAAWQQLRSPARLSAALQLSVESSAELWLGRDDPGRTPIFRTR

SEQ ID NO: 307215 - protein, 60 aa, Zea mays
  Clone ID: MRT4577_43253C.1.pep
HGRNECLLFRRWPSWSCNKRPSPHFSGPLVHHCSLSTFSKWISDVVKHGDIRCIVCARAR

SEQ ID NO: 307216 - protein, 102 aa, Zea mays
  unsure (1)..(102): unsure at all Xaa locations
  Clone ID: MRT4577_43254C.1.pep
CPMAGANFRVWGRFFRAISHLEAFALCADELKFGAGQFRRLHSKQLXHTFRLYSHXWRTWAFCFIQAAWRRYLKRKAAKHCRRQEEMEANSIGVFPSRFMTT

SEQ ID NO: 307217 - protein, 69 aa, Zea mays
  Clone ID: MRT4577_43255C.1.pep
MPRYYEDKPKGGACAGVKEDLGACLLQSACVLQEGKSPRQCLKEGNCRALQYSFFECKRSMLDARSRFR

SEQ ID NO: 307218 - protein, 81 aa, Zea mays
  Clone ID: MRT4577_43256C.1.pep
YQLYAPTSHECCDCLSGSDPFSGTPSSETFPPFGSYHIEHVSHRVLTQRMQARNSSHVSCVKACDPWNLYLRSYHYSLHGP

SEQ ID NO: 307219 - protein, 75 aa, Zea mays
  unsure (1)..(75): unsure at all Xaa locations
  Clone ID: MRT4577_43257C.1.pep
IIXSPPPHGCRALTDLMPILWCSLARVLKVRCRLGVGLDPHDSQSLLSPGWKGYNGAPPPQTLRGHRLLPHHGHT

SEQ ID NO: 307220 - protein, 73 aa, Zea mays
  Clone ID: MRT4577_43258C.1.pep
SPAKSKTLDPPGGPESPQSRGGGSLISCPILGFITCSINRGLPLFYQGNPWLLHNLFWVVTLGKTHPPPTFFF

SEQ ID NO: 307221 - protein, 315 aa, Zea mays
  unsure (1)..(315): unsure at all Xaa locations
  Clone ID: MRT4577_43259C.1.pep
GRAITCLAARRGGFPPLTQLSSPPSAASSSSQSIADYTADAEWLVTRPPDAAFDYVEGFAFVNSDDPVNGWPSVPIPGGARFDPSLLPAGAGPVLYCLEVALYQYAHRPDDDDEEDQAAVTVSRMMAPLKHVRGLEFAADVGYVDFLSRVNRVEEEARRNGSWDAPHPWLNLFVSARDIADFDRAVIKGMLADGIDGPMLVYPMLKSKWDPNTSVALPEGEVFYLVALLRFCRSGGPAVDELVAQNGAILRACRANGYDYKAYFPSYRGEADWARHFGAARWRRFVDRKXARYDPLAILAPGQKIFPRVPASVAV

SEQ ID NO: 307222 - protein, 49 aa, Zea mays
  Clone ID: MRT4577_4325C.1.pep
MEGLVRLDYLEGGARFFCFFCLPTFLNFSFFFFFFFFKINFTKSKRKRG

SEQ ID NO: 307223 - protein, 44 aa, Zea mays
  Clone ID: MRT4577_43260C.1.pep
QSLMLYSQLVMEKVLSIWCGPSLFLIVNGPRTSRTPGRVGGCVG

SEQ ID NO: 307224 - protein, 87 aa, Zea mays
  Clone ID: MRT4577_43261C.1.pep
PNQTRTTRHQVEEVEGTNHGRRELQRRRAQGQRGGGRRREGRLIGGEQSAAGRSRRAPRRCRSAWTPSSTSQPAPGRPTPGSSMSTS

SEQ ID NO: 307225 - protein, 174 aa, Zea mays
  unsure (1)..(174): unsure at all Xaa locations
  Clone ID: MRT4577_43262C.1.pep
MRLWCIFLLPLLCLLAGVRSEDYSDVTVIVRGSETIASTSGEFVCATIDWWPPEKCNYDQCPWGRASVLNLDLTNPLLAKAIQAFSPLRIRVGGSLQDQVLYGTPNLGLPCDPFTKVSSGLFEFSQGCITLERWDDINDLFLNTGAVXTFGXLNALQGRHQIRKGVWGXGPWEF

SEQ ID NO: 307226 - protein, 117 aa, Zea mays
  Clone ID: MRT4577_43263C.1.pep
TTCQRTPRGLRSSLPQHTRGRGKGALSREDRLLPLRRKAYIDRLPSPPPSLPAPPHPSRGRHHRGRARAGQIEEGSGNLGEGWRGRQVLAMAGAEAVDSGEKRLIVLGYHQELCREM

SEQ ID NO: 307227 - protein, 392 aa, Zea mays
  Clone ID: MRT4577_43264C.1.pep
MATQRFTAALVACLLLLLALPARGRNITAILAGYKEYKLYNQYLSETKVCDEINSRQSTSMSVLVLSNDAMTTLASDAGDSLPAIKNALRLHSVLDYYDRKKVKKYGDESAATLYQATGDAASTTGNVKVVDQEDKNYGFSAATPGARICTVTKEVETHPFKFAILEVTAPIEFDGLFDTPSTDNLTRLLERAGCKVFASLAASTGVLKTYEAAMDKGLTLFAVNDDAFQAKDAPDVKAMSKANLTKLLQYHALPSYNTKTSLKSVKGPLRTLAAKADVTVVAKGDDVSLDTGKSRSRVASTVVDSVPFCLLTMDTLLVPPELYVGAPEAAPAPAPADAPQGSPPAADAPSVAADHADHKSKKPSASSAVAWRPAGALAAVAVCSVVLASLL

SEQ ID NO: 307228 - protein, 72 aa, Zea mays
  Clone ID: MRT4577_43265C.1.pep
KKKSVVVEVCRDVPAWPGRHLLEDGGHRRYFGLRTAERRVVEFECGSQREYELWTKGVARLLSVAVERKRLA

SEQ ID NO: 307229 - protein, 219 aa, Zea mays
  unsure (1)..(219): unsure at all Xaa locations
  Clone ID: MRT4577_43266C.1.pep
MAMDDGGDDFTFAAAQPPPSLVSAGGGGFIGPPLLYPVFGRPRSPPRAAPETATARVPLGRFLLVDRDPSQPPPPAPADDDDGDLDSVPAEMFCPWSXGGRPQPQRRPPRXRCKKSGSTGSVLRWRPRLAVGRSQSDGKEKFVFLSASSGGSXAPEPEGASXGSAVDVEGGAHHAWRHYANNTSEGGGARRQRSFLPYKQDLVGLFANAAVFRRSYLPF

SEQ ID NO: 307230 - protein, 173 aa, Zea mays
  unsure (1)..(173): unsure at all Xaa locations
  Clone ID: MRT4577_43267C.1.pep
VIPGLLAFPCTGCLSSSHPSTVAPKSEQXKPRRKKPVAEEPAAREXPPGKKPKGGEAGPRGXSAGKEGGEGKXAKKKGMKSVETYKIYIFXVLKQVHPDIGILSKAMSIMNSFINDIFXEKLAGEAAKLARFNKKPTITFREILTSVRLVLPGELAKHALSEGTKAVTKFTSS

SEQ ID NO: 307231 - protein, 40 aa, Zea mays
  Clone ID: MRT4577_43268C.1.pep
MTRCQKKYNPLIYENMRKKKKPNITKNKHGENKTNLYSQA

SEQ ID NO: 307232 - protein, 247 aa, Zea mays
  Clone ID: MRT4577_43269C.1.pep
NLFRLLGFCSEGSRRLLVYEHMPSGSLDRHLFDRDQQPGVLSWDARYQIALGVARGLDYLHEKCRDCIIHCDIKPENILLDDAFVPRVADFGLAKLMGRDFSRVLTTMRGTVGYLAPEWIAGTAVTTKADVFSYGMMLFEIISGRRNVGQRADGTVDFFPSTAVNRLLDGDVRSAVDSQLGGNADVAEVERACKVACWCVQDAESLRPSMGMVVQVLEGLVDVNAPPVPRSLMVLADPSKYAVEFFS

SEQ ID NO: 307233 - protein, 115 aa, Zea mays
  Clone ID: MRT4577_4326C.1.pep
TREFLMTINRPQCQICKSREIWMPRLQLPRRRCQIFEAFPRRCHVCKILSSEALHDRRLPAAPHDVPAAEPELPELPPLHRPFPGALVARARHRGRAVVVQQRGLRRGGRSRSRT

SEQ ID NO: 307234 - protein, 263 aa, Zea mays
  Clone ID: MRT4577_43270C.1.pep
MATAGAFHAGGFLLLPVRRSLRGPSPSPWSHFRTHFISSKPPPSTPLPPPVPPARLSPVGSAFGPPSRKTGAVGAGAGAGVVGWYLGLLDARPVLTKSVTAAVIFTAADVSSQMLTLGPEDSLDFLRTMRMASYGFLISGPSLHLWFNFISKLFPKKDVVNTLKKMFIGQAVYGPIINSVFFSYNAGLQGETVAEIIARLKRDLVPTIKSGLLYWPTCDFITFKFVPVHLQPLVSNSFSFLWTIYITYMASLKKADVEVAPST

SEQ ID NO: 307235 - protein, 489 aa, Zea mays
  Clone ID: MRT4577_43271C.1.pep
MSDESPPPAPAAEKSQPAEQAAGGWGGWGLSIFSEISRNAVEVAKSAIADIQQPPEQDTVPGSGEKDQEKEPEGEEEEEERRKAALDKLEKAGEDSILGQGLKAFDSSVETITTGTWQALGTAWRSGSLFVQKLENSASSLAETIQQGELPAKASAIAPTILETGKSFTAKGMEVLERVGKETMEFIVEETGMEVDKGSTGEGDQQTEEEQFEEVSFDRCFYIYGGPDQLEELEALSSHYALLFNRKKGKLNSDQKTYYDGKLKEIEQIFSLSTNADEDGPESDKGKKTESADTDTDAEMKKLCESSVRKAAKMAAGFTTALGGLSPNEIMKRTTSRLETIHSEGVHRLSEMCCLAVSQLLVLGKSVISSANKSKNEDGENDVKIDWPEDAISKAKIIRWKAQSISVDMEKVSTSFATGISDVAEAYAAAMQSALADKQDDLPNQKSLQEKVKSISIHLNSDQTSAVSKLQDALRYLAYVVVCASMPSV

SEQ ID NO: 307236 - protein, 176 aa, Zea mays
  unsure (1)..(176): unsure at all Xaa locations
  Clone ID: MRT4577_43272C.1.pep
MAGASNHGSLTDEWLPPPTPSPRSLVSSFLNEEFSPGPFSGLFSKHGANRPHDQSEKGRGALNSSEEFPTHAVKDPFQKGFSLEPNLFSANHISNSNGGLAERRAARAGFSVPKIDTSRVGSSAVIRSPVSIPPGLXPTTLLESPVFLYIKWHSFSNTGTLPFLTATNDKSTYHQL

SEQ ID NO: 307237 - protein, 95 aa, Zea mays
  Clone ID: MRT4577_43273C.1.pep
PMSKISAALYAHVMVLLPQVTLVFVFGWWEPPALARRPCIRELIRGPPVPPALREAGRPGLVSRAYVSTRVRDGEWAKRRGRWRRPVFSVARTGG

SEQ ID NO: 307238 - protein, 527 aa, Zea mays
  Clone ID: MRT4577_43274C.1.pep
MSDESPPPAPAAEKSQPAEQAAGGWGGWGLSIFSEISRNAVEVAKSAIADIQQPPEQDTVPGSGEKDQEKEPEGEEEEEERRKAALDKLEKAGEDSILGQASTCLATLSILLAFLGLVMPVIMGLKAFDSSVETITTGTWQALGTAWRSGSLFVQKLENSASSLAETIQQGELPAKASAIAPTILETGKSFTAKGMEVLERVGKETMEFIVEETGMEVDKGSTGEGDQQTEEEQFEEVSFDRCFYIYGGPDQLEELEALSSHYALLFNRKKGKLNSDQKTYYDGKLKEIEQIFSLSTNADEDGPESDKGKKTESADTDTDAEMKKLCEYSVRKAAKMAAGFTTALGGLSPNEIMKRTTSRLETIHSEGVHRLSEMCCLAVSQLLVLGKSVISSANKSKNEDGENDVKIDWPEDAISKAKIIRWKAQSISVDMEKVSTSFATGGEFQFSQTPPHLSVGISDVAEAYAAAMQSALADKQDDLPNQKSLQEKVKSISIHLNSDQTSAVSKLQDALRYLAYVVVCASMPSV

SEQ ID NO: 307239 - protein, 123 aa, Zea mays
  Clone ID: MRT4577_43275C.1.pep
MLKALFLTMLTLALVKSQDTEETITYTQCTDGYEWDPVRQQCKDIDECDIVPDACKGGMKCVNHYGGYLCLPKTAQIIVNNEQPQQETPAAEGAGAAANAAATSSTGTGGVAATGVAASGVVP

SEQ ID NO: 307240 - protein, 94 aa, Zea mays
  Clone ID: MRT4577_43276C.1.pep
VEKERTTVKGNKVNTSDDMQNGSLSPLPKAKACRAPRTSSLAINSCSNFQRSTGGNDEWEEAPYPNKVSPLAGMTNRKRSTHSNASSPPIAWVG

SEQ ID NO: 307241 - protein, 90 aa, Zea mays
  unsure (1)..(90): unsure at all Xaa locations
  Clone ID: MRT4577_43277C.1.pep
MASHTENDHEDEINPAHELLLDHSMKEKDTDRTDYYGLYLENQCRFALQVIEAVGYEMDANIYRIKLYALAXYSKAGHYDPKELALYMRN

SEQ ID NO: 307242 - protein, 108 aa, Zea mays
  unsure (1)..(108): unsure at all Xaa locations
  Clone ID: MRT4577_43278C.1.pep
LTTTGTKILCLLALVALXLMQQRSLYIAQWSVAPSXMMTQLAPPDSALGXEHPDTQGYRXQLAISCSVLQQPISNAQQQCLAHLTLHTIRTQQARHLLPALRQLAMVN

SEQ ID NO: 307243 - protein, 73 aa, Zea mays
  Clone ID: MRT4577_43279C.1.pep
EKKTGGPGFLAASHPTPGGIHFPSKTPLGPPGYELYIQKHWPAGQGIPAVHFHSPGGGSASFLTLPRFTGLAG

SEQ ID NO: 307244 - protein, 194 aa, Zea mays
  Clone ID: MRT4577_4327C.1.pep
QEAMDCVWLMIHSGQIMDCCTFSIILNACASVAALERGMELHAFGIRSHLESDVVVESALVDMYSKCGRVDYASKLFNSMTQRNEFSWNSMIYGYARHGLGRKAIEIFEEMLRSRESPDHVTFVIVLSACIHAGLVERGLEYFEMMPDHGILPQIEHYSCVIDLLGRACKIDKIKEYIQRMPIEPNALIWRTCH

SEQ ID NO: 307245 - protein, 104 aa, Zea mays
  Clone ID: MRT4577_43280C.1.pep
RCSSCCCCCALTRPARRARTTCTWRWGPPPSRRGAPCRGVRAARLAVRDQQHRTNWYSIPSECRGYMRHYMYGDLFRQDCTMVARTCRRLHHRGYSSRGDRKDG

SEQ ID NO: 307246 - protein, 119 aa, Zea mays
  Clone ID: MRT4577_43281C.1.pep
HPHALSFNTHTAQKNPIPGRGTQKQGEQNTYGVGLNFQPPKQGRTGTFFGLKNHPPPLAFFSPTKLVGGGNAPWGQPKKLPNRTEPPPTTGTFSTLTLFKPKPPFFFPPPLFSAPLGLL

SEQ ID NO: 307247 - protein, 138 aa, Zea mays
  unsure (1)..(138): unsure at all Xaa locations
  Clone ID: MRT4577_43282C.1.pep
IQQFGRIAGIRNGETETWGGTICTTTGLLTWVKELFRCKNRTYHIRTTRGRFLXAGTHSLSHRILDTEHGYSTTEGNEETFFSKTFLGGIGGPLLGGLGLLWCRRWGGFFAAFLGKNTRWMLGRTPPCPMGTPGKNFP

SEQ ID NO: 307248 - protein, 89 aa, Zea mays
  Clone ID: MRT4577_43283C.1.pep
DFGKTGNISEKFLGPPKSLGFFFRAGLVNHWGFFFKKGKNFWEKGGASCFKKSPFLLVDKKGGGEKPAGGGENGFPFLRGPLGMGVTQF

SEQ ID NO: 307249 - protein, 57 aa, Zea mays
  Clone ID: MRT4577_43284C.1.pep
WGKSIVLNKVVLIYLKSSIYINPCSKLLHIDSKTYVCMHMSGINIIRIVTYFLLNNS

SEQ ID NO: 307250 - protein, 123 aa, Zea mays
  Clone ID: MRT4577_43285C.1.pep
KAEKSWGFPSAWIKLGNNSIMISTFPVITGAEETRDNEISTVIQVVLVIKINREWPVDFGSLVGGGTEKGEEFVDRVTRATRNMPSFSRGCPSAGGDGRGAGGTERIATRRERYQQESSSCRR

SEQ ID NO: 307251 - protein, 50 aa, Zea mays
  Clone ID: MRT4577_43286C.1.pep
CVECDCLCNGGCLFIWCMVPFVCTICKSILEADFVVEPNSFEDDQQDTFV

SEQ ID NO: 307252 - protein, 90 aa, Zea mays
  Clone ID: MRT4577_43287C.1.pep
MALPFLWQQPPELWASEVSLCANDCGFPGMLAAQILCQIFFSASWSPSSPCLARPLPWCSCASLLWPSCASRTRGSRCPRWPLGRPPTML

SEQ ID NO: 307253 - protein, 55 aa, Zea mays
  Clone ID: MRT4577_43288C.1.pep
MPPADGPKRCAKVKTLRRECYWYNEYRQRPNPTITIPRPRYLPSCDGQQGELPLA

SEQ ID NO: 307254 - protein, 402 aa, Zea mays
  Clone ID: MRT4577_43289C.1.pep
MSWRRGGSGGDGGVSRRWAVLLCVGSFCLGLLFTNRMWTLPEASEIARPNANVEEGTVPIAAECGSKKVQEKQDYRDILQVQDSHHDVQTLDKTIASLETELSAARSLQESLLNGSPVAEEYKVSESIGRRKYLMVIGINTAFSSRKRRDSIRYTWMPQGEKRKKLEEEKGIIIRFVIGHSAISGGIVDRAIEAEDRKHGDFMRIDHVEGYLALSGKTKTYFATAVSLWDADFYVKVDDDVHVNIATLGQILSKHALKPRVYIGCMKSGPVLSEKGVRYYEPEHWKFGESGNKYFRHATGQLYAVSKDLATYISINKHILHKYINEDVSLGSWFIGLDVEHIDDRRLCCGTPPDCEWKAQAGNVCAASFDWRCSGICNSEGRIWEVHNKCAEGEKALWNATF

SEQ ID NO: 307255 - protein, 55 aa, Zea mays
  unsure (1)..(55): unsure at all Xaa locations
  Clone ID: MRT4577_4328C.1.pep
MPNCFATERFRKPCLKLFYYAVSDYIIWAWRICKELTNVGFFFKEGVXKATLRRN

SEQ ID NO: 307256 - protein, 80 aa, Zea mays
  Clone ID: MRT4577_43290C.1.pep
MAQLQNILLQGVRTGVVPTGELVKLQRRLLAFQLLVQTGLLLQLLLLMVSGMLPLLLQQPPDGKKALLLSRLLPLTGVKE

SEQ ID NO: 307257 - protein, 136 aa, Zea mays
  Clone ID: MRT4577_43291C.1.pep
RQKAQKNKIQNLGRARAFSKTNPLRALTSQKRQKLRGARTLTNYRGGLTGGRKKQTTTKNGGKADGTKKPPSYLDKPPGKNNGSTPQMPQGGGTATTNTKKVLEKEGGGEISGGFFGPGDDGTMGKGNVSPQGTPT

SEQ ID NO: 307258 - protein, 77 aa, Zea mays
  unsure (1)..(77): unsure at all Xaa locations
  Clone ID: MRT4577_43292C.1.pep
IILDPPIRGPSVREGGRPIATNKIGINGFGRNGRLVARVALQSDHVXIVAXNKPLIRTDYMTYMFKYHTGHGQWKHH

SEQ ID NO: 307259 - protein, 95 aa, Zea mays
  unsure (1)..(95): unsure at all Xaa locations
  Clone ID: MRT4577_43293C.1.pep
LHTLLNPCDELRVDSKDFEVNVLMKIIDASTIHRVVTVDKNPDDHPYLMKFYQSXAPKAILEMNYCTGPYDYLKTAYSADAAEFKDKEIKFLIGD

SEQ ID NO: 307260 - protein, 86 aa, Zea mays
  Clone ID: MRT4577_43294C.1.pep
TGDQENFSCRRVARRGGITLPATTGQGYDLRSRGPPTLGNTALDMSCPSTFLCSVCHGRRHGMRIRDERSRRSFTMHIQKVCLSWL

SEQ ID NO: 307261 - protein, 79 aa, Zea mays
  unsure (1)..(79): unsure at all Xaa locations
  Clone ID: MRT4577_43295C.1.pep
MPGMDALRAATLLATLFLVHAAAAHPPAVAADAMTPTDYRRLVLPDTPMPQAILYLLTTSTAEERSRKDTXTSNGFQRP

SEQ ID NO: 307262 - protein, 55 aa, Zea mays
  Clone ID: MRT4577_43296C.1.pep
GAQAGPLCYCVKQSQHKSDCRMVAHFIRASLVEVGGPPSAQVSYRILPLSWQDGL

SEQ ID NO: 307263 - protein, 199 aa, Zea mays
  Clone ID: MRT4577_43297C.1.pep
KRRKLRRRQQMQALLAIQQQQQQFGQEGSGSDTMVSQAYSPRNKNPESLGSSIVIDENANKVFSPELDTKTRLCIRDSLLRLAHSAAERQIDGDRSSTNKTNKDEDEASEDAFTRRTRSPTKEEETITNPTDRIVAYLLFHRHCSQVAAATKEEIISSTPLTLEPELKVPLGTTMVLSEDQLLSEDQRDEQKNVLQPSQ

SEQ ID NO: 307264 - protein, 78 aa, Zea mays
  Clone ID: MRT4577_43298C.1.pep
MVFKPPPNRKSWGKGYPSFWKTKKAPNGETLYLPQGNCFRKKKKKKKKKKKKKKKKKKKKKKKKKKKKKKKKKKKKKK

SEQ ID NO: 307265 - protein, 139 aa, Zea mays
  Clone ID: MRT4577_43299C.1.pep
IDMESWPDLPSLNPTLDRNYSDDNIASTYLDFCAATSLQEVTGNSTEQLDGKSEVFGNDQEEKSNSFLDCDWGNIGDFDDFDRLFSHSDSIFGNEIVANDSDFLSASSNLMDTAVLSIPIPVCEYRTLNFAVFSTFFSL

SEQ ID NO: 307266 - protein, 132 aa, Zea mays
  unsure (1)..(132): unsure at all Xaa locations
  Clone ID: MRT4577_4329C.1.pep
DLRRATMRGISTTTXFYMLSGCLGYAAFGNATWRMILSRFGIYKPFWIVDFDNACIVVHLVGGFQVFCQPLFAAVDGAVAERYPRSTREYCAAGLNVFQLVWCTEFVAVIKLVAVLMPLINRILGILRRIAF

SEQ ID NO: 307267 - protein, 81 aa, Zea mays
  Clone ID: MRT4577_432C.1.pep
GRPVASPQVREAHTVYLKEAACPRGPAAPCPDPGCRGGSSLEEAGSQPAQPRSGAAGVLGPGQSGRQGGRDRLRCSALLCS

SEQ ID NO: 307268 - protein, 531 aa, Zea mays
  Clone ID: MRT4577_43300C.1.pep
MFNWNDEQQQAGDAIWAEFNDSGDHIVPYPKGVEDSTIVSARDLKNNEEEVASIAGISEHSTGVQTGLQVMEKQTANQTCAHFSATQIDMESWPDLPSLNPTLDRNYSDDNIASTYLAFSAEPSLQKVTGNATGQIDGESEVFGNDQEEKSNSFLDCDWGNIGRFDDFDRLFSNSDSIFGNGIVASDNDFLSASSNLMDNAVQSIPIPQLPLNKRPSSDRGPSLVLTKEISSGVTITKQENKVEVHKRPARSRRKPEERGKSKISSSASGFSPSKLENSSSNLQAPMQHVQTPQYALFQDSKKIGKVQHANQFMFPEYGYPAYPFPTIPLVSNIQADGYQTKSAGTSCRTSEDSPKQSSSIEMSQDIPSRPLSMTPQEKIEKLRRRQQMQALIAIQRQQQQFGQQGSGSDPMVSQAYSLRNKNLDSLGSSIVIDENTNEIFSPEMIPTYHGPVHKSSAISDDPFIEEKIYYQLQDALDKLDTKTRLCIRDSLLRLAHSATERQIDGDRSSTNKTNKDEDEASEDAFTRRTR

SEQ ID NO: 307269 - protein, 109 aa, Zea mays
  Clone ID: MRT4577_43301C.1.pep
KKATFFLFHLIFFKTPLFFRFTGGALVTYKRGAGGLGTPMRAPWARPCKGGGTPPKTWAPQYRPGTIFWLGGLGKPGGGGPWFKLANPWRLWGMDPPKLWGEPWTGICF

SEQ ID NO: 307270 - protein, 105 aa, Zea mays
  unsure (1)..(105): unsure at all Xaa locations
  Clone ID: MRT4577_43302C.1.pep
QSRPILPNARGSGHNIRVGNXQHQHNNLPDQTRHLHQQLYTQSSSQPRHGQHHRSSLGHDDHLHPPRQPVLNDRHELRCLCQSKDIPYLRQTMTATTSPLLPKST

SEQ ID NO: 307271 - protein, 107 aa, Zea mays
  Clone ID: MRT4577_43303C.1.pep
GRLIPYLHQGIACKRNCPTDPPRANCLTIYALGDRCHPLAGSIQPLVNLCLHPNCNDRRILPLHEQLTSLYMKGLCFSLPCLAWTGNPPCFKECSYDYCYPAAGHAL

SEQ ID NO: 307272 - protein, 104 aa, Zea mays
  Clone ID: MRT4577_43304C.1.pep
TGEEATIRLRPLLMGPLWRAMAIDLHRTTPSLMCPAPRLPRETLSLTAALPGERPVSTFACVTPASSRNHLDTLNYMINTCGDGDLSLPTHDLHGCCKRLRLGI

SEQ ID NO: 307273 - protein, 95 aa, Zea mays
  Clone ID: MRT4577_43305C.1.pep
IIFFFFFFFFLCFFGVFRELPPKRGGAQFFWWEKKKSALWETFLKHHQKEKQKPKPDVPYLVITILKKKQKKHLFSGRLFFNKRKKLNLFGEVAC

SEQ ID NO: 307274 - protein, 70 aa, Zea mays
  Clone ID: MRT4577_43306C.1.pep
MEQLTELEKELVGEHNEKGNPKRKFDGSISIIGSVHMEASQAKGHVKGALVIIPLFGLAIMILPLVFSTL

SEQ ID NO: 307275 - protein, 80 aa, Zea mays
  Clone ID: MRT4577_43307C.1.pep
PSRFRQRFSILPGAPRHGYQLPLCTRGYSRLFAIGSWGLCRRGSVCLRSLPWVESSSRLRTVSQMSRPRHGGVPTKKKKH

SEQ ID NO: 307276 - protein, 45 aa, Zea mays
  Clone ID: MRT4577_43308C.1.pep
QLRPSQTTRTTSQPRERKPVSSRWPRPLWFFYFCVLFFFIFLFFF

SEQ ID NO: 307277 - protein, 67 aa, Zea mays
  Clone ID: MRT4577_43309C.1.pep
KKSYPERRNYLARWAQKWLYQLSKDTKTGDMVPSINRNYTYQTYGHDTYKHPFYPRIPNSGSVPTAE

SEQ ID NO: 307278 - protein, 86 aa, Zea mays
  Clone ID: MRT4577_4330C.1.pep
MDPHEMVVKNPYVHLSIPRAHLRSDSGQQSEEVPSSSSSSETQPLPPGACAPEPVGLLHTVEAPGPKAIKGAKGEQCQQTWQSPCN

SEQ ID NO: 307279 - protein, 78 aa, Zea mays
  unsure (1)..(78): unsure at all Xaa locations
  Clone ID: MRT4577_43310C.1.pep
VKDTRGTAYVVYEDIYEAVSAVDHLFGYNVVNRXVIVLYYQPFKMSKXSDLTKKDDEITRLQEKYGIGCKTPGPVSSD

SEQ ID NO: 307280 - protein, 179 aa, Zea mays
  Clone ID: MRT4577_43311C.1.pep
KDCYKLKRVDVETFGTSPSNTCCEKMQNNYQEYVKLKARVEVLQHSQRNLLGEELAPLSPSELDQLESQVDKTLKQIRSRKTQVLLDELCDLKRKEQMLQDANRVLKRKLHEFETEAASPPQLAWQGGGGMLSHDPPQPEHFFVALESNAPLQPTYHTMDMNQQPEPAPGDCYPPAWMA

SEQ ID NO: 307281 - protein, 96 aa, Zea mays
  Clone ID: MRT4577_43312C.1.pep
AHHNSIHRPILPHSRLFNSILSAVPTRSTQQHNAPNLHPQASNSSATLHQNVSRLPILCINPCEPTQQPRAPHEPQEPDEHAACAAQHHSPSPHAS

SEQ ID NO: 307282 - protein, 241 aa, Zea mays
  Clone ID: MRT4577_43313C.1.pep
MGRGKVVLQRIENKISRQVTFAKRRNGLLKKAYELSILCDAEVALVLFSHAGRLYQFSSSSDLLKTLERYQRHIYASADAAVPSSDEMQNNYQEYVKLKARVEVLQHSQRNLLGEELAPLSPSELDQLESQVDKTLKQIRSRKTQVLLDELCDLKRKEQMLQDANRVLKRKLHEFEAEAASPPQLAWQGGGGMLSHDPPQPEHFFVALESNAPLQPTYHTMDMNQQPEPAPGGCYPPAWMA

SEQ ID NO: 307283 - protein, 55 aa, Zea mays
  Clone ID: MRT4577_43314C.1.pep
IFNKILVHNDYIIYIYILSSTSMYYKFITNSTVRSTPQRQRLAILRLVGWPDRKG

SEQ ID NO: 307284 - protein, 240 aa, Zea mays
  Clone ID: MRT4577_43315C.1.pep
MGRGKVVLQRIENKISRQVTFAKRRNGLLKKAYELSILCDAEVALVLFSHAGRLYQFSSSSNLLKTLERYQRYIYASADAAVPSSDQMQNNYQEYVKLKARVEVLQHSQRNLLGEDLALLSPSELDQLENQVDKTLKQIRSRKTQVLLDELCDLKRKEQMLQDANRVLKRKLGEFEAEAASPPQLAWQGEGGMLSHDPPQPEHFFQALESNPCLQPTYHTMDMNQQPVPAPGGCYPAWMS

SEQ ID NO: 307285 - protein, 90 aa, Zea mays
  Clone ID: MRT4577_43316C.1.pep
SWHAFAAHNDDEVDDLDNALAGQNDQAYFASNAAAHASKKSSPRVTSEEVQKADDALDGSDHRRGTSVSARMDAQHKKHNIPILPITTIG

SEQ ID NO: 307286 - protein, 60 aa, Zea mays
  Clone ID: MRT4577_43317C.1.pep
GPVVGAFSGVLRVGQGGCPAGFFRWVSLGFFLTVFLGFVGRLCVFGGVHCGGVFVCVGVV

SEQ ID NO: 307287 - protein, 72 aa, Zea mays
  Clone ID: MRT4577_43318C.1.pep
SGSIALSRSCCHVDTRAKTSWLLALRTRFRHVVERTTPSVRASLRGPPRNYELEMVRCRVDGSLEHCDPLGF

SEQ ID NO: 307288 - protein, 134 aa, Zea mays
  unsure (1)..(134): unsure at all Xaa locations
  Clone ID: MRT4577_43319C.1.pep
LQVPDLYSVLPTRLKLADTAXHGGKNRGTSQESRGTGXXRGRGARRQGSRRRSPDGGDGNPGSSGGDEAGGGGGKAQHPTKRRGPPPERKAGPRGRPDHRRGQGPAPLRERGRRGEPRRTGRGRHRGAAEGGGG

SEQ ID NO: 307289 - protein, 77 aa, Zea mays
  Clone ID: MRT4577_4331C.1.pep
YLFLSVEYVICGPCVHFDIKFIFCGGGLTTVKSKLFFYLVLLMGLEMVSEIKSEHVNHTQVENLFISYRKYYAVIYV

SEQ ID NO: 307290 - protein, 100 aa, Zea mays
  Clone ID: MRT4577_43320C.1.pep
SLLLIIPLPISLILTAAVEHYSESAPASLQSVRLSSLVLRSTPRRLKTCRKSLDSLLTLGIRIIARGLVRMTDRVAERRLRLQVVQLLERRQVVHVLSAQ

SEQ ID NO: 307291 - protein, 204 aa, Zea mays
  unsure (1)..(204): unsure at all Xaa locations
  Clone ID: MRT4577_43321C.1.pep
KHLTEGRGETEQPRRRRRWSTRCRVALLDADXXGGEGGKKQQHLAARVLEESRKLXDNVAPAIFSRXVTXSMNVITQAFAGHLGDLELAAISIANTVVXGXNFGLMLGMASXXETLFGQAFGAKKFHMXGVYXQRSXIVLFMFPVLLLPMYXXXEDVLLLTGQPPELAAMAGKVFXLXIXXHFSFAFLFPLQXFLQFQNEELRQ

SEQ ID NO: 307292 - protein, 34 aa, Zea mays
  Clone ID: MRT4577_43322C.1.pep
LRRLGRVVCLYSLCRGGVLRPRLNPDERPIAIQS

SEQ ID NO: 307293 - protein, 169 aa, Zea mays
  Clone ID: MRT4577_43323C.1.pep
GSWTLVRLMDTLALPSWVRNPFSIFGTAVAATPWLSTDTSAFANTYIESRDTAGAYVFSAALPPGVRKEEVTVEVDEGNVLVITGQRSVSREERVGDRWHHVERCCASFLGRFHLPEDAAVDGVRAAMDAGMLTVTVPKVGAAAAAIAEKPNEAPPPVAVEAADGGPAC

SEQ ID NO: 307294 - protein, 117 aa, Zea mays
  unsure (1)..(117): unsure at all Xaa locations
  Clone ID: MRT4577_43324C.1.pep
MENKYPTASAEYSEAAEKARRKVRALIAEKRCAPLMLRLEWHSDXTYDAWSRTGGPCGTMKRPGELVHGADAGLDIAARMLEPIKEEFPTLSYADFYQLAGDVGVEVTGDADIPFHP

SEQ ID NO: 307295 - protein, 60 aa, Zea mays
  Clone ID: MRT4577_43325C.1.pep
PRGRPGRDSVLILWSVAIASSMLSATTVPLQQGGGLFELSGLRRSASLPMRRNATFDDLM

SEQ ID NO: 307296 - protein, 43 aa, Zea mays
  Clone ID: MRT4577_43326C.1.pep
VNKNYHINISLERIRLSTTHTIVEQKTQCPLGKEFKVFMEPCT

SEQ ID NO: 307297 - protein, 189 aa, Zea mays
  Clone ID: MRT4577_43327C.1.pep
AMLMQSKTASNQRAHPWRSTARSQGWTEEVGAAEENGEEAELEKSGSGGAASMGEQGWSAELGQGEPASRGAHCPGSFATPASEGERHGGRVGRATLGLRRGRSRGRGRARREPWHAWPWKRAGRERVEGRAWELGVAPRGGGRSTQGRAHLSASEQRGCELRGREEETPGEGPGRCPIGSRRESGIRG

SEQ ID NO: 307298 - protein, 115 aa, Zea mays
  Clone ID: MRT4577_43328C.1.pep
GSSRPAGIRITHKPGPTTPWRCGFRSSVSGAQAPFHRCSPALLPPRSCRHPPPRAPAAARDQPVRLFIHSATFTPASRRGQHRTHHRRRSEVTSQLKSKLVPGISSPRSRTGTAG

SEQ ID NO: 307299 - protein, 59 aa, Zea mays
  Clone ID: MRT4577_43329C.1.pep
FIFIFFFYHIPRSSYSTTRHIHLTHKQLGADADHGFKDLPNPMRSSMGQGLLDECIQLL

SEQ ID NO: 307300 - protein, 181 aa, Zea mays
  unsure (1)..(181): unsure at all Xaa locations
  Clone ID: MRT4577_4332C.1.pep
ALKCRGSRSFHVXKPGIEVDEVRSGVVGGGLVRGVLRVTQNIEFRPAIVMIDETVNIKSTQVYLRVVLLYADSIELQFAVPGGLIGAGTSMHPTLTRADRLTVQPLGEASSLPDVYLXLAINFFLLQLLLSVRPLRSVKAGNVSMLTKGDILMLNIGALSTRARVVSVKNNLANFLLIAPV

SEQ ID NO: 307301 - protein, 91 aa, Zea mays
  Clone ID: MRT4577_43330C.1.pep
IRLERCYCFFSSCCYHHTRGWSRKLMKDHHDDEPPRPLLLCYTKPRQNDNLLLRCSGGLQTGVPLHKHHHHAVHHLENAQRLHGDDDHEQL

SEQ ID NO: 307302 - protein, 124 aa, Zea mays
  Clone ID: MRT4577_43331C.1.pep
YPPEAYGLVQSSYFHGLNPYEELIHAISTREAMIRSSRGLSEPGTLFKNLMAILRDVVICYDGTVRNICSNSIIQLKYGEDDETDSSSVVPPGEPVGVLAATAISNPAYKAVLDSSQSNNASWE

SEQ ID NO: 307303 - protein, 84 aa, Zea mays
  Clone ID: MRT4577_43332C.1.pep
FPHLNSVWWLPLLGRAPPCKVHHSTGPPPTAFCGWHHITRTIIFFWSISPLSSASRTCGVHPPVLSRPGAQNEVKGVAPRTRGR

SEQ ID NO: 307304 - protein, 59 aa, Zea mays
  Clone ID: MRT4577_43333C.1.pep
WGNPLELPLLFKKKEKTHWGLTFFHNGNNFNFYHLINPPKIFKAHLLLAQQNWSHQNNF

SEQ ID NO: 307305 - protein, 66 aa, Zea mays
  Clone ID: MRT4577_43334C.1.pep
MAALYSSFLLKYSMSLRQLHISCTIELLLGRNHQGWFHEQLQAGSYFINNHHFSSKRWVISFSTSL

SEQ ID NO: 307306 - protein, 193 aa, Zea mays
  Clone ID: MRT4577_43335C.1.pep
MTEACVKAAVGHPDTLGDCPFSQRVLLTLEEKKVPYQMKLIDVSNKPDWFLKINPEGKVPVYNGGDGQWIADSDVITQVIEEKYPTPSLVTPPEYASVGSKIFSTFVTFLKSKDASDGSEKALVDELQALEEHLKAHGPYVNGANVSAVDLSLAPKLYHLQVALEHFKGWKVPETMTSVHAYTEALFSRESFV

SEQ ID NO: 307307 - protein, 59 aa, Zea mays
  Clone ID: MRT4577_43336C.1.pep
ICYQIFSQTGHKMFRNFYFPRGQQKKSGPSQNENNGITVVFFFDSCIFWSLISLKKNGH

SEQ ID NO: 307308 - protein, 48 aa, Zea mays
  Clone ID: MRT4577_43337C.1.pep
VQILIASVITVYIDGGGLTLTLCSHQMSNMRNADRSTCWEQNTLLLEP

SEQ ID NO: 307309 - protein, 64 aa, Zea mays
  Clone ID: MRT4577_43338C.1.pep
HSSSPHHIISPLLSWILTYTRPDIIRHTESSLHFITNQSLLPNLSINISTNTMNNYYRCPFITN

SEQ ID NO: 307310 - protein, 107 aa, Zea mays
  unsure (1)..(107): unsure at all Xaa locations
  Clone ID: MRT4577_43339C.1.pep
GHVGPCGLCFVRHHPTTRSDTALIAKHDRTRIVSTLSRSAPXIACEIPCRMKTSLHTRSPVAYEHRHLFHRMTPPYHGDYRGLLVCEGVLTSHLNGAVTAHLARYLA

SEQ ID NO: 307311 - protein, 70 aa, Zea mays
  Clone ID: MRT4577_4333C.1.pep
IGPGIERVRSRLLLVGLVPCGSSPRVCMDFSIIFFLQIRHTGCPRLPPIYSARNVLSSTCMLWILNSFSE

SEQ ID NO: 307312 - protein, 426 aa, Zea mays
  Clone ID: MRT4577_43340C.1.pep
MSMGFSCAGARLHGRTGVGGAKCRPGAALLGRRGSGFRATARKWGSFWGIHDFIPPSAWRSIDGAAISGPVVVVPEAADATEEVAAVVQPVVLPEKLDVDDGGNGKLPPAGGGGGDGENGGGSGGGGDGDEEEDEFGPILSFDQVVQEAEKRGVSLPSLPTDMVEAAKSVGIQKLLLLRYLDMQASAWPLGPAIRSCSLLRNRMLVDPAFLFKIGTEIVIDTCCATFAEVQKRGEEFWSEFELYAADMLVGVVVNVALVGMLAPYARFGSRSASEGLLGRVRHAYDALPSSVFEAERPGYKFSVQQRIGTYFFKGILYGSVGFFCGLVGQGIANLIMTAKRSVKKSDDDVPVPPLLKTSALWGAFLAVSSNTRYQIINGLERLVEASPVGKRVPAASLAFTVGVRFANNVYGGMQFVDWARMSGCQ

SEQ ID NO: 307313 - protein, 161 aa, Zea mays
  unsure (1)..(161): unsure at all Xaa locations
  Clone ID: MRT4577_43341C.1.pep
MLIWYRSASEGLLGRVRHAYDALPSSXXEAERPGYKFSVQQRIGTYWDKGILYGSVGFFCGLVGQGIANLIMTAKRSVKKSDDDVPVPPLLKTSALWGAFLAVSSNTRYQIINGLERLVEASPVGKRVPAASLAFTVGVRFANNVYGGMQFVDWARMSGCQ

SEQ ID NO: 307314 - protein, 72 aa, Zea mays
  Clone ID: MRT4577_43342C.1.pep
YTQLSKSRRGHLQQQNKQFNLSWFYAALSTPNAKLIILRETSTFIFYIFCPPKYLYHIFDFAMMKIRRIWVE

SEQ ID NO: 307315 - protein, 69 aa, Zea mays
  unsure (1)..(69): unsure at all Xaa locations
  Clone ID: MRT4577_43343C.1.pep
GPTTHWDNCPWCHEWSLQRHQTWRNFWHCHALGLGTRGLGYPTIRLLQWRRLGMMLVSVXRGTTVECGG

SEQ ID NO: 307316 - protein, 502 aa, Zea mays
  Clone ID: MRT4577_43344C.1.pep
MSTHAASRRSSSSSAVAKRPAIAEGATKAAGPGPTAAQAKKRTALVNITNVAAPGARVAAVGKVAPPVTGAKLNPATSGAPLKKPSLANARTIRGSAAKSASIKPAPPVSRHDSSSEQKHNVPVPTTVHVPSRAPALVPYSSFVSPGRSGDSVSTDETMSTCDSMKSPDFEYIDNGGCSMLASLQRRADEHLRTSEDRDVEENKWKKNGPAPMEIDSICEVDSNFEDPQLCAALASDIYMHLREAEMKKRPSTDFMETIQKDVNPSMRAILIDWLVEVAEEYRLAPDTLYLTVNYIDRYLSGNEINRQRLQLLGVACMLIAAKYEEICAPQVEEFCYITDNTYFRDEVLEMEASVLNYLKFEMTAPTAKCFLRRFARSAQACDEDPALHLEFLANYIAELSLLEYSLLSYPPSLIAASAIFLARFVLQPTKYPWNSTLAHYTQYKPSELSECVKALHRLSSVGPGSNLPAIREKYSQHKYKFVAKKQCPPQIPAEFFRDAAC

SEQ ID NO: 307317 - protein, 44 aa, Zea mays
  unsure (1)..(44): unsure at all Xaa locations
  Clone ID: MRT4577_43345C.1.pep
SMLQSLFLQDVEHAAVNNRGLCFKNSPPLCRFPCHQXCGSNRKF

SEQ ID NO: 307318 - protein, 78 aa, Zea mays
  Clone ID: MRT4577_43346C.1.pep
CLPLGMLLLFFNLSRFYVLMVILLNSHVHLSIGTYTFVPFFWINLLLKMPKYITIQKRDRFFSVASFVNMLEPNIFKK

SEQ ID NO: 307319 - protein, 42 aa, Zea mays
  Clone ID: MRT4577_43347C.1.pep
TEVQVYLWEKVMMIIVTRDNASPRQSYAHPEFEREACPSRPA

SEQ ID NO: 307320 - protein, 314 aa, Zea mays
  Clone ID: MRT4577_43348C.1.pep
QRWRLFADFLENMAYGLEILTPVFPHLFVPIGAAAGAGRSAASLIQSATRSCFYAGFAVQRNFAEVIAKGEAQGMVSKFVGIGLGIALANHIGSSVPLALISFAGITAVHMYCNLKSYQSIQLRTLNPYRASLVFSEYLLSGQVPSVKEVNDEEPLFFNLSLGASRKSKILSAEAKDAADRICRRLQMGSKLSEIIESKEDACALFDLYKNEQYLLMDYKGKFCIVLKEGSSPEDMLKSLFHVNYLYWLERYMGFKPSNVASECRPGGRLEVSLDYAQREFSHVKHDGSDGGWVMDGLIARPLPVRIRIGDGTS

SEQ ID NO: 307321 - protein, 56 aa, Zea mays
  Clone ID: MRT4577_43349C.1.pep
TPGTTRSNCYHGKLRPVKKMSSNVDTTGLRPNKVPPNSRAAQPVMLGMLGVEEPSK

SEQ ID NO: 307322 - protein, 115 aa, Zea mays
  Clone ID: MRT4577_4334C.1.pep
MPCLNVSTNVNLEGVDTSAILAEASKSVANIIGKPEAYVMVVLKGSVPMAFGGTQEPAAYGELVSIGGLNPDVNKKLSAGIASILESKLSVPKSRFYLKFYDSKRSDFGWNGSTF

SEQ ID NO: 307323 - protein, 93 aa, Zea mays
  Clone ID: MRT4577_43350C.1.pep
KLQPSFFFKIKPPPPPFSLLKSGKKTTSREKFWPRRFKRVTNLVLPKNPENVCCPTSFPLFWPNPPTGIFLEILPPFPQKKKQNLGEFPHSCF

SEQ ID NO: 307324 - protein, 193 aa, Zea mays
  unsure (1)..(193): unsure at all Xaa locations
  Clone ID: MRT4577_43351C.1.pep
GALSPPPLNPSERASERSHPHQHHPWSSASTTSRCCSASSPGRRLLPREPRRSRCATPPSSPPRSRSSACRTCPRRPAASRSSPPSTSAAASPASAASPPNRSSSSPASTPPTSSRSTLPAEDNTPWALTSLPPAKVRHLPPPXVIAPPPPAAPRLKQPTREAPPPPPQSEKPSPXRPSSSLASPSSTARPSP

SEQ ID NO: 307325 - protein, 36 aa, Zea mays
  Clone ID: MRT4577_43352C.1.pep
YHHYMWVLNCMSADPYARYGWCDPIHTGIRSCVNHH

SEQ ID NO: 307326 - protein, 80 aa, Zea mays
  Clone ID: MRT4577_43353C.1.pep
TSSTFINKHSSPLLTIITTLNHPILDKSPLRKMSRQSNPFNNANFWDFVQHFDPNQATGRGVDHQTETPFPSFMAGFPFG

SEQ ID NO: 307327 - protein, 96 aa, Zea mays
  Clone ID: MRT4577_43354C.1.pep
QAQAACILDREMRRRGRSFVVGGSGVPLVKQAADADPSCHVVARLDSSHPFHGSSVHSAQGRSDRDSRRFALSSLASHTVSRDAEGDTQEVSSPAG

SEQ ID NO: 307328 - protein, 100 aa, Zea mays
  Clone ID: MRT4577_43355C.1.pep
WRSARFTLLGGLEFHLPSSPLSEAGAHQLKRKKKRKKKKKKKSHNQTLKPTINTINPLFSPPTPTNQLPKTTINMKGNCGCASGACNCGATCSCDGCPGK

SEQ ID NO: 307329 - protein, 142 aa, Zea mays
  Clone ID: MRT4577_43356C.1.pep
MDALSSMLDKAKDKVKSNPDVMEKVNSVLDKVKNHPEVMEKVAEVLHLGKRESKEKEPEAEDKAKEGETSADKTQDSNILDQAVEEIQAVVAAVQQQETTGDETQVPVEAAAETDAPAQEEKREVEKDNPKNRIDFLGFFAM

SEQ ID NO: 307330 - protein, 35 aa, Zea mays
  Clone ID: MRT4577_43357C.1.pep
ASPVSLIIGLFLLLNSDTGDCVCSRAVYLHCTFES

SEQ ID NO: 307331 - protein, 100 aa, Zea mays
  Clone ID: MRT4577_43358C.1.pep
AVHRHSFHLPTRADVIVFLLFMVNCRHPEQAHEQAQAQVHPQVHKLLPSYQPKCCHNPLRRDVLFLWFQQSHTRAAELVTPSHSRHRAPLALDHICRHKN

SEQ ID NO: 307332 - protein, 242 aa, Zea mays
  unsure (1)..(242): unsure at all Xaa locations
  Clone ID: MRT4577_43359C.1.pep
MKTSSEVPFYHSLPVPGAQDSLKDQIHSKVMGTIGNVMNSIDRKALPQQLEGAWETAGNVVNSIESKLSGQKSFDFDGGNDFLDGYECPDDYWDYEQHKAQKPVNIRNLLGGIVAIIGRTCKNDGIQQSKDSSVSFLGSGSDGDTSLHPSVYAPSAPPLLDEEALSYIFYRVVLEAEPPEWLPDSYADSCMQCSASFTAITRGRHHCRFCGGIFCRXCSKGRCLLPAKFRERNPPRVCDACY

SEQ ID NO: 307333 - protein, 115 aa, Zea mays; identical to SEQ ID NO: 307322
  Clone ID: MRT4577_4335C.1.pep

SEQ ID NO: 307334 - protein, 64 aa, Zea mays
  unsure (1)..(64): unsure at all Xaa locations
  Clone ID: MRT4577_43360C.1.pep
FYVAMPVFERVPERGIRCSNISXSVSNHYMVXFGSVYXFSXXSQEVTHVIXTLLVLWNIIYTVG

SEQ ID NO: 307335 - protein, 72 aa, Zea mays
  unsure (1)..(72): unsure at all Xaa locations
  Clone ID: MRT4577_43361C.1.pep
MPAPLILPTVARELXAELLVALSAARALPKGQQLHGHLLKAGHVPATASSHALLAHHLLTFYARCALPDLSL

SEQ ID NO: 307336 - protein, 80 aa, Zea mays
  Clone ID: MRT4577_43362C.1.pep
INAPTNLGWLVVLKIKPRGVFAIAEDWNEVQCDPFHVSRLGNLFDKAHASLSWVRKNMEGITVKGANKGHNPSSASGDDP

SEQ ID NO: 307337 - protein, 126 aa, Zea mays
  Clone ID: MRT4577_43363C.1.pep
YIFFFFFFLGVFLGFLADPPPPTPTPKPTSYPHFHIKKTLGEGGKHGVTEETGKTVKIPHTHPTENLKAKTRVPEGPNERTNKSLGPTPPLPGLKPVTPSGLRKKKTGKRNAQSPFAPRAALGPPR

SEQ ID NO: 307338 - protein, 46 aa, Zea mays
  unsure (1)..(46): unsure at all Xaa locations
  Clone ID: MRT4577_43364C.1.pep
KALFGHLTAVAFWGLGDLNWVTRCYCVLRVFFLPNDFGDQHXQFCR

SEQ ID NO: 307339 - protein, 103 aa, Zea mays
  unsure (1)..(103): unsure at all Xaa locations
  Clone ID: MRT4577_43365C.1.pep
MDGGDLCRXPREKRVVRVPAISDKNADIPADNYSWRKYGQKPIKGSPHPRGYYRCSSKKDCPARKHVERCRSDAAMLIVTYENDHNHAQPLDPSVLTAANAEA

SEQ ID NO: 307340 - protein, 309 aa, Zea mays
  unsure (1)..(309): unsure at all Xaa locations
  Clone ID: MRT4577_43366C.1.pep
GPEFPGRPTRPGSWRRGLKPPACCPAPRAHPTSSTSTTSSPPVPLSTCPPLPGPARRTSQPARRRCRPPDEAVAARDAGSNPRPSPRARSWTSTAPLAIRVSCGNGKVRSMVXKDLLAAPCSSLWAEAPNNMGDDWSMFDEQTPIKHCTDFEFQFCDIGDIIVKEFEEGKETLQAKRRRMLQFCPENVEMTRSMTEEGLLESLQEMDFSGTNCLLNSDGTDELPEEWLVDCSQDTEPGFPAEEMNSPAAATEKDVDTSAHQNASPSQQSIVVNNNRAQARPTPLKAGKSIIRXAKKARTSXVPFPFELI

SEQ ID NO: 307341 - protein, 45 aa, Zea mays
  Clone ID: MRT4577_43367C.1.pep
GDRLVGRAEEVEEAPRRQEGPRRMRSEERVRHQRGPQARRRPRRR

SEQ ID NO: 307342 - protein, 67 aa, Zea mays
  Clone ID: MRT4577_43368C.1.pep
FVIMLLMPLSACVGCLMLQVGVSESTWQELEEELIPSSSIVRTNWLDTQPMRKYKDSCICVAGGNLF

SEQ ID NO: 307343 - protein, 141 aa, Zea mays
  Clone ID: MRT4577_43369C.1.pep
MLLTSAGGMAASLLVLGLSIRATSAATCVAAAVAFMATFSLGFGPVIWMYGSEILPLRLRAQGTGVGTAVNRVMSAIVGMTFIPMYEAVGMAGTFYIFAAMSAAAWVFVYACLPETKGRSLEEMEALFDAGAAPSPRAALS

SEQ ID NO: 307344 - protein, 125 aa, Zea mays
  Clone ID: MRT4577_4336C.1.pep
ICGEASAAACAPGRRRSKMSSRGQGCCCCSSLRLLPRDDAVSSPSACEHRLKSCIFECAQTPHLVNSACPPSPYAQISADDYADLPETYLLLFCGFGIQVVIQRHEIRKWKRKAIDRKKKKKKGA

SEQ ID NO: 307345 - protein, 70 aa, Zea mays
  Clone ID: MRT4577_43370C.1.pep
SGECSRFNNIMCSRPNVCPAPWLCTPPVNALAGIQGRPGSPQIGWCPGFPPSSHSSLALIMRINPCPPPG

SEQ ID NO: 307346 - protein, 62 aa, Zea mays
  unsure (1)..(62): unsure at all Xaa locations
  Clone ID: MRT4577_43371C.1.pep
PXHHLLRPRRRRRPHXYTKXXGHPEVXXXIXXXLRNNLPYWXLLXXXKVTXXLLXMVEXXXI

SEQ ID NO: 307347 - protein, 126 aa, Zea mays
  unsure (1)..(126): unsure at all Xaa locations
  Clone ID: MRT4577_43372C.1.pep
IAVTYVLVPCTFESSHASLYVIQLMDGCTNIVEETRRAXHDNPNNILPWLHMNNXSPDSSTAIPAHFDVKARHSSNIGXSGFLXVLLNGEVHKTSNPMTYGFNFPLQIDKADDPLTLGQKYSVCLL

SEQ ID NO: 307348 - protein, 91 aa, Zea mays
  unsure (1)..(91): unsure at all Xaa locations
  Clone ID: MRT4577_43373C.1.pep
DSGFIIFGANLSNPLNMLLPLLQTVFPLDYILITIIIMYFIFTSMVGIRNIGIWFFWIRLYXIRRGRTRPQALLFLCMILLLIVLHTSYMI

SEQ ID NO: 307349 - protein, 87 aa, Zea mays
  Clone ID: MRT4577_43374C.1.pep
AQKFCFIKTPGGKNGRHQRVVTWGPTFFPDLYMFLHANFKKLKGPLNFACTTIISHKPIDMHAWTNNFVLAFLFFYPAPFPPPKGPF

SEQ ID NO: 307350 - protein, 106 aa, Zea mays
  Clone ID: MRT4577_43375C.1.pep
MTSPPRQSAISTVIAYVTAGVRRWDDLDPVRLDCEDQITDGVYTDKGKVYCLTKCGDEHVLRLPESRRRKCGNADESGSSESEFSVLQSPQTNECTITFRPLRWLH

SEQ ID NO: 307351 - protein, 50 aa, Zea mays
  Clone ID: MRT4577_43376C.1.pep
GIKEPLNPYYCKIFRSEPANTRPTKKRTRLPPGYTKRHGIKIYAGAPPEM

SEQ ID NO: 307352 - protein, 35 aa, Zea mays
  Clone ID: MRT4577_43377C.1.pep
MAELVGPRVYSCCNCRNNVCLHDDILSKAFQVQTP

SEQ ID NO: 307353 - protein, 328 aa, Zea mays
  Clone ID: MRT4577_43378C.1.pep
MAATRSTTAVPELALPSGNARPVPVIGLGTAVMFQPPETTKDAVLAAIELGYRHFDTASLYGTEKPLGEGVAEAVRRGLIESREEVFVTSKLWCTQCHPDLVVPSLRQTLENLQMDYLDLYLIHMPVCQKPGPPVFPARREDARPFDFKGVWQAMEECQRLGLARAIGVSNFRTKHLDKMMPFATITPAVNQVEVNPVCQQLKLRGYCAEKGIHVQAFSPLGGQSWAAERNAVLESEVLAEIAKARGKTVAQVSLRWVFEQGVSFVVKTYKKERLKENLEIFDWELTDEDRVKISRIPQKKLSGFAFMFMPEGEFTSVDVSEINPIEE

SEQ ID NO: 307354 - protein, 35 aa, Zea mays; identical to SEQ ID NO: 307352
  Clone ID: MRT4577_43379C.1.pep

SEQ ID NO: 307355 - protein, 34 aa, Zea mays
  Clone ID: MRT4577_4337C.1.pep
IASSSGYLDALQANARKASETSSVVDAVAMDTAL

SEQ ID NO: 307356 - protein, 199 aa, Zea mays
  unsure (1)..(199): unsure at all Xaa locations
  Clone ID: MRT4577_43380C.1.pep
MSDRRRDKEKPRDRDIDRHRDRDRDIDRHRDRDRDRDRDRDRDRERDHRRERERERKRSRSRSPSADRDRSHRRHSHSHRGRPSPSPDAGRHKRRREASPASADHHHKEDKKAXPTLTRHPAEGTSXAAAAAVGDGDVNAEELEMMKMMGIPVGFDSTKGKHVPDADVSGVRAVTKRQPRQYMNRRGGFNRPLPPERNR

SEQ ID NO: 307357 - protein, 66 aa, Zea mays
  Clone ID: MRT4577_43381C.1.pep
SSAILILVRIGFHRLLIMRLVQLRCNLYVYWGDRRRLQCTHARRVFLFGKRQKFFCIILCKRVRTR

SEQ ID NO: 307358 - protein, 122 aa, Zea mays
  unsure (1)..(122): unsure at all Xaa locations
  Clone ID: MRT4577_43382C.1.pep
KYKFLKQKKIFPFPGTLLTYEQFDFVNSTLTVKVRVINRRAKRRAHLPLQLLXNMCRAAQPVAPRYRARTDPQNNHAKDLHPASCTSTHWHLPLQVRRASRTIAALAKFGPTDSIILRVHRL

SEQ ID NO: 307359 - protein, 54 aa, Zea mays
  Clone ID: MRT4577_43383C.1.pep
HANKLLIISQGLLDHHDRISHFHYRSSRIATPHPILHVILLQQAPNWTILQQPY

SEQ ID NO: 307360 - protein, 82 aa, Zea mays
  unsure (1)..(82): unsure at all Xaa locations
  Clone ID: MRT4577_43384C.1.pep
MSKNYPPECAEYTAAVNAVTLRPSAPIWDMSCSPLMLSLECHCVGTFYFSLRTXDYILNDDTXSELSHSTNAELDISMRMIK

SEQ ID NO: 307361 - protein, 82 aa, Zea mays
  unsure (1)..(82): unsure at all Xaa locations
  Clone ID: MRT4577_43385C.1.pep
MEQIQYSRKYDDDTYEYGHENLPAEVAKLLPNNMLLYEKQWPLMGVQKSRRWEHYSIHQPEPHIMLIRRPINYQXQEEEAAA

SEQ ID NO: 307362 - protein, 36 aa, Zea mays
  Clone ID: MRT4577_43386C.1.pep
KKKKKKKKKKKKKKKKKKKKKKKKKKKKKKKSKNNH

SEQ ID NO: 307363 - protein, 171 aa, Zea mays
  unsure (1)..(171): unsure at all Xaa locations
  Clone ID: MRT4577_43387C.1.pep
MRVTRRDEHRAAAAAFLYAVTVLGVLAGSAGVRAFDDGTAVYIVTMKQAPVFHRRLNLEKFGSSRVANAAGRGGGGGGGGAGDTPTTSVLRKPRQGSPKPMNYGSYIVHLQNSLLKRTLRGERYIKLYSYRYLINGFAVVITPLQADKLSRRKEVANVMLDYXVRTAPTHT

SEQ ID NO: 307364 - protein, 118 aa, Zea mays
  Clone ID: MRT4577_43388C.1.pep
TQQQCMTFRKRCPPPWDARWPGAGELHKRRKRNGTHARTHTGGGMQPKINSGERLRGRDLDIHVYRFYFFFHVFTAVPSVVLGVVYLTLMGRGLAFHFLRHLSIGVQELGLGDADKHL

SEQ ID NO: 307365 - protein, 45 aa, Zea mays
  Clone ID: MRT4577_43389C.1.pep
KKVHLPRILLTNFQIITLLLLALRRTTQAVQLTSIMFTIHLLTNN

SEQ ID NO: 307366 - protein, 68 aa, Zea mays
  Clone ID: MRT4577_4338C.1.pep
KHPPRFKPHYNNDFVCFCVSQKGTLHQNKIKAFCGVYRPAKHFTRPACVLLYFYFSLACRRGQPTPVD

SEQ ID NO: 307367 - protein, 82 aa, Zea mays
  Clone ID: MRT4577_43390C.1.pep
KYYARCARGLLSSNTILRIRLSIFIRKGVLMRLFLLLLFPYLSFLVRLRPGAEPIIRSTGPGRKSDSLSANHRPRPVRKLHC

SEQ ID NO: 307368 - protein, 129 aa, Zea mays
  Clone ID: MRT4577_43391C.1.pep
MKIMFAMTSIKGVGRRFSNIVCKKADIDMNKRAGELTPEELERLMTVVANPRQFKVPDWFLNRKKDYKDGRFSQVVSNALDMKLRDDLERLKKIRNHRGLRHYWGLRVRGQHTKTTGRRGKTVGVSKKR

SEQ ID NO: 307369 - protein, 106 aa, Zea mays
  Clone ID: MRT4577_43392C.1.pep
SPARTSNKRAGELTPEELERLMTVVANPRQFKVPDWFLSGKKDYKDGRFSQVVSNALDMKLRDDLERLKKIRNHRGLRHYWGLRVRGQHTKTTGRRGKTVGVSKKR

SEQ ID NO: 307370 - protein, 71 aa, Zea mays
  Clone ID: MRT4577_43393C.1.pep
YQSSRHNLYDYLTNIHALTHHHLPFLSSTQLTIHLTIKSTFYRYTLISSYLSHLTNISITISLPHNKYSLY

SEQ ID NO: 307371 - protein, 152 aa, Zea mays
  Clone ID: MRT4577_43394C.1.pep
MSLIAGEDFQHILRLLNTNVDGKQKIMFAMTSIKGVGRRFSNIVCKKADIDMNKRAGELTPEELERLMTVVANPRQFKVPDWFLNRKKDYKDGRFSQVVSNALDMKLRDDLERLKKIRNHRGLRHYWGLRVRGQHTKTTGRRGKTVGVSKKR

SEQ ID NO: 307372 - protein, 152 aa, Zea mays
  Clone ID: MRT4577_43395C.1.pep
MSLIAGEDFQHILRLLNTNVDGKQKIMFAMTSIKGVGRRFSNIVCKKADIDMNKRAGELTPDELERLMTVVANPRQFKVPDWFLNRKKDYKDGRFSQVVSNALDMKLRDDLERLKKIRNHRGLRHYWGLRVRGQHTKTTGRRGKTVGVSKKR

SEQ ID NO: 307373 - protein, 322 aa, Zea mays
  Clone ID: MRT4577_43396C.1.pep
MVELEPSVKSEHGGGVGLVLPPGFRFHPTDEEVITSYLLHKFLNPSFAPHAIGEVDLNKCEPWDLPSKAKMGENSKEWYFFCHKDMKYPTGTRANRATKEGYWKATGKDREIFKPAAGRDRDRELVGMRKTLVFYMGRAPRGTKTNWVMHEFRLEGKSRHTCNDLRFNPKDEWVVCKVHHKGAEEASAAKKSAGGGGEEHYYSTATPNVSSVEGGDEFLVDSLLDYSSYFNCFATGGLPLPSTTANSAAAPATNDDDSSWSMLRHAPADQQAMVGSYSLHHQAMKAKTVGGVTSPSFSAGLPSSPVADYVGNDASGYHTNNY

SEQ ID NO: 307374 - protein, 231 aa, Zea mays
  Clone ID: MRT4577_43397C.1.pep
MCPTKKGMTGEPSSPCSSASASTLPEHHQTVWTSPPKRPAGRTKFRETRHPVFRGVRRRGSAGRWVCEVRVPGRRGCRLWLGTFDTAEAAARAHDAAMLALAGAGACCLNFADSAWLLAVPASCASLAEVRHAVADAVDDFLRHQLVPEDDALAATPSSPSSEDGNTSDGGESSSDSSPPTGASPFEFDVFNDMSWDLHYASLAQGLLVEPPSAVTAFMDEGFADVPLWSY

SEQ ID NO: 307375 - protein, 153 aa, Zea mays
  unsure (1)..(153): unsure at all Xaa locations
  Clone ID: MRT4577_43398C.1.pep
MSLIAGEDFQHILRLLNTNVDGKQKIMFAMTSIKGVGRRFSNIVCKKADIDMNKRAGELTPEELERLMTVVANPRQFKVPDWFLNRKKDYKDGRFSQVVSNALDMKLRDDLERLKKIRNHRGXLRHYWGXRVRGQHTKTTGRRGKTVGVSKKR

SEQ ID NO: 307376 - protein, 73 aa, Zea mays
  Clone ID: MRT4577_43399C.1.pep
QLNRAPPPMGLWYNAAGFVKLTYTVGRGLLPFYNGASGWRSAYCGTTTPAVVCRQAPGLTPASWLSGMSCCCC

SEQ ID NO: 307377 - protein, 103 aa, Zea mays
  unsure (1)..(103): unsure at all Xaa locations
  Clone ID: MRT4577_4339C.1.pep
QARGPRGKGPPEEEFRQGRANENPFPPPWLGIGTITLFGGFALPPPGFLPREYARFFVKALFPWFPPPVFLFLAGPVGYGAPKXLKREKQKFVSRPKHVWTNY

SEQ ID NO: 307378 - protein, 58 aa, Zea mays
  Clone ID: MRT4577_433C.1.pep
IAFFVMIGWHVCYSYATCEFCNHMKTNELMKRIVFTIPSYSSSTPSFSSIASTFLQAD

SEQ ID NO: 307379 - protein, 152 aa, Zea mays; identical to SEQ ID NO: 307371
  Clone ID: MRT4577_43400C.1.pep

SEQ ID NO: 307380 - protein, 152 aa, Zea mays; identical to SEQ ID NO: 307372
  Clone ID: MRT4577_43401C.1.pep

SEQ ID NO: 307381 - protein, 152 aa, Zea mays; identical to SEQ ID NO: 307372
  Clone ID: MRT4577_43402C.1.pep

SEQ ID NO: 307382 - protein, 152 aa, Zea mays; identical to SEQ ID NO: 307371
  Clone ID: MRT4577_43403C.1.pep

SEQ ID NO: 307383 - protein, 129 aa, Zea mays
  Clone ID: MRT4577_43404C.1.pep
RTRGATRKTRTGTGRRTRWAEGEAYKSWAKTRPKGVPGEKGYPLKIPKKKQPGSKKGKAGGAKRGSKPKKKGGPQRPPFQGENRAGQRDKKNGQRPGKSGSRIGPQGGFSLPPGKREKTGGPKPPGPEK

SEQ ID NO: 307384 - protein, 84 aa, Zea mays
  Clone ID: MRT4577_43405C.1.pep
RKLGIRLEQKRFCRPDICTLLTRILITRTVELLLHATIWPTHFETSNSTACTLLPCRGYIYSLAQELHRRASSICLHIDILPCI

SEQ ID NO: 307385 - protein, 75 aa, Zea mays
  Clone ID: MRT4577_43406C.1.pep
KREKEKVLILTKESFLAQVRKNPVMLDKYQGQKKKGNLHQFLNPISTGPLSVCPPIGECPFMKVTFKETGVLKGI

SEQ ID NO: 307386 - protein, 114 aa, Zea mays
  unsure (1)..(114): unsure at all Xaa locations
  Clone ID: MRT4577_43407C.1.pep
LSKNQAPIQRLRGLAHDSCITHASTTLCCAATTPTKCYTLALPLSKMVKDGRXAAAPMEVMRLTLGDADDDYTDRVCEVYAIPKSATANSEEADYHVIQTNMLDMLKQTGRPQM

SEQ ID NO: 307387 - protein, 62 aa, Zea mays
  Clone ID: MRT4577_43408C.1.pep
RYSYDEYLILIQVLKWLLERETAIQYTLFNKVCGNLKLSNPDDHKSVAPILMHTSDKLLRAD

SEQ ID NO: 307388 - protein, 86 aa, Zea mays
  Clone ID: MRT4577_43409C.1.pep
PGISPSERQRRETLVAPPRTLIAEKIQLGGPPMRMIELLEDLRNQSPMEILMPDPPGAFGPLMTEGAVVFPGAPVRRVFCLSAPLR

SEQ ID NO: 307389 - protein, 78 aa, Zea mays
  Clone ID: MRT4577_4340C.1.pep
KGAAGCFLPVKRVSQLDPGPRLNLRGNNTTFRTQKEKRPVQKDKAAHGERATLHVGRGRTKTIDENGTERGRGELMGF

SEQ ID NO: 307390 - protein, 195 aa, Zea mays
  Clone ID: MRT4577_43410C.1.pep
SICWQVLLLTICKTGCFKEAKGVFNSLHDRNNVAWTVLISGFLQYGCFTESVELFNQMRAELMTLDQFALATLISGCCSRMDLCLGRQLHSLCLKSGQIQAVVVSNSLISMYAKCDNLQSAEAIFRFMNEKDIVSWTSMITAYSQVGNIAKAREFFDGMSEKNVITWNAMLGAYIQHGAEEDGLRMYKVMLSEEY

SEQ ID NO: 307391 - protein, 70 aa, Zea mays
  Clone ID: MRT4577_43411C.1.pep
NPISYLYFYFYHTNPKSKPNLFFLNLFIPLFLITYPNIILLIPYPIYQTLSSIIHTFTSFSFILSLFISF

SEQ ID NO: 307392 - protein, 42 aa, Zea mays
  Clone ID: MRT4577_43412C.1.pep
LALKKGGEGGYLKRGAKGHFGRDGPDFTWEVVKPLKSEKPSA

SEQ ID NO: 307393 - protein, 395 aa, Zea mays
  Clone ID: MRT4577_43413C.1.pep
MGRGRNRKPRNFATFRLCPRPGAADASERVFVRVDDNPYSVPGFADDDGLSSSTAVRGDGGEPDPSSSTSTDEGGSPLPEHVRREIMELGLPDDGYDYLAHLRELRPSLSSTGGGGSSAVFLPSRRLARSGLPVDVKAYDFTSTPLGSGEVAVVAASRAEEAIDLDVTRLLDGSDSTAVESGDEDLEEDFVILANEPDEKQESEEENVAGSKEKALQLPGDQFVSLAFEEYADSGVGCCVQDAKHELSQEVTDKLKPPHSETFDADKRCRAPTPQYVAHRILESNEQIDASSNAISEHVQYAETYEVSEEEQAILAPESSKGSAVMYSTATVSGSYLDVKLKFPKHSPGETSMKKSIIRKGIEKLPAGYSPQRNTPTGETKQGPYKGTRQEGTES

SEQ ID NO: 307394 - protein, 72 aa, Zea mays
  Clone ID: MRT4577_43414C.1.pep
SYALPAAEGNGSKRRIGLRDLTTLNKPCCSSNKKETFRLPCSHTCMTCVPSHAIAAHHSQLIYLFFSPIISG

SEQ ID NO: 307395 - protein, 47 aa, Zea mays
  Clone ID: MRT4577_43415C.1.pep
IVAMKAVSLGFDLDRGDVGTVPSPVEFMGYLYFVGTIVFGPWISFHT

SEQ ID NO: 307396 - protein, 61 aa, Zea mays
  Clone ID: MRT4577_43416C.1.pep
DVCFSPAPSRTTQRSSREPEIIIDVELATRLLPRGFIWPVAAYRELINGDLVVDDKDIGYY

SEQ ID NO: 307397 - protein, 150 aa, Zea mays
  Clone ID: MRT4577_43417C.1.pep
DFSDLDSLLPLTKLETLSLLTNPITTDAHYREYVAYKFPKLRLLDFRKIRQKDRQAAVELFKSRKGKELLKEIAKKAKAAADNPSIDTNNSKVSNTSAEDVQRIRDAIKNATSLHEVERLTRILQSGHIPENLNAENGNGTSHDEHAMEM

SEQ ID NO: 307398 - protein, 225 aa, Zea mays
  Clone ID: MRT4577_43418C.1.pep
MAALAAASTAAFAAKPRARLSVACSAATGDSSSVSLASSVKTFSAALALSSVLLSSAATSPPPAAADIAGLTPCKESKAFAKREKNSIKKLTASLKKYAPDSAPALAINATIEKTKRRFENYGKFGLLCGADGLPHLIVSGDQRHWGEFVTPGLLFLYIAGWIGWVGRSYLIAISGEKKPAMREIIIDVELATRLLPRGFIWPVAAYRELINGDLVVDDKDIGYY

SEQ ID NO: 307399 - protein, 232 aa, Zea mays
  Clone ID: MRT4577_43419C.1.pep
MAALAASSTAAFAAKPRLPRARLTVACSATGGDGNGSSSSVSLASSVKTFSAALALSSVLLSSAATSPPPAAADIAGLTPCKESKAFAKREKNSIKKLTASLKKYAPDSAPALAINATIEKTKRRFENYGKFGLLCGADGLPHLIVSGDQRHWGEFVTPGLLFLYIAGWIGWVGRSYLIAISGEKKPAMREIIIDVELATRLLPRGFIWPVAAYRELINGDLVVDDKDIGYY

SEQ ID NO: 307400 - protein, 77 aa, Zea mays
  Clone ID: MRT4577_4341C.1.pep
QKVCFPPRVGGGLKLLIVVGPTNLFWGRMGRPQFGFLLGVPVFFFLWVAPNQVFFSDVLYTPSGGTLFFLPGCFFPF

SEQ ID NO: 307401 - protein, 251 aa, Zea mays
  unsure (1)..(251): unsure at all Xaa locations
  Clone ID: MRT4577_43420C.1.pep
PAGPGKSPPLLSPLPRGLALSPSSLTSTTAKGKKKKGPSSGNLPAALDVEIREAQEYLDSDQQEPVPENFPFELIDEEGMSVVILRRDYKDEKVEVTVSMPNLEGGPEFGDEDGEGDGESAAKDDGEAEEDDESAGESSISLKVVVSKDSGPELEFTCTAFREEITIDDMLIVEKTDDDDGEEKFPYEGPEFTELPVNVQKGLFKYLEQRGVTLSATNYMPDYMATXKQAQETSGXMTKMKDFVAQLATAS

SEQ ID NO: 307402 - protein, 305 aa, Zea mays
  Clone ID: MRT4577_43421C.1.pep
LGTSRPGRENPPLLSPLPRGLALSPSSLTSTTAMAMALASATAAALFRSALSAPHGAGARVRPQRRQPFLAPLHAAKGPGSAPVVLEGKAKGKKKKGPSSGNLPAALDVEIREAQEYLDSDQQEPVPENFPFELIDEEGMSVVILRRDYKDEKVEVTVSMPNLEGGPEFGDEDGEGDGESAAKDDGEAEEDDESAGESSISLKVVVSKDSGPELEFTCTAFREEITIDDMLIVEKTDDDDGEEKFPYEGPEFTELPVNVQKGLFKYLEQRGVTLSATNYMHDYMVTKQAQEYIRWMTKLKDFVAQ

SEQ ID NO: 307403 - protein, 89 aa, Zea mays
  Clone ID: MRT4577_43422C.1.pep
PRARSEDCGKTKYTGNRAYLKTTLQLVGESGPLSKRELWREQYALSRVKHASRELLTLHEKNLHPIFEGEALLRRMNRYGFLGEGQNKL

SEQ ID NO: 307404 - protein, 50 aa, Zea mays
  Clone ID: MRT4577_43423C.1.pep
QMAVCGGVVHTGKQSGSCDASSFVLLGIYFGGCAIQSWGPRVLNYWDLHF

SEQ ID NO: 307405 - protein, 184 aa, Zea mays
  Clone ID: MRT4577_43424C.1.pep
MAAASAITAVSGVVLPQTFLSHRSPPPQVLAVASSFRRLSLCASPRRITHIIPRADASAEAGEPEPVTASAESEEEVAEGSVAVAEAEEPTPPSKPKVKFGEIIGQRPNKRRLSLFKGIIIAKHKAGVHTTIRVRRIIAGVGVEITFPVYSPRIKEITVIRHKKVRRAKLYYLKDKLPRFSTFK

SEQ ID NO: 307406 - protein, 214 aa, Zea mays
  unsure (1)..(214): unsure at all Xaa locations
  Clone ID: MRT4577_43425C.1.pep
MAAAASAITAVSGVVLPQTFLSHRSPPPQVLAVASSFHRLSLCASHRRITHIIPRADASAEAGEPEPVTTSAESEEEVAEGSVAVAEAEEPTPPSKPKVKFGEIIGILNKQFIEEAEKVKTVPDLRPGDIIELRMQRPNKRRLSLFKGIIIAKHKAGVHTTIRVRRIIAGVGVEITFPVYSPRIKEITVIRHKKVXRAKLYYLKDKLPRFSTFK

SEQ ID NO: 307407 - protein, 42 aa, Zea mays
  Clone ID: MRT4577_43426C.1.pep
QSCQCPILEHKVLLKLLPLTFKFFHTYCFPYADPGILFSVFT

SEQ ID NO: 307408 - protein, 140 aa, Zea mays
  unsure (1)..(140): unsure at all Xaa locations
  Clone ID: MRT4577_43427C.1.pep
TTGSPVRNASTSTGAASSSADXAATVSSCPHRMWASGVTMAAAGKKKEKGMRDSKEIVTATACGVRAAPSKPRQKYRVGPTTSGPVPVSRRTERACVRAGAAPAICCWRRTVTGERSGVEASGSSLPCRAPGRRRVAPAG

SEQ ID NO: 307409 - protein, 79 aa, Zea mays
  Clone ID: MRT4577_43428C.1.pep
GSCVKVKFRWFGSLVLVLSPALGLGYFAAPCSFWGPPFCFKLFLFALAVLSLSPLLLNKHPTIKKKKKKKKKKKKKKKK

SEQ ID NO: 307410 - protein, 127 aa, Zea mays
  unsure (1)..(127): unsure at all Xaa locations
  Clone ID: MRT4577_43429C.1.pep
QQRHPRNDSLLALKAQSARATNAPIKPQCPLATSATIPQSHPPDTPMGYEHPAEQAYRLQQALAESAXEQPNAQXQQQSXAHITIQTNVTQQQQALDXLDAVNPIGYXQQQLLATKPPALANVAETN

SEQ ID NO: 307411 - protein, 122 aa, Zea mays
  Clone ID: MRT4577_4342C.1.pep
PKLVPNCFRIPSLHSPPPSIRPIGGPLPRGDGRSTAAAEWVLAGDDRPPDTAAGFMLETSAEKHTTIMGHDHMSRIKMHMAEGSFGGMSAPCLNVSIACDLARTHLYFGILRRHAVTYFMFH

SEQ ID NO: 307412 - protein, 51 aa, Zea mays
  Clone ID: MRT4577_43430C.1.pep
VLQSFLQQQPIGQLGGLITAQVAQQLTAMCGLQLQQPGSSPFKTTSGGVFF

SEQ ID NO: 307413 - protein, 131 aa, Zea mays
  unsure (1)..(131): unsure at all Xaa locations
  Clone ID: MRT4577_43431C.1.pep
XXFFFXLXXXGAGRLRPGRGAGRRLRLLLQGCPQHDHHIPGGKKKKKLPRTKSPPHAVTPPPTTAISQKEKKKPVLRCRRQKKGQKKALFHRDHAGEKKGGLQPRAGGVHGAGAPPLCRQVGHRLPPQMRP

SEQ ID NO: 307414 - protein, 543 aa, Zea mays
  Clone ID: MRT4577_43432C.1.pep
MTTLRTPWASRRPMPLLLRGASLLRLCQCTSGLSSVKFSSRVTVLVNLNAMRDGMRATYSRRAASKNSEVKKDEQPVTEKVSRAASKNSEVKKDEQPLTEKEDAAETDLEVERGRSSSPSQLQSMTFKELRELTRRRGISVKGTKKDLVSALMNSMAVEANGEGGKSSVELVSPLEVPLKRKGGASVVVEQKLESSEIISETPNKKSRTKQKSSKNTTREEISVTNVKLSKTVVQKETVAGLSPDDDSEPWTILVHKKPQASWIPYNPRTMRPPPLSKDTRALKIMSWNVNGLKALLKSRGFSVQQLAQREDFDVLCLQETKMQEKDIEVIKDTLLDGYTNSFWTCSVSKLGYSGTAIISRVKPLSIKYGLGISDHDTEGRVVTVEFDDFYLLTAYVPNSGDGLKRLTYRVTEWDPSLGNYMKELEKSKPVILTGDLNCAHQEIDIHDPAGNRRSAGFTNEERESFGTNFLSKGFVDTFRKQHPNVVAYSYWGYRHNARKTNKGWRLDYFLVSESITEKVHDSYILPDISASDHSPLGLVLKL

SEQ ID NO: 307415 - protein, 102 aa, Zea mays
  Clone ID: MRT4577_43433C.1.pep
SDEVNEDDSHGIKHGALPWCLHPPVSLKQLDTCTDNTYIYYSCCWLKEGDACCCCCLVGLLGFLWAWLPLPCGRATWARMPGRGDGAQLLQVNGDPGGAPAC

SEQ ID NO: 307416 - protein, 274 aa, Zea mays
  unsure (1)..(274): unsure at all Xaa locations
  Clone ID: MRT4577_43434C.1.pep
MPLLLRGASLLRLCQCTSGLSSVKFSSRVTVLVNLNAMRDGMRATYSRRAASKNSEVKKDEQPVTEKVSRAASKNSEVKKDEQPLTEKVSMFPLVLILSDCCSFVSYHSVCILGRCCXTDLEVERGRSSSPSQLQSMTVKELRELTRRRGISVKGTKKDLVSALMNSMAVEANGEGGKSSVELVSPLEVPLKRKGGASVVVEQKLESSEIISETPNKKSRTKQKSSKNTTREGISVTNVKLSKTGVQKEQLXLSPDDDSEPWTILVHKKPQPAG

SEQ ID NO: 307417 - protein, 105 aa, Zea mays
  Clone ID: MRT4577_43435C.1.pep
GQKGGWDLSSGAPDEAEGLGLGPGVGSALGPFWGCVGKGLGAKRSRRRLAMRWLEARGSGRPRLLVSGFTGYTEDPLPLAPSCGGDTVFEASLVPQKVGEGLEGP

SEQ ID NO: 307418 - protein, 51 aa, Zea mays
  Clone ID: MRT4577_43436C.1.pep
YSPPRYANGRTQLPSRWKDGLLLGPYLSGPACAGLDVAAGQWSTILALFRT

SEQ ID NO: 307419 - protein, 120 aa, Zea mays
  Clone ID: MRT4577_43437C.1.pep
ELEKSKPVILTGDLNCAHQEIDIHDPAGNRRSAGFTNEERESFGTNFLSKGFVDTFRKQHPNVVAYSYWGYRHNARKTNKGWRLDYFLVSESIAEKVHDSYILPDISASDHSPLGLVLKL

SEQ ID NO: 307420 - protein, 125 aa, Zea mays
  Clone ID: MRT4577_43438C.1.pep
LLGYSWSPQSPLVVVGSRLFRPSVSRRGQYTPVTTKWWCRRAFPFFFSLFLGACFCAVGSLTRPGGLFLGAGSFLRQRGPLFVGGVCPNERLGAGASPPFFVLISWEPGGDFFFFVLRKARRGPP

SEQ ID NO: 307421 - protein, 99 aa, Zea mays
  Clone ID: MRT4577_43439C.1.pep
SACLVYQGTRPHPSPALGKDSSPRQIHASPEGPLSQQTHPRLARSPARADFVGQRPRPDRPTNRPYRMRIQCGDRLTPYPDTRASVSKVEVTAVTSPLY

SEQ ID NO: 307422 - protein, 93 aa, Zea mays
  Clone ID: MRT4577_4343C.1.pep
SYTPERVILKETVTIATGKQLIKQNTSSRQLHSFAVQEEASRICFGVTTQVFTNPYDQWGQSLLIQCLQEIAKPTELESASLREEALQKKIKL

SEQ ID NO: 307423 - protein, 254 aa, Zea mays
  Clone ID: MRT4577_43440C.1.pep
MGRVIRNQRKGRGSIFTANTRLNKNPAQFRTLDYAERNGYIRGVVKEIVHDSGRGAPLARVSFRNPYKFKHDTETFIANEGMYTGQFIYAGKNAALTIGNVLPLHSVPEGTVLTNVEDKNGDRGALGRTSGNYVTVIGHNPDEGKTRVKLPSGAKKVLPSSCRGMVGIVAGGGRTDKPLMKASRAKHKFAAKRNSWPKTRGVAMNPVDHPHGGGNHQHIGKASTISRYAAAGQKAGLIAARRTGLLRGTQKTKD

SEQ ID NO: 307424 - protein, 58 aa, Zea mays
  Clone ID: MRT4577_43441C.1.pep
KERGNHLQFWKIIGETWSTIFDSLGFLHFLKKWRVPVTLTFYMISVPISNAGYLLTLY

SEQ ID NO: 307425 - protein, 55 aa, Zea mays
  Clone ID: MRT4577_43442C.1.pep
EKGFFRVRGNPLGGLNFGFLAAFFFKSFPKMGKRAGVQHGVPMFDSAFGLCRLAP

SEQ ID NO: 307426 - protein, 39 aa, Zea mays
  unsure (1)..(39): unsure at all Xaa locations
  Clone ID: MRT4577_43443C.1.pep
XXXTGXLQNLSGTNTISYTTFSIISLLGCKQTTHILLYQ

SEQ ID NO: 307427 - protein, 101 aa, Zea mays
  Clone ID: MRT4577_43444C.1.pep
MLHRPRASASPPLAGGCRHRYAMAVILSSAAPTILTRATRPLRQPKSGLRGGLARLSTALGLAHAGAGTGAALAAPIYYDEMLRLSSDSDSDVSRFSLPEL

SEQ ID NO: 307428 - protein, 86 aa, Zea mays
  Clone ID: MRT4577_43445C.1.pep
LPCMGKGGLNFPTIKDPLQPKSISGRKQITPRFLFNPTIKNPFFCRPNHLWKIKPCRLGKKGSSYQIRIPPLNKTRSKPKNFSFWG

SEQ ID NO: 307429 - protein, 82 aa, Zea mays
  Clone ID: MRT4577_43446C.1.pep
MSSHICVLLASPFVRHPHHQHLPLRHVAACYYDAFPYRSLRCNLRRLAVEAEMQAMAGHTPRTNGRDHVARIDSDASSTSLV

SEQ ID NO: 307430 - protein, 57 aa, Zea mays
  Clone ID: MRT4577_43447C.1.pep
RALVLGAKKFFALVAAVPLLSQGAPVKFIPGLRAENGVVGLELQTPLGSFDLELNQV

SEQ ID NO: 307431 - protein, 42 aa, Zea mays
  Clone ID: MRT4577_43448C.1.pep
KKKNLDLSFKRAKVYIKHTPTWLPNNTQCRMKITRTALFITC

SEQ ID NO: 307432 - protein, 95 aa, Zea mays
  unsure (1)..(95): unsure at all Xaa locations
  Clone ID: MRT4577_43449C.1.pep
TLFISSYAFIISHCSLASSFIIPQFLPPVTSMAGKNPTEQAYMLQQTIAARGXPQPIALLLQQNKGHPTIRTIATQRQQQILPAXLRKIAMVNPG

SEQ ID NO: 307433 - protein, 48 aa, Zea mays
  Clone ID: MRT4577_4344C.1.pep
MFIIIMLHLHTDFSFLEMNPFAMVNGEPYPLDIRGELDDTTAFKNFKK

SEQ ID NO: 307434 - protein, 59 aa, Zea mays
  Clone ID: MRT4577_43450C.1.pep
GCLVPCPCIRPGRSKRFTSLALSWILCLCSRSLHALPLFFSAFPRIWVLRFPRFFIIIN

SEQ ID NO: 307435 - protein, 102 aa, Zea mays
  Clone ID: MRT4577_43451C.1.pep
GRPFFFFFFFFFFFFFFFFFFFGFLGGTKHFIQIPGGFFLFQISEFQSLSPQQGGSKSFFHDSFYKTRGRAFPQKSMCGGVNLILSGLPQGPKQDYPQRWQN

SEQ ID NO: 307436 - protein, 102 aa, Zea mays
  unsure (1)..(102): unsure at all Xaa locations
  Clone ID: MRT4577_43452C.1.pep
MTMSISSTHKTRPXTTGELLRVIYWDIKYXEDSYDHDRPEEIPKKFRLILRDEMATKAVALMRTYQGEQVEAAMHMHSHVTEHEPDHDHDGEDEDTAGDDND

SEQ ID NO: 307437 - protein, 106 aa, Zea mays
  unsure (1)..(106): unsure at all Xaa locations
  Clone ID: MRT4577_43453C.1.pep
VSVCLGVILVDGGKDGLEQGLDDVVGAWGGASAEVAGAGGHGAAASEGTSESSRHRRSSRRNPSVDAAAASGEVSAPFRSQVSTQPSVKTRVGERVGVRVGRPXFR

SEQ ID NO: 307438 - protein, 72 aa, Zea mays
  Clone ID: MRT4577_43454C.1.pep
TCGWEVKRNGPGGTECSREGEDGKSSRLGPAPLCYLPDDAEETAFLLEASVASSVPGRWCLPGGVAGRSRGG

SEQ ID NO: 307439 - protein, 185 aa, Zea mays
  Clone ID: MRT4577_43455C.1.pep
GAHHPYPQPSDRPAALCFLFNACELLFFASRSPALPSSAPAPSSPSRFSVDRCPARISARQAPSRALALGFSPWCARLYRTSIFLFLDGPILSSSLSFAIADSSNLARPCVLTCRAPCSASPQAPFAARSDLALVLLVASPLRIFKLSRRSLLMARPPSPFCSAVLPTELSHGTLSFCASSPVKL

SEQ ID NO: 307440 - protein, 55 aa, Zea mays
  Clone ID: MRT4577_43456C.1.pep
VKRGTTAVLIIRNHVIKPTSLYFVKNPPGALGEATQRNALKLEHILFCLLGIDSP

SEQ ID NO: 307441 - protein, 254 aa, Zea mays
  Clone ID: MRT4577_43457C.1.pep
MADHKEEQSVMDKISEKFHGGDSSSSSDSDDEKKKGSSSASATEAMKAKIYRLFGRERPVHSVLGGGKPADLVLWRNKKISGGVLAGATAIWLLFEVMEYHLLTLVCHCLIVSLAILFLWSNASSFINKSPPNIPEVKIPEDVSVNVALTLRYEINRGFATLREIGHGHDLKKFLIVIAGLWLLSVLGSCCNFLTLFYIVFVALYTIPVLYEKYEDKVDAFGEKAMIELKKYYAIFDEKCLSKIPKGPLKDKKH

SEQ ID NO: 307442 - protein, 253 aa, Zea mays
  Clone ID: MRT4577_43458C.1.pep
MADHKEEQSVMDKISEKFHGGDSSSSSDSDDEKKKGSSSASATEAMKAKIYRLFGRERPVHSVLGGGKPADLVLWRNKKISGGVLAGATAIWLLFEVMEYHLLTLVCHCLIVSLAILFLWSNASSFINKSPPNIPEVKIPEDVSVNVALTLRYEINRGFATLREIGHGHDLKKFLIVIAGLWLFSVLGSCCNFLTLFYIVFVALYTIPVLYEKYEDKVDAFGEKAMIELKKYYAIFDEKCLSKIPKGLKDKKH

SEQ ID NO: 307443 - protein, 256 aa, Zea mays
  Clone ID: MRT4577_43459C.1.pep
MADHKEESVPESVMDKITEKFHGGDSSSSSDSDDEKKGSSSASAAEAMKAKIYRLFGRERPVHSVLGGGKPADLILWRNRKISGGVLAGATTIWLLFEVMEYHFLTLVCHCLILSLAILFLWSNASTFINKSPPNIPEVKIPEDVAVNVALSLRYEINRGFATLREIGHGRDLKKFLIVIAGLWLLSVLGSCCNFLTLFYIVFVALYTVPVLYEKYEDKVDAFGEKAMIEMKKYYAIFDEKCLSKIPKGPLKDKKH

SEQ ID NO: 307444 - protein, 172 aa, Zea mays
  unsure (1)..(172): unsure at all Xaa locations
  Clone ID: MRT4577_4345C.1.pep
SARTRQNLPTRRLSWPRIGAQTHKGGETMTEKTNTSYGEYEDTIDNANAMIQHKEGIHPDQQRVIFADEHIEDGGTLDDYNIHKEYTLHLVLRLQSGAKKRMKNTYTKANKIKHELTNVNLSALQFYKVDDATCKATRLXEECRNTEXGADVLVXHHLQRLYCCTSGLTYVY

SEQ ID NO: 307445 - protein, 212 aa, Zea mays
  Clone ID: MRT4577_43460C.1.pep
MTSHARVRKLGIRLERRGGMEPDKAGEAAKEPTETEAGDSVDPRELVSSDDEIDYSVEPDFYDPDLDDVDERWVSRQRKGRTSDAVLSCPACFTTLCLDCQRHEKYVNQYRAMFVRNCKIKTDQVLREGKSKRKKRRGGRAGDPAAASEGESKGQSYHPVCCEVCSTEVGVLDEDEEWYVRSRRPHHHIRKLLRYAICLLSLISLYIGMMRF

SEQ ID NO: 307446 - protein, 32 aa, Zea mays
  Clone ID: MRT4577_43461C.1.pep
GTTGISQGYKVKAATSFSVNKGFEWLTLTHGV

SEQ ID NO: 307447 - protein, 257 aa, Zea mays
  Clone ID: MRT4577_43462C.1.pep
MADHKEEPVPESVMDKITEKFHGGDSSSSSSDSDDEKKGSSLASAAEAMKAKIYRLFGRERPVHSVLGGGKPADLILWRNRKISGGVLAGATAIWLLFEVMEYHLLTLVCHCLILSLAILFLWSNASTFINKSPPNIPEVKIPEDVAVNVALSLRYEINRGFATLREIGHGRDLKKFLIVIAGLWLLSVLGSCCNFLTLFYIVFVALYTVPVLYEKYEDKVDAFGEKAMTELKKYYAIFDEKCLSKIPKGPLKDKKH

SEQ ID NO: 307448 - protein, 169 aa, Zea mays
  Clone ID: MRT4577_43463C.1.pep
MEPDKAGEAAKEPTETEAGDSVDPRELVSSDDEIDYSVEPDFYDPDLDDVDERWVSRQRKGRTSDAVLSCPACFTTLCLDCQRHEKYVNQYRAMFVRNCKIKTDQVLREGKSKRKKRRGGSAGDPAAASEGESKGQSYHPVCCEVCSTEVGVLDEDEVYHFFNVIPSNS

SEQ ID NO: 307449 - protein, 294 aa, Zea mays
  Clone ID: MRT4577_43464C.1.pep
MRSFAPVFLSAVVAWLELAGTAQGGNFYQDTEMTWGDGRGKVVDGGRGLDLTLDRTSGSGFQSKSEYLFGKIDMQIKLVPGNSAGTVTTFYLSSQGDAHDEIDFEFLGNVSGEPYTLHTNVFTRGQGQREQQFRLWFDPTTAFHTYSILWNPQHVIFAVDGTPVRDFKNHEARGVAFPRMQPMRLYASLWNADDWATQGGRVKADWSKAPFVASFRGFSADACVWDGGRQRCPEGTMEAAAVAGAGSGRGWWNQQLSDMSYRRMRWVQRKFMIYNYCADAKRFPQGVPAECKLR

SEQ ID NO: 307450 - protein, 77 aa, Zea mays
  unsure (1)..(77): unsure at all Xaa locations
  Clone ID: MRT4577_43465C.1.pep
IDVDGVLQIKGCAACLIDTWDELRTTVTRFNGTFNDLDYHQVAXLAIXLEXXXLAXEQIRLRHVPSRPXIQRQEAAI

SEQ ID NO: 307451 - protein, 113 aa, Zea mays
  unsure (1)..(113): unsure at all Xaa locations
  Clone ID: MRT4577_43466C.1.pep
DLRLFCIFFLYSQRFNHHFSDLVRPRSLCSQYCAGYFATRLCXKKKKKKKKKKKKKKKKKKKKKKKKKKKKKKKKKKKKKKKKKKKKGGALFKDPNFIPRGLKKKIFFLGPPK

SEQ ID NO: 307452 - protein, 94 aa, Zea mays
  Clone ID: MRT4577_43467C.1.pep
KLVHKNQTPSKSVPPSKSVPEAPKKAPMGIQHSTLVYLMAMFLLCGCVPVVCQNHSPQSQRVLEPLKPHTAIWLSISKLRRSDGLAPNLLFIVQ

SEQ ID NO: 307453 - protein, 76 aa, Zea mays
  unsure (1)..(76): unsure at all Xaa locations
  Clone ID: MRT4577_43468C.1.pep
GWVAWVPPSLLLASATIPGTASLSELNVPILAVLSLVSPRMGCLSQVRFGCSIRKICGEGNRHRQTLHHVGXSPTV

SEQ ID NO: 307454 - protein, 85 aa, Zea mays
  Clone ID: MRT4577_43469C.1.pep
PVSEHARMNQKGRFTSPTSTAKDVCKGRPSSQRASAMMQEKLAILVTRCAYLDLCLIFRRFLLSLRILFFFHCNQTKQESVHPHS

SEQ ID NO: 307455 - protein, 43 aa, Zea mays
  Clone ID: MRT4577_4346C.1.pep
VCCYFRNDRCYLSLAANVSRSTSLLKSHSYEMSKWAPPMMGCW

SEQ ID NO: 307456 - protein, 85 aa, Zea mays
  Clone ID: MRT4577_43470C.1.pep
HIYHQTWPVQDGSHKDEKHGKRSRENIGPVTGPYGACGRTQGIERVDLLRSGFKPPRAPIHLAHVHWPYMGMPFMGGLSAIQDLC

SEQ ID NO: 307457 - protein, 134 aa, Zea mays
  unsure (1)..(134): unsure at all Xaa locations
  Clone ID: MRT4577_43471C.1.pep
CSKFIEKKKKKKKKKKKKKKKKKKKKKKKKKKKKKKKKKKKKKKKKRKKGRPFKKTKLNPPGNPKKKFFKRAPKIKSMAPXKKXKLKKPCLTQKKTLEKKSPFPKLEKKKKAPNQSPSQKFPNPKWKREPPFNR

SEQ ID NO: 307458 - protein, 54 aa, Zea mays
  Clone ID: MRT4577_43472C.1.pep
HRSGYGGQAPPNMKLMRLSPSVSPKHSISIESLLIYSNTCSRIHTQECMPPAYL

SEQ ID NO: 307459 - protein, 86 aa, Zea mays
  unsure (1)..(86): unsure at all Xaa locations
  Clone ID: MRT4577_43473C.1.pep
EDSPKDGKQSLLQRGHRRHVPQGGLAETPDAEXNPKRLDQDNGYKEAGHRGGLNEGNGKKWKGQMRPKKHNQTVTNKMTGDGNTLK

SEQ ID NO: 307460 - protein, 186 aa, Zea mays
  Clone ID: MRT4577_43474C.1.pep
MEYGLSDPEKAQSSCSSTIAIDNTQQGRFAKFLDPHPSTNALKNTASAATRLHGLYPFPWPTYAVVAMDRDSSSSVSASDGSSEAGGRGGCCSSPQSTRSLVVVDTAANLSRTASDASTSLSDRSSSVDVDHSGPFQPAAAAVAKLIGRSSPPADAAVLRRLSIEPRAEVLDGGSTQDEMQQARDG

SEQ ID NO: 307461 - protein, 121 aa, Zea mays
  Clone ID: MRT4577_43475C.1.pep
SDIDLSPHHPQTRTMRSTRGDDVDNNPLRDKCPAVNLRRGQHGDPVLRAPRGHGRAARHDAADHGLSGPTSLSSSTTTWRTRPTSTENQIYKMSNSNMACCACPSANNACESFNPFNWYEK

SEQ ID NO: 307462 - protein, 183 aa, Zea mays
  Clone ID: MRT4577_43476C.1.pep
FFFFFFFFFFFFFFFFFFFFFFSFSFLGGQPKNGGGSQKKKSRDPQGGANPGGKAFSQPLPAGKRIGDKAQSPTGDPHKIGGKPTPAQKIGRQGHFGTKPPQKKKTGGRKRKTGPPLSGAKKNHPRDRGVYSTKNRQKTPYLKRATFNLWRETTKNTPITDLRTPGNPHSYKTRERGMQLLWG

SEQ ID NO: 307463 - protein, 66 aa, Zea mays
  Clone ID: MRT4577_43477C.1.pep
SFFPRTSQQAGLWYGKPNSLTLWIQQQSSCIYLITLFSTYQLLQQYLGLLHKHRTHYNTWLQPVLL

SEQ ID NO: 307464 - protein, 133 aa, Zea mays
  unsure (1)..(133): unsure at all Xaa locations
  Clone ID: MRT4577_43478C.1.pep
MPASAMAISYARMAGTPINVGSCGHGHIPMRKPVDKPKVRESVSRWYGPQGVKYLGPLAGEPPSYLVGEFPGVDGWDTVGLSADPEPYAKTRDLQLIXAHAARLGVLXCVFRXLSRRQGGKGGEAEWCKAVSQ

SEQ ID NO: 307465 - protein, 45 aa, Zea mays
  Clone ID: MRT4577_43479C.1.pep
ITPFIVFIHTYDSLIQSGYMPMLFKITPKTSTMCVYIKFRPTSSR

SEQ ID NO: 307466 - protein, 113 aa, Zea mays
  Clone ID: MRT4577_4347C.1.pep
PKAAPKLAPSNRSTSDIVKRTPGPLNGHKCAFFGSTTSRPEVPPNAEPPAKKILTNPQPIKPPAPVKQKTAAIAGCCPVPFSSPPLPTLPAPGRPLFLFPFPVGSPRKEGPTG

SEQ ID NO: 307467 - protein, 69 aa, Zea mays
  Clone ID: MRT4577_43480C.1.pep
LKKKIKKNMRIQYLQTYLWNTLNLPCILAYNASYTVPQNLLFGTKVYNQRNCQNPECIPFHLQYQLIPY

SEQ ID NO: 307468 - protein, 116 aa, Zea mays
  Clone ID: MRT4577_43481C.1.pep
PSFFFWVFINFYLLFISITNNIINLRTTYLKPSTKPNKHGREDYTNSKAQTQMKNPAAHKKKNEKTPTFYSYQPSSPKKKKGPAPEKKKKPRPYKKKKRAQSLWHTHQQKGEPQPP

SEQ ID NO: 307469 - protein, 53 aa, Zea mays
  Clone ID: MRT4577_43482C.1.pep
PTRTRKKQRLTLTLGTHTLRTSRPGCLEGPSLTNPAFQVLSFPTEDLKSIKWP

SEQ ID NO: 307470 - protein, 84 aa, Zea mays
  unsure (1)..(84): unsure at all Xaa locations
  Clone ID: MRT4577_43483C.1.pep
KGCLDKITFFXFGPRFFFIPIKKFGGSFGGPPWFKNPYYFSPNKIRALKKRQKPGKFSKKFKAKFRRKMPKIENPLEPNKFFKF

SEQ ID NO: 307471 - protein, 80 aa, Zea mays
  unsure (1)..(80): unsure at all Xaa locations
  Clone ID: MRT4577_43484C.1.pep
KWGITCHPPSLVPGGDWPKVQSPVCMFSTSXSVVGVSCPIVPNLDLMFPKGPLGLWYVGEDMEEADFPRAREDLGPSEKV

SEQ ID NO: 307472 - protein, 174 aa, Zea mays
  Clone ID: MRT4577_43485C.1.pep
MPAKFSQPEPFKVQVPEEEIQRLRTLLKAQRLPENPILPDATFQTGTELSWMQKAKRHLIDFDWRAAERTLNSFDQFLVEIEGATIHFVHQKSTHKNAIPLLLLHGWGSTVSEFNKVISPLVNPPEGKQAFHVVAPSLPGIGYSPVLPKAGANVEDNARIFNTLMTEVLGYETY

SEQ ID NO: 307473 - protein, 105 aa, Zea mays
  Clone ID: MRT4577_43486C.1.pep
RVWFVVWIVYRRPFSPRYRLCPWFPQVLVPLLVGKAGSPPGAGRDFRGRPGGRAGFFLSPLPFWGHTLCLAGPFFGSLPLCVHKGSPQPPMFFLQFLRKLCRVFP

SEQ ID NO: 307474 - protein, 54 aa, Zea mays
  Clone ID: MRT4577_43487C.1.pep
YMGHITSVGFTIEKSTSSPKSPNHPTPPQRVETLACTYTELPHINFEATTVRDV

SEQ ID NO: 307475 - protein, 41 aa, Zea mays
  Clone ID: MRT4577_43488C.1.pep
KNATNSGLFIVIPWTRMGHPLLVRTNKVTLSTIFYPLCQRH

SEQ ID NO: 307476 - protein, 92 aa, Zea mays
  Clone ID: MRT4577_43489C.1.pep
DRGRKLYSPKRLATSPPPPSKQARRPLVYVVATGVTGQRRHISRRSARPPPRLASLRLRHVAQPHLVLPSARPLLPAGATPSLRAVAVRSGS

SEQ ID NO: 307477 - protein, 124 aa, Zea mays
  Clone ID: MRT4577_4348C.1.pep
RTRGPHTSRGKRSNEHRHARGMARALALSALLLVASVDEAFAAEAPAASPKHSDSTPSKAPSSSPDKSDKALTASAENAEDTPKATPAKAPATASKSEAQPLEARDSWCSAASPTIESAASEKA

SEQ ID NO: 307478 - protein, 178 aa, Zea mays
  unsure (1)..(178): unsure at all Xaa locations
  Clone ID: MRT4577_43490C.1.pep
MMGPVWWAVLVLLAMADAVAGRFVVEKNSVQVTSPDSLKGKYECAIGNFGLPQYGGTLQGWVVYPKDNKQACKEFDVSFKGHKSGARPNFVLIDRGECFFTTKAWNAQLAGAAAILVVDSKDEPLITMDNPEDTGTKHLENITIPSVLITKKXLGEDLKKSGENGDMGSXPREWRESL

SEQ ID NO: 307479 - protein, 102 aa, Zea mays
  Clone ID: MRT4577_43491C.1.pep
STPRSPGHYETGGIVHDLGGGFSKRGWGLVRGSGYSASSRTQHLVVEVDMACLPDSARMLVLADAIALAVQVDIACVPDSARVVVLTAADDDVVAATDVDLS

SEQ ID NO: 307480 - protein, 61 aa, Zea mays
  Clone ID: MRT4577_43492C.1.pep
HDIRFSVLGKKIWVTAVSTGGVASGCWQCRIRGDLLLRAHPLLVCFRLLGRKFPTGRWADA

SEQ ID NO: 307481 - protein, 90 aa, Zea mays
  Clone ID: MRT4577_43493C.1.pep
GGKKHSKTRGGSRQLNKRGYYGPITKILNLREGGKGKNNKTALQFIPIWFSRPPPKISPSPGFLTPPGGGGTEKKKDPLQTWKKKGLLGN

SEQ ID NO: 307482 - protein, 129 aa, Zea mays
  Clone ID: MRT4577_43494C.1.pep
MKGGGAMRPSPMFYVHEADVVQIHHFLEECSLCAKSLSGDIFMYRGDTPFCSEECREQQIEVDRAKHRRKKRAAAHALSARSREHRHQQQLQQHHHQQQQPQPRNAGMDTRHPWVDAGFARPRAPALRV

SEQ ID NO: 307483 - protein, 72 aa, Zea mays
  Clone ID: MRT4577_43495C.1.pep
LRGDLSAASSPHGVGDAALTSVVVFDNEQEASLGDRDPCRRGERAPGIGSRRAALVPTAPVPPAPPPLRQVT

SEQ ID NO: 307484 - protein, 73 aa, Zea mays
  Clone ID: MRT4577_43496C.1.pep
PFPLTRGWSAGAASKPLELNTDVSCWSHTSLKVDVDDLRVVEARHGVNRRPPLHVLRAQHAHHKICFAQAGCR

SEQ ID NO: 307485 - protein, 76 aa, Zea mays
  Clone ID: MRT4577_43497C.1.pep
CHSGLYILFICLIKLRGFGTRDESPAGHSCRHDVIQVSTYSSTHREQNSGDVSSSHVSYLLATKTDDISISVVPAW

SEQ ID NO: 307486 - protein, 123 aa, Zea mays
  unsure (1)..(123): unsure at all Xaa locations
  Clone ID: MRT4577_43498C.1.pep
MSSNLTDMGDGTRGITSRALIEKPAAGTRDAFGEGRITMRKTDTKPKPAADGXPWYGADRALGLGPTDDWPPSYQNREAPGDYGWDTATLHADPETSAKNRELEVIHCRWDTLSTLGRVCHEL

SEQ ID NO: 307487 - protein, 64 aa, Zea mays
  Clone ID: MRT4577_43499C.1.pep
TLHTTLTFSFTSSHNERGISQNTCASKLTPLLSHQQRSYRHPSPTTFTPLPPLMPNLPTKYLLT

SEQ ID NO: 307488 - protein, 424 aa, Zea mays
  unsure (1)..(424): unsure at all Xaa locations
  Clone ID: MRT4577_4349C.1.pep
MAERVVGVCVGPKDGGTSVAERVVGVCVGPKDGGRGLRAAAGKGRYRYTQMVDCMQEWPEPVVRVQALAESGLSVIPRCYVKPPCDRPAVSPAAATTVQETTEPSDMSIPVVDLGXAGGXDGGAAVTEAVAAACREWGFFQVVGHGVRPELLRAAREAWRGFFRRPLAERQRYANSPRTYEGYGSRLGVQKGAALDWGDYFFLHLAPEAAKSTPKFWPAVPGNCKEVSEEYGREVVRLCELLMRVMSVSLGLDEAHLQRAFGGAGCCGATLRANYYPRCPQPDLTLGLSAHSDPGVLTALLADEHVRGLQVRRSAGDWVDVRPVRDAFIVNVGDQVQIMSNSVYKSVEHRVVVNAEEERISLAIFYNPKGDVPISPAPELVTAAKLPPLYPTMTFDEYRLYVRSKGARGKAQIEALKGQASPEN

SEQ ID NO: 307489 - protein, 54 aa, Zea mays
  Clone ID: MRT4577_434C.1.pep
LLFGRIHLEHLTTCSDQSKLVPSETNVLFSKHVRFITRLLVVIIRLILVPPPPE

SEQ ID NO: 307490 - protein, 111 aa, Zea mays
  Clone ID: MRT4577_43500C.1.pep
MAYVERGVVKDKRTIWRLSIISDFFWAIVSFIRIFFDTLFSLDKTDNFKKGYGAGKKWDGGPGGGGRGPYGGGGGGGFGGGGGGGSRGPRTLSDIQSNDHSSLPACGSCCG

SEQ ID NO: 307491 - protein, 106 aa, Zea mays
  Clone ID: MRT4577_43501C.1.pep
MAKNPKDAAPEEEMPAAAEEQAAPAATVKVLFFARARDLTGVADSAVEVPPGSTAGECLARVLAQFPKLEEIRGSVVLALNEEYAADSAAVADGDELAVIPPISGG

SEQ ID NO: 307492 - protein, 65 aa, Zea mays
  Clone ID: MRT4577_43502C.1.pep
PTCKLHILGNILVKKEYVLAGHTTVPVHSNGKSSPWMEWGAGVGVRLVHFCLDQLWFCFIPLNLQ

SEQ ID NO: 307493 - protein, 142 aa, Zea mays
  unsure (1)..(142): unsure at all Xaa locations
  Clone ID: MRT4577_43503C.1.pep
MLAAANCLLSAGLHLVRRHSSPPKGCGGHSHTQLGKTMSCPAPDTAAAGAGMSVPCPCSRFQLRHGDLKSGPEATGSAGTGAHLASSASKRHSFDVGKLPGPGSVPVPASSNAARRFVGCVSASXVEQSEDYTRIIARGPNP

SEQ ID NO: 307494 - protein, 139 aa, Zea mays
  Clone ID: MRT4577_43504C.1.pep
DLPLIGLPQPGRRPQVDLDGQARRQHRRGARRDAGDHGFPPQSRCASIVDPVHGCTPYRSEVYIYNMNISDVTCLPVRPTIMYVCARFYRSYKVVVKIMVSSVLMNKKDQNNVHPFTIGYMKMCSVVCLKNIKNRRARC

SEQ ID NO: 307495 - protein, 75 aa, Zea mays
  Clone ID: MRT4577_43505C.1.pep
GDTIFTGETVLPLFSPGFNAPPYGEGGFPCGSGSDIKGLTKGSAQGAVACFKGVSFFFSNFFWEGGGLKKCFNHP

SEQ ID NO: 307496 - protein, 54 aa, Zea mays
  Clone ID: MRT4577_43506C.1.pep
NMSNDYSFSGELLYGGSISTLPTPSQMGDEIKWGGGGGAYLPTYPNFPFREQTT

SEQ ID NO: 307497 - protein, 132 aa, Zea mays
  unsure (1)..(132): unsure at all Xaa locations
  Clone ID: MRT4577_43507C.1.pep
MKLTAALAVVLGLFGTTNAHMRMDSPTPINHPNNPHKTNADYDYVAPLSGTAPYPXRGQLKNLNSKGGXPVVTWGAGSTQRVTIGGGAVHNGGXCQFYFYYDSGRTFSVIKSGIGGCFTGEDYCVIFMEDSN

SEQ ID NO: 307498 - protein, 57 aa, Zea mays
  unsure (1)..(57): unsure at all Xaa locations
  Clone ID: MRT4577_43508C.1.pep
MSPKVDFFLALSLLSAVTTYGXKPXCSAPNLPSTPSTPTPSTYTHGSXTIDLLKFKM

SEQ ID NO: 307499 - protein, 171 aa, Zea mays
  Clone ID: MRT4577_43509C.1.pep
LRVRPPTGNFTELAQLFGAKGLDTRDLAVLSAGHTIGTSHCFSFSDRLYNFTGLDDARDTDPELDRAYMARLRAKCASLDDNTTLVEMDPGSFRTFDLGYYANVAKRRGLFHSDAQLLADPSTRAYVLRHATGAHRDEFFADFAASMVKMGAVGVLTGGQGEVRKKCNVVN

SEQ ID NO: 307500 - protein, 133 aa, Zea mays
  Clone ID: MRT4577_4350C.1.pep
WSLQIQSWVGAWGPFCFCGPYEAVPAFPFVLDPIPGPCLPGPPCPSISAPPLVLQVRPFRVGATPRSKAGPLLSGSKVALGPFPPFCPFPGSAVPFYRRRPLQAPSIVVLRNFSLFVKSGVPWCSIVFFSLKE

SEQ ID NO: 307501 - protein, 82 aa, Zea mays
  Clone ID: MRT4577_43510C.1.pep
SSGNNAEYFFFFFFFFFFYKTLYKIIRQRSLLFSVVQINLFQHTACLGHTHTHTVTQSAHLVLNDMPQVNTAGREEEKPREL

SEQ ID NO: 307502 - protein, 63 aa, Zea mays
  Clone ID: MRT4577_43511C.1.pep
SARENFVQKKKKKKEGKKKKKKKKKKKKKKKKKKKKRGGRQLLELKGPAFNSGPVPPGFQSCP

SEQ ID NO: 307503 - protein, 109 aa, Zea mays
  Clone ID: MRT4577_43512C.1.pep
PRGRPGAQILTGDSLRPFRKSGAASHGFNDVHIRITVTLEACARQTNLLMISLEETTDSKTYIREKISYDNNIDLHPPDSIHLCHVHPHFKETSRNPHTYILNDQSPAP

SEQ ID NO: 307504 - protein, 66 aa, Zea mays
  Clone ID: MRT4577_43513C.1.pep
ILATPKCNHHLKGLVLALTHPATQDTFNQESLPSMMQWFNRPGLLGNFGKPQGTCCPNSRLYRGGN

SEQ ID NO: 307505 - protein, 73 aa, Zea mays
  Clone ID: MRT4577_43514C.1.pep
GRCRDTFLLYTQCRGKNNHIHPAKINNLVPATHTTTDIVVLCPSHVLSSATDDDPNLPDLQNPSRVYCHTTPY

SEQ ID NO: 307506 - protein, 64 aa, Zea mays
  Clone ID: MRT4577_43515C.1.pep
FDADSFQRNCQAILAFQENARNGACMDTETQLHMTRSCLIACTPMHKSRRLLCLIACTKSKSLD

SEQ ID NO: 307507 - protein, 133 aa, Zea mays
  unsure (1)..(133): unsure at all Xaa locations
  Clone ID: MRT4577_43516C.1.pep
MPMADRVHPMPSPSSPPLPPPPGRRRPDADPATETTPLHPSFFHAIRGLANATATATGAAAPLSPALDAAVRADNGRNGKVGVEYRAGGAVAVSYAGQRLAAGPWPAFRQAPRNVTVVAGRSLXKGGKIFSPP

SEQ ID NO: 307508 - protein, 58 aa, Zea mays
  Clone ID: MRT4577_43517C.1.pep
ADSGKICPKYPGDKQLFYFGQHEKRNKMFLQISDSLFLYQQKRGGAPKLGPKTRKPPF

SEQ ID NO: 307509 - protein, 88 aa, Zea mays
  Clone ID: MRT4577_43518C.1.pep
MNLQIALSSGNNAEYAGHVPKDNNKLLKKSWLIKVFLLKKKKKKKKKKKKKKKKKKKKKKKKKKKKKKKKPKKKKKKKKKKPPRFSPP

SEQ ID NO: 307510 - protein, 219 aa, Zea mays
  Clone ID: MRT4577_43519C.1.pep
GVHNTAGAAKHQAVALRVQGDLAAFYNCRFDAFQDTLYVHARRQFFRNCVISGTIDFIFGNSAAVFQNCLIITRRPMDNQQNSVTAHGRTDPNMKSGIVIQNCRLVPDQKLFADRFKIPSYLGRPWKEFSRLVIMESTIADFIKPEGYMPWNGDFGIKTLFYAEYNNRGPGAGTSKRVNWPGFHVITRKDAEQFTAGPFIDGALWLKFTGTPHILGFKS

SEQ ID NO: 307511 - protein, 180 aa, Zea mays
  unsure (1)..(180): unsure at all Xaa locations
  Clone ID: MRT4577_4351C.1.pep
LPPVIRAEGLMTTNKTLAGAEDAVLTLLIETVAQKPVPRADPVDLXPLLSAEVXTDTXRQLXFRAEDLFTDGDDAIDYVVRGHYTVAEDSDGLRRDRVRNFVDDGTGLQGFLLFNADSGGTDSELGCLLLERLSDDYGKKPKLGYTVYPSSEEYTSENEPYNMVLYTHSLFEHTDVAVLL

SEQ ID NO: 307512 - protein, 132 aa, Zea mays
  Clone ID: MRT4577_43520C.1.pep
AGVFLKCAKGKKIFLKGGKKKTVFIPGPYRGSKETPLTNWGKNKRAGFYKRKRTVHGFPPLQGDLNGSPPFLRGKTNRPAFHGIFFGHQAMTQSFWAFKGLILGSPKDFRFLLTRPNRFRGFEPGKKSSQGG

SEQ ID NO: 307513 - protein, 58 aa, Zea mays
  Clone ID: MRT4577_43521C.1.pep
MAAMACSASLAVAPLLLLSLLVSAAPTAQDRGGHRAGRVHQDTDPHDLNGQTLRQDEK

SEQ ID NO: 307514 - protein, 562 aa, Zea mays
  unsure (1)..(562): unsure at all Xaa locations
  Clone ID: MRT4577_43522C.1.pep
MANALLGGLWAIVVVAVVVGVVATVTHSGKKAGDDFTVPGEASIAXVRQVGRVPVRAHVVQGVVXEDALPGHQWHREPQGGVPQRCQGGAGVGENSGRAVQDDRRGXASDSMTESAREDCKKLLEDAVDDLRGMLEMAGGDIKVLISRSDDLETWLTGVMTFMDTCIDGFVDEKLKADMHTVLRNATELSSNALAITNSLGGILKKLDLGMFKKDSRRRLLSEQDEKGWPVWMRSPERKLLAAGNQPKANAVVAKDGSGQFKTIQQAVDAMPKGQQGRYVIYVKAGLYDEIVMVPKDKVNIFMYGDGPKQSRVTGRKSFADGITTMKTATFSVEASGFICKNMGFHNTAGAERHQAVALRVQGDLAAFYNCRFDAFQDTLYVHARRQFFRNCVISGTIDFIFGNSAAVFQNCLIVTRRPMDNQQNSVTAHGRTDPNMKSGLVIQNCRLVPDQKLFPDRFKIPSYLGRPWKEFSRLVIMESTIADFIKPEGYMPWNGDFGIKTLYYAEYNNRGPGAGTSKRVTWPGFHVIGRKDAEQFTAGPFIDGGLWLKFTGTPHILGFKF

SEQ ID NO: 307515 - protein, 565 aa, Zea mays
  unsure (1)..(565): unsure at all Xaa locations
  Clone ID: MRT4577_43523C.1.pep
MAKALLGGLSAILVVAVVVGVVATVTRSGKKAGDNFTVPGEASLAXVRQVGQVPVRAHPIQGVVREDTVPGHQWHREPQGGVPQRGQGGAGVGPDGGRAVQVDRRGQGXSDSMTESAREDCKKLLEDAADDLRGMLEMAGGDIKVLFSRSDDLETWLTGVMTFMDTCVDGFVDEKLKADMHSVLRNATELSSNALAITNSXLGGILKKMDLGMFSKDSRRRLLSSEQDEKGWPVWMRSPERKLLASGNQPKPNAIVAKDGSGQFKSIQQAVDAVPKGHQGRYVIYVKAGLYDEIVMVPKDKVNIFMYGDGPKQSRVTGRKSFADGITTMKTATFSVEASGFICKNMGFHNTAGAERHQAVALRVQGDLAAFYNCRFDAFQDTLYVHARRQFFRNCVVSGTIDFIFGNSAAVFQNCLIITRRPMDNQQNSVTAHGRTDPNMKSGLVIQNCRLVPDQKLFPDRFKIPSYLGRPWKEFSRLVIMESTIADFVKPEGYMPWNGDFALKTLYYAEYNNRGPGAGTSKRVNWPGFHVIGRKEAEPFTAGPFIDGAMWLKYTGAPHILGFKF

SEQ ID NO: 307516 - protein, 90 aa, Zea mays
  Clone ID: MRT4577_43524C.1.pep
RPYKSTPPSTQAFRPLLASRSKLSSGARVAVACPPVPTRTNARRGGALCPPRISAKETGVPRVVGVRWPSRTLLCFGRFVCSVTPYLVRF

SEQ ID NO: 307517 - protein, 272 aa, Zea mays
  unsure (1)..(272): unsure at all Xaa locations
  Clone ID: MRT4577_43525C.1.pep
RASSARSPPPRTPSSPRRAAPRSPPWSPXFLLVESNSDNPKIHSIEHRIIRPERIEGHAKYWRGVDYLIFNTYIWWMNTADMKVRRPNSRYWSEHDEVPRIGAYGLVFKTWSDWLNDNIDPARTLVFFMTISPPHISPHNWGNPDGIKCVRETLPYQNYSQHLDLYHDMRLYDLVVNVASSMEKVPVTVINITRMSDYRKDAHTSLYTIRQGKLLTPKQKADPEKFADCIHWCLPGVPDVWNQILYTRILSKSSWHSNFSPPPSQSLPLPPQ

SEQ ID NO: 307518 - protein, 235 aa, Zea mays
  Clone ID: MRT4577_43526C.1.pep
GRVKFLQRLSYLNVGIYPFTSLFLIMYCLLPALSLFSGQFIVATLDPTFLCYLLLITITLMLLCLLEVKWSGIGLEEWWRNEQFWVIGGTSAHLAAVLQGLLKVIAGIEISFTLTAKAAAEDDDDPFAELYLVKWTSLFIPPLAVIGINIIALVVGVSRAVYAEIPQYSKLLGGGFFSFWVLAHYYPFAKGLMGRRGRTPTLVYVWAGLISITVSLLWITISPPDDRITQGGVDV

SEQ ID NO: 307519 - protein, 333 aa, Zea mays
  unsure (1)..(333): unsure at all Xaa locations
  Clone ID: MRT4577_43527C.1.pep
MAAARYDVEKGGRNNGDGKPSPPPPGHLYPQRDGEREWVPWLVPLVVAVNIVLFAVAMYVNNCPAHAASSRRGGAGSCVXRVPPPLLVPAAQREPAPRALVGHXQKLGALVWDKVVREHQGWRLVTCIWLHAGVAHLLANMISLVLIGLRLEQQFGYVRVGIIYLVSGVGGSVLSSLFIRNNISVGASGALFGLLGAMLSELFTNWTIYANKAAALVTLLVVIAINLAIGILPHVDNFAHIGGFLTGFLLGFVFLMRPHYGWMQRYALPSDVKYTTKKYLVYQWALLAVASVLAVIGFAIGLGMLFRGVNANDHCGWCHYLSCVPTSRWSCGK

SEQ ID NO: 307520 - protein, 47 aa, Zea mays
  Clone ID: MRT4577_43528C.1.pep
LFFCCDSRATERWRRYTTYEHVDGCLAAGSIMSAQHYCCFDSASISS

SEQ ID NO: 307521 - protein, 98 aa, Zea mays
  Clone ID: MRT4577_43529C.1.pep
EHVFWAAAMMVVLAVVALALAAAPRAEAGQNCICECMKLCVRTRIPSMGQCAGKCREMACTKSCEDACTRKGFPGLPSEGIPTCELEPLTPDETHMLH

SEQ ID NO: 307522 - protein, 52 aa, Zea mays
  Clone ID: MRT4577_4352C.1.pep
LSRLSLSSSVVKQVPAWACLSRTPSHSSCRARVGVSSVLEKPPLVLIVCKIK

SEQ ID NO: 307523 - protein, 74 aa, Zea mays
  Clone ID: MRT4577_43530C.1.pep
VVSLLTLPPTSSKAMPHKSKDRTECKNLIWSVPDQERHWQALPTFARSTISCCGSNGPPSLCSIQRLGPFHLAE

SEQ ID NO: 307524 - protein, 94 aa, Zea mays
  unsure (1)..(94): unsure at all Xaa locations
  Clone ID: MRT4577_43531C.1.pep
GVGFFFFSFLGDQKQTTWAPQXPTGFWPHPFIQQRRASLIFPRGPFIQGWFGTLFFPRKISLFSLGKMEKPWVSKLAPKGLKTREGRGLLCPKF

SEQ ID NO: 307525 - protein, 863 aa, Zea mays
  Clone ID: MRT4577_43532C.1.pep
MVGTSPGGGVFCFSSMVSSPRLLFLLLAGASLCCVAAQKTDTLRQGESLSGAATLVSSPEGVFEAGFFAPDPKQPSRQYLGIWYHSISPRTVVWVANRVAPATSASPSLTLTVTGELRVLDGTAANGTADAPLLWSSNTTSRAGPRGGYSAVLQDTGSLEVRSEDGVLWDSFWHPTDTILSGMRITLQAPGRGPKERMLFTSWASETDPSPGRYALGLDPGNSGQAYIWKDGNVTYWRSGQWNGVNFIGIPWRPLYRSGFTPAIDPVLGNYYTYTATNTSLQRFVVLPNGTDICYMVRKSSQDWELVWYQPSNECEYYATCGPNAKCTASQDGKAKCTCLKGFHPKLQEQWNAGNWSQGCIRSPPLGCETNQSGDGFLPMGNIKWPDFSYWVSTVGDEPGCRTVCLNNCSCGAYVYTATTGCLAWGNELIDMHELQTGAYTLNLKLPASELRGHHPIWKIATIISAIVLFVLAACLLLWWKHGRNIKDAVHGSWRSRHSSTQSQQNSAMLDISQSIRFDDDVEDGKSHELKVYSLDRIRTATSNFSDSNKLGEGGFGPVYMGTLPGGEEVAVKRLCRNSGQGLEEFKNEVILIAKLQHRNLVRLLGCCIQREEKILVYEYMPNKSLDAFLFNPEKQRLLDWKKRFDIIEGIARGLLYLHRDSRLRVVHRDLKASNILLDADMKPKISDFGMARMFGGDQNQFNTNRVVGTFGYMSPEYAMEGIFSVKSDVYGFGVLILEIITGKRAVSFHCHEDSLNIAGYAWRQWNEDNAAELIDPVIRASCSVRQVLRCIHIALLCVQDHADERPDIPTVILMLSNDSSSLPNPRPPTLMLRGREIESSKSSEKDRSHSIGTVTMTQLHGR

SEQ ID NO: 307526 - protein, 220 aa, Zea mays
  unsure (1)..(220): unsure at all Xaa locations
  Clone ID: MRT4577_43533C.1.pep
PDFEISFISIGFHPKLQEQWNAGNWSQGCIRSPPLGCETNQSGDGFLPMGNIKWPDFSYWVSTVGDEPGCRTVCLNNCSCGAYVYTATTGCLAWGNELIDMHELQTGAYTLNLKLPASELRGHHPIWKIATIISAIVLFVLAACLLLWWKHGRNIXDAVHGSWRSRHSSTQSQQNSAMLDISQSIRFDDDVEDGKSHETQVYSLDRIRTATSNFSDSNSL

SEQ ID NO: 307527 - protein, 230 aa, Zea mays
  unsure (1)..(230): unsure at all Xaa locations
  Clone ID: MRT4577_43534C.1.pep
GYMGTLPGGXEEVAVKRLCRNSGQGLEEFKNEVILIAKLQHRNLVRLLGCCIQREEKILVYEYMPNKSLDAFLFSMCPSLSALLISQYERTNXDWILITVVEXPEKQRLLDWKKRFDIIEGIARGLLYLHRDSRLRVVHRDLKASNILLDADMKPKISDFGMARMFGGDQNQFNTNRVVGTFGYMSPEYAMEGIFSVKSDVYGFXVLILEIITGKRAVSXHCHEDSLNIA

SEQ ID NO: 307528 - protein, 40 aa, Zea mays
  Clone ID: MRT4577_43535C.1.pep
TAGCTIGLIVLILGLVNLTFLASKHIDICQLPVYPARIIL

SEQ ID NO: 307529 - protein, 89 aa, Zea mays
  unsure (1)..(89): unsure at all Xaa locations
  Clone ID: MRT4577_43536C.1.pep
ARDHCPLSSSPRHGHLSGGLHNQQPILVKPGSNXALSKPCFKANLARTVSSKKGSKRIKLPPVGFHSRQTLHYIGGATFMAHQISPTGS

SEQ ID NO: 307530 - protein, 69 aa, Zea mays
  Clone ID: MRT4577_43537C.1.pep
VPVVRWNSFFSDTNAWADKRPSGDNALIAHTPEMDADSSCGCASFFSEALAPTRRNMEALNAYTLLATG

SEQ ID NO: 307531 - protein, 89 aa, Zea mays
  Clone ID: MRT4577_43538C.1.pep
TCSKPLGVNQPMTNVILVVAYTFWLGHMLNIGVQPDHIVWALPAAQHHRRHPAGSSNMSTSSSSCCAMSPPHVIAQCEDHLLSSQKVHW

SEQ ID NO: 307532 - protein, 76 aa, Zea mays
  Clone ID: MRT4577_43539C.1.pep
TCSKPLGVNQPMTNVILVVAYTFWLGHMLNIGVQPDHIVWALLTAHHHRRHPAGNSNMSTSSSSCCAMSPPHVTVI

SEQ ID NO: 307533 - protein, 75 aa, Zea mays
  Clone ID: MRT4577_4353C.1.pep
DRISKCGRSQLKPTIGLSLCFERICAYSKLEGSTVRRPSVYVLVFVCLKSSNIVHPDYHRSITNSRSIEVMLQFF

SEQ ID NO: 307534 - protein, 90 aa, Zea mays
  unsure (1)..(90): unsure at all Xaa locations
  Clone ID: MRT4577_43540C.1.pep
GHPWVLCQVQAVAALKGASLFAGWAAALAFGPRHRFLXXIPPPPRLGAIPVRSQWPPRVPVRHWRGAARNEQQRGMRRRPAAEPGDPSKD

SEQ ID NO: 307535 - protein, 76 aa, Zea mays
  unsure (1)..(76): unsure at all Xaa locations
  Clone ID: MRT4577_43541C.1.pep
PPPPPRAYGGCLGHCAGCAFRTRSDFLQHSCSTQTAFCGLRVSDCQVFFGESSRSLHTTQAPGLTDAGXHPGWPDR

SEQ ID NO: 307536 - protein, 180 aa, Zea mays
  unsure (1)..(180): unsure at all Xaa locations
  Clone ID: MRT4577_43542C.1.pep
GEKGGPPGRAPLIFQIRQKRNSNPGPEDRPPHNLRXAGGPSFDPKPPGXKNYPGGGGVKPPMPHPPAGTQKKWGPWPGSGTKTHPHPHPPPXVKPHINPCKVGXFSPPGGPPAKPKNPLRPGGPNPLPPNCRGCKPQKPPGRGQKQLPPNWLGPHPQGCPPGGGPXENPTLGGQLPLGPP

SEQ ID NO: 307537 - protein, 164 aa, Zea mays
  unsure (1)..(164): unsure at all Xaa locations
  Clone ID: MRT4577_43543C.1.pep
LALALLASPRPFLWVFRPGLAXELPPAFPDFLPPHPRGKVVEWAPQEKMLAPPPVGCFLTHCGWNSTLEGVPHGGPLLCWPSFSGPFPNQAYICDIWKVGLRVGPPGGDGLFPKKRIMERFSSLMGASGVKERVKKFKELAKRSMGPEGKSFKNIHPLMESMTK

SEQ ID NO: 307538 - protein, 60 aa, Zea mays
  unsure (1)..(60): unsure at all Xaa locations
  Clone ID: MRT4577_43544C.1.pep
KQKDGQRPHGRPKASQTPEGRGGKGGTKTXNLKMDRGRPREQKNILPRKQVQGQNQKGGD

SEQ ID NO: 307539 - protein, 52 aa, Zea mays
  Clone ID: MRT4577_43545C.1.pep
SYSDGETEPSLELLVLCNTMHDILPELKAIIQDLLVALRKGAGATVQAKMQA

SEQ ID NO: 307540 - protein, 64 aa, Zea mays
  Clone ID: MRT4577_43546C.1.pep
FILSSESYQILLGHINGRHTSRCQSHIYLYSTHPVLIIGGIYSCCGSYHFMTDSIGLSLVCVQS

SEQ ID NO: 307541 - protein, 91 aa, Zea mays
  Clone ID: MRT4577_43547C.1.pep
DAWADSLAKDLSALWTGAPGCSVCHRTVFGAPCPCKSEAATLGNSTTPSAIIHRTVRCASGSSANSCQRATLTAEQCYDRSHSRKSQGTGL

SEQ ID NO: 307542 - protein, 74 aa, Zea mays
  Clone ID: MRT4577_43548C.1.pep
HASARTRDGLSNGGSNYAAAMVNVSKTKKTYCENKECTKHTLYKDTQYKKGEDSLSAQGKRRYDRTQLGYGGQT

SEQ ID NO: 307543 - protein, 81 aa, Zea mays
  unsure (1)..(81): unsure at all Xaa locations
  Clone ID: MRT4577_43549C.1.pep
WVMPKCIGQRWAVTYYIFLRLNAPATRVXPVXPFRHAHLVGKAASVLSLFXCYADLAIQRVLCKTIKLGFVRDIPARSLCA

SEQ ID NO: 307544 - protein, 134 aa, Zea mays
  Clone ID: MRT4577_4354C.1.pep
STIEYVQHLRGRLKALQEERRQSSSSTGSAAESSPPLDARCCVGSPDDGGGVIPMVEADVRGTTVLLRVVCREKKGALITVLKELEKHGLSVVNTNVLPLAGSSLNITITARIEDGFSTAIELVNALNAALKKN

SEQ ID NO: 307545 - protein, 246 aa, Zea mays
  unsure (1)..(246): unsure at all Xaa locations
  Clone ID: MRT4577_43550C.1.pep
MSQAGAFPPGKKITVVFVIGGPGSGKGTQCSKIVRHFGFTHLSAGDLLRQQVQSDTEHGXTXARHFPICCRRQLAIYPSDMPIYLVSAMIKNLMHEGKLVPSDIIVRLLLTAMLQSGNDRFLVDGFPRNEENRRAYESIIGIEPELVLFIDCPREELERRILHRDQGRDDDNVDTIRKRFQVFHDSTLPVVLYYDRMGKVRRVDGAKSADAVFDDVKAIFTQLLTTQVHSLTHICLPFFFQLIVLS

SEQ ID NO: 307546 - protein, 73 aa, Zea mays
  unsure (1)..(73): unsure at all Xaa locations
  Clone ID: MRT4577_43551C.1.pep
SSARLPQCQMTTALHHPRQSSSRAGGGDQPDREQTVPCPRLLPVRVPHWLTPLTLTKVYGSSAXELSFCFPGG

SEQ ID NO: 307547 - protein, 130 aa, Zea mays
  Clone ID: MRT4577_43552C.1.pep
AAETQRHHQPSRSEAGAKFLEGHRIPDQDEVNARRDHHFGAALQMLPPHLLRITTLLQSPQDTARRDTQLRALLLQTHTLFHALVSAPQEQIVEDTDGHFPHRSIPQVHQSDLKYASWVRNIYRLRVSHV

SEQ ID NO: 307548 - protein, 91 aa, Zea mays
  Clone ID: MRT4577_43553C.1.pep
MYEHYGGTEVALTTESCLTAESLEALRGNKVGLDGPMATLTGKGDRAPNLAGREEPRLYANVWQCKNLGGYKTRSDDVNCVTLRVDSERPD

SEQ ID NO: 307549 - protein, 61 aa, Zea mays
  Clone ID: MRT4577_43554C.1.pep
YIIPIMMEWIWIHSVLKEILEMWFLNRWVEKVVWCRREGLEKVYNVPRFEDFVWIQNRVCE

SEQ ID NO: 307550 - protein, 32 aa, Zea mays
  Clone ID: MRT4577_43555C.1.pep
ISLAIGSPLHQLPLPLHVFIRTPHASSTWLFG

SEQ ID NO: 307551 - protein, 166 aa, Zea mays
  Clone ID: MRT4577_43556C.1.pep
MRTRHLYFTSLGMEVQVLDLSSDSEGEVSAHSPDHKRPSQQPGVDPNRRVGDNGSSAVDSLFEEAGAARPPRHPSDALNKGKEKVVDVESVESPKHGGESLGAAGRVLGAGSDPWSALVSKCKAGGSGNNGTECWDSWGDWGDQLTNSAPVARLGSERTGFHETYE

SEQ ID NO: 307552 - protein, 72 aa, Zea mays
  Clone ID: MRT4577_43557C.1.pep
LDRRNARWRGVTLQSTAASERLRQETGRKYVAIISCASENAGAGTPWRPLPWPSSNNRSSSPTPVPSQAPAV

SEQ ID NO: 307553 - protein, 67 aa, Zea mays
  Clone ID: MRT4577_43558C.1.pep
ELTSRWPPFFFFFFVLFLFIFLVSFFLLLFFGFFQSPWPGTGLIKLRGGTGPSRGLYSFFGGGESFF

SEQ ID NO: 307554 - protein, 100 aa, Zea mays
  Clone ID: MRT4577_43559C.1.pep
QSEHIVVVSPHRARTQDCFLLLPARPTWLQNQIRSCHWCLPSSSSKLQGPSPPPCIVACCYPPRERYFKSCIPSKMSEYMISKRGNHQIHKILDISIVIF

SEQ ID NO: 307555 - protein, 92 aa, Zea mays
  Clone ID: MRT4577_4355C.1.pep
EQNITALFCFQRAFSLWQGKSYYTITNILLLRPSAHWNKRRVTAPIFTRESIPVLFLSYYGYSAALTFDDPVTDVSTSSFSILNSWVYLGWR

SEQ ID NO: 307556 - protein, 105 aa, Zea mays
  unsure (1)..(105): unsure at all Xaa locations
  Clone ID: MRT4577_43560C.1.pep
MGVGMEVHQNRWIQKWDPGPENLQFNFPWGPPNLSVVGLFGPPVPLLVFKGLVPGFPIQGXDAGRPFREVSLNGVQGCRISQFLPPGCEEGSFPSVCVGIVLVLI

SEQ ID NO: 307557 - protein, 55 aa, Zea mays
  Clone ID: MRT4577_43561C.1.pep
TLETIEGQAPRAMATANLRHRAIPPQQTTKWPKEASFCQMLMHPVPETRPKTRCV

SEQ ID NO: 307558 - protein, 98 aa, Zea mays
  Clone ID: MRT4577_43562C.1.pep
LEAGREVVTSNTAHFDHFRRFPWHAISASATTKQSLCTFSIFTSSQAVLYAPTTHALLAVLFTIFFISIMTYIFSHKQKRCMRSSLDSSAFNNFAFLH

SEQ ID NO: 307559 - protein, 58 aa, Zea mays
  Clone ID: MRT4577_43563C.1.pep
TRIRNTEAVLFVVAADNSRPGLKESKMKLIYSDLQDQDVASRKNMTHLNEYAFGVMQL

SEQ ID NO: 307560 - protein, 134 aa, Zea mays
  unsure (1)..(134): unsure at all Xaa locations
  Clone ID: MRT4577_43564C.1.pep
MDIFPCTVKKKKKSHLTKILLPIIAFVLPLTFTALVWTCKRRGRRQKKKVQKRVMLEYLRSPDEMGDKNIEFPFISFEDIAAATDHFSDSNMLGKXGGFGKVYKGSVXEVPKEVAXXKRLSKGXSVQGXXEFKN

SEQ ID NO: 307561 - protein, 155 aa, Zea mays
  unsure (1)..(155): unsure at all Xaa locations
  Clone ID: MRT4577_43565C.1.pep
PCRPTRAAKVAELLMEGVHYTVELKGNNVDLADDGVAHAEIILGTDDLWDENDPWARFVMNALKAKVFYRRDVQYIVRDGKAIIINELTGRVEPKRRWSDGIHQAVXSKXGLKIHXSVIVAQITYQSLLKLYPKLSGMTGTANTEEKEFSKMFKM

SEQ ID NO: 307562 - protein, 440 aa, Zea mays
  Clone ID: MRT4577_43566C.1.pep
MSFRSMVRDIRESFGNISRRNFEVRIHHRGKSLGSSGDLQDRPAEVQQSRWASLPPELLCDVMKRLEEDDSSWPDRKDVVSCASVCTTWRDMCKDIVRSPEHCAKLTFPVSLKQPGPRDGVIQCFIKRDKSKLTYRLYLSLSSGVLDENGKFLLAAKRSRRMAHTEYAIFMDSRNFSRSSTGYIGKLRSNFLGTKFIIYDTQAPYNGGRVCTQERAPSRRLSSRKVSPRVPSGSYPVAQVNYELNVLGTRGPRRMQCAMHSIPASAVEPGGVVPGQPKELLPRLFDESFRSTATSSFSKYSVADSSMDLGSCPFSEVEVGGGSLREGDESEKERPLVLRNKAPRWHEQLQCWCLNFRGRVTVASVKNFQLIAPAKTQPQPQASGPPPPPPPSSSSYHDPVILQFGKVGRDMFTMDYRYPLSAFQAFAICLTSFDTKLACE

SEQ ID NO: 307563 - protein, 125 aa, Zea mays
  unsure (1)..(125): unsure at all Xaa locations
  Clone ID: MRT4577_43567C.1.pep
IRDLLLXRVETEKRXSLIKAWEDNEKAKADNKATKKVSVILSXXXXXXXXXEAEMKKIEEQLEKKKAEYAEKMXXKVAMIHREAEEKRAMVEAKRGEEVLKAEEMAAKYRATGHAPKKPIGCFGA

SEQ ID NO: 307564 - protein, 94 aa, Zea mays
  Clone ID: MRT4577_43568C.1.pep
NSYIILAPDKDQEHHGQRLASHRRAERRRQMGPYGLRDPVFRSLNRRAVGPLGATIGNWCFRSKIVIGYTLLINYERKAYTVTPGRPNEYDTCS

SEQ ID NO: 307565 - protein, 87 aa, Zea mays
  Clone ID: MRT4577_43569C.1.pep
LQHLWNSLPDGVVGQRIDGRLSALGNCIACNDHVALTHTDLDKETEEMIADVLGVEVFTHTIPGNILGGSFCSFSNRGCSVPLSGPR

SEQ ID NO: 307566 - protein, 82 aa, Zea mays
  Clone ID: MRT4577_4356C.1.pep
KKGFQEQVFNTQLNRGMFVIQNHVNVRLIWFGRKISRPAFTFLMGNVYLLFMFKHRYTQLSIDSIYLNDVVNLALLVLFHSM

SEQ ID NO: 307567 - protein, 40 aa, Zea mays
  Clone ID: MRT4577_43570C.1.pep
VSPLPPMIELECGPPPHGGQSQCEPWPELTIEIKIKKVCS

SEQ ID NO: 307568 - protein, 163 aa, Zea mays
  unsure (1)..(163): unsure at all Xaa locations
  Clone ID: MRT4577_43571C.1.pep
GFPPPCLSRNPSRRLLFTALLAAAAVSGHGRWSQRLLFRGGVRWPATPLHAPARHPARPLPHPXSPRCLPRPRPPPPPPRLHSPSFARSPRPPSATPSTRTPTRRPAPPSPRQPGEELWWIPPPPSSRTTTLPRTTPPSSPLPPPTTRPQATATATVAPRRCR

SEQ ID NO: 307569 - protein, 91 aa, Zea mays
  Clone ID: MRT4577_43572C.1.pep
LKAGTSLPATKRFPSESLGRKKRRASDMRQTRSSRPPSTHGSAAGMWGSAQGHTWVRGRQRIIWRQSQWPIKRTGTASVCSSRRTRCSSRS

SEQ ID NO: 307570 - protein, 108 aa, Zea mays
  Clone ID: MRT4577_43573C.1.pep
VEGKKDGRVGSYKVKKRSCKVKKIRRYRDTKKNRNLKLKKKLNQDNTMLILDMNHVNRCSRWHNNCRLSLVFMPRGHFLLLAGLAGDRAPHRRNVAELHRGFHYSAPS

SEQ ID NO: 307571 - protein, 72 aa, Zea mays
  unsure (1)..(72): unsure at all Xaa locations
  Clone ID: MRT4577_43574C.1.pep
MILLTSTSRVVFNPREHPQTDAYCGNVNPIGVTSFYDEGKLLSYTLMFDYHRHHGIXILIARIFNTYCPRMN

SEQ ID NO: 307572 - protein, 137 aa, Zea mays
  unsure (1)..(137): unsure at all Xaa locations
  Clone ID: MRT4577_43575C.1.pep
RRLTHPAFSPPSPNKVPPCWDIHRGDRKSSALASIPATTFAVILSVLFCAAAGTVVYNDLPDYVIHGRVYCDTCRARFETNVTEYISDAKARLECXLFFTGKLERSIDSVTDAIRTYSIVLNDRDDDDIYQVVLVES

SEQ ID NO: 307573 - protein, 112 aa, Zea mays
  unsure (1)..(112): unsure at all Xaa locations
  Clone ID: MRT4577_43576C.1.pep
PRSKTNSKDHRGENGGGGRXTGXQXTTAKPTRHQDEGGGAXXKTANXKERPQTPHTDAEEGKRDRQARRKRNPKGRAHRSQPXEQPXGQDHPAGRAAKXNGTRNTPTPPEGR

SEQ ID NO: 307574 - protein, 89 aa, Zea mays
  unsure (1)..(89): unsure at all Xaa locations
  Clone ID: MRT4577_43577C.1.pep
PFSLLPXXFYGNGVVLFRTPPAIFSERNGQKIIRGQGKMPKGPKPPGRMHRPQTVGKKVTGPEPLGKKTLGEPEQKKKAPGPRGPKKKQ

SEQ ID NO: 307575 - protein, 96 aa, Zea mays
  unsure (1)..(96): unsure at all Xaa locations
  Clone ID: MRT4577_43578C.1.pep
HXISYTXIXXXYXXQXHKSXPIPXXXXPXIFXLXXXLLFLSPFXXXSLXXXKXXXXXXXXXXTKXXNXXTTTTXPSXKXXXXPXXVXXLXXXHFLK

SEQ ID NO: 307576 - protein, 103 aa, Zea mays
  unsure (1)..(103): unsure at all Xaa locations
  Clone ID: MRT4577_43579C.1.pep
SFFHTHGNRGSAGGSRLHEPGQGEELPRKVAVLTTGNRALXAELDNLKLACQDIDAQNSRTVGXGVDDAHPPNVSTTLSMSIDPATLQLQLHEPHNEAGQLHN

SEQ ID NO: 307577 - protein, 257 aa, Zea mays
  Clone ID: MRT4577_4357C.1.pep
MAAPPELVDDTIAEICLRLPPDEPAHLVRAALVSRRWRRILSGGAFLRRYRAFHGAPPLLGFVDNTIGLHGATAPRFSPTTSSGSPFPRRTFDCICWEALDCRHGRVLLGLFAERVNLVVWDPVTGDHCGLPDPGVLPGYYSAAVLCAARGCDHLHCRGGGPFRVVLAGMDYFSRDAGVRARLYCSEAAAWVASAQLASDSHVMRKPSALVGDNVYFQLMEGDVFLRYDMGRNRLSTFDPPGAHVDERGVVLMPMGA

SEQ ID NO: 307578 - protein, 161 aa, Zea mays
  Clone ID: MRT4577_43580C.1.pep
MDFSAGGSGSGGGGGGAGDGRAQAERWLEIAEKLLAASDLVGCKRFAERALEADPLLPGADEILAVADVLLASQSMGPSGHQDPLAILQLPPGVNPDQASVSRAFRRLALLLGPRNPHHGAEMALRLVNDAYAFLSDPSRRPPPPANPATGTPSSSHYAAL

SEQ ID NO: 307579 - protein, 73 aa, Zea mays
  unsure (1)..(73): unsure at all Xaa locations
  Clone ID: MRT4577_43581C.1.pep
MDTAASGRFDKLQSSFKLSIQCLLTACSREDVNDAFSSFTDAEKERLHRMLTLVMKNLHANVXDEFDDFLPET

SEQ ID NO: 307580 - protein, 115 aa, Zea mays
  Clone ID: MRT4577_43582C.1.pep
SDRYAPSRMHFQRRRGCIRAQSPWEQLQCDLAYTICGGSECLTCCTIVWRCEAKWLWLELTASTKPWPDLYSPIQHIGKRISTANIGTIDGNAHNTKIWTDLWMYASRLQKAYPA

SEQ ID NO: 307581 - protein, 431 aa, Zea mays
  Clone ID: MRT4577_43583C.1.pep
MAILLLLLFVLSSASADEYGEELLQRAWGEREWMVSVRRRIHAHPELAFREHRTAALVREELEHLGLPARAVAGTGVVADVGSGAPPFVALRADMDALPLQELVEWEHKSKVDGVMHACGHDVHTAMLLGAAKLLSQRKDQLKGTVRLLFQPAEESGAGASHMIREGVLDDVEAIFAMHVDYRIPTGVIAAHPGPTQAAVCFFEAKIEGKTGMAETPHLNVDPVVVTSLAILSLQQLISREDDPLHSQVVSVTYVKAGKALDATPNLVEFGGTLRSLTTEGLYCLQRRVKEVVEGQAAVHRCKGAVEIKVEDYPVYPAVVNDEKLHRHVEDVGRGLLGPGKVRPGEKIMAGEDFAFYQQLVPGVMFGIGIRNEEAGSVHSAHNPYFFVDEDVIPVGAALHAAIAELYFTDGPLFRQRRLVVSRSCGWSRVQ

SEQ ID NO: 307582 - protein, 138 aa, Zea mays
  unsure (1)..(138): unsure at all Xaa locations
  Clone ID: MRT4577_43584C.1.pep
PKTQSKGTPPKQXYTDXPQTQKYPPAFAFPKQNATTRLTHXHXTPYHVIIKAXFXFFFICMTTTXPTQXPSYLKXWGGGGPNPXTNNSAXXXXKKKKNPPPPVVRLGFVPSXGXPFARSSXXAVXRLCPXAPAPPGAA

SEQ ID NO: 307583 - protein, 82 aa, Zea mays
  Clone ID: MRT4577_43585C.1.pep
EGALGGERPLRGPRVDGELQRPPDRGARLGVTKREHSYSRVPHDEGGVLPSLNRTGAPLPELPMLIQSTCKRGRMRARSRGR

SEQ ID NO: 307584 - protein, 43 aa, Zea mays
  Clone ID: MRT4577_43586C.1.pep
LSGGECGLLGESLVDNGNNNYLLTTARADAPPYGIDFPTHQAT

SEQ ID NO: 307585 - protein, 122 aa, Zea mays
  unsure (1)..(122): unsure at all Xaa locations
  Clone ID: MRT4577_43587C.1.pep
WSRFKTLCQQRFGPPLRTNTLGKVARLPFRSTVDYQDRFLALLCHTEPVPLPHQQAQLFTAGLPWHLRVDVELCAPGDLQQAMALARAYERRQXAQTAXPPPFTCIMATPSSTPASPAGLSA

SEQ ID NO: 307586 - protein, 182 aa, Zea mays
  unsure (1)..(182): unsure at all Xaa locations
  Clone ID: MRT4577_43588C.1.pep
MCCNDHHACSASTLYLLYGKTLRKPTRPYDNERLDADMTLAVEDVLKCTREVCSLQYATDXIRNGARHXLTLDEKNPRXIFEXGQALLSRMNPYGLLAEGXSTIEYVLVLTXDNFLSRLTXPALGLPGRMANIHVTHARVXIKHRXITLRRQICRRTMIRXRIRXDHHGDFSLTSPFGEGPA

SEQ ID NO: 307587 - protein, 47 aa, Zea mays
  Clone ID: MRT4577_43589C.1.pep
NLAVTYKLSASSGEAVDTGYSWTRFRGFLIRKGPNSCGGRWNNMYLP

SEQ ID NO: 307588 - protein, 252 aa, Zea mays
  Clone ID: MRT4577_4358C.1.pep
MFSSARLALRRAASLGAGLCRAAEDPFSRRFLHGQLLPRSFASDASGHNRGFPPSGSGVVADTDPRQNFNRSGFVSQDIRAKTQVNFNNTDNGAAMSGTPRGQNPFSSREGFTVNLRTFAMDHEQYSKKRAFVHVLLKRKKTFVTVTDSSGNKKTGASAGCLEDRKGRSRLSRYASEAVAEQVGRSARKMGLSSIVMKVKGASFFKKKKKVILSFREGFRGERVRDQSPIMYIHDVTQLPHNGCRLPKQRRV

SEQ ID NO: 307589 - protein, 118 aa, Zea mays
  unsure (1)..(118): unsure at all Xaa locations
  Clone ID: MRT4577_43590C.1.pep
VFCCVLAPASVGPSSSFVSSSLASSSCSSCSSSSSSSASSGSSLSVRSCCFSVSAGLVVAVFSVRLGVWWALFARVSAGFGGPPGRRCQGWLQGALCVRPVFVVGAPRXCGALGRVII

SEQ ID NO: 307590 - protein, 54 aa, Zea mays
  Clone ID: MRT4577_43591C.1.pep
SLLQRMMCNLGHENGTTQKGTVVLDKALLEQERSLGHSQTLLVHSEIIYSILQG

SEQ ID NO: 307591 - protein, 103 aa, Zea mays
  Clone ID: MRT4577_43592C.1.pep
LSSLHLHSFNSSSSKLISHQTIIIIIIQNHTIISTFPHSQFLLNSSHNILLLIHTTHILISIYSHSHIQHISPLSTPTTSPTNLTPSYITTNTTNSLISTNPL

SEQ ID NO: 307592 - protein, 70 aa, Zea mays
  unsure (1)..(70): unsure at all Xaa locations
  Clone ID: MRT4577_43593C.1.pep
RHKGRDRVMASVDAAXRYTILYKIKLDEIDTTIPTIGFNGETVEYKNVRFIFCFCPPHHKITSLRRDYFQ

SEQ ID NO: 307593 - protein, 47 aa, Zea mays
  Clone ID: MRT4577_43594C.1.pep
ERHAQPGHVIAVDYRQLLILSIERVQIPNSKLTHRVSLLQSARLITC

SEQ ID NO: 307594 - protein, 110 aa, Zea mays
  unsure (1)..(110): unsure at all Xaa locations
  Clone ID: MRT4577_43595C.1.pep
PRQKIKYQLIPRGAIYMXDQWXLPSKSDLPMKGNQGDFFAYLDKKYPNGSRSNRATLTGYWKXTGMDRSIKLNKLTLGTKNTLLFHERRPLFCIRTEWIIHEFYIDANGF

SEQ ID NO: 307595 - protein, 152 aa, Zea mays
  Clone ID: MRT4577_43596C.1.pep
FHIEDKVPYKCHRNSIVSYTHHSTQTFFFLGVIFLTRTRTTRSSGGDEGLSTRSSLASKIARTTSFSWTPACDDSGTSLGNQPFVEFFLGFRFEVGRRGCPTTEQAGPRRTAGTVRNSGGHKHNPPKARLRTTFVPPCEVPGRRLGRRGGVA

SEQ ID NO: 307596 - protein, 81 aa, Zea mays
  Clone ID: MRT4577_43597C.1.pep
MVANGDAPARGSAAAAASLRRRRTTSGAAAGGGGASSMLQFYTDEAAGRKMSPNTVLIMSIGFVAVVAVLHVFGKLYRTSN

SEQ ID NO: 307597 - protein, 497 aa, Zea mays
  Clone ID: MRT4577_43598C.1.pep
GILDLGRGPGRLQHSREAMAGPPLLSFPFFFLLCVALAWSEAYGASGGYGLGVNYGRVADDIPSPWRSVELLRAAGAGSVKIYDANPGVLRALAGTRWPVSIMVPNQIIPDLAASAAAADRWVAENLVPYYPATRVKFLLVGNEILSDLSIANSTWPHLVPAMENIHRSLRKRGISSVKIGTTLAMDALADGAFPRPPSAAAFRADIAETVVRPLLHFLNGTNSYYFVDAYPYFVWADNNLTVSLDYALFQGGRTRYVDPGTGLTYTNLLDEMLDAVVIAMAKLGYGHVKLAIAETGWPNGCDYNQIGGNVHNAAIYNRNLAARMAKNPGTPVRPGAKMPVFVFSLYNEDLKPGPGTERHWGLYYANGTAVYEIDLTGRRPLGSYPPLPAPENNIPYKGPIWCVLSAAASNKLNETAVGNALSYACGQGNGTCDAIQPGKTCYTPNTTAAHASYAFNSYWQQFEKTGATCYFNNLAEQTTKDPSHGSCRFPSSLGSP

SEQ ID NO: 307598 - protein, 92 aa, Zea mays
  Clone ID: MRT4577_43599C.1.pep
KPNKVPTLYRALSNYYPLFHLSFLLKKKTPQKLPNPKFLLLFSRQFLKRELFKFPPPFLVKCQPKTGLKKTVFFFSFNQNLNPLWELGYPPI

SEQ ID NO: 307599 - protein, 48 aa, Zea mays
  Clone ID: MRT4577_4359C.1.pep
KHPFIYSCSKFSCKLLWALSKYSGLALSALTLSSSWYLWTPEPGLVSP

SEQ ID NO: 307600 - protein, 118 aa, Zea mays
  unsure (1)..(118): unsure at all Xaa locations
  Clone ID: MRT4577_435C.1.pep
LRLLALSSCNSSLAFFLKTQLGFTLVPKFTFLHSPLRXEERTNIHLIFSALQGNTLPFCFFLDGQRARRHFLKEYYSYKELYTGVTKPLSGTQIVKSFILILGACKKSFESVFQLSHL

SEQ ID NO: 307601 - protein, 221 aa, Zea mays
  Clone ID: MRT4577_43600C.1.pep
RPRVRAKLGFGHVKLAIAETGWPNGCDYNQIGGNVHNAAIYNRNLAARMAKNPGTPVRPGAKMPVFVFSLYNEDLKPGPGTERHWGLYYANGTAVYEIDLTGRRPLGSYPPLPAPENNIPYKGPIWCVLSAAASNKLNETAVGNALSYACGQGNGTCDAIQPGKTCYTPNTTAAHASYAFNSYWQQFEKTGATCYFNNLAEQTIKDPSHGSCRFPSSLGSP

SEQ ID NO: 307602 - protein, 144 aa, Zea mays
  unsure (1)..(144): unsure at all Xaa locations
  Clone ID: MRT4577_43601C.1.pep
YRAVLGLQVEAFWPRNSMILDGAARVIHCILLWRIMFSIASTFXGLSKGMDEYGLLALATGIADFAELHAHTRLTINRDKADRLAMTKLNTCAVILEVMDAPLTATAVRAYVMCGGRPQLNDFKLKLGRKRCLRISPMKGSERR

SEQ ID NO: 307603 - protein, 89 aa, Zea mays
  Clone ID: MRT4577_43602C.1.pep
AASKLNETAVGNALSYACGQGNGTCDAIQPGKTCYTPNTTAAHASYAFNSYWQQFEKTGATCYFNNLAEQTIKDPSHGSCRFPSSSGSP

SEQ ID NO: 307604 - protein, 73 aa, Zea mays
  unsure (1)..(73): unsure at all Xaa locations
  Clone ID: MRT4577_43603C.1.pep
MRFRIYKRKVLILTLVVAACGFVLWSSNGRQRKSDALGPPLLDAEPXRGXAGHLAVSVGIRRVSNESAAPLVP

SEQ ID NO: 307605 - protein, 99 aa, Zea mays
  Clone ID: MRT4577_43604C.1.pep
PSLPAPAACPPVNSGPPPNYEMLKEEHEVAVLGAPHKPAPPTSTVIHIRSETSVPDHVVWSLFNTLFMNPCCLGFIAFAYSVKSRDRKMVGDVTGAQAY

SEQ ID NO: 307606 - protein, 200 aa, Zea mays
  Clone ID: MRT4577_43605C.1.pep
MHAERNTKCISAPAQAVQVPLQHKNRHSALSRLRTLIALKVRRPINLEDYTPPVELLQILPLKSSVRGNDVGPQIGPNNSKFSPGMQALLDLLFAVEDSVSDAAKILGLSTGALSRLILSDDSLRTAANELRASKGTGAVLRAPDVAGQRAQGLLRRRRGRCSSRRQQPSWRVGEVSGLCNSSTDWIQIIPYMGCLLEFS

SEQ ID NO: 307607 - protein, 127 aa, Zea mays
  unsure (1)..(127): unsure at all Xaa locations
  Clone ID: MRT4577_43606C.1.pep
SRINPLVCLKAKGIEPVFGLXASKAITKVFKEGLXSTPVSQFSKGPFDKYMLFPLYFCAAGNGTFFFCPGPQRYPCPKGVLFPPFKKWVFKQPLSLVAAPFHLPGVXWTPVSPARRLCLGFCQVCLE

SEQ ID NO: 307608 - protein, 79 aa, Zea mays
  Clone ID: MRT4577_43607C.1.pep
SFYNHGWGTYRRCCSPSMGKGLALQRTTSAYSYVAQLHNLKDDNSSDEFDKDSIESDDRSLEELSWETLELLVVPHIFR

SEQ ID NO: 307609 - protein, 99 aa, Zea mays
  Clone ID: MRT4577_43608C.1.pep
NVQGGPYLCFRCFVLPGVLQPWSGGLEGVCPPTGWGSPDLGCSGPCRGEFPVFILGYGKGLGPPGKRKNKKNNKKKKKISEKKKKKKKKKKTTERGPLA

SEQ ID NO: 307610 - protein, 93 aa, Zea mays
  Clone ID: MRT4577_43609C.1.pep
RPAGIPRPFCSSSTLGFHGPYRLERNSSPSRSTVYSIGIGDDIHSIHPIVELAISIRSEEPATSSLHLLLHVCQVPALSEHSPCGQPLPYCRC

SEQ ID NO: 307611 - protein, 87 aa, Zea mays
  Clone ID: MRT4577_4360C.1.pep
FPGRRAHHPAAALILSFRDVSSAPCHDASRSPRDRTSTRLGTVPCDGTTPRGSPLNHKDLPPKPPRTTCKAHAKGPKRNGPSLTKLP

SEQ ID NO: 307612 - protein, 80 aa, Zea mays
  Clone ID: MRT4577_43610C.1.pep
MSPQTSNWTKHCAARVFKHIEKMYRKNGINMGKHSLQYIEHKIFMLGEFIDSFLMLRKKGLLTLKLVTNITPQSSLWAFG

SEQ ID NO: 307613 - protein, 88 aa, Zea mays
  Clone ID: MRT4577_43611C.1.pep
RVCVYFFSARQKPRTNYLEDRKNGSKLIVFVIGGITYSEMRCAYEVSQAHKSCEVIIGKTCVFLLSIFLKQTLRCKNIYVKLYLVIYI

SEQ ID NO: 307614 - protein, 116 aa, Zea mays
  unsure (1)..(116): unsure at all Xaa locations
  Clone ID: MRT4577_43612C.1.pep
FLSFASSFSXLLFPLPLSPFVFACRVSWFSLRCALAFFRLVLCLVVXRRCWFRGFPVLVAGVSCALGFVVCCFPAVLLPGAGVFRVGVCLWLAPXFLXSSPRCRSPSRLWCXVVFV

SEQ ID NO: 307615 - protein, 133 aa, Zea mays
  Clone ID: MRT4577_43613C.1.pep
PPPGPFLQGQLDGRPPPVPPGLCPPPPPVGGVPGLGSLGRSGFRARFWPFTLKRFVWVNKVTLRGDFPPGHQKNVGMGGGGGPPLIFILFYFILTRGPWGFLTFQISGDWEGKFYPPPGGFQKNPWGQRPFVF

SEQ ID NO: 307616 - protein, 208 aa, Zea mays
  Clone ID: MRT4577_43614C.1.pep
MDTVSSTGSQLQGLTKPSYARCASISTGDNHQSLTSMSGRHTCGPRSVQLPSLRGIVGIAQTNGGPDASSPVDNSRSCISSEFKHSSIPASNQKVFKLSSDVLTKRDVWNDTFDHIFTELGQPQRLEAVELPCHPRHRLPDFSQLEFTDKVFATQEVFEELPLSSLAAWVSIGKLLAYLCWKIPWPPHICMLWGVAVRLYIQLQGYPS

SEQ ID NO: 307617 - protein, 466 aa, Zea mays
  Clone ID: MRT4577_43615C.1.pep
MQTPTMSTSMATTAPAKPPAPPRQCCRYLLLPSTGHRRSVAAWSAKKKNPWLDPFDDGPDEEFDYQGMFSGGKQEEDPRPPEDPENPYGFLRFPQGYNPELDSLASKVRGDVRRACCVVSGGVYENVLFFPVVQMLKDRYPGVLVDVVASARGKQVYEMCKNVRYANVYDPDDDWPEPAEYTHMLGVLKNRYYDLIISTRLAGIGHALFLFMSSARDKVGYVYPNVNSVGAGLFLNEMFKAPTNNLADGGYHMYKDMLEWIGRPAKNVPQQPTQPLRVSISKKLRAYVEDKYSRAGVEKGKYVVIHGIASDSVANMKSRGDDDCLLPLGHWAQIAKEISSGDRGLKPLFVIPHEKHRDEIEEEVGDDTSILFITTPGQLTCLINDSAGVVATNTAAVQLANARDKPCVALFSSAEKARLFLPYVEGKSSCTVISSATGNLIDIDLNAVKNVVKDLEPAPSFALAQK

SEQ ID NO: 307618 - protein, 79 aa, Zea mays
  Clone ID: MRT4577_43616C.1.pep
LFFFFFFFLCLFPEPEKKMINSYICFSYQNNVGLLFVYLGGFQQSNGDRVILITASTKKCFFSLHLNKIFSKIILQSFF

SEQ ID NO: 307619 - protein, 160 aa, Zea mays
  unsure (1)..(160): unsure at all Xaa locations
  Clone ID: MRT4577_43617C.1.pep
IASDSVASMTSRGXDTDCLLXLEHGAQIAKEIXLATRGLKPLFVIPHDKRREELEEEVGDDTNILFITTPGQLTCLINDSAGVVATNTAAVQLANARDKPCVALFSSAEKARLFLPYVEDKSSCTVISSMTGKLIDIDINAVKNAVKDLEPAPSFALAQK

SEQ ID NO: 307620 - protein, 341 aa, Zea mays
  unsure (1)..(341): unsure at all Xaa locations
  Clone ID: MRT4577_43618C.1.pep
VQGKQVYEXCKNVRYANVYDPDDDWPEPAXYTHMLGVLKNRYYDLIISTRLAGIGHALFLFMSSARDKVGYVYPNVNSVGAGLFLNEMFKAPTNNLADGGYXVRALHLHNDLLASFSIALRASMXCARYKDMLEWIGRPAKNVPQQPTQPLRVSISKKLRAYVEDKYSRAGVEKGKYVVIHGIASDSVANMKSRGDDDCLLPLGHWAQIAKEISSGDRGLKPLFVIPHEKHRDEIEEEVGDDTSILFITTPGQLTCLINDSAGVVATNTAAVQLANARDKPCVALFSSAEKARLFLPYVEGKSSCTVISSATGNLIDIDLNAVENVVKDLEPAPSFALAQK

SEQ ID NO: 307621 - protein, 141 aa, Zea mays
  Clone ID: MRT4577_43619C.1.pep
MGVELDLSDLAVLRPVQTAAAGDGPDAADTGCVTPTAASSLLPRLGLGGGLLDIDSAACVTPTASPCLLRPATVCPPAPRKPVAPGSKRRKRCCRLQRAFFFPVPLDLSTVFVPRGADAAPADRSSPPSRAAKKIPLHVVG

SEQ ID NO: 307622 - protein, 44 aa, Zea mays
  Clone ID: MRT4577_4361C.1.pep
KKTHIQDNSFSSQNKQPYVQTCLDIKIAKKLIGNKNLLPNLIFF

SEQ ID NO: 307623 - protein, 73 aa, Zea mays
  Clone ID: MRT4577_43620C.1.pep
ENAVEGAVSWLDSNQLVKVKQFEAKMKQLEGICSPIIAKMYQAEGSGMGAAAGMVEDPPSGGIGAGPKIEEVD

SEQ ID NO: 307624 - protein, 86 aa, Zea mays
  unsure (1)..(86): unsure at all Xaa locations
  Clone ID: MRT4577_43621C.1.pep
LSASADTGTIYPNCSQAHIGSVLPRLLXERVHXLCENPTLEAYHLQQALTGRLLPXNPXITQHILSLLHQLHAGHLYXQNIMAQQL

SEQ ID NO: 307625 - protein, 62 aa, Zea mays
  Clone ID: MRT4577_43622C.1.pep
KPLIPNMAAEFFNQDYYHVLLLSKCRDVGLTLTDRVTHTISKLTPVQCSPRFSVFNISGAVQ

SEQ ID NO: 307626 - protein, 162 aa, Zea mays
  unsure (1)..(162): unsure at all Xaa locations
  Clone ID: MRT4577_43623C.1.pep
HKKKIKKKKKKKKKKKKKKKKKKKKKKKKKKKKKKKKKKKKKKKKKKKKKKKNPEGGRPNLXLEKKKKKPRGEVPFPPPKNKGVKKGKTPPKKRGKSAVKNWKKGSQKKKPKTLSPKKGEKTQKNLGEIGKRAQGKRSLGKGPRGDTKKRGPTTQKKIPLGE

SEQ ID NO: 307627 - protein, 57 aa, Zea mays
  Clone ID: MRT4577_43624C.1.pep
DRRVRNASRHISLSIRARCRGKVTRDVSQNGVGQCRRGLSQKKCVGSFDNRLHQSIR

SEQ ID NO: 307628 - protein, 77 aa, Zea mays
  unsure (1)..(77): unsure at all Xaa locations
  Clone ID: MRT4577_43625C.1.pep
FXGRVXPFXVLPCSRCSVVXRGLPXXFFAPPVSCLRXFSAGXFXPGCAAVRLLFARVXXSKKKNPPSPPVVPCACLI

SEQ ID NO: 307629 - protein, 34 aa, Zea mays
  Clone ID: MRT4577_43626C.1.pep
RSWTVRDIEYPRLRRVSRSCYMSILPLRSRSILS

SEQ ID NO: 307630 - protein, 109 aa, Zea mays
  Clone ID: MRT4577_43627C.1.pep
DNQTVKAKCSMIYGHNCDYSSMMINMSPQSAYSVGAINTHHLLVIQSANSRHLLPHSVIAPQLSAPVTDLIFLLPPVPPFLFRLSMAPAVVSVYRAHGMGAGSARAIYR

SEQ ID NO: 307631 - protein, 110 aa, Zea mays
  unsure (1)..(110): unsure at all Xaa locations
  Clone ID: MRT4577_43628C.1.pep
SRSHDRTATFVPGGSTFDSSVYFVMIRGGYDGCSIVGGVQVSAGADLADFMIPGVLFHGIVGALDLGRHPPATKGIVRTDXTAKTDLPKVRIXCTLPLTGATCVCTMITY

SEQ ID NO: 307632 - protein, 45 aa, Zea mays
  Clone ID: MRT4577_43629C.1.pep
RGLGFIMDCKNQKQWAQQTMITPGVRARTHIDKHIASEGPTEKGR

SEQ ID NO: 307633 - protein, 200 aa, Zea mays
  unsure (1)..(200): unsure at all Xaa locations
  Clone ID: MRT4577_4362C.1.pep
MTRTEPNRSRSSNSDSDKNSGNVGGGRTTGMRVIVPLQGVXQGRGGLFLGSVIPCAFFYFLQFYLKRNRKNDESDNSGEQNSSASSSSSPNSGLPDPTRSQSAGHLTELTGLPRSLSRILLSPRNSGGAVSVSGRVNCVLKGGDSSPYYVGQKRVEDDPYDELXNPDGVIQLGLAQNNKLSLDDWVXLENPKEAFSDGLS

SEQ ID NO: 307634 - protein, 157 aa, Zea mays
  Clone ID: MRT4577_43630C.1.pep
MANLLSSAPTHATLPDCFVFPPDQRPPASSQAVSLPVIDLSRGRDEVRRAVLDAGKELGFFQVVNHGVSPEAIRDMEAVCAEFFRLPAEDKVGFYSEDTDKPNRLFSSTTYELGGEKYWRDCLRLSCGSPVGDTKNNWPDKPQKLREVVEKFVGPTR

SEQ ID NO: 307635 - protein, 151 aa, Zea mays
  Clone ID: MRT4577_43631C.1.pep
NSPSRCRTREGPQNLCCCGVLVCRGSPRGRSSIAISENSRSQAIISSLISATSFPVCSSCCACCTRSSIAFRATVAASSARTISCCYTASTPSTFSASRSIFAITGSHRSPSFFSKLAMAYRMNRVCGRRWLSSGLFFFGLIFFFSAGLEI

SEQ ID NO: 307636 - protein, 93 aa, Zea mays
  Clone ID: MRT4577_43632C.1.pep
PPVILPLASYAGKLWRLESAIPDDFRDLVDVGPPSFRATRVFFRVVEGGVPTPVHHATLLSETVPVAKELLLRSRQTAVTSGGVSLPAWRSRP

SEQ ID NO: 307637 - protein, 72 aa, Zea mays
  Clone ID: MRT4577_43633C.1.pep
KKNKAERQPQQDLLQSREEVNQKERLLNQRSNWSASRYGRWAVEKSSGEEIVHSSHQPLCSTHSHSSNSIIS

SEQ ID NO: 307638 - protein, 125 aa, Zea mays
  unsure (1)..(125): unsure at all Xaa locations
  Clone ID: MRT4577_43634C.1.pep
GIIILRLLTGKQPQRIAEIVEDAIEKENLHSIIDSTAGSWPFIQANQLAHIALRCAELSRRRRPDLTVDVWKVVEPLMKAASMTARPLSCTAPSDETCIPXVAADGFTHNREAITGSLXSGHSKS

SEQ ID NO: 307639 - protein, 54 aa, Zea mays
  Clone ID: MRT4577_43635C.1.pep
LLAIMQYWQPNRPWPAVMWEYDALALCYVKHLTVGMARFPRAFLRTETTANPRW

SEQ ID NO: 307640 - protein, 67 aa, Zea mays
  Clone ID: MRT4577_43636C.1.pep
MSDRMSWQTYLGEHLMCEIEGHHLTSADIDGHDGAGWAQSTAFPQFKTEEMTNIMNDFPNPGFFAPP

SEQ ID NO: 307641 - protein, 168 aa, Zea mays
  unsure (1)..(168): unsure at all Xaa locations
  Clone ID: MRT4577_43637C.1.pep
NLYLFQQGWYQMKISAMWEEGGNKTPASPARVVQYEASDVGADDALGIWKIDDVDNSFHTQPFRIKYARQDIYLSVMVSFNIFNIEEEGPAASAVMLKFELMYAPTLENGSELQASSVTSSAAVHEFRIPHRALLGLHSYCPVHFDAFHSVLXDLTLHIVYLKAGATK

SEQ ID NO: 307642 - protein, 51 aa, Zea mays
  unsure (1)..(51): unsure at all Xaa locations
  Clone ID: MRT4577_43638C.1.pep
PKFWIYRLKNKKQCTCCFSWCFFLNLFLPQIEILXIMKKKYRRKSNSIAVT

SEQ ID NO: 307643 - protein, 30 aa, Zea mays
  Clone ID: MRT4577_43639C.1.pep
DDEHRVFACLLLSIVHLPDHLKPLFLHCSI

SEQ ID NO: 307644 - protein, 94 aa, Zea mays
  Clone ID: MRT4577_4363C.1.pep
AGEDYIASEATAEPEDAGRASCNVDDTAALDEPQPPNCDLYLGNVQDGNAIDTVNSTLQAPRCDAAEGGGPVNFTTIIPVRARGPTFKGGVLKD

SEQ ID NO: 307645 - protein, 144 aa, Zea mays
  Clone ID: MRT4577_43640C.1.pep
QKQKENASVLAFMIVDTLGSDQMMCSVQPPNVFVEHTEAWVAETLKECSSDCRSTESFLYFLVLQWLVAVRLCAYYPQQHILYSATRIRERGDDLEEPGQLKRQNKRVRFNKTRPGRPRGFVLFLFFNKNGFGPSGVFFVDYLV

SEQ ID NO: 307646 - protein, 85 aa, Zea mays
  Clone ID: MRT4577_43641C.1.pep
MNLRCGLLYILKKKKKKKKTRALRRLRTACERAKRTLSSTAQTTIEIDSLYEGIDFYSTITRARFEELNMDLFRKCMEPAEKCLR

SEQ ID NO: 307647 - protein, 55 aa, Zea mays
  Clone ID: MRT4577_43642C.1.pep
LADAGVVVVLVVSHRSTLYSIIAAALDSAIVGAGNYPSPLRSRTARIRLSSLLSA

SEQ ID NO: 307648 - protein, 234 aa, Zea mays
  unsure (1)..(234): unsure at all Xaa locations
  Clone ID: MRT4577_43643C.1.pep
WVCSFRKCQPQPSNSEGYSHMKSWSTDIQAHHSSTAHILNKPVEDSSSMNRSNFLGVGISALQNHHYASQGVNLNPISLEAKLKEQCAGKASGSRFFGTNEEIRNNNPFQHRKDDSNSSMALYKQNCIGSSMGNYAPNASTFNHSILSPLGFNHALNLPWQSNNTSYLTKSHCGAAETFIPKDALSNGISVDSTPKAPYHHSLKNHGGAGYQKPPALHDNLKDIDLNDTPXDVA

SEQ ID NO: 307649 - protein, 135 aa, Zea mays
  unsure (1)..(135): unsure at all Xaa locations
  Clone ID: MRT4577_43644C.1.pep
MSIFVTASPRKTTYDLVTMIVTPIMIXHTKLLFVDMLDIPTAAEALNEGKMEVRDDEYPLLNGVDATTDDAEACTGLNVDRKEGEFPRNDATQKKEGMPIHESIYETQSSDPEFHEGTNCXVLVPDKPTKTYGLI

SEQ ID NO: 307650 - protein, 114 aa, Zea mays
  Clone ID: MRT4577_43645C.1.pep
PCSNSSPAARAPRSAAAGNKKPTTCLCSPTSHPGSFRCSRHRNGAAAPGGEAVHGAGRGGTAGTGRAAKGRSVRALLLQRIGGGPSELGGRRRRCRRGVGDFQPRPSRLRLMNQ

SEQ ID NO: 307651 - protein, 105 aa, Zea mays
  unsure (1)..(105): unsure at all Xaa locations
  Clone ID: MRT4577_43646C.1.pep
MAERGGEXGGERGGXGRGXGRGGRGDXGGRRGGXRGPRQEEEKXXPXTKXGRPXKENRXTKXEEXHPHXPPGKEHQXXETXXPGXKDEXXKXTPXQKQTRAGQRT

SEQ ID NO: 307652 - protein, 109 aa, Zea mays
  unsure (1)..(109): unsure at all Xaa locations
  Clone ID: MRT4577_43647C.1.pep
RAPDLLARPTQCVCDCTRGNGTGGESIYGEKYPGEKYRRKLTGPGVLYMANAGPNTDGSQCFICTADTHWLDGKHVVFRQHVXGMEVRKVIEKGGCPNGGTSKEVKVAD

SEQ ID NO: 307653 - protein, 94 aa, Zea mays
  Clone ID: MRT4577_43648C.1.pep
PPPPQLTRGRFWSGRGSKGAPLPASSHGAAPWSAPGRAASRLAPWPGELSAPPPAEGGPPPLSACGVPARPTETLGPLSTEPTKVAGATVRPLL

SEQ ID NO: 307654 - protein, 103 aa, Zea mays
  Clone ID: MRT4577_43649C.1.pep
ALQIFNTSSVSLHFIASNNDWGVREYDMHSYHSFNHNLFNLPLNPTSSIPVGNLVIIVVDLTNPQLLLPISGNPIHSIKGHLYFSFAPTWSPNGLTLPTCNQD

SEQ ID NO: 307655 - protein, 60 aa, Zea mays
  Clone ID: MRT4577_4364C.1.pep
TLISCGVYLAAPLLLVAINLLIGTNGHWRGANPHRRGGPGKAPGGEPPAGRRAPGEFPPP

SEQ ID NO: 307656 - protein, 175 aa, Zea mays
  Clone ID: MRT4577_43650C.1.pep
SNGFSYAETLVHSTLDHCDNADFTLEVFFNMKNHTVYVRKRPYLKMFLEKVAQMFEVVIFTASQRVYAEQLIDKLDPDGKYISRRIYRESCVFSDGCYTKDLTILGIDLAKVAIVDNTPQVFQLQVDNGIPIKSWFDDPSDQELIELLPFLESLVDSEDVRPIISKTFHDKLEQN

SEQ ID NO: 307657 - protein, 61 aa, Zea mays
  unsure (1)..(61): unsure at all Xaa locations
  Clone ID: MRT4577_43651C.1.pep
HFSSSASQAKASAPERIPSPTPKRXKRAKSCSRCLHTALHIADAPGSLLPGGKGRCLYSPW

SEQ ID NO: 307658 - protein, 72 aa, Zea mays
  Clone ID: MRT4577_43652C.1.pep
QHKSVVGRSHGFLDGGSAQKKGAPYNNFKNLPKQTLIHTFPGHNCHNLNRKLKMPQDGLTRCFECRSRQFFL

SEQ ID NO: 307659 - protein, 42 aa, Zea mays
  Clone ID: MRT4577_43653C.1.pep
NQFNYTSFWGCLTQSIKKGKLHHLVTTNECTVMAAFKSQTST

SEQ ID NO: 307660 - protein, 92 aa, Zea mays
  Clone ID: MRT4577_43654C.1.pep
KKKLGLHPEPSRLKGKAQKSHNQRRQLPQKRPKFPWRAWTEKINGRGKCLWDLLVSAPPLQLLFSFLGPCCCGIMCGVGCKVKSVVPVKLIF

SEQ ID NO: 307661 - protein, 109 aa, Zea mays
  unsure (1)..(109): unsure at all Xaa locations
  Clone ID: MRT4577_43655C.1.pep
IVQFFILNRASISGGIFYILMLNALSAYXANTTIFPQYSQTTIAALLTPYLPSMTASIXENPSLQPYRLQQAIATRNLPLSPLFFQQSPALSLVQSVVQNHHAQQLQQL

SEQ ID NO: 307662 - protein, 191 aa, Zea mays
  Clone ID: MRT4577_43656C.1.pep
MALARRRPATLPVFLSAFLYAAAFLAGPAAAMGKTGNVFVFWGRNKDEDSLRETCDTGRYTYTTVIVSFLDVFGHGRYHLDLSGHDVSAVGADIKQCQSNGMSIFLSIGGFGGQYSLPRRRSAADVADYLWNAYMLGTRAGVHRPFGDAYVDGINFFIDGAAGARPENYDELARRLWDYNKGYRARTPVQL

SEQ ID NO: 307663 - protein, 76 aa, Zea mays
  Clone ID: MRT4577_43657C.1.pep
PSFQTVIKLKIIILNAHSNVSVYLLCPFFYNSKLRLIFQRFLTLIIFNLESSETDMLNTESSFLPSYGASWNKKLI

SEQ ID NO: 307664 - protein, 70 aa, Zea mays
  Clone ID: MRT4577_43658C.1.pep
GQAAAAARANSSLAGRNATRKRESGWRTTEGIRNQVVPRTNAPIDLCVAGDGKGTLPARRQVTHDRDEEG

SEQ ID NO: 307665 - protein, 86 aa, Zea mays
  Clone ID: MRT4577_43659C.1.pep
IRLERNVILFLRTNESRGFACVTMDSLEGARRSIKYLHRTVLEGRLVTVAKADRTRERTLTPGKYCGRRGGSQRSPLPYHHLRREC

SEQ ID NO: 307666 - protein, 34 aa, Zea mays
  Clone ID: MRT4577_4365C.1.pep
NRFFLIRGGSFYHPSKILVSNCLFHSLKCITLFF

SEQ ID NO: 307667 - protein, 167 aa, Zea mays
  unsure (1)..(167): unsure at all Xaa locations
  Clone ID: MRT4577_43660C.1.pep
RPAWEASKASARGFARRHAGXGGPLGAARGARXXRRRRAKARPGGANPKATQXPGKLKLRVAGHPQGESAXHARGAHRGXILGPNSKLPKARCAGLGWPGCQDLRHXHSAPLAXFRTAPRYCCCXXAGDGGGATPPRWSGGXLGSXREEHXAGAXAQXXLXPSFIVS

SEQ ID NO: 307668 - protein, 127 aa, Zea mays
  Clone ID: MRT4577_43661C.1.pep
RPQARGEPPSQGKKKGAQMSLLNPPGGGKIKSGGALAPYAKGKWGTKATPVGGTRGVGFTPQRSFLGGYNRKGEKWPPGVDAPLRCRQGTGAPSLFFSAVYFEMGGLWWSFFPPPIFYETKSLWSGV

SEQ ID NO: 307669 - protein, 82 aa, Zea mays
  unsure (1)..(82): unsure at all Xaa locations
  Clone ID: MRT4577_43662C.1.pep
MKGALLISLVQAGIRPGNTCCELYCPVHGIXXDGPMPGDDIIAGXDDALHNYFSATGAGKHVPRAVXVSIXPTVIDDVTPGT

SEQ ID NO: 307670 - protein, 117 aa, Zea mays
  Clone ID: MRT4577_43663C.1.pep
NHEIDDAFQLNIPPKIGEVLRRIALYFYPHGELSGRGLIYFLLGLFFSKLGVNEDDDQRLVRAFGEHLGNITRLALPSPDSWDFLGIHEQRRPLIEVFGRALDKRGHRPRFFYITAG

SEQ ID NO: 307671 - protein, 47 aa, Zea mays
  Clone ID: MRT4577_43664C.1.pep
RLTQVGLPRQYKPTDLSGRATGGKMRACVYHIGSSIVNLPNAWSDGS

SEQ ID NO: 307672 - protein, 82 aa, Zea mays
  unsure (1)..(82): unsure at all Xaa locations
  Clone ID: MRT4577_43665C.1.pep
PKGLCFHIIVIPRQMMXYLYLFCSVRFSDVSFRSEFEARGRCGLRPRWRQMGGVIPSGDSAPGRCLTSPCARXVRWVHASKF

SEQ ID NO: 307673 - protein, 60 aa, Zea mays
  Clone ID: MRT4577_43666C.1.pep
GGGFFANFVKGSFRKPSLVNSGGNILPVPVVFRTPVEISTWLGLDSNAKPKKMQEKEMGP

SEQ ID NO: 307674 - protein, 266 aa, Zea mays
  unsure (1)..(266): unsure at all Xaa locations
  Clone ID: MRT4577_43667C.1.pep
ISDKDRCPQCKGDGLSRTLALIARMLHLLNHSRSQLQHPCNECKGSGETISDKARCPQCKGDKVVPEKKVLEVVVEKGMQNGQKITFPGEAXHAPDTATGDIIFVLQQKEHPKFKRKGDDLFYEHTLILTESLCGFQFVLTHLDNRQLLIKSNPGEVVKPDSFKAINDEGMPMYQRPFMKGKLYIHFSVEFPDSLSPEQCKTLEAVLPLKPVSQYTDMELDECEETMPYDVNIEEEMRRRQQQHQEAYDEDDDVPGGGQRVQCAQQ

SEQ ID NO: 307675 - protein, 86 aa, Zea mays
  Clone ID: MRT4577_43668C.1.pep
FSIVDPRVRRIPMRTCRGKKIGRGSGLSGLAVMAARAIARRENAAARLEGDKAGLEKLIADREKAQAQDASELHTIFIDTIGSRGR

SEQ ID NO: 307676 - protein, 129 aa, Zea mays
  Clone ID: MRT4577_43669C.1.pep
FVLTHLDNRQLLIKSNPGEVVKPDSSKAINDEGMPMYQRPFMKGKLYIHFSVDFPDSLSLEQCKALEAVLPPKPVSQYTDMELDECEETMPYDVNIEEEMRRRQQQHQEAYDEDEDMPGGAQRVQCAQQ

SEQ ID NO: 307677 - protein, 130 aa, Zea mays
  Clone ID: MRT4577_4366C.1.pep
PTFCEMYASFCFRLAGDLPNFVKDDEKITFKRLLLNKCQEEFERGEREQAEANKAEEEGGAKQSEGEREEKRIRARRRMLGNIRLIGELYKKKMLTERIMHECINKLLGEYQNPDEEDLEALCKLMSTIG

SEQ ID NO: 307678 - protein, 418 aa, Zea mays
  Clone ID: MRT4577_43670C.1.pep
MFGRAPKKSDNTRYYEILGVSKDASQDDLKKAYRKAAIKNHPDKGGDPEKFKELAQAYEVLSDPEKREIYDQYGEDALKEGMGGGGGMHDPFDIFQSFFGGGSPFGGGGSSRGRRQRRGEDVVHPLKVSLEDLYNGTSKKLSLSRSVLCSKCNGKGSKSGASSRCAGCQGSGFKVQIRQLGPGMIQQMQHPCNECKGSGETISDKDRCPQCKGDKVVQEKKVLEVFVEKGMQNGQKITFPGEADEAPDTVTGDIIFVLQQKEHPKFKRKGDDLFYEHTLTLTESLCGFQFVVTHLDNRQLLIKSNPGEVVKPDSFKAINDEGMPMYQRPFMKGKLYIHFSVEFPDSLSPEQCKALEAVLPPKPVSQYTDMELDECEETMPYDVNIEAEMRRRQQQHQEAYDEDEDMPGGAQRVQCAQQ

SEQ ID NO: 307679 - protein, 418 aa, Zea mays; identical to SEQ ID NO: 307678
  Clone ID: MRT4577_43671C.1.pep

SEQ ID NO: 307680 - protein, 417 aa, Zea mays
  Clone ID: MRT4577_43672C.1.pep
MFGRAPKKSDNTRYYEILGVSKDASQDDLKKAYRKAAIKNHPDKGGDPEKFKELAQAYEVLSDPEKREIYDQYGEDALKEGMGGGGGMHDPFDIFQSFFGGGSPFGGGSSRGRRQRRGDDVVHPLKVSLEDLYNGTSKKLSLSRNVLCSKCNGKGSKSGASSRCAGCQGSGFKVQIRQLGPGMIQQMQHPCNECKGSGETVSDKDRCPQCKGDKVVPEKKVLEVVVEKGMQNGQKITFPGEADEAPDTATGDIIFVLQQKEHPKFKRKGDDLFYEHTLTLTESLCGFQFVLTHLDNRQLLIKSNPGEVVKPDSFKAINDEGMPMYQRPFMKGKLYIHFSVEFSDSLSPEQCKALEAVLPPKPVSQYTDMELDECEETMSYDVNIEEEMRRRQQQHQEAYDEDDDVPGGGQRVQCAQQ

SEQ ID NO: 307681 - protein, 45 aa, Zea mays
  Clone ID: MRT4577_43673C.1.pep
PGHPPAAPGDLGRPRRAGDELILESRLKDVRYLGYMGGRSAHAEP

SEQ ID NO: 307682 - protein, 73 aa, Zea mays
  Clone ID: MRT4577_43674C.1.pep
NYLPAGCCPVLKITSHIHRYTNTGIRRSRLNNKLNKMRTMGSYRTLAKLQCNRGQKNYLMLSRGKKVYKSSSI

SEQ ID NO: 307683 - protein, 43 aa, Zea mays
  unsure (1)..(43): unsure at all Xaa locations
  Clone ID: MRT4577_43675C.1.pep
MIIPVLCFTGSKVIWNKWELYLDLLQADYSEGDALDXLELFRY

SEQ ID NO: 307684 - protein, 266 aa, Zea mays
  unsure (1)..(266): unsure at all Xaa locations
  Clone ID: MRT4577_43676C.1.pep
MAKKKGSAAAAAMADETDVSSPQGSAPGSEGGGEKEGAFLLGEPTWEDAGGGRWRCAETGHELPEREKEAYARSRACRLALIDHAVAQKKPPLNAFKPHPEHKSKLVCKITGDTINKLEDHIWKHINGKRFLNKLERVEDRMASGEMPDGEPVMSNEXGEEEMDGSDDRNXGASCRGSNEEVAKKSKSSKKYKKKTNVASSIXGEPKPEMDGSDDRNFWVPPVEGRWDDDDGKKRWELSPGKHTLAKNEGGSSMREFVRLNCIRHP

SEQ ID NO: 307685 - protein, 153 aa, Zea mays
  unsure (1)..(153): unsure at all Xaa locations
  Clone ID: MRT4577_43677C.1.pep
MVPQADNKPAETIPAEDXPAADKAPDVKKPKAEHRVSAGKPPVKVRGHRKMLPNKDQKRVNTYKIYLFKVLKLVHPDIGVYSEGVIIMHSVWIDSFENLTDDDLQLTRDNEKPTFTCRDIRYSPRDSLFAVCLSMNSMPRSSSTCTRVKLCRG

SEQ ID NO: 307686 - protein, 114 aa, Zea mays
  Clone ID: MRT4577_43678C.1.pep
PFLAGWTDVQSYWMWVYSPTDVRSYVLKLGDGDTEFDVRSRVRPNIYLHIRFHPRCDGTVKVNMRPITITGPNSGSISESILLTRLLISNLREIPPGDPIAGITTSSLVSILGT

SEQ ID NO: 307687 - protein, 79 aa, Zea mays
  Clone ID: MRT4577_43679C.1.pep
MMAVTAAALLALALAVSTAEARNIKTTTTTKEKKDDAVVQPQTFPPFDRLGGGASPASAALPGPSPVASSLRSLLLLVL

SEQ ID NO: 307688 - protein, 60 aa, Zea mays
  Clone ID: MRT4577_4367C.1.pep
PGVQTSPQLEGGAQKAANLKGGFPPPTPGLNQFFLLGKPFWGLLRAFLFFMKNRGESHPL

SEQ ID NO: 307689 - protein, 50 aa, Zea mays
  unsure (1)..(50): unsure at all Xaa locations
  Clone ID: MRT4577_43680C.1.pep
DYSLSLPSTLPASXARSWAAPADSNRTPWGAYSXFPCLTXTXXPSPLPIL

SEQ ID NO: 307690 - protein, 297 aa, Zea mays
  Clone ID: MRT4577_43681C.1.pep
QFPEEIARCSMLRRFEVHDNAFSGELPAGLWSLPDLRVIRAQNNRFTGRLREFPGGQSRLEQVQIDNNSFSGGIPQSIGLVRTMYRFSASLNELNGSLPDNLCDSPAMSIINISRNALSGTIPAFKNCRRLVSLYLAGNGFTGPIPASLGDLQVLTYIDLSSNALTGGIPTELQNLKLALLNVSYNQLSGRVPPSLITELPAVFLQGNPGLCGPGLPKDCDADAPSRRRQGLAVAATVASFLTGVALLAVWAFAVLKRLRCSESFSSFFPLKLVLFYPVRITGEELLPGSHDMISSA

SEQ ID NO: 307691 - protein, 46 aa, Zea mays
  Clone ID: MRT4577_43682C.1.pep
DGLPVGSQLQFVVKGVHRMSHGLRRGPLSGLPVLYLRPTPCGPMPI

SEQ ID NO: 307692 - protein, 83 aa, Zea mays
  Clone ID: MRT4577_43683C.1.pep
NQSRPCGIRITHIVVPKICTRADDISNVVCHNPKGFFVVQQRLPAMSSALGRVCKAHLNGNVRMHALTLYSFAKKCYVICQCG

SEQ ID NO: 307693 - protein, 92 aa, Zea mays
  Clone ID: MRT4577_43684C.1.pep
PRRSEVSRRSRPLHLLRIGVARSSVDRGLDRCVSPLIVVMTSLAMAERGSPAMASNYRATGSSQRPPPPHPGSWQSREAPYAPSEALAPARW

SEQ ID NO: 307694 - protein, 64 aa, Zea mays
  Clone ID: MRT4577_43685C.1.pep
RIYAPSRSPPVHTCFYCQTKPCLRSKPTTIDQLSSCTAVAGYAYVCSTRTPDDHINRPPSILNI

SEQ ID NO: 307695 - protein, 51 aa, Zea mays
  Clone ID: MRT4577_43686C.1.pep
CYIVWSIHQICPFCELYLFFPLCVRGFHFSLFVFPTTHLLIKYCNVTLSSF

SEQ ID NO: 307696 - protein, 80 aa, Zea mays
  Clone ID: MRT4577_43687C.1.pep
KKKIFFFFFFFFFFFFFFFFLNTIFLFFRGIPYSTCSNLRTHVHQTTHSTITCQSRNQSQFEWIQTEIPSRTRGSTRNPD

SEQ ID NO: 307697 - protein, 135 aa, Zea mays
  Clone ID: MRT4577_43688C.1.pep
EPCQEWLDTIEVMCNEMLGNYTKKEDQLMTAAFDSRPKRRLNQVMDALHFEYPDYERLNKGAEGQKRKRIVSVVGRQAARTVKEDEEKLTKRKLSLEPTTVAPKKRKAAALKQKATDIEEETPASPSVADVAEIL

SEQ ID NO: 307698 - protein, 98 aa, Zea mays
  unsure (1)..(98): unsure at all Xaa locations
  Clone ID: MRT4577_43689C.1.pep
KSGGKKKFKLSIFLGTYPDTTSFVEGSFPVRGYRGKRGSKPQSFLWAGGSGPLRSNGTGEHPGGPGVLWPSPGPTPLLXKRQQGGPQYLRKSSLGAGA

SEQ ID NO: 307699 - protein, 91 aa, Zea mays
  unsure (1)..(91): unsure at all Xaa locations
  Clone ID: MRT4577_4368C.1.pep
MAMDPDPGAKAFGEHYYRTFNTNRPGLVGLIKETSMLTFKGQKFKGQSAFAGKLGFFPFQACEHKIVTANCNPSGPKGGMLVFXSGSIRTG

SEQ ID NO: 307700 - protein, 176 aa, Zea mays
  unsure (1)..(176): unsure at all Xaa locations
  Clone ID: MRT4577_43690C.1.pep
SKKLLSGLGMDYKKFDVYDNKCMIFXEADREXKKGIVCGEPRFVEVENDDGLTVMTKVARQQLRYTPLIPLLKHLFISKNTARHMRWHKEGVHEKPDIMAHPTDIDAWKALDSFDSSFADVXENVCLGLATGRFSPFNLTAQSYSCWSVFAVPYNIPPALCMKYEFIFLCLLIPGP

SEQ ID NO: 307701 - protein, 69 aa, Zea mays
  Clone ID: MRT4577_43691C.1.pep
FILFFSILSFLFELLGAPGGEKTRGGPKSRVVGFPLPKVKIFNPRGEFLKLFYTCSPNCLALVQLFFLV

SEQ ID NO: 307702 - protein, 216 aa, Zea mays
  Clone ID: MRT4577_43693C.1.pep
VRLPLSSCGWRPVLHLAGIDLPSPIFSKLLDTARPQLCSLRAPSRAAPSRALLSLPHLPPLPALSPALFHGRRFLQRVPWSSSPHLHDGRALSLPRSSPSPARPWRPVAARILPVPSSLRRAPGLLPSCAPSQLGCGHLLARSQGGTRYLGFAMWAGVISLLFKSVRVCSTTKSQKPNYRNGSSSPFILATETPTRNTPIPCVTASWHQYIWSSAS

SEQ ID NO: 307703 - protein, 77 aa, Zea mays
  Clone ID: MRT4577_43694C.1.pep
RPPSHAKNGVPTLPTLKGKGKKMGLQSHGKGFKEQGTIFLVAHLGGGNVSFLGLVQTLFSCKQEMQNLEKKKKPTRP

SEQ ID NO: 307704 - protein, 71 aa, Zea mays
  Clone ID: MRT4577_43695C.1.pep
ILGSISVAGQIYSDYMFTGILTGPSEARHQQAAWWFLISFSTGGCYSGNTARVPHEEMSACNDLSCLAFLN

SEQ ID NO: 307705 - protein, 102 aa, Zea mays
  Clone ID: MRT4577_43696C.1.pep
QKKKTKKKESYSTQRTPNQAKQYCHTRTADQVLVLALRLHGAELAGRPPGAASSLSESRASCPCFLCFLFTSSLLVASDPVRALPVVSPISARGCVPLLDDF

SEQ ID NO: 307706 - protein, 59 aa, Zea mays
  Clone ID: MRT4577_43697C.1.pep
VVKDALDDGDHGRGPDAQPPQQRDVVLFVVLCIGAPNFLFICLVHQPGNEPGSCTVAGY

SEQ ID NO: 307707 - protein, 97 aa, Zea mays
  Clone ID: MRT4577_43698C.1.pep
PGRRLRRRCRTRRRSRLNSELHAGIAYAAYRLGVGAVVHALSVAADVVFDRVDAAVKDADSVLTDADGGDEVTYEQPRQRQAQQGYTILVGAIARAI

SEQ ID NO: 307708 - protein, 113 aa, Zea mays
  unsure (1)..(113): unsure at all Xaa locations
  Clone ID: MRT4577_43699C.1.pep
LSPXXXSAGSLASRCXXXWAXXFLXXXFXXAXXASGVRFXXFPXXXXGXXCFXXXWXSFXAPPPXXXGPXWPPGXRXRXASXSRSSXGXSGAGVSSVSGRXXSPSACXPLXPS

SEQ ID NO: 307709 - protein, 189 aa, Zea mays
  unsure (1)..(189): unsure at all Xaa locations
  Clone ID: MRT4577_4369C.1.pep
KVSVFFFAITFGLIFISPFMQTLRTLKCAFRPFQSDQSSSLFLNAVAANQRGPGTLGDNQARSYGNTSAIEMAAAKAAQHRLMRGVWTNARFGDMRRALAACERLILLHHDPHELRDYAALLYHCGYYEDCLHYLSLYQTAXWEIPNQSIGDLGGRSCEYSQSAVNAYFSRGWLEQXVXTCGKVLDQEL

SEQ ID NO: 307710 - protein, 40 aa, Zea mays
  Clone ID: MRT4577_436C.1.pep
MARSGGGRAGRKKEKGERRKKKGERRKPRASIFAFFAECP

SEQ ID NO: 307711 - protein, 55 aa, Zea mays
  Clone ID: MRT4577_43700C.1.pep
FVSRLIPHTFLSQDYFDFQPGLVKMLDGCNPDTFNIWGIRIWKDLQCDAFNCFKT

SEQ ID NO: 307712 - protein, 51 aa, Zea mays
  Clone ID: MRT4577_43701C.1.pep
IHHPQPTLPTLKAIIKNKSHITQLLTTYLPINILHTFLNILSPINIPQSTY

SEQ ID NO: 307713 - protein, 128 aa, Zea mays
  Clone ID: MRT4577_43702C.1.pep
VSVSFVTGLAGALIYLQKARISPDAAFSVLDWTAYVIFIVVIGGIGTIEGPIVGVIVFFALQKSLADFGSWYLLVLGLIGIAVMLFAPRGLWGLFTDRTGIQSFPIRRVLAGGPSTISSKVTQGGPHG

SEQ ID NO: 307714 - protein, 54 aa, Zea mays
  Clone ID: MRT4577_43703C.1.pep
HARRHAQPGFISAFIGAVVAERFGHGFLYGPLWRPESGITTGTRRHQAGQHDGG

SEQ ID NO: 307715 - protein, 73 aa, Zea mays
  Clone ID: MRT4577_43704C.1.pep
LSKELSPYSVPSVFKQRYWSFKHSRGRSVCAFICLSQKLVSICVTSISVMSLSPTVCPCVSGRIVSNSCYAWL

SEQ ID NO: 307716 - protein, 300 aa, Zea mays
  Clone ID: MRT4577_43705C.1.pep
MPDADVDTVIREAAAAAAPAGDDDSEGDTEEEEEEGDEVDEDEDDDEEELPAEAPAPDEEQPAPAPISTLPGNPNQLTLVFQGEVYVFESVTPEKVQAVLLLLGRGELPPGLAGMVLPNQNENKGYDDILQRTDIPAKRVASLIRFREKRKERNFDKKIRYAVRKEVALRMQRRKGQFAGRASLEGESPAPGCDPGSQGSGLDFASRESMCQNCGTSEKMTPAMRRGPAGPRTLCNACGLMWANKGTLRSCPRAKVESPAVATEQGTSDNKALATLNNNNVAASNGEATSAAEKGVPKAP

SEQ ID NO: 307717 - protein, 223 aa, Zea mays
  Clone ID: MRT4577_43706C.1.pep
PISTSPDDVAWLKAQLASNSLALLASADAWHELRKGINPRTRERQLFDLNRHHGISHYPEEEATNHTALPCPGELLVEEHHSNYGEPWAGGRDVFEFLANASALAPRDQVLEIGCGTLRVGLHFIRFLDAGRFHCLEQDELSLMAALRYELPSQGLLYKRPMIVRGGDMDFSKFGDTVMYDLIYASAAFLHIHDDLVWTGLERLAGKLRPQTGRIFVSHNIKF

SEQ ID NO: 307718 - protein, 88 aa, Zea mays
  Clone ID: MRT4577_43707C.1.pep
CRDRCLLLRRAVPLVAMLVSCCLLMRARCLSRRDEVLWTQAWVLLAWHPGFQDNPSTWLCQPHICRYCFRFLNTDMREIIGQLLLSCI

SEQ ID NO: 307719 - protein, 121 aa, Zea mays
  Clone ID: MRT4577_43708C.1.pep
GFFLVFPVSCVPVLGGVLWGLVAPLGLRLVSAVGVLLPLPFLVPCVASGSPSVFLGLSVPSVASVGLRFPGPCPCRFCCRSRGAGFPRLRPFSSVFSVGSRCGGVVRCPPAGFVVHGLLYG

SEQ ID NO: 307720 - protein, 108 aa, Zea mays
  unsure (1)..(108): unsure at all Xaa locations
  Clone ID: MRT4577_43709C.1.pep
ALAALSXGVPFWSAWLVRPCLPLLLVALRPASWSFSPGGGPLRSWPRAGLPRLVALRVLPSASASCFRGGAVPLRLRVSLALPGSPGLLASXRPPPRSASRPWPLCVL

SEQ ID NO: 307721 - protein, 109 aa, Zea mays
  Clone ID: MRT4577_4370C.1.pep
ANEITTRADHQSLNSKKIEKKTVLLCFRGYHHKNTSVDFGQSKPFFYGERSNVGTKGKLRACISPHENMRILYLWYLGFTGGLNFREDITLELATYFLGLSNWGDLDRP

SEQ ID NO: 307722 - protein, 66 aa, Zea mays
  Clone ID: MRT4577_43710C.1.pep
MPALAKPTFRTAKPASAPKPNPADIWPKAATAGASHPPNFEMIKEAFTALKERTDPRPCEQPRSLD

SEQ ID NO: 307723 - protein, 200 aa, Zea mays
  Clone ID: MRT4577_43711C.1.pep
MASLPDPTVYYPTSSNAILRAHPSAAAAASRGSFGPVFAVLAVISFLAVSACVVGRLRLCGRRLFRKGSADQDSYASDSDLEKGFEVKYPAMKPMASSRAVIHDMDDGFEIKFAPGKPAAWKHDGKADSKGSRQGHGQGQGQRQHHGQGQHQPQIVGIPKGYAVPVPVPKDYAGFRYPAEAVVRQGQIRGGAFVPAKPGT

SEQ ID NO: 307724 - protein, 122 aa, Zea mays
  unsure (1)..(122): unsure at all Xaa locations
  Clone ID: MRT4577_43712C.1.pep
RTRTLTLPDTSLESLYITLHVCHRRAYISARRPANXIYCILKKLGKDKLLGHFSQQRTVFFIDGGLYKHYKNFIACLEATLTYLLCEEVASSFVVKYTNDFSXLXSALLASFHSQYAEAAYF

SEQ ID NO: 307725 - protein, 70 aa, Zea mays
  Clone ID: MRT4577_43713C.1.pep
NSWVDERLCRRPPSPFVCEHFGRKPGRGTRTIKAPTFRNGTRPKAKQHGQGGTRLSEFTKHLRKLPRRIH

SEQ ID NO: 307726 - protein, 77 aa, Zea mays
  unsure (1)..(77): unsure at all Xaa locations
  Clone ID: MRT4577_43714C.1.pep
IGYLEGRPXKNLKKKKKKKKKKKKKCALLGAVDYRSHTNLWRPQKGVAESSLPPPFWVTPPQPLHVPATLAHCVPSW

SEQ ID NO: 307727 - protein, 151 aa, Zea mays
  Clone ID: MRT4577_43715C.1.pep
FRTPPRGAKQKRPPRGFQLSLTRGFSPPLILASGNPFFFGGPRLFLFFVAQRVFWAPPGGPHLFLPPKGRFFPFSGFFRLGAKPQASFFFLPRSNKPWGFRGPLFFFRVSRSQIFSYLCSPRGFFLLGKRFFPPGGVFFFFLVGAPKFCLP

SEQ ID NO: 307728 - protein, 69 aa, Zea mays
  Clone ID: MRT4577_43717C.1.pep
GPHVPALAPLPIGFAVFLVHLATIPITGTGINPARSLGAAIIYDSPHGWHGHVSLFARRCMHIIYTFAT

SEQ ID NO: 307729 - protein, 44 aa, Zea mays
  unsure (1)..(44): unsure at all Xaa locations
  Clone ID: MRT4577_43718C.1.pep
GYGDXDIXLSVLHSVSNGYYGECGRTGGYMEVTGFISDVKRQVY

SEQ ID NO: 307730 - protein, 73 aa, Zea mays
  Clone ID: MRT4577_43719C.1.pep
FCGFFTIIWFIFNHGIQHSSYQHLELVDSCNKKGEITWLTNYTQKHALVGYRTRSTNHPQAMPAITSHTIMTP

SEQ ID NO: 307731 - protein, 44 aa, Zea mays
  Clone ID: MRT4577_4371C.1.pep
MATVLGSPRAPAFFFSSSSLRAAPAPTAVALPAAKVGIMCRINS

SEQ ID NO: 307732 - protein, 98 aa, Zea mays
  Clone ID: MRT4577_43720C.1.pep
FKQICVAYYLPEWCSTSDYVKLFQSLSLQDIKAGDWTENVAPFWPAVIRSALTWKGFTSLLRSGLKTIKGALVMPLMIEGFQKGVIKFAIIACRKPAE

SEQ ID NO: 307733 - protein, 141 aa, Zea mays
  unsure (1)..(141): unsure at all Xaa locations
  Clone ID: MRT4577_43721C.1.pep
LLHGDYAPKAIFPTIAGRPPHTGVMSIMSHNDTYVANEAHPKRGILTLQYYIDNRIVTQXDDMDNIWYHPCYYKLTGAPXHHPELLTVCXPFNPXANMEKMTHIMSETFYVPDMHVAIQRVLSLYDNGRTTDIVLDSVDAV

SEQ ID NO: 307734 - protein, 108 aa, Zea mays
  Clone ID: MRT4577_43722C.1.pep
QGCSIGCSIHRRVLSICRFSQLPLDGFLSHESVPIADSRQQSQAVQLRQQNSHKEYTSRRSCLFRLQRRWKCWIISGDPDMIGFWYEQQWMAPAIQDPSLRSACNFPS

SEQ ID NO: 307735 - protein, 67 aa, Zea mays
  unsure (1)..(67): unsure at all Xaa locations
  Clone ID: MRT4577_43723C.1.pep
PSVPRPSEGPFCNLLSXXKFGSRDGEEYVXXVWXEPXRKGTXXHXLLSAPRPHCPLIDRXXCRPQNS

SEQ ID NO: 307736 - protein, 54 aa, Zea mays
  Clone ID: MRT4577_43724C.1.pep
PVRKVSFLNTNFNLLSKQTPAQPHLYHLLATATSHKSDIKKRMQHFSYDLSSCN

SEQ ID NO: 307737 - protein, 97 aa, Zea mays
  Clone ID: MRT4577_43725C.1.pep
MESTTGSVELEQTPSSQITSSWYSARSKEQAPHGRDNLQGIMSTVRVRTAAVVAIGTRCTKYIMLGGCGVGLHRLELKSYVPQVMNTGQTRGQGENS

SEQ ID NO: 307738 - protein, 82 aa, Zea mays
  unsure (1)..(82): unsure at all Xaa locations
  Clone ID: MRT4577_43726C.1.pep
XFFYFFFFIFFFFFFYSLFFLSFIFFFFSSTTSLGGRPKNQQGVFIKKKWPKKHWGGGINGKTPGWDKTGEAKKLCKITTPH

SEQ ID NO: 307739 - protein, 79 aa, Zea mays
  Clone ID: MRT4577_43727C.1.pep
SRALIQVLFCKESCMERSLLLFDVAVHCSINMSYICQYVAHSRKSGLSDNGGKEVDPRMTLDSRHGACAGARRAHALAG

SEQ ID NO: 307740 - protein, 44 aa, Zea mays
  Clone ID: MRT4577_43728C.1.pep
IKRNKLFFPRFSPLTISFFTTPPNKFCFLVLGFLILFFSFAILD

SEQ ID NO: 307741 - protein, 77 aa, Zea mays
  unsure (1)..(77): unsure at all Xaa locations
  Clone ID: MRT4577_43729C.1.pep
MSIMNGNLLKLYAIRKEGDIKFEETDSQVTCVMMARCCVNTHEQYTSYQPTPQHLVVVVRTYACSVTCRTRGTPRXF

SEQ ID NO: 307742 - protein, 63 aa, Zea mays
  Clone ID: MRT4577_4372C.1.pep
MRAPGGGVIVDPAEEMSMELGEVVMQVCGGGAKGEHARIEHRCPMAVPDAEDGVYHFNIGHGV

SEQ ID NO: 307743 - protein, 55 aa, Zea mays
  Clone ID: MRT4577_43730C.1.pep
MACEQGVVTSCQRTAEFDAHMTKDQEAGGLDDIDFTAAWCGPCRAIGLLFVGHPT

SEQ ID NO: 307744 - protein, 85 aa, Zea mays
  Clone ID: MRT4577_43731C.1.pep
FEPVLHVKFPIPLGKGKGDFSPCFQLQGPGNNTAHLIFTLIIDKNMIFRGANTTNRGLAHMGPVCLGFSQFLATKSWRGLPNTCL

SEQ ID NO: 307745 - protein, 88 aa, Zea mays
  Clone ID: MRT4577_43732C.1.pep
MSLLKRLARSMYSNPPIHGAKIVANGGGDPTMYGEWKQEMDPPAPRIKREKHTPFYSQPKKVFFPKAPPWDPKGKRFFLEGPKKPSPG

SEQ ID NO: 307746 - protein, 117 aa, Zea mays
  Clone ID: MRT4577_43733C.1.pep
LHRISRFFRLDIISEGSARSRFINKMDCMEGNCKMCSVLKLALIDNYSTPDDQIHLMTVGQVLLNHRIRWTPSKQSALKCSAYILHQTQRRLNALAVVIPIGRSLSTAATIGCHTTR

SEQ ID NO: 307747 - protein, 125 aa, Zea mays
  unsure (1)..(125): unsure at all Xaa locations
  Clone ID: MRT4577_43734C.1.pep
SAGATRPTNAIKDEGGGGDSGLVLADQIDLNSLDQQLERHLTRAWTMEKRKVEVYDGAGAGARHDQHVXRSTPREDWEIDPDKLVVKDVIDQGTFCNVHRGIYYADDVAEKLLDCXEDGHRSEHD

SEQ ID NO: 307748 - protein, 54 aa, Zea mays
  Clone ID: MRT4577_43735C.1.pep
PDLGTDLVATLPSLNVQDFFHFGGGLSQSKNLLTCRQPTGFEEDGLVHFKRFQL

SEQ ID NO: 307749 - protein, 182 aa, Zea mays
  unsure (1)..(182): unsure at all Xaa locations
  Clone ID: MRT4577_43736C.1.pep
KQIKTXKKKKKKKKIKITKKKKKKKKKKKKNKKKKKKKXKKKKKKNKKKIKIKKNKKKKKKKIPNKKKKEKEKMIKXKMKXKKILKKKQKKKEKKKKKKKKKKKNKKKKKKRXYKKKKKKKDQKKKKKKKRKIKKKKRKKKKKRKKKHXNKESKNLKKKKKRVKSKKKXKNNIKKIKNLNYV

SEQ ID NO: 307750 - protein, 97 aa, Zea mays
  Clone ID: MRT4577_43737C.1.pep
FDNREPIKYTSVTKSAQCTGSSSIGSRSSLADQVQLHDDVGCYHLSQLYYGGRTGLWVRRRSPNKHPKWGMVGARVREHGCGLSCIDKLNCSGVSCR

SEQ ID NO: 307751 - protein, 74 aa, Zea mays
  Clone ID: MRT4577_43738C.1.pep
HAVSLLHGILIDSIAPDENLRDKLGQPEVIQIPVPLSLVNPLSSSESRVLIIGTMLRAQARLRATALHAANTGR

SEQ ID NO: 307752 - protein, 85 aa, Zea mays
  Clone ID: MRT4577_43739C.1.pep
STAVHSTRSYLQKLVGCIESLQTDGGVRAKATRRSTHVSGLRCTSLCVCVTQGKNKRVSFDVHLISVPGLQMYQFMSVHIYPFPA

SEQ ID NO: 307753 - protein, 88 aa, Zea mays
  Clone ID: MRT4577_4373C.1.pep
EALPVTTEPKVVRHSLSTKIQGYGLPRLFLSGPTHVEVCLFFFPRKYPGRSGASTELEDLFYLVLGFSLIRFSLMYRLLVLEFRYNGR

SEQ ID NO: 307754 - protein, 150 aa, Zea mays
  unsure (1)..(150): unsure at all Xaa locations
  Clone ID: MRT4577_43740C.1.pep
LYCXNDKPSLDWATRFHIIKGAACGLLYLHEKWDKVVIHRDIKASNVLLDSEFNGRLGDFGLAKSYNHGTDPQTTRVVGTMGYLAPELVRMGKASPLTDVFAFGTFLLEVTCGHRPIVVEQSTSGKHHRFLATNESVPIGHHVHHRQDYW

SEQ ID NO: 307755 - protein, 103 aa, Zea mays
  Clone ID: MRT4577_43741C.1.pep
WQLYSMLLPVIGHRFAGGTRRQAHGSALPPGGLSPAVEGCRRGVDCGSTTTCGVFPVAADTRAGSGSHRGVFVSGRQWARGGSPGGKEVVAVPLDGVVRVEYM

SEQ ID NO: 307756 - protein, 32 aa, Zea mays
  Clone ID: MRT4577_43742C.1.pep
KKKKKKKKKKKKKKKKKKKKKKKKKKKKLIKV

SEQ ID NO: 307757 - protein, 150 aa, Zea mays
  Clone ID: MRT4577_43743C.1.pep
SQPSTIYQQFSQIHHTLDSHLQHLACSLDKFLYCENDKPSLDWATRFHIIKGAACGLLYLHEKWDKVVIHRDIKASNVLLDSEFNGRLGDFGLAKSYNHGTDPQTTRVVGTMGYLAPELVRMGKASPLTDVFAFGTFLLEVTCGHRPFLK

SEQ ID NO: 307758 - protein, 33 aa, Zea mays
  Clone ID: MRT4577_43744C.1.pep
SSRYASVETVITLDATMPAGGTLRSPQGTGPCI

SEQ ID NO: 307759 - protein, 77 aa, Zea mays
  Clone ID: MRT4577_43745C.1.pep
VPTIHWLWLQDVCCMCNINAGPSLFVIKKTARLGIICFVSSPPGVLYSCESSLNGIVHVLCSYERIYEAVSEIVRLG

SEQ ID NO: 307760 - protein, 88 aa, Zea mays
  unsure (1)..(88): unsure at all Xaa locations
  Clone ID: MRT4577_43746C.1.pep
QSEVEATLNLNAMNQSPNPWPVSFSYARALQNSVLKTWQGXXXNVXAAQKALLVRAXXANSLAQLGRFPGEGRAXEAKKGMFPKGXPY

SEQ ID NO: 307761 - protein, 187 aa, Zea mays
  Clone ID: MRT4577_43747C.1.pep
MNNLQDNGLVPIVEPEILLDGDHGIERTLEVAEKVWSEVFFYLAQNNVLFEGILLKPSMVTPGADHKEKASPEAIAKYTLTMLRRRVPPAVPGIMFLSGGQSEVEATLNLNAMNQSPNPWHVSFSYARALQNSVLKTWQGRPENVEAAQKALLVRAKANSLAQLGRYTGEGESDEAKKGMFQKGYTY

SEQ ID NO: 307762 - protein, 387 aa, Zea mays
  Clone ID: MRT4577_43748C.1.pep
MAMATAKLNSPATSLLAGGRTRRSAPARCTTVIRAAAGSYSDELISTAKSVASPGRGILAIDESNATCGKRLSSIGLDNTEVNRQAYRQLLLTTAGLGEYISGAILFEETLYQSTTDGKKFVDCLKDQNIMPGIKVDKGLVPLPGSNNESWCQGLDGLASRCAEYYKQGARFAKWRTVVSIPCGPSALAVKEAAWGLARYAAIAQDNGLVPIVEPEILLDGDHGIEGALEVAEKVWSEVFFYLAENNVLFEGILLKPSMVTPGAEHKEKASPEAIAKYTLTMLRRRVPPAVPGIMFLSGGQSEVEATLNLNAMNQSLNPWHVSFSYARALQNSVLKTWQGRPENVEAAQKALLVRAKANSLAQLGRYTGEGESDDAKKGMFQKGYTY

SEQ ID NO: 307763 - protein, 51 aa, Zea mays
  Clone ID: MRT4577_43749C.1.pep
LAVGVVAKLLLVLQTNAGERAGLRVKEMLKTHARVWKDSPCLQTHRGSYPC

SEQ ID NO: 307764 - protein, 44 aa, Zea mays
  Clone ID: MRT4577_4374C.1.pep
NLCRGLSIVDSHIGWKLVFDVDTVVHISPLNLEAYFDRIIDLSV

SEQ ID NO: 307765 - protein, 166 aa, Zea mays
  unsure (1)..(166): unsure at all Xaa locations
  Clone ID: MRT4577_43750C.1.pep
RSKRLPIHGPADSEGRISLHGGVRCCXRRGYNPITAATTTTSNGSDPVGVVYGKVDRGRRRGLDGEFRSSVVLDDATTNAEEHMDLRRILRGRCPRRKAISPGGAATAKDEDQVFEPRLVIPRRKERLCIMCWMYCMSLGSNIGVHDLEDKKAILDTRLSRDYNQS

SEQ ID NO: 307766 - protein, 126 aa, Zea mays
  Clone ID: MRT4577_43751C.1.pep
PLGKNPKGEKRLPAGKSPAKEGGVSKKGGKKPKKRVERSKFSFFKVFNRGPPDMGFSSRALSFLNSFFKDFFKKFPGEGAKFPRFNKKPPFPSRGIQTSVPLFLPGGLPKPPVLGGPKAVPKFPSS

SEQ ID NO: 307767 - protein, 292 aa, Zea mays
  unsure (1)..(292): unsure at all Xaa locations
  Clone ID: MRT4577_43752C.1.pep
MCEQRSRPRPRPLRAVVPASVTDMRMVVAPPDGEFGDFPVERDWMLVGKSYVPGLSTNRGRRRLDAGEIVHFAFPSYEKXWRVKDXAKKAAALAQIVRFSTKRAGEIGKLSPEWTQCLVPLVNSSKVKIQGKLVFPTMELRLMQEILLYVSFYIHKSVLAEMDNSPCDMLDHANVDFTPSPLHKLLSLLNLKPSNKDAFSLDDLTTRKLKQILRGNNNNXMILLRXAWPYFLEQGADEQAISEAALNKLVGTAETFDLEEAEPPTTLVSVLKPYQKQALFWMSKLEKGIDAN

SEQ ID NO: 307768 - protein, 46 aa, Zea mays
  Clone ID: MRT4577_43753C.1.pep
MHVLPAGNECNASPPKKKKKKKKKKKKKKKKKKKKKKKKKKKKKGR

SEQ ID NO: 307769 - protein, 65 aa, Zea mays
  Clone ID: MRT4577_43754C.1.pep
PWWHQCATDTRARMTHLPSRRHTVILAHMYTMQVRHRDTLHADQSSARLHTRGFATETHTTHLTP

SEQ ID NO: 307770 - protein, 117 aa, Zea mays
  unsure (1)..(117): unsure at all Xaa locations
  Clone ID: MRT4577_43755C.1.pep
KKRKKRKQGKQQGSXTQRRRPHKNKRTQQAGQTARTKSNNREPGKTRESPPNPPPQNNKRKAPPGDKTSKRPNTTTTTQEETRNNHQGERERRTEQTGTARIXQERQRETXLLKAFT

SEQ ID NO: 307771 - protein, 102 aa, Zea mays
  Clone ID: MRT4577_43756C.1.pep
VRALGKVPEGPWNKDHTNTIVRCYEITSSGSRMLGSYRWNPRDEKNSMIRLIYHESQDRLNILLENVILQDLTYTQHAAPHDLPGNAEGLRAQALMVTTLYG

SEQ ID NO: 307772 - protein, 126 aa, Zea mays
  Clone ID: MRT4577_43757C.1.pep
IRELVDPLLGRDEFASDKMERMTLAASLCTRTSSRSRPEMSLVLRLLQGDDEAIGWARAQVTASFDGSDEEAAAAAPDLNMQSHLNLALLGVEVEDDDTLSQSQSQCSSTVDTSADGYWSRSSSFD

SEQ ID NO: 307773 - protein, 43 aa, Zea mays
  Clone ID: MRT4577_43758C.1.pep
SLTKFFFFFFFFFFFFFFFFFFFFFFLTASCHLVIRVWLANYS

SEQ ID NO: 307774 - protein, 32 aa, Zea mays
  Clone ID: MRT4577_43759C.1.pep
QKEALSLHTYLTYSPALYSGQINSISGSQLSH

SEQ ID NO: 307775 - protein, 49 aa, Zea mays
  Clone ID: MRT4577_4375C.1.pep
AALIGYSDTSGSYASWSQSEVFLLRYMAMCATETVWINVLFGQTFEGCL

SEQ ID NO: 307776 - protein, 84 aa, Zea mays
  Clone ID: MRT4577_43760C.1.pep
PCPPLSDSRWLCPSLLFQKFLASKICRGVHCKRTCVIFWFMCSPSLTCDRGLPLCVLGSLHRILHCSRLQSATTLACKCRSLPI

SEQ ID NO: 307777 - protein, 133 aa, Zea mays; identical to SEQ ID NO: 194970
  Clone ID: MRT4577_43761C.1.pep

SEQ ID NO: 307778 - protein, 96 aa, Zea mays
  unsure (1)..(96): unsure at all Xaa locations
  Clone ID: MRT4577_43762C.1.pep
VSVVALTVTIEXGASCQKIKKAIGAAFEVPLKGIMVYVQKFLVSPFFKGNSGFTMLAAMSGIAMNNLFIKLVSWPNTEWGFSNRVVALLPHMFKPQ

SEQ ID NO: 307779 - protein, 51 aa, Zea mays
  Clone ID: MRT4577_43763C.1.pep
VHAGVHSVFYRGHLKFNQWAAVYHRRAGKTLAVPHLIGLADHPLLAGWGIT

SEQ ID NO: 307780 - protein, 402 aa, Zea mays
  Clone ID: MRT4577_43764C.1.pep
MRGGLWQLGQSVTRRLAQAEKKVIARRCFASEADLKKTALYDFHVANGGKMVPFAGWSMPIQYKDSIMDSTINCRENGSLFDVAHMCGLSLKGKDCIPFLEKLVVGDIAGLAPGTGTLSVLTNEKGGAIDDTVITKVTDDHIYLVVNAGCREKDLAHIEEHMKAFKAKGGDVSWHIHDERSLLALQGPLAAPVLQHLTKEDLSQVYFGQFTFLDINGFPCYLTRTGYTGEDGFEISVPNEYAVDLAKAMLEKSEGKVRLTGLGARDSLRLEAGLCLYGNDLEQHITPIEAGLTWAVGKRRRAEGGFLGAEVILKQIADGPPQRRVGFISSGPPARGHSEIQNEKGESIGEITSGGFSPCLKKNIAMGYVKSGNHKAGTKVNILVRGKPYEGVVTKMPFVPTN

SEQ ID NO: 307781 - protein, 50 aa, Zea mays
  Clone ID: MRT4577_43765C.1.pep
VCQRLKLWVRRQLKNELAPGYKGTQYRRHRIASRAPTGIKNRGAGLCSSR

SEQ ID NO: 307782 - protein, 105 aa, Zea mays
  unsure (1)..(105): unsure at all Xaa locations
  Clone ID: MRT4577_43766C.1.pep
KSPLKSMPGVTSVPFNPKQTKCPVPGYLKPPKVLERFKPPAKNPKICPXVPXTLPPYPXVGGPYNKKAPPGFFPSAPQPMANPSPPEVKYISFFTDKNVNPPPPI

SEQ ID NO: 307783 - protein, 67 aa, Zea mays
  Clone ID: MRT4577_43767C.1.pep
SLKTKIPLSRTSIRYSGAETKVCGRRSHRTQTTDKKSRGTARIADDVSVKRVGQQPQTLESRPKQEH

SEQ ID NO: 307784 - protein, 114 aa, Zea mays
  unsure (1)..(114): unsure at all Xaa locations
  Clone ID: MRT4577_43768C.1.pep
VLLHGRFQTQTWVHSGSGYLWERLAVLHHLSPGREVSPAHQYALAGGVSFPFCWLAGAGSAVFXVLGEYRVCVGRGWEPGERACPEAPVLLLPTGVTLVLIGSHAAFHQIEPAD

SEQ ID NO: 307785 - protein, 127 aa, Zea mays
  Clone ID: MRT4577_43769C.1.pep
PILLGKNIKKHLGSGICYKPLGELCLFPGLQSVVKFLKSFDFTCESGRQVKKMPSFFPLQYGSQHCIMSCKIFIQGKSGSMYMGETKPPKKLSAMPVQLLVWLPYNVISLDSLPLKSNRGQVFDPRF

SEQ ID NO: 307786 - protein, 223 aa, Zea mays
  unsure (1)..(223): unsure at all Xaa locations
  Clone ID: MRT4577_4376C.1.pep
ETCPNRVQVPWERRGPRLPPRFTTEASETYRGAFTAASTGGGYSPKPXXPLXXXXRXAXYAVAXXRPLFAXAGMLIAAAVISXXXRSXXPPPPPPPXSSYSXQPARXFXXRAPPXRXVATRHFVGGKVPPGLKXXVLRVLXTGGAAFVGSXLVDXLXXPXDSFTVXDNXFTGRKDNVXXHXGDPNXEMRRHDVVEPXXPXXDQNYHLAFXASPVHHKNNPTKT

SEQ ID NO: 307787 - protein, 71 aa, Zea mays
  Clone ID: MRT4577_43770C.1.pep
KGGMNYDFNKYMGLFGPLYGPFRACLKRVGLVPAHGPGPWPKPGPGLKYFGSCRAWAVFFSGFGPAQMYTY

SEQ ID NO: 307788 - protein, 72 aa, Zea mays
  Clone ID: MRT4577_43771C.1.pep
MSTTTEAAKSGSAAPVRCQRIGCDAIFTNDDNREGSCQYHPSVSSSASSGFPFPPETALVSWLRRVCAICDG

SEQ ID NO: 307789 - protein, 94 aa, Zea mays
  unsure (1)..(94): unsure at all Xaa locations
  Clone ID: MRT4577_43772C.1.pep
AGCGHSTTPPTTRTTESHINAAITRVWSGPTFNCKILTCPLGGTLVLLTDVGTHSVVEATPSNTLPPTNVQRRNGRVINTSLSXEPSWVLLGPG

SEQ ID NO: 307790 - protein, 254 aa, Zea mays
  Clone ID: MRT4577_43773C.1.pep
MAARGRSPPPRRGYGGGRGDHGSVSLLVRNIPLRCRPEELRVPFERFGPVRDVYLPRDYHTGGPRGSGGLILGIANSLEGSLSPDMCQLTGLWYFDVKNNSLTGAIPETIGNCTSFQVLDLSNNHLTGEIPFNIGFLQVATLSLQGNKFSGPIPSVIGLMQALAVLDLSFNELSGPIPSILGNLTYTEKLYLQGNRLTGLIPPELGNMSTLHYLELNDNLLTPTRPPTRPKKLKQIALRRCIQEILDLRALTTF

SEQ ID NO: 307791 - protein, 143 aa, Zea mays
  unsure (1)..(143): unsure at all Xaa locations
  Clone ID: MRT4577_43774C.1.pep
AVILHFSIVSVMLRCYCVISCLLYYVVTFLFTFFLFSIHALFLHMLLQXQRTXXGXQKXXXSRNPXXXXXXXQTXXKXXXRXEQPAAGSPSTINSAGQVXKAEKXLASFPSSFVYLQQXYHISLFKLYYVNDTVYSCFARLYA

SEQ ID NO: 307792 - protein, 52 aa, Zea mays
  Clone ID: MRT4577_43775C.1.pep
TVKHYKRASLKQKKKKKKKKKKKKKKKKKKKKKKKNKKKKKKNKKKHKQNKG

SEQ ID NO: 307793 - protein, 62 aa, Zea mays
  Clone ID: MRT4577_43776C.1.pep
CPMHFKSDNQRSSHRPSIYGISIGNAVAVNSVACTDHIALPQTGVLPTRPAPIGLRTNFPPS

SEQ ID NO: 307794 - protein, 61 aa, Zea mays
  Clone ID: MRT4577_43777C.1.pep
FSWVITGFLEKIEPDTHKQRAKYPAQAVLPYSNHHAAPFDSTTEKRKTQRTQTAFLDAQVF

SEQ ID NO: 307795 - protein, 81 aa, Zea mays
  unsure (1)..(81): unsure at all Xaa locations
  Clone ID: MRT4577_43778C.1.pep
MTGGSGVVVIDNGGGLLKAGFGGDNDPIAVVPNCMANPPGGNASSKKWLVADQLQAEXVDVTGMTLXKRPIDRGYLINTEV

SEQ ID NO: 307796 - protein, 88 aa, Zea mays
  Clone ID: MRT4577_43779C.1.pep
IRSWHAQEDRSHSALVCRLEDMCSSFSHAVRNIENLCWIPLAELGKERAEDPAMEAMCVIREGRGRDGGEAAAGKSVRATGRWLACPA

SEQ ID NO: 307797 - protein, 67 aa, Zea mays
  Clone ID: MRT4577_4377C.1.pep
MARACVFLVVLLLAAVAVAPFAGAARVDVVEGRSMASADAPEAADDAPALGSDFASFFDLPLEAPFQ

SEQ ID NO: 307798 - protein, 111 aa, Zea mays
  Clone ID: MRT4577_43780C.1.pep
RCFSIIVTSILSHSTASSSVCPNDIISASLVYQFIQGTLFLFSREDDGPRLFLAVIVEAANDVDNLGVECFLIVMTVNVFVHRVFFALHHIVAGAAPRQLYQRIRRHYPVP

SEQ ID NO: 307799 - protein, 72 aa, Zea mays
  Clone ID: MRT4577_43781C.1.pep
MQWRPGRGLGVGRREGRQGLAKPRQLPESLLHSARHPSILGRPKVASLHEGTAQLTILWANFSQLSFPLVCS

SEQ ID NO: 307800 - protein, 223 aa, Zea mays
  unsure (1)..(223): unsure at all Xaa locations
  Clone ID: MRT4577_43782C.1.pep
MAFANLRKVLISDSLDPCCRKILQDGGLQVVEKQNLSKEELIAELQDCEGLIVRSATKVTADVINAAEKLQVVGRAGTGVDNVDLEAATRKGILVMNTPNGNSLSAAELTCGMIMCLARQIPQATASMKDGKWDRKKFMGTELNGKTLXILGLGRIGREVATRMQSFGMKTVGYDPIISPEVAASFGVQQLPLEEIWPLCDXITXHTPLLPSTTXLLNDSTFA

SEQ ID NO: 307801 - protein, 110 aa, Zea mays
  Clone ID: MRT4577_43783C.1.pep
MFCVSCDAKKKNRSIPRPSLSMSSCVLSSCYRLRCLSGIISSAWPHSIACIGAPAPHGSPSRGHASTLDRSRRRAVRALRRQPQADPSGKSESHHLAFLEELIGNQSHIN

SEQ ID NO: 307802 - protein, 252 aa, Zea mays
  Clone ID: MRT4577_43784C.1.pep
MAFMMVILAIYLAPNTTKLVNRYLFGAAQQVGSLRQMDWCGFVADYLFRGIRKFKESEAPFVFVKGCVHILNVIYVDLVKHAAFEVPNGFPRLGVVTTEHNKLVASHPFGSLLVRRLEESVYAPVLNNMGNGSIVKGGTCADSDTNTDALANQFAITVTHQNNPQPIAAYPGTARTTPDITSLASVEHVALETSARSAVYSFNTHRVEGSVFLEECVVFPRSREQLQSAGPSSPYSAQIAEKMQFAPEDTLG

SEQ ID NO: 307803 - protein, 325 aa, Zea mays
  unsure (1)..(325): unsure at all Xaa locations
  Clone ID: MRT4577_43785C.1.pep
MHMTAEKLSLKSASDYNYLKQSNCLKINGVDDSKKFTVLVDALDTIQISKEDQMKLFSMLAAVLWLGNISFSVIDNENHVEVVSNEGLATAAKLLGCTANQLVSAVSTRKIRAGNDSIVKKLTLTQAIDARDALAKSIYANLFDWIVDQINHSLGTGRQFTWRSISILDIYGFECFNKNGFEQFCINYANERLQQHFNRHLLKLQQEEYLEDGIDWTPMEFVDNTNCLSLFEKKHLGLLSLLDEESTFPKASDFSFANKLKRQLSGNSCFKSEKEGTFKICHYAGEVXTYDTAGFLEKNRDPLHSESIQLLSSCTCELSKHFASV

SEQ ID NO: 307804 - protein, 108 aa, Zea mays
  Clone ID: MRT4577_43786C.1.pep
MGRVYSSAGGVDKAWQRNLHLIGGGGGGGEKKACPAAAPALGLQKHKSWSPDIERDEVWERRRRDMRRGGTALRRARSVTDDDLAELRGCIDLGFGFEPAESVCAACG

SEQ ID NO: 307805 - protein, 100 aa, Zea mays
  unsure (1)..(100): unsure at all Xaa locations
  Clone ID: MRT4577_43787C.1.pep
GDDPEAAAGRAVEVDGVEFRGKLLTVRLDDWRKGRARSEERARWVEAGVVREASSPWHKGREDACREFRRVLESRPEXWQAVVSAFERIPKPSRREFGLM

SEQ ID NO: 307806 - protein, 148 aa, Zea mays
  unsure (1)..(148): unsure at all Xaa locations
  Clone ID: MRT4577_43788C.1.pep
AHLTGLTGRGRRLLLLPPIEPAKKARRPPRPLPSSWGAPTAAANPCNKRXPLDKPLQLPPGAVAPLKRRPPPNPGAPPCRGPQQQRLPPPPGGRRPCPVPPXSPPKKTCPSRRGGQAPPRPSTSPAQCCSPRGSAPPCPCGNPNPNPY

SEQ ID NO: 307807 - protein, 72 aa, Zea mays
  Clone ID: MRT4577_43789C.1.pep
TGVGKGKCKGQQFKGGANPTRPGFRAPRHKRGGTPGACQGAFLSGGPQILRATGIKRVQGGPPKNQGPDHIG

SEQ ID NO: 307808 - protein, 129 aa, Zea mays
  Clone ID: MRT4577_4378C.1.pep
HWVPRGRPDISYLVWAVTRRAFHFPPFYYRLSTPILCWDTTSMASSLRKYITIVVFNDPTTSAGDYDYHIFILDSGCRRHPIPSSHCLLGRPSLKLTSRCIEEPTFTSSFAPLFFPDDEHLLPRDILIK

SEQ ID NO: 307809 - protein, 98 aa, Zea mays
  Clone ID: MRT4577_43790C.1.pep
IPATQIVSHTASLQPLRCSGGSTLLIASLQSDFHNNTLRTSTRRQDRWHRCIYGIFIAVHNHNSCHFGLYCPSGRSASHESFTRMLAVGTPYSCLAIL

SEQ ID NO: 307810 - protein, 182 aa, Zea mays
  unsure (1)..(182): unsure at all Xaa locations
  Clone ID: MRT4577_43791C.1.pep
GGSGDRGXTASSPMLNALPTGNIFPPVRVPATAAAPPPSRSRPDVLGSGTGHYGHGSIMRGTGMAPARSSIDSSFLGHSSRSPASFSASSGSLQEVTRLGNEWYKKGKYGEALRHYERAVALCPESAACRGNRAAALIGLGRLADALHECEEAVRLDPVSGRAHSRVAGVCLRLGMIDKARR

SEQ ID NO: 307811 - protein, 67 aa, Zea mays
  Clone ID: MRT4577_43792C.1.pep
KKKKKKKKKKKKKKKKKKKKKKKKKTRKKKKKNKKKKKGFVLARGAAGGGPSHFCCRGRRICWQPRV

SEQ ID NO: 307812 - protein, 120 aa, Zea mays
  Clone ID: MRT4577_43793C.1.pep
NLGIRSRTGAGKVNPKRTGGPKPAWVPGPGAPVTFILSIAQPQKWAGPKGHWGRPTMGGRKSISLLAYWVLDMGGVRAPTRLLLPPSVGSPGTSLMKGAFRAIPALASKKLHLVSPGKAG

SEQ ID NO: 307813 - protein, 93 aa, Zea mays
  Clone ID: MRT4577_43794C.1.pep
LTRIPFYPVSMALEKIRVLLLRLHPERATTTVTAGTRTVGACHGRGQGLLFPLLFFAVLRERLYPLEWKMMDDVVMIMAWKRANDLFLSDRLY

SEQ ID NO: 307814 - protein, 56 aa, Zea mays
  Clone ID: MRT4577_43795C.1.pep
LLFTHFTWSPINFFCPFLTFIPSYTKIPIQYASPTPLKTHLTKNITFSHLKPLIPY

SEQ ID NO: 307815 - protein, 50 aa, Zea mays
  Clone ID: MRT4577_43796C.1.pep
VLPNQVYGQRIKCGSSDGPVQANALVDQVCYDARLSTENHGCIVPIATGP

SEQ ID NO: 307816 - protein, 101 aa, Zea mays
  Clone ID: MRT4577_43797C.1.pep
VIMPSFQKSKWFSLENWVEQFGLSFRQWALPHYDVQTALFPHVHYLCFKNTWWYYTHKRALWPCMRPQFGKRVFIIYQKVQYKGGISPIGIPIVNPPAQVF

SEQ ID NO: 307817 - protein, 106 aa, Zea mays
  unsure (1)..(106): unsure at all Xaa locations
  Clone ID: MRT4577_43798C.1.pep
RGGFVSNLPGDVPRVNGQLAVSRXFGDKGLKTHLSSEPDIKEATVDSQTDVFLLASDGFWKVMTNEEAMEIARRVKDPQKAAKELTAEALRRESKDDISCVVVRFR

SEQ ID NO: 307818 - protein, 39 aa, Zea mays
  Clone ID: MRT4577_43799C.1.pep
YGICLSVLRFTIFDCISSSFCVFCSTIVHLDVSSNIFLT

SEQ ID NO: 307819 - protein, 55 aa, Zea mays
  Clone ID: MRT4577_4379C.1.pep
LAIIGVSRFCSCDHHRPQHLCAVMLVDQCTLMSIPPELLLMHIELVLLSPTHNKA

SEQ ID NO: 307820 - protein, 80 aa, Zea mays
  Clone ID: MRT4577_437C.1.pep
LLTAVIAGATSLIPHAGYGTQARGVADANRELLGLEIWWDAVFMLKYLLSLFSRALIWGKSGASTPRAEFRAYVRVHATS

SEQ ID NO: 307821 - protein, 411 aa, Zea mays
  Clone ID: MRT4577_43800C.1.pep
MSSESDRDDDKKGNKKEKKRYYKNKGGDHICREWDSDESSTDSSSDDDAANIAVNNGLLFPNVGHKWFMAKDDKKKKVHSRATPKYTTSSDEDSSSENEDDLLTLFANLSMEQKKKLNELIDAIHEKDELLDSQEDFLIKENKKHGIGPSICTRCRDIDVEAIDDHLATIKKQNDHIAQLDAKISEHELENEKFKFAHSMLYNGRRPDIKDGIGFQQGSNVKLNAPKRLSNFVKSKAPMVQDNEGYILYPANYPEHKIRRIHARKPHTVSHHAFIYNNEASSRCNCTEWELTITQAHVAALESHEVIAVEALEQAKDEHVQKLIEAYLVTHNQCRELFEPLAIKKILAPTLEVKEEAASTPFAPPLFEATLELQEPFPLGEEYNPVLPSQSPPEEDTNISSFSTHPRVVLE

SEQ ID NO: 307822 - protein, 145 aa, Zea mays
  unsure (1)..(145): unsure at all Xaa locations
  Clone ID: MRT4577_43801C.1.pep
TARTAAXPRGLPSGISPCRGECRNPTRPGRRPHLPAPPMAISPWIPPCSRSSLHGCRRPQACSLAKLARAPCADRPYPLLQLGASPSSLVIEPLSSLALAPAPLHGIVVLAPSSSSLALGKLHGFSPQAPADLSHGAFSGGEKDP

SEQ ID NO: 307823 - protein, 502 aa, Zea mays
  Clone ID: MRT4577_43802C.1.pep
MGALLPWLAWLLVSLVGVYLLGHLVQARRRRGLPPGPHPLPIIGSLHLLGNQPHRSLARLAKTHGPLVSLRLGSVTTVVASSPAAAREILQRHDAAFSNRSVPDAPGAHARNSTVWLPNAPRWRALRKIMGTQLFAPHRLDALQHLRRDKARELVDHVRRLARRGEPVNVGRVAFTTSLNLVSRTIFSRDLASLEDDGASRKFQEVVTDIMEAVGSPNVSDFFPALAVADLQGCRRRLARLFARLHRIFDEEIDARLRGRDAGEPKKNDFLDLLLDAAEDDDNTAGLDRDTLRSLFTDLFSAGSDTSSSSVEWAMVELLRSPGSMAKACDELATVIGPRKDIEESDIGRLPYLQAVVKETFRLHPAAPLLLPRRAQADVKMMGYVIPEGSRVFVNVWAMGRDEETWPEPEKFMPERFLGKKKTQAVDLRGGDFDLIPFGGGRRICPGMPLAIRMVHLLLASLLNQFAWRLPAELERNGVDMAENFGITLTKAVPLCAIATEI

SEQ ID NO: 307824 - protein, 107 aa, Zea mays
  unsure (1)..(107): unsure at all Xaa locations
  Clone ID: MRT4577_43803C.1.pep
QRRVPAHGDSELLELLILXRALSELTWPATLNKRDIFREVLMDIDPLSLSKLSDNKIIVPGSHIIPLISVHNLSRVIDIAHPLLMIIYEYASPDTYCRILLNHMLIL

SEQ ID NO: 307825 - protein, 78 aa, Zea mays
  Clone ID: MRT4577_43804C.1.pep
PVVRRIARRMSSVAYLSSQSWRASRVSLLWTLEAEAVSAVWENASSAREQCPTQPRDNGRPSRHSCCHPGPAARRASR

SEQ ID NO: 307826 - protein, 55 aa, Zea mays
  Clone ID: MRT4577_43805C.1.pep
SDIICNHRANWKLTMLDEPEPGGFTIDWGTRLYVLNVGTNSGMRSRATTVRHDYI

SEQ ID NO: 307827 - protein, 239 aa, Zea mays
  Clone ID: MRT4577_43806C.1.pep
MKVVSLILGALASVASAQQATLCKDFEYYSSNGYELNNNIWGRSSATSGSQCTYVNSVSSTGAKWTSNWQWQGGKDNVKSYVYSGRQIVKKPITQYSNLETEAYWVYDTSNIRCNVAYDLFTASDPNHSTSNGEYELMVWLARYDVYPIGSSQGMVNVAGRTWELFYGLNGNMKVYSFVTPSGPIYNFKASMKDFFTYLQNNKGFPASSQNLLTYQFGTEAFTGGPAKFTVNQWPANAY

SEQ ID NO: 307828 - protein, 86 aa, Zea mays
  Clone ID: MRT4577_43807C.1.pep
LPPRLRTLSLRDPTFPELRVPSGLQEQKEWVWLRSGARVWDAIHVPGARLWPGSLSERLRGAPPGTMAPLRRFQPKARPLPPLGCR

SEQ ID NO: 307829 - protein, 105 aa, Zea mays
  unsure (1)..(105): unsure at all Xaa locations
  Clone ID: MRT4577_43808C.1.pep
DIKEKLCYVALDFENEMATAASSSSLEKSYELPDGQVITIGNERFRCPETLFQPSFIGIASAGIHETTYNSIMKCDIDIRKDLYANNVMSXGGATMYPGIADRMQ

SEQ ID NO: 307830 - protein, 154 aa, Zea mays
  Clone ID: MRT4577_43809C.1.pep
FVKTLTGKTITLEVESSDTIDNVKAKIQDKEGIPPDQQRLIFAGKQLEDGRTLADYNIQKESTLHLVLRLRGGAKKRKKKTYTKPKKIKHKHKKVKLAVLQFYKIDGSGKVQRLRKECPNATCGAGTFMASHFDRHYCGKCGLTYVYQKEGAQE

SEQ ID NO: 307831 - protein, 196 aa, Zea mays
  Clone ID: MRT4577_4380C.1.pep
MQVACNRTTGRTPSASSHPAWRPRPTRHVTGVSVTTCKKLHRHLRQCRAFSTEEPVPRLEATLRMAQQCQSSTSITGTGKGDISKGILLHEGSGPRTLLLIRVSTAAPEHSGFKLITDQGFECWPLGRVRQPPQSTRAPRPLLIRDSKAGPSEGFDSRPRARRARDDSRYVRYMAEARATLPRYPRTFPRPAEAIL

SEQ ID NO: 307832 - protein, 175 aa, Zea mays
  Clone ID: MRT4577_43810C.1.pep
MTFTWTPSQPRPDPSAPSNQSGQRENMYEAMSPRRALLAILLAVALASASSAPQPPPCSRSCAALNCDSVGIRYGKYCGVGWSGCDGEEPCDDLDACCRDHDRCVERKVLIYHSLLGMMSVKCHEKFKNCMRKVKKAGKVGFSKKCPYEMAMATMTQGMDMAIILSQLGTQKVEL

SEQ ID NO: 307833 - protein, 75 aa, Zea mays
  Clone ID: MRT4577_43811C.1.pep
CQGMAHDPYKGWWPEWNLARGKTSSVYSTSVGQVFRGKPSILVVLFHVCTGKDEALFIAYSESYCKAELLAHIRA

SEQ ID NO: 307834 - protein, 73 aa, Zea mays
  Clone ID: MRT4577_43812C.1.pep
VYTSPSSKAGRGFFTEGGGSERQLSYAAFYIAKQDLSPRPQGTRTGTPTQRATSPYVLTIFGPPAATHAQERV

SEQ ID NO: 307835 - protein, 61 aa, Zea mays
  Clone ID: MRT4577_43813C.1.pep
RGTNIQRKGLLNLKTRRLPPWIRKSIYQPKATRGEKHPYQQIVWKSSLSRAICERSMCLSS

SEQ ID NO: 307836 - protein, 42 aa, Zea mays
  Clone ID: MRT4577_43814C.1.pep
CVNNNKFLQLSDAEHIVFNQQPFKARMPHNQFSLFFDKTKSI

SEQ ID NO: 307837 - protein, 181 aa, Zea mays
  Clone ID: MRT4577_43815C.1.pep
MAPPPAPPADSTPDLRPVASVPVPITVPSPRDHTHHHHHLVDRRDTPRGRAWEPERNRRGEAMDGAAVVKLMSGEAGYVLEDVPHVSDYLPDLPTYPNPLQDNPAYSVVKQYFVNPDDTVCQKIVVHKDGPRGNHFRRAGPRQRVYFEPDEVHACIVTCGGLCPGLNTVIREIVCGLSDMY

SEQ ID NO: 307838 - protein, 459 aa, Zea mays
  Clone ID: MRT4577_43816C.1.pep
MAKPSVQTHFVLDAMAAERVKVAENWERALDSLENMNQRLGKFAKVQRQLVEQSEVAAQAAKQAAKERSVLSRQVEESGQLLARVQLESMAAETEKSRRSGSTSPSSRSSPPVQVRKGPQKGVQINPLPEMSFPKFDGANPRVWLDKCLDYFHIFKVSEAMWVQVASLHLEGIAARWFHVHRLKQRTGWNHFTRDVLNKFGADEYPKAMRRLMGLRQTGSLDEFVRAFEEARYMVSLHNPKLGEVLFVTQFIRGLEYDLQGAVQSQMPTTLDRAVLIAKLQDELNDQYKGRSTRSVFQSRSSSTAVKAKAISGTTGKGCMKVRGLLKNKVTLLLSIHSGSPTCFINKNLVARARLSAVSCPPARFTLANGESLTSDLLVPQLAWCANGHTFHTDMRVLDLGPYDAILGYDWLKSHSPMECDWANKVLVFHDAGVEVTLKGDDDNIKKEVQEVSAICHKC

SEQ ID NO: 307839 - protein, 89 aa, Zea mays
  Clone ID: MRT4577_43817C.1.pep
RSARVGQAILTAHPPPGAGRPSSHVWHLAPTFLTGPVLTPPTACVSPRASVQARQATAIIHSCLCTGETLVPTRTQGLKKSLSHPQVLL

SEQ ID NO: 307840 - protein, 170 aa, Zea mays
  unsure (1)..(170): unsure at all Xaa locations
  Clone ID: MRT4577_43818C.1.pep
PLRAGIRVRLSVTQTDAECILAFVPHKVDPVTENFVGGHHNFLWSSDHPTICLKVTPPCANPAYTLKEKSGDXYXIIAPNGDMNKLXYPNPYGAPETVSIYIHAVHIPNDHXLAKDEHXNPINVKIAEMKEXLESCTGAEKYLEALETRSMHTNDSTTMRVMFYAMAELH

SEQ ID NO: 307841 - protein, 60 aa, Zea mays
  Clone ID: MRT4577_43819C.1.pep
YALTIDFSDSVAHRSVSASDCLSGAEDLDDSPSHLPLKQSRLMLRLSLKMITTRCQVNPA

SEQ ID NO: 307842 - protein, 86 aa, Zea mays
  unsure (1)..(86): unsure at all Xaa locations
  Clone ID: MRT4577_4381C.1.pep
FFFWVVFFFFFGTHQNTSPMGHTDLQDHSWPTKAFFFKXFNHKSGGGGGIPPNLNNTKXYPKFYTFQNHKNKTTPQTXTXSQLSPP

SEQ ID NO: 307843 - protein, 467 aa, Zea mays
  Clone ID: MRT4577_43820C.1.pep
SVSQHKAEQDRFVAQLASLESRHSSAEGKLGAAREHAASAQDEAAEWKKKYEMAAVQAKTALERLASVQEQINKIAQERESSIRAEFASHLEGKEEEIRKLVAKIREAESEESVLTERLLVVESKTQGHNKETTGLRDEIKELTSKLEYLRDRAVSYEKQARMLEQEKNHLQEKFLSECKKYDEAEQRYKSAERDAKKAVELADAARTEAIAYQKEKDKAQQLSIEKVAVIERVQRQVDRLEQEKVNLLGEVQRMHNSESDAWSKVTLLESRVAEREKEMDDLLSRSNEQRSSTVRVLESLLATERAARAEANKRAEALSLQLQSAQGKLDILHQELTSIRLVETALDSKLRTTTYGKRLRDNEVRLYSIQDMDIDPPERSRKRTKSNTSPLKPVQTEDGGSVHMREDSVTVSTDVKDDNPDGYKKFTIAKLKEELTKHGFGTQLLELKNPNKKDILALYKKHVLCE

SEQ ID NO: 307844 - protein, 125 aa, Zea mays
  Clone ID: MRT4577_43821C.1.pep
KPSVPFELNWETHQYKCWISQYITFGLLASLQAVNLFWGFLICRIAYRFVVYKDMEDDRSEYEPTDDETEAKEKLIKEDGADKETKSQMEKVEQMAPVTPAPAHPVAVEQDSIGSRVKQRKSGKH

SEQ ID NO: 307845 - protein, 87 aa, Zea mays
  Clone ID: MRT4577_43822C.1.pep
SATRADDSDTARSCDCWLQYYLVVVLLTTNTRPPPDRGTLGDAAKCDEADGRAGSGAVPLLVAISGARPPNHLLLTRWVPVRCNGNI

SEQ ID NO: 307846 - protein, 82 aa, Zea mays
  Clone ID: MRT4577_43823C.1.pep
IRLGPDSQASFSGAVAIRPTGGTYDALGGRHRDSSQLCKGRWHDSSTCVQHFMAITNLAQRKTTVGLSKVDIMIENHSNFGR

SEQ ID NO: 307847 - protein, 42 aa, Zea mays
  Clone ID: MRT4577_43824C.1.pep
ASDKNANITTLLNVTYHPSPTLSHYLDSSPTDPLLPGTINNT

SEQ ID NO: 307848 - protein, 67 aa, Zea mays
  unsure (1)..(67): unsure at all Xaa locations
  Clone ID: MRT4577_43825C.1.pep
LFPQFXSAGDGGSSFLRLVDLFLKVAQTLYTLISNGSGINFGCPKGLPSKIGGQVREPGPLAHEDAD

SEQ ID NO: 307849 - protein, 89 aa, Zea mays
  Clone ID: MRT4577_43826C.1.pep
LPGAMVPSVGRYQTAFNVAKMVGEQFGYLSPSEEAFAKVYCFKPEVPVQVEPDGAPVDQAPYLAPAVQLAVQTARQRAHPCPCQVRQPR

SEQ ID NO: 307850 - protein, 145 aa, Zea mays
  Clone ID: MRT4577_43827C.1.pep
HPPRRGFPPPPVTFGGGVFGPKNLSCSNRGSPPPWLTPGLKKNLGGLLCLGGAARRGLSRASWFILRALFFFLAAALRPLAPSGEFAQGVVPGVQMLRPPVPPIGGHSVGLGPPPKPPQVLEDVEHAEPAAVHEKKGQQRQKGDT

SEQ ID NO: 307851 - protein, 99 aa, Zea mays
  unsure (1)..(99): unsure at all Xaa locations
  Clone ID: MRT4577_43828C.1.pep
FFFFFWVFFFXTLNRPIFTGSKKITPTKVPTNHKLSLRGHTGPTDDNFWKELGQPGTGEHLKLTTNRLFHLFDFWARAPFFGRGFFFYSGRAAYVFTRA

SEQ ID NO: 307852 - protein, 95 aa, Zea mays
  Clone ID: MRT4577_43829C.1.pep
PVTFLLDQVKVKISVVLVRLCPSRTAGIYWQILDVFVRGLAPIVTFDVIDSSTTPPPSGLAALWAVHWRRERPSRRRCLMDEDLQCLGVGGGPDE

SEQ ID NO: 307853 - protein, 810 aa, Zea mays
  unsure (1)..(810): unsure at all Xaa locations
  Clone ID: MRT4577_4382C.1.pep
MADKVTAVPPRDPWPSSTVVVGDLEALVADGLLRPLSGGPQPEWMVLSEADPTPPTGYVVSFIPFHERGFGVPVSRFMXALLHYYGVELHNFNPNSIAQAAIFMVVCEGFLGIDPHWDLWTHLFSAELFASTTEAKKVRMAVRAGGCTLQCRGGCCRHPSPEGASFGGXRRLPLSEMKPGVDLEGSRMSSASLSADDLRRXGSRYDREAGCRGPYPARXRPDHGYVSLDDDMAARLGLSPDLRLGQRSPSQPPSGLAPSVSGAGTSRSRSEERRQAEGVLDPLAEVIEVTPGSQADPLVPQEQAPVPAAQEVGPPAVVATPGRAAPSAPRAPEAEAAPESAAGQLSAAPTGPGARGASPQARLALARSGKRRQGLAGLAPKKALKTEPASAAGAAVRHAGWLASAQGALEPGAQAARLAMGQASQADPSVGAAIMPGETADAATTPSPPDLLPAPASTPAGAVADSPAEPPVASDVGMVEVPPLVVVLDLPVLGHEERAVVVAVRNPNEWRGQPFRFWSHGASELLLFLNDEREEQSRNELREHAEATMRSLWLTMEVLSRDVPRVCQELADMSTAKSLFIHRESGVWGSLRSQKATLAEANECLAQRSTEAADLRLLCDKLKSEDQSRSQAAEAVGLAEALRGQLAEATEQLAEASARAGTLAEDLTVAVGSAQSAQAVASQERARAEASFFNSRLKNFVRLSAEFETALNNRLRGALHHSVRRALVVLASHYDVDLERVSEGYCLPDEDEAALAEVQRLDAAVVGPSAVMASSFEVEILPLASLSEAGLDSAEGGSGAEGAAPPPADV

SEQ ID NO: 307854 - protein, 94 aa, Zea mays
  Clone ID: MRT4577_43830C.1.pep
KLTFKGKKKGAPIYFGGAPPKFKVGPFEKRANPIYSTPPGKNPKWDGPKVWPSQFVRKGPNPTGPQERGSPPSTTFKKHPPSPVLADFKKTPPR

SEQ ID NO: 307855 - protein, 86 aa, Zea mays
  Clone ID: MRT4577_43831C.1.pep
GAPPPPFFWGLERIVPPRLAGVFRVPLSPPLALWAPPMGGPRLVAPPLVTHCGGLSPHDVSPCPFELAAFLPFFPGEDASTLSVVI

SEQ ID NO: 307856 - protein, 90 aa, Zea mays
  unsure (1)..(90): unsure at all Xaa locations
  Clone ID: MRT4577_43832C.1.pep
GTPAARAGDPQPRTGGGGRREACQGTTAKNHPTASAEDSEAGEKARRKRRAPXAEKSXAPHRPRPGGGGAGTXDAPARTGGPXGTXKGPA

SEQ ID NO: 307857 - protein, 61 aa, Zea mays
  unsure (1)..(61): unsure at all Xaa locations
  Clone ID: MRT4577_43833C.1.pep
MGVEKKHGLQLLDFCVSPFGQRXRIAKVEKGLAYXYLQHDLGNKSELIIRANLVHKKIPML

SEQ ID NO: 307858 - protein, 182 aa, Zea mays
  unsure (1)..(182): unsure at all Xaa locations
  Clone ID: MRT4577_43834C.1.pep
MASGETNAGNTQRGNTLPNGDIYVGNFAGLVPHGFGKYMWTDGTLYYGEWDTSKMSGRGAIQWPSGASYDGDLCGGFIDGTGSFKGVDGSVYKGSWRMNRKHGMGTMVYANDDTYEGLWNEGLPDGFGKYTWVDGNIYIGLWKSGKMNGRGVMQWTNGDTLDXYWLNGLAHGKVFANMHQEH

SEQ ID NO: 307859 - protein, 122 aa, Zea mays
  unsure (1)..(122): unsure at all Xaa locations
  Clone ID: MRT4577_43835C.1.pep
AADTTRTSAASDKSSCTRPCALTTPKPKQDSYVWSSRTASSSGLRLLRTAQDRQRHQPADGDARGPLPEPALFLGHQRVQGIVRGEMYXASCSAATSSPSPDATSMCSSEAATSTFPCPRDA

SEQ ID NO: 307860 - protein, 94 aa, Zea mays
  Clone ID: MRT4577_43836C.1.pep
HFSLPRLPHQPENLPNSPINPIDNITSSCGPPMNLRTLIGLPHHVAQSTILQKRFTAYRLSFNHFAPPLTLGPAKAVIHYKESPSACLDKLEPT

SEQ ID NO: 307861 - protein, 46 aa, Zea mays
  Clone ID: MRT4577_43837C.1.pep
FIKSLFKLISLTSQKRFISMVTIHDPIILSFSLHCQNHNTSTSPFH

SEQ ID NO: 307862 - protein, 252 aa, Zea mays
  unsure (1)..(252): unsure at all Xaa locations
  Clone ID: MRT4577_43838C.1.pep
MQIGPQIVRSNPIQQPNPIQSNQRKRKTAKGSCMCGTTSCHQGKWGCQSRTHRTTTCQQWRTTWGGCSSGLSASTIWRLPPIRLRIRLRHCPPAFGSGKLIMEGSLGFFERREADSVQMQNVLSIXILNLLIEKPAAASVPVLRQLLXSSRFDRPPDYDYPMVGMNSPRHQSAAVRLQKVYKSFRTRRQLADCAVLVEQRWWKLLDFALLKRNSVSFFDIGKPETAVXKWSRARMRAAQGGNSNCILSVITN

SEQ ID NO: 307863 - protein, 129 aa, Zea mays
  Clone ID: MRT4577_43839C.1.pep
DEPETQSDKLSKLCTCWTTFMSHRFIVPKPQLREKPIINKQRNRKKASFTCWLLIAWSIMPGYEHGNASADDVEPGLVLLQRRPEVLQLDIMSTHPHLHLQTRGCRLQRRRCDGVHSWVWISEWRALGP

SEQ ID NO: 307864 - protein, 121 aa, Zea mays
  unsure (1)..(121): unsure at all Xaa locations
  Clone ID: MRT4577_4383C.1.pep
QQPSNKGGNISYILALLALIASATDAYILPQCSLAPMSIIPYIIPLASSMSLQHTSALAYTLQHAIVASVIQQLISQXQHQMLAHLTLQTIXTQQQXHGLPSLYQLVIVNPVDYLQHQLLA

SEQ ID NO: 307865 - protein, 77 aa, Zea mays
  Clone ID: MRT4577_43840C.1.pep
KNVCILSPNPFRLKKLWSSSCFQLFFFFKSCLCFSKILPQTFRPLIFFCQGFDCSRFSNFARACAFKVCFLWVFVPL

SEQ ID NO: 307866 - protein, 450 aa, Zea mays
  Clone ID: MRT4577_43841C.1.pep
MAAVAAAPRPQLPMLSGGGGAALSSLTLQTLAFISPLPISRCHRCVLRSNASSSPSPPPSQEEAAAAEVVPTAESCVNLGLQLFSKGRVKDALEQFENALELNPTSIEAQAALYNKACCHAYREESKKAAECLREALRDYNLKFGTILNDPDLAPFRASPEFKELQEEALRGGEDIGSGFRRDLKLISEVQAPFRGVRRFFYVALTAAAGISTFFTIPRLVLAVRGGDDAPDLLETAGNAAINIGGIVVLVALYFWENKKEEKQITQISRNETLSRLPVRLSTNRIIELVQLRDITRPVILAGSKASVTRALQRAERYRTELLKRGVLLIPVIFGASQKDQTKPRGFGARRAAASVPSVGGDFEKRTESIAAKSRLKTEVRFKADIVSPEQWESWIRDQQVSEGVTPGEDVYIILRLDGRVRRSGIGMPNWNDILQELPRLEDLMSKLER

SEQ ID NO: 307867 - protein, 142 aa, Zea mays
  Clone ID: MRT4577_43842C.1.pep
CFLKPSSYCYLLACKRGPPVRHVGLVCLRKEGEKGRGWPSLRCREEEEKIARETSDLFRSPFLSIPPVNSPDLWWLSTTDREERTVVVAVVVAKFLLSLLVVGSLGFRLLKNIASDLLPPLPLPLSLSLSLSLSHLLRLSVS

SEQ ID NO: 307868 - protein, 72 aa, Zea mays
  Clone ID: MRT4577_43843C.1.pep
LSFVHCSVQYCSPMIEIANILTIMSCDCQYEIELNFVMFLTNQKIKIRIQISLLGSFLWDLFRYVCRQTHES

SEQ ID NO: 307869 - protein, 76 aa, Zea mays
  Clone ID: MRT4577_43844C.1.pep
ASSSAWASAYLCIQEGDVSCDHMLVDRYQAEDNAWIQPCTCPLGKWVNQAMPARRPCQFPCHMGVIVCGGISDGVP

SEQ ID NO: 307870 - protein, 67 aa, Zea mays
  Clone ID: MRT4577_43845C.1.pep
PGTDALSSIVTVLRWIGRREQRIHHRQDVLSVLRPDAGECVTHLLECSVVSAVSLLRCWATSGAAAG

SEQ ID NO: 307871 - protein, 59 aa, Zea mays
  Clone ID: MRT4577_43846C.1.pep
LLSWIAKILKLVAISVGWAGRPIWTPCNRSMAYEVIVAWIMGVHTVSWAAPIDSKDLAD

SEQ ID NO: 307872 - protein, 68 aa, Zea mays
  Clone ID: MRT4577_43847C.1.pep
LGRIFTKKKKKKKKKKKKKKKKKKKKKKKKKKKKKKKKKKKKGGGRLKKTKLTSPGMKVNIFFKGQQK

SEQ ID NO: 307873 - protein, 56 aa, Zea mays
  Clone ID: MRT4577_43848C.1.pep
QYMVNNSGIQEIYMNILRKPYQHAMTNSLKTSEQNGQSGTMSTLRMSNLLTYVGQL

SEQ ID NO: 307874 - protein, 55 aa, Zea mays
  Clone ID: MRT4577_43849C.1.pep
SYRLGFRLGILQSMDNILVPHTGQVYIIVYSKNQQQGIGASTTHGTTDRPVYDQV

SEQ ID NO: 307875 - protein, 65 aa, Zea mays
  Clone ID: MRT4577_4384C.1.pep
NRLLSPRDVIDTFVSAGYGNELHILLCHQGRVGYTGCDFLVSVAWADGDVRLSTTARFGCSRPVL

SEQ ID NO: 307876 - protein, 94 aa, Zea mays
  Clone ID: MRT4577_43850C.1.pep
YVIMATQDKTSWPELIGKEINDAIEVIEQERPDVTFFESLDVDLNETPRPSDQLAPGTIRVVIYFSVDPNTNEEIVEETPRIYQGIKWYKGSFC

SEQ ID NO: 307877 - protein, 79 aa, Zea mays
  Clone ID: MRT4577_43851C.1.pep
VVTMSNNIKQLIEELHSMCTPVSDFLKIVLANSNPQPHYMPAFTERPHTSSQRIYDFIDCKPNYVRRFMISLTANRIVF

SEQ ID NO: 307878 - protein, 52 aa, Zea mays
  Clone ID: MRT4577_43852C.1.pep
LTGGQQLLLLGGCFFFFFFGERDRQLCIDERDTKGASYGKMEHALNGRLWTT

SEQ ID NO: 307879 - protein, 286 aa, Zea mays
  unsure (1)..(286): unsure at all Xaa locations
  Clone ID: MRT4577_43853C.1.pep
VSPYXMRWNEAFLALGTQFAGGVFLGTALMHFLSDANETFGDLLPDSGYPWAFMLACAGYVVTMLADVAISYVVSRSQGRSTGTAATGGSDAGLEEGKMRTTNGTRSEPTPADAHGSDHSAASILRNASTIGDSVLLIVALCFHSVFEGIAIGIAETKADAWKALWTISLHKIFAAIAMGIALLRMLPNRPLLSCFAYAFAFAISSPVGVGIGIIIDATTQGRVADWIFAVSMGLATGIFVYVSINHLLSKGYRPQRPVAVDTPVGRWLAVVFGVAVIAVVMIWDT

SEQ ID NO: 307880 - protein, 139 aa, Zea mays
  Clone ID: MRT4577_43854C.1.pep
LLLIIEPAETKADAWKALWTISLHKIFAAIAMGIALLRMLPNRPLLSCFAYAFAFAISSPVGVGIGIIIDATTQGRVADWIFAVSMGLATGIFVYVSINHLLSKGYRPQRPVAVDTPVGRWLAVVFGVAVIAVVMIWDT

SEQ ID NO: 307881 - protein, 95 aa, Zea mays
  unsure (1)..(95): unsure at all Xaa locations
  Clone ID: MRT4577_43855C.1.pep
MCGGAIISEFIPQRGAKRGLCAEDIWPHAAADFDDLLHAHAHAHGHDDDDXPPPPPSXDQEPPARKRERKTMYRGIRRRPWGKWAVEIRDPAKGS

SEQ ID NO: 307882 - protein, 35 aa, Zea mays
  Clone ID: MRT4577_43856C.1.pep
VGLAHLMACVYLVSMYRLLQYIETCVPRGEKRSIC

SEQ ID NO: 307883 - protein, 74 aa, Zea mays
  Clone ID: MRT4577_43857C.1.pep
EKPPPVEQQPQDQQATGKTAADPSLWKEVIKAAEANGAMLPKRRGPRGRTFGRKDRRVLLGCYQLVLRLTTGLC

SEQ ID NO: 307884 - protein, 77 aa, Zea mays
  unsure (1)..(77): unsure at all Xaa locations
  Clone ID: MRT4577_43858C.1.pep
ATFRSSRVTAGATAAGGFGLGAHGWDWSQVVGVVVHXCTADRCSWSDRWTKSAGGARTVRGAPLVFHPFLFLASREQ

SEQ ID NO: 307885 - protein, 63 aa, Zea mays
  Clone ID: MRT4577_43859C.1.pep
PKAMLMGNPLKWSSSVHRLTTSNLVFPRKKLCAPLMVLKAGGPAPLISLRNPPKLLIKDGLFS

SEQ ID NO: 307886 - protein, 74 aa, Zea mays
  Clone ID: MRT4577_4385C.1.pep
LTSTGWVNCFFFYFTNGPPFPCGNQFRGKTNQRWQNLNCPRNRNLAAWGVPHHIRNLLKRKTSYIYLKRWTMAS

SEQ ID NO: 307887 - protein, 86 aa, Zea mays
  Clone ID: MRT4577_43860C.1.pep
WFFLTKGATRGLRVCPAPRSGALAVGGHKRPCGREREAYARAVPSFRERPTCRKRALDLPFIGVRRGPRSTMGGCSTVLTCYRQRS

SEQ ID NO: 307888 - protein, 123 aa, Zea mays
  Clone ID: MRT4577_43861C.1.pep
NRQLPYTRTPDWISPEFILARSFGWMILLPSKVPQAIPLLCSDRLNTLRLPELLYLVDSHGIELPNLSRSSPAMPAAQAFRRHRHGPPLPLKRSPQDRLPATLPVRPSPESGDHQGATPCIDP

SEQ ID NO: 307889 - protein, 129 aa, Zea mays
  Clone ID: MRT4577_43862C.1.pep
AHTLRQLDCSLHQTDAQGLQLRGTRRARSQDQITWSPMLDRRFLEAWKRTAIFTKQMLRVFNFVELEELDHRTRSLGRQCLIVDSSKLGNEPRLMPGNRGVPAPAQFWIWGLGKDEQISRERPVPAGLE

SEQ ID NO: 307890 - protein, 42 aa, Zea mays
  Clone ID: MRT4577_43863C.1.pep
TLLESTISQLYVQQLKSYLGSLEHFQTNDSYNLTNTIFLLFH

SEQ ID NO: 307891 - protein, 71 aa, Zea mays
  Clone ID: MRT4577_43864C.1.pep
NPDKSGPLNPKTKDIYGFPTRSSGQANSRARLGPVLGRPNKAGVVGTNLGSGWKPRQSVLNPTMAGSSAPS

SEQ ID NO: 307892 - protein, 48 aa, Zea mays
  Clone ID: MRT4577_43865C.1.pep
RVRSKNKHTNPYFSTFTYHHRLGKYEPFLRSKPNLRAQQIQPLYPHNT

SEQ ID NO: 307893 - protein, 140 aa, Zea mays
  Clone ID: MRT4577_43866C.1.pep
HRVVTGRNNPAHNTTLLLAAGHAATTEDNLSYHVDHIGDELCHQLKFLAVVKVQNHGPMDGKHTALMFLRWPNATDGRPARQLVGFQSQHIKAGEKAHLRFEVSPCEDFSRVRDDGTKVIDKGSHFLKVGKHELEISFGA

SEQ ID NO: 307894 - protein, 79 aa, Zea mays
  Clone ID: MRT4577_43867C.1.pep
GLDASAVQLLKIRSSMMHRGYRSRLSEIPMIELTYKHGYSTQDSTVTPPKFISRSEHIDIQITYLPAGQCTERAYTESP

SEQ ID NO: 307895 - protein, 107 aa, Zea mays
  Clone ID: MRT4577_43868C.1.pep
RGFCVLGGPPEPLAKTGGFLFPPNVFPPLGSFFCVLGPFLTIFGIGPFWGVALFIYPWCLPFFYPPPPPKKPVLGPLFWPPFFQFLLILTLLPPGFLCFFLGGLFPL

SEQ ID NO: 307896 - protein, 75 aa, Zea mays
  Clone ID: MRT4577_43869C.1.pep
ISHRSYLKDDFRAMGRKSYQTTLGYRRPLLYTQSLIGYLQPKDVVPVSLPELQTLRKWLRKKKEVIIWLTYVKGP

SEQ ID NO: 307897 - protein, 95 aa, Zea mays
  unsure (1)..(95): unsure at all Xaa locations
  Clone ID: MRT4577_4386C.1.pep
MATPGTSADAPTWYSLLVIDVRETTIVNEVALYDHDWHYIRSASIAXQVXLRQGISLDGFQNIYCGPHMNGLPPPPCGKSSXLIACNILNQKKKM

SEQ ID NO: 307898 - protein, 34 aa, Zea mays
  Clone ID: MRT4577_43870C.1.pep
ALSSICQDFFILSRSDNYSLDLLGVFGVQRVLWC

SEQ ID NO: 307899 - protein, 59 aa, Zea mays
  Clone ID: MRT4577_43871C.1.pep
SVGFIIVRLVFVVAHLCCSCKRRTESVVRAVFIHGSSKPMHQSAWSAERCDAVTPVRLY

SEQ ID NO: 307900 - protein, 50 aa, Zea mays
  Clone ID: MRT4577_43872C.1.pep
AEQQGSCPKMRARSFLVMKYVIMRAPWVFNLIGIFTLTAYVVSSGIVVVP

SEQ ID NO: 307901 - protein, 122 aa, Zea mays
  Clone ID: MRT4577_43873C.1.pep
SVEHGASASSSVVHSCQSMATGREQGSPCACPSPPADPPSLRLTSSPHPPPAAADAHRLAVRWPQAHRRRGRGARLRGSPLPAPGVVVVHRGSCGHVSSLSDVVSLQSAACSAHGVKIPARP

SEQ ID NO: 307902 - protein, 184 aa, Zea mays
  Clone ID: MRT4577_43874C.1.pep
MGLNAVVAACYALPVLISVLTVRFFYVLWHSGQSASRPRNTRLRCLIILGSGGHTAEMMNIVTTLQKDRFTPRYYVAALTDNMSLQKAEVYEHSLIQSDGMKTAESAHFMQIYRSREVGQSYITSIATTLLATLHAMWLVIRIRPQVIFCNGPGTCFPVCIAAFLLKVLGWDGASFSTLKALQE

SEQ ID NO: 307903 - protein, 98 aa, Zea mays
  Clone ID: MRT4577_43875C.1.pep
FLSFSCQFHCIGFSFFIFSYFFFMPRSCDGLFFFLLIPPPPSFFLAFWGGLVLGVELYGWFVVGFQRCRWAIPSVQLGFCVSPPPEGRPPHHLFVGKR

SEQ ID NO: 307904 - protein, 73 aa, Zea mays
  Clone ID: MRT4577_43876C.1.pep
ARTRGAYMTSFACVLTRALYIATPKHNIIWVRTERRKCCTGRGPQINGLRCHSALDCWRVNLDSTTHTTFPTL

SEQ ID NO: 307905 - protein, 132 aa, Zea mays
  Clone ID: MRT4577_43877C.1.pep
LKSPRNARRRATEARQRTAVGRRQALAHTHCAGAFVASSQGTRRRSGGAATLQHSQRPALEDGESGKAREGRAGGASSLRAPALALSRKRKGKASGAGIRKNGAATCRHQLLGIEIFAYMAPASVGFACTAP

SEQ ID NO: 307906 - protein, 208 aa, Zea mays
  unsure (1)..(208): unsure at all Xaa locations
  Clone ID: MRT4577_43878C.1.pep
SVLTVRFFYVLWRSGQPESRLCATRLSCLIVLGSGGHTAEMMNIVXTLQKDRFTPRYYVAALTDNMSLQKAQVYEQSLIQSNGTKAGESAHFMQIYRSREVGQSYITSIATTLLATLHAMWLVIRIRPQAIFCNGPGTCFPLCISAFVLKVLGLGWCSIFYIESIARVKKLSLSGLLLYKLRIADQFFVQWPQLQHKYPRACYAGRLM

SEQ ID NO: 307907 - protein, 59 aa, Zea mays
  unsure (1)..(59): unsure at all Xaa locations
  Clone ID: MRT4577_43879C.1.pep
XXXGLFNCFCLANQITXRHIGRSYLLGTLPDNQNTTLTDPKKTIRSGHPSSPWGIFHII

SEQ ID NO: 307908 - protein, 40 aa, Zea mays
  Clone ID: MRT4577_4387C.1.pep
AVKHAKLCLQVETVLSSPVVCKITDPLLLQIKPPQFFFGL

SEQ ID NO: 307909 - protein, 96 aa, Zea mays
  Clone ID: MRT4577_43880C.1.pep
NETKHFNGKNHVLEPIQNIYIKEKGGKPTGTASLWAKTHGLTPDHDHTQKLLKKKMRKPIYNLKTKKNSGFKSFWGKPHPKKISPACSVKGAKQAF

SEQ ID NO: 307910 - protein, 38 aa, Zea mays
  Clone ID: MRT4577_43881C.1.pep
LHIETASLSSQGSHTDMHLEAEFTTAGFGVDMVANVFT

SEQ ID NO: 307911 - protein, 441 aa, Zea mays
  unsure (1)..(441): unsure at all Xaa locations
  Clone ID: MRT4577_43882C.1.pep
MERGAGASEKGTVLVTGASGFVGSWLVMKLLQAGYTVRATVRDPANVGKTKPLMDLPGATERLSIWKADLAEEGSFHDAIRGCTGVFHVATPMDFLSKDPEXSVLAAQLISLSISTSSLHMHCTHILHTYGFHXNEVIKPTVEGMISIMRACKEAGTVRRIVFTSSAGTVNLEERQRPVYDEESWTDVDFCRRVKMTGWMYFVSKTLAEKAALARSXNVGKTKPLMDLPGATERLSIWKADLAEEGSFHDAIRGCTGVFHVATPMDFLSKDPENEVIKPTLVVGPFISASMPPSLITALALITGNAPHYSILKQVQLIHLDDLCDAEIFLFENPAAAGRYVCSSHDVTIHGLAAMLRDRYPEYDVPQRFPGIQDDLQPVRFSSKKLQDLGFTFRYKTLEDMFDAAIRTCQEKGLIPLATAAGGDGFASVRAPGETEATIGA

SEQ ID NO: 307912 - protein, 292 aa, Zea mays
  Clone ID: MRT4577_43884C.1.pep
MEGGAGASEKGTVLVTGASGFVGSWLVMKLLQAGYTVRATVRDPANVGKTKPLMDLPGATERLSIWKAAGTVNLEERQRPVYDEESWTDVDFCRRVKMTGWMYFVSKTLAEKAALAYAAEHGLDLVTIIPTLVVGPFISASMPPSLITALALITGNAPHYSILKQVQLIHLDDLCDAEIFLFENPAAAGRYVCSSHDVTIHGLAAMLRDRYPEYDVPQRFPGIQDDLQPVRFSSKKLQDLGFTFRYKTLEDMFDAAIRTCQEKGLIPLATAAGGDGFASVRAPGETEATIGA

SEQ ID NO: 307913 - protein, 100 aa, Zea mays
  Clone ID: MRT4577_43885C.1.pep
LQERLDFLLRLGLSTDDLSNYPLLLACSLRKNVIPVLSYLEKLGVTRARLAAFVRAYPACLHASVAVDLAPMVKALRGLDVDRQDLPRVLERYPDVLGLK

SEQ ID NO: 307914 - protein, 228 aa, Zea mays
  unsure (1)..(228): unsure at all Xaa locations
  Clone ID: MRT4577_43886C.1.pep
KKCLLTQSCARAFSEKKTREESWTDVDFCRRVKMTGWMYFVSKTLAEKAALAYAAEHGLDLVTIIPTLVVGPFISASMPPSLITALALITGNAPHYSILKQVQLIHLDDLCDAEIFLFENPAAAGRYVCSSHDVTIHGLAAMLRDRYPXYDVPQRFPGIQDDLQPVRFSSKKLQDLGFIFRYKTLEDMFDAAIRTCQEKGLIPLATAAGGDGFASVRAPGETEATIGA

SEQ ID NO: 307915 - protein, 229 aa, Zea mays
  unsure (1)..(229): unsure at all Xaa locations
  Clone ID: MRT4577_43887C.1.pep
MERGAGASEKGTVLVTGASGFVGSWLVMKLLQAGYTVRATVRDPANVGKTKPLMDLPGATERLSIWKADLAEEGSFHDAIRGCTGVFHVATPMDFLSKDPEVDQSLAAQLISLSISTSSLHMHCTHILHTYGFHXNEVIKPTVEGMISIMRACKEAGTVRRIVFTSSAGTVNLEERQRPVYDEESWTDVDFCRRVKMTGWMYFVSKTLAEKAALAYAGEHGLDLVTIIP

SEQ ID NO: 307916 - protein, 357 aa, Zea mays
  Clone ID: MRT4577_43888C.1.pep
MEGGAGASEKGTVLVTGASGFVGSWLVMKLLQAGYTVRATVRDPANVGKTKPLMDLPGATERLSIWKADLAEEGSFHDAIRGCTGVFHVATPMDFLSKDPENEVIKPTVEGMISIMRACKEAGTVRRIVFTSSAGTVNLEERQRPVYDEESWTDVDFCRRVKMTGWMYFVSKTLAEKAALAYAAEHGLDLVTIIPTLVVGPFISASMPPSLITALALITGNAPHYSILKQVQLIHLDDLCDAEIFLFENPAAAGRYVCSSHDVTIHGLAAMLRDRYPEYDVPQRFPGIQDDLQPVRFSSKKLQDLGFTFRYKTLEDMFDAAIRTCQEKGLIPLATAAGGDGFASVRAPGETEATIGA

SEQ ID NO: 307917 - protein, 32 aa, Zea mays
  unsure (1)..(32): unsure at all Xaa locations
  Clone ID: MRT4577_43889C.1.pep
TYISKKIQSYIQLSSYFLKKSIISPKIXFTNQ

SEQ ID NO: 307918 - protein, 196 aa, Zea mays
  unsure (1)..(196): unsure at all Xaa locations
  Clone ID: MRT4577_4388C.1.pep
NVPAAAEPVDVQDLFASLQRHIXQAAFKQAAKDAEQVXLGSVVXDEDAMRCKVLIYIEDDNIDKGLRLIRVVEGIAIDLSYYRGYCCYRRNKLHEGLEVXRGQEDTPPGLHLECQIFYRLRIMNDCMSNYEKXIDDXKIESMYLKINIIAGLAGAGRASEGQAXMKALNVDLXTRALRETRSFEIHTXSACCLIEN

SEQ ID NO: 307919 - protein, 97 aa, Zea mays
  unsure (1)..(97): unsure at all Xaa locations
  Clone ID: MRT4577_43890C.1.pep
ILPTLFFLHXKTLFTWWFIQQNRGLKFLYLKFLKKEYPLPFLIKNTKLIKLSTHISRYLNLFSIPPSLQKTFFFYQTKTLLLNFHTNILTSPSQILY

SEQ ID NO: 307920 - protein, 70 aa, Zea mays
  Clone ID: MRT4577_43891C.1.pep
NPSTFLYSLSRTSGRWRLSLPHSRPMACCCPSLPRLFLVLASTVRPSFSRLGLYAWRIFDLALHLLSETI

SEQ ID NO: 307921 - protein, 430 aa, Zea mays
  Clone ID: MRT4577_43892C.1.pep
MSPSAHAPASVTRAPPAISLRDPRPHSSGSPHESHGPPIVDHGDGSYSFRLQVAPLFAAREFRLTVVLLFRSWEPLRPWSRGFKYRAELRRIPLLFRPDNNASLPALETCRAADFSRDAWSGRWTRLAKNDSCEDVDAAGRYRCLEPDHPCEAPWCDGPLGALESNGWVYSAHCSFKLFAADASWRCLDGKWLFFWGDSNHVDTIRNLLTFVLGITDTSVVTRRFDAVFTNPSGGAGTLRITSIFNGHWNMSMNYLGLHSLRNRGFRQLIRSYFMSGDRVPDVVVLNSGLHDGCYWTSVRIYAQAADFAAQFWSGVMDKVRARGRAVPRVFYRTTIATGGYARDLAFNPNKMEAFNGVLVEKMRRHGVLTGGVIDNFDMTFPWHYDNRCNDGVHYGRAPAKLVWRDGKVGHQYFVDLMLGHVLLNAICNE

SEQ ID NO: 307922 - protein, 83 aa, Zea mays
  Clone ID: MRT4577_43893C.1.pep
KDFYLGKARVFPVLRLFMSGQFIGFGWKYKRAFRWYLRGRKVGFWLEKNWNLCFIMVCKKNIIAFLFRKHARFMYMCFSCCCV

SEQ ID NO: 307923 - protein, 198 aa, Zea mays
  Clone ID: MRT4577_43894C.1.pep
AFRDEESPPPSSVVAFSGAASASKTPLPPLPSSPRSPQSPSIDDIPTRRAAPGTTPPSRPRPPRCPPGLLRSSSPCLKRIQHPHPNIFLKSSDLPPSSAACVASSISVPRSLHRRRPCRLLPLPLAVLASPLMRWSPQHRSWTTLELGAPLPAKPQSHRRFLDSERGLRHKTIPSCSGNLCVHILQGAPPFSNVPHRS

SEQ ID NO: 307924 - protein, 106 aa, Zea mays
  unsure (1)..(106): unsure at all Xaa locations
  Clone ID: MRT4577_43895C.1.pep
MILLVQQIQYERTPYLAMLRKDERLYIITFGLDXDXTATPMDDCMAAVADTKVNFEVIYLGDITXSPDINTMYVLARPMNXLGFSLNMHIRXDFRTGNNIENDRTL

SEQ ID NO: 307925 - protein, 77 aa, Zea mays
  unsure (1)..(77): unsure at all Xaa locations
  Clone ID: MRT4577_43896C.1.pep
PTIADHHRGATGGGGGYGDHQRGGGMHGEAXQQQKQGAMMTALKAATAATIGGSMLVLSGLIQAGTVIALTVATPVL

SEQ ID NO: 307926 - protein, 90 aa, Zea mays
  Clone ID: MRT4577_43897C.1.pep
DPPKQRVQKTKSLPLLGGGGQPEFVRAPPRPGGPKAPGGGGPINPRVPLRGQGRVFETPGPTGPSQGGWGPLFFPPGGNQKNQWEKPARG

SEQ ID NO: 307927 - protein, 53 aa, Zea mays
  Clone ID: MRT4577_43898C.1.pep
MAGQQNSYTITPCLSYSHSTGNGPSASCFSNIRNLKSANSTTANKHADSNCLK

SEQ ID NO: 307928 - protein, 46 aa, Zea mays
  Clone ID: MRT4577_43899C.1.pep
GYHIGVQVIANHCTGGSPFGSLLSFFLNDSQISCVVLKKPHPFFST

SEQ ID NO: 307929 - protein, 99 aa, Zea mays
  unsure (1)..(99): unsure at all Xaa locations
  Clone ID: MRT4577_4389C.1.pep
SLILLFNSYPTLLFGPWGYLARMDPLIPLSLFYSFFVHILSYFHYPFISLFSLTNYTSSFLLTXHTHPLLFNFLYGLFPFIPLKFNPFFSSSLNIIIFF

SEQ ID NO: 307930 - protein, 421 aa, Zea mays
  Clone ID: MRT4577_438C.1.pep
MGLLPTDRMDSLFSPRCVWVTGPIIVGAGPSGLAVAACLREQGVPFVVLERADCIASLWQRRTYNRLKLHLPKQFCQLPRMPFPEDYPEYPTRRQFVDYLERYAAEFEIKPEFGTTVLSARYDETSGLWRVVTNGGAGGDMEYIGRWLVVATGENAEAVVPDIPGLAGFDGEVTHVSEYKSGEAYAGKRVLVVGCGNSGMEVSLDLAEHGARPAMVVRDAVHVLPREVLGTSTFGLAVLLMRWLPLWLVDWLMVLLAWLVLGNLARLGLRRPAAGPLQLKETHGRTPVLDYGALARIRAGDITVVPAVTRFAGKGGQVEVADGRTLGFDAVILATGYRSNVPQWLQGNDFFNKDGYPKTAFPHGWKGESGLYAVGFTRRGLSGASADAVRIATDLGNVWREETKPTKRAGACHRRCISVVF

SEQ ID NO: 307931 - protein, 100 aa, Zea mays
  Clone ID: MRT4577_43900C.1.pep
VCQGFYPTEAFRTMPRIISQRSLSGPRGRRGKTASEGTFFYTRHKDGQDDATRRFLSPTGGLPFEVPPSATGVATFSLVSADTFFGPEIPTPTPSTARSR

SEQ ID NO: 307932 - protein, 46 aa, Zea mays
  Clone ID: MRT4577_43901C.1.pep
MPKFFCDYCDVYLTHDSMSVRKAHNSGRNHLRNVVDYYEQIAHENA

SEQ ID NO: 307933 - protein, 77 aa, Zea mays
  Clone ID: MRT4577_43902C.1.pep
TGGVFFCGPKRVSEAWCVLGIYFGAGFVREWEGLVWGEFLLTLWAFQGLFLRRPLGPGLLKYFGFPPEGGGRPGNLF

SEQ ID NO: 307934 - protein, 99 aa, Zea mays
  Clone ID: MRT4577_43903C.1.pep
PKFFFFSCMKTGVSQITDTKHGAQTGSNNHPRGGGAPHPFFLNLSSKGLKTIGWALLGILWGKLKTWALGDPMGEPLFQNFSRGGGTPYFPSRMNYANF

SEQ ID NO: 307935 - protein, 108 aa, Zea mays
  unsure (1)..(108): unsure at all Xaa locations
  Clone ID: MRT4577_43904C.1.pep
AQLAFGIASGPSGIICHLPVIPSRGGKPLWFRGGTFFGRALHNSGGALFKCPRSDVVPPPPVSVSALVVGPPELVFRPPIPNRTNKXQKKKKKKKKKKKKKKKKKKKT

SEQ ID NO: 307936 - protein, 117 aa, Zea mays
  Clone ID: MRT4577_43905C.1.pep
ILKRCFRELNLTPDKQKIILRLICSILDAFHFMKPANDASGNSDALSEDIDSSLTFSLVTVSSDKQQYMQKVVFPQVQKLLGSDPEKVNVNINLVALKILKLLPPDYFESQLSSIIH

SEQ ID NO: 307937 - protein, 76 aa, Zea mays
  Clone ID: MRT4577_43906C.1.pep
NLMTDHQFFLESFHNVEEIKALNASMSNNGYSFCLKETSEIKRPVRFKVNCLIFIDCNKIIKEFVKKPTTLLDLSA

SEQ ID NO: 307938 - protein, 89 aa, Zea mays
  Clone ID: MRT4577_43907C.1.pep
QPPLHSLAFIEEENVLSMIRSITTFTKQMLRVYNLVELEELDLKTSGSPNLDCRFLEAREQIEICGWQPLRRAACPARFDLGEDPTRPA

SEQ ID NO: 307939 - protein, 99 aa, Zea mays
  Clone ID: MRT4577_43908C.1.pep
SGLGTKATAAGLVKRAHALSFFLHTGVPCAGAQPFFRAVHVRELGGVPGDLGLQPSGLFPAFKGSRRHRRTVEFRKSCQRWQSRREVFKDLTYSSKLLA

SEQ ID NO: 307940 - protein, 47 aa, Zea mays
  Clone ID: MRT4577_43909C.1.pep
PSPPTRSSSLDRMGEIREGNAPTTLKRPPTAWGSSSPEEDARTEALE

SEQ ID NO: 307941 - protein, 60 aa, Zea mays
  Clone ID: MRT4577_4390C.1.pep
RSRRRSWRCDPAWTTASPSRRVGRGRAGGMADYSADEFVIFVLYIVTQRKFEANGNSRIY

SEQ ID NO: 307942 - protein, 57 aa, Zea mays
  Clone ID: MRT4577_43910C.1.pep
NYTNSIFRCHLDANGLYDGHFTGGGGSGFVRAQGDADGSLDRLWRSKAAFLRGVFPV

SEQ ID NO: 307943 - protein, 34 aa, Zea mays
  Clone ID: MRT4577_43911C.1.pep
KGKKKKKKEKKKNKKKKKKKKKKKKKKKKKKNPP

SEQ ID NO: 307944 - protein, 42 aa, Zea mays
  Clone ID: MRT4577_43912C.1.pep
YTNKMSCSPPMKSVLYGNGILCRLIQNNVAMSHRLLNFFPFD

SEQ ID NO: 307945 - protein, 55 aa, Zea mays
  Clone ID: MRT4577_43913C.1.pep
GGPKREFNRLDVGGSRQGASHLGDPKEFFNFYPMPVFFFFFFKKIISLFINFFFY

SEQ ID NO: 307946 - protein, 100 aa, Zea mays
  Clone ID: MRT4577_43914C.1.pep
MAAAASAARSFLRSSGSSSLRSAAARAASRAGPGPAPLPRRMPTSAPRVLLRSPVEMSSVCLESLMPMHSATASALMTSLLAAPACKGFGWLSEGQAETR

SEQ ID NO: 307947 - protein, 72 aa, Zea mays
  unsure (1)..(72): unsure at all Xaa locations
  Clone ID: MRT4577_43915C.1.pep
GGPLFNPLGFGKPXKELNELQPKGVKNGGLPMLPPPGYFFQGVVPGGGPFQNLFDPLAGPVKKKGFPPPRFP

SEQ ID NO: 307948 - protein, 49 aa, Zea mays
  Clone ID: MRT4577_43916C.1.pep
FVYPLAVANPLVPPFRRQPLHLLPSNQFSFMNPPLQQSCFWRCHLLNYI

SEQ ID NO: 307949 - protein, 87 aa, Zea mays
  Clone ID: MRT4577_43917C.1.pep
PPHFGSLPTRWPGGKKKKNFFFTKKVYGGPNPGPLPSGPRVPHFSPTKKNFLTAFGPNLEAPPRKDPRRVLTPPHIKKTLFRPKDPP

SEQ ID NO: 307950 - protein, 94 aa, Zea mays
  Clone ID: MRT4577_43918C.1.pep
PLCAMKFAPLACQLSFACICITILAVTKPGSSRLGRTFKGKQVCPYIIVYHECVYAPLDMTGVGRPDSCFVVVVSNVLNYRFVTVFAQCYLTFP

SEQ ID NO: 307951 - protein, 95 aa, Zea mays
  unsure (1)..(95): unsure at all Xaa locations
  Clone ID: MRT4577_43919C.1.pep
TPNWRDXEHHXLGEKPSPXFELSXQELYVRPEAPXKAESXLYLVGDDYLFLWRWIIHPPAFIDXQIVAQRVNXLKLADMMTLLGSLDIIMAEVRR

SEQ ID NO: 307952 - protein, 127 aa, Zea mays
  Clone ID: MRT4577_4391C.1.pep
WPSCACLGGPSLLAFRCRQILVSTVLLPWSERQFIVAVSLTAGFWTLLFQCCAPSLQCSEVPMSLLFISKLECKLLHYLIISYAATQTIISCLFLLQLHGASLGFLLQRIPSGLHGRCPLYGLTTIS

SEQ ID NO: 307953 - protein, 522 aa, Zea mays
  unsure (1)..(522): unsure at all Xaa locations
  Clone ID: MRT4577_43920C.1.pep
AFLRLRGFIGDQEITDDIKMQFVDEDIELGELEXLRGALVGLPGITGLLTEQKKRLTIAVELVGNPSIIFMDEPTSGLDARAAAIVMRTVRNTVDTGRTVVCTIHQPSIDIFEAFDELLLLKRGGQVIYSGKLGRNSQKMVEYFEAIPGVPKIKDKYNPATWMLEVSSVAAEVRLKMDFAEYYKTSIVCRQNKVLVNQLRETXAGTSDLYFPTEYSQSTVGQFKACLWKQWLTYWRSPDYNLVRFSFTLLGALLLGSIFWRIGTNXNFLTFFVFGRWCQPSKSESVGVFYCRGDSTTLKMVIGSMYTAVMFVGINNCSTVQPIVSIERTVFYRERAAGMYSAMPYAIAQVVIEIPYVFVQVTTQRTRDAMMSFQWTAVKFFWFFFISYFSFLYFTYYGMMAVSISPNHEVASIFAAAFFSLFNLFSGFFIPRPRIPGWWIWYYWICPLAWTVYGLIVTQYGDLEDLISVPGESEQTISYYVTHHFGYHRDFLPVIAPVLVLFAVFFAFLYAVCIKKLNFQQR

SEQ ID NO: 307954 - protein, 53 aa, Zea mays
  Clone ID: MRT4577_43921C.1.pep
MAKLRTRITYLMYPPGAASEMAYMHNYRTRSVYGRQYVHRSLGEIGLISMNMM

SEQ ID NO: 307955 - protein, 49 aa, Zea mays
  Clone ID: MRT4577_43922C.1.pep
PVFNQPFRTISKSPASPFFFHLIQTFSTDSLQHSMITSMPSIYRLLAQI

SEQ ID NO: 307956 - protein, 67 aa, Zea mays
  Clone ID: MRT4577_43923C.1.pep
ALTYAKKRLPYWNTVAAFHKNVWLRGIKTSKRSGNLLFPITRCHGDHSSSQGFFAGCPQSGEKFFYP

SEQ ID NO: 307957 - protein, 96 aa, Zea mays
  unsure (1)..(96): unsure at all Xaa locations
  Clone ID: MRT4577_43924C.1.pep
QASARMVLVGDGAASMRRSRNDDAADDTGVVPRQWTTEEGGRRERRLATGVNLVEKMAARRRRFLPCRILVXHRSIRPLTXLMPXGRFIPPGGSGT

SEQ ID NO: 307958 - protein, 48 aa, Zea mays
  Clone ID: MRT4577_43925C.1.pep
NKISIRPLVPKIFSAIFHLPHKYNAMYQNLSRFFAHPSSKLTTGPTIR

SEQ ID NO: 307959 - protein, 191 aa, Zea mays
  unsure (1)..(191): unsure at all Xaa locations
  Clone ID: MRT4577_43926C.1.pep
HTLLDQKRQDDLRIVGCETLFDFTVNQVDGTYQFNLEGLVPRLCEIAQEVGEDERASALRIISCSFLVEQVWFMGELSHISSEFDNVVQVVLENYXXKMQNDDQGTNDADSQLVQEDQKAEHPPSPFIITPAPSWESIVNAKGGINLPEEDARDPKFWSRICVHNMAKLSREATTFRRILECQLLSPSLWI

SEQ ID NO: 307960 - protein, 88 aa, Zea mays
  unsure (1)..(88): unsure at all Xaa locations
  Clone ID: MRT4577_43928C.1.pep
VGFKVVEVGRVVLIVFVPYLVLSTSTAPGGNINVLPYVPLREMARFRLEELGKDGNAAPGPVVVGSSGTCKQMGGLCLAHAWVGPVXP

SEQ ID NO: 307961 - protein, 55 aa, Zea mays
  Clone ID: MRT4577_43929C.1.pep
LHDNQKFGQPWILKSKFENLELFFVPPNSGRNFNEAFLNSGPPFLAGYPPSVKNG

SEQ ID NO: 307962 - protein, 144 aa, Zea mays
  Clone ID: MRT4577_4392C.1.pep
GCFPIYLTLYQTSSAGDYDQYGCLKRFNALSAQHNSLLQAKVSSLQSKYPGARVMYADFYSHVYDMVKSPGSYGFSTNLRACCGAGGGKYNYQNGARCGMPGAYACSDPASSLSWDGIHLTEAAYRKIADGWVSGAYCHPAISA

SEQ ID NO: 307963 - protein, 119 aa, Zea mays
  unsure (1)..(119): unsure at all Xaa locations
  Clone ID: MRT4577_43930C.1.pep
MSRRYDSDITILSADVRLYQEXYAMQDIGNPGSLLLILAGDVVCLVXGQRKVNSXVLQTSRSAEKMYDIYSXSTCRGMXAIMISQDFCVTTARRPYLGYTMSYLHLIAVNFLILTLCIT

SEQ ID NO: 307964 - protein, 41 aa, Zea mays
  Clone ID: MRT4577_43931C.1.pep
HKSKGSAHYKVNRRSLSDIQVQMFSSDYVYLRKNQYKGCML

SEQ ID NO: 307965 - protein, 66 aa, Zea mays
  Clone ID: MRT4577_43932C.1.pep
TGSLTLWSGERAHLFGMPHPHHTGTVASVTLSATSPASASKGTKKQAAPRRCSVGPASRNPIAHRS

SEQ ID NO: 307966 - protein, 64 aa, Zea mays
  Clone ID: MRT4577_43933C.1.pep
HTVLESWLPMTMLSWRGLSQMFRLPLLDLVCHQELLALQVRCLLYAQFCIMLLYTDDEPSEISW

SEQ ID NO: 307967 - protein, 108 aa, Zea mays
  Clone ID: MRT4577_43934C.1.pep
SCCASFDLFAVTCHHGPVCTPVFVFCLLRFLAFPGLGGWGGGGGFLGVAPRGFVALRWRFASLGAADWGAPWGVGLGRPSWLWPPLRLPGRRVERANSRGGARPGGRS

SEQ ID NO: 307968 - protein, 44 aa, Zea mays
  Clone ID: MRT4577_43935C.1.pep
KLRVQKKKKKSAKAITRKKPKKKHEKPTKSQIKSRLLSFLGEAS

SEQ ID NO: 307969 - protein, 97 aa, Zea mays
  Clone ID: MRT4577_43936C.1.pep
PTRPPTRPFGTKKKKKKKGKKKNKKKKKKKKKKYRTNPSQCILTYIHIIADPFLSFQFSLHLIYYSVVFLRRDCKNLNFPHLNNLLTDTTLANLNLF

SEQ ID NO: 307970 - protein, 889 aa, Zea mays
  Clone ID: MRT4577_43937C.1.pep
MRAEQSKFAQSMKSSENEGHDITMLEADVSSSTGVVSEESLPVCSLCRDSDSKSPLCYLILLQKSRLATFVEMGNPSWENPAQVNKTGSVKREGSVDCCVSGSSTSEELVNDTTVEPSFDIDNMEVDAFLDFSNEQHPLIRYISSFPTGHSNINADENVSLEAIEADIYNSILNDLFGSRNAHIQDSDQMLPSNTSNITIDTKRTRSPKRSVLGTYVSCLSSKHRHSSLYDVASKSSASVTTRNRFGPVDCDGIHISSCGHAVHQECHDRYLFSLKQRYVRRLGFEGGHIVDPDLGELLCPVCRRFANSILPASPDFSGKTSMMLRPFVQTLTPQVVTTTSDVNRNCLQFARALSLFESAGKIVGETKFLKAISGKLNETTNPALDPCLRRLAMLYYPRSHSSFSPSKRLNPSLFLWDTLRYSLVSTEIASRGRMSSHSAESKSCLESLRGELNSSSGFILSLLFHAAHSARNLNRLEVLLRFEGIQLLAGSICSCISGYKDILNATKRKGSLPSMVDPASEGALFPDVQFWKQCADPVLAQDPFSSLMSALFCLPVQFLSSAEFFIPFVHLFYVVCAIQALVTCYGEETFDRSNFNDCLLNDVCKTMSGYDIARDYFVSKYIDPSCHPKDMVRRLTYPYLRRCALLWELLRSSATSPLYDGSNIWEGSHLYLSNSTQDDSSSLAMELAGLRELEDLFQIQSLDLILQDESVHMLALKWSQHFCEEYNPRKYRGTLFSTPAVPFRLMQLPDVYQVLLERYIKMQCPDCGSVPDEPALCLLCGKLCSPSWKPCCRTGKCQNHALQCGAGIGIFLLVRKTTILLQRSARLTFWPSLYLDAFGEEDNEMHRGKPLYLSQERYTSLTYLVASHSLDRTSEVLRQTTIGFYGSD

SEQ ID NO: 307971 - protein, 133 aa, Zea mays
  unsure (1)..(133): unsure at all Xaa locations
  Clone ID: MRT4577_43938C.1.pep
MARTSCQAAHIVAGTRHEMPALMACPAEFWPCKPFAGARISGSLHMTIYTAVLMETLTALGAXVRCCSCNIFCTQEHAGGAIARNSTAAFSXKGETLEEYXRCTERXLEWGEAGGLQSLXTTAGETTLLILLE

SEQ ID NO: 307972 - protein, 87 aa, Zea mays
  unsure (1)..(87): unsure at all Xaa locations
  Clone ID: MRT4577_43939C.1.pep
VIKVWKFYRYKSCSYCTVDEFIVFYWCGLNTSVKVDMILCTVWRDIFTDCMEDISFVQVLNGRMFELSQRKYVGAQXMEVSHKLCKG

SEQ ID NO: 307973 - protein, 363 aa, Zea mays
  Clone ID: MRT4577_4393C.1.pep
MAARRLLVAFLALCSGFSAVHGQKFNAIFSFGDSMSDTGNLCVNGPPAGLTLTQPPYGETFFGRATCRCSDGRLVVDFLAEKFGLPLLKPSKQGGANFKQGANMAIIGATTMDSGFFQSLGIAGKIWNNGPLNTQIQWFQQLMPSICGSRQACKSYLSKSLFVLGEFGGNDYNAQLFGGYSPEQASRQSSTIVDAIGRGVEQLIRLGATHVVVPGVLPVGCFPIYLTLYRTSNAGDYDRHGCLRRFNALSARHNALLQRKVSGLRGRYPGARIMYADFYAHVYDMVRRPASYGFSANLRACCGAGGGKYNYQNGARCGMPGAHACSNPSSSLSWDGIHLTEAAYRKIADGWVSGAYCHPPISA

SEQ ID NO: 307974 - protein, 122 aa, Zea mays
  Clone ID: MRT4577_43940C.1.pep
GGGGLGNRGGIKALKNKPTGAYDDVSGFELPPEVQDNTKEPDLLEEVVLCVCGIKRKRVIHNVLTRRSNTMLYGGIPPIASTTSASIVPPQAGSLLPARLSVVFFGWLSHLASAYSTSSAVC

SEQ ID NO: 307975 - protein, 31 aa, Zea mays
  Clone ID: MRT4577_43941C.1.pep
NKFEVHYICTRAQAHAQIEGSVSKGLGPSSQ

SEQ ID NO: 307976 - protein, 207 aa, Zea mays
  Clone ID: MRT4577_43942C.1.pep
RVGSFINLRYQQAIGVARGLTYLHTSCRDCIIHCDIKPENILLDASFVPKIADFGMAKVLGREFSHAVTTMRGTIGYLAPEWISGTAVTSKVDVYSYGMVLFEVISGRKNSSPEYFGDGDYSSFFPMQVARKLRSGHVESLVDEKLQGDVNLKEVERVCKAACWCIQENESARPTMAEVVQFLEGLSDLGMPPLPRLLNAVTGGSPT

SEQ ID NO: 307977 - protein, 34 aa, Zea mays
  Clone ID: MRT4577_43943C.1.pep
YGHPRAPISPTVSEFETRTAEEGSESRNKPEYGE

SEQ ID NO: 307978 - protein, 325 aa, Zea mays
  unsure (1)..(325): unsure at all Xaa locations
  Clone ID: MRT4577_43944C.1.pep
MAPGGFKLFGKVITQCAESAPPAPPEAAAAASRATAFARERDDPDERDQPMVKREAAASDHDFAAVDKHXSTPAAAAGRDXTGRERRQQRAAAAAAPPXPRHHQHHHQQQQDTVEARAAAAASSAPPLPCPRCRSRNTKFCYFNNYNVNQPRHFCKDCHRYWTAGGALRNVPVGAGRRKNRPLGPVVAGAVPVPVPVPAHHHHHHLHPAAAAAAAAAGFVLGFPGQQHPSSPTSPSPSPVYADRWPTRDRSKTRGQRACSTSADEGDAIPCCPVQSLARIPGVVGDHRTTNPALYIPSWEKVTTDGVLMLCLCAQMELTALASQR

SEQ ID NO: 307979 - protein, 72 aa, Zea mays
  Clone ID: MRT4577_43945C.1.pep
DLYDGTWRSRWRGHSDSYMGEDIDIAKECTMTSELLTCREASILSDILMDDRKDPPNDEPGIVNGVLNEDMT

SEQ ID NO: 307980 - protein, 62 aa, Zea mays
  Clone ID: MRT4577_43946C.1.pep
PFPFWVKGPGGFLQKVFEKAPGGGGGKGALQGPEPFRRMGTWPPIIIWFLQPLPCFFCPFPP

SEQ ID NO: 307981 - protein, 129 aa, Zea mays
  unsure (1)..(129): unsure at all Xaa locations
  Clone ID: MRT4577_43947C.1.pep
QQQQFLPFNQLSTLNPXAAYLQQQLLPFNQATSAYSHQQQLLPFNQXTKLNPAAYLQQQILLPXFTSLVAASRASFLTQQQMLPFYQQVADYPASLLQLQQLEPLCQLTLTNPAXASFQHHNIGGALLK

SEQ ID NO: 307982 - protein, 132 aa, Zea mays
  Clone ID: MRT4577_43948C.1.pep
MEGRRPGAPVAGLPIGFRFRPTDEELLLHYLRRKALACPLPAGVIPDADLARLHPWDLLPAAAPGGSGADADGERFFFHRPATQCWRKGGGAARAAGTGVWRPSGKETLVLSPRCKRPVGTKRTLVFCPRPA

SEQ ID NO: 307983 - protein, 281 aa, Zea mays
  unsure (1)..(281): unsure at all Xaa locations
  Clone ID: MRT4577_43949C.1.pep
MEGRRPGAPVAGLPIGFRFRPTDEELLLHYLRRKALACPLPAGVISDADLARLHPWDLLPAAAAAXVPCLSITPLPALPLAXYLTSTRDRIGSNPAGGSGADADGERFFFHRPATRCWRKGGGAARAAGTGVWRPSGKETLVLSPRCKRPVGTKRTLVFCPRRGRARTHWAMHEYRLLPAGLHPYGCAAGAGANAPPPTNVSSHGGDAAADWVVCRIFRRARPAHRARLGGXQGGTRRGAXAAEESPSSPSSCVTDASETLDQEEDDGDEGSSSSTVASSN

SEQ ID NO: 307984 - protein, 215 aa, Zea mays
  Clone ID: MRT4577_4394C.1.pep
GLSTLSAASGSARQGGRRTRVLPGSQPPRSEPLVPEQVTCGRRPLGANFHDAARCVLTSVQLFERRRWGWCCSRRRWRLRHSEARVTNFYISDRNSGKRFYVRAGESALITPMIKQKTISFDGDKKDASQNLKRLLATNELSCNGDLTVKEGLIREGDTASVIGILKKHHACDIVDAPAGVVTTGCQLIRCMFPVFVEGLILIGDEDPDEAVYMV

SEQ ID NO: 307985 - protein, 61 aa, Zea mays
  Clone ID: MRT4577_43950C.1.pep
KKKKKKKKKKKKKKKKKKKKKKKIKKKPKIKKNKKKYLFPWGPPPPLGGIFCSFPSPWRGA

SEQ ID NO: 307986 - protein, 139 aa, Zea mays
  Clone ID: MRT4577_43951C.1.pep
MEARPGAWRLQQRGPGAPVAGLPIGFRFRPTDEELLLHYLRRKALACPLPAGVIPDADLARLDPSDLLLPAAAPPAGGAADDASGEHFFFHRPATRCWHEVRLCFASQSKIEEDLNEQRVCGRTLAQQEMAVFCWKGTD

SEQ ID NO: 307987 - protein, 100 aa, Zea mays
  Clone ID: MRT4577_43952C.1.pep
ATIGTTRDQRLYTTETTEASDHTPRPHPGTPRRKSVTPWRGPRWGHWCQRGAEELILGARVTATFPAAVAIHVVVAGNPEIRKSIRLEQATTSPHAWLAR

SEQ ID NO: 307988 - protein, 68 aa, Zea mays
  Clone ID: MRT4577_43953C.1.pep
IGGVSSLLGRRVRLARRLGGPAVFSWSPCPSSWYCPRPFCLRVGSIWVQLGMASALLARGSAAREILV

SEQ ID NO: 307989 - protein, 39 aa, Zea mays
  Clone ID: MRT4577_43954C.1.pep
LGMSVPSPSVPVSHEAADPCLAHRRSRLVMEWCLLSDAA

SEQ ID NO: 307990 - protein, 232 aa, Zea mays
  Clone ID: MRT4577_43955C.1.pep
MAPCASPSALALSASTRVSILRLPLALRQRAEARVPGAQFRPSTACSWARPLLPELAGAVPRAGARGTGRRTQPLFRPRALTTTSQIASCAFTLGTVAVLPFYTLMVVAPNADITKRTVESGAPYVALGLLYAYLLYLSWTPDTLRAMFASKYWLPELAGIVRMFASEMTVASAWIHLLAVDLFAARQVYHDGLRNNVETRHSVSLCLLFCPVGILAHVLTKVLAGAVARSH

SEQ ID NO: 307991 - protein, 70 aa, Zea mays
  unsure (1)..(70): unsure at all Xaa locations
  Clone ID: MRT4577_43956C.1.pep
ALLGTPELIAWFEKIARGAGAGAAAAHPWRTHKLPAQNFAPRISXFPPWPLLSFPPPFLISDPRTASLFL

SEQ ID NO: 307992 - protein, 239 aa, Zea mays
  Clone ID: MRT4577_43957C.1.pep
MAPCASPSALALSASTRVGSPFASPNPTAAILFTTVLYTLPLVSAVLCSWLICSASASALLQVSSFPLTLRLEARVARAPGSAQLRPATACSWPRPLLPELAPAFPRAGARSAGRPQPLFRPRAMMTTSQIASCAFTVGTVAVLPFYTLMVVAPNADITKRTVESSAPYVALGLLYAYLLYLSWTPDTLRAMFASKYWLPELPGIVRMFASEMTVASAWIHLLAVDLFAARQVYHDGVK

SEQ ID NO: 307993 - protein, 231 aa, Zea mays
  Clone ID: MRT4577_43958C.1.pep
MAPCASPSALALSASTRVSSFPLTLRLEARVARAPGSAQLRPATACSWPRPLLPELAPAFPRAGARSAGRPQPLFRPRAMMTTSQIASCAFTVGTVAVLPFYTLMVVAPNADITKRTVESSAPYVALGLLYAYLLYLSWTPDTLRAMFASKYWLPELPGIVRMFASEMTVASAWIHLLAVDLFAARQVYHDGVKNNIETRHSVSLCLLFCPVGILAHVVTKVLAGAAGRSH

SEQ ID NO: 307994 - protein, 72 aa, Zea mays
  Clone ID: MRT4577_43959C.1.pep
GNSVRLSWSYSSAISSDARVGKLASCTAAARSSGTCGSPRAANHNPPLASAYSNKGTIDRHAHLFSSHVLLK

SEQ ID NO: 307995 - protein, 190 aa, Zea mays
  unsure (1)..(190): unsure at all Xaa locations
  Clone ID: MRT4577_4395C.1.pep
KVTPNLAMDAADTLLLYLSLLHRLDPPAXDILISAAHVTVYYFYFDXTTEARNDVXEGSLFSIQNNSQPRFQFIAMNTYSTDNLLLDLSGXDXEYKVPTIYLLDQSGXILTNXIWVYNQHDCEDVAXLFGMIMNAYSRVPPTPKATSTKRELNQLEECSYMCLHHMVYLNCRCDAVEGLLIRGVTNRIAT

SEQ ID NO: 307996 - protein, 133 aa, Zea mays
  unsure (1)..(133): unsure at all Xaa locations
  Clone ID: MRT4577_43960C.1.pep
KGRVLALILWPTRELAXTKQRVMPAIGDHLNVQVHACIGGKSIDEDIRRLENGVHVVSGTPGRVXDMIKRRTLRTRAIKLLVLLCPSVHILVSTTFGCLGKMLHPYDLCDIFFAICTFTRQTCDLIRGGCSSC

SEQ ID NO: 307997 - protein, 39 aa, Zea mays
  Clone ID: MRT4577_43961C.1.pep
RDTDRGVGGSRGGVGLAYDLRLELGACRQVEDAQSARGG

SEQ ID NO: 307998 - protein, 72 aa, Zea mays
  Clone ID: MRT4577_43962C.1.pep
VIPPFVLVGWASGFGFGFFVFHIGYYIQGHHLFFWALRGSFGMHKGFLGCNFFFFFGFFFFFGGGLFFIFVW

SEQ ID NO: 307999 - protein, 38 aa, Zea mays
  Clone ID: MRT4577_43963C.1.pep
PRVRSPTRIHVTCALVRETTPAGRVHKGVCSTWIKVTY

SEQ ID NO: 308000 - protein, 109 aa, Zea mays
  Clone ID: MRT4577_43964C.1.pep
KAVSKGHGAQWGSLFVQRARALPGEGKQLENRFKQGQKMQSNWDKGPKPRGGEAPLLGPRGELWKLKTPEIFERGGGGQTPPASNYPTCKRAIKTEKGPCFCPPPGGGG

SEQ ID NO: 308001 - protein, 83 aa, Zea mays
  Clone ID: MRT4577_43965C.1.pep
LGQTGSFRSLPPLPVHVRLSRLGVMTSVLLNVALGYTTTDVHCTFTVVHGYITAPITDFDEASCSMALEQCLFYTDYYKRRAT

SEQ ID NO: 308002 - protein, 139 aa, Zea mays
  Clone ID: MRT4577_43966C.1.pep
MANARSGVAVNDECMLKFGELQSKRLHRFITFKMDDKFKEIVVDQVGDRATSYDDFTNSLPENDCRYAIYDFDFVTAEDVQKSRIFYILWSPSSAKVKSKMLYASSNQKFKSGLNGIQVELQATDASEISLDEIKDRAR

SEQ ID NO: 308003 - protein, 126 aa, Zea mays
  unsure (1)..(126): unsure at all Xaa locations
  Clone ID: MRT4577_43967C.1.pep
MANARSGVAVNDECMLKFGELQSKRLHRFITFKMDDKFKEIVVDQVGDRATSYDDFXNSLPENDCRYAIYDFDFVTAEDVQKSRILYILWSPSSAXFKSGLNGIQVELQATDASEISLDEIKDRAR

SEQ ID NO: 308004 - protein, 195 aa, Zea mays
  Clone ID: MRT4577_43968C.1.pep
MGPSTLVSRLFAGISNISSFCSGSVAAWFRMMGTVGCAMQNKVCESNCLLNYGWCKQANARSGVAVNDECMLKFGELQSKRLHRFLTFKMDDKFKEIVVDQVGDRATSYEDFTNSLPENDCRYAIYDFDFVTAEDVQKSRIFYILWSPSSAKVKSKMLYASSNQKFKSGLNGIQVELQATDASEISLDEIKDRAR

SEQ ID NO: 308005 - protein, 139 aa, Zea mays
  Clone ID: MRT4577_43969C.1.pep
MANARSGVAVNDECMLKFGELQSKRLHRFLTFKMDDKFKEIVVDQVGDRATSYEDFTNSLPENDCRYAIYDFDFVTAEDVQKSRIFYILWSPSSAKVKSKMLYASSNQKFKSGLNGIQVELQATDASEISLDEIKDRAR

SEQ ID NO: 308006 - protein, 122 aa, Zea mays
  Clone ID: MRT4577_4396C.1.pep
QQRFFPSPPQAALTWSFYLREKKPPLSQPPGPPPHDFFPFNQREALNSPVFFRPPQLPPLTRQGGVTPAPFLKHPQLFRFPHPRAPNGGPLLQVHKLAPSTPLVFTNPGGFPPPPLLGGPPF

SEQ ID NO: 308007 - protein, 81 aa, Zea mays
  unsure (1)..(81): unsure at all Xaa locations
  Clone ID: MRT4577_43970C.1.pep
ILDYFIIFSNKNLPLKTIFMLADQIINQVEFFHSKSFLHIKIKPNNFLKGLXKRANQVYVIQFXGFHRNSKNSSTHQHIPY

SEQ ID NO: 308008 - protein, 169 aa, Zea mays
  unsure (1)..(169): unsure at all Xaa locations
  Clone ID: MRT4577_43971C.1.pep
ANARSGVAVNDECMLKFGELQSKRLHRFITFKMDDKFKEIVVDQVGDRATSYDDFTNSLPENDCRYAIYDFDFVTAEDVQKSRIFYILWXACALSFASLVAHAASQLLANEIFYLLNCXSPSSAKVKSKMLYASSNQKFKSGLNGIQVELQATDXASEISLDEIKDRAR

SEQ ID NO: 308009 - protein, 97 aa, Zea mays
  unsure (1)..(97): unsure at all Xaa locations
  Clone ID: MRT4577_43972C.1.pep
DEKAKDPNTLAKAYEEHXNRXFDTNXAALEGLNQETTMLTFEGQKGQGPTANAGKHGTHPKQACEHQNDTEDSQPTATQGGMXAYDTGAMRTGPEEH

SEQ ID NO: 308010 - protein, 92 aa, Zea mays
  Clone ID: MRT4577_43973C.1.pep
RFEARMILKETFPPNPYSGVLHGGVSRLISLRPRRSLSDKCAVFSLSRVIDRHRRRFFFSAKNQTPKKGRWQWTLQRRRLQKSALGRPRGTQ

SEQ ID NO: 308011 - protein, 79 aa, Zea mays
  Clone ID: MRT4577_43974C.1.pep
FPCLGNFCASGGFVNFVGRARLCGGVLVCLGEGRETLKADRGFQRPPLRSGPPSDPLDDGLVSGGPFHLGLSLRRLGSG

SEQ ID NO: 308012 - protein, 60 aa, Zea mays
  Clone ID: MRT4577_43975C.1.pep
TNPCSISLRPALKNVIVLVISVNFPDVLSSCKAYINMVCFILKKKKTPKKKKKKKKKPKP

SEQ ID NO: 308013 - protein, 57 aa, Zea mays
  Clone ID: MRT4577_43976C.1.pep
IRCTRHTTWHNGTHGASSNHGKPFVDWVSPVRRDIPLADLARRESLQFHCWSTTFNA

SEQ ID NO: 308014 - protein, 134 aa, Zea mays
  unsure (1)..(134): unsure at all Xaa locations
  Clone ID: MRT4577_43977C.1.pep
NKRKQNQRTAEQSMSLSSTAFPGKAVNEPPTLFTQAPATLRKTAAKAKPADSSGSPWNGPDRVLYLDPLYGAPPSXYLTAEIPEDYXLKYRGAXPDPETLAKNRQLEDIHSRWNMLGALACVLQKLLAPQRPTS

SEQ ID NO: 308015 - protein, 87 aa, Zea mays
  Clone ID: MRT4577_43978C.1.pep
GPLLGTPASVIQILPTSCCLEFHPPAYTKVKGWPFFFFFFFVATTCQRFKVFFLPCFFPFFSFSSLIPFFPCFFWVQFLYKLKSVTP

SEQ ID NO: 308016 - protein, 127 aa, Zea mays
  Clone ID: MRT4577_43979C.1.pep
ARSLGVQYQRAAIFTGRSRLYTPVRCRRSGAVRCARTRTRTRFASCLCLYGRATRGPIPPPPGIEHPAARHPSEYLLCVSCSVPALVGAAIANANQPCLRLRANGTHCKYPAMLNARTASRTTSITR

SEQ ID NO: 308017 - protein, 61 aa, Zea mays
  Clone ID: MRT4577_4397C.1.pep
IRKPCSPGLGEFLWQACIASGWGTQIHRWGFPFSNAPVKFLVQIIKGPVMALNNGGGQKGT

SEQ ID NO: 308018 - protein, 93 aa, Zea mays
  Clone ID: MRT4577_43980C.1.pep
VFATLNTFVIFTSNRLHSLDTSCLVYSNYRQRFYVLWKLQIHNPGAGNSQPQPKEAWAMNCRGTSIFHTKIFKQQDQWIYVILSAIQITGFFH

SEQ ID NO: 308019 - protein, 57 aa, Zea mays
  Clone ID: MRT4577_43981C.1.pep
SAFFLPTLIGTKGTSMIHFDSQGSYAMHISHPVYTSQHCLIESGSATSSHFGVALKL

SEQ ID NO: 308020 - protein, 164 aa, Zea mays
  Clone ID: MRT4577_43982C.1.pep
WHNRESTIYRASNVSTISRNDQQAIVSALANGFPLHATILQGTKLTFLRYCTSYEPPDFFQALKVRAPEDIPCHAIVLVGAVKKKGKLSYYFLNAWKRFCARRSEDGTLLAYGIGKVNANRLYRNVIKVSCFKEAPKERSFTQNMKLNTALLVGDLPKREPTFR

SEQ ID NO: 308021 - protein, 66 aa, Zea mays
  Clone ID: MRT4577_43983C.1.pep
LAAGGVDHTIHVWRVTDPEQKRVQALKQSGVVRTDQWGVTQWELLLLWRGGKFFQGSWGVRANADG

SEQ ID NO: 308022 - protein, 94 aa, Zea mays
  Clone ID: MRT4577_43984C.1.pep
FFFFFEQECNCKWITSTARQHSKCTIFERDGEDVIALLTQLGITRRKKYMEKAGTMSAAEVCNGRASAVVQQDFCFGTVSSVLEQSAQQSRDVL

SEQ ID NO: 308023 - protein, 34 aa, Zea mays
  Clone ID: MRT4577_43985C.1.pep
HQSSYSQIDYCFWSMNTLTKTGLSPTSNYHALYF

SEQ ID NO: 308024 - protein, 88 aa, Zea mays
  Clone ID: MRT4577_43986C.1.pep
IAGRRSRSRDKRRGSTIVDWLSEVDNVGEPVISQQWLTSSQWRAQESRRAGNDRSDGRYSAEQQRETPGRREICAREKRAGTARRAAR

SEQ ID NO: 308025 - protein, 146 aa, Zea mays
  Clone ID: MRT4577_43987C.1.pep
SDRTVLFLVASFTSSIPHSLDRGAFRPWMTDSLMSPPQLIADCRIQLQRRRPCVVPSSDFLKLPAVKMVRPTLLCFARATAPLRRSCASDSSPLRTPPPAVRHLAQPRCWCSMPYPSRPRSSHTRRYSWLLAGYRRLAERALARRK

SEQ ID NO: 308026 - protein, 80 aa, Zea mays
  Clone ID: MRT4577_43988C.1.pep
GAPASPIRAAWRHERGRMRRGMRPAPSLPLLRRSSSPPGTAAKTAPPPPLPLCVLRGPGSQQQQRLLRFRWVSVLQLTRG

SEQ ID NO: 308027 - protein, 63 aa, Zea mays
  unsure (1)..(63): unsure at all Xaa locations
  Clone ID: MRT4577_43989C.1.pep
TNVLPPNAIVXIGSESSACTAERGQYHIGGKMKNTSNDWIYPKPMMDSNYWNIHCMASGNMHH

SEQ ID NO: 308028 - protein, 89 aa, Zea mays
  Clone ID: MRT4577_4398C.1.pep
MSVTFLAMRLVCCLHLVPATCTSSRSFDCQCGRSPVRWWCERPVHRSNVPSMAVAASRSRSSASISSKSKTLRAELQIRMGSVRVFYGL

SEQ ID NO: 308029 - protein, 72 aa, Zea mays
  Clone ID: MRT4577_43990C.1.pep
CMRSKCVVSSRFFQYLRLEATGILLHLGGCLPRLGRRMSAGVRLHPLEWPPLDILKEPYTQGALGKPCWISH

SEQ ID NO: 308030 - protein, 130 aa, Zea mays
  Clone ID: MRT4577_43991C.1.pep
VTSSHHLSKFLFALYRRYRMTGDIMRLFMLSVPAIAESYRTNRRGIRAQRRDRHGLRLGHHIRNVPSASSERYVRRGKRVSAFALPRATHLFSWAPSTLADVACALLPLSHTSASVESMRVYGLESDLRC

SEQ ID NO: 308031 - protein, 35 aa, Zea mays
  Clone ID: MRT4577_43993C.1.pep
GSKKLKSDHCEAENNDGASGYDVGRVGGRVGPRGY

SEQ ID NO: 308032 - protein, 507 aa, Zea mays
  unsure (1)..(507): unsure at all Xaa locations
  Clone ID: MRT4577_43994C.1.pep
MASDAAHGSSLDGVTPSSKFDLPVDSEHKAKTIRLLSFANPHMRTFHLSWMSFFTCVVSTFAAAPLIPIIRENLGLTKADIGNAGVASVSGAIFSRLAMGAVCDLLGPRYGCAFVVMLGXPAVSCMAVIASAGXYVAWRFLIGFSLATFVSLQYWTSTMFNSKIIGTVNGLAAGWGNMGGGATQLIMPLVYDVIRKCGATPFTAWRLAYFVPGLMHVVMGVLVLTLGQDLPDGNLRSLQKKGNVNKDSFSKVMWYAVINYRTWIFVLLYGYCMGVELTTDNVIAEYMYDRFDLDLRVAGTIAACFGMANIVARPMGGIMSDMGARYWGMRARLWNIWILQTAGGAFCLWLGRASTLPVSVVAMVLFSFCAQAACGAIFGVIPFVSRRSLGIISGMTGAGGNFGAGLTQLLFFTSSTYSTGRGLEYMGIMIMACTLPVVFVHFPQWGSMFFPPSATADEEGYYASEWNDDEKSKGLHSASLKFAENSRSERGKRNVIQADAAATPEHV

SEQ ID NO: 308033 - protein, 95 aa, Zea mays
  Clone ID: MRT4577_43996C.1.pep
SRVPVEQLVLPAGARDGKPQWAPSKSHTAYAKDGKHSPPYDTSCFGSSVHYGGRDYFYGSSTTKKATESSTDYKGDKKDPVADSHGDWWQGSFYY

SEQ ID NO: 308034 - protein, 137 aa, Zea mays
  Clone ID: MRT4577_43997C.1.pep
GGGDAHAVPPPGWPIVQGRWGFISLKRNITGLFGGWAFVWWFPGFPSVGRKAFLGGLPSNCPRWGSVLLLSRPVNPGLALLLSFFSRLSWAPFKGLAGLVAPPETKLLCLNPRAVFFFGFWENFFLALLGLFFLFLG

SEQ ID NO: 308035 - protein, 95 aa, Zea mays
  Clone ID: MRT4577_43998C.1.pep
SRGWAAPSGPQRPPGASLGSPPAPAAVSAPLWGQCGPLSLLVSARVGVPFSWRWVCPEPPVFFFPNEVPRVTSASPGYRNQTPKKKKKKKTKKTK

SEQ ID NO: 308036 - protein, 157 aa, Zea mays
  Clone ID: MRT4577_43999C.1.pep
PQMEPKKSSAQHQPHAMEPKKSSPRGAGAVAATATEAESPLSSLFYPPAPAANGKDQELYSIIYKGQSGSAQAGATGNGKPQWAPSKSHTAYAKDGKHSPPYDTSCFGSSVHYGGRDYFYGSSTTKKATESSTDYKGDKKDPVADSHGDWWQGSFYY

SEQ ID NO: 308037 - protein, 246 aa, Zea mays
  Clone ID: MRT4577_4399C.1.pep
MAASALHQTTSFLGQALVSRAAGVDAGGRITMRRTVKSVPQSIWYGPDRPKYLGPFSEQTPSYLTGEFPGDYGWDTAGLSADPETFARNRELEVIHSRWAMLGALGCVFPEILAKNGVKFGEAVWFKAGAQIFSEGGLDYLGNPNLVLMGFVEGYRVGGGPLGEGLDKGYPGGAFDPLGLADDPDTAAELKVKELKNGRLAMFSMFGFFVQAIVTGKGPIENLFDHVADPVANNAWAYATNFVPGN

SEQ ID NO: 308038 - protein, 124 aa, Zea mays
  unsure (1)..(124): unsure at all Xaa locations
  Clone ID: MRT4577_439C.1.pep
GCVFCWCWLWGNIYVGGERCVRCAFLQFLVWGVFLLLLCDAEWFNWCHWRGLVIFHHLCGWGAPVGWVTPFWTGVVSEVWILCLSPAGLVGVLVMGGVLXXFWVFLKILKISRGSLXGCVEGGG

SEQ ID NO: 308039 - protein, 105 aa, Zea mays
  unsure (1)..(105): unsure at all Xaa locations
  Clone ID: MRT4577_43C.1.pep
MRRPPACQEIGHSHRCRCTSRTFXRRRQHCRSCGPTLCKENSYCYLGVTTTADMYRLQILXSCFNPSSRRXHAANPAPHGSIYGAADSFXRVSLGNEDVTWSMKN

SEQ ID NO: 308040 - protein, 80 aa, Zea mays
  Clone ID: MRT4577_44000C.1.pep
RFPWVVFLVPVSVPVLFPWVLSPPSAGLGPLPGSAAPAFLFGLGGLSPFGGGCLTAFYFFHPPPSGGVGPVIKHYLGRPL

SEQ ID NO: 308041 - protein, 45 aa, Zea mays
  Clone ID: MRT4577_44001C.1.pep
VYYHVPTRRRRGLSFIKHDPMPRASRCCDTLIDAPARRVLKLEVA

SEQ ID NO: 308042 - protein, 84 aa, Zea mays
  Clone ID: MRT4577_44002C.1.pep
RHGEQEWSLQRRHGGQALHGASPTLVDLGFTKGQGQGTEQDRVSIYMIGGLRIERWFQVLAEFSLAKKRLGTRTMLLCCSITPC

SEQ ID NO: 308043 - protein, 926 aa, Zea mays
  Clone ID: MRT4577_44003C.1.pep
MGEGRGRRDLTPRFLSTSQMAPPSANRSHQQLVVLPVLLLLLIRIPASAAAAADTSLSTLSYSHHCPNLPSALDLPGGEVSALGPDAHVPVPEVSTGYFVGGDRIFGPDPSSQPRSFSLLPSSVARTTNASLLHVSATLTVSGGRRPFRDRGGRNLFEYDGRARHFRPRLPRFTGRRGSITFGLEGYYSTGSGDLCMVGTGSGRAADGSPVHFLPVVLRLGFPSPANVTRPFVTGRLENVDTISPIEPISLVAYTQEGYAYGESASCPPPPAGRLDALQVFENRNFSCAHLSSMLKSPFRLDYPSGSESTASSLGIHQSYMYVNRMHCNDDGAVRAYVAFTNQTELSRYYFMLGEKAVVVDGFWDQKSSRLCLKGCHVVKSGPSRADLAVGECGIGMSFWFPAVWSLQQRSFSAGLVWNASLKSGEAVAAGSSAITPNYRGNLSGLKYNYTKVDEAMKYYEKSGLNKNRKGKFPDSNSYQDLVFRFFVKRGGGSGYASPVTIGSMLFDGNSLVVQDPFSRHVTAEMKQRLLNVSYDIYYVGNWSLESFHRRHISAEGVYDTKTGSLCMIACRELNVSSDCEILVTAQFSSLDAKVAQHVKGAIKSLRKKTDPLFFETLDIASYGMYVEQVDASIWRMDIESTMTLISMTLACVFIAVQLFHVNKVPEALPAMSITMLVVLALGYMIPLVLNFDALFKNSNKQTVPLSGGGWLEVNEVMVRIITMVTFLLQLRLLQQAWSARSVDASKAESWAAEKKVLWICLPLYIIGGAITWVVHMRSNHSRRMLRQVVHLKPVEQHAFWEDLVSYCGLILDGFLLPQVILNVFSDSKVRALSPGFYIGSTLIRVLPHVYDVFRRQHFVPSLRPSYMYAGPRDDLFSLAWDIVIPCGALLLSALLFFQQWRGGAFFLCSKNRRTREYEMVSVASS

SEQ ID NO: 308044 - protein, 132 aa, Zea mays
  Clone ID: MRT4577_44004C.1.pep
KKTRGGGANTPNRPNQGAIPKRGGQFRLGGELIKAPKWKRGKAGPVFGLGREGNPFNLGVLPGGGDPPQNKGSGGVKLPPKPNGEGGPTPQKKNPGEKTLYFGGKNLGLWNYKRGGKGEKKNLEDSNPNFGG

SEQ ID NO: 308045 - protein, 188 aa, Zea mays
  Clone ID: MRT4577_44005C.1.pep
MAPPRRVCVTGGGGFIASWLVKLLLSRGYAVHATLRDPCDPKNVHLKQMGEVRENLHLFKADVLDYDALTRAFEGCEGVFHLATPVPEDKIVDPESEVLAPAVKGTSNVLKACSAMKVQKVIVLSSNAAVDFNPNWPQDKLKDESCWSDKDFCQENQDWYSVAKIVAEQASLEYSEKHGLNAVTLCPP

SEQ ID NO: 308046 - protein, 94 aa, Zea mays
  unsure (1)..(94): unsure at all Xaa locations
  Clone ID: MRT4577_44006C.1.pep
NIRSSLPDTDRXLVRSPPSKXPTXMXXXXXXXXXSSSSEVPIAARTCVSVGEVAVGAVATGSGDRVAADCGVCAIARQDSAQETASSKGSTSYF

SEQ ID NO: 308047 - protein, 66 aa, Zea mays
  Clone ID: MRT4577_44007C.1.pep
NNIYTPPKYNQSPPHHIHVHIHIYINIYIYPITLHLINFHLPASTSHSFPTDSLLPLAINIIRPNL

SEQ ID NO: 308048 - protein, 163 aa, Zea mays
  unsure (1)..(163): unsure at all Xaa locations
  Clone ID: MRT4577_44008C.1.pep
GKPTGSPXEQPARDETPEPXXKGTRQKXPRPGGEGXPGXXPRPPAEKTEQTKAPXGAPQQTNKTGXEEGKGGXPQERXEXPXRNQGGGTRGTKEGRPHPQKNSGXPAGGPTQKSXXEKKKKQXTPGKGXATRQPQXRGKSKXHAPRKKKKKKKKKKKKKKKTK

SEQ ID NO: 308049 - protein, 91 aa, Zea mays
  Clone ID: MRT4577_44009C.1.pep
LPSEKTQPVAPPLVPLFTFFGPSYWKCEPPPQKGKPSCRIAPRTGKPRQVFLAWPLWVNCRSTLMNNTSGQFPVGKICLFRKSRPQKKTQP

SEQ ID NO: 308050 - protein, 43 aa, Zea mays
  Clone ID: MRT4577_4400C.1.pep
MPAAASPCAAPSRAFPIENLFDHVADPVANNAWAYATNFVPGN

SEQ ID NO: 308051 - protein, 211 aa, Zea mays
  Clone ID: MRT4577_44010C.1.pep
MAPLLFRDMKGLSCSSQASTATCPSLERHPAPRPHKASAGASPLAPVPAAEPRTRTHRLDGKKGQQPQHKAAVVPANAGGGLVSPAGSSRYLLLSGRFAAVAEEIQEVLEPAPAVDAIAKREEASDAADAKTAQAQEQVVVVLKVSLHCKACAGKVKKHLSKMEGVTSFNIDFAAKKVTVVGDVTPLGVLSSVSKVKNAQLWAAPPAIAAA

SEQ ID NO: 308052 - protein, 133 aa, Zea mays
  Clone ID: MRT4577_44011C.1.pep
MVGHMLDTNQMVGLVLPTPINEHPMIYRLHLCVTHEDPPKIKHWYLPSTLEPAIKINVHMLAIDDISEPLPRPISTSAICLPYHLPPGFSNIHTVHLDTTLDCTVEQLSNAIASLPHGRSPRLHIVNTSTAHY

SEQ ID NO: 308053 - protein, 207 aa, Zea mays
  Clone ID: MRT4577_44012C.1.pep
MDGRLALCWFFLVNSATTLSVCLCFVSTACYAASIPPGLGLKPLLYFTLLPPSSYLSVLKPIERLLPIPTEPRVKYTFVEFPTTSGVQLGGICWEMRLPSLRREVNGIPYHRETPYISRPPHQRDPPRVHQAQQGIEEDVVDGMTSFMAACLVSIKKTKDLLPDQLQKAFRKTFSAKKKKSKIRKAWDETKVIYNVASWGHHCCWAA

SEQ ID NO: 308054 - protein, 91 aa, Zea mays
  Clone ID: MRT4577_44013C.1.pep
MVVCSLLGTHRTDGDVFEYPHSDWRVSYGVLLSTGYHQAQICGIPHHYLTMVIGLHSIPWYRVSTISSLVDRLIHPPSLQVDSMSRTVFTS

SEQ ID NO: 308055 - protein, 59 aa, Zea mays
  Clone ID: MRT4577_44014C.1.pep
GAPQKTFFGGLQRPGAGVKPPPRLKFPPPQTWFYKGFCSRHPGVKNQIFLRGAFTKKQT

SEQ ID NO: 308056 - protein, 52 aa, Zea mays
  Clone ID: MRT4577_44015C.1.pep
FFLCNFYVKGVVDTPTGTNILFFTKKFVHSIFAQGSCSHIKLLVQTGSAFFT

SEQ ID NO: 308057 - protein, 106 aa, Zea mays
  unsure (1)..(106): unsure at all Xaa locations
  Clone ID: MRT4577_44016C.1.pep
MKERIVSLAGRALAASATFTHTSGGCCCHPPSPVHLPPSVHLPPPVHLPPSVHLPPPIHLSSPXVHLPPSVHVPSPVHLPSSPCHYPTQPPRPQSYSQPHPCPSQQ

SEQ ID NO: 308058 - protein, 37 aa, Zea mays
  unsure (1)..(37): unsure at all Xaa locations
  Clone ID: MRT4577_44017C.1.pep
RDASNSESARVRHGTFVHLXAVVSVVSTYMVPRLTRS

SEQ ID NO: 308059 - protein, 106 aa, Zea mays
  Clone ID: MRT4577_44018C.1.pep
RPPPVHHRYISRRPFLPPPSFPPPPPPPPSPSTAHSWLPPLLSPVRGPLQSAWSLRPMGGDRGRVCGGGALSFAGAPVSARASLLLAHRLRVTSSSRGDVALGCAL

SEQ ID NO: 308060 - protein, 74 aa, Zea mays
  Clone ID: MRT4577_44019C.1.pep
TPIGRLVAYPAGSLAIEADSPAPMVVLSAAGVSPPSAIGFEGYEKRLEITFSEAPVFVDPHGSGLRALSRSQID

SEQ ID NO: 308061 - protein, 71 aa, Zea mays
  Clone ID: MRT4577_4401C.1.pep
MAGMAPEGSQLDAKNYDSKMHELLNQGETEDAFTSYDEAHDRFDDMGFQDNLLRGINAYGYEKPSAIHKRE

SEQ ID NO: 308062 - protein, 68 aa, Zea mays
  Clone ID: MRT4577_44020C.1.pep
CPLAAAAVTVQRRFMGARLLYKPTAAPAPAPLRRRPAPVAGSYGGSPSTPGGGAFGGSAPYTPSGCGA

SEQ ID NO: 308063 - protein, 56 aa, Zea mays
  Clone ID: MRT4577_44021C.1.pep
FFFTGLHVPMSWRGVLIRIQSILVAAGSCPERWCLLRRQEPAMAEANAAKEKKAVV

SEQ ID NO: 308064 - protein, 104 aa, Zea mays
  Clone ID: MRT4577_44022C.1.pep
ACSLFCQPARCGCVGRRFSWVRAGVSQAGRGGPPPSVLHLGGGNAADSRCMRGAASGGPVARPPRARSFFFFFFVCLFFFFFFFFFFSASGNVTSYFWLATYII

SEQ ID NO: 308065 - protein, 91 aa, Zea mays
  Clone ID: MRT4577_44023C.1.pep
TLDCTVASMLHITPGSSSEDDPDTYGDRLRTFYLTLATRMHRMTMHIMPSSACEAPCELPTPARMPVAPCTRHAPPDPVFSPIGISRPRHP

SEQ ID NO: 308066 - protein, 93 aa, Zea mays
  Clone ID: MRT4577_44024C.1.pep
EPQDLLNGHAFVGSGAVRIHHSLRMPVHLTQDVHMSRLAFQVDPAKMLTELVVVHRLCPVRERYPRPCAVRATRTAGVCKPRGGTVLRRLMGE

SEQ ID NO: 308067 - protein, 55 aa, Zea mays
  Clone ID: MRT4577_44025C.1.pep
VRSAPTEDALKTPATAYATDTGRTPERRGTNGIVSLHAKKLDKQHKEDLVKETGT

SEQ ID NO: 308068 - protein, 41 aa, Zea mays
  unsure (1)..(41): unsure at all Xaa locations
  Clone ID: MRT4577_44026C.1.pep
MKKLMVVLSLIAAAWAXEQNKLEHGGPGDKTSHPYQAALYT

SEQ ID NO: 308069 - protein, 57 aa, Zea mays
  Clone ID: MRT4577_44027C.1.pep
LCFWAIFIYSDCFLYYCLIYVSRLSCVDFVLQITSLPDEYILLHENYQLYVLPKVLE

SEQ ID NO: 308070 - protein, 68 aa, Zea mays
  Clone ID: MRT4577_44028C.1.pep
MATSGIDMDHRCHGQYDRDRDRDQQEEETSSVDPDDPSVDNEGGGNADNSTGGRLLRFIGDNVWPPWN

SEQ ID NO: 308071 - protein, 107 aa, Zea mays
  unsure (1)..(107): unsure at all Xaa locations
  Clone ID: MRT4577_44029C.1.pep
TSAPDIRGMIPRNFWPQKNVQHGNNVIINGTSRYGQSHANDIYMRYMTXGTIIGPIKTAHEGGINEMNFVXDRANPEKHPCYHFHSKINLSCVNPETGVVDPKKYTV

SEQ ID NO: 308072 - protein, 68 aa, Zea mays
  Clone ID: MRT4577_4402C.1.pep
MPAAASPCAAELKVKELKNGRLAMFSMFGFFVQAIVTGKGPIENLFDHVADPVANNAWAYATNFVPGN

SEQ ID NO: 308073 - protein, 158 aa, Zea mays
  Clone ID: MRT4577_44030C.1.pep
MIMASGSVPFLTKCFRDLGNSNVSGSIGPELGRLVNLKYLELYRNNLDGEIPKELGNLKNLISLDLYANKLTGGIPKSLSKLDSLRFMRLNNNKLTGSIPREFAKLSNLKVIDLSNNDLCGTIPVDGPFSTFPLRSFENNSRLNGPELQGLVPYDFGC

SEQ ID NO: 308074 - protein, 300 aa, Zea mays
  unsure (1)..(300): unsure at all Xaa locations
  Clone ID: MRT4577_44031C.1.pep
RKLPQTALDVWRFSRTNRQGSFLLEPLLHGTCSDLQETYERNFPCVSGLDAECSNVAGVANDDPDASLERQLSPNVPRTAELSYHELTPTSPGNAEAQPEPPLXNPKXSQELQVQCQXDMLPELPRFSPIDVPSSIRGNDTPYKTPGGTPSWLGGSAVSEIPSSDGNYSLPGQSTRDSDNMSFLFPINEDDEHPEIPGLMSTPGGVSSVATGTTGLGSMSARTRAVALFFKDHAFSPSDDQPGKFRLNKILEGKTRKQAARMFFETTVLKSYNYIDVQQEDPYGAIEILVKPLLSAAKLT

SEQ ID NO: 308075 - protein, 109 aa, Zea mays
  Clone ID: MRT4577_44032C.1.pep
GLSLRPAGDGWLGVWPPLFGPLGRVGVVFVRGGFLPVLALLCWAGSSSVLSRCSAGFVWVFGCLHVIGVWGLPLASVLFFLLPLFGVPPLLLNPPPVFLYLLVGKNGAT

SEQ ID NO: 308076 - protein, 210 aa, Zea mays
  unsure (1)..(210): unsure at all Xaa locations
  Clone ID: MRT4577_44033C.1.pep
FGAVLIQEGHPIAFFSRPVAPRHQALAAYERELIGLVQAVCHWRPYLXGRRFTVKTDHYNLKYLLDLCLATIPXHHWVGKLLGFDFSVEYKPGATNAVADTLSRRDTVEGELLALSVLRFDFIDELRQAEQDHPSLVALRGEITAGTRXRLYIPADFPLLQEIVGAIHEDGHEGVKRTFHRLCRDFHFHNMKQVVQEQVRMCEVCQRYKS

SEQ ID NO: 308077 - protein, 143 aa, Zea mays
  unsure (1)..(143): unsure at all Xaa locations
  Clone ID: MRT4577_44034C.1.pep
MKDKDNASFNDEDRLRAGVXAAVKRKIAASSCKTKRPPSVFFIFMXSEFRQEYQAHHPDILNVVLANNEAWVKWRSMSEQXKQPYALPAVYKNDDYDNTKATIEKESTSSKNAMTDDDDGSKSHVHDEXDGHTDHDITPRTTK

SEQ ID NO: 308078 - protein, 84 aa, Zea mays
  Clone ID: MRT4577_44035C.1.pep
DLSIHVSVHLSILDPMVRRNRNAVTELCMLHIRHGHGRKRCCVCDLHRISAGKSARDGHMTQSEPFQVMKSAYSGNPFVVGTTL

SEQ ID NO: 308079 - protein, 204 aa, Zea mays
  Clone ID: MRT4577_44036C.1.pep
PTPRSTRCSRRATRPRGAPASTTTTSTPWSAAAPTAMPPTSVMTRLILIMVWRKLIRNPNTYSSLIGVIWSLVCFRWNFQMPAIVLQSISILSDAGLGMAMFSLGLFMALQPRIIACGNKVAAFAMGVRFVAGPAVMAAASIAVGLRGVLLHIAIVQAALPQGIVPFVFAKEYGVHPDILSTAVIFGMLIALPITLVYYILLGL

SEQ ID NO: 308080 - protein, 580 aa, Zea mays
  unsure (1)..(580): unsure at all Xaa locations
  Clone ID: MRT4577_44037C.1.pep
MITALDLYHVLTAVVPLYVAMTLAYGSVRWWRIFTPDQCSGINRFVALFAVPLLSFHFIXTNDPFAMNLRFLAADTLQKVAVLALLAXXXXXXXXXXXXXXXWSITXXXXXXXXXTLVMGIPLLRGMYGASSAGTLMVQXXXXXXXXXXXXXXXXXXXXXXXXXXXXXXXXXXXXXXXXXXXXXXXXXLAXXXVELEAEPXXXXXXXXXXXXXXXXXXXXXTVRKSTSSRSEAACSHSHSQTMQPRVSNLSGVEIYSLQSXXXXXXXXXSFNHADFFNIVGAAXXXXXXXXXXXXXXXXXXXXXXXXPQPQAVAVPAKRKDLHMLVWSSSASPVSERAAVHVFGAGGADHADVLAKGAQAYDEYGRDDYSSRTKNGXXXXXXXXXXLSKLGSNSTAQLXXXXXXXXXXXXXXXPPASVMTRLILIMVWRKLIRNPNTYSSLIGVVWSLVSYRWGIEMPAIIARSISILSDAGLGMAMFSLGLFMALQPRIIACGNKLAAIAMGVRFVAGPAVMAAASIAVGLRGVLLHIAIVQAALPQGIVPFVFAKEYGVHPDILSTAYGPITSHGFITCHDDDALNSL

SEQ ID NO: 308081 - protein, 92 aa, Zea mays
  Clone ID: MRT4577_44038C.1.pep
MAASSLCHGHLLLFLLVSVTSACLGTAAAHQAGSGEGYTIAGRVKIDGMSEKGYGLPAKTSNTKVILNGGQRVTFARPDGYFALYPTNDSLP

SEQ ID NO: 308082 - protein, 72 aa, Zea mays
  Clone ID: MRT4577_44039C.1.pep
IKQANQSKIMLFKTQEVCAYNFCMLTEQRGQSQEAGSLSSPSEMAHCHNFAMLGIIEVFIDFSASKLEKASG

SEQ ID NO: 308083 - protein, 196 aa, Zea mays
  Clone ID: MRT4577_4403C.1.pep
MAASALHQTTSFLGQALVARAAGVDAGGRITMRRTVKSVPQSIWYGPDRPKYLGPFSEQTPSYLTGEFPGDYGWDTAGLSADPETFARNRELEVIHSRWAMLGALGCVFPEILAKNDKVYPGGAFDPLGLADDPDTAAELKVKELKNGRLAMFSMFGFFVQAIVTGKGPIENLFDHVADPVANNAWAYATNFVPGN

SEQ ID NO: 308084 - protein, 124 aa, Zea mays
  unsure (1)..(124): unsure at all Xaa locations
  Clone ID: MRT4577_44040C.1.pep
MGEGQLVFMHTVSKGYWXKXGQRGGYXETTYLTRTTVDEIYMWAXLVLEPDVPGHIFMXRRLTLLHTKISYXKVTALGWLILETSKRRALMMTDCFNRXKNVVRASTNGVLYCVAKIQLSPRPI

SEQ ID NO: 308085 - protein, 66 aa, Zea mays
  Clone ID: MRT4577_44041C.1.pep
HVLMPQMLCPNITSSLDYAEQHVTNGVPQHDVANYNHANVSNPLSVMLLAYNSCSCMGPAVPLEPS

SEQ ID NO: 308086 - protein, 50 aa, Zea mays
  unsure (1)..(50): unsure at all Xaa locations
  Clone ID: MRT4577_44042C.1.pep
TGRGXRRMGWVSQLPIFSSTYLASITTMTVADKSTLTMRTSKKKATLSHI

SEQ ID NO: 308087 - protein, 81 aa, Zea mays
  Clone ID: MRT4577_44043C.1.pep
KVKRPYCRIQINEGRGFHSLSCLIPTASYTKKAVVLHFTEGQNPFYTNLRSRVNITILDSAGKSTKTIARLNSKMQKALKA

SEQ ID NO: 308088 - protein, 120 aa, Zea mays
  Clone ID: MRT4577_44044C.1.pep
NGPPNQLVRRAPRPGPSASSTDGARAAKRGRLRSCASPCPLASRSLPLSPQNLNPRAAGRRDPWSRAGCSAAVCLSSPRPRRCPRPSPCLAVFPETPTAPPSARLPCSVAVRRPLAHRRS

SEQ ID NO: 308089 - protein, 103 aa, Zea mays
  Clone ID: MRT4577_44046C.1.pep
VGAHAPSRQGSEGRTPVLPAPPRGRLDAGEPRRPCPRAGHARAAAPAPRAYARPRAMGCRSVPSRRGAGGRSPVQPTPQPGRRATEQTSRCLSRAGRVPRAWV

SEQ ID NO: 308090 - protein, 64 aa, Zea mays
  Clone ID: MRT4577_44047C.1.pep
MDYSNLRRQAASMKKTLFDQGYLDEQFCQVEDLQDEASPNFAEEVVTLFFKDSARLISNAEQAL

SEQ ID NO: 308091 - protein, 123 aa, Zea mays
  unsure (1)..(123): unsure at all Xaa locations
  Clone ID: MRT4577_44048C.1.pep
GKTGPFNPPGPRGFPVPPGPDGMTETIAVPGTPSVDHGFLVTRHCQTTYDPQCPSATKILVPGNFMLYVQWNQRAHGHDLGTVGNCLRKFXSMPLLFCNINNVLNFMFFNDYFYXCTPPEPMP

SEQ ID NO: 308092 - protein, 52 aa, Zea mays
  Clone ID: MRT4577_44049C.1.pep
MSRNENSHRLLPWIVLACSCMRSFQKVKREHGALRQKLEAYFQVIIRHTSHP

SEQ ID NO: 308093 - protein, 260 aa, Zea mays
  Clone ID: MRT4577_4404C.1.pep
MAASALHQTTSFLGQALVSRAAGVDAGGRITMRRTVKSVPQSIWYGPDRPKYLGPFSEQTPSYLTGEFPGDYGWDTAGLSADPETFARNRELEVIHSRWAMLGALGCVFPEILAKNGVKFGEAVWFKAGAQIFSEGGLDYLGNPNLVHAQSILAIWACQVVLMGFVEGYRVGGGPLGEGLDKVYPGGAFDPLGLADDPDTAAELKVKELKNGRLAMFSMFGFFVQAIVTGKGPIENLFDHVADPVANNAWAYATNFVPGN

SEQ ID NO: 308094 - protein, 72 aa, Zea mays
  Clone ID: MRT4577_44050C.1.pep
EIYRRTFREDGCMFYDEFFGSDCASMLRVGLIRSMMGLLCEVGLLRRVHRNACIAGIRRESAELESAECTAA

SEQ ID NO: 308095 - protein, 105 aa, Zea mays
  Clone ID: MRT4577_44051C.1.pep
GLQAPPARLRVLVNFLGRVCRADQRSSSPLSPSPTLPCCSLVVVHSYFPPAYAHSVLARVVVFNLSNSFDMRLTMLRLLVISPIWVMWADDLNTYQMFDDKPKPG

SEQ ID NO: 308096 - protein, 74 aa, Zea mays
  Clone ID: MRT4577_44052C.1.pep
ERFPAFVNKTLIPPPNVLRTPPGGFSGCPPGVWGGKNLFFFPVRGAVLFWGIQKNPDYGGVGTSYNMPLKFCFP

SEQ ID NO: 308097 - protein, 50 aa, Zea mays
  unsure (1)..(50): unsure at all Xaa locations
  Clone ID: MRT4577_44053C.1.pep
GGLIGXXXXLWNGSVVFXDFAPLRMFIRFYRXFVLVLNKALAAGEHVEVF

SEQ ID NO: 308098 - protein, 132 aa, Zea mays
  unsure (1)..(132): unsure at all Xaa locations
  Clone ID: MRT4577_44054C.1.pep
GCAHPSPISHPLRQQCSQQQMRMMXVQSXVAQQLQMMTQLERPXPPSSSLYDHALMQQQQQLLAAQGLPPMPMMMAQHIRPMGGLSQSHXPTSRPPPCGVSRCPFPPLTTDLSDIWEISSTHLSLSIYPPPP

SEQ ID NO: 308099 - protein, 113 aa, Zea mays
  Clone ID: MRT4577_44055C.1.pep
FWPKAISIGPPPGDADPPWKVGAPPPQVGGFAPPPAPDISPNPGRTAPMYVGCPKKKIGDPTQKFGQGPPEPNRRENPKTPLFGPHPRPHWLADVPLRNGPPQKTPPPPLNHL

SEQ ID NO: 308100 - protein, 165 aa, Zea mays
  unsure (1)..(165): unsure at all Xaa locations
  Clone ID: MRT4577_44056C.1.pep
SGSTTPTPDPFPLRRLAERAEEEERYEERVEVMKKADEMVEWEEYTXEEGKMMCEAXKNDKGGRRVRMXEIVXAIEHKEEVRGNEDXVRDSKDYRRKDEIELXRMWEDIVKMHETHQESSSIAPESKEFYKKKKGEKYRYEAEIKNGAERKDIAENEKRRYEDEK

SEQ ID NO: 308101 - protein, 51 aa, Zea mays
  Clone ID: MRT4577_44057C.1.pep
TRFCRNILRFYFLTTTSLLTDDVLTRISAHMLQYSQNTSYFADHDDYEAGL

SEQ ID NO: 308102 - protein, 80 aa, Zea mays
  Clone ID: MRT4577_44058C.1.pep
SAHVQDPVCYQRDRSLPTYSGSTPMAFGRRPSLVLGMLRINGSGALGRWIHAGFGHAVFLCLTYLLSSCNEFASSSSFAL

SEQ ID NO: 308103 - protein, 45 aa, Zea mays
  Clone ID: MRT4577_44059C.1.pep
QPNWPYNTESCLKTSRRAYLQTNPSRNSTTQYTRVTHTDLVCLTN

SEQ ID NO: 308104 - protein, 97 aa, Zea mays
  Clone ID: MRT4577_4405C.1.pep
QTEVVKLDFTVAASPRRFSLASRISFPALTAIEYRCRKRESASRSLGERSRTRKDPVGGKGSCLLETLPCSAGHICFVRRDSPFKIYIKKNVPAGLE

SEQ ID NO: 308105 - protein, 63 aa, Zea mays
  Clone ID: MRT4577_44060C.1.pep
TNIQTLNNIHNYTIYVYYTSPSGTRHRGAQGRSDIHHPQTTRLTSIGILAPTPSSMIRSFSLT

SEQ ID NO: 308106 - protein, 60 aa, Zea mays
  Clone ID: MRT4577_44061C.1.pep
LVRVARIMNQLSNHSLSLVAVEVHETHKRFEVLTAGLKAHNYAMCHQLLHLLLEQIYCAT

SEQ ID NO: 308107 - protein, 364 aa, Zea mays
  Clone ID: MRT4577_44062C.1.pep
MAQARVRLTPAGRTPAATFLSGSNPRPAHLTFFPKLTPTSLSAAAAANAPPPHIVVVGSANADIYVEVDRLPLIGETVAARAGRSLAGGKGANQAACGGRLALGPTYLVARVGDDANGRLLEGALADAGGVRTDRVARAADAPSGHAVVMLMPDGQNSIIIVGGANMEGWAAGIGSEDLELIRKAGVLLLQREIPDWVNAQAAQAAKSAGVPVIMDAGGMDTPLPRELLSLVDIFSPNETELARLTGMPTETFEQISMAAGKCHKMGVQEVLVKLGSQGSALFVEGEEPIRQPIVPATEVIDTTGAGDTFTSAFAVALVEGKPKRECMRFAAAAASLCVRVKGAIPSMPDRKSVMKLLESVGVE

SEQ ID NO: 308108 - protein, 61 aa, Zea mays
  unsure (1)..(61): unsure at all Xaa locations
  Clone ID: MRT4577_44063C.1.pep
MSEDKHHHFFIHHNYDXEQPAGEYRFSETEVVTDTGEGECNKYKNDEKEHKHNQHLGVAGA

SEQ ID NO: 308109 - protein, 37 aa, Zea mays
  Clone ID: MRT4577_44064C.1.pep
HKHEEQNDSTASIILTFGNKWNTANNRGNQQNHSERV

SEQ ID NO: 308110 - protein, 94 aa, Zea mays
  Clone ID: MRT4577_44065C.1.pep
ITGMVGSLLGSVSHFVYTRPASQAWQYFRRCKPGTNSDMTISCPSQTLSNASSQSSRSGLTLLTKLCILTLVVGSTHISIFYSVFKSNQIYTIK

SEQ ID NO: 308111 - protein, 55 aa, Zea mays
  Clone ID: MRT4577_44066C.1.pep
SSTASAFFFFFFSSKGFLSVEYKKGGGHQFLVTDLHNVYSQKFTYNTRIIGEVTN

SEQ ID NO: 308112 - protein, 58 aa, Zea mays
  Clone ID: MRT4577_44067C.1.pep
KINRSRGDHTRGRPHTSSSLPSVRVLGVRMRGGCSGGGGHRCLGDVVGSRERCSTECG

SEQ ID NO: 308113 - protein, 186 aa, Zea mays
  unsure (1)..(186): unsure at all Xaa locations
  Clone ID: MRT4577_44068C.1.pep
RPRVRLSQHDNEIEVDIYSFDVETLWELDRFVTNYRKSITKNKRKAELSAVRPDEADPDQEPEKVEHVRQGKADQDQIPAVQEPIPEPETVDVDPPKESAAXIMRDVWVNHHLVIWKIRRERMLVDQVVLEALAVTRVHPLVIRTQIVHQQMVLMLGNHPERSIYKPDVDGGTGNHNTLVQERILA

SEQ ID NO: 308114 - protein, 69 aa, Zea mays
  unsure (1)..(69): unsure at all Xaa locations
  Clone ID: MRT4577_44069C.1.pep
KHKRLLGXVILFKVSILYKPLSMMFKVPMLIDFDNKRAYFQPRFRHLHDQFLTAPVHISXIRRAYVLDD

SEQ ID NO: 308115 - protein, 61 aa, Zea mays
  Clone ID: MRT4577_4406C.1.pep
MAAELKVKELKNGRLAMFSMFGFFVQAIVTGKGPIENLFDHVADPVANNAWAYATNFVPGN

SEQ ID NO: 308116 - protein, 435 aa, Zea mays
  Clone ID: MRT4577_44070C.1.pep
MYSNFKEQAIEYVKQAVQEDNAGNYVKAFPLYMNALEYFKTHLKYEKNPKIKEAITAKFTEYLRRAEEIRAVLDEGGAGPGANGGDAAVATRPKTKGKDGDGGNGGDDSEQSKLRAGLNSAIITEKPNIKWNDVAGLESAKQALQEAVILPVKFPQFFTGKRRPWRAFLLYGPPGTGKSYLAKAVATEADSTFFSISSSDLVSKWMGESEKLVANLFQMARENAPSIIFIDEIDSLCGQRGEGNESEASRRIKTELLVQMQGVGHNDDKVLVLAATNTPYALDQAVRRRFDKRIYIPLPDMKARQHMFKVHLGDTPHSLTESDFESLARRTDGFSGSDVAVCVKDVLFEPVRKTQDAMFFFKADGDMWMPCGPKQPGAVQTTMQELASKGLAAKILPPPISRADFEKVLSRQRPTVSKKDLEVHERFTKEFGEEG

SEQ ID NO: 308117 - protein, 63 aa, Zea mays
  unsure (1)..(63): unsure at all Xaa locations
  Clone ID: MRT4577_44071C.1.pep
GSGSIMFCTPRCSPLYSPVSAALPDPGRGSSAQTMAGWQAAASLGCLHGSRPPMTXCRWTPGF

SEQ ID NO: 308118 - protein, 435 aa, Zea mays
  Clone ID: MRT4577_44072C.1.pep
MYSNFKEQAIEYVKQAVQEDNAGNYVKAFPLYMNALEYFKTHLKYEKNPKIKEAITAKFTEYLRRAEEIRAVLDEGGAGPGANGGDAAVATRPKTKGKDGDGGNGGDDSEQSKLRAGLNSAIITEKPNIKWNDVAGLESAKQALQEAVILPVKFPQFFTGKRRPWRAFLLYGPPGTGKSYLAKAVATEADSTFFSISSSDLVSKWMGESEKLVANLFQMARENAPSIIFIDEIDSLCGQRGEGNESEASRRIKTELLVQMQGVGHNDDKVLVLAATNTPYALDQAVRRRFDKRIYIPLPDTKARQHMFKVHLGDTPHSLTESDFESLARRTDGFSGSDVAVCVKDVLFEPVRKTQDAMFFFKADGDMWMPCGPKQPGAVQTTMQELASKGLAAKILPPPISRTDFEKVLSRQRPTVSKKDLEVHERFTKEFGEEG

SEQ ID NO: 308119 - protein, 75 aa, Zea mays
  Clone ID: MRT4577_44073C.1.pep
MAGKGDGPAIGIDLGTTYSCVGVWQHDRVQIIANDQGNRTTPWCVSFTDYERLMQRCAARTRSGVNPIDTGVLMP

SEQ ID NO: 308120 - protein, 236 aa, Zea mays
  unsure (1)..(236): unsure at all Xaa locations
  Clone ID: MRT4577_44074C.1.pep
KDHYYNSTLRTFAXXTPFXVPGRGNPSPLTLAPCISSHSTTLHFYITPELVVIYRDTMLATACCSLISIQQQGKLENKPPFRPAPGTGVASGLLLVCGCASAVCPRFSFCRCWHGLVGRLRRCRCWLRLEVLLRRLLGVVHLVLYQVWEGEGVASHFPFMAPSWSSGMLSKGGEMTGASLAFASASVLAPAARMAAPTAIGDCRRTRSLFLSSGTRILKKQKALETENSGNREPGR

SEQ ID NO: 308121 - protein, 81 aa, Zea mays
  unsure (1)..(81): unsure at all Xaa locations
  Clone ID: MRT4577_44075C.1.pep
KKNLVLKTPFFLRREHVCQLPRLSAQAQRPENTTQHLPFYSSAPCLEKXNGNLYKRTMHPFLFLERPARPGIGPGTAGVPA

SEQ ID NO: 308122 - protein, 142 aa, Zea mays
  Clone ID: MRT4577_44076C.1.pep
MSSGSAVTGGGAEQAAAVPLGQKLIVHVAENGHTLEFQCGGDTLVEAIQHSIQLHCEIPPADQLLLCGNISLDGANALATYKLPRDDREVFLYNKARLLADSRPPAPESLYIPEPNIPPPPRPQGSPPSDASADPALKALVS

SEQ ID NO: 308123 - protein, 120 aa, Zea mays
  Clone ID: MRT4577_44077C.1.pep
MRGGRSDEFCRCQACLGKYTLLGDEENPRLSTYDRRLPCCGCGIGWSCFLLGFLCPIIWYVAALLYCCKYYNRDPRERTGLAASAVLAVIITAVTIVTLSVLLICCVNKRFLNSCAVWPK

SEQ ID NO: 308124 - protein, 59 aa, Zea mays
  Clone ID: MRT4577_44078C.1.pep
VIDMIMLRRELAFGSSSQTLDLATRELHFKGCLGKYTPFGNSLPYKGFHDAFRSWPLRV

SEQ ID NO: 308125 - protein, 59 aa, Zea mays
  Clone ID: MRT4577_44079C.1.pep
VSLTFKIFVYSFQCRYSRLFRQHSSRVVATKYGKINNFYVDAAQLQVMSERIPYLFSKY

SEQ ID NO: 308126 - protein, 387 aa, Zea mays
  Clone ID: MRT4577_4407C.1.pep
MPRLLLVVVAIFVSISAVAAAVINVKNYGAHGNGVNDDTKPLMAAWKAACGSAGAATMVVPPGTYYIGPVQFHGPCKASTLTFQLQGTLKAATDLKRFGNDWIEFGWVNGLTVAGGVIDGQGAASWPFNKCPIRKDCKVLPTSVLFVNNQNTVVRDVTSVNPKFFHMALLSVKNIRMSGLKISAPSNSPNTDGIHIERSSGISIMDTHISTGDDCISIGQGNDNVDVARVQCGPGHGMSVGSLGRYSGEGDVTRVHVRDMTFTGTMNGVRIKTWENSPSKSNAAHMVFENMVMRDVQNPIIIDQKYCPYYNCEHKYVSGVTLNDIHFKNIKGTATTPVAVLLRCGVPCRGLVLQDVDLRYKGQGGTSAKCENAKAKYLGYQFPKPCP

SEQ ID NO: 308127 - protein, 124 aa, Zea mays
  unsure (1)..(124): unsure at all Xaa locations
  Clone ID: MRT4577_44080C.1.pep
PAGPKVCIELAALASIRCSGSEIILHTTDPSRPHQRFRMANDSQAVAMPSSSRLHGGRHRAEPPSHPPAPSEPRDWTALPQDILITVFLKLGPREIMLGAEFVCTTWRRVXAGEALLGSRTDMT

SEQ ID NO: 308128 - protein, 74 aa, Zea mays
  Clone ID: MRT4577_44081C.1.pep
SNAPLSRPFLGITIPFFFVPPPPALFWLCALDPVFELSRLPTSNVFLHPCALFKIPPASLLLCKETTTKIKLFI

SEQ ID NO: 308129 - protein, 154 aa, Zea mays
  Clone ID: MRT4577_44082C.1.pep
VLYNYSGIILTFSKLCPLYNYSGIRFHYTYTGGSMKTTVYFSVLLLNHFVKHVHCKLLSPFFHSFTPIGHKKRNRSYKNTAGSTAASASAKTSPATAPGRRPRTRRHQAQPSAPSAHVCSSALETSWSPPSAIQLHQRQSCPIRGVARGYGGRS

SEQ ID NO: 308130 - protein, 63 aa, Zea mays
  Clone ID: MRT4577_44083C.1.pep
QRPNPPQQCGACPPHPTKIFLAPPMPLGGFPFKKLCLPTRYPPIRVLTNKGPTIIVFELKIFE

SEQ ID NO: 308131 - protein, 63 aa, Zea mays
  Clone ID: MRT4577_44084C.1.pep
NSCIGKTLAYPNLLAWKKIPFYLAGYLKKRPQGFAFSKIFQFILKIGTPLLSYNKTRRLWWFP

SEQ ID NO: 308132 - protein, 271 aa, Zea mays
  unsure (1)..(271): unsure at all Xaa locations
  Clone ID: MRT4577_44085C.1.pep
AENPLIIVEDPSSSQLCGAKCFSESTGEMRQSSKKSRRYSEIPQDLYARIPDNAASSKDNSKATDVFNPGTPNHLLPVLGLCAPNADQVNSYKNSICAPSIKEHKRASGDVVNKQLSTPADHSNELRNEVQSASDKVIFPGASEEALRRISNMIPDNYFPFSHIPPIXGRGXVDPVEYIGASNASFQGKLGLPNFSLEDNTPLKHIKPIPDIFPYLSLGAHKDYFRNXVPELPDXSLLPNFMADIAGTSKQNHSCLVHLLGWGLSPGHQSI

SEQ ID NO: 308133 - protein, 73 aa, Zea mays
  Clone ID: MRT4577_44086C.1.pep
NEIDDLVILYYTRADDSIYCCGPSSNTKFKSVPHICGYGPTLTNCTHKNSRKERVGNFILWLGLFGEGTRLLG

SEQ ID NO: 308134 - protein, 71 aa, Zea mays
  Clone ID: MRT4577_44087C.1.pep
GQTKNNLLRLPFQHQKGHPHPKNFGAQNKLNHYFYSIQKKNLRFLILFNRQKTPLKPNIPLPYQQKILLAK

SEQ ID NO: 308135 - protein, 47 aa, Zea mays
  Clone ID: MRT4577_44088C.1.pep
VKIYRYMIMEECGRGSIAVVGNVLRCEFSPILLKAPFCDHRPSLDVI

SEQ ID NO: 308136 - protein, 68 aa, Zea mays
  Clone ID: MRT4577_44089C.1.pep
KGNGTRNRMNQHACGHKYMSSEMTPNMHRERSQLNNLVSPYLSYTTHGWCMAYSSALFISGEPRTQAC

SEQ ID NO: 308137 - protein, 101 aa, Zea mays
  unsure (1)..(101): unsure at all Xaa locations
  Clone ID: MRT4577_4408C.1.pep
PGDYGWDTAGLSADPXTFARNRELEVIHSRWAMLGALGCVFPEILAKNGVKNGRLAMFSMFGFFVQAIVTGKGPIENLFDHVADPVANNAWAYATNFVPGN

SEQ ID NO: 308138 - protein, 171 aa, Zea mays
  unsure (1)..(171): unsure at all Xaa locations
  Clone ID: MRT4577_44090C.1.pep
EIWGKSRHPNVELRAFCSKHSAVGYTSSVEXSXLASELNPRKSGPDNTTLNSGKIPILRFTRKNKDKFTNCGTSTSSSGNLIRVKTIEQGALANTVRNANTQPIQIWERGTGHPSVGGDHMGSSGDIAVVLRKLIDSGKISVSDIASEVGISSESLEAALVGETTTFSHGL

SEQ ID NO: 308139 - protein, 76 aa, Zea mays
  unsure (1)..(76): unsure at all Xaa locations
  Clone ID: MRT4577_44091C.1.pep
LEFFLAWSRKKSLFVXGXWXVFSLGRSLPXDLXXIXNLSXXLTAPRDATGSVLVVFXTLPFVGGQRIWARSVGVDA

SEQ ID NO: 308140 - protein, 50 aa, Zea mays
  Clone ID: MRT4577_44092C.1.pep
NTYNALCTTYMHTYLDPHHINCRHHIAFTHLHYLKGTNGFSYAGSHYSLT

SEQ ID NO: 308141 - protein, 123 aa, Zea mays
  Clone ID: MRT4577_44093C.1.pep
AAFFFFFFFFFFFFFFFLKKKPRLTETPTQGNFLQSEKTVILANVFNTLQIYFIRNQLDTKPGGGPQTLAVENPANKAIGRQLCPFLNAYPLKLHNNVGGHHGLSAPSTLIPNKVALKMRNLF

SEQ ID NO: 308142 - protein, 109 aa, Zea mays
  Clone ID: MRT4577_44094C.1.pep
MDDDDLLDRGLEHGVELAVEDEKVKQGKWDNLSHGSMPPADLQDTNQAMENGHHAKQGVPTTAEDMGFPDSKEHHPPAFHRQTDVPEHKAQQLDHTLKHQKGQDHSQIL

SEQ ID NO: 308143 - protein, 76 aa, Zea mays
  unsure (1)..(76): unsure at all Xaa locations
  Clone ID: MRT4577_44095C.1.pep
KKHWNPPFTISKVFFFIFSLLNYPNPNNPFFPXIAPIYKTDRPXYKAPAPNWTQKYPIELNFWRYWLKSNHFGFSH

SEQ ID NO: 308144 - protein, 153 aa, Zea mays
  unsure (1)..(153): unsure at all Xaa locations
  Clone ID: MRT4577_44096C.1.pep
HSPRPAPLQPQSQQQLHHRRSVGSQKLPWTRTTRRSRPPQPPSPSSSSSSSSSSSXSPKKRARRDGGRHPTYRGVRMRSWGKWVSEIREPRKKSRIWLGTFATAEMAARAHDVAALAIKGARDAHLNFPGLARLLPRPATAAPRDVQAAAALA

SEQ ID NO: 308145 - protein, 165 aa, Zea mays
  unsure (1)..(165): unsure at all Xaa locations
  Clone ID: MRT4577_44097C.1.pep
RCTDQSVGVAYQLQHLASIIEVLDPKLHDHLXMMWALEYDPDIFFAACEEQGAVYKNKVSKSKLKGLRHFGKWDNSKDKDKDKDKDKDKNGAEDGEDGPVPISVFMVASVLKEKREKLLQEARGLDDLIRILNDVNGNLDAKKACAGALKLHKKYLKKVQQAKKP

SEQ ID NO: 308146 - protein, 79 aa, Zea mays
  Clone ID: MRT4577_44098C.1.pep
SRGASKSPRFKKSQKRLRCPSPKRPKKRVFLKRVPKPPSWGGGVPNLKKKKRVFPNPNKTPLCRPWVNLVFSLKVTGTF

SEQ ID NO: 308147 - protein, 89 aa, Zea mays
  Clone ID: MRT4577_44099C.1.pep
SLKKASNVMCSHPWPSINTVSTPTLFIYDMITAKPRECTHTHTYIYVCQGICIAQAQSHGYTYKATQAPNSLRILSPVNPALVKSSLHS

SEQ ID NO: 308148 - protein, 182 aa, Zea mays
  Clone ID: MRT4577_4409C.1.pep
MRRTVKSVPQSIWYGPDRPKYLGPFSEQTPSYLTGEFPGDYGWDTAGLSADPQIFSEGGLDYLGNPNLVHAQSILAIWACQVVLMGFVEGYRVGGGPLGEGLDKVYPGGAFDPLGLADDPDTAAELKVKELKNGRLAMFSMFGFFVQAIVTGKGPIENLFDHVADPVANNAWAYATNFVPGN

SEQ ID NO: 308149 - protein, 83 aa, Zea mays
  Clone ID: MRT4577_440C.1.pep
CSSHYLECSHRGFPRDNMQDGLWKSASLGISLCFHWTWSSSCRSLLGRDRSWGRKQWRMGVIRGGGGAVKGETRGWRTKRGVP

SEQ ID NO: 308150 - protein, 55 aa, Zea mays
  unsure (1)..(55): unsure at all Xaa locations
  Clone ID: MRT4577_44100C.1.pep
NSFLSAVSKLFILCGKCVYFCSGCSHXPRYRNQIQVSVSRGRXQDLNLDTRSCVV

SEQ ID NO: 308151 - protein, 44 aa, Zea mays
  unsure (1)..(44): unsure at all Xaa locations
  Clone ID: MRT4577_44101C.1.pep
LSLWWSSSIVQSLQLIQLVVQSQMIVDVASKQKRRMLLRPXTRS

SEQ ID NO: 308152 - protein, 97 aa, Zea mays
  Clone ID: MRT4577_44102C.1.pep
ILIELLRDLGGGGGGGSALTARAFPGKLVPSFTQLTQSVNVGFSNVTTSCFTGICGVSTVRINPIRGSPGEARPAAGRIASLTPRSTRSQFSSISIQ

SEQ ID NO: 308153 - protein, 72 aa, Zea mays
  Clone ID: MRT4577_44103C.1.pep
RAWLSNIQSASVPMKMTDLTHFASGADPCPSGWNIAAAPLVNLGCALNSVDNESFDFLISVSLAFDQEWIPM

SEQ ID NO: 308154 - protein, 103 aa, Zea mays
  unsure (1)..(103): unsure at all Xaa locations
  Clone ID: MRT4577_44104C.1.pep
QLFPFSQRDSAYFHKQQFFPFNQLAALNPPAYFPHQKLLPFGQPVNTSPPSLLEPQPLLSFLQQFVVYPPALLXLFQLVPFYHHDFEKPAAFCXQEFVGGALF

SEQ ID NO: 308155 - protein, 148 aa, Zea mays
  unsure (1)..(148): unsure at all Xaa locations
  Clone ID: MRT4577_44105C.1.pep
MEDVAKFLFGISGNVIALFLFLSPVPTFWRIIRNKSTEEFSGVPYNMTLLNCLLSAWYGLPFVSPNNVLVSTINGVGAVIETVYVVIFLVFASNKKARLRTLGLASAVAGVFAVVALVSMLALHXPARKLLAGLAMTVFSICMYASPL

SEQ ID NO: 308156 - protein, 170 aa, Zea mays
  Clone ID: MRT4577_44106C.1.pep
MDMEKALALVLLVSAAILLGAHQPTSAQVFCRSQFNLANEACSMRNFIPGPGVRRGGLPRQQQLNETTSPSTATTASAVSQVLQSRSDDDDDSHGGRRSRRRHQHRHSEDGEGEDPRDTACCRRLMGLDNSCVCQATARLPPFMISVRHVITLTPVEGCEISFECPGPLF

SEQ ID NO: 308157 - protein, 163 aa, Zea mays
  Clone ID: MRT4577_44107C.1.pep
MEVNVLSSRLVKPAYTAGEAPMPATEYIPLSMFDRVTFEMQMAIIYAFAPPAPTTASIEKGLATVLAQYRAFAGQLGESPDGTPSVILNDRGARLVEATVDADLVDMAPSKPTPELLKLHPDLEAEHQEVVLLQLTRFRCGSLAVGFTSNHVVADGHATSNFL

SEQ ID NO: 308158 - protein, 59 aa, Zea mays
  Clone ID: MRT4577_44108C.1.pep
YIDRWTIGHMISPTITTNSTDLCNNYKAIWIIPDIGHIILDVIFLPYLIDIHIVTVISI

SEQ ID NO: 308159 - protein, 48 aa, Zea mays
  Clone ID: MRT4577_44109C.1.pep
FSGKNMEEVYRFYIAHADHYFIFDTNPGDAGIYGHTQYLLWGARPPST

SEQ ID NO: 308160 - protein, 202 aa, Zea mays
  Clone ID: MRT4577_4410C.1.pep
RRTGEAKQTPGSTHTKLMIQACGHGLGPWQRGRADAGGGARAGMERAVEWTSGASDRRERAQPSTSEEKPRFCEGRVLSALTVIAHRPPNRDLSGGHATHAVQLASSRGLCGCFMCNILAAAGGPVAQSPAGRGIKTTSTRPAVRSGTRRGAPLSLPLLPVGQSPTSSGVRGAGLHGDHCDERRATCHPQRLRRRRRPARHN

SEQ ID NO: 308161 - protein, 632 aa, Zea mays
  Clone ID: MRT4577_44110C.1.pep
MLDHLAIIASELGDDATDFEVDGIDNLSENDVSDEEIDADELARRMWKDKVKLKRIRERQQKLALQRLELEKTKTKKISDQALRKKMTRAQDGILKYMLKLMEVCNARGFVYGIIPEKGKPVSGASDNIRAWWKDKVKFDKNGPAAIVKYELENSMLSNPKGGGAMDQHSLMDLQDGTLGSLLSALMQHCSPQQRSYPLDKGVPPPWWPTGNESWWPALGLPKGEAPPYRKPHDLKKVWKVGVLTGVIKHMAPNFDKIRNRVRKSKCLQDKMTAKESLIWLGVLQREEKSVHGFGSALLQNARHSSTSEDRNEGIYSSSDEYDVDRLEQPPRSTSSKEDEGDAHPVLQIRGEQTSTRGTNKRRRHDTSSNQLAISKEEMSKSKSQQRKGPSTRPPVAEVEVEVTQRNDKTPEVVCSAAGGDMNFIDPIDAVGITNLPMSPKHVPPTIGALQQHGDCRGNFLSPAAAINYNSSNSNQAASAAQSNTYLGGHPLACEGSDIANSWSGHSFQQDVGLGPPIGFDPSPVAHQGSAVQQPLPLPLPLPMDHQAPITGSGALATNGSYSLPTAGGVSSGTIVSETHQQLMDNPFFGDAGDSSFGGLPFSLLPFSSPMLNFDELDELVDDDDLMQYLGT

SEQ ID NO: 308162 - protein, 151 aa, Zea mays
  Clone ID: MRT4577_44111C.1.pep
YPVQSREHPKLHYLLLLYYKSNGLLRTVPQMNGSRAAATSTSRRSISMLPNSPRNSLTGCTEHKPPIHATVTRHALDTLCYVPRYCIKSSSSTNSSNSSKLSIGLLKGRRLKGRPPKELSPASPKKGSSMSCWWVSQTIVSELTPPAVGRL

SEQ ID NO: 308163 - protein, 191 aa, Zea mays
  Clone ID: MRT4577_44112C.1.pep
IIEAGRDPRSAARIPQPRIPPALPPRPPAAAPAAPPPLLPSPAPLAAPRSPSSAGFHPCLPACPAPPFLARRETDRRDRHKSRGEMAAVPRSPSRAPLPHGPIGVAPPALAALGASSQWLSGSRASKCGSSPTFSRSFFSSHLGGLRLATDLLLGLVGAAAVGATCGMQKNQRLGWCWYQRRRRRRRVLER

SEQ ID NO: 308164 - protein, 219 aa, Zea mays
  Clone ID: MRT4577_44113C.1.pep
TGKRTEEVQEKAKVLQTLKVNDWIESEKMRLGHLRDRARDMGRRKELRECVEKLKLLSTPGERARRLNEEPEIHADPAMDPYYESPEEQEQEIERSSFNKSRSSFLRKDGSLVSPGKGDGRNAAQRDPKTNWESNRNTRAESSSHMESPLSRRSTYSSQGESVGYTNKPEGLNIDAQTVRLEGTTRSAPQGSPGASSGSLATNIGSGAKTASQSAINES

SEQ ID NO: 308165 - protein, 58 aa, Zea mays
  Clone ID: MRT4577_44114C.1.pep
RPVSASYCRASPYAEPDDDDHTSGIAVACTYDDLCVACCSLTDDTCIVMSFGLYHPTG

SEQ ID NO: 308166 - protein, 85 aa, Zea mays
  unsure (1)..(85): unsure at all Xaa locations
  Clone ID: MRT4577_44115C.1.pep
MQTFVRTXLTGETITLQVESSDTIDSDNAKIEDTEGIPPDQQGLIFAGKQLEDGRTLADYIIQMESTLHLVLRLKGGMQIFVKTL

SEQ ID NO: 308167 - protein, 102 aa, Zea mays
  Clone ID: MRT4577_44116C.1.pep
LENPIQDIRYCPQDQKAGGGKKARDVGHEESFSMLGEWEEDDKRRQEGKKHERTLGKLSPAQWKKEVGPSRSTKRPNPGKLHWQELNANCRDRAIQSGRGWK

SEQ ID NO: 308168 - protein, 72 aa, Zea mays
  unsure (1)..(72): unsure at all Xaa locations
  Clone ID: MRT4577_44117C.1.pep
MDHAADAQRTDLMTITRHALNEQGRHPESRGDFTILLSHIVLGCKFVASAVNKEXLXKFIGIVGEGYGKRER

SEQ ID NO: 308169 - protein, 127 aa, Zea mays
  unsure (1)..(127): unsure at all Xaa locations
  Clone ID: MRT4577_44118C.1.pep
MAEEKHHHHHLLHHKKDEEQLAAGXXYGESRLYTEAMETXEVVSTGXNEYDEYKKEEKEHKHKHHLREAVAIDAGAFLLYEKHEDKNDPXHAHRHNIEDEVEDDDDVDFCGFDFHEHHKKNNDHNEA

SEQ ID NO: 308170 - protein, 68 aa, Zea mays
  unsure (1)..(68): unsure at all Xaa locations
  Clone ID: MRT4577_44119C.1.pep
LNLYYWFXANXPTPIYQSRSQPKVQPLRGDGSARVXSLTQRRTPHNNSKHTAGCNTNSVYRLDCNNFT

SEQ ID NO: 308171 - protein, 146 aa, Zea mays
  Clone ID: MRT4577_4411C.1.pep
YTCTALLSQLVAGDEVRGVCPGGLDYLGNPNLVHAQSILAIWACQVVLMGFVEGYRVGGGPLGEGLDKVYPGGAFDPLGLADDPDTAAELKVKELKNGRLAMFSMFGFFVQAIVTGKGPIENLFDHVADPVANNAWAYATNFVPGN

SEQ ID NO: 308172 - protein, 98 aa, Zea mays
  Clone ID: MRT4577_44120C.1.pep
TLSHLFSQPHSSRSPSHTAPSLSSTSRLRPPSLPSPSALSHHQRLPLSPRFSMSLYQQPPSALSLCRPLKQPTCRSPPPAVPPFAASQLPPWCRFHPP

SEQ ID NO: 308173 - protein, 47 aa, Zea mays
  Clone ID: MRT4577_44121C.1.pep
LTQAKQTQRGNFIGTGACQPTKAGPGSIAEALIRGQPILLNDITLGQ

SEQ ID NO: 308174 - protein, 169 aa, Zea mays
  Clone ID: MRT4577_44122C.1.pep
NGPGSAQGQQTPQPFQQQMVPRGRVYRYPPGPRHMPEVQQMPGVGVGGMVQPYDMGSFPVRDAGVSPAPPIGTLTSALANATPEQQRTILGESLYPLVEKLEHQQAAKVTGMLLEMDQTEVLHLLESPEALKSKVAEAMDVLRNVAQQQNPNAPTSQLAGLTLSDGIIS

SEQ ID NO: 308175 - protein, 168 aa, Zea mays
  Clone ID: MRT4577_44123C.1.pep
ASRVFSLLFPIVGDVRWAPAWVGPGQQWYVLASSPLWQGQDELRWLGPLSWSGMPGNPSSSSVPPSPCLLVCGPRAPLVPLFSLRFLPREGRGPFCDNFFLSLWLLVCTCFLLFLALVRWFVLLVSLLLCFVSPPWGFSGLSGCFVLFFVPVMAWTACNFQGPFRISK

SEQ ID NO: 308176 - protein, 118 aa, Zea mays
  unsure (1)..(118): unsure at all Xaa locations
  Clone ID: MRT4577_44124C.1.pep
HRVRSSFCPEKRAVRSSSKKLVGGGVLEAALLLLAGGAGTASAAVSCGKGTSSGAPGLGNAMGSAGSPSAGGCRGGRSLNSRGSSGENRKATXNCLKRMTGRFGGGVRMANAANIPGK

SEQ ID NO: 308177 - protein, 72 aa, Zea mays
  Clone ID: MRT4577_44125C.1.pep
HVIEPEEQRPERSVTVVRFWNLMEGTSIDLVRLKHPDPFLPATVTRELVSSKAPSRVHRLLAAIFFVSGRVG

SEQ ID NO: 308178 - protein, 56 aa, Zea mays
  Clone ID: MRT4577_44126C.1.pep
PVMTNSEGATVLCVTILNSIWCGVKPICHAFISIFQKKETSYLEETNYLYLEEAEK

SEQ ID NO: 308179 - protein, 49 aa, Zea mays
  Clone ID: MRT4577_44127C.1.pep
KNPPQYYWATFPYLFPKVIKNIGTRDNGSPTAKPPHFGFAPARAAPQKG

SEQ ID NO: 308180 - protein, 185 aa, Zea mays
  Clone ID: MRT4577_44128C.1.pep
WGASIPRRSGNTLATRTPCTSPPRPPEEFQLALFKNQRKENLFANRIFDLFDVKKRGVIDFGDFVRALNVFHPNIPMEEKVDFSFKLYDMDGTGFIERKEVKQMLIALLGESEMRLSDDIIETILDKTFSDADANQDGKIDRTEWENFVTRNPSLMKIMTLPYLKDITTTFPSFVFNSEVDDLVT

SEQ ID NO: 308181 - protein, 90 aa, Zea mays
  Clone ID: MRT4577_44129C.1.pep
NKNTSTSAPASCTAHTNTSTPAARASRPPPSQVHACTSSHRPTATNSLLTIQLQPTPGDVAALAEKWSGDEMSVTEEAWRGGTGRGNFLR

SEQ ID NO: 308182 - protein, 74 aa, Zea mays
  Clone ID: MRT4577_4412C.1.pep
TVDRGDSVLENRADHGGNGTDTEEQMYNMGRLLGKSEEDLLKIVIDSTCARRTVFTDLLQDAYSHYRDKVAIRI

SEQ ID NO: 308183 - protein, 189 aa, Zea mays
  unsure (1)..(189): unsure at all Xaa locations
  Clone ID: MRT4577_44130C.1.pep
HASARPQGRTGEVLQSQPPGSAAGAGGQLPASSGSVRPRSDAWWARARPVCDPPASVSVSEVEALFELFKSISGSVIDDGLINKEEFQLALFKNQRKENLFANRIFDLFDVKKRGVIDFGDXVRALNVFHPNIPMEEKVDFSFKLYDMDGTGFIERKEVKQMLIALLGESEMRLSDEIIETLLDETFSD

SEQ ID NO: 308184 - protein, 213 aa, Zea mays
  Clone ID: MRT4577_44131C.1.pep
MGCFHSTAKRQHPGYEDPVHLASQTAFSVSEVEALFELFKSISGSVIDDGLINKEEFQLALFKNQRKENLFANRIFDLFDVKKRGVIDFGDFVRALNVFHPNIPMEEKVDFSFKLYDMDGTGFIERKEVKQMLIALLGESEMRLSDEIIETILDKTFSDADANQDGKIDRTEWENFVTRNPSLMKIMTLPYLKDITTTFPSFVFNSEVDDLVT

SEQ ID NO: 308185 - protein, 72 aa, Zea mays
  Clone ID: MRT4577_44132C.1.pep
GDAGICCRPHRIPEPRGPHRQHGAWERAYQWPGVLRRRGLRFLVSWAAKGNCPNPGRMVYMLPRREVVLTNL

SEQ ID NO: 308186 - protein, 86 aa, Zea mays
  unsure (1)..(86): unsure at all Xaa locations
  Clone ID: MRT4577_44133C.1.pep
SGDLGGGRGAVSPFXRSSTSFPHAIDPGLRDSVDPNHRRTEMCPGPTLLLTKLLKCALCYFTKEAKTKADNRKPNPPNPNPSRVAI

SEQ ID NO: 308187 - protein, 66 aa, Zea mays
  Clone ID: MRT4577_44134C.1.pep
RSLSVSRLYGARDGGNRPISTAFPNNHSHEQRPRVRQDQDPDCFLTQPAVRYQKTRSRSTAEDRLS

SEQ ID NO: 308188 - protein, 121 aa, Zea mays
  Clone ID: MRT4577_44135C.1.pep
GGGGIPPYLKHGNNEKKPRRGGHTPGSPPAKQQGNTHQTCFAGGKAPPGPKFYTNRTTGGQTTIHSSFKYKKHPNQAFFQKKKPPEREGAPPPMHSSPSELGAPQAMGNQTKTKLAAFLQP

SEQ ID NO: 308189 - protein, 63 aa, Zea mays
  Clone ID: MRT4577_44136C.1.pep
KRRCAIVKGGMGGENKERRREDASHGKKGGEKCGGDWKSPPALSWKVEAVGKRVRTRVSPRVR

SEQ ID NO: 308190 - protein, 101 aa, Zea mays
  Clone ID: MRT4577_44137C.1.pep
MSAQDIPTGDFQDNEYQSRTGQSEIPVQTDDKPVEDPIDPDTADSDAQLEADEKDAIDQSNIIDERTRGATKSSGTYQEPGDEEGLPGPEDGTSRVAGGPN

SEQ ID NO: 308191 - protein, 190 aa, Zea mays
  unsure (1)..(190): unsure at all Xaa locations
  Clone ID: MRT4577_44138C.1.pep
NSNITKAFDSISWAFLLEVLQKLGFGQIWRDIFSGLLATSSTQXLKQGDPLSPMLFILVMDVLGFLVSKAEERGLLQPLSTRPLQHRLSLFXDDVVLFLQPKDQNIQVVLNILKLFGEASGLQTNVQKSCVYPIRRGVGEMEVLQQQLPCQVSSFPCTYLGLPLSLKKLTRGQVQPIIDEVADQLPRHGC

SEQ ID NO: 308192 - protein, 70 aa, Zea mays
  unsure (1)..(70): unsure at all Xaa locations
  Clone ID: MRT4577_44139C.1.pep
EARSYDCEQCVQVFKPSPKLTKHQDNXTGEESYKCEECGKAFNLSXQLTDDKILYAXSKXYKCKVCGRAF

SEQ ID NO: 308193 - protein, 85 aa, Zea mays
  Clone ID: MRT4577_4413C.1.pep
PAESSFRFWQARAVESFLRGTTSYAAQMFLLKRGLLEHILYCIVDSECKSRDVLQSYFDLLGELMKFNVDAFKRFNTYINTDAKF

SEQ ID NO: 308194 - protein, 86 aa, Zea mays
  Clone ID: MRT4577_44140C.1.pep
TPANQATSFFISCNLGAPKIKGTGVAILGVKGSNTKEKNRLSWGRGPSNSGVLTDNSKNYLAKTKNGSGLSWIHPAVTPFIKLTPW

SEQ ID NO: 308195 - protein, 67 aa, Zea mays
  Clone ID: MRT4577_44141C.1.pep
TMKLHIYYFTRMRPYCHSTYLDGVHCRTKHWATSRTLKYDLTIIFLTPHSTHTGIGGTHPKLTRAQT

SEQ ID NO: 308196 - protein, 85 aa, Zea mays
  Clone ID: MRT4577_44142C.1.pep
LHAADGAERDVEGRAHHERHGLAPRENRATAAQRGERETMHRHRMTAASREVVVVRTESTAAVIFDSLVLPRRFTDQQMWLYNFQ

SEQ ID NO: 308197 - protein, 205 aa, Zea mays
  Clone ID: MRT4577_44143C.1.pep
PAGVSLCALLFSFPRDTYSFPTSPSSFPVTAASADPPCLLPPWAGGCRELLSQHLVCSREGAPCPSGILRWRRVCGSAFFFQTGFERVLPILTPPSLRPLPPDAPSLTTHTDGSPSERYRDSVRRPRGYDGAGDRLSAGNATATPDGRATSRRRRRRRCPSRLRRRFRSRRSRAFPGRQVCVRPPCCLADGVRVYYCNSLGARLL

SEQ ID NO: 308198 - protein, 59 aa, Zea mays
  Clone ID: MRT4577_44144C.1.pep
AILQWGVYSTIGAVSTKSFVCEMLVLESGVVQFRILVGFEPGVFPIYGPVVGRLYSISV

SEQ ID NO: 308199 - protein, 74 aa, Zea mays
  unsure (1)..(74): unsure at all Xaa locations
  Clone ID: MRT4577_44145C.1.pep
LKMSATIKQATNKGGYLETYFNTKTKRXTASAHEQTLARHNIIAQQHIPLSSLGAKAKEDPTESPFQQWLNQNA

SEQ ID NO: 308200 - protein, 105 aa, Zea mays
  Clone ID: MRT4577_44146C.1.pep
MADENEAGKKEEEEFSTGPLSVLMMSVKNNTQVLINCRNNKKLLGRVRAFDRHCNMVLENVREMWTEVPKTGKGKKKALPVNKDRFISKMFLRGDSVIIVLRNPK

SEQ ID NO: 308201 - protein, 39 aa, Zea mays
  Clone ID: MRT4577_44147C.1.pep
ELLGLFKSNDQSQRTLLLLMKVVLGNIIKSPPYRSNPIK

SEQ ID NO: 308202 - protein, 105 aa, Zea mays; identical to SEQ ID NO: 308200
  Clone ID: MRT4577_44148C.1.pep

SEQ ID NO: 308203 - protein, 105 aa, Zea mays; identical to SEQ ID NO: 308200
  Clone ID: MRT4577_44149C.1.pep

SEQ ID NO: 308204 - protein, 105 aa, Zea mays
  Clone ID: MRT4577_4414C.1.pep
LVNGVNCATGGCHVSYSKSLTGSHGNGLSGSVFPTTGFSGVVETEDGSLEDVISSQNSAVSSQNSPDYVVRRTDPIGSSSLQNFTEEGCIMRNMSNGTGISTDYT

SEQ ID NO: 308205 - protein, 119 aa, Zea mays
  Clone ID: MRT4577_44150C.1.pep
MRDPFDAPVDLINPDHNGGNKLSRTGAVSAGDYGLQNGPKSFAPNSDTLVRHQVQGASLHKDLVLEDPNTRIMDPETKELYFRSQSQEDEILLLRKKIAEASLKELSLLGEKHILERRL

SEQ ID NO: 308206 - protein, 312 aa, Zea mays
  unsure (1)..(312): unsure at all Xaa locations
  Clone ID: MRT4577_44151C.1.pep
NKNALQQYAQGPSDRHIEQMYHGSSFQQDTGGTTPSNYFEEGRVDGGSQLYPSDGDALPGIEGFQIAGEPRPGCQLTACGFPTNGTTLCNFQXVVFCSFVMIFYNCYKCQFLXKTFHPIDVAVXWVRHLENGIKQSIEGATMYDYVVTADDVGTLLAVDCTPMDDNGRQGDLVTEFANNGNKITCDPEMQSHIDACISKGRAEFEVFVLAYSPEEWELATLVLTRPNYQIKFKQTGNVVIDEKYSQSLQTKIPNGRTTQFVLITAGTTLPFNTQGISEPNNEDYDVRLRDLIVLVMRTFQKKALDAKRKGKA

SEQ ID NO: 308207 - protein, 117 aa, Zea mays
  Clone ID: MRT4577_44152C.1.pep
PKKKKRMPPKPPSRKSREPLGGGGSPQGFFPATPPTPAPECPRRVKRPPRPVTAPPLWAVPSRPRPSQCLYFLVYPPVARLFFPSRPFYFLCVSPPPFMCIRCLLSGFYLLAAPSGV

SEQ ID NO: 308208 - protein, 504 aa, Zea mays
  unsure (1)..(504): unsure at all Xaa locations
  Clone ID: MRT4577_44153C.1.pep
MFGAALGCARNYALQNGPKSFAPNSDTLVRHQVQVASLHKDLVLEDPNTRIMDPLTDPITFIMEPETKELFFRSKKLGDEILLLRRKMAETYIQEMRFLGXKLIVERKHTDSRIGVDEQXNENITGALQQMRQKKKHLEDNMRLXNEINVLVGMLEYFTSRSLHIIASFXQVLLNVRPPRFQLSPGVYMTSXDMTQSGNIYNPNLQQVTLSRNEPSPSYNLDSNRNTLQQYAQGPSDRHMDQMYHGSNFQQDTGGTTPSNYFGGDRRVDGDSQLYQPDGDTLPGIEGFQIAGEPRPGFQLTACGFPTNGTTLCNFQWVRHLENGTRQSIEGATMYDYVVTADDVGTLLAVDCTPMDDNGRQGDLVTEFANNGNKITCDPEMQSHIDACISNGRAEFEVFVLAYSPEEWELATLVLTRPNYQIKFKKTGEAIIDEKYSQSLQMKIPNGRTTQFVLVTAGATLPFNTQGISEPNNEDYDVRLRDLIVLVMRTFQKKALDAKRKVNT

SEQ ID NO: 308209 - protein, 91 aa, Zea mays
  Clone ID: MRT4577_44154C.1.pep
VPPTIRFILDGEMPPYLLAKDLILQIIGEISVSGATYKSMEFVGSTVESLTLFLTSFFENLAVRRIWLWRESEYRGDYVRRKMKWSKGFRI

SEQ ID NO: 308210 - protein, 83 aa, Zea mays
  unsure (1)..(83): unsure at all Xaa locations
  Clone ID: MRT4577_44155C.1.pep
SVSALIHTHPELGYLEFQTSELVRRELHAMGIPYRHPFVVTGVVATVGTGGPSFVVLWSDMDALSLQEXVEWEHYNKIPLKTH

SEQ ID NO: 308211 - protein, 123 aa, Zea mays
  Clone ID: MRT4577_44156C.1.pep
QVSILRVITSASFGHFWVSENLETTKSQEMSMGHEWVGLSAIVCASYCMLKECVKGSRLTTAGRAKRPGRAIFVVGRERQNEEAAQNKAYSCVEEFTAHSAYIKSSLYILDLIFLVDHYNLQI

SEQ ID NO: 308212 - protein, 781 aa, Zea mays
  Clone ID: MRT4577_44157C.1.pep
RTRGATRAPEAPVRLPGRGCPPWRAPAHCTPLDCLQIDLSTNQLTGDIPEDFGNLKNLTILFLYNNQLSGTIPASIGLLPQLKDIRLFQNQLSGELPPELGKHSPLGNLEVSINNLSGPLRESLCANGKLFDIVAFNNSFSGELPAELGDCITINNLMLHNNNFSGDFPEKIWSFPNLTLVMVQNNSFTGTLPAQISSKMARIEIGNNRFSGSFPASAPALKVLHAENNRLGGELPPDMSKLANLTDLSVPGNQISGSIPTSIKLLQKLNSLDMRGNRLSSAIPPGSIGLLPALTMLDLSDNEITGSIPSDVSNVFNLLNLSSNQLTGEVPAQLQSAAYDQSFLGNRLCARADSGTNLPTCPAGCRGCHDELSKGLIILFAMLAAIVLVGCIGIAWLLFRRRKESQEVTDWKMTAFTQLNFSESDVLSNIREENVIGSGGSGKVYRIHLGNGNASHSEERGIGGDGRMVAVKRIWNSRKVDEKLDKEFESEVKVLGNIRHNNIVKLLCCISSQEAKLLVYEYMENGSLDRWLHHRDREGAPAPLDWPTRLAIAVDAAKGLSYMHHDCAPPIVHRDVKSSNILLDPDFQAKIADFGLARILVKSGEPQSVSAIGGTFGYMAPEYGYRPKVSEKVDVYSFGVVLLELTTGKVANDSGADLCLAEWAWRRYQRGPLLDDVVDEAIREPAYMQDILSVFTLGVICTGENPLTRPSMKEVLHQLIRCEQIAAEAEACQASYQGGGGGGTPLLESRKKGSRRRSMSDSGRWNDDDEEDSGNFVVHVV

SEQ ID NO: 308213 - protein, 47 aa, Zea mays
  Clone ID: MRT4577_44158C.1.pep
LHGQVPLALTLTLDQYWYVPENASAARAPTVHHHGCRPPGLPRAVPE

SEQ ID NO: 308214 - protein, 107 aa, Zea mays
  Clone ID: MRT4577_44159C.1.pep
SQFIPGPCVYFFGGQHHNLNSIITRTALLLPFYPDPQKLQSLSPFPPNTFYKTILSQNSPACYPETLFPAELFTYHQHPSLLFFFARAPRLFGLHCAILTIRRQTSF

SEQ ID NO: 308215 - protein, 67 aa, Zea mays
  unsure (1)..(67): unsure at all Xaa locations
  Clone ID: MRT4577_4415C.1.pep
LSFGCKLESGSRERPVTASRAFLPRPWHSQTDSESDXEGGAAGVDSRQGCPAERIHSDAQPVQPEER

SEQ ID NO: 308216 - protein, 66 aa, Zea mays
  Clone ID: MRT4577_44160C.1.pep
LASLEPCTVSLPGPCLGGEYGCPLSLQTGYSGPRYGRPSTKVLGEGGTGHLRDLMPGTSPGLPLVS

SEQ ID NO: 308217 - protein, 69 aa, Zea mays
  Clone ID: MRT4577_44161C.1.pep
LLYMMEEHSVTGHVAKPRRKQKLQNLQQQHGLAVYHTIRRVFWPESSYWYRLGTSLGHAGRKFIFDCPW

SEQ ID NO: 308218 - protein, 126 aa, Zea mays
  Clone ID: MRT4577_44162C.1.pep
STPTPTDGSTPTPTSGQPSDPTSTGDPSTATPSPPSDPNATPTPPPDGSTNTGPDGTTPSNPDGKPTPPTPDSLGGSNPSPSQDPSSTSTSTAPPTGSPSPDAPPSRRNYRPRGHSGEYFKRSPLN

SEQ ID NO: 308219 - protein, 94 aa, Zea mays
  Clone ID: MRT4577_44163C.1.pep
SRSLYLISISNRNRRHNLCLYDYKSFAAAADGSAKVANFSVAGAEQLAACIMEAGRQAPHGWQPMIVHASCAAVPANNTHGLVGNPANESLYRY

SEQ ID NO: 308220 - protein, 53 aa, Zea mays
  Clone ID: MRT4577_44164C.1.pep
LLCRNICTVSAVGRGQDPVVRRGLRVKVIESCLPRTQVVAPPASSLTRRRTSG

SEQ ID NO: 308221 - protein, 147 aa, Zea mays
  Clone ID: MRT4577_44165C.1.pep
MASKRIQKELKDLQKDPPTSCSAGPVGEDIFHWQATIMGPSDSPYSGGVFLVTIHFPPDYPFKPPKVAFRTKVFHPNINSNGSICLDILKDQWSPALTISKVLLSICSLLTDPNPDDPLVPEIAHMYKTDRNKYENTARTWTQRYAM

SEQ ID NO: 308222 - protein, 141 aa, Zea mays
  Clone ID: MRT4577_44166C.1.pep
NLQRIGPLGQLVSMIPGFSGQFIEKGNEKEGQAKIKRYMTMMDSMTDAELDGTDPKLMNQSRINRIARGSGRRVEEVVHMLDEYKRIAKVWKKLPVLNNNRRSDMNRDIRRISDAIPPNMLTQLGGIAGLQNMIKQMGGRD

SEQ ID NO: 308223 - protein, 244 aa, Zea mays
  unsure (1)..(244): unsure at all Xaa locations
  Clone ID: MRT4577_44167C.1.pep
WSSLQAGLSPTRQQCRNKMXDVDKYYRRTKDARAGRQGGKYYSFLSHLEALHASAPPLPPPPSGMTTVQAGPHQPMEMAWTAGPTVLGPAAVAGLPDLSFSSMSESDSEYDSDDDDDHSGAGEEGLSGGECDREMMATFERMMKQFTEKQDAMQRVFLETLERCEAERTAREEAWRRQEVARMNREREQLARERAAAASRDAALIAFLQRVGGGQGEPARLPPHGAGVVPPPPMPDCAPPSRRH

SEQ ID NO: 308224 - protein, 213 aa, Zea mays
  Clone ID: MRT4577_44168C.1.pep
MQIFVKTLTGKTITLEVESSDTIDNVKSKIQDKEGIPPDQQRLIFAGKQLEDGRTLSDYNIQKESTLHLVLRLRGGMQIFVKTLTGKTITLEVESSDTIDNVKSKIQDKEGIPPDQQRLIFAGKQLEDGRTLSDYNIQKESTLHLVLRLRGGMQIFVKTLTGKTITLKVESSDTIDNVKSKIQDKEGIPPDQQRLIFAGKQLEDGRTLSDYTS

SEQ ID NO: 308225 - protein, 111 aa, Zea mays
  Clone ID: MRT4577_44169C.1.pep
ELTCRRPPSFFFFFFFFYCLCFVFRVLHSMQTADPPRAIRPAFAKREPKKENPHYPRNKKRPPQKPGGGTSGGKNQRAVQLSRPQNSRGTPNTGKRAPRSPGKTCPWGTTP

SEQ ID NO: 308226 - protein, 41 aa, Zea mays
  Clone ID: MRT4577_4416C.1.pep
CAAVASYERRFATRNYMTQSLLGPSMTVSEGINDPPKRTPL

SEQ ID NO: 308227 - protein, 92 aa, Zea mays
  unsure (1)..(92): unsure at all Xaa locations
  Clone ID: MRT4577_44170C.1.pep
SRQRAERKKKPKQRRSRXQSSKPRPTKETAGAERRQQGKQAQAAAEXAPRGRGPTKAPKGTDGTGPTKEGGTRATKGRSQREXPRNAGRXPG

SEQ ID NO: 308228 - protein, 67 aa, Zea mays
  unsure (1)..(67): unsure at all Xaa locations
  Clone ID: MRT4577_44171C.1.pep
HSFFHSLSQXTTKPYNKGGAAHTPTPLSTTITSFPXTQQPPPPSASALRLHFPPPHASPSPTSLSRP

SEQ ID NO: 308229 - protein, 40 aa, Zea mays
  Clone ID: MRT4577_44172C.1.pep
VSFGQQCFPVGKTSRCWVINYLLWCDVIPIESTRSKLGVC

SEQ ID NO: 308230 - protein, 289 aa, Zea mays
  Clone ID: MRT4577_44173C.1.pep
MGDHEGHGVDFEKKADQKLSGWGLFGNKYEEAADLLDRAGSFFKLAKNWSRAAAVYKKIADCHLQGDNKHDAASAYVEAANCYKKFSLQDAAQALNSAVNLFQEISRLNMAARYSKDIGEIYLQEQDLENAAVYLNRAADLFDSEGQSSQANSMTQKIAEIYAQLEKYQKATELFEEIARKSINNNLLKYGVRGTLLNAGICQLCRGDVVAINNSLERYQDIDPTFSGTREYKLLADLAASTDEGDVGKFTDAVKEFDSMTRLDPWKTTLLLKAKNELKKKEEDEDDLT

SEQ ID NO: 308231 - protein, 104 aa, Zea mays
  Clone ID: MRT4577_44174C.1.pep
GNNFSQIKIFSFKLFITEQMNFKSKNNFPNLSKIWFWVLHIFSRVGIIASSHQASHHSSACIILKKEASEVFCLKDKSVATITTWLKKDLRMEYRVVILMNFLL

SEQ ID NO: 308232 - protein, 42 aa, Zea mays
  unsure (1)..(42): unsure at all Xaa locations
  Clone ID: MRT4577_44175C.1.pep
MALLSDLMNLNFSGRTGKIITXSIWLAVSGLDTRSKAWTLSG

SEQ ID NO: 308233 - protein, 74 aa, Zea mays
  unsure (1)..(74): unsure at all Xaa locations
  Clone ID: MRT4577_44176C.1.pep
VPSRSRPGACILVCENNXYGMGTAEWRASKSPAYYKRGDYVPGLKVDGMDVLAVKQACKFAKEHALENGPIVSI

SEQ ID NO: 308234 - protein, 73 aa, Zea mays
  Clone ID: MRT4577_44177C.1.pep
AQIFVARYSYSRTIVICREFWALLLGLAPMSRRFHTAIQIKTVCAQNVPYLICISLELWQHAHLFVSFLIFLN

SEQ ID NO: 308235 - protein, 92 aa, Zea mays
  Clone ID: MRT4577_44178C.1.pep
TTNEHAMEQTKAAVSSTLGGGVEGGDKTARKALKGGAGGDTSEESLHALAWALDNGVRGHPDATLGVCHTQHAGDHFTYPGAGHGIGDAPAS

SEQ ID NO: 308236 - protein, 68 aa, Zea mays
  Clone ID: MRT4577_44179C.1.pep
VGHASANGQSMDMTTPVITKKSAGTDRWKMSFVMPAKYGSNLPRPKDPSVIIKEVPSKIVAVAAFSGP

SEQ ID NO: 308237 - protein, 47 aa, Zea mays
  Clone ID: MRT4577_4417C.1.pep
RQFSMVRVTGRIKVRIINQVHFIRRVAIDNIDRLVECLGGSSRNNSR

SEQ ID NO: 308238 - protein, 103 aa, Zea mays
  Clone ID: MRT4577_44180C.1.pep
RTPSPEPSSKADHMTDQLIDELNEDFKVVYNDGDSGVNTYELATEMRSVGHNLTEKQLEDMINDMDADGDATIDLTNDLNLMAKLMKDTNYDDDLKEDLNEVY

SEQ ID NO: 308239 - protein, 47 aa, Zea mays
  Clone ID: MRT4577_44181C.1.pep
LFLFFFFSFRGVHFCLDNQSTQTLSKKINTHFKFITRTLNALPHQHQ

SEQ ID NO: 308240 - protein, 83 aa, Zea mays
  unsure (1)..(83): unsure at all Xaa locations
  Clone ID: MRT4577_44182C.1.pep
RAYISSTMLRKSALRAVVETLSTDSTLYVRXNIELLVPNKNGYISLQNLXFALAKNFTDAMKDFRDVYFVNTVCAFLYKKLDF

SEQ ID NO: 308241 - protein, 173 aa, Zea mays
  Clone ID: MRT4577_44183C.1.pep
MDRPCHHQHQFFMPPPPQQQQLCVPMMDDPSSFLAEMGIGGGDGPSSSARGERKRRFTEEQIRSLESTFRARHGHAKLEPREKAELARELGLQPRQVAIWFQNKRARWRSKQLEHDYAVLRAKFDDLHARVESLKRDKLALSTQLFAWCARVHDQLNELSERLRDREDPAAAG

SEQ ID NO: 308242 - protein, 66 aa, Zea mays
  Clone ID: MRT4577_44184C.1.pep
KFFKKTPKFWNQFNLIPPGFFGKIGTFLRGVKNQKLEFSKGNFRGFSPNPNGAQFFLGEALKGPKT

SEQ ID NO: 308243 - protein, 88 aa, Zea mays
  Clone ID: MRT4577_44185C.1.pep
VDITSYQFCPCLFPLQELIHAILSGITHLQYCAAPFPGTGNMQSIPKLISVCCIKSYLMFSSITTEPYVADETTCKQNEWLMKTTSIY

SEQ ID NO: 308244 - protein, 345 aa, Zea mays
  unsure (1)..(345): unsure at all Xaa locations
  Clone ID: MRT4577_44186C.1.pep
MDAFTHVPPXFRFHPTDEELXDYYLRKKXXLKKIDLDVIKDVDLXKIEXWDLQEKCRIGSEEQNEWYFFSHKDKKYPTXTRTNRATTXGFWKATGRDKXIYVKNCLVXGMRKTLVFYKGRAPNGQKSDWIMHEYRLETNNNGIPHEEGWVVCRVFRKRLATVQRMVGDSPYWFNDHAGFMAPELGSPRQAAHHQQNVMMYHRQQSSYSYPCKVELEYHHLLPQEHFLQQLPQLESPKLPDLIGQVDTTLQPACGLTQEHGAPRYTLQELQAEPLYLATGGDTDWRALDKFMASQLSHGDITPNKDSANNYSNPALQVIQQSEEKEEALDYVSTSASCGGDNDLWK

SEQ ID NO: 308245 - protein, 136 aa, Zea mays
  Clone ID: MRT4577_44187C.1.pep
IECPPRGRAGIFPKTIAANNCICTCVPERLHYIILHPSLQLNVHTAQHRWHAATALVSSSSLRAPAPFSVGARATSRPAPVATVVTPLPATTAPAARESHAASTGHPQQQAHHAERRGTASRCPATATSWTMPRNK

SEQ ID NO: 308246 - protein, 132 aa, Zea mays
  Clone ID: MRT4577_44188C.1.pep
PGSLGAQVPRVRFVQPPGDQGCVPPVFGRPRGFVQMPGDSRPPPGGDLLSPGGFCPLGLRLARAPPRLPRFYLGAVQAPLWFGAGPGFLGLFFFWGRMPQFFPWALGPVCILPLFFFSLINLPFFWAGPFPA

SEQ ID NO: 308247 - protein, 121 aa, Zea mays
  unsure (1)..(121): unsure at all Xaa locations
  Clone ID: MRT4577_44189C.1.pep
SIVMSSKAFRTAMKXNHASRSEKQAQQLNRSIWKSSSAVSSDSSFMDSMHTTIMPSTLDNLLLNSNQSFLYTAKLVKHGGVPDSIFNGWDLVEREVLPPPPSRFEDVAQWERAMYAGTKKK

SEQ ID NO: 308248 - protein, 110 aa, Zea mays
  unsure (1)..(110): unsure at all Xaa locations
  Clone ID: MRT4577_4418C.1.pep
IRLGAVVDSFFNRIRLEDTLSRVHVTLAHKLGHGVFAVAXYGIYQYQEVPVVFKTLDYTYKMAGLQAQMGAVNNEPINCRNXWTHATVWTAHAXTSNEANMLTQLVSEGK

SEQ ID NO: 308249 - protein, 61 aa, Zea mays
  Clone ID: MRT4577_44190C.1.pep
PNPVAVICQSSTLQECREENCSVGFICCHTCTWVQPCKFVNINPVAFRKEIKLSEIDRHSF

SEQ ID NO: 308250 - protein, 119 aa, Zea mays
  Clone ID: MRT4577_44191C.1.pep
QGVGTRSGRGVWAFHRIGGTRGPASTASLAVSNGNSYRLDHFIEQRGCRQATQQGGSQEDDIVVGALSRRGKRDQGRPLVEGRGRTQGHSEAEVSSSVGNKNGRVGSRAGRRSKLASYV

SEQ ID NO: 308251 - protein, 105 aa, Zea mays
  Clone ID: MRT4577_44192C.1.pep
MSATKTKGQSIIDENPVAVFSKSYCPYCNQGKQLLSASGAKFYAIELDQVNDGSAIQSVLADITGQRTVPNIFIAQQHIGVNSDLQAKMGKLTPCSRELAPYKRP

SEQ ID NO: 308252 - protein, 91 aa, Zea mays
  Clone ID: MRT4577_44193C.1.pep
QGVGTRSGRGVWAFHRIGGMRGPASTASLEEDDIVVGALSRRGKRDQGRPLVEGRGRTQGHSEAEVSSSVGNKNGRVGSRAGRRSKLASYV

SEQ ID NO: 308253 - protein, 164 aa, Zea mays
  unsure (1)..(164): unsure at all Xaa locations
  Clone ID: MRT4577_44194C.1.pep
MATMAEKNPALKKEASDDPSDEAAPIQXAPAMHKPQEEIRLPADKFADKEAVDNNGMKKENNIAQTXYKTYICKVLKQEHHDLGISSKDMPIMNSFILHVVEIFGAQADKLGRXNKKATITSREIQTSVRLLLPGELVLHAVSDGTWVRHQGHLCLTALHYASM

SEQ ID NO: 308254 - protein, 143 aa, Zea mays
  Clone ID: MRT4577_44195C.1.pep
LVQKLHRLVPLWRLTISDLTSISIVHFQSVFYRIVVENMGDVDADGLKSAAEYLIDTLKDPAAVILGSSPGDGKVSLVAAFSPAIVEMGLQAGKFVSGIAKLCGGGGGGKPNFAQAGGRKPENLPDALEKARAEIVARVSGSS

SEQ ID NO: 308255 - protein, 54 aa, Zea mays
  Clone ID: MRT4577_44196C.1.pep
RASSMASRSFSRPSGACRTSSTIKGGSMCTSAIDRYPGPVTVSGAVQGWGKSRA

SEQ ID NO: 308256 - protein, 323 aa, Zea mays
  Clone ID: MRT4577_44197C.1.pep
AHHTATHLLQSALKSVVGSETSQAGSLVAFDHLRFDFNFHRPLSEEELTTIEALINQWIGNAAHVETKVMALQDAKNAGAIAMFGEKYGEQVRVVAVPGISLELCGGTHVSNTAEIRGFKIISEQGIASGIRRIEAVAGDAFVDYVCARDNYMRRLCLSLKVKAEDVNSRVETILEELRATRNEASSLRSKIAVLKAASLASRATTVEPQNVRIVVENMGDVDADGLKSAAEHLIDTLKDPAAVILGSSPGDGKVSLVAAFSPAIVEMGLQAGKFVSGIAKLCGGGGGGKPNFAQAGGRKPENLPDALEKARAEIVAGVSSSS

SEQ ID NO: 308257 - protein, 110 aa, Zea mays
  unsure (1)..(110): unsure at all Xaa locations
  Clone ID: MRT4577_44198C.1.pep
CSTSPEFPGGGTRAGNLYKGSVGTDLDRATNXLGVHXEPGQTIYLKINNKIPGLGMRLDRSNWDLHYATRCSKEIPYSYXRLLLDSMQXERMLFIRSNXVDASWALFTPL

SEQ ID NO: 308258 - protein, 350 aa, Zea mays
  Clone ID: MRT4577_44199C.1.pep
QFDVIGGFVYFVLVFSMFPQCDSFHILHEDSWAGRINGFFTAMWNAVFEILERYPVSLPGVVTLLMVSFFFVPTKLSRRRRVLLGFLHAAAHLTSAVLLMLLMELAIEICIRNHLLATSGYHTLYEWYRKVESEHFPDPTGLRARLEHWTFGLYPACIKYLMSAFDIPEVMAVTRSTICKKGIESLPRGGAIIYYVCVFLYFWVLSTPVVSLVFGSYLYLCINWFHIHFDEAFSSLRIANYKAFTRLHIKKNGDLEVFTLAVDKVPKDWMLDPDWDMEPKQPFQMSYTRKFPSKWRAASGLDPINAVRIVDRFVIPRTPSSPTTPGGSVSSPTTPGGSVSSPTTPGGFMR

SEQ ID NO: 308259 - protein, 191 aa, Zea mays
  unsure (1)..(191): unsure at all Xaa locations
  Clone ID: MRT4577_4419C.1.pep
LLLANLSILILAEGLLLPLAAVKYSRGTFIFPEAQPSPHKNFADMKTFLNRFFGGLKSGGNAYVIGDSAKPGQKWHVYYAAEHPEEPVVTLEXMTGLDKKKASVFFKTTADGYSLCAKEMTKLSGISDIIPEMEIXDXDFEPCGYSMNAXHGPALXTIHVTSEDGFSYASYEVMGFNPGSFSYGDLVKRVL

SEQ ID NO: 308260 - protein, 125 aa, Zea mays
  Clone ID: MRT4577_441C.1.pep
TISHVEYSANTSFSRTSAATKLTSSMGQLIPKGRKFRNAQTKQESVDTEWLPNSRLNLLGPGMTPPLAAATSESAYLSLEGSTRSMHMHHNNPNQTCSTVTDFRRLVNQFIYPNTQKSSQRNPQK

SEQ ID NO: 308261 - protein, 38 aa, Zea mays
  Clone ID: MRT4577_44200C.1.pep
YHHICTLRYHILAVWITCIALFLCRVINFVSHLHVTTV

SEQ ID NO: 308262 - protein, 100 aa, Zea mays
  Clone ID: MRT4577_44201C.1.pep
DKTSVIKFCLQVMYTHMQLFASREAWPFQGLWSVSHGFVQLFWGYAQKSLFEYPFVGFPVVSFVPIRLVHILSVHVIQGLLECTGVYGLILRSFGVRKSV

SEQ ID NO: 308263 - protein, 78 aa, Zea mays
  Clone ID: MRT4577_44202C.1.pep
YTITYLPPGEKKKKKKKKHRKKKKKKKKKKKKKKKKKKKKKNRVSLIENLILPGLEHASLLILLRPKPNLIECWRASI

SEQ ID NO: 308264 - protein, 51 aa, Zea mays
  Clone ID: MRT4577_44203C.1.pep
SQEKRLSTVPLINYICLNKKESSRTKDNIARTPNRIKPVGNPRANPSYDAA

SEQ ID NO: 308265 - protein, 53 aa, Zea mays
  Clone ID: MRT4577_44204C.1.pep
RTKGRSKILDLPFHKVKKLGDFPQPNPTQTFFSLGQKKYPFLGAYQLKLNSLS

SEQ ID NO: 308266 - protein, 80 aa, Zea mays
  Clone ID: MRT4577_44205C.1.pep
PDASCSGRPSSYINFCRATAMHMFFPDCSCSHSREVCGASRLRNQIQTRVSEHLCRGTPSSSSRPFSLCFPSLIKNQYSG

SEQ ID NO: 308267 - protein, 101 aa, Zea mays
  Clone ID: MRT4577_44206C.1.pep
RARVGLAHHISKLSSRGTRRRKNAHPVVGSVGPQAPTFDGYQWRKLQLRIFILYQGHGLLVLSMVWAFVLLVDPLGPRPPLCQAPPSWKPPPRQAARPPLR

SEQ ID NO: 308268 - protein, 183 aa, Zea mays
  unsure (1)..(183): unsure at all Xaa locations
  Clone ID: MRT4577_44207C.1.pep
PPPAPPPXPXPPPPPPPPPPPXPPRPPPPPPPLPPAPPPPPXPPPPPXALPPPPPPPPAPSRGPLPRWXPXLPPPSXAPPAXRPPXAXSPPLSSPXXFVPCCPCWXXXXXXCPPPPPLVFVLVXPPFPGPXVCLAXPPSLXFXLXXXXXLGLXGSSRPPPSVPPPPPPAAVSSGREVGPGAGS

SEQ ID NO: 308269 - protein, 39 aa, Zea mays
  Clone ID: MRT4577_44208C.1.pep
ICSSIYFFSRLCISMIFLKRNKNLVQTSPRSNDYNEPSP

SEQ ID NO: 308270 - protein, 177 aa, Zea mays
  unsure (1)..(177): unsure at all Xaa locations
  Clone ID: MRT4577_44209C.1.pep
FQPLKXILCXKNHYKRSHCDKSYTCSRCNTKKFSVIADLKTHEKHCGRDKWLCSCGTTFSRKDKLFGHVALFQGHTPALPVEDGDVPEGSPAPQDGEPTNEMARSMVYSFPCSSSDGLLNLDMKMADDVRGYLSPLSFDNCFGAFDDFTRPGFDISEDPFSFPPSGSCSYGQQNGDS

SEQ ID NO: 308271 - protein, 202 aa, Zea mays
  unsure (1)..(202): unsure at all Xaa locations
  Clone ID: MRT4577_4420C.1.pep
MESKGGKKKSSSSRSSLMYEAPLGYRIXEDIRPAGGIXKFSAAYSNCARKPLLISLLSSXPSSAQTTCIFILISLIPPAXLSSDXRYQRPLPVFLPWSVCHLALKRWQSAAPPPVSVIGFEGFEKRLEISFSEAPVLADPSGRXLRALSRAQIDSVLDLARCTIVSELSNEDFDSYVSSASSLFSTHYGILIKTGGEVLASA

SEQ ID NO: 308272 - protein, 129 aa, Zea mays
  unsure (1)..(129): unsure at all Xaa locations
  Clone ID: MRT4577_44210C.1.pep
VXYWVITXXSYLHPVQPWXISTDKRQRSRGSRAEAEPRSRNCARRTPKQTASIQERELFFSCLFFPLCQDVTLTEQPSVDERIWSFSAAAGRAEGLRWRRGASTGGGGRTVGRRTPRGTRRRRPRGLPS

SEQ ID NO: 308273 - protein, 70 aa, Zea mays
  Clone ID: MRT4577_44211C.1.pep
FGIENPMVKKPGGGFLNKNPHSKKGFQNQKRNSGEILFTPRNHIKKIIWGGFLGLEKKNLKTPETFDILK

SEQ ID NO: 308274 - protein, 270 aa, Zea mays
  unsure (1)..(270): unsure at all Xaa locations
  Clone ID: MRT4577_44212C.1.pep
FATASITKGGPREPWHDIHSRLEGPIAWDVLYNFEQRWRKQGGKDLLVQLRDLSDIIIPPSPVMFPEDRDTWNVQLFRSIDGGAAFGFPDTPEEAARAGLVSGKDQIIDRSIQDAYINAIRRAKDFIYIENQYFLGSSYCWKPEGIKPEEIGALHVIPKELSLKIVSKIEAGERFTVYVVVPMWPEGMPESASVQAILDWQRRTMEMMYTDITQALEAKGIEANPKEYLTFFCLXNREVKQDGEYEPQEQPELNTDYVRAQERLGRFMIY

SEQ ID NO: 308275 - protein, 121 aa, Zea mays
  unsure (1)..(121): unsure at all Xaa locations
  Clone ID: MRT4577_44213C.1.pep
TRAALSDXVKGQDIYLPIAALRSHAGGLHALWKWVTDNWSELERRLPPSLSMLSSVVAITTSGFTHREHIEDIQAFFSSKSTKGFDMALSQSIDAISAKAAWLERDAEDVKMWLQEHRYLQ

SEQ ID NO: 308276 - protein, 90 aa, Zea mays
  unsure (1)..(90): unsure at all Xaa locations
  Clone ID: MRT4577_44214C.1.pep
KQYMKTFSLIXEHKLKGHMRWIXAXMNXVRYGELYRYICVTXGAFVHXAFYXAFXMSVIESVTCVLSTMASCLGVFAEFILDRGCALLIF

SEQ ID NO: 308277 - protein, 202 aa, Zea mays
  Clone ID: MRT4577_44215C.1.pep
AFLNGDLQEEVYVQQAPGFAQPGQEHKVYRLHKALYGLHQAPRAWNKKLDEQLGVLGFVRCPSEAAIYCRGRDAERLVVGVYVDDLVITGTSSSSIRKFKTEMTNIFKMSDLGLLSYYLGIEVRQEEAGIRLSQGSYARKILEKCGLEDCNPCTVPMQPKLKLSRESDSSKINVTEYRSLVGSLRYLGNTRPDLAYSGGYVS

SEQ ID NO: 308278 - protein, 88 aa, Zea mays
  Clone ID: MRT4577_44216C.1.pep
FEWIQAGWSSAKHGVHFISSDWAVSVRTGEGYLKSSPEEKIKKSLAEHVCIGGARGDQRLSKQNACWVVTQKHENRNMLRYLLLFSLS

SEQ ID NO: 308279 - protein, 312 aa, Zea mays
  Clone ID: MRT4577_44217C.1.pep
MPIVLVDWSDIREQKRLMVLRASVALHGRSVTLYEKAFPLSEQCSKKAHDQFLADLASILPSNTTPLIVSDAGFKVPWYKSVEKLGWYWLSRVRGKVQYADLGAENWKPISNLHDMSSSHSKTLGYKRLTKSNPISCQILLYKSRSKGRKNQRSTRTHCHHPSPKIYSASAKEPWILATNLPVEIRTPKQLVNIYSKRMQIEETFRDLKSPAYGLGLRHSRTSSSERFDIMLLIALMLQLTCWLAGVHAQKQGWDKHFQANTVRNRNVLSTVRLGMEVLRHSGYTITREDLLVAATLLAQNLFTHGYVLGKL

SEQ ID NO: 308280 - protein, 234 aa, Zea mays
  unsure (1)..(234): unsure at all Xaa locations
  Clone ID: MRT4577_44218C.1.pep
MASSVSLRGAILQRPHLTPRPDARRAPTTRRRAVPAKICCIGWDPEGILGAPQGGHIARLEFRRRLERDSEAREAFERQVREEKERRRSEREARVIPDTDAGLVEFFLDTDAREIEIEIGRLRPRLSQDFXGHVSREIAQIKFAVTRTAEMEDRLIELEAMQKVLLEGVEAYDKLQNDLVTAKERLMKILQSSDRKSTLLEMVERNELNISILTLLDENIASAKTSNQDEAAAD

SEQ ID NO: 308281 - protein, 230 aa, Zea mays
  Clone ID: MRT4577_44219C.1.pep
FFFLSLTLWFTRARCTATYPSGWPPVSRFLFPDHDRLWGWAGQDPEGILGAPQGGHIARLEFRRRLERDSEAREAFERQVREEKERRRSEREARVIPDTDAGLVEFFLDTDAREIEIEIGRLRPRLGQDFFGHVSREIAQIKFAVTRTAEMEDRLIELEAMQKVLLEGVEAYDKLQNDLVTAKERLMKILQSSDRKSTLLEMVERNELNISILTLLDENIASAKTSNQDE

SEQ ID NO: 308282 - protein, 209 aa, Zea mays
  Clone ID: MRT4577_4421C.1.pep
MAVLQVAAAAPPPVSVIGFEGFEKRLEISFSEAPVLADPSGRGLRALSRAQIDSVLDLARCTIVSELSNDDFDSYVLSESSLFVYPYKIVIKTCGTTKLLLAIPRILELAEELLLPLAAVKYSRGTFIFPEAQPSPHKNFAEEVAFLNRFFGGLKSGGNAYVIGDSAKPGQKWHVYYAAEHPEEPLITLENDMTGLDKKKASVFFKTLL

SEQ ID NO: 308283 - protein, 494 aa, Zea mays
  unsure (1)..(494): unsure at all Xaa locations
  Clone ID: MRT4577_44220C.1.pep
MLRSPGNSPRRLSPSPTPAPSTPRPASPPPSNAPSSKRRRSEVLDEDTYVAAIERIIERDYFPDLPRLRDRLDWLQAVRSHDPLILRDAQLKILDRRRRAQRHAAGPVPTPTPATSTALRSPSFLTTPAGSVAGGVGGPDADHDDDVAAALSLDGFFXRRFTSEDNDSFSRILDKVNQRRRERYAHLLEPPPPAEAGSKASEGAKRDRITDGYGTSGQPPSTLEGAKFTAKNQLMYYPADQGEAPLTEEERAERLRGMTKEINKPNTRLHGRATADDARPKEEEGAAILYALVAGSTPGGMAYHDPDKLKKYDLEDLRKTPNPFYLESDKKAGNGYSFVRTPSPAPGVDESPFMTWGEIDGTPLRLDSDETPGGSERAHFKMPPPPARDVKAHLLSRDAARKIKERSNTFHRPPLPSPARGVSASPRTLSRAAQKFVRNAISKSSKSSSAIDESLRASYRGSTPSASTPKSRFSRDPGLASRSPSTRQGSTPPW

SEQ ID NO: 308284 - protein, 246 aa, Zea mays
  Clone ID: MRT4577_44221C.1.pep
MNVPSFISSSSSSNHFAKMNSSSLIGTETLLPTESVYIMSPQKNLGISRSNMEPVSHGVNLPKDVIPMPVQDISRFISSGKSYAPVWSDGLLGRSQCFPSGPSGSSFANISNSVVLNASKPFSVDISGRSLANGSNDRPPLTSNMCFSSSHSCSSYASILGGKILGSSRRIPFEDIADGEMLAPGILPLQSPQLVKQPSSAGLFNEVARDVHQFAGLSNSLEVAVPPRFSDLGHNVEHLKVIRRVT

SEQ ID NO: 308285 - protein, 616 aa, Zea mays
  unsure (1)..(616): unsure at all Xaa locations
  Clone ID: MRT4577_44222C.1.pep
MSGLLNSNLNSSASNLSDSAGRPFTASFSGQSGSIPGFHHSGLHNTHGSYNLPSMPGSLAQRNAAMSGLPSSGVQQPGGSIPGRFPSNNLPVGMPQIPHAHSGVSGRGMNFGAGPAFSSSMNIGGNIQGLSSGLGSGGNRNSVHGMPVSSSIGNSGQRISSVGNMVSASNIGRNIGTGGLSVPSIASRIPRVRCAVYYVSXIRVHVSSSFFNXLKPATPQLINMLGSSYPTSGGSLSQSQIQAGNNSFSSMGMLHDASDTAPFDINDFPQLSGRPSSAGGPQGQYGSLRKQGVGVNTLVQQNQEFSIQNEDFPALPGYKGNPSDYNAIELHHKEQLHDNVPVIQAQQYPMARSGLGSSYLPNRQQHQQGANSVQNGGSHNILLRPPSQTSSLGSYDPFLQQYQQPQPQNHFRLQQMSSAAHSYRDQIQKIQAGPTPPDPYGLLGFLGVIRMNDADLASLALGIDLTALGLNLNSPDNLYKTFGSPWSNDPAKGDTDFRIPACYLFDKTPPLQTLLFQRFHIVTLFFVFYSMPKDEAQLYSANELYNRGWFYHKEVHLWLTRISNVEPLVKTHLYERGSYYCFDPESWDTIRKDNFVLHYEMVEKRPVLPSTSPNLR

SEQ ID NO: 308286 - protein, 190 aa, Zea mays
  unsure (1)..(190): unsure at all Xaa locations
  Clone ID: MRT4577_44223C.1.pep
PTRRHASDSSFLGIRNHRSGVLRLLSCLIIEDSLQAHPFLQQYQQPQXSKHFRLQQMSSAAHSYRDQIQKIQAGPTPPDPYGLLGFLGVIRMNDADLASLALGIDLTALGLNLNSPDNLYKTFGSPWSNDPAKGDTDFRIPACYLFDKTPPLQTLLFQRFHIVTLFFVFYSMPKDEAQLYSANELYNRGW

SEQ ID NO: 308287 - protein, 318 aa, Zea mays
  unsure (1)..(318): unsure at all Xaa locations
  Clone ID: MRT4577_44224C.1.pep
MSGLLNSNLNSSASNLSDSAGRPFTASFSGQSGSIPGFHHSGLHNTHGSYNLPSMPGSLAQRNAAMSGLPSSGVQQPXGGSIPGRFPSNNLPVGMPQIPHAHSGVSGRGMNFGAGPAFSSSMNIGGNIQGLSSGLGSGGNRNSVHGMPVSSSIGNSGQRISSVGNMVSASNIGRNIGTGGLSVPSIASRINLNGSGGSGSLNVQGSSRMMNGLLHQXSXPQLINMLGSSYPTSGGSLSQSQIQAGNNSFSSMGMLHDASDTAPFDINDFPQLSGRPSSAGGPQGQYGSLRKQGVGVNTLVQXNQEFSIQNEDFPALPG

SEQ ID NO: 308288 - protein, 109 aa, Zea mays
  Clone ID: MRT4577_44225C.1.pep
PAADISASSALGGDPEMTLFGVFDGNWGKNAAEFAAENMPKFLAEEFKKVNGGREIEGAVKRSYLKTDEEFLKRDESGSSCCVTSVLQKGGLIFSNTTDCRAVLSRAGK

SEQ ID NO: 308289 - protein, 50 aa, Zea mays
  Clone ID: MRT4577_44226C.1.pep
LVFFFFFFFFFFFFLFFFFFFWTEDRTSKPSMRCYFEAGEKLILNIRQFN

SEQ ID NO: 308290 - protein, 57 aa, Zea mays
  Clone ID: MRT4577_44227C.1.pep
MASGDLASTYYPIFISVVGIDIGTAKTTFVKRDLTVEFENKYEPTIAAQAHPLDIST

SEQ ID NO: 308291 - protein, 195 aa, Zea mays
  Clone ID: MRT4577_44228C.1.pep
IVQAKFKYLSEHYAHVRQMRMDGSSFYRAFLFSYLENLGKMQASHAEVTRLMECVARSREKFCRLHWNDAYFSNPEAFFSSVVSEFEQLVNSVANGLNADELYKRSLHEITSSRILCLFRLLTEVHIRTHHADYPEFSQETEALMNQEQAQHQELRVQSEVTLCQAQLINTQSKEGMITTQPCRLETCFRLIACL

SEQ ID NO: 308292 - protein, 186 aa, Zea mays
  unsure (1)..(186): unsure at all Xaa locations
  Clone ID: MRT4577_44229C.1.pep
SRQKEYLRPPNNRVAKHSYANCTFVTPEPLEKALQCQEPLSDXLSXKYAENSIVQQKFKILSEHYAHVRQMRMDGSSFYRAFLFSYLACNQENLGKMQASHAEVTRLMECVARSREKFCRLHWNDAYFSNPEAFFSSVVSEFEQLVNSVANGLNADELYKRSLHEITSSRRRIQFFLGCVVYLFSM

SEQ ID NO: 308293 - protein, 395 aa, Zea mays
  Clone ID: MRT4577_4422C.1.pep
MAVLQVAAAAPPPVSVIGFEGFEKRLEISFSEAPVLADPSGRGLRALSRAQIDSVLDLARCTIVSELSNEDFDSYVLSESSLFVYPYKIVIKTCGTTKLLLAIPRILELAEELLLPLAAVKYSRGTFIFPEAQPSPHKNFADEVAFLNRFFGGLKSGGNAYVIGDSAKPGQKWHVYYAAEHPEEPVVTLEMCMTGLDKKKASVFFKTTADGYSLCAKEMTKLSGISDIIPEMEICDFDFEPCGYSMNAVHGPALSTIHVTPEDGFSYASYEVMGFNPGSFSYGDLVKRVLRCFGPTEFSVAVTIFGDRDNAKTWGTKLDAEAYACSNMVEQVLPFGGLLIYQSFTVTAETTHGSPRSVLHDFAGDIVKNRSESDAPWEADAVDESEERDVKKMKC

SEQ ID NO: 308294 - protein, 51 aa, Zea mays
  Clone ID: MRT4577_44230C.1.pep
QGLSKNAFVLKFWGYWSLNLNDPNHVLLYQKTTSPSYVLTKYESSIHASAM

SEQ ID NO: 308295 - protein, 50 aa, Zea mays
  Clone ID: MRT4577_44231C.1.pep
GCSFKNDLANLLRKCRTKITTLILIDVHYFRNKRLIFEIRVTYSRVTLPI

SEQ ID NO: 308296 - protein, 233 aa, Zea mays
  Clone ID: MRT4577_44232C.1.pep
YGILQSFNKAKDFVWRHDLFEDSMVAAGLSGIESGTKLYISNLHYGVTSEDLQELFSEMGHLKHCAVHYDSYRHPTGSAEVIFTRRSEALAALKRYNNMRLDGKAMKIEVIGAELGLSAAAVPQISVVPGASRRGQREVVMMPGGSGFGQGASGPSSSLPGWKRGGFVRRGQGRVSFPQRGRGQVRSRGRGRGRSSFVQSRGRGYVRRGNAEKSAKQLDNELDNYNSGAMNVD

SEQ ID NO: 308297 - protein, 61 aa, Zea mays
  Clone ID: MRT4577_44233C.1.pep
PPPFFFFFFFFFFFFFFFFFFLSLHYCRSIYMWVLNYTVTISILVLTALKPDIRPLFLDFH

SEQ ID NO: 308298 - protein, 67 aa, Zea mays
  Clone ID: MRT4577_44234C.1.pep
LCSRTSARHSTQRRRESWRSSRTRWPSAKSTAATSDELRRRCERRQGGGHAAAPEFLNCIRPRWIHN

SEQ ID NO: 308299 - protein, 307 aa, Zea mays
  unsure (1)..(307): unsure at all Xaa locations
  Clone ID: MRT4577_44235C.1.pep
MATPLDVPLDDLIKSRAGRGTGRGRGQGGGRGRGDGQRLARGSWRGRGTGNFRERGLGVSSRRPLGVNTWSSSFAIAKSFNKAKDFVWRHDLFEDSMVAAXGLSGIESGTKLYISNLHYGVTSEDLQELFSEMGHLKHCAVHYDSYRHPTGSAEVIFTRRSEALAALKRYNNMRLDGKAMKIEVIGAELGLSAAAVPQISVVPGASRRGQREVVMMPGGSGFGQGASGPSSSLPGWKRGGFVRRGQGRVSFPQRGRGQVRSRGRGRGRSSFVQSRGRGYVRRGNAEKSAKQLDNELDNYNSGAMNVD

SEQ ID NO: 308300 - protein, 106 aa, Zea mays
  unsure (1)..(106): unsure at all Xaa locations
  Clone ID: MRT4577_44236C.1.pep
AFLGKNLQXXVPTXXPSLSXXLSPRAVGTQYLVPKHLLQGSHQAQTPAGSGSGHDTGDPPRRVKACLLLVIXRTWRGREPSGAHPRLLPAEEPXGREDGALQGRAP

SEQ ID NO: 308301 - protein, 80 aa, Zea mays
  Clone ID: MRT4577_44237C.1.pep
PRVRSAFKEKYEHIADKNDKLEEQVTYLSSSFLSFKDQLVVALSWNWLQVKLFPAQTVRCFGSNDRHRIKRQTGERRAFG

SEQ ID NO: 308302 - protein, 184 aa, Zea mays
  Clone ID: MRT4577_44238C.1.pep
MSVIHADDIEISLCDGNSEDERRRRKIGSLRRKAIHALKKRGRRRVDFRFPPAISIEDVRDAEEERAVSAFRERLAAHGLLPEKHDDYHMMLRFLKARKFDAEKAMQMWADMLRWRKEFGADTILEDFEFDELDEVLCHYPQGYHGVDREGRPVYIERLGKVDPNKLMQITSVDRYIKYHVQEF

SEQ ID NO: 308303 - protein, 197 aa, Zea mays
  unsure (1)..(197): unsure at all Xaa locations
  Clone ID: MRT4577_44239C.1.pep
MRVHVAMAVGLVFLVSGAWCVSPKVCPGNNITVIYGKDWLDAKETWYGKPTGAGPDHNRGGCGYKDVNXPPFDSMGACGNILIFXDGMGXGSCFEISRDKPVECSGEAVEVHITDMNYEPIAAYHFDLSGXRIDAMAKNGEEDKLHKVGIIDVHIRRSKCKYDSNVSFHLEKGCVSYYLALLDNYVXGDCDIVVVDL

SEQ ID NO: 308304 - protein, 117 aa, Zea mays
  Clone ID: MRT4577_4423C.1.pep
RMGSETSGSARSSARIHRRRCAGGSFLMDRNDTPARARSRGLELPRHSLAHRREVYCVRARGQSVACLLAGCLGSWWRQTDRVRDVGEGEVSAVPAPQRKPEAAAFRARKSGGLVPN

SEQ ID NO: 308305 - protein, 54 aa, Zea mays
  Clone ID: MRT4577_44240C.1.pep
PPFFFFFRKQGGHYCSTLIRSFITRGFRVQEHSKATSSALGLVGGGGYSKMKCL

SEQ ID NO: 308306 - protein, 530 aa, Zea mays
  Clone ID: MRT4577_44241C.1.pep
MATGSPRRRPLPLLLLFLLLFAANGRANAARPGGPSPIKNVVVLALENRSFDHMLGWMRRLLGLPVDGLNGTECNPNSNSTSSICVSADADLVVPDDPGHSFEDVLEQVFGNVSAAAAQPQPSMSGFVRSALSVNAVLSSAVMRAFRPSLLPAFSALAPQFAVFDRWFSSIPGPTQPNRLFLYSATSRGAVAHDKLDLLLGYPQRTIFESLAADGHDFAVYFKTIPTVLFYRRLRALRYAARAFHRYDAAFKEHARRGVLPALSVIEPRYFDLTGTPADDDHPAHDVANGQRLVKDVYEALRASPQWNQTLLIVTYDEHGGFYDHVATPTAGVPSPDGIRGPPPFFFKFDRLGVRVPTIMVSPWIKKGTVVGRALGPTDTSEFEHSSIPATIKKIFNLSSDFLTKRDAWAGTFDHIFTELDQPRTDCPETLPEVPFERPTPPKEHGWLSDFQRELVELASFLNGDYMLTSLAQENRKKKMTVKQADAYVRRAITSFLQASKQAVRLGANESAIVTMRSSLTSKSTRSSSP

SEQ ID NO: 308307 - protein, 189 aa, Zea mays
  unsure (1)..(189): unsure at all Xaa locations
  Clone ID: MRT4577_44242C.1.pep
SEFGSRKNITRAFFVDLEPTAIGEVTTGADRXIHPPEQIILHKEHAANNFARGHYTLGRKVKNLRLDPIPXFEDHCTGLQGVMNLNDADGGTGCRLTSLVXEQLAVHYGRSSELGFTIYPSLQISHAGGEPYDRALCMHSLIDHTYVDVLIAXEPIYDICKSALGNERATYTNLNRLIXQAVSYLTTLL

SEQ ID NO: 308308 - protein, 143 aa, Zea mays
  Clone ID: MRT4577_44243C.1.pep
MSSTNSVQCFGKKKTATAVAHCKAGKGLIKVNGRPLQLVQPEILRFKVYEPLLVVGLDKFANVDVRVRVSGGGQVSQVYAIRQAIAKSLIAYYQKFVDEHSKNLLKQALVQFDRTLLVADNRRCEPKKFGGPGARARFQKSYR

SEQ ID NO: 308309 - protein, 75 aa, Zea mays
  Clone ID: MRT4577_44244C.1.pep
MASLAACLPADDQRDPFRLPTKENIRMAMHWLVQGCSYGDSLVFHFSGIGRQVADDDGDEADGYHEALCPLHAPP

SEQ ID NO: 308310 - protein, 57 aa, Zea mays
  Clone ID: MRT4577_44245C.1.pep
PVRGVTPTTPAFLGVATGPPGAGTGPIRTSMYMACYNPAYNPSGIRVTPINGAMDHT

SEQ ID NO: 308311 - protein, 78 aa, Zea mays
  Clone ID: MRT4577_44246C.1.pep
CFGPGTDANTFKSVGLRLPLFVALSVPFGGSHLVLVYPWYPVTGPVGWHCTRCYLFELEALMIIAILASLCVCRAVRL

SEQ ID NO: 308312 - protein, 71 aa, Zea mays
  Clone ID: MRT4577_44247C.1.pep
PLFSYPVCCLEKTLSAEMRPARSPAPFLRRWKPFFYKTCKKGCRYCALEVTYRSACLFLNNGAPSQKNVEY

SEQ ID NO: 308313 - protein, 107 aa, Zea mays
  unsure (1)..(107): unsure at all Xaa locations
  Clone ID: MRT4577_44248C.1.pep
WPGFPGPCSSGLGVCVCFASSICGCLALGCVGWGFSSLCCSCSRFAGWVLCFSGGVLLGVLLVLLLVCEGFGLGRRLALFKPPSLGSPCVRGCVFIGRRWVVPVXFR

SEQ ID NO: 308314 - protein, 94 aa, Zea mays
  Clone ID: MRT4577_44249C.1.pep
LHQSVKLVYNIDDGYTCFRKVMELGFLEKTITGIIEELIKRHKQIDAVHFIQAFRAIPPSPLLKTYIEEFKDTIENNGDATVNCLFSFFYQQTK

SEQ ID NO: 308315 - protein, 139 aa, Zea mays
  Clone ID: MRT4577_4424C.1.pep
MLQVHPSHSRSVKVIYTGLCLQLFVRKSQCRLLKRNQPCLGAGDGAPYTNFTGRESSLITYDLMTTGNVALQEAWDTVLGDVHQAERWMLELPSRDDQPMLKILASVDQLRFKTWKQNCGEQLRSDGLRCCFDGLYEEI

SEQ ID NO: 308316 - protein, 79 aa, Zea mays
  Clone ID: MRT4577_44250C.1.pep
CYSFFNLAPLKFRPPYFLSLPFLFFFPSFFPPFIFSPYVLFFLLRTIPPTSKCPPNKYHCMPSVFSMISFNHTQSRESH

SEQ ID NO: 308317 - protein, 57 aa, Zea mays
  Clone ID: MRT4577_44251C.1.pep
KSSETSLYLWLTLPVVCRKSTFFLGNVSFRTIQKKKKKKKKKKKKKKKKKKKKKNGK

SEQ ID NO: 308318 - protein, 45 aa, Zea mays
  Clone ID: MRT4577_44252C.1.pep
PGDLSSLIHFEFFYWQPQKVCCTGMWLIKSKAFKGEDLIGKNVLD

SEQ ID NO: 308319 - protein, 166 aa, Zea mays
  Clone ID: MRT4577_44253C.1.pep
MASDSGDFGGENKSLETARRLLEETFTSEAEAEALPSLPSGFYDAFVLRGIRVVQALQPGTLLCHFNVPSRLLNSGGFLHGGATASLVDLVASAAFATAGLRTRGSPLEMNISYLDAAFADEEIDIEAKVLRAGKAVGVAVVELKKKSGKIIAQARYSKYLGVSKL

SEQ ID NO: 308320 - protein, 67 aa, Zea mays
  Clone ID: MRT4577_44254C.1.pep
MRNAYIQTESRRPLPKISQCDDHDPACPNRFTFIFHKPRHDQNCCNCQYTGSSFKHPTTDKLDSYPA

SEQ ID NO: 308321 - protein, 58 aa, Zea mays
  unsure (1)..(58): unsure at all Xaa locations
  Clone ID: MRT4577_44255C.1.pep
ASTAPHWVGPFSLLNRFWVRRXRTTXLLLAAARQMKEYIPTRTYLVNSMDPDTRGSHP

SEQ ID NO: 308322 - protein, 71 aa, Zea mays
  unsure (1)..(71): unsure at all Xaa locations
  Clone ID: MRT4577_44256C.1.pep
SQVAGAAVIQKKKKKKKKKKKKKKKKKKEEKLKKIKNKKNSKXKKKKHVKKIKNKLGGVVLKIKKFLKPGK

SEQ ID NO: 308323 - protein, 74 aa, Zea mays
  Clone ID: MRT4577_44257C.1.pep
LLKHHCHSPNNEYPDHTKAKPPKLGKCAPLNIHIIFLGENNKLKVKPKRFGHHNTRPMHIVIQNYLKITNEAEI

SEQ ID NO: 308324 - protein, 117 aa, Zea mays
  unsure (1)..(117): unsure at all Xaa locations
  Clone ID: MRT4577_44258C.1.pep
KENTKKHHRTYTSLKVHTKTNKTLRELNTLISQLNSPTKLGNLASITNQVLYLCIKQGSKLHVLQXIVSKNQPQFIEPIFSSLNSSFSAPFLSLCSVLCNSQIPSTTNTTHLLQVIL

SEQ ID NO: 308325 - protein, 326 aa, Zea mays
  unsure (1)..(326): unsure at all Xaa locations
  Clone ID: MRT4577_44259C.1.pep
MDAARWVVCLLVTVICLSCAAAATAAVRSPAARLHRHLKRLNKPAVKSIESPDGDMIDCVHISHQPAFDHPYLKNHTIQMRPNYHPEGLYEESKASSSSGERPMAQLWHQNGRCPEGTVPIRRTRKDDLLRASSMRRYGRKRRAAANPMSVSPTMLNEGGHQHAIAYVQGDKYYGAKATINVWAPKIEQPNEFSLSQLWILGGSFGEDLNSIEAAWQVSPDLYGDNNTRLFTYWTSDAYQATGCYNMLCSGFIQINNQIAMGASIFPTSSYSGSQSYSSIXICKDPKDGNWWMQFSKDYVLGYWPSFLFSXLADSASMVELGREVV

SEQ ID NO: 308326 - protein, 78 aa, Zea mays
  unsure (1)..(78): unsure at all Xaa locations
  Clone ID: MRT4577_4425C.1.pep
MAVLQVAAAAPPPVSVIGFEGFEKRLEISFSEAPVLADPSGRGLRALSRAQIDSVLDLARCTIVSELSNDXLDSYXLS

SEQ ID NO: 308327 - protein, 209 aa, Zea mays
  Clone ID: MRT4577_44260C.1.pep
MPLFISDEELRLLGGDTAAVAERADAAIRELRRQVDTVRAEADAAAIAAEQTCALLEQRYASLSAEFDRSKAEAAELTASAERRAAELASSQAEIHQLRIQAIAKDGEVERLKIEISELHKSKCQSLELIEQRDAEIKEKDDIIQSYYNKIVNLAETSAGKEARIQEVEAKFTHCQAICNRMTQEKELLEKHNVWLDEELKAKVKNLAE

SEQ ID NO: 308328 - protein, 232 aa, Zea mays
  unsure (1)..(232): unsure at all Xaa locations
  Clone ID: MRT4577_44261C.1.pep
LRIQLDRVCYNTLLAIYVKTGKYDEIATVCEEMEKLGIEKDTVTYNSLINGYGKQGRLDMVAFLVQDMRAQGVAPSVLTYSTLIDIYSAGXIRGDAFNVYLDFKESGLKADVVLFSSFIDTLAKNGLVECALSLLDEMMKMGIKPNVVTYNTIIDAFGKSKIFTEEDSDIGDMGIVGVYGGQVVRVTNPVIRXDGALXTDVRMRRSQELFFILELFQKMVHPGVRPNVVTFS

SEQ ID NO: 308329 - protein, 96 aa, Zea mays
  Clone ID: MRT4577_44262C.1.pep
IILPQQHKTRGDFWGITAVFFPKKKTVHPGTQVRGGPQHEQRSREKHKRGFLRAMPGPEIAQGPWASRGYPTNRGAPHLNPKGHVFSKGESNRDGK

SEQ ID NO: 308330 - protein, 62 aa, Zea mays
  unsure (1)..(62): unsure at all Xaa locations
  Clone ID: MRT4577_44263C.1.pep
RQVPVLISFVYPRFPSYSKRQHPFVVRLRTLTRIPAQRAXXXILADSVWVAPSLKRIQSSLF

SEQ ID NO: 308331 - protein, 205 aa, Zea mays
  unsure (1)..(205): unsure at all Xaa locations
  Clone ID: MRT4577_44264C.1.pep
PAFPGIIIVSSNVXATAKLIKNLADDFAVKDLGNLEYFLGIEVKKTREGILLSQKXYALDLLKKANLEKCKAFSTPMSATDKLSKNQGTTLNEKEHFRYRSTVGGLQYLTLTRPDLSFAVNKVSQYLQSPTDVHWTAVKRILRFVKGTIDYGLLIQKTPSVMLSSFSDADWAGCPDYRKSTSGFALFLGDNLVAWRSRKQATVSR

SEQ ID NO: 308332 - protein, 473 aa, Zea mays
  unsure (1)..(473): unsure at all Xaa locations
  Clone ID: MRT4577_44265C.1.pep
RLTCDIVDALEASMLYKEAAAVAGGATYTRKLPQRNTRXAASGVPRWASSAATTPESKRPGQTISKGHKNYELMLQLQLGIRHSVGKSSAVPMRALQPGDFDPGEKFWTRFPPEGSKVTLPHSSGEFRWKDYCPMVFRHLRKLFAVDTADYMLAICGNDALRELSSPGKSGSFFYLTQDDRFMIKTVKKSEVKLLIRMLNSYYNHFNRYKNSLITRFYGVHCVKPLNGQKVRFIVMGNLFCSEYQIHPRFDLKGSSYGRTADNFEDEIDETTTLKDLDLNLVFPMQRSCYTDLHEHSGQDCDFLESDGIMDYSFSLGVHFCXDDISASKMGSSTFTASPKLLTKSESFQGGGTPELCFSDDDFDMVPDCHRKPLIRLGAHMPARAEQASRRSEFDPLLLTGGGFLFPNQTGEVHDVILFFGIIDILQDYSLRKRAEHAYKSLQTDPNSISAVDPKLYSKRFQDFIGRIFVEDG

SEQ ID NO: 308333 - protein, 293 aa, Zea mays
  Clone ID: MRT4577_44266C.1.pep
MRGGGAGPTAAFMSDEPPPADAEEVEENSGAEEEDEETVVEQDDDELELGLCLGSKQQQQQHPPPCRILTARDLQPRSLSPDSSVSSSSPAAGAGTAAPSKRAKADAAPNSPGTVASGHPQSFGVVGWPPIRTFRMNSLFNQAKENASEAGAKKPIVEPDMQEDKEESKKGRTVGWVKVNMEGDIIGRKVDLNAHRSYKTLASALELMFMKPSIGLCTSSSSKTLKLLDSSSEYQLTYEDRDGDWMLVGDVPWEMFVGSVKRLKIMRTSDAKGLGPRFQGSHRPTAACTRGRT

SEQ ID NO: 308334 - protein, 62 aa, Zea mays
  unsure (1)..(62): unsure at all Xaa locations
  Clone ID: MRT4577_44267C.1.pep
MFACAKLACTPSLIRAGSRVAYRPISASVLSRPEASRTGEGSTVFNGAQXGVSQLIQREFQT

SEQ ID NO: 308335 - protein, 111 aa, Zea mays
  Clone ID: MRT4577_44268C.1.pep
KEKFPPQKQPPFETVRKNSALPSKGEPAPKLPAAAKKMEQKTVEKDFGDFQAAGGKNESCTKIMLPRLFFSFFQIWVSKQMWLLPALCSCIKSFHLKTYKKKHGQTLYPFF

SEQ ID NO: 308336 - protein, 55 aa, Zea mays
  Clone ID: MRT4577_44269C.1.pep
LHFISRELQSARYVLLQWPSQTSPVALTCRPKSGGQSATLATSSLFRAYCRAQTA

SEQ ID NO: 308337 - protein, 393 aa, Zea mays
  Clone ID: MRT4577_4426C.1.pep
MAVLQAAAPPPVSVIGFEGFEKRLEISFSEAPVLADPSGRGLRALSRAQIDSVLDLARCTIVSELSNDDFDSYVLSESSLFVYPYKIVIKTCGTTKLLLAIPRILELAEELLLPLAAVKYSRGTFIFPEAQPSPHKNFADEVAFLNRFFGGLKSGGNAYVIGDSAKPGQKWHVYYAAEHPEEPVVTLEMCMTGLDKKKASVFFKTTADGYSLCAKEMTKLSGISDIIPEMEICDFDFEPCGYSMNAVHGPALSTIHVTPEDGFSYASYEVMGFNPGSFSYGDLVKRVLRCFGPTEFSVTVTIFGDRDNAKTWGTKLDAEAYACSNMVEQVLPFGGLLIYQSFTVTAETTHGSPRSVLHDFAGDIVKNRSESDAPWEADAVDESEERDVKKMKC

SEQ ID NO: 308338 - protein, 31 aa, Zea mays
  Clone ID: MRT4577_44270C.1.pep
MEAASPSRLCLRLILSKKWGFLDARGKNVWT

SEQ ID NO: 308339 - protein, 76 aa, Zea mays
  unsure (1)..(76): unsure at all Xaa locations
  Clone ID: MRT4577_44271C.1.pep
SPSPSPSARTLPSSTASSSPTXAPASPSSASVSTTHVPAASTTGSSRSPATVSSPSTCVAHSDHSATSISTPQSSH

SEQ ID NO: 308340 - protein, 53 aa, Zea mays
  Clone ID: MRT4577_44272C.1.pep
GTPKCFRLAHKIYLQWLKGLLITASESKKEKPGSLGAWMNLSHTRLHGCRIDQ

SEQ ID NO: 308341 - protein, 130 aa, Zea mays
  unsure (1)..(130): unsure at all Xaa locations
  Clone ID: MRT4577_44273C.1.pep
MGEQANQPAALQKVEGQLHLRPIISECVRARNICQAVSYYEXRFARRNYLTHILLDPSMPGSHAINVPEMRTPLCANAPADTEGKNFMMDFVMYGVAAGVSKNDGAHIEHKXLLIHKQHDMLNLXRLSEP

SEQ ID NO: 308342 - protein, 61 aa, Zea mays
  Clone ID: MRT4577_44274C.1.pep
ETIRFTRIKSLLNANKLVGSAQGAHTSRITPTMPKPRIHDTHSTLVCLNLDYPGCPRTGNS

SEQ ID NO: 308343 - protein, 66 aa, Zea mays
  unsure (1)..(66): unsure at all Xaa locations
  Clone ID: MRT4577_44275C.1.pep
KGTDPTFFFSYKPIKQKIQLFFLFFFFXNHLFSLYPPPFHFNGSFRSLLTLPPMVMGDTTLLIAAK

SEQ ID NO: 308344 - protein, 60 aa, Zea mays
  Clone ID: MRT4577_44276C.1.pep
RCVTLFYTFYNSKSSKVHIHETYSILTNATPKQGLFCHFKISTYGLRIFNTQSIPPYPNP

SEQ ID NO: 308345 - protein, 162 aa, Zea mays
  unsure (1)..(162): unsure at all Xaa locations
  Clone ID: MRT4577_44277C.1.pep
MSDWEEHLVXAEADVGGPNTXPQRVGPARLNGFSVLQNRPCHDEDDATSETEKDGRDTCXFDRVDIFNGXKLEDIARSSCNXGVPHXNQSCYKLTAISEYGFVKLLTSDGHSKEDLXLPCSKRTLVGPTLCGGFRSXKDVDQTVQSAKRQQPICSLNDVDPR

SEQ ID NO: 308346 - protein, 76 aa, Zea mays
  Clone ID: MRT4577_44278C.1.pep
GKHNFFCIEDLVPEIMTVGPHFKEANTFLCPFKLKAPLGGLKKKRTPFLEGGDPGTPENSPNGLPKRINWVPDQAH

SEQ ID NO: 308347 - protein, 139 aa, Zea mays
  Clone ID: MRT4577_44279C.1.pep
ARLRTQRQNRDAVKAVQSRANQTLELKRNVPFPLAVTSRTIMSLIFWAMQHGNLGCLRFDNSILLERVLGYSFFFFLSCDGEFETLNSLSESDHVCLYLQLQKDTILEAMDDSLLVHNSRAFWWPCLALCSEYTLMPFF

SEQ ID NO: 308348 - protein, 194 aa, Zea mays
  unsure (1)..(194): unsure at all Xaa locations
  Clone ID: MRT4577_4427C.1.pep
PGAAVVVYVRPVALFFVSRPXGFGLYIFLIILPFIVLCPLYYYYQRHPVNLLLLGLFTVAISFAVGLTCAFTKGEVILESAVLTAVVVLSLTAYTFWAAKRGHDFNFLGPFLFAAVMILMLFALIQLFFPLGRISLMIYGGLAALVFCGYIIYDTDNLIKRYSYDEYVWAAVALYLDVINLFLSLVTLFRAADS

SEQ ID NO: 308349 - protein, 82 aa, Zea mays
  unsure (1)..(82): unsure at all Xaa locations
  Clone ID: MRT4577_44280C.1.pep
LVGAKLVSGIVWRAEIFVCKERMPITSPLMARVVLIQSLVSFLTCNKMHPCPRRAGNRSVELVQASLLPIGWQFTPDXPCGL

SEQ ID NO: 308350 - protein, 106 aa, Zea mays
  unsure (1)..(106): unsure at all Xaa locations
  Clone ID: MRT4577_44281C.1.pep
FSPQGNQAGGRGETKDPLKHKARHKNALETAEAATKQHESRHRHRMDRDNKASNSRKTEDYQSNITETGPAKRHEDQSTQHAEKPTEGTGGDKDPEYXMHGIKNEK

SEQ ID NO: 308351 - protein, 54 aa, Zea mays
  Clone ID: MRT4577_44282C.1.pep
MSPPLPGLVFGIIWWPPPGLMPWFFSFKKKKKKKKKKKKKKKKKKKKKKKKQKH

SEQ ID NO: 308352 - protein, 79 aa, Zea mays
  Clone ID: MRT4577_44283C.1.pep
IKPSILHPQKILTLTQNCTHQHVSEITMRLRALLYKTTGLRALLANPFAIPIGCQNHTIHPPPIHPAEYIQVKPPRILG

SEQ ID NO: 308353 - protein, 65 aa, Zea mays
  Clone ID: MRT4577_44284C.1.pep
SLTLLLPHSTSPRSASSARSRAVAKVFVCRFQVAMVRGSSVCLELPRRFLPLCLLPAMTIDTNNS

SEQ ID NO: 308354 - protein, 79 aa, Zea mays
  Clone ID: MRT4577_44285C.1.pep
TPTSFIMHHVYYLIDAVTNPETCLRPDIAFIPFSHYFDIYTVTTTAICVPDIVHIHVIHLHCPLNRLILKLLCKIFINF

SEQ ID NO: 308355 - protein, 82 aa, Zea mays
  Clone ID: MRT4577_44286C.1.pep
DPWRLHLYILSWVDRWWVYGVILASNWNGKGNSVIVLGILSLFFLSRGLEFSCCKLFLSCHRDLPGGLEVMLFCIIVLSASL

SEQ ID NO: 308356 - protein, 98 aa, Zea mays
  Clone ID: MRT4577_44287C.1.pep
PKVSCVCLRVHKRVERTYHTCDGDDDTTARGGPVAPSQNHYRQQCLSLPFPGGSEVVFCLTSSSASLDSAHHRRRCGLHGDALCPTPAPPARWRSAFA

SEQ ID NO: 308357 - protein, 104 aa, Zea mays
  Clone ID: MRT4577_44288C.1.pep
GFLEQAHGHTYPKIDYWSPFCWLPNKKPGKIILQGTFGNPRQLSGPGVVVGGLPGPTEMLRVGGVPPPPSSAAYASIRPRGGLIDQGAGGRTPGPLVGTNGAWT

SEQ ID NO: 308358 - protein, 65 aa, Zea mays
  Clone ID: MRT4577_44289C.1.pep
RAMCDQGQGRSDIRYTLIREQHRAIDISRLIRTRRPHRPRPPYSPHQNQHTGHFRLRPRVPPRVR

SEQ ID NO: 308359 - protein, 500 aa, Zea mays
  unsure (1)..(500): unsure at all Xaa locations
  Clone ID: MRT4577_4428C.1.pep
MESKGGKKKSSSSRSSLMYEAPLGYSIEDIRPAGGIKKFSAAYSNCARKPSXISVVIPILVXETTCIFILISLIPPASCFPVTKRYQRPLPVFLPWPVCHLALKRWAVLQVAAAAPPPVSVIGFEGFEKRLEISFSEAPVLADPSGRGLRALSRAQIDSVLDLARCTIVSELSNEDFDSYVLSESSLFVYPYKIVIKTCGTTKLLLAIPRILELAEELLLPLAAVKYSRGTFIFPEAQPSPHKNFADEVAFLNRFFGGLKSGGNAYVIGDSAKPGQKWHVYYAAEHPEEPVVTLEXMTGLDKKKAXVFFKTTADGYSLCAKKLTSSLGISDIIPEMEICDFDFEPCGYSMNAVHGPALSTIHVTPEDGFSYASYEAMGFNPGSFSYGDLVKRVLRCFGPAEFSVAVTIFGERDDAKTWGKKLDAEAYACSNMVEQVLPFGGFLIYQSFTVTGETTHGSPRSVLHDFAGDIVKNRSESDAPCWEADAVDESEEREVKKMKC

SEQ ID NO: 308360 - protein, 53 aa, Zea mays
  Clone ID: MRT4577_44290C.1.pep
GTRGGDSQGPKGVPSGLFFFFPETNRGGEWKMVKGPPVGELSRKKIDSPVQKP

SEQ ID NO: 308361 - protein, 155 aa, Zea mays
  unsure (1)..(155): unsure at all Xaa locations
  Clone ID: MRT4577_44291C.1.pep
LGFSRPAGMTETCGIXSLEYVQKGCARQFGSTGALVTGVEAKIVNAKTMKHLPPSQLGEICVRGPNIMEGYFNNVQATESTIKNGWLHTGDLGYFDERGQLHVVDRLKELIKYKGFQVAHYKRLRKVTFVGSVPKSAAGMILRRELIAQVRLSKL

SEQ ID NO: 308362 - protein, 504 aa, Zea mays
  Clone ID: MRT4577_44292C.1.pep
HARSPAIRTSHSKDIAGSKSSQRTNGGHGVASGGLRLRWRVPLAAPGGCVLYPVCFLAVTALGAVATTANPLYTPREIAKQAADARARLVVTVSDLLPKISGLRLPIVLLDGDGAPVPSGCPSSNVTLYSDLVAGVQEAEYRHTPIGQGDTAALFYSSGTTGESKGVVLTHRNFIAAATMVTSDQDELGEGHNVFLCFLPMFHIFGMSVITLGQLQRGNAVVVMARFDVDAVLAAIERHRVTYLFCAPPAMIALAKHSRGGRYDLSSLRCIGSGAAPLGKDVMVAMADRFPGVDIIQGYGMTETCGIISLEYVQKGCARQFGSTGALVTGVEAKIVNAKTMKHLPPSQLGEICVRGPNIMEGYFNNVQATESTIKNGWLHTGDLGYFDERGQLHVVDRLKELIKYKGFQIAPAELEGLLLSHPEILDAAVIPYPDAEAGEVPIAYVVLSPKSSLAEADVQKFIEKQVAHYKRLRKVTFVGSVPKSAAGKILRRELIAQVRLSKL

SEQ ID NO: 308363 - protein, 79 aa, Zea mays
  Clone ID: MRT4577_44293C.1.pep
GGKMCGNKKKGCGVNCPVGTERKMGKKKWASSGLGGEMGPGPPRGPLKLGSLFCLKFPGKPPPRRAVGVIFLKKETSCS

SEQ ID NO: 308364 - protein, 52 aa, Zea mays
  Clone ID: MRT4577_44294C.1.pep
KKRIPGEFKHNCLKQKTTLIYFLTFSSMALPSILSPKLPFLNITYCLSVFFP

SEQ ID NO: 308365 - protein, 149 aa, Zea mays
  Clone ID: MRT4577_44295C.1.pep
VVTTQSTFFFFFFFFFIFFIFFFFFDDERASENASGRERERGETPSGALVFYSVAQGVAYRHIIARTAVGRDKAPHQAGRGQLARSAHVGARLSSPARCCAPGRAVEDEEGDDTGARALAGDRPGGLARLAVARGAAASHSTALARVAP

SEQ ID NO: 308366 - protein, 32 aa, Zea mays
  unsure (1)..(32): unsure at all Xaa locations
  Clone ID: MRT4577_44296C.1.pep
LRRRFFSRGRKFLEEICRLYSAFLFLKKXYVN

SEQ ID NO: 308367 - protein, 195 aa, Zea mays
  Clone ID: MRT4577_44297C.1.pep
TRKYTPLLSKILQCVLQKGTDGDKISHEKEVIAAADEVVGSIDKEELAKYLSLNSDPEDEEAQKFKKKIEETRDQLADALYQKCLALAEIESLKSDESIEVSAKDIFEENYKELIKWVDVKSAKYGTSTVLREKRCGRPGTALKILNDLIQNESEPKKKLYDLKIQLIEEMGWNHVSTYEKQWMQVRFPPCLPPF

SEQ ID NO: 308368 - protein, 738 aa, Zea mays
  unsure (1)..(738): unsure at all Xaa locations
  Clone ID: MRT4577_44298C.1.pep
MVGKSVPKLRGIYLRGGNACCQTSEWXTVLLDPKFHEGXSPLSPLVCLHXLLTLFSNGSIIVEVQELSFLLLGASVHYFVGNPANRSSGLHYFEVYGIDYKAPWRGPIFRVPITVIKPIALLGEPPLLSISNLRFQSGHIERRFINVPFGASWAEVTMRTSAFDTPRRFFLDTVQICPLKRPVKWEAVVTFSSPSSKNFSFPVEGGLTLELSIAQFWSSGIASHEPTCVDFEIVLHGISIDQKVSTLDGESPLLIVARSLLASEKLVPVGTLNKIRIPYRPVECNLSSLPTDRDKLPSGKQIIALTLTYKFKLEDNAEIKPHVPLLNNRIYDNKFESQFYRISDSNKRIYSSGDVYPSYVRLSKGEYTLQLYIRHENVQFLEKLKELVLFIERKLDKKDFVPLMFYSQPDGPIVGSGTFKSTVLVPGEPEAFYVGPPSSEKLPKNAPPGAVLVGSITYGTVSTFNKKDEQNHRAPVSYSISYTILPSKVDDKEKGVLVGTKSIPEQLDEEVRDTKIKFLSSVKQLTEEDKSAWSELVVSLKSEYPKYTPLLSKILQCVLQKGTDGDKISHEKEVIAAADEVVGSIDKEELAKYLSLNSDPEDEEAQKFKKKIEETRDQLADALYQKCLALAEIESLKSDESIEVSAKDIFEENYKELIKWVDVKSAKYGTSTVLREKRCGRPGTALKILNDLIQNESEPKKKLYDLKIQLIEEMGWNHVSTYEKQWMQVRFPPSLPPF

SEQ ID NO: 308369 - protein, 53 aa, Zea mays
  Clone ID: MRT4577_44299C.1.pep
IVSGRSPTRTPTRPPTRSCRWARSSSVLCMERSSLSHARFGIRVVYVHRLEGL

SEQ ID NO: 308370 - protein, 53 aa, Zea mays
  Clone ID: MRT4577_4429C.1.pep
DEGGPRVSQRGRGCVCDPSQSIGRRSVKSLKSVRLKTTCVTFRMPRHEGRFSD

SEQ ID NO: 308371 - protein, 73 aa, Zea mays
  Clone ID: MRT4577_442C.1.pep
EDTNAKDVSSFFANHGSFKMQSFYKIACILYFHQFIHTLLVVVLPELLYVSIHIGETIRLSINQMSTSVNDNL

SEQ ID NO: 308372 - protein, 87 aa, Zea mays
  Clone ID: MRT4577_44300C.1.pep
ACSTAVSYQRGSVRLSVGLGPQLRHVQRLTWHRGRASLWHMAVSVASKAFRGPWQLVVAARTIGKYEAMPAFMVPQVMNASADAWVN

SEQ ID NO: 308373 - protein, 49 aa, Zea mays
  Clone ID: MRT4577_44301C.1.pep
HLYAETDGHPRGTYRAAEPTRLILDDRELRAGRLKWVADAPQIGPDRPE

SEQ ID NO: 308374 - protein, 96 aa, Zea mays
  Clone ID: MRT4577_44302C.1.pep
KKNGNKRPRKGEPKIKPFLLFFEHNYTPLQKKQRGARNPPFLKEPAPPPPTFFPKVHSPKEKGVTKGRGGPHFWEPLKYPPLQKKNKKGGGWVPPK

SEQ ID NO: 308375 - protein, 75 aa, Zea mays
  unsure (1)..(75): unsure at all Xaa locations
  Clone ID: MRT4577_44303C.1.pep
MATTEDSAAAVNARLLFALLESQQQVLSDCHGAWSSALAHFASREEDLASRSVALDEALAXRDVSTSETLAALEA

SEQ ID NO: 308376 - protein, 72 aa, Zea mays
  unsure (1)..(72): unsure at all Xaa locations
  Clone ID: MRT4577_44304C.1.pep
LAWCRKGLGLNEEVXPNMDSKTKFSDVKGVDEAKAELEEIVHYLRALPDIAPLPSVSDTRQRLLYTRQRLCR

SEQ ID NO: 308377 - protein, 64 aa, Zea mays
  Clone ID: MRT4577_44305C.1.pep
EIKMIFLYILCSLDIPRSYICCGLSCYFTMLFGVLDGTSSSKHLVCWMVLVLMSIWCVGWYWLL

SEQ ID NO: 308378 - protein, 103 aa, Zea mays
  Clone ID: MRT4577_44306C.1.pep
GKLQPHLQLLFGADSLPPGPRLLGGARGFTRGCGEPQACAPSLCVLLLLSHACVLWLVGLSCLAVWAEAASLFCSDIGGLSTLYLSFWFVVVVLATLARWPGA

SEQ ID NO: 308379 - protein, 136 aa, Zea mays
  unsure (1)..(136): unsure at all Xaa locations
  Clone ID: MRT4577_44307C.1.pep
PVTSACANSPSELELAERQAPPSSRNGARTQQLEVVATAEEALVLLAAAETSEAGISCGQVATGKAPWIPYSRGQSSGPFAGWCRGGRSLNNAAXPTGDRRAVCNXLKNADAGLSGLDAGNAASIPSKCGVXIPYT

SEQ ID NO: 308380 - protein, 110 aa, Zea mays
  Clone ID: MRT4577_44308C.1.pep
VREASGGGRSRRGGAAARTGRSGGRVGRFVTQTERCCHGGYRRAGGRLLTLMPLPRRTGSAKGRTTGRAGRRLTGVRRPPRSRPWITERQAIVITSPYPRDSAMNTIHSR

SEQ ID NO: 308381 - protein, 47 aa, Zea mays
  Clone ID: MRT4577_44309C.1.pep
SLRSELASGKNKLVSHTHWFALMDLDTIQEQPRLATLPGKVTCDFPR

SEQ ID NO: 308382 - protein, 65 aa, Zea mays
  unsure (1)..(65): unsure at all Xaa locations
  Clone ID: MRT4577_4430C.1.pep
YVVCARXFSVFLLYMXVCAVDXWRLWWKALFASGTXAFYVFLYSINYLVQDLKSLNGPGSGSLYI

SEQ ID NO: 308383 - protein, 65 aa, Zea mays
  Clone ID: MRT4577_44310C.1.pep
GLFFHHRSNWWWFRLSLFYVVGKYGYVLMEKRFVSSSKELLLFFHVLSVGQLSFGICLFLRLMLG

SEQ ID NO: 308384 - protein, 75 aa, Zea mays
  unsure (1)..(75): unsure at all Xaa locations
  Clone ID: MRT4577_44311C.1.pep
IIPVWGDDPENRPSHGPSELFPPPPQEIKRFFFDFXKNLNKGVAVYAFLPATPAPEALPCPLGLFAPYILQSLGP

SEQ ID NO: 308385 - protein, 66 aa, Zea mays
  Clone ID: MRT4577_44312C.1.pep
LIWVTLSDMFIDGDDPSRIAFKTPTGLGRTYPVSAFAKEGATDTEAKPKDAPATTVAANGEAAASK

SEQ ID NO: 308386 - protein, 85 aa, Zea mays
  Clone ID: MRT4577_44313C.1.pep
LCYNILYWTDRGANIYTRGITTQLSITDLAENIYLKGLHANVHRLNTYHDKPDLDHIGCYLGWLLLHYPSGNYLRHGASMILPAR

SEQ ID NO: 308387 - protein, 67 aa, Zea mays
  Clone ID: MRT4577_44314C.1.pep
HNSSSVPFKRISHTAIYSLFQTRVVILHIHQDICYPPTPYSNLLITHMHADYFVSNACLTPYMLYFN

SEQ ID NO: 308388 - protein, 73 aa, Zea mays
  Clone ID: MRT4577_44315C.1.pep
PDQPLETVVVCCLTVILLTHDSLGSRSRTLQNVVFRGPRRGLSRCGIKHHVVDSAESKANDQSLLTHGDGTRF

SEQ ID NO: 308389 - protein, 146 aa, Zea mays
  Clone ID: MRT4577_44316C.1.pep
PTSTHWQKSNCQGPGRLEQGVLSYEGCSRGSSSSPAWLSPTAIGLVGRERGGEEITALHIDIDDPRLLPFVQRVVGVTRWPRRARFLEEAVHGARTIVANPAIGIYTRLLRGAIGIRRVRRHLALGTGRQIQHLRRGHFLCSSQNI

SEQ ID NO: 308390 - protein, 98 aa, Zea mays
  unsure (1)..(98): unsure at all Xaa locations
  Clone ID: MRT4577_44317C.1.pep
AVAXTVAVAWAGAVAGCLFVAHRYTPPLPYPHAIRVCVCSASARRRWFRVSPACRPHRNATRYQLSTSIAFSFRYKNLTSPPPYRTALFPARSFPKCT

SEQ ID NO: 308391 - protein, 67 aa, Zea mays
  Clone ID: MRT4577_44318C.1.pep
MIEFIRVDFYLFILDIEITNMLLMPNVQNEISDIQQRLQKMDTLEKEIESLRYELDSTVSEEESSSG

SEQ ID NO: 308392 - protein, 165 aa, Zea mays
  Clone ID: MRT4577_44319C.1.pep
MPRRQRTRSSEELKAEDFVDSVLNFGGEEEDGEEEKQEAGGDGQPAAEFKSKNLEAERKRRGKLNRNILALRAVVPNITKMSKESTLSDAIDLIRKLQNQVLELQRQLADSPGEAWEKQGSASCSESFTATENMPYQGQIELVPLGPCKYHLRIFCKKGGSSKGC

SEQ ID NO: 308393 - protein, 39 aa, Zea mays
  Clone ID: MRT4577_4431C.1.pep
MSSVFSGDETAPFFGFLGAAVSVVFSCMCASYGTATSGV

SEQ ID NO: 308394 - protein, 210 aa, Zea mays
  unsure (1)..(210): unsure at all Xaa locations
  Clone ID: MRT4577_44320C.1.pep
IFFFGGPPKFFGGGGPPPGKKKTGKTGGKPWGAQFFLGGKPNPNPDRRRGGFFPLSRKGGKRGGKNGKQKGGREPPGAKRGPKXCPGAGHLPXGPXRFGPPPPGFGRIFPGQFKGNPGGVXPPGGPQGKKNPRARPLTPRGGNPRGAGLPCPKNPVLAGGKAPPPPGGKGPXRGVENGPHPVFPGAPKAKVGPGGCEKKAQGAPPGAKFF

SEQ ID NO: 308395 - protein, 70 aa, Zea mays
  Clone ID: MRT4577_44321C.1.pep
CHASAHSCSDAWFGSHTLSLVADCSKATPNARCQNRLKLYGSYSTRTTAKEPMLRAPTGAAGQIGYALET

SEQ ID NO: 308396 - protein, 65 aa, Zea mays
  Clone ID: MRT4577_44322C.1.pep
TLLMEMVCSSRSQNSSTVYPKDDGWILFCWSCGHLHVRTVLIFLKWSMTFFFTELWLASNLRHLP

SEQ ID NO: 308397 - protein, 293 aa, Zea mays
  unsure (1)..(293): unsure at all Xaa locations
  Clone ID: MRT4577_44323C.1.pep
MDELQDVQLTEIKPLLNDKTGTRNFQDFDCQEHDIETTHGVVHVTIRGLPKGNRPVILTYHDIGLNHKSCFNAFFNFEDMQEITQHFAVCHVDAPGQQEGAPSFPTGYQYPTMDELAEMLPPVLTHLSLKSIIGIGVGAGAYILSRFALNHPELVEGLVLINVDPCAKGWIDWAASKLSGLTTNVVDIILAHHFGQEELQANLDLIQTYRLHIAQDINQENLQLFLGSYNGRRDLEIERPLLGQNDNKSKTLKCSTLLVVGDSSPAVEAVVECNSRLNPINTTLLKXADCGGL

SEQ ID NO: 308398 - protein, 73 aa, Zea mays
  unsure (1)..(73): unsure at all Xaa locations
  Clone ID: MRT4577_44324C.1.pep
QPAPAPILDPXRLKSWSWGGAFIGETLTTSIFLYIAILTATVVSKSTSNCATDGIHGIAWSFICMIFELVYCT

SEQ ID NO: 308399 - protein, 150 aa, Zea mays
  unsure (1)..(150): unsure at all Xaa locations
  Clone ID: MRT4577_44325C.1.pep
MISSKRLVQMAKKWQATAAMARRRLTATLAKEADGSCGTSMPVAVRGHCVVYSSDGTRFEVPLAYLGTAVFGELLSMSREEFGFTGDDGGRITLPCDAAVMEYAMCLLRRDASEEVVRAFLSSMXDPATTASVARCHRWDSGANQPSVYS

SEQ ID NO: 308400 - protein, 124 aa, Zea mays
  Clone ID: MRT4577_44326C.1.pep
GFQWATKESVLCEENMRGVRINIHDVTLHADAIHRGGGQIIPTARRCFYACLLTAAPRLLEPVYLVEIQCPDSAIGGIYGVLNRRRGHVFEESQVSGTPMFIVKAYLPVNESFGFTADLRTNTG

SEQ ID NO: 308401 - protein, 57 aa, Zea mays
  Clone ID: MRT4577_44327C.1.pep
SQTLGRILKTGWFNPQNGGPNCHVPAFPRFILLLKFAVGTSPLPGNGPGPSPQEPAV

SEQ ID NO: 308402 - protein, 128 aa, Zea mays
  unsure (1)..(128): unsure at all Xaa locations
  Clone ID: MRT4577_44328C.1.pep
MMERSLLEVLATAAQGGTEGTSVLSMLKYAVLPIAKVVTVCFMGFLMXSXLVFSLLLPWLIFSQLGRXITIEKMIQWWYIPXNIVXGAESGSLIGFGVXSIIRPPYPYFKXTVIHIGIGNIGNIPPGL

SEQ ID NO: 308403 - protein, 88 aa, Zea mays
  unsure (1)..(88): unsure at all Xaa locations
  Clone ID: MRT4577_44329C.1.pep
FEPEILVDGQDDIDRCAXPTXTMLAAFYKALNEHHVLLEGTLLKPNKVTTGSDSKKVTTEVIAEYTVRTLQRTLPADDPAEVFLSATQ

SEQ ID NO: 308404 - protein, 38 aa, Zea mays
  Clone ID: MRT4577_4432C.1.pep
MKSYHPGSFNVQLLPRHQTELPSLNHFSVNAFSYMLAR

SEQ ID NO: 308405 - protein, 433 aa, Zea mays
  Clone ID: MRT4577_44330C.1.pep
MMERSLLEVLATAAQGGTEGTSVLSMLKYAVLPIAKVFTVCFMGFLMASKYVNILQPNGRKLLNGLVFSLLLPCLIFSQLGRAITIEKMIQWWYIPVNIVVGAVSGSLIGFVVASIIRPPYPYFKFTVIHIGIGNIGNIPLVLIAALCRDPSNPFGDSDKCNQDGNAYISFGQWVGAIIVYTYVFKMLAPPPGQTFDGSEEDGIPIKASGENTVPQVGKYPMNTNSSTVPENEPLLSAGEVQKERATSVGTKIMGYVKCVVKFLKDKQLLQPPIIASAFAIAIGVIPFLKNFVLTDDAPLFFFTDSCLILGEAMIPCILLAVGGNLVDGPGEGSKRLGVRTTVAIIFARLVLVPLAGVGITMLVDKLGFIPEGDRMFKFVLLLQHSMPTSVLSGAVANLRGCGKESAAILFWVHIFAVFSMAGWIIFYLSLLF

SEQ ID NO: 308406 - protein, 56 aa, Zea mays
  Clone ID: MRT4577_44331C.1.pep
LCILCKGPKGKRRCTYSKPKKKKKKKKKKKKKKKKKKKKKKKKKKNKLFLRWDISH

SEQ ID NO: 308407 - protein, 57 aa, Zea mays
  Clone ID: MRT4577_44332C.1.pep
SLHTAQLGPRQSLFHGRKRHTGARTRPDAEPMLRRHGQSKEHDDLKRAGKRLEARLL

SEQ ID NO: 308408 - protein, 48 aa, Zea mays
  Clone ID: MRT4577_44333C.1.pep
ALGVCLFRVPGVTLAGDIINSRVSCRVVHQVRNLQKSHWPLFRKGFDV

SEQ ID NO: 308409 - protein, 70 aa, Zea mays
  Clone ID: MRT4577_44334C.1.pep
SSLLPTATAGNYLMFAPPCYIKPLCNHFIPKNQVKRIIGVSCVLKLWEHLSEWALYCSIDLLNLDPRFAP

SEQ ID NO: 308410 - protein, 118 aa, Zea mays
  unsure (1)..(118): unsure at all Xaa locations
  Clone ID: MRT4577_44335C.1.pep
MGHRVLLLLSLASVAAVAAAVXDAEDPMIRQVDPDGDHXDLELNAESHFLSFVQRFGKAYXDCXEHAXYRLSVFQDFQRSARRNQMEALLTWRGITAEGQGVKVESSEVSFSPNSRCC

SEQ ID NO: 308411 - protein, 201 aa, Zea mays
  unsure (1)..(201): unsure at all Xaa locations
  Clone ID: MRT4577_44336C.1.pep
MKFNIANPSTGCQKKLEIDDDQKLRAFYDRRISQEVSGDALGEEFKGYVFKIMGGCDKQGFPMKQGVLTSGRVRLLLHRGTPCFRGYGRRNGERRRKSVRGCIVSQDLSVINLVIVKKGENDLPGLTDTEKPRMRGPKRASKIRKLFNLNKDDDVRKYVNTYRRTFTXQRLKEQRDRRSESLAKRRSKLSAAAKASAATSA

SEQ ID NO: 308412 - protein, 86 aa, Zea mays
  Clone ID: MRT4577_44337C.1.pep
LRSTVSRPRYLPTSTYEKTSNDLRPSYKDFHVTISRNKSSEEDKMMAFSEIQLSDSLQRPTTPATYTVPDCHADILLADCQDHLAM

SEQ ID NO: 308413 - protein, 113 aa, Zea mays
  Clone ID: MRT4577_44338C.1.pep
MKFNIANPSTGCQKKLEIDDDQKLRAFYDRRISQEVSGDALGEEFKGYGFQIMGGWDKQGFPMKQGGLTSGRGRLLVHKGTPCFRGYGKRNGERKKKSGRGWIVRQELSGIHL

SEQ ID NO: 308414 - protein, 251 aa, Zea mays
  Clone ID: MRT4577_44339C.1.pep
MKFNIANPSTGCQKKLEIDDDQKLRAFYDRRISQEVSGDALGEEFKGYVFKIMGGCDKQGFPMKQGVLTSGRVRLLLHRGTPCFRGYGRRNGERRRKSVRGCIVSQDLSVINLVIVKKGENDLPGLTDTEKPRMRGPKRASKIRKLFNLNKDDDVRKYVNTYRRTFTTKNGKKVSKAPKIQRLVTPLTLQRKRARIADKKKRITKKKSEAAEYQKLLAQRLKEQRDRRSESLAKRRSKLSAAAKASAATSA

SEQ ID NO: 308415 - protein, 65 aa, Zea mays
  Clone ID: MRT4577_4433C.1.pep
HACPVVCYKGYAWSKSPLMDWSHETSEGPDVRTGVGAQVLSDVHCLMVLLQDHRPTLVFREDQIT

SEQ ID NO: 308416 - protein, 49 aa, Zea mays
  Clone ID: MRT4577_44340C.1.pep
IVIKSTFFCFLFLSFLGGKKGTQVFQPFCPLTPIYWGFLDKNRFSSFIQ

SEQ ID NO: 308417 - protein, 251 aa, Zea mays
  Clone ID: MRT4577_44341C.1.pep
MKFNIANPSTGCQKKLEIDDDQKLRAFYDRRISQEVSGDALGEEFKGYVFKIMGGCDKQGFPMKQGVLTSGRVRLLLHRGTPCFRGYGRRNGERRRKSVRGCIVSQDLSVINLVIVKKGENDLPGLTDTEKPRMRGPKRASKIRKLFNLAKDDDVRKYVNTYRRTFTTKNGKKVSKAPKIQRLVTPLTLQRKRARIADKKKRIAKKKSEAAEYQKLLAQRLKEQRDRRSESLAKRRSKLSAAAKASAATSA

SEQ ID NO: 308418 - protein, 62 aa, Zea mays
  Clone ID: MRT4577_44342C.1.pep
SRRGLLPRSCVSLRSSDHRVLTRWTPFSGRGLAYGHAHRQRPVRVPPACTYRGGGERDNEGA

SEQ ID NO: 308419 - protein, 251 aa, Zea mays
  Clone ID: MRT4577_44343C.1.pep
MKFNIANPSTGCQKKLEIDDDQKLRAFYDRRISQEVSGDALGEEFKGYVFKIMGGCDKQGFPMKQGVLTSGRVRLLLHRGTPCFRGYGRRNGERRRKSVRGCIVSQDLSVINLVIVKKGENDLPGLTDTEKPRMRGPKRASKIRKLFNLNKDDDVRKYVNTYRRTFTTKNGKKVSKAPKIQRLVTPLTLQRKRARIADKKKRITKKKSEAAEYQKLLAQRLKEQRDRRSESLAKRRSKLSAAVKASAATSA

SEQ ID NO: 308420 - protein, 90 aa, Zea mays
  Clone ID: MRT4577_44344C.1.pep
MEFRADGFGWPPPQGNVAESLPPPMGDRGEVASSHFDSSRALRLMRELDTNVTEDLTTLMPNLLSCLKHDDPAIVKQAIANGTNLFVVVL

SEQ ID NO: 308421 - protein, 65 aa, Zea mays
  Clone ID: MRT4577_44345C.1.pep
LDPEFYIKTLWDIYSHPIRDLSKGGLGPSFKRVKTGPHIWATNFGEGKNLPPQGGEIAPFFRTRN

SEQ ID NO: 308422 - protein, 70 aa, Zea mays
  Clone ID: MRT4577_44346C.1.pep
FDAWADARADAHRIERAVREERQNSKTEKKDRDTMPILTDHNLSSKSASLGGKRPIVTSSTREKERERET

SEQ ID NO: 308423 - protein, 242 aa, Zea mays
  unsure (1)..(242): unsure at all Xaa locations
  Clone ID: MRT4577_44347C.1.pep
SMSHCEIESIGSSLAACVELKELRLAHNKITTIPSDLAKNTKILNLDLGNNLIERESDLKVLSELRYLRNLNLQGNPIAEKGTLAKKVMKIVPNLRIFNAKPIEAISQNENSGKXSKLKKDEEMPDRDPIDSNTKKEKRKRSKQQVQSPEEPAAKDIPPAATIDAPVKSALSDSKKKKKEKVVTEQDKSSKTKIKDYKASFDDTELKAKKESKKKKSANKEDKDAGGIDDTEVSFAELMFSG

SEQ ID NO: 308424 - protein, 75 aa, Zea mays
  Clone ID: MRT4577_44348C.1.pep
TMGHPDMLGDQVSDAELDAWLTQDALRGEHPLDLHHDYYGRGGRPIEGGVLALTIRISGATPAARSKVTFYDQDS

SEQ ID NO: 308425 - protein, 110 aa, Zea mays
  unsure (1)..(110): unsure at all Xaa locations
  Clone ID: MRT4577_44349C.1.pep
VAPRTSLPFFPSIPTGTYQRTQINDATSSPREPFAAREDPSDAPTAKPYWPAKLAPHDTTPVXYAGFLRVAFGLLREMLRYNVCSRIAIVLCHPALLNVNNFENGLKQLS

SEQ ID NO: 308426 - protein, 116 aa, Zea mays
  Clone ID: MRT4577_4434C.1.pep
DQASEKTLTNNFHFYQQSIPGASKIFSVLMLHATSACEANPTIIAQCSQAYIESLIPPYLASTIASPYENPPLKPYRLQQAIPSGNIPPSPSINNHQSYPSCNHSYKTSWHNKCTN

SEQ ID NO: 308427 - protein, 59 aa, Zea mays
  Clone ID: MRT4577_44350C.1.pep
AATSPHVVHANKKTSADNAEASYANKIQDDFWSTLRDGIKATHLHTCNEFWPLSQHPNL

SEQ ID NO: 308428 - protein, 135 aa, Zea mays
  Clone ID: MRT4577_44351C.1.pep
MPQATWMLFEQSPESSIYFTSEYLPVENQHSIDRAREWHQQKLQQNTSSSLETVKKAKKKRKNKKSAMASKEIPEQGGPNVEDVVVAVSISAELRNEGQPTTTREMDNPKQGGLNVEDVVAAVSVSDEPTREIFN

SEQ ID NO: 308429 - protein, 106 aa, Zea mays
  Clone ID: MRT4577_44352C.1.pep
MAGGDIKKGANLFKTRCAQCHTVEKDGGNKIGPALHGLWGRKTGSVEGYSYTDANKQKGIEWNDDTLFEYLENPKKYIPGTKMAFGGLKKAKDRNDLIAYLKDSTK

SEQ ID NO: 308430 - protein, 83 aa, Zea mays
  Clone ID: MRT4577_44353C.1.pep
TVKKAKKKRKNKKSAMASKEIPEQGGPNVEDVVVAVSISAELRNEGQPTTTREMDNPKQGGLNVEDVVAAVSVSDEPTREIFN

SEQ ID NO: 308431 - protein, 133 aa, Zea mays
  Clone ID: MRT4577_44354C.1.pep
RRRITGSLVRRKASAVARSTSPRKDPLHCANRPHAAQCRIPASGRSGTSFAEGDAATASGDGGRACLSGRSAQRADGRRRAWWIALKTDMETVGRRRPTGGAVGTATPKRRLVGGRWGSSFTEAIPAGLEVPN

SEQ ID NO: 308432 - protein, 75 aa, Zea mays
  Clone ID: MRT4577_44355C.1.pep
GVFSFLFFSVDSDFQQPFTPGLQASRILLLSLVAVMVIRMFACLPFFLWGSSPCAFLLASLALFIECPNVGLFLG

SEQ ID NO: 308433 - protein, 47 aa, Zea mays
  Clone ID: MRT4577_44356C.1.pep
CSKARIIHMLTLANTQDESKTRLLFCGDMEDFAFPRARKKKKYFDRA

SEQ ID NO: 308434 - protein, 83 aa, Zea mays
  unsure (1)..(83): unsure at all Xaa locations
  Clone ID: MRT4577_44357C.1.pep
FRSRRAYPPPPALFKQGGKAQPLKAPQAPKKEFDQTDLAYFPKKKNXEKALKELXAQAPKGAIWGSGFKKSGKKLDWSPVSHT

SEQ ID NO: 308435 - protein, 90 aa, Zea mays
  Clone ID: MRT4577_44358C.1.pep
YVSSEFGSRLAQARCLPQDHQPPDQGALERHQAWDRQPHQIHARGSSTSSRSRTFRGSRRARAAQRGRTSARWSTPGYARRTMMGEDPAA

SEQ ID NO: 308436 - protein, 63 aa, Zea mays
  Clone ID: MRT4577_44359C.1.pep
RKKSNGANIGKTLGECLLENSQVLIAESQSGLNKKFKLWQQNLDVTGFIDGTPVGLNSDKSYV

SEQ ID NO: 308437 - protein, 42 aa, Zea mays
  Clone ID: MRT4577_4435C.1.pep
MSVIMMESRASDQFRSQNYDVSPPIALGVCRRRWCMIRVLGV

SEQ ID NO: 308438 - protein, 263 aa, Zea mays
  Clone ID: MRT4577_44360C.1.pep
LYQYAVVLLAYPKSVILSISVGWRLIPSAEAMDEVPTNRRRLKYRQLNGSVFQSFRPLMLNLYEKPSSEEKLVTGGHSKVRISVNGSPESDTEERDTMVDTSVNMGKGKVAVRKNRPVSEEALSRSSDARSAGSSKGYNSELDVYVDALTTVDSEAETDSEHRGHGQCTFDRMDSDNRFSNAQNAMTSRNSNFDKKDRPDVPSANRDMSNQHEEASVSTENTKPVVVGEHERTSSLEELLAKKNLLLGIMRGLAPGGIAHRRF

SEQ ID NO: 308439 - protein, 115 aa, Zea mays
  Clone ID: MRT4577_44361C.1.pep
WMRNMLVEERSVGGLFVYYDHHAEKEGVFCNERLIMGRRPGLFSQSSTSVKKDGAAKLIFSVAPIKRTYYRRHEATERKNWITLRSGAPPFFFFFFFFFFFFFYPRVRPRGRGRW

SEQ ID NO: 308440 - protein, 60 aa, Zea mays
  Clone ID: MRT4577_44362C.1.pep
QQCCLVTYTGCLSVKPCGSARQEAYHAGSSSSKEEKEKVSSGTATRQQWQIQASASRART

SEQ ID NO: 308441 - protein, 72 aa, Zea mays
  unsure (1)..(72): unsure at all Xaa locations
  Clone ID: MRT4577_44363C.1.pep
FPPTDGQRRKPATTEPTPPKLTRYHRGPTRXSSRTTYTPWPKPRASKPSRPXPSPRTYTTVVKAVPYPRLSP

SEQ ID NO: 308442 - protein, 130 aa, Zea mays
  unsure (1)..(130): unsure at all Xaa locations
  Clone ID: MRT4577_44364C.1.pep
MSLLTDDLVVEILSRXPLKSFCRFKCVCKSWHALSSDPHYRKKFPRTPVGLFYQIPEYHTGIDLVRLPSSDKEIDTTLSFVPCYEDLQLMDCSNGLLLCYQGGIRMYFADISHVIVCNPATXEWMSLPNT

SEQ ID NO: 308443 - protein, 200 aa, Zea mays
  unsure (1)..(200): unsure at all Xaa locations
  Clone ID: MRT4577_44365C.1.pep
VYGVDWPLSGQTXITLTPALESPVGPLINAAELMMVVPLGGRTHPRDVIGMQELARGFTNPPSDWRGDPCLPQGNSWTGVTCNQDPLARVTGLNLTNFRVGGSISNNIANLTAISSIWLVGNNLTGPIPDLNHLLHVVSLHLEDNGLTGPLPESLGNLTRLEELSVQNNSLQGTIPSSIRNRAAVDPRFRFQYTPGNNLS

SEQ ID NO: 308444 - protein, 64 aa, Zea mays
  Clone ID: MRT4577_44366C.1.pep
NSNPKNGSPIAHGAYQHTFPITERWASPQWNALGQKLLTLDPMAYLWVQLWTRASYLKGSWLYM

SEQ ID NO: 308445 - protein, 65 aa, Zea mays
  Clone ID: MRT4577_44367C.1.pep
GAFRAGPGIAPSCGSWGSLGKTRPSRIVARPCSTAMAAPNRAADAGQAWVRAGSPTAAYFGHDEL

SEQ ID NO: 308446 - protein, 61 aa, Zea mays
  Clone ID: MRT4577_44368C.1.pep
RHLEDNGLTGPLPESLGNLTRLEELSVQNNSLQGTIPSSIRNRAAVDPRFRFQYTPGNNLS

SEQ ID NO: 308447 - protein, 66 aa, Zea mays
  Clone ID: MRT4577_44369C.1.pep
ETEGGSPCPKTCKKFVLMDQSLGLYKKQPSLWGKQRFFCTPKSPSICPLYDQGARFERIGFVIMMG

SEQ ID NO: 308448 - protein, 97 aa, Zea mays
  Clone ID: MRT4577_4436C.1.pep
NNSKERPDVWIESPDKSIIISVTSDIRTIQSEVFAAPYCLRFSRIQRVRYDQPWHECLDVQAFVDIVHSNNGTIQRVADDNSLKNDDTKHSRTNIKV

SEQ ID NO: 308449 - protein, 76 aa, Zea mays
  Clone ID: MRT4577_44370C.1.pep
FRFTRARTLSSTHHHTLCDLIISSHTGKLGPATRRTKYQTSLPMKDLLFSLPYFQHNVNHSLHNYITTNIIPHRNL

SEQ ID NO: 308450 - protein, 214 aa, Zea mays
  unsure (1)..(214): unsure at all Xaa locations
  Clone ID: MRT4577_44371C.1.pep
MAPLLVAAMNHAAAHPGLMSHLLGPNNESVSRHHLPSSSPHSNKRKGNLTFTTRSARECSQNGVRMLSPSEIPHRDWYPSDFTFRAVTSSYQIEGAWNEYVNGESNWDHFCHNHTERILDGSNSDIGANSYHMYKTDVRXLKEMGMDGYRISISWPRILADGTKEGGINPDGMKDYGNLISLLRENGIEAYATIVHCDVPQVLEEYYGGFLHKS

SEQ ID NO: 308451 - protein, 95 aa, Zea mays
  Clone ID: MRT4577_44372C.1.pep
MGRRGEPYYVEAVPPVDVNKNTEWFMYPGVWTTYILMLFFACFLVLSVSGCSPGAAWTVVNLAHFAVSPHPLSRPQSLALLILRMSMDRFRPLYP

SEQ ID NO: 308452 - protein, 108 aa, Zea mays
  unsure (1)..(108): unsure at all Xaa locations
  Clone ID: MRT4577_44374C.1.pep
TELISGTCLQFLRCYDHKPGSQRAPLIXEDGPAYITSYXISRAEHLTRRRQQTYGLALIDEWLATYPKRDTLFYDQSXAPEDIYXEPFLMLPWQGRWPVQENGCEILT

SEQ ID NO: 308453 - protein, 165 aa, Zea mays
  Clone ID: MRT4577_44379C.1.pep
GSSHCLFSCHNTSIQSRSGFFIVIIFIIAVFILFIVIIVIIVVGSRHNYQGIFLLMMRRRGVVGLCVVERRVEGRSLAAAGGNAASACTGGQPPAAGEGQALTGRPNGGRRSAEVWADRGRADERTRGGAGVGRAAGCGRKGGRAAGAGLWPASAAGERCLPRAE

SEQ ID NO: 308454 - protein, 40 aa, Zea mays
  Clone ID: MRT4577_4437C.1.pep
GGSRNRELKKQGGLGCQVVLTPELHGMVVPVPEPKPWDIP

SEQ ID NO: 308455 - protein, 133 aa, Zea mays
  Clone ID: MRT4577_44380C.1.pep
RQVPALKLIENGKINTLDHITGAIAGQGDPASAAAAAATAAAVIPAVSTPPPFQGRPITPVYTVAPNVQRIPTAGIYGASYVPFAAPATATIATLQKNAAAAAAMYGGYAGYIPKAFPAGAIQGPIHDVYQTY

SEQ ID NO: 308456 - protein, 43 aa, Zea mays
  Clone ID: MRT4577_44381C.1.pep
KKNKLMDFNNLPAGNKNHHYCSNMVHFSVQRLLIILTCLCNAS

SEQ ID NO: 308457 - protein, 61 aa, Zea mays
  unsure (1)..(61): unsure at all Xaa locations
  Clone ID: MRT4577_44382C.1.pep
LSFCSHTPYPSRPPQSPPPXVPILAARIIVSWCDSPIVLVEGRREEGKGENPRWWTSVSLL

SEQ ID NO: 308458 - protein, 120 aa, Zea mays
  Clone ID: MRT4577_44383C.1.pep
RAQSSCTPAMYVDVPGFPHKMHELCGNINVSCSNRMYRRSIWSRPRATPRTQPIGAHVQGRLFSAETRSASAGPRTTRAHALPGSSRPRRRRTPGAWPPARSAVAAAGSARDGTALWRRP

SEQ ID NO: 308459 - protein, 225 aa, Zea mays
  unsure (1)..(225): unsure at all Xaa locations
  Clone ID: MRT4577_44384C.1.pep
DGRVRRKINRAMDTGRLPDSRGREVSLGNVIFVLTTDWXLRNSGDRSXTPLQDEGKMLEAAHSDWQLELSIGDKQQLKHQADWLCNDARPAKVARELSGGHGLSLDLNLAVGASDDTEGSRNSSDLSVEQEQEKGHVAVKCSTPAPDSDLLNLVDDAIVFRPVDFAPFRKAVTDCVSAKFDSVTRGSSSFRVDEDAVDRMAASVWLXRTRARDWPRKCYPHRRWR

SEQ ID NO: 308460 - protein, 95 aa, Zea mays
  unsure (1)..(95): unsure at all Xaa locations
  Clone ID: MRT4577_44385C.1.pep
MSSKVSRDTLYEAVREVLHGNQRNXRKFLETVELQISLKNYDPQKDKRFSGTVRLKSTPRPKFSVCVLGDQQHCDEAKAVDIPHMDIEALKKLNK

SEQ ID NO: 308461 - protein, 82 aa, Zea mays
  Clone ID: MRT4577_44386C.1.pep
CSKVLQRCTVGARVKLPWGFPVRKNREAFRPCNTGWSLEIGKILPHKISHMGSEFLSGRLLWISLLSGYVGQLHGLRSLVRS

SEQ ID NO: 308462 - protein, 111 aa, Zea mays
  unsure (1)..(111): unsure at all Xaa locations
  Clone ID: MRT4577_44387C.1.pep
GRVGGRVGGRVGNGAGAGDNGSACGIKNVNLPPYSGMTACGNVPIFKDRKGCGSCYEVRCKGKPECSGNPVTGFITDMNYEPIGPYHFDLSGKXAFGXSWAKPGLNDKLRH

SEQ ID NO: 308463 - protein, 87 aa, Zea mays
  Clone ID: MRT4577_44388C.1.pep
GFFLFWFHHKETFFYYKENIHTMFAHRFFALPETTHKFPGSQLPNFSYHPHAIKYNFFPREFQRLDKLMPGITLLRCSKSEKQMRKP

SEQ ID NO: 308464 - protein, 88 aa, Zea mays
  unsure (1)..(88): unsure at all Xaa locations
  Clone ID: MRT4577_44389C.1.pep
MANPRVFFDMTVGGXAPAGRIVMELYAHKVPTTAEKFLALCTDEKSVGXSGKPLHYIGWTFHPRIPYCMCQGGDFTLSNGTGGECIYG

SEQ ID NO: 308465 - protein, 494 aa, Zea mays
  Clone ID: MRT4577_4438C.1.pep
MMKSLLFSAHPTSLLLPAPRLRRLLRLRAASSASASAPPRADRRSPGTPSRRPSSSLYARPSLLDMERDRATRRADVDAFLTSLGVDPGELAGLELPVTVDVMRERAEFLGSLGLTQEDLAAYPLALGCSVRKNMVPVLDYLGKLGVRRDALPDLLRRYPQVLHASVVVDLAPVVKYLQGMDVRPTDVPRVLERYPELLGFKLEGTMSTSVAYLVGIGVGRRQVGSVITRFPEVLGMRVGKIIKPFVEHLEGIGLQRLAIARIIEKKPYVLGFGLQEKVKPNIEALVDIGVRKEALASIVMQYPDVLGLELRDKLVAQQSLFESSILVSREDFGRVLERMPQAISLGRAAVLKHVNFLTACGFMLSQVSKMVVACPQLLALNIDIMRMNFEYFKNEMERDLEELVEFPAFFTYGIESTVRPRHEMVSRKGLTCSLAWLLNCSDAKFDERMKYDTIGVEEMEGEDSSDMNASVDEVESEEYEDSDYDDSDDEFVR

SEQ ID NO: 308466 - protein, 81 aa, Zea mays
  Clone ID: MRT4577_44390C.1.pep
SDNPFPFLSKSLPYPRRPSSLTANIAVSSRTHHVVTLLLPFLPEFHSPLYKTPFREIVIHTIIILLIHLQCHHLQLHELDS

SEQ ID NO: 308467 - protein, 50 aa, Zea mays
  Clone ID: MRT4577_44391C.1.pep
MEERRGFDEMEVLTLASLFWRRRRQTNFKMDTRQHLRLRKQVSVSCHRLP

SEQ ID NO: 308468 - protein, 146 aa, Zea mays
  Clone ID: MRT4577_44392C.1.pep
PRCFPPLGPWVFNPVRAEFFSQLPEYPQGPGFSFLDPWFNMTGVKKVPGPPLPFLFSPGPEVEVDSGGGFFFVNKDSSQGGLAGAPLKTEGGASLFGNFPQKNLRVVFSPPGFQVGFPPETGGYFCLSPRLGLGLGCNGGPWAFYM

SEQ ID NO: 308469 - protein, 95 aa, Zea mays
  Clone ID: MRT4577_44393C.1.pep
ARVRGLRLKGMPKIRSIDRDFCGSGSGSQQSSHTLFFPRLTRFVLNDMPNLEDWVTKVSGASDPYGQEEFMFPKLVKLTIWNCPKLKLKPIPPRA

SEQ ID NO: 308470 - protein, 85 aa, Zea mays
  Clone ID: MRT4577_44394C.1.pep
FRLLERHILYQVIDEAIEYMKLLDDQPTSLSCSYLRGGRPVMDQIQTPLNATVDGKNALYEDLLRHELVLKLVASTKAYAKAGLD

SEQ ID NO: 308471 - protein, 64 aa, Zea mays
  Clone ID: MRT4577_44395C.1.pep
LEPQLGYIELQLYTKLETCHLPNRSSLTFTSCIVHMAERATEQKKEKSPLICFEACTNSQQLIF

SEQ ID NO: 308472 - protein, 132 aa, Zea mays
  Clone ID: MRT4577_44396C.1.pep
AGVTTQSTFFFFFFFFFWVFFFFFFFFFFFFLGNPRQATAFNNLMGGGEDTEIKFFIGGGGALTKDQAASLWNGNWEGSGDGTPGELRASTGVPALPTAGGPTKETAGMPAGDTPPRPGRCLHWAGATPRAR

SEQ ID NO: 308473 - protein, 125 aa, Zea mays
  unsure (1)..(125): unsure at all Xaa locations
  Clone ID: MRT4577_44397C.1.pep
IASSISPLSPLFLQHPVGVLEHFPSAHSFSQNIKAQHLLQLVLGNLAAYSQQQQFLPFNQLAALNSPSYXLQQQLPXSHLAADYTQQFFSFNQLTLLNSDDYLQQXQLPPFIQLGYVRPAAFLTQ

SEQ ID NO: 308474 - protein, 162 aa, Zea mays
  Clone ID: MRT4577_44398C.1.pep
MTRKGDLKELSEPNAMFFMLLYKDNLLSTNNFPSTLPSIVFDALQEYEDVFPDEVPPGLPPKRGIEHQIDLVSGASLPNRAAYRTNPEETKEIQQQVKELVKKGVEVDEEKIKNVRDWMPPQNERVNFDAIKRDELIKNLLEKARANIEKMTKKYEKRANKG

SEQ ID NO: 308475 - protein, 117 aa, Zea mays
  unsure (1)..(117): unsure at all Xaa locations
  Clone ID: MRT4577_44399C.1.pep
GFMSPNMGKPIGELELGRKPISWDEPRSAADIKNLEVGLGSLLDXKEGRVAHASPDLSKKALPELVEGRAGTHSRRSSWGHKSGTSASMDSLAAQMGTAKSPWGSISSVHGTTNGAP

SEQ ID NO: 308476 - protein, 150 aa, Zea mays
  Clone ID: MRT4577_4439C.1.pep
GRQRGAVKMGYLKTDEFLKRGESGGTCCVIALLRKGRLVVSNIGDCHVVLSRAGKAEVLTSDHRASQEDEKQRIENLGGFVVNYHGTWRVQGSLAVSRGNGDGHLKQWVVADRETRTLLVDHQCEFLILASDGLWGKIDNQDAVDQKSRH

SEQ ID NO: 308477 - protein, 64 aa, Zea mays
  Clone ID: MRT4577_443C.1.pep
LVESYVIGLHVYACWSVCAPVWIFVVRTSLVFPTVGQWFYMSVFVSVKVVNCGVVLNVPPQITP

SEQ ID NO: 308478 - protein, 78 aa, Zea mays
  unsure (1)..(78): unsure at all Xaa locations
  Clone ID: MRT4577_44400C.1.pep
RPCVRXNXGSSCCCGSSCNCMSPNXETAAASSIKTMVIAAPTTKASAGGFEAATEGGGCDCNTCKCGTSCGCSCCSCN

SEQ ID NO: 308479 - protein, 320 aa, Zea mays
  Clone ID: MRT4577_44401C.1.pep
MASAAGSEEACREIRGTCGAPRRLGLLLAPRSPAERQQIRAAYRARFGEDLAATLAAPNTNPLLQLSKLLYLWALEPAERDAVVAREAVEGGVTAAGYRALVEVFTRRKQDQLFFTKQAYAARFRRSLDQEMATEPSHPYHRLLLALAASRRSHHDDLSQHVAKCDARRLHDTKNSGAGAGSGSVVDEAVILEMFSKRSIPQLRLAFCRYKHIYGHDYTKALKINGSGEFEGPLRVVVKCIYNPSKYYSKLLHRSMLPAATDTRMVTRAILGSDDVGIDEIRSAFQSSYGKSLAEYIQENLPGSDYRDFLVAVASASVAQ

SEQ ID NO: 308480 - protein, 55 aa, Zea mays
  Clone ID: MRT4577_44402C.1.pep
MGGNRAKHANQIPLTVSCLRDIDRDRVGSISKPFRRSRLIIDPQAYNQTYSRVSA

SEQ ID NO: 308481 - protein, 119 aa, Zea mays
  Clone ID: MRT4577_44403C.1.pep
VPCRVDSPEECAKIIYANKNLRLGSGILIAVPIPKQHATSGKIIESAIQTALKEAGDKRIIGNAITPFMLERVKELTGGSSLEANIALVKNNALIGANIAVALSNLQQREISRMGRSAL

SEQ ID NO: 308482 - protein, 81 aa, Zea mays
  Clone ID: MRT4577_44404C.1.pep
PSAAHDLTARTSFIATANYMTEPGTHSRSRVDTSARFMASGLATAMSVIDTADRSAVEGISALLSRVWERIRYAVSALSCD

SEQ ID NO: 308483 - protein, 196 aa, Zea mays
  unsure (1)..(196): unsure at all Xaa locations
  Clone ID: MRT4577_44405C.1.pep
MASTTTTFLDSVDLSSNRLTGGIPAAFADLPSLRSLXLRHNQLTGPIPAGLVQGQFRSLVLSYNQLTGPIPRDDARDEINTVDLSHNRLTGDPSHLFAAGRPIGKVDLSWNYLNFDLSRLVFPPELTYLDLSHNLIRGTVPLSLERLSTLQKLDLSYNRLCGPLPKGHGVIKHGCKPYAHNQCSKGTPLAGCQDLE

SEQ ID NO: 308484 - protein, 111 aa, Zea mays
  Clone ID: MRT4577_44406C.1.pep
VCRSDTSNCFLQKNKEANGYRHKTVLYWDSINLVFGKDHATGEAAKTPTDGARGMSKEEGTGKELTSSTTSGSLKRQRSSDSFTSMMAEKLDKFTEAIRDEAPKGPTSKEI

SEQ ID NO: 308485 - protein, 169 aa, Zea mays
  Clone ID: MRT4577_44407C.1.pep
PEDCSISGYFDARAGATFLGKNKEANGYRHKTVLYWDSINLVFGKDHATGEAAKTPADGARDMSKEEGTGKELTSSTTSGSLKRQRSSDSFTSMMAEKLDKFTEAIRDEAPKGPTSKEIFSTLEEIDGLDEDTFLDLFDILTGDARKYESLLALPLILRKRWLLKQLKK

SEQ ID NO: 308486 - protein, 261 aa, Zea mays
  Clone ID: MRT4577_44408C.1.pep
MEKGKKSGSGRGYISWNDDMDKALLDTFVEYYNKGDRCQNGWKSHVYTAAIKNVREKCNVEITKDNIMSRNKTFDKHHTIINGMLQTSGFGWDWNKNKISVDSDSVWEAYVAKNKEANGYRHKTVLYWDSINLVFGKDHATGEAAKTPADGARDMSKEEGTGKELTSSTTSGSLKRQRSSDSFTSMMAEKLDKFTEAIRDEAPKGPTSKEIFSTLEEIDGLDEDTFLDLFDILTGDARKYESLLALPLILRKRWLLKQLKK

SEQ ID NO: 308487 - protein, 68 aa, Zea mays
  Clone ID: MRT4577_44409C.1.pep
KTKRASKLAFYLEKSFTRRPPIFLFLHICPFEAFALFLKAHELVEKVFFEGVQTFQSKCVSHLGPVNA

SEQ ID NO: 308488 - protein, 98 aa, Zea mays
  unsure (1)..(98): unsure at all Xaa locations
  Clone ID: MRT4577_4440C.1.pep
KILSPPASHTQLSQLSPARHQVPIHISTESSFQAPSTATFQPSSTLRDSRTQHQRPPTPPQKXAHKDNNIKFEQVCIPNLIFQDFPSTAERQTATVQL

SEQ ID NO: 308489 - protein, 85 aa, Zea mays
  Clone ID: MRT4577_44410C.1.pep
MVGVFLELYPVEALPAFLPEVQTADTTLPSTEHETYTDITLFNSLACMHIPLDAIHSTTGLDPFYWMRAILASNRVTVMVTVDPL

SEQ ID NO: 308490 - protein, 268 aa, Zea mays
  unsure (1)..(268): unsure at all Xaa locations
  Clone ID: MRT4577_44411C.1.pep
PPPPPPPPPPPAPPPPRPPPPPHPPRPPPRPPPRPGGARAGRARPGRREAPQSPRPPGPPPRRPRPPGARPRPPPPXATPPPPGGGPPPPPPPPAPPGKAPHAPAPPPPPPPPRPKGAAPPXSRKQRGPPGAPPAPTAANPRPGXPKPAPPKXGGGPPRGRPNRPPAARTPPQPAPRTARPXGTRAPPPRRPPTTASAPXAGRAPPRQAPRRPXXPRPERVITXPPRTXXPRERRPPXAESAGRKEPSPDXPKERPPPTTGQPEKEPP

SEQ ID NO: 308491 - protein, 53 aa, Zea mays
  Clone ID: MRT4577_44412C.1.pep
ACNKQALFPLRLLVLSGGPPPINQGGVSWILKRGLFFLGKHWRGPICFAPEIF

SEQ ID NO: 308492 - protein, 85 aa, Zea mays
  unsure (1)..(85): unsure at all Xaa locations
  Clone ID: MRT4577_44413C.1.pep
KSWRFLGLERSRFCVVAXXLVLPILTGIRTGQDMHVQLLTATRVARETARIADPAALNDLEFGSEPPLPGFWKKPNQNREPRAPK

SEQ ID NO: 308493 - protein, 75 aa, Zea mays
  Clone ID: MRT4577_44414C.1.pep
AVPDCSSPLWSLSTTSQALRTCASVDCFVALSHSLILHVSWFYPIQHGCEILKVQTPATLHLYFPQMASTGKGPK

SEQ ID NO: 308494 - protein, 89 aa, Zea mays
  Clone ID: MRT4577_44415C.1.pep
FMTLFPCHLLHNISYLEKTQTHAKTLFFFFFFFFFFFFGPFPKKNIGWKNVLFLGTWNNPGPFPPRKCLLKTLEHHPHNYRTCWWIPQG

SEQ ID NO: 308495 - protein, 225 aa, Zea mays
  Clone ID: MRT4577_44416C.1.pep
SGFRQMMGLPPMPVWFETGIPQSWQWTYLAPYISSCPQNTTRLAWQNFPALFIDNQPNPNRFSPNDTQPNEVAGRRPSDPSDSTIPADESCVNVNATEHPGYSCSPGIARNRSEPLSFPGRLVNLTWENPGKPVGPNMSYITDTVAGAPAFVAWVSQLNLTYTPLEITGNNTGYTYQPAGEVYEGDPAANDTMFIALTDSDPYLTPFNLSMINPHVVALGLYQAG

SEQ ID NO: 308496 - protein, 57 aa, Zea mays
  Clone ID: MRT4577_44417C.1.pep
PTMIRHSRNTSLTVPPPVVLYSVTLINPPQSRVSSIRNRILLANNHHVHSGSSFSHE

SEQ ID NO: 308497 - protein, 138 aa, Zea mays
  unsure (1)..(138): unsure at all Xaa locations
  Clone ID: MRT4577_44418C.1.pep
QFVLATLVEYXKQNQFFPFNQRGALNFAVYLQQQFPFSQLVVAYPQHFFPFNQLAALNFAVFLQQQQFFPFSQLVDVSPVAFLTQQQLXPFYLHVMPNGGPLLQLQQLLPFNHLVLTNPTVFYQQPIMGGAPFRLLMG

SEQ ID NO: 308498 - protein, 95 aa, Zea mays
  Clone ID: MRT4577_44419C.1.pep
VFPPLIPPSFSPFHRPALFPLDSPRCPFLALDPDRFFFLWSPQLLPIGGTFFPLRIPLLFSPLFPHLVSLLVPARLFRVDSLGGRFFIIPTLVFP

SEQ ID NO: 308499 - protein, 473 aa, Zea mays
  Clone ID: MRT4577_4441C.1.pep
LQVIKYVTNHPDNRWVGVGDATGDYPFSHHKLTVQFSEASAAQDRKLEGLVHKAIRELWRPNPSQLILLQTRGIGALHKELPKACALTGSSDPCYIEAYHLADPTDGRITLHLKILNLTELELNRVDIRVGLSGALYYMDGFSRTVRHLRNLVSQDPVQSSVTVGVSHFERCSLWVQVLYYPFYGSSGSTDYEGDYAEEDSQMMRQKRSHRPELGEPVVLRCQPYKFPLAELLLPLECSPVEYFRLWPSLPAMVECTGTYTYEGSGFKATAAQQYDSSPFLSGLKSISSKPFHQVCSHFIRTVAGFQLCYAAKTWFGGFVGMMIFGASEVSRNVDLGDETTTMICKFVMRASDESITREIKSDLQGWLDDITDGAVEYMPEDEVKSVAAEQLKISMERIALLKAARPKVPPAKTDQEEEEERKQSEELDGFGNPKGPSTLSKLTAEEAEHRALQAAVLQEWHQLCKERAMKAQ

SEQ ID NO: 308500 - protein, 46 aa, Zea mays
  Clone ID: MRT4577_44420C.1.pep
RVTGKRDQQHVESTLRFVYHQPMNITEGCNTLLKRVQQGKCEHNPW

SEQ ID NO: 308501 - protein, 129 aa, Zea mays
  Clone ID: MRT4577_44421C.1.pep
KKWVGGRARRQTAASSWEAPFDTLSHAFHKGMGKVKRCDTRSTVSTRAGAPSLQVGTENVIELSPPPHIALGVRPPSTQLVAHGKQPQILSQAPPPPAQLAINRPPTIWEQENHRENHAPPSISPSCRI

SEQ ID NO: 308502 - protein, 60 aa, Zea mays
  unsure (1)..(60): unsure at all Xaa locations
  Clone ID: MRT4577_44422C.1.pep
ERTQEVFIWHPPPPLCVINFQFQLXGAHPLYVFMRAFSMNAKNVVYWHLKAVLFSSLRIC

SEQ ID NO: 308503 - protein, 188 aa, Zea mays
  Clone ID: MRT4577_44423C.1.pep
MFRGPETEGGRAGSRAMKPPGGEASNLFGSPEEAAPSSRPNRMASNIFGPTEEPQNIPKRTNPPGGKGSGIFDESTPVQTRQRLNPPGGKTSDIFGSPVAATSPLAHPNKPKDHVLLCEGEDPKSAPTAATSTSPREEPGEKGGPGEGGRAQQPMPTGDSHEPRLGPRPRSHNKVLNPPGGKSSISFY

SEQ ID NO: 308504 - protein, 80 aa, Zea mays
  Clone ID: MRT4577_44424C.1.pep
IPVDPPRCRTSPWALPTLPCSRGDTKSAAISTPTELSTSGGSTTKSRGNPPGLSWLTHATASSEMFRVAAFMQSESFCLY

SEQ ID NO: 308505 - protein, 74 aa, Zea mays
  unsure (1)..(74): unsure at all Xaa locations
  Clone ID: MRT4577_44425C.1.pep
XSPXSPITNTSTSTHXPLTFNILHSILLPLTSIINSIPTNSPLYTYSPTSPFPSLETQSYYFFSHMLQNSTLDS

SEQ ID NO: 308506 - protein, 107 aa, Zea mays
  unsure (1)..(107): unsure at all Xaa locations
  Clone ID: MRT4577_44426C.1.pep
MDLLLPGSSSHGLASTPELISTRTCRPAVLDKGAVQKRSLLLATGSDTRGVAQVRSSGIERNRVGLGCEAVTGQVSEVNTDTFWPIVDATGDXVVVLQMCTEXCGPC

SEQ ID NO: 308507 - protein, 61 aa, Zea mays
  Clone ID: MRT4577_44427C.1.pep
GCFLSPAQSALHELRNARVMRAAAFLEISPSRHHLQTPWNQRPAPCCHELQLGFIPADPYP

SEQ ID NO: 308508 - protein, 92 aa, Zea mays
  unsure (1)..(92): unsure at all Xaa locations
  Clone ID: MRT4577_44428C.1.pep
DGRLCPLPKSVLLTHSHHGPWHVLIQWQGLTPDDATWELLHNFKDLYPNIXIELFEETGRDVMTNIPYVQRKRATRVLGQNYIRCEQYSFRK

SEQ ID NO: 308509 - protein, 72 aa, Zea mays
  unsure (1)..(72): unsure at all Xaa locations
  Clone ID: MRT4577_44429C.1.pep
VPGPRRVPIPPKEKGPLLCKRSSTSLKTHKTNFGRGKHVSHICNKTFGTXKVPPPLYGALFQKNPTLLKWPP

SEQ ID NO: 308510 - protein, 63 aa, Zea mays
  Clone ID: MRT4577_4442C.1.pep
MAIAPITGILRRQLILDLGIGLGAGFIMGNWFWYGYHMPRTNGRDEYYAKKEASRAAERTQAQ

SEQ ID NO: 308511 - protein, 68 aa, Zea mays
  Clone ID: MRT4577_44430C.1.pep
SKKSNMPVPFGIPAIIPVVKVGIFEQNQFVFKKTMESLPPRGTLFSGPQVVLQPTFSNLNGQNGDKGC

SEQ ID NO: 308512 - protein, 38 aa, Zea mays
  Clone ID: MRT4577_44431C.1.pep
LTILHHNNKVQAPFPASRMQKRIIDKQHNVKHSEIQFK

SEQ ID NO: 308513 - protein, 53 aa, Zea mays
  unsure (1)..(53): unsure at all Xaa locations
  Clone ID: MRT4577_44432C.1.pep
KRDNIPNCQXDNLVKSCPSNSKGCKFVKSDPLPYQCQKVFHGYPGPKCTPWIS

SEQ ID NO: 308514 - protein, 67 aa, Zea mays
  Clone ID: MRT4577_44433C.1.pep
PLTKRVWAPKVIPPKFSREKKVVLNPHGLIAGKNPVCFKKLGGSPRSHGVSVRLPPHWGETPFQKGF

SEQ ID NO: 308515 - protein, 105 aa, Zea mays
  unsure (1)..(105): unsure at all Xaa locations
  Clone ID: MRT4577_44434C.1.pep
RAHAAKAFCKNKESGLSQVLMDVKPWVDETYMKKLXQSVISVHMQGLPWGASKLVLVGYGIKKMXSCCTIVDDIVSIDTXIEGLLKQEPINKYVHSXDTVAFNTI

SEQ ID NO: 308516 - protein, 49 aa, Zea mays
  Clone ID: MRT4577_44435C.1.pep
PRKSILVNPQLMLRVDYGVFCKRECRAERIQAPAFGMSAHFISIYWRQL

SEQ ID NO: 308517 - protein, 45 aa, Zea mays
  Clone ID: MRT4577_44436C.1.pep
KQKQNKRKENIQGRAQEKKARKIEKREKKLMRPGFEGRKEGYVNE

SEQ ID NO: 308518 - protein, 107 aa, Zea mays
  Clone ID: MRT4577_44437C.1.pep
TWGILTPFHRGGYHHPIARKTTGAGLQGGLQQVGDPPKGAAPFFGKINIKAKGDQAAFEKNHKRAKPVSTHEWEKTILQALICSAGGRKNSLNSSLFSEYNPNITRT

SEQ ID NO: 308519 - protein, 97 aa, Zea mays
  Clone ID: MRT4577_44438C.1.pep
HAIFLFCFCRCKDQVNPLKKGYKFTNQPLKDLGVKFTPVHGYLYEAVKSLQDKGFIPKTSGAKVITCCLFLLFQVPERRSCMPQTTSQPPPEIVSKL

SEQ ID NO: 308520 - protein, 346 aa, Zea mays
  Clone ID: MRT4577_44439C.1.pep
MAAVVCVTGAGGFIGSWIVKILLARGYAVRGTSRREAADPKNGHLWALDGAAERLTMLQVDLLDRASLRAAFRGCDGVIHTASPMHDNPEEIIEPIIAGTRNVVEAAADAGVRRLVLSSTIGTMYMDPRRDPDAPLGDSSWSDLEYCKSTENWYCYAKTVAEQGAWEAARARGLDLAVVIPVVVLGELLQPSMNTSTLHILKYLTGQTKEYVNESHAYVHVRDAAEAHVRVLEAPGAGGRRYVCAERTLHRGELCRILAGLFPEYPIPTRCKDQVNPPKKGYKFTNQHLKDLGVKFTPVHGYLYEAVKSLQDKGFLPKTSGAKVPERRSYLPQTTSQPPPEIVSKL

SEQ ID NO: 308521 - protein, 46 aa, Zea mays
  Clone ID: MRT4577_4443C.1.pep
IYIFFFIIWQTGGEFSKGEDYLHVIITRETCLLEIKNEKLESPLNY

SEQ ID NO: 308522 - protein, 128 aa, Zea mays
  unsure (1)..(128): unsure at all Xaa locations
  Clone ID: MRT4577_44440C.1.pep
MCLPRVHCNSHWCDHLSCHVHTNICELHLDEPRLIILDDPXTDHHPXGESALVNIPTIVFCDTDSXMRYGDIGIPANYKXRXSIGCLYWLLASMLLQMLGTILPGHEWKIMIDLLFYRDPEEAKELEE

SEQ ID NO: 308523 - protein, 296 aa, Zea mays
  unsure (1)..(296): unsure at all Xaa locations
  Clone ID: MRT4577_44441C.1.pep
MAAVVCVTGAGGFIGSWIVKILLARGYAVRGTSRREAADPKNAHLWALDGAAERLTMLQVDLLDRASLRAAFRGCDGVIHTASPMHDNPEEIIEPIIAGTRNVVEAAADAGVRRLVLSSTIGTMYMDPRRDPDAPLGDSSWSDLEYCKSTENWYCYAKTVAEQGAWDAARARGLDLAVVIPVVVLGELLQPSMNTHXTLHRGQLCRILAGLFPEYPIPTRCKDQVNPLKKGYKFTNQPLKDLGVKFTPVHGYLYEAVKSLQDKGFLPKTSGAKVPERRSCLPQTTSQPPPEIVSKL

SEQ ID NO: 308524 - protein, 119 aa, Zea mays
  unsure (1)..(119): unsure at all Xaa locations
  Clone ID: MRT4577_44442C.1.pep
SQSYLNSYLLLEELALAIADITQTFQGWHGCLQNILSPLSKKYFYYINAPFVFSARNTECTVPFMRHDASIVYEXCRPKPLMVXLSDLQGDQDQAYRKIKLRAXDVQGRNVLTNFLGMN

SEQ ID NO: 308525 - protein, 86 aa, Zea mays
  Clone ID: MRT4577_44443C.1.pep
HATFLFCFCRCKDQVNPPKKGYKFTNQPLKDLGVKFTPVHGYLYEAVKSLQDKGFIPKTSGAKVPERRSCMPQTTSQPPPEIVSKL

SEQ ID NO: 308526 - protein, 50 aa, Zea mays
  Clone ID: MRT4577_44444C.1.pep
LASMREKRTVVCICMEHGRTHTQLKHNKTQATRGELVADDGVQQKQQLRG

SEQ ID NO: 308527 - protein, 71 aa, Zea mays
  unsure (1)..(71): unsure at all Xaa locations
  Clone ID: MRT4577_44445C.1.pep
KDSINLGSNVQGILRWFFLDNLXRFPGSTEHYAFVWFDPNNIDPLSMKEFPKGLNQFNPGKNPTKXIFTPP

SEQ ID NO: 308528 - protein, 75 aa, Zea mays
  Clone ID: MRT4577_44446C.1.pep
KALGHDSRQYKTSGLGLAGILHWDRIHDLLAARTKVTGFSDAGDFFRGKEYSWNFYAWSSYKSGVNLHGSAKKLP

SEQ ID NO: 308529 - protein, 552 aa, Zea mays
  unsure (1)..(552): unsure at all Xaa locations
  Clone ID: MRT4577_44447C.1.pep
TSFELVARFCYGVKIELSPANVVYLRCASEHLEMTEEVAEENLRAQSEMFLNQVVLRNWKDSLAALETCDDLLPHAEDLQIVNRCIESLASKATSNPNLFGWPIREHGMMQSPGGSVLWNGISTGARPRNFNSDWWYGDASSLSFPMYKRLISTMESRGIRPEIIAGSLTYYAKKYLPGLRRHSHSMGTMPLTATLSEVEQKNLLEEIDRLLPLHRGIASTKFCLXLLRTAMILKASPTCISNWEKRIGMQLDQATLEDLLLPNFSYTMETLYNVECVHRILDHFLAMDQANGGESPCLDDVMASPSLTPITSVAKLIDGYLAEIAPDINLKPPKFQALASAIPEYARPLDDGLYRAIDIYLKAHSWLSEAEREQFCRLLDCQKLSLEACTHAAQNERLPLRVVVQVLFFEQLQLRTSIAGCLLVSDNLEGSRPLRSGIATSGEAGGWATAVRENQVLKVGMDNMRTRLAELEKECSSMRQEIEKLGGRAGKGGGGGWASRVVPRRLGLKVRSQMCSAQEGSVSEQHRSMSAKLDKLQAKVSKQKKQLAADA

SEQ ID NO: 308530 - protein, 129 aa, Zea mays
  unsure (1)..(129): unsure at all Xaa locations
  Clone ID: MRT4577_44448C.1.pep
GWAWASPAPSKKRFRTKFPAEQKARMRELAHRVGWRIHKPGADAVDVFXAQVGVSRRVLKVWMHNNKHLAKVPPSPPSSQAQAQAQPPPPPQQHRHHNHHPPPPPPHHIHHHHHPPPPPQQEQQHDMHE

SEQ ID NO: 308531 - protein, 116 aa, Zea mays
  unsure (1)..(116): unsure at all Xaa locations
  Clone ID: MRT4577_44449C.1.pep
SVVGRLLRSAVAVGEVSCGRVLCCVDMPEKSNKTGLGMHSNAHWVRDIALGWTAVSKKACPDNSELESAKPTVWETSTSRRSDYFNTTKPEGPAIXRTLRNSPFRPEHTEYDSVGS

SEQ ID NO: 308532 - protein, 57 aa, Zea mays
  unsure (1)..(57): unsure at all Xaa locations
  Clone ID: MRT4577_4444C.1.pep
GHASGGCAHTNAIRXSFSFSNTIILSSILRRXRRXHPQKCTCIQIKNTHSNIKHTNQ

SEQ ID NO: 308533 - protein, 45 aa, Zea mays
  Clone ID: MRT4577_44450C.1.pep
ASRAQSSRYLLTDSVWLIGRDSVWLLSHFNAYLFCARVPPSGASV

SEQ ID NO: 308534 - protein, 50 aa, Zea mays
  unsure (1)..(50): unsure at all Xaa locations
  Clone ID: MRT4577_44451C.1.pep
RLKLVSHLHLPHNIQLXXXNXXXXXXKKPXXAIKGTSQAVVIHLLVLLMK

SEQ ID NO: 308535 - protein, 139 aa, Zea mays
  Clone ID: MRT4577_44452C.1.pep
PFDNQPNSFQTGAARNDVMNPETVALCMGIKDSRPPLLISPGDLRSSRGAEVGIPLGNGTGSGSPPEAALAPPLRRDDEPLDRRKDLATEAAAALSAARQAGSVFFAPGGFFFFFFFLLFFFFFSVSFLIPRPGRPRGS

SEQ ID NO: 308536 - protein, 104 aa, Zea mays
  unsure (1)..(104): unsure at all Xaa locations
  Clone ID: MRT4577_44453C.1.pep
DNDISRVSFHSISTSDTXECGTRGXFMETTGFSDPVRQRIYYVASVKLXVHITGQILASLVMTQVKVRDESYAAHEAEADXLQHSAARRAYALGYAFNTLEGFS

SEQ ID NO: 308537 - protein, 63 aa, Zea mays
  Clone ID: MRT4577_44454C.1.pep
RTRVVVNSHFYLQQQHRGGFRPTAVAKAPTYLKQQLLKQIELSLILIAQINIPAKLQQTDTFN

SEQ ID NO: 308538 - protein, 61 aa, Zea mays
  Clone ID: MRT4577_44455C.1.pep
IKRVGVLTVFMDAHAFEHMTLKAFLRLLVVFYIWKKLHNNSKPSSVGVGSVCTLYLLCYFV

SEQ ID NO: 308539 - protein, 87 aa, Zea mays
  unsure (1)..(87): unsure at all Xaa locations
  Clone ID: MRT4577_44456C.1.pep
SFTHGVAMSFNEQADLFISSYMQCPLIYNVGRGYPRFXRKEXIVSIHRWGYPGXILRCIIIRILVWIIRSYIILVIEGLYPNSILYI

SEQ ID NO: 308540 - protein, 34 aa, Zea mays
  Clone ID: MRT4577_44457C.1.pep
VTRITPRSVCYDQNTEFVAVLIISIDGCSPGLKL

SEQ ID NO: 308541 - protein, 111 aa, Zea mays
  Clone ID: MRT4577_44458C.1.pep
KKNKKKKKKMILLRPETVKKKKKKKKKKKKKKKKGCPRPVCYPPLSSSMARLQGWLSSLGHMERTEQVRASTGVLSKHKQVKSILLLSSSNPFYSFPECKFGSRRPGANQK

SEQ ID NO: 308542 - protein, 111 aa, Zea mays
  unsure (1)..(111): unsure at all Xaa locations
  Clone ID: MRT4577_44459C.1.pep
SRSCAGSENAKDLVRHMLEPDPKLRLTAKQVLEHHWLQNAKAPNVPLGDIIKSRLKQFSRMNRXIRCMCLXVIADHLSAEEVEDIKDMFKTIVSYEELKTGIAELREQLLG

SEQ ID NO: 308543 - protein, 76 aa, Zea mays
  Clone ID: MRT4577_4445C.1.pep
NNFIWLIGLSAVIYSSPTCCRPCSQESIACINDQSGISGQCKSSFLYHLIIIFPFNFATQLPTFPLIFVLKLSRDI

SEQ ID NO: 308544 - protein, 100 aa, Zea mays
  unsure (1)..(100): unsure at all Xaa locations
  Clone ID: MRT4577_44460C.1.pep
LAQNIGEHYLHHLALADIARYSQHQQLVPFNRLAESNFASYWXQHHLPFILLSAVXSQIVLACDQPTVXNYTVYLQHGQRLPFIQLAGERSATLLTQPQL

SEQ ID NO: 308545 - protein, 67 aa, Zea mays
  Clone ID: MRT4577_44461C.1.pep
KNAGFTLGHLLGFYPCICMDPRKQSSGALPSSGLFQFQEAESPGSKARGLGHILRHNGWFDLIPYPW

SEQ ID NO: 308546 - protein, 50 aa, Zea mays
  Clone ID: MRT4577_44462C.1.pep
VVKVAPILQVRCKLRTKLALDLLKMHVNNARPALFLLLALLGYGNERGAR

SEQ ID NO: 308547 - protein, 131 aa, Zea mays
  unsure (1)..(131): unsure at all Xaa locations
  Clone ID: MRT4577_44463C.1.pep
GRPXEKNYKKKKKKKKKKKKKKKKKKKPPPHLGLAKFSPRPPPSPEFPPSHLENAPEGSKNPKLSLPNPPFNPWGGGRDHDDRIQWGRRGRGVLEPEGPPELRVRGGVRLLQGLWLMPFPVAPLPGAPRPG

SEQ ID NO: 308548 - protein, 73 aa, Zea mays
  Clone ID: MRT4577_44464C.1.pep
RENISTLCTGHPPVFLKRRVTLPAAGMTKKKFGSGAQIQVYRPGEEKVKIVKRATKLKFRGGGKKPLGKEKPW

SEQ ID NO: 308549 - protein, 182 aa, Zea mays
  Clone ID: MRT4577_44465C.1.pep
MAPISVLLNSNVTDDKGLQVFYVTSQDNLGVALRNSAAKGVDSQDFYEAAADAHVGLIPVKSEIGSAVMNGLNLVVAITKHKLKDECEKPTLNDVSIVSPVYQVLDTTGITNTTAAIVSNEDNSNAWVYYLKGSDPKEIQICEYELTTGNIGPISNLNIDPDCSLGAFYDTNGNGRSIIYQD

SEQ ID NO: 308550 - protein, 87 aa, Zea mays
  Clone ID: MRT4577_44466C.1.pep
KKKKRTKKKQKKKKKAKQKKQKKKKKKKKNYKKIKKRKTGEKKGEGQKKKKKRRQRTPKFQKHPPEASNGKNKDPAKKKNKGQGLSP

SEQ ID NO: 308551 - protein, 256 aa, Zea mays
  unsure (1)..(256): unsure at all Xaa locations
  Clone ID: MRT4577_44467C.1.pep
MDPLLAAAMNHISSXHPXLRRHLVGPNNDSISRDQLPSSSPQSSKRXRSKLRFTTPSAREESQNGVQMLSPSQSPQRDCVSSDFTFGDDTSMYQXVEGAWNEHAKGESYXDHFCQNHPERILXGSNSEIAANSYHMDKTNVRLLWGMDMDTYRFSISWTKILPKGSKEGGISPYGIEYYRYLINLLLENGIEPYVTSLHWDGPQALQEKYGGFLDKSHKSIVEDYTYFATVRFDNFGDKXKDWLTFNEPQTFTSFS

SEQ ID NO: 308552 - protein, 107 aa, Zea mays
  unsure (1)..(107): unsure at all Xaa locations
  Clone ID: MRT4577_44468C.1.pep
MLVCXDEXXXDREQXPXAAPXAKQKXSXXKPDRXXNKXTPPXGXRXHXRAXXXAAETGGAXXGKXRQXXRDQXEKEGRRXXXGTPEKAXAARKXPERQXXXNSGPKK

SEQ ID NO: 308553 - protein, 60 aa, Zea mays
  Clone ID: MRT4577_44469C.1.pep
CVCVLLSMVCTGHVGLNIFYGIFGMYGVNGDSGNCEVLNISFALTALYGCSFSPDICSYS

SEQ ID NO: 308554 - protein, 65 aa, Zea mays
  Clone ID: MRT4577_4446C.1.pep
GNKRSAETIILHLSRSPVRDALSPQTAHHVGIRVTRSPMQRTTEEVHLPATFHNGSTRRSKCIER

SEQ ID NO: 308555 - protein, 71 aa, Zea mays
  Clone ID: MRT4577_44470C.1.pep
SSVPSTHRPLSVFIRYETPLTLSAPLTIFKCFLFLLTFMLFVMILNTIAFYSVFGLSYYLSCPLSFFLFSF

SEQ ID NO: 308556 - protein, 83 aa, Zea mays
  Clone ID: MRT4577_44471C.1.pep
DAQGCISLSVLFFSGINSSVLDGPVYIYGYVSPEPIRESETPSSVSQSFSPYYYCSMAQLESVPLKKKKKKKKKKKKKNSRGG

SEQ ID NO: 308557 - protein, 110 aa, Zea mays
  unsure (1)..(110): unsure at all Xaa locations
  Clone ID: MRT4577_44472C.1.pep
GVRXMICWCXQMXATTPKSSMARSDEIXRXXGSYLFFFFXXXXXIRWGGXCGFXGCPLXXXGGGLAWPPGPPLLXALAPXTEPKRPSAPPLRLPLXDXVPXGGXXPXXVG

SEQ ID NO: 308558 - protein, 67 aa, Zea mays
  unsure (1)..(67): unsure at all Xaa locations
  Clone ID: MRT4577_44473C.1.pep
MVKAVAVLGSSFFFKGTGFFTQEGDGPSAVTGSVSGLKPGLHGFHVHALGDTPNGCLSTGPHYNXAS

SEQ ID NO: 308559 - protein, 48 aa, Zea mays
  Clone ID: MRT4577_44474C.1.pep
RKHPLSHHCTYLLRAHTLDMPPDRPPSTAYHSPYESPTFAAHTPLIQR

SEQ ID NO: 308560 - protein, 905 aa, Zea mays
  Clone ID: MRT4577_44475C.1.pep
MEATMQSILDALARTEARLTDALAGRCGEQSARERASSFDGSVPQYRDEASLPPLIHDNAAKVASLDSGNDVGLQQIATVLAFLGSDELPSSTTLLAGSVFDRYIPPLYDDDLLQEFDVLDEDAASANAVDDDSGAIPVHAPLDPDAMLDSNVDRSGSPRYPCLPEGATLFRWDLDEKVHDGLIGGTELSGEVRHLCFSLPSPDQTMNPALVPNTDAEEDGVLTTVREWASTAAPTLSPTSPWSASWVGPTPTPTAPTAPCSRTSMLSAAASPTPTRTTPSANRRPRATRGPWPPCRRRASGDLTEDTIIASCKDSVEVTHDRHLLGVTYTGLEQHEQALEQNEISSKGTKGWGAAGLDLLQAEIDAANIKIVLGKFDDAVLHRPPWPPPTQYGQFEKILRVMMDCKGHMVESCFIVWSNVADGRKLDILVDGVGYNHLGISVEEADCSRMVRSVGEGSSMFPSMEHSEAFQGAVPHKVEQSLCSEDADLGSLAARLIGLCTHAMLVKHGWIVVRSVLLLTPEEVKVVSKTTDHLLLVLLSSAWSGTEIATTLRLQDQIQHQDIMVLIDSGSSHTFLINSGLKQLFMSVYCSAWSGTTSHQTLKLKGSIQEQPLNILLDGGSKHTFVNDKLIPLLSRVQSISYPTKVQVVNGLIVSGRYQWLQAHWQIQEYEFVSDLLFLPLPSLDMVVDIDWLATFSSMRVDWVQKWLAIPYKGSSIVLYGQSHTIPSGTVVELWSLDSEAQQSSQPSYPPQTQSLLLQFAYVLRTPFEAMANEAATWKEIKIVSSPTSRKRPVNEINRSSTKKQGPGSVEISREGMSASKARAELVSIHGSRAKASSVLMQWAQVCVRSILLLVSQGNFSVFIWDPGGHAKNSLGTSCISRSGECQQQYKKDVRSSPALKMEH

SEQ ID NO: 308561 - protein, 934 aa, Zea mays
  Clone ID: MRT4577_44476C.1.pep
MEATMQSILDALARTEARLTDALAGRCGEQSARERASSFDGSVPQYRDEASLPPLIHDNAAKVASLDSGNDVGLQQIATVLAFLGSDELPSSTTLLAGSVFDRYIPPLYDDDLLQEFDVLDEDAASANAVDDDSGAIPVHAPLDPDAMLDSNVDRSGSPRYPCLPEGATLFRWDLDEKVHDGLIGGTELGGRGSHHCSRMGLNRGTYSVPNLPVVCILGGPNSDAYGSNRSMLPDIHVVGGGLSNPDPYDPKVMGLEAREQMRYIGKLKHAHYDWQLPCERGVLAATWQQARSLAFAVGNEQLAVHVASQCQQASSRDTRAMATMSKKSVRDLTEDTIIASCKDSVEVTHDRHLLGVTYTGLEQHEQALEQNEISSKGTKGWGAAGLDLLQAEIDAANIKIVLGKFDDAVLHRPPWPPPTQYGQFEKILRVMMDCKGHMVESCFIVWSNVADGRKLDILVDGVGYNHLGISVEEADCSRMVRSVGEGSSMFPSMEHSEAFQGAVPHKVEQSLCSEDADLGSLAARLIGLCTHAMLVKHGWIVVRSVLLLTPEEVKVVSKTTDHLLLVLLSSAWSGTEIATTLRLQDQIQHQDIMVLIDSGSSHTFLINSGLKQLFMSVYCSAWSGTTSHQTLKLKGSIQEQPLNILLDGGSKHTFVNDKLIPLLSRVQSISYPTKVQVVNGLIVSGRYQWLQAHWQIQEYEFVSDLLFLPLPSLDMVVDIDWLATFSSMRVDWVQKWLAIPYKGSSIVLYGQSHTIPSGTVVELWSLDSEAQQSSQPSYPPQTQSLLLQFAYVLRTPFEAMANEAATWKEIKIVSSPTSRKRPVNEINRSSTKKQGPGSVEISREGMSASKARAELVSIHGSRAKASSVLMQWAQVCVRSILLLVSQGNFSVFIWDPGGHAKNSLGTSCISRSGECQQQYKKDVRSSPALKMEH

SEQ ID NO: 308562 - protein, 181 aa, Zea mays
  Clone ID: MRT4577_44477C.1.pep
SSRQERNRYQRNSWREPRVLFTFGTRANTGSSTRVLDEIAIEVGRHGASEDGRSFVPASGEDRGGKQGDSPTHGGDSGGGGKYGGGGQGGVQVTLPAGAVTELLLLSVESQATPAGQSVDPKVQAVLDQFVEVFEDPVGLPPSRTCDHTIPLVPGTNVCVLPLSSKVFRDCSCILPLSFKV

SEQ ID NO: 308563 - protein, 107 aa, Zea mays
  Clone ID: MRT4577_44478C.1.pep
KNPKLSLNTFPIKTNQNSFLGPKKKCGTFPWAKTSPRIFPVGKKGNGRGKLFRVKKKFWFSAHLGFKSLFCPGIFCGRPRRELPRLGRGTKKRVGSIKKKKKGAAFF

SEQ ID NO: 308564 - protein, 245 aa, Zea mays
  Clone ID: MRT4577_44479C.1.pep
MAPAKTDDPLSQLLAKIEEGNKETHRRMEAIQGAVGNMEAAVKVVMTEQGDLQKWKPEVEAKVTEISDALKAIQIQMGKMEKKPLGFGSRQEEEGEDGFLKPPPSDSSNLEFRREEGRTQFSHGVLGMNWIQQYSPMKVDWANKWAVIPYNGSPAYLQGVQVTLPAGAVTELLLLSVESQATPAGQSVDPKVQAVLDQFVEVFEDPVGLPPSRTCDHTIPLVPGTNVCVLPLSSKLFRDCSLLLP

SEQ ID NO: 308565 - protein, 83 aa, Zea mays
  Clone ID: MRT4577_4447C.1.pep
VLSFRELLAIKGDFEIPKSIKTMVRQQKRKKTKSQLFQNPGKLPIHRTIKFFPRVPGRVGPERPPLFFFFFFFSFFFFFFFFF

SEQ ID NO: 308566 - protein, 218 aa, Zea mays
  unsure (1)..(218): unsure at all Xaa locations
  Clone ID: MRT4577_44480C.1.pep
LARCICEATFHLSDTRTYGPRWPPPPASRGGCCSSPWSRPSPLRPPPAERGGRAALFVFGDSLIDSGNNNNLASLAKANYFPYGIDFAGGPTGRFCNGYTIVDELAELLGLPLVPPYSEASSVQHVLQGVNYASAAAGILDDSGGNFVGRIPFNQQIQNFETTVARIAGAAGAAAAADLVARSVLFVGMGSNDYLNXYLMPXYDTRRRYGPQQFADLL

SEQ ID NO: 308567 - protein, 61 aa, Zea mays
  unsure (1)..(61): unsure at all Xaa locations
  Clone ID: MRT4577_44481C.1.pep
IWADMALTFTNLLKQLFAKKEMKILMVEPDASGKTNMLYKLKLIENXTTIPTIEFNVETVE

SEQ ID NO: 308568 - protein, 77 aa, Zea mays
  unsure (1)..(77): unsure at all Xaa locations
  Clone ID: MRT4577_44482C.1.pep
TPETTPSPALKIXCXXLVETHTMGPXASCXGCRVPCPLRXPAGTXEQXXSLTSRFFXHDQNXAEGQRLPKARKRSET

SEQ ID NO: 308569 - protein, 131 aa, Zea mays
  Clone ID: MRT4577_44483C.1.pep
MCLTVRSERDKKVPNPTLRCRPDLAKGKASPRSLPNLGHHMVPPTLHFCANRSLLAPARATTRTAMAAGGTEQELERARREPPSKQEQKQRELAGIMATVFKDELNLHHEGGRKEREREREREREREMMQH

SEQ ID NO: 308570 - protein, 306 aa, Zea mays
  unsure (1)..(306): unsure at all Xaa locations
  Clone ID: MRT4577_44484C.1.pep
MVWHCDSYHMAFTRSNSASRYSDYSAWSGTTCHQTLKLKGRIQEQSLNILLDSGSTHTFVNDKLIPLLSGIRSISYPTEVQVANGPIVSGRYQWLQAHWQIQEYEFVSDLLFLPLPSFDXDMVIDIDWLATFSSMRVDWAQKWLAIPYKGSSIVLYGQSYTIPTGTVVELWSLDSEAQQSSQPSYPRRPNSLPSHLILQTQSLLLQFASVLRTPFEAMADEAATWKEIKIVSSPTSREQPVNEINKSSTKKQGPGSVERSREGMSASKARAEPVSIHGCRAKHHRLCNGHKFVSGQFCERGFFSPQ

SEQ ID NO: 308571 - protein, 390 aa, Zea mays
  unsure (1)..(390): unsure at all Xaa locations
  Clone ID: MRT4577_44485C.1.pep
MAAAAGLPWWLLLLAVVPAVTAAATAGGEGRAPALFVFGDSLIDSGNNNNLASLAKANYFPYGIDFAGGPTGRFCNGYTIVDELAELLGLPLVPPYSEASSVQHVLQGVNYASAAAGILDDSGGNFVXPCMLRDMTDXDXDKKASLQIQCXGRIPFNQQIQNFETTVARIAGAVGAAAAADLVARSVLFVGMGSNDYLNNYLMPNYDTRRRYDPQQFADLLARQLAAQLARLHGAGGRRFVVAGVGSVGCIPSVRAQSLAGRCSRAVDDLVLPFNANVRALVDRLNGNAAAGLPGASLTYLDNFAVFRAILADPAAFGFAVVDRGCCGIGRNAGQVTCLPFMPPCDHRERYVFWDAYHPTAAVNVIVARLAFHGGADVVSPVNVRELAGM

SEQ ID NO: 308572 - protein, 102 aa, Zea mays
  unsure (1)..(102): unsure at all Xaa locations
  Clone ID: MRT4577_44486C.1.pep
DRRVRDSARTNVASIRLMALLLCLSGTGILQMRWRGXALDHWGRNDQLWGIIGVXRHLFSXFQGLLKVFARLDTXLTVTSKARDDEEFLDLFTFNRNHPACD

SEQ ID NO: 308573 - protein, 91 aa, Zea mays
  Clone ID: MRT4577_44487C.1.pep
FFFFFFLVFQGFKTNHGNCIHHILSHTLGDQCTIFIKTNQLTMRLGTSQTYFCHYRIKPLIGRFKLVALTILNSPHWFSWGQTICRLFSLK

SEQ ID NO: 308574 - protein, 115 aa, Zea mays
  Clone ID: MRT4577_44489C.1.pep
SLLPFSFQEPDLEDCSFRCRGTSPQESLSSMSPISSLPALFDQTASAPCGGGQLDPAAPGTTNMEQLLEKQGDGEAGVNSEEGWSRAGRPALGPPGSVTFSARSPGRGDLPPTRP

SEQ ID NO: 308575 - protein, 57 aa, Zea mays
  Clone ID: MRT4577_4448C.1.pep
MAFSLQEMEHKRESGKKKKKKKKKKKKKKKKKKKKKKKKKKKKKKKKKKKKKKGPPF

SEQ ID NO: 308576 - protein, 109 aa, Zea mays
  Clone ID: MRT4577_44490C.1.pep
APALHVDERARAMAAPNLATTAAGRARGADRGASPGRSGGTDAPLDRGPKADATAGCPPNGRATATACSSSPPRPLARAPREDPTTWRYVGENQRRYHKGCQKGDVTIH

SEQ ID NO: 308577 - protein, 165 aa, Zea mays
  unsure (1)..(165): unsure at all Xaa locations
  Clone ID: MRT4577_44491C.1.pep
SWAEFRTVFRTHYIPKALMEIKFNEFLDLXQGEQESVMEYFERFTRLYQYVLDFVNTNEKTRFYFLRGLNKKLQGLMATSWAERYNEVVSQAVLGDNKIRLHQESKRKEIVEESSGKXPVPEXVKQSVYPPPPSPPQLYSSLQSREKQVVIPFIPHEPRCPTHSF

SEQ ID NO: 308578 - protein, 101 aa, Zea mays
  Clone ID: MRT4577_44492C.1.pep
VTMQNLTDRLATYLDKVRALEEANSDLEVKIRDWYQRQRPTEIKDYSPYFKTIEDLKTKILAATVDNANGLLQIDNARLAADDFRTKFEAEQSLRINVESD

SEQ ID NO: 308579 - protein, 38 aa, Zea mays
  Clone ID: MRT4577_44493C.1.pep
ITGVRMRGLVCDTFTSQREQIVVIQRVVACDDGKIHVV

SEQ ID NO: 308580 - protein, 73 aa, Zea mays
  Clone ID: MRT4577_44494C.1.pep
GPRSHEDLYFLITNVEMNINHQDINRNDNDSKVTVILDDQHHLRPCPLLTSSPRSCHPPASTRHSLPALWCTK

SEQ ID NO: 308581 - protein, 113 aa, Zea mays
  Clone ID: MRT4577_44495C.1.pep
KKKKKKKVVVGVCYILQRIPILLAFLKKKKKKKGGGWCLLYLTKNTYFVGLLKKKKKKKRVVVGVCYILQRIPILLAFLKKKKKKKRWRWGLLILTKNTYFVGLLKKKKKNKG

SEQ ID NO: 308582 - protein, 263 aa, Zea mays
  Clone ID: MRT4577_44496C.1.pep
MGAKENGEERDDHSSDVERDGKQGKVTESDYEPARNSLSSPGEATSNEDTKVKRVSRVPKKLSRKESKENSPRSARSISKSQIHSKLQYISANSNQNKSPKTNKAANGAKTVEIKRPETPKAPSCSSSEMSEETDDKTIEDRPTDDKAIEGRIKDDSAVEGRATNDKAVDDKAKNDKDIEDGMKDDNAIECEVTDDKPIDSKVTDDITVEGREIEGKAIEEAKEIDILDEAPKSDQSTGTDDEIVDTEENIADNGNSVSYKIN

SEQ ID NO: 308583 - protein, 66 aa, Zea mays
  Clone ID: MRT4577_44497C.1.pep
YYPVLRLPADVIIAPASPICLGDKVISCAAPHDDVGGGVRNAGEHPAVGDLAMHVFFWVLSVSNCF

SEQ ID NO: 308584 - protein, 133 aa, Zea mays
  unsure (1)..(133): unsure at all Xaa locations
  Clone ID: MRT4577_44498C.1.pep
EKGQTGPPGPPRRASPRGEGPNTGGPDPGTRGRNQTGPNRGRKGGSRGGNRENQPKPPPKKXPQGRGGKPGAPKEGNNLTDPGQAQSPDSPXGNRETPPPQGKGQTAGRGGTRTGPLTPSPRTDPLGQGGRVP

SEQ ID NO: 308585 - protein, 100 aa, Zea mays
  Clone ID: MRT4577_44499C.1.pep
GPQTPQNAGQPLRDRPHAVFYFPPPWPRGDHKGFLGPPTKLCRGGGRTAKKKAGGGPTLPPCWPPGSPPPRPKGPPRGPPCRKQGGGRPWEKAPFLCFCP

SEQ ID NO: 308586 - protein, 79 aa, Zea mays
  unsure (1)..(79): unsure at all Xaa locations
  Clone ID: MRT4577_4449C.1.pep
SFLTRPILGEANYGVGESHHTDQIDLYITSSLKNTYLNIVHSTXYKSDTTNEHLLPSLAEETXKLLKKDTAIETPVLTK

SEQ ID NO: 308587 - protein, 115 aa, Zea mays
  unsure (1)..(115): unsure at all Xaa locations
  Clone ID: MRT4577_444C.1.pep
MADKILRFLMLLGLYAGVDTATISPHCSYASIATVLXPYISQTDDLMCENRIVQXYTIQHAIGTRILPLSVLLLQQLIDLLQQIHSLHFVXHIMKAQQLQQLGLEYLAAYSKQHE

SEQ ID NO: 308588 - protein, 103 aa, Zea mays
  unsure (1)..(103): unsure at all Xaa locations
  Clone ID: MRT4577_44500C.1.pep
ARLAGGAGRAPRLAAQRRLXSTCAAGQAQAELRRLEPQVRRRRHRGCRRRHVLASLSILLVWLLLRLLAVYLWSESERGSGALHGKRACKCNGLGRTRGRPGS

SEQ ID NO: 308589 - protein, 37 aa, Zea mays
  Clone ID: MRT4577_44501C.1.pep
QSPALRKQHMTTSTCNYSVNYALSTQCQHYVAMMDLL

SEQ ID NO: 308590 - protein, 70 aa, Zea mays
  Clone ID: MRT4577_44502C.1.pep
RILILEQDAVTPVELWTTCSSPPPSAWPKTDWFKLHQKKKRLIDFPTYVSLDFSSLLSKCSALLLAMKQP

SEQ ID NO: 308591 - protein, 337 aa, Zea mays
  Clone ID: MRT4577_44503C.1.pep
PDEAIRIFNDMIAAGVEPIDATLVSVLSACAQLCSLDVGTWLYDTYIVSHKVELTPNLSNAFIDMFAKCGDVGAASRLFSNMEDKNVVSWNTMIMAHGLHGQPEEALHLFQEFKGNGILPDEATYIGVLSACSHGGLVSEGRCHFKEMKIVYGIEPRAEHYACMIDLLGKVGLLEEAFEVARSMPVGADEAGWGALLNACRMHGNVEIGKCAANKLAGLDPSDSGIYVLMSQIYASKSKWGQVKMLRTVMRDRRVKKNPGCSSIEVDGKCHEFLVADVSHVHSEDIYAALGNIYLHSKAEGYISHASCVCYKSILSIVFTGLRNIQDEIRGQGPPIA

SEQ ID NO: 308592 - protein, 94 aa, Zea mays
  Clone ID: MRT4577_44504C.1.pep
PRHEKRHEDLGQSMPPADSILITANEASLQLKLPRIAEEMRREASSSTYGRQGRKSKLQASGTCWASCTSTSSAALVGRRSRNGSWLGSAMRTS

SEQ ID NO: 308593 - protein, 266 aa, Zea mays
  Clone ID: MRT4577_44505C.1.pep
MAPHQGSPRSIFTEKSRLPRVPFHPWRRCCKCPYGPLAPTALHRQNGSSSIPPSTAKRRRKAVSSMKKPKPMPKQAKPAVVGMKKKRETERMELVVDDVCAEEPDKEERISGWKRSAMAKEIHQNQEEEVVAVSTAKRRRKAASSGKKPKPTPKKAKPTMVGMKKKGETERVELVVDDVCAEEPNEEERVSGRKCSTMAEEIHQNQEEEEEEVVAVSFGQKKKLPRDFCLGEHWCSISRQVLCYDKKDVKVYSLINYTIENVNWAI

SEQ ID NO: 308594 - protein, 152 aa, Zea mays
  Clone ID: MRT4577_44506C.1.pep
LAEDGSVDEGVAYFVEWAILIVSAVMILQSSLDYLFAFTTLVLCGIIKVIARIEGKSKVLRYIFGGLSDGTSRNSSRYGDFDEDYSSMNEDRQDGFGNLHGGYQRHAPRRNSPLAGSAKTLSQGVAMDSFYSTFHTTPERMEFTKEEYEAFT

SEQ ID NO: 308595 - protein, 137 aa, Zea mays
  Clone ID: MRT4577_44507C.1.pep
SVGQCIAVWRVATGSAHDGVRRPWRLWPPHPSPPGELPPSDSPVFCGSQGQPERLTRALRVADAADETNLLPGPGANGDARVAGEAGGASALAAGRKPAQHKRARLTWRREQGLDRRPSELRGLRPREGFQDAGPGH

SEQ ID NO: 308596 - protein, 77 aa, Zea mays
  unsure (1)..(77): unsure at all Xaa locations
  Clone ID: MRT4577_44508C.1.pep
RTFWVSGQIMENDESYAMEGDVHFSHQSCTEYLILSGRXFDHNQAWARVGFDTRXRHSADFELXKGXKEGEPFCDSH

SEQ ID NO: 308597 - protein, 119 aa, Zea mays
  Clone ID: MRT4577_44509C.1.pep
SPQASIGLFPVFSTGGVFVIYVFFFFFGAPPLVPPVCYPVLLRGADFFLGFFILSHFPPGTRCGPGFSSPFFSPFFGPLGPPPVSVGVFRVPPRVRLEPPKKIKKKPPKKKKKKKKKNT

SEQ ID NO: 308598 - protein, 80 aa, Zea mays
  Clone ID: MRT4577_4450C.1.pep
KKPNPNTKKKKKKKKRPLPLTKTSLPPSNIPQLYPPFIPTLNSFFCPPLYKFFSLYSPSSPLLNPLLPLPFFPSSLYPIY

SEQ ID NO: 308599 - protein, 91 aa, Zea mays
  Clone ID: MRT4577_44510C.1.pep
PTTATYWRPRRRLGRPSPPPSLGYSGIDSAAGVGTLYNPKSHRHAEPTWKCPTARPLTCGTGSTAKRLYELQDSPTPVTPESSQLEAVAKD

SEQ ID NO: 308600 - protein, 114 aa, Zea mays
  unsure (1)..(114): unsure at all Xaa locations
  Clone ID: MRT4577_44511C.1.pep
FLVIGTAPVGRVETVVIKPALDHTFXSTGLTTEVNIVEMHHXALQEAHPVDNGGLNVKNAAAKDLXKAGXAALNSKDDPXQXADSLTLHAIIMNHLGQIGNRYSPILDXHTTHC

SEQ ID NO: 308601 - protein, 114 aa, Zea mays
  Clone ID: MRT4577_44512C.1.pep
TCRGCFHIYPPETKIKFLLVLALRYTAHPEVGTVLSFLLDKDYIKFRGQITLLFGLSSYYLFFGRFVHFGEKVKCHCEAVNCQGYLGSQIKNPIQSILATVAPQVQLREYSPMH

SEQ ID NO: 308602 - protein, 84 aa, Zea mays
  unsure (1)..(84): unsure at all Xaa locations
  Clone ID: MRT4577_44513C.1.pep
MGKIKMRSNGCXRIGGLVARDGLQSEDVQLGADNDPFITTGYMTFMFKLDTVHGQWKHRDIGLKDYKTXLLFSEKPVTAFGIRN

SEQ ID NO: 308603 - protein, 92 aa, Zea mays
  Clone ID: MRT4577_44514C.1.pep
DGSGYSLSCPFRWRVGDAVVREGLCGRCDRGPGAEGRAAEGGREGENRGVRVCGAAMEEEEGERGGGGGGDGHGEGRGMRKPFAALGFSPDP

SEQ ID NO: 308604 - protein, 40 aa, Zea mays
  Clone ID: MRT4577_44515C.1.pep
RLGLVARLAHGVAAASLLLVLYVVRATRRRLASPYAVLAM

SEQ ID NO: 308605 - protein, 158 aa, Zea mays
  Clone ID: MRT4577_44516C.1.pep
MAENLAPEKRHTFVHNGQKVFEWDQTLEEVNMYIELPKGVPTKLFHCTIQASHVEVGIRGNPPYLNHDLMHPVKTDSSFWTIEDAEMHITLQKREKGKTWSSPIQGQGILDPYAADQEQKRLMLQRFQEENPGFDFSQAQFSGTCPDPRTFMGGIRSE

SEQ ID NO: 308606 - protein, 182 aa, Zea mays
  Clone ID: MRT4577_44517C.1.pep
MVPFTYLAPALFFNATVKTVKPLGHDSFGAALNMFEFESAMLYTEPEFEIQFSASVTAGVNFATTNEAAGISGPDFRGTVVPNDGAAPFQMRMGGVQLGNEAVLPIISGNTSSGLEVPYGTVYRVLTPVFRGGEAHYKTLENSVFVASETVSDSGVPGKFILGVKISKVFASKTNITIGEEF

SEQ ID NO: 308607 - protein, 73 aa, Zea mays
  Clone ID: MRT4577_44518C.1.pep
TLRQQFYFFLHTIPHKKGSPSKTPTQWACSSTTTLCKGCTDQSPDLPQWLMEGLGRSFRLRPSSRKENKPVSE

SEQ ID NO: 308608 - protein, 102 aa, Zea mays
  Clone ID: MRT4577_44519C.1.pep
MSVTISESYTSYSTIIFNMGNGDDNTEDAEMHITLQKREKGKTWSSPIQGQGILDPYAADQEQKRLMLQRFQEENPGFDFSQAQFSGTCPDPRTFMGGIRSE

SEQ ID NO: 308609 - protein, 53 aa, Zea mays
  Clone ID: MRT4577_4451C.1.pep
SILLIEIYLRKKKKRGCAHTPNNIKAVAFNSKNAGFIPHTTIKTSPDETIKRG

SEQ ID NO: 308610 - protein, 48 aa, Zea mays
  Clone ID: MRT4577_44520C.1.pep
WGFFRNKITLYNALVMFYKLPPQLVFFPVLKPHFRGGSLLALIKIFPL

SEQ ID NO: 308611 - protein, 110 aa, Zea mays
  unsure (1)..(110): unsure at all Xaa locations
  Clone ID: MRT4577_44521C.1.pep
SATNASIISQCSLXAPSSIIPQFLPPITXMAFKHPAEQAYMLQQAIAASVLQQPIAQLQQXQSLAHLTIQTIATQHQQQLLPSLNHLSIVNPVSYHQHQLLAYNPLALSN

SEQ ID NO: 308612 - protein, 78 aa, Zea mays
  Clone ID: MRT4577_44522C.1.pep
MGTGKIGINGFRTIGTLVARVALQSEDVELVAVNDPFMTTDYMTYMFKYDTVHGHWTHNDMTLNDYKTLLFRDKPVTV

SEQ ID NO: 308613 - protein, 914 aa, Zea mays
  unsure (1)..(914): unsure at all Xaa locations
  Clone ID: MRT4577_44523C.1.pep
MSSEPLPAESPEAPASSSGSPSKDAVGTEVGAAAGAPETNTLWVGNLPSHVTEGDLLALFGPHGALDCALARAGSRSYAFVLFRSPAEARAAVEATRGEKVKGAAMRTEFARPARAVRNLWVGGISPSISKEELEGEFLKFGKVEGVAFSQDQTSAYIDFEKLEDAISAHRSLNGKMLGGKELCVDFQRSKGRAEWSEASSFNGRVPGPVGDKXQWPSEEFCWSADAXAQPTNVLWVGFPGSYRVIDEEALKHAMSVFGVVTKIKVFQTRQYAFVEFANVAEACNAKMNLDGHLFNDPRIQILFSNSGLAPNKLDNPTSVAGFPSSDIYSSDGRLGPGIGSGTLQGYDPPRGGRTRYYDYAGMPTPGGILSQPEPFDPREAKRMRLAAGADPYDVRAGSTGLYSAGYRHQGSSVHAEGSSSPVIRVRGTVHRTSYIEHCWRGSIAKGGSPVCRARCLPITKGSDIPLPDVMNCSARTGLDMLAKHYADATGFDIVFFLPDSEDDFVSYTEFLRYLGSKSRAGVVKVDAGTTLFLVPPSDFLTNVLQVDGPERLYGVVLHIPQISAAAALRPQLTGTEQQPYYDERGTLPTSQRKYSIISPNDSGHLDADYRTSLHEDSMHRLGHIPGRPRVDEGQAVQPALAGFPANQAAGLQVQSSLKPDIMATLAKPSXSVQSSPLVSGQMNAIDRTSQIQDPSMLSKVWNPENQVTASNSSFGQMANVQHPGQQFSGQASAAHLTNYGNMVSAQERSIQHTAYNPEVTLNLPPPPPLPTIPHSSATLQSQGGHSLPSQTNQQLYQPEQYYVPQNNYGPLVPVSHSNLQISNTNNPTLTIPQVNPGPPTNNQIGNLAQPQHSMPLHVDRASQDFSSQGQQQNRGPGAAQAPEEDKSKKYQATLQLAQNLLLQLQQRGSGNQS

SEQ ID NO: 308614 - protein, 45 aa, Zea mays
  Clone ID: MRT4577_44524C.1.pep
VCQSTVTEAMHGVLGPRVRPGCRYHVCTERRSLSCRPSALPQPSM

SEQ ID NO: 308615 - protein, 79 aa, Zea mays
  Clone ID: MRT4577_44525C.1.pep
RGGFFFVPSRKILVPPKTLTNCFFVFLFVGQLLFGGLQFSAGLFSVWVSLLTERGVFRLPHISSFDVMFFIRKKKPCSG

SEQ ID NO: 308616 - protein, 70 aa, Zea mays
  Clone ID: MRT4577_44526C.1.pep
QAHWKSKGRGDSFNTPPPFSVVPQKQKPRPPPFSNLAGANKLSPVFISSFLMKTMRTQAYFFFFFSLTRL

SEQ ID NO: 308617 - protein, 40 aa, Zea mays
  Clone ID: MRT4577_44527C.1.pep
LCSAYNTYISTTALKSLHLYTRYDTTALMATSLRMRLVPH

SEQ ID NO: 308618 - protein, 91 aa, Zea mays
  Clone ID: MRT4577_44528C.1.pep
MSLSTKLTTSFRIGMHLQCFSAEETTTPVQSLILRCLQMYMDQKEVVDALCHHSKIEPCITELAWRQLEHQNPLFFKAYYMRLMLKNQIMV

SEQ ID NO: 308619 - protein, 86 aa, Zea mays
  Clone ID: MRT4577_44529C.1.pep
NLCFPYLVCPVGFPPFRPGRITLLTCCVACFGKGDLLFFVNVTPCFFVFYAQCFVFILAMLTVPFFSFFSLLFCGFFTFFFAKFLT

SEQ ID NO: 308620 - protein, 99 aa, Zea mays
  Clone ID: MRT4577_4452C.1.pep
AQAVASLMGCPANARDVKKDEKSVPNLVQLLDPSPQNTAKKYAISCLLALSASKRCKKLMVSHGAIGYLKKLSEKDVAGARKLLEKLDRGRLRSLFSRK

SEQ ID NO: 308621 - protein, 191 aa, Zea mays
  Clone ID: MRT4577_44530C.1.pep
MGEYNGGVSTSWTIGSAHGGMAPPTRPKIKIIHIIAPEIIKTDVAHFRDLVQRLTGKPASCAASSTGDDDVASTLPPVEDEDMETTTKKRPRPRPAPPPAAGDERSDFTKAQEEPVKKRKIKCEVKVEEQGAGFGDYDLGRGDLWMDLNPGGFLSFLEEEGVFQGLAAADHDFFQPFGSSRMDLVGEMHAS

SEQ ID NO: 308622 - protein, 135 aa, Zea mays
  Clone ID: MRT4577_44531C.1.pep
NLLIKKLDVCCALFDFTDASKNMKEKEIKTLMLLEIDEYVRTANVKFPEIVVEAITKMISVNLFRTLISPPREKKALQAFDLEEDEPLMDPAWPHLYHVYELLLTFVQSPQNDAKLAKRYIDYSFILRLLDLFDS

SEQ ID NO: 308623 - protein, 66 aa, Zea mays
  Clone ID: MRT4577_44532C.1.pep
MAENEEEVEVEEEKTSPPPPPEEHQAGCYFIFDICGSEPDSPVKQGKPRCNIKNLNDKPLEYDFPP

SEQ ID NO: 308624 - protein, 101 aa, Zea mays
  Clone ID: MRT4577_44533C.1.pep
IQDRALCQGHDGVHSPVISPVVQAVSGVKLLIYHARYVSLWTSAPDGRFWVRNPCEHTLEIGLSVVELVLPPPPHVCHQKIWNCNLIRALLISTTMSVCSI

SEQ ID NO: 308625 - protein, 53 aa, Zea mays
  Clone ID: MRT4577_44534C.1.pep
CETKCSICQEEYLLGEDVGKMACKHYYHLSCIEHWLRQKNWCPICKSVALKIK

SEQ ID NO: 308626 - protein, 107 aa, Zea mays
  Clone ID: MRT4577_44535C.1.pep
ACGVSEASAPSLTRSVRTGLIVARSPCVLTIALSNGLDPWSTKHVPPAAGTLCRILDARRKPVAMPGCHGAHEVPLMSSTALQQTPGHCRYDPVGLRAESAYERHGV

SEQ ID NO: 308627 - protein, 109 aa, Zea mays
  unsure (1)..(109): unsure at all Xaa locations
  Clone ID: MRT4577_44536C.1.pep
MQPIRRRDRGFALTXCVSGRLLAADTVLPGAREDEGVTPYEARRVHDEVKDMVYNSXNGYMKYAVPLDEHADLKXQGVNTLGXYARTMIDDWDTQAVLGDKEQLWSSAD

SEQ ID NO: 308628 - protein, 89 aa, Zea mays
  Clone ID: MRT4577_44537C.1.pep
AQAVAIHEKQGEKTGRRGLEHEVEQAIDAPAAILLIAAPHRIAGLTRRTKLAIPWQPILYSCTHQWTKDKPDTLPDNPKAPKQGPFEAA

SEQ ID NO: 308629 - protein, 111 aa, Zea mays
  unsure (1)..(111): unsure at all Xaa locations
  Clone ID: MRT4577_44538C.1.pep
MDVIFSGELTIFLFDIAAVXIFSCWRNTXTPPYSNNQNLLCHAWSPPNAEKSXQTAHQRTNGSFNXDELQKGVKVGLSCVHQNPDDRPLMSNVLLMLASTNATLLPTPKQP

SEQ ID NO: 308630 - protein, 63 aa, Zea mays
  Clone ID: MRT4577_44539C.1.pep
TRCANSSKLGGSKSVGVKYLKSGVSRDALKPNGNAIFLFFYVFFFYIIIIILFLLKYLLILLL

SEQ ID NO: 308631 - protein, 181 aa, Zea mays
  Clone ID: MRT4577_4453C.1.pep
MSFGSCPAVAGGATAEELLEQARGLVPPALAAARAATGFGGRWKAIAARLGRLPQCLSDLSSHPCFSKNSLCRELLQSVAATLAEAAELGARCHEPPKAGKLQMQSDLDALAGKLDLHLRDCSLLVKTGVLSDATVPAAPAGTASASGAQVDVRELLARLQIGHAEAKHRAVDGLLDALRE

SEQ ID NO: 308632 - protein, 83 aa, Zea mays
  unsure (1)..(83): unsure at all Xaa locations
  Clone ID: MRT4577_44540C.1.pep
MGTSFDRWEKDPFFLAAEEGQESGXGGESGYRVWGXERSGGDSXAGSGTGGPTAAQLRRERDTGLGTGKGQLDELGRAGRSND

SEQ ID NO: 308633 - protein, 130 aa, Zea mays
  Clone ID: MRT4577_44541C.1.pep
PGVSPRIYYCVEFAVHHHHGYHQQSHAAVEAISRRMIHMASHLYSVEVSYLDFLNRVRMEEVSLRSAGMWEEVHHPWLNMFVPKAGVAGFRDLLMDNVSPDSFQGLILIYPLLRDKWDTNASGVIPDSGP

SEQ ID NO: 308634 - protein, 39 aa, Zea mays
  Clone ID: MRT4577_44542C.1.pep
SFFYVKKKKKKKKKKKKKKKKKKKKKKKKKKKKNKKTKT

SEQ ID NO: 308635 - protein, 51 aa, Zea mays
  Clone ID: MRT4577_44543C.1.pep
RTLFSLLISRKGVAWDHIYDGLCRWSTSWHSCQWHHLLCAGIGLSDHSHWY

SEQ ID NO: 308636 - protein, 92 aa, Zea mays
  Clone ID: MRT4577_44544C.1.pep
MASDGDHGGALQKPLLPKAPRSGGWFRKGTSTARLGAAAAGTSSKAAALRPPHHVPALLCTLVVALGTVQFGFTSGYSSPAQDGVTRDLDLS

SEQ ID NO: 308637 - protein, 144 aa, Zea mays
  Clone ID: MRT4577_44545C.1.pep
DEKRHETAYTRIVAKLFEVDPDAAVRALGYMMRHRITMPAALMTDGRDAHLYAHYAAAAQQTGVYTASDYRSILEHLIRQWRVEELAAGLSGEGRRARDYVCGLPHKIRRMEEKAHDRAAQTQKKPTSVPFSWIFDRSVNVVIP

SEQ ID NO: 308638 - protein, 63 aa, Zea mays
  Clone ID: MRT4577_44546C.1.pep
PLIVWPPAEHRPKITRGPSPDYVKIPWFSGGPIKPRYIYGNILFAKKKKKKKKKKNPPKKTNT

SEQ ID NO: 308639 - protein, 42 aa, Zea mays
  Clone ID: MRT4577_44547C.1.pep
FWQATKGGLPVDYRAPRLSMKSLRGTPFISHTDLADSGAASV

SEQ ID NO: 308640 - protein, 562 aa, Zea mays
  unsure (1)..(562): unsure at all Xaa locations
  Clone ID: MRT4577_44548C.1.pep
PGRFTSISRAFGDGXKYCRRPMLTGFASGSKKPRSQVSYSGSPRSEELGLKNKDHFRKIQSHVSVKTSDAKKLPDSSRSGHSSPELLTCIANVLVTVGDRGWREYDTQITMDSDVHSEQRICVKLAEGTKYAHKVCQVLQPGATNRYTHAMMWKGGAEWCLEFPDRSQWLIFKQMHDECYSHNIRAASVRNIPTPGVHLVGIHDDNDMVSFVRSEDYLVHIGTDVEIALDEARVLYNMDSDDEEWISSRQKFLVRDNNATLELAEDLFERVMDKLEKFAYSHDSNELSIVQMKELETDDLPLDIIEVIHAYWQAKRQKKGMPLIRHFQFAMWKVYEQQLHEWESKVCRMQGSSNGYQGKKMPPKPALFAFCLRPRGLDVPYKGPKQRSHKKLMSTGCHSFSRQHDGFYRQGYSPRFSTRTGSLRAFESSESSTPRFFRTNIVKRSATVAFSDDHQPSPSFRPQRVKRSASDHWNTVIHDWQNSKHLFPGSPPVDIEELKLRDAASAAQHAAAMAKLKREKAHCLMQKADLALHKATVALMIADAIKSSSRNKSRDCRRGFDE

SEQ ID NO: 308641 - protein, 51 aa, Zea mays
  Clone ID: MRT4577_44549C.1.pep
ISRFCMLAKVDFLFVPNIYPPTLFTLSISMVMELYTVQLHVRVFQNLFARK

SEQ ID NO: 308642 - protein, 72 aa, Zea mays
  Clone ID: MRT4577_4454C.1.pep
FLGRFHGIRTMLYFLGSWRPTLYVSLNFGNASLKNRPSLKKARPGGTKRTRSPVIPVGPLNLTLELALDILI

SEQ ID NO: 308643 - protein, 271 aa, Zea mays
  Clone ID: MRT4577_44550C.1.pep
GMPLIRHFQFAMWKVYEQQLHEWESKVCRMQGSSNGYQGKKMPPKPALFAFCLRPRGLDVPYKGPKQRSHKKLMSTGCHSFSRQHDGFYRQVSGRRYNECTVDGRICELYDIGSLYSLTGYSPRFSTRTGSLRAFESSESSTPRFFRTNIVKRSATVAFSDDHQPSPSFRPQRVKRSASDHWNTVIHDWQNSKHLFPGSPPVDIEELKLRDAASAAQHAAAMAKLKREKAHCLMQKADLALHKATVALMIADAIKSSSRNKSRDCRRGFDE

SEQ ID NO: 308644 - protein, 65 aa, Zea mays
  Clone ID: MRT4577_44551C.1.pep
LGTLGSSTVDLQRVLRGAVSLPEERVCLSRKSEADLPRKIGGSIRDTGCVELRPRKQAVGKDSEL

SEQ ID NO: 308645 - protein, 93 aa, Zea mays
  unsure (1)..(93): unsure at all Xaa locations
  Clone ID: MRT4577_44552C.1.pep
MKRRRLIADGNTQPPAPMSHDHPVLXSAWKDDGTTEFSPGCDKHDKQWPLLTGAQPSTEPGFHCPIKEVAWXIPQMNLLVSESWDTTSGPAVS

SEQ ID NO: 308646 - protein, 78 aa, Zea mays
  Clone ID: MRT4577_44553C.1.pep
VVLKLIYIYSMKVDGGSHLALNATSLQFRPLLNIAAYPVIGQKLNLGNLSHKQSLCRYSSEIKHLLLIKSLPHNINGS

SEQ ID NO: 308647 - protein, 56 aa, Zea mays
  Clone ID: MRT4577_44554C.1.pep
RTFFWTPPPRARTDVPCSEPGGARQLRLCVHGYNDICKHSACVTMQSHEIGCGQHL

SEQ ID NO: 308648 - protein, 82 aa, Zea mays
  Clone ID: MRT4577_44555C.1.pep
MVGFFLCLSLIPLTIISTNMKGGSLGVLGTKTNPEKTKGKNKERHGRKTPKETLPEHQKRPSKAGKIRPKKKKKQFYYTAYT

SEQ ID NO: 308649 - protein, 245 aa, Zea mays
  unsure (1)..(245): unsure at all Xaa locations
  Clone ID: MRT4577_44556C.1.pep
MALPSSSTPTASAPASLGERWPPLESTPAVFNQFVWSLGVPEDDVEFHDVYGLDADALDMVPQPVLAVVLCFPDPPQDASYPSEQLLISGEKETQDQVYFIKQIESLGNACGTIALLHAVGNASSKVNLVENSCLDLFFKSTATMDPYERAVCLEKDDTMARAHLLAANDGATELSDLIEEHYICFVYVNGTLYELDGMKDGPIKHGPCSSISLLQDVVPVIXGHHVQYPQLINFNLMVLSRKEK

SEQ ID NO: 308650 - protein, 126 aa, Zea mays
  unsure (1)..(126): unsure at all Xaa locations
  Clone ID: MRT4577_44557C.1.pep
PLRGVGARAQFVWSLGVPEDDVEFHDVYGLDADALDMVPQPVLAVVLCFPDPPQDASYPSEQLLISGEKVNNYGPCRXPPPHETQDQVYFIKQIESLGNACGTIALLHAVGNASSKINLVENSCLD

SEQ ID NO: 308651 - protein, 62 aa, Zea mays
  Clone ID: MRT4577_44558C.1.pep
WPKCQGSARLLGPWRLVPIPGLAEPGWRAAMLNLLPPNTSRRFWASEPPFPTPPPAAAAPAS

SEQ ID NO: 308652 - protein, 147 aa, Zea mays
  unsure (1)..(147): unsure at all Xaa locations
  Clone ID: MRT4577_44559C.1.pep
MKCNPRVMSSRRKCRKGDFTDPSSVRRVLMSAELSTELRHKYNVRSIPIRKDDQVQVVRRTYNARDGKVVQEYRHHCPIHFXRITREKANVSTENVDIHPSKVMNSKLNLDKDRKALLDRKALETAANNANREIIAXDATSCAGGAT

SEQ ID NO: 308653 - protein, 567 aa, Zea mays
  Clone ID: MRT4577_4455C.1.pep
VVSTAGLCCSCQEMSLGTCPAAAGDATAEELLQRARGLVPPALAAARAATGFGGRWKAIAARLEKVPPCLSDLSSHPCFSKNSLCRELLQSVAATLAEAAELGARCHEPPKAGKLQMQSDLDALAGKLDLNLRDCSLLVKTGVLSDATVPAAPAACAQADVRELLARLQIGHAEAKHRAVDGLLDALREDEKSVLSALGRGNVAALVQLLTATAPKVREKAATVLCLLAESGSCEGLLMSEGALPPLVRLAESGSLVGREKAVITLQRLSMSADIARAIVGHSGVRALIDMCQTGDSITQSAAAGALKNISAVPEVRQALAEEGVVRVMVSLLDSGVVLGSKEYAAECLQNLTSSNDSLRRAVVSEGGLRSLLAYLDGPLPQEPPVAALRNLVSVVSADSLVSLCVLPRLVHVLRDGSVGAQQAAAATICKMSSSMDMKRLVGEHGCIPLLVRLLEAKSNGAREAAAQAVASLMGCPPNARDMKKDEKSVANLVQLLDPSPQNTAKKYAISCLLALSTSKRCKKLMISHGAIGYLKKLSESEKDVAGAKKLLEKLDRGRLRSLFGRK

SEQ ID NO: 308654 - protein, 67 aa, Zea mays
  Clone ID: MRT4577_44560C.1.pep
LDMCHDQDASQELLREGFYCPGPGWPAESIWRRHSWGAVQHVSNGWHEDLRALQHVNHGWRLVGMNS

SEQ ID NO: 308655 - protein, 117 aa, Zea mays
  Clone ID: MRT4577_44561C.1.pep
QCKTCFWCFFRIFGAKHSLPPRNNQGKHPKKLTGKNPSTVQCSNCSHGAALQDEIGKPARGLTQGGRQNDASCAPLQKQPAVHPAEEALVAAPDLLASMNNGGVDNRGGAKPRDRTP

SEQ ID NO: 308656 - protein, 86 aa, Zea mays
  Clone ID: MRT4577_44562C.1.pep
APPPFCSRRAAGVVPRSPCLDVLPAPLLGLRLCVVFFSSALWSSQRVFAGGAGNFRQLFSMSPGGGGRPPASNLVVPGINSGPVLP

SEQ ID NO: 308657 - protein, 126 aa, Zea mays
  Clone ID: MRT4577_44563C.1.pep
LNSDVDFCEERSQTCKVLQSLDPPVCLHALVQLLNDGAVQADNHGHLERHVHTIAYVCEHLSLNDSFIGDCLDVLDSLQAEGEVHHAIRELKLFDLRCQHLLSHNAKAPGRTLTFRLSILMLLTLI

SEQ ID NO: 308658 - protein, 112 aa, Zea mays
  unsure (1)..(112): unsure at all Xaa locations
  Clone ID: MRT4577_44564C.1.pep
SRMLFNVKFVRLPFVVHGDLPEHHGVAYAAAGLLIVAVHFVGGAGNGARRPPGQKSGDVQEHGVGEEHVCQVQTDPRRGGKRARHCLCAPRALAVPQRIKVKRRKXLARKQG

SEQ ID NO: 308659 - protein, 57 aa, Zea mays
  unsure (1)..(57): unsure at all Xaa locations
  Clone ID: MRT4577_44565C.1.pep
WKANITHDLVRLSINPWTMPKRHFSGIIRRILSRVXLGGQPGSLSPDPVXRWDNAKY

SEQ ID NO: 308660 - protein, 62 aa, Zea mays
  Clone ID: MRT4577_44566C.1.pep
PLDSELTPACEEKRPPLRAGWCTPRLRLGSCCVCGQASCSCQGARVVFGLSSAVRGGAHGCS

SEQ ID NO: 308661 - protein, 52 aa, Zea mays
  unsure (1)..(52): unsure at all Xaa locations
  Clone ID: MRT4577_44567C.1.pep
LDRSARSVAHTLLLXRSGIVRRRHRRTRSNSALISLRDTLSASCKAPHTSSR

SEQ ID NO: 308662 - protein, 68 aa, Zea mays
  Clone ID: MRT4577_44568C.1.pep
LFFATTWGAKANLRNRWGVRWDPLANLQEIWRKEKWQNPLCLYIAQNSIEAPGELVHNTIAKICLHLP

SEQ ID NO: 308663 - protein, 37 aa, Zea mays
  Clone ID: MRT4577_44569C.1.pep
LHLFKKANRALMNYFNPHGHGRKQLTACSNTITEPLC

SEQ ID NO: 308664 - protein, 318 aa, Zea mays
  unsure (1)..(318): unsure at all Xaa locations
  Clone ID: MRT4577_4456C.1.pep
MKSRFLVLCAIVCVMAQMGDANVVLLGNNLTLSFADIEASFSPGVKGSGVNGIVYASEPLNACSPLTIKAVKGPPSPFALIVRGGCTFDEKVXNAQDAGFKAAIVYDNENSGVLVSMAXSSSGIHIYAVFVSKASGEVXXKKSSGHTDVEXTCFFVRRHRIRRDHPRIPEAREFHGMSSQLVKAMPSLIFTKVQEDNCTSSMCAICLEDYSVGEKLRVLPCRHKFHAACVDLWLTSWRTFCPVCKRDATSGVSELPATEATPLLSSAVRLPSQPSSFRSSVAASPPRPISRHPSLHSVSRAYSVSSTPHSPNPFRSHT

SEQ ID NO: 308665 - protein, 93 aa, Zea mays
  Clone ID: MRT4577_44570C.1.pep
MTRCLMFTLLFLVSSLISTVGLPVEPPAELLQLGGGDVGGGRLSVDASDIAEASRDFGGVARAEPMAVFHPRAAGDVAGLVGAAFRSARGFRV

SEQ ID NO: 308666 - protein, 131 aa, Zea mays
  Clone ID: MRT4577_44571C.1.pep
GATRHVYRPPLSLITAVKASYYYTHDITEFTLSCHPMSLYTFRIFDTGSSAWLGSSAFVYWSRVVSSPSIRFVRVVATPSLLVADGGVQCLQLHTQVPTNGSLQATRRGTGAVSLPQDMVCQQSADSVSFR

SEQ ID NO: 308667 - protein, 201 aa, Zea mays
  Clone ID: MRT4577_44572C.1.pep
MAALGTAITPAAATAAPCCYNRHPRSHITARRNRVASARRLDLCASSSPAVTAPDIPDEALVEPLVAPAPETKLRKLACPICYYPLASSSDQLDDATSLECSTCKKCYPNKQDYWDLTVSVGSTEYSESMPVATELFRTPLVSFLYERGWRQNFIWGGFPGLEREFEMAKTYLKPTIGGTIVDASCGSGLFSRLFIKSGLY

SEQ ID NO: 308668 - protein, 52 aa, Zea mays
  unsure (1)..(52): unsure at all Xaa locations
  Clone ID: MRT4577_44573C.1.pep
MGGGEDIQPLWCNNGTGMDKAGFVGDNAPRAVFPSIVXRPRKTGVMCGMGQK

SEQ ID NO: 308669 - protein, 150 aa, Zea mays
  unsure (1)..(150): unsure at all Xaa locations
  Clone ID: MRT4577_44574C.1.pep
KQKESLSIGAPLEPQFQNPLPPKTGGPPPQRKKETPPKRGGPPRGEKGPQGPPPRVLKKQGXSFPPPKGGKXLKPQRAFPXGPPPHPPFKGAGPKGGHSPLGEPPIFFPVKKNPPLWKPGPPGXASGQKNGGIRHPPPPGKTGGPPTSPR

SEQ ID NO: 308670 - protein, 47 aa, Zea mays
  unsure (1)..(47): unsure at all Xaa locations
  Clone ID: MRT4577_44575C.1.pep
GXXGRADAFTNARATYVFLFFLEKTHWHGVIRPDPHLALIQKIPSRR

SEQ ID NO: 308671 - protein, 61 aa, Zea mays
  Clone ID: MRT4577_44576C.1.pep
TDPRINWLCNPVHKPRELRGLPSTEKKSVCLGGKGPPPPKNRPSRKAPWKGNQTLSLPPYR

SEQ ID NO: 308672 - protein, 64 aa, Zea mays
  Clone ID: MRT4577_44577C.1.pep
YVTWTLEGAFFFFFPFFLRLSQKPLTKSKIIPKTKSLQNTDIIPKQITREKLRDGGVSAKNPLN

SEQ ID NO: 308673 - protein, 251 aa, Zea mays
  unsure (1)..(251): unsure at all Xaa locations
  Clone ID: MRT4577_44578C.1.pep
GGWCKGVVKRDQEVYVKVVSVKGQKLSLSMRDVDQXTGKDLLPMQRGGDDAPRVNPSGGRGSGMGSGKRLGLSGIVITEEDEAAPTSRRPLKRMSSPERWEAKQLIASGVLDVRDYPMFDEDGDGMMYQEEGAEEELEIELNEDEPAFLQGQSRFSIDMSPVKIFKNPEGSLSRAAALQTALIKERREVREQEQRAMLDSIPKDLNRPWEDPMPDTGERHLAQELRGVGLSAYDMPEWKKEAYGKALTFGQ

SEQ ID NO: 308674 - protein, 320 aa, Zea mays
  Clone ID: MRT4577_44579C.1.pep
MSRSPHLPPRCPPLGPQITRRDDGMFTQSCRFPSGDTFIGEPPCWLDDLLEDSGKAPKLPPLRRACSDSDAILDALSTFQSPIYPIEECDLNSGGEAEDLLGGVEGDESGSVVEASCFYGPNSPRQKSRLTTSESSMVNAVLENVPGNPLQYLTIDACSDVNGNVANVTADACDAFGHPDQDKSFKRRSGQRSRVRKLQYIAELERTVESLQNIGADLAVRVSSLFQLHNALSMENKQLRVQISSLQRAKLIKDGQTQALKNEAERLKRMSARRSRSATASCYDPGSFSFGADASSVSWQMPDMARLSLNGGSPRGSYGL

SEQ ID NO: 308675 - protein, 116 aa, Zea mays
  Clone ID: MRT4577_4457C.1.pep
MKSRFLVLCAIVCVMAQMGDANVVLLGNNLTLSFADIEASFSPGVKGSGVNGIVYASEPLNACSPLTIKAVKGPPSPFALIIRGGCTFDEKVKNAQDAGFKAAIVYDNGIRGVLVS

SEQ ID NO: 308676 - protein, 322 aa, Zea mays
  Clone ID: MRT4577_44580C.1.pep
MSRSPHLPPRCPPLGPQITRRDDGMFTQSCRFPSGDTFIGEPPCWLDDLLEDSGKAPKLPPLRRACSDSDAILDALSTFQSPIYPIEECDLNSGGEAEDLLGAVEGDESGSVVEASCFYGPNSPRQKSRLTTLESSMVNAVLENVPGNPLQYLSIDACSDMNGNVANVTADACDAFGHPDQDKSFKRRSGQRSRVRKLQYIAELERTVESLQNIGADLAVRMSSLFHLHNALSMENKQLRIHISSLQQAKLIKDGQTQALKNEAERLKRMSARHRRSRSVTSCYDLSSFGADATSVNWQMPDMARLSLNGSSSVSPRSGYGI

SEQ ID NO: 308677 - protein, 57 aa, Zea mays
  Clone ID: MRT4577_44581C.1.pep
LVCAWLSIRARQQLEVKHQSVGDSTAEAIDVAAMAIVPPELECWRRETFRARPAARY

SEQ ID NO: 308678 - protein, 120 aa, Zea mays
  Clone ID: MRT4577_44582C.1.pep
YPLERLQLLTEATQLRSRRISPSACTSTRAIHGALRRQHRRSVGDTADRGCQRKGASSSVDRRWTATISVAYRSFNGTGHSDQDLTVRRRSALYIHDYFVKTPLWFLRLIPNSEKNLAVS

SEQ ID NO: 308679 - protein, 61 aa, Zea mays
  Clone ID: MRT4577_44583C.1.pep
GLNFPTSVEMIKKATAGVYHKEYTRRKVTLRLQCTENRPGVASTVRTCPLAYATDLKCLSL

SEQ ID NO: 308680 - protein, 110 aa, Zea mays
  unsure (1)..(110): unsure at all Xaa locations
  Clone ID: MRT4577_44584C.1.pep
AAEAAALPPAPVAAAPAARSPAPARCGVWLCRSSACPRAAREPAPLRTSRRRSVLWPPPSAASRLGLGFSVGCGCVLVAAATAACSRCWCARLVAPLPPPRRXGXXGLYS

SEQ ID NO: 308681 - protein, 143 aa, Zea mays
  Clone ID: MRT4577_44585C.1.pep
RSTAPDSPTHLPLPALSSSSIACMVLIHIQRDREKREKLASDGDYVWHPHRPGARGLGLWSQAGGAAPQQAKRRRRCGADQAGQPRSPGPPAPDAGARAAVAARGRRRRGGAARGGRAARGPPARGGDVPGAAVRARGGRHRR

SEQ ID NO: 308682 - protein, 96 aa, Zea mays
  Clone ID: MRT4577_44586C.1.pep
QLGAKLGPRGGPNRYPGGKPRQGGKPPAKKKEDQAPRDIHELKHGLIFGPLDRNLTRPWAPGPSFGQGAPALPGDPLEGAAKTPSAGATGPPKSPF

SEQ ID NO: 308683 - protein, 251 aa, Zea mays
  unsure (1)..(251): unsure at all Xaa locations
  Clone ID: MRT4577_44587C.1.pep
GVTPFWTPEQEQVDVLLGRRRDFFFLPKKYLYRRHQAPHPIAPHTTFRATSPRTDGNGVPRARRGSQPRARDPHHSHTHHGALVRGGARRAAAAARACPSSGGGXSEEVEEEGECGFCLFMKAGGCRDTFVAWEECVEAAQKEGADMVERCHEATANLKKCMDAHADYYAPVLMAEEAVNERAEAEAAAAAAAAAAETAKAKGWEPATEGEIKEEAVPQRAASTLPAAGEEKKEETIAQKEKKEEAVSEKV

SEQ ID NO: 308684 - protein, 57 aa, Zea mays
  Clone ID: MRT4577_44588C.1.pep
TPPTFHRRKKLYPPVGAFQISKPQLAPLNPQVIFSHTKIAKLLPTIGADRLFFTKKT

SEQ ID NO: 308685 - protein, 72 aa, Zea mays
  Clone ID: MRT4577_44589C.1.pep
PIISRGQNLHNKLTKCRPCSGWPGWKWMASLFFNQTIHPLIKQSLTTQNLGVKVPVQVKGLKPAVNKLWGPG

SEQ ID NO: 308686 - protein, 84 aa, Zea mays
  Clone ID: MRT4577_4458C.1.pep
PHVLNRIFLVLLFSDKLRAMQQLVQSMHKALIPNFKSMLPESKHITSTIRSAKVKENLHTDPTYKPMKHDYNDTIFNQYILQLT

SEQ ID NO: 308687 - protein, 123 aa, Zea mays
  Clone ID: MRT4577_44590C.1.pep
VSIPGDRAPLVSSKKDGEASDLRNSFYAQGDGDFFFPTDFRLLEQIAHKWAGFSKEQKNPGAFKPVKKRGPFILVSAPFMEEFGIPLKTRPKTGYNPLFADFKNPKFFFRVPTPNVSSHSRRN

SEQ ID NO: 308688 - protein, 67 aa, Zea mays
  Clone ID: MRT4577_44591C.1.pep
VKSSSPNNVSYVSCYTILIKGQFCCRYSSMLPAVLLSLKKKKKKKKKKKKKKKKRTKDIKNPKIHTI

SEQ ID NO: 308689 - protein, 85 aa, Zea mays
  Clone ID: MRT4577_44592C.1.pep
RVSALCVIAVMVFGVHRDTLSMIYVWRKIFASSRSFVVINFDGDLRYLALCLFPLCVFVCDRRGRFDAEAEASVMLLGCSMKWSS

SEQ ID NO: 308690 - protein, 88 aa, Zea mays
  unsure (1)..(88): unsure at all Xaa locations
  Clone ID: MRT4577_44593C.1.pep
QYEGLRSIIVANLTCRVDHHENCDDKLIEFLKKTYYVDAGHDNQEGMVRLNSRMAQIEGIGAANRIFYLAVPQXALLDVALPLADGAC

SEQ ID NO: 308691 - protein, 67 aa, Zea mays
  Clone ID: MRT4577_44594C.1.pep
HARVRKLGILDGARSTPFFYRGRSFCLEGDGAEQSLSQTKPWTEPPSPTSAATKPTSTGQGLYPAAC

SEQ ID NO: 308692 - protein, 85 aa, Zea mays
  Clone ID: MRT4577_44595C.1.pep
LLFFPHTSHQRGRYGDEKPKGRMYGEAQQQQKQGAMMTALKGETDATLGGSMLVLSGLILAGTVIALTVVTLVVVIVNPVLGPDD

SEQ ID NO: 308693 - protein, 55 aa, Zea mays
  Clone ID: MRT4577_44596C.1.pep
PTRASTHIGPSRSPTHTKLTGPDHFSRPSHLPSTLHATLLHLRSTSTTYTTPLSS

SEQ ID NO: 308694 - protein, 71 aa, Zea mays
  Clone ID: MRT4577_44597C.1.pep
VLPPPSPQDFVGHFAGDDFPPGACYGTFEAFRYKIPGLLKIRYIGQTTVGSAAIFGLFLGAGSLIHCGKSY

SEQ ID NO: 308695 - protein, 75 aa, Zea mays
  Clone ID: MRT4577_44598C.1.pep
MARSDSCLARVGAGIAIGGAVGGAVGACYGTFEAFRYKIPGLLKIRYIGQTTVGSAAIFGLFLGAGSLIHCGKSY

SEQ ID NO: 308696 - protein, 75 aa, Zea mays
  Clone ID: MRT4577_44599C.1.pep
MARSDNCLARVGAGIAIGGAVGGAVGACYGTFEAFRYKIPGLLKIRYIGQTTVGSAAIFGLFLGAGSLIHCGKSY

SEQ ID NO: 308697 - protein, 502 aa, Zea mays
  Clone ID: MRT4577_4459C.1.pep
MKSSRFLFLCAMFCLMARLGAANVVLMGNNLTLSFADIEASFSPGVKGSGVNGIVYASEPLNACSPLTIKAVKGPPSPFALIVRGGCTFDEKVKNAQDAGFKAAIVYDNENSGVLVSMAGSSSGIHIYAVFVSKASGEVLKKSSGHTDVEVWILPTFDNSAWSIMAISFISLLAMSAVLATCFFVRRHRIRRDHPRIPEAREFHGMSSQLVKAMPSLIFTKVQEDNCTSSMCAICLEDYSVGEKLRVLPCRHKFHAACVDLWLTSWRTFCPVCKRDATSGVSELPATEATPLLSSAVRLPSQPSSFRSSVAASPPRPISRHPSSHSVSRAYSVSSTPHSPNPFRSHTNLPGVIHASRSTTDLANMSSPHPRISHLSSSTHSLVGSHLSPPISIRYPLPHSRHESPSPHVSSPYISNSGYGSSSYYYLGGSSQHGSYLRRCGESGPSLSTMVPRSSQQQFQSEANVAAGASSAQSSRQSYLRRCGDSDASLSDMASAQSLPGC

SEQ ID NO: 308698 - protein, 52 aa, Zea mays
  Clone ID: MRT4577_445C.1.pep
NWKKGKECLIYKNMGERKLIWSGTEREHITALNLVSWGVHLIREVWDEASTF

SEQ ID NO: 308699 - protein, 75 aa, Zea mays; identical to SEQ ID NO: 308695
  Clone ID: MRT4577_44600C.1.pep

SEQ ID NO: 308700 - protein, 75 aa, Zea mays
  Clone ID: MRT4577_44601C.1.pep
FHVCHSVLLTSYLHMACRTPRAVSSPMRLHTRRLAASVVTTTQLAQLTTTNPLAHANNTEPCATTSATNSCLLSY

SEQ ID NO: 308701 - protein, 89 aa, Zea mays
  Clone ID: MRT4577_44602C.1.pep
CPILFLLFIVCIIYNSIWHQENLNVCVDALNMSADILEGSMDQHFHSIMQNRHTQHRRDMVDDNLTSEIIEETVNYEELHHMFTFIFYC

SEQ ID NO: 308702 - protein, 68 aa, Zea mays
  Clone ID: MRT4577_44603C.1.pep
KQGSTLFTTTLKFSYNITLKPELVMLIQNHSQKFLHALYIAHGFMFYPRPKTLQLQPISIQERTMQGS

SEQ ID NO: 308703 - protein, 92 aa, Zea mays
  Clone ID: MRT4577_44604C.1.pep
RAPLRWVVKAETGPPRGAQRSKRIQLSLPADGRLVSSRAGACIATCLRPPLHRPRLHSWLPWTSSRRRQTEQLATVNSGPVRFCKICALASV

SEQ ID NO: 308704 - protein, 427 aa, Zea mays
  unsure (1)..(427): unsure at all Xaa locations
  Clone ID: MRT4577_44605C.1.pep
MDCNSDDLDKQNEVTGSRVFIPQDAQGVILAFLPGRDVVKLRSVCKFWLECVEEHSFMDRHXIMLAATTSPLLVSPRLIXPSPHVHIRSCHNXNFRSVELVFSSRFNMSAPCNGLVCAYDIKGDAEVLNPTTRKHLRXQIQHSSHXSLYSEYFVGFVHSTKQYKVVSIRHHVRFLTFEICTIGAPSWRTIHESAELLVATKAVIVKDGMYWLLLDEASSYSSREILTLNLTDERFSKIAIPDAVKSHKLELFEGEGKLRLLSTHSDGSSNIVSDIWVADLAREDWVHLQTIIPLTHLGISPFFQLKTKVFFGNQKRLLCVDLQDGTVSYINMPSGETLISCGMFVESFAPAATGLVSSTASYGDRSRLAEPSMADPGPSFRGAGSSSASRGRSSGLTGWSSADLEQSFKRTKRTTNMQWKISKHRAI

SEQ ID NO: 308705 - protein, 179 aa, Zea mays
  unsure (1)..(179): unsure at all Xaa locations
  Clone ID: MRT4577_44606C.1.pep
HGIFNLESMGWALRICWLWLQKRDSSRPWEGLPFQVPRNSHALFDVALETKVGDGEATKFWTDRWLHGCTVGELAPNLIQVIPKRARRQHTVSQALASGSWTADIQGALTVQVLVEYLKLXEVVDFTLQPAVSDQHIWNLTNSGLYTSQSAYNAFFLGSVKFAPWKKIWKTWAPLRCKF

SEQ ID NO: 308706 - protein, 53 aa, Zea mays
  Clone ID: MRT4577_44607C.1.pep
AAFFFFFYYTMGLQKTTRQITHGPPQPGRTGGGTIIYSTGHRHQSRWRPLITL

SEQ ID NO: 308707 - protein, 103 aa, Zea mays
  Clone ID: MRT4577_44608C.1.pep
MASSSSFFFFDAEPVYDYEPSLLPTMDACALCAKPLGRDCDIFMYRGDTPFCSEECRGEQMRLDAVRARQAARSAGRRRQQQQQYSSRTESRHQETMEVSVAT

SEQ ID NO: 308708 - protein, 53 aa, Zea mays
  Clone ID: MRT4577_44609C.1.pep
QPLSFFITKTNGRARAYNLFPPSKKTLKKSSSANTHIFGTYILTQPLNQPVYE

SEQ ID NO: 308709 - protein, 142 aa, Zea mays
  Clone ID: MRT4577_4460C.1.pep
LFFMKHRHITDRTESQLILQILQISVSKCSEMLTPARSTEATWRKPKRYVHFPQTSSRISWAWSATTGALPETRGLRRLDHFHSHSHSHTHTVTPELVATGAPAMVGPLQSAGSASRRKAATHMKVGVGEEIPGCGTDAWRR

SEQ ID NO: 308710 - protein, 89 aa, Zea mays
  Clone ID: MRT4577_44610C.1.pep
PSPSKTPPPSSPVKTPARPGAGFHLIPRPKFWSPPPKFTGEIGTPYSFIHFEWSQNPYCLIFVPTSLVQYRVQKKMHSLRIHTNPNPSL

SEQ ID NO: 308711 - protein, 69 aa, Zea mays
  Clone ID: MRT4577_44611C.1.pep
TVQTILVMISYFYYYLHFLIILLFFFGGEAKTPGALLKLARKTAKRGKTGNTRWFNPPYIGELNVKIPN

SEQ ID NO: 308712 - protein, 50 aa, Zea mays
  Clone ID: MRT4577_44612C.1.pep
LPGRGNPSRTGRRIMGRHGIVHMAWRNDPEATWQYHDDGRRFSSTHHRFE

SEQ ID NO: 308713 - protein, 70 aa, Zea mays
  Clone ID: MRT4577_44613C.1.pep
KVLQVQRFNNVPQLKVISLVIWKSGPTASMVVLDANVMDISRVLDICVVSPLRVNLLFMCKLCFFVFFFF

SEQ ID NO: 308714 - protein, 52 aa, Zea mays
  Clone ID: MRT4577_44614C.1.pep
IPKGEIEKKNFFKNKKGLKALKQKGKFSIVKDKNSFISWAFIYSRWPLHFPP

SEQ ID NO: 308715 - protein, 58 aa, Zea mays
  Clone ID: MRT4577_44615C.1.pep
HDLEIRLICYRSSASLAYATLDAAPPPVFGRRVFLRPLQCINNLRIIFRRCHAPSTPT

SEQ ID NO: 308716 - protein, 50 aa, Zea mays
  Clone ID: MRT4577_44616C.1.pep
VIYVLMSRSVHVSILLHYDIRNMLSRSLGDSKVVRLTLAFNTTGPILVSV

SEQ ID NO: 308717 - protein, 151 aa, Zea mays
  unsure (1)..(151): unsure at all Xaa locations
  Clone ID: MRT4577_44617C.1.pep
GRPSKRIKGRRGGGGQKKPPKPTHPAGPPQQKNPTPPPPPRTPQXYKGHQRPPPFTDESDEKHGPPERPGKPGNAPPGPPGEPKTRKGRPSRTEGKXPKGGPGKKGKPPKXHKTDEQKAKPGKPEEPKKRPNQXNARPPLPXKPGKPGGPT

SEQ ID NO: 308718 - protein, 157 aa, Zea mays
  Clone ID: MRT4577_44619C.1.pep
AFLFLSLPTSPVSGVAAARSPSSPKPLAPHLPRSLPSRSYHTGDGSQLCSCQISLHISPSPPSSPGTALIPPPRSPSHCVRPHPCCPDPVVPPCLSAPFPLSPWPAHSRLQPPTPCSAPDTVLTALKEEMQQRMDDASTAGRWWPLMPPQSSPSFSR

SEQ ID NO: 308719 - protein, 66 aa, Zea mays
  Clone ID: MRT4577_4461C.1.pep
DAVYGIFLLVSDSTAKESVKHHLTCFGDQGMYYYGDCYSRFQRGRDVTGGPALRAPRAHAHGCCTR

SEQ ID NO: 308720 - protein, 119 aa, Zea mays
  Clone ID: MRT4577_44620C.1.pep
VRIWGPQLFCWRRVPKVDGDASGAASIVRVGNGGTYALVGLDSKKGVFFNIARAFGQATFRWTGVVRSRVVPSPDILETEGALFWVFFSGHADWKLSWCVPAPIAYPRHARSAGAPRGL

SEQ ID NO: 308721 - protein, 129 aa, Zea mays
  unsure (1)..(129): unsure at all Xaa locations
  Clone ID: MRT4577_44621C.1.pep
MLPCMDPREPSTGKPYAPTKLQSQHLPIDYAGLLVAAVAVLGFMGGDKEGYWLQLMFWAKALAHMINFEHHLNQVHMTLHAIXSGSGHELFXAPLVRQYRVLGSARTSFASFFIGYRADIPAASAGFCS

SEQ ID NO: 308722 - protein, 368 aa, Zea mays
  Clone ID: MRT4577_44622C.1.pep
MYHQQQLHTHNQHLSSSRPGLPPEKQFLLHGAGGGGGGDAGLVLSTDAKPRLKWTPELHERFVEAVHQLGGPDKATPKTIMRLMGIPGLTLYHLKSHLQKYRLSKNLQAQAHTASAKNALVGCRTGADNALCQGSASPPPPPPPPHLNLDPPQINRSMHISEALQMQIEVQRRLHEQLEVQRHLQLRIEAQGKYLQSVLEKAQEALAKQSGGADETTTTQQQMLPDLISRATATRRGHVQQEHLHLQHHLGGDGSVDSCLTACEGSRCQRERDQDLLSIGLSSAPPPTPTPSRGYNDRGGGGSASCEEFLQFLDEPSRRGAGGGGGPRMSSRSLTSASAAAGAIQGLAAAKAKGSTSTDPAGTEWSSF

SEQ ID NO: 308723 - protein, 97 aa, Zea mays
  Clone ID: MRT4577_44623C.1.pep
AMASRVLSAYVSRLHAAFAPLPRVRMLAVARPLSTALCSAGTQTRLGTLQPALVLAQVPGRVTQLCRQYSDMPPLTLEGIQDRVLYVLKLYDKIDPE

SEQ ID NO: 308724 - protein, 102 aa, Zea mays
  unsure (1)..(102): unsure at all Xaa locations
  Clone ID: MRT4577_44624C.1.pep
VLPFGVVMVMIIMSWSQGVYSVTAECXSTYDLXLXVTVPSVQEVHKMKEVVRGLPRLKGAALRPRYVAQLVLFLSSYEARYIXGLILVVGGGVSTSSSLVGL

SEQ ID NO: 308725 - protein, 37 aa, Zea mays
  Clone ID: MRT4577_44625C.1.pep
FFFPHNGRNPAATATRPMIHLKFAVSQIERDGKAIRE

SEQ ID NO: 308726 - protein, 45 aa, Zea mays
  Clone ID: MRT4577_44626C.1.pep
AKQHKTNNSKLKAHEVLKQLFLLPFVVRSTNFLEFHLCITTFLAF

SEQ ID NO: 308727 - protein, 95 aa, Zea mays
  Clone ID: MRT4577_44627C.1.pep
FFFFFFFFFFFFFFFFFFFFLTLEMFVVCTIVFANVVGQFCKQCFVTNNQVQKLGKIISPWDTLLQGGFFFCPNWSKFYSLIGLTTYTTVGQKLI

SEQ ID NO: 308728 - protein, 99 aa, Zea mays
  unsure (1)..(99): unsure at all Xaa locations
  Clone ID: MRT4577_44628C.1.pep
MNVEKLKKMAGAVRTGGKGSMRRKKKAVHKTTTTDDKRLXSTLKRIGVNTIAGIEEXRCVKDDGVIEGGNXKGQAGMGADTWGGRGTGQTKNVGRSGWD

SEQ ID NO: 308729 - protein, 71 aa, Zea mays
  Clone ID: MRT4577_44629C.1.pep
IKNNSFYGGKNRFYCTMAPNIFLRLVEQFSPEIIVWKENLPPPRIFNVSQRAWFVWIGFVITYNGKIRAPP

SEQ ID NO: 308730 - protein, 60 aa, Zea mays
  Clone ID: MRT4577_4462C.1.pep
VWDQQNQLKCCCRANNFLYIQKKHHRLLNTPCLTKRFKDVFRTEAGTEYSPQDAPFPTLT

SEQ ID NO: 308731 - protein, 135 aa, Zea mays
  Clone ID: MRT4577_44630C.1.pep
QALEQTATRAKRDGSDVPSDQSEIEKAVRDMVEQTTSMIQAAYAEEDDVARSRALSHHKSEMFRRFKRLVQVRHELLEGKCDLGKFVDEVCLILKYVVSQCFSDQDQIDTVSRDTEDFDGAKPSGAVTADGTHDT

SEQ ID NO: 308732 - protein, 174 aa, Zea mays
  unsure (1)..(174): unsure at all Xaa locations
  Clone ID: MRT4577_44631C.1.pep
MEHKEAGCQQPEGPILCVNNCGFXGSAATINMCSKCHKEMVMKEEQAKLAASSFDSIVNGGDGGKAPVVAAVAASAEVAVAQVDVKALVVQPAADVAGTSEAVAVSPRRKEGPNRCSTCRKRVGLTGFDCRCGNMYCSLHRYSDKHDCQFDYRTAARDAIAKANPVVKAEKLDK

SEQ ID NO: 308733 - protein, 41 aa, Zea mays
  Clone ID: MRT4577_44632C.1.pep
LSLLSIVNMISYYSSESESCLDDWSSHLWVPDKLEMVDLIT

SEQ ID NO: 308734 - protein, 73 aa, Zea mays
  Clone ID: MRT4577_44633C.1.pep
EYKLFFFFFVVFVDYCLLNQYKTKNPYCWNQRDATYRVRCGNESWKKWMNGSAVSILSDGQTQIHRTMNCRRG

SEQ ID NO: 308735 - protein, 157 aa, Zea mays
  Clone ID: MRT4577_44634C.1.pep
MTTTTKNHKQQQLLPTAAAAPPWPVRTKLLLCAALGFALGVVATASLVNSPSYATSSAAAAALRGGGGALGLVLPPSATRNAAQDRRPPPKQAGAARATVRRSRPEPPAATGITSAAAPPPYVIGAQGPAAPSAVAASRVNGGSIVSDSDGDDEELM

SEQ ID NO: 308736 - protein, 71 aa, Zea mays
  Clone ID: MRT4577_44635C.1.pep
GPWVVLWRVAGLLVGGWLAPVLLCPGVVFLVRPLVPVLVPPPVRALRPVSGKLNIFPSAGGVGGPGVPGRV

SEQ ID NO: 308737 - protein, 491 aa, Zea mays
  unsure (1)..(491): unsure at all Xaa locations
  Clone ID: MRT4577_44636C.1.pep
PRVRGRVGFKRLKQEKQDRAAAXGKNIDEIPGAEGLVVRVVSSVDKKLEVKPRFLEIFQEDNYPTEFPYKSKAVLLFQKIEGVEVCLFGMYVQEFGAECSFPNQRRVYLSYLDSVKYFRPEIKTVSGEALRTFVYHEILIGYLEYCKLRGFTSCYIWACPPLKGEDYILYCHPEIQKTPKSDKLREWYLSMLRKASKEEIVVELTNLYDHFFLTMGECKAKVTASRLPYFDGDYWPGAAEDMINQLRQEEDDRKLQKKSKTKKIITKRALKAAGHTDLSGNASKDAMLMQKLGETIYPMKEDFIMVHLQYSCSHCCTLMVSGRRWVCHQCRSFYICDKCYDAEQQLEDRERHPCNSRDTHMLHPVDIVGVPKDTKDRDDILESEFFDTRQAFLSLCQGNHYQYDTLRRAKHSSMMVLYHLHNPTAPAFVTTCNVCSHDIETGQGWRCEICPDFDVCNSCFQKGVVTHPHKLTNHPSAADRDAQNAEARQMR

SEQ ID NO: 308738 - protein, 60 aa, Zea mays
  unsure (1)..(60): unsure at all Xaa locations
  Clone ID: MRT4577_44637C.1.pep
WPLASAXAIKXXQXKPCWGLHXXRXTSNXQLRRLYDIIFFFFLHPHXSFGGGGGXXXQNT

SEQ ID NO: 308739 - protein, 93 aa, Zea mays
  Clone ID: MRT4577_44638C.1.pep
TSYYYTDHNILDYLCARHEELDAVSSRSSVTVRVRESETERDEEDTSTESPERRRRGQERRAETGDRRRWTRGETAVAVAAERREAGAWRDRI

SEQ ID NO: 308740 - protein, 79 aa, Zea mays
  Clone ID: MRT4577_44639C.1.pep
KKKRAGGPLLLKKAGARSFFHWLKALQHKRENRKQASKAPLIGGGQHKRKARGRSRKTPPLGNPFKRLVKPRRPPKAFY

SEQ ID NO: 308741 - protein, 65 aa, Zea mays
  unsure (1)..(65): unsure at all Xaa locations
  Clone ID: MRT4577_4463C.1.pep
MREILHIDRGQGGXNQIGAKFWEVVCAEHGIDATGRYGGDSYLQLERVNVYYGGGGGYGGRREGG

SEQ ID NO: 308742 - protein, 66 aa, Zea mays
  unsure (1)..(66): unsure at all Xaa locations
  Clone ID: MRT4577_44640C.1.pep
KGPAEFQEYELKGVQNGPQAILAYVGFCDQQPAYQGVGPQDXWHSRLTSRWPSNIGDIIMPRSITP

SEQ ID NO: 308743 - protein, 103 aa, Zea mays
  unsure (1)..(103): unsure at all Xaa locations
  Clone ID: MRT4577_44641C.1.pep
GSRFLRPFVIVMQRSNAPEVRELIVRCVSQMVLSRVNNIKSGWKGVFMVFTFAAADDTRSTVLLAFETVEKIVRDYFHHITETETTAFXDCATCLIAFTGSQF

SEQ ID NO: 308744 - protein, 48 aa, Zea mays
  Clone ID: MRT4577_44642C.1.pep
ISSGRCRCFKLTFACMRLRGYFIVILKPKLMAVALQLQHWDYHDVTHH

SEQ ID NO: 308745 - protein, 70 aa, Zea mays
  Clone ID: MRT4577_44643C.1.pep
ENVVVTELRRKVHEHAHVMMGRNVFVLWVRAGINAALSMGIVLVLDRITGDDEHDDMREDLLEAVTSPPA

SEQ ID NO: 308746 - protein, 55 aa, Zea mays
  Clone ID: MRT4577_44644C.1.pep
RMWSLDWITSEIFQHQISSEQPPTANLHQPLQQSFFSKHLLLQLIDESSFEKLAQ

SEQ ID NO: 308747 - protein, 133 aa, Zea mays
  unsure (1)..(133): unsure at all Xaa locations
  Clone ID: MRT4577_44645C.1.pep
LGTSRPAGIVIYGSHYLYYLSSVPRKLSEIITVEEAKEFYPLFGLGANVALIFSGHTLKYFSNMRKXLGPRVDGWPNSLKDMTSILVVPGLVITGAFSGPHAESNGDAEEIAAREACPSLLVPDLAKLESVVY

SEQ ID NO: 308748 - protein, 187 aa, Zea mays
  unsure (1)..(187): unsure at all Xaa locations
  Clone ID: MRT4577_44646C.1.pep
MGYWWHRVVLPVRRAWLGVASRFGVRQTGTAQQRRDAGGSRLWRLRQEVSTCEYEDVHVMWEMLSRXTAPAPAPAPTXAAAQPVPAAAAAVGRQVPPLPRLLVDQGRRRRRRRACQLRCCCCGIDIVLPLSSGFFGFVFSGFRCLYCIVSSMYRRPSPSLRRTLRCTPLPPRVPGSIRLPMIPDHVN

SEQ ID NO: 308749 - protein, 118 aa, Zea mays
  Clone ID: MRT4577_44647C.1.pep
VLALPVLTLISFALGLASWAFLADSVFGVSVSIILESARRALRPRDLISSLLKSQVFGAIIAVVSCAWGVTTHGGAKGVGESTTSAVVVSLVGIFIADFALSCLFFQGAGDSLKYAMG

SEQ ID NO: 308750 - protein, 169 aa, Zea mays
  unsure (1)..(169): unsure at all Xaa locations
  Clone ID: MRT4577_44648C.1.pep
MGYWWHRVVLPVRRAWLGVASRFGVRQTGLWRLRQEVSTCEYEDVHVMWEMLSRTTAPAPXAHQAAAQPVPAAAAAVGRQVPPLPRLLVDQGRRRRACQLRCCYCGIDIALPLSSVFFGFFFFTGSRCLYCIVSSMYRRPSLRRALRCTFHSSSCTRLDPPADDTGACE

SEQ ID NO: 308751 - protein, 146 aa, Zea mays
  unsure (1)..(146): unsure at all Xaa locations
  Clone ID: MRT4577_44649C.1.pep
MGYWWHRVVLPVRRAWLGVASRFGVRQTGLWRLRQEVSTCEYEDVHVMWEMLSRTTAPAPAPTRXAQSVPAAAAAAAVGRQVPPLPRLLVDQGRRRRRRRRRRRRRRACQLRCCCCGIDIALPLNFFCLFRFLLLLWFPLLALYCI

SEQ ID NO: 308752 - protein, 263 aa, Zea mays
  unsure (1)..(263): unsure at all Xaa locations
  Clone ID: MRT4577_4464C.1.pep
MICSSLLRVSSRSAVRPSHSFSQSASNLPRICAINRWQRGYATEAKEHDLVIIGGGVAGYVAAIKAGQEGLKVACIEKRGMLGGTCLNVGCIPSKSLLNNSHMYHQILHDTKKRGIEVGDVKLNLQQMMAAKNTSVDGLTKGVEFLFKKNKVEYIRGTAAFSGEHEVTVNKTEGGETTLRAKNILIATGSEATPFPGLTIDEXRVVTSTGAISLXKVPKKMVVIGGGIIGLXEMGSVWSRLXAEVTVVEFLXSIGGPGMDANI

SEQ ID NO: 308753 - protein, 99 aa, Zea mays
  Clone ID: MRT4577_44650C.1.pep
QPKKTTHTIPKLSGPENSTTESTGTGPILDTKSCNRRRHRKPQGLPPKTTAIKTRKRGVEPTLLGYRTGHTHPKDTGFYGTRLLRTHTHTQTLRLHYPA

SEQ ID NO: 308754 - protein, 56 aa, Zea mays
  Clone ID: MRT4577_44651C.1.pep
SGAGLSYAVCILDLIILTDTLCYNSLTNFYSFDILRSPFDYLDPILIRVQKYSTSH

SEQ ID NO: 308755 - protein, 43 aa, Zea mays
  unsure (1)..(43): unsure at all Xaa locations
  Clone ID: MRT4577_44652C.1.pep
MPAKIFCLLMLTALSESADTPHIFPXMXQGPIDSLLPPTYSPT

SEQ ID NO: 308756 - protein, 118 aa, Zea mays
  unsure (1)..(118): unsure at all Xaa locations
  Clone ID: MRT4577_44653C.1.pep
VHARVRGRVGKDAVAYADWVKKHHQFSDMLVQTSPAVTGHAFPRLKLRYKPSLVQXWKERLEARTCLDVSSGETSGKXLLLLDVRNDYEWDVGHFEGAQRPNVDCFRSTSFGLSGEIL

SEQ ID NO: 308757 - protein, 125 aa, Zea mays
  Clone ID: MRT4577_44654C.1.pep
GGVPFTNPRGVRNSAASSQKKNKSDKRLALREDPTTAHSRAPPIHLPETRPRSHLARGGPWPPPPPLPTRLPPPPPAATLSPPPPPPPPPSASSRSGGGRGCGRRRRRAVRSTRSPSPRPPSTTA

SEQ ID NO: 308758 - protein, 186 aa, Zea mays
  Clone ID: MRT4577_44655C.1.pep
GRSIQNSGVVVVAESTSFDRGNNDNVIIGNKTYFGIINEIVELNYNHKGTMVLFKCDWVDNRVRNKWVKSDQLGITSVNFKHLFNTCEKLSNDPFILASQAVQVYYVPYPIDIEWVVVVQSKARYVYDLDNLENEHIDNDNQFFAPLVDLNGNVTIDIVNGIVPVVRRDIDGYLVDPKTSKTKSTK

SEQ ID NO: 308759 - protein, 47 aa, Zea mays
  Clone ID: MRT4577_44656C.1.pep
AAHIDIIRTLLSCLIRYVLVLTGSVESRLTSHIGTFAVKANASEYVS

SEQ ID NO: 308760 - protein, 78 aa, Zea mays
  Clone ID: MRT4577_44657C.1.pep
QYTQNYTYRAGKGVPKNKAGGGFYFNLHFYKGYALGKLPDKGGGGQKKGWEIHCLHMGVLRVTTKVCTGQNIKKKATG

SEQ ID NO: 308761 - protein, 80 aa, Zea mays
  Clone ID: MRT4577_44658C.1.pep
PTMCVKSVGIMPTTGISIGSPGRYDSWLLDAVHLKSTLSATARSYACTYSRRKRSAMSTSARVVIARSITLSAGDQCAVP

SEQ ID NO: 308762 - protein, 245 aa, Zea mays
  unsure (1)..(245): unsure at all Xaa locations
  Clone ID: MRT4577_44659C.1.pep
MDQDERQHPEPPAMEKELSADALACDYCSGPQAVVYCRADSARLCLPCDRLVHAANAVCSRHLRALLCAACRATGAVFRHAGTEFLCSNCDFGRSRDAELPLHDRCTVQGYTGRPSAHDLAALLGVPDFDKPSAGKADDGWWAIWEEPQVFRLEDLIVPTTSCHGFQPLVTPSSPKIHNSPDGKTNDEVIRQLRELAEVDMGSGQITPREEAEQAAHQLPSWTESQHTTGXGDFRIDNSHGVATM

SEQ ID NO: 308763 - protein, 46 aa, Zea mays
  Clone ID: MRT4577_4465C.1.pep
EESRPPDLPVTTCWILFLRWSTNNPSGGVPSFRPPMSYCPIMKLFG

SEQ ID NO: 308764 - protein, 49 aa, Zea mays
  Clone ID: MRT4577_44660C.1.pep
GRPVRRRAAPPLQSRTRPNLSFSMFYSLNFNFITFTLLIILLSHLLINF

SEQ ID NO: 308765 - protein, 271 aa, Zea mays
  Clone ID: MRT4577_44661C.1.pep
VSDYARDLEEMQMISKEDYLVSLRRKSSAFYRGLPKYRGLLRQLHNSRWDTSLGLGNDYMSLSCGKDIMLDGKFAGSFGLERKIDLTNYIRWWLPKKTRQSDTSKTEEIADEIRAIESSMQQTEPYKLPSLGFSSPSKPSSMGLSACSILSQSDAFKSFLEKSTKLSEECSLSKEIVEGKTVASVPATGYDTGAININMNELLVQRSTYSMAPVMPTPMKSTWSPADPSVDPLFWSNFVLPSSQPVTMATITTTTFAKNEVSSSDPFQSQE

SEQ ID NO: 308766 - protein, 68 aa, Zea mays
  Clone ID: MRT4577_44662C.1.pep
TKTQNHGRSNNKEGRKNSHQTAGTKTVELQEKIPFVPPPILGSTSHHSQPSRMYRHTQSYVPRRGVIQ

SEQ ID NO: 308767 - protein, 412 aa, Zea mays
  Clone ID: MRT4577_44663C.1.pep
MASPNPEAAGLQAVAVAGAGEGGSSSSLSAVAGAAALSGELVPRRALALRKERVCTAKERISRMPPCAAGKRSSIYRGVTRHRWTGRYEAHLWDKSTWNQNQNKKGKQVYLGAYDDEEAAARAYDLAALKYWGAGTQINFPVSDYARDLEEMQMISKEDYLVSLRRKSSAFYRGLPKYRGLLRQLHNSRWDTSLGLGNDYMSLSCGKDIMLDGKFAGSFGLERKIDLTNYIRWWLPKKTRQSDTSKTEEIADEIRAIESSMQQTEPYKLPSLGFSSPSKPSSMGLSACSILSQSDAFKSFLEKSTKLSEECSLSKEIVEGKTVASVPATGYDTGAININMNELLVQRSTYSMAPVMPTPMKSTWSPADPSVDPLFWSNFVLPSSQPVTMATITTTTFAKNEVSSSDPFQSQE

SEQ ID NO: 308768 - protein, 122 aa, Zea mays
  Clone ID: MRT4577_44664C.1.pep
TLGKKDGDKEDDGEKKKDKGAGAGDGGEKKDGGGGGEDKKDKSAASVAPMPMADPSMYQMPPQYGYMPYPPAPVGYYGAAPPPPNPGFYPNAGPQYPSPYATYPAHAPQMFSDENPNACSVM

SEQ ID NO: 308769 - protein, 38 aa, Zea mays
  Clone ID: MRT4577_44665C.1.pep
ILYVCSLTNELSILLVKIKSFAVYNKHHSNKLCFNIFK

SEQ ID NO: 308770 - protein, 121 aa, Zea mays
  unsure (1)..(121): unsure at all Xaa locations
  Clone ID: MRT4577_44666C.1.pep
MGSLDNNIMSGGAVLLALDNQGSDRPPKEPPGPNINTNYNGNXLTARATLDCQPNGAGSPDNCVTGGIKNANLPSYRGMTACGXLPQFXDDNDCGSCYDEXCEEQPECSGTPITAYITDMN

SEQ ID NO: 308771 - protein, 146 aa, Zea mays
  Clone ID: MRT4577_44667C.1.pep
PGFPGGVGVNPPPNKKQETPQGNPPRRPLLGPSGKKSAFGGLKGTPQKLGKDPSRFMGILDGGVGKVVFRFFQGGVFGKMSPPSLWSPFPLGPRAPFGTPPFRGPPFVVSSQTPGFFLRQTRPPFFVPFLRGLFLPLKTPPPFGNC

SEQ ID NO: 308772 - protein, 67 aa, Zea mays
  Clone ID: MRT4577_44668C.1.pep
GTGSVLAYKGRACVCSISVSALYQGRKIAVNSWIVCAVGIRVMFIWSDNVNMSNIECLHRRSVAYEW

SEQ ID NO: 308773 - protein, 85 aa, Zea mays
  unsure (1)..(85): unsure at all Xaa locations
  Clone ID: MRT4577_44669C.1.pep
ADARAMDWEMXAKAEGMRRVLEMADALRLETMREVVALLRPAQAVHFLLAAAELHLAVHDFGRHKDDRXATSPPPRRRSDGRWRA

SEQ ID NO: 308774 - protein, 67 aa, Zea mays
  unsure (1)..(67): unsure at all Xaa locations
  Clone ID: MRT4577_4466C.1.pep
ALSLCGIPHIACSXPPPLILSNSWXXSPLLEIIASFTAGLCALYMFRIYLLTCDGYLRVHFHNVSPR

SEQ ID NO: 308775 - protein, 196 aa, Zea mays
  unsure (1)..(196): unsure at all Xaa locations
  Clone ID: MRT4577_44670C.1.pep
PASAREPGPLSAARAPLSPSSASPPPPQLAPPXSPAIPSFPSAGPXPHRSPLLARPPRPSPPLARPPRPFPPLARPPRPPPPLAPATRPSPXAPCRPALPEPSAPAXAAADTASRSMPIPVPSARPTAGASPRFPSSRPALDPGVTAATGRHVARHLQPQPSHTIRKQVLQSSYFFKEQGPITCIKYAHRFSCRLR

SEQ ID NO: 308776 - protein, 98 aa, Zea mays
  unsure (1)..(98): unsure at all Xaa locations
  Clone ID: MRT4577_44671C.1.pep
ALIVLFRYISLDYGLRRKSVTRTDHASHSLXNXGTDVKKVIHQTETDGIIDWRSKVNSPPVEAAFEQFTRHLISEWVTDLWYSRVTPDKEGPEELIDV

SEQ ID NO: 308777 - protein, 87 aa, Zea mays
  Clone ID: MRT4577_44672C.1.pep
RGMFFYFSALLLFFFTDPQTQRGGIPMKPIGEFLTGTPVFKRCKPPHPNLIKKRVLSFFHMFNRIRGFQRKQVKRLVGGKIPFCLEK

SEQ ID NO: 308778 - protein, 47 aa, Zea mays
  Clone ID: MRT4577_44673C.1.pep
LYFFFLFQNSEGIINIKNFLHSTVLLSIDEITLPTANRHILDATAGV

SEQ ID NO: 308779 - protein, 59 aa, Zea mays
  unsure (1)..(59): unsure at all Xaa locations
  Clone ID: MRT4577_44674C.1.pep
IWLIFLVKGGDVRNELFFFVGFGLLNYVQGFFVGPRMRFKFALLGGLCGVLLKKVWIVX

SEQ ID NO: 308780 - protein, 69 aa, Zea mays
  Clone ID: MRT4577_44675C.1.pep
AQLFHFHGLVACFGLGAPVDPTQSSCIISLSCRYADHNLVYLPFRYCVLFGIHTIIKMALRGSHIKKKK

SEQ ID NO: 308781 - protein, 108 aa, Zea mays
  Clone ID: MRT4577_44676C.1.pep
MCSGSWFWSSSGSGKEHPSLVVVNLERQLKKTLAVRRRRRLRLRRLRAGGAEAMEMVNLKLYLENRCIIAENERLRERASALRRENLALLQNLSSRTAAVPEPGAGAA

SEQ ID NO: 308782 - protein, 54 aa, Zea mays
  Clone ID: MRT4577_44677C.1.pep
CRSRDLEFVTSAFCNSVSTRRVSFVGSQFASVKMLIHGFLLMLALLDIYFWVNL

SEQ ID NO: 308783 - protein, 111 aa, Zea mays
  Clone ID: MRT4577_44678C.1.pep
MCSGSWFWSSGGGGGSEKRPSLVVVNLERQLKKTLAVRRRRRRLRLRRLRAGGAEAMEMVNLKLYLENRCIIAENERLRERASALRRENLALLQNLSSRTAAVPEPGAGAA

SEQ ID NO: 308784 - protein, 153 aa, Zea mays
  unsure (1)..(153): unsure at all Xaa locations
  Clone ID: MRT4577_44679C.1.pep
MGVEEQAVQQPDGGGGKPDAASAKPPPPEHGQQTPPSNPRASTCSTDKDDDGHAICRVCQCTEPDLTGASALGFLGIVPPSPHPSCLKDPGNDATKNPTTKDASNAPTFLEFIGPEGEIFKCATDIESGHFRPQDAIGNLGCSCXNELALAHY

SEQ ID NO: 308785 - protein, 41 aa, Zea mays
  Clone ID: MRT4577_4467C.1.pep
LSALAGKNSSLGQLCPATTSTSLTLESILAMTMCSWSLCDS

SEQ ID NO: 308786 - protein, 110 aa, Zea mays
  Clone ID: MRT4577_44680C.1.pep
MCSGSWFWSSSGSGKEHPSLVVVNLERQLKKTLAIRRRRRRRLRLRRLRAGGAEAMEMVNLKLYLENRCIIAENERLRERASALRRENLALLQNLSSRTAAVPEPGAGAA

SEQ ID NO: 308787 - protein, 132 aa, Zea mays
  unsure (1)..(132): unsure at all Xaa locations
  Clone ID: MRT4577_44681C.1.pep
PNDFGGPEGETTWGGGGGEKGKPLGPKREREKKVLGGRPPPITSRGGQPLKRRNRSPPGTGGPKPPXTDQMSHEXGPPKPKTQKNAQAPAEEVPPPPPEPLGEGPAPPPRGAQGTQNSPGFFGKLKKPFPNR

SEQ ID NO: 308788 - protein, 58 aa, Zea mays
  Clone ID: MRT4577_44682C.1.pep
LVHKVCDGRQTPKSIIGNVEAISLSRGNRDSVVAIQNQVGSIDPINMHQIRMWMIRTT

SEQ ID NO: 308789 - protein, 248 aa, Zea mays
  unsure (1)..(248): unsure at all Xaa locations
  Clone ID: MRT4577_44683C.1.pep
IFXXXXXXGCEFGKSKDSSRQSKQLEEXLTAKMRECKRRLIKEFDRILKDEEKKDTPEANKQLNDKKQFMIKELNSYVTLRKTYQSSLRGNKRIELFDTGTDQVADKSPVQMASEMSNQELISAGRKQMDQTDQAIERSKMVVAQTVEVGAQTAATLSQQTEQMKRIGNELDSVHFSLKKASQMVKEIGRQVATDKCIMAFLFLIVCGVIAIIVVKIVNPHNKNIRDIPGLAPPAMNRRLLSIDALGL

SEQ ID NO: 308790 - protein, 85 aa, Zea mays
  unsure (1)..(85): unsure at all Xaa locations
  Clone ID: MRT4577_44684C.1.pep
RLGELETAHAMASMTVLSHGVLPIMRSANRARTAVVFRASAEAHAHAGRRAFLFLVATGILGCSFXYSFHTKTVKTIKIGSSTPP

SEQ ID NO: 308791 - protein, 226 aa, Zea mays
  Clone ID: MRT4577_44685C.1.pep
ARPGILGVNLGKNKTSEDAAADYVQGVHTLSQYADYLVINISSPNTPGLRKLQGRKQLKDLVKKVQAARDEMQWAEDGPPPLLVKIAPDLSKQDLEDIAADALALRLDGLIISNTTVSRPSPADKHPLAQETGGLSGKPLLDLSTNILRDMYMLTRGKIPLIGCGGVSSGEDAYKKIRSGATLVQLYTALAYGGPALIPRIKAELAECLERDGFKSVQEAVGADFR

SEQ ID NO: 308792 - protein, 70 aa, Zea mays
  Clone ID: MRT4577_44686C.1.pep
NFLELILEFFFTSALILKFFSTTGKICSLKQVYENGSSGNIPQGMYYRKLIFKLPFFPFYVPGTCGSTHW

SEQ ID NO: 308793 - protein, 130 aa, Zea mays
  Clone ID: MRT4577_44687C.1.pep
ARANAHQFVSALPDGYSTLVGDRGIQLSGGQKQRVAIARAVVKDPKVLLLDEATSALDAESERVVQEALDQAVVGRTTVVVAHRLSTVRGADVIAVLKNGAVAEKGRHEDLMRVKGGTYASLVQLSSTSS

SEQ ID NO: 308794 - protein, 138 aa, Zea mays
  unsure (1)..(138): unsure at all Xaa locations
  Clone ID: MRT4577_44688C.1.pep
HHSPSVLLNTIPLLHATPKAQTLEPLMMHYLLQYNALSHLCVHCQLLSGHPYAPLSFIEPRYVLGTSSTYQFIQPPSRLRREXLSFNQLAAVNSAAYVQQQQLLRFRQLAVVSPATFLXQPQLLPIYQHGAANAGTLL

SEQ ID NO: 308795 - protein, 65 aa, Zea mays
  Clone ID: MRT4577_44689C.1.pep
SLSSRHITRHVTRSKASDTKLTCTKKSMMSVHQYDILRILLCFSNGRCAQDVNSLRNNLPCIYTL

SEQ ID NO: 308796 - protein, 125 aa, Zea mays
  Clone ID: MRT4577_4468C.1.pep
MASKAFALFLAVNLVVLGVANACTPNCSGPSTTPTPTPSSFGRCPRDALKLGVCANVLGLIKAKVGAPPAEPCCPLLEGLVDLEAAACLCTAIKGNILGINLNLPVDLSLILNYCGRTVPTGFKC

SEQ ID NO: 308797 - protein, 200 aa, Zea mays
  unsure (1)..(200): unsure at all Xaa locations
  Clone ID: MRT4577_44690C.1.pep
MSLKGPSPQHHDGSGLRIGIVHARWNSTIIDPLVTGAKEKLLAAGVKESNIVIQSCPGSWELPIAVQRLFSASQIQGTSTGGPSAGDLLASSTTDLTSLSAPSGAFDAIIAVGVLIKGKTMHFEYIAESTCQGLMRVQLDTGVPVILGVLTVLTEDQAKARAGVDGKGHNHGEDWGMAAVEMGVXRRKEWVHTIDKKIDT

SEQ ID NO: 308798 - protein, 76 aa, Zea mays
  unsure (1)..(76): unsure at all Xaa locations
  Clone ID: MRT4577_44691C.1.pep
MAKHTNXVKRNVHXKRHCYNYVKTWXKACTTKAXRRMERQKKAVKIYQRATGGTFRANGQCQTVKNNMNSMAGRGF

SEQ ID NO: 308799 - protein, 85 aa, Zea mays
  unsure (1)..(85): unsure at all Xaa locations
  Clone ID: MRT4577_44692C.1.pep
GKELDGRKITVKRPQXSGAPRYEDGAYARSREEGVYGGGGTSNSGSSXGCGAGYGAAGAYGGGGDAYVGGILSGGYCNSDGKWRN

SEQ ID NO: 308800 - protein, 186 aa, Zea mays
  Clone ID: MRT4577_44693C.1.pep
MEEAKVVETRDGTIAVASAFPGHQEAVQDRDHKFLSKAVEEAYKGVDCGHGGPFGAVVVRNDEVIVGCHNMVLNNTDPTAHAEVTAIREACKKLGKIELSDCEMYASCEPCPMCFGAVHLSRIKRLVYGAKAEAAIAIGFDDFIADALRGTGFYQKANMEIKRADGNGALLAEQVFENTKEKFRMY

SEQ ID NO: 308801 - protein, 112 aa, Zea mays
  Clone ID: MRT4577_44694C.1.pep
SPIHTKMTTLHLTHSTLRHLPSPHTPSTRTRKNFSIHHTRRSLRRSHIQGRKIIQVLIRRLLRPHNRTPRIIRLKKLRHGIIRIIFSNHGRSRHKISIISSGCVRRPKTMNL

SEQ ID NO: 308802 - protein, 36 aa, Zea mays
  Clone ID: MRT4577_44695C.1.pep
NFVRAKKKSGLEANVINCASSVCFERQVLKHFPDAW

SEQ ID NO: 308803 - protein, 54 aa, Zea mays
  Clone ID: MRT4577_44696C.1.pep
CQCAAVEQACAISLTNPPDMAYQCGHLTCEACGRTLSSCPLRPALSTLRGRFYF

SEQ ID NO: 308804 - protein, 100 aa, Zea mays
  Clone ID: MRT4577_44697C.1.pep
MAAAASAARSFLRSSGSSSLRSAVARAASRAGPGPAPLPRRMPTSAPRVLLRSPVEMSSVCLESLMPMHSATASALMTSLLAAPACKGFGWLSEGQAETR

SEQ ID NO: 308805 - protein, 143 aa, Zea mays
  unsure (1)..(143): unsure at all Xaa locations
  Clone ID: MRT4577_44698C.1.pep
MTTTKGHINMVVXITHVDSTKCTSTXHLIYINCEAIDXRGAERLDTEAAAMYKRSLKCSWXVLNKXLRAGRAXGGTDALDIVXLWXLETSIYYCSVIDALGHADSMKNMITGTSQADCAVLIIDSTTAGLAAGICKDGKTREH

SEQ ID NO: 308806 - protein, 86 aa, Zea mays
  Clone ID: MRT4577_44699C.1.pep
IHEVSIIQTRYHHCRSPVTTNHPSSDSQPNPLQAGAARSDVMSAEAVALCMGIKDSRHTLLISTGDLRSTRGAEVGIRLGSGAGPG

SEQ ID NO: 308807 - protein, 259 aa, Zea mays
  Clone ID: MRT4577_4469C.1.pep
MPEDKEYAPVPLGQAAAPDPEDPAKSPPRPSSPGTSTRKAFFAVLQSWVSRKFMTGCVVLLPIAVTFFITWWFIQFVDGFFSPLYAKLGFDIFGLGFLTSLVFILLVGIFVSSWVGSTVFWVGEWFIKKMPFVRHIYSASKQVSTAVSPDQNTTAFKEVAIISHPRVGEYAFGFITSTMVLQTDKGDEELCSVYVPTNHLYIGDIFLVNSAEIIRPNLSIREGIEIIVSGGMTMPQVIMSLEPTPRKSQNVRLDRVRTV

SEQ ID NO: 308808 - protein, 107 aa, Zea mays
  Clone ID: MRT4577_446C.1.pep
CTCCTPRRLRKSAGQRSRASGTLGIPVRYGTGAVGHADTALASRHASSLMHRTGSHCWHTVMAVVSHDLAGSPCHIGINKLLQSQGRCCSAQCPRTLVHSQVSPWTL

SEQ ID NO: 308809 - protein, 55 aa, Zea mays
  Clone ID: MRT4577_44700C.1.pep
HTAKLEHHIPSNLTFQLKEQPSVCLTLSSSTYTENSIANRAHINTHGVAQNRIYA

SEQ ID NO: 308810 - protein, 100 aa, Zea mays
  Clone ID: MRT4577_44701C.1.pep
MAAAASAARSFLRSSGSSSLRSAAARAASRAGPGPAPLPRRMPTSAPRVLLRSPVEMSSVCLESLMPMHSATASALMTSLLAAPACKGFGWLSEAGNDDV

SEQ ID NO: 308811 - protein, 77 aa, Zea mays
  Clone ID: MRT4577_44702C.1.pep
LAGITTSIKRRKASSIYYILLVHKTWNDMSTSPLPIEWNHNLGTAAPDIWSSLITGHNFYHRHCFFSRLNLAEDKKP

SEQ ID NO: 308812 - protein, 100 aa, Zea mays
  Clone ID: MRT4577_44703C.1.pep
MAAAASAARSFLRSSGSSSLRSAAARAASRAGPGPAPLPRRMPTSAPRVLLRSPVEMSSVCLESFMPMHSATASALMTSLLAAPACKGFGWLSEAGNDDV

SEQ ID NO: 308813 - protein, 80 aa, Zea mays
  Clone ID: MRT4577_44704C.1.pep
RCKPLLEHFDRFINRLFKETNYAGQHAVHESMARCVTNDLLNGEQVKVTEESTPHDGLFDQGFPYCESDGECQLDPVNRV

SEQ ID NO: 308814 - protein, 51 aa, Zea mays
  Clone ID: MRT4577_44705C.1.pep
PPVFKVPAIMTLSSKSLPTSRRLHTHPHKIYFVPISGFEGDNILRGPPTLT

SEQ ID NO: 308815 - protein, 92 aa, Zea mays
  Clone ID: MRT4577_44706C.1.pep
IVVSSSGHRASMESKILSLVMLHALSTSGASESVFQRCSQGVIAFLFPAVPTINDRVSIQHSSYSFIYGFTKQWQQATCLFLPWLCRRSPAQ

SEQ ID NO: 308816 - protein, 135 aa, Zea mays
  unsure (1)..(135): unsure at all Xaa locations
  Clone ID: MRT4577_44707C.1.pep
SSVAQLSSGKMPSVYLYIPNIIGYFRIIINFIAFAVCYSNKALFAVLYFFSFVLDGVDGWFARKFNQASTFGAVLDMVTDRVSTACLLALLSQXYRPGLVFLILLGLDITSHWFQMYSSFXLSGXTSHKDVKHTG

SEQ ID NO: 308817 - protein, 222 aa, Zea mays
  Clone ID: MRT4577_44708C.1.pep
AQLPSGKMPSVYLYIPNIIGYFRIIINFIAFAVCYSNKALFAILYFISFVLDGVDGWFARKFNQASTFGAVLDMVTDRVSTACLLALLSQFYRPGLVFLILLGLDITSHWFQMYSSFLSGKTSHKDVKHTGNWLLKLYYGYRPFMAFCCVSCEVLYIFLFLFADEESTSLLSVCKGILNQSPVVILVFVSTLVGWAVKQATNVIQMKTAADACVVYDLKRSK

SEQ ID NO: 308818 - protein, 98 aa, Zea mays
  unsure (1)..(98): unsure at all Xaa locations
  Clone ID: MRT4577_44709C.1.pep
MTLIPYNTSLTNLNFIALHPTLTTKPTINIYYHTNPIYSIILLNLKMTLPPTNPNYYYHHWIKDIHXITIINDQQGHPAFSLMNKTTINAINHSLLQF

SEQ ID NO: 308819 - protein, 43 aa, Zea mays
  Clone ID: MRT4577_4470C.1.pep
VAAPEVRWRWVNRHILEAIRESGPQAPLSIAVLFVQNIDRTFA

SEQ ID NO: 308820 - protein, 972 aa, Zea mays
  unsure (1)..(972): unsure at all Xaa locations
  Clone ID: MRT4577_44710C.1.pep
MSEVAKKAAAEMKLSLDEEKNLGFLIAMSKTNTEKITKEILEGLSEDTGDSESYDVDSGGEDSEDRPWRPSHSVYGKSTIKENHLVNMRGRYFRDVSVVRADEGEKTCPHPEENEVVVFRSFLKAGLRFPLSSFVVEVLKIFEVYLHQLTPEAIIRLNIFVWAVRSQGLKPDAKSFCNMHELSYETIPWGKEQYHNNFGCYSFVSRSGSSCPVPTFRKRWPSGWMTEWFYVKNDLKAREDIKGIIMRPIWQSFGLRRPKVEMKEAAEECQRAFGVVCSFIGTRDLVQEHIAFRVWPLAEKWEMPEETIKEADEGGLIRFKYTFKFGDKFIEPDDEWLKSIDNLSDELLGTYSKAEDTAMSAAFGGRKKKRLNRVFDAIGFVYPDYCYPIRRQKRKNTTSAKEEAAAAPSEPEPERKKIKVLTHRPRYIEPASVPEFTGETSSASEAEKPTEPALLPEVAETAEVPIKSKLEQSKILLSGTEEKAEAPCTEKMEEVKEATEGSKTSEVLSPAANIGTSKNEKVQAVTPKRKRMANVLDVLETLKSSSTPPKKATGTPETATAIPGFTAPEQEIEAEAGPSEPAKGKPLEKKEEQEAQHYAQKLKYPKGALIFNGSGEEDFLYCLPDSKEISVCREMSKSFGFPTLEDGLSVLSKNDLADSLAYNSLKGLILSNALRAQKDAEDEGCTIALSNLRSEVIELRNEGLEKDKILYSLINKIKEDEAAFKSQAEAQKREIEDLRKQLARAKEEXYLKKQSVNSATNGQXSPRSDCRRXLRSSKKRCYNKSIDCVKKLKASFAKVGAFSSEENFSRGNPEGVIEWINHEAEAFEEILNSRGDICAFSGARGIATILEKEGCEHVKILAQSEAALSFEDTKDPSAEASIIGGKFFTDIWDNGGREMAGEIIRRSERGIHDAREVAEAAKKSAEAEDPTEVSPGARPRGDDEIKKMAEAIMDEVVDRLLNEAAEVVLRED

SEQ ID NO: 308821 - protein, 109 aa, Zea mays
  unsure (1)..(109): unsure at all Xaa locations
  Clone ID: MRT4577_44711C.1.pep
IGYLEAGREHISPHLRIALPTAHPRLPPAARPPDDSRSPPAGHRPPPARLRYCTFVARSTVVLAXYVDFXGDFTTIAAQWLQKLPASNKFTYNCDGHTFSYLIEKGFSE

SEQ ID NO: 308822 - protein, 254 aa, Zea mays
  unsure (1)..(254): unsure at all Xaa locations
  Clone ID: MRT4577_44712C.1.pep
LLGHRSSWPPSSFPSRAMASPMAPPFPSAPSPSRIPPPPWKSVXRAATPSARAWDLPSRRSPWPVRALAVSLPXRARASPSRPPASAPPWWSAGEGTISWRYPAPSNPSFPLTADAFPARPWRSRRRLTASLHGAPPRSCSLWRAVAVPXASPILHLIDASPADIPMVTCPCVPPMAPPFSVPSPNLRTASPGPXSLPPLGPVGTSSGSFXFPPSPSASSRRPPPPAVPAXPSSAPRRPSSPSSLSAAIPRHPA

SEQ ID NO: 308823 - protein, 897 aa, Zea mays
  Clone ID: MRT4577_44713C.1.pep
MSEAAKKAAAEMKLSLDEEKNLGFLISMSKTNTEKITREILEGLSEDTGDSESYDVDSGGEDSEDRPWRPSHSVYGKSTIKENHLVNMRGRYFRDLSIVRADEGEKTCPHPEENEVVVYRSFLKAGLRFPLSSFVVEVLKIFEVYLHQLTPEAIIRLNIFVWAARSQGLKPDARSFCNVHELLYETKPWGKEQYHNNFGCYSFVSRPGASCPVPTFRKRWPGDWMTEWFYVKNDLSAREDIKDKFIEPDDEWLKSIDNLSDELLGTYSKAEDTAMSAAFGGRKKKRLNRVFDAIGQKRKNTTSAKEETTAAPSEPEPKRKKIKVLTYRPRYIEPASVPEFTGETSSATEAEKPAEPTLLPEVTETAEIPTKTKLEQSKILLPETKEKAEAPFTEKMEEVKEATEDSKTSEVLSPVANIETVSNQKVPAVTPKRRRMANVLDVLETIKSSSTPPKKAAVTPETTVEASGSKAPEQDTEAEAGPSGPSKAKTLESEAEKITKPTFAEGTGVVTPEASKIRDYIFRHASGKKLTEKEEQEAQHYAQKLKYPKGALIFNGSGEEDFLYCLPDSKEISVCREMSRSFGFPTLEDGLSGLILSNALRAQKDAEDERCTIALSNLRSEVIELRNEGLEKDKILYSLIDKIKEDEAAFKSQAEAQKHEIEDLRKQLARAKEERILEETKRELSDQWADHLEVTVEELRSSKKKCYNKSVDCVKKLKASFAKVGAFSSEENFLRGNPESVIEWIDHEAEAFEEILNSRGDICAFSGARGIATILEKKGCEHVKILAQSEAALSFEDTKDPSAEASIIGGKFFTDIWDNGGREMAREIIQRSEKGIHDAREVAKAVKKSTEPEDPTQASSGPQAKDDDEIKKMAEAIMDQVVDRLLNEAAEIVLRED

SEQ ID NO: 308824 - protein, 1012 aa, Zea mays
  unsure (1)..(1012): unsure at all Xaa locations
  Clone ID: MRT4577_44714C.1.pep
MSEAAKKAAAEMKLSLDEEKNLGFLIAMSKTNTEKITNEILEGLSEDTGDSESYDVDSGGEDSEDRPWRPSHSVYGKSTIKENHLVNMRGRYFRDLSIVRADEGEKTCPHPEENEVVVFRSFLKAGLRLPLSSFVVEVLKIFEVYLHQLTPEAIIRLNIFVWAVRSQGLKPDAKSFCNMHELSYETIPWGKEQYHNNFGCYSFVSRSGSSCPVPTFRKRWPSGWMTEWFYVKNDLKAREDIKGIIMRPIWQSFGLRRPKVEMNEAAEECQRAFGVVCSFIGTRDLVQEHIAFRVWPLAEKWEMPQETIKEADEGGLVRLKYTFKFGDKFIEPDDEWLKSIDNLSDELLGTYSKAEDNAMSAAFGGRKKKRLNRVFDAIGFVYPDYCYPIRRQKRKNTTSAKEEAAAAPSEPEPKRKKIKVLTHQPRYIEPASVPEFTGKTSSATEAEKPIEPALLPEIAETAEVPPKIESEQSNILLSETKEKTEAPLTEKIEEVKEATEGSKTSEVLSPTAIIGTAKNEKVPAATPKRKRMANVLDVLETIKSSSTPPKKAAVTPETTVEISGSTAPEQEIEAEAGPSEPAKTLESEAEKITKPTFEETSVVAPEASPKIRDYIFRHASGKKLSEKEEQEAQHYAQKLKYPKGALIFNGSGEEDFLYCLPDSKEISVCREMSRSFGFPTLEDGLSVLSKNDLADSLAYNSLKGLILSNALRAQKDAEDEGCTIALSNLRSEVIELRNEGLEKDKILYSLIDKVKEDEAAFKSQAEAQKREIEDLRKQLARAKEEXYSKKQSVNSAINGQXSPRSDCXEELRSSKKRCYNKSIDCVKKLKASFAKVGAFSSEENFSRGNPEGVIEWIGREAEAFEEILNSRGDICAFSGARGIATILEKKGCEHVKILAQSEAALSFEDTRDPSAEASIIGGKFFTDIWDNGGREMAGEIIRRSEKGIHDARAVAEAADKSTEPEGQLDPTKAPSDPQPKGDDEIKKMAEDIMDEVVNRLLNEAAEVVLRED

SEQ ID NO: 308825 - protein, 1008 aa, Zea mays
  unsure (1)..(1008): unsure at all Xaa locations
  Clone ID: MRT4577_44715C.1.pep
MSEAAKKAAAEMKLSLDEEKNLGFLIAMSKSNTEKITKEILEGLSEDTGDSESYDVDSGGEDSEDRPWRPSHSVYGKSTIKENHLVNMRGRYFRDLSVVRADEGEKTCPHPEENEVVVFRSFLKAGLRFPLSSFVVEVLKIFEVYLHQLTPEAIIRLNIFVWAARSQGLKPDARSFCNVHELSYETMPWGKEQYHNNFGCYSFVSRSGASCPVPTFRKRWPGGWMTEWFYVKNDLSAREDIKGIIMRPIWQSFGLRRPKVEMNEAAEECQRAFGVVCSFIGTRDLVQEHIAFRVWPLAEKWEMPQETIKEADEGGLVRLKYTFKFGDKFIEPDDEWLKSIDNLSDELLGTYSKAEDNAMSAAFGGRKKKRLNRVFDAIGFAYPDYCYPIRRQKRKNTTSAKEEAAAAPSEPEPKRKKIKVLTHRPRYIEPASVPEFTGKTSSAAEAEKPTEPALLPEIAETAEVPPKIESEQSNILLSETKEKTEAPPTEKIEEVKEATEGSKTSEVLSPTAIIGTAKNEKVPAATPKRKRMANVLDVLETIKSSSTPPKKAAVTPETTAEXLVLQLQSKRLKPKLXSEPAKTLESEAEKITKPTFEESGVVAPEASPKIRDYIFRHASGEKLSEKEEQEAQHYAQKLKYPKGALIFNGSGEEDFLYCLPDSKEISVCREMSRSFGFPTLEDGLSALSKNDLADSLAYNSLKGLILSNALRAQKDAEDEGCTIALSNLRSEVIELRNEGLEKDKILYSLIDKIKEDEAAFKSQAEAQKREIEDLRKQLARAKEEXYLKKQSVNSAINGQXSPRSDCXEELRSSKKRCYNKSIDCVKKLKASFAKVGAFSSEENFSRGNPEGVIEWIDHEAEAFEEILNSRGDICAFSGARGIATILEKKGCEHVKTLAQSEAALSSEDTRDPSAEASAVGGKFFTDIWDNGGREMAGEIIRRSEKGIHDAREVAEAAVKGAEAEDPTKAPSGPQPKGDDEIKKMAEDIMDEVVNRLLNEAAGVVLRED

SEQ ID NO: 308826 - protein, 1011 aa, Zea mays
  unsure (1)..(1011): unsure at all Xaa locations
  Clone ID: MRT4577_44716C.1.pep
MSEAAKKAAAEMKLSLDEEKNLGFLIAMSKTNTEKITREILEGLSEDTGDSESYDVDSGGEDSEDRPWRPSHSVYGKSTIKENHLVNMRGRYFRDLSVVRADEGEKTCPHPEENEVVVFRSFLKAGLRLPLSSFVVEVLKIFEVYLHQLTPEAIIRLNIFVWAVRSQGLKPDAKSFCNMHELSYETIPWGKEQYHNNFGCYSFVSRSGSSCPVPTFRKRWPSGWMTEWFYVKNDLKAREDIKGIIMRPIWQSFGLRRPKVEMNEAAEECQRAFGVVCSFIGTRDLVQEHIAFRVWPLAEKWEMPQETIKEADEGGLVRFKYTFKFGDKFIEPDDEWLKSIDNLSDELLGTYSKAEDNAMSAAFGGRKKKRLNRVFDAIGFVYPDYCYPTRRQKRKNTTSAKEEAAAAPSEPEPKRKKIKVLTHRPRYIEPASVPEFTGKTSSATEAEKPTEPALLPEIAETAEVPPEIESEQSNILLSETKEKAEAPSTEKIEEVXKLLRAPKHPEXSPAANIETVKNQKVPAMTPKRKRMANVLDVLETIKSSSTPPKKAAVASETTAEISGSTAPEQEIEAEAGPSEPAKAKALESAAEKITKPTLAEETGVVTPEASPEIRDYIFRHASGKKLSEKEEQEAQHYAQKLKYPKAALIFNGSGEEDFLYCLPDSKEISVCREMSRSFGFPTLEDGLSVLSKNDLADSLAYNSLKGLILSNALRAQKDAEDEGCTIALSNLRSEVIELRNEGLEKDKILYSLIDKIKEDEAAFKSHAEAQKREIEDLRKQLARAKEEXYLKKQSVNSAINGQXSPRSDCXEELRSSKKRCYNKSIDCVKKLKASFAKVGAFSSEENFSRGNPEGVIEWIDHEAEAFEEILNSRGDICAFSGARGIATILEKKGCEHVKTLAQSEAALSFEDTKDPSAEASIIGGKFFTDIWDNGGREMAGEIIRRSEKGIHDAREVAEAAVKSAEAEDPTKAPSGPQPKGDDEIKKMAEDIMDEVVDRLLNEAAEVVLRED

SEQ ID NO: 308827 - protein, 62 aa, Zea mays
  Clone ID: MRT4577_44717C.1.pep
RTRGRTHGRDRAQSLVRQSRLTVRQRLGQQQPHCEGDPQYAHDPLYGIFLPACKGWMQLVFA

SEQ ID NO: 308828 - protein, 804 aa, Zea mays
  Clone ID: MRT4577_44718C.1.pep
CPVPTFRKRWPGDWMTEWFYVKNDLTVREDIKSIIMRPIWQSFGLRRPKVEMNEAAEECQRAFGVICSFIGTRDLVQEHIAFRVWPLAEKWEMPQETIKEADEGRLIRLKYTFKFGDKFVEPDDDWLKSIENLSDELLGAYSKAEDTAMSAAFGGRKKKRLNRVFDAIGFVYPDYRYPIRRQKRKNTTSAKEETAAAPSEPEPKRKKIKVLTHRPRYIEPASVPEFTGETSSATEAEKPAEPTLLPEVAETAEVPTKTKLEQSKILLPETKEKAEAPFTEKMEEVKEATEDSKTSEILSPSAIIGTSKNEKVPAATPKRKRMANVLDVLETIISSSTPPKKAAVTFETTAEISGSAALEQEIEAEAGPSEPAKAKTLESEAEKITKPTFAEGTGVVTPEASPKIRDYIFRHASGKKLSEKEEQEAQHYAQKLKYPKGALIFNGSGEEDFLYCLPDSKEISVCREMSRSFGFPTLEDGLSVLSKNDLADSLAYNSLKGLILSNALRAQKDAEDEGCTIALSNLRSEVIELRNEGLEKDKILHSLINKIKEDEALFKGQAEAQKGEIENLRKQLARAKEECILEETRRELSDQWANHLEETVKELRSAKKKCFDKSIECVKKIKTSFASVGAFSQEENFIRGNPEGPLEWINHEAEAFEEILNSRGDICAFSGARGIATILEGKGCEHVKILSQSEATLSTEDIKDPSAEASAVGGKFFTDIWDNGGREMAQEIIQKSEKGIHEARKVAEAAEKNAEPEGQIDPTKASSGPQPKDDDEIKKMAEAIMDQVVDRLLNEAAEIVLRED

SEQ ID NO: 308829 - protein, 154 aa, Zea mays
  unsure (1)..(154): unsure at all Xaa locations
  Clone ID: MRT4577_44719C.1.pep
ASNAAVRAAPAPXPPSXPGPPAPPAAALRWPCDPPAAVLAPTPAAAPAPTPPRNGRPERPLPDRPPPVPDPPPRPPPPPPPPPPPPRPPPPPPRQDAPWKWVAMHSSVSASAQSSLVPCLIAVADAVAARGGDVEMGKAPVTRPAGRVVLLPVE

SEQ ID NO: 308830 - protein, 138 aa, Zea mays
  unsure (1)..(138): unsure at all Xaa locations
  Clone ID: MRT4577_4471C.1.pep
WMVGSXASGAXPSXQAGLGRQKDKXXLLGQGRDAXXLGXWIXSALDXLXQWWXLRDXPPXXGCIXLASXXVLDKXXLHCPPLXGAXXPNRRGLYSLXGCWVVSXSXXGRXPXSCPCRXEDKXALLGQEXDXXXLXPGS

SEQ ID NO: 308831 - protein, 1175 aa, Zea mays
  unsure (1)..(1175): unsure at all Xaa locations
  Clone ID: MRT4577_44720C.1.pep
MSEAAKKAAAEMKLSLDEEKNLGFLIAMSKTNTEKITREILEGLSEDTGDSESYDVDSGGEDSEDRPWRPSHSVYGKSTIKENHLVNMRGRYFRDLSIVRADEGEKTCPHPEENEVVVYRSFLKAGLRFPLSSFVVEVLKIFEVYLHQLTPEAIIRLNIFVWAARSQGLKPDARSFCNVHELLYETKPWGKEQYHNNFGCYSFVSRSGASCPVPTFRKRWPGDWMTEWFYVKNDLSAREDIKGIIMRPIWQSFGLRRPKVEMNEAAEECQRAFGVVCSFIGTRDLVQEHIAFRVWPLAEKWEMPQETIKEADEGGLVRFKYTFKFGDKFIEPDDEWLKSIDNLSDELLGTYSKAEDTAMSAAFGGRKKKRLNRVFDAIGFVYPDYCYPIRRQKRKNTTSAKEETAAAPSEPEPKRKKIKVLTHRPRYIEPASVPEFTGETSSATEAEKPAEPTLLPEVTETAEIPTKAKLEQSKILLPETKEKAEAPFTEKMEEVKEATEDSKTSEVLSPVANIETVRNQKVPAMTPKRRRMANVLDVLETIKSSSTPPKKAAVTPETTVEASGSKAPEQDTEAEAGPSEPSKAKTLESKAEKIIKPTFAEETGVVTPEASKIRDYIFRHASGKKLSEKEEQEAQHYAQKLKYPKGALIFNGSGEEDFLYCLPDSKEISVCREMSRSFGFPTLEDGLSVLSKNDLADSLAYNSLKGLILSNALRAQKDAEDEGCTIALSNLRSEVIELRNEGLEKDKILYSLIDKIKEDEAAFKSQAEAQKREIEDLRKQLARAKEEXYLKKQSVNSAINGQXSSRSDCXEELRSSKKKCYNKSVDCVKKLKASFAKVGAFSSEENFSRGNPESVIEWIDHEAEAFEEILNSRGDICAFSGARGIATILEKKGCEHVKILAQSEAALSLEDTKDPSAEASIIGGKFFTDIWDNGGREMAREIIQRSEKGIHDAREVAKAAEKSTEPEGQLDPTKAPSGPQPKGDDEIKKMAKDIMDEVVDRLLNEAAEVMTFVPKDTHISPHNIFVSALILRCKLCIPLGTSLELLRLLLRRYKLCIPLGTSLELLRLLLRRYKLCIPLGTSLELLRLLLRRYKLCIPLGTSLELLRLLLRRYKLCIPLGTSLELLRLLLRRYKLCIPLGTSLELLRLLLRRYKLCIPLGTSLELLRLLLRRYQR

SEQ ID NO: 308832 - protein, 80 aa, Zea mays
  Clone ID: MRT4577_44722C.1.pep
PVQLMSKAAYALPENFTVQFVRSLVTGQAWFGISWCALYLEPANVLANFPPEKRNLRPQAVQNAMEYLNLYESYCLEGDI

SEQ ID NO: 308833 - protein, 51 aa, Zea mays
  Clone ID: MRT4577_44723C.1.pep
CTCTTRHSPSLDGTTSLPPNPRLQGSRTPTNLATLRRSTLRRTITCTIIRP

SEQ ID NO: 308834 - protein, 73 aa, Zea mays
  unsure (1)..(73): unsure at all Xaa locations
  Clone ID: MRT4577_44724C.1.pep
LYYXNGQKLPLXAAKLASFKNEIXPRQGLLPVREFTLAEIEHFLDPQDKSHPKFVDVADLEFLMFPRELQLSG

SEQ ID NO: 308835 - protein, 96 aa, Zea mays
  Clone ID: MRT4577_44725C.1.pep
RPFMSTKAIGHRGGSTSNGPVSVGTCTGLKPKKKFVCRRTFASPSVAMCSPFSLSGADATSPYPHPYPEVRACSQRRGPPANRACARRRAAAALAH

SEQ ID NO: 308836 - protein, 58 aa, Zea mays
  Clone ID: MRT4577_44726C.1.pep
KKHILQWVKKNPKDRSFDKNKTLLSFLKKIPPQHYKKFNTLRDFRALRGYWGASWNFF

SEQ ID NO: 308837 - protein, 446 aa, Zea mays
  Clone ID: MRT4577_44727C.1.pep
MQCLPCGPSTNAPAAHAAARSVSRRRVVVEGVTSATHDSEEAPPRSMRATGDRGAMSSKTLWLVSKRKLIALSAFCLSLHSSRYFPAFALGDTSVKIEDVTPKIFPSGPLFPTEKRIAELFEINTYSVVNIFDATLRPQLNVTGVVEIPEGNGSGVVWDDFGHIITNYHVVGSALSKNPKPGDVVARVNILAAEGIQKNFEGKLVGADRAKDLAVLKVDAPTDLLKPINVGQSSALRVGQQCLAIGNPFGFDHTLTVGVISGLNRDILSQAGVTIGGGIQTDAAINPGNSGGPLLDSKGHMIGINAAIFTQTGTSAGVGFAIPSSTVLKIAPQLIQFGKVRRAGLNVDLAPDPIAYQLNVRNGALILKVPGGSAAAKAGLAPTSRGFAGNIVLGDIVVAVDGKPVKGKSDLLRVLDDYGVGDQVSLTIRRGSETLEATLPLEEADM

SEQ ID NO: 308838 - protein, 67 aa, Zea mays
  Clone ID: MRT4577_44728C.1.pep
PFSPRAAAAVACLRAVAAAAAVHLEICCWRCLAASSIQEARLHACGRGGSGCLILNQKNLKRRFGNG

SEQ ID NO: 308839 - protein, 75 aa, Zea mays
  unsure (1)..(75): unsure at all Xaa locations
  Clone ID: MRT4577_44729C.1.pep
SNVHLVFFFRGGKHMFVKTLCVKAISMQVESSFAPNNVKEKFQHKXGIPKEQQCLMFPGXQLENGRTLKESIIQK

SEQ ID NO: 308840 - protein, 66 aa, Zea mays
  unsure (1)..(66): unsure at all Xaa locations
  Clone ID: MRT4577_4472C.1.pep
MKFPAPYLLALLSGNSSPSSHDLTAILKSVRCQVHNXNMQLLLSQLISNHITXLIASGNENFASVP

SEQ ID NO: 308841 - protein, 151 aa, Zea mays
  Clone ID: MRT4577_44730C.1.pep
SFVIVGKGWDVFISSTNPLSGWHLFMVNDLISPQSQQMERQLTTVWQSLTPTSCPRFYNFHLHTRCSDGQMTPEGLIEQAIHQELQGLAITDHHCVAGYYRAQRWLTEHCHYPSLRPQLWTGIEITANLDGTEVHILGYDFDPTHPVLDPY

SEQ ID NO: 308842 - protein, 107 aa, Zea mays
  Clone ID: MRT4577_44731C.1.pep
AAVWFTGRSHYCMSRSTVHPQSSPRISVPWRSESSRKQRWSTVSRSPGRSNSMLRIPTFLRTAFPGGGASTPRARHTPVPGASRCTVIGGRAVDERMWKLHYVLVVG

SEQ ID NO: 308843 - protein, 94 aa, Zea mays
  Clone ID: MRT4577_44732C.1.pep
NFGKKNPPFVAKMKTLSKKFSLKGVFWGPKIKAPKSFFQPFKPPPPFGFKKGLNPFCPKFPKGKSRGFLEKKAQGWFSLCRVEKTGFPPLVFLV

SEQ ID NO: 308844 - protein, 77 aa, Zea mays
  Clone ID: MRT4577_44733C.1.pep
LISWVESQSSFGDILNDLAMQPHMNGVAPVDSSLRRANTITATLNGVNSAEANPMTNYPETNGIGHADMGGLGQQLR

SEQ ID NO: 308845 - protein, 437 aa, Zea mays
  Clone ID: MRT4577_44734C.1.pep
MGQQEEPTSSRPYAFAYDERKGKKKALTPSSPSEEEEEEESDDDEDNQHHLLRTKTQSDASEREKGHFGDSCPNMAEPTKGRSKGKALSVKTWDNSSSEDEPPRTRNHRSSSWSSRKCLMIRGKMSILSSSDATCSDNEGEGKPSLDELAKTVNFFEDVYTKQKAQLKTLKNKLISSQDDYKCLLEKFETFANLNGELSTKIEQLESNAPSSATNDGLIKKNEKLKTRLASSQEAIENLLGKMKILNIHNNELTTKLENIDSTPRVSLIEMPKIIKKDASTFCFDLIDDSNPCNQVLVENIVVETCSNEVTNENEQLRQEGARLCKALYDKKGKSKQIQPPQDNTTAGVNKPVEGETVICRLCHMEGHKSYQCKAKIGDKQTQKLKQKPTRKISNTYINKVDKKAATPYLIEKKKNGKVIAIKANKRANKGKGVKRI

SEQ ID NO: 308846 - protein, 96 aa, Zea mays
  Clone ID: MRT4577_44735C.1.pep
LPISIANPRVFFGMTVCGAPAGRIVMDLYANQVPKTRENLRALCTGHKGVGKSGKPFHYKGFTLHRVIPEFMCHGRYFTRGNCTGCECIYGEKFPD

SEQ ID NO: 308847 - protein, 63 aa, Zea mays
  Clone ID: MRT4577_44736C.1.pep
MRVLLVALALLALGGSATFTHTSGGWGWQPPAAVHLSAAVHLAPSVHLPTSVHLPHAVHLAAA

SEQ ID NO: 308848 - protein, 125 aa, Zea mays
  Clone ID: MRT4577_44737C.1.pep
CPPSVPGVTCSQSSFAGGPYPICLALGFVRFVVALGGPGCRFGKWRFSSLCSTCLGSLFRHCTVSAFPYGGVSGWLWCRVTYCLRPTALPSLGPGRAGVLSTLCCSASRSRFGVSGKSRADPGGL

SEQ ID NO: 308849 - protein, 105 aa, Zea mays
  unsure (1)..(105): unsure at all Xaa locations
  Clone ID: MRT4577_44738C.1.pep
TGTTKLAKYEKHGLTLKVHRRGYRPFDPPLYKQTTVHLLPPFKTPAEIYPFVTPNPYSDHNSPDSHFPNPQTTLKSTLLALIPIFPSYTLYFSTXRLSFHVTKRA

SEQ ID NO: 308850 - protein, 105 aa, Zea mays
  Clone ID: MRT4577_44739C.1.pep
GGGGVKLLTPDRFIHQKFNSMYKNTTHAPTHTEKSRNCSSPAQDYIHCKNTVQAVESEVAKQMGQINDGIAVHLYVLALSTYQDGKIILDGAQFVQLSFRLAWQE

SEQ ID NO: 308851 - protein, 81 aa, Zea mays
  Clone ID: MRT4577_4473C.1.pep
LYPQQANTESYLKRNEDRELGSAARDGMKKRGRTDRQEEQNRTETAAAAALTWWALPSAPASRVISGTFFSAYVRFSGPGR

SEQ ID NO: 308852 - protein, 79 aa, Zea mays
  Clone ID: MRT4577_44740C.1.pep
FQASPRSGKLSLELKAPGRRVRIQGKPVSVKTGPLLAKPLLKEHPMFSLQLWGMIFLQLEKKKVSFPPSKGVRNPASRL

SEQ ID NO: 308853 - protein, 117 aa, Zea mays
  Clone ID: MRT4577_44741C.1.pep
MAPSLLAAMSTSPFLASSGSSRRPLGAAHTRRAGLRVAALKYDPAKKSAGGVLLPKSAVKFERYLMGEILSIGAEVSEVEAGKKVLFSDINAYEVELGTDEEKHCFCRESDLLAVVE

SEQ ID NO: 308854 - protein, 134 aa, Zea mays
  Clone ID: MRT4577_44742C.1.pep
MAPSLLAAMSTSPFLASSGSSRRPLGAAHTRRAGLRVAALKYDPAKVAPQNDRVLVRLEQIPEKSAGGVLLPKSAVKFERYLMGEILSIGAEVSEVEAGKKVLFSDINAYEVELGTDDEKHCFCRESDLLAVVE

SEQ ID NO: 308855 - protein, 41 aa, Zea mays
  unsure (1)..(41): unsure at all Xaa locations
  Clone ID: MRT4577_44743C.1.pep
LQSPRRVLATHRTGTGPSLPRNEGGGXLTLYVTKGGVLQTT

SEQ ID NO: 308856 - protein, 131 aa, Zea mays
  Clone ID: MRT4577_44744C.1.pep
MAPSLLAAMSTSPFLASSRRPLGAAHTRRAGLRVAALKYDPAKVTPQNDRVLVRLEQIPEKSAGGVLLPKSAVKFERYLMGEILSIGAEVSEVEAGKKVLFSDINAYEVELGTDDEKHCFCRESDLLAVVE

SEQ ID NO: 308857 - protein, 120 aa, Zea mays
  Clone ID: MRT4577_44745C.1.pep
KKREFFFLKGQLPPLFFVPTKAPSFLFFKNFFFWNLYEKPPPLGEQSPFWHGLFGPLYKRPFCFFPGTEKKITGLTPRNPFNFEIEKGVHQKKNAKSSPVGWYPKHKHGVQNVKLKSLPN

SEQ ID NO: 308858 - protein, 134 aa, Zea mays
  Clone ID: MRT4577_44746C.1.pep
MAPSLLAAMSTSPFLASSGSSRRPLGAAHTRRAGLRVAALKYDPAKVAPQNDRVLVRLEQIPEKSAGGVLLPKSAVKFERYLMGEILSIGAEVSEVKAGKKVFFSDINAYEVELGTDDEKHCFCRESDLLAVVE

SEQ ID NO: 308859 - protein, 127 aa, Zea mays
  unsure (1)..(127): unsure at all Xaa locations
  Clone ID: MRT4577_44747C.1.pep
TTQKAAAALGILHEARHTILFHXHGDGPTAATRSVSGLKSGLYAFHVHALGDTTNACMSTGPHYNPASXFYAAPQDENRHAADXLGNMTAGAHAAANINVTDSQIPLTAPHSIIGRFVVVHNDPDDL

SEQ ID NO: 308860 - protein, 122 aa, Zea mays
  Clone ID: MRT4577_44748C.1.pep
AVAFRTLAPCQALVNYHTIGAGLRVDGLKNYPAKVTPQNDRVLVRLEQIPEKSAGGVLLPKSAVKFERYLMGEILSIGAEVSEVEAGKKVLFSDINAYEVDLGTDDEKHCFCRESDLLAVVE

SEQ ID NO: 308861 - protein, 131 aa, Zea mays; identical to SEQ ID NO: 308856
  Clone ID: MRT4577_44749C.1.pep

SEQ ID NO: 308862 - protein, 94 aa, Zea mays
  unsure (1)..(94): unsure at all Xaa locations
  Clone ID: MRT4577_4474C.1.pep
MIYTXIESSNACTDVLTPSANHKLHXIGEQIPHPQCPSSIKRXNGNVFNVCDDSYNVVNLDTWEFTFQKWHISNLSCMHLIVVLDRTLQYAYYY

SEQ ID NO: 308863 - protein, 119 aa, Zea mays
  Clone ID: MRT4577_44750C.1.pep
AWNLWADLCACLSVNGRMHFAILSVVVMMSRSSGLVGAHSFLVTGLLVSNDNSVVVGAASLTVGVGWSSTSVRRLSAVSHHSGVRRLREDEMLSFVVVRRRRGAPPSSFPSPLLSGSGR

SEQ ID NO: 308864 - protein, 309 aa, Zea mays
  Clone ID: MRT4577_44751C.1.pep
MAPSLLAAMSTSPFLASSGSSRRPLGAAHTRRAGLRVAALKYDPAKVAPQNDRVLVRLEQIPEKSAGGVLLPKSAVKFERYLMGEILSIGAEVSEVEAGKKVLFSDINAYEVEAVLPVRQVRVRRQSDLLAVVEWISPRHDDAAEKARNSKGERSELEPIRLEVVLVFVSVQHATQLSSREREEARRSGSFHAPRLRPLVSAPMAPSLLAAMSTSPFLASSGSSRRPLGAAHTRRAGLRVAALKYDPAKVAPQNDRVLVRLEQIPEKSAGGVLLPKSAVKFERYLMGEILSIGAEVSEVEAGKKVRNIL

SEQ ID NO: 308865 - protein, 328 aa, Zea mays
  unsure (1)..(328): unsure at all Xaa locations
  Clone ID: MRT4577_44752C.1.pep
TYASADGGSSLTPTVAGERVGAGPFQQADDHTVLQAAISTKTPYIDVCDDTDYSWRAKGFHEQAKAAGVPAITTAGIYPGVSNVMAAELVHAARSEVGPRGRPGCSYLSIYDLFGSLPNLPHIATLLCLRLVLQFERLTLGKVXGIVSHKPNKPLMCSSCVTVKPNGLLWAGIQNIYXRDDNVQFSVRINYLIPNLALXQEFLRDRNKVQKLVQSVDPLVRAVDGIAGEHVSMRVDLDCSNGRNTIGLFTHKKLSVSVGFATAAFALAVLEGNTQPGVWFPEEPEGIRIEARKLLLERASQGTSTFVMNKPSWMVETDPKEVGLGIFV

SEQ ID NO: 308866 - protein, 83 aa, Zea mays
  Clone ID: MRT4577_44753C.1.pep
PRPRGNPTTAKPTTTTRSKNKAETITTSTDMEALPLPQTHHHHHQHDHNDEEAPTKHEGTHPAGRAGKKPPGNINQHSAIPPR

SEQ ID NO: 308867 - protein, 316 aa, Zea mays
  unsure (1)..(316): unsure at all Xaa locations
  Clone ID: MRT4577_44754C.1.pep
RNAGMLEEALQGVDLVVHTAGPFQRAEECTVLQAAISTKTPYIDVCDDTDYSWRAKGFHEQAKAAGVPAITTAGIYPGVSNVMAAELVHAARSENGEPERLXGTGGAGPTILTTSFLLLGEDVIAYNKGEEIKLKPYSGALNIDFGKGVRKKNVYLLNLPEVKSAFKILGVPTVSARFGTAPFFWNWGMQAFANFLPVEFLRDRNKVQKLVQSVDPLVRAVDGIAGEHVSMRVDLDCSNGRNTIGLFTHKKLSVSVGFATAAFALAVLEGNTQPGVWVPEEPEGIRIEARKLLLERASQGTSTFVMNKPFWMVETD

SEQ ID NO: 308868 - protein, 53 aa, Zea mays
  Clone ID: MRT4577_44755C.1.pep
AAPPASAVVRGDECYQVCYPVHMIGVGVMFRGESRSLLATGPWTLTGITLLGS

SEQ ID NO: 308869 - protein, 146 aa, Zea mays
  Clone ID: MRT4577_44756C.1.pep
MSPFEALYGRKCRTPLYWDQTGERQFFGPEIIQEAEEQIRMIRENLRIAQSRQKSYADTRRRPLEFEVGDHVYLKVSPMRDVHDVFHVSQLMKCLRVLEEQLPMEELSVHCDLTYIEHPIKVINTLTRVTRNKVIKICKVQWSHHG

SEQ ID NO: 308870 - protein, 75 aa, Zea mays
  Clone ID: MRT4577_44757C.1.pep
PRVAGVAARFPDGATDRGIGRVLGRESLLLVLLRGLLRIGGEKRGKYSRDMLPIRRTSSVIHGFTHSYFNYNWMF

SEQ ID NO: 308871 - protein, 245 aa, Zea mays
  unsure (1)..(245): unsure at all Xaa locations
  Clone ID: MRT4577_44758C.1.pep
MVSNGELSQPQAGEYGLAVMRRRPKTKIVCTLGPASRSVDMIEKLLRAGMCVARFNFSHGSHDYHQETLDNLHAAMERTGILCAVMLDTKGPEIRTGFLKDGKPIQLRKGQEIVISTDYSIKGDDKMISMSYKKLAVDLKPGSVILCADGTITLTVLHCDKEQGLVRCCCENTAMLGERKNVNLPXGVVVDLPTLTEKDREDILQWGVPNKIDMIALSFVRKGSXLVEGQGRYFGEHAKSIMLMS

SEQ ID NO: 308872 - protein, 196 aa, Zea mays
  unsure (1)..(196): unsure at all Xaa locations
  Clone ID: MRT4577_44759C.1.pep
MEPPGPCNVEVHTCRPWVKRRSHMYSEGIGHENSVKWATRGHLVYXVVRIDKHVIEXKLQKEAAEMNKRFLTDSRGLHNLKGDREQXITIEIASXKLESTNDYCTEIDAPGXRDFIKNMISGTSQSXXAELIXIDSTTGGVEAGISKDEQTRERVLHAFTLGXKPMIWCFNQMKXAATPKYPKARYEEIVKEVSSY

SEQ ID NO: 308873 - protein, 532 aa, Zea mays
  unsure (1)..(532): unsure at all Xaa locations
  Clone ID: MRT4577_4475C.1.pep
LEDSPLMNLQEVFKCHKATNSGDHIGLLFLSRHLKKYRYGLEYASLEVKNHLERVNFSDLVGTIMIIYDGHDKIRNEGMWTTHFHINKAMMKKKRCGLRFVVDELAKEYDTTRDQLNNAIPSIRISRRKCLVGDEGVKSSSCCIAVVAHAERNSISQLDTIKTRVIPSILDTLLKGFLEFKDVEIQCPHDGELLVKVCMSEHCKGGRFWPTLQNACIPVMELIDWELSQPSNVSDIFCSYGIDSAWKYFVESLKSATTDTGRNIRREHLLVIADSLSVTGQFHALSSQGLKQQRTRLSISSPFSEACFSRPAQSFINAAKQCSVDNLCGSLDAVAWGKEPFNGTSGPFEIMHSGKPHEPEQNESIYDFLCSSKVRNFEKNHLDTRRQSTENASICRLACKSSKGSTTVNGVAITIXRTFFXKVSIWDNIIDMRTSLQNMLREYPLNGYVAEPDKSQLIEALKFHSRGAEKIGVGVREIKIGLNPSHPGTRCFILLRNDDTTEDFSYHKCVQGAADSISPQLGSYLKKLYYRA

SEQ ID NO: 308874 - protein, 85 aa, Zea mays
  Clone ID: MRT4577_44760C.1.pep
MHTPSPAVPAPAQLSSAGMGRPCSSSSSADARLLLLLAAVATTLQAAGAAPTVANGYIRKSCRATQYPSEYEQSLAAYGGYPPPR

SEQ ID NO: 308875 - protein, 60 aa, Zea mays
  Clone ID: MRT4577_44761C.1.pep
MDAKKIKLHDYHLYGSQQLFPAAGGLSFHPAPGLMSSLPHAGWLHEDHRTTTPRSVLATH

SEQ ID NO: 308876 - protein, 50 aa, Zea mays
  Clone ID: MRT4577_44762C.1.pep
MGKLCCSQEDDEPAFNLLGLLVTVVLALLLLMLCTPPRRRRCVAYYPRYC

SEQ ID NO: 308877 - protein, 50 aa, Zea mays
  Clone ID: MRT4577_44763C.1.pep
MGKLCCSQEDDEPAFNPLGLLVTVVLALLLLMLCTPPRRRRCVAYYPRYC

SEQ ID NO: 308878 - protein, 50 aa, Zea mays; identical to SEQ ID NO: 308876
  Clone ID: MRT4577_44764C.1.pep

SEQ ID NO: 308879 - protein, 85 aa, Zea mays
  Clone ID: MRT4577_44765C.1.pep
RPGRAVTVWVHWFDVLCAACALEGYRMSEIWRERDYDCLKNYARGGRLPSPPLKNTVTVRIRCKWGLGHENLVYSFPWAHPPNNV

SEQ ID NO: 308880 - protein, 55 aa, Zea mays
  Clone ID: MRT4577_44766C.1.pep
HGASSRRFATFAFRTSYLSLLDPRTHCVSDHYEQLVWWSRSILLTNMTTYHRQYH

SEQ ID NO: 308881 - protein, 247 aa, Zea mays
  unsure (1)..(247): unsure at all Xaa locations
  Clone ID: MRT4577_44767C.1.pep
MADAARGLGSSSLPVANVQALAESCNDNGADAPVPGRYLIKDPSAEEVVAAGDSACAIPVIDFRKLLDPGSSEEECARLGAACHHWGFFQLINHGVPTEVTGNLMKDVAGFFRQPLEAKKECAQQAGSIEGYGQAFVVSEDQKLDWADMLFLIVRPREARDMRFWPTRPESFRXVVRRVRDEXHIFNCSSFLLTVPEPIPXSVDAYSLEASKLAYRLLEFMARGVGADPASLQGMFQGQVQGMRGDY

SEQ ID NO: 308882 - protein, 81 aa, Zea mays
  Clone ID: MRT4577_44768C.1.pep
TYYIKKYIKNLTAVLEPEKADEFKKGVEGATKFLLSKLKDLQFFVGESMKDDASVVFAYYKDGATNPTFLYFSHGLKEIKC

SEQ ID NO: 308883 - protein, 157 aa, Zea mays
  Clone ID: MRT4577_44769C.1.pep
YIVLPTFAYEHKIFVGPFSRKFPKAQVWVAPRQWSWPLNLPLEFFGIFRAKIIKDRDLSTPWAEEIEQKVLSSPEVGIGPYVEVAFYHKRSRTLLVTDAVIFVPRKPPSSISNESLLASAKNGLAVKILSKGKDIPNDPVVDNPNTRQKGWERMVLQ

SEQ ID NO: 308884 - protein, 81 aa, Zea mays
  Clone ID: MRT4577_4476C.1.pep
TMRNMSTLMQGTKSSLPLSCIQSSFKEKMHCFRAFHSERTEGKPWLRGENNRGIKPGRNTSTPPPKTAGPVAGDSKVDAFR

SEQ ID NO: 308885 - protein, 146 aa, Zea mays
  unsure (1)..(146): unsure at all Xaa locations
  Clone ID: MRT4577_44770C.1.pep
ELENGXPWEVEGKWVTQGPVDVDIGANPSAEGGEDESVDDTAVKVVDIVDTFRLQEQPPFDKKSFVSSIKKSIKNLPAVLEPEKADEFKKGVEGATKFLLSKLKDLQFFVGESMKDDASVVFAYYKDGATNPTFLYFSHGLKEIKC

SEQ ID NO: 308886 - protein, 355 aa, Zea mays
  Clone ID: MRT4577_44771C.1.pep
DKSAKMSGDVPRAAIANIFFTEIFTPLLLAVVTVIPYLFINAQTGVLADKQTVAKGANPPKIQPTASLVRILIVAFGPVAINAGVLLVMFAMACFMGPLLSMCCKKFGSVLAAIAHALAVIFMLVFFEVLFLLEGFNFARTMAGMIAVVSLQRFLFKLIVSLTLTREFKTDQSNIAFWTGKWYSMGWHSVSQPAREFLCKITELSMFAADFILGHWLLMFMLPVILIPRVDTLHSMMLFWLLPSQQIRPPIYSLKQSKLRRRRVIRFAILYFVLAVVMIALIVGPVYGGKAVSASLNNQLSDIAGFRLLQPNHQNHDNTNGTQQTGTGAPNYTGAGRKTTSTGAGAGVTGKIRLF

SEQ ID NO: 308887 - protein, 129 aa, Zea mays
  Clone ID: MRT4577_44772C.1.pep
MLVYQDLLSGDELLSDSFTYKELENGVLWEVEGKWVTQGPVDVDIGANPSAEGGEDESVDDTAVKVVDIVDTFRLQEQPPFDKKSFVSYIKKYIKNLTAVLEPEKADEFKKGVEGATKFLLSKLKDLQL

SEQ ID NO: 308888 - protein, 79 aa, Zea mays
  Clone ID: MRT4577_44773C.1.pep
RSPTPTVSDKRPGRLRRSRMRSSSTPTKPRPSSRGLARSSKRWVQFWIREAPRLSRLKKDTAGRYTTYANIPRERPPTQ

SEQ ID NO: 308889 - protein, 167 aa, Zea mays; identical to SEQ ID NO: 215747
  Clone ID: MRT4577_44774C.1.pep

SEQ ID NO: 308890 - protein, 58 aa, Zea mays
  Clone ID: MRT4577_44775C.1.pep
PVSNFCSLCSPKSKFVLQQIQCFRFKPLALCSSLHSCHAFLIIWLHHTVRGGLTLPLL

SEQ ID NO: 308891 - protein, 184 aa, Zea mays
  Clone ID: MRT4577_44776C.1.pep
MARRHIPVIRSRNDSLSSDGFEELGPRSMLPNARHLRYAVDGEVPDVLYTLNHVGVNRRFLGRLRSSKPFQNVTTYEIRQDETDEDGELVKKPIFEIVTTVCIEGRPDDHRRMAHPRRAAPQIDRPLTAAFENVDYRSDGYYTDEEQYVDPAGSPVADAPLMVIYSEHLINALRAWCRYYPTIT

SEQ ID NO: 308892 - protein, 80 aa, Zea mays
  Clone ID: MRT4577_44777C.1.pep
QELDRSRVHTSYQSPEAVDRASAQIMLRLFSFFKTPFVLDYKVNRATSARPAESCIVAGLDTSMSSNQCTNAWSQAPSRA

SEQ ID NO: 308893 - protein, 270 aa, Zea mays
  Clone ID: MRT4577_44778C.1.pep
FVVSGARTVEGYYDNLAAEGELDNKRSDSRTSEGVHEKWIGQIEKDLPRTFPGHPALDEDGRNALRRLLIAYAKHNPSVGYCQAMNFFAGLLLLLMPEENAFWTLVGIMDDYFDGYFSEEMIESQVDQLVLEELVREKFPKLANHLDYLGLQVAWVTGPWFLSIFTNVLPWESVLRVWDVLLFDGNRVMLFRTALALLEFYGPALVTTKDAGDAVTLLQSLAGSTFDSSQLVLTARMGYQSVNDTILQELSNKHRPPVISATATATATAT

SEQ ID NO: 308894 - protein, 92 aa, Zea mays
  Clone ID: MRT4577_44779C.1.pep
RSRKFSADAPPSSPPHPTFYPSRTFLRLHPSPPPLCPCLRDTRAQPHHPRQSPMLPHQRSLLTFPAHRDKSVHAMVWIRGWSPRLDPAGEGR

SEQ ID NO: 308895 - protein, 276 aa, Zea mays
  Clone ID: MRT4577_4477C.1.pep
MDRYQRVEKPRNDTPISQNEIRITTQGRMRNYISYGMSLLEENGHDEISIKAMGRAINKTVMVVELIKRRVGGLHQNTATESVDITDTWEPLEEGLLPLETTRHVSMITVTLSKNPLDTSSPGYQPPIPAEEVKPAFDYDHEESYPTGRGRGRGGGRRGRGRGMSNGPPPPAYGYNEEWEEEGDYYNRGRGRGRLRGRGGRGRGGYYGGGRRGGYGYDYGYAPRGGYYEEQDEYYDEPEEYAPPPGRGRGRGRRGGMPWRGRGGRGPPRGGRGSYY

SEQ ID NO: 308896 - protein, 424 aa, Zea mays
  Clone ID: MRT4577_44780C.1.pep
MAESRGFVMAAVMVVAVVSVAPRGAEAKTTIEPCSGSDSCPALLGYTLYADMKVSEVAALFAVDPAALLAANALDFGAPGAAHRILPMGLFVRVPTRCSCADGVRKSVSVRYAARPADTLATVSDVVFAGLASSDQIRNENGLTSADPDAPLDAGQKLAIPLPCVCFNSSDNNLPAVYLSYVVQVGDTVPAIAASYETTVTDVMNVNAMGSPVAAPGDILAIPLPACASTFPKSASDHGLIVANGTYALTASNCVQCSCGPGSLNLYCTPTSLSGTCPSMQCPNSDVMLGNVSTHPTGAGCNVSACSYGGFVNGTITASLTGGLQARCPGPRQFPALTEPPTTVSHDSTYLPPLSAPGPAEAGGVMPEPGSPGPGPSVQAGPFTLPKVSKANGPAGSVSAAPLVGKPLQILPVLVSCLAFYLQL

SEQ ID NO: 308897 - protein, 105 aa, Zea mays
  Clone ID: MRT4577_44781C.1.pep
RKRGRTRGCHPQQEQPERRHRNERDMGRERDRNYDRDRERDRDRERDRDRDRDRHRDDRDRYGDHHRHRDRDSERNEDWDRGRSSGKRSRSREADHSKRRRMTSQ

SEQ ID NO: 308898 - protein, 97 aa, Zea mays
  unsure (1)..(97): unsure at all Xaa locations
  Clone ID: MRT4577_44782C.1.pep
STASPSVPCPLEARGRTPSRPPRRSRAPSPAAPAPAPLPPRPRQIALGGARPXAPTKSRKPPFRPAVDDTKPVLRDPISRSDLAVTEQVVLRLPPFP

SEQ ID NO: 308899 - protein, 95 aa, Zea mays
  unsure (1)..(95): unsure at all Xaa locations
  Clone ID: MRT4577_44783C.1.pep
STASPSVPCPLEARGRTPSRPRRRSRAPSPAAPAPLPPRPRQIALGGARPXAPTKSRKPPFRPAVDDTKPVLRDPISRSDLAVTEQVVLRLPPFP

SEQ ID NO: 308900 - protein, 50 aa, Zea mays
  Clone ID: MRT4577_44784C.1.pep
ELPAKVPHNDQRVKSLFLTKPPFTRANNDRADNELPQPFTTEERPCAYPP

SEQ ID NO: 308901 - protein, 94 aa, Zea mays
  Clone ID: MRT4577_44785C.1.pep
TAGATPAPAPPKAQSPFGGNGQQQPLGTLWEGPRASPFRYSPKPNVKLLGPWSGPWGLKSTHSFMCVVDCHGPKGKDITEKGGVGPGVPSCLAE

SEQ ID NO: 308902 - protein, 55 aa, Zea mays
  Clone ID: MRT4577_44786C.1.pep
VYINALPRELLLKKKVFQGIHPSMDGYVRICVSRVSGNRAAKGGVVLYIFTFFGD

SEQ ID NO: 308903 - protein, 100 aa, Zea mays
  Clone ID: MRT4577_44787C.1.pep
YEKAAAWTFCDEPKPWRQAEEKRCRNEHEGKLRSPSSLHGHSNGWFNTLKKAHCICKQFCGTQFHFLRWVILSTTTLHCRNHTGGTINRQLYKNARAINC

SEQ ID NO: 308904 - protein, 58 aa, Zea mays
  Clone ID: MRT4577_44788C.1.pep
IEAFLRYYGSYFQVFEVPKFMDTFNPSVIIDNMCANSSFGGLLNILNPASEFSQRLFN

SEQ ID NO: 308905 - protein, 154 aa, Zea mays
  Clone ID: MRT4577_44789C.1.pep
STVAPRASTFRAGHRLGHMCIAPSTAMMSSASVQCHVRSSCLGAAVPIVLDSASSLLDAHLGPAIVNPTVRAMMVSVVVTVVADSRQFLWLRLQACPTRSVLLPLILWGITYSSGVCTADPCNGCRQRMYVFASVMCAPLCISTSRPKASVDVI

SEQ ID NO: 308906 - protein, 151 aa, Zea mays
  unsure (1)..(151): unsure at all Xaa locations
  Clone ID: MRT4577_4478C.1.pep
ERRRHGYAALLLPRLEIMVVVLAMPCVAQAAAALIRGGTTCGLVVGIVLTAVLTSVLVALLLFLSLGITMGKLLQYREVHHEEGQEEYHWYQDLARRAXCLPRLGPLFEDLRGPPKYMRGGGGGKRRAEGGGPERRVIASEDENEGSRAPL

SEQ ID NO: 308907 - protein, 91 aa, Zea mays
  Clone ID: MRT4577_44790C.1.pep
LGWSSTESFAAGWIVPLFCVRPLSGFEVVYHVEAVGLYDERRLGFPVAEVASQGGSCSCSEPSRSDTLARAPFPFAGAEEQKKSPPRTRGS

SEQ ID NO: 308908 - protein, 127 aa, Zea mays
  Clone ID: MRT4577_44791C.1.pep
FVIKITLYYVMCTSRTRTTMMILWRNTTTTWIKTCITYIWMYSCMIIFTFFFFWRILQIFKLIKFSLGIFLIIPFITVVIVIFFFRSGVGTSEWVSDLTWCCGPPRVGVKLKSLPWVCGKERRQVVQ

SEQ ID NO: 308909 - protein, 75 aa, Zea mays
  Clone ID: MRT4577_44792C.1.pep
QFRGVCPIILSLSWMLQLCVMLTNNQLLTLLLHKFLYCLEKLINMGGPALIGSHSFTVTLGCVERPKALFYRWLL

SEQ ID NO: 308910 - protein, 81 aa, Zea mays
  unsure (1)..(81): unsure at all Xaa locations
  Clone ID: MRT4577_44793C.1.pep
NGPEIVGLAFWKCAPRFVLMLTHQEFVAVDKTAPVIXDFMSKFMSAPVLGAKEICAKLSPTVNLTVTSEEGIVGPQPPLSS

SEQ ID NO: 308911 - protein, 50 aa, Zea mays
  Clone ID: MRT4577_44794C.1.pep
IEKKAYSTKLLNKTQQILNPKSDQPRVNCLPITNEGTSDHHSSSHINLNS

SEQ ID NO: 308912 - protein, 138 aa, Zea mays
  unsure (1)..(138): unsure at all Xaa locations
  Clone ID: MRT4577_44795C.1.pep
NKKTTIATKINSLLILLALSTSLAHPTILPQYSQPPIPSLLPPYLPWGVAXTXKNPPLQPYXLQQPIPTTNIPLXPXXHQHSPTLSSLXSFXQTINTQQXNQLXLPXTNQXPPTNLTPYSHXQQXLSFNQLPTLNPPY

SEQ ID NO: 308913 - protein, 289 aa, Zea mays
  unsure (1)..(289): unsure at all Xaa locations
  Clone ID: MRT4577_44796C.1.pep
IGYIYNNKLIAAPRTDTNTPWVPSWSNAATTIRRRCSTLGIADAIHCHGGTATLTQIATKAALHPSKTPCLRRLMRALTVAGIFSVAKNSSDDDSDQHVYGLTPASRLLVGSSQNLAPTLSLILNNVFVAPFLDLGTWFESALPATDLPLFELSHRKNVWDVVGHDPSVSQLFNAGMVADTRFLMDIAVREXGDVFQGIRSLXVDVGGGXXAAAQAIXSAAFPAIQCTVLDLAHVVATAPACAGLXXFLLGDMFEAIPXANAVXLSGXMHDWXVTLECVTILKKTAEAI

SEQ ID NO: 308914 - protein, 365 aa, Zea mays
  Clone ID: MRT4577_44797C.1.pep
MGSIMEQRCNNDPQALLDAQLELWHSTFAFIKSMAFKSALELGIADAIHCHGGTATLTQIATKAALHPSKTPCLRRLMRALTVAGIFSVAKNSSDDDSDQHVYGLTPASRLLVGSSQNLAPTLSLILNNVFVAPFLDLGTWFESALPATDLPLFELSHRKNVWDVVGHDPSVSQLFNAGMVADTRFLMDIAVRECGDVFQGIRSLVDVGGGHGAAAQAISAAFPAIQCTVLDLAHVVATAPACAGLSFVAGDMFEAIPPANAVFLKWIMHDWGDTECVTILKNCKKAIPPRDAGGKVIIVDTVVGAGPPNLKNKETQVMSDLFFMIVNGLERDEQEWRNIIFEAGFSDYIIIPVLGVRSIIELYP

SEQ ID NO: 308915 - protein, 76 aa, Zea mays
  Clone ID: MRT4577_44798C.1.pep
MSSGGCSTCLEVIFAAILPPLGVFFRYGCCSSEFFVSLLLTLLCYVPGVAYSLYVILRTPPEPPGIDGERPYDMLA

SEQ ID NO: 308916 - protein, 227 aa, Zea mays
  unsure (1)..(227): unsure at all Xaa locations
  Clone ID: MRT4577_44799C.1.pep
IRARGDDMRHSEMFSSCLSSEHFEKSIISPATASSLNMHHLKAKCENIHLDLQTYPKNVRLKASIAQIKLDEYYHAGNNISDDSNLGNHFLNNNLRQGVQASLPQCLFAVGDHSVETYEFCGNSSTELTRVELLKTFGECTFCYDVSTKDQDGNLVSSTSMSIYLAPLLLWVHFHTIYMLLSXVSNVESDLSHGEHKIQKHGDEXGSRLTTSTTMSSSGSPKVQISL

SEQ ID NO: 308917 - protein, 261 aa, Zea mays
  unsure (1)..(261): unsure at all Xaa locations
  Clone ID: MRT4577_4479C.1.pep
MDRYQRVEKPRNDTPISQNEIRITTQGRMRNYISYGMSLLEENGHDEISIKAMGQAINKTVMVVELIKRRVGGLHQNSATESVDITDTWEPLEEGLLPLETTRHVSMITVTLSKKPLDTSSPGYQPPIPAEEVKPAFDYDHEDSYPTGRGRGRGGGRRGRGRGIRNGPSPPAYGYNEEWGEXEITIIEGVXGRSRGRGRVRGGYYGGGRRGGYSYGYGARGGYYEEQDEYYDDPEEYAPPGRRGRGRGRRGMPWRGRGVYY

SEQ ID NO: 308918 - protein, 93 aa, Zea mays
  Clone ID: MRT4577_447C.1.pep
STPCMIPLHHVLNPRINQFYKSSSQMLDGRHLPPTCGLPTWGAFTNLKLLSRDAPGLFNLSTLGAQNGRQCVFGQRLLPLGVLAKKGLHELVR

SEQ ID NO: 308919 - protein, 109 aa, Zea mays
  Clone ID: MRT4577_44800C.1.pep
IGYLEAGRAGATASVKSNAQMASFSTGKWALRALSQSLAREFGPQGVHVAHAIIDGVIDIPKTKEWLKDMPPEAKLSADGIANDYWWLHTQPVTNFTWEIDLRPAIEKW

SEQ ID NO: 308920 - protein, 97 aa, Zea mays
  Clone ID: MRT4577_44801C.1.pep
RVRRSSGSRVTRILDARTAPMRCPCARRGDPYKSGLSNLQEEYQAIRDERDEHAYVDMDTRGPRLSRCSRSTSTGSLCDRIDAGLEGNEDEVKLIEL

SEQ ID NO: 308921 - protein, 142 aa, Zea mays
  Clone ID: MRT4577_44802C.1.pep
GGWARATARTERQSGARSCAQGEECHPGRARDDLAEDARWRGRSRGRGVASCQNDGRIQAGGRGARGARRCQGTRHRGEIEQGAMEKETGHRAKAISRRCRAGGTRGWGSSGRGRAPWEGTGGRGIGAGARTEFNDDRHGRT

SEQ ID NO: 308922 - protein, 111 aa, Zea mays
  Clone ID: MRT4577_44803C.1.pep
LSVATRERKRESAAIESHHPHRSAPVTWFWMFRRVRGSRSGKKLEARGPRVRGILCVVESPPRDRATAWAGESSPLTEEKNRCSRRSLTMKNMSSSRWCLPVNLLAPRINM

SEQ ID NO: 308923 - protein, 79 aa, Zea mays
  Clone ID: MRT4577_44804C.1.pep
KELRKNSFMVLIPEDECAEVEEDGDEEEGGSPREWLESGVGDGFPLCGFDSLYDKYCESMLVFHKMIAQLMKDPGKKCS

SEQ ID NO: 308924 - protein, 73 aa, Zea mays
  Clone ID: MRT4577_44805C.1.pep
HHVRTCMDLSPLRQPPFFFFFVFGCVFSFFFFFSRGVRLVARLFVFVARFVRMPKAAITAGWKLRGLRASVTG

SEQ ID NO: 308925 - protein, 117 aa, Zea mays
  unsure (1)..(117): unsure at all Xaa locations
  Clone ID: MRT4577_44806C.1.pep
MEIASFLSVALALAALGPGSLLLVNRLLYGKLPPGPRRRSEVGNLFDEQPVRGRCYQEGESRLGANMTESLMTSPSVQESTTKLXKEMIENPEDLLDHQDPFFFFLHPPPVHCSPHQ

SEQ ID NO: 308926 - protein, 59 aa, Zea mays
  unsure (1)..(59): unsure at all Xaa locations
  Clone ID: MRT4577_44807C.1.pep
QPISASGCIVHAINQLGTGYAXRYYRHWRRRSRRCGWRRRDGELTKRWLRFVIAEAGVD

SEQ ID NO: 308927 - protein, 68 aa, Zea mays
  Clone ID: MRT4577_44808C.1.pep
ALENRLADTILHSLDGSLKPKDLTAQLANAQAILQSCKRAFTATARCSTPTAPKWRLLWLSRTIYPHL

SEQ ID NO: 308928 - protein, 57 aa, Zea mays
  Clone ID: MRT4577_44809C.1.pep
VGYGPTMVSDGSPRIGVIYLRGSIIHGYHNLRKSRRSANYPVWKRAGSGNKYRCRAR

SEQ ID NO: 308929 - protein, 276 aa, Zea mays; identical to SEQ ID NO: 308895
  Clone ID: MRT4577_4480C.1.pep

SEQ ID NO: 308930 - protein, 64 aa, Zea mays
  Clone ID: MRT4577_44810C.1.pep
LNEINSPLSKKKPRAGCAGAGQAQQASCSSSSSARPSVNKVAGQAEFTIDRLKAGRILVLVESA

SEQ ID NO: 308931 - protein, 347 aa, Zea mays
  Clone ID: MRT4577_44811C.1.pep
MSTRAAGSALLRHLGPRVFGPVFSPAVAPPRPLLALAGGGERGGALVWVRVRLLSTSAAEAKEEVAASKGNSGSTAAAKAEAVEAAKEGDGKRDKVVSSYWGVAPSKLMNKDGAEWRWSCFRPWEAYKPDTTIDLNRHHEPKVLIDKIAYWTVKLLRVPTDIFFQRRYGCRAMMLETVAAVPGMVGGMLLHLRSLRRFEHSGGWIRALLEEAENERMHLMTFMAGAKPKWYERALVLAVQGVFFNAYFLGYLISPKFAHRVVGYLEEEAIHSYTEYLKDLEAGKIENVPAPAIAIDYWQLPADATLKDVVVVVRSDEAHHRDVNHFASDIHFQGMQLKETPAPIEYH

SEQ ID NO: 308932 - protein, 84 aa, Zea mays
  unsure (1)..(84): unsure at all Xaa locations
  Clone ID: MRT4577_44812C.1.pep
MAPTSKLFIDIGRASQXHAYHRRGLWAIKAKNGVAFAKADXFFTSLKQKFYLVYHFKPLVLITYKPKPTNLMSSITPGTFLILL

SEQ ID NO: 308933 - protein, 92 aa, Zea mays
  Clone ID: MRT4577_44813C.1.pep
MAAGALVLALVAALAVALAGANSEGDALSALRRSLRDPGGVLQSWDPTLVNPCTWFHVTCDRDNRVTRLDLGNLNLSGHLVPELGKLEHLQY

SEQ ID NO: 308934 - protein, 80 aa, Zea mays
  unsure (1)..(80): unsure at all Xaa locations
  Clone ID: MRT4577_44814C.1.pep
MDGGVRRLTDGELIDTMLSWSPVVXLIAFSTYRYVLANLAVRSSYLDRLDGSGLRCAYAVLALGIAEVDKERINHVCFIP

SEQ ID NO: 308935 - protein, 65 aa, Zea mays
  Clone ID: MRT4577_44815C.1.pep
SSVPHTSLLLLPVLPWSDGVRGLVISRTTRRPTWPREVEALARQFLQNPYKPSSLALRLVRISRL

SEQ ID NO: 308936 - protein, 95 aa, Zea mays
  Clone ID: MRT4577_44816C.1.pep
VFVAIWFVQVYYSGKKNMGWKCAGLVVAAVRVRYGVPNFGLLRSSTCLSAGCCVCCCSQARRACRRVLPFTCVVSGRPLSFLRGTCQVVSTTFFR

SEQ ID NO: 308937 - protein, 42 aa, Zea mays
  Clone ID: MRT4577_44817C.1.pep
SLIRHPAYIYASVYVVGMERTFTRTAMPYPSLKLQERDAQAG

SEQ ID NO: 308938 - protein, 64 aa, Zea mays
  unsure (1)..(64): unsure at all Xaa locations
  Clone ID: MRT4577_44818C.1.pep
GRVXKKKKKKKKKKKKKKKKKKKKKKKKKKKKKKKKKGGEVVGRSKFNVRGLAKVFFFFLGSLK

SEQ ID NO: 308939 - protein, 133 aa, Zea mays
  unsure (1)..(133): unsure at all Xaa locations
  Clone ID: MRT4577_44819C.1.pep
LLPXPCXPCLLPGPCXXVPPSSXXLLPLLLLXGVVVVGXRVVXVPVVXGXVXXGXXAXXXXGAPPAXGRXGRXGGXGXXLXPPLPXXRRLRAAPRXXGXGVLGRRPRXRXRLRGPAAPAWXGLQTXVGGGGVG

SEQ ID NO: 308940 - protein, 49 aa, Zea mays
  Clone ID: MRT4577_4481C.1.pep
LLVYSAYLAICGLTWWLVSCILLCIAQIALFGFIYASVHINFSLIPKNK

SEQ ID NO: 308941 - protein, 67 aa, Zea mays
  Clone ID: MRT4577_44820C.1.pep
LKAIPSCMNKEGVNITKGHIGEKLEPQTLEIYEPKDDSKQDYIDDESVQEYFIKADDAATRDRPDQQ

SEQ ID NO: 308942 - protein, 222 aa, Zea mays
  unsure (1)..(222): unsure at all Xaa locations
  Clone ID: MRT4577_44821C.1.pep
IGYLEAGRVLVQNESLMCNSRCLLYILQLCMIPASXLLEVVFDHVHYSSXTKLIIMXAFIGXVAPCTNTDVSATARGLIAARIPVCSTAFQQYYVHFLQRKYSLKSFYLLGHXSSIQNMSLLLKLPFAYYLLTGKTVEQVRLSSLGLLFLALSCFIXIGGNLSQFICITGFSCRSFQGLGHMXKTELVQTLELLVFLKHRLNLQTLHVMNLNDLKMIWYSNS

SEQ ID NO: 308943 - protein, 156 aa, Zea mays
  unsure (1)..(156): unsure at all Xaa locations
  Clone ID: MRT4577_44822C.1.pep
MAAAAPAACKGKRKRHLSEDDVWLLLHRYHPGTILTALQEVAQHADGRRIDWEGGXWAKSAPRGSPPXREYQMLWRHFAYHHDVDESVDADDQPLDDDSDLELELEPDPNLTKEALCEASALAKALISGSSQASGHRINLDTHVLNPEMRDSAGSI

SEQ ID NO: 308944 - protein, 157 aa, Zea mays
  unsure (1)..(157): unsure at all Xaa locations
  Clone ID: MRT4577_44823C.1.pep
QSTIVXPTMDSHKYVVASLXXPWCLSLQVXCYPATPXXRLQWXSQXLXXXXXLFLSLSXTXXHXXRVCGGVSGXXTQXXFNPYRXSNQXQSPVWHXXTFYXTPCXPPTNHSVPLLHSCYPLXVHVTWGTKXIRAHTNYQQPLCLADTSAALLFSATA

SEQ ID NO: 308945 - protein, 69 aa, Zea mays
  Clone ID: MRT4577_44824C.1.pep
GMIPQQRGRRTEDQLEPKSADYSHNYRIKGTTIDRATLGCIHKSEFHRDPIGMTSVGCLSHEHAHTLPA

SEQ ID NO: 308946 - protein, 92 aa, Zea mays
  Clone ID: MRT4577_44825C.1.pep
EKKKRFRRGLAPNSFRFRSKSNTWPGEKPANLKRVSNYKGLEDLCRNYLWEKEFSQTVVKNPLWAFGCKKMLFVLVLKNKKKKKEKKKEKKK

SEQ ID NO: 308947 - protein, 70 aa, Zea mays
  Clone ID: MRT4577_44826C.1.pep
WIIRKMDAWARVGTGEMEINKGRMNLKINQTTKRKWAGFLFFLKKKKQGPRGGKGFLFSSSSKQANCDHG

SEQ ID NO: 308948 - protein, 103 aa, Zea mays
  Clone ID: MRT4577_44827C.1.pep
EKINGRGLYSYFRAGGTKGAHLSPGFGERVNPWFPPLTKGGKLPRPWANLGPMGNGRGPPRGPTGGPWSSPPGSGKGNEKRPFLTKKPRISAGIFLPNSPGNT

SEQ ID NO: 308949 - protein, 70 aa, Zea mays
  Clone ID: MRT4577_44828C.1.pep
SLVLGRALICTVESTVYRVNFEMGSGIGRLLETALMHIRIHFGLDVFAVAKICLFYQFCICFAALVILSV

SEQ ID NO: 308950 - protein, 592 aa, Zea mays
  Clone ID: MRT4577_44829C.1.pep
YMNSAIQCLVHTPQFTMDFCEDYHREINRQNPLGNVGELALAFGELLRKLWAPGGRAPVSPRPFKMKLSRFASQFSGYNQHDSQELLAFLLDGLHEDLNRVKHRPYINSGDADGRSDEEVADEYWANHIARNNSIIVDVCQGQYKSTLVCPVCGKVSVTFDPFMYLSLPLQFASTRSVTAVVFSCDGSVPPTPFTVNVPKQGRCRDLLQALGAACSLKNGEKLLIAEIRNHKIYRFIDDPVLQLSTISDDDHLAVYKLPKLEKRVNYIQFVHRHEDLDHGNNNSLTSWKPYGVPLLAQISCNEIVTGFDIHELVHKMLVPVLRNPDSLHLAVQSSVFTRTHSYHTDSIKCQLLLVDDSNTVIEKSNDAIRIPQSSLATVFFINWPKADLKKIDTHHLEYLPEVFMYAPPAKRTRGEALSLYACLDAFLREEPLVPEDMWYCPRCKEQRQASKKLDLWRLPEVLVIHLKRFSFSRSTKQKLETFVNFPIHDLDLTNYIANKKTSERQIYELYAVSNHYGNMASGHYTAHIKLVDENRWYNFDDSHVASIDEDEVKTAAAYVLFYRRVREQDIARGTSNGSQLYAKRSHGYSHR

SEQ ID NO: 308951 - protein, 468 aa, Zea mays
  Clone ID: MRT4577_4482C.1.pep
MPVQTPLPLDGMPLTAMEYRSFFENPDMKPEAQIIMKLQDLDGWKYFGRNMFWLGVIGGGLILLHLLTLLYFKLRYRDRERRRHGYAALLLPRLEIMVVVLAMPCVAQAAAALIRGGTTCGLVVGIVLTAVLTSVLVALLLFLSLGITMGKLLQYREVHHEEGQEEYHWYQDLARRTLGAGKRGQWTWKDPRRAACLPRLGPLFEDLRGPPKYTRGGGGGKRRAEGGGPERRVIASEDENEGSRAPLVQQLLGVLRIYLTLLESVKRVAVGIVAGAHASSGRSSRAHAVAVLSVASFQLLFMLLGKPFVKKRVQLVETLSVASEVAVFAACLALIDRTASSGGWLPDGEARGVGLAMLGAFVLGFAAQVCNEWNALYRQARLLSADRSSFLDGAKTAGLGLLVLVLPSSALGDHRDPPPPDGGGGAGESVSASTAADGGRGGSSNNERWWLGQLREMAKASFSKESNA

SEQ ID NO: 308952 - protein, 83 aa, Zea mays
  Clone ID: MRT4577_44830C.1.pep
SLKTNDTLPFCLNAGVKANLAPPHPFKSSIQSEAKFWADKKNFGTEAIYGSALNIRKVLYAKILLRFQRPLEAWQLFLLDMRH

SEQ ID NO: 308953 - protein, 162 aa, Zea mays
  Clone ID: MRT4577_44831C.1.pep
DAWADAWADAWADAWVVVLKTVAICQYGVHNVTADYIMKCDDDTFVRLDIVLHQISTYNKTSPLYLGNLNLLHRPLRRGKWAVTYEEWPEAVYPPYANGPGYVISAGIARDVASRHTNHSLRLFKMEDVSMGMWVEDYNASAPVQYVHSWRFCQFGCVDNYF

SEQ ID NO: 308954 - protein, 67 aa, Zea mays
  Clone ID: MRT4577_44832C.1.pep
ALELHYGKHLLCPVCVVLSSHLHARIKQEFQVSRVRSCSETGCRCIYPCIVCKQGLQIVYSNVFIPK

SEQ ID NO: 308955 - protein, 83 aa, Zea mays
  unsure (1)..(83): unsure at all Xaa locations
  Clone ID: MRT4577_44833C.1.pep
LRFPFWENKLPNIEIIVADISKFEXIQFGVLLCFGYFAMALYXHMKNYKSLLKKISRWMKEDGLLFVHLFCHKTFPYHFEVED

SEQ ID NO: 308956 - protein, 418 aa, Zea mays
  unsure (1)..(418): unsure at all Xaa locations
  Clone ID: MRT4577_44834C.1.pep
LFCVPQVQVTRSPPPPVPGPXIRMGRPYPQXKGRRRTREAAIVGSALAGAIALLAVIVVAWVVLRRRYRRRDDEDDEDGLGEVPGMMTTRFTFEQLRAATEQFSKMIGKGGFGSVFEGQVGDQRVAVKQLDRXGQGRREFLAEVETIGNIHHINLVTLVGFCAERSHRLLVYEYMPNGSLDRWIYSSAAAAADTTPLDWHTRRRVITDVARGLAYLHEECRQRIAHLDIKPQNILLDDGFGAKISDFGLSKMIGRDESRVVTRMRGTPGYLAPEWLTSQITEKADVYSFGVVVMEVVSGRKNLDYSQPEDSVHLISVLQEKARDGRLEDLVDARSDEMRGLHREGVIQMVKLAMWCLQVDYNRRPQMSVVVKVLDGAVDVETGIELNFVATVPDSLANNGGNLASSTPLLASHLSGPR

SEQ ID NO: 308957 - protein, 115 aa, Zea mays
  Clone ID: MRT4577_44835C.1.pep
LEGRCKPHDLGSDQRVGHIRSCCHEIQDPWNAALHPMSLCQRSTVHTRGQAIRRCSVIAALWHVIVHLYREVMRDESSWSLLSAAERPRHVCLEFPLLRLDSTSPCNRAGSTLIG

SEQ ID NO: 308958 - protein, 79 aa, Zea mays
  unsure (1)..(79): unsure at all Xaa locations
  Clone ID: MRT4577_44836C.1.pep
REQPSXEAGGLPPEXVGRGVSARTGPSLSPPAWRVEPRRPDPSHPGAARVGCLGISPNRAVTPSKANQARADTPSTRPA

SEQ ID NO: 308959 - protein, 338 aa, Zea mays
  unsure (1)..(338): unsure at all Xaa locations
  Clone ID: MRT4577_44837C.1.pep
MAVASTSPLSAKPATAPSPPAPGSGLLALGVRRAPATAAWRRLRVEAIRTQRTEVPVEESAPARDAAAAAPLDXTEPERTAXVPSSDDSWVVKLEQSFNIFATDSVIMVLKGVYGDRYYARFFALETIARVPYFAFISVLHLYATFGWWRRADYIKVHFAQSWNEFHHLLIMEELGGDSLWFDCFLARFMAFFYYFMTVAMYMLSPRMAYHFSECVERHAYSTYDEFLKLHEEELKRLPAPEAALNYYMNEDLYLFDEFQASRTPGSRRPKIDNLYDVFVNIREDEAEHCKTMKTCQTHGNLRSPHSTPNCLEDDTECVIPENDCEGIVDCVKKSLTK

SEQ ID NO: 308960 - protein, 121 aa, Zea mays
  unsure (1)..(121): unsure at all Xaa locations
  Clone ID: MRT4577_44838C.1.pep
PKSKSPHPPIYLWGFYVHLRRQVQLIPXPPSTISFSLLSFPAKPTITSTTISTPSPRPSRSTHVHFLYYARCLLLRLRASSQYPTTSSTPRSLPSYYFHNLIYYPNYFRIFYTTLFVLYHS

SEQ ID NO: 308961 - protein, 94 aa, Zea mays
  Clone ID: MRT4577_44839C.1.pep
ERVLALHLVVMLFRDIRNVVVTTDLRVHTCDLHHSSKNTIQPTNQPKEIKKSTDTNSSQLVKNRSESQDAGSSRKFSQTPLSSRMMTLSRVLRR

SEQ ID NO: 308962 - protein, 417 aa, Zea mays
  Clone ID: MRT4577_4483C.1.pep
MDWSTRFRTRNPSPAVSHFAGHRRSQADRVFLRTMASAAPVEEPTAAAEAKGRLTGDSFIRRHLRTLAPYQPILPFEVLSARLGRRPEDIIKLDANENPYGPPPEVAAALGSLKFPYVYPDPESRQLRAALAEDSGLESDYILAGCGADELIDLIMRCVLEPGDKIVDCPPTFTMYEFDASVNGALVIKVPRLPDFSLDVDLIVEVVEQEMPKCIFLTSPNNPDGSVINDEDLLKILDLPILVVLDEAYIEFSSLQSRMAWVKKHDNLIVLRTFSKRAGLAGLRVGYGAFPLSIIEYLWRAKQPYNVSVAAEVSACAALQNPTYLENVKNLLVKERERLFNLLKGIPFLKPFPSHSNFILCEVTSGKDAKKIKEDLAKMGVMIRHYDKKELKGYIRISVGKPEHTDALMKGLNALRL

SEQ ID NO: 308963 - protein, 60 aa, Zea mays
  unsure (1)..(60): unsure at all Xaa locations
  Clone ID: MRT4577_44840C.1.pep
GGLENTCLKTWGGQQDKVNLAQHVVXVRAKANFLAEVGKYTSDGEVAQAKEVMLVKKYRC

SEQ ID NO: 308964 - protein, 221 aa, Zea mays
  Clone ID: MRT4577_44841C.1.pep
MSRGGGTTLYVTGFGHGTRARDLAYEFERYGRLVRCDIPAPRSASSRLFAFVEYESRRDADDAYHEMHNKRIGRDDLLKIEWARTPPSASWRFDSGRDRPRGERSERGGDRGDRSDRGDRADRGVRSPRRRSTSPRRERGASPRKDDRRERDYDRRDRDRSRSPIDGDREMKDVRDREDDRGDRDRGDREERREREREAEPPAEPRRSNLLRLRLMTTGRS

SEQ ID NO: 308965 - protein, 94 aa, Zea mays
  Clone ID: MRT4577_44842C.1.pep
VVARPARRSRLRAVAAPPLGRPALPLLGWPCLPPPSWAWPSWSPRRFACCCFLLRLCCGRAPLLPSASGGGRPSAGGLRWRPGASPSCAPRWSG

SEQ ID NO: 308966 - protein, 54 aa, Zea mays
  unsure (1)..(54): unsure at all Xaa locations
  Clone ID: MRT4577_44843C.1.pep
KIREIADGLCLEVEGKMVXRTAGXAINNSLIXGNAYAEGPDGVGTESTVVTGVD

SEQ ID NO: 308967 - protein, 66 aa, Zea mays
  unsure (1)..(66): unsure at all Xaa locations
  Clone ID: MRT4577_44844C.1.pep
MHRHRMELLTAPTVAELLLLFWSSAYGGDAXARAMLSTYQDACTDMKVPARDLRARMTVAEKAGQI

SEQ ID NO: 308968 - protein, 151 aa, Zea mays
  Clone ID: MRT4577_44845C.1.pep
MSGLSRPLLLAVGCLAALCVITAAGNTTLAPNVTTASSPPPTTTTVPVSPTTLSPLPVTTPAPDICGSRNSCVSCVDGNATCFWIECKGKSYCSDNSTAGDCKVVNTTGFCSVPTTTPTPTNSTAKTTTLPSTTTTSTTATTSGTTNTTLS

SEQ ID NO: 308969 - protein, 55 aa, Zea mays
  Clone ID: MRT4577_44846C.1.pep
PRPQLMVYGSDSGLPTTPKQLNHSLIMTTSHTDYYPAIYMPLEQANGIDRLLLIY

SEQ ID NO: 308970 - protein, 101 aa, Zea mays
  Clone ID: MRT4577_44847C.1.pep
GPSKLGEDKNGLPYLPPGRGLELQALKKLPGLIGIKTNQGRDKNPGLNQIFTGFFCTGTHTHGGHEPPNSRDWAIRFRFRFNSGGGPNGFIAPFPCKPTGG

SEQ ID NO: 308971 - protein, 220 aa, Zea mays
  Clone ID: MRT4577_44848C.1.pep
MAEEKKRHKHKHKEKEKQPGGGTEQAAHFKPCGDVKGIRFGGQFIVKSFTVRRASPLELLRLLGIPPSYLSECQSLPFPSTTAYMPTGFTILAHQAWHTLTLGLGTNKSKAALFVFESEAMKAAVDRLWPAVTPLGDVNRRLIRGLTGSEMARFKFRKGCLTIYVYAVRRLGAAGFMRTDDLRRVLQSVVELKDFLDHTAMLAIPSQKSITLQSRTAVAH

SEQ ID NO: 308972 - protein, 88 aa, Zea mays
  Clone ID: MRT4577_44849C.1.pep
DLDAPSVIGELVPIPPYEESFSCRRPGIHAIGTVPCYFDVGGVRPELDVGYEVAEGLDIVSWRALLAATGDSWVGGAVDPARVEHGKV

SEQ ID NO: 308973 - protein, 81 aa, Zea mays
  Clone ID: MRT4577_4484C.1.pep
PRVRSNKKSLSPAEQDQQVLKMTTTALDNCFLVPNLDDLMPKHEQIEYHQADDYPATYDPHIASDSPEENNHHLGDVSETL

SEQ ID NO: 308974 - protein, 66 aa, Zea mays
  Clone ID: MRT4577_44850C.1.pep
PGVFFLPGGAPVWFFPSGPPRGGLIIKIGGVFRFPQKKKKKKKKKKKKKKKKKKKKKKKKKKKKKK

SEQ ID NO: 308975 - protein, 54 aa, Zea mays
  unsure (1)..(54): unsure at all Xaa locations
  Clone ID: MRT4577_44851C.1.pep
KDAFHLWVRVXPFHVLRINKMLSCAGADRLQTGMRGAFGKPXGTCSKVDNWQVL

SEQ ID NO: 308976 - protein, 85 aa, Zea mays
  Clone ID: MRT4577_44852C.1.pep
MWSSEMGRRSRRTNGMVAEPQTTQLLLHGVIEATILEADLSVTTDGKLQPTKKTLMKKKVFSWIRKLTFCRNQHSLIRHRSRTTA

SEQ ID NO: 308977 - protein, 119 aa, Zea mays
  Clone ID: MRT4577_44853C.1.pep
RRRTQSAYPSTLSPSDLSRSYRAEQLLSYSGIEMWSRERAHPLPFQSYSDNYPQGMNADPARTRSWSHEEKVPSTRAQRRGQEHIDKAFVAFLRIDNDHTGRQRVLDGPRRCMWELDMH

SEQ ID NO: 308978 - protein, 59 aa, Zea mays
  Clone ID: MRT4577_44854C.1.pep
PRVRRTVPPVFRSPSLPRALRSLSRGARKSYTTYDHIYCLNNNHTALLIHMNLTLPVPL

SEQ ID NO: 308979 - protein, 131 aa, Zea mays
  unsure (1)..(131): unsure at all Xaa locations
  Clone ID: MRT4577_44855C.1.pep
TKTTHANKGAHLKKTPRYPPPPKKKTPPRGPPKKGKXTPGHPPXPQCENKGKGHRDPPGTPHPKPGRGKPXGPTNPKGAPKGPKXQMGGEKSQNPRPXKGTPEVSPTHGGGDKPKKKKRGEAKTQKGQKNT

SEQ ID NO: 308980 - protein, 50 aa, Zea mays
  Clone ID: MRT4577_44856C.1.pep
GTEFMLDSSTDGTAAMANAYVEKRALACTWEAIENQTPMSALEPYESVPE

SEQ ID NO: 308981 - protein, 56 aa, Zea mays
  unsure (1)..(56): unsure at all Xaa locations
  Clone ID: MRT4577_44857C.1.pep
LPPSSCCQCATPCLINHTSSRGYFSEALCFLGAARFSPLKIPPKKKIKGGRRXVSS

SEQ ID NO: 308982 - protein, 33 aa, Zea mays
  Clone ID: MRT4577_44858C.1.pep
KYIYGFLINLISGALHILKLASPFLDIIHNIHS

SEQ ID NO: 308983 - protein, 110 aa, Zea mays
  Clone ID: MRT4577_44859C.1.pep
ASDAWADAWADAWDGYLKISCNGGLKHRRSEICYISANHSSIKLYHDYYLAFMQNGPSITTQVGAAPGRRGGGHTNRLSGERHAPHPGARLYVQLLRAHRAQRHGGVPGA

SEQ ID NO: 308984 - protein, 169 aa, Zea mays
  unsure (1)..(169): unsure at all Xaa locations
  Clone ID: MRT4577_4485C.1.pep
GLAGLRVGYGAFPLSIIEYLWRAKQPYNVSVAAEVSACAALQNPTYLEXHFYEXCNSSFHSLALPNLILLNLGPGQWKNVKNLLVKERERLFNLLKGIPFLKPFPSHSNFILCEVTSGKDAKKIKEDLAKMGVMIRHYDKKELKGYIRISVGKPEHTDALMKGLNALRL

SEQ ID NO: 308985 - protein, 53 aa, Zea mays
  Clone ID: MRT4577_44860C.1.pep
RPRVRCSWSVAWSIARPMLVRVSDLRNDAGAWLVVDIPRSALCMRYCSTTAYR

SEQ ID NO: 308986 - protein, 67 aa, Zea mays
  Clone ID: MRT4577_44861C.1.pep
LDSQEIGPILAVLARAPLSTNQSLISCTLQRFQEKKWLMIDNFHGSTTKATLIIIMHISFGRKRYLA

SEQ ID NO: 308987 - protein, 225 aa, Zea mays
  unsure (1)..(225): unsure at all Xaa locations
  Clone ID: MRT4577_44862C.1.pep
IFVQSHVRAHIELMWLLSSSTPIGWLNKMIQFKEKSRKAXSFAGNENVGVALLTYPVLMASDILLYQSDLVPVGEDQTQHLELTREISERVNNLYGGRKWKKLGGRGGSLFKVPEALIPPAGARVMSLTDGLSKMSKSAPSDLSRINLLDPKDVIVNKIKRCKTDSLPGLEFDNPERPECKNLLSVYQIITGKTKEEVVSECQDMNWGTFKATLTDALIDHLQPI

SEQ ID NO: 308988 - protein, 77 aa, Zea mays
  Clone ID: MRT4577_44863C.1.pep
NDLFIFFKAGLLIILFALARIIILLGISSVVTLSIVHFVLQSKNPELGLMLVGGKGPDEDLGTWRGATAAAAVAQSS

SEQ ID NO: 308989 - protein, 422 aa, Zea mays
  unsure (1)..(422): unsure at all Xaa locations
  Clone ID: MRT4577_44864C.1.pep
MASSSPQLKEPSSAVKRASTGPTALPERNKRKTSPSLPEASGATQQPAKRKPPLFQRAWSPGDEVRILEALATYRREHGGRLPTPVELFGALDGSLEKEGVGAKELAIKQRSLKRRYDRDVMKNAPPADKHERRLYLLSKHVWGRVPPTRPPVAKVRSATXRSAPAPKQATPLPKPKRRAXRPXSGKEALKPKAKTLDEMRELYPYLVDEATILVEPAVLERVLLNIEDIDAQVLDKKIRKARKQLADAITESARINNMEVPTIFLFTSSKLQPEKLRVENENNLLVDHLEKMDDVDICAKQRLARVEREVMELRQTVIAYQSQAKGIICESAKGGLQSIVAENQTPANILQKKTEVPNDLIHKKNAAVTSKYHCAVPHNVPPNKPKMQGVMLPPSKAFPGMPRKIDKSPTPRKAIWKGPIC

SEQ ID NO: 308990 - protein, 40 aa, Zea mays
  Clone ID: MRT4577_44865C.1.pep
AQQVCDHGRKIKLGLPPPSKISWRPALFISRRCRQHRPVD

SEQ ID NO: 308991 - protein, 191 aa, Zea mays
  Clone ID: MRT4577_44866C.1.pep
MAPSSPQLKEPSSAVKQASTGPAALPERTKRKTSPSLPEASGATQQPAKRKPPPFQRAWSPGDEVRILKALATYRREHGGRLPTPVELFGALDGSLEKEGVGAKELAIKQRSFKRRYDRDVMKNAPPADKHERRLYLLSKHVWGRVPPPRPPVAKVGSATQAKGAGAQASKADAQAQAQAKSADHQSQEAL

SEQ ID NO: 308992 - protein, 418 aa, Zea mays
  unsure (1)..(418): unsure at all Xaa locations
  Clone ID: MRT4577_44867C.1.pep
MTRTNWEADKMLDVYIYDYLVKRNLQATAKAFIAEGKVATDPVAIDAPGGFLFEWWSIFWDIFHSSTAXKPHPHPLPPPXDHTAKQQQPIGAGTGAPPPHPLHDSREHQMRLQQLLHQHNPHLHTTRDAPPPASINALNSDVSAVLASKMMQDRVRNPNPIDSDASQHLLDANRIALLKSPPPSHTGPMPMQQQLHPRNQQLDIKPDVGMPQRTMPADPSSMYASGMMHPKPALLATGLNQGGVGSVPLKGWPLTVPGIDQLRSNLGVQKQLVPSSNQFQLLSPQQQLLAQAQTQNDLTRMGSPAPSASPNVRPDDPDYLMKLKMAQMQQSSGHRPMELQQPHQQNTRKRKPTSSGAANSSGTGNTVGPSPPSTHPLIPLVVEYQWLAMLIFYRRVNDLWCGCNWWTCLILKPDGCFG

SEQ ID NO: 308993 - protein, 94 aa, Zea mays
  Clone ID: MRT4577_44868C.1.pep
DDVDICAKQRLARVEHEVMELRQTVIAYQAQAKGIICESAKSGLQSIVAENQTPANVLQKKTEVPNGLIHKKNAAVTSKYYCAVPHNVPPNKPA

SEQ ID NO: 308994 - protein, 83 aa, Zea mays
  Clone ID: MRT4577_44869C.1.pep
SPPFFHVVVCMADFRFFSWYFVVAVDTGRLSTPPPGPVGVVVPPPLCTAGGWSARGVGVPTRIIGLLYHQREVEALVRHCVGG

SEQ ID NO: 308995 - protein, 46 aa, Zea mays
  Clone ID: MRT4577_4486C.1.pep
GVPPSRRSKLSSPCFRSYTLNLIAPPFFYMPVFLQPLAWTNLVVCH

SEQ ID NO: 308996 - protein, 54 aa, Zea mays
  Clone ID: MRT4577_44870C.1.pep
KKRHFTILIYVCSSLEKKNVQYIINSCVLIINYDLKFLRFGFFLKSSQDNLFFY

SEQ ID NO: 308997 - protein, 268 aa, Zea mays
  unsure (1)..(268): unsure at all Xaa locations
  Clone ID: MRT4577_44871C.1.pep
MSTTEPLLSAGAEKKKGGKGRRVGIDEALSAHAGEFGRWQLRHFVAVSAAWALEALHTMVIIFADREPATLPVPCAAAGREWAGGGGSGAAASTVVEWGLVCGQRYKVGLAQAVFFAGCMIGAGVFGHLSDSFLGRKGSLQVVCVLNAAFGLLTALAPTYWAYAALRLLTGFSTGSVGVLAFVLATEPVGPARRGAAXXAAFYFFSGGIAALAGVAALLPRSWRLLYAATSLPSLVFAVAVVPFVSESPRWYLVRRRPDDALRVVRAI

SEQ ID NO: 308998 - protein, 198 aa, Zea mays
  Clone ID: MRT4577_44872C.1.pep
NVHLFELWQAFPYRKQALMVTPWPTTDLPKDLRSIKRFQNLQSLIRGIRNVRAEYSVEPAKRISASVVATADVLEYVSREKQVLALLSKLDVQNVHFTESAPGDANQSVHIVADEGLEAYLPLADMVDVSEEVKRLSKRLSKMQSEYDALVARLNSPSFVEKAPEDIVRGVREKASEADEKISLTKNRLTFLQSTITT

SEQ ID NO: 308999 - protein, 128 aa, Zea mays
  Clone ID: MRT4577_44873C.1.pep
MAALTSALLFAALLVAAQYVLRLLHSFLWVPFRLERRFRRQGIRWPPRSLVSGNAADYRDLLAAARSAPLSSFRHNGVVARATPQYAVWLARYGRPFVYWFGPRPRLVISDPELVKAVMTDFTGGFDK

SEQ ID NO: 309000 - protein, 44 aa, Zea mays
  Clone ID: MRT4577_44874C.1.pep
ETCLCCVGPGRNIARRTMAVLGVLYCVFNEMLVANAVRLKRSLF

SEQ ID NO: 309001 - protein, 191 aa, Zea mays
  Clone ID: MRT4577_44875C.1.pep
NSARGGHGDGAAFPRATNASLSFCGYNGTSCCNATDDAAVQKQFAAMNISGTPCGDVVKNVLCARCSPYAGELFTVTTAPRTVPLLCSTTGASSRLSSAAKPAAAAATATTDYCTQVWDTCKDVRVPGSPFQAPRGTAPSPAPRLTDLWQSAGEFCGSLGGAGRSPCLDGGGAAFNSTRPAALPFRGMCLE

SEQ ID NO: 309002 - protein, 256 aa, Zea mays
  unsure (1)..(256): unsure at all Xaa locations
  Clone ID: MRT4577_44876C.1.pep
MECNRDEAARAKALAERKMMDMDFVGAKKMIIKAQQLLQEVDDVDXQKMLTVCDVHSAAGAKVNTEIDWYGILQVPVNADDALIKKQYRKLALLLHPDKNKFGGAEAAFKLVGEANITLTDRSKRSVHDMKRTTFRSVTARPSHQPPKRPAPARSSSTPVNLHTMHQQHQYQASNPTGPQTTFWTICPACGMKYQYYLSILKKVLRCQNCLKSFIAHDLKDQAIPSGANQRSAGVWKNAGTPQNSAGPQSNVTGQK

SEQ ID NO: 309003 - protein, 85 aa, Zea mays
  unsure (1)..(85): unsure at all Xaa locations
  Clone ID: MRT4577_44877C.1.pep
VEGMGRSTSYGDFNYLAMDXXPRTTRLLRRRQPTVSGTVXHXXTXXSXDXXXRXXARTSTYKLPXRPDDRSDHNXFRRHSSQSRD

SEQ ID NO: 309004 - protein, 121 aa, Zea mays
  Clone ID: MRT4577_44878C.1.pep
SKYYIILKRFLEGNTQTFPRRQTKVFNTTKWLDWKHMHASGGNFFSSPRLFCPPLWGWKENLFQGGQNISCFGKKPLFVALKKNQCKNARLAYIRENLLWFRENTSTTLVEKERNTQDAEK

SEQ ID NO: 309005 - protein, 513 aa, Zea mays
  Clone ID: MRT4577_44879C.1.pep
MAALVPLLLAHLLLCVHGATVTSVATPPPLPVLPVPSYAQLRWQLSEMALFLHFGPNTFTDSEWGTGHADPSVFAPSALDAGQWARIAAQGGFGRVVLTAKHHDGFCLWPSALTEYSVAASPWQGGAGDVVAELAAAARAEGLGLGLYLSPWDRHEPVYGDTIAYNEHYLGQMTELLTRYGDVEEVWLDGAKGDAKKMDYMFDAWFSLIHQLQERVVIFSDAGPDTRWVGDEAGVAGYTCWSPFNKSSVTIGHTTAEYSSSGDPFGQDWVPAECDVSIRPGWFWHASEKPKNVTTLLDIYYKSVGRNCLLILNVPPNSSGLIADEDIQVLQEFTEIRRAIFSQNFAANATVTANSVRGEQDNLQFAPSKVLEDGIYSYWAPQEGQTCWEMLFDLGQSTSFNLLQLQEPIQLGQRVIEFHVAILVDELWQTIVEGTTIGYKRLLLFPVTESRYLKLTIDSARADPLISFFGVFMDPFSSIHSLQNHVKPPRTNSNEVTMLRMAHASVNKSIDAM

SEQ ID NO: 309006 - protein, 130 aa, Zea mays
  unsure (1)..(130): unsure at all Xaa locations
  Clone ID: MRT4577_4487C.1.pep
QVVQDIAKDCNDAPERSIITLCLTDMVRGLMLTLKYFFQRNVTINYPXEKAALEXRFRGECALRRYESGEEGCIACELCXAICPAQEITIDXEEREDXSRRTTRXYDIDVTKCILXCGFCQQAXPVDAIA

SEQ ID NO: 309007 - protein, 78 aa, Zea mays
  Clone ID: MRT4577_44880C.1.pep
IPSQKFHPWSRGGFFASKQIGYTKKPRVGQTLFAWGVLTLTGGLVHGDGGILPFFYSSQQGGPLGTFPVLCRALPQRN

SEQ ID NO: 309008 - protein, 63 aa, Zea mays
  Clone ID: MRT4577_44881C.1.pep
PLIILPPLLADHTHFSLKPSLLNFLHFKFQNSKAFSKAPKTHYTTYNECSTLCSTRPIHMHHN

SEQ ID NO: 309009 - protein, 59 aa, Zea mays
  Clone ID: MRT4577_44882C.1.pep
KVLNTQNLPLGKEGRLSGDLGRIDAHSMCSPGFSCESRYQVTFFLRGSGRLQVVGINST

SEQ ID NO: 309010 - protein, 63 aa, Zea mays
  Clone ID: MRT4577_44883C.1.pep
GKKGTLAIIMHNVKLQKRAMYEHDPSLNSQSCHYYTNHSGCPCVNYWQPHFNGKTVKTYTLPI

SEQ ID NO: 309011 - protein, 54 aa, Zea mays
  Clone ID: MRT4577_44884C.1.pep
LGFRYSGVHRVSQTVIRFLVGKNMDGWFHTSEHRTVGPGLPDSALPWLLIRRFF

SEQ ID NO: 309012 - protein, 252 aa, Zea mays
  Clone ID: MRT4577_44885C.1.pep
DLFAAFRGLLLHLWTLWELMVVGEPILVVAPSPAQCSEAVSALVSLVAPLLYSVDFRPYFTIHDPDFARLNVLAEGEVFPPMVLGVTNLFFLKSLKSIPNVVSVGSPNPYSTRVLPVGGQSPGNGMNGTPGKLKLEKLAINKFSPTSLLNSIKLRREGPLSLMTEHKEALWSTYSPTTKPDTSVLNRLIDAGVSPRIEESMSVVNNEILRRHFLELTTNFLAPFGPYLRTTTPSEGTSPFVDPPLLPPFHAD

SEQ ID NO: 309013 - protein, 89 aa, Zea mays
  Clone ID: MRT4577_44886C.1.pep
IINNGWGVQHLGTPHDHFTLERGGGLTGLLPIYTREQKAYNFNQAKKDLGSFKAQKRSMFIEYAGAFIRCKLYRAKPARWLLIAFEGAT

SEQ ID NO: 309014 - protein, 60 aa, Zea mays
  Clone ID: MRT4577_44887C.1.pep
DRCLRLAPAGTCKRIMYSKYRGLVEPLTLQQGTLKGPLKFREWHASAMYRGCMVILYALC

SEQ ID NO: 309015 - protein, 192 aa, Zea mays
  unsure (1)..(192): unsure at all Xaa locations
  Clone ID: MRT4577_44888C.1.pep
CHRRLQIQEMLRVIRQDADHKRNHISHSAQDQFNIXNVQVDVAEKYNIGLXYERQDNYAXIXKTSDYSMLLNVSRIKTLQAHDDPIYKMXNQGLNDLPCVIHDHHEYHNLVKELIIQDLLLFKDXASLVRXRKDDHHHVKXSLNSSKXEYASXADVHEPEXIFDDHDVYLTPAPSHHDAHAHFCSGGIALAS

SEQ ID NO: 309016 - protein, 41 aa, Zea mays
  Clone ID: MRT4577_44889C.1.pep
LLSLSCFILLGDPSNDSALNLSCLTMYRVLPVFYALSHIIV

SEQ ID NO: 309017 - protein, 89 aa, Zea mays
  unsure (1)..(89): unsure at all Xaa locations
  Clone ID: MRT4577_4488C.1.pep
MHGMGSQRRLLLLLALLLLTLVAGEGDGALSGAGSTATDDGAGGGDXSPPAGAPLDVRARKWWRFPATEGLVTGSERRVPNSSDPLHNR

SEQ ID NO: 309018 - protein, 89 aa, Zea mays
  Clone ID: MRT4577_44890C.1.pep
LSELSSLPAHSDIHSITSKMTSISTSYANTTEEHERKQPGRATEDQNNLPLLEHSPRRPPTLTTIDNINAQVGSGETQHNYTYPRRIYL

SEQ ID NO: 309019 - protein, 92 aa, Zea mays
  Clone ID: MRT4577_44891C.1.pep
FPQKTFISHYSPPLKTPPIRENWNPNRARPQIPGEHQASQFSSQNKKGFLGKVLYPLEITFFKKKKRGPNSFKFVPPHPPRKKKKIFGFPFY

SEQ ID NO: 309020 - protein, 68 aa, Zea mays
  Clone ID: MRT4577_44892C.1.pep
DGPVPISVFMVASVLKEKREKLLQEARGLDDLIRILNDVNGNLDAKKACAGALKLHKKYLKKVQEKKP

SEQ ID NO: 309021 - protein, 43 aa, Zea mays
  Clone ID: MRT4577_44893C.1.pep
MSLLGENLDMIIEEETFWEQRSHEKWLLKGDGNNEFFHRIVSG

SEQ ID NO: 309022 - protein, 98 aa, Zea mays
  Clone ID: MRT4577_44894C.1.pep
VGFPFHFCLHLYLMFFRSGSCLFVVLQDCSLIGFWILIHHDHLLSGFGFRCSLALLCRLPFCLAENLSLAHQKINRMFCFRLLFVLTSSHVQDDALTR

SEQ ID NO: 309023 - protein, 249 aa, Zea mays
  Clone ID: MRT4577_44895C.1.pep
RPPGVGKTTLIREIARILADEGKKRVIIVDTSNEIGGDGDVPHSGIGRARRMQVPKVTMQHNVMIEAVENHMPEVIVIDEIGTELEAMAATTIAQRGVQLVGTAHGVTIESIIKNPCLQMLVGGIESVTLGDEEAKKRKVQKTILERKGPPTFLCAVEMISKTECRVHHRLDATVDAILAGKPPKFEARKMHNKSTEFEMPLVIPDREYEIESLPLYQEVMVTRSLSSDGNFSDDFAASRQTKSKSMPS

SEQ ID NO: 309024 - protein, 135 aa, Zea mays
  Clone ID: MRT4577_44896C.1.pep
TLPYLDPSSNETGPRTKTCNRTTPNLSYKTTESSNPFVHRANDRLNCCHKTLYTPLGQSIDPLLIIVLLIECVIYNLAFLYVNNPRSSFRLVLNGGGRKSTRCGCGGGFFFFFFWLSDVVGCFVLVQWSGWRVSH

SEQ ID NO: 309025 - protein, 273 aa, Zea mays
  Clone ID: MRT4577_44897C.1.pep
KNVFISAIRFATCMETLFPRFLDDLKTSAQEQTDFMIHEDDETALVMMDEDVRSVVQEGITKLLSGLRTGLDLLATEFDQSPDQAEKGILCSLADIDWVANLSTKIEMTHAFVSGWSEISCHILSVVQDSKYSSGLWAVKAKLIEVTGKALDAVGYGTVVLPAPSRFHLLKTWLPYIQTTKRSLDGNSKGEMSLQMDSDMWQNVESAIVSMVLALPSDDQADILSEWMKNAEQFRYPDLTEAFEVWCYRSKTAKRRLVGGLNGSSSSNPTVSS

SEQ ID NO: 309026 - protein, 80 aa, Zea mays
  Clone ID: MRT4577_44898C.1.pep
SARRWRRPARSSTSPRPRPRDPVVRLSPGGRAKGFGRLSQGCKKKSPHKALVFEFGYEIRGLILGQVPSPVGLNRVGGLK

SEQ ID NO: 309027 - protein, 44 aa, Zea mays
  Clone ID: MRT4577_44899C.1.pep
RQLNLTAGEFRLFFPQPVLTLITVYLNCGLEMLQLLDSVDLIFC

SEQ ID NO: 309028 - protein, 54 aa, Zea mays
  Clone ID: MRT4577_4489C.1.pep
IKITYLLFTLKYLFLSNFITKECKNVLKATTKARTKHFFLMTVLQEKCTTNGNC

SEQ ID NO: 309029 - protein, 100 aa, Zea mays
  unsure (1)..(100): unsure at all Xaa locations
  Clone ID: MRT4577_448C.1.pep
NLPTXSTNPTXXXRPCYYFKNASATXHKXXXITFPSTIISSIPLFIYTLLPTLSXTTLSPSNTSILFXSSISSFNSPPISFLPLLLPPPTFTSPINSFPL

SEQ ID NO: 309030 - protein, 84 aa, Zea mays
  Clone ID: MRT4577_44900C.1.pep
MGFEYSAVQAYRLLIELSASSLQQSIAFLQLQSLAHLAYLQLPQLLPFNYLAGVSHLALVTHCRIVAVSTMHCCRNTQLGYSRC

SEQ ID NO: 309031 - protein, 114 aa, Zea mays
  Clone ID: MRT4577_44901C.1.pep
MGVVLEPLLRWIRQGVACCHDDDLLVGNATTWFLLDIACYSQSLASAVDDGLQRRGPIGGLTGGCEVGRRRSVATGGSASAWGPLTATASQRAGQSHLHLRHLVEKTPHRNIHA

SEQ ID NO: 309032 - protein, 108 aa, Zea mays
  unsure (1)..(108): unsure at all Xaa locations
  Clone ID: MRT4577_44902C.1.pep
MFGNIGKIPIIGDLTGSNKNAHLKGNVVLVRKTVLGLDVTXIAGSXLXDXVGEFLGRXXTCQXISFNELYXXSXNGLRLGAQASLICEGQPCSLVAQPGAARRRYVGP

SEQ ID NO: 309033 - protein, 55 aa, Zea mays
  Clone ID: MRT4577_44903C.1.pep
NETLDSLERAGSVWFIYFCKLQLYRANVCGTTNLQMISSPIATETGRLKLYGKDR

SEQ ID NO: 309034 - protein, 102 aa, Zea mays
  Clone ID: MRT4577_44904C.1.pep
PAVGKIGKESTLHLLLRLRGGMQIFVKTLTGKTITLEVESSDTIDNVKSKIQDKEGIPPDQQRLIFAGKQLEDGRTLSDYNIQKESTLHLVLRLRGGNSEEH

SEQ ID NO: 309035 - protein, 104 aa, Zea mays
  Clone ID: MRT4577_44905C.1.pep
FGSRGGRAPPHFLAGPHNGRHGRRDREGGPGTQPTNFHRPQPPGLHSLRGALQCGMLDPRRLIRSPEWRWRLTHNTGGQRRSADRRRNNCPRLRRREHGRVLPP

SEQ ID NO: 309036 - protein, 88 aa, Zea mays
  Clone ID: MRT4577_44906C.1.pep
ERVPLLDQSGCSWSIALYIMPTAGYQLRMSKGAPHLIMEEVTLTEGGQLPPDYVLKDPDSHFIYVCEKLEEKGTNCRDADPKESTNAN

SEQ ID NO: 309037 - protein, 218 aa, Zea mays
  unsure (1)..(218): unsure at all Xaa locations
  Clone ID: MRT4577_44907C.1.pep
MQGASHMLLEEPFRLASVLSPAKPKVFPSLTKIVGTLGPNSHSVGIIQECLTAGMSVARFDFSWMDAAYHQETLDNLRKAAQNVKKLCPVMLDTLGPEIQVHNSTGEPIELKAGNHVIITPDISKALSAEILPIKFGDLAKAVKKGDTLFMGQYLFTGSETTSVWLENAATLAGPIFTLHASQVHINLPTLSEYDKXVISXWXSCNSVDIISLSHTRS

SEQ ID NO: 309038 - protein, 50 aa, Zea mays
  Clone ID: MRT4577_44908C.1.pep
SRKINDHRTSSSHHGGVSTVDGLEDFAMGKPHSVHALNAAVSEISTAAPA

SEQ ID NO: 309039 - protein, 137 aa, Zea mays
  Clone ID: MRT4577_44909C.1.pep
DPLRGDCLPPPHCACACASFNTGRCPPHYLSALTRPTSRRGAVCRRTLLVTHHARAEEDHWAVGVITQHMLRTGAEGLQALTWIWVSLIMITEELHEHTPTETLGIQPTVLESRTLLLSENSVQIGVHMPQLQRMYC

SEQ ID NO: 309040 - protein, 46 aa, Zea mays
  unsure (1)..(46): unsure at all Xaa locations
  Clone ID: MRT4577_4490C.1.pep
SDYGLSKTGPSMDHTHVSAGVKSRYGYLDPXFFRMQELSVKSDVYS

SEQ ID NO: 309041 - protein, 541 aa, Zea mays
  Clone ID: MRT4577_44910C.1.pep
MQGASHMLLEEPFRLASVLSPAKPKVFPSLTKIVGTLGPNSHSVEIIQECLTAGMSVARFDFSWMDAAYHQETLDNLRKAAQNVKKLCPARVETQQKPQVKVQVMLDTLGPEIQVHNSTGEPIELKAGNHVIITPDICKALSAEILPIKFGDLAKAVKKGDTLFMGQYLFTGSETTSVWLEVVETSGENVNCLVKNAATLDGPIFTLHASQVHINLPTLSEYDKHVISTWGSCNSVDIISLSHTRSAEDVRELRAFLQAHALPDTQIYAKIENSEGLDHFDDILNAADGIIISRGDLGIDLPPENVFMFQKTAIHKCNLEGKPVIITRVVDSMIDNLRPTRAEATDVANAVLDGTDGILLGAETLRGLYPVDAVSTVGRICAEAETVYNQPLQFKKVMWHVGDPMPHEESVASAAVGSAIKVKAAAIVVFTFSGRAARLVAKYRPTMPILAVIFPREGSDPSKWRSYGTTQARQCFAVRGVYPLMGSTDEAETGGLTKEEYGIKLAMSYGRSVGIVKPFDRLIIFEKIGDSSVVKIIECEG

SEQ ID NO: 309042 - protein, 261 aa, Zea mays
  Clone ID: MRT4577_44911C.1.pep
MQGASHMLLEEPFRLASVLSPAKPKVFPSLTKIVGTLGPNSHSVEIIQECLTAGMSVARFDFSWMDAAYHQETLDNLRKAAQNVKKLCPVMLDTLGPEIQVHNSTGEPIELKAGNHVIITPDISKALSAEILPIKFGDLAKAVKKGDTLFMGQYLFTGSETTSVWLEVVETSGENVNCLVKNAATLAGPIFTLHASQVHINLPTLSEYDKHVISTWGSCNSVDIISLSHTRSAEDVRELRAFLQAHALPDTQIYAKIEILR

SEQ ID NO: 309043 - protein, 148 aa, Zea mays
  unsure (1)..(148): unsure at all Xaa locations
  Clone ID: MRT4577_44912C.1.pep
ILPQPLLSCAEFTQIILAVITCYLGALQVFMFQKTAIHKCNLEGKPVIITRVVDSMIDNLRPTRAEATDVANAVLDGXTFTTFLSFYECHSYFLCWSLGTDGILLGAETLRGLYPVDAVSTVGRICAEVCFYLRRNCNRTIQPSEILD

SEQ ID NO: 309044 - protein, 41 aa, Zea mays
  unsure (1)..(41): unsure at all Xaa locations
  Clone ID: MRT4577_44913C.1.pep
KCLRRPGARSKAISKTVVSLVAPXEPGAATHLTEPTLCLYL

SEQ ID NO: 309045 - protein, 83 aa, Zea mays
  Clone ID: MRT4577_44914C.1.pep
WYRATEPQLRPARAATALATGGRPAKKDRQSRGTSFFFKTKKKKKAKKKAGTWAGPTQGRIPQRAKTRGAAQAGGGGPNPPEG

SEQ ID NO: 309046 - protein, 111 aa, Zea mays
  Clone ID: MRT4577_44915C.1.pep
MEGLTSSEIAGFVVGALLLGATIAAPKVDGFIASSQRRSLGMCKRCGDLRIVACSQCKGTGSARSGGMLSLGMLDDLYESLGAEAKTENLVPCTKCRSRGRLLCPECSKVA

SEQ ID NO: 309047 - protein, 69 aa, Zea mays
  Clone ID: MRT4577_44916C.1.pep
PSPSVCSVQTPPSLSVDKGKVIRFQFICETMRALAFNGCSCCRSKSCIRLCSSCRSRETSWLIGGWVLK

SEQ ID NO: 309048 - protein, 56 aa, Zea mays
  Clone ID: MRT4577_44917C.1.pep
GQKFWGKKNHKNALNYNAFALFPLKFFKVKTNLFTLKGVPIRLATLAKGGKNFCQK

SEQ ID NO: 309049 - protein, 60 aa, Zea mays
  Clone ID: MRT4577_44918C.1.pep
GGGRPSCVANSTLVLFLLLPFALELQCLSDVSVFRMLLRHIAALVLSNAPTYPWWWCCCC

SEQ ID NO: 309050 - protein, 64 aa, Zea mays
  Clone ID: MRT4577_44919C.1.pep
GGGQVERFRGNQCTRDQRFATSRCEVGSVPYLKNPLRKIGGIHQLCQSVLGLKREMISALTQRG

SEQ ID NO: 309051 - protein, 191 aa, Zea mays
  Clone ID: MRT4577_4491C.1.pep
MSDPIKVNLPQGLELHHIDNTQALEQWTPSLTNLLQSCVNDDPPSSSLGFHAPLSTKDATEFWLSLSPQLFGTKSRITLFVLARGPSAIGTVHLVSHPKATHAHKVEVAKLLVSSEERGLGLGRKLMEFSERFAMEKLGKSMVILDTATETPARGFYLKLGYTEWGICPSYAESADGHLHDCSFFYKILDS

SEQ ID NO: 309052 - protein, 77 aa, Zea mays
  Clone ID: MRT4577_44920C.1.pep
GTRAGWLADMGLTCGQTCRRADRVWMHEGIYEAFVQAVMSAEDSYNVEDSTYESTSIDAATDETAEQNVDDAISDAA

SEQ ID NO: 309053 - protein, 46 aa, Zea mays
  unsure (1)..(46): unsure at all Xaa locations
  Clone ID: MRT4577_44921C.1.pep
VVRRANLVTCGGQTMVAYTLPAAVIPMPEGGDWGWXINLSASDYPP

SEQ ID NO: 309054 - protein, 211 aa, Zea mays
  unsure (1)..(211): unsure at all Xaa locations
  Clone ID: MRT4577_44922C.1.pep
EISLSSPAPVAAAAAFLPAAPCSGSESASFPASSLLPPPLPSPLCFASSPHPQPPFPRTLAASPWRSTSSPPAASPGPKPSRPPPSSPTSRPPTSPTPSSPSSPXLGFSGADAAAVVAKDPRLLCVKVDKTLAPKVMGLIGIGMSRPDIACIVSLAPYRFRSRNIVSKLHYYLPLIGSVDNLLRMLKRESPLLSDLDKVVKPNVVFLRECG

SEQ ID NO: 309055 - protein, 287 aa, Zea mays
  Clone ID: MRT4577_44923C.1.pep
VFQTLTAPAVVSQGAPQPPPGPSVACGCPLPAVRANPKLRLTGGRPVQAGAASCPDLGPARAGTGPPAAARRSASTPAVRGAGPGARPPGGSAGRRCRRADARSPGGGRVDPALEGAGARPPAAARAAPARGLSWRRRRGPLESSGRDGSTAHGHAARLGRGRPTLRRHRHAASAPTMRGAEGSAGERPFRRRGFGQGTPGGDSSKPSARARRPRPRRHGRSHSGPGGAGPMGGSGAARRAQASALGRAVRSASTRECIPAARGYGSTGAAHAQAHRPGNGNDNGFA

SEQ ID NO: 309056 - protein, 44 aa, Zea mays
  Clone ID: MRT4577_44924C.1.pep
MYDTFPRTAMPYTQLIDYYRHLVRSGPVEFRRRCHIAVIKDPAY

SEQ ID NO: 309057 - protein, 199 aa, Zea mays
  unsure (1)..(199): unsure at all Xaa locations
  Clone ID: MRT4577_44925C.1.pep
MLGVLQEDRECMAWLDDGKAARSVVYLSFGSHASMSDARLKEIASGLARCGSPYLWVLRPEMAAAVEVGENGLVVPWCAQEAVLSHPXVGLFVTHCGWNSILESVVAGVPVLGCPVLSEQTTNCRQVCTAWGIGAELPQEAGSDEVAALVREMMTGRKGKDAREKTLQWKRLAQVSAQPGGLSYNNIGRMVENILLKHI

SEQ ID NO: 309058 - protein, 49 aa, Zea mays
  Clone ID: MRT4577_44926C.1.pep
GGSFLDLRNLRQSPPHMDYASRFFEFKMNEQRLLGWCLHCSDPRHCFLL

SEQ ID NO: 309059 - protein, 75 aa, Zea mays
  Clone ID: MRT4577_44927C.1.pep
RAIRVPDDQSKRVDAVRIDRLDPAGASRLVPMGTKTTLHLSINPPMRVPATAQHPSIMNLPHLLTGAKLRLSTRI

SEQ ID NO: 309060 - protein, 87 aa, Zea mays
  Clone ID: MRT4577_44928C.1.pep
CYFSKKNGRMTAVFCHGKGKLYTTKPPAGISQKLCTIKPQAAAGRGAHIMLQLLTERLLLDTLADCSHLLQQIRLDPLAALVCAHCS

SEQ ID NO: 309061 - protein, 169 aa, Zea mays
  unsure (1)..(169): unsure at all Xaa locations
  Clone ID: MRT4577_44929C.1.pep
VSPLAVRGWVPSPGWQAGFLFWPPGCAPRAFRFGSLARLAPRPFPAGVPARLWVPPLAPPGLAPGSAPPVLAPRPVXGPLPGPRPPVPXPPPPGAPPPPPPPPPPPPLPPSPPPPPPPPPRLPPLWPPPPPLPVFPFCVGPPQGAPLKKEEKKQKKKKKKKKKKKRIKK

SEQ ID NO: 309062 - protein, 65 aa, Zea mays
  Clone ID: MRT4577_4492C.1.pep
MGAKIFALLALLALSASAATSTFIPQCSQQYLSPATAAGFNTTIQSTCQEHQQLTHTYLNIVMKI

SEQ ID NO: 309063 - protein, 137 aa, Zea mays
  Clone ID: MRT4577_44930C.1.pep
MAKGGLGKLRCMIRRWHSSSRIARAPPAASHGDDDDGAVVAVSSGGGASSFHGADEVPKGLHPVYVGKSRRRYLIAEELVGHPLFRTLVDRSGGGAAAGTVVVGCEVVLFEHLLWMLENADPPPESLDELVDYYACC

SEQ ID NO: 309064 - protein, 137 aa, Zea mays
  unsure (1)..(137): unsure at all Xaa locations
  Clone ID: MRT4577_44931C.1.pep
KNQAPLHQHRSRARHYYSAQQRIKPSRTISPPPHHNPSKRSKQWPESDRRPSPLPPFWRPSPSRWPPRPRRPRPAPSPPPSRRRRPSPRPSSPPPPPSSSPPSATEPMGPRACRLPSSTXPPPPPPPPRSIYWSAIQ

SEQ ID NO: 309065 - protein, 70 aa, Zea mays
  Clone ID: MRT4577_44932C.1.pep
LGPSRPAWPGFLNQQCKGPAGNSNKPTYTHQVGSSHDDQRGRPSHSSIFMDNAIGFVLILLFYRYITMSF

SEQ ID NO: 309066 - protein, 112 aa, Zea mays
  unsure (1)..(112): unsure at all Xaa locations
  Clone ID: MRT4577_44933C.1.pep
MMAPPIXDVAGPRPRXGDVEAPPSXRSSPSSVVEVESEPLGRARQRPLAKARADFESWGRAKRSSSSSGAEPKSEPWVGRSGIRRLLGLSPSPSPGSGGTEFTVFRGLARVR

SEQ ID NO: 309067 - protein, 71 aa, Zea mays
  Clone ID: MRT4577_44934C.1.pep
AGFKHRGLLLWVPPLKPRGVGYRKFFPFFFAPEQVFLVTISQASAISPVFPFTIDPRIASAYKVRGGPVSL

SEQ ID NO: 309068 - protein, 96 aa, Zea mays
  Clone ID: MRT4577_44935C.1.pep
QGSCRHLQCSPSDAYSWLGTSFYVYALPPPPSPYLTAQKKNHPTGSTCVLFTGNRSIIVARTVQLTHILNVTIWMPKKKKKKGAVQKEEQNYVRGM

SEQ ID NO: 309069 - protein, 122 aa, Zea mays
  unsure (1)..(122): unsure at all Xaa locations
  Clone ID: MRT4577_44936C.1.pep
VAIKALGFDMXQEQISQRIGDVVKNGSGPIQYQGFEHMXMTAKFGDRDSKEQLSKAFRIIXQDGNEKISSIDIQRVPKQVGVNLPLDEIQRMVQQAXDPNGAGEXISFTEFISILRRTSFGT

SEQ ID NO: 309070 - protein, 45 aa, Zea mays
  Clone ID: MRT4577_44937C.1.pep
HGYRVFAVHFIQTGRLDWKALQVVITARERSGLNSAACRPCSTRG

SEQ ID NO: 309071 - protein, 335 aa, Zea mays
  Clone ID: MRT4577_44938C.1.pep
PSSSPACVHPVLSFHPLASCLWSCSSWTSSALVPCSSSPFCADRVSPHLAAVGLAVVVSLYPCRRICRTAHCISLISSPDFSVPRRATPRKKKITPPSAPILIPPPPLVSRLLQISSAQVSSPRTPSSKPQPSSSFPSPLCSLAESPAARLCFSPMARGSLQAARGTHLLCSCSSVPELLCRGTSVRPRLIGFLVPWLPLRARPALLSRPWPALPAWFRLSRRRLAARPSARPSSMVAVRRRSPHAGRELSVRRSRAVLSCSPSKLPCWLHPARLCVACIASVVLARAKLFARQRSSSSSLRALLPVVASSSPDFALSPSSALLLPVYISHDCLL

SEQ ID NO: 309072 - protein, 135 aa, Zea mays
  Clone ID: MRT4577_44939C.1.pep
MAEGARFHGMVGGGGKGMQENEFNGFFSMPYYHKIGEGSHMSVDSTDNYNLGGGSVTMSVDNSSVGSNESRTVILKHPGLRDAPTASYSVGNSVFRPNRVAAHTLNEDALARVLMDPNHPTEILSQYQQWAIDLG

SEQ ID NO: 309073 - protein, 445 aa, Zea mays
  Clone ID: MRT4577_4493C.1.pep
LGTSRPAGFEKIEDLLASVAVTRPQWTRLLSSVDHRVDRSLAILRPQAIVDHRSLLSSLGWPPSLAGSKFSSINSGKQAEIVNPLFVMRGDLKSKYSESFLALCNLQGLQKRRKARQLKGHCVGNQLRQPLWVIEELVNPISTAAQRHFSKWAEKPEFVFALAYKIIRDFVDSMDEILQPLVDKANLIGYSCREEWISGMVIALSTYLAKEIFPKQIEVLQESSSSSDSGSTAYQARVSWLSLVDLMISFDKRIQDLILSAGLLLTVKDDDSWQRISVLCVFCDRPDWLQVWAEIERQESLNKLRSAMDLEKNWSTGIRGTMLEYSDDYKAPVITSVVHHTLSLLIDRARPIPSITLRAEFISMSAAPIISEFLGYMLRRCQEAEGLTALADDNAVLKVSQSINAARYFESTLAEWCEDVFFLEMENLTVNGEEWVYLSARDNHL

SEQ ID NO: 309074 - protein, 82 aa, Zea mays
  Clone ID: MRT4577_44940C.1.pep
LSLYVYFGFLGTLGFAQTGKPPGLYCAYPTGTHLTGPTPFFPTVFKTTLKNLFFRKKKKKFSITTQDLFFKGLAPNYKAPIF

SEQ ID NO: 309075 - protein, 95 aa, Zea mays
  unsure (1)..(95): unsure at all Xaa locations
  Clone ID: MRT4577_44941C.1.pep
MADSMATLGVTLRTLQLMTNRLLARMQFKLEVIHPGRPNVSKGEXKERLATAYDVKDPNTMFDIGMPTQLGGGKITAYGLIYDNVKAVNTFEPKY

SEQ ID NO: 309076 - protein, 204 aa, Zea mays
  Clone ID: MRT4577_44942C.1.pep
PVNQTPLCTHDQETVSNNIIHAGVSKNTSHDGVSKNTSHDEVASVQPSREAEMRPRSAPPSQSTQADNSGWSVETLMELLDFTPQEITKAISATESNRFVASVVIAFLVVLSNWGLDIGGAITRVLVGTRPLLFLIVTNITIVFTLLMENKDPNVRSRPVGVNLGSADSLGQMLEIGLLLQKALGALLIDCSVCAVIMICFLGF

SEQ ID NO: 309077 - protein, 89 aa, Zea mays
  unsure (1)..(89): unsure at all Xaa locations
  Clone ID: MRT4577_44943C.1.pep
HASATRPPRSATDREPYVGTXLLNTRITADQAPVRDVGTWLFSTEGEXPYREGQSIGVIADGEDKNGTPHKLRLYSIASSALRNFXDSK

SEQ ID NO: 309078 - protein, 332 aa, Zea mays
  unsure (1)..(332): unsure at all Xaa locations
  Clone ID: MRT4577_44944C.1.pep
MEKGAGTRRRRLVERGSDRLAFITGQTRSLSCDPIPDSPLRSQFEGGTRDDGFSERNQLQKSEPSDLVPGFQDPGTRQGVKARTLSYDALVPEFERAGGRQENNASTLSYEDELFRKFKMGSAVPEIQPVNQTPLHTHDQETVSNNIIHAGVSKNTSHDGVSKNTSHDEVASVQPSREAEMRPRSAPPSQSTQADNSGWSVETLMELLDFTPQEITKAISATESNRLLASVAIALLVVLSNXGLDIGGAITRVLVGTRPLLFLIITNITIVFTLLMENKDPNVKSRPVGANLGSADSLGQMLEIGLLLQKALGALLIDCSVCAVIMICFLGF

SEQ ID NO: 309079 - protein, 81 aa, Zea mays
  Clone ID: MRT4577_44945C.1.pep
RAGRGPNIYKEALVNLSSVFEVFVGCLLVRWIGCHIRARAGPSIRPRSVLLLSGLVLFGFQWLLSGGYCCFLRKSLRDCGW

SEQ ID NO: 309080 - protein, 82 aa, Zea mays
  Clone ID: MRT4577_44946C.1.pep
MSNKASCLKKKKKKRPKKKKKKKKKKKKKKKKKKKKKKKKKKKKKKKKKRGGPFKKTKFTYPGMQSKNFLKGEPKKKKLAAV

SEQ ID NO: 309081 - protein, 91 aa, Zea mays
  Clone ID: MRT4577_44947C.1.pep
EKGIFSQGSRGQFPNLFSNLKNRGLKPLTLAHWFFFFPQPPLQKKQTPTKVKGNFVAKALKPFLKVWKNFGVPPRNPISIILTRFLGKLTG

SEQ ID NO: 309082 - protein, 73 aa, Zea mays
  Clone ID: MRT4577_44948C.1.pep
SAIALIDGSLIILCIYPSSNVFDQRAVESPSRSLRFPSDSGVFFSSSDRHGSPLDAIALDRQGIAHVTSWERF

SEQ ID NO: 309083 - protein, 297 aa, Zea mays
  Clone ID: MRT4577_44949C.1.pep
MASTEGFRLVRCPKCLNILPEPPNVTVYKCGGCGTTLRAKTRASGGQQVAATAKQGRQDSDSYSVATAVSSGVPRQNRDQGSIGAVTESSFDADVASAEHGSNGARSGENGGGMLAGQNVHFEGQDNNTSSRMEGPAGQTRLNANATYLDSGGTENHTVQQTAEKCRVSGHVDDTECHLNTSEDEMFPSETSKAAVGMQDPGQKKEAGGTEHAANKKSHLVRALSRSCDLGSSMNLTDFHSARASLQSKSFRASAPLQSKIMSTVDELKGDLSEMFSKPADCKPRPHPHPPRPSKRD

SEQ ID NO: 309084 - protein, 83 aa, Zea mays
  unsure (1)..(83): unsure at all Xaa locations
  Clone ID: MRT4577_4494C.1.pep
LRRIDVTVYDNGSQGHTXEXYVVANVIVCGKELQQFDSGCTHGAPPPCIARATHSGNVNTISHITHQDGIRDGPPLVAHAIGF

SEQ ID NO: 309085 - protein, 58 aa, Zea mays
  Clone ID: MRT4577_44950C.1.pep
SEILKSTRWSSTYKMLHTCIAYKEAIETYADADLKYKWEPTAEEWDLFIAIEPILSSL

SEQ ID NO: 309086 - protein, 136 aa, Zea mays
  Clone ID: MRT4577_44951C.1.pep
FEISRGKRGSPRSHRSPCPRALKKAGFVFGAKALVFAVFFAPFFPPFAPLREACKAKGFPFPWALLSPPFFFPSFGWMRDPLDTLLKLWVPGCGVRGGVMGSCPLWGGGFQLQCCEGLVKLFCFLFGGFRGWGFPS

SEQ ID NO: 309087 - protein, 241 aa, Zea mays
  Clone ID: MRT4577_44952C.1.pep
MVKSKAIRVHELGGPEVLRWEEVEVGEPGEGEIRIRTTAVGVNFIDIYFRKGVYAAPTMPFTPGMEAVGVVTAVGPGLTGRKVGDVVAYAGNPMGSYAQEQILPAAVAVPVPPSVDHKQAASVMLKGMTAHVLLRRVFKASLECLASRGFLVSFGQSSGKPDPIPTSDLASKSLFLTRPSLMHYTATRDELLESAGEVFANVANGVLHVRVNHTYPLSEAAQAHADLEGRKTSGSIVLIPG

SEQ ID NO: 309088 - protein, 479 aa, Zea mays
  Clone ID: MRT4577_44953C.1.pep
MDGRRTILMGRYEIGKQLGQGTFAKVFYARNLTTGLAVAIKMINKDKVMKVGLMEQIKREISIMRLVKHPNILQLYEVMASKSKIYFVLEYAKGGELFNKIAKGGKLSEDAARKYFQQLVSAVDFCHSRGVYHRDLKPENLLLDENENLKVSDFGLSALAESKRQDGLLHTTCGTPAYVAPEVLSRKGYDGAKSDVWSCGVILFVLVAGYLPFHDTNLIEMYRKISRAEFRCPRFFSTELKDLLHKILVPDPSTRISISRIKRSAWYRKPVEAHAKKNEAETSENTCTGEGFNLSGFFEDKYGRREERFTTRQPVTTVFTKLKELAKRLKLRVKKKENGTLKLAAPKEGKKGMLELDAEIFEVAPSLLLVELKKTNGDTLEYQKLVKEEIRPALKDIVWVWQDDQHQCSQSPESLLSPPETQDELRLSLPQQEGQDFLEAPLPSLSLDQLKSPTAPEQAEQLPQPEQLQTPIAPEEQIN

SEQ ID NO: 309089 - protein, 249 aa, Zea mays
  Clone ID: MRT4577_44954C.1.pep
KYFHIRCCAHIINLVVKDGTAALDSLISNLRSTVKYVMVIATILDPRYKMRFIEWCFNKIFDEHQVVFELEDVRSELEKLYGDFEVQHRERKESQSKSNASSSLSVERSCSLPSASCQFQSFLSSTQSNPSKSELLIYLEETNVCLSDKEFDLLNWWKVNSHRFSVVSRMAKKFLTILATSVSSESTFSTGGRTLDDYRSSLRPSMVEALVCSSSWIRGTHDGSMIYVEEDDEDNVENIMFPKSLVESN

SEQ ID NO: 309090 - protein, 513 aa, Zea mays
  Clone ID: MRT4577_44956C.1.pep
MDGRRTILMGRYEIGKQLGQGTFAKVFYARNLTTGLAVAIKMINKDKVMKVGLMEQIKREISIMRLVKHPNILQLYEVMASKSKIYFVLEYAKGGELFNKIAKGGKLSEDVARKYFQQLVSAVDFCHSRGVYHRDLKPENLLLDENENLKVSDFGLSALAESKRQDGLLHTTCGTPAYVAPEVLSRKGYDGAKADVWSCGVILFVLVAGYLPFHDTNLIEMYRKISRAEFRCPRFFSTELKDLLHKILVPDPSTRISISRIKRSAWYRKPVEAHAKKNEAETSENTCTGEGTTSVSTECSTSEGNQGPLSLPNLNAFDIICLSTGFNLSGFFEDKYGRREERFTTRQPVTTVFTKLKELAKRLKLKVNKKENGTLKLAAPKEGKKGMLELDAEIFEVAPSLLLVELKKTNGDTLEYQKLVKEEIRPALKDIVWVWQDDQHQCSQLPESLLSPPETQDELRLSLPQQEGQDFLEAPLPSLSLDQLKSPTAPEQAEQLPQPEQLQTPIAPEEQIN

SEQ ID NO: 309091 - protein, 171 aa, Zea mays
  unsure (1)..(171): unsure at all Xaa locations
  Clone ID: MRT4577_44957C.1.pep
ARNSARAYKMLHTCIAYKEAIETYADADLNYKWEPTAEEWDLFIAIEPILASLAKVTTALSASSYPTANLFYPHIVDIKIALRAAMVSNNLNLRTMGNAMMEKFNKYWEEKNNVMVIATILDPRYKMRFIEWCFNKIFDEHQVRVGIXDVRSELEKLLWDYEVQHIETKES

SEQ ID NO: 309092 - protein, 148 aa, Zea mays
  Clone ID: MRT4577_44958C.1.pep
AAQAAQDGCHHPIIYTSEDVVARVKDITSGKGVNVVYDSVGKDTYKASLECLASRGFLVSFGQSSGKPDPIPTSDLASKSLFLTRPSLMHYTATRDELLESAGEVFANVANGVLHVRVNHTYPLSEAAQAHADLEGRKTSGSIVLIPG

SEQ ID NO: 309093 - protein, 372 aa, Zea mays
  Clone ID: MRT4577_44959C.1.pep
MSAFSSLLLPSFFLFPGQPLQLLPNPPTRFSRLRCHRRDSTSVATMVKSKAIRVHELGGPEVLRWEEVEVGEPGEGEIRIRTTAVGVNFIDIYFRKGVYAAPTMPFTPGMEAVGVVTAVGPGLTGRKVGDVVAYAGNPMGSYAQEQILPAAVAVPVPPSVDHKQAASVMLKGMTAHVLLRRVFKVESGHTILVHAAAGGVGSLLCQWANALGATVIGTVSNQEKAAQAAQDGCHHPIIYTSEDVVARVKDITSGKGVNVVYDSVGKDTYKASLECLASRGFLVSFGQSSGKPDPIPTSDLASKSLFLTRPSLMHYTATRDELLESAGEVFANVANGVLHVRVNHTYPLSEAAQAHADLEGRKTSGSIVLIPG

SEQ ID NO: 309094 - protein, 56 aa, Zea mays
  Clone ID: MRT4577_4495C.1.pep
QRPRVQRQFFPQFNKEDQNHPRFRKITRNFLNNVSFFSENFKIKRFFLLRIFVDRF

SEQ ID NO: 309095 - protein, 49 aa, Zea mays
  unsure (1)..(49): unsure at all Xaa locations
  Clone ID: MRT4577_44960C.1.pep
RHSILDSPSPWLLAHFARVGVGVSLASWLSFKASSMQADDRSXMPSLIR

SEQ ID NO: 309096 - protein, 82 aa, Zea mays
  Clone ID: MRT4577_44961C.1.pep
FMVLTQGDGFFPHKWGKLDLWGEFARESMCFFSPFFASGFHIFADRPRPKDVIKWRPSLLSWIVPFRCIKPQVRLERNGLTP

SEQ ID NO: 309097 - protein, 69 aa, Zea mays
  Clone ID: MRT4577_44962C.1.pep
DTRAKIGGALGNAAMFAVSVLAFFQLHQITFGSKTPAMEYRKRIEYSIQPRSSQSNGKGKLLEVYLARG

SEQ ID NO: 309098 - protein, 52 aa, Zea mays
  Clone ID: MRT4577_44963C.1.pep
NLCGSGINPGTQKGWDVQQPDLKMGSRSRARTPKHMIKHKGSTTPRMLQALA

SEQ ID NO: 309099 - protein, 135 aa, Zea mays
  unsure (1)..(135): unsure at all Xaa locations
  Clone ID: MRT4577_44964C.1.pep
MDLILLQGIIALTFRFLYVCTHLCSLNLTLSSNNYVFLCSISNINSGFLHALFSVLPGEMPMLALFLLSSFGLVEYFMIFSLFLPKPTETFTDPSYLSAVRSVGLDVMTVFLELSRAFLLCINNSAXSEIKQPGC

SEQ ID NO: 309100 - protein, 107 aa, Zea mays
  Clone ID: MRT4577_44965C.1.pep
MNSHNRRTIKHLRNPTIIIIIKNTQHKNRRPAENHIIKNNRRSPPVQSTRRTKYTITIRRTQKQRRGQGNKYRIVLYSIQSEDKTPQIDNLIKNNRARTSTRTSTST

SEQ ID NO: 309101 - protein, 108 aa, Zea mays
  Clone ID: MRT4577_44966C.1.pep
PGSYTVAGVTSALTHIKGLPLHVIYPAGLPNCSHAITSPSFASTRGHLLIGHEADWYCYQSNFNRMIPPDPLCLTEPRLAVQPTWHHAARTTLLSSIVSRHRCAWCLA

SEQ ID NO: 309102 - protein, 128 aa, Zea mays
  Clone ID: MRT4577_44967C.1.pep
ASFEEFYCCTLLSKFLKPNGQTRQHWTWGKVVFLSQQCPSWMQAPAPLLPRCQHPRRPLRPPCPGSPDGAYPGAGWLPQVAAECSEVDPREPRWCSPWLLLATQALGSGWPSAPPGGPSPPAQWIGLP

SEQ ID NO: 309103 - protein, 66 aa, Zea mays
  Clone ID: MRT4577_44968C.1.pep
KRILKDIYVRRPFGTPAHQGSIQSHSSVTDGELVLAKFSKNFGNATLKDPAFLIAPNPFFLGNGRL

SEQ ID NO: 309104 - protein, 154 aa, Zea mays
  Clone ID: MRT4577_44969C.1.pep
SCAEVDARSATPQSYLCFHTESERSVPDPFNCDKLGADNLPSSNTAPKPRMRWTPELHERFVDAVNKLGGSEKATPKAVQKVMKVDGLTIYHVKSHLQKHRIVQHHSETSCAGVTGRRGRHTQADDDSIPQSKGEGGIEGGLVSQIGLQKQLHE

SEQ ID NO: 309105 - protein, 87 aa, Zea mays
  Clone ID: MRT4577_4496C.1.pep
PILLSLSLSLSLLYICIRNPVLPFILSHILPPLDWRMDTPCIYLRDWIVFLKCRKIGSCRRTFFQSCQINLNWECVLETIGDFIMST

SEQ ID NO: 309106 - protein, 61 aa, Zea mays
  Clone ID: MRT4577_44970C.1.pep
MSFILTQDLCFFKTTLATRNVPKIETRKASPEKNPNRHSPIKNSTPGRKNTFTMRCPESPS

SEQ ID NO: 309107 - protein, 82 aa, Zea mays
  Clone ID: MRT4577_44971C.1.pep
NKKLKISCKKKKRAQGFLFIFFFFFIFISFFYFVFFLFFFFQTPFSLYIIPFHFNGSFRSLLTLATHGDGVDTPVTPSADST

SEQ ID NO: 309108 - protein, 83 aa, Zea mays
  Clone ID: MRT4577_44972C.1.pep
HGARHKTCTAQQVTALHMCSDGILPAIDGLHILHHETLMLRHCDGNHASAWPTVLSTAAITDEVSQLDTTGATTLPDSSMVGP

SEQ ID NO: 309109 - protein, 91 aa, Zea mays
  unsure (1)..(91): unsure at all Xaa locations
  Clone ID: MRT4577_44973C.1.pep
SIKSVDESHWVVGLDANXIYCCEXFKTARSYPHVMPNPVLSILELLLPLASSDLGANNLQNEFLMRNIHLFLIQNKMDEMAVLGLYTTSYD

SEQ ID NO: 309110 - protein, 85 aa, Zea mays
  Clone ID: MRT4577_44974C.1.pep
RSFLQGIPLEGTLRLVKLNRDPTKERDRKGQKARSRTRPTAFKKKCFKEADYRGCVVRLRYQLTMGFHRMLNTMIFTGLWLPFFF

SEQ ID NO: 309111 - protein, 40 aa, Zea mays
  Clone ID: MRT4577_44975C.1.pep
RLVVHIKNMVKHTLTYSKTINYMGNHMKNSSSMFQSPISK

SEQ ID NO: 309112 - protein, 56 aa, Zea mays
  Clone ID: MRT4577_44976C.1.pep
KFLATRTSYQTSLTVKRHGHIHDDEFRFPRHGKEKQSVTVFVISYPSRHPAPFVLR

SEQ ID NO: 309113 - protein, 222 aa, Zea mays
  Clone ID: MRT4577_44977C.1.pep
KYLISSNPYNPTSSDTAQQKVDGLVRVFLFGLRLTGPLDAQVPFPKDSTVFLGPRPISCSSHVHVFLSPFRVPPSSWGSQSCSSGSWFMNSCPINWEHAHRQHRLLLLVQNRYHYFAVAGAWSQRPASISNYSRRCPCSARQNLRLVVRTSKNQQVAIDLWRWTFCLLLLVRANAHRPRHHGSAGDATCCTATSQKGRLGSGDPSTTRRVRRRRNRVLLWLR

SEQ ID NO: 309114 - protein, 338 aa, Zea mays
  Clone ID: MRT4577_44978C.1.pep
MRGILFGPRRQPPPLPLFPAAKRSSAPANLLFARLYRFLPASPILRLLLLLALLSLIPPAFFHLRLRRFHQMRERKCGWIARPPMVCAHGGDSTNAFPNSMDAFRMALDARVDCVEVDVSRSYDGVLFALHDRDLQKMSGNSTAKVGHWTTDEIKALRTRFQLSKRVQNEEVPMAEEALAMISQSFRQVVLDVKVGPPSFEKGLAEDILSLLRRTNCKNCLVWAKSDDIGREIIKLSKDVIVGYVVMVDKFTNRRTELVRIEGAKVAGIYHPLIHEKVMKVMRRHDRRVFAWTVDDSSSMKKMLYEHVDAIVTSNPSLLQQLMQETRAECMEDGFALP

SEQ ID NO: 309115 - protein, 32 aa, Zea mays
  Clone ID: MRT4577_44979C.1.pep
DNYLEKRIVIKSLKQNVSNNQRANIAVVYLLP

SEQ ID NO: 309116 - protein, 63 aa, Zea mays
  Clone ID: MRT4577_4497C.1.pep
MAAVETVVLKGAMSCQGCSGAVRKMLSKNEGVETFDIYLNEQKVTVKSNVKPVDVFQTGFKFG

SEQ ID NO: 309117 - protein, 112 aa, Zea mays
  Clone ID: MRT4577_44980C.1.pep
CGPLLPLLVRALLGVLALLVPLLFSACPPVCSCGLLGFRLGSAGSVCRPCRSACCRSWLRRRSPPSSVVRRLSVVLCACSSSACAVVPLRVLFLFPARCPVAAAVYYWGRGS

SEQ ID NO: 309118 - protein, 29 aa, Zea mays
  Clone ID: MRT4577_44981C.1.pep
LLLLGNKMHLTLSTCAGTKNCHMLRPLGG

SEQ ID NO: 309119 - protein, 93 aa, Zea mays
  Clone ID: MRT4577_44982C.1.pep
HVLHRQQDEELDELSESVQRIGGVGLTIHEELSGQERILNDLSLEMETTSNRLDFVQKRVAMVMKKAGIKGQIMLIVFLVVLFTILFVLVFLT

SEQ ID NO: 309120 - protein, 120 aa, Zea mays
  unsure (1)..(120): unsure at all Xaa locations
  Clone ID: MRT4577_44983C.1.pep
HVLHRQQDEELDELSESVQRIGGVGLTIHEELSGQXLLLTWSKVSRFVQELLPGIHAATVXERILNDLSLEMETTSHRLDFVQKRVAMVMNKAGIKGQIMLIVFLXVVLFITLFVLVFLT

SEQ ID NO: 309121 - protein, 120 aa, Zea mays
  Clone ID: MRT4577_44984C.1.pep
QGSVRDAGDGPWDGVWLALRGHGEPTVCRAYTTASRRAGMFIDVHAEHGQVPNRMYLIWRHSSSPEGHVQHDAQSHVCDREPHVLAACLVETRSLGAYGLLHACVPVPQYAVCTRDHSCQ

SEQ ID NO: 309122 - protein, 110 aa, Zea mays
  Clone ID: MRT4577_44985C.1.pep
VPRGGQFNQPFKGGPFLELTIRGGRANYWKINSGPVHLVFFPCFFFAPPPPKGGLSPKLNRAPFPGLLKKKKGFWPPYFKGFNLTPPQKFPFFLGESGLVRPKNRPPPQV

SEQ ID NO: 309123 - protein, 175 aa, Zea mays
  unsure (1)..(175): unsure at all Xaa locations
  Clone ID: MRT4577_44986C.1.pep
MARTCVLGSCCEXSQCHLVXNKETIRPIESHDVLDEGSLGIQVEDKDVSSSQVLGGTQDLSSKKPQEDNVNIVPIVPVYVNDGLMMPNSVDDEASLPLEETNPAEVLQHIGAGEENPCPAQEFESIGAGGEEELNLLRSMGWDENEDVQPLQQEEIADCLKQNVRLQQKLQECKG

SEQ ID NO: 309124 - protein, 633 aa, Zea mays
  unsure (1)..(633): unsure at all Xaa locations
  Clone ID: MRT4577_44987C.1.pep
MERSEPSLKPEWLLRPTVPATTHKPVTSPRADDHGRGASSRNRSSGRDRDRSSQLSSSRRGSSSSGSRRNDRDGTGKSRGYGNFGKHSKDRIQEKDLDFRERESRLVQPDDPLRDGFESFSSCRSEKDRLNRTRSKVAIPNRAVSXSLDNGNVSKKDNGVISFEREFPHLGSEDKNGKQDIGRVPSPGISTPIQNIPLVVSDGWNSVLADVRGSKHXSVSSSSTPAGSSKPTEVSNSGSALSMAETVMQSPLNICTTPQLSIDAQKIEERTMRQCILRPLTPSSNKISASISLDKLLKSKGARAGESNGPIKVAPQLSIQPSSNSVRTPVKTELVKQSQSGSLQVLSREQNGTVNTAAKDITSNNPVSPVLGRSSSMEPMRKSIVNPKLKVGTNGRSLHPLQGSFADRKASAKDKYKFFELLRSKSVNGSSAAIESPSSLTDDQQNSNLDLPFKFIENGSSSCEEANSCEGSQRHLSDNEETIPPSESHDVLDEGSLGIQVDDKDVSSSQVLGGTQDISSKKPQEDNVNIVPIVPVYVNDGLMMPNSVDDEASLPLEETNPAQVLQHIGAGEENPCPAQEFESIGAGGEEELNLLRSMGWDENEEVQPLQQEEIADCVRQNVRLQQKLQECRG

SEQ ID NO: 309125 - protein, 473 aa, Zea mays
  unsure (1)..(473): unsure at all Xaa locations
  Clone ID: MRT4577_44988C.1.pep
GASEMEMMKERFSKLLLGEDMSGSGKGVCAPLGRTPVRACVCXATVFGQLWRLEPLPPEKKAMWRRELDCLLCVSDHIVELVPTWQTFPDGTRLEIMTSRPRSDLYINLPALGKLDNMLLEILEGFRDVEFWYVDQGICAPDCDSSASYRRTFHRRDDKWWLPVPHVPHGGLREATRRQLEHRRDCASQILKAAMAINSNALAEMAVPVSYLDSLPKNGRAALGDVIYRYITSDQFSQDCLLDCLDLSSEYQALEIANRVEASIYVWRRKGGGGARSSWGIVKDMVMDTEKRDLLAERAEALLMSLKQRFPGLTQTSLDMSKIQYNKDVGKSILESYSRVLESLASNIIARIDDLLNVDELSKQPADSIPSAGADAKVACKSNGSKQATAVPASGTPYATAYATPSFSPAQLSSPSKIGRALLVDRRSHHVAGAKRATASAADRAGVEVVKGMVVDGSSAIFDIIPIAVPAKI

SEQ ID NO: 309126 - protein, 97 aa, Zea mays
  Clone ID: MRT4577_44989C.1.pep
ERVGSLVIGWCLPVHRLSVCSAPVCVVGVVLCLVCSAAFDSLHVRRPPPVLRSLCSAGCFSSLASLPLLAPFSCARLFARLVACCGRRPRVRKEDSL

SEQ ID NO: 309127 - protein, 55 aa, Zea mays
  Clone ID: MRT4577_4498C.1.pep
GTLGKGLDEMAVKLSDTRRKLGEKLTTRPCAMKGPTEKALTYLQGDISYDIVDFN

SEQ ID NO: 309128 - protein, 44 aa, Zea mays
  Clone ID: MRT4577_44990C.1.pep
FANGSFPFPPSICQMLKPLNNVIHPYINQSHVGKPAPKSHFYAD

SEQ ID NO: 309129 - protein, 178 aa, Zea mays
  Clone ID: MRT4577_44991C.1.pep
MVAHRFHQYQVVGRALPTPTDEHPKIYRMKLWATNEVRAKSKFWYFLRKLKKVKKSNGQMLAINEIFERNPTTIKNYGIWLRYQSRTGYHNMYKEYRDTTLNGAVEQMYNEMASRHRVRSPCIQIIKTATVHFKLCKRDNTKQFHNSAIKFPLVYRKVRPPTRKLRTTFKASRPNLFM

SEQ ID NO: 309130 - protein, 90 aa, Zea mays
  Clone ID: MRT4577_44992C.1.pep
SHPLPTFRLCALLQIGVAALSLASSELEMGVFSAQAPLALVPVLLASRMRMDQSLPLVTRVPPRASFSPLMGGLEANPRRRWGGFLSRSV

SEQ ID NO: 309131 - protein, 102 aa, Zea mays
  Clone ID: MRT4577_44993C.1.pep
MAPNVEKNPAAKKPAEEEPAAEKAPAGKKPKAEKRIPAGNSAAKEGGQTERSTWTRMTSAPTNYLSVYFPVDYGCDTVGLSADPETFFLIGSWRSSTPAGPC

SEQ ID NO: 309132 - protein, 178 aa, Zea mays; identical to SEQ ID NO: 309129
  Clone ID: MRT4577_44994C.1.pep

SEQ ID NO: 309133 - protein, 178 aa, Zea mays; identical to SEQ ID NO: 309129
  Clone ID: MRT4577_44995C.1.pep

SEQ ID NO: 309134 - protein, 69 aa, Zea mays
  Clone ID: MRT4577_44996C.1.pep
PDVHIASFSLSPVRPLTRPSGVKCSSCHMLQNRSFQSFLLHVLLVVLSHPLLFSVCRIPRWQGRTPRGL

SEQ ID NO: 309135 - protein, 105 aa, Zea mays
  Clone ID: MRT4577_44997C.1.pep
RKLRRTYQAQMMDMTQAICNYFPKMTRVSRPKGGYILWIEMPEIVDTLQLYEDALRHNIAIAPGSMFSSSGGYRNCFRLNFGLPFTEEIQQAMIVLGQLLHEQTK

SEQ ID NO: 309136 - protein, 78 aa, Zea mays
  unsure (1)..(78): unsure at all Xaa locations
  Clone ID: MRT4577_44998C.1.pep
MAASTMXISSTVTDGTPIKVGSFGEGRSTMRKTVGKPKAEASSSPRYGPDRGKYLEPFSVEHPSYLTGELPGDYDCHT

SEQ ID NO: 309137 - protein, 80 aa, Zea mays
  Clone ID: MRT4577_44999C.1.pep
LGKSIGGHPLLFMVPGTVGGQLLFLLPPPTPGKVVGFGPGYIPFRDMVVPGMPIKLVGVAALPIILPTLGFLVFGRDSKM

SEQ ID NO: 309138 - protein, 116 aa, Zea mays
  Clone ID: MRT4577_4499C.1.pep
HPPPAKQSPPPMNRPSATEGTRAMPDTAAGHLPTPSQPPPAPHATNWVHMATAPCHDNTQPTTTKPHYETHGCADQHAYATASQMIENYLWETTYSLGQSVEFLRHQCGPTEKPGR

SEQ ID NO: 309139 - protein, 64 aa, Zea mays
  Clone ID: MRT4577_449C.1.pep
YAVSDILWCRRLGNQATMVRRTRVVRTRPALSLARGGPELPVEVQARPSDRATTDLGQNVLRNF

SEQ ID NO: 309140 - protein, 998 aa, Zea mays
  Clone ID: MRT4577_44C.1.pep
MAPKRKTSSSSAVVIPPIDPNSQLPFAGNHMSVISETELLHLVSIGVLPPRELCSWRICHGFTVPTEDTHESVVYASFLLCGLGLPISPFFRGLLDFYHLNLTHLNPNSILQISIFVHLCEAFLGVLPHFGLWKYLYHCRPGMAGGQHQLVGGASLEMCRGRKTEYLEIPLKDSIKGWRLEWFIVENYGNYLPSRSGRQSDVRTPSWTESPTNQEVAEAGVLLAEVGLLKERGMTAEAVVTDFVFKNIQQLKDRADPAYLYRGLADSTRVTNRRIPSADLVSRLEMILMGKVSNVGALVAYSAWNLPPPKAFTLFVSNPPVTDGSLGLRVRPSAEEVSALVASLGEIPDDERQVHFEVPLNPSDAEISAMLDLLAEDSSDAAPAGALVVAPLPEADTTLDTQKPVSTRPRRPCRANQPDPSANEQKKKRRRLRRVSSLDRDAGTSVCATEEVPATGFTDADPNGCTQSAVDPNVGAPSVVGPNGGAACVANVDDEEEEDEVPLTRKNSRQFIASGESSGVPSPALSALISLQELSLANFDQTLEDMVPEDLLSEPVDDGVMEACADVPDAGLRSSRASSTLERDLEGRETDLDRPGPMEVAEGPSTLEVATAENLDPKDGADTCLAPEDVDGDDLARVGSVSHCPAPEGAAGDDPAQVGSANYDPAPEGARAGSPSCTSMDVHAGSPPHSGCMVVAQTLDQGVALEGSVPADRVFGSVEGTELIPTGSLQAASGGGLTPAYQLISPDLGIPSFFSNLQALVDGMASQLRLQGASVPEVASSLACWNPVSLQHRISELEATNAGMTRQISTLEEKHSQDQAELVSTALDDANALSSSLHAQLNSEKEEKCILAASRDSLDRLYRDSSNSLTILERSHHFTMEELDNQRCKLQESADEVTRLKQLISAKDATIKELRASKKSIVQELETARLAAKVAEETSVTLRAQRDRAMDKAIRAGRILMRRPGVVVPEDIRADVNAAPDSSSRPSSSVAPEKDIAK

SEQ ID NO: 309141 - protein, 51 aa, Zea mays
  Clone ID: MRT4577_45000C.1.pep
LVEVQHQELTERWQPDESLSIAAQGERATERAVSGCAVGIRQAGDRKGGDR

SEQ ID NO: 309142 - protein, 54 aa, Zea mays
  Clone ID: MRT4577_45002C.1.pep
ECHLLMNFKSIYKTKQTTCHNVICVISFHKNPSSSKAWAEMCCKELYDFLFMFC

SEQ ID NO: 309143 - protein, 61 aa, Zea mays
  Clone ID: MRT4577_45003C.1.pep
TSLSPCNLPVPEPLTFKQAPPGPLWNLNSGPPPDPVSIWKNPLQKSYYVGVFLPLLKKFGC

SEQ ID NO: 309144 - protein, 122 aa, Zea mays
  Clone ID: MRT4577_45004C.1.pep
MLAVTVSQVVALLSKAAGAEAERWRRRCGGGHDRSAPSPAVGYCCVCISACRDDGDDVRRLPCGHAFHRDCVDRWLARCRRTCPLCRLHVAGGPTVGFVDQQQLQLSDDLVIWFSSLFVAGL

SEQ ID NO: 309145 - protein, 68 aa, Zea mays
  Clone ID: MRT4577_45005C.1.pep
GGCTYRPASWLLSALVSNKGCPPSGPKNKRNEGRLGQPSPLTEQERTSRGGIHRPSIRWQAKERTPTV

SEQ ID NO: 309146 - protein, 153 aa, Zea mays
  Clone ID: MRT4577_45006C.1.pep
QHNWWLVPPFQPQKREAYECHPSVYKSPRARWLRSRGQVGSSVGAFPTAVAWRICHRPYLLGRATAQGPSRQRRRGPRRRAEPGSPGRSRYSSASTQRAPPLLLVAPARGLTRSNESGVGFGAGGNTRRGGVGRSERGGRRVTEGGHATLGRA

SEQ ID NO: 309147 - protein, 94 aa, Zea mays
  unsure (1)..(94): unsure at all Xaa locations
  Clone ID: MRT4577_45007C.1.pep
VGSPSATAATREAERRADGAAWXPSCSRGALTAAKHHRVIVAEFQRAWLDDITGSGRHRTLAAWPPPCPSRCRSRRVVAGGSGGELRKMEMKLR

SEQ ID NO: 309148 - protein, 57 aa, Zea mays
  Clone ID: MRT4577_45008C.1.pep
LSSHLMKLQGLPSRTGRSQIHPSLAPEAKVPLNHGRLTHFHVGKLGKPDCRPGAEGA

SEQ ID NO: 309149 - protein, 96 aa, Zea mays
  unsure (1)..(96): unsure at all Xaa locations
  Clone ID: MRT4577_45009C.1.pep
EQPQXELFVKAGSDGAKIGNCPFSQRLFMVLWLKGVTFNVTTVDTKRRTETVQKLCPGGQLPFLLYGTEVHTDTNKIEEFLEAVLCPPRXPKLAAL

SEQ ID NO: 309150 - protein, 136 aa, Zea mays
  Clone ID: MRT4577_4500C.1.pep
CVQVGIHYRFTNYIAVFPYYLSQFTVYNVLLIWKLMYDSIFYVGTAYIYVGAAPTSAPGRRLGGTCTQGSSSDVVAVRRASAVACSAPAGSPARGVSKGHKAEPAAFNLLRSQNSRFKLSPHDGCFFTLVFKGPLL

SEQ ID NO: 309151 - protein, 1048 aa, Zea mays
  Clone ID: MRT4577_45010C.1.pep
MPRTKNVSAPGGGDDEDPRRPFRQVKGKTVYLEQQEGRKKRRTDRAARAAAAAAAAAAQAELGDQPQTPSDQIAYRVRRLASRPRPSTHTTASTPPPTLPAPVTPVAPSTTTAIPATSTMPASTAPPAPASAPPVPPPRFRERDETEVRPLAVDPRLFDLQRATAARVRRFRYVPVESWLPAQRDPAAVDLFSTRIQESFFRAQMSAQIALRVHWLLDLPAFLLAAGADSEAHLTYLPGLLTLLTTSDSICYGTYDPPRRPHGGVAPGTAHVAALFRPPFSDGSRRSPADFTTAAKYLFELIRRTLLPRMGYREATTHIQLWLLGALVSHSEFDVVDFLICEIEDTVLDGIRARRQLSYAHYLCHIFAQLIRPPQFQGTLEASRLVFGSYRPTPEAPVPASAPVFDSQDEDATLRQFNTQDTVVDDDDDDDDDDDDFGVPPPPPPPMPPRSHDHEAGSSSATPAAPPAIDPAIASILQSLTQQQAHLAAEQTRLSERMLTMFQTIQDRHDSLQQQLLQDWAESRAFMALMLQHSGVSVPPVQSAPPPPLQAPVVPAIQTGPPIPSVGPSPLRPVTFGFYVTETNEKPNSPPLLGIVILSASIRIAQWAAELSEYHITFEPRTTIKSQVLADFIIDWTGPARQQEEPSEKVWTIHCDGTWCHAGAGAAAYITSPTCVKHRYAACLSFALESDRCINNIAESEAIILGLRKLKALGVTTCIIKTDSKVVAGQIEKDYSAKDPTLLQYLTVVRSLEKQFKGFTLQHVDRARNEEADALAKAAARGEALPSDVFYHVIGTPAFRSPEGLQITTNAEGHRIVDLIMAEDWRAPITLFLQGYYHPSDVNEAKRLKHQSQDFTLIEGQLYKKGISQPMLKCVTETEGLQIMREVHNDTCGSHSGPRALAAKQNIICRFGVPSELTVDNGKQFDSQDFRDFCFSIGTKLAFASVYHPQSNGVVERANGKIFTAIKKMLLDDKKGKWADLLPEPVWALNTTECRATGFTPFRLLYGLEAMTPQEIKHGSPRTSALVVPNVDEPTSKDLIDGDRGFAL

SEQ ID NO: 309152 - protein, 471 aa, Zea mays
  Clone ID: MRT4577_45011C.1.pep
MTELEKIAYAVVMASRKLCHYFEAFKVRVTSDRGLGELFRNPEASVCIAKWAAELSEYHITFEPRTAIKLQVLADFIVDWTGSARQQEEPSEKAWTIHCDGAWCTNNIAEYEAVILGLHKLKALGVTTCIIKTDSKVIAGQVEKDYSAKDPALMQHLTTVHSLEKQFKGFTLQHVDRARNEEADVLAKAAARGEALASDVFYHVISTPVVHNLEGLQITTNAEGHRIVNLNMTEDWRAPITLFLQGYYLPVPSELTVDNGKQFDSQDFRDFCFSIGTKLAFASVYHPQSNGVVESANGKIFTAIKKMLLDDKKGKWVDLLPEAVWVLNTTECRATGFTPFRLLYGSEAMTPQEITHGSPRTSASVVPDVDEPTSKDLIDGDCVFALQALNKYQAQTKAWRDHAVIPREFDEGDLVLVRTTRTESRGKLEPKWEGPFIVKMKASPSAYRLTTPSGENLEHSWNIDNLRKFFV

SEQ ID NO: 309153 - protein, 97 aa, Zea mays
  Clone ID: MRT4577_45012C.1.pep
RSRLSAGFSSTSDNNYLPRASRGSTVCAWRSIFPLSLYDVSPMALLASCTWDKSLSLCSMIALGATCAIPVFRTLVDRIDWGAAAFSVAVYCYVVLI

SEQ ID NO: 309154 - protein, 681 aa, Zea mays
  unsure (1)..(681): unsure at all Xaa locations
  Clone ID: MRT4577_45013C.1.pep
MCRRQGEAMMRILVAPSGRSRARQFTWSSRKAARSGVRTEQPVQRQQQQQQPLRRSSLEISHRLRQIRLHTVFIVSPPGLTPPLTPXASTPPPTLPAPVTPVAPSXPPQPYPLPPXPASTAPPPPAPASAPPVPPPRFRERDETEVRPLVADPRLFDLQRATAARVRRFRYVPVESWLPAQRDPAAGDLFNTRIQESFFRAQMSAQIALRVHRLLDLPAFLLAAGADSEAHLTYLPGLLTLLTTSGRYVEEWVRVFYASVWIDPDHHWMRFRFEREYVTITASQIRQLFGFPESTTRLHSLCYDTSDPPRRPHGGVAPGTAHVAAQFRPPFSDGSRRSPADFTTAAKYLFELIRWTLLSRMGYREATTHIQLWLLGALVSHSEFDVMDFLVCEIEDTVLDGIRARRQLPYAHYLCHIFAQLIRPPQFQGTLEASRLVFGSYRPSPEAPVPASAPVFDSQVEDAALRQFDTQDTTVDDDDDDDDDDFGVPPPPPPMPPLSHDHEAGSSSATPAAPLAIDPAIASILQSLTQQQAHLAAEQDRLSERMLSMFQNMQDRQDALQQQLLQDRAESRAFMALMLQHSGVSVPPVQSAPPPPLHAPVVPAIQTGPPIPSVGPSPLRPVTLAFTSPVVSSVCPQPPVPPASAVTTTAMAVSVTSSVPAAPAARPQSESVPAPASTADP

SEQ ID NO: 309155 - protein, 48 aa, Zea mays
  Clone ID: MRT4577_45014C.1.pep
SRDQQFCISFEIIARLSNFFKKKNSYPMEVTHMGSFTAIGTPSNPSGS

SEQ ID NO: 309156 - protein, 87 aa, Zea mays
  unsure (1)..(87): unsure at all Xaa locations
  Clone ID: MRT4577_45015C.1.pep
NIDQIQAVISDGIIAPLXQMLQGAQFDINKEADWGISNATSGGSHXKSSXLVSECCIVPLCYLLVCPDPIIVTVCLDGRENILKVGE

SEQ ID NO: 309157 - protein, 302 aa, Zea mays
  unsure (1)..(302): unsure at all Xaa locations
  Clone ID: MRT4577_45016C.1.pep
MGSRFASHQLSNGLYVSGRPEQPKEKAPTICSTAMPYTGGDIKKSGELGKMFDLHVEKSRKSGPLGNAPSRNTSFGGAASNSGPVSNAGGRSNYSGSLSSSVPGAGGSARAKSNSGPLNKHGEPTKRSSGPQSGGVTPMARQNSGPLPPVLPTTGLITSGPISSGPLNSSGAPRKVSGPLDSAASMKMRATSFAHNQAVTNLNTEDGYSIQGSFPKPILWAVILLFVMGFIAGGFILGAVHNAILLIVVVVIFGFVAALLIWNACWGSRGGIGFVSRYPDADLRTAXDGQYVKVIGXGXCGN

SEQ ID NO: 309158 - protein, 164 aa, Zea mays
  Clone ID: MRT4577_45017C.1.pep
MGSRFASHQLSNGLYVSGRPEQPKEKAPTICSTAMPYTGGDIKKSGELGKMFDLHVEKSRKSGPLGNAPSRNTSFGGTASNSGPVSNAGGRSNYSGSLSSSVPGAGGSARAKSNSGPLNKHGEPTKRSSGPQSGGVTPMARQNSGPLPSVLPTTGLITSGPISS

SEQ ID NO: 309159 - protein, 87 aa, Zea mays
  Clone ID: MRT4577_45019C.1.pep
QRRVLFFFFFFFFFCFFFVIFFFIFPFLRIYFAYSSAFRRVEKGRTTCPWSKSVGGGGKPRRVARASHLTEGGNQDNLWAGCARGPR

SEQ ID NO: 309160 - protein, 147 aa, Zea mays
  Clone ID: MRT4577_4501C.1.pep
RVPPFPEPRAPPSGNGEICLSPGAVGGNGGLSPGPGPLFGDWLGFPPFLGGSLPLVFFFLFPPPPPGSARENSWLFFLWGLPPRGGEGLFNPAPGGFVFFPKLTVGFIFWVGRPVFFFRAGPFKKTGFSPLLVFLVALYLSFWGGVG

SEQ ID NO: 309161 - protein, 66 aa, Zea mays
  Clone ID: MRT4577_45020C.1.pep
GQRHAACCKQQTGGAPAREFYRTDYTDLNATTDSVVTGCRNRDPYDPEPGTNVQSSSETGPSDINL

SEQ ID NO: 309162 - protein, 32 aa, Zea mays
  Clone ID: MRT4577_45022C.1.pep
PGKGPFENLVDHMADPVNNNAGAYATNFVPGK

SEQ ID NO: 309163 - protein, 123 aa, Zea mays
  unsure (1)..(123): unsure at all Xaa locations
  Clone ID: MRT4577_45023C.1.pep
MTQPSGGAQRYYSPALIASIRFFSCNDVRLTRDQFPFNLLTNASYTLTLYFPPYPFSSMIRXHVCEKPXSFNPYMAPTQAIAAMQPIPLSXLVSTHLPALSLVQSLVQTIRAQELQQLVLPVI

SEQ ID NO: 309164 - protein, 53 aa, Zea mays
  Clone ID: MRT4577_45024C.1.pep
EILSHKNNPPIHLLVLLGENVSKTLVSSKGVQLSKIRTPFWMLRAFMNARNEQ

SEQ ID NO: 309165 - protein, 110 aa, Zea mays
  unsure (1)..(110): unsure at all Xaa locations
  Clone ID: MRT4577_45025C.1.pep
MVMVLVVCLALSAASASAXQMPCPCAGLQGLYGAGACLATVMGAWGLCPFAVFLRXCECIPLAXVPYYAGCGLTSAMFQPVRQRCCRLLVRVMDVHFVAQHLLMMMLVER

SEQ ID NO: 309166 - protein, 314 aa, Zea mays
  Clone ID: MRT4577_45026C.1.pep
MDGAEKLRWAFSDGSVTDLLDARSLHGSPDIKKKVQFHSSLVQKLALEKEMEGHVGCVNAIAWNSSGSLLVSGSDDTRINIWNYNNRELVHDIDTGHSANIFCTKFVPETCDEVVVSGAGDAEVRVFNMSRLSGRRPREISMEPTAVYQCHSKRVKKLAVELGNPNVVWSASEDGTLRQHDFRECSSCPRAGSANQECHNVLLDLRCGAKKSLADLPKHPLALKSCDISSVCPHQIIVGGSDAFARLYDRRMLPPLSSCQTKTNPPPCVKMFCPLHLANSKKTYLHLTHVAFSPKGREVLLSYSGEHVYLEDVD

SEQ ID NO: 309167 - protein, 179 aa, Zea mays
  unsure (1)..(179): unsure at all Xaa locations
  Clone ID: MRT4577_45027C.1.pep
LVFRAPAAASLXCCCFIDDKEFLSGSDDGSIELWSIMRKKPILIIKNAHPVLCTNLNSVDNDDESPKENGMHKPENVPSAAQSWVGTVAATRGSDFVASGAGNGLVRLWAIKPDSKGAEPLFDLKLDGFVNSLAIAKSGRFIVAGVGQEPRLGRWGRVRSAQNGVAIHPIRLKDVKEDL

SEQ ID NO: 309168 - protein, 66 aa, Zea mays
  Clone ID: MRT4577_45028C.1.pep
PFMKLRLDRVFQDQFDAKSVEKALASTPVELKFKNPEKWPAPSPKNGFGGGDPFFPPKFTNGPAKK

SEQ ID NO: 309169 - protein, 79 aa, Zea mays
  unsure (1)..(79): unsure at all Xaa locations
  Clone ID: MRT4577_45029C.1.pep
MSCMCGSSCNCGSSCNCGKMYPDLNDKRDVSSQVRAADDGLSDAPETKNAEQIEAAFESGEAAHGCSCHDNXKSTPCNC

SEQ ID NO: 309170 - protein, 50 aa, Zea mays
  Clone ID: MRT4577_4502C.1.pep
VRRVSDLNIRVSFPVHQNVIDSSGFSLVSSPPRLLVGRVLSKTRCSVVCP

SEQ ID NO: 309171 - protein, 527 aa, Zea mays
  unsure (1)..(527): unsure at all Xaa locations
  Clone ID: MRT4577_45030C.1.pep
MAPRSRKRASRPKPRPGSRRGGGGGDDDPFFESAPKRRRGDRDEDIESEDSDDDGVAALGRGFDEDGDEGGKEDEDEETVGEKKMRIAKEWLKKVTEVAKRGQEDDDEDENVSGGRRVAEILQRKQLEESGRKRREIAARVLPPGPQDGFKVLVKHRQPVTAVALSKDSDKGFSGSKDGIIMHWDVETGKCEKYIWPSEDVLVSHHAKPPVSAKRSKQVLALAASSDGRYLASGGLDRHIHLWDIRSREHIQAFSGHRGPISCLAFAPDSSELFSGSFDRSIMQWNAEDRTYMNCLYGHQNEILTMDALSKERILTVARDRTMHLWKIXEESQLVFRXPAAXSXECCCFIDDKEFLXSLECCCFIDDKEVLSGSDDGSIELWSIMRNXPILIVKNAHPVSCTDLNSVDNDDESPKENGIHKPESVSSAAQSWVGTVAARRGSDLAASGAGNGLVRLWAIKPDSKGVEPLFDLKLDGFVNSLAIAKSGRFIVAGVGQEPRLGRWGRVRSAQNGVAIHPIRLKDEKEDL

SEQ ID NO: 309172 - protein, 62 aa, Zea mays
  Clone ID: MRT4577_45031C.1.pep
LLFNHLIRQHPYETLRLLPIPVKFYIIPTTLLQQSTTNLTYSASLIPFITLLISLFHLYSRP

SEQ ID NO: 309173 - protein, 81 aa, Zea mays
  unsure (1)..(81): unsure at all Xaa locations
  Clone ID: MRT4577_45032C.1.pep
QCTLFDALINLCVPDISEDCGELVGXXXINYXKFXIFISTSKSLHTGYXLQLFYESDNRXIAEYQTEIKKVKHYIAVLGSA

SEQ ID NO: 309174 - protein, 168 aa, Zea mays
  unsure (1)..(168): unsure at all Xaa locations
  Clone ID: MRT4577_45033C.1.pep
SSPPRLPPSFRWFLTWPGGTPQGLGFRKRSFPAVFGPFPVSNPPVGPWWGSFRFPLRGCFPPLGFPGGGPFNFFFFLPRGGGLNFFFPPPFGRGWNFFFFCPPPPSWVVFFFFSRPPYPPVGVFFFFFKWFFPPFKKKKKKKKKKKKKKKKKKKKKKKKKXKKKKKKK

SEQ ID NO: 309175 - protein, 112 aa, Zea mays
  unsure (1)..(112): unsure at all Xaa locations
  Clone ID: MRT4577_45034C.1.pep
TRHAYLQXQLLPVXLLATDDFQQEQGFSFNDSGELNPDAYLQEXILLPLSQLAAAYRASFLTQYPLLTFYQQFEANLASLXHLQDLMSFGQLAIXTSAPASYQQHIIGGALL

SEQ ID NO: 309176 - protein, 101 aa, Zea mays
  unsure (1)..(101): unsure at all Xaa locations
  Clone ID: MRT4577_45035C.1.pep
MYLLVPDLHSLRMRVLVMLVDDDLLVIIRFSREWDNICMQMFAELIAENDTMRNFAVFYLGSITXEPDVTTMDELYDPSTVMVFFQNEHIMCDLRTANYSK

SEQ ID NO: 309177 - protein, 113 aa, Zea mays
  unsure (1)..(113): unsure at all Xaa locations
  Clone ID: MRT4577_45036C.1.pep
RQXRGXXSGGKEXSIASLCXLLDXXAXRHARRTXAXASXVXASKEMLAGFSKRRRXDVSLSXAKVQSLTLXXWPKKGTXKLVQXKVKAARACLLXPLKXMQEXSQACWLLKQG

SEQ ID NO: 309178 - protein, 110 aa, Zea mays
  unsure (1)..(110): unsure at all Xaa locations
  Clone ID: MRT4577_45037C.1.pep
YLVLESAMVXKETHSRXMNKLNKSTRXYGARHKLNMIREDDLCILPYLKAEQCLVVFLTGTXPHRLSVLNLYVKVKESSVHTHEENDXLVNGWAIGRDTAVWEKXPEEFM

SEQ ID NO: 309179 - protein, 59 aa, Zea mays
  Clone ID: MRT4577_45038C.1.pep
VIARVTRRLLHQASHHRALRRVDALCYRSCKFDLIATRVPTIYNVNLPRLFRSSDIEHH

SEQ ID NO: 309180 - protein, 145 aa, Zea mays
  Clone ID: MRT4577_45039C.1.pep
GGGGLGAHKNLEGLGGGVFVGKLSPILPFKKGAWGPGGEFRGPQPLGGKPTPQGGPALAFFPPQKEEFPPPEKAPPQKGGGPIFIDPPGGIFIGAHGPPPPLGGWAQKKGQVFKGWLPWGPPGPPEIWEEKVFQKAPPQPPTTKI

SEQ ID NO: 309181 - protein, 91 aa, Zea mays
  Clone ID: MRT4577_4503C.1.pep
KKKNKAKEQLKVKCPVPKNTHPVQFSKIQFGKTTVLIQVNLNPKLQRRGFQMTWVKIINCDKLAMSRGSPQGDWKFQQAQKHQVWAKRPVF

SEQ ID NO: 309182 - protein, 38 aa, Zea mays
  Clone ID: MRT4577_45040C.1.pep
NREYDFMCIHNAICEKEILRPPSVSKIDGAIVVGSDAW

SEQ ID NO: 309183 - protein, 53 aa, Zea mays
  Clone ID: MRT4577_45041C.1.pep
SGSSTYAYKHAWYLFSCRPWRVPRQAAAAIGRRRSASTTREEIDDGGLNPRAE

SEQ ID NO: 309184 - protein, 81 aa, Zea mays
  Clone ID: MRT4577_45042C.1.pep
MICVKSPAAVSRRRDKGVPSIKSRSGTFSSPTLHRRAAGTSAPRFHPHRGKCSWTAPFREQVLHQLMRHVFPTAPTKKTPS

SEQ ID NO: 309185 - protein, 49 aa, Zea mays
  Clone ID: MRT4577_45043C.1.pep
SLCSRFYDQIQPALLEPPSVRRWQLGTLCRIGAIRCTPLQNKKKWTYNS

SEQ ID NO: 309186 - protein, 402 aa, Zea mays
  Clone ID: MRT4577_45044C.1.pep
MDVRDLHQQPQQQQAPPRVGSPPQAGAGGVMMQHAAAFGAAPPPSGLPQASAANVMHGMSLAFNPMASPDASSPISSMKIVDMPLGSMYRPDSGATGLQQQQPGSGGVGASGGAIVAVSGGDLVKKKRGRPRKYGPDGSIGLGLKTAAAGVTEATGAQSGGGGSTPNPDGKRRGRPPGSGKKKQLDALGSSGTSFTPHIITVKPNEDVASKIMAFSQQGPRTTCIISANGALCTATLRQPATSGGIVTYEGHFDILSLSGSFLLAEDGDTRSRTGGLSVALAGSDGRIVGGCVAGMLMAATPVQVVVGSFIAEAKKPKEEQPKREPTSVPPHTAVFGAASTASPPSDGTSSEHSDDPGSPMGPNGSAFTSAGLPLHSTYAAVGWSLSEDQSRYDPDLKMMTD

SEQ ID NO: 309187 - protein, 177 aa, Zea mays
  Clone ID: MRT4577_45045C.1.pep
RAAVAAPLARPTILPARQISPAVAVNATRSYHEKVLDHYSRPRNVGSMNKKDADVGTGLVGAPACGDVMKLQIRVDPETQKISEVKFKTFGCGSAIASSSYLTELVRGMSLDDAGKVKNTEIAKELCLPPVKLHCSMLAEDAIKSAISDYYTKNPNAKVSNLSGTGMKLPEADAAAA

SEQ ID NO: 309188 - protein, 70 aa, Zea mays
  unsure (1)..(70): unsure at all Xaa locations
  Clone ID: MRT4577_45046C.1.pep
HIFCNVRRMVRTSRHALLRLTXRSSSRRKHPRHQEGHTAHPGRRAXGHTAGRDKKTPRQNHKSTTKDPGT

SEQ ID NO: 309189 - protein, 162 aa, Zea mays
  Clone ID: MRT4577_45047C.1.pep
YESFYGDLVQGHFDILSLSGSFLLAEDGDTRSRTGGLSVALAGSDGRIVGGCVAGMLMAATPVQVVVGSFIAEAKKPKEEQPKREPTSVPPHTAVFGAASTASPPSDGTSSEHSDDPGSPMGPNGSAFTSAGLPLHSTYAAVGWSLSEDQSRYDPDLKMMTD

SEQ ID NO: 309190 - protein, 49 aa, Zea mays
  Clone ID: MRT4577_45048C.1.pep
VIIRNIQGQMLCNKDEYLNHTLEWRYMTIIKMYGRKCDRTRGSSRGFRT

SEQ ID NO: 309191 - protein, 70 aa, Zea mays
  Clone ID: MRT4577_45049C.1.pep
SIHCGTVRCYSRFRKLHNMPDNFVTSRLGFLPRDVLQRQPLYCICALIWALLTQRDRVRVLRSSGPRSVL

SEQ ID NO: 309192 - protein, 276 aa, Zea mays
  unsure (1)..(276): unsure at all Xaa locations
  Clone ID: MRT4577_4504C.1.pep
MTKTECLSIGSFVRKAHSTKTNGTTTSIMGFQTKPVTAEALFQCTQDHEEYLQAYVRSFLRLRAQAPTMPNEIVIEVMIMGLRPGPTTQYFARKPPQTLEKLLQKMDEYIRADNDFRQRREEAYRYFEMTXGFRGRLHPRQVRSIHNPSSSGDKGNPTQGQQHSSQSSGAQQSSFRPPTPTGRGGRSFGGRFGNXPRRLFCLFYGEDKGHTTRTCQPXQASWAQLPPPPPPPPLVPAQNHDQQPEGHLQPQQQRDLREQSEADTANSTMPESRHIY

SEQ ID NO: 309193 - protein, 58 aa, Zea mays
  Clone ID: MRT4577_45050C.1.pep
TRNRETLRAMRPTDVGYRSLRVQRRYRVTWRQSTLRRLLYIRSSELYERTQRGRTTEK

SEQ ID NO: 309194 - protein, 72 aa, Zea mays
  Clone ID: MRT4577_45051C.1.pep
GPGSLVPFSPGGDGWASGAARYHFPGLRRRRVSTRWSTNGPLRAKYNAKMAGMNAPIAKPKGSKKLKDWDAK

SEQ ID NO: 309195 - protein, 76 aa, Zea mays
  Clone ID: MRT4577_45052C.1.pep
HPQDDHDTQITVTLPHPIILPRPHAVPAPTVLPSTDTTCTLPIPATTTTPHTDITVEETLNTLRQTTEQLRGDPPP

SEQ ID NO: 309196 - protein, 68 aa, Zea mays
  Clone ID: MRT4577_45053C.1.pep
VAYGRANGAHKASPRTVFVYFNWFNAEALYAPPKRGLRADPLRLGTLARRCRRHRGAGTGARPSPRTR

SEQ ID NO: 309197 - protein, 430 aa, Zea mays
  Clone ID: MRT4577_45054C.1.pep
MSVAAGVSDAAIAVRDKLRGKIGQTKVKRYWPGKAPEWADDVDEDVDLRTARVSLDKAFPRDEDGDVPAKDDRRLRRLAETRAENKEELRADHRRIRQAEIVSTAEEENERQEADADEEDEEAQEERRRRIRARQLLREQEELLPQEEEEPVEAEESEEESEYETDSEDEQMGMAMVKPVFIPKSQRDTIAERERLEEEERQLEELVKKRLEARKIETRQIVVEEIRKEEHIEKALNEEANIEDVDTDDELNEAEEYESWKNREIARIKRDREERDARLKEKEEIEKVRNMTEEERREWERKNPKPLRQTKQKWKFMQKYYHKGAFFQEGADDVIQSAGKEDIYTRDFSEPTGEDKMDKSILPKVMQVKHFGRSGRTKWTHLVNEDTTDWNAPWSTNGPLRAKYNAKMAGMNAPIAKPKGSKKLKDWDAK

SEQ ID NO: 309198 - protein, 116 aa, Zea mays
  unsure (1)..(116): unsure at all Xaa locations
  Clone ID: MRT4577_45055C.1.pep
LRCTEINAQVVLKPTNLDGVYYTATRQNPNDRHVEQVSYHEVITRALSVMDMPVFSIQQASRLAMLVSGXQKPVNISKAAVGYKIGTFCGRTRCQGLNGGTLVQETRLVNLVSSPR

SEQ ID NO: 309199 - protein, 57 aa, Zea mays
  Clone ID: MRT4577_45056C.1.pep
RYELRTRLSLSSQRHVVKVGTWFALVQSPSVAAYLGWHNCFVFFLPWTAVLSSVAFS

SEQ ID NO: 309200 - protein, 77 aa, Zea mays
  Clone ID: MRT4577_45057C.1.pep
SLDFKHQGRKALLFELLDIVPHHFPDYCRACFFWSRGHLFPFCPSIKVLVKFFGKLFFCGCKQYFLTFFFVFFVNRP

SEQ ID NO: 309201 - protein, 196 aa, Zea mays
  unsure (1)..(196): unsure at all Xaa locations
  Clone ID: MRT4577_45058C.1.pep
RAWYNGQQMFPTLQAMTXERRVGKLGXPGASFGVFAILTLTVWVAVYDRVLVRPLFRLTGHARGFNLRQRMGAGLVLFAVDMAVAAHTESVRRAAALAEGLRDSNPLTGERPVRMSAINLVPLHCLTVLVQGLNLIGQIEFYYFEFPKTMFSIXVFLLALGLGFGAVLGNAIHGVIYPGTPSGGSPDGWLASYLEQ

SEQ ID NO: 309202 - protein, 278 aa, Zea mays
  Clone ID: MRT4577_45059C.1.pep
MNTRQPGPEQPRRGGPRDPRPRPIPPPPPPPPRLPDPHPMGSLGGDAEPQGARGRPRFLCLHGFRTSGEIMRKQVLGKWPADVTARLDLVFADAPFPAEGKSDVEGIFDPPYYEWFQFDKSFMEYRNFDKCLAYIEELMIKDGPFDGLMGFSQGSILSAALPGLQEQGLALTRVPKVKYLIIIGGAKFQSPTVAGKAYANKIACPSLHFIGENDFLKVHGEKLIESCVDPFVIRHPKGHTVPRLDDESLVVMHRFLEKIEGEVLEYSSKDVNETEVGM

SEQ ID NO: 309203 - protein, 229 aa, Zea mays
  unsure (1)..(229): unsure at all Xaa locations
  Clone ID: MRT4577_4505C.1.pep
MAGKGDGPAIGIDXLGTKYSCXGVXQHERVQILAIDQRNRTTPSDVRFTDSERLIEDAAKNQLLMNPINTVFDAKRLICSRCSDGSVHRDIRLMXFKVISVPGEKTLIVVPYKGEENQLATEEISSSGLIQMREIDEAYLAITIKNAVCTVPAYFNDSQRQATKDAGVIAGLNVLRIINEPTAAAIAYGLDKKATSVGEKXVLIFDLGGXTFDVSLLXIEEGIFEVRPQ

SEQ ID NO: 309204 - protein, 182 aa, Zea mays
  unsure (1)..(182): unsure at all Xaa locations
  Clone ID: MRT4577_45060C.1.pep
GARVAGSCDALTNLTFISTYYYQIPYVLYNAKQSFMEYRNFDKCLAYIEELMIKDGPFDGLMGFSQVTSRTARVEMRPPPLQFLWAMNQLLDXGCELWCADVGXGSILSAALPGLQEQXRSCGSYNTRSRAGSVLLAASSYSVAFVFSWQGLALTRVPKIKYLIIIGGAKFQSPTVASKAYA

SEQ ID NO: 309205 - protein, 309 aa, Zea mays
  unsure (1)..(309): unsure at all Xaa locations
  Clone ID: MRT4577_45061C.1.pep
MGSLGGDAEPQGARRRPRFLCLHGFRTSGEIMRKQVLGKWPADVTARLDLVFADAPFPAEGKSDVEGIFDPPYYEWFQFDKXAAAYAHAHPPAHYPPPSPPRSRRPADFVKLIVVSLVFFCGARVAGSCDALTNLTFISTYYYQIPYVLYNAKQSFMEYRNFDKCLAYIEELMIKDGPFDGLMGFSQGSILSAALPGLQEQGLALTRVPKVKYLIIIGGAKFQSPTVAGKAYANKIASASXGENDFLKVHGEKLIESCVDPFVIRHPKGHTVPRLDDESLVVMHRFLEKIEGEVLEYSSKDVNETEVGM

SEQ ID NO: 309206 - protein, 559 aa, Zea mays
  Clone ID: MRT4577_45062C.1.pep
MGSSGFSWTLPDHPKLPKGKPVAVVVLDGWGEANPDQYNCIHVAQTPVMDSLKNGAPEKWRLVKAHGTAVGLPSDDDMGNSEVGHNALGAGRIFAQGAKLVDQALASGKIYDGDGFNYIKESFESGTLHLIGLLSDGGVHSRLDQLQILLKGVSERGAKKIRVHILTDGRDVLDGSSIGFVETLENDLLELRAKGVDAQIASGGGRMYVTMDRYENDWDVVKRGWDAQVLGEAPYKFKSALEAVKTLRAQPNANDQYLPPFVIVDDSGNAVGPVLDGDAVVTINFRADRMVMLAKALEYADFDNFDRVRVPKIRYAGMLQYDGELKLPSRYLVSPPEIDRTSGEYLVKNGIRTFACSETVKFGHVTFFWNGNRSGYFDETKEEYVEVPSDSGITFNVAPKMKALQIAEKARDALLSGKFDQVRVNLPNGDMVGHTGDIEATVVACKAADEAVKIILNAVEQVGGIYLVTADHGNAEDMVKRNKSGKPLLDKNGGIQILTSHTLQPVPVAIGGPGLHPGVKFRNDIQIPGLANVAATVMNLHGFEAPADYEQTLIEVADN

SEQ ID NO: 309207 - protein, 559 aa, Zea mays
  Clone ID: MRT4577_45063C.1.pep
MGSSGFSWTLPDHPKLPKGKPVAVVVLDGWGEANPDQYNCIHVAQTPVMDSLKNGAPEKWRLVKAHGTAVGLPSDDDMGNSEVGHNALGAGRIFAQGAKLVDQALASGKIYDGDGFNYIKESFESGTLHLIGLLSDGGVHSRLDQLQLLLKGVSERGAKKIRVHILTDGRDVLDGSSIGFVETLENDLLELRAKGVDAQIASGGGRMYVTMDRYENDWDVVKRGWDAQVLGEAPYKFKSALEAVKTLRAQPKANDQYLPPFVIVDDSGNAVGPVLDGDAVVTINFRADRMVMLAKALEYADFDNFDRVRVPKIRYAGMLQYDGELKLPSRYLVSPPEIDRTSGEYLVKNGIRTFACSETVKFGHVTFFWNGNRSGYFDATKEEYVEVPSDSGITFNVAPNMKALEIAEKARDALLSGKFDQVRVNLPNGDMVGHTGDIEATVVACKAADEAVKIILDAVEQVGGIYLVTADHGNAEDMVKRNKSGKPLLDKNDRIQILTSHTLQPVPVAIGGPGLHPGVKFRNDIQTPGLANVAATVMNLHGFEAPADYEQTLIEVADN

SEQ ID NO: 309208 - protein, 556 aa, Zea mays
  Clone ID: MRT4577_45064C.1.pep
MASSWTLPDHPKLPKGKPVAVVVLDGWGEANPDQYNCIHVAQTPVMDSLKNGAPEKWRLVKAHGTAVGLPSDDDMGNSEVGHNALGAGRIFAQGAKLVDQALASGKIYDGDGFNYIKESFENGTLHLIGLLSDGGVHSRLDQLQLLLKGVSERGAKKIRVHILTDGRDVLDGSSVGFVETLENDLLELRGKGIDAQIASGGGRMYVTMDRYENDWDVVKRGWDAQVLGEAPYKFKSALEAVKTLRAQPKANDQYLPPFVIVDDSGKAVGPVLDGDAVVTINFRADRMVMLAKALEYADFNNFDRVRVPKIRYAGMLQYDGELKLPSRYLVSPPEIDRTSGEYLVKNGIRTFACSETVKFGHVTFFWNGNRSGYFDETKEEYVEVPSDSGITFNVAPKMKALQIAEKARDALLSGKFDQVRVNLPNGDMVGHTGDIEATVVACKAADEAVKIILDAVEQVGGIYLVTADHGNAEDMVKRNKSGKPLLDKNGGIQILTSHTLQPVPVAIGGPGLHPGVKFRNDIQIPGLANVAATVMNLHGFEAPADYEQTLIEVADN

SEQ ID NO: 309209 - protein, 229 aa, Zea mays
  unsure (1)..(229): unsure at all Xaa locations
  Clone ID: MRT4577_45065C.1.pep
MFARSCLRSTRTLNGLRKGPSAIAKRAASSSANAAGDATATRLNLAAAASTTLALGSMAWYYHLYGPVAFAMXTPAEEGLHPTKYPWVHNQWFKTFDHQXXRRGFQXYQEVCQSCHSLSRVPYRXLVGSILTVDEAKALAEENEYPGEPDEQGEIQMRPGKLADYMLPPYKNEEAARFANNGALPPXDLSLIIKARPXGGCDYIFSLLTGYPXEPPAGVQVAPGMNFNP

SEQ ID NO: 309210 - protein, 45 aa, Zea mays
  Clone ID: MRT4577_45066C.1.pep
SLARACSRSAIARGAMAASCSACDGDLSSSLRPIFYYNPPNVGVK

SEQ ID NO: 309211 - protein, 65 aa, Zea mays
  Clone ID: MRT4577_45067C.1.pep
IFLKTKATSLLKKPCKQTVSLRPGHVKSHTIHTTTTLCVRLCVIQVIETAYAYAHTFDHPYDQAY

SEQ ID NO: 309212 - protein, 73 aa, Zea mays
  Clone ID: MRT4577_45068C.1.pep
YSPTVGEFMVSFNILNGLNLLYVFRKSDLLNPNLDMGFQLGSFTCNYRYKHYYIQFVYTSIYSPYIYSCHFIF

SEQ ID NO: 309213 - protein, 55 aa, Zea mays
  Clone ID: MRT4577_45069C.1.pep
KKKKKKKKKKKKKKKKKKKKKKKKKKKKKKIKKFKAKKKKKKKSFYLPGGAKGKF

SEQ ID NO: 309214 - protein, 120 aa, Zea mays
  unsure (1)..(120): unsure at all Xaa locations
  Clone ID: MRT4577_4506C.1.pep
RGSPPATHRXIFPAQHLKECSPLVAPPTPKESPPPLGPRLKGGKQIFVKTLAGKTITLGGEGFGPPANGKGKIPAKEGVPPAHQGFFFPGKQLEDGCPPPDFNIPKEGPPPLGVRLPGGF

SEQ ID NO: 309215 - protein, 113 aa, Zea mays
  Clone ID: MRT4577_45070C.1.pep
NMVWNQESLRRLIKKVGVHCALGSDHQPYRKLVMFQDILRFKQDNSRIWHDEVPSSARISHHVKSWIAHSAFILLLETSSCFSGVRILAWMPSSSFRSGPLRVIHRSTASVAA

SEQ ID NO: 309216 - protein, 45 aa, Zea mays
  Clone ID: MRT4577_45071C.1.pep
QTPKRSTTTPSLVAPYRKISDHLLGPGSRFLGHAWGLPKIKKYIS

SEQ ID NO: 309217 - protein, 110 aa, Zea mays
  Clone ID: MRT4577_45072C.1.pep
NGLSIEKHYVANLTCYSSDLTIIKCQVLNQIVYELPSEHPLAETRPLRELLGHTPPQVRSFAPPGLSCWEQGMSELNFVNQLASPQIISLENLLCVDIWYSYSHMPHGII

SEQ ID NO: 309218 - protein, 62 aa, Zea mays
  Clone ID: MRT4577_45073C.1.pep
QGWVKGPHVWLARSDRAWSGANTLLLAVNKKRTARESPKCSRPPCTYTAVGSAPGKWPAQPQ

SEQ ID NO: 309219 - protein, 55 aa, Zea mays
  unsure (1)..(55): unsure at all Xaa locations
  Clone ID: MRT4577_45074C.1.pep
LLTFPSGQQPQAEDENTPQKRVDKIFDQMXDKNHDDKLTLEEFREGSKADPRIVQ

SEQ ID NO: 309220 - protein, 48 aa, Zea mays
  Clone ID: MRT4577_45075C.1.pep
AYITKYKYVIYTTYCVTFFVRAGRAEVTIIHGCNLNLQSNKACLQQLT

SEQ ID NO: 309221 - protein, 153 aa, Zea mays
  unsure (1)..(153): unsure at all Xaa locations
  Clone ID: MRT4577_45076C.1.pep
MALPKPSTAVLLLLAEGAVLALARADLTHYNCLKNKKETGQNLSTHDVTLTLEPLANXPSLIVVTYTLHPLSHSKVHQCWWTVHLRAPDTDQLDLHNGTNSGCFYLAHNAHSVQHMPRFDTXHGSPMHGRFPGDGCAMQWRLSVQELLSCLLA

SEQ ID NO: 309222 - protein, 47 aa, Zea mays
  Clone ID: MRT4577_45077C.1.pep
RRLLLESLWYPVGSLCLLLVSARSALLAPTKVLASCQGVFLKRGLPP

SEQ ID NO: 309223 - protein, 132 aa, Zea mays
  unsure (1)..(132): unsure at all Xaa locations
  Clone ID: MRT4577_45078C.1.pep
SILYRYRHVRTRVEHHFXSRADGVPPLTYPQKAGTGRNNGFICLENRPXRDVQVSTSHTGEHGHAQXQFVVIXIFDWKKLEDIAXTSHYCKIPYVNCTEYQVIDISEDVSDDLLTSDGCTKDDLRLPSDESL

SEQ ID NO: 309224 - protein, 55 aa, Zea mays
  Clone ID: MRT4577_45079C.1.pep
NGASNQRVQMAQVLLLTVVLQPKYSKTILLINQDLKVTWFPMHNLKGPIFPPILN

SEQ ID NO: 309225 - protein, 89 aa, Zea mays
  Clone ID: MRT4577_4507C.1.pep
VRLSSRYEIVSLLHQMAGVLVRKEKQHCPARAPKRIRLGTSGGYARRPSQCRQPQRHPRRRLSAGTLGVESVRVGGAGRDGKGRIRLPG

SEQ ID NO: 309226 - protein, 108 aa, Zea mays
  Clone ID: MRT4577_45080C.1.pep
PPGKNKPPLAPTLPLKKTNPFMKTQPLVFCTLAQGRLPRDFLNEPPQDRVKATPRDGTKSHDVPVGGQKGAEREGKIRTPRGPWGAPRTAYSWKQRTPPPPSPHVVKA

SEQ ID NO: 309227 - protein, 834 aa, Zea mays
  Clone ID: MRT4577_45081C.1.pep
HRLSTIQRQVSGSDLPQGGEFVPFPVTRRANSYSIMMEEDMENGRSYQERPRTFSTVRSKSSIPLALRLLMRINPRALIILSLLVFSGVLYVGASTSPIVVFVFCICTLSLFFSLYLTKWVLAKDEGPPEMSEISDAIRDGAEGFFKTQYGTISKMAFILAFVILGIYLFRTTTPQQEASGLGRATLAYITVASFLLGALCSGIAGFVGMWVSVRANVRVSSAARRSAREALQIAVRAGGFSAIVVVCMAVFGVAILYSTFYVWLGVDSPGSMKVTDLPLLLVGYGFGASFVALFAQLGGGIYTKAADVGADLVGKVEQGIPEDDPRNPAVIADLVGDNVGDCAARGADLFESIAAEIISAMILGGTMAQRCKIEDPSGFILFPLVVHSFDLVVSSVGILSIRGTRDSGLISPIEDPMAIMQKGYSVTIMLAVLTFGASTRWLLYTEQAPSAWLNFALCGLVGIVTAYAFVWISKYYTDYKHEPVRLLALSSSTGHGTNIIAGVSLGMESTALPVLVISVAIISAYWLGQTSGLVDESGNPTGGLFGTAVATMGMLSTAGYVLTMDMFGPIADNAGGIVEMSQQHESVREITDVLDAVGNTTKATTKGFAIGSAALASFLLFSAYMDEVASFAQLPFKEVDIAVPEIFVGGLLGSMLIFLFSAWACSAVGKTAQEVVKEVRRQFIERPGIMDYKEKPDYGRCVAIVASASLREMIKPGALAIISPMAVGVVFRILGHYTGQPLLGAKVVASMLMFATVAGILMALFLNTAGGAWDNAKKYIETGALGGKGSESHKAAVTGDTVGDPFKDTAGPSLHVLIKMLATITLVMAPIFL

SEQ ID NO: 309228 - protein, 102 aa, Zea mays
  Clone ID: MRT4577_45082C.1.pep
QLVIIIIIAACWKKLSSHNNTPHPTRRHHKESLLCRLRNHPTIINCALTTGCSPGKPPVPPALLNNPTPREKRLAYYSPPWLFFLSPRRPTTDYRSSPAPHK

SEQ ID NO: 309229 - protein, 78 aa, Zea mays
  unsure (1)..(78): unsure at all Xaa locations
  Clone ID: MRT4577_45083C.1.pep
SLLRSRLRFFSNCKEGGGVFILKVKEGPKEDKRKLLXVLCPSGIYGKLFFHFYTRXFFXFRYSAAFRSRKGPIAMKWR

SEQ ID NO: 309230 - protein, 191 aa, Zea mays
  Clone ID: MRT4577_45084C.1.pep
VPEIFVGGLLGSMLIFLFSAWACSAVGKTAQEVVNEVRRQFIERPGIMDYKEKPDYGRCVAIVASASLREMIKPGALAIISPMAVGVVFRILGHSTGQPLLGAKVVASMLMFATVAGILMALFLNTAGGAWDNAKKYIETGALGGKGSESHKAAVTGDTVGDPFKDTAGPSLHVLIKMLATITLVMAPIFL

SEQ ID NO: 309231 - protein, 81 aa, Zea mays
  unsure (1)..(81): unsure at all Xaa locations
  Clone ID: MRT4577_45085C.1.pep
SVFGGGLPFPGAPSSKGRRLRSCERASPXGPAGSCAFFSXLRARCYLVRHSALPLPRNHQRLPLCDSSXLPASLPCCDSCL

SEQ ID NO: 309232 - protein, 69 aa, Zea mays
  Clone ID: MRT4577_45086C.1.pep
GFYDDALPLPNDKVTESGVPYTGCYNRKEKPTLGLCKPKDGLPFPTEIIPRRSGKYRHLSLCHVSNTKT

SEQ ID NO: 309233 - protein, 64 aa, Zea mays
  Clone ID: MRT4577_45087C.1.pep
TLLVNLFANTSAPLNPGKLQFYLSIGTAKYNLKFRLMCDMLVFGGVFCATKESIAAASNSSSSH

SEQ ID NO: 309234 - protein, 197 aa, Zea mays
  unsure (1)..(197): unsure at all Xaa locations
  Clone ID: MRT4577_45088C.1.pep
MMSRFAHLGKSRKLAETLLVASKPNTASGQNIASSFAFGLGYSSRAFLHGKVHNGPNTSYMLGRANDSLHWSTGVRKFSILSSCSQNAFQNQLAWKRLVALGSRAPKASPIFSKVACAIGLAVSRSNITPYLVAFIAGEVMLGQKTSADGEYYPIRERXQDGRIYVTSLIYSAVELVIIIFRSIYLALLFTPSILMA

SEQ ID NO: 309235 - protein, 81 aa, Zea mays
  Clone ID: MRT4577_45089C.1.pep
FNIHLLTTPTSNFSLKFPKLKSLHLFLPTSNFEKPYISPINSPFNQSPFPISLYTKNPPPHNLSKNFPNPNYKSTPPFIPI

SEQ ID NO: 309236 - protein, 119 aa, Zea mays
  unsure (1)..(119): unsure at all Xaa locations
  Clone ID: MRT4577_4508C.1.pep
VLPALRFHWPFVLHTSCTWDSRGVXHFNRLALHPPXACRFCCDLARSDCPSLLFFPLVAEWDALCAGALIAWVVGVPLIVSVNFASSLGPPPFAPFLSFLASFPGFPVRFLNWGLLLGF

SEQ ID NO: 309237 - protein, 122 aa, Zea mays
  unsure (1)..(122): unsure at all Xaa locations
  Clone ID: MRT4577_45090C.1.pep
RCVTAWALHALSGIKDRLLVWGPLLPSKRALAPLPVGRCNTRRTVHVXQSKNALDQIAVADXKNCDRLLMACETPLLMEFWALWXVPCQKIAPMIYELPNDYTNKITCCIVNTDDSLYMAST

SEQ ID NO: 309238 - protein, 58 aa, Zea mays
  Clone ID: MRT4577_45091C.1.pep
ISVFVKIDLHVCLGVSAPSFNFSRAKCRLRGTASSVINITAATHLQGHWASNRRSRTS

SEQ ID NO: 309239 - protein, 156 aa, Zea mays
  Clone ID: MRT4577_45092C.1.pep
MSTPTRKRPRKTNGSTSSSSSAMRRTTSLSDLAPPPDLSGRPKTRAARGHAVAGPGTAWGAEITMTHSADFLPAMETAAFLKACGICNRRLGPGRDTFIYMGEVAFCSQECRQQQMNLDELMEKKCSTPAGGGGGGVGGGGGGGSDQPGKSSTVAA

SEQ ID NO: 309240 - protein, 150 aa, Zea mays
  unsure (1)..(150): unsure at all Xaa locations
  Clone ID: MRT4577_45093C.1.pep
LTQNATVRCSLSPFPQLDDEGYHKKTFSMTYXEMXSLFFDKXSPDTRASMYTHADMNYADPQEIRNYLCSEMLSVPTIYPFFXTTDMLVILAICVYATXLHRNRLSEHRIQQLMTAVLVARMLYCISADEDHHYIRTDETPXGXDVMFYL

SEQ ID NO: 309241 - protein, 134 aa, Zea mays
  Clone ID: MRT4577_45094C.1.pep
YIYGVRYKRHLKPSNLKLLDTRAPTEARTENLWRHIIYIYTLHLLERRRQVDGDARQVRVPQARPRNPVLLGRAGALRRRHRRRRFPSSLKPDFAGGVENLKCCSLATMVASLTDFDVREEVPGRVGGPLGQPG

SEQ ID NO: 309242 - protein, 66 aa, Zea mays
  Clone ID: MRT4577_45095C.1.pep
CTHCYSKFVDFLLYWFRGSLPQNFFPPNSSERENSWYGFMCRTQPHWPDPAKKLNPVCRPPKGNQP

SEQ ID NO: 309243 - protein, 100 aa, Zea mays
  Clone ID: MRT4577_45096C.1.pep
KRTTDGARKKRWKKMSILWELSYWKDLEVHHNIDVIHVKKNVCGSLLGTLMSDRWKTKDHAKARANLEELDIRPELYPDSTSAQPPLSRIYCQKKPEWQS

SEQ ID NO: 309244 - protein, 575 aa, Zea mays
  Clone ID: MRT4577_45097C.1.pep
PATFPEGLKSLDLSGNRLSGGIPPGLGSCATLRRLRLSSNWLAGTIPPRIGELARLRVLDLSGNRLTGGVPPELLHCRGLVRMDLSRNLLHGRLPSGLAQLKNLRFLSLSGNNFSGEIPSGLGQLGSLEFLNLSNNSLSREVPADLVALRNRTVLLLGNNKLSGEEEITAAAPGSPVHVVTAHSVTGELFPVSPIATAIRKLIDTGPGTSNGSTTTTSSSNGGDGGLGTKEIAAIASASAIVVLLLVALTLCICTRKWRLKPSERSFASKEVKVFADVDIGAPLTYETVVRATGNFNASNCIGNGGFGATYRAEVAPGVLVAIKRLAIGKQHGDKEFQAEVRILGQCRHPHLVTLLGYHINESEMFLIYNYLPGGNLERFIQERGRRPISWRRLHKIALDVARALAYMHDECVPRVLHRDVKPNNILLDNECNAYLSDFGLARLLRNSETHATTDVAGTFGYVAPEYAMTCRVSDKADVYSYGVVLLELISDKKALDPSFSPYGNGFNIVSWAVRLIQRGRVREFFVEGLWEKAPHDDLVEFLNLAVRCTQESLASRPTMKHVLRCLRELRPPSY

SEQ ID NO: 309245 - protein, 92 aa, Zea mays
  Clone ID: MRT4577_45098C.1.pep
RGRLLPSLRLQVCWLWTCPGRVSSCRAAVLSCRVVGGVFSVRVVVPRVGSPCPGAPSVAASSCWLPRHRAGGCRPSPYVCSPPVWLARARGH

SEQ ID NO: 309246 - protein, 51 aa, Zea mays
  Clone ID: MRT4577_45099C.1.pep
RHKRRHARHARKAPQLILYKRTPSITKARDTYHVYRKHYLIHMGEHAHRLE

SEQ ID NO: 309247 - protein, 65 aa, Zea mays
  Clone ID: MRT4577_4509C.1.pep
IRTMVHSFIILSWFRCARLYCTLFFFRGCLHVSFNTSKCWFLRPNFAFGLRVIVVWQCSSTSISC

SEQ ID NO: 309248 - protein, 126 aa, Zea mays
  unsure (1)..(126): unsure at all Xaa locations
  Clone ID: MRT4577_450C.1.pep
CQQREVQSTSKRLMNGSTQAVEPVSGCKVRXVWKMHHERRVQVYRWIQGGEWRHAKPTHKKRGQAGGQQQSQTHPWYGRAWYATGTAHMPKHAPASSRGTKCADERLGARARARPVREKTWADTRS

SEQ ID NO: 309249 - protein, 257 aa, Zea mays
  Clone ID: MRT4577_45100C.1.pep
MEARCLLLLAVLLLAGAHGGEAQPLVPGVFTFGDSSVDIGNNDYLHTLIKADFPPYGRDFPNRVATGRFCNGKLATDITADTLGFTSYPPAYLSPQASGKNLLIGANFASAGSGYYDHTALMYHAIPFSQQLEYFREYQSKLTAFAGSSQAKSIISGSLYIVSFGASDFVQNYYINPLLFKTQTVDQFSDRLVSIFVNSATQLYGMGARRIAVTTLPPLGCLPAAITLFGHGSTGCVSRLNSDSQRFNGKMSAAVSS

SEQ ID NO: 309250 - protein, 110 aa, Zea mays
  Clone ID: MRT4577_45101C.1.pep
KQKKLLLHLGGGGVLIQKQKFFPLAKQKGQKLEAYINWLEPPKKRGLGQKKIKSWEGTPFLLVRGGPPPPHRKLAQQNFFKNNGLRAQKHTEFFPFKALAESKRIVRALD

SEQ ID NO: 309251 - protein, 91 aa, Zea mays
  Clone ID: MRT4577_45102C.1.pep
VLLGEYLIALSGGLLRLLQVEGHFRIMLIYATRSSNVLLYPSQVKPFLHCRPLGMHAIPPPMDEAGIYTGLLIMFTKLCIHLGKKKKKKGP

SEQ ID NO: 309252 - protein, 183 aa, Zea mays
  Clone ID: MRT4577_45103C.1.pep
IAAKLFYYQRRRPPPLPEPTEPRGLDSSSAARRRVHPIRSAHHRPGYEVVRGNQIERRASSGSITEPTRNVLFSTRHSATASNDRLPDAVQQAKERLHQRLRSVDLFSGRRQTSPAVGTIWAGPDLPSECDICSSEDGWLAHRTIRFNSSASLSAYKDKQITAETFSNAAVVAPHDLRPVSKL

SEQ ID NO: 309253 - protein, 90 aa, Zea mays
  Clone ID: MRT4577_45104C.1.pep
VCTHPTPKDCKGLKHITYRLKICRERFLKKRKKRKLGESNISGKKAWNRNVFRVKNSKAFVQGPDRKNNSKTNKQSYRGPGGLPTTLLPL

SEQ ID NO: 309254 - protein, 47 aa, Zea mays
  Clone ID: MRT4577_45105C.1.pep
VTKKIKGMISSKELVLKIFNTKRERKHQSGFSHHIILVNFGLNNHTK

SEQ ID NO: 309255 - protein, 129 aa, Zea mays
  unsure (1)..(129): unsure at all Xaa locations
  Clone ID: MRT4577_45106C.1.pep
LLVSFCSGRHNLLSKQQLSDGLXFVLTLLEDTLSDAPRATEYLGRLFARFVEESILLLEEVGKLIQEVGEARGXLIRDGIAADILGAVLDSIKSDKGDSFLNEVKSTSSLKLVDFRPHHLKRSKLDAFM

SEQ ID NO: 309256 - protein, 151 aa, Zea mays
  Clone ID: MRT4577_45107C.1.pep
LRYLEARVAGRGLLVRGWAPQLLILSHDAVGGFVTHCGWNSTLEAITAGLPVVTWPHFVDQFLNEKMTVEVLGIGVSVGVKEPLTYQVTKKEILVGRDVVEAAVRTVMGGSEDAEERRRRARALASKAQLATQIGGSSHGNLQDLVKRFEA

SEQ ID NO: 309257 - protein, 84 aa, Zea mays
  Clone ID: MRT4577_45108C.1.pep
CALSASPRLCIYICVSVSMRAYPCWLCFSMSHADVHMVVGYVVRCPRSPLPGVQVRACRLFLTLPGVIRCQQGKCSPRPLSAPS

SEQ ID NO: 309258 - protein, 71 aa, Zea mays
  Clone ID: MRT4577_45109C.1.pep
IKVVCCCKKKKKKKKKKKKKKKKKKKKKKKKKKKKKKKKKGKKKKILKRPLWPLTTLKGKILKIPIKLAGR

SEQ ID NO: 309259 - protein, 116 aa, Zea mays
  unsure (1)..(116): unsure at all Xaa locations
  Clone ID: MRT4577_4510C.1.pep
QQNLGVQTHSTFQIRSSQNMQDIHVTTLLNSAQEICSQEANTLEIRWHVGIHRRSPATWTRRRHSTIKVLAPETRTWRWVAPSITKCACRQPTCSLLYAVHRASTNSKATICPXPS

SEQ ID NO: 309260 - protein, 35 aa, Zea mays
  Clone ID: MRT4577_45110C.1.pep
TTTERRKPIRTNPQPQSYKPPILYSCNPGGHGLLL

SEQ ID NO: 309261 - protein, 96 aa, Zea mays
  unsure (1)..(96): unsure at all Xaa locations
  Clone ID: MRT4577_45111C.1.pep
MGFEADLHRIQGPWNPQEDQPLPPVLEPHRPPHLTGNRPQNPGPAGQSCXRLRGATHLPPKVNPRPFPAKKNPALVRPTPPLGNRWAALGRFFPGR

SEQ ID NO: 309262 - protein, 149 aa, Zea mays
  Clone ID: MRT4577_45112C.1.pep
MEVQVFDLSSDSEGEVTAHSPDHKRPSRQPGADPNRGGGETGSSALDSLFEQAGAAKPQRHPSDALKKGKEKAVEGESAGPPKHSGELLGAAGRVLGSGSGPWSALMSKCKAGDGGNNGAGCWGSWGDRDQLTNSTPMPRLGSERKGLM

SEQ ID NO: 309263 - protein, 100 aa, Zea mays
  Clone ID: MRT4577_45113C.1.pep
HLLYFERPLQLTRLVWKNQVFALGRPLLSVIFTWLSYEYVGVVHTSSHKLLVMIHWSTAMICVLIIVMLISPSSSQISNCIVSCCIKQVQVCHNPHAGHR

SEQ ID NO: 309264 - protein, 79 aa, Zea mays
  unsure (1)..(79): unsure at all Xaa locations
  Clone ID: MRT4577_45114C.1.pep
VRTAALIDVFLSIXXMFVSMFLVHSILNIHLVFGSFIAFISEKILPLFGSASGRFLAARSRSWKQTLRFWRGFCPTRFG

SEQ ID NO: 309265 - protein, 102 aa, Zea mays
  unsure (1)..(102): unsure at all Xaa locations
  Clone ID: MRT4577_45115C.1.pep
TTQTKQQNLLVPSKLDRLKLKPIRAHRSRFSHVDNYFQFTLFKVKSFIIFHXCKSSFTVSSHINFDLPPTSFSITIAHYNLIKHWCPWRTPLNMFKPSSGRP

SEQ ID NO: 309266 - protein, 192 aa, Zea mays
  unsure (1)..(192): unsure at all Xaa locations
  Clone ID: MRT4577_45116C.1.pep
RHASGHPVAATRAPTRASTRPDVCCCYGNTLSKDPTYTXLPCRSTAAXPFTFLIRGKNYLENLKKFKAKGTLMQMVDADWVRSDKRQHDLRGRPGGIRQVLLCYYAMSYLXLKLYLLHCAIWLIVNAKIGELLRVVYLQKYAARGGPYFFFIGNIQVPGSTTYRLALYYMMNTPVEDSPLLHNCVNGDDAYR

SEQ ID NO: 309267 - protein, 78 aa, Zea mays
  unsure (1)..(78): unsure at all Xaa locations
  Clone ID: MRT4577_45117C.1.pep
YYIFPXXXXXWGCFFFFFFYITTETRALEHTSDNINHGARVPTNLRAHTYLHNFYTGNIPRGGASPILGIGGGPPLRV

SEQ ID NO: 309268 - protein, 67 aa, Zea mays
  Clone ID: MRT4577_45118C.1.pep
PTRSKKKKKKKKKQNYKTNKYRRIHIMWRLSKFNSLSVPLQRIQLLKPCIYPPKSHCMTFPFHHLYY

SEQ ID NO: 309269 - protein, 68 aa, Zea mays
  Clone ID: MRT4577_45119C.1.pep
LEFIRRGRMNIYRVGKASTVWLYVDKSILDPKAMTPFLCTQNNYLYTNKKRGLVVPKLLVSYYVVVQR

SEQ ID NO: 309270 - protein, 179 aa, Zea mays
  Clone ID: MRT4577_4511C.1.pep
MIISKKNRREICKYIFHEGVLYAKKDYNLAKHPKLDVPNLEVIKLMQSFKSKEYVRETFSWQYYYWYLTNDGIEHLRSFLNLPSEVVPNTLKKSSKPPSRPFGSGPPGDRPRGPPRFGEDRPRFGDRDGYRGGPRGAMGDFGGEKGSAPADFQPSFRGSRPRFGRGGGSAFGASGSSME

SEQ ID NO: 309271 - protein, 64 aa, Zea mays
  Clone ID: MRT4577_45120C.1.pep
TRPATRTTTPSKKHHYYFFEKHQTLMTTGQYISITSTDSLTTDISKNELHTFSSTTDTKAFPYI

SEQ ID NO: 309272 - protein, 52 aa, Zea mays
  unsure (1)..(52): unsure at all Xaa locations
  Clone ID: MRT4577_45121C.1.pep
MIMTARSIIEKYYTRLCNDFHTSKRVSSEIDVLXPANRLXSTIAGYITHLMM

SEQ ID NO: 309273 - protein, 673 aa, Zea mays
  Clone ID: MRT4577_45122C.1.pep
FASATGRVHNWNGIQQEITGRVQRKVLYEISSAVRIFGSANDTEVRATLWVQEYGRERYVGLAKNQTSDQQWTHLKGKFLLHAPFTKAVIFIEGPPAGIDILVDGLVLSPARKLQAAPCPKIENVLYGTNLLHNNGFTRGLSGWSPMGSCRLSIQTEAPHMLPSILKDRASQKHISGHYILATNRTDVWMGPSQVITDKLRLHVTYRVSAWVRVGSGGHGRHHVNVCLAVDKNQWVNGGQVDADGDQWYEIKGAFKLEKQPSKVTAYVQGPPAGVDLRVMDFQIYAVDRKARFEYLKEKTDKVRKRDVVLKFQGSNAVNLLGSSLRIQQTENSFPFGSCIARHNIENEDLAEFFVKNFNWAVFENELKWYHTEAEQGRLNYKDSDELLEFCEKHKIQVRGHCLFWEVEDAVQPWVQSLQGHHLMAAIQNRLQSLLSRYKGRFRHHDVNNEMLHGSFYEDRLGRDIRAYMFREAHKLDPSAVLFVNDYNVEDGCDTKSTPEKLVEQVVDLQDRGAPVGGIGVQGHISHPVGEIICDSLDKLAILGLPIWITELDVTAENEHIRADDLEVFLREAFAHPAVGGIILWGFWEMFMFREHAHLVDADGTINEAGRRYLALKQEWLTRMNGSVDHQGEFKFRGYHGSYTVEVNTPSGKVARSFVVDKDSPVQVIALNV

SEQ ID NO: 309274 - protein, 108 aa, Zea mays
  Clone ID: MRT4577_45123C.1.pep
HYCFFSSFLLFLFFFLGPKGGAKGRVFCRQKGLLLNSIGTTKYFNQLNARNRSSQPWWGPFFHPTPKATKNFLNERLPPLGPPREKALGKTHPDLGDTKEKMRQTPTP

SEQ ID NO: 309275 - protein, 117 aa, Zea mays
  unsure (1)..(117): unsure at all Xaa locations
  Clone ID: MRT4577_45124C.1.pep
RRYVWIYSAAQFLFIVLFTHIFYRYVRLQAVIAIILSAFAGFSVAICTNYSLLQILRWRRARHAVASPTSTARXRRRRXHGSSPRDPPSAPVAVAVTVAEVDLEMALPPTYAPPAHA

SEQ ID NO: 309276 - protein, 181 aa, Zea mays
  Clone ID: MRT4577_45125C.1.pep
MTQSIANNPINRGRSRKEVEGRRPMARRGTEAFPNLGAHCDKPDCNQLDFLPFDCDGCGKVFCAAHRTYGDHGCAKAADQGRTVVVCPDCGDAIERLVPGQGEREILEAHVRSRRCDPGKKRKPRCPARRCREQLTFSNTQDCKGCGRKVCLKHRFPADHDCAASAPGAAAAARRASGECG

SEQ ID NO: 309277 - protein, 132 aa, Zea mays
  unsure (1)..(132): unsure at all Xaa locations
  Clone ID: MRT4577_45126C.1.pep
KRVIERFEKEAAEMNKRSFKYTWVLDKLKAEREKGITIDIALRKFETTKYYCTVIDAPGHRDFIKNMITGTCQADCAVLIIDFTTGGFDSCISNGGHTPXHSLLWLTLGMKLFICCWNKMYSPSCNFFMVRF

SEQ ID NO: 309278 - protein, 69 aa, Zea mays
  unsure (1)..(69): unsure at all Xaa locations
  Clone ID: MRT4577_45127C.1.pep
MQAYCGKXKEELIKNAAHTGTPGKGILAADETTDTIRKSLYSINAQNVXDNRFVLLVLLFCCPCSSPAN

SEQ ID NO: 309279 - protein, 59 aa, Zea mays
  Clone ID: MRT4577_45128C.1.pep
DARFYVIKSYTEDHIHKSIKYNVWGSTPRDNKKLNAGYHEAKAKEDHCPIFLFLSVNSS

SEQ ID NO: 309280 - protein, 74 aa, Zea mays
  Clone ID: MRT4577_45129C.1.pep
YCLTWAMDRPYYNPREYTFYLPYTLVDHPPLCSAYTCLYLVLVCIIMMIIITIYMKHETTVLKMQRKIELAPAF

SEQ ID NO: 309281 - protein, 51 aa, Zea mays
  Clone ID: MRT4577_4512C.1.pep
SVRYECMSMIISHILGILAKNSHSIFKCSSNRRCSLHINISPGSLVLLGQK

SEQ ID NO: 309282 - protein, 92 aa, Zea mays
  Clone ID: MRT4577_45130C.1.pep
GWEVEAPFYYCTFKNGQPLRGEFLTPLFDHLLTASKPPNNAGLYVNPSGRCPFKGGGPPGSPPLCIYHQIAGLKSKHEKKKMDPQKKTSTQV

SEQ ID NO: 309283 - protein, 70 aa, Zea mays
  Clone ID: MRT4577_45131C.1.pep
LKITKYSPLKFYQARIRRPPLFWRPCTQAPEGPSPNGQGLALPLLEGAHPGGADLGPSEGQKPLGALLGG

SEQ ID NO: 309284 - protein, 190 aa, Zea mays
  unsure (1)..(190): unsure at all Xaa locations
  Clone ID: MRT4577_45132C.1.pep
MRTRDDAPVDSHLMDSRRWHSRARALPGAALPGTRTRFSVDEDGIQLENAMYYVVRSINQDRFIGRLDTTDTSTPLIARDLCDLTAYRTAVIPVLLRDEVVLGRGYXLLVGLFELTVAMRDTHVYNQMSELDGNGLDVIISGCLTMYDDSSFXVGDTCMGSTIKLTSGKNDGDKXMQSVVGWPEFAVGLF

SEQ ID NO: 309285 - protein, 155 aa, Zea mays
  Clone ID: MRT4577_45133C.1.pep
TRLEDCDLDSYTVPAGTTVLINAWAIGRDPRVWNAPDEFMPERFIVDDDDDMGGIDNNGSVDLRGNDFQFLPFGSGRRICPGLNFALVSIELMLANLVYHFDWELAEGEDSNSNIDMTEVFGLTARRKHKLLLVPRSASSAPVAVDQSTGRGAHM

SEQ ID NO: 309286 - protein, 140 aa, Zea mays
  unsure (1)..(140): unsure at all Xaa locations
  Clone ID: MRT4577_45134C.1.pep
PTRPPTRPRTRGVLGWQNNRENVDDISATLAGISTEIDISIFYRGLDQGSKHTLVSVVCYYGQHYHCFAFKDGRWVMYDDQTVKVTXNHTTLSILFTVRTNVAQFWFHVICAGXSSWGDVLVMCEKGHLQPQVLFFESAN

SEQ ID NO: 309287 - protein, 57 aa, Zea mays
  Clone ID: MRT4577_45135C.1.pep
TGILTEGFTNIEGEATQTNDYPPSIWIIPYLYQSLLKFQSYKAWDPTISMAHQIKCT

SEQ ID NO: 309288 - protein, 90 aa, Zea mays
  Clone ID: MRT4577_45136C.1.pep
MHLLMLPWLAFGHIVPFVQLARRLLSSTSSSVRVTFLTAAGNVPRVEAMLSSPSSTGEAAVVVSLRLTHVTGLTEDISSLCNLSTDYFFS

SEQ ID NO: 309289 - protein, 79 aa, Zea mays
  unsure (1)..(79): unsure at all Xaa locations
  Clone ID: MRT4577_45137C.1.pep
DVVDVQIVGWVLSVLCPXSKAVAEGSLTLQGANLPIYIAWSFMGIRGGHQDAGSHFSGHLHRVVAGRSHLMSRWLLSRA

SEQ ID NO: 309290 - protein, 156 aa, Zea mays
  unsure (1)..(156): unsure at all Xaa locations
  Clone ID: MRT4577_45138C.1.pep
SITYWGVKTKNKGEQPTRDNKKQTQGGGQKPPKPQSPNPRKXNRRHQKTPNPGKPKXKKGGKKKSPKQGGNREQGRKWTRGREPNSEGKKQDTPQNFPESREGPDRKTPRAPKAAXPPGGGPRAPLGNGPPAXSNPLQGETSPEGHQMSIACRGHN

SEQ ID NO: 309291 - protein, 42 aa, Zea mays
  unsure (1)..(42): unsure at all Xaa locations
  Clone ID: MRT4577_45139C.1.pep
FLVVTRKKKKKKKKKKKKKKKKKKKKKKKIKNKKKKKKKIKX

SEQ ID NO: 309292 - protein, 49 aa, Zea mays
  Clone ID: MRT4577_4513C.1.pep
KVGIAPVQQRLIFAGKQGDVWRTRADYNIQNEITLHLVLRLRCGQYVME

SEQ ID NO: 309293 - protein, 122 aa, Zea mays
  unsure (1)..(122): unsure at all Xaa locations
  Clone ID: MRT4577_45140C.1.pep
SLRPCLGPRLLTLCTGPGAGPAHLAYARQVFGRVPQPSDAVWYNTLLRGYARSPSSSAAAVRVFVRMLEEGVAPDTYTFVSLLKAFAAARAGEHGRQAHAVAGKLXAAGHDYFRPTLINMYA

SEQ ID NO: 309294 - protein, 61 aa, Zea mays
  Clone ID: MRT4577_45141C.1.pep
KSWIGQIGMAYLIIGHVVKGGYEDKQVSLVSLEYFQRLRCNCTAGTFNLGLTIQERRSWKQ

SEQ ID NO: 309295 - protein, 63 aa, Zea mays
  Clone ID: MRT4577_45142C.1.pep
IGNFFFLDWFEPVTLALLDSKFARASVGTLGNQRCYATKHFSRINTLGRSFVNLYLWGLSLPI

SEQ ID NO: 309296 - protein, 168 aa, Zea mays
  unsure (1)..(168): unsure at all Xaa locations
  Clone ID: MRT4577_45143C.1.pep
GLXVAAXAVFEQEGGENAVAWNLMIAGYFQDGQIDKALHTCXKMLEANLKFDCVTLASIIMACVKSCITLLGIAAHGYAVRNGLDSDKTVAAGLIDLYASTGRIEQARRVLNATSPRNPVVWKALVSAYVDCGMNSEARNLLNQTQLXGMSPNATCWDSVIAGFIQKG

SEQ ID NO: 309297 - protein, 99 aa, Zea mays
  Clone ID: MRT4577_45144C.1.pep
ARFFFGANGSRSGVPGFINSRSVLPAGVHNTQVGPPHHVEVQYVCLPAPLVKCFSFDPPGNTSRAAVRTQVKAICQFGVTPGHGGCSSLKKNPQPQQEQ

SEQ ID NO: 309298 - protein, 55 aa, Zea mays
  Clone ID: MRT4577_45145C.1.pep
RRLPFVFLFIISMFAVSNCLMVVVFLFNFQMSKINMLRSCKGSVYWMAPEVKVTV

SEQ ID NO: 309299 - protein, 99 aa, Zea mays
  unsure (1)..(99): unsure at all Xaa locations
  Clone ID: MRT4577_45146C.1.pep
MASMGFAHXARQAYMVQLVLAERASEQPVAQSQQQFSQHVTLQTIAXEQQATSIMSLPSLIQLAQVNPATYLEQPLVACNPLALSNKAAYQQQQQVQQF

SEQ ID NO: 309300 - protein, 72 aa, Zea mays
  unsure (1)..(72): unsure at all Xaa locations
  Clone ID: MRT4577_45147C.1.pep
CFFLXLXLERTEDIVMRCICATETLNLGERVPQACKFIIYGTLTGLAKLPLIFHREKGENLTHKKICEYGID

SEQ ID NO: 309301 - protein, 48 aa, Zea mays
  Clone ID: MRT4577_45148C.1.pep
FFFFFFFFFFILKKGRAHSFLLKSTFTLNLKCLYGDGGFPIPISSDTN

SEQ ID NO: 309302 - protein, 57 aa, Zea mays
  Clone ID: MRT4577_45149C.1.pep
MELDGTTAAADGCGGGGRGGPAEFEFDKGRVVTPWEGERIHEVGAEELELTLGVGAK

SEQ ID NO: 309303 - protein, 237 aa, Zea mays
  Clone ID: MRT4577_4514C.1.pep
MFLTRTEYDRGVNTFSPEGRLFQVEYAIEAIKLGSTAIGLKTKDGVVLAVEKRVTSPLLEPSSVEKIMEIDEHIGCAMSGLIADARTLVEHARVETQNHRFSYGEPMTVESSTQAICDLALRFGEGDEESMSRPFGVSLLIAGHDENGPSLYYTDPSGTFWQCNAKAIGSGSEGADSSLQEQYNKELTLQEAETIALSILKQVMEEKVTPNNVDIAKVAPKYHLYTPAEVEAVIARL

SEQ ID NO: 309304 - protein, 241 aa, Zea mays
  unsure (1)..(241): unsure at all Xaa locations
  Clone ID: MRT4577_45150C.1.pep
MSNPTQIFAEDVTEEKGENARLSAFVGAIAVGDLVKSTLGPKGMDKILQSASTGEIMVTNDGATILKAIALDNAAAKVLVNISKVQDDEVGDGTTSVTVLAAELLREAEKLVDQKIHPQTIIEGYRIASSAALKALEKIAVDHSSDEQAFRKDLEAIARTTLSSKVLSQDRLQFAKLAVDAVLKLGGSTDLTHIQIIKKAGGKLKDSYLDEGFILDKKFGVNQPKRIEXAXILVANTAMDT

SEQ ID NO: 309305 - protein, 48 aa, Zea mays
  Clone ID: MRT4577_45151C.1.pep
TYKYIYTTSTFITVVFLTRCPIIILYALTHHSPLPSNCPSIYLRITTL

SEQ ID NO: 309306 - protein, 122 aa, Zea mays
  Clone ID: MRT4577_45152C.1.pep
LARLPRIWGQVLLVNLGGRYVRCFCHTYLSRDMMPESLRSPNLCDSLLDPLLQELVEGDSRHSSWPPLGRCTGSERKAAPSSRPPALRSRQTLHLAGSSSGSRGLVEAASGGSLRYVWVEVR

SEQ ID NO: 309307 - protein, 44 aa, Zea mays
  Clone ID: MRT4577_45153C.1.pep
KKKKKKKKKKKKKKKKKKKKKKKKKKKKKKKKKKKKKPFFRNHL

SEQ ID NO: 309308 - protein, 343 aa, Zea mays
  Clone ID: MRT4577_45154C.1.pep
MPAHQMRHRHAAAMMNVVAIGLILSTLAAAGVWSPAPQPTAAPHHGDRIVREGRRVVIVEYERELPLSTDGGGSVKVKETRVLPPDALDGVEGDGGTFDEARGVVSDAAGKVAGAAEEGKERLSDAKESAKGGVLGTVKRCKDRLCGAGRKVEEGAKDAVSRVEHGAEDAARGAMEAVSDAKDSAENTAFDAVQKGKETMKSAKDKASDAEQRGKDAVRSAKDKASDAAHQGKETVKSAKDKVCETASKAKERASGIQHGAAEAAKAAKERVSAAAKSAKDTVQSARDSVSDIAQRAEECAEDTAERAADRAAEAEEEAKARAAEVAKNLTDIARRARGVASD

SEQ ID NO: 309309 - protein, 212 aa, Zea mays
  unsure (1)..(212): unsure at all Xaa locations
  Clone ID: MRT4577_45155C.1.pep
MFGRAPKKSDNTKYYEVLGVPKNAAQDDLKKAYRKAAIKNHPXDKGGDPEKFKELAQAYEVLSDPEKREIYDQYGEDALKEGMGGGGGGGVDPFDIFSSFFGPSFGGGGGGSSRGRRQRRGEDVVHPLKASLEDLYNGTSKKLSLSRSVLCSKCKGKGSKSGASMRCPGCQGSGMKVTIRQLGPSMIQQMQQACNDCRAPGESINDKDRCPA

SEQ ID NO: 309310 - protein, 51 aa, Zea mays
  Clone ID: MRT4577_45156C.1.pep
IKNNQNVFQKSKSMHTDELTLILTQVHEQYLLNVHRHLYKIHNVRNALNAN

SEQ ID NO: 309311 - protein, 74 aa, Zea mays
  unsure (1)..(74): unsure at all Xaa locations
  Clone ID: MRT4577_45157C.1.pep
GVYALVPGLXREDVLVQSDPAGRLVITGDPEHPDNAWGITDSNKVVNLAYRIDPHQTCGVATLDRQLFGRAPFG

SEQ ID NO: 309312 - protein, 109 aa, Zea mays
  unsure (1)..(109): unsure at all Xaa locations
  Clone ID: MRT4577_45158C.1.pep
CGARGGGCDNPIRESRTVYLSLLRCTTLPCHHIVREPGRARARERHGCSEARDAGAGRLLAATGWLPRPRARGDACPRYDAXCRACRSSRWAGPCRPQPVPASVSRSPA

SEQ ID NO: 309313 - protein, 49 aa, Zea mays
  Clone ID: MRT4577_45159C.1.pep
MPVLPAGNEWNVFCPQKKKKKKKKKKKKKKKKKKKKKKKKKKKKKKKKR

SEQ ID NO: 309314 - protein, 295 aa, Zea mays
  Clone ID: MRT4577_4515C.1.pep
MLRMDQMEMLLGMPLPGTPGLARLLFQLRSQEAQKSDQKPPRGGADAEFLLHPASTARMFLTRTEYDRGVNTFSPEGRLFQVEYAIEAIKLGSTAIGLKTKDGVVLAVEKRVTSPLLEPSSVEKIMEIDEHIGCAMSGLIADARTLVEHARVETQNHRFSYGEPMTVESSTQAICDLALRFGEGDEESMSRPFGVSLLIAGHDENGPSLYYTDPSGTFWQCNAKAIGSGSEGADSSLQEQYNKELALEEAETIALSILKQVMEEKVTPNNVDIAKVAPKYHLYTPAEVEAVIARL

SEQ ID NO: 309315 - protein, 86 aa, Zea mays
  Clone ID: MRT4577_45160C.1.pep
WFVLIKFLTKGGNMNLKQWLCTLIISAPLLTEWLTVETHGDLGDHNLYLRMQSSCSHSLSITMLRMLSSLLCKLETHTWDMTRTVL

SEQ ID NO: 309316 - protein, 81 aa, Zea mays
  Clone ID: MRT4577_45161C.1.pep
IMLRSTQGLLSIEDSSSEGLTTGGGATHHYKHLHCCPKIVNLLSPNTDLFYERKKYDFKNRSPRQWNYLCFTLPESSHLYH

SEQ ID NO: 309317 - protein, 732 aa, Zea mays
  Clone ID: MRT4577_45162C.1.pep
MRLLRVATCNLNQWAMDFDTNLRNVKESIKRAKAAGAVIRVGPELELTGYGCEDHFLEQDTTAHAWECLKDILTGDYTDNILCSIGMPVIFNSVRYNCQVFCLNRKIIMIRPKMSLANDGNYREFRWFSAWTFKGEIVDFQLPVEVSEAISQDTVPFGYGYMRFIDVSLAAETCEELFTANAPRIDLALNGVEVFMNASGSHHQLRKLNLRIDSIRSATQTCGGVYMYANQQGCDGGRLYYDGCCCIAVNGDLVGQGSQFSLKDVEVLDALVDLDAVSSYRASVSSFREQASHKTNVPFVKVPYKLCQPFRSGMVPTSPVEIMYHCPEEEIAFGPSCWLWDYLRRSQASGFLLPLSGGADSSSVAAIVGCMCQLVIKDIEKGDEQVKADALRIGQYKDGAIPMDSRELAKRLFYTVYMGTENSSEDTRSRAKRLAEEIGSFHLNVPIDSIVSAFLSLFETLTGKRPRYKVDGGSNTENLGLQNIQARIRMVLAFMMASLMPWVHNKSGFYLVLGSSNVDEGLRGYLTKYDCSSADVNPIGSVSKQDLRAFLRWAAIHLKYSSLAEVEAAPPTAELEPIRANYNQLDEIDMGMTYEELSIYGRLRKIFRCGPVSMFQNLCHSWCGRLSPSEVADKVKHFFKYYAINRHKMTVLTPSYHAESYSPEDNRFDLRQFLYNSRWPYQFRKINELVQEMDKDGKWGTSAEGKLGAQTGAQGTGMGVVAAGSANPSAGF

SEQ ID NO: 309318 - protein, 35 aa, Zea mays
  Clone ID: MRT4577_45163C.1.pep
PRTRLYQNLKTSYPPAVAPHSHAPRSATRHASDAR

SEQ ID NO: 309319 - protein, 284 aa, Zea mays
  Clone ID: MRT4577_45164C.1.pep
MIFNLRRKSILLLENISCLLQVDGGSNTENLGLQNIQARIRMVLAFMMASLMPWVHNKSGFYLVLGSSNVDEGLRGYLTKYDCSSADVNPIGSVSKQDLRAFLRWAAIHLKYSSLAEVEAAPPTAELEPIRANYNQLDEIDMGMTYEELSIYGRLRKIFRCGPVSMFQNLCHSWCGRLSPSEVADKVKHFFKYYAINRHKMTVLTPSYHAESYSPEDNRFDLRQFLYNSRWPYQFRKINELVQEMDKDGKWETSAEEKLGAQTGAQGTGMGVVAAGSANPSAGF

SEQ ID NO: 309320 - protein, 127 aa, Zea mays
  Clone ID: MRT4577_45165C.1.pep
MSKLSQPVSGKNLCHSWCGRLSPSEVADKVKHFFKYYAINRHKMTVLTPSYHAESYSPEDNRFDLRQFLYNSRWPYQFRKINELVQEMDKDGKWGTSAEGKLGAQTGAQGTGMGVVAAGSANPSAGF

SEQ ID NO: 309321 - protein, 64 aa, Zea mays
  Clone ID: MRT4577_45166C.1.pep
AIEFRCVGAPEHHVFMFPFSFRENLFLNGWVEFWGKNLPGFSMDPHSDLSVYFAAWCGVIQGRL

SEQ ID NO: 309322 - protein, 76 aa, Zea mays
  Clone ID: MRT4577_45167C.1.pep
MRRGGGRRFPKPSLAPSTADEDTPDLDASVIRNLDSAFSRRDSDAKSLCSSRPDSTAGAILKFSDRATKVAALRDE

SEQ ID NO: 309323 - protein, 65 aa, Zea mays
  Clone ID: MRT4577_45168C.1.pep
QKIFKNNVKNMKFILKKTHFPCCKIKHSYFLSNYSTQEMVSWLMSHLFLFKLGIKNLNMDQPHLV

SEQ ID NO: 309324 - protein, 67 aa, Zea mays
  Clone ID: MRT4577_45169C.1.pep
HKFEDADDFFRPIRREDFCSTPKLPPHPPAFSGLSLTDTALNLPPPSTYGLPSTPWSRRRLLGPERP

SEQ ID NO: 309325 - protein, 42 aa, Zea mays
  Clone ID: MRT4577_4516C.1.pep
RRGLNNRRILHFIIFCIHRNLQDHTQVHTYAGEHKNLQYLRG

SEQ ID NO: 309326 - protein, 42 aa, Zea mays
  Clone ID: MRT4577_45170C.1.pep
SFFFFFFFFFLVGFFFFFFGNNYKLRLKNKCQRPIQHNVAMG

SEQ ID NO: 309327 - protein, 78 aa, Zea mays
  unsure (1)..(78): unsure at all Xaa locations
  Clone ID: MRT4577_45171C.1.pep
HAXXATXKKGKXEXRGKGXPAEXGRQRKPXRRKXXXXXXXEDKAGXKENPKGEKKGXAXXGPNGKEXAXHRPKRASAA

SEQ ID NO: 309328 - protein, 95 aa, Zea mays
  Clone ID: MRT4577_45172C.1.pep
RNCRQLVKLKGLAKRGGVIRWNYPFFRGVPQGPFIFFISGGGGFQPNKIWGARKKKPPQVVGVTKWVGVGGPPAPQDSWGGRMGVFGNFPSFPFL

SEQ ID NO: 309329 - protein, 84 aa, Zea mays
  Clone ID: MRT4577_45173C.1.pep
FKPPPSVSLPPPLKKVCIVSSKFCKPPCSSFITHTPFQACFLLVYILNSSPQTFLCEVTRSPFFFFFYLSTTLFFLFCCFCFCP

SEQ ID NO: 309330 - protein, 76 aa, Zea mays
  unsure (1)..(76): unsure at all Xaa locations
  Clone ID: MRT4577_45174C.1.pep
SATNAYIIPQRSLAPRAIIPQFLPPVTKMGFEHPAVQAYRLQLALACSSLQQPMAQLQQQSLAXLTLQTICTQQQQ

SEQ ID NO: 309331 - protein, 51 aa, Zea mays
  unsure (1)..(51): unsure at all Xaa locations
  Clone ID: MRT4577_45175C.1.pep
LGLKLRLRTFTSSSQKNRPTPWLRLRSIKSRHGKFFVGLVGRTGVVRPXXP

SEQ ID NO: 309332 - protein, 99 aa, Zea mays
  Clone ID: MRT4577_45176C.1.pep
FFFFFFFFFFGGLEQRPSFFFITNRMHRKSNWASPNQSLGPHRSQLTSKNMGVQMSSLFTASVANQARVDKLPLLVLYHPKGVLDMRFCHTYCFHELGY

SEQ ID NO: 309333 - protein, 58 aa, Zea mays
  Clone ID: MRT4577_45177C.1.pep
YRNKYAESDTEPIVVRQRSPVTCRESGAASAVAHEVGPGLGFRYVMDIPHLYRLLSFK

SEQ ID NO: 309334 - protein, 83 aa, Zea mays
  unsure (1)..(83): unsure at all Xaa locations
  Clone ID: MRT4577_45178C.1.pep
LALLPLNAIATYTHTNNGYNYQPPSSVHLPSHPHLXPPPVNLPPSMHLPPSVHLPPPVHLPPPVHVTTPFHLSTTPCHYPTQP

SEQ ID NO: 309335 - protein, 44 aa, Zea mays
  Clone ID: MRT4577_45179C.1.pep
YGRLDRMGDSLWEMDFCRSAVVVWVPGASRGWRGIIWAGGKSRE

SEQ ID NO: 309336 - protein, 117 aa, Zea mays
  Clone ID: MRT4577_4517C.1.pep
MAIKDIVASFDLAVHGIGLLQQQLIKNPETPLVSYIYPQLIRGVKVRPPPAQEQGSGSSGGGKHRPLCPAGPGRAAAAGAPEDAVVDGVSGACKGRSPEGVRRVRQQGAGAMSQMAV

SEQ ID NO: 309337 - protein, 54 aa, Zea mays
  Clone ID: MRT4577_45180C.1.pep
PHPFHTFTLTIIQTCTVTFKYRDRLIMAMPHPFTRPNPHHQPFMNAELLATYGL

SEQ ID NO: 309338 - protein, 55 aa, Zea mays
  Clone ID: MRT4577_45181C.1.pep
RYLMLGHRRVWLRSNTTLYQAQVEGMRGPGIASLLGRLCPISAETILYTRSVVEL

SEQ ID NO: 309339 - protein, 69 aa, Zea mays
  Clone ID: MRT4577_45182C.1.pep
KCFGSHKVAHMVFRRAKSPPPPKKKKNLVEPKNVGLNKLKNFYYCLKDHNIKGQKFVRICWIFKILMGS

SEQ ID NO: 309340 - protein, 42 aa, Zea mays
  Clone ID: MRT4577_45183C.1.pep
IQKHFKHLLKEIVYYKQEFILKHSIILLTCLWSCWTPAIHIT

SEQ ID NO: 309341 - protein, 59 aa, Zea mays
  Clone ID: MRT4577_45184C.1.pep
MGREYKQEVTAQNLADVIHRFCWYYSPFATKKPAPDSPFKDVVANKEMAANARSWTACT

SEQ ID NO: 309342 - protein, 94 aa, Zea mays
  Clone ID: MRT4577_45185C.1.pep
SSGNNAEYAGSFVVLRIPLGTAIELLLCFFFFLFGTRWCVLSFYIYISGGFCSYRTKIKKEITCDGPIKNLSPPSERKRVPKKKKKYSALLPLL

SEQ ID NO: 309343 - protein, 161 aa, Zea mays
  Clone ID: MRT4577_45186C.1.pep
LQKRTIRPRAPFPSPRPTDPINQVSVNSPSAGEKRRAEAAALDISPGHWSVLGVESRGLAIGLESCACEASDASATEFRGIVRRSTEGRHVLVLPSTVLCAAPFLCAWVEESPRQRCRSPSPLRGCRPLLSDVGWIGEDDSRPFNLEFTVSIKSKLTSSCN

SEQ ID NO: 309344 - protein, 71 aa, Zea mays
  Clone ID: MRT4577_45187C.1.pep
FYLKLNHGNMKLTWANSKKLLRMSKLKGCSGAQPNLAQFGKGTRNWKSRRTTSNNLAPAKIPIKNNRSPNQ

SEQ ID NO: 309345 - protein, 104 aa, Zea mays
  Clone ID: MRT4577_45188C.1.pep
FVAKAASASTVGFAIFIIGFLTQLVTTFGFPYSADYKKLYRTLWSLFPPDLFAKALNILGKATATPEDKGVSWNQRGECPSYETDCVITIDDLYKWLIFTSFLW

SEQ ID NO: 309346 - protein, 54 aa, Zea mays
  Clone ID: MRT4577_45189C.1.pep
ARCFTIFRSSVSEYLIGYFRLWKGHGSPMHPGEVGVRFRLGGAPGTIYLIPPND

SEQ ID NO: 309347 - protein, 90 aa, Zea mays
  unsure (1)..(90): unsure at all Xaa locations
  Clone ID: MRT4577_4518C.1.pep
MANPRVFFDMTVGGSPADRIVXMELFSYEVPKTAENFRALCTVEKGVVKSGMPLHYKGSTFHRVIPWVMFHGCDFTLGIGTVGXFIYGEK

SEQ ID NO: 309348 - protein, 142 aa, Zea mays
  unsure (1)..(142): unsure at all Xaa locations
  Clone ID: MRT4577_45190C.1.pep
AGVTTQSNICFSVLKKKKKKKKKKKKKKKKKKKKKKKKKKKKRKKKKKKKKKXTLGCNNWLRGNSKKLGAVNRGSKLGTKLGEKKEKVVSWGKMLSVKNSKKKKNRKKKVKNLGGLKRELTKINWVGLTARFQIGKPVGQPA

SEQ ID NO: 309349 - protein, 148 aa, Zea mays
  unsure (1)..(148): unsure at all Xaa locations
  Clone ID: MRT4577_45191C.1.pep
MDHRVLLLLSLATGAAVAADVDAEDPLXIRQVDPGGDDDDLEMNAESHFLMFTNGVGKAYKDADEHAYRVIVFEANLRRARRDQLLDPAEEHGDAIYSQLTAAEIPRNYLGLRKTRGALLEELGQSTMKETGLRSEGLLRSTDCDSPR

SEQ ID NO: 309350 - protein, 107 aa, Zea mays
  Clone ID: MRT4577_45192C.1.pep
LLRPTAACMTALVARPAYGTRSPSTMTNYPDLDPTPPVRARRPAGCRHESLLNPVPKLIMVLTSRRCRCSMQRERYPMIQRTDALTDPEVAYYSLHMRRFHYSTFSD

SEQ ID NO: 309351 - protein, 268 aa, Zea mays
  unsure (1)..(268): unsure at all Xaa locations
  Clone ID: MRT4577_45193C.1.pep
RGDSWTHEDGVRRPNTVLGVICRXCFPGWVTLPGEGRVPELGMTWEHYLAAPAPPEHRVGDVECDTVADIVIATFWTFYRCAEGXEEAAARVINAECRRLLGNFRHEARMQAVRDYLAQTGIRRRKEKCRDKYLSKEKYMKVPPRWCADKMDCWEALVDEWCSPQWRVAHNIAKEKRLKMEGVPHHLGSVNLHGYGKNWSKHNKAPXQSCSTSMACPILHRXKKAKAFSESDLENAENFSNKGLHHKMVQYVKQGKARKGRTLTELAS

SEQ ID NO: 309352 - protein, 70 aa, Zea mays
  Clone ID: MRT4577_45194C.1.pep
RDGSDKCVYPKAPTYSEDLLVISATSRSGNTKCRSPSRKFKQSLPPLNTVRVGYGPPHGDGTVSLELGDV

SEQ ID NO: 309353 - protein, 159 aa, Zea mays
  Clone ID: MRT4577_45195C.1.pep
MASTTLLLAVLLLVAASAAAPARSCSPRDLQALLSVKHALGNPTTLSTWTPASPDCCSWDHLRCNDAGRVNNVFIDGADDVRGQIPSAVGGLTELMSLTLFRLAGLTGPIPACLAALSNLQFLTVSHTNVSGAIPESLARLRGLDSVDLSSNQLTGGIP

SEQ ID NO: 309354 - protein, 52 aa, Zea mays
  Clone ID: MRT4577_45196C.1.pep
SMIPARDICQARYDSPALKARHLALRPFTHIFTRFYLLPAHSSGSTDLMRYF

SEQ ID NO: 309355 - protein, 108 aa, Zea mays
  Clone ID: MRT4577_45197C.1.pep
MRREGRQHGWVFTVDPSLVDAEGKCRSRAVHVEGAAAANGGFVRASRKPTNHSKPAVGRAYKSMIGKGEAGSGKQGRHKFKHDEVKMYSLYLEGAHDAYADAMLEFDS

SEQ ID NO: 309356 - protein, 39 aa, Zea mays
  Clone ID: MRT4577_45198C.1.pep
AVEAGGHVLAAVVDVHGDGEGELVADAERLGPEAIAYAW

SEQ ID NO: 309357 - protein, 183 aa, Zea mays
  Clone ID: MRT4577_45199C.1.pep
TPLPTCHHRQNAGVLIQQPSRRRFRLTAQRKPGSTSTSPRTGTPSGSESDNVVLKAAWYGSEALGIAASFFRPPSPEADAGAADDGTSESQPVGRAQVAEAIKDDFARSYFVFGNLTLGAYEDDCEFADPAGSFRGLQRFKRNCTNFGSLLEKSNMKLTKWEDGEVQSIGHCLSSYLMWLPRT

SEQ ID NO: 309358 - protein, 51 aa, Zea mays
  Clone ID: MRT4577_4519C.1.pep
PPPEGRDPRPAQSHSHPQEPDRQARAMLNTAQARRSREPGRNPGKSPPLTA

SEQ ID NO: 309359 - protein, 75 aa, Zea mays
  Clone ID: MRT4577_451C.1.pep
KNDLVPIPVKGGDVGVFMGITIKNLGKCLFLKGGDPLFFKNDRIRGSDSPKMGCVYGCRLEGFLVEKIYLRESLA

SEQ ID NO: 309360 - protein, 79 aa, Zea mays
  Clone ID: MRT4577_45200C.1.pep
GGLAPHPLLNLVNKIPPPVVPPPLPEKSLTGVKNWPWGGGGKTPKEPPKPPPNFLDRKIIPHLPDLSQKLERGAPFLFF

SEQ ID NO: 309361 - protein, 141 aa, Zea mays
  unsure (1)..(141): unsure at all Xaa locations
  Clone ID: MRT4577_45201C.1.pep
RAGESPPNPYTPGGPHERSTPGSRSATSHHPPSRPTAQERPRPSTXPRPPAHGPPRRPPGDPTETQPGPDQPPPRPTDPAPPNAAPPXPKTTDRPPPTAPRAPRPPAPPQPPPPPPPPPXPPPGTPERPXPPPPRRPRPPA

SEQ ID NO: 309362 - protein, 45 aa, Zea mays
  Clone ID: MRT4577_45202C.1.pep
LGAGVRAHRFDHPQERSTSVTQHSLKLHTTHSGIQTLTASYTNVR

SEQ ID NO: 309363 - protein, 75 aa, Zea mays
  unsure (1)..(75): unsure at all Xaa locations
  Clone ID: MRT4577_45203C.1.pep
FKRLFNFKKDRDGYSEWFAGNQXSGGAAGASSLFFVYSLDYARTRLANDAKAAKGSGDRQFNGLVDIYLQTLKSD

SEQ ID NO: 309364 - protein, 91 aa, Zea mays
  Clone ID: MRT4577_45204C.1.pep
LPRGWTADRLKSLLQDQGISYATAKKKKGMTVGFVTFQSVEQLTNAVQILKENPSGGKQIKIVDANRRSHQKAHAGAPVSNTGTATENGSS

SEQ ID NO: 309365 - protein, 366 aa, Zea mays
  unsure (1)..(366): unsure at all Xaa locations
  Clone ID: MRT4577_45205C.1.pep
ACASPAAGVDLGRQFHAISIKHRCHDALCVSSALVSMYAXKXGSIENAQCVFERQTDRDLLSWNSMLSGYAQHGYSQKALDVFRQMEVEGIDMDGLTFLSVIMGCAHAGLVEEGQQYFDLMVRDYGITPTMDHYACMVDLYSRAGKLDETMSLIEGMPFPAGPTIWRALLGACRVHKNVELGKLAAEKLLSLEPLDSATYVLLSNIYSAAGKWKEKDEVRKLMDTKKVRKEAGCSWIQIKNKVHFFIASDKSHPLSEQIYAKLRAMTAKLKQEGYCPDTSFVPHDVAEDQKEAMLAMHSERLALAFGLIATPPAAPLHIFKNLRVSGDGHTVMKMVSEIEDREIVMRDCCRFHHFKSGVCSCGDFW

SEQ ID NO: 309366 - protein, 142 aa, Zea mays
  unsure (1)..(142): unsure at all Xaa locations
  Clone ID: MRT4577_45206C.1.pep
WHASPLATPLPWGRAQGRGDPTKPHPTPKPGPPHGGRAQGPGPDPGAAPRNPAGPPLGERGGILGGGGPGGKTVPRGNSXESPPPAKSEPTGEPKEGGANQGAHKKXFCGPTAGRPAGRAPXGGNQESXPPPXRGGKPPGTP

SEQ ID NO: 309367 - protein, 78 aa, Zea mays
  Clone ID: MRT4577_45207C.1.pep
FGCPPPPLSFHNSVPGKLVFWRQPPPILSQDGPRMGPFWLFIFFLWFFFFFFFFGSKVSCCAIHLSYYYFLRSNHKTT

SEQ ID NO: 309368 - protein, 95 aa, Zea mays
  Clone ID: MRT4577_45208C.1.pep
CEDALPPVLLAAPKARVRRVLAEAVGHYLLRVRWPSPLAPRNTGHEADGTRHAALSALLVLPAGRCRCPLTYTPRLFSGNAAGNAGPPLVASPTR

SEQ ID NO: 309369 - protein, 68 aa, Zea mays
  Clone ID: MRT4577_45209C.1.pep
IHHSAAISPWRYVSESVGQAVLEQALCDLRCGVCGRLMSALGTMVLCLRFGVVAALVCPRVHPVVTPS

SEQ ID NO: 309370 - protein, 81 aa, Zea mays
  Clone ID: MRT4577_4520C.1.pep
TWDVPTLPANTTLAYIPIRGSTFVLYHSLLLQSERCYALRRSSFAPRWMRADWEEMKAMERATLMRSLLHETGQLRLLVIV

SEQ ID NO: 309371 - protein, 162 aa, Zea mays
  unsure (1)..(162): unsure at all Xaa locations
  Clone ID: MRT4577_45210C.1.pep
MPMADRVHPMPSPSSPPLPPPPGRRRPDADPATETTPLHPSFFHDIPLSPSPAGTCIVQVPKDQVLREPPPDRAXLQEARWPARAAPPPPPRVLPLLRRAPXYSSPPPPPSRAPSAXRLPPARAVLLRALRARHPRPRQRHRGQQGLQGQGQAAMVVVVMVM

SEQ ID NO: 309372 - protein, 54 aa, Zea mays
  unsure (1)..(54): unsure at all Xaa locations
  Clone ID: MRT4577_45211C.1.pep
MTSIICYFGSETIMSLIEFPLLDQTSSNXVISTTPNDLSNWSRLSSLWLTSFLL

SEQ ID NO: 309373 - protein, 101 aa, Zea mays
  Clone ID: MRT4577_45212C.1.pep
MQDRLHILEDLNMLYIRQMALSLEDTELQRKLDHEIRMREGACKLLAACSQREQALEATKSLLVCNSRILSYMGELQRRKEAQVLEKTGRRPSDSGPPAER

SEQ ID NO: 309374 - protein, 63 aa, Zea mays
  Clone ID: MRT4577_45213C.1.pep
NSYFTELLSGKKKGLLQLPSDKALLSDPVFRPLVDKYAADEDAFFADYAEAHQKLSELGFADA

SEQ ID NO: 309375 - protein, 65 aa, Zea mays
  Clone ID: MRT4577_45214C.1.pep
PDKEILKIVKENFDFRAGMIIITLDIKKGGEGRYLKRAAYGHFGRDPPVFAWGGVNPLRWENPSA

SEQ ID NO: 309376 - protein, 135 aa, Zea mays
  unsure (1)..(135): unsure at all Xaa locations
  Clone ID: MRT4577_45215C.1.pep
KVFPSSPTTLKLSPPFSCFHPPGFWCVLKEGKWWGLFVSPEVGPPPLVHKPLSPPPVVSRXAPPMVPPDRVFFTVAYLFFFPPVPFFPPPSLEKQTXPKPPFFFWGPPLLLPPFFFLYTPPPFFFPPPPPFCSPV

SEQ ID NO: 309377 - protein, 58 aa, Zea mays
  Clone ID: MRT4577_45216C.1.pep
LVTLPQPRRYASYAPTLTLLAPWEELPDRERRVQAVWRRPGASPSPHRREELRPDSAP

SEQ ID NO: 309378 - protein, 33 aa, Zea mays
  Clone ID: MRT4577_45217C.1.pep
DGHPMISYDFDCQQVCVWTPINITLLIRLFFGS

SEQ ID NO: 309379 - protein, 46 aa, Zea mays
  Clone ID: MRT4577_45218C.1.pep
PGGPRAGHPVQGSALTPTSVWRAADQLANVAIMRKAMNRVSDLDGF

SEQ ID NO: 309380 - protein, 49 aa, Zea mays
  Clone ID: MRT4577_45219C.1.pep
RVRLTAFYAPSKIIVDHHSITHRHLPCEHHLPGRATSPDPHDTQQLTCT

SEQ ID NO: 309381 - protein, 82 aa, Zea mays
  Clone ID: MRT4577_4521C.1.pep
ARLQQCRLLANMVSKAGFLQAIAPLMVPDLLPWVSLGCKDPSSLCPTNRVQEVGGGPRGRVCSFVAQVPSLFESLISGPEPF

SEQ ID NO: 309382 - protein, 118 aa, Zea mays
  Clone ID: MRT4577_45220C.1.pep
HASEDAKVDSSEPVVASSGALQHLIANYLNGTLTNLSAAFQESSEYISGTLGVPPTYVYSGLAALVALPITMSRFGWSLNREQSFGAMPGGVPDITNEDFSYIPAQDLDDPRVEYIDT

SEQ ID NO: 309383 - protein, 85 aa, Zea mays
  Clone ID: MRT4577_45221C.1.pep
EYDENARGRMLGIRLVVGSSFSYGSGSGSRGGTFVKELAGKQTEMEASDDEYRCYLEWSLLSHGLPLPSQRLKNLQRGPRVQEQP

SEQ ID NO: 309384 - protein, 73 aa, Zea mays
  Clone ID: MRT4577_45222C.1.pep
CWVKLEEFCFLDIGSGPRWWVERTYETYGVCVKLHMSVFQPFAFGFAFSNKGFCKLVLEITGTLSFTGRLSRM

SEQ ID NO: 309385 - protein, 63 aa, Zea mays
  Clone ID: MRT4577_45223C.1.pep
VLSHGVCAVEKNNPHTLKVNIYLFRSTFVIVSEPNNYAVLFEWIPGQKGKFKFQDQTANNFRT

SEQ ID NO: 309386 - protein, 51 aa, Zea mays
  Clone ID: MRT4577_45224C.1.pep
VTDTMFQQLRQSIAKCIVSLIRKFILNRTYTWVQSQWLLNFLLIILNQLFA

SEQ ID NO: 309387 - protein, 91 aa, Zea mays
  unsure (1)..(91): unsure at all Xaa locations
  Clone ID: MRT4577_45225C.1.pep
RTTCQIFNEGGLDYLXNPRLIQGHSILAIXAYRAGLMDAVDDWRMDIMPIGEVVNAVYQSDCFVTIVIVADHNAFDILQVKELKNGRLVML

SEQ ID NO: 309388 - protein, 159 aa, Zea mays
  unsure (1)..(159): unsure at all Xaa locations
  Clone ID: MRT4577_45226C.1.pep
MEHASAFLARALTTPLPASAALPRRRPARVAVAAAAPERRPPGAVASTTNYVVPLDAAPSGITRPLVEILRDLNKRVPDAIVRPSSRRASASDPVIPWYHANRMLSFYAPGXHREAAGTASLSDERFDDPVSAAEEAAFCKACARFGFGLYLYHEDETP

SEQ ID NO: 309389 - protein, 56 aa, Zea mays
  Clone ID: MRT4577_45227C.1.pep
IVSYISHFLFYEENTAEGRTKHPFLIVGQDRKLSFSNRVQKQYFTFLSYNGQACGD

SEQ ID NO: 309390 - protein, 189 aa, Zea mays
  Clone ID: MRT4577_45228C.1.pep
MEHASAFLARALTTPLPAPAALPRRRPARVAVAAAAPERRPPGAVASTTNYVVPLDAAPSGITRPLVEILRDLNKRVPDAIVRPSSRRASASDPVIPWYHANRMLSFYAPGWCGEVRDVIYTDSGKVTVIYRVTVRGTDGEVHREAAGTASLSDERFDDPVSAAEEAAFCKACARFGFGLYLYHEDETP

SEQ ID NO: 309391 - protein, 81 aa, Zea mays
  Clone ID: MRT4577_45229C.1.pep
PRRQYPSWCCFFSSVPQPSKMARDSKVFNLRRWPLSLRASVGRGSIPDRTEMSSAADPRNLISSRAERIRRGEGDGAGESR

SEQ ID NO: 309392 - protein, 103 aa, Zea mays
  Clone ID: MRT4577_4522C.1.pep
RFNCIILCSCIQCQFQSLHLQMSVYSWGHMDILEVSIFLDGMICIFSYVGVGPSIDSCFSESMVVFIRILLDAFSRPVSRGYLIILFFLNGIFYYICFTFVMI

SEQ ID NO: 309393 - protein, 52 aa, Zea mays
  Clone ID: MRT4577_45230C.1.pep
VSSKVQYKFLDYRLKYGRRSSKISPVQRMGLRELRPQLPKPFQSTQRLTLIL

SEQ ID NO: 309394 - protein, 73 aa, Zea mays
  Clone ID: MRT4577_45231C.1.pep
HCLATLHCRDGGTITCITGPLLSHTPDYSRQLSDLLVWMHLQKFTEPQVVAATTAHTHLNKYLGECMTCSNCR

SEQ ID NO: 309395 - protein, 45 aa, Zea mays
  Clone ID: MRT4577_45232C.1.pep
GTSSIGEDPTMLHQMAVTGADQIIVMAIRADSPWEVLPKRIQSAL

SEQ ID NO: 309396 - protein, 212 aa, Zea mays
  Clone ID: MRT4577_45233C.1.pep
TPQAVEEACFADVLDEDSFNMPDMILKLKTSTRSSSLPLDSSTDSERRKLSPVYCSHSIGDDSQQSHGEAQVDMFWQQNVPLSPNGSTFPSSPSTNSDNYPVSWFCFSPKTHGTGTYIPNVSYQTYRERIMLERDTIRARKQRQRLPGRRYYSAEQGFSGSQTEEDTIAQSATNQSPKKQNSVQQSGYSGKSTVPDADFVCFREHVATEGGT

SEQ ID NO: 309397 - protein, 98 aa, Zea mays
  unsure (1)..(98): unsure at all Xaa locations
  Clone ID: MRT4577_45234C.1.pep
DRKSILLQMFLFNELEELNTEAFNRQLXALKHCGKSKHACVENLEDNGRHLSPDEHQNVSPKQTTCKKLEVSPSISTPISWVKKCASVIFKPFSKKNA

SEQ ID NO: 309398 - protein, 51 aa, Zea mays; identical to SEQ ID NO: 190028
  Clone ID: MRT4577_45235C.1.pep

SEQ ID NO: 309399 - protein, 59 aa, Zea mays
  Clone ID: MRT4577_45236C.1.pep
ELEPKFPLSRYEMGNGFFIFYHISWTFTVENYPGWVWCPHFQCLSLSPNALTIAITNRL

SEQ ID NO: 309400 - protein, 340 aa, Zea mays
  unsure (1)..(340): unsure at all Xaa locations
  Clone ID: MRT4577_45237C.1.pep
ASASLEAGRDRACVRLDGNGLSSSDDPDSIHSPPPAYSFIRKQIPLLCLLQPWPCCPSSSAWPPCPSSSLCSSRTPPRHSXDAGCNGILLTYTLQRRDKIRPHVAAPNSQPYSFSASATVVNAGTRPLRSWALLLTFVHGEILVSVDGAVLTSGAALPYNTTAGDAAGRPTPTSFTGYPQTDLLTPIATAGDPAKTQATVSLVGTLFAGPEPYVPLPSFLSLADPSYTCPPATNATSSPTNLTTCCVFTAGGDPTGGLGGEXFLPRRTGDLVITYDVLQSYDTTYLALVTLENDALLGRLDAWQLXRGRWXHXGVISSMRGATPAXVDTAECLYGPQGQY

SEQ ID NO: 309401 - protein, 97 aa, Zea mays
  Clone ID: MRT4577_45238C.1.pep
VQWGLGPGRRIRSYEARLVSGSSRPPSFSKRLKTYLSHGVLLIGEPVPPIESMAAGVRHSTGEGGENREMIVLASLLLIGLAGGGNPGPRPALKGTP

SEQ ID NO: 309402 - protein, 37 aa, Zea mays
  Clone ID: MRT4577_45239C.1.pep
GHVVHAHSSQAVYYSNLHTSPSSVNEDTRNDFLSGIV

SEQ ID NO: 309403 - protein, 217 aa, Zea mays
  Clone ID: MRT4577_4523C.1.pep
MVVEMDGGVGVAAGGGGGAQTPAPAPPRRWRLADERCDLRAMETDYVRRFHRHEPRDHQCSSAVAKHIKAPVHLVWSLVRRFDQPQLFKPFVSRCEMKGNIEIGSVREVNVKSGLPATRSTERLELLDDDERILSVRFVGGDHRLQNYSSILTVHPEVIDGRPGTLVIESFVVDVPDGNTKDETCYFVEALLKCNLRSLAEVSEGQVIMDQTEPLDR

SEQ ID NO: 309404 - protein, 38 aa, Zea mays
  unsure (1)..(38): unsure at all Xaa locations
  Clone ID: MRT4577_45240C.1.pep
VELDSCTKMLVGAAKASQKAPTPAQALHHTLSAGVNDX

SEQ ID NO: 309405 - protein, 121 aa, Zea mays
  unsure (1)..(121): unsure at all Xaa locations
  Clone ID: MRT4577_45241C.1.pep
RDPAADFWADDPGTKRGHGGGHKDRQSRAHXXXXXXXXXXXEGGXAKQKKKKKKKKKKKKKKKKKKKKKRGGPPRGPKTAGRRKSPKGPPKPRAQRDGENPGTQPGAAQPASGRKSERART

SEQ ID NO: 309406 - protein, 80 aa, Zea mays
  Clone ID: MRT4577_45242C.1.pep
IVFLLICSMEIWACLVMGQCEPSQMFGQQQDLAAVWLHIKLIWPRHHCFPQVRWQTHIGCMQFKILDYKTSNNTISQRYV

SEQ ID NO: 309407 - protein, 101 aa, Zea mays
  Clone ID: MRT4577_45243C.1.pep
HGYDQSSASVVLAHLVNALSVVRAASNSSSSRRRMALSYLFTTLQGQCIMRVIVSGSCHILDAWRRALGTLHHVVMNEATHHIACYECSGMKCMPRRPRVP

SEQ ID NO: 309408 - protein, 64 aa, Zea mays
  Clone ID: MRT4577_45244C.1.pep
GRPRVRGREIGRVIRHMVGRRGTYHGDEEAGLNLNVNSYINRLVLKYPDGTSLPSQGLWKHPHK

SEQ ID NO: 309409 - protein, 86 aa, Zea mays
  Clone ID: MRT4577_45245C.1.pep
NKGGEFNFSPPPQLIKMAGPFYLGGKGKKKTKGGKAPPPGVSVGTPGVSTFGGEGPPKRLSKKAPFSSNFLGAPGDWTQGRGFPGG

SEQ ID NO: 309410 - protein, 125 aa, Zea mays
  Clone ID: MRT4577_45246C.1.pep
ILDELSRRFSEHDSKWDRRVAEQESRWNATFSEFTTGQDRCVGALEQATGVLEDWRMNMEGMMDDLRLEVGKISKNWERAVVDNSSAMAGILAPSPPAVEQQPAGVPANRPHGHRVESSHREDGF

SEQ ID NO: 309411 - protein, 118 aa, Zea mays
  unsure (1)..(118): unsure at all Xaa locations
  Clone ID: MRT4577_45247C.1.pep
QTHQAYRTSNNLTTVATAILWLLALLALFASATNASIIPQCXLASSSIIPQVLPPVTLMALEHTPVQAYPLQQAIAASVLQQPIAQLQQQSLAHVTIQTIGTQQXQQVLPALNHLIME

SEQ ID NO: 309412 - protein, 93 aa, Zea mays
  Clone ID: MRT4577_45248C.1.pep
PRVRHAFMDLFCSFVRVNLFSDKMPRKMILQVYNILHVMLKGGRDCEFYHRLVQFVDSYDPPIKGLHEDLNFVSPRIGEVLEAVGPIIFLSTD

SEQ ID NO: 309413 - protein, 71 aa, Zea mays
  Clone ID: MRT4577_45249C.1.pep
LVSIVLACLVYTTQSERETMDHFVLFGIFFKCYLRNIVRLYCKIRRRKKKENSYEVYIVWLLVLFPVSNSV

SEQ ID NO: 309414 - protein, 158 aa, Zea mays
  Clone ID: MRT4577_4524C.1.pep
DYVRRFHRHEPRDHLVWSLVRRFDQPQLFKPFVSRCEMKGNIEIGSVREVNVKSGLPATRSTERLELLDDNERILSVRFVGGDHRLQNYSSILTVHPEVIDGRPGTLVIESFVVDVPDGNTKDETCYFVEALLKCNLKSLAEVSERQVVKDQTEPLDR

SEQ ID NO: 309415 - protein, 84 aa, Zea mays
  unsure (1)..(84): unsure at all Xaa locations
  Clone ID: MRT4577_45250C.1.pep
LQKLKYTLLELELRRLLEQELQYNGSWLRDLDCIHSNYQTLMRAVLLFIVSTYQCKDWVICEHGALXGCGXXFLGCLAAIRIIT

SEQ ID NO: 309416 - protein, 113 aa, Zea mays
  unsure (1)..(113): unsure at all Xaa locations
  Clone ID: MRT4577_45251C.1.pep
MRPNPPRPSGFXGGQQQVGYPPRSGDSPPQQFPPRPSGFPGGQQQVGYPPRSGDSPPQQFPPRPSGGAEIPAWKMGEKEFKEEVWRLMTGIAKLVEPLTDKNGFFPYHLFRAQ

SEQ ID NO: 309417 - protein, 69 aa, Zea mays
  Clone ID: MRT4577_45252C.1.pep
QQGGIVVHHATPSQLLRLVLYVLRCSPSSGAFPPSSSLQLRPCRRRQAFEHMVQEVVVHHTYCRSHVVK

SEQ ID NO: 309418 - protein, 73 aa, Zea mays
  Clone ID: MRT4577_45253C.1.pep
SVPRWPRRTRPRLEDGCGDLGCTTKKWNFIYPVYLNSKKTVAGGRRIYAAKAWPDPTCIDIADCCSDLTTPHA

SEQ ID NO: 309419 - protein, 125 aa, Zea mays
  unsure (1)..(125): unsure at all Xaa locations
  Clone ID: MRT4577_45254C.1.pep
QHSASSGRFLTEEILETTAIHEPXTKTLHAACWSLPKRANGNVIRAGPVCVRIPCGSPRTKLFVLCSRDEVQIHASALLSLCRYHVKAIRQNSSRRRERTAQICWAVFPLPERNAVTCSTQQQQQ

SEQ ID NO: 309420 - protein, 49 aa, Zea mays
  Clone ID: MRT4577_45255C.1.pep
KKKKKKKKKKKKKKKKRKKEKKKKKKKKKKIKKKKKKKKLKKKKKKKKS

SEQ ID NO: 309421 - protein, 64 aa, Zea mays
  Clone ID: MRT4577_45256C.1.pep
HAREAGGGRLTPWGDPTPPGGHCQGGRLPLGLIGGSTGSRFSLPQRTQRRRTLCLNRGINLRRV

SEQ ID NO: 309422 - protein, 73 aa, Zea mays
  Clone ID: MRT4577_45257C.1.pep
PSSAPISLLTSTTLDRALRRPLAMELLPCARPALARPSPRSPAGAPSSSSMAVAPCRGCSHGHQCSLCSSPWL

SEQ ID NO: 309423 - protein, 43 aa, Zea mays
  Clone ID: MRT4577_45258C.1.pep
RHFRLMPRLFFVVLGLSIRQVTRSGGGQIFAGIALHNCDRHNI

SEQ ID NO: 309424 - protein, 51 aa, Zea mays
  Clone ID: MRT4577_45259C.1.pep
FSIFCKINIARAAPMNRVWLHNSPKLFLLLSCPYTNSHTKINLHLLTQSTN

SEQ ID NO: 309425 - protein, 212 aa, Zea mays
  Clone ID: MRT4577_4525C.1.pep
MVMVEMDGGVGGGGGGGQTPAPRRWRLADERCDLRAMETDYVRRFHRHEPREHQCSSAVAKHIKAPVHLVWSLVRRFDQPQLFKPFVSRCEMKGNIEIGSVREVNVKSGLPATRSTERLELLDDNEHILSVRFVGGDHRLQNYSSILTVHPEVIDGRPGTLVIESFVVDVPDGNTKDETCYFVEALLKCNLKSLAEVSERQVVKDQTEPLDR

SEQ ID NO: 309426 - protein, 96 aa, Zea mays
  Clone ID: MRT4577_45260C.1.pep
GQQGEGGGAERRARRRGRAEAGLQAMVWGRDGVWQGGTAGDRSSGRERRSLWGDGDYWVAVCFFSGFRLAAGTDCCCLVGRRRGIGGIYPNKNLIS

SEQ ID NO: 309427 - protein, 111 aa, Zea mays
  unsure (1)..(111): unsure at all Xaa locations
  Clone ID: MRT4577_45261C.1.pep
KKKKKLVQAFFFFFFFFFLFFFFRGHLQIKKKNNSTSLLPLSTKTPPGGGIYIHGNQIRRCSFNSKRAKKQATFAPTPLRATYKGQTADPKQVFPGPKILKKRGGHXKLFG

SEQ ID NO: 309428 - protein, 145 aa, Zea mays
  unsure (1)..(145): unsure at all Xaa locations
  Clone ID: MRT4577_45262C.1.pep
MDVLATNANRRXXVPTPAQRIIVQTNSEVDLLDDGYRWRKYGQKVVKGNPXHPRSYYKCTYQGCDVKKHIERSSXQDPNAIITTYEGKHSHDVPAARNSSHAAANANGSCSTSVPHRVQSSAXVVAEWXLTKHILSFFYAPKRGR

SEQ ID NO: 309429 - protein, 237 aa, Zea mays
  unsure (1)..(237): unsure at all Xaa locations
  Clone ID: MRT4577_45263C.1.pep
LRSKQPFFYWLDVGEGREMNLEGKCSRSKLLSQCIKYLGPKEREDYEVVIEDGRFLHKKSRRILDTSSGPRDAKWIFVLSTSKNLYVGQKXKGTFQHSSFLAGGATSAAGRLVVENGTLKAIWPHSGHYRPTEENFQEFKSFLKDNSVDLTDVKMSPEEEDEEFWGRGGSAAGGRDPSEDASRVASPLARSFNNHPAPPTAAAAAARGCEASTPREALRSPLQHGALAAVAAAAESE

SEQ ID NO: 309430 - protein, 101 aa, Zea mays
  unsure (1)..(101): unsure at all Xaa locations
  Clone ID: MRT4577_45264C.1.pep
MASGKEPIEVRFRLFDGTDIGPTKYDPSTTVSSLKEFILARWPXRILENNRTLAESRVPVGEVPGGVITMHVVVRPPQADKNSEKQLANSPKQNRCGCTIL

SEQ ID NO: 309431 - protein, 161 aa, Zea mays
  Clone ID: MRT4577_45265C.1.pep
MSSGGIARGRLAEERKAWRKNHPHGFVAKPETLGDGTVNLMVWHCTIPGKQGTDWEGGYFPLTLHFSEDYPSKPPKCKFPTNFFHPNVYPSGTVCLSILNEDSGWRPAITVKQILVGIQDLLDQPNPADPAQTDGYHLFIQDPAEYKRRVRVQAKQYPALV

SEQ ID NO: 309432 - protein, 43 aa, Zea mays
  Clone ID: MRT4577_45266C.1.pep
GKHGVHPRRELRIRRCTGPASTPRTRTPIVVGARARAQQDQQQ

SEQ ID NO: 309433 - protein, 90 aa, Zea mays
  Clone ID: MRT4577_45267C.1.pep
RDTLDVGLAGSVGCCHRVLGGEGVGKGGGLRGRGRAAAEGDGEGRGARAGTNAAEVVAGDRRGSRWRTPMADGETRWWWDWGWKVPAGFE

SEQ ID NO: 309434 - protein, 35 aa, Zea mays
  Clone ID: MRT4577_45268C.1.pep
RTRLCRPDLLTSYGRFCNLGAGVFPVSRVSWIMYC

SEQ ID NO: 309435 - protein, 119 aa, Zea mays
  Clone ID: MRT4577_45269C.1.pep
MAGGKEPIEVRFRLFDGTDIGPTKYDPSTTVSSLKEFILARWPQDKDITPKTVNDLKLINAGRILENNRTLAESRVPVGEVPGGVITMHVVVRPPQADKNSEKQLANSVKQNRCGCTIL

SEQ ID NO: 309436 - protein, 69 aa, Zea mays
  Clone ID: MRT4577_4526C.1.pep
LQYLPNRPTSLLPLTTFLREFIATVHASYHLAVCLKPRVGLTSPLPGHRFLNDSLWRYLTPYSYLYFFT

SEQ ID NO: 309437 - protein, 107 aa, Zea mays
  unsure (1)..(107): unsure at all Xaa locations
  Clone ID: MRT4577_45270C.1.pep
MAGGKEPIEVRFRLFDGTDIGPTKYDPSTTVSSLKEFILARWPXKLINAGRILENNRTLAESRVPVGEVPGGVITMHVVVRPPQADKNSEKQLANSVKQNRCGCTIL

SEQ ID NO: 309438 - protein, 119 aa, Zea mays
  Clone ID: MRT4577_45271C.1.pep
MASGKEPIEVRFRLFDGTDIGPTKYDPSTTVSSLKEFILARWPQDKDIAPKTVNDLKLINGGRILENNRTLAESRVPVGEIPGGVITMHVVVRPPQADKNSEKQLANSPKQNRCGCTIL

SEQ ID NO: 309439 - protein, 112 aa, Zea mays
  Clone ID: MRT4577_45272C.1.pep
VSERFFNQGIGLATAFLCVSSPPAPSRRQGIRQLQTSATCEKRCGGTGGKEPRVGEKDDREETQGCTHAAKAGSMRPMHTTLTRSSSIHSRQLRKGQRGSEREEQREEKRGT

SEQ ID NO: 309440 - protein, 77 aa, Zea mays
  Clone ID: MRT4577_45273C.1.pep
MLEAAMVTVDLGTRGRDLALLDGHQQWHRAAITKCEHGTCPAGDELQLYGSGGKEGTPLVIGNGALFSATTFRYWPP

SEQ ID NO: 309441 - protein, 65 aa, Zea mays
  Clone ID: MRT4577_45274C.1.pep
PPFNDLLFLLYSFFSFLLSNILHWYFTIASQLHAQRLEITQVTPGSRELGKILEGGTVTGSITEI

SEQ ID NO: 309442 - protein, 630 aa, Zea mays
  Clone ID: MRT4577_45275C.1.pep
MPPQFPTARLLLPSHRLLPLLSPLPSASLSPAPRTLRLPPPQLLHRVARRRPLLRGMASAAAPGSHAAAEAPPVDVGGGGAGAPRRLVLEELPWDHSFVRELPGDPRSDTIPREVLHACYSRVSPSAKVDNPKLVAWSDSVADLLDLDHKEFERPDFPQFFSGATPLVGSLPYAQCYGGHQFGVWAGQLGDGRAIALGEVVNSRGERWELQLKGCGKTPYSRFADGLAVLRSSIREFLCSEAMHGLGIPTTRALCLVETGKSVVRDMFYDGNAKEEPGAIVCRVAPSFLRFGSYQIHASRGKEDIEIVRRLADYTIHHHFPHLENMKKSEGLSFETAIGDSPTIDLTSNKYAAWAVEVAERTAYLIARWQGVGFTHGVLNTDNMSVLGLTIDYGPFGFLDAFDPSYTPNTTDLPGKRYCFANQPDVGLWNIAQFTGPLSSAELISQDEANYVMERYGTKFMDEYQSIMTKKLGLTKYNKQLISKLLSNMAVDKVDYTNFFRLLSNVNADPGIPENELLVPLKAALLDIGKERKEAWISWVQTYIEELVESGVPDEERKAAMNSVNPKYILRNYLCQSAIDVAEQGDYEEVRRVLRVMQNPYDEQPGMEKYARLPPAWAYRPGVCMLSCSS

SEQ ID NO: 309443 - protein, 71 aa, Zea mays
  Clone ID: MRT4577_45276C.1.pep
FPYPCLSFVRFQLNRCSMLLSFFPQNLCVLVAPSYPCPVLGSFELVSLGIFGRIVACITARHNYNNPPMVY

SEQ ID NO: 309444 - protein, 74 aa, Zea mays
  Clone ID: MRT4577_45277C.1.pep
GVDNILKRMAILDGDHSVESRPTSLPSRSLGQVPGTWEAVRCGVVLWWKKPQISLKPPTKKDGRRLDKNLDPAI

SEQ ID NO: 309445 - protein, 125 aa, Zea mays
  Clone ID: MRT4577_45278C.1.pep
NTNPFFIKPKCRGEKVHGDTRGQNTNHHPAGDPKQPMDYHWVHKKSIGGPVKLNNTPKGKKKKMKLKWGEQQRRGTGGGGQHRREDRRKSRILFFKAGGGGPGPQTPPPGGNRPGARLHPNPRVR

SEQ ID NO: 309446 - protein, 108 aa, Zea mays
  Clone ID: MRT4577_45279C.1.pep
KKKKKKKKKKIKKKIKKKNVCFFSGAPLGGNSAEVLHTGGGWTILLGGPIGPLGGGITINWRAFYTPRRGKKLVYPTLKTCGNTPLFPAGGLPKRAAPKALSHQWPPL

SEQ ID NO: 309447 - protein, 86 aa, Zea mays
  Clone ID: MRT4577_4527C.1.pep
FLRWVASFWHTSQNRSWSCIVLPRILSSVPRACKQRKATSQPRRRPIINNIDHLVRRPFGPPQAASDGGAAVPRGGDTPASSHASE

SEQ ID NO: 309448 - protein, 80 aa, Zea mays
  Clone ID: MRT4577_45280C.1.pep
SLAHARTAVVELRQIVIIFRYMSQLRQHFSENESSIPSYMVWRSSMILSSASAYMAYVIFLNQAGLCSIIRSLVIKWERT

SEQ ID NO: 309449 - protein, 53 aa, Zea mays
  Clone ID: MRT4577_45281C.1.pep
HEDKMGLEVEAYIRRHYEGEISDIEIIEKEDLDLVFHLLCILNLIFCLTSIMK

SEQ ID NO: 309450 - protein, 63 aa, Zea mays
  Clone ID: MRT4577_45282C.1.pep
ENPYLTQLNNPDKHTSFTIFLNIQKSLTKHSSQQYHNLNCKLYSPFTRTLNTIYCFILHSNSY

SEQ ID NO: 309451 - protein, 73 aa, Zea mays
  Clone ID: MRT4577_45283C.1.pep
ATAPNLSSTYGALAKSSVLSTAFIPSFIAATWTLLRRKSRRSAEENAYLSIVASPSYRFTLLSSTRTTSAVMS

SEQ ID NO: 309452 - protein, 255 aa, Zea mays
  Clone ID: MRT4577_45284C.1.pep
MPRYDERDRYGGNTRLYVGRLPSRTRTRDLEDLFGRYGRVRHVDMKHEFAFVEFSDPRDADEARYNLDGRDFDGSRMIVEFAKGVPRGQGGGGDRDRGRGGDREYMGRGPPPGSGRCFNCGIDGHWARDCKAGDWKNRCYRCGDSGHIERDCQNSPKNLKRGKSYSRSPSPRRGRVRDRSYSRSRSRSYSRSVSPRRDERRSRSPRDSRSPRRSPRDSRSPRRSPRDSRSPMKSPRGSRSPMRSPRDSRSPMRSA

SEQ ID NO: 309453 - protein, 54 aa, Zea mays
  Clone ID: MRT4577_45285C.1.pep
SNKDARTNAFMYTFTDTYSGGENPSGAVETRLDSYTTHLQMACLRMKFDDVNDM

SEQ ID NO: 309454 - protein, 80 aa, Zea mays
  Clone ID: MRT4577_45286C.1.pep
TLEITNVLVSPCHLLKRRKTASSAKMRVGHVFIRITANRGRRKQGFSSFIMWGGTLEHLGPDPGGRRRMQKTLARSLWAY

SEQ ID NO: 309455 - protein, 169 aa, Zea mays
  unsure (1)..(169): unsure at all Xaa locations
  Clone ID: MRT4577_45287C.1.pep
ASAGLDSIGRVWXVRTGRVIYMLESHIKPIYGLDWAIDGHXLLSGSGDGFMKCWDVRAMRETNSIAANTGGVTDLRWFKGTDGPTSGIPLQEDEQGQVIPKKASTFVISSGFDKNVQIFSADDWAHCKTLQGHSGPVFSTDVTRDACWIVSGGKDRTVKLWSRDDNGGI

SEQ ID NO: 309456 - protein, 139 aa, Zea mays
  unsure (1)..(139): unsure at all Xaa locations
  Clone ID: MRT4577_45288C.1.pep
TLLPSSPTVPILQNLLRDAINLAXRFNFSHVTHHYHHETLHNLHHHIYFFFTPPPLMIETNCPDIPTRFLKNDKPIMLIMLQEISVTTDYDIXSHKNMIVISYNKLLYLXRPNNVILCLKCVLSSLSRSILMILILTTH

SEQ ID NO: 309457 - protein, 40 aa, Zea mays
  Clone ID: MRT4577_45289C.1.pep
LKSYHFLYVFFLDHAPFIFPLPFIVIKKKKKKGRRLSCIG

SEQ ID NO: 309458 - protein, 168 aa, Zea mays
  unsure (1)..(168): unsure at all Xaa locations
  Clone ID: MRT4577_4528C.1.pep
MSMVRDRTQIMIVFHLRSIISAERVRXMEKRRLMNLLLLGAISLPTVSMVVPYEVFFVAGGSGNGGSGTYAKDKLVKDITVEARLNTHGPNDRTVAHVLKGDPTHLVVEQDNTLATYGINAVCTHLDCGVPWNGAENKFICPCHASXYNNQGKVSPXLAPLSLALVHV

SEQ ID NO: 309459 - protein, 37 aa, Zea mays
  Clone ID: MRT4577_45290C.1.pep
SRKACHAAYVLMEVAAGVPTAMVIKIPAGSFRFDQIG

SEQ ID NO: 309460 - protein, 326 aa, Zea mays
  Clone ID: MRT4577_45291C.1.pep
MATLQHQNQGAAAPMTTTGGGLRAMDLYEKLEKVGEGTYGKVYKAREKATGRIVALKKTRLPEDDEGVPPTALREVSLLRMLSQDPHVVRLLDLKQGQNKEGQTILYLVFEYMDTDLKKFIRGHRQNHEKIPAHTVKILMYQLCKGVAFFHGRGVLHRDLKPHNLLMDRKTMALKIADLGLSRAITVPIKKYTHEILTLWYRAPEILLGATHYSTPVDIRSAGCIFAELVTNQPLFPGDSELQQLLHIFKLLGTPNEEVWPGVDKLPNWHVYPQWKPTKLSTLVPGLDADGYDLLEKMLVFEPGKRIPAKKALEHPYFNDVRKEMH

SEQ ID NO: 309461 - protein, 163 aa, Zea mays
  Clone ID: MRT4577_45292C.1.pep
VALLEILRNKKKKKKKKKKKKKKKKKKKKKKKKKKKKKKKKKKKKKKKKTKKKKKKGPKGRARLKIREPPGWRNFNIKFFKPATPGGGPGTKSPQKGAFFRGFMGGVLKTGGWENPGGTPINSLGSTPPFPKGGKNKKGPTKSPFQKLANPNGERKFERVKFL

SEQ ID NO: 309462 - protein, 125 aa, Zea mays
  Clone ID: MRT4577_45293C.1.pep
KNGFIKQAPKGEKTKMKKKEASGGGGGPKKKGPGPSKKKGEKKPRGDRKQTRGKGKRTDTKKGGKQKKGENKSQKIGQPTGTKRGQKPEGPKGGNRRDRAGGRRGTQKAQKRGGALKSSQPHRGG

SEQ ID NO: 309463 - protein, 137 aa, Zea mays
  unsure (1)..(137): unsure at all Xaa locations
  Clone ID: MRT4577_45294C.1.pep
YIIKVCGVKNVLPFLTGXAKTIYLPALGYYHQKMPMVCQHQEENMPXDVAGRLVKKRXAETKGAEDKMKDMGFIPIIXHDPQSRGSGGEVITKTWLTENKMNAQTGSLRGSGDTKKPPHRGHLGMRRGTPLFSGGAP

SEQ ID NO: 309464 - protein, 86 aa, Zea mays
  Clone ID: MRT4577_45295C.1.pep
FMEHQDQQRQTTLHANTRALESALATRDRDYDYSSGADFCTGVVSLWPPFRSFQAFFLSQPQVYFVTGTNNAAARVNKTAFAVVVL

SEQ ID NO: 309465 - protein, 145 aa, Zea mays
  Clone ID: MRT4577_45296C.1.pep
KSIISESCVSVGKYHVKESISSTLQSIFDKYGDIAANCQLESSSMRAYYLECLCAVVQELQSTPFNELTKSKVKEIFSVLKDVESANIDVSWLRALLNEISEAINLASQRQTFEAKKVKYEGPLESVKNELESRMENLSQKEKEA

SEQ ID NO: 309466 - protein, 250 aa, Zea mays
  Clone ID: MRT4577_45297C.1.pep
MTLAAGLGYALIALGPAFSLFSGVVVRKPFLVLTLLSSTLFWLISLIVLSGIWRGFLPIKSGAWWAYVILILTSVALQEGTRLVFWMLYKKMEEMLDAFADRISKPRLRLTDKMLISLAGGLGHGVAHAVFFCLSLLTPAFGRATFYTERCSKLPFFLASALIALGFLVIHTFSMIIAFNAYDEGKKSDQVFVPVIHLAAAAMTLVNLAPGGCLIGTPLLLVMAALTLQHCWRVACRRLTEHRHQQHNSS

SEQ ID NO: 309467 - protein, 230 aa, Zea mays
  Clone ID: MRT4577_45298C.1.pep
MAGPPYPSTTNFPRLEHISLYLRIFIALIVFQLIGTAVYNVFLHPLRKYPGPRLAAATDLVWRYYIVKGEEVSWTQECHKKYGEVVRLGSNRLSYIHPQAWKDIVGHRKGLRQENPKDPHNGVVEGAPNAPSILFIKDPQDHGRVRKIFSNAFSDKALRMQEPLICGHINKLIRNIAQAISENPDVHLDGVKLYNCATFDIMGDLTFGEPLGMLDTGEYTPWGKSCIWWP

SEQ ID NO: 309468 - protein, 125 aa, Zea mays
  unsure (1)..(125): unsure at all Xaa locations
  Clone ID: MRT4577_45299C.1.pep
GKILGRIQATGSDKKRRRRFIYIGDGKGDYCPSLKLGEGDHVMARENYPLWHFICGNKQLFKAEVHPWNSGEELEKTLLKLXGEVISPPAQASQFDYSKCEMSNPASCPPSCAALITDQLLVRKY

SEQ ID NO: 309469 - protein, 79 aa, Zea mays
  Clone ID: MRT4577_4529C.1.pep
PTRPKLFFLTPKTSDFVQLYTQEDCEIIKVNVHCPVQGDIVIECVSLDEDFEHEVMMFRAMFSTAFIEDNLLVLDRNEI

SEQ ID NO: 309470 - protein, 51 aa, Zea mays
  Clone ID: MRT4577_452C.1.pep
GTSLALKASKSVACIRSMLGQCSCRVYLPNAVTWGRAPLIRRSLHLFRRAS

SEQ ID NO: 309471 - protein, 312 aa, Zea mays
  unsure (1)..(312): unsure at all Xaa locations
  Clone ID: MRT4577_45300C.1.pep
VDRGENRPEIRTLPQNLHSRSELPTTTSVPKCPVTITTPPPSLLPCSSSSQRLXAADPNDERCLTHLHQSLSDSSGRLNWTKAAISAPCDGFFSHLQGVTCNNGRVYKLALPDLSLGGTVPPELSNCTNLQSLDLSANALSGAIPTELSALLNLAVLNLSANALSGAIPRELASCAYLNVIDLHGNQLSGPIPEELGLLVRLSTFDVSYNRLSGPIPVLLANRSGAGTAAVGTARFNASSFVGNKGLYGYPLPPMRTRGLSVLAIVGIGLGSGLLSLVLSFSAVCLWLRATDRRTPTTPGEEGKISQPMPNY

SEQ ID NO: 309472 - protein, 133 aa, Zea mays
  Clone ID: MRT4577_45301C.1.pep
ISNPAPINFNPPPKDFLAAFCRPFFIPDYLFSDFVDAKSFGGGNKMGGPPPMGSSNGGPPFICGKKKGFLFIYKPLMVVGSPPVFYYDYFVWGTFGLVNPPSPLLQIWLPWFICGGHCLVLQRYGPLLLDINY

SEQ ID NO: 309473 - protein, 611 aa, Zea mays
  unsure (1)..(611): unsure at all Xaa locations
  Clone ID: MRT4577_45302C.1.pep
MRGGGGASWLSFRGVVVEEEEAVVSAPEKPMRRGRRRWGAEVDDGYSPSSTGGGGSSCCDSFGCDSPLAGFVRPDGDPDTDLETDGLATSTSSAFTERQDDEAEEALYGVKEEEWAQIQEPAKNPAFRATPECHKQRYRTDAAVLLHGRKGSKQRPASLDLGXLGSMEPRFLQVXIGGVGLMNKGLGASVIRSDVFHSPGTPNYPRHRASVLGCHKGWSSERVPHPSKGNRRYPGSSMAFPYSNGRTLPSKWEDAERWIFSPNSRDALGRTTVAHARRPKSKSGPLGPPGRLGGQYSSVSSVSLLDNGRAGPITANSPFAAGVLMPEHVCEGKSTNGTYSSRPIGNEINIGRGVKICPLNGGSHPVRTSRVRQRLDYAVESSVSLPSTQESVQDEQVEITEDSASTIASIISRKDAATQTSPELSRSSSPNTRPTFNGSLSTEQVKEKGSCLSDLDIRDVQMDDRVTLTRWSKKNVTRSSNKNSTNIIEWSEKTVESKSSSWGFAKAKCISKIDREDTEITAWENIEKAKADAAIQKLVIKLEKKRSSSLDKILNTLKSAQRKSQVMHEHERDAVTANQDGKGSRKAKKRAQLSKNGQISSLSGCFTCHAF

SEQ ID NO: 309474 - protein, 59 aa, Zea mays
  unsure (1)..(59): unsure at all Xaa locations
  Clone ID: MRT4577_45303C.1.pep
MGKEKSHINIVVXGHVXXGKSTTNXQLIXKLGGXDKRVXXKFXXXGAEIXKRSLSNAWV

SEQ ID NO: 309475 - protein, 68 aa, Zea mays
  Clone ID: MRT4577_45304C.1.pep
ASRTGGGGPPPPRPAEPSPSVYLPSGLSSYQSSLVVITYLQRSHSQSPACDKVGCHIMHICYHNNAER

SEQ ID NO: 309476 - protein, 92 aa, Zea mays
  Clone ID: MRT4577_45305C.1.pep
PRAGESIQKAKAEAAIQKLMIKMEKKGSSSLDKILNTLKSAQRKAQVMREHELDAVTANQDGKGSRKAKKGAQGSKNGQISSLSGCFTCHAF

SEQ ID NO: 309477 - protein, 197 aa, Zea mays
  Clone ID: MRT4577_45306C.1.pep
VHTTTPTVLNPAALESRPRTSAERRHYHHRKRRRGDVSATDPDRRRWPGGAEGGLEVAPNAREVLIGLYTRTLKEIEAVPKDEGYRKAVESFTNHRLQICQEEDDWKRIEDRIGCGQVEELIEEAEDELKLIAKMIEWDPWGVPDDYECEVIEDDTPIPKHVPQHRPVALPEEFFKTLDAVKSDPALQGDAPPQVKA

SEQ ID NO: 309478 - protein, 240 aa, Zea mays
  unsure (1)..(240): unsure at all Xaa locations
  Clone ID: MRT4577_45307C.1.pep
MASRAPVIVVVAAVIMAAARLASGSGYYPVAAPFTSSSWQDGSATFYGDGSGLGADFGGACGYGANDIQSLYSTRTAALSTPLFAGGAGCGQCYELRCVNSRWCNPGSPSVVVTGTNLCPPNWYLPSDNGGWCNPPRQHFDLAPPSFLLLAERVAGIVPVQFRRVPCQRSGGVRFYVQGNYYWLLLYVMNVGXGSGDVSDLAVKRXGEPDCSYVPASHNWXITQQVGPRARARAGPSSSG

SEQ ID NO: 309479 - protein, 182 aa, Zea mays
  Clone ID: MRT4577_45308C.1.pep
MHAYVSSEFGSSVPAHQQRDATTTTASDDGEMFLRRILTGGGGLAALRAARAVKETTGIVGLEVAPNAREVLIGLYTRTLKEIEAVPKDEGYRKAVESFTNHRLQICQEEDDWKRIEDRIGCGQVEELIEEAEDELKLIAKMIEWDPWGVPDDYECEEFFKTLDAVKSDPALQGDAPPQVKA

SEQ ID NO: 309480 - protein, 130 aa, Zea mays
  unsure (1)..(130): unsure at all Xaa locations
  Clone ID: MRT4577_45309C.1.pep
AGESSGRLASWDGKAPPWEXSAGGSLSRRRPGAERSWEDAQGRREERLGAGKKHRRAGTRAGELQGAHRNLDQGAATAMEEREGSAQRVERGGATGREQEEARRAEGEIEGGREARLGRSQFSAAGFFLQ

SEQ ID NO: 309481 - protein, 46 aa, Zea mays
  Clone ID: MRT4577_4530C.1.pep
YFVRYANATFLFRGISFLEVLSYGICSFMVIGRTHNCGFNSRSFAC

SEQ ID NO: 309482 - protein, 59 aa, Zea mays
  unsure (1)..(59): unsure at all Xaa locations
  Clone ID: MRT4577_45310C.1.pep
LEXTIPKSTSITQTQLSKIXSNQKGLIKLYFLSFLXTISLIFILHTXXXXPISIIIKIP

SEQ ID NO: 309483 - protein, 72 aa, Zea mays
  Clone ID: MRT4577_45311C.1.pep
MVVGASLIKCSCVPRHVPRNNSPVQVHWNHGVAEPACLVLSCRPLSRDRVGLAEEFLGPKGSAYAWVHGSLR

SEQ ID NO: 309484 - protein, 809 aa, Zea mays
  unsure (1)..(809): unsure at all Xaa locations
  Clone ID: MRT4577_45312C.1.pep
MDPKGKRIVINDKEKETLYVDEPKGDKPTNSGSNNKKKDGKKRRIKKINYYDSDTSSSSPRDYDDDSSTKKKTVNQNYSFDYSRMSDEYNKVSGLDNAKQIWDTLKISHEGNDATMITKMELVEGELGRFAMKRGEEPTKTYKYTNMKPEEILEKIVSGRMIVKEARYVDDIANRPLPLYEPQPIALKATSSKEALANKVAQVEAARLNEEEMAQEKKGKKERKKNYRKAQGEAHIGKEWDSDCSSSDSDNEGLAASTFDKSSLFPNEHHTCLMAEEKHVSICNRCKDIDIDACNTHVATILKLNNDVANLNAQLKTCKSENGKIKFARVAYTIGRHPSIKDGLGFKKGTKNLTSQRASNLIEEKGKAPMAISSHSSHDKRNHAYLYAHVKNVSSVAHHDSCYNHVVLPTRHDVVFDSHAKFASSSSSYAHGRNRPKCHAHHIDSYVPRNASNGPTMLYHTNNASFVLMCKNDKVVARNLASKCKRDKTCIWVPKSYVYTSGGTSWIIDSGCTNHMTGEKKMFTSYVKNKDSHDTIIFGDVNQGKLRDHHLAHVGMKNLHKLLKGEHLLGLTDVYFEKYIHCVACQAGKQDKSENQSTLKHFLTRAQNEFELKEEGIKHEFSTPYTPRQNGVVERKNRTLIDKTRTMLGEYKTPERFWSKAVNTTCHAINWLYLHRLLKKTSYKLLTSNKPNVLYFHVFGSKCYILVNKGRHSKFAPKVVEGFLLSYDSNTKAYRVSSDVVFDETNGSPREQVDLDDVDEDEVPTAAMRTMAIGDVRPQEQQDQDKPSSSTLVHPXTQDEEHVPQDEGM

SEQ ID NO: 309485 - protein, 768 aa, Zea mays
  unsure (1)..(768): unsure at all Xaa locations
  Clone ID: MRT4577_45313C.1.pep
MDPKGKGNMINDKEKETLYVDEPKGDKPTNSGSNKKRKDGKKKRHIKKIIYYDSDASSSSPRDDDDEDSSTNKKTQIHKNAQATTMLLASLCRDEYNKVSDLDNAKQIWDTPKISHEGNDTTMITKMELVEGELGRFAMKRGEEPTETYNMHKTLVNMIRSYGSTRWTDHDVIRLMLRSFTVIDPHLVNLIRENPRYIKMTPEEILGKFVRGRMMVKEVRCVDDIANRPLPLNEPKPTALKATSSKDTLPNKVAQVEAAGLNEDEMTLVIKRFKTALKGHKEYPNKNKSRGKRSCFKCGKSGHFIAQCPCPDNDNDQPQEKKEKERKKNYRKAKGEAHIGKCKDFDIDAYNTHPFTILKLNNDVANLNAQLKTCKSENDKIKFARDAYTIGRHPSIKDGLGFQKSIKNLTSQRTSNLVKEKGKVPMASITHSSHDRKNHAYLCAHVKNASNIAHHDNCYNHVVLPEHHDAIFDSHAMFAYSNSXFMFMVYASGXTSWIIDSRCTKHMTGEKKMFTSYIKNKDSQDTIIFGDGNHGKVKVLGKIAITTEHSISNVFLVESLGYNLLSDKSETQVEEYLEEEGIKHEFSAPYTPQQNGVVERKNMTLIDMARTMLGEYKMLVRFWSEVVNTVCHAINRLYLHRLLKKTSYELLTGNKSNVSYFRVFGSKCYILVKKGYNSNTKAYRVFNKSSGLVEVSSDVVFDETNGSPREQVDLDGVDEDEVSTIAMRTMAIGDVQPQEQQDKDQPSSSTLVQPXTQDEEQVPQDGGM

SEQ ID NO: 309486 - protein, 87 aa, Zea mays
  Clone ID: MRT4577_45314C.1.pep
GLNSEKLYRQSFSVLLPSRGPYSLYIEAHFSPLAGVFKRGWLGFLALPLKKPWRDIPFSPGGKSPFSPLPFSLTGPPLSSLPNGPPL

SEQ ID NO: 309487 - protein, 49 aa, Zea mays
  Clone ID: MRT4577_45315C.1.pep
SNNSLVHLVLHIQRLRHVARRLRQSLLLLRHRSTVSILPALLKNQTARS

SEQ ID NO: 309488 - protein, 287 aa, Zea mays
  Clone ID: MRT4577_45316C.1.pep
MARVREPPPMASNDDSASLLVDYGWSPAAATPARSSPLRRLLHGGKAPAGAAAAAAATTTTTTRSHDVKRFICSPFAAVFRAMSCARDSAVSTCDGQRSSNATAGVAERLREARKRRPSLEQLLRMEAPPPASARRPDHHRKLGKPREAVAPYEVIISSGAVKGKEQEPLFPSPQSRFVAAVSDDADDAERRRRTTIVPVKLEPGGPGRRQTNAKRLVVVFASLRACSWAPRINDGKVAAGRAPGNKADLFYYRPIPMGRRCRVQHLEESPYVASSDLSSLLNLEQM

SEQ ID NO: 309489 - protein, 57 aa, Zea mays
  unsure (1)..(57): unsure at all Xaa locations
  Clone ID: MRT4577_45317C.1.pep
YGRFPIYIYIYIYIYILGISAQKQTPTRKHISYNMKDAQKSVPILSKTNNRXQRGVA

SEQ ID NO: 309490 - protein, 112 aa, Zea mays
  Clone ID: MRT4577_45318C.1.pep
LFLLENRRGGGCLAGHRRARPSVGDSVRIHRVTLGGHAPVAAYYSVFIALHFRCLSTTCCCSYMGGLPPRRRAGTRDPCIRGVDLHQNTIAAIFGGVVSIRWGIGAPVFFET

SEQ ID NO: 309491 - protein, 99 aa, Zea mays
  unsure (1)..(99): unsure at all Xaa locations
  Clone ID: MRT4577_45319C.1.pep
KLNECLDFISSKQLHRGGIDSPSRRSXLSLMTXVIKATGGGAFKYADVFKERLGVSLEKEDEMDCLVAGANFLLKAIRHEAFTHMDGQKQYVQIDQNDL

SEQ ID NO: 309492 - protein, 72 aa, Zea mays
  Clone ID: MRT4577_4531C.1.pep
EPSRLQRIASARSFGCMKTSRRRRCCTTTQLLFHFICYYQLWVCTAIISRRRPAVWKDSRHVLACAVTIVAC

SEQ ID NO: 309493 - protein, 122 aa, Zea mays
  Clone ID: MRT4577_45320C.1.pep
LFFVLTFFERPANASEFEYKQPINYGLKTKSSVMTRGTEEKPKGDRSRSSTGGYLDSIGARPGPTTCQDLEFRINFILPGLTPKCLELHANRTPWCTWGGERDPQTWLALGPLVLRTGLQGF

SEQ ID NO: 309494 - protein, 35 aa, Zea mays
  Clone ID: MRT4577_45321C.1.pep
MPWFQPPTPKYFRNFPGRFDLTLVLLSVQIHKQYT

SEQ ID NO: 309495 - protein, 106 aa, Zea mays
  unsure (1)..(106): unsure at all Xaa locations
  Clone ID: MRT4577_45322C.1.pep
AGRGHAPAAASPGRQRRRXRAPDDRTDRRGKARRGQLEKGTPPTPHRASTXKPTGTHSTGDKAHWSTSRERPGKNGTAPRTRRKKNTKSAPQAQQRNTQTTMATET

SEQ ID NO: 309496 - protein, 81 aa, Zea mays
  Clone ID: MRT4577_45323C.1.pep
LNAAFFLFFTIHRAMTLFKNSQNMNIKSIVQLPSSFSTYPFQLKINVFSLPHHRYTNIYTAPLTQRTCSLFPSASTSFSLT

SEQ ID NO: 309497 - protein, 183 aa, Zea mays
  unsure (1)..(183): unsure at all Xaa locations
  Clone ID: MRT4577_45324C.1.pep
MPIIRIALRSHHEXYHPGDLXKVAFAEFISTLIFVFAVQSSGMAFXSXLTGXGPTTPVVLIDVTWALAFTLFVLVLKYANISGXHVNPVETFGAFEGGNITLFRWLLNCLAHLLRSTVESFLLRFSTCVXVTDTFSLTAVTQSYALPLEIVMTFGVTYTEYATAVDPKKGSLGTIVPIGIGFI

SEQ ID NO: 309498 - protein, 179 aa, Zea mays
  Clone ID: MRT4577_45325C.1.pep
SGPTHAWDGPGNFQDREQMRVEKEIRQRYGRFFYRFPNGESAADVYDRITGFRETLLSDIVLGRFQPPGHRSTSGDMNIVLVSHGLTLRVFLMRWYKWTVRQFEGLENLANGGELVMQTGEGGRYSLLVHHTPDELRAFGLTDEMLQDQMWQKTARPGELNHRFMTNGQSFFDPFTVIY

SEQ ID NO: 309499 - protein, 46 aa, Zea mays
  Clone ID: MRT4577_45326C.1.pep
DRLCHLPKCLIASGVKPIPIYLAQLHGVLRYMGPKSGNMSIFYQKK

SEQ ID NO: 309500 - protein, 44 aa, Zea mays
  unsure (1)..(44): unsure at all Xaa locations
  Clone ID: MRT4577_45327C.1.pep
SPRQPHGSAAGDRCRRRPEREGAHPVAVLSHLPAAXSLPRSLRR

SEQ ID NO: 309501 - protein, 76 aa, Zea mays
  Clone ID: MRT4577_45328C.1.pep
EKKIHLTLPIGGLREGVIFSLPPQGQKQAVPKPGSDPEKIFLFATAQSKKGSLKKTAQPVEDNGKRVKKSRVLHES

SEQ ID NO: 309502 - protein, 59 aa, Zea mays
  Clone ID: MRT4577_45329C.1.pep
ISGFASGRRGRYFFFFFFFFFFFFFFFFFFVYNYMPAFNSGSYKIFPPFFFIYRGLVQK

SEQ ID NO: 309503 - protein, 339 aa, Zea mays
  unsure (1)..(339): unsure at all Xaa locations
  Clone ID: MRT4577_4532C.1.pep
LGPSRPAGAPVPSPVYVPNARSNGADPHRNGRPGSHHHGRGGGYGGGNRRGNGGGGGRRGSEHHGGFDGQRRGGGRRDGHGPVHQLRGHQPTYIKAPVVAGAPPPPPPFVSPATPQTPPYGPPMGFHDMSAHVYYFPAPTSEGIQGLPFVPLPASPQAVLIDPSRKNLLEQIEYYFXDDNLCKDLYLRQHMDGQGWVPLSLIAGFRQVQKITNNIQFILETVMLSNIVEVQGDKLRRRGAWENWLLPKLNYSAGSSSGSMTPVTSNIDALASQFRSVGLEGATYHPSMPGMSGEALLTRSATSVSLGYHASTFGGIQSNGSEPLFGPKSARNLLRSDTF

SEQ ID NO: 309504 - protein, 46 aa, Zea mays
  Clone ID: MRT4577_45330C.1.pep
WVRSLKHALLLVHLNIARHIGLDESLKVHLDCDWVIGQLIQVHDHG

SEQ ID NO: 309505 - protein, 154 aa, Zea mays
  unsure (1)..(154): unsure at all Xaa locations
  Clone ID: MRT4577_45331C.1.pep
GXXNNRXLXXQESQXRHLGFRIFFXGSSXSPYDSRTPAKTFYPERLFLCRHPFQPLTSRPXXSSLXASLRRRGPLRSQPXEAPGGAFXRGXAAGGGGGVPLSSFGLSEEPPTXGVWGPSLLPACLCSRSCFAPGTPQSGKIRXSRRAFAVPLDY

SEQ ID NO: 309506 - protein, 54 aa, Zea mays
  Clone ID: MRT4577_45332C.1.pep
KGRQDTTPSKHPPFHSPPFPLITFQFIPLNTFHLPSINITLNLQNPYLTNLNLL

SEQ ID NO: 309507 - protein, 47 aa, Zea mays
  Clone ID: MRT4577_45333C.1.pep
GTNKKDHTLITCSTEEPYTGSLVTTTIYWHMTDHSKESQLLSFRTRG

SEQ ID NO: 309508 - protein, 124 aa, Zea mays
  unsure (1)..(124): unsure at all Xaa locations
  Clone ID: MRT4577_45334C.1.pep
YELHFIGXXXWVPLXGAGRXHSRTTENIRQNGPRSQRKQRKKCSRGQGQGQGLARRRPAYMTTSRKLYKDVQSYRLVHHSHPRQTRMKINGCLVPTVPCRPRGEAASVKPGVTHRTMRDLHLCR

SEQ ID NO: 309509 - protein, 102 aa, Zea mays
  Clone ID: MRT4577_45335C.1.pep
IRRELRPATSVCKILGNLPLRMVADVSSSRSCGPIYVGVRVCPTCIAPARPRLYDLCTAVIGVGVGEEWGDRGSSVVRFRLDVGRSVKRWGGVDQASTKSRA

SEQ ID NO: 309510 - protein, 31 aa, Zea mays
  Clone ID: MRT4577_45336C.1.pep
VLGIVTDSTMPIILASFNHSRLHILAYSADN

SEQ ID NO: 309511 - protein, 376 aa, Zea mays
  Clone ID: MRT4577_45337C.1.pep
VYSTLSIGDGANDVSMIQAAHVGIGISGQEGMQAVMASDFAIAQFRFLTDLLLVHGRWSYLRLCKVITYFFYKNLTFTLTQFWFTFQTGFSGQRFYDDWFQSLYNVIFTALPVIIVGLFDKDVSASLSKKYPQLYKEGIRNSFFKWRVIAVWGFFAFYQSIVFFYFTAAASRHGQGSSGKILGLWDVSTMAFTCVVVTVNLRLLMACNSITRWHYISVAGSIVAWFMFIFIYSAIMTSFDRQENVYFVIYVLMSTFFFYLTIVLVPIIALFGDFLYLSIQRWLFPYDYQIIQEQHKDEPHEYSRVQLPETSHLSPQEARSYMMSMLPRESSKHTGFAFDSPGYESFFASQQGIGVPHKPWDVARRASMKQQRAGKS

SEQ ID NO: 309512 - protein, 145 aa, Zea mays
  unsure (1)..(145): unsure at all Xaa locations
  Clone ID: MRT4577_45338C.1.pep
RRRXHETAEGPNPGTPXXXGKAXXPEREXRGKETXXRHXTQGQAXXEXXXEHXXXXPXEPXEKXXXXRXREPAPKQHXAXEXKXKTRRRKGXXEEXSSXKXXDEAXXKEXAQQXXXXHXQXKSEKTGRSKGQQTKAEGAGPASPR

SEQ ID NO: 309513 - protein, 323 aa, Zea mays
  unsure (1)..(323): unsure at all Xaa locations
  Clone ID: MRT4577_45339C.1.pep
NVIFTALPVIIVGLFDKXDYSYLFMELSPAIALSSESFQDVSASLSKKYPQLYKEGIRNSFFKWRVIAVWGFFAFYQSIVFFYFTAAASRHGQGSSRKILGLWDVSTMAFTCVVVTVNLRLLMACNSITRWHYISVAGSIVAWFMFIFIYSAIMTSFDRQENVYFVIYVLMSTFFFYLTIVLVPIIALFGDFXSIVRYLISVELLRQVQLFCLTMSTISDPVFSGXQRWLFPYDYQIIQEQHKDEPHEYSRVPLPETSHLSPEEARSYMISMLPRESSKHTGFAFDSPGYESFFASQQGIGVPHKPWDVARRASMKPQRAGKS

SEQ ID NO: 309514 - protein, 250 aa, Zea mays
  Clone ID: MRT4577_4533C.1.pep
MAGRHRNPLPSSFSRGAGAGNHPHPPPPHHPHLPPYHLDEFREPPRLPPHHLDDFRDPARLPPGHPDSLREHPPPPRHHFAGHGGGALPPASHMAAALEERIGAEIEEAHALLGQNQRLSATHVALVQEVSAVRHELGHTARAIGAAQQEGDLRIREVYERLMKMEAELRAVEEMRAELAHVRMDIQQLGAARQELMGQIQGYTQDLARSAVELQQVAAVSETQELRHGTQHLRSSIELEKEGYAESYEQ

SEQ ID NO: 309515 - protein, 89 aa, Zea mays
  Clone ID: MRT4577_45340C.1.pep
MGRCLMPKPHMGEPLANTEKGLPILIPAVCDCHQETRYTKLYTAEIRDFLLVAASCFALRATFHGLGGTPTPCWEAKNDSYLGSRSKAQ

SEQ ID NO: 309516 - protein, 50 aa, Zea mays
  unsure (1)..(50): unsure at all Xaa locations
  Clone ID: MRT4577_45341C.1.pep
LIKKRSXSLYKNERYPLFYKGGGGARMSTATSSSHRQRSQRSVEAEHSIH

SEQ ID NO: 309517 - protein, 181 aa, Zea mays
  unsure (1)..(181): unsure at all Xaa locations
  Clone ID: MRT4577_45342C.1.pep
XVSASLSKNTHSLYXREGIRNSFFKWRVIAVWGFFAFYQSIVFFYFTAAASQHGHGSSGKILGLWDVSTMAFTCVVVTVNLRLLMACNSITRWHYISVAGSIVAWFMFIFIYSAIMTSFDRQVNLFTDLIRIIYYSCGGFLXPHDLLLLQENEYFVIYVLMSTFFFYMTILLVPIIALYGD

SEQ ID NO: 309518 - protein, 177 aa, Zea mays
  unsure (1)..(177): unsure at all Xaa locations
  Clone ID: MRT4577_45343C.1.pep
MPSPSRSPTTPPVASEWSCVRCTLLNPDHSDSCVACEASRPVEVDIDSPXRGRRPRVSXSPKRSRRKNERSASPPPQRXEEEGARCIAGGGRTLRXAGKGPATKKGNLEICLDKKTFKIMTYNVWFREDLELRSRMDALGDLIKQHCPDFICFQEVTPYIYMLMQKSWWQQYMLVVT

SEQ ID NO: 309519 - protein, 98 aa, Zea mays
  unsure (1)..(98): unsure at all Xaa locations
  Clone ID: MRT4577_45344C.1.pep
MYMAPKDDHDGDLHKEEEVVQGDVRVVVHQETSADXEAESALVRKISGLAAYIDMLPSLSPSTEVNSLFTYLFTGCIPCSTVDVXRLGPELQHMRAGL

SEQ ID NO: 309520 - protein, 92 aa, Zea mays
  Clone ID: MRT4577_45345C.1.pep
KYQWMTIAGSIKGVTDCYPFVPLVRGTMQMRHQYNSVRNPSHARGAAWFYVLHAAFSENCMELSVLVQVVKNQGMKSKPACTATRNRSFSAL

SEQ ID NO: 309521 - protein, 100 aa, Zea mays
  unsure (1)..(100): unsure at all Xaa locations
  Clone ID: MRT4577_45346C.1.pep
AHRQTPPTPTPDPPGPHPPXTPARPPTRPPRKGPPRRRTRRTPEPPHQPPPAPVQKXPPPPTSAQPKATHPPSPAQXTPPPPDPAVCEPXSPPGEDTPTV

SEQ ID NO: 309522 - protein, 193 aa, Zea mays
  Clone ID: MRT4577_45347C.1.pep
HCSYEVSSRASLSDAASRFFLLYSSEILGFMVAIMFFGIMRQTSAWECDSSMPSILSAIESNLGLPKAFMFLCFMPILVFCAFFIFTAEQKPPFGTFLLVTLICYIVANGFTILLILSSKLLLYVVAILHVFTKRRWQSWGNGVQSAFLGQFLSFSSFQSVKIVQMLRNNPNIIVAVATLPLVCLVHPAIGLF

SEQ ID NO: 309523 - protein, 1103 aa, Zea mays
  unsure (1)..(1103): unsure at all Xaa locations
  Clone ID: MRT4577_45348C.1.pep
MGGGGGFRGSCRVGAVLLFSAWVALAALSRLLRPVPNGCVMTYMYPTYIPIAATXGTSPXRYGLFLYHEGWKQIDFAKHIRGLRGVPVLFIPGNGGSYKQVRSLAAESFRAYQNGPLEPTFYQEASSSLPGDGLNNFSIPSRYGRMLDWFAVDLEGEHSAMDGQILEEHTEYVVYAIHRILDQYKESHLERSKGGAQSSPDLPSSVILVGHSMGGFVARAAVVHPNLRKSAVETILTLSSPHQYPPIALQPSLGHFFSHVNEEWRKGYKTGVSHAISSKLSNVVVVSVSGGIHDYQIRSRLASLDGIVPSTHGFMVGSSSMKNVWLSMEHQSILWCNQLAVQVAHTLLSIIDPVDRQPFSSTQKRVFVFTKMLQSAVPQSLSSMTHVPASLSRNLPANENQDAGELHKKDSLSCPSSTEWTSDGLEKDLYIQSNSVTVLAMDGRRRWLDIKKLGSNGRGHFVFVTNLAPCSGVRIHLWPEKHHSPVQNELPASKKIVEVTSKMVQIPAGPAPKQVEPGSQTEQPPPSAFLLLSPGEMSGFRFMTISVAPRPTISGRPPPAASMAVGQFFSPEEGASSFSIGTIIRSSFAPKEIFLLEDHPLALNLSFSASLGLLPVTLSLKTAGCGIKNPGDQMEAERNNLCKLRCFPPVALAWDSVSGLHIIPNIYSETVVVDSSPAFWDSPEGTDKTTVLILADPHCSYEVTSRASLSDAASRFFLLYSSEILGFMVAIMFFGIMRQTSAWECDSSMPSILSAIESNLGLPKAFMFLCFMPILVFCAFFIFTAEQKPPFGTFLLVTLICYIVANGFTILLILSSKLLLYVVAILHVFTKRRWQSWGNGVQSAFLGQFLSFSSFQSVKIVQMLRNNPNIIVAVATLPLVCLVHPAIGLGLLLLSHAFHAHSNLCSFLAASFRSITQKKDLYKSKMGDGSVLLSKSKSDGLQQLLPMDDSPTASKSFTDSQLELFDYRHGVMILHLLSTLMFVPSLVAWLQRIGMGQNFPWFIDSAICVGVILHGLFGSQPNVSCCIFFKLPGRRGREIGLSFLYLVGGYYSFVSSMALAPYRALYAMATIGYICFISRILERRNMVRGDINSRRTRKHSHRH

SEQ ID NO: 309524 - protein, 32 aa, Zea mays
  Clone ID: MRT4577_45349C.1.pep
ARCLINELFSCSEFQVFVLQHNLVLFLTVMNA

SEQ ID NO: 309525 - protein, 121 aa, Zea mays
  Clone ID: MRT4577_4534C.1.pep
ALGTRIKSKLQSQRTKGGPGKGDGPSREGYGNKPPGEEGGTGTPWEKGVGDLPGRQRGGTERRGEATGRSRGENKRVVQGGNRTGVQGMGLRPWFEAKSRPQSTLKKRGKLGFKKPEKLFG

SEQ ID NO: 309526 - protein, 81 aa, Zea mays
  Clone ID: MRT4577_45350C.1.pep
HLAALNPAVFLQQQFLLPFRELVAASRVSFLTQQQLLPFYKRFGVNPATFFQLHLLLPFVQLALTNPAAFFQQPFFGGAFF

SEQ ID NO: 309527 - protein, 318 aa, Zea mays
  Clone ID: MRT4577_45351C.1.pep
SVFQCNLVARFSRGPDRNKLLLQDILSQVSDRAAPALTSSSQSQRKTIKLLIHLVSKHLRDKRYFIIIDDIWDTSDWEKIKDAFPNNNLDSRILITTRVISLSWVCCFDSDDGLVHQMKPLNRTDSERLLLASAFGPSSVDDYDCQQPLCDEILIRCEGVPLFVIGMADLFKEQLLQQKDAEDQRTLAVYSSELEQGPQRLPKCIERALSLAYDDLPYESKLQSLCMTMFPSGYKFDNDRFFFFRWNEDNEVAMRFTIPHLADRNVITRVAGADCRHCPDEEEGCHCQWHVNHFMQQFLASKSAEMGFYFTASSLKKY

SEQ ID NO: 309528 - protein, 88 aa, Zea mays
  unsure (1)..(88): unsure at all Xaa locations
  Clone ID: MRT4577_45352C.1.pep
RRLWRGLSGVALSKRRGGGXMQIFVKTVTVKTITLEVESSDTIHNVKAKIQDKEGMPPDQQRLMFPGWGGGDDLKVPEYNSXKEAKVY

SEQ ID NO: 309529 - protein, 66 aa, Zea mays
  Clone ID: MRT4577_45353C.1.pep
HKSWVFSNSNCIKHHFQAMLVMAMCWDVEFRFEDHIKSLQSGQNWGHYLCLQTIYPFHQKVLPYPH

SEQ ID NO: 309530 - protein, 194 aa, Zea mays
  unsure (1)..(194): unsure at all Xaa locations
  Clone ID: MRT4577_45354C.1.pep
MDYRYRCRVTLVRVATARLEHHLQCLPEVPLMADTLLCRXRACFTPDLMGAGSLLFLIIYYLNPSVHDRVSCFDMLLGLCDYLVPIXLTPRILASNMXTTAQQRXLHEICSTLCXTRRRAEGWRKRLSYLEEEKXQKYCMTTSISLAXADWVLQHVHKLLFTYLTETSALLLPGLNQHTIIVKYIGMGKRDIHI

SEQ ID NO: 309531 - protein, 49 aa, Zea mays
  Clone ID: MRT4577_45355C.1.pep
FSYEFSGKSFGNIRNGHFYTRSICHGELFILIEALEFCGGACIPSPVSC

SEQ ID NO: 309532 - protein, 53 aa, Zea mays
  Clone ID: MRT4577_45356C.1.pep
DVSSHSCITQCRYLIHVGNEGSSSTSTFTLIITLPRHNHDLIRNFLSRMFVFN

SEQ ID NO: 309533 - protein, 65 aa, Zea mays
  Clone ID: MRT4577_45357C.1.pep
GRVDGTGKVACPCARWSDGDVGCRTCAGSGRAACRSCRGSGTRRRAAVRVAVRAQRALVAGTKDR

SEQ ID NO: 309534 - protein, 95 aa, Zea mays
  Clone ID: MRT4577_45358C.1.pep
CGVILRLVLSFLRFPLCLRSRRVLKRGFVGVGRRLRRMIRLRGCCIWFLLVCLRCVGLTLNLVLLMILSLCRIVMVSILMTVLRRLFVLFYAPAD

SEQ ID NO: 309535 - protein, 94 aa, Zea mays
  Clone ID: MRT4577_45359C.1.pep
QWNPPDPGSERRDVQSPIEIKHQSAFFLHLVHNLKHRLARRPNSYGSWRLATRILLSRWRGQPPAGRSIYSRLPFGKAAAWRRNLWLRVEGWQA

SEQ ID NO: 309536 - protein, 105 aa, Zea mays
  Clone ID: MRT4577_4535C.1.pep
SSDAWADAWGGVKVCFPLVPTRDGYFMRLFKRNSDGTWVVRVASVDTRHVLQGRQQTSEYGIQEMPHGYLQETCREHDWGDDRGANEIYKLLVDSGLALLARPRA

SEQ ID NO: 309537 - protein, 72 aa, Zea mays
  Clone ID: MRT4577_45360C.1.pep
FLSVWLCNTFMIARVCHSRSIPLMMYPRAADLTHDQQRHPQVKRLKCKEHIHRGHQMVANNVSLFSLAKKTL

SEQ ID NO: 309538 - protein, 153 aa, Zea mays
  unsure (1)..(153): unsure at all Xaa locations
  Clone ID: MRT4577_45361C.1.pep
GSRSLXLPPVPXARGCLXPSCRASLPGPPXGAXSAAAXSVARPCCCLALLPSSXLFLSSLSXGPPPCGXPXSRVLVLLLGWSLPCSLRCRGXGCLSSGXVFSPLFGVXSRAPLFLGFLRCRPGAAGCXPAPPALFLRSCFWGCLCFLFXLVFL

SEQ ID NO: 309539 - protein, 121 aa, Zea mays
  unsure (1)..(121): unsure at all Xaa locations
  Clone ID: MRT4577_45362C.1.pep
MKCAVLLFVCLFVCLQFPLVSRCGRIRKMLADSNSSSNSKDADGHQKLELANVPGGAYAFELAAKFCYGTNFEITAANVAXLRCVAEYLEMTEDQHADNLVSRAEAYLAEVALRSLDGALE

SEQ ID NO: 309540 - protein, 96 aa, Zea mays
  Clone ID: MRT4577_45363C.1.pep
LKDWALRKTDHPARIPHDNEDLTIPGGVIKDNLFRLYAMERLYDLLHLALNEDDIDPEDLGHPSDRPRPHQRSHLGGRCGQSLCLPGGGEPLRNQH

SEQ ID NO: 309541 - protein, 66 aa, Zea mays
  Clone ID: MRT4577_45364C.1.pep
CSWGSISWRESFIDASAVKKEIIHLNGAGIKDAQLSVSTPPPPEAVELLHLKMSSLPLSSSRNPPI

SEQ ID NO: 309542 - protein, 91 aa, Zea mays
  Clone ID: MRT4577_45365C.1.pep
RGGQLLVERQITEPIQALSRTDEKLVREGVCHQGLPLALFDAYKKVSDVLPSPPRRAALDSTNQASIPTYKGETTREALTHLPQQKLCTIL

SEQ ID NO: 309543 - protein, 94 aa, Zea mays
  Clone ID: MRT4577_45366C.1.pep
MNDTVTIRTRKFMTNRLLQRKQMVIDVLHPGKATVPKTDIREKLAKMYKTTPDVIFVFGFRTHFGGGKTTGFGMIYDSFDYDKKNEPKHRLARH

SEQ ID NO: 309544 - protein, 153 aa, Zea mays
  Clone ID: MRT4577_45367C.1.pep
IYDCFEGNKYSHASSFARIMEGGYARRLLQVGIRSINQEGREQGKRFGVEQYEMRTFSKDRPMLENLKLGEGVKGVYISIDVDCLDPAFAPGVSHIEPGGLSFRDVLNILHNLQADVVGADVVEFNPQRDTVDGMTAMVAAKLVRELAAKISK

SEQ ID NO: 309545 - protein, 43 aa, Zea mays
  Clone ID: MRT4577_45368C.1.pep
SHFLTYAKAGTLYLLQSTLFRTLDGVLTTGSPGRPLLVTFHLK

SEQ ID NO: 309546 - protein, 89 aa, Zea mays
  unsure (1)..(89): unsure at all Xaa locations
  Clone ID: MRT4577_45369C.1.pep
PDPGTTPPRLAPFPAPRAPSPPSRVPPSTPLVPHAAPSPTPRAAPSTPPTPHVALSTPPVPRVAPSTPPTPRAAPATPXPRPRAGLASL

SEQ ID NO: 309547 - protein, 50 aa, Zea mays
  Clone ID: MRT4577_4536C.1.pep
VSEQLTRSPPELLFISIPVTAVLYPTCTRRPRDATDTSNSISALVDRCQR

SEQ ID NO: 309548 - protein, 51 aa, Zea mays
  Clone ID: MRT4577_45370C.1.pep
FYFGFFIQTWEISGVKFAFWAWDLHRSLFLGGQAKGTIWIIPSRTRGSGRE

SEQ ID NO: 309549 - protein, 43 aa, Zea mays
  Clone ID: MRT4577_45371C.1.pep
YTSLPTRTTGKDPFIRAGIRTPERKDLWLLIHVSFFDINDLVH

SEQ ID NO: 309550 - protein, 350 aa, Zea mays
  unsure (1)..(350): unsure at all Xaa locations
  Clone ID: MRT4577_45372C.1.pep
PRTAVISPSRPALPLLSSASAGGFPHASRAPCVRECSRADAAGAAPLSKTLLDLKDSCWRXXRPHTIRGTALGSIALVARALIENSHLINWWLIFKAFYGLGALIFGNGYIVGINQIYDXXXXXXXXXXXXXXXXXXXXXXXXXXXXXXXXXXXXXXXXXXXXXXXXXXXXXXXXXTIYSVPPFRLKRYPVAAFLIIATVRGFLLNFGVYYATRAALGLTFQWSSPVAFITCFVTLFALVIAITKDLPDVEGDRKYQISTLATKLGVRNIAFLGSGLLLANYIAAIAVAFTMPQAFRCTVMVPVHAVLAGGLIFQTWVLEQAKYRKDAISQYYRFIWNLFYAEYIFFPLI

SEQ ID NO: 309551 - protein, 382 aa, Zea mays
  Clone ID: MRT4577_45373C.1.pep
MAPLASLPLPPSTAVTARFLAAPAIRVISPSRPALPLLSSASAGGFPHASRAPCSAAREHRRGTVRECSRADAAGAAPLSKTLLDLKDSCWRFLRPHTIRGTALGSIALVARALIENSHLINWWLIFKAFYGLGALIFGNGYIVGINQIYDVAIDKVNKPYLPIAAGDLSIQSAWLLVILFAAAGFSIVISNFGPFITSLYCLGLFLGTIYSVPPFRLKRYPVAAFLIIATVRGFLLNFGVYYATRAALGLTFQWSSPVAFITCFVTLFALVIAITKDLPDVEGDRKYQISTLATKLGVRNIAFLGSGLLLANYIAAIAVAFTMPQAFRCTVMVPVHAVLAGGLIFQTWVLEQAKNRKDAISQYYRFIWNLFYAEYIFFPLI

SEQ ID NO: 309552 - protein, 101 aa, Zea mays
  Clone ID: MRT4577_45374C.1.pep
MRITNCRPCKNTLPRTRNWATGGKPPSSFPGGRFFPALDRFARRLAATPSLSPSPASKWALKRRRHPRGRAVSPSLVGRRWAKSASARARARGGPKIVPPA

SEQ ID NO: 309553 - protein, 128 aa, Zea mays
  unsure (1)..(128): unsure at all Xaa locations
  Clone ID: MRT4577_45375C.1.pep
HSTPAAIGAFGSCIVCTRNKAASLESRKAHDSHWTSVTDYSMSRSNTLPKTATTGSRSLTLPCNLCRHLSLGEIHAGSNNLDQASLLGKGCIVNMCLVKIYSGTMVAINRGNPTSXQGVHXFQTEIDM

SEQ ID NO: 309554 - protein, 50 aa, Zea mays
  Clone ID: MRT4577_45376C.1.pep
NQDLSLGHISLQSGKTQTSFMLAVHKRCCYCSLKQEITHGQLTTPVARNI

SEQ ID NO: 309555 - protein, 77 aa, Zea mays
  Clone ID: MRT4577_45377C.1.pep
FFKISSHLIPQCQSKTLKCAKKKKKKKKKKKKKKKKKKKKKKKKKKKKKKKKKKKKKKKKKKKRGAKKKKQKRGAPL

SEQ ID NO: 309556 - protein, 127 aa, Zea mays
  Clone ID: MRT4577_45378C.1.pep
FGSRPGKIWVICFRGKKKKKKKKNKNTNRAYTDYQSICYPEINAEPELCQFTRNTEGGPLLYGAVSPGIFFGRVSWLSPYFLIQGAFWRLPVQSLGGPFGGRYLLLKYLPTYSAFLLENRPAGGHCG

SEQ ID NO: 309557 - protein, 97 aa, Zea mays
  Clone ID: MRT4577_45379C.1.pep
ADLVRLTLSYFLSISSQILSSVLMASNYVDTGAEEGRFHGHCHGHGHHYHHSTTPTSAAAYPKTLRRSLSFAHRHGAAPKCVCAPGTHAGYVKSRLH

SEQ ID NO: 309558 - protein, 88 aa, Zea mays
  unsure (1)..(88): unsure at all Xaa locations
  Clone ID: MRT4577_4537C.1.pep
ENGLMCSCPAGFYGRRCEVRTSIDACASSPCFNRATCYTVLSTDASVCNWPYGFVGRRXTXLVGLXPSFPWVAVSLGVGLAVLLVLLG

SEQ ID NO: 309559 - protein, 160 aa, Zea mays
  unsure (1)..(160): unsure at all Xaa locations
  Clone ID: MRT4577_45380C.1.pep
FGNSIEVISCAIAAGLWPSLAXSLVLLNSAGSVVPNYSFIPLSEERRTSWISRLQAQLLLLFLRSRAEGILKEYYPTRTERVDKPLLDQIILVIQGMKDPLTKSEAFVTMLREHCSKVQIRELNAGHAPHDEVPDEVNTILCKWVEQIEVKPALEKTKAI

SEQ ID NO: 309560 - protein, 706 aa, Zea mays
  Clone ID: MRT4577_45381C.1.pep
MALLALRFGPLLPAPPHHRRVLRNRCRVRIVASNAPTPVRDGGAAAVVWFKHDLRIDDHPGLAAAVSEPRRPVVPLYVFDRRILAGYSDKMLELLLFALKDLKMTLKSQDSDLLIGLGNAEDVVLKLVNEVQAGLVFTEEEVEYRVRDVLANVESSLSNGSFSWGSPPKIVAWSAPLYDYKNLGAVPTSHDDFLKKKLPLATPLAAATLPALNLELDTGSLPTLEELKCFLKEITPEDNWAPLKRMPARSILKRTISQRKIKSNATLSTINEENIDDAATMDSVASGKRIINSKFASENSLEVSGGTEITLDALAAYLKYLEGTGNASWQELHDKVRLAETRYGASFYILFGPAIHAGVHARGKAYTETIQYEKDRNAGFLSPFGYSTPTVTSAVDAICSMEWYWLLASKSQVCIEGKYSIRIWRWKGYLVQYTFLGNEGPPVLLVHGFGAFLEHFRDNIDKIAATGHRVWAITLVGFGKSEKPNVNYSELFWSELLRDFIVEIVREPVHLLGNSIGGYLCAIAAGLWPSLAKSLVLLNSAGSVVPNYSFIPLSEERRTSWISRLQAQLLLLFLRSRAEGILKEYYPTRTERVDKPLLDQIVRASYDPGAAKVLESVFNFNLSIPLNFLFDSFGGKILVIQGMKDPLTKSEAFVTMLREHCSKVQIRELNAGHAPHDEVPDEVNTILCKWVEQIEVKPALEKTKAI

SEQ ID NO: 309561 - protein, 63 aa, Zea mays
  Clone ID: MRT4577_45382C.1.pep
RSRSKFRSHSQGYQYLPIEPKRYVYITALASGIVHSPSLIQGRDISIRMVLLKIETEPGRWSG

SEQ ID NO: 309562 - protein, 81 aa, Zea mays
  Clone ID: MRT4577_45383C.1.pep
SLASQKTNSTSYFHSTKQHDNLNPKKKINPFCMERKNNGLHLIPNTIFCVLPPPYLGPRHTYRLLHRRLLFKPRVNLFFTL

SEQ ID NO: 309563 - protein, 87 aa, Zea mays
  Clone ID: MRT4577_45384C.1.pep
DIKFRSKMNKSPCFVLAKFLFPTFFCHATDFETLTNNSKLQVVQGFPVSPYFFFTPIGLNWVGHKPFHFSFLNRGFFSLPNVIMGFF

SEQ ID NO: 309564 - protein, 72 aa, Zea mays
  Clone ID: MRT4577_45385C.1.pep
ELPGRHHAREDAWADAWEEGSEECVHRATDQLCGAVMVRVCSLEAERCFINLIMVGPQLCKRSFWADQRNLW

SEQ ID NO: 309565 - protein, 42 aa, Zea mays
  Clone ID: MRT4577_45386C.1.pep
MAGLKKLAEYLTTGSYMTIYQALKDDLVSYTSFIVCFLVQVY

SEQ ID NO: 309566 - protein, 93 aa, Zea mays
  unsure (1)..(93): unsure at all Xaa locations
  Clone ID: MRT4577_45387C.1.pep
ITSLWLLSCFSLXGIAFGCGVTAIHPVLNGLSRIVHGEDAVTGSWTSQVSLQDNTGFHFCGGSLISDDSVVTAAHCAVMTSDVVVAQEFHQGS

SEQ ID NO: 309567 - protein, 395 aa, Zea mays
  unsure (1)..(395): unsure at all Xaa locations
  Clone ID: MRT4577_45388C.1.pep
MPKVDRFFAALEGHALSMLKTSAELVLPSDKTWPFLLRFPVSAFGICLGVSSQAILWKXIASSSPTTFLHVSHKVNLVLWCISVLLMCAITAVYALKLAFFFEAVRREYYHPIRVNFFFAPWIACLFLAIGVPPSVATEPLPRWLWYALMAPVLFMELKIYGQWMSGGQRRLSKVANPSNHLSVVGNFVGALLGANMGLREGPVFFFSVGLAHYSVLFVTLYQRLPTNETLPKELHPVFFLFVAAPSVASMAWAKITGEFGYGPRVAYFIAMFLYASLAVRINFFRGFRFSLAWWAYTFPMTGAAIASIRYSTEVDNTFTKALCVALSVIAVLTVTALFVTTLVHAFVLRKLFPNDICIAITDHKMKPIMELHESHGEDSSTNSNDIEAGAGGKQ

SEQ ID NO: 309568 - protein, 64 aa, Zea mays
  Clone ID: MRT4577_45389C.1.pep
NTAHAAELLTQGLLFFPSSPSISMSPCCSPEIFHLGQYSLDWHHTIHTYHPLIRLYNAYNIDPA

SEQ ID NO: 309569 - protein, 91 aa, Zea mays
  Clone ID: MRT4577_4538C.1.pep
RDLDQDPAMYAYAAYPGYGNYQQQPTQATAAKFLMPTHQSCCAPTPQLLCDQLANDHSRDIITVVAGAAVVAVAGNSHTLDMLRRRTWQDL

SEQ ID NO: 309570 - protein, 58 aa, Zea mays
  Clone ID: MRT4577_45390C.1.pep
SWNGQRVQNSGRPFQGQATGRKVLFTKTALTTCGAPRGYGPSPMKEALSNRGLTAFGR

SEQ ID NO: 309571 - protein, 321 aa, Zea mays
  unsure (1)..(321): unsure at all Xaa locations
  Clone ID: MRT4577_45391C.1.pep
ATILLGAGATVCLQVVAERRRGTLEEFLEQPSIDATTLLLSIFIPNWXQNSGHWDPRGRPGYRAAPRPLGNAVSYVNCAFLGHASLDEQSDTLVLSNLRLAFGAYGTEHAIRATRVEEFLTGKSLTASVVLGAIQLLRETVVPMEGTSHPENRVSAAVGFLFSFLSPFSKCIPEPGKSLASSSTDSADTDDVRNLPLSTRRETFSSDEYKPVGEPIKKYGVELQASGEAVYVDDIPAPKNCLYGEFIYSTQPLAYVKSIKFKSSLASEKIISFVSAKDIPSGGLNIGSSSTFGDEPLFGDXIAEYAGQXLGIVIAETKGML

SEQ ID NO: 309572 - protein, 75 aa, Zea mays
  Clone ID: MRT4577_45392C.1.pep
MARSDSCLARVGAGVAIGGAVGGAVGACYGTFEAFRYKIPGLLKIRHIGQTTVGSAAIFGLFLGAGSLIHCGKSY

SEQ ID NO: 309573 - protein, 121 aa, Zea mays
  unsure (1)..(121): unsure at all Xaa locations
  Clone ID: MRT4577_45393C.1.pep
WLLRAVGXRRGLXLLXASGGSXVLXAVARGRFLPPGAAAAXLFAPLXLRSSLXFPSXXLCVPPPPPGLARLVRARSRXFLPFAAAXRGGPRAXPXPPXSLPXARPVPRSRRLSGXRAAAAA

SEQ ID NO: 309574 - protein, 75 aa, Zea mays
  Clone ID: MRT4577_45394C.1.pep
QGEKERAQQQQLTFNTSSLSPYNIHSFSLVAKQNSSYKILLLLRFTARLNAMQLIAMSVDHANCVFPPFTSIKSI

SEQ ID NO: 309575 - protein, 61 aa, Zea mays
  Clone ID: MRT4577_45395C.1.pep
SVQFGYHRGKEVGCARLSMRWYLGSHHIHEMHSKYTGATVQTKAQPASTHQSQVWICEYIE

SEQ ID NO: 309576 - protein, 104 aa, Zea mays
  Clone ID: MRT4577_45396C.1.pep
ELACLGLNIMVVSVFLATSDLQAVTNKYAQFLFGIPVVFKHQLGGNFFSRRGKCRVPSPYGIFRHSYLPIHKEQPHLKREGGKTKKSFLFFFPKYGSSQLMFWF

SEQ ID NO: 309577 - protein, 68 aa, Zea mays
  Clone ID: MRT4577_45397C.1.pep
AGGPQGIYDPVDLTRAAQAARPGRDAGTHGSSPPSTTRRSRGGESPPTTTQRASRDQATTGSSIPLRH

SEQ ID NO: 309578 - protein, 87 aa, Zea mays
  Clone ID: MRT4577_45398C.1.pep
MAAKIFCLLMLLGLSASAATATIFPKCSQAPIASLFPRPLPAGFVVNPFYLQPQHQCITYTCLTYSYHSPWAYAKHSHTHTWHKPVL

SEQ ID NO: 309579 - protein, 179 aa, Zea mays
  unsure (1)..(179): unsure at all Xaa locations
  Clone ID: MRT4577_45399C.1.pep
RLCHHAWQCRRSTLISRSSLAGALDHPLPPSAVVVSQVINHHRMVTLXKVGFRLPVLFHASPLSPISKTFRGALADPNWRAAMEDEYAALLQNHTXDLVPRPPGANIVADKWIFKHKFNVDGSLERYKARXVHCRFTQRPGIDFDGTFSPIVKPTTVQTVLSLVVSSHLSIHQLDARAE

SEQ ID NO: 309580 - protein, 62 aa, Zea mays
  Clone ID: MRT4577_4539C.1.pep
TLIDHHYYPQQQHYNIHREINSLPLNNYHHYHASNSITIVRPSSIQIDFFNTINPKFTPHLN

SEQ ID NO: 309581 - protein, 121 aa, Zea mays
  unsure (1)..(121): unsure at all Xaa locations
  Clone ID: MRT4577_453C.1.pep
MEKENSHXNIVGIGXIYSDKSTTTGHXLIYNAXGIXMRXIKRFERGGAKIIFWAFKNAWELNKLMGXRKRGITINNPLRKFKTTKFYCSGINATGHRNFIKNMNTGTYKTNCADIINNSTT

SEQ ID NO: 309582 - protein, 307 aa, Zea mays
  Clone ID: MRT4577_45400C.1.pep
FHSFPPFLFLQASSVVCRQYDEKCRQLRHQESRGESQMSIDKTRAVVKDLHSRILVAIQRIDMISKNIEDLRDKELQPQLEELIGSLTRMWATMLECHRHQHDIIKLVSSTRNMKTSIRSESQFQATLLLQVELNTLCSNFQKWIASHKAYLQSLNSWLLKCVKALQRKRKSSRKKNIKADPITKYAVAPIFKTCESWINLLDDLPTDLEDAIKDLAADINRYVPHQEKQRGGSKLTLSLSRSGRSNGEMGEVHRSYTPMDLQSSLETFLGKLEMFSDVSLQKYMKLKEDIDEAKERYAEAQAAQRI

SEQ ID NO: 309583 - protein, 462 aa, Zea mays
  unsure (1)..(462): unsure at all Xaa locations
  Clone ID: MRT4577_45401C.1.pep
PVPAVWRGARLAPPHCAAGEPAQAGAVSALPSPTVTFPFPICSYNREVEDGCGHTGSDLCDPCGPLRGSVPRFAGYDNDDYLLRGAYAYSAGGGSEPYGARGTTPARSGSALFDDYGRSISXHLMTMGGRSVPHXWEEQQPWGSGGGGGGSGSYGVIAKALPKAETREDESGGAQKFRVKLLPEGAGNSTDVLCQIGLDGIRMLDPSTSRTLRIYPLDSLTRWEVLDATIFAFWAKTSVDIEPKRIRLKSSSYTSNTMLDTVTAATVQFKEIGADARSRGAIETGKPLVQSNEKKKGFDWMFTKPVDEVKDHWVPDEVAKKCHSCAVDFSPFNRRHHCRNCGEIFCDKCSQGRIALTAEDNAPLVRVCDRCMAEVTQRLSIAKDVANRSATVQSHEDLARKLKEEMEKNRKSSASGGGAPGTRMREVACPTCTVHLQVQVPTSGSETVECGVCQHAFLVSAN

SEQ ID NO: 309584 - protein, 146 aa, Zea mays
  unsure (1)..(146): unsure at all Xaa locations
  Clone ID: MRT4577_45402C.1.pep
MSQVDKTLELILAAQSXGGLVLTSGDAVGNANRRGLNTGDQVLHTXSFFRHQLRPAYILVLTNTVIQAKSDSTYFPLSRPAEGHLKRLPRMSYPPRVGSKMTDSRQDRXTHVCLDCAYIYSXLPLLYDEXPTTTXCPHCIASNKRI

SEQ ID NO: 309585 - protein, 76 aa, Zea mays
  Clone ID: MRT4577_45403C.1.pep
QNYDGGDLHGDPTSGLPITNLTLKNIKGKNAVDAKGKNAAIVCGKGACTNWTWSNVQVSGGKKYDSCQNVPSVASC

SEQ ID NO: 309586 - protein, 78 aa, Zea mays
  unsure (1)..(78): unsure at all Xaa locations
  Clone ID: MRT4577_45404C.1.pep
PYRSAERRSPWVGDQQLPDQERDGDYGYDLYRGGVLPERRRARRILDGTKELLYARLCRSARRPTKSDPNXERRLTAG

SEQ ID NO: 309587 - protein, 38 aa, Zea mays
  Clone ID: MRT4577_45405C.1.pep
LCWSIGRARLERNRASVWVSKRGIPLLALDYAAEQMLH

SEQ ID NO: 309588 - protein, 201 aa, Zea mays
  Clone ID: MRT4577_45406C.1.pep
MKGDKAGGRDRGGASRPLRLESQRFRLLSIVVGCFVICLVFLLSSRPDAAAAFGTVSVSPKASLVAARRPVAVKTVRASSSADGALGGDFHVDILPQHRQEQSLERTGDKTATEWVRDTVIVEERSGAETSEAETEETEPDRHDSATATAAASNTDDQPAVPGAEKAVQDTAAITGQPAAETTSATAPDGTEKTGAATGGW

SEQ ID NO: 309589 - protein, 59 aa, Zea mays
  unsure (1)..(59): unsure at all Xaa locations
  Clone ID: MRT4577_45407C.1.pep
YYIFRCSXWLSPWPGPFGRVLPNVGLGGRRAYAPVSILDSDLEAFSHNSAHGNFWPLAF

SEQ ID NO: 309590 - protein, 91 aa, Zea mays
  unsure (1)..(91): unsure at all Xaa locations
  Clone ID: MRT4577_45408C.1.pep
VKRSPGHLVNYFLFIXAEEDRAASTQLGYEKFNHIIGRTDLLKPKHISSVKTHHIHLIYLLSNAIFPEWIRSQIRSQDRHTNYPLLYIDNT

SEQ ID NO: 309591 - protein, 98 aa, Zea mays
  Clone ID: MRT4577_45409C.1.pep
LVLNNKYFKSLYLTLNHISGTKYIHPNHNIKKPFNYIMHALRFMSTHEYCKAHPPSSFIYNIVMPKLRNTICIHIVCNIYISRNTLPTHNTSFPTSLN

SEQ ID NO: 309592 - protein, 109 aa, Zea mays
  Clone ID: MRT4577_4540C.1.pep
RVARRKWPVRWRPYCWFCNSWQLHRRTCTTARRTETSPMSTSTPPPRRRCCTSPSRTPPSHTKTLAGSLTHRPPHLLAFCGPPTNNPHLTPHTHLFFFSPPPPPEPSTP

SEQ ID NO: 309593 - protein, 87 aa, Zea mays
  Clone ID: MRT4577_45410C.1.pep
VNQIGTVPESIQAALDSKAAGWGVMVSHRSGETEDNFIADLSVGLASGQIKTGAPCRSERLSKYNQLFRIEEELGNVRYAGEAFRSP

SEQ ID NO: 309594 - protein, 80 aa, Zea mays
  Clone ID: MRT4577_45411C.1.pep
SLHHFSTNSFLFRSHTSPRRVSVSGGRTNNPQSSTMTAAPIAVRTDLHPAAIDTSHAMNNASYRQTVLPCDLNPDQERTP

SEQ ID NO: 309595 - protein, 58 aa, Zea mays
  Clone ID: MRT4577_45412C.1.pep
DIKLFLSCVGGACFFFFHSSSAGSEATLTEPLKRYSQGFGGLHPLLFYLPPAPGFIFY

SEQ ID NO: 309596 - protein, 71 aa, Zea mays
  Clone ID: MRT4577_45413C.1.pep
ISYVPPFFFSFIYIYLFNNSLTFLIFVFTLIFLFYYFFPTPYISFHNIFFTSTNNRYSFTLSPYTYYPPHL

SEQ ID NO: 309597 - protein, 58 aa, Zea mays
  unsure (1)..(58): unsure at all Xaa locations
  Clone ID: MRT4577_45414C.1.pep
RAHELASRRAAVEMPWPSTRQVFLGLRRDRQHTSARRRRGTDRLGTISPPXQXRGGVR

SEQ ID NO: 309598 - protein, 56 aa, Zea mays
  unsure (1)..(56): unsure at all Xaa locations
  Clone ID: MRT4577_45415C.1.pep
XRPREQKVPWRNILFMKFIADQPSVFGLESIFALSGVLCGKDGGAHSFHSQPERDA

SEQ ID NO: 309599 - protein, 112 aa, Zea mays
  unsure (1)..(112): unsure at all Xaa locations
  Clone ID: MRT4577_45416C.1.pep
MARNINSDYIDFSHLGGFDMGINFDEFEENVKKLMEYLDSAHDKAVEFIEDVHAKFYGPFTDDEVPNNDQSSRYVITESLPTSIEKELVGPNTELSTPXACFITIEKQVYWL

SEQ ID NO: 309600 - protein, 197 aa, Zea mays
  Clone ID: MRT4577_45417C.1.pep
MQHLKSAAPGSPSGFRGAQTRRNPCGETAPLPGAPCRTVLTPTFRYCRRECTVAPARRAMERIPSAQPPPACLPKAPGLEPGDLPGMDFAHMYQVYKSRRGIKRSEDSKETYKLPHRLIEKKRRDRINECIAQLKDLLPEHLKLTTLGHLEKAVVLELTLKHVKALTNLIDQQQQKILALQSGLQAGELSGRNVEAG

SEQ ID NO: 309601 - protein, 147 aa, Zea mays
  Clone ID: MRT4577_45418C.1.pep
DQQANGKLPEAKDGELGSDGTYILERRPCINSCRRSVSFEQRTCPTPHATSHHLTGETSGRYIRPSTRSFRRPPDDTNGAIVGSRRQELPLDDGWRRRVKRRQRQWRLTPWPLADQCRASLVPSACGLAIFLKERTSRHARTTCKLQ

SEQ ID NO: 309602 - protein, 114 aa, Zea mays
  Clone ID: MRT4577_45419C.1.pep
WDPRAAGGLLNSCRRSVSFEHEHAQPLTPHRITSQEKLADGTSDQAQEASAGHQTTPTAPSSARVVKNFLWMMDGEGASRGGSGSSSRRRDHGAPMLRQLLSSGPLAADAVAAS

SEQ ID NO: 309603 - protein, 406 aa, Zea mays
  Clone ID: MRT4577_4541C.1.pep
MMQPPPPHQQQQWAMAPPPPPQYYQAGHPPPPPPQFYQAGPPPPAMWGQPPPQAAAAPAPAGGGAGDEARTLWIGDLQYWMDENYLYSCFSQAGEVISVKIIRNKQTGQPEGYGFIEFSNHAVAEQVLQNYNGQMMPNVNQPFKLNWATSGAGEKRGDDGSDYTIFVGDLASDVTDFILQDTFKSRYPSVKGAKVVFDRTTGRSKGYGFVKFADSDEQTRAMTEMNGQYCSSRAMRLGPASNKKNTGGPQPSSAIYQNTQGTDSDSDPNNTTVFVGGLDPSVTDELLKQTFSPYGELLYVKIPVGKRCGFVQYSNRASAEEAIRVLNGSQLGGQSIRLSWGRSPANKQPQQEQSQWSGGGYYGYPQGYDPYGYARPPQDPAMYAYAAYPGYGNYQQQPPQQPPPQQ

SEQ ID NO: 309604 - protein, 336 aa, Zea mays
  unsure (1)..(336): unsure at all Xaa locations
  Clone ID: MRT4577_45420C.1.pep
MGHDEAVVTQNSVKAPSPPKDQPAIYPCFDWSTMQTMPPAAFGKSYAAIYPHAGGFLHQLMPLVVNPLSAEPAKSGNSKHASLNMNLKEIHGSAVSSCISQKTPGDPRLAGSGDGEXSRRASIPSASRRLPPRLSPTEIALPTSLXPRSRPPCLSHVNVEXFCHAKPCVSTGSDFKVSGPTSTEWPAKADKESKRERRKQSNRESARRSRLRKQAETEELARSVXLLSEENTSRRSXISRLTESAQKLRMENSALMEKLADGTSDQAQEXPPATRRHQRXSSACVVKNLLWMMDGEAASRGGGVSGFLSRRRDHGAPMLRQLLSSGPLAADAVAAS

SEQ ID NO: 309605 - protein, 40 aa, Zea mays
  Clone ID: MRT4577_45421C.1.pep
PQGEPGWVQAPPLVIRPDSARVAQARPRARTALRRARRRP

SEQ ID NO: 309606 - protein, 142 aa, Zea mays
  Clone ID: MRT4577_45422C.1.pep
FFFFPPPPGGGKKSPPGGFKGPRGPPRGSQKLPGLGTPRGEQATFPDLFLIVIIINVTGPRQYCEPSSEVRHSAFARAQYTGCSCTSGRLALNMVARTGHRRRTPPTQGAPTARQHHRQPHGVLTGPSSASHRTETRKKKRK

SEQ ID NO: 309607 - protein, 67 aa, Zea mays
  Clone ID: MRT4577_45423C.1.pep
FGSSSQPQVMMSTKSDTQWMCFVATNYDLRLGTQSPTAVPPKVLDLSQMTPKPMTSRQRQEDILRTK

SEQ ID NO: 309608 - protein, 52 aa, Zea mays
  Clone ID: MRT4577_45424C.1.pep
ATHVNITFMSVGRTFRGKQPIMAIGVDEEPAKDPLGKIGALPAIEEFVFPGL

SEQ ID NO: 309609 - protein, 102 aa, Zea mays
  unsure (1)..(102): unsure at all Xaa locations
  Clone ID: MRT4577_45425C.1.pep
AERRAQAGFVVFCMYFKAHRVEGGXGFNWNTKWRTNGPRXAQTIVAYSKTDSPVGSKRKTSFIVEKGIPACTTAQKLDKLGMLGSDTSELVSFNCFIPQKNI

SEQ ID NO: 309610 - protein, 157 aa, Zea mays
  unsure (1)..(157): unsure at all Xaa locations
  Clone ID: MRT4577_45426C.1.pep
GPRRPPSTFNRPHVARIVYGRWKQNAVAALIAEEERGINVDATKDLVMGDYNKTPDLLNMNPLGKVPVLDTPDGPGFEKNAIARYVARXKDYNPLFESCRIEQAHVAHWVDFAATKVDPCVVWHLYPTLEDLPYAISPEETGMFLLKRWLGALNTHL

SEQ ID NO: 309611 - protein, 548 aa, Zea mays
  Clone ID: MRT4577_45427C.1.pep
MEAATAATAAMMWFRKGLRVHDNPALDAARRHGAGAASARLYPVFVLDPRYLRPDPVAASPGSARAGVARIRFLLESLSDLDARLRRLGSRLLLLRARDDVADAVCAALKDWNIGKLCFESDTEPYALARDKKVTDFALASGIEVLTPVSHTLFDPEEIIKKNGGRPPLTYQSFVSIAGEPPAPAMEEYSELPPLGDTGEYELLPVPTVEELGYGDISQEEIPPFHGGETEALRRMKESLQNKEWVAKFEKPKGDPSAFVKPSTTVLSPYLKFGCLSSRYFYHCIQDVHRSVRNHTKPPVSLTGQLLWRDFFYTVSYGTPNFDRMKGNKICKQIPWSENEDLFVAWRDGQTGYPWIDAIMIQLRKWGWMHHLARHSVACFLTRGDMFIHWEKGRDVFERLLIDSDWAINNGNWLWLSCSSFFYQYHRIYSPITFGKKYDPNGNYIRHFIPVLKDMPREYIYEPWTAPTSIQKKANCIIGKDYPKPVVDHETASKECRKRMGEAYASSRVDAKPSKGKTLNSRRKMLHGDRDTSNSTIAKRLKRNSRVE

SEQ ID NO: 309612 - protein, 78 aa, Zea mays
  Clone ID: MRT4577_45428C.1.pep
PKQAMTDPWPFQAQLCFCQRAPFPFRLGICSLSPSLMHMACGGRGSILCHSVFNSGRQVISHHHHNHNPRVRGRVGRP

SEQ ID NO: 309613 - protein, 75 aa, Zea mays
  unsure (1)..(75): unsure at all Xaa locations
  Clone ID: MRT4577_45429C.1.pep
FTQAFIQTDALFVPDVVNXHPGGPVDLWAIHCKDECMLKLLLARANILMFDSQHGRTRLYQAVYIGHVSCLQAIL

SEQ ID NO: 309614 - protein, 108 aa, Zea mays
  Clone ID: MRT4577_4542C.1.pep
RGSSPPRRGWFVPQRKGLPGRLGSHRPRDPARRARGIGFIKGAPPPPFEKKGASVRGSWVKNPPLSVAISVCRFLPWCNKPRPLCFSWNGCKNACLTPTPPFPKQKKK

SEQ ID NO: 309615 - protein, 99 aa, Zea mays
  unsure (1)..(99): unsure at all Xaa locations
  Clone ID: MRT4577_45430C.1.pep
SACRPDVEVIVCMCDRFIXGPNVCHLLAVKRILSYLVDRACLGLWYQTGSTFDLIGYSDFDYARCKIDGKSSSWTSRYLXRYLMLWNSKKQTFVALSTV

SEQ ID NO: 309616 - protein, 48 aa, Zea mays
  Clone ID: MRT4577_45431C.1.pep
PAGPGSNGLTISSKLPRFSDMYTLTIASVDPQSIAANKPIHFTKSVTK

SEQ ID NO: 309617 - protein, 44 aa, Zea mays
  Clone ID: MRT4577_45432C.1.pep
SAPEQPDVAVPFNEAPETAFGHYVSRNAEARRRLLSYRTVRIPR

SEQ ID NO: 309618 - protein, 162 aa, Zea mays
  unsure (1)..(162): unsure at all Xaa locations
  Clone ID: MRT4577_45433C.1.pep
LLLLSVXXLVVLSRVESXASELXXMLGQGVWXTTVXWPXASPXXPGLXXSSARATTAXARSSSNKXAXXXGSYRAGGESXXRXXPDDPPVTRRRRACGRRTTRARRLATWWAQLFFHLGGATVAHQGGMGRQLXCDLAAGPTSPTVLRLGSYSVEDQEQXLV

SEQ ID NO: 309619 - protein, 88 aa, Zea mays
  unsure (1)..(88): unsure at all Xaa locations
  Clone ID: MRT4577_45434C.1.pep
YFKRVTLFVCCVLGTRVQSHPLSVKILFKYRTTFPFLEPIYLVTWLLWSDSFSLPNCSFDMIITSXKLDVSAQNYNFCLRLHTISFVI

SEQ ID NO: 309620 - protein, 37 aa, Zea mays
  Clone ID: MRT4577_45435C.1.pep
IVGFMKFARYHTRYDYSVMPVPFKFNVIDVGLLTDLY

SEQ ID NO: 309621 - protein, 61 aa, Zea mays
  Clone ID: MRT4577_45436C.1.pep
FHINWVRLCSFLFIFRAYTYIIVFLHCEELHNYCFSFLSVNNYSITPMTIIFTLKEKRTSL

SEQ ID NO: 309622 - protein, 63 aa, Zea mays
  Clone ID: MRT4577_45437C.1.pep
KQSYNHDALLENGIPLFFPNQNEHCISMKIDSILPRPNEDRTPDRCSFAQQIEQKLPTTYVPL

SEQ ID NO: 309623 - protein, 176 aa, Zea mays
  unsure (1)..(176): unsure at all Xaa locations
  Clone ID: MRT4577_45438C.1.pep
MIGGGRAADSHPASCSSSSSSSSSPSGPSTGGSRLHRSKRRPDILNMLMSAACLSSSSSDTGKGQSKFSSNKVTHGFHLVEGRSGHDMEDYHVAEYRYENDRELGLFAIYDGHLGDSVASYLKANLFDNILKEPLFWSDPXEAIKNAYSSTNKYILENTXQLGPRGSTAVTAICSD

SEQ ID NO: 309624 - protein, 84 aa, Zea mays
  unsure (1)..(84): unsure at all Xaa locations
  Clone ID: MRT4577_45439C.1.pep
MGSAGEEEREARSEAAFTDSASIDGSSSSSDAASTDEWLPAAPVPVXRSQEAGRLXASDTDVARQQHKHKRRAPSEMEMMKERF

SEQ ID NO: 309625 - protein, 101 aa, Zea mays
  Clone ID: MRT4577_4543C.1.pep
FIFWRHPRFVTLLSCCQRVGSWFLAQIIVVTAAYQEASDGVLVAYDCYEDPPVSGDLAPPRHGLWLCMMLPCLLCDGGPGPFLRPRCRSGFSATGDRIDLD

SEQ ID NO: 309626 - protein, 71 aa, Zea mays
  Clone ID: MRT4577_45440C.1.pep
ATGDSSPETGEHPEPVLAPPLPIPNRPPAAEVAPHCPPASISLGPAVRRSPAPPALSGWRSGRSPIPTLGQ

SEQ ID NO: 309627 - protein, 79 aa, Zea mays
  Clone ID: MRT4577_45441C.1.pep
AGPAPPPAPFSLPKTKHNPFLRPFNPRFFNHPLYFPPRPFLKSKKTPQFRSPQHRQRATDSRPTTTFTALWPLISCFAF

SEQ ID NO: 309628 - protein, 118 aa, Zea mays
  unsure (1)..(118): unsure at all Xaa locations
  Clone ID: MRT4577_45442C.1.pep
MQNRYSSEIPVVLIQAVLYIGVIAVTRLARPTLNKMCYNRRMEKNTMFLLSVLRVXAAWSILAAYTIPFFIXPRTVHPLLGWPLYLLGSFALSFIXINIFPLPXITVLTTWFGFIGAL

SEQ ID NO: 309629 - protein, 68 aa, Zea mays
  Clone ID: MRT4577_45443C.1.pep
GPLHEALPLYAVQVLRLFLRGQGHALNKDFTLLLIYSIVQNYPLTNNMHLNRYHPLHELTHMHDHKLS

SEQ ID NO: 309630 - protein, 104 aa, Zea mays
  Clone ID: MRT4577_45444C.1.pep
HQVGKSDNPVKYANMINSEACHQEHYLLARCHLSAQVKYFHLIQFRNFLINAPSILIHIFGHYFFNYSLEKNQQMFIDIKVLFMKNLLVVFFPINLNTCVYSRG

SEQ ID NO: 309631 - protein, 158 aa, Zea mays
  Clone ID: MRT4577_45445C.1.pep
SVRRRARPRRKAHTARRRRYRTPALRSGKAPRLPRTRPTARRGRRAILTRSSPRLRAPRSTASSWRAQCTRRSPASAPPWRARCSRPHSRPARRRREPTRSRTRTPPRRPPPAPAGSPKERPSRGTSPRSSVRATRTARSARRSPAPCSAARRTSGAR

SEQ ID NO: 309632 - protein, 149 aa, Zea mays
  unsure (1)..(149): unsure at all Xaa locations
  Clone ID: MRT4577_45446C.1.pep
RAXSISPLMSXXRRMFYIAMRPPCRSLSADALLLHRGMGLDRSCAAXAATHXWHGGDHGSTLLVRTRDGAXAMGHGDSPFWCICAPPXRRRIAPRAAPSGVAPEGXXVRWXDMCFNACXXWMDXLEPAXLLGAPAPPAPXXAAVPARPR

SEQ ID NO: 309633 - protein, 185 aa, Zea mays
  Clone ID: MRT4577_45447C.1.pep
APLGTAGSWRPPSTRRSPVSALPSRPTSVRRRARPRRKAHTARRRRYRTPALRSGKAPRLPRTRPTARRGRRAILTRSSPRLLAPRSTVSSWRAPCTRRLPASALPWRARCSRSHSRPARRRREAARSRTPTPPRRPPPAPAGSPRERLSRGTSPRSSVRATRTARSARRSPAPCSAARRTSGAR

SEQ ID NO: 309634 - protein, 92 aa, Zea mays
  Clone ID: MRT4577_45448C.1.pep
NASGEMDEGPSTKLEGLPGVLLGLPGFNVDPETRVFGAGYLVTGEMVQGPPKGQRRVGPVPKRAKVRPRSSARPRFVKRRGTHSSQRCCSRF

SEQ ID NO: 309635 - protein, 96 aa, Zea mays
  Clone ID: MRT4577_45449C.1.pep
EPPLRNFQNHPPVPVTHHMKEPLHTCAQIHKTKAAPPKQKEACVRPRDTYKAASNPYQPPPAESLPDLTGPHGLLHTSLGARPAAEPAKWPKPPLF

SEQ ID NO: 309636 - protein, 109 aa, Zea mays
  unsure (1)..(109): unsure at all Xaa locations
  Clone ID: MRT4577_4544C.1.pep
PNLVEPPPGKRRKSQAPAPKKTKQNNSHNNSRISRPAPARPTREQKNPLLDSEKLAPARKRLQENTQEAQNAKKQRAIQFLDFXXXXXPKKKNPPPPPTGGGGFQKKHR

SEQ ID NO: 309637 - protein, 127 aa, Zea mays
  Clone ID: MRT4577_45450C.1.pep
TPTPLPARSRDCWIGCRQRPSASSRTLCCPLDYSGPRGPPPARIDGLGYGSPSTRHRKLSCFEYVGGSHSNTLLTDDCPVLAGQARGLSHRPRRHEGHALGPRCLAAYDAPAITVRHLLAPATPPAY

SEQ ID NO: 309638 - protein, 91 aa, Zea mays
  unsure (1)..(91): unsure at all Xaa locations
  Clone ID: MRT4577_45451C.1.pep
PPPNPRDPRPQPLGGWGPPGSRXPPAHSSPGPRPPRPXAHPGGRAAPXVPRGGAVPTHPHPPMPEEPGSEPPRPTESPWRRLQGGKWTCKP

SEQ ID NO: 309639 - protein, 67 aa, Zea mays
  Clone ID: MRT4577_45452C.1.pep
FFFYFFFLGDFLIILPFFNPHIIRGSPGIPWLDKTRKRKHQQPDQENKLRVGFIPKGEGPNKNLKGL

SEQ ID NO: 309640 - protein, 64 aa, Zea mays
  unsure (1)..(64): unsure at all Xaa locations
  Clone ID: MRT4577_45453C.1.pep
KKKKKKKKKKKKKKKKKKKKKNKKKXKKKKKNKKKKKNVITFKGSKFYKACLPDNKFFFPSLKL

SEQ ID NO: 309641 - protein, 46 aa, Zea mays
  Clone ID: MRT4577_45454C.1.pep
WGRPVTWCCVNVPGLVSWHRPQLCFPSLLCGPFYNILPITEPQYSQ

SEQ ID NO: 309642 - protein, 45 aa, Zea mays
  Clone ID: MRT4577_45455C.1.pep
SILLILIWVIIYRYRGSKPGISTNDKYVIGNCINYTLSTHTRNKE

SEQ ID NO: 309643 - protein, 97 aa, Zea mays
  Clone ID: MRT4577_45456C.1.pep
TPRHIQGDACVAWWCKTKERHARLSRPKSLARSIPAHPHSAILSMLLTESLCLYANIFRSVVFFVSLGSSLLFLVPFFVIFFFFFTQANAQILQKQT

SEQ ID NO: 309644 - protein, 38 aa, Zea mays
  Clone ID: MRT4577_45457C.1.pep
DPSQYCSTLHAIFCAAHQRRRLEALTIAYEKISPKLRE

SEQ ID NO: 309645 - protein, 71 aa, Zea mays
  Clone ID: MRT4577_45458C.1.pep
GTIWEIFVGIRMHLHTGQAPVNKISGDRRCYRRSWSLSTMHVEWARSVNCRLCIYSEEGLTALEMNIICSR

SEQ ID NO: 309646 - protein, 87 aa, Zea mays
  Clone ID: MRT4577_45459C.1.pep
RGLLGLLCGILGPIKAYASEVCRKEHQALGISLVTSSRAIALVIGPAIGGFLAQDSGSHQVTPSPHVDFANRCLNSSGGATNNNPMS

SEQ ID NO: 309647 - protein, 156 aa, Zea mays
  Clone ID: MRT4577_4545C.1.pep
PEDPHPRRLFWGLFRLGPPPRVPPLRAFPGAPLGKPRPPPGFSGGARQGPFPRVGAVPPGALRAPANFSFGWPGPRPVLLPPPLAETPGSPSVLFPYAPATPRVVPPRVLGKLRKKNCPFSNHFVLKGWAKASPRVANKNLNKTTSSLGWLTLLGA

SEQ ID NO: 309648 - protein, 77 aa, Zea mays
  unsure (1)..(77): unsure at all Xaa locations
  Clone ID: MRT4577_45460C.1.pep
MSSSTIALSSTTFGGGALNMPWSLFHXTRLTMHMTAAKANPAASFGRPXYRPDRVLYLGPLCGAPTSXLTGESPGRL

SEQ ID NO: 309649 - protein, 151 aa, Zea mays
  Clone ID: MRT4577_45461C.1.pep
FCIICLTATLPIQSLFPYLYFMIRDLKVAKEEQDIGFYAGFVGATYFLGRTISAVPWGIFADKYGRKPCIVISILSVIVFNTLFGLSTTYWMAIVTRGLLGLLCGILGPIKAYASEVSRKEHQALGIFFVTSSRAIALVIGPAIGGFLAQG

SEQ ID NO: 309650 - protein, 90 aa, Zea mays
  Clone ID: MRT4577_45462C.1.pep
AGIFYSNRGMDSWGARDKTYDGHSWAPSFDHGTDNDSLWNFGHKDGENGDSDLIFGPQGLPPIRTGGSSSNSLFVKEQKPSFDSVPGTPM

SEQ ID NO: 309651 - protein, 119 aa, Zea mays
  Clone ID: MRT4577_45463C.1.pep
TQMGPQFTRPSQLGQTPNPNETQGSETGQGNPQMDIHWSMPPRGQILPPPQPGMGYWPPPPWGYPTHPMGPWGRPPWPTQPLSSPADSTTHQVTPPPHDNFVDRCLNSSGGATNNNPMS

SEQ ID NO: 309652 - protein, 51 aa, Zea mays
  Clone ID: MRT4577_45464C.1.pep
LTIPCIFHSLQSSVLHSQPKSTVGTPAYIAPEVLLKKEYDGKVLVLSLFLS

SEQ ID NO: 309653 - protein, 651 aa, Zea mays
  Clone ID: MRT4577_45465C.1.pep
MMRVMDKLKGKKRGDCGDSSRSRSTRGSGGGDTSSMLFQGSTASRQRLEQLLGCMEEQGREVASHSAPGQEREVAGHSAPGQEREVACHNALEPEREAIGSSGPMLEQDHNAFEQASEAADHNAPSQEDELARQGSPMRDDDDYGEDYDGEADGEADDEVVTTTQATNFRFRRSLRVPPTQPLDQRRVINPAGERSWVEVAWSGKGHRTPVNTVLGSIARFHYPGVVQFNGAETGAYHWAHWGLKPYGPDRTHQDAVWSSFWEQFRLDETANEEHAKRVFHNAARKVINGSMSDARVKAVTVYFKKVKGQRMTNKQACEIHLTAEEYKQSEVDWLTAHPEAWVKLCEYWASDEYKVISDRNRLNRKSKPGLHRFGADGFIGKSQRMEARDGVEPRFIDVYMEGHRGPDPDHPEVLCDDSATEKLTRYAEEVRRKAGDDDLDWREAPFDPDAAYVAGGGLPHGRLGIGDGVVSHDSFGRRSVSSVGSRSRTSTSRESELDEQLRQQQQQVQQLSQQVQMMQGMLMQMYSAQMGSPMGPQFTRPSQSGQTPNTNETQGSETGQGNPQMDIQWSMPPRGQILPPPQPGMGYWPPPPWGYPTHPMGPWGRPPWPTQPLPSPADSGSHQVTPPPHVDFADRCLNSSGEATNNNPMS

SEQ ID NO: 309654 - protein, 108 aa, Zea mays
  Clone ID: MRT4577_45466C.1.pep
IFLPSPDQGCRDKLEPMDRPVSPRMKAPSSRRRSEVSSCANPSRPETQRTTWIVCHSSPGAINNQGASDCSPESRNCAKQFFHREPARSSLNPPVRHVPPNSLLICCG

SEQ ID NO: 309655 - protein, 51 aa, Zea mays
  Clone ID: MRT4577_45467C.1.pep
IKTTFSTARHRRQGRHHRDRTSPLHRRPPDLAPSARLPCPSPRAPHRQAAS

SEQ ID NO: 309656 - protein, 75 aa, Zea mays
  Clone ID: MRT4577_45468C.1.pep
EPESYKINQNSHKYTTSIKSHIHKDIGKYDKHKMWLPRRSQNAGIKSHVHEDIGKHDKHKMWLSRRSQNDMYTKI

SEQ ID NO: 309657 - protein, 102 aa, Zea mays
  Clone ID: MRT4577_45469C.1.pep
PEATGLLSFSLQERVARKRHGGVAACFLIMYSAQMRSPMGPKFTRPSQSGQTSNTNETHGSETTMGISYTSNGALGTPPMANTTTSVTSGFRLSSSDSSPSR

SEQ ID NO: 309658 - protein, 193 aa, Zea mays
  Clone ID: MRT4577_4546C.1.pep
MADNVLIDRSASGFEFRRWATGDEFQSLATMSVLQPDARGIYSSLPYVSPLPPFQYAAYLHSSLSLPPLNPRRHPPLLPLPPAAAAKGMKQAAQRRTGPRECKRKKPPRTPRLGEEPPSAQRRKPLERATPLPSAPAVHEALDDLERQVTMGFVEDLKHALALAPPPSSLPLPTFSLVRAAAAAAKAVPSCTV

SEQ ID NO: 309659 - protein, 69 aa, Zea mays
  Clone ID: MRT4577_45470C.1.pep
KKKKKKKKKKKKKKKKKKKKKKKKKKKKKKLKKKKKKKKKKFFPCPGRAAGGGKKKFFFFKRHPKKRVF

SEQ ID NO: 309660 - protein, 319 aa, Zea mays
  Clone ID: MRT4577_45471C.1.pep
MSGGESGPAAAAAAVPLLQAPEGRTTKYYEGCPGCRLDEANKTRTGVPYLNFFYIWVVCLAAALPVQSLFPYLYFMIRDLKVAKEEQDIGFYAGFVGATYFLGRAISAVPWGMFADKYGRKPCIVISILSVIVFNTLFGLSTTYWMAIVTRGLLGLLCGILGPIKAYASEVCRKEHQALGISLVTSSRAIALVIGPAIGGFLAQPAQKYPNLFSEESIFGRFPYFLPCFVISLLAAGSCIACIWLPETLHFHGDDKVEAIEELEAQVRGSESTKDLHKNWQLMSAIILYCVFSMHDTAYLEVFSLWAVSSRKFRGLSLT

SEQ ID NO: 309661 - protein, 75 aa, Zea mays
  Clone ID: MRT4577_45472C.1.pep
GTSSRRAKFSSGPGQSTPTRARGQQIRHGARGIGQQRRAAGRGEDAVDHGTAINVAGMGYFTDDNDLNGINTETK

SEQ ID NO: 309662 - protein, 201 aa, Zea mays
  Clone ID: MRT4577_45473C.1.pep
MATKHLALCLLVLLSIGMGMATAAANRKLGYGPGGGGGGGGSGGGGGYGGPGYGSGSGYGEGGGSGGAAGGYGHGGGGGGGGGEGAGAGGSGYGSGQGSGYGAGSGAAGGYGSGGGGGGGGGGGQGGGSGYGHGGGEGYGSGSGSGSGYGSGEGYGQGGAHGGGYGSRGGGGGGGGQGGGGSGYGSGSGSGYGGGNDNGHY

SEQ ID NO: 309663 - protein, 34 aa, Zea mays
  Clone ID: MRT4577_45474C.1.pep
IHPKTSGSVDGAPRKAPTSVRFHCADGFDTRTLA

SEQ ID NO: 309664 - protein, 42 aa, Zea mays
  Clone ID: MRT4577_45475C.1.pep
LRLGDYPAAGGTDQLRRGIEGRFGAGDRRAGRRHGEELRERS

SEQ ID NO: 309665 - protein, 89 aa, Zea mays
  Clone ID: MRT4577_45476C.1.pep
FPGIIRESGSFRAAFKAFYKYAGPVCFGAFGPLLVRALISFGANRWGTPALESRPVRLLFSSRGLVGSLKLTPPCPPVLQKLFVRERSL

SEQ ID NO: 309666 - protein, 212 aa, Zea mays
  Clone ID: MRT4577_45477C.1.pep
MADNALANPIPSVAAAHDDDEDPDLISLLPDCILATILSLLPLPAAGRTQILSHRWRRLWPSAPLHLLDSHLPVPTSSLCAAMSRILASHCVSAVRFHILLARPSASDLDSWFRSLAAKSLQELVLRLPSDDTLRLPPSFLSFRSLSTAELTNCRLPEDGEVYFPHLGELTLRLAIVPSAAALHGLDRLPQAWQPIARPRLRLPDPSRAVLE

SEQ ID NO: 309667 - protein, 211 aa, Zea mays
  Clone ID: MRT4577_45478C.1.pep
MADAPRAAHLIFDDSNSSRGGPAYQEIEQEGATDLYHNAKHGGDAQSKGKARQDEHSIELDGYTADRRLDGPDTRRTSRQLRRGSEPPDAKVLKRLWWRAAFINVLFICAWYCFSTLMSVYNKWMFSESLFNFPYPLFVTSIHMLVQWLLAALVLSFFPRLRPKTRPAANDYATKVAPCGMATGLDIGLANLSLRTITLSFYTMCKSSGLA

SEQ ID NO: 309668 - protein, 103 aa, Zea mays
  Clone ID: MRT4577_45479C.1.pep
IMKACMMAGTLNLKHTPNHKDRGGSSSIFIYILFHENETSRISRQPNFRVPCLRLYSRAKQLHRNRKEMLGKDLRSPGWTHRRPRRRTEERQRRRTGRHGGSF

SEQ ID NO: 309669 - protein, 193 aa, Zea mays
  Clone ID: MRT4577_4547C.1.pep
MADNVLIDRSASGFEFRRWAAGDEFQSLATMSVLQPDARGIYSSLPYVSPLPPFQYAAYLHSSLSLPPLNPRRHPPLLPLPPAAAAKGMKQAAQRRTGPRECKRKKPPRTPRLGEEPPSAQRRKPLERATPLPPAPAVHEALDDLERQVTMGFVEDLKHALALAPPPSSLPLPTFSLVRAAAAAAKAVPSCTV

SEQ ID NO: 309670 - protein, 162 aa, Zea mays
  Clone ID: MRT4577_45480C.1.pep
KRARSVRPPTYTHLEDRPFSPSPTPTAPLWPVGCRSSLPAAIDLSGGVDASMDDALDVFGEMGTRASVGMVTIIHGAGHRGYIEADTQTVSSRIASHSVSVPRSRNGVLIMLSVASIFSGANAPLLSYVPTLFYAAHKFPFRQGKTNMYPYKLDSFFKLFIF

SEQ ID NO: 309671 - protein, 175 aa, Zea mays
  Clone ID: MRT4577_45481C.1.pep
MEKPSHVAAAAGKQASHRLAVVTGGNKGVGLEVCRQLAAVGVMVILTARNEKRGKDAAESIRRESNLSNVVFHQLDVRDDSSVAALARHIESRYGKLDILVNNAAAVGVAADEEGLKALNLDAETWTSGRAATLLKDVFQNTYEVPRDCLDTNYLWIQTGKRRPPSSTETIPARE

SEQ ID NO: 309672 - protein, 105 aa, Zea mays
  unsure (1)..(105): unsure at all Xaa locations
  Clone ID: MRT4577_45482C.1.pep
NPLDEEIRGSHQSCSQTALISFKQLHSLQTAEVSFRSWCPKQSRAGTRXSTACTDDEVGSQDQHFWPRFRVGGPPRLFFRARLSPSSALRCRPERFRATTRQXVC

SEQ ID NO: 309673 - protein, 93 aa, Zea mays
  Clone ID: MRT4577_45483C.1.pep
MASQVPHVPPRAATVLSATELIGNTPLVRLNKIPQSLGIECDVYVKPELFSAGGSVKDRIALRMIEEAEKSGRIKPGDTLIEPTSGNTGIGLA

SEQ ID NO: 309674 - protein, 80 aa, Zea mays
  Clone ID: MRT4577_45484C.1.pep
PNFSTILKGPPTRPQIKGSGKPFGFLSNKIHRAQPLVLFRVGPLNEKDVKESWKDNVSGPPKKPPGFITLFVLKGKVLLG

SEQ ID NO: 309675 - protein, 53 aa, Zea mays
  Clone ID: MRT4577_45485C.1.pep
GLPQIAGFNPKRTTSKSALSLTKLPLEETWLSPVEYYLTLNYLNSVGQSSIIT

SEQ ID NO: 309676 - protein, 121 aa, Zea mays
  Clone ID: MRT4577_45486C.1.pep
PRVRPRVRPRVRLQIRLSKIGSSDSGAAATGSAAAAGAAAAVGSAAALGGGIPESDTVACPDHLVIADLPDAKSLGAVTTSAAAATRAIGRLSRRPVGERVHICSRCEFPIAMYGRLVRTC

SEQ ID NO: 309677 - protein, 55 aa, Zea mays
  Clone ID: MRT4577_45487C.1.pep
EGPRHSTVRVFYHVMCVPSLMTYGLVYIVSYMSKCEVLYTLYITPELTVVCVSQA

SEQ ID NO: 309678 - protein, 71 aa, Zea mays
  Clone ID: MRT4577_45488C.1.pep
NVDDAYGDQNIWACMSILHTDVLSKFNTDMSNHYYTTDIWYIIPSIHPYTSLISGSITYISENYHDQGSIG

SEQ ID NO: 309679 - protein, 116 aa, Zea mays
  Clone ID: MRT4577_45489C.1.pep
TRKDYKWRSKLTTVSFWRASSYLPASFVSGDVDEHDESEGEGDSKLIITAALSSLHAAASPPGGPTGKAVPPLAPCRADTPKFSMAVAAGGGGTLQSPAGTGLPLIGCDMEPGPPP

SEQ ID NO: 309680 - protein, 159 aa, Zea mays
  unsure (1)..(159): unsure at all Xaa locations
  Clone ID: MRT4577_4548C.1.pep
RPGVHRHAGPRPVGTGAAVVLSPLPIVTLPPPSVPLPPPWRRPSPAPPRRXLAIRMGGGPRTFPGGVSKWQWKRMQAKKARQLLKARLARERQLYEMRKRVELRDAVAHLERPWDXAPPPARPPXPTLLSVAAEDQLKALADRFHRPGGVDLWNDRDGP

SEQ ID NO: 309681 - protein, 60 aa, Zea mays
  Clone ID: MRT4577_45490C.1.pep
NRVVSTLFIRLVLVETTPSCLCTGGVHDTDHSTYNEGHPAQGEHRRALIDYDLPFAQRAT

SEQ ID NO: 309682 - protein, 279 aa, Zea mays
  Clone ID: MRT4577_45491C.1.pep
KSSSSLSRAEAAAAHEVGKMSRAVRVRGDELETERGARAKKRSLAVDRSTSPRSPGDLAVGSSHSHPEILFAIFEPDEAQSGAKQGRVCDVVESATEESSDPPSSPIYEPYIPDELAADPVVRSAFKHAMAKYEAEEDRLADLFTMDHYWYQPSSCLRKDRRLLSIRELARDAILSAAKSVILLSSFLDNQPLNKCCGLWFQRDGQRKTALVLTSAHLIRKDDIHKWKQQWTGEYHQNAKVIVHLLDNKTTLGQLIYLQEHYEFAIYEVQVDKPVHLPT

SEQ ID NO: 309683 - protein, 224 aa, Zea mays
  Clone ID: MRT4577_45492C.1.pep
MNYRFQNLLGAPYRGGDAVFAGDSSVLLSAVGNRVATTDLAASTSLTLPFESSANIARLATSPSGDFLLACDDKGRALYANLRRRAVLHRVSFKAAPSAVRFSPDGELIAVAVGKLVQIWRSPSFRKEFFPFHLLRTFPGFAAGVTSFDWSPDSASLLVACKDLTARLLPVKRGTGNKPFLFLGHRAAVVVAFFATDKKTGKVHGVYTVSKDGAIFTWKFGGGQ

SEQ ID NO: 309684 - protein, 92 aa, Zea mays
  Clone ID: MRT4577_45493C.1.pep
TAISHPASPSPLRQEWNRIASMGSSSNTYSSMLATYTAVTREDMVIGRDSSPPSFKENEWMLGYHEAILYDVKVLRIEYHEDVRRFFVHNLG

SEQ ID NO: 309685 - protein, 65 aa, Zea mays
  Clone ID: MRT4577_45494C.1.pep
LDAAGGQFTFYTDTLRAGTTRIHYSVPVSNLFTSQENGTAIQNIGLSVNFHATTKRKTQSSPLIK

SEQ ID NO: 309686 - protein, 140 aa, Zea mays
  unsure (1)..(140): unsure at all Xaa locations
  Clone ID: MRT4577_45495C.1.pep
STIRAKRXDEARRFXEELPFEPGIGFXKALLGGCQIHWNSKLAESVAKRIRALDPKDTSSYILLSNVYSASGSWQSVSMVRREIKEKGLKRITGCSWIEVQEKVHVFFNGDCRHHQSDEIYSMLESCFYSIQDEGEHSIV

SEQ ID NO: 309687 - protein, 67 aa, Zea mays
  Clone ID: MRT4577_45496C.1.pep
GPSSRPGTQTPEEAKRLGPHPSPPDLSLEAAPLAAAALIARGDDGCCCHIVIQHHNPHDKGANRCTA

SEQ ID NO: 309688 - protein, 175 aa, Zea mays
  unsure (1)..(175): unsure at all Xaa locations
  Clone ID: MRT4577_45497C.1.pep
DSPPLVASFSPRCRRRCSPTSSLDALNGDLAPPQIEDRLPPSPEEHLXRKDLVYSTYKTESQEGSRKHDQLRXNFLSTQKCENQVMGWTSTEHPYANVHEARLTSDTAESAKAFAXKHEWNYVDRKRHAPLLRPKAYTDNFTCIGSSESGASMRLEISVMVTLAPRRFPPGSIVC

SEQ ID NO: 309689 - protein, 141 aa, Zea mays
  Clone ID: MRT4577_45498C.1.pep
WFVPILNGLVRVSILVSISLVLRAGMEIGEADDRSADTTRTGFGDASYKTEEKWEQAGTASGPFRAKSCGLDLRHDGSASMYAYAFRLIRSDLAFVFLGRNSLLFGGLEGRRGPGVDVSRGSQQHWCGSLKMLMVGKAHLE

SEQ ID NO: 309690 - protein, 182 aa, Zea mays
  Clone ID: MRT4577_45499C.1.pep
AARGLDIPNVDLVIHFELPNSSELFVHRSGRTGRAGKKGTAIVMYNYDQSRAVRVIERDVGCKFTELPKITVDGSDLLSGGFDSFGGGYSGSNYGRSGGFGGRGGFGRSGGGGGYGNSGFGRSSGGYGRSGGGGFGDSRFCGRSGGGGGFSGGQSGGGGGFGDSWFGRSSGGGSGFGRSGGL

SEQ ID NO: 309691 - protein, 134 aa, Zea mays
  Clone ID: MRT4577_4549C.1.pep
THTHRRIVTQPCRHHHPQSPSAYLDLCLIFRRFLFSLLMRFFFHSTVAGEEPASRRRRHKRDTSTDRSGMTMRSQATGQEIPSSHDTISHCSAQLIDQPPMPTIQTRPLRRGAPRTNGEIRRPRRIAPLEPLSL

SEQ ID NO: 309692 - protein, 74 aa, Zea mays
  Clone ID: MRT4577_454C.1.pep
MENPVGLRFPPTDKDIVFYYLRPKNSDRDTSHVDRVISTVTIRSFDPWELPCKCFYEFSSSTIGYFLSLGFFSL

SEQ ID NO: 309693 - protein, 102 aa, Zea mays
  unsure (1)..(102): unsure at all Xaa locations
  Clone ID: MRT4577_45500C.1.pep
DDDSGSRVLMKLGKXQFELQKLVDTYRSNIIYTITTPSESLLKELQTVEEMKQQCDMKRETYEAMRASYTQKGRSRHSKTETYSAEQLQSALAEYQEDAALF

SEQ ID NO: 309694 - protein, 119 aa, Zea mays
  Clone ID: MRT4577_45501C.1.pep
AKARDYFLLPSEIRRIVSPDVLATAKHRFLHFLLLLARVYREFLSPKPPKPPEPEPPKPPPNRPEPESPKPPERPPPILPSHDCSNPESSNPPPSSDWSPNPELPNPAPAPDRPPNPVL

SEQ ID NO: 309695 - protein, 97 aa, Zea mays
  Clone ID: MRT4577_45502C.1.pep
PTNPMLFFDAETGNFEAVSKMGVPSVLVKNGVTLDMFKLGFSNFATNWAASPRKDDEYPRGEVIHRRKSLQTPGLEFIVTNLPPFMTNFLVKDAPPD

SEQ ID NO: 309696 - protein, 206 aa, Zea mays
  unsure (1)..(206): unsure at all Xaa locations
  Clone ID: MRT4577_45503C.1.pep
KVDLVIHFELPNSSELFVHRSGRTGRAGKKGTAIVMYNYDQSRAVRVIERDVGCKFTELPKITVDDLTXSGGFDSFGGGYSGSNYGRSGGFGGRGGFGRSGGGGGYGNSGFGHSSGGYGRSGGGGFGDSGFGGRSGGGGGFGDSGFGGQSGGGGGFGDSGFGRTSGGGSGFGRSGGFGDSGSGRFGGGFGGSGSGGFGGFGDKNSR

SEQ ID NO: 309697 - protein, 88 aa, Zea mays
  Clone ID: MRT4577_45504C.1.pep
LRHQLLIKYGRTITRHYVIWFACQRGARAKCMMFPLYGGYRCLVSNNTKYPGLSQIQGAPCSVNDSYTMVVHPCGNLHLLSLGGSRKK

SEQ ID NO: 309698 - protein, 70 aa, Zea mays
  Clone ID: MRT4577_45505C.1.pep
SGSSHILGLLWFHDSGTFQWKMQIIPSKRSVTNVSTSENEHDWVISKTHPQSLVRLIAVACWPVTETNRP

SEQ ID NO: 309699 - protein, 38 aa, Zea mays
  Clone ID: MRT4577_45506C.1.pep
NSGLVVWIGWVIIWIWYFGVNLLGIGLHSYGSFTLPCK

SEQ ID NO: 309700 - protein, 43 aa, Zea mays
  Clone ID: MRT4577_45507C.1.pep
NIAALLAIAHRHSAADWTSFFFPPPCAYIHPKSAEVDLSQSGA

SEQ ID NO: 309701 - protein, 188 aa, Zea mays
  unsure (1)..(188): unsure at all Xaa locations
  Clone ID: MRT4577_45508C.1.pep
AGRDGATGRMQSMRRSSHXGVLAPARAYGYGRQVLPVPQHGGLLVPVHPKGAHAEIRSLSRCSYLSAQAATSQKKERAGQPACQSAPERWTAMELEAWRRRRIGIGELGGATGNGQEAQPRAPGHRLGHKLTRMELPEIYTPVRLFLLPLLPLSLALDDGESAVSWQLLHSDRQWGEEAGGREPTPHP

SEQ ID NO: 309702 - protein, 99 aa, Zea mays
  Clone ID: MRT4577_45509C.1.pep
MELNFAPDKVPDKNTDSGKVDDARTSPSSPVIAISSAEPVLSLKLGKRTYLEDVCGGQSVKSLPSDTSAETPPPASPKKTKVTPNKKSYCQVEGCKVDL

SEQ ID NO: 309703 - protein, 77 aa, Zea mays
  Clone ID: MRT4577_4550C.1.pep
ACVPGLQVHTPGHLSWVASQASVLVPDSCQLNLRPFASCYVSKCSDASVTIVKKTLCTYFHILDTYIGLPDFLNSLL

SEQ ID NO: 309704 - protein, 60 aa, Zea mays
  Clone ID: MRT4577_45510C.1.pep
SSQKSMYFKMTLCCFYKWSRLSHYVTSPSYHDKNPCLAHESASVLCRTIESPNVLHLHHR

SEQ ID NO: 309705 - protein, 186 aa, Zea mays
  Clone ID: MRT4577_45511C.1.pep
HHRAWPLALSSATRYFFCSVLSLFFPHIGILPRPSLAPAPSHLPQLIHLHAQSVLLCRRGRLGRLIALRRRPRSSSQAPVLFLGCRRLPPCALLLLRGRVVCQGYPQLACTKSGHVHRRSSCSSLPATVNLAHGRQSAHVRCLPSTPVILTMNPSMLGLGISRTIICNRAAEPLHQCPRLQLHGLA

SEQ ID NO: 309706 - protein, 192 aa, Zea mays
  Clone ID: MRT4577_45512C.1.pep
AIVADLSDQASVRDAIHAIKTNAGPPDILVNAAGVNYRPHMNDLSQGAWDETIAVNLTAPFTLGQAFGPKMAEKGWGRIINIISQQSFRAFGNSGAYGASKAGLLGLTRSQAEAWSKHGVLCNAIAPGLVDTPLARATFLDPGKADAHAARTMIGRNGLPKDFAGVAVWLASEASAAVTGQTIFVDGGYSST

SEQ ID NO: 309707 - protein, 219 aa, Zea mays
  unsure (1)..(219): unsure at all Xaa locations
  Clone ID: MRT4577_45513C.1.pep
MDEKKGSEEAPFFTDYGEASRYEVTEVVGKGSYGVVAAALDTLTGEHVAIKKINDVFEHVSDATRILREIKLLRLLRHPDIVQIKHIMLPPSRREFRDIYVVFELMESDLHQVIKANDDLTPEHHQFFLYQLLRGMKYIHAANVFHRDLKPKNILANGDCKLKICDFGLARVSFNDTPSAIFWTDYVATRWYRAPELCGSFFXKYTPCDDIWSLGCIFA

SEQ ID NO: 309708 - protein, 43 aa, Zea mays
  Clone ID: MRT4577_45514C.1.pep
ISKKKKKKKKKKKKKKKKKKKKKKNLKKKKKKKKGLVLGRDPP

SEQ ID NO: 309709 - protein, 89 aa, Zea mays
  Clone ID: MRT4577_45515C.1.pep
SAPLQLCWHTMPRMRRRMLLLSCWHMTTRRRSAPLQLCWHTMPRMRRRMLLLSCWHMTLNGLIPHLENLKRRTSKTQHRFFRLVYFFYL

SEQ ID NO: 309710 - protein, 126 aa, Zea mays
  Clone ID: MRT4577_45516C.1.pep
LAEHRAVVVLCLATLGVDSHHGPRLLAPRPDAHRDVVSVVAEVVVGPRDVVAASLEWAAVAPSACLPQGPASLSFSGARRRDRYLFFSSVAASSPAPSSAPRVCGETSKSLGLGSGPRVRRAAPSA

SEQ ID NO: 309711 - protein, 132 aa, Zea mays
  Clone ID: MRT4577_45517C.1.pep
KHKTIHVTMLNYYITIIIMRSLCKSNHHCSKCSGIKLTILKQRDGEACPITPHAPPQPRQGPTQQSNPVARWTTKLSRQPSPPENLHQTDAQVLQPHGTRRARSLDRRSLIIDSSKRRNKSRSRHGDTEARR

SEQ ID NO: 309712 - protein, 43 aa, Zea mays
  unsure (1)..(43): unsure at all Xaa locations
  Clone ID: MRT4577_45518C.1.pep
ENDDFMEKVTKTVHSDELTVXEPNLLSFAYKNLIGTLRSSCHI

SEQ ID NO: 309713 - protein, 47 aa, Zea mays
  Clone ID: MRT4577_45519C.1.pep
RRFPVDHARLVLDASGAFFFFYGCDHNLRKDCTAKQGYDFVLLNCRG

SEQ ID NO: 309714 - protein, 29 aa, Zea mays
  Clone ID: MRT4577_4551C.1.pep
VPESVIVHSKDRDYTISRVSMHTRLIDRL

SEQ ID NO: 309715 - protein, 66 aa, Zea mays
  Clone ID: MRT4577_45520C.1.pep
TSFRYPTDNAQDRRIVKKRRNINSIQLTKLGSGLKVFTMSAEDERQAALNSYRTKLMESREWEAKL

SEQ ID NO: 309716 - protein, 72 aa, Zea mays
  Clone ID: MRT4577_45521C.1.pep
KKNKKSHKKQSIRKRLEKFILRHVCMPCSHYDILSPNFNSLNKFYHLKNCENPFVPQRYSLPNILIYSTNVI

SEQ ID NO: 309717 - protein, 85 aa, Zea mays
  unsure (1)..(85): unsure at all Xaa locations
  Clone ID: MRT4577_45522C.1.pep
LQTHTIPAPRCHPAAGGSSRVTFSFYDRYITIFSSEGLLYQDDVFFHGFLIHAFILFYSFFFFFYFIFFLFFLILLXXFLFLFFF

SEQ ID NO: 309718 - protein, 116 aa, Zea mays
  Clone ID: MRT4577_45523C.1.pep
LLLYFIWFKVVQCEVIAVFSAHYYCFFLLWSDDTNAQTFDSKGWDTNPPELLTEWTWILPCGLGHTGLKVRYIAHGRAETMGRTLHMSRPDDAYKCWDHRWTKFGALRHKIILLAI

SEQ ID NO: 309719 - protein, 1300 aa, Zea mays
  Clone ID: MRT4577_45524C.1.pep
IRHEENIDLDDEFLEGQDTPVELEPVILGFDEGVQVEIPPNSQLELASVRSTERTVGVHLNSGVAEQENVSGSVVHSDPVTEAEKALQALTLDGVNGLTEDSNGEPSNSSRTPASSSQLPQAIRLEPIFSSASTVVGQNEVPVSLQFGLFTGPPLIPTPVPAIQIGSIQMPIHLHNQFNPSLPHMHPSTTPLYQFGQLRYVRPIAPSVRSLPSQATRPAHSSISAQHTLNQNVSSVLPELMDGGTNQNIPAQASSSTFINKSAAPTTKVPLGMDNSNSQYLNAPANNQMAGVDGFSSQVDREFAEGTTPSGRNQGLSLKRNYRPTSNNVESSQYGLEGRAMGDPKALGVVSDRRGRRYGYAVKDINMRSTGSIVEPSHKDSKGGFQRRARRNVRRTEFRVRENIEKNQNETSESFCHGEQDEITSSNGTRDIPARNTNRRELDMSKASRINGASDQSLSFRSTHNVPYERSHGGNKKSRTGAVPDGDTTSLQAGAVRVVKQQGIEVPVDADGFIEVRSKRQIMSVRREQREKENRSKIRMAKAPRKQHSISLQSSVGPSVNKRAAPSSGEVTKKVSSGSAITVEGRIVDYAESSIPLMGDTASMNLIGPPSTNAETHTNCFANQPIQIQASSDLVTSSPAKLVSGLSDGDNKGPSISTPFNMVSWDNSQINQQVMPLTQTQLEEAMGPAKFEQQAGPGFSLESNNALSPTVITEKVLPSSASPINSLLAGEKIQFGAVTSPTMLPPVSRTVSSGLGAPGSSRPDMKIDRGLPSDNSGPDKANSKELCPSTEDAEAEAEAAASAVAVAAISTDEGSPADATTASAPDKSFTSKDLSGLTSGGARTGQAGQSSTEEPLAVALPADLSVDTPSMSLWPPIASPQASGPMLSQFHGAQPSHFSCFDMNSMLGGHIFAFGPSDESAGSQGQHPQRSNALPSAPLGAWPQCHSGVDSFYRPPTGYAGPFITPGGIPGVQAPPHMVVYNHFAPVGQFGQMGLGFMGATYIPGDKQPDWKQSQGPPIVGVSQSDPNSQNMVSGQVNAPSVPAPVPHLRPTSIMPIPSPLTMFDIAPFQTSTDIQMQTCWPHMPVPPLHSVPLSVALKQHPVEGTATQQFVHNVPIDKSGTNNRFQESSASAGPSDGNKTFPNAAVSQYRDELGLVEQPASTSSSSQTVQPSFGQAGLISNEVPTSAKAMVRVTPSKVNPGIAAGAAGSTNAPQVTSIPSKTHQSSSSSSDPQYQHLVNNQDRRARATQKAGTGNEWQRRSGYQGRNQGSGSDRSSGTGRMKQIYVAKPSATSGHASSG

SEQ ID NO: 309720 - protein, 184 aa, Zea mays
  Clone ID: MRT4577_45525C.1.pep
MRCSKMPMRRNMQTRTAVAAKPMALALALVPALPPAPLMAAAASSLATSAAAGSDAVAPEPAIPTHGLVDVCPANLLMYTTTTCLAVAGCCAACDGARLISDSEHLRVLGSWPLASASSTCCCQFAVASSSTTPCVCVTLALQCSAERLSKQWLWPWAWLSTTLPKCQIGLSHWGRRPCTPGPW

SEQ ID NO: 309721 - protein, 165 aa, Zea mays
  unsure (1)..(165): unsure at all Xaa locations
  Clone ID: MRT4577_45526C.1.pep
MLSAXTVSLQQGRMXLSKFAGGLALHVCCLMRRNGTSNDFMSEVSLRTHSDTTMGGTRLWPTKTKLNVRIKGMDRIWCHFLRSWNGSCDTSPLXDRHLRDREGLRQVTHLIKNNSTLDICDDYCMTVGNQVISVYCKVIXKVVTDRKRNKLTRPQIVIHRVIEAI

SEQ ID NO: 309722 - protein, 74 aa, Zea mays
  Clone ID: MRT4577_45527C.1.pep
KGKSSRLLTSHDRERRSCGECAEQEHESGDQRSPRHHSLQHRHRRQSRARPAAPAYIYHPIRRPSSERTRRSSG

SEQ ID NO: 309723 - protein, 82 aa, Zea mays
  unsure (1)..(82): unsure at all Xaa locations
  Clone ID: MRT4577_45528C.1.pep
RPGWGSFALAVVYILWIAQNNPGGTMREFLFLFVLLGLVEGAASSYFIGWSCLIQIVSSXTKHPGGGCFSXXYQPPSAQSLP

SEQ ID NO: 309724 - protein, 123 aa, Zea mays
  unsure (1)..(123): unsure at all Xaa locations
  Clone ID: MRT4577_45529C.1.pep
PPMDKHRLLVHILRHQERGXEIIISCSTNKMCHQLARGIDRNLNALSIHGRKSQAERDNLLNQFLTGRAPTLVATHVAARGLDIKDIRLALNYDFPTGIEDYLHRIRRTGRARATRVSYTFFS

SEQ ID NO: 309725 - protein, 88 aa, Zea mays
  Clone ID: MRT4577_4552C.1.pep
KSLFLSCSIFTILNFHFLLFGEVHFPPSFSRSGDLHFGWPSFHFLPQVLSLFWTCSIFSLCSFLIFTNFLGIIWFITGEREGLIFFLL

SEQ ID NO: 309726 - protein, 96 aa, Zea mays
  Clone ID: MRT4577_45530C.1.pep
LKLNILVISYRSEKAEHGVPDLGQLPPLAPPRLIRRDDAATPPIRSIFLASHSCGGSISPASSSSSPLLPPRLAELELPAGMATGADDLPPPPLLL

SEQ ID NO: 309727 - protein, 220 aa, Zea mays
  Clone ID: MRT4577_45531C.1.pep
MQENHNGTKNIVVSSEMHVVPCSMKEIVSSDMKEEDHSSPGFLAENLFADLGFTCSSNAADKTTEENPAIVLQSSPKISDQLRKISNSLKLLNSMAPSIVKQKTDIVRPQSFDLVEAEPKTPEVNLKLWHAQDAQESLKARSTGIKKSLAKECLLFLNSANKEQLKSLKGIGEKRANYILELREESPLKEIDDLKSIIGMSKREIDKMMSKLISDSPMNE

SEQ ID NO: 309728 - protein, 102 aa, Zea mays
  Clone ID: MRT4577_45532C.1.pep
LGITCSYNAADKSTEENPDGVLSSSPKISDQLRKISNSLKTLLDMAPNIVKQKTDIVRPQSFDLVEAEPKTQVNLKLWHAQDAQESLKKSLAKDCLFFSKQR

SEQ ID NO: 309729 - protein, 91 aa, Zea mays
  Clone ID: MRT4577_45533C.1.pep
LSLPTLGQDNHVDQVPANRGTSQFQTVPGCVGAPLLPDARRRAHEALPHEPTASATNASPISRSGTRLRGQNNVNNRNGQVLAINGILGPT

SEQ ID NO: 309730 - protein, 263 aa, Zea mays
  Clone ID: MRT4577_45534C.1.pep
MAGHSSLYRLPHREESLASPGSLSSSNGEGAELFHALIGRSTSSSEGTEHKKTGDNKSSTTVIQKSRVKKVLVDGGSSINISFPQTLQALGIKLKDLTESDTPFFGIVPAEGEYPLGHIYMSITFGTIENYKTEFLRFEVARFDYGYNAIIGRPGLAKFMAIPHYPYMILKMPGPQGIITVHADFQGAAECFRGAIQTTLTGGPSTALPAQANTRMEEEGLTIPTNEAQVVTSIRLAEETKRINLGFSDERKTAIISFSLDDK

SEQ ID NO: 309731 - protein, 90 aa, Zea mays
  Clone ID: MRT4577_45535C.1.pep
LFFYKLYFNCGWIFFFHFGSLSWFHFALKFPYFNCPGPSLLPLNNLILCLSQISLNLCFFVVKKIFLFVVVTKSFKTFFLSTTVNPSIFF

SEQ ID NO: 309732 - protein, 194 aa, Zea mays
  unsure (1)..(194): unsure at all Xaa locations
  Clone ID: MRT4577_45536C.1.pep
MRRQHLSASKISAASQQQVVFSXRQEVKHLKQTSLWGSTFDAVVASLARAAFTTLARIKAVFGAGXAAPPAAVPQPDTLLGGAPVRRRAVXPSRKSMSMEEVLLFDVDNQPSFAPKRQVRGGGFLEDSSAALTPPAGTLGAAALSPRYAGLVISIERMARSPLLVGPEERDELYGMLTASVRAQLRARLRGAVP

SEQ ID NO: 309733 - protein, 160 aa, Zea mays
  unsure (1)..(160): unsure at all Xaa locations
  Clone ID: MRT4577_45537C.1.pep
GAKGKPRLKEKRENPNKRAKKKRKEREKKGGKEKARGGGKAXEKGPPTAPKRAQQGETKSHAAWGNERKGGKGGHWPKGKKGGKRKXSKGRKGGNPQGNREKKGEREGKAMKKTPKRAKRAPKKKGRPAPTAKEMTKNIALREEKKQEKKKFLKKNIKYF

SEQ ID NO: 309734 - protein, 149 aa, Zea mays
  Clone ID: MRT4577_45538C.1.pep
MASSKALLLLAAAAVAAACLVGAADAKFGRLGRLVITGVVPCNTGSLIDIASSPAFPNADVELRCAGRVVAGATTNTNGTFSMELDMTNALAAFIGGCTLVVDTPLVKCNADLTDVGSLVSYLQGPLTRLLGGIFHLFPAGFSFHARRA

SEQ ID NO: 309735 - protein, 92 aa, Zea mays
  unsure (1)..(92): unsure at all Xaa locations
  Clone ID: MRT4577_45539C.1.pep
FSSYTNHNTTSTLITLAVRFFTKTATPLLHINVXHYXFSLTKFLYIHPFQRTNYIFFPFTNFIINNTLYFPNFIITFFIPSNTFIHFKNYYF

SEQ ID NO: 309736 - protein, 283 aa, Zea mays
  unsure (1)..(283): unsure at all Xaa locations
  Clone ID: MRT4577_4553C.1.pep
MMNELKEVKKXVNPTEVLLVVDAMTGQEAAGLPRVCNDEIGITGAILTKLDGDSRGGAALSVKEVSGKPIKFVGQGERIEDLEPFYPDRMAQRILGMGDVLSFVEKAQEVMRQEDADELQKKILSAKFNFNDFLKQTQMIAKMGSFSRLIGMIPGMNKVTPAQIREAEKNLKFMESMINVMTLEERERPELLAESRERRKRVAKDSGKTEQQVSQLVAQLFQMRAKMQKMMGAMQGKESPDMDELMESMKAEEQAAAGTGRRRRKYGNLRQRQLDAMRGFRRR

SEQ ID NO: 309737 - protein, 187 aa, Zea mays
  unsure (1)..(187): unsure at all Xaa locations
  Clone ID: MRT4577_45540C.1.pep
ARLTKLLKHLGGXVTCDGHSCTHVVXTRKARRTMNFCIALCSGAWIISPNWLKESFREGQFVGEAQYVLEDEEYRMQYKSQLRDAVMRAKERPNSLFAGYTFCLSKYIQPSFDVLSAIIKSTGGKIIKKLSELDELSRTIFLVCEEEAELALVAAKSGIKTFSSDWFMSCVMKQELDLEAPQFIVSL

SEQ ID NO: 309738 - protein, 40 aa, Zea mays
  unsure (1)..(40): unsure at all Xaa locations
  Clone ID: MRT4577_45541C.1.pep
DVIXLLYCHLNSGDWRSFFNVMTEKQLSFPNFISLQHNPL

SEQ ID NO: 309739 - protein, 77 aa, Zea mays
  unsure (1)..(77): unsure at all Xaa locations
  Clone ID: MRT4577_45542C.1.pep
ATRTPRVRXFLDTPLLTAMLLHFRDNILEAGMQRLTSSCSVINHMEPIGDLNHVSVLREDMTYMHHRKFHAMISKLA

SEQ ID NO: 309740 - protein, 91 aa, Zea mays
  unsure (1)..(91): unsure at all Xaa locations
  Clone ID: MRT4577_45543C.1.pep
GKRGGKQTRKGRREETKXGEKNPPPPREKGXREEKKKRGRKGPNKXPKERKEGXRRADXGTKGTQDDAGPDARAQREAATSSRKRTLGQPG

SEQ ID NO: 309741 - protein, 195 aa, Zea mays
  Clone ID: MRT4577_45544C.1.pep
PRVFFFFFCFWLASTSVSRYVGHQNFATIDHNDVLKRRVHLHLRPHQPLTHSQPKRSHQGRENRNKRSRGAEHVWRRYPSFQPAGCLDLSPTRLLQLSTVDSFRSTPRSQSSCGPGAGSQPGAPAPAPPPPPTGFSCLNQAAHGLHHPRPRRACTCACSYSSWPRTRPPRWRTQSRPCSAAASAGCWPDAARRPG

SEQ ID NO: 309742 - protein, 80 aa, Zea mays
  Clone ID: MRT4577_45545C.1.pep
RLGHLTCHEHTSGRSPINTMADITKLLCTKGLQLCHAHLSSENYVSGDCITIDDIKVVNDTPAKNDNALMMRPIGDIPPG

SEQ ID NO: 309743 - protein, 104 aa, Zea mays
  Clone ID: MRT4577_45546C.1.pep
MAATSVACAFFFFDAAEPLGETGRRQRQALDACTLCSKPLARNSDIFMYRGDTPFCSEDCRYEQMHHDAAATAYARHQASSRRRQQRSRGGSVSANEADVYVAS

SEQ ID NO: 309744 - protein, 99 aa, Zea mays
  Clone ID: MRT4577_45547C.1.pep
MATSVACAFFFDAEPLGEPGRRHALDACALCSKPLTRNSDIFMYRGDTPFCSEDCRYEQMHHDAAATAYARQQASSRRRQQRSRGGSVSANEADVYVAS

SEQ ID NO: 309745 - protein, 173 aa, Zea mays
  Clone ID: MRT4577_45548C.1.pep
IGYLEVTFIIVKNARDLKKKKKKKKAPSGRAGRQLSQARESRGTLFPHTPKQQWQSCARGHQAIIAQRADEAWRRPWPAPSSSSTRRSRWARPGGGKALDACALCSKPLARNSDIFMYRGDTPFCSEDCRYEQMHHDAAATAYARQQASSRRRQQRSRGGSVSANEADVYVAS

SEQ ID NO: 309746 - protein, 103 aa, Zea mays
  unsure (1)..(103): unsure at all Xaa locations
  Clone ID: MRT4577_45549C.1.pep
SCKINYYLADVIGTTPPXKARRNPKTSLEPAQEFKENGTLAMKMKSTDTPTRPGPIFIHLARYRGGVGGAIEQNTKPIAVHAADYFSAPTRSKETAPASNRTR

SEQ ID NO: 309747 - protein, 109 aa, Zea mays
  Clone ID: MRT4577_4554C.1.pep
GVLPPPLGGPLGERGFSHPGLRGVGGFSRGLENALPLGPGQVKRSGAPGKILLSSRGRPRPPPPLKLTQWEGRFLLVFPPSLLLLFRVGFGRVGYQTGSLFFMPRGGGF

SEQ ID NO: 309748 - protein, 164 aa, Zea mays
  Clone ID: MRT4577_45550C.1.pep
MPAGHGLRSRTRDLFARPFRKKGYIPLTTYLRTYKVGEYVDVKVNGAVHKGMPHKFYHGRTGRVWNVTKRAIGVEINKQVGNRIIRKRIHVRVEHVQPSRCAEEFRLRKVKNDQLKAEAKARGEVISTKRQPLGPKPGFMVEGTTIETVTPIPYDVVNDLKGGY

SEQ ID NO: 309749 - protein, 35 aa, Zea mays
  Clone ID: MRT4577_45551C.1.pep
EGEPSTTECDCAVGFVESSALVSQKIRCTSPLFRL

SEQ ID NO: 309750 - protein, 51 aa, Zea mays
  Clone ID: MRT4577_45552C.1.pep
FYLYLLLFGHPVIYVVQLHVNHVMCTIVLFRLVILNAMYWLHGFFCLDPCY

SEQ ID NO: 309751 - protein, 107 aa, Zea mays
  Clone ID: MRT4577_45553C.1.pep
EHSCRTQLPLHIDYYGRQPPIGTPELITPTPPSACTACRLVDGSTVESQGKEACICMPRTPDCVNCEVLGVRLCSPMAAAEEQKGCCRARVLFSIHADRISQQMKDA

SEQ ID NO: 309752 - protein, 68 aa, Zea mays
  Clone ID: MRT4577_45554C.1.pep
CYCQEALKQRPPWPPPTQWVMHIVGAQLRPIPWPSYGSRSVGQCLWGGPGCDQCFLLNFIILMALGPC

SEQ ID NO: 309753 - protein, 221 aa, Zea mays
  unsure (1)..(221): unsure at all Xaa locations
  Clone ID: MRT4577_45555C.1.pep
PVPAFPGSHTIYTVQSDIHYMEGMPPXQQRLIFGGKRVGGGRTLADYNIHNESHLHLVLRLRGRMQILLKTLTGKTITLEVLSSDTIDSVNAMIHYKEGIPPDQHXLIFVGKQLKDGRTLSVYNMQKESTLHLILRLIGGMHILVKTLTGKTITLDVQSSDTIDNVNANIHDKDGIPXDQQRVIFISKQLEDGRTLADYNIQXESTLHLVLRLRGGNKSWV

SEQ ID NO: 309754 - protein, 146 aa, Zea mays
  Clone ID: MRT4577_45556C.1.pep
MATSNTARMEDGGGDLRSTIKKWNIIYPVYLNSKKTVAEGRRIAAAKACPDPTCIEIADCCSHLKIPHAIELDKAYPRDFFQVGRVRVQLKKDDGSPVNPAIKTKKQLMIQVAELVPKHHGRTKKQEPAPNPGGSSKNTKGGKKKK

SEQ ID NO: 309755 - protein, 146 aa, Zea mays; identical to SEQ ID NO: 309754
  Clone ID: MRT4577_45557C.1.pep

SEQ ID NO: 309756 - protein, 94 aa, Zea mays
  Clone ID: MRT4577_45558C.1.pep
GTQLHLSSAYHPQSDGQTERVNQCLEMFLRCAVHNSPSQWAKWLDSAELWYNTSYHTSIKCSPFKALYGVEPNLGCIPVTDSLNPSEAQLTLQQ

SEQ ID NO: 309757 - protein, 141 aa, Zea mays
  Clone ID: MRT4577_45559C.1.pep
LLLLRPFEDMVKNLKVDPVAKVTASTTSMVSAKENKNQSEAEPSYYETLETYQGLPCPYGGYYGYYYPGLDGSVGEAKDNGYYGYGTEVQYPVMQGENGSVIYLMPGFQSYDASQTYMPINPGGVSSQALHSPMYAASGYY

SEQ ID NO: 309758 - protein, 125 aa, Zea mays
  Clone ID: MRT4577_4555C.1.pep
MLLPLLKSQPLLHHAARLSSPRTRLLLRRDAIPLARSPPIRMAASSGSGASSPASAPPAAVVHKSKIKFCPACGSPTKLAIPDGDEKMRAVCSSCGRVHYENPKMVNAEQIKEKGKDPYTFVFGL

SEQ ID NO: 309759 - protein, 124 aa, Zea mays
  Clone ID: MRT4577_45560C.1.pep
ASSSPPLPYPNLASNPIPFPPHSLACLAYSSSLLLALGRCLPRLPPRIWPPTVFPCSLAIVSIIDTCSPKTLGSSQSLRPSHGDRGITDDGKDDAVATANDSAQVPRATGGAACGGALAAFAFT

SEQ ID NO: 309760 - protein, 171 aa, Zea mays
  unsure (1)..(171): unsure at all Xaa locations
  Clone ID: MRT4577_45561C.1.pep
KKKKKKKKKSLYLRPKPRLRGTFTTISRQTVGTSKQLSGGPTSPYRAQFATIRAVLQQPGAWETPGGPGKPWLAPHSPFGSXCNFEQVGTYRPGPHRPPLQGEGXAPWGSGLTPEGVVNPRRGAGTLHRALSPGHCPISPSFLVTPSLFPREALISRLSLRSRVTVRRPLY

SEQ ID NO: 309761 - protein, 107 aa, Zea mays
  Clone ID: MRT4577_45562C.1.pep
TLVLLFPSLGGLSISGGTASSSYNPAPPTWMAPALSSSWATLVEFPKRPNPPNTAPSSESSLQYNSFLNKSPPVTKGGTNRVLTAFTKSLEGAFSTLCSGAPTRALT

SEQ ID NO: 309762 - protein, 107 aa, Zea mays
  Clone ID: MRT4577_45563C.1.pep
GRHHRLPDLVEREPHSETGGGFQWAPRAERNPAAKNLAKKNPAAKKAPGGRRPRAERRFLAARSAAKEGGKKKGKKKAKNSGETSKIYFLKVLKQGHPVLGFWSKAL

SEQ ID NO: 309763 - protein, 283 aa, Zea mays
  unsure (1)..(283): unsure at all Xaa locations
  Clone ID: MRT4577_45564C.1.pep
VVPASPSRSPCRFSRNQDAARIGPGGRRHRHVRAGGXTAGTVLCCMCGVSMQPNPANMCARCLRARVDITEGVPRHAAVVYCPDCSSYLQPPRSWLRAAPESPELMQILLRRINRPLARLRVSLSGAEFVFSEPHSKRLRLKLRLRREVLHGIVLEQTHPVEFVVHDRLCDSCSRAQANPDQWVAVVQLRQHVPHRRTFLYLEQLLLKHGQASLAIRVAAAPGGLDFFFGSRSHAARLVDFLATVAPIQTQTAKQLVSHDTKSSVYNYKYTFSVDICPICRED

SEQ ID NO: 309764 - protein, 72 aa, Zea mays
  Clone ID: MRT4577_45565C.1.pep
WSIQSKTTIHTMITTKTSAVILQNLNTFARIQLEGRVLSFLQNWFAPRLVNWQDPEEGKFNAVVYKILMQIS

SEQ ID NO: 309765 - protein, 77 aa, Zea mays
  Clone ID: MRT4577_45566C.1.pep
PSYMALGPRLAARQAGRAALATSLGRLEGRLGRLPGGPPGPDSTCMGCLRFGRSIYIYYFIYCNFNQKNYVFVQLLF

SEQ ID NO: 309766 - protein, 218 aa, Zea mays
  unsure (1)..(218): unsure at all Xaa locations
  Clone ID: MRT4577_45567C.1.pep
PILRRVVSEEVERALGKLGPATIGGRPSPKRXFRTRLSLPLFTGGKVEGEQGAAIHVVLFDAGTGCVVSSGPESSAKLDIVVLEGDFNNEDEEGWTGEEFDSHVVKEREGKRPILTGDLQVTLKEGVGTIGELTFTDNSSWIRSRKFRLGLKIASGFCEGVRIREAKTEAFMVKDHRGELYKKHYPPTLKDEVWXGWKXIGKDXGSFHXKRLNKSGIS

SEQ ID NO: 309767 - protein, 360 aa, Zea mays
  Clone ID: MRT4577_45568C.1.pep
VPRGRPGRDSRFIPPYHIELCARCAVGRSPPLSAISAGRLGLALATAPVSGSGGRARFARVFVPATMKDKRGLEDAGDGRPDAKRPRPPALASVIVEALKVDSLQRLCSSLEPILRRVVSEEVERALGKLGPATIGGRPSPKRIEGPNGRTLQLEFRTRLSLPLFTGGKVEGEQGAAIHVVLFDAGTGCVVSSGPESSAKLDIVVLEGDFNNEDEEGWTGEEFDSHVVKEREGKRPILTGDLQVTLKEGVGTIGELTFTDNSSWIRSRKFRLGLKIASGFCEGVRIREAKTEAFMVKDHRGELYKKHYPPTLKDEVWRLEKIGKDGSFHKRLNKSGISTVEDFLRLVVRDPQKLRSILGS

SEQ ID NO: 309768 - protein, 63 aa, Zea mays
  unsure (1)..(63): unsure at all Xaa locations
  Clone ID: MRT4577_45569C.1.pep
MASLELACSYAALILSDYGISITAXKIATIVNAANIKVESYWPALFAKLLEKRNVXDLILSVG

SEQ ID NO: 309769 - protein, 59 aa, Zea mays
  Clone ID: MRT4577_4556C.1.pep
KTPPFHGGRNPPWSLAEPKTLWDLALNLGLNTFTNIAWKLSFLSPPPRVPAFHFGKILG

SEQ ID NO: 309770 - protein, 56 aa, Zea mays
  unsure (1)..(56): unsure at all Xaa locations
  Clone ID: MRT4577_45570C.1.pep
LXRXXAARGYPRXGSXIPXEXXACXNTAYRHPRQGQQVAPNSPXILTAGQVSGQMK

SEQ ID NO: 309771 - protein, 616 aa, Zea mays
  unsure (1)..(616): unsure at all Xaa locations
  Clone ID: MRT4577_45571C.1.pep
MKEKRGLEDAGGGAGDGRPDAKRSRPPALASVIVEALKMDSLQRLCSSLEPILRRVVSEEVERALGRLGPATIGGRSSPKRIEGPDGRALQLQFRTRLSLPLFTGGKVEGEQGAAIHVVLLDAGTGGVVSSGPESSAKLDIVVLEGDFNNEDEEGWTGEEFDSHVVKEREGKRPILTGDLQVTLKEGVGTIGELTFTDNSSWIRSRKFRLGLKLASGFCEGVRIREAKTEAFMVKDHRGELYKKHYPPTLKDEVWRLEKIGKDGSFHKRLNKSGISTVEDFLRLVVRDPQKLRSILGSGMSNKMWDALVEHAKTCVLSGKYYIYYSDESRSIGAIFNNIYAFCGLISGEQFYSSESLDDSQKLFADALVKKAYDNWMYVIEYDGKGLLNPKPKKKSASTGQVETHALRVGPLDYSNNTMSSMXPGPSPSAGTDSAGYGVDQIATHPSQLQSSSANVQAPYDDTFSFLPRTMQTGSANDAMGLELGSXQQVTSSXQTIQPANVGYGDWPRNRDSQYPDGFTEGIRLKSHQLLEGEDMQQLLRVFSMGGASGSLPDDTFNFQSYMPSPMPNLGFETERSHSSGKAVVGWLKIKAAMRWGIFVRKKAAERRAQLVELED

SEQ ID NO: 309772 - protein, 106 aa, Zea mays
  Clone ID: MRT4577_45572C.1.pep
RKLGIRLEPKREAHYLAPAQLLFNGGSIEKDWRENNRPHHGGERPNRNQPKKAYQSDRTNGNAPPGDGGRRYTRARARIQDRSDLDDSNEAAEKENRLKLQTGRAV

SEQ ID NO: 309773 - protein, 212 aa, Zea mays
  unsure (1)..(212): unsure at all Xaa locations
  Clone ID: MRT4577_45573C.1.pep
MAACRGGGGGKDVDRIKGPWSPEEDDALQRLVGRHGARNWSLISKSIPGRSGKSCRLRWCNQLSPQVEHRPFTPDEDDTILRAHARFGNKWATIARLLSGRTDNAIKNHWNSTLKRKYSSSSSASASPADDAMANDDEDRRPLKRTSSDGYPGLCFSPGSPSGSDLSDSSHQSLPFVMPSAASQQPHVYRPVARXGGVYRLPTANPASVAFL

SEQ ID NO: 309774 - protein, 49 aa, Zea mays
  Clone ID: MRT4577_45574C.1.pep
AVFYKSLTKDWEDLLGVKHYSAHDSLDSKAVLYATNRVPFISYSHLKES

SEQ ID NO: 309775 - protein, 57 aa, Zea mays
  Clone ID: MRT4577_45575C.1.pep
ITGCSLGFGFHKIRIIGVRLGAVKCNRQRMQRFFGMLAPPLVFPRAICSRVPYQSLR

SEQ ID NO: 309776 - protein, 359 aa, Zea mays
  Clone ID: MRT4577_45576C.1.pep
MGSNDPSTPSKASKASEQVLETVDQPPATTSSGTVSVYPEWPSFQAYQAIPPHGFFPPTVAANPQAHSYMWGAQPMVPPYGTPPPPYVMYPPGAVYAHPSTPPTMHPFSHYPMPTNGHAETPGTAPSAPEMNGKSEPGRTSAPSANGITSHSESGSESESEGSDANYENDSHSKDNDGKEDGNSQNSISYSASQGVLNQTMAMLPIQPGAMVGGVSSSTANLNIGVHYWEAPGSAAVSATHGKAPAGSARGDQWDERELKKQKRKQSNRESARRSRLRKQAECEELGQRAETLRSENSSLRAELERIRKEYEQLLSQNASLKEKLGGSSDPIPDMNEQNDGNGSDKKQSDSDAQPGSES

SEQ ID NO: 309777 - protein, 81 aa, Zea mays
  Clone ID: MRT4577_45577C.1.pep
LLAAVCLLPPGCGCGCGWQETAANDDDRSSRTTVAAAGEATSSFFIVAGRALHLACVAVAFAFAYRSSALLLFVCHPLVCV

SEQ ID NO: 309778 - protein, 83 aa, Zea mays
  Clone ID: MRT4577_45578C.1.pep
TYVIYYQPRSGTCFLLQQPKIHFLVVLEHGPPHHKISLQKKNKPLPQKKNPPPFHKKKKHPPQKKQNLPPGTNNFLIPHPPSN

SEQ ID NO: 309779 - protein, 172 aa, Zea mays
  Clone ID: MRT4577_45579C.1.pep
IVILTEVCFYKPSLLSPAGSHRGGTKLKHHKVQAFRPLSGCVGFLGYQYGNTSMLARSAVVSTAAGWTQATRRPLCFPDVEAELHPCLKQNLLCLYDDRTYMNGTVPGGKPHGTVPRIARRFLFTNAVFFLGRRNNHGVWIFLFLFLFFKYCSALLGRRNNHLQRPCTNSAR

SEQ ID NO: 309780 - protein, 99 aa, Zea mays
  Clone ID: MRT4577_4557C.1.pep
MAWRGAASRSIIAAVRARAASPSSTAASRLRSTAPLPAPSRLRSTAPLPAPSRRSVPAFAFATARPLAAMSGSPAAAVVKLTGHAATSVRACCELSQGT

SEQ ID NO: 309781 - protein, 95 aa, Zea mays
  unsure (1)..(95): unsure at all Xaa locations
  Clone ID: MRT4577_45580C.1.pep
WQPASKIHRVISDCIQHRYSGSPDVSCKGNSRIAWRGLISGSKVFCCQCDYQEIIDAWAQWLTPALPAPWKAEKKKLLSRELRRGTNPLFRSLXF

SEQ ID NO: 309782 - protein, 46 aa, Zea mays
  Clone ID: MRT4577_45581C.1.pep
KKKKKKKKKKKKKKKKKKKKKKKKKKKKKTRPRTKKKLKEKFCPFP

SEQ ID NO: 309783 - protein, 49 aa, Zea mays
  unsure (1)..(49): unsure at all Xaa locations
  Clone ID: MRT4577_45582C.1.pep
VQLQLPKLAIPVRGDVCACICLLCAVDGSHTNERPGFXACSSGWSHAGR

SEQ ID NO: 309784 - protein, 488 aa, Zea mays
  Clone ID: MRT4577_45583C.1.pep
MGRKVSCMITHGPWVLIGIPKFVEAWNTKTGMKLRFQGPSSLVCSMAITDEMLFAGTGDGRVIASTSKPIHLPSSSPDSTTATPPISSFTNLLEPRPEPYPTMAASLLSRAAAAAAALRGAARPNHLLARASLPKGRVGWAARAAEGAGGPRCGPSPLLGAFGIAARCNATSSSSAVSEATGVHTVPPTEPVVSAEWLHANLKDPDVKVLDASWYMPAEQRNPLQEYQVAHIPGALFFDVDGISDRTSSLPHMLPSEKAFSAAVSALGIYNKDGIVVYDGKGLFSAARVWWMFRVFGHDKVWVLDGGLPQWRASGYDVESSASSDAILKASAAGEAIEKVYQGQLVGPTTFEAKLQPHLLWSLDQVKENINTQTHQLIDARSKPRFDGAVPEPRKGIRSGHVPGSKCVPFPQVLDSSQKLLPSDELRKRFEQEGISLDQPLVTSCGTGVTACVLALGLHRLGKTDVAIYDGSWTEWGAHPDTPVATAV

SEQ ID NO: 309785 - protein, 256 aa, Zea mays
  unsure (1)..(256): unsure at all Xaa locations
  Clone ID: MRT4577_45584C.1.pep
MAASLLSRAAAAAAALRGAARPNHLLARASLPKETLLPPLLLLVIIITAATPLAGRVGWAARAAEGAGGPRCGPSPLLGAFGIAARCNATSSSSAVSEATGVHTVPPTEPVVSAEWLHANLKDPDVKVLDASWYMPAEQRNPLQEYQVAHIPGALFFDVDGISDRTSSLPHMLPXEXAFSAAVSALGIYNKNGIVVYDGKGMFRAACVWWWGGLPSLHLEHQNRRANLCSEQGKQSLPDILLAQKQPWLVVLGCLM

SEQ ID NO: 309786 - protein, 67 aa, Zea mays
  Clone ID: MRT4577_45585C.1.pep
FLWCASLSGISLDQPLVTSCGTGVTACVLALGLHRLGKTAGRVYDGSWTEWGAHPDTPGCNCCLVSS

SEQ ID NO: 309787 - protein, 278 aa, Zea mays
  unsure (1)..(278): unsure at all Xaa locations
  Clone ID: MRT4577_45586C.1.pep
CVDVIKMGRKVSCMITHGPWVLIGIPKFVEXILILVRVHLYFVLCMVTLRGDFAWYKAWNTKTGMKLRFQGPSSLVCSMAITDEMLFAGTGDGRIMAWRFPAKESNTEPVLILSGHQRPVISLSISARRLYSGSLDKTIKAWDLTTRQCVQTLSEHKAAVTSVLCWDEKLLSCSLDKTVKLWTLSESGNLQVKYTHAEENGLRTLFGXMHRVGKTPVHLCSXLHNSNXVRLXDLPSFDGIGTLLSTKEVRTIELAAGGLLFTGDCSGELKVWRWAPKD

SEQ ID NO: 309788 - protein, 81 aa, Zea mays
  Clone ID: MRT4577_45587C.1.pep
KTTQNNYRMLASNTRNRLQWSNPTQCHLHAHLGLVRLFLIHMDWMGLEKIEKKFDLFGIQTHPIPLNPHGLRANRTSPYRW

SEQ ID NO: 309789 - protein, 80 aa, Zea mays
  Clone ID: MRT4577_45588C.1.pep
GPGRGAAPPPPRGGGAPPDAGRAHARPGGPRSVRGRAPAQGPGPDEARPPPPPGQGRPTHGMFASARPPPPAQGRARSPS

SEQ ID NO: 309790 - protein, 136 aa, Zea mays
  unsure (1)..(136): unsure at all Xaa locations
  Clone ID: MRT4577_45589C.1.pep
MAEQNTCHVSYTDVVGHVANEAACAAFHQDHVKMPKYSVEWQPAAWYESWGYGPKRVLDLGPLYGETPSYLTHEFPGQYGXTTAGHSRGDPETXSRNRVAXVIHFRXAMLGELDCNFPXLVARNVNKVDYAVGFND

SEQ ID NO: 309791 - protein, 56 aa, Zea mays
  Clone ID: MRT4577_4558C.1.pep
SRLIYSVPCITSAVQSLFAPSVLNHAHLPKPKKKKVTKGNHIPVSVRGASTSLYAL

SEQ ID NO: 309792 - protein, 125 aa, Zea mays
  Clone ID: MRT4577_45590C.1.pep
GTRRYVRLEVGGYFADCRALVEEDRPRWRGYSAARGGRHDGAPALGEARAHLAGQLPRPARGRAMEPGARRPDRPGTRRRNAGTLRLLMAPAAWAGRLAGRTARTAHAGDTGVSSIHPTAAAAGA

SEQ ID NO: 309793 - protein, 73 aa, Zea mays
  Clone ID: MRT4577_45591C.1.pep
DLLQLQMNELPNNQRFSCAVKLPPYNCPTLCWMFWCRVAYQSFCARLVVVHTVVRCIVPLVTMVVSPCRPVSS

SEQ ID NO: 309794 - protein, 251 aa, Zea mays
  unsure (1)..(251): unsure at all Xaa locations
  Clone ID: MRT4577_45592C.1.pep
MAEVETFLFTSESVNEGHPDKLCDQISDAVLDACLAEDPDSKVACETCTKTNMVMVFGEITTKANVDYEKIVRDTCRGIGFVSNDVGLDADHCKVLVNIEQQSPDIAQGVHGHFTKRPEEIGAGDQGHMFGYATDETPEFMPLSHVLATKLGARLTEVRKNATCPWLRPDGKTQVTVEYHNDNGAMVPIRVHTVLISTQHDETVTNDEIAADLKEHVIKPVIPEQYLDENTXFHLNPSGRFVIGGPHGDAG

SEQ ID NO: 309795 - protein, 184 aa, Zea mays
  Clone ID: MRT4577_45593C.1.pep
MQIFGKTLTGKTITLEGESSDPIDKGKAKIQDKEGIPPDQKGFIFAGKKLEDGRTLADYKIQKEPTLHLGLRLRGGAKKRKKKTYPKPKKIKHKHKKGKLSGLQFYKGDDPTGKGTRLRKEGPNTEGGGGVFMANHFDRHYWGKGGLTYVYNQKAKLLAPICFIRQPIKHSEVGYSNCISFKSA

SEQ ID NO: 309796 - protein, 184 aa, Zea mays
  Clone ID: MRT4577_45594C.1.pep
MATEVKQTYFSWSQGESTERDGPQRVSVSQTLDHGSISFGRFELESLSWEKWSVFTNDRRNEEFGKFNGLVAQKKAYFEEYYKKIRELKASQQQNQQTELILEYSGDGSDSSQTAEEEQGADLETPTGSGAAVDVYVEEVPCETTSEHGLQCYNDQGNENFDTEFSSSNLSSSGGFLQQTDHDV

SEQ ID NO: 309797 - protein, 100 aa, Zea mays
  unsure (1)..(100): unsure at all Xaa locations
  Clone ID: MRT4577_45595C.1.pep
MATEVKQTYFSWSQGESTERDGPQGVSVSQTLDHGSISFGRFELESLSWEKWSVFTNDRRNEEFGKFNGLVAQKKAYFEEYYKXIRDLKGSQQQNQQTEL

SEQ ID NO: 309798 - protein, 127 aa, Zea mays
  Clone ID: MRT4577_45596C.1.pep
RCEWWTGQCDESSCRNDAEGRPMRIYTVIYYAKVGSFGAHIRATRRVGQHYEKTISSADGKTISRAMIISHYYYYYLTMSQRRIPATYPPPITTNHQVSTTITITLPTTTYPYGLQPNTTLYQYTMK

SEQ ID NO: 309799 - protein, 138 aa, Zea mays
  unsure (1)..(138): unsure at all Xaa locations
  Clone ID: MRT4577_45597C.1.pep
MATEVKQTYFSWSQGESTERDGPQGVSVSQTLDHGSISFGRFELESLSWEKWSVFTNDRRNEEFGKFNGLVAQKKAYFEEYYKKIRELKASQQQNQQTELILEYSGDGXSDXSQTAEEEQGXADLETPXGSGAAVDVY

SEQ ID NO: 309800 - protein, 571 aa, Zea mays
  Clone ID: MRT4577_45598C.1.pep
MATEVKQTYFSWSQGESTERDGPQGVSVSQTLDHGSISFGRFELESLSWEKWSVFTNDRRNEEFGKFNGLVAQKKAYFEEYYKKIRELKASQQQNQQTELILEYSGDGSDSSQTAEEEQGADLETPTGSGAAVDVYVEEVPCETTSEHGLQCYNDQGNENFDTEFSSSNLSSSGGFLQQTDHDVRVPVRGDNSTSKLYAAPQNASSVHDGTRKTYEAARTPRRIIEKDSRLRHSPKIIPKSVKALSQSAMDYTFASERPGSVKPNTTTSQKAKPVQRPNAASQKTSASTERSKLTGLRRPSSAGAQRPSTGERHAIARENSQLPVVVSTPRRPSTAERRPVTRDRAEKQANVTTPRRPSTSERLPIKRETAAKHNDISAVRRPSTGERRAFTRDGVLRTDVKTPSKARATVAHPMSEMTTVGNTRKAITPNAARSSKLETKSNNYRLKGPSALDSHSTRSNRMDLQVSGKQKSSSVNLPPRKIFSSTAGEPSVGTISRSKKKEGVQATVQSRASTSKRTTPLQTGNLKARGPNPPAPPPPPRRPSRTTTKPSAGASSIGGRKPKASAPQWH

SEQ ID NO: 309801 - protein, 66 aa, Zea mays
  unsure (1)..(66): unsure at all Xaa locations
  Clone ID: MRT4577_45599C.1.pep
MYIHTWQGSMSAPLFNTRSFKIAYVPNGKGYAEIVCPHRQSQGGESDRDXDKGRRIEEEEEESSDE

SEQ ID NO: 309802 - protein, 104 aa, Zea mays
  Clone ID: MRT4577_4559C.1.pep
MAWRGAASRSIIAAVRARAASPSSTAASRLRSTAPLPAPSRLRSTAPLPAPSRRSVPAFAFATARPLAAMSGSPAAAVVKLTGHAATSVRACCELSQGQNGKDG

SEQ ID NO: 309803 - protein, 72 aa, Zea mays
  Clone ID: MRT4577_455C.1.pep
RSSTLTGLKILIPLRCTHKPGAQRTYGLRFSFQPADHVQSHTFLRGQIHPSAVRSVVCTKFPVRGSTHGGQP

SEQ ID NO: 309804 - protein, 211 aa, Zea mays
  Clone ID: MRT4577_45600C.1.pep
KSCSSCPRLISSQELEFFRPHIEIKRDRQTGEVFEVLDGLMFKDGFLYKKVALSSLIYWGIQPTETELLKFSSSPSNRASADDLDWLSGMYGSKKRNLPAERDMKSSSSKIKSSKASDLKGSTSTENYDDNDEFNLHDLVLYGRKDFGVIIAVEKDGFRILKGGPEGSAVTVRKQDIKKGCVDKMFTAVDHHKKTISINDTVNVVEGPFQG

SEQ ID NO: 309805 - protein, 73 aa, Zea mays
  Clone ID: MRT4577_45601C.1.pep
GLPRLNTCVITSFRDLYRLNSQLISGTIKTSFRLSRHWHVAVALGMSLLPWAGRPVSDGGQDFLVRDFLFFSP

SEQ ID NO: 309806 - protein, 104 aa, Zea mays
  Clone ID: MRT4577_45602C.1.pep
LDLYFPLLTASPCYSSRRGDENQTWSSLSPQVLVGPLDRDNGDHLYHVLHPYNCRVLTAVIPSRFSRVLKDKRIRRCVELGITYNDSRILHRSAPDDTATTEAE

SEQ ID NO: 309807 - protein, 106 aa, Zea mays
  Clone ID: MRT4577_45603C.1.pep
HPYSAVISCHHEDNRTTRPQASHRVLKYYSTRSMFTPKRIILAGKYYGIPSSTYWERGLLPFVLQTEECADAIGGGGLHVAGRRGRHHHYGVLGRGESFRADAEAR

SEQ ID NO: 309808 - protein, 50 aa, Zea mays
  Clone ID: MRT4577_45604C.1.pep
LVHKVYCRASLARVDMASDPNVYVGFLWPHGWRALSPCKALLRKWRRARE

SEQ ID NO: 309809 - protein, 125 aa, Zea mays
  Clone ID: MRT4577_45605C.1.pep
NEHRYSSVARWDFPVRLRLEGVPVHAWNKDVAAQIIGSHCAIHVLDEKTMPRKRTRTFDLWAWSEDPSKENENDICGKVCASRGWGEAFFFFPPPPPPNTPTHPTLHPPTQKTTPPPPPPPPFPP

SEQ ID NO: 309810 - protein, 75 aa, Zea mays
  Clone ID: MRT4577_45606C.1.pep
SNSNSSRYLANQTYKTRESPELVKDWRSRWFLIREEPPELVIEEEEQPEVFAGRSRQEPRNKRNSSQPARKDPGR

SEQ ID NO: 309811 - protein, 55 aa, Zea mays
  Clone ID: MRT4577_45607C.1.pep
NFEVRRWHVVPKLLLPSGFTTDREENVFKDVDAMFKGAIVGARRFYNRLLCDVVH

SEQ ID NO: 309812 - protein, 89 aa, Zea mays
  Clone ID: MRT4577_45608C.1.pep
PAWVIKAIDRIRRNFLWQGRKEGKGGHCLLAWSNVTRPKEMGALGISDLWNLGWALRVRWPSLQKTDHLKPRSEFSIKVCCSAEIVCCS

SEQ ID NO: 309813 - protein, 84 aa, Zea mays
  Clone ID: MRT4577_45609C.1.pep
PDSTDIVGWVSSVLNGTDKIEAVCDPALMEKVFGTVKMEKVRKVLSVALRCAAREVSQRPSMTAVVKELTNARPASASSSAYWQ

SEQ ID NO: 309814 - protein, 99 aa, Zea mays
  Clone ID: MRT4577_4560C.1.pep
GGPPPPFLGPGFSPFPPPPRGGPPLLGHPHHSLHPSFPTSQPLSRGRHSFLVPYKEVKSSPFPPKALVASESHLSCSFELLRLGGFFSLSLVLVIKTPL

SEQ ID NO: 309815 - protein, 164 aa, Zea mays
  Clone ID: MRT4577_45610C.1.pep
LPEDVVDKTRMDGGRHSGRPNCVGSDDVTRDHCCIHLAPSMTPLEPRASCGTVASRTLGGAACSPALGVPPPLTRLGAPGTPQLARTWPRRRLPSESRSRHHHVTDLGIAAATPDRGTAATARLGLGATATGQGSVVARALGQLPPSHAPESRPASRDPIAHRS

SEQ ID NO: 309816 - protein, 68 aa, Zea mays
  Clone ID: MRT4577_45611C.1.pep
MGGRTHARSTKESSVVNLVLTGVHVVFILFIIVMGFAHGDARNLSRPADPAHSPGGFFPHGAAGVFNG

SEQ ID NO: 309817 - protein, 94 aa, Zea mays
  Clone ID: MRT4577_45612C.1.pep
NPFCPLESFLEKDPLPLRFFHPGSLSGPEIFFLMPPGHGGGPLPPVSRNRAPMIEIFNLVGGSGGFPPLNLIWPPLCPLRDREPGKPSWKFSWA

SEQ ID NO: 309818 - protein, 140 aa, Zea mays
  unsure (1)..(140): unsure at all Xaa locations
  Clone ID: MRT4577_45613C.1.pep
MADDYAFGHVIRHWDLIPLSVHMCLXIGVLRYFVSKVMRSPTTXRLPTEVSIRYADXIIRKRNLTTKAQDIPGSXFQERKVYYATEENGXLHVPQEYAEKGHADMVSDPHMVMDMMNNNLSMIAPXTLTYVCANVFCSGF

SEQ ID NO: 309819 - protein, 78 aa, Zea mays
  Clone ID: MRT4577_45614C.1.pep
PTRPKKKKKKKKKKKKKKKKKRSKRITNLNRHKVNLEGLSTSIASMELTECRFIVVQSRKHSSVSYRTVPLRMPLFLL

SEQ ID NO: 309820 - protein, 95 aa, Zea mays
  Clone ID: MRT4577_45615C.1.pep
QALARRAGARTIAPPPERRTARSARPAAAQRPSPSILGASPALGLGSVGSHAASWGWPVWVFFLAFTLATVLCLSPRVSPRVRPRVRPRVRPRVH

SEQ ID NO: 309821 - protein, 72 aa, Zea mays
  Clone ID: MRT4577_45616C.1.pep
HASAHASAHASAAAVRTNKRRWRPHEWPTPDRAHGWGVAWSCTNTTHYRDRLKLTDRRGQSWGLLLLSERII

SEQ ID NO: 309822 - protein, 89 aa, Zea mays
  Clone ID: MRT4577_45617C.1.pep
FLENSASPLQKRKNLYLLGVGFTRIGANSKSRQLADRCLEIQGDWGRAKSLKKAIKNKIAKNGLIGKGIATTGVGLLVGGIAPAVPRKK

SEQ ID NO: 309823 - protein, 198 aa, Zea mays
  unsure (1)..(198): unsure at all Xaa locations
  Clone ID: MRT4577_45618C.1.pep
LEAGRDRCSSVDVHLMIVEAGHIVPDFIKASAGIVSVXHCDATSTIHLSRIIPPITSLAGKARVVLNPATPLTDSDYAHDVVDLTLIIXVNPGIGGHSFIESRVXRIAELXMLCAKNVVNSCIEADGGVAPINAYEVIETDTDAIDVGSADIENPDYAEVIIRIXTIQRPLAVGAYGAGRVLIYSVQGYQRCDLHTCV

SEQ ID NO: 309824 - protein, 57 aa, Zea mays
  Clone ID: MRT4577_45619C.1.pep
ERPPGQVQAFFFFFFFFLAATGPRSNCHSKNFITGNPNLSDDSQPALPSSGNPSACV

SEQ ID NO: 309825 - protein, 90 aa, Zea mays
  unsure (1)..(90): unsure at all Xaa locations
  Clone ID: MRT4577_4561C.1.pep
WRRYRQQEYDDSSLMXCAEEQEEXGSXKMPPLSSPSMVLXPQHXLQIXSXLPLPLPPEVLNDSXATSDLHDGXEXACXSHGXSCVLGDYR

SEQ ID NO: 309826 - protein, 68 aa, Zea mays
  Clone ID: MRT4577_45620C.1.pep
ANTMGVNKMWKGVSASKHGNRSKPLARATHSRCQNSHNQGSRIQPKTYDLQLIHCLHLSCIYILYSLL

SEQ ID NO: 309827 - protein, 99 aa, Zea mays
  Clone ID: MRT4577_45621C.1.pep
MAPKILVILAFLGAASPAVLAAFDVIEMLVDKPTYSTFLKLLQDTRDASEANRIRPATVLVDPDKLAKPLASLPGDKVQTEVENHDLLHYTSTPSSWTR

SEQ ID NO: 309828 - protein, 142 aa, Zea mays
  Clone ID: MRT4577_45622C.1.pep
VSVVQDLDLYGILEETARRGMSFDELLTIPEQDEWVYSDGKSTTCVAFILAMYKAAGIFDPLADPIQVTEFTIRDAYTLKLFESNQTRLPSWCNPEEGKLDFCQILGEYRMELPGYNPIYPYPNMNQNCPSLPPNYERPFKC

SEQ ID NO: 309829 - protein, 493 aa, Zea mays
  unsure (1)..(493): unsure at all Xaa locations
  Clone ID: MRT4577_45623C.1.pep
FCRMAQFHLLDPFYDESHRGRLLSEGQDLATLRSRTHNGFQDMVFDDRYTNYLRRAGLDVISYQLRRGLPTIDSAAITALVDRWRPETHSFHLPFGEMTVTLEDTQKILGLDVGGRAVTGQCDPDGWRARVEAFLGRELPAEGVERTAGVGITWLRQSFGVCPADADEATVQFYCRAWILHMFGCVLFPDATGDCASWMYIPCLTDWDTAGHYSWGSAVLSFLYRQLCEACRRTSSSSSIGGCVYLLQIWMWFRIPVGRPRVFQPRPWPWMIYGNARLRPTYAYIWDQVAAPFARAKRAYMEYVNEFDTLSASSVTWQPYNAPEYAGMIFSVVCSSEDEIYMMQCPLVCFWCVEWHLPHRVQRQFGRNQLWPVEDVPTSKELHKFDRRKQKKITDFRQHHMIGTRVRLVXLRQQWTAEDYADIDSSEDEETEYDLSTRLGTQVEAAPILDRVGNTLRRSVEDIDRQLLTVGDSSMRSFLQAPTWSCCSLWLQD

SEQ ID NO: 309830 - protein, 72 aa, Zea mays
  Clone ID: MRT4577_45624C.1.pep
CTSNGEQRHEYMTTNIFNNPPCGDVIMLESGDLQLAWELGAGGEKRHLVVASYSGKLSVDQSSHHDTHLTAL

SEQ ID NO: 309831 - protein, 90 aa, Zea mays
  Clone ID: MRT4577_45625C.1.pep
TKKTMHFYWFTTIPSFFIGSDSRGRPPGGPPTGQNPRDGVTGGWGFPNPTLTGQIKAYPPKGGNFFGQQQQSPRLKETPGWRPGPNKTLF

SEQ ID NO: 309832 - protein, 598 aa, Zea mays
  unsure (1)..(598): unsure at all Xaa locations
  Clone ID: MRT4577_45626C.1.pep
DLATLRSRTHNGFLDMVFDDRYTNYLRRAGLDVISYQLRRGLPTIDSAAITALVDRYCYDFIKIFLNHXLFYTIFFNYXWRPETHSFHLPFGEMTVTLEDAQKILGLNVGGRAVTGQCDSDGWRARVEAFLGRELPAEGVERTAGVGITWLRQSFGVCPADADEATVQFYCRAWILHMFGCVLFPDATGDCASWMYIPCLTDWDTAGQYSWGSAVLSFLYRQLCEACRRTSSSSSIGGCVYLLQIWMWFRIPVGRPRVFQPRPWPWMIHGNDRLRPTYAYIWDQVAAPFARAKRAYMEYVNEFDTLSASSVTWQPYNAPEYAGMIFSVVCSSEDELYMMQCPLVCFWCVEWHLPHRVQRQFGRNQLWPVEDVPTSKELHKFDRRKQKKITDFRQHHLILVNDWESGAENVYSNDELHNNSDYRRYQAWYQGATRCKLRQQWTAEDYADIDSSDDEETEYDLTTRLGTQVEAAPILDRVGNTLRRSVEDIDRQLLTTGDSSMRSFLQRLSRRLRGAAARCGCRTTVAHDVHVPSCTDTATPSTGLGAGFDYDHDEIGPSQLEGAPSTQPLQPQDRRRHRSPQRYTPGTDALGKGKTRRR

SEQ ID NO: 309833 - protein, 64 aa, Zea mays
  unsure (1)..(64): unsure at all Xaa locations
  Clone ID: MRT4577_45627C.1.pep
GXPFFFFFKGMDLETXSVTALYIDKRVDVYKHYSVDCKRSDKRDLSEYGYLAXXVPFNEFPPYD

SEQ ID NO: 309834 - protein, 223 aa, Zea mays
  Clone ID: MRT4577_45628C.1.pep
MGNTPSCIPLAPAGGGASAAATSAATEVIHADGTVTRLARPVRASELMLHHPGRFVCDSSRLAVGCRVPGVAAAELLRPRHAYFLLPMDMLYSVLTDDEMAALSESHAASSSSSSSWKRITTSTRQGRRSATGGRGRGHAKDEACSSDGARVYPMLGLLETAGLQGADSTKKHEVRAGPAGKSSGGGLRRHRSYSWQPVLDTIEEVPFRDAADGRFTSGAPQE

SEQ ID NO: 309835 - protein, 330 aa, Zea mays
  Clone ID: MRT4577_45629C.1.pep
TRRTIPGLENCLMLRPAYAVEYDYLPAYQCSRSLMTKKMSGLFFSGQINGTTGYEEAAAQGIISGINAARHSDGKSLIILERESSYIGTLIDDLVTKDLREPYRMLTSRSEHRLLLRSDNADSRLTPLGREIGLIDDRRWELYQSKQARIKQEKERLRSTKVPGGEFAAEVTAVSNQPVKDSSTLEAILKKPHVQYKLLDEHGCGNENLSRIEKECVEIDIKYEGFIARQQSQLHQIVNQEHRKLPEDLDYHSMTNLSLEAREKLSKVRPQTIGQASRIGGVSPADMTVLLIWMESNRRMATHRRQREQLGSVAVESDGSSEEAVQASTA

SEQ ID NO: 309836 - protein, 88 aa, Zea mays
  Clone ID: MRT4577_4562C.1.pep
VNRITSTNQGLSRNQRKTVSRYFHTQQTSRLHTVESQRCKRGEQTKKKSAPLKAHYPHKKPDAPGALKNKTTREHEKIAGPPQEWPTL

SEQ ID NO: 309837 - protein, 292 aa, Zea mays
  unsure (1)..(292): unsure at all Xaa locations
  Clone ID: MRT4577_45630C.1.pep
MAMASTATAAASLRLAFPLLSSPASSSSSSNTLRFPLRRRSAARPIAVSAFKKLSEASPVPIPQEPTEPLLVDEDALPPKAGVYGVYDPAGELQFVGISRNVRASIEGHRRKVPANLCASVKVAVSDEETPDRSALNNAWKSWMQEHIAATGKAPPGNVAGNHTWVXVAPQRPPDLRLTPGRHVQLTVPLEQLIDRLVKENRVVAFIKGSRSAPQCGFSQRVVGILEAHAADFVTVDVLDEEHNHGLRETLKAYSSWPTFPQVFVGGELVGGCDIVSSMAERGELAALLIQK

SEQ ID NO: 309838 - protein, 133 aa, Zea mays
  unsure (1)..(133): unsure at all Xaa locations
  Clone ID: MRT4577_45631C.1.pep
RRARXSFTVRASLRKATGTAAVAMAASALLAGGAMAQEVLLGAGDGGLVFEPSQFSVKAGETITFMNNAGFPHNVVFDEDDVPIGVDATKISQEEYLNAPGETYSVTLTVPGTHGFYCEPHQXAGMVGKITVN

SEQ ID NO: 309839 - protein, 87 aa, Zea mays
  unsure (1)..(87): unsure at all Xaa locations
  Clone ID: MRT4577_45632C.1.pep
DEICKYLFXEVVLDAKNDCNRANHPEGDVPNLHVIKLMQSFKFNEYVTETLYWQYYYWYLTNDGIDHLLNYLNLPSEIVPATLNKSV

SEQ ID NO: 309840 - protein, 127 aa, Zea mays
  Clone ID: MRT4577_45633C.1.pep
FIVRASLRKATGTGVVAMAASALLAGGAMAHEVLLGASDGGLVFEPSQFTVKAGDTITFKNNACWPHNVVFYEDEVPSGVYATKISQEEYLNAPGETYSVTLTVPGTYGYYCEPHQGARMVGKITVN

SEQ ID NO: 309841 - protein, 173 aa, Zea mays
  Clone ID: MRT4577_45634C.1.pep
LLHACVLDGKAGPVPVPVGVMVLFPCPMLVTGSPEVIVPLDDTVAPDEAEEAGDVIVAKVLPSKSEGTVGLGAASSPVRLRWDPDSVITDTDELLWPAARPASHTSERRAPFMIVTGVGHSPTLFRRRFQETRVRSSVKAVWATVQLCREKKMKNEELANESGGCTAPFQPGR

SEQ ID NO: 309842 - protein, 30 aa, Zea mays
  unsure (1)..(30): unsure at all Xaa locations
  Clone ID: MRT4577_45635C.1.pep
MGLRAGFLLLPPXPXLLXLLLVLLISPARG

SEQ ID NO: 309843 - protein, 72 aa, Zea mays
  Clone ID: MRT4577_45636C.1.pep
SFHELFRSIMTCPTNSWSYLCLVPLKLYDEVCCLLKHWWLLSATGFGSIFGGWAYLAFVIWLPGTSFTFLQC

SEQ ID NO: 309844 - protein, 83 aa, Zea mays
  Clone ID: MRT4577_45637C.1.pep
GVDDAIELPLDAQIHLYYASTINDARPALRILAGSPFSGRLVTTNGDINASKWWAGIMPRLLNGMCRQDSPKSLQAHHQRIFQ

SEQ ID NO: 309845 - protein, 56 aa, Zea mays
  Clone ID: MRT4577_45638C.1.pep
LVHIDAPGVKRAQEYIRRPVAADTFGLCCYGDHAYAMFVGSETFGASTTGHTTGVF

SEQ ID NO: 309846 - protein, 184 aa, Zea mays
  Clone ID: MRT4577_45639C.1.pep
MGLLSQRVERSEMEPGDHIYTWRAGYTYSHHGIYVGGSKVVHFTRKREAGGAGLDSAIAVSSLLLSRGSDECPSFPDCGFQLPDSGVVLTCVDCFLGGGALHRFEYGVPAAAFLAKVRGGTSTTARADPGDAAVRRAMHLLRHGFGDYDVFENNCEDFALYCKTGLLLLPAAAAGGGVGRSGQA

SEQ ID NO: 309847 - protein, 232 aa, Zea mays
  unsure (1)..(232): unsure at all Xaa locations
  Clone ID: MRT4577_4563C.1.pep
AGRSSKRGKKISKKKKKKKKNKKIKKKKKKIPPFFGTHQQRKKQNLAPKRAPKKFCPLMPLGVSAKGAKGTIFPQCPQTPKVSLFPPDQPQGGVSGGENPIFQPEGNQKGIGAGILPLTPLVPQKWCTLLHKIPWGDFLAKKFGGQQLPKLGEKNLVAYSQKKNFFPFNQLRGLNPASFLQQQTPFNQLGGANPQKFFPLNQWGRFNSPGFFRXQKLPPFAHLTKGNPGGFL

SEQ ID NO: 309848 - protein, 94 aa, Zea mays
  Clone ID: MRT4577_45640C.1.pep
MDGGFPALLDPTALSLALPVTQGPQGLNKLSKDDYLAICLAALAGTRGSGLVVKAAAGFGRKETGGINKQSWCPPQPAPAAHEEALRFRCAVCG

SEQ ID NO: 309849 - protein, 113 aa, Zea mays
  Clone ID: MRT4577_45641C.1.pep
MSVVYYSVRYLIRLFFSFSLVHSSMCRFAVSSTRVGLAWLCMEKKKKKKKKKKKKKKKKKKKKKKKKKKKKKKKKKKKKKKNQKKKKKKKKKKKKKGGPPLKKKKFNPPGRKK

SEQ ID NO: 309850 - protein, 86 aa, Zea mays
  Clone ID: MRT4577_45642C.1.pep
GGICHGESPQGQVPRVWENEKKHKGIECIMKSNKGRKMKEKKKKKKKKKEKKKKKKKKKKKKKKKKKKKKKKNKKKKKKKKKSLYS

SEQ ID NO: 309851 - protein, 329 aa, Zea mays
  unsure (1)..(329): unsure at all Xaa locations
  Clone ID: MRT4577_45644C.1.pep
FPTAPDHKSHQANPNPSAMSSSPAALRFYCHQCDRTVSLAPPASPDADVFCPRCGGGFVEELPPNPSPAPPAXPPSLPRPPSTSATXSDLSAFFGPASPEPLAPGLFDPSNFLHDHFGGLLSGGATIQIVLEGGPPPPGLNFADYFVGSSGLEQLIQQLAENDPNRYGTPPAAKAAVASLPDVAVSADMMQADGGAQCAVCMDDFHLGAAAKQLPCKHVFHKDCIVPWLDLHSSCPVCRFELPTDDPDYNHTHQQHGDSSAPAPPSPAPAVSSPRVAERRFRISLPWPLRAAFGAAQAESSNPTDDDVPPSGSDAAGGPQSQTGYDDLD

SEQ ID NO: 309852 - protein, 98 aa, Zea mays
  Clone ID: MRT4577_45645C.1.pep
DSFPGERTSEHDPIMADTHLRNSISANGLFRKGVRRSAAKHPKPRRTPKPELLAPTLPASNPEGQVNNNHVGSSLSVRRCVRVINVHRRLLLLLFFAL

SEQ ID NO: 309853 - protein, 42 aa, Zea mays
  Clone ID: MRT4577_45646C.1.pep
IHSFRKQFQHNEFEPDAGILRYSYVDILWCLINFEHFQHLEL

SEQ ID NO: 309854 - protein, 82 aa, Zea mays
  Clone ID: MRT4577_45647C.1.pep
QLPGARGCRSCDRWRGRRSRRDLLELATTDPWYVWLAGGYRCNNHMAFVKSSCLGSIFCLLVLEVEHINALVGVYFPNCLCS

SEQ ID NO: 309855 - protein, 211 aa, Zea mays
  unsure (1)..(211): unsure at all Xaa locations
  Clone ID: MRT4577_45648C.1.pep
LQLICAELTICWKDRVRIALGVAQXLAHLHHDHAPQVLHRDLKSSNVLLLGDELEPRGTGFGIDRVVGEMAYQSCMSSDLNYKCYVAPEQSCTKKPTHLMDVYSFGVILLELVTAAQRPASDGESVDVVKWVRRRANVTDGVSQILDPSIASAATQKGMQATLELALRCTSVVPDRRPAMDEVARSLQAISFASVHPQTPMLTKSPGTLEP

SEQ ID NO: 309856 - protein, 103 aa, Zea mays
  Clone ID: MRT4577_45649C.1.pep
PPGAGRESPKPPPPGTRLLGKGAPPQKEMANQPTPGQPRGKGPCNSRGNPSTQKKGFWPGLKYPHFPGSLEPFFRFGGPPQCISLIPKNPHSLAQFLKTFKFF

SEQ ID NO: 309857 - protein, 199 aa, Zea mays
  Clone ID: MRT4577_4564C.1.pep
MRCYTYSVIFIKSLYDTQILLTARFSPQLNSQKRPLDDLISFLDPLLGAEDHDAEIILLGAADLGAKVLAPLSIIGKRGTDVVELGTMNHGAEHLLLSRNCRPPPHLEDRRAVRRGGPSQATTSTPIAASKTSRHRYDLKPSSMPIKVLPQRASLASRYVSHPSTSKGRDDSSSSFRDDMRTRVIWSSCWLRVLNRTSS

SEQ ID NO: 309858 - protein, 102 aa, Zea mays
  Clone ID: MRT4577_45650C.1.pep
HVLTLLRQSIRRQALYIPLTLLTSLPAVLSKSLVHTSLGVSPLSLSLSTSQVRGVHVRESPESRFRRSSTNRRYEVDVGPSSDSLTGHTPASHTAMESACSS

SEQ ID NO: 309859 - protein, 182 aa, Zea mays
  unsure (1)..(182): unsure at all Xaa locations
  Clone ID: MRT4577_45651C.1.pep
DRQRLRGCARGRLLPHSPSARCANSNFSLTIADVDNSWLDSPLKAEDRHTGEVIGTGRHRKSSPRLYILDTLRLPSYHASTARVLAASGPTLSFAQWHHRLCHLCGSCLSTLIXSHDVXPTHVESSFHCKGCHLGKQVQLPYFTSDSHSAKPFDLIHSDVWXAPFVSKGGHKYYVIFIDDHF

SEQ ID NO: 309860 - protein, 111 aa, Zea mays
  Clone ID: MRT4577_45652C.1.pep
PTRPPTRTGSGSGSFLDPAPAVAAVPGIKRRSSATNTVLSDSDDQSSNSYGSGSSDLEGTRTGDDDDCDDDVMTSDYTSYDFVAAGYCNMQGGSPKRMRSSYRQHAAQSGT

SEQ ID NO: 309861 - protein, 56 aa, Zea mays
  Clone ID: MRT4577_45653C.1.pep
MVVKSGGGGGGAEEGAAGAAVRRWVEAGGGRLGLDGGLATELLVLFSDLNDPLWSA

SEQ ID NO: 309862 - protein, 68 aa, Zea mays
  Clone ID: MRT4577_45654C.1.pep
SHGYPVPQHIIIYRYLPPEIHFARLFSRITRYGRPRPIASDFVHRVTKVSPHIANTSQTIVALILYCS

SEQ ID NO: 309863 - protein, 94 aa, Zea mays
  Clone ID: MRT4577_45655C.1.pep
RQQTHLFHLLNAKLPMPSFFRQGQENTTRKFGAMPTMTIQDSDISFVFNGFSGWTPRTAYRLPALPKIGNETGDVVKLAADFGAKHISWLHPLS

SEQ ID NO: 309864 - protein, 49 aa, Zea mays
  Clone ID: MRT4577_45656C.1.pep
LVARRADAEVKVEVGASERPLPLDTIACGLAVTETQTQTAGPTRRPTRE

SEQ ID NO: 309865 - protein, 88 aa, Zea mays
  Clone ID: MRT4577_45657C.1.pep
QTSQTSILRTPCMASPCPLDVEASHILPVLLSEGKQGSSRFIWMFCWICFSSTAKLPTSALIACELHKLPVDALSFRHIQNWRKCKPK

SEQ ID NO: 309866 - protein, 200 aa, Zea mays
  unsure (1)..(200): unsure at all Xaa locations
  Clone ID: MRT4577_45658C.1.pep
MSSSTPPSHGATTPTQYTDKEDGGHYHCNHPHHYYEERNKNVQKPHQSMVSQVYNPSFFKVANPGPLGLISFALTTFVLGLYQCGAXFPDPTPLVASALTKPSLXLAVFFGGIAQFFAGLMEFRVGNTFGTTVHCSYGAFWLAFAMFFVPDLAIKDAYKGDDRAYSFALGIFLILWCFLTLIFFIXALKTNIAILVVLGF

SEQ ID NO: 309867 - protein, 46 aa, Zea mays
  Clone ID: MRT4577_45659C.1.pep
HRFSRTSSTSAPGQQSRGRHIEEEQVTSSDISIMISSSSTHGQYSR

SEQ ID NO: 309868 - protein, 74 aa, Zea mays
  Clone ID: MRT4577_4565C.1.pep
PAGTTSSHHYAVDEDGIAAHSDYDDSSVPHMESQLSAAVPWIYGFWGYDSSRYEVAALPSGRWGRKTFLDQVII

SEQ ID NO: 309869 - protein, 189 aa, Zea mays
  Clone ID: MRT4577_45660C.1.pep
LPGFGQLAMVDPAAYLKKEQLFYFSPLVVAKAPTNRQQQLLQQMGPALPRLVGANPGASWQQGFPFNQRNLWNFGGAPQQGPRFFNPLAGGNPWGGAFPQRQQLVPSTRFFLITPVLGGRPPLVGGALFWFPFGGAPPPAPPFGVGFPRNNQFFVWGFSQKKKKKKKKKKKKKKKKKKQQKKKKKTPPP

SEQ ID NO: 309870 - protein, 760 aa, Zea mays
  Clone ID: MRT4577_45661C.1.pep
MAHEREPLLQQRQTGVGNACGAKDSSSAPAPSAAALPSLARTVLKFLMWAVFLTWAAGIFLYPTKPVQAVFRKWVGLTRDSMFGIAGGIFLTFSAPILIIALLAYVYISFFPSEHVVEKRKLRSLSFRLWTFPVLVDGPFGVVSAVEFIGIVLFIVFVVYSMTYYAVEAVSLVSKFDIPSMTESELILDVIGLRLGAVGLFCMLFLFLPVARGSVLLRLIDIPFEHATRYHVWLGHLTMALFTLHGLFYVISWSMQGRLREELRQWKEIGVANLPGVISLAAGLLMWVTSLHPVRKRFFELFFYTHQLYVVFVVFLAFHVGDFIFSICAGAVFLFMLDRFLRFWQSRAKVDIISAACRPCGTVELVFSKPASLHYNALSFIFIQVRELSFLQWHPFSVSSSPMDGRYHMSVLIKVLGTWTEKLRSIITDVQEKNGGDSELQCGRMTACVEGPYGHESPYHLMYENLVLVAGGIGISPFLAILSDIIHRIEEGKQCMPKNVLVLWSVKKSKELSLLSAVDAQTISSSVSDRLQLDIQAFVTQEPHPPLEDGIVGDDQKVPGMFVKNGTAMSGLVGTGDNFWAAMYFLASTLGFLLAYALVQVYYVKPHNVVAWWYLGLLFMLCMVAGVALPGGLVVLLWHLSEKQRLEDDKWDASQSPRAEQTGPLAAAGGGDDDAAPSVSLAALRTTRYGCRPNFEAEFAAFAERAGDAADVGVLVCGPQGLQTSVARECRARNLRRGGLGAAKSRSGAVFHFNSHSFDL

SEQ ID NO: 309871 - protein, 45 aa, Zea mays
  Clone ID: MRT4577_45662C.1.pep
KIAQLLGPNEVDRRIHDLSTSLPFLSATAIITRGNFGVLYFHTTS

SEQ ID NO: 309872 - protein, 60 aa, Zea mays
  Clone ID: MRT4577_45663C.1.pep
RIPGLTQSSNPFFIAPRHLEGTVRNRVRGVSLNTNPTCNSERVNTCGGLWGDNAGNHCTG

SEQ ID NO: 309873 - protein, 45 aa, Zea mays
  unsure (1)..(45): unsure at all Xaa locations
  Clone ID: MRT4577_45664C.1.pep
MFSMLGLLVQAIVTAKGPIKNFXDQVAHHVAKNTWAYATKLVPGK

SEQ ID NO: 309874 - protein, 156 aa, Zea mays
  Clone ID: MRT4577_45665C.1.pep
KRAWIYHGGARCVNALHDIAESPHRLQRVTIFSGTIVNSLEYLYSDGDGQQHTAGPWGGCGGTGRKIHLAPEEFIVEVTGTFHPCAWDRTIPSVVSSLTLVTSTGKTHGPFGTQLGAAFQVPVQSDSRIVGFFAHGDNYIEAIGAYVKKLTESSNR

SEQ ID NO: 309875 - protein, 118 aa, Zea mays
  unsure (1)..(118): unsure at all Xaa locations
  Clone ID: MRT4577_45666C.1.pep
MRQSPYHAHHPLLQPERHGTTERTSRPNDKDRIREGILYQLMNLQPSLLEVHHQHTPEKPLVMPLNIMHLDDHLILXDDRGRGTLVGDIPPAPSPTGRGLPLYANDTRAGNVLVEDAL

SEQ ID NO: 309876 - protein, 366 aa, Zea mays
  unsure (1)..(366): unsure at all Xaa locations
  Clone ID: MRT4577_45667C.1.pep
MRLGSTRTKMLGSQGSGDLWVEMKGFFMASQTSVGSSAAEVEVHRENVETATTSPTVISPDEAVVARIGPWGGVGNALHDIAERPHRLHRVTISSGTIVNSLEYLYSDGDGQRHTTGPSGGCGGTXERFILPLKSVXGTFNGHANVITSLTFVTNARSYGPFGRGRGTSFHIPVQGNGCIVGFFGRSGRYLNAIGVYTAPKPEPKAGGDEAVVARIGPWGGVGNALHDIAERPHRLHRVTIFSGTIVNSLEYLYSDGDGQQHTTGPWGGCGGTGRKIHLAPEEFIVEVTGTFHPCAWDRTIPSVVSSLTLVTSTGKTHGPFGTQLGAAFQVPVQSDSRIVGFFAHGDNYIEAIGAYVKKLTESSNR

SEQ ID NO: 309877 - protein, 276 aa, Zea mays
  Clone ID: MRT4577_45668C.1.pep
MHIQIRVASMMIELGPSEFLTGVSGTSGPFKNLTNVVTSLTFVTNTRSYGPFGKGRGTPFHIQTQNNGRIVGFFGRSGQYLYAIGVYTNQDARVARIGRPLGGDEGVLHGITDLSGQQRSRGGGPSGECGDSDDEPNGDFAKFGPWGGDGGQPQDIGTLPCRLDRIKISSGLIIDSIEFSYAGPDSQYRTAGPWGGHGGDNSSFQLAGSEFLTGVSGSIGTFNGHANVITSLTFVTNARSYGPFGRGRGTSFHIPVQGNGCLVGFFGRSGRYPTAS

SEQ ID NO: 309878 - protein, 231 aa, Zea mays
  Clone ID: MRT4577_45669C.1.pep
MAASSVSLGAPDGTSTRSVSTRRRNPNQKQLGNKMCAVLIYFSYNLCLCFFLLVCSVLVLFDSNWFLLLAQGGDEAVVARIGPWGGVGNALHDIAERPHRLHRVTIFSGTIVNSLEYLYSDGDGQQHTTGPWGGCGGTGRKIHLAPEEFIVEVTGTFHPCAWDRTIPSVVSSLTLVTSTGKTHGPFGTQLGAAFQVPVQSDSRIVGFFAHGDNYIEAIGAYVKKLTESSNR

SEQ ID NO: 309879 - protein, 193 aa, Zea mays
  unsure (1)..(193): unsure at all Xaa locations
  Clone ID: MRT4577_4566C.1.pep
EDEIEQQVKEXLAQXVIQKSHSPFASPVLLVKKKDHTWRFCVDYRYLNAMTXKSKYPVPVFDQLMDELASAQWFSKLDLKAGYHQIRLSPGEEPKTAFQTHLGHFEFRVMSFGLTGAPNTFLSAMNDTLAPVLRRCALVFFDDILVYSPTLEAHLQHLSTVLQLLQQDQWKVKLSKCAFAQTSVSYLGHIISG

SEQ ID NO: 309880 - protein, 128 aa, Zea mays
  unsure (1)..(128): unsure at all Xaa locations
  Clone ID: MRT4577_45670C.1.pep
MAMGDRFVARCDGALLPCALLLSAPTATKAYDSLYPNXEPSLXWYIMHXTPDAYVPVVTMFNYQQFHHIPAPDCQIEGSXSEMEAICPLRGAQTTEQGDCSKFKSRPPHCCKNDPXIVDLLPGTPIHM

SEQ ID NO: 309881 - protein, 114 aa, Zea mays
  Clone ID: MRT4577_45671C.1.pep
EYEILPRHGEIWAVYKNWEAVWTAQDFEKCEYELVEILGHTDSSIQVQLLRKVDGYKMVFMSYRAEGSVMTIRNDEYPKFSHQIPCFRLTHEKGGKLRGYLELDPLSVPEEFLD

SEQ ID NO: 309882 - protein, 97 aa, Zea mays
  unsure (1)..(97): unsure at all Xaa locations
  Clone ID: MRT4577_45672C.1.pep
HTKVPTGAGVIFCLLMLIIISASATTATIFPKCSHAAIAFPYYTEPLTSEVYDXVNPILXIFHDPXAITSSILPLSPSFXQQYSILLHLGPLGHLLT

SEQ ID NO: 309883 - protein, 64 aa, Zea mays
  Clone ID: MRT4577_45673C.1.pep
KLHPYHMDGEVLYSMGFRRLGTNLYARHDMKTSLLLMYNYIVNMIGLQMNLMWLMTVGGVHKTS

SEQ ID NO: 309884 - protein, 103 aa, Zea mays
  Clone ID: MRT4577_45674C.1.pep
YIQPQDFFSEILPRAVRGHCVHACIFTGYWEDAGTINSFFDANLGLIVLPSKVDHYEQKTPLLTVPRYLPDTQFDYCPTIDASIYERLPLTECHIELPAIGGC

SEQ ID NO: 309885 - protein, 124 aa, Zea mays
  unsure (1)..(124): unsure at all Xaa locations
  Clone ID: MRT4577_45675C.1.pep
MSTTIDGLATSSQEGNAHNDEKKEXNSDEXNSEGEMKPKRVSFKKRAVTVGYKFRHSLWRKSKMKNDNHVASIDDIRDGQELEIVERFXECLIDEGLXLPEHHDDYHMMFXRFLKARKFXXDKA

SEQ ID NO: 309886 - protein, 64 aa, Zea mays
  Clone ID: MRT4577_45676C.1.pep
QENKKSRINSRNRSKERQKPQNYKISNRYTKLNQHANDRSRYQAKSIRNTNQAHKQAHKSDQRS

SEQ ID NO: 309887 - protein, 105 aa, Zea mays
  unsure (1)..(105): unsure at all Xaa locations
  Clone ID: MRT4577_45677C.1.pep
VHACATTWADAWASSRASSSYGYSGNGLDAAGSPSYALNMYLQVQNQMEGIWYFQGLAVPTAXDPCTHACCCTIQITPLAAQRRLADDGTALVLVGLLTDEDVPP

SEQ ID NO: 309888 - protein, 73 aa, Zea mays
  Clone ID: MRT4577_45678C.1.pep
VLFWGWYWGQRIGGLYFFRYLWDLLIFLERVVRDRRFWLSGWFFVWALVFNRNGNDIFFLWYLKRVFTGGLEF

SEQ ID NO: 309889 - protein, 100 aa, Zea mays
  Clone ID: MRT4577_45679C.1.pep
LQFVDVVKNEIDKGHVYPTHEPTHHYEFSSENSDLHASFQFDNNEFKLLNVTVQKLHLNNGVFILNKLEWVDSVPKQHFDTPKECVYPQESNSSIFSFLH

SEQ ID NO: 309890 - protein, 166 aa, Zea mays
  Clone ID: MRT4577_4567C.1.pep
GGRLFMEREKQMNNHLLPQEIEEFLGNPALATRSFFSGGGGGLHLSSNPTERSTRDQKLLKKEQKKHLVLSRRSENKEIVNLFKIIMYLQNTGSIHPISSYPGCDMVPKGELDSSNKISFLNKNPFWGLFNLFHDRNSGRYTLHHYFESEEIFEEMADLFTLSITE

SEQ ID NO: 309891 - protein, 112 aa, Zea mays
  unsure (1)..(112): unsure at all Xaa locations
  Clone ID: MRT4577_45680C.1.pep
EAEXSNSSXVQXXVXMVLLFCCXNILLRRAVPNGIHCLSLRLTGVYSLNAHDCAXERLSLLLVVLVLHSLRELPRVLFPWCVPFALLLKMVVLSALSFPCLVILGSCLSFAC

SEQ ID NO: 309892 - protein, 87 aa, Zea mays
  Clone ID: MRT4577_45681C.1.pep
ALGWLNGLYGFMAQFVTSNPREAFANYRDLDMGQNVIGSDGLSSYWSARAWAERYFMGNYRRLAAVKAAVDPTDYFRNEQSIPPLPK

SEQ ID NO: 309893 - protein, 135 aa, Zea mays
  unsure (1)..(135): unsure at all Xaa locations
  Clone ID: MRT4577_45682C.1.pep
PPGEAIGQDLLGNPGLVAPDSTVSFKRALWXWKTPQPPKTFCPEVFPGQWGPSPHKVAPGRLPGYGVLPKIIKGGLKWGPGPPAFVSNRMGFFKRFLDMFGFKYGDNLGCFDQSPFGNPIFSPPHKTPSYSVPPQ

SEQ ID NO: 309894 - protein, 102 aa, Zea mays
  Clone ID: MRT4577_45683C.1.pep
LCFVCRLVCWLLLCSLFLLFHAAFPLSRLLSEGSLVFPLALACGLSPCCMPGHVLSWPHGQWSPLASPRWSCLILASWNAPPLLYTPPPRVWCVRGRTKIRV

SEQ ID NO: 309895 - protein, 61 aa, Zea mays
  Clone ID: MRT4577_45684C.1.pep
ECSGTNGAQCSPMKPMYAPVPCYKEIGLRSFSVGVVPTNSPALCLSPYNPLYKQNTGLSSL

SEQ ID NO: 309896 - protein, 58 aa, Zea mays
  Clone ID: MRT4577_45685C.1.pep
NRGGPPPPPHCGLALPPVPGKKKKKKKKKKKKKKKKKKKKKKKKKKKKKKKKKKKNTH

SEQ ID NO: 309897 - protein, 175 aa, Zea mays
  unsure (1)..(175): unsure at all Xaa locations
  Clone ID: MRT4577_45686C.1.pep
PGGAGKVDFREGPALEHLEEFLSDPAXTTAAFDFGFVDPDKPKYVRYPKQLFPLGGVGGPLVYPNPLWAGIGGFSPEGPLKDLDRRFSPPLREINVRLFQDPPVEVCQLPIPEGVPISPRVVLCDNDPPPKMVNHSPVVSVIFQRPAPPRGQIKKQGFGGFFFLFFFGPALGGLS

SEQ ID NO: 309898 - protein, 43 aa, Zea mays
  Clone ID: MRT4577_45687C.1.pep
STRNDYPAAKRVKLDSVRVLRQISNNRKCTSSRSSDTEENVKR

SEQ ID NO: 309899 - protein, 107 aa, Zea mays
  unsure (1)..(107): unsure at all Xaa locations
  Clone ID: MRT4577_45688C.1.pep
LYLTKLRSEHNKICFVPITSSEXINIIQTSTNLLYSXRSTFFYSLYQITYSKKPSNNPLSLPIQDFYIIXXLGTQPICPQYTFFIKPFLLFTLSSTSLSSLNKFFYF

SEQ ID NO: 309900 - protein, 105 aa, Zea mays
  unsure (1)..(105): unsure at all Xaa locations
  Clone ID: MRT4577_45689C.1.pep
TGPPASSRQGLVSRAAGVNAGGRITMRRTVKTVPRSIXYGPDRHKYRGPLPEQTPPYLTGEFPGDYGWDTADLSADPETFARNREVEVIHSRWSMLGALGCVFAE

SEQ ID NO: 309901 - protein, 51 aa, Zea mays
  Clone ID: MRT4577_4568C.1.pep
RLTTTHFTYRRRHLQSSRGLNHLRNLERQAKRGPSSLGDEKGSMWPKHWEH

SEQ ID NO: 309902 - protein, 51 aa, Zea mays
  Clone ID: MRT4577_45690C.1.pep
ILVASQPLLSDFVQHIGCTGDDSMSSSPMTARQVHWRGTGPGRAVGASDHV

SEQ ID NO: 309903 - protein, 155 aa, Zea mays
  unsure (1)..(155): unsure at all Xaa locations
  Clone ID: MRT4577_45691C.1.pep
AAWAPFFARGGGQPAPPRYGPVSGPGGPPPPLSVGGGGLPPPPSPLGGGAGSPPPPRADGGGPPPPPLPLFAPRRLPPPVVRPASALVCHPLLAAPGGPPXPPPSPAGRCLPVSPGASFPGSPRPASXGPPGGGGCSRAVWGRGLFPSFAPLLLS

SEQ ID NO: 309904 - protein, 136 aa, Zea mays
  Clone ID: MRT4577_45692C.1.pep
RTPVYPSEAQERLPFVSAPDEWVLTGDPDKDDATRSSHKYETSPDITLFKALISLCTNESVAAKGALELCMTQMKVVLSSQQLPLDASMDNIARAYHATETYVQALSYAKNLFKKLVGSNDLSSGSERSKEVDDVS

SEQ ID NO: 309905 - protein, 102 aa, Zea mays
  Clone ID: MRT4577_45693C.1.pep
KGKKGKGSQGETNGGKKGFSKQAGYKRRARGLTLGAFKKNEPVTCARGKELKPQNGGPPGLLSWSPLNRAPLFRPPFFFFFFFFFFFFFFFYYFFFFFFFFF

SEQ ID NO: 309906 - protein, 213 aa, Zea mays
  unsure (1)..(213): unsure at all Xaa locations
  Clone ID: MRT4577_45694C.1.pep
MLLTKPQLSSSLLASTPLFNPTSNPNHARPIAASPSPRRRLRISAASTAVSPGATALSRVDVLSEALPFIQRFKGKTVVVKYGGAAMKSPELQSSVIRDLVLLSCVGLRPILVHGGGPEINSWLLRVGVEPQFRNGLRVTDALTMEVVEMVLVGKVNKNLVSLINLAGGTAVGLCGKDARLITARPSPNAAALGFVGEVXRVDATVLHPIIAS

SEQ ID NO: 309907 - protein, 132 aa, Zea mays
  Clone ID: MRT4577_45695C.1.pep
GSSTKQQTPRSIKSELATPSKQHSEHCSGVGMMMMGGAGKMVRAALHAFIRHYHPAASLLALPFSAVSLLSRTHPAVLGASHLLSRRLRRALVAAGFPPASQLLFLLSHRLSQRACPPLPGAPFALSFLLLA

SEQ ID NO: 309908 - protein, 96 aa, Zea mays
  unsure (1)..(96): unsure at all Xaa locations
  Clone ID: MRT4577_45696C.1.pep
GLFVQYAVIKXSLNPXFMXIXXXTFALXXDFXCLFIVRWGXRLPXKANXPNLWPNLPFSXXXTGXEFFXXVXEXSGTXKXRVKXEXPXRXKFXSPX

SEQ ID NO: 309909 - protein, 78 aa, Zea mays
  Clone ID: MRT4577_45697C.1.pep
EQSFYLNPKVGKCIIVKVLKLDASMYGKSNSAMDEIIYHENGLCSLHYLKRHIGESRSCPIELTFRITEGIPYITHFM

SEQ ID NO: 309910 - protein, 80 aa, Zea mays
  Clone ID: MRT4577_45698C.1.pep
IINPSRFKKPVTANQPFKEIFKKTFFSLFGRQNRPSPRNKAVPPNPLNFYHLSNPVFFLQILKKPLLPHFLSKPPYFYPP

SEQ ID NO: 309911 - protein, 90 aa, Zea mays
  unsure (1)..(90): unsure at all Xaa locations
  Clone ID: MRT4577_45699C.1.pep
TVDYITSKTIELVLVVVAAIDAVISVHCSLTGSCRXRKQQNHELQRDSQNHHAQEHQLQPALEHSVLQQHQQQLVHMQPPHHNLQHDVHV

SEQ ID NO: 309912 - protein, 253 aa, Zea mays
  unsure (1)..(253): unsure at all Xaa locations
  Clone ID: MRT4577_4569C.1.pep
PTQLEALSRVPVLSYFSNSLYVSGMVAALTNESATSKSVYFAHCTSEMIFITHLLTEQPEKLAGPLLADTYVTLLKGRNAWYGQMLAKGELSPDMGDSIKGKGMIQAFFFCLKLLXTTSVLEYLSPASSFLNXPRQIKKSDKPXICSHPILLFYTVTMIILPFHWXGISAVGAFFELLSQPSLSVQHPEENKQVAPAELCPILKRLYRILIKRELPARDILQALRDETMNDPRERIEMAQSHAFYRPSLLGKP

SEQ ID NO: 309913 - protein, 270 aa, Zea mays
  Clone ID: MRT4577_456C.1.pep
MLDRPPRRGFAFIVPSMSMQEPTSAATQLHAAMEASLSLSSLQLAFTAVAAIAALGVAVTVTRYNRRYMGLRLPPGPPGWPVVGNLFQVAFSGKLFIHYIRELRKEYGPILTLRMGERTLVIISSAELAHEALVEKGREFASRPRENTTRNIFSSNKLTVNSAVYGPEWRSLRRNMVSGMLSTSRLREFRHARRRAMDRFVSRMRAEAAASPDGASVWVLRNARFAVFCILLDMTFGLLDLREEHIVRIDAVMKRVLLAVGVRMDDYPPF

SEQ ID NO: 309914 - protein, 379 aa, Zea mays
  unsure (1)..(379): unsure at all Xaa locations
  Clone ID: MRT4577_45700C.1.pep
QSSHKYSLPQGPKPRNFPDLSSAASSSLRKTSFVSRSSLRFRPNKDGVGCAPPRADLQARRRLCGSGGGGEAAAGGGVAPGGACAGYGGSLRFDQGHSFVESAGSILDNXAFQRFGFSTSAPQQDDKETNKHTDDGVNRSVGASTGASSEANNVPGTEKAQEAGSLDSISKSNRKRTAKRTAFSDSDSEDLDLSKEDLVKLLLEKDESLKSKDEEFKDMKDKVLRSYAEMENVLARTKRESENTKKYAIQSFSKSLLDVADNLSRASSVVKASFSKXIDSSNDSDEAVTLLKTLLEGVEMTEKQLGEVFKKFGVEKFDPLNEKFDPNRHYAIFQIPDPSKPSGTVAAVVKVGYMLHDRVLRPAEVGVTEGGPTEEEPGE

SEQ ID NO: 309915 - protein, 70 aa, Zea mays
  unsure (1)..(70): unsure at all Xaa locations
  Clone ID: MRT4577_45701C.1.pep
EYVKQDAKIIYLXECLQKTPPPVLIFCQNKADVDYIHEHLPLKEVEPVAIHGGKDQDERQNAIDSFLPHR

SEQ ID NO: 309916 - protein, 235 aa, Zea mays
  unsure (1)..(235): unsure at all Xaa locations
  Clone ID: MRT4577_45702C.1.pep
MSSEKTTKAGKYDLCQDPNIDDYAAIDNHNIGLMYLRRNLMEELIAEVDTFDEKVVGSFVRIKIPGTGQRQDIYRLVQIVGTGRSAEKYKYGKRTTDITLEILNLDKREAVTIDIISNQEFTEEECKRLRQSIKYGFIPRLTVGEVQEKARVLQTLKVNDWIESEKMRLXHLRDRASDMGYRKDLRECVEKLRLLSTPEERARRLNEELEIHADPAMDPYYESPEEQEQEIEKVA

SEQ ID NO: 309917 - protein, 45 aa, Zea mays
  Clone ID: MRT4577_45703C.1.pep
QELNTPPSMHQLDDHMILLDLASWISSKEAPVAHHACLQIRFRPV

SEQ ID NO: 309918 - protein, 616 aa, Zea mays
  Clone ID: MRT4577_45704C.1.pep
MSAIAASSAAAASNSDEEENYEEYIPVAKRRAMEAERLRQLRLSKSAPASAVSSLPMPPPPPLLPAQTSVPDAAAKPSLLVKATQLKRAAPEVTATEQRIQQEKEVIENLSDNKSLRSVREIAKGIIYTEPIQTGWKPPLRLRRMPLAKANEFRRKWHIIVDGDDIPPPARDFRDLRLPEPMLRKLRERGIVQPTPIQVQGLPVVLSGRDMIGIAFTGSGKTLVFVLPLIMVALQEESLMPIVPGEGPFGMIICPSRELAKQTYDVIEQFLIPLKEAGYPEIRHLLCIGGVDMRTQLDVLKKGVHIVVATPGRLKDLLAKKKMNLDNCRYLTLDEADRLVDLGFEDDIKEVFDHFKDQRQTLLFSATMPQKIQNFAKNALVKPVTVNVGRAGAANLDVIQEVEYVKEDARIIYLLECLQKTPPPVLIFCENKADVDYIHEYLLLKGVEAVAIHGGKDQEERQNAIDSFKTGRKDVLVATDVASKGLDFPDIQHVINYDMPAEIENYVHRIGRTGRCGKTGIATTFINKNQTETTLLDLKHLLKEAKQRIPPVLAELNDPLDDEEIIAKESGVKGCAYCGGLGHRVSDCPKLEHQKSMAIAGSRKDYFGGGGYRGEI

SEQ ID NO: 309919 - protein, 47 aa, Zea mays
  Clone ID: MRT4577_45705C.1.pep
FFVRSKFYFHTSQLYEWGDPLFIHITTTHISTAFSNIIFSPLTKHSL

SEQ ID NO: 309920 - protein, 157 aa, Zea mays
  unsure (1)..(157): unsure at all Xaa locations
  Clone ID: MRT4577_45706C.1.pep
LQVAPDPDVRRLEPAGRHARHPILASRDFFIVVPPAEKDDDEDLFKVPQCSCQALQLQEGYINSSRNAGWGAFNSCRWQVNGSGQFCGVAEMIGPVDFDRSVDYWQQDKWSGQFPXVKWHIIKDVPNNLLRHIILENNDNKPVTNSRDTQGGSIRLA

SEQ ID NO: 309921 - protein, 82 aa, Zea mays
  Clone ID: MRT4577_45707C.1.pep
TKAAESACAPRPIYCNPARVSGSTPPPKARSPSHSPDDGTFARQRRKVRGVHTANTREVGGGGDRRRCWWVAMGVGRIVEEQ

SEQ ID NO: 309922 - protein, 100 aa, Zea mays
  Clone ID: MRT4577_45708C.1.pep
PIQKMGIPLGFPFEPISQTRLLNAPLNMGGVLLAGVPGVGGFNPVFSVVLGDPSNFLAHVWSFVGVLPLFVQKDSRGVSLEDVAPRTKKVSPPVWPPPIT

SEQ ID NO: 309923 - protein, 177 aa, Zea mays
  Clone ID: MRT4577_45709C.1.pep
PAGSGQPQAKIKHAPEFFFSPKLAAAATASAASLSGAANDLLPKYGLPKGLIPDSVTSYSFDEATGAFEIHLASTCYVHFGSHLVYYERTITGKLSRGAISDLSGVQAKKLFLWVYVTGMVAHPDQGTIEFQAGFVSESLSASMFDEVRTCGSSAGAQLRGAAGVIGELGLLPVAQA

SEQ ID NO: 309924 - protein, 107 aa, Zea mays
  Clone ID: MRT4577_4570C.1.pep
ALPSLLSPSSYLPWPPPAISNGAMGASRLSTSGCTQALHDEIAPYGHEHQPYSATPSPCRPIAMNAANPGARTGTALGCARRLALAGPHLLPPQANALPDQTRICCS

SEQ ID NO: 309925 - protein, 58 aa, Zea mays
  Clone ID: MRT4577_45710C.1.pep
SSAHVYPDSTHASRVRLSPNPVTTAAGARRDGAEGRRQWQRSHHATADHSLHHPFLQV

SEQ ID NO: 309926 - protein, 169 aa, Zea mays
  Clone ID: MRT4577_45711C.1.pep
MSPLPRRRLVVLVLLAVAATASAASLSGAANDLLPKYGLPKGLIPDSVTSYSFDEATGAFEIHLASTCYVHFGSHLVYYERTITGKLSRGAISDLSGVQAKKLFLWVYVTGMVAHPDQGTIEFQAGFVSESLSASMFDEVRTCGSSAGAQLRGAAGVIGELGLLPVAQA

SEQ ID NO: 309927 - protein, 114 aa, Zea mays
  unsure (1)..(114): unsure at all Xaa locations
  Clone ID: MRT4577_45712C.1.pep
SACGSSTVQAXCRMTMLHQPPPVSRPVDVRPAGCLKRRPPGGNFNCPIWRCCSPFCLSRSRRSGCAFXPFXCDPRCWPAVPWRACXSAVLLRALLAAPSPAWCSDWADPXAALS

SEQ ID NO: 309928 - protein, 170 aa, Zea mays
  Clone ID: MRT4577_45713C.1.pep
MSPLPRRLVVLVLLAAAVAATASAASLSGAANDLLPKYGLPKGLIPDSVTSYSFDEATGAFEIHLASTCYVHFGSHLVYYERTITGKLSRGAISDLSGVQAKKLFLWVYVTGMVAHPDQGTIEFQAGFVSESLSASMFDEVRTCGSSAGAQLRGAAGVIGELGLLPVAQA

SEQ ID NO: 309929 - protein, 153 aa, Zea mays
  Clone ID: MRT4577_45714C.1.pep
RLLGSLVGVPSAFLASGGSKFQPSSLARASVLFLRGLGAVSCAPAVAVQVVLVLLRRLFLSACGVFVWLVVLLVSVGCRHGCLLALQLLCWAGRLCPEAFVVGLLALVLFRVLSVGLSLRVVLLLWSPVSVGCGVCFSSAPFLSPRVCFFFGF

SEQ ID NO: 309930 - protein, 171 aa, Zea mays
  Clone ID: MRT4577_45715C.1.pep
MSPLPRRRLVVLVLLAAAVAATASAASLSGAANDLLPKYGLPKGLIPDSVTSYSFDEATGAFEIHLASTCYVHFGSHLVYYERTITGKLSRGAISDLSGVQAKKLFLWVYVTGMVAHPDQGTIEFQAGFVSESLSASMFDEVRTCGSSAGAQLRGAAGVIGELGLLPVAQA

SEQ ID NO: 309931 - protein, 170 aa, Zea mays
  Clone ID: MRT4577_45716C.1.pep
MSPLPRRLVVLVLLAAAAAATASAASLSGAANDLLPKYGLPKGLIPDSVTSYSFDEATGAFEIHLASTCYVHFGSHLVYYERTITGKLSRGAISDLSGVQAKKLFLWVYVTGMVAHPDQGTIEFQAGFVSESLSASMFDEVRTCGSSAGAQLRGAAGVIGELGLLPVAQA

SEQ ID NO: 309932 - protein, 131 aa, Zea mays
  unsure (1)..(131): unsure at all Xaa locations
  Clone ID: MRT4577_45717C.1.pep
MAAILAGVGVIATVGKGFSGRRWCNDIVVWKNTKTADGVPHDVALKRSHWYGKTSLSRLVGTLIAMKPVYAVLXLCSREVIIMRQKNSNIPWRQMTNELLHLHVYEVLQRXRDPYLEXSDYYLIPYYVYDE

SEQ ID NO: 309933 - protein, 169 aa, Zea mays; identical to SEQ ID NO: 309926
  Clone ID: MRT4577_45718C.1.pep

SEQ ID NO: 309934 - protein, 86 aa, Zea mays
  unsure (1)..(86): unsure at all Xaa locations
  Clone ID: MRT4577_45719C.1.pep
GRRLRRRRVPSFLSLRILPFRSLPTRRMGIRSLTVILRIRILITSLRRTPLGVGRSPLLMLYIXRVRFLGRLTLDPVRNSEKKPNG

SEQ ID NO: 309935 - protein, 145 aa, Zea mays
  Clone ID: MRT4577_4571C.1.pep
HGVNFFFVTFGEFFEFFFRSLMNQAVVRFFGCFKTAASLPPFFLVQLGRPIYTGGVGGAFFGVPKVPRAQGFCPRFFFFPARGPLPEFPPLFLPQDRRFPQGLLPGRGFFPPRQGRRINLCLVCSSVLKMDRCFFPPPKIFWWAP

SEQ ID NO: 309936 - protein, 129 aa, Zea mays
  unsure (1)..(129): unsure at all Xaa locations
  Clone ID: MRT4577_45720C.1.pep
PRSVSRXSASXSSSLSWXAPFLPGSGLCWSAVXRXRCCCCCCFLAVAAXAAPPXGGLXPXXLPPPPXAXAGWWWXAXWLXXWLGXPXVXGXXGPVXXWXXGAXPALRGCGAARLCLVRXFSEKRGXGGG

SEQ ID NO: 309937 - protein, 68 aa, Zea mays
  Clone ID: MRT4577_45721C.1.pep
DFPLQTPRAPNPSGMRPPGPFMRPGSMGLPRFYPAGRARGIPHRFAGHESYQNMGPQSMNVQVTQHRT

SEQ ID NO: 309938 - protein, 99 aa, Zea mays
  unsure (1)..(99): unsure at all Xaa locations
  Clone ID: MRT4577_45722C.1.pep
SILVERLASQLADQLSYELATERSSCQKNESARLLLERQNKELRSXLHEMEWAVKSKFKSTIAALEAMIALLEELRAKREQEVTVLKKALDEETRAHDA

SEQ ID NO: 309939 - protein, 119 aa, Zea mays
  Clone ID: MRT4577_45723C.1.pep
APTRVALSHRCLTLVKKNSSPKSPLQVEFSEFATNVGPILLLFPYAKGRSPQIMVNEKNSKRQPAQPVVNRPRHQRGLSWEALVKRCPFLFFNSSPGVFLFFGKKKKLVSCIAEAKKPV

SEQ ID NO: 309940 - protein, 54 aa, Zea mays
  Clone ID: MRT4577_45724C.1.pep
RTHSGSSVKGPSVAVYITSPAWIARLFNVEPCSFLQTCIRCLIHPTDTVMFKGL

SEQ ID NO: 309941 - protein, 75 aa, Zea mays
  Clone ID: MRT4577_45725C.1.pep
QKSIERMKQRIVQHAVSIGVCSAGGRLAYRSSPVLLLKLKWHLGWCVSRILLLRPRAASRGSGTHGCRRPSPPCT

SEQ ID NO: 309942 - protein, 233 aa, Zea mays
  unsure (1)..(233): unsure at all Xaa locations
  Clone ID: MRT4577_45726C.1.pep
MVRLRTMALLLVAVTAAAVAGLAAANFRDDCDIPWEPQNARFTSDGNGLSMALVSNSSGCMLRTKKQYVYGTVSTLIQXSSQATXGRHCHHVLRILXGDNHDEIDFEFLGNVSGQPYTFHTNIYANGVGNKEIQFKPWFDPTTGYHNYTISWSPCMIVWYVDSVPIRVFRNYQQSYGVAYPTSRPMHAYSSIWAAEDWATQGGRVKTDWSKAPFVATTGHHLDICDCPGGYAC

SEQ ID NO: 309943 - protein, 103 aa, Zea mays
  unsure (1)..(103): unsure at all Xaa locations
  Clone ID: MRT4577_45727C.1.pep
DSAALWDVMDLGGQCGVPGETTVGRTXAAQPHYEPXDYCMFRLCVGDWEHDWRVDAHDXDFMEHXLSTVDRKHQPWLILPTHRELCYSSNAWYTGEGSFLTAP

SEQ ID NO: 309944 - protein, 117 aa, Zea mays
  unsure (1)..(117): unsure at all Xaa locations
  Clone ID: MRT4577_45728C.1.pep
QGEEHCILFSGPCTASQFPTVTRVTHHKPLRALHVILHVSAARAAHRXADKTCNRRMLVVRGAQQRACSPARPPRXVCEACLFAFVVCVPSGRPQWRPGLXXWSSGSAKQVNGASTP

SEQ ID NO: 309945 - protein, 67 aa, Zea mays
  Clone ID: MRT4577_45729C.1.pep
SRPAGPGTAFVGCALNVTIVSTRDTENARFYGGPVKASDILLGSMAKPPAASPLYKALSELFDKIGK

SEQ ID NO: 309946 - protein, 126 aa, Zea mays
  unsure (1)..(126): unsure at all Xaa locations
  Clone ID: MRT4577_4572C.1.pep
VARNRSSTKFNIQGLVIIGGFEAYTGGLXLMHGRTQFDVLCIPFLVIPATGSNNVPGSDFSVGADTALNTICTICARIKQSAAGTKRRVFIIETMGGYCGYLATMAGLAAGADAAYIFEEPXTIRD

SEQ ID NO: 309947 - protein, 63 aa, Zea mays
  Clone ID: MRT4577_45730C.1.pep
MADSKATSAVTLRTRKFMTNRLLARKQFVLEVIHPGRASGCKAVLKERLALACEVKDPVTIFG

SEQ ID NO: 309948 - protein, 68 aa, Zea mays
  Clone ID: MRT4577_45731C.1.pep
SLPDASSVPDMGQPLYPPEYAYTTVVGGRVVVEPNHVAGPEPLVLGLADRVNAPVYPVGARVPDAEEE

SEQ ID NO: 309949 - protein, 210 aa, Zea mays
  Clone ID: MRT4577_45732C.1.pep
CAIYHQFVLEDDSYDAEVERAFLDGMAKVMVDRKAQFVDKKLEFLKSVGYGENEITTKVIPVINSTKDLLLERFDYLLERGVEYKILCRILRVFPKVLNQSKDMLNEKLNYLTEELGYSLEYLGCFPAFLCFDLENRVKPRYTMLWWLQEHGLLRKKLAPATVLANSEKRFISTLYLVHPAVPKLWLECFSSRIHMDYYLKNINQHPDNI

SEQ ID NO: 309950 - protein, 109 aa, Zea mays
  unsure (1)..(109): unsure at all Xaa locations
  Clone ID: MRT4577_45733C.1.pep
GGKVDNGIKYAVFAEKSLRLLGKNQYTFNVESGFTKTEIKHWVELFFGVKVVAVNSHRLPGKGRRMGPILGHTMHYRRMIITLQXGYSIPLLLFKLKGILKEVFLVFSQ

SEQ ID NO: 309951 - protein, 65 aa, Zea mays
  Clone ID: MRT4577_45734C.1.pep
SSAQTLTKPSIFSLNPCLTKNLIISCIPISTMDSISQIIISPSILLMSFIYVLTIIIPILPLYTL

SEQ ID NO: 309952 - protein, 121 aa, Zea mays
  Clone ID: MRT4577_45735C.1.pep
VEVTSQLMTLVNNISIRISNREFRPGHCTHYLKHSGLLMNVFSNAFNPDMSPRRYAHVDVDFRNSERDWYQFKWQTTSPPWSKLCAMPGRVTREVYGQMTVATSVNKGIYYFIQFLEQLHD

SEQ ID NO: 309953 - protein, 71 aa, Zea mays
  Clone ID: MRT4577_45736C.1.pep
AAARATSPPSRTVAATHSLSFIDMNARVGRNVSITNKEGVQEADRPDEGYYIRSGIVVVLKNATIKDGTVI

SEQ ID NO: 309954 - protein, 48 aa, Zea mays
  Clone ID: MRT4577_45737C.1.pep
APPRTIHGGPPPLLKGFCSNPSARFMARQSVAPSVVAYALIGFRLSVT

SEQ ID NO: 309955 - protein, 505 aa, Zea mays
  unsure (1)..(505): unsure at all Xaa locations
  Clone ID: MRT4577_45738C.1.pep
MQFSSVLPLEGKACMSPVRRGSGGYGSERMRINCCSIRRNKALRRMCFSARGAVSSTQCVLTSDAGPDTLXRPNXSFRRNYADPNEVAAVILGGGTGTQLFPLTSTRATPAVPIGGCYRLIDIPMSNCFNSGINKIFVMTQFNSASLNRHIHRTYLGGGINFTDGSVEVLAATQMPGEAAGWFQGTADAVRKFIWVLXGDQLYRMDYMELVQKHVDDNADITLSCAPVGESRASDYGLVKFDSSGRVIQFSEKPKGAALEEMKVDTSFLNFAIDSPAEYPYIASMGVYVFKRDVLLDLLKSRYAELHDFGSEILPKALHEHNVQAYVFTDYWEDIGTIRSFFDANMALCEQPPKFEFYDPKAPFFTSPRYLPPTKSDKCRIKDAIISHGCFLRECAIEHSIVGVRSRLNSGCELKNTMMMGADLYETEDEISRLLAEGKVPIGVGENTKISNCIIDMXCQGWKERLHNKQRGRPRSXDRPDEGYYIRSGIVVVLKNATIKDGTVI

SEQ ID NO: 309956 - protein, 520 aa, Zea mays
  unsure (1)..(520): unsure at all Xaa locations
  Clone ID: MRT4577_45739C.1.pep
MQFSSVLPLEGKACMSPVRRGSGGYGSERMRINCCSIRRNKALRRMCFSARGAVSSTQCVLTSDAGPDTLXRPNXSFRRNYADPNEVAAVILGGGTGTQLFPLTSTRATPAVPIGGCYRLIDIPMSNCFNSGINKIFVMTQFNSASLNRHIHRTYLGGGINFTDGSVEVLAATQMPGEAAGWFQGTADAVRKFIWVLEDYYKHKAIEHILILSGDQLYRMDYMELVQKHVDDNADITLSCAPVGESRASDYGLVKFDSSGRVIQFSEKPKGAALEEMKVDTSFLNFAIDSPAEYPYIASMGVYVFKRDVLLDLLKSRYAELHDFGSEILPKALHEHNVQAYVFTDYWEDIGTIRSFFDANMALCEQPPKFEFYDPKTPFFTSPRYLPPTKSDKCRIKDAIISHGCFLRECAIEHSIVGVRSRLNSGCELKNTMMMGADLYETEDEISRLLAEGKVPIGVGENTKISNCIIDMXCQGWKERLHNKQRGRPRSXDRPDEGYYIRSGIVVVLKNATIKDGTVI

SEQ ID NO: 309957 - protein, 110 aa, Zea mays
  Clone ID: MRT4577_45740C.1.pep
LNRCPQDEGIMSLDHKIISLLASRNGHLADQSCIQPVEVMIFLITGKCSSLSAFLARCEGVLSSDQVGINVNSCAVIDHWRRGRVDRRGRLVLQISWMPLLSLTAKVLEK

SEQ ID NO: 309958 - protein, 147 aa, Zea mays
  unsure (1)..(147): unsure at all Xaa locations
  Clone ID: MRT4577_45741C.1.pep
GNHDLPDLSMVVPKFRPGLLPKQTRSCPTMTLVLDLDEXHTIYVRCRPYLKEFLDRVASVFETIIFTASQSIYAEQLLNVLDPKRKLFRHRVYRESCVYVEGNYMKDLTVLGRDLTRVMIVDNSPHAFGFQLDNGIPIESWFDDPND

SEQ ID NO: 309959 - protein, 449 aa, Zea mays
  Clone ID: MRT4577_45742C.1.pep
MQTRKKGAAKNAVGYHANPKTSRPSRRATQSTVAEKKVSDLITSSSKKQRPVGVTSKKHSKGGRKLLVSCDTTDAGNDAPQVPPSVFPDLQAQHSDGVADDRPNDSIFSPTYHHHKEGGVNNLSKGLEEQTTHVHGSKEASLKSGSNLACNTHDGINDHSGTLKLQSAGQSTLLEVDEYSELGNLSSEVSAIYLAMQQSKLECIDEQSQDSTSTEGYGEAEETEEYDDFDPYSFIKDLPDLSMVVPKFRPVLLPKQTRSCPTMTLVLDLDETLVHSTLEHCEDADFTFPVHFNFREHTIYVRCRPYLKEFLDRVASVFETIIFTASQSIYAEQLLNVLDPKRKLFRHRVYRESCVYVEGNYMKDLTVLGRDLTRVMIVDNSPQAFGFQLDNGIPIESWFDDPNDMELLKLLPFLESLVGVEDVRPYIARKFNLREKVATASSLTIDMQM

SEQ ID NO: 309960 - protein, 98 aa, Zea mays
  unsure (1)..(98): unsure at all Xaa locations
  Clone ID: MRT4577_45743C.1.pep
GTDNXNRXMDPISRLVARLRDEGEHMLALLQLCVEHRAMAGEKGRLVKEVLKQLCKNEESFRQQLDDLEEHLFLCFMTINKARSMVMNFIAGAEQNSS

SEQ ID NO: 309961 - protein, 91 aa, Zea mays
  Clone ID: MRT4577_45744C.1.pep
FFLFLTRLDVRGESTFPEDVSSDEEGNAYVTDAKGSKIWKVGPDGALLGVIKNATFVQRPGLRHNLVGLNGIVYHPNGYLLVVHTFGGDFF

SEQ ID NO: 309962 - protein, 51 aa, Zea mays
  Clone ID: MRT4577_45745C.1.pep
FFFFFFFFFFFFFFFFFFFFLKTFSCHNMIGLQSLHASNTSHVPPLNMKPE

SEQ ID NO: 309963 - protein, 224 aa, Zea mays
  Clone ID: MRT4577_45746C.1.pep
MESAVEGKGRTASDGTDSESNSFDKRDDMSEDELVVLGGKIDDSVDNVNIDESEDNRSKQGVKRRRKRVKMKATAETERSKKAKSKVWDAFTKVTVPDTTEKGKMISKAKCNYCKKLYSYIQGSTTSHLSRHMRICAVYLKHVAKQQDQSLLNFAPSTAESTFSTGGRTLDDYRSSLRPSMVEALVCSSSWIRGTHDGSMIYVEEDDEDNVENIMFPKSLVESN

SEQ ID NO: 309964 - protein, 111 aa, Zea mays
  Clone ID: MRT4577_45747C.1.pep
SNHSMRLLSVCINLCISWWCWFSPRKSTMWSSPFLFSLGLCRRSSSSALLVAGIDLMLALRAIDLKPLVEVDRISAQKDTVMIDAKEPLVPNIAEVHQAGTQKCPLAELAV

SEQ ID NO: 309965 - protein, 530 aa, Zea mays
  Clone ID: MRT4577_45748C.1.pep
MDSSELHILALQRVKQVEPENATKIVAPSGRRKVRTIIYILLLKEKRREEKIDKRLAVMDSSELHILALQRVKQVEPENASKILGCILLEEPDNQDMLQLAYGNDAEVHAKISHAKAMLDAIVACCSSSPAFGYHYWPPVPNKAQAEEYALQPQHYSGGGCYYASENALIYNGGGPPRSRLSSTRRPCHYFIKGICKNGQSCHYSHHRQEAQVCSGALEKLELEIIELLKSRHGQPLSIASLPTLYGDRYGKSLKADGYLTESKRHGKAGYSLSRLISRLSKITTIERPHGQHYVVLAEDAGRYKELMSRGERGGDMGSSSHQVYLTFPSESTFMEEDVANYFGLYGSVRDVRIPWQEKRMFGFVSFHNPETVNTILTMRIPHFIGESRVLVKRYIEKSKCIERYRPRALRRFVGMDMDMDMNDDDDDYDDQPPARMVMRNQQRLLATEKRLIELERKRFFAMPPQQYQHVYFDCSIGDDDGQGQPPPRHLPLIITQPARASSSSSYDDDDDDIQLPESPFTSSAVPMLM

SEQ ID NO: 309966 - protein, 51 aa, Zea mays
  Clone ID: MRT4577_45749C.1.pep
RGGAERRWECGSSRLDARVQRIGNSRRFASSFGRTWQINQTVEMPCAHDLG

SEQ ID NO: 309967 - protein, 149 aa, Zea mays
  unsure (1)..(149): unsure at all Xaa locations
  Clone ID: MRT4577_4574C.1.pep
SFYHSIGQGISAVGAFFELLSQPSLSVQHPEENKQVAPAELCPILKRLYRILIKRXCYVSSLLSIFGEFTVCLRSECRSADEVRSDHFSLIHFIGFILLSXRYRPDLCXELPARDILQALRDETMNDPRERIEMAQSHAFYRPSLLGKP

SEQ ID NO: 309968 - protein, 113 aa, Zea mays
  Clone ID: MRT4577_45750C.1.pep
YLILYVDDDDDYDDQPPARMVMRNQQRLLATEKRLIELERKRFFAMPPQQYQHVYFDCSIGDDDGQGQPPPRHLPLIITQPARASSSSSYDDDDDDIQLPESPFTSSAVPMLM

SEQ ID NO: 309969 - protein, 79 aa, Zea mays
  Clone ID: MRT4577_45751C.1.pep
NEIVMDSDVAETMLGLLHRLLSVSSPPHRPMVLRPPQGTTLRAVTAYYGGTTSRAAALTTSPSPSPRPTWCLRTFLIAV

SEQ ID NO: 309970 - protein, 136 aa, Zea mays
  Clone ID: MRT4577_45752C.1.pep
MARTKQTARKSTGGKAPRKQLATKAARKSAPAAGGVKKPHRYKPGTVALREIRRYQKSTELLIRKLPFQRLVREIAQDFKTDLRFQSSAIGALQEASEAYLVGLFEDTNLAAIHAKRVTIQPKDIALARRLRGERS

SEQ ID NO: 309971 - protein, 84 aa, Zea mays
  Clone ID: MRT4577_45753C.1.pep
KKKKKKKKKKKKKKKKKKKKKKKKKKKKKKKKCLSQKKKKKKKVLSFPRAGRSKRANFWKISLKLAARLNLPFRGPNSPFRESF

SEQ ID NO: 309972 - protein, 116 aa, Zea mays
  unsure (1)..(116): unsure at all Xaa locations
  Clone ID: MRT4577_45754C.1.pep
WSQPAGQNPDGPPPPPTXKPNIPAPNHPRPKXKPPXKLGGTPEPKPTKKPRPNGPQPLISXPFPXPWCPNPPPGLAPGTCGPRPVGGFGPPPPGPAPLGPFYSAIIREPAPARPQP

SEQ ID NO: 309973 - protein, 52 aa, Zea mays
  Clone ID: MRT4577_45755C.1.pep
PPFLPPITYLLTIQFKSLTLATILQTASIVTLAEGLLASGCRSRCLAGSQKS

SEQ ID NO: 309974 - protein, 151 aa, Zea mays
  unsure (1)..(151): unsure at all Xaa locations
  Clone ID: MRT4577_45756C.1.pep
MASLYVGDLAETVDEPQLHALFSQVAPVATVRVCRDILSGVSLGYGYVNFYSRQEATRALEALNFTPLIGKYIRVMFSNRDPSLRKSGRANLFVKNLEPNIDSKNLYEIFSSFGAILSCKVATDSAGQSKGYXFVQYETEESAEAAINGLN

SEQ ID NO: 309975 - protein, 344 aa, Zea mays
  unsure (1)..(344): unsure at all Xaa locations
  Clone ID: MRT4577_45757C.1.pep
MRMSCNGCRVLRKGCSDNCAIRPCLQWIRSPDAQGNATVFLAKFYGRAGLINLITAGPEHVRPXVYHQCTYIYICTYLKDPYTHFSRILLPCVCSKPPCCDLMISVYNFIYXAIFRSLLYEACGRMLNPVYGSVGLLWSGNWQLCQAAVESVLRGIPIAQPPPAATAVPPLRSCDIRHVARREAGRGAVDAGLHRMANSSRGQFKRSGAQHRSADSGSIELVFSQPSAASSMLVDIRQAQPLNWAPRHPSPHQYYSASHDDDAVRESDDSKASVDTVDVSHVSQSEPAEPPRESNERADGLDLTLGLPPTAHKVEPSSDVDDDQTSHRGEPTKLGLAMADSRAR

SEQ ID NO: 309976 - protein, 110 aa, Zea mays
  Clone ID: MRT4577_45758C.1.pep
RPRGTTYILDSLILIMGPRYITLCIFLVLVLHGDTTLAETCRQFVKWDPFCFSAMCKASCFIEGKSSDGSYVKGHRCESNGYHAVCVCFLCKNLVSNDMRIYLLLFLSVI

SEQ ID NO: 309977 - protein, 82 aa, Zea mays
  Clone ID: MRT4577_45759C.1.pep
MRAHLAVVLLLLLPLLPGRALSCSSSSCCWCQGREGGADVALMGLARDGSADTGNLSTSENGRFSYGAASSSRTRALLDDFY

SEQ ID NO: 309978 - protein, 63 aa, Zea mays
  Clone ID: MRT4577_4575C.1.pep
TFWGAGLLHLNGGGDYENISGIRYKKKFWGASKGEKGGTPVLVNHLWEFWGPAHKILIGSNNF

SEQ ID NO: 309979 - protein, 177 aa, Zea mays
  Clone ID: MRT4577_45760C.1.pep
AARVERLAAIPETELPSGRKRRSCTTDEHSLARAERLKTERNGGMCNVFNVPIFDKVFNIPIDTAVANLSSIGISLGGNGGEIAASIDVISKLYSNRVEPDGGKDGIAITATEPETIEEEDEIDPLMLHNLCGEIMEELLDIDFVNNSNWQKSGDSVSLSKPSHSGRVKLGRPRKGK

SEQ ID NO: 309980 - protein, 124 aa, Zea mays
  Clone ID: MRT4577_45761C.1.pep
FPKPVFLPKVSRKGESFNQLFRPMLTGNPPLRKVPGVAFLLGFNLNVPLVPLFTGGLTPGLLLLLPGKANLVGWVPPFLFSKKKLNHPPNFKRAVLPALKLVPPPKGKGGAKRPENKPYFQIWE

SEQ ID NO: 309981 - protein, 238 aa, Zea mays
  unsure (1)..(238): unsure at all Xaa locations
  Clone ID: MRT4577_45762C.1.pep
MEENQEKFAPESSGGDGGGSVRTICVFCGSRPGNRPSFSAAALDLGKQLVERQMNLVYGGGSGGLMGLVSKAVYEVPSAVLPDDVSAVILGEVKVVRVREVQVVRMMHQPKAVMAQHADALAALPGDXGTCEELLVILAXAQLGIHSKPVGLLNVDGYYNSLLSLFDKAVEEGFIDPKARNIFVLADTAADLLTRLTMMARLAADDDDATTTPRGDGDGDGDEHKGATTAAGVKRKRG

SEQ ID NO: 309982 - protein, 124 aa, Zea mays
  unsure (1)..(124): unsure at all Xaa locations
  Clone ID: MRT4577_45763C.1.pep
TNSRCRRGVXTKAIPKIGAPPIARMEDAQIAQARVRKSERRTTKGMIDGQASSNSTIITGADPHGGLGVWSSAGTRGFKSSEKAXRYAEQRTAVDAIRTVGPERAQDMRKGAGSGRDAALRAVA

SEQ ID NO: 309983 - protein, 61 aa, Zea mays
  Clone ID: MRT4577_45764C.1.pep
SHIIIGGGEHLYRDLYQPLLGLDKHGHLPNFKTVNPLEAMTHLFEIKTKLTPVRTKHELKH

SEQ ID NO: 309984 - protein, 72 aa, Zea mays
  Clone ID: MRT4577_45765C.1.pep
MTTQGGNRSTTTLVAAVDVVLAVAAASSLAGVASAENAGGFVVTGREYCDPCRAGFETNVFRNVACATVEVV

SEQ ID NO: 309985 - protein, 281 aa, Zea mays
  Clone ID: MRT4577_45766C.1.pep
MASGSIVKKEVGENHDVLLFGVNNSVKGDLAPQHPIQATVHKEAKFWADKKRFGAEAIYGSAFNIRKDLDAQILSKFQRPPGALPSSMLGYEALTGSLDDFGFEDYLNLPQDSDSFHAPDMHHGMEKNLLKIGICKKYIHTRSRGDSGGRGVRLPNLAPSRSDPACPALEADPQATTSGEVTARTWRWQSEDYGSPTRRGDARGRCRQVDAGGTSGSRRLAWTASGGWRDNDKEASLTDGVKVDARANGKEAGLTDGMEVNTVMTGSPMMVVCATRHAETD

SEQ ID NO: 309986 - protein, 345 aa, Zea mays
  unsure (1)..(345): unsure at all Xaa locations
  Clone ID: MRT4577_45767C.1.pep
PKPTPTGGEPPTSQPSKMQYNNLGRSGLRVSQLSYGAWVTFGNQLDVKEAKSLLQACRDAGVNFFDNAEVYANGRAEEIMGQAIRDLGWRRADVVISTKLFWGGQGPNDKGLSRKHVVEGLKASLKRLDMEYVDVVYCHRPDATTPIEETVRAMNWVIDQGWAFYWGTSEWTAQQITEAWGVANRLDLVGPIVEQPEYNLFSRHKVESEFVPLYNTYGIGLTTWSPLASGVLTGKYSKGNIPXESRFALDNYKNLANRSLVDDTLRKVNGLKPIAAELGVSLAQLSIAWCASNPNVSSVITGATKESQIVENMKALDVIPLLTPEVVDRIEAVVQSKPKRTESYR

SEQ ID NO: 309987 - protein, 374 aa, Zea mays
  unsure (1)..(374): unsure at all Xaa locations
  Clone ID: MRT4577_45768C.1.pep
GRSGGGLPKTHTAPPHTDLTETHPPPPPAASGAPPTTSQPSKMQYNNLGRSGLRVSQLSYGAWVTFGNQLDVKEAKSLLQACRDAGVNFFDNAEVYANGRAEEIMGQAIRDLGWRRADVVISTKLFWGGQGPNDKGLSRKHIVEGLKASLKRLDMEYVDVVYCHRPDATTPIEETVRAMNWVIDQGWAFYWGTSEWTAQQITEAWGVANRLDLVGPIVEQPEYNLFSRHKVESEFVPLYSTYGIGLTTWSPLASGVLTGKYSKGNIPAESRFALXGTRDNYKNLANRSLVDDTLRKVNGLKPIAAELGVSLAQLSIAWCASNPNVSSVITGATKESQIVENMKALDVIPLLTPEVVDRIEAVVQSKPKRTESYR

SEQ ID NO: 309988 - protein, 46 aa, Zea mays
  Clone ID: MRT4577_45769C.1.pep
RPHMHTDTALRQVTLPQPSARSAASTGPLCSNSHVQTVHHNARATT

SEQ ID NO: 309989 - protein, 39 aa, Zea mays
  unsure (1)..(39): unsure at all Xaa locations
  Clone ID: MRT4577_45770C.1.pep
QIVENMKALDVIPLLTREVVDRIEAVVQSKPKRTXESYR

SEQ ID NO: 309990 - protein, 191 aa, Zea mays
  Clone ID: MRT4577_45771C.1.pep
MFPRISRLGARLLRESRAETRAGNLLNSQRIFFQDHVNRHSIPVVTPAVLSMRNALLSTATSGDQDESSQAKDKISVTFVNKDGSEKTICVPVGMSMLEAAHENDIELEGACEGSLACSTCHVIVMDVKYYNKLEDPADEENDMLDLAFGLTETSRLGCQVIAKPELDGMRLALPVATRNFAVDGYVPKPH

SEQ ID NO: 309991 - protein, 124 aa, Zea mays
  Clone ID: MRT4577_45772C.1.pep
SSQAKDKFSVTFVNKDGSEKTICVPVGMSMLEAAHENDIELEGACEGSLACSTCHVIVMDVNYYNKLEDPADEENDMLDLAFGLTETSRLGCQVIAKPELDGIRLALPVATRNFAVDGYVPKPH

SEQ ID NO: 309992 - protein, 43 aa, Zea mays
  Clone ID: MRT4577_45773C.1.pep
PVSFFVTPAGRAKKKKKKKKKKKKKKKKKKKKKKKKKKKKKAA

SEQ ID NO: 309993 - protein, 158 aa, Zea mays
  Clone ID: MRT4577_45774C.1.pep
MPFCQLQQVVIRMKVVRQKIRAAPSTSRGIDGTKCISFTELISVTFVNKDGSEKTICVPVGMSMLEAAHENDIELEGACEGSLACSTCHVIVMDVKYYNKLEDPADEENDMLDLAFGLTETSRLGCQVIAKPELDGMRLALPVATRNFAVDGYVPKPH

SEQ ID NO: 309994 - protein, 171 aa, Zea mays
  Clone ID: MRT4577_45775C.1.pep
RTTSKAFVLLYCRSDGFYLKFICINFLFIYFQRNVLFSTATSGDQDESSQAKDKISVTFVNKDGSEKTIRVPVGMSMLEAAHENDIELEGACEGSLACSTCHVIVMDVNYYNKLEDPADEENDMLDLAFGLTETSRLGCQVIAKPELDGIRLALPVATRNFAVDGYVPKPH

SEQ ID NO: 309995 - protein, 100 aa, Zea mays
  Clone ID: MRT4577_45776C.1.pep
AGRHSNTASLPTEISTISHRQGTRSQTHRGGWYTAGLVQHATSSATTSTTGWSSSRAAEEGGVAAAARFFAAAAAQETSRGSHKVQANAVADVPGNAATS

SEQ ID NO: 309996 - protein, 98 aa, Zea mays
  unsure (1)..(98): unsure at all Xaa locations
  Clone ID: MRT4577_45777C.1.pep
IHDFSEGFEQYPNKXXSDKCVAVXGWGRERLVGYSLQPRFAGLQQPRRSRAGCSGRGAAARGHGRARRRQQQGQVLLRAVCASIYGHKARIRDYRFTD

SEQ ID NO: 309997 - protein, 140 aa, Zea mays
  unsure (1)..(140): unsure at all Xaa locations
  Clone ID: MRT4577_45778C.1.pep
QAPRFPPGSSPPPGGPFRPPRDPPLWGPHGPPPXLFFLGPPVAPPPNGPXGPLCGGARSLASSRPQPRAAGCPPPKXLPPAPRGGGPPLPPPPGWGGPRPPPWPPLGAARPPPXPPPPPPPQGAGKTPXPAPRGNKPQAL

SEQ ID NO: 309998 - protein, 47 aa, Zea mays
  Clone ID: MRT4577_45779C.1.pep
KKKKKPAKIYHHPPFGHQTKTFFFFPKHTTKTKTPLTSSSPKVNKSL

SEQ ID NO: 309999 - protein, 230 aa, Zea mays
  Clone ID: MRT4577_4577C.1.pep
MARLRSRISWLKEGDANSKLFHLHARHRKRKNFVASLVDGNNILSSHIDKAAAVDQFFSNLIGTNVDRDWTNDLDALGLPSHDLSELDAPFSEKEVWETINGLPLDKGPGPDGFTRRFYRVCWQIIKEDLMAVVSPVWSRKFNNFGRLNTAYISLIPKKEGAYQVKDFRPISLVHSVAKLITKILANRLARRLYDMVSPNQSAFIKGRFIQDNFMLVQQTSRLLHQQKKG

SEQ ID NO: 310000 - protein, 94 aa, Zea mays
  unsure (1)..(94): unsure at all Xaa locations
  Clone ID: MRT4577_45780C.1.pep
NASPQLRRPRAAPSMTGRQRRTRRSHTEPRRRPPAPRCSSCSPGRCRRSIFYPPLCTRRRRNRPIYYNGVYADLRRCSLCYLPAIAGYGYHPRX

SEQ ID NO: 310001 - protein, 57 aa, Zea mays
  Clone ID: MRT4577_45781C.1.pep
LLFKLLGYIKRTFRSRLTLTGVDPPQFFNKSHQQGPCLTYLFDQVIIVIGEGLPRGS

SEQ ID NO: 310002 - protein, 214 aa, Zea mays
  unsure (1)..(214): unsure at all Xaa locations
  Clone ID: MRT4577_45782C.1.pep
MDEDAGGASPPPXATGSRAPTSSRSVTETVNGSHRFVIQGYSLAKGMGVGKHIASETFSVGGYQWAVYFYPDGKNPEDNSVYVSVFIALASDGTDVRALLELTLLDQSGKGKHKVHSHFDRSMESGPYTLKYRGSMWGYKRFFRRTALELSDYLKDDCLKINCTVGVVVSTIDYSIPHSIHVPDSDIGYDFGSLLDSQEGADVILNVGGERFHA

SEQ ID NO: 310003 - protein, 432 aa, Zea mays
  unsure (1)..(432): unsure at all Xaa locations
  Clone ID: MRT4577_45783C.1.pep
MDEDAGGASPPPXATGSRAXLQQPTTAAPSHRDMAASPTSSRSVTETVNGSHRFVIQGYSLAKGMGVGKHIASETFSVGGYQWAVYFYPDGKNPEDNSVYVSVFIALASDGTDVRALFELTLLDQSGKGKHKVHSHFDRSMESGPYTLKYRGSMWGYKRFFRRTALELSDYLKDDCLKINCTVGVVVSTIDYSIPHSIHVPDSDIGYDFGSLLDSQEGADVILNVGGERFHAHKLVLAARSHVFGSQFFDDESDGEKSEVNETDELKEFSIDDMEPNVFKAMLHFIYRDTLVDDDELGASSSDGSIFDTPAAKLLAAADKYHLARLKSLCESYLCKGISVASVASTLALADRHHAMELKAVCLKFAAENLSAVMRSEGFIYLKDNCPSLQSEILKTVAGCEDQCSSVGKSQSVCGQLSDGGDSSCRRVRQRT

SEQ ID NO: 310004 - protein, 119 aa, Zea mays
  Clone ID: MRT4577_45784C.1.pep
LPVADGGGTCLTADTKAPSRAALGRGTKARSVTRRGRPRPPDRTHRDAKRTDIRQEGPRAGRAGARGRRRRRTGRGGGRAHLADHVERAGRGGTRPAVREMTQPRRLAMVPGTGVHVDA

SEQ ID NO: 310005 - protein, 58 aa, Zea mays
  unsure (1)..(58): unsure at all Xaa locations
  Clone ID: MRT4577_45785C.1.pep
RIGCRLVCLVQLTGRPLSLSLPRLGSAVPLNRPQLFLAFVSLPLNGPYISVPXRXLSR

SEQ ID NO: 310006 - protein, 123 aa, Zea mays
  Clone ID: MRT4577_45786C.1.pep
MNGARYQTLASPNLTILPSLLCTHATPVLIPSSSTRASPARRRRSEQQWTGAQSQLSPEGMEYMAGALRAGVVPLDLFGKARTTWKVGIFASLQFWTRISCRFLFFYPGNGTAMPIDCRSRSP

SEQ ID NO: 310007 - protein, 236 aa, Zea mays
  Clone ID: MRT4577_45787C.1.pep
MDGSAEPAHGAPHAAAFPTGGEAAQHGHGYKRRHGVQRIRQEDRRWSSGLVWFLVILCTVLTIGVIVTGATVFAVYLLYKPTTPYLLVSSARLETLAYDQSGTIRDLQLALTVLAENSNSRTDATFSRVNLAVGFRGAEVALLRAGTFAVPRRSSFPLRYQVVSAGRQLSPEGMEYMAGALRAGVVPLDLFGKARTTWKVGIFASLQFWTRISCRFLFFYPGNGTAMPIDCRSRSP

SEQ ID NO: 310008 - protein, 481 aa, Zea mays
  Clone ID: MRT4577_45788C.1.pep
MASARGPCGISVRSDFSSACLIHKAGAPSNSVSGVMAVQVHRHRNKVRNGQAIRCAMATGKEQGAISTASSGDQTKGGLRGKLNKVVLAYSGGLDTSVIVPWLRENYGCEVVCFTADVGQGAIELEGLEKKAKASGACQLVVKDLKEEFVSEYIYPCLRAGAVYERKYLLGTSMARPVIAKAMVDVAKEVGADAVAHGCTGKGNDQVRFELTFYALNPELKVVAPWREWDITGREDAIEYAKKHNVPVPVSKKSIYSRDRNLWHLSHEGDILEDPANEPKEDMYMMSIAPENAPSKPEYLEIGIIAGVPVSINGRDLSPASLLAELNEIGGKHGIGRIDMVENRLVGMKSRGVYETPGGTIMAAAVRELESLTLDRETMQWKDIIALKYAELVYAGRWFDPLRQSFDAFMEKVTATTTGSVTLKLYKGSVNVASRKSPYSLYREDISSFENGEIYNQADAEGFIRLYGLPTRVRAMLEKGI

SEQ ID NO: 310009 - protein, 40 aa, Zea mays
  Clone ID: MRT4577_45789C.1.pep
KEWSTMAQYRQPSHHRYFTPPAVVLIRSPSKPYPGVPHGP

SEQ ID NO: 310010 - protein, 65 aa, Zea mays
  unsure (1)..(65): unsure at all Xaa locations
  Clone ID: MRT4577_4578C.1.pep
MKTFXPWPVFFRREWKRHWPFLPGFAIPGFIIPKMPANFPEEGLKNSKFVQEPKKPWPTRCCPNC

SEQ ID NO: 310011 - protein, 227 aa, Zea mays
  unsure (1)..(227): unsure at all Xaa locations
  Clone ID: MRT4577_45790C.1.pep
GHPLFPQEKCQQDYSLQKNASGGAFWEISLLYNDKSKEKPALDFSSQFDMPLDIVIDKCIIQEILLQYKYVSSFTMKLLEEGFDLCAHLLALRRYHFMEIADWADSFIASIYQKKWSFVKSEQKRSEIQGLMDLALQRSSCDSDPYKERLFIYMRESPVDSVDASPCGLDLLDDILLGYKAEWPMNIVITVDALKIYAEIFCYLLQVRFAXFSLTEVWRFLKELTQF

SEQ ID NO: 310012 - protein, 166 aa, Zea mays
  unsure (1)..(166): unsure at all Xaa locations
  Clone ID: MRT4577_45791C.1.pep
XIYPCLRAGAXMXRKYLLGTSVARPVIAKAMVDVAKEVGADAVAHGCXWKGNDQVVTLLAGGGGGLVILXATLILQVRFELTFYALNPELKVVAPWREWDITGREDAIEYAKKHNVPVPVSKKSIYSRDRNLWHLSHEVLSIFHVYCFKFYQSIFCSLIFFFFTCR

SEQ ID NO: 310013 - protein, 221 aa, Zea mays
  Clone ID: MRT4577_45792C.1.pep
SESFSTLQGDILEDPANEPKEDMYMMSIAPENAPSKPEYLEIGIIAGVPVSINGRDLSPASLLAELNEIGGKHGIGRIDMVENRLVGMKSRGVYETPGGTIMAAAVRELESLTLDREPMQWKDIIALKYAELVYAGRWFDPLRQSFDAFMEKVTATTTGSVTLKLYKGSVNVASRKSPYSLYREDISSFENGEIYNQADAEGFIRLYGLPTRVRAMLEKGI

SEQ ID NO: 310014 - protein, 158 aa, Zea mays
  unsure (1)..(158): unsure at all Xaa locations
  Clone ID: MRT4577_45793C.1.pep
LPSSLPSLXWVVVHMLSLGFSFFFFFWXGXXFFWVGGHLPXAFFLFFGRERKTPHRERDYXSVLAHPPXASFIALAHAEPSDRWVPAAVHRLXAFSCGESFPVVLXVSLHVLPFSGPSVYFXYPKGLLXILVPSLSFPLFPFLTGSPSFRNPPFFAVL

SEQ ID NO: 310015 - protein, 114 aa, Zea mays
  Clone ID: MRT4577_45794C.1.pep
PFGGLGPFKRFVSRILKGFPSFFFWARFWKPGGAPGAREFLNLKKNLWGKKMGGVFFHSPPNLSPCLKVGPNLNPPSAFVKGFFKKIFLCKKNILLEPFSLPVVLGSPFIGGNT

SEQ ID NO: 310016 - protein, 139 aa, Zea mays
  unsure (1)..(139): unsure at all Xaa locations
  Clone ID: MRT4577_45795C.1.pep
RXRGPRAXXPRGGXXXXXXXPPRXXXXXAARXAWHPGQEGGEARPRLLRGRRRQDTVTGFSPGGGVRRRLVVGMGLEEEVDREGGGVDGDEEEEEPRDEAAEAVSVAMSSASHHRRRRAAVVSHSRADRGVSPRGTLGM

SEQ ID NO: 310017 - protein, 37 aa, Zea mays
  Clone ID: MRT4577_45796C.1.pep
MAGWLLVLGADLLWGRRPAVAQVCCASTADGRLCLHG

SEQ ID NO: 310018 - protein, 49 aa, Zea mays
  Clone ID: MRT4577_45797C.1.pep
GTFLYKYYNSFMHNFPLKMRYTYCLSDFTLGVIFLNYLYIYSHWQLGIT

SEQ ID NO: 310019 - protein, 50 aa, Zea mays
  Clone ID: MRT4577_45798C.1.pep
HILIILGGTTNVRVQMISNMSLKALKLPQESPQSVIMNCIILSFYTTFHF

SEQ ID NO: 310020 - protein, 127 aa, Zea mays
  unsure (1)..(127): unsure at all Xaa locations
  Clone ID: MRT4577_45799C.1.pep
RVGVLFFHPQAANYKRGEGGANEATKTXDRGISEFVVMAADTEPLEILLHLPLLAEVFYLPYVFFFWVEXGGXXXXXTRLFFACSVTXFEGCLLXLLXQGLXGSLAELLICSAVPFSVCLASSCFGG

SEQ ID NO: 310021 - protein, 88 aa, Zea mays
  Clone ID: MRT4577_4579C.1.pep
QLQLAFLGKLIAEFCIGFWNKRPNKHGLKQQKEFALQGRAADIPTKLGQPHFASFRTWYGQPTAGGQNSHLPERNHRIVSRVSKSSWG

SEQ ID NO: 310022 - protein, 64 aa, Zea mays
  Clone ID: MRT4577_457C.1.pep
NTPPRDGNNCYLPPKTTNGIWFGGKISLGSRTFLCCQGPYVCIIYCSITGVKMWNLYVPDGRTA

SEQ ID NO: 310023 - protein, 147 aa, Zea mays
  unsure (1)..(147): unsure at all Xaa locations
  Clone ID: MRT4577_45800C.1.pep
TTLTVLLRLLPNYYDHVPAYENLLITKLLGLHTVKPSTGRKLRFGVLGHMFRTEXRIHRMSDLTGSSXGLTTAKCXIDNNTTLQDEDLNYTFYXLEPSWREALLKQIETDSDFLRAQQIMDYCLRLGVHDRPPQHLTARAFYLMSMA

SEQ ID NO: 310024 - protein, 146 aa, Zea mays
  Clone ID: MRT4577_45801C.1.pep
LFMCLGCNFVAGASYPSVVVVPKRCLENVLLAGRGLIWLPCVVIVFDPSSLMGDRCECSSNYLEVAVVDSFLVVVVRAGHSSWCSSSWGIFVRQQMCRSVIWYGVVLWRCGKVSPALLSQSWWGAVDTCGLVWCLVPCESEIWSTF

SEQ ID NO: 310025 - protein, 57 aa, Zea mays
  Clone ID: MRT4577_45802C.1.pep
VGNSWSGDTRGLLYTFVEKRVLEIFCFPAAIRPLCCMKLSFWLRICISVFIGPCVPV

SEQ ID NO: 310026 - protein, 61 aa, Zea mays
  Clone ID: MRT4577_45803C.1.pep
KYRQSRFLPNRFSVYIFGKIKEENSDVVNPYIMQSTWTCVPEFKSKYVRLINLKVAYHFGP

SEQ ID NO: 310027 - protein, 93 aa, Zea mays
  unsure (1)..(93): unsure at all Xaa locations
  Clone ID: MRT4577_45804C.1.pep
TNTRVLVNGCSIGGHPTGSEGAXQWMPERFMLYGWHKSNNYSGHYFMYLSINSGRPIXIGVNFMLAXTMEIMLANLMYHFHCXVPNHKEYGEW

SEQ ID NO: 310028 - protein, 154 aa, Zea mays
  Clone ID: MRT4577_45805C.1.pep
MATSSSSLTTLHSRFLSPTPSSPYMAALPRRRRAGARYPRIRAIDLDQNTIVAISVGVVSIAVGIGVPVFYETQIDNAAKRDNTQPCFPCSGSGAQVCRFCSGKGIVTVVLGAGETEESQCVNCEGIGSLTCTTCQGTGIQPRYLDRREFKDDD

SEQ ID NO: 310029 - protein, 61 aa, Zea mays
  Clone ID: MRT4577_45806C.1.pep
GCVPGSIRGFRGMVCPKTQTAVPCLSEAHLHLLLAPSLCGRHAASDRLGLLGVWSRGPQQT

SEQ ID NO: 310030 - protein, 108 aa, Zea mays
  Clone ID: MRT4577_45807C.1.pep
GISGSTPRVRPRVRKKKKKKKKKKKKKKKKKKKKGGGGGGGSNVSNVWLRGMRSFMLSLEFTKLARLSHGLQWKNWEIPDLTHFEDLALYSPFGYLGRRKKARPTNFS

SEQ ID NO: 310031 - protein, 120 aa, Zea mays
  unsure (1)..(120): unsure at all Xaa locations
  Clone ID: MRT4577_45808C.1.pep
LGAFSRLSFWPSFSFCASGSLVVPLPAGGFPPLLCVPFLCGLCCLPAVXCAPCGSPGVLCSPSVLLARGGLFCGWAVLPXSVLCVGGRPGFFVCPPXGVXXGGRILLRSSSRELFRSGSG

SEQ ID NO: 310032 - protein, 52 aa, Zea mays
  Clone ID: MRT4577_45809C.1.pep
KFKCPNCGELGHRKSSYKCLLNGTKKRKQKPRKNTTNQWFPKNDNGSSEHQH

SEQ ID NO: 310033 - protein, 57 aa, Zea mays
  Clone ID: MRT4577_4580C.1.pep
PIASCHSHGRTHVVFIRLAYGTRRLIPVLCHKMAPWYHNSRSTHTYPDWTHLLSALC

SEQ ID NO: 310034 - protein, 56 aa, Zea mays
  Clone ID: MRT4577_45810C.1.pep
SKVRSCLPVVHYPDAMSSLLLGNSRPNRLNSVPSFSVTQRSYAPTRSAFMSNATCR

SEQ ID NO: 310035 - protein, 865 aa, Zea mays
  unsure (1)..(865): unsure at all Xaa locations
  Clone ID: MRT4577_45811C.1.pep
MVLKSHTNLLDMCCEDVFDFQQPLRSPRHVVNSPGIISDPDWESSNDGNSVGSMPFCFKRKIIVANFLPVICAKNEATGEWSFAMDDNQLLVQLKDGFPIGNEVIYVGSLNVQVDPIEQDRVSQKLFKEHRCVPTFLPAELQHQFYHIFCKQHLWPLFHYMLPVCHDKDELFDRSLFQAYVRANKIFADKIVEAVNSDDDCVWVHDYHLMLIPTLLRKKLHRIKVGFFLHSPFPSSEIYRTLPVRDEILKSLLNADLIGFQTFDYARHFLSCCSRLLGLNYESKRGHIGIEYFGRTVSLKILAAGVHVGRLEATLRLPATIKKVQEIESRYSGKLVILGVDDMDIFKGISLKLLGLELLLERTPKLRGKVVLVQIVNPARSIGKDIEEAKYEAESVAQRINDKYGSANYKPVVLIDYSIPFYEKIAFYAASDCCIVNAVRDGMNLIPYEYTVCRQGNEELDKLRGLNKSSSHTSTLIVSEFVGCSPSLSGAFRVNPXWSMEDVADAYTSVPDLTRYEKNLRHEKHYRYVRSHDVAYWARSFDQDLDKACIEQYSQRCWTTGFGLNFRVIALSPGFRRLSLEHLASSYKKANRRMIFLDYDGTLVPQTSHDKSPSAELISTLNSLCSDMKNTVFIVSGRGRDSLSEWFASCENLGIAAEHGYFIRWNRAAEWETSFSGIYSEWKLIADPIMHVYMETTDGSFIEPKESALVWHYQNTDHDFGSCQAKELVSHLERVLSNEPVVVRRGHQIVEVKPQGVSKGISVDKIIRTLVSKGEVPDLLMCIGNDRSDEDMFESINRATSISELPAAPEVFACSVGPKASKANYYVDGCDEVIRLLKGVTAVSLQKDTAGHSHAAFEDTLEVVS

SEQ ID NO: 310036 - protein, 26 aa, Zea mays
  Clone ID: MRT4577_45812C.1.pep
HQVCHTLGKYVTLTVTAPELLIGMTT

SEQ ID NO: 310037 - protein, 94 aa, Zea mays
  Clone ID: MRT4577_45813C.1.pep
FSPTGTPYCLPQFQLFRQQFFQQLRQVEPQPRFQAIFGLVLQSILQQQPQNGQVPGLFAAQITQQLTAIFGLQQPTPCPYASAGGVPPLKNYFL

SEQ ID NO: 310038 - protein, 55 aa, Zea mays
  Clone ID: MRT4577_45814C.1.pep
KRFELPLTAYFTSTSNQHASPTLIDSHEIINKIEFDSHQHVTNTEVLHQLIQKKT

SEQ ID NO: 310039 - protein, 45 aa, Zea mays
  Clone ID: MRT4577_45815C.1.pep
GRAGFTDSNLLRPASLRPRAPKPHDHAWLSSRVTEKFLAKFPTCE

SEQ ID NO: 310040 - protein, 72 aa, Zea mays
  unsure (1)..(72): unsure at all Xaa locations
  Clone ID: MRT4577_45816C.1.pep
REIEMAQKLLNSDLGELINKMKLAQQYVMTSLQQEYKTQMLTAAHALAVDAKHLLXVVDQARLKMLGQTRPH

SEQ ID NO: 310041 - protein, 59 aa, Zea mays
  Clone ID: MRT4577_45817C.1.pep
KNRKLIIHTYNIHNSYIKKPKIKIRWPSFYNLITVKTLSIPNLFFLHPIIHFTTSRYKK

SEQ ID NO: 310042 - protein, 125 aa, Zea mays
  Clone ID: MRT4577_45818C.1.pep
MCFRYALVLIAMYNVWDLIGRYVPLIPCLKLTSRKGTLAAVLARFLFIPAFYFTAKYGDQGYMIFLTSFLGLTNGYLTVCVLMEAPKGYKGPEQNALGNVLVVCLLGGLFSGVVLDWLWLIGKGW

SEQ ID NO: 310043 - protein, 163 aa, Zea mays
  Clone ID: MRT4577_45819C.1.pep
DGASPLSASSEPVICLSILALAARTSNFAPHHRSRSENPTPSNGVSIPCRAPRPRVTCARATRDACCCGVAADQISYSAERRGATRNAARSIESITTRNQSEIRGTVHRITGCAARPAVPTAALIRGAGARARARARHGWPRSWRSCRISSRPASRNPIAHRS

SEQ ID NO: 310044 - protein, 68 aa, Zea mays
  Clone ID: MRT4577_4581C.1.pep
VQKSSQEQICLMMEERQPVIFGQFNLSNMPCGSSILKTCFVCLSKKVSRICQKKERTKGGSYRGSELT

SEQ ID NO: 310045 - protein, 75 aa, Zea mays
  Clone ID: MRT4577_45820C.1.pep
TPFDPSAAGRDHAGHGLPWLLPVLILLPNPPFLPSGRPGDHDHDGCYAAACRLPGALRFIRPPRRAPRGPDQSSR

SEQ ID NO: 310046 - protein, 112 aa, Zea mays
  unsure (1)..(112): unsure at all Xaa locations
  Clone ID: MRT4577_45821C.1.pep
MEKGSTGQRGRIYIRDTGLEDKRSKANQYQTTSLAHSEGTNTNEDXTRTADKRMAYTXKDNTNENXTHYRCMRRQVTRPHGNSACIRRKIXANLTTXSMGRKDGASMYPSSI

SEQ ID NO: 310047 - protein, 48 aa, Zea mays
  Clone ID: MRT4577_45822C.1.pep
SEPSFHLFGFIMCIGATGSKDVEDSIARNSSVFRWVTSSSLFICTHCL

SEQ ID NO: 310048 - protein, 110 aa, Zea mays
  unsure (1)..(110): unsure at all Xaa locations
  Clone ID: MRT4577_45823C.1.pep
GRCEDVCWVKTNQKKCGSNLADCLKSLVAPLKGPWLVGXLKGTGRGTPVGHVIHANFAPILIIAEEPPVGXPKKPGALSRIIDLFGLGRGGFELFGGDHNIRPGWLTLGK

SEQ ID NO: 310049 - protein, 107 aa, Zea mays
  Clone ID: MRT4577_45824C.1.pep
NNSFFFFFFFCFFFFFFFFFFFFFLKKAPTGGLKFQTIPPGGAQTGGNSRCIALNPAGPLTHWLYKKKRQTDRKTALPMHYITSIEQPLGFHTRVGPKQKLGLPPQG

SEQ ID NO: 310050 - protein, 48 aa, Zea mays
  Clone ID: MRT4577_45825C.1.pep
PHIRFIFYTTQPYKAEGHLIINAFSYSKHTETIISLCYHTIIFSLFFH

SEQ ID NO: 310051 - protein, 59 aa, Zea mays
  Clone ID: MRT4577_45826C.1.pep
EPGNEKNIKGKLSARAMTMATEMGLNSDYYNMLCRAGYLVICQFCQPGCTPPMRRGHRG

SEQ ID NO: 310052 - protein, 133 aa, Zea mays
  unsure (1)..(133): unsure at all Xaa locations
  Clone ID: MRT4577_45827C.1.pep
RRPGRPRCSRPRGPPRWPPPRPSSPRSGARRARACRRPXPAAXRRTRRWWRPAGSTPPPPCSPRRPETGPCLGPXIEADGEAXRRPTRLGRDPXSPPARLGGPTGRRTCSGRRASASRSRRRRRSPRRGRPDP

SEQ ID NO: 310053 - protein, 61 aa, Zea mays
  Clone ID: MRT4577_45828C.1.pep
HKKKSPVLPGRSQSGSKGTKKQISGWPIQNPAWRDGGNLSFKNQKDGFLTAPLFFRGGGRP

SEQ ID NO: 310054 - protein, 77 aa, Zea mays
  Clone ID: MRT4577_45829C.1.pep
DAVSRIKSSTVADWMPAADVDGDASSFLLNKKGGVISEKSERNHLGTEKNGLIGNGKICRVRARVCAGVCEDAVQRP

SEQ ID NO: 310055 - protein, 87 aa, Zea mays
  Clone ID: MRT4577_4582C.1.pep
FDARLESELFQSGITVMARDHPQGGVFCLPAKLSRKSSKPIPGSSKAYIGYLWSGAGSPHLHRHVYYKEPLSKTVPRSFTPFVEVGT

SEQ ID NO: 310056 - protein, 71 aa, Zea mays
  unsure (1)..(71): unsure at all Xaa locations
  Clone ID: MRT4577_45830C.1.pep
CFXRFXXRXXVVRXXFVVXVKTAXXVMVFXEIGIFMRCTCEXPCLFRFSDIGFDLCDTNRSFSPKKKKKSG

SEQ ID NO: 310057 - protein, 164 aa, Zea mays
  unsure (1)..(164): unsure at all Xaa locations
  Clone ID: MRT4577_45831C.1.pep
QVHYVYALQGPHPGGAKKKKKNTGQAAPRGPHPPKDPEKKRPSPQKKKKGEKKATATQAPPPGGPGKQRAGGTRPPLGGKRAANTPRKRGGGPAQKKEGGKSTTPAGESPPGRRSKNNPRQNLKLKENRRGGRGEARRERGGGPLTPTXEDNPLPSRDRVEDYK

SEQ ID NO: 310058 - protein, 107 aa, Zea mays
  Clone ID: MRT4577_45832C.1.pep
CLFCFIPTSLSMHVLWVATWCPIVTSLPLMFRTRACLASQRYFLALWFIHHRSSVSAMHVNPGQSRLVSPPHLLGSHSVFASFTALFLLSFIKPGFRFVALHCHYSY

SEQ ID NO: 310059 - protein, 169 aa, Zea mays
  Clone ID: MRT4577_45833C.1.pep
ISLADGEMLVSCFNFFLVEPWLIGESDVGEVASFSLDGLTVNLLLFLLYFKPQFPSAALSHKELLSFIFSTLAPETYSQRRRIDARATDAAADRARIAPLEATGRRRGAGEVYAAAAAALGRIGEGGANGAVGDEANGERPNGQESGATIEGQGHPSHRGLPTRPVLDR

SEQ ID NO: 310060 - protein, 83 aa, Zea mays
  Clone ID: MRT4577_45834C.1.pep
IKFASGGNGGGARCQWGGAPSLPLLHLVVSSPPRPLFFRSIYFPGRAVWVKKKKKKKKKKKKKKKKKKKKKKKKKKKKKKNTQ

SEQ ID NO: 310061 - protein, 70 aa, Zea mays
  Clone ID: MRT4577_45835C.1.pep
TCDASFSPMLSCGDTYMNMRRKIPKSGFRGHFSVRPDVSPRAASVVERLDKHVPTRVRFESVHGYQPNPV

SEQ ID NO: 310062 - protein, 654 aa, Zea mays
  Clone ID: MRT4577_45836C.1.pep
MATQGQAAAGSASESGGSPAALAAAAAAAAAFPATSLYVGDLHESVQDAQLFDVFSQVGGVVSVRVCRDINSRKSLGYAYVNYNNQGDAARALELLNFTPINGKPIRIMYSNRDPSSRKSGTGNIFIKNLDKSIDNKALYDTFCAFGNILSCKIATDPSGESRGYGFVQFEKDESAQSAIDKLNGMLINDKKVFVGPFVRKQDRENVSSNIKFSNVYVKNLSDTVTDDELKEMFGKYGTITSAVVMRDSDGKSRCFGFVNFENADAAAQAVQELNGKIFNDKELYVGRAQKKSEREMELKEKFEKNVQEVAEKFQNTNLYLKNLEENIDDEKLRELFAEYGNITSCKVMRDSNGVSRGSGFVAFKSAEDANRALTEMNGKMVGSKPLYVALAQRKEDRKAKLQAQFSQMRPVAMAPSVGPRMPMFPPGVPGVGQQLFYGQPPPAFINPQAGFAFQQPLMPGMRPGGPMPNFMMPMVQQGQQPQRPAGRRAGGMQQPMPMGGQQQVFPRGGRGYRYPTGRGMPDPGMHSVGAVMPPSYEMGGMPMREAAPQPVPIGALATALANAPPDQQRLMLGENLYPLVEQLEREQAAKVTGMLLEMDQTEVLHLLESPDALKAKVAEAMEVLRSAQHLQQSNVSTEQQLANLSLNDGVVSS

SEQ ID NO: 310063 - protein, 67 aa, Zea mays
  Clone ID: MRT4577_45837C.1.pep
TGLAIKLGARLTEVRRNGTCPWLRPDGKTQVTGEYRNEGGTTPAIKAVTVVISTQVDEIVTNVETAA

SEQ ID NO: 310064 - protein, 150 aa, Zea mays
  unsure (1)..(150): unsure at all Xaa locations
  Clone ID: MRT4577_45838C.1.pep
PKQFFPLKIIPSPLKGPTRAWPTXPPPGGGGPFFPHPPKKKKPPGXGYPGAPLNXTAPKVPPKKNPPRRCPERGGPRFFLKTQKKPPPGGPSKGEIPPPGRGVSRGPQPGPKLGEKKGKRVPGGKRVPPQNSQKKKAGKKRGNPGGPKGG

SEQ ID NO: 310065 - protein, 86 aa, Zea mays
  unsure (1)..(86): unsure at all Xaa locations
  Clone ID: MRT4577_45839C.1.pep
MKNLAVDEMKRMGGPKNGGNGNRFGXXGGXGDMGQGXGVGSFRRKKTGGRSNGGVGGXGGVWKVVGLFGKRGFGMGTWGKEGGGGG

SEQ ID NO: 310066 - protein, 125 aa, Zea mays
  Clone ID: MRT4577_4583C.1.pep
QRRVRGRLLKFERVFKAQKRIHMSVFKAQRVLDEIRWRYYEETVMILNLMPYRASYPILKLVYSAAANATHYRDFDKTNLFITKAEVSRSTIMKKFRPRARGRSYSIKKTMCNITIVLNIVKKSK

SEQ ID NO: 310067 - protein, 53 aa, Zea mays
  Clone ID: MRT4577_45840C.1.pep
AKAPPPLFFCFSKKKKTCFGPLKKKKKKKKKKKKKKKKKKKKKKKKKKKKKKK

SEQ ID NO: 310068 - protein, 212 aa, Zea mays
  Clone ID: MRT4577_45841C.1.pep
MDVMFGGTETVASAIEWAMAEMMHSPDDLRRVQQELADVVGLDRNVSESDLDRLPFLRCVIKETLRLHPPIPLLLHETADDCVVAGYSVPRGSRVMVNVWAIGRHRASWKDADAFRPSRFAPPEGEAAGLDFKGGCFEFLPFGSGRRSCPGMALGLYALELAVAQLAHAFNWSLPDGIKPSEMDMSDIFGLTAPRATRLYAVPTPRLNCPLY

SEQ ID NO: 310069 - protein, 61 aa, Zea mays
  Clone ID: MRT4577_45842C.1.pep
HLELYQKPMNTHLDIHNQELTTTKPFILSKLGLARVKKPIEPTKSRFSHMDSCFPCTPIQG

SEQ ID NO: 310070 - protein, 256 aa, Zea mays
  Clone ID: MRT4577_45843C.1.pep
CKYCFYDLCLDCCVEIRRGEIPGGEEIMRVKPEDRGRAYLFGTTNSKDGSKRFSMRRHSSSLENEPSNVVGSSEGANNSLELWKAESDGSIPCPPKELGGCGGSILDLKCFFPEKMLSNLEERADRIMRSEVFAKAVAKRSDQCPCYDHSGNIRTQDVRETANTKGSSDNHLYCPVATAIKEDDLAHFQMHWTKGEPVIVSDVLHLTSGLSWEPLVMWRALREKKTNGDVEDEHFAVRALDCLDWCEVRSYISLNV

SEQ ID NO: 310071 - protein, 83 aa, Zea mays
  Clone ID: MRT4577_45844C.1.pep
CISRFSRGRYGSRLLNLLKRKAMLLQEEVLANESEYDEAEDDIFCRRHGIKLYEHVTASTTIHITAKNPTDHWRPHDSDNAAD

SEQ ID NO: 310072 - protein, 58 aa, Zea mays
  Clone ID: MRT4577_45845C.1.pep
PIVNHGLFLRSECLICQYPPYIVQTHLQTVWAIHVWPTLLVVMCVPILTLSPNGEKRF

SEQ ID NO: 310073 - protein, 116 aa, Zea mays
  unsure (1)..(116): unsure at all Xaa locations
  Clone ID: MRT4577_45846C.1.pep
KGIPEHARHHMVNRISSIIINEVINGLNMDAVPCINICMLGENMRYNKNKLRLLRKRMXTKSSHXPSHLFTPGIYHGCTIRMIITKITIARMRILRGYTSTMSRRHGTQKSRVWPS

SEQ ID NO: 310074 - protein, 46 aa, Zea mays
  Clone ID: MRT4577_45847C.1.pep
CLFGFIKIHMDLRGLDGFQSISSQSSYPLAQSLPIHMPYEKPNKAC

SEQ ID NO: 310075 - protein, 63 aa, Zea mays
  Clone ID: MRT4577_45848C.1.pep
LAASIMFIAKAKGKIGTLMMVGCMSLSITCKKCEPLFLCVGIKQTASSLFYVHLHQYALSYSI

SEQ ID NO: 310076 - protein, 421 aa, Zea mays
  Clone ID: MRT4577_45849C.1.pep
MLGRRVHRVGPRLRVGSGPLLPSVIGGEGRSPSVALSAAACPAPRPERLWCCFRCRLLPLGRSVAARPPHGCWLRRARASHLQVLPAPPGAPGGSHNTSYATRAAFVFWDSPVRACGEDGSEDLPVRTGAAAVRRCGVGGQVAAVVGAEVVVAIGEASSAEAVASTDETVSATCAPDLRLLGFNGWFSSLVRGRREKPPRALLTPKSRYHSYPKYVSLARFLDLRPLCDELKPEAAVARTDAVLARTEASSAQEQVASLAEEMQQRQLELGQVIREQDQSRDQAIEADIVRLSAGFETALNESVKNCKALAQAAEQKEADRVAIRLRGALHHGVRRAFAVLASHYDVDLERINEGYCLPDEEEAALAEVQRLDAAVEGPRAALASSFEVEILPPVSPSEAGPDSAEGGNDAEGAAPPPADV

SEQ ID NO: 310077 - protein, 47 aa, Zea mays
  Clone ID: MRT4577_4584C.1.pep
LIYHAYLIILIRPNNSTYVVHHVYPVYPSISSIDPLPLNAVLPADRI

SEQ ID NO: 310078 - protein, 185 aa, Zea mays
  Clone ID: MRT4577_45850C.1.pep
MERLAEASAQAGTLAEGLVVAVRSAQSAQAMASQQRARAEGLETALNESVENYKALAQAAEQKEADRMAMSEAISAFCRAFGLDDQTPRALRHGVRRAFVVLASHYDVDLEWVSEGYCLPDEEEATLAEVQRLDAAVEGPSAALASSFEVEILSPVSPSEAGPDSTEGGNDAEGAAPAPVLWTLS

SEQ ID NO: 310079 - protein, 233 aa, Zea mays
  Clone ID: MRT4577_45851C.1.pep
MAPSHAHSRSVPLLLLVIGVCCCCSGASSPVVGRLDDDPTCPREPTAAVAAVSSAESSYVEPRRCQPPAPHIAVAVFPYDVDPMQFALNLEYTEAEFFLHGAYGVGLDHVAPSLALGGPPPVGARKASLDEVTRRIVAEFGLQEVGHIRAIQRTVGGIPRPLIDLSAHNFARVMDEAFGTRLDPPFDPYVNSLNFLLASYVIPYLGINGYVGTNPIVDGYQTKKLLAGLLGVE

SEQ ID NO: 310080 - protein, 139 aa, Zea mays
  Clone ID: MRT4577_45852C.1.pep
MPLFMYMRTRYVIVLAVVRKGKKWMVLPSEALFVWAFSASGHQKVLWTIKHPAFQTASIKIALVKIIQNQHEHRIGRVVMIVGIRRFLDPETFAPLNFSLHVMPTILIFFLQSDSLHSQILRKVDQKKLNQTCPKYSCS

SEQ ID NO: 310081 - protein, 403 aa, Zea mays
  unsure (1)..(403): unsure at all Xaa locations
  Clone ID: MRT4577_45853C.1.pep
MAPSHAHSRSVPLLLLVIGVCCCCSGASSPVVGRLDDDPTCPREPTAAVAAVSSAESSYVEPRRCQPPAPHIAVAVFPYDVDPMQFALNLEYTEAEFFLHGAYGVGLDHVAPSLALGGPPPVGARKASLDEVTRRIVAEFGLQEVGHIRXEPLSCSCIGSTTVLMCILNFGLCARAYRAIQRTVGGIPRPLIDLSAHNFARVMDEAFGTRLDPPFDPYVNSLNFLLASYVIPYLGINGYVGTNPIVDGYQTKKLLAGLLGVEAAQDAVFRARLFERLGEAVPPYGNITVAEFTDRVSALRNRLGRCGVKDEGLTVPRRQGAEGAICTNVLSADTDSLSYARTPAELLSILYLTGDERVPGGFYPEGANGRIARSFLASHMETSQCKLPEAISALRSVLRVLRA

SEQ ID NO: 310082 - protein, 128 aa, Zea mays
  Clone ID: MRT4577_45854C.1.pep
PGLHLWWAHSRFCVLGSVHHAGEGRSGDVDASAVLVDVIICCSVVLILQILLIVTVIIMHQLLRIILRRVLYVLMGPRRRHRGRPSSSVLRCSMDRMMMDGWSGVRGGEERDPGYCIESPRPASRYPM

SEQ ID NO: 310083 - protein, 152 aa, Zea mays
  unsure (1)..(152): unsure at all Xaa locations
  Clone ID: MRT4577_45855C.1.pep
MAAPILATLVXIVLLTPTELTPPGATHTAMTCSTVHRTLMPCLPSAQMLGAMPPHPRCGDLRRLLQQGNNTPDXRNICECLNNDPDGPNARGPYISRDAALPRKXRVALPHDITTNAHCHTINKRTRDVPVPGHQCMHDAGGDEQCKVTGIL

SEQ ID NO: 310084 - protein, 110 aa, Zea mays
  Clone ID: MRT4577_45856C.1.pep
PLLRLVWFPLSLRCFVVFGRCLSSRRYVGRSFRFLFLRVFPSCFPSCSLWAALPSGRLFVGFPSLGLAPVFLLVGWAGRVVPPYPTHCLGVPGWFQRSRGSSRALRSGPA

SEQ ID NO: 310085 - protein, 77 aa, Zea mays
  Clone ID: MRT4577_45857C.1.pep
GSLRRGEKPAPQHGRNENKRACAHAQGQAFICTPPTAVRERNPSQKPRRPKRKKARPTPTQKKKKKRGGLESRCFPL

SEQ ID NO: 310086 - protein, 80 aa, Zea mays
  Clone ID: MRT4577_45858C.1.pep
PIFLNSLCGSKEPMGFYTNLKTPPNSEFTKKANLFVFSFQAMVFIKVSSIPGPKSTGYKRFFPKFGSKKNYSASLKKPKK

SEQ ID NO: 310087 - protein, 68 aa, Zea mays
  unsure (1)..(68): unsure at all Xaa locations
  Clone ID: MRT4577_45859C.1.pep
PPPPTHRAPRKNAQGPPTAQKTGRPGPYQLLPLXXIXNIIMYGTSAEKALTCPSARFKGRVATLTAGC

SEQ ID NO: 310088 - protein, 457 aa, Zea mays
  unsure (1)..(457): unsure at all Xaa locations
  Clone ID: MRT4577_4585C.1.pep
MTSPIQLAAAPLLLLVVVAGTRSSRIFSVADYGAAGDGFRYDTAAIQAAVDACAAAGGGRVLLPAPGNYLTATVQLRSRVVLEVPPGARLLGGTRQADYPPESRRWYVVLAENTTGAGITGGGEINGQGGAFVVRPSEVKNVMVSWNATGDCLGDECRPRLVGFIDSKDVRIHDITLNQPAYWCLHLVRCDNTVIHNVSIFGDFKTPNNDGIDIEDSNNTVITDCHIDTGDDAISPKSTTGPVYNLTATNCWMRTKSCAIKFGSASFFDFKRLVFDNITIVDSHRGLGMQIRDGGNVNDVVFSNIKMRTRYYHPLWWGRAEPIYITTCPRHPDSKEGAIXSDTDEMLMNLMSENGVFLAGSKHGLLRNLKFKNIDLTYKRWTNYTGGLYDYRPGCQEMVKHKTGGMMLEHISGLEIDNVRMRWARGSLKGWNVNPILFRPSTIDNLSFHDWQSVDVQ

SEQ ID NO: 310089 - protein, 80 aa, Zea mays
  Clone ID: MRT4577_45860C.1.pep
AHSTTVHHLLDKSHPNKHHRPPTTIQTLYQTLIHKAKTIHTFTCNNQIEFSPVNCITTLHTSRSAFYMHLRAPASVMHYA

SEQ ID NO: 310090 - protein, 39 aa, Zea mays
  Clone ID: MRT4577_45861C.1.pep
MDDDYHVIVLGTDLKECILSLLLSVDGLMALHMVRYDYY

SEQ ID NO: 310091 - protein, 61 aa, Zea mays
  Clone ID: MRT4577_45862C.1.pep
EASAGKFTVWVAPPSNDRHLQHMQSRVKERRSTVLGTVSLLVIPIRFHLSILVGPECLPCM

SEQ ID NO: 310092 - protein, 51 aa, Zea mays
  Clone ID: MRT4577_45863C.1.pep
EGLGSRPGLSLLLNPFSLPKFFQIYLRWGGTGTWTYGGYPSGVLLRNFAIL

SEQ ID NO: 310093 - protein, 81 aa, Zea mays
  Clone ID: MRT4577_45864C.1.pep
GGGFTIFPFLFKPPCTFNRFESLECIFVDNALFTYKNLIFFVVIFQLTTSYIFVNIVGLYFLLMAFSFSATIFFILISFFY

SEQ ID NO: 310094 - protein, 57 aa, Zea mays
  Clone ID: MRT4577_45865C.1.pep
QKPVNCQFSPQFLYLVLHWGKTIFATLPINFLFQRTHFTYIRVYRSTHWPTDFSFTL

SEQ ID NO: 310095 - protein, 362 aa, Zea mays
  Clone ID: MRT4577_45866C.1.pep
MAVTAEAAAEMVLERRAYARVGLLGNPSDVYGGRALSFAIADFSATVHLRPSPELLIQPHPHHDLVAFPSLPQLVSRLQSEGYYGGVRLLMAICKVFYNYCVQNNISLKAENFTLSYDTNIPRQSGLSGSSAIVCAALSCLLDFYNVRHLIKVEMRPNLILNAEKELGIVAGLQDRVAQVYGGLVYMDFSQGHMDKLGHGIYMPLDVNLLPPLYLIYADNPSDSGKVHSTVRQRWLSGDDFITSRMKEVAQLALDGHKALLQKDYTELARFMNKNFDLRREMFGDDVLGALNIKMVDVARSVGAASKFTGSGGAVVALCPDGDSQVERLRKGCQEAGFVVQQVKVAPSVLTDEELSSLLLAS

SEQ ID NO: 310096 - protein, 117 aa, Zea mays
  unsure (1)..(117): unsure at all Xaa locations
  Clone ID: MRT4577_45867C.1.pep
SSEGGLLTDAXDSRXYTLVVLGEIEKAXHPDVFNMMLDSLGDGRLTDRKVRTVDFINTLLIMTSNVRSSVIENGARXIGFHHCSDENDSEFSRIMSLHMDEMKHCLRPEVLNRLDEM

SEQ ID NO: 310097 - protein, 58 aa, Zea mays
  Clone ID: MRT4577_45868C.1.pep
MAAVEVCVKAAAGNPDTLGDCPFSQTVLLTLDEQKVAYEVDLVDLGNKPEWFLNISAQ

SEQ ID NO: 310098 - protein, 628 aa, Zea mays
  Clone ID: MRT4577_45869C.1.pep
ASSSLSLGSGGNVDSSNDPCHRQAVQCRSRYCRRHTTSVSSQLLWGQDNPRAGMAGVEGPGNPLLTLGLGRSPSSSETNSKVSSPTACMMSPSSVKEADEESSMDLGLSFDLCLGHDTAHRHKKPSAGAPKLDLQLSLSTCSPESALTNVSANDGLETVADTTTTLEKLEPWIFRNYMASSSSYAYASEATYGLSLPKIPEDVVVVPSTTDVSSAVTVSVKSPAPKRSNISTKCCQFPGCEKGARGASGYCIAHGGGRRCQKPGCQKGAEGRTIYCKAHGGGRRCQYLGCTKSAEGRTDHCIAHGGGRRCSQDGCSRAARGRSGLCIKHGGGKRCQRESCRRSAEGHSGLCISHGGGRRCQFPECAKGAQGSTGLCKAHGGGKRCTFPGCTRGAEGSTWLCKAHGGGKRCAHQGGGGACPKSVHGGTRYCVAHGGGKRCLVAGCTRSARGRTEHCVRHGGGRRCRAEGCAKSAQGSTDFCKAHGGGKRCVWGQEGSSLGAGGPPCDRFARSRVGLCAGHGALVEDRCVHGGGSLGPAPAIGQLTTDCEPAAAAAATRGDADMADGDEEAFLTLGWNGDGESAGGTAPAPAPAPFMEGRVHGSGLLALLSCSGNGGASAASSSGMRTWM

SEQ ID NO: 310099 - protein, 157 aa, Zea mays
  Clone ID: MRT4577_4586C.1.pep
VFQNCFLFLRRPMDNQRDIATAQGRADGRESTGFVFQYCRFTAETGLKDASRPPIRSYLARPWREFSRTLIMESDIPAFIDKAGYLPWNGDFGLKTLWYAEYANRGPGADTAGRVTWPGYKKVISKEEAEKFTVQNFLHAEPWLKPTGTPVKYGFWA

SEQ ID NO: 310100 - protein, 45 aa, Zea mays
  Clone ID: MRT4577_45870C.1.pep
RFGSVITIYNTSAVPAIRAMIYTRPNTICVQICTMILDNPGSSIG

SEQ ID NO: 310101 - protein, 94 aa, Zea mays
  Clone ID: MRT4577_45871C.1.pep
LLLLALGGTRERELEREIDVGERLGGGALTKMLAGFIGHVVEGPAELVAAGSRTPSPMTKACDVVGALPGRVRAGRVRAGLVSRALCLLAHYAR

SEQ ID NO: 310102 - protein, 63 aa, Zea mays
  Clone ID: MRT4577_45872C.1.pep
DHPIVNPLCDSDDESPNPLSPCLEPFAPISVTQPPSPSDPVAVPTGFSPPRPSRLRSRPCPLA

SEQ ID NO: 310103 - protein, 90 aa, Zea mays
  Clone ID: MRT4577_45873C.1.pep
KGDPEKFADCIHWCLPGVPDVWNQILYTRILSKPPSWGSSNVSPLSIPVPASPVRIPSREGRVFFYHSLSLGKVYGFSFSFSSFLVGRVG

SEQ ID NO: 310104 - protein, 214 aa, Zea mays
  Clone ID: MRT4577_45874C.1.pep
FQIHDLLQLSVSRDSSFPARSRILSAGNARRRSDGGGARRVLVHSRCRFSFRSGVLGVMPRTGDMPMRSAPPARTSSAWWLAAMLWLVAVAWCYSLLRDSSSAHPPISSVAAMIWRRIRPLPLLLQAAMEVDGAMVMLEDLVFAGGFGAYQQRQIRWSYGARWQPVFHTMALPLLAEWRPCISSQPKSDRGGRCIFYLEFEAVPSCCDGLVAPS

SEQ ID NO: 310105 - protein, 142 aa, Zea mays
  Clone ID: MRT4577_45875C.1.pep
PNSNQSHEDDLTRDSEVISKPKNSELTKEKSCSDKPSASNRGAAEGGDDPKKRPRDQAGKSTSDASNSTYKKVEMFVKEQIRPLCKSAVITVDQYKWAVAKTTDKVMSFHRDAKNANFLIKEGDKVRKLALQYVEASQQKIS

SEQ ID NO: 310106 - protein, 130 aa, Zea mays
  Clone ID: MRT4577_45876C.1.pep
KNSEVTKDKSCSDKPSASSKEPKGVNPNRGAAEGGDDPKKSPRDQAGKNTSDASNSTYKKVEMFVKEQIRPLCKSSVITVDQYKWAVAKTTDKVMSFHRDAKNANFLIKEGDKVRKLALQYVEASQQKIS

SEQ ID NO: 310107 - protein, 163 aa, Zea mays
  unsure (1)..(163): unsure at all Xaa locations
  Clone ID: MRT4577_45877C.1.pep
DHASGRAAEXHIMFQRITLFIVSNGILDILRIGDYTALYECIIRNXNQFYRLSKHGNGHSLSMMALRKGTTDHXDMSKCSEGMSQXCTGGRLCTAFTRHLIDHDHAMMMGPSHDIPXQDALLLNTLAYNEIGGFPVQHMTARRIRCIYHVNNHYAHCSMCDIL

SEQ ID NO: 310108 - protein, 94 aa, Zea mays
  Clone ID: MRT4577_45878C.1.pep
MQKTKGGGFRVRLGGLFYATGTESGPSSSCCSGVRNLKSAVSTACYRCAGCNCLKNAGRGVSGLNAGNAASIPSKCGVSIPYTISTFTDCFRVN

SEQ ID NO: 310109 - protein, 80 aa, Zea mays
  unsure (1)..(80): unsure at all Xaa locations
  Clone ID: MRT4577_45879C.1.pep
MMVTICCLAAGYVGGPTMVVIALKRPHSCAVDDDIYQPRVVAXNSDTLPIYEPGLDDVVKLFRGRNLLFSTDDGKLVAEA

SEQ ID NO: 310110 - protein, 167 aa, Zea mays
  unsure (1)..(167): unsure at all Xaa locations
  Clone ID: MRT4577_4587C.1.pep
PAGPGPNSRSSHPFFVVSLLEETLXQKTKDGKPLCDVLKEGGVLPGIKVDTGTIEVVGTDKETTTQGHDDLXKRCAKYYEAGARYAKRCAALKIVPNEPEQVAIDLNAHGLARYAIICHENGLVPIDEPEILCDGPHDIDRCSYLTDTVLAACYRXLNAYHVLLEGT

SEQ ID NO: 310111 - protein, 72 aa, Zea mays
  Clone ID: MRT4577_45880C.1.pep
MVVTALHQTTSFLGQALVARAAGVDDGGRITMRRTVKSVPQSIWYGPDRPKYLGPFSEQTPSYLTGEFPGEY

SEQ ID NO: 310112 - protein, 84 aa, Zea mays
  unsure (1)..(84): unsure at all Xaa locations
  Clone ID: MRT4577_45881C.1.pep
VSPSAAPAASIQLSGARATPASFVRMAAPRGVSSPPSGAACTCTGKQKKVLSLLVFQPSXHIKQEFALLRQSAFHSRRPRTVSP

SEQ ID NO: 310113 - protein, 100 aa, Zea mays
  unsure (1)..(100): unsure at all Xaa locations
  Clone ID: MRT4577_45882C.1.pep
TKALHSFLFLSSCVGARVQAIPREARQYELGEARYYMVLAWAAVLWQCFFLGAVGVIFCVHTLLAGILIAVFIPVTEVAAVIFLHEXFSSEKGVALALSL

SEQ ID NO: 310114 - protein, 492 aa, Zea mays
  Clone ID: MRT4577_45883C.1.pep
MGALTDSRKRLSADHCLSADHRLPYPSSPPSLTPPFKRAKLSPIPEHDPSTSDFPPIRPSPQIIHSAAAASTSSTPGPSPSSTTASTPLPHRRRLPPPPFQRSIHGPQRILRVFQLGGAARAHAAGHSWFSPQSPPPRPLGLQQYVELVNSVTHPAPPTPAAITNATRQAEAAPFEVVAIEEDEDERKQQNEEEVMGSVVVRRVPPYKELYEASRQKRDAKLKTLEFEVRLTEQGRLSLERLAEALPRITPKKEEVPEPFVPLTDEDEEMIRQALHGKNRHERLAVHEPSNIVITREIMQCLNNQEWLNDEVINLYLDLLKERELREPRKFLKCHFFNTFFYKKLISSGYDYKAVRRWTTKRRLGYSLIDCDKIFVPIHKEVHWCLAVIIHKEVHWCLVDSLGGMDMKVLNVLAKYIVDEVKDKSGQQMDVLSWKQEGVKNLPLQENGWDCGMFMLKYIDFYSRDMDLIFGQKQMHYFRRRTAKEILSLRAE

SEQ ID NO: 310115 - protein, 270 aa, Zea mays
  unsure (1)..(270): unsure at all Xaa locations
  Clone ID: MRT4577_45884C.1.pep
PSRPPFEVRLAQAGRLSLERLAEALPRITPKRXAPEPFVPLTAEDEKMARWTLHGAGXRDALXVHVPSNIVITREILQCLNNQEWLNDEVINLYLDLLKERELREPRKFLKCHFFNTFFYKKLISSGYDYKAVRRWTTKRRLGYSLIDCDKIFVPIHKEVHWCLAVINIRDKKFQYLDSLGGMDTRVLRILAKYIVDEVKDKSDQQIDALSWKQESVENLPLQENGWDCGMFMLKYIDFYSRDMDLIFGQKQMHYFRRRTAKEILSLRAE

SEQ ID NO: 310116 - protein, 223 aa, Zea mays
  Clone ID: MRT4577_45885C.1.pep
LGPSRPAGSAREVPLSPPRAHAGLLCCSSTPVVLGLRSRSATAPSRRARPLLARRNRDSRSDEETAAEPKIITVGRPGKSGRRRNRKQQQQQQQTAAKEEEEEEEEEDEDEEEERDATIPEVVTNRMMRRVGASVGLPLALGVGFFPVFYYLKAVAKVDVPTWIPFGVSFVFFGAALAGVSYGIVSASWDPAREGSLLGWNEARRNWPVFWDSLRGRSPPRRG

SEQ ID NO: 310117 - protein, 70 aa, Zea mays
  Clone ID: MRT4577_45886C.1.pep
SGRPIYLLGHKDRALDTIARTKDSNSLHHCLSDLRRPTRRGRMGRRRPLESRASGTFLPRLALARCSRPQ

SEQ ID NO: 310118 - protein, 97 aa, Zea mays
  Clone ID: MRT4577_45887C.1.pep
QSGQLVLLELKGANTESLPGNQPVCATAGAGPELDGELGLMFGQAVGHLLLTQTDYTKGPTVLPPETLIQHRRGIIHHQSAMTRLQNQQRGLPLRDS

SEQ ID NO: 310119 - protein, 57 aa, Zea mays
  Clone ID: MRT4577_45888C.1.pep
KLGILLVYFGAPGYSRLAHQLPMRTILKWYRDPLTPQLYLLYYIINILFTIDPYNYQ

SEQ ID NO: 310120 - protein, 83 aa, Zea mays
  Clone ID: MRT4577_45889C.1.pep
GSPFSDDARPVAPRHPSSLRVRKTAAPDLTMEGTIAPTAGCMLGAKGLFLSCGDSTDVLGLLITGCCRHRVCRAMTAHYMIRA

SEQ ID NO: 310121 - protein, 62 aa, Zea mays
  Clone ID: MRT4577_4588C.1.pep
MEAPDEEAVLGLPEGERLLEVALISAQGLKPPSGVRRRLQAYAVAWVDAGHKLQNPPDATGG

SEQ ID NO: 310122 - protein, 100 aa, Zea mays
  unsure (1)..(100): unsure at all Xaa locations
  Clone ID: MRT4577_45890C.1.pep
QTANQEQKRPPPPXKPKAGRAXARRXXAARNRRKTXXPGTPXXEPRPXXXXAPXAXXXXGPXRPRPXPXXRRXXPAXXXXPARXXXRRRSXXXSXXAPGA

SEQ ID NO: 310123 - protein, 64 aa, Zea mays
  Clone ID: MRT4577_45891C.1.pep
QTQKVTTSKQITALSLDMPCMTKFDQQPKSIQQLCNQALLSRGHGDQTALGRAAVHQLHQHMKV

SEQ ID NO: 310124 - protein, 162 aa, Zea mays
  unsure (1)..(162): unsure at all Xaa locations
  Clone ID: MRT4577_45892C.1.pep
SLFAKPSITKWPGARVYLSAELDGLQYSFKPAAYTQLFKATAASTNATPNCYAFVNGSFGFPDKVFSLPLAGSMQLMRLESDGHLRLYEMGIPHLELRMVLDALSTVMDFCDYPLTCGDYRCLAVHDMCSCPSSSHFRLRSERHPDAGCVPLAXAAPSATTC

SEQ ID NO: 310125 - protein, 42 aa, Zea mays
  Clone ID: MRT4577_45893C.1.pep
REPRLLSDITPHVLLKQPLCPCCYYMRCNHTLLYNKLPLVHT

SEQ ID NO: 310126 - protein, 59 aa, Zea mays
  Clone ID: MRT4577_45894C.1.pep
EHLQRHHLAPDASLLYISAHSDLLHAREEVAAERALHLEALAVYAKAVDMVEEHHAVAG

SEQ ID NO: 310127 - protein, 100 aa, Zea mays
  Clone ID: MRT4577_45895C.1.pep
KRPSSSPPSVPNLIDTRPTCAASSSLAATGNVMEPQIRLTTLPKPCHDGNAPSSHAAEAPARPPYAYLPPPQSHPPPTPPPRCSKLLREQRSPLPCRNYP

SEQ ID NO: 310128 - protein, 70 aa, Zea mays
  Clone ID: MRT4577_45896C.1.pep
RNRGLLGFLCLPLEAFKKTPGPGPFSKFFFVSLPILFKNLVGGPKKGNFSPPPAGWSIKNFKRPLQKCWG

SEQ ID NO: 310129 - protein, 73 aa, Zea mays
  unsure (1)..(73): unsure at all Xaa locations
  Clone ID: MRT4577_45897C.1.pep
MLLMWTTTSLHGPGDAIDCGASCSCRCRRPPRSNTSLRASGTCCQRCRCAPFCSCWNXDVCFCYCILKIHYCT

SEQ ID NO: 310130 - protein, 66 aa, Zea mays
  Clone ID: MRT4577_45898C.1.pep
KLYVFFNANLHQEFSTSFLVFFGISNSFSVSFNTSNFYVNKIFTNCFSDFNISILYLNNVVPNCGL

SEQ ID NO: 310131 - protein, 86 aa, Zea mays
  unsure (1)..(86): unsure at all Xaa locations
  Clone ID: MRT4577_45899C.1.pep
PRGTPYCSPKCQLLGKKCCHQLRQVEPKHGYQGILGLVLQSILKQKPQRGQVGGLLGAQKAQQLRAMWGLKKPTPCPXVAAGGVPH

SEQ ID NO: 310132 - protein, 96 aa, Zea mays
  Clone ID: MRT4577_4589C.1.pep
PRRPAKPPKRIQNNATKPRVQWDNGTELPAGGSPPGLNRRGATATTSRAWTAPGPGARCRGAHITTAPPRPASPTKTGVQTAGSHIRRCSYKPSLN

SEQ ID NO: 310133 - protein, 51 aa, Zea mays
  unsure (1)..(51): unsure at all Xaa locations
  Clone ID: MRT4577_458C.1.pep
LXSEERHXAQHLRESRHTTLNHTTFSDAYLEHSFLIRAEASTQLSISQTNI

SEQ ID NO: 310134 - protein, 52 aa, Zea mays
  Clone ID: MRT4577_45900C.1.pep
SCVCRAQNLESNRHSPISEQYTPPERRSMLPYSAVLPNGVGKPWRSRPGYRR

SEQ ID NO: 310135 - protein, 92 aa, Zea mays
  Clone ID: MRT4577_45901C.1.pep
MAERAGEELASTAAGPGTAFCPDLEVDSWLGFRFHDLDFGYGAPCAFLPPDLPVEGLMILVPSCAAKGGVDLFMALDDDHVDAFKHICYSMD

SEQ ID NO: 310136 - protein, 90 aa, Zea mays
  unsure (1)..(90): unsure at all Xaa locations
  Clone ID: MRT4577_45902C.1.pep
LFRQHANCAMXPSGPAIRFSGRMAFSALSVVPECIKLSPLYDFGEFCVFDFGEELCWLFAFVFFVRIANSLGELLLCLFGTGNSITTLPL

SEQ ID NO: 310137 - protein, 98 aa, Zea mays
  Clone ID: MRT4577_45903C.1.pep
RSFLQIDSLLRASNGRQKLSLLMLLGLSACAGGGDHCWVGWQAPMGLLNQAGLIAAMVAVCESACFKRTGLVKTVTTGIVPIRHLGLYKQISGLNDNK

SEQ ID NO: 310138 - protein, 43 aa, Zea mays
  Clone ID: MRT4577_45904C.1.pep
PFCRRCALGLNWPSRASVADTLKRLPEHQSSPSLWILYDGITS

SEQ ID NO: 310139 - protein, 65 aa, Zea mays
  Clone ID: MRT4577_45905C.1.pep
KQGVPPHILRGAVSYLATAEPYVVLNKIKGDDDFSRHVRCWHARERGAMVRTVQFRSTPGVMHAW

SEQ ID NO: 310140 - protein, 142 aa, Zea mays
  Clone ID: MRT4577_45906C.1.pep
LVAGAWLSGDLDVAKSRSATGRSAAPLPGFMLVSVLFRFGASSSSPLRQFLLVSTSALLSCSASALLARLHFGAAELLRWRTGRDYATPRRRHAAGGCRRRHGLYWAYSLVLGRDRGCSPGSPGRRSAPGRQDAEAAARVNA

SEQ ID NO: 310141 - protein, 82 aa, Zea mays
  Clone ID: MRT4577_45907C.1.pep
TADIFTYHPNHHQKRGLCLLRTQSMKKAKTYTVNKLPCNKRGEPYPLYRRALYTCPLPLICPPKWTYLTETQGACGASLPFG

SEQ ID NO: 310142 - protein, 37 aa, Zea mays
  Clone ID: MRT4577_45908C.1.pep
SRCAKYHESAVDVDANVDTTSSSCMFVDIMYLPGRPL

SEQ ID NO: 310143 - protein, 58 aa, Zea mays
  unsure (1)..(58): unsure at all Xaa locations
  Clone ID: MRT4577_45909C.1.pep
TSLSCAALFFFFFGYFLKIFGGXKNNPNLADQFARTTPPLLPLISRLYQRINTSFYSS

SEQ ID NO: 310144 - protein, 71 aa, Zea mays
  Clone ID: MRT4577_4590C.1.pep
LRILMVLSCHIISKLLPYHGKQALTLLKSVDSTYEMAEDIWQVLAKAKYLDWEKHSTERLWRMESLKYVRY

SEQ ID NO: 310145 - protein, 31 aa, Zea mays
  Clone ID: MRT4577_45910C.1.pep
LVCLAVARGLTTLKGPSISARLKMDRNRYWR

SEQ ID NO: 310146 - protein, 58 aa, Zea mays
  Clone ID: MRT4577_45911C.1.pep
LVFIFLLCVQVEAPRVQPKLSEPFLGFTQTAEIWNSRACMIGLIGTFIVELVMDGHDV

SEQ ID NO: 310147 - protein, 116 aa, Zea mays
  Clone ID: MRT4577_45912C.1.pep
MAARCSSLSSPSLSVHGPLRRNKPSKRLAPCLPSSPRPGAAALRARAAKLPPGVEAPRVQPKLSEPFLGFAQTAEIWNSRACMIGLIGTFIVELVLNKGILQMIGVEVGKGLDLPL

SEQ ID NO: 310148 - protein, 61 aa, Zea mays
  Clone ID: MRT4577_45913C.1.pep
MRECIFVHMGQAGIQIGNACWELYCLQHGIQPDRQAPADKTAGHDDDAFSTLVSQTGAGKH

SEQ ID NO: 310149 - protein, 74 aa, Zea mays
  Clone ID: MRT4577_45914C.1.pep
RVWVSLTNYQVNKPAACTNEAPIHIPTPAYSQVDYVTFPAQHTSRMFVSPARQASTMRIFSSSLCRIKWIAQPA

SEQ ID NO: 310150 - protein, 101 aa, Zea mays
  unsure (1)..(101): unsure at all Xaa locations
  Clone ID: MRT4577_45915C.1.pep
MAAKIFCFLMLLGLSAGAATAAIFPQCSQAPIAPFLPPYLXPAVSTIXENPILQPYRIQQAIAEGILPXSPLTLQQHEALLQKKXVMHLTTQNMKAQQLQQ

SEQ ID NO: 310151 - protein, 213 aa, Zea mays
  Clone ID: MRT4577_45916C.1.pep
MADGALLDLLPQIHALFSDQLRVISYKWLSRNFSVSSNDAKRLLQEFVNKHGTDHEVIYSVSGWLKNNPQNYCVQLTSSSKLEEARRTFKDSCSVQVYSIQACIPKDTAVLWNPEFVQAEELFNQPFDEENCLRDNRFCGVRNSFVKRTTTGKHVSSMPPKPTNSVVAPAVPKPSSAPKGQSSMVRQQDLPAEKDNAPVLDKTVNAPSVTEPS

SEQ ID NO: 310152 - protein, 74 aa, Zea mays
  Clone ID: MRT4577_45917C.1.pep
LNQPFCLGGTFFLGGTRNKQPESREKIRSYLIWDGQPWKGILVSFKVNPIGCKRFKTKKKEFEKQKGGLNKNRG

SEQ ID NO: 310153 - protein, 84 aa, Zea mays
  Clone ID: MRT4577_45918C.1.pep
CYILHPCNVCHLYCLPKIERVPHVRMNQHRNRGLLRFVNLPLHGLKLLSADHIRVLLRLVTGLPNLRPRKCLLPVLLLLLLLLQ

SEQ ID NO: 310154 - protein, 70 aa, Zea mays
  Clone ID: MRT4577_45919C.1.pep
DSHHQMLGRIDSKDGVHPGMRASNKYSHSRSHKPMPIIGQRSRLAFCYHAVAPSPLGCSEIVLYHQVINV

SEQ ID NO: 310155 - protein, 48 aa, Zea mays
  Clone ID: MRT4577_4591C.1.pep
DRNLFGRTAALGFDRLPVKGGACHVAVWCAILMLIRSHVVLPPRKQAR

SEQ ID NO: 310156 - protein, 37 aa, Zea mays
  Clone ID: MRT4577_45920C.1.pep
SRRNAHSSTLPREDFKSPRPQPSTARHGTTAARKISH

SEQ ID NO: 310157 - protein, 94 aa, Zea mays
  unsure (1)..(94): unsure at all Xaa locations
  Clone ID: MRT4577_45921C.1.pep
GPDEFRPKRFLEEKKSVEAPGNVFRLVPXGVGPRSCLGIILGVPIMGIPLGRLVQNFQLLPPPGLAKFAPPEKPGQFSNQFAKHAPLVCKPLGA

SEQ ID NO: 310158 - protein, 232 aa, Zea mays
  unsure (1)..(232): unsure at all Xaa locations
  Clone ID: MRT4577_45922C.1.pep
MAGAATPPPSSSSSASCGTDAAYLLFRGETLLPDGVHASLYAVALAYCFVGLSAVTARFFKSMEQIMRHSREVVVGVDPRTGAPVVRRDKVWNYTIADIALLAFGTNFPQISLATIDAIRNLGQLTAGGLGPGTLIGSMAFDLFLIHAVCVVMPRAGSKMKISDLGIWLVELFWSFWAYIWLYVILEVWTPRVITLWEAXLTVLQYGLLLLHAYAQDKRWPFVLIPLYDPDS

SEQ ID NO: 310159 - protein, 55 aa, Zea mays
  Clone ID: MRT4577_45923C.1.pep
KPLLAWASPCSFLAGSGSVVSRKSRRSAEESALLRIVASPGYRFTLGAPRTPPVQ

SEQ ID NO: 310160 - protein, 87 aa, Zea mays
  Clone ID: MRT4577_45924C.1.pep
SSRHQLVVRSGVRDLPCVVADIASYDRGREVDTAIRADFVRSWIGDLVRARGEARCRRVRQVFGSPRADQAPRWLVDKLNETLNVER

SEQ ID NO: 310161 - protein, 82 aa, Zea mays
  Clone ID: MRT4577_45925C.1.pep
ARLVFGPVANRTSSAARSRATRATRAHEALIPEPHAGRDSPAVHHACMPDVCIVGTGGARSWHLRYPTCTLAGTALVASIRS

SEQ ID NO: 310162 - protein, 122 aa, Zea mays
  unsure (1)..(122): unsure at all Xaa locations
  Clone ID: MRT4577_45926C.1.pep
YKCQVLLCGLLGIPPFLPQSPMHTRSLAVLKWQVXNSNWSMWFADVISFPHTFPSLKXLVSKKMVDTAKESVGRSATSLEIYGKMEEVFIEMDSERNMSLLTLCLLVLDLFICVNKKQSLLN

SEQ ID NO: 310163 - protein, 79 aa, Zea mays
  Clone ID: MRT4577_45927C.1.pep
LNQLKIPPNQIQPENNKEALKMHLTKSFYLLFALCTVSFTLPTPQPAPVDDTLSKRYDGDDECDVVLGSDGVASTDRSC

SEQ ID NO: 310164 - protein, 91 aa, Zea mays
  Clone ID: MRT4577_45928C.1.pep
LVSSMISQGGTDSFITLSPVENQDGDLVTNNQWLTFHTLFPRIAWSSLDLFEQRDVIKELTLRTKRNRSLIAWIGERPYSIFQMIAVACKP

SEQ ID NO: 310165 - protein, 62 aa, Zea mays
  Clone ID: MRT4577_45929C.1.pep
LSSPVFFWVEGFHPPSRFFVPPLGLPHYYKCQMALFFFLKKFAQVIVFKKGIVCVPQKNPTP

SEQ ID NO: 310166 - protein, 37 aa, Zea mays
  Clone ID: MRT4577_4592C.1.pep
AGMLLFPVMLCCTCDVASFVCVISNLLARLASGGHRD

SEQ ID NO: 310167 - protein, 118 aa, Zea mays
  Clone ID: MRT4577_45930C.1.pep
MGRPRCSEVKPEQQQQQQRDVSVAQRRPKPTVPKPPPTEHDEYPVRAKQQQQLAKDGKLEATKRKLQEGYQEFNNAKKQRTIQMVDPQDLPKQGSRNLALSGKPRNSSNIRNRLAVRR

SEQ ID NO: 310168 - protein, 45 aa, Zea mays
  Clone ID: MRT4577_45931C.1.pep
TTLYTHTTFAPQGPRNVGRRRRRRAAERPLETGDHHQVPIQRASR

SEQ ID NO: 310169 - protein, 195 aa, Zea mays
  Clone ID: MRT4577_45932C.1.pep
MVHVNFYRNYGKTFKKPRRPYEKERLDAELKLVGEYGLRAKRELYRVQYALSRIRNAARELLTLDEKNPRRIFEGAALLRRMNRYGLLTEEQNKLDYVLALTVDNFLQRRLQTIVFKNGMAKSIHHARVLIRQRHIRVGKQLVNIPSFMVRVDTEKHVDFSLTSPLGGGQPGRVKRKNQKKASGGGGDDGEEEED

SEQ ID NO: 310170 - protein, 582 aa, Zea mays
  unsure (1)..(582): unsure at all Xaa locations
  Clone ID: MRT4577_45933C.1.pep
MLDSLGHSPSAIPSICFYTTSPARDWPPIVEWKPYSSPSAAVAAQFPHPIPTLRSTDPYMMGEAKENDVYEEELLDYEEDDDKTVDGSAAKPTGEVAKKGYVGIHSSGFRDFLLKPELLRAIQDCGFEHPSEVQHECIPQAILGMDVICQAKSGMGKTAVFVLSSLQQIDPVAGQVAALVLCHTRELAYQICHEFERFSKYLTEVKVAVFYGGVHIRKHKDLLKNECPHIVVGTPGRILALARDKDLSLKNVRHFILDECDKMLESLDMRRDVQEIFKMTPHDKQVMMFSATLSKEIRPVCKKFMQDXFFGVCHFLCVGNWGRLPSVLVSLVDISSLLHTQCSWFHLIGLQWRWFSYGFXLELSILEXVQCITELLYGGCMYXVYWYIYCRRWNANFVSFXPMEIYVDDEAKLTLHGLVQHYIKLSEAEKNRKLNDLLDALDFNQVVIFVKSVSRAAELNKLLCECNFPSICIHSGMTQEERLTRYKNFKEGHKRILVATDLVGRGIDIERVNIVINYDMPDSADTYLHRVGRAGRFGTKGLAITFVSSASDSDVLNQVQERFEVDIKELPEQIDTSTYMPS

SEQ ID NO: 310171 - protein, 100 aa, Zea mays
  Clone ID: MRT4577_45934C.1.pep
LFFFFFFLIWSLNNWNRIFLQHYIKLSEVEKNWKLNDLLDALDFNQVVIFVKSVSRAAELNKLLCECNFPSICIHSGRGVRSSHSCSAGSYRPWSPEGSS

SEQ ID NO: 310172 - protein, 103 aa, Zea mays
  Clone ID: MRT4577_45935C.1.pep
RWNANLFHVSFVPLHPMEIYVDDEAKLTLHGLVQHYIKLSEVEKNWKLNDLLDALDFNQVVIFVKSVSRAAELNKLLCECNFPSICIHSGMTQEERLLQTLES

SEQ ID NO: 310173 - protein, 670 aa, Zea mays
  unsure (1)..(670): unsure at all Xaa locations
  Clone ID: MRT4577_45937C.1.pep
MMGEAKENDVYEEELLDYEEDDDKTVDGSAAKPTGEVAKKGXTSGSTVPVSETSCSSQSCSVLSRXGFEHPSEVQHECIPQAILGMDVICQAKSGMGKTAVFVLSSLQQIDPVAGQVAALVLCHTRELAYQICHEFERFSKYLTEVKVAVFYGGVHIRKHKDLLKNECPHIXVVGTPGRILALARXKDLSLXKNVRHFILDECDKMLESLGNFLSAIVNMFNYSIKYNCYPXKYMYYADMRRDVQEIFKMTPHDKQVMMFSATLSKEIRPVCKKFMQDXALQPSPALLSKVIIFYSHCSCGGPPVAVSHLPALELXVSSALSRWEDSIPQCLHLXHKSVLFAFFRYPTPSVLKMRSPSSWSTSPVCCTLNVNLVSLNWTSLVLVLQLSRAGGERILLLELYLEAPLQNLSIFGKNLVLNNAXELLYGGCMYXRGGLSLYWYIYCKTDAGMLICFMYHLFPXPMEIYVDDEAKLTLHGLVQVIQEYSAFESCTFFYLFSLNNWNRIFLQHYIKLSEAEKNRKLNDLLDALDFNQVVIFVKSVSRAAELNKLLCECNFPSICIHSGMTQEERLTRYKNFKEGHKRILVATDLVGRGIDIERVNIVINYDMPDSADTYLHRVGRAGRFGTKGLAITFVSSASDSDVLNQVQERFEVDIKELPEQIDTSTYMPS

SEQ ID NO: 310174 - protein, 76 aa, Zea mays
  Clone ID: MRT4577_45938C.1.pep
SRSSQRCATRSASYSCVPARLKKRFSCSPTEGRVPNSSSIVHGSCRIKPMASKAHNCGSCAHTSSLWSANSTSGND

SEQ ID NO: 310175 - protein, 73 aa, Zea mays
  Clone ID: MRT4577_45939C.1.pep
SNSLLTFRFVSAADEAYYSYGVVDSAAVLTRFVLDSSGQIQRLMWIDMTRSWSLFWSYPLDECDCYRACGPYG

SEQ ID NO: 310176 - protein, 117 aa, Zea mays
  Clone ID: MRT4577_4593C.1.pep
LAHVVDFGARELGAMVDCSPKSLWRRESTGRCGPASLELYSAEEGSDPPELLAPEEGQEPDPSEINLLCQESFDEGKSILPLMHYLPISLYHCLSLEYGMGIELHGEHERAHINNHL

SEQ ID NO: 310177 - protein, 88 aa, Zea mays
  unsure (1)..(88): unsure at all Xaa locations
  Clone ID: MRT4577_45940C.1.pep
FYIFQGLCAVLKKKKKKKKKKKEKKKKKKNIKTKKHKKKKKKKKNKQXKKNKKYIKEEKKKNMVLGLTPHWGKFYKIPKNESPGGTSP

SEQ ID NO: 310178 - protein, 201 aa, Zea mays
  Clone ID: MRT4577_45941C.1.pep
MPTVSYRRFAHILGFTDGDISGDKIKIHDFRPPTKDEAKDLHISESDEYWKSTNLIRRLRKAPSSSHGQAAAGTSRPSPGRGSPTPRGRGRGCGRGMGARLAHGITAFFSMCRNISFDVHELARRQRETDDNLRRQASSMGMPFAPRSPDVPLHPPSPEINEWHQQAYGVPFMSAEDEEGEEEEFFDDREHQYYLISYAIQ

SEQ ID NO: 310179 - protein, 40 aa, Zea mays
  Clone ID: MRT4577_45942C.1.pep
RPKAKAKAKAKDQTKAQAAAPASVPAQAPKRTQAPTKASE

SEQ ID NO: 310180 - protein, 95 aa, Zea mays
  Clone ID: MRT4577_45943C.1.pep
VVLSATTSTNFRSDDEDVQRHPHGGRRRRQRSGRSPRRGSTGITSSTREQQQQHDDAGCGGSYHHDKDYIIMQTQARSGLACQPTISVMGKGGQP

SEQ ID NO: 310181 - protein, 52 aa, Zea mays
  unsure (1)..(52): unsure at all Xaa locations
  Clone ID: MRT4577_45944C.1.pep
RGETEXTASVADARRPRRSDRHQSAAATPNNGTLWAPTTTTLPPAVWPPEKG

SEQ ID NO: 310182 - protein, 57 aa, Zea mays
  Clone ID: MRT4577_45945C.1.pep
FHPILLAQGQGGVTRVDLVKGFFFGGFLKGGGTLVMLVERFLPEVAFKFWKGPKYGA

SEQ ID NO: 310183 - protein, 69 aa, Zea mays
  unsure (1)..(69): unsure at all Xaa locations
  Clone ID: MRT4577_45946C.1.pep
NKPGVPEMQVEEGKDDLPGANFSEGSPTPPNEATEQEEDEDGRGSGAKGEGGGRQXSDVIKRTRGWSRG

SEQ ID NO: 310184 - protein, 45 aa, Zea mays
  Clone ID: MRT4577_45947C.1.pep
LEAYNLGAAPTEGANCLDLLHWDSWRGIGVPLSFHCYLVLNALKI

SEQ ID NO: 310185 - protein, 219 aa, Zea mays
  unsure (1)..(219): unsure at all Xaa locations
  Clone ID: MRT4577_45948C.1.pep
MGASESLLSRQQLQQPRPQWADEITTVSEGRRDDADADPLVRRIRSLTIAPPLLSSQSEAEAESSLTDILVGKPSNSSATSGNLNPNVLAELFAMYREWQEENAKKISRKQXTWNVLVQEEIENKIETADALAVKLLQRFNYCLTYMRSTSHNLAEVHPLQIEVGESKGRLTEVISNCDALCKRIAAEGPESLRSSVQPFMAARAEAEGSGSLDPKQES

SEQ ID NO: 310186 - protein, 54 aa, Zea mays
  Clone ID: MRT4577_45949C.1.pep
LPRARELKIRIQVEELYHCPTYIPGPNTHLTSSTQLNIFKHHTTPEVLTTLLYL

SEQ ID NO: 310187 - protein, 49 aa, Zea mays
  unsure (1)..(49): unsure at all Xaa locations
  Clone ID: MRT4577_4594C.1.pep
GYYPPLFKYAISSINGPPPPKRXXXXLKRRKKVLLLLSLPKRWSVCHYT

SEQ ID NO: 310188 - protein, 77 aa, Zea mays
  Clone ID: MRT4577_45950C.1.pep
SNPHKNGKSPVLGPPPPNPPPILTSQAHKPRVPKKKKKKKKKKKKKKKKKKNKKKKKKKKKKVSAFSLLRANPAHCG

SEQ ID NO: 310189 - protein, 79 aa, Zea mays
  Clone ID: MRT4577_45951C.1.pep
KQLVPSWAGIGSGGGRQKRPQGDLGGNSDKSFSWGAGQGGGWPNPHPNLSKAKCWPPAARKNPERIFGSHSSGRAQHQS

SEQ ID NO: 310190 - protein, 130 aa, Zea mays
  Clone ID: MRT4577_45952C.1.pep
FFFFFFFFFFFFFFFFFFFFFFFFWQTNPFKKSFPFRTNGKQTTLTQGPEKKITGIDKQEQEALKGQPPLGKPKRGHPRGGLGGNKGDKKTGLAGTPSFKNGYKRKKTWGADQKKNPGTGKISNLNRGRH

SEQ ID NO: 310191 - protein, 168 aa, Zea mays
  unsure (1)..(168): unsure at all Xaa locations
  Clone ID: MRT4577_45953C.1.pep
MSDSGEQNYGERESRSASRSGSAHGSGKSARHTPARSRSKEDSRRSRSKSRSRSESRSRSRRSSRRHYTRSRSRSRSHRRSRSRSYSRDYRRRHSHSHSPMSTRRRHVGNRANPDPNCCLGVFXXLSLYTTERDLXREVFSKYGPIXDVSIVYDPASRRSRGFAFVYF

SEQ ID NO: 310192 - protein, 118 aa, Zea mays
  unsure (1)..(118): unsure at all Xaa locations
  Clone ID: MRT4577_45954C.1.pep
GSHEAPSKKPALPRFYGLAVERFTYTDELLLEQQHQLNNPARRSITVLWKSSSEFEEIFKKMYHICSPTTYIXFRLMICTQLAYRGQQHDNDTTRSRPSLQKQQLHKDLHKWVVQSSL

SEQ ID NO: 310193 - protein, 179 aa, Zea mays
  unsure (1)..(179): unsure at all Xaa locations
  Clone ID: MRT4577_45955C.1.pep
MKSTVRLLIAQRSFRKLDDDLLARRYLSVYQGSEXDLQXYTTLSYVPSXRIYNLPRERVNXLDALVRMTGITAKEQGVKDESSSASSGSYHDGVWNTWAQLAEEEXDDDADLFDEETEDDKNYAEDFHGAVKVSDKKKESGKPSHLLDAKPWDDETDMRTLDEADMNVQMERLLCWDPS

SEQ ID NO: 310194 - protein, 143 aa, Zea mays
  Clone ID: MRT4577_45956C.1.pep
VLAGVEVLRPLNDIKIETEAPLKVVVWTNEEGSRFPPCMMGSGVFAEKFSLADTLAKVDVDGVSVGDALNAIGYAGTRAVSGHKVGAYFEAHIEQGPILEDEKKTIGVVLGALGQKWFDLKLRGVEAHAGPTPMHLRKDALVG

SEQ ID NO: 310195 - protein, 157 aa, Zea mays
  Clone ID: MRT4577_45957C.1.pep
MEEQFILRVPPSVAERIERLMNESASSSSNPDEASLDLSFSEDGRNGTFMIGNESFPASLLDLPAVVESYKTYDDSVLIKTADVGQMIMVREENDPAPEGVEYKHGLTPPMRDARRRRFRREPDLNAELVNQVEKHLINQNASATGGEEGGDRKNLQ

SEQ ID NO: 310196 - protein, 46 aa, Zea mays
  Clone ID: MRT4577_45958C.1.pep
APAMKSRLIGIDIETRRGQTTILHRNTPVLGAAHVSARPGQLRTCS

SEQ ID NO: 310197 - protein, 157 aa, Zea mays
  Clone ID: MRT4577_45959C.1.pep
MEEQFILRVPPSVAERIERLMNESAASSSNPDEASLDLSFSEDGRNGTFMIGNESFPASLLDLPAVVESYKTYDDSVLIKTADVGQAELVNQVEKHLISIMHGVSVNQNASATGGEEGGDRKKPPVARAAKQPGVQEPAANGEEADPERSDSDDSDN

SEQ ID NO: 310198 - protein, 42 aa, Zea mays
  Clone ID: MRT4577_4595C.1.pep
LHCEPGQFSLTVSCWEAGCMFNLAPTPSRIVSLLSSGQVILG

SEQ ID NO: 310199 - protein, 61 aa, Zea mays
  Clone ID: MRT4577_45960C.1.pep
NCALNLVTLVTSACPLSVVSHRNGPHKSLTSCCVKRANGSLENIVSICRVCVGPASSTIKN

SEQ ID NO: 310200 - protein, 197 aa, Zea mays
  Clone ID: MRT4577_45961C.1.pep
MEEQFILRVPPSVAERIERLMNESAASSSNPDEASLDLSFSEDGRNGTFMIGNESFPASLLDLPAVVESYKTYDDSVLIKTADVGQMIMVREENDPAPEGVEYKHGLTPPMRDARRRRFRREPDLNAELVNQVEKHLISIMHGVSVNQNASATGGEEGGDRKKPPVARAAKQPGVQEPAANGEEADPERSDSDDSDN

SEQ ID NO: 310201 - protein, 62 aa, Zea mays
  Clone ID: MRT4577_45962C.1.pep
CCPVHCFPVCSPPRPYFNVPCLTCSDGWVVRCSFRRSGIVRACVFFCSCWSAALVLLYSSIH

SEQ ID NO: 310202 - protein, 69 aa, Zea mays
  unsure (1)..(69): unsure at all Xaa locations
  Clone ID: MRT4577_45963C.1.pep
MLLVRRSNVFDPCXMDLFDPFDSMFRSIVPSPSSAXRAXTVAVFSAPIVWKDTHEAQVFKADLPPVKRE

SEQ ID NO: 310203 - protein, 137 aa, Zea mays
  unsure (1)..(137): unsure at all Xaa locations
  Clone ID: MRT4577_45964C.1.pep
TNACYGGTAAVFNAVNWIEWSSWDGRYALVVAGDIAVYATGNARPTGGVGAVAMLIGPNAPLIFERGLRGTHMQHAYDFYKPDMLSEYPIVDGKLSIQCYLSALDRCYSVYRKKIRARWQKEGNDRDXTLNGFGFMI

SEQ ID NO: 310204 - protein, 66 aa, Zea mays
  Clone ID: MRT4577_45965C.1.pep
LSHALVPEPRSYTADRPSFFFFFFLISFFAVFNPFNNKPYTFFSTTQISIYITILHFSTFTKTDRK

SEQ ID NO: 310205 - protein, 109 aa, Zea mays
  Clone ID: MRT4577_45966C.1.pep
PPFPRGPPGRLLGPKPGFPLNAPFTKLVPGGPPRVGGHHPGGPPDPPHVPAPVGKKKNKFSPPPRGGPPRPFGPPPFFRLGYAGNKFDRAPWPRGPPWFWPRCPFFVLT

SEQ ID NO: 310206 - protein, 100 aa, Zea mays
  Clone ID: MRT4577_45967C.1.pep
EHKGGQDLCDTLPALDIYFAVNRQLSEPKMRFSTSSAPSLLATKSSPNLCGTPSPGSPSTHSNNPLESWKICSPGDNPQLVKTRLRHWAQVVACSVKHSS

SEQ ID NO: 310207 - protein, 88 aa, Zea mays
  unsure (1)..(88): unsure at all Xaa locations
  Clone ID: MRT4577_45968C.1.pep
PFAKSGGAGRRGRRRRSGHPSRRYTMERPELELPECXRRARGGSKRRQRRAGLLQLEEMAQWMKEERAHGVQSPRRGERARAKLSLET

SEQ ID NO: 310208 - protein, 68 aa, Zea mays
  Clone ID: MRT4577_45969C.1.pep
MASNYVDTTGEEGRFHAHGHHSNSTTPTGEAASPKNTRRRWPGSASAPSGAGHRLASTHAGSFKCRFH

SEQ ID NO: 310209 - protein, 94 aa, Zea mays
  Clone ID: MRT4577_4596C.1.pep
EFGTRSTALNEALREEVQRLKIAAGQVGNMNGNPFNGGLQQQIPSYFVQQQQMPYFGGHQAQHQHHSQNHHHRSPSNGRQSPSDQSLNDSMDFV

SEQ ID NO: 310210 - protein, 60 aa, Zea mays
  Clone ID: MRT4577_45970C.1.pep
FVHAFGHAFGWVFQNRFGRDNHFRNIGLSYFMHNWFKETGEGFLSSTGVEFTCRLWGGWG

SEQ ID NO: 310211 - protein, 54 aa, Zea mays
  Clone ID: MRT4577_45971C.1.pep
PGCANPKSRVVCSINRICQYSIPRVVGFVSVFPWGIFALVTRVLCVNKIQYQGF

SEQ ID NO: 310212 - protein, 107 aa, Zea mays
  unsure (1)..(107): unsure at all Xaa locations
  Clone ID: MRT4577_45972C.1.pep
ANPSADTYSAFKDHDAPQDQGRHGGNLGNQTDGADRVTNINVTXDSQILLTGPDSIIARSVCVDADPDDRLKIGHDLSQTTGIAACSCRLRYHSTPALYTIDGLGGA

SEQ ID NO: 310213 - protein, 110 aa, Zea mays
  Clone ID: MRT4577_45973C.1.pep
DVSAAINVMRNICKHTISSIQYYIVPVTVDHFPIQREILRKEADRQMFYEVDVEIRKSLSISYEVFFIIGTAAQHVLSCSCAAILPFITISFNMKFLSSNAARYRASSRS

SEQ ID NO: 310214 - protein, 102 aa, Zea mays
  Clone ID: MRT4577_45974C.1.pep
GVVPPPLYLLKGPSPPGMLGPFYGQHPPFYWTGACFQYRVFKKNPFLGKLFFAIPPPAQISGLERPISLVVPLFCLPPFPLKFSHGGEFPFEISHIIKNFWP

SEQ ID NO: 310215 - protein, 257 aa, Zea mays
  Clone ID: MRT4577_45975C.1.pep
CQGIRQGVVSGLGFGLSFFVLYSTYALCFYVGANFMLDGKATFTDVFRVFFALLMATIGVSQTSALGPNSAKAKASASTIFALIDSKSNIDPSSDEGMVLADVTGELELRHICFSYPSRPGTQIFRDLNLRIPSGKTVALVGESGCGKSTVIALLERFYDPDSGTITLDGVDIKDLKTGWLRRQMGLVSQEPVLFNDTIRANIAYGREGEATEEEIVAAAEAANAHEFVSALPQGYGTLAGERGAQLSGGQKQRVAI

SEQ ID NO: 310216 - protein, 99 aa, Zea mays
  unsure (1)..(99): unsure at all Xaa locations
  Clone ID: MRT4577_45976C.1.pep
SYKIKGKLPMGGXPRREDNPHKKAGEPHRKEEGDPHRKDAGNHKEGFXKKIKDKITGKHGNKSGNHREKRDRKKKREKKKHGKGHNHNGGHSTSSSDSN

SEQ ID NO: 310217 - protein, 113 aa, Zea mays
  unsure (1)..(113): unsure at all Xaa locations
  Clone ID: MRT4577_45977C.1.pep
PAASATRLGGASRVPASGSSLSSRLLSLPASXRFIXFMPRHLEPRSALPARIVPPAPPCLFPGSSFKRPGRAIAPLGKWQPRLIXXSRTSIQLPHNSLXXLGAFAKGPPLLQI

SEQ ID NO: 310218 - protein, 138 aa, Zea mays
  unsure (1)..(138): unsure at all Xaa locations
  Clone ID: MRT4577_45978C.1.pep
VFVGPVCPLLIMPPHLFGGSPTWVTWTFSIKLNFSVPRALXALVFFPPLFVKKGAPPNPLEKFLCIKGIVFFSFWQGFALNFLPQPGVFKSPPFWVGVGPPQGGFQNARVTPKRGGFPVPPRDASPVPPPTGAERAKF

SEQ ID NO: 310219 - protein, 66 aa, Zea mays
  Clone ID: MRT4577_45979C.1.pep
EDFRKIYKQEKPSVKSMQEIGKACGEKWNTMAFEVSIFSLQPDSCVPLVIYHLMLPADVNCLIPQW

SEQ ID NO: 310220 - protein, 101 aa, Zea mays
  Clone ID: MRT4577_4597C.1.pep
FPFCPVGFAFFQQQKFFPFNQLAPLNPPVFFHQQIFFPFNELVSPIWVSFFTQHQLVPFSKQFGGNPPPLFQIHQLLPFVPLVLTNPPPSSPQPIIGGALF

SEQ ID NO: 310221 - protein, 216 aa, Zea mays
  Clone ID: MRT4577_45980C.1.pep
PGPEDDKVVMQRKQHARHIDVISPSKSRMAVSSFSSVSPVKKQPNLSHQPKFLLESTNSSNHRASEVSGAVTATTTAGASSTLAAQLVSNKGPVSSAATRNEKPVLVTNKPLQVLVPSKSEAQKQASLTGSASTQVVSVSRPLSAPQVPAAKQSVPATTAQNAPLLSRSVSAVGRLGNEPSANAPSFIPRSRTYRNAMMEKSSGGVSSLTHQQGSS

SEQ ID NO: 310222 - protein, 55 aa, Zea mays
  Clone ID: MRT4577_45981C.1.pep
PPPAQRVGQSKKRYFSIKDGSDPHACIANTQSGHSTDKVIEIRPSAIPNIRASFA

SEQ ID NO: 310223 - protein, 33 aa, Zea mays
  Clone ID: MRT4577_45982C.1.pep
LISNLKEGTTNDGAVVERFWRCQNKLVDWHKLL

SEQ ID NO: 310224 - protein, 114 aa, Zea mays
  unsure (1)..(114): unsure at all Xaa locations
  Clone ID: MRT4577_45983C.1.pep
LIHLPFVYYVNVTGLSVGRTWANGPAGPFVLDPSTCSWTTIDSDTVTTRXTAPVYAALGEELPTKVAEANEYTSLGAHDTCFNTDEVAVDRAPPVKLHMXAACDLTLSMENTLI

SEQ ID NO: 310225 - protein, 104 aa, Zea mays
  Clone ID: MRT4577_45984C.1.pep
LPVVPTLHPRRSSTCPRPIHCSPLPCLESRLSTDNVERGCRLTSRRHGYSGSRHFPTPAYHQDTLAEDNDFDPLSMLRTTTSRGERWTQMCPTCFVRCCERPHC

SEQ ID NO: 310226 - protein, 274 aa, Zea mays
  Clone ID: MRT4577_45985C.1.pep
MSIVVASEVATALASRGAVVALESTIICHGMPYPKNLQMAMEVEAIIRDNGAIPATIAVLDGVPHVGLNNEQLKRLAISGRQFQKTARRDIVHVIASGGNGATTVSATMFFAHKVGIPVFVTGGIGGVHRHGEQTMDVSSDLTELGKTPVAVVSAGVKSILDIPRTLEYLETEGVTVAAYRTNEFPAFFTEISGCQVPCRVDSPEECAKIIYANKNLRLGSGILIAVPIPKQHATSGKIIESAIQTALKEAGYSQHLHFWNGKIRVVGLRSRME

SEQ ID NO: 310227 - protein, 53 aa, Zea mays
  Clone ID: MRT4577_45986C.1.pep
RGPSGQVLLVASGKLTLNQRVYACSWRVFRSPSVFLVGKVALCHTVRSSRLDN

SEQ ID NO: 310228 - protein, 86 aa, Zea mays
  unsure (1)..(86): unsure at all Xaa locations
  Clone ID: MRT4577_45987C.1.pep
IRTDITXYINDTVRLSCILANISIIRHPTTTTATRSKETSTAAATAVDDDGLHIYRVTTRPYHATDNTPQANLTAQPRRSRSNAEG

SEQ ID NO: 310229 - protein, 87 aa, Zea mays
  Clone ID: MRT4577_45988C.1.pep
STSFLCQLVFPPEMTYLDLSHNLIRGTVPLSLERLSTLQKLDLSYNRLCGPLPKGHGVIKHGCKPYAHNQCRKGTPLAGCQDLEWSE

SEQ ID NO: 310230 - protein, 332 aa, Zea mays
  Clone ID: MRT4577_45989C.1.pep
MASTTLLAVLLLVAASAAPARSCSPRDLQALLSVKQALGNPSTLSTWTPASPDCCSWDHLRCNDAGRVNNVFIDGADDVRGQIPSAVGGLTELMSLTLFRLAGLTGPIPACLAALSNLQFLTVSHTNVSGAIPESLARLRGLDSVDLSSNQLTGGIPASFADLPSLRSLDLGHNQLTGSIPAGLVQGQFRSLVLSYNQLTGPIPRDDARDEINTVDLSHNKLTGDPSHLFAAGRPIGKVDLSWNYLDFDLSQLVFPPEMTYLDLSHNLIRGTVPLSLERLSTLQKLDLSYNRLCGPLPKGHGVIKHGCKPYAHNQCRKGTPLAGCQDLEWSE

SEQ ID NO: 310231 - protein, 96 aa, Zea mays
  unsure (1)..(96): unsure at all Xaa locations
  Clone ID: MRT4577_4598C.1.pep
NEPSQLDMDLYAQGLARYAVSCQDNGLVPNVVPEILVDGTHDIDRWSYVIETEHAACXYNVLNEHHVILDGTLLEXNMETXGSDSKYVTHDVIADD

SEQ ID NO: 310232 - protein, 114 aa, Zea mays
  Clone ID: MRT4577_45990C.1.pep
LAHPAVGGFFTHCGWNSTVEAVSEGVPMICHPRHGDQYGNARYVCHVWKVGTEVAGDQLERGEIKAAIDRLMGGSEEGEGIRKRMNELKIAADKGIDESAGSDLTNLVHLINSY

SEQ ID NO: 310233 - protein, 119 aa, Zea mays
  Clone ID: MRT4577_45991C.1.pep
VTAYLQTQLEETWKALFSSLRYGKNFSGPGCFRHAVLSPLGYETALFKGLSEDIDCQGASAHDLWQSPDDKKTARLSEFGEMIRDSFGFPVNRHHSDKTVSGHYNILFVRREDYLAHPR

SEQ ID NO: 310234 - protein, 153 aa, Zea mays
  Clone ID: MRT4577_45992C.1.pep
GGERANLIPGFKSGALPDGVEDRVRGPGVVVSWAPQEEVLAHPAVGGFFTHCGWNSTVEAVSEGVPMICHPRHGDQYGNARYVCHVWKVGTEVAGDQLERGEIKAAIDRLMGGSEEGEGIRKRMNELKIAADKGIDESAGSDLTNLVHLINSY

SEQ ID NO: 310235 - protein, 72 aa, Zea mays
  Clone ID: MRT4577_45993C.1.pep
PPILLVVEASELSEALTARRMYAQLVHHHRLVERENGLADPDHKVGGDLHVHGRLLIAALLLLMRRMRMRIN

SEQ ID NO: 310236 - protein, 75 aa, Zea mays
  Clone ID: MRT4577_45994C.1.pep
KKKKQKGKKKTKLSALPYNIINYFLIYPKFNSLYLIFTSPFTKKTLSFPILITFNLFQVFPNLLYFPRISPPFSL

SEQ ID NO: 310237 - protein, 134 aa, Zea mays
  Clone ID: MRT4577_45995C.1.pep
GTSARRRRGASGAKNRCIDLPSLAPSSSPRMGRLTMRRSSRSQISGVETSQAPPEEFALVRATTDMLVPVTYPALRQHMHPTLSDIFQLVQISLEQGGPVQLHVGEVDSRSLSIADLDRGRAETLAIHGGLRSW

SEQ ID NO: 310238 - protein, 157 aa, Zea mays
  unsure (1)..(157): unsure at all Xaa locations
  Clone ID: MRT4577_45996C.1.pep
ESDMSQLKPSQPQEXPDRLRSVALPKRKSEPGGQDYASMSLKRRLEEAEPENQSIFEKTNLQETHHPTSSSGGGARLGGGPPSPGDPSQPMILSKIQALLKNVRSVPPANPDGHPSKYQHRRGVGSPGRELPPHRPAGCYSLLLDVVVVTYQCSKFT

SEQ ID NO: 310239 - protein, 40 aa, Zea mays
  Clone ID: MRT4577_45997C.1.pep
ILKCIRQVKSQFVIAQQMHVVKPLLILLIYFRYIAGCLCF

SEQ ID NO: 310240 - protein, 83 aa, Zea mays
  Clone ID: MRT4577_45998C.1.pep
KKKETKQNPLVGKKKTLKRGGKKIRARGGKNHTPKWFGGEFWEKGFNPQIRVSITRRKPPQGFGPFLGNPGGNPGGNPGVNPE

SEQ ID NO: 310241 - protein, 89 aa, Zea mays
  Clone ID: MRT4577_45999C.1.pep
IGGERALDRQSREGDHPIGGERHQKQEPMVHGAFSQGGLPLPSSFPPLTSLTCSVADPSLPPPVPLKRPGLVDLFFFFQLFLESIACGA

SEQ ID NO: 310242 - protein, 297 aa, Zea mays
  Clone ID: MRT4577_4599C.1.pep
MESPFRADVVKDKAALVTGGGSGICFEIAAQLARHGAQVAIMGRRREVLDKAVAALRSQGLRAVGFDGDVRNQEDAARVLAATVAHFGKLDILVNGAAGNFLASPEDLTPKGFRTVLEIDTLGTYTMCYEALKYLKKGGPGKGPSTGGLIINISATLHYSASWYQIHVSAAKAGVDSITRSLALEWGTDYDIRVNGIAPGPIQDTPGLRKLAPEEMSKGLREMMPLFKFGEKRDIAIAALYLASDAGKYVNGTTLVVDGGLWLSHPRHIPKEEVRELSKVVEKKVRASGVGVTSSKL

SEQ ID NO: 310243 - protein, 38 aa, Zea mays
  Clone ID: MRT4577_459C.1.pep
IRHAQITRWGQRSMQSFSCGQLTDGHRCPRASINSAQG

SEQ ID NO: 310244 - protein, 978 aa, Zea mays
  Clone ID: MRT4577_45C.1.pep
MAPKRKASSSSAAVIPPIDPNSQLPFAGNHMSVVFEPDLLHLVSIGVLPPRELCSWRICHGVTVPTEDTNESVIYVPFLLHGLGLPISPFFRGLLDFYHLKLTHLNPNYILQISISIHLCEAFLGMLPHFGLWKYLYHCRPGMAGGQHQLVGGASLEMRRGRKTEYLEIPLKDSIKGWRLERFIVENHGNSLPPRSGRQPNVRTPSWTESPTDQEVAEAGALLAEVGLLKERGLTAEAVVADFVFKNIQPLKDRAYPAYLYRGLADSTRVTNRRIPSVDLVNRLEMILRGKVSNVGALVAYSAWNLPPPKAFTLFVSNPPVTDGSLGLRVRPSAEEISVLVASLGGIPDDERQVHFEVPLDPSDAEISAMLDLLAEDSSDAAPAGTLVVAPPPEADITLDIQKPVTEEEKEVPVPEFTDAELDGGALPATDPNGCAPSAADPNGCAVYVVDEDDCEEEDEVPLTRKNSRQYVASGESSGVPSPALSALIGLQELSLANLDQTLEDMVPEDLLSEPADDGVMEVCADVLDAGLRSSRASSTLERGLEGQETDLDHLGPMEVTEGPSALEAATAENSVLRDGVDTCPAPEDVAGDDSARVGSASHCPAPEGTAGDDPAQVGSANRDPAPEGVRVGSPSCTSMDVHAGSPPHSGCMVVAQALDQRVALEGSVPADQVLGSIDGTELVPAGSLQAALGGDLTPGHQLISHDLGVPSFFSNLQALVDGMASQLRLQGASVPEGALSLARWNPVLLQRRVSDLEATNADMTRQISTLEERHSRDQAKLVQRCSDFEEKYSQSQTELAQVSAALDDANALSSSLRTQLDSEKEEKRILVASHDNLDRLYRDSSNSLTILERSHRFTMEELDNHRCKLQESADEVIWLKQLISAKDATIKELRASKKSIAQELEAAQLAAKVAEETSITLRAQRDRAMDKAIRARRILMRRPGVVVPEDIRADVNAAHDSSSRPSSSVAPEKDITK

SEQ ID NO: 310245 - protein, 65 aa, Zea mays
  unsure (1)..(65): unsure at all Xaa locations
  Clone ID: MRT4577_46000C.1.pep
VCQDAMSEIVGDAKEXSRTVTETVVLQIGLKNYDPEKVKRFTGSVKLHHIPRPKMMACMLRDAQH

SEQ ID NO: 310246 - protein, 143 aa, Zea mays
  Clone ID: MRT4577_46001C.1.pep
IGRYTTMTLALRNIFSYEAHDTSNPGARMTYYAYLGQYLPGASCTSILCIILEEPQTWSCLPRENLLDNLHPSVCPLDYLHLPRATTHINLRPRCLSIPFLHRHLFIGKYLEAHILDRRHHPLYTLNPVGTVNVLLATNVILG

SEQ ID NO: 310247 - protein, 110 aa, Zea mays
  unsure (1)..(110): unsure at all Xaa locations
  Clone ID: MRT4577_46002C.1.pep
FLRLFCELGGHEGGGDDCXCERHXARAVRRLAGPNNRVPADGNIDELAEAQRIGAGKLLRRNAENVAARLEQLEAQVEQMLDGLNDPNGAKNFPFDKLVGFQXPFFNLFE

SEQ ID NO: 310248 - protein, 51 aa, Zea mays
  Clone ID: MRT4577_46003C.1.pep
LLVGLWMAGRGSSVWEPFVLLYQEKCGSICGVGYLGKFISEIMLLKGPICY

SEQ ID NO: 310249 - protein, 37 aa, Zea mays
  Clone ID: MRT4577_46004C.1.pep
FFFFNSTDSLCVDKRNSSSSTVLQRHLCTTMPLKHRR

SEQ ID NO: 310250 - protein, 128 aa, Zea mays
  Clone ID: MRT4577_46005C.1.pep
FLDPPLPPPFRVHSGDHLPRVPPIAFIFAKKRPLKFPLCPKVRIYFFLPPVPVCIFVSFTRIRSAYRLLFFIKLVCVLQAKLCSLGGGQKFFLKHCFPPPPLSFPGGPKRNCCKVIAVVSIVASGFFF

SEQ ID NO: 310251 - protein, 50 aa, Zea mays
  Clone ID: MRT4577_46006C.1.pep
THTVILTSSPTPAFLPFSIASQSDRRRLAEILFGLFILTACLIITAPSVK

SEQ ID NO: 310252 - protein, 97 aa, Zea mays
  Clone ID: MRT4577_46007C.1.pep
FRQTVIQFLFNFTKQCGVGCEPENVRWKLILVVEEIWENKPSSLGNRVLTGSFQNPSLILKRYLQVRTTIQALQKTGDHPDLISESHTIVCALHQLP

SEQ ID NO: 310253 - protein, 97 aa, Zea mays
  Clone ID: MRT4577_46008C.1.pep
LACYHGSKKATRGCAGDAASPTEVTSNPSLRPPPVSGYLLRASVCTSSRRISCIQRKASSVPLHWCHPTMLYRIALRLIFALTKSRMYSRYHELSAI

SEQ ID NO: 310254 - protein, 65 aa, Zea mays
  unsure (1)..(65): unsure at all Xaa locations
  Clone ID: MRT4577_46009C.1.pep
NKTNLQEPTMYSMQTHNTPTVFVLILAQLCVYIXHTIIPKVTHYLSSKLLVSSHNYQYLPPFLPL

SEQ ID NO: 310255 - protein, 124 aa, Zea mays
  Clone ID: MRT4577_4600C.1.pep
ENQILRFRYTSDMGEQHPAEHKVVVELSSKDLVPKHLTEQQRLTFLKLVGPRYNPDTDIVRMSCEKFSARAQNKRYLGDTIRNLIKEAKEGDSFADVPLDLRHHKPKIHYTFPESWKMTENRKR

SEQ ID NO: 310256 - protein, 160 aa, Zea mays
  Clone ID: MRT4577_46010C.1.pep
MDHAKLARMQASVRIGGKGTPRRKVKKVHRGAGTDDKKLQTALKKLNVQPIQAIEEVNMFKSDGNVIHFSAPKVHASVPANTFAIYGHGEDKELTELVPGILNQLGPDSLASLRKLAESYQSMQKEKGEDGEKKDDDEEDDDDIPDLVAGENFESKAEVE

SEQ ID NO: 310257 - protein, 102 aa, Zea mays
  Clone ID: MRT4577_46011C.1.pep
HSWSGRRRPGSATSRATRGTSDQVATTVLPEVPRGEACHRTRHRLRQRRVSRQPRAAGACLETARCIPAAVEGRGGTEKAEGSGSDGGRSRREPKADVRRGG

SEQ ID NO: 310258 - protein, 69 aa, Zea mays
  Clone ID: MRT4577_46012C.1.pep
NCLQFLYKHLRLIQYLSKSKDMKKALLPDLDRFRDHTSNNCNLTYRSPKRVIKNLLESLRKVPQFSYNY

SEQ ID NO: 310259 - protein, 58 aa, Zea mays
  Clone ID: MRT4577_46013C.1.pep
LAPLIGRTQKGIGLNTGGPYGGKKGPNPNLVSKGWEPKRCLNKKPGGAAKPQNPPRLK

SEQ ID NO: 310260 - protein, 346 aa, Zea mays
  unsure (1)..(346): unsure at all Xaa locations
  Clone ID: MRT4577_46014C.1.pep
GPTIPCNHFXNALTVRIVTLQNTSTKENETLMAIGTAYVQGEDVAARGRVLLFSFSKSENSQNLVTEVYSKESKGAVSAVAALQGHLLIASGPKITLNKWTGSELTAVAFYDAPLHVVSLNIVKNFVLFGDIHKSIYFLSWKEQGSQLSLLAKDFGSLDCFATEFLIDGSTLSLVVSDSDKNVQIFYYAPKMVESWKGQKLLCRAEFHCWSPCVEVSWDYRMLPTPRISXEKTNRFALVFGTLDGGIGCIAPVDELTFRRLXQSLQRKLVDAIPHVCGLNPRSFRHFKSNGKAHRPGPDNIIDFELLSHYEMMSLEEQLEIAQQIGTTRSQILSNFSDFSLGTSFL

SEQ ID NO: 310261 - protein, 73 aa, Zea mays
  Clone ID: MRT4577_46015C.1.pep
GCKRISNNCWHCHQHLLSISPDLRINEGKECGPSPWIGVEARRVASCLQQSASPICSCINKCHFIPTSNPQHL

SEQ ID NO: 310262 - protein, 87 aa, Zea mays
  Clone ID: MRT4577_46016C.1.pep
GDPFVRGSVRPVVCRAASEDLQGAVDLFVRGSDRPVVRHVLSAAGIRVVEEVGGHVGEQAGHAPRAQAATPVKKQETAPPRMCQAKV

SEQ ID NO: 310263 - protein, 61 aa, Zea mays
  unsure (1)..(61): unsure at all Xaa locations
  Clone ID: MRT4577_46017C.1.pep
MKGKADTSKKDQGMLLAGGAAPKRKKAAASGKTKRPPFGFFVFMCEFKHEVXALHPGNKSV

SEQ ID NO: 310264 - protein, 101 aa, Zea mays
  Clone ID: MRT4577_46018C.1.pep
RETCNRSLGSSTAMFKSSVLFSNIFGRCRGKNAAGLLQFTTTQARKTATFCKLINLYQIDAAKLNLHFCSNMFPARNDTRWSQTAENNSVTQENGVNSKGF

SEQ ID NO: 310265 - protein, 201 aa, Zea mays
  Clone ID: MRT4577_46019C.1.pep
MIREFLAVAARAALEWALASLLLANGAAFCVIAAAAARLRLGPPCIVCARVHRLLCSSSSSAASATGVARDALRLLLCDAHLAAVAPDRCDGDGGVSETDAAMADDDPNTFSGMETHRDVSIGSEICEQDEDGIKHHAGDRIARTTSADDGYGPLVSLFELAPIVSSRPREDDDSIDQLARTMPQSLTLAVDCDESLTLGE

SEQ ID NO: 310266 - protein, 309 aa, Zea mays
  unsure (1)..(309): unsure at all Xaa locations
  Clone ID: MRT4577_4601C.1.pep
MESPFRADVVKDKAALVTGGGSGICFEIAAQLARHGAQVAIMGRRREVLDKAVAALRSRGLREDAARVLAATVAHFGKLDILVNGAAGNFLASPEDLTPKGFRTVLEIDTLGTYTMCYEAFKYLKKGGPGKGPSTGGLIINISATLHYSASWYQIHVSAAKVPGSSLNHSLIRENNWSKQIRLXAGVDSITRSLALEWGTDYDIRVNGIAPGPIQDTPGLRKLAPEEMSKGLREMMPLFKFGEKRDIAIAALYLASDAGKYVNGTTLVVDGGLWLSHPRHIPKEEVRELSKVVEKKVRASGVGVTSSKL

SEQ ID NO: 310267 - protein, 37 aa, Zea mays
  Clone ID: MRT4577_46020C.1.pep
HICFCDDLSCGGYQSPNLGAWSTTQRNNVRYGSLTRP

SEQ ID NO: 310268 - protein, 105 aa, Zea mays
  Clone ID: MRT4577_46021C.1.pep
AASVAVVSAWKVLELSCKDSETVAADVASTRPMDSSVAAVTVTVTATATASSPSSPTAMARFSVEFKEVGQVRRGGVHRPRQEVHERLVVVAIATAASAGVLHGR

SEQ ID NO: 310269 - protein, 154 aa, Zea mays
  unsure (1)..(154): unsure at all Xaa locations
  Clone ID: MRT4577_46022C.1.pep
LLPSPLQPPPASSTAAGSDWQSCSCSCSCALAPHASSCRRCRPCFSASLSYTSCMASRAASRSSSPCSSXADAXSSTSAFSRRSAASSARSASSSLLCALNAVTSSPSVRLSSPSTVRVSDCGIVLASWSMESSSSRGRDDTIGASSKRDTSGP

SEQ ID NO: 310270 - protein, 48 aa, Zea mays
  Clone ID: MRT4577_46023C.1.pep
FLDYRLKYGWRSSKICPVQRKRLPELTPQLPKPFQSTDGFTMILYKMA

SEQ ID NO: 310271 - protein, 86 aa, Zea mays
  Clone ID: MRT4577_46024C.1.pep
DECELKFLELSEIRSFRFIALNINENAQQLVVDRFQVPGESYDAPNACVCCNDCRYPTFQYDFVTDEYCQHSEILFIFCDVDAVMG

SEQ ID NO: 310272 - protein, 170 aa, Zea mays
  unsure (1)..(170): unsure at all Xaa locations
  Clone ID: MRT4577_46025C.1.pep
GPPFFFPPQFPFFPIGAGGPLLFLGLRGRPFPFLFWGGGTPPPPPYCFPPPPPNLKFLSGEAPPRPGRTSEGNRCSRGPLSAWRDPRAMGFGVIQTARRPRVRLHHWFWYLRGLCPAAPSVSLRVFTSVLEXGVLGPFFFLRNPPMGELSPFSLFLCCGPXXPRLCLVFF

SEQ ID NO: 310273 - protein, 148 aa, Zea mays
  unsure (1)..(148): unsure at all Xaa locations
  Clone ID: MRT4577_46027C.1.pep
FLAVDNSXAMNILGIIVPLYSPIKQGASLVALSFFGASQVKFPGVERNHKCLVGSVLSPVGVFPYVFRQPYCYQLWPQKLVSPSMHLDYVSISVAPFFVSNPNVSLSQPFWFLWQVVSHPVGYTFQPKISPNPVVPVKKKKKKRRGRP

SEQ ID NO: 310274 - protein, 111 aa, Zea mays
  unsure (1)..(111): unsure at all Xaa locations
  Clone ID: MRT4577_46028C.1.pep
GVSSLLWVSLAFCPFLPCLVPCGFPGPSCFFALXRSVSAVCSGFVXFAASGLWVLFRGLLAFCSLVLLGLACRVVPSGVGGVVARVLARRLAGAVRRLNLLSVAVLVVGVV

SEQ ID NO: 310275 - protein, 118 aa, Zea mays
  unsure (1)..(118): unsure at all Xaa locations
  Clone ID: MRT4577_46029C.1.pep
GHVLTKXAHNLLTRKRXXQXGGLNQKVRDPXTPIRSQIPGAXIIVKDYVIDTIDDMSPYINSGDYESNEWWSYQFESPDAILEPPRSSPHKTLHSPNIFSYERQNLATIPQNNKIPTH

SEQ ID NO: 310276 - protein, 63 aa, Zea mays
  Clone ID: MRT4577_4602C.1.pep
LASIPLKKVFPEKKIGKVIKTSFSATQKRPPMEKKLFKWKAQGFSADKKVVRGGPLDPSNLVV

SEQ ID NO: 310277 - protein, 84 aa, Zea mays
  unsure (1)..(84): unsure at all Xaa locations
  Clone ID: MRT4577_46030C.1.pep
RVRDLRVRLKQIDDIGVRCEKAASGTAVTXQEWKDRAQNLYEXVCAQKGQASFQGRKDNVLDGWVRVTQCYHDEFKHLVDSLID

SEQ ID NO: 310278 - protein, 203 aa, Zea mays
  unsure (1)..(203): unsure at all Xaa locations
  Clone ID: MRT4577_46031C.1.pep
PGEQPQQAAETPQRQPAAGPERAARGSKDSKGKQTGGKGRPDKXKKSRRTRAXGNSDGQDGNHTTKKRRENKRSARDKXDHGAKGKNPRPGSPPPNRKQEKXDRGRADRRNRXAGTENTETKTHXPAQTQXNXPAGKXGEXTKNNXHGTQGHQEAXRXSGQNKRHSQXSTGEAXGETDQDAXXGNQEAAQGXPTNPXAATKAG

SEQ ID NO: 310279 - protein, 673 aa, Zea mays
  Clone ID: MRT4577_46032C.1.pep
CHLRISVSGQLMSDGQIIRSASYHDLLAYCQEFQNLVNAHKDTIGVSDLNRVPPHRENEILIKETIDVHGSRYKESLKPSPTDQLIKTEEREMGDTGLKPYILYLRQNKGFFNGSMGILCHVIFVCGQIAQNSWMAANVQNPDVSTLKLISVYIAIGFITVFFLLFRSIALVVLGVQTSRSLFSQLLNSLFRAPMSFFDSTPLGRILSRVSSDLSIVDLDVPFGLMLAIGAGINAYSNLGVLAVVTWQVLFVSVPMIVLALRLQKYYLASSKELMRINGTTKSALANHLGESVAGSITIRAFEEEDRFFEKNSELVDKNAASYFYNFAATEWLIQRLETMSAAVLSFSAFIMALLPAGTFSSGFIGMALSYGLSLNNSFVFSIQNQCQLSNQIISVERVNQYMDIPSEAAEVIEENRPSPNWPQVGRVELRDLKIRYREDAPLVLHGITCTFEGGDKIGIVGRTGSGKTTLIGALFRLVEPTGGKIIIDSVDITTIGLHDLRSRLGIIPQDPTLFQGTIRYNLDPLEQFSDQQIWEVLDKCQLLEAVQEKEQGLDSLVVEDGSNWSMGQRQLFCLGRALLRRCRVLVLDEATASIDNATDAILQKTIRTEFRDCTVITVAHRIPTVMDCSMVLALSDGKLVEYDKPTKLMETEGSLFRDLVKEYWSYASNGNI

SEQ ID NO: 310280 - protein, 226 aa, Zea mays
  unsure (1)..(226): unsure at all Xaa locations
  Clone ID: MRT4577_46033C.1.pep
QQIRYRXXLPLYCMXITCTFEGGDKIGIVGRTGSGKTTLIGALFRLVEPTGXXIIIDSVDITTIGLHDLRSRLGIIPQDPTLFQGTIRYNLDPLEQFSDQQIWEVRCLTTYTTIHVVSGPVVLVYQLKLQSNHLKLLLSVLVQVLDKCQLLEAVQEKEQGLDSLVVEDGSNWSMGQRQLFCLGRALLRRCRVLVLDEATASIDNATDAILQKTIRQXFRDCTVITV

SEQ ID NO: 310281 - protein, 126 aa, Zea mays
  unsure (1)..(126): unsure at all Xaa locations
  Clone ID: MRT4577_46034C.1.pep
DAWALYQNADIYLLDDXPFSAVDAHTATSLFNEYVMGALSDKTVLLVTHQVDFLPVFDSVLLMSDGEIIRAAPYQDLLAHCQEFQNLVNAHKDTIGVXQILTESDPTKQMKTRDRLIFMEAYTKSL

SEQ ID NO: 310282 - protein, 41 aa, Zea mays
  Clone ID: MRT4577_46035C.1.pep
VRAICHGMSKNYRLPVVAVWIGTRPLIVLNWMTDMYLSKAP

SEQ ID NO: 310283 - protein, 96 aa, Zea mays
  Clone ID: MRT4577_46036C.1.pep
KALNGTFTRGKHEWSELPKSFLIRKNKSPGTFKMQYSCLLGSKQSVQMDNDICGFWLHFLFRTLRQEDHFSRVRSSSPAWTLSAGSDDPQNCLPTK

SEQ ID NO: 310284 - protein, 84 aa, Zea mays
  Clone ID: MRT4577_46037C.1.pep
CIASVYLSSRITIGAGWHRLSELCLGAAHSVLVPVHQDISVLARAGGTLLDLRHEHGQRQRHEVLVRRAMPLPLALDRPGSRMI

SEQ ID NO: 310285 - protein, 62 aa, Zea mays
  Clone ID: MRT4577_46038C.1.pep
LSYTYWHIAATISNAVGLFYRFSSNKSLFLNMIDLDNSFIYFSCVGMTNSRLQTCNRFGRKK

SEQ ID NO: 310286 - protein, 80 aa, Zea mays
  Clone ID: MRT4577_46039C.1.pep
RTKMGGKTKKKIWEKGGRPPKKKKPLSPKGEKKKEKRKKKQKRKKKKKKKKKKKKKKKKKKKKKKEKKKGLVFWGDWAFP

SEQ ID NO: 310287 - protein, 43 aa, Zea mays
  Clone ID: MRT4577_4603C.1.pep
MRIASVGKMEELLGSYLSLNSPRHHPAILAAFEDVWEAVFGEE

SEQ ID NO: 310288 - protein, 48 aa, Zea mays
  Clone ID: MRT4577_46040C.1.pep
KSSKASASPATISDLTDLYSSGSNSGSGSVGFALGFALPLPFPLPRRG

SEQ ID NO: 310289 - protein, 54 aa, Zea mays
  Clone ID: MRT4577_46041C.1.pep
YERDYSSCAGWRLDSWINRGMHNASLTRCVAAERTLIVCQREESYAKSPSRAVL

SEQ ID NO: 310290 - protein, 142 aa, Zea mays
  unsure (1)..(142): unsure at all Xaa locations
  Clone ID: MRT4577_46042C.1.pep
PTRSPRVRLELGGKSPVIVFDDADLDMAGNLVNFATYTNKGEICVGGTRIYLQEGIYHQFGEKGPQLASKFVVRDPFNPSVNQRPQVDKDQYQKVLKCIDIWKRESATLVTGGKTFGDKGFFIEPTIFTDVXDDMTIAQDEI

SEQ ID NO: 310291 - protein, 71 aa, Zea mays
  Clone ID: MRT4577_46043C.1.pep
SCSRVRQPRSRVEIFRYPSARPPQPSTQSQAIDMGRAYAAGPGRRLVGWHCFRPGGQLVASYSPFFSHTRQ

SEQ ID NO: 310292 - protein, 59 aa, Zea mays
  Clone ID: MRT4577_46044C.1.pep
CPGGKGVALEACSGCGGVRFVPCEECSGSCKVFVEEAGTFRRCPECNENGLVRCPLCSL

SEQ ID NO: 310293 - protein, 72 aa, Zea mays
  Clone ID: MRT4577_46045C.1.pep
VHMCSYDCLKDTRRGPWVSTAWTATASCSTEDSYRNVLPTGETDKYNQPDSVTVYKDARYHGIEDYTEDHIH

SEQ ID NO: 310294 - protein, 387 aa, Zea mays
  Clone ID: MRT4577_46046C.1.pep
NKVDPRLAVEQNGQNADASTNGASATTLEATQPVSPWGDVDHLLDGYDDQQKALIQKERARRITEQHKMFSARKLCLVLDLDHTLLNSAKFIEVEPIHEEMLRKKEEQDRTLPERHLYRFHHMNMWTKLRPGIWNFLQKASNLFELHLYTMGNKLYATEMAKVLDPTGTLFAGRVISRGDDGDPFDSDERVPKSKDLDGVLGMESAVVIIDDSVRVWPHNRHNLIVVERYTYFPCSRRQFGLPGPSLLEIDRDERPEDGTLASSLAVIERIHHNFFSHPNLNEADVRSILASEQRRILTGCRIVFSRVFPVGDASPHLHPLWQTAEQFGAVCTNLVDDRVTHIVANSPGTDKVNWALSKGKFVVHPGWVEASALLYRRANEHDFAVK

SEQ ID NO: 310295 - protein, 46 aa, Zea mays
  Clone ID: MRT4577_46047C.1.pep
HEPPSTALHDELGLPCTTQKGKCLAYTNLTAPHHNWSMGTTRHIRV

SEQ ID NO: 310296 - protein, 85 aa, Zea mays
  Clone ID: MRT4577_46048C.1.pep
APRLFGGQQLGYSPRSGDNLPLLAGQPQFPPRPSNAKAGNEGPAWKRGEKEFKEEVWRLMTGIAKMVEPLTDKNGFFPYHLFRAQ

SEQ ID NO: 310297 - protein, 74 aa, Zea mays
  Clone ID: MRT4577_46049C.1.pep
MPLGAGVSGSVYLFNIKGGAHSRIPVDAQSPKCTPWRQERCIHRSHSRQHWHWFKHQPTLCWPNEGGERIFKFP

SEQ ID NO: 310298 - protein, 60 aa, Zea mays
  Clone ID: MRT4577_4604C.1.pep
ESRGGPHASATPVRDRYQLIFKRWFPVWNSADLSMFTCFRFKTTTFVTTPFFCMLLADGF

SEQ ID NO: 310299 - protein, 47 aa, Zea mays
  Clone ID: MRT4577_46050C.1.pep
LARGAERLAGGHPRGCGTAPGRLWLFDPGCFRRSPVRRWLVGEEPEG

SEQ ID NO: 310300 - protein, 57 aa, Zea mays
  Clone ID: MRT4577_46051C.1.pep
AECVASVCHFMSAHCCLLFRTVVVPCSRYRCISLYVSWCMYHWEPHIIPHLVPSPLL

SEQ ID NO: 310301 - protein, 91 aa, Zea mays
  unsure (1)..(91): unsure at all Xaa locations
  Clone ID: MRT4577_46052C.1.pep
HSQGETKKQTGQEGHKPPDXENPGGTQXKRTATHTSSASRRKNEEARTEHHPQQXRSQKGERDAPRSGAKSAAXXXRTRSXTATPASAQAP

SEQ ID NO: 310302 - protein, 68 aa, Zea mays
  Clone ID: MRT4577_46053C.1.pep
PRARRRRSFARAPRRGARRGSRQHTPCNVGIKNPTTACQKKLKIDDDQKLHTFYYQEISHYFNDNTLT

SEQ ID NO: 310303 - protein, 98 aa, Zea mays
  Clone ID: MRT4577_46054C.1.pep
FNFGDPKKKLLRCMQGDVNLDPLKGPPPIFFWFVFLYLHFWFCLVVFFFFFYCFFSFFVFFSNKNYNKLELFKLQTELKTQKTKEREKVSNQTHTNKN

SEQ ID NO: 310304 - protein, 65 aa, Zea mays
  Clone ID: MRT4577_46055C.1.pep
QTFRENTPCFVKQIRSSNKTGAEQSGYMVESVGTNRPALSSTAAKSSMAITYSIPWKVLIEAPFK

SEQ ID NO: 310305 - protein, 70 aa, Zea mays
  Clone ID: MRT4577_46056C.1.pep
GFLLFGSCFSKMRASSLFLRLPFFVNSAFFKVWGQFRFHCSDRFLGGHVMWHFISFIHPQIKFMRTHHNN

SEQ ID NO: 310306 - protein, 68 aa, Zea mays
  Clone ID: MRT4577_46057C.1.pep
GKIVTLQLQIPGLMLRVLVIKQILPDNQLQRGKKRVSFLLPPTSSSPVPRSLPPTTSEGVLVLPSHLS

SEQ ID NO: 310307 - protein, 49 aa, Zea mays
  Clone ID: MRT4577_46058C.1.pep
ALSTVVYCKAMLNEDTIHSCRSFLQSSIQPDSKGSRVPVHPLVLSVLAC

SEQ ID NO: 310308 - protein, 68 aa, Zea mays
  Clone ID: MRT4577_46059C.1.pep
NGTRTPGTTTMPDHSQRRNDLILRYSDVKIHHNPLLYILILQCYQPAGKADKRPDTCVVSTIHILAYT

SEQ ID NO: 310309 - protein, 45 aa, Zea mays
  Clone ID: MRT4577_4605C.1.pep
TTQVTANAGDDVEIRGLALGANRATKYLMYGSGISHVYFYVAAIY

SEQ ID NO: 310310 - protein, 63 aa, Zea mays
  Clone ID: MRT4577_46060C.1.pep
GSPSLSGVLGLVHDQLVQLRTRWRVGEAPPHGRLLSALYPSDRSQRSGIAPNQLIPGKYTALN

SEQ ID NO: 310311 - protein, 329 aa, Zea mays
  unsure (1)..(329): unsure at all Xaa locations
  Clone ID: MRT4577_46061C.1.pep
MKITVASGSLQPFTTDQWAMHQQDTIRKRRKRVATIHVADPQGARVVGASVSVQQTAKDFPIGSAIASTILGNQAYQQWFVDRFNAAVFEDELKWYSTEPMSGQLXFDVPDQMLAFVRSHRVMVRGHNIFWENQDXRRPVYNVIETCDDXSSTVDTYVSKLKDLRSAGAILEGIGLEGHFSKPNIPLMRAILDKLATLGLPIWFTEIDISNKFDAQTQAAYLEQVLREAYSHPAVSGVMLWTALHPSGCYQMCLTDWNLSNLPTGDVVDRLLNEWRTLQAAGQTDAHGAYSFTGYLGEYVLTVSYNNRTTQSTFSLSPGDETRHINVQM

SEQ ID NO: 310312 - protein, 111 aa, Zea mays
  Clone ID: MRT4577_46062C.1.pep
SLSSLSSPLLPINSSPRPTIPNSSFGFHIQCNSSGKESRHRGMGLAFGKLFSRLFVDKDMQILMVGIDTTGQGTHWTRFWTLLQKEEDRSQVRWGCRVLETTRMEIFSSNG

SEQ ID NO: 310313 - protein, 115 aa, Zea mays
  Clone ID: MRT4577_46063C.1.pep
PTRPLRSAWPGVSRAVDAALRKRARRGGASRGQPEPALYNGGILKFGSSSSGCGDPDGYRTTETGVFSPAFVVYNLNKTTMYTFSCWVKLEGHALHERVQRHRDLRRPLFHRRHV

SEQ ID NO: 310314 - protein, 267 aa, Zea mays
  Clone ID: MRT4577_46064C.1.pep
EFFSVAQDADPLATLFMNEYNVIETCDDPFSTVDTYVSKLKDLRSAGAILEGIGLEGHFSKPNIPLMRAILDKLATLGLPIWFTEIDISNKFDAQTQAAYLEQVLREAYSHPAVSGVMLWTALHPSGCYQMCLTDWNLSNLPTGDVVDRLLNEWRTLQAAGQTDAHGAYSFTGYLKRSPSLSSQAHDIPILLEICILLLQQCPKPCPMCSSKGDHDDLAKLELVEDGGFTSGIDADHKDLHILIDEEPAEELPKHEPHSSMSAFFTT

SEQ ID NO: 310315 - protein, 216 aa, Zea mays
  unsure (1)..(216): unsure at all Xaa locations
  Clone ID: MRT4577_46065C.1.pep
MGKDCGNHGDDDFRQSCRRLLAILLTMALLVGVVALIVYLVLRPTHPRFYLQDAALRQLDLSNGSAPLLSTAAQVTVASRNPNGRVGVYYDRLDVYATYKYQQVTLASRLPTVYQGHGDVDVWSPVLAGPAVPFAPFLADALAKDLAAGYLVLQLRIDGRVRWKVGSWVSGHYHMFVTCPAYFISSGAGSGXTAALSARTGSGSRPPRTAASRSRL

SEQ ID NO: 310316 - protein, 80 aa, Zea mays
  Clone ID: MRT4577_46066C.1.pep
MAGGGCGAGSLLLACSEGAEFGCKQPSTEVVRSVNESSCGIGGWSNELCAWKAGSMVAAWQRASLLPKQETRSLLLCGKS

SEQ ID NO: 310317 - protein, 87 aa, Zea mays
  Clone ID: MRT4577_46067C.1.pep
AQWGPRIFPPYAPCSFYTGWYATIFLMLTTPIGSLFFPYPSYNIEFKCEKTPLLHYIGFTQERAERNTPLSPLVFKQSPALFLVQTL

SEQ ID NO: 310318 - protein, 233 aa, Zea mays
  unsure (1)..(233): unsure at all Xaa locations
  Clone ID: MRT4577_46068C.1.pep
PKKKKKNPRPARLKKNRVLYFFEEVQIKRLYFYNKYYILKWESKKKKKTWGGARAPIPPFVEGFTRSRRHVHRCSSLFSSFITPLNASSPCSFPPPRPPPLPKNPAYFHPPPVIPPYLYAPVYPPXAPNFDLSSPPPLPPVPPLPPSSPPPHCPXSSPPPQPPPPTSPPPXLYALPPRPPFPVPVXFPPPVFPVQHSSSTLPSFFPPIFFARSRGLLLQYCARRLSSASPPYS

SEQ ID NO: 310319 - protein, 65 aa, Zea mays
  Clone ID: MRT4577_46069C.1.pep
MGLAFGKLFSRLFVDKDMQILMVGIDTTGKTTILYKLKLGEIAMVKEHIGQGFGHCCRRRRTDLK

SEQ ID NO: 310320 - protein, 48 aa, Zea mays
  Clone ID: MRT4577_4606C.1.pep
LFIARKIVCQLLYFPPFFRIGGYLCEILPNSPSSTWPSKHGLKWCLFS

SEQ ID NO: 310321 - protein, 127 aa, Zea mays
  Clone ID: MRT4577_46070C.1.pep
VVRSRYGSDREERSPKYNVGASHLNVDVPGLVSRRQREGGLRGPVVVADSEDVPARPPARAGTVRSGLSLLEVVQFSNIRIHVSLCPPGMDPLSFRQPHDSRAGQGSSSIRWGGGGLVSFVVYLMGV

SEQ ID NO: 310322 - protein, 453 aa, Zea mays
  unsure (1)..(453): unsure at all Xaa locations
  Clone ID: MRT4577_46071C.1.pep
SPRGLAPDNTGARCIATVVARSDCWAFVKGGFVLDWPTQTSVIFFQNADKTPMKITVASGSLQPFTTDQWAMHQQDTIRKRRKRVATIHVADPQGARVVGASVSVQQTAKDFPIGSAIASTILRHPPYQQSSAYCFNRGFTQADVTRYASETGTGQIRPDVTCQTAALMRADRXVVRGHNIFWENQDATPRWEKNLTADDLRATVNTRIXILMTRYRGEFAHWDVNNEMLHYNFYEQRLGPNASAEFLSVGQDAYPLATLFMNEYNVIETCDDPLSTVDTYVSKLRGFVSAGSILEGLGLVGHFSKPNIPLMRAILDKLATLGRVLRLNHTXVSETXDAQAQAAYKEQVLREAYSHPDFSGVMLWTALHPSGCYQMCLTDWNLSNLPTGDVVDRLLNEWRTLQAAGQTDAHGAYSFTGYLGEYVLTVSYNNRTTQSTFSLSPGDETRHINVQM

SEQ ID NO: 310323 - protein, 166 aa, Zea mays
  Clone ID: MRT4577_46072C.1.pep
RPGLRRAASYGKMERWAESVKDYEILRKELPSDTEVAEAYFHAQIALKSSRGEEVSNMKFGGEVEAIIGMEQFQLATSLSGVSVIHFMAASNQQCCKISPFVNTLCTRYPSVNFLKVDVNESPAVARAENVRTVPTFKIYKNGIRVKEMICPSQQLLEYSVRHYGI

SEQ ID NO: 310324 - protein, 60 aa, Zea mays
  unsure (1)..(60): unsure at all Xaa locations
  Clone ID: MRT4577_46073C.1.pep
FVVRFTNKDITAQIISASIAGDMVLASAYSHELPXYGLXVGLTNYECYCTGFCCSRCQPC

SEQ ID NO: 310325 - protein, 155 aa, Zea mays
  Clone ID: MRT4577_46074C.1.pep
RTIPVERTAVGYRRLEKETFRRTRSRLGSASRRRSSSRQAEPRGNHGRMAAHINGGSLASKFRSRPLSLGADRDGRTCVSLRRKTRKGRIQRWLIINSERIRIIQEEAGRQHNTVRWWSSKQGGSGTRAGRYPQAAHAADREFGDGDSAEPSCRI

SEQ ID NO: 310326 - protein, 50 aa, Zea mays
  unsure (1)..(50): unsure at all Xaa locations
  Clone ID: MRT4577_46075C.1.pep
EPAGTPLYTHRAAADSXXKRDGSSXXVXLEHEXVRVGGRRASRGAAGPPR

SEQ ID NO: 310327 - protein, 685 aa, Zea mays
  Clone ID: MRT4577_46076C.1.pep
SVKYHLGTGYDRPTRGGNRIHLSLVANPSHLEAVDPVVIGKTRAKQFYSNDADRTKNMGILIHGDGSFAGQGVVYETLHLSALPNYTTGGTIHIVVNNQVAFTTDPRAGRSSQYCTDVAKALNAPIFHVNGDDLEAVVCVCELAAEWRQTFHSDVVVDLICYRRFGHNEIDEPSFTQPKMYQVIKNHPSSLKLYEQKLLGTGEVMKEDVQRIHDKVNRILNEEFAKSKDYVPNKRDWLSAYWTGFKSPEQISRVRNTGVKPEILKRVGQAITTLPENFKPHRAVKKIFELRAAMIESGQGIDWAVAEALAFATLIVEGNHVRLSGQDVERGTFSHRHAVLHDQETGAKYCPLDHVAMDQNEELFTVSNSSLSEFAVLGFELGYSMENPNSLVLWEAQFGDFANGAQVMFDQFLSSGEAKWLRQTGLVVLLPHGYDGQGPEHSSARLERFLQMSDDNPFVIPEMEPTLRKQIQECNWQVVNVTTPANYFHLLRRQIHREFRKPLIVTAPKNLLRHKDCKSNLSEFDDVEGHLGFDKQGTRFKRLIKDRNDHKQVEEGVNRLILCSGKVYYELDEERKKSERGDVAICRVEQLCPFPYDLIQRELKRYPNAEIVWCQEEPMNMGAYSYISPRLFTAMKALGRGSFEDIKYVGRAPSAATATGFLSVHAQEQSELVKKALQAEPIKFL

SEQ ID NO: 310328 - protein, 120 aa, Zea mays
  unsure (1)..(120): unsure at all Xaa locations
  Clone ID: MRT4577_46077C.1.pep
VLSFTYVIILLDNVLEEVHAFPSPGFWFLVTSAPTSLGWSREGLSNVVLHDLEVGKDTFRSPFRHLCLLSGSSDLLLREREEKNEEPPIQRRGENNPLQGNASQCTKIVKNVIFIRGXSA

SEQ ID NO: 310329 - protein, 87 aa, Zea mays
  unsure (1)..(87): unsure at all Xaa locations
  Clone ID: MRT4577_46078C.1.pep
HIYDHACVHASVEVEAALVANDEGPTPVANRIEDSPPFPLYLFVRNELGCVILTAERLKSPVXECSKGFGGIRHFLLVDPMLESVKE

SEQ ID NO: 310330 - protein, 103 aa, Zea mays
  Clone ID: MRT4577_46079C.1.pep
RGAREKASRNSGDQLSSPCSTKAVAVAGFSGYSWISSTARVWVWWGGTQWSRDHSRSRRGRRSRPPQPVKKEEGAPVKNPHTPLHMSRSASREPCVPGEGQRE

SEQ ID NO: 310331 - protein, 67 aa, Zea mays
  Clone ID: MRT4577_4607C.1.pep
LMLPDLGYTERHHQDPRDATSALGLLRRNTDESEINGCQMLYYPQPEHGFQFKVTDPDYERSLCRYT

SEQ ID NO: 310332 - protein, 74 aa, Zea mays
  unsure (1)..(74): unsure at all Xaa locations
  Clone ID: MRT4577_46080C.1.pep
VGKTIMLGDXSDPTSCKSDFGSXWVKNDXVLGTFMXTGRRESHRSLPRWHXTQRTVANLPELKEDGRPFASQNV

SEQ ID NO: 310333 - protein, 57 aa, Zea mays
  Clone ID: MRT4577_46081C.1.pep
TRTRAKRILYINDQYCQDRHHNPTYTNHLGTTDQSLLLKILHCITELPPPPYVYLMP

SEQ ID NO: 310334 - protein, 44 aa, Zea mays
  Clone ID: MRT4577_46082C.1.pep
KSYISFWALMQVLLQYMNTLNKYNIRLVFFKPGDYHAHKLTTKG

SEQ ID NO: 310335 - protein, 79 aa, Zea mays
  Clone ID: MRT4577_46083C.1.pep
ITSSDVHLRVKWVGRFEGHLWNSHHIVLLPKTLLEFAQFASFKRCDALRYSFALSFALAIVFVDIADASSSCIHFFGNV

SEQ ID NO: 310336 - protein, 77 aa, Zea mays
  Clone ID: MRT4577_46084C.1.pep
GRAGPLLLVWPSSFGPLWAWRVLPFCWAVLPVPVAVRPRSFCSCVGLPRLLVLVPLSPAVRLAKSRGGPRNSAAVPA

SEQ ID NO: 310337 - protein, 72 aa, Zea mays
  Clone ID: MRT4577_46085C.1.pep
KKKKKKKKKKLKKKKKKKKKKEKKKKKKKKKKKKKKKSKKKKKKKKGGAFLGVQIFLPGDCKLKFFFWGPQI

SEQ ID NO: 310338 - protein, 183 aa, Zea mays
  Clone ID: MRT4577_46086C.1.pep
VLCLAAMAVAIFLCGVASVTSNSRMGYAFSRDGAMPLSQVWYRVNKQEVPFNVVWLSVSVAFVMALTSLGSQVAFQAMVSITTLGMYIAYALPIFFRVTAARNSFVPGPFHLGRRCSLVVGWVAVLWVALVTVLFCLPVAYPVAGVNFNYTPVAVGGVLVLSLGAWVLHARFWFRGPVTTIDA

SEQ ID NO: 310339 - protein, 154 aa, Zea mays
  unsure (1)..(154): unsure at all Xaa locations
  Clone ID: MRT4577_46087C.1.pep
DSGIYHLGGGGGGGGAGGTAANAGEGSLPQLRSALSAFFNSPHPLEILKDGAAYGPRGSVYRDHDVNSYLRSVRAVVRKEARRAREAERERWRLLLWWPFGVHGXVVGVGPGAARGPRGRRQRGCQARXHLLLVVLLPAELLALGALLADIRFR

SEQ ID NO: 310340 - protein, 49 aa, Zea mays
  Clone ID: MRT4577_46088C.1.pep
VDAYACPLKPTPSSSAVGRGWDALWTFFKVSLPILERFENCVYEIDYSR

SEQ ID NO: 310341 - protein, 72 aa, Zea mays
  Clone ID: MRT4577_46089C.1.pep
LFPEHNIIFPNNLSQHTTPKHSVSSHYSSIPDLPDISYVLINDLNFSTKNSCLLCSNKSDQSCFGLPDWTTC

SEQ ID NO: 310342 - protein, 124 aa, Zea mays
  Clone ID: MRT4577_4608C.1.pep
KKIGFRGERVKKVGPFAPKEHGKCFGGGHGGDPRGNWGQGPAQGVWKCRGQCSGPARFPPGLVRNPRAAPGLVPAPFGANVNAKKGKKMAVGPVPPPKKILPGKCSPGANKIWKGSRPLWVFCP

SEQ ID NO: 310343 - protein, 68 aa, Zea mays
  Clone ID: MRT4577_46090C.1.pep
GVREPWGETSITRVTKGTEYKHALVLEESDGRGLDDLLTSWDGPGGSCTQNSHLNTCLIWTAEQQLFV

SEQ ID NO: 310344 - protein, 73 aa, Zea mays
  Clone ID: MRT4577_46091C.1.pep
EMGFTGSSLILRRLRELRTCRSYECRPDVRGMPYCRPEIKIKEIFHFHVEKMSVHGVYLFPVLKINAIFILHV

SEQ ID NO: 310345 - protein, 446 aa, Zea mays
  Clone ID: MRT4577_46092C.1.pep
MSRCFPYPPPVYLGNPVAVAEAESTAKLQKERERAHKKKDKRSDKKAPQLGETSKHSKHNHKKRKLEDVSTGDQEPKKVFKESAELLEKSGLSEEHGAPCFVQMFRDSPESSQDSSKRRKAVLPSPSQAKNGNIIRIKLKSNQDPQSVLLEKPRVLEQPLVQQMSSVSSLSSKQNSINRKVNVRSTAGQQWVNGDSQAVQKSLVTETLSRAMQRTVPQPAVKVTRRADPQLSVKAPVGRSDLPPKFSGSVGPSPARVTGRFCPAPVKTQQRIEHPPSMVSQRVDPQAKVSQKEMGSAVCLPQAPHPPVLQKPKDLPVPKQREPINSLPKEEPCFSGRTVEADQGKEAKLSRSDRKKIHKTEKKNKKFRDLFVTWNPLLMENEGSDLGGQDWLFSSTRSSDGSMAQPTVPDGLGPIHPMVQQQPYLQPRATFLPDLHIYQLPYVVPF

SEQ ID NO: 310346 - protein, 285 aa, Zea mays
  unsure (1)..(285): unsure at all Xaa locations
  Clone ID: MRT4577_46093C.1.pep
MGHNDGEHEHEHEGDDLSADDSSWSDGVWSEDDDEETLSFEDSVSGSDGESHEAAVAEESDSSEDEVAPRNTVGDVPLEWYKDEEHIGYDIDGRKIKKRDREGRIEAYLRNADDAKNWRKIYDEYNDEEVQITKDEAKIISRLLKGKTPHTNVDPYPDYVDWFEYEDKGHPLSNAPEPKRRFVPSKWEQKKVVKLVRAIRNGWIKFDKPKEEQNLYLLWGDETDTTDNKRHGLSYIPPPXKLVITXHEESYVPFCLAVILPICINVIISDEVVFSFQSLFGFPES

SEQ ID NO: 310347 - protein, 144 aa, Zea mays
  Clone ID: MRT4577_46094C.1.pep
LGTSRPAGNCTHYYRTTRAEPKLSHSSPTSPLLLCRPGLHTDPGAHAIGWRVAILRAQQPDPVKPWRTCSIAWTNLLQQPASTHLVPCPLPHAHCAAELGHCSLAIRNLRTAVLHGEALLHRHLPSWDLAPQPPHRFALLHVRL

SEQ ID NO: 310348 - protein, 81 aa, Zea mays
  Clone ID: MRT4577_46095C.1.pep
RATDDLIKTWLKKHETGDARGRPREEGEDEEGLPDDDAGEEGEGRAQRDQGVTQPRRQRHLLLSTRPPALRTPPAGGKTSF

SEQ ID NO: 310349 - protein, 73 aa, Zea mays
  Clone ID: MRT4577_46096C.1.pep
AYVSQNPGHDQGVSHTVCRIMSESVYVEFPALIGSPPVRPSLYVLGRSCCKGRCHWISGLAMRLRSAACMLAS

SEQ ID NO: 310350 - protein, 117 aa, Zea mays
  Clone ID: MRT4577_46097C.1.pep
FIVQARVGREFPCKYMSTLLACVSGTVQALAIAAVIRGGDRDSWLLSWDLRLLTVVYSGVFNTAATFCLISWAIARRGPIYPSMFNSLSLVATTVLDSLLLGTDVSVGSLLGALLIV

SEQ ID NO: 310351 - protein, 70 aa, Zea mays
  Clone ID: MRT4577_46098C.1.pep
HLWPCCTYGQRVAGTSCLGMFQHPHRTLYLAAPTSFTASVTDGDPIEFPKREKESTATPTLNSRASWYGS

SEQ ID NO: 310352 - protein, 223 aa, Zea mays
  Clone ID: MRT4577_46099C.1.pep
MDSLVKRSNGYGAYGSSKPQMSYHRQSTESVTTVVTEINRMTINDKPYYGGGGGVHKQACKVEAFDEHDKAYKGTLAVKKHDEYEEDEEEYGQVVDAEYGAHYGDTAVKKQAYSYQQEAYGETGAAGYGGAAMKKQGYNYTKETCGESDAAYGAHHGGAGAAVQTYAYNQQSAYKQKGAASKTNGSRQKVYGYAAEAVKQQARGTGSHRVVGAGAAQQHATKR

SEQ ID NO: 310353 - protein, 74 aa, Zea mays
  Clone ID: MRT4577_4609C.1.pep
KKVVYVAREVGPVGGAFLRRPFGRCCSLLGRQHNCGYHSAGVNLLPVKRDPLPVLIGRPFLPFFSPKGFVPCLV

SEQ ID NO: 310354 - protein, 109 aa, Zea mays
  unsure (1)..(109): unsure at all Xaa locations
  Clone ID: MRT4577_460C.1.pep
MTSGELGCTYDDLILSDDVIAMTVEKIATIVKVDNMRGESXWPWLFCKLLERSSAEDLILSDVYAGVADPHVAAAPAGGASTAAAPAAEEKSEPAXEDSDDDMGFILVH

SEQ ID NO: 310355 - protein, 94 aa, Zea mays
  Clone ID: MRT4577_46100C.1.pep
TSSRPRPLLSRSSGSGPSWRRRACTAPVYNPGAPVYCHHDARGRCRHSRAFIEPFPVEASPVYGLKSLASIWQAADRCRRVDSARMNGSYLAVQ

SEQ ID NO: 310356 - protein, 93 aa, Zea mays
  Clone ID: MRT4577_46101C.1.pep
VSVHIRVDSIGLQRANAWCPSAGIGLDLTDPPVCSRIRGSEVCLDFLVTALGGGIMDEWDEGGGLAVDGGRPASGEVGVERRGRVEPRGVPRV

SEQ ID NO: 310357 - protein, 442 aa, Zea mays
  Clone ID: MRT4577_46102C.1.pep
EKNNKKQSSYCEHGFACEAHNGYGAYGSSKPQMSYHRQSTESVTTVVTEINRMTINDKPYYGGGGGVQKQACKVEAFDEHDKAYNGTLAVKKHDEYEEEEEYGQVVDAEYGAHYGDAGAAVKKQGYSYQQEAYGETGAAGYGGAAMKKQGYNYTKEACGESDAGYGAHHGGAGAAVQTYAYNQQALYGGSIGAAVQQPAYKQKGAASKTNGSRQKVYGYAGEAVNTAGAGYGAHHGVVGAGAGQQHGYHQKDAYGTGYGAVAVVGKEKNGYQYQEAYGGTDAGGYGGAHYGGGGAVQQPGYGGETAGGKAEQSGDQYQEAAYGGTDAGGYGAHYGGGAAAAIQKHGYRKDVYESETESEDDESDCEEAFPPRGGRMQGGVQVQHGYGADNLGGVRRYESYESREEHGDGRRYESYKSTVQYNGGGHATCSPIKNRHLLGYGA

SEQ ID NO: 310358 - protein, 139 aa, Zea mays
  Clone ID: MRT4577_46103C.1.pep
MGSGSFLKVLAKNFDVLAGYASVRAIETKNPVDDQQWLTYWVLYSFVTLFELTFAPIIEWLPFWSYAKLFFNCWLVLPWFNGAAYVYDHFVRPMFVNRRIVNIWYVPRNEKLGKSDDVLSAAERYIEQNGPEAFEKLIS

SEQ ID NO: 310359 - protein, 209 aa, Zea mays
  Clone ID: MRT4577_46104C.1.pep
WYWNPNPSKLVQKFNPNTPDISRFQCWVLNFHLCYWPLISLAYPLYASVRAIETKNPVDDQQWLTYWVLYSFITLFELTFAPIIEWLPFWSYAKLFFNCWLVLPWFNGAAYVYDHFVRPMFVNRQIVNIWYIPRNEKLGKSDDVLSAAERYIEQNGPEAFEKLISKSTKSSKSRNTKRLNLEDGEAENRAKAERESWGENPFYDKNYRY

SEQ ID NO: 310360 - protein, 252 aa, Zea mays
  Clone ID: MRT4577_46105C.1.pep
MESNTTPFAAVGTAAEEASTRRVANRIIRALQHQLRLLHRAGAEFFVLGVTGNVYTVTLSTTPACTCPDPAVPCKHILFVLLRVLGLSLDEACVWRQTLHPCQVARLVGTPTYPDVLAGARARERFHQLWSARPANNVADDRQEASSHRPLDGAACPVCLEEMAPAQPSQGSGATAQAILTCRTCRNAVHAECFTRWKRSRSRRAATCVVCRSRWKKPNREHEHEQYMNLAAYMNDDGDVTMLSADGWLCAG

SEQ ID NO: 310361 - protein, 81 aa, Zea mays
  Clone ID: MRT4577_46106C.1.pep
LQSDALPCITFRRLGIRFTYGVKQSNLSEQAPDDGHPRRCFPFALRRAQRQSRVVTTWTLSMPTKRSEFGCGGAMRTNTIL

SEQ ID NO: 310362 - protein, 50 aa, Zea mays
  Clone ID: MRT4577_46107C.1.pep
QALEDLLYSPTTHDGYILISPRKRTNSMLLNSETIYWIGTLKGHKGASRS

SEQ ID NO: 310363 - protein, 107 aa, Zea mays
  Clone ID: MRT4577_46108C.1.pep
SIKWLIGGFLIFSFFFLQPQTQNFTPFKKGPPQRRGPLFQYRLQTLAIGNSQKGRLLGNSQKYNAGWGRQFHQWYIWHSDTKTGFYQCSGLTPGGSTCQLYIYKKIL

SEQ ID NO: 310364 - protein, 489 aa, Zea mays
  Clone ID: MRT4577_46109C.1.pep
MPLAPLSLEPPPFRLIRPATGSGGRVLPVPGPAPRLCRSLRAAPVAPDTTEEPFAAARGRLESLSQVTGVLGTQWGDEGKGKLVDILSQRFDVVARCQGGANAGHTIYNSEGKKFSLHLVPSGILNENTQCVIGNGAVVHLPGFFKEIDGLESNGISCAGPPTRSDRAHLLFDLHQVVDGLREAELGNSFIGTTKRGIGPCYSNKVTRNGLRVGDLRHMDIFGAKLNTLLRDAALRFKDFEYDNKILKEEVEKYKKFAERLEPFITDTVHFVNQSILQKKKILVEGGQATMLDIDFGTYPFVTSSSPSAGGICTGLGIAPRSLGDIIGVVKAYTTRVGSGPFPTELLGNTGDLLRASGMEFGTTTGRPRRCGWLDIVALKYCCQINGFSSLNLTKLDVLTGLKEIKLGTSYYTDDGNSVQSFPADLSLLEQVKVKYEALPGWEEDISSIRDYSDLPETARRYVERIEELVGIPVHYIGVGPGRDALIYK

SEQ ID NO: 310365 - protein, 107 aa, Zea mays
  Clone ID: MRT4577_4610C.1.pep
RKQPFLDPYDEPLKRVLLLRIHSLLGIRIRTHFSCGPVLAQHGTSALVSAQGASSNRIRHGFSVQAAPASVKVAASAAASVNQVNTPPVPVLLHRLPLLLVPPWLAS

SEQ ID NO: 310366 - protein, 719 aa, Zea mays
  unsure (1)..(719): unsure at all Xaa locations
  Clone ID: MRT4577_46110C.1.pep
ASLRAGKSFPVGRVSCRVRSVQARRVRFGGKLGRCWCSLGAAFGLIGAAVWRCAVCRLAVCASLVADVFRKQGQEWYCTSGLPSDISVVVGEQSFHLHKFPLLSKSGLLEKRIREKIDNRDDSCAIDLSDIPGGAKAFELAAKFCYGVKFEMTASNVVHLRCAADYLEMTEEXSEGNLIAETESFLTQTVLRSWKDSVKALQTCDNVLDVAERLQIVKRCVDSIATKSCSDPDLFGWPVARYGGPMQSPGGSLLWNGISTGARPRNSSPDWWYDDVSCLSLPLYKKLISAMEYRGISQGVIVGSLNHYAKRRLPGLNRRKSIGDASNCLSMTSLTSIPSEDDQKYLLEEIDRLLPFQRGVTSCKLLFGLLRTAIFLKASPSCVSNLERRIGMQLDKASLEDLLIPNVSDSVETLYDVECVQRIVDHFLSMDQETGGASPGIGEDGQMLASPSLMPITMVAKLIDGYLAEVAPDMNLKLPKFRSLAAAIPDYARPIDDGLYRAIDIYLKAHPYLPESDKEELCRVMDCQKLSLEACTHAAQNERLPLRVILQVLFFEQLQLRSSIAECLMISEPLDGGGGFSRQLGGLPVSGEHLRGAGWPLAARENQTLREGMDSMKQRVSELEKECFAMKEDIERLGRSRSAGKSRFPFALAAKPHVCGTKDKEAAPESSKSETSKSKAAAATRSDDKLAVVKGGAAAAGDGGPQLKHRKHKTSLSAC

SEQ ID NO: 310367 - protein, 256 aa, Zea mays
  Clone ID: MRT4577_46111C.1.pep
MPLLLLPPPACTTAATSLAFSRPRPSRARWANLSYAFPRLRKYGRRHREPVAGPSLDDDGGEEDETEAEDWESDDGEEEMEIDEEEFLAMRPKPAGFGEGKTYSTDIEEQLLREMGFGGGAARRGEAAPANRRAGDSSTKVAAADVSDDGVQVRVWNLPKKKNIHKDLKQAFKGFHGLLSIDPAVSANKKTRDPICKGFAYLKLESAEAATRFVEIYSHQTVSFGKIQKPISCCIIDKRSSVEHSNKHPLVRQSLN

SEQ ID NO: 310368 - protein, 52 aa, Zea mays
  Clone ID: MRT4577_46112C.1.pep
KTEPLSCGIICKDEHPPFIYAYVSTRARSMPIFTPLLWLAPNYVSLIIIAEK

SEQ ID NO: 310369 - protein, 51 aa, Zea mays
  Clone ID: MRT4577_46113C.1.pep
CCSLFVQTAMQGFTEKIVGMMKSENLFASQGGPIILSQASIIFSLDLVQRL

SEQ ID NO: 310370 - protein, 62 aa, Zea mays
  unsure (1)..(62): unsure at all Xaa locations
  Clone ID: MRT4577_46114C.1.pep
VKVFGGDGKVWFAGKRVRGKLAMWEEXDGEQWQXWDWVDGVPGYDDGVYRGFVFDSGFTAIP

SEQ ID NO: 310371 - protein, 74 aa, Zea mays
  Clone ID: MRT4577_46115C.1.pep
MAMDPDAVANAFVEHYYRTFDTNRAALVGLYQETSMLTFEGQKFQGPSAIGGKLRSLPLQGWRAQIVTPPCPPS

SEQ ID NO: 310372 - protein, 107 aa, Zea mays
  Clone ID: MRT4577_46116C.1.pep
VVPVRLLYVVCIFVFHLQCCSSSLVSSLVFPIIPRWLLVFRHLCSVLSFSSPSGHVEENLVLLLGCPARAAACTPGSSAGDGHCRIRQPGAAAYSALSLDRRNYVSC

SEQ ID NO: 310373 - protein, 148 aa, Zea mays
  unsure (1)..(148): unsure at all Xaa locations
  Clone ID: MRT4577_46117C.1.pep
VGVDDSSATRQPTDPSFQFQLLYLSRTPFSSPPLGQPHSSPPSPPSSICISSLPVPLLSKTALRPIYTRAPTHTQRDKSPRALSRLSRNRFFFVAVEGARLQEPDFHCYVQATSKMDDWMLPSPSPRTLMPSFFSERVHLHSXLQHLR

SEQ ID NO: 310374 - protein, 80 aa, Zea mays
  Clone ID: MRT4577_46118C.1.pep
DRFASRAVSTDFARQKCSATYCSGGGHPLHNRWIQPSREWPTSDSLTPPSAATSPPNRTPAPHEFDVNHSNLCCSREIVA

SEQ ID NO: 310375 - protein, 120 aa, Zea mays
  unsure (1)..(120): unsure at all Xaa locations
  Clone ID: MRT4577_46119C.1.pep
EVCKQGGRGVWGTPQRPNQKREKLLRRGGGRGGGGARGGQGRRRGTKKSPRGPPGNPPKRGQTLGNPKGEKPKTPPMPPSRRAPTGAGSPQKMGGKRGKPREKXPPKGPQPAKSPQKGGG

SEQ ID NO: 310376 - protein, 329 aa, Zea mays
  unsure (1)..(329): unsure at all Xaa locations
  Clone ID: MRT4577_4611C.1.pep
MPPRLYKINDARGSMCGVHTKPWISQRSIPTRAQHRRARAHQHDTAKLHSTDTLRSSPPEPPARSMARLLPTAAAAAIVAAVLVAGLPGARAASASPAADDAPPYRNHTVGGGDGWFFDANTNASSGNYSDWAAGETFYLGDYLIFKTNDNSSVVQTTNATTFGLCDASDXGGDDVXTAAAAAGAAASSRXTIAVALTAEGANYFFSEADGGAQCQQGMRFEIKVEHGRGLPPSLXAPAAGAQGPRPRAAAGGHGVLGHRRGRARRRRRGQRRRWQERRVQGGGGGQRPVIGGGGCCCCGSGRFGSLSSDGLKAFVIWNHCSAYVCVCI

SEQ ID NO: 310377 - protein, 98 aa, Zea mays
  unsure (1)..(98): unsure at all Xaa locations
  Clone ID: MRT4577_46120C.1.pep
CSLRCMSVCTIYNSRTLELVVLRVMPALGIYLYRAARSSRTHSMILAWRREWFVIQIFSLEMTKEEQCPXTTVVCATTKGWVEGSTSLTCRTWEENRI

SEQ ID NO: 310378 - protein, 211 aa, Zea mays
  unsure (1)..(211): unsure at all Xaa locations
  Clone ID: MRT4577_46121C.1.pep
MQQTXRCRTIPXXLXXLEXAQDRQNXXSESPLTPSXQXLAPNXHXYAGEWDXLPTILSXVQPXXAXTXLXXSXXXFMDXXXSHXXXSLVGHDYCPRXSXKLSXSRAWERPXETDQADSGYDXILISDXPYAAXSLXXLYALXSKSLXPPYGVPHAGLQXRTSSXSXXAXRPLRALLXREGLLXGHXFTXVXXRAXCKFXSANSPRTMSPAA

SEQ ID NO: 310379 - protein, 81 aa, Zea mays
  unsure (1)..(81): unsure at all Xaa locations
  Clone ID: MRT4577_46122C.1.pep
GGGGGKKQLGLVALHSHYQDINVVQAIAQQLHLQQFGDLYIDLNLXQARGGGGFFFFSTYXIYPXYYSAPGTPPTLGGVLY

SEQ ID NO: 310380 - protein, 85 aa, Zea mays
  unsure (1)..(85): unsure at all Xaa locations
  Clone ID: MRT4577_46123C.1.pep
SLALSLTILQLVVASETDDSWWLLCYMFFDSLTTVCCRLRHHRARKKEAGRPHTKHSVTESVLSMLALLXDTVSVNRSXSRQCTV

SEQ ID NO: 310381 - protein, 60 aa, Zea mays
  Clone ID: MRT4577_46124C.1.pep
KKNTLTQETPPPKKKPKKKKNKNKKKTQKKKKKKKKKKKKKKKKKKKKNKKKKKKKKSLY

SEQ ID NO: 310382 - protein, 34 aa, Zea mays
  Clone ID: MRT4577_46125C.1.pep
ILVGKVRQGSTWIPKLMHLKIARKITELLELLLF

SEQ ID NO: 310383 - protein, 99 aa, Zea mays
  Clone ID: MRT4577_46126C.1.pep
QPPSDPSLPLALTAVSPTTIPTGYPRADTSQSLFGICKCDIYNSWRRRTSRLTSCRLVCTKTSASWSWLACLISTMTRLLWAPSVRPLLELLPRRLLYA

SEQ ID NO: 310384 - protein, 75 aa, Zea mays
  Clone ID: MRT4577_46127C.1.pep
SEVLSKNCLEKKLPGPCSSCGPVWFVLTFVFKVHPYLHGICLWLDVNIWTKYLSPLKKKKKKKKKKKKKKKKGRP

SEQ ID NO: 310385 - protein, 162 aa, Zea mays
  unsure (1)..(162): unsure at all Xaa locations
  Clone ID: MRT4577_46129C.1.pep
RGGPNFLRAPACSPYFSAGRGNPNRPPLLRPFPTSRAPGSPFPRLLRKGPKTLPLPPGQGFIFKLFLPFWKDHDWVKILELCRKAPPSPQKKGKGVLXXLLGPPKGPVFFKAPPLMDMLLMVPPQGRQPGEKNWAPLFSKGGFSPSKVFKKNGALGVLQVFP

SEQ ID NO: 310386 - protein, 76 aa, Zea mays
  Clone ID: MRT4577_4612C.1.pep
RPVCKGCRFWVQRIRCSSRTAKSRGPSPTPPSRSSGFFTGRGRGRIIPNIGINTFVLPIVGVFYPIVHFFRALIAV

SEQ ID NO: 310387 - protein, 79 aa, Zea mays
  Clone ID: MRT4577_46130C.1.pep
GPRRNKVFGRQKERFGPILYIHWYKWDCPFLRDPFDHECQLQSLLPVPGGYKISWSCLSTVYSTQFSHTPLNVPRNFST

SEQ ID NO: 310388 - protein, 152 aa, Zea mays
  Clone ID: MRT4577_46131C.1.pep
KIKYHSRTKGAARSSPNEPYLLAPAFMGLKSVKAAPFALWAVQAVLDAANCIFKIQPFKSVLRIIDMAPAASSPRYQLAPAGRRQASCWVPIVTGSVLVGVHCWWWCRTVTRTETPTAPLAYLVRLATAAAYCTATLLVVATFSVGRRDVLL

SEQ ID NO: 310389 - protein, 162 aa, Zea mays
  unsure (1)..(162): unsure at all Xaa locations
  Clone ID: MRT4577_46132C.1.pep
MPKIKGRLLSKKKRIXRKXERRKARESRKKTKEVQAXKKKERAKQKKEQIXSVKKWRKQSPQGGFSXEKIMCQPLIFKEKKGFNNXKKRAGVSPGDRSGGLAKRGKRGKNGRARDSKFGHGGRKGLKKQNPAXTPNDFKGFNQGGEPPNKKKKRFLTLLWIL

SEQ ID NO: 310390 - protein, 173 aa, Zea mays
  unsure (1)..(173): unsure at all Xaa locations
  Clone ID: MRT4577_46133C.1.pep
MDRTYYKGGIKAYWKRRGYYRIDAAAAQXAAAPHRGARRXWVSPRPSRRRRRWRVPRXAPMPRVXVRRGQLRRRLLRALSPRRWLMRLRDAYVSAMLRLASSPAVGYGAGQPYCGTAAFARPAQLKEYEDKVLVEIYRSILAGGGPGPIAVTTGSNGAGAPAAATLRLPTAAA

SEQ ID NO: 310391 - protein, 208 aa, Zea mays
  Clone ID: MRT4577_46134C.1.pep
MAVPGGRNGLRDEDDDMAQHAEAFGGVSDDEDVPPHLRALANAAQSGDVTALVAALDNHDGSIDVPVEDGDTLLHLACLYGHLPCVQLLLERGASLECQDEEGAIPLHDACAGGFTELVQYILNFAANKDGCVVRMLNTIDSEGDTPLHHAARGEHLDVVKLLLQAGASPKKENTYGQTPADMADQDTEVRTLLTAKQIEASTHMSDD

SEQ ID NO: 310392 - protein, 72 aa, Zea mays
  Clone ID: MRT4577_46135C.1.pep
FRHVHGPVGSPGLNLAFRTDGWISPFFSGYPRPWQKEGGRIQCRSFFIPRCEVCDSVTRFVHGECTFMILAL

SEQ ID NO: 310393 - protein, 123 aa, Zea mays
  Clone ID: MRT4577_46136C.1.pep
IYIAAVDTGNLQPAAAKQLTTSLINTITSSETGGGGTGTTSKHWYRRNTNNSFDKYLGQQSKRPYSWSPRQASFASKKRFANRGTRERERLLLRLLVAHQSKQKPLVDGWGNDRLFSYHLHER

SEQ ID NO: 310394 - protein, 147 aa, Zea mays
  unsure (1)..(147): unsure at all Xaa locations
  Clone ID: MRT4577_46137C.1.pep
MPLLASLRTLSPIPCLVVPTPTKPLTANAVHKRRPETAEANKPHHARPGLAXLSVIRFTTKSTELPLLKVPDQPLMRQIGQDVKTDLHFHSSAVSRLEEPAEAYLVVLLEDTNLCAIHAKRATILPKDIQLARRIRGDEGLSVTLHC

SEQ ID NO: 310395 - protein, 131 aa, Zea mays
  Clone ID: MRT4577_46138C.1.pep
RSFGVSSHQTAAQAQGRGLRLRLRLRAPSSLPSFPARRRRRRSDRRRQCGAGANRKRLVTPDRRRQCGAGVKRKRKRKRLMTSMPPGRRRRCGMKTRRLMTSMTPDRRRHRGTKILMTRTFLPRVPRTFLL

SEQ ID NO: 310396 - protein, 90 aa, Zea mays
  unsure (1)..(90): unsure at all Xaa locations
  Clone ID: MRT4577_46139C.1.pep
AAPKAKKGTGGHKDGGPTKKSVTWSLKAKMQFPIGRIGLYLKKGLYAQRVSTGALVYLVGDLEYLAXKLLDLXGNPSQGPXETRIIPCHV

SEQ ID NO: 310397 - protein, 133 aa, Zea mays
  Clone ID: MRT4577_4613C.1.pep
LFFFFFFFFFFFFFFFFFFKKPQGIKKAPPTQGVLWGPPHFFFGGGCPPLDPKGPVQAVKWYSPTKKERPWPPPFGGNPFGKLFYFPRGPPFPRGKGLPLFWGGKNPNGSFSPPEAPPGEKNPPKEDLTTVGY

SEQ ID NO: 310398 - protein, 250 aa, Zea mays
  Clone ID: MRT4577_46140C.1.pep
MKFGKRLKKQIEESLPEWRSQFLNYKELKRRVNAVSSRGSAADPSSSSAAEADFLTLLDAEIDKFNAFFLEREEEFVIRQRELQERIGRAGGPEATLARVRREVVDLHGEMVLLLNYSSVNYTGLAKILKKFDKRTGGVLRLPVIARVLRQPFFTTDLISELVRDCEAAMEAVFPPAASRDLHGRQALAVAGQGIFRNTVAALLTMQEVRSGSSTVGHFSLPPMQPLPESDWLVQSVDSTPTASPLIPTQ

SEQ ID NO: 310399 - protein, 280 aa, Zea mays
  unsure (1)..(280): unsure at all Xaa locations
  Clone ID: MRT4577_46141C.1.pep
THTRRDQIDTLRSRSNKSKKKKNLARHNYTGLAKILKKFDKRTGGVNAVSSRGSAADPSSSSAAEADFLTLLDAEIDKFNAFFLEREEEFVIRQRELQERIGRAGGPEATLARVRREVVDLHGEMVLLLNYSSVNYTGLAKILKKQIEESLPEWRSXPQLQGAEAARECRVLPVIARVLRQPFFTTDLISELVRDCEAAMEAVFPPAASRDLHGRQALAVAGQGIFRNTVAALLTMQEVRSGSSTVGHFSLPPMQPLPESDWLVQSVDSTPTASPLIPTQ

SEQ ID NO: 310400 - protein, 231 aa, Zea mays
  unsure (1)..(231): unsure at all Xaa locations
  Clone ID: MRT4577_46142C.1.pep
IRDDGWDSLLEDVLSFCEKHGIPKLDMDHEYINRHKPRQRTNRTNYQHYRYDCLNPVIDLQLIEFNDRFNEVNSELLTHMAAFSPNNSFGAFKHESLMELAKAYPDDFSPVELDDLSSELHCYIDNVRADARFAQLGTISEHGKLMVDTKKHLAFSLVYRLLKLVLVLPIATASVGEXXSAMKIVKTVLQTGIXXDDXMXNCVISFMEQELLDTISINDVDXRFQKMDGHN

SEQ ID NO: 310401 - protein, 250 aa, Zea mays
  unsure (1)..(250): unsure at all Xaa locations
  Clone ID: MRT4577_46143C.1.pep
SFVGYDSPSSADAWARWSRGWTAEENRHGDLLNRYLYLCGXVDVRRVEQTIHHLINAGMRLASDKCPYRGFIYTAFQERATAVSHGNTARRAMALGDASLARICGAIASDEKRHEAAYTRVVDQLFALTPDAAVRALEYMMRERILMPAYYMFDGRDPDLFRHYAAVAQRLGVYTTADYADLVQFFVDRWGVADLGPGLTGEGRQAQDYVCRLPERVRRMDQLDARRRLQPQTRQVPFSWLFDRHVELLT

SEQ ID NO: 310402 - protein, 59 aa, Zea mays
  Clone ID: MRT4577_46144C.1.pep
TVHSRSHQPGPQEPESWRHVCMSDLLMAEKNKSYYTIERLHHLVRLVTIFRRPNSYRTI

SEQ ID NO: 310403 - protein, 85 aa, Zea mays
  Clone ID: MRT4577_46145C.1.pep
ALVRFAALMSRTNPSSEPFSEPYSPKLGLCIDGSVQPRQIGNLSLHQIHVPYFRAIQSPSIPRCPFHFPRLQKLRQRCRAKGIQS

SEQ ID NO: 310404 - protein, 133 aa, Zea mays
  Clone ID: MRT4577_46146C.1.pep
MKGVSRFGVKGKLAPRYIGLFPILERCGQVAYRLQFPESLFALHSVFHASQLKKCLWIPDQTMDVADVNLEPYLTYSEHPIRVLDQNDRITRKRTLKFYKPKDSRSSSRVCGMISTLAMGVRKVHLLSVAPKL

SEQ ID NO: 310405 - protein, 33 aa, Zea mays
  Clone ID: MRT4577_46147C.1.pep
IVNKEALEADNLGVLNWKSVSMCPALMAQAPLN

SEQ ID NO: 310406 - protein, 51 aa, Zea mays
  Clone ID: MRT4577_46148C.1.pep
KVELALWMTSGLGWAVGGRTKILAELSKGRDAWDPGWYEASHTVKCQLHQH

SEQ ID NO: 310407 - protein, 131 aa, Zea mays
  Clone ID: MRT4577_46149C.1.pep
PRGRPGCSSLIFRIRRSLRITGPPTATPYGRDYDGHVEHEGNAVAVEEPPQDEAKHHPKLIGIVHDNDYMVVENTPLMSVSTCLPCHIVNHASWLRHSVQDIDHSKPCTSLEHTSRLLLTICQYFSEVEPI

SEQ ID NO: 310408 - protein, 67 aa, Zea mays
  unsure (1)..(67): unsure at all Xaa locations
  Clone ID: MRT4577_4614C.1.pep
FHQYNILSIFYLSHFILKHYNILXNSXYYIFIPIKPXKPKXTTTTSSXKQPFLPLXLPLNYXIKQTK

SEQ ID NO: 310409 - protein, 31 aa, Zea mays
  Clone ID: MRT4577_46150C.1.pep
STHFNNSPHITFYFSLKSYNIPFFLNFYIFF

SEQ ID NO: 310410 - protein, 52 aa, Zea mays
  Clone ID: MRT4577_46151C.1.pep
WCLRSTQRPPASSRLDFIVLTPGAFLRRLVRTPSSYRSAISVMRMAPCHTCA

SEQ ID NO: 310411 - protein, 62 aa, Zea mays
  Clone ID: MRT4577_46152C.1.pep
RKSECSYLFKTPTLPTRPSKPLPSNHVNTKLCYGRLTSITQNEKTLPYPNLLMPIYNAIHQL

SEQ ID NO: 310412 - protein, 65 aa, Zea mays
  Clone ID: MRT4577_46153C.1.pep
HASIKKKKKKKKKKKKKKKKKKKKKKKKKKKSTRHKYTNRANPNILTLYVFLHRPNWKNLGRCLT

SEQ ID NO: 310413 - protein, 44 aa, Zea mays
  Clone ID: MRT4577_46154C.1.pep
KPPLLNVKLHEVLNFMQYEIPYKYLSASYSLCGLSLEIKIQVLT

SEQ ID NO: 310414 - protein, 97 aa, Zea mays
  Clone ID: MRT4577_46155C.1.pep
TRAEGGSIALFLFYFMEVGGKCAFGFQTEQFVFFKKEEAFRIFLCTVEPSLVFNPEKNMFLSSLTSAIIWTWNNIYIFLFWGKKKNKKKKKKKFFFI

SEQ ID NO: 310415 - protein, 45 aa, Zea mays
  Clone ID: MRT4577_46156C.1.pep
MACTNNAMRALFLLVLVCIVHGEKEESKGIDAKASGPGGYFDITK

SEQ ID NO: 310416 - protein, 74 aa, Zea mays
  Clone ID: MRT4577_46157C.1.pep
AHAKPLKEPAEHLPDPDRSRQEARPKGRLIEDADASLLGAASTKSHWMAIGNRRSNDPSQSASGWLSRSRDRLS

SEQ ID NO: 310417 - protein, 98 aa, Zea mays
  unsure (1)..(98): unsure at all Xaa locations
  Clone ID: MRT4577_46158C.1.pep
TWTCPCPRRRLPGTRXYVSXPPPTRRPRAPSSRRRRTTSSALWRSRSTARWRRTRAGAPPSTSPSARPTPRRRRPSAEPSPPGTRPRASWGSRTPCSS

SEQ ID NO: 310418 - protein, 162 aa, Zea mays
  unsure (1)..(162): unsure at all Xaa locations
  Clone ID: MRT4577_46159C.1.pep
MSWGLGWKRSTEIFHLTLDYGDYDDNDDHQPSSPSPPASSSPSASASSTPVSSSSPTATRNGDLGFRIELEWSAGDDEDQVALRLQSQLMVALPPPHDAVSVDLIPRDDGEEEVVQIEMRVVRRREALRSVRVSRAPGSXGQRXDGAGVLARLIRSNLAPAP

SEQ ID NO: 310419 - protein, 128 aa, Zea mays
  Clone ID: MRT4577_4615C.1.pep
LQSCIFWNIPFASLNSPEPGVVWQQEQPKRRSCSCSRNNIFQHEQCLLAVGTTLCGSSNRGLVLGSKNNVVWQQDLATVWSSTCVQPPAGEEAARDGRSRRPEMEERMVGDGGKESGGWTDGRWANPN

SEQ ID NO: 310420 - protein, 98 aa, Zea mays; identical to SEQ ID NO: 310417
  unsure (1)..(98): unsure at all Xaa locations
  Clone ID: MRT4577_46160C.1.pep

SEQ ID NO: 310421 - protein, 164 aa, Zea mays
  Clone ID: MRT4577_46161C.1.pep
MTDAAGQGGGGGEGGGSMNGYGSGSGSGYGSAGATNTPGGPYGTGSSMASVDGGGSGGGDNGGSGAGSGSSASRSYTVGFYGGGYSDAQGSGGGGGRGGGPQNGSGSGSGSGRGISSSYVAGPNGGSSANGGGSGGGEGGGRDGGYAGGYGGASGSSSGQGGQG

SEQ ID NO: 310422 - protein, 90 aa, Zea mays
  Clone ID: MRT4577_46162C.1.pep
LRVRPRVRLQSDIQDQLWGAGNGDESNRTSHHAWSPYARYANKTLSHGTDKYLLRMTRQFHTNTKVLIEEWLLPYERLHIKDGRYTTHMM

SEQ ID NO: 310423 - protein, 47 aa, Zea mays
  Clone ID: MRT4577_46163C.1.pep
YCGDQCNANSSPPDCIALYVVLRRSIESFGSSSFYRCTYIIYDERHI

SEQ ID NO: 310424 - protein, 177 aa, Zea mays
  Clone ID: MRT4577_46164C.1.pep
MDDDGSSSPSPLRVVICPWLAFGHLLPCLDIAERLASRGHHVSFVSTPRNIARLPPVRPTVAPLVNFVALPLPRVDGLPEGAESTNDVPHDQFELLRKAFDGLAAPFSEFLSAACAEGAGKRPDWLIVDTFHHWAAASALENKVLFPLLLQFHVRTSTARSKNKVRRSFLQFHMQLN

SEQ ID NO: 310425 - protein, 70 aa, Zea mays
  Clone ID: MRT4577_46165C.1.pep
LVIKLTPFLVIINGSGGLWVFFSCPWILLKNPRALGPCQSFLVSLPPPPVVVWLDARKEGSFQPHQGVGR

SEQ ID NO: 310426 - protein, 109 aa, Zea mays
  Clone ID: MRT4577_46166C.1.pep
RADSPPPQAEDTTFACSTATTETGEGAKRPRSDHHPTEGGSGTAQEHADEPANDPHGLLQKPYSGGDDDDSLDGLFAADEAAQQDEGNGMDGVRLWSYDEVPAVDRSAF

SEQ ID NO: 310427 - protein, 182 aa, Zea mays
  Clone ID: MRT4577_46167C.1.pep
WDPRGRPGREHLVSSPTSLTNHPSVDRHLHLCYTTYDLSSGPWMSNLELHAASLDCIHRVDSRERHPATHSFRFTRSTHSSCPCLLRLMHGLAADIIVIVVHRSPDNCTVEVIYELTPATGSWMWTLQHVSLHVTWGYTKPTLLLTVAYVHEYRTKRSQPTLSYMTYALTGWDLNDHKPSCG

SEQ ID NO: 310428 - protein, 119 aa, Zea mays
  Clone ID: MRT4577_46168C.1.pep
RLEERLPAHFSQPQPGERGEGDYRRGVRHDQRDDLKSTALQVRAGLRFAAPTVRTGRPSMPVRRAFSPSPGGSLILRLERLLPAHVPAHHNPLLRARPLRYQQHHSKDGASSHAPIRRT

SEQ ID NO: 310429 - protein, 116 aa, Zea mays
  Clone ID: MRT4577_46169C.1.pep
RHFHSLIEHHLTPCILSVGMLGIRTTCQSFSFWLHSHAKGMNHHFIHAHHRLFGSNVQRLESILIPCWFIHSIPEDIETRTQKHRLIQHRLIIKYKVSVHLRMNFLLQLVSSTPWN

SEQ ID NO: 310430 - protein, 100 aa, Zea mays
  Clone ID: MRT4577_4616C.1.pep
RGERYIPEDAGLQSRPDLFSYLTLIRAYIEAKLHTEVEEPIWTMLRSDTTGSHLIPAVLKVYMLEAKARSRSRRSGARFDGGPGHIELVPHGVPEGRAWR

SEQ ID NO: 310431 - protein, 66 aa, Zea mays
  Clone ID: MRT4577_46170C.1.pep
PILYKERLLYNKYAYWEIEMNTYLRSRDFQQTQLEPVDLLRHIMSPGQKIKWLQLISTEILNATLI

SEQ ID NO: 310432 - protein, 104 aa, Zea mays
  unsure (1)..(104): unsure at all Xaa locations
  Clone ID: MRT4577_46171C.1.pep
MPVMPTDTRNPMLLYTGERVQRAPASGPERAIRHGVKPTIFRIYVCWSSGNHLDVECLRPPILGRSRPNLTTSYGGCYDVNLGRXWLRRATTHEEKIDHAEIRK

SEQ ID NO: 310433 - protein, 153 aa, Zea mays
  unsure (1)..(153): unsure at all Xaa locations
  Clone ID: MRT4577_46172C.1.pep
PTPPGAPGXPGEFGPGPGGEPTFPIRGGIKAWGKQGQNGFPGEKGIPSKIPTKKSPEPKRENPGGPKRGPTHIKWGGPTGPFSRGKTGGPSGLKKRPNPRGRGVGYLAPRGVFFLPRGTGKTDWPXPPGPEXKCNKGAPPGCPHRGKNRLEGG

SEQ ID NO: 310434 - protein, 85 aa, Zea mays
  Clone ID: MRT4577_46173C.1.pep
GGLKPKYHFCTYIPTTKIGVFTRSVQGQKKSDHGRNTFVRVSFSQNTSSIFLIDDNSRHRFYVTNDNTRIAKKQAWYWYPPCFLV

SEQ ID NO: 310435 - protein, 233 aa, Zea mays
  unsure (1)..(233): unsure at all Xaa locations
  Clone ID: MRT4577_46174C.1.pep
RPGLHIEVADLLRRLSCSRHPSQLPTDLAITHAFAHHWGGSFEIAYGAAKDYHSRDMDLDRGAISLRQDHEMEETHQSCVLGTPECQQXDKHVDLGCIVVDRNMLCGDLWCDVAPFVLIGLPIILDWIIPDENTYPPPTDHYTDALHKALLFFNVQKYVLIHNNNGIKWSGNSGLSHASDAKDVKDXLISDYYHAGYXIKFHFTMDFXMTLLNWSVXIQYRAKHKAXGEYDHV

SEQ ID NO: 310436 - protein, 122 aa, Zea mays
  Clone ID: MRT4577_46175C.1.pep
MDILYQCKEVLKIQKFRRMVSYAGFYCFTSLITYAYTSNTTRAGISRADQYYSSYPAGTELLTDTAKLYKAALGNCFEVDEWGPIEFSIMAKHFDRQGKPPYAYHAQYLAHLLSHGQLDGSG

SEQ ID NO: 310437 - protein, 138 aa, Zea mays
  Clone ID: MRT4577_46176C.1.pep
RSPPASLGFPSPSTISASPDLDLSPRGRARRPPGCRSNPPSSRCQRRSATDAPQGRTRAGISRADQYYSSYPAGTELLTDTAKLYKAALGNCFEVDEWGPIEFSIMAKHFDRQGKPPYAYHAQYLAHLLSHGQLDGSG

SEQ ID NO: 310438 - protein, 87 aa, Zea mays
  unsure (1)..(87): unsure at all Xaa locations
  Clone ID: MRT4577_46177C.1.pep
ASHRTRAGMSRADQYYSSYPAGTELLTDTAKLYKAALGNCFEVDEWGPIEFSIMAKHFDRQGKPPYXAYHAQYLAHLLSHGQLDGSG

SEQ ID NO: 310439 - protein, 122 aa, Zea mays
  Clone ID: MRT4577_46178C.1.pep
MDILYQCKEVLKIQKFRRMVSYAGFYCFTSLITYAYTSNTTRAGMSRADQYYSSYPAGTELLTDTAKLYKAALGNCFEVDEWGPIEFSIMAKHFDRQGKPPYAYHAQYLAHLLSHGQLDGSG

SEQ ID NO: 310440 - protein, 72 aa, Zea mays
  Clone ID: MRT4577_46179C.1.pep
RTHLCLVAFHQKHHQVAPRRSGDITGRGSTDCYGSVSTHARNVRLFFSRVSVGSIRASAALRAFRPWCEDPP

SEQ ID NO: 310441 - protein, 120 aa, Zea mays
  unsure (1)..(120): unsure at all Xaa locations
  Clone ID: MRT4577_4617C.1.pep
DHHQSVLHYVTIDCGLGLQHIHLQXRENQVASCCVAPQHFRMGSSASVCSLASMYALNWVLFGSRNSQRGGLVHAQEQHLSARMMSSCSGNDVVWKQQLRSCSRQQEQRRVAARTGRHLV

SEQ ID NO: 310442 - protein, 71 aa, Zea mays
  Clone ID: MRT4577_46180C.1.pep
GPKIGCFYNVTTYFYYLCLDRDNVFLAVPVTRGVCSRDYKQQSTIRVDRFFITVKLNPAVLPVRTRGRTHG

SEQ ID NO: 310443 - protein, 63 aa, Zea mays
  Clone ID: MRT4577_46181C.1.pep
KTTCNQFLLKQFDIVQPTTNFQNRNVLQLFTVGGLGTLWPWIGLILIEAYQLVGGMFFLWGLF

SEQ ID NO: 310444 - protein, 94 aa, Zea mays
  Clone ID: MRT4577_46182C.1.pep
QETHEGVTEDGIEDAFEVLGEIQEIVQTGLWVGDCFIYTSSVNRLHYYVGGEIVTIAHLDRTMYLLGYIPKDNRLYLGDKELNIISYSLLVSVL

SEQ ID NO: 310445 - protein, 162 aa, Zea mays
  Clone ID: MRT4577_46183C.1.pep
LTRNRKSPPFPNPLSPGGGQFFNAPGPPGFSPGKGAVSPTPLMWVGSPLGPPRFAPFSFRVVFCSEWSPGYTFSPEASFALFTPSWVPSSAPLEPAPRGLEFPPRVVPPQVPRGVSGYSTSPFLKPPNWGPLFCSPPAPSFVPGFFGPLFRSSLDCFRFRPA

SEQ ID NO: 310446 - protein, 72 aa, Zea mays
  Clone ID: MRT4577_46184C.1.pep
MVKGLYIHTLGSSKPYVQSFTLFRLHRRPSIRGKLYTPFFISTFCRFVQLSKNTGVPFAPHQRQLVLRIGVC

SEQ ID NO: 310447 - protein, 70 aa, Zea mays
  Clone ID: MRT4577_46185C.1.pep
SREALTRVFVRGWIFTVLSVRQASVFGGLYVSQVVGGVGVVLLVALPAGGVGKVRSCSACHLGRTHPVDR

SEQ ID NO: 310448 - protein, 71 aa, Zea mays
  Clone ID: MRT4577_46186C.1.pep
PLNKVQYGRPYAIQALTNLPTIRNQEMWPRLFRLLAATLNIFSLGVILSPRGEKSPAKGDGQGYSEGCGPP

SEQ ID NO: 310449 - protein, 122 aa, Zea mays
  unsure (1)..(122): unsure at all Xaa locations
  Clone ID: MRT4577_46187C.1.pep
VVTHPQSVAPSPDCIWLNCGVGVQNLKTRMTGYRYVQLYKLMEDSATADIMPVQNCQXMTPSIAXDARDLEERSTPDLLSRDVEEEMAKVKDXVRPHRFPKGAVPVADKIFKRQCTVPEQDD

SEQ ID NO: 310450 - protein, 115 aa, Zea mays
  Clone ID: MRT4577_46188C.1.pep
LGLGFFIFYSFNNPQKTRTCFQTISDYKTLGPPKGTQQLSYSSKTMTKGTWRYTPTPYALSLPKNLLFKKEAKKRPYPNGDHVDNNINLNFLTATPKLLFKKDRRTATPPLFWTP

SEQ ID NO: 310451 - protein, 533 aa, Zea mays
  unsure (1)..(533): unsure at all Xaa locations
  Clone ID: MRT4577_46189C.1.pep
MAESKVASLDARTTKIRNVPIAVTPEGFWCCPSQAVLQKTAKSQNPQAKTKPRGGASPLAPKAAPPXRGRPQSRPREGRTRLRPGRKPTQRSRGACRRQRTLRLXNATNPPKAVNERPQKQHKVSVGFGQLETSDLKVVLYGKDGVAVKMSVHKNTLAGNSTFFADKLSGQSPASSIEVTDCEDVEIYVETVGLMYCSDVKQRLIKQTVPRVLRVLKVAELLGFPACVMSCLDYLEAVPWVGEEEENVVSSVRNLQSESYGVSPVLKRVAPSDRTTPPNDTFSHIIELVLRSSEDRGRREMKSLVQKLLKESSTGCMSGSSDLCSAVLYRSCRNCLDSLLILFQQATDSDFAEQALNTKEPVFRQVALEADNLLWLAEILADRNAADEFAVIWASQRELAGLHSRLPVKSRHLVSCVTARLFVGIGKGEMLPSKDTRRLLLDVWLQPLMDDYNWLQHGCRSFDRKVVEEGVGRTILTLPLEDQQTILLSWLGSFLKVGDSCPNLQKAFEVWWRRTFVRPYAEQQGNRSQSGRS

SEQ ID NO: 310452 - protein, 67 aa, Zea mays
  Clone ID: MRT4577_4618C.1.pep
MDDDDVLLDVSPSLAHLGVHPRISTPPPHLPARGPSPTLTPCTLHVPPPPPPPRRSPTHLPPPPAPP

SEQ ID NO: 310453 - protein, 60 aa, Zea mays
  Clone ID: MRT4577_46190C.1.pep
GLYVHKNPLDVPLSPNACEFFIGRCRYSQLSKREGAMYITHAHPFVPLIPNINKQLGLCG

SEQ ID NO: 310454 - protein, 71 aa, Zea mays
  Clone ID: MRT4577_46191C.1.pep
AGQSIYQHESPKNIFRPVLKNGAQAHGKNNTIQGRVEKLAPDQKLADGHMKLLMEQVRQRKQSKSQSGTHP

SEQ ID NO: 310455 - protein, 110 aa, Zea mays
  unsure (1)..(110): unsure at all Xaa locations
  Clone ID: MRT4577_46192C.1.pep
AGAGALSTGEGSQRRGEILSSSLSSGISGSRAAGASTALDPHDAAPQQLTRVKAAARGRLLXTPAAGVXCPEDAGRXAVVVRAGPGPLSRIEPGLEDDAIDVYRINGINP

SEQ ID NO: 310456 - protein, 78 aa, Zea mays
  Clone ID: MRT4577_46193C.1.pep
MRATIPTLALLVTPRLPGLAVPLAGGRLRVGGRPRTRLRVAAPTSVPGEAADHAEPSTSAPEYGEKFSRRDHWYPVSL

SEQ ID NO: 310457 - protein, 120 aa, Zea mays
  unsure (1)..(120): unsure at all Xaa locations
  Clone ID: MRT4577_46194C.1.pep
MGDARSEVPLAVLQDRQDSTATPWLPADAGSGTGQQEKHAAPADVTPPMGECSTEYRGLPDANGEDAGTVPAALRKVSIVPLVFLIFYEVSGGPXFGIEDSVGAAGPLLAIVGFLVLPVI

SEQ ID NO: 310458 - protein, 86 aa, Zea mays
  unsure (1)..(86): unsure at all Xaa locations
  Clone ID: MRT4577_46195C.1.pep
GGGAPGNPGQGEFARGXLGAPGVPPFLSARRPGTPPPRGXGRAPPGTAPLKGQKSPGGKGGEKGAPGTGXGPGPPPAPNNKAGAKK

SEQ ID NO: 310459 - protein, 477 aa, Zea mays
  Clone ID: MRT4577_46196C.1.pep
MGECSTEYRGLPDANGEDAGTVPAALRKVSIVPLVFLIFYEVSGGPFGIEDSVGAAGPLLAIVGFLVLPVIWSIPEALITAELGTMFPENGGYVMWVASALGPYWGFQQGWVKWLSGVIDNALYPVLFLDYLKSAVPALGGGPPRAFAVLGLTAVLTLLNYRGLTVVGWVAICLGVFSILPFFVMGLISLPRLRPARWLVVDLHNVDWNLYLNTLFWNLNYWDSISTLSGEVDNPGKTLPKALFYAVIFVVVGYLYPLLAGTGAVPLDRGQWSDGYFSDLAKLLGGAWLMWWVQAAAALSNMGMFVAEMSSDSYQLLGMAERGMLPAFFARRSRHGTPLVGILFSASGVLLLSSLSFEEIVAAENFLYCFGMLLEFIAFVLLRVRRPDAPRPYRVPLGTAGCVAMLVPPTALIVVVLALSTLKVALVSLGAVAIGLVLQPALRFVETKGLLRFAVNTDLPDIGVGQSSASAEEPVTP

SEQ ID NO: 310460 - protein, 58 aa, Zea mays
  Clone ID: MRT4577_46197C.1.pep
HTTLSIPFTLASSLCDLDELPARGAQKERSVILLRHCDRPQPPPKPMKGGLVASYLTW

SEQ ID NO: 310461 - protein, 95 aa, Zea mays
  Clone ID: MRT4577_46198C.1.pep
KGPVTLIGTLPFVFSPPSPFNDLRKNIPKLFAPGQFFPVPAVLFKKGFVLYIFPPQGLLARSGSMHDRSVRGHPLRQAYAAFCFSPPSVPSSTPT

SEQ ID NO: 310462 - protein, 91 aa, Zea mays
  Clone ID: MRT4577_46199C.1.pep
VGCPPYGAALFLGPFFLGPPMVGAPLDGFRYLSALVSGGRSSGFPDLSLRVLLVRVLAFLVSVLLCLFSPPVVFPLGFVRPAVFLVAVFWV

SEQ ID NO: 310463 - protein, 209 aa, Zea mays
  Clone ID: MRT4577_4619C.1.pep
MAFCWRGLASSHYPWSPASSFRRPSSPTSAGCPWRRRSLPLLPPAFGGKDDHQPREGGQQAEPRLHPSHPQLFGVGSEPCCGSISLALMALVPPPTLPPTAKRGVAVRPPHERWSRRAQVRHIRGVPYAAGLTAPTRPEGSYKTSYAVGVAGAFLDGLVLTPVGGRGRGPLRTRCGGRRCRQATGAKVSAVTGEPLVKRWPLPQASRSE

SEQ ID NO: 310464 - protein, 67 aa, Zea mays
  Clone ID: MRT4577_461C.1.pep
MEFCINYKYCFLKKKKKKKKKKKKKKKKKKKKKKKKKKKKKKKKKNIKNVKPKTNWRERRLTTSSTG

SEQ ID NO: 310465 - protein, 81 aa, Zea mays
  unsure (1)..(81): unsure at all Xaa locations
  Clone ID: MRT4577_46200C.1.pep
TAVLEDLFVRLINFAGKLYKDTATPGGLLAVAIAHTLALVAAVAVASNASGGHVNPAVTFGXLVGRRISFGRAAVYWLAQM

SEQ ID NO: 310466 - protein, 264 aa, Zea mays
  Clone ID: MRT4577_46201C.1.pep
MLPGRHPARRADATGTGPLLPDATRAVVAEFVATAMFVFAAEGSVYGLWKLYKDTATPGGLLAVAIAHTLALVAAVAVASNASGGHVNPAVTFGLLVGRRISFGRAAVYWLAQMLGAVVASLLLTLVSGGTRPVGFGLVRGVHERHALLLEAVMTFGLMYAVYATAVDHRSRGGAVAIAPLAIGFVLGANILAGGPFDGAAMNPARAFGPALVGWSWRHHWVYWVGPLIGAGLAGGLYEFVMVEQEPEAPLAAVPRMPVASEDY

SEQ ID NO: 310467 - protein, 261 aa, Zea mays
  Clone ID: MRT4577_46202C.1.pep
DNQKMHILYEITKIPGQLIEVACNMHGTRVVQKVIESISTSDEVSMVVSALSHGAITLMMDSNGCHVAERCLLKLSPEGKAFLVNAATKYCVELAKDRQGCCIIQKCIAHASKEQRNRLLYSITTRALELAEDEYGNYVIQFVLGLGVAWATNEVLDKLEGSYGYLSTQKCSSNVVEKCLREAPERERARIILELIHDPRLLNVLVDKYGNYVIQTALRESEGTAVEAALVRAIKPHAGALRNNMYGKRVLSKACLKSRKP

SEQ ID NO: 310468 - protein, 184 aa, Zea mays
  Clone ID: MRT4577_46203C.1.pep
MGLWDSLLNWLRSLFFKQEMELSLVGLQNAGKTSLVNAVATGGYSEDMIPTVGFNMRKVTKGNVTIKLWDLGGQRRFRTMWERYCRGVSAILYVVDAADRDSVPIAKSELHDLLTKQSLAGIPLLVLGNKIDKSEALSKQALVDQLGLELIKDREVCCYMISCKDSVNIDVVIDWLIKHSRTAK

SEQ ID NO: 310469 - protein, 128 aa, Zea mays
  unsure (1)..(128): unsure at all Xaa locations
  Clone ID: MRT4577_46204C.1.pep
RDDRARPTXAPAKGGNEQGGXXRXXGPXRXXXXRDPAAXHTGRGARKDXQQTQEEXQKRXPREEPEEXERKHXXXKXKXXAEERDRRKSPSXPPXEGAKRETEXKKXPRENEAXDTEXEPKSXDESXE

SEQ ID NO: 310470 - protein, 53 aa, Zea mays
  Clone ID: MRT4577_46205C.1.pep
WGGPLLRTKKLPKLTCIGRMGGANKGNNGGANPQYKGGTDPYTASKATGNPDL

SEQ ID NO: 310471 - protein, 56 aa, Zea mays
  Clone ID: MRT4577_46206C.1.pep
HFQQLKDPITNSPLNQPFSPQKFSHNFKPKHLFTFSLTPFQTNSLFLFIKSHLNFP

SEQ ID NO: 310472 - protein, 140 aa, Zea mays
  unsure (1)..(140): unsure at all Xaa locations
  Clone ID: MRT4577_46207C.1.pep
AGTPAGTAAVNSGDRHHACSHHVITPVGRGLFTLQRSLVALNTHLALNTHVAEHAASVACIVMTCNLYHGMDRMSTMTFTADFPHVXRYLRTMVYQTNFKKVIVEVNHGDAAPYISKEAASSKEPKAKAVLNDASKEAPK

SEQ ID NO: 310473 - protein, 211 aa, Zea mays
  Clone ID: MRT4577_46208C.1.pep
RPGITSFPSLLIIRISSPPNMRLSYVPDPPNFTSEEDKAVEQRVRERRGEKGLIALDRTLLHSPPVADGWNSFLGSIRTKTSLPTAIRETAICRVAVLNRAWYEWESHSPILSSASDVTPQQVEAVLKSPPRSPLVDVLGTSLSTLLAYTDAMTLDVQVPDAIFAELKKSFSEREVVEITATISAYNCGSRFLVALDVGERNAHTGPKEGG

SEQ ID NO: 310474 - protein, 164 aa, Zea mays
  Clone ID: MRT4577_46209C.1.pep
ERRSRENLRLRCCITFKTRIGCNQSCHQMHDTTIQKKKKSKIRRYSLSLPSLFLILPILSSGGRCRPVVFNLCCTYVVHAQPAALRRGRLICAETHLNCLSNASCLTCHLAVYLKQLVLNLLRCCLKQLSAVLRLLEIVSSFCLAKKIAAESTTRTAGGRLASS

SEQ ID NO: 310475 - protein, 114 aa, Zea mays
  Clone ID: MRT4577_4620C.1.pep
EPHTVIRLWPVGTPCLLPTSHLSSKLWTNSAHAEAVPGSVPHSSTSLSTRSARRAVASQSAADYAVPPGARRRGFGGGIRHGGERPGPPPAVDAARRDSWTAREVTTTSSFIFI

SEQ ID NO: 310476 - protein, 48 aa, Zea mays
  Clone ID: MRT4577_46210C.1.pep
YRIVSGSQLLTRVRYNHDDAKLEDDALEAEVVRPEATVASHLLGRRVE

SEQ ID NO: 310477 - protein, 60 aa, Zea mays
  unsure (1)..(60): unsure at all Xaa locations
  Clone ID: MRT4577_46211C.1.pep
MNDTVTTGTRKFITNGLLQLKQXMVTDVLHPRKARVPXTEIWXTLAKMYKTTTEVILHLN

SEQ ID NO: 310478 - protein, 345 aa, Zea mays
  Clone ID: MRT4577_46212C.1.pep
MGRRGLLKAALLLCFLAACSGRELTIKQNPSTTIYNSTLAKILVEYASAIYTADLTQLFTWTCARCGDLIEGFEMIEIIVDVENCLQAYFGFASDINAVVVVFRGTQENSIQNWIEDLLWKQLDLDYPGMPEAMVHRGFYSAYHNTTLRDGVVSGIQRTRKAYGDIPIMITGHSMGGAMASFCALDLVVNYGLDGVNLMTFGQPRIGNAAFASYFKTYLPQAIRVTHAHDIVPHLPPYFSFFPQKTYHHFPREVWIHNIGLGTLVYPVEKICDDSGEDPTCCRSVSGSSVRDHIYYLGVSMHAEDWSSCRIVMDYSKLQYQMDLNGNLVLSKQPGLSNARGFSAQ

SEQ ID NO: 310479 - protein, 255 aa, Zea mays
  Clone ID: MRT4577_46213C.1.pep
MGRRGLLKAALLLCFLAACSGRELTIKQNPSTTIYNSTLAKILVEYASAIYTADLTQLFTWTCARCGDLIEGFEMIEIIVDVENCLQAYFGFASDINAVVVVFRGTQENSIQNWIEDLLWKQLDLDYPGMPEAMVHRGFYSAYHNTTLRDGVVSGIQRTRKAYGDIPIMITGHSMGGAMASFCALDLVVNYGLDGVNLMTFGQPRIGNAAFASYFKTYLPQAIRVTHAHDIVPHLPPYFSFFPQKTYHHFPREVW

SEQ ID NO: 310480 - protein, 95 aa, Zea mays
  Clone ID: MRT4577_46214C.1.pep
TKQTHETEKKPHPKQSKIPVGFDQALTTQKPGPCFSQKKTSPPPPHFSGPHWVKICQWKGKTNHPEILPGDDQSSAKKKKKKKKKKKKKKKQHTT

SEQ ID NO: 310481 - protein, 67 aa, Zea mays
  Clone ID: MRT4577_46215C.1.pep
TRWNNAHRQRTRAYLHISRTGGLHKYYGLALTTGGMGSYSCLPTWVLDGPKWDVHPRYVHDLWGLNL

SEQ ID NO: 310482 - protein, 82 aa, Zea mays
  Clone ID: MRT4577_46216C.1.pep
RSQPLFLYRQAWCSRSATIGISLVMSYENSNRSLREASQLQIVSMHDQRSSYGTFGTIIKSIWRVVNPVRQASMSIFQKEGN

SEQ ID NO: 310483 - protein, 786 aa, Zea mays
  Clone ID: MRT4577_46217C.1.pep
MRALSGRRAGTLPSPPRSGEDRITGRGGGIAQWVEEAEESRRGIAWWGRGRGIAQWGRLEEEERSGEEKSRSGGGRAVAVQWRSRALALAVEESRIRARSGGDPSVRPRSQEAEGSTAPQPNSNLNVDMVFGSSSKRKRADEKEDDDVQVVHEVPVDIQDGGADADSGDEDGAAATGTKHPLLDEINIIGVPSGKNVGGTKEWQCKHCKKSYKGSLTRVRVHLLGPLPGKKAQIARCMSLQNDPNKSKALREKVKEADSKGFHMRSTSGTTTPNPLTKSFGVAQRESVDMEITKFLCANGIPFNVLRSPQFSQMIMAIKNGPKDYKGPSSEKARTTLLDACKRSVETDLAPLKSTCRGSCFLYAEDFSGVEKTGEAIAQYLLKAIDEIGPGNVLQVVTDNAANCKAAGKEIEKVHKHIFWAPCVVHTLNLIFKDFAVKFPWMLDTYKTGKAIVKFFQNHCHCLAMFRTNSRLDLLKVKKTRFASHYILLQRLITCREALATTVVTRQWKDWVNTCTNDVKHQARVIVLTINDDSFWMEAENIIAITEPIYSVLRFSDGEGPKMGEIYERMDCMVGEIKDIMTKDDNPHKDDFVEVESIVMRRWEKMNLPLHCLAYALCPKFYHQQYLNTPAPGGTIRQAPNTDKEVMTNVLEAFSKIADSPREQQVLREQFNAFIMKKGMFALPPVQLDAFTMEPIEWWVSYGSETPDLAEVAKKVLSQPISSSSAERIWSTFSHIHNTKRNRMNTTTADKLVFIHSNLRLLSRSTDGYKHGAHAKWDIDPEDSSI

SEQ ID NO: 310484 - protein, 48 aa, Zea mays
  Clone ID: MRT4577_46218C.1.pep
PGSANGQFIGRIAQLIRSNRLDKLELQSLSPPEPPTMRITGTMGARLA

SEQ ID NO: 310485 - protein, 63 aa, Zea mays
  Clone ID: MRT4577_46219C.1.pep
RTRFIANMLSMDSTVAEIISAAGYTDLPKVDETLLYERCAKECGSYSAPAIITRHDPRSLYWN

SEQ ID NO: 310486 - protein, 120 aa, Zea mays
  unsure (1)..(120): unsure at all Xaa locations
  Clone ID: MRT4577_4621C.1.pep
ASATRLGINLSPCXLSSSAMGNQAILRGTAPVGMATAYDYGGPIPCLATLPLGGVDDVRCGRQPPGCRKYLRINTAHPEPDYSSGVDYLYKQAVGDVLEALTLVAHRTRSPLLLVRGPGL

SEQ ID NO: 310487 - protein, 145 aa, Zea mays
  unsure (1)..(145): unsure at all Xaa locations
  Clone ID: MRT4577_46220C.1.pep
YVQASQVYLPNYSQPQHCFPFTQLFTLNTAVHSRQQLLPFTQVATAYSKQQPLLPFNQLHPLNPGAPLQXQILLPFSQLAAAHRAYFLTQHQMAPFYQQFAANPASLLQLQQLMPFDQLALTDXPTNYYQQHIXVGGARLLDRLL

SEQ ID NO: 310488 - protein, 63 aa, Zea mays
  Clone ID: MRT4577_46221C.1.pep
MLSVRVAAAVVRALPRRAGLVSRNALGSSFIAARNFHASNTHLQKTGTAEMSSILEERILGAD

SEQ ID NO: 310489 - protein, 65 aa, Zea mays
  Clone ID: MRT4577_46222C.1.pep
KCASLVARVVYCLQYESLFMTTERAVVACCSIIKARLRARPGHHVVPQLVQHLSNSLSAIYLAKP

SEQ ID NO: 310490 - protein, 41 aa, Zea mays
  Clone ID: MRT4577_46223C.1.pep
EKLFLTLSLPPPKPPSKSHARTLSLEPEKTIFQIRLYYVNS

SEQ ID NO: 310491 - protein, 113 aa, Zea mays
  Clone ID: MRT4577_46224C.1.pep
RELIKPSRTPRITIPSILYPPSHCTTDLRSWIYNNLVTSWALCLLPKVASRPPYYTPRLDASALPLNTRDDCISHTSASMRPPLVRFLRHRRCLLGRCITLQSCDTETCSART

SEQ ID NO: 310492 - protein, 129 aa, Zea mays
  Clone ID: MRT4577_46225C.1.pep
PFSFRFAARIKVHELRGKSKADLQAQLKEFKSELSLLRVAKVTGGAPNKLSKIKVVRTSIARVLTVISQKQKSALREAYKKKKLLPLDLRPKKTRAIRRRLTKHQLSLKTEREKKREKYFPMRKYAIKA

SEQ ID NO: 310493 - protein, 69 aa, Zea mays
  unsure (1)..(69): unsure at all Xaa locations
  Clone ID: MRT4577_46226C.1.pep
LRFFIYTPYKTYYSPLLGLQKETSVFCTTSEEATSHICSXPSFPRQSTXPCVLLAXPRSPGGRAXRVDE

SEQ ID NO: 310494 - protein, 123 aa, Zea mays
  Clone ID: MRT4577_46227C.1.pep
MARIKVHELRGKSKADLQAQLKEFKSELSLLRVAKVTGGAPNKLSKIKVVRTSIARVLTVISQKQKSALREAYKKKKLLPLDLRPKKTRAIRRRLTKHQLSLKTEREKKREKYFPMRKYAIKA

SEQ ID NO: 310495 - protein, 71 aa, Zea mays
  Clone ID: MRT4577_46228C.1.pep
ISGQVTHVIKPHKTFASLFDKFDSYNRVLWARGKWATKFSRLPLGVHSNGNSQTQDWQGNPKLGDLDDKLG

SEQ ID NO: 310496 - protein, 65 aa, Zea mays
  Clone ID: MRT4577_46229C.1.pep
MVAVVSSYTLPSGFSSLQTEPVEEFYRARGKLLEFNLPGGIPESWPKLLQALNIEDPDNKRSAAA

SEQ ID NO: 310497 - protein, 100 aa, Zea mays
  Clone ID: MRT4577_4622C.1.pep
LRTNQGNQENKGGQSEPNYPKNPGIPTLREKKGLGAKKKPKRGTQGEEKLGKPLKTRQMVFNQKGKGKRATLRGPRAQNQNLPWGETSPRGPELGLKKPP

SEQ ID NO: 310498 - protein, 178 aa, Zea mays
  unsure (1)..(178): unsure at all Xaa locations
  Clone ID: MRT4577_46230C.1.pep
WGEDVAARALGRSCAIHYVXERSRRRERTRSFDLWAWCSDPCDIPKEACLTVTEPDRELPPPSAPLPLVGAQYDLPTDLKAGHVYTIRNHIEVVEDLSFVRGRDVRGSPTCRRPHREFVWSYGVPDSVGEKRERSEDRRGRDFSRRDWDHDDDEDFQQNRRHGTRRHRRLSGWARSSR

SEQ ID NO: 310499 - protein, 68 aa, Zea mays
  Clone ID: MRT4577_46231C.1.pep
IITWTAIDGESTLNAAAVHSTLHIAFEHNMYGQNLTVHNVFNASDYCCLRKQSSLINSSVSHALLICS

SEQ ID NO: 310500 - protein, 43 aa, Zea mays
  Clone ID: MRT4577_46232C.1.pep
NPGLLWSKVVSPLTQFNSFMFNLIFALKAWNPFIHPKIYNRVP

SEQ ID NO: 310501 - protein, 270 aa, Zea mays
  unsure (1)..(270): unsure at all Xaa locations
  Clone ID: MRT4577_46233C.1.pep
IQPFGWLWARGQKPKPKAKPHTLNHPNLSELDGYCSGNGQCLLPDXQQTTVLSWNNRVKIALGSARALESVRQTXCLFSLVVGVWGWQTISQEGXLDLVLLKHXMSRLPLHVDXQESDDSPGYRVPEVEMSGQYSQKSELLTGRKAFDRXKYSAATLDPATNKDDDCCSSQARSQLSLVQWASPQLHDIDQMTXRGCATRSPLRPGKLLTGLVAVPVSSHFVRCCRLVXPVAQPEPEFRPPMSEVVQSLVRLVQRASMGTTTALSGDHAP

SEQ ID NO: 310502 - protein, 145 aa, Zea mays
  Clone ID: MRT4577_46234C.1.pep
MRNFTALLEAAKTAGGGVASLPPDVARGVDDVARRVDAAVDATDVRAASNSRRIRTSLDAVRKVLIGVAAVMLALVLDGFPFSVTGKKSLVSTAEFLAWIIITATLILSGTFLLLHNVIGDTCVAMDEWLAQSEGQGQSHTGLDD

SEQ ID NO: 310503 - protein, 107 aa, Zea mays
  Clone ID: MRT4577_46235C.1.pep
TGNRAKAFIQSYLPLVFRLTPSQGGGTHRFGSFSLFISHFGPPFDSNERAGPKILSYSRKGERGRERERERERERGLYFKQLLWGVQNNFHGLFLRPLFFPGALPRP

SEQ ID NO: 310504 - protein, 85 aa, Zea mays
  Clone ID: MRT4577_46236C.1.pep
YKPGDGRVFYFRLYLALLLKEFLDFLGANLLFFFEERPCFHSLISFWNRSRISSCLFGAFSECCLSFFSFFPFLAPGARLLAAFK

SEQ ID NO: 310505 - protein, 494 aa, Zea mays
  unsure (1)..(494): unsure at all Xaa locations
  Clone ID: MRT4577_46238C.1.pep
MGSIVADADRRPHAVCVPFPAQGHVTPMLKLAKVLHSRGFHITFVNSEFNHRRLLRSRGASALDGLPDFRFAAIPEGLPPSDADATQDVPSLCRATMENCLPHFRSLLAELNSSPDVPPVTCVVGDDVMSFTLEAAREVGVPCALFWTASACGYLGYRYYRDLMEKGIFPLKDAEQLTNGFLDTPTDWALGMSKHTRLKDFPSFVRSTDPDEFMFHFALKVTEQIVGADAVILNTFDELEQEALDAMRAMIPSSASIHTIGPLAFLAEEIVPRGGPTDALGSNLWKEDVSCFEWLHGRAPRSVVYVNYNGSITVMTNEELVEFAWGLGNSGHDVVXIIRPNLVNVDSDMLPPEFLEAIRGRGHLASWCPQEVVLRHEAVGVFLTHCGWNSTMESLCGGVPMLCWPFFAEQQTNCRYTCVEWGVAMEIGQDVRREAVEEKIREAMGGEKGMEMQRRAGEWQQTGLRATRPGGRSYANLDKLVADVLLSGTSGKSS

SEQ ID NO: 310506 - protein, 54 aa, Zea mays
  unsure (1)..(54): unsure at all Xaa locations
  Clone ID: MRT4577_46239C.1.pep
MLGYQDLLSGDXLLKASFTYYELDIGVLREVDGKWVTHSPVRVDIGAPSYLEGR

SEQ ID NO: 310507 - protein, 279 aa, Zea mays
  unsure (1)..(279): unsure at all Xaa locations
  Clone ID: MRT4577_4623C.1.pep
KKKFSGPIPPXIGSCKSLPXLDLTNNYFTSELPREIGNLSKLVVFNISSNRLGGNIPLEIFNCTVLQRLDLSQNSFEGSLPNEVGRLPQLELLSFADNRLTGQIPPILGELSHLTALQIGGNQLSGEIPKELGLLSSLQIALNLSYNNLSGDIPSELGNLALLESLFLNNNKLMGEIPTTFANLSSLLELNVSYNYLSGALPPIPLFDNMSVTCFIGNKGLCGGQLGRCGFRPSSSSQSSNSVSPPLGKIIAIVAAVIGGISLILIAIMVHHIRKPMET

SEQ ID NO: 310508 - protein, 98 aa, Zea mays
  Clone ID: MRT4577_46240C.1.pep
PQQQPPTGSTGGQGGVPTETAQHVRRQPVEEKIREMMGGEKGMQMQRLAGEWQQTSLRTTRLGRRSYANLDKLVADVLLSGGGKSSQEGFTSHTDTIQ

SEQ ID NO: 310509 - protein, 64 aa, Zea mays
  Clone ID: MRT4577_46241C.1.pep
LFPFFFQLHTSTSTSPILLYLNISFFPSYYFNITFIAFRSFFSLLFLIFPSSSFIFISFFILSS

SEQ ID NO: 310510 - protein, 112 aa, Zea mays
  Clone ID: MRT4577_46242C.1.pep
ENLVSRYDELEEENGEPMNGEYDEQISGYPRDNSEFSPIQMMGDVSHDEDAERDEGEEDGEDYETDDPAGDEDDDVEMDWDDDIRDNDDGNGAANADEDECGTSSYSSQYRE

SEQ ID NO: 310511 - protein, 78 aa, Zea mays
  Clone ID: MRT4577_46243C.1.pep
YLLRNAKMMMRMILIIYMWPMVIISVCYGIGGFSTCVSVSLISFRPREKVRSIYMHPFRLLFCSRSVKRTIGSCPCSH

SEQ ID NO: 310512 - protein, 128 aa, Zea mays
  Clone ID: MRT4577_46244C.1.pep
DSPWNGVELDTSSGIQSTSVLPLPGSCSRRPGTNWEGRSLSADPISDPISPASVVRGCGGLYMDDRGLAKNAAELLGHGGEFSKLKGKCAGARASLRGSRRCSWEMASHNSSGNMASDGEVMPSTMEK

SEQ ID NO: 310513 - protein, 114 aa, Zea mays
  unsure (1)..(114): unsure at all Xaa locations
  Clone ID: MRT4577_46245C.1.pep
PPRMHLLRHIHNNYREAAETMTGTLGMCSEGYSELGAHVXRTMRVLGGPELALDESVFLVGMYKYTDKPFLTPLCPVLIATVTARLSSSAKWRREKQVITELRSDPHPSASGSS

SEQ ID NO: 310514 - protein, 92 aa, Zea mays
  unsure (1)..(92): unsure at all Xaa locations
  Clone ID: MRT4577_46246C.1.pep
MFYATMKRHPRLIVPQILXLQWLYYLTLSVAMALVLDTRDPRLTLLYLXYLSTLTPRTTTSXSAVASFLHHSVTGPEYMLYVIERARYRLNF

SEQ ID NO: 310515 - protein, 69 aa, Zea mays
  Clone ID: MRT4577_46247C.1.pep
KLQVPNASGYTVNEHKPNFDSVLATPLDKSLSDSIHSTPFEKTVYNSIPGTSVHISLSEYSVPSTPMHN

SEQ ID NO: 310516 - protein, 44 aa, Zea mays
  Clone ID: MRT4577_46248C.1.pep
HMAAPRYDMDRFGVVFRASTRQFDVMIVAGTLTNNMAPALRKVY

SEQ ID NO: 310517 - protein, 99 aa, Zea mays
  Clone ID: MRT4577_46249C.1.pep
FNSFIRSGGFFFGTRQPPLTRNRGATQLKSNFGGGSKKDLGNNCYPPTKVFDGAEELHYPNTTLTEGSTLNPVSFAEHSPKYTLSSETGGVPKKRRLPC

SEQ ID NO: 310518 - protein, 212 aa, Zea mays
  unsure (1)..(212): unsure at all Xaa locations
  Clone ID: MRT4577_4624C.1.pep
MASEAVRPSDAXLLQAQGDIWRLSLSYLTPLTLKCAVALGIPKAIYRHGGAASPAELITALSLPSAKLPFLRRLLRLLPASREFTGHRESTEEERYRIHPVSYLLVEGIPHEDHMNHTSFVLTCTSSRYIEPXIWLVDXLRKDTATSPCEELHGATLYHDSMSXLDTXFHDMSSDSLYTHYNFFFEMALRQINDLFEEIQLMTYCCLYFADD

SEQ ID NO: 310519 - protein, 70 aa, Zea mays
  unsure (1)..(70): unsure at all Xaa locations
  Clone ID: MRT4577_46250C.1.pep
HXXXREQGLTPNTHPTPPGAPFTSPGARTPEREAQRGSGHTRRPQSQCPSGRPTAPKTAAAWRHRGPCHH

SEQ ID NO: 310520 - protein, 631 aa, Zea mays
  Clone ID: MRT4577_46251C.1.pep
MRHGDPIGIGILRKLGHLLPGPYLQYIYIVEKIQIGRVPGREPAGHSWDRRGREDIRRSPHPSALPVSLSPLLLLSVMMSSTPLSQPATAGDDDDMESLPLAAASDYASVASTFDPLFSSTSATATATSPRSPPTRAAAFTLSPTFSSSFVDPPSYADATGAGAGAVSSSPCSASSPSSASPRSARVAASEYSFLAVSDPETEAEPAATSLVPGSAPTYVSYLVTSVRRGDPDQRRHSVRRRFRDFVTLADRLADAFRGHFVPPRPDKNTVESQVMQRDEFVAQRRAALERYLWRLAEHPAIGPSDELRVFLQAEGKMPLPGTTDMASRMLDGAARLPRQLIAGEDTVTAPQEVVQPAKGGRDLLRIFKELKQSVVTDWAGVKPPLVEEDREFLEKKEKLQEWEQQLTSASQQAEALVKAQQDMVETMGALGLAFVRLTKFETEEAMYDSQRMRAADSRRVATAAVKASRACRDLNAQTVKYLDTLHEHLSIMLSVRTAFSDRASALLTVQTLMSDLASLESRIEKLEAASLKIFGGDKARTRKVEELRETIRATEDAKFCALREYERIKENNRSELQRLDSERKEEFMRMLKGFVASQAAYADKIVDGWETVAEETSGYVGVRGSDSMTS

SEQ ID NO: 310521 - protein, 55 aa, Zea mays
  unsure (1)..(55): unsure at all Xaa locations
  Clone ID: MRT4577_46252C.1.pep
GLAPLINNLTVSYLRCAAPXAHGHDDEPPHWAPPAGRXHTGRAXXGXXXGGGGGG

SEQ ID NO: 310522 - protein, 89 aa, Zea mays
  Clone ID: MRT4577_46253C.1.pep
MEEIRSDDMEKQDEVMLPGFRFHPTDEELVRFYLKRKIQQKSLPIELIRQLDIYKFDPWDLPKLASTGEKEWYFYCPRDRKYRNSTRPN

SEQ ID NO: 310523 - protein, 46 aa, Zea mays
  Clone ID: MRT4577_46254C.1.pep
CICLLALLSITNILTNMSSLLTYWSSFNSHDQYFCRWLSASLAFFY

SEQ ID NO: 310524 - protein, 81 aa, Zea mays
  Clone ID: MRT4577_46255C.1.pep
GCMGCFFYGFGLYVTPCLVVPCLFSCVWWFPLLFLVFGGFVPLLHGFFYCLFVGLRTFACPFGPGLISCASVLKDDFSRPK

SEQ ID NO: 310525 - protein, 147 aa, Zea mays
  unsure (1)..(147): unsure at all Xaa locations
  Clone ID: MRT4577_46256C.1.pep
PPGLEQXFRRTKTGVGGTYTNAGRGLXKANGVLIELIRXPQMVRIKAFMLILMALRSMLMDMRMRIRVLGVRMTVQSYAMQQAVYKVLEAYYQELVDYVHKNEVKDILTEDDRILIGDDRTLFEPNKMRCQAARARVQRAYRRALRC

SEQ ID NO: 310526 - protein, 92 aa, Zea mays
  Clone ID: MRT4577_46257C.1.pep
HRRRTVMRHRCQASTHSHSRQLRFFTSDHDPTLTFGFCVTSKTIQTTGRGFASCHRCRATSPNVAASTLRCKPHLHSQSRCWDAKASTEGNA

SEQ ID NO: 310527 - protein, 104 aa, Zea mays
  Clone ID: MRT4577_46258C.1.pep
YMDGHVAACTWPNQGKARMQRAWAAHVGEVEGCWRGKPKTQTGWHRCVRPRAVQGGEVSTAPARLPDRDGAGAATRARGRGKHKSLGAEWSRRPRNQEMASPDG

SEQ ID NO: 310528 - protein, 249 aa, Zea mays
  Clone ID: MRT4577_46259C.1.pep
MAGLGKAMYAVGFWIRETGQALDRLGCRLQGKYFFHEQISRHRTIMNIFDKSLIGDVQVGQGASIWYGCVLRGDANNIQIGSGTNIQDNSLVHVAKSNLSGKVFPTIIGNNVTIGHSAVLQGCTVEDEAFVGMGATLLDGVVVEKHGMVAAGSLVRQNTRIPCGEVWGGNPAKFLRKLTDDEIAFITESASNYSNLSKVHAAENAKPLEKIEFEKVLRKKFAHQDEEYDSSIGITRGAPPELTSPNPAQ

SEQ ID NO: 310529 - protein, 129 aa, Zea mays
  unsure (1)..(129): unsure at all Xaa locations
  Clone ID: MRT4577_4625C.1.pep
MATGSAAGEESSAAARRLXRLSLHLLQPAPAPADRHQQPLALAACARRVEGGADVAAALAAYLHGRHRAVQMRLLDFFRARPDLQTPVELSTDVHRELCYRQLSALELEAGVRPLTLMATDPDEYLDVM

SEQ ID NO: 310530 - protein, 125 aa, Zea mays
  Clone ID: MRT4577_46260C.1.pep
MSDKLTDTEVGGEQTQYEGIHTYVEPHDKKYGQLSNSSEGTSVHAKTADPGAPNTHGITPADKIRYGQSIQEGGMGGKTTSSSGHAKADTGFGGTKALADDEGAAKQRREQGYGGSKDMDRTIGA

SEQ ID NO: 310531 - protein, 263 aa, Zea mays
  Clone ID: MRT4577_46261C.1.pep
MAGLGKAMYAVGFWIRETGQALDRLGCRLQGKYFFHEQISRHRTIMNIFDKSPHVHRDAFVAPSASLIGDVQVGQGASIWYGCVLRGDANNIQIGSGTNIQDNSLVHVAKSNLSGKVFPTIIGNNVTIGHSAVLQGCTVEDEAFVGMGATLLDGVVVEKHGMVAAGSLVRQNTRIPCGEVWGGNPAKFLRKLTDDEIAFITESASNYSNLSKVHAAENAKPLEKIEFEKVLRKKFAHQDEEYDSSIGITRGSPPELTSPNPAQ

SEQ ID NO: 310532 - protein, 83 aa, Zea mays
  unsure (1)..(83): unsure at all Xaa locations
  Clone ID: MRT4577_46262C.1.pep
DYFKRLFIFLKDKDGYWRGFAVNLASGGAAGAFSLLFVYYLYYARTWLSNDSXYAVKGGGETHYYVHGYLCLMTLKFYSIVGL

SEQ ID NO: 310533 - protein, 305 aa, Zea mays
  Clone ID: MRT4577_46263C.1.pep
MKNVAKCDTWCELQNPANHRVFERKLRPKPSGGGHVCLGVTHTRSSAQPPSLSFPYLASSPLLEISRVRAHSRFWPPPPPSGEMAGLGKAMYAVGFWIRETGQALDRLGCRLQGKYFFHEQISRHRTIMNIFDKTPHVHKDAFVAPSASLIGDVQVGSGASIWYGCVLRGDANIIQIGSGTNIQDNSLIHVAKSNLSGKVFPTTIGNNVTVGHSAVLQGCTVEDEAFVGIGATLLDGVVVEKHGMVAAGALVRQNTRIPCGEVEHTSSTVLCFGFLIKPSQAPLPFLFHRLVSPRQGFLVMMEPQ

SEQ ID NO: 310534 - protein, 59 aa, Zea mays
  Clone ID: MRT4577_46264C.1.pep
STQATRHLVARNIGSHHLQQLVLVGLAAYSQHLLQPYITTNCLHRTLQPILSFTYHLLS

SEQ ID NO: 310535 - protein, 100 aa, Zea mays
  Clone ID: MRT4577_46265C.1.pep
EKKAMSGKGPISQFILHHYRHFNAAALVDAAKGYEAHLAGGGKMLVALAGAMSTAELGISLAEMIRQDKVHLISCTGANLEEDVMNLVAHSHYKRVTNYR

SEQ ID NO: 310536 - protein, 325 aa, Zea mays
  Clone ID: MRT4577_46266C.1.pep
MGQKGNVPRAAREPATTERTPAHRSSAQPPSLSFPYLASSPLLEISRVRAHSRFWPPPPPSGEMAGLGKAMYAVGFWIRETGQALDRLGCRLQGKYFFHEQISRHRTIMNIFDKTPHVHKDAFVAPSASLIGDVQVGSGASIWYGCVLRGDANIIQIGSGTNIQDNSLIHVAKSNLSGKVFPTTIGNNVTVGHSAVLQGCTVEDEAFVGIGATLLDGVVVEKHGMVAAGALVRQNTRIPCGEVWGGNPAKFLRKLTDDEISFIAESAANYSNLSKVHAAENAKPLEKIEFEKVLGKKFAHQDEYDSSIGVTEGAPPELTSPNPAQ

SEQ ID NO: 310537 - protein, 71 aa, Zea mays
  Clone ID: MRT4577_46267C.1.pep
HEYLHTITTKKPNNAPNAKTNYDCTHTYIHDAATIITHAYISARSTLYTKSNTATLVHVYHHIAFYEPNKH

SEQ ID NO: 310538 - protein, 183 aa, Zea mays
  unsure (1)..(183): unsure at all Xaa locations
  Clone ID: MRT4577_46268C.1.pep
KAQSSTNNGATKATTTYALRTLLARCDCDHNATMLPRCYQAPIAXYLPQTVASMIAKTXKTHLLDPYRIHQANATCIIPVSPSMIKHMTSLSLGQSMVQTNKAQKTTKPWLTETNQLLLAKLAPYIQPHQCIAFNXLSTLTPATXLARSTXPFTQIATVYSHEQQRTFIEQIXAALNTTIYSD

SEQ ID NO: 310539 - protein, 61 aa, Zea mays
  Clone ID: MRT4577_46269C.1.pep
GAPPSLSMFIFALEVLSFLTVASGFVFIFCRTACASPPIGCALKPQQCIVNHRIRRNRKVC

SEQ ID NO: 310540 - protein, 184 aa, Zea mays
  Clone ID: MRT4577_4626C.1.pep
FFREMGVDKKTTGKILCRSPEIFASNVDNTLKKKIDFLTNFGVSKHHLPRIIRKYPELLLLDINCTLLPRMNYLLEMGLSKKDLCSMIFRFSPLLGYSIELVMKPKLEFLLRTMKKPLKAVVEYPRYFSYSLEGKIKPRFWVLQSRNIDCTLTEMLAKNDELFAEEYLGLGGLLEKPLQSSIGS

SEQ ID NO: 310541 - protein, 99 aa, Zea mays
  Clone ID: MRT4577_46270C.1.pep
RPLNILGGPVPRSGPFGGVPPGGPQGHPLQVQRPQQVLLPWASNKEFCCHIGRSMAHPPKCIMCVTQMWGKFSFSYGFAPPECVISVQINCMWLYVSQL

SEQ ID NO: 310542 - protein, 183 aa, Zea mays
  Clone ID: MRT4577_46271C.1.pep
LRKGQELKISCIAKKGIAKEHAKWMPTSAVGFEYDPHNKLHHIDWWFENDTDPAVEWPKSKYAEWEEPPQEGEPFDYDAVPNRFYFEVETSGSMEPDQIVQNGIRVLQQKIGGLLKGLDPRKYGGDEAEFDGPRSPDMNMDGGTTPWQDGGYTTPYGGGGGQTAYGGGMTAYGTTPYGGSSWQ

SEQ ID NO: 310543 - protein, 56 aa, Zea mays
  Clone ID: MRT4577_46272C.1.pep
IRPKFFPQVYSGAGQNRGSPSFGKDRLGSAPKKFWKHALVLEKRFPPLVKVAGTFF

SEQ ID NO: 310544 - protein, 97 aa, Zea mays
  Clone ID: MRT4577_46273C.1.pep
RHSPGVTRKCLGNLVFLLKTFGTWFDSRTSPTCLLFFWVASGHLPCPYDGHDCDSLFGQAGALDICLAGWGLPMWYGADRRNHFRPVCERKLQCHLH

SEQ ID NO: 310545 - protein, 88 aa, Zea mays
  unsure (1)..(88): unsure at all Xaa locations
  Clone ID: MRT4577_46274C.1.pep
MMRSYTHTMSSMAAMRSKAIRCDYKPAPKSAKAKIDQVHDHAGKGASAGLNDHPDRNLFCAMGTKGIATVPHAXFDTKSGDLGKYHYI

SEQ ID NO: 310546 - protein, 60 aa, Zea mays
  unsure (1)..(60): unsure at all Xaa locations
  Clone ID: MRT4577_46275C.1.pep
AKKKATRARISMMPIGTTGVPYRSPGEGTXHWLDIWNALYRERIIYIGDNLDAEFSHQVL

SEQ ID NO: 310547 - protein, 100 aa, Zea mays
  Clone ID: MRT4577_46276C.1.pep
VLLTDQFGTGSKPDLLHLITYVGNIFEVHIIDHGIHDFYFTLNEALTYNYTLHTIAALKYPLCIRFIATIHGYPLFDYNNFAYHKGGTTYNTSHGLLITI

SEQ ID NO: 310548 - protein, 79 aa, Zea mays
  Clone ID: MRT4577_46277C.1.pep
PLPACDITNASVLECLHKNMHQKIIVDLRLIAQPSYLLGAEVITKRAYDIAIAQHANKDLADALIDHSEWLHVMLLPRH

SEQ ID NO: 310549 - protein, 51 aa, Zea mays
  Clone ID: MRT4577_46278C.1.pep
CKKPVAFLSRQSSAFQNIATHSFQLSCYYQELTLAQLTVAGGGARLSTGIS

SEQ ID NO: 310550 - protein, 49 aa, Zea mays
  Clone ID: MRT4577_46279C.1.pep
KPLVSCPCCSWYLYEMGYQNEELCYEMHFVIKQWLHLHVIIPHPLSLLL

SEQ ID NO: 310551 - protein, 68 aa, Zea mays
  Clone ID: MRT4577_4627C.1.pep
RQKCIFHVRGGSSWVCKMGSPLVFQYRMYNLSDYCLDFWLQKLAFMSPFMFFHIVIIIRSLSIVLLCF

SEQ ID NO: 310552 - protein, 254 aa, Zea mays
  unsure (1)..(254): unsure at all Xaa locations
  Clone ID: MRT4577_46280C.1.pep
MDQLDEQSFLDELMSLRREEAPVPAPAPWQAYPGSGMMTTSDLLLYGGDGTTEASSGMDFAGPIQQPMAPPPGTSPHGPHEEFNFDCLSEVCNPYRSCVGVVPRHGVAHGAGQALSQFPLHDAMAEDGPSGGNLHRGGGSSSSPVPIVFGAGGAGESPXDDKGRPHRRPRXGKLNGGTTSKNLMAERRRRKRLNDRLSMLRSIMPKIXKMDRTXXILGDTIDYVNELTERIKPSEEEIGATPEELNLLDTRKNF

SEQ ID NO: 310553 - protein, 174 aa, Zea mays
  unsure (1)..(174): unsure at all Xaa locations
  Clone ID: MRT4577_46281C.1.pep
MSPPSVMGQFGDTTYTKVFVGGLAWETQKETMRKYFEQFGEILEAVVITDKNTGRSKGYGFXYSPYTPDYGYPTNFYNIYGGAQYPFYGGATAGMVTGTSPFYPYFQFGQSGNTTTNYTSGQGYNLQQYPQMFHFSTVSSTAAAVTGFAQQYGGPLSLAASPQAPAVCIPIKQA

SEQ ID NO: 310554 - protein, 186 aa, Zea mays
  unsure (1)..(186): unsure at all Xaa locations
  Clone ID: MRT4577_46282C.1.pep
MSPPSVMGQFGDTTYTKVFVGGLAWETQKETMRKYFEQFGEILEAVVITDKNTGRSKGYGFVTFRDSDAAMRACVDPAPVIDGRRANCNLASLGVQRSRPPTPQHXYSPYTLDYGYPTNFYNIYGGPQYPFYGGGAGMVTGTSPFYPYLQFGQSGNTTTNYTSGQGYXLQYPQMFHXFSTVSSTAA

SEQ ID NO: 310555 - protein, 233 aa, Zea mays
  Clone ID: MRT4577_46283C.1.pep
MSPPSVMGQFGDTTYTKVFVGGLAWETQKETMRKYFEQFGEILEAVVITDKNTGRSKGYGFVTFRDPDAAMRACVDPAPVIDGRRANCNLASLGVQRSRPPTPQHGGARNFRVMKSFSQQAGIQGGLGAAFPSHATFPHYAIPQGLPFHVYGYSPYTPDYGYPTNFYNIYGGAQYPFYGGATAGMVTGTSPFYPYFQFGQSGNTTTNYTSGQGYNLQQYPQMFHFSTVSSTAA

SEQ ID NO: 310556 - protein, 86 aa, Zea mays
  unsure (1)..(86): unsure at all Xaa locations
  Clone ID: MRT4577_46284C.1.pep
RRRRAARRGKRQKEGKGGEKNDXXQXHGGERHGHDGQDVVHHELVQRLQPPELHRGAHGHGLFWLVSGLGQGVVAASTGLSPGRLE

SEQ ID NO: 310557 - protein, 263 aa, Zea mays
  Clone ID: MRT4577_46285C.1.pep
MSPPSVMGQFGDTTYTKVFVGGLAWETQKETMRKYFEQFGEILEAVVITDKNTGRSKGYGFVTFRDSDAAMRACVDPAPVIDGRRANCNLASLGVQRSRPPTPQHGGARNFKVMKSFSQQAGIQGGLGAAFPSHATFPHYAIPQGLPYHIYGYSPYTLDYGYPTNFYNIYGGAQYPFYGGGAGMVTGTSPFYPYFQFGQSGNTTTNYTSGQGYNLQQYPQMFHFSTVSSTAAAVTGFAQQYGGPLSLAASPQAQAVCIPIKQA

SEQ ID NO: 310558 - protein, 50 aa, Zea mays
  Clone ID: MRT4577_46286C.1.pep
TRLQHPPLFFLVLPLFFFFPSLNRQNGTAPLVLAYAQHGETASPRFRLNP

SEQ ID NO: 310559 - protein, 118 aa, Zea mays
  unsure (1)..(118): unsure at all Xaa locations
  Clone ID: MRT4577_46287C.1.pep
TAATPTTPRGAANHNGQAGXQGGNAGREQXRXEQGRGGEXQKPXDKTXGGGEEXXNTXTRETGAGKHEPXAGRRDPEPXDKEEGRTDTEGQAKQPEQPTRGKEEAANNNARGHNTREK

SEQ ID NO: 310560 - protein, 111 aa, Zea mays
  Clone ID: MRT4577_46288C.1.pep
KKKKRRKSTSSISSHRGAQCTRAGCGASTSARWSSTHADATRTAYVKKSRCRFWLSGSWRLSSRVLAICSLSWSLMTVGRLSFPQPSQGCPAPSLRLLACLACGGSQLPLV

SEQ ID NO: 310561 - protein, 68 aa, Zea mays
  Clone ID: MRT4577_46289C.1.pep
ALFGPALRLSLIWTGLHAALLLKVFRSKSRDEILFRGEGCNTPGLYILLDNKYGFKHVISVDKPNAKF

SEQ ID NO: 310562 - protein, 817 aa, Zea mays
  Clone ID: MRT4577_4628C.1.pep
MPRPLAALLSTACILSFFIALFPRAASSRDILPLGSSLEVESYESSTLQSSDGTFSSGFYEVYTHAFTFSVWYSKTEAAAANNKTIVWSANPDRPVHARRSALTLQKDGNMVLTDYDGAAVWRADGNNFTGVQRARLLDTGNLVIEDSGGNTVWQSFDSPTDTFLPTQLITAATRLVPTTQSRSPGNYIFRFSDLSVLSLIYHVPQVSDIYWPDPDQNLYQDGRNQYNSTRLGMLTDSGVLASSDFADGQALVASDVGPGVKRRLTLDPDGNLRLYSMNDSDGSWSVSMVAMTQPCNIHGLCGPNGICHYSPTPTCSCPPGYATRNPGNWTEGCMAIVNTTCDRYDKRSMRFVRLPNTDFWGSDQQHLLSVSLRTCRDICISDCTCKGFQYQEGTGSCYPKAYLFSGRTYPTSDVRTIYLKLPTGVSVSNALIPRSDVFDSVPRRLDCDRMNKSIREPFPDVHKTGGGESKWFYFYGFIAAFFVVEVSFISFAWFFVLKRELRPSELWASEKGYKAMTSNFRRYSYRELVKATRKFKVELGRGESGTVYKGVLEDDRHVAVKKLENVRQGKEVFQAELSVIGRINHMNLVRIWGFCSEGSHRLLVSEYVENGSLANILFSEGGNILLDWEGRFNIALGVAKGLAYLHHECLEWVIHCDVKPENILLDQAFEPKITDFGLVKLLNRGGSTQNVSHVRGTLGYIAPEWVSSLPITAKVDVYSYGVVLLELLTGTRVSELVGGTDEVHSMLRKLVRMLSAKLEGEEQSWIDGYLDSKLNRPVNYVQARTLIKLAVSCLEEDRSKRPTMEHAVQTLLSADD

SEQ ID NO: 310563 - protein, 49 aa, Zea mays
  Clone ID: MRT4577_46290C.1.pep
TTPKIVIILHEEIFSTATTEFIRPTINDCFYISIVHERHPQVHLYDQCF

SEQ ID NO: 310564 - protein, 119 aa, Zea mays
  Clone ID: MRT4577_46291C.1.pep
KRDGGRRIVRAPRAAHHSRRLVLPPSIPAVCLALASAGSMTGHHSMHMEGRSCCRDECCYHSCQAPWCRRCEQEPPPMHRAPGEQAKCPGCVQKRLPARTKRRSVQWLLQLRGRWFSCP

SEQ ID NO: 310565 - protein, 215 aa, Zea mays
  Clone ID: MRT4577_46292C.1.pep
MASSASRFIKCVTVGDGAVGKTCMLICYTSNKFPTDYIPTVFDNFSANVVVDGTTVNLGLWDTAGQEDYNRLRPLSYRGADVFVLAFSLVSRASYENVMKKWLPELQHYAPGVPIVLAGTKLDLREDRHYLVDHPGAVPVTTAQGEELRKHIGATCYIECSSKTQQNVKAVFDAAIKVVIRPPTKQRERKKKKERRGCSIFCSRIMHARRLGCFK

SEQ ID NO: 310566 - protein, 78 aa, Zea mays
  unsure (1)..(78): unsure at all Xaa locations
  Clone ID: MRT4577_46293C.1.pep
PGGNAGGIKNSYNMGGGKPHNSLKQTHITRLQGQLTGNHGIGGGNWADAXSXGNFFXTWNPRGHPXPYRTKRRPPGPG

SEQ ID NO: 310567 - protein, 102 aa, Zea mays
  Clone ID: MRT4577_46294C.1.pep
ETWKEKGYFSNQKVGKKGCQWSSIDVSILSSITKPKIRQEVRQLTMPQAVSLSLLACELPPIYPFFRNLGSTHPYSSVPPLDPQSKVLSTQSPELMHPSTTY

SEQ ID NO: 310568 - protein, 119 aa, Zea mays
  unsure (1)..(119): unsure at all Xaa locations
  Clone ID: MRT4577_46295C.1.pep
QPAGHTHQMQALPRGSFPIYPRTASCSQPEPLPPLHSCLAACILRPSVQPPPRXNPAFHRATLPQQAQQALLALAPRPSLGLLATSFHASQLARVPAGRSLRASQPTSPQPHLPPPTLL

SEQ ID NO: 310569 - protein, 84 aa, Zea mays
  Clone ID: MRT4577_46296C.1.pep
TNSLYTLPSILKLSRIMRTVAVLALFAQLATCAIFNITGSCADSENGPVCVITKSVVNPATVCNGKAEAYAGDGNQWHDGLYWN

SEQ ID NO: 310570 - protein, 93 aa, Zea mays
  Clone ID: MRT4577_46297C.1.pep
QARAMATLAHTFLSTEHFYEAHSLAIPGPKDRRFAYPPLVFDLLPFGFLFLFLLDFVFSLQFSFVTITHIVFKIMHFLIWCHPEKRTQCLHTH

SEQ ID NO: 310571 - protein, 632 aa, Zea mays
  Clone ID: MRT4577_46298C.1.pep
MAAAGVSPAFLLRLLSRCSDLSGFCVGRLKFQPRCRVPRQGRSDRSHFALSLTDLIGKQRRSRCSDCCATHRGKTDNSRVQPRGQQEAAPRPTLGLGLGRRSPPRPTPGSSASPDLRPRPRKEVSASPDPKARTQLRPREESRPRPTPASASGEVSASPDLGLGPTAPQGIHHYPTLANSGYEGTRSASHLARPGVAAPARVLRCPVVRSHSTPAQLRAAPVLRHRQADKPSRQACRRLGEEESSAAALHARSPPLAGQIDRSPSGSRLRSLLYFRFARFPFQKEPIGLLLDRCARLDFFWEFNRRMGRDGGRVRMSRVLATGDERGMGEVAGVERAACKRPRGALDGGGSASAAAWPACRVARAAAGGKDRHSKVVTARGLRDRRVRLSVPTAIQFYDIQDRLGVDQPSKAIEWLIRAAAAAIDGLPSLDCSFVFPHAAASPPGGAADDAELSTSETSKSSVLSLANAPVDNTAATAAHSQQANHAYNNNAAAGGGAFAELILHCSANNSSKPMQQHPTLAYYATQPPNAHSASAMSFETMLPHFSFLQEQSHHAIAFDRGTLQSNAAVAAPLWPTSQHACLLQRFAASPADATGLPSFFLGSGAAGASPVVPANAEPRLQLWDFKQERKT

SEQ ID NO: 310572 - protein, 150 aa, Zea mays
  Clone ID: MRT4577_46299C.1.pep
HVNHGKFKAEPWTDGHATYYGGRDGLTDTTDGGSCGYKGELYTNGTGCGACYELKGPKGTVVVTATNEAPPPVSGQKGEHFDLTIPAFLKIAEEKAGIVPITYRKVACERKGGIRYTITVNQHYSEVKVTNVGCAGDVVALWVKGNKRVK

SEQ ID NO: 310573 - protein, 85 aa, Zea mays
  Clone ID: MRT4577_4629C.1.pep
MSLISGEDLQHILRLLNTNVDGKQKIMCAMTSIKGVGRRLSNIDCKRADIDMNMRAGQLTPDELERLMTDAVNLKQVKEPDWFLY

SEQ ID NO: 310574 - protein, 286 aa, Zea mays
  unsure (1)..(286): unsure at all Xaa locations
  Clone ID: MRT4577_46300C.1.pep
HSYGRLGTSRPAGIPRDKSNHSINHGLGSFRVDNNGASPGVDAARRARRGLRGGGGXGGGKKKPHVNHGKFKAEPWTDGHATYYGGRDGLTDTTDGGACGYKGELGKDYGTLTAAVGPSLYTNGTGCGACYELKGPKGTVVVTATNEAPPPVSGQKGEHFDLTIPAFLKIAEEKAGIVPITYRKVACERKGGIRYTITGNQHYSEVKVTNVGGAGDVVALWVKGNKRVKWTPMKRSWGQLWTTEVDLTGESLTFRVMTADHRKATSWHVTPRDWQFGKTYQATKNF

SEQ ID NO: 310575 - protein, 122 aa, Zea mays
  unsure (1)..(122): unsure at all Xaa locations
  Clone ID: MRT4577_46301C.1.pep
PANRTGGRRPDRSTQQPGADKGSGXAETATTTXPAKXAEPPAGGGAALFFFCDDXRHXRDKREGRHTXTRDADRRRRRRDDEDAADRGRQTRDGAREAEDPPDRHHHRAGRRKDAQGPPSAP

SEQ ID NO: 310576 - protein, 327 aa, Zea mays
  Clone ID: MRT4577_46302C.1.pep
MIGGLYHQLFRHHLNFGMKTLLSLVNGYVTSGLRGRSAIYRMSRSPYFKGQNYSSDLNTSSLSQRSQSLHVGGRQVLKRSGAELENELGSIGPIRRIRQKSNMMSSFRDSRANPKGNLLTSHISSTDFTEDGASIQSPSSKKLLVGSSQSLRPLESQKNEGDGKSSDSIPPIPAQSNKMAEKIFEQLNIIAPSPKQQQSVTLNASNSMSKKPVFQDAGSSSMYNQSSSLKFQDLDGANGPHDTNLNGSLLKKDKLNIIKDGSPKAAFSDRPALLGNSVSASKSWTPAFKMAVIEDLPELDDDLEVLIQSSKIEVETTEQKIDSNRKD

SEQ ID NO: 310577 - protein, 186 aa, Zea mays
  unsure (1)..(186): unsure at all Xaa locations
  Clone ID: MRT4577_46303C.1.pep
NELVVCLALSAXASASAMXMPCPCAELQGLXYGAGAGLTTMMGAGGLYPYAEYLQHTECSPLAAAPYYAGCGQTSAMYQPLRQQCWQQKTRMIGVQSVSQLMHMMIQLERAAAASRSLYKPAMMQQKEXLLIIQSLNPMAMMMAQNMPAMGGLYQYQYQLPSXPTNLWGVYAVIAGYYCIMTYEKS

SEQ ID NO: 310578 - protein, 145 aa, Zea mays
  unsure (1)..(145): unsure at all Xaa locations
  Clone ID: MRT4577_46304C.1.pep
MQMTRLEDLTPAPSMEHSSRPTLGFPLGTALLLLVIFALSGMFSCCYHWDKLRALLRSXIPTCSWRPRSIRPSPWRXSPPRKAVSGHKLERSGEERGVPVIIMPGDKVPKFLAMARPSPSRPRSSSREDHRMSGSSGTLRQYLYT

SEQ ID NO: 310579 - protein, 172 aa, Zea mays
  unsure (1)..(172): unsure at all Xaa locations
  Clone ID: MRT4577_46305C.1.pep
NLFSQRHIYLSLPSSLSPHLSPPFPRLAPLYPHRAAAPEKHAFIRSGDTSVRDAVVQEGAVXCLVWVLDPSSSSSSSKVXYVALRAIDVLRLSPPNSTGRLLAAWFLDRVLSLLRNGDNSLLRNCALKAAHLLCXVSEDVTKAMIDAEFMPELMRVLGAYIKSLEAREMQDD

SEQ ID NO: 310580 - protein, 88 aa, Zea mays
  unsure (1)..(88): unsure at all Xaa locations
  Clone ID: MRT4577_46306C.1.pep
GRRRAGLPLXXLXARRXAXXLVRALRLVRAXVAARXXRXGVGRGRGXRXXRXPPRLXXXACVXCALARAXSLRCGXRFXCGCVXCXXV

SEQ ID NO: 310581 - protein, 55 aa, Zea mays
  Clone ID: MRT4577_46307C.1.pep
FEKLAAKATKLARYNKKPTIPYGEIQTSVGLVLPGELVKHAVSEGAKAVPKFPSS

SEQ ID NO: 310582 - protein, 62 aa, Zea mays
  Clone ID: MRT4577_46308C.1.pep
NHLQTQLSRTFTSNLPFFQVTTLLYNPASILLHIIRNDTTFMSFTLLITTTLLHTRPDSYPK

SEQ ID NO: 310583 - protein, 101 aa, Zea mays
  Clone ID: MRT4577_46309C.1.pep
FLFFFYRNLCIFVCFIFLDAKNLDVRKIPPKWETAPPKKRPAGLYQQNRGAGQKLIRREQKGVGWPKPARTILNQEQNLFGPTWGFSRLNKKRVGFIELLN

SEQ ID NO: 310584 - protein, 49 aa, Zea mays
  Clone ID: MRT4577_4630C.1.pep
TYHASVPASNPRSDLVPIYQESRKQMIPNHINKTVTKYPSTERMVPKTV

SEQ ID NO: 310585 - protein, 101 aa, Zea mays
  unsure (1)..(101): unsure at all Xaa locations
  Clone ID: MRT4577_46310C.1.pep
IXLYXXXFLLXLLKQTFLQNLAPKXLXLFSLLNFFLYLSYIMSSSQISPSYHVFYLHCIFFNTFLTFNFPFNIILNIFTVSFLHFSYLLSLNLISLIHSLP

SEQ ID NO: 310586 - protein, 82 aa, Zea mays
  Clone ID: MRT4577_46311C.1.pep
QLSSFQDKSVIEKGNWAPLLMAPLFTTHNSRNPKLLSLSNPFCTTSSFSLPPFSQRRPYQSPFPTQPNPISKISLSFTLHLT

SEQ ID NO: 310587 - protein, 90 aa, Zea mays
  unsure (1)..(90): unsure at all Xaa locations
  Clone ID: MRT4577_46312C.1.pep
KRGRPFKKPHRGPLVGAPLXRCPKRRGXKPQVPDSAKKAALRKIKERLHKAGGXKKTKKAEVAQSQKAHLKGGVQKGSKGPKLGAPAGKR

SEQ ID NO: 310588 - protein, 59 aa, Zea mays
  Clone ID: MRT4577_46313C.1.pep
GSKAPAERTVGGPWKKSMSRCLKADLQFRVGRIWRYLKKGRYAQRVGTGALVYLDDVLE

SEQ ID NO: 310589 - protein, 56 aa, Zea mays
  Clone ID: MRT4577_46314C.1.pep
GPWNTMALKGKQQLGTSHCLKKHPQGGGGEHNLSVPKHSLRGEKKNSLRGHHQWQT

SEQ ID NO: 310590 - protein, 97 aa, Zea mays
  Clone ID: MRT4577_46315C.1.pep
ATIPADTLFTHRPDWPTTQVLATERTYVSNTDCTGKGLVSGTNTYMLLKRCNKTWIKVGLGKLESDRARWLSAYVGGDCLFSESACNHYLLIMPDRL

SEQ ID NO: 310591 - protein, 130 aa, Zea mays
  unsure (1)..(130): unsure at all Xaa locations
  Clone ID: MRT4577_46316C.1.pep
RPFPGXYGLFRFCVGDSGGGWGVGXPQXDFVGPCLSTVGRMHQPWLIFATRRVLGYSSSXWCAGDGSFEEPGGRENLQRLWQNVRVDIGFFGHVHNSERTCPLCQSLCVAGVMTLCSGAMNGTISLGAGG

SEQ ID NO: 310592 - protein, 95 aa, Zea mays
  Clone ID: MRT4577_46317C.1.pep
CNTGHTTANSYAKCGSAVAIVYAYITVAVTHEPVATDNKANSNKANTTYKLYLALSERLKVYRVTMPTNQFSIEDKKMYVEMQYREVKSETRKCM

SEQ ID NO: 310593 - protein, 50 aa, Zea mays
  Clone ID: MRT4577_46318C.1.pep
FFYNPIFRKLEIENVSLKITLLPNGALEQLQKDAKNFSSKSDCWGQTQTC

SEQ ID NO: 310594 - protein, 70 aa, Zea mays
  Clone ID: MRT4577_46319C.1.pep
HMYSMVGLSHSSPSDQVSSSYCSSPSAQMSSLCSPSVHCMILSRYSSQVLRLNLVFSIACVIREQISKCL

SEQ ID NO: 310595 - protein, 118 aa, Zea mays
  Clone ID: MRT4577_4631C.1.pep
VAVGARLAPERMVRRVFVFSDMEFAQATENPWETDYEAIVRKFTEAGYGAAVPEVVFWNLRDSKAMPVEAGQKGVALVSGFSKNLLKVFLDGGGIVAPRTVMEKAIAGPEYNKLTVID

SEQ ID NO: 310596 - protein, 123 aa, Zea mays
  Clone ID: MRT4577_46320C.1.pep
SLIYTIRWSPTGPGTNNPNQQLLLASASFDSTIKLWEVEQGCLLYSLSGHRQPVYSVAFSPDGEYLASGSLDQCLHIWSVKEGRILKTYRGTGGIFEVCWNKEGSKIAACFSNNTVCVMDFRM

SEQ ID NO: 310597 - protein, 78 aa, Zea mays
  Clone ID: MRT4577_46321C.1.pep
GHVRVVHQSHPPVGRPDIIGAPLRRDPEQFVERPRCRLSLTLLLLLRLRAHAATVLTPDAPRARAQAQAQRLRQWRAP

SEQ ID NO: 310598 - protein, 342 aa, Zea mays
  unsure (1)..(342): unsure at all Xaa locations
  Clone ID: MRT4577_46322C.1.pep
AWSPXSSLLASGSGDSTARIWTIPYGPCGSDMQPYSPGVHVLKHFKGRTXEKSKDVTTLDWNGEGTLLATGSYDGQARIWSRDGDLKQTLFKHKGPIFSLKWNKKGDFLLSGSVDKTAIVWDTKTWECKQQFEFHSAPTLDVDWRNNNSFATCSTDNMIYVCKIGEQRPVKAFSGHQSEVNAIKWDPTGSLLASCSDDWTAKIWSMKQDKCVFDFKEHTKEIYTIRWSPTGPGTNNPNQQLLLASASFDSTIKLWEVEQGCLLYSLSGHRQPVYSVAFSPDGEYLASGSLDQCLHIWSVKEGRVLKTYRGTGGIFEVCWNIEGTKIAACFSNNTVCVMDFRM

SEQ ID NO: 310599 - protein, 72 aa, Zea mays
  Clone ID: MRT4577_46323C.1.pep
NTNNGGACNKNHATNITVAPHQVQTVLPHINNIDLRLLKMGTGCKSQSDHFGRSSITSKLEHLTRSTQKEGS

SEQ ID NO: 310600 - protein, 273 aa, Zea mays
  Clone ID: MRT4577_46324C.1.pep
MTTNLVVERSEPGCGLPPALSFKDVHHPCFGGGRAELGSRLPHGLVACFFLQHSGRRAFTSLAEEVNFGYARPANCGCRRPPHAWFPGLAGPGAASGTASCRLVGAWLPVHRTGDGRAVCRSATSTASPAPAAAPGAVQDVVRRGGGVRVLGWSCPHSRSEDGSEDLFARTGAAAICRYSTGAQVAAVVDAEVVAAAGRRGRGPFRNGARAEVIAIAGESLVLRWPPPSVLRWSPPLASRSELAIPRPYWCGGLVGFSSGGQVARPDPLGSRL

SEQ ID NO: 310601 - protein, 76 aa, Zea mays
  Clone ID: MRT4577_46325C.1.pep
AQLGILHNAKILVGILPHNINLDLYLSWAGDLPLITAARGGSAISCLTFSKHFCSLSHHHLECCSFFTKVLSREKS

SEQ ID NO: 310602 - protein, 339 aa, Zea mays
  Clone ID: MRT4577_46326C.1.pep
MAPLVPMSQPWVEKYRPRQVKDVAHQEEVIRVLNNTLQTADLPHMLFYGPPGTGKTTTALAIAYQLYGPELYKSRVLELNASDDRGINVVRTKIKNFAAVAVGTARKAGYPCPPYKIIILDEADSMTEDAQNALRRTTETYSKVTRFFFICNYISRIIEPLASRCAKFRFKPLSEEVMSSRIMHICNEEGLNLNAQAMSTLSVISQGDLRRAITYLQSAARLFGSSISSSDLISVSGVIPEDVVKSLLAACRSGEFDVANKEVSSIIADGYPVSQLMAQFLDVIVSADDIPDDQKARICKKLGETDKCLVDGADEYLQLLDVASETIRALFNMPRTLVF

SEQ ID NO: 310603 - protein, 176 aa, Zea mays
  unsure (1)..(176): unsure at all Xaa locations
  Clone ID: MRT4577_46327C.1.pep
MGAATMGLTSRALVGKPATSTRDVFGEGGSTMRKSAGKRKPAGSGSAWGGADRVLYLGPLSGQPPSYLTGEVPGDYGWDTAGLCGDPETFAKNRERGGSHCRWAMRGALGCVFPELLARDGVKVGEARWFKARSQIFREGGLDYLGNPRLIHAXSILGIGACQGVLMGAGXGYRIG

SEQ ID NO: 310604 - protein, 85 aa, Zea mays
  Clone ID: MRT4577_46328C.1.pep
GCLCRHKYVWWLYVCEFKNSIWVCKYLYGFSLVAFSFGHLMKHLLVVSLSILLSYLGFVHACIHVMGHNITGFYFTVMLAGRLLP

SEQ ID NO: 310605 - protein, 164 aa, Zea mays
  Clone ID: MRT4577_46329C.1.pep
PSKIVWCEQRARVGPESGWLPEQPASGALEFLVIAELRPNLCSVMDYRPYVSIDGKTTPIVFALVSSACNTDFSWGFCASTGDGHPPAEHHRRSGSRRRSGGQRVEARLGPLDRASTINIRSVDTDSVGNRGIVVRCGRGSRIGVGRLGLKHIPPFSWDASSSS

SEQ ID NO: 310606 - protein, 98 aa, Zea mays
  Clone ID: MRT4577_4632C.1.pep
VEVSQAFNLLLGSYKKLETLPNNRNALLNMVTLAIYSTDFRVRKSFRNNLLANFYTPLAKTNFSLFGRETMNSVNQWINSKTHGRVKQLLASPLQPDT

SEQ ID NO: 310607 - protein, 86 aa, Zea mays
  Clone ID: MRT4577_46330C.1.pep
KQANIPTSPANPIPLNQGFLQTQRSSITGRQINHFPHLLLFEHRRGAILFPHIRDTWSGIFPHLYLTRVAIFGAALAFWGLHHFHW

SEQ ID NO: 310608 - protein, 165 aa, Zea mays
  Clone ID: MRT4577_46331C.1.pep
AAGSSSGKQFEFQEATVDAIHQGFRNGSLTSTALARFYLEQIARLNPQLRAVIEVNPDALAQAARADAERAASRGRCAVGLHGVPVLLKDNIDTRDRLNTTAGSLALLGSVVRRDAGVVARLRRAGAVILGKANPSEWSNFRPVASGWSARGGQTLNPYVLSVTP

SEQ ID NO: 310609 - protein, 138 aa, Zea mays
  unsure (1)..(138): unsure at all Xaa locations
  Clone ID: MRT4577_46332C.1.pep
LLCCASRIPETRWWKVGVNGFGRIGRLVTRAAFNSGKVDIVAINDPFIDLHYMVYMFQYDSTHGKFNGTVKAXNGKLVINGKAITIFQERDPANIKWGDAGAEYVVESTGGFTTMEKGWAHLKGGAKRVIISAPSADA

SEQ ID NO: 310610 - protein, 205 aa, Zea mays
  Clone ID: MRT4577_46333C.1.pep
GHQNFVTIDHNDVLKRRVHLQIDAASSRRRRHLRPQPLTHTAQNIPSGKGKQKQEEQNTYGVVASIQVFNPRVVWICLLLSLGRRTSARARARRLREKKAAGRRHASSAALWLAISVSPDQACWLRCAALLDACAALESGQEGGKRVMRASFSALVCFFFFFLHIYKYIIYRYILEILLEKTVGNDAQTSQNELSTPKDASLTAS

SEQ ID NO: 310611 - protein, 65 aa, Zea mays
  Clone ID: MRT4577_46334C.1.pep
LQEPGRNYIGGTTSFFVGGRPMLVMVLIKKTLYYDTYYDISYEQQHGLTILCETIEDDDMDNITA

SEQ ID NO: 310612 - protein, 106 aa, Zea mays
  unsure (1)..(106): unsure at all Xaa locations
  Clone ID: MRT4577_46335C.1.pep
PFLLCAXXFVCLSXLAXLLXXXXXVFCLXGLXXVLLXXCXLPXVXSXSGFPRXRXACGARRRXRXARXLWXXWGWGXXPGLXAPPALGXGXGGRXRVRXRVGXRVG

SEQ ID NO: 310613 - protein, 102 aa, Zea mays
  Clone ID: MRT4577_46336C.1.pep
LFFSGGALSLAKKPHFWGYSQRGHSKKWAPAKIVLLGRKASWFSKARGAKGPNWGPCKRGAGVAPNWWGNRSKWWWFKKERGVVGPCWPKGGGFAAGEKPRG

SEQ ID NO: 310614 - protein, 547 aa, Zea mays
  Clone ID: MRT4577_46337C.1.pep
MGLNPKQVKILNFLVIPNIKGQGSGQDTFEGATVLEARAGFYEKPIATLDFASLYPSIMMAYNLCYCTLVEYEEARKLNLPPEFVNKTPSGEIFVKPELQKGILPEILEELLAARKRAKADLKEAKDPLERAVLDGRQLALKISANSVYGFTGATVGQLPCLEISSSVTSYGRQMIEHTKKLVEDKFTTVGGYEHTAEVIYGDTDSVMVQFGVSTVEDAMKLGREAADYISGTFTKPIKLEFEKVYFPYLLISKKRYAGLYWTNPEKFDKMDAKGIETVRRDNCLLVKNLVTECLHKILVDRDVPGAVQYVKNTISDLLMNRVDLSLLVITKGLTKTGEDYAVKAAHVELAERMRKRDPATAPTVGDRVPYVIIKAAKGAKAYEKSEDPIYVLDNNIPIDPQYYLENQISKPLLRIFEPILKNASKELLHGSHTRSVSISTPSNSGIMKFAKKQLTCLGCKAVISGASQTLCSHCKGREAELYCKTVANVSDLEMLFGRLWTQCQECQGSLHQDVLCTSRDCPIFYRRRKAQKDMTEARLQLDRWDF

SEQ ID NO: 310615 - protein, 215 aa, Zea mays
  Clone ID: MRT4577_46338C.1.pep
MMVPKAPSREALALLKNTIRPAAAIRSQAQRCLLSSPSRPTTLSQSRAGHLHQGTRNAATFTHSHHAEAVSVIPTNVDTSNADFKENKRQMDEATEKLVNLHTKIAQGGPQKARDKHIQRGKMLVRDRISALIDPGTPFLELSQMAGYDMYGEDDVPAGGIVTGIGSVNGVQCMVVANDATVKGGTYYPITREKHLRAQTIAQENRLPCIYWVGS

SEQ ID NO: 310616 - protein, 68 aa, Zea mays
  Clone ID: MRT4577_46339C.1.pep
ETVLSFKRAGLTQTGLRSLMVDLGKYWSRCFNIFYGKESHRCNEMISLFFPPQVNEIKLPFFPIKKNK

SEQ ID NO: 310617 - protein, 53 aa, Zea mays
  Clone ID: MRT4577_4633C.1.pep
GNTQTVTNIELVNNYRHTNLEKGVVNLATTFFLPRDQKKEVTWCYTTTCLLVR

SEQ ID NO: 310618 - protein, 64 aa, Zea mays
  Clone ID: MRT4577_46340C.1.pep
KMVVWFPVVFPYVRFPLYYGNVLKGSSVLVPFFLVLLVLLDVRKGVIRKVLSPFKKSQDILWHK

SEQ ID NO: 310619 - protein, 82 aa, Zea mays
  Clone ID: MRT4577_46341C.1.pep
MQDAARQAFFSIDLKYYPHRSTDSAGGVIVSPVGEGNPRLNSMVNLAVVLNTKLDHTLDELGKMSENRRRGARRAQPEQQAP

SEQ ID NO: 310620 - protein, 97 aa, Zea mays
  Clone ID: MRT4577_46342C.1.pep
GLFSKRGFGNFNNQGVPLSTNQVIGEGLGKPTFICIGDFVPEIMTVGPPFKGANNFLWPFKLKAPLGGLKKKRTPFVGGGDPGTPENSPNGLLKRMN

SEQ ID NO: 310621 - protein, 121 aa, Zea mays
  Clone ID: MRT4577_46343C.1.pep
EAPVHDRGGTMVLVNAWLIHRDPRLWEAPEEFRPERFLDATATVAAPLLPFGLGRRRCPGEGMALRLLSLTLAALLQCFDWEVGGCVDMAEGVGLSMPMAKPLAAVCRPREFVQTVLSAST

SEQ ID NO: 310622 - protein, 115 aa, Zea mays
  unsure (1)..(115): unsure at all Xaa locations
  Clone ID: MRT4577_46344C.1.pep
MPCCRTASGIASRARTQPKGCTLSPSLGDGTDKTTRPYLPHKPKNIALHTDSDMPWLMMHNRTYCADIARYVSTMNLXEMLERADHLHLVATTKLATLRLPEDDKSAFLTDPRTG

SEQ ID NO: 310623 - protein, 64 aa, Zea mays
  Clone ID: MRT4577_46346C.1.pep
PFYPQVVGNINPFLQQQQLLPFYPQDVANNVPFLQQQQLLPFNHLALTNPPPLLHHPPIGGPIF

SEQ ID NO: 310624 - protein, 92 aa, Zea mays
  Clone ID: MRT4577_46347C.1.pep
GVSPITMGGSVSNDLNEPLKWKGIIYNGKKMILIPQATGNSYNPFSATAGRGVIPVLAFPSARSDPLPPLPRSCWLACSCCCCGRRLPVPAV

SEQ ID NO: 310625 - protein, 41 aa, Zea mays
  Clone ID: MRT4577_46348C.1.pep
ALQILTLIPFNQFRGLPTDEKTALGLPYMKMGRVQQLEQLT

SEQ ID NO: 310626 - protein, 98 aa, Zea mays
  Clone ID: MRT4577_46349C.1.pep
SFNVIVEPHVVRQERLHGSRGSVPPDRLDLGRSGGSVHRPASGCSKCLLASSAGRRHPLHRASGAACVHAFYGGQTCTVLNVCRGLLRSPSVQESAYP

SEQ ID NO: 310627 - protein, 67 aa, Zea mays
  Clone ID: MRT4577_4634C.1.pep
LHQLLSHTYTDPLMGTPTTLMQRPPNFALNITTNNRPYACNIFSKKNPTLLTIKPLDLARTWPFIQT

SEQ ID NO: 310628 - protein, 83 aa, Zea mays
  unsure (1)..(83): unsure at all Xaa locations
  Clone ID: MRT4577_46350C.1.pep
ALIHTSLDLXNXTNLHTKIKSWLAFAAHNAVEVHALANALAAQKDQAYFTPNASAHASSKSSPRVTNVKIHNATDPIKDLYHL

SEQ ID NO: 310629 - protein, 59 aa, Zea mays
  unsure (1)..(59): unsure at all Xaa locations
  Clone ID: MRT4577_46351C.1.pep
IDYVRTVTYPQLLHPEQLIRGMDDASNNFTRGHYTTGTDIDHLRLDQIXKLAYNCTDLD

SEQ ID NO: 310630 - protein, 75 aa, Zea mays
  Clone ID: MRT4577_46352C.1.pep
KKACFCFPLNRQKTFTLHIGRVPGLKNWNRAIGPCLVLSHRNGKGAIFGPHMLVDLSPYIFRGYLPGAGASAGAG

SEQ ID NO: 310631 - protein, 410 aa, Zea mays
  Clone ID: MRT4577_46353C.1.pep
LSYHKKLHGFIQSEYQRGVSAWNFDIEDLKAQASLIHDDEPPEIKEDEDIARNIEVEKDLSSRNHLGKSFANECNSRQRAFVTTLKSDGNSPTTNEAFDFDFDFSEAATTRRADGHERNIRENDSLPSTAKRDPESNHWTNDVGQRQLSSGGSNSSTAERGYGFERDAVVQTIPDKQRSEARKTASLSGPLSLPTRASANSLSAPIRSSGGFVDSSGDKSKRSVVEIKGRFSVTSENVDLAKVQEGPLSSLSRKSPEGSLLRKSASTGDCLINTKLMRNANQLKEFCNSSVSSSVLIPHLNNLVQQTMFQQDVIMNLLSNLQQDEKVDRTQPGISSQVRTMENGKVADTANSEKERSLLVKISELQSRMITLTDELIAAKTKHVQLQQELNALYYREEIEDVRDEDIEET

SEQ ID NO: 310632 - protein, 85 aa, Zea mays
  Clone ID: MRT4577_46354C.1.pep
CATSALCSPIGSSSKSDEYPFPLCSFLASPNTENRVIRRQCMYMCVPLCMISPFSCWWGQANCTPSDMCLISCLSCKVCLYVWIA

SEQ ID NO: 310633 - protein, 51 aa, Zea mays
  Clone ID: MRT4577_46355C.1.pep
CRPCVILCLSIPKDSLHQSDASCVLKIPQVMFLVWISQFVILLCLLLLLEH

SEQ ID NO: 310634 - protein, 134 aa, Zea mays
  Clone ID: MRT4577_46356C.1.pep
HSLDTEVNRYVSNVYLIRRNGSVAMFTRNFKYLDICIPRIHPIFRQWHPAASPSDPPLIFVTVVGEEGEHGAASTIPAPGFAQEEPLVGPGAGASSIEVPVGGGVVVENGAVVLLHLHRGLMWFTGARSERHRD

SEQ ID NO: 310635 - protein, 46 aa, Zea mays
  Clone ID: MRT4577_46357C.1.pep
VAPKLNCLREEMYILYNLGSEENVGAKVKSEAASSSYSILDQPALS

SEQ ID NO: 310636 - protein, 64 aa, Zea mays
  unsure (1)..(64): unsure at all Xaa locations
  Clone ID: MRT4577_46358C.1.pep
PQKLLFKGPHKKAVLSQGNRIVTLDREERKPXGAYFCAPRIFKKCVHVVISSLFTKPFVLVFFC

SEQ ID NO: 310637 - protein, 95 aa, Zea mays
  unsure (1)..(95): unsure at all Xaa locations
  Clone ID: MRT4577_46359C.1.pep
AFAAGWSWTVLGQSRQSDCQSHLHGLCCYFNPPQGLVEANMQQILSGDRLSSCPHQNMRSLQVSDPYPRVDRLHWKKDDITXGVCTWITSGLICH

SEQ ID NO: 310638 - protein, 54 aa, Zea mays
  Clone ID: MRT4577_4635C.1.pep
LKLNITVLVGVIEINLVTGGVRGRFFLIGGNKITVDLGGEGLFSGSYLKGAWYV

SEQ ID NO: 310639 - protein, 567 aa, Zea mays
  unsure (1)..(567): unsure at all Xaa locations
  Clone ID: MRT4577_46360C.1.pep
VVACQAFYHKRGTGSPNPLIRLPGLTPQMQQQLILQAQQXTSSPTTSDVVKSRPKLLLNGSAVLGRDGQTNSGSDIIPNIGSPCQGVEGLHMLIKXMIXAEQQQPLQEKRYSQQLPQQHQLQQPAVSSQQSQSSNQHLQQEKLGIGSMPVDGGIPNSFGGAEQTAKKRKKPGSSSGRANSSGTANTAGPSPSSAPSTPSTHTPGDAMSVPQLQQNGGSAKPMVMFGSDGTGSLTSPANPLDDVDRLLEDGSLDDNVESFLSQDDMDPRDNLGRCMDASKGFGFSEVAKARASAAKVVCCHFSADGKLLATGGHDKKVTLWCTDSLKPKSFLEEHSFLITDVRFSPSMSRLATSSFDKTVRVWDADNTDYSLRTFTGHSASVMSLDFHPNKEDMICSCDGDGEVRSWSINNGSCLTCVKVFKAGATQMRFQPRKGKYLAAASEKAIYILDGETQHACRSPLQGHNKNIQSLCWDSAGEYLASVSEDSVRIWSFSSGRDGEFVHELNRSGNXFHSCVFHPTYQXVSDWLLRVLELWXDIREKNTMTFKHAQTXLVAARAASXATRKVAS

SEQ ID NO: 310640 - protein, 76 aa, Zea mays
  Clone ID: MRT4577_46361C.1.pep
MTTKIQSAADTYCLRDSGLAKINTVNKHTRAQESAEDLSSTNTIKMSLTETLNQMAAKGTVIPKMAIDVLNQVNDN

SEQ ID NO: 310641 - protein, 83 aa, Zea mays
  unsure (1)..(83): unsure at all Xaa locations
  Clone ID: MRT4577_46362C.1.pep
MNGKTFCHQNVKQXKKKKKKKKKKKKKKKKKKKKKKKKKPKKKKKKKKSPSPARTLSPNKNFALNKVFQKVFRLKKYNKRIYG

SEQ ID NO: 310642 - protein, 46 aa, Zea mays
  Clone ID: MRT4577_46363C.1.pep
NNTLSHWMINYVVEWCRNPSIMIVSGSIPSSVTGIITAFGFRREIP

SEQ ID NO: 310643 - protein, 98 aa, Zea mays
  Clone ID: MRT4577_46364C.1.pep
YMDGPVSLDLVQRSAAPGSHTACIRSISFSPSIPMIHGISHSQMLQHIQHAHLLCTRRYISIPVAHRHETIPCLCTSRRTHTTVARFMCPVIIAPGSH

SEQ ID NO: 310644 - protein, 77 aa, Zea mays
  Clone ID: MRT4577_46365C.1.pep
FRSTARVRPLLSLPVRMLPPTPSTYCQCPPSMLFLLQILSPHCLWPDLSSPPHNYSLQLPPATMTQHLDYIPLLPPS

SEQ ID NO: 310645 - protein, 166 aa, Zea mays
  Clone ID: MRT4577_46366C.1.pep
SAPTRRRSPYTRPKPSGGAKASRPSPRLDPATTRPLEPSQKAVRSGLGRRAEPDVPDARAAESKPKLAHGDDRPPLEEKRRCSGEGGFVFLCALAGHTEAIGGISLPSGSNKLYSGSVDGSVRIWDCNSGKVAWFSASDDVSDYARVTNNISDMHGLPTISLTMDE

SEQ ID NO: 310646 - protein, 220 aa, Zea mays
  unsure (1)..(220): unsure at all Xaa locations
  Clone ID: MRT4577_46367C.1.pep
MPISSTLATRLRTGHSSAPKPARRSPYTRPKPSGGAKASRPSPRLDPATTRPLEPSQKAVRSGLGRRAEPDVPDARAAESKPKLAHGDDRPPLEEKRRCSGEGGFVFLCALAGHTEAIGGISLPSGSNKLYSGSVDGSVRIWDCNSGKCVDVIKMGGKVSCMITHGPWVLIGIPKFVEAWNTKTGMKXKISGPSSLCSMAITDEMLCRRSHHVLLTEILS

SEQ ID NO: 310647 - protein, 55 aa, Zea mays
  unsure (1)..(55): unsure at all Xaa locations
  Clone ID: MRT4577_46368C.1.pep
PGYGPTTCRVGLVRTTSCLPRHCXRPQSRATGWLFGSTLHSRLQVIKTCMHEGMC

SEQ ID NO: 310648 - protein, 289 aa, Zea mays
  Clone ID: MRT4577_46369C.1.pep
LGAKLHLGESLNISYLSPFLKALGSNYSNGANFAIAGAATQPRDVPFALHIQVQEFLYFRDRSLELIDQGLSGPIDAQGFQNALYMIDIGQNDVNALLSNLPYDQVIAKFPPILAEIKDAVQTLYSNGSRNFWIHGTGALGCLPQKLAIPRKNDSDLDQYGCLKTYNRAAVAFNAALGSLCDELSAQMKDATLVYTDLFPIKYGLVANHTKYGFDKPLMTCCGYGGPPYNYDFSKGCQSKDVAACDDGSKFVSWDGVHLTEAANAVVARAILSSQYSKPSLKFDQFCRA

SEQ ID NO: 310649 - protein, 82 aa, Zea mays
  unsure (1)..(82): unsure at all Xaa locations
  Clone ID: MRT4577_4636C.1.pep
PGVGPHALGSSFCLHTRXLFGXWLVSWLAGLVMFSSLLXRELRALEHPGDSLAPRSAGXMPDSSSCAPVEPLWSFFGLPCTL

SEQ ID NO: 310650 - protein, 41 aa, Zea mays
  Clone ID: MRT4577_46370C.1.pep
LYARRLYGYLQQETKSICMQCRSLLEANVELTTRASNNGQS

SEQ ID NO: 310651 - protein, 95 aa, Zea mays
  Clone ID: MRT4577_46371C.1.pep
HNHKHSTKATKVECHVHNIKHTRVTQTLNNHHPNHLNQHHPCLAHHHSHHCCLFLLHHPCQGRQTQNCHRLHSHHPHQHHLHHPQELALEYHELS

SEQ ID NO: 310652 - protein, 130 aa, Zea mays
  unsure (1)..(130): unsure at all Xaa locations
  Clone ID: MRT4577_46372C.1.pep
AWGPAPRNDRGREMLNLVAGXLESTPTISSGSRQPFVMETVKADDAAKLGTSPNPHLYGILVLSIGIELVVTMTIRLAYIHVNKQTNGSTGKGQSKPAPRFVGDILAFLLNLVSSWSSAEEGWHEICNVN

SEQ ID NO: 310653 - protein, 86 aa, Zea mays
  Clone ID: MRT4577_46373C.1.pep
LSGSLFSKCSSRRGDHRWSSSAAFHHVICNEAPERFIKYAVDRVMSSTRFWWSLLLITSIISSPAYPHELDHENVQHNKKYSAAVS

SEQ ID NO: 310654 - protein, 78 aa, Zea mays
  Clone ID: MRT4577_46374C.1.pep
KGSNQAISMKKKKKKKKKKQKKKNLPEKGPFGLFLVRLSKSFLLTSSPWSHITTMFIIPVPLFKSERSKREWPDGNRK

SEQ ID NO: 310655 - protein, 160 aa, Zea mays
  unsure (1)..(160): unsure at all Xaa locations
  Clone ID: MRT4577_46375C.1.pep
MTRGTPACKVTRRIMSYLLXIYASSSTSRXDCEIYYAXATFEDPLMSMSRHVXTIKSVIYIAAKVFGESXHLXYTVLDNXCPPGKTEVAIHNXYYYKELXLSLDLXALITVLLHDVNVVMHEDCXDXKPLQNTDTVGVPLLIRILEDSRGLDMLLTHILM

SEQ ID NO: 310656 - protein, 228 aa, Zea mays
  Clone ID: MRT4577_46376C.1.pep
MPLSPPPPSSSPRQAAIQELRRGTQLAELLRQQVELIPEPNRRHAAAVNVGEISMAMESSLSILQSQMEHPFSEPEVMAAALTAHSDGGTSGERNGGPVARTRKVRVRHRPGRGRPAAGDELPIKEILTEAPENDRFHWRKYGEKNILYSEYPRLYYKCGYSDDHKCPAKKYVQQQSNSYPPIFLVTLINEHTCDALFRDDEPIISSSSSGSSQVLDFTKASLSSPLH

SEQ ID NO: 310657 - protein, 261 aa, Zea mays
  unsure (1)..(261): unsure at all Xaa locations
  Clone ID: MRT4577_46377C.1.pep
NLLLLIVPILIAMAFLMLTERKILGYIQLRKGPNVVGPYGLLQPFADAIKLFTKEPLKPATSTITLYITAPTLALTIALLLXTPLPMPNPLVNLNLGLLFILATSSLAVYSILXQGXASNSNYALIGALRAVAQTISYEVTLAIILLSTLLISGSFNLSTLITTQEHLXLLLPSXPLAIIXFISTLAETNRTPFDLAEGESELVSGFNIEYAAGPFALFFIAEYTNIIIINTLTTTIFLGTTYDALSPELYTTYFVTKTLC

SEQ ID NO: 310658 - protein, 77 aa, Zea mays
  Clone ID: MRT4577_46378C.1.pep
EVKGALGRKVVVGNRPQAFGAKLEEGSGTGKAWASSGKLKKKLGREGVPTSEKEGRWYPGQGGQHRRPPPEPPTQSP

SEQ ID NO: 310659 - protein, 46 aa, Zea mays
  Clone ID: MRT4577_46379C.1.pep
RKNHRILKTLSQGKGRSLCAFLISPELTSQTKRVSEAQAVTACNTL

SEQ ID NO: 310660 - protein, 456 aa, Zea mays
  unsure (1)..(456): unsure at all Xaa locations
  Clone ID: MRT4577_4637C.1.pep
MAEDGXQGPAAAAAGGGXAAAASGGAGVEGRSRESVKLFVGQVPKQMSEAELVAMFRGVALVDEVTVIRDRATRVSRGCCFLICPSREEADKAVTAYHNKRTLPGASSPLQVKYADGELERLEHKLFVGMLPKNVTHAEMTDLFSKYGNIKDLQILRGSQQTSKAGCAFLKYETKEQAVAAIEALNGTHKIEGSSVPLVVKWADTEKERQARKAQKAQFQSSNMLNANAMQQNSVFGGLQMGYVPQYNGFGYQPQGTYGLMQYPPLSPVQNQAAFQNMVQPVNQGSSIHGANSEVSPNPVPRSFNSAQLGSPYSPLPGLQYPGVYPGGPINHRPFSSSHSSTKVQNSSANSPSSSPSSNPGPQIEGPPGANLFIYHIPQEFGDHDLASAFHSFGRVLSAKVFVDKATGVSKCFGFVSYDSPASAQAAISVMNGYQLGGKKLKVQLKRDNSKHSKPF

SEQ ID NO: 310661 - protein, 56 aa, Zea mays
  Clone ID: MRT4577_46380C.1.pep
KVNISDHFSCCHQLDSLHGNKKGKGPTHVKFSLAISNFKNDQEAGSKKLKEGALYD

SEQ ID NO: 310662 - protein, 96 aa, Zea mays
  Clone ID: MRT4577_46381C.1.pep
HRNHLVIERDHIRLTAHPPPLFLPLTPRVGMRAYTERGMQPTTEREGQETLQRIRKCSQGFEKMTDPRFFRFLGVVAGLIFSVHDLLRTNTLNGTR

SEQ ID NO: 310663 - protein, 50 aa, Zea mays
  Clone ID: MRT4577_46382C.1.pep
CVTAYCLFPATTFMALTVVCATRGLHEWALTQVLVIAVLCAEIDASCMSY

SEQ ID NO: 310664 - protein, 102 aa, Zea mays
  Clone ID: MRT4577_46383C.1.pep
RQMFQPGGGCPLRILRAARRVLKSDSTRARRTPERKLWRDRYCGIPRSTYWYRGRPPVVKETDECADAIRGSGLQVAGRRGQHNQYGVLGRRKSCRAAAEER

SEQ ID NO: 310665 - protein, 63 aa, Zea mays
  Clone ID: MRT4577_46384C.1.pep
IRIRLRTRALRSHRLAGSSFARLLACWLAVLRQTTTAWCSVCCLLACFGCLLGLAACKPVASC

SEQ ID NO: 310666 - protein, 64 aa, Zea mays
  Clone ID: MRT4577_46385C.1.pep
SMESWSSIMPAQNMPSICTVGPVDEFVYQHAFTLRQTSGRALPVRVDTHAFAAAAITLRDYLSQ

SEQ ID NO: 310667 - protein, 56 aa, Zea mays
  Clone ID: MRT4577_46386C.1.pep
NKVSCIACQAKPIPVITFPPLTHRLQNKDHYNILAVACTIFTTPRLGAHGPTPPIY

SEQ ID NO: 310668 - protein, 79 aa, Zea mays
  Clone ID: MRT4577_46387C.1.pep
RKVLCLGAWNNYYEGSGRMPPLCWRGGGSFFRPVIKKAFFHLGCWFYPGPPPRFIKVGSRAIKTGGVFFLGEKKKKPNP

SEQ ID NO: 310669 - protein, 187 aa, Zea mays
  unsure (1)..(187): unsure at all Xaa locations
  Clone ID: MRT4577_46388C.1.pep
SDPHTSPFSNLYPITTTYLFSPDNQRHQDDEYLTFHNYFHDGGRLLFHISLPTTTSPQAILHRLSTHPAYHVSHRTTHKNNLPHPPSIQSIKYSINSLHSAPNSNQNLPMNLSLLPSPSXPPSFSNSTLTSTTQSPNYFLSLSANSPNSPTYNIFTLEPYANEPQLTSPPVFSTYTTKPSTTPFTPP

SEQ ID NO: 310670 - protein, 39 aa, Zea mays
  Clone ID: MRT4577_46389C.1.pep
WRICVYNVDPLCPSYKDLALPTDFLTTTRLSGAHANHLG

SEQ ID NO: 310671 - protein, 46 aa, Zea mays
  Clone ID: MRT4577_4638C.1.pep
RRWIRSLQSPLLAGTMLRLILSSLCGSCKQRYYGVPLRAANSIAWY

SEQ ID NO: 310672 - protein, 73 aa, Zea mays
  Clone ID: MRT4577_46390C.1.pep
NRRLEESIQLVRRGDFTLRGYQGCRSRGAIPPLPCFEACAGALVRLLAVLHLQLIRYAHHVRSIRSGLDVIES

SEQ ID NO: 310673 - protein, 71 aa, Zea mays
  unsure (1)..(71): unsure at all Xaa locations
  Clone ID: MRT4577_46391C.1.pep
FLDQSAHXTIVASKTCSCXXXTPXXHLQSDPNAAPYSGSSNSLLLTDETQTLTYVLLQPQPNHLSPPPSYE

SEQ ID NO: 310674 - protein, 57 aa, Zea mays
  Clone ID: MRT4577_46392C.1.pep
SLPCPPQFIFNNPHQCCKILFEFRPPQIYLSWLNPQQLKFPPFFVSSNPRNSFFLLF

SEQ ID NO: 310675 - protein, 63 aa, Zea mays
  Clone ID: MRT4577_46393C.1.pep
VNNSLGFNFSCVFMGEGVKKGPLNLVVHGFMYCPPPFQKKKKKKKKKKKKKKKKKKKKNSRGG

SEQ ID NO: 310676 - protein, 68 aa, Zea mays
  Clone ID: MRT4577_46394C.1.pep
ARNSARGPARPGLLTVRAPPTGGGSSSTATGSLPYIYDGALSQRETDLRDWIRSGRCIPCVATYCIPR

SEQ ID NO: 310677 - protein, 90 aa, Zea mays
  Clone ID: MRT4577_46395C.1.pep
NPLQQTTPHKLYSYYNSYPTTIQHLPISPLTFLTQQQLSHSILTLLLTLSPYYIYINYFHTTNSLLQTKQLSTNNPSFFLPYFILLNIYT

SEQ ID NO: 310678 - protein, 97 aa, Zea mays
  Clone ID: MRT4577_46396C.1.pep
MAQQPPRAPSAAPQDHWPTAAGEDQGPAAARRGAHRRSASDPDATLEAEPIDDDGVTGGGGGGGDDNDRPDHDQLQAMSDDDDSPAHDTRPGSAGER

SEQ ID NO: 310679 - protein, 73 aa, Zea mays
  Clone ID: MRT4577_46397C.1.pep
WFKPEHWIIFLTINTSSNQDFSRMHAIRPFMQRETLTPFRGVLHTVAPAPSMHAQSPTHKQLARAIAGPETLR

SEQ ID NO: 310680 - protein, 91 aa, Zea mays
  Clone ID: MRT4577_46398C.1.pep
PGVTPQSTRGGVRVAPCPRFPLPCGLSRGGPPPGSPAAVRKNKKRWVCVEPIKRRGFKKKKKKKKKKKKKKKKEKKKKKKKKKVLCVVTTA

SEQ ID NO: 310681 - protein, 93 aa, Zea mays
  unsure (1)..(93): unsure at all Xaa locations
  Clone ID: MRT4577_46399C.1.pep
ARLSAAQRQTYTRQDXRLGQIKNWYFCRYSLKALSKCVLLAYRSYRYLPPAEFDSFKDMHXLYVGXIQLTEIPTLXDLREQVTVELVKDVLPI

SEQ ID NO: 310682 - protein, 117 aa, Zea mays
  Clone ID: MRT4577_4639C.1.pep
EIPQPHFTKHLVGCKKVPRSFNGGRKLPTGGKKTVLKKRDPPTPPPKIGPKLANKFFALTGGHRGGQIKPNIQGGNNIHKANHCFEGTILVWAKQPLETPALGWKPKIVCYGLKVRT

SEQ ID NO: 310683 - protein, 107 aa, Zea mays
  Clone ID: MRT4577_463C.1.pep
KNRPTIQNIGKKNFLGGPETTKAQKKTFRGGFIKQRGGDPGLKFWGPESLDRKNSWGAQRAGFFGPKRLRFGSQTKLFGFLGPPKKGGGGCNRGFCFFGARGQLFLP

SEQ ID NO: 310684 - protein, 62 aa, Zea mays
  unsure (1)..(62): unsure at all Xaa locations
  Clone ID: MRT4577_46400C.1.pep
MSSIQSEDTTLKGPNKVKKIFIXXLTLGMIAGSMLKMHHWNEQRKTRPFYDMLDDVKNRHVP

SEQ ID NO: 310685 - protein, 131 aa, Zea mays
  Clone ID: MRT4577_46401C.1.pep
RGLVSVGNSRCAKSASRHFDAWMTGHEIPHEMEEAALCAGMKKGNIAALSKIHKLYSTTRSPSQKKIILRALACTDNIQMLMSHLDLMRLDDVDHGSLQSFKTVCDNVVTTPVGVKALSRFLVQKLNAIQS

SEQ ID NO: 310686 - protein, 115 aa, Zea mays
  Clone ID: MRT4577_46402C.1.pep
EAKVPKKAKNPRGGCPGNPGKIGERGKTFKRGKFFPRKLGKKKKKKRLLFMSHKKQPVLGTREFFKNNPGFPPFFIFPQFFYVFHQKNGPQRKPQGFFFFFFFSNGGSRNFPGEP

SEQ ID NO: 310687 - protein, 195 aa, Zea mays
  Clone ID: MRT4577_46403C.1.pep
KNIVDPRDGPYGGRRSNAPRAARSPRPSIVCISPVSSMESKWLHAVAVLSDGKRLFLTTSGGSGSSVGLNSGLQRPTCLKIVATRPSPPLGVGGGLTFGAVSVAGRALPEDLALKVESAFYSAGALVMSDSSATAMSSLLAVQKDSAAQLSLPSTFGTASRTSRALRETVSALPVEGRMLCASDVLPLPDAAYMM

SEQ ID NO: 310688 - protein, 102 aa, Zea mays
  Clone ID: MRT4577_46404C.1.pep
VSACGRTPPYLGASARMSCSWPGSSLPPLTAAGCQAAMVLSSPGRRTRVALQVQESRTGASTGSRSGQYHSPAPRDGCFTHPLIGRVFPSCTRLSSHGPRPT

SEQ ID NO: 310689 - protein, 67 aa, Zea mays
  Clone ID: MRT4577_46405C.1.pep
QLKWAARSSGEQNNMEQNGGQEQIKTRYSYILSKLVIVRHSRKTLCPFHTLALRGLIEKEHKCFMEI

SEQ ID NO: 310690 - protein, 236 aa, Zea mays
  Clone ID: MRT4577_46406C.1.pep
MDAEAGEAGVQQPAGAASTSTAAVPFDRSSSRLGAPGAESFDGALRELKDLRSQLHEAADCCAKAFLSTDKKKMILEGTKGYICDAVVAVIDHLGTVSSKLEHKLQERTEVAQTERKINFLKQVIFGPELHSSLSLRFYQEISIDICMRQGENGPRLPQITGSTVSGATLTLKPYDVQPAIGKEHTVVSENVEDNPRTIRRSFSFRAEDVHVVLGDHKKKGNHGSNILSFLKKTRR

SEQ ID NO: 310691 - protein, 57 aa, Zea mays
  Clone ID: MRT4577_46407C.1.pep
YTVGSHEPCSDSDAQCAGISTSARAPKSWVAPSYQAREFNMIQSPPLFLLADPHKMV

SEQ ID NO: 310692 - protein, 109 aa, Zea mays
  Clone ID: MRT4577_46408C.1.pep
MAAAQSSTDSLAPNLRRRPRRLVFDRRYGWIFDEWTHPADQALSGGRGMFCALTMARSLVSAAACSINYAASSISRVLERPKILHKKQQAWFRELECSGVVADLKLIQT

SEQ ID NO: 310693 - protein, 216 aa, Zea mays
  unsure (1)..(216): unsure at all Xaa locations
  Clone ID: MRT4577_46409C.1.pep
DDEIESVAGGGEFAAKDYTDPPPVPLIDAAELGSWSLYRAEIAEFIATLLFLDITVATVIEYKHXTDAXSXSGADTACGVVAELGITWAFSDMIFVLIYLFVGISGGHMNPVVAFGLFLVRKDSLARALLYIVAHCLGAICGVGLVKAFQRAYFDRYGGGTYSLASGYSRGIGLGDEIIGTFVLVYNGFSDTDPXSNARYSHVPGLAHIPIGFRVC

SEQ ID NO: 310694 - protein, 74 aa, Zea mays
  Clone ID: MRT4577_4640C.1.pep
LHNSEGHVNTYMLSDLQQLCQQLFQSIPNLILNNKSKTKLTIHLYSIHINLPAILHDPYNLTSYIANRHTSTNI

SEQ ID NO: 310695 - protein, 52 aa, Zea mays
  Clone ID: MRT4577_46410C.1.pep
ERLLKLAADQHHYIHQLLDCQHKSYLTYIQDSHYRPFNHDSELQPVNTYENY

SEQ ID NO: 310696 - protein, 99 aa, Zea mays
  Clone ID: MRT4577_46411C.1.pep
YFLSSNTQVVWAPDQGCNIHYLTPQTTKLVLVVLAFIAITSRVSCTQTGRCSCRQQQTHEQQHHSQQHHAHHLQHLPPPQHLQQEPHHLQHVHMQPQKH

SEQ ID NO: 310697 - protein, 95 aa, Zea mays
  Clone ID: MRT4577_46412C.1.pep
DTQSTYNSAQLNRQKPVVGWICIQDRKNQAGDTRLSLFHPGPDLSFFFTRNPRSILILRSERIWSGVVDSFIAWGTFSTWNGDLINLNEHACELP

SEQ ID NO: 310698 - protein, 70 aa, Zea mays
  Clone ID: MRT4577_46413C.1.pep
KKNRGGFESNQKTYFGLSMDKRSSYVKKKSLLYVLFFLSFMPEELFSPFLLEVGAGKATLSICHKHYLFL

SEQ ID NO: 310699 - protein, 51 aa, Zea mays
  Clone ID: MRT4577_46414C.1.pep
VYEALMEITSPRAYLIHCLPAERGLEVTDGAIEAPKSIVFPQAENRMHAQK

SEQ ID NO: 310700 - protein, 41 aa, Zea mays
  Clone ID: MRT4577_46415C.1.pep
SSGSSFGALPQYWRMWNMVIFLLLLYSDSIPFYLVETLLLN

SEQ ID NO: 310701 - protein, 76 aa, Zea mays
  Clone ID: MRT4577_46416C.1.pep
TPTDMPNKSSRTKPEAIKGGPHTERGTATPTKRPKTPKGAKKLTNPLNHNKKNPVNGKFSKPGKTTQKKPPQDNAP

SEQ ID NO: 310702 - protein, 142 aa, Zea mays
  Clone ID: MRT4577_46417C.1.pep
MAAAAAMTAAGCGGAGAARALSRFRGCLAGALLGDCVGAVYEARDTVDLTSVLRQVQDLEPDPGSPGSARTEALCYTDDTAMARALVQSLLAKEAFDEVDMAHRFAQEYKKDPDRGYGAGVITVFRKLLSPRCRDVFEPARA

SEQ ID NO: 310703 - protein, 122 aa, Zea mays
  unsure (1)..(122): unsure at all Xaa locations
  Clone ID: MRT4577_46418C.1.pep
AVGSGXAWGCGLCXVRXLLXGXXLLXGLAXRXGCPCWVCVSXVXRPXVXGRVVVLCGPVSGLXXLVGPPRVGLPXXVPAVGGFXAPRCLCFFPPLSLGPACPCCWPXFWXSFXSLPXSPRWP

SEQ ID NO: 310704 - protein, 94 aa, Zea mays
  Clone ID: MRT4577_46419C.1.pep
KKKIGLVYVLYGPHGTGKTSCARVFAKALNCHSPEHPRPCDSCASCIAHNLGKSRSLLEIGPVGNIDLDGIVDILDNVMLSPVTSQHRVVIIDD

SEQ ID NO: 310705 - protein, 78 aa, Zea mays
  unsure (1)..(78): unsure at all Xaa locations
  Clone ID: MRT4577_4641C.1.pep
PHALIVRRYLSLLDTAVELELPGYRGPRLPRRQQVPIFPQPLITDRARCKYSHKDIVAEGLRQLLGEEKYRXDLTVPP

SEQ ID NO: 310706 - protein, 182 aa, Zea mays
  unsure (1)..(182): unsure at all Xaa locations
  Clone ID: MRT4577_46420C.1.pep
VAPLLSAAMDHAASHXPGLNGHLXGPSNSXCSGEQLSHFSPQRTWXRRYLILTTRSDGVXQTNRTXMLIPSQNPXRDXLPSDFTFGGVTSEYLPAGDXNEDENVERYCDRFCHTCPDRILGAPHSXIASDSHHMCKTDVTXLLRSMCTEXYRFSISXCIILAIGTMEXGVNPXGISYYRNLI

SEQ ID NO: 310707 - protein, 109 aa, Zea mays
  Clone ID: MRT4577_46421C.1.pep
KHDPQAAAPHFNTNRQNGAGMQEERRHTTEHRRTRTPRTPQETTTNGAREAGTRPHKRKNNDHTRKTRGGQQDPTPTDTSGQAHAQRTRTQERENQPEKNKRRQKRPTP

SEQ ID NO: 310708 - protein, 45 aa, Zea mays
  Clone ID: MRT4577_46422C.1.pep
AKIQARRHAFLPLPQIRKLRVWPALKAFFVDARGLLCVRAAGNFS

SEQ ID NO: 310709 - protein, 54 aa, Zea mays
  Clone ID: MRT4577_46423C.1.pep
GKAKLVCLTNTGLLALPNFIKIKWNQLKRGNKRVWTWYQFLPLVLCWDIQHQFY

SEQ ID NO: 310710 - protein, 100 aa, Zea mays
  Clone ID: MRT4577_46424C.1.pep
VVDEDPSAVRPIIPGHHGADVQHHDSGVPQTFRIAFLPSRGVTRWRLRPPCVCHRARRSAIRGAHGVGDGRELRLSDIDRLPWVPPVHFVGCGLDEYSRP

SEQ ID NO: 310711 - protein, 53 aa, Zea mays
  Clone ID: MRT4577_46425C.1.pep
MILRLQFLVCKSNNAICIIRSTTDDDVELTCLWIFCMSHSAVLLITPTLQLQL

SEQ ID NO: 310712 - protein, 64 aa, Zea mays
  Clone ID: MRT4577_46426C.1.pep
VLISSGGSNNSESRIVSLCIYIRFDRFPLPRVQKKKKKKRAARLEVYEDTSARTRAYSVIAVPQ

SEQ ID NO: 310713 - protein, 50 aa, Zea mays
  Clone ID: MRT4577_46427C.1.pep
GQCQKMCFKRGLTKKKKMFLLKIKLGTGGLKCFLSPKKKKPGETCYWDWL

SEQ ID NO: 310714 - protein, 267 aa, Zea mays
  unsure (1)..(267): unsure at all Xaa locations
  Clone ID: MRT4577_46428C.1.pep
MSIRTVELKPFQDQKPGTSGLRKKVKVFQQEHYSEAFVTSILLSIPEGVEGSFLVVGGDGRYWNPEVTQAIAKIGAAYGVKKLLIGHNGIMSTPAASHLIRIRKATGGILLTASHNPGGPEEDFGIKYNLANGAPAPESVTNKIYETSRTLTSYKIADIPDIDLSTIGTQKYGELEVEIVHSTEDYLKMLKDIXFDFDLIKSFLKQHPDFKVLFDGLSGVTGSYGVDIFEKELGIPNSTQNCVPXPDFGGHHPRSNXVYXXSLVDAV

SEQ ID NO: 310715 - protein, 165 aa, Zea mays
  Clone ID: MRT4577_46429C.1.pep
VRQPPSRPELLPWLSSPPSLGYCRARPALPHHTPAVLHSQPRRSLLTGARPCPLSSALPAPPLPMAACSSRPPSSPSRAFLWRPGCQPLYSMPLLGSWHVRRAIAQAQLIHGAGNNNPFLLMACCSPLHHAISCSPFLLQQVDAPSPPLFAHLPHGASSMPTVQR

SEQ ID NO: 310716 - protein, 66 aa, Zea mays
  Clone ID: MRT4577_4642C.1.pep
CALNPENVETEFYEQFWVSSQAAELFSLPYFNSFPLTQLSATRFKLKQLLDVENLSLPLFLSSQIS

SEQ ID NO: 310717 - protein, 73 aa, Zea mays
  Clone ID: MRT4577_46430C.1.pep
MAANILGLLGLLDLSPSAATSTLLPHCSQTPIPFLVTLYLSPTESSVLYNPILEPFMIQHVIPSGLLPLSPLF

SEQ ID NO: 310718 - protein, 103 aa, Zea mays
  unsure (1)..(103): unsure at all Xaa locations
  Clone ID: MRT4577_46431C.1.pep
FLGPWFRAPLLFGGLLVRXSPXPWWPLGACSLVPSALFGCSFLPWVAFGAASPFPGVAAFGPCPVFSFALGGAWXLFXCVCLAFGDPLXPLLGPLGGVFSGGR

SEQ ID NO: 310719 - protein, 137 aa, Zea mays
  unsure (1)..(137): unsure at all Xaa locations
  Clone ID: MRT4577_46432C.1.pep
GLPGVLEAYRHDYEEGMHACLHAXNXWMVIAAXKRGDIRRQTADALRATSXHLGXCVXLEMGKILPEGIGEGHEQIDLCDYAGHKAQLXGTVIPLNXPVMMARRNPLXIARCLTAFNFLCAVLVWTAWIALPCETLS

SEQ ID NO: 310720 - protein, 87 aa, Zea mays
  Clone ID: MRT4577_46433C.1.pep
RGKGGKLLWNQQKAYDAFASKTLLVNSQCYWGRHTPPRLEYSLIFRSSPDLDSICRLDLVVFGLTQKPLFRPIALGNKNTGGYSRGE

SEQ ID NO: 310721 - protein, 79 aa, Zea mays
  Clone ID: MRT4577_46434C.1.pep
LLGPWYPGWSHQQRPPVRWPSPLSSGNNAENFKIFFFFFFWLESTVVVSRTKEPSLSPSIHSSLNHHDRTRVLCVVTPA

SEQ ID NO: 310722 - protein, 74 aa, Zea mays
  Clone ID: MRT4577_46435C.1.pep
TRAASTVVWHDERTEEDQRLTHGFTQHCGHGLHRQSLGLRAVHRLAHIGTNTPHRARLRQMRLRSLGLLPDRDA

SEQ ID NO: 310723 - protein, 62 aa, Zea mays
  Clone ID: MRT4577_46436C.1.pep
SLLPSCYSTSIGLFGLSSPRKQVSPRPSFCLRLMPLENHAWTYLSRANTASNFVSKAMSLNP

SEQ ID NO: 310724 - protein, 38 aa, Zea mays
  unsure (1)..(38): unsure at all Xaa locations
  Clone ID: MRT4577_46437C.1.pep
EXTPFLLPGWFINVKGKTFHMLSSWEKQLRSEGQKDKP

SEQ ID NO: 310725 - protein, 135 aa, Zea mays
  Clone ID: MRT4577_46438C.1.pep
ARQTFRPEFLNRIDEYIVFQPLDTTEINHIVEIQLNRVKNRLRQQKIHLQYTAEAVELLGSLGFDPNYGARPVKRVIQQMVENEIALGVLKGDFKEDDTVLVDVSSAAIAKGLAPQKKLVLQRVENGNDELVAND

SEQ ID NO: 310726 - protein, 142 aa, Zea mays
  unsure (1)..(142): unsure at all Xaa locations
  Clone ID: MRT4577_46439C.1.pep
VDKVSSAHVYLRLKKGETIHTISEALLEDCAQLVKAHSIQGXHVLIVEKRVNEIINRLNKTRVERRAPDLKAEKEASNAAEKAERKMQLKEKKRKEEMERLEKEKWAEIRSYKGLMVAEKMTSNRQIASAGKSMQEMEDEFV

SEQ ID NO: 310727 - protein, 156 aa, Zea mays
  unsure (1)..(156): unsure at all Xaa locations
  Clone ID: MRT4577_4643C.1.pep
KKSGGGGGPPRRGGEAARXGRPPXRRXPEAGRQQRRRAGPRAETDTPAPTXTRRGGGTSFFFSAXARXKERGGAAAPAPHXRXXQQXRSQTERAQATQGTRXAKEARAARAGXRTQPPRAARTRRGGARRAATERTGNDRRNRQTTTPRRARRRAG

SEQ ID NO: 310728 - protein, 128 aa, Zea mays
  Clone ID: MRT4577_46440C.1.pep
MNTMFSSITRLARPVLAKSLAQSPRTFTTLVPLRPSLTPMNGAIRRSVLPSSFTPSVAASADIVPSSAITEHPALGGMQIRCGPRNAMNGHTRLVQKRRHGFLVRKRSKTGRRILLRRKIKGRRNIAQ

SEQ ID NO: 310729 - protein, 208 aa, Zea mays
  Clone ID: MRT4577_46441C.1.pep
MVLYFKARPDAGDYTIYMGAAKNENEELIKYGLPEDVWFHVDKVSSAHVYLRLKKGETIHTISEALLEDCAQLVKAHSIQGNKMNNVEVIYTPWANLKKSPSMDVGQVHVLIVEKRVNEIINRLNKTRVERRAPDLKAEKEASNAAEKAERKMQLKEKKRKEEMERLEKEKWAEIRSYKGLMVAEKMTSNRQIASAGKSMQEMEDEFV

SEQ ID NO: 310730 - protein, 216 aa, Zea mays
  Clone ID: MRT4577_46442C.1.pep
MVLYFKARPDAGDYTIYMGADKNENEELIKYGLPEDVWFHVDKVSSAHVYLRLKKGETIHTISEALLEDCAQLVKAHSIQGNKMNNVEVIYTPWANLKKSPSMDVGQVGFHNPRMVHVLIVEKRVNEIINRLNKTRVERRAPDLKAEKEASNAAEKAERKMQLKEKKRKEEMERLEKEKWAEIRSYKGLMVAEKMTSNRQIASAGKSMQEMEDEFV

SEQ ID NO: 310731 - protein, 95 aa, Zea mays
  Clone ID: MRT4577_46443C.1.pep
YEIVTDKPVTQKISERSTPYHPMIKDDGSLISDPCYSTNALMKLTSMNVSEQPYMVWILLALTFQSMMGCPSPYDDTYGIYRYADPECDTTRMML

SEQ ID NO: 310732 - protein, 241 aa, Zea mays
  Clone ID: MRT4577_46444C.1.pep
APPAEAAAGSGPAGGEGRKGKAPKGGPENGKFRYRGVRQRSWGKWVAEIREPRKRSRKWLGTFATAEDAARAYDRAALLLYGPRAHLNLTSPPPPTLAAPRSHPHSSSATSSAPPALRPLLPRPPLHQLSSDGAPAPDFHYHNQFQRRLLPQPTPTLYYANTATASTVTTSVPTRVAVPQEPAIAPAVGSLTSPGEPQVGRKEEARGEAGWDYNGGEEEDYAAALLWDEPEPFFWFDVFLK

SEQ ID NO: 310733 - protein, 105 aa, Zea mays
  Clone ID: MRT4577_46445C.1.pep
RSVCVQFYFWVLCHLYNKKNEWERMRLGKGAAFRTIKEEEAIDMSTYHSQITHSWIKTRTPESEIVYNYMSFPDPAMIVPKKERVDDSSRPRTSDLCEDLNYYHI

SEQ ID NO: 310734 - protein, 77 aa, Zea mays
  Clone ID: MRT4577_46446C.1.pep
SHTNSHSLPPPSYGSCSAAAHVDPTRPRLHRPLAGGGWRPCPRRPEWDPASTWSAGVRFAGPSCLWLAPQPPWTCSR

SEQ ID NO: 310735 - protein, 66 aa, Zea mays
  Clone ID: MRT4577_46447C.1.pep
SAQLTQVASQWQLPIDATHNQRLQSASDTAGRRAPATEAIAQAPSSLSMCAAAAAIGTQEEMLRRG

SEQ ID NO: 310736 - protein, 49 aa, Zea mays
  unsure (1)..(49): unsure at all Xaa locations
  Clone ID: MRT4577_46448C.1.pep
GSCILLLYRPGPALCYSALRSIYIDILSKNTKDSGKNADCCGIEPGXFR

SEQ ID NO: 310737 - protein, 118 aa, Zea mays
  unsure (1)..(118): unsure at all Xaa locations
  Clone ID: MRT4577_46449C.1.pep
RHPSPVQLQGPXGVGSPPILGQCXEFMRHQCSPXGTPYCSPQCQSLRQQCCQQLRQVEPQHRYQAIFGLVLQSILQQHLQRGQVMGLLAAQIAQHLSTMCGLQHRTPCPNAAAAGVPQ

SEQ ID NO: 310738 - protein, 235 aa, Zea mays
  Clone ID: MRT4577_4644C.1.pep
MAKRALAPFLLVTTLLASLLATCHGGGIAVYWGQNDGEASLSETCASGNYKFVILAFVYKFGKGQTPQLDLASHCDPSSGGCTGLSKDIRSCQNSGIKVLLSIGGGDGSYGLSSEGDARDVAAYLWNNYLGGTSSSRPLGDAVLDGIDFDIELGGAKYWDRLARDLKNKGGKAVLLSAAPQCPFPDEWDGGAINTGLFDYVWVQFYNNPPCQVNAGRGAFMDAWEQWESVPAGQI

SEQ ID NO: 310739 - protein, 54 aa, Zea mays
  Clone ID: MRT4577_46450C.1.pep
WGGGGFFFTSLKQSEKGIGSFLTKRVMINYKKVEGIGLHCNTVFIPLIIFKGPN

SEQ ID NO: 310740 - protein, 72 aa, Zea mays
  unsure (1)..(72): unsure at all Xaa locations
  Clone ID: MRT4577_46451C.1.pep
SRPSLRIARDVDYNGRYFLGEGLRGKVVESYRAESVTEVTRPVFMITGKARGKFXVLMESPRYFGSTHKSAQ

SEQ ID NO: 310741 - protein, 48 aa, Zea mays
  Clone ID: MRT4577_46452C.1.pep
RPTRQPTRQPTHYPTFSGYNFCIMTDRFMVSMPFVLDTLSGCLKLVHL

SEQ ID NO: 310742 - protein, 81 aa, Zea mays
  Clone ID: MRT4577_46453C.1.pep
QKTFKYHLIFYPPDQHIIQPFIRLPLIRFSNMSNNLLLIDSFHNLHEVKLLLNLSRMILLLGLDQSIFDILTAPTLFLQTA

SEQ ID NO: 310743 - protein, 116 aa, Zea mays
  unsure (1)..(116): unsure at all Xaa locations
  Clone ID: MRT4577_46454C.1.pep
SIRADRLQIATGAVVLXSLKGLLHLTVGITDVHEQVYERIKAPYLTVLCASGPEQTYSVLXHLHLMGMRAAVEFISDCTSLYXQFSDPXYVHKLKLEMWTAIVQECITYDIACELF

SEQ ID NO: 310744 - protein, 74 aa, Zea mays
  Clone ID: MRT4577_46455C.1.pep
GFVQARQASVLPLIQISSPHPLFSLTLCLWYPKVCSRGLGRLGSQAPYPGESGPRSPWGRENIRKYFYGKPTLS

SEQ ID NO: 310745 - protein, 121 aa, Zea mays
  Clone ID: MRT4577_46456C.1.pep
VGQTRCCLKNVFSVASGDYSACVGEKPPRRLWLNVLGPVLPKKDHFPRLGKDNGRFLGFVGFPDCSVPFKSNPARILFLAGFLGTNWGPIIGVLLTPEKLPSMGWVCELLKAFFESRGVSW

SEQ ID NO: 310746 - protein, 77 aa, Zea mays
  Clone ID: MRT4577_46457C.1.pep
VSSRPRTTSTIRQATLIEWEEITLMLHCTRARDHPSAWLEHALPLDHLSPTSDGQRLPNVPVSNNNPTYSWEGHTSS

SEQ ID NO: 310747 - protein, 67 aa, Zea mays
  Clone ID: MRT4577_46458C.1.pep
PTPQLPSVSQLLPRPDNPYELPHEPPPPHPLHLLQLHLHLYHHERHHATRLLPSWLLLQHQTLHHQP

SEQ ID NO: 310748 - protein, 91 aa, Zea mays
  unsure (1)..(91): unsure at all Xaa locations
  Clone ID: MRT4577_46459C.1.pep
PHRPLILGPGKGXITIDIKSGXLSCRLRAAIAYYVLALRLVRPPLVPMSIFTPQHGRRTLTILLKEPMYLTVLSSRRSKRTSYISVVSLLH

SEQ ID NO: 310749 - protein, 58 aa, Zea mays
  unsure (1)..(58): unsure at all Xaa locations
  Clone ID: MRT4577_4645C.1.pep
XFLFPTTKQAREALYFSGAFLQKKGERNTIQDDLFVATQTPTVRAFQAATSPFRTSPA

SEQ ID NO: 310750 - protein, 45 aa, Zea mays
  unsure (1)..(45): unsure at all Xaa locations
  Clone ID: MRT4577_46460C.1.pep
DINYPLLGTPITHKKKLGFXPIRIAAFMINLLDTTVATVYNVFIL

SEQ ID NO: 310751 - protein, 130 aa, Zea mays
  unsure (1)..(130): unsure at all Xaa locations
  Clone ID: MRT4577_46461C.1.pep
RAQKAPQSYLKASNKTKAISKGAHVKSKNPDASIVDKNNPSQRSVSLVPKPRESXKEKKKPNPPEKKEWEGSPPWKPWGREKDLFFGGQNVAFNPKNMSQGLFSRFASGAVQRNFLLAVWKKTPGAWFNR

SEQ ID NO: 310752 - protein, 73 aa, Zea mays
  unsure (1)..(73): unsure at all Xaa locations
  Clone ID: MRT4577_46462C.1.pep
RVGLAFNFSXVFYYEILNSPXQSFNLAKQGFYETISQLNPLGEGSYKKSPLIMQLLRGNLTLWTFSPPEDGVY

SEQ ID NO: 310753 - protein, 68 aa, Zea mays
  Clone ID: MRT4577_46463C.1.pep
MVEAFCATWKLANSQNFDEYMKALGVGFPTRQVGIVTKPTVIISQEGDKVVIRTLSTFKNTEISFQLG

SEQ ID NO: 310754 - protein, 91 aa, Zea mays
  Clone ID: MRT4577_46464C.1.pep
GAVSKAPRWTRRLWRASMVSGRVRLFKPDEVCPTIMWLCSSCFKVTGILIVIKKLIRSLVTCPIKVCFPAEKYTLVYIDRKPSQRARISFS

SEQ ID NO: 310755 - protein, 77 aa, Zea mays
  Clone ID: MRT4577_46465C.1.pep
MAQRDHKQEEPTELRAPEITLCANSCGFPGNPATQNLCQNCFLAGPASTSPSSSSSSLPGVSAPTPVIDRPRPAPLE

SEQ ID NO: 310756 - protein, 44 aa, Zea mays
  Clone ID: MRT4577_46466C.1.pep
CYYPGRRTHKRGIFLCITRPFRQSLVGVKQHTIWSSIEKNEAKT

SEQ ID NO: 310757 - protein, 118 aa, Zea mays
  Clone ID: MRT4577_46467C.1.pep
KKLFKEFSQIFLINYWGELAGKPPKVLGRNLAIFSFPGGPLKGEISTPLGAFFMDSNLGPNFGKIMEKFFSWEKFFSVKISTKFTTGKIKGKTLGALWGGLPQFFWVALIPLFQGEKL

SEQ ID NO: 310758 - protein, 230 aa, Zea mays
  Clone ID: MRT4577_46468C.1.pep
MPPSRLQVGTKTTEGHNQAGNTLHPYEVQRLRQVMRNNARLQQLGIPGLCDTLPKAYSFHHNKNKPNFTNNEDSESDYNPSSNDTGEEDLLDDLNIVIIKDYNMRTTNMSNGVIKLRTKRLLAEKESIRITRSKKTAAQPNGTEVFDNNDGHTQATVQASDPALFDEYTHMANGGHSIARPDGHNLMGNKDNVNIQVDDNMTSGGEASIEPSVHVQLGENDRWERGVNMG

SEQ ID NO: 310759 - protein, 71 aa, Zea mays
  Clone ID: MRT4577_46469C.1.pep
SQTKIHCPALKTPTTYLENPCPSPLKLPGNTSPFPPLTKTLTGQTRSPSQKNPQPKCQTAPPLKHPQNPAH

SEQ ID NO: 310760 - protein, 105 aa, Zea mays
  Clone ID: MRT4577_4646C.1.pep
HASAHASGRAATWRPRPPRHRRSRPARSRTTSRSRGRMPPPRRTRRRCGRARASGSALPALSAATCRASASGRSRTSPRNGTQCAPSATRSPMKPRALPRCRLQV

SEQ ID NO: 310761 - protein, 136 aa, Zea mays
  Clone ID: MRT4577_46470C.1.pep
TGLPPKRSPLFGWGGSPPPPFFKLEFQKPQRLFVFGGPPTGSKKPGFSGFPKQNPFFFPKFWIFSAPGFFKLGLSMGVNKFFFFSPSQIFQGFFLFLTPCLCFLQPPLHPPIFCTPLFFSPFFFVPTLVKQPPFFF

SEQ ID NO: 310762 - protein, 129 aa, Zea mays
  unsure (1)..(129): unsure at all Xaa locations
  Clone ID: MRT4577_46471C.1.pep
GQQGVALHLLALAVSATFTPTTQALMMPHTSLASCTVITASVTSGTPVTFEHLPAQAYMLQQAHLASVVHVPTSHHHQPSSXHLTIQTIGTQHHQQFLPXLSQLAIANPGDYLRHQLLASNPLAVANVV

SEQ ID NO: 310763 - protein, 96 aa, Zea mays
  unsure (1)..(96): unsure at all Xaa locations
  Clone ID: MRT4577_46472C.1.pep
PGSTTLFAALFFFFGGGXGXXXVXPVRGRGXRMXGRVWGSASHGAALRPTRKRGTHWPHFSPTQEPGGGAPFSSXCXPWXARGAPTWGSGPGAVPP

SEQ ID NO: 310764 - protein, 242 aa, Zea mays
  Clone ID: MRT4577_46473C.1.pep
MEYVNPLTGFRVDGRRPNEMRQLKGEVGVVARADGSALFEMGNTRVIAAVYGPREVQSKGQQVNSKEALVRCEYRMAEFSTGDRRRKPKGDRRSTEISLVIRQTMEASILTHLMPHSQIDIYVQVLQADGGTRSACINAATLALADAGIPMRDIATSCSAGYLCSTPLLDLNYLEDSAGGSDVTVGILAKMDKVTLLQMDAKLPIDTFENVMGLAIEGCKAIATYIREVLLENTKKLECQRG

SEQ ID NO: 310765 - protein, 295 aa, Zea mays
  Clone ID: MRT4577_46474C.1.pep
MPSRGCRPPGARRWDSTTLFSEKTQQKPSLASLVRSPRCGASFGHGDTAAIPAMEYVNPLTGFRVDGRRPNEMRQLKGEVGVVARADGSALFEMGNTRVIAAVYGPREVQNKGQQVNSKEALVRCEYRMAEFSTGDRRRKPKGDRRSTEISLVIRQTMEASILTHLMPHSQIDIYVQVLQADGGTRSACINAATLALADAGIPMRDIATSCSAGYLCSTPLLDLNYLEDSAGGSDVTVGILAKMDKVTLLQMDAKLPIDTFENVMGLAIEGCKAIATYIREVLLENTKKLECQRG

SEQ ID NO: 310766 - protein, 245 aa, Zea mays
  Clone ID: MRT4577_46475C.1.pep
MWRRRVGALLLRSPRTSSSASSACQSRRHHLLPSEEPLALNRLARLFTSQAGSDGGDTQKPFIAFVLGGPGSGKGTQCTKIASDFGFAHLSAGDILRHEIASGSEKGELILEIIKEGRIVPSEITVELIRKAMEMNNAKRVLIDGFPRCEENRIAFERIVGTEPDIVIFFDCPEDEMVKRLLGRNQGRVDDNIETIKKRLKVFESLNIPVVDYYSSRGKVHKINATGTADEIFEAVRRLFSSLRL

SEQ ID NO: 310767 - protein, 87 aa, Zea mays
  unsure (1)..(87): unsure at all Xaa locations
  Clone ID: MRT4577_46476C.1.pep
RGDEHSLLDCLPEGVMXRTRGMALAAQSWAPQTAILGQPSIGSFVTHCGWYSDLESVINGAPMGAWPLYAEQNMNAAMMERQVGVAL

SEQ ID NO: 310768 - protein, 113 aa, Zea mays
  Clone ID: MRT4577_46477C.1.pep
GSCFFPPLPSPPPDFCFLGPARVGRFLLLFLGQAVSGNRLLPVSLFLGKAPLAPDPHTASPPPLGVSFFLLAPPVSLFFLGRWPRPPSFWFAFSFCFPGFAFFAFGFVFFLGL

SEQ ID NO: 310769 - protein, 91 aa, Zea mays
  unsure (1)..(91): unsure at all Xaa locations
  Clone ID: MRT4577_46478C.1.pep
GFYLKALILVYLERPFAXKQLAYLASKPFFHGLLDYIISGPVVAIVWEGKSVVTTGRKIIGATNPLASEPGTIRGDFAVHIVRNVIHCSDT

SEQ ID NO: 310770 - protein, 115 aa, Zea mays
  Clone ID: MRT4577_46479C.1.pep
GLVFFFFFGHQTQGTSPLAPFFLFGPWIFSSPKPRKSSKSFKRGDHYLFRGQQNIGGGLLLKPLQPPLGGKTEGSGYFHNQKGAALVFLGPLHGRVDLPHFEDLNLGPEARLPRE

SEQ ID NO: 310771 - protein, 129 aa, Zea mays
  Clone ID: MRT4577_4647C.1.pep
MRASINRPPTPSAEEDRDKQPSLGEIINIKLVETGEKEKLMELLRERLAECGWRDEMKALCSNKHMHPMMLSKCFTFLRAYARKKGRNNVTVDDLIHVITPKGRASVPDSVKAELLQRIRSFLMSTTLR

SEQ ID NO: 310772 - protein, 48 aa, Zea mays
  unsure (1)..(48): unsure at all Xaa locations
  Clone ID: MRT4577_46480C.1.pep
PRERPGENTAFXLSPELVEAPEGSGGAIPRKEASHSMAESYRALAHIR

SEQ ID NO: 310773 - protein, 133 aa, Zea mays
  unsure (1)..(133): unsure at all Xaa locations
  Clone ID: MRT4577_46481C.1.pep
DQLICKPLGNGFDVPESSLSVNSGEEVDGLVHPXSGVRYHSHASWQHQWMQSGWHLRGVHMLMIASSVHWMGLSSVTRWMIYRVCLMMCLSMHLLAVVAYVHHERVCEAASRSATAPCGYIFWSNVVRCAAGP

SEQ ID NO: 310774 - protein, 134 aa, Zea mays
  unsure (1)..(134): unsure at all Xaa locations
  Clone ID: MRT4577_46482C.1.pep
GAPPRMHLRSSVFQENVYMATRVLLDFFISPQKFGVQKALQKNFRKALPFKKGFNGLFFLFLGPLVKDPVPFXKIMGGSPSPLFPVGVKLGALRTKAQKNEIFVFKPFFSRGCFRDNGFFLDKGGGVIRHPLGG

SEQ ID NO: 310775 - protein, 170 aa, Zea mays
  Clone ID: MRT4577_46483C.1.pep
MSPLPRIVLLAVAAAAAAAVTASATSLSGAANDLLPKYGLPKGLIPDSVASYSFDEATGAFEIHLAGTCYVHFGSHLVYYERTITGKLSKGAISDLSGVQAKKLFLWVYVTGMVAHPDQGTIEFQAGFISESLSASMFDEVPTCGSSVGAQLRGAAGVIGELGLLPVAQA

SEQ ID NO: 310776 - protein, 153 aa, Zea mays
  unsure (1)..(153): unsure at all Xaa locations
  Clone ID: MRT4577_46484C.1.pep
VPFFFFFLFFFFFFFFFFFFFFFFYFLCLDQQPPPSRATTQHKPQQKKKSKQKKKNNNKKPKQKNHTKKKRPTTQQGRKPPKKKINRNQKTKDKXKKKPQRKRSHKIGERTKQLKXTKRKEQLETKKKIRRREKQXRNRHVDTPTRGRARKEC

SEQ ID NO: 310777 - protein, 170 aa, Zea mays; identical to SEQ ID NO: 310775
  Clone ID: MRT4577_46485C.1.pep

SEQ ID NO: 310778 - protein, 170 aa, Zea mays
  Clone ID: MRT4577_46486C.1.pep
MSPLPRIVLLAVAAAVAAAVTASATSLSGAANDLLPKYGLPKGLIPDSVASYSFDEATGAFEIHLAGTCYVYFGSHLVYYERTITGKLSKGAISDLSGVQAKKLFLWVYVTGMVAHPDQGTIEFQAGFISESLSASMFDEVPTCGSSVGAQLRGAAGVIGELGLLPVAQA

SEQ ID NO: 310779 - protein, 271 aa, Zea mays
  Clone ID: MRT4577_46487C.1.pep
GRVGKKTLHLALGSNDLEVVKWNDKLRMAFDECIVQLSKKVGDAGPVLDMMSVMLENISHTPLIAIATTSAVYRTAQIIASIPNLSYKNKVFPEALFHQLLLAMVHPDHETRVGAHRIFSVVLVPSSVSPFPNLKSLDQCRKHDVQRTLSRVVSVFSSSAALFDKLRRDRNSFREYLHEGSMNRILHGIDDEIATPNDLPGSQSLRQSLRLSSVSHKHSYTSLEEGQSPLTESINEMETIVLRLSSQQATLLLSSIWRQALSPKNAPQNYE

SEQ ID NO: 310780 - protein, 47 aa, Zea mays
  Clone ID: MRT4577_46488C.1.pep
ACAGVTVYAFGSVCCVIIVSGVQCPTGPHYSHHYVGARQVALFNRDQ

SEQ ID NO: 310781 - protein, 74 aa, Zea mays
  Clone ID: MRT4577_46489C.1.pep
PTRPDEAPFSYGQRGNLDRNIGRRALAVAIFFSFVSCCSRGELATPVLCNIKQKLLYCLGRLSAKLKCDGHLLV

SEQ ID NO: 310782 - protein, 105 aa, Zea mays
  Clone ID: MRT4577_4648C.1.pep
PPPAPKKGSLGPLGPIAMGFFVGANILSRGPLRGGSINPARSFGPPVPGGDFAGNWVYWVGPLFGGGLFGLVYGKVFFGGSSQQVGDQAYAYFFPPSISALDEGF

SEQ ID NO: 310783 - protein, 105 aa, Zea mays
  unsure (1)..(105): unsure at all Xaa locations
  Clone ID: MRT4577_46490C.1.pep
YQNNPFSSAPPPSQPQQLFLPKPDYEADLLRRLPFKPLVAFYSVAYTHQPQLPYSHHPPAYPQEFLPXYTQLAALNYPAYLQHXQLLPSNHLAAVSPATFFTQPH

SEQ ID NO: 310784 - protein, 58 aa, Zea mays
  Clone ID: MRT4577_46491C.1.pep
VGGCSGPEVWQASALYALVRSMFSSCLMECRAKSGRCVLSIKCHAALFALKKKKKKAA

SEQ ID NO: 310785 - protein, 48 aa, Zea mays
  Clone ID: MRT4577_46492C.1.pep
QKTQIFLQVARWAPLKELKVNNIFQRSLVAHEINGTCEVLHFFERQEC

SEQ ID NO: 310786 - protein, 56 aa, Zea mays
  Clone ID: MRT4577_46493C.1.pep
SKTMSTHGRCRILVPPSSATLFSQFFLCSYHKLTHVLICECLTPTLGYIPKVTYTH

SEQ ID NO: 310787 - protein, 56 aa, Zea mays
  unsure (1)..(56): unsure at all Xaa locations
  Clone ID: MRT4577_46494C.1.pep
LTFYIFXPXNYXPPLFIKPRPPIINNIKSSXNHPHNYFLYKIIIPSQFHTTYYXQS

SEQ ID NO: 310788 - protein, 55 aa, Zea mays
  Clone ID: MRT4577_46495C.1.pep
FGSQNAWAGRGAASGGPAWSPRHAPREPGGAWNQEHLNPACHHIPGSCPGRDRAR

SEQ ID NO: 310789 - protein, 69 aa, Zea mays
  unsure (1)..(69): unsure at all Xaa locations
  Clone ID: MRT4577_46496C.1.pep
GRARDPRRANSAAXLQERRRXQKPLAXPNPXGTAXLQQQQLLPYSQFSLMNPALSWQQPIVGGAIFGGG

SEQ ID NO: 310790 - protein, 97 aa, Zea mays
  Clone ID: MRT4577_46497C.1.pep
STLLRIPIEHAVCSFSAKVSSPIIQSSLLLVYRDLLYLLHVDLTSFNLCKQGLRSCSLPLWTKKKNTAPRTVEVQGYILQKEGGKGTLENLQNHPFA

SEQ ID NO: 310791 - protein, 148 aa, Zea mays
  unsure (1)..(148): unsure at all Xaa locations
  Clone ID: MRT4577_46498C.1.pep
MSTEWEGVEAKKPLLVARNSSVSSIWVVVASTTVAVAGSFVFGISVGYSSPSQKGIMRDLHLSLAEYSVFGSILTIGAMLGAIVSGTIADRVGRRCAMAISDVFCILGYLLIAFSKNSVWLDLGRLSIGXGIGLLSYVVPVYISEITP

SEQ ID NO: 310792 - protein, 173 aa, Zea mays
  unsure (1)..(173): unsure at all Xaa locations
  Clone ID: MRT4577_46499C.1.pep
QSFGAWLRXDGKDQVTEEDVNEGGAMVPARVHTVLIYTNDDKTETNDEIDDDLIEHVINPEILDKYHHXKTILHLNLFRRFAIGEPHRDAGLTILKIIIDTYGHWGAHFCGNFSSKDHTKVDHIGTYVAKQVVNSILASGLLRXXLAHVGXAIRVPEPLNLFGNSYSTGKMTL

SEQ ID NO: 310793 - protein, 110 aa, Zea mays
  unsure (1)..(110): unsure at all Xaa locations
  Clone ID: MRT4577_4649C.1.pep
PAGSESEEPERWKSTPRNQRSSEEAEGGANLSPIXMRASINRPPTPSAEEDRDKQPSLGEIINIKLVETGEKEKLMELLRERLAECGWRDEMKALCGFDFSRIKLKYYSC

SEQ ID NO: 310794 - protein, 46 aa, Zea mays
  Clone ID: MRT4577_464C.1.pep
QILYVICSQLKKEDQKIDIRINIRIHPYLQENRWSKRSRLTLRLST

SEQ ID NO: 310795 - protein, 56 aa, Zea mays
  unsure (1)..(56): unsure at all Xaa locations
  Clone ID: MRT4577_46500C.1.pep
FFFFRSGIYIRTSKQFEDTVVLPFXXXEXGNTXXXNRRQNTXGQRTGAAGGGRGPT

SEQ ID NO: 310796 - protein, 41 aa, Zea mays
  Clone ID: MRT4577_46501C.1.pep
HHAIHEYAHHNCHGSRAHIYSLCLSRLLYVYDTDPTLDQST

SEQ ID NO: 310797 - protein, 104 aa, Zea mays
  Clone ID: MRT4577_46502C.1.pep
MLLRRLLHSTRHFRHGLRTVTSATTTTTCYFCTPITFRCLPDLPLSRVLSPRLLSTYGRDDDRNKPWSFEADSGDPDPFANEDAADDGAAEGPPVGPTRADDEP

SEQ ID NO: 310798 - protein, 81 aa, Zea mays
  Clone ID: MRT4577_46503C.1.pep
CCAYVIEGFPCAGVGLVIRRKKCLQSTVPGRYVQMNCDGLCHKPMCTYCVYVHDTILASFRLTSVRSAIQLFPWIHACSSN

SEQ ID NO: 310799 - protein, 86 aa, Zea mays
  Clone ID: MRT4577_46504C.1.pep
LLACCFQAAIVGPGNELGKPIDINDAEEHIFGLTLMNDWSARDIQAWETIPLGPFLGKSFSTTVSPWIVTLDALKPFMCDAPKQEP

SEQ ID NO: 310800 - protein, 106 aa, Zea mays
  unsure (1)..(106): unsure at all Xaa locations
  Clone ID: MRT4577_46505C.1.pep
MVESMQAADPAGRISALLALRQLLAMLQSLALLLPVQWHAXAGAFDAAASVLGLAGKXKATASVVLRVLAGSLMVAARREIATRRAQEAGREYELIPRTCATMWFK

SEQ ID NO: 310801 - protein, 63 aa, Zea mays
  Clone ID: MRT4577_46506C.1.pep
KLHAYVNLLAIIYIVLLSSPKDIYFFIGFTHCKLVGYPCLNKLYLTLTMYRFLKFGYYRFGTY

SEQ ID NO: 310802 - protein, 280 aa, Zea mays
  unsure (1)..(280): unsure at all Xaa locations
  Clone ID: MRT4577_46507C.1.pep
TSLLLSCTPAGRRARSSSRLSRVAVGCDDGTVGLLDRGFRLSYGFQAYASSVLFLQQLKQRNVLVTVGDDDQSSSQASAICLKVFDLDKVQEEGSSTTTPFCVQILRIFTDQFPQAKITSFMVLEEAPPILLIAIGLDNGFIYCIKGDIARERITRFKLQVETASDGSTSLPITGLGFRVEGQAHQLFSVTPGSVTLFSLHIQPPRRQTLDQIGCQTNAVAMSDRMDLIIGRPEAVYFYEVDGRGPCWAFDGEKKVVGWFRXYLLCIIEDQRTHKSHLNL

SEQ ID NO: 310803 - protein, 65 aa, Zea mays
  Clone ID: MRT4577_46508C.1.pep
PVKQKQCVFQRFPGVFLVFLSPPYSVTLRLNECARYSVFVHRRSCSLCPGFARSVRIGYAIVRVT

SEQ ID NO: 310804 - protein, 81 aa, Zea mays
  Clone ID: MRT4577_46509C.1.pep
GFGLVLSNILVCTRPLSLFFQGGVWFLVGQVPGFLFFFLLFFLFLPATSPRFWLGPRFFSFPVFFFFFFFCGSISFFLLFC

SEQ ID NO: 310805 - protein, 112 aa, Zea mays
  Clone ID: MRT4577_4650C.1.pep
MRASINRPPTPSAEEDRDKQPSLGEIINIKLVETGEKEKLMELLRERLAECGWRDEMKALCRAYARKKGRNNVTVDDLIHVITPKGRASVPDSVKAELLQRIRSFLMSTTLR

SEQ ID NO: 310806 - protein, 49 aa, Zea mays
  Clone ID: MRT4577_46510C.1.pep
PKNIIMLSYSSIISLILLRINNAIFINHTPQNKYFSITTFIPSLYHKNP

SEQ ID NO: 310807 - protein, 118 aa, Zea mays
  Clone ID: MRT4577_46511C.1.pep
KKKRPGLGFFLDKKISSGAGGGGGPGEAMGSTNRGGDPPPSMGPKAGPKHGGGGGKRKNFGFFFLTHTKKNLFWGPPSGPLIFGQPPPQAKKKKNISMGRKRRDQKWGGAHLQFPPKL

SEQ ID NO: 310808 - protein, 200 aa, Zea mays
  unsure (1)..(200): unsure at all Xaa locations
  Clone ID: MRT4577_46512C.1.pep
LQYPSPCSAGEGKPGMPKEXGGGAMVPFYXEPGQGAPPPXPVRPIRHGNLLQVACLRPPNSDGGGGTEEVVGSVVEVNLGDGGSGGSEAEEKIDEAEMRRIEYGSVPAFALLQSRKNTLADVATMSHVPSVPDHAEWWQYVLEYSKTIGSLLGNPDXLSGFMIEEPKTILKVREKPTSLRAAWGVXLXIFYVDKTFARAG

SEQ ID NO: 310809 - protein, 105 aa, Zea mays
  Clone ID: MRT4577_46513C.1.pep
RGNRTESRVCILSLNLRHYAFNDKAHLGIFFLYCNMFVSPAASPRPGAENRRAWVAVVVRQHCLDQTAKQGSLWDLSLKLCNRYRVPSNCQQSKSHSITCQYEGV

SEQ ID NO: 310810 - protein, 733 aa, Zea mays
  Clone ID: MRT4577_46514C.1.pep
MPGMPTDGGGAMVPFTGEPGQGAPPPAPVRPIRHGVAPPIFRIYVSWSSGNLLQVACLRPPNSDGGGGTEEVVGSVVEVNLGDGGSGGSEAEEKIDEAEMRRIEYGSVPAFALLQSRKNTLADVATMSHVPSVPDHAEWWQYVLEYSKTIGSLLGNPDPSGFMIEEPKTILKVREKPTSLRAAWELLEIFYVDKRLQGWLPERLVDWLADFDSLLSTMASTVYSKLSNFQKKLVNLQIVEDDPDYWNGLSAALSVGWLDIVVNMLRFHGSYQLDQMDSRETENGLVEAVAVLVSMMPRMRPNLPTGKLGQCCKTRPDFIKAWEKWRGQVTKLECSAFWIQCGHQKTRDGLKNLLHIMMGNIKEITAATSHWLELFASHFLYIKPFTVGFEGMHHLAQKCIQLMPSSGTNGLTGLIIGVMSENPEVVLAECTKNFGPWLVTHAMELLTADNDYADIMLHEERPNLGGISIEELHRLVYAQVLCCHPLTWQIAPTYLSSCLNQGLGLLEILLLKQPIQDNCLVLKTLEICRLYELENVSTIIMKIAGIYRWKHGRKGTGVYWFQQARDKVCLDRIAQQLFEHIGKSVTDDSFKQWEGLLELLGSDIGSAGGLEFLHRYRDFKRSLQQALDRRCGEAARQTVDFLIQLMKNPSTPQRFWLPLLHDSVELLNSKLSPLMDVAETTLLLNKLQELSMAKLRPDFSSNHLSSHAMSSVRLALASNLARAVLEDRSPSTL

SEQ ID NO: 310811 - protein, 68 aa, Zea mays
  Clone ID: MRT4577_46515C.1.pep
VPERPGRPTRPALFIRQNVDKYWEIKSEAGAVRVFVDPKNKHKRIHLDILYMDEKHNDDLDKLYINDA

SEQ ID NO: 310812 - protein, 377 aa, Zea mays
  Clone ID: MRT4577_46516C.1.pep
MALPTANPGFRLGCQESPAMGLRSAPRLALRRPGAVSGHRSRTGRGKFPVASTSLDDYLPMRSTEVKNRTLTGDITSLRLITAVKTPYLPDGRFDLEAYDSLINMQIEGGSEGVIVGGTTGEGHLMSWDEHIMLIGHTVNCFGTRIKVIGNTGSNSTREAVHATEQGFAVGMHAALHINPYYGKVSTEGLISHFEAVLPMGPTIIYNVPSRSGQDIPPQVIETLSGYPNMAGVKECVGHERVKCYTDKGITVWSGNDDECHDSRWKYGATGVISVASNLVPGLMRSLMYEGENALLNEKLLPLTKWLFCLPNPIALNTALAQLGVARPVFRLPYVPLPLEKRIEFVRIVEAIGRGNFVGQQEARVLDDDDFVLISRY

SEQ ID NO: 310813 - protein, 36 aa, Zea mays
  unsure (1)..(36): unsure at all Xaa locations
  Clone ID: MRT4577_46517C.1.pep
DTXPXPSXPYXPPYVXXTPRPSPPTYVPPYGPGPPT

SEQ ID NO: 310814 - protein, 73 aa, Zea mays
  Clone ID: MRT4577_46518C.1.pep
AQILSPRILKRGSIHNPGGAPPPPWGVWGFQQATQRGGEILKEAKTPPQRGGWAPSNPQKNPGGSKDIRGVCN

SEQ ID NO: 310815 - protein, 391 aa, Zea mays
  Clone ID: MRT4577_46519C.1.pep
CILPKNDAEKSYQKIYDWQYIFCLELWTSVVCGCSSEEEFRPLAYPLTQIIHGVACLVPSARYFPVRFRCVRMLNCIAEATGTFIPVSSLLLDMLEMKELRGRPDGVGKAVNLFSVKQVDKKTVKTRAFQEACIYSVVDELAKHLTQWSYSIAFFEMSFIPLVRLRSFCKTIKADRFRKEMKDLIYQIEANVEFIKSKRVGIAFSPNDPAVESFLQTEKEERCSPLSKFVATLHQRAQDRMDALDETSVIVGAESSTFSRRLSEAQKQQDEQDDDEGTIAFSKNWLSENKKPKTPKEDKKRPREDDDVATEEDRVEDLVLSSDEEDGNNEEADDGFVPVEGDSDEDFVDPDSEYKKQKKAKLKKRNKRQPFLHKAPSRTKSNSGPKKKARH

SEQ ID NO: 310816 - protein, 110 aa, Zea mays
  Clone ID: MRT4577_4651C.1.pep
NKKKHSEGRGQTHKNTGGGHSRNNHQLHNWLNGKKKNRVIKNKRPKSSKSGEVAQGPPTRTRGGGGNYFTERSQRNHQRGGGRQGGHRRSTPTREPGAPPAKQGGRGLLP

SEQ ID NO: 310817 - protein, 89 aa, Zea mays
  Clone ID: MRT4577_46520C.1.pep
RVQNAEVQGFVAAHKSSAYFSRFHVNVRMNRDGKTDYMAMIRMITLDSYKYNADIYRVVVRYTAKDISAQVISASIAGDMVLASAYSHE

SEQ ID NO: 310818 - protein, 97 aa, Zea mays
  Clone ID: MRT4577_46521C.1.pep
NKPQPKKEKGNARIRPIKQDWEPVGFPKKGPTAAAKKDEKAVNAARRSGAEIQTMKKFNAGINKAASSGTSLNTKRLDDDTENLAHEPVPSDLKKNL

SEQ ID NO: 310819 - protein, 119 aa, Zea mays
  Clone ID: MRT4577_46522C.1.pep
TRGGTERDAALAHAQQTVGHLSRRQIKESTPPQVRQASDRPRRMEEYGIRPWTGACPPLFPGETSLAVLLPYTWTPPHPPNSQVLRAVKQTHKIGAPLFFGSEAGQKIHQQRHSCHNRS

SEQ ID NO: 310820 - protein, 72 aa, Zea mays
  unsure (1)..(72): unsure at all Xaa locations
  Clone ID: MRT4577_46523C.1.pep
ELARPFPKVGGSCPLPFGLIFNAXKGKKAHPSCKKNYGPLPGKKIGLHSAPFFNPFFFFFLSQWALFFFPVG

SEQ ID NO: 310821 - protein, 237 aa, Zea mays
  unsure (1)..(237): unsure at all Xaa locations
  Clone ID: MRT4577_46524C.1.pep
MAASRRLARKLPSLISRYERLISPETDAPELTEAPTTSASIPLDPSLPVLPLAVSHLSPPNPLPVLPSAHASSLASLFRLLRRARHHPRLAALDLHILLAAADASSAFRPDHGVTSLVDARLAASRRLPSLQRLLEXLVLTRPCPCADDSIFACPELLPTFRKVIVAFAASGDIPSASHALASLRRVADSPLPAEFYNIILQALSRLRRHDDAIRCYGEMTSVYPFAPDVTPSHTHQ

SEQ ID NO: 310822 - protein, 82 aa, Zea mays
  Clone ID: MRT4577_46525C.1.pep
RPLQTCPPTKGLWRNLCPKTRGGAGLFNSHQETQFVPLTSHARAEIFAASIRETTFFQTRGQNSQWRAGTWGRTSCIYRGPH

SEQ ID NO: 310823 - protein, 79 aa, Zea mays
  Clone ID: MRT4577_46526C.1.pep
TRLLPPRAMSRIHLCTASNFRSDERWPITCRRRMAHFLRRCRFLGRSSCSSYVGDCVSSSVSGCSTVFWCVSSARLCAW

SEQ ID NO: 310824 - protein, 100 aa, Zea mays
  Clone ID: MRT4577_46527C.1.pep
SSHTGYFLVSRVNSTTYPWHQPIGMKIRLKAISIKKFMDFFWISLEYSSPIIFTKIWLDEVVWSSRYLLYHPYHEQPKVRTKKTIAVAVTQCLVFDRSAE

SEQ ID NO: 310825 - protein, 56 aa, Zea mays
  Clone ID: MRT4577_46528C.1.pep
RVILVVTVQAKLDPTAQEPINRIGEPCRTEHMDGHGEGGQESGRRRSRRWAKGRKS

SEQ ID NO: 310826 - protein, 46 aa, Zea mays
  unsure (1)..(46): unsure at all Xaa locations
  Clone ID: MRT4577_46529C.1.pep
NSCHICEEFANXMLDEFIRWLKRLIEFGLVWAAALFFIWPPQIFFM

SEQ ID NO: 310827 - protein, 463 aa, Zea mays
  unsure (1)..(463): unsure at all Xaa locations
  Clone ID: MRT4577_4652C.1.pep
DRQNPDAALSHLAHENTRARALDIPRHRRRFILRARALHLALPRAEAYVLRRGDADRLAPRSSSVGGGGEGGXEEEQEEVEGSXCGGGAVVVVAADAEAEGHPYDFHVSGPRNLPPPNWKEIIRSSWKDPNYKRMVMACFIQAVYLLELDRQDKKGEEDGLAPKWWRPFKYTFTQPLVDERDGSIYGAMLEWDRSSALSDFILMRPSGAPRAVLALRGTLLQKPTMKRDLQDDLRFLVWESLKGSVRFVGALAALKSEVEKFGSANVCVAGHSLGAGFALQVCKELAKHGVFVECHLFNPPSVSLAMGVRTMSEKASYLWKKVKGSLPLKEDTTPPLETAKADASDKKRLRAEKKWVPHLYVNNSDYICCHYNAPSCSSTTTDGASNEQQQQQRKASEIAGDVVAKLFVTSKGPQKFLEAHGLQQWWSDGMELQLALYDSKLINRQLKSIYATTTEMPSPAKS

SEQ ID NO: 310828 - protein, 78 aa, Zea mays
  Clone ID: MRT4577_46530C.1.pep
PCGEGKHSMTLWSRTFSSFSNRTCSLLICRVYLSFAIVYRVILCALTITVTRVRTPRDTTGSGGIGGSHLGRRPFNEI

SEQ ID NO: 310829 - protein, 64 aa, Zea mays
  Clone ID: MRT4577_46531C.1.pep
DAWKKKKKKKKKKKKKKKKKNSKKKKKRGAALFYFFNFEIFYREKNEIPHLRTQNCVNTEKEKK

SEQ ID NO: 310830 - protein, 118 aa, Zea mays
  unsure (1)..(118): unsure at all Xaa locations
  Clone ID: MRT4577_46532C.1.pep
TTXHSNPISSNGTFQVPPRQFTYIPGTLXFPIIPFYNSTAVDPYIQLMLVMNPFLSPITSNLSAYTYHLKSYNLYPELLHYLXKXLMNYQPLQLFIYFKLLSHIFPYLMFFYYIPKSF

SEQ ID NO: 310831 - protein, 275 aa, Zea mays
  Clone ID: MRT4577_46533C.1.pep
MHGRTQGAAVGDMTQRLLLALSLIASATAVPAVIRTVPDDPTAGSSGAADAADALFCDSWRLSVETANAGPWSAVPSRCGAFVRDYMEGPRYASDSAVADADALAFASEALAAAEWGGSASARPAWVFDVDETLLSNAPYYAVNGWGSQEFNETSFDEWVDAAKAPTLPSSLNLYNQLQGLGFHVILLTGRSEFQRNATELNLLFAGYNSWEKLILRQPYDIGKNAVQYKSERRAAMEAEGFKILGNSGDQWSDLIGSPMATRSFKLPNPMYFIS

SEQ ID NO: 310832 - protein, 123 aa, Zea mays
  unsure (1)..(123): unsure at all Xaa locations
  Clone ID: MRT4577_46534C.1.pep
ILIPSPAPXRARAAIFLVFPTQLQRQQAAGNHNPIKLTSSAGGPQPSPTETNKTPFNPVRSPLRAESPQGTKTRGSPHGSSAPAPLLQGPPEEGGGLQNETPNIRAGTPPKRLAKKGQSPPHG

SEQ ID NO: 310833 - protein, 131 aa, Zea mays
  unsure (1)..(131): unsure at all Xaa locations
  Clone ID: MRT4577_46535C.1.pep
LFYLLCSHITSSIWCDLHKFFAVSQSESEDELELRAAALLRSLIAGTSCCRGSRNDEEDCDGFPGSRGQRRTAVGPHPSLCSHXEVVYSXLATEMVSVSASRIAAFRTFWRSSPRLETRPGLAACSAPCHR

SEQ ID NO: 310834 - protein, 101 aa, Zea mays
  Clone ID: MRT4577_46536C.1.pep
LFYLLCSHITSSIWCDLHKFFAVSQSESEDELELRAAALLRSLIAGTSCCRGSRNDEEDCDGCLPFDPDPAAEGFLLLAAALAAASFTSLHTLSRIPRKSR

SEQ ID NO: 310835 - protein, 84 aa, Zea mays
  unsure (1)..(84): unsure at all Xaa locations
  Clone ID: MRT4577_46537C.1.pep
SVILHIVPXGKMGWMASTFNGHPARAMRLRSVESCVSEERSTLKAQCPRARSVFQGPMPIRAQGWSAISEIIMKQGVMVHMSRF

SEQ ID NO: 310836 - protein, 354 aa, Zea mays
  Clone ID: MRT4577_46538C.1.pep
QRRGAKLRLYTGELTQLGPAEQFLRTIIDIPYLYQRLDVLLFMSTLPRVRANAEQSFKTLEVACHELRNSRLFKKLLEAVLKTGNRMNDGTFRGGAQAFKLDTLLKLSDVKGVDGKTTLLHFVVQEIIRSEGVRAVRAAKEQSNSSISSVTSDDLTEDVSDDTEHYKQLGLGVVSSLGDDLQNVRKAAILDADALTISVASLGHKLVKANEFLNTGMKSLDEDSGFHRKLGEFIEQSQVRVTQLLEEEKKLRALVRTTVDYFHGSTGKDEGLRLFVVVRDFLGILDKVCREVKEAAAKAAANNKKPSAAGSEKELGQPSQSSSSFRDPRQQLVPAIKDRRSAAARSSSSSSDSD

SEQ ID NO: 310837 - protein, 106 aa, Zea mays
  Clone ID: MRT4577_46539C.1.pep
TRKKSDRELCTTTHNGHSTPLSTPFACLAKHTHTHPYKGHKRKRTKRPHIISRMHKAFLFLYLYLSVCISLSPFKQASSSLTSTCLWFQGNCCSIVGTDNARGEGT

SEQ ID NO: 310838 - protein, 231 aa, Zea mays
  unsure (1)..(231): unsure at all Xaa locations
  Clone ID: MRT4577_4653C.1.pep
MTVGPLFRCPLPEIPNTPPPRSLTWHPRILALAHSKFLAPTPVRPLPISPRARALHLAIPTPSREHFPGRGRMACAATMPIDLLPAPAPAEEEVKAVXGGRGDGGGGXEGEGCGGGAVVVAVADAEAEGHPYDFHVSGPRNLPPPNWKDIIRSSWKGPNYKRMVMACFIQAVYLLELDRQDQKGEEDGLAPKWWKPFKYKVTQTLVDERDGSIYGAMLEWDRSSALSDFIL

SEQ ID NO: 310839 - protein, 58 aa, Zea mays
  Clone ID: MRT4577_46540C.1.pep
EQQGVIFFRFLLTNTELPQLNRTPPSTLSFLLVASNITESILVNFVHQLTKNKSPQRP

SEQ ID NO: 310840 - protein, 143 aa, Zea mays
  unsure (1)..(143): unsure at all Xaa locations
  Clone ID: MRT4577_46541C.1.pep
PGTLRPPRPVFRXDTCVFVSQSGETADSLGALRYCLERGALTVGIVNTVGSSISLLTHCGVHINAGPEIGVASTKAYTSQFVCMVMFALSLSEDRASKQKRREEIVEGLGKISDQXKEVLKLDQPIKKLCEXQKQKALLLLRR

SEQ ID NO: 310841 - protein, 65 aa, Zea mays
  Clone ID: MRT4577_46542C.1.pep
LKTRSPKKREPGAPHAGSLNPGFPTCSEQTDKRSYFRSVWNKKKNRIYKKKAVPKPTRGRPEHGP

SEQ ID NO: 310842 - protein, 77 aa, Zea mays
  unsure (1)..(77): unsure at all Xaa locations
  Clone ID: MRT4577_46543C.1.pep
XQXSYIPWIPAGTPPSRSAVAEAHVHLDVGLPRLXKICLAFTQVIVTAISSSPPCYLKKKSLEARSVCGRVLXFCLA

SEQ ID NO: 310843 - protein, 51 aa, Zea mays
  Clone ID: MRT4577_46544C.1.pep
RITKEPSYLDRAHHVLCAGTHAGQIGTSFPLLITRTYWLQDTAPTPSRIEG

SEQ ID NO: 310844 - protein, 228 aa, Zea mays
  Clone ID: MRT4577_46545C.1.pep
CRKGDGCEYAHGVFECWLHPAQYRTRLCKDEVGCARRICFFAHKREELRAVNPSAVSVGMQMQPTVSPPPPSGLGDMLSPAAWPSSPASRLNKAALGGGRDLDLDQYQHMLFDTVSSPRANWGSAGGIGSPLPPARAVPDYADLLGSVDAASMLSQLHALSLKQAGGDMPAYGSMVADTQPHMATTSPMVGLGSSTAFGLDHSMAKAILSSRASAFAKRSQSFVDRGG

SEQ ID NO: 310845 - protein, 68 aa, Zea mays
  Clone ID: MRT4577_46546C.1.pep
MLWVARLPGLLSAAMVVVVLSPSLQSFPPAEAIRSSQFDGSVRFPGHFFGGARGVDFRRAPPFRNAVD

SEQ ID NO: 310846 - protein, 172 aa, Zea mays
  Clone ID: MRT4577_46547C.1.pep
MLWVARLSGLLSAAMVVVVLSPSLQSFPPAEAIRSSQFDGSVRFPGQIAGGARGVAFRRAPPFRNAADCGAGADNGTGANVCDPWLVHIAITLDDEYLRGSVAAVHSVVQHARCPESVFFHFLVSDPGLGDLVRAVFPQLRFKVYYLDPGRVRGLISTSVRQALEQPLNYAR

SEQ ID NO: 310847 - protein, 32 aa, Zea mays
  Clone ID: MRT4577_46548C.1.pep
PNKHLNSVNSNSFLCDSQIKIKAFYFINSKTT

SEQ ID NO: 310848 - protein, 54 aa, Zea mays
  Clone ID: MRT4577_46549C.1.pep
RVCRRSSDLLVTVIYSRRYTGCLKIVHRVDRILRILAHSLHLLIRLSIKTSRYA

SEQ ID NO: 310849 - protein, 88 aa, Zea mays
  Clone ID: MRT4577_4654C.1.pep
PRLFWESQPSFGMTPDPHTTMSGNMAYGPYGGRHYPSHPIESSTLPLDVIGAGELYLLAGRGLARTYYDCRKVTYVLQGPCTFGAVTP

SEQ ID NO: 310850 - protein, 103 aa, Zea mays
  unsure (1)..(103): unsure at all Xaa locations
  Clone ID: MRT4577_46550C.1.pep
TKKKDATPARRPNEPTRNQKTTETTDRTHDTPKPNKRAPPTTPGKEARKTPKKQRQPEKHAPTNKPERRKRSKTHGHHDESRADGHECGRQGPAQQPAVQXRP

SEQ ID NO: 310851 - protein, 91 aa, Zea mays
  Clone ID: MRT4577_46551C.1.pep
DSSGGAVLRYALHLRFLCPSKKKSLKSMLRCKSDPSTAPYSSNTLPEEERRFYLYNDLRVVFPQRHSDADEGKLRVEHDFPADPKYFDISN

SEQ ID NO: 310852 - protein, 95 aa, Zea mays
  Clone ID: MRT4577_46552C.1.pep
SKINDSSGGAVLRYALHLRFLCPSKKKSSKSMLRCKSDLSTAPYSSNTLPEEERRFYLYNDLRVVFPQRHSDADEGELRVEHDFPADPKYFDISN

SEQ ID NO: 310853 - protein, 712 aa, Zea mays
  Clone ID: MRT4577_46553C.1.pep
MGLPQPSTVEDDAPTALRTSISCPPHSGGVSACDLDGLPAGSSSRRVLSYPLICDFDRKATLDAPNESNGYSKDGCEFGEPADLHGLNIDSRNTNSWSSPKLVPSVHMPARRVVGFDSGCIGGSDGAETDMVDSSLVDRNSHLPFDQHELQARKRLFSPLKNVLVKQFNGDMLNLPSGDSRFRHSDSADKLYSTGFQDNKKANTGCINFFETRDTPASRCSSRSPEWDVTRSNSNSFTDGPLLGSKDYISYYDHLAASAKLAHSPLSLSPLSPKYMNKIKVTGSQRYIMKDLEDDFLDLKETGGSGGARMPEVSKGSNLLHDELDVMTPKWGSLRRYRNWGPESSPTSPRIGYGRSLSLHVRRSLVGSFEESLLSGRYSYGKDSQTIDGFLAVLNVTGGSFFPTTQKLPFSVTSIDEDSSLLYYSSIDLAGRLPSNNTKSPKLQRSYSNNDSRSAKSRLRIPVKGRIQLVVSNPEKTPLHTFFCNYDLSDMPPGTKTFVRQKVTLSPSALPSNPVEEGSKTCDVNSGHKSSQSVSCGNEPSERGARSECCNGGQNCNSNDESEKGDLKTRCRSLDSDSNESNKSSSPGNKKDQSDSDGCCCQMDKFGMGEKKSCCSPSKINDSSGGAVLRYALHLRFLCPSKKKSSKSMLRCKSDLSTAPYSSNTLPEEERRFYLYNDLRVVFPQRHSDADEGELRVEHDFPADPKYFDISN

SEQ ID NO: 310854 - protein, 584 aa, Zea mays
  unsure (1)..(584): unsure at all Xaa locations
  Clone ID: MRT4577_46554C.1.pep
MDLSRPTSSDLSLGLHSHGHAHAHARRHAVAAPLRLFDDAEEPKPERVGAGEADAERDDEDGGDQHFSLLGHSLCVKRPRRAGNGGGGGFSXSMLGGPHNNHIAALAITLKQVATPEYKAYIQXSRKMLRLWHQRCSEENADWLLXTDNHLILWDLRTLGLTGKIFEKVCEACHISINKTPIYGDNGSISPGXCGSEHLQXTTRGCLEEDFESIADFLIRSTQIASNVLKEHGKVQKEFLRGLMNNKDVMELRNQVXRHLRHSLLCQVLMYECAXYTVVSNYPDSQQHCHPLXPRILASLXSTAQRLGEFLXVVEGLXLILIQTGKLFLGDMAHISGLVAAKECRSPFDYCDVVTSTTHKNLRGPRGGIIFFRKGKNLRKRAGSFSQGDENEYDFEDRINFGVFPSMQGGPHNNHIAGLAITLKQVATSEYKAYIQQVKKNAQALASALIRRKCRLVTGGTDNHLVLWDLRTLGLTGKIFEKVCEACHISVNKTPIYGDNGSISPGGVRIGTPAMTTRGCLEEDFEVIADFLIRATQIANNVLKEHGKVQKEFLRGLQNNNDVIELRNQVEAFASQFAMPGFDV

SEQ ID NO: 310855 - protein, 155 aa, Zea mays
  Clone ID: MRT4577_46555C.1.pep
WSTADMHRHLFYLCQFKGHAVIPGVAATIQLLVANFGTSPTLERSRKQRCANLQNELRILDLAPSKHHHDQEEVPSHHRLINGCMGDISGVQSRLHTMRRGKESFANSNSNQGQAKHGNIVSNNTSVCPSITTLTKEDMFMQIVELHRRRTISSE

SEQ ID NO: 310856 - protein, 116 aa, Zea mays
  unsure (1)..(116): unsure at all Xaa locations
  Clone ID: MRT4577_46556C.1.pep
MEKMSSSVQSWVDQHKLATVGAMWTTAVGASVACGRRRGKAAGFTXSLPRSAERRWRTTTTPRNGGRRRRGASSWTSTRSXGGHRRRRPGERAVDLLADQTFRSRPAGRPWIETRR

SEQ ID NO: 310857 - protein, 596 aa, Zea mays
  Clone ID: MRT4577_46557C.1.pep
GSRFLADRFENWHAVAAPLRLFDDAEEPKPERVVAGEADAERDDEDGGDQHFSLLGHSLFVKRPRCAGNGGGGGETSSCSSTSAALRPAKRQATGEGSGADLETRRAAVRAWGNQSLAETDTVSGSLMVQELARQVRGIELIASENFVCRAVLDALGSHLTNKYSEGAPGARYYGGNQHIDAIERLCHERALTAFGLDPACWGVNVQPYSCTSANLAVYTGLLQPKDRIMGLEPPSGGHVSHGYYTPSGKKVSGASIFFESMSYKVNPQTGYIDYDKLEERAMDFHPKILICGGSSYPREWDFARMRLVADKCGAVLLCDMAHISGLVAAKLPLCSYFQRLEGFCCHLGYHFMQECRSPFDYCDVVTSTTHKNLRGPRGGIIFFRKGKNLRKRAGSFSQGDENEYDFEDRINFGVFPSMQGGPHNNHIAALAITLKQVATPEYKAYIQQVKKNAQALASALLRRKCRLVTGGTDNHLILWDLRTLGLTGKIFEKVCEACHISINKTPIYGDNGSISPGGVRIGTPAMTTRGCLEEDFESIADFLIRSTQIASNVLKEHGKVQKEFLRGLMNNKDVMELRNQVEAFASQFAMPGFDV

SEQ ID NO: 310858 - protein, 139 aa, Zea mays
  unsure (1)..(139): unsure at all Xaa locations
  Clone ID: MRT4577_46558C.1.pep
MSLDCTYQLPLCSYFQRLEGFCCHLGYIFMQECRSPFDYCDVVTSTTHKNLRGPRGGIIFFRKGKNLRKRAGSFSQGDENEYDFEDRINFXVFPSMQGGPHNNHIAALAITLKQVATPEYKAYIQQVKXNAQALASALL

SEQ ID NO: 310859 - protein, 400 aa, Zea mays
  Clone ID: MRT4577_46559C.1.pep
HASDQHIDAIERLCHERALTAFGLDPACWGVNVQPYSCTSANLAVYTGLLQPKDRIMGLEPPSGGHVSHGYYTPSGKKVSGASIFFESMSYKVNPQTGYIDYDKLEERAMDFHPKILICGGSSYPREWDFARMRLVADKCGAVLLCDMAHISGLVAAKECRSPFDYCDVVTSTTHKNLRGPRGGIIFFRKGKNLRKRAGSFSQGDENEYDFEDRINFGVFPSMQGGPHNNHIAALAITLKQVATPEYKAYIQQVKKNAQALASALLRRKCRLVTGGTDNHLILWDLRTLGLTGKIFEKVCEACHISINKTPIYGDNGSISPGGVRIGTPAMTTRGCLEEDFESIADFLIRSTQIASNVLKEHGKVQKEFLRGLMNNKDVMELRNQVEAFASQFAMPGFDV

SEQ ID NO: 310860 - protein, 72 aa, Zea mays
  Clone ID: MRT4577_4655C.1.pep
SDLFVMQVLQASTVMEVFGPELYFMDPSPPKVTPHEYVLGLVEQCTFHHLRVMPPDSSSTNESLVSLFIELN

SEQ ID NO: 310861 - protein, 161 aa, Zea mays
  unsure (1)..(161): unsure at all Xaa locations
  Clone ID: MRT4577_46560C.1.pep
MDLSRPTSSDLSLGLHSHGHAHAHARRHAVAAPLRLFDDAEEPKPERVVAGEADAERDDEDGGDQHFSLLGHSLFVKRPRRAGNGGGGGETSSCSSTSAALRPAKRQATGEGSGADLETRRAAVRAWGNQSLAEXDPDVHSLMEXELDXQVRGIELIASEN

SEQ ID NO: 310862 - protein, 39 aa, Zea mays
  Clone ID: MRT4577_46561C.1.pep
QYHPECPVDPHIQEIINSIYILPLLKTGGILTVVGGITN

SEQ ID NO: 310863 - protein, 106 aa, Zea mays
  unsure (1)..(106): unsure at all Xaa locations
  Clone ID: MRT4577_46562C.1.pep
MDLSRPASSDLSLGLHSHAHAHARVHAAAAPLRLFDDAKPERLVAGEADAERDDGDGGDQHFSLLGHSLCVKRPRRAVNGGGGGGGETSSCSXTXPALRPAKRQAA

SEQ ID NO: 310864 - protein, 78 aa, Zea mays
  Clone ID: MRT4577_46563C.1.pep
DQAKVIYPGFKTPNILFDSEYNAKLFDFGLAKDGPNGDKNHVFSRVMGTQGNVAPENLAPGNFCKHDLAARKGSDLGP

SEQ ID NO: 310865 - protein, 92 aa, Zea mays
  unsure (1)..(92): unsure at all Xaa locations
  Clone ID: MRT4577_46564C.1.pep
LCGIEQQHIDTLQLXLYLRYVVALGVVISGYRNRPLLAQSELNVVLQIRVSDYLIISLVEQEGIDLQGLRVDVAVERGLLHGQRRSAAGAVP

SEQ ID NO: 310866 - protein, 51 aa, Zea mays
  Clone ID: MRT4577_46565C.1.pep
SAQVSNKAYVLWMSRIKLHPMSSCSFIHKNIKHPSRHVLTSRCGAFSSRSA

SEQ ID NO: 310867 - protein, 35 aa, Zea mays
  Clone ID: MRT4577_46566C.1.pep
MILRSILATTANQLEFELAYVAIILRSITSFSRVP

SEQ ID NO: 310868 - protein, 95 aa, Zea mays
  Clone ID: MRT4577_46567C.1.pep
ICVYFLMLCLVKHTNDPDSSKVAQEKETSDPKYSKHAKSSPLFFLLALPPSKEGAITFSSPWFWVAWHWWSIGGKKNARGEGTINSKPHAPHHAG

SEQ ID NO: 310869 - protein, 650 aa, Zea mays
  Clone ID: MRT4577_46568C.1.pep
PAGILLAGYLPVLATVSNSHASVIRREPVQASEDTTKRRASKSKSFKDAENFEVLVLEKSCGCKFKSLRILLIAIISATVLTLVTPTLYERQLQSASRYVDVGWMWDRASSDPRYASSADVGWEDVYKALENLRSGNRQSHLRVGLLNFNSTEYGSWTQLLPADSHVISTVRLEHAKDSVTWQTLYPEWIDEEEETEIPSCPSLPEPNVPRGARFDVVAVKLPCTRVAGWSRDVARLHLQLSAAKLAVASSKRNHDVHVLFVTDCFPIPNLFPCKNLVTREGSAWLYSPDSKALREKLRLPVGSCELAVPLKAKSRLFSVDRRREAYATILHSASEYVCGAISAAQSIRQAGSTRDLVILVDETISDHHRRGLEAAGWKVRVIQRIRNPKAERDAYNEWNYSKFRLWQLTDYDKVIFIDADLLILRNVDFLFAMPEIAATGNNATLFNSGVMVVEPSNCTFRLLMDHIDEITSYNGGDQGYLNEIFTWWHRVPRHMNFLKHFWEGDSEAMKAKKTQLFGADPPVLYVLHYLGLKPWLCFRDYDCNWNNAGMREFASDVAHARWWKVHDRMPRKLQSYCLLRSRQKARLEWDRRQAEKANSQDGHWRLNVTDTRLKTCFEKFCFWESMLWHWGENSNRTKSVPMAATTARS

SEQ ID NO: 310870 - protein, 58 aa, Zea mays
  Clone ID: MRT4577_46569C.1.pep
ICYGDGVEVQKDVFELGRPRGLKNCCDWSVAGQGEVFIFTASNFFTGLSVFKFTDHSF

SEQ ID NO: 310871 - protein, 67 aa, Zea mays
  Clone ID: MRT4577_4656C.1.pep
LPMIHQRAAECETLYILGGRQSPYKSADQVCLYQQLTSSPKLSLSPRPYSSTRTVFASMFMHRHLAS

SEQ ID NO: 310872 - protein, 83 aa, Zea mays
  Clone ID: MRT4577_46570C.1.pep
STTCGSGCSLLPYPHWLHVYGARQLWPAAGLESFSSFLIASLLYCDVVQLALGVPERLEPGPVAQGEIPVIPREPPLVGCATC

SEQ ID NO: 310873 - protein, 177 aa, Zea mays
  unsure (1)..(177): unsure at all Xaa locations
  Clone ID: MRT4577_46571C.1.pep
KMFLGENLLFAGETGNMLLETTDDINNEQHDDAAVSEPQSADNDGSGPSGASSLPPEKDAYMGSKEDSINDYHDPSVVSEFQIANNDAKCEPSIAFLPEKDKDLEANKTSLEGPAKTGQLSSEASGSTLMISEPQVLVVSPQDGTLSFMNNNTNNQEMXGFLNVSPDTMDTEMQMDS

SEQ ID NO: 310874 - protein, 97 aa, Zea mays
  unsure (1)..(97): unsure at all Xaa locations
  Clone ID: MRT4577_46572C.1.pep
FSQLAGASAQQFFPFIKLPALTYAASLQQQLLMPFSQLPDVSPPAFLRRQQLLPFCLHGMPSXGTVSNXQHLLPFKHLALATLAVFYQQPIXGGALF

SEQ ID NO: 310875 - protein, 61 aa, Zea mays
  Clone ID: MRT4577_46573C.1.pep
RAAASHAVIAPPPPPPPSLPPPIASPLLRPPLPSASSSAEIARSPSTILCRKWLTERTCKP

SEQ ID NO: 310876 - protein, 134 aa, Zea mays
  unsure (1)..(134): unsure at all Xaa locations
  Clone ID: MRT4577_46574C.1.pep
MTSQLSAAVPRXHGLRGNTAARSRLAAVAPAXWALPRQAAHGIRCDYLGSATSLIMVTTTTLMLVAGRFPLVSCXNRIATAVLKLQARDSEQHTGDRAGLXVFITLACGAVHHILGGVILVGLEKVGARLQIIR

SEQ ID NO: 310877 - protein, 68 aa, Zea mays
  Clone ID: MRT4577_46575C.1.pep
CQVLSRSLGFDKGHRVPFASSASPILPSCVLLHVPSPWFQGFPAVLRWMLSIRCCSQCLALDSATHEA

SEQ ID NO: 310878 - protein, 122 aa, Zea mays
  unsure (1)..(122): unsure at all Xaa locations
  Clone ID: MRT4577_46576C.1.pep
ERMLSVATGVFTGSSGVKISGXVCPVHWHYRTRSHSXELTAGHYDITSHYLYARIVRMLTRHCAVLNFTCVXMLDHEQPYDAQCHPEALVQQVAVAAREVGVGLDGENALTRYYDTVHDQLG

SEQ ID NO: 310879 - protein, 120 aa, Zea mays
  Clone ID: MRT4577_46577C.1.pep
IFGTRHAQAGKEGGRERKKERTVSAAPPPFVPCTATSAHRIQEQRSPLYLSLSCSSVFIRAGRVGLSLFALVVPQLLNPDFVLSLVRRRRRRRRRRRFCRCGEALERLTEESEHTARRTT

SEQ ID NO: 310880 - protein, 62 aa, Zea mays
  unsure (1)..(62): unsure at all Xaa locations
  Clone ID: MRT4577_46578C.1.pep
FSPLPYIFKKGKHKKKLPLFPXPLKSPLQYFYFTESPILLFWQLFLNQIPISQPKLHISPPF

SEQ ID NO: 310881 - protein, 83 aa, Zea mays
  Clone ID: MRT4577_46579C.1.pep
QKCLVSVYGASCCFCTTTIHILVWVVCSLHSKMRSLQGDFSDDGSMPAHLLTACAGQLRLILHILLVCTSLCIVPSYYAFLLS

SEQ ID NO: 310882 - protein, 137 aa, Zea mays
  Clone ID: MRT4577_46580C.1.pep
GTFGSLLGHDIVKVYSCINISSSNFRSLFKIWLGLRASLDFFLFRMLSGRLWLQYSMIIMFSGVTWIITVRKFPQLGLQMLLYMMGFSTLDGIRDVFSSVFRGWRSFFLNWYENSQVILELGPLRRDSPRVFARELC

SEQ ID NO: 310883 - protein, 130 aa, Zea mays
  Clone ID: MRT4577_46581C.1.pep
ETKTNNGSRREISHREKEADRKRSEHAARTAYMLCRSSRRVLTLFCQSLESLSASTETPPSSSSSSSSNQRQHKIRVQKLRNHQSEEGQTNPPSTNEDRRTRKREIEGASLFLDPVSARRRTGNERRRCC

SEQ ID NO: 310884 - protein, 108 aa, Zea mays
  Clone ID: MRT4577_46582C.1.pep
MVAEAAPSSSAAIWSLRRDEITFDRLHKFWSALSSRARYELLRLDKQTLIEHARKNLYCSRCNGLLLESFTQIMMYGKSLHPEGSREPRIQEVEAEVQDPPVHPWGGL

SEQ ID NO: 310885 - protein, 272 aa, Zea mays
  Clone ID: MRT4577_46583C.1.pep
MGYNRHRRGRGSSSSSSRRTKQEASCDDGLGTSLPRQEEGTEDELKGSRIQLAMWDFGQCDVKRCTGRKLSRFGLLKELRVTNGFGGVVLSPVGTQCVSKEDHPIVQRKGLAVVDCSWARLSDVPFVKLRCGAPRLLPWLVAANPVNYGRPCELSCVEALSAALIICGEEDTAHLLLGKFKWGHAFLSLNRDLLKAYSQCENGAEIINVQKSWLSSNSSVPKPPVNGAEESRQNTEEGSEGDSDDDLPPLEKNMNHLNLDEDEESEEESESE

SEQ ID NO: 310886 - protein, 164 aa, Zea mays
  Clone ID: MRT4577_46584C.1.pep
DALFLVTEGKNPINMNSMSSSLARTGQWVFSQDIPTDVVVEVGEANFSLHKFMLVAKSNYIRKLIMESKDSDVTRINLSDIPGGPEIFEKAAKFCYGVNFEITVQNVAALHCAAEFFQMTDKYCDNNLAGRTQDFLSQVALSSLSGANRVLKSCEILLPISRDL

SEQ ID NO: 310887 - protein, 44 aa, Zea mays
  Clone ID: MRT4577_46585C.1.pep
ISIRAHLWMLLRSCCIFRHLWAYRFLEKKRKEKTRIHHYIDCNL

SEQ ID NO: 310888 - protein, 90 aa, Zea mays
  Clone ID: MRT4577_46586C.1.pep
APVANSRLNRLRPRTRSTEKVMRPPSEDAVWLRTTVDNGGHVFPLLPSPHTTAHRGRVWPGRARAEAGATSISICSQVGASQGVAATRRE

SEQ ID NO: 310889 - protein, 135 aa, Zea mays
  unsure (1)..(135): unsure at all Xaa locations
  Clone ID: MRT4577_46587C.1.pep
HPRAPGKWRARDHKYGTVGSVELSVVVRCLLPRAMPCGCGHRHIYLPRPIGSPAGRTDAGFAILPASRVGGRTWRSSPAPTPDFLXQSSGATGTRRPSTVPCPPRFHLAAXQSPLCMLGPLLFASRGPSIRVASR

SEQ ID NO: 310890 - protein, 590 aa, Zea mays
  Clone ID: MRT4577_46588C.1.pep
REPHFCIGTDTRFAVGVTFFRSIADLLYVLHIVIKFRTAYINPSSTLRVFGRGDLVTNPKEIAWKYIRSDLAVDVAAALPLPQIIVWFVIPAIKYSSAEHNNNILVLIVLAQYLPRLYLIFPLTYEIVKATGVVAKTAWEGAAYNMVLYLIASHVLGALWYLLSVDRQTFCWKTNCLNETGCDLKYLDCDTTPNATWANTTAVFSNCNASDTNISFDFGMFEPALSNQAPAQSFAMKYFYSLWWGLQNLSCYGQTLTVSTYLGETLYCIFLAVLGLVLFAHLIGNVQTYLQSITVRVEEWRLKQRDTEEWMRHRQLPCELRERVRRFIQYKWLATRGVNEESILHALPADLRRDIKRHLCLGLVRRVPFFSQMDDQLLDAICERLVSSLCTKGTYIVREGDPVTEMLFIIRGKLESSTTNGGRTGFFNSITLKPGDFCGEELLGWALVPRPTTNLPSSTRTVKALIEVEAFALQAEDLKFVASQFRRLHSKKLQHTFRYYSHHWRTWASCFIQAAWRRYKRRKMAKDLSMRESFNSVRLDEVDNEDDDSPPKNSLALKFIARTRKVPQNMKELPKITKPDEPDFSAEPED

SEQ ID NO: 310891 - protein, 46 aa, Zea mays
  Clone ID: MRT4577_46589C.1.pep
CFVTLTCVCTRSQCLLHNFLIFLCYFSEMRCANFIFVSFYLWLIKF

SEQ ID NO: 310892 - protein, 58 aa, Zea mays
  Clone ID: MRT4577_4658C.1.pep
LKKELRREPKRRRRPERHPLKKKKEKPGKRKKSSKACINQKRRRLKKLLLLLDLFPFD

SEQ ID NO: 310893 - protein, 74 aa, Zea mays
  unsure (1)..(74): unsure at all Xaa locations
  Clone ID: MRT4577_46590C.1.pep
MYRSLVAYVLPMTPCLLYGLYYGGFLIQFLIEKNGMMGSLPKPYGYFVPDVIVGAVVGLVVGWXFGPLSPVASR

SEQ ID NO: 310894 - protein, 76 aa, Zea mays
  Clone ID: MRT4577_46591C.1.pep
FCPVLYSDLQGSLFHVGALLHRAHAEPNEELPRVGIGGRRRGGGGEGEVLVLVDRVGDDAAGRRRGGGQTGEINAR

SEQ ID NO: 310895 - protein, 63 aa, Zea mays
  Clone ID: MRT4577_46592C.1.pep
KTPLTFISGYSPTLPYFEKKKTKTVQDVPEEKKRKQAHPRHETSCPGPSVATALLTSVGMTHK

SEQ ID NO: 310896 - protein, 204 aa, Zea mays
  Clone ID: MRT4577_46593C.1.pep
MGRPPCCDNGVGVKKGPWTPEEDIVLVSYIQQHGPGNWRSVPENTGLMRCSKSCRLRWTNYLRPGIKRGNFTPHEEGIIIHLQALLGNKWAAIASYLPQRTDNDIKNYWNTHLKKKVKRLQQPAADSFQTTASNAVTCSPNYYSPSSSHHSLQGMQPMSSYPHTTCSGGAPSNNEATTGYYYRRRLPLSPAWMRASPAAATANC

SEQ ID NO: 310897 - protein, 119 aa, Zea mays
  Clone ID: MRT4577_46594C.1.pep
WALAAVFVASFGVACFNPRALGTTARTCLPFLLAATVLGYMVGSGLPSGVKKVLHPIITCALSADLAAVAFGYLSGSGLDAVLGDYLTKAPSNPGAGDLLMGSLGSVIISFAFSMFKQR

SEQ ID NO: 310898 - protein, 97 aa, Zea mays
  unsure (1)..(97): unsure at all Xaa locations
  Clone ID: MRT4577_46595C.1.pep
MAAALEQLSSSKMFDGFNLRFRHQSATLGCAMTFSIYLPPSPASNISVLYWLSGLTCTDENFIMKXRAAAANGIALVTPDTSPRLLGRSGFQLKLLV

SEQ ID NO: 310899 - protein, 1208 aa, Zea mays
  unsure (1)..(1208): unsure at all Xaa locations
  Clone ID: MRT4577_46596C.1.pep
MALSASDVPTMYTVLVNSLSADEAARRPAEAALAQCETRPGFCSCLLEIISARGLACREDVRLLATVYFKNSINRYWRHRRDSYGISNEEKDHLRKNLLLNMREENSQIALQLAVLISKIARLDYPKEWPELLSVLAQQLQSADVLASHRVFMVLFRTLKELSTKRLAVDQKNYAEITGHLFEYTWNLWKSDVQTILQNLSMLSQRNDIDSVFEQSNDLALICDRWLLCLMIVRLLIFSGYASDSRTAQEVWQVREVCPTVLTAIKSLLPYYDTFKDKHAKLCDFAKRACTKLMKVLVTLQGRHPYSFVHETVLSATVDFCLNMITNPEQTGTTFEEFLIQSMVLVKSVLECKEYRPSPMGRVINENEPLSLEQRKKNFAAVASDMLKVILSGDRVVLLCNILVRRYFIFTAKDLEEWSENPESFHHEQNLVQWTEKKRPCAEALFIVIFEKYXRCEHLSFHCGCEYIQCSXSHDHVSLQLLAPVVVSVLREAMAISPPQETEVTAGMLLKDASYTAAGHVYYELSNYLSFNEWFHGSLSIEISNHHPNMRIIRRKIALLLGHWISEIKGDTRKLVYRALVGLLQDNDIAVRLAACSSLCYLFQESCFSELDLFECLPTCWTMSFKLIEDVQEFDSKVCIXTAIPILLLFNLXPVGIETSYCTIXITCRVKVSQKAVNGYVWQDLVSIVCFFLRNNSCTSTXEFSGLSSLLKLYLRGVRQPPSIIXEDRRENPRIPGPPIHSDIEAHVRTTTTGLDLRPVLWRWTDEGXLTTAEIRSHGKSNLGPEECYSDHLTXGFTYFFVGASVEXISVLLEHAGDKVIPFACQLSQFFQMIWNESAGESLLQIQLLTALRTFVSSLGFQSPLSYHMLIPILQSGINIDSPDALNLLEDSVLLWEATLSNAPSIVPQLLDLFPYLVGIMNRSFDHLEVTMKIIEDYIIFGGSEFLKSHGASLANIIDTIVGNVNDKGLLTALPIVDLLIQIFPLEAPPLISSALQKLTFISLSQDDGQNPSRTTVRASSGAILARLLVMNTNFSAQLLSEPALLASIQQAGISVNNNLLFSLVDMWIDKVDDANAIQQKEYAMALSVILTLQVPQVIDKLDDILSVCTTVIIGSREVKTDDDTSGDITSSSWIGNDGSGYSNTSSKELRKRQVKDSDPIKQTSLEMVLRENLKACAVFHGDAAFNAAIGRIHPSSFAQLQQALNTA

SEQ ID NO: 310900 - protein, 95 aa, Zea mays
  Clone ID: MRT4577_46597C.1.pep
APFLDFWVRGPLSSPVHWPLPYCRGPPFQFPPPGHNPYPPNWGPKMPPKCRLGTLETSCFPPHITWPHCFPVSPLSFVPFRGRNTPVSCFRVFWV

SEQ ID NO: 310901 - protein, 55 aa, Zea mays
  Clone ID: MRT4577_46598C.1.pep
STQTQAKRAHCCPRPWNHRAGVLSVSDSLLRGKKNRTRPMPNSHPKHQSVMLHGD

SEQ ID NO: 310902 - protein, 201 aa, Zea mays
  Clone ID: MRT4577_46599C.1.pep
IHAAGFSNPTPIQAQTWPVALQNRDIVAIAKTGSGKTLGYLIPAFIHLRRCHNNPMLGPTVLVLAPTRELASQIQAEVVKFGQSSRVSCTCLYGGTSKVPQLRELERGADIVVATPGRLNDILEMKRINLHQVSLLVLDEADRMLDMGFEPQIRKIVDELPNARQTLMYTATWPKEVTKIAGDLLRDPVQVNIGSIDELVA

SEQ ID NO: 310903 - protein, 443 aa, Zea mays
  Clone ID: MRT4577_4659C.1.pep
MARLVLSECCGLAPLRRLRAGRGAIAAPSPPALSAAPRRRPASASIHRDWALRVSAPTRLASAAVEEDKPSAAPGQEEGAAAGGEFDPGAPPPFGLAEIRAAIPKHCWVKDPWRSMSYVLRDVAVVLGLAAAAARLDSWLVWPLYWAAQGTMFWALFVLGHDCGHGSFSNNPKLNSVVGHILHSSILVPYHGWRISHRTHHQNHGHVEKDESWHPLPERLYKSLDFMTRKLRFTMPFPLLAFPLYLFARSPGKSGSHFNPGSDLFQPTEKNDIITSTASWLAMVGVLAGLTFLMGPVPMLKLYGVPYLVFVAWLDMVTYLHHHGHEDKLPWYRGKEWSYLRGGLTTLDRDYGWINNIHHDIGTHVIHHLFPQIPHYHLIEATEAAKPVLGKYYKEPKKSGALPWHLFRVLAQSLKQDHYVSDTGDVVYYQAESKTSTSAQKSD

SEQ ID NO: 310904 - protein, 194 aa, Zea mays
  Clone ID: MRT4577_465C.1.pep
DSWVELSRLVDERAVLKHFDWPEGKADALREAAFGYRDLKKVESEASSFCDDPRQPCSSALKKMQAVFEKLEHGVYSLVRVRDGAMSRYRGYQIPWEWMQDTGIVSQIKLQSVKLAMKYLRRVSSEIQAIQVGPDEEELVLQGVRFAFRVHQFAGGFDVDTMRAFQELKETASAFQQWGGQNQHLHQQRLAGRS

SEQ ID NO: 310905 - protein, 65 aa, Zea mays
  unsure (1)..(65): unsure at all Xaa locations
  Clone ID: MRT4577_46600C.1.pep
ASGXXLXFXXCCSLRPVXFXVXXLSXPFPXXLXXXSXXLLWXFXXXSLXRLXXPSLXCLVXXLWG

SEQ ID NO: 310906 - protein, 76 aa, Zea mays
  unsure (1)..(76): unsure at all Xaa locations
  Clone ID: MRT4577_46601C.1.pep
PRPQPRPPPRSGPXSXPQPPPRWRPPRPQPPPSWRPPRPQPPSGRLQPSPATVCVQCTNIFLCCNYYLYSRCGLGI

SEQ ID NO: 310907 - protein, 86 aa, Zea mays
  Clone ID: MRT4577_46602C.1.pep
VNFDGVGAKAKTLPFALAFVYLVAPTGAEEPARSTLRLAHYETKAYDDVAPSHILTRPRGPRGIQPIVTGPARRSVLRARFVITFL

SEQ ID NO: 310908 - protein, 252 aa, Zea mays
  unsure (1)..(252): unsure at all Xaa locations
  Clone ID: MRT4577_46603C.1.pep
MANPPAAGGKSFLQAMSTVTEEAAVPLRVVQMEGLAVLKIIKHCEEFAPALVTGQLLGLDVGSVLEVTNCFPFPIREDDEEADADGANYQLEMMRCLREVNVDNNTVGWYQSCLLGSFQTVELIETFMNYQENIRRCVCIVYDPSRSSQGVLALKALKLTDSFMDLYRNNGLTGEKLREKKLSWVDIFEEIPIXVSNSALVSAFMKELEPESPVSQCDFXRLKLSTAPFMERNLEFMIGCMDGPFSEQNKFP

SEQ ID NO: 310909 - protein, 63 aa, Zea mays
  Clone ID: MRT4577_46604C.1.pep
GGGFFTKDIIFFLSKKPGPKKKIFYGGKIRNNFGGIQGRKKWDHSGGFKLKKGGKHQHDYLGG

SEQ ID NO: 310910 - protein, 30 aa, Zea mays
  Clone ID: MRT4577_46605C.1.pep
SALFFYLHDSIVTHVLDLWRVYSVVVMYLC

SEQ ID NO: 310911 - protein, 86 aa, Zea mays
  Clone ID: MRT4577_46606C.1.pep
MYKPNLCFGDAIFLLVRLNLNDVQNWCTNAPHVPISLPFQYLSPLTSDAGISFLVNLRTSCPNYSYLCMFSYDLLLQICTTIYKPT

SEQ ID NO: 310912 - protein, 76 aa, Zea mays
  Clone ID: MRT4577_46607C.1.pep
APGVPAAGPNHKRFRRKRAGVSRCGVPVIPQPDPFSVVSSCSGVWVQSKRAASCKLQPVCVIQPPHLGMRVKKTVY

SEQ ID NO: 310913 - protein, 72 aa, Zea mays
  Clone ID: MRT4577_46608C.1.pep
NQTTQGVFNKKFGFPIPRSKSYSTQPESIERTVERKVEHSINQCTAASSQRKYAIYYLTDEKLPCGHYNHER

SEQ ID NO: 310914 - protein, 52 aa, Zea mays
  Clone ID: MRT4577_46609C.1.pep
GTPRSGYRVTRSRLNPEMLNTDASDADSIAPMATNSSTTPASPTDRYMHAIS

SEQ ID NO: 310915 - protein, 251 aa, Zea mays
  unsure (1)..(251): unsure at all Xaa locations
  Clone ID: MRT4577_4660C.1.pep
PRGRPGYFFLHRFIAFADICCLPLLAAPCPYRLVRRYHQIENQPXPRTRCXRGXVPSPHDHLHRLXFTRNRLQQFPYCADLAARQKDSVLPLLLAPVRLACNECLTNAXDTXTFQLRGSCHPTPVIRLLEMIPRARADRIPTAMSRACQHSPAAWTTAHTAHSLISMRCSDNNAAHASEXLRTDNCKIPVRQQIFXSIEWAYXTMYMRADYXLNDETEGXIVPDGVNAQLLYIHNRLVEHAPEIAFLDAVA

SEQ ID NO: 310916 - protein, 130 aa, Zea mays
  unsure (1)..(130): unsure at all Xaa locations
  Clone ID: MRT4577_46610C.1.pep
CVANFLLVSIIETVHSATKAXPGFIKLDEDILSPLAVKNELYTYQTLDFWEHITTPEMXLMNSGVYLSQYSHTYSHLLDSXHGIKTSTICGDVYMHSFDKVHPTSKNGPNVSISANARFVSCARLIKLHN

SEQ ID NO: 310917 - protein, 161 aa, Zea mays
  unsure (1)..(161): unsure at all Xaa locations
  Clone ID: MRT4577_46611C.1.pep
MAERTSAMAAPRPLLRRMLSFREPLLLLPCLLSVLGAAASXLARSHASLLHSLARSLVRPAPAAVNDNMKHAAAHARRPXAAAATRPDDGEDASGRWSKAEVEAVMAAIGLAASGRGEGLAAAVGRGDVAGLFDADEPSFAEVRGAFAVFDADRDGFIGAE

SEQ ID NO: 310918 - protein, 54 aa, Zea mays
  Clone ID: MRT4577_46612C.1.pep
KWTKSSCIMNPRAGILNAVCVVVLYARIKAGCHKLNMCANDHYSFNKVFSFVLT

SEQ ID NO: 310919 - protein, 102 aa, Zea mays
  unsure (1)..(102): unsure at all Xaa locations
  Clone ID: MRT4577_46613C.1.pep
PAGQAAALASLFAPPPPPPLPVFSFAAAQPKEEEAPTNSELQQHLAAQAAPSSSVSEDIMAPFASLDAAGIFELGDAASAAAYWSAGSCXWADVQDPSLYLP

SEQ ID NO: 310920 - protein, 448 aa, Zea mays
  Clone ID: MRT4577_46614C.1.pep
MTPAAAWCAQHRLRFLLPSLFLAPVLFFLLSPPSSPPFVSLPASGELPPLSSRLIWAQRRLVEWRPCGWWRTAPLQAPSRRNGYIRIDCYGGLNQLRRDLCDGIGVARLLNATMVLPKFEVAAYWNESSGFADVFDVDYFIEQTRGYVEVVKDLPAEIASREPFKVDCSKRKGHFDYVETVLPALLEHQYISLTPAMNQRRDRNPAYAKASYCQSCYSALRLNKNVESKAVELLQAIPKPFLSLHLRFEPDMVAYSRCSYTGLSSKSMDSIEAARREGRKVLTGDAARLWRNRGKCPLTPSETAFILQALGIPTNTNIYLAAGDGLMELEGFTSVYKNTYTKSSLLTHEAFENMHGNTKAALDYYVSVNSDAYVATFFGNMDKMVTATRTMQGLQRTLVLSRRAFANYTAAGLAGQQLAKAMWDAHREEYVRGRGSALPEYCFCEFKL

SEQ ID NO: 310921 - protein, 342 aa, Zea mays
  Clone ID: MRT4577_46615C.1.pep
MPRDSRPAGMRLFGVTIAPAPEADPPVRDPSPNPPVAAREDVMRKCKSMGNLAALGAVVDGGGGGADGGGAGDGYLSDGGLMQSSGKRRRAQERKKAVPWTEEEHRTFLAGLEKLGKGDWRGIAKNFVTTRTPTQVASHAQKYFLRQTNPNKKKRRSSLFDMMPRELSPAPNCPILPPSMAKVHDVVAMTKQLQNSNLEGTSSSNAASQVGRDLPPVPSFKATNMDPSFSKFSHMERVWRTPYPFGPVPRAPEGTPSPTAAAAAAAAAAANAAVPVSQANLTTACTSNTFLSQPKPSDTPSLPPKGGPPSEEDGLELTVAPPSQQNMTNMSSQNAVGVIQVI

SEQ ID NO: 310922 - protein, 224 aa, Zea mays
  Clone ID: MRT4577_46616C.1.pep
LLRVYNKDFRALRILGALNAKDAKSKNDSSGGSVAIHRTGYDLTTSSGSFQAPIVVMKPARTTEKHGVSLASVAPIAGLRSLRKLPAGRYSSFTGTNDKMQLRMSRDQSKSEETVSSASSPRPTSSSSPRNVLKKAEPERRSRPPVSPKSPSKKSNEAVSPKGRTRSKPPQVKCHRDEVLQITGNRISLAKQVDVSIMDCPKPLGGNSTFVPESNTAATASQKA

SEQ ID NO: 310923 - protein, 79 aa, Zea mays
  unsure (1)..(79): unsure at all Xaa locations
  Clone ID: MRT4577_46617C.1.pep
KPPRVKIPGPGEKKPPPFFGGSFGGPPGGGLPRTPGYALPXMLLGRAKGGFAVAKKKEKGGGGRKGFSVRRSYSLDPAG

SEQ ID NO: 310924 - protein, 123 aa, Zea mays
  unsure (1)..(123): unsure at all Xaa locations
  Clone ID: MRT4577_46618C.1.pep
PRVRKEVREEVDKYKVGAPARVGLVATDDAVKPSGNTELDPYQTYYFHVLNIRTKINKGTEEIITPVELIKKGEKEDSYESDLLDKLDMQTFSYGLQATMILXDGSAISPDALDLSEEDLIEK

SEQ ID NO: 310925 - protein, 172 aa, Zea mays
  unsure (1)..(172): unsure at all Xaa locations
  Clone ID: MRT4577_46619C.1.pep
KKETLALASLIDDEKKLGDCQFDLWKQYYVATCVTVFGKLRRSRRLDAVQSGCTALSIFKXGDLMVVANAGDSRVVLGTASDNGVVTXVQLIIHLKLNLPQEXSTSGGATTRXYYLADEPGVDFVWQPSQESSVLAMSCTFDDYYIKDYGVILAPEVTQRRTDGNDHSSSSG

SEQ ID NO: 310926 - protein, 47 aa, Zea mays
  Clone ID: MRT4577_4661C.1.pep
KKFKKKKKKKKKKKKKKKKKKKKKKKKKKKKKKKIKKKKKKKKKKAC

SEQ ID NO: 310927 - protein, 65 aa, Zea mays
  Clone ID: MRT4577_46620C.1.pep
SRTVQIMSSGQPLSRSVDRRLISVRPPNGLISPIAVRYICAVRSASGVVVFKVMQSRESSFRQGV

SEQ ID NO: 310928 - protein, 36 aa, Zea mays
  Clone ID: MRT4577_46621C.1.pep
FRLSSLKAWASVQCAHRAFCPSVGVYSSPNLLIRII

SEQ ID NO: 310929 - protein, 121 aa, Zea mays
  unsure (1)..(121): unsure at all Xaa locations
  Clone ID: MRT4577_46622C.1.pep
QKALALASLIDDEKKLGDCQFDLWKQYYVVACIAVFGKLRRSRRLDAVRSGYTALSIFKQGDLMVVANAGNSRVVLGTASDNGAVTLSXLIIHLKLNLPRKSLLTDHEFLCAGTTVVADVL

SEQ ID NO: 310930 - protein, 60 aa, Zea mays
  Clone ID: MRT4577_46623C.1.pep
VYYLADESGVHFVWQPNQESSVLVMSCAFDDYYIKDYGVILAPEVTQRRTDSNDHSSSSG

SEQ ID NO: 310931 - protein, 59 aa, Zea mays
  Clone ID: MRT4577_46624C.1.pep
NSIWAPPLNVLPLFVKKFRKKHPPKPLPPPFLYFSTRDGNRPKNSFLVQGFYSTETTNL

SEQ ID NO: 310932 - protein, 60 aa, Zea mays
  Clone ID: MRT4577_46625C.1.pep
VYYLVDELGVHFVWQPSQESSVLVMSCVFDDYYIKDYDVILAPEVTQRRTDNNDHSPSSG

SEQ ID NO: 310933 - protein, 97 aa, Zea mays
  Clone ID: MRT4577_46626C.1.pep
GPQSLLHLCYIEGVPLSNLNFVFVHPALCPPHPFSPIPSSGSPPALARHLCTTTRGAVSSKPPKKRNIWPRRRPTNIERVGRPGPSVPVPCRRGVSS

SEQ ID NO: 310934 - protein, 60 aa, Zea mays
  Clone ID: MRT4577_46627C.1.pep
VYYLADEPGVDFVWQPSQESSVLAMSRTFDDYYIEDYGVILAPEVTQRRTDGNDHSSSSG

SEQ ID NO: 310935 - protein, 58 aa, Zea mays
  Clone ID: MRT4577_46628C.1.pep
HTKIGRLVASGCRLAAWQPGRIWPVSSCLFYQVVGGKVRGTPLDFVGTRCLRLVKPGS

SEQ ID NO: 310936 - protein, 39 aa, Zea mays
  unsure (1)..(39): unsure at all Xaa locations
  Clone ID: MRT4577_46629C.1.pep
DFTLLSLSRATSECICATXICRSQATTFMRSSRRAPRMA

SEQ ID NO: 310937 - protein, 447 aa, Zea mays
  Clone ID: MRT4577_4662C.1.pep
MARLVLSECCGLAPLRLRAGRGAIAAPSPPALSAAAAPGRPAPAAIHRDWALRVSAPTRLTSAVEEDKRSSPLGEGDEHVAASGAAGGEFDPGAPPPFGLAEIRAAIPKHCWVKDPWRSMAYVLRDVAVVLGLAAAAARLDSWLVWPLYWAAQGTMFWALFVLGHDCGHGSFSNNPKLNSVVGHILHSSILVPYHGWRISHRTHHQNHGHVEKDESWHPLPERLYKSLDFMTRKLRFTMPFPLLAFPLYLFARSPGKSGSHFNPSSDLFQPNEKKDIITSTASWLAMVGVLAGLTFLMGPVTMLKLYGVPYFVFVAWLPAGTYLHHHGHEDKLPWYRGQEWSYLRGGLTTLDRDYGLINNIHHDIGTHVIHHLFPQIPHYHLIEATEAAKPVLGKYYKEPKKSGPLPWHLFGVLAQSLKQDHYVSDTGDVVYYQTDSKTNTSAQKSD

SEQ ID NO: 310938 - protein, 76 aa, Zea mays
  Clone ID: MRT4577_46630C.1.pep
MLDKLWDDVGGGPRPETGLEKLRKGTTARSVGNNKDADGGRFKRAQMMCVTPTTPVTPSSLFVETTPCGAGKVWGN

SEQ ID NO: 310939 - protein, 86 aa, Zea mays
  unsure (1)..(86): unsure at all Xaa locations
  Clone ID: MRT4577_46631C.1.pep
SSAFSASTRLMGMLYAEIVTGVHVHGAGLLVQILCGLGDPQLGNEHRLTTALMGVPAAAAITSMAPSGMNQLVGXVLGEVPARPAR

SEQ ID NO: 310940 - protein, 648 aa, Zea mays
  unsure (1)..(648): unsure at all Xaa locations
  Clone ID: MRT4577_46632C.1.pep
MALTLLRLGTAFLVLLLFSCAAEAGEVGVNYGMVANDLPNPASVVQLLKQNGITMVKIYDANANVLTSLANTGIKAMVMMPNQNLAHAARDPVYAAQWVQDNVKKYLPRTQINAVAVGNEVFDDPNVDKMTLVPAMNNVQKALANLGLANAVKVSTPIAFSAVRDSFPPSGSWFRDDIAQPVMKPMLQLLQRTGSFLTVNIYPCLTQMQQPDDIXLDYALGNAQHAVLDGSNKYYSLLDAQLDATHYAMEALGFGNVEAVLGETGCPNKGKIGKHRPPRRGVGSSRRRLLDDGGSEPEASVANARAYNNYVINRVLSGNTGTPHRPRADMHVYIFALFNENNKSADPDDVENNFGLFYPNMQKIYDFNFRGGGGGGGQPPAGPAAASWCVANAAVGDDRLQQALDYACGHGADCSAIQPSGSCFEPDTKLAHASYAFDSYYQRNGRATSACDFSGAASIVYQAPAVTCSSAKPSWCVAKPGAGGAQLQQALDYACGHGADCSAIQSGGSCFQPDTVAAHASYAFNSYYQRNGRARVACDFSGAGSIVYQQPSFCAATASWCVANPGVGDARLQTALDYACGHGADCRAIQPGGACFQPDNKASHASYAFNGYYQRNNRARVACDFSGAGSIVYQQPKVGNCVLPSNAG

SEQ ID NO: 310941 - protein, 84 aa, Zea mays
  Clone ID: MRT4577_46633C.1.pep
VQEETKKDITDKDVQMGFDISHRKHKGQYALRKLYHESPRLICVLYTSPTCGPCRTLKPILSKDCIGCEKEEGISGVYRGEQMS

SEQ ID NO: 310942 - protein, 530 aa, Zea mays
  unsure (1)..(530): unsure at all Xaa locations
  Clone ID: MRT4577_46634C.1.pep
MAVTRVAVAAALSAAPLSSRRHRVALPSACRLLPASATCCNSRAPMSLQAAAAAPAAGAVDEETPASSPPSDASKGVENLVIIGSGPAGYTAAIYAARANLKPVVFEGCQMGGVPGGQLMTTTEVENFPGFPDGITGPDLMDRMRKQAERWGAELYQEDVEFVNVKSSPFVIRSSDREVKCHSLIIATGATAKRLRLPREDEFWSRGISACAICDGASPLFKGQVLAVVGGGDVATEEAVYLTKYARHVHLLVRKDQLRASKAMQDXDYGECFRVLNNPNITVHFNTEAMDVVSNDKGQMSGVHLKRRDTGEESVLTVKGLFYGIGHTPNSQLLQGQIELDSAGYILVKEGSAKTSVDGVFAAGDVQDHEWRQAITAAGSGCIAALSVERYLVANDLLVEFHQPVQEETKKDITDKDVQMGFDISHRKHKGQYALRKLYHESPRLICVLYTSPTCGPCRTLKPILSKVIDEYGEFVHLVEIDIEEDPEIAEAAGIMGTPCVQFFKNKEMLRTVSGVKRKKEYREFIEANK

SEQ ID NO: 310943 - protein, 443 aa, Zea mays
  Clone ID: MRT4577_46635C.1.pep
MYGPPSRGGGGAGAAGEQPRVYQVWRGSNEFFLQGRFIFGPDVRSLFLTIFLILAPVVVFCIFVARHLINDFPDHWGVSVMVIVIVFTIYDLTLLLLTSGRDPGIVPRNTHPPEPEAIDMNNDAGNGQTPQQLRLPRTKDVIVNGTIVKVKYCDTCMLYRPPRCSHCSICNNCVEHFDHHCPWVGQCIGLRNYRFFYMFVFSTTLLCLYVFGFCFVYIVKIKDAEQSSIWKAMLKTPASIVLIIYCFICVWFVGGLSVFHFYLMSTNQTTYENFRYRYDRRANPYNIGILNNFMEIFCTAVPPSKNNFRARVPVEQGLQQSRAPARGFMSLNMDKPVGDFELSRKPVSWDEPRSAADIRDLEVGLGGLLDEKEGRIAHASPDLSRDALPELVEGRAGMHSRRSSWGHRSGTSASMDSIAVQMGTGDSHWGSISSAHGTTSGAH

SEQ ID NO: 310944 - protein, 58 aa, Zea mays
  Clone ID: MRT4577_46636C.1.pep
MIELTIYMVLSSMVRPSVCCSTCALYFLMSCSIASIVRILIFTWCIVFVDITSRVSVL

SEQ ID NO: 310945 - protein, 195 aa, Zea mays
  unsure (1)..(195): unsure at all Xaa locations
  Clone ID: MRT4577_46637C.1.pep
MYGPPSRGGGGAGTAGEQPRVYQVWRGSNEFFLQGRFIFGPDVRSLFLTIFLILAPMVVFCIFVARHLINDFPDHWGVSVMVIVIVFTVYDLTLLLLTSGRDPGIVPRNTHPPETDAIEMNNDAGNGQTPQQLRLPRTKDVIVNGVIVKVKYCDTCMLYRPPRCSHCSICNNCVERFDHHCPWVGXCIGLRNYRV

SEQ ID NO: 310946 - protein, 89 aa, Zea mays
  Clone ID: MRT4577_46638C.1.pep
RPICTFPPWCGRKKGWPVLGGAFYNTGFFFLCMVCLHYVVKNVRMRWSLAPMSSFLGRSYMHVWMQKKVFRNLIKNSLFFANTYVNKYM

SEQ ID NO: 310947 - protein, 133 aa, Zea mays
  Clone ID: MRT4577_46639C.1.pep
GLSQTIQGQNPTHWRKKDPRFHGGKLFHTITKTDTCPTGPAPRIHCLPARGRPNQGSLPYFRGPTRPKGPEKKKVNMQACRNFWAPPGFWVACSNPSWGEGACFPGHLFLKGAHNMHRPPPRISIISMSVTLD

SEQ ID NO: 310948 - protein, 66 aa, Zea mays
  Clone ID: MRT4577_4663C.1.pep
WSLSVSGCAWLRDSEVNRKLSSDQCILIARSSYNVHILIGPIRTPTEPCEVNGRQIEASDGRERPI

SEQ ID NO: 310949 - protein, 161 aa, Zea mays
  unsure (1)..(161): unsure at all Xaa locations
  Clone ID: MRT4577_46640C.1.pep
PFVLSGVKQNLQNPWDPGGLNFAGKVKKMFFWMGGGFFFLCLGKVKGEKKKRGLFKXKRXLSWGKVELISAFQPGGGPTTVLVGPRPSANFFAPLVLVLPVFPTNERGAFPPLWGGAPKGGFFFLAPAIIIFPFLGWGNRVVVNWYYFRGVLFLREGNLLF

SEQ ID NO: 310950 - protein, 91 aa, Zea mays
  Clone ID: MRT4577_46641C.1.pep
SSEPPTAGSAAQPPPPPLAEHFSLPHMAGMSFRQLAEESSFMPPHHYSRCCSPARAESTGTQVAHNFTVALAFRGKPEKGTSAAQPRAWAT

SEQ ID NO: 310951 - protein, 77 aa, Zea mays
  Clone ID: MRT4577_46642C.1.pep
PRVRPCHDNTQHSPYLGRAQISFHGHRRPTLTLAVASDLILAPSLAPLHRPPHRCLAVPWPSWISMVEFYPCMIPTQ

SEQ ID NO: 310952 - protein, 184 aa, Zea mays
  Clone ID: MRT4577_46643C.1.pep
GISKISTPRQSSTSSSQPKCSASAARAASITSTRTRRISAARADRPGRGGSTAARSTPSRSAGWTGSPSCSRSSRHGEPRSCAASAPTTPPASSSSASSSPTAAGRPSSSSSPRSHRPRRPPPPRGRGRQRRPLRLCHHRVLLHPAVRWTRPPARGRGTAPAPAPPPSSSSPPRCRRGRHHSRG

SEQ ID NO: 310953 - protein, 97 aa, Zea mays
  Clone ID: MRT4577_46644C.1.pep
PSGKNGPGVQEGVHEEEVGPRPRPWTRFPFFPPNPPPRRGGQKPGKFLKKGEGCPGLDQGPLDPVLELPQSLPPRGACLFTICHGPPRGQTAGSWPG

SEQ ID NO: 310954 - protein, 71 aa, Zea mays
  Clone ID: MRT4577_46645C.1.pep
TQLTSTVEMMIPSASGCNRVRMANELVAGSARRPSSPSTTWCHLLHHRVRAVRADPPLSRSLAYIFTDSQC

SEQ ID NO: 310955 - protein, 47 aa, Zea mays
  Clone ID: MRT4577_46646C.1.pep
RSMHSPSTMTRATLLPFEGLRLTSSVLSALWLVDTYPSWGEVSPGFY

SEQ ID NO: 310956 - protein, 38 aa, Zea mays
  Clone ID: MRT4577_46647C.1.pep
EQHALLLCQQQQKHQSDVLTTHKNVSRLAFIRKPRRTS

SEQ ID NO: 310957 - protein, 78 aa, Zea mays
  Clone ID: MRT4577_46648C.1.pep
IQQPNPEIRNSIKTQPDYKDTAYDSVTYHHGKCSAIALLDPIAKTANTGVVNVLLQASLMSSGYHGFARCAVRIYVKH

SEQ ID NO: 310958 - protein, 68 aa, Zea mays
  unsure (1)..(68): unsure at all Xaa locations
  Clone ID: MRT4577_46649C.1.pep
PYGVAPRTTRDVLTTWHPPLAYLFRHSVTTPTQAAERDXQGVAKVDDKRQEAIGGVDVVKRATGCDAR

SEQ ID NO: 310959 - protein, 103 aa, Zea mays
  Clone ID: MRT4577_4664C.1.pep
ALRWSTLPLQRATSAHTPFAGHPPSLRPATPSPIVGSASCHMVTSSSQPQLERRHLPIKPTIAHSTPISVKAKHTPDKILSSKLQLRLLPMLSALTSKGQQHR

SEQ ID NO: 310960 - protein, 68 aa, Zea mays
  Clone ID: MRT4577_46650C.1.pep
MGRGRGHLLLPAAADCLWALSCALLLHASPHGAGASGLLRVELSRRRGGLDQRALAAVNAARQHEASR

SEQ ID NO: 310961 - protein, 196 aa, Zea mays
  unsure (1)..(196): unsure at all Xaa locations
  Clone ID: MRT4577_46651C.1.pep
FRPVLVDGLLQLGCNWAIALCLCGLSRVETKQHRHNRTXPPVSSPTQAHARIHLETPAYDQGAARSLSAVPDQDIAGVVIPLPTATFLAHYRPTLTLCSTPLSSPSILLGYVCCSAVLLCFPNGFMLTAGSHFLVYTYFYSYFCTYLLQLCVILAANQQHGDLDKEWGVMDSKHKGKSPSCHLDACCCYIVSVNPA

SEQ ID NO: 310962 - protein, 80 aa, Zea mays
  Clone ID: MRT4577_46652C.1.pep
LYEPRIVLCDPSELNTEATMGHNDGGVVISDITNLIATGLQNHDQSTSQGLIMTCSPLALDELLKSSNLSLIEQALYNVY

SEQ ID NO: 310963 - protein, 105 aa, Zea mays
  unsure (1)..(105): unsure at all Xaa locations
  Clone ID: MRT4577_46653C.1.pep
EKTAMCVTVLQMLMLGSGYWLVTRPGKGLHCPQLVLTLTRFLHIASFYDTIGVYDSADLVQIYAVTXPNLLXAVVDFAGDELLHIATTVKVTHDHLDRALEDTNS

SEQ ID NO: 310964 - protein, 466 aa, Zea mays
  Clone ID: MRT4577_46654C.1.pep
MAGWTDSTGSGGRGSGGRGFTTPRYTTNSTNDMIHGGTSGGGGGSGRWRGGRSRGWPPPQPHHRYRRVDAVHRDSAPVSLSELQAASSTSSRHRYLTRSISADKSSASGTAGSTDTKEPDDKANRSAANFECNVCFDMAAEPVVTRCGHLFCWECLYQWLHVHSHHRECPVCKGQVADDAIIPIYGRGGSAASVDNAPPRPTGARVESTRQQQQQLPIFHPPNVFEFIGLGLAAAARGEHSTEQLLLPTFSHPTVFDDDDGHEWDMDLVNNGIDPLDLITPGTQDLDMDDYDGTIDFDDDDYEYDYHLAGATLFASAGTEASNPSSSQAHAGMINIRDNILGTATSIYHQQEFGYSGVRPHNNRGRRRHRNRARASANHSGADEMVIEDTSHFYLQNGGSSNISAGAAFRPNGGWTGRRGRSNLNSNSGGGSNLNSNSGGGSNMNSNSGGGRGGIQGTRRQRTNYN

SEQ ID NO: 310965 - protein, 47 aa, Zea mays
  Clone ID: MRT4577_46655C.1.pep
MSNKLKSKVQVFFNTSSGRSIDKPLGHLFLKQKKSLRLVLQPKAPNK

SEQ ID NO: 310966 - protein, 87 aa, Zea mays
  Clone ID: MRT4577_46656C.1.pep
GGGGFFFFFFFFFFFFFFFFFGKRRDSCIKRKFTSYPYGKGGSPLPYGPWGGGTIFLGGKKNKLGEKAPNYPGHIQDSPNMNITFHS

SEQ ID NO: 310967 - protein, 137 aa, Zea mays
  unsure (1)..(137): unsure at all Xaa locations
  Clone ID: MRT4577_46657C.1.pep
RILFLFPRFFFNDFRFDSMAGWTDSTGSGGRGSGGRGFTTPRYTTNSTNDMIHGGTSGGGGGSGRWRGGRSRGWPPPQPHHRYRRVDAVHRDSAPVSLSELQAASSTSSRHRYLTRSISADKSSRSGNRGFNRYQXA

SEQ ID NO: 310968 - protein, 40 aa, Zea mays
  Clone ID: MRT4577_46658C.1.pep
QTRSRSPETDHGRGASQRLNYGWVHREELTRSSRSCKRTL

SEQ ID NO: 310969 - protein, 92 aa, Zea mays
  Clone ID: MRT4577_46659C.1.pep
LFCTVHGDKANSKDNHSKASGPCGSFDITKLGASVNGNTVSTKAVHEACASACGGTGNHTILIPKGDFLVGLLNFTRPCKGDVTIQVNGNLL

SEQ ID NO: 310970 - protein, 123 aa, Zea mays
  Clone ID: MRT4577_4665C.1.pep
KKKGFLTQNCPQGGFFLFAQTLFAKKRLLAPPTTELNAFWAGFFNLHMVSHPPTTLGPFQPIFPFFEQGEPGFLLGPPPGKPHGGLRAPFAQKGERVPLQGGQLPKGGPRRGVPGEPFFSFGP

SEQ ID NO: 310971 - protein, 74 aa, Zea mays
  Clone ID: MRT4577_46660C.1.pep
ISSPIVATTGKCKTGLKKLKSLVPRERNAIHCCLKKFDGKMDGLIQIINLYTKFIEILLLRLLWIKLLVQLKTY

SEQ ID NO: 310972 - protein, 507 aa, Zea mays
  unsure (1)..(507): unsure at all Xaa locations
  Clone ID: MRT4577_46661C.1.pep
TSPRXAVNLVEDALMKYKHWEEEIDKWQTPVLQDERLPEWYKITLFNELYFLVAGVRVWIDSGSLVSDADNKSNPEESNLSHEIDDKENVGKFLYLEGIEYFMWCTYDVHFYASFALLDLFPKIELSIQRDFAGAVLREDNRRVRFLADGTWGIRKVIGAVAHDLGAHDPWHELNAYNIHDTSRWKDLNPKFVLQIYRDFAATGDKSFGKDVWPAVCTAMEYMEQFDHDGDGMIENDGFPDQTYDAWTVQGVSAYCGCLWLAALQAAAALAGSLGHDDYAERCMTRFVKAKTVFEARLWNGSHFNYDSGTSYSSRSIQADQLAGQWYTASSGLPPLFDEDRIKCTLQKIFDYNVMRVKGGRMGAVNGMHPNGKVDETCMQSREIWTGVTYSLAATMLLHGMEHQAFTTAEGIYTAGWSEEGYGYWFQTPEAWTIDGHYRSLIYMRPLAIWAMQWALSPPRSILEAPKVNTMDRAHISPGTFQFLQDSVRKMTPKNGCFGNTVINLDC

SEQ ID NO: 310973 - protein, 131 aa, Zea mays
  unsure (1)..(131): unsure at all Xaa locations
  Clone ID: MRT4577_46662C.1.pep
YSSFTIGNSRXLLYNPNSHAWGQVKNGCVMVTAHAVLGKRLFCIEWKNQRSLAIFNPADDSWQKVPVPLTGSSSTRFSLVVHEDKLLLFPLEEEPGYQTLMYDPAAPMGSEWCTSKLKPTGSCLCSVTIKA

SEQ ID NO: 310974 - protein, 56 aa, Zea mays
  unsure (1)..(56): unsure at all Xaa locations
  Clone ID: MRT4577_46663C.1.pep
GSTQLTQGPETPPXRPKTDKPTPTTIWSIKNPPXAXXEKHQQHTRDAKRRRSIIAA

SEQ ID NO: 310975 - protein, 219 aa, Zea mays
  Clone ID: MRT4577_46664C.1.pep
MVLPIKLLFVPATVFVSALIILSYFTSVPYLSYSDLPYYGSYFSRIPKCDIFQGEWVPDADTPPHYTNETCSYIQEHQNCMKYGRPDLEFLRWRWQPSRCDLPRFDADKFFRLVGNKTLAFAGDSLARNHMQSLLCLLSKVASPKELTERTDPIKIMHYERYNFTVKIIWSPFLVRTEEPDNNSGVFKLYLDEPDGRWLSGVAGFDYVILSGANWFTRQ

SEQ ID NO: 310976 - protein, 42 aa, Zea mays
  Clone ID: MRT4577_46665C.1.pep
YQPELLAPGQDIFVCASSCRVGCVSYMSTEYPVVSFRCIVTA

SEQ ID NO: 310977 - protein, 40 aa, Zea mays
  Clone ID: MRT4577_46666C.1.pep
ERREPARQGQVLFRPPGRTPLSPPKCSNRRKDRPEGLVRF

SEQ ID NO: 310978 - protein, 81 aa, Zea mays
  Clone ID: MRT4577_46667C.1.pep
LKGWAFTGPPSRKCSSPATRTSSWAAKFLLLHMQGLDNSVGLAGPPLSCDAKAVGQKIGKRFGICLVCPLRSPYISWVFST

SEQ ID NO: 310979 - protein, 193 aa, Zea mays
  Clone ID: MRT4577_46668C.1.pep
MSARSMETVEEDVEEYSWREVVLGHIARMAVPHLVPVVPGAQPELERETGERRRGRDLLVAVDFGPNSKHAFDWALGHIARMADTVHLVHAVSSVQNEIVYDKSRELMEDLAVEAFKTLLVRTKARIVEGDAGKVICREADRLKPAAVILGTRGRGLIQSVLQGSVSEYCFHNCKAAPIIIVPGKEAGEQSVL

SEQ ID NO: 310980 - protein, 120 aa, Zea mays
  Clone ID: MRT4577_46669C.1.pep
PGERSPSRDPGQVSHGRGDESRAPTATNRGPPTATAMNRVEHVVSTPPSSSDPSSAHHAINQLGSIIQLCSDVQLCSRAGHHRSSSTIPGLLSSARHLHPWLECVKWKQQMKRTWRRKLA

SEQ ID NO: 310981 - protein, 65 aa, Zea mays
  Clone ID: MRT4577_4666C.1.pep
GENPYIRRGIKGFVDFPRAERLRVRPRPREERGDLVFNLECQQTQLRVLMRKHRPAADMDLIEAG

SEQ ID NO: 310982 - protein, 121 aa, Zea mays
  unsure (1)..(121): unsure at all Xaa locations
  Clone ID: MRT4577_46670C.1.pep
APGPGNGDLFPGGNPPVPSVGGPNPPGXATYPGGTPPTXRGGANWAFPTPAGSLPPSXGDPGPGPRNPPQVLPGHGPPXPFPPXPNPGPSNRAGPKKRQGPGXSKTPPGPTPXPRPPPGPY

SEQ ID NO: 310983 - protein, 113 aa, Zea mays
  unsure (1)..(113): unsure at all Xaa locations
  Clone ID: MRT4577_46671C.1.pep
RGFIYTILSLIQTIIGISLIEILSKHSSQEVYFGQPLTFXWLSDVRALMAFKRFSEALVKTEGKVVGESPDPQLRNRNGAAXFPYMVLYPSTFYHXGPFAGFTALGFPNSISL

SEQ ID NO: 310984 - protein, 62 aa, Zea mays
  Clone ID: MRT4577_46672C.1.pep
VNSKAGLVIGALLPIQVALPKGVENASRLVERFRIHQQQAAMGGKATFLEEPSRVRARRARA

SEQ ID NO: 310985 - protein, 103 aa, Zea mays
  Clone ID: MRT4577_46673C.1.pep
LPGRTDNEVKNYWRTRVQKHAKQLHCDVGSRRFHDAMRNLWMPRLIERIHADDSAAVAANATGDVSHFYSASPSHELSSSSQPAPAYRNAAPNGSCARAPSPD

SEQ ID NO: 310986 - protein, 86 aa, Zea mays
  Clone ID: MRT4577_46674C.1.pep
SSLPCLIHLPILGTSGFVASSPSASPSDLAQMPPGRKGQRCTRETPGQSHVFKLLSLHERVVFMFCKFLFLVFSLQFLFCKPATGF

SEQ ID NO: 310987 - protein, 92 aa, Zea mays
  Clone ID: MRT4577_46675C.1.pep
CWCYTRIPAKGVNHHKQTVIFGAAIIYDESKEAFQWLLDTFKMAMNGTHPKTLLTDRSVALSEAVAATLPATAHRYCVWQIYQNALQQLSQA

SEQ ID NO: 310988 - protein, 83 aa, Zea mays
  Clone ID: MRT4577_46676C.1.pep
APLGAPNRGGVEVNTLGGSLFLIPPKVVRFSRFFQPQTKSRNFPPFGGFCTPNFVLKTPKGPPFEVFFFKKYFFKKGTLLISR

SEQ ID NO: 310989 - protein, 103 aa, Zea mays
  Clone ID: MRT4577_46677C.1.pep
MRRRLAEHLSYIPRSLSLIQLKEMSSVSAGHGRRPKKKLYHREPGLDKAMDLQKKPALLLRLRELILAQKKGSLLVRDLEKEVGFVQKWNFVSLIERHPNIFH

SEQ ID NO: 310990 - protein, 91 aa, Zea mays
  Clone ID: MRT4577_46678C.1.pep
DQTFWIHTPSLLSERITSPTVCGNGCRACPVLITLLDISESSVLARDIPRHERGGGEGQIDRTNCEGVAYLFPHSFRVNPRLPQRRGRDAN

SEQ ID NO: 310991 - protein, 179 aa, Zea mays
  Clone ID: MRT4577_46679C.1.pep
MASRRRTLLKVIILGDSGVGKTSLMNQYVNKKFSNQYKATIGADFLTKEVQYEDRLFTLQIWDTAGQERFQSLGVAFYRGADCCVLVYDVNSMKSFDNLNNWREEFLIQASPSDPDNFPFVLLGNKVDIDGGNSRVVSEKKAKAWCASKGNIPYFETSAKEGTNVEDAFQCIVKDALKN

SEQ ID NO: 310992 - protein, 72 aa, Zea mays
  Clone ID: MRT4577_4667C.1.pep
HAFADASVCMLVGRAARPGVRKTYFTWRVTTYVLIVRLNCYIAWIEQIFSSRSHEQVSIHLYIIHNRESHCI

SEQ ID NO: 310993 - protein, 97 aa, Zea mays
  Clone ID: MRT4577_46680C.1.pep
EFARTYIRTRASPTQLRKNTETGKKLHNPKAIGESNDHAIHAKAKWSRQPQKQSELIQASHQLARHPTDWRKTPPSKYAGRKALPRRTNYRRRNFKT

SEQ ID NO: 310994 - protein, 114 aa, Zea mays
  Clone ID: MRT4577_46681C.1.pep
TPLQGILSWRKVAPAPMEPVADGTAALTSTTGSCSVKYDWQGSWPAVNKFMADADVTLAYKPVRTRAIARSISSMIDITGTYSIDLTEVAQHDIRNHDAYVQWPHRRHYRLAHH

SEQ ID NO: 310995 - protein, 159 aa, Zea mays
  Clone ID: MRT4577_46682C.1.pep
MAQKDPAKGKGATTGPRPIPSPIRFSKFFRANLGILVTGGVGFFGSHLVDKFLENKKNEAIVVDNFFTGSKNNLKKGIGHPKFEFFRQDVTKPLFGEVDQIYHLVGPASPIFYKHNLVKTFKTNVFETLNLLGLAKKVGARILLTSTSEVYGDPLEHPQ

SEQ ID NO: 310996 - protein, 58 aa, Zea mays
  Clone ID: MRT4577_46683C.1.pep
RPGLKFSYTIGTGLQPSSCYITQTLVVIKAPQTRNERQGPAHRSRTSGVYVDEDQGRE

SEQ ID NO: 310997 - protein, 45 aa, Zea mays
  Clone ID: MRT4577_46684C.1.pep
LAFFTFMRRRWRLEHFFVFGAALLLLLLTPLALAADKMSYSFLLR

SEQ ID NO: 310998 - protein, 39 aa, Zea mays
  Clone ID: MRT4577_46685C.1.pep
KSAVNLTNTTGNQGVIFDRAKTLRWVSKVSGQANFPQLS

SEQ ID NO: 310999 - protein, 66 aa, Zea mays
  Clone ID: MRT4577_46686C.1.pep
EGKNLFKIWANSIQWPNWAGSPSPYGSLPANKSMPPSQPPKKIPQHQLIRFLHPNNWKAKGKNCGP

SEQ ID NO: 311000 - protein, 102 aa, Zea mays
  Clone ID: MRT4577_46687C.1.pep
PGSSLLIPLVFVWRSQVKGYCCCSWLGLPPSGLKGLVLVGPVLAVTFGVSPPAAANGNRSCCSRSCLKVSVSTAVDRGRWRSMPRVGFCWRSPPPGIRYVVT

SEQ ID NO: 311001 - protein, 216 aa, Zea mays
  Clone ID: MRT4577_46688C.1.pep
MAGRMVRSCVQTALKAANSVVGLAGMAVILYALWMLRAWYREIAGLGQRPPAPWFIYTFLGLGIFLCILTCSGHIAAETANGHCLYCYMTIVFMLIILEGAITLDVFLNSNWEEGFPPDPSGKFGDFKHFVRSNSEICEWVGLSVVAAQVLSIVLGMVLRTLGPDRETDYDSEDDTAVPARLPLLRNQSQHGSWDYAEATTSRQGLPLLHSKCVQR

SEQ ID NO: 311002 - protein, 103 aa, Zea mays
  Clone ID: MRT4577_46689C.1.pep
LEDTESISPFPFPMLYQRVYHESIIYSGQAVCSRVIPHSWRSRLRWVFIVLGPRARWRAMTQRWVEPLVTNWVCINDRSRGAPSDDAGRPLFVPVLQRPLSGF

SEQ ID NO: 311003 - protein, 81 aa, Zea mays
  unsure (1)..(81): unsure at all Xaa locations
  Clone ID: MRT4577_4668C.1.pep
INHPPYHTKLPPAACINSRRERAEDRVTXALVGGPAPPGGGGRAGARARGPDARQPREEQEGDGAEPVQPRRDADAGAAGQ

SEQ ID NO: 311004 - protein, 92 aa, Zea mays
  unsure (1)..(92): unsure at all Xaa locations
  Clone ID: MRT4577_46690C.1.pep
RGGEKPNRTGGGLTVDGDANGRGXXGKGENHDAHTHGANGDGNSPNNNEEDRAPTGDANDGGTTGPQNRARTHAGNHGGGARLGDNTSALPG

SEQ ID NO: 311005 - protein, 59 aa, Zea mays
  Clone ID: MRT4577_46691C.1.pep
LSLVHGLWYLVRVGLAPSARHGTHGYRCTFGSEGTSINPPPGDPGSLNPRASLARPPSR

SEQ ID NO: 311006 - protein, 73 aa, Zea mays
  unsure (1)..(73): unsure at all Xaa locations
  Clone ID: MRT4577_46692C.1.pep
RKLPFQRLGREIAPDWKKXXXFQSSAVAALQEAAEAYLVGLFEDTNLCAIHAKRVTIMPKDIQLARRIRGERA

SEQ ID NO: 311007 - protein, 50 aa, Zea mays
  Clone ID: MRT4577_46693C.1.pep
HVWRRNLVCQLKVLVTLSHLLIHPTIWTAMQKSLLSTLKPIHKCSTLRLA

SEQ ID NO: 311008 - protein, 97 aa, Zea mays
  unsure (1)..(97): unsure at all Xaa locations
  Clone ID: MRT4577_46694C.1.pep
MGAKMLALLALLALSSSAATSTFIPQCSQQYLYSATVVLFXFPTIQSYMVQEAIQASILRPISXTLQQPYALLQQTSLVHLYLQRILAHXLHQQLLP

SEQ ID NO: 311009 - protein, 103 aa, Zea mays
  unsure (1)..(103): unsure at all Xaa locations
  Clone ID: MRT4577_46695C.1.pep
SSLGGVKRSLSVFWKRRLSTVVVKLNFLXDLNEALTYIQQGHVRHPPNAVTDPXFFATRNMEDFITVVYSSNINRKVIGEQCCISIIFTPSSKKYILAKFYLA

SEQ ID NO: 311010 - protein, 88 aa, Zea mays
  Clone ID: MRT4577_46696C.1.pep
NARAGLATDQHPVRDEDRPGGRDTERLSSSVHSWVEEHKLSSIAAALATVVVAFLSYSLRSTPERPSNLRFIQTRMHSQALTLAELRR

SEQ ID NO: 311011 - protein, 59 aa, Zea mays
  Clone ID: MRT4577_46697C.1.pep
SLARRMSSHQLPAHAITLGGRLQDISGETSRGNGINDSGPYMISQRTAASAAGPIDVAI

SEQ ID NO: 311012 - protein, 101 aa, Zea mays
  Clone ID: MRT4577_46698C.1.pep
IGYLEAGRAFVSSFRRRRSPVSPLLAYCVKHQRRAVSMISSLPKHERLGVIYRVRSWRRPWNSKPGGKYLLDMMVSVSTWLRYAAHKFDYCISLSDNIHIM

SEQ ID NO: 311013 - protein, 536 aa, Zea mays
  unsure (1)..(536): unsure at all Xaa locations
  Clone ID: MRT4577_46699C.1.pep
MGVVYYQYKSEKEICSMPKKKKKKRPSELKQLIMTSGRHGRGRIRGRATEDIVISNAQTGEEYADERASIPQNTTVLVRRISIAGQLSEKIVLSPRPKVTEECSVPCKSVVXTQAQSHVLPQXQDEDAAIAAVIDAAELKWEQLPSKKGQGSGRFTSGRNYGSLEGEAPPPGYVCRSCGVPGHFIQHCSQENKMPPPGYICYRCRIPXGILSIVAQALVIPSATXKMLCSLVPVVTPVNGILDSLVPASPVSAVDDLPAELHCRLCKKVMRDAVLTSKCCFDSFCDRCIRDYIIKESKCICGVKTLADDLIPNQTLRSTISNMLGTQTSSGGSGITRHRSSSGSNPDPKIQSHTASAREVKQSRDHQLPAASAPDDVLQVATEGALVNQPREKLAPSAEILGKDGGNSAQVSAEKTVANAEALKVKDGTESTSKATTVSGSREYDVTRTDQPKKKRKKADLTKNVQPNNVGYGYNVSFDPAYYNPFINGHPWATEPYMYSSMGMPYAGYPMDPYCANPLGSILKRRHEHASIDTAC

SEQ ID NO: 311014 - protein, 227 aa, Zea mays
  unsure (1)..(227): unsure at all Xaa locations
  Clone ID: MRT4577_4669C.1.pep
MVVANGNVDMEEGTLEIGIEYRTVSGVAGPLVILDKVKGPKYQEIVNIRLGDGTTRRGQVLEVDGEKAVVQVFEGTSGIDNKYTTVQFTGEVLKTPVSLDMLGRIFNGSGKPIDNGPPILPEAYLDISGSSINPSERTYPEEMIQTGISTIDVMNSIARGQKIPLFSAAGLPHNEIAAQICRQAGLVKRKEKTDNILENAEEDXFAIVFAAMGXNMETAQFFKRDFE

SEQ ID NO: 311015 - protein, 122 aa, Zea mays
  Clone ID: MRT4577_466C.1.pep
CLEQSEQIIWVLEREKWIKILERRTQDINKEADELNKKLALIPSRQRMHVPRRVQLYEAHCVEASNLHINLRLVLEALENFAANSLQAFQDVAKSAEGTRLPRDNVRREHRSSERSSNYKTS

SEQ ID NO: 311016 - protein, 76 aa, Zea mays
  Clone ID: MRT4577_46700C.1.pep
AVVTTQSTFFFFFFFFFFFFFFFFFFFFFLKTQGFYSGVGTRKLISTPALRTQNLEQKKFGTFFVLTGKTAHPGFN

SEQ ID NO: 311017 - protein, 110 aa, Zea mays
  Clone ID: MRT4577_46701C.1.pep
RAGAFSRGRGFWTLFTQFGGLSKESKKGVCCSFPGTKNAIRVGLTTLKSMGFVRGGFSQRGWYLKIPPLVCLVRKEHQKVPFGGLFLKKKKNPPPKKKKKKKKKKKKKGR

SEQ ID NO: 311018 - protein, 88 aa, Zea mays
  Clone ID: MRT4577_46702C.1.pep
TVWISYFLIVTHLVTCYTDLKGKDSYRTRCADATTPLTCIFTVVQQHAADNSPILTSKAVRNIVSAEVASLSLTSMNMHNDTSSSTTR

SEQ ID NO: 311019 - protein, 73 aa, Zea mays
  Clone ID: MRT4577_46703C.1.pep
LRSRCTPSWGKNSAASSDPRRLLTHAKDCVRTDPAGVEVRGSAILRLAVTRTIGGEGKGAPILSARCPTDRWT

SEQ ID NO: 311020 - protein, 82 aa, Zea mays
  Clone ID: MRT4577_46704C.1.pep
SGLYFPQLVRCGLHVPEYSSRPRSRASISILVAVQRRTSWPFFSDYWIGLLSSDSMAGPERQMAVGEDTRKTSTIPAGSRYQ

SEQ ID NO: 311021 - protein, 87 aa, Zea mays
  Clone ID: MRT4577_46705C.1.pep
RGLFFFFFSNNTSFRLVLIECYQRTTKPLTSIAPATPPCTHHLCSLERVGYLPQFLQEQLWPQEQELAPLQPQVDPQSQAMMTDVKL

SEQ ID NO: 311022 - protein, 138 aa, Zea mays
  Clone ID: MRT4577_46706C.1.pep
KKIPAHMNNLTLHRSAILDRSKDIKNRSDSLAKSSISLGEAERSAPKKASASRKGVLSSEHMVPGTATPSQHKSLNSDRRKMHSIVAQKAPTNLRCSNGVPKIDKKETTPAKGAIFLAKLKLPEKTLLEKSRNVDRIT

SEQ ID NO: 311023 - protein, 61 aa, Zea mays
  Clone ID: MRT4577_46707C.1.pep
PRVRPRMHLISCCSSLRAIWAGTVCKRSCTYYSYMFSCCYYSFSEQPLCQERLMMQHSILY

SEQ ID NO: 311024 - protein, 112 aa, Zea mays
  Clone ID: MRT4577_46708C.1.pep
GLEGGPIPSPPFPWGWPFLFGRWATRFSPWDGGLVPPPVNVGLLPPLGPLGFPLLLSVFFFCGVVGGLPFCPGICFCLDFSPVGSLPGVPGLGPLCAGFVPFGGPPGRVANG

SEQ ID NO: 311025 - protein, 47 aa, Zea mays
  Clone ID: MRT4577_46709C.1.pep
KYCVYVECDCLREILNDCLYGTRNRGLIHASAHASAHASAHASADAG

SEQ ID NO: 311026 - protein, 78 aa, Zea mays
  Clone ID: MRT4577_4670C.1.pep
SIEGFFPWGGSSKHKRKVLWSNAAFTDLDPLFLKNLSAEIYVPGSRVILSLPQRGFFSRNLWEIFFSGAPAFFLSPPI

SEQ ID NO: 311027 - protein, 190 aa, Zea mays
  Clone ID: MRT4577_46710C.1.pep
MRSGRACSALASLLLLWLGVAAAQKASSWKTLSGKAPAIVAKGGFSGLFPDSSEYAYQFALLASSPDTILYCDVRLTKDEIGICLPDIKMDNCTNIPDFYAQGQKSYLVNGVPTSGWFSVDYNGTELEQVTLKQSINSRTPRFDSSFFPLLAVEDVQSKFKPSGIWLNVQHDSFYSQVNLSMRNYIISGS

SEQ ID NO: 311028 - protein, 283 aa, Zea mays
  unsure (1)..(283): unsure at all Xaa locations
  Clone ID: MRT4577_46711C.1.pep
MDFHSKATNYLVTASDDESIRLYDTQDAVVVCIALCSGKENFLSCSLDRTILLWDHRAEKPQGLLRAQRRPTVSYDAQGMVFAVAYGGRIKMFDIRKFGMGPFATFSVGTDDSEAHVVQFSGDGRRILLTTKAGRVHVLDSFEGNSIASFRAKPILTNSTLEASFCPEGNHIVSGSGDGSVYAWNVESGKXEEEHVILIPKQRIYYYDDVIYHTSVWLRYGHFLGHQVACWESTDVKPPRVRWSPGSLMFVTGTSELSCWVPDLSKLESFTISHTNTRSSSSL

SEQ ID NO: 311029 - protein, 87 aa, Zea mays
  Clone ID: MRT4577_46712C.1.pep
GNTPGKFHTKGNSLPLQKSRAMLGPGVPPPWARPTREARTDAWPHPYKLMKVPRAVSSGNKIKPFKGGAARQKMPKKPIYAAGGLPT

SEQ ID NO: 311030 - protein, 62 aa, Zea mays
  Clone ID: MRT4577_46713C.1.pep
FDIRKFGMGPFATFSVGTDDSEAHVVQFSGDGRRILLTTKAGRVHVLDSFEGNRLHAGKAQM

SEQ ID NO: 311031 - protein, 262 aa, Zea mays
  unsure (1)..(262): unsure at all Xaa locations
  Clone ID: MRT4577_46714C.1.pep
AWRSRTRCLRDCRDYNGRICSMDFHSKATNYLVTASDDESIRLYDTQDAVCLNTINSKKYGXXLVCFTDNPSIVLYSSNNGWDESLRLLSMXDPRFSGYYKGHLDRVVCIALCSGKENFLSCSLDRTILLWDHRAEKPQGLLRAQRRPTVSYDAQGMVFAVAYGGRIKMFDIRKFGMVVVIERWRGLVTWFGLYLTCYVXGPFATFSVGTDDSEAHVVQFSGDGRRILLTTKAGRVHVLGSFEGNSVSILTADQFVSCSCTY

SEQ ID NO: 311032 - protein, 323 aa, Zea mays
  Clone ID: MRT4577_46715C.1.pep
AWRSRTRCLRDCRDYNGRICSMDFHSKATNYLVTASDDESIRLYDTQDAVCLNTINSKKYGVGLVCFTDNPSIVLYSSNNGWDESLRLLSMNDNRFIRYYKGHLDRVVCIALCSGKENFLSCSLDRTILLWDHRAEKPQGLLRAQRRPTVSYDAQGMVFAVAYGGRIKMFDIRKFGMGPFATFSVGTDDSEAHVVQFSGDGRRILLTTKAGRVHVLDSFEGNSIASFRAKPILTNSTLEASFCPEGNHIVSGSGDGSVYAWNVESGKVACWESTDVKPPRVRWSPGSLMFVTGTSELSCWVPDLSKLESFTISHTNTRSSSSL

SEQ ID NO: 311033 - protein, 69 aa, Zea mays
  Clone ID: MRT4577_46716C.1.pep
PRQDRVPILFVFIEIFRPCQAPAAYYQSAIPSGHSISIISSQTYDRTNRAGPVHRSTSLQGRGGRDCRP

SEQ ID NO: 311034 - protein, 322 aa, Zea mays
  unsure (1)..(322): unsure at all Xaa locations
  Clone ID: MRT4577_46717C.1.pep
MTSPPRVSMEITDEVVKSMKIGLVFQGYNGRICSMDFHSKATNYLVTASDDESIRLYDTQDAVCLNTINSKKYGVGLVCFTDNPSIVLYSSNNGWDESLRLLSMNDNRFIRYYKGHLDRVVCIALCSGKENFLSCSLDRTILLWDHRAEKPQGLLRAQRRPTVSYDAQGMVFAVAYGGRIKMFDIRKFXNAHVVQFSGDGRRILLTTKAGRVHVLDSFEGNSIASFRAKPILTNSTLEASFCPEGNHIVSGSGDGSVYAWNVESGKVACWESTDVKPPRVRWSPGSLMFVTGTSELSCWVPDLSKLESFTISHTNARSSSSL

SEQ ID NO: 311035 - protein, 94 aa, Zea mays
  unsure (1)..(94): unsure at all Xaa locations
  Clone ID: MRT4577_46718C.1.pep
VPAALKPYRPFQKEKRVKKTKDFVGPVFXAKFYGPGDFKALETMPTRPKVYPTLLGALQGPPTSLVPPLQAPTKNVVAVLSPYVPKLKKKAEPP

SEQ ID NO: 311036 - protein, 150 aa, Zea mays
  unsure (1)..(150): unsure at all Xaa locations
  Clone ID: MRT4577_46719C.1.pep
PDLRLACKPTGEPFPRRPLPTGPPNSHPSFSRSPRLRLGKAGERGFGPEQWAREPRPAXSIACQAASSXISAEPVPDMEKRKLMNLLLLGAISLPXTVGMXVPYGAFFVLAXFGNAGGGTYAKDKLXNDITVEXWLNTHGPXNDRTLAQG

SEQ ID NO: 311037 - protein, 93 aa, Zea mays
  unsure (1)..(93): unsure at all Xaa locations
  Clone ID: MRT4577_4671C.1.pep
EGGGVGRVPHRVGEEVGRRKVRRARDGVHRXRGGVVRRAGVVQQVGVGGGGRXGPXRXXXPRXRRRRGGPSAMSGQGXEXARCRMSXXXRGRV

SEQ ID NO: 311038 - protein, 62 aa, Zea mays
  Clone ID: MRT4577_46720C.1.pep
PVLWETSSRTIREITLLMVRFAVRLHWWSMVHGDMRASEERTASEGICCGRGDSVRLNLIRD

SEQ ID NO: 311039 - protein, 39 aa, Zea mays
  Clone ID: MRT4577_46721C.1.pep
KQRSKSTLSMAVITTMRSPSKLSPHQSSAISIQRSASGS

SEQ ID NO: 311040 - protein, 43 aa, Zea mays
  Clone ID: MRT4577_46722C.1.pep
IKNCRVLFRMEPYIFKSLANYLRLEGFATDTSIKVEEILGLFL

SEQ ID NO: 311041 - protein, 48 aa, Zea mays
  Clone ID: MRT4577_46723C.1.pep
KNIERDGGRQVPRKIFYGEKKGHVPALGYCDGRTIIAHKVAFLTEVMV

SEQ ID NO: 311042 - protein, 314 aa, Zea mays
  unsure (1)..(314): unsure at all Xaa locations
  Clone ID: MRT4577_46724C.1.pep
MRLRGVLLVLVLLLAATAVVPVLLLSENDDDGVAPAPPFNSSRVKAVSWHPRIFVYKGFLSDAECDHLVTLAKKKIQRSMVADNESGKSVMSEVRTSSGMFLDKRQDPVVSRIEERVAAWTFLPQENAENMQVLRYEPGQKYEPHFDYFHDRVNQARGGHRYATVLMYLSTVREGGETVFPNAKGWESQPKDGTFSECAHKGLAVKPVKGDAVLFFSLHADGTPDPLSLHGSCPVIRGEKWSAPKWIHVRSYEXNPRQYSCSPRKPTAGCADRSERCAEWAAAGECARNPAYMLGAGDEGAPGQCRRSCGVCDS

SEQ ID NO: 311043 - protein, 408 aa, Zea mays
  unsure (1)..(408): unsure at all Xaa locations
  Clone ID: MRT4577_46725C.1.pep
MRLRGLLRLVLALLLAATAIVPVLLLSENGGGGVAPAPPFNSSRVKAVSWHPRIFVYKGFLSDAECDHLVTLAKKKIQRSMVADNESGKSVKSEVRTSSGMFRSVXAQDPVVSRIEERIAAWTFLPQENAENMQVLRYEPGQKYEPHFDYFHDRVNQARGGHRYATVLMYLSTVREGGETVFPNAKVGVXLARCSRSRLLCLLARSRSRSRRSRFSSMFVLDTXPNPMQGWESQPKDATFSECAHKGLAXLISHPREWCTRPGHAMPCLSSRTAGERREASDDDADRFAYCLLAARXVKPVKGDAVLFFSLHADGTPDPLSLHGSCPVIRGEKWSAPKWIHVRSYEXNPRQYSCSPRKPTARGCADRSERCAKWAAAGECAWNPAYMLGAGDEGAPGQCRRSCGVCDS

SEQ ID NO: 311044 - protein, 36 aa, Zea mays
  Clone ID: MRT4577_46726C.1.pep
GSSVFLFFKPPISLSLFKHQPSPLTHQSQWPLLVSS

SEQ ID NO: 311045 - protein, 99 aa, Zea mays
  Clone ID: MRT4577_46727C.1.pep
PHLVPPCPSAGSNRGQRAWAASSPAPWLGPRAQQSEARLCCSQRSPRPRLRLSLRWGPGSNPGRGGNILGPGPETGTTAGPYYSSRGLHLHGGGCLWSR

SEQ ID NO: 311046 - protein, 67 aa, Zea mays
  unsure (1)..(67): unsure at all Xaa locations
  Clone ID: MRT4577_46728C.1.pep
GEGGTYGXLTQLLALASHALAEAETRPEPKDLWEEPINATMWRPCSDQRDCKASXGKPXYIMISANG

SEQ ID NO: 311047 - protein, 322 aa, Zea mays
  Clone ID: MRT4577_46729C.1.pep
RNVLRQDQQIKIEELLQLQREKEELMKISDEFLEEVEARNHKVDELKAEAKFLVVSPRELQESRRSLQSEITKLLQSNSFLSNELNDSIEKQKRFEHDFSNLVSEAVSKDILSVIFRSLHEERTLQLKSLHNNFGCLQTAGGELYQEIKMMNKRLGDIEMENKYLGKELSRTMSVYGGSIVQTATGKGNPGRRDANLLNSNRKIQQDCHVNLEVEQEEVCNADFQESNETLQDEVRKLRSEVEMLRSKEKAVFNIKSCDEEIMKLLANMQMAIMNAALFKEKVLELIITCESFEISAMVQKEVLKEEIIQRNSYVDELKDQL

SEQ ID NO: 311048 - protein, 97 aa, Zea mays
  Clone ID: MRT4577_4672C.1.pep
LSAVGPTTPTSATFLTSSTIAVPLDEVNELIVSLDRSASFRSGSKSDISHRGHSDLRPPSTSSGSSGSVGPSEFSENKTVVLFLVSTSHVPDANTST

SEQ ID NO: 311049 - protein, 75 aa, Zea mays
  Clone ID: MRT4577_46730C.1.pep
WKASSPISSATSFMASMHPAFMPSPLDTLLITSDKSLYIGKLVKHGGVPNSIFDSWDMVKREVFPPPPSRVENVA

SEQ ID NO: 311050 - protein, 67 aa, Zea mays
  unsure (1)..(67): unsure at all Xaa locations
  Clone ID: MRT4577_46731C.1.pep
MLKELDHAVPSYEGEALRLFFMTSSKTFDYICSXLVCEDMISMAPAGLINIEGRLLNVDNHVAIVMM

SEQ ID NO: 311051 - protein, 43 aa, Zea mays
  Clone ID: MRT4577_46732C.1.pep
TIEMKRKKYCSKKKKKKKKKKKKKKKKKKKKKKKKKKKKKKKK

SEQ ID NO: 311052 - protein, 129 aa, Zea mays
  Clone ID: MRT4577_46733C.1.pep
PEKEISMWRLAKKARLEKRSNAAYSNLEARETIPNAYLPCHRMRMANQPLKLKLYMQCNTQEQNSIQFCDVPADGRCGRCALTQRFHGNHTGTSWQYGNQLSSQTGSSATRMKIFEKPFKKMKKIVIQG

SEQ ID NO: 311053 - protein, 166 aa, Zea mays
  unsure (1)..(166): unsure at all Xaa locations
  Clone ID: MRT4577_46734C.1.pep
KGQPPTPIGVPPPPRRGGLGPPPGAPTGPLNPPTPPPHSGPPTPRGFLAPPPPLGGPPGAPNPPNPPGPQQXKNPGLPPPPGADPPGGRAPPPEXKPARGRPPPNCLPTKNKPPWXGEPPFAPEPCPPLGQGGRPPNPQGYGPPRQGPXKNWIPPRKRSPRGGGPP

SEQ ID NO: 311054 - protein, 240 aa, Zea mays
  Clone ID: MRT4577_46735C.1.pep
EYLAPRSYGPPPAPPPHPCLSASGSPPPLSRPPRPQFDPNFAWHQAKPLPPCCVKARAAAPESEAKCHATVVSGWFTETRSRCGKASKLQYYNNPMWPGETHSLKVDKILYQGKSPYQEVLIFESLTYGKVLVLDGIVQLTDKDECAYQEMITHLPLCSIPSPKKVLVIGGGDGGVLREIARHGSVESIDICEIDQLVIDVCKDFFPDLSVGFEDPRVRLHVGDAVEFLRNSPEGTYDAI

SEQ ID NO: 311055 - protein, 55 aa, Zea mays
  Clone ID: MRT4577_46736C.1.pep
PTRASHSRRLCHYLRAVTVSSVRGVLKPYHSTNARPGTLSLTRFFSFFFPSTKYF

SEQ ID NO: 311056 - protein, 49 aa, Zea mays
  Clone ID: MRT4577_46738C.1.pep
RAVVLPDDASILKYIRFYRGLLLVLNKALADDDRVKTCTSPIVSNYISF

SEQ ID NO: 311057 - protein, 41 aa, Zea mays
  unsure (1)..(41): unsure at all Xaa locations
  Clone ID: MRT4577_46739C.1.pep
YFFFQKPKTREIXHXXYIFSPQNTSFTHPQVTTPKLIGQKT

SEQ ID NO: 311058 - protein, 117 aa, Zea mays
  unsure (1)..(117): unsure at all Xaa locations
  Clone ID: MRT4577_4673C.1.pep
RRGRTKSSLIRTARDVNFIELRHCSLRHMLLLMRPVKIQPALCLGVQAANCGRCAKLLLTRTACPTDRQRCMPPAGRDHARRRPEAGGGTSSRDSRHXLPACIVLLILXWIHAEAPS

SEQ ID NO: 311059 - protein, 108 aa, Zea mays
  Clone ID: MRT4577_46741C.1.pep
RACCVRQHIYVAPHFSRSPVVWFHLISTRMLSSRLLCTPSRPPRQSWSPAGSITWVFARRLCQVVVVARRSSLLRLLPVRLVSIPGVRGRCVERLESFPGLSGAAGPP

SEQ ID NO: 311060 - protein, 40 aa, Zea mays
  Clone ID: MRT4577_46742C.1.pep
LNFCNSLAVLIFLSFLVVINKGNSYHLVIFLSFTLNFFTI

SEQ ID NO: 311061 - protein, 219 aa, Zea mays
  unsure (1)..(219): unsure at all Xaa locations
  Clone ID: MRT4577_46743C.1.pep
VRNSRVDPRVRAALAMRSGYLLRLSVALSPRSRSYRAPPPPRRRPGPHSPDPENLLTPRWQLTPRYVAKQFGRHGAISGVPPASLWPTPEQLRELEAEEQEWYPSLATMQESLRLQQQALEARRQAREQRIAKCMAKMPQMIENWRKQXRERWEKIQADKERRARLQAEAQERLGYHVDPRSARFQELLQDLDKQQRKRLEEERQRHEKDARIAAMSSA

SEQ ID NO: 311062 - protein, 98 aa, Zea mays
  Clone ID: MRT4577_46744C.1.pep
EPWPQPCALCKVKPNSQVMGGIPVTASLAYKLANILAPSVSNVARKWFCGKLPITNDLPAIIIIWQGPTFKTGALLLAGLIFFNNTGGVVFDSLHAYI

SEQ ID NO: 311063 - protein, 78 aa, Zea mays
  Clone ID: MRT4577_46745C.1.pep
WTYRSWILHFCGHVDHPLCQIIRTATRARDDLSSLSSKPRNLICLSELLRQYLCCVANLLMDMHSECHYCSVCIIKRV

SEQ ID NO: 311064 - protein, 113 aa, Zea mays
  unsure (1)..(113): unsure at all Xaa locations
  Clone ID: MRT4577_46746C.1.pep
VCWFRLGRRRCSTAGQKMVRCSLNEETQLNKHGLVSKQLISCLAASLVFVSPPSQVPMTCSIILLGRLDHFYHITIXYSTKSLETTKRILSAACSCLVSAHAYHQRSKXSRPP

SEQ ID NO: 311065 - protein, 252 aa, Zea mays
  unsure (1)..(252): unsure at all Xaa locations
  Clone ID: MRT4577_46747C.1.pep
MATAGKVIKCKAAVAWEAGKPLSMEEVEVAPPQAMEVRVKILFTSLCHTDVYFWEAKGQTPMFPRIFGHEAGGIVESVGEGVTELAPGDHVLPVFTGECKECPHCKSAESNMCDLLRINTDRGVMIGDGKSRFSIDGKPIYHFVGTSTFSEYTVMHVGCVAKINPEAPLDKVCVLSCGISTGLGASINVAKPPKGSTVAIFGLGAVGLAAAEGARIAGASRXIIGVDLNXPSRFEEARKFGCTEFVNPKDTA

SEQ ID NO: 311066 - protein, 66 aa, Zea mays
  Clone ID: MRT4577_46748C.1.pep
QEDRHARAQADHQRRAQFRALRHGPPRPFSGGTAWGAPVNGFRRSPTTDVGYSTASAVVDVTMALA

SEQ ID NO: 311067 - protein, 39 aa, Zea mays
  Clone ID: MRT4577_46749C.1.pep
KKKKKKKKKKKKKKKKKKKKNKKKKKKKKKLVPDRTTAR

SEQ ID NO: 311068 - protein, 109 aa, Zea mays
  unsure (1)..(109): unsure at all Xaa locations
  Clone ID: MRT4577_4674C.1.pep
ELFKVIFKFYRTARDVNFIELRHCSLRHMLLLMRPVKIQPALCLGVQAANCGRCAKLLLTRTACPTRRQRCMPPAGRDHARRKTGGWRGTSSRDSRHRLPXCIVLLILP

SEQ ID NO: 311069 - protein, 98 aa, Zea mays
  unsure (1)..(98): unsure at all Xaa locations
  Clone ID: MRT4577_46750C.1.pep
GRWGGGGGLINLEPGAHGLLRSRPFRQFFRPDNFFSCHSPPGNNWAXKCHYTNGRXVRGSXLXLXRMEPENWDCLQRLQVXLSLSGGATSGXGTLFIF

SEQ ID NO: 311070 - protein, 111 aa, Zea mays
  Clone ID: MRT4577_46751C.1.pep
MSRRYDSRTTIFSTEGSLYQVEYAMEAIGNAGSALGILLFDGVVLVVEKKENSKLLQTSRSAEKMYQIDSHLARAVAGIMSDANILITPDRLPAPPPTPLPLPSNPSPDQH

SEQ ID NO: 311071 - protein, 85 aa, Zea mays
  Clone ID: MRT4577_46752C.1.pep
PTRSPTRSPTRSPTRPKKKKKKRKLKKEKKEKKKKDKQSKGSNFNISCLLPHSSNIISLNINPLTLILQPPYYKNLTVKKLNLLK

SEQ ID NO: 311072 - protein, 74 aa, Zea mays
  Clone ID: MRT4577_46753C.1.pep
RETPHLLGQYYGRHKGQTHKPKAGDSHECTFQGKNTGRITCTYLGWGETKTKGGALVRRQMILTRMGRPQNNYT

SEQ ID NO: 311073 - protein, 134 aa, Zea mays
  Clone ID: MRT4577_46754C.1.pep
KLYSPTGHTGVWPGKRQASPGGGAQSNGGLGLGQNRPCDSKAPIPQGGPSAKKVPYGSLGWGGMTKWGGTWFQPKGGGQGNVLTGPRLNGERITPNHHRGGSALNHKGLARNGGVQTCSKAFIGGLISSRVSGF

SEQ ID NO: 311074 - protein, 95 aa, Zea mays
  Clone ID: MRT4577_46755C.1.pep
MGAYKYVSELWRRKQSDVMRFVQRVRCWEYRQQPAIVRLTRPTRPDKARRLGYKAKQVDLLQCRSHWRARTLTVMDLWVGEGRGWCSRAGIAIVI

SEQ ID NO: 311075 - protein, 116 aa, Zea mays
  unsure (1)..(116): unsure at all Xaa locations
  Clone ID: MRT4577_46756C.1.pep
MAYKTLFIVALHALSVSATNAYIIPQCLLAPSAIIPQCLSPVTSIGLXHLAVQAYKLHQALAASVTEQPIAQLQQQFLVHVTIQTIVTHDQQTLSHLAIVNPIDYLQQQLLASNPL

SEQ ID NO: 311076 - protein, 73 aa, Zea mays
  Clone ID: MRT4577_46757C.1.pep
HKHTQGPRSHQPKKPMLMGNTLQATPPGTARREEKPTATFITQALTGGQITLTSTLGILYTITLEQCSLGEGT

SEQ ID NO: 311077 - protein, 67 aa, Zea mays
  Clone ID: MRT4577_46758C.1.pep
PTGTHVHDSSPSYPSAPNPAISAMPPAIGKLPLLDPQLCFFPSVNPQFPSMDLYHKLSNPPLCVFFS

SEQ ID NO: 311078 - protein, 94 aa, Zea mays
  Clone ID: MRT4577_46759C.1.pep
GGKLPKKYLTNHFTNSGQSFLWRVCQFLSGPTFNLLPNQFFNHLTNLLHHPFSFQTFPNFPFKTLKKIPRFIPIPVIPPKRKPLINLSHPKNPF

SEQ ID NO: 311079 - protein, 61 aa, Zea mays
  Clone ID: MRT4577_4675C.1.pep
TIADSKATSAITLRTRKFMTNRLLARKHFVLEVIHHGRANVSKAELKARLAKAYEVKDPNT

SEQ ID NO: 311080 - protein, 88 aa, Zea mays
  Clone ID: MRT4577_46760C.1.pep
PLRGGNTPKPFFFFFFFFFFFLKKKIFFFSFFFFFFFFGSKNHLIEANVQRAMCKANSYSLMLWPGELAQQERTILRAPRVLCVVTTA

SEQ ID NO: 311081 - protein, 43 aa, Zea mays
  Clone ID: MRT4577_46761C.1.pep
QRSYQIKKHLLGLDYPQKLLYLFNSLKTQTRVSQLCFPLFYNC

SEQ ID NO: 311082 - protein, 91 aa, Zea mays
  Clone ID: MRT4577_46762C.1.pep
VFVFISILLKTMYDRMVVFIRVILDSHCAAQPQYPQSPYTQQYWLCYTSYLIFTGARSRESKLMYASVRSFNFYIGALNFNSLALVLQSSL

SEQ ID NO: 311083 - protein, 100 aa, Zea mays
  Clone ID: MRT4577_46763C.1.pep
HQAWLKEDRQSLPSHGDSSFHVKITFLEELCEDHVFVIKPIFHMKWSKSKFKQRPCYVFRRHCLMNIFSNASVSKSKKQNGPKLQLMTGCNSLDEIKHCL

SEQ ID NO: 311084 - protein, 51 aa, Zea mays
  Clone ID: MRT4577_46764C.1.pep
LGDTEALFCYHVAYWYLRYRNFSKTYHSNGLFCIYWFRGSHFQLNGLRFSQ

SEQ ID NO: 311085 - protein, 75 aa, Zea mays
  Clone ID: MRT4577_46765C.1.pep
KLLPLPKRQKLIPSPVNYRSPATVAHGHPAPEYRGLRTSRAAPPVTLCSSSLTPAALRGLRLDLDSYHSDGRLRR

SEQ ID NO: 311086 - protein, 34 aa, Zea mays
  Clone ID: MRT4577_46766C.1.pep
MNNQRKPGDWNCKNCQHLNFSRRDYCQRCDQPLT

SEQ ID NO: 311087 - protein, 273 aa, Zea mays
  Clone ID: MRT4577_46767C.1.pep
NSARGAAARYRAAVGLQVEAFWRRNYMILVGAGAVVVCVALWRIMFGIASTFVGLSEGMAKYGFLALATALVAFAGMYARARLTINPDKVYRLAMTKLNTSAAILEVMGAPLTGTDVRAYVMSGGGPKLKDFKFKLGSKRCFLIFPIKGSERRGLVSVEFKKKNGQYDMKLLAVDIPMASGPDQRLFLVGDEQEYKVGGGLISELRDPIVKAMAAEKEFDYLDEREDEEDERREREEAEQEEAEALRREEERLRQQAEERRRREEAESLEKAS

SEQ ID NO: 311088 - protein, 50 aa, Zea mays
  Clone ID: MRT4577_46768C.1.pep
CVAIRHHLVLTHYDLTPGVDEAAVLVSVSSVYSLERRARSARADSARAAR

SEQ ID NO: 311089 - protein, 128 aa, Zea mays
  unsure (1)..(128): unsure at all Xaa locations
  Clone ID: MRT4577_46769C.1.pep
QRRVLFFFFFFFAQGYSFNFDKVFDHSATQEHVFTEISQLVQSALDGYQVXIRMTVTXLPLQTLETIIFGLFFQYLVTXMQLKNDKPFXCIFAYGQTGSGXTYTMMGNPELQEQKGMIPRSLEAPSHA

SEQ ID NO: 311090 - protein, 126 aa, Zea mays
  Clone ID: MRT4577_4676C.1.pep
APLHGAELPHAQISPLLLQLALSSSSSSPWCPALARSPSAVLPLAAGTIELRALLAFCPCVRPATWKIRARPCQASSASLPWPPPSPGCPWSCSLLLQAGVDLPSPIFFKLLDTARPSPRFPLAGR

SEQ ID NO: 311091 - protein, 91 aa, Zea mays
  unsure (1)..(91): unsure at all Xaa locations
  Clone ID: MRT4577_46770C.1.pep
PPPEEEAVENLQQXLLASNPLALANVAAYQQQQQLQQFLPALNQLAMXNPIFYLQSXQXXSSIXLNINNXPTYXQQXXXQQXXXQQILPXL

SEQ ID NO: 311092 - protein, 61 aa, Zea mays
  Clone ID: MRT4577_46771C.1.pep
MREAVASAPESVGKLLVVMQGDCAPTTSRMAGELLRAVRMEHEKKGMAAAYDSRTIHVMPY

SEQ ID NO: 311093 - protein, 125 aa, Zea mays
  unsure (1)..(125): unsure at all Xaa locations
  Clone ID: MRT4577_46772C.1.pep
APGPGLFATRQGAKRGRAPRRISWATPGVPRARRWRKQASNWQPGLPKGGSGAXRGMPERPPGGRKXXKFGLKRXXPPPPQNVFFFASRYFFFLVLCLLVVRINPGTKMFAPQGRFLQHAPPAKK

SEQ ID NO: 311094 - protein, 60 aa, Zea mays
  Clone ID: MRT4577_46773C.1.pep
MSSCKRYLPSLILLLLHGGRGAVAAKVSAIVVFGDSSVDTGNNNFIPTIARSNFWPYGRD

SEQ ID NO: 311095 - protein, 50 aa, Zea mays
  Clone ID: MRT4577_46774C.1.pep
IRNYCEVACIIQNSGRIIVTTINTITYRYYIRCMLQSASLQMRLIIQLLL

SEQ ID NO: 311096 - protein, 155 aa, Zea mays
  Clone ID: MRT4577_46775C.1.pep
PRVRPHKHHTLYLLLLFIQPIQRRQSRGPSMQLIPTNTLPASCDPARTLPFPRPWGTNSSRSTTTKTSQTTTSWTACLTHRLGSHHMSIANLNHNLNEVHTHMLPFHNHLHHQTTGERCTGCQYTTWPTIRTMRYKVTIPRSYGAMTTMDLGVST

SEQ ID NO: 311097 - protein, 93 aa, Zea mays
  Clone ID: MRT4577_46776C.1.pep
SSSHQKEVSGVRFTAQEKAAKTSALEPRKEKINGARAKSGGFPRGHVNTQGPAKKLFSCGSGKIRPPHIIFWFSQAAIAIKTVGFFIQQAPPL

SEQ ID NO: 311098 - protein, 331 aa, Zea mays
  Clone ID: MRT4577_46777C.1.pep
MASTTTTFLAVLLVVAASAAPARSCSPRDIHALLSVKQALGNPASLSTWTPASPNCCAWDHLRCNDAGRVNNVFIDGADDVRGQIPSAVGGLTELMSLTLFRLPGLTGAIPACLTALSNLQFLTVSHTNVSGAIPESLARLRGLDSVDLSSNRLTGGIPAAFADLPSLRSLDLRHNQLTGPIPAGLVQGQFRSLVLSYNQLTGPIPRDDARDEINTVDLSHNRLTGDPSHLFAAGRPIGKVDLSWNYLNFDLSRLVFPPELTYLDLSHNLIRGTVPLSLERLSTLQKLDLSYNRLCGPLPKGHGVIKHGCKPYAHNQCSKGTPLVGCQDLE

SEQ ID NO: 311099 - protein, 331 aa, Zea mays
  Clone ID: MRT4577_46778C.1.pep
MDSTTTTFLAILLVVAASAAPARSCSPRDLHALLSVKQALGNPASLSTWTPASPNCCAWDHLRCNDAGRVNNVFIDGADDVRGQIPSAVGGLTELMSLTLFRLPGLTGAIPPCLTALSNLQFLTVSHTNVSGAIPESLARLRGLDSVDLSSNRLTGGIPAAFADLPSLRSLDLRHNQLTGPIPAGLVQGQFRSLVLSYNQLTGPIPRDDARDEINTVDLSHNRLTGDPSHLFAAGRPIGKVDLSWNYLDFDLSRLVFPPELTYLDLSHNLIRGTVPLSLERLSTLQKLDLSYNRLCGPLPKGHGVIKHGCKPYAHNQCSKGTPLAGCQDLE

SEQ ID NO: 311100 - protein, 969 aa, Zea mays
  Clone ID: MRT4577_46779C.1.pep
MAAPPKAWKAEYAKSGRASCKSCRSPIAKDQLRLGKMVQASQFDGFMPMWNHASVDDVEGIDALRWDDQEKIRNYVGSASAGTSSTAAPPEKCTIEIAPSARTSCRRCSEKITKGSVRLSAKLESEGPKGIPWYHANCFFEVSPSATVEKFSGWDTLSDEDKRTMLDLVKKDVGNNEQNKGSKRKKSENDIDSYKSARLDESTSEGTVRNKGQLVDPRGSNTSSADIQLKLKEQSDTLWKLKDGLKTHVSAAELRDMLEANGQDTSGPERHLLDRCADGMIFGALGPCPVCANGMYYYNGQYQCSGNVSEWSKCTYSATEPVRVKKKWQIPHGTKNDYLMKWFKSQKVKKPERVLPPMSPEKSGSKATQRTSLLSSKGLDKLRFSVVGQSKEAANEWIEKLKLAGANFYARVVKDIDCLIACGELDNENAEVRKARRLKIPIVREGYIGECVKKNKMLPFDLYKLENALESSKGSTVTVKVKGRSAVHESSGLQDTAHILEDGKSIYNATLNMSDLALGVNSYYVLQIIEQDDGSECYVFRKWGRVGSEKIGGQKLEEMSKTEAIKEFKRLFLEKTGNSWEAWECKTNFRKQPGRFYPLDVDYGVKKAPKRKDISEMKSSLAPQLLELMKMLFNVETYRAAMMEFEINMSEMPLGKLSKENIEKGFEALTEIQNLLKDTADQALAVRESLIVAASNRFFTLIPSIHPHIIRDEDDLMIKAKMLEALQDIEIASKIVGFDSDSDESLDDKYMKLHCDITPLAHDSEDYKLIEQYLLNTHAPTHKDWSLELEEVFSLDRDGELNKYSRYKNNLHNKMLLWHGSRLTNFVGILSQGLRIAPPEAPVTGYMFGKGLYFADLVSKSAQYCYVDRNNPVGLMLLSEVALGDMYELKKATSMDKPPRGKHSTKGLGKTVPLESEFVKWRDDVVVPCGKPVPSSIRSSELMYNEYIVYNTSQVKMQFLLKVRFHHKR

SEQ ID NO: 311101 - protein, 96 aa, Zea mays
  Clone ID: MRT4577_4677C.1.pep
HSQPHATKPHPHTGQASLYNLDVQRASTGGPLAALRGPETSPLGGNNAPSPCPKVRSAGEAADAVPDHVRPDTTTPSYDHANLEHVPRSTSTKSSV

SEQ ID NO: 311102 - protein, 331 aa, Zea mays
  Clone ID: MRT4577_46780C.1.pep
MASTTTTFLAILLVVAASAAPARSCSPRDIHALLSVKQALGNPASLSTWTPASPNCCAWDHLRCNDAGRVNNVFIDGADDVRGQIPSAVGGLTELMSLTLFRLPGLTGAIPACLTALSNLQFLTISHTNVSGAIPESLARLRGLDSVDLSSNRLTGGIPAAFADLPSLRSLDLRHNQLTGPIPAGLVQGQFRSLVLSYNQLTGPIPRDDARDEINTVDLSHNRLTGDPSHLFAAGRPIGKVDLSWNYLNFDLSRLVFPPELTYLDLSHNLIRGTVPLSLERLSTLQKLDLSYNRLCGPLPKGHGVIKHGCKPYAHNQCSKGTPLAGCQDLE

SEQ ID NO: 311103 - protein, 107 aa, Zea mays
  unsure (1)..(107): unsure at all Xaa locations
  Clone ID: MRT4577_46781C.1.pep
QFGFGAVLEAELAAKKTELQRCRDTAERVEAENGWLCAELDAAALEFTSRKQRIVELEKEMAELRXTAADADNCSSSASAPSERLESSSAAPKPNRASLAGLNRRAS

SEQ ID NO: 311104 - protein, 49 aa, Zea mays
  Clone ID: MRT4577_46782C.1.pep
SVSPAHLGSTRPLFFICPPLKISLCASPDTSFHCSFGTQKILLVFRGRL

SEQ ID NO: 311105 - protein, 980 aa, Zea mays
  Clone ID: MRT4577_46783C.1.pep
MAAPPKAWKAEYAKSGRASCKSCRSPIAKDQLRLGKMVQASQFDGFMPMWNHARCIFSKKNQIKSVDDVEGIDALRWDDQEKIRNYVGSASAGTSSTAAPPEKCTIEIAPSARTSCRRCSEKITKGSVRLSAKLESEGPKGIPWYHANCFFEVSPSATVEKFSGWDTLSDEDKRTMLDLVKKDVGNNEQNKGSKRKKSENDIDSYKSARLDESTSEGTVRNKGQLVDPRGSNTSSADIQLKLKEQSDTLWKLKDGLKTHVSAAELRDMLEANGQDTSGPERHLLDRCADGMLFGALGPCPVCANGMYYYNGQYQCSGNVSEWSKCTYSATEPVRVKKKWQIPHGTKNDYLMKWFKSQKVKKPERVLPPMSPEKSGSKATQRTSLLSSKGLDKLRFSVVGQSKEAANEWIEKLKLAGANFYARVVKDIDCLIACGELDNENAEVRKARRLKIPIVREGYIGECVKKNKMLPFDLYKLENALESSKGSTVTVKVKGRSAVHESSGLQDTAHILEDGKSIYNATLNMSDLALGVNSYYVLQIIEQDDGSECYVFRKWGRVGSEKIGGQKLEEMSKTEAIKEFKRLFLEKTGNSWEAWECKTNFRKQPGRFYPLDVDYGVKKAPKRKDISEMKSSLAPQLLELMKMLFNVETYRAAMMEFEINMSEMPLGKLSKENIEKGFEALTEIQNLLKDTADQALAVRESLIVAASNRFFTLIPSIHPHIIRDEDDLMIKAKMLEALQDIEIASKIVGFDSDSDESLDDKYMKLHCDITPLAHDSEDYKLIEQYLLNTHAPTHKDWSLELEEVFSLDRDGELNKYSRYKNNLHNKMLLWHGSRLTNFVGILSQGLRIAPPEAPVTGYMFGKGLYFADLVSKSAQYCYVDRNNPVGLMLLSEVALGDMYELKKATSMDKPPRGKHSTKGLGKTVPLESEFVKWRDDVVVPCGKPVPSSIRSSELMYNEYIVYNTSQVKMQFLLKVRFHHKR

SEQ ID NO: 311106 - protein, 78 aa, Zea mays
  Clone ID: MRT4577_46784C.1.pep
NPFCTNAGLTSRFFYGLFYFFVFVFWVLSFFFVLVSEFGVPLMNEDYVHGHSDHMPHGIQLPLLPQSESTSEFQPLEY

SEQ ID NO: 311107 - protein, 77 aa, Zea mays
  Clone ID: MRT4577_46785C.1.pep
GCATHSALHCQGRSKLWRGSSMVSSDMVTCRTQGGPPELRPAGDGRRGRPTRLHYLHAPAQALRVPGGGLRLHRGGH

SEQ ID NO: 311108 - protein, 212 aa, Zea mays
  unsure (1)..(212): unsure at all Xaa locations
  Clone ID: MRT4577_46786C.1.pep
MSPIMAARGQGLGQGQGHQVQQDFDFFLVVDFEATCEKDARIYPQEIIEFLAVLVDGATGLIASAFRRYVRPRHRPVLTQFCRDLTGIRQEDVDGGVDLGEALWLHDAWLKAATAGAGNKGRVRLAVVTWGDWDCRTMLEFECRFKGIEKPSYFDRWVNLRVPFQAAXRXRSAGXLQEAVRAAGLDWEGRLHCGLDDATRRGCLLRHAARGQ

SEQ ID NO: 311109 - protein, 101 aa, Zea mays
  unsure (1)..(101): unsure at all Xaa locations
  Clone ID: MRT4577_46787C.1.pep
RGFVMLLQSAXDTALDIVGAGSELGXWLAMTVIDXLLIPLNLDEISINLWPNSSGMQTVQMASSLLXARHFGEGVLVGLGVGTXWAVEYTKVKIIKLLEGY

SEQ ID NO: 311110 - protein, 43 aa, Zea mays
  Clone ID: MRT4577_46788C.1.pep
FYKNEMILEKWKMSFDGSGHVSYLSLKMCTRKLLTYIPNYKTL

SEQ ID NO: 311111 - protein, 43 aa, Zea mays
  Clone ID: MRT4577_46789C.1.pep
AHDWGLLTCTHVTNKVFCLKKIGMCIVTTLFPWHIAIHKTTPT

SEQ ID NO: 311112 - protein, 196 aa, Zea mays
  unsure (1)..(196): unsure at all Xaa locations
  Clone ID: MRT4577_4678C.1.pep
APNRNAARSSLLPSLPSRPQAASPATHTSXPAPLPATFTAGPPAAPTPXPLPSPPSSRSPLTSLPLSRRTWTSKRAMAPPALNLAGSGRLRAKSAINGSTPARSDRSPPSPPPERRPARPAAPPLPVPAHVCTRTTLVPLARSTCSRPPPQPAXSSQGPVQAASSAALSPPARGTTLRSAPTPPPSSPVLVGHPRS

SEQ ID NO: 311113 - protein, 99 aa, Zea mays
  unsure (1)..(99): unsure at all Xaa locations
  Clone ID: MRT4577_46790C.1.pep
VLLKDRRATTGGCRALLSRYAVRFSPPWSTGSDSPLRRXLHGTATRTFPLIPIVVEQTGRGERAYDIYSRLLRERIVCVMSPIDDSVASLVIAQLLFLQ

SEQ ID NO: 311114 - protein, 47 aa, Zea mays
  Clone ID: MRT4577_46791C.1.pep
PCYNPGPTLLTSARAIFVTCPNISTITMLVWRVTECHFRTQKPHTIC

SEQ ID NO: 311115 - protein, 37 aa, Zea mays
  Clone ID: MRT4577_46792C.1.pep
KKKKKKKKKKKKKKKKKKKKKKKKKKKKKKKKKKKKK

SEQ ID NO: 311116 - protein, 131 aa, Zea mays
  Clone ID: MRT4577_46793C.1.pep
RRGLFLRSCSPFLPGRAGESFFPLETGQPSFFPVILWTPFLCALQQCSFPFPGPTACVLVRRVRFRRGPSWAAGFPPLASLFLWGPWISWRGQVVHLGVGPVAVAGVVAHGAGTNKHLDKVKRETEHNEDK

SEQ ID NO: 311117 - protein, 66 aa, Zea mays
  Clone ID: MRT4577_46794C.1.pep
RTLAPTTTPTASLRPTTSPRGGAATLRTCQTSLVITSTRRPCCRYMNPELDGNKMLCYANFTNGRV

SEQ ID NO: 311118 - protein, 76 aa, Zea mays
  Clone ID: MRT4577_46796C.1.pep
MVCSFICLERDPHSIDYIYRVRNNSLAALADDGKFLLAARKCRKPTCTDYLISLDKVDMSKGSSTYIGKLRSAFEI

SEQ ID NO: 311119 - protein, 65 aa, Zea mays
  unsure (1)..(65): unsure at all Xaa locations
  Clone ID: MRT4577_46797C.1.pep
TYXXQXLXQQQXLXQIXPTLTQQKIXNLXXYLQQLLPFNQXTXSNSXXYXXQXQXLLNPLXXXNP

SEQ ID NO: 311120 - protein, 158 aa, Zea mays
  unsure (1)..(158): unsure at all Xaa locations
  Clone ID: MRT4577_46798C.1.pep
MLFITFLQNWKKELEKHREKLLSGSESSSKKRQRKKKEKKKSGRXQKFSILLNVTIKSLQXYSSSSSSSSDSSSSSSDSDDEDKKQGKRKKKKKNRSHKSSESSMSETESDSKDSLKKKKKSKDANEKEKDIKGLSKKRKMYPEDKPLSXESLSESDY

SEQ ID NO: 311121 - protein, 133 aa, Zea mays
  unsure (1)..(133): unsure at all Xaa locations
  Clone ID: MRT4577_46799C.1.pep
MRQNQERFGFEPGPEFTLQMFQKYADDFSDQYFMKDKCRDSPPSVEDIEGEYWRIVERPTEEIEVIYGADLETGTFGSGFPKLCPEMKSDVEDKYAQSGWNLNNLPRLQXHVEDHHLYSLNYMHWGAPKMWYG

SEQ ID NO: 311122 - protein, 92 aa, Zea mays
  Clone ID: MRT4577_4679C.1.pep
MASPWHSSRWCFSRPSSSCQQWMALRGSCKKPTSSSSRSDAIIGLGEAKDRIGLLHTLATLPTHSESVPINKGTPLEDQKKASNEVGSRCTT

SEQ ID NO: 311123 - protein, 93 aa, Zea mays
  Clone ID: MRT4577_467C.1.pep
VLRSGSVFEKLGVTVNRSLSDGKPIAEHELRKSTTLGLIWRALGAAGRVSNCSDIDYMLLSSSEAGELLTVGPPPSTGARACVQKPHASADAW

SEQ ID NO: 311124 - protein, 285 aa, Zea mays
  unsure (1)..(285): unsure at all Xaa locations
  Clone ID: MRT4577_46800C.1.pep
MAAAGSSPSFSSSSKRLEGKVALVTGGATGIGEAIVRLFMEHGAKVCIADIQDEAGQQLRDALGGDAQGAMFVHCDVTSEEDVSRAVDAAAERFGALDVMVNNAGVTGAKVTDIRAVDFAEARRVLDVNVHGVFLGMKHAARAMIPRKRGSIVSLASVASAIGXGTGPHVYTASKHAXVVGLTKSVAAELGRHGVRVNCVSPYAVPTALSMPHLPQGARADDALKDFLAFVGGEANLKGVDAMPEDVAQAVLYLASDEARYVSAVNLMVDGGFTAVNNNLRAFED

SEQ ID NO: 311125 - protein, 163 aa, Zea mays
  Clone ID: MRT4577_46801C.1.pep
STRPDFSLLLYRRPPPWPAVAPSHGVPKLLAFPLPRAQLLRAHLPAGHDAPAPVESLRSPGSSRALASAHPYARFSPMVSSPTLCSSVRMAASSASNPLHHGGARRRSSPASLAESPSPRASSFASRCCPTSLVRAPILHHSAPPNCFDPWRVPARRPSPGAP

SEQ ID NO: 311126 - protein, 61 aa, Zea mays
  Clone ID: MRT4577_46802C.1.pep
VLFPLKKTPPPPNWAFFLGLNHWRQLAFLFKKKKKKKKKKKKKKKKKKKKKKKKKKKKTPP

SEQ ID NO: 311127 - protein, 101 aa, Zea mays
  Clone ID: MRT4577_46803C.1.pep
KGGPAFLDKPPPGAPFFNPNPKTPVQAPKKKKKKPQGGILEKMAHSLGGAQNPWGKKKTKGGGQPGQRAQKKKENVFKAQRPLLGPFYKGGGGPPQKQRIG

SEQ ID NO: 311128 - protein, 63 aa, Zea mays
  Clone ID: MRT4577_46804C.1.pep
AYILPNKLLLNKICMCHRSLATPNVNKQKCSKRESNVVVGISLSLSNHCQMSRKLTTPLEYQQ

SEQ ID NO: 311129 - protein, 63 aa, Zea mays
  Clone ID: MRT4577_46805C.1.pep
TTISSAPSGQLWVSVPRTLTTWWGPGSSWLLRKSCKYAQIRYTCCLYCHGVSYSLLLYDDIAC

SEQ ID NO: 311130 - protein, 50 aa, Zea mays
  Clone ID: MRT4577_46806C.1.pep
KSSCNDFLSFMNKKKEVSFSASTRKIPCSRRTHGGTFRVPNFTNASHLNA

SEQ ID NO: 311131 - protein, 63 aa, Zea mays
  Clone ID: MRT4577_46807C.1.pep
TIFRFFLSFKKIPPKVQKIFWWEDQYVATYGSKIPPGNQSHKKSICLYGRGKPLPCVCSPKLN

SEQ ID NO: 311132 - protein, 82 aa, Zea mays
  Clone ID: MRT4577_46808C.1.pep
MKFFGRCSVASQKIRKYISKKKKKKKKKKKKKKKKKKKKKKKKKIKKKKKKKKKKKKKKKKGGARFKKTKFNDRGRGKEKFF

SEQ ID NO: 311133 - protein, 82 aa, Zea mays
  Clone ID: MRT4577_46809C.1.pep
SISYFSLRRGLTHGIFSRIFIFSSLFETLLALKVFSFSLCLPQAQSKAPEWGFLLPLFIFKGPLPFLGLGGSCFAFIPINVD

SEQ ID NO: 311134 - protein, 118 aa, Zea mays
  Clone ID: MRT4577_4680C.1.pep
FEGSPYKKLPKAYVCSLSRWHGPIMGVLYFSPVKIAFGSATPFKYVPETPKIGSPFYKVVFPLHPLGPVTPPPSQQTPPKGAIQVVSVANSGFWFMGFVNYESPVKNLPGSVRVVPGA

SEQ ID NO: 311135 - protein, 111 aa, Zea mays
  Clone ID: MRT4577_46810C.1.pep
WDLLQPVMRVFGHCLLAPLNLAEVHDAAAEAVRVVYARACHDLVPQAILAARSLIELDKSTRKAAKAAAVVAFGQIVPVGHRGSNGSSSRPSSKPNTPSKQRKPDTLLMSK

SEQ ID NO: 311136 - protein, 91 aa, Zea mays
  Clone ID: MRT4577_46811C.1.pep
RPSEAFLLEFLCTFFSTLFIVPDHPEHGVLFLVRELLNVIQDYTWEDSSDDIIRIYTSILHLLSAMSQDTYLYHIDKVDSNDSLYGGDSRF

SEQ ID NO: 311137 - protein, 43 aa, Zea mays
  Clone ID: MRT4577_46812C.1.pep
CKRDNTKQFHNSKIKFPLVYQKVRPPTRKLKTTYKATRPNLFM

SEQ ID NO: 311138 - protein, 67 aa, Zea mays
  Clone ID: MRT4577_46813C.1.pep
LSGCSQRAYWRSNRSQDRSCYMVLQSRTPVDWGLCSSFLIQRSGSYSPPCWTCLRCATRRRTRSRAE

SEQ ID NO: 311139 - protein, 172 aa, Zea mays
  unsure (1)..(172): unsure at all Xaa locations
  Clone ID: MRT4577_46814C.1.pep
MASNQHHHLLLALFLMAAAGTTTATTSSSGNSTTPTAYEMLERYDFPRGILPEGVQRYELRPDGSFEVFLSGRSCEFRVGDRYLLRYDRRITGTAREGSIRALQGVSVKVLFVWLGITEVDRSGDQLSFLVGPLAASFPSRNFAESPRCQCGXFDCAYGAWDDAAAAAVAAS

SEQ ID NO: 311140 - protein, 168 aa, Zea mays
  Clone ID: MRT4577_46816C.1.pep
MASNQHHHLLLALFLMAAAGTTTATTSSSGNSTTPTAYEMLERYDFPRGILPEGVQRYELRPDGSFEVFLSGRSCEFRVGDRYLLRYDRRITGTAREGSIRALQGVSVKVLFVWLGITEVDRSGDQLSFLVGPLAASFPSRNFAESPRCQCGFDCAYGAWDAAAAAAS

SEQ ID NO: 311141 - protein, 116 aa, Zea mays
  unsure (1)..(116): unsure at all Xaa locations
  Clone ID: MRT4577_46817C.1.pep
SSQIISTGPLVISRYTSTIXSPQYHKCEHLTPKVLTLYSQMLLLHRKSQHSLDHIPLLIPTNCNTLVTLKSLMSPTSTLSWTLNTWISTYSTRLCSTRLSVSTTSLPLCYSTMVEH

SEQ ID NO: 311142 - protein, 98 aa, Zea mays
  Clone ID: MRT4577_46818C.1.pep
QSWWVGHSQVGQSFPFNELAAVTPVYFLPQGILPPFVQVSGRKRGSFLTKEQLWPFFRRFGDTPGPLLQIWQLVPFVPLVLENRAASFQWQILGGALF

SEQ ID NO: 311143 - protein, 189 aa, Zea mays
  Clone ID: MRT4577_46819C.1.pep
GPENKSTSAVKGSKQQPSLNNASNGDASYKARQIEKAVIENLDTRKHITLNGDASNLTSASVLLKEARDLKHLSKRLKQEKGDDFESTSMCFEAGLKFLHVASLWETPNIDSSNQGVSIQAMKLYSETGILFGFCAHEFERLKKMANAALAYKCVEVAYMKAAFFRSPGVIKDRHALHAASLMVAPAES

SEQ ID NO: 311144 - protein, 132 aa, Zea mays
  Clone ID: MRT4577_4681C.1.pep
NRSNQNNYLHNAIVDWETTPRSHRTRRSNPPLVVPALHLLRAPAQNLQPAVLRVPQSLARLTSNRSVDVPSHDGGANRGDDPAPPIGVVRSDRSATVIRQPSTSSEPGGAPAHGGLLAGVTPTQRSSAWYLE

SEQ ID NO: 311145 - protein, 73 aa, Zea mays
  Clone ID: MRT4577_46820C.1.pep
NYEFPVHLTMVYGDGPTFYTSCIHRRTKQELGSPTLQPERTSHSNLDIANRSNRLREIRGIIKEKEPLEWQYS

SEQ ID NO: 311146 - protein, 88 aa, Zea mays
  unsure (1)..(88): unsure at all Xaa locations
  Clone ID: MRT4577_46821C.1.pep
HIPKXPNHNAYYHAYIYIHAVMQPRDDRAYSWGGGGGAPPGSAPHPTATPNDHEHAHGRQGILKISARVFMWAPNAPSARLMTANLDN

SEQ ID NO: 311147 - protein, 74 aa, Zea mays
  Clone ID: MRT4577_46822C.1.pep
LWAGRVFFLMAPRRGGRSDGWWSCEFSRGCTGFQLERCGRNVTEICHVRVPSGNDFRSCEIRLRLNRRCSVELI

SEQ ID NO: 311148 - protein, 84 aa, Zea mays
  Clone ID: MRT4577_46823C.1.pep
CPPFAGRAGEKKLSIWFLTRGGPLFFCFSGFAPPLGRFLFVNLFFPPRSGFLGAKKKKKKKKKKKKKKKKKKKKKKKKKKKKTP

SEQ ID NO: 311149 - protein, 56 aa, Zea mays
  Clone ID: MRT4577_46824C.1.pep
TGTVWKFYISEKKEGTVAFMSAVTKTLHREYGSVIEVFLITRCPPSGVSTRGGPPR

SEQ ID NO: 311150 - protein, 64 aa, Zea mays
  Clone ID: MRT4577_46825C.1.pep
CLCRAQPSCGTGGCTHRRSLERSKDGACGRRRRRRRWRGQCKCRRTAWQSLSVTFVSTFPRTRG

SEQ ID NO: 311151 - protein, 194 aa, Zea mays
  Clone ID: MRT4577_46826C.1.pep
MHPDDSHIVLNSHGVWRIKGIIQVSRSIGDVYLKKPDICRGNPVLQQSICPFPLRRPVMTAVPSITTRELRPGDRFIIFASDGLWEQLSDDAAVDVVASSPRKGVAMRLVRAAQLEAARKKEVKYDKIRTIEKGQRRHFHDDITVVVLFLDKCRGAARSSPEDIDGTYAPVDVFSCSPAAGGDHEDPTKPVLRR

SEQ ID NO: 311152 - protein, 494 aa, Zea mays
  unsure (1)..(494): unsure at all Xaa locations
  Clone ID: MRT4577_46827C.1.pep
MAIKDEPQPLHILFFPFLAPGHLIPIADMAALFAARGVRCTILTTPVNAQLIRSAVDRANDASRGTEGALAIDIAVVPFPDVGLPPGVECAPALNTMDDREKFFHGAQLLREPFDRFLAENRPDAAVTDSFFDWSADAAAEHGVPRIAFLGSSLFSRACSESTLRNNPVEAAPDDPDALVLLPGLPRRVELRRSQMMEPKKRPERWAFFQRMNAADQRSYGEVFNSFHELEPDFMEHYTTTLGRRAWLVGPVALASKDVATRGANNGLSRDAGACQQWLDAKPEGSVSRWCYVSFGTLTHFSPPEMRELARGLDLSGKNFVWVVGGADXEESEWMPDGFAELVARGDRGFIIRGWAPQMLILTHPAVGGFVTHCGWNSTLEAVSAGVPMVTWPRYADQFYNEKLVVELLKVGVAVGSTDYASMLETRRAVIGGEVIAKAIGRVMGDGEDAEAIREMAKELGEKARRAVANGGSSYDDVGRLVDELMARRRSVKV

SEQ ID NO: 311153 - protein, 100 aa, Zea mays
  Clone ID: MRT4577_46828C.1.pep
SFRRISFNVTRSRHNVKLRRVGLIITSNRCSSTNLIPSGTLNSTQHTKQTTNKYTQTHTTQRRNNTSSPPNRNIPIDTQGRLISLNRRKQALNQPKGSEP

SEQ ID NO: 311154 - protein, 57 aa, Zea mays
  Clone ID: MRT4577_46829C.1.pep
TLSVFGTLAIALSLTPFALLLCFLEPFHLFQRQALNYPLNLGITFKTTCDHKAKKCH

SEQ ID NO: 311155 - protein, 141 aa, Zea mays
  Clone ID: MRT4577_4682C.1.pep
PCALRWAWTLVMRGYQPFSGFRAFLGVPHDAGVTVAEGVGLAIAPGLVGIECLAVGLTELSFRVRFGHMLALTCEDGFDGSGAQMVGGASVSGEMRCAFPPLAECSGYCRLKALAAERPPADCLPEVTIDAQDSRLSRVAA

SEQ ID NO: 311156 - protein, 83 aa, Zea mays
  unsure (1)..(83): unsure at all Xaa locations
  Clone ID: MRT4577_46830C.1.pep
ICMDFMSDAGVRHRGQSQLSVPALVVPHTVRLPGLASAPVRCRRSIFAADLNQCALMRVRLPPSXTSPSSFAAHSPLASACLT

SEQ ID NO: 311157 - protein, 80 aa, Zea mays
  unsure (1)..(80): unsure at all Xaa locations
  Clone ID: MRT4577_46831C.1.pep
REPSPAKSPRKKVYPETQXAAAAKAPRMAATSAAAGEALQDHAGPRRCDPALRSVHRAAKENAPRIAQRNEDAAARREPG

SEQ ID NO: 311158 - protein, 91 aa, Zea mays
  Clone ID: MRT4577_46832C.1.pep
LLSQETSTFFCGRGSQQNAFSISLRNLIQRHVTLDQVYKYIHDEQPLLWFNQITIHQGISYYLINLLVYCHSDLVYILQRDRLMISPTSAS

SEQ ID NO: 311159 - protein, 70 aa, Zea mays
  Clone ID: MRT4577_46833C.1.pep
LAMANAPTYLTQQLLHQQAPLHIVLPQTHLAVATPASYYPQLLPFNQQHATNSAIYLQQRQQLLHPQSVL

SEQ ID NO: 311160 - protein, 145 aa, Zea mays
  Clone ID: MRT4577_46834C.1.pep
LCPRMVKRISVTQIMRSPNEGMLESASSGQVLERAVPWWFLPKFMQLDVGCVQCCGMFSSKGPVSIDVSVRTTRSSGSCVVPRRPGTASVCPQYYGNVWSNDFAGCSSTDLLGPALVDHATWKVGHRLVVELVILSCPMFGDSSL

SEQ ID NO: 311161 - protein, 809 aa, Zea mays
  unsure (1)..(809): unsure at all Xaa locations
  Clone ID: MRT4577_46835C.1.pep
RRPRIGNADLPCELGSGSGGSALSADNTAGGGLIVIGSMKWPLSRLLVYGSLNSDGESHRGTSGNSNGTFKGGVGGGSGGSILLFLQWFLLEKNSSLSASGGNGGVYGGGGGGGGRIHFHWSYIATGDEYVHIASVNGTIVSSGGSGKNDGHCGEDGTVTGKKCPKGLYGTFCTECPVGTYKNVVGSNSSLCSPCSVDSLPNRAEFIYIRGGVTELPCPYRCISDKYKMPNCYTPLEELMYTFGGPWSFSIILSLTVILLALVLSALRIKIGESDITYRATNAIHNDGCSFPFLLSLAEVPGASRAEETQSHVHRMYFMGPNTFREPWHLPYSPPDAIIGIVYEDAFNRFIDEINLVAAYEWWEGSIHSILSVLAYPCAWSWKQWRRRKKNHRLQEYVKSEYDHSCLRSCRSRALYKGLKVGSTPDLMVAYIDFFLGGDEKRLDVASTIQKRFPMCLIFGGDGSYMSPYYLHSDTLLSNLLGQYVSTAIWNRLVAGLNAQLRTVRQGSVRSTLGPVVSWINSHGNPQLERHGVRVELGWFQSTASAYYQLGIIVAVNEXTSTRISATMSMPQNFVNAQGXNVAVPLQDFNQANLDQPCTSYAVSRKRLTGGVNGGIINEGTLKSLHYKRDYLFPFSLLLRNSRPLGYAETLQLLICIVLLGDFSITLLMLVQYYWISVGAFLAILLIPPLALLSPFLAGLNALFSRGLKRSSVTRIFALWNITSVVNIIVAIIYGSLYFWLSSLAVSSVHQVYNTKSFKSREDNEWWILPTILFLIKSLQAGLVNWHVANLEIQDYSLFSPDPDRFWAM

SEQ ID NO: 311162 - protein, 64 aa, Zea mays
  Clone ID: MRT4577_46836C.1.pep
RRQRTLVGLQFVKKTNFIKTELFFLPNCKSVYKCNACGCVRHCLIGKVVPHLHIIEKIFSSMGT

SEQ ID NO: 311163 - protein, 57 aa, Zea mays
  Clone ID: MRT4577_46837C.1.pep
NKQARPDFHKRVLYGDCVRKKKPKLFSFKSHKTCLAPVFVLVNVCQNECWLNQMGLL

SEQ ID NO: 311164 - protein, 228 aa, Zea mays
  Clone ID: MRT4577_46838C.1.pep
MDAAGGVEAAANGGCWGFADLNSETMFCGYIITVQHASVALKKKKKKKKKKKKNTFGVIFGATLAWWLFEKSGLSLLTICSDILLILIVLQFIRVKIAGLLDRQPRPLPELVLSEEMVSNAAASFRVKVNSMLMIAHDITLGKDFRLFFQVVIVLWLLSVIGNFCSSITLAYIGTVALVTMPALYNKYQRPVDRYAGMVYRNISRHYKIVDENVISRLPRRFIRDKED

SEQ ID NO: 311165 - protein, 216 aa, Zea mays
  Clone ID: MRT4577_46839C.1.pep
MDAAGGVEAAANGGIEGSADPCSSGGAGGYRRSVHQIAGGGKAADIILWRRARVTFGVIFGATLAWWLFEKSGLSLLTICSDILLILIVLQFIRVKIAGLLDRQPRPLPELVLSEEMVSNAAASFRVKVNSMLMIAHDITLGKDFRLFFQVVIVLWLLSVIGNFCSSITLAYIGTIALVTMPALYNKYQRPVDMYAGMVYRNISRHYQDSDENVIS

SEQ ID NO: 311166 - protein, 51 aa, Zea mays
  Clone ID: MRT4577_4683C.1.pep
GPCIIISPWYHQNTNVVSTFAVVFQCNMPPECISIIYQVPNTSGGLLLVYH

SEQ ID NO: 311167 - protein, 93 aa, Zea mays
  unsure (1)..(93): unsure at all Xaa locations
  Clone ID: MRT4577_46840C.1.pep
FRPSLRFVGYMRRNLHRSKHDSELRMLACVHSTRNVPSIISXLLELSNPTKRSPIFIYALHFVELTGRASNMFAAHHSPPTRASAASITSSTP

SEQ ID NO: 311168 - protein, 77 aa, Zea mays
  Clone ID: MRT4577_46841C.1.pep
KRLVGLWNNPASDNRYAQSNAVYALLVSDSGIKIVWTQNHKGSLVSQVGIAFLRIYLHVHTRRQTNSRRGHPQLDHA

SEQ ID NO: 311169 - protein, 90 aa, Zea mays
  Clone ID: MRT4577_46842C.1.pep
LPARAGDAASSPVEAPPAVKTAFHLKIKKYEPPAKIKFIKEVRPMTDLGLKKPKKLLKKAPILVRGGFPKKKAKALPPKLKPPGPPVALE

SEQ ID NO: 311170 - protein, 65 aa, Zea mays
  Clone ID: MRT4577_46843C.1.pep
TLDHCIRRRPRPHRTRNWAEVNRTDWGPRALGRTGRVSVAGRNRRRPGKAGLCGVLVVVNVSRWR

SEQ ID NO: 311171 - protein, 254 aa, Zea mays
  Clone ID: MRT4577_46844C.1.pep
EGGFAGEPKRFRKLWGSNSTTFLRTVHVNQEKDAIAFVEAEEKAPRFSEVPPCDERVASQEATDSRLEQCLGVGNSLGHENGAQFETSCVNNLPSEVHADPEISSSFSECCSSGSHANGNENHSESTAQETAFVGNSSQNVNNKEELELPCIDGLPCTSARNQILQEHFNVINADENKEIEVKISKLEGSSKSYLNFEEEKLPSFVDESCLQNKNERENEVNSESPIHEKMTKFGFEDKGDAYEDFQEGDMDQV

SEQ ID NO: 311172 - protein, 115 aa, Zea mays
  Clone ID: MRT4577_46845C.1.pep
LRVGGCRAARIRCEVHGVGCTSKRHSDLYGLHRVHGGRRLLRDRAQTAETGSVLFFCGWSKEWGRSGSVRPVIPGGSNTFSRACVTFARDGEDAPDQRVPHACGYARKEGLAWWG

SEQ ID NO: 311173 - protein, 99 aa, Zea mays
  unsure (1)..(99): unsure at all Xaa locations
  Clone ID: MRT4577_46846C.1.pep
MRSLNTLASHRSGTLDMDATDTGCEGKDKKGAGDGKAVGTRKKTTNCCVKAWLHDRVEIMGGYQNNAHXPYYVACTDSEHLIGDADKNQVEMNHINTIL

SEQ ID NO: 311174 - protein, 60 aa, Zea mays
  Clone ID: MRT4577_46847C.1.pep
RARPRVQELKNGRLAMFSMFGFFVQAIVTGKGPLENLADHIADPVRNNAWAYATNFVSGN

SEQ ID NO: 311175 - protein, 90 aa, Zea mays
  Clone ID: MRT4577_46848C.1.pep
LGPGVLKISGPNGVHPIFVITPSNFPGFKGGTFFSTFSGGLSSKIPVTLGVLGSLAWDFALLAHPWLRGLTCVANRNRQHYLVMYIEFPC

SEQ ID NO: 311176 - protein, 50 aa, Zea mays
  Clone ID: MRT4577_46849C.1.pep
RAPSNQLCNSIERSNPIQARTPSRHPPTLGEHETRRLGCVRPRALLMHAS

SEQ ID NO: 311177 - protein, 233 aa, Zea mays
  unsure (1)..(233): unsure at all Xaa locations
  Clone ID: MRT4577_4684C.1.pep
NSARGPPTGPILFLPLVFLFLFTTAAASATAPEDEKFTEELLLRPLPDRKALAHFHFRSSAPPAASVGRHHHLFPKAISQLVKKYHISELELSFTQGRWNYEQWGGFDPMSTNNAKPPGVELWAVFDLPLSEIDATWKNLTHTLSGLFCASINFLESSTAFSAPRWGFKLNEGNLRYGALPREAXPSIYKGYYHSQKLKLRSSQSLGIILDQTLTVVLPPNNVHWRTATFQSW

SEQ ID NO: 311178 - protein, 133 aa, Zea mays
  unsure (1)..(133): unsure at all Xaa locations
  Clone ID: MRT4577_46850C.1.pep
LYRVDHSSGPWRCSSTRVWRPRSSSARPPLPQVRPTXRAPSPLARADTSFTDRDRREFIQGARRISLPAQQKPQVTGHRVSARWKSADRGSRPANSRGTVLIRPIDLIQETRIARKDGCMDGKKKKDGPPRVM

SEQ ID NO: 311179 - protein, 158 aa, Zea mays
  Clone ID: MRT4577_46851C.1.pep
MERPSLRALLLGAAGLLLLLLPLSSSSSSDTCGPCEPASCPPLPPLGCLLGETRDACGCCPMCARGEGEPCGGGGAGRGYCAPGMECVKSRKRRRGKAGAAAGGPGVSGVCVCKSRYPVCGSDGTTYPSGCHLRAASQRAESRGEKAITQVMKGTCEQ

SEQ ID NO: 311180 - protein, 86 aa, Zea mays
  unsure (1)..(86): unsure at all Xaa locations
  Clone ID: MRT4577_46852C.1.pep
MDEFLKGHMQRCLXRKKKKKKKKKNKKKKRNVWKKKKKKIYKKKKKKKKKKKKKKKKKRGSPFLGPRFPSPGFPLFTFFLGPPNSI

SEQ ID NO: 311181 - protein, 122 aa, Zea mays
  Clone ID: MRT4577_46853C.1.pep
MKLHLLLKVLFGPVPVYFSALAILILLTNAQYFGLGGVGVPRATKLASSTPVVSVMKYCDIFRGEWVPDAEAPYYNHKTCGMIQEHQNCLKYGRPDLGFLKWRWRPSGCELPRFDPVQFLQF

SEQ ID NO: 311182 - protein, 160 aa, Zea mays
  unsure (1)..(160): unsure at all Xaa locations
  Clone ID: MRT4577_46854C.1.pep
MKLHLLLKVLFGPVPVYFSALAILILLTNAQYFGLXGVGVPRATKLASSTQVVSVMKYCDIFRGEWVPDAEAPYYNHKTCGMIQEHQNCLKYGRPDLGFLKWRWRPSGCELPRFDPVQFLQFVRHKSLAFVGDSLDRQHMETLIWPLSXVRYPKELPLHP

SEQ ID NO: 311183 - protein, 487 aa, Zea mays
  Clone ID: MRT4577_46855C.1.pep
ELLPVFEFDELELKRFPNPRDHMVNTYGYSTINFFAPMSRYASAGGGPVAASKELKQMVKAFHNSGIEVILDVVYNHTNEADDVNPYMTSFRGIDNKVYYMLDLNNSAQLLNFSGCGNTLNCNHPVVKELVLDSLRHWVKEYHIDGFRFDLASVLCRGPDGSPLDAPPLIKEIAKDSVLSRCKIIAEPWDCGGLYLVGRFPNWDRWAEWNGKYRDDIRRFIKGDPGMKGVFATRVSGSADLYQVNNRKPYHSVNFVIAHDGFTLCDLVSYNSKHNDANGEGGRDGCNDNYSWNCGIEGETNDLNVLSLRSRQMKNFHVALMISQGTPMMLMGDEYGHTRYGNNNSYGHDTHINNFQWGQLEERKDGHFRFFSEMIKFRHNHPILRRDRFLNKNDVTWHENRWENQDSKFLAFTIHDHSSGGDIYLAFNAHEYFVDAVIPPPPHHKSWSRVVDTNLESPKDIVPEGVPFTGSGYRIAPYSSILLKAKP

SEQ ID NO: 311184 - protein, 112 aa, Zea mays
  unsure (1)..(112): unsure at all Xaa locations
  Clone ID: MRT4577_46856C.1.pep
SWWVPVARSRSVRGRPVXGAGVLRSPSFCPWLPGSVRGPCLCLLSGXGPXAGLLGGVGVIKKKWSPPRRRCCRRAGSRLLVSRACPSFPACSGLVLVASAGSPVGSLRAPPA

SEQ ID NO: 311185 - protein, 122 aa, Zea mays
  unsure (1)..(122): unsure at all Xaa locations
  Clone ID: MRT4577_46857C.1.pep
EKMVHDADKYMFEDEETRRRCXSNISLENYSYNMRNTIKDEKIAFNLAADDMKKIEDAIYAVIIWLDSNHLAEACEFDYKMKELDSLLXPIIVKMYHGAVSYMGGSGGMDEDTSAGSFGPWP

SEQ ID NO: 311186 - protein, 83 aa, Zea mays
  Clone ID: MRT4577_46858C.1.pep
HLGPKTLNTVLQQWHVIPASSLNKSSLRQFCTDGPSYLACFYELQRAKLEGLYIYKHTPFSSYIYSHVCKQMSIFLSFTCVSI

SEQ ID NO: 311187 - protein, 41 aa, Zea mays
  Clone ID: MRT4577_46859C.1.pep
LEERKDGHFRFFSEMIKFRHNHPILRRDRFLNKVSSELVCP

SEQ ID NO: 311188 - protein, 646 aa, Zea mays
  unsure (1)..(646): unsure at all Xaa locations
  Clone ID: MRT4577_4685C.1.pep
MAPPRPPTGPILFLPLVFLFLFTTAAASATAPEDEKFTEELLLRPLPDRKALAHFHFRSSAPPAASVGRHHHLFPKAISQLVKKYHISELELSFTQGRWNYEQWGGFDPMSTNNAKPPGVELWAVFDLPLSEIDATWKNLTHTLSGLFCASINFLESSTAFSAPRWGFKLNEGNLRYGALPREAVCTENLTPWLKLLPCRDKAGITSLLYRPSIYKGYYHSQKLKLRSSQSLGIILDQXLTVVLQPNNVHGEQLHSNHGQLQPNWSMRHLFNRKLSGKCLVSKSSRVFIEVDKGIADEVNISGSVHSWSNEFFVLSNSPDKLIKGQNHLEMQSSFLYVYDASNYSEEQPLDLGITWKLPLIWTCTPSPFHASRFLMGSGNERGSIALSFMSTNLHKKISGSANDCSIKAVIFQVVPWYVKVYYHSLEIFIDGSRKTVSEVVDKIHVIPSEDKLLPGTLEMLLRFPCSMQSGTLTLDFDKGFLHIDEYPPDANQGFDIPSALVSFPEFSSARSYPEIDPVLGSPLLENFQEDSVVKSYTEVLLVPLTTPDFSMPYNVITFTCTVLALYFGSLLNALRRRIGEEERELKKRATRHGLISRLLAKLRGQKVDPSESGSSFESTGSKKLLFKVVFVAVAAVLFHYFSNNS

SEQ ID NO: 311189 - protein, 175 aa, Zea mays
  unsure (1)..(175): unsure at all Xaa locations
  Clone ID: MRT4577_46860C.1.pep
TAAHRAPRPGPDRARDAPXAGKAPEXXQXXXKHXXXXKQEXXSXXEXEEXXTXXXEXXEXXEDXGXQEXXXRGXXAXXXEKPXAXQQRGXXPXXKGXXXXQQAQXXTGKTATXXXGXXQQXDXXXXEXQAXXXXPTXEXAQQXEKXXRAXXDHXXXKXXAXXGGTXXXEDQRXXA

SEQ ID NO: 311190 - protein, 153 aa, Zea mays
  unsure (1)..(153): unsure at all Xaa locations
  Clone ID: MRT4577_46861C.1.pep
YSFISSILQSVSERSSVTLQLPGQKYHQAPCSLRSLVFYLIFFSTIVGCSAPSSTVENMGQSTLCMDGLNPAIVNCSHVNGNTQIMNDITARDDGSRLVLGLGPTPNFYSAVSTGSKQAQRLSGQSSTFTDSGMXELGLHTDGEGCIQCLQAP

SEQ ID NO: 311191 - protein, 103 aa, Zea mays
  Clone ID: MRT4577_46862C.1.pep
TRVISHKSLHLASSAQRVLLDQHSVLSPRLRQPHPLTIHNCCLCHLFAADGLLPHHIGGAFLDCLLVVFNNKFFDMYVPTKKNYFPKKKKKGGGRVGDRIPDR

SEQ ID NO: 311192 - protein, 623 aa, Zea mays
  Clone ID: MRT4577_46863C.1.pep
MDNGFMDIPHPPLMNDPFVLVGCSAPSSTVENMGQSTLCMDGLNPAIVNCSHVNGNTQIMNDITARDDGSRLVLGLGPTPNFYSAVSTGSKQAQRLSGQSSTFTDSGMLRLGLHTDGEGAIQCLQAPNGALHSLGIVDEASTSTTVRSMGGYMPSLLFAPRSNPTANETQLEIPDSLNLTHSTSNSQHIQRHLQFSPEPSAMTESSFGVSSDVVTATTTSERSHSRHPKKCRFKGCSKGARGASGLCIAHGGGQRCHKPGCHKGAESSSAYCKAHGGGRRCEELGCTKSAEGKTDYCIAHGGGRRCEHPGCPKAARGKSGRCIKHGGGKRCLVKGCIRSAEGKAGLCISHGGGRRCQYPDCGKGAQGSTLYCKGHGGGKRCVFDGCSKGAEGSTPLCKAHGGGKRCMFEGGGVCAKSVHGATEYCVAHGGGKRCSVPGCTKSARGRTDCCVKHGGGKRCKVENCGKSAQGSTDFCKAHGGGKRCTWGTGCEKFSRGKSGFCAAHGTLMARQREQEAAKNVGSMIGPGLFSGIVVSSATAASSMTNEHSSSGVSTASDCDGTVRSQSMIPPQVLVPRSMMPSWSTEPVDGGREGGHVVPEGRVHGGGLLSLLGGSFRNADLEKL

SEQ ID NO: 311193 - protein, 204 aa, Zea mays
  Clone ID: MRT4577_46864C.1.pep
GATEYCVVHGGGKRCSVPGCTKSARGRTDCCVKHGGGKRCKVDSCGKSAQGSTHFCKAHGGGKRCTWSTGCEKFSRGKSGFCAAHGTLMARQREEEVVKNVGSMIGPGLFSGIVASSATAASSMTNEHSASGVSTASDCDGTVRSQSMIPPLVLVPRSMMPSWSTEPVDGGREGGHVVPEGRVHGGGLLSLLGGSFRDADVEKL

SEQ ID NO: 311194 - protein, 106 aa, Zea mays
  Clone ID: MRT4577_46865C.1.pep
QLAHRVLSRVVQPSVLPSPVLRASFRPFSTADIAVLFQLPINTPPRAVTRIHNSVPAPKANTRQQNSARPPRQTCLYRSFPFFPPASLSDHEFLCITNFRRTSHTV

SEQ ID NO: 311195 - protein, 217 aa, Zea mays
  unsure (1)..(217): unsure at all Xaa locations
  Clone ID: MRT4577_46866C.1.pep
MLRLGLHTDGGGAIQCLQGPNGALHSLGIVDEASTSTTVRSMGGYMPSLLFAPRSNPTVNETQVEIPDSLNLTHSTSNSQHIQRHLQFSPEPSAMTESSFGVSSDVVTATTTSERSHSRHPKKCRFKGCSKGARGASGLCIAHGGGQRCHKPGCHKGAESSSAYCKAHGGGRRCEELGCTKSAEGXTDYCIAHGGGRRCEHPGCPKXARXKSGRCIK

SEQ ID NO: 311196 - protein, 101 aa, Zea mays
  unsure (1)..(101): unsure at all Xaa locations
  Clone ID: MRT4577_46867C.1.pep
IGTSHVGGVGVRSGGVGAAAEAAISDSEYGNEPVXRGNLELGYGHEVEDQEEDGTHQLFWGSVIGDMKKMKIHCDNIFGEQNTHQRYTRMKHDVRILDSLS

SEQ ID NO: 311197 - protein, 624 aa, Zea mays
  unsure (1)..(624): unsure at all Xaa locations
  Clone ID: MRT4577_46868C.1.pep
MDNGFMDIPHPPLMNDPFVLVGCSAPSSTVENMGQSTLCMDGLNPAIVNCSHVNGNTQIMNDITARDDGSRLVLGLGPTPNFYSAVSTGSKQAQRLSGQSSTSIDSGMLKLGLQTXTGEQFNICKHRMEHXSLGIVDEASTSAAVRNMGGYMPSLLFAPCSNSIANETQVENQDSLDLTHSTSNSQHLQHDLQLSPEPSAMTESSFGVSSDVVTATTTSERSHSRHPKKCRFKGCSKGARGASGLCIAHGGGQRCHKPGCHKGAESSSAYCKAHGGGRRCEELGCTKSAEGKTDYCIAHGGGRRCQHPGCPKAARGKSGRCIKHGGGKRCSVKGCIRSAEGKAGLCISHGGGRRCQYPDCGKGAQGSTLYCKGHGGGKRCVFDGCSKGAEGSTPLCKAHGGGKRCMFEGGGVCAKSVHGATEYCVAHGGGKRCSVPGCTKSARGRTDCCVKHGGGKRCKVENCGKSAQGSTDFCKAHGGGKRCTWGTGCEKFSRGKSGFCAAHGTLMARQREQEAAKNVGSMIGPGLFSGIVVSSATAASSMTNEHSSSGVSTASDCDGTVRSQSMIPPQVLVPRSMMPSWSTEPVDGGREGGHVVPEGRVHGGGLLSLIGGSFRNADLEKLQS

SEQ ID NO: 311198 - protein, 152 aa, Zea mays
  unsure (1)..(152): unsure at all Xaa locations
  Clone ID: MRT4577_46869C.1.pep
DPPGWPGEVNTKRSLETCGVLAGTLKNRTFYVTTLIIPKQKSTSDTCEATNEEELFEVQDTYSLXTLGWIHTHPTQSCFLSSIDVHNHYSYXRKHGIFHLTDPGGMGVIHDCQERGFHPHKAPLDGSPIYEQCSHVYMDTDIKFDMIDLRQR

SEQ ID NO: 311199 - protein, 50 aa, Zea mays
  Clone ID: MRT4577_4686C.1.pep
EWDSDESSTDSSDEDAANIVVNKGLLFPNFGHKCLMAKETKRKVTPELRR

SEQ ID NO: 311200 - protein, 139 aa, Zea mays
  Clone ID: MRT4577_46870C.1.pep
LSCPCVIYDPKLHNLPSTKQYLWWLTSCLHRQEHPNSAVAQFVEGSVGGEVEELHGSGSVRVKDWTNDGGDGDEGRGEEDGHRCRAPPSHGDRQMSWCTNSVTRRKIRHRGGRKAPWQRIRARQRLGDVEREWASCRIR

SEQ ID NO: 311201 - protein, 162 aa, Zea mays
  unsure (1)..(162): unsure at all Xaa locations
  Clone ID: MRT4577_46871C.1.pep
GRVGCFLRVAESNTKRSLETCGVLAGTLKNRTFYVTTLIIPKQKSTSVTCEATNEEELFEVQDMGSLFTLGWIHTHPTQSCFLSSVDLHNHYSYQVMLPEAIAIVMAPTDTXQGGMGVIHDCQERGFHPHKAPLDGSPIYKQCSHVYMDTDIKFDMIDLRER

SEQ ID NO: 311202 - protein, 507 aa, Zea mays
  Clone ID: MRT4577_46872C.1.pep
MGRPQPARAGAINIEACARPIAVDHRISLPYYFRIAGSLLRQANIYRNESNFLDLYVILLRYSSLLCETIPRHRDYHAFKLREKAFFDKLVDIIKELETLKPVVQRQIVEHNRGGTVEFNTNSLNGNYGTTHRIEQCTPSSYTPQTFVGSSNGALQKPFHAGRQVASLSSVQKQFMNLPYPKEETLARHSILGPNGLNGRWNGPVTGIKVQYPSNFELTQNDITSLVPSILNQDDLHGSNTAPAPPPPSSSSNDNDNMKSVLSLDDGRWSVPAEEHTPLPSANLEEELFQLNIKQPSPPPVLAEVQRPISPSRVADPTPGLPTSGTARFQNLHVPIKLMECFLRVAESNTKRSLETCGVLAGTLKNRTFYVTTLIIPKQKSTSVTCEATNEEELFEVQDMGSLFTLGWIHTHPTQSCFLSSVDLHNHYSYQVMLPEAIAIVMAPTDTRKHGIFHLTDPGGMGVIHDCQERGFHPHKAPLDGSPIYKQCSHVYMDTDIKFDMIDLRER

SEQ ID NO: 311203 - protein, 69 aa, Zea mays
  Clone ID: MRT4577_46873C.1.pep
KKKKKKKKKKKKKKKKKKEKKKKKEKKKKKNGHAEVINSNIKKGGAHFQGTQVYHPWGSRKNPVFFGLP

SEQ ID NO: 311204 - protein, 78 aa, Zea mays
  unsure (1)..(78): unsure at all Xaa locations
  Clone ID: MRT4577_46874C.1.pep
ETSIYSIHKTIIIRGQGLTLQFDSFAKLGFLGRSERKKRLLQSTTQTFGSNFLYIRTHRLALEPNASSVADAATXTXI

SEQ ID NO: 311205 - protein, 126 aa, Zea mays
  unsure (1)..(126): unsure at all Xaa locations
  Clone ID: MRT4577_46875C.1.pep
MLHLRGATPMTPRERTRIAIHTLEEWMIPIEEVHTARKLMMIDFTATWCPPCRAMTPIFDDMDHKSPNDVFLLADVDEXLRPLCXQFSVKAMTTFLFMRKVDAKDTLAGAGNEELVRKLEXLHMDS

SEQ ID NO: 311206 - protein, 102 aa, Zea mays
  unsure (1)..(102): unsure at all Xaa locations
  Clone ID: MRT4577_46876C.1.pep
DCKNDSRSQGWDPLVEEDIPFCVEARIDIPHMDGPIPRFGQXTKRRNKXITQDHFYRVDIFYAAIDSLISELDHQFNEVSSELLTCFACLEPRDSFSKLDVN

SEQ ID NO: 311207 - protein, 83 aa, Zea mays
  Clone ID: MRT4577_46877C.1.pep
RPLVPLHYSTSPYLATSHGCGDRRGASLCPTSSAAPVGLVPWPRLLPYRCFMQSPLVPVWLLARGGCGGPALLLYWLKCLPPI

SEQ ID NO: 311208 - protein, 61 aa, Zea mays
  Clone ID: MRT4577_46878C.1.pep
LHTQGAGLTIRRQPTYIRNTNRELAPLRCCFSNTHLPKVFYQPKPLLHLICLFGVLLIRTD

SEQ ID NO: 311209 - protein, 144 aa, Zea mays
  unsure (1)..(144): unsure at all Xaa locations
  Clone ID: MRT4577_46879C.1.pep
MLEELPWPDYLARPPYSPSSSPSSAGTCVRHGDGVHCPRHRPAPSXPQLPPXPSIPSSLPQLPRTSAALDAPRPPTGGPAPHAAYPWPHRRPRARPIVPXXPSAPPPAXXPRRPWPPPPPLAPPPAWLRRPPPPAAASPPPPSP

SEQ ID NO: 311210 - protein, 120 aa, Zea mays
  unsure (1)..(120): unsure at all Xaa locations
  Clone ID: MRT4577_4687C.1.pep
FDDSPAIFDKIIKKEIPSSVVYEEEKVLXAFRGINPXQAPTRILIIPKVKDGLTGVAKAQERPIKTLGYLLYVAKVVLKQQALEDGYXVVINNGPSVCQSVYXHIHVHLFVGRQMTWPPV

SEQ ID NO: 311211 - protein, 162 aa, Zea mays
  Clone ID: MRT4577_46880C.1.pep
KKKKINKKKKKKKKFPASADLPRSPPPPSRRAVATAPPPMASSAAGAGKSLIQTFRKFFKKPWEITGPCSSPEYRSAVPGALEYRQTCPATLREDSLRAVIPTSDPETVFDIKYHPRDCRRNRPPVRRTLLRKPDLERYMAAKQFDPAKDFPVPYVNSAVEY

SEQ ID NO: 311212 - protein, 73 aa, Zea mays
  Clone ID: MRT4577_46881C.1.pep
KNLIQRSGISQDTFRCSIHRLPRESLGKTTSSHLKLGCATGRTGAGREAVPVCGRCDREGQSVSQKLTWRDHV

SEQ ID NO: 311213 - protein, 76 aa, Zea mays
  Clone ID: MRT4577_46882C.1.pep
TRGPLYKFAPQTNPPKKVSPAPGPWTPPRGETIPPSLGLGFNPYKRGQGLTRGNTRGNKNPGVHLETSPTHQKAPL

SEQ ID NO: 311214 - protein, 90 aa, Zea mays
  unsure (1)..(90): unsure at all Xaa locations
  Clone ID: MRT4577_46883C.1.pep
LKGNSASFGAPKVKNPCFQFPESFHQKSKNGFPQPLGPVKINFFYLRGKFXPSLXLQGQVNGCPPPKLTKWWRGASCWDEGGLFQVPGPF

SEQ ID NO: 311215 - protein, 172 aa, Zea mays
  unsure (1)..(172): unsure at all Xaa locations
  Clone ID: MRT4577_46884C.1.pep
FARLSEILXPIRTVRLTRDRPADAAMIRRLLTEGDLVICPEGTTCREPFLLRFSALFAELTDEIVPVAMENQMSMFHGTTARGWKGLDPFYFFMNPSPGYVVTFLNKLPAELTCSGGKSSHEVANYIQRLIASTLSYECTSFTRKDKYKALAGNDGTVVSKPNIDKNKAMAC

SEQ ID NO: 311216 - protein, 58 aa, Zea mays
  Clone ID: MRT4577_46885C.1.pep
GIGTLQTPRLAFVSSPHIGWREQVSASALGLLTLGHRTGPPTMIRYRQLTMPRQRPSP

SEQ ID NO: 311217 - protein, 112 aa, Zea mays
  unsure (1)..(112): unsure at all Xaa locations
  Clone ID: MRT4577_46886C.1.pep
KLLGRYNFLDELSTLDPELYRNLMQLKHYDGDVEDLFLDFTVTEELGGKRIVHELRPGGKNIXQTNENKLHYVHAMADFKLNRQXLSLQILTFANALYRXSSXLITPYWLSL

SEQ ID NO: 311218 - protein, 83 aa, Zea mays
  Clone ID: MRT4577_46887C.1.pep
SSHVSSLSLVKASIGQAWVYLNRRTVPAMVPSPLTVAMHLHGSGEILGNRSVESRSAAHSLSAGDLASATRTTLKQHCLCADS

SEQ ID NO: 311219 - protein, 79 aa, Zea mays
  Clone ID: MRT4577_46888C.1.pep
NLLACLTASQLLSNDSSGVANCQAFESESKTVQLAKGTGLPAQQNKPSYEALIRLMCLFGLKSILSLFLEYKKQVKDER

SEQ ID NO: 311220 - protein, 300 aa, Zea mays
  unsure (1)..(300): unsure at all Xaa locations
  Clone ID: MRT4577_46889C.1.pep
KKTKKKKKRKRKTEKKRQKRKKKKKKKRKKKKKKKRREKKEKRKKQKNNQKKKKKKKQKKKTTKKKNKEGEKKKKQQQRKKKKKRKKKKNQTHPQQRKKKKKKKRQKRKKKTKKQKKTKKKQKKKKKKQKKKKKKKQKKKKKKKKKKKQKTQKKNKKQQKXKTKKTKNKKKKKKKKKKKKKKQKTKQKKKNKKKKQXXKKKKKHKQQQQNKKTKKKHKKXXQNXXKKQXQKXSXHXKTTNTQQRVALSGALLGRVARRLPAAAAASWVGKGSLRVCFAPCFFVFVSGLGLPVKYSPAGLE

SEQ ID NO: 311221 - protein, 69 aa, Zea mays
  Clone ID: MRT4577_4688C.1.pep
KSRDILSLCEVNNMQGQSQTNRIFFFGSSFRHFGSIWNLIIHTIDDCERQLLTYVTDGKTTKRRILLKG

SEQ ID NO: 311222 - protein, 52 aa, Zea mays
  Clone ID: MRT4577_46890C.1.pep
PHRADSGRLLRYYYLPLDQTLFFILIPKKRVKRRPDLVGRLFRLDLKRSHFP

SEQ ID NO: 311223 - protein, 368 aa, Zea mays
  unsure (1)..(368): unsure at all Xaa locations
  Clone ID: MRT4577_46891C.1.pep
TIAEILLGRLVLAKFMVILHYPYIILKMSSPNGIIIVKGNLKQSECDKVKKSLTYSHHEKEEMQISSLPTGNXASNFIGQVQDHKVSPARPQQLGYEHMXIEASLDPKXRNSXLTNFLQDNLNIFAWKPTDVXGVPRNLVDHXLNVSPNAKTVKQKLHRFPHVXKDLIKEQITRXLVVGFIREVLHLEWVAKHILVQKXNXWRMCIDYTKPNKVYPKDPFSLPQIDQIMCSTFECDPLXFMDFYSRYHRIPKKIKPIHQPFNIYSYTTMLFGXKNAGSTCERGIXRCXSSQLYRNIEAYMDDVIIKTQAKKDLISDLVETIESIRIFYIKLNPXKCTFGVLSXKLLGHLVSQKGIEANPRVLCVVTTA

SEQ ID NO: 311224 - protein, 45 aa, Zea mays
  Clone ID: MRT4577_46892C.1.pep
PKSDVLHLVVCALNAHNVSIKLRLEVRDAGSQTGSYASALVCHPT

SEQ ID NO: 311225 - protein, 88 aa, Zea mays
  Clone ID: MRT4577_46893C.1.pep
YPGAVFLSIYMVYNMSELSTYKPESLSSHSPLLCQHCLPPDRNNMVLEVFSCFFGYFHALNHILALKFVPSFTSSKLLGMCLAPLLCT

SEQ ID NO: 311226 - protein, 38 aa, Zea mays
  Clone ID: MRT4577_46894C.1.pep
KHSINYCMVKYSVYTSRNLSLVLLLSLCSKALKLIVSR

SEQ ID NO: 311227 - protein, 137 aa, Zea mays
  Clone ID: MRT4577_46895C.1.pep
VFFPKKQINHVAPEPPSEIAEEHDGLESVLVPMQGIVVNGKSTSELLSGSVSLRSAEVVGTPVGRIVKCEEFLKAAGPVMVCNICILFDLHFISCAMPMDIKMSVVFIACVRVVSTPRRIQFFFPSSDLAFRIKLTM

SEQ ID NO: 311228 - protein, 72 aa, Zea mays
  Clone ID: MRT4577_46896C.1.pep
GSHKKKSEGGKQRAPKKLGGKEIQLVRIGNPKKNIPNKKKRGPPKKITTQLSLPGEIFKNLLMWRPRSRWII

SEQ ID NO: 311229 - protein, 89 aa, Zea mays
  Clone ID: MRT4577_46897C.1.pep
YLFGRSLYLKKPLLVVPCACSFSAPYLFMFVIKWLHWWMLSIPFQWDVRLHLYSICTDHASSYLVLAGIYTLFFLLGIRCTLAFFSNQP

SEQ ID NO: 311230 - protein, 128 aa, Zea mays
  unsure (1)..(128): unsure at all Xaa locations
  Clone ID: MRT4577_46898C.1.pep
YFYRLRSSLRVNXHASLLDLRDFDRXQLXVEEPSDSADQALLRELRGRSTGQMDNVISQAQATLGSLMTQRSTFGGITTKISNVSSRLPTINHVLASIRRXKKSMDTIILSLVASVXAFLIFIYWLSK

SEQ ID NO: 311231 - protein, 90 aa, Zea mays
  unsure (1)..(90): unsure at all Xaa locations
  Clone ID: MRT4577_46899C.1.pep
STVQYILCSNXRKGCANENGIKXILRRNIAQQTAAINAEEDCVHDGHVLPXVHRKAHHXDSSAIHGDIGRVRSHXNRRKREPPQGLQRRI

SEQ ID NO: 311232 - protein, 83 aa, Zea mays
  Clone ID: MRT4577_4689C.1.pep
TQMRAITLPKKKQQQLESDCAGALFIESYRTGRRIGGWEHNTKWNVCHHQRKSSEISPNLKFPSIGSLLKSESTSTTHKPLFD

SEQ ID NO: 311233 - protein, 103 aa, Zea mays
  unsure (1)..(103): unsure at all Xaa locations
  Clone ID: MRT4577_468C.1.pep
GTVTKGGYSTHILDHERYRVKVPDGXPLSKAAPLLRAGITAYTPMMRLNINQPGXSLSFIAITPLLHMSWTTGQALSLQVTPLSTSESQSDGSTNLRCAHSID

SEQ ID NO: 311234 - protein, 49 aa, Zea mays
  Clone ID: MRT4577_46900C.1.pep
ARRIKRDHSFLNWEYLKQQGSITLPIYGAEHEGKRGRHHPCWGQHQCRK

SEQ ID NO: 311235 - protein, 59 aa, Zea mays
  Clone ID: MRT4577_46901C.1.pep
LPLRKPSILHYPCKKNWIFHALLSKSADSGLTRNLVHGQEPALFRIALHSAHIIHGIIR

SEQ ID NO: 311236 - protein, 150 aa, Zea mays
  unsure (1)..(150): unsure at all Xaa locations
  Clone ID: MRT4577_46902C.1.pep
MWAPSCLASCCAXRARERXRTAGGSIRRRSGRIAYCGLFALSLFASXALREVAAPLLQSIPWISHFYYTPNRQRLKTDAWLMSSLGNFLFFTILADIMSEIRDQKDPRDKGHHGGWMRQDLXWDIIAVLMYIASNAVLRFYEAISMFGSG

SEQ ID NO: 311237 - protein, 266 aa, Zea mays
  unsure (1)..(266): unsure at all Xaa locations
  Clone ID: MRT4577_46903C.1.pep
DGCAADEVAGKPGGRLVQRIRAVWVKGQRQAAEGGHYVSPSSRFLSGLPWICSAEGQCSRPWCSSASSDRLKASRFPRFQSEAYDYIIVGGGTAGCPLAATLSHKYKVLLLERGGSPYGNRNITLLENFHICLADVSPQSPSQAFISTDGVINARANVLGGGTCINAGFYSRAKPSFVQQAGWDAELVNQSYPWVEERIVHWPKVAPWQAALRDGLLETGVSPYNGYSYDHLYGTKVGGTIFHDTGGPDPAGDLLAXCNPISLRLL

SEQ ID NO: 311238 - protein, 582 aa, Zea mays
  unsure (1)..(582): unsure at all Xaa locations
  Clone ID: MRT4577_46904C.1.pep
MDLLSRGAAVFKALVFLCFIRSSQGGDLNLPPLVKASRFPRFQSEAYDYIIVGGGTAGCPLAATLSHKYKVLLLERGGSPYGNRNITLLENFHICLADVSPQSPSQAFISTDGVINARANVLGGGTCINAGFYSRANPSFVQQAGWDAELVNQSYPWVEERIVHWPKVAPWQXALRDGLLEAGVSPYNGYSYDHLYGTKVGGTIFDDTGRRHTAADLLAAGNPSNLRVLLHATVDKILLXGSTAGXKQPRATGVRFRDENGAHHQAFLTRKRGSDVIVSAGAIGSPQLLLLSGIGPRGQLSRHNVSLVHANEHVGEGMSDNPMNSIFVPMKSPTEQSLIETVGITDAGVFIEASSGFSQSDDSIHCHHGIMSAARVQISTIPPKQRSLDQIQEYVRNKHSLPKEVFDGGFILEKIDGPLSTGSLVLADTDIDSNPSVSFNYFQHPQDLRRCVYGIQTIERILKTNHFANLTANGAGYPMETLLNLSVSANINLIPKHTDDTTSLEQFCRDTVTTIWHYHGGCHVGKVVDRHYRVIGISGLRVIDGSTLFSSPGTNPQATVLMMGRYMGVKILRERLGRAAGV

SEQ ID NO: 311239 - protein, 136 aa, Zea mays
  Clone ID: MRT4577_46905C.1.pep
MSSGGGRGKPKGSKAVSRSTKAGLQFPVGRIARYLKAGKYAERVGGGAPVYLSAVLEYLAAEVLELAGNAARDNKKNRIVPRHIQLAVRNDEELSKLLGAVTIAAGGVLPNIHQTLLPKKAGGKGKADIGSASQEF

SEQ ID NO: 311240 - protein, 278 aa, Zea mays
  unsure (1)..(278): unsure at all Xaa locations
  Clone ID: MRT4577_46906C.1.pep
PAGTNNYLSQSKPPVKHLHKNITTADQEPSSQKFSIPASEAQRLVQDILKGNGIPSENASIISRCLIAADLRGVDTHGMNRIPSYMERIRQGVLSATAQPILTQVTPAVAQVDGQNGFGFVAAHKGMAAAIESARIFGIGMASIKHSNHFGMSAWIVQQALDADMMSLVFTNSSPALPAFGGKSKLMGVSPIACGAPGKGPMENFILDMAPSVAARGKIYKAKRRGEKIPLDXALDSDGRPTDDPEAALGGVMLPMGGPKGLHCHNDGCLSGSLSRSA

SEQ ID NO: 311241 - protein, 42 aa, Zea mays
  Clone ID: MRT4577_46907C.1.pep
SCFALEHRRRLCVISPRKCFALNPGRVDIVFMLKISLFPGSS

SEQ ID NO: 311242 - protein, 70 aa, Zea mays
  Clone ID: MRT4577_46908C.1.pep
MAMLSRAASSAGRRPLVPPSMLLAVRAKVIVLFGHIEPEPNDPILSSDQAFLADPFIDKKNDVRGAYRDD

SEQ ID NO: 311243 - protein, 47 aa, Zea mays
  Clone ID: MRT4577_46909C.1.pep
MGTHGVGHIKKNKYLTPHVTLSEGGPSPFFLKKIGIGRTLPGNENGV

SEQ ID NO: 311244 - protein, 77 aa, Zea mays
  unsure (1)..(77): unsure at all Xaa locations
  Clone ID: MRT4577_4690C.1.pep
CKMTLPLKRRETASSRSFWMRSPTTIPRRRLNSTPTRTKTQTTCKYXXTQDASRTEKPNHKELEARKTEIDGHLWQR

SEQ ID NO: 311245 - protein, 73 aa, Zea mays
  Clone ID: MRT4577_46910C.1.pep
PHLRQTPVAWQREAPWVQNLTLDGGVRLWVQDTSQGSNRRMEGLTLQDPPHSRDDKPPSRGGSQSSDRGSLTD

SEQ ID NO: 311246 - protein, 205 aa, Zea mays
  Clone ID: MRT4577_46911C.1.pep
MVAKQEDTKPTTQKFSKGERSIPHHSQKASKYYPAEDVAVPKKARKSVRPAKVRESLQPGTVVILLAGRFRGKRVVVLKHLSQGVLLVTGPFKVNGVPLRRVNARYVIATSTKVDLKGVDEKVIEKASQDGYFTKDKAAHKPGEDAFFKQGEKPEKKETSKDRVEDQKAVDKALLATIKKEAHLADYLGASFSLRSSDRPHQMVF

SEQ ID NO: 311247 - protein, 73 aa, Zea mays
  Clone ID: MRT4577_46912C.1.pep
DSKRANSLNAGMMCTEMTQVHHVQGELTAECQGHIIMACSLGKGRITMRKTVNNANSQNLGGGGCGPNRLKCL

SEQ ID NO: 311248 - protein, 70 aa, Zea mays
  Clone ID: MRT4577_46913C.1.pep
LGILKCRRTPLHTDVFGGFYLTCPNHLNRYWTSFSSIGATSILSRQYSTPYNIAGLTSSSIYTSLSIDPK

SEQ ID NO: 311249 - protein, 61 aa, Zea mays
  Clone ID: MRT4577_46914C.1.pep
APFFFFFFFFFFFFFFFFFFFFFWVLQHFSDLALISCCPQLFIYRGHMNYPYLPFPHLLLG

SEQ ID NO: 311250 - protein, 54 aa, Zea mays
  Clone ID: MRT4577_46915C.1.pep
SERVGLVTIHVVRRACCALLYIHVDGFFFFKTKDCMRCQRYICDMNGMAGPVVI

SEQ ID NO: 311251 - protein, 47 aa, Zea mays
  Clone ID: MRT4577_46916C.1.pep
NCSFLFLFFQLTNFITLKPRTLFCFIYMAFSLLCCSMGCIDFFTREF

SEQ ID NO: 311252 - protein, 126 aa, Zea mays
  Clone ID: MRT4577_46917C.1.pep
LEAGRENDRFNCFTRCIPLAAGLFRCGRRSTHDASHTEVSSGICSLPLPPPAETYPSRACAPSRPSATARATTRSRQGKHASVRSTRGPSATLHAPGRRTLTPTYMEYHHVMLKLDIVELPREHMV

SEQ ID NO: 311253 - protein, 99 aa, Zea mays
  Clone ID: MRT4577_46918C.1.pep
GMAFCGGLYRIPLSPRKGICPKLIQCGEPKGFPSRTAVNGRAFACKIPPYIGIWPPPRQARAPASFIYFPIIFFPYLPPLRICNGSFRVIAHTATHGDG

SEQ ID NO: 311254 - protein, 176 aa, Zea mays
  unsure (1)..(176): unsure at all Xaa locations
  Clone ID: MRT4577_46919C.1.pep
MECYMISSAALAVVPLGLAPLVRCSSFFAVDCSKKKIKTDKPYGXIEGGLIVYVHANGRKGXGNAEDQFVYKYGANVDGYIPIYNQVXWYPTGDVYICGTXTGLLIWAVTLAGILGGGVLLIYNTSALSDLKISNACASCYSPCKITVSVYNLTSMDAQPSPCNNNQCTKKTEKKR

SEQ ID NO: 311255 - protein, 160 aa, Zea mays
  Clone ID: MRT4577_4691C.1.pep
AMRARLPGPTHTSRADQRLSGMAMFVRGLRCDRLLAGGPTPSTQSRPLSQAPESEPPPSATPTSKLNPGTLLGRRPCACSLTRGRCTANGSPRSLTWSWTKHGADDGAVDATTGHRSAPDVAQPEHMPEAPGDHGVLKPTANEARPSAHKQPSYNAEDYS

SEQ ID NO: 311256 - protein, 147 aa, Zea mays
  unsure (1)..(147): unsure at all Xaa locations
  Clone ID: MRT4577_46920C.1.pep
VGGVGGKKXRGGVPGGKEDQKGTPKKGETKGGPPGGGKREGEGGRGPRPRGGGKGRINRQGXRKKGQKPHRQGRGTKEXPLAMYPEGGKKKPSGGGGKKTPGGGEKMGTRGGGKKGGGGGGAKYGGAPGGAQTGPLDRGAKPRGRKG

SEQ ID NO: 311257 - protein, 186 aa, Zea mays
  Clone ID: MRT4577_46921C.1.pep
MNSYSGDRSSSRPTTTSFDSYRFDFGANPSRSSTSRPLRDQRPGGATNPSPRPTTTNTWSHQPVKTSWTHQPSPSAAAALGSGPVSMVGDISGRSWSATAPSSGIGLPQSNNPNLFSDLLGPALGSTRAQSNAPLRSAAAQPSKPSSANPRTNSSSFSMGGMASTLPKTTGAPIASGSYGGLVAGQ

SEQ ID NO: 311258 - protein, 119 aa, Zea mays
  unsure (1)..(119): unsure at all Xaa locations
  Clone ID: MRT4577_46922C.1.pep
MAKSAASSVVRCLQLLTAAAVLADAAAGGGLPTSFYSKKCPDVQSIVRAGVASAVXRRSSMGAFILRMFFHDCFVNGCDASILLDDTATFTGEKNAVPNANSVRGYEVIDAIKVRVEAF

SEQ ID NO: 311259 - protein, 441 aa, Zea mays
  unsure (1)..(441): unsure at all Xaa locations
  Clone ID: MRT4577_46923C.1.pep
MNPIATAAPTPSSFFASNRRFAPRLRSLLPAAGMSSAAVSASAPSPSSGTGEQAKAAPLPHSTLEIAGARRGLLSGFASLRAPYRAFPVLASNRHVETIFAALTRSLPAVKLRRECLRAPDDGAVALDWVSGDDRVLPNDAPVLILLPGLTGGSDDTYVRHMLMRARSKGWRVVVFNSRGCADSPVTTPKFYSASFTGDLRQVIGHILGRYPQSNVYATGWSLGANILVRYLGEETDKCPLSGAVSLCNPFNLVIADEDFHKGFNNVYDKALARALTTIFKKXHALLFEGLEGEYDVHKAANARTVRDFDEGLTRVSFGFKSVDDYYSNSSSSDSIKDVCIPLLCIQCVHADNDPIAPSRGIPRDDIKANKNCLLIVTPQGGHLGWVAGDEAPFGCPWTDPIVMEYLEHLENEKDSSTKNNTSYEGVSEASVSHLTVHGQR

SEQ ID NO: 311260 - protein, 439 aa, Zea mays
  unsure (1)..(439): unsure at all Xaa locations
  Clone ID: MRT4577_46924C.1.pep
MSYAAVSASAPSPSSGTGEQAKAAPLPHSTLEIAGARRGLLSGFASLRAPYRAFPVLASNRHVETIFAALTRSLPAVKLRRECLRAPDDGAVALDWVSGDDRVLPNDAPVLILLPGLTGGSDDTYVRHMLMRARSKGWRVVVFNSRGCADSPVTTPKGKVLRSHLYGLIDWEVHCPLLSXISNSRHTHFVLFYSASFTGDLRQVIGHILGRYPQSNVYATGWSLGANILVRYLGEETDKCPLSGAVSLCNPFNLVMGCEDFHKGFNNVYDKALARALTTIFKKDLNKIXHALLFEGLEGEYDVHKAANARTVRDFDEGLTRGLQQRLTQLYXCNFYSFLFTFQRTLQWFAVSFGFKSVDDYYSNSSSSDSIKDVCIPLLCIQADNDPIAPSRGIPRDDIKANKNCLLIVTPQGGHLGWVAGEHXPFRCPWTXPIVMEYL

SEQ ID NO: 311261 - protein, 80 aa, Zea mays
  Clone ID: MRT4577_46925C.1.pep
NGGGGRYKRGQLTPWTPKTPGTPLLLKTPRGPGKVWGRVFPPGGNLAPKGMGANLFGGGQANSPPVLDGVFRGEARSTPP

SEQ ID NO: 311262 - protein, 70 aa, Zea mays
  Clone ID: MRT4577_46926C.1.pep
PPLSLFHSSFFFYVCYIQFRYQPLSVVPNLILSHSRRGRNGSTTKVLGGEGCKHFRSKKMGEGGASKRKG

SEQ ID NO: 311263 - protein, 238 aa, Zea mays
  unsure (1)..(238): unsure at all Xaa locations
  Clone ID: MRT4577_46927C.1.pep
MAMAAIASPSSRTLIPPRPRHHGAAPSPSTSGDSSLRLLRAHPRHGRRGRAVSVSTPAARSRPFVFSPRAVSDSKSSQTCLDPDASTSVLGIILGGGAGTRLYPLTKKRAKPAVPLGANYRLIDIPVSNCLNSNISKIYVLTQFNSASLNRHLSRAYGSNIGGYKNXGLLEVLAAQQSPDNPNWFQGTADAVRQYXLWLFEEHNVMEFLILAGDHLYRMDYEKFIQAHRETDADITVA

SEQ ID NO: 311264 - protein, 52 aa, Zea mays
  Clone ID: MRT4577_46928C.1.pep
AETSPRPSSESTVSCRSAAHSSAVTLPAYTYISPLLDVAIPLSYALFWALPG

SEQ ID NO: 311265 - protein, 109 aa, Zea mays
  unsure (1)..(109): unsure at all Xaa locations
  Clone ID: MRT4577_46929C.1.pep
KTWLVVHATDRILGWLAFTMAVHIKGMNEPPYTPRVHTGALALAVNADXGAASGQKRPPKPYWKHLXRPVRTNEETFDLLXKQIPXENDLXHTVRGMLPICRLAKILFT

SEQ ID NO: 311266 - protein, 74 aa, Zea mays
  Clone ID: MRT4577_4692C.1.pep
KNCFFYIKGGKVVPFNSQQGFNRTMTTPMGQRSKRKENFLMAGPALACQRYISPMGSRGQLFAFGPKIPALPAM

SEQ ID NO: 311267 - protein, 61 aa, Zea mays
  Clone ID: MRT4577_46930C.1.pep
VTNASPFKKKIVDCRGYFSVSRAQPPRLVGTISSADLSSHPPHPPQGALNRSMSSRHSPGR

SEQ ID NO: 311268 - protein, 53 aa, Zea mays
  Clone ID: MRT4577_46931C.1.pep
GPRSQKQRRPFKARRVFPCQIKGKGIPGLLPMVTSKTVRERSIFLNLGKVLGP

SEQ ID NO: 311269 - protein, 314 aa, Zea mays
  unsure (1)..(314): unsure at all Xaa locations
  Clone ID: MRT4577_46932C.1.pep
GTCCIPYKGYYGPAISALSATPNFVPTPPXRPPARAAGVPVGAPGFALIALAGIFLWCQKRRKLLLELEELYTIVGRPNVFSYSELRSATENFCSSNLLGEGGYGSVYKGKLSDGKVVAVKQLSQSSNQGKMQFAAEIETISRVQHRNLVRLYGCCLERKTPLLVYEYLENGSLDHALFGKGSLNLDWPTRFEICLGVARGIAYLHEESTIRIVHRDIKASNVLIDADLNPKISDFGLAKLYDDKKTHVITNVAGTFGYLAPEYAMRGHMTEKVDVFAFGVVALEIVAGESNYQNALDEGTTYIFERVWELYEN

SEQ ID NO: 311270 - protein, 79 aa, Zea mays
  Clone ID: MRT4577_46933C.1.pep
VSMVSGSSEHRVEEVNLGGAGPELLVHHVNVGHGAAVGVVGVDVETVVHQGHDLLLVGHHMMQPPPVGVQLLVNIIPQL

SEQ ID NO: 311271 - protein, 120 aa, Zea mays
  Clone ID: MRT4577_46934C.1.pep
TKLSANQIIIHAWLWIKQHLSQTWGRLSSMRQKASTTAYRHCLDILHKYREQEFLSPSNDIRYIVMTELGTSIHQTNQQEAPPSVKGPAQISACFVLHEAHAKYEQIARPGLDHLPHPNK

SEQ ID NO: 311272 - protein, 38 aa, Zea mays
  Clone ID: MRT4577_46935C.1.pep
YLQLCHDHQRVICVELGRLPSCLQEMDKSSIITSGLLQ

SEQ ID NO: 311273 - protein, 458 aa, Zea mays
  unsure (1)..(458): unsure at all Xaa locations
  Clone ID: MRT4577_46936C.1.pep
MGHRRNYSDDEFSVASEKPEVEFMDFQNGDTFQDYSSEDTPVLVSAPFPFEHGKPKSVLVGETSADTIQIENTSPEPVNLWSVRIFSSNPEDSYVLSMMRPPSNGASEEEKQAFLALTSVEDRTLRPGQTLTVWLSCTPKDIGLHTSIVHVDIGNEKIERVAFLLADDNVSKSLFSDKPYSRRRVQVKKFEPSPFVPGCRPTQQHVQGYKHKLPQYAIPAHIRELIESKQTPDVLYDELSMVNYAEYFSTLLVMEELNLEEEMRTYDMEGVLMRRRGMHFLSLEVPGLAEKRPSLVQGDFVVARYAGNHAQAYQGFIHRVEADEIFLQFDHQFHMNHHDRNRYHVSFTYNRVNMRRLYKSIDDAKYLGPGILFPRQSPCRVLKRWPFNPLNPHINTEQADAVAMVLACRGGSPYVIYGPPLTGKIMTIVEFVLQFYTXERRGKFLICAASXTAADHVL

SEQ ID NO: 311274 - protein, 86 aa, Zea mays
  Clone ID: MRT4577_46937C.1.pep
MPEVKKIWPTATTTVHGDPVIYGDEVRDTAARSLRYFSCWNSSVTMAWYRHCMLEKAFYPRYMKMFLPFRARRDMLHHDRNSPTRN

SEQ ID NO: 311275 - protein, 341 aa, Zea mays
  Clone ID: MRT4577_46938C.1.pep
HSSRSGGTEKRGERMEIQSSGRSIEGLMEKVLSVNILSSDYFKELFKYKTYHEVVDEIYNQVDHVEPWMTGNCRGPSSAFCLLYKLFTMKLTVKQMHGLLKHQDSPYIRAIGFLYLRYVAEPKTLWTWYEPYIKDDEEFAPGSNRKVTTMGVYVRDLLLGQYYFDSLLPRVPLPILRQVTSHLEKLKLPTKQSGMTGDSNRLESNDTARRPPSVKASLSVSFGQRAPHRASTRDSSPVRRTLPSKQDKEGDRAKSPPMKHRSRGSERDHDLERERSDRERGSGRYYKDREPDRHAREHRDRDHRRSDYSDRDGETRGRERRDRDSDRSRHASVRRSRSRKS

SEQ ID NO: 311276 - protein, 179 aa, Zea mays
  unsure (1)..(179): unsure at all Xaa locations
  Clone ID: MRT4577_46939C.1.pep
PSVRPASLRYVAEPKTLWTWYEPYIKDDEEFAPGSNRKVTTMGVYVRDLLLGQLLXEETSSLPPVTSLYKYYFDSLLPRVPLPILRQVTSHLEKLKLPTKQSGMTGDSNRLESNDTARRPPSVKASLSVSFGQRAPHRASTRDSSPVRRTLPSKQDKEGDRAKSPPMKHRSRSSERDHD

SEQ ID NO: 311277 - protein, 118 aa, Zea mays
  Clone ID: MRT4577_4693C.1.pep
SSLNYGTVPGRHSMSEERQSYLKRLGYPELHSSNFFDLDLLSSSGNSFDEEVFERSLLINSPMDVISPESSMSYSEQGHTDEGRDDTDLSRSSSQLSDIRDYSDHFAQWVVNGGTLCY

SEQ ID NO: 311278 - protein, 485 aa, Zea mays
  unsure (1)..(485): unsure at all Xaa locations
  Clone ID: MRT4577_46940C.1.pep
HSSRSGGTEKRGERMEIQSSGRSIEGLMEKVLSVNILSSDYFKELFKYKTYHEVVDEIYNQVDHVEPWMTGNCRGPSSAFCLLYKLFTMKLTVKQMHGLLKHQDSPYIRAIGFLYLRYVAEPKTLWTWYEPYIKDDEEFAPGSNRKVTTMGVYVRDLLLGQVXLEVFHXSIKKQYPELLSQCLLSYPTTSEXRPLTILFSEXMQLVFLESLPVDLAYXGCFNCGVAFKRXSSLPPVTSLYKYYFDSLLPRVPLPILRQVTSHLEKLKLPTKQSGMTGDSNRLESNDTARRPPSVKASLSVSFGQRAPHRASTRDSSPVRRTLPSKQDKEGDRAKSPPMKHRSRSSERDHDLERERSDRERGSGRYYKDREPDRHAREHRDRDHRRSDYSNRDGETRGRERRDRDSDRSRHASVRRSRSRSPVRGRSDGDKHRSSPFGRAPELSNLAKLKDLYGDATNVKNDAGDDRAHRDSGTEEVIRLGGARWR

SEQ ID NO: 311279 - protein, 85 aa, Zea mays
  Clone ID: MRT4577_46941C.1.pep
EGSGVCACVFQEALLENALFVYAIAWCFTPKIPGVPCPNQEALGTCLWFALFALFVCTPLLLVCSPILSVKPLLTIKGIRSHSTR

SEQ ID NO: 311280 - protein, 78 aa, Zea mays
  unsure (1)..(78): unsure at all Xaa locations
  Clone ID: MRT4577_46942C.1.pep
RETFQTEGGGXFSPLTRARASHCHVATDKGGAGGGGAGASHLFRIGYRAGHACPSDLTTGLRPDFSVRVSPPPPPGPR

SEQ ID NO: 311281 - protein, 97 aa, Zea mays
  Clone ID: MRT4577_46943C.1.pep
DRLSTKSACHCPYRGRLLLSVRTTREPKTSDIISDKEIKERLNRLPSACGTNVPMTIRREGKDRPREESDALTSPSVSASRVTSLTMITCTYHMMLY

SEQ ID NO: 311282 - protein, 341 aa, Zea mays
  unsure (1)..(341): unsure at all Xaa locations
  Clone ID: MRT4577_46944C.1.pep
MASPAAVLVSNGGISPHAPPSAAAFLVSTPGAYTTAPGTLLWWTRHLRRLAESATLLARSRPNLLXASPSPDRAPSTSIYXSIHSLVNPSVRVAIREMRTRLPMTKDEDLALTALVRGADPISGGGGAGLDVFVHVGTYSPPIFGESGARLAAAGRGRDAAAAKYASWARIRKSLEKMRPPGVTELLLTNDGDHILEGAVTNFFVVCXRRNARATENSLXTMATKFEVQTAPLSDGVLPGIMRQIVIEVCHDIGIPVREVSPSWSMNEFWKEAFVTSSLRFIQHVESVQVPLFWEDIQSKTWSDVPWAVKKFQGVGCITTQIQRELLKRARSDEYGVNGLL

SEQ ID NO: 311283 - protein, 75 aa, Zea mays
  Clone ID: MRT4577_46945C.1.pep
AHCLDLMLEDIGKINEFNTCINHAKKVTRFVYKHGRILDMMRGKIGGDLVRPAVTRFATSFLTLASMQKNKQGLK

SEQ ID NO: 311284 - protein, 45 aa, Zea mays
  Clone ID: MRT4577_46946C.1.pep
RYWSSQIMRVLFNYTVTQSRIKLSSIFYKPLIVDYFIFGQIIRGL

SEQ ID NO: 311285 - protein, 87 aa, Zea mays
  Clone ID: MRT4577_46947C.1.pep
GTFSSGTSSALGWPMLTRCCSPAAPLSVWRVILHCDQLSAFFPSGFTVVKCISDCGLYLYACVPLCALLITFFPSLLAPCGHAMQLN

SEQ ID NO: 311286 - protein, 42 aa, Zea mays
  Clone ID: MRT4577_46948C.1.pep
GIEIAFGLKNAVARYHFLNQCNVLTTKFSFSFKLDTNYFLNS

SEQ ID NO: 311287 - protein, 143 aa, Zea mays
  Clone ID: MRT4577_46949C.1.pep
MAPPRTVICVGDVHGYISKLESLWANLQSALPADAFAAALVIFLGDYNDRGPDTRRVLDFLLALPARHPAQRHVFLCGNHDLAFAAFVGALPPPPDGSPFAATWDQYIDNEAHEGWFRGPGHEDMHVQGRRWGGVIKERWNPK

SEQ ID NO: 311288 - protein, 123 aa, Zea mays
  unsure (1)..(123): unsure at all Xaa locations
  Clone ID: MRT4577_4694C.1.pep
PLIGVNSKFRPVRPAFPRPEFVLWGPFPHWWLRGDKARXIPRAPAPLVSLRALGPFFLRPKFGSPPLWAGVLGFLGSEPPLTRGEWAFPSATFVLWSNFGRAPLFRVLLCFQNKKCAPSGFFK

SEQ ID NO: 311289 - protein, 62 aa, Zea mays
  Clone ID: MRT4577_46950C.1.pep
LSLADLNHVFVTLCLFATPYAFVLNAHPHVKAWWSGLMKRPSVQKVAALMKPFALNGCPVNR

SEQ ID NO: 311290 - protein, 87 aa, Zea mays
  Clone ID: MRT4577_46951C.1.pep
CLIRSDMGTGRVIGTAVVYLLPVPAAHVCIGLKPFAGDEHSQHQGVTMSSSMESVYLTDTTESFTQAQEAKDASKFILILYRVIQDP

SEQ ID NO: 311291 - protein, 123 aa, Zea mays
  Clone ID: MRT4577_46952C.1.pep
LGTPTESPHSPGMLSWLSMLTAPTIRPVILLRQLQMASPLAVLETRMFRVCASSLHHVADGSPRAAHSVGVAGGSAGSPPASSSADGEASRPRRPATTSSRSGAAAAPCLVGGRSRAAIIRGL

SEQ ID NO: 311292 - protein, 188 aa, Zea mays
  unsure (1)..(188): unsure at all Xaa locations
  Clone ID: MRT4577_46953C.1.pep
MPKMNNEKTARSVQREPHPALHPGGRVLRFAMRNSNHLEGVRRRTASQPPRRADKSPPLNKYDLACDDLASMNSIVLDYDVMVMTGAQLFMNYDVKIPDXRSKILDGXSSDMYSLVGSVAMDRMSDWFGAEDTMVARGXICFAGELIMGLAPNYTILMIARFQMNSPVGYKIMIAPAYTARGLDHVLE

SEQ ID NO: 311293 - protein, 311 aa, Zea mays
  unsure (1)..(311): unsure at all Xaa locations
  Clone ID: MRT4577_46954C.1.pep
MGRRSSQFPSMALAMATVLMALAGVAATARAGGGIAIYWGQNGNEGTLAQTCATGNYRFVNVAFLPTFGRGQTPALNLAGHCDPASGGCTGVGADVKACQRMGVKVLLSIGGGVGSYGLSSRADARSVAAYLWDNYLGGGGGGSESRPLGDAVLDGVDFDIESGGGMYWDDLARFLKSYSRXGRARRPVYLSAAPQCPFPDASLGTALATGLFDYVWVQFYNNPPCQYSASAGVGSLAKAWAQWTSIRAGRVFLGLPAAPQAAGSGFVPASDLVAQVLPVVKNSTKYGGIMLWSRYYDGLTGYSDAVKSYV

SEQ ID NO: 311294 - protein, 57 aa, Zea mays
  Clone ID: MRT4577_46955C.1.pep
VKRFSSNRFTFTRESLEITLVENQLWKSEPLPNETTVHSKLNTTRISFPGKRACSDW

SEQ ID NO: 311295 - protein, 175 aa, Zea mays
  unsure (1)..(175): unsure at all Xaa locations
  Clone ID: MRT4577_46956C.1.pep
RTNSCSDHELAEVDDGGCAEQQEDAAGGGGRAGGGGAAGFVRFGGDHLRPGGVLLLLLRVFRGPVSGRGRGLLWGSXGSPLVPLSXFSGPIIAXXSGXXPXLAALRLXGSTATXKEIMVVVKVLWRDPREKLCQVIHDPPLSCLAIGSRGLGILKRVLLGSVRDYVVNNAACPCP

SEQ ID NO: 311296 - protein, 104 aa, Zea mays
  unsure (1)..(104): unsure at all Xaa locations
  Clone ID: MRT4577_46957C.1.pep
PPGGGCRARHAGPTRDKRKRTGTSNDAAPRAGRHRNRKQHSKGRKSQAPEAEATQTATXAXDAPPQXARKNPDTQDGNNPEETNQAGAGGTRAEHDRNRGHEAG

SEQ ID NO: 311297 - protein, 51 aa, Zea mays
  unsure (1)..(51): unsure at all Xaa locations
  Clone ID: MRT4577_46958C.1.pep
LSNTNPIXIFFYFYPTTIVLKDHSISHYSNKSHIQFITLYLNYSNQLTTYM

SEQ ID NO: 311298 - protein, 261 aa, Zea mays
  Clone ID: MRT4577_46959C.1.pep
MKRPRGASPPLAAMTNPNDDGYGVVGMEADADADADEEMMACGGGGEKKRRLSSEQVRALERSFEVENKLEPERKARLARDLGLQPRQVAVWFQNRRARWKTKQLERDYSALRQSYDALRHDHDALRRDKDALLAEIKELKAKLGDEEAAASFTSVKAEPAASDGPPPVGVGSSESDSSAVLNDADPPVAEAPVPEVRGTLLDAPGAVAANHGGVFFHGSFLKVEEDETGLLDDDEPCGGFFSVEQPPPMAWWTEPTEHWN

SEQ ID NO: 311299 - protein, 203 aa, Zea mays
  unsure (1)..(203): unsure at all Xaa locations
  Clone ID: MRT4577_4695C.1.pep
RPGRAFPLLSPLTSLLPSLASLLSVPTEQQPRADVKNHWHVVMARRSRERSRLLARAASSSSSSSTGGYLFGAVTSATSSLCFGFSKLGGAGSASGSGGLFKSLVPAPPTSPFKNFGIATASKGLLGPSFKASXGTATAASSQRHLSPSSSPLQEKXGMDISHHGRHEHHQKDYHASDIADEPLKKKDVSFFDFLGVGRTACG

SEQ ID NO: 311300 - protein, 315 aa, Zea mays
  unsure (1)..(315): unsure at all Xaa locations
  Clone ID: MRT4577_46960C.1.pep
LPASPVLFFLRESIVFGGDVVAERVRRIESSCVFPDDGYGVVGMEADADADADEEMMACGGGGEKKRRLSSEQVRALERSFEVENKLEPERKARLARDLGLQPRQVAVWFQNRRARWKTKQLERDYSALXQSYDALRHDHDALRRDKDALLAEXLSTLCRYTSCWTSTMTRAMADRRPDPLGWLPEFLXIKELKAKLGDEEAAASFTSVKAEPAASDGPPPVGVGSSESDSSAVLNDADPPVAEAPVPEVXGTLLDAPXAPVAANHGGVFFHGSFLKVEEDETGLLDDDEPCGGFFSVEQPPPMAWWTEPTEHWN

SEQ ID NO: 311301 - protein, 168 aa, Zea mays
  Clone ID: MRT4577_46961C.1.pep
LNECPHLCALSYDYLKKTEGYEQNLLAFFHNKMNPDALLVQLIEEMDKCILGYFSFHWKYATHIITQVLTHEQPRRKLRRMVMEATRKMRFERVTRELKVTRLFTTLVEELKAIGVHCQHDHNRAGTDVMDPAAHSDRSPGLLLMGGGMGAGKSTVLKQIMREVLWTE

SEQ ID NO: 311302 - protein, 126 aa, Zea mays
  unsure (1)..(126): unsure at all Xaa locations
  Clone ID: MRT4577_46962C.1.pep
EIKGLKAKLGDEEAAASFTSVKAEPAASDGPPXVGVGSSESDSSAVLNDADPPVAEAPVPEVRGTLLDAPGAVAANHGGVFFHGSFLKVEEDETGLLDDDEPCGGFFSVEQPPPMAWWTEPTEHWN

SEQ ID NO: 311303 - protein, 113 aa, Zea mays
  Clone ID: MRT4577_46963C.1.pep
MGLIESTPANAEGQAANRGGLMISQGIIPPQDENKFASLLQETDLDSAKIKEIMKEVGSNNYDKGLNKAEFTRVAEALGLFEKAKTHGFTKEILADLYFDMFDSDKDENVNFF

SEQ ID NO: 311304 - protein, 59 aa, Zea mays
  Clone ID: MRT4577_46964C.1.pep
AYTTHANLTILGSIELYDDCIMDDTEKRYYITPSTSKNQILPFYFANQLLTLFLCNRSF

SEQ ID NO: 311305 - protein, 49 aa, Zea mays
  Clone ID: MRT4577_46965C.1.pep
RSIQLYTAARGFPTSYIAQRSCATRLSCSPGAPAPRRDTIEREGCADST

SEQ ID NO: 311306 - protein, 67 aa, Zea mays
  unsure (1)..(67): unsure at all Xaa locations
  Clone ID: MRT4577_46966C.1.pep
INDLIFDHGXGPLYDSLLGAIKDHTEPQEAQRDTHLGGEDFDNRMGNQLGHELQRKNQKDITGDPRA

SEQ ID NO: 311307 - protein, 45 aa, Zea mays
  Clone ID: MRT4577_46967C.1.pep
MGHYHSSENAVFNPRLIDSINCAPSSRVYVYVPARRRVMASCNLV

SEQ ID NO: 311308 - protein, 70 aa, Zea mays
  unsure (1)..(70): unsure at all Xaa locations
  Clone ID: MRT4577_46968C.1.pep
HIPQXSLTPXSIITQILPPYTSINFKHLTFHSNIHQQSLAPTILQQPITQLQQQYFPHLTIQSHHISSST

SEQ ID NO: 311309 - protein, 72 aa, Zea mays
  Clone ID: MRT4577_46969C.1.pep
GTVLTYLSTTLMESTIGNGAVEDKRIGGLNYNLHWQARSVIALIGGSDFTRLKRERRINSVLNIHPYNLLEA

SEQ ID NO: 311310 - protein, 128 aa, Zea mays
  Clone ID: MRT4577_4696C.1.pep
MSRITGMSSWHVAAASAPGSRGSGGLFRSPVLAPPTSLFKNFGTATMSKGLMGPSFEASGRYSYSGKQPTTPLSIIFSSPREALGMDIGHHGRHEHHQKEYHASDIADEPLKKKDVSFFDFLGVGVSS

SEQ ID NO: 311311 - protein, 85 aa, Zea mays
  Clone ID: MRT4577_46970C.1.pep
LPGRTDHGMRILWNTHILKKLAKMGIDPATHQPLANSKAAASSQSTVTDEFAKTSNTREELSLKNDGSPREAPLSTDSSEPPSWP

SEQ ID NO: 311312 - protein, 118 aa, Zea mays
  unsure (1)..(118): unsure at all Xaa locations
  Clone ID: MRT4577_46971C.1.pep
RRTREKRKMLAATDPMLWHXGVAALGLGTYGAHMFRPKNPAYKEVWHTASLYHLVHTAALLGAPITKRPNVFGGLLTAGIVLFSGTCYTVAYLEDRKFSSPAPLGGFAFIAAWASLLF

SEQ ID NO: 311313 - protein, 123 aa, Zea mays
  Clone ID: MRT4577_46972C.1.pep
RRTREKRKMLAATDPMLWHKVAAVSGVAALGLGTYGAHMFRPKNPAYKEVWHTASLYHLVHTAALLGAPITKRPNVFGGLLTAGIVLFSGTCYTVAYLEDRKFSSPAPLGGFAFIAAWASLLF

SEQ ID NO: 311314 - protein, 44 aa, Zea mays
  Clone ID: MRT4577_46973C.1.pep
YYFNKFVFLAWCRCLKLLIVVWRSNLFCWCMSSCQFGCLLDVTV

SEQ ID NO: 311315 - protein, 116 aa, Zea mays
  Clone ID: MRT4577_46974C.1.pep
KRHRSQEPLLGCIIRCSHPSLVSVYSAPPTTASTYTSSGASSAPSPSFSSLCSRLLVVRVVGGQCYGTVCTGQLSATWPARNTASAASSAAAARRPSAIVTTTPLHRCGTDAWADA

SEQ ID NO: 311316 - protein, 73 aa, Zea mays
  Clone ID: MRT4577_46975C.1.pep
GLLVPLSWEERFKVLGEKEIGHRNLVFFFWGFVKGGMGGLLSFGTGFVPCLAPPAFMFLSPPYLKSHRAPCKV

SEQ ID NO: 311317 - protein, 95 aa, Zea mays
  Clone ID: MRT4577_46976C.1.pep
MAPAEPKSGLFVGINKGHVVTKRELPLRPCHRKGKATKRVYMVRGLIKEVDGSAPYEKRITELMKVGKDKRALKLAKRKLGTHKRAKKNTEDMIG

SEQ ID NO: 311318 - protein, 56 aa, Zea mays
  Clone ID: MRT4577_46977C.1.pep
NLKLYCDKNVCRRPTMDSGRYLDTKISLQLVQIDTKYKIHNKMALFRKNTAGNPRF

SEQ ID NO: 311319 - protein, 47 aa, Zea mays
  Clone ID: MRT4577_46978C.1.pep
IQSDLLAGQTWGKREMELVSLYSIEKAERVQVLGVARLGLSNIVYSS

SEQ ID NO: 311320 - protein, 68 aa, Zea mays
  Clone ID: MRT4577_46979C.1.pep
TGGGPCKLKTPPHITTFFLKSKGTAAGGVYDHGGGGAEQTSSEGSGTASPCQRPLPPWGGSPWGGPPF

SEQ ID NO: 311321 - protein, 277 aa, Zea mays
  Clone ID: MRT4577_4697C.1.pep
MASSSTTNTSDGGAKSSSCPRGHWRPGEDEKLKQLVEKYGPQNWNSIAEKLEGRSGKSCRLRWFNQLDPRINKRPFTEEEEERLLNAHRAHGNKWALIARHFPGRTDNAVKNHWHVVMARRSRERSRLLARAASSSSSPSTGGYLFGAVTPATSSLCFGFSKLGGAGSASGSGGLFRSPVPAPPTSLFKNFGTATASKGLLGSSFEASGRYSYSGKQPTAPLSITFSSPREALGMDIGHHGRHEHHQKDYHASESADEPLKKKDVPFFDFLGVGVSS

SEQ ID NO: 311322 - protein, 202 aa, Zea mays
  Clone ID: MRT4577_46980C.1.pep
MAARAIVVLVSLILAVVAGGASAQLSSGFYSRSCPGMLKAVRSALRPAIVRERRVGASIVRLFFHDCFVQGCDASLLLDDAPGLRGEKNAKPNKNSVRGFEVIDAIKTAVEKECPGVVSCADILAIAAEESVVLLGGPSWEVKMGRRDSTTASFNGAENNIPPPTSGLANLTSLFAAQGLSQKDMVALSGAHTIGQARCTFF

SEQ ID NO: 311323 - protein, 85 aa, Zea mays
  Clone ID: MRT4577_46981C.1.pep
VRDGDDQAHQDLNAVRTVPRRHQPLAEEVGDGRQRVVRGARAVQFHRPQRGVRRTGCRAQPGVCGAVGGIIVMVRCNFFSVEVGL

SEQ ID NO: 311324 - protein, 61 aa, Zea mays
  Clone ID: MRT4577_46982C.1.pep
GFRVNPGAAEQEPTTPVQVKFRWVFFPESWREGLVNRLRKASKKGVAGSGLALLAKRGKTG

SEQ ID NO: 311325 - protein, 66 aa, Zea mays
  Clone ID: MRT4577_46983C.1.pep
CRVGCPPPSPCSRIVFLLRLCLFRWPPRGTPVWSACRPGAGSPLRRNSEEYKKKKKKKKGRPSRLE

SEQ ID NO: 311326 - protein, 196 aa, Zea mays
  Clone ID: MRT4577_46984C.1.pep
MEVPRLPQGALPSMALPRPSPQSTPRSRAHLPAIKVVTPDEDGRGSPHGGPGPSDSSGAGARKKLRLTNEQSTLLEDTFRAHNILSNAQKQELGRQVDLSARQVHIVFCVYVVVSSSILFVGKTLIGIFPAISLIGDIIIVGIFYFIGFALFCLEAFLNMWVIQLLHPSDQFRREPGEPCTCGVVHLESDTIIEYD

SEQ ID NO: 311327 - protein, 188 aa, Zea mays
  Clone ID: MRT4577_46985C.1.pep
MEAVMDLKYLPVFPNGGVAAAKKKTRLGTTAVAGGQTGVYYRECLKNHAASLGGHALDGCGEFMPSPEADPADPSSLRCAACGCHRNFHRRLPELSPPPPLLALPPPPPPLAPAPAPALASHAMRDSRTMRGEEAPDDRLPAAFDDDTEESDEGSDFEEDRPLTPLPAPGMVPLPPGYRQVAPHMLLA

SEQ ID NO: 311328 - protein, 103 aa, Zea mays
  unsure (1)..(103): unsure at all Xaa locations
  Clone ID: MRT4577_46986C.1.pep
IAQSYQYKSNNSXRGKTLLXRVFHXKHLQXEIQDSXXSCPGFVINTKPXLQGAEIIKSSLYLGSQDVTQDLKLMKDCKITHIVSIGVPGPPLPTCETWVTGLF

SEQ ID NO: 311329 - protein, 137 aa, Zea mays
  Clone ID: MRT4577_46987C.1.pep
GERQFLRRAAWLVMRTDGYFVPALFLNPAYQDELDGMFPRKDSVFYLLAHYLFHPTNEVWGLVTRFHRSYLRGSDERLGIQVRVFDGDAPFQHILDQILACTSQEHLLPDVAVTQEPSAGRGARSKAVLMTGLSSWY

SEQ ID NO: 311330 - protein, 101 aa, Zea mays
  Clone ID: MRT4577_46988C.1.pep
QLGFLTALLRCPGFMNILGTIEFTHFTIYKYKFPISMARCIRMSRYMWIILHPVYSLAELLQEAETHTMGIKDDRREETIQKCNLHIFHFSYLTRQQWKHE

SEQ ID NO: 311331 - protein, 62 aa, Zea mays
  Clone ID: MRT4577_46989C.1.pep
DALFHSLLFGDQFPFFDPAAYKSLDSLFSADPVQNNPPAPADQDMPLWSFFDGSLVKDNPPF

SEQ ID NO: 311332 - protein, 89 aa, Zea mays
  Clone ID: MRT4577_4698C.1.pep
SRVVPDPEFLPGHGTPARSACWPRASLCIATLVRSGRVNLYWRPKPRTPDYVGRVEVVGGLEDVPTAQLFVARNSSTRQKLKHSDPGVR

SEQ ID NO: 311333 - protein, 448 aa, Zea mays
  unsure (1)..(448): unsure at all Xaa locations
  Clone ID: MRT4577_46990C.1.pep
GKLLXDMDMALPVVNATAAVLARVSAAFNGPLARAVVFGVHIDGHLVVEGLLIAVIVFQLSRKSYKPPKKPLTEKEIDELCDEWEPEPLCPPIKEGAKIDAPTLXESAAGPHTIVDGKEVVNFASTNYLGLIGNEKIIDSCISSLEKYGVGXLWSTWLLWNSCDEGVHWAVQNGLHLSRSTVVYFKHNDMASLASTLEKLTRGNKRAEKIRRYIVVESIYQNSGQIAPLDEIVRLKEKYRFRVILEESHSFGVLGKSGRGLAEHYGVPIEKIDIITAGMGNALATDGGFCTGSVRVVDHQRLSSSGYVFSASLPPYLATAAVSAVNYLEQNPAVLANLRSNIALLHKELSDTPGLEIFSHVLSPIVFLKLKKSTGSPTTDLDLLETIAGRVLKEDSVLIVTSKKSNLDRCKLPVGIRLFVSAGHTESDISRLSSSLKRVSASVFSDCF

SEQ ID NO: 311334 - protein, 74 aa, Zea mays
  Clone ID: MRT4577_46991C.1.pep
QTCYYIDGYEHRQRQMSEEARSLTETGLHSIPHTSLRVHSNIRPLTKFQSCMRALTFKTPFHNHFEIVKGGKSH

SEQ ID NO: 311335 - protein, 93 aa, Zea mays
  Clone ID: MRT4577_46992C.1.pep
ARDCCETTTTSVYTLKFKLCKVRSVQFGQKVIPYLNTYDDRTIRYPDPLIKANDTIKINLETNKIMDFIKLYLPFHRLHQVIYLVRLNVSTNS

SEQ ID NO: 311336 - protein, 169 aa, Zea mays
  Clone ID: MRT4577_46993C.1.pep
DELDGYFADISNRENANLSFGQGFYKRSKLLDARKSSAVLSRDAEMRRLMQRQAETSYRKMEEFIINRLREIMRSNRFDFFIPKVSKIEGRLKNGYYARHGFRTIKHDIRTMCQDALRYKDGNDSGDIKQIVVSFIQLAKRLGNPRYISDRYGAGAQDSLDINQYSFDT

SEQ ID NO: 311337 - protein, 99 aa, Zea mays
  Clone ID: MRT4577_46994C.1.pep
KHAHTWPFPYLKLKQFTLTDGLVRIGQASMRDHAGPRPHPTPNGSAAHNHISWRGDWDWGHRPRWTWTPSTRHTHTPVCTARPRITCDRPLDHHRFTGG

SEQ ID NO: 311338 - protein, 211 aa, Zea mays
  Clone ID: MRT4577_46995C.1.pep
VKIVRATSFSIRLPEYDVPVVDKAVDATWRREQPRKIPFMPQDADSSVKTMSRPSDSSWDKIAATLMACLMAIVMMVRSVKDLVTRRLPYKGGSEEIHSTLYPDPIQKEEFRPPSPIPGFAEADLFAVVLQRLGELEEKVQMLQEKPSEMPCEKEELLNAAVRRVDALEAELIVTKKALHEALIRQEELLAYIDRKEIAKAQRKKKAMLCY

SEQ ID NO: 311339 - protein, 92 aa, Zea mays
  Clone ID: MRT4577_46996C.1.pep
PLRALQIRLGDVELSKGYPTPSAATSSKSCTADVTPLKSIVSTSKPYQSNVLVTKTCHRSVTAKYQLESHMYTNNPFSIHAYVESLLQNNTR

SEQ ID NO: 311340 - protein, 628 aa, Zea mays
  unsure (1)..(628): unsure at all Xaa locations
  Clone ID: MRT4577_46997C.1.pep
MSGHLDRFARPCFEGCSSHDERRDHKSDFEVSEDEKKTRISSLKKKAIDASTKIRHSLKKTRRKSGSRVLSVSIEDVRDLEELQAVEAFRQALLLDELLPARHDDYHMMLRFLKARKFDIDKAKQMWIDMLQWRREYGTDTIVEDFEYTELSTVLQYYPHGYHGVDKEGRPVYIERLGKVDPSKLMNVTTMDRYVRYHVKEFERSFLIKFPACSLAAKRHIDSSTTILDVHGVGLKNFSKTARELIQRLQKIDNDNYPETLYQMXIVNAGPGFRXLLWNXTVKSFLDPKTTAKIHVLGNKYQSKLLETIDASELPEFLGGTCTCPEYGGCLKAEKGPWKDPNILKIVQSGGVHCARQIVTISNGEEKFITYAKPNRHTMRGSDTSTAESGSEADDAVSPKALRSYISHPKLTPVREEVKMFRATSFSTRLPEYDVPVVDKAVDATWKREQPRKAPSVPQDADSSVKTASKPSGRPWDKIAANLMACLMAIVMLVRSIKDLATMRLSSKGGSEESYCTLYPDSVQKEEFRPPSPFPGFAEADLFAVVLQRLGELEEKVQMLQEKPSEMPCEKEELLNAAVRRVDALEAELIVTKKALHEALIRQEELLANIDSKEIARAQRKKKTMFCY

SEQ ID NO: 311341 - protein, 230 aa, Zea mays
  Clone ID: MRT4577_46998C.1.pep
HASDGVIHNPFPEAEHFGQSVAYVAVNGALAGLICFEDKLRGDSRQVIETLSKQGISVYMLSGDKESAAMNVASVVGIQADKVLAEVKPHEKKKFISELQKEHKLVAMVGDGINDAAALASADVGIAMGGCVGAASDVSSVVLMGNRLSQLIDALELSKETMKTVKQNLWWAFLYNIVGLPIAAGALLPATGTILTPSIAGALMGFSSVGVMANSLLLRVRLSSGGSENH

SEQ ID NO: 311342 - protein, 406 aa, Zea mays
  unsure (1)..(406): unsure at all Xaa locations
  Clone ID: MRT4577_46999C.1.pep
MSGHLDRFARPCFEGRSSHDECRDHKSDFEVSEDEKKTRMGSLKKKAIDASTKIRHSLKKNRRKSGSRVLSVSIEDVRDLEELQAVEAFRQALLLDELLPARHDDYHMMLRFLKARKFDIDKAKQMWMDMLHWRREYGTDTILEDFDYTELDTVLQYYPHGYHGVDKEGRPVYIERLGKVDPSKLMNVTTMDRYVRYHVKEFERSFLIKFPACSLAAKRHIDSSTTILDVHGVGXLKNFSKTARELIQRLQKIDNDNYPETLYQMFIVNAGPGFRLLWNTVKSFLDPKTTAKIHVLGNKYQSKLLETIDASELPEFLGGTCTCPEYGGCLKAEKGPWKDPNILKIVQSGGVHCARQIVTISNGEEKLVFMQIEVPCVTFESIFIDFISRIFCIKSLVMCCFVKNML

SEQ ID NO: 311343 - protein, 119 aa, Zea mays
  Clone ID: MRT4577_4699C.1.pep
DPFPAKWGVGSIFGPECENRGMLPRGAGDSIIFSPPLFLPPNEVEEFLSKSPDPLRPPEDRFGNLKPRKNYPMLLVVPPVRMVMPVPKNQYIFNLFFSKVLGCPSYPLEKGQLFLFMDQ

SEQ ID NO: 311344 - protein, 59 aa, Zea mays
  Clone ID: MRT4577_469C.1.pep
ARTSMSMSRLPSTTLCGDANENNLKCTDTCKLSIRMNNYDPHYDKPISGSGQMLHITRT

SEQ ID NO: 311345 - protein, 180 aa, Zea mays
  Clone ID: MRT4577_46C.1.pep
HERRRSVREGRGLPPPSPALVPYLPNGAPLRLSKKQGVTIAKGHKNYELMLNLQLGIRHAVGRQGQVLLDLKSSAFDPKEKVWTKFPPEGSKHTPPHNSCDFKWKDYCPKVFRTLRKLFKVDPADYMLSLCGDDALRELSSPGKSGSFFYLTNDDRYMIKTMKKGEVKMLLRMLQAYYNH

SEQ ID NO: 311346 - protein, 166 aa, Zea mays
  Clone ID: MRT4577_47000C.1.pep
VLAEVKPHEKKKFISELQKEHKVVAMVGDGINDAAALASADVGIAMGGGVGAASDVSSVVLMGNRLSQLIDALELSKETMKTVKQNLWWAFLYNIVGLPIAAGALLPATGTILTPSIAGALMGFSSVGVMANSLLLRVRLSSRRKREPLKAISDEVEKNYSSKWST

SEQ ID NO: 311347 - protein, 127 aa, Zea mays
  unsure (1)..(127): unsure at all Xaa locations
  Clone ID: MRT4577_47001C.1.pep
GKLLXDMDMALPVVNATAAVLARVSAAFNGPLARAVVFGVHIDGHLVVEGLLIAVIVFQLSRKSYKPPKKPLTEKEIDELCDEWEPELLCPPIKEGAKIDALTLESAVGPHTIVDXDGKEVVNFASA

SEQ ID NO: 311348 - protein, 88 aa, Zea mays
  unsure (1)..(88): unsure at all Xaa locations
  Clone ID: MRT4577_47002C.1.pep
PGGRPXGCPQGQGXPPQGCPQMRRGGPLPRGQGTYGGVRQAFPGQPPQGGLRGPMGGQVGPQLAAMWGLQLQQPGSCPCKAAGGGVFF

SEQ ID NO: 311349 - protein, 666 aa, Zea mays
  unsure (1)..(666): unsure at all Xaa locations
  Clone ID: MRT4577_47003C.1.pep
MSGHLDRFARPWCSSHDERRDHKSDFEVSEDEKKIRISSLKKKAIDASTKIRHSLKKTRRKSGSRVLSVSIEDVRDLEELQAVEAFRQALLLDELLPARHDDYHMMLRYMYPVNYDAPFVXLMCXFHFSKSQVHSSSLTKSGXRFLKARKFDIDKAKQMWMDMLHWRREYGTDTILEDFDYTELDTVLQYYPHGYHGVDKEGRPVYIERLGKVDPSKLMNVTTMDRYVRYHVKEFERSFLIKFPACSVAAKRHIDSSTTILDVQGVGLKNFSKTARELIQRLXKIDNDNYPETLYQMFIVNAGPGFRLLWNTVKSFLDPKTTAKIHVLGNKYQSKLLEIIDASELPEFLGGTCTCPEYGGCLKAEKGPWKDPNILKIVQSGEVHCARQIVTISNGEEKFITYAKPKHHSMRGSDTSTAESGSEADDAISPKALRSYIQHPKLTPVREEVKIVRATSFSIRLPEYDVPVVDKAVDATWRREQPRKIPFMPQDADSSVKTMSRPSDSSWDKIVATLMACLMAIVMLVRLVKDLVTRRLPXIKAGQKKSTLRCTQTPSXEEFRPPSPIPGFAEADLFAVVLQRLGELEEKVQMLQEKPSEMPCEKEELLNAAVRRVDALEAELIVTKKALHEALIRQEELLAYIDRKEIAKAQWSCFLLQRKKKAMLCY

SEQ ID NO: 311350 - protein, 90 aa, Zea mays
  Clone ID: MRT4577_47004C.1.pep
MKWLLRSIVFQGSIVFQEPHFVLVCVQFKLCKVRSVQFGQKVIPYLNTYDDRTIRYPDPLIKANDTIKIDLETNKIMDFIKLTSSSYILS

SEQ ID NO: 311351 - protein, 83 aa, Zea mays
  Clone ID: MRT4577_47005C.1.pep
IYEDAKFKLCKVRSVQFGQKGIPYLNTYDDRTIRYPNPLIKANDTIKIDLETNKIMDFIKLYLPFHGLHQVIYLVRLNVSTNS

SEQ ID NO: 311352 - protein, 57 aa, Zea mays
  Clone ID: MRT4577_47006C.1.pep
PGGGATGVCIFFEFFCPTQTPLGFTHTIWPKQFGYGTLNGGGCLFPPLNSEPAPPWV

SEQ ID NO: 311353 - protein, 129 aa, Zea mays
  Clone ID: MRT4577_47007C.1.pep
DRNNDAPFPNGVINALQYYTSLLESLDSGNLNNAEAATSIERFCVQPSIQKLLTNRYRWMERSPPWRSLFGQCGFTPVTLSQTAETQAEYLLQRNPMRGFHLEKRQSSSPSLVLCWQRKELVTVSAWKC

SEQ ID NO: 311354 - protein, 77 aa, Zea mays
  Clone ID: MRT4577_47008C.1.pep
MVTTDWGPIIVAVVLFILLSPGFLFQLPARVRVVEFGNMGTSALAILVHAILYFCILTIVVVAIGVHVYTTKPDPVE

SEQ ID NO: 311355 - protein, 79 aa, Zea mays
  Clone ID: MRT4577_47009C.1.pep
HTTSKVQSLLHSFEIPNQGRFLRGDGGSFAVPAGVCSVGLALRGPSPIRPAWHLLLHFLYLVHRFTVYLELVHHRLLLP

SEQ ID NO: 311356 - protein, 240 aa, Zea mays
  unsure (1)..(240): unsure at all Xaa locations
  Clone ID: MRT4577_4700C.1.pep
SPWLIKGLAGSSISGKVRPGKALPLPAGSRALPLFSPSRRRLYLSLFPLLSPSLLPSLASLLSVPTEQQPRADVKNHWHVVMARRSRERSRLLARAASSSSSSSTGGYLFGAVTPATSSLCFGFSKLGGAGSASGSGGLFRSLVPAPPTSLFKNFGTATASKGLLGPSFEASXGTATAASSQRHLSPSSSPLQEKXGMDISHHGRHEHHQKDYHASDSADEPLKKKDVSFFDFLSIGVSS

SEQ ID NO: 311357 - protein, 95 aa, Zea mays
  Clone ID: MRT4577_47010C.1.pep
PAGLLPLVSPAIHGDGLLPLVAAGPGGPRPRLAAPCEPAPLRQAAPGAVVGHRRRATCTTCSPSGDPTTRERARRDWAHHDCVATHVAHCGGIHV

SEQ ID NO: 311358 - protein, 63 aa, Zea mays
  unsure (1)..(63): unsure at all Xaa locations
  Clone ID: MRT4577_47011C.1.pep
MCCDEIHLVDHRGMDNWLKVTHGVDHVFNRAADIGGMGVHPXNHSVIXMYNNTMISLNMQDAV

SEQ ID NO: 311359 - protein, 37 aa, Zea mays
  Clone ID: MRT4577_47012C.1.pep
LLIEFVSSGLDQKIKCSNIMNSQKRFQGASESYSIHS

SEQ ID NO: 311360 - protein, 74 aa, Zea mays
  Clone ID: MRT4577_47016C.1.pep
KVGPVPGGGGGFPISFVGVGPGHLVCFRAINPPKNHLGYINAAPKESNKGGPLFNSTMLGPINRGVVNPLSGSA

SEQ ID NO: 311361 - protein, 99 aa, Zea mays
  Clone ID: MRT4577_47017C.1.pep
NQGGEKFFSFFQKEILMGGAPKTPLKTLVFFKKPLPLGGAKGAPFFKKNFFFKLFFPKRGRAKKKNPPPTKDPLPFRTLGRGGNFFFLDPTPQRPFSLG

SEQ ID NO: 311362 - protein, 75 aa, Zea mays
  Clone ID: MRT4577_47018C.1.pep
SMTSCASREILIYYGWLRTRQRSRLPLRHGQQLPTKQQDGSGHGCTPPSTTPMLTSWMTHHPRPHADPKVQSHIH

SEQ ID NO: 311363 - protein, 285 aa, Zea mays
  Clone ID: MRT4577_47019C.1.pep
IGFLEQGRDALPSDFLVISLIRCAPSLPLGEEGGGKARKREPASEMGAGSSRADAPSRRRARLSLGGCFGAGSSSSAHDGGSFAAAGPSSSRAIEVQSRQSGRQVSALNFQASLAAKDLQVSSESNPRLHSSSSTISHHLRFNHLNYHENKEDGLGSENAETSGLQSSSRKPVMVRGSLINEAVNGDISGEGISSIGSELENVPSTVSTNEIGGSTSESGLGPSSMTSERIMSDSEVEISPQGTSSTTVMMSGRSDASQSSLTSVFSNSFTASSVIVEPMPDPSL

SEQ ID NO: 311364 - protein, 69 aa, Zea mays
  unsure (1)..(69): unsure at all Xaa locations
  Clone ID: MRT4577_4701C.1.pep
MATKILFLLMLLALSACVANATILPQCSQASIASLLPPYLASMIALVXENPAIQPYTLQHAIVLRNIPL

SEQ ID NO: 311365 - protein, 71 aa, Zea mays
  Clone ID: MRT4577_47020C.1.pep
GSRHYIQMFYTCNRKAQLTSDLRSYTIHVLLLFHHFYGCTTTDDNERFAGSQSEKKKKKKNKIKKKKKKKK

SEQ ID NO: 311366 - protein, 46 aa, Zea mays
  Clone ID: MRT4577_47021C.1.pep
PKKSSVNPFSLGLFFFPQVLVVVTVKSTPVSSFFFLSGGGPPPNVP

SEQ ID NO: 311367 - protein, 75 aa, Zea mays
  Clone ID: MRT4577_47022C.1.pep
KSPGPQFLLHFYSEILTHNTTHQTSENPTLPYTGKIQRRGHLLTLEHTLTRIYFEPGIFLDGNQPGWGAHPHTKT

SEQ ID NO: 311368 - protein, 126 aa, Zea mays
  Clone ID: MRT4577_47023C.1.pep
ALRQPASQPASAGTRTVQVQPPPSTAATPMASWSWTSVHCSSYPLPGPSARFTPSLVSATTPALRRTRARRQLQRCLCSQYAGERQPPPPPPPPQPEPDSSQQLERLFFNLNQTTMKHEPERNEIL

SEQ ID NO: 311369 - protein, 39 aa, Zea mays
  Clone ID: MRT4577_47024C.1.pep
VPRAIFLYTVGCVGCAFKNFGNFAFPMSVLPRAKAIGFP

SEQ ID NO: 311370 - protein, 132 aa, Zea mays
  unsure (1)..(132): unsure at all Xaa locations
  Clone ID: MRT4577_47025C.1.pep
CWFXLPRPXXXRPSVLLPXVRPPPXXFRLLPSPGCRGXVXPLSCXGAPWRRPPXRSRCASACRARPCXXXXGRCPXCRACPRXSXAXXRPXARXAVXSGXPXRGFGGRRXSPAXAARSPXXXVGLGRPPRXP

SEQ ID NO: 311371 - protein, 66 aa, Zea mays
  Clone ID: MRT4577_47026C.1.pep
GGKPRTKGIPKPPHLGLSFWGTPKIFKETNPIFLKDGGEGNIIPPFSLARGGEAYNGGGKRKEKFS

SEQ ID NO: 311372 - protein, 193 aa, Zea mays
  unsure (1)..(193): unsure at all Xaa locations
  Clone ID: MRT4577_47027C.1.pep
LPLAPLTGTLLVTTITDTPHLTRPTRQVLAGPHDHPASRPLVLGLSPAVAAADDHHDLKAMHLRLGVPGCESPDXRDESDITGPLHLLPSIVGYRAPADQVPTPSTEADSDQQKKAAQYSDQWNVEETTASDAXDYRRPASPPIPTYRENTMSTTHMKGIQEDXEAKHDQLFLHIQVSMDGAPHLKKIDLMTY

SEQ ID NO: 311373 - protein, 41 aa, Zea mays
  Clone ID: MRT4577_47029C.1.pep
SPHRLVFYSGDAFIRCYLPRLGNLVVPTSLHVLSTTTGCPG

SEQ ID NO: 311374 - protein, 46 aa, Zea mays
  Clone ID: MRT4577_4702C.1.pep
NTLTDLESSHLITVTWDHTHSVYSRSCTPQHQSDYSLGVHIYAAAI

SEQ ID NO: 311375 - protein, 309 aa, Zea mays
  unsure (1)..(309): unsure at all Xaa locations
  Clone ID: MRT4577_47030C.1.pep
MEFSKQGQAPLPNNIGLQSLPSSNVQSNQTEYPSLFYPSSLPGDWSSHMGTSVPVSSYYIVPMNQQSVQLGASRPEVSHPAQPLLSRVSLRPPQQVLNIQTSLPAMAGSQPSPSMAGRKSQQKVASPKVQMLKSPSFQSSNKRSAQKEPPSKDQHHQLESVRSKFRESLIAALSLDSDQLAWSLSPDDALSDGATDKFKPAAGDVVQDLAANTSKDVCTTNSGVATTVAPSRCEENEKLISGLASEMXMSINDDMQQPSNQVSSEDDLLGQCMVADELLQGHGLSWVSDHVAGISKPNAEPNDLKRPDS

SEQ ID NO: 311376 - protein, 150 aa, Zea mays
  unsure (1)..(150): unsure at all Xaa locations
  Clone ID: MRT4577_47031C.1.pep
MRGDASRYGYEEDRLCCPRRLPFRHRVRWPGGAGYTSHARNPQGAGICSRTPLRDACTCTTLSDASNYAAIDNLNELNMQEDSFCKRXSCSXKHFAKSARTMPAHETEAVTFCDTMYMNTYDTIGTWQRAITFNDTRHDKIMLQLDVQDF

SEQ ID NO: 311377 - protein, 62 aa, Zea mays
  Clone ID: MRT4577_47032C.1.pep
QDPWTVSSTYSLTVRSMPSLSSSCPLSRAPIRFEYGALGVELGSTPTGASPRCAIVVVLLQS

SEQ ID NO: 311378 - protein, 87 aa, Zea mays
  Clone ID: MRT4577_47033C.1.pep
FGTRVPYSFDCLLGLLDRCCPMGLRVRTLLALGVITVLGYYTILTLGKKLSPLTRLNESNSLPSQLLSHGRARSRERLNLLLPQRPP

SEQ ID NO: 311379 - protein, 69 aa, Zea mays
  Clone ID: MRT4577_47034C.1.pep
PSVLTSLSSDETSSAVFSYETNINRPVCVSVTTTEKKKVITTQHLTRVLQIKLHLSSAPNNASKDPALS

SEQ ID NO: 311380 - protein, 78 aa, Zea mays
  Clone ID: MRT4577_47035C.1.pep
LSLHIGLCVLDTYRSLRQVTDAVQLTCMRTFTATPLPSSSRVDYPRQGVSPAQHSTPGRVPCSGPSNRCNSRAIGPGR

SEQ ID NO: 311381 - protein, 92 aa, Zea mays
  Clone ID: MRT4577_47036C.1.pep
TVECARGPFVGALAPGLARPWLPRPPPAPTTVPAGARSLDRACRSSCPRPCPPCPYNLPKPSEPHPVNVGGRRSKESDDGVRPQRRRQPPLR

SEQ ID NO: 311382 - protein, 40 aa, Zea mays
  Clone ID: MRT4577_47037C.1.pep
RVHRRKPQGHCREHAYKSGHTALLTETAELLLGITLNQAA

SEQ ID NO: 311383 - protein, 100 aa, Zea mays
  Clone ID: MRT4577_47038C.1.pep
LAVFFFFVVSGRGRETVAALAAPFSCFEITKTVKGVEKGNRLQTLTIGILREDNVAIDHMKAAGARWNQVAELTMGLELAPLTSAELIDGCGPLVSALSG

SEQ ID NO: 311384 - protein, 72 aa, Zea mays
  Clone ID: MRT4577_47039C.1.pep
LRDIAKNKQATTLLLLRAVALRAWRPSRTGLAGGDILHETSLHLCTEQPNKRCFKSPRVQLYQWSSNPIRRT

SEQ ID NO: 311385 - protein, 98 aa, Zea mays
  Clone ID: MRT4577_4703C.1.pep
VNIMVLWFFFFFFFFFFIFFFLGLGAKQKLPPKAQSFLKPKVLKGTDFNYKCKILSWSTRDDGREHPNIALGPNKGFSKPQPGLSGKKILAGRTLFLL

SEQ ID NO: 311386 - protein, 168 aa, Zea mays
  unsure (1)..(168): unsure at all Xaa locations
  Clone ID: MRT4577_47040C.1.pep
VRVLGCYYTVDLCFRLRPSSYLLVECRTIIGKHIFCCLMLIGFXCSAATXTVVGQCLQASIELRCFNVPISSGGXGCENSVLQPYRXIQQAVAACILXPLSPLVLXNPWCLLQAVPLMHLVEHNMKAQQLQKLVLGNLYVYYXQQQFLIFNQLAXALNSADYLQQQLP

SEQ ID NO: 311387 - protein, 146 aa, Zea mays
  unsure (1)..(146): unsure at all Xaa locations
  Clone ID: MRT4577_47041C.1.pep
WPRGGRGARGGRGPGEEEGAGKGXWVDWEDLILEDTVPLVGFVRMILHSGKYESGDRLCPEHEKAILERLLPYHPQYNEKIGCGIDYITVGLHPEFENSRCLFIVRKDGEQIDFSFWKCVKGLIRQKYPMYADSFILRHFRRRQDY

SEQ ID NO: 311388 - protein, 91 aa, Zea mays
  Clone ID: MRT4577_47042C.1.pep
PPEPLCSLWLRVVLGAFLAFPQLRPQVFKLFPRAPSKRKTFDPPMGAFFPFFPKIPPLSRFTFPFGEGGGSFNIWGLGFKKKKKKKKKKKN

SEQ ID NO: 311389 - protein, 100 aa, Zea mays
  unsure (1)..(100): unsure at all Xaa locations
  Clone ID: MRT4577_47043C.1.pep
GFLLRALXVXGAPCAFLGAXXGGXLPAXWXFPXVXXXXCAVXVLAGLXXGVAPPSPGXGRXXAASXWGSSGAAPRXRCGXRPRSPPXCFPLPSRARVACS

SEQ ID NO: 311390 - protein, 746 aa, Zea mays
  Clone ID: MRT4577_47044C.1.pep
MDARLDLRFARLQQLQAEEVDEPYRDAVSPLPPLPVVYEPYREASHPPPVHDDVAGVVSTGSDDDLDLQQIAKEPSVSSPPRHSSRDAVRGPCPRPLHHQLTIPIAANLDQICRLSRPCDVADRGLLCDLLWSDPSSMEDREWADNKDRYVSCTFGADVATDCRRAQDLDIVYRAHQVVEDEYEFSVDRQLVTFFSAPNYRKLGCSFTIIKLKADRNSSSPLGCSTKCPSQALHPIVKPNLVVVLNIAGAGGKLCGGFDIKVFTRVHQTGDVSLMPNVSIELVSNMMEQGKQPSVAAIPGLALGGGLELTMSCQAQIPTHVAHTICSLVNNVMASQAHVVGQGIVDRAAFGGDHQWIVQGTANGHGLSSKVAAEVNNQFRVGIQTTAIIHVLPRGVLQFGSTGLALGNKKIVMFAKTLCSQLNNRSSLAASASAKNTSRQHGQSLIDNAIVSTSTPPNVLLIASLLWAAQQNGHPELIGKTPIVRPSLDVERHILLKGAFDKAEEIVLRMKQWDGTAGLVWQKDSLMVPKWLTDRLMAFLIFYSEAITALLCCALIPGLLLLELVKFTETWQGTVCWEPTILLLTRRHLYKQNELYATLFEGAMIGYTPGGMQFAQETIETMISSNLFLTAEMANTLSPWPWFNCVQECVLWQFDLLDISALHASRIGFSFVIILTESIKVLKMLLVDQGAAGHFFVMIWDPGGIDAMYRLEGKPNFKKGRMSAARHLNHEPLSLSQQGSWTKTSK

SEQ ID NO: 311391 - protein, 77 aa, Zea mays
  unsure (1)..(77): unsure at all Xaa locations
  Clone ID: MRT4577_47045C.1.pep
VGELDTKKVLIAALALLALAGSAVYSTSGGCGCHIPTFHLPASFYMPASFYIPAEQHPHPWQYPTXPPXLIPCQQFG

SEQ ID NO: 311392 - protein, 199 aa, Zea mays
  unsure (1)..(199): unsure at all Xaa locations
  Clone ID: MRT4577_47046C.1.pep
SKKAIKVFSSAKYPAPERLQEYGSIFTGAQDPGLQRRSRHRIQSKHRPLDERALQEKLKYFPVCVSTKPEPEDDAEEGLGGLPSNISSVSSLLLFNTTENLYKKYVFLDPLAGAVTKTHVMLGAETEEKLFDAPLSISKREQLEQQVPENYFYVPDLGQVPEIDVPSYLPDLPGIANDLMYSADLXPGIAPSAPGTIPE

SEQ ID NO: 311393 - protein, 78 aa, Zea mays
  Clone ID: MRT4577_47047C.1.pep
EPGSRGAVKCPPNYRWELLPGPDLFLISPEKRIVTFPVEQLSGQGIYNLLLSPLSKFTAPPHQKKPPRKKIKKKKKGG

SEQ ID NO: 311394 - protein, 97 aa, Zea mays
  Clone ID: MRT4577_47048C.1.pep
EPQQRGADKKGPPLGKPIPKKEPGSAKSRNPGPRGPKPKKTPLNGGRPMGKTRNPNTGTYQRGTNQRIGGKENGLPKRCTREEASQQKKKRKLYKQK

SEQ ID NO: 311395 - protein, 108 aa, Zea mays
  unsure (1)..(108): unsure at all Xaa locations
  Clone ID: MRT4577_47049C.1.pep
AMLVERTPKDSPACMHACMPPAWGLTVQSSEYPPGRTVITLPADSSSSTTXTLRYVMIVTHMMLRAVTYMYLLGLGSGNSVDKEARSAGHNHQVLFFRVIYDYLLLRT

SEQ ID NO: 311396 - protein, 149 aa, Zea mays
  unsure (1)..(149): unsure at all Xaa locations
  Clone ID: MRT4577_4704C.1.pep
HSSGNSWGAWLEVTKDAGWTWRKYGPICIKGQPLGVIQPVPYRTDDGTIRVLLRSFETIGHVCMADSIDEGVTWSYVRETELPNPNSGIDGVKMKDGXVLLAYNTFSRGTLKLAVSLNDGDSWDEVMTLEDTKGXEFSYPAVIQSWMSS

SEQ ID NO: 311397 - protein, 74 aa, Zea mays
  Clone ID: MRT4577_47050C.1.pep
YRSEFRSRHAYEAVNITMIDTPGLPPGLLKCPTRIHFCFIRMVTHAPYHLSALSHASTCLCYNRLRAYRSSVHN

SEQ ID NO: 311398 - protein, 107 aa, Zea mays
  Clone ID: MRT4577_47051C.1.pep
MAILPAPQKINHLEVLAMSGIQSMCDKFVKGLIPVHGSNLKELAFAGCLELTSASIKTVGEYCQELTSLDLRNLNRLCDSALWHLRGCRLLRKLRLQRNAFSFFLAF

SEQ ID NO: 311399 - protein, 108 aa, Zea mays
  Clone ID: MRT4577_47052C.1.pep
ITDSAERMGTRQDFPISPGRPQVNQISPNRGRGRGRYTAIVAIELIDKAAEEQEQGVSGGLRDRSRRKNPNSVTFLGPHVPVPCRFQQPHKEGVPARRGGSLTRANLI

SEQ ID NO: 311400 - protein, 77 aa, Zea mays
  Clone ID: MRT4577_47053C.1.pep
RKGDSPFLLPMFFHFLIRNHHHHHPNPNPILHNRPLRQKKNLPNSILRWPKPKKKGEIPHSFLPDLPNRIRGSGPFA

SEQ ID NO: 311401 - protein, 208 aa, Zea mays
  unsure (1)..(208): unsure at all Xaa locations
  Clone ID: MRT4577_47054C.1.pep
GSSKLPSRAFFNFDDVQLWMSCXYTSTQNGKAERMNRTITNLICTLLFXGLPACYWAEGFHTATYLLNHLSSRXVNHPTPFFAPFNTVPSYTHIRVFGXCVCYPSTSAIAPCQLVPXSTCCLFLGYSSDXKWYCCLDLLTKNIIFRHAFNEDAFPLLARXDLDVDXSSLLTTDPVDVPSPYHRSCRPFARPTWAYYLRPLHTWACFFD

SEQ ID NO: 311402 - protein, 64 aa, Zea mays
  Clone ID: MRT4577_47055C.1.pep
NMYYTSRIPDNKNNLYSNVSYVIPPELIECLCRKQVVVSESSNSSQDFGSHMSRGILVSGVQLS

SEQ ID NO: 311403 - protein, 90 aa, Zea mays
  unsure (1)..(90): unsure at all Xaa locations
  Clone ID: MRT4577_47056C.1.pep
FVKNEPLYTEVADGVFVGGWPSSVEHLPPGDPAIIDCTCESPKSSTISNNAYLRVSTWDTRAPYPLHIESAVLWAVXQRSQSKPVLFHCS

SEQ ID NO: 311404 - protein, 100 aa, Zea mays
  unsure (1)..(100): unsure at all Xaa locations
  Clone ID: MRT4577_47057C.1.pep
QXLXXXXSXNNQTTTXKFXXYKINNSXXNXPXXPFLLIXHSPLLLHXLPPPLPXXXIXHFIXLLHTTXTTLHFLTLPPLXTTFXQKNNNLSKKKKKSLYS

SEQ ID NO: 311405 - protein, 177 aa, Zea mays
  unsure (1)..(177): unsure at all Xaa locations
  Clone ID: MRT4577_47058C.1.pep
WSSHRSGDLSPASSTSLCIIFSRALIWLVIASSLFRRHVCALSSPTSXXTGGGGEKNKKSSSSPSSPSPVSFLFSASSFGSSFSSCTSTPLSTMSKSNSGNSESSAFASSGTRSGSFCGSCLTSGTTGLGSSSLKSSIPSKSSDGAPMDGISAGSERKPGARDAELILLPAGLEVPN

SEQ ID NO: 311406 - protein, 981 aa, Zea mays
  unsure (1)..(981): unsure at all Xaa locations
  Clone ID: MRT4577_47059C.1.pep
MGFLSAKLLPSCESVCVCCPALRPSSRRPVKRYKKLLAEIFPKTPDGAPNERKIVKLCEYAAKNPLRIPKIAKFLEQRSHKELRSAHVNFVRIITEAYSKLLFICKEQMAYFAISLVNVLTELLESKQENVHILGCQTLANFINSQVDNTYARNIESLVHKVCALSRRQGEDHRLLRAASLQCLSAMIWFMKEHSYIFADFDEIVHSVLENYRTEESNGGGDDRHALQHNWVDEIARSEGRPGVGGGNDVNINTTTIRLRPARNSSALTRDERDSPEVWSHICVQKLAELARESTTMRRILDPMLSYFDMKKQWAPRHGLALLVLSDMAYLEKSSGNEQLILTTIIRHLDHKNVLHDPQTKSDIIQTATSLARQLRSRGFAVELVVAGDLCKHLRKTLEAVESGNVEDQNLNEPLQIVLEDCLMEVVRGINDVRPLYDMMAITLENLPSMPTVARATLGSLLIISHIISLTSVSSNNLMVFPEALLQQILKSMLHTDIDTRVGAHHMFSAIIVRGPSHLRSESEYLYETKKQSRNTSVFASATALLEKLRREKESLSSDKPRNIMHDDVKEMNMHEEDKRKNPAYFSKLVSSFIERCATRSSVEETNIAMLTEDQTNQLLSSFWIQANQTDNTPFNYEAIGHSYSLTVLSSRLKNSSNGNIIQFFQLPLSLRSVALTPSEVLPAYCQRSIFTLAMSMLAFAGKVCHVAELSDLLRCFSSSKIDPYLRIGEDLQLYVRLQSDLGSYGSESDQEIAKSMLSDCRTKVGINDHRVLDVIASALSNFIEMGKDVIVKELTELFTPEEMPLFGSNSALDXPTSXQAFSDESLSFDEECSRTSSVDCGLHESPITNTASSISKITLPQSVPHVLGVGQLLESALHVAGQVAGASVSTSPLPYGTMTSQCEALGLGTRKKLSSWLVNGHESTPDNPMPSLPTAHHSIIPKVNPATFRTSSESCSAVKLPPASPFDNFLKAAYRTQPEL

SEQ ID NO: 311407 - protein, 99 aa, Zea mays
  Clone ID: MRT4577_4705C.1.pep
PTHPLETRTAGFSFAVSSNMLFTFLIAQAFLSMMCSMRAFIFFFFAAWIVVMAIFVLTLLPETKGVSIDEMVDRVWRRHWFWKRCFADDYDAARVYDNC

SEQ ID NO: 311408 - protein, 348 aa, Zea mays
  Clone ID: MRT4577_47060C.1.pep
AGRAGLSPARVAAPAVRGAVEALLAGPDPARADEVARRCAGLSNWYGVIPALFPNARYVHGIMTGTMEHYVKKLRHYAGGLPLVAAEYGASEGWVGANVEPETPPESATFTVLPNIAYFEFIPLKAATGHGGGTAGDTCYAEAEPEPVGLTEVTVGEHYEVVVTTFAGLYRYRLGDVVQVAGFYNSTPKLKFVCRRNLLLSINIDKSSEQDLQLAVDSAAKVLAAEKLEVVDYSSHAEVSRDPGHYVVFWELNADAGDDVLQSCCDELDRAFADPGYVGSRRARGIGPLELRVLQRGTFQKVLRHYLSLGAPVSQFKSPRCVGRANNSGVLQILSANVVKAFFSAAYD

SEQ ID NO: 311409 - protein, 70 aa, Zea mays
  Clone ID: MRT4577_47061C.1.pep
RCFSCSSVTMCIYLLDVCNVCICIILRLCLCSCKPRVLCRMFRLSCMRILSMLGTPVYSMLDKKKKKKGP

SEQ ID NO: 311410 - protein, 120 aa, Zea mays
  Clone ID: MRT4577_47062C.1.pep
IHLLLCMISQNVLLNAMQIDPYLRIGEDLQLYVRLQSDLGSYGSESDQEIAKSMLSDCRTKVGINDHRVLDVIASALSNFIEMGKDVIVKELTELFTPEEMPLFGSNSALDWANFMHQHF

SEQ ID NO: 311411 - protein, 164 aa, Zea mays
  Clone ID: MRT4577_47063C.1.pep
MQIKAALIALAGLSALSEASVLERRTPLDRAIARRQFGGGRGGGGNNNNNNGGNNNNNGGNNGGNNNNNGGNNNNGGGNGATLLADNIQAASNSNGGADTEAGQSPSKTDPDNFINFCSGQTKTNGEQVEAGSCNGIVMGKIPAIGKMVSSVIVNPLNGANLQA

SEQ ID NO: 311412 - protein, 93 aa, Zea mays
  Clone ID: MRT4577_47064C.1.pep
GALMSVWVTPVANNYGYDGDSGGGDDDYDGGNGAGGYGNSDGICRNLTVGPARPSYPVRSRDVSPSPKGLSSSGSCLLWPICVFDCKVALWQL

SEQ ID NO: 311413 - protein, 140 aa, Zea mays
  Clone ID: MRT4577_47065C.1.pep
GLHESPITNTASSISKITLPQSVPHVLGVGQLLESALHVAGQVARASVSTSPLPYGTMTSQCEALGLGTRKKLSSWLVNGHESTPDNPMPSLPTAHHSIIPKVNPATFRTSSESCSAVKLPPASPFDNFLKAAYRTQPEL

SEQ ID NO: 311414 - protein, 68 aa, Zea mays
  unsure (1)..(68): unsure at all Xaa locations
  Clone ID: MRT4577_47066C.1.pep
GHPPSKPGESPCTTPVARLKDVFHNVKTDVYDKKPKLLEPIKAGQTPKYMVTACSHSLVAXSVTLGLQ

SEQ ID NO: 311415 - protein, 97 aa, Zea mays
  Clone ID: MRT4577_47067C.1.pep
MALQWNTLTRAETAEAVVTGLDTLPMASSVMRQIVVLTCLIVPPLCRVRPFCGIQTRELYWKKEHARRCTYQICHQLQRIRFEKHLTQAHGTVIFRG

SEQ ID NO: 311416 - protein, 68 aa, Zea mays
  Clone ID: MRT4577_47068C.1.pep
QWCGPPCLRRLSLVVFCVGWFLFIWSIDSHACQFGYGMGHLFWFSWCNSVCYDVYLLYMVIDASRSSA

SEQ ID NO: 311417 - protein, 51 aa, Zea mays
  Clone ID: MRT4577_47069C.1.pep
SCAVLPWGLLFPGQFPRAPPVRVLQCLPCWVPWGPSPCFHHCSGPWGWAVF

SEQ ID NO: 311418 - protein, 82 aa, Zea mays
  Clone ID: MRT4577_4706C.1.pep
RSMPHVSIPRLWSLSVPTLSLHDLWILSLPYVSFLHIRIPSLSSLSSPHLWTPSLPSLSYSRLWSASLPPLPFPRPWSLSLL

SEQ ID NO: 311419 - protein, 96 aa, Zea mays
  Clone ID: MRT4577_47070C.1.pep
HFCTHHDSYMYYVSIYSYGSRVASMHVPFFVAGGRVVVLHHGFSRIGPSMHASRIHVVSGIRLAFWVMTPSSYLAVSCNGPRRAKHHSSVWIGRSR

SEQ ID NO: 311420 - protein, 95 aa, Zea mays
  unsure (1)..(95): unsure at all Xaa locations
  Clone ID: MRT4577_47071C.1.pep
FVGCKRNREXEHRSFQPLKTAVCVKNHYRRXHCDKSYTCRRCNVKRFSVLADLRTHEKHCGRDRWVCSCGTSFSRKDKLFAHVAAFDGHAPALPP

SEQ ID NO: 311421 - protein, 143 aa, Zea mays
  unsure (1)..(143): unsure at all Xaa locations
  Clone ID: MRT4577_47072C.1.pep
SIPHRRPHLADQCSPSGSRQAPSSSIAGCSKASESETELTSLTPSLLHLPHAPPPLLSPAAARSLPSAPPAPPSSSAPAAVVPAQAELRQCRPPLCTPHSAAASATAAASRAASPQCSRPGLPAGXGAGGGALALSGPPFPWV

SEQ ID NO: 311422 - protein, 57 aa, Zea mays
  unsure (1)..(57): unsure at all Xaa locations
  Clone ID: MRT4577_47073C.1.pep
LQXPRRPTTSKEDKHQLKSSKIKLDRHRNQDPEFKMKSFLIIPLPQPLLAITVPHLT

SEQ ID NO: 311423 - protein, 69 aa, Zea mays
  Clone ID: MRT4577_47074C.1.pep
KTCLCLTTYNVHGMTGNITAPVSTSSCELGTNPYDGGCVLPGQYEYYHCIGVVRSWGYTHVHTQHSIMC

SEQ ID NO: 311424 - protein, 315 aa, Zea mays
  Clone ID: MRT4577_47075C.1.pep
MAAKSPVLAALVLLLSSAQLSTGARRRMELYQPDPADMLSYHNGSVLHSDIFVSVLWYGSFTQVQKAIIYDFLLSLTTTPQAASPSVAEWWDMIEQQYLSKAAQTTKHTTTRVMLDTTQVSSDDGCSMGTSLTLSQVSALAARARPRKGGVALVLTAQDVAVEGFCTSQCGLHGAESGAGAASAYVWVGNSAAQCPGQCAWPFHQPEYGPQTPPLVPPNGDAAVDGMVVSLASAFAGAVTNPFRDAYYQGSSDAPLEAATACPGQFGSGSYPGYPGNLKIDQASGASYNANGAQGRKYLLPALYNPSTSACSTLV

SEQ ID NO: 311425 - protein, 36 aa, Zea mays
  Clone ID: MRT4577_47076C.1.pep
KPSCCDLTPSGTLTTQNSDHLAHPGECRAICRLRNT

SEQ ID NO: 311426 - protein, 83 aa, Zea mays
  Clone ID: MRT4577_47077C.1.pep
HLIQSKQDSKQDRAVAIINRKQTNRGQTTGTRRQSTTLIQSLSHQAANKRVRARENENTRRNATLQQRPKPCGGAEQQPGADD

SEQ ID NO: 311427 - protein, 232 aa, Zea mays
  Clone ID: MRT4577_47078C.1.pep
MATLARWHLQPPTARPLARRRIPRRAATVVSPRAFSRADFDGFVRRAWQGANAGAERFAFEARQAAQRLDSRFSISRRLADASRAARARAVEIDAEFGIGRRWRSFSVDFSRNWPRYRRDINDFMGTPIGRALATIFFLWLALSGWLFRIFIFGTFVLPFAAPLLLGTFANRVAIEGTCPACKRRFVGYRNQVIRCMSCQNIVWQPNNSPSGGARSSRSSEPDVIDVEYEEK

SEQ ID NO: 311428 - protein, 106 aa, Zea mays
  unsure (1)..(106): unsure at all Xaa locations
  Clone ID: MRT4577_47079C.1.pep
GLSRAPWATLRSCRHIVLFLRAAAATAATAAAEADRIGRLPGQPPVNFSMYSGYVTVYAASRRNLFYCLIKTPXEPAHAALVPLGRKGGSSGPSLRYAPSHALHLA

SEQ ID NO: 311429 - protein, 53 aa, Zea mays
  Clone ID: MRT4577_4707C.1.pep
MIRFILIQNRAGKTRLAKWYMQFDDDEKQKLIEEVHAVVTVRDAKHTNFVEFR

SEQ ID NO: 311430 - protein, 58 aa, Zea mays
  Clone ID: MRT4577_47080C.1.pep
GVSCGSFSCDVGSYMMVCVCALVCVGLMLLCDVGYGGYKKRLVVLVPARFDVLCFTVR

SEQ ID NO: 311431 - protein, 79 aa, Zea mays
  Clone ID: MRT4577_47081C.1.pep
IHDGATFPANNALASKLRGDNPAYLFRATHRFWGPYFATCWVLQLAPIVFHREEEDPAFGPFPAPLLEDHYRGLGRPQV

SEQ ID NO: 311432 - protein, 54 aa, Zea mays
  unsure (1)..(54): unsure at all Xaa locations
  Clone ID: MRT4577_47082C.1.pep
DAYFLGHIIRSSQRTTTRGLKNPPIQNGRGSGXQKQIYSNANYRRTTSKYHGLD

SEQ ID NO: 311433 - protein, 58 aa, Zea mays
  unsure (1)..(58): unsure at all Xaa locations
  Clone ID: MRT4577_47083C.1.pep
AIYAQCNIDFKKDRVASQFYFIMIISVCIKVSQSFVVXKYLSLDLFFQLXKVTQFNIS

SEQ ID NO: 311434 - protein, 69 aa, Zea mays
  unsure (1)..(69): unsure at all Xaa locations
  Clone ID: MRT4577_47084C.1.pep
HHDGDKAAADDDDDDVQWQTDTSIDAANTXMPEQLSAATAEMVMLSTEETEKKMKXQATHTDEALHGSA

SEQ ID NO: 311435 - protein, 62 aa, Zea mays
  Clone ID: MRT4577_47085C.1.pep
QNCRMSKIFYIACSPDPARLRSKMIYATSNERIKRELDGFNVELQPTDYGEAGLDIIQGRSI

SEQ ID NO: 311436 - protein, 90 aa, Zea mays
  Clone ID: MRT4577_47086C.1.pep
QIGFMAFSLFFCVVRSHFFFFISPSFFLITPGPGHICDIVSSVGYGLISVIFFFPPPKLFAKAFWARMLEPHRLFVPFLMVNKKGAINSC

SEQ ID NO: 311437 - protein, 53 aa, Zea mays
  Clone ID: MRT4577_47087C.1.pep
LKKKKKINFHRYFSKLTYTSNQHLTYLKFTPKLQLTTLSSHITSHIKLSLYPT

SEQ ID NO: 311438 - protein, 27 aa, Zea mays
  Clone ID: MRT4577_47088C.1.pep
VMFTLYLRYKGVPSGSSVRPFPAPNFP

SEQ ID NO: 311439 - protein, 121 aa, Zea mays
  Clone ID: MRT4577_47089C.1.pep
SSRSAHRKQHLPMPNYRKHMVQQCDLCNSTTGLPMIETKIRHLSTAAIRQLSTPDQAYLRQAILSPCGVWHFIGSMRAGAAKIQTERCNIGCLAPKCVHLHILYGRICVSRQVRQFLLLRM

SEQ ID NO: 311440 - protein, 104 aa, Zea mays
  unsure (1)..(104): unsure at all Xaa locations
  Clone ID: MRT4577_4708C.1.pep
MMLKYGAGQLSYQYISDRVLPDKAIXDFIEEGGANLTLKHAQVTLEARELDKELXQRTKHKNEDEHGQDFEKDGELMDREMELKAQSTAMTDKSREMNKGETES

SEQ ID NO: 311441 - protein, 222 aa, Zea mays
  unsure (1)..(222): unsure at all Xaa locations
  Clone ID: MRT4577_47090C.1.pep
RFGRHGEGPARTVXIGNLDEKVSERILYEILIQAGHVVDLHVPSDKESNSLKGYAFVEYETEEIAQYAVKLFSGLVRISGKTLKFMIAGYDKPSSNVNTSVMLNPVPSSNGNNPVTPKLNPIPLPKQTQIMCCSDMPVSRTLAYQVVNGRIGGYVFSLTPYPYGFQALSGGQVHGHGQVSNRTYDYNRQEFGSVLSIVHGGPVMNFLCPWSCELNQSIMYPS

SEQ ID NO: 311442 - protein, 68 aa, Zea mays
  Clone ID: MRT4577_47091C.1.pep
QFTFVNSVGCGPSFDFDGISSQCLMEESIAALLFATIPLQSAHVESTGRFICLEILSPRRILIMRVRR

SEQ ID NO: 311443 - protein, 941 aa, Zea mays
  unsure (1)..(941): unsure at all Xaa locations
  Clone ID: MRT4577_47092C.1.pep
MSEDKKIPAETKLSLEEEKNLGFLIAMAETNTEKITKEILEGLSEDTDDSDSYDVESDGEEAEDRPWRPSHSVFGKTTIKQSHIDNMRGRYFRDISIVRADAGEKTSPTPEEDEVVIFRSLLKAGLRFPLSNFVIEVLKTFQIYLHQLTPEAIIRMGIFVWAARSQGLEPNAKSFCNIHELLYETKPWGKEQYHNNFGCYSFGARSGSSYPVPTFRKRWPGAWMSEWFYVKNDLTAQNNVKSIIMYPIWQRFGLRRPKVEMDEAAEECQRAFGAVCSFIGTRDLVQEHIAFRVWPLAEKWEMPKETIKESDEGGLVRLKYTFKYADKFIEPDDDWLKSIETLSDELLGAFSKAENTALSAAFGGRKKKRLNRVFDAIGFFYPDYCYPIRRQKRKNITSEKEEAATAPSEPEPXRKKVEGLHTPTTPXEPASVPEYTGGTPSAAEAERPLLLPEIAEMAEAPSTEKMEEAKNVTKEKTSEILSPAINVEAAKIQKAPMVTPKRKRMVNVLDVLETIKSSSTTPKKSVEIAEASSEAPTQQTEAEAGPSEPFKEETLEAEAIKIPEPILVEETDTAIPEAPASMCDYIIRHASGKKLSEEETHEANHYAKELKYPKGAVIFNGTNEDDFLYCLPDNKELSVCREMARSIGFPKLEAGLSAMTKEDLADSLAYNSLKGLILSNALRAQKSAEDESYEIAFNNLRSEVIKLRNEALEKDKILLTLVDKVKKDEAASKAQAEAQKREIKDLQKQLARAKEERALEETKRELSDFMVSKLESRVKELRTSQGKCYVKSVECVNKIKSSFASVGAFSSEENXSLEAIPKXLEWISHEAEAFEEILNSRGDICAFSGARGIASVLEKKGCEHVKFLAQSEATLSTEDIKDPSAEASVVGGKFFTDIWNDGGRGMAREIIERSEKGIHDARRVADAAERSREPERQLGTN

SEQ ID NO: 311444 - protein, 967 aa, Zea mays
  unsure (1)..(967): unsure at all Xaa locations
  Clone ID: MRT4577_47093C.1.pep
MSEDKKIPAETKLSLEEEKNLGFLIAMAETNTEKITKEILEGLSEDTDDSDSYDVESDGEEAEDRPWRPSHSVFGKTTIKQSHIDNMRGRYFRDISIVRADAGEKTSPTPEEDEVVIFRSFLKAGLRFPLSNFVVEVLKTFQIYPHQLTPEAIIRMGIFVWAVRSQGLEPNAKSFCNIHELLYETKPWGKEQYHNNFGCYSFGARSGSSYPVPTFRKRWPGAWMSEWFYVKNDLTAQNNVKSIIMYPIWQRFGLRRPKVEMDEAAEECQRAFGAVCSFIGTRDLVQEHIAFRVWPLAEKWEMPKETIKESDEGGLVRLKYTFKYADKFIEPDDDWLKSIETLSDELLGAYSKAENTALSAAFGGRKKKRLNRVFDAIGFFYPDYCYPIRRQKRKNIISEKEEAETAPSXRTKRKKVEGLHTSTTPXEPASVPEFTGKTSSATEAEKLIKSALLPEITETAEVPPKIELEQSNILLSETKEKTEAPLTEKIEEVREATEGSKTLEVLSPTAIVXSKTPKGAISDXKRKRMVNVLDVLETIKSSSTISKKSVDVAEGSTEASAQQAEAEAEAGPSEPFKEQPFEAEAVKIPEPILVEETGTVIPEAPAGMHDYIIRHASGKKLSEEEAYEANHYAKELKYPKGAVIFNGTNEDDFLYCLPDNKELSVCREMARSIGFPKLEAGLSAMTKEDLADSLAYNSLKVPELNAAQNPQKSAEDESYEIAFNNLRSEVIKLRNEALEKDKILLTLVDKVKKDEAASKAQSEAQKREIEDLRKQLARAKEERALEETNRELSDLMVNKLESRVKELRTSQRKCYVKSIECVNKIKNSFASVGAISSEENFSRGNPEDPLEWISHEAEAFEEILNSRGDICAFSGARGITSVLEKKGCGHVKLLAQSEATLCSEDIKDPSAEASVVAGKFFTDIWNDGGRGMAQEIIERSEKGIHEARKVAETAEKSREPERQLGTN

SEQ ID NO: 311445 - protein, 193 aa, Zea mays
  unsure (1)..(193): unsure at all Xaa locations
  Clone ID: MRT4577_47094C.1.pep
AHLTLRPTAPVRDRQQFGPHGSRLTVVWPDACLHRQWLAYSTLDVGCVPGSQRQRCLQQFSPVFSRLGMVNLPVXQRLRSGSPLAVGNARMCLQRQLLHHIVAGVGHXLCVAKASAYMXQQLMSSVPLVVQCSVACLHHRQQCLNPLPVDSPLVAAFLRQQHRVLPHKQFFLMIPAVQLPHGWMVPCYLDSHM

SEQ ID NO: 311446 - protein, 557 aa, Zea mays
  unsure (1)..(557): unsure at all Xaa locations
  Clone ID: MRT4577_47095C.1.pep
MAGAPGVGPGAGGGGGAAAGLKTYFKTPEGRYKLQYEKAHSAVLHYSHGGKTVSQLTVAYLKEKPASQGSQPSTPSASSGMRSAAARLLGTGNGSKALSFGGGNGASRAVAGSSRVGGGLGTPTGLGGSQGGTNYDGKGTYIVFNAADTLFISDLNSQEKDPLKSIHFSNSNPLCHAFDPEAKEGHDLIIGMGSGDVYSMSLRQQLQESWKKXVAALHYNKGDKDVSPNGSRCTSVAWVPEREGIFVVSHSDGNLYVYDKNKDGNTDCTFPAVKDQSQFMVAHAKSSKSNPVARWHICQGSINAISFSPDGAYLATVGRDGYLRVFDFSKEQLIFGGRSYYGALLCCTWSSDGKYLLTGGEDDLVQVWGMDDRKIVAWGEGHNSWVSGVAFDSYWSPPSSDGNGENVYRFGSVGQDTQLLLWDLALDEIVVPLRHPSSASPTFSSGSPSTHWDNACPPTGVLQPSPRMRDVPKLSPLVAHRVHADPLSGMVFTSESILTICREGLIKIWVRPEQSENNQQSNSSEFALGPASKDRAITSSNKASSSSFKKLPPVLVT

SEQ ID NO: 311447 - protein, 220 aa, Zea mays
  Clone ID: MRT4577_47096C.1.pep
MAEPGKRAVAQWRRWALANLGPFAALFTTNFGSAWLILAPVVSLVATYAPRRLFRTYFNLFLRRRSRRLLNVVDPYVTIDISEPGGEVRYSRYGPVSDNDSTYEEVKAYLSGAAREQDARELRAEGAREGNGLVVSMRDGQDVADEFRGVPLWWSSVVARDVQGQRKGDRRFQRLTFHLRHRALVVDEYLPHVRRQGREILFSNRRRRLYTNSKSRDSYS

SEQ ID NO: 311448 - protein, 80 aa, Zea mays
  unsure (1)..(80): unsure at all Xaa locations
  Clone ID: MRT4577_47097C.1.pep
VXCAGVFGVRPRRRPAAGACSLPRAPPXXWSGLLFGVVVXGCRLWCCPLVVSGGGCSRVPVGGAFCCLWWAAPRLXXPCR

SEQ ID NO: 311449 - protein, 83 aa, Zea mays
  Clone ID: MRT4577_47098C.1.pep
NPLKEFFFFLSPPFFFGEFLFFTPLIALLNPFFLNPFFPFLSSFKIPLSDLFSKLFGKLTCVCTLFLPPHYSLFLPLLHVILP

SEQ ID NO: 311450 - protein, 65 aa, Zea mays
  unsure (1)..(65): unsure at all Xaa locations
  Clone ID: MRT4577_47099C.1.pep
IYIXXKNVVHSFFIHKPVEKPCQIYLTSDGCVSGMTRDREGKEKENQAPDDCCISTILLWPWCFA

SEQ ID NO: 311451 - protein, 338 aa, Zea mays
  unsure (1)..(338): unsure at all Xaa locations
  Clone ID: MRT4577_4709C.1.pep
SGQVITEMRRRTGAEIRVYSKADKPKYLSFGDELVQVXIFANSINIFLYVFIIXHLFVNFCCTCIFVPSFQVAGPPAIARGALTEIASRLRTRTLRDTSTANNPPPFAPSDDPTVDMPSRKLTLYGGPTNDTPYGRPANDPLYGRPAIDPPFGRPTNDRPYGRPAIVPPFGRPTNDPPYGRPANDPPYERPTNDPPYGRPSSTIAYGRPNRSAPRDPSDAYPGDYFSKREHPSGGPMVTSNAPSAAYERYAAPTHFPTREPPSTFSHRSYRDHMPTDSYSSRGTQKLDITRDGNSDAYDYTEAAGQIHGLEDYRGLPSASGRVSSTIELRIPNSSLES

SEQ ID NO: 311452 - protein, 106 aa, Zea mays
  Clone ID: MRT4577_470C.1.pep
PRVFGRVCGRVGQAWEIDPRHYGVSEHSIHTRSLFTSGIEHPGLPPPSHSSSRRSTTTSRTCRIRPRTTTARARQSWSATATRQATTRTMTRTVETVTEAAEESWR

SEQ ID NO: 311453 - protein, 98 aa, Zea mays
  Clone ID: MRT4577_47100C.1.pep
TRTRKLPRPHSPSRARHIHYGRARTHQDQHHTTCMVEPITGSWLPTNIHYNHLLLQQHQRDPLTSTAFTPPPSINLLHDNYSQCLGNHVPRHPPFDTR

SEQ ID NO: 311454 - protein, 146 aa, Zea mays
  unsure (1)..(146): unsure at all Xaa locations
  Clone ID: MRT4577_47101C.1.pep
MSPPRLVPAVRASSLLSVHGARSGLLLPQSALCSASSSSSSAPMAXSALPAMTPPVFGPSRSPSTXAPTLQPWSPYAHTSTRISPRLVLFPGASSCAAPLAPLLAARPSPAPCSPSSLCRPHSSTRPRMSHCRPRLSLSTSPPCAW

SEQ ID NO: 311455 - protein, 122 aa, Zea mays
  unsure (1)..(122): unsure at all Xaa locations
  Clone ID: MRT4577_47102C.1.pep
LVSQIQHPNSCHFSPKITKVMSKQPNELIHMNIVGPAQVRSLGGSXYVLVIVDDFSHYSWCFSCXAKDESCSHAQDLIXGCRIRFXNALKAIHSDNGKKFKSHFVTFLCLFRSQISDIHFLC

SEQ ID NO: 311456 - protein, 99 aa, Zea mays
  Clone ID: MRT4577_47103C.1.pep
KVQRLFFSPLARPSPYGFGLGPTLPQTPRTVVPSFLKLAYMPRTHPIVFPLSCFMEMFPQCRLGWNGTTPMVPNPLPPQFVFSPGFQISPNSPISGVAL

SEQ ID NO: 311457 - protein, 66 aa, Zea mays
  Clone ID: MRT4577_47104C.1.pep
GPSAFWAMVSRSAWRLFRSSGVYSVGGRFVCRGQGGVPPCGVCVPVPPLLCSSTASGLSGVNLQRV

SEQ ID NO: 311458 - protein, 56 aa, Zea mays
  Clone ID: MRT4577_47105C.1.pep
AVQGLRVQPPHGAGHLHAQRPLLRRLLRSGSGSSTSATSPVSTTASLMPCVPLHSV

SEQ ID NO: 311459 - protein, 44 aa, Zea mays
  Clone ID: MRT4577_47106C.1.pep
RPTIFPLKLPKKIKTISYRQTFFTIRVFKPKRVASELTLFISPS

SEQ ID NO: 311460 - protein, 146 aa, Zea mays
  unsure (1)..(146): unsure at all Xaa locations
  Clone ID: MRT4577_47107C.1.pep
FFFFFFWQFTGKDHERPERNHFGQDGHVLDLSFFEICDPEFSKIKESGNVWASITDLEPKLLAHQRKAFEFIWKNLAGSLQLEEMDGSTSRGGCAVAHTPEAGKTLLLILFLVSYLKVXPRSRPLVLIGMLMESIVSRAWSPLMIW

SEQ ID NO: 311461 - protein, 49 aa, Zea mays
  Clone ID: MRT4577_47108C.1.pep
MASGQLACTYAALILSDYGIAITAETIATIVNAANIKVESYWPALFAKL

SEQ ID NO: 311462 - protein, 57 aa, Zea mays
  Clone ID: MRT4577_47109C.1.pep
AIAINYRPNQPVENLSLYLYIQYRTIALNMKRFHTDTSTNDHTVLQMLKLTMMYIKA

SEQ ID NO: 311463 - protein, 92 aa, Zea mays
  unsure (1)..(92): unsure at all Xaa locations
  Clone ID: MRT4577_4710C.1.pep
RDGNSDAYDYTEAAGQIHGVEDYRGLPSASXISGARLRLHEAHAGSSESVVEIQGTLDQAKAAQSLLEGFISANSRQQQSHSSRMPLYPRWG

SEQ ID NO: 311464 - protein, 117 aa, Zea mays
  Clone ID: MRT4577_47110C.1.pep
NPQNFHFGSDRQNWAGVQKGFPNKNNPLNRVQGFGRFHLLPDRAFGERAEACPPFKAPCPFGEKPQGLGGNRKREVPPGHGQRPPPFFPLVPGQGGPHFLEVFGPHFGERVSPGKGK

SEQ ID NO: 311465 - protein, 37 aa, Zea mays
  Clone ID: MRT4577_47111C.1.pep
SVIRLHCASSCCVVHKNMASSICLIPTKSQNALHIMH

SEQ ID NO: 311466 - protein, 47 aa, Zea mays
  Clone ID: MRT4577_47112C.1.pep
NQTPINWRRVKIQILLLHTNIKTYRYLIPFIFHPITIHFFSHLVLFK

SEQ ID NO: 311467 - protein, 213 aa, Zea mays
  unsure (1)..(213): unsure at all Xaa locations
  Clone ID: MRT4577_47113C.1.pep
MTSALPHMSELPDGGAGGNGQDEAAAFASPAKRLRRSPALEPTSVLYNRSPSPPTSSSLVSSAAPEPPPISAEDWEAVLSGGDMAAPPAAARSQDASFLRWIMDADAQVDAFDPFLPCQETAVVEPFLQPQLPLPVADDLEPGATVDELLEAVRRADAGDSTGAREILARLNHRLPSPPGHPHPPILRAAAHLRXDALLRVLTPAPATTPLDA

SEQ ID NO: 311468 - protein, 489 aa, Zea mays
  unsure (1)..(489): unsure at all Xaa locations
  Clone ID: MRT4577_47114C.1.pep
MAPPPPWLAALLFLLLPALLPAVGSVSGAAAAGIFRVRRKLPXELEGTLXNISALRAHDGRRHGRLLAAADLPLGGLGLPTDTGLYFTEIKLGTPPKRYYVQVDTGSDILWVNCISCSKCPRKSGLGLDLTFYDPKASSSGSTVSCDQGFCAATYGGKLPGCTANVPCEYSVMYGDGSSTTGFFITDALQFDQVTGDGQTQPGNATITFGCGAQQGGDLGNSNQALDGILGFGQANTSMLSQLAAAGKAKKIFAHCLDTIKGGGIFAIGNVVQPKVKTTPLVADMPHYNVNLKSIDVGGTTLQLPAHVFETGEKKGTIIDSGTTLTYLPELVFKQVMDVVFSKHRDIAFHNLQDFLCFQYSGSVDDGFPTITFHFEDDLALHVYPHEYFFPNGNDIYCVGFQNGALQSKDGKDIVLMGDLVLSNKLVVYDLENQVIGWTDYNCSSSIKIKDDKTGTTYTVESHDISSGWKFHWHKSLVLLLVTMVWSYL

SEQ ID NO: 311469 - protein, 102 aa, Zea mays
  Clone ID: MRT4577_47115C.1.pep
MAPLRGAKRRKKAAAEKKAAMAAAAAGQGAPGGDWWDGFCMRMAGTLSSAEDAHRFESLFKMPRKTFNYVCSLVKDDMMVRASSYTFIDGTVLSLEDRVAVA

SEQ ID NO: 311470 - protein, 111 aa, Zea mays
  unsure (1)..(111): unsure at all Xaa locations
  Clone ID: MRT4577_47116C.1.pep
RSSRFTVLALASSTGSRMPFKRYVEIGHVDLENYGKHYGRLLANHDVVDQNRALVDPPDMGRRHINFKRVXLTDIKIDIKRVPKKSTVIKAMVEADEKTNWENSSWGMKLI

SEQ ID NO: 311471 - protein, 135 aa, Zea mays
  Clone ID: MRT4577_47117C.1.pep
DLIPGVDFATIHSYPDQWVPGASDGAQVAFMRRWMASHAGDAAAVLRKPLLVAEFGWSARSNGYTVSMRDAYFRMVYEAIYASARAGGPLAGGLFWQVMVPGMESWTDGYDVVLDRSPSTAAVVGQECSRMTGLN

SEQ ID NO: 311472 - protein, 90 aa, Zea mays
  unsure (1)..(90): unsure at all Xaa locations
  Clone ID: MRT4577_47118C.1.pep
MATVLGSPHAPAFFFSSSSLPAGRGPTGLSLPATKGGIMGRNTSTRPKLRAHATHNVKLITPKGEVDPHVPHYGGIXDQAQEDXIDLPYS

SEQ ID NO: 311473 - protein, 42 aa, Zea mays
  Clone ID: MRT4577_47119C.1.pep
GIMWSGPRVEQSTSWPVTHVKIVLGSGTQCSKLDVRTPQSGR

SEQ ID NO: 311474 - protein, 62 aa, Zea mays
  Clone ID: MRT4577_4711C.1.pep
GWAYKDQSAWPNFFCTGLPQMNCFFGRPPRDGEIQNFRVREHVVFGLLNGQWGKKNSFTTHG

SEQ ID NO: 311475 - protein, 83 aa, Zea mays
  unsure (1)..(83): unsure at all Xaa locations
  Clone ID: MRT4577_47120C.1.pep
MAPSAAVPGGSEVEGSPRMAKFLCSFGGSILPRPLDGCLRYVGGETRIXMLPRDISYADLAARMRELYKDADIIKYQQPDEDL

SEQ ID NO: 311476 - protein, 68 aa, Zea mays
  unsure (1)..(68): unsure at all Xaa locations
  Clone ID: MRT4577_47121C.1.pep
NPYIYNNYFTTPFQVFIYGVGQSXKXGTRNSLYNNIVLSGCSTMFKDFHRRVQWYLKNIVDSRFLSSK

SEQ ID NO: 311477 - protein, 60 aa, Zea mays
  Clone ID: MRT4577_47122C.1.pep
VVVLDVVHSSLHSVGVPHRLAYVLYYSRCLVSLVNSFSGNDLVIMYHASPWVAVSVSAMA

SEQ ID NO: 311478 - protein, 72 aa, Zea mays
  Clone ID: MRT4577_47123C.1.pep
GRADGPKPDRGLYRIERELCRTVPLKLTCPYCLTRKEEAYLSYSQNRPTGTGDTCLIRKSRVTHPSFLLVHH

SEQ ID NO: 311479 - protein, 88 aa, Zea mays
  Clone ID: MRT4577_47124C.1.pep
DPSFGYQAYPETKGNEIGIPRGISMPHSQEIRRLKCSYMNCNSLMSYYTYPESKVNEIGIASGIPISHFQEIRMQKCSYMNWNHLFSY

SEQ ID NO: 311480 - protein, 295 aa, Zea mays
  Clone ID: MRT4577_47125C.1.pep
MAGEGNGDEGWRRSGIEVSALQFGYDGQPPLFARFNLCVAPGSRCLLVGANGSGKTTLLKILAGKHMVGGRDVVRVLNGSAFHDTQLVCNGDLSYLGGSWSRTIGSAGDVPLQGDFSAEHMIFGVDGVDPVRREKLVDLLDIDLQWRMHKVSDGQRRRVQICMGLLHPYKVLLLDEITVDLDVVTRMDLLGFFKEECEQREATIVYATHIFDGLETWATDFAYIQEGELRRSGRYSDIEELRSAKNLLSVVESWLRSETKLPKKEPPPRPETQARRSSPFDASPFRSSRHMAYYR

SEQ ID NO: 311481 - protein, 36 aa, Zea mays
  Clone ID: MRT4577_47126C.1.pep
FCILRHSTSQDDLLRRPGRSLPNLQESFRSVIMSHL

SEQ ID NO: 311482 - protein, 106 aa, Zea mays
  unsure (1)..(106): unsure at all Xaa locations
  Clone ID: MRT4577_47127C.1.pep
KSSGTARNFFKFXLLTIXEKHTKRVDALVLFSLLLLGSCAQGLQDEVGAPPALSAEEGVMETRAECRQVLLPCKDNKCYCCIGGGTRQCYATLAECRHACLPLNTN

SEQ ID NO: 311483 - protein, 310 aa, Zea mays
  unsure (1)..(310): unsure at all Xaa locations
  Clone ID: MRT4577_47128C.1.pep
MAGEGNGDEGWRRSGIEVSALQFGYDGQPPLFARFNLCVAPGSRCLLVGANGSGKTTLLKILAGKHMVGGRDVVRVLNGSAFHDTQLVCNGDLSYLGGSWSRTIGSAWGCSTARXFSXAHDFWRREKLVDLLDIDLQWRMHKVSDGQRRRVQICMGLLHPYKVLLLDEITVDLDVVTRMDLLGFFKEECEQXQVLVCSELLPPRITRNAXRSPQREATIVYATHIFDGLETWATDFAYIQEGELRRSGRYSDIEELRSAKNLLSVVESWLRSETKLPKKEPPPRPETQARRSSPFDASPFRSSRHMAYYR

SEQ ID NO: 311484 - protein, 76 aa, Zea mays
  unsure (1)..(76): unsure at all Xaa locations
  Clone ID: MRT4577_47129C.1.pep
PQVRKXLRCDASIYIRSXLLRTVSVEPFFCLPAYGRTVLTSFLSTPNDCHHGKKKIILLAQELASRTTEALTLILE

SEQ ID NO: 311485 - protein, 187 aa, Zea mays
  unsure (1)..(187): unsure at all Xaa locations
  Clone ID: MRT4577_4712C.1.pep
MDYDKSRRSNSKKRTHSNSDDGKRKRLNTRHDDTSMFSEPIETIYRILCPVKKIGSVLGRGGDIVKALREETKAKIRVADSIPGADERVIIIFNYQNEPEPTDEAAEEKNSDGLGNFKSHCFAQDALLKIHDKIVSDEIHDEVANDEKSESADDVTTRILVQGNQVGCLLXKGGSIIQQLRSNTGAG

SEQ ID NO: 311486 - protein, 100 aa, Zea mays
  unsure (1)..(100): unsure at all Xaa locations
  Clone ID: MRT4577_47130C.1.pep
GPGRPTRPPTPPKTRTRETTEKTHTKGRGGGRTRGPNPTXARTRRHSXARAAPKAKKQAARKQPRNGKNPRKTTQXRPAAHPPNAGGQXSEQARTERPPK

SEQ ID NO: 311487 - protein, 731 aa, Zea mays
  unsure (1)..(731): unsure at all Xaa locations
  Clone ID: MRT4577_47131C.1.pep
MPMSTMPPPPPPHHSPAIQRPSTTGSDVPLNFHRCHYQIPFFKIKIQGSLLPVPRAPAPLPPHAPTSCAAPGHCQVGHTMQPPQSLVSRARTAIHSAAARVLTDIKADLRDAEGSGGRSRAPSPRTSLDREAAEASATGREPDVKPPSPRDEVLEISPPENEDSSSIPTESTCSTKLTFPPASIVKQLVSAIENGKSFKSMSDMRYTGEQLLKDKGGLSLSVVKSLVRRDKEERSSSDFFGDEETQSLMYSLFKLEEQFSFEASQCFPELVHSRSVSKDLHGAPPGSFIHHLAVVIGSISSVHKMAFFWQSVVLELRKLWSDWQPVPRMPLEVAPDLNSCLLHQEIQVVNCCIARKXRRKAAKESLDSLLNQASIGKSEPRLSEAKFPDSEMYARDNTGDYVLRLGADQSSENLTLLETGEPIYSPTLQEGPIMTAELIKETEELVLRTGSLGAGCSQLLSDMQAFKAANPGCVLEDFVRWHSPPDWSEDCAANSTTVGEGSSRRGRLSDRMQTKEGNLWKELWEAAKPIPAVEQTPIYDEDLAVESIFDALEVIEPSKLFEQLLGVILSVCFVAAESVLAADSNLSKLFYDCKDYIIGVYHNDMSKDELDEMYKVYETMEAIVTHPEEALQIMEQPDEKSVDNKNRFTLKLNFMAKDRPPLWKRTTKDDKISQKVEKNTSEEKNTKIFSNLFDKKVSIFSKKNVRSSEVPPASTSSSSPGPFDESEWTIL

SEQ ID NO: 311488 - protein, 93 aa, Zea mays
  Clone ID: MRT4577_47132C.1.pep
IPQPYFFTFGGVFSPLLLQIMIGPFIPPCKGTVDVFSGKIFYLTFGLTGPLGFLSNKLESILLENLLMSSLPLAAGGPPPVPFLWPTPGKGGA

SEQ ID NO: 311489 - protein, 81 aa, Zea mays
  Clone ID: MRT4577_47133C.1.pep
HNLSISPTPERRTSINGHAQHREATPLRRSKAEFDAHMTKAQEAGKLVVIDFTAAWCGPCRAIAPLFGEHAKKFTHAVFLK

SEQ ID NO: 311490 - protein, 102 aa, Zea mays
  Clone ID: MRT4577_47134C.1.pep
CAIPSVVRAGGRAGHLKLQEGLVERSQTVDLLLGEMTGICEDASLLKRVADERLPLSNSRGGGGSSLFSSLHSFHLKSWTCSARTTAANGSLDKHTLAVPAC

SEQ ID NO: 311491 - protein, 69 aa, Zea mays
  unsure (1)..(69): unsure at all Xaa locations
  Clone ID: MRT4577_47135C.1.pep
IGGVPSMYWQAPIEEXNLFLAACGYTALMDGWIWVSYSQSDWAGDGWHLHASWRTGWLTDGDEGLIGWR

SEQ ID NO: 311492 - protein, 87 aa, Zea mays
  Clone ID: MRT4577_47136C.1.pep
VAFVAIKTKRGGNPFLAKKCAPPRARLNWKVVFLNKPPRVREGGYWAPAPPTWVSKTPGQPGQNRLFPIGPGGLLCPGSVVYFPGRG

SEQ ID NO: 311493 - protein, 70 aa, Zea mays
  Clone ID: MRT4577_47137C.1.pep
ASCRVATVFFSWSMLEYMCVPFYLLAWAVLFGGVMVVCGMSPRLSFYSKCPRCRVAHLWVLVRSTMISCP

SEQ ID NO: 311494 - protein, 245 aa, Zea mays
  Clone ID: MRT4577_47138C.1.pep
GYMTQSLWGPSMSFSGGINVPVMQTPLCANAPAEKGGKNFMIDFMMGGVSAAVSKTAAAPIERVKLLIQNQDEMIKSGRLSEPYKGIVDCFKRTIKDEGFSSLWRGNTANVIRVYSLDYARTRLANDAKAAKGGGERQFNGLVDVYRKTLKSDGIAGLYRGFNISCVGIIVYRGLYFGLYDSIKPVVLTGNLQDNFFASFALGWLITNGAGLASYPIDTVRRRMMMTSGEAVKYKSSLDAFQQIL

SEQ ID NO: 311495 - protein, 387 aa, Zea mays
  Clone ID: MRT4577_47139C.1.pep
MADQANQPTVLHKLGGQFHLSSSFSEGVRARNICPSVSSYERSFATRNYMTQSLFSPSMSVTGGINVPVMRTPLFANAPAEKGGKNFMIDFMMGGVSAAVSKTAAAPIERVKLLIQNQDEMIKSGRLSEPYKGIGDCFKRTIKDEGFSSLWRGNTANVIRYFPTQALNFAFKDYFKRLFNFKKDKDGYWKWFAGNLASGGAAGASSLFFVYSLDYARTRLANDAKAAKGGGDRQFNGLVDVYRKTLKSDGIAGLYRGFNISCVGIIVYRGLYFGLYDSIKPVVLTGNLQDNFFASFALGWLITNGAGLASYPIDTVRRRMMMTSGEAVKYKSSLDAFQQILKKEGPKSLFKGAGANILRAIAGAGVLSGYDQLQILFFGKKYGSGGA

SEQ ID NO: 311496 - protein, 231 aa, Zea mays
  unsure (1)..(231): unsure at all Xaa locations
  Clone ID: MRT4577_4713C.1.pep
MDYDKSRRSNSKKRTHSNSDDGKRKRLSSRHDDTSMSSEPIETIYRILCPAKKIGSVLGRGGDIVKALREETKAKIRVADSIPGADERVIIIFNYQNQPELTDEAAEKQISDGLGNMKPHCFAQDALLKIHDKIVADEIYDEVAHDESSDDVTARILVQGNQVGCLLGKGGSIIQQLRSDTGAXIRVLSSENLPQCALQSDELVQISGAPSLVRKXLYEISTRLHQHPRKE

SEQ ID NO: 311497 - protein, 387 aa, Zea mays
  unsure (1)..(387): unsure at all Xaa locations
  Clone ID: MRT4577_47140C.1.pep
MADQANQPTVLHKLGGQFHLRSIISEGVRARNICPSVSSYERRFATRNYMTQSLWGPSMSVSGGINVPVMPTPLCANAPAEKGGKNFMIDFMMGGVSAAVSKTAAAPIERVKLLIQNQDEMIKSGRLSEPYKGIVDCFKRTIKDEGFSSLWRGNTANVIRYFPTQALNFAFKDYFKRLFNFKKDRDGYWKWFAGNLASGGAAGASSLXXVYSLDYARTRLANDAKAAKGGGERQFNGLVDVYRKTLKSDGIAGLYRGFNISCVGIIVYRGLYFGLYDSIKPVVLTGNLQDNFFASFALGWLITNGAGLASYPIDTVRRRMMMTSGEAVKYKSSLDAFQQILKKEGPKSLFKGAGANILRAIAGAGVLSGYDQLQILFFGKKYGSGGA

SEQ ID NO: 311498 - protein, 387 aa, Zea mays
  Clone ID: MRT4577_47141C.1.pep
MADQANQPTVLHKLGGQFHLSSTFSEGVRARNICPSVSSYERRFATRNYMTQGLWGPSMSVSGGINVPVMQTPLCANAPAEKGGKNFMIDFMMGGVSAAVSKTAAAPIERVKLLIQNQDEMIKSGRLSEPYKGIADCFKRTIKDEGFSSLWRGNTANVIRYFPTQALNFAFKDYFKRLFNFKKDRDGYWKRFAGNLPSGGAAGASSLFFVYSLDYARTRLANDAKAAKGGGDRQFNGLVDVYRKTLKSDGIAGLYRGFNISCVGIIVYRGLYFGLYDSIKPVVLTGNLQDNFFASFALGWLITNGAGLASYPIDTVRRRMMMTSGEAVKYKSSLDAFQQILKKEGPKSLFKGAGANILRAIAGAGVLSGYDQLQILFFGKKYGSGGA

SEQ ID NO: 311499 - protein, 88 aa, Zea mays
  Clone ID: MRT4577_47142C.1.pep
TFPLSHFSNLFSIKNHTPSWGPGSFHLSFPHYPHHHQIKTSLIHSLITYTSLHIKVISTLHYLILSINLSTNKTFPSLYHLFYHLFIQ

SEQ ID NO: 311500 - protein, 313 aa, Zea mays
  unsure (1)..(313): unsure at all Xaa locations
  Clone ID: MRT4577_47143C.1.pep
MADQANQPTVLHKLGGQFHLRSIISEGVRARNICPSVSSYERRFATRNYMTQSLLGPSMSVSGGINVPVMRTPLCANAPAEKGGKNFMIDFMMGGVSAAVSKTAAAPIERVKLLIQNQDEMIKSGRLSEPYKGIVDCFKRTIKDEGFSSLWRGNTANVIRYFPTQALNFAFKDYFKRLFNFKKDRDGYWKWFAGNLASGGAAGASSLFFVYSLDYARTRLANDAKAAKAGGEMQFNGFVDVYRKTLKSDAIAALYRESNISRVAILAYRGLNFGLYDSINPAVHTRNLQDNFYSPPLVWXLTTNGAESLNLTP

SEQ ID NO: 311501 - protein, 387 aa, Zea mays
  Clone ID: MRT4577_47144C.1.pep
MADQANQPTVLHKLGGQFHLRSIISEGVRARNICPSVSSYERRFATRNYMTQSLWGPSMSVSGGINVPVMQTPLCANAPAEKGGKNFMIDFMMGGVSAAVSKTAAAPIERVKLLIQNQDEMIKSGRLSEPYKGIVDCFKRTIKDEGFSSLWRGNTANVIRYFPTQALNFAFKDYFKRLFNFKKDRDGYWKWFAGNLASGGAAGASSLFFVYSLDYARTRLANDAKAAKGGGERQFNGLVDVYRKTLKSDGIAGLYRGFNISCVGIIVYRGLYFGLYDSIKPVVLTGNLQDNFFASFALGWLITNGAGLASYPIDTVRRRMMMTSGEAVKYKSSLDAFQQILKKEGPKSLFKGAGANILRAIAGAGVLSGYDQLQILFFGKKYGSGGA

SEQ ID NO: 311502 - protein, 387 aa, Zea mays
  Clone ID: MRT4577_47145C.1.pep
MADQANQPTVLHKLGGQFHLSSSFSEGVRARNICPSFSPYERRFATRNYMTQSLWGPSMSVSGGINVPVMPTPLFANAPAEKGGKNFMIDFMMGGVSAAVSKTAAAPIERVKLLIQNQDEMIKSGRLSEPYKGIADCFKRTIKDEGFSSLWRGNTANVIRYFPTQALNFAFKDYFKRLFNFKKDRDGYWKWFAGNLASGGAAGASSLFFVYSLDYARTRLANDAKAAKGGGDRQFNGLVDVYRKTLKSDGIAGLYRGFNISCVGIIVYRGLYFGLYDSIKPVVLTGSLQDNFFASFALGWLITNGAGLASYPIDTVRRRMMMTSGEAVKYKSSLDAFQQILKKEGPKSLFKGAGANILRAIAGAGVLSGYDQLQILFFGKKYGSGGA

SEQ ID NO: 311503 - protein, 390 aa, Zea mays
  unsure (1)..(390): unsure at all Xaa locations
  Clone ID: MRT4577_47146C.1.pep
MADQANQPTVLHKLGGQFHLRSIISEGVRARNICPSVSSYERRFATRNYMTQSLLGPSMSVSGGINVPVMRTPLCANAPAEKGGKNFMIDFMMGGVSAAVSKTAAAPIERVKLLIQNQDEMIKSGRLSEPYKGIVDCFKRTIKDEGFSSLWRGNTANVIRYFPTQALNFAFKDYFXKRLFNFKKDRDGYXWKWFAGNLASGGCCXGASSLFFVYSLDYAXRTRLANDAKAAQGGGXRQFMGLVDVYRRTQSDGIAGLYRGFNISCVGIIVYRGLYFGLYDSIKPVVLTGNLQDNFFASFALGWLITNGAGLASYPIDTVRRRMMMTSGEAVKYKSSLDAFQQILKKEGPKSLFKGAGANILRAIAGAGVLSGYDQLQILFFGKKYGSGGA

SEQ ID NO: 311504 - protein, 183 aa, Zea mays
  unsure (1)..(183): unsure at all Xaa locations
  Clone ID: MRT4577_47147C.1.pep
RFFPAFFAPSLVPPGGXLAQXLLASNPLXLANVVAHQLQQQLLQFLPALSQLAMVXPAAYLQQQRLVGSTPLVLANAPTXMHQQLLXXNLPALTHLAMANPAAYLQQLLPFNQLIVSNSVAYLQQRQWLLNPLAVATPLVAXFLHIYNLLAYNQYFLLNPFFSRLQPILWSSIFYILFSNELV

SEQ ID NO: 311505 - protein, 45 aa, Zea mays
  unsure (1)..(45): unsure at all Xaa locations
  Clone ID: MRT4577_47148C.1.pep
CLVPTFYSILVPKLPNIEXKTFPPPPHLAIYTLKRNKMKGLNISP

SEQ ID NO: 311506 - protein, 127 aa, Zea mays
  Clone ID: MRT4577_47149C.1.pep
TCIAKIRKSQFNRCKKSLKKMEETNFSKKARKLVPQAIFKQIIFLNNLYMELYGPAKKIFSQEHFIFKSQQSMAGQHKQLAEQKKGWIGPIFNDGTCFPWVVVFLGLRIPPILILAPLTVTTKKKTF

SEQ ID NO: 311507 - protein, 106 aa, Zea mays
  unsure (1)..(106): unsure at all Xaa locations
  Clone ID: MRT4577_4714C.1.pep
TLWGSFLKHPIDQFPQQCLNHITIQTIATQLATALCHLAGANPIAYCGQHXVASNPLALGHIAAYQQQQQLRXQVLPAXLGQLSMXVNPIAXYLQQRTTLFDARPA

SEQ ID NO: 311508 - protein, 66 aa, Zea mays
  Clone ID: MRT4577_47150C.1.pep
WLRSDQNAVIVCRPTASRLLLVSCSCVPLGYSFGISSLQRDLLRPMRRKFSLCPSHVVDVCEEIRR

SEQ ID NO: 311509 - protein, 100 aa, Zea mays
  unsure (1)..(100): unsure at all Xaa locations
  Clone ID: MRT4577_47151C.1.pep
PTSPSTKVYASGSSSXIIGSGCTNHMTEEKRMSSSYEKNQDPQRAITFGDGNQGLVKGLGKIAISPDHSISNVFLVDSLDYNLLSVYQLCNMGYNCLFTD

SEQ ID NO: 311510 - protein, 406 aa, Zea mays
  Clone ID: MRT4577_47152C.1.pep
LMRLGFFDGDPRELPFGNLGPSDVCTPSNQELAREAARQGIVLLKNTGKLPLSATSIKSMAVIGPNANASSTMIGNYEGTPCKYTTPLQGLGANVATVYQPGCTNVGCSGNSLQLDAATKAAASADVTVLVVGADQSIERESLDRTSLLLPGQQPQLVSAVANASSGPCILVVMSGGPFDISFAKSSDKIAAILWVGYPGEAGGAAIADVLFGYHNPSGRLPVTWYPESFTKVPMTDMRMRPDPSTGYPGRTYRFYTGDTVYAFGDGLSYTSFAHHLVSAPKQLALQLAEGHACLTEQCPSVEAEGAHCEGLAFDVHLRVRNAGERSGGHTVFLFSSPPAVHNAPAKHLLGFEKVSLEPGQAGVVAFKVDVCKDLSVVDELGNRKVALGSHTLHVGDLKHTLNLGV

SEQ ID NO: 311511 - protein, 49 aa, Zea mays
  Clone ID: MRT4577_47153C.1.pep
KGRHASLQDRSKLRLASSYKPSSNISHNGVGYYAPAARTTLKKKKKKRP

SEQ ID NO: 311512 - protein, 97 aa, Zea mays
  Clone ID: MRT4577_47154C.1.pep
PPLTLNFSEFRHLKFPKYYPSAAIYRIKSFSFLFGGPCLTRRSTPTRQHLPTTARVATTSLSPTPVVCDVIVPEPSHLFPVDPSALLTPTSTSSVPI

SEQ ID NO: 311513 - protein, 104 aa, Zea mays
  Clone ID: MRT4577_47155C.1.pep
SPLAGLPSHVSVAPHAHPDPPLHIGLSAAAIAAPAYEKLNPTRTSPLLLSADPTSPQPRTARGSSLANSLAATMRRRLTCARSEVVVPRHRLTSIIVSGSSYPA

SEQ ID NO: 311514 - protein, 65 aa, Zea mays
  Clone ID: MRT4577_47156C.1.pep
ISRNNLHVCDLVSTNEQVVALYDHIDYISTMVMYITYLARLLLVLEAPGSCIRECFFQPTHQRLL

SEQ ID NO: 311515 - protein, 72 aa, Zea mays
  Clone ID: MRT4577_47157C.1.pep
APAPCVSNGGDQPRSVHSLRSHDSQRPRASSIKLAIPPRLCFALAARLAARESRRSELLGASDQGPRGTHEG

SEQ ID NO: 311516 - protein, 65 aa, Zea mays
  Clone ID: MRT4577_47158C.1.pep
GVLHIHGNVNDSDETRWLDSVVESISNVAKNHGLSWNVSVEHVERVKWYGPRIRHLVVDVTCRQI

SEQ ID NO: 311517 - protein, 33 aa, Zea mays
  Clone ID: MRT4577_47159C.1.pep
CRLCLRKKKKKKKKKKKKKKKKKKKRKKKKKKR

SEQ ID NO: 311518 - protein, 188 aa, Zea mays
  unsure (1)..(188): unsure at all Xaa locations
  Clone ID: MRT4577_4715C.1.pep
VPSSRAGPTNGSPYGRPANDPPYERPTNDPPYGRPSSTIAYGRPNRSAPRDPSDAYPVDYFSKREHPSGGPMFTSNAPSAAYERYAAPTHFPTREPPSTFSHRSYRDHMPTDSYSSRGTQKLDITRDGNSDAYDYTEAAGQIHGLEDYRGLPSASGRFSSTIELRIPNSSLESIGXVGGVNLAEIRQV

SEQ ID NO: 311519 - protein, 111 aa, Zea mays
  unsure (1)..(111): unsure at all Xaa locations
  Clone ID: MRT4577_47160C.1.pep
IRHLFRQRQIIYNGQGAQSTEGEVSTYAILTAQLDEELGGTPVHSRVVQGKEPAHLMSLFGGKPMIIYKGGTYREGGHTAPASTRLLHVRANSAGATHAVVVLPXAGALYF

SEQ ID NO: 311520 - protein, 120 aa, Zea mays
  unsure (1)..(120): unsure at all Xaa locations
  Clone ID: MRT4577_47161C.1.pep
SVFSKYSLKPLVPRLSELIGVEVGMANDCIGEEVEMLSVDMPEGVELVLEKVRFYKVEKYNEAEYAKKLTFVGDIYGKKTLGIAHXAYVLIEGVTNYFKPLIDGLCYLYRTLFFFVGNYF

SEQ ID NO: 311521 - protein, 84 aa, Zea mays
  Clone ID: MRT4577_47162C.1.pep
PPPFTLGKKALPRIKRVMGMCFQGFAKKGGLFRPNDPVFGFPMHPFSPFQACMVGNGAPPPSPWMQPMSPKAFPNGGFMGCFLY

SEQ ID NO: 311522 - protein, 55 aa, Zea mays
  Clone ID: MRT4577_47163C.1.pep
AAYTIYRVVKCPLFFVLNHYMCNPKGGGRIAQGSKNCAIYRGGNFYVGYTQFFRK

SEQ ID NO: 311523 - protein, 114 aa, Zea mays
  Clone ID: MRT4577_47164C.1.pep
GARQLPGVQKGDQQGGRHQVHGQELPARPAMDRSHRHAGEVRPVHMRTDHCIHEWKMLLLFSLSSRCTCMYSGCYLCEFCTCTVHEVSFLLYTMAKGVLTKGTVCLPPRLYNLD

SEQ ID NO: 311524 - protein, 623 aa, Zea mays
  unsure (1)..(623): unsure at all Xaa locations
  Clone ID: MRT4577_47165C.1.pep
MSSSAFGDFGPLTERRRAEKARQQRRRIMIAAGTISIIIILIAMGSAAVMYSGKKSSSDGGHKSASKGKSSGGSDSXREREAESEAESESGSESKTNLKAVSKSIKAMCSQTDYTDACEKSLGKAANASSSSPKDIIRSAVEVIGDAIXQAFDRADLILSNDPLVKGAVADCKEVFADAKDDLNSTLMGVDDKDGIAKQSYQLRIWLSAVIANMETCVDGFPDDEFKAKVKESFNDGKELTSNALALIEKGSSLLSVLKGGSKRRLLEEEGEPAQAGPALDKDGIPEWVPDSERRVLKGGGFKSTLTPNVVVAKDGSGKFKTINEALAAMPKTYDGRYVIQVKEGVYEEYVTITKTMKNVTFLGDGSKKSIVTGKKSFADGITTFKTATFTAQGDGFMAIGMGFQNTAGAEKHQAVALLVQSDKSIFLNCKMDGFQDTLYAHSKAQFYRNCIISGTVDFIFGDAAAVFQNCILVLRRPMDNQQNIATAQGRADAREATGFVLQKCEFQAEAALRDSGRPPIRNYLGRPWRECSRTIVMESELPDFIDKAGYLPWNGDFGLKTLWYAEFGNTGPGANTAGRVSWPGFKKVISKADATKFTVENFLHAQPWIDPTGTPVKYDLFT

SEQ ID NO: 311525 - protein, 62 aa, Zea mays
  Clone ID: MRT4577_47166C.1.pep
IFMLRNASISDLRNKNEILHAKAGELKSSKPFTYTVEHTLISPRCIDLNIDALHEHMASIIN

SEQ ID NO: 311526 - protein, 202 aa, Zea mays
  Clone ID: MRT4577_47167C.1.pep
AGRARAQRAVSRRPPSSPGNSPSPPAQSWHVPQPVQPVRAAVGEEGDVGKERQRSRYQRGQRRRQAPPALVDAARDAGTPAAIRGLPFVQHPALPEIAAFHALHQRLGGNPARRGEMAGRGSRPPAVPSPRRMIRGCWRCAPSEHRSAGTAESWRPRANGNGRLALLSLSLASSYYIPPARRTIDKETKRRRRYCGRGLVPN

SEQ ID NO: 311527 - protein, 76 aa, Zea mays
  Clone ID: MRT4577_47168C.1.pep
AGVMAVLVLLGEDVTSPDDMCGQRCAIPGGGPADLPRSVLEHRDRRASRPMSRHRTCRQDAEAAAMLGFPIHQLET

SEQ ID NO: 311528 - protein, 111 aa, Zea mays
  Clone ID: MRT4577_47169C.1.pep
PTRPPTRPALAVVANVGKRAISSRSVAHALHNRHWITDIETPLNLLGLQQYLSLWDALRRVVLTQDADRHVWIHATSAQFSSKSSDRAYCMGSITFEPWKRLWKTWASPTC

SEQ ID NO: 311529 - protein, 34 aa, Zea mays
  Clone ID: MRT4577_4716C.1.pep
IQMLILYQFIKLILKETPKHYLMGPGHKQRFFQH

SEQ ID NO: 311530 - protein, 73 aa, Zea mays
  Clone ID: MRT4577_47170C.1.pep
FIQHSAPQTKHPNFTLSLKDSHFLVLGDNRGTVYGLSSSWEIPSVEADADYDADSAGRCTASDKAVVPLKGDA

SEQ ID NO: 311531 - protein, 52 aa, Zea mays
  unsure (1)..(52): unsure at all Xaa locations
  Clone ID: MRT4577_47171C.1.pep
MPGGHGLRSRTRDLFARPFRKKGYIPVNNXLRTYQIGDYLDLKGNRALHKGI

SEQ ID NO: 311532 - protein, 63 aa, Zea mays
  Clone ID: MRT4577_47172C.1.pep
IQILKIKNHRHSRQLQKKREISWLTHYIKGVAQWLRVTHCSSDESRDVWPLDPLESPDPKRAR

SEQ ID NO: 311533 - protein, 101 aa, Zea mays
  Clone ID: MRT4577_47173C.1.pep
GYLEAPGASQVPTRPEPIRKDGLPTSGSGGHGGGGPWPAQPRRGPPYPGAAGPRGSGGSGYGAGGPNYQQGGPYGTSGPGRGPNYSQGSGSRNQQQYGNWQ

SEQ ID NO: 311534 - protein, 515 aa, Zea mays
  Clone ID: MRT4577_47174C.1.pep
MAVAVPGQLNLDEAPSWGSRSVDCFEKLEQIGEGTYGQVYMAKETGTNEIVALKKIRMDNEREGFPITAIREIKILKKLHHQNVIKLKEIVTSPGPERDEQGRPIDGNKYKGSIYMVFEYMDHDLTGLADRPGMRFTVPQIKCYMKQLLTGLHYCHVNQVLHRDIKGSNLLIDNEGNLKLADFGLARSFSSDHNGNLTNRVITLWYRPPELLLGSTKYSPAVDMWSVGCIFAELLNGKPILPGKNEPEQLTKIFELCGTPDDTIWPGVTKMPWYNNFKPHRPLKRRVKDFFKHFDRHALDLLEKMLTLDPSQRISAKDALDAEYFWTDPLPCDPKSLPKYEASHEFQTKKKRQQQRQAEEAAKRQKLNHPPPHSRLPPIQQPGQAHPQIRPGQGMHNVPPVAAGPGHHYTKPRGPGGPNRYPPGGNQGGGYNPNRGGQGGGYGSGPYPQQGRGPPYPGGGMGGTAGPRGSGGSGYGAGGPNYQQGGPYGASGPGRGSNYSQGGGSRNQQQYGNWQ

SEQ ID NO: 311535 - protein, 54 aa, Zea mays
  Clone ID: MRT4577_47175C.1.pep
RGSTTEHSEDRESVRICADWYITMRRSLKTGARSTHSGDQTCMCAQTCKCQGVR

SEQ ID NO: 311536 - protein, 510 aa, Zea mays
  Clone ID: MRT4577_47176C.1.pep
MAVAAPGQLNLDEAPSWGSRSVDCFEKLEQIGEGTYGQVYMAKETGTNEIVALKKIRMDNEREGFPITAIREIKILKKLHHQNVIKLKEIVTSPGPERDEQGKPIDGNKYKGSIYMVFEYMDHDLTGLADRPGMRFTVPQIKCYMRQLLTGLHYCHVNQVLHRDIKGSNLLIDNEGNLKLADFGLARSFSSDHNGNLTNRVITLWYRPPELLLGSTKYGPAVDMWSVGCIFAELLNGKPILPGKNEPEQLTKIFELCGTPDDTIWPGVTKMPWYNNFKPPRPLKRRVKDFFKHFDRHALDLLEKMLTLDPSQRISAKDALDAEYFWTDPLPCDPKSLPKYEASHEFQTKKKRQQQRQAEEAAKRQKLNHPPPHSRLPPLQQPGQAHPQMRPGQGMHNVPPVAAGPGHHYAKPRGPGGPNRYPQGGNQGGGYNPNRGGQGGGYGSGPYPQQGRGPPYPGAAGPRGSGGSGYGAGGPNYQQGGPYGTSGPGRGPNYSQGSGSRNQQQYGNWQ

SEQ ID NO: 311537 - protein, 520 aa, Zea mays
  Clone ID: MRT4577_47177C.1.pep
MAVAVPGQLNLDEAPSWGSRSVDCFEKLEQIGEGTYGQVYMAKETGTNEIVALKKIRMDNEREGFPITAIREIKILKKLHHQNVIKLKEIVTSPGPERDEQGRPIDGNKYKGSIYMVFEYMDHDLTGLADRPGMRFTVPQIKCYMKQLLTGLHYCHVNQVLHRDIKGSNLLIDNEGNLKLADFGLARSFSSDHNGNLTNRPYSCCCKLLITSWIGCRPPELLLGSTKYGPAVDMWSVGCIFAELLNGKPILPGKNEPEQLTKIFELCGTPDDTIWPGVTKMPWYNNFKPPRPLKRRVKDFFKHFDRHALDLLEKMLTLDPSQRISAKDALDAEYFWTDPLPCDPKSLPKYEASHEFQTKKKRQQQRQAEEAAKRQKLNHPPPHSRLPPLQQPGQAHPQMRPGQGMHNVPPVAAGPGHHYAKPRGPGGPNRYPQGGNQGGGYNPNRGGQGGGYGSGPYPQQGRGPPYPGAAGPRGSGGSGYGAGGPNYQQGGPYGTSGPGRGPNYSQGSGSRNQQQYGNWQ

SEQ ID NO: 311538 - protein, 110 aa, Zea mays
  unsure (1)..(110): unsure at all Xaa locations
  Clone ID: MRT4577_47178C.1.pep
RSSSRFRSPSFCWSASFAVCLFSSLSLRLXFFACALLGSPSSFGSRAFCLALRWCFPSSLSRWLPRRSGVFCVCAXSLPFGGPGVSSQTNTVGLFLGVKRGSTRNSARSS

SEQ ID NO: 311539 - protein, 126 aa, Zea mays
  unsure (1)..(126): unsure at all Xaa locations
  Clone ID: MRT4577_47179C.1.pep
PSPQVSTSVIDPYMRVLSTHSLFLLTDVAVLLYYDVLYDIXDASLDTSTSPTXYTDLNDLXSMAYNEVTASLMXEAAHYGDGKEIHNYLAPYXRIHXMRRGYTATISAERDNHEHTCGFLFTTLAS

SEQ ID NO: 311540 - protein, 410 aa, Zea mays
  Clone ID: MRT4577_4717C.1.pep
RSEIVSDEIYDEVAHDESSESADDVTARILVQGNQVGCLLGKGGSIIQQLRSDTGAGIRVLSSENLPQCALQSDELVQISGAPSLVRKALYEISTRLHQHPRKENRPLEQIIDASTQRKHESPTLQHENPMLPHLHSHHPPPIPLLDPYRSGPQYPVSETEEFSIRILCASELIGSVIGKSGANVRRVEQQTGARIKVQEIDKDASGERLIIVSSNEIPTEPISPTIEALILLHDKVSASSEKHHSSTRLVVPSNKVGCILGEGGQVITEMRRRTGAEIRVYSKADKPKYLSFGDELVQAAGQIHGLEDYRGLPSASGRFSSTIELRIPNSSLESIVGVGGVNLAEIRQISGARLRLHEAHAGSSESVVEIQGTLDQAKAAQSLLEGFISANSRQQQSHSSRMPLYPRWG

SEQ ID NO: 311541 - protein, 62 aa, Zea mays
  Clone ID: MRT4577_47180C.1.pep
IKHLYLTTSLSIPYLFHHGFKKKKKTYDAPNGQLTIPLYTSTSHVIFLSHSKNSGTVCPSKN

SEQ ID NO: 311542 - protein, 117 aa, Zea mays
  Clone ID: MRT4577_47181C.1.pep
ANPKVQFPKEPNNLFKIHSFKHWVLANKKIFTIHPPAKDSVLFLSPPKPKKQNPPAKLTPKFFMPKKFPKMPKAFKNPVIYNYPRPDLPKPALFRLSSVSPTLQVPKSGVKKKNSHS

SEQ ID NO: 311543 - protein, 79 aa, Zea mays
  Clone ID: MRT4577_47182C.1.pep
LGALGDGSLEVEVHDVRVCRVVERHEASGAARIRPQRSRRRGRRSWARRRARGAPRPASPGGASPRRRGARKRTRRGAA

SEQ ID NO: 311544 - protein, 81 aa, Zea mays
  unsure (1)..(81): unsure at all Xaa locations
  Clone ID: MRT4577_47183C.1.pep
SRASGVVLFFWGEPLRLSWLLLFPRAVVIARRCQQFRVPVPSLSNNPGFSPMTLVGRWGXXGKAGKSFVRPGPAGWRARIR

SEQ ID NO: 311545 - protein, 98 aa, Zea mays
  Clone ID: MRT4577_47184C.1.pep
FAAHPKGPLPPQGRGDFPPNGGSLGTIAPKKTLGSGGPKSSAFGCGAGAQQKVGPPQKGPGIVKLGGNRAKTGPLQGSQPFLKKNRPWLFFNKNHWVG

SEQ ID NO: 311546 - protein, 57 aa, Zea mays
  Clone ID: MRT4577_47185C.1.pep
KSPGLNKPIITKYGPLFRKGLELQGKPPGPFFQKKKKKKPKPKKKKKKKKKKGRRLV

SEQ ID NO: 311547 - protein, 158 aa, Zea mays
  Clone ID: MRT4577_47186C.1.pep
GSRQCAGRCLGWSESAGPRAQAGELVGGEESGLSRAKLFFLTGQRASLGAREDMGARNLTMAYRRARSTRGGGRPKSGEGDLGLPVKFCRVRGLGKLHGPMAELTEARTQLGGDWSGLATAAEALKAWRAVAQHARGRFPVISDLGKFGEREGMNGRG

SEQ ID NO: 311548 - protein, 54 aa, Zea mays
  Clone ID: MRT4577_47187C.1.pep
PVNSVPQEPPTHTIGHRAWSKNQWRAPPVCRTHTCMRFKLECNPPFFVYSPRFF

SEQ ID NO: 311549 - protein, 78 aa, Zea mays
  Clone ID: MRT4577_47188C.1.pep
GGTDLGEQVSALQHNTPSRPNQYHSSLLILVSTNKRRGENKLSLRAQNPFDFQVPFTHNYHTTVQDRLYTAPSFDRLL

SEQ ID NO: 311550 - protein, 161 aa, Zea mays
  unsure (1)..(161): unsure at all Xaa locations
  Clone ID: MRT4577_47189C.1.pep
QHVNTKGAKIFXLLALLALSASAGTSTIIPQCSQQYXLSTVTAAGFQHPRGGGYMLHEAIVSSILRSLALTLQQTYALLQQPSLLHLYLQRILTQQLQQQLLPTIXQVVAVNLAAYLQQQQFLPFNQLAVVNPAVYLHAQQLLPFNQLDCSPDAFLLQQHL

SEQ ID NO: 311551 - protein, 113 aa, Zea mays
  unsure (1)..(113): unsure at all Xaa locations
  Clone ID: MRT4577_4718C.1.pep
SXPILVPSWLHAVRGRVYTVGPVCRRRAVSKSESMRGVGIWPVIRAVSASVVVVRRLGVPWRCAPRAGGRGSLVPGVTSWRCIAVRRSLDDMPGSAFFDGWDFTADPCGFPGV

SEQ ID NO: 311552 - protein, 163 aa, Zea mays
  unsure (1)..(163): unsure at all Xaa locations
  Clone ID: MRT4577_47190C.1.pep
MDSGSTVCANRIEVHARQHMXGRLSSIIAKELLNAQNVCINRXEEISHAHCGTSFRQSMKYLRFHPKAXNTKPTHDPIHFRDPSKILGRNIRGMIPHKSKNHEXCLWRLKTHDDDPPQNYQTERMVIPGALKVLRVRSGHKYCLLKXGSYEVAYNYHDKFLPL

SEQ ID NO: 311553 - protein, 62 aa, Zea mays
  Clone ID: MRT4577_47191C.1.pep
IRLFFPPRGFFCPGKNKKRYKKKKNKKKKEKKKKKKKKKKKKKKKKKKKKKKKKKKKKKKKR

SEQ ID NO: 311554 - protein, 66 aa, Zea mays
  unsure (1)..(66): unsure at all Xaa locations
  Clone ID: MRT4577_47192C.1.pep
ARRCFSLSARLEFEFYXRTCPSAETITQQTAPAALPTHSGAGPVLLRLRFHDCSIXGCPTSVLIDS

SEQ ID NO: 311555 - protein, 47 aa, Zea mays
  Clone ID: MRT4577_47193C.1.pep
GCRSAPQRGHVFDFADIGASADIKLQRALVYIGSVMPEPPVRKHPGR

SEQ ID NO: 311556 - protein, 44 aa, Zea mays
  Clone ID: MRT4577_47194C.1.pep
KNSKVVIEDCKDEYNWLEDYESTTRNRLPAGLRSSSVIGESWLA

SEQ ID NO: 311557 - protein, 63 aa, Zea mays
  Clone ID: MRT4577_47195C.1.pep
PPHNSANTLENTATPAHQRPTNTPEYRPKTVSNNRRELFFKFFFFFFFFFFEPPRTLRCYPCY

SEQ ID NO: 311558 - protein, 155 aa, Zea mays
  Clone ID: MRT4577_47196C.1.pep
MSIMAQKSPFGHLKDCTDIQHMAKTLTGFQLFNLQKDSPLRTLEPSTLQALYELISLVHDGAEAVSQMDKIEATSQNKSSNQRDDTDTSAAADDSSLLDKDPVAKIILPVEPLELRTMLLAMVHTFPRTLENLILNMLGPVGAEILTRKFDEMDQ

SEQ ID NO: 311559 - protein, 49 aa, Zea mays
  Clone ID: MRT4577_47197C.1.pep
FISPKARSYPVKSTAFRNTNYGKHRSRVCANQLINCRPSASVLWYGHTA

SEQ ID NO: 311560 - protein, 243 aa, Zea mays
  Clone ID: MRT4577_47198C.1.pep
MANLLQTPFLVPFLLSMALNLVCFTATVSSEDDQFVYSCFSGKNLTLDGAAAVTADGVLELTNRTVHVKGHAFYPAPWRFRRSPGETVQSFSVTFVFGMVPIYSDKCTDGMAFLISPTKDFSGAQESQYLGLLNKTSDGKASNHIFAVELDSSENSEFHDIDDNHVGININSLTSFRSLSAGFYDDDDKNGLFQNLSLVSRKEMQVWVDYNGDTTQINVTLAPLKVNVAKPSKPLLTATYNLS

SEQ ID NO: 311561 - protein, 261 aa, Zea mays
  unsure (1)..(261): unsure at all Xaa locations
  Clone ID: MRT4577_47199C.1.pep
MAAAEPVPVPVPAAAAGTNNKIKTVVVLVQENRSFDHMLGWMKSLNPDIDGVTGAETNHVDASDPASHAVRFSDGAEYVDPDPGHSMQAIYEQVYGTPFVDAATTPATPPGVAPSMSGFAQQAEKERPGMSATVMSGFRPDAVPVYRDLVREFAVCDRWFASNPASTQPNRLFVHSATSHGLVSNDSRALVAGLPQRTIFDALHDEGLSFGVYYQYPPSTLFYRSLRQLKYAASFHAFDLHFARHCXEGRLPSYVVVEQRY

SEQ ID NO: 311562 - protein, 454 aa, Zea mays
  Clone ID: MRT4577_4719C.1.pep
GRVGQTGARIKVHEIDKDASGERLIIVSSNEIPTEPISPAIEALILLHDKVSAPSEKHHSSTRLVVPSSKVGCIIGEGGKVITDMRRRTGAEIRVYSKADKPKYLSFDDELVQVAGPPTIARGALTEIASRLRTRTLRDTSTANNPPPFAPFDDPPVDMPSRKLSLYGGPATDPPYGRPANDPLYGRPAIDPPFGRPTNDRPYGRTAVAPPFGRPANDPPYGRPTNDPPYGRPSGSIPYGRPNGSAPREPSDAYPVDYFSKREYPSGSPMFTSNAPSAAYERYAAPTRFPTREFPSAFSPGVDHMPHHSYRDHVPTDSYSSRGTQQLGITRGGNSDAYDYTEAAGQIHGREDYREPTSATGRFLSTIELRIPNSSLGSIVGAGGVNLAEIRQVSGARLRLHEAHAGSSESVVEIQGTLDQAKAAQSLLQGFISANSRQQQQPYSSRMPLYPSWG

SEQ ID NO: 311563 - protein, 88 aa, Zea mays
  Clone ID: MRT4577_471C.1.pep
IKYEERDRPACDIAISGLGWISVEPSGVPSNSAEEVYDGGELHLVVHVPKPVEVFMRPPLPVGKAASQWYRYQELTEEEKELRPKWHY

SEQ ID NO: 311564 - protein, 36 aa, Zea mays
  Clone ID: MRT4577_47200C.1.pep
YLMNIYNYLVKYYLRFTILIHLFFHCAGYTTIRIQN

SEQ ID NO: 311565 - protein, 259 aa, Zea mays
  unsure (1)..(259): unsure at all Xaa locations
  Clone ID: MRT4577_47201C.1.pep
LVRALDGKGVXYQARNAKEVSMEMINMHEKQQFMDDKKLIAIISEAGSAGVSLHADRRAKNQRRRVHITLELPWSADRAIQQFGRTHRSNQTSAPQYRLLFXTNLGGEKRFASIVAKRLESLGALTQGDRRAGPSLSAFNYDSNYGKKALTMMYRGIMEQDSFPVVPPGCSDDETSIQEFINEAKAALVSVGIIRDAFICNGKDPGKLSGRIVDSDMHDVARFLNRLLGLSPNIQNRLFDLFTSILDIGLHNARIEGQL

SEQ ID NO: 311566 - protein, 118 aa, Zea mays
  Clone ID: MRT4577_47202C.1.pep
KKVVSPPRSLLKKTSRAGVEGDQAQVFCPIVQIWGRWLPTSPLKTKVFWQAQGVRCFGAAKSPFSKSSNCETFVCTPPGPSFVPLGLGCMVRFLLQRSMLQNWRGYVLGHFGCLMPPS

SEQ ID NO: 311567 - protein, 75 aa, Zea mays
  Clone ID: MRT4577_47203C.1.pep
TRGHSRTPSPISFQIHPSSYPTSTASPPRQVSGINGFGRMESGGRGPCRVTMSSCRRNDPFISTDYMTYMFTAAR

SEQ ID NO: 311568 - protein, 148 aa, Zea mays
  Clone ID: MRT4577_47204C.1.pep
MDSHGKPKPAGSTPPTPPKPPKPPTPPTPTPPTPEARKGFMRRIFPFLLAANLFVVAYVLVRANQKDSAKKDPTTDPATATAGKPAEPVSIPRKELPPIPEDDQRKLYKWMLEEKRKIKPRNAAEKKKLDEEKALLKEFIRAGSLPSF

SEQ ID NO: 311569 - protein, 180 aa, Zea mays
  Clone ID: MRT4577_47205C.1.pep
SREQGQLTRSPSPPTQREGLLSTGWTPTASPSPPVRRRRRRRSRRRRRSRRSRRRRRRPTPTPPTPEARKGFMRRIFPFLLAANLFVVAYVLVRANQKDSAKKDPTTDPATATAGKPAEPVSIPRKELPPIPEDDQRKLYKWMLEEKRKIKPRNAAEKKKLDEEKALLKEFIRAGSLPSL

SEQ ID NO: 311570 - protein, 132 aa, Zea mays
  unsure (1)..(132): unsure at all Xaa locations
  Clone ID: MRT4577_47206C.1.pep
MAFPTVLKDLMNADSHECVKVVADSSTAWITDYDQYQLTELDVVXLPEXDHGIPMKDLLTLDESGNAASDIYSPKSEEVREVNDKLKDLPGVVNTSAYENGCIMKVKLMNSDELNSLMHDDKYSKYCEECDH

SEQ ID NO: 311571 - protein, 342 aa, Zea mays
  Clone ID: MRT4577_47207C.1.pep
APADPTGTLKPNEVCVILDSGQYSGDVLVFKHPGLHFGDIHILTARQIDGLEKNFIGYSKNAILFPTSGQRSLADEMANSDFDGDEFWVSRNNMLLKTFEKRSEPWVTKGLAPDCWLAHMDRLLTEGVDQDEKKSIVENMIKLVDLYYAALDGHKVDVDRHLRVKAYPHFMEKKGFESYHSSSILGRIYDETEEIIAQQCDEQIQITTLPCFSEVEATPECTSLWEHRYQEYLTKSRGLFDLGKEEKNDEFQKLYQHYKHLLYDADELEETSRDLSDVFMEACAIYRIVYERAWCTRSVSRCRFVWNVAGAALCHLHATKYAAQRGEKTALCPLSVIRQLYI

SEQ ID NO: 311572 - protein, 171 aa, Zea mays
  Clone ID: MRT4577_47208C.1.pep
CRSICRLGTFSGSGWCVWSCWFSRPHSHPSVSLHLGTSVCLSLCFLGRGWQSPHLADGCSVTVWSCLACRACARWSRVVWPSVRWRCGDRQACVCVPARRGSQRCVWRLGSSCHVRGAPSASRAAVRAVLSCAASSSAVFVGVGSRVRGFGRGCRGGPASGNIALRGLVVK

SEQ ID NO: 311573 - protein, 194 aa, Zea mays
  unsure (1)..(194): unsure at all Xaa locations
  Clone ID: MRT4577_47209C.1.pep
DFXGXRVXWVSXNNMLLKTFEKRSEPWVELLKLKETQHRLSKPGDLNELILERVLFNECLTTMFIPNYTKGLAPDCWLAHMDRLLTEGVDQDEKKSIVENMIKLVDLYYAALDGHKVDVDRHLRVKAYPHFMEKKGFESYHSSSILGRIYDETEEIIAQQCDEQIQITTLPCFSEVEATPECTSLWEHRYQEYL

SEQ ID NO: 311574 - protein, 76 aa, Zea mays
  Clone ID: MRT4577_4720C.1.pep
PPFLSTAASYKRGMQVQQLGDDGNQDIFPSYAPWFFYMGWLRDKFSLMVTNFYWFPFFPIPFIKLLVQDVKTQLFK

SEQ ID NO: 311575 - protein, 64 aa, Zea mays
  Clone ID: MRT4577_47210C.1.pep
MPNNFVLRIFAAKEKGLGVMKASKALMTSSFEQGTSDRKRLGQVNELDQANLEKGEVLDTFELC

SEQ ID NO: 311576 - protein, 165 aa, Zea mays
  Clone ID: MRT4577_47211C.1.pep
EVCVILDSGQYSGDVLVFKHPGLHFGDIHILTARQIDGLEKNFIGYSKNAILFPTSGQRSLADEMANSDFDGDEFWVSRNNMLCKFQPSPFVSLPFWACSRSCCFQPSSLLLTHRRSAFVHFFSRSLASSTNENIPEIHLLMPKQYVRQVIVSSLISDLRHKRPQ

SEQ ID NO: 311577 - protein, 105 aa, Zea mays
  Clone ID: MRT4577_47212C.1.pep
DTSSFVSASMLCYSVVGTVNIKNPRGDPNESTMRCARWKTEARRVQNSELLHRVRASLSLQRLLAMAASRDHLGGDPPESTQLRLGDDIAWSEINGVYDRDDSLK

SEQ ID NO: 311578 - protein, 39 aa, Zea mays
  Clone ID: MRT4577_47213C.1.pep
VQAIVIVKGLFYNLADHIVEHVINNACVLLHQLLPLQVK

SEQ ID NO: 311579 - protein, 753 aa, Zea mays
  unsure (1)..(753): unsure at all Xaa locations
  Clone ID: MRT4577_47214C.1.pep
MAMTRRSASHLLSAFRPFSLLLQPHLVDSSPAAASARRAMSSASALRARDEKDVARWRXSMGRMRNIGISAHIDSGKTTLTERVLYYTGRIHEIHEVRGRDGVGAKMDSMDLEREKGITIQSAATYCTWKDYQINIIDTPGHVDFTIEVERALRVLDGAILVLCSVGGVQSQSITVDRQMRRYEIPRVAFINKVDRMGADPWKVLNQARSKLRHHNAAVQVPIGLEEEFEGLVDLVEMKAYKFEGSSGQNVTASDVPLNMEDLVTEKRRELIEVVSEVDDQLAEAFLNDEPITANQLKAAIRRATVARKFIPVYMGSAFKNKGVQPLLDGVLDYLPCPLEVYNYALDQNKSEEKVLLAGTPAEPLVALAFKLEEGRFGQLTYLRIYDGVIRKGDFIYNVNTGKKIKVPRLVRMHSNEMEDIQEAYAGQIVAVFGVDCASGDTFTDGTVKYTMTSMNVPEPVMSLAVSPISKDSGGQFSKALNRFQKEDPTFRVGLDAESGQTIISGMGELHLDIYVERIKREYKVDAKVGKPRVNFRETITQRAEFDYLHKKQSGGQGQYGRVCGYIEPLPSGSDGKFEFDNMIIGQAIPSNFIPAIEKGFKEACNSGSLIGHPVENLRIVLTDGASHQVDSSELAFKLAAIYAFRQCYTSAKPVILEPVMKVELKFPTEFQGTVTGDMNKRKGIIVGNEQEGDDTIVVCHVPLNNMFGYATAIRSATQGKGEFTMEYLEHNVVSQDVQMQLVTSYQAAKGTE

SEQ ID NO: 311580 - protein, 51 aa, Zea mays
  Clone ID: MRT4577_47215C.1.pep
PRKQKQRRRVCHQFPPPPPPVGVPRQQGGLLINAGLVVHHLSNQCGMFGRR

SEQ ID NO: 311581 - protein, 110 aa, Zea mays
  Clone ID: MRT4577_47216C.1.pep
WVVGRTSVSTVGRTQILPESSSWLMQGAPGLVAQDLRLENGKFVVGVQERIRTAWCRGQASSRHYLREVTSHLKTKLVLGNLESQASCALDHLSLPNNVSVNHCDMLRLI

SEQ ID NO: 311582 - protein, 167 aa, Zea mays
  Clone ID: MRT4577_47217C.1.pep
GPSSRPGYPVPDPKFDLKAYLGTWYQVAGTSFGPTAGASCVTANYALNDNGTVRVLNTATVGPQPISIVGTATPVDSAYGAGGAFVVSFPGTPDAECPGPNYIVQDYAIDWAIVQTQKWNTLYILSRERQPASASIDAWIERAIAFGSDATAISRFNQTRLRCMMVL

SEQ ID NO: 311583 - protein, 76 aa, Zea mays
  Clone ID: MRT4577_47218C.1.pep
AGRSCQRGTAGRQGSPPPGPLVVCPPVQGLCKCIVFAGNVFTALVCPVPQCPSHLWIMHVGQRWFFLDSPPHFCAP

SEQ ID NO: 311584 - protein, 52 aa, Zea mays
  Clone ID: MRT4577_47219C.1.pep
KGRMHTMKLSSLHKLSMMFLCATNAHSYVQADTSDAQCLFFYLYQNVLSTPG

SEQ ID NO: 311585 - protein, 46 aa, Zea mays
  unsure (1)..(46): unsure at all Xaa locations
  Clone ID: MRT4577_4721C.1.pep
CQTTTGRRGYKLGGIDKRVIDRFVXEAVGMNMRXFXYAWLLDKLMA

SEQ ID NO: 311586 - protein, 152 aa, Zea mays
  Clone ID: MRT4577_47220C.1.pep
SNINRYIHINIYVYSYLPASTRGGSTSAALGCCAAGPPPSLPCVNNLYRTIWPRRKNLAMVRYSRSHSPIQTVGTCSLSLNLAATTPCITQSPRRRARRRAEVPCRARRRIICHRGERTDVLAGGLAALVAVSRGPCHARSCFFRRALPVLR

SEQ ID NO: 311587 - protein, 66 aa, Zea mays
  Clone ID: MRT4577_47221C.1.pep
WLQQTSSVMTLLEMWGWGLCAKLFTQNCARSTNYRNKTSRVSPNYKFTYAYHTGCSSKAHLNGLLG

SEQ ID NO: 311588 - protein, 166 aa, Zea mays
  Clone ID: MRT4577_47222C.1.pep
MIKLRYPKKLFRRSSSKGSSTTSSSSSDGDAAGSARGGEIEWEVRPGGMLVQKRDDGRGHVDVITVRVATGFSWHDVSVVATCTFVWACKKTIAGELKAVLWKMTGLEPREQRLLFRGKEREDGDHLHMIGVRDMDKVLLLEDPALKDMKLRAGLTAAYRQTFIRV

SEQ ID NO: 311589 - protein, 115 aa, Zea mays
  Clone ID: MRT4577_47223C.1.pep
MDEGATTSDSSAAETFDPQDLIHAIFKLVWRRRAGKGAGGGGSIEDIDAERAPETSRRNRSTTANATALKVSCELLRIFVTEAIQRSAFIAEAEDGAVIEPTHLERVLPQLLLDF

SEQ ID NO: 311590 - protein, 46 aa, Zea mays
  Clone ID: MRT4577_47224C.1.pep
SKTKYPVKDNMDKAPYTVQLSMSHDVSPVAHLNSSRRKHHMFMSHL

SEQ ID NO: 311591 - protein, 127 aa, Zea mays
  unsure (1)..(127): unsure at all Xaa locations
  Clone ID: MRT4577_47225C.1.pep
FSPLSRCRRVIVASRTVLTALLPPALPLLRALLPGLLPXACAHSCPCRRRGCPAWPSHQWPRHRWPRPRLGPHQLGRGWSGVVWSGPRCCQPLCCRRALGVLDAATDLGTSFHXECLLRASFGRTTP

SEQ ID NO: 311592 - protein, 98 aa, Zea mays
  unsure (1)..(98): unsure at all Xaa locations
  Clone ID: MRT4577_47226C.1.pep
SVTYVTMMCDVVVKLRDTHLVPGFTAGVSNVMYLKTNGNYSRYRDECKTGPGIKVLDDNMLVAYNDSNDIVLAKLXTLIYYRMNAHLSVXVTYYEILM

SEQ ID NO: 311593 - protein, 34 aa, Zea mays
  unsure (1)..(34): unsure at all Xaa locations
  Clone ID: MRT4577_47227C.1.pep
XSGRCTSFYFMKYVCLRVMYYCGMLYKCINTTLY

SEQ ID NO: 311594 - protein, 109 aa, Zea mays
  Clone ID: MRT4577_47228C.1.pep
KPPPCWRSRRPQSPPLLAFLRTPTFAPSPPRGSPFCPRTSCSPPASVGGGGTLLFGGFDECLVPHQIARISVVFLYSLFWIGAQEKPPFLIFFVISGGPFPFKRSFVVL

SEQ ID NO: 311595 - protein, 52 aa, Zea mays
  unsure (1)..(52): unsure at all Xaa locations
  Clone ID: MRT4577_47229C.1.pep
GLGFKPAGAIIVLSRGQARYKPSSPGQGQGICIAKALAADRAGXRGSTREFR

SEQ ID NO: 311596 - protein, 70 aa, Zea mays
  Clone ID: MRT4577_4722C.1.pep
SLFKAVLPPAGPVPELIPGRPSSLVGGRRLEQQQSVAAGSWEAAGGGGERRRRRLVSGDLASQRHGYWLS

SEQ ID NO: 311597 - protein, 103 aa, Zea mays
  unsure (1)..(103): unsure at all Xaa locations
  Clone ID: MRT4577_47230C.1.pep
LPGLRLRWGRRPGWHGRRCRGPRCWRVAVRELLGALSCCFVGLLSAAGAGSSLVLPLFCPWCLGVCVLRVAQRXFLARWCREYGSSRAFRPGPCRRAVFPSNG

SEQ ID NO: 311598 - protein, 85 aa, Zea mays
  Clone ID: MRT4577_47231C.1.pep
PRVRQVAQDNAPFPVGQLGFVYNKANGDVVELLPVRVESAFVFAGGVVELPFFQMNAFVAGSRPPAGVQTRGPFYNLMPAACITC

SEQ ID NO: 311599 - protein, 51 aa, Zea mays
  unsure (1)..(51): unsure at all Xaa locations
  Clone ID: MRT4577_47232C.1.pep
HKQFPPPHFKNKPKCTPTYIHYITYVTITSIIVLYXNNLXSXVTTATGRDG

SEQ ID NO: 311600 - protein, 84 aa, Zea mays
  Clone ID: MRT4577_47233C.1.pep
LGPWMLLTENIDRGMDARPVGWFVGAKCECTDGMLSKGAGKRPQHYGCPRGGTPLYAQYQYLEWHELELEAYEEAKLPPEPRTT

SEQ ID NO: 311601 - protein, 79 aa, Zea mays
  Clone ID: MRT4577_47234C.1.pep
PPPQTAPHRRQEHIFVKTLTAETTPVDVESSDTIDHVKAKIQDQEGIPSDQQRLIFPGNQLEDARTLADYHLLKGFSLY

SEQ ID NO: 311602 - protein, 44 aa, Zea mays
  Clone ID: MRT4577_47235C.1.pep
FYFWALHAIVSAHHLGLSSPRIGPRHGKGNQLTELWSVSFQPRH

SEQ ID NO: 311603 - protein, 91 aa, Zea mays
  Clone ID: MRT4577_47236C.1.pep
DFVYYRVLIYHRSDCTEAPDRYVGSSVRGVSCRVRVEWSRMIMRCRTLRAYHGRGSRARPLGPRAVSSQPPCMDQRYRLPSHVCSLLSTWE

SEQ ID NO: 311604 - protein, 65 aa, Zea mays
  Clone ID: MRT4577_47237C.1.pep
MDQRTIIMCSVVGSLGVLSAILGFSAEGTKLTISDLYVGGGVCLYPQKPALGFPDCSWQLIHPGT

SEQ ID NO: 311605 - protein, 51 aa, Zea mays
  unsure (1)..(51): unsure at all Xaa locations
  Clone ID: MRT4577_47238C.1.pep
HASADAWXKKKKKKKKKKKKKKKKKKKKKKKKKKKKKNKKKGGSLFRETQV

SEQ ID NO: 311606 - protein, 73 aa, Zea mays
  Clone ID: MRT4577_47239C.1.pep
RTCPYNHAPATSFSKLSTSSSQTNMARRLLAYPDVPHNTEADEHYTDQLNKKELSSPSKMNLFLRICGGLRHF

SEQ ID NO: 311607 - protein, 60 aa, Zea mays
  Clone ID: MRT4577_4723C.1.pep
IPRIQPGFITSSDKHKDKTQAVSPNLTLQGVQEPYGIVASKFILSSCLLIVLTKVVLGKA

SEQ ID NO: 311608 - protein, 138 aa, Zea mays
  unsure (1)..(138): unsure at all Xaa locations
  Clone ID: MRT4577_47240C.1.pep
GGGXVRXMICGGHXMDATTPKXSKARXDEIXKEVGSYLFFLGXNPHIFVWGGVSFFEGDNMIGGGWGLSWCMGPTLLEALDPVIEPKRPSVLPLGLPLPDVSKIGGLLPVLFRRLVSGLLKPGLVFTFAPAGLSSGFK

SEQ ID NO: 311609 - protein, 115 aa, Zea mays
  Clone ID: MRT4577_47241C.1.pep
RSPSSRPGLRSSFPPPLRLGSSHLVLLSPVVSIVCSGEPASFLFLVLLPSSAPVNHFVRQLEIVDGLLKSVTINMRAFSVTNRAFSILSILTNHGRQSSVPSSLLTYPEQHLITR

SEQ ID NO: 311610 - protein, 56 aa, Zea mays
  Clone ID: MRT4577_47242C.1.pep
RKISTLSFLGQQCSQVLLLPHSQMVMCFYFMYYLNIEYSVKLLLQIGPAGWSGSYM

SEQ ID NO: 311611 - protein, 69 aa, Zea mays
  Clone ID: MRT4577_47243C.1.pep
SLSQACVLMQPLGNKCYQLLTYATSILLDMYCTLSSVYCWSKLHLCIYRRVVLNFLNLCILMQPLENSC

SEQ ID NO: 311612 - protein, 82 aa, Zea mays
  unsure (1)..(82): unsure at all Xaa locations
  Clone ID: MRT4577_47244C.1.pep
NSARGSTLTARKQQAQRVRXTQHCTAPPSPLDRMCDLILPPLCQSTPREPSNRTSPTGSCGRAVTGTLLHLLEVLCGPTIIA

SEQ ID NO: 311613 - protein, 138 aa, Zea mays
  Clone ID: MRT4577_47245C.1.pep
LINVSQSSRRFNAKLDTLCFHSPWNYLHCSSMSYNIVLSILAANKVSSVWKSRCLLLGEHASSIFVWLYQDVNLLMHCLLIFFHLHMQNNEMSGLNFYTKYWFAISCGHRKRTILLQVLVYQIMSLIHVSIIRILILG

SEQ ID NO: 311614 - protein, 338 aa, Zea mays
  unsure (1)..(338): unsure at all Xaa locations
  Clone ID: MRT4577_47246C.1.pep
RLKGTVLDSGWSQASFLMQAXTLTKRAFVNMSRDFGYYWLRLIIYVVVTICIGTIYFNVGTGYSSILARGACASFIFGFVTFMSIGGFPSFVEDMKVFQRERLNGHYGVVAFVISNTVSAMPFLVLITLVSGTLCYFMVRLHPGFTHYLFFVLDLYASVTVVESLMMAIASVIPNFLMGIIVGAGIQGIFMLVSGYFRLPHDIPKPFWRYPMSYISFHYWALRGQYQNDLKGLLFDGQQDDVLPSKIPGEFILETVFQIDVARSKWLDLAVLFSMIVIYRLLFFLMIKASEDVTPWLRRYVARRRVRNRRHRKPDLPARTPSLRGYVVDAASLPDDHP

SEQ ID NO: 311615 - protein, 54 aa, Zea mays
  Clone ID: MRT4577_47247C.1.pep
MGFFVKGLPVMPVFEWGGKPFGKGKVGKLIPALFFFLWEDIKSGPYRIPVPSKQ

SEQ ID NO: 311616 - protein, 150 aa, Zea mays
  unsure (1)..(150): unsure at all Xaa locations
  Clone ID: MRT4577_47248C.1.pep
DHSLTAAFERSLYMLSLYSAPKXLIKKIDIYRKRLLWQGGQLTKKYHLTDWDTVCLPEDQGGLGVIDLEKMNIGLLAKWIWKLETSDGLWQNIVRSKYXKVKPLIMVEKKQDDSYFWKGLLKVKDTVYKFCRKKIGNGNRTSFWNDTWLG

SEQ ID NO: 311617 - protein, 126 aa, Zea mays
  unsure (1)..(126): unsure at all Xaa locations
  Clone ID: MRT4577_47249C.1.pep
IRLEDHATLGVVDRCVLAPLDSMEVIEKPLHRCHRPGAHEPHAIVVPERTGNTSVKNRSSLTADKRAKDPPAMIAGHQNWAQGXESLDLNFTMTDDCGLMRNSGADMDTIDLKYIQGCTFEGASDI

SEQ ID NO: 311618 - protein, 40 aa, Zea mays
  Clone ID: MRT4577_4724C.1.pep
ILHKALHRRVWERIISCVGQHKMTKKLSSARSSGICTGFH

SEQ ID NO: 311619 - protein, 77 aa, Zea mays
  Clone ID: MRT4577_47250C.1.pep
VYASGGCALARSGSKMSSKPFSVSWFHGWRLELSSDNLQVNIASSSAAFSARCRWPIMCTCRKHAQASRSRRGMMRV

SEQ ID NO: 311620 - protein, 86 aa, Zea mays
  unsure (1)..(86): unsure at all Xaa locations
  Clone ID: MRT4577_47251C.1.pep
PGLLSDSXXLXVTLANGPXTFXMMTGCXHPKLNXNXXTXPXXPXXPITFTTTATXRXCPXLASXVDGTDELSXTQASXXXGXARTQ

SEQ ID NO: 311621 - protein, 135 aa, Zea mays
  unsure (1)..(135): unsure at all Xaa locations
  Clone ID: MRT4577_47252C.1.pep
MPASGGWNSVRDRGPSPRVAPAEVKEHVGGSMIAEGIWAHCRLKLGRHGQQIALKSILAHEDLICLASSRNTEKTMVAAALGEIMTSXEKITWLLXRGLELLXKPEYRSTERXLLLLRAKEVFYPLGVIAATVSW

SEQ ID NO: 311622 - protein, 149 aa, Zea mays
  unsure (1)..(149): unsure at all Xaa locations
  Clone ID: MRT4577_47253C.1.pep
GEKNNPATPQKKYPPPRGCSGGEKTPPPPPGGGGEPPPKKKKKRGGGPPQKTGGGGGAPPKKKNTPQKRGAPPRKNKEGGAPPPRKATDFSPRFPGGQKKKPFWGAPPNPPPKNRGPAGAQGNPKNPKGAKKPXQKIGGGPRKPPSQSP

SEQ ID NO: 311623 - protein, 86 aa, Zea mays
  Clone ID: MRT4577_47254C.1.pep
KSQSNRPPAPLISPNTWVKSGLPWIFPATQCVPRRPVNWNPPPSRAQWAPPTQARAPPRGGARPCFRPRRGPGQGTSFFFFFFFFF

SEQ ID NO: 311624 - protein, 102 aa, Zea mays
  Clone ID: MRT4577_47255C.1.pep
SSLRRRDGVQGGDLLEPGATSSIIQSGASAFLPLDVRCMLKCIPTVPSPGVYALRPRITNGNRTGATAHANRSPIVIRKSYGWPFLARALVSRLSVHVIKES

SEQ ID NO: 311625 - protein, 55 aa, Zea mays
  unsure (1)..(55): unsure at all Xaa locations
  Clone ID: MRT4577_47256C.1.pep
NGLGVWTDTNGLAXKLYNFKRDPEPLVSLSNSADQLSDVGDGAANHERDPVNLED

SEQ ID NO: 311626 - protein, 101 aa, Zea mays
  Clone ID: MRT4577_47257C.1.pep
MDEDEQNASSLTEDGSTLLPLPVPVPLSNDIVIIPKIVRNFDQEEKQIQDLKSNMSTVKSFMEQLKLLYSEDLKKLGDHLRIISHAASGYRKVVEENRKPY

SEQ ID NO: 311627 - protein, 93 aa, Zea mays
  unsure (1)..(93): unsure at all Xaa locations
  Clone ID: MRT4577_47258C.1.pep
KEEAPQKKGINRAKNGFSMGLFTPVWKGCLNLGNLRFFSKQNPFLTPALGKKAPGWVWPPKKGFFPLVKNCFRFFSKKKKKXKKKKKNPPGGG

SEQ ID NO: 311628 - protein, 55 aa, Zea mays
  Clone ID: MRT4577_47259C.1.pep
MLGVFLTQPQGCSFYFFKHVIPAHLLRDYTLTRFFYSAMKIPFVSQKNKLPVFQK

SEQ ID NO: 311629 - protein, 55 aa, Zea mays
  Clone ID: MRT4577_4725C.1.pep
LPLLEGGPSSECFRRGHGAPGHQPHHRHRKLARRGACESRASTTRTKPGTTNVSI

SEQ ID NO: 311630 - protein, 86 aa, Zea mays
  Clone ID: MRT4577_47260C.1.pep
FLVVFFFLLGFYLEHITTANNKTVHSSNETREGSILRAKFNTLNKLRRSQIFTSFVFSLKVTREEHPLWKWEPSLGAKKGTGHNQA

SEQ ID NO: 311631 - protein, 114 aa, Zea mays
  Clone ID: MRT4577_47261C.1.pep
FLRVFVQNHVSKFNKHPYDLLSQNRPIQISRMATPSEYVVIRRQYQCSSQEEVPKIRAQDVVYGSMKTCGKFEVLLWRSPIPPYYSYASTYEIQEPRTTSAKRKRSMKDGVTFC

SEQ ID NO: 311632 - protein, 76 aa, Zea mays
  Clone ID: MRT4577_47262C.1.pep
SFSTGHACNTLVYSHSKPPPESGSNSQTIRATYCADPIATSLLISTRMPAGSGEDEIAVLPRHTKVLITNNNRTKS

SEQ ID NO: 311633 - protein, 33 aa, Zea mays
  Clone ID: MRT4577_47263C.1.pep
SQAIQRNSSSRTFLLLFFFVLTFSILFLDWYNN

SEQ ID NO: 311634 - protein, 122 aa, Zea mays
  Clone ID: MRT4577_47264C.1.pep
MTTTLGGHAGADKLGGLLGYLWHNSWRDPPAALPNRSASSAMKAGGYGSAVERSNIDVGTGLDRRRWRRCHHHEVIIDLEDGDVDAWDGSRRKWTLSPFTVEKRISPVYILVREETSASPFP

SEQ ID NO: 311635 - protein, 87 aa, Zea mays
  unsure (1)..(87): unsure at all Xaa locations
  Clone ID: MRT4577_47265C.1.pep
GKLLXDMDMALPVVNATAAVLARVSAAFNGPLARAVVFGVHIDGHLVVEGLLIAVIVFQLSRKSYKPPKKPLTEKEIGELCDEWEPE

SEQ ID NO: 311636 - protein, 69 aa, Zea mays
  Clone ID: MRT4577_47266C.1.pep
EGFPTEPGSLSALNAEVRLALVISSQNLMGAISSWSVFFARLVFLLNYLDALIVHFWTIDMWIVLHCSP

SEQ ID NO: 311637 - protein, 251 aa, Zea mays
  Clone ID: MRT4577_47267C.1.pep
MRGSGTSTAESGSKEVDDAVSPKALRSYTSHPKLTPVREEVKMVRATSFSTRLPEYDVPVVDKAVDATWKREQPRKAPFVPQDADSSVKTASKPSGRPWDKIAATLMACLMVIVMLVRSVKDLATMRLSSKGGSEESYCTLYPDSVQKEEFRPPSPFPGFAEADLFAVVLQRLGELEEKVQMLQEKPSEMPCEKEELLNAAVRRVDALEAELIVTKKALHEALIRQEELLANMDSKEIARAQRKKKTMFCY

SEQ ID NO: 311638 - protein, 108 aa, Zea mays
  unsure (1)..(108): unsure at all Xaa locations
  Clone ID: MRT4577_47268C.1.pep
PSAPLSMGGFVPQGXLRHPRWRXXAPHATAXXPPSTGFSNPIPQSPRLXPTXXGPRASCLXPSWALHPGMIPLXXIISTKPPTLYFVFPGXCSQLCLEXXQHRXVACA

SEQ ID NO: 311639 - protein, 273 aa, Zea mays
  unsure (1)..(273): unsure at all Xaa locations
  Clone ID: MRT4577_47269C.1.pep
LIILDKFDGNSXLVAELVTANGYKAAFAVKDGAEGSRGWKSSNLPWKAPPKGFSFDLGELFGDGSDGLPVTIGLAAATGLGVLAYTEIETLLQFLGSAAVVQLVVTKLLYAEDRQKTLKQIDEFFNKKVAPKELIDEINEIGQALLPLPGDAKSQPALATATQVAATQTAAPAEDATAEATTESDPATPTPLSPYTNYPDLKPPSTPTPPSVESEVETKASSTVTEGPAVVNSAPIADAATGSSPATTRPRPQSPYPNYPDFKPPSSPSPSAP

SEQ ID NO: 311640 - protein, 58 aa, Zea mays
  Clone ID: MRT4577_4726C.1.pep
WPNLIILFQSLSSACLESVYKTANCPFAQHTLLMLHVSPSVSLPVACHTLLWLATIQV

SEQ ID NO: 311641 - protein, 107 aa, Zea mays
  Clone ID: MRT4577_47270C.1.pep
KWGAIQGEEILPSWRMNRGEKRGPISCRKGGSRGAPPRKKIKIEGRGKRFRGPKAHLREGNPKGTRGHWGKRGKAFNLAGTGVYGEKKTFGTGRQGKQKAGKAPGAG

SEQ ID NO: 311642 - protein, 486 aa, Zea mays
  unsure (1)..(486): unsure at all Xaa locations
  Clone ID: MRT4577_47271C.1.pep
MDMALPVVNATAAVLARVSAAFNGPLARAVVFGVHIDGHLXVVEGLLIAVIVFQLSRKSYKPPKKPLTEKEIDELCDEWEPEPLCPSIKEGAKIDAPTLESAAGPHTIVDGKEVVNFASANYLGLIGNEKIIDSCIXSLEKYGVGSCGPRGFYGTIDVHLDCESKIAKFLGTPDSILYSYGISTIFSVIPAFCKKGDIIVADEGVHWAVQNGLHLSRSTVVYFKHNDMVSLASTLEKLTRGNKRAEKIRRYIVVESIYQNSGQIAPLDEIVRLKEKYRFRVILEESHSFGVLGKSGRGLAEHYGVPIEKIDIITAGMGNALATDGGFCTGSVRVVDHQRLSSSGYVFSASLPPYLASAAVSAVNYLEENPSVLANLRSNIALLHKELSDTPGLEISSHVLSPIVFLKLKKSTGSPTTDLDLLETIADKALKEDSVFVVTSKKSNLDRCKLPIGIRLFVSAGHTELDISRLSSSLKRVSASVLSDYF

SEQ ID NO: 311643 - protein, 299 aa, Zea mays
  unsure (1)..(299): unsure at all Xaa locations
  Clone ID: MRT4577_47272C.1.pep
MPLHARAPPXPLPPSTHRXTARLRPCAAPATKPRRRSLVLVRASSSDPPQQQLNLSVLRFTLGIPGLDESYLPRWIGLGFGALVVLNHLLSASPTPAQLRSEAVGLCLAAFSATLPFLGRFLEGADAASRVPLPEGSIQVFVMSENLSAVQKEDMAWASYVLLRNTNTTSVVIAIGDLLCVRGYWNPPANTSKYSMIEWFKSQMQQVGLVDLRDALYFPNSSGKFLLRCQSCCSXDSQLAKILPDGILSVLAQPILSPDPANNETKTEGVILLASNANYAYSEKDRAWIRTVADKFQLA

SEQ ID NO: 311644 - protein, 75 aa, Zea mays
  unsure (1)..(75): unsure at all Xaa locations
  Clone ID: MRT4577_47273C.1.pep
MVLFKKPKTLGSNVQGNFVWFRRDTFKGFXGFPQRXGFVYVAPNKNCPRYIKEFPKWFKHFTPPKNPTKKFFPPL

SEQ ID NO: 311645 - protein, 182 aa, Zea mays
  unsure (1)..(182): unsure at all Xaa locations
  Clone ID: MRT4577_47274C.1.pep
MCGIIAVIHGDPKSQSASVEVHDALYLLQHRGQDAAGIVSCSAGGRFHQCKGNGMASKVFQDGARVSDLPGFMGLGHLRYPTAGSSANSEAQPFYVNSPYGICMTHNGNLINAPALRQRLDHEAHRHINTESDSELMLNIFADELNETGXARINADDCFAALERMYKLCTGGWACTAMLAGD

SEQ ID NO: 311646 - protein, 263 aa, Zea mays
  unsure (1)..(263): unsure at all Xaa locations
  Clone ID: MRT4577_47275C.1.pep
MVAEAEGPANAIMLETTYYSVGGGHHHRDQIIERDQRERXHTPNNDGAVTRLPERPTCGRCTSNXMLTMNPINTAFDAKRVIGRRPSDASVQRDLKLRALKVIAAPGEKPMIVAQHKGEEKQSAAEEISYMVLIKMREIAEAYLGRTIKNADATVPGYFNDSQRQATKDAGVIAGLNVLRIINEPTAAAIAYGLDKKATSVGEKNVLIFDLGGGTFDVSLLTIEERYLEVKXTAGDTXSGGEDFDTGGQHFVRVKRRQRISWH

SEQ ID NO: 311647 - protein, 157 aa, Zea mays
  Clone ID: MRT4577_47276C.1.pep
QIHREVKLSSGTGLNQEQSLQRAGDTRWGSHYKTLKSLSRELNFFIDNVRADERFSSLISISALARLMVDTTKHTSFPLVYRLLKLVLVLPIATASVERCFSAMKIVKTMLRNRIGDGFMNDCIICFVEPGFLATIPTDDVIVRFHKIEDRTRRGKI

SEQ ID NO: 311648 - protein, 262 aa, Zea mays
  unsure (1)..(262): unsure at all Xaa locations
  Clone ID: MRT4577_47277C.1.pep
MDPKGKGMVVNDKEKESLFNEPRDDKPTDSGLSHKKRDGKKKRRIKKIIYYDSDASSSSPREDDDEDSDEYNKVSGLDNAKQIWDTLKISHEGNDATMITKMELLEGEMGRFTMIRGEEPTQTYNRLKTLVNKIRSYGSIRWMDHDIVRLMLRSSMVIDPHLVNLIRENPRYTKMTPEEILGKFVSGRMMVKEARYVDDALNGPLPIHEPQTVALKGTSSRETLPSKVAQVEAAGLNEDEMALIIKRFKTALKGRKEYXNKN

SEQ ID NO: 311649 - protein, 480 aa, Zea mays
  unsure (1)..(480): unsure at all Xaa locations
  Clone ID: MRT4577_47278C.1.pep
MDPKGKGMVVNDKEKESFLNEPRDDKPTDSGSSHKKRDGKKRRIKKIVYYDSDASSSSPRDDDDDDSSSKKKMQIHKNAQATTVLLASLCRDEYNKVSGLDNTKQIWDTLKISHEGNDATMITKMELVEGELGRFAMIRGEEPTQTYNRLKTLVNKIRSYGSTRWTDHDVVRLMLRSFTVHQDDARGDSWEVXSRRMMVXEARYVDDALNGPLPVHEPQTIALKATSNRETLPSKVAQVEATGLNEDEMALIIKSFKTALKGRKEYPNKNKTKGKRSCFKCGKTGHFIAQCPDNDDDQEQEKHGKREKKVYKKAKGEAHLGKEWDSDCSSSDSNDEGLAASAFNKSSLFPNERHTCLMAKEKKVSVRDTSKYTTSSDDDSSDDEVDYSSLFKGLDRAKVEKINELIDALNEKDRLLEKQEDILYEEHDKFVSVQKSLALEIKRNEMLSSEFSVCHESVSSLKILNDDLNVKLEEANKSSS

SEQ ID NO: 311650 - protein, 254 aa, Zea mays
  unsure (1)..(254): unsure at all Xaa locations
  Clone ID: MRT4577_47279C.1.pep
MAAEGGGVRALSQREQDIQMMLAADVHLGTKNCDFQMERYVYKRRTDGIYIINLGKTWEKLQMAARVIVAIENPQDIIVQSARPYGQRAVLKFAQYTGANAIAGRHTPGTFTNQMQTSFSEPRLLILTDPRTDHQPIKESALGNIPTIAFCDTDSPMRYVDIGIPANNKGKQSIGCLFWLLARMVLQMRGTILPGHKWEIMVDLFFYRDPEEAKELEEDEALGAPEYAAVAEYTAPAGDTWGAEWPXAAAPAAA

SEQ ID NO: 311651 - protein, 72 aa, Zea mays
  Clone ID: MRT4577_4727C.1.pep
MNRTFCYFLHVDAFYSCDQQQILLCPQVMDTQESDQSSQNTYAKLANIRSLQGSIELAWPLLWVKGIPHLSS

SEQ ID NO: 311652 - protein, 84 aa, Zea mays
  Clone ID: MRT4577_47280C.1.pep
ICRGSVSRWKKVLQGSIVQCCSYHLCSQCITGADSNINLRLSLIVYHHVVLLLRKSSGLSYIGRAPEHMICPELLSHTIPLYSA

SEQ ID NO: 311653 - protein, 581 aa, Zea mays
  Clone ID: MRT4577_47281C.1.pep
MDPKGKGMVVNNKEKESLFNEPRDDKPTDLGSSPKKRDGKKKRRIKKIIYYDSDASSSSPRDDDDDDSSKKKPVNQNYSFYYSRIPFNSNAHLLSISLDKPPHFDGENYSFWSHKMRSHLFSLHPSIWEIDENGMHFDSTDNHVFINEQIHKNTQATTVLLASLCRDEYNNVSGMDNAKQIWDTLKISHERNDATMITKMELVEGELGRFAMIRGEEPTQTYNRLKTLVNKIRSYGSTRWTDNDVVRLMLRSFTVIDPHLVNLIRENPRYTKMTPEEILGKFVSGRMMVKEARYVDDALNGPLPVHEPQTIALKATSNRETLPSKVAQVEAAGLNEDDMALIIKRFKTALKGRKEYPNKNKTKAKCSYFKCGNTGHFIAQCPDNDDDHEQEKHGKKEKKKVYKKAKGEAHLGKEWDSDCSSSDSDDEGLAASAFNKSSLFPNERHTCLMAKEKKVSVRDSPKYSTSSDEDSSNDEVDYSSLFKGLDRAKVEKINELIDALNEKDRLLEKQEDILYEEHDKFISVQKSLALEIKRNEMLSSELSAYHETVSSLKSVNNDLNAKLEKANKSSSCVEHVSICNR

SEQ ID NO: 311654 - protein, 81 aa, Zea mays
  Clone ID: MRT4577_47282C.1.pep
FFFFFFFFFSLFWCDVFFFFVFFLVSPPGKELVLIVRGIGERGGEPNEGALGKTGPPHTPIGSFKGRKGPPRQKRWENAPQ

SEQ ID NO: 311655 - protein, 128 aa, Zea mays
  unsure (1)..(128): unsure at all Xaa locations
  Clone ID: MRT4577_47283C.1.pep
KRPRGGTTEATKKTKKAREEXNNREEHDRKRGKDTHGQKTGHRTRRNAKAKQENTDNNGPPQRKPEREHQAKQAKATVFFFHAHHXDRGTAGXKXKRXGSHSXRGAGDAXXXKTTPGEQERSPRRGSE

SEQ ID NO: 311656 - protein, 95 aa, Zea mays
  Clone ID: MRT4577_47284C.1.pep
APVSSKSNGGHSRSGWSRGSPVLRARTCPECRGHPPRAPDGSRLAPVLFFRRFGRAESSQAETWQSRIERERARERKKGKSLDRSKEPSERAESG

SEQ ID NO: 311657 - protein, 930 aa, Zea mays
  unsure (1)..(930): unsure at all Xaa locations
  Clone ID: MRT4577_47285C.1.pep
PPFVIVLPPPNVTGALPLGPPIPRPPRAARLPSPPSSACSSPSVPPAGPSAFPALSRVCGRGTRALTRAGKCTGREKRVKERHKWRDXLGADESIRIIHLXALRDWXRHXFLLDKHXTVSMTXALVRLHKDFLIYQDYRIXYWVCKILIVISDNEVDNIDLKEETMLKVPGYANPVHFGVLISFAYPLEEGLDEIVVATTRIETMLGDTAIAVHPEDERYKHLHGRYAVHPFNGXRLKIICDAELVDPTFGTGAVKITPAHDPNDFEVGKRHNLEFINIFTDDGKINSNGGAKFDGMPRFTARVAVIEALKEKGLYKDTKKNEMSLGVCSRTNDVVEPMIKPQWFVNCNHMAKAGLDAVRTKKIEIIPQQYEQDGYGWLENIRDWCVSRQLWWGHHVPAWYVTLGGDLXKDLGSANDRWIVARNESDANLEAQKKYAGKKLRLDQDPDVLDTWCXSGLFPLTVLXGWASDTADLRAFYPTSVLETGLEILFFWVTRMPMMGMKLGGXVPFSXKVYLQXPLIRDAPVLTDXKSPGNVADYFQLINGMYRDGVLKRLEEGNLDPNELNIARDGKKKDFPDGIAECGTDALRFALISYTSQSDRINLDIKRVVGYRQWCNKLWNAIRFAMGKLGDHYIPPATVDVSLMPPICKWILSDSGKAVGKTVSSLEAYKLSDATSAIYSWWQYQLCDVFIEAIKPYFFNDSQELESARTASRDTLWICLDTGLRLLHPFMPFVTEELWQRLPQPKDSCRKGSIMISQYPSLVEEWSNGRLENEMDIVLDAVNKIRSLKPPTDSNERRPAFALCRGQEIAATIQCYQSLIVYLSSISHLKILTENDETPADCATAVVNKDLSVYLQLQGALNADAEREKLKKKKDEIQKLQNALAQKMDASGYREKAPQSVQEEDMRKLTALLEQLEVISEAEKKLDAN

SEQ ID NO: 311658 - protein, 54 aa, Zea mays
  Clone ID: MRT4577_47286C.1.pep
DGQAPHARGALCAKWTPPWRANALTWVGAGGRAQAPGASLDANLQSLTIYPNYG

SEQ ID NO: 311659 - protein, 87 aa, Zea mays
  Clone ID: MRT4577_47287C.1.pep
AYMSLFGRSPLLVGRGQETLVPLACVGPYAWFSQKGLITIRLCSHLGSMRMSAPCGRQGAIWAGPRFSLPSGSLRLIDSALSLASLT

SEQ ID NO: 311660 - protein, 792 aa, Zea mays
  unsure (1)..(792): unsure at all Xaa locations
  Clone ID: MRT4577_47288C.1.pep
MDKQSDAQGSEKVAEEKQLDEKELERKLKKDQKAKEKEEKKLKAKQKEAARLQAQATSDGTKKAERKQRKKAVEDENPXDFIDPNTPNGRKKLLAPQMAKQYSPSAVERSWYAWWESSGYFGADSASTKPPFVIVLPPPNVTGALHIGHALTVAIEDAMIRWRRMSGYNALWVPGVDHAGIATQVVVEKKLMRERKLTRHDIGREKFVSEVLKWKDQYGGTILNQLRRLGASLDWSREAFTMDEQRSKAVTEAFVRLHKESLIYRDYRLVNWDCTLRTAISDIEVDHIDLKEDTMLKVPGYANPVQFGVLISFAYPLEEGLGEIVVATTRIETMLGDTAIAVHPEDERYKHLHGRYAVHPFNGRKLKIICDAELVDPTFGTGAVKITPAHDPNDFEVGKRHNLEFINIFTDDGKINSNGGAQFDGMPRFTARVAVIEALKEKGLYKDTKGNEMSLGVCSRTNDVVEPMIKPQWFVNCSTMAKAGLDAVRSKKIEIIPQQYEQDWYRWLENIRDWCVSRQLWWGHRIPAWYVTLEDDLDKNLGSNNDRWIVARNESDAKLEAQKKYVGMKLRLDQDPDVLDTWFSSGLFPLTVLGWPSDTADLRAFYPTSVLETGLDILFFWVARMVMMGMQLGGDVPFQKVYLHPMIRDAHGRKMSKSLGNVVDPLEVINGMSLDGLLKRLEEGNLDPNELNIARDGKTKDFPDGIAECGTDALRFALISYTXGSYGTQLSFFMFNVAXGFMQSPPLQSDRINLDIKRVVGYRQWCNKLWNAIRFAMGKLGDDYIPTATVDV

SEQ ID NO: 311661 - protein, 121 aa, Zea mays
  unsure (1)..(121): unsure at all Xaa locations
  Clone ID: MRT4577_47289C.1.pep
RTKSPPPGSPSPGGWAPPPPRFPWQERGGASRSGHPGQRPLGSPLKLNPPPSPRGGGGGPXPGVPRGGPAXFFGGLLPGTSSPSPPXMGPPPFSGTKRGXPPPPTPVDGPFGRNKPRPPFF

SEQ ID NO: 311662 - protein, 70 aa, Zea mays
  Clone ID: MRT4577_4728C.1.pep
AIQFYLVPHMLVKNDWDPLLFRFAHIRPVKPKCAIQWARQSQLCEQQDRPMPIIATILEPIIIKTMGLLE

SEQ ID NO: 311663 - protein, 408 aa, Zea mays
  unsure (1)..(408): unsure at all Xaa locations
  Clone ID: MRT4577_47290C.1.pep
DAHGRKMSKSLGNVVDPLEVINGMSLDGLLKRLEEGNLDPNELNIARDGKTKDFPDGIAECGTDALRFALISYTSQSDRINLDIKRVVGYRQWCNKLWNAIRFAMGKLGDDYIPPATVDVSLMPPICKWILSVLNKAVXKTVTSLEAYKLSDATSAIYSWWQYELCDVFIEAIKPYFSDSQEFESARAASRDTLWFCLVTGLRLLHPFMPYVTEELWQRLPQPKDSSRRKDSIMISEYPSLVEEWSNGGVENEMDIVLDAVNKIRSLKPPTDSNERRPAFALCRGQEVAATIQCYQSLIVCLSSISHLKILTESDETPADCATAVVNKDLSVYLQLQGDLNEDAEREKLRKKKDEIQKLQNALAQKMDASGYREKAPQSVQEEDMRKLTALLEQLEVISEAEKKLDSN

SEQ ID NO: 311664 - protein, 93 aa, Zea mays
  unsure (1)..(93): unsure at all Xaa locations
  Clone ID: MRT4577_47291C.1.pep
QLVVFGYRAAVEDNDLVMNMEISHPVRXPFPXGLPVKVELTTRIMVTGDYKSVIGQFFAAIKNCRPREPFKGKGIXHMYEVVRRKEVYVGMKK

SEQ ID NO: 311665 - protein, 66 aa, Zea mays
  Clone ID: MRT4577_47292C.1.pep
SAFVLSNGMLNMSSSNQFYPTRLNISCPNRTQNPVSTAILSYQDSPSLTKNPKPIKSQDDLFSNHA

SEQ ID NO: 311666 - protein, 63 aa, Zea mays
  Clone ID: MRT4577_47293C.1.pep
NGVKKKVISFQSLKYSRFCFMQHACSTPLQRGGLFPPVRQKGGEGSFKKQSAALKSIKGAFPT

SEQ ID NO: 311667 - protein, 101 aa, Zea mays
  Clone ID: MRT4577_47294C.1.pep
ALRARRVAQHGELDPHGAVQVRRVQRHASVHRRVRRARHVRVFRMQRRRALRRRRVGEVRRLAVPRPGRLVCRRHRGAVGPESEHSASSWLSLFAPSCPRT

SEQ ID NO: 311668 - protein, 92 aa, Zea mays
  Clone ID: MRT4577_47295C.1.pep
AKVRGGRRDDKGSRRIRNLRINRLPRRRHEAYGDLRRIRSRYLRKEGIAGNRPLNRRNVPTFPPAVHANPHLKINLGYTRSITPPPKHATRT

SEQ ID NO: 311669 - protein, 63 aa, Zea mays
  Clone ID: MRT4577_47296C.1.pep
ILIIHCLFVCSQASRSAWARNMLLGFRGYSWAFNLIQTSLMCLTSCSVCVHFKFVWLLTICPN

SEQ ID NO: 311670 - protein, 47 aa, Zea mays
  Clone ID: MRT4577_47297C.1.pep
MGLMFGFGFIKKKKKKKKKKKKKKKKKKKKKKKKKKKKKKKGAGKNK

SEQ ID NO: 311671 - protein, 38 aa, Zea mays
  Clone ID: MRT4577_47298C.1.pep
LKILDRPDMCMQLQTKTQMLRYLFIIFQNNPLLITMVL

SEQ ID NO: 311672 - protein, 215 aa, Zea mays
  Clone ID: MRT4577_47299C.1.pep
MRTRTPAWGRAAKLSSARVDHHTAMEPAADGDDVHGQRRDGGHHAPVVSLRALGLADADAFMAWASDDRVMRHLKRPLCATREQAVAQIRDTVLGHPWFRAVCFGDVPVGQVSVWPYADEGGRRANLGYALAHDQWGRGIAAAAVRMVVGTVFDDLPGLERLEAVTDVANVRSQRVLEKAGFHREGVLRRYIAGRRGSGARDAVIYSFLSSDDRA

SEQ ID NO: 311673 - protein, 129 aa, Zea mays
  Clone ID: MRT4577_4729C.1.pep
QTSWRTCTKRCTDILVVCTSILLVLVDFSFPSRLMAVDGPTVRSKMQMLSQIRTDATEKTNPANSGGGRTTVQLLVLTSNTHSACRPPPPSPSSAPVTTTFSPPPTHTARAVPGLSPGGYGPTSRTPAA

SEQ ID NO: 311674 - protein, 48 aa, Zea mays
  Clone ID: MRT4577_472C.1.pep
GKVGTRAHPVVPVFPPVLAPRVLDDPVRLAVRRMGAKPEAPGRVFGRV

SEQ ID NO: 311675 - protein, 84 aa, Zea mays
  unsure (1)..(84): unsure at all Xaa locations
  Clone ID: MRT4577_47300C.1.pep
TDHFLAPPLTTEAPRXAVPEHTSAHLQPILRPQPRAHVSLLLPAARNYLDSRPLSPQGVVPDRSGTWRDSLDGSDTIDHPARLP

SEQ ID NO: 311676 - protein, 109 aa, Zea mays
  Clone ID: MRT4577_47301C.1.pep
VPCRLLAAGSMMHVKPGHSVSARVPIGQLSSEAACADRRDLVHGGMEHGCFRSWCTKHRWYAWVSLSLTLPQSLARWRMPWNVFFMYRFGSVVCCTQKKQHIMCRWCLV

SEQ ID NO: 311677 - protein, 57 aa, Zea mays
  Clone ID: MRT4577_47302C.1.pep
MPSFLFFPRWSLIAGHLPGRTDNEIKNHWNSHLRRRGRAGDSRDDGVVVNIDLVKLP

SEQ ID NO: 311678 - protein, 47 aa, Zea mays
  Clone ID: MRT4577_47303C.1.pep
ISSAPMAGGDRRLRRRWHAQLARRRLVFVGDAYTAENTTGCVDGQPP

SEQ ID NO: 311679 - protein, 78 aa, Zea mays
  Clone ID: MRT4577_47304C.1.pep
VLLRPSKQTRGSKVMYESICRMKIFLAAFSVNQIRHRHLFAQSDVEKCPLVRNVNEAAPFSPHFFLSSSCSRRQGSNF

SEQ ID NO: 311680 - protein, 69 aa, Zea mays
  Clone ID: MRT4577_47305C.1.pep
SRKSFESYIFSLRDRVARSISYCIFLYFILYGVMFLCKYMFACACLYSLRVTNRLQSVLSFEESTVKLR

SEQ ID NO: 311681 - protein, 187 aa, Zea mays
  Clone ID: MRT4577_47306C.1.pep
MVCCHGGRRRSAALLFLAVAVVACAAAAAAQEPNTDAYFVSGFFSKLGRAAPSSSGANGVCSWSGVSCDGAGRVVAFVAAGMDLAGAIPEDTIGKLARLQVLDLSGNRLTALPNDLWELGASLGALNLSGTAIRGALPNNIGDFARLKVLDISHNAFTGALPQALGSMFGLQVLNASHNQFPGTGPN

SEQ ID NO: 311682 - protein, 118 aa, Zea mays
  unsure (1)..(118): unsure at all Xaa locations
  Clone ID: MRT4577_47307C.1.pep
SIQLNLGXRCFFWFFPTKQPSTPKPHPKTNKMFIHTQEIKPRFQPKSKTARFFKPLENKILQPTKKTPPLHSGHIPNFYTHAPKKTLPRLCNPLLPKKGFFLALPKTEGLTPSHQSRG

SEQ ID NO: 311683 - protein, 180 aa, Zea mays
  Clone ID: MRT4577_47308C.1.pep
FGSRHRVFLTDKYRPESCCIIANYYSLKGQHEKSVSYFQRALKLNRKYLSAWTLMGHEYVELKNSPAAIDAYRRAVDINPRDFRALYGLGQIYEMMGMPLYALYYFRKSPYLQPNDARLWIAMAQCYDSDPLQMIEEAIKCYERAANSTDTEGIALNQLAKLHGLLWQSVEAAFYYKKDL

SEQ ID NO: 311684 - protein, 182 aa, Zea mays
  Clone ID: MRT4577_47309C.1.pep
MAAAAATRAGAWGVAWLLAATVAAALLASASAQSGCTTTLISLYPCLNYISGNVSAPPSSCCSQLASVVQTNPQCLCAALSGDSSSLGGVTVDKTRALQLPQACNVKTPPASKCNSAGGGSAPGAATPATPSAGVPSTAGTGTGSKATPTAPFLTSGAASTRGAVSLVLAFATVAVYGISAA

SEQ ID NO: 311685 - protein, 140 aa, Zea mays
  unsure (1)..(140): unsure at all Xaa locations
  Clone ID: MRT4577_4730C.1.pep
ADNAGAEYLRGLGLAGRTDPDSFRACVPLATHADMEPYIARIADEGDTXHVLTATPVTSISLSSGTTQGKRKYLLFNDDLFKCAMQTGQTSFAFRNRAFPVEDGKSLQFIYASRQFKTKGGLTATTATTNVYRHRDFKAH

SEQ ID NO: 311686 - protein, 135 aa, Zea mays
  Clone ID: MRT4577_47310C.1.pep
RPHSLLWQLLAAAALRAPRRRPRRRPAYHRPQVRRRTTVLINHHTVQLSTASLLHHTNRCRNRHWIEGDADGPVPDVRRRVDPGGGEPGAGIRDCCRLRHLGRVTILAHLALLPTAFGDTDIRHSGFVVSLFRIG

SEQ ID NO: 311687 - protein, 76 aa, Zea mays
  Clone ID: MRT4577_47311C.1.pep
PKIHHNIIASPTIWSTLALRPIPSGGIEAFATSSWGSTHGTHVLLPTYKHAQQHRFHGHGVFYSWEYMLLFPFSGL

SEQ ID NO: 311688 - protein, 104 aa, Zea mays
  Clone ID: MRT4577_47312C.1.pep
GSRVTDRGVERNVGGTATRAGSWVVAWLLAATVAAALLASASAQSGCTTTLISLYPFLNYISGNVSAPPSSCCSEVASVDQINPQCLCCALSVDSSSLGGVIVD

SEQ ID NO: 311689 - protein, 149 aa, Zea mays
  unsure (1)..(149): unsure at all Xaa locations
  Clone ID: MRT4577_47313C.1.pep
AGVELGNRGSRSAKPATYRATSSPSAAYCRVIYPIRDRSQWPHFDMDPVVKGPLAKRGVARQRKLRIKGCLEGGSKSKTTTKEGGRQMKRGPIRCKKCGDLGHRQTSYKCPLNXTKKRNRKQRSRKYAGANEPSQTDIQAQKTIYDSSL

SEQ ID NO: 311690 - protein, 53 aa, Zea mays
  Clone ID: MRT4577_47314C.1.pep
GDVRRGKKKKKVWEWWSLASNKKCLLEIKWLGHEPRIARVAAGGAIAISCCWC

SEQ ID NO: 311691 - protein, 86 aa, Zea mays
  unsure (1)..(86): unsure at all Xaa locations
  Clone ID: MRT4577_47315C.1.pep
DLWLNENAQCVMGIVGYHLTVFLARWINADERAAKDDVIELVTKLELLLPPYERIQKRTEVSSQRVXXTKTVEILXTMSEEESSKI

SEQ ID NO: 311692 - protein, 60 aa, Zea mays
  Clone ID: MRT4577_47316C.1.pep
VSGRTACCVSLGNYYSVTCTQLDQHYEIAHSSAPKMCHMCYVQHQCQKLKNPPLCILTGQ

SEQ ID NO: 311693 - protein, 445 aa, Zea mays
  unsure (1)..(445): unsure at all Xaa locations
  Clone ID: MRT4577_47317C.1.pep
CISSPAGASLRADRPGGPHGFRAGERVATDSGASVRPPYGHASGSPALPWTGEESSRRRRSXQPGKNLIKIPSYQEVFGTGASTSSSKPPSYNPPVATSAAAAASSSSSSSGSFSQAFSFLKSSEFYSPPPPPPQPTTTPRPTQASPSAPTPQSKNSILVSHRQRGNPLLKHIRNARWTFADVVPDYVLGQSSCALYLSIRYHLLHPDYLYYRIRELQKNFRLRVILCHVDVEDVIKPLHEITRTALLHDCTLLCGWSLEECGRYLETIKVYENKPADSIREHMDNDYLSRLTHGLTSIRHVNKTDVVTLGSCIXSLSQIMNGSMDELARCPGIGERKVRRLYDTFHEPFKRVPARPRPNLVVPDTPDREKAKGQPSSTDGSSLQDAVEKPDASKKTKKGSDVRSALTVAFAKYSEKIRSQGRDAPNEAGESTGGSTVEAERAGD

SEQ ID NO: 311694 - protein, 56 aa, Zea mays
  Clone ID: MRT4577_47318C.1.pep
PWHLLFLNLYEFCLFILPKIPFSYFGLIELQMSQCCTYYGAAGLQLSCSLVSVKTW

SEQ ID NO: 311695 - protein, 47 aa, Zea mays
  Clone ID: MRT4577_47319C.1.pep
KKKKKKKKKKKLKKKKKKKKGKKKKKKKKKKKKKKKKKKKKKRGPPF

SEQ ID NO: 311696 - protein, 173 aa, Zea mays
  unsure (1)..(173): unsure at all Xaa locations
  Clone ID: MRT4577_4731C.1.pep
QHPAAIQQQQPMPQQSNFQGFGGVNPQYQHLVAGXSLLQEVKNNNHVKAQQLPPDAPKASGGLAPGVAIPNVAAAGEQGQHINSNTRDHNGAVKGAAPAGTGPSNVINNTASMPPGRNNSFKSVSSSPAAATGGIAVNSKVDDSFHQLEDLDLDGLITNELMESGLFGAGQGW

SEQ ID NO: 311697 - protein, 93 aa, Zea mays
  Clone ID: MRT4577_47320C.1.pep
NATAQLHSLTLPPHDLHFAPFIAQPRMINGDHATSTSPRSLRSLPLCSSSRGRRSHPKREEEAARGRQIRRRLAARTFLFCLYVRAHAYTGAG

SEQ ID NO: 311698 - protein, 177 aa, Zea mays
  Clone ID: MRT4577_47321C.1.pep
ANVASNDVWLSQKVSFMDEATAITAASKAIQETQEALGASAKEIGNAVREAVDRVKKGSRLVMGKFQAPAEGTHNLTSFCLCDAWIGCDTKTSFKLKVLKRSRAGTRGHVPEEGPVAAAEDGIEEEEEEEEEEYDDYESEYSDDEEDAKNKGEGKGKVVNGSAHQGAESDIDSGSDE

SEQ ID NO: 311699 - protein, 318 aa, Zea mays
  Clone ID: MRT4577_47322C.1.pep
MGASLARSVALLTLLLCLFLPCHGKLSTKFYAKSCPSVAAIVRSVMEQAVAKEPRMGASIIRLFFHDCFVNGCDASILLDDTSTFTGEKNAGANANSVRGYEVIDAIKTQVEAACKGTVSCADIVALASRDAVDLLGGPTWNVQLGRKDSRAASQSAANANLPGPGSGAASLVATFAAKGLSARDMTALSGAHTVGRARCLFFRGRIYTDQNVNASFAAARQQTCPQSGGDGNLAPFDDQTPDAFDNAYYTNLMAQRGLLHSDQELFNGGPQDALVKKYSGNARMFATDFAKAMVKMGGLAPAAGTPTEVRFNCRKVN

SEQ ID NO: 311700 - protein, 74 aa, Zea mays
  unsure (1)..(74): unsure at all Xaa locations
  Clone ID: MRT4577_47323C.1.pep
AEAGAGIAALIAPAISEQRXARIEECRKTYWLVXPRSLIGDSRRHSVQSFSATSADGHESLTSLYDAVESIDPT

SEQ ID NO: 311701 - protein, 685 aa, Zea mays
  Clone ID: MRT4577_47324C.1.pep
MAAAEENSSLFLIFILTMIALPLVPYTILRLCRAASEKAKTIHCRCSGCHRSGKYRKSIYKRISNFSTCSNLTILLLWIVMIFLVYYIKLVSREVQVFEPFSILGLESGASESDIKKSYRRLSIQYHPDKNPDPEAHKYFVEYISKAYQALTDPISRENYEKYGHPDGRQGLQMGIALPKFLLNIDGASGGIMLLGIVGFCILLPLMIAVIYLSRSSKYTGNYVMHQTLSTYYYFMKPSLAPSKVMDVFIKAAEYMEMPVRRSDDEPLQKLFVAVRSELNLDLKNIKTEQAKFWKQHPSLVKMELLIQAHLTRESFALTPALLKDYRHMLELAPRLLEELVKIAVLPRNPHGFGWLRPAIGVIELSQNIVQAVPLSARKTSGGNSEGIAHFLQLPHFTEATVKKIARKKIRAFQELCDMSVEGRAALLTQVAGLSEEQVRDVELVLEMIPCIEVDIKCETEGEEGIQEGDVVTMYAWVSLRRRNGLTAALPHCPNFPFHKEENFWLLLADVASNDVWLSQKVSFMDEATAITAASKAIQDTQEALGASAKEIGNAVKEAVDRVKKGSRLVMGKFQAPAEGTHNLTSFCLCDAWIGCDIKTSFKLKVLKRSRAGTRGHVPEEGSAAAVEDGIEDEEEEDEEEYDDYESEYSDDEEDEKNKGKGQGKVVNGSAHQGAESDIDSGSDE

SEQ ID NO: 311702 - protein, 98 aa, Zea mays
  Clone ID: MRT4577_47325C.1.pep
TKVLCYKCNLICTNFLYIKAGRKRGLRSVHLILFTLSHTIQIQWTRAILLLSPVSAQKKKNFWVSTLPKTFRRKRNREICALSCYGASSPSEMCLRWR

SEQ ID NO: 311703 - protein, 93 aa, Zea mays
  Clone ID: MRT4577_47326C.1.pep
DKLVQLTLWLGVCTAPTAPRPPRAAHREAQKWAHYRRSRDAKPSKFPRLLDSCQDKRRNPVGASVRSRCPSMTLSLGDPRTYAGVGAACSCNA

SEQ ID NO: 311704 - protein, 244 aa, Zea mays
  unsure (1)..(244): unsure at all Xaa locations
  Clone ID: MRT4577_47327C.1.pep
MARTPRTTILHLVLTLCILSAQNTPSLASSAIDEFLGCLSADIPSRLIQTPATPSYSALLLSTAWNLRYILPDTSKPIGIIAATEHAHVQTTVRCGRRHGVRVRVRSGGHDYEGLSYAXSTSTTEPFAVLDLAALRAIHVDPARAEAWVESGATVGELYYAVGAASRSLGFPAGSCPTMGVGGHLSGGGFGSLARKYGLSADNVLDAVVVDADGRLMNRSTMGEDHFWALCGGGGESFRVVLSW

SEQ ID NO: 311705 - protein, 62 aa, Zea mays
  Clone ID: MRT4577_47328C.1.pep
MSTAQSLKSVDYEVFGRVQGVCFRMYTEDEARKIGVVGWVKNTSKSTVTSPVQGPEDKVIPN

SEQ ID NO: 311706 - protein, 108 aa, Zea mays
  Clone ID: MRT4577_47329C.1.pep
MTIAAVLCLLLFSGRLAGADKTFRGRRGGGYGGLEAGGRGGGGYSTPSEAAPYTPAAGETTTPSSGGGYSTASVAAPSTPAAEETTTTPSPGGRGYRGATRKASSGGG

SEQ ID NO: 311707 - protein, 223 aa, Zea mays
  unsure (1)..(223): unsure at all Xaa locations
  Clone ID: MRT4577_4732C.1.pep
MLACPQVSNWFINARVRLWKPMVEEMYVEEMKAEGQDGGGQQQVGVAVANNPNPSSAGHASEAAEDDGRGDSGGGAVVDRKPTRAQLLHDAGSLASVVNIGGGSRAGFGIMDHLDFDAYGGHHAGAVSLTLGLQQHDSHADGGAGGVNIAFXAAARAPPRXLFAPTAAAAGHQMGGGVHPGLHHHVQFSGAGAGIDGEAAHGQEHYRGLQGGGGFHLLRDLAG

SEQ ID NO: 311708 - protein, 62 aa, Zea mays
  Clone ID: MRT4577_47330C.1.pep
MASLKASKPAGVAAQGKEPAPKLSETATKPSAAKSGGVKKAEQKPRETKKKVKSSKPAAAKK

SEQ ID NO: 311709 - protein, 81 aa, Zea mays
  unsure (1)..(81): unsure at all Xaa locations
  Clone ID: MRT4577_47331C.1.pep
MLARAARRTWALLLRGSLLASGRAPRRASSGLPRNTVVLFVPQQEAWVVERVVRFQRILDPGLNMXIPVLDRIRYVQSLKE

SEQ ID NO: 311710 - protein, 120 aa, Zea mays
  unsure (1)..(120): unsure at all Xaa locations
  Clone ID: MRT4577_47332C.1.pep
MATAAAASLLKNSFAGSRLPDGTRTTPAFLVVATGPRGAGAGPICAYMYMSSSNPPYDLTYCRLSPIKESMVFREMTRRYMTDMITYADTDLAIVGAGYAGLSXADQLSKDPAESIVIEE

SEQ ID NO: 311711 - protein, 171 aa, Zea mays
  Clone ID: MRT4577_47333C.1.pep
IGYLEAGRGSLIEIDRSTIHHSRTEYAQPEVLISVDDARRRRRAYFRCTHKHDQQCAAQRQVQRRDDDPDAYTVTYIGAHTCRDPATAATTTSTRGPAASRRPTPATGRPDTRAPCCLRSPRGSWRAAAAAASGSRSWSWRRCLAASPRRGAPLPRPRRCGPPRPARTRAT

SEQ ID NO: 311712 - protein, 53 aa, Zea mays
  Clone ID: MRT4577_47334C.1.pep
PTRFAFLVSCSYRARQPPSLFKWPAPSLPALELPSVVMAPSPLVPSVMQLTLT

SEQ ID NO: 311713 - protein, 211 aa, Zea mays
  Clone ID: MRT4577_47335C.1.pep
GKPLQHRPAEHRQVNSSARPIHDLLISFCFACIRISFSNWSLIQPSFAFDPRNKTDPQEKIAVLTILIRNILDSMAGTTTVVGWVVSPILRKMLSLVQSYVSSQYNWKSNMVSDLKNLEATLMEVLLVVDEAERRHLKDRNQVALLCQMREAVCDTEDVLDKFDYKLIREKVEHQSMARSIVASSLSLGKRLVGLDKLRSELHMVIKSMAR

SEQ ID NO: 311714 - protein, 201 aa, Zea mays
  unsure (1)..(201): unsure at all Xaa locations
  Clone ID: MRT4577_47336C.1.pep
MPSPSLLWTACVNITKSPCITALDSPIRSRMNYDPHKDKRLLGSAQSAPYALVPKMNVCMLVACPPCSXADNMRLDYMHVEALKRMNNTRXLGKRLDKKYHAFLRSQGIIKHXPRLLGAGLNNARXFPTLTTHQESLESEVNETIATVKLQLKKDLWHGLLTGDNLDMXTYKQIQQIIHMNVDLLVSLLKXKNWQNVRCLY

SEQ ID NO: 311715 - protein, 64 aa, Zea mays
  Clone ID: MRT4577_47337C.1.pep
PRVFFFFFVFFFFFFFFQINKPSFRKEYLKHNRIKILISLNYSHTFSPPTPYTIHIPSPFTTSP

SEQ ID NO: 311716 - protein, 116 aa, Zea mays
  Clone ID: MRT4577_47338C.1.pep
TTVKYAQILRTECTVRRDRCSRQQWLHSHETSHVYVQCSRMQSMQTDVRSAVPRIAPVTRNLISVGQTDEVSSHEYAPQKPDRPHTRASLALRTTISEACSPTLSVLARRWDGNDC

SEQ ID NO: 311717 - protein, 112 aa, Zea mays
  Clone ID: MRT4577_47339C.1.pep
VFPPLVFSPSFTGQVGIYHSFFFPAPCVKGGLLRPGVPGLFPWRWAFMSPLEVFKKRGLGVFSPGQVCQIRFFFFGVLRFDSFWGFPVFPFFWKFWFVNFSKIVWALVSKKK

SEQ ID NO: 311718 - protein, 429 aa, Zea mays
  unsure (1)..(429): unsure at all Xaa locations
  Clone ID: MRT4577_4733C.1.pep
RRRCTSSTTSPAAAPRPGTIRSSSRRRGCSSSSTTXPSPQIQAMDALELQRLKDKLYIMLEEVDRRYRRYCEQMRALAGGFEAVAGERAAAAYTALASRTISRHFRSLRDGVVAQLQAARRALGEKDVAVPGMTRGDTPRLRVLDQCIRQHKALTQAAGMMESHPWRPQRGLPERAVTILRAWLFEHFLHPYPSDVDKHILARQTGLSRSQVSNWFINARVRLWKPMVEEMYVEEMKAEGQQDGGGQQQAGVANNPNPSSAAHAHASEAAEDDGRGDSGGAAAVVDRKPTRAQLLHDAGSLASVVNIGGGSRAGFGIMDHLDFDAYGGHHAGAVSLTLGLQQHDSHADTGGVNIAFXAAARAPPRXLFAPTTAAAGHQMGAGVHPGIHHHVQFSGAGAGIDGGEAAHGQEHYRGLQGGGGFHLLRDLAG

SEQ ID NO: 311719 - protein, 97 aa, Zea mays
  unsure (1)..(97): unsure at all Xaa locations
  Clone ID: MRT4577_47340C.1.pep
MALRMRHPTSLDCSEADKDHLPGYCRSALSVFKANEEHIELRKIEVREKVFAHLGRVEEEYKRLAFIRHELEGMAYPTRKEVESIKSXIDTVNRQLK

SEQ ID NO: 311720 - protein, 520 aa, Zea mays
  unsure (1)..(520): unsure at all Xaa locations
  Clone ID: MRT4577_47341C.1.pep
MALTRIGLAGLAVMGQNLALNIAEKGFPISVYNRTTSKVDETVQRAKVEGNLPVFGFHDPASFVSSIQKPRVVIMLVKAGAPVDQTIATLAAHLDQGDCIVDGGNEWYENTERREKAMEERGLLYLGMGVSGGEEGARNGPSLMPGGSFEAYKYIEDILLKVAAQVPDSGPCVTYIGKGGSGNFVKMVHNGIEYGDMQLIAEAYDVLKSVGKLTNSELHQVFSEWNKGELLSFLIEITADIFGIKDDKGEGYLVDKVLDKTGMKGTGKWTVQQAAELSVAAPTIEASLDSRFLSGLKDERVEASKIFQGDYSTGLPVDKAQLIEDVRQALYASKICSYAQGMNIIKAKSSEKGWGLNLGELARIWKGGCIIRAIFLDRIKKAYDRNPNLANLLVDPEFAQEIIDRQAAWRRVVCLAINNGVSTPGMSASLAYFDSYRRDRLPANLVQAQRDYFGAHTYERVDMPXVLSTPSGSRLRATPRSEHGLVFAYASMPPCRVINHITACREELCLIFIFHAQCLI

SEQ ID NO: 311721 - protein, 46 aa, Zea mays
  Clone ID: MRT4577_47342C.1.pep
NDLLFSKGKNPNGYINKRVSQKCHFIQGENLKYEQIAPKTGCPNSS

SEQ ID NO: 311722 - protein, 92 aa, Zea mays
  Clone ID: MRT4577_47343C.1.pep
REPVRGGFFKSPANTSLMGIMVFFHKKKRSTQSCFSTSIQQPKPPSRAIDLLTLAKTRAANFETRTYTSSPNAAQYKTSLCSNTKSPRSVIC

SEQ ID NO: 311723 - protein, 653 aa, Zea mays
  Clone ID: MRT4577_47344C.1.pep
MDQHDSMADSPRRRHNLLRDKVQLVKRKDSDRYEIVRFHDPLSFEKGFFVVIRACQLLAQHNDGIIFVGVAGPSGAGKTVFTEKVVNFMPDVAVISMDNYNDATRIVDGNFDDPRLTDYDTLLENIHGLKEGRSVQVPIYDFKSSCRTGYRTVDVPSSRIVIIEGIYALSEKLRPVIDLRVSVTGGVHFDLVKRVLRDIQRAGQEPEEIIHQISETVYPMYKAFIEPGLETAHIKIINKFNPFSGFQNPMYILKSPRSLGPEKIKAVLGDDHTESNEETYDIYLLPPGEDPEACQSYLRMRNREGKYNLMFEEWVTDNSFIISPRITFEVSVRLLGGLMALGYTIAAILKRSTRVFSDGKATVKIDWLEQLNRQYIQVQGRDRLYVKSVADQLGLDGSYIPRTYIEQIQLEKLINDVMALPEDLKTKLSIDDELVSSPKEAFSRVSADRRNKLMKSGLSQSYSTHGDKNIVKLSKLTETNRRFGGGRALEPPAINQGAITQLSEQISTLNERMDEFTSRVEELNSKFTVKKHLPSQQNLALPNDACNGSTPTNLFVSHLGNGTLIPHSSSSNQLSKDSPMIEEIMNITRGQRQVIHQLDNLTNLLHEHLVLTRQTNNTASRNRVLDSDTLICPLICLTVASIGYFMFKGLSRG

SEQ ID NO: 311724 - protein, 42 aa, Zea mays
  Clone ID: MRT4577_47345C.1.pep
RIGIAKRFKLVATVPRSIKVGPRNLKFKNSTAGLVKRILNWG

SEQ ID NO: 311725 - protein, 67 aa, Zea mays
  Clone ID: MRT4577_47346C.1.pep
RIMHPRKGGPSLHGRHTWCPVETNQPSYPETSHRPSLHLARIPNISKEVHYLILSLLVHNKKPGSGE

SEQ ID NO: 311726 - protein, 49 aa, Zea mays
  Clone ID: MRT4577_47347C.1.pep
FKFEIRHQTDRIDGRAIPVGKPRGRSHEPQDTQAIFFTTGLNADAFDRI

SEQ ID NO: 311727 - protein, 117 aa, Zea mays
  unsure (1)..(117): unsure at all Xaa locations
  Clone ID: MRT4577_47348C.1.pep
FPLSLPASFVVWLRARXALSRRGXLCPCXXLVARPXPCRGAXXRRXGLPPXARXPXXWVXPGAPARGFXLXXXAPPPLLAAPAXFVSVRLAXXWPSGPCFSGXGPAXVXCCRPARWV

SEQ ID NO: 311728 - protein, 54 aa, Zea mays
  unsure (1)..(54): unsure at all Xaa locations
  Clone ID: MRT4577_47349C.1.pep
GVLFHSLDFVLFRGRGPLQKNKNQGDXRPFLLLACVKHTLLHEAVLPLNLPNGP

SEQ ID NO: 311729 - protein, 92 aa, Zea mays
  Clone ID: MRT4577_4734C.1.pep
GSEALTFLGLQNFSRVQAFRGEKHTILVAIHWVETQNWEKPSVHHWVWVCGGGGNIGLSHSKSPSLRHFFPEGLSSNCTPRGEQTTHCLPHP

SEQ ID NO: 311730 - protein, 68 aa, Zea mays
  unsure (1)..(68): unsure at all Xaa locations
  Clone ID: MRT4577_47350C.1.pep
GASYDAFGQPGYLPVILFXQPLKSFKRLPNFXLPECLLVTSMKDRINPIPYQYVIARQGNEKIDSILG

SEQ ID NO: 311731 - protein, 91 aa, Zea mays
  Clone ID: MRT4577_47351C.1.pep
MGLQEEFEEHAEKAKTLPATTTNESKLVLYGLYKQATVGDVSTGRPGIFSLKERAKWDAWKAVEGKSKDEAMADYITKVKQLLEAAAASTS

SEQ ID NO: 311732 - protein, 35 aa, Zea mays
  Clone ID: MRT4577_47352C.1.pep
VRNSRPRSNSVLHMVTALQDQIACTENIRSTMPSH

SEQ ID NO: 311733 - protein, 137 aa, Zea mays
  Clone ID: MRT4577_47353C.1.pep
GQRGLAIIMFSGHDATYAMHTSCLQLSSAPIQFFYDSCAVGHGFRYFQCVVFLYPGTIKRSEVRLGFRSRGICRVASGGSYLNVQCSNPEAPCKSMFHVLSMRSMRQPKESMCGGQPSPIIATGDVDGRSLGSQRNQ

SEQ ID NO: 311734 - protein, 34 aa, Zea mays
  Clone ID: MRT4577_47354C.1.pep
LESCRGISKKDVFSLRREIHIPSTGSVEMAVAVF

SEQ ID NO: 311735 - protein, 129 aa, Zea mays
  unsure (1)..(129): unsure at all Xaa locations
  Clone ID: MRT4577_47355C.1.pep
VAPGSGELVIFGTDAKKPFLVVGVVSVESXLTAADGTKLKHRADLKLDRCTLCHDIGVTPKHNVIMDIPLTMDVGRIVKGGQLIQFEKESYARIGVMPRYGDADSAVWFDVEPFCMFHLVNCFEEGDEV

SEQ ID NO: 311736 - protein, 208 aa, Zea mays
  Clone ID: MRT4577_47356C.1.pep
SMRPQPRAKASHRDTAAEAGQTTATPLCNLHADVGQVDLQATSLPEQLPQASAHAPCHRPEQARRTAAAGEPEQLPRASAQAPCRRPEQARRTAAAGEPERAGRAAAAGKRACSVPLPRASSPNRRCERARASRPSRCRRQARRLRAVAPSKHAETPPRASPSEQAEPLPQASAQTPCRRPEQARRRRGRARASKPSCRPEGNQAQRP

SEQ ID NO: 311737 - protein, 308 aa, Zea mays
  Clone ID: MRT4577_47357C.1.pep
LGTSRPAGSRFRESLSHAEGSGSDGALATDVFAVGDAPPLRSAIGCMSTAYDSSPDGVATAGLLGMNRGTLSFVTQASTRRFSYCISDRDDAGVLLLGHSDLPFLPLNYTPLYQPTPPLPYFDRVAYSVQLLGIRVGGKPLPIPPSVLAPDHTGAGQTMVDSGTQFTFLLGDAYSALKAEFLKQTKPLLPALGDPSFAFQEALDTCFRVPAGRPPPSARLPPVTLLFNGAEMSVAGDRLLYKVPGERRGADGVWCLTFGNADMVPLTAYVIGHHHQMNLWVEYDLERGRVGIAPVKCDVASERLGLML

SEQ ID NO: 311738 - protein, 101 aa, Zea mays
  unsure (1)..(101): unsure at all Xaa locations
  Clone ID: MRT4577_47358C.1.pep
APKAEKNPAXEKKPSEEKAEKKPRAEKRVPSKEGCVTKGTKTAMKSVXSYKIYIFKELKQVHPVIGIXAKAMFIMNSLINDIFEKLAFEAAKLARYNKEPT

SEQ ID NO: 311739 - protein, 173 aa, Zea mays
  unsure (1)..(173): unsure at all Xaa locations
  Clone ID: MRT4577_47359C.1.pep
RLAAAGALASKMLCLLALLALCAGAAXASIVPHCSLAPSSIVPPFLPPAPSLGXGRAAAAASRLPSAVAASVLQPPIARLAQLSLAHLTVRTIAAHRRPLFLPALSSLALVNPVAFLQLRLVASYPLAVCNVVANQLRRLLRQFLPVLSSLVLVNPAGCLRPLPLLSCSRLAV

SEQ ID NO: 311740 - protein, 65 aa, Zea mays
  Clone ID: MRT4577_4735C.1.pep
NLILPIILTMNQYPIYSNIVNNLLKTLHLVFHSLTNKSRRKNAKRQYDRQDSSRVVSRGVSRRID

SEQ ID NO: 311741 - protein, 437 aa, Zea mays
  Clone ID: MRT4577_47360C.1.pep
MATRSLTSALPLSRTPRVPSHRPSLRRLQTLTRALTSSSPQAMASSPTPKKVLVPIANGTEPMEAVITIDVLRRAGADVAVASVEPGATSVAASWGIKLTADALLADLADDEFDLISLPGGMPGSSTFGECKVLEKMVKKHVEKGKLYAAICAAPAMTLGTWGLLNGLKATCYPSFIDKLPSEVHAVESRVQIDGKCMTSRGPGTAMEYSVILVEQLYGKEKAKEVAGPMVMRPQHGVEFSMKEVNSTSWNVGETPNILVPIANGTEEMEATMIIDILRRAKANVVVASLEDKLEIVASRKVKMIADVLLDDALKEQYDLILLPGGLGGAEAYAKSDKLMDLIKKQAEANRLYGAICASPAIALEPHGLLKGKKVTSYPAMWNKLADQSECNNRVIVDGNLITSQGPGTSMEFSLAIVEKLFGRERALELAKSMVFI

SEQ ID NO: 311742 - protein, 69 aa, Zea mays
  Clone ID: MRT4577_47361C.1.pep
SVQLLKQPEAQPPKPSSPWPEVENCGIILETMPCSWPIILHKVLSTRTHKVTPKLSRYFSAHKKDSLWG

SEQ ID NO: 311743 - protein, 59 aa, Zea mays
  Clone ID: MRT4577_47362C.1.pep
CSRRPFFLTKDNLFNAFRFHIEDGPQTAHFNAVRFLTKILQDFVINETTCIFPSIPSLS

SEQ ID NO: 311744 - protein, 122 aa, Zea mays
  Clone ID: MRT4577_47363C.1.pep
EQYDLILLPGGLGGAEAYAKSDKLMDLIKKQAEANRLYGAICASPAIALEPHGLLKGKKATSYPAMWNKLADQSECNNRVIVDGNLITSQGPGTSMEFSLAIVEKLFGRERALELAKSMVFI

SEQ ID NO: 311745 - protein, 150 aa, Zea mays
  unsure (1)..(150): unsure at all Xaa locations
  Clone ID: MRT4577_47364C.1.pep
MSGGVEPETPPGSSGRSGGSTPVGGKPPRHHLTSIRHCASIARIAAASAGFGLDSGTLSLISPTADIHPGFLPVFRSGSFADIGPKTYMEDEHVCVDNLVEHLGFYGPGIPAPGAFYGVFDGHGGTDAACFVRXNILEFITEDCHFPNSI

SEQ ID NO: 311746 - protein, 47 aa, Zea mays
  Clone ID: MRT4577_47365C.1.pep
GFVHPLRFPAVTLFASGLSRCVELSPHNKFSQAPTMPSLIPGLIPPL

SEQ ID NO: 311747 - protein, 77 aa, Zea mays
  Clone ID: MRT4577_47366C.1.pep
IRLEVKFPNERFFRPPLPSTPERNYIDLFGAPIHKLYIQGKSVNPRLYGWSFNHILRWPLPFFPWGPTSLRNLPTRI

SEQ ID NO: 311748 - protein, 53 aa, Zea mays
  Clone ID: MRT4577_47367C.1.pep
NARSTHASGSWCNNPKNSTAHPRLVDIHHIEIHGSGQKLNCIRIPEDCRIALY

SEQ ID NO: 311749 - protein, 72 aa, Zea mays
  Clone ID: MRT4577_47368C.1.pep
LFLIRADIFWCSCTYSLCVVCLVLAHDSVELSVTWLTGFGPSSLICLLVPLLTIQCSVLKVQSTWTFSWCNQ

SEQ ID NO: 311750 - protein, 653 aa, Zea mays
  unsure (1)..(653): unsure at all Xaa locations
  Clone ID: MRT4577_47369C.1.pep
MYPENPHLRFLLFLAVAAVAAGGAAANTTLTASLSGNQIKIIWSGLPAPDGLDYVAIYSPPSSRDRDFLGYLFLNGSASWRGGSGELSLPLLPTLRAPYQFRLFRWPAKEYSYHHVDHDQNPLPHGKHRVAVSADVSVGDPARPEQLHLAFADEVDEMRVLFVCGDRGERVVRYGLQKEXQGVEGGGHGCEXYEQRHMCDWPANSSVAWRDPGFVFDGLMKGLEPGRRYFYKVGSDTGGWSEIYSFISRDSEASETNAFLFGDMGTYVPYNTYIRTQSESLSTVKWILRDIEALGDKPAFISHIGDISYARGYSWVWDHFFSQIEPIAANTPYHVCIGNHEYDWPSQPWKPWWATYGTDGGGECGIPYSVKFRMPGNSILPTGNGGPDTRNLYYSFDSGVVHFVYMSTETNFVQGSDQHNFLKTDLEKVNRSRTPFVVFQGHRPMYTSSDETRDAALKQQMLQNLEPLLVTYNVTLALWGHVHRYERFCPMKNSQCVNTSSSFQYSGAPVHLVIGMGGQDWQPVWQPRPDHPDVPIFPQPERSMYRGGEFGYARLVATREKLTLTYVGNHDGQVHDMVEIFSGLVSPSNSSVAEAVDGTKLGTGVSTVRKISPLYLEIGGSVMFALLLGFSFGILVRRKKEAAQWTQVKNEES

SEQ ID NO: 311751 - protein, 43 aa, Zea mays
  Clone ID: MRT4577_4736C.1.pep
IRKKATMRRTTLNICLVSLEMRKTLCSTLQVWSTGFDPQCKVR

SEQ ID NO: 311752 - protein, 118 aa, Zea mays
  Clone ID: MRT4577_47370C.1.pep
VRFRSFQDPVWGQEPGGPFYPSRLGEEAAGPRSPRFWKQGRQGLERGRKGGASRPPSGGPKGAIEPHFLWVWMFWRPLFLGPLNISGGKIGPCVPPAGSLRVICFYMVSPGPFPSWRI

SEQ ID NO: 311753 - protein, 68 aa, Zea mays
  Clone ID: MRT4577_47371C.1.pep
QQALDRVMVGRTSVVVAHRLSTIQGCDTIAVLDRGVVVEKGTHTSLMASGRSGTYFGLVALQQGGKQH

SEQ ID NO: 311754 - protein, 141 aa, Zea mays
  Clone ID: MRT4577_47372C.1.pep
LSQGQYAEDLLERAGMTNWKPVATPADTQQKASAGDGILLDDATSYRSIVGALQYLTITRPDIAYAVQQVCLHMHAPRDVHLTMLKRILRYIKGTIHFGIQLRTASPSTITAYSDADWAGCPDTRRSTSGFCIFFGNSLVS

SEQ ID NO: 311755 - protein, 67 aa, Zea mays
  unsure (1)..(67): unsure at all Xaa locations
  Clone ID: MRT4577_47373C.1.pep
RSITSGFASVARCQWAASRSLGIVLGERERHGRRAEPHQVLMLLLLLGRGAPPRXGRGRENKGACKS

SEQ ID NO: 311756 - protein, 86 aa, Zea mays
  Clone ID: MRT4577_47374C.1.pep
THASVNFSVFYYEILNSPDRACNLAKQAFDEAIAELDTLGEESYKDSTLIMQLLRDNLTLWTSDMQDDAADEIKEAAAPKPTEEQQ

SEQ ID NO: 311757 - protein, 61 aa, Zea mays
  Clone ID: MRT4577_47375C.1.pep
GIFHRNTTNIKRKRVRYLAKQCCKETWGTTQNCQISFNVTTHQNLKKSITASLASLQKQKQ

SEQ ID NO: 311758 - protein, 153 aa, Zea mays
  Clone ID: MRT4577_47376C.1.pep
MSRLVSRRHLAAATALRRSPAAFASRWLHTPAFATVSPEEISGSSPAEVQNFVQGKWIKSANWNWIVDPLNGEKFIKVGEVQGSEIKPFVESLSKCPKHGLHNPLRAPERYLMYGDISTKAAHMLGQPEVLDFFAKLVQRVSPKSYPQALLEV

SEQ ID NO: 311759 - protein, 109 aa, Zea mays
  Clone ID: MRT4577_47377C.1.pep
PNAGSRLGFLQTNAKRLPSFRSFQDGDSNWGGDHQRCSPTPLPLWLFQLLTQIKNSKYFRPPMAHPLRDLRSDVFVPLATGESMLHPLVFFFEKSFDGKLQSYQFPPYL

SEQ ID NO: 311760 - protein, 68 aa, Zea mays
  Clone ID: MRT4577_47378C.1.pep
VPSGAGAGAGDGHGEGHPVLAGLPEGPSEAASGAVYGPVSSQGATQGVNSRVDSPLVCSGGTRSSGVW

SEQ ID NO: 311761 - protein, 102 aa, Zea mays
  Clone ID: MRT4577_47379C.1.pep
YAAPDPYIMSTQPPSAPSVPVATPLSPVLWQLNLPARFDIYSLGLIFLQMEIKPKKSSTQRNALASVLRLQRKIMRTIKESMDELNSQRKSIWWSRWIPREE

SEQ ID NO: 311762 - protein, 134 aa, Zea mays
  unsure (1)..(134): unsure at all Xaa locations
  Clone ID: MRT4577_4737C.1.pep
IDLDQFEDYFITLRAWRLYGQCPKLCVKAHALKGQSCAPPRLVENDPMARDGNDFDGDEAHSQKHAKSPELAKKFFLEAAAVIFKEQIXKAFREGSAQQKARRVFVTPALKLLEQRVHVACKKIISLEKQNKLF

SEQ ID NO: 311763 - protein, 92 aa, Zea mays
  Clone ID: MRT4577_47380C.1.pep
YYYNKLFYLASILYTGVPSILSILIQLSLNMRHNPMPSLPTAHHSIIPKVNPATFRTSSESCSERGRVYLGKHTVYRSAKPDAWADAWADAW

SEQ ID NO: 311764 - protein, 153 aa, Zea mays
  Clone ID: MRT4577_47381C.1.pep
AELPTRSRTRGRTRGIGWELLTSMVRYKARQRTSAKAALAHPYFNREGLLGLSVMQNVRLQLFRATQKDYSEAARWVIGLMARSGTEDVGGFTEAQLQELREIKPKKSSTQRNALASVLRLQRKIMRTIKESMDELNSQRKSIWWSRWIPREE

SEQ ID NO: 311765 - protein, 58 aa, Zea mays
  Clone ID: MRT4577_47382C.1.pep
VAPISVPYIMQPEKCRALCPRLVCYSLSLSRTLLHRTIALNLAVHDPSSQLRCVRSLS

SEQ ID NO: 311766 - protein, 565 aa, Zea mays
  unsure (1)..(565): unsure at all Xaa locations
  Clone ID: MRT4577_47383C.1.pep
MAASGLGLSTSFLPGHDTLLRRRRRRPAGHAAASFRPVTAELGGVATELGRQLVEAVGVGLPCTVMQCGDVIYRSTLPRNDGLTITAPGVTLALATVSYLWSTPGVAPGFFDMFVLAFAERLFRPTFRKDDLVFGKKLGEGAFGVVCKASLANPEAAKKQGDLVVKKATEYGAVEIWMNERVRRACASSCADFIYGFCETKAKGKGAEEYWLIWRFEGEDTLYDLMQSKEFPYNVETKILGGIQDLPQGIARENKIIQTLXMRQLLFALDGLHSTGIVHRDIKPQNVIFSALYXSRTFKIIDLGAAADLRVGINYIPKEFLLDPRYAAPEQYIMSTQTPSAPSVPVATTLSPVLWQLNLPDRFDIYSLGLIFLQMAFPSLRTDSNLIQFNRQLKRCDYDLQAWRNLVEPRASAELRRGFDIMDLDGGIGWELLTSMVRYKARQRTSAKAALAHPYFNREGLLGLSVMQNVRLQLFRATQKDYSEAARWVIGLMARSGTEDVGGFTEAQLQELREIKPKKSSTQRNALASVLRLQRKIMRTIKESMDELNSQRKSIWWSRWIPREE

SEQ ID NO: 311767 - protein, 615 aa, Zea mays
  unsure (1)..(615): unsure at all Xaa locations
  Clone ID: MRT4577_47384C.1.pep
GHFMKGDAVIVIKGDLKNXEGWVEKVEDETVHIRPKISDLPKTLAFNEKELCKYFKPGDHVKVISGVQEGATGMVVKVEGHVLIILSDTTKEHIRVFADHVVESSEITTGITRIGDYELHDLVLLDNLSFGVIIRVEAEAFQVLKGVPDRPEVVLVKLREIKSKIDRRSSAKDRSNNIISAKDVIRVVEGACKGKQGPVEHIHKGMLFIYDRHHLEHAGFICAKAQSCLLVGGSTGGHRGNGMDTVDARLGALRSSASILQSPGRLPPRGPNMNYGGRFGGGRGXGCDALVGKCIKIKSGPYKGYRGRVKEVTGALVRVELDSLMKIVTVKRDDIADTPTVATPFREPRYSLGGETPMHPSRTPHHAYQTPMRDPGATPIHDGMRTPMRSRAWAPMSPPRDNWEDGNPATWGSSPAYQPGTPQARPYEAPTPGSGWANTPGVSFNDAPTPRDNYANAPSPYVPSTPVGQPMTPNSASYLPGTPGGQPMTPGNAGMDMLSPIIGGDGEVAWLLPDVLVNVLRGGDDGPGVVREVLGDGSCRVALGSSGNGDVVTVLANEVEVIRPKKSDRIKILNGNFRGYTGKLIGIDGSDGIVRLDETYEVKILDMVILAKLAT

SEQ ID NO: 311768 - protein, 152 aa, Zea mays
  unsure (1)..(152): unsure at all Xaa locations
  Clone ID: MRT4577_47385C.1.pep
CGATDVKSPETILEHEXVDALFSLSRIIWLGGLNYRIALSYCLAKALVEMHKQLLEKDQLQIEXRCGCIFQGWKEGMIXFPPIYKYSFNSDXLWCDHIMWXLLQSSYIRGESRFSDHRPVYNLFMAKVESARHRRSNLSLIMISGVEGTMID

SEQ ID NO: 311769 - protein, 213 aa, Zea mays
  unsure (1)..(213): unsure at all Xaa locations
  Clone ID: MRT4577_47386C.1.pep
QKNRRMLAYSTVGTPDYIAPEXWSLGAIMFEMLVGYPPFYSEDPMSTCRKIVNWRSHLKFPEEASLSLEAKDLISKLLCNVDQRIGTKGAHEIKAHPWFAGVEWEKLYQMEAAFIPEVNDELDTQNFEKFEETAPPMQTSSKAGPWRKXELKKTNNKPKRPTIKSLFETADSEDQPSDGSFLNLLPTQLELPESLEPSPHSSISSEDSQARNR

SEQ ID NO: 311770 - protein, 72 aa, Zea mays
  Clone ID: MRT4577_47387C.1.pep
ELKINALAGSRAGHTGTELLYRFSKLPKAATFPLRHPQLIVSNQLWFCFLCNLHANTIYLFIHPSIHPACLL

SEQ ID NO: 311771 - protein, 601 aa, Zea mays
  Clone ID: MRT4577_47388C.1.pep
LNSIPAPANATPSALIRSRRRRHSRARPMDSARSWLQKLQPRDKDRERGAKTPAPASPNGGAGNSARMAAAAGEEALSSATKQKVAAAKQYIENHYKSQMKSLQERKERRWMLERKLADADVSEEEQNNILKDLEKKETEYMRLRRHKMGVDDFELLTIIGRGAFGEVRLCREKATSNVYAMKKLKKSEMLRRGQVEHVRAERDLLAEVDSPYIVKLYCSFQDDEFLYLIMEYLPGGDMMTLLMRKDTLTEDESKFYVAETILAIESIHKRIYIHRDIKPDNLLLDRSGHLKLSDFGLCKPLDSSCFPNLSDLDYAAGKSTNPSSDGDKQSSNSTAPRRTQQEQLLHWQKNRRMLAYSTVGTPDYIAPEVLLKKGYGMECDWWSLGAIMFEMLVGYPPFYSEDPMSTCRKIVNWRSHLKFPEEASLSLEAKDLISKLLCNVDQRIGTKGAHEIKAHPWFAGVEWEKLYQMEAAFIPEVNDELDTQNFEKFEETAPPMQTSSKAGPWRKMLSSKDVNFVGYTYKNFEIVNDPELPGIAELKKTNNKPKRPTIKSLFETADSEDQPSDGSFLNLLPTQLELPESLEPSPHSSISSEDSQARNR

SEQ ID NO: 311772 - protein, 126 aa, Zea mays
  Clone ID: MRT4577_47389C.1.pep
WDPRGRPGTIHFEKFEETAPPMQTSSKAGPWRKMLSSKDVNFVGYTYKNFEIVNDPELPGIAELKKTNNKPKRPTIKSLFETADSEDQPSDGSFLNLLPTQLELPESLEPSPHSSISSEDSQARNR

SEQ ID NO: 311773 - protein, 94 aa, Zea mays
  unsure (1)..(94): unsure at all Xaa locations
  Clone ID: MRT4577_4738C.1.pep
TDSTALENYCFSYYLIISGFITHRVPMQDSLHCIITMIYSDKNIEVSXILILKAGGKSHLILMLTKSRATPNISIKPLLMALLIVAHGPFKMMW

SEQ ID NO: 311774 - protein, 421 aa, Zea mays
  unsure (1)..(421): unsure at all Xaa locations
  Clone ID: MRT4577_47390C.1.pep
MGMGSARGGAGGWLPGERWRRVIFLALAAVSFLISLILLFLSAXVSASQVSSCLTPPLPXSAVRRGPGEPPCLVYLLTGARGDGRRLLRLLLAVYHPRNRYVLHLSADAPDDERLSLATGVVAAAPAVGAFENVVIIGNPTAGTPVGSSGLAGTLRAAAVLLRLHADWDWFLTLNAADYPLVTQDDLIHVLSSVPRDLNFIDHTGDVGSKEPEKVQQIIVDAGIYLSGRTNFFRGTQKRAAPEAFKFFTGSPWVILNRQFIEYCILAWENLPRILLMYFNNVIQPQEGYFQTVICNSLDFRNFTVNNDLRFMVQDDSAQKKSLFTSREHYGHMVDSGAPFARPFQENDPLLDQIDGNILKRWSHGPVPGAWCTGRKRWFSDPCSQWGDVNVLRPGPQAVMLHQYVNRTLEEAKSSSNSCRR

SEQ ID NO: 311775 - protein, 142 aa, Zea mays
  unsure (1)..(142): unsure at all Xaa locations
  Clone ID: MRT4577_47391C.1.pep
LPVINHFFLEKPECLLSLSGGAHHLNQKNSLNPAAYLQQQQWAPTQVGSGYGDQRQLQTWNQXGPMNPAAKGEQGISQPFSQKAATSRASLRTQEQVLPFYQQVEDNPATLIQRQQWGPFVQLDKTNPADCYQQHIIGGALF

SEQ ID NO: 311776 - protein, 188 aa, Zea mays
  Clone ID: MRT4577_47392C.1.pep
RSLESLHIDDLGIAADEAVAINSVLELHCVVKESRGALNSVLQTIRKLSPKAFVLVEQDAGHNGPFFLGRFMEALHYYAAVFDALDAALPRYDARRARVEQFHFGAEIRNVVGCEGAARVERHERADQWRRRMSRAGFQSMPIRMAARAREWLEENAGGGGYTVAEEKGCLVLGWKGKPVIAASCWKC

SEQ ID NO: 311777 - protein, 267 aa, Zea mays
  unsure (1)..(267): unsure at all Xaa locations
  Clone ID: MRT4577_47393C.1.pep
MLFPDADLIHVLSSVPRDLNFIDHTGDVGSKEPEKVQQIIVDAGIYLSGRXNFFRGTQKRAAPEAFKFFTGXLLSVLALFSLVLIISSPIYLLRNXSPWVILNRQFIEYCILAWENLPRILLMYFNNVIQPQEGYFQTVICNSLDFRNFTVNNDLRFMVQDDSAQKKSLFTSREHYGHMVDSGAPFARPFQENDPLLDQIDGNILKRWSHGPVPGAWCTGRKRWFSDPCSQWGDVNVLRPGPQAVMLHQYVNRTLEEAKSSSNSCRR

SEQ ID NO: 311778 - protein, 117 aa, Zea mays
  unsure (1)..(117): unsure at all Xaa locations
  Clone ID: MRT4577_47394C.1.pep
SWHVHGSHSVYLSKPGVTDEEGLKVVIEEGILHLFDLQRQLLAKVLRXTXRLYLLDMNIAAPVCLTARVEDVAWCWHERYGHVNFQALRKLGHDGMVSGLPAIDHVDQXCEDCIRRP

SEQ ID NO: 311779 - protein, 60 aa, Zea mays
  Clone ID: MRT4577_47395C.1.pep
MVCVDLGGPPASPDRPLCYCFMDDPRLLQYSCLGGETSYPDLSPLRPHDAMLPLPRLLGC

SEQ ID NO: 311780 - protein, 134 aa, Zea mays
  Clone ID: MRT4577_47396C.1.pep
MFSGDWTPPCGSCCTKKYASLVQIPWRVFCKKGCNADGDTWDECIGKCTEICYKDPVLEDRQWSAYIDRSPGQDSYSLECFNACVSGCGFRFDIPTEKVEEIKPNRPSKPSAPEPEVKQTRNADCNEDVPCTSA

SEQ ID NO: 311781 - protein, 84 aa, Zea mays
  Clone ID: MRT4577_47397C.1.pep
RALCVGPSWLRPSYLTHLKNRVPVRFCPRVRGRSPFGLVVGTPVVRFGGPPYEPSRKKNDQGFCSRLKTKKPQKTHKKKKKKKK

SEQ ID NO: 311782 - protein, 87 aa, Zea mays
  Clone ID: MRT4577_47398C.1.pep
RYWTTTGTRHTIASPGKGHCLQRVQSHGHQRHSHILRPTPKTSPACATTPYRSSYDTANVKTRARPIGHKRLDGKLKRTEQRAPLLP

SEQ ID NO: 311783 - protein, 127 aa, Zea mays
  Clone ID: MRT4577_47399C.1.pep
SFFRPFILHCVFGSDPSLILANILLRLRSAICKYEKSGRCTCLKAETKMKSLFSLLACCPYFTLLNITRVLCVVTIADKLSFCAHRSTDVGICMGRCASRRRLSDNKRFNGCRYRGRGCGVRHLLSP

SEQ ID NO: 311784 - protein, 97 aa, Zea mays
  unsure (1)..(97): unsure at all Xaa locations
  Clone ID: MRT4577_4739C.1.pep
FDLVFLIXRAPVVINYVRTYIYIHYAEEEGALCIREEWGTYLWVGGQCVSVCLSVLYMAYRSHMQRGRALALRWHSFGTWIKNKLNLILGVWKEVYT

SEQ ID NO: 311785 - protein, 121 aa, Zea mays
  unsure (1)..(121): unsure at all Xaa locations
  Clone ID: MRT4577_473C.1.pep
KRESRGPKHYQESQHPNGGNPNQAGGPGGPQXPPPNPLNKTGGXPGKLSPPLRPPXFFRPKGPAPGGAPHAGGGAAHPPLPEGSRGAVPSQGPCPPWGGGPGGAPPFGGPWRRSSPXRPGR

SEQ ID NO: 311786 - protein, 603 aa, Zea mays
  Clone ID: MRT4577_47400C.1.pep
MGDETSTSVAPQEQESTVAGSVKQQLSRLVLSSLQTTLPDVEVEPMVEVSAKFADYQCNNAMGLWSKVKGSGTIFKNPNSIGQAIAKNLPSSDIIESASVAGPGFVNITLSNRWVAQRIQDMLVNGIKTWAPVLPVNRTVVDFSSPNIAKEMHVGHLRSTIIGDTLARMFEFSNVVVLRRNHVGDWGTQFGMLIEYLFEKFPNWQEIGCQAIGDLQIFYKASKHRFDSDPDFKARAQQGVVRLQGGEDKYREAWKKICDISRSEFDLVYKRLNVVLEEKGESFYNPYIPQVLEELSNKGLIKESEGARVIFIQGHQIPLIVVKSDGGFNYASTDLTALWYRLNVEQAEWIIYVTDVGQQQHFDMVFSAAKMAGWLPDPSEKKFPKTSHVGFGLVLGSDGKRFRTRSTEVVRLVELLDEAKSRSKSELLQRLTENGKIVDWTDEELDQTSEAVGYGAVKYADLKNNRLTNYTFSFEQMLSDKGNTAVYLQYAHARICSIIRKSNKNVEELKMSGAISLDHPDERVLGLYLIRFAEVVEEACTNLLPNVVCEYLYNLSEMFTKFYTNCQVVGSPEETSRLLLCQATAVVMRQCFNLLGITPVYKL

SEQ ID NO: 311787 - protein, 123 aa, Zea mays
  Clone ID: MRT4577_47401C.1.pep
MASSARAAASAARSALRRAPLAASSSSSAAGILHRSAAAGLETRMPLHSAASAARLGSCITRDGDNAFSWNSRRMFSSNEKHLPAISDPKIETAFKDLMAASWNELPGSLVEEAKKAVSMATD

SEQ ID NO: 311788 - protein, 75 aa, Zea mays
  Clone ID: MRT4577_47402C.1.pep
HTLVSYSQLSNWDKCSSWEGFKVSPFTAGARTFSFEWLLVVAVAFPVVLIDEVLKFVGRCLTARARKQSGKRKAE

SEQ ID NO: 311789 - protein, 603 aa, Zea mays
  Clone ID: MRT4577_47403C.1.pep
MGDETSTSVAPQEQESTVAGSVKQQLSGLVLMSLRATVPEVEVEPMVEVSAKFADYQCNNAMGLWSKVKGSGTSFKNPNAIGQAIAKNLPSSDIIESTSVAGPGFVNIVLSNRWVAQRIQDMLVNGIKTWAPILPVKRAVIDFSSPNIAKEMHVGHLRSTIIGDTLARMFEFSNVDVLRRNHVGDWGTQFGMLIEYLFEKFPNWQEIGSQAIGDLQIFYKASKHRFDNDPEFKARAQQGVVRLQGGEERYREAWKKICDISRSEFDLVYKRLNVVLEEKGESFYNPYIPQVLEELSSKGLIKESEGARVIFIQGHQIPLIVVKSDGGFNYASTDLAALWYRLNVEQAEWIIYVTDVGQQQHFDMFFSAAKMAGWLPGPNEKKFPKTSHVGFGLVLGSDGKRFRTRSTEVVRLVELLDEAKSRSKSELLQRLTENGKIVDWTDEELEQTSEAVGYGAVKYADLKNNRLTNYTFSFEQMLSDKGNTAVYLQYAHARICSIIRKSNKDVEDLKMTGAISLDHPDERVLGLYLIRFAEVVEEACTNLLPNVVCEYLYNLSEMFTKFYTNCQVVGSPEETSRLLLCQATAVVMRQCFNLLGITPVYKL

SEQ ID NO: 311790 - protein, 277 aa, Zea mays
  Clone ID: MRT4577_47404C.1.pep
LAVDDERQTLGEPWKPSVTKPTEVGMQSKNNKLANVVSLLQKLQQLSVSKDEDAPPVDHMAFLCETESPDHRYVSEILLASGLLMKELGSGQAGLQLQLHSSGYPINPDLFHVLEQRKAGWASIPDGIHQSSRSGAKSDPKRAHRKLVFDTANELLLQKFEKETTVYAVSSSTGAKDHPPAKALSGQQLLKFVSSEIEGMGTERSSTCQMEGGVIPDAEILQRLQGWTSFSRELPGMVLEIERSVFKELVDEVVHGESADGPEMKAAGRRRRRRLFA

SEQ ID NO: 311791 - protein, 69 aa, Zea mays
  Clone ID: MRT4577_47405C.1.pep
GLPIPRDLGGPLLIRGRQHSPPLPLIRPYPTYPTMLRPPDNNRIAFVAPHPGVQEANIYPRPHEPPDPG

SEQ ID NO: 311792 - protein, 109 aa, Zea mays
  Clone ID: MRT4577_47406C.1.pep
RRAEHHWSWPLHRCGNCGAVGDSTSAEWCTPGSFAGRFGVWGARGSSSATRIAARPPCIVDNHPLCLPFDEQVIEDPGTQQVEIAEHELIEGEEEVVQEEPFNEEYRLI

SEQ ID NO: 311793 - protein, 55 aa, Zea mays
  Clone ID: MRT4577_47407C.1.pep
IQNNLIPQTSFISTSNLPIKYLYILSFFKNNLHNLNSKPSSSLSHPNNYPNLFKY

SEQ ID NO: 311794 - protein, 93 aa, Zea mays
  unsure (1)..(93): unsure at all Xaa locations
  Clone ID: MRT4577_47408C.1.pep
WLXCLFXGPPAXXXXCXAXLSXXXXGSXXXXXXXPLXRCPXXFXXXAXXCGXXXXXXXVVXGGLXXXXXSXAFRXLXXAALXPXXXXCXXXMX

SEQ ID NO: 311795 - protein, 123 aa, Zea mays
  Clone ID: MRT4577_47409C.1.pep
RGPGGVPGPLPGPRRAPKGVFFLHGRGWGLPGAPFLSFSLPSVFFFPPGSAFFLLQPRSVSLFSWGSPGPCLIPCGLLCPVWALYGLGSPPLFCCWADIWPPLGPFSSTLGCLVRITTPYWVI

SEQ ID NO: 311796 - protein, 90 aa, Zea mays
  Clone ID: MRT4577_4740C.1.pep
QRMAISHEFKNLQLQATTTSTISLIKCTDQDVKTNWTRQLPACANVPVFTNRSASSVMVQLFQSQQIGKTNPKNHKRSNHAIVDDVVEKT

SEQ ID NO: 311797 - protein, 67 aa, Zea mays
  Clone ID: MRT4577_47410C.1.pep
AEAFPYVASKLVHPSPRPHLSYRVHLHPNAESPCEYIILGKHISHVFEDLRKMKAPNSSNTLECPHL

SEQ ID NO: 311798 - protein, 65 aa, Zea mays
  Clone ID: MRT4577_47411C.1.pep
ETGGCCLAAIHACMLVVARPSRASDRQQQQPGEKKEPACRCTGTAGLSSVPLPEQPGVPELVPNS

SEQ ID NO: 311799 - protein, 99 aa, Zea mays
  Clone ID: MRT4577_47412C.1.pep
PQGFPEWPSFKRKGCKGRVYFIPHRVKWGSGPPLKVWCLNKVKIESPPPGGALNLRSAGTIGAMVFRFSLYLCMRGFLAIFYFFFFFYVESSMFFSPFS

SEQ ID NO: 311800 - protein, 88 aa, Zea mays
  Clone ID: MRT4577_47413C.1.pep
MQPLLRPASLIDRFCFGCIAYPPPGTAYPPPGQQAYPPPAYGAPPPMAAGGYPPPPPPQPQDSKRSNDGFLKGCLAALCCCCMLDMCF

SEQ ID NO: 311801 - protein, 116 aa, Zea mays
  Clone ID: MRT4577_47414C.1.pep
MSAARRCGGRRRLERAAAAGDNANGYVETDPTGRYGRFDELLGKGAMKSAYRGFDEERGVEVAWNQASLADVLRSPDAVQRMYSEVQLLSELRHDGIIGFHASWVDVPGRSFNFIT

SEQ ID NO: 311802 - protein, 61 aa, Zea mays
  Clone ID: MRT4577_47415C.1.pep
IHTPTKLPKRKGGKIHATTTRRYEGKGRRSETCPHPGPNSSHLPRQCPQISLQSDPPRFDV

SEQ ID NO: 311803 - protein, 97 aa, Zea mays
  unsure (1)..(97): unsure at all Xaa locations
  Clone ID: MRT4577_47416C.1.pep
SLAHISSLVQPYLSPVVSSMCENTVVXPYRIQHAIATGILPSSHLILKQPSALLQEXPLXVHLTAXQNITAHQLQQLELANLAXYSHQHHCLPMNQL

SEQ ID NO: 311804 - protein, 37 aa, Zea mays
  Clone ID: MRT4577_47417C.1.pep
LVKGIFNRTNGVIRSQKIRTHSINYRQISSVNHQYSP

SEQ ID NO: 311805 - protein, 87 aa, Zea mays
  Clone ID: MRT4577_47418C.1.pep
RLFGAGFEHSARHDHKGHGGHAFEIPEINLSNLPCSPGVWLKRSFRSCVYGVLVDFTNWFKWSKGLCPLYPMKKKEIGTMGFPAPMV

SEQ ID NO: 311806 - protein, 46 aa, Zea mays
  Clone ID: MRT4577_47419C.1.pep
HLHHRQGARVVAMGSTAETETEKEQEEAAAASEELPVMPWANSVAR

SEQ ID NO: 311807 - protein, 545 aa, Zea mays
  unsure (1)..(545): unsure at all Xaa locations
  Clone ID: MRT4577_47420C.1.pep
SLQLELEDEPYVVDDEEDDPEAAKGKAPSKKRKLPPLFSPGAHYHWKLCGANSGYHYIPCVDFDGDGRQRHHERSCQRSPVTCLVSLPKEYKQPAPWPERKDKVWYGNVGHPRLSNYVKGHNWLNHSGEYLMFPPDEWEFKGSARHYVESIDEMAPDIDWGKNIRIILDVGCKSAGFGIALLEKXVITLSLGLTNDQTDLAQVALERGIPATVGSLGSRXIPFPSGAFDAIHCGECNIPWHSNGGKLLLEINRILRPGGYFIISSRSADLESEEGISASMTALCWNAIAYNSDDVSEAGVKIFQRPVSNEVYDLRAKKDPPFCKEEQNKASAWYTNIKHCLHKAPVGIEERGSDWPEEWPKRLESFPEWLGETETRVASDHNHWKAVVEKSYLDGLGIDWSNIRNIMDMRAVYGGFAAALASKKVWVMNVVPVHAADTLPIIYERGLIGVYHDWCEPFSTYPRSYDLLHADHLFSRLKIRCKQPVSIVVEMDRILRPGGWAIIRDKLEILDPLETILKSLHWEIVMTFRKDKEGIMSVKKTTWRP

SEQ ID NO: 311808 - protein, 41 aa, Zea mays
  Clone ID: MRT4577_47421C.1.pep
TCFDNFGDKVKNCITFNEPQSLTSFSYRTGVFAPGRCSPGL

SEQ ID NO: 311809 - protein, 135 aa, Zea mays
  Clone ID: MRT4577_47422C.1.pep
PAVEQSRRSTLGGGRDGETSGFLYVSSFRPRLGASPRRRRSLRRLFLFVSSATEKARGRATNQRRFHTRNHPLRFRIAVRATISHISGLSEEGVIHLAFTTSDFADDGLWFPNHRPIDDAILLPGNISSPIDLIS

SEQ ID NO: 311810 - protein, 52 aa, Zea mays
  Clone ID: MRT4577_47423C.1.pep
IYERMLSNYIHHRLFYSSRVLFTSITQALGSNVVLLHLIPVRPIRHTFYLAS

SEQ ID NO: 311811 - protein, 79 aa, Zea mays
  Clone ID: MRT4577_47424C.1.pep
MDPKHSAEVSKHLDKQNQALMETYRAMSHELHKLQVEEETIMRKLYELMSAEGLLPKRKKEKQHGENIVGSTESKEQEP

SEQ ID NO: 311812 - protein, 103 aa, Zea mays
  unsure (1)..(103): unsure at all Xaa locations
  Clone ID: MRT4577_47425C.1.pep
GWAGIQAIPRTVWLDPXRKQVLQWPIEEVEALRXKSVTLKNRVIKAGHHVXGTGIQTDQADLEVSFKVSPAALAGAXTLDPALAYNAEKLCGVKPPDLRGGVG

SEQ ID NO: 311813 - protein, 250 aa, Zea mays
  Clone ID: MRT4577_47426C.1.pep
MAAFWLLLLFVASAVLVLRTWRAQSFVNKARQAGPRYPPGLEPYPLIGHLPQFLANRHRVLDWMTEALARQTTTCTFVLRRPGGVRGAITANPANVEHFLRTSFDHYPKGPRFASLLHDFLGRGIFNADGEAWRAQRKVASHEFNTRSLRAFVARCVHAELHGRLLPLLRRAAASGSPLDLQDVLERFAFDNICRVAFDHDPRQLPDDGDDTADSSFADAFRDAANLSAGRFRYAVPGFWKIKKALNLGS

SEQ ID NO: 311814 - protein, 79 aa, Zea mays
  Clone ID: MRT4577_47427C.1.pep
MDPKHSAEVSKHLDKQNQALMETYRAMSHELHKLQVEEETIMRKLYELMSAEGLLPKRKKEKQHVENIVGSTESKEQEP

SEQ ID NO: 311815 - protein, 61 aa, Zea mays
  unsure (1)..(61): unsure at all Xaa locations
  Clone ID: MRT4577_47428C.1.pep
MDAAERRLARVAAHLVPSFPVPHATGPPLARCPAAASSSSSSPAGDSYRRVHXDVPSQPPE

SEQ ID NO: 311816 - protein, 592 aa, Zea mays
  unsure (1)..(592): unsure at all Xaa locations
  Clone ID: MRT4577_47429C.1.pep
MGALGDRLRAFSTNRWLVFVAAMWLQSMAGIGYLFGAISPVIKAALGYNQRQVAALGVAKDLGDCVGFLAGSLSAVLPSWAMLLIGSAQNFLGYGWLWLIVTRQAPALPLWMMCVLIYVGTNGETFFNTTALVTCIQNFPKSRGQTVGIMKGFAGLSSAILTQLYAVMHTPDHATLVFMVAVGPSLVALGLMFIIRPVGGHRQVRPSDKNSFLFIYTICLLLASYLVGVMLVQXFHALSDNVXGILTVLLLILSGXPIMIPVTLTLSSKTQHPIEEALLSDPSKGETSTSQEKEDQPEVILSEVEEEKPKDIDSLPPSERRKRIEELQTKLVQAAARGGVRIRRQPRRGENFTLVQALVKADFWLIWWSLLLGSGSGLTVIDNMGQMSQAVGFKDGHIFVSLTSIWNFLGRVGGGYFSEIIVREHTYPRHIALVICQILMAVGHFLFAMAWPGTMYVGTFLVGLGYGAHWAIVPAAVSELFGVKHFGAMYNFLTVANPAGSLVFSGLIASNLYDYEAEKQAQRRQITSLTSPRLFHSMGFLADGTLKCEGAVCFFVSSLIMSAFCVVGAGLSLIVVYRTRRVYTHLYGSNRT

SEQ ID NO: 311817 - protein, 91 aa, Zea mays
  Clone ID: MRT4577_4742C.1.pep
MQKNNIELLPDLYSNFAQFIYVASHSIIQAKQVFVDGINRAPCKPLIKGFIQFMSTHGGPKDIPLLDSVISNAVTPGSDVSTALSREDRED

SEQ ID NO: 311818 - protein, 40 aa, Zea mays
  unsure (1)..(40): unsure at all Xaa locations
  Clone ID: MRT4577_47430C.1.pep
HLLQLESGADIVKAHTEWRPKRARGEGSLXSFGGFPAENA

SEQ ID NO: 311819 - protein, 83 aa, Zea mays
  Clone ID: MRT4577_47431C.1.pep
GDPIECQKWFLMPGPIPFVHPFLPRNRPPKLNRQFVTFSLTPNCFPPFKNFFFPPDLKARNYLNFPKKKGGNKIKVSPGVLPN

SEQ ID NO: 311820 - protein, 111 aa, Zea mays
  unsure (1)..(111): unsure at all Xaa locations
  Clone ID: MRT4577_47432C.1.pep
FTVAVSPGEGSNSRLMRLWCCLYLQFREINCFLATNYASVYTRVFQHLSKTLCYCAWKVGMLGRSQHNMSPPWFFIESFASTLVDRPVYXIHQKKNIIPFXCAVIISNKRM

SEQ ID NO: 311821 - protein, 139 aa, Zea mays
  Clone ID: MRT4577_47433C.1.pep
GRPFFFFFFFFFYTPRLGIYINPKTRKEARNINNRTKESIVSPTFSSWPSGGWSYSYATWLRCSVRRPWKKMAVTIRHVCVVSCRGPPIACPPCSITASYRLTVRASDTVLGVGRSAAASHGTIRGDGDVVLGVPGLVS

SEQ ID NO: 311822 - protein, 52 aa, Zea mays
  unsure (1)..(52): unsure at all Xaa locations
  Clone ID: MRT4577_47434C.1.pep
IGRPAXPEAVQAHVLGCFSPAEQELLPLLLDRATDLILDHIRERTSGPSLGP

SEQ ID NO: 311823 - protein, 89 aa, Zea mays
  Clone ID: MRT4577_47435C.1.pep
YRISQEHLRCRRLTRAAVNICWTPDRCGGGGAIKKRSIQGVYTYTLIIIYRSTVVFIGIMSAVSTREAYIRESVSRIPYRNFPRFFGSA

SEQ ID NO: 311824 - protein, 63 aa, Zea mays
  unsure (1)..(63): unsure at all Xaa locations
  Clone ID: MRT4577_47436C.1.pep
WREWPKGPPRAXGAPTLVAHPPRGGRRFLLAPVFCFCPSVGVGLRWPWWVFPDVFFPPWSGGP

SEQ ID NO: 311825 - protein, 59 aa, Zea mays
  Clone ID: MRT4577_47437C.1.pep
PDLPKAQTHIDCIPRDWNTPYYKGRCPDLVYFTILKHHALNSRKAYLGFFKRGLYSWRD

SEQ ID NO: 311826 - protein, 190 aa, Zea mays
  unsure (1)..(190): unsure at all Xaa locations
  Clone ID: MRT4577_47438C.1.pep
PASAQLDRHLVFPLLEFLQERQLYSESEILEAKIRLLNDTNMVDYAMDIHKSLYDTDDVLEDMVKRRAEVVSRLRSLEEAAAPLIAFLQNPLXRPIQIVPDQIEVVYQYAKFQFECGNYSGAVDYLYQYRALCTNSERNVSALWGKLAAEILMQNWDVALEELNCLKEIIDSKNFSSPLNQLQNRIWLMH

SEQ ID NO: 311827 - protein, 99 aa, Zea mays
  unsure (1)..(99): unsure at all Xaa locations
  Clone ID: MRT4577_47439C.1.pep
RYLNAIQTNAHHLIRYLATTVVVNKRRRNMLKELIKVIQXEHHSYKDPVTEFLECLYVNYDFDGAQQKLIECEQGVLDKESLYLKTGGYKKLEWLSEGF

SEQ ID NO: 311828 - protein, 49 aa, Zea mays
  Clone ID: MRT4577_4743C.1.pep
LKLYQRCSSDICDICMDYDAPIALFLLERESSVFNYMVITTVTHGSTNV

SEQ ID NO: 311829 - protein, 720 aa, Zea mays
  Clone ID: MRT4577_47440C.1.pep
MATAAWAAWLLILTCFGAWTPRQILVAAATDANDVTALNTLFTSMNSPGQLQGWKVSGGDPCGESWQGITCSGSSVTAIKLPNLGLSGNLAYNMNTMDSLVELDMSHNNLGGGQQIPYNLPNKKLERLNLAENQFSGSVPYSISTMPNIKYLNLNHNQLSGDITDIFSNLPSLTTVDLSSNSLTGNLPQSFTSLSSLKTLYLQNNQLTGSINVLANLPLDDLNVANNRFTGWIPEELKKINSLQTDGNSWSTGSAPPPPPFTAPPRSRNRRKSPGQHSNGSNNSSSGGSSSIGAGAIAGIIISVLVVGALVAFFLIKRNKRKSAMPEHYEQRQPFNSFPSNEVKNMKPIEEATTVEVESLPSPAAVNLKPPPKIERNQSFDDDDFANKPVAMKSNAAAAPVKATVYSVADLQMATDSFNMDNLIGEGTLGRVYKAQFSDGKVLAVKKLNSTTLPRQSSDDFYELVSNISKLHHPNLSELVGYCMEHGQHLLVYDFHRNGSLHDMLHLSDDYNKPLSWNSRVKIALGSARALEHLHEICSPSIIHKNFKSSNILLDTELNPHISDAGHSSFVPDAEFQASDQGSGYSAPEVEMSGQYTLKSDVYSFGVVMLELLTGRKPFDSSRPRSEQSLVRWATPQLHDIDALDQMVDPALKGLYPAKSLSRFADVIALCVQPEPEFRPPMSEVVQALVRLVQRANMTRRMLDGEEASRRPDDQEQEFV

SEQ ID NO: 311830 - protein, 437 aa, Zea mays
  unsure (1)..(437): unsure at all Xaa locations
  Clone ID: MRT4577_47441C.1.pep
MSEHDLTALMAAQLDRHLVFPLLEFLQERQLYSESEILEAKIRLLSGTNMVDYAMDIHKSLYGTDDVPEDMVKRRAEVVSRLRSLEEAAAPLVAFLQNPQLVQEFRPDKQYNIHMLQERYQIGPDQIEALYQYAKFQFECGNYSGAADYLYQYRALCTNSERNVSALWGKLAAEILMQNWDVALEELNRLKEIIDSKNFSSPLNQLQNRIWLMHWALFIFFNHENGRNGIIDLFFQDRYLNAIQTNAPXHLIRYLATAVVVNKRRRNMLEELIKVIQQEPHSYKDPVTEFLECLYVNYDFDGAQQKLIECEQVILNDPFLGKRIEEGNFVSVPLRDEFLENARLFIFETYCRIHRCIDISMLAQKLNMSYDEAELWIMNLVRSSKLDARIDSVSGTLIMTTNHVNVHEQIVESLKGLNMRTYMLAKNIVEPAQQATR

SEQ ID NO: 311831 - protein, 218 aa, Zea mays
  unsure (1)..(218): unsure at all Xaa locations
  Clone ID: MRT4577_47442C.1.pep
TTVEVESLPSRCAVXLKPPPKIERNQSFDDDDFANKPVAXKSNAAAAPVKATVYSVADLQMATDSFNMDNLIGEGTLGRVYKAQFSDGKVKNYELPIMCYSILLIRKIGLKYIEPVAQMKNWNPMVPTSSAFLSYSCFLHATKYFLVMQCGSGLDDIDYLFSFYSNXVLAVKKLNSTTLPRQSSDDFYELVSNISKLHHPNLSELVGYCMXHGQHLLV

SEQ ID NO: 311832 - protein, 103 aa, Zea mays
  Clone ID: MRT4577_47443C.1.pep
RPLPCSALPPAGAASRACPRVPRFGAVCNCILPESLKINAAGHDPASRAEDSERKMLTSSFSCFCSISLCQRHFSTSSPSLRSSANGTSWDTKQSNSTRLKKS

SEQ ID NO: 311833 - protein, 436 aa, Zea mays
  Clone ID: MRT4577_47444C.1.pep
MAEHDLTALMAAQLDRHLVFPLLEFLQERQLYSEPEILEAKIRLLSGTNMVDYAMDIHKSLHGTDDVPEDMVKRRSEVVSRLRSLDEAAAPLVAFLQNPQLVQELRPDKQYNIHMLQERYQIGPDQIEALYQYAKFQFECGNYSWAAEYLYQYRALCTDTERSVSALWGKLAAEILMQNWDVALEEFNRLKEIIDSKNFSSPLNQLQNRIWLMHWALFIFFNHENGRNGIIDLFFQDRYLNAIQTNAHHLLRYLATAVVVNKRRRNMLKELIKVIQQEQHSYKDPITEFLQCLYVNYDFDGAQQKLVECEQVILNDPFLGKRVEEGNFVTVPLRAEFLENARLFIFETYCRIHRCIDISMLAQRLNMSYDEAELWIMNLVRSSKLDARIDSVSGTLIMTTNHINVHEQIIESMKGLNMRTYMLAKNIVEPAQQAAR

SEQ ID NO: 311834 - protein, 41 aa, Zea mays
  Clone ID: MRT4577_47445C.1.pep
NEHTIPHISGKHSPSEPDSSGLSLYNSRLNHSGHKWFTCYS

SEQ ID NO: 311835 - protein, 221 aa, Zea mays
  unsure (1)..(221): unsure at all Xaa locations
  Clone ID: MRT4577_47446C.1.pep
MATAAWAAWLLILTCFGAWTPRQILVAAATDANDVTALNTLFTSMNSPGQLQGWKVSGGDPCGESWQGITCSGSSVTAIKLPNLGLSGNLAYNMNTMDSLVELDMSHNNLGGGQQIPYNLPNKKLERLNLAENQFSGSVPYSISTMPNIKYLNLNHNQLSGDITDIFSNLPSLTPVDLSSNFSTGNLPTSFTSLSSLKTLYLQNXQLTGSINVPANLPLDD

SEQ ID NO: 311836 - protein, 248 aa, Zea mays
  Clone ID: MRT4577_47447C.1.pep
MSVIMLGSKKERNLSMHFQSDQKSSAKFCLFSKVQSASPPPGNTLVYLNVYDLTPVNGYVYWAGLGVFHSGIEVHGVEYAFGAHDYSISGVFEVEPRQCPGFKFRKSICMGTTSLDPLQIREFMEIQSVNYNGDTYHLISKNCNHFCEDICKRLTGNFIPKWVNRLARMGAVCNCILPESLKINAAGHDPASRAEDSERKMLTSSFSCFCSISLCQRHFSTSSPSLRSSANGTSWDTKQSNSTRLKKS

SEQ ID NO: 311837 - protein, 45 aa, Zea mays
  Clone ID: MRT4577_47448C.1.pep
IGGLLAFKQAPTFFQALADFGLWHSRYPALYFPLGGNIFITGGRF

SEQ ID NO: 311838 - protein, 83 aa, Zea mays
  unsure (1)..(83): unsure at all Xaa locations
  Clone ID: MRT4577_47449C.1.pep
ESQFTLNLPPDRVTFIVCGQTXVTNPITKYALTMTPLALSLEELLPPNKQTYPNIMMLRSALVVSSLIIALSVPFFGKFVRSL

SEQ ID NO: 311839 - protein, 234 aa, Zea mays
  unsure (1)..(234): unsure at all Xaa locations
  Clone ID: MRT4577_4744C.1.pep
MGVSEYATGDTRRYPDRGRRGDDPGRPGPIRRLPIILPPNSHPAASPRRRTSSRRVVTGVKMVGPGLYTEIGKKTRDLLYKDYQTDHKFTLTTYTSNGVAVTASSTKKADLILGEIQSQIKNKNMTIDVKANSESNIITTITVDEIATPGLKTILSFAVPDQRSGKVELQYLHDYAGVNASIGLTANPVVNLSAAFGTKAVAVGADISLDTGTGDLTKYXAALRFTHEDLVASL

SEQ ID NO: 311840 - protein, 67 aa, Zea mays
  Clone ID: MRT4577_47450C.1.pep
MLAFLALGLALLLSATGQASAQNCGCQSNMCCSKWGYCGTGKDYCGDGCRSGPCYGGGGGGGGGGGG

SEQ ID NO: 311841 - protein, 92 aa, Zea mays
  Clone ID: MRT4577_47451C.1.pep
DPRPVLKRGQNPQVPLPVKAEGGVPLQLASPPSTQMLQERVPSTVGKPAQVTAPPMLQDTQVIEPVTSWNFCLVNVCFCLFHNCPWYLFIPI

SEQ ID NO: 311842 - protein, 51 aa, Zea mays
  Clone ID: MRT4577_47452C.1.pep
GLVRLFPIHMDWMRLKKIEKKFDLFRIQTHLISLNPHGLRANRSRRKVNFD

SEQ ID NO: 311843 - protein, 91 aa, Zea mays
  unsure (1)..(91): unsure at all Xaa locations
  Clone ID: MRT4577_47453C.1.pep
LMAWSXRPWMLHQSAVRLWMSARASLCLIKHFVRLTASVPDRGQMEAACGGRGDGXRRTARPPIPDQDAWPRAVSRGHAPHTNRQGLKRAS

SEQ ID NO: 311844 - protein, 57 aa, Zea mays
  Clone ID: MRT4577_47454C.1.pep
TVGHTRDMFPLGWAPLTSGYEADSCTHTVLFNTHGKSLLHMPLGHCLYFRLRTRRVE

SEQ ID NO: 311845 - protein, 66 aa, Zea mays
  unsure (1)..(66): unsure at all Xaa locations
  Clone ID: MRT4577_47455C.1.pep
PRVRPLVRPRLSDSCRIIWVGGTVSCARXXDPIRWSNSPWRLVQVSWDDPDLLHIVKRASPWLVEL

SEQ ID NO: 311846 - protein, 86 aa, Zea mays
  Clone ID: MRT4577_47456C.1.pep
LCKSRGFCYATPTLHNENILSAPTRPKCLACFYKAIAICLLSKIYHPPGSEIEHWFAIPNPFNVSLVLIGSNNTTLNSFSTKERVL

SEQ ID NO: 311847 - protein, 70 aa, Zea mays
  unsure (1)..(70): unsure at all Xaa locations
  Clone ID: MRT4577_47457C.1.pep
STPPSRLPXTFSPTPTGGGDERHKXQQEGLGSIQSAXQGLPVQFHRPSPRAQLPPYSARCPLYQNTFFGG

SEQ ID NO: 311848 - protein, 93 aa, Zea mays
  Clone ID: MRT4577_47458C.1.pep
AWTFGLIYVLETTGSRPSPPIALHISKPAAHTTTYQHSSKTHIVRHPTQTIPTAHTTQTTYQRQKNDPPTNLANLHTHKNKARNATKPETPAP

SEQ ID NO: 311849 - protein, 77 aa, Zea mays
  unsure (1)..(77): unsure at all Xaa locations
  Clone ID: MRT4577_47459C.1.pep
MRFHNPKIVSLLKRLRFYIPQILPNLEKVXVYLDDDVVMQKDLTQQLSIELHSNVIGAVVTCLKSFHRYHKYLDFSH

SEQ ID NO: 311850 - protein, 277 aa, Zea mays
  unsure (1)..(277): unsure at all Xaa locations
  Clone ID: MRT4577_4745C.1.pep
MVGPGLYTEIGKKTRDLLYKDYQTDHKFTLTTYTSNGVAVTASRMSHGGXIFGRLCSALLNEXNFTIXFKLGRILNLFTMIDGDCQLSXGGKTILSFAVPDQRSGKVELQYLHDYAGVNASIGLTANPVVNLSAAFGTKAVAVGADISLDTATGNLTKYNAALRFTHEDLVASLNLNNKGDSLTGAYYHKVSELTNTAVGAELTHSFSTNENTLTFGGQHALDPLTVLKARINNSGKASALIQHEWRPKSLVTISAEVDTKTIEKSSKVGIAVALKP

SEQ ID NO: 311851 - protein, 87 aa, Zea mays
  Clone ID: MRT4577_47460C.1.pep
FFFFFFFFFFSDNWGQEYRSKAKVQKAVAAAAATHVSSTKCFISGINKKREYDVACHPIHYVLLLVKPLNSKTTFHARQTFSTNLSK

SEQ ID NO: 311852 - protein, 47 aa, Zea mays
  unsure (1)..(47): unsure at all Xaa locations
  Clone ID: MRT4577_47461C.1.pep
NKVTNCFGKTHLHPLQYFIERCTRFYLLDICLQYIYCRYLSQMTXPG

SEQ ID NO: 311853 - protein, 279 aa, Zea mays
  unsure (1)..(279): unsure at all Xaa locations
  Clone ID: MRT4577_47462C.1.pep
MRGANRRRTGASSSASIASTSTKREREEESASAADESSDGEEVPSSSASESESESGGEDAERERELERALADVPFGELQRARADGSLAXPPLRPRQPRRRXARRVSKRRPMEISTKVRPPKLREVIQVPKKVGRDPRFEPVYGSVDKEGFRKRYNFLFDEDFPAEKERLQKMIKKSKDPDAIGEMKSRVTWIDKQVKSHPPKNVESEILREHIKKEREAAKAGKRPYYLKKSELRERKLMNKYNELKEAGKLDAFMEKRRKKNASKDHRFMPYRRTGDA

SEQ ID NO: 311854 - protein, 57 aa, Zea mays
  Clone ID: MRT4577_47463C.1.pep
SRPSGLSSWLPDSSPTVSPCVYCLRDACLCRHRHLQLRPAVDQSWWATIANYAPHVR

SEQ ID NO: 311855 - protein, 72 aa, Zea mays
  Clone ID: MRT4577_47464C.1.pep
APQRAVEARAAPAETVIRSSYSKSRCTVSAPVVGCRARGRRARARGVGPGFVGLAPSLTGYASSAAMPRARP

SEQ ID NO: 311856 - protein, 114 aa, Zea mays
  unsure (1)..(114): unsure at all Xaa locations
  Clone ID: MRT4577_47465C.1.pep
RKVIXRSFSLAMDMYLSDSHTKPAEKRDHEAGAEFLESNTASVSAWQEKRLKQMGATARNASGYLNSVKVNGVREAAARALMAEMNVNQLSDLATFYQTMGKICSEVLDTKLQG

SEQ ID NO: 311857 - protein, 173 aa, Zea mays
  Clone ID: MRT4577_47466C.1.pep
SRPAGFSDHPKRPGDEDPQPPFNMLRNVLDMNAHFGGFNAALLKAGKSVWVMNVVPTDAPNYLPLIFDRGFIGVQHDWCDAFPTYPRTYDMVHADGFLSLQKNHKHRCSTLDIFLEVDRILRPEGWVIIRDAAPLIEAARSVVTQLRWDARVLDLDIASDEKLLVCQKPFLRK

SEQ ID NO: 311858 - protein, 340 aa, Zea mays
  Clone ID: MRT4577_47467C.1.pep
MVHCAKCNIEWNKNDGIFLVEVNRLLRPGGYFVWTSNLNTHRALRDKENQKKWTAIRDYAEGLCWEMLSQQDETIVWKKTNKRECYKSRKFGPELCGHDPESPYYQPLSPCISGTRSQRWIPIEHRTTWPSQARQNATELDIHGVHPEVFADDNSSWDTMVRNYWSLLSPLIFSDHPKRPGDEDPQPPFNMLRNVLDMNAHFGGFNAALLKAGKSVWVMNVVPTDAPNYLPLIFDRGFIGVQHDWCDAFPTYPRTYDMVHADGFLSLQKNHKHRCSTLDIFLEVDRILRPEGWVIIRDTAPLIEAARSVVTQLRWDARILDLDIASDEKLLVCQKPFLRK

SEQ ID NO: 311859 - protein, 102 aa, Zea mays
  Clone ID: MRT4577_47468C.1.pep
NHRLRLRRASVSSKVPREMDDTLATIRMKLKKRKKGKDSNDFDAVAECGPEVPALVQQEGERAVVDIGDGVADEKSNLNVVKLEGSDVSGKCAQGLDDLGVE

SEQ ID NO: 311860 - protein, 61 aa, Zea mays
  Clone ID: MRT4577_47469C.1.pep
EMQRYQVDKHEVVAKQEATLLNLPVLKSAPQKRRLPSSAFCKRRLYFSARWICRFGLFGEI

SEQ ID NO: 311861 - protein, 94 aa, Zea mays
  Clone ID: MRT4577_4746C.1.pep
KGVHMPSGRKLKLPIHFRHKEWAGRANNSILSTSYTQKLALIQDVRTTKQFNNMIGALQLNDVHDALIVCMISVVCREGTNNGPVLRALTLTQP

SEQ ID NO: 311862 - protein, 79 aa, Zea mays
  Clone ID: MRT4577_47470C.1.pep
FKPPKVAFRRKVFHPKIGSNGSICLTFLKIQLCRAQPLSRVRLPICSLVADPNPADPLVPEVAHLYKPPRHKFKNTAGP

SEQ ID NO: 311863 - protein, 91 aa, Zea mays
  Clone ID: MRT4577_47471C.1.pep
VGESERQNPGKAGLVPLPGKIFVALGPVFISASLFITFFPARAEKLFFLAGPGLCSEFLFFGPPLPFRDGWSSPFPPVVSGLKRNFCPGAY

SEQ ID NO: 311864 - protein, 62 aa, Zea mays
  Clone ID: MRT4577_47472C.1.pep
RIRYRTAADKLNTKRQPCPKPAWIQRPGAPFIFLPPYRGSSPMAFGRRPSLLLVYAENKCER

SEQ ID NO: 311865 - protein, 41 aa, Zea mays
  Clone ID: MRT4577_47473C.1.pep
KFSLCFTLGSSSHLLAKIPQLVIARILHKLFFGYFIGLSWQ

SEQ ID NO: 311866 - protein, 106 aa, Zea mays
  Clone ID: MRT4577_47474C.1.pep
KLTQLPITFPLHYTSSQNNKPHTNFYHKPSHPLLKTFLKNQHPTKNTYPTTNKFNSTRTTTTYPNNTFKKNLKDSLIYNHKTSFLNSFIHKNNLKYKSTPITITLL

SEQ ID NO: 311867 - protein, 140 aa, Zea mays
  unsure (1)..(140): unsure at all Xaa locations
  Clone ID: MRT4577_47475C.1.pep
MTRCRSSPSGCLSEPLGPPGLNFFPGPFRCLGLKTNHLYLLFPVSGPAPYFHSLAFPYLFFFLPFFWVPLSYYFFSXFKFXIIYFFLFSIISFYFHFFFFFYILYFYIFSFFIFFILLLIFLYYYFFXYYDLFIFFLYFY

SEQ ID NO: 311868 - protein, 54 aa, Zea mays
  Clone ID: MRT4577_47476C.1.pep
TSGPDIAIANKDDDDAKERIVTGSMPCTYDPGSSKPTLIRGFFSCVKIKKTVTA

SEQ ID NO: 311869 - protein, 46 aa, Zea mays
  Clone ID: MRT4577_47477C.1.pep
ECESYINHACVPHGYLKKLVKEDSSCLVNFLRGKRVKQLKHRGGVN

SEQ ID NO: 311870 - protein, 601 aa, Zea mays
  unsure (1)..(601): unsure at all Xaa locations
  Clone ID: MRT4577_47478C.1.pep
MSTTGEILRSELSSRTPPFGLRLWIVIGICIWVAILFIIGFMCFWSIYRRKPTKSSFDSTNDIPVSQIPDVSKEIAVDEVREHAAVQTFHVHESCRALAVQEKPCEKDSGRMLGHLVRSKSSDADNLSQCSSAAYQCERAASSYSGDEGSSGNARRQYPTVSASPLVGLPEFSHLGWGHWFTLRDLEHATNRFSKENVIGEGGYGIVYRGRLVNGTDVAIKKLLNNMGQAEKEFRVEVEAIGHVRHKNLVRLLGYCVEGIHRMLVYEYVNNGNLEQWLHGAMRQHGVLTWEARMKVVLGIAKALAYLHEAIEPKVVHRDIKSSNILIDEEFNGKLSDFGLAKLLGAGKSHITTRVMGTFGYVAPEYANTGLLNEKSDVYSFGVLLLEAVTGRDPVDYGRPANEVHLVEWLKMMVGTRRAEEVVDPDMELKPAIRALKRALLVALRCVDPDAEKRPTMGQVVRMLEAEDVPSREDRRSRRGHSSHADNESKASSSXLHRRGDRRERHVHDRAQGQPRGGHLRGGLGGEPAQGLRPGAGGQGPRRRPAHQERRHQRQPAPRQPARLLQGRAAAHLRLAAQAVGLGRRRRSVIAHRRRPQTGWH

SEQ ID NO: 311871 - protein, 74 aa, Zea mays
  Clone ID: MRT4577_47479C.1.pep
AGFVTNVTEYIAGAKVRLECKHFGTGKLERSIDGVTDGNGTYTIELKDSHEEDVPLPICASLLKQLDSDDDDDQ

SEQ ID NO: 311872 - protein, 72 aa, Zea mays
  Clone ID: MRT4577_4747C.1.pep
DRRTRNPTADTCTKQTPNGPRTGSSSRCSLYPTTACRQLADAGHIDCGYGRSMRVCGRTVKTCSTMAVELLE

SEQ ID NO: 311873 - protein, 218 aa, Zea mays
  Clone ID: MRT4577_47480C.1.pep
MATSWLLRHPCPLARPWTRTRNDIGLQVTGITYCYWRCSRASAGGRIMADMSMNTTNCTAEPALLPQADAADPPPRVSKRSPRTGRGAAVAARHEEEGTDDEWLMYLEPAKLEVFDHLEPWAEANVVPLLKPAEVAWQPTDLLPDLASLGADGFHAACFDISARAAGLPDAHLVCLVGNMVTEEALPTYQSIPNRFEAVRDLTGSSGTAWARWIRGWS

SEQ ID NO: 311874 - protein, 201 aa, Zea mays
  Clone ID: MRT4577_47481C.1.pep
CQPVCDDCGRSSTTCYYISIVVDDVLLLIVVVVRVQLLEQRGADGQRHVLEVAERVGGAQVVADADVPGEQDAGAVPVRLHLVAVLARALHQDHLADVLLVAVLELERSIDGVTDGNGTYTIELKDSHEEDICEVVLVESPRKDCDQVQADRDRAGVLLTRNVGISDNLRPANPLGYLKDVPLPICASLLKQLDSDDDDDQ

SEQ ID NO: 311875 - protein, 256 aa, Zea mays
  Clone ID: MRT4577_47482C.1.pep
MATSQSSWLLRHLCPLAMPWTRTGNNIGLKVTNITYWRCSRANNGGTMMEDMSMSTANCLAQPAQLQGEAVEVAGVSKRSTCTGRCAAVAVRHEEEGTDDEWLMYLEPAKLEVFDHLEPWAEANVLPLLKPAEVAWQPTDLLPDLASLGADGFRAACSDISARAAGLPDAHLVCLVGNMVTEEALPTYQSIPNRFEAVRDLTGSSCTAWARWIRGWSAEENRHGDVLNRYLFLSGRIDMRKVERTIHNLIHSGMVM

SEQ ID NO: 311876 - protein, 103 aa, Zea mays
  Clone ID: MRT4577_47483C.1.pep
SSRIFALLYRHCVDAGAASSAASRDRRDLAAPAVEHFADSSLPVVVADILNHHFRYSTSIFHKIRFTSVSSESSDDDVDELKEHERDLDGSSEYCPSGRTEGL

SEQ ID NO: 311877 - protein, 167 aa, Zea mays
  Clone ID: MRT4577_47484C.1.pep
MASIPATTFAVILSVLFCAAAGTAVDNDLPDYVIQGRVYCDTCRAGFVTNVTEYIAGAKVRLECKHFGTGKLERSIDGVTDGNGTYTIELKDSHEEDICEVVLVESPRKDCDQVQADRDRAGVLLTRNVGISDNLRPANPLGYLKDVPLPICASLLKQLDSDDDDDQ

SEQ ID NO: 311878 - protein, 88 aa, Zea mays
  Clone ID: MRT4577_47485C.1.pep
SCRSLLVSGLDLSRWRLPCSLGFSLCSAGFLFHLCWVVVGLVCTLDVPSNTQMCKFRLGVSDNVRPAGRACLKKKKKKKGTNNIEENR

SEQ ID NO: 311879 - protein, 54 aa, Zea mays
  Clone ID: MRT4577_47486C.1.pep
PRRVLDAYAVEVTGTPITWCRSIRHVSISPSLALPKCRAGDGRERASERACDCA

SEQ ID NO: 311880 - protein, 53 aa, Zea mays
  Clone ID: MRT4577_47487C.1.pep
TTFHFTLTNPHSMQSTPMPPSLRIRPPRQSIIFSIVTNLLNPRYYNKSSFKKK

SEQ ID NO: 311881 - protein, 57 aa, Zea mays
  Clone ID: MRT4577_47488C.1.pep
NNSLIEENSHVMLFCQQSLLQLRSHSYFFSHTLMGSIYLCHVDLSLVAFGNGIMTND

SEQ ID NO: 311882 - protein, 73 aa, Zea mays
  Clone ID: MRT4577_47489C.1.pep
IPGCSVYPVLASGSTTKASTDSFISGVRRNPVGARDCITCLRCLLTLPRGLGTVRCGAGKGGFVFYALYAVCT

SEQ ID NO: 311883 - protein, 151 aa, Zea mays
  unsure (1)..(151): unsure at all Xaa locations
  Clone ID: MRT4577_4748C.1.pep
MKFNIGNPSTGCRRKLEIDDDHKLRTFYERTICQEVIVYAMGEEFMGYVLKIMGGCDEHGXRMEQGVLTSGRVRFLLHIGASCFLGYGMRNAERRMKAVRGCVVSHELSAINLVIVKKAENVLSVLIDTERSRMRGRHRASRIWIVLNLVK

SEQ ID NO: 311884 - protein, 74 aa, Zea mays
  Clone ID: MRT4577_47490C.1.pep
ECRPGREEDEASPGPSLTHMVCLGCYQITVLEPASSRFSRFTCRPSGMGCYHVTIGQTRQPHPLHDGLGPKRAA

SEQ ID NO: 311885 - protein, 62 aa, Zea mays
  Clone ID: MRT4577_47491C.1.pep
RSGELLQSPPGALQAPASRASEQASLSLALVRALVRYDDRAVQCSAASLDRCVAFADCGVVP

SEQ ID NO: 311886 - protein, 96 aa, Zea mays
  Clone ID: MRT4577_47492C.1.pep
TLPKKKKKKKKKGKKKKKKKKKKKKKKKKKKKKKKKKKKKIEKIKKKKKKKKKKGGAPPGFSGRSLGGDQLSLIGGLLKPGQNKGNSFSRGKIFFR

SEQ ID NO: 311887 - protein, 147 aa, Zea mays
  unsure (1)..(147): unsure at all Xaa locations
  Clone ID: MRT4577_47493C.1.pep
PSQPSKPYKPAAPLRSSSTVRGDRRGGGLQHRAGEPRKWGASALDPSTPPPSPRDLQASRGSGARRRSTPPPPXPSPXSAGEPRKRGASALDPSTPPPSPRDLRPRAARLPQLLPLNKAQLVSTASFRQPQLVSPPPPPSAPRRPPA

SEQ ID NO: 311888 - protein, 141 aa, Zea mays
  Clone ID: MRT4577_47494C.1.pep
KFDKDRKFTTNRMGRQLSSMGVDPIAAINRARSQSRGRKRERSVSRAAADGDGMEIDGQQSNKKLRRTSRSRSRSRAPEEVIPGEGFKDSEQKKKAIKKAKASTRNRNKDARRGEADRVIPTLKPKHLFSGKRTLGKTSRR

SEQ ID NO: 311889 - protein, 211 aa, Zea mays
  Clone ID: MRT4577_47495C.1.pep
MKENYGRISDSRDPCDPEREIVERSEQTSNITVSKATSPISDESSGRRPAKRLKADAPRLVNVNQVESPQEQKPVVNENHVSGGETVQSEITELPAKPPCSSLGDINAESNNMLEQGSEDVPNMDIVKEEELSRAKGDIEMKDAKTVALDHTPKGVNLSSRRKRGASILYGLTAEELRDHMSSLINRHTCQSRVTSQEFPSIDGLPDQTHA

SEQ ID NO: 311890 - protein, 52 aa, Zea mays
  Clone ID: MRT4577_47496C.1.pep
ASQKFNAYWLTIKPYYSEHKQDGTIKSNIKPHNGNTKGNDKKLTAPLQINEM

SEQ ID NO: 311891 - protein, 137 aa, Zea mays
  Clone ID: MRT4577_47497C.1.pep
GPRVRQNIIPASTGAAKAVGKVIPELNGKLTGMAFRVPTANVSVVDLTCRLEKPAKYDDIKKVVKQASEGPLKGILGYTEHQVVSSDFNSDTHSSTFDAGAGIALNDHFVKLISWYDNEFGYSNRVVDLMAHMASKE

SEQ ID NO: 311892 - protein, 65 aa, Zea mays
  Clone ID: MRT4577_47498C.1.pep
PEGCSSVSIGSCCILSSYLAFTLPVRCFPPAYPPRSGPPCVPVLEVPTRHAMRGQPAVTCCVCVS

SEQ ID NO: 311893 - protein, 156 aa, Zea mays
  Clone ID: MRT4577_47499C.1.pep
PPKAPKPKYPAPPSPFSSPAKSPPPPPIPKAFKGAPPKGFPFGPKGPFPPNPISSFPNQGSPPFSPSPGPPTGKDPQRGVPLEKKPKPPPKPGPQKGPPFLMARPRPPRTGQTKPQGPEGFSNPPPLLLPPYPTKGPRAKPESQVPGKGTKPLPGP

SEQ ID NO: 311894 - protein, 90 aa, Zea mays
  Clone ID: MRT4577_4749C.1.pep
CEPDEPVPASQPNQGSVRVRGRKDRKRIKQRDDFITADKEKRRAQYSAAVKRKEAERTEREMAAVARDRAWAERLVELKQLEEEKNPAMA

SEQ ID NO: 311895 - protein, 128 aa, Zea mays
  unsure (1)..(128): unsure at all Xaa locations
  Clone ID: MRT4577_474C.1.pep
MATGLALAAAPHVASVTGSGTVEEQAAGVGILLQISMLVLSFVLGHILRRRKFYYIPEASGSLLIGMIVGGLANISNTQKSIRRWFNFREDFFLLFLLPPIIFQSGFSLXPKPFFSNFDAIITFAILG

SEQ ID NO: 311896 - protein, 51 aa, Zea mays
  Clone ID: MRT4577_47500C.1.pep
RHQLSSRAAITTSVTFDQVGVGWSLMHPNIFGAAITGAWGTPWDLRRRIPH

SEQ ID NO: 311897 - protein, 55 aa, Zea mays
  Clone ID: MRT4577_47501C.1.pep
KTAQGSEPNNRGAQGGRSPSGYRGGGGAIPPLGEGGLTKANPVSRSCVGKGAGGV

SEQ ID NO: 311898 - protein, 88 aa, Zea mays
  Clone ID: MRT4577_47502C.1.pep
KKRQNLDFLGRPIKISQFGQKIRLPRDRPWPAWNRPGPPPFQGSKKGPTNRILFGQAGNTPWTQQTLIGPKPNYPPRAKNGKTGVGPP

SEQ ID NO: 311899 - protein, 276 aa, Zea mays
  Clone ID: MRT4577_47503C.1.pep
MATGQLFSKTTQALFYNYKQLPIQRMLDFDFLCGRETPSVAGIINPGSDGFQKLFFGQEEIAIPVHPTVEAACNAHPTADVFINFASFRSAAASSMSALKQPTIRVVAIIAEGVPESDAKQLISYARANNKVIIGPATVGGIQAGAFKIGDTAGTIDNIIQCKLYRPGSVGFVSKSGGMSNEMYSTIARVTDGIYEGIAIGGDVFPGSTLSDHILRFNNIPQVKMMVVLGELGGKDEYSLVEALKQGKVQKPVVAWVSGTCARLFKSEVQFGHAGA

SEQ ID NO: 311900 - protein, 340 aa, Zea mays
  unsure (1)..(340): unsure at all Xaa locations
  Clone ID: MRT4577_47504C.1.pep
MATGQLFSKTTQALFYNYKQLPIQRMLDFDFLCGRETPSVAGIINPGSDGFQKLFFGQEEIAIPVHPTVEAACSAHPTADVFINFASFRSAAASSMSALKQPTIRVVAIIAEGVPESDAKQLISYARANNKVIIGPATVGGIQAGAFKIGDTAGTIDNIIQCKLYRPGSVGFVSKSGGMSNEMYSTIARVTDGIYEGIAIXGGDVFPGSTLSDHILRFNNIPQLKMMVVLGELGGKDEYSLVEALKQGKVEKPVVAWVSGTCARLFKSEVQFGXHASAKVTGMLLEMDQTEVLHLLESPDALKSKVAEAMDVLRNVAHQQNPNLPTSQLAALSLTEGIMS

SEQ ID NO: 311901 - protein, 103 aa, Zea mays
  unsure (1)..(103): unsure at all Xaa locations
  Clone ID: MRT4577_47505C.1.pep
GSKLVKLGCEMGVQVFEDFFKRCKEVAXKKKRVADEYLKAXLSDEMFQTKVIWSLARLQATCGAFALFTGTFKLIESDGEEKFEXTGRTCSVDAAYKADDKIF

SEQ ID NO: 311902 - protein, 124 aa, Zea mays
  unsure (1)..(124): unsure at all Xaa locations
  Clone ID: MRT4577_47506C.1.pep
SQLAFVNPVAYLQQQGVRCNLLFLANITSYQQQQQLQQFLPSLSQLAMVNPATYLQQQQLILSSPLTVINAPTYLQQQLLQHIVPSLTHLAVANPAIYLQQLLTYNHMTXSNYACYLQHILTFT

SEQ ID NO: 311903 - protein, 92 aa, Zea mays
  Clone ID: MRT4577_47507C.1.pep
TSNILRFLFYLLDGNAIDQLPKPYNTPVHSDKICTYYYYMVYSKSMDEILKLLYIAEASFFNFYVHNRNAYAVTNIPYTPVHDTKRNAGKLS

SEQ ID NO: 311904 - protein, 74 aa, Zea mays
  Clone ID: MRT4577_47508C.1.pep
VAVAFSLGDRRQERIQARGRHVTRRPLEVQAETMDSKQCSPSNSGANRGRVSRRRSAAGARWSAAFSCLGVARA

SEQ ID NO: 311905 - protein, 189 aa, Zea mays
  Clone ID: MRT4577_47509C.1.pep
VSLLGTVLNRAEAMAKGSAAVHTRAQCRHGFTNNHHFWVVAWRTYVICCAADGAVQCSPMESQVPLAPAPCFALLLSLLSDRTVSSPARLPLWTLVLGRNGVDRGASYRRSWAERRVRAAWRREASRAGAIRGGPGRGGAPDARPSGPSDGVPVAWRGRAGLRTCRGRVRNTSREATAEWSRSGQRRAR

SEQ ID NO: 311906 - protein, 43 aa, Zea mays
  Clone ID: MRT4577_4750C.1.pep
MLGGSGSHGRRRLAALSQIAYQRNDDDEEEASRERRRRARQER

SEQ ID NO: 311907 - protein, 168 aa, Zea mays
  Clone ID: MRT4577_47510C.1.pep
GIRHEGPPFHGPTCHFPYSSSPETRWRFGLCRPSSHLRPPIVPTRKHQRPICHYPTAHRQSAAPGRSLQGQAAAGRATATAAGIRRPAATGGGQAVGTWCRSTARQQQQQRDSTTTVWSTAPLLVSSTAPLQRRLISCAVCTRVLKELIPGQHTIAQSSTGSFLDYRW

SEQ ID NO: 311908 - protein, 41 aa, Zea mays
  Clone ID: MRT4577_47511C.1.pep
GVTCSRTLRSYLLAESSVGDPDRATDRVTWPLTSALTEAVY

SEQ ID NO: 311909 - protein, 76 aa, Zea mays
  Clone ID: MRT4577_47513C.1.pep
NAPGGRKPQKGHYPTPRNATTKDPGGVPKKPNRNLQACHLFFLRVVSELENKTVNIGTRLKKKAGPNAAKNQFLNL

SEQ ID NO: 311910 - protein, 128 aa, Zea mays
  unsure (1)..(128): unsure at all Xaa locations
  Clone ID: MRT4577_47514C.1.pep
EKAKLGRVREEYEKMMETRAEWETEKKVKARRQKEQKEVXHCYCTINSLFPSSKASVVQAPNPXMTELDRKREKALEEYNLEMTRISKISGGARAMAEERKYNDGKKIREKARKMRSTGKPXRTCACF

SEQ ID NO: 311911 - protein, 74 aa, Zea mays
  Clone ID: MRT4577_47515C.1.pep
GYSEPSFLTLQTELDRKREKALEEYNLEMTRISKISGGARAMAEERKYNDRKKIREKARKMRSTGKPPRTCACF

SEQ ID NO: 311912 - protein, 143 aa, Zea mays
  Clone ID: MRT4577_47516C.1.pep
PRVRGRVGSAVRPATSYRSGRNGEGAAGVAAPGGTGSKADEWEKAKLGRVREEYEKMMETIAEWETEKKVKARCQKEQKETELDRKREKALEEYNLEMTRISKISGGARAMAEERKYNDGKKIREKARKMRSTGKPHRTCACF

SEQ ID NO: 311913 - protein, 104 aa, Zea mays
  Clone ID: MRT4577_47517C.1.pep
SVVLLWRFLVSAAVRSVTCMSFRALRSLLWARQPALIVWRGPRSPPWIRFFFRRGLIPRHWCSSCLASPALVVLVACSVSLLGAFLPSPRAVAPALVPCWFLVR

SEQ ID NO: 311914 - protein, 263 aa, Zea mays
  Clone ID: MRT4577_47518C.1.pep
MNSSGEYDAAFAATIAAAAFAIAAREDKLAAQKNSVPIEEVTPSLSPVNRAEGTKKPAGGNKIARWFSGKEPIEHDDDDEGPVNVSVRRPLKPAPGKPEDVPADHHKVAPRMLETSLGVRKGSGSSSRSAERKWSKEFEQEQAVQKAPSAVRPATSYRSGRNGEGAAGVAATGGTGSKADEWEKAKLGRVREEYEKMMETIAEWETEKKEPARAPTIAAATELDRKREKALEEYNLEMTRISKISGGARAMAEERKYYDKSVI

SEQ ID NO: 311915 - protein, 106 aa, Zea mays
  unsure (1)..(106): unsure at all Xaa locations
  Clone ID: MRT4577_47519C.1.pep
NELCDNDFFFFHKTWQVVLNGVALMCVPSMXTTKPVLLKKQHEHRHEGNQDSLLQGIDELVGAEFGEHHEDAHDHDELELGEPLVHKLFHTTEYGVSAAGNTASCL

SEQ ID NO: 311916 - protein, 54 aa, Zea mays
  Clone ID: MRT4577_4751C.1.pep
SAVYCMAYMVSQLSALKDVTLPEGVLPVPGSWTSFSLLMYITLESDLYHIFFHH

SEQ ID NO: 311917 - protein, 55 aa, Zea mays
  Clone ID: MRT4577_47520C.1.pep
TPMLSGVLDKTGGKLIQTSKKGPTSLNKKKKKKKKITNKNFIKKKNGAAVLKVQS

SEQ ID NO: 311918 - protein, 65 aa, Zea mays
  Clone ID: MRT4577_47521C.1.pep
LDRTESYFISSFFLKFYWLFTYLLSYIHNPYPLAFYFIFLVTVVMCPMHIFFEMHYMSFPMHKDK

SEQ ID NO: 311919 - protein, 116 aa, Zea mays
  unsure (1)..(116): unsure at all Xaa locations
  Clone ID: MRT4577_47522C.1.pep
NPPENPRYCHPNVFQVFGRFSPKTFPQQFTTWFQPKTRGGPPPPPFGFVGPPQPPQGRGQXAPAPNPPPMGGLAPPNPPKKPPPPHALXGGLPIKKCGPPPPKPXKNGFNQKRPPP

SEQ ID NO: 311920 - protein, 63 aa, Zea mays
  Clone ID: MRT4577_47523C.1.pep
VPAGFCRPGGECNTLHEEIALAHVEQELLPPGATADRRQCELLAHIFYPRFSGSGLQPMLATM

SEQ ID NO: 311921 - protein, 330 aa, Zea mays
  unsure (1)..(330): unsure at all Xaa locations
  Clone ID: MRT4577_47524C.1.pep
VDVRFRFVSASLFRTASPLPPSPASHYLDSLPSGPPVARALPHWRHGRPRRQARVPRRHRLDCLLAGPRSPRGVACGGGGDRACMVLDKKVLYXDICFRAHKLTMRSFGDVXHVISATMSGVTCCLCFSGQLNSDLRRLAVNLIPFPRLHFFMVGFAPLTFRGLXKYHVLTVPELPKXIWDAKNMMCIVDPRHGRYLTASAMFCDKMSNREVDEQMLNVQNKNSSYFVEWIPNNVKSSVCDIPPTGLAMASTFVGNSTSIQEMFRRVSEQFTAMFRRKAFLHWYTGEGMDEMEFTEAESNMNDLVAEYQQYQDATAEEEEEYEEGDEVAA

SEQ ID NO: 311922 - protein, 103 aa, Zea mays
  Clone ID: MRT4577_47525C.1.pep
PRGVVFNYCANQGFPLRHLAALFTQTEIAFILMAQGANVESKNGQGETPLACAPAMLQYKMPHRGEELAVSVSRGPLGGPVLVLVSAEFPLFQFVSNGVSRIK

SEQ ID NO: 311923 - protein, 105 aa, Zea mays
  Clone ID: MRT4577_47526C.1.pep
GRSLGTPRRWMPFQCPRPPLPPLFSAGTARRSYHPATTTLHLWSWSWSWTTPASFIFLAPQHHSGCPYDAAPGGPHGLHNGHSVRRPPAVADATNGTAALIRGSV

SEQ ID NO: 311924 - protein, 125 aa, Zea mays
  Clone ID: MRT4577_47527C.1.pep
GRVGASRALCRDLPLLLLFVGRVASRGSTAAWFRARFAVAVPRTSPAAGLTSPRRVVHGNRRSTVGYAAAAPTYMDGGLLWLWSPRLDIFLLWCMIAMAGPRSSGVRLISAAGALLGWVCRVRWC

SEQ ID NO: 311925 - protein, 154 aa, Zea mays
  Clone ID: MRT4577_47528C.1.pep
MGFPPVCCCAPIPKPVVAFCNLLGAIKDAVLLTLAAVGFPHDAARGSADAHQPEEVKTRLPAVEYAQLLAEQQPSPATHAACIVCLDTLEAADEVRRLGNCAHAFHRACIDRWIDLGRTTCPLCRSDLLPSPRGRAGLLGLGRLASRLTRVRVW

SEQ ID NO: 311926 - protein, 120 aa, Zea mays
  Clone ID: MRT4577_47529C.1.pep
VSEITNQGLQLQMSSTQRHALIGPAWTCHDQSRSWAYHMVSSGHTSPALTPLLEQRVVLCYARSPLLTLCLAQIGSNMSYLVPANSGPDHAGVPRPPIYRHLRTRAQKGPRCTLGETGVQ

SEQ ID NO: 311927 - protein, 124 aa, Zea mays
  unsure (1)..(124): unsure at all Xaa locations
  Clone ID: MRT4577_4752C.1.pep
PSGDAWPGSNVTGRLYHFGPRDANPGDGEVVTCGKLQGRGTFNVIPDSXTMGGTILALLKESGRTTKQRIEKVSVTQAIVHSCSTITDSLRQDRTCLPPTMNSPELHXLFLNLGWETGPPRNVR

SEQ ID NO: 311928 - protein, 190 aa, Zea mays
  Clone ID: MRT4577_47530C.1.pep
ASRVSKRLTEEAEQYFEDFLSNVEDTDFSSFDGERSDSSSTRKDLLLLHAMTETPVKLPEVALPAEADGVVLPWLQWETTNDLQTSPCKTKAQGESTRGSTSNQTASSRGSWSPGDHATSSVASKDSLLTRFGEVGICRSSLSDYARTLSFHIDDYLHLRQSEDLLLETWMQKQRIDSGGLVLCSKSTIL

SEQ ID NO: 311929 - protein, 44 aa, Zea mays
  Clone ID: MRT4577_47531C.1.pep
RGCQSILDNLCTGDNRRVVVVFICTLCLCALPVSGYLVCQVALG

SEQ ID NO: 311930 - protein, 57 aa, Zea mays
  Clone ID: MRT4577_47532C.1.pep
MAFSLQEMEHKRECGKKKKKKKKKKKKKKKKKKKKKKKKKKKKKKKKKKKKKRGGPF

SEQ ID NO: 311931 - protein, 57 aa, Zea mays
  Clone ID: MRT4577_47533C.1.pep
ISKQTSHGEKQNKNKRRERLLHSTNKQERWKRARQDDNGLPKKKAAERAISYLAWAL

SEQ ID NO: 311932 - protein, 116 aa, Zea mays
  Clone ID: MRT4577_47535C.1.pep
MGPTDCRLSAAACLALWGWMALVPPPTLPPAVWLGHGCPSTAQVTVAPCAGLPHPWLPLPAGAHWGPYKTSYAATVAAAFLDGLVLTPVGRNGSENPFVHAEAAATHRCRGGRRHW

SEQ ID NO: 311933 - protein, 60 aa, Zea mays
  Clone ID: MRT4577_47536C.1.pep
RVCPRSWPEPVVRFPVGVFPSPLGVRACAQGHGVSFAVFAVVSSISGRHPVFFCCPITRM

SEQ ID NO: 311934 - protein, 36 aa, Zea mays
  unsure (1)..(36): unsure at all Xaa locations
  Clone ID: MRT4577_47537C.1.pep
HQNVRFLSLWVDHQGFDXVTQEIPWALLELHSPDAW

SEQ ID NO: 311935 - protein, 99 aa, Zea mays
  Clone ID: MRT4577_47538C.1.pep
PAGSGGAPRTRRGRNKMSSKKATNRGLVLVLLLVVLPALSVATHAGERELPDEKDHKGHSTVASGKGGTASGDMVKTNDYGRYDPTPAFSKPRSKLIPN

SEQ ID NO: 311936 - protein, 96 aa, Zea mays
  Clone ID: MRT4577_47539C.1.pep
RPGREGSRRGRNKMSSKKATNRGLVLVLLLVVLPALSVATHAGERELPDEKDHKGHSTVASGKGGTASGDMVNTNDYGRYDPTPAFSKPRSKLIPN

SEQ ID NO: 311937 - protein, 73 aa, Zea mays
  Clone ID: MRT4577_4753C.1.pep
SINETYNCSTIINNRGDICFVTEVQLTTLVSDPAYCYSQRVLRNGTHSLIWIHLLKREHTDHLSCTTTALSLE

SEQ ID NO: 311938 - protein, 47 aa, Zea mays
  Clone ID: MRT4577_47540C.1.pep
DFPQFFSGATPLAAEFRPTHSAMEDISFVCMRLFMLGDGTTIAHQPS

SEQ ID NO: 311939 - protein, 93 aa, Zea mays
  Clone ID: MRT4577_47541C.1.pep
KNCHGTSQSIFFDAFPFKVSHHLDPETNGGKCRIFNMSILYASFPGPDWHKNATNKDMTAHQENSMLRPSHYTVREQNHPPELVMDACNKIYF

SEQ ID NO: 311940 - protein, 260 aa, Zea mays
  Clone ID: MRT4577_47542C.1.pep
MGCVSSKILAKSGSFQEKVSGLGHAHGFQRSSAIEEIILSTSKSSGDQFMALLRTSSRASSSSAEAHSPAPPPAAAAAAARIETVDVAELLAGLEEGSCGTAGEAQAPPRPRASAGRARSFRTVEELDAMLLLTQHQQEDEKLATATEGAEAARVSEGAKRRGRARHLGELQVPPAAAAFDFSKSGSLRDWLRQGGQTFSPGSYVTPRFGTPAAAERGGGEQQQQEALLFDPELVAQLERAMEQLSEDRGRVLDQILGCK

SEQ ID NO: 311941 - protein, 133 aa, Zea mays
  Clone ID: MRT4577_47543C.1.pep
MAAPSAVVEIKSKAQFDELVKNTPYVALQAHASWCGPCKAISPIFNKQAAEHKSDKYAFAKFDTDDVPDLAFELGIRSIPAFFFFENGDKASDLLGAVPPKLTAAVKSYADKATGGAAEKPAEENTLKTDENF

SEQ ID NO: 311942 - protein, 40 aa, Zea mays
  Clone ID: MRT4577_47544C.1.pep
PPDHSPRASHAVAPLPQQRSPRSRGLFSKGPPRTWLQSPV

SEQ ID NO: 311943 - protein, 82 aa, Zea mays
  Clone ID: MRT4577_47545C.1.pep
LISAACACACAAQSNSSPNWIRQVAWVGAGSIERRMGDEAEDHYELHMVCYGNHEDELRDELRSSAPPWRPPVDPALAAAGA

SEQ ID NO: 311944 - protein, 31 aa, Zea mays
  Clone ID: MRT4577_47546C.1.pep
CCKGHTYSLWRGIKSAGGPVHHEALCFTRTI

SEQ ID NO: 311945 - protein, 65 aa, Zea mays
  Clone ID: MRT4577_47547C.1.pep
VVRWKPPWPLQPRQDISAELRLVLWPSFRAFHEATARWWCLSWIRLQTWLSSVWCYSRQQSEMLQ

SEQ ID NO: 311946 - protein, 362 aa, Zea mays
  unsure (1)..(362): unsure at all Xaa locations
  Clone ID: MRT4577_47548C.1.pep
RIFPYSVATSTAKKKKKKKAATGKQTILIPKGDFLVGQLNFTGPCKGDVTIQVDGNLLATTDLSQYKDHGNWIEILRVDNLVITGKGNLDGQGPAVWSKNSCTKKYDCKILPNSLVMDFVNNGEVSXGVTLLNSKFFHMNMYRCKDMLIKDVTVTAPGDSPNTDGIHMGDSSGITITNTVIGVGDDCISIGPGTSKVNITGVTCGPGHGISIGSLGRYKDEKDVTDINVKDCTLKKTMFGVRIKAYEDAASVLTVSKIHYENIKMEDSANPIFIDMKYCPNKLCTANGASKVTVKDVTFKNITGTSSTPEAVSLLCTAKVPCTGVTMDDVNVEYSGTNNKTMAICTNAKGSTKGCLKELACF

SEQ ID NO: 311947 - protein, 87 aa, Zea mays
  Clone ID: MRT4577_47549C.1.pep
SLWGTLFAANEAVTTASLRRRLILRPSPSSEETKSESESEAAAAGGVAARLRKLDLAFEERFLKVTCGRAVSAPVMFCRRICHSDNI

SEQ ID NO: 311948 - protein, 134 aa, Zea mays
  unsure (1)..(134): unsure at all Xaa locations
  Clone ID: MRT4577_4754C.1.pep
MSTAATACATRAAARPPLNTAPARRAPPSALRPPSATPARRAFGWGFCAAASSASXPSTWDWTRWSRHFXXVYHAESYSSLLHFQLEEALENXDFSEAGKLNRDIFIATXNYSLSHFMSFLXNALYEHLFPYSS

SEQ ID NO: 311949 - protein, 302 aa, Zea mays
  Clone ID: MRT4577_47550C.1.pep
MQREMVHGHGDGNHHQHHQLPRYAAAAAATGVARASKKSKPKKIPQRGLGVAQLEKLRIEEQKMEGSMPVCRPSNRSVGVGGVFYLHPMHPPPQAPLPLLPRPGAECAVHCGYPSVLWGLPMDTASVAVDPMKHWNYKRCLCTLPPLPTVSVGLSLTAASSSHPTEPPSNQMYSSGGGGGAETAAAEDDDDRVHAVVEEAAGVDRPWPLVFEGLNTAAFRTTAAGKAPLAVAARTTREAAAAAGLPDACAAADLTRYEFSRATTNYYRLNLQRAHSHVCGFPPVWVLLSVCFSSELEFLHKD

SEQ ID NO: 311950 - protein, 50 aa, Zea mays
  Clone ID: MRT4577_47551C.1.pep
YYTYKTRGLLLQPRRVVVQTCRPLIIAQLTLTVGACMQGRLFRYVSHYWG

SEQ ID NO: 311951 - protein, 64 aa, Zea mays
  Clone ID: MRT4577_47552C.1.pep
GFLFLISIQMDWKELSGFKSGKISPNLSQSPPIQLFIIYQHSGLYDQSAIQDYNIVAVWLLSVG

SEQ ID NO: 311952 - protein, 157 aa, Zea mays
  unsure (1)..(157): unsure at all Xaa locations
  Clone ID: MRT4577_47553C.1.pep
RVGLASMGYRLMHLSQMSHMNPSCMRRGRLDAXCRQKFPDEATRREADPYYHRYTRTEPXHDLAVRMESIMLQLERVDIDLVIIAHDAGLLELYRYLMACNAADIPKLPFSRDEIIESIPXHYDNETKLIKTADLXPXMVTGSPEDIKIPVLTSGTV

SEQ ID NO: 311953 - protein, 99 aa, Zea mays
  Clone ID: MRT4577_47554C.1.pep
FCIAPSRSCPKIDILLVVWVFEDGIVRAARQIPRHVGAPHRRPGRTRMLCARSHYRGGDVKGHYRAEVTEGTVGELRFQRRDATESRSWSTGAPDQRTG

SEQ ID NO: 311954 - protein, 87 aa, Zea mays
  Clone ID: MRT4577_47555C.1.pep
SMPCYTPNILYPPQLRASSSNVKAHYQWYSEQSEGSRNEHDCHKSKLFHSSSSLHAAPPPSTSNGTSGCLPAGSFPLTAFGNTSATP

SEQ ID NO: 311955 - protein, 63 aa, Zea mays
  unsure (1)..(63): unsure at all Xaa locations
  Clone ID: MRT4577_47556C.1.pep
HKRTVFFLLPKIVKCTELYSKFRTRKRNVVPKYQYQHSLHRNVSVLTNTPKCTHTIGSXRNSR

SEQ ID NO: 311956 - protein, 131 aa, Zea mays
  Clone ID: MRT4577_47557C.1.pep
GITMPHCTPLPKPHKVLKPGEENSNRHPLPSPEYRLLGSRSLAHSCRHQLDHVAGANVGAPHRRAVARSSRRVGPRLRRAVVPALPGAVPVQLLVPVERLLAAVSPRPLRRALRWRGSGVRRQRGAGLARP

SEQ ID NO: 311957 - protein, 256 aa, Zea mays
  unsure (1)..(256): unsure at all Xaa locations
  Clone ID: MRT4577_47558C.1.pep
MFYWQATIMGPPDSPRPGPSLPIPSLSLSLSLSLSLSLSPARSAASSSTRPTNQGRXPRDAADDEDNVVSLKVSLLGDCQIGKTSFMVKYVGDDGEEQNGLQMTGLNLMDKTMPVRGARIAYSIWDVAGDHQSVDHVPIACKDAVAILYMFDLTSRCTLNNIVDWYGRARKWNKTAIPILIGTKRHGFAQLPLEMQWAIVNQARAYARAMKATLFFSSATHNINVNKIFKFITAKLFNLPWTVERNLTIGEPIIDF

SEQ ID NO: 311958 - protein, 55 aa, Zea mays
  Clone ID: MRT4577_47559C.1.pep
HGLGKTSYETYDTKKIPTSQDHLHTTVPQFLIIINKEGLPIQHKRGMIKYLYART

SEQ ID NO: 311959 - protein, 64 aa, Zea mays
  unsure (1)..(64): unsure at all Xaa locations
  Clone ID: MRT4577_4755C.1.pep
IGYLEAGRGASINPKPCSRAAARPPAMSLPXPGAPRDGGASXXSPFPHDXWMXGKRTSXQNGAQ

SEQ ID NO: 311960 - protein, 87 aa, Zea mays
  Clone ID: MRT4577_47560C.1.pep
TTYIFFPVKDRPSPGILGAAAGILPWWGSPAFSEKAQFHGFLTRGGTSSLGPWGGRSMFKRAPLSFLWVPKEGPFINPTTIGGRPGA

SEQ ID NO: 311961 - protein, 188 aa, Zea mays
  unsure (1)..(188): unsure at all Xaa locations
  Clone ID: MRT4577_47561C.1.pep
MEPRMTPPGHCQLGKTAFMVKLLGXDGEEQNGLQMTGLNLMDKTMPVRGARIAYSIWDVAGDHQSVDHIPIACKDAVAILYMFDLTSRCTLNNIVDWYGRSRKWNKTAIPILIGTKFDDFAQLPLEMQWAIVNQARAYARAMKATLFFSSATHNINVNKIFKFITAKLFNLPWTVERNLTIGEPIIDF

SEQ ID NO: 311962 - protein, 162 aa, Zea mays
  Clone ID: MRT4577_47562C.1.pep
LGRDRCCFRRPPAPLSMDSSSTPPDPIRLGHTRYGYLSMPYGQWRTPGTRPGPWLAHLLDTRSASSVLLSGRRAGARMTTWMFMLSLLLDCVLYCPLGMSMRCTTALSVMPCCLATPMERLWCAASLTFTPWTLTLRQKLMNYSMFDMEGLLSELAICELQE

SEQ ID NO: 311963 - protein, 71 aa, Zea mays
  unsure (1)..(71): unsure at all Xaa locations
  Clone ID: MRT4577_47563C.1.pep
GREGPFPPRFSRKLPPLVXGTPTPPLGWEKNLGAVSGGSIWSRMKRHRVKLPQYNETVTFGSRNKPPFGDP

SEQ ID NO: 311964 - protein, 73 aa, Zea mays
  Clone ID: MRT4577_47564C.1.pep
VERRSIARVSARVEQELQSVITDAIDRLTILVVSGLAEMHHLMAPRGNTMERRWSIKMQQQGRVNHEGVIAVS

SEQ ID NO: 311965 - protein, 224 aa, Zea mays
  Clone ID: MRT4577_47565C.1.pep
RNSAQGRPPVFPGFPGVPFGAPVFFPYEVQKLSQGLISLAPPCFFFCSGCSTDSCKGGFSSSLLFYVRVAPLFFMFSVGPACFGKGFRFALALGWAAPGAQREPAPQRAQARRPPAKGGDDGLPPEQRGEGGPKALQEKAPRKAAQAPGGACPKGGKNPGKKKPGFLLFSSQDLLVLENLYFPRFGNQCDFVGVVSTSVETPVPRKICSKDLKRTRGLALCFAK

SEQ ID NO: 311966 - protein, 110 aa, Zea mays
  Clone ID: MRT4577_47566C.1.pep
QQVSQERQPIEHGADRPRDDKDYKEPPPETLFEPGELKAGSFYRAGITEFVDTFLFLYISILTAMAVSKATSKCSTGGIQRIAWSFEAMIFSLAYCTDGISGAHISPAGD

SEQ ID NO: 311967 - protein, 76 aa, Zea mays
  Clone ID: MRT4577_47567C.1.pep
GLSIDLAKGSHERRICRRPRRPSEETSPLTELSSSMWVDAYDHHLSNIYNEGHSEDLAMGGVRHPLVTSPCRQRRP

SEQ ID NO: 311968 - protein, 74 aa, Zea mays
  Clone ID: MRT4577_47568C.1.pep
FILPPHSVFLAGQDVFGNFLKSEFSEENIEFWLACEDYKKTKSDLLHCKAEKIYKAFVQSDAAKQVSLLPSAYM

SEQ ID NO: 311969 - protein, 78 aa, Zea mays
  unsure (1)..(78): unsure at all Xaa locations
  Clone ID: MRT4577_47569C.1.pep
VXSSLSSXXRFIIPXGGGESXLPPPTCSYHXERXEXSRRXASSPXAAGYRARVLPXVHRXXPTVTXGXXVHWAEKLST

SEQ ID NO: 311970 - protein, 113 aa, Zea mays
  Clone ID: MRT4577_4756C.1.pep
SGEKKFECNLTLSCALPSRQRSSKSHLSKSLAASPTVFVSRRSKTLARVGRRSGERWSNAYACNGQRLVRSGGGYAHRLGPLSGGVWVACLLRPVTSTKLLHIDAELAPPPRQ

SEQ ID NO: 311971 - protein, 42 aa, Zea mays
  Clone ID: MRT4577_47570C.1.pep
EPALLAPEPRRIALRPDHPGLLLVVCFNPWASPLILFGFPQK

SEQ ID NO: 311972 - protein, 103 aa, Zea mays
  Clone ID: MRT4577_47571C.1.pep
KGKRGPSLKLVKNPPKKRMGGGENFFFENWSQAPTKALKQKKGPFRKLAQLFFYLKTFVFVLNPFYGKNNQNFCYPPLPTHRGGVLGKKGFIFFLPPQKNGQP

SEQ ID NO: 311973 - protein, 97 aa, Zea mays
  unsure (1)..(97): unsure at all Xaa locations
  Clone ID: MRT4577_47572C.1.pep
MGKRKPDAKPPPKKRMAKLDAAFSCPFCSHGSSDEXRIDMKNLIGESSCRSCSENFSXTRVSALTEPIDIYRETIDERERVSTDEGDDDAGASPMRR

SEQ ID NO: 311974 - protein, 121 aa, Zea mays
  unsure (1)..(121): unsure at all Xaa locations
  Clone ID: MRT4577_47573C.1.pep
MISSHDMKRLEAYSNNSNXDIHVMLDLVPMLAHQYFLHRLPMXITWCIYSXMFCLSLHDNDIGTANGDLAIERAHGLSNFIQTMKKLHGYLHNIGRKKIGTTLPRLKYIEMPSFSKSMDED

SEQ ID NO: 311975 - protein, 61 aa, Zea mays
  Clone ID: MRT4577_47574C.1.pep
RPGWWTPELLDDAPCGDPQEEGGLHKLIIMPLSGNFRRIPCGQGLKFDNNCGFLVDYWAKK

SEQ ID NO: 311976 - protein, 105 aa, Zea mays
  Clone ID: MRT4577_47575C.1.pep
EQDCSGGGYKRIAKVRIKRERARAYKTNSPGYITSATTFKKPKRQNRGNFFRGKHRGILPGGNSVPNTLLPRLNGLGLHLPKTKKAKAFFYFEFFWKPGSFGNFF

SEQ ID NO: 311977 - protein, 71 aa, Zea mays
  unsure (1)..(71): unsure at all Xaa locations
  Clone ID: MRT4577_47576C.1.pep
HSAPTDDGLHAGDLVNMTXAASDGVDNINVTYSHNRLTAPNSIIIRAVFVHTDPDDLVKVAHELSTSTGNS

SEQ ID NO: 311978 - protein, 70 aa, Zea mays
  Clone ID: MRT4577_47577C.1.pep
PREARPRIPGPTHARDIPLRPPRNLRGLFKMQLGWLPQQQNQDISSLLHQTHLRVHFAMEFLHANTQEST

SEQ ID NO: 311979 - protein, 84 aa, Zea mays
  unsure (1)..(84): unsure at all Xaa locations
  Clone ID: MRT4577_47578C.1.pep
MRVLLVALPLLGLGASATSTHTSGGCRXQPPATVHLPAAEHLPPPVHLPPPVHFPPAVHLPSTGHLPPPSHVSSPDHVPAASWH

SEQ ID NO: 311980 - protein, 42 aa, Zea mays
  Clone ID: MRT4577_47579C.1.pep
ITKAQHGFIFRLPSSIVLIGGPHNLRKVLPTQASKQVYLICQ

SEQ ID NO: 311981 - protein, 93 aa, Zea mays
  Clone ID: MRT4577_4757C.1.pep
GVGKRPHLFLGTPVSGPYSFFLKGRLVGPPLVCMWGYPWFFLFRGRAFRRDPVSGPRGGPRFLWVWGAPAPPQGPAGPGRGFPLGAAGLLGEA

SEQ ID NO: 311982 - protein, 96 aa, Zea mays
  Clone ID: MRT4577_47580C.1.pep
SDAGDFFLGEECDVRSRSRDGVAGAGRGRVGSGRAGPSPCQDLATRDDCAARTGCRWCRSEALDDMCFGPTEARRLPRQVFSCDPPSDAAHASFNK

SEQ ID NO: 311983 - protein, 104 aa, Zea mays
  Clone ID: MRT4577_47581C.1.pep
LNLFLLGGPPDDIVFCCQLAKKKSVFLCPGSVLGMENWVRFPFALDSSSLLDGLERLNSFCPRHKKKNLLYGPLLYSASKVFPPSLVFPWVLPQSGPLESPPSF

SEQ ID NO: 311984 - protein, 52 aa, Zea mays
  Clone ID: MRT4577_47582C.1.pep
LKEQVARKGLSPKEEKTKKLPWGGALINSGPNLLDHDHGQRSFFNNSPWSKN

SEQ ID NO: 311985 - protein, 113 aa, Zea mays
  unsure (1)..(113): unsure at all Xaa locations
  Clone ID: MRT4577_47583C.1.pep
GQRLSFDGIYSYGTLSSAARRRGGARSDSYERIGIPHHQYALQISASSESYSLLLCSLYSTSFVLCRTYWIYSDHTLSSTLIYHXIRPTPCSFTRRLHTRVVCGALEAASNMR

SEQ ID NO: 311986 - protein, 212 aa, Zea mays
  Clone ID: MRT4577_47584C.1.pep
EELTSMKRMRVELEKLRLLCERIIKREKVKRETVLCDHEILAKTKDTVIFSYLACGASSESATTSVNNRSYSGAAQRSDDVTVDSTISGKKTIRFSLNNRGADRNTADSSRTLLSFKRKLSERGPRAGKQLPQRPTIAAEKLEDEDKKTTDKKITMQQREMFQKELIMTSDQASTQNLRLPKGYAYVPRDSLSKEKLWKQNTQPHNPQEPGG

SEQ ID NO: 311987 - protein, 64 aa, Zea mays
  unsure (1)..(64): unsure at all Xaa locations
  Clone ID: MRT4577_47585C.1.pep
LFATLPSRQQCTYRSHAHSLSPLTQAGPNVFTLLFLSLTPWPICDCSPSGTMLGQLADRGELXE

SEQ ID NO: 311988 - protein, 266 aa, Zea mays
  Clone ID: MRT4577_47586C.1.pep
LHNRILLRLQSLRSTMPSLAAAAAARRAGEALRRGVMGGRYLSSLRPSPATAAAPDSDEVLVEGKASARASVLNRPGHLNALTTTMGARLNKFYESWEDSPDIGFVMMKGSGRAFCAGGDVVGLRQLINEGKLDESKDFFRTLYSFIYVLGTYLKPHVAILDGVTMGGGGGVSIPGTFRVATDRTVFATPEVHIGFHPDAAASFYLSHLTGHVGEYLALTGEKLNGVDMLALGLATHYSISEHLDLVDERLAKLVTDDPSVIDSSL

SEQ ID NO: 311989 - protein, 67 aa, Zea mays
  unsure (1)..(67): unsure at all Xaa locations
  Clone ID: MRT4577_47587C.1.pep
IYPYAHTLCGHEYSAVGGDENSIKFYRCALQVDERHYNAWYGLGVVYXRQEKFEXXEHXFRRAXXIN

SEQ ID NO: 311990 - protein, 101 aa, Zea mays
  Clone ID: MRT4577_47588C.1.pep
ASEKGVVTGALYGVGGCGSRRAGLGVRWDEQKLDRGAPAGGVRRLRGLRCVRPDLRKPRSSSACAALRDRSRDVKGTGRGRASTGGPGGCPCAIGGSDEHW

SEQ ID NO: 311991 - protein, 64 aa, Zea mays
  unsure (1)..(64): unsure at all Xaa locations
  Clone ID: MRT4577_47589C.1.pep
YLLSTYLSPTDSSLCXKPGFQPYRIQQAISIDILPLSPXSYNISLTLLQQTPLVHIFTQNIHCP

SEQ ID NO: 311992 - protein, 71 aa, Zea mays
  Clone ID: MRT4577_4758C.1.pep
LRKKKKKKHPSDCLIYSSSRGWRRRPISVAADDFLDARRTRAVSNPTKSQSAKWKQHLKLTSRRKMEQQST

SEQ ID NO: 311993 - protein, 89 aa, Zea mays
  unsure (1)..(89): unsure at all Xaa locations
  Clone ID: MRT4577_47590C.1.pep
KKEXXVXXVVPPPGXAKKXKKKTYTKPKKIKNKHKKVKLSGLQKYKVDDATGKETXRLRKEGPNTECGAGRYMDNHFNPHYXGKCGVTY

SEQ ID NO: 311994 - protein, 59 aa, Zea mays
  Clone ID: MRT4577_47591C.1.pep
DHRLALKASLRSHTSTEDRIMVNSEPIDHYYPFFQPRWLALQNGQVVSTHYDIRCPPQT

SEQ ID NO: 311995 - protein, 97 aa, Zea mays
  Clone ID: MRT4577_47592C.1.pep
DNHPFFFFLAGEVFATRRWGELVRRPGNMPTGASGCVLTLCGCEKSEFQRRPGPSSGCRRGRGYQCPLYVYRIRSFATLRLCVSIYKHINKHINQPK

SEQ ID NO: 311996 - protein, 388 aa, Zea mays
  unsure (1)..(388): unsure at all Xaa locations
  Clone ID: MRT4577_47593C.1.pep
MDLPSLAVVLRAALSHVPEERKAAEESLNQFQFTPQHLVRLLQIIVDGSCDMAVRQVASIHFKNFIAKNWSPNDPDESPKVLESDKAMVRENVLGFIVQVPPLLXLGESIKTIIHSDYPEQWPSLLHWVSHNIDLQNQIFGALYVLRVLARKYXIENSAPLFDPNVFNAWMVLFINLLERPVPVEGQPMDPEIRKSWAWWKVKKWTIHILNRLYTRFGDLKLQKPESKAFAQMFQKTYSGKILACHMQLLNAIRGGDYLPDRVINLVLQYLTNSVTKNSMYQMMQPQIDILLFEIIFPLMCFNDNDQKLWDEDPHEYVRKGYDIIEDLYSPRTAAMDFVSELVRKRGKNNLQKFIHFIVDIFRRYDEASADLKPYRQKDGALLSIGTL

SEQ ID NO: 311997 - protein, 214 aa, Zea mays
  Clone ID: MRT4577_47594C.1.pep
MAPESDSGSSAPLLRAGSGHRHATGGWRSALFIIWVEVAERFAYYGISSNLISYLTGPLGESTAAAAAAVNAWSGTASMLPLLGAAVADSWLGRYRTIVASSVLYVTGLGMLTLSSMFPTPKSQQCNFTADGRRECPPSSLQTAFFYVSLYLVAIAQSGHKPCVQAFGADQFDVTDPGESSSRGSFFNWWYFGVCGSATVTVAIMNYVQDNVSW

SEQ ID NO: 311998 - protein, 146 aa, Zea mays
  unsure (1)..(146): unsure at all Xaa locations
  Clone ID: MRT4577_47595C.1.pep
SKAHDGMTDAXAIGSAMRQDAVNKAKAFDEKHQFRANASARINSFDKRVGLSEKINNGISVVNERVKSVDQRLHVSDKTMAALLAAERKLNDTGSAVKTNRYVSAGTSWLNGAFSKVAKAGHVAGSRTREKFQLAVSNLTAKVSDN

SEQ ID NO: 311999 - protein, 99 aa, Zea mays
  Clone ID: MRT4577_47596C.1.pep
AVQPNDGASDVVADIDHESGESAVAVDTSLDDVVEEIGVDCGANRGTDEDEEADGEGSRRNGDYGSEIHVPLLNVGHGRDLSARERSEGAVSETTTSVV

SEQ ID NO: 312000 - protein, 122 aa, Zea mays
  unsure (1)..(122): unsure at all Xaa locations
  Clone ID: MRT4577_47597C.1.pep
CGSGSGFPGWAPGSGLYCNWQLNGRGGFLLLGGPQLVKFDPAANLAAGLFGRGELCSPQYLGGKVGFWDFFGTLVFQGLGWGGHKGVFRFLDGGGGAQGVFFCLGRVVFFFIIKXKPPXGRS

SEQ ID NO: 312001 - protein, 63 aa, Zea mays
  Clone ID: MRT4577_47598C.1.pep
LRSLHGGSWGQCGIVCQGGEPCSVARESTGTVDVCGDGVPRHVVCLGLPCKVKTRFESSTSRN

SEQ ID NO: 312002 - protein, 36 aa, Zea mays
  Clone ID: MRT4577_47599C.1.pep
SRRAWVASVSCYKSGTGRITEPTYRHRRGSRRRESV

SEQ ID NO: 312003 - protein, 211 aa, Zea mays
  unsure (1)..(211): unsure at all Xaa locations
  Clone ID: MRT4577_4759C.1.pep
IGYLEAGRDLRLLAPLPALRIHRSPHFPRPRRXEAPQKRCEAPGIPXARRPALTNGSGRRRRRCRWATSPXPPSPRXESPTPXSPGGQHAGPSPRPLTSPRSPPPAPPPPPSRPRPSLPQPLSSRRSAAWSNRQPSPQFTAGPPGLKRGGGGTPPPPTTRARNRSLPRRAAPLLGNLQGPTAGKRILGPSPHQFPVMKVERSGPLQAHPTY

SEQ ID NO: 312004 - protein, 74 aa, Zea mays
  Clone ID: MRT4577_475C.1.pep
LHRPHTNAAGNPQRLETRITAGRSKLRLLLVVSQHQPLAGYYEYAMKISLTSEVKSLHFQGYAAITQEITTIWL

SEQ ID NO: 312005 - protein, 100 aa, Zea mays
  Clone ID: MRT4577_47600C.1.pep
KKKPPRGGRQTDGTETGEDSTDKHAEATRYLPKLACRPMTKVNARGLQKVQHNTSTQAPGTPVVRASSDTAPGADKVMSLDTSTRRVHIWTQRALRAQGR

SEQ ID NO: 312006 - protein, 44 aa, Zea mays
  Clone ID: MRT4577_47601C.1.pep
GSIKRTQFRTGYGNPNKIRKLSHTCSQLPYPICIKAQLVTKLTY

SEQ ID NO: 312007 - protein, 119 aa, Zea mays
  Clone ID: MRT4577_47602C.1.pep
PTILGFTEERVRRNMEFLMRVVGLEVPYIARRPALINYSIDRRLLPRNCLINFLRAKGLFNDEASFLSVAAIGDEKFRRRYVHPYEEDFPGLAAAFASSCAGEHQWERLYKMTGENKES

SEQ ID NO: 312008 - protein, 128 aa, Zea mays
  unsure (1)..(128): unsure at all Xaa locations
  Clone ID: MRT4577_47603C.1.pep
PTLMLNFSFGXPIKPYERPLMMPGVMPPITIMPMPNMMPSIMVPTMMSPITIVIMMPPMMIPNMVLPYMMPNMIPFTMTPSMKPPIMISSMIPPIYDXTFVSSMIMPXLLTVPQCYSDXIFYIIHKQQ

SEQ ID NO: 312009 - protein, 85 aa, Zea mays
  Clone ID: MRT4577_47604C.1.pep
MVLFSFQIEEMHRELCSLVICFIPPMSTPQPPGSVFRSFVQSLVLKARGGDHRMVVNGTFNDTVLISLYTVILHLLTKKKKKKGP

SEQ ID NO: 312010 - protein, 82 aa, Zea mays
  Clone ID: MRT4577_47605C.1.pep
QQTSADHSSMNSSLGHWHGNPCLSSYFLKRLALFMGFRCLYLMYMLPSADLPPFLMCSATCFFVVPLRDSDASSCVVSPHLF

SEQ ID NO: 312011 - protein, 65 aa, Zea mays
  Clone ID: MRT4577_47606C.1.pep
GDHANHKSFFGGHKGGKTALCIGGGTKPYRGFLRGHKKKGQNFVKAKPKKVFKFTKIAFFLRNQS

SEQ ID NO: 312012 - protein, 114 aa, Zea mays
  unsure (1)..(114): unsure at all Xaa locations
  Clone ID: MRT4577_47607C.1.pep
MGQPGMDSVPGKENNGIAPNLNGVVSPAKQQLEGKEALRYANILRSRNKFADAINLYTIVLEKDGTNVEALIGKGICXQAQNLPRQAIECCTEAVKIEPGNASALTHXGMIYKD

SEQ ID NO: 312013 - protein, 77 aa, Zea mays
  unsure (1)..(77): unsure at all Xaa locations
  Clone ID: MRT4577_47608C.1.pep
SHIYGPVRSERRNDGRYLLDSRLPLPRVQSLSIXLPRVSNTFSTVLWTREALSFILSGRVGFQSDILSGGSANLSLL

SEQ ID NO: 312014 - protein, 114 aa, Zea mays
  Clone ID: MRT4577_47609C.1.pep
RQRSVLAYLRDSKLLPFPTAAVAPPPHSVDTMREIISIERGEPRHTCNPFSMLLLALLKNASQLAKVRYTRVTLIIFSSTEKRLPELHPCLQSRHHTIEQHQHPIYTHFQELNP

SEQ ID NO: 312015 - protein, 53 aa, Zea mays
  Clone ID: MRT4577_4760C.1.pep
NLAPRRGFFNLACPVKGSRVFLKKKKKKKKKKKKKKKKKKKKKKKKKKKKKKK

SEQ ID NO: 312016 - protein, 77 aa, Zea mays
  unsure (1)..(77): unsure at all Xaa locations
  Clone ID: MRT4577_47610C.1.pep
DRDRVVEARGELHRMLNEDELRDAVLLVFANKQXLSNAMNAAEITDKLGLHSLRQRDWYIQSTCATTGXEGLYEGLD

SEQ ID NO: 312017 - protein, 98 aa, Zea mays
  Clone ID: MRT4577_47611C.1.pep
FHGDSEIDQLFRCFRVLMTPTEETWPGVSKLPDYSDTFPSWTNYNLPSQVKNINSEGIDLLGQMLMYDPSQRITAREAVKHQYFDDLDKSTLPFNYDE

SEQ ID NO: 312018 - protein, 71 aa, Zea mays
  Clone ID: MRT4577_47612C.1.pep
SSSSSSTKLKTLSICLVKVVHITTTVQEKTKSWKETSRSSRTTTSSRCGLAATPSQLPVKAPIFTAFRLAL

SEQ ID NO: 312019 - protein, 820 aa, Zea mays
  unsure (1)..(820): unsure at all Xaa locations
  Clone ID: MRT4577_47613C.1.pep
MVVVDASEFGAEGFDPKRWINAALDARHPSEPLDRFLADAEERLRSAADDAAAALERDSGDALRRVPLACRDALRLRDDAVALRSHLASVLQSLSLAEGSSAESIAALARIDTVKQRMEAAYTTLQDAAGLAQLSQSVEDVFSSGNLPKAAETLATMRHCLSAVGEVAEFANVRKQLEVLEERLDEMVQPRLVDALSNRKVDAVQDLRGILIRINRFKSLEVQYTKIHVKPLKKLWXDFELKQRSSKVDMEKLSGESISGLSFSSWLPNFYDETLLYLEQEWKWCLTAFPDEYKSLVPKVLTETMSELNSSFVSRINIATGDVIPETRSIAKGILDVLSGDLPKSTKLQNKHLQALIELHNMTGTFARNIQYLFSESDLAVVLNTLKAIYSPYETFKARYGQMERAILSAEMTSIDIRGAVPRGVGAQGIELSETVRRMEESIPEMIVLLEAAVERCISLTGGSEADELVLALDDVMLQYISNLQETLKSLRIICGLDSDALKKDAGLEKKEVQRLVDVSEEEEWSIVQGALQILTVADCLTSRTSVFEASLRATLARIGTNFSVSGFGSSLDKSPAATADENADLSFAGRAALDIAAIRLSDLPDKSKKFLTVLEQSKDPRFHALPLTSQRVAAFSDTVNELVYDVLISKVRQRLSEVARLPIWSSVEEQGGLPLPSFSAYPQAYVTSVGEYLLTLPQQLEPLAEGISGNEAGNDEAQFFATEWIFKVAEGATALFMEQLRGIHYITDRGSQQLAADIEYLNNVLSALSMPIPPFLSTFHACVSTPRDQVRDLIKSDGASQLDLPTTHLVCKIRRITLD

SEQ ID NO: 312020 - protein, 185 aa, Zea mays
  unsure (1)..(185): unsure at all Xaa locations
  Clone ID: MRT4577_47614C.1.pep
MMSQAAMQAEKAVGHGDNATTTQDVTNPGNNEAWADNSEKMKALAWFGKNDVRMVETPKPKVIEPRDVIVKVTGSTVCGSDLHLLHGSVVEMQKGDILGHEFCGVVDECGSEVTKFKKGQRVVASFQIACGECYYCKQKLSSQCEKTNSNTIENTMYGGRTAGMFGYSHFTXGFAGGQAEYTRVP

SEQ ID NO: 312021 - protein, 87 aa, Zea mays
  Clone ID: MRT4577_47615C.1.pep
PARGRTCGCAPPILAHDAAMPCFGLDQVSYHHCQALSPYYVWSHNASVGSLNLLHHDDDATAAQDGASAWDIWSLKQLFMLAACGAY

SEQ ID NO: 312022 - protein, 43 aa, Zea mays
  Clone ID: MRT4577_47616C.1.pep
LTYGLYSFHRGNSQRSQLMMRTRIAAQGFTVAAILLGLAVTAM

SEQ ID NO: 312023 - protein, 175 aa, Zea mays
  Clone ID: MRT4577_47617C.1.pep
LVMIPLDIMMCQLRIVPNYPRGMFPPCIFGGGQSKQTCNFCKNKTPLSPFACYTETFFRPKLLGLKLLSVAPNFFLFLFSGWLKMGPRSAKTGEFFFQCRNWAKKHLFPPLLDLISGKRGLCGPVTLGPKLQKRICAGPLPPERNAIWAEKKKKKKKKKKKKKKKKNSRGEPGYP

SEQ ID NO: 312024 - protein, 67 aa, Zea mays
  Clone ID: MRT4577_47618C.1.pep
ADEAVRRRYATVDVARVQYRMSCTVQLKVQCFNGPVKLRRRRHEVILSLILVGSNSIDQRKCLCIRT

SEQ ID NO: 312025 - protein, 215 aa, Zea mays
  unsure (1)..(215): unsure at all Xaa locations
  Clone ID: MRT4577_47619C.1.pep
MLRRAAPSLAFWRWRPQDNDAGRKLAAQLLLQPLSHTSLAVPDRIAQQRATQVSFPRGRTRYLFDGTRHRDAISWNAVVSGHARHGNVPDALDTAARMHSSGVPFTEATFASVVGACARGRMFCAGTQAHGQVIKSGCEGFAVTGASLLDFYSSCFDLRATRTLFESLRPKNELLWSPMGXALVXVRLLAXXLDLLQNTPXXRDXVAWTAVISGY

SEQ ID NO: 312026 - protein, 115 aa, Zea mays
  unsure (1)..(115): unsure at all Xaa locations
  Clone ID: MRT4577_4761C.1.pep
GEKKKGAKKRALGEFRKQRFRQQKNRNQTTGGDNGRGGFKKKTGGNKRATTQQERHQGNTKKGGQGGAASPRKKLAQDPGAGEENPGPQRGLGGVHQXWGALSPPGXPLXGGFGG

SEQ ID NO: 312027 - protein, 77 aa, Zea mays
  Clone ID: MRT4577_47620C.1.pep
SLCESWLACKVRPAIRAGTHTARTDTRGKGNLAHRYSRWHLLPAKDAALTHPKQLTPRRGSVLRRRAGGKGRAGHAT

SEQ ID NO: 312028 - protein, 66 aa, Zea mays
  Clone ID: MRT4577_47621C.1.pep
LHSLSHSCSGSRHSIWSLDPMGLVAMISSDLRRNTDGPYCLDEGKCRLAIDWSHDDCFIYVAHHCL

SEQ ID NO: 312029 - protein, 90 aa, Zea mays
  Clone ID: MRT4577_47622C.1.pep
TCRVVKIHHCNEQLKTTSMRTACYGQTGPLKHNMPPRPENIYCQVFLKTDSLRYDKENSHEIHLKNTYTLMITPALWLIEVILTLQRKKH

SEQ ID NO: 312030 - protein, 52 aa, Zea mays
  Clone ID: MRT4577_47623C.1.pep
GGRGLGYLPRHLVGEDLTTDSTKKCLGDWGTSVLSRIARIEPIPSSYAYVMP

SEQ ID NO: 312031 - protein, 124 aa, Zea mays
  Clone ID: MRT4577_47624C.1.pep
MEKEPLDMVETSVRVIETHVDIIRSLVTDGVVDTSEPESVYTLKTTLFQIGDVCDMLEKCALSIKKYADSKRAKIIQDEALQYAEDDEAADDLVALPSPDLLTQADILEKYFGIEYDSDQSRGC

SEQ ID NO: 312032 - protein, 39 aa, Zea mays
  Clone ID: MRT4577_47625C.1.pep
GNEGLDKTFLCLAQGSRRIAALVFSYYNQSCFYCIQVFP

SEQ ID NO: 312033 - protein, 159 aa, Zea mays
  Clone ID: MRT4577_47626C.1.pep
VYLYSTYIEKNKRHSIQHHCQSGLASKWGCLNYSLQGNLLFFAFIVLIWVFSQVEGLMKLMEGEHVGPFNLGNPGEFTMLELAKVVQDTIDPNARIEFRQNTQDDPHKRKPDIGRAKELLGWEPKIPLREGLPLMVTDFRKRIFGDQDTAAATTGNQQG

SEQ ID NO: 312034 - protein, 67 aa, Zea mays
  Clone ID: MRT4577_47627C.1.pep
GHGKAYFLKNDIPLGTRDFKLQNRSGAHRKTGYTCADVYRTPLGNCKLQEHTAYKEGLKGTQMKTCH

SEQ ID NO: 312035 - protein, 142 aa, Zea mays
  unsure (1)..(142): unsure at all Xaa locations
  Clone ID: MRT4577_47628C.1.pep
PRVRFVAQALRKEPLTVYGDGKQTRSFQYVSDLXVYLYSTYIEKKIRDTRFNITARVPDLIFFFRWLSGLAXVEGLMKLMEGEHVGPFNLXNPGEFTMLELAKVVQDTIDPNARIEFRQNTQDDPHKRKPDIGRAKELLGWE

SEQ ID NO: 312036 - protein, 119 aa, Zea mays
  unsure (1)..(119): unsure at all Xaa locations
  Clone ID: MRT4577_47629C.1.pep
TAVIVQRDHRGELPKREHRVHEGRREGHALAARPARPVQLLPRQAHPPVALRQDNRSCEPGPRMLSKTSNCPRVLAYTTNLWLDLAEGVMEPFMXELLCLYVRSSIHIERCVVLLLPAP

SEQ ID NO: 312037 - protein, 56 aa, Zea mays
  Clone ID: MRT4577_4762C.1.pep
GPPRAAPLMKGGLKHRSTLRAATLEKAKLDLYQRIKKIMPQLATGGGGGDVGKRIG

SEQ ID NO: 312038 - protein, 104 aa, Zea mays
  Clone ID: MRT4577_47630C.1.pep
MIPKNDRIRFPKCKITSKQESIKNVGRGGRGKGACRARTSGSQGGGRAWMKKELATCGARTFGSWGPIGGRGGSCKGTISGRGWSASRAAAIALRDGGDIKQEA

SEQ ID NO: 312039 - protein, 86 aa, Zea mays
  Clone ID: MRT4577_47631C.1.pep
YFARFLGSSNRGACVFKATIIMFLRNDALNLDKAACPAHLGLTPDRAGTWTNEKKAGGQPRFIQTLSPRADKRRLHRQSEGARHWG

SEQ ID NO: 312040 - protein, 149 aa, Zea mays
  Clone ID: MRT4577_47632C.1.pep
KYPPFYRHGGTPNINHPLLLQTPPPSESPDALSSERIEQNEDLAVVRSSRRFTSRSGARRRRGVSVRAARTAGTQEAAARRARPLWVVVVVVVVVSAPRSWRQHRAAVKPNITVSATKDDAMAAESGCGCGCGRAWWSSLLALRSEGRR

SEQ ID NO: 312041 - protein, 63 aa, Zea mays
  Clone ID: MRT4577_47633C.1.pep
GDTPYQLTITKRRNWAGLDLIPTQNCQPTVGPTSPILGPGPPQSGGASNYMRPETHRGSPQPR

SEQ ID NO: 312042 - protein, 118 aa, Zea mays
  Clone ID: MRT4577_47634C.1.pep
MASSSIALTVMFGFTAALCCLQLLGADTTTTTTTQSGLARLAAASLVPAVLAALTLTPLLAFARVHARAGAEGALVSGLAKATLLAGTVALVAAAVVQLGADGHLDRGRDDVARLNVK

SEQ ID NO: 312043 - protein, 112 aa, Zea mays
  Clone ID: MRT4577_47635C.1.pep
GINSMDIRSSFNSSLRAKILIRVLVVQVHMANRAGKAGGYIAPHTSSPSHNDNTQHNNPSSSLDPPASPRLHPEFSHSDWLLLAYKIREIRPYFYITNLSNIFSQPEELCCV

SEQ ID NO: 312044 - protein, 34 aa, Zea mays
  unsure (1)..(34): unsure at all Xaa locations
  Clone ID: MRT4577_47636C.1.pep
IGNNIDRYERYSYAXKDLISIESEIHVNICHNDR

SEQ ID NO: 312045 - protein, 81 aa, Zea mays
  Clone ID: MRT4577_47637C.1.pep
PLGGLMKICLCGPLTPAPVQPFFVAKGGGPRGGGLGGFGPQVFLYWDARSSGRVSFAVSASFSFVPVVPENFIFFHFDFPL

SEQ ID NO: 312046 - protein, 72 aa, Zea mays
  unsure (1)..(72): unsure at all Xaa locations
  Clone ID: MRT4577_47638C.1.pep
LTPNPQNXSSIAQCXXFPVXPQSRXXLRFVXMPTDLXPIVSILFHVWSVCWSVNVWQWLGHVXVLACCXLCS

SEQ ID NO: 312047 - protein, 38 aa, Zea mays
  Clone ID: MRT4577_47639C.1.pep
RVVRAPLKKVPQIKGKVDIDQSYRGIRHVQCLQKTETN

SEQ ID NO: 312048 - protein, 53 aa, Zea mays
  Clone ID: MRT4577_4763C.1.pep
AWSAGSGRSPRTPPCTRTAASSPPSRRRSSPSVAVAGPFTLQRALLHRQRCVA

SEQ ID NO: 312049 - protein, 77 aa, Zea mays
  Clone ID: MRT4577_47640C.1.pep
CWYHAGSWSSCWSGQLKSSHGIGKRLWFSEGPTHRPSRSLCLSPEHWNPSLIDGGHPPPFMPPPGTSYKNGIKKRGG

SEQ ID NO: 312050 - protein, 257 aa, Zea mays
  unsure (1)..(257): unsure at all Xaa locations
  Clone ID: MRT4577_47641C.1.pep
MWTRALATMLFVAGAALLGVGGASAQQGVWSIITRPMFQSMLSHRGDSGCQGAFYTYDAFIEAASKFPGFGTTGDEQTRRRELAAFFGQTSHETTGGWATAPGGPFAWGYCRVKEQNPTDPPYYGRGPIQLXLMSTTTGSPGXLNLNLVGNPDLVASDPVVAFKTAIWFWMTPQSPKPSCHAVMTGAWTPSATDRAAGRLPGYGLTSNIINGGLECGKGQSTDGAKDRVGYYKRYCDMLRVGYGDNVPCKDQKPYGG

SEQ ID NO: 312051 - protein, 75 aa, Zea mays
  Clone ID: MRT4577_47642C.1.pep
PLDAQRHKRTPKARVQRRVTYGTLGVIIHTKLTPKPLHGSNGDHLWNTLVPYPHYPYVCWLLICLEVLAWIFNRT

SEQ ID NO: 312052 - protein, 143 aa, Zea mays
  unsure (1)..(143): unsure at all Xaa locations
  Clone ID: MRT4577_47643C.1.pep
AAGPPYYXRGPIQLTHKYNYRLAGQALNLNLVGDPDLVARDPVVAFKTAIWFWMTPQSPKPSCHAVMTGDWRPSATDRAAGRLPGYGLTTNIINGGLECGEDRSTDGAKAAKDRVGYYKRYCGMLGVGYGDNVPCKDQKPYGG

SEQ ID NO: 312053 - protein, 145 aa, Zea mays
  unsure (1)..(145): unsure at all Xaa locations
  Clone ID: MRT4577_47644C.1.pep
MWTMALATVLLFVASAALLGVGGASAQHGVWSIITRPMFQSMLSHRGDSCVRGAFYTYDAFIEAVSKFPGFGTTGDDATRMLMLADFFSQTYHETTVGCATAPVGPLAWGYCRVKEHNPTDPPYFGLGPIQLXLMSTTTCSPGKR

SEQ ID NO: 312054 - protein, 147 aa, Zea mays
  unsure (1)..(147): unsure at all Xaa locations
  Clone ID: MRT4577_47645C.1.pep
NNGADRRVLWTIALATLLFLVAAGLLWFCFSSSQHFLWSIITRPMFHIMLSHRGDSGCQGAFYTYDSFIEAASKFPVFCTTVYEQTRMLXLAAFFGQTSHXTTVGWATAPGGPFAWGYCRVKEQNPTDPPYYGRXPYSLLMSTTTCS

SEQ ID NO: 312055 - protein, 69 aa, Zea mays
  Clone ID: MRT4577_47646C.1.pep
GGNSLGPGERHPGLPRFCPGPGQAPAAVIGGFQLKNPLLPARGGQESAWIPHFPPRNRAFLQQLQFHSC

SEQ ID NO: 312056 - protein, 42 aa, Zea mays
  Clone ID: MRT4577_47647C.1.pep
HLFRSPMEEIIPHPHLQRTRRPCNRRRHGDGAAIDDRRLPGL

SEQ ID NO: 312057 - protein, 168 aa, Zea mays
  unsure (1)..(168): unsure at all Xaa locations
  Clone ID: MRT4577_47648C.1.pep
WTRALATVLFVAGAALLGVGVGGASAQQGVWSIITRPMFQSMLSHRGDSGCQGAFYTYDAFIEDASKFPGFGTTGDEQTRRRELADFFGQTCHETTGGWATAPGGPIVFXYCRAKEQNPTDPPYYGRGPIQLXLMRTTTGSTGXMNLNHEGNPELVVSDPEVNFKTDI

SEQ ID NO: 312058 - protein, 132 aa, Zea mays
  unsure (1)..(132): unsure at all Xaa locations
  Clone ID: MRT4577_47649C.1.pep
KADPRVGLARCCYGCFELFAGPTAPAGDGVWSIITRPCSHMLATTAQQXCQGAFYTYDTFIEAASKIPGFGTTGDEQTRRRELAAFFGQTSHETTGGWATAPDGPIAWGYCPVKEQKQTDPPYYGQGPIQLT

SEQ ID NO: 312059 - protein, 144 aa, Zea mays
  Clone ID: MRT4577_4764C.1.pep
PGRVGGHMGGPLASFILSNYRHGSRDWVILVLLAVSSPTALATSDVIQMLADKPTYSTFLKLLHDTKVVDEANQLRTATLLADPDKLAKPMASLPAYKERTAEENHVLLTYYDPNKLDQMKTRTGILPTLLYLTDKKLGLLNYT

SEQ ID NO: 312060 - protein, 259 aa, Zea mays
  unsure (1)..(259): unsure at all Xaa locations
  Clone ID: MRT4577_47650C.1.pep
MWTRALATVLFVVVAGAALLGVGGASAQQGVWSIITRPMFQSMLSHRGDSGCQGAFYTYDAFIEAASKFPGFGTTGDEQTRRRELAAFFGQTSHETTGGWATAPGGPFAWGYCRVKEQNPTDPPYYGRGPIQLXLMSTTTGSPGXLNLNLVGNPDLVASDPVVAFKTAIWFWMTPQSPKPSCHAVMTGAWTPSATDRAAGRLPGYGLTSNIINGGLECGKGQSTDGAKDRVGYYKRYCDMLRVGYGDNVPCKDQKPYGG

SEQ ID NO: 312061 - protein, 259 aa, Zea mays
  unsure (1)..(259): unsure at all Xaa locations
  Clone ID: MRT4577_47651C.1.pep
MWTRALATVLFVAGAALLGVGVGGASAQQGVWSIITRPMFQSMLSHRGDSGCQGAFYTYDAFIEAASKFPGFGTTGDEQTRRRELAAFFGQTSHETTGGWATAPGGPFAWGYCRVKEQNPTDPPYYGRGPIQLXLMSTTTGSPGXLNLNLVGNPDLVASDPVVAFKTAIWFWMTPQSPKPSCHAVMTGAWTPSATDRAAGRLPGYGLTSNIINGGLECGKGQSTDGAKDRVGYYKRYCDMLRVGYGDNVPCKDQKPYGG

SEQ ID NO: 312062 - protein, 64 aa, Zea mays
  Clone ID: MRT4577_47652C.1.pep
AGAQSIRCRHATQLSRLMHTEDGIELTMNVGRAQVISASVCAIEMATRWRVHGRKRLTLLGGGG

SEQ ID NO: 312063 - protein, 71 aa, Zea mays
  Clone ID: MRT4577_47653C.1.pep
MAAWWVGGGRQVGQVAARLVRGSSQVHTRDQLVRSPRQRGFFVVGPAGPLGAAAETRRAWRTRIANRVLLG

SEQ ID NO: 312064 - protein, 258 aa, Zea mays
  unsure (1)..(258): unsure at all Xaa locations
  Clone ID: MRT4577_47654C.1.pep
MWTRALATVLLFVAGAALLGVGGASAQQGVWSIITRPMFQSMLSHRGDSGCQGAFYTYDAFIEAASKFPGFGTTGDEQTRRRELAAFFGQTSHETTGGWATAPGGPFAWGYCRVKEQNPTDPPYYGRGPIQLXLMSTTTGSPGXLNLNLVGNPDLVASDPVVAFKTAIWFWMTPQSPKPSCHAVMTGAWTPSATDRAAGRLPGYGLTSNIINGGLECGKGQSTDGAKDRVGYYKRYCDMLRVGYGDNVPCKDQKPYGG

SEQ ID NO: 312065 - protein, 71 aa, Zea mays
  unsure (1)..(71): unsure at all Xaa locations
  Clone ID: MRT4577_47655C.1.pep
GTKAARKSYPXTLGIKKPHRCGPDSASLREIRIYKNSRKLLIRKSAIERLELQIGEDFKTDLSFQASAVAA

SEQ ID NO: 312066 - protein, 57 aa, Zea mays
  Clone ID: MRT4577_47656C.1.pep
LTRRSQTLLSSRRGHRWSAYSKPNRSDSMRHVHVDRRRKNHDFERAATGKILRRRVR

SEQ ID NO: 312067 - protein, 101 aa, Zea mays
  unsure (1)..(101): unsure at all Xaa locations
  Clone ID: MRT4577_47657C.1.pep
GARAGRTAQRAGARRTTKRRGRHSGENVVGTRKWLVLSLPVSRSDSLGKLGPAFSIRAGCSVGLDFXLIGRALIGAGFLGLQLKIGAXTGCGIRIGSGYGF

SEQ ID NO: 312068 - protein, 98 aa, Zea mays
  Clone ID: MRT4577_47658C.1.pep
WNLFSGFLIPRTRIPVWWRWFYWICPIAWTLNGLVTSQFGDVSETFSDGGVRIADFVEDYFGYHHDLLWVVAVVVVAFPVLFALLFGLSLKIFNFQKR

SEQ ID NO: 312069 - protein, 30 aa, Zea mays
  Clone ID: MRT4577_47659C.1.pep
NTIPKISTFPENRGYTIMHCLYHVRTCIRL

SEQ ID NO: 312070 - protein, 65 aa, Zea mays
  Clone ID: MRT4577_4765C.1.pep
RPTTLPRYLVPSTALLHSPSPSRRCRRFPGGPPLAPQLLVFDRTRPFMIPPRSSHLSCSYSLHRS

SEQ ID NO: 312071 - protein, 94 aa, Zea mays
  unsure (1)..(94): unsure at all Xaa locations
  Clone ID: MRT4577_47660C.1.pep
KKKKKGEEGRRPPPPPLFYFPPPPPLPKKKKKKKPPPRGFFFFFLPPRGVQILPIPERAGPTHQLKSNIPNKKTGLFGXMSLANRGCYYHRTRG

SEQ ID NO: 312072 - protein, 82 aa, Zea mays
  Clone ID: MRT4577_47661C.1.pep
SGVLTCLERIGSHLFLTSGNSCFPALLNPFPLADFYRCTLLLAPNLGFFYDIDLKPPHIDRIVQQVPLLNLSQITGTECQSQ

SEQ ID NO: 312073 - protein, 146 aa, Zea mays
  Clone ID: MRT4577_47662C.1.pep
MAAATTPEEDAASAAAVDAITETTNRFTVNTDAAGADAGPLKLDDVDGNVYSCKRCGTLLAVADDIVSKSFHCKNGKAYLFDNVVNVTVGEKEDRMTITGMYSVSDIFCVGCGEIVGWKYEAAHERSQKYKEGKFVLERYQLLGAE

SEQ ID NO: 312074 - protein, 63 aa, Zea mays
  Clone ID: MRT4577_47663C.1.pep
EEPEIQGRKICSREVIIYISDILCFMIYSKSYITTCLEPMVHFISKRNFNLKQVPVAWSRMKT

SEQ ID NO: 312075 - protein, 59 aa, Zea mays
  Clone ID: MRT4577_47664C.1.pep
EHQPPYIRCAGVIATLVLVVPETKHQNPLMILGEQSLASTEKDSKSLHNLCPAGTATLD

SEQ ID NO: 312076 - protein, 128 aa, Zea mays
  Clone ID: MRT4577_47665C.1.pep
LWRPPAKSTPPWLLFRSPVFSVWSSVWFGPTVILGPTRRGPSLVTSFFFWGSSPPSFFFPCLLAVLFVCPNIWCSQVVFPWFPSFFRPVFRAGAGGRPGGFPPVFFGVGCPGARPCVGLALGLAMPFY

SEQ ID NO: 312077 - protein, 99 aa, Zea mays
  Clone ID: MRT4577_47666C.1.pep
NIIVFLPSNFTLMGSGLGYTCWPAAGGPTTEYWAPDPKGRPTPRGRGRRPTRTRRVWRTGTRPAAASKNGTTPGPAGQAPGEREAGAGKAPPGGSGRGG

SEQ ID NO: 312078 - protein, 74 aa, Zea mays
  Clone ID: MRT4577_47667C.1.pep
SNTERWNVVLVPEKIQRMALRVVILPRASSCLPAEDVHPAEPDCRCIRYEVLGKARAPCNRRTGFSPWPRKNKT

SEQ ID NO: 312079 - protein, 54 aa, Zea mays
  Clone ID: MRT4577_47668C.1.pep
TFMVKFRDEKIESCPSMHLEDHRFYSTLPFQTISPNFFKYIFFFASRHELCVDT

SEQ ID NO: 312080 - protein, 101 aa, Zea mays
  unsure (1)..(101): unsure at all Xaa locations
  Clone ID: MRT4577_47669C.1.pep
LGLGSGKWGXAQQRPGRTXAKRAPGMRARPGTRTLHEARSWASVPSPGPTRPVXASQVARRERCAIDGSPRLAKGQGRIRLRPHPCLADADYGLKPNARYQ

SEQ ID NO: 312081 - protein, 184 aa, Zea mays
  unsure (1)..(184): unsure at all Xaa locations
  Clone ID: MRT4577_4766C.1.pep
GGWFRLWFDPSVLVAPLTRCFAERMTLSYDADADDYRNAPGVXTRVSDFGSTSTLRYLDPNLXTQSNHFHSLSYICYGEFQASSVAXRDLTTXSTRATCRLLTGYMNTLASTLEEAGYEEGRDLFGAPYDFRYGLAGPGHPSQVGSAYLQRLRLLVESACAASGGRPAILVAHSLCGLFALQLL

SEQ ID NO: 312082 - protein, 44 aa, Zea mays
  Clone ID: MRT4577_47670C.1.pep
NKNAGVCHLFTITLLTTVKFGGMKYRLSLPSPDQVTSRESDLIK

SEQ ID NO: 312083 - protein, 40 aa, Zea mays
  Clone ID: MRT4577_47671C.1.pep
DAARRGSPGSRKAPGQGAGPTGAWHGVTRGADAVDREFGR

SEQ ID NO: 312084 - protein, 79 aa, Zea mays
  Clone ID: MRT4577_47672C.1.pep
VPTPMHMPLSYLLALKEAVRYWYEWAVWAVLMEMMLQERGYWVVLIDDNNTNEMMAKPHRMPSFVRCTRSYCAPLQRRR

SEQ ID NO: 312085 - protein, 150 aa, Zea mays
  unsure (1)..(150): unsure at all Xaa locations
  Clone ID: MRT4577_47673C.1.pep
RKWPDLNFQLDTQILDAWYYNRSSLDYDDTVVVEFVDGPPKIFNFTNRALSPXDANMTRXLEKTTRAMVAXGRFRHDAVMEVVFQSMAIWQGDSNTMHLHRHDMFVLAQGLGNYDVARDIVIVVRPSSVDRVNMTSTLVDTVLQSEINDL

SEQ ID NO: 312086 - protein, 57 aa, Zea mays
  Clone ID: MRT4577_47674C.1.pep
AGRILMVFVQSLAGSHVSRFILRPYEVARAPYLCRPWWSSTQSRNMCVVRRFRMLCL

SEQ ID NO: 312087 - protein, 348 aa, Zea mays
  Clone ID: MRT4577_47675C.1.pep
MAAGAVQQSILLTPPATAPGDDPFQLAYVIFRRGIGLDRTSNFFFMEKVDMIIARAWRRFLEKTRLQKLFSRKKNSKPKIDSKKNDDLASEIEDKELYVERIRLETMDLSFGNLFGKVTIQEPTFEEVIVLYRRKSPKGQDDRAIHVKHFKNIPMADMELVLPEKKNPSLTPMDWVQFIVSVVIGLVTLISSLEMPKADFWVVIAILSALAGYCAKIYFSFQQNMATYQNLITQSMYDKQLDSGKGTLLHLCDDVIQQEVKEVIIAYYILMENGKATSDDLDLQCEELIQEEFGLQCNFEVMDAVQKLERLGVITRDSIGRICCVPLKRANEIIGATTEELVMKARQS

SEQ ID NO: 312088 - protein, 104 aa, Zea mays
  unsure (1)..(104): unsure at all Xaa locations
  Clone ID: MRT4577_47676C.1.pep
PPTKSKPPCLRTRPAGGSPNPGKGRGPGSDRGGXKPPPRPGACLGALDPPPGPPAGAPGCDTGTGPLGEPPGGGIAYRPGPGGGGRKSFPPPPGDKRPPKRGPP

SEQ ID NO: 312089 - protein, 500 aa, Zea mays
  Clone ID: MRT4577_47677C.1.pep
MAEANAGKEKKEVVRLERESVIPIMKPKLTMKLAYLIEHQSDREEFLKLCRRVEYTIRAWYHLQFDDMMELFALFDPVHGAKKLEQQNFLPEEIDTLEQNFLSYFFRVMEKSNFNIVNDDEVELAHSGQYLLNLPIKVDESKLDDKLLSKYFKEHRHENLPDFSDKYVIFRRGIGLDRTSNFFFMEKVDMIIARAWRRFLEKTRLQKLFSRKKNSKPKIDSKKNDDLASEIEDKELYVERIRLETMDLSFGNLFGKVTIQEPTFEEVIVLYRRKSPKGQDDRAIHVKHFKNIPMADMELVLPEKKNPSLTPMDWVQFIVSVVIGLVTLISSLEMPKADFWVVIAILSALAGYCAKIYFSFQQNMATYQNLITQSMYDKQLDSGKGTLLHLCDDVIQQEVKEVIIAYYILMENGKATSDDLDLQCEELIQEEFGLQCNFEVMDAVQKLERLGVITRVSSHLFLFLLMVPPDQSIGTFSYRYSAQNNDFCRHVYRARSFCIY

SEQ ID NO: 312090 - protein, 112 aa, Zea mays
  Clone ID: MRT4577_47678C.1.pep
GKEAVDGTAASCTICLGCRQGQYGMSVWHTRRGGSRGSKRPTAGRPGIVSSRRRRYMPHRFLLAQPAACMTGAAELELACSSVPGDIFFFAKSVSFDVPDARAVIHNTRSVA

SEQ ID NO: 312091 - protein, 539 aa, Zea mays
  Clone ID: MRT4577_47679C.1.pep
MGFRGGLRPPVTRVCFVLLCLCASLSEAKRTPQPAPTTGKKQQPPAASSSQQSPAVSYPALPVRAVCLGGWLVTEGWILPSLFDGIPNKDLLDGTQLQFKSALRKTYLTADNGGGGAVVANRTQASDWETFKLWRLNDTTFNFRTSGNQFVGIGASDGIIVATATTPGLPETFQIVRCPFDKNRVRIKAANGYFVQAIATGEVIADYGEPTRWSDFDASVFLMTTVGQQLQGEYQLCNGYGADKAAPLLREHWSTYIVEDDFKFFASSGLTAVRIPVGWWIASDPSPPAPYVGGSLQALDNAFRWAEKHELGVIVDLHAAPGSQNPWEHSSSRDGTQEWGTTDASIAQTVQVIDFLASRYATSPRLLAVELLNEPLAPGATLDSLTRYYRDGYAAVRKHAPAAYVVMSNRLSSGNSTELLWFAGRGFPGAVVDVHYYTVFNSLFGNFTAQQNIDFVRTNFSGELAAVTTRDGPLTFVGEWVAEWKVPNATKEEYQKYAAAQMNVYGQATFGWAYWTAKNANNHWDLEWMIRNGYISLKG

SEQ ID NO: 312092 - protein, 129 aa, Zea mays
  Clone ID: MRT4577_4767C.1.pep
DDFMDGGSSSHDGSSVVVGQDYCPRRSRKLSGSRRAWERANNETDQADGGYDVILVSDVPYAANSLKKLHALISKCLRPPYGVMYYVASKKSSVGSNGGARQLRALMEEGGVLGGHLLTERCTYIPRGV

SEQ ID NO: 312093 - protein, 48 aa, Zea mays
  Clone ID: MRT4577_47680C.1.pep
FNVIELKYLELVFLMCHCSVPWYGFFGDIEFVKYCFSVSYIRNFWFFL

SEQ ID NO: 312094 - protein, 130 aa, Zea mays
  unsure (1)..(130): unsure at all Xaa locations
  Clone ID: MRT4577_47681C.1.pep
AATYTQKALDFGRVANQKGXVLDWVKKLHQEKQLGTMVDKDLGSSYDRVELEEMVQVSLLCTQYHPSHRPRMSEVIRMLEGDGLAERWEASQNVDTPESVSSELLLQKYMDFAADECSLGLEAMELSGPR

SEQ ID NO: 312095 - protein, 94 aa, Zea mays
  Clone ID: MRT4577_47682C.1.pep
TMRYTAHQQCSCCSTSRCTSLRLILRNPPDHLPRGTDTFPSVEVPPVIPRHPLPPGRPTLTDHYLWLHSGPCIFYAFMSLYFLVLIINKLAWNG

SEQ ID NO: 312096 - protein, 388 aa, Zea mays
  Clone ID: MRT4577_47683C.1.pep
MASPELPGAKRNNVLVPPSPLLRLNDDLLADIFLRLPTLADVGRAATTCASFRRVVADSTFLRRLRSVHPAPLLGLLLFSSVHPAEPPHPSAPYARALQRAADLSFSFVPCAGRWIPIDARDGRVLLESETMGGDFAVCDPVSRRYLFLPRIPGHPAAQRCRRLEPFLVPASNEEPETSLRVVCVAERKPGQLVAFVFSSDTGRWGSLTVDVSVPPSCKFSWSSYGFGSCYWKVTGSNKLLGLDTRSMVFSSFDIPSGYGQQDSVIVEAAEGRFRMFTLHNSMISAASYLVHAVRVIREEGNNLWQVKRRVRLPSQYIFSFADATDKHLLLRGIPWNLHLEPSTPGADIGYFSVEFESMQVEKICGIRNLLYAKLYTGFPPSLSLPSI

SEQ ID NO: 312097 - protein, 74 aa, Zea mays
  unsure (1)..(74): unsure at all Xaa locations
  Clone ID: MRT4577_47684C.1.pep
LDCLVHAALSFLRTSNNLWELITNASSEAMDXLIQQLXSWDTGKRPTAEQALQHPFFNVXAIAXPRPVHEAYHT

SEQ ID NO: 312098 - protein, 39 aa, Zea mays
  Clone ID: MRT4577_47685C.1.pep
GASLHHIRSRDKRREAFWQAVIKLSLCMGKLVMLQNKFV

SEQ ID NO: 312099 - protein, 138 aa, Zea mays
  Clone ID: MRT4577_47686C.1.pep
LCVLRDARILENTIISTLRSMAVASTTSVEERPRWRPPTPALPRFGRRPTMAARTGCPPIYTNAVVDSPPPSALLMSSPALLPQRRHVGEAAARRPGLRPIKNEADLPNVSHDSGQFSSDEEKEDPTRPRTRGRTRGR

SEQ ID NO: 312100 - protein, 61 aa, Zea mays
  unsure (1)..(61): unsure at all Xaa locations
  Clone ID: MRT4577_47687C.1.pep
MPSKLDPSQVVDVFLRITGGKVRAASCFAFKIWQICLYRLKIVKDINMETYKDWXGLHVTV

SEQ ID NO: 312101 - protein, 457 aa, Zea mays
  Clone ID: MRT4577_47688C.1.pep
MDMNNGWLGFSLSPSAASRGGYGYGDGGGGASASACGDGEGSCPSPAAAASPLPLVAMPLDDSLHYSSAPDWRHGAAEAKGPKLEDFMSITCSNKSSGRSLYDSCGHHDDEQASKYHEVHGIHPLSCGSYYHGCISSGGGGGGGIGLGINMNAPPCTGGFPDHQHHQFVPSSHHGQYFLGAPAASAGPPAGAAMPMYNAGGGSVVGGSMSISGIKSWLREAMYVPPERPAAAALSLAVTDDVPPAEPPQLLPAPLPVHRKPAQTFGQRTSQFRGVTRHRWTGRYEAHLWDNTCRKEGQTRKGRQVYLGGYDREEKAARAYDLAALKYWGPSTHINFPLSHYEKELEEMKHMSRQEFIAHLRRNSSGFSRGASMYRGVTRHHQHGRWQARIGRVAGNKDLYLGTFSTQEEAAEAYDIAAIKFRGLNAVTNFDISKYDVKRICASTHLIGGGDACRRSP

SEQ ID NO: 312102 - protein, 96 aa, Zea mays
  Clone ID: MRT4577_47689C.1.pep
HRQAVTFVIPSRRCKKNIYVHLVVTHRSKLNDRATNLILIQVLIIYAYSTTLEEPCVIGRCGRSAIYATSAGGGMLRSNPTQTASEEAPTRPPTRP

SEQ ID NO: 312103 - protein, 87 aa, Zea mays
  unsure (1)..(87): unsure at all Xaa locations
  Clone ID: MRT4577_4768C.1.pep
LFWPDQPEFVRMAARFGVTIIPFGCVGEDDVLEXCFVNPFVQLNSIYSRTHXAHFSCXLVLDYNDQKNIPGLREWIQSINKEAERVR

SEQ ID NO: 312104 - protein, 52 aa, Zea mays
  Clone ID: MRT4577_47690C.1.pep
APRCPRPSLFVPNPQRFESPSYSILVNYFEITLVNRPKNVWFKKLIFSPGRE

SEQ ID NO: 312105 - protein, 64 aa, Zea mays
  Clone ID: MRT4577_47691C.1.pep
CMSSQTLQSLPALSPLGPNLSNLNYPDPVLYRLPVPASMMLCRQEQPIPLLNVTWLLCSRSWTS

SEQ ID NO: 312106 - protein, 147 aa, Zea mays
  unsure (1)..(147): unsure at all Xaa locations
  Clone ID: MRT4577_47693C.1.pep
CWRQDDTSMRRFPXRELGQEGFFFLDGWYDDFCHDTFTFDDASALAAXVXATRWPLXYKPPQLPMCDGNLDPKQFVLSCEGAICWSGGNTCVMAKPFFWACRIVVQTSSSSFDSGTITFWXKVKDMLVTRFLSSFKRRPGLAHAHAP

SEQ ID NO: 312107 - protein, 93 aa, Zea mays
  Clone ID: MRT4577_47694C.1.pep
VAECQHTARRVIYTPTVHVPPSGELPPPVHIPPPVHLPTPDHLPPTDHVPTTVDMPATPCHYRTEPTRAEANAEAHPCPGQQSYANPFQVYGT

SEQ ID NO: 312108 - protein, 71 aa, Zea mays
  unsure (1)..(71): unsure at all Xaa locations
  Clone ID: MRT4577_47695C.1.pep
CRMRGSLFVQAVFCFEQLMNSSQHIEDSCSTSKQNLCCMCYILRLHNIACHLIRTGQSLELYVGEFSXPAS

SEQ ID NO: 312109 - protein, 103 aa, Zea mays
  Clone ID: MRT4577_47696C.1.pep
LNLLPSAICDCAARQALVNSTNKSTNKQQPSCYQATISNNNNNNDSRETLKGVDALRWSRSDSENSLNHWLLKINLFDQLNSLQHSKQPSLAFAASKTNKNST

SEQ ID NO: 312110 - protein, 47 aa, Zea mays
  Clone ID: MRT4577_47697C.1.pep
VRTPGKKLYLYYLFTERTCDKGFRPLVFDVGEKGYTCTIYLQNEHVM

SEQ ID NO: 312111 - protein, 156 aa, Zea mays
  unsure (1)..(156): unsure at all Xaa locations
  Clone ID: MRT4577_47698C.1.pep
MNQRPRFPATAPAPAPPPAPAPAPAPNPTPTPTPMPMPRPPPPPPPRPTPCPRPPPPPPPIPPPPPPPRPPPPPTPPPAPPPNPPPEPPPSPPPPPPPMPPPPPPPRPPPPLRQRPKRQSRPNGPRPKSGPXXPPLGPRSKPGPRPKPPGPYLESS

SEQ ID NO: 312112 - protein, 79 aa, Zea mays
  Clone ID: MRT4577_47699C.1.pep
DPAPKKILKKLPYGFGGRPKFPSKNREDFFGFSPPFSSKHANGPKKLGRKKIKTLGPPLKKPGGKRFFSHWRPQKRTWV

SEQ ID NO: 312113 - protein, 58 aa, Zea mays
  unsure (1)..(58): unsure at all Xaa locations
  Clone ID: MRT4577_4769C.1.pep
MSKQGGKDKPLKAPNVERNEYDDSDLAXLQKKTDEEKALNELNATAHKGAIGGSGLKR

SEQ ID NO: 312114 - protein, 52 aa, Zea mays
  Clone ID: MRT4577_476C.1.pep
IASLSVILSLQPYYLLDKFTFKLVPASPLSFQQSPSLSFFHSFVQTINSQHL

SEQ ID NO: 312115 - protein, 124 aa, Zea mays
  unsure (1)..(124): unsure at all Xaa locations
  Clone ID: MRT4577_47700C.1.pep
SSRASSSYTICNAKAIIYDNXDCMPDHDTLVLAGKHLDDAKTLADYNIKKESTXHLGLEVQGGXTMIKVKTLIWKEIEIDIXPKDTFHRIKECVEDKEGIRPVKQQLIHAEKRLADDTTIKDYN

SEQ ID NO: 312116 - protein, 76 aa, Zea mays
  Clone ID: MRT4577_47701C.1.pep
LTYHITYRFGINKNDDDHRFTQITEHLMDDALELSFPHNPRILLLITHKYTYTHNQHTKISSGDETMELEQNLTDT

SEQ ID NO: 312117 - protein, 97 aa, Zea mays
  Clone ID: MRT4577_47702C.1.pep
CRDSKKNRCTSMIVRLLSCIRNIGHRWDIFVDSCYGVVGNGPERNHGDSCRSAAKRQDEANEEGEVETRRGRGLLVVPVRVASEQKRCCTPSRYVEI

SEQ ID NO: 312118 - protein, 105 aa, Zea mays
  Clone ID: MRT4577_47703C.1.pep
LPANSSFSKHSLAYMQASAQYIKQVSGLLKVGVTTLRSSSAYEAPQETYSCQLRLKSSPEDDVVPMRPGSGETHVIFPDSLGDDLIIDVSDSTGKSCGRVVAQVA

SEQ ID NO: 312119 - protein, 658 aa, Zea mays
  unsure (1)..(658): unsure at all Xaa locations
  Clone ID: MRT4577_47704C.1.pep
DELIEADSDFVDLVAAHDSSMELVEQRCQVEKPEHFQPTTVVRIPSLRSRSIGKGEKVVVAPEIEAATSKIIKEEERESGQVSWRVYKLYMTEAWGWWGVMGMVSFAVVWQCSDMASDYWLSYETSGGIQFNPSLFIGVYVAIAAFSMVLQVIKTLLETVLGPQTARIFFEKMFDSILHAPMSFFDTTPSGRILSRASSDQTTIDVVLAFFIGLTISMYISVLSTIIVTCQVAWPSVXAVIPLLLLNIWYRNLYLATSRELTRLEGVTKAPVIDHLSETVLGVTTIRCFKKEKEFFHENLDKINSSLRMYFHNYAANEWLXGFRLELIGTLLLSITAFLMISLPSNFIKKEFVGMSLSYGLSLNSLVYFAISISCMLENDMVAVERVNQFSILPSEAAWKIEEHLPSSNWPNHGDIDIKDIKVRYRSNTPLILKGINISISGGEKIGVVGRTGSGKSTLIQALFRLVEPAEGKMIIDGIDICTLGLHDLRSRFGIIPQEPVLFEGTIRSNIDPIGQFSDAEIWQALERCQLKDVVVSKPEKLDAPVADRGENWSVGQRQLLCLGRVILKQTQILFMDEATASVDSQTDATIQKITRQEFSSCTIISIAHRIPTVMDCDRVLVLDAGLVKEFDSPSRLIEQPSLFGAMVQEYANRSSNL

SEQ ID NO: 312120 - protein, 110 aa, Zea mays
  unsure (1)..(110): unsure at all Xaa locations
  Clone ID: MRT4577_47705C.1.pep
GAHQLQQLVLPVINQVAMANRSRYSQQEQXVSFNQLATLNRAAYWXQQLLPFSQLAXTAYYEXRQLLTFNQLAALNPTAELPQEILLSFSQIAVGSRAYFLTQHRGLSLY

SEQ ID NO: 312121 - protein, 55 aa, Zea mays
  Clone ID: MRT4577_47707C.1.pep
GGGVITQSQCRTMAPLKMHGLYLQSITRGVSQELSSGCQNYFWENGTQLNQATRD

SEQ ID NO: 312122 - protein, 176 aa, Zea mays
  unsure (1)..(176): unsure at all Xaa locations
  Clone ID: MRT4577_47709C.1.pep
CSGGGSQNIKASLMLLGLSASAATATIFPQCSQAPIASLLPPYLSPAVSSVCXGPGGQPYRIQQAITAGILPLSPLFLQQSSALLHQLPLVHFLAQNIRGQQLQQLVLANLAAYSXQQGFVAFNQLAALNSACYLRQQQLPFRQVPAVYPQXFLSFNQLAALNFPGYLQRLQLLPF

SEQ ID NO: 312123 - protein, 352 aa, Zea mays
  Clone ID: MRT4577_4770C.1.pep
MKAPSLLVRCFPGLLPSKDTSCVPIVSEKDLQLPSLAVEIIPSKSAHPYKYAGEKVDVQGFDIFKGKVSVADMISFSPSEVASSKYDGALKSWENSITLVNIIRNEIRDGQLSFRGKRVLELGCGSGVSGIFSCLKGASTVHFQDMNAETIRCRTIPNVLANLEQARDRQNRPSEESPVTPSRQLLDPNVHFYAGEWDELPTVLSAVPPPAAPADLSFSEDDFMDGGSSSHDGSSVVVGQDYCPRRSRKLSGSRRAWERANNETDQADGGYDVILVSDVPYAANSLKKLHALISKCLRPPYGVMYYVASKKSSVGSNGGARQLRALMEEGGVLGGHLLTEVCDREIWKFFFK

SEQ ID NO: 312124 - protein, 102 aa, Zea mays
  Clone ID: MRT4577_47710C.1.pep
RHFYVLLVTGPFYSSLLAKRIKELRLRRDQKHLFAPKPPRTKSHSMLNLKRLQSRSAWGSPVVVIVLTPVGSGRLGTHNRAESPRYLRARSRLLTRRGGSAL

SEQ ID NO: 312125 - protein, 70 aa, Zea mays
  unsure (1)..(70): unsure at all Xaa locations
  Clone ID: MRT4577_47711C.1.pep
TRKRPEHKMSSRLVQIKMLFKKPRRKDSPLSQGQAENLRDQRRGQTSCAKKRASYQFELNQKKTKETXPI

SEQ ID NO: 312126 - protein, 225 aa, Zea mays
  unsure (1)..(225): unsure at all Xaa locations
  Clone ID: MRT4577_47713C.1.pep
MVDLRSLLVAGVVLLAGLAVLVHGAGDEQFVYSGFTGAPLALDGTATITPSGLLELTNGTAQLKGHAVHPAPMRFQRTPGGPVRSFSASFVFGIIPPYSDLSGHGIVFFVGRDSFATALPSQYLGFLNSSNNGNFTNHVFGVELDTIQSTEFKDPDNNHVGIDVNSLTSANASTAGYYDDGTGAFHDLTLISAKPMXQVWLDYDGXTAQVNVFLAPLRTPSYLWC

SEQ ID NO: 312127 - protein, 188 aa, Zea mays
  Clone ID: MRT4577_47718C.1.pep
AALPPPPSPGRRTLFLDLDETLIHSQTEPPPSRFDFTVRPVIGGHAVTFYVVKRPGVEAFLRAAADAFEVVVFTAGLQEYASLVLDRLDPDGEVFAHRLYRGACRDAGDGTLVKDLAATGRALDRAVIIDDNPNAYALQPENAVPVAPFVDDDNDQELQRMTAFLDVAAGYEDTRDAIRCYKDLVTAT

SEQ ID NO: 312128 - protein, 69 aa, Zea mays
  Clone ID: MRT4577_47719C.1.pep
PSTHPCSPRSVGQTLLGSKSYQKGATGPTPPTNRRRRSSPPSHPRFILAICTRQDTSPLAPAILIHERF

SEQ ID NO: 312129 - protein, 73 aa, Zea mays
  Clone ID: MRT4577_4771C.1.pep
GWGKLWVGKKMAGRPRSFFITRGPPCLNQSAAGLFVLCPVGNKNSRLRAVFNSSKNECGSPPIPNPNPLDFVG

SEQ ID NO: 312130 - protein, 40 aa, Zea mays
  Clone ID: MRT4577_47720C.1.pep
APVCALSVADLTPFLILSRMPSDMLASLAARVTSMGKKSG

SEQ ID NO: 312131 - protein, 75 aa, Zea mays
  Clone ID: MRT4577_47721C.1.pep
IPLPPGEMHYLVLGGLGVFLFFSCFVFLFFFFPFAFSPFIWRDWEELGTGSWKVDFVNFFSSFPGVGIFFNMCPE

SEQ ID NO: 312132 - protein, 192 aa, Zea mays
  unsure (1)..(192): unsure at all Xaa locations
  Clone ID: MRT4577_47722C.1.pep
VTIDSYEDIPANDEKSLQKAVANQPVSVAIEAAGTAFQLYSSGIFTGSCGTALDHGVTAVGYGTENGKDYWIVKNSWXANPPNPGPSPPSPTPAPAVCDNYYSCPDSTTCCCIYEYGKYCFAWGCCPLEGATCCDDHYSCCPHDYPICNVRQGTCLMGKDSPLLSVKATKRTLAKPHWAFSGNTADGMKSSA

SEQ ID NO: 312133 - protein, 242 aa, Zea mays
  unsure (1)..(242): unsure at all Xaa locations
  Clone ID: MRT4577_47723C.1.pep
MAASTTAAAALLLLLLSLXRGGGXMSIVSYGERSDEEARRMYAEWMAAHGRTYNEDLPESVDWRAKGAVAEVKDQGSCGSCWAFSTIAAVEGINQIVTGDLISLSEQELVDCDTSYNQGCNGGLMDYAFEFIINNGGIDTEKDYPYKGTDGRCDVNRKNAKVVTIDSYEDVPANDEKSLQKAVANQPVSVAIEAAGTAFQLYSSGIFTGSCGQRXRHGVTXVXYGTENXRDYWXREELWGSS

SEQ ID NO: 312134 - protein, 173 aa, Zea mays
  Clone ID: MRT4577_47724C.1.pep
MAASTTAAAALLLLLLSLAAAADMSIVSYGERSDEEARRMYAEWMAAHGRTYNAVGEEERRYQVFRDNLRYIDAHNAAADAGVHSFRLGLNRFADLTNDEYRATYLGARTRPQRERKLGARYHAADNEDLPESGDWRAKGAVAEVKDQGSCGKGASIPISALFLSFFLLLYSC

SEQ ID NO: 312135 - protein, 62 aa, Zea mays
  Clone ID: MRT4577_47725C.1.pep
SQLGAANRASFFTQQQLLPFYQQFGANPPTLLQIQQLLPFVQLVLKDPRASYQKQIIGGALF

SEQ ID NO: 312136 - protein, 481 aa, Zea mays
  unsure (1)..(481): unsure at all Xaa locations
  Clone ID: MRT4577_47726C.1.pep
MAASTTAAAAASVLLLLLSLARGGGLMSIVSYGERTDEEARRMYAEWMAAHGRTYNAVGAEERRYQVFRDNLRYIDAHNAAADAGVHSFRLGLNRFADLTNDEYPATYLGARTRPQRDRKLGARYHAADNEDLPESVDWRAKGAVAEVKDQGSCGTCWAFSTIAAVEGINQIVTGDLISLSEQELVDCDTSYNQGCNGGLMDYAFEFIINNGGIDTEKDYPYKGTDGRCDVNRKNAKVVTIDSYEDVPANDEKSLQKAVANQPVSVAIEAAGTAFQLYSSGIFTGSCGTRLDHGVTAVGYGTENGKDYWIVKNSWGSSWGESGYVRMERNIKASSGKCGIAVEPSYPLKEGANPPNPGPSPPSPTPAPAVCDNYYSCPDSTTCCCIYEYGKYCFAWGCCPLEGATCCDDHYSCCPHDYPICNVRQGTCLMGKDSPLSLSVKATKRTLAKXRTGLSPATQLTAXKSSAXRKRSVALGRQQPG

SEQ ID NO: 312137 - protein, 59 aa, Zea mays
  Clone ID: MRT4577_47727C.1.pep
LGGPTHASTLPGTPRTRQHRVLRDPSTFIEKVLDPTSRRRLCSLVLRTPPTCVRSDDPI

SEQ ID NO: 312138 - protein, 138 aa, Zea mays
  unsure (1)..(138): unsure at all Xaa locations
  Clone ID: MRT4577_47728C.1.pep
RIALGSXQYVYHXGALKAAFAEFISTLIFVFAGQGSGMAFIKLTGGGPTTPSFLIGCWXXHXFXLFITISXAPNISXXHXNPXXTFXPLXGGNITLFRGLLYWVAXLLGSTGACFLLRFSTGRQATGTFRLTGLSVWE

SEQ ID NO: 312139 - protein, 35 aa, Zea mays
  Clone ID: MRT4577_47729C.1.pep
TWQIFHSCYFAGSTAPEGYKSSSAEIRSISSPAGG

SEQ ID NO: 312140 - protein, 151 aa, Zea mays
  Clone ID: MRT4577_4772C.1.pep
KQTAGASSAVAGNGGTPPGSTTTATHTGGGETNGAAAAALAARPALAASSMFAKVHMEGYAIGRKVNLRAQDGYDSLSRTLTNMATNFFCPADCSGAAEKDAPKSDKFIFLYEDFEGDRMLVGDVPWELFLASAKGLYIVRKPSIRRQRSG

SEQ ID NO: 312141 - protein, 457 aa, Zea mays
  Clone ID: MRT4577_47730C.1.pep
SKLASLPVARQRGCPCLHPAAAAAALLLLLLVSLAAAADMSIVSYGERSDEEERRYQVFRDNLRYIDAHNAAADAGVHSFRLGLNRFADLTNDEYRATYLGARTRPQRERKLGARYHAADNEDLPESVDWRAKGAVAEVKDQGSCGSCWAFSTIAAVEGINQIVTGDLISLSEQELVDCDTSYNQGCNGGLMDYAFEFIINNGGIDTEKDYPYKGTDGRCDVNRKNAKVVTIDSYEDVPANDEKSLQKAVANQPVSVAIEAAGTAFQLYSSGIFTGSCGTALDHGVTAVGYGTENGKDYWIVKNSWGSSWGESGYVRMERNIKASSGKCGIAVEPSYPLKEGANPPNPGPSPPSPTPAPAVCDNYYSCPDSTTCCCIYEYGKYCFAWGCCPLEGATCCDDHYSCCPHDYPICNVRQGTCLMGKDSPLSLSVKATKRTLAKPHWAFSGNTADGMKSSA

SEQ ID NO: 312142 - protein, 596 aa, Zea mays
  unsure (1)..(596): unsure at all Xaa locations
  Clone ID: MRT4577_47731C.1.pep
MARGMRKCIIQSQEEYLVEEPIGETSHRPRDAAYDHHPSARERQKESDNGNEFNDLDHHKKDTTSFETTSGVYPSPDDADIEDSVEGETNEAISRGPNKLKHVWNLQKGKRIVVNCNELGQPIGEEAGVLGKFLGMVARNGCLCSLSFKDWRLLIGKKDRNNEQKNKQDVLKQVKMRFLYPARMEKWILRTIEGVLDDQWVALVNNWFTTKSQDISEANRIXLRKKEGDPYIXTKSFARNREDMREQDPEKKYPHRAVLYINTHKSNITKNRNPHVVALKELLVQQPSLADTSHGKVAWKGDALSQILGEEKPGHIHGLGLVPNPDQVFGGSTSRHLKHLNLTSLDATSSEDVVSLRLQVEKLIDRVQKQDDTILNLQNTLELQKSHHECLDEPLSASKDLQPTMNQKINLLDELNSTMADEIEHDGYEELQAQCKKSKIQEKGKPPMPRGGLQGGRVSTSLNVKNRSNAAKVMNQDTARNSSNHEPYKSKGSLENYLPSTKDDQSTSKRKVGSHIFLMSWRNQNKKVALGTIIGCDPKQQVGGDPLGKEFWKVRLGLVLVRDEPLIRPYNNFVVLGDINNDPIAWPSSCIEKAAL

SEQ ID NO: 312143 - protein, 467 aa, Zea mays
  Clone ID: MRT4577_47732C.1.pep
MAAPASTTAAAAAALLLLLVSLAAAADMSIVSYGERSDEEARRMYAEWMAAHGRTYNAVGEEERRYQVFRDNLRYIDAHNAAADAGVHSFRLGLNRFADLTNDEYRATYLGARTRPQRERKLGARYHAADNEDLPESVDWRAKGAVAEVKDQGSCGSCWAFSTIAAVEGINQIVTGDLISLSEQELVDCDTSYNQGCNGGLMDYAFEFIINNGGIDTEKDYPYKGTDGRCDVNRKNAKVVTIDSYEDIPANDEKSLQKAVANQPVSVAIEAAGTAFQLYSSGIFTGSCGTALDHGVTAVGYGTENGKDYWIVKNSWGSSWGESGYVRMERNIKASSGKCGIAVEPSYPLKEGANPPNPGPSPPSPTPAPAVCDNYYSCPDSTTCCCIYEYGKYCFAWGCCPLEGATCCDDHYSCCPHDYPICNVRQGTCLMGKDSPLSLSVKATKRTLAKPHWAFSGNTADGMKSSA

SEQ ID NO: 312144 - protein, 48 aa, Zea mays
  Clone ID: MRT4577_47733C.1.pep
TGLISRLIALITNNAKLNENQSHGPHVVCCCSMVEIKELPFLSLSSSR

SEQ ID NO: 312145 - protein, 50 aa, Zea mays
  Clone ID: MRT4577_47734C.1.pep
YFTVRHVHLNCHIFGKSFVIIILANPDPLLYTRPLDLYLMNSLSVAYSHV

SEQ ID NO: 312146 - protein, 376 aa, Zea mays
  Clone ID: MRT4577_47735C.1.pep
MAISCFNGGAGWPEPVVRVQAVSDTCGDTIPERYVKPLSERPRLSPASDGSGPNIPVVDLSMLDVDATSSAVAAACREWGFFQAVNHGVRPELLRGARAAWRGFFRQPAEVRERYANSPATYEGYGSRLGTAKGGPLDWGDYYFLHLLPASLKSHEKWPSLPSSLRGATEEYGEEVLQLCRRVMRLLSSGLGLEAGRLQAAFGGEGGEGACLRVNFYPQCPQPELTLGVAGHSDPGGMTMLLVDDHVKGLQVRSPDGQWIVVEPVPDAFIVNVGDQIQVLSNAAYKSVEHRVTVSAAEDRLSMAFFYNPRSDLPIAPMAELVGPDRPALYPEMTFDEYRVFIRQRGLAGKAQLESLQVKAAAGGGGCSAAAASSTS

SEQ ID NO: 312147 - protein, 465 aa, Zea mays
  Clone ID: MRT4577_47736C.1.pep
MAASTTAAAAASLLLLLLVSLAAAADMSIVSYGERSDEEARRMYAEWMAAHGRTYNAVGEEERRYQVFRDNLRYIDAHNAAADAGVHSFRLGLNRFADLTNDEYRATYLGARTRPQRERKLGARYHAADNEDLPESVDWRAKGAVAEVKDQGSCGSCWAFSTIAAVEGINQIVTGDLISLSEQELVDCDTSYNQGCNGGLMDYAFEFIINNGGIDTEKDYPYKGTDGRCDVNRKNAKVVTIDSYEDVPANDEKSLQKAVANQPVSVAIEAAGTAFQLYSSGIFTGSCGTALDHGVTAVGYGTENGKDYWIVKNSWGSSWGESGYVRMERNIKASSGKCGIAVEPSYPLKEGANPPNPGPSPPSPTPAPAVCDNYYSCPDSTTCCCIYEYGKYCFAWGCCPLEGATCCDDHYSCCPHDYPICNVRQGTCLMGKDSPLLSVKATKRTLAKPHWAFSGNTADGMKSSA

SEQ ID NO: 312148 - protein, 60 aa, Zea mays
  Clone ID: MRT4577_47737C.1.pep
MRIKVMALMLCVVVQWLRLKSCLFYLQLKSENRSSPKLRSFKLITIILFGLFEYLCHIKP

SEQ ID NO: 312149 - protein, 467 aa, Zea mays
  Clone ID: MRT4577_47738C.1.pep
MAAPASTTAAAAAALLLLLLVSLAAAADMSIVSYGERSDEEARRMYAEWMAAHGRTYNAVGEEERRYQVFRDNLRYIDAHNAAADAGVHSFRLGLNRFADLTNDEYRATYLGARTRPQRERKLGARYHAADNEDLPESVDWRAKGAVAEVKDQGSCGSCWAFSTIAAVEGINQIVTGDLISLSEQELVDCDTSYNQGCNGGLMDYAFEFIINNGGIDTEKDYPYKGTDGRCDVNRKNAKVVTIDSYEDIPANDEKSLQKAVANQPVSVAIEAAGTAFQLYSSGIFTGSCGTALDHGVTAVGYGTENGKDYWIVKNSWGSSWGESGYVRMERNIKSSSGKCGIAVEPSYPLKEGANPPNPGPSPPSPTPAPAVCDNYYSCPDSTTCCCIYEYGKYCFAWGCCPLEGATCCDDHYSCCPHDYPICNVRQGTCLMGKDSPLLSVKATKRTLAKPHWAFSGNTADGMKSSA

SEQ ID NO: 312150 - protein, 570 aa, Zea mays
  Clone ID: MRT4577_47739C.1.pep
TRPKKDTTSFETTSGVYPSPDDADIEDSVAGETNEAISRGPNKLKHVWNLQKGKRIVVNCNELGQPIGEEAGVLGKFLGMVARNGCLCSLSFKDWRLLIGKKDRNNEQKNKQDVLKQVKMRFLYPARMEKWILRTIGERWRQHKSNLKSLHFDAHRSKENNLKNVPEGVLDDQWVALVNNWFTTKSQDISEANRINCAKRKATHTSGTKSFARNREDMREQDPEKKYPHRAVLYINTHKSNITKNRNPHVVALKELLVQQPSLADTSHGKVAWKGDALSQILGEEKPGHIHGLGLVPNPDQVFGGSTSRHLKHLNLTSLDATSSEDVVSLRLQVEKLIDRVQKQDDTILNLQNTLELQKSHHECLDEPLSASKDLQPTMNQKVNLLDELNSTMADEIEHDGYEELQAQCKKSKIQEKGKPPMPRGGLQGGRVSTSLNVKNRSNAAKVMNQDTARNSSNHEPYKSKGSLENYLPSTKDDQSTSKRKVGSHIFLMSWRNQNKKVALGTIIGCDPKQQVGGDPLGKEFWKVRLGLVLVRDEPLIRPYNNFVVLGDINNDPIAWPSSCIEKAAL

SEQ ID NO: 312151 - protein, 112 aa, Zea mays
  unsure (1)..(112): unsure at all Xaa locations
  Clone ID: MRT4577_4773C.1.pep
LWPLTLSMVVRGTPHSRVNKSLPSQGFFTKESSIAVPLKAEAQRLEGVHLPSGCGVSQQKQCARVLKACLAKRRLKPLLGSGEECPSIVTGFLGTITCGQMVVKTTSNLXRX

SEQ ID NO: 312152 - protein, 98 aa, Zea mays
  Clone ID: MRT4577_47740C.1.pep
SVRNREGKIVNLQRGVSPAIEGVADPPTEKSGFTVELARRRAIPCVTVAPNPNWRRGQLPRAKTILPDPTPRAETLQPRRSTAAALLSGFSLSRCYGS

SEQ ID NO: 312153 - protein, 181 aa, Zea mays
  unsure (1)..(181): unsure at all Xaa locations
  Clone ID: MRT4577_47741C.1.pep
MAAPASTTAAAAAALLLLLLLSLAAAADMSIVSYGERSDEEARRMYAEWMAAHGRTYNAVGEEERRYQVFRDNLRYIDAHNAAAXDAGVHSFRLGLNRFADLTNDEYRATYLGARTRPQRERKLGARYHAADNEDLPESVDWRAKGAVAEVKDQGSCGKGASIPISALFLSLFFITILLLK

SEQ ID NO: 312154 - protein, 71 aa, Zea mays
  Clone ID: MRT4577_47742C.1.pep
TKLHFDDNQIDIGTRRQRNTTTRWRQTDGLGHVRRLTAWDFAMGSETRRRTARHDARRREQAWLPWAKWRA

SEQ ID NO: 312155 - protein, 52 aa, Zea mays
  Clone ID: MRT4577_47743C.1.pep
EQYEGIPYYSSVLSCPMRQIPEQEPVQCGPTSSSCLECQAGHAFLVEHLQNL

SEQ ID NO: 312156 - protein, 157 aa, Zea mays
  Clone ID: MRT4577_47744C.1.pep
LAYFSPFIYFKRLSLSDTALLSIPFHTLPPLSPILDDLPRTTTESSLLLRLSLPLAHFADYPMQKESTLHLGIHLSTTIPIFANTLTGKTIILTNAYSAPITHFQAKIHNTEDLLPDQQRIILAVKHLEDWLTLAYYYIHQESTLHSVLPFRVGMLI

SEQ ID NO: 312157 - protein, 127 aa, Zea mays
  Clone ID: MRT4577_47745C.1.pep
PAGSGVFKEERRRPGVGRAVPGPGGCAPVTSLGGAFHVQSGDGTRRGARRSREDDVEAAGRRGRSLAARAHMSHVSSLLQSSPVQSSPTTLPPLTCVMAARHLGSRISFGAPSAVSFLLKKKKKKAP

SEQ ID NO: 312158 - protein, 151 aa, Zea mays
  unsure (1)..(151): unsure at all Xaa locations
  Clone ID: MRT4577_47746C.1.pep
RPRYKLFFFFFFFFYFFFFFFFFFFFFFLEMDLLIFGKPQTLDKKHPGGGGAKGESHPHARPERRIRAPTPGGVERPYHGPPRDNINGATSHAEAGVHAGSDGGGGGLGILNPKPVRQLCAALRSREDGAAPVSLHLAPTGEGTSPMVDXL

SEQ ID NO: 312159 - protein, 83 aa, Zea mays
  unsure (1)..(83): unsure at all Xaa locations
  Clone ID: MRT4577_47747C.1.pep
CAFACASARRRWCGSRGACCRPRPPRCWCCWRPGVRSLRGGSXCSGXWAACCCSPRPAARWRRRFPRRAARRFSPPPPSLWSS

SEQ ID NO: 312160 - protein, 78 aa, Zea mays
  Clone ID: MRT4577_47748C.1.pep
HQTGSAPPWMQNKGTSPFKNKQLELSNPWNPTRTGAFICVTFGGFPFYVSNLNGQVPFVHASFGAILFWGKPILSNSF

SEQ ID NO: 312161 - protein, 40 aa, Zea mays
  unsure (1)..(40): unsure at all Xaa locations
  Clone ID: MRT4577_47749C.1.pep
MMLAXAXGNHMAQAGRSIRQXLXEGPLFRGSWAGFLLYAX

SEQ ID NO: 312162 - protein, 63 aa, Zea mays
  Clone ID: MRT4577_4774C.1.pep
KRKRGPEDLTFDFLTLHFCCSPTYFVIYFFMIPCRSYETDRIAATMIFIADKKNVHRSSRKYM

SEQ ID NO: 312163 - protein, 117 aa, Zea mays
  Clone ID: MRT4577_47750C.1.pep
VAGEANLLQSATLLVVPEKLAKPLVSLPGDKVRALVKNHVLLSYLDPIKLDEMNTRTGILPTLLSVTDKKLGILDYISVDDGQMYFVAPGVPCVDKLVKVVAARTYSVSIMEISEPI

SEQ ID NO: 312164 - protein, 57 aa, Zea mays
  Clone ID: MRT4577_47751C.1.pep
WRKSTEPLTEKLTWHSGVKASAYTSWCDRAECIVPDTPCSDLLCPTSVIRVAIRIAW

SEQ ID NO: 312165 - protein, 121 aa, Zea mays
  Clone ID: MRT4577_47752C.1.pep
YVWQRKHHRTRHWVSLSIPPPNLHCLLHLCMHHKTAHEGAGAHHDHGHARLPPGGCVLGCRCPPLPAKAARTVPPNPRSTNGPLKALWGYLSSHTTRSCLQLDSRCTALPSATFRGTALYF

SEQ ID NO: 312166 - protein, 72 aa, Zea mays
  unsure (1)..(72): unsure at all Xaa locations
  Clone ID: MRT4577_47753C.1.pep
MLAVFIEHVVEVPAELVAAVSRTPTTKTKAFXLVGRLLATSEPAEYVQLGDHGHLAYCHTNXALLRPKSFAA

SEQ ID NO: 312167 - protein, 55 aa, Zea mays
  Clone ID: MRT4577_47754C.1.pep
RPPFFFFFFKPIKRLKRLIWNNTFFVSFELVIKSFVTLTLPPMVMRDTLLLNHGR

SEQ ID NO: 312168 - protein, 97 aa, Zea mays
  Clone ID: MRT4577_47755C.1.pep
PGISVRVLRRAIFFRPVRIWHPSKRTPRGLVLSFIRVRKVIMVISPKSILIRSSPGFCAALAPLLVSPPRCCKPFWLCPPPCAPGFLKTSLWMVFSP

SEQ ID NO: 312169 - protein, 112 aa, Zea mays
  Clone ID: MRT4577_47756C.1.pep
MMRRCSIAALAIFLLLLVCSSSSSNCAAAARLLPGAGHLRPLRHAAVGASGDELSAGSETMEACEEGNGKDECVQRQLLLDAHLDYIYTRHFDSASATAPLRKKLVCGGNIL

SEQ ID NO: 312170 - protein, 97 aa, Zea mays
  unsure (1)..(97): unsure at all Xaa locations
  Clone ID: MRT4577_47757C.1.pep
MMRRCSIAALAIFLLLLLLVCSSSSSNCAAAARLLTGAGPLRAAVGASGDELSXLRGXAQDTMEACEEGNEKDECVQRRLLLDAHLDYIYTQHKGKP

SEQ ID NO: 312171 - protein, 97 aa, Zea mays
  unsure (1)..(97): unsure at all Xaa locations
  Clone ID: MRT4577_47758C.1.pep
FWFFCFFFLARRSVXFFRXVFXSRAPRCASSGXAPCXAGRGXGVRFSLLGWGRLSCXXPSAGGPXRXAXPCLAGXALGAFXLXPGCXLPALGXAAPV

SEQ ID NO: 312172 - protein, 100 aa, Zea mays
  Clone ID: MRT4577_47759C.1.pep
MMRRCSIAALAIFLLLLVCSSSSSNCAAAARLLPGAGHLRPLRHAAVGASGDELSAGSEVTTQDTMEACEEGNGKDECVQRRLLLDAHLDYIYTQHKGKP

SEQ ID NO: 312173 - protein, 117 aa, Zea mays
  Clone ID: MRT4577_4775C.1.pep
MAPKILGMLAGRDRASPAALAGFDVIEMLADKPTYYTFLKLLRDTKVAGEANHLRSATLLVVPDELAKPMASLPAHKVPLAADNHVLLKYYDPIKLDEMKTRTDILPTLLYVTDKKL

SEQ ID NO: 312174 - protein, 84 aa, Zea mays
  Clone ID: MRT4577_47760C.1.pep
NFGLPHFFRFGPLPFFFPWVFHNESRMDPLSNGSLTPMGVGPPLIGTLKLGRGLGPPPLGLFPCFAPKAPGFPFFALILGLLLG

SEQ ID NO: 312175 - protein, 142 aa, Zea mays
  Clone ID: MRT4577_47761C.1.pep
WQELCLSIKKNRIDPVLRKTGPKTYTGRTVEKPVKALTNHLDNSSLTHTNTSRVIVAKLKHKGRAAPTPQDEPHTAKATRRRLNPDTDARNKITARHRCQASHTPHEAAPILRHEQRSTTPNSGRKQTPKATMAPTPPSQAE

SEQ ID NO: 312176 - protein, 111 aa, Zea mays
  Clone ID: MRT4577_47762C.1.pep
IITSITKPLKKKKKKKKKKKKKKKEMSQLSLMRTVESWLRKERDEDRRRRKERKEKGLPEFDKVVEGSRVIGDPAKNADRVINNGWAAGRLTSTIAGEENFVFSSNSVLRQ

SEQ ID NO: 312177 - protein, 84 aa, Zea mays
  unsure (1)..(84): unsure at all Xaa locations
  Clone ID: MRT4577_47763C.1.pep
MGWTMRLVTAALLLGLMMVVTGDEDENSPCAHEALLDEDTLFCQGLEVFYPELGNIGCKFPXTCNNYRQKITSWMEPIVKFPGA

SEQ ID NO: 312178 - protein, 181 aa, Zea mays
  unsure (1)..(181): unsure at all Xaa locations
  Clone ID: MRT4577_47764C.1.pep
KAPQNRRRPTPRPRQGQASHATTTAGQPHACVPTPQTSYGHASARAPPLPPRPQQPQGHPPKPATGRSGGRRPAPQXPGSQPAXRPTQRGSGRRPPYRRRRRVEVPPPPIRPTAQPTNAPRRTPPRHMPETSLLAPPKAGTRRSRTPRAPDSRPPRAAPLPTLGRQTTPSPRVRPTAGLEG

SEQ ID NO: 312179 - protein, 149 aa, Zea mays
  Clone ID: MRT4577_47765C.1.pep
LCNQTHSYLASSKPSGTDTEPSQPTRHDYFVQTYPRQPDGHSATASLQPTGTNNCTGTATLHTHFPRACSCSAAVPTLPCQSRPLHCLKKQQWSCQNQWACFCSGSSSCAEGMNSRQIDRMFPFFSRVARSPALHWRVTKLKVPRFSQW

SEQ ID NO: 312180 - protein, 407 aa, Zea mays
  unsure (1)..(407): unsure at all Xaa locations
  Clone ID: MRT4577_47766C.1.pep
MSPRQAIACCHLLPSTDAPTHQPQPSEPQRRSSTSERPKKAKARVPAWGERSKDGTLDRVGVAPAGVTAVRLQASMAFVAGPPTTRRNARSQPALPTPQAETRGGEINLAGEAQDPAPSPTTMTHHLQKAPLAAADPPTPPIQAPRYKHKRATPPPQRAGRVRGRQRRRPATAMATRARALPPRASRTSHHGCGHKATCPCQQGGAADGDQPLDPASQPADPAFPAADQVAGHLQEEGGVEWVEEGREMSERAVPPPPSSLLVELPASCSGDGGGEDRRRWVRSMGSRPCRPEEDDVRAGKKLGYYCEFLIRPTAQPTNAPRRTPPRHMPETSLLAPPKAGTRRSRTPRAPDSRPPRAAPLPTLGRQTTPSPRXDPRPAACPPAARTPSQXPATPGCAKRTPRSLPP

SEQ ID NO: 312181 - protein, 76 aa, Zea mays
  Clone ID: MRT4577_47767C.1.pep
PVFGYVPENEAPLANVKVGNVIESIQVVSGLDTLVNPSYKIVGKRVLYKSFLFVGSCPQVNVKCYKVSYSQTLLAR

SEQ ID NO: 312182 - protein, 36 aa, Zea mays
  Clone ID: MRT4577_47768C.1.pep
QQTLVCFFYKRGLLSACANCQGKRHLCIQHKPLKGG

SEQ ID NO: 312183 - protein, 82 aa, Zea mays
  unsure (1)..(82): unsure at all Xaa locations
  Clone ID: MRT4577_47769C.1.pep
MGLQEEFEEHAQKAXTSPENTSTENMLTLYGLYKKATXGDDNTERTGIFYQKDRDMRDAWKAAAGQWXDGAMDDYISKGKEL

SEQ ID NO: 312184 - protein, 114 aa, Zea mays
  Clone ID: MRT4577_4776C.1.pep
MATAAGFSLLRSSLGGSRFRAATRTKPGSLGGATGPGGAGAGPIWPSMSRSSSNRPYNRTSFRSSPIRESIGSRGRTRRSMTAMITYATTNVLMGGAGSGGLSWAYKLSRDPAV

SEQ ID NO: 312185 - protein, 50 aa, Zea mays
  Clone ID: MRT4577_47770C.1.pep
VITIWGPLCPVELMYYLVKSVVSGFYLTVSLSDAVSLINKRKTPPKTIQT

SEQ ID NO: 312186 - protein, 51 aa, Zea mays
  Clone ID: MRT4577_47771C.1.pep
GSTLSRPSSVNAPLSCQVLLSSYLNLRQIYLHPSHMSLINCMMKNEYFMLV

SEQ ID NO: 312187 - protein, 88 aa, Zea mays
  Clone ID: MRT4577_47772C.1.pep
PGQTLIQLLCALDRAPAVYLFGHHRLAFKSLGPLIFLLILLHLPVDSPNLIADEGTEKEGVHVPHHLVLAPSLNIEFLPLLQALVGHC

SEQ ID NO: 312188 - protein, 47 aa, Zea mays
  Clone ID: MRT4577_47773C.1.pep
GNDFHGMSTTRSSNMQIRVTSQSQPEIWFTNIPFIGTTRNFFVYTTG

SEQ ID NO: 312189 - protein, 98 aa, Zea mays
  unsure (1)..(98): unsure at all Xaa locations
  Clone ID: MRT4577_47774C.1.pep
MAPKADGKRAANKAAEDEPATEKADNAPAGKKPKAEKRLPAGKFSGKEGGXGKKGKKKAKKSVETYKIYIFKVLKHVHPDIGILFKGMFIMNSFINDI

SEQ ID NO: 312190 - protein, 344 aa, Zea mays
  unsure (1)..(344): unsure at all Xaa locations
  Clone ID: MRT4577_47775C.1.pep
YLYFFFFSNSCTSLFYRSQSDLEANLFKLMEKRGYGEEYINRYKMMTRFHHQRVPLVILVCGTACTGKSTIATQLAQRLNLPNVXTDMVYELLRTSTDAPLTSVPVWARDFNSPEELITEFCRECRVVRKGLAGDLKKAMKDGKPIIIEGIHLDPSIYLMDEEKSDGNSRTEKTVTDSENPGVSVERKVEHQFKNGLAENRMDSTEDNKNFVKSKKSTLEKGDGHKDLDQQKNNATKKDKPAAEPIIVPIVLRMSDFDHKALLEEWIATRAFRDNCIPQDHRKLINNLKLIQDYLCSFESQGLTIVDISANSFPQTLDWLHSYLLQCIERGLLAACLESCNQGQ

SEQ ID NO: 312191 - protein, 136 aa, Zea mays
  Clone ID: MRT4577_47776C.1.pep
SRLRAILQIHLSSPSRSQPQTRCSNASSKYDFVKVKVCLGENADHYYVLSRFLLSRMLTVTKIPNHVAIKIALELKKLLVDNSLLDVSQSDLEANLFKLMEKRGYGEEYINRYKMMTRFHHQRVPLVILVCGTACT

SEQ ID NO: 312192 - protein, 481 aa, Zea mays
  unsure (1)..(481): unsure at all Xaa locations
  Clone ID: MRT4577_47777C.1.pep
MQQQQDPAPADPDPLPPPDLGDAAASSATQTIPSRNASSKYDFVKVKVWLGENADHYYVLSRFLLSRMLTVTKIPNHVAIKIALELKKLLVDNSLLDVSQSDLEANLFKLMEKRGYGEEYINRYKMMTRFHHQRVPLVILVCGTACTGKSTIATQLAQRLNLPNVXRWVYYLSFPVYSSCLMCLVSLPLXLQTDMVYELLRTSTDAPLTSVPVWARDFNSPEELITEFCRECRVVRKGLAGDLKKAMKDGKPIIIEGIHLDPSIYLMDEEKSDGNSRTEKTVTDSENPGISVERKVEHQFKNGLAENRXILLRTTKTSSKAKKAHWRKVEPVKVYXAQNHETKVHXCTFSRKKSXKDESDGHKDLDQQKNNATKKDKPAAEPIIVPIVLRMSDFDHKALLEEWIATRAFRDNCIPQDHRKLINNLKLIQDYLCSFESQGLTIVDISANSFPQTLDWLHSYLLQCIERGLLAACLESCNQGQ

SEQ ID NO: 312193 - protein, 107 aa, Zea mays
  unsure (1)..(107): unsure at all Xaa locations
  Clone ID: MRT4577_47778C.1.pep
SPTLPPTLSSTRSPTRRLTSXALIYNVCANPXLPFFLKIYNIAPSATPTFPFLHNSNVPLTKYPYLXTHAMSLFIITCHATSHLRKPRXITLTPTTLNTLVATHSRY

SEQ ID NO: 312194 - protein, 50 aa, Zea mays
  Clone ID: MRT4577_47779C.1.pep
MPLKFDVVTWLCIPHILWGVRSLHLCIQLVYSLGQQALLFLGKCIVRGID

SEQ ID NO: 312195 - protein, 61 aa, Zea mays
  unsure (1)..(61): unsure at all Xaa locations
  Clone ID: MRT4577_4777C.1.pep
SVKEGELKITLFGLGRQSQKTFRPKNDAPSGNKAVHLTNHIRLTLXSRTLRYAVRLPPGDD

SEQ ID NO: 312196 - protein, 46 aa, Zea mays
  Clone ID: MRT4577_47780C.1.pep
PRVRFFFFFFFGGIGIGRLITKDKSLLAVKSDQRMPISGSSTSSLP

SEQ ID NO: 312197 - protein, 374 aa, Zea mays
  Clone ID: MRT4577_47781C.1.pep
MRQSGLVPEKPVAEGTSTVEHEQIAVGEGSDNKDEEDYTILSPAKPSHLEFGRSTMIADDMVIMKKLGYFGEAESKLVRFADEEVVPELKDDEVVFKSFFRAGLRFPLYDYERFDKGAKGLKRKRIVSILNRQAARLVKEDENISKKAKSTPEPKAAISIKRKLNMTLTAEPKVADAREEAPSTPPAAEIAEILKKKDQPSVVKEKTEGQKRQRIVNVMQTIERTPPLASTSRMVPAASAEVEATAEAEAAAEAANLVSTMSGIDKLISDMVIEETVATAEENMAAVPGKGKEGVDASSEEKSFDLQHLGGQELSEADKEELKEYEISCGYQPGSMLFCRVDKEILGCIRDRAGAKIISTLSKSVGFPKLEARI

SEQ ID NO: 312198 - protein, 96 aa, Zea mays
  Clone ID: MRT4577_47782C.1.pep
DLLSSKITDELSIFHILNLNKCFTNIFIVSKNMELNPFMLTITRYFSFLLAALTITPALSIIFNKIRLILNQLTRIILLLDSLYSKLFSTLITKSI

SEQ ID NO: 312199 - protein, 196 aa, Zea mays
  Clone ID: MRT4577_47783C.1.pep
DACRFGPEFPGRPTRPVRLHETRSGDICNACVLLVKRWKKLPAGSKKNWNHVVDARAGPSLKTTLKPKKVKTLSGNRMKSNQISKLQKEFKRHNSDAHSTTSSASPAQSPCYSNQSDEGSDTEMASSSNRTPVFSFLDLTYWKRQKICCGIIYKGRFGEVLIDTHLFKPCCSSKKAAAEKPEEQGPAPLPISTQEW

SEQ ID NO: 312200 - protein, 104 aa, Zea mays
  unsure (1)..(104): unsure at all Xaa locations
  Clone ID: MRT4577_47784C.1.pep
MPVFQQKKGKVPFFQEQKRGKGWFFFQILKKHKRGDHFPKGGDLVEPRPPGVAPPPMPSEPPELPYPPPPYPFGAPYPPPPWAPPYXVXAPYGPPYMGPPFGEP

SEQ ID NO: 312201 - protein, 63 aa, Zea mays
  Clone ID: MRT4577_47785C.1.pep
KLDLNDKVNVDASKIRAGVRPIFCIIKHAEPKWWKKLVRDDQRTPHSVKADRYTWNDQEDDRA

SEQ ID NO: 312202 - protein, 80 aa, Zea mays
  unsure (1)..(80): unsure at all Xaa locations
  Clone ID: MRT4577_47786C.1.pep
HPRNPKKTPPGGGPNPXGGPXPRKGFPRAGPPPPPLKKPGVVSKPKKPSKPGRPKSEKRHPGXPVGPPPPPRGKGVFESL

SEQ ID NO: 312203 - protein, 76 aa, Zea mays
  Clone ID: MRT4577_47787C.1.pep
QGRASLPPLLVLASWPSMGYWTGRLLGARKHEAHWKTCTYVQRPALLMDDIYYASCKTILRIRGMHACGSKGLVLD

SEQ ID NO: 312204 - protein, 56 aa, Zea mays
  Clone ID: MRT4577_47788C.1.pep
TSIVAIIAWQECKLESLFRQRVRFSDKSLRSKNPPSLVQVNQRDGMALMTKSLIFS

SEQ ID NO: 312205 - protein, 45 aa, Zea mays
  Clone ID: MRT4577_47789C.1.pep
GNDQGALEKIIRVLIVWFCPWLISFLGYFNMQTLNILFTALLTRP

SEQ ID NO: 312206 - protein, 702 aa, Zea mays
  Clone ID: MRT4577_4778C.1.pep
MAAAAQARSSFLVLLVATWSLSPRLAGASTSTEAAAAGRGVTLRLDASQVVVDNGAVQVALSAPEGRITGVSYSGDGETTNLLGYDAGEGDSGGYWDSVWNYPGSGLPGQYNTLDSTEFNVVSSSEDQVELSFRSTYNPSHRNSLRLNIDKRLVMLRGSSGFYCYAIFEHDRAYPALNITEARLVFKLNTAKFDYMAITDDIQRYMPSAADREEPRAVPLAYKEAVLLVDPKEPQFRGEVDDKYQYSLDNKDNVVHGWISRGDPNAVGFWVITPSNEFKSGGPLKRELTSHVGPTSLTMFMGTHYVGKYMVANINDGEAWKKVLGPVFIYLNSGPSRGELWEDAKARARAEAASWPYSFLASPEFPKAAERGSVVGRLLVRDKHEKHGMPAGSSAFVGLASPGPPGSWATESKGYQFWTRAAPDGTFRIANVREGVYGLYAFVPGFLGDYCYGSPLTVAPGRAIGVGDLVFEPPRSGPTVWEIGVPDRTAAEFYVPDPDPRYVNRLFVVRDRYRQYGLWERYADLYPDKDLVFTVGESDESKDWFFAHVTRKVGQVAVPTTWQIRFSLDRVVADDDTYTLRISLAASQMCRLQVQVNGDARRGRDFTTPDMGDDNAITRHGIHGSQWSLECVVGGHLLRQGDNTIDIKLIAQQGPKGPAMVAGVMYDYIRLEGPPSRGVASSRIPAFSLHRILFLLAFLVMS

SEQ ID NO: 312207 - protein, 88 aa, Zea mays
  unsure (1)..(88): unsure at all Xaa locations
  Clone ID: MRT4577_47790C.1.pep
MIPGNQVATEAAPKPAPTTEAVKQPQRYRPATVVLSWDTFQTQENLXLLIRKLLFHKLNRXIAQEFKTDWCFQNHGMLTHQNSTNSHL

SEQ ID NO: 312208 - protein, 137 aa, Zea mays
  unsure (1)..(137): unsure at all Xaa locations
  Clone ID: MRT4577_47791C.1.pep
RAWFLTGRGRGNPSAPSNGKSGLKPKKTGEPEKGQHNTPHHTTNGQGSVQGGFGRVFAHKITHPSCFTDSFSSRHHQKKTYSTPGSEFRQHNSPPVGWAKGWSGWWWVGGSXLKTSRNQSPGHRPAAAGAVHRPRQK

SEQ ID NO: 312209 - protein, 129 aa, Zea mays
  Clone ID: MRT4577_47792C.1.pep
RCKMMDGVTRCKECVRRGRSCDGTGVPLSALNRITSEHKRLRLEEKEAAEQLAEYQQKAAEALSRLSRIRSQRESLVTRGAEMVNRGLKSLDELDEVERAESEAVIDVQLNGGVDVIDWNAILADFGSS

SEQ ID NO: 312210 - protein, 134 aa, Zea mays
  Clone ID: MRT4577_47793C.1.pep
MLEYQNAIGGRLKLKGKALDVKDGGVKKKKKKYQREESSQIAHDELHKGGRSESPIDPNNERIESDKTGDEGNPHPDYGHLTPAERRYMEQKQKIDMQKMAKVANKSHRDRIQDFNQYLANLSEHYDIPKVGPG

SEQ ID NO: 312211 - protein, 53 aa, Zea mays
  unsure (1)..(53): unsure at all Xaa locations
  Clone ID: MRT4577_47794C.1.pep
XXPXGVPVHGXRPRLQPXXXXXXRXXRXXVDXAVDPXTGFCLXLSLDPPTTNR

SEQ ID NO: 312212 - protein, 93 aa, Zea mays
  Clone ID: MRT4577_47795C.1.pep
ARVFFFFFFEEKLVCFFFFFFFFFFSRTTHYHLTAWGYVCNYHYSCRFNAQLSPRLLNHISCLLTDSISRHLGVSIVHSRPGRPRCTQSPLGV

SEQ ID NO: 312213 - protein, 64 aa, Zea mays
  Clone ID: MRT4577_47796C.1.pep
WYSIMLGSYFFLILSQPGSGFHPRMGKVNQLPRPQSPQDPIGNKRHSPGCPAVFNTQVGGAGAH

SEQ ID NO: 312214 - protein, 62 aa, Zea mays
  Clone ID: MRT4577_47797C.1.pep
GVQKTMDNIDALGTHLVSKLHSMNRMLQFCRQVCSQCVRYYALSSYMTARRIVMVDKQISCT

SEQ ID NO: 312215 - protein, 142 aa, Zea mays
  Clone ID: MRT4577_47798C.1.pep
NRILLSYISKYDPGLLLHNILLNALKTLFSRIELIELHLCSLKIELKTWNYDVKGKPFINRKTNQNSLNNEILQNKPKYHIPMLSTTLYLCPPLYIFFGHQSSNHHPSLRQGNHRCSFLIKVFTTKLRYFIYKGYKQRWNPN

SEQ ID NO: 312216 - protein, 85 aa, Zea mays
  Clone ID: MRT4577_47799C.1.pep
GRHNQAFQIDLNSHVGKILTRKCQIIALPYQESHYYTRNLKKLQQQRNATIEKIEGKKKNQEAENDRLIATRLDQAGFRTSARPG

SEQ ID NO: 312217 - protein, 80 aa, Zea mays
  Clone ID: MRT4577_4779C.1.pep
NPTKEIDVCTLFFRAYVVIVLSFYFLSLDDLFHKAQFILKRILCILLIFKCGDPYFYKHCLGKLEGALHYPCVRWASHLT

SEQ ID NO: 312218 - protein, 120 aa, Zea mays
  Clone ID: MRT4577_477C.1.pep
CDIGLQGCSIITFAKKKKKKKKKKKKKKKKKKKKKKKKTKKKKKKKKKVLPLPGGPLKGEIFENFHNIGGRLTIHLGAQFPLMEGHKTFKGPVFNNLGLKNPWVSQIKTLCKKPLFPKGA

SEQ ID NO: 312219 - protein, 54 aa, Zea mays
  Clone ID: MRT4577_47800C.1.pep
VLRLFRRPSPSALNTTHTRPKLKPEKQPGTKPWDRHYSERLTRLKKKPSRVCWL

SEQ ID NO: 312220 - protein, 56 aa, Zea mays
  Clone ID: MRT4577_47801C.1.pep
PLGSSMFHHGWMFLFLRALPQRGKKPPNLPGFLLVFVDKLLPMLVTVWNLSYKRYL

SEQ ID NO: 312221 - protein, 92 aa, Zea mays
  Clone ID: MRT4577_47802C.1.pep
ALSLYSAPMSARTSRLCTITTPYTPACLRISLRSQLKIGQPHALLPESAPLPDSPQDNTNDVLHYLLYKMEVTTCLQDSVTCFSVRHGVRLV

SEQ ID NO: 312222 - protein, 44 aa, Zea mays
  Clone ID: MRT4577_47803C.1.pep
KKICCACPKTKKLRDDCIVQNGKKACEKFIEAPLKCLKTEGLRV

SEQ ID NO: 312223 - protein, 76 aa, Zea mays
  Clone ID: MRT4577_47804C.1.pep
TDRPSIGTRIVKRIFTSLGVTSCRTILPFIPTHERFVLIYSNRNPVGMCNEYRSILSLKNKKKRILVRVLTHMIME

SEQ ID NO: 312224 - protein, 96 aa, Zea mays
  unsure (1)..(96): unsure at all Xaa locations
  Clone ID: MRT4577_47805C.1.pep
VYRSVSDGVDSLLSAVSSVPEMVVFSARQLVRVTTPGPVCSPPVALCVEDRSVMQNARTSDQLRRLMRHPRHLGQRCDNDAVYIASLQPRDXPXPV

SEQ ID NO: 312225 - protein, 32 aa, Zea mays
  Clone ID: MRT4577_47806C.1.pep
PDQFHVCICLHFVPAQPQSINYSRCAPINKLL

SEQ ID NO: 312226 - protein, 83 aa, Zea mays
  Clone ID: MRT4577_47807C.1.pep
KIKDLHIQCFTGAMVVDVLNDFPALAVPNLIMSIGAGTDPAIRSGDILLMKSILVDVITYIDLLRKTLCCIRMNYLWALDYNV

SEQ ID NO: 312227 - protein, 697 aa, Zea mays
  unsure (1)..(697): unsure at all Xaa locations
  Clone ID: MRT4577_47808C.1.pep
MATFPVTTAPTPHQSTPPTAGLPGHLRLPTAASADAALITLSAFLSSGRLTTSSPSLLHRTLRAAADHRLPRLGLQLHAFLVKTRLLADPFSASALLHLYSTIAPLHRTRLLFDRIPKSTYPVPWNTMILRYAQDGFLDEAFDLMVAMXNPASPLVXTWNAVIAGCVRAENGELAIELLGKMVSVGGVVPSVATFNTVLHVISALRGVNVLRELHAFVLRNAEVVGLGPVDLDRLQESLAAGYMCSSCVQYAGRVFRDVRISTCFLGNLMISGFLDTGQRNQALGVLREMAFGCGHEAQHLPSASLTLVLPEVNLATKRGLEIHAYAYRHGFECDTSVCNALMAMYARGGKICRSDKVFQGLDAKDVVSWNTMISGYATVHDFDLSFELFREMQRNGTRPDDYTFTSVLNACSXLPAITGXMALHGQMIRMGLCHSYVDDMNSLMDAYGKCGFIAEAQKIFDETERKDTVSWNIIISCYGYSSFPQRAIRLFHQMQDQSYKPTRVTFIAVLAACSHAGLVDEALRYFEAMHGDYSITADEAHYACIVDCFGRAGQLQRAYEFIRGMPVVPNACVWGALLSSCRIHGNIGLAEIAAKKLVELDPQHSGYWMLLKDMYSKAKRWNDVSQLRAAMRDNGVKKCPGYSWIEGRDSEVHRFLTADKLHSQSHQIYEVLGGLTEQLMDEGYEPEIDVDLTYTE

SEQ ID NO: 312228 - protein, 90 aa, Zea mays
  Clone ID: MRT4577_47809C.1.pep
FGSRRAGIPNFLSSGKSGPQADTGPLDGLSALSARARRMSAPATGGLRVPLCWGSQRVHLPDRQQGTWFRKTLPCRGSGTTSENSVARRV

SEQ ID NO: 312229 - protein, 102 aa, Zea mays
  Clone ID: MRT4577_4780C.1.pep
GVRPRVRHASGTSLGLAGTLQIPTDSDKTWAYVVIGLSFYFLSLDDLFHKAQFILKRILCILLIFKYGDPYFYKHCLGKLEGAIHYPCVRWASHLTPMRSLG

SEQ ID NO: 312230 - protein, 142 aa, Zea mays
  Clone ID: MRT4577_47810C.1.pep
DKCGRFWGMVHWGQRCLLGDDGTVPEWSRVSASIFWHASTDSFVPSAGSPLGWFVVVSSDHLLLFSTVLLSVLVCIPIKLLLTFSLLALPCRDRGSQRLFVSIPLVILAALSIFLLVIVNLVVGLFLLLFFLPLFPVFLLIF

SEQ ID NO: 312231 - protein, 201 aa, Zea mays
  Clone ID: MRT4577_47811C.1.pep
MSGGMRQILNLGLYDGRKRAYSLRRLNLSKMNFFHPTAEEAAAHGKVLPTLALDKARKINRKRICNTKLATAEAAAPKMDMPKSDLVMGPPQISPCLQSRRFVHFFPTASESKVILGDRGNRMLRFNIVDGSRYMDTLPCLHGVKEMPMVISVPPTDVHLPDAEDTEDLYIIDGLLHPHRAEVRPQFEALVVEGVPKSAVS

SEQ ID NO: 312232 - protein, 69 aa, Zea mays
  Clone ID: MRT4577_47812C.1.pep
KIWEICFRGKKKKKKKKKKKKKKKKKKKKKKKKKKKKKKKKKKKKKKKKKGPPPTKEPRHPGIKSGPGP

SEQ ID NO: 312233 - protein, 65 aa, Zea mays
  unsure (1)..(65): unsure at all Xaa locations
  Clone ID: MRT4577_47813C.1.pep
YPRGRPGRYGNSNRSDTKQAHEKSALLDVFRGLISDGLGPRISAYNAIIFSLCRHNMLXKAXGPE

SEQ ID NO: 312234 - protein, 66 aa, Zea mays
  Clone ID: MRT4577_47814C.1.pep
PPPKFYMVFLKTLHPFGPQNYFPLLKALGCPCIMAPFPPVVQSLVFHPCFKFSPKIHLPFARFFQL

SEQ ID NO: 312235 - protein, 81 aa, Zea mays
  Clone ID: MRT4577_47815C.1.pep
WPQPICMSSGGKFMELIRLVHRSGPVPGFRFLSKQRLQKSILWSQAPVWLCMSVPIVACASSLMTLVLMFLYPSTFHHKTC

SEQ ID NO: 312236 - protein, 116 aa, Zea mays
  unsure (1)..(116): unsure at all Xaa locations
  Clone ID: MRT4577_47816C.1.pep
EKRPTSGREYYAKDLSEGEFGGLQIYLGNVNMPGIMVCRAEKPPCNPISXSKIMXRMEMTMQSGRLVDILMAHVCVATLXSCYLYTTPEXGEPALSRXDXSVTLFSWKTLMLKDYW

SEQ ID NO: 312237 - protein, 52 aa, Zea mays
  unsure (1)..(52): unsure at all Xaa locations
  Clone ID: MRT4577_47817C.1.pep
MAATIQTASARQIFDTPGNPTIEVDVFFSDXTFARATFFIAALTSIYEALDF

SEQ ID NO: 312238 - protein, 90 aa, Zea mays
  unsure (1)..(90): unsure at all Xaa locations
  Clone ID: MRT4577_47818C.1.pep
RNLLSVAYKNVIGARRXSWRIVTSIEQKEESKGNESQVTLIKEYRQKIETELAKICEDILEVLDKHLIPSAQTGESKVFYHKMKGDYHRY

SEQ ID NO: 312239 - protein, 41 aa, Zea mays
  Clone ID: MRT4577_47819C.1.pep
MSGAGQEDKKPAEGGAHINLKVKGQDCNEGFFCIKRATPLK

SEQ ID NO: 312240 - protein, 71 aa, Zea mays
  unsure (1)..(71): unsure at all Xaa locations
  Clone ID: MRT4577_4781C.1.pep
SRRGPPFFIFXXRRNIKVGAITHYVTEGFPRHTRAAAKLTAGFLLYETVNDYEHVMQKKLLQMYHCSRSFT

SEQ ID NO: 312241 - protein, 64 aa, Zea mays
  Clone ID: MRT4577_47820C.1.pep
VLELGIVVHSVIIGISLGASQDPSTIKPLVVALSFHQMFEGMGLGGCIVQVIIIQSIVLRYTVH

SEQ ID NO: 312242 - protein, 253 aa, Zea mays
  unsure (1)..(253): unsure at all Xaa locations
  Clone ID: MRT4577_47821C.1.pep
MAGDAINIVLDPIFMFVFQYGVSGAAIAHVISXYGGTFCRYFITSILLWRLRLHVDLLPPSFKHLQFGXFLKNGFLLLARVIATTCCVTLSASMVARLGSTPMAAFQICLQTWLACSLLADGLAFAGQAILASAFARKDHPKATATASRILQLALVLGLLLSILLGVGLHIGSRLFTSDQGVLHHIYIGILFVCLTQPINALAFVFDGINYGASDFGYAAYSMXFIGIWIALVIYMSLRMFAGFWRIGTTQGP

SEQ ID NO: 312243 - protein, 271 aa, Zea mays
  unsure (1)..(271): unsure at all Xaa locations
  Clone ID: MRT4577_47822C.1.pep
LRSLGAPAVLLSLAIQHAXFRGFKDTKTPLYATVAGDAINIVLDPIFMFVFQYGVSGAAIAHVISQYFIASILLWRLRLHVDLLPPSFKHLQFGRFLKNGFLLLARVIAATCCVTLSASMAARLGSTPMAAFQICLQTWLACSLLADGLAFAGQAILASAFARKDYPKATATASRILQLALVLGLLLSILLGVGLRIGSRLFTSDQGVLHHIYIGIPFVCLTQPINALAFVFDGINYGASDFGYAAYSMDRDGTRALGLSSRLNIEAELVT

SEQ ID NO: 312244 - protein, 289 aa, Zea mays
  unsure (1)..(289): unsure at all Xaa locations
  Clone ID: MRT4577_47823C.1.pep
FCYFITSILLWRXRLHVDLLPPSFKHLQFGXFLXNGFLLLARVIATTCCVTLSASMVARLGSTPMAAFQICLQTWLACSLLADGLAFAGQXGNPVFLWSLTFFIGNWMTFNKLKLIXDNGVSRCISYLLVYFLXSGSHFXAILASAFARKDHPKATATASRILQLALVLGLLLSILLGVGLRIGSRLFTSDQGVLHHIYIGIPFVCLTQPINALAFVFDGINYGASDFGYAAYSMVLVAVVSIICILTLESYGGFIGIWIALVIYMSLRMFAGFWRIGTAQGPWAYLRG

SEQ ID NO: 312245 - protein, 95 aa, Zea mays
  Clone ID: MRT4577_47824C.1.pep
VPDLIKLCVMRVLLHSFSMESSIKDICSLHLSNEVHCFSFGQLCIFSPPLCFNNLSIGFRTSVAGESIVAPRNSGTMMYKFENCRDRPELTQKAN

SEQ ID NO: 312246 - protein, 105 aa, Zea mays
  unsure (1)..(105): unsure at all Xaa locations
  Clone ID: MRT4577_47825C.1.pep
GILFVCLTQPINALAFVFDGINYGASDFGYAAYSMASWQTSTCHTYSSNKPRALQIFYXHACIXVLVAIVSIICILTLERYGSFIGIWIALVIYMSLRMFAGFWR

SEQ ID NO: 312247 - protein, 45 aa, Zea mays
  unsure (1)..(45): unsure at all Xaa locations
  Clone ID: MRT4577_47826C.1.pep
KGFGRIVRLLARLPLQSYKVELILXNYSIIRIIYMTYMIKYDTVH

SEQ ID NO: 312248 - protein, 60 aa, Zea mays
  Clone ID: MRT4577_47827C.1.pep
MSWLSWALDSDSDKLSWTPVSAITTVGHAGSLRPAAPAARARCRGHGTRSLGGQRERLVR

SEQ ID NO: 312249 - protein, 93 aa, Zea mays
  unsure (1)..(93): unsure at all Xaa locations
  Clone ID: MRT4577_47828C.1.pep
RSTCDDSFEGINAELYARELLGGCQKIGAETXCSMDENTLKLLXKAANEARIPGSSTVIDAHSDGKDLHAXNIGDSGFLAIMHGEDHLKAIPT

SEQ ID NO: 312250 - protein, 60 aa, Zea mays
  Clone ID: MRT4577_47829C.1.pep
FIFCLVYTLFFFLLFHLLSLLLSVLSLEKGLFVSPIYQASHFLISTQGVNVLYYPPPRTL

SEQ ID NO: 312251 - protein, 85 aa, Zea mays
  Clone ID: MRT4577_4782C.1.pep
LQKHHSIPSDHRTPATMLLFTTMPSRLRLLNSVLIATYRNSDIRTLLTRFLCCPTPTNSTAFSTSRTKQDGSQCLQIIMYILTDH

SEQ ID NO: 312252 - protein, 91 aa, Zea mays
  Clone ID: MRT4577_47830C.1.pep
LVTQGGSLKPWIGAVDGEGRRTAGLPNGWSGQRYFSAKTQIVLLPWIGAVDGEGRRAAVLPSGWNGQRYYSADGVGGATGMKGVDGGGRWG

SEQ ID NO: 312253 - protein, 133 aa, Zea mays
  Clone ID: MRT4577_47831C.1.pep
KLFFFFFFFFYFFFFFFFFFFFRGIFITLAGVTSGPGGGPKGGATTDRGGPRGKPASAHNSAQQTEAKSITGKNRGAQKGNQQKKKAGGTQTTGEAKKRANQQQKRTAQRPGRSREKNGRTRPNKKTDPLGEG

SEQ ID NO: 312254 - protein, 115 aa, Zea mays
  Clone ID: MRT4577_47832C.1.pep
MANHQEKPTTSPPPQPAEGSVARPRLPGVGNAHPGSAGYPNPPDAAIPDAATLRDQWRFAVRQYSRWYSHAWGTAILAGAAFFALGWLVKGSNPLPSRAEPQHGAIGKSVAKEDN

SEQ ID NO: 312255 - protein, 118 aa, Zea mays
  unsure (1)..(118): unsure at all Xaa locations
  Clone ID: MRT4577_47833C.1.pep
SYTFRSLLDXGAQLAFGSDWPISDIXNPLQAIRSAVFRKPPGWEVPWIPAERLTLDESLKAHTMSAAYACFLDHAVGSLSEGKYADFVVLPSTSWDEFSSDLPGHVLATYVSGRQAYP

SEQ ID NO: 312256 - protein, 203 aa, Zea mays
  Clone ID: MRT4577_47834C.1.pep
MARQQSVQALCVLAALLFAASLPSPAAAGVHLSSLPKALDVTTSAKPGQVLHAGVDSLTVTWSLNATEPAGADAGYKGVKVKLCYAPASQKDRGWRKSEDDISKDKACQFKVTEQAYAAAAPGSFQYAVARDVPSGSYYLRAFATDASGAEVAYGQTAPTAAFDVAGITGIHASLKIAAGVFSAFSVVALAFFFVIETRKKNK

SEQ ID NO: 312257 - protein, 194 aa, Zea mays
  Clone ID: MRT4577_47835C.1.pep
PAGLGRSDRQAQSEILSARAGDHSKEEAAARQRPRVPTLVAAAALVAAAVRGRCRRCSAAYGTAKSGVGVASMGVMRPELVMKSIVPVVMAGVLGIYGLIIAVIISTGINPKAKPYYLFDGYAHLSSGLACGLAGLAAGMAIGIVGDAGVRANAQQPKLFVGMILILIFAEALALYGLIVGIILSSRAGQSRAD

SEQ ID NO: 312258 - protein, 165 aa, Zea mays
  Clone ID: MRT4577_47836C.1.pep
MSSVFSGDETAPFFGFLGAAAALVFSCMGAAYGTAKSGVGVASMGVMRPELVMKSIVPVVMAGVLGIYGLIIAVIISTGINPKAKPYYLFDGYAHLSSGLACGLAGLAAGMAIGIVGDAGVRANAQQPKLFVGMILILIFAEALALYGLIVGIILSSRAGQSRAD

SEQ ID NO: 312259 - protein, 122 aa, Zea mays
  Clone ID: MRT4577_47837C.1.pep
MSSVFSGDETAPFFGFLGAAAALVFSCMGAAYGTAKSGVGVASMGVMRPELVMKSIVPVVMAGVLGIYGLIIAVIISTGINPKAKPYYLFDGYAHLSSGLACGLAGLAAGMAIGIVGDAGVR

SEQ ID NO: 312260 - protein, 165 aa, Zea mays; identical to SEQ ID NO: 312258
  Clone ID: MRT4577_47839C.1.pep

SEQ ID NO: 312261 - protein, 101 aa, Zea mays
  Clone ID: MRT4577_4783C.1.pep
YVILGGSASRRGTHRGLLPNTELTTWHPSTELPASFTGPEESNGWAYTPPIPKTSPDCQTPIYGSYSTPATGAADYLLTDADGSMSLPDCILPTMKHKALL

SEQ ID NO: 312262 - protein, 165 aa, Zea mays; identical to SEQ ID NO: 312258
  Clone ID: MRT4577_47840C.1.pep

SEQ ID NO: 312263 - protein, 165 aa, Zea mays; identical to SEQ ID NO: 312258
  Clone ID: MRT4577_47841C.1.pep

SEQ ID NO: 312264 - protein, 65 aa, Zea mays
  Clone ID: MRT4577_47842C.1.pep
VVHIHVKDDVICIVLVIKVQDIVIFLSGSLVDSKSFGLKSACVMIRKSEFLGWVVGYREGCPHTC

SEQ ID NO: 312265 - protein, 97 aa, Zea mays
  unsure (1)..(97): unsure at all Xaa locations
  Clone ID: MRT4577_47843C.1.pep
GNFSKKVGPGPPFSLVPGLGFFSSGVFXLAGNWARAPKKTRFVPPPFQFPVRKEKKFSPFLGPVPLPTGGFLPPPHTLFLPKKAGGGSPKVWVGSKD

SEQ ID NO: 312266 - protein, 79 aa, Zea mays
  Clone ID: MRT4577_47844C.1.pep
PDLCELALLFGLPGFFFYATGSHFVWAWGFISLSARAPLCCSLGSVLLLSVLGPVCFSVGGGRVYLAGPPPHLVLVSLN

SEQ ID NO: 312267 - protein, 95 aa, Zea mays
  Clone ID: MRT4577_47845C.1.pep
ADAGNLWCEGSETSSQFAHGAHERRQPGLLRRLEIASSAVSHDAGDDLKNTRTLRGASDTDSHTCPEDRSGAAVLTLQRGSGGAPLQWQLAATDH

SEQ ID NO: 312268 - protein, 135 aa, Zea mays
  unsure (1)..(135): unsure at all Xaa locations
  Clone ID: MRT4577_47846C.1.pep
IRLEDDLAAAFIAAFAKDVLHLLKFVGGGADATWTCVEDALQHHELFLVKHCLTCHKDXSVKXYRRTYQKFYTDLLESYPDLHMIKNYDAASRPLDHPDHYAEFHVYTDSTAVLYMRSTLDTTLPIGPKAFVSEY

SEQ ID NO: 312269 - protein, 58 aa, Zea mays
  Clone ID: MRT4577_47847C.1.pep
FIPNTLHRTCSEFSIPSACSQTLFIQFYNIINVFVDPDKVKVVMLFFQICIVQWQYIC

SEQ ID NO: 312270 - protein, 78 aa, Zea mays
  Clone ID: MRT4577_47848C.1.pep
VEPPLSTMFPGIADRMSKEITSLAPSSMKIKVVAPPERKYSVWIGGSILASLSTFQQMWISKEEYDESGPAIVHRKCF

SEQ ID NO: 312271 - protein, 91 aa, Zea mays
  Clone ID: MRT4577_47849C.1.pep
CTSANLGTQGGPKKTRGGALQWSGHTQTDDRPWPDATSSRSFEQKKAEWLVWFGAAGCITYHPLCDVRTRAEIIMLWHMDWIRMGKKYDRF

SEQ ID NO: 312272 - protein, 105 aa, Zea mays
  Clone ID: MRT4577_4784C.1.pep
KRADYWAFLGKRNKNFLPKIFWLKKKTGERRSQRALTPCFFSSKGFFFLKREKKRGGGLELPFPKGLPLITIALEGETFWFKGWKRSKRVGLILGGEPLKEPFFS

SEQ ID NO: 312273 - protein, 53 aa, Zea mays
  unsure (1)..(53): unsure at all Xaa locations
  Clone ID: MRT4577_47850C.1.pep
AYFAADAAAHASKKSSPRXVTNGEVQNAAAALNGSDHRRGTNVXSARLDAQQR

SEQ ID NO: 312274 - protein, 197 aa, Zea mays
  unsure (1)..(197): unsure at all Xaa locations
  Clone ID: MRT4577_47851C.1.pep
KNPKRSPKPKKGAEKPKKGSENKREKKKKARKREKKKAIKPRKKKLKKXEKKRAKKGKHRAQGSYKNNKKRXNKXKRFKKQMKKKKGRXQKKKKGAKRKYRRTEEVNKRERKGKKPAKKENRPPQEKRKRPPPEGEGKKHKKKPLKKTPKGKEKPQPINKYKKNRQKNLMLYFNFFFFFIFFFFLFYFFFFFFFFFF

SEQ ID NO: 312275 - protein, 65 aa, Zea mays
  Clone ID: MRT4577_47852C.1.pep
AALYNVVNEKTLALQDLLAGQFISVKRAGIFQIRWRLTDWPNSCAGCMANGTRSVFAERREESEV

SEQ ID NO: 312276 - protein, 271 aa, Zea mays
  unsure (1)..(271): unsure at all Xaa locations
  Clone ID: MRT4577_47853C.1.pep
MLLPFSTTPNLADTMAKSPLSATVVLPLLADVYPTGHYYDNMNIGNPPNPYYLXVDTDNDLTCLHSHAPCHYYNKVXHPLYRPTAXNLLVPSDNKLCTALNSEQTSNNSCPXPKLCDXYQIKHTDSASSQGELIXNDSFSLAMTSSNIRPVLTFEXGYEQQVEKTWLVQAAIDGMLVLXELSPTLVSQLKHLVITKNVVGHCLSTNAGQFLFFADDDVPSSRVTWVPMAHMXSENYYSPDSGTLYFDRRSLRVEPMDVVFDSGSTYTYFTA

SEQ ID NO: 312277 - protein, 60 aa, Zea mays
  Clone ID: MRT4577_47854C.1.pep
GRKTQNVQFNYFYIGEVQFIECHHQVCVQSCMVLKTLHCGGISKAFFARFGWCGLLKASF

SEQ ID NO: 312278 - protein, 54 aa, Zea mays
  Clone ID: MRT4577_47855C.1.pep
FFGPVIAPILDNLAPQSPDSMPLRCSWGFPPLKKLFSLEYPLPSYLVESFSGDD

SEQ ID NO: 312279 - protein, 83 aa, Zea mays
  Clone ID: MRT4577_47856C.1.pep
GLLAGDFGGNHRLEDSPPRIHPPVEDLGRPLRWEEAAYAARDSSRLAFALASRCRGPAVVGLSASVPRLWFGSAGFPLPGRVG

SEQ ID NO: 312280 - protein, 103 aa, Zea mays
  Clone ID: MRT4577_47857C.1.pep
EGAFFSLQKKWRRRFFSQQRKYPGETPPNRVFPPVPPFFFLYNPGGDLFLFFPHTFFKPQKRGGILIKPKRGGLKEKIFSPPPQTWEKLVVGGARRPPFNKKG

SEQ ID NO: 312281 - protein, 104 aa, Zea mays
  Clone ID: MRT4577_47858C.1.pep
VAMFIKLRDLASGCRPWSLAVSPWPLRRKPPSSARCSGAPLHRRAFGCPASQFLDRLTGKWTSFGRSSMVCSDLWRRSELKSQELARMPARAGSHGTDAWANAW

SEQ ID NO: 312282 - protein, 69 aa, Zea mays
  Clone ID: MRT4577_47859C.1.pep
MALLRSCRLAVRVAVAVVLLLLCGYALGAAEGARPLPGGHGGASGGFSTANLPVFVVARAGPSRRGAGH

SEQ ID NO: 312283 - protein, 64 aa, Zea mays
  Clone ID: MRT4577_4785C.1.pep
MASTSCCLLHQSTARLGASPRLADAPPRSAQLLVCKARKHEAVADHIDVSRRSALALLAGVSAG

SEQ ID NO: 312284 - protein, 115 aa, Zea mays
  Clone ID: MRT4577_47860C.1.pep
KKKKKKKKKNLKKKKKKKTNGGTKKKKKGGTNFNSAGRGTSYPFLGCSWLPVFGGRFLAVSSVKPLACLHLLAWGVIPVWPGTVLASRPFSVGLANGFPPGTVYGSRPVPGLFAR

SEQ ID NO: 312285 - protein, 139 aa, Zea mays
  Clone ID: MRT4577_47861C.1.pep
YGGNSEAIKTKGPEVRRQVALTVSPAEATTSAVGSLTSGGDHISPTSGSDHLVDGQPRSAPAARGSAGGGTRATQAGEPDTRQLTAPQTAGPAHPEFTSSARPANALLPRMLEEEADCQPTRKAKLPLGSPSSPARMMN

SEQ ID NO: 312286 - protein, 234 aa, Zea mays
  unsure (1)..(234): unsure at all Xaa locations
  Clone ID: MRT4577_47862C.1.pep
TSRTQQAALPTLVSTISSPPAWVRQFYFPTSPAFSNCPRLCAFLIRRTSHTHACVDRRYHSQPRQLGPAMDAFPYIPPHLKYAGLSKQERDRNAAAEKGRDSTKASVTFLSQANSPGTNLSQADPLNTARRHSTMSTRSYPTPFPGGMETTEDDDLPPFPEPEVSSLALDTKPGAQIHYTYYPASKPQGNHPHPFSQTLVVFPHXAMMARSSWGRCIRSFLENESQGDYRIQGY

SEQ ID NO: 312287 - protein, 386 aa, Zea mays
  Clone ID: MRT4577_47863C.1.pep
MPRSFCDHRALSPSGPPDGVRRCSLEGSASRSSLPATSPSEGARSWWCRRSCLLTAVGGVQPHGSRHPSTIIRLQGFSSRNPVATSGRWSSTRMTTSLVVERSESGCCLPLPLASRMFIIRVGEEGEPSGSFAFRVGWWSASCSSIRGRRAFTGFVEEANSGHARPVVCGAVSCRVSGSPAWVALVPPPALPPAAGAERGCPSTARATVAPCAGWPHPRLLPRHRPHREVVQDVVRRGGGDDILGWSCPRSRSEDKREDLFRWSLPLVGLMWSPPLVRLPTAEVVASAGETVSATCRQTSGPLALMASLSPPARGRGRGSIRSSAHPEVIAAAGEPLGAEVVVAAGAEVVAAIGGAVRNQLPARLLLVQRSPFLQRWSWGPACKGM

SEQ ID NO: 312288 - protein, 38 aa, Zea mays
  Clone ID: MRT4577_47864C.1.pep
QHDYTLKIAHKTIKSEQGCILACPPIMMDSWFSRDCSD

SEQ ID NO: 312289 - protein, 114 aa, Zea mays
  Clone ID: MRT4577_47865C.1.pep
NERNLLEKINMLCLMEIIFSRSSENRTIPMRDIAEQTKLPVEDVEYLLMKSLSARLIEGIIDQVDGVVHVSRVKPRVLGIDQVKCLHDRLDTWIGKVDTILLSVEAETPDLVSS

SEQ ID NO: 312290 - protein, 125 aa, Zea mays
  unsure (1)..(125): unsure at all Xaa locations
  Clone ID: MRT4577_47866C.1.pep
MSAYCGKSRXELIKNXAAYIGTPGKGILADDDSTVTIGKRLSSINVQNAEENRPALRELLFCCPGAXLQNIIGVILWEETLSHNTKDGKSSVRRLKDGSLLPVIKDXKGTILVLDPDTETPTHSH

SEQ ID NO: 312291 - protein, 82 aa, Zea mays
  Clone ID: MRT4577_47867C.1.pep
GGSSPGFLAGGTLFRGPSSPTRKVGWKGVSGVASTGGFPPRSRGGPKRGGPKRVLVHCGSTPCRASLVACWVLVLCWAAVVF

SEQ ID NO: 312292 - protein, 110 aa, Zea mays
  unsure (1)..(110): unsure at all Xaa locations
  Clone ID: MRT4577_47868C.1.pep
SSAKERIRDFICVPELRVAWGMFISGSSPIGARINGPRMTSKNLINEIFRDAGSTYGETGAIMVQTKVDSVTTREMXHADSPGARYAMXATGRSAGSVNSVWRDCKKIIG

SEQ ID NO: 312293 - protein, 41 aa, Zea mays
  Clone ID: MRT4577_47869C.1.pep
IVTKPHDDRSSAPSGTTTSPTTKSSLLPLDPNRKPRYTEEC

SEQ ID NO: 312294 - protein, 161 aa, Zea mays
  unsure (1)..(161): unsure at all Xaa locations
  Clone ID: MRT4577_4786C.1.pep
TKGPPGAXXXRTXPRXAXXXRTRRXXRAARTRXXPRRTPTATGGGPXXSXGARKKXXAPPTAAXXXPPSRRRXPPRAPRXTTPXXSXXTPTTAAPXTAPXXTTRSPAXSPPAPTGPXPSRXRXPGTTRAGAPRPRQPSTRPXGTPPRTKPTPRRRPRRRRP

SEQ ID NO: 312295 - protein, 79 aa, Zea mays
  Clone ID: MRT4577_47870C.1.pep
LDRAMSGPFSAYLCFASPFSLPETWGPSVILPVGRTGTDGDEASSAAMVALRARVRDGAETECGEEGERDREIQQKLGS

SEQ ID NO: 312296 - protein, 97 aa, Zea mays
  Clone ID: MRT4577_47871C.1.pep
IVTRHYDLSTPCHTRPPSRLAPAAEQQHARHSLINLVVVFNTVETLLCSTRVSCLSECVTGLLDLPVGWFTSATVYPTSAVTLLYSPWCSLPTLLPG

SEQ ID NO: 312297 - protein, 169 aa, Zea mays
  Clone ID: MRT4577_47872C.1.pep
LPPAPCMLQCRQHEDHTHGISGRSRVSTMVTVFAQATASDNAQDVLGSGTGYRRSQVHNPAEFELRSSSTSRFQRRRTSSWSKIGRGVSPVRGDRVRPGVRSRSPVQGVGPYFSSSGRHIFTGHASVQQQFDSLHTTPPKFGSPPPIASVGVVVHHVGSAEAHSPAFGC

SEQ ID NO: 312298 - protein, 87 aa, Zea mays
  Clone ID: MRT4577_47873C.1.pep
HTTQCDSDLPPSTRCALASPTILILLEMPTESSSPPMCTSLTWSTIMMVRILMCPARLNSTNNKTRESYTVDQHLSSASEKMNTSLA

SEQ ID NO: 312299 - protein, 44 aa, Zea mays
  Clone ID: MRT4577_47874C.1.pep
MRIILMFASIPSADCTHVGVASSRVFFGTIGYIPLKDPNFRYIS

SEQ ID NO: 312300 - protein, 50 aa, Zea mays
  Clone ID: MRT4577_47875C.1.pep
SWILLNFFFFFFFFFFFFFFFFFFFFFFFFFSLAAPNQTAPKLKYLFSTI

SEQ ID NO: 312301 - protein, 187 aa, Zea mays
  Clone ID: MRT4577_47876C.1.pep
MSPIWVFGYGSLIWNPGFAYDDRVVGFVRDYRRVFYQGSTDHRGTPQFPGRTVTLEHQPGATCWGVAYRIKEEDKEIALEYLEVREKQYDEKVYLDLYTDSSPKVPAVENVMVYFATSNKENNQNYLGPAPLEEMTRQIYLAQGPSGPNKEYVFKLEDALHKLGVVDQHVQELANALREYSDTELSK

SEQ ID NO: 312302 - protein, 72 aa, Zea mays
  Clone ID: MRT4577_47877C.1.pep
SSAPEHFHLLQGNLDTELIKSQYGPINYLLKTSNSRSITRLLPLPNARSTSPYASTFPLIFSNTLYPKAPTS

SEQ ID NO: 312303 - protein, 66 aa, Zea mays
  Clone ID: MRT4577_47878C.1.pep
SLNDYSIRDNVHMKIVLASFSAYMVGLVRHSLNSSSSYVEIHGIHFHPGPGLSRSCVSNGMRGRVF

SEQ ID NO: 312304 - protein, 137 aa, Zea mays
  unsure (1)..(137): unsure at all Xaa locations
  Clone ID: MRT4577_47879C.1.pep
ELETTAPAPPGEDXNEPGGPTPTGXGPRRGARPALEAPQQEQNSHADHLPPPPSGGQEAPGDTPTRQNPAPRPAPKPDRNALAPPDACHGGNGHTRRPPRAQPPGTSPRSPPRGPTSNGGLKTEARKPPHEGQSQTG

SEQ ID NO: 312305 - protein, 59 aa, Zea mays
  Clone ID: MRT4577_4787C.1.pep
GHLWCHSPSGENCWSCFWIKPSPKVPGSFKYIMGSVQVMCTLSCTLKNDLGPFASARLV

SEQ ID NO: 312306 - protein, 60 aa, Zea mays
  unsure (1)..(60): unsure at all Xaa locations
  Clone ID: MRT4577_47880C.1.pep
NQDKGXTESRGEHKDAGEDGSNPXNKAHGRTADEDHGTDPRXNRGXNEGRKNHXXSTTKK

SEQ ID NO: 312307 - protein, 81 aa, Zea mays
  Clone ID: MRT4577_47881C.1.pep
GSEQQSQPVYCAQVVIASSCMFHTLACSLQELVEAGRTSSMMKQNPDCSARNRQCYFHDCGYVSLKSKAGPLNSLSLLRVF

SEQ ID NO: 312308 - protein, 58 aa, Zea mays
  Clone ID: MRT4577_47882C.1.pep
FVPDEYKRCWFGVRILKIKKRRKKKKKKKKKKKKKKKKKKKKKKKKKKKRAAAKKDPM

SEQ ID NO: 312309 - protein, 66 aa, Zea mays
  unsure (1)..(66): unsure at all Xaa locations
  Clone ID: MRT4577_47883C.1.pep
TAALYVNHRLRRGAVFPPPSFPESCVLSDSHGSQRVRRRSGAWGLGTVDSGVGGPCGARPGLXRVP

SEQ ID NO: 312310 - protein, 84 aa, Zea mays
  Clone ID: MRT4577_47884C.1.pep
PTGTEHHPHQNKNMTWDNTAFALIIDDHLVTLFISELDRPTLHLAESRTAFEGVAHHFIILRSARLLNSALRDQIVVVGLIGSA

SEQ ID NO: 312311 - protein, 95 aa, Zea mays
  Clone ID: MRT4577_47885C.1.pep
LLFLLLSRAVSLFFLFRALDLLIGKKKKREPLQTKWAGRSSTPLLKAIPRERNSPVKSQPPPTCPKHQLPPTEAPIGILTLCRQSPWIRPPPQST

SEQ ID NO: 312312 - protein, 67 aa, Zea mays
  unsure (1)..(67): unsure at all Xaa locations
  Clone ID: MRT4577_47886C.1.pep
LSIMSSLTHLNLSYHDLHLIISMHLLSINPLAISLVLNSTLYTSXIIYAHALQSCCLKRKINTILHH

SEQ ID NO: 312313 - protein, 88 aa, Zea mays
  unsure (1)..(88): unsure at all Xaa locations
  Clone ID: MRT4577_47887C.1.pep
SLQMLLNISKXLLGSLPLNDLHTNSLXXSSNTPKLHSYIHYQIASQAATQSSSASNPTQSINNKNNDTYFCYYFCKSLILFAFISAFF

SEQ ID NO: 312314 - protein, 36 aa, Zea mays
  Clone ID: MRT4577_47888C.1.pep
NQMSPLYYCIGPGIISIVWHLCLDAHSTYHSDYISN

SEQ ID NO: 312315 - protein, 65 aa, Zea mays
  Clone ID: MRT4577_47889C.1.pep
PGHHASAHASEKKKKKKKKKKKKKKKKKKRGVLGESKTLFSFACNALPLFYFGFTFNMLGLRLLS

SEQ ID NO: 312316 - protein, 67 aa, Zea mays
  unsure (1)..(67): unsure at all Xaa locations
  Clone ID: MRT4577_4788C.1.pep
GVSHPSGRSLTRFHTPLLRRGSRAKAWISLGLALAVALSARAEEEPADAAEGEAXLTLDDNSFYYPA

SEQ ID NO: 312317 - protein, 39 aa, Zea mays
  Clone ID: MRT4577_47890C.1.pep
GFNPKQGFKGVNLTQVKETLKLLGKSHNMTPRIKLGSHF

SEQ ID NO: 312318 - protein, 100 aa, Zea mays
  Clone ID: MRT4577_47891C.1.pep
VGFFFFFFFCGGFFFFFFLSFFFSCAWGAPGGPGRARRAFFFSPWSACWGGGGAWVMGGSRAGLVVVALPLRVRPGRSGRHAGRPGGCRALPCLPFVPWP

SEQ ID NO: 312319 - protein, 86 aa, Zea mays
  Clone ID: MRT4577_47892C.1.pep
SSGNNAEYAGVLAGAVVEVPDVVLLQRNARSLTTRSRNELACVLFSLPNKTNFSRLLFCCSTCTFQSAKKKKKKKKKKSTLRCYHC

SEQ ID NO: 312320 - protein, 74 aa, Zea mays
  unsure (1)..(74): unsure at all Xaa locations
  Clone ID: MRT4577_47893C.1.pep
WADLCSLFMCLFMCLYXDRGPCENPACPARRQPTTHPGHVPYARLAGRNNGSAIVPTLNSTILDRRTLPPVAGQ

SEQ ID NO: 312321 - protein, 37 aa, Zea mays
  Clone ID: MRT4577_47894C.1.pep
IEIYIDHQMIIIYGSFSKPCKFVLSRHDIHSYLQERL

SEQ ID NO: 312322 - protein, 67 aa, Zea mays
  Clone ID: MRT4577_47895C.1.pep
DGKETATHTTHTLITLNSLPSFPLFTSLSSKIDRINRQSSNPSKHRVDLKNLYNKCHKQLQQLHLNF

SEQ ID NO: 312323 - protein, 678 aa, Zea mays
  Clone ID: MRT4577_47896C.1.pep
MVMAAPVPLRRRRALLVVATLLAVVTAALAQDYKDGGGDDYEEDEKKKPQFKAQEACNGVFLTYTFMERAKEYPHLKKAAAQPYAFKATATVLNTMTEDLKAWQMFVGFQHKEILVSVGGAVLLDGSDLPANVSGGATFAGYPMADLLNSIETAGEPSLIESKIEITGTQFGVKAPGKPMPKTIKLTNPVGFRCPAPNHKDSVMYVCCVKDRKFKAKKANSTRYQTRRKADLTFAYDVLQANTNNYQVQVTIDNWSPISRLDNWNLTWEWKRGEFIYSMKGAYTLLKEGPACIYSPAAGYYKDMDFTPVYNCEKRPVIVDLPPEREKDDAVGNLPFCCKNGTLLPPTMDPSKSRAMFQMQVYKLPPDLNRTALYPPQNWKISGKLNPQYACGPPVRVSPQEFPDPTGLMSTTPAVASWQVACNITRPKKRASKCCVSFSAYYNDSVVPCNTCACGCGDDTATCDPDKRAMLLPPEALLVPFDNRSAKARAWAKIKHWRVPNPMPCSDNCGVSINWHVINNYKSGWSARMTIFNWQDYTFKDWFAAVTMGSHFSGYENVYSFNGTRMGAPFNNTIFMQGVPGLAYLEPITDAKTTSEPRLPGKQQSVISFTRKDAPNVNIPRGEGFPKRIYFDGEECALPDRIPKVSSARRRAGTASLGQIAMAAALVMIVALVDSLCL

SEQ ID NO: 312324 - protein, 133 aa, Zea mays
  unsure (1)..(133): unsure at all Xaa locations
  Clone ID: MRT4577_47897C.1.pep
LYRCHLEDVVKVAGFYNLTPKLKFVCRLNLMLSINVDKNSEQDLQLXVDSAARILLEEKLEVVDYSSHAEASRDPGHYVVFWELNAYGFDGVLRSCCNVLCGLALSVLFILLSVIHWPWHQGQLGDHMSSGAM

SEQ ID NO: 312325 - protein, 65 aa, Zea mays
  Clone ID: MRT4577_47898C.1.pep
GRGITSVTCGASIATNHHGSTGSTACASKPVSLLSPAVYGGIHLSRLLEVCLLAATLTSTIQLLT

SEQ ID NO: 312326 - protein, 148 aa, Zea mays
  unsure (1)..(148): unsure at all Xaa locations
  Clone ID: MRT4577_47899C.1.pep
MAAWGGMMLFGRLAGLVGAGLLWAAADIGAGQQAFNVRATNHLYKPRQNGWDLNRVSAYCATXDTYKTLSWRKKHGWTAFCGPAXGTKGRXACGNSIXGKNRATGACILGRIVYQCSNRXWDLYYQTVFYKIDTNGQXYHMGSLNNNY

SEQ ID NO: 312327 - protein, 66 aa, Zea mays
  Clone ID: MRT4577_4789C.1.pep
RRVRHFASSFLKFVDIFNLCYCTFTLAVHICTQKCSIKYVVFSNSNLCYKNIPHIVSLSLKKKKKK

SEQ ID NO: 312328 - protein, 56 aa, Zea mays
  Clone ID: MRT4577_478C.1.pep
LDHFFFELGAKKIKHLSKLLDEDPPVMEPRPTLAKRLDLYRSAPSEINPVAWSKKP

SEQ ID NO: 312329 - protein, 72 aa, Zea mays
  Clone ID: MRT4577_47900C.1.pep
KKPNKKEQLTLVNNVLKLSTKLLKELDTPFRLYGLTMNPLIYNITRVVILSAVSGGISDRLGFNIRLWKIKS

SEQ ID NO: 312330 - protein, 101 aa, Zea mays
  Clone ID: MRT4577_47901C.1.pep
SNPSESTWLALVMADRIPTLLIPTTTVTLRHSSQRWRRWSGACPPSGGYSSPTLVLTTAAMALRCSSSRWGNNADLEEGEDAAASFRADPILSSAPQMPYL

SEQ ID NO: 312331 - protein, 83 aa, Zea mays
  Clone ID: MRT4577_47902C.1.pep
SECKLQSAGDIEITLENLSLLAWFFCIRACVVGSMSTVPLLYIYERTRVALQLCLFSISARAIISFSRPRRSSFKKRVRARVG

SEQ ID NO: 312332 - protein, 253 aa, Zea mays
  unsure (1)..(253): unsure at all Xaa locations
  Clone ID: MRT4577_47903C.1.pep
MTPSLQDAKITFLGGGNMAAAIIGGLLAKNTNKQNIYVSEPWDVNRNKMADLGVRTTADNKEAAADADVVILAVKPQVAKGVCEELSSAWAGRDSLPVVISIAAGITLASIAQWFKGDSGKAPHIVRVMPNTPALXXGEGASGLYXAAEDVTXAAEKELTSALLXSVSXATEWVDKEELLDVVTGIXSGSGPAYFFAFVEHLISSGVSLGLSEEQATRLAAQTCLGAGKMLVESSDEPFSLRKNXTSPNGTTH

SEQ ID NO: 312333 - protein, 60 aa, Zea mays
  Clone ID: MRT4577_47904C.1.pep
KKTGSGISKPQQARGLVERDPKRDGTKILVYWVRNPLSLGRKGNFYLEQTPQKKAFFGWG

SEQ ID NO: 312334 - protein, 58 aa, Zea mays
  unsure (1)..(58): unsure at all Xaa locations
  Clone ID: MRT4577_47905C.1.pep
TPSKPLPTAVLAKLPAPSIYPLPLHACGHAMPASPQIQVGRRAPAQFKDXCVVXPPPP

SEQ ID NO: 312335 - protein, 122 aa, Zea mays
  Clone ID: MRT4577_47906C.1.pep
HDILVFTYVTFRASNWGGEDKNKCLNETEPIYKTGYKAATTDYSLMAKAKHYFRTLEPKGIHVQILNITELSDYRKDGHPTVYRKQFAPLTKEQIADPASYADCTHWCLPGVPDVWNEFLYG

SEQ ID NO: 312336 - protein, 138 aa, Zea mays
  unsure (1)..(138): unsure at all Xaa locations
  Clone ID: MRT4577_47907C.1.pep
QNEYYSTSIRIFLQELSSPTHSXASNWGGEDKNKCLNETEPIYKTGYKAATTDYSLMAKAKHYFRTLEPKGIHVQILNITELSDYRKDGHPTVYRKQFAPLTKEQIADPASYADCTHWCLPGVPDVWNEFLYGYLVQK

SEQ ID NO: 312337 - protein, 43 aa, Zea mays
  Clone ID: MRT4577_47908C.1.pep
VFAIPDVQLLIQALDARIMARRAGLHSTWICELRPSSSSRVLT

SEQ ID NO: 312338 - protein, 57 aa, Zea mays
  unsure (1)..(57): unsure at all Xaa locations
  Clone ID: MRT4577_47909C.1.pep
LPAPTLXLLRIVTWVGRHNSCPVCRCRIPPAVDPEQAXPLEEDLWXTLVVVRFSCRG

SEQ ID NO: 312339 - protein, 74 aa, Zea mays
  Clone ID: MRT4577_4790C.1.pep
MERKTFGFLFLLLLVLASDVTVKRAEAKDCLTRRHGFQGRCLFDRQCAHVCRSDGFIGGQCRGPLRKCFCSRPC

SEQ ID NO: 312340 - protein, 86 aa, Zea mays
  Clone ID: MRT4577_47910C.1.pep
SSNSYCSTASDLTCCMVNCPSTQVLYFEDFVPCQISQSSFDVLMSTDRQSYGFKLKRGLLDDEGNAFLEWDSMTFARIEGGFSVDP

SEQ ID NO: 312341 - protein, 60 aa, Zea mays
  Clone ID: MRT4577_47911C.1.pep
GGLELDKGLNNACMLSSLLIAIHTTLHFKSTGPILADVESNQHLFMSYGGRRRFCCARLP

SEQ ID NO: 312342 - protein, 67 aa, Zea mays
  Clone ID: MRT4577_47912C.1.pep
HRCGNLITWESSQTFVVYIPKTRSPCQRYLVIQTINSALACAGAEVYIKWNASSVLTRRAVALLEYD

SEQ ID NO: 312343 - protein, 187 aa, Zea mays
  unsure (1)..(187): unsure at all Xaa locations
  Clone ID: MRT4577_47913C.1.pep
SVNLATLXXHCSNLKRLKVENNQKLTNDGVKAIASLSALEHLGLQLQHKTESDAYIEVVSRIGANLKTFSLKIVPEVDDTLLQAIHEHCRSLSKFRITDSEFMTDQGFVDLFTKWTNPPLRFVDLQKCRQIDASKPRENPDSVGLCSEGFKALMAHSGEKLQYLNIHACRHISREAFEEVFHKDAQY

SEQ ID NO: 312344 - protein, 229 aa, Zea mays
  unsure (1)..(229): unsure at all Xaa locations
  Clone ID: MRT4577_47914C.1.pep
MKKIFGAKKNKDPPPTIQDATDRITKRGDTVDEKIKKLDAELARYKEQIKKTRPGPAQEAVKARAMRVLKQRRMYEGQRDMLYNQTYNLDQVAFAAEGLKDAQQTMTAMKAANKELKGMMKTVKLEDIDSMQDEMMDLMDVSTEIQETLGRSYNVPXDDIDEEELMGELDALEADMDFESESVPSYLQPDQEPELNLPAAPTGHAAVPANQQQEDELGLPTVPQASIRT

SEQ ID NO: 312345 - protein, 75 aa, Zea mays
  Clone ID: MRT4577_47915C.1.pep
PYKTPTPSKLKLASPFNKGEGPFGRGPFTGNPPRPQEGLPSSPEGAFPYRTRGLRFFLWGQTPFPGAFKAFPGLS

SEQ ID NO: 312346 - protein, 83 aa, Zea mays
  Clone ID: MRT4577_47916C.1.pep
RGLTRPCEPLSWWPQGYAPCLDLASSHHSIMYVSSRPDTRRSPARSIPPVSLSPSGSVRLLALAYSSRYVLSYSSTRGRRMGA

SEQ ID NO: 312347 - protein, 97 aa, Zea mays
  unsure (1)..(97): unsure at all Xaa locations
  Clone ID: MRT4577_47917C.1.pep
HASAHASGGQDKIRPPSSHYFQITHCHTFVARSNERDRVVEAIYELHRMLNEDELRDAALLVFAIKLYVLGAMDAADVTDKLGLHSLRXRHWYIPST

SEQ ID NO: 312348 - protein, 66 aa, Zea mays
  Clone ID: MRT4577_47918C.1.pep
DYCCKYDHSSDHVIHIMIQMKHDSDNDFEMEDIIDDIHDHTYVLTNARNGSLIERPHERAHMVAIS

SEQ ID NO: 312349 - protein, 84 aa, Zea mays
  Clone ID: MRT4577_47919C.1.pep
KQHKLPVGFQVPFGQGTNITGELWAYLKSLISTGGGEYKSPCKALYFYRWERCPPRRGSFFGWSTSSRAPLNKLFRGPWGGRGG

SEQ ID NO: 312350 - protein, 279 aa, Zea mays
  unsure (1)..(279): unsure at all Xaa locations
  Clone ID: MRT4577_4791C.1.pep
PDADALIAEVFDAVSGVRRAYAALQDAHCPWDPDKMRTADAAVVAELRHLARLRDRFRRSAAVGHIPRPNPSAPPLREAVAPYEAALDDLQRQLQSRQAEVNALKEKLAXATSRRNGRHHHVPPSKQNGGAPTAELFTTCAEQARAATRAFAGHLAHLMRAAGLELAAATRSLTKIPVSSPQLAKHALEAHATRALLGGFEHESFYLDGSLSSLLDPAAFRRERYAQFRDMRGMEPAELLGVLPTCAFGRYAAAKFAALLPPRVEEAVLGDAEHRRVVN

SEQ ID NO: 312351 - protein, 45 aa, Zea mays
  Clone ID: MRT4577_47920C.1.pep
HHFAIRWCLTKPWIQQDGHRENVLSLGQRGDLIVETVEGAALALG

SEQ ID NO: 312352 - protein, 93 aa, Zea mays
  Clone ID: MRT4577_47921C.1.pep
ANNPRRTLRDFSWNTTVHVPMADRMVRREINRPDLVRLLGLHGWVHPGSLCPNSFEHWMLLTWLMEVSTGLTGAAQPHRAHWGQMRYFTVRTH

SEQ ID NO: 312353 - protein, 80 aa, Zea mays
  unsure (1)..(80): unsure at all Xaa locations
  Clone ID: MRT4577_47922C.1.pep
MREXFSIQIGQSGIQDENACWELHCLEDGIQXPDGQMPSDRTIGGGDDAFTTFFSDTGAGKPVPRAVFVDLEPTATDEAR

SEQ ID NO: 312354 - protein, 54 aa, Zea mays
  Clone ID: MRT4577_47923C.1.pep
SPPLASRSSHSHTLSFLNPTHLSQPRHVPSPWPGGARHRRSSSFSPRLSPTSSP

SEQ ID NO: 312355 - protein, 115 aa, Zea mays
  Clone ID: MRT4577_47924C.1.pep
AARGVLALLLLQMVLAPTTPTDRLLQVCHLHRGMIPTQLRGIVDKPGKTDVCREASNNQPCPLVSSRSAKAVYVIGEKRLSAPTLFALCVGKKHLATNCLFDDCMLRGEQGPGWL

SEQ ID NO: 312356 - protein, 37 aa, Zea mays
  unsure (1)..(37): unsure at all Xaa locations
  Clone ID: MRT4577_47925C.1.pep
NAIPDHSVTSASPEPKRRSNERGEPARRSIRXGLIRL

SEQ ID NO: 312357 - protein, 44 aa, Zea mays
  Clone ID: MRT4577_47926C.1.pep
RSSAPKMNSVHNLHSIISSLTSMIPQEKKKKVSRCSTAKANPAH

SEQ ID NO: 312358 - protein, 1017 aa, Zea mays
  unsure (1)..(1017): unsure at all Xaa locations
  Clone ID: MRT4577_47927C.1.pep
MSEAAKKAAAEMKLSLDEEKNLGFLIAMSKSNTEKITKEILEGLSEDTGDSESYDMDNGGEDSEDRPWRPSHSVYGKSTIKENHLVNMRGRYFRDLSIVRADEGEKTCPHPEENEVVVYRSFLKAGLRFPLSSFVVEVLKIFEVYLHQLTPEAIIRLNIFVWAARSQGLKPDARSFCNVHELLYETKPWGKEQYHNNFGCYSFVSRSGASCPVPTFRKRWPGDWMTEWFYVKNDLSAREDIKGIIMRPIWQSFGLRRPKVEMNEAAEECQRAFGVVCSFIGTRDLVQEHIAFRVWPLAEKWEMPQETIKEADEGELVRLKYTFKFGDKFIEPDDEWLKSIDNLSDELLGTYSKAEDNAMSAAFGGRKKKRLNRVFDAIGFVYPDYCYPIRRQKRKNTISAKEEAAAAPSEPEPKRKKLKVLTHRPRYIEPASVPEFTGKTSSATEAEKPTEPALLPEIAETAEVPPKIESEQSNILLSETKEKTEAPLTEKIEEVREATEGSKTSEVLSPTAIIGTAKNQKGPSVTPKRXNGKCTRRLGDNXSSSTIPKKGVEVAEASTEASAQQAEAEAGPSEPFKEHPFEAEAVKIPEPILVEETDTVIPEAPAGMHDYIIRHASGKKLSEEETHEANHYAKELKYPKGAVIFNGTNEDDFLYCLPDNKELSVCREMARSIGFPKLEAGLSAMTKEDLADSLAYNSLKGLILSNALRAQKSAEDESYEIAFNNLRSEVIKLRNEALEKDKILLTLVDKVKKDEAASKAQAEAQKREIKDLQKQLARAKEERALEETKRELSDFMVNKLESKVKELRTSQGKCYVKSVECVNKIKSSFASVGAFSSEENXSLEAIPKXLEWISHEAEAFEEILNSRGDICAFSGARGIASVLEKKGCEHVKFLAQSEATLSTEDIKDPSAEASVVGGKFFTDIWNDGGRGMAREIIERSEKGIHDARRVADAAERSREPEGQLVLKKCSLRSETVGRSADPHTKGDEEINQMAETIMDKVVDQLLNEAAEAVLRED

SEQ ID NO: 312359 - protein, 976 aa, Zea mays
  unsure (1)..(976): unsure at all Xaa locations
  Clone ID: MRT4577_47928C.1.pep
MSEAAKKAAAEMKLSLDEEKNLGFLIAMSKSNTEKITKEILEGLSEDTGDSESYDMDSSGEDSEDRPWRPSHSVYGKSTIKENHLVNMRGRYFRDLSIVRADEGEKTCPHPEENEVVVYRSFLKAGLRFPLSSFVVEVLKIFEVYLHQLTPEAIIRLNIFVWAARSQGLKPDARSFCNVHELLYETKPWGKEQYHNNFGCYSFVSRSGASCPVPTFRKRWPGDWMTEWFYVKNDLSAREDIKGIIMRPIWQSFGLRRPKVEMNEAAEKCQRAFGVVCSFIGTRDLVQEHIAFRVWPLAEKWEMPQETIKEADEGELVRLKYTFKFGDKFIEPDDEWLKSIDNLSDELLGTYSKAEDNAMSAAFGGRKKKRLNRVFDAIGFVYPDYCYPIRRQKRKNTISAKEEAAAAPSEPEPKRKKIKXLRIGRVILNQLRCLSSPEKLLXTEAEQPTLLPETAEVAEAPSTEKMEEAKKPTKEKTLEVLSPAVNIETAKNQKGPSVTPKRKRMVNVLDVLETIKSSSTIPKKSVEVAEASTEASAQQAEAEAGPSEPYKEQPFEAEAIKIPEPVLVEETDTAIPEAPVSMRDYMIRHASGKKLSEEETHEAIHYAKELKYPKGAVIFNGTNEDDFLYCLPDNKELSVCREMARSIGFPKLESGLSAMSKEDLADSLAYNSLKGLILSNALRAQKSAEDESYEIAFNNLRSEVIRLRNEALEKDKILLTLVDKVKKDEAASKAQAEAQKREIKDLQKQVARAKEERALEETKRELSDFMVSKLESKVKELRTSQGKCYVKSVECVNKIKSSFASVGAFSSEENXSLEAIPKXLEWISHEAEASEEILNSRGDICAFSGARGIASVLEKKGCGHVKFLAQSEATLSSEDVKDPSAEASVVGGKFFTDIWNDGGRGMAQEIIQRSEKGIHDARKVAEAAERSTEPERQLGAAGSNVDEEIKQMAETILDKIADQLLNEAAEEVLRED

SEQ ID NO: 312360 - protein, 66 aa, Zea mays
  Clone ID: MRT4577_47929C.1.pep
IITQSRAPPTLCLVFIEENKILGVFSVNDHGVFGSLLIWRVAKYSFVVLPVVTRSAFVMVMNSLYV

SEQ ID NO: 312361 - protein, 62 aa, Zea mays
  Clone ID: MRT4577_4792C.1.pep
LVTLINVMQLPGLNTLGISLARIDYAPLGQNPPHTHPRATEILTVLEGTLYVGFVTSNQAGK

SEQ ID NO: 312362 - protein, 41 aa, Zea mays
  Clone ID: MRT4577_47930C.1.pep
ARIYMIKIPLVAFNQNETCYFVKYKVLLNVAKVRPIVTLPS

SEQ ID NO: 312363 - protein, 264 aa, Zea mays
  Clone ID: MRT4577_47931C.1.pep
RQLLKGEIAVHPLCEQLVAAHVGCLRVATPIDHLPLIDAQLAQSSGLLHSYAAHHRPFLSPHDKHDLDSFLAQYLMLLCSFREQLQQHVRVHAVEAVMACREIEQSLQDLTGATLEEGTGATMSEDEDEAPMLEVGLDMGSDGHDMMGFGPLMPTDSERSLMERVRQELKMELKQGFKSRIEDVREEILRKRRAGKLPGDTTSILKQWWQEHSKWPYPTEDDKAKLVEETGLQLKQINNWFINQRKRNWHNNSQTSTLKSKRKR

SEQ ID NO: 312364 - protein, 60 aa, Zea mays
  Clone ID: MRT4577_47932C.1.pep
RPYVNGTSMPSPRVVRLLRPSSPHRPQSVPSLYPKTPPLGQIGARRTWSRSGAHLKKLDR

SEQ ID NO: 312365 - protein, 172 aa, Zea mays
  Clone ID: MRT4577_47933C.1.pep
MPEFVLFGDSLTEWGFSETTQGFGRFLQQKYQYKVGIVNEGRAGYTSSDLQDDFARIIRSTTASGATQTLLFTIFLGANDACIGLQGAEYVPWPVFSENIRGFLDTILTEQAMDNTKIVLITPPPINSQVEAISNNMSKAEVEQENCKRNEMLGYRTYMNKKAYAEGVMKIA

SEQ ID NO: 312366 - protein, 66 aa, Zea mays
  Clone ID: MRT4577_47934C.1.pep
GPIVEKADRKRPISLEGHLGKGRQDSTREGLVKPRASQSSHVKTTPSEKISWRPTRRTITFESPPI

SEQ ID NO: 312367 - protein, 144 aa, Zea mays
  Clone ID: MRT4577_47935C.1.pep
IDKSKMENVLLDRSSRSLEFPKRSLIGRGRRGPAGARTAVPPFGSYSSFTTWQSHNHLHKGGAWASAPALPYARPPVIYSSPSLPLLPSHQPPLLPLPRPLQSTPLSPPYQQLRPRPASAPRAGRSAAGSTTVSVSAAVPPAPA

SEQ ID NO: 312368 - protein, 37 aa, Zea mays
  Clone ID: MRT4577_47936C.1.pep
MATAGKVIKCRAAVAWEAGKPLSIEEVEVAPPQAMEV

SEQ ID NO: 312369 - protein, 34 aa, Zea mays
  Clone ID: MRT4577_47937C.1.pep
QPYSGVRDLGAAESRHASLRVIMGHHGASLCGKL

SEQ ID NO: 312370 - protein, 273 aa, Zea mays
  unsure (1)..(273): unsure at all Xaa locations
  Clone ID: MRT4577_47938C.1.pep
PAGNVTTKIQQQILXFSSEGEAPSSSTVLAPLKLQDPILDCARDGRTHTVNSFLERPINFRTATWSNQAAGSRLFSFNYPSDVVKNSMYSRKLQNFLGLRADLVVRVQVNAQPFHAGRLMLSWTPFLNSLGASRKYYYTDPTPSFLTCISGNPRVEIDLSTTTEATMTIPFVSPFLYYNLVTGTGDIGTFQLIVYSPLVDLVSGGNIDYTIWVNMTNVRTEFPTGMPTSIAQVGEEGKQQQKAGFVTRQAEAYSTIMXPLTKIPGVGQLIGFA

SEQ ID NO: 312371 - protein, 83 aa, Zea mays
  Clone ID: MRT4577_47939C.1.pep
MLDQAFDTERQPEDPWKAGLALTQTTAALIRMHQARDSCWSDRLMGLTEIGNPFLDNGAYVAPLGSKCPCGTGTRIYGFSRTC

SEQ ID NO: 312372 - protein, 56 aa, Zea mays
  Clone ID: MRT4577_4793C.1.pep
LQGGHVSVNPDVGSIPQRLQLLPFFSIKQKGFFGKDDHAITRSIVAFTYHEPSKKA

SEQ ID NO: 312373 - protein, 105 aa, Zea mays
  Clone ID: MRT4577_47940C.1.pep
QQEKTMVFKVRTRRLVDLWYNAMRCKQLQHIKKKKPTCWKACSSTTVCIKNPEARNWLATQRRVYFSPDITHICIGLPIFMAHAARSLAFIATSAHILALTEMRF

SEQ ID NO: 312374 - protein, 83 aa, Zea mays
  unsure (1)..(83): unsure at all Xaa locations
  Clone ID: MRT4577_47941C.1.pep
MTDCISXHIVQLAIQVGNASWELYCLEHSMQPDGQEPGDNTDRHHDDAFSTFFSQTGAGKHVPRAIXADLEPTAIDEVRTDTY

SEQ ID NO: 312375 - protein, 48 aa, Zea mays
  Clone ID: MRT4577_47942C.1.pep
SVLCSVPDSESRVKGLGHIVRHRGCFHVIGYPWSALTHGSRDEADDRG

SEQ ID NO: 312376 - protein, 56 aa, Zea mays
  Clone ID: MRT4577_47943C.1.pep
SLDTKHPLTQTPVISWTDSIPARLHYIDRSRSLAHGCCHPRRLLCRQACLLLEYCI

SEQ ID NO: 312377 - protein, 51 aa, Zea mays
  unsure (1)..(51): unsure at all Xaa locations
  Clone ID: MRT4577_47944C.1.pep
DGGGEVVELKLLQLSLCSPPPASGRCSSYAVAXRHLPSLSSLFPSSILPRP

SEQ ID NO: 312378 - protein, 121 aa, Zea mays
  Clone ID: MRT4577_47945C.1.pep
MNAFFYALMSLAIAATNVSAIGETMTCTTYSASPKGFACNDRPDIVCTEGCKTFVTSSQCKFDKYPKKPTTSELCTVGFGSTSATTKICITGQGSFSCTGKSTGSAKCYGCVAYNKIPWAS

SEQ ID NO: 312379 - protein, 144 aa, Zea mays
  unsure (1)..(144): unsure at all Xaa locations
  Clone ID: MRT4577_47946C.1.pep
RDIIHRGGAGLKTEPAIVASDPLRTETTTTTSRFRQIWIQKQNMRCSTTKTKQQEPCRQGLTDTGSNAGLLFSPSPSSIQARKMPNPAIRSEAAQHEANGFPDKSKKKVAHRRGKVSRRTAILDLEDEIPLRAEGNRPXQWFVP

SEQ ID NO: 312380 - protein, 99 aa, Zea mays
  unsure (1)..(99): unsure at all Xaa locations
  Clone ID: MRT4577_47947C.1.pep
SGLVRSSASCAFVRCLSSGASPASFLALAPSCRLCRPWPPGLLFWFFVLWSPSCASRSASWALLPVHWPCLPAPLQLPAPWPLASARASKGAWVXPXFR

SEQ ID NO: 312381 - protein, 69 aa, Zea mays
  unsure (1)..(69): unsure at all Xaa locations
  Clone ID: MRT4577_47948C.1.pep
DHLPIRIRPNLTTCNCPNCPCVLTPQKKKKKLSICKKKKKKKKKKKKKKKTKKKKKKKKKKXLCVVPTV

SEQ ID NO: 312382 - protein, 499 aa, Zea mays
  Clone ID: MRT4577_47949C.1.pep
MQHITRDILSMLGVEFSDFAFLPSAGASGGILVAWKRTVGHTGAQRVDNHSISVQFCKDDGVPCWLTCVYGPQTDAEKVLFLQDIRAACVGPWVIEVWDPVRNLPADKAPGPDGFTRKCYKAIDETDKIRKGLLWRGRKEAKGVHCLVAWRKVCSPQNLGGLGISSFSELCWAIRMRWLWLKRTDPTRPWSDLPIQVPSKARFFFSAVLVTELTMASLLVQFLLIIIKESGSYGLHPDANSFYVLLRFSRKKAAKKVEDERAIRDGLLEVTEGGRHVLHLAAIVGDGEVPLTKKVTKEKNTLAEQLKNAEASRKRFDDELKRYAAETQTREEIRKSLENEVRRLTQTVGQTEGEKREKEEQITRCEAYIDGMESKLQVCQQYIRTLETSLQEEVARHAPLYGVGVESLSFNELEALANIHEQSLRQIKAIQQRKGSSHLLGGTALSHIPALFSPPPPSAAVGSPASRIPASPMAPNGAGMHGNGHHMNSTTGGRWFNPS

SEQ ID NO: 312383 - protein, 167 aa, Zea mays
  unsure (1)..(167): unsure at all Xaa locations
  Clone ID: MRT4577_4794C.1.pep
MQIFLKTLTXRPITLXEGEQSTPYHNGKANIQDKDRIPPNQQQLIFAGKQLEDGPTLADYNIQKESXTLYLVLTLRGXTXLIKVLTXLTXKHILIGIKPTFLFDTINDPVEEKEGITAEQHMLIYAGKQLADDKTAXDYSLKGGSVLHLVLALTRGYYSTPDELAIR

SEQ ID NO: 312384 - protein, 72 aa, Zea mays
  Clone ID: MRT4577_47950C.1.pep
QPSIHQDGSAAAIGDMLSSRLPTLPTDRTQAELHLNQFDTYSSGGLLDQLMLNGDKHLLWSNPSMVKVFSMP

SEQ ID NO: 312385 - protein, 485 aa, Zea mays
  Clone ID: MRT4577_47951C.1.pep
MEKLPSQQQVVLLASPGAGHLIPMVELAQRLAADHGFAVTLVTIPGMSNPATEAVVLSSLPSYVLTAVLPAVPLDDLPSDIGFGALVFEFVRRSLPNLRALMEDASRGSVTALVCDFFGTSALPLAAELGVQGYVFLPNSFAMISIMRHLAGLHGDAAAPGEYRDLPDLLPLPAGGLVLHHADLPEGFQDRKDPVYAYHVEEARRYGRANGFLVNSFEELEVVMVETFKRDAEDGAFPPVYPVGPFVRSSSSEEADESGCLEWLDRQPENSVVYLSFGTGGSLSVEQTAELAAGLEMSGHRFLWVVRMPSLDGNPCAYGSMPGDKDDPLAWLPEGFLERTSGRGLAVVAWAPQVRVLSHSATACFVSHCGWNSTLESVAAGVPMVAWPLYAEQKMNAAILTEVTGVALRPAARGNGHGLVTREEIAASVKELMEGEKGSAVRGRTRELREASKRAWSSEGSSRRALGEVAGKLKAALVNGNGSAP

SEQ ID NO: 312386 - protein, 91 aa, Zea mays
  unsure (1)..(91): unsure at all Xaa locations
  Clone ID: MRT4577_47952C.1.pep
LARIQRSIDPSTTWTGQITTSTSSSCRRRCRCHSHSSSSSSFAFRCSTSRRPRFWRGEADAGRRGGGRGRGGSRRSTYXRWSPCSTRTTPS

SEQ ID NO: 312387 - protein, 117 aa, Zea mays
  Clone ID: MRT4577_47953C.1.pep
FYWALFPLFWGGLKFSLLGVFLRLFGVIFRVPYLNFLGAHPFFSGGFFTFLAWKNFPFQHFFIFFGKWIPPVLANLAPPLWWFFARFRYSLRPLTPLFFRFFTPLFFKVPPLFPSTF

SEQ ID NO: 312388 - protein, 58 aa, Zea mays
  Clone ID: MRT4577_47954C.1.pep
CDVSFCVKWHIVEDVDKSILRHMMLENIEMKIVTHTSYIHEIRLDQCVQMLEVFSDDV

SEQ ID NO: 312389 - protein, 346 aa, Zea mays
  unsure (1)..(346): unsure at all Xaa locations
  Clone ID: MRT4577_47955C.1.pep
PSALLQVRWRSAGRRGHGCARAQAYVRGWLRVYCRPIPDTLIFEGVEVTGYQIFEDPKVQKAIEFASTAHLGQFRRTGDPYITHCIHTGKILAALVPSTGERAVNTIVAGILHDVVCDTSESLKSIEEQFGADVASLVSGVSKLSYINQLLRRHRQKNTGGSTLXQRNQANNLRVMLLGLVDDPRVVLIKLADRLHNMRTIYALPVPKAEAVAQETLAVWCSLASRLGVWALKAELEDLCFAVLQPQIFKKIQSELTLMWNHTGKSKNMRRSSIRNELLASMKDGNMVSINDWFSSCNQERPNMKDLLQAVLPFDIFLDRKRRSYFLSNLNSNSGESIPNPKIVDD

SEQ ID NO: 312390 - protein, 76 aa, Zea mays
  Clone ID: MRT4577_47956C.1.pep
PRNCQRREFGPPPSTGGWDIDSSRVLLACEEPERGAGVFVAMEGWVEFRIDLIRRRVIPPLLGQRSRHLDSRRASD

SEQ ID NO: 312391 - protein, 93 aa, Zea mays
  unsure (1)..(93): unsure at all Xaa locations
  Clone ID: MRT4577_47957C.1.pep
GKAISSSVQSPPACKAGCSGIMLVPLAKAQGFLLKVKPGVVLVFRSHCLFKPPCETVIFVKRGCLNENSWFAWKKKXXXKKPKKKKKKKKKKR

SEQ ID NO: 312392 - protein, 119 aa, Zea mays
  Clone ID: MRT4577_47958C.1.pep
RRVLSGLLCLRSRSRPRHDGAGLRSTPRRAVAEPQGMPYMPRHTGIPCPAIRSSQRLETPSPIEVGESGVPGVSLLPVILLVVQPGHRIVHVHSPGLRDAVAMSYLLIITGIWLMRNAV

SEQ ID NO: 312393 - protein, 74 aa, Zea mays
  Clone ID: MRT4577_47959C.1.pep
VFSKVLRHCRSCAQDYSYASSRRYPLRYDLRSNSEDSGYDHDIQHRVRMIDSRRAPSMISVDVQHCREWSIGYY

SEQ ID NO: 312394 - protein, 13 aa, Zea mays
  Clone ID: MRT4577_4795C.1.pep
MEEGFLRRRTWGR

SEQ ID NO: 312395 - protein, 240 aa, Zea mays
  Clone ID: MRT4577_47960C.1.pep
MSCTSPDPPDYCSAESPELKLYQAFIFSVPVFFTFVLLLFFYLFYLRRRRANWQSLRMRTNNLIRGDNARLECGLKKEMREMLPVVIFKESFLIRETQCSVCLAEYEPDERLQKIPPCGHTFHINCIDHWLSTNTTCPLCRVSLLPAPKATSTGLDLEAQTVVEEESPNAHHRQEEGLVDANTPQEGEAAGGDGASSVQIEEPHRDAAEPLVVTVVAVAAPQADAEGSPSTACQTVKGKK

SEQ ID NO: 312396 - protein, 48 aa, Zea mays
  Clone ID: MRT4577_47961C.1.pep
GCSAHSPSALGPFFDDGHAPCALAPPGDDLVFYVRGPRLAPDWRWVAG

SEQ ID NO: 312397 - protein, 63 aa, Zea mays
  Clone ID: MRT4577_47962C.1.pep
GRPFYKSMVFPRKVDLPGVDGEGLPGPGLGSNLSVVFFVLMDRVFSKVKWDIDAMVFAASPPF

SEQ ID NO: 312398 - protein, 49 aa, Zea mays
  Clone ID: MRT4577_47963C.1.pep
MGAVRVVVAGNLPIGCSPAYLSGANVTEPAAYDAYGCLAVLNGFAVLYN

SEQ ID NO: 312399 - protein, 99 aa, Zea mays
  Clone ID: MRT4577_47964C.1.pep
NPPAPPGLLKPSPNLFNKGNPFFGNLGNLKNLAGNGGPRGGFHGGEKKPAQAGVFVREGGAEPGLHVVEGPPKRAGPGGGHPGAAYFLARVGEGAHPAR

SEQ ID NO: 312400 - protein, 66 aa, Zea mays
  Clone ID: MRT4577_47965C.1.pep
LADLIYLTTHVITLLISICEYQLSVCFVAAESVLAADSNLSKLFYDCMDYIIGVYHTDMSKDELDD

SEQ ID NO: 312401 - protein, 203 aa, Zea mays
  unsure (1)..(203): unsure at all Xaa locations
  Clone ID: MRT4577_47966C.1.pep
PFVNRKPIPGPGNPEFPELGAQPGKVFLGPLPNPFQGLVGILLVGVLFRPSFHGGVPGPRAPQEWALGPQGPGGFXRFGGGVSQIXKRVVPLKGGPSPKNPNGPGGFPFPVVFPPPPPPKGGPPGLPPQGVSNRLSLLVFFFLTEGGRVSPQLFGVSPSLPGRGGFPWAGFGQKPRSPFQSCFVGAVFIRVFSVPPKKRFFVV

SEQ ID NO: 312402 - protein, 556 aa, Zea mays
  unsure (1)..(556): unsure at all Xaa locations
  Clone ID: MRT4577_47968C.1.pep
SSTTDAFFLAEPAVAVPENNVIAAEPEKVEKPKKKYVPITPTIHTGFSFSVVHLLTAVKKAMVTPAEDTPPATATQPDGEEGXVVQQWRAQQNAPSRTKCNRSNXQVLEGANASAVEQTVPINTPALTVQEIVNRIRANPGDPRILETQEPLQDLVRGVLKVLSSRTAPLGAKGWKALVAYEKSNKSWFWVGPAPSVSSYDDPDEETSAEAWSIPHKMLVKLVDAFSNWLKSGQETLKQIGSLPPPPPPNPANLDLKERFKELKAQKSLNTISPSSDEARTYFQREEFLRYSIPDRAFCYTAADGEKSIVAPLRRGGGKPTAKARGHPMLLPDRPPHVTILCLVRDAASRLPARTGTRADVCTLLRDSQYLNHEEANKEAAINQVVSGALDRLHYERDPCVLYDNDKKLWTYLHRGREEEDFEDDGTSSTKKWKRPRRDVSDAAEPGAANDDIDDDGAGTPPSNNVKKQKTTLSGEAANDEGNHPTQNPASGGLEGDSDLNAVPSSKFFEEPCGDAYIDARPDDGGPNSVDAKPGSTADDNTALPGNTGMDATTPP

SEQ ID NO: 312403 - protein, 59 aa, Zea mays
  Clone ID: MRT4577_47969C.1.pep
LESTKKNHIPTYGRDHLLYSTVSHYPSRKATIHTESCWLHLLKRTWLTHAREICDTHYA

SEQ ID NO: 312404 - protein, 112 aa, Zea mays
  unsure (1)..(112): unsure at all Xaa locations
  Clone ID: MRT4577_4796C.1.pep
LQHENGCYTARIVSSTPSPGSPSPSQQAGHSPSPRLVPFHMFCVRFSRDLWHAYTGRAPINPRTXAGSHSMPEQNRVVCATGITATNVVCQRPRDLVRGAQVSQSQRALVPN

SEQ ID NO: 312405 - protein, 74 aa, Zea mays
  Clone ID: MRT4577_47970C.1.pep
SRSGLSVACARNQILDWPTWSLQCTPLCTISIVSYQVDRSLSILMFERLQDWFLIKTQVWFCALSATVLRLMPN

SEQ ID NO: 312406 - protein, 108 aa, Zea mays
  unsure (1)..(108): unsure at all Xaa locations
  Clone ID: MRT4577_47971C.1.pep
GXNAQVSKILXXAKAXXKDSSKRQEKIDNEMYLAREKALADANYYRILKEAEANRLKLTPEYLELRFIESSATNSKIFFGEKIPNMIMDQRLLKNYLDAVPRKDHYEM

SEQ ID NO: 312407 - protein, 371 aa, Zea mays
  Clone ID: MRT4577_47972C.1.pep
MSDVTSDSAQRRRSPPPPSPSPSMPRFQQQPSGRQPPPPGADPFAFGIVAFIGICFVLVSLSVPSSVLHQVPEGHVGVYWRGGALLKTITPPGFHLKLPLITQYEPIQVTLQTDQVRDIPCGTKGGVMISFDKIEVVNRLRKEFVHETLLNYGVHYDKTWIYDKIHHEINQFCSAHSLQQVYIDMFDQIDETMKEAIQRDCTRYAPGIEIISVRVTKPNIPGSIRRNFELMEEERTKALIAMEKQKVAEKEAETQKKIALSEAEKNAQVSKILMEQKLMEKDSSKRQEQIDNDMYLAREKAVADANYYRILKEAEANRLKLTPEYLELRFIESIANNSKIFFGEKIPNMIMDQRLLKNYLDAAPRKDHYEM

SEQ ID NO: 312408 - protein, 65 aa, Zea mays
  Clone ID: MRT4577_47973C.1.pep
GSKGNMFFFLFSAKPGRNTFFFCAVLTNWQPPKGPLERYGTNCWLTKKAASQGFVPSQGYLNLCF

SEQ ID NO: 312409 - protein, 68 aa, Zea mays
  Clone ID: MRT4577_47974C.1.pep
ICSYTELAIQDLVDKKGVEPHFLPWHILGLPRGASCAALGNPWPPPTKRASLPVEWGCVVCDAGRVGQ

SEQ ID NO: 312410 - protein, 56 aa, Zea mays
  Clone ID: MRT4577_47975C.1.pep
SIRHTKIPQVNKQTSYIRTKETKHERELTHMPKPKTYAYGHLKPKKALYTRYVLTT

SEQ ID NO: 312411 - protein, 10 aa, Zea mays
  Clone ID: MRT4577_47976C.1.pep
MGLDVVEIGP

SEQ ID NO: 312412 - protein, 61 aa, Zea mays
  Clone ID: MRT4577_47977C.1.pep
QQQQQNNGEAKAEVKDSSSNSSSSGSSNLQVVQKRRLLMGVEEAAFLLMTLSSPTFTLLHG

SEQ ID NO: 312413 - protein, 67 aa, Zea mays
  Clone ID: MRT4577_47979C.1.pep
LFTRIARQYFAKMPWTLLCSSLQSRLVSGLFPLPPPDYPMGVSLPVVSLAVLSVPLCVGRARGFYSA

SEQ ID NO: 312414 - protein, 92 aa, Zea mays
  Clone ID: MRT4577_4797C.1.pep
PHPLNLCTPKSPDLAPPALIYPIKPAWFMMDKQIPKAAPPPSFPFLSLPCSLASCYCTCYPINKTSFPGVFYCYKKKKNKKKKKKKKKKKKH

SEQ ID NO: 312415 - protein, 47 aa, Zea mays
  unsure (1)..(47): unsure at all Xaa locations
  Clone ID: MRT4577_47980C.1.pep
AAGTTRLVRTNLALAGREGDTPSGWKXEXGWWDLGGGRVPMGRLYAH

SEQ ID NO: 312416 - protein, 436 aa, Zea mays
  Clone ID: MRT4577_47981C.1.pep
MAGKRVTGRDGQDEGGAKVGLPAMDISLAFPQATPASIFPPSASDYYQSDDLLTSEERSIRMKVRGIMEKEIAPIMSAYWEKAEFPFNAIPKLASLGVAGGTIKGYGCPGLSITASAVTMSEIARVDASCSTFILVHSSLAMVTIALCGSEAQKQKYLPSLAQLTTVGCWALTEPNYGSDASSLRTIATKAPGGWHIDGQKRWIGNSTFADVLVVLARNADTQQLNGFIVRKGAPGLKATKIENKIGLRMVQNGDIVLNKVFVPDEDRLPGINSFQDISKVLAISRIMVAWQPVGISMGVFDMCHRYLKERKQFGVPLAAFQLNQEKLARMLGNVQSMVLVGWRLCKLYESGKMTPGHASLGKAWNSRTAREVVSLGRELLGGNGILADFLVAKAFCDLEPIYSYEGTYDINSLVTGREVTGIASFRPAAPAKARL

SEQ ID NO: 312417 - protein, 227 aa, Zea mays
  Clone ID: MRT4577_47982C.1.pep
MAHDHPFSLRLPVHASDHLEGAWGTSTDAYGKQGHEIRSTVADRVRQRQRGSNLLMYTKILGYGALARLVKTGYSISRDEAAKALYAISSLIRNNVNGQEAFNSENGSAMLQLNFRIAQLPLFSDGLFLKSIVDMLSSFVFNHVEKYPCSLRTTPARSLIHLKDVVIGSLMKTLCMVVKSVTFSDVDNTMAKTFLPSNTPESSANTLESPAKKVAKSIAFLDDVNTM

SEQ ID NO: 312418 - protein, 139 aa, Zea mays
  unsure (1)..(139): unsure at all Xaa locations
  Clone ID: MRT4577_47983C.1.pep
KGGEGARGGGGQTGNALPHRRRVGPTGPGGKRPGPAWGAQDFPTGEPGTALPARTRPGPGPXPGXPPGPRGIRPPIKPGALVVSPRPRWPPGGFIPPPGVVTRRGHPGARKAEPDLVPPPLFSGLGPWLASRAFGRGPP

SEQ ID NO: 312419 - protein, 106 aa, Zea mays
  unsure (1)..(106): unsure at all Xaa locations
  Clone ID: MRT4577_47984C.1.pep
MGPLSPASFSFFLRHRARTMSHINIVVTGHVDSGKSTPHGTPDHNLGCTDKRAVQRFDNEAVVMNNRSLKYAWSLDKLKAXREKGITIXLAPWKXFRPTKYYCTVF

SEQ ID NO: 312420 - protein, 196 aa, Zea mays
  unsure (1)..(196): unsure at all Xaa locations
  Clone ID: MRT4577_47985C.1.pep
NSARGEDVDLAGHEQGEKLGPLVAVAVNDAGAHGVLRSHLGRASTIVRSRXQLPSSSRRRRRHGXYLSFTTPSAXAVGDMEGXQXLTASKIPQRDRVSSDFTLADDTXGYPTEGACTEQXKGESTWDHLCHNHSKRILXGADTNIAANXRHXMYKTDVXTLKEMGMDAYMFFISWCRILSKGTTEXGLNPDGIKYY

SEQ ID NO: 312421 - protein, 42 aa, Zea mays
  unsure (1)..(42): unsure at all Xaa locations
  Clone ID: MRT4577_47986C.1.pep
XTHCSLCFLHFLNLLRLGNHGNFIEVKELMHPIHTKSYDDVY

SEQ ID NO: 312422 - protein, 87 aa, Zea mays
  Clone ID: MRT4577_47987C.1.pep
PPLPPKEHMPIQDLYYDPIKVAATRVGLFEGCSHREKLTVPGQEWHLNRFKHPALKCHVMLFPCRSLEQEKSSHACGHFVFLKTLQS

SEQ ID NO: 312423 - protein, 79 aa, Zea mays
  Clone ID: MRT4577_47988C.1.pep
ANGEGQSNPYPRALGLSSNEELLAFLIRESGSVPSSENYSPVVRIPLLERKVFPRNRYRCSYDVVNTHWNNGIPSTVVK

SEQ ID NO: 312424 - protein, 50 aa, Zea mays
  Clone ID: MRT4577_47989C.1.pep
PHFIHFTLILQQIHFYQLPTSVNQYAIMSISNIYALSASTQAASCVVTTL

SEQ ID NO: 312425 - protein, 148 aa, Zea mays
  unsure (1)..(148): unsure at all Xaa locations
  Clone ID: MRT4577_4798C.1.pep
GHPRAMYHPLRYHSCFXQFRIMNVQSVAHQLKIIFSLRVLFPSSSSLFKPPFIKKHDKLLGAQGVFPVAIMMPHHISAMGGLFLFQYQLLSFRAQPXCGVSASFPPCFFSLRFVFYPLFFSSLSIYVLMQYFAPPHQLRYDQIKKHKK

SEQ ID NO: 312426 - protein, 61 aa, Zea mays
  unsure (1)..(61): unsure at all Xaa locations
  Clone ID: MRT4577_47990C.1.pep
RQPSITTFLITQXHXGGDITRKFYNIRWGRPQRGQRFHVKLEEDRMGRRFSTYHHXXLSHP

SEQ ID NO: 312427 - protein, 167 aa, Zea mays
  unsure (1)..(167): unsure at all Xaa locations
  Clone ID: MRT4577_47991C.1.pep
RGKKTFGGPKERAGDLSKPKGSFTGPVFGVKPPGGPPENPPPPXLTRNFSMPLKKPPGPXRPKPPPLGPQKKPPXPGFPQGPMAPPPPQKRPPEGGAPXGPDPWGDFSLPQKGPGGFFFGKKNRRGAPPPPKISPFFPKKAPEKGLILFLPPPFKKPLGGEPRKFFF

SEQ ID NO: 312428 - protein, 79 aa, Zea mays
  Clone ID: MRT4577_47992C.1.pep
KKKKKKKKKKACTLGWHLASGTTFGANSSNWSSALSVRSKGALLGPLMSPLLQIHLARFFDPVVLIAKTLGETPVQYPS

SEQ ID NO: 312429 - protein, 345 aa, Zea mays
  Clone ID: MRT4577_47993C.1.pep
VPFPSPSPPPSSSPRLSSVTPHIQAHEVAVPPRLPSKNHPRLPAELGRPLRCGAGAGAAATMSSNGKPTPQPAAASAGAGAGGPPKMYQRPIYRPQQAPAKRRRGGRSCPFSCCCCFCWTLLVVVLLAVLAAVAGGAFYLLYRPHRPAFTLTAARVTRLSLSSSATAPALSDAIDVTLTARNPNKKLVYVYDDFAVTAATAANAVPLGAATAPGFAHEAGNVTVIRATVSASALAVDPAAAGSDVKRSGEFPIVLDLETRAGVRVGALRTKKIGILVHCDGVKVAAPAPAPAKKTKKLAKAAADTPAPAAAAVDDAPAPPAASATATVARACQVRVRVKIWKWTF

SEQ ID NO: 312430 - protein, 89 aa, Zea mays
  Clone ID: MRT4577_47994C.1.pep
HESLQSLPRLHSNHLHFFLHHSPSSTTGNARFLCCQLWPTCLRSSSSPQVVFNVGAPIMNNGGAFYIVSRMNGLVLDVEGGSRNQGTRI

SEQ ID NO: 312431 - protein, 105 aa, Zea mays
  Clone ID: MRT4577_47995C.1.pep
SFKTTYPYFCNKTNPGGGVFANPPILQVNQNGHPFLGPLRGYLLHKSPPYKSIRVSWVQGHFYNKNIPCIKGGGDTPRQAIILDGGGFTGAPCKGEGGFVRPNGA

SEQ ID NO: 312432 - protein, 40 aa, Zea mays
  Clone ID: MRT4577_47996C.1.pep
AKNLDLCFISGSQIGNLISICDTCNNLVFSCLCYVVFIWL

SEQ ID NO: 312433 - protein, 58 aa, Zea mays
  Clone ID: MRT4577_47997C.1.pep
NNQLFLILETHMHQIGVFNESKLRLQILRCLETFLSVILEDLDQRNVYDYLKGLVTCH

SEQ ID NO: 312434 - protein, 144 aa, Zea mays
  unsure (1)..(144): unsure at all Xaa locations
  Clone ID: MRT4577_47998C.1.pep
RSWAPPKCXFFIWLVAQNRXWTADRLVRRGLNHPIRCPLCDQQGETLNHLLVNCVFSRIFWYNLLRKFGLHSLAPQPDAVSFMDWWEMVSETVNGLVREGLDSLIILGSWMIWKHRNRVIFYGGSPSLPLIMEHADEERRGWEE

SEQ ID NO: 312435 - protein, 67 aa, Zea mays
  Clone ID: MRT4577_47999C.1.pep
PIVSFIPPPPPVVRSCCEGPHGVEWMVVVAKMLPPPPFVSYLIKSSKGALFLTCFLFEKINWVFLGP

SEQ ID NO: 312436 - protein, 114 aa, Zea mays
  unsure (1)..(114): unsure at all Xaa locations
  Clone ID: MRT4577_4799C.1.pep
PGVPPRGPRGLWGPKEGRGTTPGSVRXELGLPRVPLPIERLSFAPVWXGFPPGGAGXGAGGEVGLQHPPKKKKKKKKKKKKKKKPKKKKKKKKKKYSALLPLLRRFCRFHHTAA

SEQ ID NO: 312437 - protein, 36 aa, Zea mays
  Clone ID: MRT4577_479C.1.pep
RLALHGHSKCAISVFNEMTGQRVEPDVITFVGLLNA

SEQ ID NO: 312438 - protein, 973 aa, Zea mays
  Clone ID: MRT4577_47C.1.pep
MAPKRKTSSSSAVVIPPIDPNSQLPFAGNHMSVISEPELLHLVSIGVLPPRELCSWRICHGFTVPTEDTHESVVYAPFLLYGLGLPISPFFHGLLDFYHLNLTHLNPNSILQISIFVHLCEAFLGVLPHFGLWKYLYHCRPGMAGGQNQLVGGASLEMRRGRKTEYLEIPLKDSIKGWRLEWFIVENYGNSLPSRSGRQPDVHTPSWTESPTDQEVAEAGVLLAEVGLLKERGLTAEAVVTDFVFKNIQPLKDRAYPAYLYRGLADSTRVTNRRIPSTDLVSRLEMILRGKVSNVGAPVAYSAWNLPPPKAFTLFVSNPPVTDGSLGLRVRSSAVEVSALVASLGEIPDDERQVHFEVPLNPSDAEISAMLDLLAEDSSDAAPAGALVVAPLPEADTTLDTQKPIKVPATEFTDADPNGCTQSAADPNVGAPSVADPNGGAACVANVDDEEEENEIPLTRKNSRQFIASGESSGVPSPALSALIGLQELSLANFDQTLEDMVPEDLLSEPVDDGAMEVCADVPDAGLRSSRASSTLERDLEGRETDLDRPGPMEVAEGPSTLEVATAENLDPKDGVDTCPAPEDVVGDDLARVGSVSHCPAPEGAAGDDPAQVGSANYDPAPEGARAGSPSCTSMDVHAGSPPHSGYMVVAQALDQGVALEGSVPADRVLSSVDGIELVPAGLLQAASGGGLTPGYQLISPDLGIPSFFSNLQALVDGMASQLRLQGASVLEVASSLACWNPVSLQHRVSELEATNAGMTWQISTLEEKHSRGQAELVQWCTDFEEKYFQSQTELGQVSAALDDANALSSSLHAQLNSEKEEKRILAASRDSLDRLYRDSSNSLTILERSHRFTMEELDNQRCKLQESADEVTRLKQLISAKDATIKELRASKKSIVQELETARLAAKVAEETFVTLRAQRDRAMDKAIRAGRILMRRPGVVVPEDIRADVNAAPDSSSRPSSSIAPEKNITK

SEQ ID NO: 312439 - protein, 176 aa, Zea mays
  unsure (1)..(176): unsure at all Xaa locations
  Clone ID: MRT4577_48000C.1.pep
PIQVRHDLSIESTNXKNLHACNVHPVLMLIRVMNYRGXECIMVYTATLNIQXDTTMLIHLIXLQPIALVLGATGIYFDYKNXHDSDNVNLYSLYSCIGIXTMTLYAILCIIGFVTVLFTGDAXTLTTVCLLGYELYGLFGYILTLINAELKSLEKLTFLXSIGFYKYGTXAFLVNF

SEQ ID NO: 312440 - protein, 128 aa, Zea mays
  Clone ID: MRT4577_48001C.1.pep
VYALSLIAVACRVGLPLSTLVAPGSFCLVAMSPQHRLPFWRRAGSLALCPLLGLASLPVSPPPQALLCSSGVASRCLVLFGAGPCPPRARAREVGQCQCALCASRWPLLCSASPPRGLGVEILLLVCV

SEQ ID NO: 312441 - protein, 76 aa, Zea mays
  Clone ID: MRT4577_48002C.1.pep
SIYCRLVPDPKITIYYVSMNRKGVDEFPYCVHLVSWEKENVSCDSLETALIDCNNYMTNSAGNDAFHLHLPVHPLN

SEQ ID NO: 312442 - protein, 70 aa, Zea mays
  Clone ID: MRT4577_48003C.1.pep
TVSHSSIHCTQLAWTSSSCGHGGLHGSPRQLWRWRLMACGPSAVAPASLRCRRLQEQARTDVPYRIGGGL

SEQ ID NO: 312443 - protein, 478 aa, Zea mays
  unsure (1)..(478): unsure at all Xaa locations
  Clone ID: MRT4577_48004C.1.pep
MLVHNEHKAAVCIGKIESEVNSIMDGVGLQPERHTILKKLKELFSMRQQGVSSQDCVESSPDQCVPEETLSCDPLDVTVEDKTSFQEHLGEFDELRQIIADLSKRAEALEKKQKGSDQDLLFLREVVKDSGRKVQQLEYLVDELQFRFDSSLSLPGSMHNTLAKPSIFLIGGYNGVTWLSSLDSFSPEKDTMVGLTPMSFARSYASAAALDGHIFAFGGGGGKSSWYNTXAMGIYDMISLLLCDLFMFCGMYFYMVVFIXVECYSSRNNEWIECPSLNRKKGSLAGISLNSKIYAIGGGDGNETFSEVEMFDPYLGKWLCGPSMLISRFALAVAELNGTIYATGGYDGSMYLQSAERYDQREGVWVRLPSMNTKRGCHALTVLGESLYAMGGYNGDKMVSSVEIFDPRLNAWRMGDPMSAPRGYAAAVTLDGSAYLIGGLESNVQILATVEVYNASSGWSVLGLSSLGKRSFASAVVM

SEQ ID NO: 312444 - protein, 148 aa, Zea mays
  unsure (1)..(148): unsure at all Xaa locations
  Clone ID: MRT4577_48005C.1.pep
KDTMVGLTPMSFARSYACAAALDGHIFAFGGGGGKSSWYNTVRGXNEWIECPSLNRKKGSLAGISLNSKIYAIGGGDGNETFSEVEMFDPYLGKWLCGPSMLIPRFALAVAELNGTIYATGGYDGSMYLQSAERYDQREGVWVRLRSM

SEQ ID NO: 312445 - protein, 41 aa, Zea mays
  Clone ID: MRT4577_48006C.1.pep
EIYLISPSIRFEFKKKGLLERKIKIHPHWTLSRVLWGVTTA

SEQ ID NO: 312446 - protein, 258 aa, Zea mays
  unsure (1)..(258): unsure at all Xaa locations
  Clone ID: MRT4577_48007C.1.pep
GKLLKIQKKVQQLEYLVDELQFRFDSSLSLPGSMHNTXAKPSIFLIGGYNGVTWLSSLDSFSPEKDTMVGLTPMSFARSYASAAALDGHIFAFGGGGGKSSWYNTVECYSSRNNEWIECPSLNRKKGSLAGISLNSKIYAIGGGDGNETFSEVEMFDPYLXKWLCGPSMLIPSVPLDGSDLCFRYAMRGYMIDKLVSSVEIFDPRLNAWRMGDPMSAPRGYAAAVTLDGSAYLIGGLESNVQILATVRNCWLLTILHI

SEQ ID NO: 312447 - protein, 56 aa, Zea mays
  Clone ID: MRT4577_48008C.1.pep
MALSVEKTSSGREYKVKDLSQADFGRLEIELAEEEMRPHRARAAENPPGRRHLSTK

SEQ ID NO: 312448 - protein, 217 aa, Zea mays
  Clone ID: MRT4577_48009C.1.pep
EAAYPGVAYSKSGHCRYALLSRVCLSMFDGFDSYQFGATADTTELGGTQLAARRNESLQQFIEHSDADPMELMNSSPDCDFARFCDRKYRQLIHPGIESSLFGNSECGTLPVVSVAGPLYELFVAMASSIWTLHRLAWAYDPAVGIFQVGRGAEFSTVYMENIVRSKKRFAGSKEPRKPVRPKVGFTVVPGFRLGGTVIQCTVYLDHGKREEDITDS

SEQ ID NO: 312449 - protein, 88 aa, Zea mays
  Clone ID: MRT4577_4800C.1.pep
MNMVMAARVCLGLAAGSACAMHMPCPCTRLQGLHSAGTGLTTMMGAAGLYPYTQYLRQPQCSPLAAARYYAECGQTSAMYQTILQHCC

SEQ ID NO: 312450 - protein, 85 aa, Zea mays
  Clone ID: MRT4577_48010C.1.pep
RLAPHGMYGFRDIAMCSIHYSELFSPLRYCVRRPYWVIGGCVCGYPLNRSDHGILPQMMLLCGIQPSVPMQSAKPEHRNVTCSCL

SEQ ID NO: 312451 - protein, 78 aa, Zea mays
  Clone ID: MRT4577_48011C.1.pep
SVLNEVENAVAVFVDRDSEGNGAAGYYDGRAHASGASGGLSTSGGHGSSACHTTQRSSPPRTRTWSETTPDTVYPAKR

SEQ ID NO: 312452 - protein, 80 aa, Zea mays
  Clone ID: MRT4577_48012C.1.pep
LGIWVEGSTHCFSAPCGTSVAGKLQTMIGRIAHGTQPLASATPWHEAFGCATLSVSDALDLCRALTSCPGKRPFTPFPTF

SEQ ID NO: 312453 - protein, 174 aa, Zea mays
  unsure (1)..(174): unsure at all Xaa locations
  Clone ID: MRT4577_48013C.1.pep
PXSTHAVRPARAIIPSRAPLLCLHGHRPSPSIEVTPLLILATPQNLPMATAPSPLLAVAYGCLLCLRSVATSWARPSPVAVGCRRPTPLHAGALSWSSPRQPRPVLLHQASPGCSSWRASARREALSAPVRAPVYLPEPPTSPIHGARSRLQLALAPSARSAMASPFRRSPARA

SEQ ID NO: 312454 - protein, 89 aa, Zea mays
  Clone ID: MRT4577_48014C.1.pep
ISLCMLVPDDVVLVDESQEGVNRKLGLWRQALESKGFRISRTKTEYIRCDFGTTISEDGDVSLGGRVLPKKNTFRYLGSMLQRDGDIMN

SEQ ID NO: 312455 - protein, 81 aa, Zea mays
  unsure (1)..(81): unsure at all Xaa locations
  Clone ID: MRT4577_48015C.1.pep
MLSGMAASGEGASLPSPAGGEDAHRRRISYFYXPSIGNYYYGQGYPMKPHRILMAHSLAVHYGLHRLLXLXRPYPVSEADI

SEQ ID NO: 312456 - protein, 203 aa, Zea mays
  unsure (1)..(203): unsure at all Xaa locations
  Clone ID: MRT4577_48016C.1.pep
LNSSAEQKDQVIIQSQAPTPAHPQRSIFLCLQAANEERLREEFVRESRKLPPKQQSQTCDSNVITPRTEFMAVLSVALECYIHLRLNYDHEWKQNKVILSDANVPGERDLSGFNPNXHCLYGLDAYLIMLALQTHEVRFSILREVFYTPGQQDKCFLCIXVGHLAAKCEGKVKMKAGEFXDEKADAIVPKKPYQVICLLYNMW

SEQ ID NO: 312457 - protein, 387 aa, Zea mays
  Clone ID: MRT4577_48017C.1.pep
HAFAHAFDQFANATSGFGEERLIKHGHSRDLYHGVLQDGTAVVVKRITLRVARKDAYLAELDLFAKGLHERLVPFLGHCLDKEEEKVLVYRFVRNGDLSSALHKKSREEDEGLQSLDWIKRLKIATGVAEALCYLHHECSPPMVHRDVQASSILLDDKFDVRLGSLNEVCPQEGEGHQNVITKLLRFSSSADQGSSGSPSATCPYDVYCFGKVLLELVTGRLGISASNDAATSEWLDATLRYVNIYEKELMSKIIDPTLIIDEDHLEEVWAMAIVAKSCLNPRSSKRPPMKYILKALENPLKVVREDNGNGSGRLRATSSRGSWNAALFGSWRHSSSDIGPSREDNILKRSETIKSSGGSNGDHSSSRRRQSKEIFPEPSGSRDTED

SEQ ID NO: 312458 - protein, 795 aa, Zea mays
  unsure (1)..(795): unsure at all Xaa locations
  Clone ID: MRT4577_48018C.1.pep
MTRARARGLWALLLVALVAAAVAPGALVLAQGGTLTSRSDLVGLYALRGSLGLRARDWPRRADPCAAWAGVGCRAGRVVSLSVAGLRRTRLARLSPRFDVDGLRNLTRLEAFSAAGFGLPGSIPAWLGAGLAPTLQSLDISACAVSGEIPASALLGLGNLTTLNLAGNQLSGQLPATALPRLTRLRTLNLSRNAFSGALPHAVWSLPGLSVLDVSRNNLTGALPTPGLALPANAQVVDLSGNFFYGGVPETFRRLFAQVLLANISGNYFDGELGVSDGGGGNVSFQLNCFLDVLGQRTQVDCQQFYASRGLPYDGPVIPPAPQPAPSPVRKKHKNLKYILIGAIGGGLLLIAVVAAIVFCFVCSGSTGRRNHQRESGASPSAPSGVSATGTAAATGGTQPSALSANTVKVGDSFAYDQLVNATSGFGENRLIKHGHSGDLYHGVLQDGTAVVVKRITSRVPRKDAYLAELDLFAKGVHETLVPLLGHCLDKEEEKVLVYRFVRNGDLSNALHRKSREENEGLQSLDWIKRLKIATGVAEALCYLHHECSPPMVHRDVQASSILLDDKFDVRLGSLSKVCPQEGEGHQNVITKLLRFSSRSRFFXGSPSATCPYDVYCFGKVLLELVTGRLGISASNNAATSEWLDATLRYVDIYEKELMSKIIDPTLIIDEDHLEEVWAMAIVAKSCLNPRSSKRPPMKYILKALENPLKVVREDNGNSSARLRATSSRGSWNAALFGSWRHSSSDVGPSRDDNILKRSETIRSSGGSNGDHSSSRRRQSKEIFPEPSGSRDTED

SEQ ID NO: 312459 - protein, 67 aa, Zea mays
  Clone ID: MRT4577_48019C.1.pep
GEEKESARHCFFNREEGQMKRDTRLPTVKTFHCCQLHAIGTPTYIPPLLLAPKLITMAPVCCCEAIE

SEQ ID NO: 312460 - protein, 451 aa, Zea mays
  unsure (1)..(451): unsure at all Xaa locations
  Clone ID: MRT4577_4801C.1.pep
WPGKLFTHLHSTCVCVCFTSRRNLAADTRRHSRPTALARSPIPLDSSASPAAATLHASASAWLSTPRRRPARCSAASRRPPHLTSVADAPFPPSRVPAALSLPRRXTDTRSSNKGXIVNSDGIPETSDSPHVVCFGELLIDFVPTVNGVSLAEAPAFKKAPGGAPANVAVGIARLGGSSAFIGKVGDDEFGYMLADILKQNNVNNQGLLFDPHARTAXLAFVSLRSDGEREFMFYRNPSADMLLEEKELDLDLIRKAKIFHHGSISLITEPCKTAHIAAARAAKDAGVLVSYDPNLRLSLWSSPEDARDGILSVWRTADIFKVSEEEVSFLTNGEDPYDDAVVKKLMRSPTRPPTRPEGPDGCRYYSKDFSGRVGGLKVSAVDTTGAGDAFVAGVLSQLATDFSLLQDEGRLREALKFANVCGALTVTQRGAIPALPTRQQVLDALANFVA

SEQ ID NO: 312461 - protein, 91 aa, Zea mays
  Clone ID: MRT4577_48020C.1.pep
PSKTRAAGVRCCPLLQKFNFPPRARARCPLRPGARSTSQQQSKGAPHRLARTPPRGPFPPTRCGAPLVSVHQSTTSDNPDQMIGTTPSQGR

SEQ ID NO: 312462 - protein, 153 aa, Zea mays
  unsure (1)..(153): unsure at all Xaa locations
  Clone ID: MRT4577_48021C.1.pep
DAPTGXFSLIDACASNPLXVNPTGEHXEXISHEWXAKKHSPXFFDMPYQGLVRGDPETXPRTVPIFLEHXHQIGCAQTYSKXLRLYXQIARCLMIMRHDDMHAXAVSIHLQHIARAMDRLPPALGALDASIILIDPEWNSXGIKHRTGMADRI

SEQ ID NO: 312463 - protein, 93 aa, Zea mays
  Clone ID: MRT4577_48022C.1.pep
SLLTLLATLPSLFHLQEEAMPMHWLSFLATSYPFTRVASRSFYLFPLCFISSYHLPENKARATRKWRLDESSFVLIPLLSPFGHFVTCKSLLV

SEQ ID NO: 312464 - protein, 230 aa, Zea mays
  unsure (1)..(230): unsure at all Xaa locations
  Clone ID: MRT4577_48023C.1.pep
MAEAAADSSNSAVDGGGSNVQNDYPTIDPTSFDVVLCGTGLPESVLAAACAAVGKTVLHVDPSPFYGSLYSSIPLSSLTSFLSPEASPPTSSAAAAASDSRTVVDLHRRSVYSDVETSGTVPEPARRFTVDMVGPRVLYCADEAVDLLLRSGGSHHVEFKSVEGGXLLYWEGCLYPVPDSRQAIFKDTTLKLKEKNILFKFFKLVQAHIAAASASSXRRGQGDASTKIPE

SEQ ID NO: 312465 - protein, 166 aa, Zea mays
  Clone ID: MRT4577_48024C.1.pep
AFCPPSPSFLFRVFSLSFFFWPEPDYFIDLAPHICIKLTKVESWFKRELLTPRRLAFNVLFYGCDVGLFAYGWWSQATNVKLAGLNTLKWSVWTSRGAGLVLAYDGGLILIPMLRNIIRIVRPKLAWFFPADENIWFHRQVAFSMAFWAMLHSTGHYVNFMKVGGV

SEQ ID NO: 312466 - protein, 108 aa, Zea mays
  Clone ID: MRT4577_48025C.1.pep
GEMKDGVPEGAQLQGPVHRNATYRPRYRSRGPPRPRPAPAVGEAEDKENQQATSGPNQPSVRRGYRRPYNYRRRPRPPNAPSQDGKEAKAAEAPTENPAPPTQQSSAE

SEQ ID NO: 312467 - protein, 130 aa, Zea mays
  Clone ID: MRT4577_48026C.1.pep
STHYHRLSVDYQTNPKVSLCHMACQIGEGIGGVEEVTFLYRLTPGACPKSYGVNVARLAGLPDYVLQRAVIKSQEFEALYGKNHRKTDHKLAAMIKQIISSVASDSDYSASKDSLCELHSMANTFLRLTN

SEQ ID NO: 312468 - protein, 295 aa, Zea mays
  Clone ID: MRT4577_48027C.1.pep
MAFASRIGNALRRTLAPTCSPLLQPVRCMSSSKLFVGGLSFATDETTLKDAFSEFGNVLEARIIIDRESGRSRGFGFITFTSTEEASAAMTSMDGKELQGRNIRVNHANERAGGIRGGGGFGSGGGYGGGGGYPTGGYGGGGYSSGGGYSSGGYAANGYGVGSGSGNYSNASGGGYSGSDGYGNGAASGGYANNLSSGYNSNGRYNTIGSSDGNTGGYNSYPNPYGAGNYNTGGSSSSGGTLGEFGGGGFGGNNFAGNVTGGVSGGGASYGANKPQYNGDDDLLGEGFFDKEVAE

SEQ ID NO: 312469 - protein, 98 aa, Zea mays
  Clone ID: MRT4577_48028C.1.pep
HAEHLPHGVLLLPPWPSSSPLFSGGRAPPHNSRARRSPSIASRCAPSALAILKETQCQHSSSTNKANQGWRHGGEGIWTRQGSKAQTCAEAQYQDHGP

SEQ ID NO: 312470 - protein, 137 aa, Zea mays
  Clone ID: MRT4577_48029C.1.pep
HSTRACSSSVASSAVTSIMIQKFVYEQNPTILSTLLCDSTGEFSCFVSRMSSATVIIDPISVYLRRRTLTAYLTWTRPVSREKLFSARSRGAVARTSQGNSTDQEKKASASTPPSVSISSAQSSSEMAAVLRFIEVS

SEQ ID NO: 312471 - protein, 138 aa, Zea mays
  Clone ID: MRT4577_4802C.1.pep
LVTPKMEIGNMKDSSNPLSNPAYARALVIKQQEQLLQQYKLGSSPQRQHHGQHLYIKGPALFENDDPPPVKPLGTRCQLCKLDVAFRTQGDAGRDANAPPVIAVLACHHVFHSRCIESVYGLAEPAECLACLESGAAH

SEQ ID NO: 312472 - protein, 79 aa, Zea mays
  Clone ID: MRT4577_48030C.1.pep
TGSPQFRLKPIYFSVLVVPCAHAAHLVGKTIWDGARPCAILKCQRTACSDHGDHGAPELYRSSSTNSCPAGLPEGVMHL

SEQ ID NO: 312473 - protein, 304 aa, Zea mays
  Clone ID: MRT4577_48031C.1.pep
SEEWSKKAGELEGVIKALETHLTQVEDEYKEKLEKETLSRRDLEKEAVNLKQKLEKCEFDLENTRKSTELSLVPLTSIAAGSSDVVDTTVQGLPISDAVNQNDLMVIPKVPSGVSGTALAASLLRDGWSLAKIYEKYQEATDAFLHERRGRRHAEAVLERVLHEIEEKAELILDERAEHERMVEAYAMMDQKLQQALLEHDNFENNVRNLKSELKRRERDHSVAQKEIDDLQKQVAVLLKECQDIQLRCGSSLPNVGYVASSSSLVNVLSNVEHDIKDNMSFKDINGLVQQNVQLRNQIHMLSV

SEQ ID NO: 312474 - protein, 77 aa, Zea mays
  Clone ID: MRT4577_48032C.1.pep
YKKNTGNEKYSHIAKSPKPVLPTERTHPSPHPHIYFSCMLATREKCFVHFQICVESTSAQYWNAEEVSSQAGEPSLV

SEQ ID NO: 312475 - protein, 170 aa, Zea mays
  unsure (1)..(170): unsure at all Xaa locations
  Clone ID: MRT4577_48033C.1.pep
PRVRSVMNSVLLQASLEKIGVETRVQTALMMQEVAEPYIRRRAIRHLEKGRVVIFGGIGVGIGNPLFTTDTAAALRASEINADVVLKGIVGDDEYGCPPRSNSNASFEHISFRELAARGITKMDMTAVTCCEENNIPVVIFNMLEPGNISRAICXGDQIGTLVDQSGRIT

SEQ ID NO: 312476 - protein, 307 aa, Zea mays
  unsure (1)..(307): unsure at all Xaa locations
  Clone ID: MRT4577_48034C.1.pep
YWPWFKKMEQILQNSASPASVKLLTAAEDEKPRQQQQHSSKRYPLSCTGPPTGVGSSRTNPLSNPRWKRVLLKIGGTALCGAAHQNVDPKVIMLIAREVQVACHHGVEVAIVVGGRNIFCGDNWVAATGTDRASTYPIGMMASVMNSVLLQASLEKIGVETRVQTALMMQEVAEPYIRRRAIRHLEKGRVVIFGGIGVGIGNPLFTTDTAAALRASEINADVVLKGIVGDDEYGCPPRSNSNASFEHISFRELAARGITKMDMTAVTCCEEXNIPVVIFNMLEPGNISRAICGDQIGTLVDQSGRIT

SEQ ID NO: 312477 - protein, 147 aa, Zea mays
  Clone ID: MRT4577_48035C.1.pep
CTGGSISEDKIPLPSIFTAETKKPAACLKNVGRNYLWRGRKETRGGHCMISWSKVTRPKELGGLGISDLQLQVLNWALRTRWLWLKKTEPTNHWASFQLQSCKVVRGIIVNMAMSTEIGDGSSTLFWKDRWLLGQHIEELAPLIFSL

SEQ ID NO: 312478 - protein, 83 aa, Zea mays
  unsure (1)..(83): unsure at all Xaa locations
  Clone ID: MRT4577_48036C.1.pep
LVGNLLLPSLXALAPLSVCASFTRRPRRVCHSKNALDEVVVADXKNWDGLVMACETPVLVEFWAPLCGPCRMIAPVIDKLAVD

SEQ ID NO: 312479 - protein, 225 aa, Zea mays
  Clone ID: MRT4577_48037C.1.pep
MRRLWRWYQQCLAAHPVRTQVVSSGILWGLGDIGAQTVTYYSASPDRRGHDSSPPDPEDKDNKDNKEFKVDWKRVGITSSFGFAFVGPVGHYWYEYLDRIIRRRFQPNTFKFVASKVAADGFLFGPLDLLLFFSYVGLGQGRSIEQVKEDVKRDFIPALVLGGTIWPAVQIANFRFVPVRYQLLYVNLFCLLDSCFLSWIEQQGDASWKRWFTSFQKIEDQKGKV

SEQ ID NO: 312480 - protein, 124 aa, Zea mays
  unsure (1)..(124): unsure at all Xaa locations
  Clone ID: MRT4577_48038C.1.pep
MSSEHGVAIACHSKAXFDAHMTKDQEADKLVVIDFTALWCGPCRDITPLLIEHAQKXFTQVTILNEDEHEENEVTVPYDVEAXMPTFHFYNISNTVSNIVGDKKDKLLCQIYKHAAPAPASAAD

SEQ ID NO: 312481 - protein, 60 aa, Zea mays
  Clone ID: MRT4577_48039C.1.pep
FFFWITGNLGNTNLKFTSKTNVNTQVTRLETFVFWGGTLTKSHPHVNGGNEFSLGLPAKL

SEQ ID NO: 312482 - protein, 107 aa, Zea mays
  Clone ID: MRT4577_4803C.1.pep
IGYLEAGREKNTTLRDQSPSRWDVTGKLSYDDDWGATPAVPRLRPCAPRPLSPGLRRPQGPSVGTLARSGALVQGLRPGDPLRLHPMRHRSDHVALTHALLMLFPAR

SEQ ID NO: 312483 - protein, 83 aa, Zea mays
  unsure (1)..(83): unsure at all Xaa locations
  Clone ID: MRT4577_48040C.1.pep
NXFFFFFFFFCCFFFFFFWFFFFFNNTKLFVWGEIIRHAVIYKGGGGNMPRPLKKKKGGPLKRKKLKGSQRTGYTFPLRATLY

SEQ ID NO: 312484 - protein, 131 aa, Zea mays
  unsure (1)..(131): unsure at all Xaa locations
  Clone ID: MRT4577_48041C.1.pep
MDPNDAFSAAHPFRWDLXPPAPAAPAPPPPPPPAPQLLPHAPLLSAPRELEDLVAGYCVRPSTVARISELGFTASTLLGMTERELDDMMAALAGLFRWDVLLGERFGLRAALRAERGRVMSLGGRFHTGST

SEQ ID NO: 312485 - protein, 196 aa, Zea mays
  Clone ID: MRT4577_48042C.1.pep
NSARGLPKRVSLPGLNLQPPLTRRSSPSRHLTCHRLHPAVVHPAFSSLRQTCALCAAFVTSPSSAMDVAPPFSYLSARPCLFFLEPRPVLLHQASSACSPGSGRIWPPASPLVRSRFQLVVPLYWSSPDSALARLLQCALPPAPLSWSSLPLRMRWACLPAASSAPRFNRRPGTPPVVPVLCAHAPSPSLAIVLGR

SEQ ID NO: 312486 - protein, 59 aa, Zea mays
  Clone ID: MRT4577_48043C.1.pep
KRKAALLGKVVGYASGHFKSTWSGRSLSLWAWAHGIRYRNTPPKKKKSQRTKTRPGAGA

SEQ ID NO: 312487 - protein, 135 aa, Zea mays
  Clone ID: MRT4577_48044C.1.pep
GADAAEPKGAAGELHVIDAKSVDDIHAAFQKHFDAIVNSSLEENEYKDRHVEMAESMEPDQLTEAIHAESQHNLGDAREALPAEEGTGDMSTSEAESHNNIGAASDKVSDSSAKNTAQAVVLEVSSERQEESEQQ

SEQ ID NO: 312488 - protein, 38 aa, Zea mays
  Clone ID: MRT4577_48045C.1.pep
YSEETFVHAGLLPPPVIKCLGLGPCCCPRDLTFTPTGN

SEQ ID NO: 312489 - protein, 151 aa, Zea mays
  Clone ID: MRT4577_48046C.1.pep
GRVGGSKLPQKFYYWFFQTVRGMTGVLLLLVLAIMYVFASHHFRRRSFRGFWLTHHLYILLYVLLPRFHIYFLVPALIYMGDKLVSLSRKKVEIGVVKAHLLPSRVTHLEFQRPQGFEYKSGQWVRIACLALGTNEYHPFTLTSAPHEETL

SEQ ID NO: 312490 - protein, 146 aa, Zea mays
  Clone ID: MRT4577_48047C.1.pep
ARTVLPLPIDLFMFSCKMTTADYSPHLIWKSSTKTSIFLSYRRCAADRRDRPSKTRRCSSYSEYFLWREEQNRSPVPMPALGKGKGRRALVLEHCLARRLMAAHIRSVSDHTERSMPPSYAQEHVHSRLFATIRERLCLSSYMNKR

SEQ ID NO: 312491 - protein, 97 aa, Zea mays
  unsure (1)..(97): unsure at all Xaa locations
  Clone ID: MRT4577_48048C.1.pep
MALAKAKEIVASAPLVVFSKTSCPFCVRVKQLFEKLGASYKAIELDKESDGAELQNALKEWTGQRTVPNVFINGKHIGGCDDTMALNNDGKLVPLXD

SEQ ID NO: 312492 - protein, 337 aa, Zea mays
  unsure (1)..(337): unsure at all Xaa locations
  Clone ID: MRT4577_48049C.1.pep
PAGLGPRNTXGDVPLEWYKDEEHIGYDIDGRKIKKRDREGRIEAYLRNADDAKNWRKXYDEYNDEEVQITKDEAKIISILLKGKTPHTNVDPYPDYVDWLEYEDKGHPLSNAPEPKRRFVPSKWEQKKVVKLVRAIRNGWIKFDKPKEEQNLYLLWGDETDTTDNKRHGLSYIPPPKPKLPGHEESYNPSVEYIPTQEEIDSYQLMYEEDRPKFIPKRFECLRSVPAYEKALREGFDRCLDLYLCPRTRKKRINIDPESLKPFLLGNLGRERRPGRAGNHLLNLQPNLQPGIESNGARQGQGDRCLRSPRRLQQNFLPFLRPCEAVVREARSKLQGH

SEQ ID NO: 312493 - protein, 133 aa, Zea mays
  Clone ID: MRT4577_48050C.1.pep
RVHSCLHNLVVRLGTFQLLCRLLERVSLVMVLHAMVLTDVYTNISVRNVSTSLIAFVPAGCKSLPMPLHANRYKRKCVCEMLLSTKASLKSVIKCMVIIQSIVFSGSSTLKSSMQKKSKITQADITVVFIHAM

SEQ ID NO: 312494 - protein, 78 aa, Zea mays
  Clone ID: MRT4577_48051C.1.pep
DPRLTRQQPNLILHTLYLFIHIATLAVLVQKKSHPTLNLHPRPEPRTEEDNNPLGNQANPPDARDLARQDPEGHLPPL

SEQ ID NO: 312495 - protein, 84 aa, Zea mays
  Clone ID: MRT4577_48052C.1.pep
APKSFHVGSVKALPLDLLQILFWVKIPSVYLCARTSHPVFKRPTDNIILQSSLKKMVYRIKLACPSPEFSTKKVSGFVCYLAQN

SEQ ID NO: 312496 - protein, 81 aa, Zea mays
  Clone ID: MRT4577_48053C.1.pep
RVVRSSRPGTTPHLVLEERVARCDGHLDGSTAQPEPLLVMANRQRSLAGVQFYSAKTGPLGVLPDYQQPSTQPQNSHPNRV

SEQ ID NO: 312497 - protein, 30 aa, Zea mays
  Clone ID: MRT4577_48054C.1.pep
LHWTLILKSSHSHSLRLASLLSLWARTMDR

SEQ ID NO: 312498 - protein, 62 aa, Zea mays
  Clone ID: MRT4577_48055C.1.pep
GNQRVTFFSLNLKFAPTRIRTQECYSEHLTNSDKCRFANFHQISFQIIRSHRLQPSVSFNHV

SEQ ID NO: 312499 - protein, 49 aa, Zea mays
  Clone ID: MRT4577_48056C.1.pep
PVICLPWICLHGHLILVDDSIGQCPQPRSSWLQPVSSQGRCVLAAVGVV

SEQ ID NO: 312500 - protein, 130 aa, Zea mays
  Clone ID: MRT4577_48057C.1.pep
PASGSLGPRPGSQQSLHVPGCAHLLRARGGRLFAEPVVARCVRGTRGRSCFLSTSAPLSDRAWGRRLSKLFFSLKALRENQRQKYFPFRVFVFSALFCDRAFILSSFAQKFLSFVTNLSPTKNYVTDTTA

SEQ ID NO: 312501 - protein, 143 aa, Zea mays
  unsure (1)..(143): unsure at all Xaa locations
  Clone ID: MRT4577_48058C.1.pep
FGTRLSSASGVCSLAKYARPEKGPIHELDGLNLMEDRAGXLTNLLSSAPAEIKXVGSICFCRAFNSXPPSYXRRYIGHLIYIDVTTLERNKYCITGSSKFFYVNSNKGSIFDSKPTKHGLDASTLIGLLQKISTRFKKGSREL

SEQ ID NO: 312502 - protein, 267 aa, Zea mays
  Clone ID: MRT4577_48059C.1.pep
TGITYTSMFEAQLDSVYSTMKKLGFEHVEIAVGETGWPTKAEYGQIGVSTAEAAEYNRYLIGEASGGSGTPLMPKRTFETYIFALFNENLKPGPVAERNFGRHEANLTPVYDVGLMKDGVKTAATPAPAPDESKAAQSAVKKDDVEAAAAPEETAASASAPGPSSVDVEASSKATGPSPSEAPSQSGSTGEDKTPEKEEGGGDAPPPAASASGPPDEASETAAKDVDAAGGGKTPAPAGAASQGNNLRVPVSCVLTVALSLALTGGI

SEQ ID NO: 312503 - protein, 406 aa, Zea mays
  Clone ID: MRT4577_4805C.1.pep
MTRGSDPIVASPGFKAGGSDSASTQRSISYASFSAQLVASRLTATRTRTPLKVTSSGWKPLTQPVALNEERKCANLTINPTAKRSRVTSSRAVKDSINNSASKANSSVPSDKKYRNEDNVSLGDQSDGAVMPSPTKKLQICKGPSDAPSIRKSTIRILGVKGAALPPTGKSQVETRKCFANATAEVISASTNEISEPDNAAAPLLAQQLPPDTAKNSTVIMHTHETSKVNQLAATWPRANFQTDYNKKPSNVPIMANQPSGFAGATAPLVTPKMEIGNMKDSSNPLSNPAYARALVIKQQEQLLQQYKLGSSPQRQHHGQHLYIKGPALFENDDPPPVKPLGTRCQLCKLDVAFRTQGDAGRDANAPPVIAVLACHHVFHSRCIESVYGLAEPAECLACLESGAAH

SEQ ID NO: 312504 - protein, 102 aa, Zea mays
  unsure (1)..(102): unsure at all Xaa locations
  Clone ID: MRT4577_48060C.1.pep
LCLLYAANLLFLLGGGEKKHIIPRPFRRLCSLSGXMAAPSKGAFSAAGVGFPRRGTASLASGLTPGGLASFPSFLGAFSGFARFVLSGRLPVRFRFSALRDL

SEQ ID NO: 312505 - protein, 52 aa, Zea mays
  Clone ID: MRT4577_48061C.1.pep
KRCLLSLCVKKKKKKKKKKKKKKKKKKKKKKKKKKKKRKKKKKKKLWVVPTV

SEQ ID NO: 312506 - protein, 129 aa, Zea mays
  unsure (1)..(129): unsure at all Xaa locations
  Clone ID: MRT4577_48062C.1.pep
MDPVKPGIDHDDSDEHRFESKAYARAVKSYPXRAVTXQKNSCIVIKNRPCKGVQVYTXKYWXHGHAKCHFXCIDMFNRKKLADIGTWSHNCDISHVNRTEFQLIDISQDGFGRRFYSNGNTNDDLRLPT

SEQ ID NO: 312507 - protein, 50 aa, Zea mays
  Clone ID: MRT4577_48063C.1.pep
LRIYEKVPAPAPVLKKTKELDTRGNLGIPSGGIRRPSLELLPKVYRDQPA

SEQ ID NO: 312508 - protein, 100 aa, Zea mays
  Clone ID: MRT4577_48064C.1.pep
MVLYFKARPDAGDYTIYMGADKNENEELIKYGLPEDVWYVRTSSLAAATSYFLATTTTTTTCRMRFSGELNHGEAIRWWVGFRSTATCARLGLPLHVEAA

SEQ ID NO: 312509 - protein, 99 aa, Zea mays
  Clone ID: MRT4577_48065C.1.pep
MSYYGQQPPVGVPPQQGYPGKDGYPSAGYPPAGYPPPAQGYPPQGYPQQGYPPQYAQPPPQQQQSSGPSFMEGWYVLHPPRSLHSCAALRNFLAVLDQK

SEQ ID NO: 312510 - protein, 534 aa, Zea mays
  Clone ID: MRT4577_48066C.1.pep
WVPSEPAGYDIVVKIGELMVTTLTESIQQQCIQIMLQFFLNYPLSEKRLQQHIVVMRANLSYEHPSGREAVLEMLHDILTRFPQRIIDEQGQTFFLHLVVALANEQHQNVSSMILRAIQKLLGRIGGQGKSYIYEYSLSWYTGEKKSLWSASAQVIGLLVGDHTLQMGKHLKSILAVVKKIMESSIIASGAIQLGLSDEAVLPLWKETYYSVAMMERLLLRFPELYFEQNMEDIWIILCKLLIHPHSMLRSISSSLVASYFATAEKRKHEQKLDAPSWLLVQPSRLFIIAVSLLKQLRSELSDTTANNLIVQNLAYSVCNLHMLIRQSTSTHQFWSSISSDRGAFLEGFELLGSRKAKNIFLLCTSTSSDVSGSSLDTNEEPTSLLVSSILKKMGRIAMQMQDTQIKNVFNCFNMISSALGPDESLTYADHLLAPLYKVSEGFAGKVVSDEVKQLAQGVQNKLRDLIGSEKFVEVYKSVRMGLKQKRDGRKQAQKIVAAVDPERNAKRKQRMAAKHREHKRRKIMAMKIGRWMR

SEQ ID NO: 312511 - protein, 135 aa, Zea mays
  Clone ID: MRT4577_48067C.1.pep
PKPFWRYPMSYISFHYWALRGQYQNDLKGLLFDGQQDDVLPSKIPGEFILENVFQMDAGRSKWLDLAVLLCMVVVYRLLFFAMIKAAEDVTPRVRRHVARRRVRSRRRQQPLPARTPSLRGYVVHAAASLPADHP

SEQ ID NO: 312512 - protein, 48 aa, Zea mays
  Clone ID: MRT4577_48068C.1.pep
LAGSSCRRVTDHDGASPKATAPLSSIFLLDPLLSLCLLSCPLAAATRP

SEQ ID NO: 312513 - protein, 143 aa, Zea mays
  Clone ID: MRT4577_48069C.1.pep
PVRARSTTFSTTAHFTVFPHAPTSGSSAVFLSRPASIATRKSMSLLSHDSPLASLTTPPDSGVFTRLSSASSPPSTTLYVTPPPYCASIAPVTRTQSTITSLRTVAAALIYNSTRRGSTFLPGPTSKARRKSLAESRMCFSDC

SEQ ID NO: 312514 - protein, 87 aa, Zea mays
  unsure (1)..(87): unsure at all Xaa locations
  Clone ID: MRT4577_4806C.1.pep
SRDQAQDPLERXAFFFCCRLSLFFLSLLARLLDRCYLGSPKKHGTPGRLLGLAGGKNLRTSTEPTRTIQQSASSSICVPIDRVGGSA

SEQ ID NO: 312515 - protein, 47 aa, Zea mays
  Clone ID: MRT4577_48070C.1.pep
RVDPNYLGFQKKKKTYSFFCTTIIFLNMANSEGPGVNTPQKKKKPTL

SEQ ID NO: 312516 - protein, 88 aa, Zea mays
  Clone ID: MRT4577_48071C.1.pep
LSATPYLAERNGDKPSRQLTPPKHREYSGLRRKDENSTKPSMTPVKNVQSVKKISGKPKAEGFKGVNILRMSRIAKLNLQRERDKENY

SEQ ID NO: 312517 - protein, 155 aa, Zea mays
  unsure (1)..(155): unsure at all Xaa locations
  Clone ID: MRT4577_48072C.1.pep
SHAARRGHGRRRRGKNGGRAHRRQGDKPPDXNPASKDEGGNPRXRQDQAAPTRRGQQGHPRQEAREPRPRQEGPPRXRSEAEGHPXRPXNREPEPNGQGGEGGRHGPPEHEEGPXGRPARKGPRSTRXEQAGAEPDPKQGEGQRAQQRTPRPRPE

SEQ ID NO: 312518 - protein, 86 aa, Zea mays
  Clone ID: MRT4577_48073C.1.pep
SFTLIVLGEAYLVLLLVLGVELPVLLQVEVLGYIVELLLLNEGQLGMWNLASILGRHQIMRLMSRLSVPGSRKSETAIKDFGTGTS

SEQ ID NO: 312519 - protein, 114 aa, Zea mays
  unsure (1)..(114): unsure at all Xaa locations
  Clone ID: MRT4577_48074C.1.pep
RHIFTDPLRAPKPRXRVRSVWRAXVVSAKGVRGRGPRRRXSVSXHVSTCTIASGGPRSWXGRRGFXKFXAGSAFKVAGGQGLAXLGXLPVTILFARRPSVTCHSLDGPLLQEVP

SEQ ID NO: 312520 - protein, 111 aa, Zea mays
  unsure (1)..(111): unsure at all Xaa locations
  Clone ID: MRT4577_48075C.1.pep
RLSGIAHKPVVLNPYTWIDHLVSMIWLGKILPARXLSAIRAVVGRHXNTGATAPFLPWVCMANPSRCFHCLATDKRLSTVTTKHRYALTMDVTRGDKRNSREFMAADTPDV

SEQ ID NO: 312521 - protein, 45 aa, Zea mays
  Clone ID: MRT4577_48076C.1.pep
GPHSLETQALNCGGGGAVSKYGSNVPYPLKLQICTILSFIQRKHV

SEQ ID NO: 312522 - protein, 201 aa, Zea mays
  unsure (1)..(201): unsure at all Xaa locations
  Clone ID: MRT4577_48077C.1.pep
MKPPSSPGCTSLFLLPCILLAAVMYLVLFPDNFRLPAGMFGSSTSSSCNDNNGASAVGRLAAGGSPPTDEAVDLRLLMGIVTTPSTYERRALLRLAYSLQPRPVRAVVDVRFVMCRIEREEDRILVALEIIAHGDVVVLNCTENMNDGKTYAYFSAVPGLFAGDGERYDYVGKTDDDTYYRVAALAESLRGXARRDPCQGF

SEQ ID NO: 312523 - protein, 46 aa, Zea mays
  Clone ID: MRT4577_48078C.1.pep
VFSTPMVRGVFLARPNDTTKRTYLNYIPNSRSAEFLADDLNRVGAL

SEQ ID NO: 312524 - protein, 373 aa, Zea mays
  Clone ID: MRT4577_48079C.1.pep
MRRPHEQLPRLASGLALLACLAVLARSRVAGAGGMPATFIFGDSLVDAGNNNYIVSLSKANFPPNGIDFLGHQPTGRYTNGRTIVDILGQEMGLGGFVPPYMAPETTGDAVMRGVNYASGGGGILNETGSIFGGRLNLDAQIDNYANSRHDLMARHGEVEAVSLLRGALFSVTIGSNDFINNYLTPIFSVPERATTPPVAFISAMIAKYRQQLTRLYLLDARKIVVANVGPIGCIPYQRETNPSAGTACAEFPNRLARAFNRRLRALVDELSAALPGSRFVYADVYRIFSDIIANYGSHGFEVADSACCYVGGRFGGLLPCGPTSLYCADRSKYVFWDPYHPSEAANALIARRILDGGPMDISPVNVRQLIVT

SEQ ID NO: 312525 - protein, 106 aa, Zea mays
  Clone ID: MRT4577_4807C.1.pep
MGAASAAMWAGLVLVVLLAASGPAAAGLPRFAEAPEYRNGDGCPAPVTGAGVCDPGLVHIAMTLDAHYLRGSMAAIYSLLKHASCPESIFFHFLAAEGGGAPAVAE

SEQ ID NO: 312526 - protein, 109 aa, Zea mays
  unsure (1)..(109): unsure at all Xaa locations
  Clone ID: MRT4577_48080C.1.pep
IPKXLQPCRPPLLASSAEITTLPLAAVSFPDRIFCMACPSITEARALVSNESVSVSQSLCVALPIINKDMRVPNMCNFSSMVGVSLGTGTCIVVFSSGSIKICSPALSK

SEQ ID NO: 312527 - protein, 66 aa, Zea mays
  Clone ID: MRT4577_48081C.1.pep
PLDWVLLIPGFTYRFSWFSSKAVSHLPGHSIKGKHITYLKSCQRSKGWTSKLPQTQACPCVRTYKY

SEQ ID NO: 312528 - protein, 99 aa, Zea mays
  Clone ID: MRT4577_48082C.1.pep
IQVFFFLKLEKTVQGFPHWGEIFGPPEREGGVFKKKRGIGVFFPPREIFQFAKIGKGGGGFGSKKKQIFFLPELGFPFCFKPPFFLPPFFLGGGPDFFS

SEQ ID NO: 312529 - protein, 64 aa, Zea mays
  unsure (1)..(64): unsure at all Xaa locations
  Clone ID: MRT4577_48083C.1.pep
NRXGQRAEGQNKPENKQARTAENHPARRRQTRSHKAGXAXXXHXARDXNKQRHXKXGRQKDNXP

SEQ ID NO: 312530 - protein, 37 aa, Zea mays
  Clone ID: MRT4577_48084C.1.pep
GWAFLPLFRPEYLSRPLAHLMGEGAFKRRPLGIGVSS

SEQ ID NO: 312531 - protein, 94 aa, Zea mays
  Clone ID: MRT4577_48085C.1.pep
KNRDPDIEQLHRYNMYPLCFQRYVVWIKQKQQNRIARAKQKSMSLFFQLICCKLPVLNSSHASSKRVPADIRGTGIFILAPNFRRCSRCSTPQE

SEQ ID NO: 312532 - protein, 165 aa, Zea mays
  Clone ID: MRT4577_48086C.1.pep
MPLGKYYCDYCDKEFQDTAAARRRHLQGAQHHRARALWYDSVRRQESHGGASPLLQPDGAILGQGVCNHFVRTGTCKFGDACRYFHPKPHAVNPAFAPSGPVPGAMGQQSNFLGTQPNFVGYQAMEGNSFSGNILRGHTSWGNLPPSLQPPPEGGYPPLPFVDWG

SEQ ID NO: 312533 - protein, 150 aa, Zea mays
  unsure (1)..(150): unsure at all Xaa locations
  Clone ID: MRT4577_48087C.1.pep
SVPRTLRPPQVQGFYFLVKNXVGDMPGGCILVHAPGSGKTFVLISFIQSFTARYPSARPFTALPIGILGIWQTEFHRWQLHFIPLYYFYSVQAEIRVQQLRILKCVKDKMPVLFLGYKQFCTILTDGRVRFATASCPDKLLKVPNLLILD

SEQ ID NO: 312534 - protein, 62 aa, Zea mays
  Clone ID: MRT4577_48088C.1.pep
NLHTCLLPLSPNPRLIRPRILLTPSRSATHELEDPSYICGGNENKRTCHHESHRLPLHREQR

SEQ ID NO: 312535 - protein, 51 aa, Zea mays
  Clone ID: MRT4577_48089C.1.pep
SWCGSRYPSGVRCSLGSAWICSVTRARHRDRDWCWSAVSSDVQFLVVRFDT

SEQ ID NO: 312536 - protein, 121 aa, Zea mays
  Clone ID: MRT4577_4808C.1.pep
PRWDLREFDVHRGILSKKKGGGKKKGGRDKIRGTKFTNTSMPPAWLFYRGPFFSSPFLFFPAPFLDPPCCAPPALPPFYFRFPHSPFARGGFHLLPFPTFSFSPLGVSLLAPVAPPPILPS

SEQ ID NO: 312537 - protein, 97 aa, Zea mays
  Clone ID: MRT4577_48090C.1.pep
ATWVSSSASSGTLFCRKRGRRGGCRGVRRSRTAAYSSDAAVPVLADRPIRRNHGGTVRLRIYERHERKCKVIDQLALHCGGGQCVQAERRRSGVGIE

SEQ ID NO: 312538 - protein, 24 aa, Zea mays
  Clone ID: MRT4577_48091C.1.pep
HDGTDILLWKWCEGDNQSWKILPW

SEQ ID NO: 312539 - protein, 171 aa, Zea mays
  Clone ID: MRT4577_48092C.1.pep
MLSSTSLAALLHGRPHYPFPPSKAHLFLALPNNPTRFLASASVRVAYPPRWPLRAADGERDNRVQELRVPDSWLTPAGATQESEWLRETLRKWLDDEYCPEPANVDISSTAARSYRESLIARQSDLGEILLRMVGDLDKLSYRESFHGPFSAANAAVRLIAQRMEESLPDE

SEQ ID NO: 312540 - protein, 32 aa, Zea mays
  Clone ID: MRT4577_48093C.1.pep
IIFFFFFFKTRGHLCSIGGSEHLLEQLSALCT

SEQ ID NO: 312541 - protein, 209 aa, Zea mays
  Clone ID: MRT4577_48094C.1.pep
MARSPAASSSSYTDSTGSSSDSGSTSSGIDRRRRRHRHRSSRRKEGTSSFALKARKDRRSRHKRRRHERERRRSASDDDSYSTSSYDSDREVSGRSRKHKKSSRSRKFRERERSKDRHHRRDKSKHKEGLFLGWLFDIGAGIGERVTTWWIGLLLVLLVGWLCSIINGGALYRRKRVSMLMALSSFPSFLDGTKKRKKVLNGVQSLVKR

SEQ ID NO: 312542 - protein, 91 aa, Zea mays
  Clone ID: MRT4577_48095C.1.pep
MVDWPAACSVGGLVVFYYKWGSFIQKKESEHADGPVQLSKFLGRDKEKEEGTQRSAISGKKIMMKLEKTKEDKAAESKRNELLKFLNASYD

SEQ ID NO: 312543 - protein, 59 aa, Zea mays
  Clone ID: MRT4577_48096C.1.pep
YPSLFLLEQAAFKLKNYEKEQYLVNLIGVSTENNQQKMVQVNQPCDIRSDESLCSNFHI

SEQ ID NO: 312544 - protein, 177 aa, Zea mays
  Clone ID: MRT4577_48097C.1.pep
MAATLLRRALQLRRALPSPASSRALLPAASSRLLSVTASTQQNTAGTAIDLSNDESRRRLVNSLMYRSKQRAFLELDLVLGTWVEQHVRSMDEANIRSLLQILDLENPDLWKWLTGQEQPPETVNSNPVFAAIKSKVTDNLSKHSSPETRSAPGQPWVRGWDDKDKRGLDGPKYGNQ

SEQ ID NO: 312545 - protein, 194 aa, Zea mays
  Clone ID: MRT4577_48098C.1.pep
MARSPAASSSSYTDSTGSSSDSGSTSSGIDRRRRRHRHRSSRRKEGTSSSALKARKDRRSRHKRRRHERERRRSASDDDSYSTSSYDSDREVSGRSRKHKKSSRSRKFRERERSKDRHHRRDKSKHKEKKESEHADGPVQLSKFLGRDKEKEEGTQRSAISGKKIMMKLEKTKEDKAAESKRNELLKFLNASYD

SEQ ID NO: 312546 - protein, 121 aa, Zea mays
  unsure (1)..(121): unsure at all Xaa locations
  Clone ID: MRT4577_48099C.1.pep
GIVNAIHNGSGKSWSHKVNNEEDLTASIXTALXEKKDCLXFMEVXARKYYPSKDVLEWGSRGLSPDSRASNLQYKHREAPNLVVPVFIVMCSSVGAQLNNSEGSCPLSQVGIPLVFLRSQI

SEQ ID NO: 312547 - protein, 50 aa, Zea mays
  Clone ID: MRT4577_4809C.1.pep
SSHPPSSSSQRGLRQWRWPPPTLRAEARGLSRRVDAGSAVPLGWASSAPP

SEQ ID NO: 312548 - protein, 52 aa, Zea mays
  Clone ID: MRT4577_480C.1.pep
FWNKKQMGFWQFFKGKPPLKFPSQGRLGPPPNFKASKNLKPFSPPLNPKAQI

SEQ ID NO: 312549 - protein, 58 aa, Zea mays
  Clone ID: MRT4577_48100C.1.pep
GAFFFFFFQSTQNQWFLAQYVDSQGLQNIIRRGNTNEAAASTAACEPLITHSVYEPAG

SEQ ID NO: 312550 - protein, 46 aa, Zea mays
  Clone ID: MRT4577_48101C.1.pep
RCRVGRLYFFLTHDLPLGGVMDGNHADIRHLGHVERTFQHLVAVLP

SEQ ID NO: 312551 - protein, 84 aa, Zea mays
  unsure (1)..(84): unsure at all Xaa locations
  Clone ID: MRT4577_48102C.1.pep
MSEEDMTAASAVLPLWAPMLNERILSSLSRKSVAAHPWHDLEIGPDAPAVFNVVVEITKGSNVXYELDKKTGLIKVDRVLYSSV

SEQ ID NO: 312552 - protein, 207 aa, Zea mays
  unsure (1)..(207): unsure at all Xaa locations
  Clone ID: MRT4577_48103C.1.pep
MASLLARQAAQALRARQTAQLGPAASAMQGHLRTYMXTRGFPSGXKEDEEKEQLAKDLAKDWNAVFERSINTLFLTEMINYPFEKGPLSPRFRGEHALRRYESGEERCIACKLCEAICPAQAITIEAEEREDGSRRTTRYDIDMTKCIYCGFCQEACPVDAIVEGPNFEFATETHEELLYDKEKLLENGDRWETEIAENLRSESLYR

SEQ ID NO: 312553 - protein, 152 aa, Zea mays
  unsure (1)..(152): unsure at all Xaa locations
  Clone ID: MRT4577_48104C.1.pep
YMDNVSALFRQMLEEGIPPDTRTLNVLIRGYAQSLHLNDALRLFHQMRPLYGCEPDAFTYSYLVHGLSAQGRTRNARELFGEMRGSGLLPTEPACNAFVGALAMAGEAADAKRXMVEMARAXGRGVDDITRRALVDELXRARKRXDADRLTR

SEQ ID NO: 312554 - protein, 224 aa, Zea mays
  unsure (1)..(224): unsure at all Xaa locations
  Clone ID: MRT4577_48105C.1.pep
MASLLARQAAQALRARQTAQLGPAASAMQGHLRTYMXTRGFPSGXKEDEEKEQLAKDLAKDWNAVFERSINTLFLTEMVRGLMLTLKYFFDRNVTINYPFEKGPLSPRFRGEHALRRYESGEERCIACKLCEAICPAQAITIEAEEREDGSRRTTRYDIDMTKCIYCGFCQEACPVDAIVEGPNFEFATETHEELLYDKEKLLENGDRWETEIAENLRSESLYR

SEQ ID NO: 312555 - protein, 109 aa, Zea mays
  Clone ID: MRT4577_48106C.1.pep
DQEVGTINSAWRLSAASPRRKLPRNLQIQHLERRSPLRGFVTATSSRDPFFGHYALGLNPPPNKQCTLLLVSIGVSTKQTWAGYSLHFDIRICIIGVVTHTLINIFLPP

SEQ ID NO: 312556 - protein, 73 aa, Zea mays
  Clone ID: MRT4577_48107C.1.pep
SEPSLVVWLARFSGVSAGIIRTLFLSRPFRAAHEVCASPECRGQGVPEACWHFVFYSRGWHIVPDNDSPFPLK

SEQ ID NO: 312557 - protein, 99 aa, Zea mays
  unsure (1)..(99): unsure at all Xaa locations
  Clone ID: MRT4577_48108C.1.pep
PTNSNNNNQKASKQGRAQQPQDNNARGRRTTSTRRQTPAPANNGNNGSHTTAPPAKPSSVQPTTQQGGGQKEEGGSGAXQKESKGLKXGAPNKXKXTFP

SEQ ID NO: 312558 - protein, 70 aa, Zea mays
  Clone ID: MRT4577_48109C.1.pep
KRIGDHSRGNGGLQKGKKTALPQEHVQAGTMDKYPKWVKIQGLLFPKKGFPLVLGISRTIFLILRSYVIK

SEQ ID NO: 312559 - protein, 99 aa, Zea mays
  unsure (1)..(99): unsure at all Xaa locations
  Clone ID: MRT4577_4810C.1.pep
MATNIVGVLALYALXIVXSTYALIITQCSLATSANISHFLPTPTIMGCEHTCKQAYRILLALASSVLQQQTAITLEQSLAHPILHTIIAPHHQETVASL

SEQ ID NO: 312560 - protein, 159 aa, Zea mays
  unsure (1)..(159): unsure at all Xaa locations
  Clone ID: MRT4577_48110C.1.pep
MCGRAHSSMSIKLVKHDSSWCFCIENRALNDATPKDNFPIPIVDELLDEPHDTRFFTKLDLHSGYHXVHMHVNDIKKTAFLTHHSHFEFXMAFGLTNAPATFQSLMNDALCPFLYRFMLVFIDDILIYNDSWSDHLHHIDVVRIRLHSQILAQMHQHDG

SEQ ID NO: 312561 - protein, 85 aa, Zea mays
  Clone ID: MRT4577_48111C.1.pep
SARTRRNADHGTFDALTMSRSVDATHSYVLPFPSSEVVTTPKHVHPNPRMSHRYLASPGHPHLPLPTSLDHYRLTAGSSQPTESH

SEQ ID NO: 312562 - protein, 353 aa, Zea mays
  Clone ID: MRT4577_48112C.1.pep
MADSKDLNSASPNNNTWLTNLSAAEHERLKDDMKKIDEEAQRQTEQVFTVADKWFLSHFRVVCHQKTVQEREINVEYMSAVLQQLPTIGDARSADDIPSIKISFDNRIKSITEDVERMAHALGKTRMPNFLSHKLGAETIAPNTSATNGFPQPYSGMPMASYPGRPSPPSSLNGESTLSTVGPSAHNRGPSSPPSDRSAPYAGQSGVTQSPPQGSQVLPDVTGQSEDSTGPSDPSTDRPTAQVGPSGAPEVTSDPPSAEGRHKYNRPPKPQKPKKSHVPELVWPTKAKPSVRSHPHSTQKEKVKFTFNITKCDKILDELLKHGNIKLSHVIEREMCPWAISKYFGDLVSNTSG

SEQ ID NO: 312563 - protein, 178 aa, Zea mays
  Clone ID: MRT4577_48113C.1.pep
PQPQHRTLGHFCFTVNLLGPQNHSRTLQGQWELHTIQAPIKLLMVAQEPQSKAPIQVLPGLLGGVFPPALQIIWGPYFAPPTNQKFDSSPKKFCVGYAKNGNQSLPSNSHGGNVNLSYFFVFLSPTMGFGGGKLCFHVQLNLQWPLPFCLLLTGVIPEGLNVLNFFSPSLFYVGNCFF

SEQ ID NO: 312564 - protein, 68 aa, Zea mays
  Clone ID: MRT4577_48114C.1.pep
PPALHPTYPRTRGLPRVPPQSPTDVPALAPLQMYPYVVADVPTRHRPYTVELTVPWMLVTDNTWRALH

SEQ ID NO: 312565 - protein, 64 aa, Zea mays
  Clone ID: MRT4577_48115C.1.pep
PVSRPLGAPAPSLSVPPPPWGGTTADYPSPGGAASSATPRRRPAPLTTTLTFGYQTGAKHQNPL

SEQ ID NO: 312566 - protein, 58 aa, Zea mays
  Clone ID: MRT4577_48116C.1.pep
RYYLYNELSAAYLLIQTDPACGNIGSSHANRLHTSLPFPFIALILRITKRQPRNCHYI

SEQ ID NO: 312567 - protein, 95 aa, Zea mays
  Clone ID: MRT4577_48117C.1.pep
GWPLGYDLTIDDGADDEHVDSEHINHDRGRDELHAEILSSSSPIARSTSRLLSVVYPAVMHETSRSPAASRNLKKVCVSSSLNWMDIMFFVFLVL

SEQ ID NO: 312568 - protein, 130 aa, Zea mays
  Clone ID: MRT4577_48118C.1.pep
MARGVVSTKGGTAAGKKKGSVAFTIDCTKPVEDKIMEIASLEKFLQERIKVAGGKAGNLGDSVTISREKTKVTVTCDGPFSKRYLKYLTKKYLKKHKVRDWLRVIAANKDHSVYELRYFNIAENEGEEED

SEQ ID NO: 312569 - protein, 597 aa, Zea mays
  unsure (1)..(597): unsure at all Xaa locations
  Clone ID: MRT4577_48119C.1.pep
MAASLAAAASRLAATGGELSWSARPCPGSLVASFPSAGRLRRPASGVRCGGGVLPAAAGTGAEAEEGGRFVGWFREAWPYIRGHRGSTFVVVISGEVIAGPHLDGILQDISLLHGLGIKFVLVPGTHVQIDKLLAERGKKAKYAGRYRITDSDSLDAAMEAAGRIRLTIEAKLSPGPPMLNLRRHGVNGRWHEISDNVASGNFLGAKRRGVVGGIDYGFTGEVKKIDVSRIRERLDRDSIVVVSNMGYSSAGEVLNCNTYEVATACALSIEADKLICIVDGQIFDEHGRVNRFMSIEEADMLIRTRAKQSEIAANYVKVVDXGGHQSCPLPPNXHGTEHGMNGRDHINGYTASFRNGVGFNDGNGLSGEQGFAIGGEERLSRSNGYLSELAAAAYVCHGGVQRVHIIDGTVGGALLLELFTRDGVGTMIARDMYEGTRMAREEDLSGIRKIIRPXEESGVLVRRTDQELLEALTSFIVVERDGSIIACAALFPFLEDKSGEVAAIAVSEECRGQGQGDKLLDYVEKKALSLGLEKLFLLTTRTADWFVRRGFKECSFDSLPLVRRKRIDLSRGSKYYMKWLQAAEVGHMAADGFAMR

SEQ ID NO: 312570 - protein, 121 aa, Zea mays
  unsure (1)..(121): unsure at all Xaa locations
  Clone ID: MRT4577_4811C.1.pep
AISSKIKATNPGCGAGVEAAGKKKQQIYRWTASDRDCELMGLMWLLQRNATRYGAAATAVIRALMAVDEAFTAGVAVAADTGAAVACSLPVDDDMPXPAEYAQVSRASDAPRLCCFLLVLL

SEQ ID NO: 312571 - protein, 64 aa, Zea mays
  Clone ID: MRT4577_48120C.1.pep
GNTSTFSQTNLNKLGLLKTHYCTARLKQYSLSVPYRLLPNRPNDTLAGKLRKNDGLTCLHSAHI

SEQ ID NO: 312572 - protein, 52 aa, Zea mays
  Clone ID: MRT4577_48121C.1.pep
YAAIYMGYRPLALGWAHPCAEYRFTWILVLHGLKVVIKFYTPRMHAAPAGLE

SEQ ID NO: 312573 - protein, 81 aa, Zea mays
  Clone ID: MRT4577_48122C.1.pep
LLKKARPKNKGKKNLYFLFFEIDQFGEFLLKKNISSVQDPPLLQDPNPSRALHKVSFPPVKTGSQRHSEHPQLPEPETSVA

SEQ ID NO: 312574 - protein, 77 aa, Zea mays
  Clone ID: MRT4577_48123C.1.pep
LRVLFVQNIHPPSTSFLVRASIHGHFFLISRAPASRVKKMSSLQVTHVSLVLVVEHTRHRWGNKPVAATTSFTGNLS

SEQ ID NO: 312575 - protein, 86 aa, Zea mays
  Clone ID: MRT4577_48124C.1.pep
LRNKNATYASFVCPLNRTEYFCKRWPLPLIFFGNRARHFLIVFSPHSGEQSLFVVSLMKMQFGTLHICLCKKPLGSLIMLCVSGSL

SEQ ID NO: 312576 - protein, 89 aa, Zea mays
  unsure (1)..(89): unsure at all Xaa locations
  Clone ID: MRT4577_48125C.1.pep
RSRPTPGSHTQNLNAIRPQGLETKSRARTTAGDSRLSXRKTKXXKDPKKPKRPPRASSDLLEELPKDHHENLPQKXRTASLTXKDGGDQ

SEQ ID NO: 312577 - protein, 118 aa, Zea mays
  unsure (1)..(118): unsure at all Xaa locations
  Clone ID: MRT4577_48126C.1.pep
IDTISFYSYICLLLPPTEVKSSPAGMRTFRGTGTQQKSLTQQKPQSTRQNKSKKGMHARERKKIFDLDNHGGRKLVCELLTRGVTLLTNGLWRARTQFHRLXHKYKLGLTTPQLKPTF

SEQ ID NO: 312578 - protein, 135 aa, Zea mays
  Clone ID: MRT4577_48127C.1.pep
QLSPVFVRAAHDRTTDGSVPMEVEADEVGLEEHEEVVLEPRNTMSVHHRIYLPSLVHGHHGGCGGRASRGGPIAVARHRAEPHHHRLWLGVGRWCGASGWGRRLRAAHDDFSATVSGRERTSGSQLGEAFAGGAR

SEQ ID NO: 312579 - protein, 93 aa, Zea mays
  unsure (1)..(93): unsure at all Xaa locations
  Clone ID: MRT4577_48128C.1.pep
MVRYSLDPENPTKSCKSRGSNLRVHFKNTRETAQAIKGMHIRKATKYLKDVTLKKQCVPFRRYNGGVGRCAQAKQWGWTQGRWPKQSAXFLLH

SEQ ID NO: 312580 - protein, 58 aa, Zea mays
  Clone ID: MRT4577_48129C.1.pep
HVCPSILTLFLYSICLTRHTHIHGPRGSYMPPCPFNRTCPHGEILFSRASQSTCCRRA

SEQ ID NO: 312581 - protein, 64 aa, Zea mays
  Clone ID: MRT4577_4812C.1.pep
PLTLSPRNPFGPVIPQPFHPAPHKEPWFPPGTRAPITGKTPPPPGTGRFFPGQPKESDQMLAFS

SEQ ID NO: 312582 - protein, 99 aa, Zea mays
  Clone ID: MRT4577_48130C.1.pep
GKKRRGLFHLLRPILFFTQCPNNPQAKNCPGFARPTYWGGGTTPLNTYIKNIGKASYWNPCDRTKTFLVVHGNIRQHKPFFLMCLTLQRPKLKPAPPPK

SEQ ID NO: 312583 - protein, 63 aa, Zea mays
  Clone ID: MRT4577_48131C.1.pep
QGVRGPLGFLSLADLNHVPVIFCLFVTPYAFVLDAYPNVKACGSGLMERPFVQKVAALLKPFA

SEQ ID NO: 312584 - protein, 252 aa, Zea mays
  unsure (1)..(252): unsure at all Xaa locations
  Clone ID: MRT4577_48132C.1.pep
MVVVAMAVMQGQAGATRVAVSLVLLLLASLTGGSPPPEPVSCARGTSDCTVTSTYGSFPDRAVCRAANATFPRTEKELVAAVAAAAASRRKVKVATSHSHSFPKLACPGGRDGTIISTERLNRTVRVDAARRLLTVESGMLLRDLVRAAADAGLALPHSPYWYGLTVGGLLATGAHGSSLWGKGSAVHEYVVALRIVTPAPASQGFAVVRELVAGDPDLDAAKVSXLAFLGVISQVTFELQPQFKRVVTFVT

SEQ ID NO: 312585 - protein, 87 aa, Zea mays
  Clone ID: MRT4577_48133C.1.pep
AQFFHLHGLKACFVMQAPVDPSQLSRIIFLFCCYPVQNLGNFPFRYCGLFGKQPKIKKGLGGFQIKKKKKKKKKKKKKKKKKKKKKK

SEQ ID NO: 312586 - protein, 77 aa, Zea mays
  Clone ID: MRT4577_48134C.1.pep
GRGPTLGSLHLLGTGTQDSSAQFFLMPFHDPPLNVGEWEKNGPICGAHKKNPRALGLKTHLQQVKLEHDQKGFLFLF

SEQ ID NO: 312587 - protein, 92 aa, Zea mays
  Clone ID: MRT4577_48135C.1.pep
CVQSIGKVNSEGHGRPRRLSSTSRCFALIRRLWIEHSHVTTGEECSGQLQLSAVLYTILHATILICLSAASVYFHCSATYMPRKTSMRPFCK

SEQ ID NO: 312588 - protein, 151 aa, Zea mays
  Clone ID: MRT4577_48136C.1.pep
GKPYLPAAAQNIRPPRAANRRHLASALAGRPPTARRLFPSRAPSSPPIRQPRAQSAVSRSQPRAQSAANRAQSAVPSPAQPRAQSAVSSPAARAVRRIAHHSPQVYNNLQLHRDVFSVDQNLYRDGCTRWMVDQLAKVLVKLSEVNMLTGV

SEQ ID NO: 312589 - protein, 103 aa, Zea mays
  Clone ID: MRT4577_48137C.1.pep
RPGGLIFALLLDSKYRDAFCFAHLTTSIIWWPRLCAAPTTLTRSICLLLVRVASPPAPPMIKHLSHVDAAAVVLRITMSNYLRHPWDAFENDGPVSRHRNAST

SEQ ID NO: 312590 - protein, 62 aa, Zea mays
  unsure (1)..(62): unsure at all Xaa locations
  Clone ID: MRT4577_48138C.1.pep
HXPTLXHPLPLTLLQLLTTLLDIIKTSAVSLSXXQTQINHILPISLTLIFARHLFFFFSLPN

SEQ ID NO: 312591 - protein, 47 aa, Zea mays
  unsure (1)..(47): unsure at all Xaa locations
  Clone ID: MRT4577_48139C.1.pep
VGXFGCWVESFPPSAPAGGTFRTHPHPLLPGVTEIGVQKAFIFPSSN

SEQ ID NO: 312592 - protein, 310 aa, Zea mays
  unsure (1)..(310): unsure at all Xaa locations
  Clone ID: MRT4577_4813C.1.pep
GSRKGSSEHNTESLKGLSLSEVGNNRTSNNKVVCCHFSSDGKLLASAGHEKKVFLWNMDNFKMDTKIEDHTNFITDIRFRTNSTQLATSSSDGTVRLWNAADESGALQTFHGHRSHVTSVDFHPRLXQRFFALATTMEKFSSGQLVRLXTHVLRVKQGGTGRVRFEPRSGQLLAVAAGSMVNIFDVEKQSSLPCPPKGHNSEVNFVSWDENGEYLASVSQDTVKVWSVSSGVCIHELRSNGNQYQSCTFHPRYPKVLIVGGYQTLELWSLSDNQRIPIQAHEGLIAALAHSPFTGMIASASHDRCVKLWK

SEQ ID NO: 312593 - protein, 135 aa, Zea mays
  Clone ID: MRT4577_48140C.1.pep
PVPGRAVSLLRTSPRPGTRKGMGRPPKMTGPRGGRPCPPRFGWSGRWGSGFSATRMRRAGISSSATCKNGAVARLLTGRPVRSHKGRFCPPPGGGVLEGSFSARMPPRFPISLKKRQKKSQNCPPKLFQMVGGAP

SEQ ID NO: 312594 - protein, 158 aa, Zea mays
  unsure (1)..(158): unsure at all Xaa locations
  Clone ID: MRT4577_48141C.1.pep
QAPGRAAPPTAXRSRPVARPADRTAQSLCALRFMLQSLFRYTSLSILEEIVCLCDRDLHLSNLPLHAGEHVDLAELNENLGQLVDHPARTAVPVEVLIDGEHVAVELQVVVDLWAVMCNTADCARGWGGDGGLRARLGWGRDGGLRAVGGGLRARLGT

SEQ ID NO: 312595 - protein, 126 aa, Zea mays
  Clone ID: MRT4577_48142C.1.pep
LNLLHKYLSNLPLHASEHVDLAEFNDNLGQLVDHPARRAVPVEVLIDGEHATVELQVVVDLWAVMCNTANYERGWGGDGGLRARLGRRQQTTRVARNVTWRTARAVGGSEETTARDWGGDGARWRP

SEQ ID NO: 312596 - protein, 82 aa, Zea mays
  Clone ID: MRT4577_48143C.1.pep
INASHKSFSFYSHGVYFEPKCGKKEDELDHAVLVVGYGIMNGEQYWLVKNSWSNLWANDGYILMSARDNNCGVLTDPTYVCV

SEQ ID NO: 312597 - protein, 87 aa, Zea mays
  Clone ID: MRT4577_48144C.1.pep
PRVRPRVRLERAGLIERRLDPEDHRVQVVDLTEAGTRILAEVTERRRRAIRERLADWPEEDLGRFAEYLVRYNGGTPPARPDGRCRP

SEQ ID NO: 312598 - protein, 74 aa, Zea mays
  unsure (1)..(74): unsure at all Xaa locations
  Clone ID: MRT4577_48145C.1.pep
HHTHVVTYQLTQPIYSCFNKLWTMRLXALAMTSACYCSYAYILSGLVLIIHRMMMMVISRLLPRLLAVGVGSAR

SEQ ID NO: 312599 - protein, 115 aa, Zea mays
  Clone ID: MRT4577_48146C.1.pep
RRRPQEAQGTAPRVGQGLQGPAAQGPGRDRQGSMAQGQLLDPNEHLEHAYAHNSSWSLHGVGIPFFSRAPMNEFCKSRSHLCLFGYTNPYRLRKIDQVSISSKKKKKAHASAHAS

SEQ ID NO: 312600 - protein, 92 aa, Zea mays
  unsure (1)..(92): unsure at all Xaa locations
  Clone ID: MRT4577_48147C.1.pep
GSVVFRFVSRFLMFRXCXSFLVFGRALRPPFCSFXSCFGPLFVFCVPPPRLVSRVGLSFLVCLVVVVPVRVFLVGASFSFCWSFCLXFXLLR

SEQ ID NO: 312601 - protein, 55 aa, Zea mays
  Clone ID: MRT4577_48148C.1.pep
WCIGACIQMRENRRLGACPNHMWLVPKTMGFKCFGLCRNMWPDHGLVRCVYFCAR

SEQ ID NO: 312602 - protein, 197 aa, Zea mays
  unsure (1)..(197): unsure at all Xaa locations
  Clone ID: MRT4577_48149C.1.pep
HWVPRGRPGLSPSPQVLIGLRSSGLPRSPTGEPYPSISHGDRGARPAPLPAPPLPLARSLFLRSXPRPPPRPAPASAKVADRIVRVLAIDPEGARREVVGLSGQTLLRALANAGLIEPASHRLEDIDACSAECEVHIAQEWLDKLPPPSYEERYVLTRASRNRELNKHARLGCQVVLAPELQGMVVAIPEPKPWDIP

SEQ ID NO: 312603 - protein, 95 aa, Zea mays
  Clone ID: MRT4577_4814C.1.pep
KEICNLCLKVSNLCSWKVEGSIHYKLITAILYTFLYITCKGLRYTGFIWFSEEKGDNLPKIDPELTIMLAARKIVRKEYHFLQGKTLILSQEQYS

SEQ ID NO: 312604 - protein, 166 aa, Zea mays
  unsure (1)..(166): unsure at all Xaa locations
  Clone ID: MRT4577_48150C.1.pep
MAIASGVLRRLPLHLYPSLARSFCAVSPAAASAAPASASAAPAXPPAAASKVADRIVRVLAIDLDGARRDVVGLSGQTLLRALANAGLIEPASHRLEDIDACSXIAQEWLDKLPPPSYEERYVLTRASRNRELNKHARLGCQVVLAPEXXQGMVVAIPEPKPWDIP

SEQ ID NO: 312605 - protein, 190 aa, Zea mays
  unsure (1)..(190): unsure at all Xaa locations
  Clone ID: MRT4577_48151C.1.pep
PPLSPSPQVLIGLRSSGLPRSPTGEPYPSISHGDRGARPAPPPAPPLPLARSLFLRSXSPAAASAAPASAKVADRIVRVLAIDLEGARREVVGLSGQTLLRALANAELIEPASHRLEDIDACSAECEVHIAQEWLDKLPPPSYEERYVLTRASRNRELNKHARLGCQVVLTPELHGMVVAVPEPKPWDIP

SEQ ID NO: 312606 - protein, 115 aa, Zea mays
  Clone ID: MRT4577_48152C.1.pep
NNYTVLITIIISDSLIKARSLPLTRWVILSMDTRIGALRRAPTESRLVFLPCAKGKKVIKGLGKRQETPTVAFRLSADHVCGGLLASLRWRVVPPPCSGTVLAMARVLERVQDIP

SEQ ID NO: 312607 - protein, 163 aa, Zea mays
  unsure (1)..(163): unsure at all Xaa locations
  Clone ID: MRT4577_48153C.1.pep
MAIAARALRRLPLHLSPSISRSFCAVSPAAASATSAPAAASAKVADRIVRVLAIDPDGARRDVVGLSGQTLLRALANAGLIEPASHRLEDIDACSAECEVHIAQEWLDKLPPPSYEERYVLTRASRNRELNKHARLGCQVVLAPELQGXMVVAIPEPKPWDIP

SEQ ID NO: 312608 - protein, 196 aa, Zea mays
  unsure (1)..(196): unsure at all Xaa locations
  Clone ID: MRT4577_48154C.1.pep
PPLSPSPQVLIGLRSSGLPRSPTGEPYPSISHGDRGARPAPPPAPPLPLARSLFLRSXPAAASAAPASASAAPASAKVADRIVRVLAIDLEGARREVVGLSGQTLLRALANAELIEPASHRLEDIDACSAECEVHIAQEWLDKLPPPSYEERYVLTRASRNRELNKHARLGCQVVLTPELHGMVVAVPEPKPWDIP

SEQ ID NO: 312609 - protein, 76 aa, Zea mays
  Clone ID: MRT4577_48155C.1.pep
FCHIIIPLSYKYLEGQTWCSGESCPTESTSHLLEAVSSHFRICVGKACLGYPFPKPSHVGASDIGCGLFFHITHKM

SEQ ID NO: 312610 - protein, 53 aa, Zea mays
  Clone ID: MRT4577_48156C.1.pep
FFVFFGRRDCFFQLAIRFFVWTKPVQCRGKNPFWGTHRWFQHTPNLRMLSPYS

SEQ ID NO: 312611 - protein, 83 aa, Zea mays
  Clone ID: MRT4577_48157C.1.pep
FRLITTFSANNFYYCKIIFGSVRFLKIWLSTIKFLVFFPSIRSNPFWSGFGFSKNLFLFYPLKKKKKKKKKKKKKKKKKKKKN

SEQ ID NO: 312612 - protein, 61 aa, Zea mays
  Clone ID: MRT4577_48158C.1.pep
KPTFGRFVLLSPPRSSHQKGKSLFKALGMLWPLGPLVRGILSLCLVVWFGTLFCPPSFIYP

SEQ ID NO: 312613 - protein, 90 aa, Zea mays
  Clone ID: MRT4577_48159C.1.pep
LQYRSSIPLSTHGAALSYILYISFSGLLCPLSYLFQVEEELLHRHFILTASLRQNAGPTVSSRPAMITREPRFLSHLSWRSIYLPYCIMY

SEQ ID NO: 312614 - protein, 45 aa, Zea mays
  Clone ID: MRT4577_4815C.1.pep
KSDSRRIYFDKLFNGKNGDTTFQLNDFVMTPIATLCVGSKNLRLE

SEQ ID NO: 312615 - protein, 43 aa, Zea mays
  Clone ID: MRT4577_48160C.1.pep
PFSADHKLDGYTKEWYGELEPRANNSLTLSPGCSCKSDPSTQS

SEQ ID NO: 312616 - protein, 220 aa, Zea mays
  Clone ID: MRT4577_48161C.1.pep
MKATLKGRYEGDKATAATSLAAPAGDLRLKASATEAVFANGPSLRGLTLTLEKPGAFLVDLKPHNQDVRFQFMKSALVLDKRVSLTYTHSTSLAAPAPPSRTTLDCTATFDPANKVSLSHTLGSGGCRVKYTYAHGVERLTTIEPLFDTNKNAWEFAVTRKLAGGDAVKGTYAATTKLLGLEWSRDSIAGGSLKVATMFDLSDQPKAPKLIAESTWNYEI

SEQ ID NO: 312617 - protein, 40 aa, Zea mays
  Clone ID: MRT4577_48162C.1.pep
RTFGSRRPLRQSILVRRHDVLIILDMQPQVNASTKAWIRY

SEQ ID NO: 312618 - protein, 58 aa, Zea mays
  Clone ID: MRT4577_48163C.1.pep
DFYWVTRPVQGTHKTASDSFSPASLILGPGHTASSRSVLVHARRSLPCRHPRHGTSWR

SEQ ID NO: 312619 - protein, 157 aa, Zea mays
  unsure (1)..(157): unsure at all Xaa locations
  Clone ID: MRT4577_48164C.1.pep
PRVRGRVGEPPATLPTQQPAPPPPPNYIPSSAGSSLASDGFYLRSPGYPGMSXITDDFAEENLLGEGGFGCVFKGILQDGRPVAVKKLKIGNGQGEREFKAEVDTISRVHHRHLVSLVGYCTAEGQRMLVYDXVPNNTLYYHLHGVDILSVIIFSNI

SEQ ID NO: 312620 - protein, 510 aa, Zea mays
  Clone ID: MRT4577_48165C.1.pep
ALVRLRSSLIPEPSAPPAPLLPSPPPPAPLPPSPPPPALSPPPPDALPPSLPPSPLPYPTRSPPQAPPPPLPTDQPRVQPRVYPSPPPPSLPPPPPPTVSPPAPGPSNSPSPSPAPATQAPGPARVAAYSPPPPKIAPPPPPHYRGKSHYTPHSPVKSHSNSTHAASGSGNNIEISREAATTIVALAGLAMLSFIGATIWFVKKKRRRIEPPATLPTQQPAPPPPPNYIPSSAGSSLASDGFYLRSPGYPFMRYSTGSHGFPYSPADSGIGYSHMLFTPENLAAITDDFAEDNLLGEGGFGCVFKGILPDGRPVAVKKLKIGNGQGEREFKAEVDTISRVHHRHLVSLVGYCTAEGQRMLVYDFVPNNTLYYHLHVSETSLDWRTRVKIAAGAARGIGYLHEDCHPRIIHRDIKSSNILLDNNFEAQVSDFGLARLAADSNTHVTTRVMGTFGYLAPEYALSGKLTAKSDVYSFGVVLLELITGRKPVDASQPLGDESLVEWVSSSLHFI

SEQ ID NO: 312621 - protein, 187 aa, Zea mays
  Clone ID: MRT4577_48166C.1.pep
FGLARLAADSNTHVTTRVMGTFGYLAPEYALSGKLTAKSDVYSFGVVLLELITGRKPVDASQPLGDESLVEWARPLLMKAIELREFGDLPDPRMGNRFDENEMFHMIGAAAACIRHSAAMRPRMGQVVRALDSLADSNLNNGLQPGRSEVFLEPQTEEIRLFQLREFGSRDCSDELSQASWRSRRDL

SEQ ID NO: 312622 - protein, 223 aa, Zea mays
  unsure (1)..(223): unsure at all Xaa locations
  Clone ID: MRT4577_48167C.1.pep
MAAACISHRFRHSKLPVLVLALATVVAAARAQLSPPTFYASSCPAALVTINAGVRAAVLLDRRMGASLLRLHFHDCFVQGCDASVLLDDTGNFTGEKSAGPNAGSLRGFGVIDTIKALLEALCPRTVSCADILAVAARDSVVALGGPSWTVQLGRRDSTTASLSTANTDLPSPASSLSTLLAAFARKGLSSTDMVALSGXHTVGQAQCQNYPGQIYNDANINA

SEQ ID NO: 312623 - protein, 68 aa, Zea mays
  Clone ID: MRT4577_48168C.1.pep
GFDVAITAQDGNDVRTIQDYPINLWNSSLRVDNASDMSPVAAQEYCIYKNLLPFYPTVRPGHNLLRPA

SEQ ID NO: 312624 - protein, 51 aa, Zea mays
  unsure (1)..(51): unsure at all Xaa locations
  Clone ID: MRT4577_48169C.1.pep
GQYQRYMNVENDHNHKHHLGQAVAIVVHAFALYXKHEANKDPLHSHRHKIT

SEQ ID NO: 312625 - protein, 82 aa, Zea mays
  unsure (1)..(82): unsure at all Xaa locations
  Clone ID: MRT4577_48170C.1.pep
VGFPTVGYQEHCKPLVPRQAEMFPCPPRLSIPRLRIKSCCWAFRCRVHTCVARLENSSLCIWSVLQSCACWIKREKKSXRSR

SEQ ID NO: 312626 - protein, 105 aa, Zea mays
  Clone ID: MRT4577_48171C.1.pep
AGDLGGRVISNRTRPIIFIRRRSVCMHLSSRLIISMHVRLIHLHPSPITWLDLSTTTSSCVASNMYNDCNLSSANCSCSRFYMILQLDLYILILFSLSGTAVDRA

SEQ ID NO: 312627 - protein, 111 aa, Zea mays
  Clone ID: MRT4577_48172C.1.pep
YENGVGSNLTSVLNLYKIYGGGGGEKKKKKKNKNLNFGPKKKCWPFSRDLPKGKLSFFPSSWGPFWLFFGGPYLPFAGGFYIPLGEFLQLPDWKTLGVPPLFRFGALPLLA

SEQ ID NO: 312628 - protein, 302 aa, Zea mays
  Clone ID: MRT4577_48173C.1.pep
IEQTRILSTFYRSASALGSRLPSMANAKARVAGAGAILRPVSTGTQVVMRRARSVAQAAWTRPALQLSSWTCIGPRRRNNISRATVTSEEIITSTGGGSESTSLLTETTAETTETVTSEAVSEVVQSSVSVAVDGVDLVDDKGDSDDDIVDHHGDEDRMTDVELWQQLESELYRKREGEEDDIADAWAESTIAEEVGGVAEDVLSETKEVHRFYPPGKIMHILFSSSEEAVRGEEPEDDVTDGEAQSSLGIFLTPRSLYGKLRLSKMMINDHYMPIYRRNIEQLIAELEKDSSDQIGSVRCS

SEQ ID NO: 312629 - protein, 113 aa, Zea mays
  Clone ID: MRT4577_48174C.1.pep
AIVRTRSVVLLHRSRMMKITVRWSEMAYPATETPRRRIWNSGTHLPESGLHTRHRILLPPLGRGQKRPVRRTRQLLRQSAHAVRAGLCARAFLPYGQPAGALLGQPCHRSTAT

SEQ ID NO: 312630 - protein, 104 aa, Zea mays
  Clone ID: MRT4577_48175C.1.pep
WLTLCKLVDVHGWSCNHHFALLIDHMHELTLYNGWTHDYLPEMARCGHRVCKHIYLIKRFWEADFNGIMADSRQLCGAYPPFLYVLQDLRIKPCIGFSYCDCLW

SEQ ID NO: 312631 - protein, 36 aa, Zea mays
  Clone ID: MRT4577_48176C.1.pep
TFFSGRGLKNPRVKTRSMLRVLSLGGIKICCRLQGF

SEQ ID NO: 312632 - protein, 116 aa, Zea mays
  unsure (1)..(116): unsure at all Xaa locations
  Clone ID: MRT4577_48177C.1.pep
HLIVHRGRRGPRFTVGMYSLTDETKARFHDLDFGWGRPVYGGPAEAXYPALPWLSSFILPFKNASGEDGAVVPVCLPRLAMDRLVDEMGKMRRRRSPAEVQQPRHGFPVIVKRSAL

SEQ ID NO: 312633 - protein, 67 aa, Zea mays
  Clone ID: MRT4577_48178C.1.pep
SSPNSTPHRSQHYNLVYQSGDSCSRTDDDEASTSERETSEHDNNGSREETHVLELHAYRATMLALHA

SEQ ID NO: 312634 - protein, 456 aa, Zea mays
  Clone ID: MRT4577_48179C.1.pep
MPPTTHHIYGYLLLGMEHVISMEEILGPFWELLPPPAPEPEPEREQPPVTGIVVGSVIDVAAAGHGHGGGDMMDQQHATEWTFERLLEEEALTTSTPPPVVVVPNSCCSGALNVDRPPVMEEAVMMAPAAVSSAVVGDPMEYNAILRRKLEEDLEAFKMWRAASSVVTSDQRSQGSNNHTGGSSIRNNPVQNKLMNGEDPINNNHAQTAGLGVRLATSSSSRDPSPSDEDMDGEVEILGFKMPTEERVRKRKESNRESARRSRYRKAAHLKELEDQVAQLKAENSCLLRRIAALNQKYNDANVDNRVLRADMETLRAKVKMGEDSLKRVIEMSSSVPSSMPISAPTPSSDAPVPPPPIRDSIVGYFSATAADDDASVGNGFLRLQAHQEPASMVVGGTLSATEMNRVAAATHCAGAMELIQTAMGSMPPTSASGSTPPPQDYELLGPNGAIHMDMY

SEQ ID NO: 312635 - protein, 60 aa, Zea mays
  Clone ID: MRT4577_4817C.1.pep
TVLKLVTKLLSVSSPPLTTIFTLSPPHARPTTFDSFAPRTARMAALLKYAFNMVKFSTLS

SEQ ID NO: 312636 - protein, 116 aa, Zea mays
  Clone ID: MRT4577_48180C.1.pep
HASAHASGFIYRNLLVEYREYCRNQRFFSQEKCGFQEKSTAFQRGPEIRARFMYNSYIPKRPKCQQARITGLSWTCASWCHPSCSINHHVDFMKLIRWGCLGTMEWVCFGFWFGFY

SEQ ID NO: 312637 - protein, 459 aa, Zea mays
  unsure (1)..(459): unsure at all Xaa locations
  Clone ID: MRT4577_48181C.1.pep
MEHVISMEEILGPFWELLPPPAPEPEPEREQPPVTGIVVGSVIDVAAAGHGHGGGDMMDQQHATEWTFERLLEEEALTTSTPPPVVVVPNSCCSGALNVDRPPVMEEAVMMAPAAVSSAVVGDPMEYNAILRRKLEEDLEAFKMWRAASSVVTSDQRSQGSNNHTGGSSIRNNPVQNKLMNGEDPINNNHAQTAGLGVRLATSSSSRDPSPSDEDMDGEVEILGFKMPTEERVRKRKESNRESARRSRYRKAAHLKELEDQVAQLKAENSCLLRRIAALNQKYNDANVDNRVLRADMETLRAKVKMGEDSLKRVIEMSSSVPSSMPISAPTPSSDAPVPPPPIRDSIVGYFSATAADDDASVGNGFLRLQAHQEPASMVVGGTLSATEMNRVAAATHCAGAMELIQTAMGSMPPTSASGSTPPPQXIMSCWVQMGPYTWTCIRHCGFRDRWEHFICRRR

SEQ ID NO: 312638 - protein, 106 aa, Zea mays
  unsure (1)..(106): unsure at all Xaa locations
  Clone ID: MRT4577_48182C.1.pep
MCLGDMSRLFYEIRVIKLVSAIRKILSAYEKYSDAVTGLSGKDPSYILLALEAMANGRDSTRLSWDLALXSLASQTLLGPSTIVSHTCKHSKHLKDHVTSPPCTTI

SEQ ID NO: 312639 - protein, 60 aa, Zea mays
  Clone ID: MRT4577_48183C.1.pep
MVRITILFRKQLGGKLGSSLQDDLGVETIGDLLSFTEEKLQEQYGVNTGFDHIIYLPTTI

SEQ ID NO: 312640 - protein, 105 aa, Zea mays
  Clone ID: MRT4577_48184C.1.pep
WRHLASPPLSGGGSGGVPCPWLSALAPQKNAALRSCKAGLHFPVAWIGRFLKARMYALLRRRLRGRGPRRRPCVPRGCGSRTPLLCRGAHHEDPLCAAPRLTGWA

SEQ ID NO: 312641 - protein, 151 aa, Zea mays
  Clone ID: MRT4577_48185C.1.pep
MRDGRVDYRSSPRPAGRLLVDMLSTLLTLWVSLVPLMWFIQRQMSGAGGADKRRKPRKQRVGFDDVQGIDEAKEELVELLTEMDGFDSDMKVIVMAATNRPKALDAALCRPGRFSRKVVVGMPDVEGRTKILDVHLKNIPLEEDHGIISDL

SEQ ID NO: 312642 - protein, 139 aa, Zea mays
  Clone ID: MRT4577_48186C.1.pep
DGYPYGGYEYFSREIGQYFSVVTKGQQLYYGIKIFEMVSIDLSNNNLSGRIPEEIASLDALLNLNLSRNYLSGEIPDKIGAMKSLFSLDLSDNVLSGEIPSSLSDLAQLSYLDLSNNNLTGPVPSGQQLDTLYAEYPSM

SEQ ID NO: 312643 - protein, 201 aa, Zea mays
  Clone ID: MRT4577_48187C.1.pep
MTSDLAVSKEGLSIPLIDFSLFLNGTPSERNDTANAILEGFKTAGFIYLKNHPVSPKELQHAFDMSARWFDQPLESKMKVVWTTPEANRGYSAPGREKVSQLTDLADVEKMRAALPDIKESLEIGRENEAGHPNYWLEESGELVGFRKDMLGFFEQCRQLHVEVMKAIAVGMGLDDGFFDGFVDVGDNTLRLLHYPSVQSN

SEQ ID NO: 312644 - protein, 86 aa, Zea mays
  Clone ID: MRT4577_48188C.1.pep
PFWHHDFIAVCCALNSFSLFFIQDTVLNCIRTGRTVQSAALQHLACAATKPTTCSMDAPYLYVMAMILAKIFRYVPIVGERVKLKL

SEQ ID NO: 312645 - protein, 65 aa, Zea mays
  Clone ID: MRT4577_48189C.1.pep
LGHTLLNYSGGGPSRYLAIARPADTLQQRPPMRVEKLMNHLKPYLAIVLLHVAFSEMYIVSRRLP

SEQ ID NO: 312646 - protein, 59 aa, Zea mays
  unsure (1)..(59): unsure at all Xaa locations
  Clone ID: MRT4577_4818C.1.pep
KRNLTNLLLIGTISLPTRWMIRRYGEFFNTVASGNXGGGDLXKDHVSNNVTANVSVNIL

SEQ ID NO: 312647 - protein, 47 aa, Zea mays
  Clone ID: MRT4577_48190C.1.pep
FIRTTPISLNTTFLNYELLWIIFLLFFLDSNSYTSLICFCLIYCRCN

SEQ ID NO: 312648 - protein, 128 aa, Zea mays
  unsure (1)..(128): unsure at all Xaa locations
  Clone ID: MRT4577_48191C.1.pep
PPRGTQTSSRTHTRAQKNPDTRHAHAHPAHAASATTTXTSGGGGSQPPPPEQQPPPGQQPPAEHQPPTXQQPPPDHQPPPDHQPPTDQEPPTEQQPTTPXNNPTQPTRTEAEAQAHPXPSQQTKANPG

SEQ ID NO: 312649 - protein, 261 aa, Zea mays
  Clone ID: MRT4577_48192C.1.pep
MSLQCVAPPVRALAVLPAPAPPRRRTNHVSLYLPSRRPGLAVAPVRAADSSSPPTVPASAAGKAVVPDDEFSLAKVSFGVIGLGLGLSLLSYGFGSYFNLLPGSEWSALLLTYGFPLTIIGMALKYAELKPVPCITYADAFALREKCATPILKQVRSDVTRFRYGDEQHLDEALQRIFQYGLGGGIPRRNAPILQKIREEVTDDGKYSLVLVFQAKALELSDFEKRQAKFTSFFGPGIKAEIDAGKGGGDLYEVRLISDTV

SEQ ID NO: 312650 - protein, 261 aa, Zea mays
  Clone ID: MRT4577_48193C.1.pep
MSFQCVAPPVRALAVLPAPAPPRRRTNHVSLYLPSRRPGLAVAPVRAGDSSFPPTVPASAAGKVVVPDDEFSLAKVSFGVIGLGLGLSLLSYGFGSYFNLLPGSEWSALLLTYGFPLTIIGMALKYAELKPVPCITYADAFALREKCATPILKQVRSDVTRFRYGDEQHLDEALQRIFQYGLGGGIPRRNAPILQKIREEVTDDGKYSLVLVFEAKALELSDFEKRQAKFTSFFGPGIKAEIDAGKGGGDLYEVRLISDTV

SEQ ID NO: 312651 - protein, 82 aa, Zea mays
  Clone ID: MRT4577_48194C.1.pep
SVSPFIWCGLVLGHGPMYDSVDMSVYGSLHLHIVSLTSVSLGSLAVCTCPISDPALMYLLFMDVWPCHQTNANARQVLHKWP

SEQ ID NO: 312652 - protein, 81 aa, Zea mays
  Clone ID: MRT4577_48195C.1.pep
WGVHIVTKVKKYHAHSGYSRPHGMGEIFQSIFFYLCNQTTFLIQGGVGSTMFPVLWGNTKTGSFWGAPTHGFVIKRGFSQG

SEQ ID NO: 312653 - protein, 94 aa, Zea mays
  Clone ID: MRT4577_48196C.1.pep
TQKGAAHTNTGPDLKSHPQGGPGGGGPTPPLREKKAFSEMTHPLPKKFLWVGWMRNQPTRPPYGLACCRGFPHPQQRSFYAMVSEHCQPLLWGN

SEQ ID NO: 312654 - protein, 78 aa, Zea mays
  Clone ID: MRT4577_48197C.1.pep
VSTSMRHSFLDLFVCMSVSCASRRRCIAVLLGSACYVSQLTRERPPHRSRALGKPGHQERRRKQCASRVTTNDGERVG

SEQ ID NO: 312655 - protein, 50 aa, Zea mays
  Clone ID: MRT4577_48198C.1.pep
FHHYPVYKILLLRIYGETTFNVIENKQLLISTISIPAYHLGLNDLIITFN

SEQ ID NO: 312656 - protein, 71 aa, Zea mays
  Clone ID: MRT4577_48199C.1.pep
HKFCVKTRLVLVPRLYVIMWHHVFKVQSPCDYRLVHVPMQFAMCHCPYSSASGLQPPSWHGPGPADNSPHA

SEQ ID NO: 312657 - protein, 48 aa, Zea mays
  Clone ID: MRT4577_4819C.1.pep
VVLVGFQAPPIARVSIRTIFVMEYTIIVSGYHLVSITWVKGPYAHRLC

SEQ ID NO: 312658 - protein, 80 aa, Zea mays
  unsure (1)..(80): unsure at all Xaa locations
  Clone ID: MRT4577_481C.1.pep
RPGTSILSRTSKDQISTFFFLTTLFFNHSLSLRALTAVYIYLPLFILQLLVLETLSRKTTTSVHFYIYYRQNEEPPXPLS

SEQ ID NO: 312659 - protein, 53 aa, Zea mays
  Clone ID: MRT4577_48200C.1.pep
AQYKGMTYKNKQTNLTKWHARNQYHCLPKYIFFLSYRNKMDEKKESYNEINIS

SEQ ID NO: 312660 - protein, 239 aa, Zea mays
  Clone ID: MRT4577_48201C.1.pep
IERFLDKAAVNDGDGRRWSLCTVTQVEEAKIILRMLPVFVSSVLGYLPIPLLLTFTVQQGGTMDTRLGATNVPPASLFVVPIVFQMLILVVYDRAAATEMSVFWLTPQFFLLGVMDVTSFVGLLEFFYSEASAGMKSIGGAVCFCILGIASWLGSFLIRVVNRATAHHGTSMGTGWLEGANLSAGRLDLFYWLLAIFKLVAVLLYLLCAWRYTYRHHPRMQVQSTVEDHTAAIKRDAAL

SEQ ID NO: 312661 - protein, 115 aa, Zea mays
  Clone ID: MRT4577_48202C.1.pep
RWGNLPFFFGEKFLPPPIFFLGTFFCFERSLPWLTIFFFFPKLGPFFFPSVFVPCPGFFSGTRGVFFPPLFWFFSPGGGASFLCPREGVFPSCFYPVSPFSSGTQISYMLRLIML

SEQ ID NO: 312662 - protein, 200 aa, Zea mays
  Clone ID: MRT4577_48203C.1.pep
RKADVNDGDARRWSLCTVTQVEEAKIILRMLPVFVSSVLGYLPIPLLLTFTVQQGGTMDTRLGATNVPPASLFVVPIVFQMLILVVYDRAVVPWLRRATGYAGGVTHLQRIGVGFASNVVALAVAAAVEGRRRAEGGAAAAEMSVFWLTPQFFLLGVMDVTSFVGLLEFFYSEASAGMKSIGGAVCFCILGIASWLGSFL

SEQ ID NO: 312663 - protein, 113 aa, Zea mays
  unsure (1)..(113): unsure at all Xaa locations
  Clone ID: MRT4577_48204C.1.pep
KPLPGNKGVXINPPKEKFFALPGEVFSGIFFPEKEVPKIXGPPRMGPTFGPIIFFGQKGGPLGFKALGRPNPLGGAIFPPLGEKFFFWLKDPKVLDPLFGQKKKRIYPTRVFF

SEQ ID NO: 312664 - protein, 53 aa, Zea mays
  Clone ID: MRT4577_48205C.1.pep
LKGVWVFIHGRATTKYLFIQRTPHGAQTKSCITGRAQKFQPSFHETKHKNVGP

SEQ ID NO: 312665 - protein, 74 aa, Zea mays
  Clone ID: MRT4577_48207C.1.pep
RRIEPNVVKGLTSLATEEGLRHENLVSGMLNTVAGVLTTLTGASANESDGSTFHMTVTVEAAYCACCHKISSRG

SEQ ID NO: 312666 - protein, 94 aa, Zea mays
  Clone ID: MRT4577_4820C.1.pep
PFRWASRWFGVLSSLGAFRSVPLFISVLVALSAFSAPVELLGVSRLLCIYLGWSFLVLKERGYVLGPFVRGPCFVHFSPGSCYLSSSSYAQLTV

SEQ ID NO: 312667 - protein, 63 aa, Zea mays
  Clone ID: MRT4577_48211C.1.pep
MAGGRVAHATLKGPSVVKEIFIGLTLGLIAGGMWKMHHWNEQRKTRSFYDMLDKGQISVVVEE

SEQ ID NO: 312668 - protein, 47 aa, Zea mays
  Clone ID: MRT4577_48212C.1.pep
GVRNTGNKLGSLIKFSDQHVICRRPPTVHWTPVPCITMRPFQTKKKA

SEQ ID NO: 312669 - protein, 66 aa, Zea mays
  Clone ID: MRT4577_48213C.1.pep
THRAQKGPHYIKKKDTNPSKTFFSKRGADRPRRTPHQIPRGAGGINHRPTPDGLAPKRADPCKTKA

SEQ ID NO: 312670 - protein, 66 aa, Zea mays
  Clone ID: MRT4577_48214C.1.pep
KFFETSPKTNQNVDQVFFPMARDVKRRPPETVPPPAEPPAIQISRPDSGQAGAASSPRWSSSSCSP

SEQ ID NO: 312671 - protein, 87 aa, Zea mays
  Clone ID: MRT4577_48215C.1.pep
AVVVWPEIHLALSQVSCDPLCLEILNILWVLRREDDDIAEVVVGVSRAWGRGYCHISITVREVDDASRLTMMDGVLRGVASQCGPAS

SEQ ID NO: 312672 - protein, 114 aa, Zea mays
  unsure (1)..(114): unsure at all Xaa locations
  Clone ID: MRT4577_48216C.1.pep
THARVLSLISAYCRAGILLEAVKLLQMMPNIGVPRTGVSYNAALKAILCRGRXAMARRIYTTMISVRVTTDVCTYSTLIXGFGLFLTMETASTVSGDTNGHWVTPDVTAYNTLL

SEQ ID NO: 312673 - protein, 228 aa, Zea mays
  unsure (1)..(228): unsure at all Xaa locations
  Clone ID: MRT4577_48217C.1.pep
HDNSVKTTTTGHLIYKLGRIDERVIERFEKEDAEMNKRSLKYAWEMDKKKAERERGITIDIALWKIETTKYYCLVFDAPGHRDFIKNMTTGPSQADCAVIMIDSTTGGFEVSISKDAQTREHALLAFALGVKQMICCCNKMDATTPRYSKAXRYEEXLAKESSSHLNEAGYHPDKVPFVPXISGLEGDPLIERSTNLXDWNKAPTXLHEAFGHIQRPXRPSDSPLLVP

SEQ ID NO: 312674 - protein, 87 aa, Zea mays
  Clone ID: MRT4577_48219C.1.pep
MATCDTSARASWGGTDLSPLAWRATTPLVHRRPETSAWWHRVQEHISDHLRPWSRYAQFWVCVADIYISYEVGLWCASDVLFDMRMR

SEQ ID NO: 312675 - protein, 79 aa, Zea mays
  Clone ID: MRT4577_4821C.1.pep
KKKFSSTPRGEKKWTLKRDAPGFIIKSELVAKYVARCLLRSPECFLVKMSFLIFNFGLGRSFLYQISAWLQAVLILLHY

SEQ ID NO: 312676 - protein, 123 aa, Zea mays
  unsure (1)..(123): unsure at all Xaa locations
  Clone ID: MRT4577_48220C.1.pep
VIEYRGEQVRQRVADLREARYHREKKDCYLFKISEDVVIDATGKGNIARLINHSCMPSCYARIVTVSGDRSQIILIAKRDVSAGEELTXPQPCQYNYLFDPDESEDCKVPCLCKAPNCRGYMN

SEQ ID NO: 312677 - protein, 38 aa, Zea mays
  Clone ID: MRT4577_48221C.1.pep
LKQTTQYKNVFLISGCKMMEQCRCVQVCVCKCMYLIGY

SEQ ID NO: 312678 - protein, 646 aa, Zea mays
  unsure (1)..(646): unsure at all Xaa locations
  Clone ID: MRT4577_48222C.1.pep
MGVRSAATKLHIPPSAARRPTFLPFVAVLLLCSASYLIGVWXTAASPLHPTNPPPSPPLRPSPAPTSPPPXRRTRSGASSPSLDFSARHAAAADDALDASTATAASSAAPRRSSYPACPARYSEYTPCEDVERSLRFPRDRLVYRERHCPASERERLRCLVPAPPGYRTPFPWPASRDVAWFANAPHKELTVEKAVQNWIRVDGDRLRFPGGGTMFPNGADAYIDDIAKLVPLHDGSIRTALDTGCGVASWGAYLLSRDILAMSFAPRDSHEAQVQFALERGVPAMIGVLASNRLTYPARAFDMAHCSRCLIPWQLYDGLYLIEVDRVLRPGGYWILSGPPINWNKYWKGWERTKEDLNAEQQAIEAVARSLCWTKVKEAGDIAVWQKPYNHAGCKASKSSRPFCSRKNPDAAWYDKMEACITPLPEISKASDVAGGAVKRWPQRLTAVPPRVSRGTVRGVTARSFAQDTELWRRRVRHYKSVASQLEQKGRYRNVLDMNARLGGFAAALALAGDPLWVMNMVPTVANATTLGAIYERGLIGSYQDWCEGMSTYPRTYDLIHADSVFTLYKDRCEMDRILLEMDRILRPRGTVIVREDVDMLVKVKSLADGMRWESQIVDHEDGPLVREKILLVVKTYWTAQDQDQ

SEQ ID NO: 312679 - protein, 172 aa, Zea mays
  unsure (1)..(172): unsure at all Xaa locations
  Clone ID: MRT4577_48223C.1.pep
GFPLLALLALFESAAPASIVXTCSLAPSVIIPQLLRPDTXMCLKHLTNGACTVQQALDWSVLQQPTNQLQPQCLVHVTIRTMAAQQXTQFYSALSRPNVGNPGCYLHQRALAYNPLVMANVAAYQRQQQLLHXLAALSELAMXVNPAAYLQHAQLLSSNPVVVGNAPTYLQQ

SEQ ID NO: 312680 - protein, 179 aa, Zea mays
  unsure (1)..(179): unsure at all Xaa locations
  Clone ID: MRT4577_48224C.1.pep
PCRDSVIRLRSSAVKALSRXTSPNSAKVGKLVGGIMSAQTDDKDALDHCASADALQTVSEAELSNDQAHGRNPVHTIKGGLFLFGQAISCLINTPKHRVNSTAAINYELGRSRITTVSDGRKSVVASCGFMDVSHRGEGNPHINSHFLEDGLFECGGGHISPHSXDGPGLTFASDGCII

SEQ ID NO: 312681 - protein, 61 aa, Zea mays
  unsure (1)..(61): unsure at all Xaa locations
  Clone ID: MRT4577_48225C.1.pep
ALLTSXYSLDDPNTFGNRIHRMLKLGLSIDEDAGEADADMPPLEDADADADAEGSKMEEVD

SEQ ID NO: 312682 - protein, 375 aa, Zea mays
  Clone ID: MRT4577_48226C.1.pep
LERGVPALIGVLASNRLTYPARAFDMAHCSRCLIPWQLYDGLYLIEVDRVLRPGGYWILSGPPINWKKYWKGWERTKEDLNAEQQAIEAVARSLCWTKVKEAGDIAVWQKPYNHAGCKASKSPPFCSRKNPDAAWYDKMEACITPLPEVSSARDVAGGAVKKWPQRLTAVPPRVSRGTIKGVTARSFAQDTALWRKRVRHYKSVISQFEQKGRYRNVLDMNARLGGFAAALAAAGDPLWVMNMVPTVGNTTTLGAIYERGLIGSYQDWCEGMSTYPRTYDLIHADSVFTLYKNRCEMDRILLEMDRILRPRGTVIIREDVDLLVKVKSLADGMRWESQIVDHEDGPLVREKILLVVKTYWTAHEAMTKISSRTVK

SEQ ID NO: 312683 - protein, 260 aa, Zea mays
  Clone ID: MRT4577_48227C.1.pep
QKPYNHAGCKASKSSRPFCSRKNPDAAWYDKMEACITPLPEISKASDVAGGAVKRWPQRLTAVPPRVSRGTVRGVTARSFAQDTELWRRRVRHYKSVASQLEQKGRYRNVLDMNARLGGFAAALALAGDPLWVMNMVPTVANATTLGAIYERGLIGSYQDWCEGMSTYPRTYDLIHADSVFTLYKDRCEMDRILLEMDRILRPRGTVIVREDVDMLVKVKSLADGMRWESQIVDHEDGPLVREKILLVVKTYWTAQDQDQ

SEQ ID NO: 312684 - protein, 124 aa, Zea mays
  Clone ID: MRT4577_48228C.1.pep
FADLYIVAFGEYMMHGFPEYLKRPWRSPSPAPLPCTAHRCLALLSTMASARPPIANTLTRPWSPHAIPHTVYYIKYFTHDRQQNQTAVRCTLIQMPYLYLYNGYQSYRPHQGTFQCHTLTPLST

SEQ ID NO: 312685 - protein, 58 aa, Zea mays
  Clone ID: MRT4577_48229C.1.pep
AHYSRSRRALTKVGGRHSTVSIHTQTIPMFSYVMHWHSNTNARRNDRFISFHVPDTNN

SEQ ID NO: 312686 - protein, 128 aa, Zea mays
  unsure (1)..(128): unsure at all Xaa locations
  Clone ID: MRT4577_4822C.1.pep
PRVRGNTFWFLSFLSFYLCQHVXVRGIYLPMYAIHSSNQPWCVWDLVAAATCVAXILIAHFADTQLHRFLTRNKKLNLLVEPTVPTLXDWLWRYSRYPNYFFEQLWRRGLYFFLWNLSQQXMFLGPLV

SEQ ID NO: 312687 - protein, 68 aa, Zea mays
  Clone ID: MRT4577_48230C.1.pep
ALSEMMIIKYADVNWIAAHRTKQHTTASSDMVSHVGMHYLCLNGSKYTTSPLAMYDGGGDLTSSSGTT

SEQ ID NO: 312688 - protein, 63 aa, Zea mays
  Clone ID: MRT4577_48231C.1.pep
WCQTSTRHCYLRKGEDLSGPGQPPCTWRSNLNLGQDPYLPQGCQDQRSAEVRRGHEEAKSGAA

SEQ ID NO: 312689 - protein, 75 aa, Zea mays
  Clone ID: MRT4577_48233C.1.pep
SIVIPKRPPITKGRPIKTQWGAISLLPMRTGKKNPNAFGIRTFFTGGVHLFALEAFSAFPIHNLAPHLICFWIPH

SEQ ID NO: 312690 - protein, 42 aa, Zea mays
  unsure (1)..(42): unsure at all Xaa locations
  Clone ID: MRT4577_48234C.1.pep
MATRAVXRFLEGRLLSSGGLVLXEEEKVGGGVCLKLVLEKLE

SEQ ID NO: 312691 - protein, 67 aa, Zea mays
  Clone ID: MRT4577_48235C.1.pep
IRLEGSPSNYFTAAPLPKWLGGDLRPLHGQIAEGPHPKPLPHRTHILRNVDNRPPRTNGPSILYRLS

SEQ ID NO: 312692 - protein, 126 aa, Zea mays
  Clone ID: MRT4577_48236C.1.pep
MAEKQPPAPHSPSPAVQVQPAGPAAGGHSHHQAASASASGPASPHSPSPVVQQGDGTSSARAAAITAPPMGTTTATSSGEPSPRSSGKHAFYPGIRCRSGKWVSEIPQPRKARRIWLGTYPMAKMA

SEQ ID NO: 312693 - protein, 70 aa, Zea mays
  Clone ID: MRT4577_48237C.1.pep
MASGELACTYAVLMLSDDGMGMTAEKIVTIVKAGNIKLEYYWPALFDKLLEKRSVEDLILSDGSGGGAAA

SEQ ID NO: 312694 - protein, 49 aa, Zea mays
  Clone ID: MRT4577_48238C.1.pep
NVVCLGCPRNEFFLIPIQPSVWLCQENRCYMTYVIFAIIVKCKKKKKGR

SEQ ID NO: 312695 - protein, 112 aa, Zea mays
  unsure (1)..(112): unsure at all Xaa locations
  Clone ID: MRT4577_48239C.1.pep
RPGDIQLNVDLNVVTLVNEEIYHEHEQKKGHAEQRRGQSRGPKAPRTQMATTWARNPGPTTATXNMAYTNTASTSALRPIRRNXKTTDVLMRKLXPYKXLYRDIRKEFTTHP

SEQ ID NO: 312696 - protein, 34 aa, Zea mays
  Clone ID: MRT4577_4823C.1.pep
FRQCSGGRPSRGSHPGQPLFIIIMTLIRLSSERV

SEQ ID NO: 312697 - protein, 111 aa, Zea mays
  Clone ID: MRT4577_48240C.1.pep
HASAHASALLYLPHPHSHSQPHTPHHNSSLCISASSPSSACTTFFFLISLSLLPLPPSQHRGKGSPGISVPLPAAVLLITSFFLTVKDKQVTSVCIPPPPYVAYTGTDGRA

SEQ ID NO: 312698 - protein, 96 aa, Zea mays
  unsure (1)..(96): unsure at all Xaa locations
  Clone ID: MRT4577_48241C.1.pep
AANFFFFFFXXXXXXXXXXXXXXXFFGGHNNRKPKLRVAKLQISRNLHQVLLLHITTTFRHTRNTPSYSCATTVPTAGWKANNNGGSASQHSVSPH

SEQ ID NO: 312699 - protein, 451 aa, Zea mays
  Clone ID: MRT4577_48242C.1.pep
MAEHKGNVLLHKYEMGKLLGQGTFAKVYHARNTATSESVAIKVIDKEKVMKVGLIDQIQREISVMKLVRHPNIVQLYEVMATKTKIYFVLEHVKGGELFNKIQRGRLKEDAARKYFQQLICAVDFCHSRGVYHRDLKPENLLLDENSNLKVSDFGLSALAECHRQDGLLHTTCGTPAYVAPEVINRKGYDGAKADIWSCGVILFVLLAGYLPFHDKNLMDMYKKIEKADFKCPSWFSTDVRRLLQRILDPNPSRRISVEKIMENPWFRKGLGAKLLRYDLQNKNAPHVDKKADFDSLSTNVTTESKQHEEKKPTNMNAFDIISLSTGLDLSGLFEESNKKRESKFTSTNTSSTIISKIEDIAKNLRLNLTKKDGGLLKMEASKPGRKGVMGIDAEVFEVSPNFHLVEIKKTNGDTLEYQKVLNQEMRPALKEIVWAWQGEQSKQKQEQQSC

SEQ ID NO: 312700 - protein, 84 aa, Zea mays
  Clone ID: MRT4577_48243C.1.pep
QTRRVAPPVSPSRAFQTASPFEFCLASGRTVVSLVDCVSPSRSVKGGSPLPGSVQRDKCSFRRSLREACCYKSPGSSSSIQLLC

SEQ ID NO: 312701 - protein, 112 aa, Zea mays
  unsure (1)..(112): unsure at all Xaa locations
  Clone ID: MRT4577_48244C.1.pep
RGAWKLAGQTRAKGPTKKDXAFVPRXTVLPGGSAXRRLKLAQSCWLASPFRRTAVVLPXTSXPVSPAQRKVAEKGVLAAAAKGEQXSPKXRPAXXPQRKXHAKVPRRKPLEN

SEQ ID NO: 312702 - protein, 25 aa, Zea mays
  Clone ID: MRT4577_48245C.1.pep
LSAYFNFFMSIRLHLKYYYEYYSTY

SEQ ID NO: 312703 - protein, 116 aa, Zea mays
  Clone ID: MRT4577_48246C.1.pep
VSRGLSALRSFAPCSSRRSAGELSGLRSPSPVLAAWSRRARHHLAPEYGQGIRVCMAVLAVLLDLLLEAAGSGTPGTSPDSCLYRPKTAAASAVQTCERRPAAAAPAARERRRRPR

SEQ ID NO: 312704 - protein, 52 aa, Zea mays
  Clone ID: MRT4577_48247C.1.pep
GLVVCCRLASPHRSWQSTRSSLRSAWDPSRQPGYVPSALARAVSICVQCLAG

SEQ ID NO: 312705 - protein, 83 aa, Zea mays
  Clone ID: MRT4577_48248C.1.pep
PAFSCNYGPFWGLSPPVGLLSRGVRAFVLGGARPGFCLSKSALCFLRVDLNGGAKVQKRSPTLKNISPADTPGLFLAPFVFFF

SEQ ID NO: 312706 - protein, 122 aa, Zea mays
  Clone ID: MRT4577_48249C.1.pep
AVSISFGAQTTPLRIGAPRGPLSFFRKLFWVGLELIFLGPLFTNKVCPPLPGPFFFASPKFRPFFFGFLNFGNRGEMEFWGLPPPFVLLWPPGGKFTVPPFFFFVPPRMPVFSPPPGKGFFC

SEQ ID NO: 312707 - protein, 120 aa, Zea mays
  Clone ID: MRT4577_4824C.1.pep
MTAAVRSSTAAAAAAATTTTAAATLAPPLRSCNAFQLISSMSPGSTGLSRTNRAVFTARAPAATVVLAARALGWEGQGMEQGRGHKRTYVAGDYVDVRPGLAEIVWAWQGDSPAAVVGTA

SEQ ID NO: 312708 - protein, 42 aa, Zea mays
  Clone ID: MRT4577_48250C.1.pep
FFPKVPPLIPPNIKPRPSYQKISTTPQSTCNFLTLKKSPKNK

SEQ ID NO: 312709 - protein, 70 aa, Zea mays
  unsure (1)..(70): unsure at all Xaa locations
  Clone ID: MRT4577_48251C.1.pep
MDPRVXGLKTPRWAGLINWLTFPNGNKAAGGXNRNYVRDARRMAATPADVKELGGAYAFVVDMPGLSTGD

SEQ ID NO: 312710 - protein, 96 aa, Zea mays
  Clone ID: MRT4577_48252C.1.pep
FIRAFLCFVRSPPCFFSSSRSSVFCCSPFRLASLVGASFPFSVWVAPSSCILFRRAAAPGSLSWGVWARCRLFSPFRAVACSRPHARVVSPPGFSG

SEQ ID NO: 312711 - protein, 68 aa, Zea mays
  Clone ID: MRT4577_48253C.1.pep
GAYRVEAAHITSVALTDLFELPMPRLPPDLFESSPITPRGELLNIGSCIYSVTAALKSRFHAHCSTRL

SEQ ID NO: 312712 - protein, 68 aa, Zea mays
  Clone ID: MRT4577_48254C.1.pep
EALKRQPFFSLFVYFIFFFFFFFFFFFFFFFFFFFFLQRTHHMHSYRHRILHITTKISYEFVPHKYFI

SEQ ID NO: 312713 - protein, 431 aa, Zea mays
  Clone ID: MRT4577_48255C.1.pep
MAGRESGGMAAALRCAGRIGILATVAVNLAWIATYIRRRYFGGGNRSDNNGGGGEVEPSRGKPPVTSDSIVNLDHGDPTMYEEFWRGTGDSASIFIPGWQTMSYFSDLGGICWFLEPGFEREVRRLHRLVGNAVVDGYHVLVGTGSTQLFQAVLYALSPASDGTPMNVVSPAPYYSSYPSVTNYLNSALYRWAGDANTFDGDTCIELVCSPNNPDGGLRKPVIKSKSSKPVYDFAYYWPQYTPITEAAAHDIMLFTVSKCTGHAGTRLGWALVKDTKVAQKMIKFIELNTIGVSKDSQLRAAKIIGAICNGYEPVPSSGKTSQLFHFAKEKMAARWARLRAAVAASDIFTLPYELSGYCSFSNETVTANPPFAWLRYNKDDIEDLEAFLLEKKIITRGGTRFGVDARAVRVSMVDTDQAFNVFINRLATMK

SEQ ID NO: 312714 - protein, 291 aa, Zea mays
  unsure (1)..(291): unsure at all Xaa locations
  Clone ID: MRT4577_48256C.1.pep
ERALELFTRMESTRLMPNKITFNTVLNACSHGGLVEEGXSYFQRMSRFYGIEXYIAHYGCMVDLFCRAGMFXKAEXIIQTMPMEPDASMLKALLGACRTHKNLELGKKVGHRLIEAAANDHAGYVLLSNIYALDGNWGGVHKVRKLMLDRGVLKTPGSSSVELNGVIHEFISGDKSHSRKRDIYKMLGEICQQLKSSGYTPDTSQVLLDIDDEDVKESSLALHSEKLAIAFGLISTAPGTPIRVVNNLRICGDCHNAIKLISKIYGRCIIVRDANRFHHFRKGSCSCGDYW

SEQ ID NO: 312715 - protein, 1293 aa, Zea mays
  Clone ID: MRT4577_48257C.1.pep
MYPANRHMDPYYSHYRNHVPYPYYPPARWEIPSGHPQAMDSSYYYRPPNCGTWPYHDISHPSEFHCCCNRAYLPDYYSFRPPFPQELPPPHLYYHVPSPHHPNACPSYFVPSHPYPFDQTPYGYEKFKSHCCGCPTHVCPGAEKNNVKIEEQRPDVKLESGEHKNADSDSIIQHPNKKYPFIWLPSGNMKGKENGEHYELSPQVLNEWAPVSGKWLGDVKQQGQDNEKGKQFQWPIVWMPAGYDAPNQKAKDMNDTEETPKSPKISEVSPQSPKIIPLSWFGNGHHHDQKSAARNGSGDHNNGSAVKNQPVVTDHQDSMILEGNPKITPAVPKSIHVGKKPPRENCKTIPVVPEKEINEKKASTYRAIPVIKESDEKKIGMREKRESKEANSAEMVEENRKTKHNDSSVVKHSKLPPVCLRVDPLPRKKPGNGSSRSPSPPRKDTDNTKKDVDEAQSQILEPKQSSTSKDITVSEVKEKSPYEMKKEVGFRNETVEAASVEHLQEEEAPTSKDGQKVQAASTTVGDQENAALNSIEEDHVQENAGAGSLNGCDKRKNEDGTVIESETAKDDARTYGVNLSESDAAVRIQSAYRGYDVRKWQPLDKLWKIKHVHEQMQVVRKQIQCLLDSCSKPTQKEQVAIGETIMNLLLKLDAIQGLHPSVREARKSVARELICLQEKLDTLCKAASGDLNHTDSNDDESEGTKNIIQTEAPTVITEASDRKRTIELGKVQEPCSVDSMEPCNTVPSGVSWEVRPDVDASEEKNEKQESCSTTVDEAHEQVASSMDMISDEAFTADNQEHGIGESNVTSVEQVTEEEKPASEDEVKEPPLVNSTALLYDTTSSGDSSGLKQYTASTDQNLYAESNTGSSPASTEDIDISTLAVESEVAAENDGPINSQVHETVALENVEMKDDVSSAENEHNRSSSPVIHLEDPLVSLKDVEQHGPTPTKDFVVPNTEDQQEARDISLQVQAVDSMKDCGEVPDGTIEASTNDDELELGTSADVEKNDQPTLLEPRSESVSVPELSVLDESDDKMQCGVSGKDEEAHVEEKTVTIAVDKVTGGSANFEDPLCEASRKEPDIEKSHPSLGEEEDDTIGGTVFPGSGSCELSCPQDGGIAVYEGPEMVSPESQTDARKENIHSDVAETDECTKTQKAALAGTEGENSAEDSGVPVSEMDKCNEMPKDAPTLTAAGANPAEDEASLKDLSVQTENKASSASPAPDDPKASDEKTLAEENQKLKELLQKLLASGNDQMGVITDLSEKVKVLERRLARKKRPKVRVHKPSRHASCVH

SEQ ID NO: 312716 - protein, 172 aa, Zea mays
  Clone ID: MRT4577_48258C.1.pep
MEPCNTVPSGVSWEVRPDVDASEEKNEKQESCSTTVDEAHEQGKTEGQIEIQVASSMDMISDEAFTADNQEHGIGESNVTSVEQVTEEEKPASEDEVKEPPLVNSTALLYDTTSSGDSSGLKQYTASTDQNLYAESNTGSSPASTDDIDISTLAVESEVAAENDGPINSQVH

SEQ ID NO: 312717 - protein, 310 aa, Zea mays
  Clone ID: MRT4577_48259C.1.pep
MAGGFFSMAHPAVTLSGIAGNIISFLVFLAPVATFLQVYRKKSTGGFSSVPYVVALFSSVLWIFYALVKTNSRPLLTINAFGCGVEAAYIVLYLAYAPRRARLRTLAYFFLLDVAAFALVVAVTLFAVREPHRVKFLGSVCLAFSMAVFVAPLSIIVKVVKTKSVEFLPISLSFCLTLSAVAWFCYGLFTKDPFVMYPNVGGFFFSCVQMGLYFWYRKPRPAAKNNAVLPTTTDGGNAVQVQGQVIELAPNTVAILSVSPIPIVGVHKIEVVEQQHKEAAVAAETRRMAAANPDGAMPEVIEIVPAAAAV

SEQ ID NO: 312718 - protein, 180 aa, Zea mays
  Clone ID: MRT4577_4825C.1.pep
KPPLPGATSKRAPTRPLSLPLGSSFSRGPRALFSPFSLGGGFFPISSICPGGAPPSPPSRERRGPGGNPKFLGPFLPGNPGGGGTFLGAPQGEGFFFFFLLGYGGQVSLGVGFVPPHQKTFPLFFLFPPSFHKELQPKGGLPCGFKKKKKKKKKKKKKKKKKKKKKKKKKKKKKKKKKGP

SEQ ID NO: 312719 - protein, 98 aa, Zea mays
  Clone ID: MRT4577_48260C.1.pep
MEHDCRVERGACLSWRLAASFKVTLLSKVPLMLMCLGALEYCSFTGESSDQKLDITWSNRECKVLDNSLMLTLSMYRTYGSCVQSGLEYLCGKIDMQM

SEQ ID NO: 312720 - protein, 246 aa, Zea mays
  Clone ID: MRT4577_48261C.1.pep
RGGPGRAIVVDKVTGGSANCEDPLCEASRKEPDIEKSHPSLGEEEDDTIGGTVFPGSGSCELSCPQDGGIAVYEGPEMVSPESQTDARKENIHSDVAETDECTKTQKAALAGTEGENSAEDSGVPVSEMDKCNEMPKDAPTLTAAGANPAEDEASLKDLSVQTENKASSASPAPDDPKASDEKTLAEENQKLKELLQKLLASGNDQMGVITDLSEKVKVLERRLARKKRPKVRVHRSSRHATAKVQ

SEQ ID NO: 312721 - protein, 90 aa, Zea mays
  Clone ID: MRT4577_48262C.1.pep
IGYLEAGRALLLPIADLADPATAEKDWARRALYTGPPFNNLDEDLQILLEKYLEERGINTRLALFIPDYIDHKEQKEYVRWLNNIKNFVA

SEQ ID NO: 312722 - protein, 98 aa, Zea mays
  unsure (1)..(98): unsure at all Xaa locations
  Clone ID: MRT4577_48263C.1.pep
MHNEKWKTVDLYEPRTCWDTYYILTANDYAYGHINICHXAAIGLKDGRLTSLALXALDSAQGNADSSLNMLLQNKTAALHQKIVHLVYQALDTALAMF

SEQ ID NO: 312723 - protein, 88 aa, Zea mays
  Clone ID: MRT4577_48264C.1.pep
RNIWIVIHYHPYMGWMAIWAELVGWQAFFSFPFLFSFSPFSLPLFFLVLPPSCCHFIPLYDNKASACLVLSSPRRPEGGGTPHLALTL

SEQ ID NO: 312724 - protein, 79 aa, Zea mays
  Clone ID: MRT4577_48265C.1.pep
VWPQYQDLRHRSPFAPRQGKNAKRNGWLGKRSAPNPYTRLKMLIAGEQYRNVRRSFSGRGFWFFLFTRPPMMDKGPRLG

SEQ ID NO: 312725 - protein, 63 aa, Zea mays
  unsure (1)..(63): unsure at all Xaa locations
  Clone ID: MRT4577_48266C.1.pep
RKKKGGKKSLGRILEGVSKWVGILIAIILPPVGGFFKEGGGPEFWICFFFPFLGXIPGIIFPI

SEQ ID NO: 312726 - protein, 65 aa, Zea mays
  unsure (1)..(65): unsure at all Xaa locations
  Clone ID: MRT4577_48267C.1.pep
FREATGVNGGSQRFREGLLKYLDNPSLIHAQSILAIWAYHFILIRALXGYAISFYPHPRALLPIY

SEQ ID NO: 312727 - protein, 134 aa, Zea mays
  unsure (1)..(134): unsure at all Xaa locations
  Clone ID: MRT4577_48268C.1.pep
MVEPSVKSSEHGGGGIDLLFLPPGFRFHPTDEEVITSYLLQKLLNPSFAPHAIGEVDLNKCEPWDLPSMAKMGEEDSKEWYFFCRKGXKYPAGTRANRATKEGFWKASGSVRVIFFKPAAGHDSLRRRVPLVVL

SEQ ID NO: 312728 - protein, 21 aa, Zea mays
  Clone ID: MRT4577_48269C.1.pep
KLASYTICRASMGSRSGDMMS

SEQ ID NO: 312729 - protein, 53 aa, Zea mays
  Clone ID: MRT4577_4826C.1.pep
VIGLKSGLVGGFPGGVSRFWVGGGLKICMDSGCRWLRHAFLLVFVKGGRVNET

SEQ ID NO: 312730 - protein, 196 aa, Zea mays
  unsure (1)..(196): unsure at all Xaa locations
  Clone ID: MRT4577_48270C.1.pep
MMARRTDENKKAGPLIEHEANSHGNGKAQQNTRHVRRRSLYLLKTDHLDQDIVDTSVHPRHAENMKDLHDIMAQHPXKLMTTSAAEGQSRNMIIMLVLCKKSMEICCYTGYSFLDMVVVLWDECASLLMHIKRQNYQIGLSCIYNGYATNKIHCPRGXPRLPILYDLVRGYEQGRSYDFAFMGASXDYYLIYLERL

SEQ ID NO: 312731 - protein, 51 aa, Zea mays
  Clone ID: MRT4577_48271C.1.pep
QSRKFNNPHRLVLWHSVWTLHTGGNTIGYIQGGRYGNRPLFKLLLGGHSRF

SEQ ID NO: 312732 - protein, 188 aa, Zea mays
  unsure (1)..(188): unsure at all Xaa locations
  Clone ID: MRT4577_48272C.1.pep
HIKSSIRTVPPQASTRSSSLPSRGATDGEKRLEALALGRVAEAADAVASAACAGEVVRAIHAVASLLFPVDSEAVAGTVEEPFRSQIVDAVTVTLSNEERESWRHAFYHGPAFPTMSKILLGNVALKWLPKINVSARQEIYDSFFVKGPPTEVIQALVPALSEKDXSKEDPPDFCLNLERLLILWLLD

SEQ ID NO: 312733 - protein, 58 aa, Zea mays
  Clone ID: MRT4577_48273C.1.pep
GERAPWFFFLKKMVYVKKKLNPPNFKIWNPCDGTILPDKVNLVCSTFGTRCKMFVLHF

SEQ ID NO: 312734 - protein, 112 aa, Zea mays
  unsure (1)..(112): unsure at all Xaa locations
  Clone ID: MRT4577_48274C.1.pep
MGERFSCSKRYFFASNFNLTHVCETLAXAMCSSNTKNRASGHXCLVTGEIIHGIPHLRLCDFNXDRLNXNLRILNQPYRRLLCTSGVRDNFIRAFLFYEQKIGNSVFIIQNS

SEQ ID NO: 312735 - protein, 187 aa, Zea mays
  Clone ID: MRT4577_48275C.1.pep
MLAASLLALRFLLVGATAAGMGTGTVGVSGGGQLWCVAKNNAEDGALQSAIDWACSVDGGRADCAAIQQGGACYDPPDLQQHASYAFNDYFLRSGGAGSPAACDFSGAAALTALNPSHGSCVFPSSASPKNGSFTGTTTYGPTGADFSSSFSWKLNFWPLLLHISTSVTFCAALMCCSFFLNCVLRV

SEQ ID NO: 312736 - protein, 49 aa, Zea mays
  Clone ID: MRT4577_48276C.1.pep
LKCVLFFGPFFFFYERACPRVFFFLLALVRLNRFICLYGLYGIGCRFFA

SEQ ID NO: 312737 - protein, 250 aa, Zea mays
  Clone ID: MRT4577_48277C.1.pep
MALVVKRYRCTHSVSCACLKGHVREDAMYLVFKHMNWNPKMIAILSSVCKWFDEFAKRVLWKEFCHARAPKMMKDLHSDGSHIVDGNWKALGKLLIYCAGCPSGDLFSNIHDPVPGHFVYRTRFSRTLGKSLLAPQCRSDALYVSESCEHLDQGEEGDLGLFRGIFKSFAASKMKKMLIERQANFHLNKMCPYCKTKLWDLMQPNMIPSSAAVRLGAEDGSVEYYVCLNGHILGSCTLIPISDSEGTKEE

SEQ ID NO: 312738 - protein, 65 aa, Zea mays
  Clone ID: MRT4577_48278C.1.pep
GLCLRKGQGLKLKCAGCKVLKWELVRGLSWARPNPEWPTCHPPRVPRGLVAFRAKQDPCPLLVRR

SEQ ID NO: 312739 - protein, 123 aa, Zea mays
  Clone ID: MRT4577_48279C.1.pep
YHLMELECPILWVSGDNSDLVKVDPHDRTTTSEPEAPMQSLNQLSMVTDLADTRSADHEDRFRPDKIRAGRRLWPSMELDAARRAGDQGTATSMAEQITTVRRLRERQSARVGMGERAQGMKT

SEQ ID NO: 312740 - protein, 137 aa, Zea mays
  Clone ID: MRT4577_4827C.1.pep
MTLGSSGAGSSVVVPRNFRLLEELERGEKGIGDGTVSYGMDDADDIYMRSWTGTIIGPHNLFCDKDYPEKPPSVRFHSRINMTCVNHETGMVDPRKFGLLANWQRDYTMENILTQLKKEMAASQNRKLVQPPEGTFF

SEQ ID NO: 312741 - protein, 143 aa, Zea mays
  Clone ID: MRT4577_48280C.1.pep
MLAASLLALRFLLVGATAAGMGTGTVGVSGGGQLWCVAKNNAEDGALQSAIDWACSVDGGRADCAAIQQGGACYDPPDLQQHASYAFNDYFLRSGGAGSPAACDFSGAAALTALNPMHLRKMVASQERQPMVQPVQTSAAVFH

SEQ ID NO: 312742 - protein, 839 aa, Zea mays
  unsure (1)..(839): unsure at all Xaa locations
  Clone ID: MRT4577_48281C.1.pep
MDVYGYRNMGIMRSVMYSQRCTYAQVKSYTNLENVCVVDDSQITERIPTENSTHFYDEKFSVSPGNRSSNLSPVPPVGCSSPLWLGAHVTVDAQLLEVRGQVDGLAADIRTMHERLDSTVTSTTERFNQLDLAQTATCTTLDTILARLDALTTKMEQDYGGDTDVFSKVLNLLRTISRSYKKCHRCRGFGHVIRDCPNKRTLLIREDGEYSSVSDSEEIEHALLATDHAAQAEEYADVFPKDLPPGLPPLCGIEHQIDLIPGAQLPNRAPYRTNPDDTKEIQRQLFANMEKCIFCTRRVSFLGYVVTPQGIEVDSSKIAAIREWPTPTTVTQIRSFLGLAGFYHRFVRDFSSIAAPLHELTKKDVSFAWSDSQEAAFNTLKDKLTQAPLLQLPDFNKVFELECDASGIGLDAVLLQEGKPVAYFSEKLSSASLKYSTYDKELYALVRTLHTWQHYLWHREFIIHSDHEALKHIHTQTNLNRRHAKWVEFIESFPYIIKHKNEKDNVIADALSRRYTMLSQLDFKIFGLHTVKDQYVDDADFKDAFGHCIXETMGKFHIQDGFMFRANKLCVPASXFVFCCYRKRMEAVSWGTLASTRHMRVVLDKNLKRWEDCLPHVEFAYNHATHSSTKMCPFQIVYGYIPRAPIALFSLDAVDAPHIDVVAHVEQMINLHEQTQQNIAAANAKYQITSSKGRKLVTFEPGDMVWLHLRKDRFPTLRRSKLMPRVAGPFKILTKINANAYILDLPAEFGVSTSFNVADLKPYVGEDEELSSRTTLVQEGEDDEDINTNTSTSTPAAPSPAQAPSSPVQTPPLPPGPVTRARARELNYIMLLKNEGPEV

SEQ ID NO: 312743 - protein, 151 aa, Zea mays
  Clone ID: MRT4577_48282C.1.pep
MLAASLLALRFLLVGATAAGMGTGTVGVSGGGQLWCVAKNNAEDGALQSAIDWACSVDGGRADCAAIQQGGACYDPPDLQQHASYAFNDYFLRSGGAGSPAACDFSGAAALTALNPSHGSCVFPSRLVIAPNLIFVLTFPVSSFLCISEKW

SEQ ID NO: 312744 - protein, 237 aa, Zea mays
  unsure (1)..(237): unsure at all Xaa locations
  Clone ID: MRT4577_48283C.1.pep
VQSTCLGWFRVISLPHVTHSENGCRGAYKHEFLPQEQFLRFSQRTCQIQYIRSKSYXGVVLRNFVAARHPFRKRVSGVHTKHEFSPPEPFLRFRNEHAQPTTLGPKLMFGVVSRNFIAARHPFRKRVLGCIQSMSFCHRNHFFVFLNEHAQSTTLGPKLILGWFRAISLPHVTHSENGCRGAYKHEFLQPEPFLRFSQRTCPFHYFRSKTHVWGGFAEFRCRTSPISKMGVGGAYKA

SEQ ID NO: 312745 - protein, 109 aa, Zea mays
  Clone ID: MRT4577_48284C.1.pep
CLLFGDIDVTSNDRDMHVSLAFSDFETVLVQRALRSRERFIDVVNSDYTHWLRYAIGGKRHPTIISDGNRVRVVIDNTCNDVRKLEYTQYSEYPSWVWKSQDDLFLNGA

SEQ ID NO: 312746 - protein, 93 aa, Zea mays
  Clone ID: MRT4577_48285C.1.pep
KKTQCNQQQMTREHKNSTMQIIERKCEAQKGAGIRSNLNFYVVLWTVGEKTLDKLTDQPGNLIPLDIIEVPDLSVSGDNLDLVEDDPAIRLRR

SEQ ID NO: 312747 - protein, 59 aa, Zea mays
  Clone ID: MRT4577_48286C.1.pep
VGVLGFFFFFFFFFFFNKLRVAWSRKSIEPTDYHEGQKNNPHKSPNQPQIKFKRTDGTN

SEQ ID NO: 312748 - protein, 66 aa, Zea mays
  Clone ID: MRT4577_48287C.1.pep
DDGDRRGRARRVVRHPPNDLFSKIKFKIPPFNGKYDPAAYLDWELKVEQKISCHDIAAHSQVTRKT

SEQ ID NO: 312749 - protein, 157 aa, Zea mays
  Clone ID: MRT4577_48288C.1.pep
VQNSCLGWFRAISLSHVTHSENGCQVHTKHEFLPPEPFLRFSQRTCPIHYFRSKTHVWGGFAQFRCRTSPIPKTSVMVHTKHEFLPPEPFLRFSQRTCPIHYFRSKTDADINTNTSTSTPAAPSPAQAPPLPPGPVTRARARELNYIMLLKNEGPEE

SEQ ID NO: 312750 - protein, 289 aa, Zea mays
  Clone ID: MRT4577_48289C.1.pep
VQNSCLGGFAQFRCRTSPIPKTGVGVHTKHEFLPPKPILCFSQRTCPIHYFRSKTHVWGGFALYRCRTSPIPKTCVGVHTKHEFLPPEQFLRFSQRTCPIHYFRSKTHVWGGFVQFHCRTSPIPKTGVGVHTKHEFLPPELFLHFLQRTCPIHYFRYKTHVWGGFTQFRCHTSPIPKSGVGVQTKHEFLPPEPFLRFSQRTCPIHYFRSKTHVWGCFAQFRCRTSPILKMGVGVHTKHEFLPPEPFLRFSQRTLMRTSTPTRAHLHQQHLLQPRHHLPQSRRHPFHLGQ

SEQ ID NO: 312751 - protein, 75 aa, Zea mays
  unsure (1)..(75): unsure at all Xaa locations
  Clone ID: MRT4577_4828C.1.pep
AWLGEXADPQYSDRLLRPYKRPVEVYMDQQDSRWFISKDAIVSGLGLLGIKQGGPETTLSKPRRKRVVRKKAASG

SEQ ID NO: 312752 - protein, 86 aa, Zea mays
  Clone ID: MRT4577_48290C.1.pep
FNSLARARVTGPGGRGGAWAGEGAAGVDVLVLVLMSASSTSYGRHDLVERDTLATRALVLQAIEELARTSRTSTELPDLNVGFKIK

SEQ ID NO: 312753 - protein, 126 aa, Zea mays
  Clone ID: MRT4577_48291C.1.pep
KHEFLPPKPFLRFSQRTCPIHYFRSKTHVWGGFAQFRCRTSPIPKTGVGVHKSTSFCHRNHFFVFRNEHAQSTTLGPKLMLGVVSHNFVVARHPFRKRVSGAYKVRVFATGTISSFFSTNMPNPLL

SEQ ID NO: 312754 - protein, 131 aa, Zea mays
  Clone ID: MRT4577_48292C.1.pep
MYASIIFYALVALNGVMASPVQGPEVEPRAIERRVPSMGDIPFPKFPARNKNSNKMGKGSSDCSGSGTNTQVNACSAGSPYCCSSDGNGGQTCSNTTACTETIICCNNNNGFQICIGDLDFNVPITINVYE

SEQ ID NO: 312755 - protein, 85 aa, Zea mays
  Clone ID: MRT4577_48293C.1.pep
CTLLTWALVLVLNHRPTSFLDKHWEINEGTLAGIYLRGPDMCQPLHVSRGSNDIVHQSSITLYSLNPSMITGTVPALTRTTAASC

SEQ ID NO: 312756 - protein, 39 aa, Zea mays
  Clone ID: MRT4577_48294C.1.pep
KGLKKNFITKERGNPTIGELRDQQGTTPLKAGLNSKTRP

SEQ ID NO: 312757 - protein, 72 aa, Zea mays
  Clone ID: MRT4577_48295C.1.pep
HTPQTQSIGPQDLSITPNLTIERRIQRSQPTSHFLPIAPSIIHHLTHHTARPPIQQQTNTEVYKICGVRQCT

SEQ ID NO: 312758 - protein, 104 aa, Zea mays
  unsure (1)..(104): unsure at all Xaa locations
  Clone ID: MRT4577_48296C.1.pep
MATKIFSLLMLLALSTCGANATILPTRYKLPIASLLPPYLPSIIASVWENPALQPYRPQQAIAASNIPLSPLLYXQSPXALSLEQDXVPTIRGATSLQQLRANL

SEQ ID NO: 312759 - protein, 180 aa, Zea mays
  Clone ID: MRT4577_48297C.1.pep
YGWDKEAGEVIDALVAAADGSGARMFRAAGIAGIHGSGKTALAQKVFVHDKAKDNFALRLWVCVGPPDSEDRFNLLYRMLDNLGLDTDKVEEVVDKSSVVRDARGRTEAELRKAAARPAEQKKAEGSVVVTEAGAGDASRQAKDEELLKEKVENSRAVEKSKIGRCSRSTTTIHGNAMAT

SEQ ID NO: 312760 - protein, 76 aa, Zea mays
  Clone ID: MRT4577_48298C.1.pep
SDPDSDSDRSSGESSGANSARCLEPAEATLPEQSPERSAWEALKQPNLEQRRPRTSTTNRQASTSARVRAAADRSG

SEQ ID NO: 312761 - protein, 284 aa, Zea mays
  Clone ID: MRT4577_48299C.1.pep
MGRRKRETDDSHGRVKPLVELEGSEDPDQIQMGDLEIVCGGDSDPLMQETEHLDPMRIVGDELDEGQVRSAYLVACHWDWSRNSMPYSVYKMDVATSFPSRVKRKRLHRVTRLATVAGGMTFTSLRSVHRAWIIGVGGDPGDTVIFDTKTKKVIHGPTLNSTKWCPVLTTVGDKIYALCKTPCWFTDPDFPPWFELDSSSQEARIVSKGGTFKPENISDREPFIPGGSRGNIVGCEAGDCSPQPLGAGLQDFLFIPWVQSICFRPSRISHTYTFILEICSLRTL

SEQ ID NO: 312762 - protein, 76 aa, Zea mays
  Clone ID: MRT4577_4829C.1.pep
GRPGNYWESARSRYREGPIQGTHPNLAILTFPRMPRTHLVQSFLPPNPFTRLTTTNLRTPTPPFSDLPMATAGECL

SEQ ID NO: 312763 - protein, 98 aa, Zea mays
  Clone ID: MRT4577_482C.1.pep
LDWFGRGRDNFRLFEQPLVPVVNAKDGKWLISKSLFPVGKPGGHGAIWKLAYDRSVLQWLQNCGRKGATVRQVSNVVAATDLTMMALAGIGLRCNKKL

SEQ ID NO: 312764 - protein, 434 aa, Zea mays
  Clone ID: MRT4577_48300C.1.pep
MGRRKRETDDSHGRVKPLVELEGSEDPDQIQMGDLEIVCGGDSDPLMQETEHLDPMRIVGDELDEGQVRSAYLVACHWDWSRNSMPYSVYKMDVATSFPSRVKRKRLHRVTRLATVAGGMTFTSLRSVHRAWIIGVGGDPGDTVIFDTKTKKVIHGPTLNSTKWCPVLTTVGDKIYALCKTPCWFTDPDFPPWFEVLDLSRAKVVTVDDRSHLEGCSWIELPHPPCFPWKITPFGYTMLPVVLITSYVVVDTYILVSFNQLWGTYAFDTNSVEWHKVDTKELPFVGRATPHGSLFLGLSEGNGSINAYCISVTTTDNDRAPNLSITMLPLKYMDNEVDAGPCFFSLEDGCFCSFSFSLDKCSWTLHPKKLELFPKEAHLNLRTYQTENLSSLEVPEETLLAVKPEIAVHSHWEQAFKISCSSHGFNQSASVLLV

SEQ ID NO: 312765 - protein, 296 aa, Zea mays
  Clone ID: MRT4577_48301C.1.pep
MRKAGVTSASSGGGEGWPCGGGLNLGVKLNVLLLLLVVATNLVSLYHLSLRAATVPPVLLQQQRDGDKDLVLIRQLEAIRAGVSQLNHLRSSSPPPPLPPAELVLYSRLAPVASACSAHPELLHRYMSYTPYALCPDDALSIAEPLLLRGCHPLPRRRCFSPTASASASKLLPTDPFSPLPDAAVRWPKEAKCKSFSCLPPSLGFDVARTEAARFLRARGPLDLTAPQLLRLASLSRAGPIRLGLDIGGGTGTLAARLKKLVNATVLTTTMNLGAPYSEAAAARGVVPLHVPSVKQ

SEQ ID NO: 312766 - protein, 255 aa, Zea mays
  Clone ID: MRT4577_48302C.1.pep
TCCYCCWWWPPIWCPCTTSPSAASASKLLPTDPFSPLPDAAVRWPKEAKCKSFSCLPPSLGFDVARTEAARFLRARGPLDLTAPQLLRLASLSRAGPIRLGLDIGGGTGTLAARLKKLVNATVLTTTMNLGAPYSEAAAARGVVPLHVPLQQRFPVGDGTMDVVRAGHAVNRWIPEVALEFLWYDADRVLRPGGLLWVDHFWCRRSDLEGVYAAMLRRLGYKTIKWVAADKSVAIGGNSSKDEVYLTALLQKSFS

SEQ ID NO: 312767 - protein, 193 aa, Zea mays
  Clone ID: MRT4577_48303C.1.pep
PRVRLETMTANGFEIDVVTYGTLINGLCKAGRTQVALKLLRGMRIKGIRPTPKAYNPVIQSLFRRNNLRDALSLFREMTEVGEPPDALTYKIVFRGLCRGGGPIKEAFDFLVEMVNKGFMPEFSSFRMLAEGLLNLGMDDYLISAIELIIEKAKFRESDVFAIRGYLKIRKYYDALATFGRLLEINNPQWTYR

SEQ ID NO: 312768 - protein, 76 aa, Zea mays
  Clone ID: MRT4577_48304C.1.pep
EGGPPPLSAERKKKLGPARVFTVAQFIKDSQPNKLSLPYNIFITLACILLVSLLLYPFFFFFFFFFGRVRDPDSGT

SEQ ID NO: 312769 - protein, 88 aa, Zea mays
  unsure (1)..(88): unsure at all Xaa locations
  Clone ID: MRT4577_48305C.1.pep
SKIYLLKVIKEVDLVIGISFLAMALMNSFIKGILDKVSCKPSKVRGXLKDPPLPFCEIKSSVRVVLSGEVANPPVFQGIKAVTKFPLF

SEQ ID NO: 312770 - protein, 80 aa, Zea mays
  unsure (1)..(80): unsure at all Xaa locations
  Clone ID: MRT4577_48306C.1.pep
LRVPMELLLQLRCASHALFLETVAAVLCMVDNIMFQLXDSMLFAHRLLYPDSALTKXENERMHLMTLLKVTQTLXWQRAL

SEQ ID NO: 312771 - protein, 99 aa, Zea mays
  Clone ID: MRT4577_48307C.1.pep
PNPYHRRARPQEFREEHSHRDPATSPTLRPQRSPLVNRGCTMGVERRELGAMSVRRLLNHSSEPSTARNLKLAMERGSQLHDYRRASNRGTRCSAGGKL

SEQ ID NO: 312772 - protein, 141 aa, Zea mays
  Clone ID: MRT4577_48308C.1.pep
GEGHKKKGGGGEVFSPRGGPPLFFFFSHPQKRGGGGALFKKNPPPFLKRGGGKKKKREEKRGGFLFFFGGKKKIPPPFFVGVAGGGVTKKKIFWGVTKQREKSLFLTPPLSLSNMDGGRDRRTTLLSNGGGSSGGHGVKKG

SEQ ID NO: 312773 - protein, 209 aa, Zea mays
  unsure (1)..(209): unsure at all Xaa locations
  Clone ID: MRT4577_48309C.1.pep
QAALARSPLFILALRLFLSPPTSAATTHHCFNSSLLRFSLPQHLLPAFFAHSLRRFSGLTPTLLSFNLLLKCICSSGSKEQXLYLPIALQILHDVIPAWNLTPDKFTYSTIVSALADAGRVDDALALVHEMVVDGILAAEAFNPVLKAMLRTGDVNEAAKLFRFMQLKGCTLTESTYNVLLHGLLLCGRARDAAGMMRRMESEGMPPGL

SEQ ID NO: 312774 - protein, 156 aa, Zea mays
  Clone ID: MRT4577_4830C.1.pep
MTLGSSGAPSLALTILGSSVVVPRNFRLLEELERGEKGIGDGTVSYGMDDADDIYMRSWTGTIIGPHNTVHEGRIYQLKLFCDKDYPEKPPSVRFHSRINMTCVNHETGMVDPRKFGLLANWQRDYTMENILTQLKKEMAASQNRKLVQPPEGTFF

SEQ ID NO: 312775 - protein, 58 aa, Zea mays
  Clone ID: MRT4577_48310C.1.pep
KPFMCGAHPGQSVRQPRYEGLLVAVRRFTTQYSKCLEKLADQSRAVPGLGTDIKVLLA

SEQ ID NO: 312776 - protein, 73 aa, Zea mays
  Clone ID: MRT4577_48311C.1.pep
ASLLSMQIVRSTREVLEHKSMSVTLEMSDMSSRHYIFDPLMYEGCLLKGYPSRAALHDRPDRGGVVCHLIISQ

SEQ ID NO: 312777 - protein, 87 aa, Zea mays
  Clone ID: MRT4577_48312C.1.pep
TGLCYRHIFSVSLCPRSWVPARGMTSATAIVAWHGLVLRTSLPLPNPTGRATTSVSLSARPDTPTRLMIDPSSPMPRTPGRSPVMLI

SEQ ID NO: 312778 - protein, 127 aa, Zea mays
  Clone ID: MRT4577_48313C.1.pep
LLRAIGFLEAGRAVLAPAGTAQGNIHTHFHQHLDNCRDNHQINDDKRLAATGGDFLGAYATDRVSRQVPHQSVGRTKPPHKKKSSSCISRQTRQRLQRTCELSTHSPCRLPTELLVKGGTYAHHRQS

SEQ ID NO: 312779 - protein, 142 aa, Zea mays
  Clone ID: MRT4577_48314C.1.pep
HIWAASVRIGYGILCAAARCCWLPRERDNNHPPGPANRHRVSRRAGGVGGVCPSDPLDRHLPACMQMENRPSSANIIDHHLLTLYNACIASYACVIETDLDGAGYVAHDTTNRAKMHGVRRRAIGWARRLSRCGRCGPKSRT

SEQ ID NO: 312780 - protein, 40 aa, Zea mays
  Clone ID: MRT4577_48315C.1.pep
RMDGRVGVFEILLLNRCNNSTSDYEIIIASTIIINYNSIY

SEQ ID NO: 312781 - protein, 107 aa, Zea mays
  Clone ID: MRT4577_48316C.1.pep
NFNRLMRPWRKKIPAEQGVYNGQPVGMKEREKKLFSAPRGEQKRLAPGAIAGAVLFGQDAILPCLVGALAPLLNGGRPEPGGGGKAHAWGTTGGRGLGGHNYPFSAT

SEQ ID NO: 312782 - protein, 44 aa, Zea mays
  Clone ID: MRT4577_48317C.1.pep
SNQMRPNTYILIHLRLSTTNAFPCTTAPLFMSSCSSTSLYNSPT

SEQ ID NO: 312783 - protein, 60 aa, Zea mays
  Clone ID: MRT4577_48318C.1.pep
TPPIRAKPGHASVAHRLRDITFPGVARASTQSRADLAHPRDSAPSPTFPQLHRHASRSRR

SEQ ID NO: 312784 - protein, 27 aa, Zea mays
  Clone ID: MRT4577_48319C.1.pep
ILAKLFMLIKHISVYRLCRAMYSRYVN

SEQ ID NO: 312785 - protein, 100 aa, Zea mays
  Clone ID: MRT4577_4831C.1.pep
MAGNGAIEESDPMNWGAEAAELAGSHLDEVKRMVAHARQPVEKIEGSTLRVGQVAAVVFGKDSSGVIVKLDQEDRPRVKVRSERILDCIDHGGHIYGVTT

SEQ ID NO: 312786 - protein, 99 aa, Zea mays
  Clone ID: MRT4577_48320C.1.pep
NLQSYTCTVTWKLQVISFSSQARHFSEQLVAASENGTARPEIRLNQHEHPWSAIQRGKVELISTEGTHWLLAPQTFLHDNIDRRVRPTKAVAASIARRE

SEQ ID NO: 312787 - protein, 179 aa, Zea mays
  unsure (1)..(179): unsure at all Xaa locations
  Clone ID: MRT4577_48322C.1.pep
MMMRPPNMMGGAGFPGGGMGPGMGQMGGAPMXHPHHPHPHQHMGPGGNGMQMQPGGGGGGGGGGAVHGMPAGAMPGHAAGFYQGGGGAAGGGMPSGPEMLQAAGNPMAMAAQQQYMAMMQQQQMMNGHGAGGYPAMGYGYGRPAMQYPPPPPYYYHPMPQRHPHDNMFSDENPNSCTVM

SEQ ID NO: 312788 - protein, 110 aa, Zea mays
  Clone ID: MRT4577_48323C.1.pep
MPGPAAGFYQGGGGAAGGGMPSGPEMLQAAGNPMAMAAQQQQYMAMMQQQQMMNGHGAGGAGGYPAMGYGYGRPAMQYPPPPPYYYHPMPQRHPHDNMFSDENPNSCTVM

SEQ ID NO: 312789 - protein, 178 aa, Zea mays
  Clone ID: MRT4577_48324C.1.pep
MMMRPPNMMGGAGFPGGGMGPGMGQMGGAPMGHPHHPHQHMGAGGNGMQMQPGAGGGGAVHGMPAGAMPGHAAGFYQGGGGAAGGGMPSGPEMLQAAGNPMAMAAQQQQQQYMAMMQQQQMMNGHGAGGPGGYPAMGYGYGRPAMQYPPPPYYYHPMPQRHPHDNMFSDENPNSCTVM

SEQ ID NO: 312790 - protein, 89 aa, Zea mays
  Clone ID: MRT4577_48325C.1.pep
LLGFPAPPKKPIKFGNPFYKPGVTKNTGGSPMGWGPNIQRGGPIPKKTLGPRETNKRFMQICPTFFEKGGGHNLGLGNPQELGKPRTRG

SEQ ID NO: 312791 - protein, 433 aa, Zea mays
  Clone ID: MRT4577_48326C.1.pep
GGKGQQTKGGGGGGGGGKGGKDANMVLPQPTPQQMQQQMQMKGMKLPPELLMGMGGSKMPPFPTPAPAPGPPPPAAKDPKPAKFSYPEDDEFGDEGSEFDDEFDDFDDEDDFEDDGFDDDDLYGDPKMMAKPVAMPPAAGKKGGNGGKKGGGGGNEIPVQVKGNAHSGGGKKDSAAKQNQGGGKNGGGGGGSQAPQNGKGGGNGNQQGKKGGGGGGGPPAGSGAPMMGGMAMPAPRPPLPQQQQPGPGMMMRPPNMMGGAGFPGGGMGPGMGQMGGAPMGHPHHPHPHQHMGAGGNGMQMQPGGGGGGAVHGMPAGAMPGHAAGFYQGGGSAAGGGMPSGPEMLQAAGNPMAMAAHQQQQQYMAMMQQQQMMNGHGAGAGGPGGYPAMGYGYGRPAMQYPPPPPPPYYYHPMPQRHPHDNMFSDENPNSCTVM

SEQ ID NO: 312792 - protein, 131 aa, Zea mays
  Clone ID: MRT4577_48327C.1.pep
MAMAAARRALLAHLRVPAVHPAAAAAAGRTIPAARRLLSSTTEETKGSFLDKGEVADRVLSVVKNFQKVEPSKVTPTAHFQKDLGLDSLDTVEVVMAFEEEFSFEIPDNEAEKIDSIKTAVDFIASHPQAK

SEQ ID NO: 312793 - protein, 61 aa, Zea mays
  Clone ID: MRT4577_48328C.1.pep
SLPTLHVYKNSRPQVKSGNHICHACQLDKHVRFAISTCLPFPRSTNILLFPFQLVHCDVWT

SEQ ID NO: 312794 - protein, 61 aa, Zea mays
  Clone ID: MRT4577_48329C.1.pep
RIVEFYSMKMAIALVACLALSAASASAMHMLCPCTAPHDLQQPRLPFNAAILLPTPSNFFS

SEQ ID NO: 312795 - protein, 124 aa, Zea mays
  unsure (1)..(124): unsure at all Xaa locations
  Clone ID: MRT4577_4832C.1.pep
RILAEQAQTRAGGLTHARRAAALASKHGYSYYKEVMQKNKQYVPQPPTADKCQELFKQLXHTRLESVPTRYESFPKELDGVKHVWHNRKDLTGADLGLASLLGVELYAWICIGQIVCRGFTLTG

SEQ ID NO: 312796 - protein, 42 aa, Zea mays
  Clone ID: MRT4577_48330C.1.pep
ARAPGQARAIYILKQHKRRRVQHLSITITYPLHSQLAKLHWG

SEQ ID NO: 312797 - protein, 190 aa, Zea mays
  Clone ID: MRT4577_48331C.1.pep
GPRGLFFFFFCQNFINAFILEITRRAPRHIAPSLFKKTRHKNIMVNRGLEENRWISNIWSLGYFFHRPDTTGQRGRPGSPVRRRLHARGAQRAPPPAVVKQWWRRVGRSFGGRPHESARRVWCFGNPRSAAGWGHRVGRSRGRLLVDRHQIRSRRRRPSLRLGFHHQRPRSRQGFSRSGRSGKRPSSRRA

SEQ ID NO: 312798 - protein, 121 aa, Zea mays
  unsure (1)..(121): unsure at all Xaa locations
  Clone ID: MRT4577_48332C.1.pep
KGKGFPRTFTPGGRGLPKGKKTKLGKNQPFFFSQKGANPAHGRGAKTLKTPPPPGRGAPKRKPPSPXGTPPRRAARRAPNPPPPGGPGRAGSPGAKKGPPWRGWPKGWGPSKDPPGTPGGP

SEQ ID NO: 312799 - protein, 250 aa, Zea mays
  Clone ID: MRT4577_48333C.1.pep
MRRELASPLATAAAATAGASVSAAASLRGWWDDVNESPQWQDGAFFSLAAAYALVSAVALVYKLVLLDLPGLLFFSTYTLLVLFWAEIYHQARSLPTDKLRPAYIAVNAIIYVVQLCIWIYLGINDNAAVELASKIFIVAVSFVALLGFSVYGGRLFVLLRRFPIESKGRQKKLYEVGTVTAICVTCFLIRCVVVALSAFDADVSLEVLDHPVLDFFYYMFAEILPSALVLFVLRKLPPKRVSAQYHPIN

SEQ ID NO: 312800 - protein, 293 aa, Zea mays
  Clone ID: MRT4577_48334C.1.pep
MRRDLASSFATAASSSSAADALRGWWDDVNESPQWQDAAFFSLAAAYALVSAVALIQLVRIQRRVPEFGWTTQKVFHLMNFLVNGVRALVFGFHVHVFLLRAKVYKLVLLDLPGLLFFSTYTLLVLFWAEIYHQARSLPTDKLRPAYIAVNTIIYVVQVCIWIYLGINDNAVVELASKIFIVAVSFVALLGFSVYGGRLFVLLRRFPIESKGRQKKLYEVGTVTAICVTCFLIRCVVVALSAFDADVSLEVLDHPVLDFFYYMLAEILPSALVLFVLRKLPPKRVSAQYHPIN

SEQ ID NO: 312801 - protein, 293 aa, Zea mays; identical to SEQ ID NO: 312800
  Clone ID: MRT4577_48335C.1.pep

SEQ ID NO: 312802 - protein, 115 aa, Zea mays
  unsure (1)..(115): unsure at all Xaa locations
  Clone ID: MRT4577_48336C.1.pep
MVVEPLGGSLSRALPXRSNATESDEKGMNECLNEISSALLQVDVQIEMIGDMQANIKRIVNLEELAAGTNNCRIMKQDVFTELCTMXDPENPSFTPRKGKTSALMFAALQGTDKT

SEQ ID NO: 312803 - protein, 298 aa, Zea mays
  Clone ID: MRT4577_48337C.1.pep
MRRELASPLATAAAATAGASFSAAASLRGWWDDVNESPQWQDGAFFSLAAAYALVSAVALIQLVRIQRRVPEFGWTTQKVFHLMNFLVNGVRALVFGFHVHVFLLRTKVYKLVLLDLPGLLFFSTYTLLVLFWAEIYHQARSLPTDKLRPAYIAVNAIIYVVQLCIWIYLGINDNAAVELASKIFIVAVSFVALLGFSVYGGRLFVLLRRFPIESKGRQKKLYEVGTVTAICVTCFLIRCVVVALSAFDADVSLEVLDHPVLDFFYYMLAEILPSALVLFVLRKLPPKRVSAQYHPIN

SEQ ID NO: 312804 - protein, 53 aa, Zea mays
  Clone ID: MRT4577_48338C.1.pep
ERHSGGLEQYVPEKLRECCPVVSHTCTVSPPQVTAGSPKTSPRGPRRHCQGWP

SEQ ID NO: 312805 - protein, 108 aa, Zea mays
  Clone ID: MRT4577_48339C.1.pep
MSLISMMEARLPPGFRFHPRDDELVLDYLCRKLSGKGGGGGGGGAYGGIAMVDVDLNKCEPWDLPGIPSGSTLRYRVSICCRFYVAHAACTLAPINNKSPAASTGRRN

SEQ ID NO: 312806 - protein, 243 aa, Zea mays
  Clone ID: MRT4577_4833C.1.pep
MAEVVVLDKLVGGDSPAATTFRPLLLCLLTIFFFLLLRYLSAGAGPSRARLPPSPPGLPLIGHAHLIGALPHVSLRGLAARKGCEDLMVVRLGAVPTLVASSARAAQAVLRTHDQSFASRARSRVGEVLTCGYSDVVFAPYGEQWRQCKKLVTTHLLSAKKVQSYRAARHEEVGLVIDRIHGAAAGLEAVNMSEILSKFANDMLCRAVACRSFRVEGRYRIFRDLIAQAFDILRRIDLESFYP

SEQ ID NO: 312807 - protein, 84 aa, Zea mays
  unsure (1)..(84): unsure at all Xaa locations
  Clone ID: MRT4577_48340C.1.pep
IFKFAPKTKGRLFPKGFFLGKNPRGFFFPGGVPHKTGETGGGFPKKLGPYPPKKRRGKRAPPQNSFAEPGLNLLXLKKGGNKEM

SEQ ID NO: 312808 - protein, 119 aa, Zea mays
  unsure (1)..(119): unsure at all Xaa locations
  Clone ID: MRT4577_48341C.1.pep
TPTRPAGGTFDVSLLTIEEGIWEGKATAGDTHLGGXEDSDNRMVNHFVQEFKMKNKRDITGNPRALRRLMTDCETAKRTLSLTGQTMIEIDSLYEVMDLYCTITRARFDELNMDLFKKC

SEQ ID NO: 312809 - protein, 150 aa, Zea mays
  unsure (1)..(150): unsure at all Xaa locations
  Clone ID: MRT4577_48342C.1.pep
ENEGNTVESKNPIDEKYGLIHVTYLMEQIKAQLVVIVHDEDSIELAVWITTLCKKTVVPYCIDKGKARLGSTDHKKNASLLRLTTDKNEDKAEFSTILEAIKAXFNDKFHEVRTNCGGGIMASMSQVKTKAREKLIVKDAAIMMTYIVYC

SEQ ID NO: 312810 - protein, 61 aa, Zea mays
  unsure (1)..(61): unsure at all Xaa locations
  Clone ID: MRT4577_48343C.1.pep
VCALALLGRAARWRWRRRRSRCVALPSASQSSPGMVGRWXGXGDAPSCHLXWGRTGWCRPA

SEQ ID NO: 312811 - protein, 75 aa, Zea mays
  unsure (1)..(75): unsure at all Xaa locations
  Clone ID: MRT4577_48344C.1.pep
PPXGFFFFFFFFWXEKNYXYSXPSPKLSTCTIRXXPETTNQRNGDXDSELHFTLTTHSFHSPHWXKISSLPTLST

SEQ ID NO: 312812 - protein, 90 aa, Zea mays
  unsure (1)..(90): unsure at all Xaa locations
  Clone ID: MRT4577_48345C.1.pep
YFLIYVAYQQAWGGYGKIHRGVAPAVPGAGMKYSMPQNKSSLTASSLPQPXNXLSWNGGYGNANNITGNLRINQGAPSAPTTLEFDETLG

SEQ ID NO: 312813 - protein, 61 aa, Zea mays
  Clone ID: MRT4577_48346C.1.pep
CRGHGPQVTPIIFTLEVTGPLLQQLEEDRSLVAPHQRRPRERASSCFEPQDSTKKMYSWKI

SEQ ID NO: 312814 - protein, 45 aa, Zea mays
  unsure (1)..(45): unsure at all Xaa locations
  Clone ID: MRT4577_48347C.1.pep
SLQQYNIFTLLGYSLHKYTXCSHTPLSQYHYKGLDSVLQPYNEPT

SEQ ID NO: 312815 - protein, 287 aa, Zea mays
  Clone ID: MRT4577_48348C.1.pep
MHILSNFFIMSCKDGLELIPPQDVVTACIQMGWLHAAHDIIDDLESAGIPVGITGYVSLLRAYEKENKSEEVNGLLQQIQKIASTMDDVHTDSPFTINNIAKVVKYEMSFSGSSLFAALADEIKHYNPGEHLALELNNSVLFFCKAKMMEDALCTYKCMREQNIGPTSHTFCHMLCGYSSMDMLREITMLWGEIKRRHEYGELDLNRDLLDSLVLNFLKGGYFSRVMEIISYMSKHNIYCDKWKYRRAFLKLHKNLYRNLNSLHDKTEAQSKRIEDVRAFRLWASIK

SEQ ID NO: 312816 - protein, 220 aa, Zea mays
  unsure (1)..(220): unsure at all Xaa locations
  Clone ID: MRT4577_48349C.1.pep
MGVVVTTRKKKKKKKKKKKKKKKKKKKKKKKKKNCSLASPARGSPVAPVPWEPGSLGSPNAAGPRLAWPPPPSPVLLGGCSPVAPFPWFTPSFRSLSPFSRRNKGSKMAMQATRRLGFLSLQRRLLLPSQTEAPRIPTGGGGAFLHSHATSFGYKQIREEDKSKLVGNVFRRVVSSYNLMNDLMSVGLHRLXKDRFISKLNPFPAMKHLNVAGETGDVAF

SEQ ID NO: 312817 - protein, 64 aa, Zea mays
  Clone ID: MRT4577_4834C.1.pep
LTLLNGTPPHPGKKIFWKKKKKKKKKKKKKKKKKKNKKKKKKKKKKLVKKKKKKKLVPARAAAR

SEQ ID NO: 312818 - protein, 306 aa, Zea mays
  unsure (1)..(306): unsure at all Xaa locations
  Clone ID: MRT4577_48350C.1.pep
HYPALSDKHKSCICNAFVPVMKAMWPGLYGNAXXSTHVISKRRKLAVQASRFMVQMVQTQLFSTESMDQAXXXSESASGLADASNNFDISEEGLAIRIALEVASCPDKKTAAGKAYALALCKVVVLLRFRQSEQKAIKCMRGLVNHLAASVASDKELGKELAQMAARLRSLDACPDEELAQDDADAIFKKLGFDDGFKLDTNQAVPPTPAPRSVRPPAPARRRARQAPSSSDDSDEEGGEADVPATSASRVPATPSMTAAARSQRASKTAALSRMSAKPATASDDSELDGQSDVTSEEDASDEESS

SEQ ID NO: 312819 - protein, 92 aa, Zea mays
  Clone ID: MRT4577_48351C.1.pep
RTKRRDREERSEPDAPWGSREGRQRAVERENGGTRRWERWLASRELLGATQEEPNASCSGAPAMCERWLAQGLHGLEQCVGSRRDGNTALEK

SEQ ID NO: 312820 - protein, 88 aa, Zea mays
  unsure (1)..(88): unsure at all Xaa locations
  Clone ID: MRT4577_48352C.1.pep
RRWSWARGQXGGXGXXGQGGGAQAPHRXGWXAXTTHPGSFTISLAIRXXWRCCGAGGGAHLRCFIYQVYPGGGGKHLSSGNGRSADGR

SEQ ID NO: 312821 - protein, 61 aa, Zea mays
  Clone ID: MRT4577_48353C.1.pep
GSLMLQRQPRLAVQRPGGWGRPWRPPPAGSIGRSWRICGDAASVTGSVCASAAKPSRTRGR

SEQ ID NO: 312822 - protein, 54 aa, Zea mays
  Clone ID: MRT4577_48354C.1.pep
VIHKPPQTSKAIFLKNSGRTPTLNSTLKFHTKSDITRNNPAKNPSPLHKKLTAP

SEQ ID NO: 312823 - protein, 38 aa, Zea mays
  Clone ID: MRT4577_48355C.1.pep
PELVVKRPGAQTVPSRHPISTSCTRGGAAKRVVEGGCA

SEQ ID NO: 312824 - protein, 79 aa, Zea mays
  unsure (1)..(79): unsure at all Xaa locations
  Clone ID: MRT4577_48356C.1.pep
VXXHRGXFXCLRRWDRWVXLVAXVQRMXXCLXCXSXXGVXLGLKSLRVGLLNYXXSCXXXXVXGASAAMMTXMGSVLXX

SEQ ID NO: 312825 - protein, 189 aa, Zea mays
  unsure (1)..(189): unsure at all Xaa locations
  Clone ID: MRT4577_48357C.1.pep
SMAHPKANGQVEKANGMILDALKKKVFDKSEKLTGKWIRELPYVVWSLRTQPSRALHGNTPFFIVYGSEAADLIFGAPRLTFKSIAEAEATRLEEVDVLEEHLNVVIQSARYQQTLRCYHDKAVWHRSFTVGDLVLCRVLIGEGRHKLSPPWEGPFIVAKVTWLEIYXLTQMGGTHVGNSWNSEHLRKF

SEQ ID NO: 312826 - protein, 353 aa, Zea mays
  unsure (1)..(353): unsure at all Xaa locations
  Clone ID: MRT4577_48358C.1.pep
MDSDYVASLLMGMGSSAPALDFAALDAGFLETLCGGGGGLFGVSGVAAGAGCGGVSPEGSSVSDPAWARARDDDNVRKRKAPPTGSAGGKEACPGKAAEAKGPDGKRCRXRQRQPGEAEGRGXAASDASVELKAQKKGKGKTAKPAVEPPKDYVHVRARRGQATDSHSLAERVRREKISQRMKFLQDLVPGCNKVVGKALMLDEIINYVQSLQQQVEFLSMKLATVNPQLDFSNLSTLLHKDMYQPCGPSANSVFPLESDGAAFPFCDQADLFHSFGSGSAAMEDQCSLSLLDTALPHAANPQFAFQKQQRDFWEDGLQNALPTGSEQRQEEDGLLVPNFDGQLHADQTKVEF

SEQ ID NO: 312827 - protein, 75 aa, Zea mays
  Clone ID: MRT4577_48359C.1.pep
NFGFILFSYSISIKSGVVAIDLDLLELGDVVLPPHVGEKVLSTDVYVTDEIIEGGGGRWRRALEEERQKTRVPGR

SEQ ID NO: 312828 - protein, 135 aa, Zea mays
  unsure (1)..(135): unsure at all Xaa locations
  Clone ID: MRT4577_4835C.1.pep
LSFLFALRSPLLFPFSLPLRGPXLVRSLSVFSCCLSVGPGFPASCALSVLGLPSFVPPCSSLSSXAFVPRLSCVLLVFSACLWFARLLSRPSSWCSLLASLRARPSWLPLALSLSASWRASLPAWGGGWGCWRRV

SEQ ID NO: 312829 - protein, 265 aa, Zea mays
  unsure (1)..(265): unsure at all Xaa locations
  Clone ID: MRT4577_48360C.1.pep
MLFLVRRHRRLALPFSSLHAPAPAPAPTLPSSPDASSVLETLSLYANDWRRALDFFHWSASPAGANLPPTAATLARAVDILGKHFEFPLATSLLLSHHDPGDPAFLRPALRALLNRLAAANLIDDALHAFESTAASIGLCDEVSFHILVDALCDHRRVDEAHHLCFGKDPPPFPPGTKTHNLLLRGWAKARAWARLRQLWFDMDRRGVAKDLHSYSIYMDALAKSGKPWKXAFKVFKEMKQRGIRIDTXAYNTAIHAVGMAQGVD

SEQ ID NO: 312830 - protein, 141 aa, Zea mays
  Clone ID: MRT4577_48361C.1.pep
MASSSHTLLSAAVLLSVLAAAAARTNWCEPGLVIPLNPLQSCRAYLVRRTCGLGRGPFVPLPVLKQRCCTELEEIVPYCRCGALRVMMDGMPGGGVDRPPCSWGGQLELAPTLVSEAECNLVTIHGRPFCYALGAEGTTTD

SEQ ID NO: 312831 - protein, 83 aa, Zea mays
  Clone ID: MRT4577_48362C.1.pep
NKLGLSTTQCFRTGQHARIAGAPHGGSRDKGMHPGLMMRHYQSSLDLVFSRCHPCSFFNSSKKDYSSQQSYRFRLGRPSRSRT

SEQ ID NO: 312832 - protein, 62 aa, Zea mays
  Clone ID: MRT4577_48363C.1.pep
LYVTRHSIPGLPLNCLWLSLSFNMKLLKKKKKIKSLLCLHAKYLGKYAIKHSKEFKIARIKN

SEQ ID NO: 312833 - protein, 130 aa, Zea mays
  unsure (1)..(130): unsure at all Xaa locations
  Clone ID: MRT4577_48364C.1.pep
PGRPTTSDHASAHASAHASASVGEKRIHYTTHGKPAPGPGHGGIGPGAAGAGGGGGQNGFGGXSCNPGHLAASPPALMAGPDPSASCGSNLKAQQGCFCHFVKNPTYGRYINSPNARKVVASCGVSVPRC

SEQ ID NO: 312834 - protein, 86 aa, Zea mays
  unsure (1)..(86): unsure at all Xaa locations
  Clone ID: MRT4577_48365C.1.pep
PPPPAPPPRLPLPPPPSAGPHPXGWGPPPGPPLTXLPARPXDGVPXSSPPHRPNLGMVPPPPPFKNRVFLFTPRVKFFWRAPPPFK

SEQ ID NO: 312835 - protein, 124 aa, Zea mays
  unsure (1)..(124): unsure at all Xaa locations
  Clone ID: MRT4577_48366C.1.pep
IRYLYRNSPQMDLELSYRFMDWFSHHLSNFGFTWKWAEWVDDAQLPNAHPSKWFLKGALDKEVRLSFAQRIQKTLPEPYLPLVGPEKEKDVPDFKFQNPETPFSKEGQEIASLLXRKGPDEGVE

SEQ ID NO: 312836 - protein, 178 aa, Zea mays
  unsure (1)..(178): unsure at all Xaa locations
  Clone ID: MRT4577_48367C.1.pep
AEEEEEEFEEEEDEGDSGMGSDELDVAELGEPITGXCRVGDQSMAVPLELYDLDGLGDVLSLHAWNDLLSDDERLRLAAFLPDMDQETFARTLVELLAGQNFHFGSPLADFLKRLKGGLCDPRVNLYRRGIRFVERRKHYYWLQSYHNSMVRRLREINDCWKGREGYSLDERLRMLFT

SEQ ID NO: 312837 - protein, 113 aa, Zea mays
  unsure (1)..(113): unsure at all Xaa locations
  Clone ID: MRT4577_48368C.1.pep
SDGTTRARGYGPTARRRKCHGNAKKPKMSFYLPIPLPTTMYKGSPAKSSSWSTPEHVAFKIPILTPXSAKYIPTLMARSHCSDKSISQAGHTKIVLDESFGYSKYFARKNYPG

SEQ ID NO: 312838 - protein, 124 aa, Zea mays
  unsure (1)..(124): unsure at all Xaa locations
  Clone ID: MRT4577_48369C.1.pep
MANSNLPRRIIKETQRLLSEPAPGISASPSEDNMRYFNVMILGPTQSPYEGGVFKLELSLPEEYPMAAPKVRFLTKIYHPNIDKLGRICLDILKDKWSPCLGIRTVLXSIQALLSAPNPDDPLS

SEQ ID NO: 312839 - protein, 107 aa, Zea mays
  Clone ID: MRT4577_4836C.1.pep
MEDAAIDDSVQSASAVTEVGSSVTAAVEEESRRPGRGAVRGEDGRPTMADKEAVDDYNGPVEAETTTVVGRDVDGPSSTIRLAAARSGYLLLGFLAGAAAAALFLSS

SEQ ID NO: 312840 - protein, 280 aa, Zea mays
  Clone ID: MRT4577_48370C.1.pep
TAFIKYFKSFWVPKLEMWIDSIRNLPLASQESCGAIEGYHLKLKVKAYDDVQLDALQRVDWLVHKLTTELHSSYWINLFADESGSFPEVKADYIASTSWQRALQIPDDAVTFDDKDPLVARVVSQKETSQTRTVWSPGSEFSLCNCSWSMQGNLCKHVLKVNMVCGARKDFQPSLSFQSFQHVLLDLWQKPLDDSFSLDLSVARVMQMQEKIKHVAELATSSGIAQVAGKLPMQWTKKRGRRVGVKPTSALLLPRSKGSLQKDLTPKNSRKRKRLSRFKG

SEQ ID NO: 312841 - protein, 180 aa, Zea mays
  Clone ID: MRT4577_48371C.1.pep
MAETAAESGGGGDSGVGACERGVAPIKAQYRTTKERFHEYLDGDKQEGACQEVPTGDPAEPGAKRIRLEDGQENGKTEVAIESRERQVPKRARGQNKSRPHVKPAHYDKDRLCPSFLQEPATPCAFGDRCRFLHDVGRYLETKPADLGPRCVLFETFGRCPFSMTCRFAGAHLGPEGQNL

SEQ ID NO: 312842 - protein, 100 aa, Zea mays
  Clone ID: MRT4577_48372C.1.pep
KPKKVPITLAIQMPVALTLSKGRKQVHTLEIFWRPPTKCLPRLEFILINRLFHTRTNVNSSKATVFVFLSLLGQVCIPCVSQGLIYVCQGLPLSSRGNMF

SEQ ID NO: 312843 - protein, 81 aa, Zea mays
  unsure (1)..(81): unsure at all Xaa locations
  Clone ID: MRT4577_48373C.1.pep
HERASFFWRSLPGTHGLLASDRACRCRVNLVXPPPNGLAGRPESFRRHGTAPLPTRKRNPGVGVVSSWVPRPWPYRAVXPP

SEQ ID NO: 312844 - protein, 140 aa, Zea mays
  Clone ID: MRT4577_48374C.1.pep
INSEENALVNDVEERSKEEHSSTDNLKGSKRRSSFSAKPEYPENGSKNSPALPSYMAATQSAKAKLRGNSSPRLSSDSAEKNGFTRRHSLPSPNNGKIISHSPRTQRPTHAGGKDGAKGDKAMLSSRDASERPLKAEWRR

SEQ ID NO: 312845 - protein, 63 aa, Zea mays
  Clone ID: MRT4577_48375C.1.pep
FARSHFAFPPVLQCVDAPRGFCGPPLLLKLSARTRLHLSWHSLSSDSCCYIYFTNLRSVCRSG

SEQ ID NO: 312846 - protein, 216 aa, Zea mays
  unsure (1)..(216): unsure at all Xaa locations
  Clone ID: MRT4577_48376C.1.pep
PVSVELLDFKLLVQIKDYNTKHRALLTGTSFHTNLNELLMLIHFLEGERCGSITDLQEEVKDINQDNQIEKLHGMLNPHLLGRFKNDVMKELPAKKEWILQRELTRXHKEYYKAILTKNYEQLARRNGGHTCLINVGMEVHTLCCHGFMIDEPDLEPANPXRFKXLLYSSGKMQLLHKMMEKLXXQXHRSLIYSQFHHMLDLLEDYLNYRKWTYER

SEQ ID NO: 312847 - protein, 83 aa, Zea mays
  unsure (1)..(83): unsure at all Xaa locations
  Clone ID: MRT4577_48377C.1.pep
KKKKKERRKEKKKKRGRKEKKKKKMKKRKEKKKKKRKRRKKRKKEEGEXKKKERGKSGGLGNKTNRENTSAIHHKRHDPKPCK

SEQ ID NO: 312848 - protein, 145 aa, Zea mays
  Clone ID: MRT4577_48378C.1.pep
MPLQDINSEENALVNDVEERSKEEHSSTDNLKGSKRRSSFSAKPEYPENGSKNSPALPSYMAATQSAKAKLRGNSSPRLSSDSAEKNGFTRRHSLPSPNNGKIISHSPRTQRPTHAGGKDGAKGDKAMLSSRDASERPLKAEWRR

SEQ ID NO: 312849 - protein, 68 aa, Zea mays
  Clone ID: MRT4577_48379C.1.pep
VHARLDARCPPRFRRLHPLKRLGASPPSCLPRRPPPPCLFPSVGLSLRERVRHPVPAPAWAACLHCSA

SEQ ID NO: 312850 - protein, 112 aa, Zea mays
  Clone ID: MRT4577_4837C.1.pep
ILPSRSTNHRMGQEQSQPDPAVGEPSPPAADPAPAQSPAPAPSSLEELAAGTRQTLNLRRRWRSARIHAVPADARPRIGVVLLDSRQHIGRPSRCWDLGSIGGSRALGQLVA

SEQ ID NO: 312851 - protein, 184 aa, Zea mays
  unsure (1)..(184): unsure at all Xaa locations
  Clone ID: MRT4577_48380C.1.pep
PPPPPPPPPPPPPPPPPPPPPGKXWFVFFFCFFFFSFGNSPYSFAPWGGGKKKTGGPPXGGGKPGRGTPEAGVPNVFFSKGPPKQRNXPXNPKPPKEPGWKKTGLGPLNLPIAGKLGPHGPPXPPGGAPGGGGPEDFRLTPQGGGGGPPPCAXPKPRGGREPKNGRAPQGAPDFGPPPRGKSPP

SEQ ID NO: 312852 - protein, 75 aa, Zea mays
  Clone ID: MRT4577_48381C.1.pep
HWMVKGWPAVMTWLELGLLTGSKSGVWAKAVAARARKAGTDRVNRILTVEMKGFFVYLVGKEKNEEKKQQNWVKE

SEQ ID NO: 312853 - protein, 107 aa, Zea mays
  Clone ID: MRT4577_48382C.1.pep
LLISDPTDAARIAKWPSRTVSSFPCHFFKKNPLHPFPPQRSEEAGAFSRTQELGTPPPLRLPPPPLPPPRRHELASSPTLQNKGVDLLAVFLVWVVYGGPITAIPAG

SEQ ID NO: 312854 - protein, 88 aa, Zea mays
  Clone ID: MRT4577_48383C.1.pep
KVGEKGNSGKKKGKEERDGLLPTKTRDQEGQEKLKNRRGPPPRKGLKNGTGLPGGGQRPRGGKTLKKNLQLWGKKRDDPPLKGGEPPQ

SEQ ID NO: 312855 - protein, 157 aa, Zea mays
  Clone ID: MRT4577_48384C.1.pep
RRCSSARPSSACTPLRCPRGRFCCCCCCWRRRTSGRGCLRRRHLGGVQLPCHERADGARCAYLDRASLAMDELGGGARHGLFQPDEKAGDWLVSVHTDTGSVQTQEEKGYCRRLPRMIFDKTKRVNDSTAMTAQCQPTCVPNSRVMAKPSSLLILKG

SEQ ID NO: 312856 - protein, 52 aa, Zea mays
  Clone ID: MRT4577_48385C.1.pep
FGNRKVVIFGGGMRSTRVLPLNRGGTKSGAEEMLSVGTSLHRKGQIFTSFPY

SEQ ID NO: 312857 - protein, 665 aa, Zea mays
  Clone ID: MRT4577_48386C.1.pep
AKSPDEFDLAHAARGPGVPFCKRSLAPIITWCHDPSWNVVEKRYRKYELLNILEFSSSRRRMSVIVKEPEGRILLLSKGADSVMFKRLAPNGRKYEEETRRHINEYSDSGLRTLVLAYRVLDEKEYKEFNEKLNAAKASVSADKDEKIEQVADSIERDLILLGATAVEDKLQQGVPECIDKLAQAGIKIWVLTGDKLETAINIGFACSLLRQDMTQIIVTLEQPDIIALEKDGDKYKISKASKKKVMSQIEDGIKQIPPSTKISTASFALIIDGKSIPYALEDDVKFKFLDLAINCASVICCRSSPKQKALVTRFVKQVTHKVTLAIGDGANDVGMLQEADIGVGISGAEGMQAVMASDVAVAQFRFLERLLLVHGHWCYRRISVMICYFFYKNVTFGVTLFLYEAFASFSGKPAYNDWFLSLYNVFFTSLPVIALGVFDQDVSARLCIQYPQLYQEGVQNILFSWCRILGWMLNGVMNAVLIFFFCITTFEDQVFRRDGQVAGLDALGVAMYTCIVWVVNCQMALSVNYFTIIQHIFIWGSIAVWYLFLIVYGSMNPRFSTTAYMVFIEQLAPALSFWLVTLFVVLATLVPYFTYAAIQIRFFPMFHNKIQWKRYLGKAEDPEVARQLSSRHRTSSQQRMVGISARRDGKAMQITRETEIEVQE

SEQ ID NO: 312858 - protein, 64 aa, Zea mays
  Clone ID: MRT4577_48387C.1.pep
TALPWALAKVKRPEPLEKIYLPPRKNPPPNKINPSGSEAYLFIPRTFFFLFRIVFGRLVTKTCP

SEQ ID NO: 312859 - protein, 39 aa, Zea mays
  Clone ID: MRT4577_48388C.1.pep
ADPSANTNVIDGLEDYGILVGPPVIHAGPMQHTRVSVRE

SEQ ID NO: 312860 - protein, 39 aa, Zea mays
  Clone ID: MRT4577_48389C.1.pep
ISGASCVSYHWQHILALRLQSAAALIFTFDRLSDQLGLH

SEQ ID NO: 312861 - protein, 223 aa, Zea mays
  Clone ID: MRT4577_4838C.1.pep
MVCMQLYSKEIESPPGASSATSILSRNLQTHGFDSKKSSEVKDLVWKFCAWRDLMARMHDESLRYVLPDQAIAALAVSLPKGPTEVFAVIAETDLSISSMYPSLSSPSPLVVAHVKELCYLLDDITTSMDSIFKSLLEKYKDPSGLCRLSVYNYNLITHLSLKQTSMFSVAPSGKKLTALPNKKVSRDLFIKKFSCKSPVYHNCRIYASDGRLLCYCDRKKLE

SEQ ID NO: 312862 - protein, 256 aa, Zea mays
  Clone ID: MRT4577_48390C.1.pep
APWCALPTQPACAHLSEHLHAVASLSHLPRSAPSLLFSPYLYPWRAASISPRPALPWPRRLGASMTAALPCLPWLCACSARNPSHGELAGHPCPSSDPLPLLSPPSQLAPALLLQPRQPPSSLHSSSLCSERRRLAARPCALLLLGAQPFLSSPSSSPLLERVPLRPPLHRALLAPSSSRTPRRCPWWPPALPASRQVSPSPWPVEFFPAVKLPARSVSLRARARRLCSSSMAPISLFASVRSSPSSHGWRLVPTR

SEQ ID NO: 312863 - protein, 45 aa, Zea mays
  Clone ID: MRT4577_48391C.1.pep
MACIGSDRKRLAVALPTETEESCPTYNMLKVSCNMFRWTKEICFY

SEQ ID NO: 312864 - protein, 73 aa, Zea mays
  Clone ID: MRT4577_48392C.1.pep
RPSQAFGRSALPHPGMLRHQSTRGGMRLIAETVLLHHSRELTLNGLTGRYLLTWLKLNHWHELMLLTLILMNL

SEQ ID NO: 312865 - protein, 66 aa, Zea mays
  Clone ID: MRT4577_48393C.1.pep
LHWHIVGEDTARNCGSSHKLATKVSRQLYAFRWMTWLLTHELQLRDSLSLWDTLGGRSLREPRLHS

SEQ ID NO: 312866 - protein, 42 aa, Zea mays
  Clone ID: MRT4577_48394C.1.pep
KYKDRNELRIDPCCHKVNWEDATVDRMRTHSMGWRSLGTTCV

SEQ ID NO: 312867 - protein, 62 aa, Zea mays
  Clone ID: MRT4577_48395C.1.pep
IKSFLEKYYPIFNLFVQDCLFASHVFYNSITVLYLRLFTFLKQILLYSLSWIYCLLGMTCSC

SEQ ID NO: 312868 - protein, 105 aa, Zea mays
  Clone ID: MRT4577_48396C.1.pep
MSTTHRRRRRLRRACAGKDATADFEDIGHSASAKELMPQYCIGKVDAATFPAKPAYVVTKDDARSSEKAATSAGAWATLLQLAAPVLLLALAFALQQNYARAKAE

SEQ ID NO: 312869 - protein, 111 aa, Zea mays
  Clone ID: MRT4577_48397C.1.pep
SKTHNSTADDLTAVVDEEACMYTMQLASSSILPMTLKNTIKLGLLEVLHKEAGGGKAALSPEEVVARMPAAPDYPTAAAAMVDRMLRLLASYYVVRCQMDDLYGRYERLYS

SEQ ID NO: 312870 - protein, 77 aa, Zea mays
  Clone ID: MRT4577_48398C.1.pep
RSIVHRCAALALFILMKIHINHGLDLALHAVDDCHRALHDADHVVHDSTQDIAHHRDLGETTHHEGINPEMIYCVSE

SEQ ID NO: 312871 - protein, 69 aa, Zea mays
  Clone ID: MRT4577_48399C.1.pep
GRIDKTILRELQFPTNYLLPQQRPRWELLRGQPVHLLHLPRHARPELPNEDGRPRPDVPLVPHTYPKPR

SEQ ID NO: 312872 - protein, 93 aa, Zea mays
  Clone ID: MRT4577_4839C.1.pep
EVTPVAFQNMSRIFKEGNPTLKFRGQGGFNKPSGGQKNFQKPTKLQRIGSRSKKENARMGLQKKNLRGKKVPPKTVVTPCGPKHQRLKKNMSI

SEQ ID NO: 312873 - protein, 89 aa, Zea mays
  Clone ID: MRT4577_483C.1.pep
FKPKTEKLSFLALDSLTSFPRSLSFETFGRFGLKTFKTILRRSKKGFRIKLGVGKITSKLALLGPFGWAKVENGDVDYLGRVGGRVGRP

SEQ ID NO: 312874 - protein, 86 aa, Zea mays
  Clone ID: MRT4577_48400C.1.pep
VNSPILLIIRVTWVGAAFLLWCHTIHSHEYLSLHHYATWVQKRSRIGCNPCGNSTGQPLLAACRFQLQRTCLHKFLMTFLERNEPT

SEQ ID NO: 312875 - protein, 160 aa, Zea mays
  unsure (1)..(160): unsure at all Xaa locations
  Clone ID: MRT4577_48401C.1.pep
MLLAGDLTADDPDDISPRSLPDTSSDGQRRRRRRSKRKRGFRSPPIQEAVSEGEQQPRVEGGGNSAAAFRVLDLKSTAETVCESSDAERSAASCVTYVGVELRQRSVSGGGRVVAASADDGTSSCGSSTRESAAAAAAVADVAPXAWRPEANGGMKKELE

SEQ ID NO: 312876 - protein, 41 aa, Zea mays
  Clone ID: MRT4577_48402C.1.pep
LQNTRSLNLVPIMNTQDILAQYMQFENSLIIISIQSSLNKP

SEQ ID NO: 312877 - protein, 69 aa, Zea mays
  unsure (1)..(69): unsure at all Xaa locations
  Clone ID: MRT4577_48403C.1.pep
FKNRSVPFPKKKRSIYTXGVLCRYFIRKVKKESSALCFYRDVVIMVVVVAAVKLNLVPMVKELNMFSSA

SEQ ID NO: 312878 - protein, 89 aa, Zea mays
  Clone ID: MRT4577_48404C.1.pep
IGYLEAGRDHLLIIPCKYSHRRLLQYVRLQDYVIHQRAWGAQFTDKDYTDPPPAPLIDATEMESWSMYRDVIDECIITMLYLEHHREHP

SEQ ID NO: 312879 - protein, 112 aa, Zea mays
  Clone ID: MRT4577_48405C.1.pep
KKKNKKKKKKKRKKKKKKKKKKKKKKKKKKKKKKKKKKKKKKKKKGFWGGVPPPRGFRLSFSNPPPENPPPGGPKTPEGFSPPPLVKGKNPGKRGGGKTPLGNPIGDQKVKN

SEQ ID NO: 312880 - protein, 127 aa, Zea mays
  unsure (1)..(127): unsure at all Xaa locations
  Clone ID: MRT4577_48406C.1.pep
DYENVDAVAPKELMANIVSIQSSLSXDVXKLVKEIXSDGSQVVAALQFEYKDPAVDSVFKPQGIRYLFGHGSRVVLRLSAXGYVGATIGVYSDQYHRDSFKPVSSXQGSLXPLVDVKLWLSKGVWDE

SEQ ID NO: 312881 - protein, 121 aa, Zea mays
  unsure (1)..(121): unsure at all Xaa locations
  Clone ID: MRT4577_48407C.1.pep
NPRMGGPKGAPKIKKLFPLTKDYYVPKXVNPSRGTFSPKNGKKVSKALKIPRLVTPLPPQRKGARIAAKKKGILKKKFGAVEYQKLFAQRLKEQRAPRSESLAKRGSKLFAPVKAFAAPPA

SEQ ID NO: 312882 - protein, 116 aa, Zea mays
  Clone ID: MRT4577_48408C.1.pep
LGTSRPAGFLYSHVLQERALFLWNSNHTEGLIKHNSKVILPVVLPALERNTKGHWNQAVQSLSLNVRKIFMDYDPALFEECREKFEEEEAQEAGMRSRCEARWKRLEEIASSKEVK

SEQ ID NO: 312883 - protein, 80 aa, Zea mays
  Clone ID: MRT4577_48409C.1.pep
WLDILDINVPVVAMFNTPEQLVFKDSFCTDSNARPFWLIFPPLLWGTVLTVCSVAVLQVLRDESYEFQWFSCVANYNQQA

SEQ ID NO: 312884 - protein, 85 aa, Zea mays
  Clone ID: MRT4577_4840C.1.pep
MMCPYLGLFFFFGHDHGSWSVYTIWSYLMKSISRTGEKKGPNHEPCKGRARPDQFKKSLMNDFIRFWLTKGFTMTLRLLPISNLP

SEQ ID NO: 312885 - protein, 235 aa, Zea mays
  unsure (1)..(235): unsure at all Xaa locations
  Clone ID: MRT4577_48410C.1.pep
GVACLVADVLASWAIPVXDXRCGVSAVGFWPAMLATYRVVAAIPELVDKGLISDYGIPISTKRLDIGEEGKVNGDHRTSDSLHVLPAQLGLSTAELPWLVGDAASQKTRFTFWLQTMERAKSFRSILVNTFPVEATAADAGTVSQQRXSGPPSRTTTVTATQRLRRRRLHYQXDDLSHDSTSKNPSMWQADETCVEWLDAQRAGSVVYVSFGSWVSSIGRDAINELALGQAATGR

SEQ ID NO: 312886 - protein, 55 aa, Zea mays
  Clone ID: MRT4577_48411C.1.pep
LKYQMGHQMVHKYSKGDLPWSLPTNWTELEWVNLYHTAPCAVNTLHGPLKYMMQY

SEQ ID NO: 312887 - protein, 56 aa, Zea mays
  Clone ID: MRT4577_48412C.1.pep
ACRRPPTMSGLLIWGPPLLPECYTAASLLTLVGLTLRPIVSPANASRKLSTWTIIC

SEQ ID NO: 312888 - protein, 97 aa, Zea mays
  unsure (1)..(97): unsure at all Xaa locations
  Clone ID: MRT4577_48413C.1.pep
IKYHPPSVVPGGDLAKVQRSVCISPNSTSVVEVFSRIAHKFDLMXPKGSFVPWYVGXGMKEGYFFEARKALAALKKGFKKVGVEFYEGEDGDKGAKY

SEQ ID NO: 312889 - protein, 48 aa, Zea mays
  Clone ID: MRT4577_48414C.1.pep
WAFELTDIVRTYHWSVIVMNQMSTKPGVGVVPALGDVWGHHPSTRIVL

SEQ ID NO: 312890 - protein, 66 aa, Zea mays
  unsure (1)..(66): unsure at all Xaa locations
  Clone ID: MRT4577_48415C.1.pep
KKKKKKKKKKKKKKKKKKKKERKXGGFCGVPILLPLKSNFISFLYGHLNKIHCPGFKTVSTGKTLA

SEQ ID NO: 312891 - protein, 92 aa, Zea mays
  unsure (1)..(92): unsure at all Xaa locations
  Clone ID: MRT4577_48416C.1.pep
RHVVRSHGGSRIEPSVSLVVVTRVGTPAAPYHLPCCISVYVQLAFGTGRYGVSNVAAMAGRLGRQLYXPTDGVGXXPGYXRXRXTQQEGLPI

SEQ ID NO: 312892 - protein, 126 aa, Zea mays
  Clone ID: MRT4577_48417C.1.pep
MNSNGVPTTTSSSLYSGILPGTKWCGGGDLATTFFDLGPEVKLDMCCRTHDLCPSKVRSYATRYNVTNNSMYTKSHCICDKTFYNCLKKAKHSTGDLMGTIYFNILRVPCVDERNGKTVFKLPPTY

SEQ ID NO: 312893 - protein, 55 aa, Zea mays
  unsure (1)..(55): unsure at all Xaa locations
  Clone ID: MRT4577_48418C.1.pep
MPGLSLYXVIXMVGEYTVVVGGYHKNVEGSEGFICYYCYCLLNQLNVSSYNMLVA

SEQ ID NO: 312894 - protein, 256 aa, Zea mays
  unsure (1)..(256): unsure at all Xaa locations
  Clone ID: MRT4577_48419C.1.pep
MDRYAPALLCLCLCLCLGALRAGSAAPTTTGTPDGSELWGYVEVRPKAHLFWWYYKSPHRTSTPSKPWPTILWLQGGPGASGVGLGNFLEVGPLDVDLKPRSSTWLQKADLIFVDNPVGVGYSYVEDDSLLVTTDWEQAADATALLKALAKEVPTLQGSPLFLVAESYGGKYAATLGVSVARAVRAGELKVTLAGVALGDSFVSPVDFTVSYVPLLLSVSRLDDNAAGEANKRTQTVKDQIAAXQFAASQGSWNDL

SEQ ID NO: 312895 - protein, 209 aa, Zea mays
  Clone ID: MRT4577_4841C.1.pep
MQTSETTGTASPPAVEPEAEDKVEEGARANEEAAAKVGGDDEDDWESEHEGRRGRRQRCRRGGAAGDSAVAMVKRELLTRCLTCPLCDHLLRQATTISECLHTFCRKCIYKKLNDEDLDHCPVCKIDLGCTPVEKLSRGRNKLLRADREPWATCAQLGGAVAEGWPGAPAAHGDRLLRGRLCDGDKLWAAQVRVLLKPYHHRRPGEVDS

SEQ ID NO: 312896 - protein, 91 aa, Zea mays
  Clone ID: MRT4577_48420C.1.pep
MRSMNRVEKMVQVGTWLRRQIERSLPEWQDQFLRYKELKRCVKARSGGCPTLPAEEAEFVAEIDAETDKINAFFLYQEEEFIIRHRELQNH

SEQ ID NO: 312897 - protein, 47 aa, Zea mays
  Clone ID: MRT4577_48421C.1.pep
KIVILLIRYLNMMDLPTFFILVMKTAEPPAALPLVTLTSNLHYLTCD

SEQ ID NO: 312898 - protein, 111 aa, Zea mays
  Clone ID: MRT4577_48422C.1.pep
MYPFETDIHMVASAWKMKRSHAHPRSPRTSMLLAGGSAHRASGGRGYEDSGFLWLAQREVLTGLSSGIADFIRTAHLLDAEYQEKYMEVVEKMRVLDRLNPLTFLAKRDRL

SEQ ID NO: 312899 - protein, 175 aa, Zea mays
  Clone ID: MRT4577_48423C.1.pep
NSARGSPHSVSRNPRLLAPNCRGSRSSPTLSMEGDRLRCTPALLPRIVVGRGGDIRNTVSGEDPVWPLGRSASLCPESRSSPTLSMEGDSVYRERIMVGRGGGIQSAASGEDLVWPLSRLASMCPGSRSSPTLCPGSRSSPTLSIEGDPVYRKQTVVGRGGGIRSMTRTPGRSHS

SEQ ID NO: 312900 - protein, 77 aa, Zea mays
  unsure (1)..(77): unsure at all Xaa locations
  Clone ID: MRT4577_48424C.1.pep
RRQAKPRKARPXDKHEPXRENGAGNAGAAKXRRNKDTRERGGXKXTERGNRXDENXGRENGNHRXXRHPNXRREKEG

SEQ ID NO: 312901 - protein, 143 aa, Zea mays
  unsure (1)..(143): unsure at all Xaa locations
  Clone ID: MRT4577_48425C.1.pep
PCEHILLGRKGGTPXLLCSXLNTGDAGEGAXLLELGNTELGELLSCYKFPRDEISIIHRSAQLCLLGNVDXRNRMQILKLMDAVDEYIPEPERHLGSLFEPQNMCSYYGRGTVVTGREEQGTVKTCQHVESKNLAHTDPLKTT

SEQ ID NO: 312902 - protein, 38 aa, Zea mays
  Clone ID: MRT4577_48426C.1.pep
FNLTTSMLLLMFTDCASYRPCRQKEVLILVDLLRHSGF

SEQ ID NO: 312903 - protein, 67 aa, Zea mays
  Clone ID: MRT4577_48427C.1.pep
QLGSSMIHSGPHGLVGSRSHHKYSDSSPAACHGRRHDIWQSRLAHGSSSALGALGLPGTRLSSRPHS

SEQ ID NO: 312904 - protein, 96 aa, Zea mays
  Clone ID: MRT4577_48428C.1.pep
LAVANLIGLSRMGHCFSLPGVTGSLKGTSDLLVASGTLWRPYQCNPCLAHRRAKSQHPDSPRVAGQGWHGDNTQTPLATSPWPVPSNPLAITCAPF

SEQ ID NO: 312905 - protein, 79 aa, Zea mays
  Clone ID: MRT4577_48429C.1.pep
PRVRIRGAYANMRIVNNLFGGRADTWTIHVLTLDNLYVYHSAMKYKSEGHDMLIIAPSEYSNGSSRDYDCKEPMLLGVK

SEQ ID NO: 312906 - protein, 486 aa, Zea mays
  Clone ID: MRT4577_4842C.1.pep
MQTSETTGTASPPAVEPEAEDKVEEGARANEEAAAKVGGDDEDDWESEHEGRRGRRQRCRRGGAAGDSAVAMVKRELLTRCLTCPLCDHLLRQATTISECLHTFCRKCIYKKLNDEDLDHCPVCKIDLGCTPVEKLRADHNIQDVRSKFFPFKRKKVNAEEAESPIMLPVKVKERSISSLVVNTPRVTPAALTGRRTRAVTRKAAALRGLGPIIVDPLKKDNDNPNKQTDNSSLLDSLNKIPQTRRQLLSNGDTTSHLSVKDKAGDNKDLDKSEFWKPLNCLVEAASKTKPLTSAPRPALKGDKPRKSPSSDSEHSSRTKTREPLQKSKAEVDKSDPGPIVMLRKRGRPGRKRKNPLPETNADSTATAIQARKALSPIWFSLIASFDQKGVPPLPQIPAHYLRIKDGSIPASSIQKYIVQKLSLLSESEVEISCCGQTVNPGQPVRNLVERWLRVGPARPLHTVIGSSGGDYVMVISYGRPKSASC

SEQ ID NO: 312907 - protein, 242 aa, Zea mays
  Clone ID: MRT4577_48430C.1.pep
MAPAATTRVCLVALVVALAFLFLLDGGVHAASAAAAQRRRQVRSLLRRLNKPAVATIKNGKCPENTVPIRRTREEDVLNIQRYGRKWPSSWSNDPNRYDDVPDAASVLRGHQHAIASAPGDDNYYGTQATFNLWEPTVERNQGFSLAQLWITSGSYANNDLNTIEAGWQVYPGLYKDSHTRLFVYWTRDAYNTTGCYNLICSGFVQTSNQIAIGASNSYFSPCLIYGGSQYDITILVWKDPK

SEQ ID NO: 312908 - protein, 259 aa, Zea mays
  Clone ID: MRT4577_48431C.1.pep
MAPAATTRVCLVALVVALAFLFLLDGGVHAASSAAAQRRRQVRSLLRRLNKPAVATIESPDGDTIDCVHISKQPAFDHPSLKNHTIQMMPSCHPQQGLLYNKSNDVAHSALTQTWHQNGKCPENTVPIRRTREEDVLNIVQRYGRKWPSSWSNDPNRYDDVPDAASVLRGHQHAIASAPGDDNYYGTQATFNLWEPTVERNQGFSLAQLWITSGSYANNDLNTIEAGWQVYPGLYKDSHTRLFVYWTRDAYTKTGCYHP

SEQ ID NO: 312909 - protein, 69 aa, Zea mays
  Clone ID: MRT4577_48432C.1.pep
LPGGKPKPWSFFFWFGLKGGHPKRTTGAPPLIQRGNGPLPGDQTQREPHSFNKKKNPATNQDGPTQFFL

SEQ ID NO: 312910 - protein, 125 aa, Zea mays
  unsure (1)..(125): unsure at all Xaa locations
  Clone ID: MRT4577_48433C.1.pep
WVYNSGFFFIRLGIPSIXLLNKGAYRXSHEPESLDKVVFIEXLFLPSHPGYGGLHACNRPMNMSLLMNIKVLFKRFCKDANLRPLDPVMVRFIDHLDKSVCMKAXISFYVAWYRYALSRLHNGSE

SEQ ID NO: 312911 - protein, 79 aa, Zea mays
  unsure (1)..(79): unsure at all Xaa locations
  Clone ID: MRT4577_48434C.1.pep
IPYFVGSELFYGTVLSSLKIFDITHHLNFILKYLSSLFLMHHSLLLRXXXKKKKKKKKKKKKKKKKKKKKFFKKKKKSG

SEQ ID NO: 312912 - protein, 38 aa, Zea mays
  unsure (1)..(38): unsure at all Xaa locations
  Clone ID: MRT4577_48435C.1.pep
PARLLQTNLFLYAVETRVYYSSALISKWXTERLSAFFL

SEQ ID NO: 312913 - protein, 47 aa, Zea mays
  Clone ID: MRT4577_48436C.1.pep
LDLEEPLYPTSRAINSKVSNDLKSQHDTSTYPKVTTMPNQSQSLNLN

SEQ ID NO: 312914 - protein, 152 aa, Zea mays
  Clone ID: MRT4577_48437C.1.pep
MGGAKWKEEEMVKTLRPSVWLTEDFPLSVDKFMSLLDILACRVCAVRWLRVLLTTKFPPGTFPVKVVCSLEQNISLMLNPSRLQSPNCIQICRRLNPNKFLANHHAGAEPPRHMAHPPLHLKAVTALNAHPGEALITVETEEMYNARSRNLL

SEQ ID NO: 312915 - protein, 188 aa, Zea mays
  Clone ID: MRT4577_48438C.1.pep
AWVSTGEVESATRYFSELNLLGRRGKKAGGLAGTYRGTLRDGTSVAVKRLGKTCCRQEEADFLSGLRLLAELRHDNVVALRGFCCSRARGECFLVYDFVPNGSLSQFLDVDADNAGGGSGRVLQWSTRISIIKGIAKGIEYLHSTRTNKPALVHQNISADKVLLDYAYRPLISGCGLHKLLVDDLAFS

SEQ ID NO: 312916 - protein, 66 aa, Zea mays
  Clone ID: MRT4577_48439C.1.pep
RAKACFSTFFTHHPSIISSIPHLSSKKPKFKHTKIISNNNTNHKKRSSPQNNPTLLTHTYNLQPFL

SEQ ID NO: 312917 - protein, 119 aa, Zea mays
  Clone ID: MRT4577_4843C.1.pep
LFNIFLFFFFNYWFFFFFCFFLLVFTVFWEKKNGAKKRGENKPKNFTPGVLLFIRVVYKKTSPRRGCFGPCGRTTISLAIEAWAPTGCPLLIRGKRFPIIGPQALFPPIIVSGGAPFNL

SEQ ID NO: 312918 - protein, 119 aa, Zea mays
  unsure (1)..(119): unsure at all Xaa locations
  Clone ID: MRT4577_48440C.1.pep
MANPRVFFDMTVSGAPAGRIVIELYANEVPKTVDNFRALCTGXKGVGKSGKPFHYKGSTFHRVHSXFMCQGSYFTLGNCTVGEFIYGXSFPTRRFCASTPAPGXLSMSNGGPNINSVQV

SEQ ID NO: 312919 - protein, 73 aa, Zea mays
  Clone ID: MRT4577_48441C.1.pep
ISARVLYRYRFKGIIHSILHYFFWQQVIFLQRPNKGGTRTQRSEKLLLKSPLNHLSQARAKSLWNWNRPARIK

SEQ ID NO: 312920 - protein, 201 aa, Zea mays
  unsure (1)..(201): unsure at all Xaa locations
  Clone ID: MRT4577_48442C.1.pep
MGLVWLVAAAVAVVLASWAFNALVYLVWRPRAITRQLRAQGVGGPGYRFFAGNLAEIKQLRADSAGAALDIGNHDFVPRVQPHFRKWIPIHGRTFLYWFGARPSLCVADVNTVKQVLSDRSGLYPKSIGNPHIARLLGKGLVLTDGDDWKRHRKVVHPAFNMDKLKMMTVTMSDCAGSLMXEWTGKMEKGGSVEIELSHQF

SEQ ID NO: 312921 - protein, 71 aa, Zea mays
  unsure (1)..(71): unsure at all Xaa locations
  Clone ID: MRT4577_48443C.1.pep
PGSGPSRIQRDHLKWVRAMRLQYPRVVFLPHXKMGVVEPIAMFYYFLLYILMLRALDRPYTLPRSCHDFGH

SEQ ID NO: 312922 - protein, 94 aa, Zea mays
  unsure (1)..(94): unsure at all Xaa locations
  Clone ID: MRT4577_48444C.1.pep
MGRMHAPGKGLSQSALPYRRSVPTWLKLTSDDVKEQIYKLAKKGLTPSQIGVILRDSHGVAQVRFVTGNKILRILKSKGLAPDLPEDLKXLIKK

SEQ ID NO: 312923 - protein, 80 aa, Zea mays
  unsure (1)..(80): unsure at all Xaa locations
  Clone ID: MRT4577_48445C.1.pep
GSLMKKTVKGCIEEKGLGVIECEVSELKVDEDGVELEYVGDVVSGYKGVVDEIEVEMGVVEEESAHASGDPGGGKDKVLX

SEQ ID NO: 312924 - protein, 95 aa, Zea mays
  unsure (1)..(95): unsure at all Xaa locations
  Clone ID: MRT4577_48446C.1.pep
WHRRWCVLSGNCISYWTYPDDETRKSPIGRINLANCTSRQIEPANREFCARRNXFELITVRPQREDDRETLVSQCRDTLCVTKNWLSADTKEERD

SEQ ID NO: 312925 - protein, 53 aa, Zea mays
  Clone ID: MRT4577_48447C.1.pep
RQWAFPGAAAAAEALPDQPGLSVSAWSMTRSEELGKGVGTEDKKKRRLPIESA

SEQ ID NO: 312926 - protein, 65 aa, Zea mays
  Clone ID: MRT4577_48448C.1.pep
MAKSKNSSQHNQSKKNHRNGIKKPKTHRYPSLKGTDPKFRRNHRHALHGTMRALKEVKEGKRESA

SEQ ID NO: 312927 - protein, 1010 aa, Zea mays
  Clone ID: MRT4577_48449C.1.pep
MGEAVTAAELLYGMPLIRSVAGDGAGAGVETAGCGALLVELKQLWGEIGKSREERERMVRELEAECMRVYRRKVDEATGERAALHQSLAAGEAEIAALAAALGSDSGPQLKVRAVARAVSFLQVNKWTMSLTERVSSATALLEELRAVKAERSRQFADVRSEIEKITAEIAGRSYGYEGSPRASEVGEHDLTIRRLNEYRARLTSFQKEKSDRLHRVLEHVTEVHSLCDVLGEDFIAIVNEVHPGLHETSDPGKPTSISDSTLATLAQVVATLAAEKAKRATMLREAVVPLVELWELMDSSEEERRSFRNVAAVLNPDKLDALPSGVLSVATIKKTEEEVERLTRLKAGRMKELVLKRRLELESICRSMHVEPDASTVPEKSIALIDSGLVNPSELMASIDEQIAKAREELQSRREIMEKINKWLLACEEEEWLEEYNTDENRFSTGRIARLNLKRAEKARLIITKIPAVIDSLMSRTLAWESERKKPFLYDGARLVAVLEEHKQARLRQEEERRRLREQKKLRTLLSEKEAMPHLKRPGSSFGRAAEPCKVNRKRVDAGRLASSGGSGTTTSSSSSGGGGASATELIRPRSSAAGAGQCGEFFKDFLEGYSCRKYSIVIVKEYLIQRIGELIPSLLFFYSIYLSSGTGRLRFAGQGAGFRSWSGAPAVHDFASATAQSWVGRDDGGGGGEADEAQGRPDEGARAQEAAGAGEHLQEHARGARCEHRAGEIHCADRLWYQFTVPALLIDSGSDGFIFSNADEILPGLVNPSELMASIDEQIAKAREELQSRKEIMEKINKWLLACEEEEWLEEYNTDENRFSTGRIARLNLKRAEKARLIITKIPAVVDSLMSRTLAWESERKKPFLYDGARLVAVLEEHKQARLRQEEERRRLREQKKLRTLLSEKEAMPHLKRPGSSFGRAAEPCKVNRKRVDAGRLASSGGSGTTSGSSSSSGGGASATELIRPRSSAAGSGQCGEFFKGVRRLSAPPFNYVAVSKGRSMSSSLALS

SEQ ID NO: 312928 - protein, 334 aa, Zea mays
  Clone ID: MRT4577_4844C.1.pep
MAGSVSNGSGKSLARWLRENGFDDDAVARMSRRCRNLHSLDAGEAPGVWDYLLTGVKMERRKLRHVVAKCPKLLTLSVDGKLAPTVQCLATLQARPGEVAQAIAKFPQILFHSVEEKLCPLLAFFQTLGVSERQLAKLLMVNPRLISYSIEAKFSQTVGFLAGLGVDREGMIGKILTKEPYIMGYSVDKRLRPTAEFLKSEVGLQGPDLQRVVMTFPDILSRDVDKILRPNLAFLQSRGFSRDQVTALVAGYPPVLIKSIKHCLEPRIKFLVEEMGRDMGEVVGYPQFFRHGLKRSLEYRHKVLKQMNSSCSLSEMLDCNHKKFAMKFGLVAAV

SEQ ID NO: 312929 - protein, 76 aa, Zea mays
  Clone ID: MRT4577_48450C.1.pep
LSREENVHMAKLAEYAQRYQEMLEVMEKGPKTVDSEELTVEERNLLSVAYKNAIGARRASCRIISSVHNKEERPRT

SEQ ID NO: 312930 - protein, 205 aa, Zea mays
  unsure (1)..(205): unsure at all Xaa locations
  Clone ID: MRT4577_48451C.1.pep
MGEAVTAAELLYGMPLIRSVAGDGAGAGVETAGCGALLVELKQLWGEIGKSREERERMVRELEAECMRVYRRKVDEATGERAALHQSLAAGEAEIAALAAALGSDSGPQLKVNKWTMSLTERVSSATALLEELRVVKAERSRQFADVRSEIEKITAEIAGRSYGYEGSPRASEVREXDLTIRRLNEYRARLTSFXKEKSDRLHRV

SEQ ID NO: 312931 - protein, 123 aa, Zea mays
  unsure (1)..(123): unsure at all Xaa locations
  Clone ID: MRT4577_48452C.1.pep
LTESYQTAYQTLIKRVILGRHSLPXLRVGGELXYFSGGPQPGGMFFAVSHGVYALCLGSRASLLNNVTVRSGALYALTFEVTRTCAHEEVLRVALALLLFVSGDVAWCTFYSVSSAYTWACVF

SEQ ID NO: 312932 - protein, 232 aa, Zea mays
  Clone ID: MRT4577_48453C.1.pep
MQLLRARSFQARYASLRLTRDAREHALMATTPVPASALPKSEAVSKGYNFASIWEQNAPLREPQKAAIAALSHAVEERPFLPNLEKNSGKDGGVAVSEKESALEEAGAMDVLVNTHQFYKWFAELESAMKSETEGKYRLYENTLQDRVNTCDSILKLVADTLNLIEELQSLHSSVATKTKTLHDAGDQLVVEKQRLIDFAEAFRGTLNYFDELENARSGKHSWRITNIFMIG

SEQ ID NO: 312933 - protein, 199 aa, Zea mays
  unsure (1)..(199): unsure at all Xaa locations
  Clone ID: MRT4577_48454C.1.pep
NRFSTGRIARLNLKRAEKARLIITKIPAVVDSLMSRTLAWESERKKPFLYDGARLVAVLEEHKQARLRQEEERRRLREQKKLRTLLSEKEAMPHLKRPGSSFGRAAEPCNVNRKRVDAGRLASSGGSGTTSGSSSSSGGGASATELIRPRSSAAGSGQCGEFFKGVRRLSAPPFNYVAVSKGRSMSSSXSSVLNSKPHK

SEQ ID NO: 312934 - protein, 40 aa, Zea mays
  Clone ID: MRT4577_48455C.1.pep
TEGAGQCGEFFKGARRLSAPPFNYVAVSKGRSMSLSLALS

SEQ ID NO: 312935 - protein, 110 aa, Zea mays
  unsure (1)..(110): unsure at all Xaa locations
  Clone ID: MRT4577_48456C.1.pep
ANWKVKPGKMYPRHDPILGPSSSLYGSVNSALVVSVASQILPSTPYLPAGFSNAXGCFXTLXQLWAFTISVGLALISVVVVLGLLCLQPILLVSPALASLVRSVVFVFFY

SEQ ID NO: 312936 - protein, 71 aa, Zea mays
  unsure (1)..(71): unsure at all Xaa locations
  Clone ID: MRT4577_48457C.1.pep
LATILXCYFLLMLRNEHILYCSRIFGAHDSSXLLDCPIRLLHLAYPSTPPFQFICRFGXSRYIMFIVYLDI

SEQ ID NO: 312937 - protein, 100 aa, Zea mays
  unsure (1)..(100): unsure at all Xaa locations
  Clone ID: MRT4577_48458C.1.pep
FARSSQVRWGPSQSKAFVINFVNELGCLILDQFLSPVCLKRCPLTFCSNSWCKRSSGIGHYVYALRSLLGFLSCTRGLCEFRLVKKKKKKKKKKKKKIXK

SEQ ID NO: 312938 - protein, 88 aa, Zea mays
  Clone ID: MRT4577_48459C.1.pep
FGAAQTEEEVERLTRLKAGRMKELVLKRRLELESICRSMHVEPDASTVPEKSIALIDSGLVNPSELMASIDEQIAKAREELQSRREIM

SEQ ID NO: 312939 - protein, 97 aa, Zea mays
  Clone ID: MRT4577_4845C.1.pep
KNRRSITVEQHIGNIFMFSKVANTILFFRLDIRMGLLYITLCIVFLMTCKPPLYMGPEYIKYFNAITIDEELERDKRVTWIVEFFANWSNALPLSML

SEQ ID NO: 312940 - protein, 609 aa, Zea mays
  unsure (1)..(609): unsure at all Xaa locations
  Clone ID: MRT4577_48460C.1.pep
MALKATAQGAAEAAVAAIGRGYDVVSDVRLKYCKGKLADPDARLIDVSRDGVQDVLLPGGIKVAAVPKSVTCDKGERTRFRSDVLSFQQMSELFNRELSKTGKIXPHGMFNSMFDFSGCWQKDAANTKSLALHGWHISLYTLALSKSRILLRDHVTQAVPSTWDPAALARFIDKFGTHIVVGVKMGGKDVIYLKQQHSSSLQPAAVQKRLKDMSDMRFLDGNGQYDMNNKHVHGKDKHDARDQRLRFVESSPSSSYCSKEDLVMVVKRRGGKEWDKDMPHSEWINTVQSEPDVISMSFLPITSLLSGVPGCGFLNHAINLYLRYKPPIEELHQFLEFQLPRQWAPVYSDHPLGPQRRKQSSASLPLSFMGPRLYVCTNMVDVGERPVTGIRLYLEGKKSNMLAIHLQHLCSLPQILQLQDDPYNHRYPEPEPYDRKYVEPFGSWKRFSHVYTAPVESDDDDSIVTGAQLHVSSHGLTKVLFLRLQFARVSNAALVKNPEWEGSPNLGQKSGLISTLISTHFSMAAQKPAPRPADVNINSAVYPGGPPTPVQAPKLLKYVDTAEMVRGPQDTPGYWVVSGAKLQLERGKISLRVKYSLLTAMVPDEEYEE

SEQ ID NO: 312941 - protein, 55 aa, Zea mays
  Clone ID: MRT4577_48461C.1.pep
VLRSHFCFQPHYTIRAPCRLLKLLRGRSTPQIWCTDRTTRPRKQEPGLLSKRGAA

SEQ ID NO: 312942 - protein, 64 aa, Zea mays
  Clone ID: MRT4577_48462C.1.pep
QWVQGQQIQLLGQCFPSLYSLHALLEHHNLHQCVCSRGIWTVCSIPSRGSTATRCWVPNETPVF

SEQ ID NO: 312943 - protein, 109 aa, Zea mays
  unsure (1)..(109): unsure at all Xaa locations
  Clone ID: MRT4577_48463C.1.pep
QADRLNTYIHTIEAELFLKKKEQITREFPLHWVVVVXVXLXLHFXAGGPHRXWLVXXFSKRARRXPVVGGAXXVPGVGGARGLAWPWRPAGSSSAPGPRAGAAPGLPWS

SEQ ID NO: 312944 - protein, 81 aa, Zea mays
  unsure (1)..(81): unsure at all Xaa locations
  Clone ID: MRT4577_48464C.1.pep
MLTLTAASSTAPRAKMNVKKLKTMARAVRTAGNGSMRXRKKIAVHKTTTTDDKTLQSTLKXIGVNTIAGIENVNICKDDVV

SEQ ID NO: 312945 - protein, 55 aa, Zea mays
  Clone ID: MRT4577_48465C.1.pep
LSLRKKSWWGRGTGPFWFKKGGSGPRFFFSAGVYNCVEKKNESRFMGGSPCQGPA

SEQ ID NO: 312946 - protein, 102 aa, Zea mays
  unsure (1)..(102): unsure at all Xaa locations
  Clone ID: MRT4577_48466C.1.pep
CLGAGDCTAESAVAVAPVAAMIPGVAVEHIRAADMAGVVRIYGLVLPRIVQNAVDPEAEPYYXLFDRYAHLARGQGWGRVGLAAGVRIGIGGDDVRQQQRSS

SEQ ID NO: 312947 - protein, 194 aa, Zea mays
  unsure (1)..(194): unsure at all Xaa locations
  Clone ID: MRT4577_48467C.1.pep
DFFFRPFLQCLGFRGGGGAIAIPRPKAAFPPNFGPPLGRSPMMMTAIACKEFGLPFAGGHGSFWGPGGDVGPINPIFGPPFVGLFSLPIFXNLLGGFPTSFPPLEFSPCPPPGNFYVRGGLAFTYFFHLGLQGEFCPLNLGGSFVLGCLGEPDWGILFWLGPILGVVLEKKKKKKKKKKKKKKKKKKRGGLVPN

SEQ ID NO: 312948 - protein, 61 aa, Zea mays
  Clone ID: MRT4577_48468C.1.pep
VDNILQDEVVGKRVRYALDGSKIIKILLDPKERNNTEYKLETLSWVYRRLCGKDMVFEYPM

SEQ ID NO: 312949 - protein, 132 aa, Zea mays
  Clone ID: MRT4577_48469C.1.pep
GPDQQQPNQTPPLTIPPGHARSRGRGGGKTRARPKHAEKKPPAAAHEGARAKNESSSSRRSRANKQHKPPPGDAIPFATTRTGVHYTATAPVGRIPNATGYSDNKHGPLWEHRWVSQVHNTPITGKNRTHKP

SEQ ID NO: 312950 - protein, 124 aa, Zea mays
  unsure (1)..(124): unsure at all Xaa locations
  Clone ID: MRT4577_4846C.1.pep
MSNPHVFFGVSVISSPADRIVIXLSSNEVPMTADNLTALCTAEKCFGKSTKSLHYKGCTFHRIITEFMCHGCNFTHSNRTSCECMYGDKFRYEKLLRKHTMPGVICMANAGANTNGCHIFICTD

SEQ ID NO: 312951 - protein, 176 aa, Zea mays
  unsure (1)..(176): unsure at all Xaa locations
  Clone ID: MRT4577_48470C.1.pep
ETKKKTFNANSSSKGKAPQHQQQKFTVEKDQCLPCKKKEYYKKDYPKFLKMVMAKKCENIIIFVNEFLYVRYSKSTXWIDSGATVHVANSLRGFRSTRTTQRSANGVQADVEAVGDLSVELADGFTLLLRDVLYVPSLQRNLISVSYLDNDGYDCHFKNSKCKIIFNNACVGLAIL

SEQ ID NO: 312952 - protein, 212 aa, Zea mays
  Clone ID: MRT4577_48471C.1.pep
MSASNSGSGDSMEWGRGRSTTRTKGKRGGGGSDKPRQPQRGLGVAQLEKIRIQSEMAEYLHHPLAQQPPHPIHRTGSFNSEELRLSHSVPSSSPSSTFHANNMGVSSSSYPIHRQTHHRLAMAYGERSAGGDDMRYGEFQTNPIVSRSPNNYYGATFGSEAHYPHPSNATLPLFKPRESICLNRPYYYDLNQTADSSSSLDDDQEVDLELKL

SEQ ID NO: 312953 - protein, 116 aa, Zea mays
  Clone ID: MRT4577_48472C.1.pep
RGLFFFFFCISIYSVVKITIMHSVLCTQTTRYFKGIKVFSIIRHVVQASKILSLPLTDPSLRVQNTELKLLSFVFMLALLEYYFRSKVYMVNPSLYRREVVVAGSGSVQWSMEVEA

SEQ ID NO: 312954 - protein, 69 aa, Zea mays
  Clone ID: MRT4577_48473C.1.pep
SLLATTSAPPDNNGHIDLLQSASHPRPRCYEGQDPRLQPVAAFHTVDTTIVLVPYPNATDVRLMIIHEM

SEQ ID NO: 312955 - protein, 90 aa, Zea mays
  Clone ID: MRT4577_48474C.1.pep
HCISIYSVVKITIMHSVLCTQTTRYFKGIKVFSIIRHVVQASKILSLPLTDPSLRVQNTELKLLSFVFMLALLEYYFRSKVYMVNPSLYC

SEQ ID NO: 312956 - protein, 57 aa, Zea mays
  Clone ID: MRT4577_48475C.1.pep
RCSWCESTQFTLSLPLTIKKYCGSTYVSTQLSHFNQSTRQINCNYCMPNEEILVTTR

SEQ ID NO: 312957 - protein, 146 aa, Zea mays
  unsure (1)..(146): unsure at all Xaa locations
  Clone ID: MRT4577_48476C.1.pep
MSRDEQALLSTDIVNRGVQPSGPDAGSPDFSVCERRRLPDFLQSVNLNYVRLGYHYLISHGVDLDTIPVIVMEGCVXMDSLIRDELCSKVRGEATYNLATVLDFLAVLAFSISDXMMSSTMPENLIDFACYKPDDEVKVVKAYFMD

SEQ ID NO: 312958 - protein, 110 aa, Zea mays
  Clone ID: MRT4577_48477C.1.pep
GRDRRQVDEMPASSCRNCISSQKGHSGHQLIRQRHSNRPHRRLRLSLRLRSKSNDDLVAPASKEFTYSRLLHHSFVRYELSFSSPEGQLRRTWFRLRASGFSDIARQFPQ

SEQ ID NO: 312959 - protein, 106 aa, Zea mays
  unsure (1)..(106): unsure at all Xaa locations
  Clone ID: MRT4577_48478C.1.pep
PSPGYTVAAPALPQEGAFAAPPRPPSPVGSPSALRLTTLSGEMSEHIFEDTLVVTRVDPYGKKFDRVGGGGAHSXQLDMYIQIDVGRGDHPMYFAEKYKKVIEGIV

SEQ ID NO: 312960 - protein, 114 aa, Zea mays
  Clone ID: MRT4577_48479C.1.pep
YAWNITIEPFNIIGSQKKNSRSRIARPFACARSAPSDLALGVARRVAGSQLVLVRHLGELEIGEGSGLALGVARREAESGCCLLGACGRRLGLSELALGVARTEADSGCWELPR

SEQ ID NO: 312961 - protein, 76 aa, Zea mays
  Clone ID: MRT4577_4847C.1.pep
ASSCWFLDQTISISSCSLCGLGPGWTLCPPTQSGLCPTILGMGPAQWQKRPPVSERKGSEEATSWQEAGPTEFRHP

SEQ ID NO: 312962 - protein, 80 aa, Zea mays
  unsure (1)..(80): unsure at all Xaa locations
  Clone ID: MRT4577_48480C.1.pep
RKGHESNHNLRVYCSHGNRGSSTSTTITRPQGEALRRPPRSWGQRRCRRRPGRPGACPAXVPMSAPAAWDILAIMGLQMP

SEQ ID NO: 312963 - protein, 198 aa, Zea mays
  unsure (1)..(198): unsure at all Xaa locations
  Clone ID: MRT4577_48481C.1.pep
LLLLHFRLCPLQVQSRLQPLAKENPHINIVPIALSDSGKSTTTGQLIYKLAGIDQRVIHRFEKEVAEMNKRPFKYAWVLNKLKXEREIGITIDIALWKFDITKYYCTAIDAPAHRDFIKKMIXTDTSHDDCDVLIIDSTTDGFEDDISXDGQTRVXSLLAFTLGVTYMICCCNKMDXTTTLYSKVRYDEIVIEASSYL

SEQ ID NO: 312964 - protein, 110 aa, Zea mays
  Clone ID: MRT4577_48482C.1.pep
LGTSRPAGIVLLDLGRGEISPRSPERAYVMANVTLASVTHVVLSIPLDFTLMLLRFAGLRLGRRRPQRPKSLNRIPRSIGTRCRRRATACGSSLGGKTPSRSGQCGGHRA

SEQ ID NO: 312965 - protein, 56 aa, Zea mays
  Clone ID: MRT4577_48483C.1.pep
LAGLSTQLRSLSGKTNLDCLRSAYLLAGLILREFISLPHPELVLELKLGNGLLLPL

SEQ ID NO: 312966 - protein, 68 aa, Zea mays
  unsure (1)..(68): unsure at all Xaa locations
  Clone ID: MRT4577_48484C.1.pep
PQNVQTQTQPFDQLNSIFTYTWSLCVCIPTVGWIDPGQNCGVRELLPPTNVCLPSXPFTFPFFLFYKS

SEQ ID NO: 312967 - protein, 461 aa, Zea mays
  Clone ID: MRT4577_48485C.1.pep
SSEPGSLSCSDDWSSHSSSAGNPDIPYVVVSKSSIVTAVCKEILGCYRKLLGIPDLLNQPNMSILKQLLQTLQPTENFDDVLSEFQPSLAPCNVDYLYCGACKMLEDIMDSVSSFSYLLSSDVLITIQSIVNSVVVLLDKSGEPNGKNIHMGCSKAIIPFLRKRLGYSAHKLLSADVPSEDAGKGWQTKGDLIQKILQIYLRNSDSTSDLLAEIGRELPKEPSLKTKDNQDVSYGFPTLCSSTITSWYRVLHEENTGSLNKTIKQALKARGSVDTILQEIQKSVDAFVSLIGMCKSHEKVSMHAMAVKHGGKFIDTFLKAFNFLERHFEQHNDTIVKMLKQLQKGTRIIQSICSDAKGNKRTIVASKVPPAKRSMERFLFQVKALLHSCSAEKEFQMGNLKHKDLQGHVVSSQAYGNVDEEDEEQTEIDSDLPADEHDNGNAMEEDAVEGSNETPMEEEEE

SEQ ID NO: 312968 - protein, 98 aa, Zea mays
  Clone ID: MRT4577_48486C.1.pep
TNPTWQHNSFASSALERLHVSMRLHRRHEARLDDNPPPAAFTLYNYDSLGAPLWPSLAPSSSPSPAASESSEMLPRQQPPAGATPTAGYSAGLWWTHM

SEQ ID NO: 312969 - protein, 123 aa, Zea mays
  Clone ID: MRT4577_48487C.1.pep
VDYLYCGACKMLGDIMDSVSSFSYLLSSDVLITIQSIVNSVVVCWTNPGNQMGKNIHMGCSKAIISFLRKRFGYSAHKRISCSVLISQAKMLEKDGRVKVILYRSYCKYTSGIVTLLKIYLLR

SEQ ID NO: 312970 - protein, 143 aa, Zea mays
  Clone ID: MRT4577_48488C.1.pep
PSSGAGAAPARPAAKPEAGAGRSDPGPFSGVPWRGGRLKALRGLGEPAGPGPGQHRAAAGGGNPAMHAPPRPGPGPRAPLPGNWFEAGHGPSGSAAAGKVQPGGGPQPRPFRLFEGNPFKAPGRQKAGQEKAEILRKDLLDPL

SEQ ID NO: 312971 - protein, 35 aa, Zea mays
  Clone ID: MRT4577_48489C.1.pep
SPNASLRIGLGETLEAASVKFLASVIPRAVKMSTT

SEQ ID NO: 312972 - protein, 82 aa, Zea mays
  Clone ID: MRT4577_4848C.1.pep
HPRQHAHESSKFFSSSFTRTHSELDDHIPVLGVNRDDARCAVAHLRLKPLHSDTLLTHSPSDKSNTLTLHKREYYFQLKAPT

SEQ ID NO: 312973 - protein, 64 aa, Zea mays
  Clone ID: MRT4577_48490C.1.pep
AFNDRLLRVPDRRLPRCHHRMLRLIDRGLGVLRGRLTGAQRHVLAFHRACLAYSAAVSPVASVT

SEQ ID NO: 312974 - protein, 76 aa, Zea mays
  unsure (1)..(76): unsure at all Xaa locations
  Clone ID: MRT4577_48491C.1.pep
VKVVVEKLGKEKKKEDELKKGVEGXXKFXXXKXKXXXFFVGEXMKDDEXVVLEYXKDGXXNXXLXYXXNGXKEIKX

SEQ ID NO: 312975 - protein, 639 aa, Zea mays
  unsure (1)..(639): unsure at all Xaa locations
  Clone ID: MRT4577_48492C.1.pep
MYIKKVVIEGFKSYKEEISTEPFSPKVNVVVGANGSGKSNFFHAIRFVLSDMFQNLRSEDRGALLHEGAGHSVVSAFVEIVFDNSDNRIPVDKEEVRLRRTIASKKDEYYLDGKHVSKTEVMNLLESAGFSRSNPYYVVQQGKIASLTLMKDSERLDLLKEIGGTRVYEDRRKESLKIMTETANKRKQIDQVVHYLEERLRELDEEKEELKKYQQLDKQRRSLEYTILDHELNDARNELASVIIXADNRRKISESMSLADNEVVDVREMIKSFDKEIKVSTKGINDTKAQKEGVEKRRTEALKVVAKIELDLRDIKDRIVNEKRAKDEAARDLQSVRRESEKSKSELAEISKVHQAKLKEEEDISKSIMDREKRLSILYQKQGRATQFANKAARDKWLQKEIEDLKPVLLSNKKQEGLLQEEIQKLKDEINDLTNYIESRKSESSKLEETLAKRHNDYNDLRKQRDVLQEERKSYWKEESEVTAELDRLQEDLIKAQKSLDQATPGDIRRGLNSVSRIIKDHGITGVFGPVLELVDCEEKFFTAVEVTAANSLFHVVVENDDISTKIIQILTREKGGRVTFIPLNRVKVPDLSCPQSPDFVPLLKKLKYRSDHRRAFEQVFGRTVICRDLETATXVARS

SEQ ID NO: 312976 - protein, 44 aa, Zea mays
  Clone ID: MRT4577_48493C.1.pep
ALMFHALRKINCRSCVLPAIHANEVPGCGLVEPAQALYRDYELG

SEQ ID NO: 312977 - protein, 120 aa, Zea mays
  Clone ID: MRT4577_48494C.1.pep
KKKTRLNFAKKKNQEGPLKAQNVKPGRLNVDQKGVPLPKKKKTPLFFVKKSNPKKHECFQTVPLKVLDLFTGGFKFLKKAPVKNQGGPVGGIGPFPPPPGKWLSSLVNPPCFLIVVPMPP

SEQ ID NO: 312978 - protein, 103 aa, Zea mays
  Clone ID: MRT4577_48495C.1.pep
PPSLPLFAGGGRSKRAEEMVHGKDQKDPALKGEPLSGSFTQFQAGPLWVVDCPNFRLIFLLFPPPPPKWAGHSSWGAPQTNQWKAPAPVTPGGIPKKNPWVFC

SEQ ID NO: 312979 - protein, 251 aa, Zea mays
  unsure (1)..(251): unsure at all Xaa locations
  Clone ID: MRT4577_48496C.1.pep
FQPPVASFRSYADVLKSGVLAGVSSQADVLKSRVLSGGMADAEGWRVVDHRRQQVRGRASGPGSWSFRGRSNWEVRGRSSGHGRGGRFHAPAASLGSNDRAVVDHSRGGQADAARNRVAVVAPGVTDKGKKRREELCCEICEDNHVPEECPVFNGPKPQAALCGFAGGESGFFQIPTWGSHAAIPRSDGVTAFITVKEGNVSADLVKSELSRLIPVKWELVGPEARRTGXLVPFPCRVELQRMIAMKYVHT

SEQ ID NO: 312980 - protein, 267 aa, Zea mays
  Clone ID: MRT4577_48497C.1.pep
RGPERRVQDLPRYDMFDSNQDGCVRCYPHVTGALRSHRDLGIDPARTARNYTMLDFRLYIREIYRLPPAGVSIPYKEANSNAAAAAPGAPAEQLQRKPRLMLINRGRTRKFVNFPEIVGAVQNAGFEVIPIEPRRDLSVEDFARTVDSCDVLMGAHGAGLTNFFFLRTNAVMLQVVPWGHMEHPSMAFYGGPAKEMRLRDVEYSIADVESTLYDKYGKDNPVVSDPESIHKQGWQLGMRYYWIEQDIRLNVTRFAPTLQKVLQMIRE

SEQ ID NO: 312981 - protein, 65 aa, Zea mays
  Clone ID: MRT4577_48498C.1.pep
TTVCHSLRWFCLCGVVTPYVYVDFDLDKLACGIPTQFVTAHHSSSLSTSISFRVRLDLDILHPNS

SEQ ID NO: 312982 - protein, 126 aa, Zea mays
  unsure (1)..(126): unsure at all Xaa locations
  Clone ID: MRT4577_48499C.1.pep
MYVSHTTSSVASDAPTTGEHRMATTIVXGLXYQGRVQCWATIPRTSTXMYVNNRSXSHEITQLSDHAYACRSGSAADTRVLTHYGPYFLHQHTIQIAXPTTARRSSNLXVRVLAYQTQNMLQACMI

SEQ ID NO: 312983 - protein, 39 aa, Zea mays
  Clone ID: MRT4577_4849C.1.pep
AQQPPSFSSRCAGLVKEQRARFYIMRRCVTMLVCWKDRS

SEQ ID NO: 312984 - protein, 65 aa, Zea mays
  Clone ID: MRT4577_484C.1.pep
FLTSLTILRGFQGLTSKPGVEHSGAKATEAYSGYRTLKHPHRTLLLMPRHRKGLLQQSILIPGHH

SEQ ID NO: 312985 - protein, 223 aa, Zea mays
  Clone ID: MRT4577_48500C.1.pep
MTRRAAATFMLMLSLPTAALMVAADDVGVDSIRLPTDGGEGLATSKGGEKQTLSLPVPDQIVAPREQNVGDVLEEEERPWACCNSTVCTKSFPPTCRCLDEVEECAPACKACEPSGFNPAFHVCNDQYHGDPGPTCAKEERPWTCCDRTVCTKSFPPTCRCLDEVEECAPACKRCEPFGINPNRHVCNDQYHGDPGPTCGKDDDDDDHPSSPSLAAATQMRLL

SEQ ID NO: 312986 - protein, 246 aa, Zea mays
  unsure (1)..(246): unsure at all Xaa locations
  Clone ID: MRT4577_48501C.1.pep
RNFSREANPSLQGAASPSRRPCCPAHIPSPSSSTLKPPSRPAAPSXPPSPREARSSLLGWPPSPSTRRPPLALPPLLPLCSDGRPAGCSPPHPPGRVPXSARRPRGCPTVXPSPAPXAWLPPLAPATXRPPLPPPYGAHPHAPASPRTPXPPAATAPPPPASATTSTSSPAAMVAVPXPSPXPPAPARTEXEVEGGAXPPDPXPPLADPPESTPSSRPXGPSPPGXPPWPGPPRRPRQREHATHVA

SEQ ID NO: 312987 - protein, 105 aa, Zea mays
  unsure (1)..(105): unsure at all Xaa locations
  Clone ID: MRT4577_48502C.1.pep
GHECSQAPIAHLMPPNLSPTVXSGCVQTPIDQPYRIQQAITTGISPLSPLVLQQPCSPMXQQLPLLHLVAQNIRAQQLQQLGLANLAEYSEQHQSIPFNQMACLE

SEQ ID NO: 312988 - protein, 96 aa, Zea mays
  unsure (1)..(96): unsure at all Xaa locations
  Clone ID: MRT4577_48503C.1.pep
CRSSQLKSWFDSLGGCCDPRKPCRDQQEQGRGRSKTQQDGIQSKRADLVKTELLAEMAAEETRRRRCSRRWRAEETRRWRCSRRWRLXRRXRSARG

SEQ ID NO: 312989 - protein, 119 aa, Zea mays
  Clone ID: MRT4577_48504C.1.pep
AKTMSMGSAELFQRRSEFIVGILQRLGTNNIMRKQEGSMSHRKMDCRHALAIPEGHFDNLIDYKRSNFNPLAKLRNGKIPSSYASDEACEFMALPSGYNQGPGSIVDQKNDLSHGGSGA

SEQ ID NO: 312990 - protein, 89 aa, Zea mays
  Clone ID: MRT4577_48505C.1.pep
LTDRLLNKAPIFTKPLKKESIPISIDDSSNDYQNDADADSDQELMDDPDLYDQPEHSNYFDLAIVKKLNYKVMIPLPDDQETKTTEYGA

SEQ ID NO: 312991 - protein, 47 aa, Zea mays
  Clone ID: MRT4577_48506C.1.pep
LETLHVAHHFKDSGEQAYKGFALADVFGASNFNDERFQDSGCVFRSY

SEQ ID NO: 312992 - protein, 38 aa, Zea mays
  Clone ID: MRT4577_48507C.1.pep
IRHEAHPTISQGQTLHDGERQNRWPPRHPPMRCRRSRV

SEQ ID NO: 312993 - protein, 81 aa, Zea mays
  unsure (1)..(81): unsure at all Xaa locations
  Clone ID: MRT4577_48508C.1.pep
MPHLHSRWTEDQDILAEEERLDIIRFRHDWDKTXMQMDEGLETPPETIKNFEXMDLEDITKDPDFTTMHELHDPSREMLIF

SEQ ID NO: 312994 - protein, 86 aa, Zea mays
  unsure (1)..(86): unsure at all Xaa locations
  Clone ID: MRT4577_48509C.1.pep
PQRVVEVFFGNKRKFGFMYPKGGFVLWQVAKEMEKGEFSQARXDLAPLEKFYEXVPPKAGIDNGVQEEEFCPASINLFGCRARFWF

SEQ ID NO: 312995 - protein, 92 aa, Zea mays
  Clone ID: MRT4577_4850C.1.pep
APVEECALAVSLGSGWKEDAVLPAPSISYLAGSLWAVVRLLRGPLVLLRRSRCAPAASGLHLGPSIGGVCRRMPACVRLAARVARAVGPAPV

SEQ ID NO: 312996 - protein, 43 aa, Zea mays
  Clone ID: MRT4577_48510C.1.pep
TVGECYPIGLIQCEIIVGPDLWHASGGACLALTPPRPICSPKY

SEQ ID NO: 312997 - protein, 70 aa, Zea mays
  Clone ID: MRT4577_48511C.1.pep
SRKKKNTAGRGQMFRQLSKCLCQYVHNRVQQLTHVTLHSISQRCFHPVSICAAACFSHRSDWVAPYKTCC

SEQ ID NO: 312998 - protein, 165 aa, Zea mays
  unsure (1)..(165): unsure at all Xaa locations
  Clone ID: MRT4577_48512C.1.pep
LSSAGSGACGRVCFXVASFVASCPCCGRPWFVXAFSGLVFPGRFPGSLSRLACSCXVXWSLSSLLXVGXSXLXXALXPGCGVLVXRXXSPPPAVASRXSPAAXVXGXPRRRRRXXVXXXWXVXAXXXLVPAPPPAXARXXGXGPCGRAAAKASXAAXVAXSXVAA

SEQ ID NO: 312999 - protein, 108 aa, Zea mays
  Clone ID: MRT4577_48513C.1.pep
QLHRDVPRAARFYSEGLDFSVNVCTLRWAELQSGPLKLALMHTNDSNLASQRVYSSMLSFTVPDINSAVSKLMALGAELDGPIKYEIHGKVAALRCIDGHMLGLYEPA

SEQ ID NO: 313000 - protein, 75 aa, Zea mays
  unsure (1)..(75): unsure at all Xaa locations
  Clone ID: MRT4577_48514C.1.pep
LRRILIKVIILGESGGGKTSLMNXYVKKKFSNQYXATIGVDFLTKEVXFDERVFSLQIWDGAGQERLMSVVSGVN

SEQ ID NO: 313001 - protein, 236 aa, Zea mays
  unsure (1)..(236): unsure at all Xaa locations
  Clone ID: MRT4577_48515C.1.pep
IKLPQAPDMHVEIQRXLSFYARGXTTGIGLDSGDGETRLRPLXQRNALPLAILLLDLAGRHLTDSLMKILTDKRYSFTTSDDKXIGRDINDNLTYIDLDYEQEXQTVINSSSVENMYKLPEVQKITMVAHIYSSTEVXLFQPXSMIGIEAAGIHETTYDAIMKCDADITKDLYANIVLIGGSTMLPEIXDRMXQRYHFTCTICMKIKAYDPPERKHHVCITLSILASLNTFQQMRI

SEQ ID NO: 313002 - protein, 376 aa, Zea mays
  Clone ID: MRT4577_48516C.1.pep
MAEEDVQPLVCDNGTGMVKAGFAGDDAPRAVFPSIVGRPRHTGVMVGMGQKDAYVGDEAQSKRGILTLKYPIEHGIVGNWDDMEKIWHHTFYNELRVAPEEHPILLTEAPLNPKANREKMTQIMFETFSCPAMYVSIQAVLSLYASGRTTGIVLDSGDGVSHTVPIYEGYTLPHAIIRLDLAGRDLTDNLMKILTERGYSFTTTAEREIVRDIKEKLAYIALDYEQELETARTSSTVEKSYELPDGQVITIGAERFRCPEVLFQPSFIGMESPGIHEATYNSIMKCDVDIRKDLYGNVVLSGGSTMFPGIGDRMSKEIAALAPSSMKVKVVAPPERKYSVWIGGSILASLSTFQQMWISKEEYDESGPGIVHMKCF

SEQ ID NO: 313003 - protein, 376 aa, Zea mays
  Clone ID: MRT4577_48517C.1.pep
MAEEDVQPLVCDNGTGMVKAGFAGDDAPRAVFPSIVGRPRHTGVMVGMGQKDAYVGDEAQSKRGILTLKYPIEHGIVGNWDDMEKIWHHTFYNELRVAPEEHPILLTEAPLNPKANREKMTQIMFETFSCPAMYVSIQAVLSLYASGRTTGIVLDSGDGVSHTVPIYEGYTLPHAIIRLDLAGRDLTDNLMKILTERGYSFTTTAEREIVRDIKEKLAYVALDYEQELETARTSSTVEKSYELPDGQVITIGAERFRCPEVLFQPSFIGMESPGIHEATYNSIMKCDVDIRKDLYGNVVLSGGSTMFPGIGDRMSKEITALAPSSMKVKVVAPPERKYSVWIGGSILASLSTFQQMWISKEEYDESGPGIVHMKCF

SEQ ID NO: 313004 - protein, 376 aa, Zea mays
  Clone ID: MRT4577_48518C.1.pep
MAEEDVQPLVCDNGTGMVKAGFAGDDAPRAVFPSIVGRPRHTGVMVGMGQKDAYVGDEAQSKRGILTLKYPIEHGIVGNWDDMEKIWHHTFYNELRVAPEEHPILLTEAPLNPKANREKMTQIMFETFNCPAMYVAIQAVLSLYASGRTTGIVLDSGDGVSHTVPIYEGYTLPHAILRLDLAGRDLTDNLMKILTERGYSFTTTAEREIVRDIKEKLAYVALDYEQELETARTSSSVEKSYELPDGQVITIGAERFRCPEVLFQPSFIGMESAGIHEATYNSIMKCDVDIRKDLYGNVVLSGGSTMFPGIGDRMSKEITALAPSSMKVKVVAPPERKYSVWIGGSILASLSTFQQMWISKEEYDESGPGIVHMKCF

SEQ ID NO: 313005 - protein, 84 aa, Zea mays
  Clone ID: MRT4577_48519C.1.pep
TSACVFTLRDAVRIRSSYRLGIALLPVPYQPHLSLYEYTDHCHHGHYAMTQCKAQPLPSTMTHCSSWNERRIRYRGRTGPTLAT

SEQ ID NO: 313006 - protein, 227 aa, Zea mays
  unsure (1)..(227): unsure at all Xaa locations
  Clone ID: MRT4577_4851C.1.pep
YPSXSARGRRAQHLCSASPRIGCCRAQIRRAPGPANPPRQLRPLDSPPSARIPRRRPRGWKVAHTDGRLRTRRTQTNTAGRLRQIVHPPQRPRMKGCATKSRGWKVHLLLLLSPNRASAAPSNPAGVQLFLGHRQWKVPISSRHYRARPVNSHISSRHSLGASTAIHGRQTIPSSRFMKVLFLRLGFSGVADMKIRRSEWGGALVAPRRSGSLSARISAALSGGLVL

SEQ ID NO: 313007 - protein, 177 aa, Zea mays
  unsure (1)..(177): unsure at all Xaa locations
  Clone ID: MRT4577_48520C.1.pep
AGKWKGIIYREKGCLEKKKKKKKKKKKKKKKKKKKKKKKKKKKKKKKKKKKKTLPEQTPRPGPRIIPQFPPSFPPMDIKHPIPPPYSPPQALAGIVFQHPFAQFQHHSLPLLTIQTIETQLKQQFVPPLTHLPPKNPFSYLHQQPLXASTPHALGNPPVSHHQLQLPQFLPALNQLA

SEQ ID NO: 313008 - protein, 61 aa, Zea mays
  Clone ID: MRT4577_48521C.1.pep
AQSGISKNKCVCARMVLCKQTITCCQTMLSQKPLSKVRHIRKARTSITGVVNTSSKLDSSY

SEQ ID NO: 313009 - protein, 42 aa, Zea mays
  unsure (1)..(42): unsure at all Xaa locations
  Clone ID: MRT4577_48522C.1.pep
FKEQYKKVIKLKERGGKXGPPTQPPHISFLFLLKKIKILKNF

SEQ ID NO: 313010 - protein, 31 aa, Zea mays
  Clone ID: MRT4577_48523C.1.pep
GIIVVLATVTARACSLVGAYGFGHAKLFRGH

SEQ ID NO: 313011 - protein, 83 aa, Zea mays
  Clone ID: MRT4577_48524C.1.pep
HTQYYAGSSGSLSYAYMTDHTSSLLPNLVRLQLTKHVLHSYFPRPLALRDLYFTSTSCHLHHQGQVPCQYLPVTNPRRTKPIP

SEQ ID NO: 313012 - protein, 98 aa, Zea mays
  Clone ID: MRT4577_48525C.1.pep
DRGAFFYQQSGKSAVQQYYIVEGSCRTHPCPQNRFFFLFIYGNLSRRLRVQSKQINRNLSNPSVQRFYRSKPTEPLFLLLYGTWPKGCAFAFDFQPPQ

SEQ ID NO: 313013 - protein, 187 aa, Zea mays
  Clone ID: MRT4577_48526C.1.pep
MADRPPPGPRAAALLPSPATGLGHAASSTDRQHSLLGRAVQTLHAHGSTQLLRFLALAVTLTALLVLASVTLTAALAALVLLSPLVLLTVPLWAPVAVLALLTGAASLVACCAGLAAVAAGTWAHRYFTGRYSVGAHRVQSADQYARGGTVADVASRVRGYYDAYAREYGGYPPRPHSRVKDAAPGA

SEQ ID NO: 313014 - protein, 204 aa, Zea mays
  unsure (1)..(204): unsure at all Xaa locations
  Clone ID: MRT4577_48527C.1.pep
MHSFTVYALGVAVAGLVVYAVLDAVAKYDKRYNVQNMPGPRLVPWIGRIHDLPIEFMWLKFKEWSDMYGPIYRTKMLGDNFVIISDEKLAEEMLVKKAKVYSDRPEIKSLFDAKSTYGSMEYLPLMGKNQYWARQRKFTHSYLTGATNVQYNGIMEFEAKRWMARLLENPDDFSASLEXMCSKVMCQLTWDDASLSTPLTPSAG

SEQ ID NO: 313015 - protein, 122 aa, Zea mays
  unsure (1)..(122): unsure at all Xaa locations
  Clone ID: MRT4577_48528C.1.pep
MSRLEDGDTCQGESGVAMTLAVDTKRAALSVCAEMLVYMTLVFNELRNTLEKHCQWRYQIXDEHVXMLGADAFSSKRVRIKTLVICGVVTXMNEXYERLVPTSVYEDYGIANLVLPTRHYLY

SEQ ID NO: 313016 - protein, 40 aa, Zea mays
  Clone ID: MRT4577_48529C.1.pep
IGLVKAQHVHEVREFTCVASKTNANHSDDPLKTTSLLFDQ

SEQ ID NO: 313017 - protein, 52 aa, Zea mays
  Clone ID: MRT4577_4852C.1.pep
PPDADSYAPTLTGAQAQRRPALRKRPSGHSLQAGLIKLHVLAQVVANHPAVA

SEQ ID NO: 313018 - protein, 111 aa, Zea mays
  Clone ID: MRT4577_48530C.1.pep
KEAPGPSYRGLAARGRGRDRRSREAARSPPAWTLVTPYCKRTRPGRGTNTKAAGFPPLSRSGRLFPPFALRLAPTHLGWGTRRHFTRRPRDPRSRNADTMLTRKHMHGISQ

SEQ ID NO: 313019 - protein, 64 aa, Zea mays
  Clone ID: MRT4577_48531C.1.pep
SWNPPPECVQLFFWPYKNKPGFFLFFSRGLSPPINSPPKWIVCQWVTPSVFGANLPKGFLCRPL

SEQ ID NO: 313020 - protein, 137 aa, Zea mays
  unsure (1)..(137): unsure at all Xaa locations
  Clone ID: MRT4577_48532C.1.pep
MEAYVLFAPAKEVIRFEEQEEDIGCPSESSAARSTSSSSSSSDGVDLADDASSSGSSCHFEMASLMTQLPIKRGLSKFFDGKSQSFASLAAVGGLEDLPKXRRSGSRRRGAAASASRTRTAVALPPRPAGSRRPGLG

SEQ ID NO: 313021 - protein, 90 aa, Zea mays
  Clone ID: MRT4577_48533C.1.pep
RRAAFIWVCRRGLSKFFDGKSQSFASLAAVGGLEDLPKPPAKRLKTSRSCGVGLEDAHRRGPPSATGRKQASRARLTPPALASAPRRLVR

SEQ ID NO: 313022 - protein, 47 aa, Zea mays
  Clone ID: MRT4577_48534C.1.pep
YETCSFLVRNVPSRYYISVMSFVNIIPANPVSLYYTRPLDLYLMNSL

SEQ ID NO: 313023 - protein, 54 aa, Zea mays
  Clone ID: MRT4577_48535C.1.pep
AGTQMMCLPTCDCLDLGSSEYSNIKFVIKSKGFLKTDQSEASRTPLNNNSMKYG

SEQ ID NO: 313024 - protein, 288 aa, Zea mays
  Clone ID: MRT4577_48536C.1.pep
MATAATASATAATRFTLLAGAGLRSRITRLPTAVRFQRQRGLTTTALLKTADLQPKEQGKPETLDYRVFLVDGGGRKVSPWHDVPLRAGDGVFHFVVEIPKESSAKMEVATDEAFTPIKQDTKKGNLRYYPYNINWNYGLLPQTWEDPTSANSEVEGAFGDNDPVDVVEIGERRANVGDVLKVKPLAALAMIDEGELDWKIVAISLDDPKASLVNDVDDVEKHFPGTLTAIRDWFRDYKIPDGKPANKFGLGNKPASKEYALKVIQETNESWEKLVKRNIPAGELSLA

SEQ ID NO: 313025 - protein, 82 aa, Zea mays
  unsure (1)..(82): unsure at all Xaa locations
  Clone ID: MRT4577_48537C.1.pep
LCKLPAPNLLLANTSWETTEGXLLATATHGFAEEVNTALPNLMSSYLRYMIMRYEGHEPNWTSRCMDFTHAQDDRCSLNGTH

SEQ ID NO: 313026 - protein, 162 aa, Zea mays
  Clone ID: MRT4577_48538C.1.pep
RLSFALDADGKFPHVRIEALELPAEHVQVAPESDRPFGEVGFLEADREFVLEALEVRVAAAVVILEPAVNYGARVHAAVPAAEVLVAELETEPRAEIVPDTGHHVEGSGIAFVHVHDHVLDVVRARMVHRVHVHFAEEVELGEVILGFGEVGFREHVARDER

SEQ ID NO: 313027 - protein, 53 aa, Zea mays
  Clone ID: MRT4577_48539C.1.pep
ELNYDCMAPNYTLFTSKAVTQESAFTWCFRSWNPDECMPFSCHQYTILMSPIT

SEQ ID NO: 313028 - protein, 96 aa, Zea mays
  Clone ID: MRT4577_4853C.1.pep
PLIRELQDEGFYVQTPGYGLLKTFPAKNKFCLFSDMAQGFQVFLSIFSQRQLKRNGGSPSNFHYSLPSDLFNPPNLHPWLLSCLFTPLSRFRDPAI

SEQ ID NO: 313029 - protein, 65 aa, Zea mays
  Clone ID: MRT4577_48540C.1.pep
TVLKSTEVIHTPTAMVACPAIFQEKLLRPCMEVDTGCCCRCTDMGSCWHSASCSTGSLPYMSPCR

SEQ ID NO: 313030 - protein, 71 aa, Zea mays
  Clone ID: MRT4577_48541C.1.pep
SMPGPSGATARCYPGPSPAGPIVSDAQLRVTACFIPCRRAGWSSCVGFEFVNVRPVRVMSGVCCRSHQICK

SEQ ID NO: 313031 - protein, 71 aa, Zea mays
  Clone ID: MRT4577_48542C.1.pep
VPPYKHETGWLLQNAKKRLNFSLTSTTWIIQVLCENVTCSWMLPASTMLSWTNRAPVQSCILSSPLTTSVS

SEQ ID NO: 313032 - protein, 38 aa, Zea mays
  Clone ID: MRT4577_48543C.1.pep
SFSSYSRDVGDGGRFKWPIARGLPFSVLRQSGMAGPCA

SEQ ID NO: 313033 - protein, 192 aa, Zea mays
  Clone ID: MRT4577_48544C.1.pep
MASAGGDTKGRKRKFLPHGKPVRKGAYPLRPGVQGFFITCDGGREHQATREAISLLDTFYEDLVDGKVFDEKPKSIPDKPLNKKIKFDDSDSSDDEDEGHPVEEANNGNDAEKGEAKSSEQQQEVPGALEIASKEDEEQVETAGGSAPKKQRIEDPLVSEQTEPKAPTDETTETTDDTPKESTDKPAETTDD

SEQ ID NO: 313034 - protein, 50 aa, Zea mays
  Clone ID: MRT4577_48545C.1.pep
LLRWPCICIIFPYDSSSCALFMSSAGSSCLALPQMLWALCWWGHLLCLLV

SEQ ID NO: 313035 - protein, 123 aa, Zea mays
  unsure (1)..(123): unsure at all Xaa locations
  Clone ID: MRT4577_48546C.1.pep
ITGVGGGFFLPVTNFISHCSRVYRPYPSFRFRFQRDGLYLQLGGLCSFYIGWARGFPFXXGXXKLRRPLSLSNPHKKKKKKKKKKKKKKKKKKKKKKKKKKKKKKKKKKRGGPPKGTQANDRG

SEQ ID NO: 313036 - protein, 130 aa, Zea mays
  Clone ID: MRT4577_48547C.1.pep
LSSLDGGRPSLFFFFGFFFISLWVFFPLSSFFQAKRTHREPPRNNFLRELEPGPNPTKGAPPNIRALLPHWISPITGGTSTRTAPWGGTQQAQKMDQWSSRGAHTRGKIPPQWFPPEGAPTWGKKNLVGG

SEQ ID NO: 313037 - protein, 59 aa, Zea mays
  Clone ID: MRT4577_48548C.1.pep
WYGSVGGDAVGLTWENPKKRGREEADEAAPEPTSILKEVGDVGKGLVRGVYLVKAPKFQ

SEQ ID NO: 313038 - protein, 57 aa, Zea mays
  Clone ID: MRT4577_48549C.1.pep
SPTRSRTPWTGPKLLKDLLWKEIRVTKRFWGVVLRPVGTQSVFKEEHTLVHRKRKGV

SEQ ID NO: 313039 - protein, 190 aa, Zea mays
  Clone ID: MRT4577_4854C.1.pep
MESTAGPRKRQKAASASGSVAPYLPQELVRNILLRLPSRSVLRFRAVCKDWLRIVSDREFAADHNRHQPAMPLVSFLRSAAGSKRGQTDCCVDAFDLSADSFRSVVRFADKGTRCSSFDIHGSCDGLLLLSFDARFYVCNPATHQWTRLPAPLRASWLAVFYRHEPTGEYRALFYRRQWPGTDYYIMVAD

SEQ ID NO: 313040 - protein, 61 aa, Zea mays
  Clone ID: MRT4577_48550C.1.pep
REGIRIKIRFTIKDDILSKSKHVNMEELKMGAPYFYILVFFVFLYFVFLFLSSLLDSLYPF

SEQ ID NO: 313041 - protein, 59 aa, Zea mays
  Clone ID: MRT4577_48551C.1.pep
MGMAADATTAMTIDFLRARLLSERSVSRAAKERADHLAKRVVELEEQLRTVTAQRRKAE

SEQ ID NO: 313042 - protein, 210 aa, Zea mays
  Clone ID: MRT4577_48552C.1.pep
MHAYILDFYYTCHPPHSDRAEGPQFDQAFPETGVSSSPPARETSEIEEVGDWDNELYERVQSHLGASTSSALFWNTPGKDYGTEENTNSNWWAHAPAYPSGPQGSFIEPPDFGNRYMTNPHSSNHSGGTSEGSTSDLEQSNSRSRSSWRSPQALSKTRYMDDSDIEEGLSLHFADVHQKDEDDRHPVRDHQDPAPSGLPVRIIPRSSDPV

SEQ ID NO: 313043 - protein, 99 aa, Zea mays
  unsure (1)..(99): unsure at all Xaa locations
  Clone ID: MRT4577_48553C.1.pep
YKPRVLTLSASATYTHTNCGCGCQPPPPVHLPPHKHLPPTVHLPPTVHFPPPVHLPPPVHLPPPVHVPPTDHLAPPPCQYPXKQPXPQAHSQPHPCPCQ

SEQ ID NO: 313044 - protein, 63 aa, Zea mays
  Clone ID: MRT4577_48554C.1.pep
AFFVFSFPVAGREILFWGPVSFYSRVCRPSGVSLVFLHHLGGLCSPFRKVLILVCAEKKKKKR

SEQ ID NO: 313045 - protein, 77 aa, Zea mays
  Clone ID: MRT4577_48556C.1.pep
LGSLTSRAKPVRYLNEPARARLSRAELTQYLALVTTYAILLPRTILESYGVISMPWLVSYPCVCCSREKSFRLSGSL

SEQ ID NO: 313046 - protein, 395 aa, Zea mays
  unsure (1)..(395): unsure at all Xaa locations
  Clone ID: MRT4577_48557C.1.pep
MERERQAVARNRKVVLRGYIDRAPREEDMELVDGGAVELRVPEGGGGPAVLVKNLYLSCDPYMRGRMRDFRNSYIPPFKPGSVXPSFPFSFFWGACPLGLFWLAAEAAGCKVGWAIRALIEQFLDLXPIEGFGVGRVVDSTHPGFSAGDVVSGMTGWEDYSLITNPEQLRKIQQSDIPLSYHLGLLGMPGFTAYVGFYEICSPKKGEFVFVSAASGAVGQIVGQLAKLHGCYVVGSAGTDQKVELLKEKFGFDAAFNYKEEPDLTAALKRHFPEGIDIYFENVGGPMLDAVLLNMRVHGRIAVCGMVSQHGVTAPAGIHNLFSLISKRIEMKGFIQSDYVHLFPQFVDDITRHYRDGKIVYVEDMSVGLESGPASFVGLFSGKNVGKQVVCVSRD

SEQ ID NO: 313047 - protein, 131 aa, Zea mays
  Clone ID: MRT4577_48558C.1.pep
PLSPPRFPASADPPPFTDPDPFRRKKSPDTGNGISADDDNDKRVLTIAELHIKMKHHFRTLQKNDTMNHTATYQRQDRTTIYEDSTDSLSKNDSRYAIYHVHLATAENVQKSRIVNILCSPSSAKEKSKML

SEQ ID NO: 313048 - protein, 79 aa, Zea mays
  Clone ID: MRT4577_4855C.1.pep
NGIFHGTPKEFSLGVGRINQPLFLIWFYLPNSGSPPNSPMEGVLNPHCCRQGGLWSKHLGFHPGFSLPCAPLGRRGRMP

SEQ ID NO: 313049 - protein, 77 aa, Zea mays
  Clone ID: MRT4577_48560C.1.pep
MTMSRKKGPPCFWTRPSPQKKKGPPPPPYEMDWARICPKKKKKKKKKKKKKKKKKKKKKKKKKKKKKKKKKKKKNPP

SEQ ID NO: 313050 - protein, 53 aa, Zea mays
  Clone ID: MRT4577_48561C.1.pep
YFFFFFLLPRGVFFKAKSHGPISYTVRQALLANAQEHSQRRSEPIHTRAISKA

SEQ ID NO: 313051 - protein, 78 aa, Zea mays
  Clone ID: MRT4577_48562C.1.pep
KGQARSRLLPTSGSAPGFTPPLCSFLDSKRQPPKNKQTRAPLLNTTARKPLVVVVVYLALLHRTGGILINTMLPIDQI

SEQ ID NO: 313052 - protein, 53 aa, Zea mays
  Clone ID: MRT4577_48563C.1.pep
KKPPPPKSPPIKSLRGFMPDSACGHHRSCYLVEFIQFGGHRWAVTFSVITHVP

SEQ ID NO: 313053 - protein, 72 aa, Zea mays
  Clone ID: MRT4577_48564C.1.pep
MATLSPPPKSGIPPRDDLDAKWLASLDLSIRRVDYSSLDEVLKDLLLFRMPTTRWASVTLVCVEWIGAGYYV

SEQ ID NO: 313054 - protein, 49 aa, Zea mays
  unsure (1)..(49): unsure at all Xaa locations
  Clone ID: MRT4577_48565C.1.pep
MGGYMFCDPDILHRNIKFTYILLDDNLXAHLANFGXARLICAFKTHVTT

SEQ ID NO: 313055 - protein, 85 aa, Zea mays
  Clone ID: MRT4577_48566C.1.pep
KGNDNILLARSEITTHSLYFTSQAAILIDLLRHTNVDRLAVECFINTKRFRQIKKNNNLSYPLRPIIIACCVPHIKHLGRLGSRG

SEQ ID NO: 313056 - protein, 74 aa, Zea mays
  Clone ID: MRT4577_48567C.1.pep
EKLPIKPGPQGYYIDSTEAPPSLSMDDAGHVVTVDRIWSLSSSGDPLLASCPQIKDLCLSFALFKLQLRRFIGC

SEQ ID NO: 313057 - protein, 130 aa, Zea mays
  Clone ID: MRT4577_48568C.1.pep
ACSRSGSWPDARGSLLYGLKPGHKKICVRLIHVWAASRTNPAFPRHPRQVTTPDLYWMKTFSSSAREGATGRRARRASGGCGDCGRDGVKDTRCFTPASISSDGHFLVGNLYPPCLLYRVRVLDLVLALL

SEQ ID NO: 313058 - protein, 212 aa, Zea mays
  unsure (1)..(212): unsure at all Xaa locations
  Clone ID: MRT4577_48569C.1.pep
MARIKPKQLLIQSKTKKAPSRISYSTIITWNLIVILVVLSLYATYSHWHQSXNKXAIYISAQHSSIDEFNLRSTQDFEMELHEAELAVRPEDPKMISRPRYAVMNTAKGPITIEIYKDASADVVDRFINLCKSNHFKGMPFRHIIKNFVIQGGDFDFDGASQEWITKAKASGKNDLSPKHEAFMIXTXKNPNTKXFDLXITTAPIPDLNDKL

SEQ ID NO: 313059 - protein, 38 aa, Zea mays
  Clone ID: MRT4577_4856C.1.pep
FLGDVIWTAWAHSQKPIIIWQSLVHRSMGRGGDESSQR

SEQ ID NO: 313060 - protein, 233 aa, Zea mays
  Clone ID: MRT4577_48570C.1.pep
MARIKPKQLLIQSKTKKAPSRISYSTIITWNLIVILVVLSLYATYSHWHQRSTQDFEMELHEAELAVRPEDPKMISRPRYAVMNTAKGPITIEIYKDASADVVDRFINLCKSNHFKGMPFRHIIKNFVIQGGDFDFDGASQEWITKAKASGKNDLSPKHEAFMIGTAKNPNNKGFDLFITTAPIPDLNDKLVVFGRVIKGEDIVQEIEEVDTDEHYQPKAAIGIIDIVLKQEP

SEQ ID NO: 313061 - protein, 75 aa, Zea mays
  Clone ID: MRT4577_48571C.1.pep
PRFGSSFFCRGHPPPLGLGPKGPPPLHFPKPVKVGEISRGEFGLFRGSPPENPLFLPLQGRIFFFLKTRLLPFNP

SEQ ID NO: 313062 - protein, 104 aa, Zea mays
  Clone ID: MRT4577_48572C.1.pep
MSGGPFFPVPGKMPSPSPEGGSGFFCSPIKKPLLDPFPKAPLPGPGYPPGLEPNKPGPESPPGPENNKPAPESPPPPPESPPPPPVWGQPKPTPFSPPPPEPWV

SEQ ID NO: 313063 - protein, 171 aa, Zea mays
  Clone ID: MRT4577_48573C.1.pep
QSSLAMHSGVGCRRFCHRAHERSFVCSFCRGQFLHASNPCCSHPRALTNFLGRICRAHQCSSSSLSPGLIVLARPSGRRFGALHGFGHTQHYPCRHRTSLRHVQQRRRPCLRLLRRVELLPVVTRALSIRQWNTNELLLATQFLCVVVRARRRKETANATLVRCWCCARTG

SEQ ID NO: 313064 - protein, 198 aa, Zea mays
  Clone ID: MRT4577_48574C.1.pep
GRVYLIHWPMAVKPSKPHFPMKREDIVPMDLSGVWQAMEECHRLGLAKMIGVSNFTTKKLQELLAIAKIPPVVNQVELNPTWQQKKLIEFCNDKGIHVTAYSPLGGQRISKLNPVRQSDILEEIGKARGKSVAQISLRWIYEQGASMVAKSLKRERLKENIEIFDWELSDEDRFKIDQIAQRKLVTVQNLLCPEGISS

SEQ ID NO: 313065 - protein, 52 aa, Zea mays
  Clone ID: MRT4577_48575C.1.pep
KPSPQEAIASSHMVFMYKHSHHLKKPSLAHIWSSCNTHLTNATPNKDYKDNK

SEQ ID NO: 313066 - protein, 180 aa, Zea mays
  unsure (1)..(180): unsure at all Xaa locations
  Clone ID: MRT4577_48576C.1.pep
MILAGDAVHITSLEKDACFSPIDTMAVLSDLHTGDRLKSLXANLAGKTYVVXGTSITNDDIKGFDVVPWKPGADFANADRWYETVYADEDXRFPGKRXGVNLPAGSAPAEGAPADDAEDDDDLDLFGDETEDDKNAVDERADVAKDCSNKKDSGKSSDLMDVKPWDDDTDMTKLEEAVRN

SEQ ID NO: 313067 - protein, 64 aa, Zea mays
  Clone ID: MRT4577_48577C.1.pep
CRSFVCASAPPMQHRFGLFTNTGFVTLSVFLLSGIGAFPPRMGAPSPERWLDVPLGRRRPHETV

SEQ ID NO: 313068 - protein, 74 aa, Zea mays
  unsure (1)..(74): unsure at all Xaa locations
  Clone ID: MRT4577_48578C.1.pep
SRSRTSAMLAILGYFIQGXVTGVGPFQNLLDHLADPVNNNVLTSLKFHLNVGALTYLVAAPPGGCCGKVDACLL

SEQ ID NO: 313069 - protein, 63 aa, Zea mays
  Clone ID: MRT4577_48579C.1.pep
FLGGLDNIHGQYEPILGKKLLHASRYRAPNQYTVHDDLGYYSLGTPNLSTGRLDLTNSQPRTQ

SEQ ID NO: 313070 - protein, 120 aa, Zea mays
  Clone ID: MRT4577_4857C.1.pep
NRNNGGIPKAPQPGGEARPSGAQKGTPKPQEQGQGPGHPTKGPGPHPWEKTHRPGTLEKNPLAAQRGRKSPSPGKGGPFFGGPPKLSRPPPRGGGNPPITRGRREAHRGPKNPGTPQTPK

SEQ ID NO: 313071 - protein, 148 aa, Zea mays
  Clone ID: MRT4577_48580C.1.pep
MSSDADYSAFLDKANQDTGSGDVKEASQKSYGTKSVNTAVPSGLKEVKEYYISESDEPFEPVALEFEGSSVSSEDLAKLLGGNKVEEVKGTGFESQYKGVIDAVKLATNGTVKVFRVELEGTRAEYYVVGVDEKGGRIVGLKALAIES

SEQ ID NO: 313072 - protein, 167 aa, Zea mays
  unsure (1)..(167): unsure at all Xaa locations
  Clone ID: MRT4577_48581C.1.pep
CLALLGPLPXGFPSCAGFLAAVVPCLGLLLGGSCPLWPARCVACSLPGPGLGPFFACCSLGGLSFSGRXPLFAFLWWAAPGLGPFVPFFRFRAAVGRRPLVVSSLPVLGWWVCPSFFCFGSLXFWGSAWLFPSVTXPPVLGGPPAEGRARRPGGSGPVRARRPALPS

SEQ ID NO: 313073 - protein, 70 aa, Zea mays
  unsure (1)..(70): unsure at all Xaa locations
  Clone ID: MRT4577_48582C.1.pep
GXPGATHSSSHSSSHLHFFSHLSLHRIPSVFIVAQGPLLLLSTPLPRDGPPSAPDVQPAQDLFLSLPRAL

SEQ ID NO: 313074 - protein, 115 aa, Zea mays
  Clone ID: MRT4577_48583C.1.pep
DLTRVFPAPCTTTCMRRWKTNCLAISWNLRNAKWDARCVAHEAQPTNTHLRNMIIDLDIIASIAGVYDGKTFQHHEMQPEMIGHYLAKVSISYYAVKHGRPGIDATRSSRLIPLK

SEQ ID NO: 313075 - protein, 72 aa, Zea mays
  Clone ID: MRT4577_48584C.1.pep
TIFYPNGLLLIPDEVRPLFLYAQAISRTQLFFSHGFAAFFFRYNSFFLFVPNLIIPQGRFLLLFFFPAIVFF

SEQ ID NO: 313076 - protein, 59 aa, Zea mays
  Clone ID: MRT4577_48585C.1.pep
VLTYNIFTIYILFFHNILNRRRTPFYFNRQRFPLFPIRMSYMFSHPMLLDLPPIIFFDL

SEQ ID NO: 313077 - protein, 276 aa, Zea mays
  Clone ID: MRT4577_48586C.1.pep
MSKGPVPFANIGKRAKDLLYKDYNFDQKFSLSTSSGSGLNLTATGVKINEDFIGDIRTQHKSSRTTIDVTVDSDSKVSTTVTVDEALTGLKTSFAFKVPDHKSGKLDLQYAHNRFSLNSTIGLTSAPLVELAATVGTSELSIGAEVGFDSTSAAVTKYNSGIGYNKSDFSASLLLADKGETLKASYVHLFNPTNGATVAAEVTHKLKTRENYFTVGSSHALDPSTLLKMRFSNSGKVGLLCQHEWRPKSLVTLSAEYDLKVVSAPSRIGMAISLKP

SEQ ID NO: 313078 - protein, 133 aa, Zea mays
  Clone ID: MRT4577_48587C.1.pep
LPGRPLSQQSYSGQTDLRAGTVLWTRRSKWRGCPLCPSSPWIRIRKRKRKCSPFHQLQWQKAGSPITRSPCPNQVPSDGDEIWAVFLSINQMEEGVDKTGPLGLHVCVFWDILLKWGSLFDIWLKCGKKSCLV

SEQ ID NO: 313079 - protein, 43 aa, Zea mays [sequence omitted]

SEQ ID NO: 313080 - protein, 66 aa, Zea mays
  Clone ID: MRT4577_48589C.1.pep
RSLPIVLKHHDRRSLPVFFTKSQNIGTSHVSESAALNTTCILDSNGPTARGLPESMLSSLCGAPEI

SEQ ID NO: 313081 - protein, 289 aa, Zea mays
  unsure (1)..(289): unsure at all Xaa locations
  Clone ID: MRT4577_4858C.1.pep
MASSDGKPLPTPASVGGGGGSSTAPPGQPTTVASKVLDMGAAAMQSLRPVKQAKQHMCTFALYAHDPKRQVETHHYVSRLNQDFLQCAVYDSDKADARLIGXAPCTPSYCHLQLILWHVLTPKKDTASTWIFSFNCMXVEYIVSRKIFDSLPAEEQRLWHSHAHEIKSGLWTSPHVAGLLEKAELDHMAATFGKFWCTWQVDRGDRLPLGAPALMVSPQADPAAAVRPDLVRKRDDRYGLSTEELRAARADVEAPAEEHPGQADYWLRHRKGFAVDVVPHEMKRHAPFP

SEQ ID NO: 313082 - protein, 127 aa, Zea mays
  unsure (1)..(127): unsure at all Xaa locations
  Clone ID: MRT4577_48590C.1.pep
RVHAYRTYPPPEVLLPVSFNGSDHLREVFYKQMGSTNQDIVALSGGHTFERCHKEHXGFYGASTTYPLIFDNSYFNELLTGDKDGLLYITRDKALLRDPVFRHLVKKYATDENAFFDDYKEAHLMLS

SEQ ID NO: 313083 - protein, 95 aa, Zea mays
  unsure (1)..(95): unsure at all Xaa locations
  Clone ID: MRT4577_48591C.1.pep
RWTCCYFPHSQHESNTFIEEERCTRHDPECSHQFLERNDDDGRRYALISPLFSSFFFLSSLGARHKRVTAASPRVQPLLXVSSRRQRXQXAGMEE

SEQ ID NO: 313084 - protein, 73 aa, Zea mays
  unsure (1)..(73): unsure at all Xaa locations
  Clone ID: MRT4577_48592C.1.pep
PVRRSMMMTCGQSVKYQSSLKAFQQILKKXGLKSMFKGAGVNILRAIAGAGVLSGYEQIQILLFGNKYGSVGV

SEQ ID NO: 313085 - protein, 99 aa, Zea mays
  unsure (1)..(99): unsure at all Xaa locations
  Clone ID: MRT4577_48593C.1.pep
HASAHASGGMGFIQSNHSVRMCGNTMISFNMLEAVRINXGVKRFFYASSACIYPEFKQLDTKVSLKESDAWPAEPQDAYGVEKLATEELCKRYTKDFGI

SEQ ID NO: 313086 - protein, 242 aa, Zea mays
  unsure (1)..(242): unsure at all Xaa locations
  Clone ID: MRT4577_48594C.1.pep
MIATTGGSSAKAAAVGGKAARACDGCLRRRARWYCAADDAFLCQGCDTSVHSANPLARRHERLRLCPASPLQTPPARSAAAATATNKRERHDEVAVPAWFGRKARTPRGGHAKSVGQVALSRRLVVPHAAGGDSDSPDERNGGEEEQLLYRVPILDPALAEFCSPPPLEDPAKPDPAAPLAQFCPVGGHFNFGPTDAELREFAADMEALLGHXLDDGNEEESSFYMETLGLLDQWKWATMPR

SEQ ID NO: 313087 - protein, 49 aa, Zea mays
  Clone ID: MRT4577_48595C.1.pep
RLVRAPPVKCYAHLVAVIADGRNSGWVLQIAMAGPCQPFIRYRNGSITG

SEQ ID NO: 313088 - protein, 96 aa, Zea mays
  Clone ID: MRT4577_48596C.1.pep
GRVGADLEMAATKQTICCMLLTLVLASNFVQDCEANPSSLLCWTLLGKMISCSVWSKQDIAHCKNECKQKSYDDGMCYVTPGKVKLVCLCHIPNCK

SEQ ID NO: 313089 - protein, 46 aa, Zea mays
  unsure (1)..(46): unsure at all Xaa locations
  Clone ID: MRT4577_48597C.1.pep
HVLKVFLECFFLIKSDVAYRVLVLPPPVYEXNAAAVKILEENAVGP

SEQ ID NO: 313090 - protein, 174 aa, Zea mays
  unsure (1)..(174): unsure at all Xaa locations
  Clone ID: MRT4577_48598C.1.pep
MGKIKIXINGFGRIGRVVVNVALQMEDVEVVAGNDPFITTDYMTYIVRVPTHVHXGKWKHXDITLKDSKMLLFGEKXVTAFGIMNPHEIPWGEAGAEYVMESNGVFTDKDKADAHLKGGDKNVVISAPSKHAPLLVVGVHEDKYTSTXNIVSNDSCTTNCLARLAKGIHDNFGI

SEQ ID NO: 313091 - protein, 69 aa, Zea mays
  Clone ID: MRT4577_48599C.1.pep
PGHQAGGAGILKGRTVALERIRTPYQWGPSIHSRFTLKMSGALTIEGWGPQSLDSEQRNQNQRFQSRWA

SEQ ID NO: 313092 - protein, 301 aa, Zea mays
  Clone ID: MRT4577_4859C.1.pep
MNGGAAPPSAAAAATPPHRRLPDFLQSVNLKYVKLGYHYLITHLLTLMLLPLMAVILLEAGRTDPEDLRQLWLHLQYNLVSVLVLSAVLVFGATVYVLTRPRPVYLVDFACYKPPAHLQVRFEEFMRHSKLCGFSDDALEFQRKILERSGLSEETYVPEAMHALPPQPTMANARAEAETVMFGALDSLFRSTGVRPKDVGVLVVNCSLFNPTPSLSAMIVNKYKLRGNVRSFNLGGMGCSAGVIAADLARDMLQVHRGTYAVVVSTENITQNWYFGNRKSMLIPNCLFPVGGAAVLLSNRG

SEQ ID NO: 313093 - protein, 67 aa, Zea mays
  Clone ID: MRT4577_485C.1.pep
RILGFTPKGWRAPFSPLGWATGAPWGPSFPPPGLILLLKRRCFPWEVGSMFLWGFNMSGKPVGRPKR

SEQ ID NO: 313094 - protein, 184 aa, Zea mays
  Clone ID: MRT4577_48600C.1.pep
QLYECKYGDTLLRGQHVLASGSESKAKEAWDDIYGDDDIVLGSSSTPIASTVASISDLSSYLDSDTVTQFGADFNILNWWQRHKLTYPILALLAKDVLTVPASTISSESTFSLAGRVLEERRRRLTTDMVEVLSCIKDWELADKHMQNTVENDTKELEATYENMYLDVEDRDKDKDGESRPRRS

SEQ ID NO: 313095 - protein, 98 aa, Zea mays
  Clone ID: MRT4577_48601C.1.pep
PLKLKTTTTIKLFKSSFSGRLTRPSISSIYKPPALHSPLEPNRWGTHMHTGTSGRSNDSLTCRTDGPPKISELIHQANARMINVQPDNPLIFSQVTAY

SEQ ID NO: 313096 - protein, 50 aa, Zea mays
  Clone ID: MRT4577_48602C.1.pep
HCNFKKGISQLRSFAKHYQEMGSHVTKCISTLIKRESTNNQLIEFYISNM

SEQ ID NO: 313097 - protein, 71 aa, Zea mays
  Clone ID: MRT4577_48603C.1.pep
SPAGVKIDVVPSVLVFNATNKAATFQVNLSPLWRLQGDYTFGSLTWYNGPKTVRIPIAVRMTVYDFYADVA

SEQ ID NO: 313098 - protein, 77 aa, Zea mays
  unsure (1)..(77): unsure at all Xaa locations
  Clone ID: MRT4577_48604C.1.pep
YQLALVALCALAAGADIIPHXAXAPTAIIEYMLLPCSRMGSELTNLRADRLQLAISVSELSKPVDRLLQQYLSHLTV

SEQ ID NO: 313099 - protein, 81 aa, Zea mays
  unsure (1)..(81): unsure at all Xaa locations
  Clone ID: MRT4577_48605C.1.pep
SISPPPEKAPCPXCASPPPNNPYPSAQKKKRPLVLLLQPQRGRFLPQPPTTWRCCSASPMGRALLYTLPLPLPXRPSQAKG

SEQ ID NO: 313100 - protein, 51 aa, Zea mays
  Clone ID: MRT4577_48606C.1.pep
QALVTKSPSTVCKKPIENPYIILPNDLLTDEILTNFIPGNYEQRYFKSPRA

SEQ ID NO: 313101 - protein, 126 aa, Zea mays
  Clone ID: MRT4577_48607C.1.pep
MSRRYPTAELYEERERDFYRNGNRSDRNYDELDFELRRSGVGADPRRSMPDFLREDYNRPTAGPLVMRGRDDDSFSRSGPRSARGFDDDVRSTRSRPPPPASSVREVERDDITIRRREPVARSPRA

SEQ ID NO: 313102 - protein, 54 aa, Zea mays
  Clone ID: MRT4577_48608C.1.pep
KGPPPPRASFSPQNVSRTFFPNFREMGRPPIFQHQGISSLPSNFSRPKKIFFNL

SEQ ID NO: 313103 - protein, 185 aa, Zea mays
  Clone ID: MRT4577_48609C.1.pep
IRHEGPFAVRHCPLRPAPPPLAKLPFAFPFPPHRPIPVSHPPPPTHGSCHCRPVCPPPRSPYPPQHSTAQRHARSRRCHRAPPPSNVGPPSTGAPRHGALSAVRSGAAPLRQGGRASAASRAGPLLRSPSPRGDTRGRCGEDARSARPTVPAASHRTAAGGSLVVARQRSCCSAGRDGVNERRSG

SEQ ID NO: 313104 - protein, 45 aa, Zea mays
  unsure (1)..(45): unsure at all Xaa locations
  Clone ID: MRT4577_4860C.1.pep
VVLDNHIRKFYXXKHXRGGNTTLFACFHHXXHAXIXXDIYLVXSS

SEQ ID NO: 313105 - protein, 66 aa, Zea mays
  Clone ID: MRT4577_48610C.1.pep
VFFFRPFTLFLESPPPPPFFSFARFFFNFFYKKKKKKKKKKKKKKPKKKKKKKKKKKKKKKKKPHP

SEQ ID NO: 313106 - protein, 84 aa, Zea mays
  Clone ID: MRT4577_48611C.1.pep
FGSSELLLNVLLLAASQSITRDTHDLNCHRMQYYGHYGMFAAQWAIAQLRHHSIRPSGEVFTAHLKQHDARLGEGFLSSRFEHQ

SEQ ID NO: 313107 - protein, 91 aa, Zea mays
  Clone ID: MRT4577_48612C.1.pep
RTGPWDVGTTAEGRVAGRRPIAAAPDFDEGAGRFPASGTPSGIAYELGGCAEYDKGNTAQGEMRRRRWIGSSKNWRWWIGSSKNWRRWIRY

SEQ ID NO: 313108 - protein, 268 aa, Zea mays
  Clone ID: MRT4577_48613C.1.pep
ERGTSSKRGSAAEAQDTPVSKKNKMLDKNLIGSRIKVWWPDDKMFYAGVVESFDASSKKHKVSYDDGDVEVLALKKERWEFIAEEQDADPDVASNMPRGRKAKGSSVQQMEGKTGTPQSDVKNSPKKRGRPKGVRSSNNMPNADSSVTPARLKGKSVEKDTEETPKTGSNSKKEGAKPSRSTGKAKDSVVKASSKDEADSTDNSKDAAASEDKDSKDEVKSSEAIDGSKTNGLSTKRKPDENEGESSEEEKASTKTTTRKKRRRKSRN

SEQ ID NO: 313109 - protein, 171 aa, Zea mays
  Clone ID: MRT4577_48614C.1.pep
MCYLDHIAHLVAYVKLPNCFMHSDVKNSPKKRGRPKGVRSSNNMPNADSSVTPARLKGKSVEKDTEETPKTGSNSKKEGAKPSRSTGKAKDSVVKASSKDEADSTDNSKDAAASEDKDSKDEVKSSEGIDGSKTKGLSTKRKLEENEGESSEEKASAKTTTRKKRRRKSRN

SEQ ID NO: 313110 - protein, 65 aa, Zea mays
  Clone ID: MRT4577_48615C.1.pep
RTKPRTDTIADDATRAQCRDLTLGAQVPHVQARGTREDGRWSSRSRWPEAAGDGRCGPGAAWRWV

SEQ ID NO: 313111 - protein, 329 aa, Zea mays
  unsure (1)..(329): unsure at all Xaa locations
  Clone ID: MRT4577_48616C.1.pep
KKKKKKKKKLKKXXKHKKXKKXKPKKKKKXRLKKKKXLXXKKNKKKKKKIKKNRKKKKKKKKTKKKKKKKKKPKNKKKNKKXXXXXXKXXXXXIXKKXXXPRRKRKKKKXKXNXKKXXXXKIKKISKHKXKKXXTKKKXFKKRVCRLIRCQVKPQRSEKKKXLIKKXRRRKSRGGVGNRFRGPRXRIFFLLVXKXKXXKKRGXXKRXGGGGKKKKKKKKKKXKKKXEGXGGEGGEEGGKGEKKREKKXXXKKKKKLKKKKKKKKKKKKXXKKKKKKKKKXXXXXXXXXXXXXXXKKKKKKKKXKKXKKKKKKKKKKKKXXKXXPPEKTS

SEQ ID NO: 313112 - protein, 94 aa, Zea mays
  unsure (1)..(94): unsure at all Xaa locations
  Clone ID: MRT4577_48617C.1.pep
AQTYVKMAFSVDNKLVEVDVXWSNVPEWNLKPKRMRPPYEVLVGIAGXGQPIPERIGQVQLFQSKKAMYHSVIPGNVKSXKMEIVNPXPVYYTL

SEQ ID NO: 313113 - protein, 104 aa, Zea mays
  unsure (1)..(104): unsure at all Xaa locations
  Clone ID: MRT4577_48618C.1.pep
PFTGADSRFCRDDKAPLFISSFPFLCGRAWRVFGLVEWACGAASAAAAAALLVRQNSIGCSCVEIHPLVDWLLLRVATGKLSRPWLDVLSRSIXXDLDSYASCW

SEQ ID NO: 313114 - protein, 166 aa, Zea mays
  Clone ID: MRT4577_48619C.1.pep
HWVPRGRPGCDVAFCYCGVRLRRPACAAPQDRMARRLERDCALPGLAGCSRCLRALSKLGGRSNATSSAKAKQEHREDCHLMGLTWLLNRNPTRYREAATAVIQALMAADEAGAGHPATCSLPADDELPVAVASSQINGATSASMSSAHGSLLLVFLAAAVIVLSC

SEQ ID NO: 313115 - protein, 505 aa, Zea mays
  unsure (1)..(505): unsure at all Xaa locations
  Clone ID: MRT4577_4861C.1.pep
MDGVSAPPPHRRLPDFLQSVNLKYVKLGYHYLITHLLTLTLLPLIAVILLEAGRTDPDDLRQLWLHLQYNLVSVLVLSAVLVFGATVYALTRPRPVYLVDFACYRPPAHLRVRFDQFMRHSRLCGFSDDALEFQRKILERSGLSEETYVPEAMHALPPPXTMANARAEAEAVMFGALDALFRSTGVKPKDVGVLVVNCSLFNPTPSLSAMVVNRYRLRGNVRSFNLGGMGCSAGVIAVDLARDMLQVHRATYAVVVSTENITQNWYFGNRKSMLIPNCLFRVGGAAVLLSNRGADRRRAKYVLRHVVRTHKGADDRAFGCVYQEQDGEGKTGVSLSKDLMAIAGGALKTNITTLGPLVLPVSEQLLFFATLVAKKLLSAKTKPYIPDFKLAFEHFCIHAGGRAVIDELEKNLQLSPAHVEASRMTLHRFGNTSSSSIWYELAYMEAKGRVRRGHRVWQIAFGSGFKCNSAVWHALRNVKPSPDSPWEDCIDRYPVELVDGFPTQQ

SEQ ID NO: 313116 - protein, 65 aa, Zea mays
  unsure (1)..(65): unsure at all Xaa locations
  Clone ID: MRT4577_48620C.1.pep
MATTASMLMNRYELGRTLXQCTFCKVYLGRNISSSQCTCIKVIDYENVMSVSMIDQIKHXISVMR

SEQ ID NO: 313117 - protein, 69 aa, Zea mays
  Clone ID: MRT4577_48621C.1.pep
TWACPIPRQPGARMISHPISCRLEPKTKDPTANNWGRAKKPPTRRTPRKKTKVAFANSKNLWVQPGGIS

SEQ ID NO: 313118 - protein, 75 aa, Zea mays
  Clone ID: MRT4577_48622C.1.pep
KVKTRKGAAETPAVSYLRNLKICRTQAMLLQYPWRFDEAISQLDTLGEDLYKDSTLIMPAFEGQLNAYGPLTAQR

SEQ ID NO: 313119 - protein, 175 aa, Zea mays
  unsure (1)..(175): unsure at all Xaa locations
  Clone ID: MRT4577_48623C.1.pep
PPFHRVFYPSFGKGPHPVSPSLSALADSLIHLALRPPRLPPGLSPQATCCEFVRTLGPPRFPPWAPVSPFFGPRLGPTIFPQQTAATFLKPALGRGSAPLLPPPRPLVFPLSVVSPQVPFRKQTKEYNYIYKQKKKFLVKKKKKKKKXKKSLVTCPRRPRLERAXILPDIPITTG

SEQ ID NO: 313120 - protein, 67 aa, Zea mays
  unsure (1)..(67): unsure at all Xaa locations
  Clone ID: MRT4577_48624C.1.pep
LFXREDNDPISLNXXRTLQKKGCPKGQKRPISLRGEPPPQTQKKKDPRGFHIYLRARFFIFTKRCAP

SEQ ID NO: 313121 - protein, 218 aa, Zea mays
  Clone ID: MRT4577_48625C.1.pep
MDSDDKKFGNGPRELTGAVDLINHYKLLPHHDFFCKKPLPLAISDTHYLHNIVGDTEIRKGEGMELDQLVQNAYMRDKPAYIQPFDMETLGQAFQLRETAPVILPSTEKGIPTISGKPKSESKDKEKKHKKHKDRERDKDKEHKKHKHRHKDRSKDKDKDKDKDKKKDKSGHHDSDSKKHHEKKRKHEGTEDSADVHKHKKSKHKSSKTDEMGNGLIS

SEQ ID NO: 313122 - protein, 75 aa, Zea mays
  unsure (1)..(75): unsure at all Xaa locations
  Clone ID: MRT4577_48626C.1.pep
SHIDVIDGLSVPKITIVPLLVDALRSMTHLPLDVHLIIVEPXHRVPDFIKACAHIDSVHCXQTFSIHFHRTVYLI

SEQ ID NO: 313123 - protein, 63 aa, Zea mays
  Clone ID: MRT4577_48627C.1.pep
NQASSQLDEISASTTYLQVIWPQPQRAEEPGELGSPTECCSCSSSYTYVPLVAADDSSISFRV

SEQ ID NO: 313124 - protein, 43 aa, Zea mays
  Clone ID: MRT4577_48628C.1.pep
PPATMVLFGGVKRTKAPLFSCFFGIPGWPGTPKLNYLVWKLVG

SEQ ID NO: 313125 - protein, 44 aa, Zea mays
  Clone ID: MRT4577_48629C.1.pep
SLSSGNNAEYRGVRKNRYVILPKDFEKGYRTNVKKPETDFDFYK

SEQ ID NO: 313126 - protein, 99 aa, Zea mays
  Clone ID: MRT4577_4862C.1.pep
YLLQTITSQQLPPHLAPHFNTLLQLLRIKTRGPTPSAHTSSHPYPHQRPSWPPSPLAFSSPVLISSSPYFSVDTYLYPRTASPFLIILSLPTGSPLCSF

SEQ ID NO: 313127 - protein, 47 aa, Zea mays
  Clone ID: MRT4577_48630C.1.pep
KMFCVQRGVFPWTRTWVPLQAFRVVCLVVGPFPLGGSVKGVIPKRLA

SEQ ID NO: 313128 - protein, 69 aa, Zea mays
  Clone ID: MRT4577_48631C.1.pep
TGPKGVHGGQNKFPGIQKNGSQKGPPPPELTKRSTSRQSGWGAKHSGSSHMEHSNDQSFCCLTFFKKIH

SEQ ID NO: 313129 - protein, 320 aa, Zea mays
  unsure (1)..(320): unsure at all Xaa locations
  Clone ID: MRT4577_48632C.1.pep
MVSVDDEGGTHEGIKTIPVQRACEFTTNSVLCVCIVTWNMNSKMSAEDVAKLVSSDRKFDLLVVGLQEAPKPDVSRVLQEALAGTHVLLGQKSMQSLRMLLFGSRSSEKYIREMKVDKHAVGGCGGIIGRKKGAVAMYINFSGIRMVFVSCHLAAHEHKVEKRNAEFQHISQSLFARXARRRRXQSADITVWLGDLNYRLQGISSTPARKMIEENRQSKLRGRDQLLQEAEKGQVFSGYCEGTLSFKPTYKYDVGGSVYDTSYKVRVPSWTGRILFKVGQSSGLDAVLSSYESLDCVRSSDHKPVKAHLCLKVRSDGDAD

SEQ ID NO: 313130 - protein, 108 aa, Zea mays
  Clone ID: MRT4577_48633C.1.pep
NADEVQSYKKKKKKKKKKKKKKKKIFKKKKKKKFKKKKKKKKKKFLFLGGAPPGGDFWKFPPPGGGVLPSFWGAHFPFWGGPFHSRGRVFTTPGWENPGVSPFIGRWV

SEQ ID NO: 313131 - protein, 197 aa, Zea mays
  unsure (1)..(197): unsure at all Xaa locations
  Clone ID: MRT4577_48634C.1.pep
EMKVDKHAVGGCGGIIGRKKGAVAMYINFSGIRMVFVSCHLAGXSFQSPGHAXSIVRGGILQVSCHLEVTKXNKKPAAHEHKVEKRNAEFQHISQSLFARXARRRRXQSADITVWLGDLNYRLQGISSTPARKMIEENRQSKLRGRDQLLQEAEKGQVFSGYCEGTLSFKPTYKYDVGGSVYDTSYKVRVPFWTDRI

SEQ ID NO: 313132 - protein, 139 aa, Zea mays
  unsure (1)..(139): unsure at all Xaa locations
  Clone ID: MRT4577_48635C.1.pep
MGNCNCSSSSFFSLPKRGSKLLKLNNGMVSVDDEGGTHEGIKTIPVQRACEFTTNSVLCVCIVTWNMNSKMSPEDVAKLVSSDRKFDLLVVGLQEAPKPDVSRVLQXALAGTHVLLGQKSMQSLRMLFSVKELGESIKR

SEQ ID NO: 313133 - protein, 58 aa, Zea mays
  Clone ID: MRT4577_48636C.1.pep
LEDSLLPSEKGDPPILFDDLGRTMNWLLPLEPFQGQGFPVLRTGVLGPHLLFKENPWG

SEQ ID NO: 313134 - protein, 166 aa, Zea mays
  unsure (1)..(166): unsure at all Xaa locations
  Clone ID: MRT4577_48637C.1.pep
NHYRTQMKTIQQRKDRRFKXERQIHPCKVAKDHRXDLIINLDQKDTQYMPLKRHKLXEDDSELLTIIGIGDTVEXVXLITEKTSSYIYXLKKLTISDMVDSIQLKHVISTRNYLPQVASHXIDKLYYSXQDTDYLNLIMEHLTGRDIMTLIMIDDNLTAHVARLYI

SEQ ID NO: 313135 - protein, 75 aa, Zea mays
  Clone ID: MRT4577_48638C.1.pep
ASWLQSTERRIRQLPWPVFCAQIHDRFGSDRHESLIRTLFHIRQIGSVAEYVEQFSVLVDHLAAYEAHADPLSLD

SEQ ID NO: 313136 - protein, 198 aa, Zea mays
  unsure (1)..(198): unsure at all Xaa locations
  Clone ID: MRT4577_48639C.1.pep
CCLLGLVLGHESLDQCQGCRLGKQIYLSYYYGESXLKCPFDLVHSDXPFVSKGVHKCYILYIDXFSRHTWIYFMKNHSEALSINKTFSAMVCTHFDTSIRVFHANSIGEYLYDTLSXNLSEQGTLAQFSCPGAHALNSFAECKHRHRLMLMLASFVPLTSXVKDVSTATYLTNIQHSLSLQGGVPFEHLCGNVSDYSS

SEQ ID NO: 313137 - protein, 107 aa, Zea mays
  unsure (1)..(107): unsure at all Xaa locations
  Clone ID: MRT4577_4863C.1.pep
MGGLEEIRNEADDLENIPIEEVFEQLKCTRQGLTSDEGAQRVEIFGLNKLXENTESKVLKLLGFMWNPLSWVMEMAAILPTPLATVVANPPHWPDFRRNHPFSWPPT

SEQ ID NO: 313138 - protein, 36 aa, Zea mays
  Clone ID: MRT4577_48640C.1.pep
LNERANVVNVTVTREVGCSEEGRDEPRQRRFVGRVR

SEQ ID NO: 313139 - protein, 114 aa, Zea mays
  Clone ID: MRT4577_48641C.1.pep
IEVGHGKKAIVIFVPVPSLQGFHRVQQRLTRELEKKFPDRHVLILASRRILPRPKRSSRSRNTQKQKRPRSRTLTAVHDAILTDLVYPVEIVGKRLRTKEDGSKTLKVILDEKE

SEQ ID NO: 313140 - protein, 85 aa, Zea mays
  Clone ID: MRT4577_48642C.1.pep
SQVPRGALSHMYKSNRTVIHAWYPASSVLHADYIVRHQMSTSIGVIPADDGSYGDVVGDKTHGESRLGQGREHLVHRKNGSPAVI

SEQ ID NO: 313141 - protein, 62 aa, Zea mays
  Clone ID: MRT4577_48643C.1.pep
FGSRGVTPVYFYSGRLAGTKRAPVYDKAHSQHRGTGDGTLHKYKKEVGSCCLHAVINMTAAF

SEQ ID NO: 313142 - protein, 50 aa, Zea mays
  Clone ID: MRT4577_48644C.1.pep
MAGHAAVRSCVQTALKAANSLVGLAGMAVILYALWVLRAWSQQDADHLPA

SEQ ID NO: 313143 - protein, 82 aa, Zea mays
  unsure (1)..(82): unsure at all Xaa locations
  Clone ID: MRT4577_48645C.1.pep
LLPPVVVVVVPSCFVPFXAAXGFCCSRAVACWWXXGCXRSVAXCVCLLXPVGLPPRVFSCXXPRWCVVRGLEGRFGACXXCG

SEQ ID NO: 313144 - protein, 109 aa, Zea mays
  unsure (1)..(109): unsure at all Xaa locations
  Clone ID: MRT4577_48646C.1.pep
GDCKPLEYKLSAWHLISCGCMCQGRDFTRRNGTGGESIYGXKLPDEKLVRKHTVPGELSMVNAGPNSNGSQFFICTVATTWLDCKHVVFGQVRXGMDVDKAIXTVGTRN

SEQ ID NO: 313145 - protein, 106 aa, Zea mays
  Clone ID: MRT4577_48647C.1.pep
SCSDAMRAGAVDAKEGMARGGAAVVQWHSSGHVKNAFLDEGVSATASGQEAAALRGWYSERARKTGGAAAWWRAAPEEGVARAAWRGALASIQHRIRERKEPSERE

SEQ ID NO: 313146 - protein, 437 aa, Zea mays
  Clone ID: MRT4577_48648C.1.pep
GPRLSPDTDIPWPLPLPTHLRSAIPSSRRLRIHLPGATSGQPLAVQPSSPSGELRGVAKMISRQLVLTYLYLLIYICLSSGVILFNKWVLSPKYFKFPFPITLTMIHMAFSGIVTFFLVRVFKVVAPVKMTFHIYATCVIPISAFFASSLWFGNTAYLYISVAFIQMLKALMPVATFIMAVFCGTDKLRWDLFLNMVLVSVGVVVSSYGEIHFNVIGTLYQVTGIFAEALRLVLTQVLLQKKGLTLNPITSLYYIAPCSFIFLFIPWYLLEKPEMDVTQIQFNYSIFFLNALSAFALNISIFLVIGRTGAVTIRVAGVLKDWILIALSTIIFPESVITSLNIIGYAVALSGVVLYNYLKMKDVRANQLPADNNSDRATKDKKSSSMFRPDNSMDNSDGTVAGGLASEAAAVDEEAPLIPSARLSYVTRTQTGSSSNR

SEQ ID NO: 313147 - protein, 110 aa, Zea mays
  Clone ID: MRT4577_48649C.1.pep
MARIKVHELRGKSKTDLQAQLKELKSELSLLRVAKIVRTSIARVLTVISQKQKSALREAYKKKKLLPLDLRPKKTRAIRRRLTKYQLSLKTEREKKREKYFPMRKYAIKA

SEQ ID NO: 313148 - protein, 77 aa, Zea mays
  Clone ID: MRT4577_4864C.1.pep
VTLFGPVRFPKAQGCIFVVVGLGMTPWCFFFRGRPGAGGLDWVQPRYEQRQGSKRMDWGSIGISSPVRGFLWFSFRT

SEQ ID NO: 313149 - protein, 54 aa, Zea mays
  Clone ID: MRT4577_48650C.1.pep
PPGPLPLQKQKAGPFLKFPRKNLPEHMGVTLPRDPGFKAGLVSALSGRIFYKGL

SEQ ID NO: 313150 - protein, 123 aa, Zea mays
  Clone ID: MRT4577_48651C.1.pep
MARIKVHELRGKSKTDLQAQLKELKSELSLLRVAKVTGGAPNKLSKIKIVRTSIARVLTVISQKQKSALREAYKKKKLLPLDLRPKKTRAIRRRLTKHQLSLKTEREKKREKYFPMRKYAIKA

SEQ ID NO: 313151 - protein, 123 aa, Zea mays
  Clone ID: MRT4577_48652C.1.pep
MARIKVHELRGKSKTDLQAQLKELKSELSLLRVAKVTGGAPNKLSKIKIVRTSIARVLTVISQKQKSALREAYKKKKLLPLDLRPKKTRAIRRRLTKYQLSLKTEREKKREKYFPMRKYAIKA

SEQ ID NO: 313152 - protein, 134 aa, Zea mays
  Clone ID: MRT4577_48653C.1.pep
MKAAAVHSVPPPSAVTLVSVVARRALVPAALRGNARRGAALVASAAPDGQMRRSPGPAVAKLTDVMSRPVQVATPGQRLSEVDDAFFAARQYSGLLPVVDDDGRCVGVISNKDKAKAPNGVGYSLVRSLTASIS

SEQ ID NO: 313153 - protein, 352 aa, Zea mays
  unsure (1)..(352): unsure at all Xaa locations
  Clone ID: MRT4577_48654C.1.pep
MLPPPVPAWAAVGLARPASFPSTHAASLPILPPLSSSAPLRSCVAVECRPGLHSIPPVARSPRAAGAPVPSVPGIKMIGSFITGMLTLVLGYAYPAYDCYKTVELNRPEVEQLRFWCQYWILLAFLTVLERVGESFVSWLPMYSEAKLAFIVYLWYPKTRGTAYVYESFFKPYIAKHETEIDRNLLELRTRAGDMAVLYFQRVTNYAQTRSYEILQYIASQSPTQRQAHQQQQRPPPPRTRQVNPAPPPIPAPSAPPMPPQPAQAQVPPTPPRXPSSSGSSWRSASCPATNXPEATATNGLQDTETMQVDPPRASLSGPPLPPEETLIEEAIRLTRGRLRRRLAGGSGPPQN

SEQ ID NO: 313154 - protein, 48 aa, Zea mays
  Clone ID: MRT4577_48655C.1.pep
RFPRVCLVLTSTVVSSLGSSDVGPAFLTNNAMKKSSRLSSGSVRCKCS

SEQ ID NO: 313155 - protein, 90 aa, Zea mays
  Clone ID: MRT4577_48656C.1.pep
AAASPCGAVGRRAPCFPLSGQFYPGRARGPGSGQDPAPPCPTEPSAGGLGGFDGRPHETRRGSFIPRLVMTPPQTSGPGGCKKRLALEPN

SEQ ID NO: 313156 - protein, 137 aa, Zea mays
  unsure (1)..(137): unsure at all Xaa locations
  Clone ID: MRT4577_48657C.1.pep
KTPELDWARATKRXVEKVDGENATMGSSTFNTPARKRLILTTSLIQYILPVVPARLLAANVTNSIEAIVYHISKSALSDACDTALSVVNDTLPNQSSTSGKEGSRILSEVLETYESRLGKLEISLLSSEKATTLHDL

SEQ ID NO: 313157 - protein, 96 aa, Zea mays
  Clone ID: MRT4577_48658C.1.pep
EGSTYKAILRFFFSANFSSKRSMVHQRIAISPAVSSHYSGAVPLTCYICRSQRRRTSHRQYTACMKTHVFNSISAKEVSSCTSYFYNAHLSQTHIY

SEQ ID NO: 313158 - protein, 136 aa, Zea mays
  Clone ID: MRT4577_48659C.1.pep
GGGPRGGPSGVGHVFPKGFVGEKRFFFGDPGVFGVFQKHKRGLVLFPKERGGKKKGSNLHRGVGGRGHPQFAPLFPWVLQNIRRGPSFFPGKGGPVFKGGEEPRRGGLGPQGPQSLGFGGALKKTKPPPPRCVPFL

SEQ ID NO: 313159 - protein, 97 aa, Zea mays
  unsure (1)..(97): unsure at all Xaa locations
  Clone ID: MRT4577_4865C.1.pep
MVHTEKELDEVIEQMMLEVQKIEAEEVEVXTSDDEADKDDDVRDADDDELDGQEGDRSGRTKQSRSGKMSCXAMPKLGMKPMIAVMXITWKKSRNML

SEQ ID NO: 313160 - protein, 224 aa, Zea mays
  unsure (1)..(224): unsure at all Xaa locations
  Clone ID: MRT4577_48660C.1.pep
PQIXFFFFTEVFRHKXSKKRQGYFEQHGGRTLLRILETDDNXSTFTLYDRGDLAKATRGFHKANIVGEGAHGTVYKANLGSSAAENAITTVAVKRCKQIDRSRTDGFVQELVVLCRVSHPNVVRLLGCCFHFEAPMLVYEFVPNGTLSDLLHGKPRRRVXADPPEEALAHLHSPPHPTLHGDVKPQNILLGEGYVAKVSDFGCSTINDSVQVVPKGTLAYLPGR

SEQ ID NO: 313161 - protein, 94 aa, Zea mays
  unsure (1)..(94): unsure at all Xaa locations
  Clone ID: MRT4577_48661C.1.pep
NPPFFNQGNRFRAVYXSRFKKVSHRGVPQFSGYKNWVWKSPDPLFLKGAFFNQSGGQNEGKFGRVVLFQAKGGQFSELLPREAGGVNFRVGRKC

SEQ ID NO: 313162 - protein, 81 aa, Zea mays
  Clone ID: MRT4577_48662C.1.pep
CHMICRPVRSVKSCHYFVQEYGRGRFASIECVAPAWCSFDSCCGHRPIRRSGATEIIFAQTRRKDAGFPLMLWTIIQEAGN

SEQ ID NO: 313163 - protein, 252 aa, Zea mays
  Clone ID: MRT4577_48663C.1.pep
MDAFFSASSASAPYGYGAGGWSYDSLKNFRQITPAVQTHLKLVYLTLCAALASSAVGAYLHVVWNIGGTLTMLGCVGSIAWLFSVPVYEERKRYGLLMAAALLEGASVGPLVKLAVEFDPSILVTAFVGTAIAFACFSGAAMVARRREYLYLGGLLSSGLSILLWLQLAASIFGHSATSFMFEVYFGLLIFLGYVVYDTQEIIERAHRGDMDHVKHALTLFTDFVAVLVRVLVIMLKNAADKSEDKKRKKRS

SEQ ID NO: 313164 - protein, 249 aa, Zea mays
  Clone ID: MRT4577_48664C.1.pep
MPPIRLIRHFKNMIRLEQQDMINRFESKSDHLVRLGCLQVYLTLCAALASSAVGAYLHVVWNIGGTLTMLGCVGSIAWLFSVPVYEERKRYGLLMAAALLEGASVGPLVKLAVEFDPSILVTAFVGTAIAFACFTGAAMVARRREYLYLGGLLSSGLSILLWLQLAGSIFGHSATSFMFEVYFGLLIFLGYVVYDTQEIIERAHRGDMDHVKHALTLFTDFVAVLVRVLVIMLKNGADKSEDKKRKKRS

SEQ ID NO: 313165 - protein, 152 aa, Zea mays
  unsure (1)..(152): unsure at all Xaa locations
  Clone ID: MRT4577_48665C.1.pep
KRKEKRENTLKKKTQKKKKKENPEKKKKGKKNKKSPTTKKKKNPQQKKNXKPPKKKKKAAPPRKPKPKTPKPPPLLNKNKXRQTRPEKKQPQKTPKXKEINPTENRGGKSTHRQPVEHQEHQSNSPAGGKGPNPTTNEGIPRTQAAATTAPG

SEQ ID NO: 313166 - protein, 259 aa, Zea mays
  Clone ID: MRT4577_48666C.1.pep
MDAFYSTTASSTSSAPYGGYGGGGEGWGYDSLKNFRQISPAVQTHLKLVYLTLCVALASSAVGAYLHVVWNIGGMLTMLGCVASIAWLFSVPVYEERKRYWLLIAAALLEGASVGPLIKLAVEFDPSILVTAFVGTAIAFACFSCAAVVAKRREYLYLGGLLSSGLSILLWLQFAASIFGQSTSSFMFEVYFGLLIFLGYMVYDTQEVIERAHRGDMDYIKHALTLFTDFVAVLVRILVIMLKNAADKSEDKRRKRRRW

SEQ ID NO: 313167 - protein, 188 aa, Zea mays
  unsure (1)..(188): unsure at all Xaa locations
  Clone ID: MRT4577_48667C.1.pep
MASFGSDDHVPAAMAVNDLIEARDGVARLRILLLQLDEQRAAWAQLEIDAVLAKLSSAISALDASEVGRSRAAGPDGARPQRQQSGRSGGNKRKQGSSRSRSQRPSDKKITATLEDGHEWRKYGQKEIQDSPYPRSYYRCTHKADQGCNAKEAVQRCETDAXTYVVTYYGEHTCRDLSSIPLIHQARA

SEQ ID NO: 313168 - protein, 365 aa, Zea mays
  unsure (1)..(365): unsure at all Xaa locations
  Clone ID: MRT4577_48668C.1.pep
MKNVAKCDTWCELQNPANHRVFERKLRPKPSGGGHVCLGVTPHSPSIGLPPPRSSTRSQTNQQIHPSHMDAFFSASSASAPYGYGAGGWSYDSLKNFRQITPAVQTHLKLVYLTLCAALASSAVGAYLHVVWNIGGTLTMLGCVGSIAWLFSVPVYEEXSVRPPVIRRVVRSSLLRQLTQPKLSIAPSSLTLCCPVCARACVQRKRYGLLMAAALLEGASVGPLVKLAVEFDPSILVTAFVGTAIAFACFTGAAMVARRREYLYLGGLLSSGLSILLWLQLAGSIFGHSATSFMFEVYFGLLIFLGYVVYDTQEIIERAHRGDMDHVKHALTLFTDFVAVLVRVLVIMLKNGADKSEDKKRKKRS

SEQ ID NO: 313169 - protein, 99 aa, Zea mays
  Clone ID: MRT4577_48669C.1.pep
SLEPYPNVVRAFNNCYISRELSAFFPGHHASCYAVEYASNMSILNGLWLQEASSSWLSDPEECHGQLSPTLSCCSWLAAPSPSPCSLLLWRRLIRFLLT

SEQ ID NO: 313170 - protein, 144 aa, Zea mays
  unsure (1)..(144): unsure at all Xaa locations
  Clone ID: MRT4577_4866C.1.pep
CXXFAPXARGPRGXRXXAXGTKPFFFFFFFLFFFFFFFFFFFFPPRFALFKGHSPPTAGPPKRTQGRTQPWRKPGPGGPRGETTIPPQFQTQNHPGKKRETPGGPKERANPHKWLAPHPPLTRRKTLHARGIKKPANPRKKAVP

SEQ ID NO: 313171 - protein, 50 aa, Zea mays
  Clone ID: MRT4577_48670C.1.pep
ELSSETRVTWITRIADTVMLLIFSTSRSTTACCRPVLPERKLRVRHRTSG

SEQ ID NO: 313172 - protein, 94 aa, Zea mays
  unsure (1)..(94): unsure at all Xaa locations
  Clone ID: MRT4577_48671C.1.pep
SRVRVFXNQVAIQSSRLNSGQLAMGSRVEIDQTGDTRVCAYYAYVRHVRNRREMVIYFAQKALIAQFGTSWVSRSERRKVDIQRAVIRHIAWCR

SEQ ID NO: 313173 - protein, 43 aa, Zea mays
  unsure (1)..(43): unsure at all Xaa locations
  Clone ID: MRT4577_48672C.1.pep
CCRYAKSLPTTCCLHASTFVCQCAIGCTATSCASFXEGLNGRV

SEQ ID NO: 313174 - protein, 62 aa, Zea mays
  Clone ID: MRT4577_48673C.1.pep
QNIIFIHELETGKRLLEVNVLSGATRMSSSLLQSRSTTVLISLYVAGLPSLHLRTCFLFLYF

SEQ ID NO: 313175 - protein, 116 aa, Zea mays
  unsure (1)..(116): unsure at all Xaa locations
  Clone ID: MRT4577_48674C.1.pep
FYGTNRGRQTWFTTIWCNVLRRLHYWARHISTNKVLCLWXMVPTYSPAMAANXFYWVLCKXSGAPFPYPHGRSSEPPCLPLLGGLGPSPLPARPWRVFPLHRCAPGLNLFCRLRAT

SEQ ID NO: 313176 - protein, 79 aa, Zea mays
  Clone ID: MRT4577_48675C.1.pep
MATHRHCLPLLLVAAALALAAGPARAALGRRPGPAVGRLEPDPCLNQLDLPEPSRWAPGPAKPPKPGRHRLAVPRVVPR

SEQ ID NO: 313177 - protein, 68 aa, Zea mays
  unsure (1)..(68): unsure at all Xaa locations
  Clone ID: MRT4577_48676C.1.pep
LSVSAMSGRGKVGKGLFKGCAKRHLKVLRDIIQAXNEPGIRSXAQRAGXKRISGLIYEETRGVLKIFL

SEQ ID NO: 313178 - protein, 87 aa, Zea mays
  Clone ID: MRT4577_48677C.1.pep
PAEPNCERSGGGGRPLSDHHHRIHIHKERPRGALYHRPTEDCPADQITLTYESRPHTATITTLDDDPVPGPTFSLALTTSGPADRPQ

SEQ ID NO: 313179 - protein, 86 aa, Zea mays
  unsure (1)..(86): unsure at all Xaa locations
  Clone ID: MRT4577_48678C.1.pep
RNILPELHELHITDVAKIMTHWSESKAFREDYXKRILTSLNSDNVTXDVQMRNPDYTPIFIESHAPASATASEPISCKIVCKTSLG

SEQ ID NO: 313180 - protein, 98 aa, Zea mays
  Clone ID: MRT4577_48679C.1.pep
MKNYCFDNCTDIVLCRLLDASLNATTSPDCSVKMAYVLTNVSLTCMAKLRDERFICPAGTDSDAVTCLDIISSKQLPNAACNSLLFKLVMATLRNESS

SEQ ID NO: 313181 - protein, 53 aa, Zea mays
  Clone ID: MRT4577_4867C.1.pep
SIAFILFHLHLHIPLYTYYILSYTYTSSTTHSKYTRPIFYKTNKNHLNNRRPK

SEQ ID NO: 313182 - protein, 109 aa, Zea mays
  unsure (1)..(109): unsure at all Xaa locations
  Clone ID: MRT4577_48680C.1.pep
AANFLFFFLLFFFFFFFFLFALCRKNYRAFMSPDARGVDPCRPCQSFRRTGVLAACPXGRXPGGGVGGLRVRPGCSAGALWPALWRGALPLGLGGAGGGRGGGGGGRGG

SEQ ID NO: 313183 - protein, 80 aa, Zea mays
  Clone ID: MRT4577_48681C.1.pep
NDVYDNVSHAFVNILRDEGPSDLYPGLTPTLIGVVPYAGCNFYAYETLNRVYRLATGRRACADVGPLATLLIWSAGGAIF

SEQ ID NO: 313184 - protein, 77 aa, Zea mays
  Clone ID: MRT4577_48682C.1.pep
KFLTALGGQGMDQTDLKILKPAKRDLFFWVTTNHGYSGLNGPGGFSFGGFEPKGTGSCFSFAKWTLQKEQTTREFRT

SEQ ID NO: 313185 - protein, 55 aa, Zea mays
  unsure (1)..(55): unsure at all Xaa locations
  Clone ID: MRT4577_48683C.1.pep
GRKKKKSTRRPHQPRTRRQGQVSTGPSRTCSRGSLISLCPKPPKEXANAGRPGCG

SEQ ID NO: 313186 - protein, 123 aa, Zea mays
  Clone ID: MRT4577_48684C.1.pep
GEEVTEAPNQSPQGKPDTELDGEARQTKRERDREKAKRSRALWRRTHRNGPRCEVTTKRRRAIMPTPTGRRPMEPKQGARPVWERRPTADKGRGDAQAGERGQGPQRRPTLGNVQGFLQSISL

SEQ ID NO: 313187 - protein, 46 aa, Zea mays
  Clone ID: MRT4577_48685C.1.pep
TCCTTLNNSRIIREGASWRELCILLATTTTAIQTVTCCLPLANFEH

SEQ ID NO: 313188 - protein, 114 aa, Zea mays
  unsure (1)..(114): unsure at all Xaa locations
  Clone ID: MRT4577_48686C.1.pep
RQREGGGGGGTRRAGGPAKGDKESTXKGXRGSXAPXGXDXDDAATXAGGDEDTDGEGRATEEQXDTPXTDTDASXNXXXRXPXXNKGXANTEREXETHNHXGXQPPARGTQEHQ

SEQ ID NO: 313189 - protein, 79 aa, Zea mays
  Clone ID: MRT4577_48687C.1.pep
LEQLPKDYKNGALLTGELKKLAIEALQKVVGDFQERRAKVTDEVLESFMKPRKLHWGGNPNPKPKADKETKELPIQTKA

SEQ ID NO: 313190 - protein, 91 aa, Zea mays
  Clone ID: MRT4577_48689C.1.pep
MSSPARSTISAAEDVADSIDALYRKDEALAELKSEVMEALQREVRSLDEDNWMFAAPRSRINLVSRPGAYLPKQNGKLSELGQASKKTRNF

SEQ ID NO: 313191 - protein, 210 aa, Zea mays
  Clone ID: MRT4577_4868C.1.pep
DLSVLGPWARKELRWLKRKDLLETMAKNIPAGAIRLGCHVTAIHPSDPGAVLTTTPAGGGGGVIRAKVLIGCDGSNSVVAKYLGMSPSKPTPPRTYLRGFTTYRHGHPFGDRFLRLRGRRFFVGRSPMTDTRVSFFVACHVPSAATSSSSRVVDARDTRHAVLQKLRDQRCPAEVVEMVRDADPDSLNVVTRVWYRPWQVALAAFRKGAV

SEQ ID NO: 313192 - protein, 57 aa, Zea mays
  Clone ID: MRT4577_48690C.1.pep
GGTKPQPNRGEHGRLKQEPNVKTVFGSSRKLGGGESALQELNILQGLMQKRLRFLKT

SEQ ID NO: 313193 - protein, 85 aa, Zea mays
  Clone ID: MRT4577_48691C.1.pep
MSSPARSTISAAEDVADSIDALYRKDEALAELKSEVMEALQREVRSLDEDNWMFAAPRSRINLVSRPGKKGNTKIATDGFLISFF

SEQ ID NO: 313194 - protein, 38 aa, Zea mays
  Clone ID: MRT4577_48692C.1.pep
LGGGLQPLLEMRVPDVHDLVVRPPGQPGDDGGQARADR

SEQ ID NO: 313195 - protein, 44 aa, Zea mays
  Clone ID: MRT4577_48693C.1.pep
CAITRSRCCRPCNLCINIGFAGRFHICVSDIPCNQEKKLNLGSR

SEQ ID NO: 313196 - protein, 74 aa, Zea mays
  unsure (1)..(74): unsure at all Xaa locations
  Clone ID: MRT4577_48694C.1.pep
ADHAXGNXKTLCFLRLFLKGXLHSHGECYIIYLSAIHHVYLTGNTAPVSRISLPLQGHVPSLCFSPTRCDARGS

SEQ ID NO: 313197 - protein, 57 aa, Zea mays
  unsure (1)..(57): unsure at all Xaa locations
  Clone ID: MRT4577_48695C.1.pep
MAADCNRHSNRTXSLLLPPPVSXQERVAVAGSVHAKYVAANFRMLMFMNHHGNTCET

SEQ ID NO: 313198 - protein, 366 aa, Zea mays
  unsure (1)..(366): unsure at all Xaa locations
  Clone ID: MRT4577_48696C.1.pep
MLAGSRPGARPDGLVDRQREPPSSRQASAIAVPLLLAQLLRYRSGPPGFRDVPAFRASSSAPLSSQTADRAASHRHDRERKHVRCRKLKLEEAPVPDRWAAQALLSGRQLLGRPVQSAVSRSSARKAPFVVRASSSPPAKQGADRQLWFASKQSLSYLDGTLPGDYGFDPLGLSDPEGTGGFIEPKWLAYGEVINGRYAMLGAVGAIAPEIFGKMGIIPPETALPWFKTGVIPPAGTYNYWADSYTLFVFNMALMGFAEHRRLQDWYNPGSMGKQYFLGLEKFLAGSGDPSYPGGPLFNPLGFGKTEKEMNELKLKEIKNGRLAMXLAILGYFIQGLVTGVGPFQNLLDHLADPVNNNVLTSLKFH

SEQ ID NO: 313199 - protein, 269 aa, Zea mays
  unsure (1)..(269): unsure at all Xaa locations
  Clone ID: MRT4577_48697C.1.pep
MAAQALLSGRQLLGRPVQSAVSRSSARKAPFVVRASSSPPAKQGADRQLWFASKQSLSYLDGTLPGDYGFNPLGLSDPEGTGGFIEPKWLAYGEVINGRYAMLGAVGAIAPXEIFGKMGIIPPETAXLPWFKTGVIPPAGTYNYWADSYTLFVFNMALMGFAEHRRLQDWYNPGSMGKQYFLGLEKFLAGSGDPSYPGGPLFNPLGFGKTEKEMNELKLKEIKNGRLAMLAILGYFIQGLVTGVGPFQNLLDHLADPVNNNVLTSLKFH

SEQ ID NO: 313200 - protein, 254 aa, Zea mays
  unsure (1)..(254): unsure at all Xaa locations
  Clone ID: MRT4577_48698C.1.pep
MDGRKQVVLYPSPGMGRLVSMIELGKVLAARGLAITIVIVSLPFVDTSARGPFLAGVTAANPSISFHCFPQVEVPPLDSDHPEAVTYEVAGLSIPHLRGFLAGASSAVLVVDFFCSIALDVAAELGXPRGIIVNTFRSLEPRAVDAISAGLCTPPGLPTPPVYCIGPLIKSEEVGVKRGHECLAWLDMQPTASVVFLCFGSLGVFDARQIREVAIGLEASGKXFLWVERSPPNDDPGKKVEEPPEPDLDALPPG

SEQ ID NO: 313201 - protein, 68 aa, Zea mays
  Clone ID: MRT4577_48699C.1.pep
SSFGQTCLPHLLKAGSRTSDSEISWAWRAGDHVLICGLQCPLCALLFSFVGISSIARGTVPWGRKKKQ

SEQ ID NO: 313202 - protein, 99 aa, Zea mays
  Clone ID: MRT4577_4869C.1.pep
MAESPSKIESMRKWVVEHKLRAVGCLWLGGISSSIAYNWSRPNMKTSVKIIHARLHAQALTLAALVGSACVEYYDQKYGSSGPKVDKYTSQYLAHSHKD

SEQ ID NO: 313203 - protein, 192 aa, Zea mays
  unsure (1)..(192): unsure at all Xaa locations
  Clone ID: MRT4577_486C.1.pep
MEEMGKRAVRTVRVRNISDLATEREVREFFSFSGEIEHVDIRFDTVSSGRTAYVTFKDPKALEIALLLSGATIVDQIVNITPAEDYIYIPVTEQQLMVHEVTSRSSASNAELEYSSEANVSPNSRVYVSKAHDVMTNVIAKGSAMRQXSPRRIEYIDXEHXFTANASARINSVCKRGGLSEKKTMGYSVAMK

SEQ ID NO: 313204 - protein, 104 aa, Zea mays
  unsure (1)..(104): unsure at all Xaa locations
  Clone ID: MRT4577_48700C.1.pep
RGNIMNEWDELWYLAPTGLILGPTKIMTIQGEPGAAIRGKNGTRGXITANKTGQALTXSSYDEPMTRRSSATMVYGIGSNALPHLNRACDYYVPYGMHVDNNGI

SEQ ID NO: 313205 - protein, 236 aa, Zea mays
  unsure (1)..(236): unsure at all Xaa locations
  Clone ID: MRT4577_48701C.1.pep
VVGGCWLLKAATRARGRPGGARHGRGRGALLALLLRPPAGLRRHRLPPHPPLPGLRRRGASSSATPSSATASGQPAAAASSVNSRQEGGGGGAXRRLAWREVEALTGGFDESAVVGRGGSSAVYLARLLDGSPVAVKVHRWCGGERRLRAFRQELDLLRRLRHPNIVALLAYSDDHEEEGALVLEYLAGGTLADALHGTAPAPLPWAQRMRALHDVACALEHLHCGGGGGTSTAVV

SEQ ID NO: 313206 - protein, 84 aa, Zea mays
  unsure (1)..(84): unsure at all Xaa locations
  Clone ID: MRT4577_48702C.1.pep
MVSIPATTFADILSVLVCVAADTAEDNDLLDYVIQGRVYXETXRVGLVTNATEYIAGSKERLFCKHPRTGKLERSYDGLDDGNG

SEQ ID NO: 313207 - protein, 38 aa, Zea mays
  Clone ID: MRT4577_48703C.1.pep
TRVRSTPHTYTPSAKPPATKPPTIKLSPPTYTPSRKPP

SEQ ID NO: 313208 - protein, 469 aa, Zea mays
  unsure (1)..(469): unsure at all Xaa locations
  Clone ID: MRT4577_48704C.1.pep
WHVQNRYIPFXLNELDARFEEMDFKXTRFQSIIHHPLTELEFETAWSMMLEDFHLHDNITLNKMYGIRKDWXPAFXKNDYCGLMLSTQCSESMNKLVKSAHVDANTPXLHQFAKQMMKLLHNRKMKESKEAXKHGEYKTVMKYIYILIXCHLIXLYTTQGQKETNTLYMFEIRVARAYTRAVMNKFQESLKYATAFKIMHDQEGGANDWVVQHTTRSKKIVWGQHQFKVTADEESGKYTCECKHWEHTAGNDRALAVMDELLEVLSRLETDIEVEETCGTSGGDGIQDDDEDNRDIKKDGEFDERNNKEIQDVSNIXTGCGQCSNTYTDTSIRRGSRXMNESGDNEQSDHARKKLDFAVDGISLARPNNSKPKGRTIKGSEQKVIKLGAKGTKKMTRKCQKCGIADGHNSRTCLSMEENRLRLASLAGRKRGRSPGSRNKGGSKAPDWNETTTSKKHAIDFDSSESDSD

SEQ ID NO: 313209 - protein, 178 aa, Zea mays
  unsure (1)..(178): unsure at all Xaa locations
  Clone ID: MRT4577_48705C.1.pep
MPSAIAIKKIDGKPGKVYYPLEKITIPAPAPKDTEAVITLTAAALKHRDLFIRQHLYPGTTFGVPLLADGVGVVTSSGASSTAQQWLNKRVILNPGTGWKDAPDGPEAPTGYAILGGTKANPAGTLAEHIVLDVSELEECPAHLSDAEAAALPLXXLTAWRALXRVKCGENASAGRNI

SEQ ID NO: 313210 - protein, 98 aa, Zea mays
  Clone ID: MRT4577_48706C.1.pep
TEGRVLTALGTHLQGQLLYPFLSVLHMSTEHQFQHKNTQPWLSAGHIDATTPMGHNRRKPTESRKRPRAGSRLSKGLDRTYIRRGTTTYTAFLKKLTP

SEQ ID NO: 313211 - protein, 37 aa, Zea mays
  Clone ID: MRT4577_48707C.1.pep
IIAPYPLMKILQNCRCDSNSESPTLSLLFISSVYMTS

SEQ ID NO: 313212 - protein, 75 aa, Zea mays
  unsure (1)..(75): unsure at all Xaa locations
  Clone ID: MRT4577_48708C.1.pep
MVNGRTVQRVMLYLRITILGYKRFNSNQCXTTSLVHIEELNTKEDFACYTVXRMAYIYRAKTKSSETRYRCIWCK

SEQ ID NO: 313213 - protein, 221 aa, Zea mays
  Clone ID: MRT4577_48709C.1.pep
RGDCGELRRLGPEALAARDREGRTVLHAVAAAGEAEAVAVLVDMGADTSAVDARGRTPLDVARDKGYQEVVDVLERWELVMTAARRGDLGSLESLLSKRAGVRGRDQYGLTALHLAAIKGHGDAIALLAGPGCMDVECEDVEGHRPLHLAVEGGHAEAVELLLDMGADANARTRRGATPLQMAEAMGYEAIAQLLCARGAEVAAASALCAASSSSSSISCA

SEQ ID NO: 313214 - protein, 80 aa, Zea mays
  Clone ID: MRT4577_4870C.1.pep
TLCCRCCRPHNCFCCRPGVFNKTPIAAVLIKHFKCYPACFVSVFMSINGGRMLVFVLQTGPQEKNPPALVGAALLKCPPG

SEQ ID NO: 313215 - protein, 43 aa, Zea mays
  Clone ID: MRT4577_48710C.1.pep
KIEIFIEYIVSTKRIHFQLVQQINMLQNLPYSNAKLQKANVYT

SEQ ID NO: 313216 - protein, 233 aa, Zea mays
  Clone ID: MRT4577_48711C.1.pep
LQLVPPRGSLMPSDGRSFFPASSLLQRAHLPQAPARSHGTPASWLACARVSSPLLVARLLHPWSAPCVGLPCKLSGAHLPGTPGSPVRAPPRQWPPVESLCPCSDGARPSLSAPSSYFPWAPSSRGSRSSSSGGRSAPPPEPNRAAETTLPWRHSPAVVCPCSAPSSSPQRPAVAQLGVSSIHLQLVESPCFSLPILCSRAAPVGHAPSSLVAASCFLVSAPLPWRLPSLATV

SEQ ID NO: 313217 - protein, 65 aa, Zea mays
  Clone ID: MRT4577_48712C.1.pep
NPLMINERLGPVGFLFFRAHMFGIRSKKGLCFVFVSEVGNGGTPADNLGAGSGGLEGKSSNVLSG

SEQ ID NO: 313218 - protein, 82 aa, Zea mays
  Clone ID: MRT4577_48713C.1.pep
MSDSDDEPITLSAHALAALKSFEAERDEHQAKFQKLKDEAESNSLLSIDTFQEDWNESQFWYSEETANTLATELLRDATSDM

SEQ ID NO: 313219 - protein, 112 aa, Zea mays
  Clone ID: MRT4577_48714C.1.pep
HYYMTMLLIYFLIFYGPNAIYSLKYVPTFLVHIFILYIIKIYNLCSKLDLRVVAREPEQAEPDLRARNATEPSLARLVSSPSCRVQPAGMCSVALLSSRSSAAPRQSDRNRW

SEQ ID NO: 313220 - protein, 244 aa, Zea mays
  Clone ID: MRT4577_48715C.1.pep
RPGFHADELAGLLVGIQDKFEIENFQDLRVQGMVALVISQPKTMAPWLARTFFEGDYSLYQRTSVLITLGLSARELAGFATSQYESAAAFPSKRLPEKMEQLYIGPSGENKALPSSQLKALPANALDSISQSLTSEFLAPLAAEAADANTGPDVLKLQTFTARYKSKTKAKPSRPCYPQHDSCPSRYIFLLAARCSLPSCSSLCETHHSQPRTSGALSTNTGYHSCRRTFDTFPAATYLNCGIC

SEQ ID NO: 313221 - protein, 77 aa, Zea mays
  Clone ID: MRT4577_48716C.1.pep
IVIEISNLFFTVFWRNAQADVPSARRLRAQLAFKNSMVRGILQFTPGIALCYVLHPSESRDIRCRTRVRPRVRPRVR

SEQ ID NO: 313222 - protein, 48 aa, Zea mays
  Clone ID: MRT4577_48717C.1.pep
VCPFVESARFRLRGFIELPLVKSMFLGAPIFSPGDIMFQNGGKTINIA

SEQ ID NO: 313223 - protein, 115 aa, Zea mays
  Clone ID: MRT4577_48718C.1.pep
GLKFSESPKSGQKFQSFSFRKPKSDSTSCICKLHRYTIYSEAASSSIKLVYRRRRSNTGYIIHGVITRSSGRTRTKALRGLFLRCAAPMRGRASWAFSPPLGRGRRGTSAKFLHG

SEQ ID NO: 313224 - protein, 55 aa, Zea mays
  Clone ID: MRT4577_4871C.1.pep
PRVRGRVGNRLKAMPRVDSEGAMCGATFKVDTFTKINSMPRVGSAANWAAWDEAI

SEQ ID NO: 313225 - protein, 131 aa, Zea mays
  unsure (1)..(131): unsure at all Xaa locations
  Clone ID: MRT4577_48720C.1.pep
PTRPPTRPGTRGYLAPEWYRGAGPVTVKADVYSYGVVLLEIVTCRRSMELEEAGEERTLMECAHEWLVRGEVWRVVGGDDAVDVTEVERAVKVAVWCAXAEPQARPDMRSVILMLERLVEVPFPPPPPAFL

SEQ ID NO: 313226 - protein, 157 aa, Zea mays
  unsure (1)..(157): unsure at all Xaa locations
  Clone ID: MRT4577_48721C.1.pep
VRARIPLLSAVRSFARYSWRGSLCIRYPATGRKLRHLRGHQVERVDKCGKGVLGGGHDEALGYDGGALRSVGRPRRRVPHTGARPVRWFRSPSTPDPRCRPGRPSKRAMMEIRPCTCATRRPEKALPGRVHXRHRSSPGRPRTXDIRCGHVNIASGT

SEQ ID NO: 313227 - protein, 198 aa, Zea mays
  unsure (1)..(198): unsure at all Xaa locations
  Clone ID: MRT4577_48722C.1.pep
MAACRGFFECLLRLLNFILTVAGLAMVGYGIYLLVEWMKISEDGIGGASTAEVLVSGRPLLGAVILGDSFLDNLPKAWFIYLFIGVGTIVILVSLFGCIGAGTRNTCCLCFYAFLVILLILAEAAAAAFIFFDHGWKDVIPVDKTHNXDVMYDFLKENWEIARWVALGVVVFEAVLLLLALAVRQXEQTAEXDSDDEL

SEQ ID NO: 313228 - protein, 61 aa, Zea mays
  Clone ID: MRT4577_48723C.1.pep
CCQAGGLIANEPTHSEHNLVECALLYLTHNLKITRILDTMQESKHNLNSAQTITFLGLECL

SEQ ID NO: 313229 - protein, 46 aa, Zea mays
  Clone ID: MRT4577_48724C.1.pep
PLVRLRTRGIRGCQPNDIKHMISTAPLTADGTAIAASKDNTAAAII

SEQ ID NO: 313230 - protein, 87 aa, Zea mays
  Clone ID: MRT4577_48725C.1.pep
GISLVSCSPPSLNAEAQPAADSASTSARTPPYKKRPRRRSATGRTQPHSWLLLGPRRDMRHYRRRGRKTTGRGWGMIAQPCGVEAER

SEQ ID NO: 313231 - protein, 212 aa, Zea mays
  unsure (1)..(212): unsure at all Xaa locations
  Clone ID: MRT4577_48726C.1.pep
NSSSRGNKIITISAAQKTFRPRHLAFYNDRVTVLHACFLLLVNKYAFLVILLILAEAAAAAFIFFDHGWKDVIPVDKTHNFDVMYXFLKENWEIARWVALGVVVFEAVLLLLALAVRAMNKPAEYDSDDEIIAIGRSPTIRQPLIHTQNVPATGVPVPTLDQRASRNDAWSQRMREKYGLDTSQFTYNPSDPSRYQQNGTPRAEERSRCTIM

SEQ ID NO: 313232 - protein, 279 aa, Zea mays
  Clone ID: MRT4577_48727C.1.pep
MAACRGFFECLLRLLNFILTVAGLAMVGYGIYLLVEWMKISEDGSSGGLTAEVLVSGRPLLGAVALGDSFLDMLPKAWFIYLFIGVGATVFLVSLFGCIGAGTRNTCCLCFYAFLVILLILAEAGAAAFIFFDHSWKDVIPVDKTHNFDVMYGFLKKNWEIARWVALGVVVFEAVLFLLALVVRAMNKPAEYDSDDEIIAIGRSPTMRQPLIHAQNVPATGVPVPTLDQRSSRNDAWSQRMREKYGLDTSQFTYNPSDPSRYQQNGAPQAEERSRCTIM

SEQ ID NO: 313233 - protein, 212 aa, Zea mays
  Clone ID: MRT4577_48728C.1.pep
NSSSRGNKIITISAAQKTFRPRHLAFYNDRVTVLHACFLLLVNKYAFLVILLILAEAAAAAFIFFDHGWKDVIPVDKTHNFDVMYDFLKENWEIARWVALGVVVFEAVLLLLALAVRAMNKPAEYDSDDEIIAIGRSPTIRQPLIHTQNVPATGVPVPTLDQRASRNDAWSQRMREKYGLDTSQFTYNPSDPSRYQQNGTPRAEERSRCTIM

SEQ ID NO: 313234 - protein, 279 aa, Zea mays
  Clone ID: MRT4577_48729C.1.pep
MAACRGFFECLLRLLNFILTVAGLAMVGYGIYLLVEWMKISEDGSSGGLTAEVLVSGRPLLGAVALGDSFLDMLPKAWFIYLFIGVGATVFLVSLFGCIGAGTRNTCCLCFYAFLVILLILAEAGAAAFIFFDHSWKDVIPVDKTHNFDVMYGFLKKNWEIARWVALGVVVFEAVLFLLALVVRAMNKPAEYDSDDEIIAIGRSPTMRQPLIHAQNVPATGVPVPTLDQRASRNDAWSQRMREKYGLDTSQFTYNPSDPSRYQQNGAPQAEERSRCTIM

SEQ ID NO: 313235 - protein, 268 aa, Zea mays
  Clone ID: MRT4577_4872C.1.pep
MLAIFQKQVAHAPQELNSPRAGASPSKPRNPDEILRDFHAAHPAAAFSASFGGGAALACVGPSSATAAGTGTDTYQRMFCGLDDIYCVFLGRLDNLSGLIRQYGLCGRSTNEAMLVIEAYRTLRDRGPYPADQVVKDLAGAFAFVVFDSRSGAVFAALGAADAGGVPVPVPLYWGVAADGSAVISDDRDLVKRGCGKSYAPFPAGCMFHSDGGLKSFEHPMNRLKAMPRVDSEGAMCGATFKVDTFTKINSMPRVGSAANWAAWDEAI

SEQ ID NO: 313236 - protein, 74 aa, Zea mays
  unsure (1)..(74): unsure at all Xaa locations
  Clone ID: MRT4577_48730C.1.pep
SSPSSGLGAEPTCRVCLEWLEAKXEVRRLGNCTHAFHTRCIDPWIDLGEVTCPLCRSHLLPRRRAGLLGMARLG

SEQ ID NO: 313237 - protein, 95 aa, Zea mays
  Clone ID: MRT4577_48731C.1.pep
QGLKPAIFRWGGPPQPIHLFFSQQLTTRKPPTRPPWSHRHRARAARVYHALPPQTKNTYHPYYTIIAWPGHSDRSHGKTVYYKICMMLISVFFLP

SEQ ID NO: 313238 - protein, 95 aa, Zea mays
  Clone ID: MRT4577_48732C.1.pep
GPRTGGRKERGARTLTAPAGTVSGAAQGAGPGAAPTLGTLLPGFISAAIPIRLEWKPPLSRNSGSLVGPTYGVAPALKKYYPREIFLETMKKKVV

SEQ ID NO: 313239 - protein, 106 aa, Zea mays
  unsure (1)..(106): unsure at all Xaa locations
  Clone ID: MRT4577_48733C.1.pep
KVFFKPKVFLLYFPPNGSLCLAIFKKQWSPVLPIFKVRLSIWSLVAGPNPGGPFVPEIAPMYKTARPKXKFPAPTWTQKYPMGLRTFFCLFGGHCSLGFVFGGRYP

SEQ ID NO: 313240 - protein, 128 aa, Zea mays
  Clone ID: MRT4577_48734C.1.pep
KSNSTPHLVTIQVSQPSQEHQQVLLHSAHHHHQDLPIQQTPSTSHQPACSNTLQLVNAPLESHPKATPTRSQSAAKWAMNSQNKAAYAAGKHPVNLRPIATVTARDNKAKSLAERLGGVAHMQAPSQH

SEQ ID NO: 313241 - protein, 103 aa, Zea mays
  Clone ID: MRT4577_48735C.1.pep
RNYAIACSVDSNYSRACYSCSYWGGALLKNNITNVVACFPLNVCSETWAITSLFTGKFIYCFKNPTSPYIDMGIRGLKHMSSLLSIQVMDVIYCSIVLVLESE

SEQ ID NO: 313242 - protein, 158 aa, Zea mays
  Clone ID: MRT4577_48736C.1.pep
STTGSGPMLLRTGPHARARVPNGSTARPRVRSGVGRTPGSPEARGGGALSYFVLGQIASLPTVSRAHLLRPPPDALFCLARPSWQGRADRSHFTLLLIVLAGWLRYSHCCGCWARHQGRTSICWVRALPGSASGAVGGGGSPDPRLRLGRGGGCVRPR

SEQ ID NO: 313243 - protein, 84 aa, Zea mays
  Clone ID: MRT4577_48737C.1.pep
SSTTRRVHSLQRSSTSHGNPAVLNNTLLHLPVVGNAPTYLTTMCNRLTSLTTSWANPVLLAQCFINNDLRTLWSYNTTTVLNHW

SEQ ID NO: 313244 - protein, 50 aa, Zea mays
  Clone ID: MRT4577_48738C.1.pep
KNSLSLPKNSSQLPLKIPKTIPGPKKCHGAWHSLSKVELKAPPSREALSG

SEQ ID NO: 313245 - protein, 71 aa, Zea mays
  Clone ID: MRT4577_48739C.1.pep
VLTHGAQSVRFTPGARRSGRRAWNSSMQTLKVLLVVVFSFVVKLRPARVVIPLFTWSVNPSNMVGPSLAST

SEQ ID NO: 313246 - protein, 72 aa, Zea mays
  Clone ID: MRT4577_4873C.1.pep
GRAHPSATPFRPQCIINTDIFYLSQPLFASKILINAQGINIIKAKTSKKVWALNLVKLPRILKEGFIILPIF

SEQ ID NO: 313247 - protein, 75 aa, Zea mays
  Clone ID: MRT4577_48740C.1.pep
ATQTIWVSLLLKIQKKGGLFGGKTALKVWCPPGRLPVFITEKIFGGKTRIQEPLKWTATRGSLGPILYWGPPYPL

SEQ ID NO: 313248 - protein, 74 aa, Zea mays
  Clone ID: MRT4577_48741C.1.pep
LSGNAISKWKKNTRPKEKNKVHTKQTANVRKVLRQPAVKSQGSGVATWPCPVPLPCARLSGHQCPLETVSIGSK

SEQ ID NO: 313249 - protein, 687 aa, Zea mays
  Clone ID: MRT4577_48742C.1.pep
MTTSAADDGSSLAPTITEGETTADAGAGAGVECVEGKEMKVGAAAPVEEPDKEVAREEDPGDDDDYEEEEEEEEETETANGKEAELMEPLAALKPGEEVKPEKLEGEKEELDEEPEASEEDPEEVEELKEEGDGIAEEGLVDGSEANDDKDADQLSSGSDSGGSRSRGMQNSELAGSLEIFDHDLPQDCVQEDIAMAFSQSGEVKSVRIIKNSSTGKNQDIAFVCYTSIEAAKKVLAEFKEGIVIKGKIVRVSACQDNNTLYLGNICKGWTRDQVLNTLKSIGIQECEISFPSYKGGSRGFAFLKFTSHYYARAALRRLMKSDAIFGTDRSAKVSFYRTPTKSSKRLIQAKIVYLEHVPLSWDENKVKEYCEEYGEILKADVFQISKNMENETISFVEFSSRKGALACVTGINKANIVDGSFKLCAYLAWPKSASKVNSAAPSNAATATEKDKTHTEKILVDIDLQHKFQKGDKSKLTSQTKEAIMKKKKSSKLPNDNDTKLTSQGAAEVPQTSKSSEGKRKVGKNKHASVYQKPLKKAINNRNVDESQLTHRSAAVLQTSNTSKGKRKASENRSLYLNEKALKKARGNSNLGGSSRSKSYASDLEPHAGFISPAIRDNGSDAYNRQRTARYDIHPIDVHPYARAPPSAYSGYKSHAGYEAANTYEYAGNRAPTPPSGSYIPRRGHY

SEQ ID NO: 313250 - protein, 116 aa, Zea mays
  unsure (1)..(116): unsure at all Xaa locations
  Clone ID: MRT4577_48743C.1.pep
VGRDTVNDVKGYYQDXEGIPSDQQRLIXTPKQLEDGHTXLRNYNNPEETTLPHLCVRSTNGXIIEPYMKALARTDNQYKKICRKCYARMHPRADNCXRKNKCGDRNQLKAKNKINN

SEQ ID NO: 313251 - protein, 80 aa, Zea mays
  Clone ID: MRT4577_48744C.1.pep
AEIFLSFTFQLAAGTTAVHAALYHHHHRLLLAAEPALVCGVQRITYFGPPSMDTIIAMYYVGTPPAPASIDLHLIRVQHC

SEQ ID NO: 313252 - protein, 86 aa, Zea mays
  Clone ID: MRT4577_48745C.1.pep
KITGCLLACLTQDTVTREQSRPPPTRRITHTIEHRVIHSITFLQLAALHCAVPLFPPLKRAIFGTLNKVRAAADKKLSTRNYPAGP

SEQ ID NO: 313253 - protein, 42 aa, Zea mays
  Clone ID: MRT4577_48746C.1.pep
TWITIDSAPLKPETTLHYCYFIDDLVSRDFIDNMSAAISHSD

SEQ ID NO: 313254 - protein, 48 aa, Zea mays
  Clone ID: MRT4577_48747C.1.pep
RIEHNSSCKLLIEEVRSAKLGPAAELNRRPAKPLGESTGCCPNSIENT

SEQ ID NO: 313255 - protein, 81 aa, Zea mays
  Clone ID: MRT4577_48748C.1.pep
IIIFKDKTCHLYTPFEPLINFSSPKVQKEYYRRIAKWSHRTISRFEPLEKRRIYQYNHVALLLFFHDFDRSPTHNGFYADI

SEQ ID NO: 313256 - protein, 108 aa, Zea mays
  Clone ID: MRT4577_48749C.1.pep
LSVLCQGLVKPACSYCALCAGFLLYRVFCLLPQDLCCDPAMLLFFSRWLLCLLICFLSLSCVRVFLLFLVLVVMVLLLRCHLSPHGPGLPDAPSVFPGSPLWCVLRLV

SEQ ID NO: 313257 - protein, 145 aa, Zea mays
  unsure (1)..(145): unsure at all Xaa locations
  Clone ID: MRT4577_4874C.1.pep
RRAPATPGMFIGLLPLFDRAGHDSAETIRRALHLGVNVKMITGDQLAIGXETGRRLGMGTNMYPCTTLLGDTNTTANGMHIDELIEKADGFAGVFPEHKYXIVKRLQHRNHICSMTGDCVNDAPALKKADIGIAVDDATDADRSA

SEQ ID NO: 313258 - protein, 49 aa, Zea mays
  Clone ID: MRT4577_48750C.1.pep
TGWTGAPKTLSFKREGAPPGGLPLEGSGLGFQQQRAGGVGPFHLPGAHF

SEQ ID NO: 313259 - protein, 237 aa, Zea mays
  unsure (1)..(237): unsure at all Xaa locations
  Clone ID: MRT4577_48751C.1.pep
YPRVRPCGCIEEALQLFXGMSEKDVISWSTAIGGLAAHGRAREAVRLFEVMDREGRVMPNGITFVGLLSACSHAGLVDEGLRYLDQMKEDYGVEPGVEHYGCVVDLLGRSGRIQRALDTIRGMPVPPDGKIWGSLLSACRSHGDVETAVVAAERLVELEPGDVGNLVMLANVYGAAGRWGEVASTRNEIRSRSTRNTPGCSMIEVDNVVPEFVPLQDPGPELGGISTPLDFLASNLA

SEQ ID NO: 313260 - protein, 113 aa, Zea mays
  Clone ID: MRT4577_48752C.1.pep
ITLVFFQELPKFFFGKSTITGETPNPTIINRRSLLNRSKTLPPVPVFSPPQTMLGARGKNFSWEETNHFLTNPPKIIGRSHITSIVRQPNKLVFRSRGKPSETAPRLKPHNGA

SEQ ID NO: 313261 - protein, 129 aa, Zea mays
  unsure (1)..(129): unsure at all Xaa locations
  Clone ID: MRT4577_48753C.1.pep
MKVLISALALLTLATSATSSTSGMXGCQTPPFHRPPPFYMPTAVYLPPXRSHRRHXYRTQPPELIPCQQFXSYGVDHVCRPFLGHTRXFQTHQNKAAETPYRSPQSQALKKQCCHQIRQVEPLHRYQAT

SEQ ID NO: 313262 - protein, 102 aa, Zea mays
  Clone ID: MRT4577_48754C.1.pep
FPCVARELDAHLPTSSVRAPPMAAFSSSLWTRSSFRRARPSSPCMTATSSFPAWPCPVARSLASCHSHSFLSLSAKSPRLANAPRHRLSISLGVVSSSRQVT

SEQ ID NO: 313263 - protein, 51 aa, Zea mays
  Clone ID: MRT4577_48755C.1.pep
YTDLGFIIWCQCHYEQSHQSSGIIVVSQSDMVRQGIHCICSRLDARVLYDR

SEQ ID NO: 313264 - protein, 149 aa, Zea mays
  Clone ID: MRT4577_48756C.1.pep
MASGAAASSALLLLVAALVATSARAATFTITNNCGSTVWPAGTPVGGGTQLDPGQTWTVDVPAGTQSGRVWWQPPMTLAEFTIGGGGSQDFYDISVIDGYNLPMLFSCSTGVTLNCGGPSCPDAYLFPSDNTKTHACSGNSNYQVTFCP

SEQ ID NO: 313265 - protein, 53 aa, Zea mays
  Clone ID: MRT4577_48757C.1.pep
PRVRPRVRIYIYQYYIITHIYNYIYRSCTCKYAGGPVGTTRSARTRLVDLIVD

SEQ ID NO: 313266 - protein, 72 aa, Zea mays
  Clone ID: MRT4577_48758C.1.pep
GKECKGHGDARGWRHGGLRRRQGHRRAGRQAAEEKTQEATGKAADYTKQAAANVKGLTAGAAGTTMEYANRR

SEQ ID NO: 313267 - protein, 146 aa, Zea mays
  Clone ID: MRT4577_48759C.1.pep
MASGAAASSALLLLVAALVATSARAATFTITNNCGSTVWPAATPVGGGTQLDPGQTWTVDVPAGTQSGRVWGRTGCSFNGGSGSCQTGDCGGALSCTLSGQPPMTLAEFTIGGGGPSCPDAYLFPSDNTKTHACSGNSNYQVTFCP

SEQ ID NO: 313268 - protein, 87 aa, Zea mays
  unsure (1)..(87): unsure at all Xaa locations
  Clone ID: MRT4577_4875C.1.pep
MRGVLVALALLALAASATFTHTSCGCGCHPPPPVHLPXPVHLPPADHLPPPXHIPPAVHLPTSVQLPPSVHVPSAVYLPSPPCHYPT

SEQ ID NO: 313269 - protein, 177 aa, Zea mays
  Clone ID: MRT4577_48760C.1.pep
MASGAAASSGLLLLVAALVATSARAATFTITNNCGSTVWPAATPVGGGTQLDPGQTWTVDVPAGTQSGRVWGRTGCSFNGGSGSCQTGDCGGALSCTLSGQPPMTLAEFTIGGGGSQDFYDISVIDGYNLPMLFSCSTGVTLNCGGPSCPDAYLFPSDNTKTHACSGNSNYQVTFCP

SEQ ID NO: 313270 - protein, 73 aa, Zea mays
  Clone ID: MRT4577_48761C.1.pep
RNQRGEIIGTGEQILIRDWCTRRAHGRERIAHSRGSLMELSSISSSPRMGIMTTNRMTYGLVFTDNKSLLSKY

SEQ ID NO: 313271 - protein, 67 aa, Zea mays
  Clone ID: MRT4577_48762C.1.pep
TVPLHTSFPYGSKHALFSAKHINLSRTPVSTTDVPPQTVEATYASSQIAPTNQSTTRLHPIPNFFAF

SEQ ID NO: 313272 - protein, 177 aa, Zea mays
  Clone ID: MRT4577_48763C.1.pep
MASGAAASSGLLLLVAALVATSARAATFTITNNCGSTVWPAATPVGGGTQLDPGQTWTVDVPAGTQSGRVWGRTGCSFNGGSGSCQTGDCGGALSCTLSGQPPMTLAEFTIGGGGSQDFYDISVIDGYNLAMLFSCSTGVTLNCGGPSCPDAYLFPSDNTKTHACSGNSNYQVTFCP

SEQ ID NO: 313273 - protein, 92 aa, Zea mays
  unsure (1)..(92): unsure at all Xaa locations
  Clone ID: MRT4577_48764C.1.pep
TIKAHHLHQLSLPGSNQVTLPHLSPYYQPQQLNPLNQLSTLYPASHLHQQLLPFXSLLPTDYSHQLQLLTFNHIPPLNPSSYLQQQIXLPFY

SEQ ID NO: 313274 - protein, 56 aa, Zea mays
  unsure (1)..(56): unsure at all Xaa locations
  Clone ID: MRT4577_48765C.1.pep
GVGNLWCVAMRNGRCTSRSLQQVLEIVVGRQRGVQEAEGGECGRLRLASKAXPGRL

SEQ ID NO: 313275 - protein, 143 aa, Zea mays
  Clone ID: MRT4577_48766C.1.pep
GAGNTPPAPPKPAPEAVTGPEKMASMWAGIGGTYATPGAKKGREKSPFPPGKDLVCCPRDGGPPDWGWFDGAALWLAPPLCVVLNARFLCASPPSPFLSGVGSPMPAGCPSKRDCRRRFLAKGVGFLPNVKLTGFLKKKTAKH

SEQ ID NO: 313276 - protein, 70 aa, Zea mays
  Clone ID: MRT4577_48767C.1.pep
ASQIITTRNLKDSCFSKIVASDDHYDLGAGDPPFRNEDRRRDSHPGRSSSGRHGWSGGGGRGASGRGGEG

SEQ ID NO: 313277 - protein, 72 aa, Zea mays
  Clone ID: MRT4577_48768C.1.pep
PASPSADAGPWWPRLATLRYETHLPLSTLSWSSTSFELYPTRSTPSEVPVISPYSIRRHERPTLTITLSRRL

SEQ ID NO: 313278 - protein, 40 aa, Zea mays
  Clone ID: MRT4577_48769C.1.pep
EQKILHYVLITHIDHFLQQGQILLQLVRTFLNDNTPTSYL

SEQ ID NO: 313279 - protein, 158 aa, Zea mays
  unsure (1)..(158): unsure at all Xaa locations
  Clone ID: MRT4577_4876C.1.pep
MAAADPPPRGEAAPALKRSASIDRIPADARRILHRLAGDLWGGDVDPGALAVSQLRGAMTNEVFRITWPGGEAEGNGPRKVLVRIYGRGVEVFFDRADEVRTFECMSRHGQGPRLLGRFANGRVEEFINARTLSAADLRDPEMSALIAKKLRXVHDLD

SEQ ID NO: 313280 - protein, 89 aa, Zea mays
  unsure (1)..(89): unsure at all Xaa locations
  Clone ID: MRT4577_48770C.1.pep
SPLPRVPAPRGGKQNLVKTLAGKTITLEGESXAPTAKXKAKIQAKEGTPPDQQRLIFAGKQLEEGRPPADYNIQKESPLPLGPRPRGGQ

SEQ ID NO: 313281 - protein, 65 aa, Zea mays
  Clone ID: MRT4577_48771C.1.pep
SFLRGSRIELVLISLGYFEIDWVLQILPFLKTIMALLDKVVGLGVHAQQRHNSLYSIAQTDVCFN

SEQ ID NO: 313282 - protein, 187 aa, Zea mays
  Clone ID: MRT4577_48772C.1.pep
QRAGTPAGWNEGAGLVNEINTKIIESLRYARKDYFQNTTKEYPSEVKPLFSGFGLKNFTIRGVRSFLLYYLPLIQPKPHTGSDDEDDDLLHDTQEKTMDLVTPFYNSVKQIGRETSIGTTRRVFERIGGRHVSQRTAWKLLKAHALGITAGWVVQSIIEVYRWFIRKPREDREALSSDRHEQVDHIE

SEQ ID NO: 313283 - protein, 350 aa, Zea mays
  unsure (1)..(350): unsure at all Xaa locations
  Clone ID: MRT4577_48773C.1.pep
MTIGVALLLDLTSRLPRAGASAASAAVRSHPGLSTTAFAATAAAALSSSGVPLSARHLFGFHGFTVAHCDAGTPAGWNDGSDDLVNEINTKIIDSLQYARKDYFQNTTKEYPSELKPLFSAFGLKNFTITTLRSFLLYYLPLIQPKPHTGSDDEDDDLLHDTQEKTMDLVTPFYNSVKQIVRETSIVTTRRVFERIVVRHVSQRTAWKLLKDASKSSKRKAARGMPTPQYTYCVARTTFRAHALGITAAWVVQSIIEVYRCFIRKPSEDCEALSSDGNEQFDDMNKFRLFGRKIYGITIKSXSSLVLASAGAGIGALVHPVHGQWLGCALGDIAGPIIAIIVFEKMQLPL

SEQ ID NO: 313284 - protein, 42 aa, Zea mays
  Clone ID: MRT4577_48774C.1.pep
AEMCACEWVTIATRHLLYCYMGSTILQSLDVVHPQALTCSTD

SEQ ID NO: 313285 - protein, 42 aa, Zea mays
  Clone ID: MRT4577_48775C.1.pep
KMGHSQSRALLGDRREPRHHGEGIGVDKLRNLAKDVDESHDL

SEQ ID NO: 313286 - protein, 127 aa, Zea mays
  unsure (1)..(127): unsure at all Xaa locations
  Clone ID: MRT4577_48776C.1.pep
MKEQLAGMEGKEEDDRLSAKXYSERQPIGTGHQATDDKDXQSPRRHRYRSPGSWKAWSLYRAAMAEFADTFLFLYIYILTDMGVSKSTCKCATVGIQGIAWSFGGMIFALDYCTAGIYGAHINPGGG

SEQ ID NO: 313287 - protein, 121 aa, Zea mays
  Clone ID: MRT4577_48777C.1.pep
CYFLFGKKKKKKKKKKKKKGRRGKKKKKKKKKKKKKKKKKKKGGGPLFFFFWGKKIGGGGEIFWERGPGKHSGKILPFPKSFKGGGGFRKKGFPRENFGVGKKSLFLWKHGGEWFFKPLKK

SEQ ID NO: 313288 - protein, 142 aa, Zea mays
  Clone ID: MRT4577_48778C.1.pep
VLHVFVGCVGSGLEGEVFTCTVLLNLACLIVASTVWNSCRRGRQDSQRICACLPFCYVADLANGEAPAATHATSLAGVTPSQSHRPGRPRRSSQITAPRTPDSRRPSSRADAGALPLAAASQPRSASRSGAVSQSSSTRSAG

SEQ ID NO: 313289 - protein, 88 aa, Zea mays
  Clone ID: MRT4577_48779C.1.pep
SARTALRKPATATANAANYQPASRNPARRGRSSRHDLRWKQLDHLGNAGFDPALFRVDAYGNKLYLHVDSASPLAWDIDHWFPCAKAN

SEQ ID NO: 313290 - protein, 118 aa, Zea mays
  Clone ID: MRT4577_4877C.1.pep
DAWDRNGPPVSRDPEALRAKYTDQLVFTGAIRVRTGYEILRLTSYLQQHLHRIDVPLLVMHGADDLVTDPKGSRALYEQASSADKSLKLYDGLLHDLLIEPEKDKVMDDIVAWLSPKV

SEQ ID NO: 313291 - protein, 85 aa, Zea mays
  unsure (1)..(85): unsure at all Xaa locations
  Clone ID: MRT4577_48780C.1.pep
ALDPPPGFFVDFGAFSSQGSCFLFFTPFPGFVFKPPRPFFFCPFFFVPEFFVPSFWVPKKKQKNEKKKTPKNLKKPTKKKKKKKX

SEQ ID NO: 313292 - protein, 177 aa, Zea mays
  unsure (1)..(177): unsure at all Xaa locations
  Clone ID: MRT4577_48781C.1.pep
MLFLPVNWNVLYSGSDDSLCKVWDRRCLXRGKVSSRPGRVGDWDYRWMPFPSEAHNLKHPGDQSVATYRGHSVLRTLIRCYFSPVHSTGQRYIYTGSSDKSVHIYDVVTGEAVKRLSWHGSIIRDCTWHPYYPTLVSSSWDGXLARWEASGDDDDHSVLVADEMRGSPYYRGYGDPL

SEQ ID NO: 313293 - protein, 104 aa, Zea mays
  Clone ID: MRT4577_48782C.1.pep
MFSSYRCAFCFSTGQRYIYTGSSDKSVHIYDVVTGEAVKRLSWHGSIIRDCTWHPYYPTLVSSSWDGFVARWEASGDDDDHSVLVADEMRGSPYYRRYGDPLVM

SEQ ID NO: 313294 - protein, 109 aa, Zea mays
  Clone ID: MRT4577_48783C.1.pep
SVWSINGSSICQAPVLQLTRQLLAWVALHEETCGLVLSPARQVRSGSHIRAACGAPALAVLVSSEIRVLLSVSGSLSRSRSLIHYLQDILASYVAIAERAEENPSTPSP

SEQ ID NO: 313295 - protein, 431 aa, Zea mays
  Clone ID: MRT4577_48784C.1.pep
MTQQDVEMAARHGTGADGAGFYPQPRNGGGGETLDDDGKKKRTGTVWTASAHIITAVIGSGVLSLAWSTAQLGWVVGPLTLMIFALITYYTSSLLADCYRSGDQLTGKRNYTYMDAVAAYLGRWQVLSCGVFQYVNLVGTAVGYTITASISAAAVHKANCFHNKGHAADCSTYDTMYMVVFGIVQIFFSQLPNFSDLSWLSIVAAIMSFSYSSIAVGLSLARTISGRSGTTTLTGTEIGVDVDSAQKVWLALQALGNIAFAYSYSMILIEIQDTVKSPPAENKTMKKATLMGVTTTTAFYMLAGCLGYSAFGNAAPGNILTGFGFYEPYWLIDFANVCIVVHLVGAYQVFSQPIFAALETAALKRWPNDRFVTREHPLVGVRFHVSLLRLTWRTAFVVVSTVLAIALPFFNDILGFLGDIEFWPLTLDYPV

SEQ ID NO: 313296 - protein, 154 aa, Zea mays
  Clone ID: MRT4577_48785C.1.pep
RTRGLRYGSTGPGDKICCQFLQLLVFFRCVFSGGTSSPAIQRGILLDWPDPSVLVSASMQGRMRGARRSARGESSRKAAGREVEPFTLCGEMSHLTRATSEPCRRARGAAFARRARPFSAYELVPARKAGRAHGPEFPPPDRVYLATHHIPTKG

SEQ ID NO: 313297 - protein, 212 aa, Zea mays
  Clone ID: MRT4577_48786C.1.pep
MAMSRAVHKANCFHNKGHAADCSTYDTMYMVVFGIVQIFFSQLPNFSDLSWLSIVAAIMSFSYSSIAVGLSLARTISGRSGTTTLTGTEIGVDVDSAQKVWLALQALGNIAFAYSYSMILIEIQDTVKSPPAENKTMKKATLMGVTTTTAFYMLAGCLGYSAFGNAAPGNILTGFGFYEPYWLIDFANVCIVVHLVGAYQVFSQPIFAALET

SEQ ID NO: 313298 - protein, 593 aa, Zea mays
  unsure (1)..(593): unsure at all Xaa locations
  Clone ID: MRT4577_48787C.1.pep
MVCCCQLSQAHRVLDSWLPVHRRSLTSRHTPRAGNTAGACTAPAAPRARPTCHPSLDGPRDCDPCRTSATRHGSGVPVRAGEARTSPWIFRLVSVGTSSPAIQRGILLDWPDPSVLVSASMQGRMRGARRSARGESSRKAAGREVEPFTLCGEMSHLTRATSEPCRRARGAAFARRARPFSAYELVSAREAGRAGGAGFSAADRAYLGRQHIPTKGPWGVDDVESEAYVSQFSADGSLLIAGFRGSRIRVYDAEKGWKIHKDISCRSVHWTVSDIALSPDQRFLAYASLTPIVHIVNVQNAGKESHANITEIHEGLDLTGGDEDEDFGIFSVKFSKDGKEVVVGNNEKSIYVYDLSANKVSARIRAHKADVNAVTFADETGNVLYSGSDDSLCKVWDRRCLSGEKSAGILTGHLDGVTFIDSRGDGRYFISNCKDQRIKLGIRKIPSXIRPVSLVDWDYRWMPFPSEAHNLKHPGDQSVATYRGHSVLRTLIRCYFSPVHSTGQRYIYTGSSDKSVHIYDVVTGEAVKRLSWHGSIIRDCTWHPYYPTLVSSSWDGFVARWEASGDDDDHSVLVADEMRGSPYYRRYGDPLVM

SEQ ID NO: 313299 - protein, 103 aa, Zea mays
  Clone ID: MRT4577_48788C.1.pep
FNSASRRGRATNPEPHPTARNRKLRVPAHPTLAHRAGHSSPARVPTVQRQRAPGVYSHVRRRHSVGHNSAADTGGGHGWPPVAREQDAEEGCIRHEGSPPGAP

SEQ ID NO: 313300 - protein, 104 aa, Zea mays
  unsure (1)..(104): unsure at all Xaa locations
  Clone ID: MRT4577_48789C.1.pep
LRHAAQGCKLRARKYPLXXGGDGGGGFFFSPKNLGCGAREEEGARPRVSYVGPCGWSPRRRAPPTDVQTSGQAASPSADPPDNLRGSNNRMRQTIWMTDLLIIS

SEQ ID NO: 313301 - protein, 55 aa, Zea mays
  Clone ID: MRT4577_4878C.1.pep
MQILQPQLVPLQQVFPELLMCRQACEPLIKRGKMESATSSDLIQPFILLVENHKA

SEQ ID NO: 313302 - protein, 74 aa, Zea mays
  Clone ID: MRT4577_48790C.1.pep
GQVVAQGLHCALTDDDCQHAPLLRILRRPVPRRRQRFQDVRDSERVPVCRLAVRPQSTATATGGRRFCYCLGSL

SEQ ID NO: 313303 - protein, 54 aa, Zea mays
  Clone ID: MRT4577_48791C.1.pep
MLYRKERVSSRGVFDRKKKKKKKKKKKKKKKKKKKKKKKKKKKKEKKKKRGVSF

SEQ ID NO: 313304 - protein, 66 aa, Zea mays
  Clone ID: MRT4577_48792C.1.pep
RPGVQSLRPTALAVRNCSFYCSDLKLYVGFVDREIERIHRKRSRCYLILNRLNSMRIIYYGSPSFP

SEQ ID NO: 313305 - protein, 211 aa, Zea mays
  Clone ID: MRT4577_48793C.1.pep
MEIPTAVIHRLQSALREATFAPSVEDAPAPPFPSVADAVAAFDSCAASVSAELRCVRCGASGGLLRGVRSALCTYCGCPRRGEEAEGGGSGGVAFRDGVAYQWLLGSLGLDGSEIVEFDTDTTASNKSKDVPPPNSGMIISDLLDLKITCLPENKETSPSSITKEQSSSVDTLNLSAANLDSFFIERKEEMTSASLPQTHFLEQEKKKKKK

SEQ ID NO: 313306 - protein, 31 aa, Zea mays
  Clone ID: MRT4577_48794C.1.pep
GARMLVIDIAILMLICNMCYFINIKKFSRHH

SEQ ID NO: 313307 - protein, 63 aa, Zea mays
  Clone ID: MRT4577_48795C.1.pep
GLDYAEALTLTANLRLSHNPIIQTTSDLHACWTLVSKNCVMRYKRAVYFYQRGPSIHTKIPSY

SEQ ID NO: 313308 - protein, 38 aa, Zea mays
  Clone ID: MRT4577_48796C.1.pep
HPKKPGRLQPLLKRYTAFKLYGRTKQHNPTCKTSPSFD

SEQ ID NO: 313309 - protein, 173 aa, Zea mays
  unsure (1)..(173): unsure at all Xaa locations
  Clone ID: MRT4577_48797C.1.pep
MFYAGYGYHASNFEQTYRCYPASFFDKPHLEGGDKVIMPPSALDRLASLHIEYPMLFELHNGVTDRISHCGVLEFVAEEGMIIMPYWMMQNMLLQEGDIVRVKNATLPKGTYVKLQPHTTDFLDISNPKAILEKTLRNFSCLTTGDSIMVAYNNKQYYIDIVEXKPASAVSII

SEQ ID NO: 313310 - protein, 51 aa, Zea mays
  unsure (1)..(51): unsure at all Xaa locations
  Clone ID: MRT4577_48798C.1.pep
ITMDPTKFRPSSHHDTTVTTTNPAAPVRNNNEALTSGXPPNPIPLKDYHLI

SEQ ID NO: 313311 - protein, 66 aa, Zea mays
  Clone ID: MRT4577_48799C.1.pep
PTRPPTRPRYRIIGAAARVDDMCYIGNTKLNCSPKKKTRKRLNVRQNSSVSRGSKPEVKCLVVLVL

SEQ ID NO: 313312 - protein, 100 aa, Zea mays
  Clone ID: MRT4577_4879C.1.pep
SISELRGIDSQASVTKRLNSPSSTRLKILSICLVKVAFGAIYAQVEKKASRRISRSSRTLTSSRRGLAATPSRLPVKAAFIYVSFSHFDYCKDYMDVLDI

SEQ ID NO: 313313 - protein, 261 aa, Zea mays
  Clone ID: MRT4577_487C.1.pep
MTTATLRSSASLRRALLRHFSVGPASTPRAVSRVPDFQVPQSIMWRHFATSRPNSLARRDNFGLMACLHAQIRCASQAAAVKETESSSSKISIGPKPKQIKEDDEDANLVYQGPISSTIKKVKLLSLSTCCLSVSLGPVVTFMTSPDMNVILKGAVASTVIFLSATTTAALHWFVSPYIHKLRWRPGSDSFEAEVMTWLATPLKRTVKFADVRPPETNRPFVTFKAEGNFYFVDADHFSNKALLARLTPQKLPHESAFKNL

SEQ ID NO: 313314 - protein, 117 aa, Zea mays
  unsure (1)..(117): unsure at all Xaa locations
  Clone ID: MRT4577_48800C.1.pep
PTRPENRETRYVAEYKLKAAATASGTIWPGTGGSAGGKAGNEPTAAASGEARETKRKTAAKAKPAAATGSPRNGPDRERDRGPRAGEPASNPTGEYPGDDGRDTRGXSAGPGTGAKN

SEQ ID NO: 313315 - protein, 82 aa, Zea mays
  unsure (1)..(82): unsure at all Xaa locations
  Clone ID: MRT4577_48801C.1.pep
CRTQLCLVRIWCEGGCGPRDDERPRKLRNQPFXAVFVNWIHIFFYFLYTYLYYRLYIXFFSQNLXFGNYFEYPMNQMVAPPR

SEQ ID NO: 313316 - protein, 54 aa, Zea mays
  Clone ID: MRT4577_48802C.1.pep
TPIPPKVKKKPPKKPPFNPDKPQEFVTKIPQFLVPPPKLGLPVPVRMYPKSESA

SEQ ID NO: 313317 - protein, 112 aa, Zea mays
  Clone ID: MRT4577_48803C.1.pep
MDSSGATGASTFLGTRLADPAPQNGRIVARLGFGVGGKAKPAAKKAEKTSTSYDRALGFPCAVAPDYLDGSLGGDYWLDPFGLGKPVEYLQLELDSLDQHLAKNEDGGIIGT

SEQ ID NO: 313318 - protein, 52 aa, Zea mays
  Clone ID: MRT4577_48804C.1.pep
HNIKLKKGTREDKGGYPHNANLSYEENKRPPQFSLHCSKYLDGRVIPFLSSR

SEQ ID NO: 313319 - protein, 142 aa, Zea mays
  unsure (1)..(142): unsure at all Xaa locations
  Clone ID: MRT4577_48805C.1.pep
MPLSLATSFXPHSRRQDDRASTRRCVGPYQGMGGSMHKNXVXPEIHEDKKVYCNDELVLVTRGTMKDYTADEWSGNNPYYIGDNSALVIMDSQIEKFRXKRAHVEEYSPDDHWRAMHPDGELENRARGGQLIDGSPCSSPGA

SEQ ID NO: 313320 - protein, 64 aa, Zea mays
  Clone ID: MRT4577_48806C.1.pep
RRGVPGSLLINSKFFHMTLYRGKALLIKDVTVTAPGSSPNTDGIHMGDSSVITITITVIDVCDY

SEQ ID NO: 313321 - protein, 43 aa, Zea mays
  Clone ID: MRT4577_48807C.1.pep
GYVPLQDEDAALATQAAPGVASPKAAKPNATSNSSPISYLFRA

SEQ ID NO: 313322 - protein, 151 aa, Zea mays
  Clone ID: MRT4577_48808C.1.pep
EVEATLKVLSPSMVSFIKDLPAIEGPSPDIDVVLSVLLQSTLPVAQSAGKAGGVSELSGVGKTGLNQNGSVHRPPRERRKDVERQGAQEEEDASAVQSRAAVPRDIFRLRQIQRSRGLGVGGAAVSQSGSSAFSFSGGGSAFSGDHSASTD

SEQ ID NO: 313323 - protein, 170 aa, Zea mays
  Clone ID: MRT4577_48809C.1.pep
TLGPAGPGLSSPSRYLSSPRARRLLALARLPPCSSAARPTSLPGSRALDRVLPAGRAPHGAPLPCSSSSALLCSPWLARVLPTPGRSSLSLSARRGASLPALLLVQLSSASSVIPCRDPAVELPCSASLASHVTCPLLPSARSSPAELASAHVLGEVSESLVREAMSLGH

SEQ ID NO: 313324 - protein, 109 aa, Zea mays
  Clone ID: MRT4577_4880C.1.pep
LELIQVCKPLMIYIYRKYAPFSLWLSYMCIVYPKLILMNLSCATLFRISHAGYRFAHARLTRPSPPVSAIHSRSDPPRTRSDPFEPPQTPPRSILIERLGPPRTPVVVH

SEQ ID NO: 313325 - protein, 39 aa, Zea mays
  Clone ID: MRT4577_48810C.1.pep
AAEQPTEQTRGKIILYVYESHAEGNPILIRVTKYLILEQ

SEQ ID NO: 313326 - protein, 38 aa, Zea mays
  Clone ID: MRT4577_48811C.1.pep
TQAPLVVHSVSSSLHSGVVPDYREALASGGMLASIHQP

SEQ ID NO: 313327 - protein, 44 aa, Zea mays
  unsure (1)..(44): unsure at all Xaa locations
  Clone ID: MRT4577_48812C.1.pep
EAQXGSDIHFFVRESPIHIQALSRYNRTHASLHFIRTVCTPNGS

SEQ ID NO: 313328 - protein, 79 aa, Zea mays
  Clone ID: MRT4577_48813C.1.pep
KKITGAFGSFVPKRTTLIFSVHNKTGAQPYMRGDFCPKEKNGQVLYISLAPQQWGRIAGLLGEEPTMDGGGEHINDGVN

SEQ ID NO: 313329 - protein, 100 aa, Zea mays
  unsure (1)..(100): unsure at all Xaa locations
  Clone ID: MRT4577_48814C.1.pep
TQPRPASSPSLSRSSCPPPPLFSSTSSMPTDARPHDFGNAXWGRLKPSGKMELPERVDIVKTARFKELPLYDPDWNYIRPASIVGKMYLMQGIGXVRGFQ

SEQ ID NO: 313330 - protein, 118 aa, Zea mays
  Clone ID: MRT4577_48815C.1.pep
ELGIILIALPPGMSKHASESRHRIEDIALPFVVPPPRYKGSDKPATRLAMREAVAEACVLQGNDVVDLPDDTDEDVPDEDDEQVVELSDCSQQEKEEEKIYAETLWGQVDSSQSLEKD

SEQ ID NO: 313331 - protein, 62 aa, Zea mays
  Clone ID: MRT4577_48816C.1.pep
ETLSVSLIETTPPDQDLPPLRFCCSGPEKDIFKARSHVRKEGPILFQGERCCYLLEYPEVYY

SEQ ID NO: 313332 - protein, 76 aa, Zea mays
  Clone ID: MRT4577_48817C.1.pep
IGAARGLAFLHASEKQVIYRDFKASNILLDASYNAKLSDFGLAKLGPTGSNSHITTRVMGTYGYAAPEYVATGHLY

SEQ ID NO: 313333 - protein, 179 aa, Zea mays
  Clone ID: MRT4577_48818C.1.pep
AVRERAERDAQGSHSAERHGEKRPRRGAASFHGKHTGRRTLTGTQRKSKRAGQRRKRKWKTNGQLPEHGGRIQTSWGGASAGCRKGTEPSRTLDRAQGGADELQQEAKARSGSATIVACELLAGARAMVSSWATAQWSRQPWEVGARLQGRWGGTTEQRSAAGKKRVRNSTARRGGHGR

SEQ ID NO: 313334 - protein, 86 aa, Zea mays
  unsure (1)..(86): unsure at all Xaa locations
  Clone ID: MRT4577_48819C.1.pep
SFSSSDGLEPCGRRRGSRWRGLALXLTWFLLRGDEMLPGLSLVGVAAXSSTFCFFLATVSGGVALCLVGVGFGRRWRGLTLSLSWF

SEQ ID NO: 313335 - protein, 72 aa, Zea mays
  Clone ID: MRT4577_4881C.1.pep
YSPGVPEVADPSQGAACFDRSHRHLAKSPQQLVARAASCVGGPRQTLLQARRPCSFRVAYEKPCSAICPHAW

SEQ ID NO: 313336 - protein, 69 aa, Zea mays
  Clone ID: MRT4577_48820C.1.pep
RPLKLSSHKQHPPSSPSETSAQAHYISSVPFDPQPSHPLASSNLPFTGPSVAYMPASNVLLHSKRSDRS

SEQ ID NO: 313337 - protein, 106 aa, Zea mays
  Clone ID: MRT4577_48821C.1.pep
MHARLDYLATLLQFLTNTCVVLFLVQSVDRLMLCLGCFWIRLKGVRPVPSLPADKEDIEAGTEGVPMVLVQMPMCNEREVYQQSIGVVSFMPMMITKVNIKPTQLA

SEQ ID NO: 313338 - protein, 122 aa, Zea mays
  Clone ID: MRT4577_48822C.1.pep
MERYNPSEVYELFVRHMNNPRVVVDNGACATATLVQVHSARKHGVLLDAVAALSDHGVCVRKGYISSDDGRWFMDVFHVVDAAGGKVADAGALLARLESSLSADALPPRPPPPSDGVGTHTL

SEQ ID NO: 313339 - protein, 140 aa, Zea mays
  unsure (1)..(140): unsure at all Xaa locations
  Clone ID: MRT4577_48823C.1.pep
DKPHIKRYRIQPAVEQCISGLAPLXLTGISXLVQLTRPLHVMTHNIISLHLLQHALDNRAVYSEKPQSFKATGSDQNMQEEHLLHHPRSINDGYSYLQXQSVXFNQLGDFNCNDYWXQRPLLPFWQIAVANLRNYLAFNQ

SEQ ID NO: 313340 - protein, 61 aa, Zea mays
  Clone ID: MRT4577_48824C.1.pep
CNLKSYALDHQTHAMSAFRFLMTKLADTVPYGINDRPRTSSIFHVPDNELCDVHSTSIYKV

SEQ ID NO: 313341 - protein, 167 aa, Zea mays
  Clone ID: MRT4577_48825C.1.pep
EEHEKIRAMKSDSYSLEWSDYKSMPFTQCVVNETLRVANIIGGVFRRAMTDVEIKGYKIPKGWKVFSSFRAVHLDPNHFKDARTFNPWRWQSNSVTTGPSNVFTPFGGGPRLCPGYELARVALSVFLHRLVTGFSWVPAEQDKLVFFPTTRTQKRYPIFVKRRDFAT

SEQ ID NO: 313342 - protein, 145 aa, Zea mays
  unsure (1)..(145): unsure at all Xaa locations
  Clone ID: MRT4577_48826C.1.pep
PAPLDRLERQSRGTTLNGKGIQLEEGAFGTHSQRQGXMQDPEGLPRYQHRFMVRDEQLVDERTLADYFIHNESTLQLVVRLRECMQIFATTLTGKTITLEVKFSDTIXDSLRXKIQDMEGILTHQQWLMFDGLQIEDGRKLAHYN

SEQ ID NO: 313343 - protein, 75 aa, Zea mays
  Clone ID: MRT4577_48827C.1.pep
FKKGFGPPLQKFLFAGRGFNLPQTFRNPFLLAFKGSFYTVSIGLFWVLKVFWLSFFNYILVFRLQILCQSNCWGF

SEQ ID NO: 313344 - protein, 55 aa, Zea mays
  Clone ID: MRT4577_48828C.1.pep
HPFLFTVTTLPPNGLLNIHQGSLYPFSNPFFHTSPYSTSRQHYLTYYSLSLYMLI

SEQ ID NO: 313345 - protein, 75 aa, Zea mays
  unsure (1)..(75): unsure at all Xaa locations
  Clone ID: MRT4577_48829C.1.pep
SAFHLQSDGQSEVVNRIITMYLRCLAGXHPKSWLKWLPWAEFCYNSSYQSALKCSPFKVVYGRDAPPMVSYQAGD

SEQ ID NO: 313346 - protein, 50 aa, Zea mays
  Clone ID: MRT4577_4882C.1.pep
KADSTMGGHLLAFYVHYLDFNTQGTWLMHSGSLVFSKAIVSFVKTALFLL

SEQ ID NO: 313347 - protein, 56 aa, Zea mays
  Clone ID: MRT4577_48830C.1.pep
SRGRGGTCNLPQIREERSFTSIFFTLIITMETFFLLLLTCLPTSERTLHILTWRGG

SEQ ID NO: 313348 - protein, 77 aa, Zea mays
  Clone ID: MRT4577_48831C.1.pep
MDHKGKGIMINDKEKESFVNEPKDDNPTDSGSGHRRKDGKKKKTRHIKEIVYYDDSDESTSSQKDNDYERRKPGRVS

SEQ ID NO: 313349 - protein, 118 aa, Zea mays
  unsure (1)..(118): unsure at all Xaa locations
  Clone ID: MRT4577_48832C.1.pep
QSVLTVHTLQGALRDCAAQGSPFFVGXSVGYVPVVLAGLLGWVRASXXLLGVRPLDPERTPLLLAWSERFXGALYAVQCVWTQFVSLRRLDQCLWPRKKTPAPLQYPSQGTGAGHVKH

SEQ ID NO: 313350 - protein, 87 aa, Zea mays
  unsure (1)..(87): unsure at all Xaa locations
  Clone ID: MRT4577_48833C.1.pep
PGPAQGEIHTXADLXTGXSXXGXSGXRADSSGTFXXKDGLGXAGFPSGMESRILDVVTGEHFVPLTCTDSFSRAMSGFQTSIQKKHG

SEQ ID NO: 313351 - protein, 103 aa, Zea mays
  unsure (1)..(103): unsure at all Xaa locations
  Clone ID: MRT4577_48834C.1.pep
SELAHGAYAGLDIAVRLLEAMEEEFPGVSYTDFYHLAGVVAVXSPSGLDIPXHPGREDMPQSPPEGRLXDATNVSDHLMXSFGKQMGFSXDLDIVALFXGHTL

SEQ ID NO: 313352 - protein, 109 aa, Zea mays
  Clone ID: MRT4577_48835C.1.pep
EKFWENFLVLNPEETRIPPNLWPQLFAFAIPGWIICWGCPLELQFVLFLPCLPGCSVSIIIWSGILLQCSFFAIPARSSRKMSVLLLYANLASLRFWGKKKKKKKTHTP

SEQ ID NO: 313353 - protein, 300 aa, Zea mays
  Clone ID: MRT4577_48836C.1.pep
MKATRVELTSETALNQSVGASKVIKKMTTHPTDLKREHMQANAVPHKSKTALSKTYSKLASNGLLATSMNAKVDTNAKLGLEPPISGKSSLLNARSSTPHSAGHKVVASHVLLKASNTSDSLQGVPSKDNKSSTISQLTGARITKLGIRSLKSDMALEKESVQVSGTKCSPVTTSRILDSIPEGKPALPSPSIMQKVPEESALNPKAPKVLKHIMRSPAVRKSPRTVPELGNEMILGSGTPKAHVDNAISSRMPPGMGAISDLELPVLENDGNIEKAEACRKELEDICILLKRNMQKLKS

SEQ ID NO: 313354 - protein, 160 aa, Zea mays
  Clone ID: MRT4577_48837C.1.pep
AQVAHALPHPSCALAHPRPRQPLPPSPRARVSDLPPPAAPCLPLLTLPAGPPSVMPPPRRTLPPHPTSPPGLCPRRCSCWARARLVHAAAVERASGEGVECATEIEATTTSSATLPSPLSSGPMLVEALWFLDELRRNGRWWVSVGCRSVQAQIDFFVRW

SEQ ID NO: 313355 - protein, 104 aa, Zea mays
  Clone ID: MRT4577_48838C.1.pep
PTESPFPKKKGEKFHMTFSRLQKKNRNAFLFFREYQTTHWLTNYRENTPHRPKHWPKNFPTIKCPPKMGHSLVIGNGGPPIKGVKKQDPPGGRERKTSSWGGSG

SEQ ID NO: 313356 - protein, 88 aa, Zea mays
  unsure (1)..(88): unsure at all Xaa locations
  Clone ID: MRT4577_48839C.1.pep
ASKALLLXDRSSFLDAHVQICVINTVRASEATHGEVAALWVTHRLVELQYSNGAIYMEDGQIVIQGKVCSISIFIKKIQARYFGHCEL

SEQ ID NO: 313357 - protein, 87 aa, Zea mays
  Clone ID: MRT4577_4883C.1.pep
KRDPKSIGTGPSKNRGYRGKPNPGAPNYSKTPEQTREACKRGPPPLGRGELGDGLGAPGNGVLGKPPGEDKAPGGLDPTGGEGGLFG

SEQ ID NO: 313358 - protein, 81 aa, Zea mays
  Clone ID: MRT4577_48840C.1.pep
HIYYTVSNSTSVLGKLTCSWNNIRNTHSGGDLEPWPRRACVHFFFPRLLEGHTLGGGSLETGMPRPGREEVPFPPCSAGAL

SEQ ID NO: 313359 - protein, 52 aa, Zea mays
  Clone ID: MRT4577_48841C.1.pep
SYFLKLRGPQKILSGVLFGKPRALHPRVFKDPGEYLCLNIFPPFGGIRVWSL

SEQ ID NO: 313360 - protein, 32 aa, Zea mays
  Clone ID: MRT4577_48842C.1.pep
PDSTFLGAFCPFSSIALTTNYKGRREFTSLSS

SEQ ID NO: 313361 - protein, 79 aa, Zea mays
  Clone ID: MRT4577_48843C.1.pep
LQMNKKKEKKKIQIWRTNKKKKKKKKKKKKGGPFKRSKFFFPWFQKKNFFLGAPKLKSLARVLKTSGWKNPCGSQIKFL

SEQ ID NO: 313362 - protein, 331 aa, Zea mays
  Clone ID: MRT4577_48844C.1.pep
MARRRVLLFLKPFDVYPPRPYVGAAASSPTSAPSSLPQPRAANPKVLSYLDDRCRVHKDTIDLCQSVLQRKSLDWIAVQRNHLCQPIRDVDLVVAVGGDGTLLRASHFLDDSVPILGVNSDPTCTKEVEELSDEFDARRSTGYLCAATAGNFEQILDVTLDGSRRPLELSRISVKLNGIQLPTYALNDILVSHPCPASVSRFSFRKRNNTGENSRLINCRSSGLRVSTAAGSTAAMLSAGGFTMPLSSRELQYMIREPISPMDADKAMLHDVLKQEQHMHVVWYNQEGAVYVDGSHVVHSIQHGDSLEISSGAPTLKVVLPEHLLKMGPEW

SEQ ID NO: 313363 - protein, 80 aa, Zea mays
  Clone ID: MRT4577_48845C.1.pep
ILKVTTINQAHLLATLDLEAFLAERTCQREPDSPPWASSQEVVYKARGIILQRIISSGIIHGLGSHRSLVGRGIGNCLLS

SEQ ID NO: 313364 - protein, 123 aa, Zea mays
  Clone ID: MRT4577_48846C.1.pep
AAHAYFQYLSHSSTELQSSYHHDALKGKTRSYTMRAMLYLLHIMLNYGVELKETLESGLSTVPLLPWQEIIPQLFARLSSHPEKIVRELLESILLKLGKLSPCSIVYPTLVDISACEGEPSEE

SEQ ID NO: 313365 - protein, 290 aa, Zea mays
  Clone ID: MRT4577_48847C.1.pep
PAGVIGGLLGALFNQLTLYITKWRRTCLHKKGKRVQIFEACLISLVTSTISFVLPLLRKCSPCPKLETNSGIECPHPPGTDGNFRPVYCSQDREYNDLATIFFNTQDDAIRNLFSAKTFHEYSAQSLITFLVMFYFLAVVTFGTAVPAGQFVPGIMIGSTYGRLVGMFVVKFYKKLNIEEGTYALLGAASFLGGSMRMTVSLCVIMVEITNNLKLLPLIMLVLLVSKAVGDFFNEGLYEEQARLRGIPLLDSRPKQVMRNMNARDACKNQKVVDRGQNGESLVIGLMLRR

SEQ ID NO: 313366 - protein, 49 aa, Zea mays
  unsure (1)..(49): unsure at all Xaa locations
  Clone ID: MRT4577_48848C.1.pep
SQLPFLHXTSHTHGVHLQKLNPPHLILIFFKHKMLRSLVVTPIIVRHAF

SEQ ID NO: 313367 - protein, 385 aa, Zea mays
  Clone ID: MRT4577_48849C.1.pep
MREVVTVQVGGFANFVGSHFWNFQDELLGLTDDPGADPVFRTAALDMDVLYRAGETHQGVASYCPRLVSVGSRGSLGSLSSSGTLGSSSAAADEPNIFTWSGKVTKSVAKPHERNLFLQSLSEEEQNPSSSDGQNNASVEDKDLVANLENGVKFWTDYSKVQYHPQSLYELYGSWTDFERFDNYGTAKEVVSEWSQMEEMNERLRFFVEECDHIQGIQFLVDDSGGFANVAAQFLESIVDDYTNTPVMLYCVRNPDSYGSSRNQRETIIRSLHDAVSLSKLSYYCNLMVPIGLPSLSYLSPLLSIKDEKHFHSSAICAAALHSLSVPFRLQHMGPASDLAHSSGKLDIGELVHILSDQGRQNMITALDVAMPAPSLTDRKDLRTY

SEQ ID NO: 313368 - protein, 21 aa, Zea mays
  Clone ID: MRT4577_4884C.1.pep
MAYSLWCMLLLACSEFSSLLW

SEQ ID NO: 313369 - protein, 761 aa, Zea mays
  unsure (1)..(761): unsure at all Xaa locations
  Clone ID: MRT4577_48850C.1.pep
MREVVTVQVGGFANFVGSHFWNFQDELLGLADDPGADPVFRTAALDMDVLYRAGETHQSVASYCPRLVSVGSRGSLGSLSSSGTLGSSSAAADEPNIFTWSGKVTKSVAKPHERNLFLQSLSEEEQNPSSSDGQNNASVEDKDLVANLENGVKFWTDYSKVQYHPQSLYELYGSWTDFDRFDNYGTXKEVVSEWSQMDEMNERLRFFVEECDHIXSYHFYCKLSLNTQSTLWAVFTYILSDHKEFFSLFSIIAXFDIIEIYLLQGIQFLVDDSGGFASVAAQFLESIVDDYTNTPVMLYCVRNPDSYGSSRNQRETIIRSLHDAVSLSKLSYYCNLMVPIGLPSLSMLLIAYNLLRRLPYNMXLLSILHCSMFVCADPYNSTXYSKLIIGLVILFSNLRLLIAVLGXVLQMFHFLIFDHKLNKHSDVAFFTSNNSXPAVGECNAHSIIIQPYGQHAYHCHIVYTEFCVGFVKAXDVCSSNIVFFYFDCSGYLSPLLSIKDEKHFHSSAICAAAMHSLSIPFRLQHVGPASDSAHSSGKLDIGELVHILSDQGRQNMITALDVAMPAPSLTDRKDLRNIQRSLHSLTPEISDEDEDPYAVESMVVHGVLDAGGKRASISQVKESICSALEGRATKPKFSHLSVSPCPLPIPLPFPSIFSSSVGQQGEILGTSHAEGARPKGPLAVGSVPMAARLRSSSAIAPFIERRSASLQRLGVARGTLGSQVLHDWGFGREEVEDMAEHLAKMLRPFYPEMDLTSDSDD

SEQ ID NO: 313370 - protein, 105 aa, Zea mays
  Clone ID: MRT4577_48851C.1.pep
MDRLTVMAPTMLVLLLLLLSRCSVAASRRGGGWWEEGEGEWRPSEEEEKGKGKGRGLILLHRVEKEGEPEGDQVRLVRDQFWPAMSLDCREGLMHIDSITMEPKT

SEQ ID NO: 313371 - protein, 100 aa, Zea mays
  unsure (1)..(100): unsure at all Xaa locations
  Clone ID: MRT4577_48852C.1.pep
PCELPRVIAYRILPVLAXGFXHLSALFLEQSLVLILQVHQVHXLALNVMEQLLLEHVLAYFDEXNXLPLIQLATLKADDNLAQQLLPFRLVDTADYYQQQ

SEQ ID NO: 313372 - protein, 40 aa, Zea mays
  Clone ID: MRT4577_48853C.1.pep
SSSCVMGSFFYFTWPQRRIFSSLIRLWCNKVYPAFSTKKK

SEQ ID NO: 313373 - protein, 249 aa, Zea mays
  unsure (1)..(249): unsure at all Xaa locations
  Clone ID: MRT4577_48855C.1.pep
MARSPMAMLPFLALGVAALVLSAAGMVAAQKCGCRANECCSQYGYCGTTDAYCGKGCQSGPCTASGGGGGGSGVSVESVVTKAFFNGIKSRAGNGCAGKSFYTRRSFLAGARANPNFGKGSTSDDGKREIAAFFAHVTHETGHMCYIEEIGGARQNYCDRKYTQWPCASGKGYYGRGPLQLTWNYNYGAAGKSVGFDGLKXPEKVAXDPEVAFKAAXGFWMTNVKQVPARXXFGATTRAINSGECNGGN

SEQ ID NO: 313374 - protein, 117 aa, Zea mays
  unsure (1)..(117): unsure at all Xaa locations
  Clone ID: MRT4577_48856C.1.pep
MRVLLDALSLLALDGSATCTHTSCGCGXQPPPPVHLPPPVHLPPPVHLPPPVHFPPSVHLPTPVHLPPPVHVPSPDHLSSPPCHYPTQPSLPQPYSQPHPCPCQQPHTSPCQLQGTC

SEQ ID NO: 313375 - protein, 48 aa, Zea mays
  Clone ID: MRT4577_48857C.1.pep
NEKKKVLFQSINHTYLVLKLIKYNIIKLNGFFFFFFFYRFLQAYHASL

SEQ ID NO: 313376 - protein, 88 aa, Zea mays
  Clone ID: MRT4577_48858C.1.pep
KNELLKGFKQMGSDDTRVNPFFRGKNIRGMHKFVKLREKREQKKRGPKGCQIKNMPPPWNARSHVTFFPALFFSWPPGKRPGPVYLML

SEQ ID NO: 313377 - protein, 85 aa, Zea mays
  Clone ID: MRT4577_48859C.1.pep
FNQVLLNFLLGPWSSPAQAKKLYSSLGGLPSSLVIHCHHAPRVPGVFVSPWCGEGAPPFCFWFCFSPGLACFEIQKGGNVQILFL

SEQ ID NO: 313378 - protein, 66 aa, Zea mays
  Clone ID: MRT4577_4885C.1.pep
SSVNEAPRCMFSTPFVPKQNLFWFLVFLNEPARDLPVLLKKSFLVLVDSYNIWYMCSIYESIFIIT

SEQ ID NO: 313379 - protein, 58 aa, Zea mays
  Clone ID: MRT4577_48860C.1.pep
SQGGKKGQSSNLSSYQKAINVTYQNFVMNRSANHLRKQSKLLLRVSKYSLRSFLFDAF

SEQ ID NO: 313380 - protein, 87 aa, Zea mays
  unsure (1)..(87): unsure at all Xaa locations
  Clone ID: MRT4577_48861C.1.pep
LCKPIDQVQSTCVWATPDLARGHADRQSGFRSPDNGAGXVTSRRQMSSGGKGQSRKVFSEGLQNRGNRXEGGTWKLEVGYPLKSVEV

SEQ ID NO: 313381 - protein, 93 aa, Zea mays
  unsure (1)..(93): unsure at all Xaa locations
  Clone ID: MRT4577_48862C.1.pep
VYHCRFAMLAVPGIRGPEAMGVGNXKKAQEWAADPGGQATYLGAPVPRGTLSTILVIEFVVITFXEHQLTMEKDPEKNKYPRGTFHPIGFSID

SEQ ID NO: 313382 - protein, 359 aa, Zea mays
  Clone ID: MRT4577_48863C.1.pep
MAEIEDAMGAPPMVTTTESEGTTTDEDVHLSPTCICGGAGGAGGGGRIKILCSFGGRIVPRPHDGVLKYVGGETRVLAVPRSICFRELKKKVEDMFKTEVAAIKYQLLSLAEELDVLVSVTCDEDLVHMLDEYDRLEAKRSPTTSPRFRVYVFTPQATAPHPSAAAPTVPSSTRYAGLSRLHPHHHHHQQHRQFQPERYVATVPASPDGSPPFSAQPHGAVSAGNSPRANALGVGFGMQRVRSSPNLSTLDAAARRLHQHGVDGSISGYVSGSPRHAGAGPMLLQNNFHHYQHQYPTAPVPVPVPVPVPHHGGRYDARGYVRVGNYLAPMVPAARPLSRGGPAPHSDMVTPKKSAIVWD

SEQ ID NO: 313383 - protein, 64 aa, Zea mays
  Clone ID: MRT4577_48864C.1.pep
GWPAIANVDLRKKTNYLLVDNKTTVKQIEDAFKEFTARQERAIVLINHYIANMIRFLVYTYTYP

SEQ ID NO: 313384 - protein, 189 aa, Zea mays
  unsure (1)..(189): unsure at all Xaa locations
  Clone ID: MRT4577_48865C.1.pep
AGRGSRPPTPRPARPAAAGGRRTSRHGGRCCRXRRRGAGGSWRGGRRRSGTAASIATDAWASDRDDAATEPGGVAVWINGRTEAWGGETPRDFRAQWGERFLVCVLGPDQLAQGNCGFGRKKKTGSLRWWNTGRGNPRFSWRERDSEVRKLQTEIRPRAGGFEVAGHPSRLCEQKGVRAFAFGRIKNSN

SEQ ID NO: 313385 - protein, 64 aa, Zea mays
  unsure (1)..(64): unsure at all Xaa locations
  Clone ID: MRT4577_48866C.1.pep
PVLALPWWVRWLTISPSGRVDVIICGRGGTRSRGPCYVHGSPVSSCPFAIGQTVGGVLFXPPLS

SEQ ID NO: 313386 - protein, 30 aa, Zea mays
  Clone ID: MRT4577_48867C.1.pep
KWALTSLIYFKGDSLIVGIVLPDRQKLYEW

SEQ ID NO: 313387 - protein, 36 aa, Zea mays
  Clone ID: MRT4577_48868C.1.pep
ERKMTSLSQELIPLSFVGHCFAAFDRRSSGIQRCMR

SEQ ID NO: 313388 - protein, 44 aa, Zea mays
  unsure (1)..(44): unsure at all Xaa locations
  Clone ID: MRT4577_48869C.1.pep
SHVDLESLANMTERYSGSDLKNMCDTXAHYSIPEMVEMEKKEKS

SEQ ID NO: 313389 - protein, 45 aa, Zea mays
  Clone ID: MRT4577_4886C.1.pep
MTSIMRLPVFIYKTIGIYVMSQMEQGLNPTLLAEEFSNYTNCCLS

SEQ ID NO: 313390 - protein, 73 aa, Zea mays
  unsure (1)..(73): unsure at all Xaa locations
  Clone ID: MRT4577_48870C.1.pep
TIHFTCSNKLNDPKTNKTYCXNKESMKHTLHKVTHYTKGNDSLYDQGKPRFDHKQTLYSGQTKPVFHKKTKTT

SEQ ID NO: 313391 - protein, 64 aa, Zea mays
  unsure (1)..(64): unsure at all Xaa locations
  Clone ID: MRT4577_48871C.1.pep
PPPPPWLLRVFSHERLRGSXTPLSHGESLMLILRGLRFWARXXVVVAAADAMGASXXXXRXGGV

SEQ ID NO: 313392 - protein, 77 aa, Zea mays
  Clone ID: MRT4577_48872C.1.pep
VRLSLSFRGITSRPVPRSTIKFVAAYLLAVLAGNPSPSADNLTAILESVDCEVDNEKMELLLSQLSGKDITELIAGG

SEQ ID NO: 313393 - protein, 134 aa, Zea mays
  unsure (1)..(134): unsure at all Xaa locations
  Clone ID: MRT4577_48873C.1.pep
RAIIIDSTKTGGDAGIXSREGQNXRQHARCCLNPWRKQMIVCWNKIDATTXPKYSXLGYDXIIKEVVSYIKKVGYNPNKIPFGPITGFEGDNMIERSTNLDWYKGATLLEALDQINYFKRPSDKSLRLPLHDAY

SEQ ID NO: 313394 - protein, 58 aa, Zea mays
  Clone ID: MRT4577_48874C.1.pep
LPSSPTSIWHPTRCPLHFWKAQSVYASWSLPLLGLLCRTISLRAQKVPVRSQVACPFH

SEQ ID NO: 313395 - protein, 44 aa, Zea mays
  Clone ID: MRT4577_48875C.1.pep
PRPVKRVAKSVVLASLKAERLQPPPDANGRRCRCRHSYCGGRSC

SEQ ID NO: 313396 - protein, 42 aa, Zea mays
  unsure (1)..(42): unsure at all Xaa locations
  Clone ID: MRT4577_48876C.1.pep
KLYKVKRXFEYHGLSKAXVFELRFXLYKQTDFDFLNHXIPSK

SEQ ID NO: 313397 - protein, 101 aa, Zea mays
  Clone ID: MRT4577_48877C.1.pep
KVKGNGAGNQASRLGKVSRYRRGPLTIIVFVQVLKGHRSRPVAPDPDPPESHLLQSQYVGSQHGHCLRGVCEPTAKSMCGYAGSTRDLRSSQENRSDDWIF

SEQ ID NO: 313398 - protein, 99 aa, Zea mays
  Clone ID: MRT4577_48878C.1.pep
PQKLGVQDPLTFSPGGHPRGPSRVPRRAPFVKGGSPQKATPWCCFPSFIGGPLPVKMEKFRGPGQRGFYKIFPPQKKTRFGGLPRPPSFPIKKKCFPPC

SEQ ID NO: 313399 - protein, 63 aa, Zea mays
  Clone ID: MRT4577_48879C.1.pep
FCFLKERGKSWVFFTWLQKGGLSQLPNIHLFIFNGLEAHRAFNCLCVHRSWGMFVCQGQILGC

SEQ ID NO: 313400 - protein, 80 aa, Zea mays
  Clone ID: MRT4577_4887C.1.pep
LCVALEQTRSSMPPIARMACRQGGDAVYVFLHCALCPLTVPLLDHWSSSPSLSRLQMSEHSTKLFVHLQTKDRKKEEECT

SEQ ID NO: 313401 - protein, 47 aa, Zea mays
  Clone ID: MRT4577_48880C.1.pep
RVQMLRRQLLPHPRSRRKHLQRNLQGPSHKALTELSVSSPLCCLPPD

SEQ ID NO: 313402 - protein, 72 aa, Zea mays
  Clone ID: MRT4577_48881C.1.pep
SALMATEGEASPPRKRMLLELPCDEEGVNVSQTVGVSASSATPARASQEQGELYDEPVILCTCVLCDQLIIL

SEQ ID NO: 313403 - protein, 200 aa, Zea mays
  Clone ID: MRT4577_48882C.1.pep
MASHIDFRCLDEGLGGERGKRKRREDAEAAAADSMDLDADAPRPSKLRAMPSLSDPSKPASFGQPTYDGVIAGRLSGRRWKEPRTRRSSAVAVSRKPIPLEQRVREKSLKRAYQARKAELKEEIRQNKVAKRKAREEREKRKQENVLRTGTKLQRVTNPKTIQKIAKSKKRKQLKVVPDEFLGGKKSVANRRMQVPGLEN

SEQ ID NO: 313404 - protein, 215 aa, Zea mays
  Clone ID: MRT4577_48883C.1.pep
LEAGRAGISASSLPTHGFHLDFRCLDEGLGGERGKRKRREDASAAAADSMDLDADAPRPSKLRAMPSLSDPSKPASFGQPTYDGVIAGRLSGRRWKEPRTRRSSAVAVSRKPIPLEQRVREKSLKRAYQARKAELKEEIRQNKVAKRKAREEREKRKQENVLRTGTKLQRVTNPKTIQKIAKSKKRKQLKVVPDEFFGGKKSEASRRMQVPGLEN

SEQ ID NO: 313405 - protein, 83 aa, Zea mays
  Clone ID: MRT4577_48884C.1.pep
KMSFSLLKAQREYKGFVLFKFFLAPKKKKGAPLFIFFSPVLARREKNFHGKKTPPGEKRSLPLKFLNKGLFFPGPQKKKKKKF

SEQ ID NO: 313406 - protein, 54 aa, Zea mays
  Clone ID: MRT4577_48885C.1.pep
KMKPFSRILKNREILLTARKGRTVTCRLVLNMNTLPETTHFDLLPPKRNLKQFT

SEQ ID NO: 313407 - protein, 138 aa, Zea mays
  Clone ID: MRT4577_48886C.1.pep
APPRFPFFFSALFFFGIFNGKQFSPGNHFVPFFPQLGSRVGSPYNGPPCFGIFPFKGPPGGVNNKQFFPFNPLIFFSPFSFFYQKHFFPFFLPPGPKVGPLFQMQQIFPFCPLFFSKPPVFFPQPPLGGAPFFIVFWF

SEQ ID NO: 313408 - protein, 191 aa, Zea mays
  Clone ID: MRT4577_48887C.1.pep
AELRAWLRSSSSSAQLHKHGTRRRPESTVRREVACCRQRTEANQSTRGSEWNTQRTLRGTARTPEPDASSVPSSDPSRGIFGCVTYEREQVPSGGGERDVIPRRSASGVGGGVPVVPPNRTTTCRPPGRLPIGRAAVSCDCQCDLTLGFARSPPVLARLFGRLLCSFPMRRGDGLRRTGGRRGVRRSDRAP

SEQ ID NO: 313409 - protein, 71 aa, Zea mays
  Clone ID: MRT4577_48888C.1.pep
MMGAYCGKYKDELIKNAAYIGTPGKGILAADESTGTIGKRLSSINVENVEENRRALRELLICCPGALQFII

SEQ ID NO: 313410 - protein, 82 aa, Zea mays
  Clone ID: MRT4577_48889C.1.pep
TGRRSPAQRGETRRTGTVRIQPSSTMGPHRSILWIGSLKENNNEGIPGGQTSYKSSQPSTHHFRDMKEQRSFSYAMKTSPGR

SEQ ID NO: 313411 - protein, 150 aa, Zea mays
  Clone ID: MRT4577_4888C.1.pep
LIGYCKDKDHFALVYEYMPEGNLQDHLRLRDTCTHRPLTWQQRLQIALDAAQGLEYLHVACKPALIHRDVKSRNILLTTGLGAKIADFGLTKAFSDSETHITTEPAGTMGYLDPEYYRSYRASEKSDVYSFGVVLLELVTGQSPVVPVDD

SEQ ID NO: 313412 - protein, 66 aa, Zea mays
  Clone ID: MRT4577_48890C.1.pep
LANTSPVGLPLSEWPCHSVRWLSLSSSVRRDVLDIGFSSVAGPRQVTLDETGRCLAEGSLDRELAF

SEQ ID NO: 313413 - protein, 257 aa, Zea mays
  Clone ID: MRT4577_48891C.1.pep
MPPRFRRCCAHGGSAPRPEKGEFCIDDIDLDEKSNKVKVTGPFDPDKLADKLCCKACKIIKQIEIVEPPPEKPKKEEPAPPVINHPWKELLITVPMPTPLVPGDLECRPRRAKIEKVLNRIQEKGEFCIDDIDLDEKSNKVKVTGPFDPDKLADKLCCKACKIIKQIEIVEPPPPPPEKPKKEEPAPPPPKKKEEPAPPPPAKVEPQKPPPPKEKPPPPAPNEEPKPAPAPAPPPKVVEVPYPWPYPCPCPCPYPAW

SEQ ID NO: 313414 - protein, 132 aa, Zea mays
  unsure (1)..(132): unsure at all Xaa locations
  Clone ID: MRT4577_48892C.1.pep
SVKVAGTVKGRAIGDTLKTYPRRWLSAVAKSGSLAAGADRHQDSRXNRRLLVKKMGCLLPVXRGTASXCTLFLKLVKASRVLGAFASSKANLTRRVALQVEDASMSDLLIPXVVRRLDXLYDLDALTVMLEK

SEQ ID NO: 313415 - protein, 58 aa, Zea mays
  unsure (1)..(58): unsure at all Xaa locations
  Clone ID: MRT4577_48893C.1.pep
ALLVEEATLEVSNDADDNERILEVYQKLNLRDSXDAARARASKILTGLGFDQAMHATS

SEQ ID NO: 313416 - protein, 148 aa, Zea mays
  unsure (1)..(148): unsure at all Xaa locations
  Clone ID: MRT4577_48894C.1.pep
VNLESHNVIGTQCPKSXTHVLLISKWTKSSQEPDIVASNDMHHDFLPSVGDVGQANVPSTTSAKHGNGNPQNDKLEQNMQKMDGLCENESRNLKQRFFSNEKSTILLKRKVLSTSVVHDENIENSNIKRDMLRSDDLPQKEPEVFLLT

SEQ ID NO: 313417 - protein, 115 aa, Zea mays
  Clone ID: MRT4577_48895C.1.pep
EIRTEFTLLVYKYCTLISLPQVSLGKQKIQNVSGLHKKNIPKNKKGKQKVHEKQNVIDDFPMDIVELLARNQHERQLMTDTNSLENCHTQPKVAQVDCESVKQRENHSVILFSQV

SEQ ID NO: 313418 - protein, 51 aa, Zea mays
  Clone ID: MRT4577_48896C.1.pep
QLMQQQGMATNFPLPPQWSQFANSPAPPPQFNTPPTHIPAPRDRVRLITVD

SEQ ID NO: 313419 - protein, 183 aa, Zea mays
  unsure (1)..(183): unsure at all Xaa locations
  Clone ID: MRT4577_48897C.1.pep
MAGREERYVRFHDWKSEQSVSVISDRVVSEKGHNIFGLLKDRTAGAFSFLGNSSHSEALNKLGLGEKSKTKVLDPQGPFLQRWNKIFVISCLFAVFVDPLFLYVPVIDGGNNCLYLDKKLETTASILRFFTDIFYLLHILFQFRTGFIAPSSRVFGRGALVKDTFAIAKRYLSXLFLVDFLGL

SEQ ID NO: 313420 - protein, 47 aa, Zea mays
  unsure (1)..(47): unsure at all Xaa locations
  Clone ID: MRT4577_48898C.1.pep
FVMXXVYDMKLXEWTKVDISDEAQKECVNAKFEYQEIFEVEALLDEK

SEQ ID NO: 313421 - protein, 82 aa, Zea mays
  unsure (1)..(82): unsure at all Xaa locations
  Clone ID: MRT4577_48899C.1.pep
PRGLLFDLPTLAXYNLQIQQWVGINQVVQNPAGXVIHVVPASVMVNMVEGNPRHFKEVLFGQDWKPNHPRRGVIFPPFPLRT

SEQ ID NO: 313422 - protein, 126 aa, Zea mays
  unsure (1)..(126): unsure at all Xaa locations
  Clone ID: MRT4577_4889C.1.pep
QQLLVCGYYRSFLLLRRSAAALAGMSANAAXTFTITNNCCHTGXPRATPRAAXTQLNPGEKWTVNATDGTISVRARQLTGCSFDTNSFSSHDGYRTTALSSTMSGQAPLTLAKSTIRSTPEFYDIS

SEQ ID NO: 313423 - protein, 354 aa, Zea mays
  unsure (1)..(354): unsure at all Xaa locations
  Clone ID: MRT4577_488C.1.pep
MTSSSNNGGRPDDGGEVVLDHEYQEEYVRNSRGMSLFACRWLPAXRQEXRAPAPKALVFLCHGYAVECSVTMRGTGERLARAGYAVYGLDYEGHGRSDGLQGYVPDFDALVLDCDEYFTSVVAAAAQSQSKDAHQLPRFLLGESMGGAVALLLHRRRPEYWSGAVLVAPMCKIADDMRPHPLVVNILRAMTTIIPTWKIVPSNDVIDAAYRSQEKRDEIRSNPYCYKDKPRLKTAYELLKVSLDLEHNLLHQVSLPFLIVHGGADKVTDPSVSELLYQSAASQDKTLKFYPGMWHALTSGESPDNIQAVFQDIIAWLDHRSPDTEQEELVSSEVEQKAKHDDQRHQEQLQDGNK

SEQ ID NO: 313424 - protein, 43 aa, Zea mays
  Clone ID: MRT4577_48900C.1.pep
YVVIAQPFTGKCIFLEWDHVEEPFRNYDNITVLREIHRFTNMS

SEQ ID NO: 313425 - protein, 82 aa, Zea mays
  Clone ID: MRT4577_48901C.1.pep
MPSEVSDIKQFIEICRRKDASSARIKKNKKVNNIKFKVRCSTNVYTLVLKDTDKAEKLKQSLPPGLTITDVGKKNPKGKRTA

SEQ ID NO: 313426 - protein, 92 aa, Zea mays
  Clone ID: MRT4577_48902C.1.pep
TTLLTNPHFMGPFFFLTHRGKKVLVKEGGKRGFLPECSKSPGGNTKQAHLMPLFGKKPLDTQQPPGARAGGGAHFHPPGGDLGPGPKARVHA

SEQ ID NO: 313427 - protein, 96 aa, Zea mays
  Clone ID: MRT4577_48903C.1.pep
GLNHPKFSRGGKIFPRKNFFSPPKPGQIFLQTNSFSFQNYPNFPRDRGILKNIPPPYKKMGKYGRAIFKRAKGGGPQWVIPSQPTLFFPKFGLRPF

SEQ ID NO: 313428 - protein, 66 aa, Zea mays
  Clone ID: MRT4577_48904C.1.pep
IEQCVFGCLPARLLALWLCSCLKKSVLPFRLSPREEVSDYKVSLEHFKIIKSNSTGIGDQPEGSDI

SEQ ID NO: 313429 - protein, 128 aa, Zea mays
  unsure (1)..(128): unsure at all Xaa locations
  Clone ID: MRT4577_48905C.1.pep
PPPFCLLSSLRARPPGPRSFAPLPRSPVCPPGARPPXFFFFFAPPFSPPPFFLSPSPGRWGXSPPPPEGPASFLSPKGRGAFFPPPLGLRRLVSSLTNVSFCSCGLHGTICSSLVKRFFGPPKKLNIT

SEQ ID NO: 313430 - protein, 55 aa, Zea mays
  Clone ID: MRT4577_48906C.1.pep
MYSRNPSVSTSQGMPRTSSFVAIAALATDQCSKNSVSIFPCIKDNSQQSTGGPSD

SEQ ID NO: 313431 - protein, 126 aa, Zea mays
  unsure (1)..(126): unsure at all Xaa locations
  Clone ID: MRT4577_48907C.1.pep
PGAFGFRFQTPPYCHVEVLFIRTQRRRREGKEPKSPWSRGLLPPLXPLPGGGKTPPIPPSVPCWGYCSSYAGCKGGVKKFPSFSPPPFFWVFFFGISPFPFPYNNSMLLSTVVQRKLPIVNKLLGR

SEQ ID NO: 313432 - protein, 90 aa, Zea mays
  Clone ID: MRT4577_48908C.1.pep
QGKNIFMAPTIQGYNKIPGPLETKLTGNTPFFPYSGNRAPQQLRNKKWSKNKPLTLLSKKKKGATPTRGPPSQKKGQGNWPISAGWVPEL

SEQ ID NO: 313433 - protein, 130 aa, Zea mays
  unsure (1)..(130): unsure at all Xaa locations
  Clone ID: MRT4577_48909C.1.pep
MAPGWYRRGSVPGQLGRDDTAAHNLSMTVVKGTKGRLNRPTYAXYYDMVMVTRKKEKPDLIKKEQXAVIVRHSKPWAPKXDDGYMYLRRQAGLIVNPKGEMKGAAITAAIGKECAXDLXPMIASEVNATV

SEQ ID NO: 313434 - protein, 160 aa, Zea mays
  Clone ID: MRT4577_4890C.1.pep
RGWPGTTVRTAALFHSRVYIPPHELPQLIMMQSRRRDHGSSGELDVFGATSYFAGLPAPGGDHCRRPSSVTEELCFQANKQVELDTTRSVTRHGPPQQQHQHQRAGWHDDHASSERHATDKAPAAAGSSGRQQAAASIGFVRQEQARRPLELHGVAVAES

SEQ ID NO: 313435 - protein, 76 aa, Zea mays
  unsure (1)..(76): unsure at all Xaa locations
  Clone ID: MRT4577_48910C.1.pep
ANRDADLQQLVQFGQLSMSDXVGNRQQRQQXLKPRAVADPLVGAFKQQQQLLPSNQFFLINHILTRQXPIVGGAIF

SEQ ID NO: 313436 - protein, 64 aa, Zea mays
  Clone ID: MRT4577_48911C.1.pep
GRRSPSQKNVGNSPFSSPPSFSTPFLGPPNKGKSQQRHCSRTLLLMNAPANQLSFSKAMERIKH

SEQ ID NO: 313437 - protein, 92 aa, Zea mays
  Clone ID: MRT4577_48912C.1.pep
PPSDSPFYACPRLSAPQPSPCFTRLPQQSVKYEPGGGRRGSFGGKLGRSGPCRKKIRKGTCIDDVVLADYDCGEDIRIRRRLDSRHAHARET

SEQ ID NO: 313438 - protein, 35 aa, Zea mays
  Clone ID: MRT4577_48913C.1.pep
PAGTPTLSSHIRTAKSYSTSLMPCLRCASQLGSYG

SEQ ID NO: 313439 - protein, 82 aa, Zea mays
  Clone ID: MRT4577_48914C.1.pep
SQSQHRSWCVMTPAPRSRWNLTAVVIDHVMLPPPSVARGRGWCRRPASLQGSSSPPGTHPPHVTVRGVSHGELLRRSDELEM

SEQ ID NO: 313440 - protein, 385 aa, Zea mays
  Clone ID: MRT4577_48915C.1.pep
MRASVEEAGALLARSDSAGRRRRSPPPVQTASPRPGSLRRQSSSFREDVGHAASETYLVSRLTFTLLQYLGLGYRWMSQLLSLTIYAIVLMPGFIQVGYYYFFSSQVRRSVVYGDQPRNRLDLYIPEDNSRPCPVVAFVTGGAWIIGYKAWGALLGRRLAERGIIVACIDYRNFPQGTIGDMVHDASQGISFVCNNIASHGGDPNQIYLIGQSAGAHIAACALMEQAVKESGGNPVSWSLTQIKAYFGLSGGIMEGEESLSRYSPEIVAKTSSAETIALLPLVVLMHGTEDYSIPSSSSQTFADVLQQAGAQARLLLYEGKTHTDIFVQDPLRGGRDPLVEDVLSIIHADDANACQKIALAPTPRRLVFEWQFAWPRIACPPSPG

SEQ ID NO: 313441 - protein, 178 aa, Zea mays
  unsure (1)..(178): unsure at all Xaa locations
  Clone ID: MRT4577_48916C.1.pep
GNPVSWSLRQIKAYFGLSGGYXWISNXWYLVTIRYNXGLMMDLKYNFSIMEGEESLSRYSPEIVAKTSSAETIALLPLVVLMHGTEDYSIPSSSSQTFADVLQQAGAQARLLLYEGKTHTDIFVQDPLRGGRDPLVEDVLSIIHADDANACQKIALAPTPRRLVFEWQLKLARKISPF

SEQ ID NO: 313442 - protein, 98 aa, Zea mays
  unsure (1)..(98): unsure at all Xaa locations
  Clone ID: MRT4577_48917C.1.pep
MHGTEDYSIPSSSSQTFVDVLQQAGAEARLLLYXKGKTHTDIFVQDPLRGGRDPLVEDVLSIIHADDANACQKIALAPTPRRLVFEWQLKLARKISPF

SEQ ID NO: 313443 - protein, 75 aa, Zea mays
  unsure (1)..(75): unsure at all Xaa locations
  Clone ID: MRT4577_48918C.1.pep
IDFNGVVLVQNNLXRTARECWAKQFRKATMSKYYPELLRVMTKYGMYVVKALGYELHGVQFXIQKLVCGIKHVDI

SEQ ID NO: 313444 - protein, 103 aa, Zea mays
  unsure (1)..(103): unsure at all Xaa locations
  Clone ID: MRT4577_48919C.1.pep
LPPLSSQPRPWRMGLPAPALLLMYSFQQGASLRYVLGLCEWWPTYPVPKAKRTKYLLXPQHLSPPLPAVASVYREISYWPCHSTYSPQSTVFAGHHLPLSYPV

SEQ ID NO: 313445 - protein, 130 aa, Zea mays
  unsure (1)..(130): unsure at all Xaa locations
  Clone ID: MRT4577_4891C.1.pep
GILAYDDGYNYTETYMMYIFYVLHDVHGAIGCWSTGMLIMSFLINDIFENVAADAMKLARYNXRPHITLREIQTSXRLGLTGEFAKHAVYEGTKAVTKFTSFYDPCDGHVRAGGRRGSADVILIAMDDDD

SEQ ID NO: 313446 - protein, 128 aa, Zea mays
  Clone ID: MRT4577_48920C.1.pep
RTRGAGGRAVCNVPASRFRHRQDNSHGSSPIWDDSTQTTMAVTPLTSTNKRCKNVRDAETAGADTWSGKRSGTSQPFSSRADLWSCVTVNRDRVRNPMSGPRAPDGSERTVALHEHERWLRAQSHSGR

SEQ ID NO: 313447 - protein, 42 aa, Zea mays
  Clone ID: MRT4577_48921C.1.pep
AGSYFKTQNGLVELFGVRPKFLDGHLWEFAQCIHRSLLVYNH

SEQ ID NO: 313448 - protein, 67 aa, Zea mays
  Clone ID: MRT4577_48922C.1.pep
TSRALHPNLSIQFEYRFTQAMTQHTVTYKFFWRQPYPLHLPLPPSPLTHRKRELNTCPLPSVPLLHT

SEQ ID NO: 313449 - protein, 79 aa, Zea mays
  Clone ID: MRT4577_48923C.1.pep
HPRQEAENWDGTSTSYMATATGGYKVFSQGTTSDMRGGMAGTLLQQPIMSTHDRWTDGSSDSGRNCPQVDISYRMYSLF

SEQ ID NO: 313450 - protein, 365 aa, Zea mays
  Clone ID: MRT4577_48924C.1.pep
MALQAATSFLPSALSARKERVSRSADIRAQTAAVSSPSVTPASPSGKKTLRKGTAVITGASSGLGLATAKALAETGKWHVIMACRDFLKASRAAKAAGMDKDSFTVVHLDLASLDSVRQFVRNVRQLEMPIDVVVCNAAVYQPTAKEPSYTADGFEMSVGVNHLGHFLLARELLSDLQSSDYPSKRLIIVGSITGNTNTLAGNVPPKANLGDLRGLAGGLNGVGSSVMIDGGEFDGAKAYKDSKVCNMLTMQEFHRRYHEETGVTFASLYPGCIATTGLFREHIPLFRLLFPPFQKYITKGYVSEEEAGKRLAQVVSDPSLTKSGVYWSWNKNSASFENQLSEEASDADKAKKLWEISEKLVGLA

SEQ ID NO: 313451 - protein, 117 aa, Zea mays
  Clone ID: MRT4577_48925C.1.pep
MALQAATSFLPSALSARKEGSVKDSASFLGVRLAADGLKLDTTARRSSPARRPASASPRRRPSRRQVVSDPSLTKSGVYWSWNKNSASFENQLSEEASDADKAKKLWEISEKLVGLA

SEQ ID NO: 313452 - protein, 421 aa, Zea mays
  unsure (1)..(421): unsure at all Xaa locations
  Clone ID: MRT4577_48926C.1.pep
MALQAATSFLPSALSARKEGSSVKDSAFLGVHLADDGLKLETAAMGLRTKRVITSVAIRAQAAAVSSPSVTPASPSGKKTLRKGTAIITGASSGLGLATAKALAETGKWHVIMGCRDFLKASRAAKAAGMDKDSFTVVHLDLASLDSVRQFVKNVRQLEMPVDVVVCNAAVYQPTAKEPSYTADGFEMSVGVNHLGHFLLARELLSDLQSSDYPSKRLIIVGSITGTCHALTFGFGCVPLTELGRECSIEXNTNTLAGNVPPKANLGDLRGLAGGLNGIGGSAMIDGGEFDGAKAYKDSKVCNMLTMQEFHRRYHEETGVTFASLYPGCIATTGLFREHIPLFRLLFPPFQKYITKGYVSEEEAGKRLSQVVSDPSLTKSGVYWSWNKNSASFENQLSEEASDADKAKKLWEISEKLVGLA

SEQ ID NO: 313453 - protein, 383 aa, Zea mays
  unsure (1)..(383): unsure at all Xaa locations
  Clone ID: MRT4577_48927C.1.pep
CCVQGSVKDSASFLGVRLAADGLKLDTTALGLRTVRVSRSADIRAQTAAVSSPSVTPASPSGKKTLRKGTAVITGASSGLGLATAKALAETGKWHVIMACRDFLKASRAAKAAGMDKDSFTVVHLDLASLDSVRQFVRNVRQLEMPIDVXVVCNAAVYQPTAKEPSYTADGFEMSVGVNHLGHFLLARELLSDLQSSDYPSKRLIIVGSITGNTNTLXAGNVPPKANLGDLRGLAGGLNGVGSSVMIDGGEFDGAKAYKDSKVCNMLTMQEFHRRYHEETGVTFASLYPGCIATTGLFREHIPLFRLLFPPFQKYITKGYVSEEEAGKRLAQVVSDPSLTKSGVYWSWNKNSASFENQLSEEASDADKAKKLWEISEKLVGLA

SEQ ID NO: 313454 - protein, 58 aa, Zea mays
  Clone ID: MRT4577_48928C.1.pep
LHPFVSTCQLCWSGGPKNLGHRLRLMKEVVPCTADNGSSPARPGPMLAVCPWFLNVIL

SEQ ID NO: 313455 - protein, 123 aa, Zea mays
  unsure (1)..(123): unsure at all Xaa locations
  Clone ID: MRT4577_48929C.1.pep
MVKITEQDINRALHNLFAVRMRLGLFNGNPKYNRYGNIGPDQVCTQEHQNLALEAAQHGVVLLKNDANALPLSKSQVSSIAVIGHNAXDATRVLGNYLGPAWIXVTPLQALQGYVKDTRFLAG

SEQ ID NO: 313456 - protein, 246 aa, Zea mays
  unsure (1)..(246): unsure at all Xaa locations
  Clone ID: MRT4577_4892C.1.pep
LASASLLRTSGSTDSYPQTQTRRVTLYLRTNVSVKAAEKYSCRVLCKTDNFSSTSIHHTHARSLHLKLPGVFPGWRHVCHSTHTHCGYALNLSSSARDTEGIEPKYRKXIRKGIIAFVAVDESRFTLAHELTCTPYFRSARSWGLFRRRSRLLCRKCGGHIGSAYGKEEEEDSSSSSLFGGDGSSDDTRPSSGSGRRSSVASSQKRYVVRISALQPSLDDLLSFPSRIDDALQVSSWCAVFFFQPG

SEQ ID NO: 313457 - protein, 116 aa, Zea mays
  Clone ID: MRT4577_48930C.1.pep
RPAVGYFRDVLVHLQRRRKVIHLPRGASPRLRQGVGACCPSWMHEARNRFLSFSRSAGRVALIGGHNEQYQQHHGRLPHAYRTQCICHVRAPSIALRICISIGVSSWYLIGSRPAR

SEQ ID NO: 313458 - protein, 82 aa, Zea mays
  Clone ID: MRT4577_48931C.1.pep
SVLPYHSRVCCSHAPGPDYGSPSALSTHITLLVSLLRAVASSSCSICPMHEPDSRTLWSRHSGVSRGMSTEADAGSSRHSGR

SEQ ID NO: 313459 - protein, 171 aa, Zea mays
  Clone ID: MRT4577_48932C.1.pep
MAPGSKAERKAALDAGAWMFNVVTSVGIIMVNKALMATHGFSFATTLTGLHFAMTTLMTLVMKWLGYIQPSYLPLPELVKFSFFANLSIAGMICILEIIFYGVRYSRDTKLSIVLVLIGVAVCTVTDVSVNSQGLLAAVIAVWSTALQQHVSIVISKPVHCSYICILHLFL

SEQ ID NO: 313460 - protein, 114 aa, Zea mays
  unsure (1)..(114): unsure at all Xaa locations
  Clone ID: MRT4577_48933C.1.pep
ARPSSVSAPGASHPSPVPSLAEPCFCRSAASPAGAVGPCFCFQVAPLWFASLAFRCIGLVLSVAVCGLVLSLSCSCAAGVSPPHALTKTLVSVSPCVVEQKKKXSGARSEASAL

SEQ ID NO: 313461 - protein, 161 aa, Zea mays
  Clone ID: MRT4577_48934C.1.pep
MATELTVQSERAFQKQPHIFQNSKTKTKSTRPGKGGRRWYKDVGLGFRTPKTAIEGSYIDKKCPFTGLVSIRGRILTGTVVSTKMHRTIIIRREYLHFIQKYSRYEKRHKNVAAHVSPAFRVQEGDQVTVGQCRPLSKTVRFNVLRVLPRTGKSVKKFSKF

SEQ ID NO: 313462 - protein, 84 aa, Zea mays
  Clone ID: MRT4577_48935C.1.pep
CMEYVELRIFLQKKQFLMQGYFVKHFIVFKVHPLPKVHEVFQYKTKSLGLNHLGILVVSYRFSFSKTTTGFPVPHSSWLNHRTF

SEQ ID NO: 313463 - protein, 114 aa, Zea mays
  Clone ID: MRT4577_48936C.1.pep
RDWLKTMVSTRNSDGVVDPKIPKKPSSRALKKALLVALRCVDPDALKRPKISHVIHMLEVDDFPYRDDRRGTRAPGQARLPETPAGGSGRPETDSSGNGGSTQAEPFRWRNPEA

SEQ ID NO: 313464 - protein, 83 aa, Zea mays
  Clone ID: MRT4577_48937C.1.pep
LKGCTMGTSSPLRSYLVVRTRPVDSLMGAPTKQIRLCTNQIRQPLVWALGLEAPKANTNSGLVKANLQGECTTNIHELIYITF

SEQ ID NO: 313465 - protein, 62 aa, Zea mays
  unsure (1)..(62): unsure at all Xaa locations
  Clone ID: MRT4577_48938C.1.pep
XXXFFFFWGGNKNLGHFFFGSVHSGGHPRGQPGFPPLFQRWDGPLPRDRSERLPHSFVWLDN

SEQ ID NO: 313466 - protein, 122 aa, Zea mays
  Clone ID: MRT4577_48939C.1.pep
MSEAAVRVIGLWPSPFVIRVLIALKLKGVEFEFVEEVVGRKSELLLIVCVPTRPWSTPSLTRTSSLSSASPMAPSPSLSMLPPSEQKGSVHASSFSLSLRPFQGESTHTLVALYSLVQSLLF

SEQ ID NO: 313467 - protein, 189 aa, Zea mays
  Clone ID: MRT4577_4893C.1.pep
VLCKSDNFSSTSIHHTHARPLHLKLPGGFPGWRHVCHSPLTPTVAATGTGSCGYCGYALNLSSSARDTEGIGPKYRKQIRKGVVAFVAVDESRFTLAHELTCTPYFRSARSWGLFRRRSRLLCRRCGGHIGSAYGKEEEEDSSSSSLFGGDGSSDDTRPSSGSGRSSVASSQKSYVVSSWCAVFFFQPG

SEQ ID NO: 313468 - protein, 48 aa, Zea mays
  unsure (1)..(48): unsure at all Xaa locations
  Clone ID: MRT4577_48940C.1.pep
SIMTEVTKQLQPRFMPNPRXIKKRIESLIEREFLERDKVDRKMYRYLA

SEQ ID NO: 313469 - protein, 81 aa, Zea mays
  Clone ID: MRT4577_48941C.1.pep
KKIPFLFNFEYGKAFSPSNHFRVGGSQTSLQGGGGKMKLIPFSLVPQPRTKHGDTSPLATLTGPTKITLCRLYKQWPLQPT

SEQ ID NO: 313470 - protein, 233 aa, Zea mays
  unsure (1)..(233): unsure at all Xaa locations
  Clone ID: MRT4577_48942C.1.pep
MSEAAVRVIGLWPSPFVIRVLIALKLKGVEFEFVEEVVGRKSELLLRSNPVHKKIPVLLHHGKPISESLIIVQYIDEVWSSGAPAFLPVDAHARAVQRFWAQYVDDKLPWAIRILKGTDDGGMEQAAGQLSAXALQLLEEAFAQLSQGKRYFGGDSVGYLDIALVSHVGWVKAVEKIAGVTLLDKAKVPNLVAWADRLCAHPAVVDAIPDADKFVEFSVTYGSFSKPINAPAK

SEQ ID NO: 313471 - protein, 254 aa, Zea mays
  Clone ID: MRT4577_48943C.1.pep
MSRLTTTETVVLPVELSELGKKMSEAAVRVIGLWPSPFVIRVLIALKLKGVEFEFVEEVVGRKSELLLRSNPVHKKIPVLLHHGKPISESLIIVQYIDEVWSSGAPAFLPADAHARAVQRFWAQYVDDKLPWAIRILKGTDDGGMEQAAGQLSAALQLLEEAFAQLSQGKRYFGGDSVGYLDIALVSHVGWVKAVEKIAGVTLLDKAKVPNLVAWADRLCAHPAVVDAIPDADKFVEFSVTYGSFSKPINAPAK

SEQ ID NO: 313472 - protein, 63 aa, Zea mays
  unsure (1)..(63): unsure at all Xaa locations
  Clone ID: MRT4577_48944C.1.pep
SSPSAKSSACHTHDLSLXVCSCILVVATTVRTEKRGKEYSPVSKPIQPDRDRQQKDSDYPDAW

SEQ ID NO: 313473 - protein, 138 aa, Zea mays
  unsure (1)..(138): unsure at all Xaa locations
  Clone ID: MRT4577_48945C.1.pep
KGRDLTSLTVDQLDRHMIFPMMXTIHDRXVYLKLQMLKNKIRVVASPDCATYAMEHQRSVHNCRDHPXDRRKRRSEEGYRLRPLEEAQVPVAPYLHIPHCEQDLQAXDRPGSIHMFEQRYQIGPDXQSGDLYQHAQPY

SEQ ID NO: 313474 - protein, 79 aa, Zea mays
  unsure (1)..(79): unsure at all Xaa locations
  Clone ID: MRT4577_48946C.1.pep
NYQALILGPRCPFCNPGTFGLCFMVLDEQDTXRLLRLPAFIMINIWIWICGIATLGSSLFNIITDXHTRFDGRSSYNDL

SEQ ID NO: 313475 - protein, 86 aa, Zea mays
  unsure (1)..(86): unsure at all Xaa locations
  Clone ID: MRT4577_48947C.1.pep
SGLWFALDGVLIFAEDLEGCSYEDIWCCPVFMITHFQWQYTLLXFLFASTWPLLFVDQVTTLWSYLGGDCKVTGGEGTTRVKRAIC

SEQ ID NO: 313476 - protein, 54 aa, Zea mays
  Clone ID: MRT4577_48948C.1.pep
YASMYPLMCKSPEVQFLFVRGSCTPIDGCYEAHRGPCVHAKIMVSSRWMISPIC

SEQ ID NO: 313477 - protein, 98 aa, Zea mays
  Clone ID: MRT4577_48949C.1.pep
SSGASRGTAAAADDEEGAAAGGWRFLLGTQPPPLPISGLRSGQRAAPIRSNPIQPNHRPRHVPPRSPPHAGNLGIRRGWLLGWTGGVRRQDSREGEEW

SEQ ID NO: 313478 - protein, 58 aa, Zea mays
  Clone ID: MRT4577_4894C.1.pep
RSLFGGRPFFFFSRLFFFFFQLNAILTLIHCISLCSQNIIFVDTKKCSELKLILQFFV

SEQ ID NO: 313479 - protein, 90 aa, Zea mays
  unsure (1)..(90): unsure at all Xaa locations
  Clone ID: MRT4577_48950C.1.pep
EAGGPLGEVVDPLNPAGXFKPHGHTDDPEAFAELKVKELKNGRLAMFTKFGIFVQAIVTGKGPLENLADHLADPVNNNAWAXATNFGPGK

SEQ ID NO: 313480 - protein, 146 aa, Zea mays
  unsure (1)..(146): unsure at all Xaa locations
  Clone ID: MRT4577_48951C.1.pep
MLLFPPHLRGVWSAELHMFTQGALXYVPNKSLIYAQSILAIWACHAALMGAIEGYRVAGGPLGEVVDPLYPGGSFDPLGLADDPEAFAELKVKELKNGRLAMFSMFGFFVQAIVTGKGPLENLADHLADPVNNNAWAYATNFVPGK

SEQ ID NO: 313481 - protein, 64 aa, Zea mays
  unsure (1)..(64): unsure at all Xaa locations
  Clone ID: MRT4577_48952C.1.pep
RYEPLHSGGRKKCIIGTVCFNLNGTGHYFVVSAHSGPICRALCVPGPVHGKKSPGGPFXXKKRR

SEQ ID NO: 313482 - protein, 95 aa, Zea mays
  Clone ID: MRT4577_48953C.1.pep
KVSKPEASAAVEAVDSCTLAFLFPLRVFRPPQIHSLLFPPCKMLHVEQSKHFHFPSIHASSQRCSNQSTFYPGHFSGSILIGTLQLDTVVVQRER

SEQ ID NO: 313483 - protein, 253 aa, Zea mays
  unsure (1)..(253): unsure at all Xaa locations
  Clone ID: MRT4577_48954C.1.pep
MAPNPAAIALLAALDGNLRLLKKMSKKMDLRETKDPKGLNALHFAANKGSLEICKFLLEDVGVDVNSVSSVGATPMFYAALKGNLQVARYLLDHGSDPAKPSERGLTPLHNAAEHGHCEIVRLLLSKGVDVDVINYRGTPLHMTAAKGQHQAMKILLEHGADPNXSSHHIFSPLMMACCGNSLECMKLLIEAGADVNGNSSSGPTPLTGAVDDGSTEFVKFLLEAGADPNIPNSTGXYSIKRAAVRGQRELVE

SEQ ID NO: 313484 - protein, 73 aa, Zea mays
  Clone ID: MRT4577_48955C.1.pep
PLPYRVTVPGWASTISSPRWSSSTSPWTPRSRTIMILTLLLQIPHTGARSVGILGMHLKLRGNDLHPSLMHST

SEQ ID NO: 313485 - protein, 244 aa, Zea mays
  Clone ID: MRT4577_48956C.1.pep
MVSSKISIVGAITSPIVVVVALTLLITLLASTVDAQPYSTMPPSMIGDLLPRTRVPPSGPSHPPPMAAMPPSWRMPAAGPTKPPSMAAMSPDVVGDLLPRGRVPPSGPSHPPPLVAMSPDVVGDLLPRGPSHPPPRVAMSPDVVGDLLPRGRVPPSGPSHPPPLVAMSPDVVGDLLPRGPSHPPPRVAMSPDVVGDLLPRGPSHPPPRVAMSPDVVGDLLPRGPQPSAVAMSLLRLAIHHPWRK

SEQ ID NO: 313486 - protein, 246 aa, Zea mays
  unsure (1)..(246): unsure at all Xaa locations
  Clone ID: MRT4577_48957C.1.pep
VTSHYPYVFILTFPTSLSFAPRTSLLYSIISSKGGGWLGPRGSKSPTMLGDITTKGGGWLGPEGGTLPRGSKSPTTSGDIATLGGGWLGPRXGSKSQTTSGDIATLGGGWLGPRGSKSPTTSGDIATLGGGWLGPCGSKSPTTSGDIATLGGGWLGPRGSKSPTTSGDIATLGSGWLGPRGSKSPTTSGDIATNGGGWLGPEGGTLPRGSKSPTTSGDIAAMERGFIGPAYVILHDGCIATRVEDG

SEQ ID NO: 313487 - protein, 54 aa, Zea mays
  unsure (1)..(54): unsure at all Xaa locations
  Clone ID: MRT4577_48958C.1.pep
VVRIGFWGGGILKCGLGESIFILKIPGWLEKMGVGXRKKKKNSPTPEGGRRMKM

SEQ ID NO: 313488 - protein, 397 aa, Zea mays
  unsure (1)..(397): unsure at all Xaa locations
  Clone ID: MRT4577_48959C.1.pep
MPPSMIGDLLPRTRVPPSGPSHPPPIVAMQPSWRMPSAGPMKPPSMAAMSPDVVGDLLPRGRVPPSGPSHPPTLVAMSPDVVGDLLPRGPSHPPPRVAMSPDVVGDLLPRGPSHPPPRVAMSPDVVGDLLPRGPSHPPPRVAMSPDVVGDLLPRGPSHPPPRVAMSRDVVXDLLPQGASHPPPRVAMSPDVVGDLLPRGRLPPSGPSHPPPLVAMSPSIVGDLLPRGPSHPPPRVAMSPDVVGDFLPRGPSHPPPFLAMSPDVVGDLLPQGPSHPPPRVAMSPDVVGDLLPRGPSHPPPRVAMSPDVVGDLLPRGPSHPPPSVAMSPDVVGDLLPRGRVPPSGPSHTPPLVVMAPSIGGDLLPRGPSHPPPLEEMIEYSNDVLGANDKLVGNVRMNT

SEQ ID NO: 313489 - protein, 163 aa, Zea mays
  Clone ID: MRT4577_4895C.1.pep
MERSLDSYSSIKDVTYSCGYCGYALNLSSSARDTEGIGPKYRKQIRKGVVAFVAVDESRFTLAHELTCTPYFRSARSWGLFRRRSRLLCRKCGGHIGSAYGKEEDEDASSSSLFGGDGSSDDTRPSSGSGRSSVAPSQKSYVVRISALRPSSDDSAVVPFTHR

SEQ ID NO: 313490 - protein, 256 aa, Zea mays
  Clone ID: MRT4577_48960C.1.pep
VTSHYPYVFILTLPTSLSFAPRTSLLYSIISSKGGGWLGPRGSKSPTMLGDIATKGGGWLGPEGGTLPRGSKSLATLGGGWLGPRGSKSPTTSGDIATLGGGWLGPRGSKSPTTSGDIATLGGGWLGPRGSKSPTTSGDITTLGGGWLGPRGSKSPTTSGDIATLGGGWLGPRGSKSPTTSGDIATLGGGWLGPRGSKSPTTSGDIATKGGGWLGPEGGTLPRGSKSPTTSGDIATLGGGWLGPRGSKSPTTSGDI

SEQ ID NO: 313491 - protein, 217 aa, Zea mays
  Clone ID: MRT4577_48961C.1.pep
MTPAHQLEPHFLDQIVQASAGYILPSVLLAANLVAYLSQDETPLMNFFVLMSLPLSIYSMPTTEETEAINETQALNIEDAVKLPDSLALYHLEGFESEDSALEKRRHVTVCKRIITITSHCVIIGGAIKDGILQISAAIKHASNQKTCTTFTGHAGPNGNLFYRYRSTGRHCDTTAEQETIAGAIEHHIKNHGHKLCGTPWFGINSWGNFGRDNLLI

SEQ ID NO: 313492 - protein, 377 aa, Zea mays
  unsure (1)..(377): unsure at all Xaa locations
  Clone ID: MRT4577_48962C.1.pep
TLPAISAPALTGSPLSPPHPPAAGEPLLLHDPCFPGGNSMNYIESIPPLNGGNYELWREKLELALALLDIDLAITDPCPIAPVDPVQEENESDDDFNARVRNHAPIKMKYDLYKVKWDQSNRKCLMVIKSSIMDTIRGAFPACTTATEYLSKVESHFTISSKAYACTIIERLLTDKYTGGGVREHILKMASMASKLKPMEMALPDEFLVYLIFASLPKEFEAFEINYNSQPDNWGIEKLIAMCVQEEERIKASRGDSINYVGIYKAHGKAPQNDHHLKNKEVDMNACYWCEKSGHHQKDCPSFLKHLIXIKGFHTRRTLQRGERCIKVVNGVDNEVEVIELPLLLNNSFILHLNNVLYVSSFLSCEFKLSNLLEIEK

SEQ ID NO: 313493 - protein, 90 aa, Zea mays
  Clone ID: MRT4577_48963C.1.pep
KKQPQKGGRNRVKKKNPGYYPKKQQPTIGGTTTGQFPNKIGHTGYPPKFKGVKEKKKGSFPNLKNQTCPTGALYKNKKGGDNRVGAKKGT

SEQ ID NO: 313494 - protein, 61 aa, Zea mays
  Clone ID: MRT4577_48964C.1.pep
SFSWVLPKSVADHKQVTWKPVGLQFLIQLAETVNGHGPLRLTSIIYRISLGKNKPRIFCNE

SEQ ID NO: 313495 - protein, 62 aa, Zea mays
  unsure (1)..(62): unsure at all Xaa locations
  Clone ID: MRT4577_48965C.1.pep
MICYYGLIFRFQKKKKKKKKXKKKKKKKKKKMKKKKKKXXKKKKKKXXNFYQFLRGNLKKWG

SEQ ID NO: 313496 - protein, 52 aa, Zea mays
  Clone ID: MRT4577_48966C.1.pep
LMFNFTFIDCPSPHQHTCYRGILYHPFINLMLKHFYYPPRQTLSSYLPYLWT

SEQ ID NO: 313497 - protein, 121 aa, Zea mays
  Clone ID: MRT4577_48967C.1.pep
MKTSVPGGRTAAAMTSGRMLLPGGPRPCPNSRGKDGQKAVELEVGPRVAPANSSAAEALPAAVAGGGTGSGSEAARLSEPGTVQLSAPRTTPVLPPDHGGKERATAHAGADPNSAHSPPRH

SEQ ID NO: 313498 - protein, 264 aa, Zea mays
  unsure (1)..(264): unsure at all Xaa locations
  Clone ID: MRT4577_48968C.1.pep
RPGKNRVWLGANSAMQSKVMSALHSSALGGHSGFPVTYSRIKQLFYWPRMKSAIKEFVAACGVCHQAKPDRARYPGLLQPLPVPTQAWQAISLDFIEGLPPSGGYNSILVVVDRFSKYGHFIALRHPFTALKIAQVFMAEIYRLHGMPQSIVSDRDRIFTSTLWRELFRLSGTQLLMSSSYHPQTDGQTERVNQCLETFLRSXVQACPSKWSLWLSVAEYWYNCCXHSSLXHSPFEVLYGRSPRHFGLSVDDSXSHVDLASWLG

SEQ ID NO: 313499 - protein, 70 aa, Zea mays
  Clone ID: MRT4577_48969C.1.pep
YTPPHLFPLNKPKSHNFFPSLNHNHYNPTSNSNNNLDTYNIYIFKVLKLVHTYIIIFSNAISIINFFFYH

SEQ ID NO: 313500 - protein, 69 aa, Zea mays
  Clone ID: MRT4577_4896C.1.pep
IFTGLEVLDGAGRERRRRLGRLSSRAPWPLHTAAMASGAAAVTFCKKLERASRRDELNWEFPNPEWLGR

SEQ ID NO: 313501 - protein, 306 aa, Zea mays
  unsure (1)..(306): unsure at all Xaa locations
  Clone ID: MRT4577_48970C.1.pep
MGLLPAIPHQPPVRARQGGASPPAHPPTGPPPXMRCAPRPRGGRNTRRRXSSSRTRYSAITSSPXSRRNKVSKPKPTKQHRTRRLEPLKQSKPPRRRPADRRRGCAPCAGIERGKGRGPAGSLGGWSSPRRAHGGTPGVHAPVAAGPGPAQPGRAAPRAARAPPGPGPGVVAVAVAAVAARAAGRGGAAVARARAGRPGPGGRRAVGRRHGRRVRRARLHDVLLLPLLRLHALTMDSAVPQPSKVSTAAACQAKQVLLPPASMGDDSSVRPHGVRSLRVFFFYCVLVVVDQLWLGGVTVMAMVTRM

SEQ ID NO: 313502 - protein, 91 aa, Zea mays
  unsure (1)..(91): unsure at all Xaa locations
  Clone ID: MRT4577_48971C.1.pep
QIAGXREDGXPAPACASVRGAVAASLSAPRRSTAGAAGCGRRPCPGAAISVKGRCVPRPSIRLALSRTRARRAATGDRAAAAALRPARGSN

SEQ ID NO: 313503 - protein, 47 aa, Zea mays
  Clone ID: MRT4577_48972C.1.pep
IYIHHWRALIISQTTLLATMILYILPMIKLYKLTLNITTIITIFNIF

SEQ ID NO: 313504 - protein, 69 aa, Zea mays
  Clone ID: MRT4577_48973C.1.pep
KQGNQRALNKQKGLFNKVIVHFCPTLKPFFGQWALPTVGNQKQSHVLPKGHNFPLHKNFIFFLKNPGEK

SEQ ID NO: 313505 - protein, 75 aa, Zea mays
  Clone ID: MRT4577_48974C.1.pep
HSSDHSSDTSYPHYIHTPTGLHATASWNQYNSPPSHHPKHHPSSTNTTTATRSSSSNVPTTTTTDIAMTNAKHQQ

SEQ ID NO: 313506 - protein, 346 aa, Zea mays
  Clone ID: MRT4577_48975C.1.pep
MVCLTPAAAALLLVVVLAAAVSALPAINVTTMAFEDGYAPLFGHGNILRSADHRTVSLLLDRSTGSGFISSSMYQHGFFSASIKLPSDYTAGVVVAFYASNGDVFEKRHDELDFEFLGNIRGKPWRVQTNVYGNGSVGRGREERYVLPFDPTTEFHRYSILWTPAAVAFYVDDVPVREVRQSAAMGGDFPSKPMSVYATVWDASTWATAGGRYRVNYRYGPFVASFTDLALLGCRVDGPIQQTTAERCAAAAEALRASDVAVMTVEKQQAMRRFRERNMVYSYCYDTLRYPAAFPECDVVESERRRFKDTGHLRFALRRRMSPRRSHGRAASRDRVRELKKRAADM

SEQ ID NO: 313507 - protein, 100 aa, Zea mays
  Clone ID: MRT4577_48976C.1.pep
SGAASCSRVGQHAPPGRISSPSLLHAHLRAPDLQLHVVKQRDSSRAFLYASICCFLRLRLDSGLVELLSSCRAPAPSNNRVVHAPSAALSVSVKWGHQQL

SEQ ID NO: 313508 - protein, 69 aa, Zea mays
  Clone ID: MRT4577_48977C.1.pep
SHNFNIDKLIGNMRNDLSYVLSRRLVVRRKREAQTSNVIQFLFSIRALAISLVTYKSREYSEIVIGATT

SEQ ID NO: 313509 - protein, 222 aa, Zea mays
  Clone ID: MRT4577_48978C.1.pep
FSGWCRLLLLRCRARGPCGPLRLRRMRKQEADARPAVPPCAPIARGRPSCSPAPSGPVVEESSSPASRPSLCFPCRGGVLLCAGAAQPHVSFRRCDAHGRRCAPPYSTPTFARPSAARRDAARLELRVPVRVDLLLPSASSGLRPCRAPLLASRSCSIEQQSCSCPVRGTIRLRQAGTLATSAASSPRGGVSVNDSRLVGSLCCRSFAEMTEICMCCKSFAD

SEQ ID NO: 313510 - protein, 210 aa, Zea mays
  Clone ID: MRT4577_48979C.1.pep
LSGRATMVPTAASLMPRAARAVRCASLRPHRPRQTAVLACSIRSRRRGTPLRQRRARLCIAHVVAVCSSAPAPAPHSLMSAFVVAMPTAGGVLLPTPRPPSPDLQLRVVKQRDSIRAFLYASICCFLRLRRDSGLVELLASRSCSIEQQSCPCPVRGTIRLRQAGTLATSAASSPRDRVSVNDSRLVGSLCCRSFAEMKEFCMCCKSFPD

SEQ ID NO: 313511 - protein, 52 aa, Zea mays
  Clone ID: MRT4577_4897C.1.pep
MASRVRCLRYRHLGQFAPLGGKQTAAQLPGDWISIGYSTQWLWYSVYATFFH

SEQ ID NO: 313512 - protein, 167 aa, Zea mays
  Clone ID: MRT4577_48980C.1.pep
MATACRIWTDGSTVVSALLPPRRALASEEMAFRVAAGHAVLSTGRNVAPMTCTPPRTTTPAHRNAKSAAKTRRCGAAATDRWALAAGEPPPPPLPLPAAAPPLQLPSLLSFLSFADIAIAGASHNRRCRSGSSPDPKAAAASLTGPQHPQRATGSQGASAPRQYLDG

SEQ ID NO: 313513 - protein, 199 aa, Zea mays
  unsure (1)..(199): unsure at all Xaa locations
  Clone ID: MRT4577_48981C.1.pep
FSGPLLPDSTARRPASSLRGLLILRMVSIATSPMPRAARCAPTARGRPLLACSIRSVVVGLLFAGVAPVSVLPMPWRRAPLRRRHTASCQLSSLRCPRPAACSSLLHAHLRAPDLQLRVVKQRDSSRAFLYASICCFLRLRQDSGLVELLSSRRAPAPSNNRAVHALSAALSVSVKRGHQQFQRPPPLAXWVSVNGSSF

SEQ ID NO: 313514 - protein, 48 aa, Zea mays
  unsure (1)..(48): unsure at all Xaa locations
  Clone ID: MRT4577_48982C.1.pep
NXPEEGINSPLNRPALFAARLVLHKYYRDQKRTPHRCNFLFLSEGAAK

SEQ ID NO: 313515 - protein, 84 aa, Zea mays
  Clone ID: MRT4577_48983C.1.pep
FKNNADGMVKRPPIKPTLLEAFFKNNPAGRFIDLLKRLFVGVVVIKSVDKKSSNGAGVCKLFCQEKMIYLSGRGPSLLCYLMEA

SEQ ID NO: 313516 - protein, 66 aa, Zea mays
  Clone ID: MRT4577_48984C.1.pep
RVRYARHRTLPHGSLYHSLASCPVHRIAFNTSRTDYSSYPCASPPSDFSTLTMCNNNADPIEADMD

SEQ ID NO: 313517 - protein, 209 aa, Zea mays
  Clone ID: MRT4577_48985C.1.pep
GHGHLYGAMEQERGTRRGARQGRSLAKAEGSSRLTRTGTRGSSLVASRRAAEGQAHEGGRGVGRSTPPAVGIAAMKANMRLCGAGAEEHAATAWATQRQARRRRRGVPRRRDRMEQASTTVCLGRWGRKEAQRAAPPPPACAFGGGAADRTGRPSGIREVAVGTIRRSSSPPRELAGCRAVEPGRRGLRGGRRGASGRETRCGPAARAP

SEQ ID NO: 313518 - protein, 223 aa, Zea mays
  unsure (1)..(223): unsure at all Xaa locations
  Clone ID: MRT4577_48986C.1.pep
ERKRYGWRGLNXFAVVSWNMAXRVLKEDKYDYCSEFFELATEFXSSGNAEEGANILMNCKTLIMSVSSILLEDTLNKSQLSDSDFNXGTAILKTLXKLLPLTLPWTLVTYDQLETNLPHSLSYGIISVAVRKLVCLAALHDYSGSMSDATMTYFDMLATVFYTTEEIKSSIIVYIISGLRASRISSGGECQQQYKEHVEKLRMKHGVRKQKTSTRAGTHVNGL

SEQ ID NO: 313519 - protein, 94 aa, Zea mays
  Clone ID: MRT4577_48987C.1.pep
RSPSPSFGFMLLGSLWVMGAVTVDQLAWLMVCAANSAMMSLVCILRFHVSVSGPEYAAKVAVRAGLLHHHHAVPSHQPVCTCLEYALSGPHAKT

SEQ ID NO: 313520 - protein, 159 aa, Zea mays
  Clone ID: MRT4577_48988C.1.pep
MAEQTEKSFLKQPKVFLSTKKADKAKRPGKAGNRFWKSVGLGFKTPREAIDGTYIDKKCPFTGTVAIRGRIIAGTCHSAKMNRTIIVRRNYLHFVKKYQRYEKRHSNIPAHISPCFRVKEGDHVIIGQCRPLSKTVRFNVLKVVPAGTTGGGKKAFVAA

SEQ ID NO: 313521 - protein, 86 aa, Zea mays
  Clone ID: MRT4577_48989C.1.pep
PSPKPPLPIVPGGSFFYGSMERPKDSIRAPTHSPVILAATPWATPPTYRRTAADPPDSTGAVQTTPSPTPPVDETPPYPGGADHRT

SEQ ID NO: 313522 - protein, 142 aa, Zea mays
  unsure (1)..(142): unsure at all Xaa locations
  Clone ID: MRT4577_4898C.1.pep
NIRAHQFHQXLVXATLVEFFKKHRFFPFNQRVALNLAVYWHHHFPLSKXVVAYPKHFFPFTQXEALNFVVYFKKHQLFPLSKXVNVSLVAFLTHHRWLRFTWQVRPKVGPFLQRHQLLPFNHLVLPNSPVFSHHPTMGGALF

SEQ ID NO: 313523 - protein, 357 aa, Zea mays
  Clone ID: MRT4577_48990C.1.pep
MAHAATLAAAAAVVVLIVVCCCSSSEAASHSANARQPPLAPGLSLDFYKRSCPRAESVVRRFVQDAVRRDAGLAAGLLRLHFHDCFVQGCDASVLLDGSATGPGEQQAPPNLTLRPTAFKAINDIHDRLQKECGGAVVSCSDVLALAARDSVVVSGGPSYKVPLGRRDSASFATREDVLSGLPPPTAAVPALLAVLSKINLDATDLVALSGGHTIGLGHCASFESRLFPRQDPTLNATFAGHLRRTCPAKGTDRRTPLDVRTPDAFDNKYYVNLVNREGLFTSDQDLFSNPGTRPLVEKFARSQRDFFDQFAFSVVKMGQIKVLTGAQGQIRRNCSARNAGMTWSVVDEAAQQSFVF

SEQ ID NO: 313524 - protein, 156 aa, Zea mays
  unsure (1)..(156): unsure at all Xaa locations
  Clone ID: MRT4577_48991C.1.pep
MAASDVEHRCLVGGLGWATDNHSLHNAFSTYGDVLKSKIMLYREXTTKSRGFCLDTFSREEVMRNDIXGLNRKELYGRNITTNKEPTRRGRKGGGLGYAGGHERSCYGGGGRRDGCGGYNGGGTYGGCGRYGGGGGEYGGRNRGGXYGNSDGNWTH

SEQ ID NO: 313525 - protein, 116 aa, Zea mays
  Clone ID: MRT4577_48992C.1.pep
QKDPRSPLDKVEKFKSIRSDADSTVPFLSVYIGDSVGDLLCLLEADIGIVVGSSTSLRRVGRQFGVSFVPLFLGLVEKQRQLTDEDASAFKPRSGVLYTVSSWSEIHAFVLGSDFS

SEQ ID NO: 313526 - protein, 176 aa, Zea mays
  unsure (1)..(176): unsure at all Xaa locations
  Clone ID: MRT4577_48993C.1.pep
MEINLVNLCIRWPWLIFIRLVIHVLLFSQDSSVXLAQLGCPRVRXIPILYTLSWPDRIYCSEVTWPRLDLCKLGSLTFKAPDNVKYPSMDLAYAAGRAGGTMTGVLSAANEKAVELFIDEKISYLDIFKVVELTCDAHRNELVASPSLEEIIHYDLWARRHAASLQPASGLSPVPA

SEQ ID NO: 313527 - protein, 77 aa, Zea mays
  Clone ID: MRT4577_48994C.1.pep
RVRSTHKLYKQCPMFLLATTLLDMGAHVKSQAPPKLLQRSAGWGTGGGATHVLHCGTDQGMQRDDPSHDVGLGCQRA

SEQ ID NO: 313528 - protein, 128 aa, Zea mays
  Clone ID: MRT4577_48995C.1.pep
MNAKRLTPVLLAVLLPCLCLMFVANCSDVGIPAAAGGLRRLPDGEKSNKIHIILCVKSHCYGPVKTCYCCNTLVNVTCYTDQQYCWSVCPSRLQGMIPAPAPAPLPSPTGRRGRFSRASTSPTSNNNS

SEQ ID NO: 313529 - protein, 96 aa, Zea mays
  Clone ID: MRT4577_48996C.1.pep
WMGHCSIDGVYRNDLNCHFGQNHNSSTYVRKSKDLSVFHGLKFMMSKFDLFLIVYHILRIILLPIQQIPWGEHLIQLAGKQDLVVTVYDETNISNH

SEQ ID NO: 313530 - protein, 92 aa, Zea mays
  Clone ID: MRT4577_48997C.1.pep
GFPIFYNGGRDLQLLFLTLERMAWTLLLSWEPRWFGSIETEWCSVEFLPTSLLFWSLLMRKARNDKLQEPRVILSGCSKPYNLGWLDPSWIF

SEQ ID NO: 313531 - protein, 223 aa, Zea mays
  unsure (1)..(223): unsure at all Xaa locations
  Clone ID: MRT4577_48998C.1.pep
MQEAGRERDRAAAAADLGGVAASVRPTDTAAVSTKPAKRYPLALWIGILGLIMLVGVYIFSLSLKQNGMLFGLMQTNLIEKEREKPCHDPGIPDTEIPYLHYPMPNTYDRKECACTGVRFFAILSMQRSGSGWVETLLNSHPNISSNGEIFSVKERRSNFTAIKKTLDKLYNLDWYSSAAKNECTAAVGLKWMLNQXNXGLMKHHQEIVEYFNRGGVSAIFLL

SEQ ID NO: 313532 - protein, 85 aa, Zea mays
  Clone ID: MRT4577_48999C.1.pep
KTVCSFPWGGLKGTFVGGGGGQTRGGPPFFSGRGGAPLKKNGGGLGPLFFKKKKKKKKKKKKKKKKKKKKKKKKKKKKLEEGAGT

SEQ ID NO: 313533 - protein, 63 aa, Zea mays
  Clone ID: MRT4577_4899C.1.pep
GAHTCCTKMKQPLYSILFWPKVHRRRQTQEQARPQTQDPTTRRPAMHTKLSHMPERGIEAHPA

SEQ ID NO: 313534 - protein, 92 aa, Zea mays
  Clone ID: MRT4577_489C.1.pep
KNGAHPPKTKGGARKNFFPPGGRQKGQKKKRPKIRGGGRPFSVSPGPFFFRGGGVPTLFWGGKDHPIGKREPWKDGHHPPLRFHPPRKGWHC

SEQ ID NO: 313535 - protein, 228 aa, Zea mays
  unsure (1)..(228): unsure at all Xaa locations
  Clone ID: MRT4577_48C.1.pep
MECENGQVAGNGNSLCLAQPARADPLNWGKAAEELSGSHLDAVKRMVEEYRRPVVTMEGASLTIAMVAAVAAGAETRVELDESARCRVKESSDWVMNSMANGTDSYGVTTGFGATSHRRTKEGGALQRELIRFLNAGAFGTGGHDHVLPAAATRAAMLVRVNTLLQGYSGIXRFEILETVAALLNANVTPCLPLRXTITASGDLVXLXYIAGLGDGRANSVGTAPDGS

SEQ ID NO: 313536 - protein, 88 aa, Zea mays
  Clone ID: MRT4577_49000C.1.pep
KRKGMTLTLVFFFPPRVLENYYFSSPPVVVSVSRHLSVVGRIYCPITHLINSNKKSHFKIGTYFNLNSRFMFRSVHSGSIFSPLALVI

SEQ ID NO: 313537 - protein, 80 aa, Zea mays
  Clone ID: MRT4577_49001C.1.pep
PPTPSVFGGEKIKFLLIRHPCGPRKVFGHYSQVVWGRSTPICFVPFFLDDNHGVFLVCSYDPPGQVNGQRPLFPPGVAAN

SEQ ID NO: 313538 - protein, 33 aa, Zea mays
  Clone ID: MRT4577_49003C.1.pep
SWKSRIRSLTKPHNFTIKCICLHLLLRDGPTRQ

SEQ ID NO: 313539 - protein, 57 aa, Zea mays
  Clone ID: MRT4577_49005C.1.pep
HHPQQHNSSTCNNMGSKTLSTKCTFASLTCLRKKTLKDMLAVGNQGMAYQESKTLFA

SEQ ID NO: 313540 - protein, 100 aa, Zea mays
  Clone ID: MRT4577_49006C.1.pep
TPPLRFQSGGGRREGEGGTTLSDFCLHTTYASSSIRAVAGGCRAPRERSNYWWRESICGEGRVSTPCASAAVVRGTVTDEALDGARRHHHVALDLRHAAH

SEQ ID NO: 313541 - protein, 72 aa, Zea mays
  Clone ID: MRT4577_49007C.1.pep
TADRRRRGRYTQKIPVTMPKAQRSNSPNMFGNGVSSMGLVDNATVAILSPVAHRTHWLDCDHKPPIPDTLNN

SEQ ID NO: 313542 - protein, 52 aa, Zea mays
  Clone ID: MRT4577_49008C.1.pep
KFTWLHPLLLEKEEPGEEKLATRRETQAMSQNRSFVSIRHLHTSLRFHLAPI

SEQ ID NO: 313543 - protein, 58 aa, Zea mays
  Clone ID: MRT4577_49009C.1.pep
LKLYKFSILIPNTTTNFFFTSYLILPLSHNIFLILTFYLLTTLLSKYNLTLFPFKLIS

SEQ ID NO: 313544 - protein, 71 aa, Zea mays
  Clone ID: MRT4577_4900C.1.pep
ASGGGRTTVVRGGSARERRGRRRARRDPRPPRRRRGVVVLPLRGVVVVGHGGGRVARKWAAAAVSVGYGIP

SEQ ID NO: 313545 - protein, 87 aa, Zea mays
  Clone ID: MRT4577_49010C.1.pep
CRLYLPSIEYTSKPRYISWIEQINHEFFLHPSIRMRFLCRYDHLLIILARRLGTNGFSYQSRDISYCIKLVAPAKTSDSGAGVVIRP

SEQ ID NO: 313546 - protein, 58 aa, Zea mays
  Clone ID: MRT4577_49011C.1.pep
RKRMAGRKEQPTSDCGLDLRTKTPQCSKFTHDQMHRNTISTSLTHSTTAHGFTVLQAL

SEQ ID NO: 313547 - protein, 139 aa, Zea mays
  Clone ID: MRT4577_49012C.1.pep
STHRVRPRVRGLVGGLWAVRLSRLQDFHPLAADKSLCFFFLPPKPVPGLNRNSPPRGQPRPGREMFIRQGVYNIVFPFQGESKEGFFFFFWSRRNINTRGWGPSMNTKGGLVLGGEKPKPLFWGKPLGGRGAPPPLGGG

SEQ ID NO: 313548 - protein, 92 aa, Zea mays
  Clone ID: MRT4577_49013C.1.pep
GNDSWSCNDISTSPIASSVQGEESYLCDEPLSPSRALRAAMLRSRFAGTIVKAQQKALLDHGKNIDPVKLQLEKERLEKRQQEGVRLSLRLV

SEQ ID NO: 313549 - protein, 113 aa, Zea mays
  Clone ID: MRT4577_49014C.1.pep
GNLGPKPIQNAQTAQTTEAPPTQSIQSYCCRARPKGQAALTPQDGPHMDKENMTTPTSKHRHRRRKIAVRRRCQASTHPTRGFEFFTNELEHPSCPRQMPKPPKQSSPRRRGS

SEQ ID NO: 313550 - protein, 207 aa, Zea mays
  Clone ID: MRT4577_49015C.1.pep
PAGRAIVDSKSTVARGQVACSNPKFLAARGPVPCSNSFAKKTLTDALSSKVKIKFSVRSSAHTSSKDIPVQTAGVKEGSLSHSFPTGNKEAYLNCTFPFAKENAKISSTRETERSSGSTGNDSWSCNDISTSPIASSVQGEESYLCDEPLSPSRALRAAMLRSRFAGTIVKAQQKALLDHGKNIDPVKLQLEKERLEKRQQEGKCHI

SEQ ID NO: 313551 - protein, 476 aa, Zea mays
  Clone ID: MRT4577_49016C.1.pep
YNPPGNDVHAFARELNEIFDSEWESVERKFRGRNLVQEQKTKAIKVRAIVDSKSTVARGQVACSNPKSLAARGPVPCSNSFAKKTLTDALSSKVKIKFSVRSSAHTSSKDIPVQTAGVKEGSLNHSFPTGNKEAYLNCTFPFAKENAKISSTRETERSSGSTGNDSWSCNDISTSPIASSVQGEESYLCDEPLSPSRALRAAMLRSRFAGTIVKAQQKALLDHGKNIDPVKLQLEKERLEKRQQEEKARIEAQVKAAEAAAQQKFEEEMRVKREQEREAARLAVRMMKKTVDIDNSDFLKELENFSKTWQSNPPGKLIVDFIDGDLPPGLGSPLERLGLFMKNDLEDEVEQEVEDSASPSMDVDMRKDLAGHEMQDSISPVKVIGTKDDFQGADINTRKDFQEDAAGHEMQDCISAVKVIGTKDDFQGAVGHEMANSLSPSTFVDTKKYSEGTEHEMVDSISPLMDPNTEEGEISC

SEQ ID NO: 313552 - protein, 116 aa, Zea mays
  Clone ID: MRT4577_49017C.1.pep
FLGDIPLLKISLNRLVPSHFRSTHTSFTLLTRSKIPLRTPQEVSFGHVQTISTDVKSISPQLVPPRPYPGYLRFGLYPLCAHKTKVTCASQLLTCWTCCLFVGQHSAPYSITGALE

SEQ ID NO: 313553 - protein, 39 aa, Zea mays
  Clone ID: MRT4577_49019C.1.pep
KKKKKKKKKKKKKKKKKKKKKKKKKKNKIAQNTRLEGSS

SEQ ID NO: 313554 - protein, 32 aa, Zea mays
  unsure (1)..(32): unsure at all Xaa locations
  Clone ID: MRT4577_4901C.1.pep
MARYRHLGQFAPLGGKQTAAQLPXDWISIGHS

SEQ ID NO: 313555 - protein, 134 aa, Zea mays
  Clone ID: MRT4577_49020C.1.pep
MAPAAGLALRLALSGGAGGPDYRRHYKRARNRPSGQIPDPIHNTPKKIRTYLTTYDTARDSDPAYHDYRRDYRNTNVNTNLRYPLCVPLCRSSCRSTNNSSIKYLHTHMQALMLAMPLPLDLYLHPLHRAEDPI

SEQ ID NO: 313556 - protein, 184 aa, Zea mays
  Clone ID: MRT4577_49021C.1.pep
MSNAPTRAHVPSPTTPTADPEIVAITTEHLSNDAVDRRAGPNKRERRKQRRTQHSLPTPDETSSETDSSAATKPPNNPPKARKSRQINTTADPDTAASIPQSLIAIMPPANPLPLLVCSIGNPGATYANTLHSAGHIVTSFIAERKVYQPFSKGLSGLVSRPDDTRLSFSLTGFKKVQGAPPGP

SEQ ID NO: 313557 - protein, 146 aa, Zea mays
  Clone ID: MRT4577_49022C.1.pep
TQISRAGLAGAGSEARMDGRHADLRVSLEAAAAAGTAGIGTLRVGALGLHQRPSSDARCLDPPSMLLRRSPRCGTSAGEPLTAEGADQAMLPDSFSFTCLLRACARVSCLPVGRTLHSPSWHPPRTSRPSLPSGPTNTFSCGSSLF

SEQ ID NO: 313558 - protein, 71 aa, Zea mays
  Clone ID: MRT4577_49023C.1.pep
NCSFGLFGTWSPRVCFPERKFMGLPKTGKWKTPVCVFLTPVFGLQIGGFWGFSPWVCNSNFQNTGQGADFS

SEQ ID NO: 313559 - protein, 70 aa, Zea mays
  Clone ID: MRT4577_49024C.1.pep
SYRFAIKKNRGLSPKGWPYPTRSLFKKKTTTSVLPSCRNEKQGAFLTIWGGRCLGPPFFVQKKKNLFFFL

SEQ ID NO: 313560 - protein, 39 aa, Zea mays
  Clone ID: MRT4577_49025C.1.pep
VASPGGNDNATMKSFIIALEGLALTWYSRLPPLSIDSWR

SEQ ID NO: 313561 - protein, 27 aa, Zea mays
  Clone ID: MRT4577_49026C.1.pep
INSFINYKCSLTLFDLSKSFKLLYPKK

SEQ ID NO: 313562 - protein, 177 aa, Zea mays
  unsure (1)..(177): unsure at all Xaa locations
  Clone ID: MRT4577_49028C.1.pep
MGRRLLRAWFLRPIIDIDAINNRLNTITFFLCCEEVMSALRETLKSVRDVPRMLQKFNSPNSFCTSSDWNTFLKCICSLLHINKIFEVGISEHLAIKLQHMNIDLIGKANSSITAELDYMSDLVVGVIDVQRGKEKGYETMVKEGFXCDELDELRMVYEXLPDFLEQNTSTNSLCTP

SEQ ID NO: 313563 - protein, 90 aa, Zea mays
  Clone ID: MRT4577_49029C.1.pep
GRVHGVVFPARATMIADSCPGLRQLRSAYGLPKFSPCSISWSSFLVRIDSGFPYALYLNPWWIYHLHEEIGAVCNQIAIRLSSPTSDALA

SEQ ID NO: 313564 - protein, 526 aa, Zea mays
  Clone ID: MRT4577_4902C.1.pep
MLLHAKDSVRKMHSVAKNYFVSDLTHPPRSLNRASRHVVPFKTRFFTHCSLESRSVDQEIVIAMGSNVGDRVSTFNRALQLMKSSDVNITRHACLYETAPAYLTDQPRFLNSAIRGTTRLRPHELLKLLKEIEKDIGRTGGIRYGPRPIDLDILLYGNSQIHSETLIVPHERIHERSFVLAPLVDLLGASSDNGIETSWHSLSKCSGGFFELWNNLGGESIIGTESIKRVLPVGDRLLDWCERTLVMGVLNLTPDSFSDGGKFLEVGAAISQAKSLISEGADIIDIGAQSTRPFAKRLSPNEELERLVPVLDEITKIPEMEGKLLSVDTFYAEVASEAVKRGAHMINDVSSGQLDPIILKVAAELGVPYVAMHMRGDPSTMQSEQNVHYDNVCKEVALELYTQVREAELSGIPLWRLVLDPGIGFSKKSEHNLEVIMGLESIRREMGKMSIGASHVPILLGPSRKSFLGEICNRANPVERDVATVAAVTAGILNGANIVRVHNAGYGVDAAKVCDALRKRKGSCRN

SEQ ID NO: 313565 - protein, 66 aa, Zea mays
  unsure (1)..(66): unsure at all Xaa locations
  Clone ID: MRT4577_49030C.1.pep
YSTKFEGTLPGFGLELKPKSTVCRLKLIFTFPTXXFTLSPAKEEIYTXQSHTXXVTTEIELLXMGY

SEQ ID NO: 313566 - protein, 174 aa, Zea mays
  unsure (1)..(174): unsure at all Xaa locations
  Clone ID: MRT4577_49031C.1.pep
SSRPGIHSATIRFPVGAPDSLARTTTWIRGADWPQCGLGDATNASHDTSAXPVHDSHQQLHFIHDHIYFRYFFLRLHHQDDALPGLQVEPGEIVFPDLEGLPTAGQDGGVRDHHVPRDLSFAGRCAIGPVHPXCGVLXENNDPASADVEKGKGEXDHANEALAAGNNNMDYGDA

SEQ ID NO: 313567 - protein, 59 aa, Zea mays
  Clone ID: MRT4577_49032C.1.pep
SSCRLAVIRSLIIGSRAACKGWQGSGSGWYTGIPTICPHASVVQEDIALHVTIYAHMRS

SEQ ID NO: 313568 - protein, 31 aa, Zea mays
  Clone ID: MRT4577_49033C.1.pep
SPSALKAPFSLVYQQCSYFSPVGGKESFAST

SEQ ID NO: 313569 - protein, 59 aa, Zea mays
  Clone ID: MRT4577_49034C.1.pep
NKFSYIYPTLLAIYIQYKISYNPLTSELKFHMVLSVFIDDVVKKESRQFLLNCSYAILW

SEQ ID NO: 313570 - protein, 88 aa, Zea mays
  Clone ID: MRT4577_49035C.1.pep
SFRKAVMSDYMIDGLEKSGTTRMEDTICAKSASADVIAAHRLTFRRYGDSHAQCTSDAASGKKMRRRRANTRTACKSVVEGIPPALEV

SEQ ID NO: 313571 - protein, 394 aa, Zea mays
  Clone ID: MRT4577_49036C.1.pep
WKHICSIDFCRYGGFGKGRLGGLSYFAGAEKKDDRVLVPDLGSLTSIHDRARELFYYLKGGQVDYGEEHSKVCGHNRFGRIYHTGHYPVWDEHNPVHFVGHSAGAQVVRVLHQMLADKAFPGHDTSEDWVVSLTSLSGALNGTTRTYYDGMLVVDGRSMKSICLLQLCRLGVIVYDWLDIPWLKNYYNFGFDHYEMSWRKVGFSGLINLLLGHTGPFASGDWILPDLTIQGSMKLNSTLRTFPNTFYFSYATKKTRKIFGITVPSSVLGVHPILFLRVLQMCMWRHPQNAPLPYKGYRDEDWEDNDGALNTISMTHPRIPIEHPHHFVVDDSDCHPLQPGIWYYKIIEADHILFIVNRERAGVQFDLLYDGIFQRCRKHAFRKSPPTVPNETSR

SEQ ID NO: 313572 - protein, 41 aa, Zea mays
  Clone ID: MRT4577_49037C.1.pep
NSESRSKLFGDYAMLLNLFQYIERHNTQRLARGRTLGRTRG

SEQ ID NO: 313573 - protein, 52 aa, Zea mays
  unsure (1)..(52): unsure at all Xaa locations
  Clone ID: MRT4577_49038C.1.pep
MVAKARVCMGKSQPHLFPXISDRFCSKEWVKKDGGWTAGYCPLRYCRCQKGC

SEQ ID NO: 313574 - protein, 143 aa, Zea mays
  Clone ID: MRT4577_49039C.1.pep
ATTKRAVQTFGKKKTAIAVAYVTDGKGMIRVNGQPLKLVKPEILQLKLWEPVLLLGKDAFSNIDIRVRVKGGGYTSQVYAIRQSIAKALIAWTQKYVDEATKATLRETLVTYDRNLLVADPRRCEPKKFGGRGARARFQKSYR

SEQ ID NO: 313575 - protein, 48 aa, Zea mays
  unsure (1)..(48): unsure at all Xaa locations
  Clone ID: MRT4577_4903C.1.pep
LRDHHAYPSVXTLDGVTPLDGHRGLTAEYLFKGAGPGLTQIEPKKLRL

SEQ ID NO: 313576 - protein, 48 aa, Zea mays
  Clone ID: MRT4577_49040C.1.pep
MDENLAREKRHSLEHKGQKVHEWDQTLEEENMNIELPEGGPTESMGLG

SEQ ID NO: 313577 - protein, 52 aa, Zea mays
  Clone ID: MRT4577_49041C.1.pep
EVGHVLNTNAFLAADDAFPGQRVSDPDALSIRSASAVASHEGMLMPSSSDQL

SEQ ID NO: 313578 - protein, 129 aa, Zea mays
  unsure (1)..(129): unsure at all Xaa locations
  Clone ID: MRT4577_49042C.1.pep
VSATKAFXVSPQWSLAPNAVIAQRLPPVTSNALGTSTRANLYSHHIAGXGALQQPIAQLRQQYWCHLTLQTIRSQAQQHYLPXRDHLAVVNPVDYLHXQLLAYKPLALANVAACQLQQQVVQFMPSLSQ

SEQ ID NO: 313579 - protein, 144 aa, Zea mays
  Clone ID: MRT4577_49043C.1.pep
NESAGKPPPKNIKKGKKKILGAPGPNIKPLTGARPPQKGKKPKKPAPKNPQKKNRGGHPFAKKAAKKETPGPSKSPKASLKNSPPKERGEPGGLPKKHTLGGGVPEPPRPQREQGTQTPLDHPRNGLKSYPPPFQKGSQARRGG

SEQ ID NO: 313580 - protein, 70 aa, Zea mays
  Clone ID: MRT4577_49044C.1.pep
EPEKDSSFRLFGCRDFSRNPHAPPRVWLGLFSRILAPARFLFLYKNFSLSFSPRKTNCWCFFPKGPLING

SEQ ID NO: 313581 - protein, 132 aa, Zea mays
  Clone ID: MRT4577_49045C.1.pep
MQAACNRTKGAHPFDSDASSMGAQAHTSCNRPAGYYVREAAPPLAPVPCLLDCGTGAATRGNIAHGPTLPTEHIGHRDRERGYSERDPSPRRKRAPSPPTDQRFEGWPLERVRQPPQSTRALSPPIDQRFEG

SEQ ID NO: 313582 - protein, 91 aa, Zea mays
  Clone ID: MRT4577_49046C.1.pep
FRLQGGPPRRTSALSGAPWPGPPIKFSPTSPGVDPKKPALGYMRCFGKGVGARPGPGREPRWGWGCVKPQGVVLLGGGYYRGAKKIFFFAP

SEQ ID NO: 313583 - protein, 29 aa, Zea mays
  Clone ID: MRT4577_49047C.1.pep
DRAPIRECIVPAPQPYVGVESLMLINVAR

SEQ ID NO: 313584 - protein, 385 aa, Zea mays
  unsure (1)..(385): unsure at all Xaa locations
  Clone ID: MRT4577_49048C.1.pep
MDASTEVTDAIAAVGIDNGPTGKLPPRDSVEGHAEEHDVLADGTHSGESEVINPSEEVEMEATSQSQDIKPRVPEGVQGHSPKVVTKSPRQSPRGGDKSEARKISPSPYPKVPIARVSDLDIVDSSSSNGDTGASKKKTEKSSFRPIAKESLSLEDSKEKNKTQKASNQRSAKNDIDEESNESVKPQRVGSTPSYGFSFKCDERAEKRREFYSKLEEKIHAQELEKSNLQAKSKETEEAELKMLRKSLKFKATPMPSFYKEPPPPKVELKKIPTTRARSPKLGRSKNTPSGGXQKEIQTPQLXARLSLDQRVPQNGAKKAPAANAAKKPQRKSLPKLPSEQTAKVVDIAASVPSGEELGNKPSLMGLVREPIRAQLTPDEPGLSV

SEQ ID NO: 313585 - protein, 85 aa, Zea mays
  Clone ID: MRT4577_49049C.1.pep
TGKTRNGPGPRDNGRFRGEHKTVSPMSLQTREHSRESCQRRPPPLWQGELGEPLWALRNGVVGQLPGEDKAPPRLGSHGRGGGAF

SEQ ID NO: 313586 - protein, 83 aa, Zea mays
  unsure (1)..(83): unsure at all Xaa locations
  Clone ID: MRT4577_4904C.1.pep
AXFPPIRLGYLSEPARPGQVDSHHAHLPTASRPSNPIKQHILSYHRPTNHTLTSSTARNRSTKPLDYKGSYQTCTQNSMTEPA

SEQ ID NO: 313587 - protein, 764 aa, Zea mays
  unsure (1)..(764): unsure at all Xaa locations
  Clone ID: MRT4577_49050C.1.pep
MRNIGMLRALVLALAVAAAAAAEKRRTYIVHMAKSAMPAEYADHAEWYGASLRSVSASASAAKMLYAYDTVLHGFSARLTPQEASDLASAEGVLAVNPEARYELHTTRTPEFLGIAGQGLSPQSGTAGDVVVGVLDTGVWPESKSYDDAGLAEVPAWWKGQCEAGPGFDASTACNRKLVGARFFNKGYEAAMGPMDTDRESRSPLDDDGHGTHTSSTAAGAAVPGASLFGFAAGTARGMAPRARVATYKVCWVGGCFSSDILKAMEVAVTDGVGVLSLSLGGGTAEYXRDSIAIGAFTATEKRILVSCSAGNAGPGSSTLSNVAPWITTVGAGTLDRDFPAYVVLGDGKNYTGVSLYAGKPLPSAPIPIVYAANASNSTAGNLCMPGTLVPEKVAGKIVVCDRGVSARVQKGLVVRDAGGAGMVLSNTAANGQELVADAHLLPAAGVGETEGTAIKSYVTSAPNPTATVVVAGTEVGVRPSPVVAAFSSRGPNMVTPEILKPDMIAPGVNILASWTGKAGPTGLAADTRRVGFNIISGTSMSCPHVSGLAALLRSAHPEWSPAAVRSALMTTAYASYSGGSSLLDAATGGMATPFDYGAGHVDPARALDPGLVYDLGTRDYVDFLCALKYSSTMIAAVARSREYACAENKTYSVGALNYPSFSVAYSTANGDGGGDSATVTHTRTLTNVGGAGTYKASTSLAAAKGVAVDVEPAELEFTSVGEKKSYTVRFTSKSQPSGTAGFGRLVWSDGKHSVASPIAFTWT

SEQ ID NO: 313588 - protein, 64 aa, Zea mays
  Clone ID: MRT4577_49051C.1.pep
SKPAVQDILIPWWCTCTSHILYKNVYEITPDSTYSVASNASQSSSSSATRPGPPRAGRAHRLAV

SEQ ID NO: 313589 - protein, 65 aa, Zea mays
  unsure (1)..(65): unsure at all Xaa locations
  Clone ID: MRT4577_49052C.1.pep
GRAGIIHLGCXCQHMQPCYAFVVLCLFSINKAFLNYAEANVCKEQSQLLAARILITYYLAHSYSG

SEQ ID NO: 313590 - protein, 178 aa, Zea mays
  unsure (1)..(178): unsure at all Xaa locations
  Clone ID: MRT4577_49053C.1.pep
MKLKQLEGLLGGLTQFSDPKLELEQYATGPHIASRMLYMXVLGIDIDPXSLELAQENAADLELDIDLVWSDIKNLNLKGVHVDTVVMNPPFGTRRNGADMEFLSMALQVASQAVYSLHKTSTREHIKKAALRGFNAISAEVLCELRYNLPRTYKLHKKKEIDIAVDLWRFVPNAQRRS

SEQ ID NO: 313591 - protein, 115 aa, Zea mays
  unsure (1)..(115): unsure at all Xaa locations
  Clone ID: MRT4577_49054C.1.pep
VWVLLLWAIGTLEAGREKKDTVVMNPPFGTRRNGADMEFLSMALQVASQAVYSLHKTSTREHIKKAALRGFNAISAEVLCELRYNLPRTYKXHKKKEIDIAVDLWRFVPNAQRRS

SEQ ID NO: 313592 - protein, 141 aa, Zea mays
  Clone ID: MRT4577_49055C.1.pep
ARLDKISLFLTKNSGLRIKMSRKIYGENDSERIASDGTAARTRPLSIKDIMLRREKKAASESKKAKEGLENGKDKSTHLERGRDHKSRKDPRDMPVEGSRKEKNRDATREGAKKENQEYTKGIFQKGGHEICTKGGTQGQL

SEQ ID NO: 313593 - protein, 53 aa, Zea mays
  Clone ID: MRT4577_49056C.1.pep
CRCMACGVEFLIESWEVLLSDWSSVIHVRQVCNMRGLCFGKTEMMNPTIKRRK

SEQ ID NO: 313594 - protein, 260 aa, Zea mays
  unsure (1)..(260): unsure at all Xaa locations
  Clone ID: MRT4577_49057C.1.pep
APSETRSRGRQRLASPSAAAAAAPPFHGFRRALRLHPQRRRRRQGEEMKLKQLEGLLGGLTQFSDPKLELEQYATGPHIASRMLYMAENSFNDITGKVVAXADFGCGCGTLAVASALLDAEHVLGIDIDPQSLELAQENAADLELDIDLVWSDIKNLNLKGVHVDTVVMNPPFGTRRNGADMEFLSMALQVASQAVYSLHKTSTREHIKKAALRGFNAISAEVLCELRYNLPRTYKLHKKKEIDIAVDLWRFVPNAQRRS

SEQ ID NO: 313595 - protein, 78 aa, Zea mays
  Clone ID: MRT4577_49058C.1.pep
ILTRGFKIWGGLRTPNWVKMGGFFGPYPGFPEWGVKLGGGPKKRETNFLGQWEQTLKAPVSQWEQQPQMVLGGVFERG

SEQ ID NO: 313596 - protein, 93 aa, Zea mays
  unsure (1)..(93): unsure at all Xaa locations
  Clone ID: MRT4577_49059C.1.pep
QDTXXRGPLYWVGGTNKXLXVSDHPXLXKSACGKSCAPFPKGKKENIRTEVFLVTLHSALARALSDAWLAFRLGCLSTASSFFFTTSRGLKSY

SEQ ID NO: 313597 - protein, 170 aa, Zea mays
  Clone ID: MRT4577_4905C.1.pep
RPGYFPAGYGRTRAWRRMSDSGRENFSSRSATSRPCSSPSRSLPCCLAYLSLSAVSCPPPPLCRTSASSSLRCPFMPPPTHLSAQGRRSSFPGSAPRLRLVLVRASRRPHAKERRLTEGTIGVQQNAFYTCNILIFEAEQANPIRFCGRRPFDVGAAATEGEQHGPAHTG

SEQ ID NO: 313598 - protein, 45 aa, Zea mays
  Clone ID: MRT4577_49060C.1.pep
RGAPLNIDTQPKRPQFFPKSESKMPYVQKKLYVGPQAQHFTSFVL

SEQ ID NO: 313599 - protein, 87 aa, Zea mays
  Clone ID: MRT4577_49061C.1.pep
GSWSSFFGGACLPPLEGWALLGSLGLHRSSRGRVVSFIPLPAVIARLMVSLQQGRTCYSVCIFFGPCVFCYADLWSSMRGPDDGSSL

SEQ ID NO: 313600 - protein, 56 aa, Zea mays
  Clone ID: MRT4577_49062C.1.pep
DRARDSTDSASWFQAYQTSSMVDMLLRSQTMSRPSTPRPAPQIRHAKSFPARPQPR

SEQ ID NO: 313601 - protein, 41 aa, Zea mays
  Clone ID: MRT4577_49063C.1.pep
ITCTPFRTTSGSILTPTKETKLKKSSPCVLGPDFPSFECST

SEQ ID NO: 313602 - protein, 76 aa, Zea mays
  Clone ID: MRT4577_49064C.1.pep
TYGMRSTFLQYHHGILKFAIIGVVSQNHSLLLHTFCLPCCCLFVVGLPFQSRGRVLLFRSFSGPSSPPGGASSPRS

SEQ ID NO: 313603 - protein, 48 aa, Zea mays
  Clone ID: MRT4577_49065C.1.pep
PPPLPNTAPMPCPLPRPRPSPPPMPPPLPNPAPMPCPLPPPRPPPPPA

SEQ ID NO: 313604 - protein, 72 aa, Zea mays
  Clone ID: MRT4577_49066C.1.pep
IWGESNLDAGEKKNKGGPQKKRALKDHGRGFRAPKNILKPGGGAPKTNRWGPTINLYNLWKNFSTFLLSSKP

SEQ ID NO: 313605 - protein, 69 aa, Zea mays
  Clone ID: MRT4577_49067C.1.pep
NKYVRMATKLYKSPFWIYDIKRCHNWNTPLFFSVFCDGLSALIVTTADLYLSHNSGLPRLDFPCFESIN

SEQ ID NO: 313606 - protein, 146 aa, Zea mays
  unsure (1)..(146): unsure at all Xaa locations
  Clone ID: MRT4577_49068C.1.pep
AVPFSGASNGVSNVGAVVGATYLPERGLVGLALLSAERPNPGGNRVSARCPGGLLLSPGPKIRGSWVVIELRIYDFNIFGNGILFLFESNGSGGEAVAIVPVDSLPDSFSKLSRESGTYGYVPARVGNXGRPMERDSWKPLAIEPS

SEQ ID NO: 313607 - protein, 99 aa, Zea mays
  unsure (1)..(99): unsure at all Xaa locations
  Clone ID: MRT4577_49069C.1.pep
TFYLLVGELLFFSIDCQGHLDLDVVTFDLFCCSDLPLDNLVLLMXIRPEKXVWFXVNVAGGWDVVRLRGGVCGDPNSGCRVGRVQRGPRTTSVCVEFAG

SEQ ID NO: 313608 - protein, 62 aa, Zea mays
  Clone ID: MRT4577_4906C.1.pep
QVLNRSPLGKVGTLEGPGRDLIPGPTGPLSGGRPFVYFMKLNLHVTIHISTRGRPSRFELRR

SEQ ID NO: 313609 - protein, 110 aa, Zea mays
  unsure (1)..(110): unsure at all Xaa locations
  Clone ID: MRT4577_49070C.1.pep
KGGILSSNQFESSNGXAKIFXSALCLLALXCIVLXPATIFPQYLXXAPIAALLPPYLPSMTASVCENPALQPYRLQQAIATSNLPLSPLFFQQSPALSLGQSLVQTIKAQ

SEQ ID NO: 313610 - protein, 89 aa, Zea mays
  unsure (1)..(89): unsure at all Xaa locations
  Clone ID: MRT4577_49071C.1.pep
HERATCPPRHIGRPWCAARHPTAERASSRGSRXARTACDVIFCARLRFITGFDNQRRQVKGNDQTAKREALVRLDEMLVFCTRFGLWSA

SEQ ID NO: 313611 - protein, 183 aa, Zea mays
  Clone ID: MRT4577_49072C.1.pep
PRVRVKGSFGYLDPEYFRRQQLTEKSDVYSYGVVLFEVLCARPALNPSLPREQVSLADHALSCQRKGTLEDIIDPVLKGKIAPDCLKKYAETAEKCLCDHGVDRPSMGDVLWNLEFALQMQDTFENGGKPEGGRGSSSDSGTVSMADSMAASAAALELISEDMDEEDIANSVVFSQLVHPTGR

SEQ ID NO: 313612 - protein, 220 aa, Zea mays
  Clone ID: MRT4577_49073C.1.pep
TRPPTRPPTRPPTRPRNPKYLSMLNHLRFYLPQVYPKLNKILFLDDDIVVQRDLTGLWEVDLNGNVNGAVETCGESFHRFDKYLNFSNPNIAQNFDPNACGWAYGMNMFDLEEWKKKDITGIYHKWQNMNENRLLWKLGTLPPGLLTFYKLTHPLDKSWHVLGLGYNPTVERSDIDNAAVIHYNGNMKPWLEIAMTKYRPYWTKYINYEHPYIHGCKFSQ

SEQ ID NO: 313613 - protein, 99 aa, Zea mays
  Clone ID: MRT4577_49074C.1.pep
PGQISLLPKGKTASQPGAGPEGNLGAPPTKRVNKPGPFHTQWYKIGRNIPNNKLTAHRMASPVFTTPGGNKISCRTMTNDLCKLIYMNKIKAPMLVFGP

SEQ ID NO: 313614 - protein, 1297 aa, Zea mays
  Clone ID: MRT4577_49075C.1.pep
MSGHLCKNGYVPNYEVWVHHGEELLRGYAPEGQDDFEPDLDRMEEMVQDLREDPDLVFPDNPEDPQPPEVKKFFELLKAAEEPLHEHTRVTILAFVTRLMAIKSKFAFSINCLNELLNLISDVLPPNHKMPKDVYQSRKLLSGLGMEYQKIDVCPDNCMLFWKENEKLDKCLRCSKSRFVEVINEDGEKMTTEVAKKQLRYMPLTPRVKRLFLSKNTAKQMRWHKEHERENPQVMMHPSDSDAWKALDDFDSDFASEARNIRIGLATDGFSPFNMTTSPYSCWPVFAVPYNLPPHLCMKYDYMFLCLIIPGPEHPGKHLNVMLEPLVDELKKLWEGVEAYDCYKKERFNLRVAYLWSIHDFMAYGIFAGWSCHGKLTCPICGKDTDCFRLEFGGKICYFDCHRCFLPLDHPFRFEANQFRKDTIVTKGPPKCLSGAQIHAALDNLKPDGTGYLGFGIEHNWTHKCSLWELPYTEALILMHNIDVMHQERNVAESIISTCMDFPDKTKDNIKARKDLEKNCNRPSLVLLQSGAKPRASFCLKSKQKKDVMVWLKNLKFPDGYAAGFRRSVNLRTGKMNGLKSHDYHIIMERLLPIMFRGYLNNDVWTALAELSYFYRQLCTKEIKKAAMEKLEKEILVLICKLEKIFPPGFFNPMQHLLVHLPYEAKIGGPVQYRWMYHIERTLKKLSAMVGNKGRVEGKLKILSFEGKTVGASTEYHIGHEEKLDALLYMYENMEEMTPYFKMAARKLKNFVKGMTKGSSSSSGRSKAQECLFQGTESLSSNRRQALMEHLPPDMQGQDVNETREEEARGEDAADYDAADADYEQEDDAGGGAGDGWSSGGGQFEGGGSVGGWDSWPSSDAGASSGGGSSRARKSRKTHWVPPPKVPAREEDKILIVPCGDESWIDASFQGQGHRTQVNKVLGSICKYLWPGVVMEKGVEVPCMSWDQYGLAFNAEHRNAQGAVWHEFWKRYKLPEDGSMNDHARIVFNKSATTLVRDQMYYARIQVTSDYILRQEGRRPRSKSEASNKYLTEEEYLEFSDSVPWMASNEAGWRVVCKYWATDGFKGVSLRNSSNRGHDVHHRYGGDGHVRLAKRMEASSGVTPSDVQVYLRGHRGSDPTNPEQLCSQSAAERVASYGASMMSEHGQDYDWMNQPIDPQIVYASGGGKPHGRYLMFGSVIDSTQVRPERSRPSRSSSRGPRSSTQGNAELIRQIALGQRPDFSAMTMPPPPPIPQFVPTPQFSWPTPAPQVPPGNLLTPGNEDSEDADASFVDGLLNSGGASGSNQPHPFDQPPPFE

SEQ ID NO: 313615 - protein, 588 aa, Zea mays
  Clone ID: MRT4577_49076C.1.pep
MAIRAGRSPLLHLLALAFLILAASPCLQARVDHRKQISHWTGQPNFDLQNVSSGRKDGPHLLGRSKEITHMKLRRVAVRKKMEVVQQDDEALVKLENAGIERSKAVDSAVLGKYSIWRRENENEKADSRVRLMRDQMIMARIYSVLAKSRDKLDLYQELLARLKESQRSLGEATADAELPKSASDRTKAMGQVLSKARDLLYDCKEITQRLRAMLQSADEQVRSLKKQSTFLSQLAAKTIPNGIHCLSMRLTIDYYLLSPEKRKFPNSENLENPDLYHYALFSDNVLAASVVVNSTIMNAKEPEKHVFHLVTDKLNFGAMNMWFLLNPPGDATIHVENVDDFKWLNSSYCPVLKQLESAAMKEYYFKADRPKTLSAGSSNLKYRNPKYLSMLNHLRFYLPQVYPKLNKILFLDDDIVVQRDLTGLWEVDLNGNVNGAVETCGESFHRFDKYLNFSNPNIAQNFDPNACGWAYGMNMFDLEEWKKKDITGIYHKWQNMNENRLLWKLGTLPPGLLTFYKLTHPLDKSWHVLGLGYNPTIERSEIDNAAVIHYNGNMKPWLEIAMIKYRPYWTKYINYQHSYIHGCKISQ

SEQ ID NO: 313616 - protein, 905 aa, Zea mays
  unsure (1)..(905): unsure at all Xaa locations
  Clone ID: MRT4577_49077C.1.pep
MGDSRRWMYEGWRKNDPSLEWIQKTEDFINRVFSSSRNGRVWCPCSVCKNYQRQTKKEMSGHLCKNGYVPNYELWVHHGEELPRGYAPEGQDDFDPDLDRMEEMVQDLREDPDLVFPDNPEDPQPPEVKKFFELLKAAEEPLHEHTRVTILAFVTRLMAIKSKFAFSINCLNELLNLISDVLPLDHKMPRDVYQSRKLLSGLGMEYQKIDVCPDNCMLFWKENEKLDKCLRCSKSRFVEVVNEDGDKLTTEVAKKQLRYMPLTPRVKRLFLSKNTAKQMRWHKERDRENPQVMMHPSDSDAWKALDDFDSDFASEARNIRIGLATDGFSPFNMTASPYSCWPVFAVPYNLPPHLCMKYDYMFLCLIIPGPEHPGKHLNVMLEPLVDELKKLWEGVEAYDCYKKERFNLRVAYLWSIHDFMAYGIFAGWSCHGKLTCPICGKDTDCFRLEFGGKICYFDCHRCFLPLDHPFRFEANQFRKDTIVTKGPPKRLSGAEIHAALDNLKPDGTCYLGFGIEHNWTHKCSLWELPYTEALILMHNIDVMHQERNVAESIISTCMDFPDKTKDNIKARKDLQKICNRPSLVLLQSGAKPRASFCLKSKQKKEVMVWLKNLKFPDGYAAGFRRSVNLRTGKMNGLKSHDYHIIMERLLPVMCRGYLNNDVWTALAELSYFYRQLCAKEIKKDVMEKLEKEIPVLICKLEKIFPPGFFNPMQHLLVHLPYEAKIGGPVQYRWMYHIERALKKLSAMVGNKGRVEGCIAEEFKYKEISAFTSVYFAEEHNVNAPTLRYNVDQAGPCSKLKILSFEGKTVGASTEYHIGREEKLDALLYMYENMEEMTPYFKEYERQNKGKLSTRLYEIMLREGKEGTPNFINWFXEFIAKKLPTLXRGLTSDVTCTCQSQKLWSL

SEQ ID NO: 313617 - protein, 132 aa, Zea mays
  Clone ID: MRT4577_49078C.1.pep
MFNHYKELRASRNINVLPEMYISVHTFIDSIFTLFYVIFIQNENRLLWKLGTLPPGLLTFYKLTHPLDKSWHVLGLGYNPTVERSEIDNAAVIHYNGNMKPWLEIAMTKYRPYWTKYINYEHPYIHGCKFSQ

SEQ ID NO: 313618 - protein, 76 aa, Zea mays
  Clone ID: MRT4577_49079C.1.pep
LSYEKPRLDGSVPDKLSWLRMRAENSVKSWKLLTINDSDIKREIKVCNYTVTKMHSTSADLATRPPTRLATRLRML

SEQ ID NO: 313619 - protein, 63 aa, Zea mays
  Clone ID: MRT4577_4907C.1.pep
TGVKPLVVAGIYIKFPPLGGRSVKNFPLPFPLVFLTPPAIRGLPLKEKKPPFISPLLALNTIF

SEQ ID NO: 313620 - protein, 76 aa, Zea mays
  Clone ID: MRT4577_49080C.1.pep
RVLEFYLECITSLFCFMFTPAFTLREHCCIIGNATVPTPNAAVNDLYMAYLAWGRTLARSMLGPALWRSFYPLIFW

SEQ ID NO: 313621 - protein, 73 aa, Zea mays
  unsure (1)..(73): unsure at all Xaa locations
  Clone ID: MRT4577_49081C.1.pep
MSSEKKLSNPMRAIQAQKLVLNISYGETGDRLTRAAKVLEQLSGQTPVFSKARDTAXRAFVHRRNEKIACYVT

SEQ ID NO: 313622 - protein, 149 aa, Zea mays
  unsure (1)..(149): unsure at all Xaa locations
  Clone ID: MRT4577_49082C.1.pep
ATPFLXFYGDLTVASGEMAEFYQPRKSGRTVTVSVVGKQVPLYXAGASLNXKPNXGRLGPAVVPVRSASCWXRAXILGLLVKSKFYRRVRCGLDIREAHLGRPARGAPPAATTTTGCDDRSCRRCVSGGVCCVVVADELCNRFLRTVLM

SEQ ID NO: 313623 - protein, 48 aa, Zea mays
  Clone ID: MRT4577_49083C.1.pep
PRVRGRVFSFALLSSLQEGTPGCGGGDRANSDHRRRNCHPQVVPWETS

SEQ ID NO: 313624 - protein, 51 aa, Zea mays
  Clone ID: MRT4577_49084C.1.pep
AWILLKSTNPSGLFYLPLGVMGGLLNSVKSLTSMMITLAVEYLHPILIEAD

SEQ ID NO: 313625 - protein, 79 aa, Zea mays
  Clone ID: MRT4577_49085C.1.pep
VGALLEDDVELPDDHEDHAILVGLQLVVVVPTGPPSASSEADVLVVHILRLASSAFCSEESTRPEEAEVYRYFMTYSSA

SEQ ID NO: 313626 - protein, 111 aa, Zea mays
  unsure (1)..(111): unsure at all Xaa locations
  Clone ID: MRT4577_49086C.1.pep
MAXPDSKKKKXXSDGXXYAEXNEEPTRERGEDGXXGXEGRXTPXRTEXIXRATRTQNGXGEKGXRXREXTXXGQKRGNPPEKGXEXXAEKGXNXGPXAXAQAEAXXXKXXG

SEQ ID NO: 313627 - protein, 403 aa, Zea mays
  Clone ID: MRT4577_49087C.1.pep
MDRGVVHKSSAALVREMGEAGHSHGWWSMNNLLRPPFEQQHHASLFMPSTTTSSSTAAAAPSSSSSSPPLQSFSSLLLSNHYPLPTTTSTSPWQNDSSSTSSHGQPDSWSQLIHTGSKESQMAFPTTICSESGGGGSYVVYGAAAASHGSSTSDVEIQLPWGSSSVLQQQQQKASSPRSSSRTTATTTSPGSNMLEFSNNSSSSPRECISTVSGSAFKKARTQEPSPAQSTVKVRKEKLGDRITALHQLVSPFGKTDTASVLLEAIGYIRFLHSQIEALSSPYVGGSNGGGGGSKQNQQLHEASAQRESRHSIFPEDPGQLLHDSSAINKRAGLQPADGEQDEESCDEEKKMMLARTYDKDLRSRGLCLVPVSCTLDVGVDVAAGPADYWAAAAPAFGMGFGA

SEQ ID NO: 313628 - protein, 552 aa, Zea mays
  unsure (1)..(552): unsure at all Xaa locations
  Clone ID: MRT4577_49088C.1.pep
MNGKQSPRNGRTAYHFQPAKNXEXDPNGPLYHKGMYHMFFQYNPHGPTFGTGKLSWGHSVSGDLVNWAFLGTALDPTSPFDAEGCWSGSATTLADGRPAILYTGRDASGVQVQNVAFPKNPSDPLLREWRKPPGCNPVVPQPGDVTGNNFRDPTTAWLGRDGLWRFAVAAEVGGVGSTLVYRSKDFVRWERGSAPLHASPDVPVWECPDLFPVAERGAEGLDTSARGGAGVMHVLKLSKAADEDYYVVGRYDDEADTFAPVEGVFDWRRIDHGHLFGAKTFFDARRRRRVLWAWVDETDDGVDKGWRGIQTFPRALWLDADGRQLVQWPVEEIETLRKGRAALAGAVVGAGGLREIAGVDALQADVEVVFEVPESLDDAEELDPEWLQHDPHKLRACAEKKASSPGPRGGVGPFGLVVMASGDMREQTTVFFQVLRHGGTYKVLMCADLTRSSTKEGVHKPFYAGFVDVDVEKDRGISLRTLIDHSVVESFGGGGRTCITARVYPEHVAAGGSSHLYLFNNGAHPVTVSKIEAWELGTASVNVEQDDRADPL

SEQ ID NO: 313629 - protein, 34 aa, Zea mays
  Clone ID: MRT4577_49089C.1.pep
RIQQRPHRRDRTPRRNRVDDAVHGPQPTRPAQDQ

SEQ ID NO: 313630 - protein, 58 aa, Zea mays
  Clone ID: MRT4577_4908C.1.pep
FQNRGHIINSLFVNYDILFHSLPILYLIHPPYRKAYFKKLCTISSTTLRMIYTRSVNN

SEQ ID NO: 313631 - protein, 208 aa, Zea mays
  Clone ID: MRT4577_49090C.1.pep
MASTQAPAAADNVDPVYEWLDDGASYLLRLDLPGFKKEDFRVHVDGEGRLTVIGNRKPTPGGGGKALRLHKTFQLPNTANLDTITGRFDGNVLTLTVPKLLAGADAPTTPPPQSKEEARVAGDKPDQADKLPARVGRGREETTEERRTTETERTSLAATSKEEDEEKAKPMVALPPQSSEKASGDHQRDDQQDGKAQADHRHREDGRS

SEQ ID NO: 313632 - protein, 76 aa, Zea mays
  unsure (1)..(76): unsure at all Xaa locations
  Clone ID: MRT4577_49091C.1.pep
MGIDLNMADGESQERRPPPAVCRELWHACAXPVVALPRRGSLVVYLPQGHLSAAGGGHVAVDLPXHVACRVADVEL

SEQ ID NO: 313633 - protein, 100 aa, Zea mays
  Clone ID: MRT4577_49092C.1.pep
PWGCLWAFFFALRVIGYSIVPPSPVAVCPWVFCSLCQLIPRVFLVFSLPFFFCVLVFSALLSLLAFRLFIGPVMVHVLPPVSAGCLVKSPLVFCFGSGLY

SEQ ID NO: 313634 - protein, 45 aa, Zea mays
  Clone ID: MRT4577_49093C.1.pep
TAIYTITFTYHFRYRQTHQALGPIAYYQEVGYCSEDVTSGASGGF

SEQ ID NO: 313635 - protein, 191 aa, Zea mays
  Clone ID: MRT4577_49094C.1.pep
MEPNLQSAMEEQLKILREISDRLAAQEARWHGRESTVAHHSASIHDTEVAAATAPSTTLSAELDAQVVATHEWLGVVADDWGGLFGRGDDSDEQRFEEPIIADNWGADAGREIVLTTRVLAADACAAGIVDGATPFASTKRSSPPLTPTRCSTTTASARSLPPTLNIAQTAPSMAAAGLRCLTSRMTPTSI

SEQ ID NO: 313636 - protein, 29 aa, Zea mays
  Clone ID: MRT4577_49095C.1.pep
MELVRLEVGRDAEVREADSFVLGVGGEYA

SEQ ID NO: 313637 - protein, 118 aa, Zea mays
  unsure (1)..(118): unsure at all Xaa locations
  Clone ID: MRT4577_49096C.1.pep
RSSVLSCWDTXAGQXERFGGPQWIGYXYVHGQXCSIXXFDVTXSGLTYTEWFLTWHRDTVXVCENXILIVLCGNKVDVKNRQVKAKQVTFHRKKNLQYYEITAKSNYDFEKPILYLAR

SEQ ID NO: 313638 - protein, 73 aa, Zea mays
  Clone ID: MRT4577_49097C.1.pep
KIHYKEGGAPNERLRINSGKQLEDHRTLDDYNIHKESTLHHVLRLMGGTHIYVKTLTAKTITLEEDASDTIHN

SEQ ID NO: 313639 - protein, 141 aa, Zea mays
  unsure (1)..(141): unsure at all Xaa locations
  Clone ID: MRT4577_49098C.1.pep
QPEGHSPLAPGGPTPPPKTPVGPTFQITPPGPSEKFLGTLSLRPGPPLPPYSRGPTNPXNPRGXSQPXPVPNSQNPHFPDPNPXRAELKNPPKVPSGPSLKTQLARDKWPPRTPFFKLKPSPNPSGGNMGALEFNRAPTPP

SEQ ID NO: 313640 - protein, 109 aa, Zea mays
  unsure (1)..(109): unsure at all Xaa locations
  Clone ID: MRT4577_49099C.1.pep
QILKKNXXKSFKSNDRLHQPKGPRKPSRXXRSKSLAQWRKTQVRRXPNRKNIMLPHALRGTSQSSTAASRWSPERVPSQGHTVAHDPXTPXPHPIRHLHHRXXAGSTAR

SEQ ID NO: 313641 - protein, 52 aa, Zea mays
  Clone ID: MRT4577_4909C.1.pep
LHLRPPNILRVRDGDQPASIYIACIGLSRIYQAPLKPLCDNGLDASNLGPRP

SEQ ID NO: 313642 - protein, 100 aa, Zea mays
  Clone ID: MRT4577_490C.1.pep
RPPAKGPFPLCAGERQILDNALFLVSTGAPSVPGFGPGVNLGRQAPPLVKTHPHCVGVPGGRFIPLLKEKKRFFGARPSPPHSNPFFFGVGGFFSQRGFF

SEQ ID NO: 313643 - protein, 93 aa, Zea mays
  unsure (1)..(93): unsure at all Xaa locations
  Clone ID: MRT4577_49101C.1.pep
XXXRXAXNRKGTRRLRKKDPPNSRRPKRQAPTQAKKSKRGAPPAVPGRRSGRINKGGRGRNPTETGHRESRQRRGRQEPPATEHRTERAAEGP

SEQ ID NO: 313644 - protein, 83 aa, Zea mays
  Clone ID: MRT4577_49102C.1.pep
YLWLDGLLLVWKGYELAGCCEAGCKGQKVLVTQRQPYQVNAPLYLIVCLASVMSVFLDIGYIYHIVGWTWYFAGMGDRSIFTL

SEQ ID NO: 313645 - protein, 57 aa, Zea mays
  unsure (1)..(57): unsure at all Xaa locations
  Clone ID: MRT4577_49103C.1.pep
MASETETFAFQVEINQLFSLIXINTFYSNKEIFLRELIFNSYDALDKIRXESLTVKT

SEQ ID NO: 313646 - protein, 76 aa, Zea mays
  Clone ID: MRT4577_49104C.1.pep
FTIIFSFFFSQGCYFPLQFFFFFLIFYFFFFFFFLFFFFFNELQQSSAFVLLNCLNLVTRTPWLAHTVCTSNLPRT

SEQ ID NO: 313647 - protein, 117 aa, Zea mays
  Clone ID: MRT4577_49105C.1.pep
PLRYRGVVPGLPHASGDSVAKLVLRIPTPAKRKSTRRSIMGIARPKSMPARPHTKVNTDDEILRTGFFDSTPLEGGKITDCEAGELLAGARRLADARSSWLNDGPHQAGTNNNAPMA

SEQ ID NO: 313648 - protein, 38 aa, Zea mays
  Clone ID: MRT4577_49106C.1.pep
EPHAFPQSPRHSFAHRLRAALKTQQTYSFTVSKLTSIR

SEQ ID NO: 313649 - protein, 78 aa, Zea mays
  Clone ID: MRT4577_49107C.1.pep
QPEACDHVVAEEQLQGQGCYNLYPDGAYPQHWLSIISMRVIERLTFPLAVTARKSNMRILSNIGSLLTRSSAYTLDSL

SEQ ID NO: 313650 - protein, 479 aa, Zea mays
  Clone ID: MRT4577_49108C.1.pep
MEEHAITDRELPIEGLNQPLSDFGNDPELFSEAQPVSSHGQGQGWLSEGGDKAEVVDASISNDVVVVAENTCTDISLGDIEQFLMQISDDQQNDELFSDLSTPLPKLQFQCDDRQVWLDAERGHEVYAADPTASSGAVVTAECTVTELPLGDLEGLLLQIANDQHMVESQSDLSAPTPHHNFNQADIGDLHESHGARVGNLSCIVQESTFCEPRTEPSDQFPQSNVTNLPFSGEANSSEGTSVAHSVSGQNANCMTTEYMMSATNGMFDNLEYSDASSFLPGSFDIVGLGAENQYFDTDNSGIQNQGYQNTTEVRTYNQAALTVRSHMKHDHVVLSSHASGTLNIHAANELHNQSSTSSQSWFNAALSALLDSVPSSPALAAEIENTVINRTLQRISSFRPQQTAGEENTFINRTLQHISSFRSQQATGEEPGTPSIQVTRGGRLMFISLLVILASVIWTFTSGSALNFCKGLWKSSST

SEQ ID NO: 313651 - protein, 118 aa, Zea mays
  Clone ID: MRT4577_49109C.1.pep
LPFSGAQKYHSHKKREKGTKNSGKTQTTGGQAKTYSGGGGSKNAPNAREEAIKTRGDRVFIEPHPSASRAPPGPLSTNNKKADKKNHQRGGEPHEDCAATNLNMGGSPSPRKTAKNRA

SEQ ID NO: 313652 - protein, 75 aa, Zea mays
  Clone ID: MRT4577_4910C.1.pep
RVGDEDNEDKTKDMGRRPHPAHPHGRQRCHRGPGRGVAPKAVEPGHGGGELGCHVWRMRRRRRTSHLCTKCTVLS

SEQ ID NO: 313653 - protein, 384 aa, Zea mays
  Clone ID: MRT4577_49110C.1.pep
MGHEVYAADPTASSGAVVTAECTVTELPLGDLEGLLLQIANDQHMVESQSDLSAPTPHHNFNQADIGDLHESHGARVGNLSCIVQESTFCEPRTEPSDQFPQSNVTNLPFSGEANSSEGTSVAHSVSGLISYHSQDADEEFLEINDFFDLEDVGQNANCMTTEYMMSATNGMFDNLEYSDASSFLPGSFDTVGLVAENQYFDTDYSGIQNQGYQNTTEVRTYNQAALTVRSHMKHDHVVLSSHASGTLNIHAANELHNQSSTSSQSWFNAALSALLDSVPSSPALAAEIENTVINRTLQRISSFRPHQTAGEENTFINRTLQHISSFRSQQATGEEPGTPSIQVTRGGRLMFISLLVILASVIWTFTSGSALNFCKGLWKSSST

SEQ ID NO: 313654 - protein, 81 aa, Zea mays
  Clone ID: MRT4577_49111C.1.pep
ACVYRAAITRSTSAFVPNHVAVRVTHLSVLMLPTGVLLVRRPGCLQTGEPPSSKTCQNNLDHAVYLCKLYTCGERLQRLAI

SEQ ID NO: 313655 - protein, 140 aa, Zea mays
  Clone ID: MRT4577_49112C.1.pep
EPDLAAPGVQETLPNKIPPASVVLTAAAQASSFRSPPHLDECCHCQGCAGKYTLLRDEENPRWTIFERRLPCCGCGIGWSSFLLGFLCPLIWYFAATLYCCKYYNKDPRERPGLAASAVAALIFTVLALIALSVALIFYI

SEQ ID NO: 313656 - protein, 155 aa, Zea mays
  Clone ID: MRT4577_49113C.1.pep
RFLVRGRMRPPLPNRYFGNALIRLGVTGAVQDIASEALVSVAGRIKDTIDRMDDELVRSAVDYCEMAEMDSRPVKGTLLETELMLISWLGMPMYDTDFGWGKPAVMSRAESIRGGFVYIIDDGPTDGVGSGGVRVLMCMEAANMKELERLLYAKL

SEQ ID NO: 313657 - protein, 95 aa, Zea mays
  Clone ID: MRT4577_49114C.1.pep
GKVRRITSEGQILEQPLDPSLIPKLMSFLKLEKGKFGMVLLKKTLQVEERYPYPVRLEAMYEVIDQGPIRRIEKIRQKGFVQKCKASGVEGQVVA

SEQ ID NO: 313658 - protein, 107 aa, Zea mays
  Clone ID: MRT4577_49115C.1.pep
MGEAHLDECCHCQGCAGKYTLLRDEENPRWTIFERRLPCCGCGIGWSSFLLGFLCPLIWYFAATLYCCKYYNKDPRERPGLAASAVAALIFTVLALIALSVALIFYI

SEQ ID NO: 313659 - protein, 60 aa, Zea mays
  Clone ID: MRT4577_49116C.1.pep
QQWSVADSLSQKGTVKVIHCPPVSVRSVTCKHKVKSCKLYLFQFSVCSISSMVCTSSPTR

SEQ ID NO: 313660 - protein, 117 aa, Zea mays
  Clone ID: MRT4577_49117C.1.pep
LLWETKSIGEWPPPRRRDPSCSATKPHRTVCYVRHLYALLLRRAHGRVCYAPVHHPNNRALMLPCLLAPKLHRPLRFFLLERSTARASGPVRWSVSVCPHHCKAPPLFFWAPPPPHS

SEQ ID NO: 313661 - protein, 73 aa, Zea mays
  Clone ID: MRT4577_49118C.1.pep
IFVGAHSSSIQSASGGDTHRLLVIYGRIEICDFGLICHLPSISNRRTKCIRRGKCNRRCMCYTTDNLVAYNKP

SEQ ID NO: 313662 - protein, 128 aa, Zea mays
  unsure (1)..(128): unsure at all Xaa locations
  Clone ID: MRT4577_49119C.1.pep
LGDFFCPPFQEADKHLSHRVNLKFLGRKIHRPMGVVSFRAPQDTNGSLNSWAASLXKILDLVDKKCPPRHKKAMVPKAGVKGLLFWVRVLNPRCSFVSVTGGGVFCCCWGRPGSPPICFGARKIFGVP

SEQ ID NO: 313663 - protein, 48 aa, Zea mays
  unsure (1)..(48): unsure at all Xaa locations
  Clone ID: MRT4577_4911C.1.pep
KAALQILGAFHSHIVTSFXSCTKLINISFALDRSISQISCFVSSTSNF

SEQ ID NO: 313664 - protein, 227 aa, Zea mays
  Clone ID: MRT4577_49120C.1.pep
SSSPFGSRCLHKLQKLKYLYIKDRSGQLNIGGLDAWVAPPNLQILNTRSGCWFTTLSASAWMNPSLLQDLSLSTTVRELQQDDIIILGSLPALRYLNLMIVGEDLGVHNEIHGECIVGAGLFPSLVYCQLWGNVAPIVFQRGAMPRLRTLDFRLSVQEVRGINGRDGGIDLGLRNLPSLQKVWVHLDPEGANKAEVKELEAELTRAIKIHPNHPQLYGIQDEDADDE

SEQ ID NO: 313665 - protein, 58 aa, Zea mays
  Clone ID: MRT4577_49121C.1.pep
VSYPAPGPLCLLCSWFGELSIPPVIVHPLQARACSVSPLLACLGRPFQQVFCSPQPLV

SEQ ID NO: 313666 - protein, 65 aa, Zea mays
  Clone ID: MRT4577_49122C.1.pep
TTSISAYSIIRARPRQSWGGATVLAAGGNALYLASSTLKALASIAGGRRNGSRTRASTAQITGAR

SEQ ID NO: 313667 - protein, 142 aa, Zea mays
  Clone ID: MRT4577_49123C.1.pep
QGGPRGAREEGLSHIPAHRAGIRPRRPSSGSAPAIRNRALAKELGGPVKGMGGPCVGGGCTVGGKGPQEVRGGIHQGEGEIPSGCWVPNWGSAGPTPVVVCFGCRSCPSLAFYCLFWFPSVLSEALSVPFACFNFILRFFVL

SEQ ID NO: 313668 - protein, 69 aa, Zea mays
  Clone ID: MRT4577_49124C.1.pep
PTRPKKKRQSLRNPNQASKMRNRLLQSSEISSHLISHFRPANPPLICIQYTLFEPLRISFLIISFIYSL

SEQ ID NO: 313669 - protein, 118 aa, Zea mays
  Clone ID: MRT4577_49125C.1.pep
GMCSESWSVFHKVTHTRFSRRNIASSQRPHLLGPAYACHACMYPLVSGGSIVRRYVNGHAEQVRPCISPRFDIGATDIEGCTARLLPPRRLGYIAPHNFLRYHAPPGRPAGRASEARV

SEQ ID NO: 313670 - protein, 227 aa, Zea mays
  unsure (1)..(227): unsure at all Xaa locations
  Clone ID: MRT4577_49126C.1.pep
GYPPGRPGLKDNVTMINSETXKALLWLAKLSPKNXLEMEFVGLTRPVLDTRATTGKGAHPYYKIFQAFGLVRKIEKXIQRHVSSDTLNVFVWGDHKKPSAHNLAWDYDIVITTFSRLSAEWGPQKRSPLKQIHWFRVILDEGHTLGSSLALTNKLQMAVALVASNRWILTGTPTPNTPTSQVAHLHLMLKFLHDETYGQNYQSWDSGIHRPFEAQMEEGRAHPVPLL

SEQ ID NO: 313671 - protein, 71 aa, Zea mays
  Clone ID: MRT4577_49127C.1.pep
GKFGSYKTEVLFCCFFLHYKRIDRSWFFTMSGFSTIKEGYLLRKWMLFVNSIIFGSRFLSLIVGIRDIDQT

SEQ ID NO: 313672 - protein, 79 aa, Zea mays
  Clone ID: MRT4577_49128C.1.pep
GWVFFFFPFLSLKKKRLVHSHLHPPILCRPQVFLLTRKIKRKTNVAPLTNPFSYPLKKTPGTLCEKPGKLFNPPPQRLV

SEQ ID NO: 313673 - protein, 75 aa, Zea mays
  Clone ID: MRT4577_49129C.1.pep
NPWLKRVCSYSRLPAARNISVSQRRKRILCCCSVFYQNRLPFFPLCRINSLVNFTKLVLPKRPFNHEERAIIRNA

SEQ ID NO: 313674 - protein, 305 aa, Zea mays
  Clone ID: MRT4577_4912C.1.pep
MPPHKIETGHQDVVHDVAMDYYGKRLATSSSDNTIKIIGVSGTSHQQLATLSGHQGPVWQVAWAHPKFGSMLASCSYDGRVIIWKEGSKPDEWALVHTFAEHKSSVNSIAWAPHELGLCLACGSSDGNISVFTARSDGGWDTTRIDQAHPVGVTSVSWAPAMAPGALISAGSSGQFEYVQKLASGGCDNTVKVWKLNNGSWRMDCFPALQMHKDWVRDVAWAPNLGLPKSTIASASQDGTVVIWTAAKEGEQWEGRLLYDFRTPVWRLSWSLTGNILAVSDGNNNVTLWKEAVDGEWQQVTTVEP

SEQ ID NO: 313675 - protein, 64 aa, Zea mays
  Clone ID: MRT4577_49130C.1.pep
PVCGGLFCPRLFAHSITLSLFFVNGMEDQCLFFRQLISNTGPVFLTRPLIRPCLEFVYFLCDLQ

SEQ ID NO: 313676 - protein, 166 aa, Zea mays
  Clone ID: MRT4577_49131C.1.pep
MAASAAAPALLRRLFCSSIPASSSVLRATFCSSAGFGSSSPSSIFGDATEVANVPPLTTPNLFVSGLSRLTTDEKLQGAFAPFGRLLEAKVVTDRVSGRSKGFGFVRYATIEEAERARQEMNAKFLDGWVIFVDPAKPRQPKPAPQQDTGSSHAGFTTNKTVGWCG

SEQ ID NO: 313677 - protein, 255 aa, Zea mays
  unsure (1)..(255): unsure at all Xaa locations
  Clone ID: MRT4577_49132C.1.pep
MKFSIAVIAAASGLVAAGPAAPTPNDAFALTKRASLPVPASKGSVTLKAPQSVSGTFDGGMKTYGRGVSCTGQVEGGDKDAVFTVKNGGTLKNVIIGKDQIEGVHCEGSCTIENVWWVDVCEDALSLKGDGNAVVRGGGAQAASDKVVQHNGTSTVTIDGFTVVDFGKLYRACGNCKNSVTRNVVVKNVKDYNGKVLTGINPNLXDSSTISNTCATSVKTICEEFKGTTPGNEPSSVSKGPSANCKYTASAIKTC

SEQ ID NO: 313678 - protein, 179 aa, Zea mays
  Clone ID: MRT4577_49133C.1.pep
LWFFFSKTKITLGGSPGGGQSFLGYFFGNGKPPKPAVAPVASAPPVKKPFAPKINPANQVFFGVTSQTNNSPRVNGQNPGNFLRARPSTKVHVAPGGGFSLGSLFGGNLSPGWGAPQSYPPRPLGVLCLIRPPRCPFMVCPPPSLVRQGLIPWCQPSVLPWGGNRPLISRPIVALDLSS

SEQ ID NO: 313679 - protein, 84 aa, Zea mays
  Clone ID: MRT4577_49134C.1.pep
RTTRFPFTLWAPQRPRSWACFMEYPSFPSRFFFKFKFFTPRWFFPGLFKVVVGGINFSVLIHFARPSLKKTAPFFFSFLWGQGL

SEQ ID NO: 313680 - protein, 45 aa, Zea mays
  Clone ID: MRT4577_49135C.1.pep
GSCTTCTRGKPKVLTQTQAFIDFPGGSRNDGRAAGDDPLMPSTDP

SEQ ID NO: 313681 - protein, 117 aa, Zea mays
  Clone ID: MRT4577_49136C.1.pep
AVNVSSRRPVAVARHWYTGETLARFAVVLGGCKFEATVACSEGADGHVSEVSLAVEDADGAAVSGEGTLRLLAAAMEAPRKGGAREPEEARRRYLDFVKRKKGRKESKARREALVDL

SEQ ID NO: 313682 - protein, 50 aa, Zea mays
  Clone ID: MRT4577_49137C.1.pep
GQKSTPFCKGFQPGYSCFLEESWILPRKRMKALLIKTGFWGQLAFKFFPF

SEQ ID NO: 313683 - protein, 75 aa, Zea mays
  unsure (1)..(75): unsure at all Xaa locations
  Clone ID: MRT4577_49138C.1.pep
FDHCRALNRVSGDGISSLGLHILEVGVKSISSKLFLKGSCLLPLRICIVFPVGEHRSPSPPPRCWSXKEGLPSGI

SEQ ID NO: 313684 - protein, 81 aa, Zea mays
  Clone ID: MRT4577_49139C.1.pep
FFVGKGPLQWLAIGSLMCRSSVALLLEPGAPQPNQKNKIVNKVLSYLFVRLHLLDGYSYSDFVWLLSYFYVYLYLHTWAWY

SEQ ID NO: 313685 - protein, 50 aa, Zea mays
  unsure (1)..(50): unsure at all Xaa locations
  Clone ID: MRT4577_4913C.1.pep
MPPRAPXRRRPAPAAGGPGFGDSARVLLALAALYAAMSLLAYRVIHMRHV

SEQ ID NO: 313686 - protein, 57 aa, Zea mays
  Clone ID: MRT4577_49140C.1.pep
CALLNHLAHMNLKQCVGHLITKTFIEMAQGHISLSEVSKGLANPGLTIHLGRIYGFG

SEQ ID NO: 313687 - protein, 38 aa, Zea mays
  Clone ID: MRT4577_49141C.1.pep
TAELPTAGHNCATASRCMSFTNIWCVRLLRLLLVRCLS

SEQ ID NO: 313688 - protein, 86 aa, Zea mays
  unsure (1)..(86): unsure at all Xaa locations
  Clone ID: MRT4577_49142C.1.pep
MRGGIIVGGDGTRVGTWTLRSPKAIADCVNNAMILHTIKGFKKVXVTNAVLSMNYRPXAMTNTSKDFADKLAITSACSQKTDPLRT

SEQ ID NO: 313689 - protein, 452 aa, Zea mays
  Clone ID: MRT4577_49143C.1.pep
MDPPPVSPDRWGPSQGAGVGPSGLRRYGLNFSASSLLQAPIAALLEYSGVVQSGPALSAHHPSAGPSSPLSASEVDGLLSAAAAGDGEVSIRIQGGPGDTEATGGPDAGTSSEDLIEATAGSEVDQASAAGRGAGATDAEANGGGAGTSGNGGGDRAYQRYDVHHVARWFEQILPFSLLLLVVFIRQHLQGFFVTIWIAAVMFKSNDILRKQTALKGERKISVLIGITVIFMIHVFGVYWWYRNDDLLRPLFMLPPKDIPPFWHAIFVIMVNDTMVRQAAMAVKCMLLLYYKNCRGRNYRRQGQMLTLVEYLLLLYRALLPTSVWYRFFLNKEYGSLFSSLTTGLYLTFKLTSVVEKVQSFLAAVKALSRKDVHYGSYATAEQVLAAGDMCAICQEKMHVPVLLRCKHIFCEDCVSEWFERERTCPLCRALVKPADIRSFGDGSTSLFFQLF

SEQ ID NO: 313690 - protein, 423 aa, Zea mays
  Clone ID: MRT4577_49144C.1.pep
MYNHELLSDTMVRQAAMAVKCMLLLYYKNCRGRNYRRQGQMLTLVEYLLLLYRALLPTSVWYRFFLNKEYGSLFSSLTTGLYLTFKLTSVVEKVQSFLAAVKALSRKDVHYGSYATAEQSFRAHARLSTQELDLGLPLGPVLGGRHGAPNIGVGEREEEYSEAGIERSYVENGPRAGVVEGRDGVGTEPSSLSELLKKVIANLVNAITFWISWSTLACWTLKPCATSVDTHAKVFGDGATLSDTTAYHSLDNALKYLTFTSLDLTSHMVFNRSLYMNDPRESHLSMVKRILRYLLLVICVPFARRRCMCLFSFAVNIFSVKTVFPNEVQCSRAYFKSGIFISHSKAASIFYEEPLPPKFYEEPLMGVVIEWPYHFVKKHLDRDSLPPLRVSYLRTRCFMGERGVLDRSEVKPCYPGAESERDK

SEQ ID NO: 313691 - protein, 160 aa, Zea mays
  unsure (1)..(160): unsure at all Xaa locations
  Clone ID: MRT4577_49145C.1.pep
SLTYLIAMTRTPLSTQQRRTSRESQSLLQEHRKESERRXQSVLPWERGPNICSRPLRHPRSHWTRGRCLYSLGRVGGDLYPRAQGRPLQRARCLQGRPPSSRATRIPRYPQRTVLLIRSRYRPRSENRHWTSPHHQLPSRHSHNAPPQSPPPASLPPATS

SEQ ID NO: 313692 - protein, 258 aa, Zea mays
  unsure (1)..(258): unsure at all Xaa locations
  Clone ID: MRT4577_49146C.1.pep
MDPPPVSPDRWGPSQGAGVGPSGLRRYGLNFSASSLLQAPIAALLEYSGVVQSGPXGGAPPVRGALVAVVGVGGXGLLSAAAAGDGEVSIRIQGGPGDTEATGGPDAGTSSEXDRGDXGSEVDQASAAGRGAGATDAEANGGGAGTSGNGGGDRAYQRYDVHHVARWFEQILPFSLLLLVVFIRQHLQDIAVLAASTRCLHTAAFQGLLHISRSKCAYATTGTLCTCADLTVATQVVNKCCIGWAPNAVILYVCCADL

SEQ ID NO: 313693 - protein, 55 aa, Zea mays
  Clone ID: MRT4577_49147C.1.pep
HPKGEPSPPGAPPPRCAVNHGSFNLLLYLGICVVWGPLVYPYECGRLINICGLCV

SEQ ID NO: 313694 - protein, 169 aa, Zea mays
  Clone ID: MRT4577_49148C.1.pep
GVGPCVVVDWVSDVVSEVLERALAGSFDPLGLADDPEAFAELKVKELKNGRLAMFSIFDFFDDAISRPTTHTHPQPPPLSRSTAKPARCARPLVDRPLPLALRSYRSPTSRLLHCRRRTSLTAKSATQCAVMSDDMSDYDPLLQTDHRAGVSYWHELNACPTYHSNLPH

SEQ ID NO: 313695 - protein, 62 aa, Zea mays
  Clone ID: MRT4577_49149C.1.pep
WLCIMRSKQCESMDNHHCSSHDIRYSGPYDHMFMSRIIGATRIGHSLDLLVQHVNRGPIDSH

SEQ ID NO: 313696 - protein, 67 aa, Zea mays
  unsure (1)..(67): unsure at all Xaa locations
  Clone ID: MRT4577_4914C.1.pep
XFLFVHSMFSHSLISGGVPFFVPLAGTSFFVFNIVILPYLWSIIHFSCLLGWFNFVSVRLVISRENF

SEQ ID NO: 313697 - protein, 54 aa, Zea mays
  unsure (1)..(54): unsure at all Xaa locations
  Clone ID: MRT4577_49150C.1.pep
SSPVLXXLPILLLGIPNNLGDGIPHRLSLQLTHGCGDKSTPEKGLTRGEQRSES

SEQ ID NO: 313698 - protein, 265 aa, Zea mays
  Clone ID: MRT4577_49151C.1.pep
MGMGEGEREEWSDLDRRAEIRSALIKPKPSDLGRTPEIQQPGTRHERGGAARSRGKGSPETRGRPRWGSRGLGKGTGTGAPEDTDHGGKGPAAAQLTPVSNCAGTGVILGEIKAWKGCSPRVRTPGCLENGGGAVEPLVDGGGLRLRKKRPGERGPGKPERGRANQRVSQVADGEAQLTEATDGARARRRSQNGRWSTASKCRRSENTFPELVVEKRLRYSKRQMAQRSAGMSDLSIHLPDAEWPTIQRVRAIWRFTFPPAALYK

SEQ ID NO: 313699 - protein, 94 aa, Zea mays
  Clone ID: MRT4577_49152C.1.pep
QGRQHVVDHATCSRIDWWGFRVKKTMVCAGGDGVISACNGDSGGPLNCQLENGSWEVFGIVSFGSRRGCNTRKKPVVYTRVSAYIDWINERMQL

SEQ ID NO: 313700 - protein, 118 aa, Zea mays
  Clone ID: MRT4577_49153C.1.pep
AAAPAGAAAALLRGPTRPPTRGAFRALILMTEDGLMATTNMVYMALAWSGCCDLNQAYPREVYVMRIFWGGAFGVRWARTIRCRYRATYTLKDGALHVIKSIHSHTSDSKPYDRSYSG

SEQ ID NO: 313701 - protein, 371 aa, Zea mays
  Clone ID: MRT4577_49154C.1.pep
MPSDSADPTCTQVIAADAGANSNTWGTARTTACVVFLLSFIRRAIVFLSGGWPCAGSGSSGNLFLFCFLACPLAVGPGKGLKLTGCIGHQCRVKLINIVLLTMITTLLTIKKWENRLISVVKRQETRTSDATHARNCYLEWYWRIPRRWISTPVQYPIISHQLSGHTDKVLVNLVNTVEGRIRTLLLGEIDAKMMQQSLIYIDLYITVKRVDAKQVALTSCPYECSYLNLKRKGMLMSSNVVQIIQSGVPTGTRIGSAKSDTVSKYCGSYSSYCCKDGTGGTPDSALPITEVNLQDIISTPVEDAMTGIMNTSTEDATPKDISDSDVKDGYAFIEAVEVQETVVRRLLYLWTTSKYPRRLQLNCRSVPVHL

SEQ ID NO: 313702 - protein, 126 aa, Zea mays
  unsure (1)..(126): unsure at all Xaa locations
  Clone ID: MRT4577_49155C.1.pep
PFLHRGHWTMITEPVRGRLCDKPPIYDINAPDLYIPLMAFGTYVVLAGISLGLCGKFSPEALNWLFIKGLVGWFMQTALLXVTLLSLRNGXAPLLDIIAYACFTFPGLCLAVSGRIICDYFYYFLM

SEQ ID NO: 313703 - protein, 147 aa, Zea mays
  unsure (1)..(147): unsure at all Xaa locations
  Clone ID: MRT4577_49156C.1.pep
NVTGYGQRCLLLLDDAPRGAFPRIYARPRHTXTWIGMKQKDAYDADEALSXRGILTLKYPIXHAISSNWHDVEKIWHXHTFYNELRVAPXEHPALLTDAPLNPKAIMKQMTHIMIETVSVPDTYEAIQDCLSLYASERTTAIVLDSA

SEQ ID NO: 313704 - protein, 142 aa, Zea mays
  unsure (1)..(142): unsure at all Xaa locations
  Clone ID: MRT4577_49157C.1.pep
MGKGKKAKKKKPGGGGQKKKGGKKKPGGEXPNKKGGPKRGKNWGGKKKENGGGGNGGGKKGKSRQQPPXGGGGAPRPNLGRKGRKSPGKGQAEKSQGAKKGGPSXGPGPQEKGKFPQGGGNQRGXSKEKPRAGGGPPGGGAP

SEQ ID NO: 313705 - protein, 118 aa, Zea mays
  Clone ID: MRT4577_49158C.1.pep
SSGNNAEYFFFFFFFFFPFFFFFFFFFYLIILQREGSFTKSLEEETRGRKTKRNTRGGGVKQQKGTFQEIREGLYIKILGLQKAWGLQKITGGGKKKILGTKKGTRRGRVQKYGYGGV

SEQ ID NO: 313706 - protein, 78 aa, Zea mays
  unsure (1)..(78): unsure at all Xaa locations
  Clone ID: MRT4577_49159C.1.pep
LSWSQVQDSGRHAQLLGRGDLLLVVETRXLLYNLLYVLPQIKIINRRRTKLKSTHYAPDIARLSPQLQSHSVLFTHSS

SEQ ID NO: 313707 - protein, 233 aa, Zea mays
  Clone ID: MRT4577_4915C.1.pep
IGYLEAGRADSLCNLRHLSLFNLMVTSVSGPIPACLSRTNLTSASFFRSKLNGIIPGSLWKLPYFTYFNAAYNNLVGPIPPLLVHGGTPDRPLGLMLDGNRLSGPIPWTFALERHLLQFRVANNKLTGDPSFLFGRRKTVTGTIDLSGNNFRFNLTGVEMPMQLSFLNLSHNRIYGGVPVSLRDTRVAVLDLSYNDLCGKIPTGGHMVQFKAAAYEHNKCLCGTPLPPCANGR

SEQ ID NO: 313708 - protein, 160 aa, Zea mays
  unsure (1)..(160): unsure at all Xaa locations
  Clone ID: MRT4577_49160C.1.pep
MLDCAKEIPERLLGLTHVHRPPSLPSVPNPSYPHVSPSELLKFASELIXLSYPLTXESIMLNTVYNNTLIFVVVHQDDNKSMSADDKNMYVLHTKNDNALIRTDAETKAYKRLTHVYYALDSFYQNPYHLRAESCIRGSLEQCGVDYDYVMRDLCHYGCQ

SEQ ID NO: 313709 - protein, 132 aa, Zea mays
  unsure (1)..(132): unsure at all Xaa locations
  Clone ID: MRT4577_49161C.1.pep
SQKQLLXSFHFSVVNTLIAVTDEQVCSARLPSLHGDVLRCLASGGRWPGRRADRGSSAAGWLSVRLAGWVPSSWPCCGLAGRAASWLAVRRFEAGGGGWAGHRSRDGGSAAEPEVWPIRRRRWPRTRGRTRG

SEQ ID NO: 313710 - protein, 59 aa, Zea mays
  Clone ID: MRT4577_49163C.1.pep
CVWAGGTIIIRQMVCYIGNLDMENNFNGGERVFCRDSIILIDQDHTFTVWRCARLCIPK

SEQ ID NO: 313711 - protein, 96 aa, Zea mays
  Clone ID: MRT4577_49164C.1.pep
ALHLSVIEVASGMFIDLSCLCHLWSDASIFVILVRRQKPIYSATNWSSSPLLALSCPVVSMVSHVSFHDSVYISLCAFESADPAPHSPLWQRTRCQ

SEQ ID NO: 313712 - protein, 64 aa, Zea mays
  Clone ID: MRT4577_49165C.1.pep
FIELYKTFSNTEVRPHKVLLPLYAELHDYAHDREGNNNVNLPREIRPSSQISKVHPHARKIPGR

SEQ ID NO: 313713 - protein, 56 aa, Zea mays
  Clone ID: MRT4577_49166C.1.pep
WDDIEDLSSIDEKKTMQSGGTSKVDLRKRLSAAEEDEDLSWDIEDDDDEPAKASSV

SEQ ID NO: 313714 - protein, 531 aa, Zea mays
  Clone ID: MRT4577_49167C.1.pep
ARRLSSSSPARGKLSAQCELWTFPPRVLLLSVVLLAAPAAGAGTGSEFDDGTSPKFPGCDNTLQKVKVTYWVDGDERSSLTGISARFGAVLPDAAPDDEKQRAAVPSPESGCAKSSTPLAGSVAVAVRGECTFIEKAKAAEAGGAVALLLVNDEDDLQRMVCSDKDSPPNIGIPVVMVSKSAGDKVQSAIGDGSKVDILMYAPLKPSFDGAIPFLWMMAVGTVACASVWTVVVVGEEPTKQGDVSLGGEENPDAEVVELQANTALVFIVTSSLVLLFLFFFNSNWSAWLLVCLFCLGSLQGMEFVVSSLVVRLCQRCREAKVKLPALGNVKVVTLVVLPLAFIFAVTWAAHQDSPVAWVGQNLMGICMMILVLQVVHMPNIKVASALLVSAFFYDIFWVFISPLIFKKSVMITVARGSDDGPSLPMVLKMPKEFDSWNGYDMIGFGDILFPGLLVAFSFRYDRTHGKDLTDGYFLCLMIGYAFGLSCTYVGLYLMNSGQPALLYLVPSTLGVIVLLGARRGELGQLWNAKV

SEQ ID NO: 313715 - protein, 50 aa, Zea mays
  Clone ID: MRT4577_49168C.1.pep
SFQLAFYPPNIILHHLTKHKGEYIPIGLSNPILTVSRSSESSYPPHMFSS

SEQ ID NO: 313716 - protein, 76 aa, Zea mays
  Clone ID: MRT4577_49169C.1.pep
VLCNRVDSDGRRAGGIIGCESIGASRRRGAPRRRASARPAAVGPGVLHTRSSGPQPPRQEADDGRGSCRSSRRAAK

SEQ ID NO: 313717 - protein, 60 aa, Zea mays
  Clone ID: MRT4577_4916C.1.pep
PGQYFFSTNFLAFWNPLGFTYQSRFGNTNPRGLKTRPRCTRIPVQIHGRRDHVPKTPGPR

SEQ ID NO: 313718 - protein, 163 aa, Zea mays
  unsure (1)..(163): unsure at all Xaa locations
  Clone ID: MRT4577_49170C.1.pep
PPPRAAPKEGRTPHHGPPLXGPPPRHQAGRNQGXLPPGKNCPPPKTPHKIPAGKKKGKPXAPKGGTHQQXGGPPPAXPGKKPGPPASIKNPPXREEAGRKRAPPPLPPKTTCCPRSGGGGQRYHPKKRRYCGSPQKGGTPQKTTWQKNANKPPTTQKPPRWRR

SEQ ID NO: 313719 - protein, 234 aa, Zea mays
  unsure (1)..(234): unsure at all Xaa locations
  Clone ID: MRT4577_49171C.1.pep
MAAAGTQLGRLLVGGLWLLAALLQRGAAAAVAAVDGRRAIAATGENFVCATLDWWPPDKCDYGTCPWGRAGLLNLDLSNKVLLNAVRAFSPPLMLRLGGSLQDKVVYGTADLGRPCAPFAKNASEMHGFTQGCLTLRRWDELNAFFQKSGARIVFGINALNGRVPLPDGSMGGPWDYTNAASLIRYTAXKGYRIMGWELGNELSGTGXRARVGAEHYGCRCDRPXTLVDDIYAS

SEQ ID NO: 313720 - protein, 52 aa, Zea mays
  Clone ID: MRT4577_49172C.1.pep
YLVVYMNAKLSCGVPLPCGECVQDDFRRKLFKRLMYMITVFTNVLVLFHHFV

SEQ ID NO: 313721 - protein, 68 aa, Zea mays
  unsure (1)..(68): unsure at all Xaa locations
  Clone ID: MRT4577_49173C.1.pep
PDRHQAVPEHSKFFRESCGRWADNRKAHQIWGYNDXAKAKADGAYTMNTDNTDSDKNTIRRLKQQPHS

SEQ ID NO: 313722 - protein, 188 aa, Zea mays
  unsure (1)..(188): unsure at all Xaa locations
  Clone ID: MRT4577_49174C.1.pep
WKEAREAGHAXDLKNNHWWXPSMHTVPERLEACTTIIXWIVSDLQAVANLXQYPPCGYHHNHPAVNHAPMPVPVFESTRCWKQPLKTLPRSIATHVHASNKMSVLEILFTLYCQYEYLNQRDSQAWTYNAWEENAFKPVPMMIIEIEIHEPVYNIDRYSKNRXSADEVDYTLLLRITCCKGNNNDDAP

SEQ ID NO: 313723 - protein, 114 aa, Zea mays
  unsure (1)..(114): unsure at all Xaa locations
  Clone ID: MRT4577_49175C.1.pep
NSLSGPIPPQLGXAAQLQTVLLWQNQLVGTIPPEIANCKDLVLIDLSLNSLTGPIPSSFGTLPNLQQLQLSTNKLTGVIPPELSNCTSLTDVEGDNNELSGEIGIDLSRLGNLT

SEQ ID NO: 313724 - protein, 45 aa, Zea mays
  Clone ID: MRT4577_49176C.1.pep
MERVLVKLAESIGLFEAQDNAHREWDEKFSLSRDSLMDHTLLFQI

SEQ ID NO: 313725 - protein, 185 aa, Zea mays
  unsure (1)..(185): unsure at all Xaa locations
  Clone ID: MRT4577_49177C.1.pep
MGIVEEAHNLRVVGEGKRGVIVLAHGFGTDQSVWKHLVPHLVADYRVVLFDTMGAGPTNPDYFDFSRYATLEGYALDLLAILEELGIASCIYVGHSVSAVIGVLASISRPDLFSKLVLLSASPRYLNDVDYYGGFEQEELDELFEAMRSNYKAWCSGFAPLCVGGDLESVSVQEFSRTLXHIRPD

SEQ ID NO: 313726 - protein, 110 aa, Zea mays
  unsure (1)..(110): unsure at all Xaa locations
  Clone ID: MRT4577_49178C.1.pep
KXRGRPHPSGCDQSPLSNYFRSGGNHEGGAATESGGVRFSAPGPPGAHPLGVDRHRLNGRALGQPLLLGRVPGNRLPSNAVQGGKPFLGGPKLSGLSVLFVLLFHTGFYH

SEQ ID NO: 313727 - protein, 61 aa, Zea mays
  Clone ID: MRT4577_49179C.1.pep
VQRPRLPPSARLHLRRLTSRVPPTRRPTMVRAPTRRRRTMRTTMICRPISHRLPKISRAML

SEQ ID NO: 313728 - protein, 82 aa, Zea mays
  Clone ID: MRT4577_4917C.1.pep
NPRIRSGLLRIAFSTAEGPHETVTAMKLSIESRVIKLSLPCPNPCRGSIVWDGTNKKKRSLSHGDTTIDHRHHPSTSMIIDE

SEQ ID NO: 313729 - protein, 75 aa, Zea mays
  Clone ID: MRT4577_49180C.1.pep
SSGRPGRYKLFFFFFFFFSNILFPYKLSPSHFNGSSRTRLTLPPMTMGDTPSHGPGEPVNCQGVVIQQKDFWITT

SEQ ID NO: 313730 - protein, 55 aa, Zea mays
  Clone ID: MRT4577_49181C.1.pep
AATSEWWWFFMSEEVLPSSLLGLASMRTSGEDRRGWFRDLGVVPEAGDARSTASA

SEQ ID NO: 313731 - protein, 548 aa, Zea mays
  Clone ID: MRT4577_49182C.1.pep
MGMGMKWGATKAMTQLKLLSSRVSLPLFKHPLSFPQAQKPCPSLLCSSSFSVMLRLKALTFLLLLLLLALCSGVHLCDARSGTRWSRTTRGGGSGAAPSASAAAIGRKGKARSSGSSHRQSGEGSRSPTDGDPVQGDGSQAPPPQDTTVFSVVEFGAKGDGVTDDTQAFEAAWAAACKVEASTVLVPSGLEFVVGPISFSGPYCKPNILFQLDGTILAQTSARAWGSAGLLQWLEFTKLTGIAVQGSGVINGRGQDWWTYADPNDADDESVEMLLPRTKPTALRFYGSSNVTVAGITIVNSSQCHLKFDSCEGVMVHDLSVSSPEDSPNTDGIHLQNSRGVDIHHATLACGDDCISIQTGCSDVNIHSVNCGPGHGISIGGLGRFNTKACVSNVTVRDVKMFRTTTGVRIKTWQGGSGLVQGVRFSNIQVTEVQTPIMIDQFYCDRATCRNQTSAVAVSGVQYEDVRGTFTVRPAHLACSDSSPCSGITLAGIQLQPLPLPQHRRLSYDPFCWQAFGELYTPTVPPIPCLQIGRPAAGNSVLSDGDLC

SEQ ID NO: 313732 - protein, 67 aa, Zea mays
  Clone ID: MRT4577_49183C.1.pep
QHFFRPAGFKCRRASNVHIPGLGKRQTGLGGPWGPQGANWGVETLQPGLSFQPERPKGVAVPFRGCP

SEQ ID NO: 313733 - protein, 25 aa, Zea mays
  Clone ID: MRT4577_49184C.1.pep
ARAANHDFTVPPYIRLLGGAQDNPS

SEQ ID NO: 313734 - protein, 80 aa, Zea mays
  Clone ID: MRT4577_49185C.1.pep
KLTTSLSIHYQLYSSNSHIFISYFYHTHHLNKHLLSHNTYSDSLTTHYLFIIYTITLTLILYLTSSLNPHFLSLLSLSHH

SEQ ID NO: 313735 - protein, 157 aa, Zea mays
  Clone ID: MRT4577_49186C.1.pep
MDGGGAKAKKAAAGRKLGGGGPKRKPVSRSVKAGLQFPVGRIGRYLKKGRYAQRVGTGAPVFLAAVLEYLAAEVLELAGNAARDNKKTRIIPRHLLLAIRNDEELGKLLGGVTIAHGGVLPNINPVLLPKKAAERAEKAAAAGPKSPKKAAAKSPKK

SEQ ID NO: 313736 - protein, 77 aa, Zea mays
  Clone ID: MRT4577_49187C.1.pep
MATCILSLLTLLYLFKSTTNSFIITQSSLSPTSIIPHLQTPINYNSFKHLSLQPNMQQQTISPSFLHQPNAKLQPQS

SEQ ID NO: 313737 - protein, 104 aa, Zea mays
  Clone ID: MRT4577_49188C.1.pep
FFFFFFFFFFFFILTGLAFRHKGLSFLFFFMKKESPTYRPRQNKASLTQDIADQQTKGHRRYWKARRSQPSQGVNVARREEAPDETRALTHKKKRSPPGGPSTI

SEQ ID NO: 313738 - protein, 54 aa, Zea mays
  Clone ID: MRT4577_49189C.1.pep
SHDNADMIHGPCMVLWSIRYVCPSSKPISPDASLHIYRPRPWEVCEIRHVCLPA

SEQ ID NO: 313739 - protein, 55 aa, Zea mays
  Clone ID: MRT4577_4918C.1.pep
KSEAEFRFFLYNSYFFCMYVYVSLDFFRLAAFFFFSFFFFFFFFFFFFFMQSRTS

SEQ ID NO: 313740 - protein, 44 aa, Zea mays
  Clone ID: MRT4577_49190C.1.pep
MVKKNKKKKKKKKPKKKKKKKKKKKKKKKKKKKKKKQKKKKKSG

SEQ ID NO: 313741 - protein, 127 aa, Zea mays
  unsure (1)..(127): unsure at all Xaa locations
  Clone ID: MRT4577_49191C.1.pep
FAEFEQMFXKGMVPQYITYRMLMRELKRLGLVKLVQKLADLMGSVPHSPKLPGGYRDKEGDDAIEKKKSIFLKAQAVSDVLKDCKDPKKLGELKDPEETDVQIADRIVANIRRRVYGDISRIGPSVS

SEQ ID NO: 313742 - protein, 210 aa, Zea mays
  Clone ID: MRT4577_49192C.1.pep
MSPLPRRRLVVLVLLAAAVAATASAASLSGAANDLLPKYGLPKGLIPDSVTSYSFDEATGAFEIHLASTCYVHFGSHLVYYERTITGKLSRGAISDLSGVQAKKLFLWVYVTGMVAHPDQGTIEFQAGFVSESLSASMFDEVRTCGSSAGAQLRGAAGVIGELGLLPVAQVFFTSLLLYKLPSVEPVGRWIRGWEFSPAFVYLIDDEIVR

SEQ ID NO: 313743 - protein, 82 aa, Zea mays
  Clone ID: MRT4577_49193C.1.pep
IIHHLHKLCCSCVHVPDNSLSLFSFFFFFFLFLFFFFFFFFFFFFFFFSICVDFWISTTRLHTYLIPQDIGSHRLQIQPTRP

SEQ ID NO: 313744 - protein, 108 aa, Zea mays
  Clone ID: MRT4577_49194C.1.pep
GEKKKGPPGGGGVHSFWPEQQGFWVGPLTNRGAHGGGFPPPGPHTMGGFLPPRVFVWAFPNQGVFSKALKRGGEKKFICCPTKNFSNPIGGFLFAKPFINFGPAAAKF

SEQ ID NO: 313745 - protein, 171 aa, Zea mays
  Clone ID: MRT4577_49195C.1.pep
RSRPSRPPPPPPPLPASRPAATAVSGTPGPPPSDVPARRPTCPRARRRRPRRKPQIELEFVGPKPGADGSFPVDRAEATSGEKLLRDVMNENKIELYAAYGKVMNCGGGGSCGTCIVEIIDGKELLNERTNTENRYLKKKPDSWRLACQTIVGNKENSGKVVVQRLPQWKR

SEQ ID NO: 313746 - protein, 86 aa, Zea mays
  Clone ID: MRT4577_49196C.1.pep
VTRSFKERSASDGSCTTNAMVSHNSDFKELLNGDKEGLIKLPSDKALLSHPVFRPLVQKYADDDKAFFDDYHEAHLRLSLLGYPDA

SEQ ID NO: 313747 - protein, 48 aa, Zea mays
  Clone ID: MRT4577_49197C.1.pep
MAAAAAAAEQGVDAARKEEDEAQVVNPWEESAVKGGIYYDKLVDQFSC

SEQ ID NO: 313748 - protein, 40 aa, Zea mays
  Clone ID: MRT4577_49198C.1.pep
SYSELINDGEPDDVKEAMNASTHSFFELTEEAKKQYRQQA

SEQ ID NO: 313749 - protein, 43 aa, Zea mays
  unsure (1)..(43): unsure at all Xaa locations
  Clone ID: MRT4577_49199C.1.pep
YSHQSESQQREQSXIAALTIMSMTAMSHIXSDSLRSLMTIDSS

SEQ ID NO: 313750 - protein, 103 aa, Zea mays
  unsure (1)..(103): unsure at all Xaa locations
  Clone ID: MRT4577_4919C.1.pep
MGRKFFVGGNWKCNGTTDQVEKIVKTLNEGQVPPSDVVEGGGGPPYVFLPAXXXQVGQEFHXAAHNYWAEEEDTGNFLTGRASTKVLAAPGGGGGLGYLFFFF

SEQ ID NO: 313751 - protein, 170 aa, Zea mays
  unsure (1)..(170): unsure at all Xaa locations
  Clone ID: MRT4577_491C.1.pep
EYVRNSRGMSLFACRWLPAXRQEXRAPAPKALVFLCHGYAVECSVTMRGTGERLARAGYAVYGLDYEGHGRSDGLQGYVPDFDALVLDCDEYFTSVVAAAAQSQSKDAHQLPRFLLGESMGGAVALLLHRRRPEYWSGAVLVAPMCKIADDMRXHPLVVNILRXHDTIIP

SEQ ID NO: 313752 - protein, 44 aa, Zea mays
  Clone ID: MRT4577_49200C.1.pep
QHLTDLTVQSTNKDRGPVITIYYTIVILQLLPSVPFSHFKHAAL

SEQ ID NO: 313753 - protein, 66 aa, Zea mays
  Clone ID: MRT4577_49201C.1.pep
KKDLGAIREQQSDSRSSSMSKGWLGFNLLRSVKVVENPQVDSYNFHALDLDQDRDGLLLQGLVPCL

SEQ ID NO: 313754 - protein, 90 aa, Zea mays
  Clone ID: MRT4577_49202C.1.pep
PGVNILAGRAVLTAAAVLFFFLFFYLFSVVLLPKNSYIFRGLPRSIERTHQWTGGVQIVPGPAPGGQNARPKCGGILEGGNCLTVHVNHN

SEQ ID NO: 313755 - protein, 60 aa, Zea mays
  Clone ID: MRT4577_49203C.1.pep
QLETKTTTGGLSWFILMYSANSSSLLVYTKRRESKKTCASCKIKGPLTSTIFDGDDSDLL

SEQ ID NO: 313756 - protein, 50 aa, Zea mays
  Clone ID: MRT4577_49204C.1.pep
HPRLYALLCDAIVSPMYTPKAHSFSTLFYSENHWENPAYSHLSTFALHPL

SEQ ID NO: 313757 - protein, 107 aa, Zea mays
  unsure (1)..(107): unsure at all Xaa locations
  Clone ID: MRT4577_49205C.1.pep
XXXXXXXXXXXRXXXLCXIXXAPXXXALXXXAAVVSXPXRXFXFFLSXCXXAXXFXLXXVVXVXXXXAPFXCLXXSXXXAPXXXXXPFLXXVXXPKTXLLPRXLCVV

SEQ ID NO: 313758 - protein, 55 aa, Zea mays
  Clone ID: MRT4577_49206C.1.pep
EMQSSVTDVIYHVDEFPKLGVVVEDEPDELRPVLFYSFVETCPAPVVLVGRIWTV

SEQ ID NO: 313759 - protein, 55 aa, Zea mays
  Clone ID: MRT4577_49207C.1.pep
VVCIYWYFIYKIRCLGIQHYTTYNVMTKEFVILIALPFLMCLYICFQAKYMNTKC

SEQ ID NO: 313760 - protein, 77 aa, Zea mays
  Clone ID: MRT4577_49208C.1.pep
MAAQSFLLAATAAARSPAVFAAPYSSEGPFNSVNFVAGPWGAAAARALVVPDATRKAVPVLRGASEVEGVVTLTQDD

SEQ ID NO: 313761 - protein, 37 aa, Zea mays
  Clone ID: MRT4577_49209C.1.pep
MGCGQSKMEEEYAVRHCRVRSGALALAIRQRYTPADA

SEQ ID NO: 313762 - protein, 140 aa, Zea mays
  Clone ID: MRT4577_4920C.1.pep
KIKNDTEEDGESANEKEKSYGSIMMERLTSSPNGRIDHVLQEKTFQHPYLSALGAHTNYWRDHDTALFILKHLYRDIPEDPPSDVIERMPIKLFYERDPVEEETPVTFSDHAAIKEFCRKVKAYSRKMEDDANCQPRDGF

SEQ ID NO: 313763 - protein, 81 aa, Zea mays
  Clone ID: MRT4577_49210C.1.pep
SCGISSCMVWLTLVPPPPLGAAVCPPPCCLIWCACLTSVLFVVICPASALFSSHMICFVRLLIRQSCPFFLACKKKKKRAA

SEQ ID NO: 313764 - protein, 32 aa, Zea mays
  Clone ID: MRT4577_49211C.1.pep
TFVILHVRGLLFTNEASQILIHAFIIYVLESQ

SEQ ID NO: 313765 - protein, 64 aa, Zea mays
  unsure (1)..(64): unsure at all Xaa locations
  Clone ID: MRT4577_49212C.1.pep
KGLMKTLDHESAEAGPLLLXVAPKPGTKSCRRQEFTVILAYMLFSEHNIYELDRPVLEYKLCVR

SEQ ID NO: 313766 - protein, 87 aa, Zea mays
  Clone ID: MRT4577_49213C.1.pep
KLVTAMGLAKMQMAKNNYTNTKDSNLTIRACVPRLFLLVVDYETANFSFIQNNGTDMLFELECKNCVLTSCCLCTCPHLKQVLSLSF

SEQ ID NO: 313767 - protein, 85 aa, Zea mays
  Clone ID: MRT4577_49214C.1.pep
QKTFWGVFSSPGGAQRCKKGPGMLKHTLPAPPQKKYCPFGPTTQLIFFGGPFCLKVIFFHNGGGSMGAGPPKPKVKTHGAWGGRR

SEQ ID NO: 313768 - protein, 96 aa, Zea mays
  Clone ID: MRT4577_49215C.1.pep
FYAVPQLFRHPVQVVRENSVQSKGLVIFPQLVQPDFARSQGQPQWQGLVPHMQQKPGKDVLRPDLNIGFPSPRSPPARQSSGINLEAQQPDLALQL

SEQ ID NO: 313769 - protein, 134 aa, Zea mays
  Clone ID: MRT4577_49216C.1.pep
SYLSYATGRNADEFADLGNPRYFSWDDKRAGTEVLLSRVMFFAGDGSDAGQDEVLGSYKDTADAVMCILLPESDTAAFRTEGGLLYVAEWNSLQHPVASAFLANVYSNYMATSVKSELTCSGKSFTALDLRKFV

SEQ ID NO: 313770 - protein, 313 aa, Zea mays
  Clone ID: MRT4577_49217C.1.pep
MHAMPSSNGQPKHYFKSHAAVSSVVHDMPSSNGQPKQIFQSQAVASSGGHDMPSNGQSKPLFQSQEATILQPKNEATWVYHGRPGDGKVGTSNKSRPSTSIGFINKNHQSVNAATFAMNLNGQKIVSDHAKSAGTTAMPVQVNIPNRGLDAPRNMFSAFPAAVRENHSIPPAPMAQSWISFGATTENKPTIVSPTSLDNNCGWKMPFANVQPSDDTKINAVPQLFRHPVQVARENSVQSKGLVIFPQLVQPDFARSQGQPQWQGLVPHMQQKPGKDVLRPDLNIGFPSPRSPPARQSSGINLEAQQPDLALQL

SEQ ID NO: 313771 - protein, 360 aa, Zea mays
  Clone ID: MRT4577_49218C.1.pep
MTCFFFSFPPKRILNSRLLFFSNAYRGATPQQPMADAAADLRRRMKEQRAAIQRRFIDSRNWAAAASSAFSAALLEARSIANQTVSNRAKLSEQKQHLRKLESDLAQALSVQTSRRSKHNLMTESILKTTATNEQLTHLVTGRRATRDECMNAISIQLKDIESLESESDTNEDKNLEKALIWYNKFLGFQVVGGEGVKFMFNKIDVQRPDKECYFCIKLVEGRYTLVQCVPSVDGAEELVKDLNCNNDLYKFVRVVRDRLQAAIISGNMLSSSFCPDLSSIISSSFSASSLDSPSENNINRSQSKNQECPVKGLAKTQRTKTTHLKVGRKRDPRSIGKGILHLEFLFDLPNSIGMWRSVQ

SEQ ID NO: 313772 - protein, 74 aa, Zea mays
  Clone ID: MRT4577_4921C.1.pep
KKKKKKKKIYIKKKKKKKKRKKKKKKKKKKHTNIVYPFLLSHPFYPLTLFFNIHLNLTYLTQFFIPTFFPKPLC

SEQ ID NO: 313773 - protein, 64 aa, Zea mays
  Clone ID: MRT4577_49220C.1.pep
KNPTHGGPSAAHAPELCHYRSPRFLNLSPFISGPNSICVKCRQDHRQNPEQSLVHTDSFPHGCS

SEQ ID NO: 313774 - protein, 132 aa, Zea mays
  unsure (1)..(132): unsure at all Xaa locations
  Clone ID: MRT4577_49221C.1.pep
SILKPFSFSFSSAALEAAFYNVLGSQLVANATGENSIKSPAHAKLNVAINGFSRIGRNFLRCWHGRXDSPIDIVVVNDIRCVMNSSHLLKYYSMLVTFNADVKIVDDTTIIVDGNPITVVFIMDPLKLPWCD

SEQ ID NO: 313775 - protein, 101 aa, Zea mays
  Clone ID: MRT4577_49222C.1.pep
PQQGAGAGSTPMLDLQRSQPGSFPGPWVHSRLNLKLAQPGGSGGLVPLDPGRPQKRGVKILPGRGEHVEAPVHALDVVVAGGHKQVGVFGAVALHLVLLGH

SEQ ID NO: 313776 - protein, 203 aa, Zea mays
  Clone ID: MRT4577_49223C.1.pep
MPTLRSATANASPVATPSPAAASTPRSVKRRLTPGRAGESPKASRHTSPHRSPHAGTGTVCIPKLLSASPKSSRKRLYGDLVAAEKPKWNPRDAAQIRAVKEALHVATVPSSELVCRDNELRRVLEFCKVCVQQEKAGSLYVCGCPGTGKTLSINKVKDSLVCWADEMGMETPDALAINCTNLANTSEIFGKILGKLQNQKKG

SEQ ID NO: 313777 - protein, 73 aa, Zea mays
  unsure (1)..(73): unsure at all Xaa locations
  Clone ID: MRT4577_49224C.1.pep
VIPKVQATPVWLANCXECIFHXVQLFADVAVXXIXKTDSSLVNPXCFSQRVSRXFMEQIPKAEXXPRVGTSIA

SEQ ID NO: 313778 - protein, 127 aa, Zea mays
  Clone ID: MRT4577_49225C.1.pep
YPLPACLTGSQPQGARIRVLGTPRSDSHHATAKHSNGGGAVSSSAQHLAGSPIPCRTTLPGPQNSKHFTGAGAPSSQASLHPLVRDSPRYHLGPRCSADLNYRLINKAMDDGIEITQAPKFSQPPVS

SEQ ID NO: 313779 - protein, 145 aa, Zea mays
  Clone ID: MRT4577_49226C.1.pep
VGTLISFTVISLGALGLISRLNIGALELGDYLALGAIFSATDSVCTLQNFDPGNISSAKLLNFIGSFLYLFGSSTILGVASGLLSAYTIKKLYFGRHSTDREVSIMMLMAYLSYMLAELLDLSGILTVFFCGIVMSHYTWHNVTE

SEQ ID NO: 313780 - protein, 90 aa, Zea mays
  Clone ID: MRT4577_49227C.1.pep
LLGSGSHFESGCLKTVLVVSSARIAPYRYNLTDSYLAVAKHLRENEEKDSEYRLSVHMVMYSDRTKCNHFETRLVWYMVTHVFLDRKFSV

SEQ ID NO: 313781 - protein, 96 aa, Zea mays
  Clone ID: MRT4577_49228C.1.pep
CGRVFCFLRTAQEIPRGTWLQKQQRARGTTTKHHKNRNAGIQNTARSEQESARRRDSTPGAQRNGKGGAEPQPGEPPKRGERTARHAPKAETESPK

SEQ ID NO: 313782 - protein, 132 aa, Zea mays
  unsure (1)..(132): unsure at all Xaa locations
  Clone ID: MRT4577_4922C.1.pep
GGWVLVVVLVPRVPSLSCAXCACSFGGVFWLFVAVRRAWCRGLCLWRVLLLAAVAGLLRVVVRPASLGCRPGVPWWALSARVSFVGRPGLLXAAVGWCGVGLFPLASPGXWRVVLQLKVSCLQPACSGCSRP

SEQ ID NO: 313783 - protein, 80 aa, Zea mays
  unsure (1)..(80): unsure at all Xaa locations
  Clone ID: MRT4577_49230C.1.pep
HASAHASAHASAHASGMLDETPLDVCGDEEVRAKLLELKHKHDALLRAQSRQRSLLRXRTSSAGSRGKVVRRVSLTQRTD

SEQ ID NO: 313784 - protein, 236 aa, Zea mays
  unsure (1)..(236): unsure at all Xaa locations
  Clone ID: MRT4577_49231C.1.pep
MDPPLSQQPTLLALSLLLLALYLARHALLGKRRNYPPVAGTMLHQLFNFGRLAEYQTELSQRYRTFRMLTPTCNYVYTVEPANVEYILRTNFANYGKGTMTHDVLEDLLGDGIFNVDGAMWRHQRKVASFEFSTRVLREYSSGVFRXTAAELAGIVAAAAAXGERVDMHDLFMRSTLDSIXFTIGFGVNLXXLSQSSQEERXFARAFDDANEQVLYRFFDPLWKAKRLLNVSSERP

SEQ ID NO: 313785 - protein, 86 aa, Zea mays
  Clone ID: MRT4577_49232C.1.pep
RDRLHGQAILVMREVVVDGVRHERGHGRRAFDGGKDRQGRPCTSGSTCSTSTASRFCSAITSVIQQCVIVAASRLWVTRRLARQPW

SEQ ID NO: 313786 - protein, 70 aa, Zea mays
  Clone ID: MRT4577_49233C.1.pep
GRPQLPGCASPPGKPVSSLGRPPGAFQPDECLFGNHFLAPIPSPKPSPPLSLLSPFLCLILMQSGPFSFL

SEQ ID NO: 313787 - protein, 219 aa, Zea mays
  unsure (1)..(219): unsure at all Xaa locations
  Clone ID: MRT4577_49234C.1.pep
FAEKRRIESECCLPPHCGRWFRRRRHRTLPPASCPRQGGVRRRRRCARCGTTXSIPKREPFTSSRSTLDEFLRLDKPLVQRTKDQITDYCMTVEGDECCSCWDAYFELNKLEQELPKEEISRMVKDSEGDVRYLIESIHHRSDLRKKIAEKSRNSVPSGSQGQTAKPRPFPVPDGIPKTQEELTEEEEALMPESPYTRLLRRMGRYPEWYTPRPDHETD

SEQ ID NO: 313788 - protein, 106 aa, Zea mays
  Clone ID: MRT4577_49235C.1.pep
KGAPPGSGGQNFGGQPVTGQILVPAAPLVRGNTRPGPCKQGISTWAPPGASFTVTISPVKVGDNVVHVKREPPPPYDSFTTAIFLCGGFPGPRIHQLGLVYFLPPP

SEQ ID NO: 313789 - protein, 83 aa, Zea mays
  Clone ID: MRT4577_49236C.1.pep
IFISSMEQRAKGLRVWRDTNRLASRLYNLKRDTKSLVSLSEEQSNDLTDGDKNQEANCSNVDDMYHGLTVNSEIDSLPDPKDQ

SEQ ID NO: 313790 - protein, 87 aa, Zea mays
  Clone ID: MRT4577_49237C.1.pep
HAVASPRAVASARRRLPIVVQFHGGGFVTGSNTDVGNDTFCTMVAQLCDAIVVPVGYRLAPESIYPAAFEDGVNVLKWITKHANLAM

SEQ ID NO: 313791 - protein, 68 aa, Zea mays
  Clone ID: MRT4577_49238C.1.pep
GRSRGRPGLEKKKKKKKNKKKKKKKKKKKLTKKKKKAPKKKEKNKKKKKTQKKKKKKKKNGAPGAREV

SEQ ID NO: 313792 - protein, 107 aa, Zea mays
  Clone ID: MRT4577_49239C.1.pep
GEEALKGKGATQKEKEGHPTTRGKRKEKARKNPGETLKQKKVLGFFKKIPHSLGPWGKFNGLGGPPKRFSIIPKKIYLWAPFLKNCKYFKPNPKKKSSPGFSPLRGP

SEQ ID NO: 313793 - protein, 53 aa, Zea mays
  Clone ID: MRT4577_4923C.1.pep
RLHAIIHYDTLVSFLPQSPYHGAKISTQQIRRPHYKTNIQRCSRGKPNNLYNA

SEQ ID NO: 313794 - protein, 206 aa, Zea mays
  unsure (1)..(206): unsure at all Xaa locations
  Clone ID: MRT4577_49240C.1.pep
HWDPRGRPGQACDTRELDRRCIGATPTEPQLLQTWGPLLGSLPPLLPLSSAGPDXFLDKPDIELDLAMLREHNHLTMEGQVASNISADHIADMDTQNSMNLLLRMLLSPAAASMMGRYGNDFVADESKNNAQADLRTAHYYHDHTAPTGTCAACADDRALALIVNLDPTNCYKAAASRRXHTYGIYVERTHIXLAALFLTATPDSL

SEQ ID NO: 313795 - protein, 125 aa, Zea mays
  Clone ID: MRT4577_49241C.1.pep
RYTMERPRFSDHLEAIKFICKDFWSELFKKQIDNLKTNHRGTFVLQDNRFRWLTRVSLDPYTENRDSTENDSAALGDTAAQTTTMLLYFPCGLIRGALTNLGIPCSVSADMSNLPACSFVVRIKT

SEQ ID NO: 313796 - protein, 119 aa, Zea mays
  unsure (1)..(119): unsure at all Xaa locations
  Clone ID: MRT4577_49242C.1.pep
VGQGSSSAGDQNEIANLFPNRSHQSSACLFPALEPVATTPLTIGFVLCTQHVPCGHNGIXCIFYYLQVRAXGSTLSGFXGRPAIIMXCKYVQLTIEHVCAYRYHGRSELIRXERNMIVT

SEQ ID NO: 313797 - protein, 194 aa, Zea mays
  Clone ID: MRT4577_49243C.1.pep
ASPPSGLDSSTPGRSASPTSRRRRVKSCVDAVVMEMVAVYCGGLYTAKPELAARRIEAIGFQVGHQLSERYTMERPRFSDHLEAIKFICKDFWSELFKKQIDNLKTNHRGTFVLQDNRFRWLTRVSLDPRIENTDSTENDSAALGDTAAQTTTMLLYFPCGLIRGALTNLGISCSVSADMSNLPACSFVVRIKT

SEQ ID NO: 313798 - protein, 173 aa, Zea mays
  Clone ID: MRT4577_49244C.1.pep
MAIAESCVDAVVMEMVAVYCGGLYAAKPELAARRIEAIGFQVGHQLSERYTMERPRFSDHLEAIKFICKDFWSELFKKQIDNLKTNHRGTFVLQDNRFRWLTRVSLDPYTENRDSTENDSAALGDTAAQTTTMLLYFPCGLIRGALTNLGIPCSVSADMSNLPACSFVVRIKT

SEQ ID NO: 313799 - protein, 38 aa, Zea mays
  Clone ID: MRT4577_49245C.1.pep
KTIKFRFRSKKSSISGAGSDLLGPLGMIPRSPRFFYEN

SEQ ID NO: 313800 - protein, 173 aa, Zea mays
  Clone ID: MRT4577_49246C.1.pep
MAIAESCVDAVVMEMVAVYCGGLYTAKPELAARRIEAIGFQVGHQLSERYTMERPRFSDHLEAIKFICKDFWSELFKKQIDNLKTNHRGTFVLQDNRFRWLTRVSLDPRIENTDSTENDSAALGDTAAQTTTMLLYFPCGLIRGALTNLGISCSVSADMSNLPACSFVVRIKT

SEQ ID NO: 313801 - protein, 68 aa, Zea mays
  Clone ID: MRT4577_49247C.1.pep
FAPHAESHTRGSTAGRRALSMLDTNMKRCGSGIRLSRSFVQLAAFGGAGGEGHHRIDCKSLQKVHAAR

SEQ ID NO: 313802 - protein, 90 aa, Zea mays
  Clone ID: MRT4577_49248C.1.pep
CAADWVAPVGAPGRGLRSRVQGCSRCSRVWVALNTPSRAPPRGPARVVGPYSGRMFPSLCRSSLLVGIDPLKRLRPCLRASLRPPRSSQR

SEQ ID NO: 313803 - protein, 124 aa, Zea mays
  Clone ID: MRT4577_49249C.1.pep
YGKPVHHGVNQLKFARSLQSVAEERAGRHCGALRVLNSYWVGEDSTYKFFEVILIDPFHKAIRRNPDTQWITKPVHKHREMRGLTSAGRKSRGLGKGHKFHHTIGGSRRAAWSRRNTLQLHRYR

SEQ ID NO: 313804 - protein, 123 aa, Zea mays
  unsure (1)..(123): unsure at all Xaa locations
  Clone ID: MRT4577_4924C.1.pep
MITTIVTTDGTNDARAIPESNMTLTPALARTRSAKEDSYAIITDHTCCTNATAVKPGRSAYINMQKTVQCTAHLYYVXDCVANLVFSXLTRYAPLTXMKLFLVLHDMDTXGALVLDTNPPTDD

SEQ ID NO: 313805 - protein, 94 aa, Zea mays
  Clone ID: MRT4577_49250C.1.pep
KKKGGGTYHPRSLFSRGSGLKGGGFFKNLEFPRVGLTCEKKKPPPLEGLGAQELIDGLLGKKSLGTRPLVGPNPPLGSPKGGEWNPKKFCSSQF

SEQ ID NO: 313806 - protein, 66 aa, Zea mays
  Clone ID: MRT4577_49251C.1.pep
GPSGFMLQCCGPQAILKYASQLRVGSNLSNPGFCYNMFSINTHVWWLSRALTVHYKRPVNHLISLM

SEQ ID NO: 313807 - protein, 110 aa, Zea mays
  unsure (1)..(110): unsure at all Xaa locations
  Clone ID: MRT4577_49252C.1.pep
AKLQDMIIQVYLDGNGTMDFLEFMNIMVRKMKDKDSEVELKESFRYFDKHQNGFISAAELRACQVQLVRRPEWXQVYDMICVADVYGDGQMYMQXFVKVMMYKLRSVPVQ

SEQ ID NO: 313808 - protein, 46 aa, Zea mays
  Clone ID: MRT4577_49253C.1.pep
KVALMTGESLTEREVEDASGQYWVESPDSICFEWLLNSSDLLNGVG

SEQ ID NO: 313809 - protein, 91 aa, Zea mays
  Clone ID: MRT4577_49254C.1.pep
GGTQHPEIFKTGGRGKKNRGGGILKTTWETKQRGTGGGAKPYTGPQPSPQGKHGPQGARKLKNRGKNYGKPWIWEKNWKSPHAKARKPVKN

SEQ ID NO: 313810 - protein, 94 aa, Zea mays
  Clone ID: MRT4577_49255C.1.pep
RGDAAEENISFFALLWAPFAALPAEARSFFGPHHVVRDNGHTHPTSCPVWTYDTSHPRQIMHFVPGIYTIHIVFSRDAYHRINRVQRWGDQQVS

SEQ ID NO: 313811 - protein, 1696 aa, Zea mays
  unsure (1)..(1696): unsure at all Xaa locations
  Clone ID: MRT4577_49256C.1.pep
MAAAEKAGAVKWDQVLSTLDTIVQRIESVERAQQQLAGQQSLANSVAEQAARARDEMARQIAETGKRVASLTLEQMAAGMEQFGDGSPASPSTSPVFASDLRRDVPPGGHRAPHDRGGHRRRHGERGGRHEPDGHQEFGEAPPPFMKFSFPKFGGESPSIWLDKCHDYFQMYQVSRSIWVMAASMHMEGKAAKWLQVFKLHHALGNWEHFSSAVLDQFGLYEYPKAMDDLLNLRQTGSLEEYVSVFDDLRYSTAVHNPQLDEIFFVAQFVKGLKREIQGPVRCQVPTTVNRAVLLATLQQDVLDKSRPKFQSTVGGKRGIPGLPPDSQEGVGLSKERQLRDYRRAHGLCFTCGDKFDAGHAAKCGKRVPAVLNVLTVDDMALELSDEVLQQLDQEDHSVVDLCSLSVHAVSGTEGVDSIRLRALVQNQVFLLLVDSGSSATFINSTFVQQAGLFPQPVSTIRVKTASGQELVSTTMVKAVEWWCGGHTFTTDMRVLDLGPYDAILGCDWLKQNSPITCNWNQKSLGFSYQGSWVQLQGLLPTVQQTVTELSVVQLSKWFSGNEVWALALLDFYPDGTSSSQSAATSLAVHNLLLQYKDVFDDPKTLPPARVFDHAIPLIPGAVPVNSRPYRYSPYHKTEIERQKKDGSWRFCVDYRKLNELTVKNRFPMPVVDEILDELHGTKYFTSLDLRAGYHQVRMKEGEEFKTAFKTHSGHFQFKVMPFGLTNAPATFQCAMNSILTPFLRKFALVFIDDILIYSPTFDLHLQHLQLVLDTLRQHQFYLKQSKCQFAQQKLMYLGHIISVEGVSTDPSKTEVMLKWPTPSTVTELRAFLGLTGYYRRFVKHYGLIAKPLTTLLKKKQFLWSEAATVTFTALKQAMASTPVLALPNFAEVFTVETDASDVGLGAVLMQKGQPLAYLSKALSEKNKHLSIYDKEFLALIMAVERWXSYLQYQEFVILTDHQSLCYLESQQLQSDLQRKAMSKLMXTVSEVQPMWLQEILNSYMTDPVAQQLLAQLAVSSPNEEGFSIHQGLIKKGNQLWVGHNSALRTKLISVLHDSALGGHSGIMATYQRVKKAFYWQGLKRDVEDFVKQCCICQKAKSEHVHPAGLLQPLPIPTGIWQDISMDFIEGLPKSDGYSVILVVVDRLSKYAHFFPLKHPFTTGQVAQVVFDNICKLHGLPKSIVSDRDKVFTSTFWKQLFTLMQTKLLLSTAYHPQSDGQTERVNQCLEMYLRCATHDSPTKWKLWLPLAEFWYNTTYHTSLGCSPFKVVYGYDPPVAAAPSLLLPESGGNGVVPAIDMAVQDLLLSRERHLELLKVQLARAQNRMKQKADRSRTEGEFQVGELVLLKLQPYVQHSVVFRSCPKLAFRYFGPYKVLQRIGQVAYKLDLPPDSKIHPVFHVSQLKSFTPNHCPVFSELPTTLSLDQGILKPVRILDRRLVRKGNQAVPQVQIQWTNKKDEATSWEDWNVLIQLFPELSTWGQVPTEEGASVTTSKVFYRPFPTVFIPKPTKPRVFFLDVNPLCFRGSQRNLGAFARWLALFFAHVSLRDPVVAVVRVHGYEADDVVATLTEQVLQKGYRVVIASPDKEFKQLISDDVQLVMPIPKIGRWSFYTLRHYVAQYKCDPTADLSLSEYISSVLIHGFCNHWDSVIFEQLAIYAAQGASWVMKQMVFQESSTWFWDLAERLHLNYCKNMVH

SEQ ID NO: 313812 - protein, 152 aa, Zea mays
  unsure (1)..(152): unsure at all Xaa locations
  Clone ID: MRT4577_49257C.1.pep
KRGQIFWDEGSVRGYPLISGLAFVTTTTTTKNNCQRFWQQKSNRVGTSKCGKGGFYPKASLFGGVSRISGRAILADPTSLSRPGGPSTGPNAWGPGGHSSAASRGGGGPPVVSHGVPPLGDGPGGERNNPTTMGGHEVHHLLGVPNETRXGR

SEQ ID NO: 313813 - protein, 352 aa, Zea mays
  Clone ID: MRT4577_49258C.1.pep
MLPLPTVGVGAIAASPATAAGVAAPIRFRPLRLVASRASTTPSSPSTSSSAISSASPAGHSREHLSGRDGSPSKTSKPRVFFLDVNPLCFRGSQRSLGAFARWLALFFAHVSIRDPVVAVLDGDGGNEYRRRLLPSYKAHRARGVGTGADTRVVDVLRQCNVAVVRVDGYEADDVVATLTEQVLQKGYRVAIASPDKDFKQLISDDVQLVVPIPEIGRWSFYTLRHYVAQYKCDPTADLSLRCFMGDEADGVPGIQHLVPGFGRKTAVKLLQKHGSLENLLNTAAIRTVGRGYAQDALTKHADYLRKNYQVLSLKRDVNVQFDDSWLSPRNTCSDANVLADFLLKLSGQGRS

SEQ ID NO: 313814 - protein, 115 aa, Zea mays
  Clone ID: MRT4577_49259C.1.pep
EDAEGGGPSEGYDFGHGCPHCVLLLSFSPRFPRFVLPPFPWWCSSPSPQAPPLPLRSLLLPWACFWRCPGCRSNLPQRALSSPMGAALGWQFGCRRRGEAEPPWAWVGFFFSFFF

SEQ ID NO: 313815 - protein, 114 aa, Zea mays
  unsure (1)..(114): unsure at all Xaa locations
  Clone ID: MRT4577_4925C.1.pep
QLRFQDGPKLSLRREKAASEDTSVSGDELIXDIKAKXKPIEDKPTVLLYXGGTGSTXWMTNTVAGDNNDMPLLPKILKVSVLGYTGWIEYRYLLFKKIMKELNDDIDSLNTKIL

SEQ ID NO: 313816 - protein, 58 aa, Zea mays
  Clone ID: MRT4577_49260C.1.pep
AISSSLLIHIIIQTSLRDSVFDNHMGKLLKTVLVFTFYIHTKKRNRLEHQRLNNLVYV

SEQ ID NO: 313817 - protein, 119 aa, Zea mays
  Clone ID: MRT4577_49261C.1.pep
VSSEFGSSRMEKLTIRRPPSLSLTGRLLTTIGGRTADPIMEEHGSTANWHSRRCSRANPTGSCIGRTVSAGTHEGGHAYKKGVNLQTLVTLIKRRTASTYRWDGRTGSRLLAARTDTDS

SEQ ID NO: 313818 - protein, 90 aa, Zea mays
  Clone ID: MRT4577_49262C.1.pep
KTPNAPPLLPCPLYLYHRRLRKGGQGRALFRARWPLPLFTSLPSRAVLPSAALPQRAPGEPGYGSCQKPPPWRVRMDMCVFCYPLVQLEP

SEQ ID NO: 313819 - protein, 83 aa, Zea mays
  unsure (1)..(83): unsure at all Xaa locations
  Clone ID: MRT4577_49263C.1.pep
IRAGVIIPXSYTHHTSMLENIEHLGFCIYRLGHDMDTYKLQRRETIKGIQKREASNCFAIRHFENKFAEEXFNLILNSQEKHY

SEQ ID NO: 313820 - protein, 167 aa, Zea mays
  unsure (1)..(167): unsure at all Xaa locations
  Clone ID: MRT4577_49264C.1.pep
GHGARGCLATTQAPGAAPGWAPGGTGAEAPGGAGAPARPQRAEHPLAVSLVRAPPSRRRGCQPRHGGGGPAAASARGLGCGPGSGGFGRGANGRARSPGMRRGCVSVDTCAQPAVRGPRRLRGQRSPRGLRRSSTRFQSEPCGHGGLWRTGTWTRGASTCXAWARPP

SEQ ID NO: 313821 - protein, 95 aa, Zea mays
  unsure (1)..(95): unsure at all Xaa locations
  Clone ID: MRT4577_49265C.1.pep
QAEDTANKLDLDGLVVIGGDDSNTNXXXFXNTXXXFFFFGXLKKTPXXLFFFFRFXEAXPRAPXNSAWKIYSEMIXNVMTDXRXXXKYYXSXRLM

SEQ ID NO: 313822 - protein, 71 aa, Zea mays
  Clone ID: MRT4577_49266C.1.pep
KADMVSNMVCNMLTYMVGFSETLYGKVHFQDILTNILNNIFQYFYWSFHYSIGYETAKVMIEPLITLELMM

SEQ ID NO: 313823 - protein, 151 aa, Zea mays
  Clone ID: MRT4577_49267C.1.pep
MAAALPPSPPAALAALLLLVMLSPAAARVPGVYTGGDWQSAHATFYGGSDASGTMGGACGYGNLYSQGYGVNNAALSTALFNEGQRCGACFEIRCENQPGWAWCLPGRPSIVVTATNFCPPNYALPSDDGGWCNPPRPHFDLAMPMFLHMA

SEQ ID NO: 313824 - protein, 47 aa, Zea mays
  Clone ID: MRT4577_49268C.1.pep
SLKNLLASYRNLLHWKVIKNLETGKTRGLRILTVLPKNPISQAGEKM

SEQ ID NO: 313825 - protein, 209 aa, Zea mays
  unsure (1)..(209): unsure at all Xaa locations
  Clone ID: MRT4577_49269C.1.pep
MAAAMPPPPLPALLAALLLLLVALPPAAARVPGVYTGGDWQSAHATFYGGSDASGTMGGACGYGNLYSQGYGVNNAALSTALFNEGERCGACFKIRCVNQPGWAWCLPGRPSIVVTATNFCPPNYALPSDDGGWCNPPRPHFDLAMPMFLHMAQYRAGIVPVSYRRVACRKSGXVRFTINGFRYFNLVLITHVAXAGDLVRASVKGSST

SEQ ID NO: 313826 - protein, 81 aa, Zea mays
  Clone ID: MRT4577_4926C.1.pep
PKNLGGGLPGMPRCNKFDDRPPPPGLETRWTLFFGVVKSYTVGCNPSPTPCMFVRVSPHKSMHCLQMLIYNILNGTNLYYI

SEQ ID NO: 313827 - protein, 37 aa, Zea mays
  Clone ID: MRT4577_49270C.1.pep
SNSNLSRSQRLLLPASDACHASRRCVRHTQAPLSVWP

SEQ ID NO: 313828 - protein, 84 aa, Zea mays
  Clone ID: MRT4577_49271C.1.pep
RCSPLSPERAPGRIAAAQQLLPPPRSRDLRRRRRRRDPPIDDSGRAPPPAPGAVTVSATSALSPTPPSATSAADKSSLDSYSLY

SEQ ID NO: 313829 - protein, 81 aa, Zea mays
  unsure (1)..(81): unsure at all Xaa locations
  Clone ID: MRT4577_49272C.1.pep
MGPGSTRGSKPKPGPPSXSGRGPDPPGKPPPPKPRXRENKGPPPPXSGPTEGGPRAPXXPRPNGARTKPXAPDPPGGGAPF

SEQ ID NO: 313830 - protein, 44 aa, Zea mays
  Clone ID: MRT4577_49273C.1.pep
TCGQIDRAKHPPCGSGNAPPVAWRPAPHRLANSEVRDTDKATAA

SEQ ID NO: 313831 - protein, 69 aa, Zea mays
  unsure (1)..(69): unsure at all Xaa locations
  Clone ID: MRT4577_49274C.1.pep
LFQKIIFLKXPIFYNPPHLHLPFIFPXISXPFLXXSPFFLXXXLLKFXLIXXISFSFXKFFSPHNSPQN

SEQ ID NO: 313832 - protein, 93 aa, Zea mays
  Clone ID: MRT4577_49275C.1.pep
RMPEHVIKHAVDKWCAGSRLASKGLNEVDFKLLTAQTRACIYVCCGIRFGVAIPDVTCFPSGVGRLRGFLFGSLWSCYVFLKKKKKKKKKNKT

SEQ ID NO: 313833 - protein, 100 aa, Zea mays
  Clone ID: MRT4577_49276C.1.pep
FRQAKPEIVNARRVASRFLAGLSSKNQPSPGFPGTHQNKGRPCFPGAWFKNIVSGGAKPSSGGSPRPPFWGADDGPPLHPQSSPGPSPPLGLFPRLSPPH

SEQ ID NO: 313834 - protein, 53 aa, Zea mays
  unsure (1)..(53): unsure at all Xaa locations
  Clone ID: MRT4577_49277C.1.pep
MLLASSSLSVKKKKKKKKKKXKKXKKXXKXKKKKXXKXXKKXKKKKKKGGAVL

SEQ ID NO: 313835 - protein, 503 aa, Zea mays
  Clone ID: MRT4577_49278C.1.pep
MAPAVGLKRSATQTITLPPPDTRLAVRDVMRSTIPSQPAVAPASTERQAPAAALQGFLCLEEVDGRRWSYVVDGGAAKGRSRGGAVPAGAAVRAVPLQSPLPPAEEIMAFIRSYVVPEGFPDSVTPSYVPYMTWRALKHFFGGAMGVFTTRTLLSSVGVSQSKVTPGAIAINWILKDGAGRVGKMLFARQGKKFDYDLKQLRFSSDLLLEIGAGIELTTAAFPQFFLPMACVANVVKNVAAVTSTSTRTPIYKAYARGENIGDVTAKGESVGNIADLLGTGLSIFISKRNPSLVTSFAFLSCGYLLSSYQEVRSVVLNTLNRARFTVAVDSFIKTGHIPSLKEGNSQETIFNPPWRHEPVAIGSRFGEAFQEPASFLAIRPLFEDERYMVTYNPTKDKVYALLKDQAKSDDIIKAAFHAHVLLHFINASHARRLKQKQKQANPDRSEYLYSRNMDFLAHIAESCKIVSSSYGTFKKKAREQGWIMSESLLNPGKARLCAAKPQ

SEQ ID NO: 313836 - protein, 113 aa, Zea mays
  unsure (1)..(113): unsure at all Xaa locations
  Clone ID: MRT4577_4927C.1.pep
FRDTSYRPRNXLRGNYKVVWMRIPKAHLLLAVRGTYKGLKGKVMHVYRRQCVIHVSRITRYXVNGSTVNVNIHPYKVIVTNLNLDKDRKGLLDRKARDRSAYKANGKFTADNV

SEQ ID NO: 313837 - protein, 72 aa, Zea mays
  Clone ID: MRT4577_49280C.1.pep
QPLLASAMSMGALLHGTHAVPLTRVTVPSCCWFFCGIPLLLVAVNLPILCTLGPFSFRVCVSDCTHMSSVYL

SEQ ID NO: 313838 - protein, 72 aa, Zea mays
  Clone ID: MRT4577_49281C.1.pep
RRQQSRAAADRAAAAAARRAAGTALGTTTARPAPAPRGGRRPPCIYQETSVTTTAGGQPAAPAAMDRVGLER

SEQ ID NO: 313839 - protein, 111 aa, Zea mays
  Clone ID: MRT4577_49282C.1.pep
TRSTSRPGFWDNLYIDGVASGSAIDRCSTPRALHTTPCWEPQPGGVHGGRHAHPGVLERHAAPRPWSRPPPALRLRMRRPTAPTPPPTRWLMLLLRCLGRSRWPCISSFGT

SEQ ID NO: 313840 - protein, 141 aa, Zea mays
  Clone ID: MRT4577_49283C.1.pep
MANNLLRPLALLLAVLGCALCPRADATAFEVGGDDGWVVPPASDGGRYNQWASKNRFLVGDVVHFKYSEDSVLVVTEADYDSCRASHPVFFSNNGDTEVTLDRPGPVYFISGETGHCERGQRMVVRVAGQGAPPPAPSSPA

SEQ ID NO: 313841 - protein, 95 aa, Zea mays
  Clone ID: MRT4577_49284C.1.pep
HHTSPPKSARWDSCLASPMSSFHLHCTRRGDPPFGARFPSNSSWGNPHTVKPFLYKPATVPLFCSYPPLLVGKTEDLAGFNQIVSEFPTSRSIYK

SEQ ID NO: 313842 - protein, 87 aa, Zea mays
  Clone ID: MRT4577_49285C.1.pep
IAKVFLPHHFSLNLSYLCSAELVQKEVILYNDLVEKYVPSDNVNSALENNSSAEEGNWTCIIHSYYNNICKSQWCKDISIPIRILVF

SEQ ID NO: 313843 - protein, 100 aa, Zea mays
  Clone ID: MRT4577_49286C.1.pep
SHCEPTHTTTLPVRLSRKRNTSYHVARQCTPDRARWCRRTRTRPQRGTAAITPSASTRSTALLREALEAGVIVAAIERRDPGPQEYRPIEHPDGGHQWST

SEQ ID NO: 313844 - protein, 145 aa, Zea mays
  unsure (1)..(145): unsure at all Xaa locations
  Clone ID: MRT4577_49287C.1.pep
RLNATKANERETDFVNDNARMHAPGGTALHGGSSQGTPMRARTDNXRGALDRTXTMRSXQHWEVGNDYYNSWHKRKMKEGRXPQLXYSYYGSQIDRAVLXTQLQRLGKPRTNHXRSAEQHNQNMNCLRLTXAMKTDEAADMLKLM

SEQ ID NO: 313845 - protein, 56 aa, Zea mays
  Clone ID: MRT4577_49288C.1.pep
SNPWRPVQPLRCAIKVRPSYDHYLCSRPTQYILGWFFYRVRESYSKSNLPPGFLKP

SEQ ID NO: 313846 - protein, 353 aa, Zea mays
  unsure (1)..(353): unsure at all Xaa locations
  Clone ID: MRT4577_49289C.1.pep
PQPKGMIDTLXLLTQRFGRRAGDMKMASLANYFGLGKQRHRSLDDVRMNLEVLIYCAAARFLEASLPEVLTVENLVERAMTRSRANGTASPDLLKPEANSPPDSSKXRQRTVSPVDCVMPAEGNQGTSDPSTNRESVELVSHIEEMKLNTTTHVDASSSGYPGFLEPDDVSIECIKISVAPLHQFGRRSSIQHRDCPLQLCCAGLKVQFGVSTKFLDNAGRPKMSIVVEIPENLCKVLEFCDVLARKLSQESGSSSEWRPLIKKYGYINRPTIRLNIPPISNSDAVAFSTDICQREPSGNIQKLAFGNVGTTELDSLFVKGSKVDAFFSLELYDYQQNAGIRLVAKRLVIHSN

SEQ ID NO: 313847 - protein, 60 aa, Zea mays
  Clone ID: MRT4577_4928C.1.pep
QGYGIGDKITAQLSLLRKIYLALDHYSPTLHQHPGLLDAFMKTCKLVADLRSKQNEGDAT

SEQ ID NO: 313848 - protein, 157 aa, Zea mays
  Clone ID: MRT4577_49290C.1.pep
GRPPGRGGAGPFIGLGIVRFSPSPFFKFTFLSASTFILVAAPPGGPGFFGFPSPGVFLWGPPLVGTGVFGFLPHLVFVQPPHVSFLPFVPFVRSRLFVVFPFWCFWPFLGGTGFRLFRWGPPLPRCLSSPLPFFPGRLLFLLPVLVLDLLFFLKFGI

SEQ ID NO: 313849 - protein, 82 aa, Zea mays
  unsure (1)..(82): unsure at all Xaa locations
  Clone ID: MRT4577_49291C.1.pep
LRYYXDQAXPIXFCXVXICFXVSXXSHCXVVIXRLLMRYXEVGXNRGXNRMISTAAXRSRIVGAMNEANRXSXILALRXCYN

SEQ ID NO: 313850 - protein, 114 aa, Zea mays
  unsure (1)..(114): unsure at all Xaa locations
  Clone ID: MRT4577_49292C.1.pep
CLWARAPCLGGXXFAVLXXXVLXGLWXXLXXSLFGPLVSALCFPRXWGPGLPWCVXXAAGFCLGWVLLWAVPLPVGCFGAXRVSCWXXGLRXSVVPAVLPIWSALXXFXXXEEG

SEQ ID NO: 313851 - protein, 102 aa, Zea mays
  unsure (1)..(102): unsure at all Xaa locations
  Clone ID: MRT4577_49293C.1.pep
NYSALCAMILKMVDSIHIRILDIIISSIHSTNEDSNRVNCFMLKPNQLNGXSGSIACHTQCFSLLILLSKIREQTQAPHVCDSTPFVSASVCKQLGACSFGR

SEQ ID NO: 313852 - protein, 114 aa, Zea mays
  Clone ID: MRT4577_49294C.1.pep
LYSRGQRHESGLLREGAGSCYLYTPLTSRNIDVSFDTRILIEWRGGCEDEATCCSPTFDGVCRSLISAVISDPAPTHCLDSSDLGGSGFSFCEPCKPLDGGGGGWFPMPMASMP

SEQ ID NO: 313853 - protein, 90 aa, Zea mays
  unsure (1)..(90): unsure at all Xaa locations
  Clone ID: MRT4577_49295C.1.pep
ACVSSFPWLLTSGSSVTAGDGACQIINNLAERNKQYXFYLHREMEDMENQAKKLXKSRNXMKIDGAXXKRKGGQFKVGKKKEKTNLLCLA

SEQ ID NO: 313854 - protein, 154 aa, Zea mays
  unsure (1)..(154): unsure at all Xaa locations
  Clone ID: MRT4577_49296C.1.pep
MRECISIHVYQADIQVGNTRCDLYXLEHAIHVDXQMPXNKTIGGGDDAFNTFFSXTDAAKHIPQRCFXDLEPTVIDYVMTATYRLLFYPEQLFYANDDAIDNFDRDHYTIVKDIVDLCLDRIRKLADNWTAIKSFLVFDADVGGTLSAMSSLLL

SEQ ID NO: 313855 - protein, 147 aa, Zea mays
  Clone ID: MRT4577_49297C.1.pep
HFSPDSCVCLCWLGLGLSNCHCHHQPTLEGKKSQEGVERPLLLLVPHSLAFDACLRIRYIVPRSWISFDMIIAHFLSIKRAFFPPAESGRILLTPSYKPLILFQQPLALAGYVWFFLAPPASWSAPWNSSVQVSSAGSSGANKPASA

SEQ ID NO: 313856 - protein, 76 aa, Zea mays
  unsure (1)..(76): unsure at all Xaa locations
  Clone ID: MRT4577_49298C.1.pep
DKVYYIFKAVLTXDFIAGNMQILARXNRNKVNLYSNATIGVXMQMRTIFIKHRSVQAHTWNTXPQXRYKPVTSAEY

SEQ ID NO: 313857 - protein, 51 aa, Zea mays
  Clone ID: MRT4577_49299C.1.pep
GSGQGSPQGYGNKPLAGLIKTSIWVLLLMSRPVLLTLCQSEIWVPVRTSMP

SEQ ID NO: 313858 - protein, 172 aa, Zea mays
  unsure (1)..(172): unsure at all Xaa locations
  Clone ID: MRT4577_4929C.1.pep
MLYLQHIRATKTXXLPAAFSRLMXVSSARXEDRGFETAXXXXVLGSXGXXAXXSWLWCXXXXXVXGAVXSXAXXXVGALVVVXPXRXXXXAGXVXGGXXLRXXFVXXXSSXXXXVGXXXAGXXXLVXVGPGXXVLXXXXLXXXXRVXXXPVVGGXXXLGXVSFGXVXRAVVA

SEQ ID NO: 313859 - protein, 101 aa, Zea mays
  Clone ID: MRT4577_492C.1.pep
VWFPFLIVQAGTNKVPDPSVSELLYQSAASQDNTLKFYPGMWHALTSGESPDNIQAVFQDIIAWLGHRSPDTEQEDLESSELEQKAKHDDQHHQQQQDGDK

SEQ ID NO: 313860 - protein, 122 aa, Zea mays
  Clone ID: MRT4577_49300C.1.pep
MKPKFMTTSPNQTLYQTVADQIHGLISEGTFQPGDRLPSVRKLHQQWSVSISTVLEAYRLLEDRGLIEARPQSGYFVKTILNFLPDEPSPSTPQSADNPVDTSLAFRVNNSMLKPGIIGLGA

SEQ ID NO: 313861 - protein, 113 aa, Zea mays
  Clone ID: MRT4577_49301C.1.pep
MAQQPLPLPAAYHALEGSSPAFCYTTTPPAPGTAARLGVAASDAKAFEMAPPSSAATVNHAGTAERRPLEGPADENASPQMGGRSLWEEGDDDLQSLVLMGFRGRHVIIGGPI

SEQ ID NO: 313862 - protein, 122 aa, Zea mays
  Clone ID: MRT4577_49302C.1.pep
MCAAATSSISMAQQPLPLPAAYHALEGSSPAFCYTTTPPAPGTAARLGVAASDAKAFEMAPPSSAATVNHAGTAERRPLEGPADENASPQVRTYVQQAYLPSSSISIVSLAVRSIHSKTVDA

SEQ ID NO: 313863 - protein, 50 aa, Zea mays
  Clone ID: MRT4577_49303C.1.pep
LVRLHEPVRKPRVEQRVRTNHALLVPSFSFLMSYSSIINLKEGTTNDGLL

SEQ ID NO: 313864 - protein, 127 aa, Zea mays
  Clone ID: MRT4577_49304C.1.pep
MGSRKLGRCGKLGAPATATSLTSSSASAATMAAVSSGVAASFGAPATATSQTASSASAVTTPARTGSSPGAATVTSRTGNSGVVATTSSQTASSGGDAPGQGRWLPSRSLRWRGGPEQRTAPPSRRC

SEQ ID NO: 313865 - protein, 126 aa, Zea mays
  Clone ID: MRT4577_49305C.1.pep
TAEGTTTEGTTTAAETTTTAEGTTTTAETTTAEGTTTAADTTTTAEGTTTTAEGTTTADATTSTSAEPTADQSCDNAGLEYAIYKHTFYNSDPPHFSSFDPTFFHTATPTYQGETTRIGIPPGTAS

SEQ ID NO: 313866 - protein, 57 aa, Zea mays
  unsure (1)..(57): unsure at all Xaa locations
  Clone ID: MRT4577_49306C.1.pep
EMLRCKTGSSKYNREVNNXCYIVYRGLYMPLHTVHPAIHVITHAYAHRGXRYDKXYW

SEQ ID NO: 313867 - protein, 107 aa, Zea mays
  Clone ID: MRT4577_49307C.1.pep
DYRYQLALQMTHVLTVLKEEEDQLIFIVLPLRSLGQADRTQREGGGGDENRRESRCLPEGRALESKPAAHTHDSMTQTWSSLPCGRFKWRLGFRWRQGHPGRPRGTQ

SEQ ID NO: 313868 - protein, 79 aa, Zea mays
  Clone ID: MRT4577_49308C.1.pep
PTPIVCKVLVLYTAAGNKISSTWLIARSGSVGKAGSASYCPMGACKVTTEFLKTKTIRKVAVITSPACPSSTMYAVRRC

SEQ ID NO: 313869 - protein, 91 aa, Zea mays
  Clone ID: MRT4577_49309C.1.pep
QKQRFWRHLREQREIEEILHRRCRVIGDHSGRFFVSPGILSWPRCSVKISGCPSISHRRGKSSSCCTSSTLAPALSEIPLEVTSHLKIILV

SEQ ID NO: 313870 - protein, 350 aa, Zea mays
  Clone ID: MRT4577_4930C.1.pep
MQGGRGGRQGLFGFGDPSGGSGGFGQPGSLMPGFFGGANPFDDPFFTNPFGSMMQTSFSAPFSGMMQPSFMNPFGSMVQPSLLGPSMFAPHGNLNGGMFGSQTHLSQGISNGSGFIQQAPEPSRPKGPIIKELSSDDEDDVDDDEEDEKKNGNFRKHQRESKEPCVEDPDDEEDNKRPKHGQFGREFSRADTSRPQPQTFMFQSSTVTYGGPNGACYTSSTTRRTGADGFTLEENKEADTTTGKATHRISRGIGIKGHSLTRNLNSDGRVNTLQTLHNLNEDELGGFEESWQRNTRENMPGWDPRMNMLGNGNVRSDFRDVNQMPALPAPELYRGTNFQNGSSMGRAPRT

SEQ ID NO: 313871 - protein, 491 aa, Zea mays
  unsure (1)..(491): unsure at all Xaa locations
  Clone ID: MRT4577_49310C.1.pep
MAAAPVGAQNRCVFVGNIPYDATEEQLVQICEEVGPVVSFRLVIDKETGKPKGYGFCEYKDEETALSARRNLQGYEINGRQLRVDFAENGRNTDRNREKGRGGPGMTSNVDSQKQLAGTSVVGEANLHQPVGLPPAIHAASVMAGVLGGAQTANVQNGLPVQYGLGNDPLTHYLARMSRHQLHEVMAELKFLATQNKEQSKTLLQGIPQLPKALFQAQIMLGMVTPQMMXWQRANSPRAPYHXSSSHLNEPYPQTDAMIPLVSRPSSLPTNIPPNPTVLQEQTATLHSIPQHQHASQPLVKMFPHGHQSGIAAQSPMLHQPLDGSSSVPTQSLVTSVGLTSQVQLPLVPQHPGPSVMPTSVPQLPLTHPHLAQVAVAPETLPNEISTLAEFTHPSKLRKLEDGTSVPGMVNSSHAVYTVPLQAVGPSGPSGSYSAGSVSLQQPGNEEQLTPDVESALLQQVLQLTPEQLSSLPPEQQQQVIELQKMLSVSK

SEQ ID NO: 313872 - protein, 130 aa, Zea mays
  Clone ID: MRT4577_49311C.1.pep
MAAAPVGAQNRCVFVGNIPYDATEEQLVQICEEVGPVVSFRLVIDKETGKPKGYGFCEYKDEETALSARRNLQGYEINGRQLRVDFAENGRNTDRNREKVDDPQIFTVEEPFLPPLEFSVNLRSCIVFVL

SEQ ID NO: 313873 - protein, 496 aa, Zea mays
  unsure (1)..(496): unsure at all Xaa locations
  Clone ID: MRT4577_49312C.1.pep
MAAAPAGAQNRCVFVGNIPYDATEEQLVQICEEVGPVVSFRLVIDKETGKPKGYGFCEYKDEETALSARRNLQGYEINGRQLRVDFAESGRNTDRNREKGRGGPGMASNVDSQKRLAGTSVVGETNFHQPVGLPPAIHAASVMAGVLGGAQTANVQNGLPVQYGLGNDPLTHYLARMSRHQLHEVMVELKFLATQNKEQSKTLLQGIPQLPKALFQAQIMLGMVTPQMMXWQRANSPRAPYHXSSSHLNEPYPQTDAMIPLVSRPSSLPTNIPPNPTVLQEQTATLHSIPQXTCIPAPSXMFPHGHQSGIAAQSPMLHQPLGGSSSVPIQSLVTSVGLTSQVQPPFVPEHPGPPVMPTSVQQLPLTHPHLALVAAAPETLPNEIRVADQASHLAEFTHPSKLRKLEDGTSVPGMVNSSHAIYTAPLQAVGPSGPSGSYSAGAGSLQQPGNEGQITPDVESALLQQVLQLTPEQLSSLPPEQQQQVIELQKMLSAGK

SEQ ID NO: 313874 - protein, 48 aa, Zea mays
  Clone ID: MRT4577_49313C.1.pep
FMVLYIFRRLLCMSEKMSDWNMVSIIFMIILILYYSFRRVTKVLSMNQ

SEQ ID NO: 313875 - protein, 43 aa, Zea mays
  Clone ID: MRT4577_49314C.1.pep
HIENHRSCTTPVKKTGHFMQCYLSVLDQDWTDTWFMSTNRHFL

SEQ ID NO: 313876 - protein, 78 aa, Zea mays
  Clone ID: MRT4577_49315C.1.pep
ARLSTRSSFITNKCAFSIKMIRCLSCTNHTDNMASNCIADRARLLPCKSYRSKCETTTRLPCQEAQNSAYNGGYKCIC

SEQ ID NO: 313877 - protein, 59 aa, Zea mays
  Clone ID: MRT4577_49316C.1.pep
QEAKVLFGSAIYWRDQIPLSTTCVCLLADGPMYLGARAMCPHASETRLRSILRCNRSME

SEQ ID NO: 313878 - protein, 87 aa, Zea mays
  unsure (1)..(87): unsure at all Xaa locations
  Clone ID: MRT4577_49317C.1.pep
TVSYFRRGTPRCHQLRSQTPRLVQRTRRGARLPLRRRASCALPTPAASLPPSPMASCSRAPSSSPAPPRPSPADPSPPFAASCXTRG

SEQ ID NO: 313879 - protein, 330 aa, Zea mays
  unsure (1)..(330): unsure at all Xaa locations
  Clone ID: MRT4577_49318C.1.pep
MAKAPLPLPSLLVLAAFFFHHPCCTAQGRAENISEVEAAVRARAXRAAPRRHXSQLVDLPLPANLSGAGVRASALSVRSNALWAGGVNTTGFTVPPRVVPAPFARRLAIVFELFVGNSTAAFAAPRGYALATPVAGLLAYDASAGPDARVSLRALGAPVRVEFKDDLSAAAALDKGFEFDATTARCVTFAASGEVVATHAVAPGSACAVNGTGHFGIAVLLPETPPPASAVRARWWAWTVGVGAGGVLGASALTLSVAGAVSWTRMRRREEMDRRAMAGEELGRMTVRGSRMPSAKVVRTSSSXEYHQPLALRILTFPSLFCHTWGGPIN

SEQ ID NO: 313880 - protein, 113 aa, Zea mays
  Clone ID: MRT4577_49319C.1.pep
GARRSNPTRVGRSMIWRHRPYSAGETRRHFLPRGGALLKIHNMSSRCTKPRSKRCYAKRRTKRNKEVGISLKAETGTELPTMRSGSVVVLGDRREITANPWLPVLRDLPQRRW

SEQ ID NO: 313881 - protein, 36 aa, Zea mays
  Clone ID: MRT4577_4931C.1.pep
ISLSPQLCSAVYVAHGGGMQCALALYTNSCPNQIRS

SEQ ID NO: 313882 - protein, 86 aa, Zea mays
  Clone ID: MRT4577_49320C.1.pep
DDPEGFPELKVKEIKTGPPPMFSMLGFFGQAFVPGKGPLENLAGPFADPVNNNAWGFAPNFFPGKLARALCLPGGPVTPPGCPSFF

SEQ ID NO: 313883 - protein, 156 aa, Zea mays
  Clone ID: MRT4577_49321C.1.pep
NSFTDRPSFFEGDEQPDAKGNFLGGLDSYDRKRQVEDMSTLDKTRHHQEGSRAFVRKLPKYVSLNCIVNEPNTNSEGACSGSGGIDSSLIATGITNDNRKSPKIVPLNLVLKKAKRCNAVKLRKTESTHLYEEKSSDCSVNRSDYSSRKYSVDDEI

SEQ ID NO: 313884 - protein, 687 aa, Zea mays
  unsure (1)..(687): unsure at all Xaa locations
  Clone ID: MRT4577_49322C.1.pep
MPGMDAFAAVSLLATLFLVRAAAAHPPAAAADAMTPTDYWRAVLPGTPMPRAILDLLLTTSTGEEGSRKVTTSYGYQGQDLRTVTTSYVSQDGEEDPRKATTSYGSQDEEGSRKITMSYGSNGEEDPRKATTSYGSQDEEGSRKVTMSYGSNGEEDPRKATTSYGFQSMEHLRKATTSYGIQDEEYPRKATTSYGSQDEEGSRKVTMSYGSNGEEDPRKATTSYGFQSMEHLRKATTSYGIQDEEYPRKATTSYGFQGEKDPREATISYGSQDEKGSRKVTMSYGSNGEDDPRKATTSYGIQDEEYPRKATTSYGVQGEKDPREATISYGSQDDKDSRKVTMSYGSNGEDDPRKATTSYGSHGEYESNKVTMSYGFQGMKDLRKATTSYGIQDEEYPRKATTSYGVQGEKDPREATISYGSQDDEDSRKVTMSYGSNGEDDPRKATTSYGSHGEYESNKVTVSYGFQDMEDLRKATTSYGIHDEEYTRKATTSYGIQGEKDPREATISYGSKDDKDSRKVTMSYGSSGEDDPRKATTSYGSHGDIHHHDHAAVHIHSSGNKLADVFFFHDXPTPRVRNHADHPTDHHLTTSAASPRGRRAPVLHQALRRHPRHVRADDIRRHGRRDTVDARHLREHAPAPRREGRLRHLPRVSRQDTRRPPRDTQRPRFLRRHAHRSCRHVGEAGAV

SEQ ID NO: 313885 - protein, 207 aa, Zea mays
  unsure (1)..(207): unsure at all Xaa locations
  Clone ID: MRT4577_49323C.1.pep
MPGMDAFAAVSLLATLFLVRAAAAHPPAAAADAMTPTDYWRAVLPGTPMPRAILDLLLTTSTGDIHHHDHAAVHIHSSGNKLADVFFFHDXPTPRVRNHADHPTDHHLTTSAASPRGRRAPVLHQALRRHPRHVRADDIRRHGRRDTVDARHLREHAPAPRRESRLRHLPRVSRQDTRRPPRDTQRPRFLRRHAHRSCRHVGEAGAV

SEQ ID NO: 313886 - protein, 599 aa, Zea mays
  unsure (1)..(599): unsure at all Xaa locations
  Clone ID: MRT4577_49324C.1.pep
MPGMDAFAAVSLLATLFLVRAAAAHPPAAAADAMTPTDYWRAVLPGTPMPRAILDLLTTSTGEEGSRKVTTSNGYQGHDLRTVSTSYASQDGDNSWKATTSYGCQRGKASRKIYTRRSTHGXNTRPFPGQKADCATSLASLARIPAVVLGTRNVRAFSGDMPTDPAGTSAKRGRXGNGRAEAPRDTDAGGVTCRDXPYVVSYSHTTHQEATYMMKMAAXGGGTEDMEAMVVSHFGMQEKDHPSKAITSHGVKGGNDPREAPISYGSQDGEDSRKVNMSYGSNGEDDPRKATTSYGSHGEYESNKATMSYGFQGMEDIRKATTSYGIQDEXYPRKATTSYGVQGEEDPKKDTMSYGSQDDEESRKISISYGSNGENDSRTSTTSYGSQGKEXLRKVTTSCDRYHGCEDDARKATASHRAEGKQDMKKISISYGSHRSGEHSLRTTSTREKGDTSKGDIHHHDHAVHIHSSGNKLVADVFFFHDXPTPRVRNHADHPTDHHPTTSAASPRGRRAPVLHRALRRHPRHVRADDIRRHGRRDTVDARHLREHAPAPRREGRLRHLPRVSRQDTRRPPRDTQRPRFLRRHAHRSCRHVGEAGAV

SEQ ID NO: 313887 - protein, 227 aa, Zea mays
  Clone ID: MRT4577_49325C.1.pep
QDEKGSRKVIMSYGSNGEDDPRKATTSYGIQDKEYPRKATTSYVVQGEKDPREATISYGSQDDEDSRKVNMSYGSNGEDDPRKATTSYGSHGEYESNKATMSYGFQGMEDIRKATTSYGIQDEEYPRKATTSYGVQGEEDPKKATMSYGSQDDEESRKISISYGSNGENDSRMSTTSYGSQGKETLRKVTTSCDRYHGCEDDARKATASYRAESEQDMKKINISYGI

SEQ ID NO: 313888 - protein, 123 aa, Zea mays
  Clone ID: MRT4577_49326C.1.pep
SSTSVRRILGSMSVSVWSLGTFVFITFQRACNLSTSSLSVFPLRCSRTLVTVVSTLRGNTCNTKTAAHCNNRVFILTMHAILVYDDREYHAPGYVAVIVRHLSLHPQHCNRRCVILNWRIFYN

SEQ ID NO: 313889 - protein, 63 aa, Zea mays
  Clone ID: MRT4577_49327C.1.pep
QISSNITVFNLVHRQLYVECRIRPQVIVHDSRSLLLHGCGLIISLEVNSVRIPLFALDVLAAS

SEQ ID NO: 313890 - protein, 64 aa, Zea mays
  Clone ID: MRT4577_49328C.1.pep
QRIDIPCMQHSYFGKTNTDIAPHGEHTDTAYAHHDASRYIRFIHHHLHVSVPSVTARMVAGTTY

SEQ ID NO: 313891 - protein, 188 aa, Zea mays
  Clone ID: MRT4577_49329C.1.pep
ESSPVTEVEPYIPFNINPTGMQPLLTTSYLLAFPSIMASIFASPFWENLREPLRPPTSTGGSPWVYYLTYAFLVFIFNIFDIANLPKEISDYLNKMCARVPRIKPGRATVDYLTKIQTSTRFWGGLLLSLLATSSLLLDRYLRQINEGLSIGFTSVLIIVGSIIELRRSYQAYNVMPALSKVLRRYGA

SEQ ID NO: 313892 - protein, 379 aa, Zea mays
  Clone ID: MRT4577_4932C.1.pep
MLGPLLRLLSACGGVWPTSPAPGAAASSSASSGDDSEGRDGLLWWRDLARCHAGDVSVAVAQANQVLEDQCRLDSAPSIGTVVGVFDGHGGPDAARFACDHLVPNLREASSGPRGVTADAIREAFLATEEGFLALVSSLWEAQPDIATAGTCCLVGVVHNRTLFVANLGDSRAVLGKKAGRAGQIAAEQLSSEHNANQEAVRQELMAQHPDDAQIVALKHGVWRVRGLIQVSRSIGDVYLKHAKYNTDRIKPKFRLPESFSKPLLSADPSIISRDLEPNDCFIIFASDGLWEHLSNQEAVEIVHSHQRAGSARRLIKAALQEAARKREMRYSDLTKIDKKVRRHFHDDITVIVLFINYDLLLKGAPQGQPLSIRCALDY

SEQ ID NO: 313893 - protein, 40 aa, Zea mays
  Clone ID: MRT4577_49330C.1.pep
KLWARYSERSVTDLHTLVSNNGGGGELFVGTLFEEGKNVH

SEQ ID NO: 313894 - protein, 77 aa, Zea mays
  Clone ID: MRT4577_49331C.1.pep
KEDTAGQGATDKHTCSCTLPRTSEIEADAGKPVCTEACGEYHPLLVHLGQEQVAMQLEPTIDRRHGLPCHLDKARAS

SEQ ID NO: 313895 - protein, 109 aa, Zea mays
  unsure (1)..(109): unsure at all Xaa locations
  Clone ID: MRT4577_49332C.1.pep
GGLFCLTPTGEKGIGSKGNKLGNPRGFPVPAFLKRGPGILFWGPKKKNIPFQSRGCKFWIFKGGPPXXFXFFFFYFXGPFFFFFFFFFFFFFFFFFFFFMSKYYWYKKI

SEQ ID NO: 313896 - protein, 109 aa, Zea mays
  Clone ID: MRT4577_49333C.1.pep
MPLMHSEDLSAHDEAVLAFKRMNEDILSLTTGTGGGDEYERKAREVVQSDPDKAKTVGQTSLKFEERHRVIIERFGRYPHRNKVLGREMRSEEREFLTSGGDTFGSSRP

SEQ ID NO: 313897 - protein, 123 aa, Zea mays
  unsure (1)..(123): unsure at all Xaa locations
  Clone ID: MRT4577_49334C.1.pep
MDSVVNPKAYPLADAQLTMAILDIIRHDANYKXVRKGAXNESTKTLNKDISQIVLMPTDAETLEILVHLPLLADDENEPYVFVPSKQALARACVVTRPDIACSETSTEAQPAGTTDTGSQGLH

SEQ ID NO: 313898 - protein, 220 aa, Zea mays
  unsure (1)..(220): unsure at all Xaa locations
  Clone ID: MRT4577_49335C.1.pep
MVGEESGCGVEGGTGGGEVPAASAPNGDRSGNSRLAVPSSSADDRGFHRSSTMPGVIKNDEITNESTGPSNLERSRTERRRQNNPAIDPAKQLLDERIPIKKKLKMLNRIATVKDDGTVVVDVPSGLEPTIVGGTEDIYTEAVEEALDGTEILYRPPMQIVILIVGTRGDVQPFVAIGKCLQDYGHRVRLATHANFKGVVLTAGLGVFPLGGDPKXLAEY

SEQ ID NO: 313899 - protein, 76 aa, Zea mays
  Clone ID: MRT4577_49336C.1.pep
RGWRTTMLARRIRALSRIMWCWKTEGVSRGACKSYYFCKGGGYRCAVGLEGCRCPRRWVVCRFWRTKDGSMEWQGR

SEQ ID NO: 313900 - protein, 66 aa, Zea mays
  Clone ID: MRT4577_49337C.1.pep
PRAPKPFGTLGTLNHQSCKRKGKGLLLLPTIDETSASLLAVCLSTFLPSFLRSLPPLTYKDRRARR

SEQ ID NO: 313901 - protein, 82 aa, Zea mays
  Clone ID: MRT4577_49338C.1.pep
EESEEGSSKKLLYLPSTCGVLVSDMRFFFGLIHSSYVRCFCVRGKHFLALLVRKRSILSCPTHTSRISKCGPFSARSLIQLT

SEQ ID NO: 313902 - protein, 64 aa, Zea mays
  Clone ID: MRT4577_49339C.1.pep
SGGRPWSTPSGVACDLFRHLPCRSFIGAPRGLSSVAHGLDEPCVVCSPVNTRLSYKVARETLHC

SEQ ID NO: 313903 - protein, 103 aa, Zea mays
  unsure (1)..(103): unsure at all Xaa locations
  Clone ID: MRT4577_4933C.1.pep
TVYSFTDIYPSGWIQSMTCDRLSRRYVEATHTWAVWVPLPFFFLFLVQGLLALVCTIFIVIGLFPLLCLRCFCVVVGFPGGCFPRSGPLVCFCGMSQEKXCCI

SEQ ID NO: 313904 - protein, 139 aa, Zea mays
  unsure (1)..(139): unsure at all Xaa locations
  Clone ID: MRT4577_49340C.1.pep
MACRANVVGQVERDDGESLSYAEIVRRFMAPNRPDDLTGLTSSXRGXKDWTLSGGXDLRAPXLGFFTQNFPSSLVQVDDCSSSDFTDQKRLEMSMQEFINHWVAGPHCGSSDGDRDGSLLYLKDWYFDKEPGLLCMLMF

SEQ ID NO: 313905 - protein, 489 aa, Zea mays
  Clone ID: MRT4577_49341C.1.pep
MACRAKVVGQVERVDGESLSYAEFVRRFVAPNRPVVLTGLTSSWRAHKDWTLSGSGDLRRPNLGFFTQNFPSSLVQVDDCSSSDFTDQKRLEMSMQEFIDHWVGGPHCGSSDGDRDGSLLYLKDWHFVKEYPDYIAYTTPTFFVDDWLNMYLDSHPIHRDSDIANHKNEINCSDYRFVYMGAKGTWTPLHADVFRSYSWSANVCGQKQWLFLPPSQSHCIFDRNMRSSVYNLHDVSEKQFPEFSKTEWLECIQEQNEIIFVPSGWYHQVHNLEDTISINHNWCNAYNLHWVWNLLYEDYKVAKEYIEDIRDICDDFEGLCQRNLAANTGMNFYDFFVFIVRFALANVVELYHLQQPEVATLSTETAHHLVYNLMSIRNVASKMTTTEAFTTENRLCSVSEDNRSAFSNIKQILEEESFRRLSMTLSKAYDHIDRGQRSLKSSISYRKGCSSVICLKSDCNVVDYITSLVDEICGPEDLTRLIDSALSHG

SEQ ID NO: 313906 - protein, 110 aa, Zea mays
  unsure (1)..(110): unsure at all Xaa locations
  Clone ID: MRT4577_49342C.1.pep
KQTTPLFYTNLLTTIRGHILTLLALPKLXFTRPNAYIIPLCXLXPNPIIPQVLPPSTSMXYVQPTVHVXTLLLVLAASHLQQPIHQSQQHYLPHVTLQYITKPHQHQFHP

SEQ ID NO: 313907 - protein, 47 aa, Zea mays
  Clone ID: MRT4577_49343C.1.pep
QIFFFGGGYLYIKRSKTEKGGTGKARHSFVLAIRVGQTGVKNSGGKS

SEQ ID NO: 313908 - protein, 312 aa, Zea mays
  Clone ID: MRT4577_49344C.1.pep
MDARAREAAETSGPGLPLAVRELLAGGVAGGVAKTAVAPLERVKILFQTRRAEFHGSGLIGSFRTIYRTEGLLGFYRGNGASVARIVPYAALHYMAYEEYRRWIILGFPNVEQGPVLDLVAGSIAGGTAVICTYPLDLVRTKLAYQVKGAVSVGFRESKPSEQVYKGIMDCVKTIYRQNGLKGIYRGMAPSLYGIFPYSGLKFYFYEKMKSHVPEEHRKGRIAKLGCGQALSSSSLVGRGTFESLVMIAKQQGWRQLFSGLSINYLKVVPSVAIGFTVYDSMKVCLKVPSREETAVAVLAEERSNTAPIPSS

SEQ ID NO: 313909 - protein, 251 aa, Zea mays
  unsure (1)..(251): unsure at all Xaa locations
  Clone ID: MRT4577_49345C.1.pep
IVPYAALHYMAYEEYRRWIILGFPXVEQGPVLDLVAGSIAGGTAVICTXYPLDLVRTKLAYQVKGAVSVGFRESKPSEQVYKGIMDCVKTIYRQNGLKGIYRGMAPSLYGIFPYSGLKFYFYEKMKSHVPEEHRKGIIAKLGCGSVAGLLGQTITYPLDVVRRQMQVQALSSSSLVGRGTFESLVMIAKQQGWRQLFSGLSINYLKVVPSVAIGFTVYDSMKVCLKVPSREETAVAVLAEERSNTAPIPSS

SEQ ID NO: 313910 - protein, 121 aa, Zea mays
  unsure (1)..(121): unsure at all Xaa locations
  Clone ID: MRT4577_49346C.1.pep
FLCCSVSQQELIRGPFTAGSQANIAGLVKPCLSPGVSWGCENTILEPYTIQQANTDSILPLXTCYLQQPSTLLHGIPCGHLXKQNITTQQLQQLELKNLAAYSEQQQIVPFNQLTEKNSAF

SEQ ID NO: 313911 - protein, 90 aa, Zea mays
  Clone ID: MRT4577_49347C.1.pep
LDLSLHSPPQTSIMGTNTSSTLIAHSRRPAMLTYTSCLVDTAHTLSRMPLYLIGWKREAEILDVSMFENLEFARGWRNVPASLRLEIQSH

SEQ ID NO: 313912 - protein, 104 aa, Zea mays
  Clone ID: MRT4577_49348C.1.pep
LNSYMSCHGMTRNSYTMESISVVASTVAPDLHHRPSPTGGFGRGRTPLPTRFEPTVLEQQSLSGPSYPPSLRTPPPPPLRPPPPPLPASTTTPTHTTKEKLGSL

SEQ ID NO: 313913 - protein, 116 aa, Zea mays
  unsure (1)..(116): unsure at all Xaa locations
  Clone ID: MRT4577_49349C.1.pep
APPEGXPKKGPKPESGTPAPSGGSPRGRPKRPXAPGPGGPAPKXGSRPGPGPKALKGEAEPGAKXASGPQLFGGPGRRGGLRPGGPNKKPPRKAGKXPPPPPPKSPPPPXGMGPPG

SEQ ID NO: 313914 - protein, 108 aa, Zea mays
  unsure (1)..(108): unsure at all Xaa locations
  Clone ID: MRT4577_4934C.1.pep
MTKSTSPAQEESSDSELDSALDAGAEAEAEAEQHDRSRSKNGPSSSPXPYPHGLAGAVALALIVDTARRRKRRAASRRRMCMSALPCLALDVRVSVQAALAFARAGIS

SEQ ID NO: 313915 - protein, 83 aa, Zea mays
  unsure (1)..(83): unsure at all Xaa locations
  Clone ID: MRT4577_49350C.1.pep
LAVASSPLDVAPGAELLLLAHQRXRRRAPRTPGGLASSRSYKREIRAFLRLVGPCDPTGPKVDPLWRKWGRGARSMRVKVFTL

SEQ ID NO: 313916 - protein, 91 aa, Zea mays
  Clone ID: MRT4577_49352C.1.pep
RHTNGELYYFSHTTTQTYGFQHMHALGDHFPATYVHIHAVGILCSTARAVVSTSSLVQDLSKQLLFSQGYSCLCIVRDGTISTHLYRCADT

SEQ ID NO: 313917 - protein, 139 aa, Zea mays
  Clone ID: MRT4577_49353C.1.pep
MSSSDKEAKPIQLHLLKTITEDFSEKMKVGSGGYGEVYKGVLNGDEIAVKKLFPVPGLNDEAFENEFRHLKKVQHKNIIRMIGYCYEIAHKDVEYEGKLVFSAVIERALCFEYMKGGSLAKHISDESCILDWPTTYKII

SEQ ID NO: 313918 - protein, 144 aa, Zea mays
  unsure (1)..(144): unsure at all Xaa locations
  Clone ID: MRT4577_49354C.1.pep
PPTDATPSHKAKPWGTAREKKQXXPGGRGKQPGPPGDRKQGDGKKEKKEEPPAAPTRGGRKQKRGXGSEAAARPPAEAPHTKGRQRQPKHERDKDHPHREEENXASQKRRHPNKEKTEEDRTKDDDHHETAKNEGTKEENNDKS

SEQ ID NO: 313919 - protein, 147 aa, Zea mays
  unsure (1)..(147): unsure at all Xaa locations
  Clone ID: MRT4577_49355C.1.pep
AAGRTPLDWETXXXIALGTARGMAYLHSVGSGGKFIHGNIKSSNILLSQELGACVTEFGLAQLMSTPHVHPNLEDEMLTGKAPLRSPGRDDSIEHLPTSGLGWRRWSAGSRRSGAPTRTRRRPRRTIRGRALSNKSPSTTRTGTAVT

SEQ ID NO: 313920 - protein, 292 aa, Zea mays
  unsure (1)..(292): unsure at all Xaa locations
  Clone ID: MRT4577_49356C.1.pep
AEVLGEGXSYGTTYKAVLEDGTTVVVKRLKEVVAGKREFEQXMXLSVRVGHHQNTAPLRAYYYSXDEKLLVYDYVPLGSLCAALHGNKAAGRTPLDWETRVKIALGTARGMAYLHSVGSGGKFIHGNIKSSNILLSQELGACVTEFGLAQLMSTPHVHPRLVGYRSPEVLETRKPTQKSDVYSFGVLLLEMLTGKAPLRSPGRDDSIEHLPRWVQSVVREEWTSEVFDVDLLRHPNLEDEMVQMLHVAMACVAVVPDERPRMEEVVGRIEEIRSSYSDTKTSPEDNPREGAF

SEQ ID NO: 313921 - protein, 83 aa, Zea mays
  Clone ID: MRT4577_49357C.1.pep
RWNARWRLAGGRSLSASSFFISAVASSKILLYAMAYKGKLGALSDRVQPSPCRRHVQFSAGPVELGGIGGGGRASRRIPRPQQ

SEQ ID NO: 313922 - protein, 179 aa, Zea mays
  unsure (1)..(179): unsure at all Xaa locations
  Clone ID: MRT4577_49358C.1.pep
KKGPKRSPPIKKKRGKPPKAGKKKREKTQGAGAKAPAKIEGSRGGNPPPPAGKXRKKGRPPPPQSAPNLGKGNWGAPLLNLANRGKRETPQKKKKGENQGFPPPKGGKTPPKKSKXPPPKGGKGPQKTTPQRPPEGGKNPKNPPSKGPPGKVFFFFFFFFFFFFFFFFFFFSFFFCFFF

SEQ ID NO: 313923 - protein, 93 aa, Zea mays
  unsure (1)..(93): unsure at all Xaa locations
  Clone ID: MRT4577_49359C.1.pep
SSPPGAFPLGSSGRRXXAXARCCRGCRXXLGXPXCARGLGLXGAXPPPPCCSPGXXAXXXKKKNLLSRLAVLGXCGCWGRRXXXVLGGLXRRL

SEQ ID NO: 313924 - protein, 181 aa, Zea mays
  unsure (1)..(181): unsure at all Xaa locations
  Clone ID: MRT4577_4935C.1.pep
ATHTCHYTDHRDHPAGLLAHIPAHKXAERVGERVTDGQTDDHAVAHYLPYCQACSIYCNVYTNLYTNLRSDARIATIINDMKNNINSNGYPIDHPMYTFIFTQTTIQHNVMHDNINPQTNPHKPLHKGCLLPTGLPTGLNTAKNTSNSESASFGAGTGLLTVATAANAAATSAGTGIDIDI

SEQ ID NO: 313925 - protein, 741 aa, Zea mays
  Clone ID: MRT4577_49360C.1.pep
MYSHLSRQPEAFLNLELLELECVQSFLMADHHLIMEALLRLHRWVLTIFISFYLDNHSSNNRAQNQLNFPEGKMAYNPSVNNEFGKGYPRAGYAKPKQSFSGPSVMVSSSPSQIRSQGHPGLPRAKYHSNHFNSDARQDDVQTRNPSGPNVFSGSGNKIQGSTGRVKAHSGGPQSNLRSLKLLRSVEQYYHTLQQMKWGPMTEHVLDNLHCKIDAFQANQVLKLLHDHTVALGFFQWLKRQPGFKHDGHTYTTMIGILGQARQFGVLKELLDEMSRAHCKPTVVTYNRIIHAYGRANYLKEAVKVFEEMQEAGYEPDRVTYCTLIDIHAKAGYLDIAMDLYGRMQEVGLSPDTFTYSVMVNCLGKGGQLAAAYKLFCEMIENGCTPSLVTYNIMIALQAKARNYENVVKLYKDMQVAGFRPDKITYSIVMEVLGHCGHLDEAEAVFIEMRRDWAPDEPVYGLLVDLWGKAGNVDKALGWYQAMLQDGLQPNVPTCNSLLSAFLKMNRFQDAYIVLQNMLAQGLVPSVQTYTLLHSCCTVGQSQMGLCCQLMAITGHPAHMFLLYLPDAEAGGQNVRDHTGYFLDMMHSEDRESKRGLMDAVIDFLHKSGLKEEAGLIWEVAAQKNVYPDSVREKSSSYWLINLHLMSEGTAVTALSRTLAWFHRQVLTLGTGPERIDIVTGWGRRSRVTGSSLVRQSIQKLLNLFESPFFTTRGNTGCFVGCGEPLNKWLHNPYVERMHLL

SEQ ID NO: 313926 - protein, 90 aa, Zea mays
  unsure (1)..(90): unsure at all Xaa locations
  Clone ID: MRT4577_49361C.1.pep
PLSRAPVRRVSSTGLDGGEDRGRGCLVMLLLVVLVVLPIRKGRSRTVAETASAAHAAARGLSRRCGGGGGRSGDRSSVAIXCTLAARTRG

SEQ ID NO: 313927 - protein, 89 aa, Zea mays
  unsure (1)..(89): unsure at all Xaa locations
  Clone ID: MRT4577_49362C.1.pep
LFELVIAFXRQGPTKKYVQHKMAQKASEIWDMISQGAYIYVCGDAKGMARDVHRVLHTIVQEQGSPDSSKAESFVKNLQMEGRYLRDVW

SEQ ID NO: 313928 - protein, 217 aa, Zea mays
  Clone ID: MRT4577_49363C.1.pep
MAAPPSMPAPPPPEPSGGIVSPVAVVAPHFCAPYVVQLAVKEKKVSLREGDFTITDTNGAVVVTVKGALISIHNRRRLLDAAGNPLLCLREKVISMHNTWEAYRGDSTRSSDLLFTAKKSSIIQPFKTEMLIYLASNTSHEACDFIMKGSFKERSCSFYLGGNNSNALIAKMHREHSATSMLLGKDYFSLTVFPNVDYVFISALVVILQEIHTDKND

SEQ ID NO: 313929 - protein, 112 aa, Zea mays
  unsure (1)..(112): unsure at all Xaa locations
  Clone ID: MRT4577_49364C.1.pep
PKKGRVXQGVGRGAPVCLPPVLEGLPREVLELAGNSAKATKKRGFVPRQGLRGIRTQGELGNLVGGGSLGPGGVLPENHSVFRPKKVAEKGASAGTKEPRSPKRGAWSPPRA

SEQ ID NO: 313930 - protein, 42 aa, Zea mays
  Clone ID: MRT4577_49365C.1.pep
GAGIGLLPGPRRGCKCVTRVRDRRPLALRGKRRGDMTICCQP

SEQ ID NO: 313931 - protein, 57 aa, Zea mays
  Clone ID: MRT4577_49366C.1.pep
TVPNRIDNLTLTRQFWIQFSIFLPKFLQEIAIISIHTYEKILYLYKRFTYTIIIHEY

SEQ ID NO: 313932 - protein, 132 aa, Zea mays
  Clone ID: MRT4577_49367C.1.pep
HANGLGSFLGATFHASSSGRGLTPSFSGKSPWNYPPFVPLAAHPGFGLDPFLNSKGLSPMRPFPPVGPPLNGRMGTPPLYRPLLTPGGMREVTTRPCTRYTLPVALSGGCFFSFLTLYFFRLCPPAFPLSRL

SEQ ID NO: 313933 - protein, 76 aa, Zea mays
  Clone ID: MRT4577_49368C.1.pep
DIVLEIDKVARLIKEAMDGEKGQGMKAKATVRKENAVAAAEGGGTSSVWSSSCSKQMFLQPQANSLNTNEHMETKV

SEQ ID NO: 313934 - protein, 105 aa, Zea mays
  Clone ID: MRT4577_49369C.1.pep
ARGHGSYSLPIAGLYRLYRLNKRLPLRPVSVRKCCQPKEKEARSYTLHKVLRAQAQHVPGSAQCFLAHLNFSVPFRAILSRCVSVCERECGCVCVFMVLDQESVC

SEQ ID NO: 313935 - protein, 75 aa, Zea mays
  Clone ID: MRT4577_4936C.1.pep
FFLEPPSNDLKGHPYQNYIYPFICTPSLHYYRICSYEFAFDGHTTRKKLGLHHLNVRSRNTAASTTPPPCQNGRR

SEQ ID NO: 313936 - protein, 50 aa, Zea mays
  Clone ID: MRT4577_49370C.1.pep
ARNSARAILVTLCCDTQPYYVNWGELLNRGGGSTHTTWTQSRMLYTTTRY

SEQ ID NO: 313937 - protein, 196 aa, Zea mays
  Clone ID: MRT4577_49371C.1.pep
MAPSPPSLTHLPIPTICRPIRPAALRIASTRILTNRLGLEFEYQVESLRRPAGSETFPTRFLEKREDTRIGLLQQQFMAFSGHELLLRLGAMFGMLEGWGEEVPRCLAREVPWDRGKRSLGPRGRHARCLEGRCKRCTRTDVCQQIDIFYLKSEKNNDNKFIEHNRCKHGSIKNDMKNGHIYLLLQDHSSANHVLY

SEQ ID NO: 313938 - protein, 206 aa, Zea mays
  unsure (1)..(206): unsure at all Xaa locations
  Clone ID: MRT4577_49372C.1.pep
VPKAWPPPSSSFYHLFXNKKGGSKSRRIXSVAPPXPPPPPPPTRRTKKPPPPASRLAPQAPPXVHGRRAPPCXRPHMSSTLDYTYYPLPPTSPPLPSPPTSPLVPEGEDDSLSITASPAPAYCASPDVNTRADRFITSFREGLKLQKLNSYRXKWHRQIQENAAAVDIEEEXGEFMVIGSLFGDDDDDAGGISLPQTPATAVAIGF

SEQ ID NO: 313939 - protein, 434 aa, Zea mays
  unsure (1)..(434): unsure at all Xaa locations
  Clone ID: MRT4577_49373C.1.pep
MASITVTRKSQSFVVPSSTPTPTTETLELSAIDRVPGLRHTVRSLHVFRRKDAAASAAHYDAAAAGRPAEVIRAALSRALVDYRPFAGRFVGSLYAGEASVECTDDGAWFVDAVTDCSLEDVNGLDYPLMVSEEELLPAPEEGVDPTSIPIMMQVTEFACGGFVVGLVAVHTLADGLGAAQFINAISEFARGVVKPTIAPIWARELIPNPPKMPPGPPPXPSSASXFKHFVMDVAVNNIAHVKSEYFQTNGHYCSTFDVAIAKVWQARTRAIKYEPNFKVHVCFFANTRHLLTHVLPKVGGFYGNCFYPVTVTATAEVVASSRLLDVIRMIRDGKARLPLEFSRWSTGNVKVDPYQLTFKHNVLFVSDWTRLGFFEVDYGWGVPNHILPFTYADYMAVAVLGAPPSMKKGTRIMTQCVEEEHLVDFKAEMKAFF

SEQ ID NO: 313940 - protein, 43 aa, Zea mays
  Clone ID: MRT4577_49374C.1.pep
VTDHSCGRRATCLTILPTMCPSKPVLFVLAIMTGWGLLVVKIN

SEQ ID NO: 313941 - protein, 87 aa, Zea mays
  Clone ID: MRT4577_49375C.1.pep
AIDLHTGNGCHYERLMMCPPVVSRAWQADSASSSDAANANPVVAKVVLSLDLFVQEQRPEEPTLQFKMELAQTNTGNTPESYSLDMG

SEQ ID NO: 313942 - protein, 72 aa, Zea mays
  unsure (1)..(72): unsure at all Xaa locations
  Clone ID: MRT4577_49376C.1.pep
MALLTLALNKVLSFPWGGSNRPLAASAYTRLMTTVTSTXLYYYYXAVTCHLTLDHTLXHHQNHHTTYFINYY

SEQ ID NO: 313943 - protein, 113 aa, Zea mays
  Clone ID: MRT4577_49377C.1.pep
EIPHRRQIDRFIFPMTREPRKDRRPLATARPPTPAPRTRAAPPPAANGRNRPDQRGNPPRLVARRPSSFLAPRFTQGRRESWGGEVFGLVWFGLARKEEGRMGEGEVGNGELG

SEQ ID NO: 313944 - protein, 72 aa, Zea mays
  Clone ID: MRT4577_49378C.1.pep
SSDLLRYVVQTKLQLCLVKKKIKQGELAFNGCFVNLNSSFYKLLYHEVYGAKKRSQRTFIVSCITGSLVSCL

SEQ ID NO: 313945 - protein, 82 aa, Zea mays
  Clone ID: MRT4577_49379C.1.pep
VQEVPASKADVNICRSTARRASVFSPPPYWGCTLRFHALVPERPPSQKRFNLVSCRIPNGPNFPLYQYSLFPLLNHKKLYSF

SEQ ID NO: 313946 - protein, 75 aa, Zea mays
  Clone ID: MRT4577_4937C.1.pep
SVVVRASHLLGWRSPVGRPLGGNKEGVLGGGFLRGFRGGALGPFVFFFGQGLSAVWALSWYPKFLKRLMIFFFFF

SEQ ID NO: 313947 - protein, 73 aa, Zea mays
  Clone ID: MRT4577_49380C.1.pep
TRGGGPLCKKPLGSFAPLSINFIGFFFYPPRVLEPKKKKKKKKKKKKKKKKKKKNKKKKKKKKKKVLCVVTTA

SEQ ID NO: 313948 - protein, 53 aa, Zea mays
  Clone ID: MRT4577_49381C.1.pep
HPPSNLQHTHPITTRSHLQPYNYSISQPTQTPLQSDTNTIPTINLHLLPPILP

SEQ ID NO: 313949 - protein, 83 aa, Zea mays
  Clone ID: MRT4577_49382C.1.pep
EIALQDASGRTLPTTTPTPTKPSERTGPRELLAAPYTSTTEPASYSRPSEPRDTATAAARATSNRQRTSQTLSQLQQWATIDQ

SEQ ID NO: 313950 - protein, 136 aa, Zea mays
  unsure (1)..(136): unsure at all Xaa locations
  Clone ID: MRT4577_49383C.1.pep
MRPEFTRPLNPSCTGKVECKNIIDPTTPLKVVWAMGASWSGDDLTDSNMHSVTSSRPIRVLLLRGSAEAEQDLRPVLAVHGFMMFVAWGILLPGGIMAARYLKSLKGDGXWFQIHVYLQYLGIAIMFLGVLFAAAE

SEQ ID NO: 313951 - protein, 58 aa, Zea mays
  Clone ID: MRT4577_49384C.1.pep
CVLLTCEIVLSASERERERERERKERCRSSGSREEMRTVASFLKRKQGLSHGCCALCL

SEQ ID NO: 313952 - protein, 161 aa, Zea mays
  Clone ID: MRT4577_49385C.1.pep
MVSGSISEEIAVAVPAERMWKVAFAETKSALLPKACAGYVDAVEVDGDGGPGSVTTMKLNPSLGENKTLKSRVVALDAAARVVRTEVLQGGTVSAQLRTHFAEIRVEAAGEGACVAKVKVDYERLDGAPLAPEDEARLAQGYVRLVRMVEAYLVAHPDEFA

SEQ ID NO: 313953 - protein, 92 aa, Zea mays
  unsure (1)..(92): unsure at all Xaa locations
  Clone ID: MRT4577_49386C.1.pep
XXALIXGXPDDAAXNCLLRLAXESHXACRLVCRXWRHLLAXXARFFXXXRXLGPRXXWXFTLAFXRXTXXIQWKVLDRGQXXXXAIPXMXAT

SEQ ID NO: 313954 - protein, 67 aa, Zea mays
  Clone ID: MRT4577_49387C.1.pep
TGALHDLCPHYPLIQCVAVFAARSVQKALVEAVQNCSTDLGSKQEAERPRLSPPQDGGGGSVSHLSL

SEQ ID NO: 313955 - protein, 50 aa, Zea mays
  Clone ID: MRT4577_49388C.1.pep
GSRGCSALLYGPIQGLGAPLAPFLTCLKLAASCLPSRIPTVIWASATGLT

SEQ ID NO: 313956 - protein, 121 aa, Zea mays
  Clone ID: MRT4577_49389C.1.pep
GQNIGDHVDRPNVGLCGGGGGQARGFRKEVGGRGGINHGGITAEKNGSVYLNPWRAKVNHYFWDQVTERRAVSPEDPGGRRPCLSPGEETRPDPGPTLGLPGEHVPPKRCGEWPLPISLWI

SEQ ID NO: 313957 - protein, 118 aa, Zea mays
  Clone ID: MRT4577_4938C.1.pep
RPPDPPFFFVFRVFGPRFLKLTKGAWCGGPLFQGAAVFFFNLGLGDPNVVFFSPPLFKKHGGVTFVVGGLKKTLFQSGSPCPARWVFLPLFVVSPPHVKCLVPPPPLGPCFTLRFVLC

SEQ ID NO: 313958 - protein, 125 aa, Zea mays
  Clone ID: MRT4577_49390C.1.pep
DPEDGNHFLMCFGATEVTWIVFPLAWLMPLLYGYFRGKAATVEYILWLSGSFSGSQYVQRSCINQQFVHRGSRQFGDESCFPTSGPVSVGQCSAPAKVVVKKGWCNEWCSAFEPRPLQRGYFFFC

SEQ ID NO: 313959 - protein, 83 aa, Zea mays
  Clone ID: MRT4577_49391C.1.pep
AFDTKHSLVPHENGHGKSLGTKLHTLVSLPSRVLLNGTDGDDHSDHLKQGFILSSLFFVVLLVLNHHDDCQQLPSMLKHLNWG

SEQ ID NO: 313960 - protein, 124 aa, Zea mays
  Clone ID: MRT4577_49392C.1.pep
HQKKPLDLWGKTRRPSQHSKRAHKNIIFWGGRCPSGKQSQRALPSQKRQYLRGAGPLPNNGGASTEGRKNQPTTISGGKAEGTTKPPSYWDKPLGNNNGSAHQILRGGGTATPYTKRVLKKEGG

SEQ ID NO: 313961 - protein, 41 aa, Zea mays
  Clone ID: MRT4577_49393C.1.pep
PRPIQNILPLIPSSIPNSSPPSTVLQIYLLILLNKPRNKYP

SEQ ID NO: 313962 - protein, 102 aa, Zea mays
  Clone ID: MRT4577_49394C.1.pep
VQIDCVYLIHSSADAGASCPEGGWFGAPSAVTFHVGQGFKPGHLVLTPNVVTISNMEIKDHRGDDCPFTLKAGATVTWTLDIQTPVMYLICNRLCAKFGCYR

SEQ ID NO: 313963 - protein, 85 aa, Zea mays
  Clone ID: MRT4577_49395C.1.pep
GKKKFQMTFAQAVCPYLYPSCWAKTIRVLDFFLLQERGNNFNLYQPKIGWAGMNPKRLSQILFGWLKDFYHKRLGNSLINVCRHI

SEQ ID NO: 313964 - protein, 46 aa, Zea mays
  Clone ID: MRT4577_49396C.1.pep
KRTRMSAPAQLDRDIRATARAQQLGVGLPQVPTKAPHGACAVTLDP

SEQ ID NO: 313965 - protein, 133 aa, Zea mays
  Clone ID: MRT4577_49397C.1.pep
KKGRKELEKIPFFTGHFSFISRPQKKAGPFFLYGFFFLNFYFFPQGFKKTPLFLGDLETGARAWLEVFQKKSTFQRVLPKPTIKKKGGGNECGCHLTKNVLFLGPVKNQAFKLMCVLPSLLKKKCNFPLGFFF

SEQ ID NO: 313966 - protein, 93 aa, Zea mays
  Clone ID: MRT4577_49398C.1.pep
SVAGANISHAHVCANMGQNAEPPFRKHKLQEFTLYEDPMDIPGPQAYLMHCLPAQRALAMTDSPIEAPNSIVFPQSDNTMHSHNSIMLHVLCA

SEQ ID NO: 313967 - protein, 40 aa, Zea mays
  Clone ID: MRT4577_49399C.1.pep
HNESHPHQLNALSQLMTWNTSLTPKPYSATNQGIGCFPEK

SEQ ID NO: 313968 - protein, 37 aa, Zea mays
  Clone ID: MRT4577_4939C.1.pep
HDWLKAQHHALQCYHAIIIFSTPNSENVAPCTQASVL

SEQ ID NO: 313969 - protein, 161 aa, Zea mays
  unsure (1)..(161): unsure at all Xaa locations
  Clone ID: MRT4577_493C.1.pep
MTYGVPKHKTIKFALVENTCGSRVIVTTRIGTIAKSCSSPFHHLVYELRMLGEDDSKRLFFRRIFGSEDKCPHHLKEVSVEIIKKCGGLPLAIITMASLLTTKSYTKADWLKGSNSIGSGLEKXCDVEEMNMILSLSYNHLPHHLKTWLLYLKMFPEEYVI

SEQ ID NO: 313970 - protein, 122 aa, Zea mays
  Clone ID: MRT4577_49400C.1.pep
LRATIAAVLNSMKTPQVVSVLLMAALLASSASAAITCGQVGSSLAPCIPYATGRASALPSSCCNGVKSLNSSARTISDRQAACRCLKSLGNSVKSVNMGTVATIPGKCGVYVVFPISMFTDC

SEQ ID NO: 313971 - protein, 122 aa, Zea mays
  Clone ID: MRT4577_49401C.1.pep
MAAVLNSRKTPQVVAVLVVAALLASSASAAITCGQVGSSLAPCIPYATGRASALPTSCCSGVKSLNSAARTSADRQAACRCLKSLANSVKSVNMGTVATIPGKCGVSVGFPISMSTDCNKIS

SEQ ID NO: 313972 - protein, 106 aa, Zea mays
  Clone ID: MRT4577_49402C.1.pep
MAAAPNLRKTPQAAVAVGQAGAPLAPCIPYATGRASALPASCCSGVKSLNSAARTSADRQAACRCLKSLANSVKSVNMGTVATIPGKCGVSVGFPISMSTDCNKIS

SEQ ID NO: 313973 - protein, 85 aa, Zea mays
  Clone ID: MRT4577_49403C.1.pep
TPPPLPDWGKKGPPPPKKLPFIPKNLGPPHKKKRGTGGQKVGGSFSLTGYQGLALKTKKGVMPLPFLKTNLEPVRAPPMGHPFPH

SEQ ID NO: 313974 - protein, 105 aa, Zea mays
  Clone ID: MRT4577_49404C.1.pep
MAAVLNSRKTPQVVAVLVVVALLAPCIPYATGRASALPASCCSGVKSLNSAARTSADRQAACRCLKSLANSVKSVNMGTVATIPGKCGVSVGFPISMSTDCNKIS

SEQ ID NO: 313975 - protein, 122 aa, Zea mays
  Clone ID: MRT4577_49405C.1.pep
MAAVLNSRKTPQVVAVLVVVALLASSASAAITCGQVGSSLAPCIPYATGRASALPSSCCSGVKSLNSAARTSADRQAACRCLKSLANSVKSVNMGTVATIPGKCGVSVGFPISMSTDCNKIS

SEQ ID NO: 313976 - protein, 708 aa, Zea mays
  unsure (1)..(708): unsure at all Xaa locations
  Clone ID: MRT4577_49406C.1.pep
STRDCRALQFHHPAASTPPPSLVKLSPPQAPVGSPPPPVKTTSPPAPIASPSPPPPAPVVSPPPPVKSPPPPAPVGSPPPPEKSPPPPAPVASPPPPVKSPPPPTLVASPPPPVKSPPPPAPVASPPPPVKSPPPPTPVASPPPPAPVASSPPPMKSPPPPTPVSSPPPPEKSPPPPPPAKSTPPPEEYPTPPTSVKSSPPPEKSLPPPTLIPSPPPQEKPTPPSTPSKPPSSPEKPSPPKEPVSSPPQTPKSSPPPAPVSSPPPTPVSSPPALAPVSSPPSVKSSPPPAPLSSPPPAPQVKSSPPPVQVSSPPPAPKSSPPLAPVSSPPQVEKTSPPPAPLSSPPLAPKSSPPHVVVSSPPPVVKSSPPPAPVSSPPLTPKPASPPAHVSSPPEVVKPSTPPTPTTVISPPSEPKSSPPPTPVSLPPPIVKSSPPPAMVSSPPMTPKSSPPPVVVSSPPPTVKSSPPPAPVSSPPATPKSSPPPAPVNLPPPEVKSSPPPTPVSSPPPAPKSSPPPAPMSSPPPPEVKSPPPPAPVSSPPPPVKSPPPPAPVSSPPPPVKSPPPPAPVSSPPPPVKSPPPPAPXISSPPPPVKSPPPPAPVSSPPPPVKSPPPPAPVSSPPPPIKSPPPPAPVSSPPPAPVKPPSLPPPAPVSSPPPVVTPAPPKKEEQSLPPPAESQPPPSFNDIILPPIMANKYASPPPPQFQGY

SEQ ID NO: 313977 - protein, 124 aa, Zea mays
  unsure (1)..(124): unsure at all Xaa locations
  Clone ID: MRT4577_49407C.1.pep
MAAVLNSRKTPQAVVAVLVAAALLASSASAAITCGQVGSSLAPCIPYATGRASALPASCCSGVKSLNSAARTSADXRQAACRCLKSLANSVKSVNMGTVATIPGKCGVSVGFPISMSTDCNKIS

SEQ ID NO: 313978 - protein, 39 aa, Zea mays
  Clone ID: MRT4577_49408C.1.pep
RIRLIYLILQELHGGTYREHERDGALLALHDRETFTDTR

SEQ ID NO: 313979 - protein, 1315 aa, Zea mays
  unsure (1)..(1315): unsure at all Xaa locations
  Clone ID: MRT4577_49409C.1.pep
MDPPLRLLPDGRLMAALLLLAACMSACSVQAVTSAEASYIARRQLLAMXEIKIYDEYXAPADFEFDDRVGAANXXXXXXXXXYIALQAWRRAFYSDPKGYTANWVGEDVCKYNGVICTEALDDPKVTVVAGIDLNGADIAGYLPPELGLLTDLAFFHINTNRFCGIIPKSMSRLSLLHEFDVSNNRFVGVFPYVCLEMVSLKYLDLRFNDFEGELPPALFDKDLDAIFVNTNRFVGYIPENLGNSTASVIVFANNAFVGCIPKSIGRMVKTLDEIIFLNNKLDGCLPLEMGLLVNTTVIDVSGNMLVGTIPEQXXXXXXXXXXXXXXXXXXXXXXXXXXXXXXXXXXXXXXXLFNSEAVVCMPSDNALVNFDDRDNXXXXXXXXXKTALQXXXXXXXXXXVDCSKHVCAGYPTPGGRPASSVPGKPPSVPGKPAAPAPMPTPHTPPDVSPEPLPEPSPVPAPAPMPMPTPRSPPADEYIPTPPVPAKSPPATSPPASRGAPPPQAQPPAASSPPATPVKSSPPPAAVVLPPPAKTPSPPAPVASPPPEAPVSSPQPQVKSPPPPAPVASPPPPMKSPPPPAPVASPPPLMKSPPPPAPVASPPQPLKSPPPPVLWLSTPSVKSPPPPVPVASPPPPVKSPPPLAPVSSPSPPVKLPPLPAPGKSTPPPXXXXXXXXXXXKSSPPPEKSLPPPTLTTSPPPQEKPTPPXXXXXXXXXXXXETLPPPSKSSPPEEPVSSPPQAPKSSSPPAPVSSPPPLKSSPPPVPESSPPPTPKSSPPLAPVSSPPQVEKTSPPPAPVSSPPPTPKSSPPLAPVSSPPQVEKTSPPPAPVXXXXXXXXSSPPLAPVSSPPQVEKTSPPPAPVSSPPLEPKPSSPPSSVSSPPTTVKSSPPPAPLSSPPMTPKSSSPPAHVSSPPEAEKSSPPLAPISSPPSEPKSPSSPPMVEKTSPPPATVSSPPPTPKSSPPPAPVSSPPPVVKSSPPPAPVSSPPPTPKPLPPPAPVSSPPPVVKSSPPPTPVSSPPPTPKPLPPPPTPVSSPPPTXKPLPPPAPVSSPPPVVKSSPPPAPVSLPPPTRKPSPPRTRVSSPRPVVKCCPPPTLVSSPPPAPKSLPPPTPVSSPPPEVXXXXXXXXXSSPPPAPKSSPPPTPVSSPPPELKSSPPPAPVSSPPSAPKSSPPPAPVSLPPPEVKSSPPPAPISSPPPPAKSPPPPAPMSSLPXXVKSPPPPAPVSSPPPPMKXXXXXXXXSSPPPAPVKPPSLPPPAPVSSPPPAVTSAPPKKEEDSTAPPAEALPPPSFNDIILPPIMANKYASPPPPLFQGY

SEQ ID NO: 313980 - protein, 159 aa, Zea mays
  unsure (1)..(159): unsure at all Xaa locations
  Clone ID: MRT4577_4940C.1.pep
MTLASLARAPPVLALALSSSMLATASPCSHNAENAPQSIXHEPDRPKYLGPVSEQTPSNLTGELPDDYGXQTAGLSGDPETLARHRXLEVIHSRAVMLAARHCMFPHILDNNAVMVDHAVWIMVVEYIFSEDVLKYVGNPKLELAKSMLNICSSQYDAH

SEQ ID NO: 313981 - protein, 155 aa, Zea mays
  unsure (1)..(155): unsure at all Xaa locations
  Clone ID: MRT4577_49410C.1.pep
EKKRGVLGGALTGFFPGERNPVRPGPGPGKQKKFWVGSPPPRGPGPLVGLNPGAQKXKPQLGGPLGGTGGPRKRGPPPSKKGPQNPGVLGPPWGXPPPGGQPLGPTLKRAGALFQQKGRPLEPWNPCRGKQKRGAPLSPGGNPPEGKKRVAPKNP

SEQ ID NO: 313982 - protein, 94 aa, Zea mays
  Clone ID: MRT4577_49411C.1.pep
TLEGHPSRSTNKDYSKKTLGGHSGIKPHTWGYPAIPDRSLLMDPVFLLRVSFDPPGMKVIGGIRGKPSHMESFRNIGARNIIGPGKTCPRREIT

SEQ ID NO: 313983 - protein, 234 aa, Zea mays
  unsure (1)..(234): unsure at all Xaa locations
  Clone ID: MRT4577_49412C.1.pep
MAALADIDSSALPPSESSKGKGKMDEEEEDEAEGAEKMCGICYLDGRRAIRGELDCCAHFFCFVCIMAWGRVESRCPFCRARFHTIRRPPVAGRFPDERIVSIQERNQVHHPXQREQHSGXDPYVNTICTVCSSSSDDELLLLCELCDSAAHTYCVGLGTTVPEGDWFCKDCGTIRDDQLRWQAENQGEFEISMDVPGAEPVPAPSISGVVDEDHDLERHMRVVARRMTRFLHL

SEQ ID NO: 313984 - protein, 69 aa, Zea mays
  Clone ID: MRT4577_49413C.1.pep
FRRGETITRSSIRRLGEPGLWPWAGVQLTEIPSCLYRLVDGRGQTSRSAENQGIRTGLLRGSHMAAPRC

SEQ ID NO: 313985 - protein, 77 aa, Zea mays
  unsure (1)..(77): unsure at all Xaa locations
  Clone ID: MRT4577_49414C.1.pep
TYGTPKTTTIFPQCSQAPISTLLXPPNLSPSVSSLCENPILQPYTIQQAISTFILPLSPXTFNNHQSLLQQIPLLHS

SEQ ID NO: 313986 - protein, 226 aa, Zea mays
  Clone ID: MRT4577_49415C.1.pep
AGGLSQDNRLFKEGKFELAKAKYDKVLREYNHVHPHDDEEGKIFANSRSSLHLNVAFCYQKMGEYRKSIETCNKVLDANPVHVKALYRRGMSYMLLGEFDDARNDFEKMITVDKSSEPDATAALLKLKQKEQEAEKKARKQFKGLFDKKPGEISEVGVESEGGKDAGDARGSGEATSADRGANAVDSPTRESEYAFEEERPGLLGRLWPSARRIFSSVGINRCTIL

SEQ ID NO: 313987 - protein, 140 aa, Zea mays
  unsure (1)..(140): unsure at all Xaa locations
  Clone ID: MRT4577_49416C.1.pep
MQSLNWLCSSSSTTRLHVPSFGIALVVLLSCVSVASSCTDQERSSLIDFRDGLSPDGNGGLHMLWANSTDCCQWEGITCSNDGAVTEVLLPSRGLEGRIPPSLXHLTGLQRLNLSCNSLYGNLPPELVFSSSSSILDVSF

SEQ ID NO: 313988 - protein, 401 aa, Zea mays
  Clone ID: MRT4577_49417C.1.pep
IVFVSNTYLTKSSLMPELEGLEEVHFYIELVQFIQVRDMLGDGRLIKRRVVDGKGEFPMDCPLHDSLLRVHYKGMLLDEPKSVFYDTRADNDGEPLEFCSGEGLVPEGFEMCVRLMLPGEKSIVTCPPDFAYDKFPRPANVPEGAHVQWEIELLGFEMPKDWTGLTFEEIMDEADKIKNTGNRLFKEGKFELAKAKYDKVLREYNHVHPHDDEEGKIFANSRSSLHLNVAFCYQKMGEYRKSIETCNKVLDANPVHVKALYRRGTSFMLLGDFNDARNDFEKMITIDKSSEQDATAALLKLKQKEQEAEKKARKQFKGLFDKKPGEISEVGVESDGGKDAGDARGNGGEATSADRGVNTNDSPTSESEYAFEEERPGLLGSLWPSARMIFSSLGMNRCAIL

SEQ ID NO: 313989 - protein, 275 aa, Zea mays
  unsure (1)..(275): unsure at all Xaa locations
  Clone ID: MRT4577_49418C.1.pep
MSSAAATAFAGVSVATPNLTTPFRGRVRLPLRGVSAAPRRAVASMAVSAPRSGAAASFLERRESERALHFVKYQGLGNDFIMVDNRDSSVPKVTPEEAAKLCDRNFGIGADGVIFVMPGVNDADYTMRIFNSDGSEPEMCGNGVRCFARFIGELENLQGTHSFTIHTGAGKIIPEIQSDGQVKVDMGEPILSGADIPTKLVATKNKAVIQAELAVEGLTWHVTCVSMGNPHCVTFGANELKXVDDLKLSEIGPKFEHHEMFXARTTQXLVQVLSR

SEQ ID NO: 313990 - protein, 353 aa, Zea mays
  Clone ID: MRT4577_49419C.1.pep
MSPAAATTTFVAISIAVPNPTAPSRGRVRLPLGGVPAAPRRAVASMAVSAPRSGAATSFLERRESERALHFVKYQGLGNDFIMVDNRDSSVPKVTPEEAAKLCDRNFGIGADGVIFVMPGVNGADYTMRIFNSDGSEPEMCGNGVRCFARFIAEIENLQGTNRFTIHTGAGKIIPEIQSDGQVKVDMGEPILSGLDIPTKLLATKNKAVIQAELAVEGLTWHVTCVSMGNPHCVTFGANELKILQIDDLKLSEIGPKFEHHEMFPARTNTEFVQVLSRSHLKMRVWERGAGATLACGTGACAVVVAAVLEGRAERKCVVDLPGGPLEIEWREDDNHVYMTGPAEAVFYGSVVH

SEQ ID NO: 313991 - protein, 337 aa, Zea mays
  Clone ID: MRT4577_4941C.1.pep
MPQVESATASEAPPPQDAWLVELGSRLPQWESLRDSSKVIIPISISRVNQFDAARLDVEMSAMLKEQLVKVFSLMKPGLLFQYEPELDAFLEFLIWRFSIWADKPTPGNALMNLRYRDERAAPITGKEVRTGLEGPGLSVSQKIFYCISFVGGQYVWSRLQSFSAFRRWGDSEQRPLARRAWALMRNAEVFYRAASFFNLLLFLYGGRYKTVVERILKARLVYGSPNMNRAVSFEYMNRQLVWNEFSEMLLLLLPLLNSSSVKKFLLPFSKDKSGGSSGDEADCPICRSSPSIPFIALPCQHRYCYYCLRTRCSATTSYRCTRCDGAVVAIQRLGSG

SEQ ID NO: 313992 - protein, 41 aa, Zea mays
  Clone ID: MRT4577_49420C.1.pep
MAVFSDLHTADGLKSLEAHLAGKTYVSGDSITKDDISSLVM

SEQ ID NO: 313993 - protein, 192 aa, Zea mays
  Clone ID: MRT4577_49421C.1.pep
MQALLLPSRLPPPLLRQRGLPAVASLASHPLNGATLPTGRLCFGGGEAAPRRLTVAAAASSSSSGPLYPTPPPTEQTIERAKLEQVIKRLEKTARYFKNLGTLGFWSQLVCTFVSAGILSFSTVVTGKVTSPFTFYTTAAGVAAAFISVFWSFGYIRLSERLRKTASAPAKAPPRADVIKSLKNGIVLNILG

SEQ ID NO: 313994 - protein, 55 aa, Zea mays
  Clone ID: MRT4577_49422C.1.pep
KKKKKKKQKKKKKKKKKKKKKKKKKKKKKKKKKKKKKKKKKKKKKKKKKKGGWGF

SEQ ID NO: 313995 - protein, 89 aa, Zea mays
  Clone ID: MRT4577_49423C.1.pep
SLFMNGHNSGLDAHTTDPTHFQTNTDTTYGTNRGYFAILHMERGDQTTQAHLAAYTTHDLLTNTETDHTGGGSSPFGCRSRYGAAYFRW

SEQ ID NO: 313996 - protein, 58 aa, Zea mays
  Clone ID: MRT4577_49424C.1.pep
GGAKTLLLGSSFFYKGVFSFFQIRTRGRAAHKLSFFFFFFFKGIFSFSQISTPGAAAA

SEQ ID NO: 313997 - protein, 45 aa, Zea mays
  Clone ID: MRT4577_49425C.1.pep
FIFFFLKQLKLFFLQTKGFLTHQPINIYYSIQTTFPQLSLSNPTL

SEQ ID NO: 313998 - protein, 66 aa, Zea mays
  Clone ID: MRT4577_49426C.1.pep
KALKVFFPPNPVSQSLFMDLDKCKETIPYEVNFKKKMGRGKQQPPGASLKNIIVPGGGQRVQCPHQ

SEQ ID NO: 313999 - protein, 67 aa, Zea mays
  Clone ID: MRT4577_49428C.1.pep
KNTEKKKPSKKGRTQQKKGAHPTGRKKKTQKPMSAREKKRAPKKDPKGAQRFGLKKKKNTNLKGGGN

SEQ ID NO: 314000 - protein, 95 aa, Zea mays
  Clone ID: MRT4577_4942C.1.pep
PGCRSSTCRSATCPVAGRRSRPVLTAMVGPVHGRRSDKSMMSRWCNSGLREHEDIKKKAMDGTMVKGGLQKVSARMLACKDIISIYFYLDLCTTP

SEQ ID NO: 314001 - protein, 294 aa, Zea mays
  unsure (1)..(294): unsure at all Xaa locations
  Clone ID: MRT4577_49430C.1.pep
FTPSSSPSLAIAQILSSPPAPLRIPRRPRCPPPPSLLLLLRPLRRPVRSCSACSSTAAHSRRWTPRGRVKGGRTRRRRSCRARGRGATARRRRSRXPDRAPVTCCEAAAVAARTARRTWELTVGRWGLHGLAFGINPHMKRQVDLQHEYSGNDCLQLKGHQTYTEVSSLLEHLKLCMFFSKKSFSAFLKFGGYKQEDILIHKARARLMQPSFALVCDKRTKCLLLFIRGAISTKERLTAATSAEVPFHHIILSEGKISNVVLGYAHCGMLAGARWIAKLVIPHFHNKMQEFSGY

SEQ ID NO: 314002 - protein, 60 aa, Zea mays
  unsure (1)..(60): unsure at all Xaa locations
  Clone ID: MRT4577_49431C.1.pep
KVFGIVXPISFKKWLLVVSLAFPVVLMXEFFKFVGWCLKARGRNRSGKRKAEYMLVMMGI

SEQ ID NO: 314003 - protein, 116 aa, Zea mays
  unsure (1)..(116): unsure at all Xaa locations
  Clone ID: MRT4577_49432C.1.pep
MPATDASSLVMEPVHCKAGCDCVDECSINSVKKYVMEARENWYDSVGXHSFKELGFYDMVXEVASMWPEDEERLLQQEGYAKPSFSAXRNYCDELAIALPSKYSKELVSYYFNVFM

SEQ ID NO: 314004 - protein, 127 aa, Zea mays
  Clone ID: MRT4577_49433C.1.pep
PYLQAKRLPSHAGAAHRAHAQSASILRLCPCGPTCITALSGYECHESRVVPGHVPYPQCAAVSLRDPPKKRKPRTSALPACFLPYRPSKRKSGRTHMVMQHRVYCLGTIRVCWFIMCIAQMNVGKCS

SEQ ID NO: 314005 - protein, 63 aa, Zea mays
  Clone ID: MRT4577_49434C.1.pep
IQKKIFNNQRRDIKGLHIVKLLDRIKEMIMQLWKNEILYRLPKRTILPNIILQFRTNTEVSGT

SEQ ID NO: 314006 - protein, 60 aa, Zea mays
  Clone ID: MRT4577_49435C.1.pep
DGVSLLTILTVAHVLPFCYAYAWHPGTLVPILDIQPSCFPDFSSVPASTHHWWCALFHCL

SEQ ID NO: 314007 - protein, 294 aa, Zea mays
  unsure (1)..(294): unsure at all Xaa locations
  Clone ID: MRT4577_49436C.1.pep
RPGTSRPGPARTALPSDFLVLSLSLSLALPLPLDGGERGESNRKREPASEMGAGSSRADAPSRRRARLGLGGCFGTRSSSSPAAAAEAHDGGSFTLAGSSSSSAIEVQSGRPVRALNFQASLAAKDLQISTASSPRLHSSSSTISHHLRFNHLNCHENKEDGLGTENAETSGLESSSRKAVMVRGSFSNEAVNSDMSGEGISFIGSELENIPSTVSTNETGGSAAESGLGPSLMASERIMSDLEGEVSPQGTSSTTAMXSERSDVSQASLTSMFPNSSIASSVIVETMADPIST

SEQ ID NO: 314008 - protein, 78 aa, Zea mays
  unsure (1)..(78): unsure at all Xaa locations
  Clone ID: MRT4577_49437C.1.pep
APDQGGLGCGRIRRLGDXCTCXQCYWXFNADGGGTGSGLGSVLLERLSVEYGKKXKLGFTVYPSPPVSTSCGEPYNSV

SEQ ID NO: 314009 - protein, 130 aa, Zea mays
  unsure (1)..(130): unsure at all Xaa locations
  Clone ID: MRT4577_49438C.1.pep
FVFSYKILWCTILRKISHKTXKGEGAISWIKTYRGVQTSYDQXNSLSIRXXALKVLRLQPRHKYCVLXELSNEVGRNYHHSIRKLDVYMNEIAKVAYERRKHLSNLLLKAHATARXKLWLQLDILTTIKD

SEQ ID NO: 314010 - protein, 92 aa, Zea mays
  Clone ID: MRT4577_49439C.1.pep
PPPLPLRLGLFFNFPMFFIEVLTSPDKAFTLSKRGFFKVFSPFTPLGGGFSKDCPLFMQLLGATFPLWAFAPPEVGFFRGKKAPKGWVGAGH

SEQ ID NO: 314011 - protein, 129 aa, Zea mays
  Clone ID: MRT4577_4943C.1.pep
ELARSPPLLAAYGGDACSLCLPRRRFGYRCRPRPGCRLFDRPLSRDQGPQAAATHHARTGSADLPRINNPQPSQLLNTTCSRESARPVGSRLISTKTHPCPPCLDTLIPPKKCSGSNTGGRQLTTPRIR

SEQ ID NO: 314012 - protein, 71 aa, Zea mays
  Clone ID: MRT4577_49440C.1.pep
HIKDPTEQRRVDCKQRKSVGSSSYNQSKLVESKCKELSYLLTRALFMATRMLCCSCSEYKKCILVIILRVF

SEQ ID NO: 314013 - protein, 84 aa, Zea mays
  unsure (1)..(84): unsure at all Xaa locations
  Clone ID: MRT4577_49441C.1.pep
EWGGKSTIRQQHGQHVTGVWERGYRCGHSRTEQSRFDTERMEGREKAKRANYATGQKCNRVQXDITFXGTKXFFMSVVNMDGGC

SEQ ID NO: 314014 - protein, 275 aa, Zea mays
  unsure (1)..(275): unsure at all Xaa locations
  Clone ID: MRT4577_49442C.1.pep
PAGYLTAREYDGHVQLLATDYEPKWIAKYKAILAALSSYPVIDMDTEDTVRCFQSAHVGLESHKELGIVPALSRNGYTMVSFRDFIRSAYSLQRARVTPVSRSTTGRKPRLVMVLRRNSRQLKNEADAIAAAAGVGFEVVAAGPDDVSDLERFPRXVNSCDVLMGVHGAGLANMLFLPHNATVVQIIPXGGLRWACRHSYGDPVPDMGLRYLDYXXSAEETTLKETYPGDHAVFTDPLSIHHQGFDKMWNIFINGQHVIVDIDRVHRVHEAALQS

SEQ ID NO: 314015 - protein, 279 aa, Zea mays
  Clone ID: MRT4577_49443C.1.pep
MTPHRSPAGTGGSGGGGPPALHYLSGPYGDTTFTKVFVGGLAWETRSEGLRAHFEVYGDILEAVVITDRATGRSKGYGFVTFQDPESARMACMDPYPVIDGRRANCNLAILGRPGPAVPFVAPIRPVIPYNGGVAVPGGMYVQSPTYQQSPYNYPQAFVYSSYGPSAYGPEYLYQQNAYGPYVGQQYIPVYGGPRTVGPAVYPYGQSGQPVPSDHAYSLGYAPSRVLPLSNQNVNAANVVRIPPLQQFPPGAPRPQQQLLAPARAPPFPQNNVSEQATG

SEQ ID NO: 314016 - protein, 172 aa, Zea mays
  Clone ID: MRT4577_49444C.1.pep
PRQCVAEMHSSALGGKRIYQNEDIHVYFVHGKEAPKSIKEASKAVTVPDRRTSKRSRRTSSGNSISLKVSGSTSVYQLKLMIWESLGIVKENQMLHKGSVEIEDDFATLADKSIFPGDFLWVRDSEIYENRDIADEISEQKDDMLQAEEGFRGTLLTSTVSAQLCQDIAFSE

SEQ ID NO: 314017 - protein, 116 aa, Zea mays
  unsure (1)..(116): unsure at all Xaa locations
  Clone ID: MRT4577_49445C.1.pep
FVPVRVGGGPPALHYLSGPYGDTTFTKVFXVGGLAWETRSEGLRAHFEVYGDILEAVVITDRATGRSKGYGFVTFRDPESARMACMDPYPVIDGRRANCNLAILGRAVPAVAFVGP

SEQ ID NO: 314018 - protein, 47 aa, Zea mays
  unsure (1)..(47): unsure at all Xaa locations
  Clone ID: MRT4577_49446C.1.pep
CFSQKKKHQKRTKKKKIKYQKKKKXKKKKKKKKKKKKKKKKKKKKAA

SEQ ID NO: 314019 - protein, 66 aa, Zea mays
  unsure (1)..(66): unsure at all Xaa locations
  Clone ID: MRT4577_49447C.1.pep
PPIQSGQPNGKKNPYGPVLLXHHPTKKKCDAKQNKLSYATPLPNPIRFKKKRQSTPPNLHYKKKKT

SEQ ID NO: 314020 - protein, 60 aa, Zea mays
  Clone ID: MRT4577_49448C.1.pep
FQCLSWGVLVCHPDASALTVEIGIHIFVDAVLDHVLPPIPSSVHRSILAYSTLIFFHQPG

SEQ ID NO: 314021 - protein, 227 aa, Zea mays
  Clone ID: MRT4577_49449C.1.pep
EKSHTQETLKGFLRRAQNEFGLRIKKIRSDNGTEFKNSQIEGFLEEEGIKHEFSSPYTPQQNGVVERKNRTLLDMARTMLDEYKTSDRFWAEAVNTACYAINRLYLHRILKKTSYELLTGTKWVFRNKQDEHGVVTRNKARLVAKGYSQSKKFEMSMMGELKYFLGFQVKQLQAGTFLSQTKYTQDILSKFGMKDAKPIKTPMGTNGHLDLDKGDSKPTLRKLTLRP

SEQ ID NO: 314022 - protein, 114 aa, Zea mays
  unsure (1)..(114): unsure at all Xaa locations
  Clone ID: MRT4577_4944C.1.pep
MPQVESATASEAPPPQDAWLVELGSRLPQWESLRDSSKVIIPISISRVNQFDAARLDVEMSAMLKEQLVKVFSLMKXDAFFSYQPGLLFQYEPELDAFLGFLLWRFSFWAGLPS

SEQ ID NO: 314023 - protein, 348 aa, Zea mays
  unsure (1)..(348): unsure at all Xaa locations
  Clone ID: MRT4577_49450C.1.pep
MLYEYKTPDRFWAEAINTACYSINRLYLHRILKKTSYELLTGKKPNVSYFRDFGSKCFILIKRGRNSKFSSKVVEDFLLGYDSNTRAYRVFNKSTGLVEVSCDIVFDETNGSHVEQVDLDELDDEEAPCVALRNMSIEDVYPKESEELTQVQDQPSSSNQASPPTQDEDQAQNDEDKDQEDEQPQEEDNDQGGDEVDQDKEDDQETQGQRPPHPRVHQAIQRDHPVNSILDDIHKGVTTRSRVAHFCEHYSFVSSIDPYRVEDALRDSDWVLAMQEELNNFTRNEVWHLVPRPNQNVVGTKWVFCNKQDEHGVVTRNKARLVAXGYSQVEASTAVSGQPKASRQAAPQ

SEQ ID NO: 314024 - protein, 86 aa, Zea mays
  unsure (1)..(86): unsure at all Xaa locations
  Clone ID: MRT4577_49451C.1.pep
LLGAGSPPLPATTGVPRSSPPPGVRVNHGSTLCPNSSPPPPSLAPRACSRYEFMYSCYSXPVXXPXPSPFLFXLXIPSPFLFXPPP

SEQ ID NO: 314025 - protein, 610 aa, Zea mays
  Clone ID: MRT4577_49452C.1.pep
MTTDRPLELLHMDLFGPIAYLSIGGTQNEFGLRIKKIRSDNGTEFKNSQIEGFLKEEGIKHEFSSPYTPQQNGVVERKNQTLLDMARTMLDEYKTSDRFWAEAVNTACYAINRVFGSKCFILVKIGRKSKFAHKTVEGFLLGYDSNTRTYRVFNKSYGQVEVSCDVVFDETNDSQIEQVDLDEIGDEEAPSIALRNMSIEDVCPKESEEPPNAQDQPSSSTQASPPTQDEDKAQNDEGEDQDVEPPQEESNDQGGDAHDQDEEDEQVPRPPHPRVHQAIHRDHPVDTILGDIHKGELNNFTRNEVWHLVPRPNQNVIGTKWVFRNKQDEHGVVTRNKARLVAKGYSQVEGLDFDETYAPVARLESIRILLAYATYHGFKLYQMDVKSAFLNGPIKEEVYVEQPPGFEDNEYPNHVYKLSKALYGLKQAPRAWYECLRDFLITNGFKVGKADPTLFTKTLDNDLFVCQIYVDDIIFGSTNESTCEEFSRIMTQKFEMSMMGELKYFLGFQVKQLQEGTFISQTKYIQDILNKFGMKDAKPIKTPMGTNGHLDLDAGGCKINRKSTSGTCQFLGRSLVSWASKKQNSVALSTAEDEYIAAGEESSTFKNLVS

SEQ ID NO: 314026 - protein, 1546 aa, Zea mays
  unsure (1)..(1546): unsure at all Xaa locations
  Clone ID: MRT4577_49453C.1.pep
MSGDHAKREIVTGGDKSASSGKTHSREFGHKHKEESASSIKSQRRGEKKKKMKKVVYYETDSSSPSTFGSELSSVTSKRHERKKYMRNLGSTKWDDHEMVKVILRSLIFHNPTQVQLIHGDPRYKLMSPEKVIVKFVSFELMIKGSKQIVEQGGTSTPEMQPVVFKATEEKKEESTSSRLPIDASKLDNEKMALIIKSFCQILKQRKGKDYKPRSKKVCYKCGKSDHFIAKCPISSDSDRGADKRGKKKEKKRYYKKKGGDAHVCWEWDSDMSSTDSSSDEDAANIAVNKGLLFPNVGHKRLMENDDKKKKKEKLNELISAIHEKDELLDSQEEFLIKENKKHVKVKNAYAQEVEKNENLTKELSIRHDTISNLRDENTSLIAKVEKSKVCHDSIDNLRNENASLFAKIDKLNESIASLKTENDKLISKAKDLNVCNVSISNLRNENAMLHAKIDELNACKPSTSNVNHVTICTRCRDINVDAIHDHLALIKQQNDHIAQLTAKINEHEIENENFKFARSMLYNGRRPDIKDGIGFQQGDNVKLNAPKKLSNFVKGKAPMAQDNEGYILYPAGYPEHKIRRIHARKSHSVFHHVFMYKNEASSSRHSTHAKMPKKKTPIASNDPNVSFKTFDASYVLTNKSGKVVAKYVGGKHKGSKTCVWVPKVYASGGSSWIIDSGCTNHMTGEKKMFSSYEKNEDPQRAITFGDGNQDSLDYNLLFVSQLCKMGYNYLFTDIGVTVFRRSDDSLAFKGVLEGQLYLVNFNRAKLDTCLIAKTNMGWLWHRRLAHVGMNNLHKLLKGEHILGLTNVHFEKDREKSQTQETLKGFLRRAQNEFELRIKKIRSDNGTEFKNSQTEGFLEEEGIKHEFSSPYTPQQNGVVERKNRTLLDMARTMLDEYKTPDRFWAEAINTACYSINRLYLHRILKKTSYELLTGKKPNVSYFRVFGSKCFILVKRGRKSKFAPKVVEGFLLGYDSNTRAYRVFNKSTGLVEVSYDIVFDENNGSQVEQVDLDELDDEEAPCVVLRNMSIGDVCPKESEEPTQAQDQPSSSMQASPPTQDEDQAQDDENEDQEDEPPQEEDNDQGGDEANKDKEDDQEQRPPHPRVHQAIQRDHPVNSILGDIHKGVTTRSQVTHFCQHYSFVFSIEPYKVEDALRDSDWVLAMQEELNNFTRNEVWHLVPRPNQNVVGTKWVFRNKQDEHGVMTRNKARLVAKGYSHVEGLDFGETYAPVARLESIRILFAYATYHGFKLYQMDVKSAFLNGPIKEXGFQVKQLQEGTFINQTKYXQDILTKFGMKDAKPIKTPMGTNGHLDLDTGGKSVDQKVYRSMIGSLLYLCASRPYIMLSVCMCARFQADPKEVHFKAVKRIMRYLVYTPKFGLWYPEGSTFDLIGYSDADWAGCKIDRKSTSRTCQFLGRSLVSWASKKQNSVALSTAKAKYIVAGHCCAQLLWMRQTLRDYSYKLSNVPLLCDNESAIHMADNPVEHSRTKHIDIRYHFLRDRQQRGDIEIAYVSTKEQLADIFTKPLDEKTFTKLRNELNILDSQNFD

SEQ ID NO: 314027 - protein, 164 aa, Zea mays
  unsure (1)..(164): unsure at all Xaa locations
  Clone ID: MRT4577_49454C.1.pep
FLFLGANREQTVGAPGDHNEPLARLHIGDDIPEGGHFAKNRGRPLWLNGKLSAAAYLWSPNAPPRLWLAWFSLACFSVGVFPRPRALSPPPPPLPPSRPSPPPPLXPPPPPXPPPPRAPPPPPXPXSPPPPPPPPPPPPLPPPPLPPPPPPRSPLPXPPPSPPP

SEQ ID NO: 314028 - protein, 64 aa, Zea mays
  Clone ID: MRT4577_49455C.1.pep
WRLRVYNDVGHREREKDTHEQLESTRCQWVDRSLGWMCIDISELSCKSCKGQYVTEHDEPGPSK

SEQ ID NO: 314029 - protein, 1392 aa, Zea mays
  Clone ID: MRT4577_49456C.1.pep
MSGDHAKKEMETGDKPATSHGKASSKESRNKEKRKDKKKEKITSSHKSHRSGDKIKKMRKVVYYETDTSSPSTSGSDTPSITSKRHERKKFSKIPLRYPRITKHTPLVSVPLGKPPTFDGEDYARWSDLMKFHLTSLHKSIWNVVEFGAQVPSVGDEDYDEDEVAQIEHFNSQATTILLASLSREEYNKVQGLKSAKEVWDVLKTAHEGDELTKITKREMIEGELGRFRLRQGEEPQDMYNRLKTLVNQVRNLGSKKWDDHEVVKVILRSLIFLNPTQVQLIRGNPRYTLMTPEEVIGNFVSFEFMIKGSRKINELDGPSTSEAQPVAFKATEEKKEESTPSRQPIDASKLDNEEMTLVIKSFRQILKQRRGKDYKPRSKKVCYKCGKLGHFIAKCPISSDSDRGDDKKGRRKEKKRYYKKKGGDAHVCREWDSDESSSDSSDDEDAANIAVTKGLLFPNVGHKCLMAKDGKKKKVKSKSSTRYESSSDENASDEEDNLGTLFANLNMQQKEKLNELISTIHEKDDLLDSQEDFLIKENKKHVKVKNAYSLEVEKCEKLSSELSTCHENIDNLRNENANLLAKVDSIASKLDAKIAEHELENEKFKFARSMLYNGRRPSIKDGIGFQKGDNVKLNAPPKKLSNFVKGKAPMPQDNEGYILGETSSSRQPTRAKLPKKKTPSASNEHNFSFKTFDASYVLTNKSGKVYASGGSSWIIDSGCTNHMTGEKKMFSSYEKNQDPQRAITFGDGNQGVTVFRRSDDSIAFKGVLEGQLYLVDFDRAELDTCLIAKTNMGWLWHRRLAHVGMKNLHKLLKGEHILGLTNVHFEKDRICSACQAGKQIGAHHPHKNIMTTNRPLELLHMDLFGPIAYISIGGSKYCLVIVDDYSRFTWVFFLQEKSHTQETLKGFLIRAQNEFGLRIKKIRSDNGTKFKNSQIEGFLEEEGIKHEFSSPYTPQQNGVVERKNRTLLDMARTMLDEYKTSDRFWAEAVNTACYAINRLYLHRILKKTSYELLTGKKPNISYFRVFGSKCFILVKRGRKSKFAPKTVEGFLLGYDSNTRAYRVFNKSSGQVEVSCDVVFDETNGSQVEQVDLDEIASPPTQNEDKAQVDEGENQANEPPQNDGNNQGGDANDQDKEDEEPRPPHPRVHQAIQRDHPVDTILGDIHKGVTTRSRVAHFCEHYSFVCSIEPHRVEEALQDSDWVVAMQEELNNFTRNEVWHLVPRPNQNVVGTKWVFRNKQDEHGVVTRNKARLVAKGYSQVEGLDFGETYAPVARLESIRILLAYATYHGFKLYQMDVKSAFLNGPIKEEVYVEQPPGFEDSEYPNHVYKLSKALYGLKQAPRAWYECLRDFLISNGFKVGKADPTLFTKTLENDLFICQIYVDDIIFGSTN

SEQ ID NO: 314030 - protein, 770 aa, Zea mays
  Clone ID: MRT4577_49457C.1.pep
MSGDHTKKEMETGEKPTTSHGSTSSEESRTKRKEKKKDSSKRKEKKSSSSHHKEKKEKSSSHKPHRKGDKHKRMRKVVYYETDTSSTSTSDSDAPSVTSKRQERKKYRDEDYDEDEVAQIEHFNSQATTILLASLSREEYNKVQGLKSAKEIWDVLKTAHEGDELTKITKRETIEGELGRFRLRKGEEPQHMYNRLKTLVNQVRNLGSVKWDDHEMVKVILRSLIFLNPTQVQLIRGNPRYTKMTPEEVIGNFVSFECMIEGSRKINELDDATTSEAQPVAFKATEEKKEESTPSRQPIDASKLDNEEMALVIKSFRQILKQRRGKDYKSRSKKVCYKCGKPGHFIAKCPLSSDSDRGDDKKGRRKEKKRYYKKKGGDAHVCREWDSDESSSDSSDDEDAANIAVTKGLLFPNVGHKCLMAKDGKKKKEKSQTQETLKGFLRRAQNEFGLRIKKIRSDNGTEFKNSQIEGFLEEEGIKHEFSSPYTPQQNGVVERKNRTLLDMARTMLDEYKTSNRFWAEAVNTACYAINRVEEALQDSDWVVAMQEELNNFTRNESRGDRRHSTAPLANLTEGQRRLRHSDCSATRQSESDRQLGLAKGATANSAPPDPRARTRAKTRKTANSAPPDPRARTRAKTRKTANSAPPDPRARTRAKTRKTANSAPPDPRARTRAKTRKTANSAPPDPRARTRAKTRKTANSAPPDPRARTRAKTRKTANSAPPDPRARTRAKTRKTTKLRLARPQGSDSALASAGRLPPRPTPWLGLGHGN

SEQ ID NO: 314031 - protein, 525 aa, Zea mays
  Clone ID: MRT4577_49458C.1.pep
MGYNCLFIDTGVTVFRRSDDSIAFKGVLEGQLYLLDFDRAELDTCLIAKTNMGWLWHRRLAHVGMKNLHKLLKGEHILGLTNVHFEKDRICSACQSGKQVGVHHPHKNIMMTDRPLELLHMDLFGLIAYISIGRSKYCLVIVDDYSRFTWVFFLQEKSHTQETLKGFLKRAQNEFGLRIKKIRSDNRTEFKNSQIEGFLEEEGIKHEFSSPYTPQQNGVVERKNRTLLDMAITMLDEYKTSDRFWAETVNTACYAINRLYLHRILKKTSYELLTDDEETPCVALRNMSIGDVCPKESEEPPNAQDQPSSSTQASPPTQDEDEAQNDEGEDQEVEPPQEKSNDQGGDAHDKDEKDEQVPRPPHPRVHQAIQRDHPVNTILGDIQKGPHRIEEALQDSYWVVAMQEELNNFTRNELKYFLGFQVKQLQEGTFICQTKYIQDILNKFGMKDAKPIKTPMGTNGHLDLDTGGKSVDQKKEHIGDLPVLGKVSGVLGFKEAKFRNSFYRRSRVYCRRPLLRAITLDEANP

SEQ ID NO: 314032 - protein, 2273 aa, Zea mays
  Clone ID: MRT4577_49459C.1.pep
MARTMLDEYKTSDRVFGSKCFILVKRGRKSKFAPKAVEGFLLGYDSNTWAYRVFNKSTGLVEVSCDIVFDETNGSQVEQVDLDELDDEEAPCVALRNMTIGDVCPKESKEPPQAQYQPSSSNQASPPTQDEDQAQDNEEEDQEDEPPQEEDNDQGGDDNNQDKEDDQEEQGQRQPHPRVHQVIQRDHHMNSILGDIHKGVTTRSRVAHFCEHYSCVSSIEPYKVEDALRDSDWVLAMQEELNNFTRNELYQMDVKSAFLNGPIKEEVYVEQPPGFEDSEYPNHVYKLSKALYGLKQAPRAWYECLRDFLITNGFKVGKADHTLFTKTIANDLFVCQIYVDDIIFGSTNKSTCEEFSRIMIQKFKMSMMGELKYFLGFQVKQLQEGTFICQTKYIQDILTKFGMKDAKPIKTPMGTNGHLDLDTGGAKGSTQTNKKIQVGVQNKGAKETEENPGLPHRTVRCTTGQCPFSPIHPPSRRLLVCYKCGKPGHFIAKCSMSSDSDRGDDKRGNKKEKKRYYKKKGGDAHMCREWDSNESSTDSSSDEDAANIVVNKSLLFPNVGHKCFMAKDDKRKKVQSRTSPKYTTSSDEGSSSDDEDDLLTLFANINMQQKEKLNELIGAIHEKDELLDNQDSIKAKINEHEKENKKFKFARSMLYNGRCPGIKDGIGFQHGSNVKINAPKRLSNFVKGKAPMIQNNEGYILYPANYPEHKIRRIHARKSHTISHHAFMYNNEASSSRQSTHVKLPKNKTPTASNEPNISFKTFDASYDLTNKSGKIVAKYVGGKHKWGRKSKFAPKAVEGFLLGYDSNTRAYRVFNKSTGLVEVSCDIVFDETNGSQVEQVDLDELDDEEAPCVALRNMSIGDVCPKKSEGLHKHKINRHLPSKHLHQLKMRIRLKTMKMKTKRMSHLKRRTMIKGEMKLIKTRKMIKKYRVKDHHTQESIKQFNEITPSTPSLPYKVEDALRDSDWVLAMQEELNNFTRNEVWHLVPRPNQNVVGTKWVFRNKQDKHGVVTRNKARLVAKGYSQVEGLDFGETYAPVARLESIRILLAYATYHGFKLYQMDVKSAFLNGPIKEEVYVEQPLGFENSENPNHVYKLSKALNGLKQAPRAWIMIQKFEMSMMGELKYFLGFQVKQIQDGTFISQTKYIQDILNKFGMKDAKPIKTPMRTKGHLDLDTGDGHLSMYHHKFRNYHIPAGLMKIKKKEFLSLKQGNMSVSEYRDKFIQLSRYVPDEVADDKRKQEHFTEGLNRPLQYALVAHTFPSFQKLLDKALAIEHKRVQLGDLKRKAITQGQGYTNSSRRRTTPSSVDSTGVSTTPPTRQATPTGTPTRPTGQKIGPTCFKCSQVGHYANACPAGNSSASAQNKQQTPGKGFSIARVNQVSAEATADGADITIDREVEFVIDLLPGTAPISKRPYRMSVEELKELKKQLTELQEAGYIRPSSSPWGAPVLFVQKKDGSQRMCVDYRSLNNVTVKNKYLLPRIEDLFDQMRGARVFLKIDLRSGYHQMKIRPSDIPKTTFSTRYGLYEFTFMSFRLTNAPAYFMNLMNKVFMEYLDRFVIVFIDDILIYSKSDSDHEEHLRLVLQKLRNNQLYAKYSKCEFWIDEVPFLGHIVSNGGISVDPAKVREIVAWSIPSIVIEVRSFLGLAGYYRRFIEGFSKIAKPMTSLLEKGREFKWDSKCQDKLAVVVHALKIWRHYIMGTKCQVYTDHKSLKYIFTQKDLNLRQRRWLELIKDYDLEIHYHPSKANLVADALSRKEHVHSAIVAQLPDEIVEDFRRLNLGIVAHTEGVTIELEPTLEHEIHRGQVGDAKIQEIKDLITEGRGPEFTEDEQGTVWFKERICVPEIDSLRETILKEAHDSDYSIHPGSTKMYQDLKQKYWWYGLKRDVAADVAKCDVCQRVKAEHQRPAGLLHPLKIPEWKWEEIGMDFIVGLPCTPAGYDSIWVIVDRLKKVAHFIPVRTNYTGAKLAELYMTRIVCLHGVPKKIVSDRGSQFTSQFWKKLHESLVTQLNFSSAYHPQTNGQTERTNQVLEDMLRACALKHGGSWDKSLQYTEFSYNNSYQASLKMSPFEALYDRKCMTPLYWDQTGERQFFGPELIQETEEQVRMIKENLRIAQSRQKSYSDTRRRLLKFKEGDHVYLKVSPIRGMRRFKVKGKLSPRFIGPFLILKRVGVVAYQLELPDHLADVHDVFHVSQLKKCLRVPEKQLPLEDLSVQDDLTYAEYPIKILDTLTRVTRSKVIKMCKVQWSHHGEDEATWEREEELRIDFPHLFPSST

SEQ ID NO: 314033 - protein, 60 aa, Zea mays
  Clone ID: MRT4577_4945C.1.pep
EYSKAPHITVCSETVVVPIIWRCIARGHEAFGSHIGSHKEPRVHPLLETLEGVLDAPVLA

SEQ ID NO: 314034 - protein, 1072 aa, Zea mays
  Clone ID: MRT4577_49461C.1.pep
MSGDHAKEMVTGEKPATSHGKVPSKESGNKKKEGSPSRIRTHKSGEKKRKMKKVVYYETDSSSPSTLGSDAASITSKRQERKKYSKIPLRYPCIPRHTPLLSIPLGKPPTFDGEDYSRWSDMMRYHLTSLHKCIWDVVEFGVQVPSVGDEDYDEDEVAQIEHFYSQATTILLTSLSREEYNKVQGLKSAKEIWDVLKTAHEGDEVTKITKRETIEGELGRFMLNQGEELQAMYNRLKTLVNQVLNLGSSKWDDHEMVKVILRSLVFLNPTQVQLIRGDPRYKLMSPEEVIGKFVSFELMIKGSKKIIEQGATSTPEVQPVDFKVTEEKKEDSTPSRVPIDASKLDNEEMALIIKSFRQILKQRRGKDYKSRSKKVCYKCGKPGHFIAKCPLSSDSDRGDDKKGRRKEKKRYHKKKGGNAHVCREWESDESSTDSSSDEDAANIAITKGLLFPNVGHKCLMAKDDKKKKVKSRSSTKYETSSDEDNASDKEDNLRTLFANLNMQQKEKLNELISAIHEKDDLLDSQEDFLIKENKKHVKVKNAYALEVEKCEKLSSELSTCHDTITNLRNENDKLIAKVDSNTCDVSIPNLRDENVDLLAKIEELNISLDSLRIENEKLLAKVKDFDVCNVTISNLRSENDILHAKVVELKSFKPSTSTVEHVPICTRCRDVDIDAIRDHMVYASGGSSWIIDSGCTNHMTGEKKMFSSYEKNQDPQRAITFGDGNQGLVKGVTVFRRSDDSIAFKGVLEGQLYLDFDRAELDTCLIAKTNMGWLWHRRLAHVGMKNLHKLLKGEHILGLTNVHFEKDRICSACQAGKQVGAHHPHKNIMTTDRPLELLHMDLFGLIAYISIGGTYATYHGFKLYQMDVKSAFLNGPIKEEVYVEQPPGFEDSKYPNHVYKLSKALYGLKQDPRAWYECLRDFLIANGFKVGKADPTLFTKTLNNDLFDHDTKIRDVDDGGVEVLLGISSEATPRGTFISQTKYTQDILSKFGMKDAKPIKTPMGTNGHLDLDTGGKSVDQKKEHIEDLSVLGKILGVLGFKEAKFRSSFYRRGRVHCRRPLLRATTLDEANP

SEQ ID NO: 314035 - protein, 412 aa, Zea mays
  unsure (1)..(412): unsure at all Xaa locations
  Clone ID: MRT4577_49462C.1.pep
MARTMLDEYKTSDRFWAEAINTAYYSINRLYLHRILKKTSYELLTASPPTQDEDQAQDDEDEDQEDEPPQEEDIDRGGDEDNEDKEDDQEIKDQRPPHPRVHQAIQRDHPVNSILGDINKGPYRIEDALRDPDWVVAMQEELNNFTRNEQDEHGVLTRNKARLVAKGYSQVEGLDFDETYAPVARLKSIRILFAYATYHGFKLYQMDVKSAFLNGPIKEEVYVEQPSGFEDSEYPNHVYKLSKALYGHKQAPRTWFQENPKEVHLRVVKRIMRYLVYTPKFGLWYPKGSTFDLIGYSDDDYAGCKIDRKSTLGTCQFLGRSLVSWASKKQNSVALSTAEAEYIVADHCCAQLLWMRQTLRDYGYKLSKVPLLCDNESAIRMADNPIEHNHTKHIDIRYHFLRDHQQXGDIEI

SEQ ID NO: 314036 - protein, 67 aa, Zea mays
  Clone ID: MRT4577_49463C.1.pep
HAPQTPHDLQDTHGKLRVHYTHTLHCNLIKLVVAAARAFTAHTAFLPCQNGLKGAAKQCLSLLSTDL

SEQ ID NO: 314037 - protein, 120 aa, Zea mays
  Clone ID: MRT4577_49464C.1.pep
SSCFARFIPLAMVGDKSSIELAIVASSDAIGRAGEIPVVASGALVGVVEDSAAVGEVIEDILADLAEESSKDSKRFCQIYASAKSWLPTPRLIRMSTRPPPLNPRTIELRLWQDCFKKRR

SEQ ID NO: 314038 - protein, 136 aa, Zea mays
  unsure (1)..(136): unsure at all Xaa locations
  Clone ID: MRT4577_49465C.1.pep
DFLVLVALLASVATGTSLXKCSQQWACRXVTERRXFECATIQAYGLRGALVASIXRGMSIXTVQQPXGLLEQPYLMNICLQRMAAQQXQQQVLPTLNQVCAENLVAYLQQQQFLPFNQLAGVNPAAYLQAQQLLSL

SEQ ID NO: 314039 - protein, 277 aa, Zea mays
  Clone ID: MRT4577_49466C.1.pep
MFHSLDPPPLHSLLPEVTHQTPPPKKARTLPFPSQAPGPSPRLLICRCSPSLGSENRREARAAMASSASRFIKCVTVGDGAVGKTCMLICYTSNKFPTDYIPTVFDNFSANVVVDGTTVNLGLWDTAGQEDYNRLRPLSYRGADVFVLAFSLVSRASYENIMKKWIPELQHYAPGVPVVLAGTKLDLREDKHYLMDHPGLVPVTTAQGEELRRQIGAMYYIECSSKTQQNVKAVFDAAIKVVIQPPTKIREKKKKKSRKGCSMMNIFGGRKMLCFKS

SEQ ID NO: 314040 - protein, 189 aa, Zea mays
  unsure (1)..(189): unsure at all Xaa locations
  Clone ID: MRT4577_49467C.1.pep
MASSASRFIKCVTVGDGAVGKTCMLICYTSNKFPTDYIPTVFDNFSANVVVDGTTVNLGLWDTAGQEDYNRLRPLSYRGADVFVLAFSLVSRASYENVMKKWLPHASHYAXRVPVTTAQGENCRRQIGAMYYIECSSKTQQNVKAVFDAAIKVVIQPPTKIREKKKKKSPHASAMMNIFGGRKMLCFKS

SEQ ID NO: 314041 - protein, 214 aa, Zea mays
  Clone ID: MRT4577_49468C.1.pep
MASSASRFIKCVTVGDGAVGKTCMLICYTSNKFPTDYIPTVFDNFSANVVVDGTTVNLGLWDTAGQEDYNRLRPLSYRGADVFVLAFSLVSRASYENIMKKWIPELQHYAPGVPVVLAGTKLDLREDKHYLMDHPGLVPVTTAQGEELRRQIGAMYYIECSSKTQQNVKAVFDAAIKVVIQPPTKIREKKKKKSRKGCSMMNIFGGRKMLCFKS

SEQ ID NO: 314042 - protein, 214 aa, Zea mays
  Clone ID: MRT4577_49469C.1.pep
MASSASRFIKCVTVGDGAVGKTCMLICYTSNKFPTDYIPTVFDNFSANVVVDGTTVNLGLWDTAGQEDYNRLRPLSYRGADVFVLAFSLVSRASYENIMKKWIPELQHYAPGVPVVLAGTKLDLREDKHYLMDHPGLVPVTTAQGEELRRQIGAMYYIECSSKTQQNVKAVFDAAIKVVIQPPTKIREKKKKKSRKGCSMMNIFGGRKMICFKS

SEQ ID NO: 314043 - protein, 56 aa, Zea mays
  unsure (1)..(56): unsure at all Xaa locations
  Clone ID: MRT4577_4946C.1.pep
STGNSYLPMKSHEQCSPAKLNGCYLRTGGTQXKPLIWMRQTIPIKGCVSSYRELAN

SEQ ID NO: 314044 - protein, 35 aa, Zea mays
  Clone ID: MRT4577_49470C.1.pep
TECWSDASIAIPNHVLTYANNYYTMNHLFERDFIT

SEQ ID NO: 314045 - protein, 57 aa, Zea mays
  Clone ID: MRT4577_49471C.1.pep
HNNDHVKVLLSISMDSVRPQLSHYFFFQVMHLAYHMVSVCRYQILCFHRCRSVSIFH

SEQ ID NO: 314046 - protein, 91 aa, Zea mays
  Clone ID: MRT4577_49472C.1.pep
PGRNPGTHASASLTAIDSSDWEQIIASRCTSQENFSSARLLDMRMRKRSLKSRRMGWPSHSKIQMTGRRCKRCQNVSSKTFLKSIGGAIYP

SEQ ID NO: 314047 - protein, 494 aa, Zea mays
  Clone ID: MRT4577_49473C.1.pep
MPAQKRPLPSSASPGSDADVEEAPGADADGCGGADQRSPKVTLNGVEERDGGPLQAKDQRHDSDADDEEEGDREGGGGGDGSGSGGDDDCDSQSSQSDGVMDEFTLVKLVDVRKEVQCPICLGIIRKTRTVMECLHRFCRDCIDKSMRLGNNECPACRTHCASRRSLRDDPNYDALILALYPDIDKYEEEELAFSEEERTRNKRIQESIAETFRRQTEALVKKRSTVKATDAASTRKTRRNMRPRRRGRISSPDIAPTDFDDDDREENGDDGSKESSSVDDHSPDVRPKRSRRWPMPRRSPAKAIGNTDNSIEDNDDSGGARDFMTASPLRGEMLAWGKNGTRSQTRHGNSSGSSGRMGRSGRVAKLVDQFRNADDFDNELNLYLVLLPLDGQSVPKLEKPYLSCLPTLSVRHLCQFVALQLSRQPKEVEIYIRKSKDACLSANYTCKYETKPEQPNGLERLWEEKSLSDLYPSLATRQGDLELLYSLKAQGQG

SEQ ID NO: 314048 - protein, 138 aa, Zea mays
  Clone ID: MRT4577_49474C.1.pep
GKKKGRPPAPPSGRVLNAPPEVTKSNTWGEKTPPPYIVLGPLPPCLGPDSIPSWEKKTGSPPRQAGFLLFPGKKTEENRAEEGKKTANFFFFFFFFFFFFFFFFFFFFFFFFFLREIHTLLSDSKSYRLHLQPNSLHT

SEQ ID NO: 314049 - protein, 96 aa, Zea mays
  Clone ID: MRT4577_49475C.1.pep
HFGFQITRTMRIPLADVGEIIGVRGENVEFIRSVSGAVVVLEKIGNGQEVRVMIEGTPSQVQTAHRLVQEALQVTECYRPGAVTTALRGATVTQVW

SEQ ID NO: 314050 - protein, 112 aa, Zea mays
  Clone ID: MRT4577_49476C.1.pep
QTDLAEGKIEYKDTRLAGAEWAAFKPQTPNGQMPALKVGDKVYAKSHAIERFLARKAHLYPADGTAQLLVDQYVEDAIDLGQEYAKAAWAPANEKEAKTKEFVEKNWVHWAG

SEQ ID NO: 314051 - protein, 46 aa, Zea mays
  Clone ID: MRT4577_49477C.1.pep
NVLPREIHCKLSRCPSEMSLCKHAPTVCCIYGLQDNVGQSGGGGGG

SEQ ID NO: 314052 - protein, 167 aa, Zea mays
  unsure (1)..(167): unsure at all Xaa locations
  Clone ID: MRT4577_49478C.1.pep
MQGLKSAKEIWDVLKTAHEGDEVTKITKRETVEGELGRFVLNQGEEPQAMYNRLKTLVNQVRNLRSTKWDDHEMVKVILRSLVFYXPTQVQLIHGXDDKKGRRKEKKKYNKKKGGDARVCREWDSDESSTDSSSDEDAANITITKGLLFPNVGHKCLMAKDSKKKKM

SEQ ID NO: 314053 - protein, 911 aa, Zea mays
  Clone ID: MRT4577_49479C.1.pep
MAPGVTYKKKGGDAHVCREWDSDESSTDSSDEDAANITVNKGLLFPNVGHKCFMAKNDKKKKKDPRLFGYLRTRPKLFCRFMHSGGSSWKIDSGCTNHMTGEKRMFSSCEKNEDPQRAITFEDGNQDIGVTVFRRSDDSVEFKGVLEGQLYLVDFNKAELDTCLIAKTNMGWLWHHRLAHVGMKNLHKLLKGEHILGLTNVHFEKDRVCSACQAGKTDNGMEFKNSQIEGFLEDKGIKHEFSSPYIIQQNGVVERKNRTLLDMARTMLDEYKTPNRFWAEAINTACYSINQLYLHRILKKTSYELLIGKKPNVSYFRVFGSKCFIIVKRGRKSKFSPKAVEGFLLGYDSNTRAYRVFNKSTGLVEISCDIMFDETNGSQVEQVDLDELDDEEAPCIALRNMSIGDVCPKESEEPPQAQDQPSSSIQESPPSQDEDQAQDNEDEDQEDESSQEEVNDQGGDDHDKDKEGEQEIQGQRPPHSRVHQAIQRDHPVNSILGDIHKGVTTRSRVAHFCEYYSFVSSIEPYRVEDALRDSDWVLAMQEELNNFTRNEVCHLVPRPNQNVVGTKWVFRNKQDEHGVMTRNKARLVAKGYSQVEGLDFGETYAPVARLESIHILLAYATYHDFKLYQMHVKSAFLNGPIKEEVYVEQPLGFEDIEYPNHVYKLSKALYELKQAPRAWYECLRDFLITNGFKVGKVDPTLFTKTVAKDLFVCQIYVDDIIFGSTNKSTCEEFSRIMVQKFKMSMTGELKYFLGFQVKQLQEGTFISQTMYIQDILNKFGMKDAKPIKTPMGTNGHLDLDTGGCKIDRKSTSGTCQFLGRSLVSWASKKQNSVALSTAEAEYIVASHCCAQLLYMRQTLRDYGYKLSKVPLLCDNESAICMADNPVEHSRTKHIDIRYHFLRDHQQRGISK

SEQ ID NO: 314054 - protein, 108 aa, Zea mays
  Clone ID: MRT4577_4947C.1.pep
MRPQVLLVALAVFAVLVALPLGKAHEEEEEEGLELEASRRRWPCCDQCGICTRSQPPICECRDTSTTGCHPACKACALSISDGLFVCKDKIVNFCKRRCTRRTDDDDA

SEQ ID NO: 314055 - protein, 115 aa, Zea mays
  Clone ID: MRT4577_49480C.1.pep
LLIWGSGFFFWKTQKRKSFYYKNSKNWSHLHCLLAVQSNPTGKPSSTTYYSSPKTPEQEPTPPSPQGIPLSRNKHTSLNGLHGQEQLQAPTITTMEMGNPPFVISPNRSSKTPRT

SEQ ID NO: 314056 - protein, 61 aa, Zea mays
  Clone ID: MRT4577_49481C.1.pep
PLYVFEEIVSLPLTCLWVRFVSKQQDPYSAFRYSSDYQILSGHLQLPYKISLVTCPATAQT

SEQ ID NO: 314057 - protein, 430 aa, Zea mays
  Clone ID: MRT4577_49482C.1.pep
MTTDRPLELLHMDLFSLIAYISIDRSKYYLVIVDDYSRFTWETLKGFLRRAQNEFGLRIKKIRSDNGTEFKNSQIEGFLEEEGIKHEFSSPYTPQQNGVVERKNRTLMDMARTMLDEYKTSDRFWVEAVNTACYAINQLYLHRILKKTSYELLTGKKPNVSYFRVFGSKCFILVKRGRKSKFAPKAVEGFLLGYDSNTRAYEVFNKSSGLVEVSCDIVFDETNGSQVEQVDLDELGDEEAPCVALRNMSIGDMCPKESEESPNVQDQPSSSTQASPPTQDEDEAQNDEGEDQGVEPPQDESNDQGGDAHNQDKEDEQVPRPPHPRVHQAIQRDHPMNTILGDIQKGVTTRSRVAHFCEHYSFVSSIEPHRVEEALQDSDWVVAMQEELNNFTRPNQNVVGTKWVFRNKQDEHGVVTRNKARLVAKGYSQV

SEQ ID NO: 314058 - protein, 83 aa, Zea mays
  unsure (1)..(83): unsure at all Xaa locations
  Clone ID: MRT4577_49483C.1.pep
NYLYYYLSHTFVNILRDEGPSHLYHFLTPILIRLFPYSSCYFYSYXTLKLLYPLTTIPCFLSYFFPFSTLLISSSDSPFSSLS

SEQ ID NO: 314059 - protein, 1235 aa, Zea mays
  unsure (1)..(1235): unsure at all Xaa locations
  Clone ID: MRT4577_49484C.1.pep
MSGEHAKKEMVIGEKPAISHGKAPSGESRNKKKEESPPHKSHRSGDKKKKMKKVVYYETDSSSPSTSGSDASSVTSKCHERKKFSKIPLRYPCISKRTPLLSVPLGKPPVFYGEDYNMWSDKMRHHLTSLHTSIWDVVEFGVQVPSVGDEDYDSDEVAQIRHFNSQATTILLASLSREEYNKVQGLKSAKEIWDVLKTVHEGDEVTKITKRETIKGELGRFMLNQGEDPQAMYNRLKTLVNQVRNLGSTKWDDHEMVKVILRSLVFLNPTQVQLIRGDPRYKLMSPEEVIGKFVSFELMIKGSKKIIEQGATSTSKVQPVAFKATEEEKKDSTPSRVPIDASKLDNEEMALIIKSFHQILKQRRGKDYKPRSKKVCYNCGKPGHFIAKCPLYSDSDRDNDKRGKKEKKRYYKKKGGDAHVCQEWDSDESSTDSSSDEDAANIAINKGLLFPNVGHKCLMAKDGKKKKVKSRSSTKYATSSDEDNSSDDEDNLLTLFANLNIQQKEKLNELISAIHEKYELLDSQEDFLIKENKKHVKTKNAYAQEIDMLNESLASLKFENDKLIAKAKELDVCNVSISNLRNENAILHAKIVELNDCKPSTSTVEHVSICTRCRDINIDAIHDHLAMIKQQNDHIAKLDAKIAEHELENEKFKFPRGMLYSGRRPGIKDGIGFQQGDNVKLNAPPKRLSNFVKGKAPMPQDNEGYILYPAGKVVAKYVGGKYKGSKTCXFGYPRPLELLHMDLFGSIAYISIGMKFLVANALFXVKRGRKSKFAPKAVEGFLLGCDSNTRVYRVFNKSTGLVEVSCDIVFDESNGSQVEQVDLDELDDEEAPCIALRNMSIGDVCPKESEEPPQAQDHQPSSSMKASPPTQDEDQAQEDENEDQEDEPPQEEDIDQGGDANDQDKEDDEDPRPPHPRVHQAIQRNHPMNTILGDIHKGPHRVEEALQDSDWVLAMQEELNNFTRNEVWHLVPCPNQNVVATKWVFRNKQDEHGVVTRNKARLVPKGYSQVEGLDFGETYAPVARLESIRILLAYATYHGFKLYQMDVKIAFLNGPIKEEVYVEQPPGFEDSEYPNHVYKLSKALYGLKQAPRAWYECLRDFLITNGFKVGKADPTLFTKTNENDLFFSRIMIQKFEMSMMGELKYFLGFQVKQLQQGTFISQTKYIQDILTKFGMKDAKPIKTPMRTNGHLDLDMGGKSVDQKEEHIRDLSVSGEIPGVLGFKETKLSSSFYRRS

SEQ ID NO: 314060 - protein, 34 aa, Zea mays
  Clone ID: MRT4577_49485C.1.pep
STSSLGTVTGPRLRYWDLQSALHGLILSAVRADR

SEQ ID NO: 314061 - protein, 305 aa, Zea mays
  Clone ID: MRT4577_49486C.1.pep
MSWAAAARWALDFMMKFSSVQPYRIDDALRDPDWVVAMQEELNNFMRNEVWHLLPRPNQNVVGTKWVFRNKQDEHGVVTRNKARLVAKGYSQVKEGTFINQTKYIQDILKKFGMKNGKPIKTPMGTNGHLDLDTGGKSVDQKGSTFDLIGYSDADYAGCKIDRKSTSRTCQFLGRSLVSWASKKQNFVALSTTEVEYIAAGHCCAQLLWMRQTLRDYGYKVSKVTLLCDNESAICMADNPVELSRTKHIDIRYHFLRDHQQKGDIEIAYVSTHNQLADIFTKPLDEKTFSKLRNELNILDSWNFD

SEQ ID NO: 314062 - protein, 963 aa, Zea mays
  unsure (1)..(963): unsure at all Xaa locations
  Clone ID: MRT4577_49487C.1.pep
MPLRYSRISKRTPLLSVPLGKPPCFDGDDYSMWRDKMRNHLTSLHASIWDIVEFGAHVPNVGDEGYDLDEVAQIRHFDSQATTILLASLCREEYNKAQGLKSAKEIWDVLKTTHKGDEVTKITKRETIEGELGRFILNRGDEPQAMYNRLKTLVNQVRNLGSTKWDDHEMVKEVIGKFVSFELMIKGSKHIVDLEQGGTSTPEVQPASFKATEEKKEESTSSRLPIDASKLDNEEMSLIIKSFRQILKQRRGKDYKPRSKRVCYNNSDRGDDKRGKKKEKKRYYKKKGSDAHVCRERDSDESSTDSSSDEDAANIAVNKALLFPNVGHKCLMAKDDKRKKIEELKSCKPSTSTIDHVTIYTRCRDVDVDAIHDHLALIKQQNDHIAQLTAKINEREIENEKIKFARSMLYSGRRPSIKDVIGFQQGSNVKLNAPKRLSNFVKGKTPMVQDNEGYILYPAGYPKHKIRRIHAKKSHSISHHAFMYKNEASSSRQSTHVKLSKKKTPVASNEPNISFKTFDASYVLTNKSGKVVAKYXGANTREKRMFSSYEKNEDPQRAITFGDGNQGXKSQTQETLKGFLRRAQNEFGLRIKKIRSDNETEFKNSQIEGFLEDEGIKHEFSSPYTPQQNGVVERKNRTLLDMARTMLDEYKTLDWFWAEGINTACYSINRLYLHRILKKTSYELLTGKKPNVSYFRVFGSKCFILIKRGRKSKFAPKAVEGFLLGYVSNTRAYRVFNKSTGLVEVSCDIVFDETNGSQVEQVDLDELDDEEAPCVALRNMSIGDVCPKESEEPTHAQDQPSSSMQXVEDALRDSDWVLAMQEELNNFTRXNEVWHLVPRLDQNVVGTKWVFHNKQDEHGVVTRNKARLVAKDYSQVEGLDFGETYAPVARLESIRILLAYATQHGFKLYQMDMKSAFLNGPIKEEVYVEQPPGFEDSEYPNHVYKLSKELYGLKQAPRAWYES

SEQ ID NO: 314063 - protein, 1500 aa, Zea mays
  unsure (1)..(1500): unsure at all Xaa locations
  Clone ID: MRT4577_49488C.1.pep
MSGYHAKKEMVTGEKPATSHGKAPSGESRNKGKEKESPSHKSRRSGDKKKMRKVVYYETDSSSPSTSGSDTPSVTSKRHERKKFTTTILLAYLSREEYNKVQGLKSAKEIWEVLKTMHEGDEITKITKRETIEGELGRFRLRQGEEPQEKYNRLKTLVNQVRNLGSKKWDDHEMVKKINELDGPSTSEAQPVVFKATEEKKEESTSSRTPIDASKLDNEEMVLIIKSFRQILKQRRGKDYKPRSKXSCYKCEREKKXEKKRYYKKKGGDAHVCREWDSDESSTDSSSDEDAANIAVTKGLLFPNIGHKCLMAKDGKKKKVKSKSSTKYESSSDDNASDEEDNLRTLFANLNMQQKEKLNELISAIHEKDELLDTQEDFLIKENKKHVKVKNAYALEVEKCEKLSSELSTCHDTIANLRNENANLIAKVDPNVCDVSIPNLRNDNVDLLAKIEELNISLASLRIENEKLITKAKELDVCNVTISNLRSENDILHAKVVELKSCKPSTSTIEHTSICTRCRDINVDAIHDHMALIKQQNDHIAKLDAKISEHDLENEKFKFARSMLYSGRRPGIKDGIGFQKGDNVKLNAPPKRLSNFVKDKAPMPQDNEGYILYPAGYPESNIRRIHSRKSHSGPNHAFMYKGETSSSRQSTRAKLPKKKTPSASNDQDISFKTFDASYVLTNKSGKVYASGGSSWIIDSGCTNHMTGEKKMFSSYEKNQDPQRAITFGDGNQGLVKDEKSHTQETIKGFLRRAQNESGLRIKKIRSDNGTEFKNSQIEGFLEEEGIKHEFSSPYTPQQNGVVERKNRTLLDMARTMLDEYKTSDQFWAEAVNTSRYAINRLYLHRILKKTSYELLTGKKPNISYFRIFGSKCFILVKRGRKSKFAPKTVEGFLLGYDSNTRAYRVFNKSLGLVEVSCDVVFDETNGSQVEQVDLDEIGDEEALCVALRNMSIGDVCPKESEEPPNAQDQPSSSTQASPPTQNEDEAQVDEGEDQKDEPPQDDGNDQGGDANDQDKEDEEPRPPHPRVHQAIQRDHPVDTILGDIHKGVTTRSRVAYFCEHYSFVSSIEPHRVEEALQDSDWVVAMQEELNNFTRNEVWHLVPRPNQNVVGTKWVFRNKQDEHGVVTRNKARLVAKGYSQVEGLDFGETYAPVARLESIRILLAYATYHGFKLYQMDVKSAFLNGPIKEEVYVEQPPGFEDSEYPNHVYKLSKALYGLKQTPRAWYECLRDFLITNGFKVRKPDPTLFTKTLDNDLFVCQIYVDDIIFGSTNESTCEEFSRIMTKKFEMSMMGELKYFLGFQVKQLQEGTFISQTKYIQDILNKFGMKDAKPIKTPMGTNGHLDLDMGDADWAGCKINRKSTSGTCQFLGRSLVSWASKKQNSIALSTAEAEYIAAGHCCAQLLWMRQTFRDYGYKLTKVPLLCDNESAIRMADNPVEHSCTKHIAIRYHFLRDHQQKGDIEIAYINTKEQLADIFTKPLDEQTFNKLRHELNILDSRNFF

SEQ ID NO: 314064 - protein, 100 aa, Zea mays
  unsure (1)..(100): unsure at all Xaa locations
  Clone ID: MRT4577_49489C.1.pep
KKKKKKKKKKKKKGKKKKKKKRXREKKRRKGKRKKGKKRKGKKKKEEKRKKRPPPPPHKRXKKKKKQQQXRQHRRKQQRARQGEGTGHQCRRRSRGCTAR

SEQ ID NO: 314065 - protein, 72 aa, Zea mays
  Clone ID: MRT4577_4948C.1.pep
FLHRQNHLKRRGSVGSAAWSLVTAAHEEEDEEGLELEASRMRWPCCDQCGICTRSQPPICECRDTSTTGCHP

SEQ ID NO: 314066 - protein, 397 aa, Zea mays
  Clone ID: MRT4577_49490C.1.pep
MRRWRSSAKFSTKSSSKGGGRTTSPAPRKFATSVVSPVILLLDVHYLVIVTGAMTRRERGRKRRDTTRRRAAMPMFAGSGTPTMSRGSAKREIETTTSHGKALSRASDAKGREESPPRVKSHQSGDKKKKMKKVVYYETDSSSPSTSGSDAPSVTSKRHERKKFSSKQIVNLEQGDTSTPEVQPVAFKAMEEKKEESTSSRLPIDASKLDNEEMTLIIKSFRQILKQKRGKDYKPRSKRVCYKCGKPGHFIAKYPMSSDSDSGDDKRGKRKEKKYYKKKGGDAHMCQEWDSDMSSTNSSSDGDAANIAVNKGLLFPNVGHKCFMAKNDKKKKVQARTTPKHTTSSDEGSSSDDEDDFLSLFANFNMQQKEKLNELIGVIHEKDELLDSQEEFLIKEK

SEQ ID NO: 314067 - protein, 57 aa, Zea mays
  Clone ID: MRT4577_49491C.1.pep
MADVDVKPEVAAGAPKKRTFRKYSYRGVDLNALFDMSTDDLVQFFPARARKRFQRGL

SEQ ID NO: 314068 - protein, 447 aa, Zea mays
  Clone ID: MRT4577_49492C.1.pep
MTPEEVIGNFVSFEFMIKGSRKINELDGPSTSEAQPVAFKATEEKKEESTPSRTPIDASKLDNEEMTLVIKSFRQILKQRRGKDYKPRSKKVCYKCGKPGHFIAKCPISSDSDRGDDKKGRRKEKKRYYKKKGGDAHVCREWDSNESSSYSSSDEDAANIAVTKGLLFPNVGHKCLMAKDGKKKKVYASRGSSWIIDSGCTNHMTGEKKMFSSYEKNQDPQRAITFGDGNQDSLDYNLLSVSQLCQMGYNYLFTDEKSHTQETLKGFLRRAQNEFGLRIKKIRSDNGTEFKNLQIEGFLEEEGIKHEFSSPYTPQQNGVVERKNRTLLDMARTMLDEYKTSDRFWAEAVNTACYAINRNRKSLQMHKINHPPPRKHLHQLKMRMRLKLMKEKIKQMSHLKMTAMIKGEMQMSKTRRMKNQDRHTQESTKQSNEITPSTPSSATFIRE

SEQ ID NO: 314069 - protein, 192 aa, Zea mays
  unsure (1)..(192): unsure at all Xaa locations
  Clone ID: MRT4577_49493C.1.pep
MGGADDSHETGAGGGESRGKDYTDPATPPLIHAGELGHLPLDRARTSAFFSTPLVLYITGATGIGYKHHTDAFAXGADAACGGVGAQGIAWDFCRMIFALVYCTARSXGGQSNPGVTFGAILTHKDPLVRALLYIGAXLPGAICGVGLHKEDQSAYFDRYGSGTNSLDSGXYSRGTGLGAEIINTFQPVYTD

SEQ ID NO: 314070 - protein, 110 aa, Zea mays
  Clone ID: MRT4577_49494C.1.pep
FMCLRSCFRFYLGYNLRNKNDRKEIAQPDERVARCGPGTKKKKKAKKKKKQKKKKKGVVASEDLTPRFSLRNAKASYQGNSTQTNAVGPNNPGIGKIPGQLIQTVSEKTF

SEQ ID NO: 314071 - protein, 53 aa, Zea mays
  Clone ID: MRT4577_49495C.1.pep
NRKSTSGTCQFLGRSLVSWASKKQNSVALSTAEAEYIAAGHCCAQLLWMRQTL

SEQ ID NO: 314072 - protein, 105 aa, Zea mays
  unsure (1)..(105): unsure at all Xaa locations
  Clone ID: MRT4577_49496C.1.pep
GVGRGEEPEAGVEPRGLRRWSRAGRAGREHERGRGTAARSGYVXASMREAQQEREETRGDVKPVHDRERPEPRRSTFVACLLLPFLKGSDSVSKLCYGRWSTGIP

SEQ ID NO: 314073 - protein, 52 aa, Zea mays
  Clone ID: MRT4577_49497C.1.pep
ILFFRVVFLFSFLERLVFCGVCQVLFFCKLLNAILIVLAGISVVKVRVFIGA

SEQ ID NO: 314074 - protein, 57 aa, Zea mays
  Clone ID: MRT4577_49498C.1.pep
GFILQRMIMLGVMFLKAPPLLPFMAQINLIQPQTILRMFTRFLLYHHFDLPVQCLPE

SEQ ID NO: 314075 - protein, 56 aa, Zea mays
  Clone ID: MRT4577_49499C.1.pep
MAYFLASNKCVLLSLFSVVVLLCLGGGASAMGSLPPPPPMVNFSIGVQGVVWCNTC

SEQ ID NO: 314076 - protein, 71 aa, Zea mays
  Clone ID: MRT4577_4949C.1.pep
VGPLLPKYVGPGMDVYPFSGALQDPPASGWFFFQVHYFLVKSLNGALVVLFLCRPQPILFVPPLPLCFFSW

SEQ ID NO: 314077 - protein, 93 aa, Zea mays
  unsure (1)..(93): unsure at all Xaa locations
  Clone ID: MRT4577_494C.1.pep
LPCLGGGCGRPRGGGGAAPSRPGGSSPPRRXGLKKKLFFPPGLRSAGGEERAGATTHNMGPIPRPAQPLRRQRRQRTSQRAPTAAQQAPARGS

SEQ ID NO: 314078 - protein, 49 aa, Zea mays
  Clone ID: MRT4577_49500C.1.pep
VMFMPGGRLGGPHNDLFTKYSNAITIATCAHKDVHMLLTHTPIDGPDAC

SEQ ID NO: 314079 - protein, 70 aa, Zea mays
  unsure (1)..(70): unsure at all Xaa locations
  Clone ID: MRT4577_49501C.1.pep
RRPNNPGFPYNAVFVYDKAPNAVDRSIIXNRXHLNTPCETYSVTLTVPGTYGFYCVPHQGXGMGGMTTLN

SEQ ID NO: 314080 - protein, 49 aa, Zea mays
  Clone ID: MRT4577_49502C.1.pep
EADVPGTLRLRRPAAAARMLSEDDVWQLHMQKAMGSLFMHTLSSSMTIS

SEQ ID NO: 314081 - protein, 82 aa, Zea mays
  Clone ID: MRT4577_49503C.1.pep
AHSPGPYIVYSIMLACKFCSWVLQVSSCPFCSSACESGTLILVGFQYTIPARVFFFTVFDGLFFIYPSHVVPYVQRPPRRFV

SEQ ID NO: 314082 - protein, 80 aa, Zea mays
  Clone ID: MRT4577_49504C.1.pep
MASNDPKPDTANNKPENASDDARADVTAAVEELLNSLSNKFAGVSSEIFAKMDEMSRRLDNLEAALQESNKPKDGSANKP

SEQ ID NO: 314083 - protein, 58 aa, Zea mays
  Clone ID: MRT4577_49505C.1.pep
LFGFFPIFVLGLREFFLYLRIHILNAQLFSRPPMVGCQQFAGPDMVFRFSLNQFFFPM

SEQ ID NO: 314084 - protein, 56 aa, Zea mays
  Clone ID: MRT4577_49506C.1.pep
LLGRSVAPSGGPLFARVASAPRVCSFRVVGPPLGVPRGVFFLGSRVLLGRVLRILA

SEQ ID NO: 314085 - protein, 89 aa, Zea mays
  Clone ID: MRT4577_49507C.1.pep
VQKEPIVVGKPSGFLMDFLLKSFNLETSRMCMVGDRLDTDILFGQNTGCKTLLVLSGCTALPEVQDARNNIHPDLYTNSVYDLVGLLQK

SEQ ID NO: 314086 - protein, 69 aa, Zea mays
  Clone ID: MRT4577_49508C.1.pep
KSFNLETSRMCMVGDRLDTDILFGQNTGCKTLLVLSGCTALPEVQDARNNIHPDLYTNSVYDLVGLLQK

SEQ ID NO: 314087 - protein, 105 aa, Zea mays
  Clone ID: MRT4577_49509C.1.pep
WLLSSTYTACICLLSLPFVMRLSPPPTAWSSILTLLESRSTGCWASSAATAFACASASVSKRLSQTRPDELYCLNVVADLCTPAMFDGWVPPSHLPQSAPRTSFV

SEQ ID NO: 314088 - protein, 105 aa, Zea mays
  Clone ID: MRT4577_4950C.1.pep
NSQNFNFSDRRKSRGKRGPVKIPAAGPSVITCVDIRYHTSIATQARTDKGGPHRLARLPQHPPPLYSSIATFPSWHQQTLKCVTRHRCRKKINTLDLTILFCLAL

SEQ ID NO: 314089 - protein, 82 aa, Zea mays
  Clone ID: MRT4577_49510C.1.pep
GPLWVSKTPYAIDALSSQVNQLPLFVDLFFLKLGVQFQPIYSGEKHIYQGRIAIPSITSPTNQKTSCQTKQWLFDGKDYLLG

SEQ ID NO: 314090 - protein, 88 aa, Zea mays
  Clone ID: MRT4577_49511C.1.pep
IVFFIFSSCEQSVFMLIYVLTILKTGELDAPLRHLVNITHNSSPHRQNHLSGAVCGGSSWPEKRSAQYTCTREPCVLKQSSVEGCLSP

SEQ ID NO: 314091 - protein, 1270 aa, Zea mays
  unsure (1)..(1270): unsure at all Xaa locations
  Clone ID: MRT4577_49512C.1.pep
METGEKPTTSHGSTSSEESRTKRKVKKDSSKGKEKKSSSHKEKKEKSSSHKPRRSGDKKEDEESGKPPTFDGEDYARWSDLMRFHLTSLHKSIWDVVEFGAQVPSVGDEDYDEDEVAQIEHFNSQATTILLASLSREEYNKVQGLKSAKEVWDVLKTAHEGDELTKITKRETIEGELVRNLGSKKWDDHEVVKVILRSLIFLNPTQVQLICGNPRYTLMTPEEVIGNFVSFECMIEGSRKINELDDPSTSEAQPVAFKATEEKKEESTPNRQPIDASKLDNEEMALVIKSFRQILKXGGGKDYKSRSKKVCYKCGXDDKKGRRREKKRYYKKKGDNAHVYREWDSDESSSDSSDDEDAANIAVTKGLLFPNVGHKCLMAKDGKKKKVKSKSSTRYESSSDENVSDEEDNLHSLFANLNMEQKEKLNELISAIHEKDDLLDSQEDFLIKENKKHVKVKNAYALEIEKCEKLSSELSTCHETIDNLRNENANLLAKVDSHVCNVSITNSRNNDDDSLARIEELNISLASLRIENEKLLAKAKDFDVCNATISDLRTKNDMLQAKVVELKSCKPSTSIVEHVSICTRCRDVDINAIHDHMALIKQQNDHIAKLDAKIAEHNLENEKFKFARSMLYSGRRPGIKDGIGFQRGDNVYASGGSSWILDSGCTNHMTGEKKMFSSYEKNQDPQRAITFGDGNQGLVKDSLDYNLLSVSQLCKMGYNCLFTDEKSQTQETLKGFLRRAQNEFGLRIKKIRSDNGTEFKNSQIEGFLEEEGIKHEFSSPYTPQQNGVVERKNRTLLDMARTMLDEYKTSDRFWAEAVNTACYAINQLYLHQILKKTSYELLTGKKPNISYFRVFGSKCFILVKRGRKSKFAPKTVEGFLLGYDSNTRAYRIFNKSTGQVEVSCDVVFDETNGSQVEQVDLDEIGDEEAPCIALRNMSIGDVCPKESEEPPNAQDQPSSSMQASPPTQNEDEAQVDEVEDQANEPPQDDGNNQGGDANEEDKEDEEQRPPHPRVHQAIQRDHPVDTILGDIHKGVTTRSRVAHFCEHYSFVSSIEPHRVEEALQDSDWVVAMQEELNNFTRNEVWHLVPRPNQNVVGTKWVFRNKQDEHGVVTRNKARLVAKGYSQVEGLDFGETYAPVARLESIRILLAYATYHGFKLYQMDVKSAFLSGPIKEEVYVEQPLGFEDSEYPNHVYKLSKALYGLKQAPRAWYECLRDFLIANGFKVGKADPTLFTKTLENDLFVCQIYVDDIIFGSTNESTCEEFSRIMT

SEQ ID NO: 314092 - protein, 604 aa, Zea mays
  Clone ID: MRT4577_49513C.1.pep
MSGGSAKREMETDTSRGKAPSRESGAKGREDSPPHVKSHRSGDKKKKMKKVVYYKTDSSSPSTSGSNAPSVTSKRHEHKKFRDEVTKITKQETIEGELGRFVLNQGEEPQAMYNRLKTLVNQVRNLGSTKWDDHEMVKEVIGKFVSFELMIKGSKQIIEQGGTSTTEVQPVAFKATEEKKEESTSSRLPIDASKLDNEEMAPIIKSFRQILKQRRGKDYIPRSKKVCYKCGKPGHFIAKCPMSSDSDRDNDKRGNKKRYYKKKGGDAHICREWDFDESTTGSSSNEDAANIAVNKGLLFPNDGHKCLMAKDDKKKKVKTRASTKYTTSSDEGSSSEDEDDLLSLFANLNMQQKEKLNELIGAIHEKDELLDSQEEFLIKENKKYVKIKDACAQEVEKNENLTKELSICHDTISNLRNENAKLDAKIAEHELENENFKFARSMLYNGRRPSIKDGIGFQQGSNVKLNAPKKLSNFVKGKAPMARDNEGYILYPAGYPEHKIRRIHSRKSHSGSHHAFMYKNETSSSKHSTHVKMPKKKTHAASNEPIISFQTFDASYVLTNKSGKVVAKYVGAKHKGSKTCVWVPKVLVSNIKGPKTIWVPKNKV

SEQ ID NO: 314093 - protein, 1014 aa, Zea mays
  Clone ID: MRT4577_49514C.1.pep
MVTGEKPATRHKKREESPPRVKSHRSGDKKKMKKVVYYETDSSSPSTSGSDAPSITSKRHERKKFRDEGYDSDKVAQIRHFNSQATNILLASLSREEYNKVQGLKSAKEIWDVLKTPHEGDEVTKITKRETIEGELGRFMLHQGEEPQAMYNRLKTLVNQVRNLGSTKWDDHEMVKVIRRSPIFLNPTEVQLIRGDPRYKLMSPEEVIGKFVSFELMIKGSKKIIEQGVTVFRRSDDSVAFKGVLEGQLYLVDFNRAELNTCLIIKTNMGWLWHRRLAHVGMKNLHKLLKGEHILGLTNVHFEKDRICSACQAGKQVGVHHPHKNIMTTDRPLELLHMDLFDPIAYISIGRSKCCLVIVDDYSCFTWVFFLQEKSQTQETLKGFLRRAQNEFGLRIKKIRSDNGTEFKNSQIEGFLEEEGIKHEFSSPYMPQQNGVVERKNRTILDMARTMLDEYKTSDRFWAEAINTACYTINRLYLHRILKKTSYELLTGKKPNVSYFRVFGSKCFILVKRGRKSKFAPKAVQGFLLGYDSNTRAYRVFNKSIGLVEVSCDIVFDETNGSQVEQVDLDELDDEEAPCIALRNMSIGDVCPKESDEPPHAQDQPSSSMQASPPTQDKDQAQNDENEDQEEPPQEEDNDQGGDANDQDKEDDDGPRPPHPRVHQAIQRDHPVNAILGDIQKGVTTRSRVAHFCEHYSFVSSIKSYRVEDALRDSDWVLAMQEELNNFTRNEALYGLKQAPRAWYQCLRDFLIANGFKLRKVDPTLFTKTIANDLFVCQIYVDDIIFGSTNKSTCEEFSRIMVQKFEMSMMGELKYFLGFQVKQLQEGTFISQTKYIQDILTKFAMKNAKPIKTPMGTNGHLDLDTGGCKIDRKSTSGTCQFLGRSLVSWASKKQNSVALSTAEAEYIIAGHCCVQLLWMRQTLRDYGYKLTKVPLLCDNESAIRMADNPVEHSCTKHIAIRYHFLRDHQQRGDIDIAYVSTKEQLADIFTKPLDEKTFTKLRHDLNILDSRNFD

SEQ ID NO: 314094 - protein, 44 aa, Zea mays
  Clone ID: MRT4577_49515C.1.pep
FCFTARVSKMFLNISKLWVQCACEEFAIKPKKTQVSTEHRKVNR

SEQ ID NO: 314095 - protein, 669 aa, Zea mays
  unsure (1)..(669): unsure at all Xaa locations
  Clone ID: MRT4577_49516C.1.pep
MATSHGKAPSKESDAKGREESPSCVKSHRSGDKKKKIKKVVYYKTDSSSPSTSGSNAPSVTSKRHERKKFRDEGYDSDEVAQIRHFDSQETTILLASLCREEYNKVQGLKSAKEIWDVLKTAHEGDEVTKITKRETIEGEFGRFILNQGEEPQAMYNRLKTLVNQVRNLGSTKWDDHEMVKVILRSLVFRNPTQVQLICGDPRYKLMSPEELDNEQMALIIKSFRQILKQRKGKDYKPCSKKVCYKCGKPGHFIAKCPISSDSDRGDDKRGKKKEKKRYYKKXGGDAHGLLFPXNVGHKCIMAKDDKKKKVQARTTPKYTTSNDEGSSSDNEDNLLSLFANLNMQQKEKLNELISAIHEKDELLDSQEEFLIKENKKHVKELSICHDTISNLRDENNSLIAKVEKSKVCHDSIDNLRNENASLFAKIDKLNESIASLKTENDKLISKAKDLNVCNIYISNLRNENAILHTKIDELNACKPSTSTVGHVTICTRCGDINVDAIHDHLALIKQQNDHIAQLTAKINEHEIENEKFKFARSMLYNGRRPGIKDGIGFQQGSNGKAPMAQDNEGYILYPAGYPEHKIRRIHAKKSHSISHHAFMYKNEASSSRHSTHVKMPKKKTPTASNEPNASSKTFDAPYVLTNKSGKVVAKYVGGXHKGSKTCVWIPKE

SEQ ID NO: 314096 - protein, 646 aa, Zea mays
  Clone ID: MRT4577_49517C.1.pep
MSGGSAKREMETDEKATSHGKAPSRESATKAKEGSPPRVKSHWSGDNKKKMKKVVYYETDSSLPSTSGSDAASVTSKRHERKNDKMRHRLTSLHASIWDIVEFGVQEYNKVQGLKSVKEIWDVLKTAHEGDEVTKITKRETIKGELSRFVLNQGEEPQAMYNRLKTLVNQVRNLVSTKWDDHEMVKVQPVAFKATEEKKEESTSSRLPIDASKLDNEEMALIIKSFRQILKQRRGKDYKPRSKRVCYKYGKPDHFIAKCPMSSDSDRGDDKRGKKKYYKRKGGDAHVCREWESDESSTDSSSNEDGANIAVNKGLLFPNIGHKCFMAKDVKKKKVQSRTTSKYTTSSDEGSSSEDEDDLLTLFTNLNMQQKEKLNELIGAIHEKDELFDSQEEFLIKENKKHVKIKNAYAEEVYASGGSSWIIDSGCTNHMTGEKIMFSSYEKNEYPQRAITFRDGNQDIGVTVFRRSDDSVAFKGVLEGQLYLVDFNKAELDTCLIAKTNMGSLWHRRLALVGMKNLHKLLKGEHILGLTNVHFEKDREKSQTQETLKGFLRWAQNEFGLRIKKIKSDNGTEFKNSQIEGFLEDESIKHEFSSPYTPQQNGVVERKNRTLLDMARTMLDEYKTPDQFWAEAINTACYSLNRLYLH

SEQ ID NO: 314097 - protein, 512 aa, Zea mays
  Clone ID: MRT4577_49518C.1.pep
MSGDHAKKEMETGEKPTTSQGSTSSEESRTKRREKKKSSSIKGKEKKSSSHHKEKKEKSYSHKPHRKGDKHKRMRKVVYYETDTSSTSTSDSDAPSVTSKRQERKKYIQLIRGNPRYTKMTPEEVIGHFVSFECMIEGSRKINELGERSEAQPVAFKATEEKKEESTPSRQPIDASKLDNEEMALVIKSFRQILKQRRGKDYKSRSKKVCYKCGKPGHFIAKCPISSDSDRGDDKKGRRKEKKRYYKKKGGDAHVCREWDSDESSSDSSDDEDAANIAVTKGLLFPNVGHKCLMAKDGKKKKEKSQTQETLKGFLRRAQNEFALRIKKIRSDNGTEFKNSQIESFLEEEGIKHEFSSPYTPQQNGVVERKNRTLLDMARTMLDEYKTPDRFWAEAVNTACYAINRLYLHRILKKTSYELLTGNPKSLQMHKINRPPPCKHLHQLKMRMRLKLMKGKIKKMSHLKMMTMIKGEMQMIKRRRMRKNQDRHTQESTKQSNEITPSTPSSATFIRG

SEQ ID NO: 314098 - protein, 2768 aa, Zea mays
  Clone ID: MRT4577_49519C.1.pep
MSGDHAKKEMETGEKPTTSHGSTSSEESRTKRKEKKKSSSNKGKEKKSSSHHKEKKERSSSHKPHRRGDKHKRMRKVVYYETDTSSTSTSGSDAPSVTSKRQERKKFSKIPLHYPRISKNAPLLSVPLGKPPTFDGEDYARWSDLMRFHLTSLHKSIWDVVEFGAQVPSVGDKDYDEDEVAQIEHFNSQATTILLASLSREEYNKVQGLKSAKEVWDVLKTAHEGDELTKITKRETIEGELGRFRLRKGEEPQHMYNRLKTLVNQVRNLGSTKWDDHEMVKVILRSLIFLNPTQVQLIRGNPRYTKMTPEEVIGNFVSFECMIEGSRKINELDDPSTSEAQPVAFKATEEKKEEATPSRQPIDASKLDNEEMALVIKSFRQILKQRRGKDYKSRSKKVCYKCGKPGHFIAKCPISSDSDRGDDKKGRRKEKKKYYKKKGGDAHVCREWDSDESSSDSSDDEDAANIAVTKGLLFPNVGHKCLMAKDGKRKKVKSNSSTKYESSSDDNDSDEEDNLRVLFANLNMEQKEKLNELISAIHEKDDLLDSQEDCLIKENKKHVKVKKAYALEVEKCEKLSSELSTCREMIDNLRNENASLNAKVDSHVCIVSTSNPKDNNDDLLARIEELNISLASLRVENKILIAKAKDYDVCKVTISDLRDKNDILHAKIVELNSCKPSTSIVEHVSICTRCRDVDVNAIHDHMALIKQQNDHIAKLDAKIAEHNLENEKFKFARSMLYNGRRPGIKDGIGFQRGDNVKINAPPKNLSNFVKGKAPMPQDNEGYILYPAGYPESKIRKIHSRKSHSGPNHAFMYKGETSSSRQPTRAKLPRKKTPNASNDHAISFKTFDASYMLTNKSGKVYASGGSSWILDSGCTNHMTGEKKMFSSYEKNQDPQRAITFGDGNQGVTVFRRSDDSIAFKGVLEGQLYLVDFDRAELDTCLTAKTNMGWLWHRRLAHVGMKNLHKLLKGEHILGLTNVHFEKDRICSACQAGKQVGAHHPHKNIMTTDRPLELLHMDLFGPIAYISIGGSKYCLVIVDDYSRFTWVFFLQDKSHTQETLKGFLRRAQNEFGLRIKKIRSDNGTEFKNSQIEVERKNRTLLDMARTMLDEYKTPDRFWAEAVNTACYAINRLYLHRILKKTSYELLTGKKPNISYFRVFGSKCFILVKRGRKSKFAPKTVEGLLLGYDSNTRAYRVFNKSTGLVEVSCDVVFDETNGSQVEQVDLDEIGEEQAPCIALRNMSIGDVCPKEFEEPPNTQDQPSSSTQASPPTHDEDEAQVDEGEDQKDEPPQDDGNDQGGDANDEDKEDEQPRPPHPRVHQAIQRDHPVDTILGDIHKGVTTRSRVAHFCEHYSFVSSIEPHRVEEALQDSDWVVAMQEELNNFTRNEVWHLVPRPNQNVVGTKWVFRNKQDEHGVVTRNKARLVAKGYSQVEGLDFGETYAPVARLESIRILLAYATYHGFKLYQMDVKSAFLNGPIKEEVYVEQPPGFEDSKYPNHVYKLSKALYGLKQAPRAWYECLRDFLIANGFKVGKADPTLFTKTLDNDLFEFSRIMTQKFEMSMMGELKYFLGFQVKQLQEGTFICQTKYTQDILTKFGMKDAKPIKTPMGTNGHLDLNTGGKSVDQKATFNSDRGDDKKGKRREKKKYYKKKGGDAHVCREWDSDESSTESSSDEDAANIAVTKGLLFPNVGHKCLMAKDGKRKKVKSKSSTKYESSSDDNASDEENNLRTLFANLNMEQKEKLNELISAIHEKDDLLDSQEDFLIKENKKHVEKCEKLSSELSTCHDTITNLRNENASLNAKVDSHVCNVSIPNLRNDNDDLLAKIEELNISLASLRVENENLIAKAKELDVCNVTISDLRDNNDILRAKIVELNSCKPSTSSVEHVSFCTRCRDVDINAIHDHMTLIKQQNDHIAILDAKIAEHNLENEKFKFARSMLYNGRHPGIKDGIGYQRGDNVKLSAPPKRLSNFVKGKAPMPQDNEGYILYPAGYPESKIRKIHSRKSHSGPNHAFMYKGETSSSRQPTRAKLPKKKTPSASNEHDISFKTFDASYVLTNKSGKVYASGGSSWILDSGCTNHMTGEKKMFSSYEKNQDSQRAITFGDGNQGVTVFRRSDDSIAFKGVLEGQLYLEKSQTQETLKGFLRRAQNEFGLRIKKIRSDNGTEFKNSQIEGFLEEEGIKHEFSSPYTPQQNGVVERKNRTLLDMARTMLDEYKTPDRFWAEARGRKSKFAPKTVEGFLLGYDSNTRAYRVFNKSSGLVEVSCNVVFDETNGSQVEQVDLDEIGEEQAPCIALRNMSIGDVCPKEFEEPPNTQDQPSSSTQASPPTQNEDEAQVDEGEDQRDEPPQDNGNDQGGDASDQDKEDEQPRPPHPRVHQAIQRDHPVDTILGDIHKGVTTRSRVAHFCEHYSFVSSIEPHRIEEALQDSDWVMAMQEELNNFLRNEVWHLVPRPNQNVVGTKWVFRNKQDEHGVVTRNKARLVAKGYSQVEGLDFGETYAPVARLESIRILLAYATYHGSKLYQMDVKSAFLNGPIKEEVYVEQPPGFEDSEYPNHVYRLSKALYGLKQAPRAWYECLRDFLIANGFKVGKADPTLFTKTLDNDLFVCQIYVDDIIFGSTNESTCEEFSRIMTQKFEMSMMGELKYFLGFQVKQLQEGTFICQTKYTQDILTKFGMKDAKPIKTPMGTNGHLDLNKGGQVRTVRALAADRPHHQDDPRTGPMQKSKSALWTVRRKRADRLGPRADRPASGADRPARTVRTRQADRPRSAEWSNG

SEQ ID NO: 314099 - protein, 112 aa, Zea mays
  Clone ID: MRT4577_4951C.1.pep
FSHQAQTNLTTAPAHFRGPHPRVHRPTELGCRPIFYPTQPNLPEQISCSLPGGARIVSHCTTRALLFGSSTRGPTEALTPVRAHDLLSPPCGPILSKISSLNLSRNKPHPLL

SEQ ID NO: 314100 - protein, 998 aa, Zea mays
  unsure (1)..(998): unsure at all Xaa locations
  Clone ID: MRT4577_49520C.1.pep
MTGEKPAGSRRTFSRESGNKYKEESSSSTKSHWRGDKKKKKMKKVVYYETNSSSPSTSGTELPTTSKCHERKKYSKMPLRYPRISKRAPLLSVPLARNLGSTKWDDHEMVKVILRSLIFRNPTQVQLIRGDPRYKQMSLEEVIGKFVSSKLMIKNSKHIVNLEQGATSTPEVQPVAFKATEEKKESTPSRLPIDASKLDNEEMVLIIKSFCQILKQRRGKDYKPCSKRXDEDKKGKKKEKXRYYKKKGGEAHMGREWDYDESSTDSSSDEDAANIAVNKGLLFPNIGQKCLMAKDDKKKRCRDVNIEAMDDHLAMIKQQNDHIAKLTAKIIEHELENEKFKFARSMLYNGRRPGIKDGIGFQQESQSNVKLNAPKRLSNFVKGKAPMAHDSEGYILYPANYPEHKIRKIHARKPHTISHHAFMYKNEASSSRHSTHVKMPKKKIPNASNEHNVSFKTFDASYVLTNKSGKLVAKYVGGKHKSPKTCVWDPRPFGYLRIRPKLVLYVYASGGSSWIIDSGCRNHMTGEKRMFSSYEKNEDPQRAITFGDGNQGLVKGLGKIAISPDHSISNVFLVDSLDYNLLSVSQLCKMGYNCLFTDVDVTFFRRSDDSIVFKGVLDGQLYLVDFNDNQAELDTCLIAKTNMGWLWHRRLAHVGMKNIHNLLKGEHILGLTNVHFEKDRISSACQAGKQIGVHHPHKNIMTTDMPLELLHMDLFGPIAYISIGGNEDEAQEEEDKDEDNEPPQEEDIDQGGDDNEDKEDDQEIRDQRPPHPRVHQAIQIDHPVNFILGDIHKGPYRIEDALRDPYWVVAMQEELNDFTRNEVWHLVPRSNQNVVGTKWVFRNKQDEHGVVTRNKARLVAKGYSQVEGLDFDETYAPVARLESIRILLAYATYHGFKLYQMDVKSAFLNGPIKEEVYVEQPPGFEDSGYPNHVYKLSKVLYGLKQAPRASYECLRDFLITNGFKVGKADPTLFTKTAAKDLFICQIYVDHIIFGSTNK

SEQ ID NO: 314101 - protein, 144 aa, Zea mays
  Clone ID: MRT4577_49521C.1.pep
VPAGPGVVFSLFALVVMASNQFGGSQDFREYPESNYCLGISFVGWLYPRAQVLRDVHRLGSGGGLFAARKASPVVDFAGDQVVACFLIWALSAGAPVPVYLRQAGDTLFTDSAAAAFSMAFFAFVAIGLFALVPGYTLSMEALV

SEQ ID NO: 314102 - protein, 1329 aa, Zea mays
  Clone ID: MRT4577_49522C.1.pep
MREIETGDKSASLGRTHSRESAHKHKEESSSSIKSQRKGKPPMFDGEYYSMWIDKMRHHLTSLHKSIWDIVEYGAQVPKEGDNDCDSEEVKQIQHFNSQATTILLASLSREEYNKVQGLKSAKEIWDVLKTAHEGYEVTKITKRETIEGELGRFMLHQGEEPQAMYNRLKTLVNQVRNLGSTKWDDHEMVKVILRSLVFLNPTQVQLIRGDPRYKLMSPKEVIGKFVSFELMIKGSKKIIEQGATSTPEVQPVAFKATKEEKKDSTPSRIPIDASKLDNEEMSLIIKSFRQILKQRRGKDYKPRSKKVCYKCGKPSHFIAKCPLSSDSDRGDDKKGKRREKKSSTDSSSDEDAANITVTKGLLFPNVGHKCLMEKDGKKKKVKSRSSTKYATSSDEDNCSDDEDNLLILFANLNMQQKEKLNELISVIHEKDELLDSQEDFLIKENKKHVKTKNAYAQEVEKNKKLTSELSTCHDTISSLRNENAKLIANVEKLDVCDDSIVNLRNDNASLIAKIDKLNASLTSLKFENEKLIAKAKDLNVCNVSISNLRDENAILHAKIVELNICKPSTSTVEHVYASGGSSWIIDSGCTNHMTGEKRMFSSYEKNQDPQRAITFGDGNQGVTVFRRSDGSVAFKGVLEGQLYLVDFNRVELDTCLIAKTNMGWLWHRRLAHVGMKNLHKLLKGEHILGLTNVHFEKDREKSQTQETLKRFLRRAQNEFSLRIKTIRSDNGTEFKNSQIEGFLEEEGIKHEFSSPYTPQQNGVVKRKNRTPLDMARTMLDEYKTSDRFWAEAVNTACYAINRNMSIGDVCPKESKEPPHAQDQPSSSMQAFQPTQDEDQAQDDEDEDQEEPPQEEDNDQGGDANDQDKEDDEGPRPPHPRVHQAIQRDNPMNTILGDIHKGPHRVEEAHQDSDWVLAMQEELNNFTRNEVWHLVPRPNQNVVGTKWVFSNKQDEHGVVTRNKPQLVAKGYSQVEGLDFGETYAPVARLKSIRILLAYATYHGFKLYQMDVKSAFLNGPIKEEVYVEQPPGFEDSEYPNHIYKLSKALYGLKQAPRAWYECLRDFLIANGFKVGKSDPTLFTKTIANDLFVCQIYVDDIIFESTNKSTCEEFSRIMIQKFEMSMMGELKYFLGFQAKQLQEGTFISQTKYIQDILAKFGMKDAKPIKTPMGTNGHLDLDTGGCKIDRKSTSGTCQFLGRSLVSWASKKQNSVALSTAEVEYIVVGHCCAQLLWMRQTLRDYGYKLTKVPLLCDNESAIRMADNPVEHSRTKHIVIRYHFLRDHQQRGDIEIAYINTKEQLADIFTKPLDEKTFTKLRHELNILDSRNFD

SEQ ID NO: 314103 - protein, 81 aa, Zea mays
  unsure (1)..(81): unsure at all Xaa locations
  Clone ID: MRT4577_49523C.1.pep
ATDVSTRVGGTSXYLADEYSVRGHVTNKSYIYSIGVLLLXIDADICNYNNILPXXDNNVVEKTWAYYLQKKLDKVINAEPW

SEQ ID NO: 314104 - protein, 243 aa, Zea mays
  unsure (1)..(243): unsure at all Xaa locations
  Clone ID: MRT4577_49524C.1.pep
ARGDRRLAAPPQRCCGSVASSGFCGLSAEDMPNARKYQSKSFPLLDSLELLFDGPIPEGAQKSPSSIPQNVGGNVGDGGNNISTAPDLSERPSGTINTSVNEAWNNISLLKQTALGPQGIDNLDTLQNRDEEVLERLQHGSDRRPQRADEQAQSSSCVELQRDRRKKRKAPDIQQIMETYMNFRMKQPRVKQRRAKDADQFTIXKVLASDVFKDPENRETFLSYEPRLRTLWLKREVGKLLSL

SEQ ID NO: 314105 - protein, 254 aa, Zea mays
  unsure (1)..(254): unsure at all Xaa locations
  Clone ID: MRT4577_49525C.1.pep
GPIKEEVYVEQPPGFEDSEYPNHVYKLSKVLYGLKQAPXEHVEKANPTLFTKTLENDLFVCQIYVDDIIFGSTNESTCEEFSRIMTQKFEMSMMGELKYFLGFQVKQLQEGTFLSQTKYTQDILSKFGMKDAKPIKTPMGTNGHLDLDTEAVKGSHLANKKTKYWVQQREQGITEGSPGLAHRTVRWGLHAELLTFGKIQRRSAIIHRTVRCTPDSVRCPREKRLWNSPASGIRSAIIHRTCPVYIGLSELHKK

SEQ ID NO: 314106 - protein, 90 aa, Zea mays
  Clone ID: MRT4577_49526C.1.pep
LCQAIPDPGRPRRFEASTHRRPRHVSVSCLVLFLKCQNTCKFPLLLDLAEKNEMIQVLVDQELQMWDPTCIFSFADVSSSSLLLIFFVSS

SEQ ID NO: 314107 - protein, 290 aa, Zea mays
  unsure (1)..(290): unsure at all Xaa locations
  Clone ID: MRT4577_49527C.1.pep
ARGDRRLAAPPQRCCGSVASSGWCGLSAEDMPNARKYQSKSFPLLDSLELLFDGEHTCTLPTAGKGLRRSVLYADTFCLTKINMLLXGPIPEGAQKSPSSIPQNVGGNVGDGGNNISTAPGLSERPSGASWVNDAWNNISLLQQTALGPQGIDDIDMLQNRDEEVLELLQHGADRRPQRADEQAQSSSCVELQRDRRKKRKVPDVQQIMETYLNFRMKQARVKEQRAKDVDQFTISSCIKALHPMPDVSDEVKVLASDVFKDPENREIFLSYEPRLRTLWLKREVGKLLS

SEQ ID NO: 314108 - protein, 351 aa, Zea mays
  unsure (1)..(351): unsure at all Xaa locations
  Clone ID: MRT4577_49528C.1.pep
MANRARWMMKYEKGLVDILHENNTSHYRTQNGWRTEGWRKIVRDFNVRYPEAKFSKMQIQEHETQLKKDYKLIKSILQRDGVSWDQSASMVRTTDEIWDEIIEDMPKARKYQSKSFPLLDSLELLFDGEHTSIHLTGHTCIATLPTAGKGXRAVLYADTFCFTKTNMXVIGPIPEGGQKSPSSVPQNGGENVDDGGNNTSTVXQQTALGPQGIDDLDTLQKRGEEVLERLQHGADRRLPRADDQAQSSSCVELQRDRRKKRKAPDVQQMMETYLNFRMKQAHVKEQRAKDAGQFTISGCIKALHTMADVSDEVKVLASDVFKDAENREIFLSYEPRLRTLWLKREVGKLLS

SEQ ID NO: 314109 - protein, 121 aa, Zea mays
  unsure (1)..(121): unsure at all Xaa locations
  Clone ID: MRT4577_49529C.1.pep
NWLYLADFASFKPTYIPDDDPSDFSFYFDTGGRRRCYLAPERFYEHGGESQVAADAPLQPSMDIFSLGCVLAELFLEGQPLFELSQLLAYRRGQYDPIHTLXKIQETGILDMILNMTQLEP

SEQ ID NO: 314110 - protein, 63 aa, Zea mays
  Clone ID: MRT4577_4952C.1.pep
PTRPQHSLDPHTTVKARFNNYGMASALVQHEWRPKSFITISGEVDTKAIEKSTKVGLSLVLKH

SEQ ID NO: 314111 - protein, 46 aa, Zea mays
  Clone ID: MRT4577_49530C.1.pep
AAVLLPGRLLPRPCALGRRRSDRAFIARYLEVLDGVSDVWRQAGNS

SEQ ID NO: 314112 - protein, 488 aa, Zea mays
  Clone ID: MRT4577_49531C.1.pep
MSWTTVPAAPPRTQGGAAMVISVPAARRSTSVRSSVLGGGGRQLYQPLRCAFYDGLAAALSESEEPSRSPAAARVPAGCKRQAARNVLILMSDTGGGHRASAEALRDAFRIEFGDAYKVFVTDLGKEYGGWPLNDMERSYKFMIRHARLWKVAFHGTSPRWVHGVYLAALAYFYANEVVAGIMKYEPDMIISVHPLMQHIPLWVLKWQQHPKAVVPFVTVVTDLNTCHPTWFHHGVTRCYCPSAEVASRALLRGLSPSQVRVFGLPIRPSFCRAVLDKDEVRKELGLDPQLPAVLLMGGGEGIGPVEETARALGEELYDRRRRRRVGQVVVVCGRNRALRSTLQSLRWKVPVKIRGFETQMEKWMAACDCIITKAGPGTIAEALIRGLPIILNDFIPGQEVGNVPYVVDNGAGVFSKDPGEAARQVARWFSSTDGDELRRYSRNALRLAQPEAVFHIVRDIHKQLQRQPAAVTRIPSRSLTSSFPYHM

SEQ ID NO: 314113 - protein, 56 aa, Zea mays
  Clone ID: MRT4577_49532C.1.pep
TDPFFYKQFHFWGGQLVKPLSVLFFLGQPVLKMNWGAPNFWGRGRGLPCLNRPPRF

SEQ ID NO: 314114 - protein, 74 aa, Zea mays
  Clone ID: MRT4577_49533C.1.pep
PGCIVVNAIYSEVIEANGVHAAVVPGNGAARSACGHMRTYHPQHKTLCLPTARTTEKTRQVSHTERSMRSETTN

SEQ ID NO: 314115 - protein, 64 aa, Zea mays
  unsure (1)..(64): unsure at all Xaa locations
  Clone ID: MRT4577_49534C.1.pep
RSAASGVGLSTXLLLAPLLAVAMGKIKIVITAPKDRRLVAACASNRGCRARWRLHPFVTTDYLT

SEQ ID NO: 314116 - protein, 97 aa, Zea mays
  Clone ID: MRT4577_49535C.1.pep
FKISPRWHTRKKTSLPAYFFFFHQILKPPFLFPSRAAFFFSKKNNRPSNGITYKNKEMPTPLNRSRTTITQWTPSEISPQPTGTLNVTKETLVSPGH

SEQ ID NO: 314117 - protein, 108 aa, Zea mays
  unsure (1)..(108): unsure at all Xaa locations
  Clone ID: MRT4577_49536C.1.pep
GRXGGSKFFAXXREEGAGGARNNNXEARXQXDDPGPRAPXKKXXDXNEAXEXXRXDNQNXDGRARQEGXGSXXXHSKXXEXXNXPAREXKXNGTPRKEXAEXQQEPEK

SEQ ID NO: 314118 - protein, 202 aa, Zea mays
  unsure (1)..(202): unsure at all Xaa locations
  Clone ID: MRT4577_49537C.1.pep
DAGCSAARGACTGTPGGXRRRRRQCRAAWAAEAMPLPPCPLPPAERPGGRIRNRTVGATRRIRNRTAERQCRAAWVHMKMTLLAGLAPRCPQPGCATKLGAEGAAADLGEEEATTQPGCKVPWHEPLSCPEYRRRYPHGGPNGNIREEEKGWGASDITATDLGEEEATARRSGRKRRRCDARGGDESGDGATALRTRTSQDL

SEQ ID NO: 314119 - protein, 110 aa, Zea mays
  unsure (1)..(110): unsure at all Xaa locations
  Clone ID: MRT4577_49538C.1.pep
YVLQLDDVIDLVIPRGSNKLVSQIKASTKIPVLGHAXIYLPIVCFWYKQSTTILKYTDWFDFXFFSIDGICHVYIDKSADMNMAKRIVMDAKTDYPAACNAMVCLISYYN

SEQ ID NO: 314120 - protein, 110 aa, Zea mays
  Clone ID: MRT4577_49539C.1.pep
PSAMSRGSSNGGVRRSAVRLEELQLDLSPSLLVLLVCLLGGGLLFLLPKQFTQVVFLKVDVDEGKEVPAWREVERMPSCHFVLHGFLLPTRVVAWKVVLLPPLLVPERLP

SEQ ID NO: 314121 - protein, 109 aa, Zea mays
  Clone ID: MRT4577_4953C.1.pep
DQLKQFTSRPLYCTNAFWSSHSAKIRLQIGSRDPFHLAREDKVPPCRVLFHADRQRDSCNSNWQHALSWAHWQPDIIVLPFQPCCCPARSCPALPPMFLFSHSSLRKSG

SEQ ID NO: 314122 - protein, 227 aa, Zea mays
  Clone ID: MRT4577_49540C.1.pep
PRVWQRACYCTARDTGNSASKRTRVFRELGRRDTQGVCCSKSEHGEMDRTERRGELEGRVATREEAAHGDGSSGATSKGTPSRTRTRREIPAGRHGCRRLRMGKLDGWASKGELRAAMEPSWLSREGGEGAAEQERRTEGLRPGTRREIDAEGKSLGKQVGRCSSRSAVRASTPGRETQRKSSAGSLAGGNSSRAPVNRESRGRGRSWGARRPRLVSGWRRRETCVR

SEQ ID NO: 314123 - protein, 497 aa, Zea mays
  Clone ID: MRT4577_49541C.1.pep
MAYRRVDPEPFLPSGFSASVVLHREVMARSVTRRLPPLHEDWAIINIQPLPDHEVTFPVVRDVVRKYLVEHRRLGVRDIQRSHLGQVLVQFSSVLERDNLVLLGPQNYLDATFTALRHNDAWNHRALFFNCECWLMLLGFPLDYRSSEYLQAAIGSFGRLLLWEEDKHNVYRTMLRVRVTSREEVPQFIVFSEADGFIGDSWTVQCEIIQQTLLGGQAQDEDPVPVAPEDGQQLPLEFFGLGQHVPAAGCDLNLPPDDNAQAESADNIQGDWDQWINGQIQNGQIPADLDVVGPVLPFNAPALPVVDARGPNINDPNIVELNYMFAQDWRPDLVLLSHLERKRNAQFYRIWANYFAPAGNPELSMQIPKKWAPFFMSNLLHKDSFNWSKSFLASDIPSALLESTDETLPLAIPKKCPDGKFLEAALQEDPTGNVSATPDLASRASKPAVVESDLLRSKRLRDARAGFRQGSCQKKNCLMCQHKFEGPPPFLPRTSDA

SEQ ID NO: 314124 - protein, 71 aa, Zea mays
  unsure (1)..(71): unsure at all Xaa locations
  Clone ID: MRT4577_49542C.1.pep
TAPGADFYIGXQIPTTDLLYDGVGEAAQIYCELARLGADMLVIDVGGGLGIDYNRTHLAQTDMLVAYSPEE

SEQ ID NO: 314125 - protein, 171 aa, Zea mays
  Clone ID: MRT4577_49543C.1.pep
MSFAAFSWPFRRRGGAGSSGASKSAATAEEDEELGVTPQLLDFLRTLSPDAFKAAALQLQGGSTEAAAGDLTSWQERHAVLVLSKAKELAKIRYDLCPRHLKDKQFWRIYFLLAKSYISPYELRAIQKEKLRRMETENCKPKQVISVEVEMQESKRTSLSQASEVDLESQV

SEQ ID NO: 314126 - protein, 94 aa, Zea mays
  Clone ID: MRT4577_49544C.1.pep
AVDPPAELFRGGPAGAGSMIILFSLEKEAGCYGRRSALGPPLWWLYLMDTAYWPRAGDVRQVEDSRGCHWINIVSAMRRTEPLNSRHTVHVLEV

SEQ ID NO: 314127 - protein, 1122 aa, Zea mays
  Clone ID: MRT4577_49545C.1.pep
MSGDHAKKEMETGDKPTTSHGKASSEESRNKGKGKEKKCSSHKSHRSGDKKKKMRKVVKYETDTSSPSTSGSDAPSVSSKRHGRKKFSKIPLRYPRIPKHTPLLSVLLGKPPTFDGEDYARWSDLMRFHLTSLHKSIWDVVEFGVQVPSVGDEDYDEDEVAQIQHFNSQASTILLASLSREEYNKVQGLKGAKEIWDTLKTAHEGDEVTKITKRETIEGELGRFRLRQGEEPQDMYNRLKTLVNQVRNLGSKKWDDHEMVKVILRSLVFLNPTQVQLICGNPRYTLMTPEEVIGNFHNRSHSKATEEKKAESTPSRTPIDASKLDNEEMVLIIKSFRQILNQRRGKDYKPRSKKVCYKCGKPGHFIAKCPISSDSDRGDDKKGRRKEKKKYYKKKGGDAHVCREWDSNESSTDSSDEDAANIAVTKGLLFPNVGHKCLMAKDGKRKKDDLLDTQEDFLIKENKKRVKVKNAYALEVEKCENYLAKELDVCNVTISDLRDKNDILRAKIVELNSCKPSTSTTEHVTICTRCRDVDVNAIHDHLSMIKQQNDHIAKLDAKIAEHELENEKFKFARSVTVFRRSDDSIAFKGVLEGQLYLVDFDRVELDTCLIAKTNMGWLWHRRLAHVGMKNLHKLLKGEHILGLTNVHFEKDRICSACQAGKQVGAHHPHKNIMTTDRPLELLHMDLFGPIAYISIGGSKYCLVIVDDYSRFTWVFFMQEKSHTQDTLKEFLRRAQNEFGLRIKKIRSDNRTEFKNSQIEGFLEEEGIKHEFSSPYTPQQNGVVERKNRTLLDMARTMLDEYKTSDRFWAEAVNTACYAINRLYLHRILKKTSYELLTGKKPNISYFRVFGSKCFILVKRGRKSKFAPKTVEGFLLGYDSNIRSYRVFNKSSGQVEVSCDVVFDETNGSQVEQVDLDEIGDEEALCIALRNMSFGDVCPKESEEPPNAQDQPSSSTQASPPTQNEDEAQVDEGEVQENEPPQDDGNDQGGEANDQDKEDEEPRPPHPRVHQAIQQDHPIETILGDIHKGVTTRSWVAHFCEHYSFVSSIEPHRVEEALQDSDWMVAMQEELNNFTRNEVWHLVPRPNQNFVGTKWVFRNKQDEHGVVTRNKSRLVAKGYSQVE

SEQ ID NO: 314128 - protein, 88 aa, Zea mays
  Clone ID: MRT4577_49546C.1.pep
KQKHTKGQIIKNINKNRGLFLPPSPVGGNFCNFPSPGGPFGLFFRGPISPFWGCFKNSLAGFSTLGIGKPLGYPNLFPFYKIPFSQIG

SEQ ID NO: 314129 - protein, 414 aa, Zea mays
  unsure (1)..(414): unsure at all Xaa locations
  Clone ID: MRT4577_49547C.1.pep
MDKSQTQETLKGFLRRAQNDFGLRIKKIRRDNGMEFKNSQIEGFLEDEGIKHEFSSPYTPQQNGVVERKNRTLLDMARTMLDEYKTSDRFWAEAINIACYAINRLYLHQILKKTSYELLTDQEEPPQEEDNDQGGDANDQDKEDDQGQRPPHPRVHQAIQRDHPMNSILGDIHKGPYRVEDALRDLDWVLAMQEELNNFTRNEXRLESVRILLAYATYHGFKLXYQMDVKSAFLNGPIKEEVYVEQPPGFEDSEYPNHVYKLSKTLYGLKQAPRAWYECLRDFLIANGFKVRKVDPTLFTKTIANDLFVCQIYVDDIISGSTNKSTCEDFSRIMIQTFEMSMMGELKYFLGFQVKQLQEGTFISQTKYIQDILTKFGMKDAKPIKTPMGTNGHLDLDTGGKSVDQKVYLLGTCS

SEQ ID NO: 314130 - protein, 122 aa, Zea mays
  Clone ID: MRT4577_49548C.1.pep
ESPKPGHSEMGNEEERANIRSVHHHPELDQAEGGGDDSVQADDETRDGEEMCHDANAIQHQVEEQSSSSWEDIDGEGGRGGRSSTRRQSTPPVMAAGKDAPTPTGSRKKREAVSRSSKPSKP

SEQ ID NO: 314131 - protein, 37 aa, Zea mays
  Clone ID: MRT4577_49549C.1.pep
PPFCIYLTLLCSHLLCDYSLEFKNTSFVQNQKNIRLV

SEQ ID NO: 314132 - protein, 106 aa, Zea mays
  Clone ID: MRT4577_4954C.1.pep
EIVGTFIIVYTVFSATDAKMNATYSHVPILAPLPKGFSEFLVHLAYIHITGEGINSAWTLDSSVIYNQLHGSVAHWILWAGPFIAVALGSINPQVIIRAIPFKSRS

SEQ ID NO: 314133 - protein, 863 aa, Zea mays
  unsure (1)..(863): unsure at all Xaa locations
  Clone ID: MRT4577_49550C.1.pep
MRKVVYYETDSSSPSTSGSDMSSVTSKRHERKKFSKIPLHYPRIPKRTPLLFVSLGKPPMFDGEDYNMWSDKMRHHLTSLHTSIWDVVEIGVQVPSPGDEDYDSDEVAQIRHFNSQATTILLASLSREEYNKVQGLKSAKEIWDVLKTAHEGDEVTKITKRETVEGELGRFWVRQGVEPQDMYNRLKTLVNQVRNLGSTKWDDHEMVKTNMGWLWHRRLAHVGMKNLHKLLKGEHILGLTNVHFEKDRVCSACQVGKQVGVHHPHKNIMTTDRPLELLHMDLFGPIAYISIGGRKITNPRDIEGILETGSKLKGKCALGPFLMLETGETISEKLAVYSQKAARSGCTGQCPDHLFTPPLGALKNEFGLRIKKIRSDNGTEFKNSQIEGFLEEEGIKHEFSSPYMPQQNGVVERKNRTLLDMARTMLDEYKTSDQFWAEAINTACYAINRVFGSKCFILVKRGRKSKFAPKAVEGYDSNTRAYRVFNKSTGLVEVSCDIVFDETNGSQVEKVDLDELDDEEALCVALRNMSIGVVCPKESEEPPHAQDQPSSSMQASPPTQDEDQAQEDENEDQEDEPPQEXRAMIKGEMPXDQDKEDDDGTKWVFRNKQDEHSVVTRNKARLVAKGYSQVEGLDFGETYAPVARLESIRILLAYATYHGFKLYQMDVKSAFLNGPIKEEVYVEQPLDFEDSEYPNHVYKLSKALYGLKQAPRAWYECLRDFLISNDFKVGKADPTLFTKTIANDLFVCQIYVDVIIFGSTNKSTCEEFSRIMIQKFEMSMMGELKYFLGFQVKQLQEGTFISQTKYIQDILAKFGMKDAKPIKTPMGTNGHLDLDMGGKFIDQKGVKLIERAHQGLASSWEDL

SEQ ID NO: 314134 - protein, 116 aa, Zea mays
  Clone ID: MRT4577_49551C.1.pep
FPHDPGGFPELKLKEIKNGPPPLFSLLGFFGRAFVPPKGPLKNLPAPISDPVNKKAWAFPPNFVPGKLTRALCLPGCPVNAPFSSVLPVAPVFFKGPLRGTPKLSPQCFFVCPPGA

SEQ ID NO: 314135 - protein, 1128 aa, Zea mays
  Clone ID: MRT4577_49552C.1.pep
MAKDGKKKKVKSRASTKYATSSDEASSSDDEDDLLTLFANLNMQQKEKLNELISAIHEKDELLDSQEDFLIKENKKHVKLNESLSSLKIENDNLIAKAKDLNVCNDSISNLRNENVMLHAKIDELNACKPSTSTVSHVSICTRCRDINVDAIHDHLALIKQQNDHIAQLSAKINEHDLENEKFKFARSMLYSGRRPGIKDGIGFQQGDNVKLNASKKLSNFVKGKAPMVQDNEGYILYPAGYPEHKIRRTHSRKSHSGSHHAFMYKSEASSSRQSTHVKLPKQKSPIASNEPNVSFKTFDASYVLTNKSGKVVVKYVGGKHKGSKTCVWVPKVLVSNVKGPKTVWVYASGGSSWIIDSGCTNHMTGEKMMFSSYEKNNDPQRAITFGDGNQDSLYYNLLYDSQLCKMGYNCRFTDIGVTVFRRSDDSVAFKGVLEGQLYLVDFNRAELDTCLIAKTNMGWLWQRRLAHVGMKNLHKLLKGEHILGLTNVHFEKDREKSQTQETLKGFLRRAQNEFGLRIKKIRSDNGTEFKNSQIEGFLEDEGIKHEFSSPYTPQQNGVVERKNRTLLDMARTMLDEYKTSDRFWAEAVNTACYAINRLYLHRILKKTSYELLTGKKPNVSYFRVFGSKCFILVKRGIKSKFSPKAVEGFLLGYDSNTRAYRVFNKSTGLVEVSCDIVFDETNGSQVEQVDLDELDDEEAPCVALRNMSIGDVCPKESKEPPQAQDQPSSSMQASPPTQDEDQAQDDENEDQEEPPQEEENDQGGDADDQDKEDDQGPRPPHPRVHQAIQRDHPVNSILGDIHKGVTTRSRVTHFCEHYSFVSSIEPYRVEDTLRDSDWVLAMQEELNNFTRNEVWHLVPRPNQNVVGTKWVFRNKQDEHGVMTRNKDRLVAKGYSQVEGLDFDETYAPVARLESIRILLAYATYHGFKLYQMDVKSAFLNRPIKEEVYVEQPPGFEDSEYPNHVYKLSKALYGLKQAPRAWYECLRDFLITNGFKVGKAYPTLFTKTIAKDLFVCQIYVDDIIFGSTNKSTCEEFSRIMIQKFEMSMMGELKYFLGFQVKQLQEGTFISQTKYIQDILTKFGMKDAKPIKTPMGTNGQSVKLIGRAHQGLVSFWEDLWCLGLQRNKI

SEQ ID NO: 314136 - protein, 73 aa, Zea mays
  Clone ID: MRT4577_49553C.1.pep
SFTKSEEFINAQLYTQMLNHLLSCKQPRCTTSICSRHACDYVRIWRNLSRYTSPPIYLTKNPSVRPRVRTRVP

SEQ ID NO: 314137 - protein, 2413 aa, Zea mays
  Clone ID: MRT4577_49554C.1.pep
MSGEHAKKEMETGDKPATSHGKASSEESRNKKKGKEKKASSHKSHRSGDKKKKMRKVVYYETDTSSLSTSGSDAPSITSNRHERKKFSKIPLHYPRTSRHTPLLSVPLGKPPTFDGEDYARWSDLMKFHLTSLHKSIWNVVEFGAQVPSVGDEDYDDDEVAQIEHFNSQATTILLASLSREEYNKVQGLKSAKEVWDVLNTAHEGDELTKITKRETIEGELGRFRLRQWEEPQDMYNRLKTLVNQVRNLGSKKWDDHEVVKVILRSLIFLNPTQVQLIRGNPRYTLMTPEELIGNFVSFEFMIKGSRKINELDGPSTSEAQPVAFKVMKEKKEVSTPSRTPIDASKLDNEEMTLVIKSFRQILKQWRGKDYKPRSKKVCYKCGKPGHFIAKCPISSDSDRGDDKKGRRKEKKRYYKKKGGDAHVCREWDSDESSSDSSDDEDAANIAVTKGLLFPNVGHKCLMAKDGKKKKVKSKSSTRYESSSDDNASDEEDNLHTLFANLNMQQKEKLNELISAIYEKDDLLDSQEDFLIKENKKHVKVKNAYALEVEKCEKLSSELSTCHETVDNLRNENSNLLTKVDSVACNVSIPNLRNDNDDLLAKIEELNMSLASLRIENEKLLAKAKELDVCNATISDLRSRNDILHAKVVQLKSCKPSTSTVEHTTICTRCRDVDINAIHDHMALLKQQNDHIAKLDAKIAEHELENEKFKYARSMLYSGRRPGIKDGIGFQKGDNVKLNAPPKKLSNFVKGKAPMPQDNEGYILYPASYPKSKIRRIHSRKSHSGPNHAFMYKGETSSSRQPTRAKLPKKKTPSASNGHNISFKTFDASYVLTNKSGKVVAKYVGSKHKGSKTCVWVPKVLVSNAKGPKTIWVYASGGSSWIIDSGCTNHMTGEKKMFSSYEKNQDPQRAITFGDGNQGVTVFRRSDDSIAFKGVLEGQLYLVDFDRAELDTCLIAKTNMGWLWHRRLAHVGMKNLHKLLKGEHILGLTNVHFEKDRICSACQTGKQVGAHHPHKNIMTTDRPLELLHMDLFGPIAYISIGGSKYCLVIVDDYSSFTWVFFLQENSHTQETLKGFLRRAQNEFGLRIKKIRSDNGTEFKNSQIEGFLEEEGIKHEFSSPYTPQQNGVVERKNRTLLDMARTMLDEYKTSDRFWAEAVNTSCYAINRLYLHRILKKTSYELLTGKKPNISYFRVFDSKCFILVKRGRKSKFAPKTVEGFLLGYDSNTRAYRVFNKSTGQVEVSCDVVFDETNGSQVEQVDLDEIGDEEAPCIALRNISIGDVCPKESKEPPNAQDQPSSSTQASPPTQNKDEAQIDEGEDQANEPPQDDDNDQGGDANDQDKEDEEPWPPHPRPHRVEEALQDSDWVVAMQEELNNFTRNEVWHLVPRPNQNVVGTKWVFRNKQDEHGVVTRNKARLVAKGYSQVEGLDFGETYAPVARLESIRILLAYATYHGFKLYQMDVKSAFLNGPIKEEVYVEQPPGFEDSEYPNHVYKLSKALYGLKQAPRAWYECLRDFLITNGFKVRKADPTLFTKTLENDLFVCQIYVDDIIFGSTNESTCEEFSRIMTQKFEMSMMGELKYFLGFQVKQLQEGTFLSQTKYTQDILSKFGMKDAKPIKTPMGTNGHLDLDEGAHRARSPPSPRRLPRPQSLLNLPPQGAGGSAAASGGGGRRGRRAGAAAGARLRAGLPGDGSQIRPLSPLTERIQGTTRSCPRPFACFVVLSSPRGDPTYEQEVFLATRCGRRMLDLSRFRDRDRARCRDWCFAAFVLAYATYLDDRLKERMQDRGAGGASPGKWHVDGDPVGMACQVAEAWELVPRGRLVKESAAMYCELTEVMVVLLDRFADLGTPACVRVHSIFTSTAWNLGMLSSRFTDRTAWNLDSALTTVETLASAAICGIVHSIIGGQPLLIVGVAEPTIIMYTYIYNFAKNQPNLGEKMFLPWATWVYIWTAVMLFLMAIFNVAAILNKFTRFAGELFVMLITVLFMQEAIKGMVGEFSAPNAWQRSLIADYGVPLMVILWTSLSYSLPSRIPSGVPRRLFTPLPWEPKSLQHWTVAKDLFSVPTVHIFLAIVPATMVAGLYFFDHTVASQMSQQKEFNLKNPSAYHYDILVLSLTLLRKKMVQTAKEGMMNNATSSEVYVKMQDVFIKMDHGGDTVSAHKEPKDLKDAIIPEGNGSGTVPEVFDPEKHVDAYLPVRVNEQRVSNLLQSLLIAGCIRVTPLIQKIPTSVLWGYFAYMSIDSLPRNQFWERIQLLFITPQRRYKVLEGAHASFMESVPFNTICTFTLFQLIYLLIVFGMTWIPVAGILLPLLFFFFLIIIRQHFIPKYFDPSHLRELDAAEYEELKGFTPDPSVCEDESVRSGDAQPGYASEILEEFTTHRGELKRRNSTFHDGRLLQLNSVKMTRELSRVPSWLT

SEQ ID NO: 314138 - protein, 83 aa, Zea mays
  unsure (1)..(83): unsure at all Xaa locations
  Clone ID: MRT4577_49555C.1.pep
RELGRRQKQPSRSKRRNKINLLGGHNPMMGVNLNIPGKKWWHLFKKGAQLKYGLKDCLLINWGINKLKKCKCLVNIFNLTXKE

SEQ ID NO: 314139 - protein, 548 aa, Zea mays
  unsure (1)..(548): unsure at all Xaa locations
  Clone ID: MRT4577_49556C.1.pep
MSGDHAKKEMETGEKPTTSHGSTSSEESRTKRKEKKDSSKRKEKKSSSSHHKEKKEKSSSHKPHRKGDKHKRMRKVVYYETDTSSTSTSDSDAPSVTSKRQERKKYRDENYDEDEVAQIEHFNSQATTILLASLSREEYNKVQGLKNAKEIWDLLKTAHEGDELTKITKRETIEGELGRFRLRKGEEPQHMYNRLKTLVNQVRNLGSVKWDDHEVVKVILRSLIFLNPTQVQLIRGNPRYTKMTPEEVIGNFVSFECMIEGSRKINELDDATTSEAQPVAFKATEEKKEESTPSRQPIDASKLDNEEMALVIKSFRQILKQRRGKDYKSRSKKVCYKCGKPGHFIAKCPISSDSDRGDDKKGRRKEKKRYYKKKGGDAHICREWDSDESSSDSSDDEDAANIAVTKGLLFPNVGHKCLMAKDGKXRSERAPPTPPPTRTPPTSLSPRDSSSPTSATSASWQRTAXKKVKSRSSTKYETSSDEDDASNEEDNLRVLFANLNMEQKEKLNELISAIHEKDDLLDSQEDFLIKENKKHVKVKNAYALESTC

SEQ ID NO: 314140 - protein, 489 aa, Zea mays
  Clone ID: MRT4577_49557C.1.pep
MSGDHAKKEMETGEKPTTSHRSTSSEESRTKRKEKKDSSKGKEKKKDSSKGKEKKSSSHKEKKEKSSSHKPQRSGDKKKRMRKVVYYETDSSSTSTSGSDAASVTSKRQERKKYSKIPLCYPRISKHTPLLSVPLGKPPTFDGEDYARWSDLMRFHLTSLHKSIWDVVEFGAQVPSVGDEDYDEDEVAQIEHFNSQATTILLASLSREEYNKVQGLKNAKEIWDLLKTAHEGDELTKITKRETIEGELGRFRLRQGEEPQDMYNRLKTLVNQMCNLGSKKWDDHEVVKVILRSLIFLNPTQVQLIRGNPRYTLMTPEEVIENFVSFECMIKGSKKINELDDPSTSEAQPVAFKATEEKKEESTPSRQPIDASKLDNEEMALIIKSFRQILKQRKGKDYKSRSKKVCYKCGKSGHFIAKCPLSSDSDRDNDKKGKRREKKRYHKKRGGDAHVCREWDSDESSTDSSDDEDAANIVVTKGLLFPNVGHKCL

SEQ ID NO: 314141 - protein, 1513 aa, Zea mays
  unsure (1)..(1513): unsure at all Xaa locations
  Clone ID: MRT4577_49558C.1.pep
MSGASAKREMETDTSRGRAPSKESDTKGREESPPRVKSHQSGDKKKKMKKVVYYETDSSLPSTSGSDTSSITSKRHERKKFSKPPVFYGEDYCMWSDKMRHHLTSLYGSIWDVVEFGAQVPSVGDEGYDSDEVAQIRHFNSQATTILLASLSREEYNKVQGLKSAKEIWDVLKTAHEGDEVTKITKRETIEGELGRFILNQGEEPHAMYNRLKTLVNQVRNLGSTKWDDHEMVKVILRSLVFLNPTQVQLIHGDPRYKLMSPEEVIGKFVSFELMIKGSKQIIERGATSTPEQRRGKDYKPRSKKVCYKCGKPGYFIAKCPLSSDSDRGDDKKGKRREKKRYYKKKGGDAHVCREWDSDESSTDSSDEDAANIAVNKGLLFPNVGHKCLMAKDGKKKKVKSRASTKYATSSDEASSSEDEDDLLSLFANLNMQQKEKLNELIGAIHEKDELLDSQEDFLIKENKKHVKVKNAYAQEVEKCELSTCHDTISNLKIENAKLIAKVEKLNVCDDSLVNLKNDNASLIAKIDKLNESLSSLKIENDKLISKAKDLNVCNVSISNLRDENAMLHAKIDELNVCKPSTSIVDHVSICTRCRDINVDIIHDHLALIKQQNDHIAQLSAKINEHERENEKFKFARSMLYSGRRPGIKDGIGFQLEGNVKINAPKKLSNFVKGKAPMVQDNEGYILYPAGYPEHKIRRIHSRESHSGSHHAFMYKSEASSSRQSTHVKLPKKKTPTASNEPIVSFKTFDASYVLTNKSGKVVAKYVEGNHKGSKTCVWVPKVLVSNVKGPKTIWVYASGGSSWIIDSGCKNHMTGEKRMFSSYXENDDSQRAITFGDGNQGKXTQTQETLKGFLRRAQNEFGLRIKKIRSDNGTDFKNSQIEGFLEDEGIKHEFSSPYTPQQNGVVERKNRTLLDMERTMLDEYKTLDWFWAEAINTACYAINRLYLHRILKKTSYELLTDKKPNASYFRVFGSKCFIFVKRGRKSRFAPKAVEGFLLGYDSNTRAYRVFNKSTGLVEVSCDIVFDETNGSQVEQVDLDELDDEEAPCVALRNMSIRDVCPKESEEPTQAQDQPSSSMQASPPTQDKDQAQDNENEDQEEPSQEEDNDQGGDANDQDKEDDEGPRPPHPRVHQAIQRDHPVNSILGDIHKGVTTRSCVAHFCEHYSFVSSIEPYRVEDALKDSDWVLAMQEELNNFTRNEGYSQVEGLDFGETYAPVARLESIRILLAYATYHGFKLYQMDVKSAFLNAPIKEEVYVEQPPGFEDSEYPNHVYKLSKALYGLKQAPRAWYECLRDFLITNGFKVGKADPTLFTKTIANDLFVCQIYVDDIIFGSTNKSTCEEFSRIMIRKFEMSIMGELKYFLGFQVKQLQEGTFISQTKYIQDILTKFGMKNAKPIKTHMGTNGHLDLDTGGKSIDQRVYRSMIGSLLYLCASRPDIMLSVCMCARFQADPKEVHLRAVKRILRYLVHTPKFGLWYPKGSTFDLIGYLDADWAGCKIDRKSTSGTCQFLGR

SEQ ID NO: 314142 - protein, 220 aa, Zea mays
  unsure (1)..(220): unsure at all Xaa locations
  Clone ID: MRT4577_49559C.1.pep
DFRGALGPSPTRPPTRPIETINCFVSPPQAXEATDSRRRCQPWTAVTTSPPCTSRSPSHSPPPSRPPTSTLPSSSRSPRPSKPPSACPMPPPRHHRRKPPQSHPPTPPTPSPSRPPISRAQRRTAATPRPAEPPTPEPPPTPASSRTTPSSPATSLPSPRNSGTTTATTSSAPSSPRPXPAVPRLLQGHGEQGGCGPAGPGPQRRRARRRYLWAAGGGGP

SEQ ID NO: 314143 - protein, 271 aa, Zea mays
  Clone ID: MRT4577_4955C.1.pep
APQPRSDLSAAVSSCPQLEFLPSLSSQFFFSLISPGRPSACGIFLAAQLAPARCQAAGKILPPSRRSVVFIPQPVAFFAVPMPRLHRGAAPAAPLFQLLWWHSVSSRAVISCLDCARLPAPWSRQDPCRARPCTHVFLHTASSNRGVPSSLQLAGRVSPSRSDPAVNAQSCVLFPQLGSRQPPFSNLCLGRRRGVLVDRLVVDLADVVEPSNFVLPCSISSNHESRTLDKNKRGPCASLIKCSVKDFNRRSSSFRASSRNLKSWVKTNLAA

SEQ ID NO: 314144 - protein, 1442 aa, Zea mays
  Clone ID: MRT4577_49560C.1.pep
MAKDGKKKKVKSKSSTRYESSSDDNASDEEDNLRTLFANLNMEQKEKLNELISAIHEKDDLLDSQEDFLIKENKKHVKVKNAYALEIEKCEKLSSELSTCHETIDNLRNENANLLAKVDSHVCNVSITNSRNNNDDLLARIEELNISLASLRIENEKLLAKAKGFDVCNATISDLRTKNDMLHAKVVELKSCKPSTSIVEHVSICTRCRDVDINAIHDHMSLIKQQNDHIAKLDAKIAEHNLENENFKFARSMLYSGRRPSIKDGIGFQRGDNVKLNAPPKRLSNFVKGKTPMPQDNEGYILYPAGYPEDKIRRIHSRKSHPGPNHAFMYKGETSSYRQPTRAKLPKKRTPNASNDHDISFKTFDASYVLTNKSGKVVAKFVGGKHKGSKTCVWVPKVLVSNVKGPKTVWVYASGGSSWILDSGCTNHMTGEKKMFSSYEKNQDPQQAITFGDGNQGVTVFRRSDDSIAFKGVLEGQIYLVDFDRAELDTCLIAKTNMGWLWHRRLAHVGMKNLHKLLKGEHILGLTNVHFEKDRICSACQAGKQVGAHHPHKNIMTTDRPLELLHMDLFGPIAYISIGGSKYCLVIVDDYSRFTWVFFLQEKSQTQETLKGFLRRAQNEFGLRIKKIRSDNGTEFKNSQIEGFLEEEGIKHEFSSPYIPQQNGVVERKNRTLLYMARTMLDEYKTSDRFWAEAVNTACYAINRLYLHRILKKTSYELLTGKKPNISYFRVFGSKCFILFKRGRKSKFAPKTVEGFLLGFDSNTRAYRVFNKSTGQVEVSCDVVFDETNGSQVEQVDLDEVGNEEAPCIALRNMSIGDVCPKESEEPSNAQDQPSSSTQASPPTQNEDEAQVDEGEDQANEPPQDDDNDQGGDANEQDKEDEEQRPPHPRVHQAIQRDHPVDTILGDIHKGVTTRSRIAHFCEHYSFVSSIEPHRVEEALQDSDWMVAMQEELNNFTRNEVCHLVPRPNQNVVGTKWVFRNKQDEHGVVTRDKARLVAKGYSQVEGLDFGETYAPVARLESIHILLAYATYHGFKLYQMDVKSAFLNGPIKEEVYVEQPPDFEDSEYPNHVYKLSKALYGLKQAPRAWYECLRDFLITNGFKVGKADPTLFTKTLENDLFVCQIYVDDIIFGSTNESTCEEFSRIMTQKFEMSMMGELKYFLGFQVKQLQEGTFISQTKYTQDILNKFGMKDVKPIKTPMGTNGHLDLDTGGKSVDQKVYRSMIGSLLYLCASRPDIMLSVCMCARFQADPKEAHLTAVKRILRYLAYTPKFGLWYPRGSTFDLIGYSDADWAGCKINRKSTSGTCQFLGRSLVSWASKKQNSVALSTAEAEYIAAGHCCVQLLWMRQTLRDYGYKLTKVPLLCDNESAIKMADNPVEHSRTKHIAIRYHFLRDHQQKGDIEISYINTKDQLADIFTKPLDEQSFNKLRHELNILDSRNFFC

SEQ ID NO: 314145 - protein, 520 aa, Zea mays
  Clone ID: MRT4577_49561C.1.pep
MERFYYVAVATFVLVFLLHHLLTRKKQQRLPPGPRFAYPILGHLPLLKKPLQTSFADLVSRHGPIIHLRLGRRHAVVVGSAAVAKECFSGELDVAIANRPHFPSAREVTFDYSVLTAVNYGALWRTMRRVSTVHLLSAHRVNVMSDTVIARELRVMVRRLARASASAPGDAARVELKRRLFDLSHSVLMETMAQTRNTYSDDPEEDMSREARDMKDIIEEIIPLVGAANLWNYVPLLRWLDLYGAKRKLADVVNRRDLIFDNMIGAERQKLRQLERKKGEAHASESDKMGMIGVMLSLQKTEPDVYTDTFINALVSNLLAAGTETTSTTLEWAMSLLLNHPDVLKRAQEEIESNVGRDRLLDKNDLPRLPYLHCIISETLRLYPPTPMLLPHEASTDCKIHGYDVPAGSMVLVNAYAIHRDPAMWEDPEEFRPERFELGRAEGKFMMPFGMGRRRCPGENLAMRTMGLVLGALLQCFDWTRVGDREVDMATATGTIMSKAVPLEAQCKPRANMSAVLQKI

SEQ ID NO: 314146 - protein, 1769 aa, Zea mays
  Clone ID: MRT4577_49562C.1.pep
MSGEHAKKEMETGEKPTTSHGSTSSEEFRTKRREKKKSSSNKGKEKKSSSHHKEKKEKSSSHKPHRSGDKQKRMRKVVYYETDTSSTSTSGSDAPSVTSKRQERKKFSKIPLHYPRISKHAPLLSVPLGKPPTFDGEDYARWSDLMRFHLTSLHKSIWDVVEFGAQVPSVGDKDYDEDEVAQIEHFNSQATTILLASLSREEYNKVQGLKSAKEVWDVLKTAHEGDELTKITKRETIEGELGRFRLRKGEEPQHMYNRLKTLVNQVRNLGSTKWDDHEMVKVILRSLIFLNPTQVQLIRGNPRYTKMTPEEVIGNFVSFECMIEGSRKINELDDPSTSEAQPVAFKATEEKKEEATPSRQPIDASKLDNEEMALVIKSFRQILKQRRGKDHKSRSKNVCYKCGKPGHFIAKCPISSDSDRGDNKKERRKEKKRYYKKKGGDAHVCREWDSDESSSDSSDDEDAANIAVTKGLLFPNVGHKCLMAKDGKKKVKSKSSTKYESSSDDNTNDEEDNLRSLFANLNMQQKEKLNELISAIHEKDDLLDTQEDFLIKENKKHVKVKNAYALEIEKCQKLSSELSTCHETIDNLRNENANLLAKVDSHVCNVSIPNPRDNNDDLLARIEELNISLASLRIENEKLLAKAKDFDVCNTTISDLRTKNDILHAKVVELKSCKPSTSTIEHVSICTRCRDVNIDAIHDHMALIKQQNDHIAKLDAKIAEHNLENEKFKFARSMLYNGRRPGIKDGIGFQRGDNVKLSAPPKRLSNFVKGKAPMPQDNEGYILYPASYPESKIRRIHSRKSHSGPNHAFMYKGETSSSRQPTRAKLPRKKTPNASNDHDISFKTFDASYVLTNKSGKVVAKYVGGKHKGSKTCVWVPKVLVSNAKGPKTIWVYASGGSSWILDSGCTNHMTGEKKMFSSYEKNQDPQRAITFGDGNQGLVKGVTVFRRSDDSIAFKGVLEGQLYLVDFDRAELDTCLIAKTNMGWLWHHRLAHVGMKNLHKLLKGEHILGLTNVHFEKDRICSACQAGKQVGSHHPHKNIMTTDRPLELLHMDLFGPIAYISIDGSKYCLVIVDDYSRFTWVFFLQEKSQTQETLKGFLRRAQNEFDLRIKKIRSDNGTEFKNSQIEGFLEEEGIKHEFSSPYTPQQNGVVERKNRTLLDMGRTMLDEYKTSDRFWAEAVNTACYAINRLYLHRILKKTSYELLTSKKPNISYFRVFGSKCFILVKRGRKSKFAPKTVEGFLLGYDSNTRAYRVFNKSTGLVEVSCDVVFDETNGSQVEQVDLDEIGDEEAPCIALRNMSIGDVGPKESEEPPNAQDQPSSSMQASPPTQNEEEAQVDEEEDQSNEPPQDDGIDQGGDANDQDKEDEEQRPPHPRVHQAIQRDHPVDTILGDIHKGVTTRSRVAHFCEHYSFVSSIEPHRVEEALQDSDWVVAMQEELNNFTRNEVWHLVPRPNQNVVGTKWVFRNKQDEHGVVTRNKARLVAKGYSQVEGLDFGETYAPVARLESIRILLAYATYHGFKLYQMDVKSAFLNGPIKEEVYVEQPPGFEDSEYPNHVYKLSKALYGLKQAPRAWYECLRDFLIANGFKVGKADPTLFTKTLEKDLFVCQIYVDDIIFGSTNESTCEEFSRIMTQKFEMSMMGELKYFLGFQVKQLQEGTFISQTKYTQDILNKFGMKDAKPIKTPMGTNGHLDLDTGGTSFVKLHTLLFYIPLIMSLSYAMTNVFFKSISNQVIGVLKGNWSLRRRQRLPLRNSSFADAPSHSPFLGEKA

SEQ ID NO: 314147 - protein, 92 aa, Zea mays
  Clone ID: MRT4577_49563C.1.pep
WQCVWVSATICSIWRSFALCRQQIYIYLLFPSLPCFLLGLLPSFSADSGSRLYLALVLLFNRLMLRLTKISASIVSAHPPAWHSRTFLVCLL

SEQ ID NO: 314148 - protein, 116 aa, Zea mays
  Clone ID: MRT4577_49564C.1.pep
MAGDAPAPYARFFPARSSLRLALSSSSSSLLAMATAPCFSLPCAQLVELSLSLVPRECVPGSDPTRRPPISLRLSLLELPVHALDLQLRHRAPPRACSHRSPSARRRCSGFLLPSP

SEQ ID NO: 314149 - protein, 33 aa, Zea mays
  Clone ID: MRT4577_49565C.1.pep
FRATELLMRWTAPAPSLSCLELPAVVVPSDLRS

SEQ ID NO: 314150 - protein, 78 aa, Zea mays
  Clone ID: MRT4577_49566C.1.pep
PLAHHHLLGHDHYIDVMRVVSLKGIHGARRAKIHEGWAIPQVVDHGVDAVTVVNMAHLARDFLTLPLEDEFKMLDQMS

SEQ ID NO: 314151 - protein, 352 aa, Zea mays
  unsure (1)..(352): unsure at all Xaa locations
  Clone ID: MRT4577_49567C.1.pep
MGNMTRSNSPVSRRIVLSFLDFLNSVEXLLVLILKLWKLLXCLESIFSVNSTATGDAIQPGLLFELFASLEANERDQSDSQVEDTFELDHSGDELFAKFYAALDEINFFKTSPAGAEDPGLLSKATQYFDDALLAMQKLGKKRASLVDIAESFKSRGNEFMRSNQHLKAVELYTCAIALNQQNAIYYCNRAAAYTLLNMNNKAIEDCLKSIEIDPHYSKAYSRLGSAYFAMGNYHDALYKGYLKAAELDPSNENVRQNIEVTKKKLAEQRVPPEEQNTHAGQAQGPHPIFTSGGVPFNLFPPGNEGTQARQASNGLEGEHGEPGIHRDDDVHINLAGTRAAAEALRAVMQML

SEQ ID NO: 314152 - protein, 94 aa, Zea mays
  Clone ID: MRT4577_49568C.1.pep
CPAACCLISPSSTASPVTVRSPLMSPHSCVSSSSIHDLPSTHRASAASAAFLTPLPPSRRARTCKHVRDHRVLHPPHHHHIHHRIQGRGSYVSL

SEQ ID NO: 314153 - protein, 477 aa, Zea mays
  Clone ID: MRT4577_49569C.1.pep
MGNMTRSNSPVSRRIVLSFLDFLNSVELAPGVDPEALEVAKDCLESIFSVNSTATGDAIQPGLLFELFASLEANERDQARAALLSQSVSNKPSQTAGTSNVEEDSNKCTTSNSDSQVEDTFELDHSGDELFAKFYAALDEINFFKTSPAGAEDPGLLSKATQYFDDALLAMQKLGKKRASLVDIAESFKSRGNEFMRSNQHLKAVELYTCAIALNQQNAIYYCNRAAAYTLLNMNNKAIEDCLKSIEIDPHYSKAYSRLGSAYFAMGNYHDALYKGYLKAAELDPSNENVRQNIEVTKKKLAEQRVPPEEQNTHAGQAQGPHPIFTSGGVPFNLFPPGSSPVQEFFAGWSSDVGAPPPGHSISINLNDIFGQANVNASGQGSSQTGNSNNHTPSASFSTGAAVPPPFAFSGSGNEGTQARQASNGLEGEHGEPGIHRDDDVHINLAGPEQAAEALRAVMQMLGPQMGQHEGAPRGPG

SEQ ID NO: 314154 - protein, 143 aa, Zea mays
  Clone ID: MRT4577_4956C.1.pep
LPSRVQQNGAMPLPRRRSRAPLNYFRTSPAYHPVAPASWIKAVRPAPFSSSHSQTSNPPPALARSARLGAIESTRRSSTPRHHLALRGFVRRVDGTPWRHCSGTRDQRGGIARRGSCFVAERRHHVERRPCAAILRRASHCGI

SEQ ID NO: 314155 - protein, 280 aa, Zea mays
  unsure (1)..(280): unsure at all Xaa locations
  Clone ID: MRT4577_49570C.1.pep
TLGPSGSSGHVQGQLLGIVATSALELGIDIGSLDAVIMLGFPYSISSLRQQAGRAGRRQKDSLSVLIGDPWPMDQHYMHFPDEIFLQPDAALSVDLGNDFILESHLQCAAEEMPITLEDDEQYFGSHLSTLCKTRLETDGTGFYYCREELQPNPAHDVAIRGARQDSYCYIDDTPRRPGGAQVMEEVEIERAIFEAFEGAVFMHQGLSYICREINHETRIARMVQADVNYHTRPRDHTNTDAMGDVXIRRLRESXYLAYYGKVTIASYVWGYFKGRSTGE

SEQ ID NO: 314156 - protein, 79 aa, Zea mays
  Clone ID: MRT4577_49571C.1.pep
ISLRVPTYPQHTTTLGCDQTTTMLITRGISLVNFTVASSALAFQVFVLYPWHNKLDDEFKALKQEHLRVLQQINQKKVA

SEQ ID NO: 314157 - protein, 1696 aa, Zea mays
  Clone ID: MRT4577_49572C.1.pep
MSGEHAKKEMETGEKPTTSHGSTSSEEFRTKRREKKKSSSNKGKEKKSSSHHKEKKEKSSSHKPHRSGDKQKRMRKVVYYETDTSSTSTSGSDAPSVTSKRQERKKFSKIPLHYPRISKHAPLLSVPLGKPPTFDGEDYARWSDLMRFHLTSLHKSIWDVVEFGAQVPSVGDKDYDEDEVAQIEHFNSQATTILLASLSREEYNKVQGLKSAKEVWDVLKTAHEGDELTKITKRETIEGELGRFRLRKGEEPQHMYNRLKTLVNQVRNLGSTKWDDHEMVKVILRSLIFLNPTQVQLIRGNPRYTKMTPEEVIGNFVSFECMIEGSRKINELDDPSTSEAQPVAFKATEEKKEEATPSRQPIDASKLDNEEMALVIKSFRQILKQRRGKDHKSRSKNVCYKCGKPGHFIAKCPISSDSDRGDNKKERRKEKKRYYKKKGGDAHVCREWDSDESSSDSSDDEDAANIAVTKGLLFPNVGHKCLMAKDGKKKVKSKSSTKYESSSDDNTNDEEDNLRSLFANLNMQQKEKLNELISAIHEKDDLLDTQEDFLIKENKKHVKVKNAYALEIEKCQKLSSELSTCHETIDNLRNENANLLAKVDSHVCNVSIPNPRDNNDDLLARIEELNISLASLRIENEKLLAKAKDFDVCNTTISDLRTKNDILHAKVVELKSCKPSTSTIEHVSICTRCRDVNIDAIHDHMALIKQQNDHIAKLDAKIAEHNLENEKFKFARSMLYNGRRPGIKDGIGFQRGDNVKLSAPPKRLSNFVKGKAPMPQDNEGYILYPASYPESKIRRIHSRKSHSGPNHAFMYKGETSSSRQPTRAKLPRKKTPNASNDHDISFKTFDASYVLTNKSGKVVAKYVGGKHKGSKTCVWVPKVLVSNAKGPKTIWVYASGGSSWILDSGCTNHMTGEKKMFSSYEKNQDPQRAITFGDGNQGLVKGVTVFRRSDDSIAFKGVLEGQLYLVDFDRAELDTCLIAKTNMGWLWHHRLAHVGMKNLHKLLKGEHILGLTNEKSQTQETLKGFLRRAQNEFDLRIKKIRSDNGTEFKNSQIEGFLEEEGIKHEFSSPYTPQQNGVVERKNRTLLDMGRTMLDEYKTSDRFWAEAVNTACYAINRLYLHRILKKTSYELLTSKKPNISYFRVFGSKCFILVKRGRKSKFAPKTVEGFLLGYDSNTRAYRVFNKSTGLVEVSCDVVFDETNGSQVEQVDLDEIGDEEAPCIALRNMSIGDVGPKESEEPPNAQDQPSSSMQASPPTQNEEEAQVDEEEDQSNEPPQDDGIDQGGDANDQDKEDEEQRPPHPRVHQAIQRDHPVDTILGDIHKGVTTRSRVAHFCEHYSFVSSIEPHRVEEALQDSDWVVAMQEELNNFTRNEVWHLVPRPNQNVVGTKWVFRNKQDEHGVVTRNKARLVAKGYSQVEGLDFGETYAPVARLESIRILLAYATYHGFKLYQMDVKSAFLNGPIKEEVYVEQPPGFEDSEYPNHVYKLSKALYGLKQAPRAWYECLRDFLIANGFKVGKADPTLFTKTLEKDLFVCQIYVDDIIFGSTNESTCEEFSRIMTQKFEMSMMGELKYFLGFQVKQLQEGTFISQTKYTQDILNKFGMKDAKPIKTPMGTNGHLDLDTGGTSFVKLHTLLFYIPLIMSLSYAMTNVFFKSISNQVIGVLKGNWSLRRRQRLPLRNSSFADAPSHSPFLGEKA

SEQ ID NO: 314158 - protein, 597 aa, Zea mays
  Clone ID: MRT4577_49573C.1.pep
MARTMLDEYKTPDRFWAEVINTACYSINRLYLHRILKKTSYELLTDKKPNVSYFRVFGSKCFILIKRGRKSKFAPKVVEGFLLGYDSNTRAYRVFNKSTGLVEVSCDIVFDENNGSQVEQVDLDELDDEEAPCVTLRNMSIGDVCPKESEEPTQAQDQPSFSMQASPPTQDEDQAQNNEEEDQEYEPPQEDDNDQGGDEVDKDKEDDQEVQGQRPPHPRVHQAIQRDHPVNSILGDIHKGRVEDALRDSDWVLAMQEELNNFTRNEVRHLVPRPNQNVVGTKWVFRNKQDEHGVVTRNKARLVGKGYSQVEGLGFGETYALVDRLESIRILLAYATYHGFKLYQMDVKSSFLNGPIKEEVYVEQPPSFEDKFSRIMIQKFEMSMMGELKYFLGFQVKQLQEGTFINQTKYIQDILNKFGMKDAKPIKTPMGTNGHLDLDTGGYSDTDWEGCKIDRKSTSGTCQFLGRSLVSWASKKQTSVALSTAEAEYIAAGHCCAQLLWMRQTLRDYGYKLSKVPLLCDNESAICMADNRVEHRRTKYIDIRYHFLRDHQQKGDIEIAYVSTKEQLADIFTKPLDEKTFTKLRNELNILDSRNFD

SEQ ID NO: 314159 - protein, 1438 aa, Zea mays
  Clone ID: MRT4577_49574C.1.pep
MAKDGKKKVKSKSSTKYESSSDDNASDEEDNLRSLFANLNIAQKEKLNELVSAIHEKDDLLDSQEDYLIKENKKHVKVKNAYALEVEKCNKLSSELSMCHDTIANLRNENAKLIAKVDSHVCIDPRNDNVDLLARIDELNVSIASLRNENEKLIAKAKDIDVCNATISDLRTKNDMLHAKVVELKSCKPSTSNVEHISICTRCRDINVDAIHDHLALIKKQNDHIAQLNAKIREHDSENEKFKLARSMLYNGRRPGIKDGIGFQRRDNVKLNAPPKNLSNFVKGKAPMPQDNEGYILYPAGYPESKIRKIHSRKSHSGPNHAYMYKDETSSSRQPTHAKLPRKKISNASNEHSISFKTFDASYVLTNKSGKVVAKFVGGKHKGSKTCVWVPKVLVSNAKGPKTVWVYASGGSSWILDSGCTNHMTGEKRMFSSYEKNQDPQRAITFGDGNQGVTVFRRSDDSIAFKGVLEGQLYLVDFDRAELDTCLIAKTNMGWLWHRRLAHVGMKNLHKLLKGEHILGLTNVHFEKDRICSACQAGKQVGTHHPHKNIMTTDRPLELLHMDLFGPIAYISIGGSKYCLVIVDDYSRFTWVFFLQEKSQTQETLKGFLRRAQNEFGLRIKKIRSDNGTEFKNSQIEGFLEEEGIKHEFSSPYTPQQNGVVERKNRTLLDMARTMLDEYKTPDRFWAEAVNTACYAINRLYLHRILKKTSYELLTGKKPNISYFRVFGSKCFILIKRGRKSKFAPKTVEGFLLGYDSNTRAYRVFNKSTGLVEVSCDVVFDETNGSQVEQVDLDEVGEEQAPCIALRNMSIGDVCPRESEEPPNAQDQPSSSMQASPPTQNEDEAQVDEGQNQEDEPPQDNGNDQGGDANDQEKEDEEEPRPPHPRVHQAIQRDHPVDTILGDIHKGVTTRSRVAHFCEHYSFVSSIEPHRVEEALQDSDWVVAMQEQLNNFTRNEVWHLVPRPNQNVVGTKWVFRNKQDEHGVVTRNKARLVAKGYSQVEGLDFGETYAPVARLESIRILLAYATYHGFKLYQMDVKSAFLNGPIKEEVYVEQPPGFEDSEYPNHVYRLSKALYGLKQAPRAWYECLRDFLIANGFKVGKADPTLFTKTLENDLFVCQIYVDDIIFGSTNETTCEEFSRIMTQKFEMSMMGELKYFLGFQVKQLQEGTFISQTKYTQDILAKFGMKDAKPIKTPMGTNGHLDLDTGGKSVDQKVYRSMIGSLLYLCASRPDIMLSVCMCARFQSDPKESHLTAVKRILRYLAYTPKFGLWYPRGSTFDLIGYSDADWAGCKINRKSTSGTCQFLGRSLVSWASKKQNSVALSTAEAEYIAAGHCCAQLLWMRQTLRDYGYKLTKVPLLCDNESAIKMADNPVEHSRTKHIAIRYHFLRDHQQKGDIEISYINTKDQLADIFTKPLDEQSFTRLRHELNILDSRNFFC

SEQ ID NO: 314160 - protein, 103 aa, Zea mays
  unsure (1)..(103): unsure at all Xaa locations
  Clone ID: MRT4577_49575C.1.pep
MPEWCSGKGGAKRHXRKVLRDXLQGITKSTMRRLANRGVVKHIFWLIYEETHGVLKIFLENVMRDTVTYTEHARHTTLTAXMDVXVFALPREGRTLYGLRGYD

SEQ ID NO: 314161 - protein, 831 aa, Zea mays
  unsure (1)..(831): unsure at all Xaa locations
  Clone ID: MRT4577_49576C.1.pep
MALIIKSFCQILKQRRGKDYKPRSKKVCYKCDKPGHFIAKCPLSSDSDKGDDKRKKRRXKKRYYKKKGGDAHVCREWDSDESSTDSSSDEDTTNIIVXTKGLLFPNVGHKCLMAKDDKKKVKSRASTKYATSSDEENSSDDEDNLLALFANLNMQQKEKLNELIGAIHEKYELLDNQEDFLIKENKKHVKVKNAYAQEVERCEKLTSELSTCHDIISNLRNENAKLIAKVEKLDVCDDSIVSLRNDNASLITKIDKFNASLSSLKIENKKLIAKAKDLNVCNVSISNLKNENAISHAKIDELNACKPSTSTVSHVSICTRCRDVNVDAIHDNIAMIKQQNDHIEKLDAKIAEHDMENENFKFARSMLYSGRCPGIGFQQGGNVKLNAPKRLSNFVKGKAPMPQDNEGYILYPAGYPEDKIKRIHAKKTHSVSHHAFIYKNEASSSRHSTHVKMPKMKSPIASNDHNISFKTFDASYVLTNKSGKVVAKYVGAKHKGSKTCVWVPKVYASGGSSWIIDSGCTNHMTGEKRMFSSYEKNHDPQRAITFGDGNQGLVKGLGKIAISPGHSISNVFLVDSLDYNLLSVSQLCKMGYNCLFTNIDVTVFRRSDDSVAFKGVLEGQLYLVDFNRAELDTCLIAKTNMGWLWHRRLAHVGMKNFHKLLKGEHILGLTNVHFEKDRICSACQAGKQVDVHHPHKNIMTTDRPLELLHMDLFGPIAYISIDGSKYYLVIVDDYSRFTWVFFLQDKSQTQETLKGFLRWAQNEFGLRIKKIRSDNGTEFKNSQIEGFLEDEGIKHEFSSPYTPQQNGVVERKNRTLLDMTRTKLDEYKTSE

SEQ ID NO: 314162 - protein, 92 aa, Zea mays
  Clone ID: MRT4577_49577C.1.pep
MEERRRPRGSASGWRRPSSRAAGAALRRKVRELRRLVPGGEEAPAGALLVRTADYIVGLRARVDLLRALAAVYGVGVGAVVADAADADACAS

SEQ ID NO: 314163 - protein, 743 aa, Zea mays
  Clone ID: MRT4577_49578C.1.pep
MSGDHAKKEMETGEKPTTSYGSTSSEESRTKRREKKKSSSNKGKEKKSSSHHKEKKEKSSSHKPHRKGDKHKRMRKVVYYETDTSSTSTSDSDAPSVTSKRQERKKYSKIPLRYPRISKHTPLLSVPLGKPPTFDGEDYARWSDLMRFHLISLHKSIWDVVEFGAQVPSVGDENYDEDEVAQIEHFNSQATTILLASLSKEEYNKVQGLKNAKEIWDVLKTAHEGDELTKITKRETIEGELGRFRLQKGEEPQHMYNRLKTLVNQVRNLGSKKWDDHKVVNVILRSLIFLNPTQVQLIRGNPRYTKMTPEEVIGHFVSFECMIEGSRKINELGDPSEAQPVAFKATEEKKEESTPSRQPIDASKLDNEEMALVIKSFRQILKQRRGKDYKSRSKKVCYKCGKPGHFIAKCPISSDSDRGDDKKGRRKEKKRYYKKKGGDAHVCREWDSDESSSDSSDDEDAANIAVTKGLLFPNVGHKCLMAKDGKKKKVKSNSSTKYESSSDDNASDEEDNLRSLFANLNIAQKEKLNELVSAIHEKDDLLDSQEDCLIKENKKHVKVKKAYALEVEKCEKLSSELSTCREMINNLRNENAILNAKVDSHVCNVSIPNLRDDNIDLLAKIDELNASLASLRLENENLIAKAKDFNVCNATISDLRTKNEMLHAKVVELKSCKPSTSNLEHISICTRCRDIDVDAIHDHLALIKKQNDHIAQLNAKISEHDLVNEKFKFARSERELGLHLVPK

SEQ ID NO: 314164 - protein, 1096 aa, Zea mays
  Clone ID: MRT4577_49579C.1.pep
MSGAHAKKEMVTGEKPATSHRKAPSRESGNKREESPPRVKSHRSGDKKKKMKKVVYYETDSLSPSTSGSDAPSVTSKRHERKKFSKIPLRYPRISKRTYLLSVLLGKPPVFNGENYCMWSEKMRHHLTSLHASIWDIVEFAAQEPSVGDEGYDSDEVAQIRHFNSQATTILLASLSREEYNKVQGLKSAKEIWDILKTAHEGDEVTKITKRETIEEELGQFMLHQGEEPQAMYNRLKTLVNQVRNLRSTKWDDHEMVKVILRSLVFLNPTQVQLIRGDPRYKLMSPEEVIGKFVQPVALKVMEEKKEESTSSRLPIDASKLDNEEMALIIKIFRQILNQRRGKDYKPRSKKVCYKCGKPGHFIAKCPISSDSDRGTNKKGRRKEKKKYYKKKGGDAHVCREWDSDEGSTDSSSDEDAANITVNKGLLFPNVGHKCLMAKDGKKKVYASGGSSWIIDSGCTNHMTGEKKMFSSYEKNHDPQRAITFVDEKSQTQETLKGFLRRAQNEFGLRIKKIRSDNGTEFKNSQIEGFLENEGIKHEFSSHYTPQQNGVVERKNRTLLDMARTMLDEYKTSNRFWAEAANTACYAINRLYLHRILKKTSYELLTGKKPNVSYFRVFGSKCFILVKRGRKSKFAPKAVEGFLLDYDSNTRAYRVFNKSTRLVEVSCDNVFDETNGSQVEQVDLDELDDEEAPCVALRNMSIGDVCPKESEDPPHAQDQPSSSNQASPPTQDEDQAQDDENKDQEESPLEEDNDQGRDANDQDKEDDEGPRPPHPRVHQAIQRDHPVNSILGDIHKGVTTRSRVAHFCEHYSFVSSIEPYRVEDALRDSDWVLAMQVELNNFTRNEVWHLVPRPNQNVLGTKWVFRNKQDEHGVVTRNKARLVAKGYSQVEGLDFGETYAPVVRLESIRILHAYATYHGFKLYQMDMKSAFLNGPIKEEVYVEQPPSFEDKFSRIMVQKFEMSMMGELKYFLGFQVKQLQEGTFISQTKYIQDILTKFGMKDAKPIKTPMGTNGHLDLDTGGKSVDQKVYRSMIGSLLYLCASRPDIMLSVCMCARFQVDPKEVHLRAMKRILRYLVHTPKFGLWYPKGSTFDLIG

SEQ ID NO: 314165 - protein, 178 aa, Zea mays
  Clone ID: MRT4577_4957C.1.pep
MMMMMDRQLVRQCDMEVMRMAMLKHEETFRQQVHELHRLYRIQRELMSDLITTRYDDEPLLLTTAGRRSKQPRRALDLQLPADEYIVSADEESDAAGAELELTLAVGGRCADGAGRRKSNRRRRQLAERQQRDNNAAAGGGSSPFGSDCSGASALSFAAFVRVLLRRPRGGGVPKAAF

SEQ ID NO: 314166 - protein, 91 aa, Zea mays
  Clone ID: MRT4577_49580C.1.pep
RLLMAKIGLFSLQERDRGRVEFKMIQSDIRYCPWLLCHNYILCYWLVYYRCVLVAPHSCASFIQWPPACGPRQPIQFELNVTCALAENHIV

SEQ ID NO: 314167 - protein, 50 aa, Zea mays
  Clone ID: MRT4577_49581C.1.pep
AIVVTSCDVTIYLMWAISPPNHGKNMAGCLKDSRRTGAYRRECCCCHREH

SEQ ID NO: 314168 - protein, 1622 aa, Zea mays
  Clone ID: MRT4577_49582C.1.pep
MSGEHAKKEMETGDKPATSHGKASSEESRNKKKGKEKKASSHKSHRSGDKKKKMRKVVYYETDTSSPSTSGSDAPSITSKRHERKKFSKIPLHYPRTSRHTPLLSVPLGKPPTFDGEDYARWSDLMKFHLTSLHKSIWNVVEFGAQVPSVGDEDYDEDEVAQIEHFNSQATTILIASLSREEYNKVQGLKSAKEVWDVLKTAHEGDELTKITKREMIEGELCRFHLRQGEEPQDMYNRLKTLVNQVRNLGSKKWDDHEVVKVILRSLIFLNPTQVQLIRGNPRYTLMTPEEVIGNFVSFEFMIKGSRKINELDGPSTSKAQPVAFKATEEKKEESTPSRTPIDASKLDNEEMALVIKSFRQILKQRRGKDYKPRSKKVCYKCGKPSHFIAKCPISSDSDRGDDKKGRRKEKKWYYKKKGGDAHVCREWDSDESSSDSSDDEDAANIAVTKGLLFPNVGHKCLMAKDDKKKKVKSKSSTRYESSSDDNASDEEDNLRTLFANLNMQQKEKLNELISAIHEKDDLLDSQEDFLIKENKKHVKVKNSYALEVEKCEKLSSELSTCHETIDNLRNENANLLAKVDSIACNVSIPNLRNDNDDLLAKIEELNMSLASLRIENEKLHAKVVELKSCKPSTSIVEHTSICTRCRDVDVNAIHDHMALIKQQNDRIAKLDAKIAEHEHENEKFKFARSMIYSGRRPGIKDGIGFQKGNNVKLNAPPKKLSNFVKGKAPMPQDNEGYILYPAGYPESKIRRIHSRKSHSGPNHAFMYKGETSSSKQPTRAKLPKKKTPNASNDHDISFKTFDASYVLTNKSGKVYASGGSSWIIDSGCTNHMTGEKKMFSSYEKNQDPQRAITFGDGNQGVTVFRRSDDSIAFKGVLEGQLYLVDFDRAELDTCLIAKTNMGWLWHRRLAHVGMKNLHKLLKGEHILGLTNVHFEKDRICSACQAGKQVGAHHPHKNIMTTDRPLELLHMDLFGPIAYISIGGKTLKGFLRQAQNEFGLRIKKIRSDNGTEFKNSQIEGFLEEEGIKHEFSSPYTPQQNGVVERKNRTLLDMARTMLDEYKTSDRFWAEAVNTACYAINQLYLHRILKKTSYELLTGKKPNISYFRVFGSKCFILVKRGRKSKFAPKTVEGFLLGYDSNTRAYRVFNKSSRQVEVSCDVVFDETNGSQVEQVDLDEIGDEEAPCIALRNMSIGDDEAQVDEVQDQANEPPQDDDNDQGGDAHDQDKEDEEPRPPHPRVHQAIQRDHPVDTILGDIHKGVTTRSRVAHFCEHYSFVSSIEPHRVEEALQDSNWVVAMQEELNNFTRNEVWHLVPRPNQNVVGTKWVFRNKQDEHGVVIRNKARLVAKGYSQVEGLDFGETYAPVARLESIRILLAYATYHGFKLYQMDVKSAFLNGPIKEEVYIEQPPGFEDSEYPNHVYKLSKALYGLKQAPRAWYECLRDFLITNGFKVGKVDPTLFTKTLENDLFVCQIYVDDIIFGCTNESTCEEFSRIMTQKFEMSMMGELKYFLGFQVKQLQEGTFLSQTKYTQDILSKFGMKDAKPIKTPMGTNGHLDLDEGGKFVDQKVYRSMIGSLLYLCASRLDIMLSVCMCARFQADPKEAHLTAVKRILRFLVYTPKFGL

SEQ ID NO: 314169 - protein, 59 aa, Zea mays
  Clone ID: MRT4577_49583C.1.pep
RLSSGFLQVFWLEGHERHITGLVLLTLCGQVITKMIEFKIKLGIGNKVYGSILIVEIFA

SEQ ID NO: 314170 - protein, 48 aa, Zea mays
  Clone ID: MRT4577_49584C.1.pep
GTARRYIGIVKQAGLERMMPGAYSTGYGGYEEYSGLSDGYGFTTDLFG

SEQ ID NO: 314171 - protein, 342 aa, Zea mays
  Clone ID: MRT4577_49585C.1.pep
METGDKPTTSHGSTSSEESRTKRKEKKKSSSNKGKEKKSSSHHKEKKEKSSSHKPHRSGDKHKRMRKVVYYETDTSSTSTSGSDAPSVTSKRQERDEDYDTDEVAQIEHFNSQATTILLASLSKEEYNKVQGLKNAKEIWDLLKTAHEGDELTKITKRETIEGELGRFRLRQGEEPQDMYNRLKTLVNQERNLGSKKWDDHEVVKVILRALIFLNPTQVQLIRGNPRYPLMTPEEVIENFVSFECMIKGSKKINELDEPSTSEAQPVAFKATEEKKEESTPSRQPIDASKLDNEEMALIIKSFRQILKQRRGKDYKPRSKKVCYKCGKPGHFIAKCPISSDS

SEQ ID NO: 314172 - protein, 163 aa, Zea mays
  unsure (1)..(163): unsure at all Xaa locations
  Clone ID: MRT4577_49586C.1.pep
STFDLIGYSDADWAGCKIDRKSTXSGTCQFLGEPLVSWASKKQNFIALSTTEAEYIAAGHCCVQLLWMRQTLRDYGYKLTNVPLLCDNESAIRMADNPVEHSRTKHIAVRYHFLRDHQQRGDIEIAYVSTKEQSVDIFTKPLDEKTFTKLRHELNILDSRNFD

SEQ ID NO: 314173 - protein, 1575 aa, Zea mays
  unsure (1)..(1575): unsure at all Xaa locations
  Clone ID: MRT4577_49587C.1.pep
MSGDHAKKEMETDEKPTTSNGSTSSEESRTKRREKKKSSSNKEKEKKSSSHHKEKKEKSSSHKPHRSGDKQKRMRKVVYYETDTSSTSTSGSDAPSVTSKRQERKKFSKIPLHYPRISKHAPLLSVPLGKPPTFDGEDYARWSDLMRFHLSSLHKSIWDVVEFGAQVPSVGDKDYDEDEVAQIEHFNSQATTILLASLSREEYNKVQGLKSAKEVWDVLKTAHEGDELTKITKRETIEGELGRFRLRKGEEPQHMYNRLKTLVNQVRNLGSIKWDDHEVVKVILRSLIFLNPTQVQLIRGSRKINELDDPTTSKAQPVAFKATEEKKEESTPSRQPIDASKLDNEEMALVIKSFRQILKQRRGKDYKSRSKKVCYKCGKPGHFIAKCPISSDSDRGDDKKGRRKEKKRYYKKKGGDAHVCREWDSDESSSDSSDDEDAANIAVTKGLLFPNVGHKCLMAKDGKRKKVKSNSSTKYESSSDDNASDEEDNLRSLFANLNIAQKEKLNELVSAIREKDDILDSQEDLLIKENKKHVKVKKAYALEIEKCEKLSSELSTCCEMIDNLKHENARLNAKNISLASLRVENENLIAKAKDFDVCKVTISDLRDKNDILHAKIVELNSCKPSTSTVEHTSICTRCRDVNIDAIHDHITLIKQQNDHIAKLDAKIAEHNLENEKFKFARSMLYSGRRPGIKDGIGFQRGDNVKLSAPPKRLSNFVKGKAPMPQDNEGYILYPAGYPESKIRRIHSRKSHSGPNHAFMYKGETSSSRQPTRAKLTKKTPSASNEHSLSFKTFDASYVLTNKSGKVYASGGSSWILDSGCTNHMTGEKKMFSSYEKNQDPQRAITFGDGNQGLVKGVTVFRRSDDSIAFKGVLEGQLYLVDFDRAELDTCLIAKTNMGWLWHRRLAHVGMKNLHKLLKGEHILGLTNVHFEKDREKSQTQETLKGFLRRAQNEFGLRIKKIRSDNGTEFKNSQIESFLEEEGIKHEFSSPYTPQQNGVVERKNRTLLDMARTMLDEYKTSDRFWAEAVNTACYAINRLYLHRILKKTSYELLTGKKPNISYFRVFGSKCFILVKRGRKSKFAPKTVEGFLLGYDSNTRAYRVFNKSTGLVEVSCDVVFDETNGSQVEQVDLDEIGIEEAPCIAIRNMSIVDVCPKEFEEPPNAQDQPSSSMQASPPTQNEEEAQVDEEEDQSNEPTQDDGIDQGGDANDQDKEDEEQRPPHPRVHQAIQRDHPIDTILGDIHKGVTTRSRVAHFCEHYSFVSSIEPHRVEEALQDSDWVVAMQEELNNFTRNEVWHLVPRPNQNVVGTKWVFRNKQDEHGVVTRNKARLVAKGYSQVEGLDFGETYAPVARLESIRILLAYATYHGFKLYQMDVKSAFLNGPIKEEVYVEQPPGFEDSEYPNHVYKLSKALYGLKQAPRAWYECLRDFLIANGFKVGKADPTLFTKTLKNDLFVCQIYVDDIIFGSTNESTCEEFSRIMTQKFEMSMMGEFKYFLGFQVKQLQEGTFISQTKYTQDILNKFGMKDAKPIKTPMGTNGHLDLDTGGKSVDQKXFKPSHRCIERELESSAKTKASTT

SEQ ID NO: 314174 - protein, 76 aa, Zea mays
  Clone ID: MRT4577_49588C.1.pep
LSWAPTQIRTPFEFLFDMNYLGVPKPWDLNVQLLGLQTPVWLALPAVCGFIRKSLQQGFRWFLQEVGSLHSIEGQP

SEQ ID NO: 314175 - protein, 260 aa, Zea mays
  Clone ID: MRT4577_49589C.1.pep
MASRLGVVLALAAVVLLAAAGAAAGQSTPRPPNAQGPKPKPKPMKVKCTENRKENPYCFNRNMDCPANCPQSCYPDCNTCKPVCVCNTPGACGDPRFIGGDGNAFYFHGRRDADFCVVSDRDLHINAHFIGKSGHSGMSRDFTWIQAIAVLFDGHRLYLGARKTGTWDDAVEHLDITLDGEPVYLPADLIEGAKWTSSRVPELSVTRTKAANGVLVTVAGKFSVRANAVPITEEESRVHRYGVTADDCLAHLEAGVPSST

SEQ ID NO: 314176 - protein, 46 aa, Zea mays
  Clone ID: MRT4577_4958C.1.pep
HEMPCMLHDNSCTHYFYLLLIDQHKKNTLVSNCTATAFIALALVRS

SEQ ID NO: 314177 - protein, 94 aa, Zea mays
  Clone ID: MRT4577_49590C.1.pep
DKNDDICIFFLEHALNKSLDSKMDQIQHLFMEASSRHTKKGPSKRKIVLSIIHGGPYGFVYHSWWSFWIVNSLMHSGSFLEEIEVEGQPSFLYL

SEQ ID NO: 314178 - protein, 34 aa, Zea mays
  Clone ID: MRT4577_49591C.1.pep
LASVQCYVLINAEFTYLSSLNSGTCLFWMPCQCE

SEQ ID NO: 314179 - protein, 235 aa, Zea mays
  unsure (1)..(235): unsure at all Xaa locations
  Clone ID: MRT4577_49592C.1.pep
MASRLGVVLALAAVVLLAAAAAAAXNPGTHPPNAQGPKPKPKPMKVKCTENRKENPYCFNRNMDCPANCPQSCYPDCNTCKPVCGNHSIFLHVLTMELLTYVDFVGEWFWFVPSXVCNTPGACGDPRFIGGDGNAFYFHGRRDADFCVVSDRDLHINAHFIGKSGHSGMSRDFTWIQAIAVLFDGHRLYLGARKTGTWDDAVEHLDITLDGEHVYLXPLTSSTSSRVPELSVTRT

SEQ ID NO: 314180 - protein, 29 aa, Zea mays
  Clone ID: MRT4577_49593C.1.pep
RGAYGHFGRDDPDFTWEVVKPLKWEKPFA

SEQ ID NO: 314181 - protein, 70 aa, Zea mays
  Clone ID: MRT4577_49594C.1.pep
THTHTSTENSEEFLFIMGVQSNEGQMMFFFIALLQKKFTELERITEKREERLLHLLPPGPVGTTFPPTRS

SEQ ID NO: 314182 - protein, 87 aa, Zea mays
  unsure (1)..(87): unsure at all Xaa locations
  Clone ID: MRT4577_49595C.1.pep
FFPLVLVSGPPLVGPSAAXAGXXFSVASPALAFGCGGAAVSVWAACCXXAGALLALFWWFPGGCXCSPRSGGPSPCLAPGGVLXXXG

SEQ ID NO: 314183 - protein, 71 aa, Zea mays
  unsure (1)..(71): unsure at all Xaa locations
  Clone ID: MRT4577_49596C.1.pep
VYRVLLLLSLAGAYPYTTSXHSNDPMILLLCPGGDDNNLALITKSHFIRFMPTLGKPYKDCHENTYQVSGF

SEQ ID NO: 314184 - protein, 85 aa, Zea mays
  Clone ID: MRT4577_49597C.1.pep
TSPGTAAPHARSRCRGCGPAHTTERRSSGPARPRASKAPPPVAQTASSATAMTATCSHRAVAIYSLPRIPRARAGPRVEWRGVAP

SEQ ID NO: 314185 - protein, 46 aa, Zea mays
  Clone ID: MRT4577_49598C.1.pep
TEGRSQLCPPFVDHSRFPYGVHNQVIKQTLAQTNRPSKLHKRVLSC

SEQ ID NO: 314186 - protein, 27 aa, Zea mays
  Clone ID: MRT4577_49599C.1.pep
MATIATMALLKPAAMARGAVGAVHQKR

SEQ ID NO: 314187 - protein, 81 aa, Zea mays
  unsure (1)..(81): unsure at all Xaa locations
  Clone ID: MRT4577_4959C.1.pep
SIARFIKAGKYDKKCHHGAPVYLNNVLEYLALQVRQLLGNAARHHHKSGIVTRHMQLAVRKAKNLCLVLGXVAITIAGVMP

SEQ ID NO: 314188 - protein, 53 aa, Zea mays
  Clone ID: MRT4577_495C.1.pep
YFHLSRCGCSIAENINPLIHSEEMKPSMETVSLKQTCARMVMLLACLTGYMMT

SEQ ID NO: 314189 - protein, 156 aa, Zea mays
  Clone ID: MRT4577_49600C.1.pep
DSLLGQDWETATDTEDSFDEDRLTPGAEFKQRAVAIYELYQNQYQRRFKWIRPDLFTPELADNLEQDAKSLINILKISGRWNADEDGKLQSLIRLLTEEHPDEKILIFTQFADTARYLAQALETAGITNIGLATGNSQIDPTILAQRFSPRSNGKA

SEQ ID NO: 314190 - protein, 103 aa, Zea mays
  Clone ID: MRT4577_49601C.1.pep
KREGKPSGGCRAVSGGSMNPARTLGPALASNLYTGLWIYFLGPVLGTLSGAWTYTFIRFDEAPSKDASSSHSQKLSSFKLRRLQSQSVAADADDDEDLDHIQV

SEQ ID NO: 314191 - protein, 203 aa, Zea mays
  Clone ID: MRT4577_49602C.1.pep
MAANAGNKIRNAKLVLLGDVGAGKSSLVLRFVKGQFVEFQESTIGAAFFSQTLAVNDETVKFEIWDTAGQERYHSLAPMYYRGAAAAIVVYDITNPASFTRAKKWVQELQAQGNQNTIVALAGNKVDMLDARHVAVEEAKTYAQENGLFFMETSAKTAINVNDIFYEIAKRLLQGQEAPSPQAGIVLNQRPDERMVSTSSCCS

SEQ ID NO: 314192 - protein, 234 aa, Zea mays
  unsure (1)..(234): unsure at all Xaa locations
  Clone ID: MRT4577_49603C.1.pep
LQFPIRLLACGLIRLKVPREHSPNPASNPMAASAGSKIRNAKLVLLGDVGAGKSSLVLRFVKGQFVEFQESTIGAAFFSQTLAVNDETVKFEIWDTAGQERYHSLAPMYYRGAAAAIVVYDISNQASFTRAKKWVQELQAQGNQNTVVALAGNKADLLEAREVQIEEAKTYAQENGLFFMETSAKTATNVNDIFYEIAKRLLQGQAAQNPQAAGMVLSQRPXERVVSAASCCSS

SEQ ID NO: 314193 - protein, 203 aa, Zea mays
  Clone ID: MRT4577_49604C.1.pep
MAASAGSKIRNAKLVLLGDVGAGKSSLVLRFVKGQFVECPGSDGVEKFFSQTLAVNDETVKFEIWDTAGQERYHSLAPMYYRGAAAAIVVYDITNPASFTRAKKWVQELQAQGNPNTIVALAGNKVDMLDARHVAVEEAKTYAQENGLFFMETSAKTAINVNDIFYEIAKRLLQGQEAPSPQAGIVLNQRPDERMVSTSSCCS

SEQ ID NO: 314194 - protein, 76 aa, Zea mays
  Clone ID: MRT4577_49605C.1.pep
ANKHMNADADATLFYLEVVGICVLRSYHVEAKRWWFIPYNYRHGKLPYCLAKAKLNATHIRCPWSVCMYLLMERAS

SEQ ID NO: 314195 - protein, 203 aa, Zea mays
  Clone ID: MRT4577_49606C.1.pep
MAANAGNKIRNAKLVLLGDVGAGKSSLVLRFVKGQFVEFQESTIGAAFFSQTLAVNDETVKFEIWDTAGQERYHSLAPMYYRGAAAAIVVYDITNPASFTRAKKWVQELQAQGNQNTIVALAGNKADMLDARQVPAEEAKAYAQENGLFFMETSAKTAINVNDIFYEIAKKLLQGQQAPSPQAGMVLNQRPNERTVSSSSCCS

SEQ ID NO: 314196 - protein, 75 aa, Zea mays
  Clone ID: MRT4577_49607C.1.pep
HNRFFSGLNSNSIPRLKSPLNLRKGQREKRKKEFSFIEKTFRWCGVPFQGGGGTGLWHSGTAHLRAGDQSRVLGV

SEQ ID NO: 314197 - protein, 30 aa, Zea mays
  Clone ID: MRT4577_49608C.1.pep
KKKTSSVKVHLKQTKHVQYVIKLVKLKIVS

SEQ ID NO: 314198 - protein, 148 aa, Zea mays
  unsure (1)..(148): unsure at all Xaa locations
  Clone ID: MRT4577_49609C.1.pep
VVVVXVLWGXPRXXLCXVSPXPPLXCLVXXXRGLGXLXXVLLXXVRXXVVXXAPCPVPVVXSPXPXGXSXRXXAWXXCCXXXGWPXXAPXXVSPPPXPCXXXXFXCXXXXXXAXXXPWLPCLCCCXXAVYXFXGLPLWLXCLFXPPPG

SEQ ID NO: 314199 - protein, 109 aa, Zea mays
  unsure (1)..(109): unsure at all Xaa locations
  Clone ID: MRT4577_4960C.1.pep
MPFDMVSRRTMPSSSLAFLVALLLLSCSTTMSSAARYLLEETKPAPHPTTVPEIPNNKPELPPHPTVPEVPKXPELPPHPTTVPELLEPELPPHPTVPELPKPELPSPH

SEQ ID NO: 314200 - protein, 92 aa, Zea mays
  Clone ID: MRT4577_49610C.1.pep
LDSSNGRHGICLTISDAIQETDPPSLVFRVEISEDDTGSKCVLARARLSRGYLTATAGTASLPATMTTNQRMTAWLKLCICVNHRSSSRFSL

SEQ ID NO: 314201 - protein, 71 aa, Zea mays
  Clone ID: MRT4577_49611C.1.pep
RTDTQNRRQSSNPRINQACLVQCHYCWWTSPAGLILTTIQDDKSIISTRYSSVRSQCHTTWNPEPLGTHHG

SEQ ID NO: 314202 - protein, 957 aa, Zea mays
  Clone ID: MRT4577_49612C.1.pep
MSGDHAKKEMETGEKPTTSHVSTSSEESRTKRKEKKKISSNKGKEKKSSSHHKEKKEKSSSHKPRRSGDKQKRMRKVVYYETDTSSTSTSDSDAPSVTSKRQERKKFSKIPLHYPRISKHAPLLSVPLGKPPTFDGEDYARWSDLMRFHLTSLHKSIWDVVEFGAQVPSVGDKDYDEDEVAQIEHFNSQATTILLASLSREEYNKVQGLKSAKEVWDVLKTAHEGDELTKITKRETIEGELGRFRLRKGEEPQHMYNRLKTLVNQVRNLGSVKWDDHEMVKVILRSLIFLNPTQVQLIRGNPRYTKMTPEEVIGHFVSFECMIEGSRKINELDDPSTSEAQPVAFKATEEKKEESTPSRQPIDASKLDNEEMALVIKSFRQILKQRRGKDYKSCSKKVCYKCGKPGHFIAKCPISSDSDRGDDKKGRRKEKKKYYKKKGGDAHVCREWDSDESSSDSSDDEDAANIAVTKGLLFPNVGHKCLMAKDGKRKKVKSNSSTKYESSSDDNNSDEEDNLRVLFANLNMEQKEKLNELISAIHEKDDLLDSQEDCLIKENKKHVKVKKAYALEVEKCEKLSSELSTCREMIDNLRNENASLNTKVDSHVCIVSTSNPRDNNDDLLARIEKLNTSLASLRVENDNLIPKAKDFDVCNVTISDLRDKNDILRAKIVELNSCKPSTSTIEHVSICDRCRDIDVNAIHDHMSLIKQQNDHIAKLDAKIAEHNLENEKFKFARSMLYNGRRPGIKDGIGFQRGDNDKLNAPPKNLSNFVKDKAPMPQDNEGYILYPAGYPESKIRKIHSRKSHSGPNHAFMYKGETSSSRQPTRAKLPRKKTPNASNDHTISFKTFDASYVLTNKSGKIVAKFVGGKHKGSKACVWVPKDIVSNAKGPKTVWVYASGGSSWILDSGCTNHMTGEKKMFSSYEKNQDPQRAITFGDGNQGVTVFRRSDDSIAFKGVLE

SEQ ID NO: 314203 - protein, 206 aa, Zea mays
  Clone ID: MRT4577_49613C.1.pep
MGELKYFLGFQVKQLQERTFISQTKYIQNILSKFGMKDAKPIKTPMGTNGHLDLDTGGCKINRKSTSRTCQFLGRSLVSWASKKQNSVALSTAEAEYIAAGHYCAQLLWMRQTLRDYGYKLTKVPLLCDNESAIRMANNPVEHSRTKHIAIRYHFLRDHQQKGDIEIAYVNTKEQLADIFTKPLDEQTFNKLRHELNPRGSSSARP

SEQ ID NO: 314204 - protein, 202 aa, Zea mays
  unsure (1)..(202): unsure at all Xaa locations
  Clone ID: MRT4577_49614C.1.pep
AGNVQGGDANDQDKEDDEPRPPHPRVHQAIQRDHPIDXKGVTTRSRVAHFCEHYSFVSSIEPHRVEEALQDSDWVMAMQEELNNFTRNEVWHLVPRPNQNVVGTKWVFRNKQDEHGVVTRNKARLVAKGYSQVEGLDFXETYAPVARLESIRILLAYATYHGFKLNQMDVKSAFLXNGPXKEEVYVEQXSXFEDSEYLPGRP

SEQ ID NO: 314205 - protein, 965 aa, Zea mays
  Clone ID: MRT4577_49615C.1.pep
MSGDHAKKEMETDDKPTTSHGSTSSEESRTKRKEKRKDSSKGKKSSSHSKGKEKKSSSHHKEKKEKSSSHKPHRSGDKKKRMRKVVYYETDSSSTSTSGSDAASVTSKRQERKKYSKIPLRYPHISKHTLLLSVPLGKPPTFDGEDYARWSDLMRFHLTSLHKSIWDVVEFGAQVPSVGDEDYDEDEVAQIEHFNSQATTILLASLSKEEYNKVQGLKNAKEIWDLLKTAHEGDELTKITKRETIEGELGRFRLRQGEEPQDMYNRLKTLVNQVRNLGSKKWDDHEVVKVILRSLIFLNPTQVQLIRGNPRYTLMTPEEVIGNFVSFECMIKGSKKINELDDPSTSEAQPVAFKATEEKKEESAPSRQPIDASKLDNEKMALIIKSFRQIHKQRKGKDYKSRSKKVCYKCGKPGHFIAKCPLSSDSDRDNDKKGKRREKKRYHKKRGGDAHVCREWDSDESSTESSSDEDAANIAVTKGLLFPNVGHKCLMANDGKKKKVKSKSSTRYESSSDENASDEEDNLHTLFANLNMEQKEKLNELISAIHEKDDLLDSQEDFLIKENKKHVKVKNAYALQIEKCEKLSSELSTCHETIDNLRNENGKLLAKVDSHVCIDSISNPRDDNVDLLARIDELNISLDSLRIENEKLIAKAKDFDVCNTTISDLRTKNDMLHAKVVELKSCKPSTSTVEHTSICTRCRDVDINAIHGHMALIKQQNDHIAILDAKIVEHNLENEKFKFARSMLYNGRRPSIKDGIGYQKGDNVKLSAPPKRLSNFVKGKAPMPQDNEGYILYPAGYPESKIRRIHSRKSHSGSNHAFMYKGETSSSRQPTRAKLPRKKTPNASNDHDISFKTFDASYVLTNKSGKIVAKFVGGKHKGSKTCVWVPKVLVSNAKGPKTVWVYASGGSSWILNSGCTNHMTGEKKMFSSYEKNQDPQRAITFGDGNQGVTVFRRSDDSIAFKGVLE

SEQ ID NO: 314206 - protein, 1869 aa, Zea mays
  Clone ID: MRT4577_49616C.1.pep
MSGDHAKKEMETGEKPTTSHGSTSSEESRTKRKEKKKSSSNKGKEKKSSSHHKEKKERSSSHKPHRRGDKHKRMRKVVYYETDTSSASTSNSDAPSVTSKRQERKKFSKIPLHYPRISKNAHLLSVPLGKPPTFDGEDYARWSDLMRFHLTSLHKSIWDVVEFGAQVPSVGDKDYDEDEVAQIEHFNSQATTILLASLSREEYNKVQGLKSAKEVWDVLKTAHEGDELTKITKRETIEGELGRFRLRKGEEPQHMYNRLKTLVNQVRNLGSVKWDDHEMVKIYTKMTPEEVIGNFVSFECMIEGSRKINELDDSTTSEAQPVAFKATEEKKEEATPSRQPIDASKLDNEEMALVIKSFRQILKQRRGKDYKPRSKKVCYKCGKPGHFIAKCPISSDSDRGDDKKGRRKEKKKYYKKKGGDAHVCREWDSDESSSDSSDDEDAANIAVTKGLLFPNVGHKCLMAKDGKRKKVKSNSSTKYESSSDDNDSDEEDNLRVLFANLNMEQKEKLNDLISAIHEKDDLLDSQEDCLIKENKKHVKVKKAYALEVEKCEKLSSELSTCREMIDNLRNENASLNAKIDSHVCIVSTFNPKNNNDDLLAKIEELNISLASLRVENDNLITKAKDYDVCKVTISDLRDKNDILHAKIVELNSCKPSTSIVEHVSICTRCRDVDVNAIHDHMALIKQQNDHIAKLDAKIAEHNLENEKFKFARSMLYNGRRPGIKDGIGFQKGDNDKLNAPPKNLSNFVKGKAPMPQDNEGYILYPAGYPESKIRKIHSRKSHSGPNHAFMYKGETSSSRQPTRAKLPRKKTPNASNDHDISFKTFDASYVLTNKSGKVYASGGSSWILDSGCTNHMTGEKKMFSSYEKNQDPQRAITFGDGNQGVTVFRRSDDSIAFKGVLEDQLYLVDFDRAELDTCLIAKTNMGWLWHRRLAHVGMKNLHKLLKGEHILGLTNVHFEKDRICSACQAGKQVGTQHPHKNIMTTDRPLELLHMDLFGPIVYISIGGSKYCLVIVDDYSRFTWVFFLQEKSQTQETLKGFLRRAQNEFGLRIKKIRSDNGTEFKNSQIEGFLEEEGIKHEFSSPYTPQQNGVVERKNRTLLDMARTMLDEYKTSDRFWAEAVNTACYAINRLYLHRILKKTSYELLTGKKPNISYFRVFGSKCFILVKRGRKSKFAPKTVEGFLLGYDSNTRAYRVFNKSTGLVEVSCDVVFDETNGSQVEQVDLDEIGEEQAPCIALRNMSIGDVCPKESEEPPHAQDQPSSSTLASPPTQNEDEAQVDEVEDQANEPPQDDDNNQGGDANDQDKEDEEQKPPHPRVHQAIQRDHPVDTILGDIHKGVTTRSRVAHFCEHYSFVSSIEPHRVEEALQDSDWVVAMQEELNNFTRNEVWHLVPRPNQNVVGTKWVFRNKQDEHGVVTRNKARLVAKGYSQVEGLDFGETYAPVARLESIRILLAYATYHGFKLYQMDVKSAFLNGPIKEEVYVEQPPGFENSEYPNHVYKLSKALYGLKQAPRAWYECLRDFLIANGFKVGKADPTLFTKTLKNDLFVCQIYVDDIIFGSTNESTCEEFSRIMTQKFEMSMMGELKYFLGFQVKQLQEGTFISQTKYTQDILNKFGMKDAKPIKTPMGTNGHLDLDTGGKSVDQKVYRSMIGSLLYLCASRPDIMLSVCMCARFQSDPKESHLTAVKRILRYLAYSPKFGLWYPRGSTFDLIGYSDADWAGCKINRKSTSGTCQFLGRSLVSWASKKQNSVALSTAEAEYIAAGHCCAQLLWMRQTLRDYGYKLTKVPLLCDIESAIKMADNPVEHSRTKHIAIRYHFLRDRQQKGDIEISYINTKDQLADIFTKPLDEQTFTKLRHELNILDSRNFFC

SEQ ID NO: 314207 - protein, 890 aa, Zea mays
  Clone ID: MRT4577_49617C.1.pep
METGDKPTTSQGSTSSEESRTKRKEKKKSSSNKGKEKKPSSHHKEKKEKSSSHKSHRSGDQHKRMRKVVYYETDTSSTSTSGSDAPSVTSKRQERKKFSKIPLHYPRTSRHTPLLSVPLGKLPTFDGEDYARWSDLMKFHLTSLHKSIWNVVEFGAQVPSVGDEDYDEDEVAQIEHFNSQATTILLASLSKEEYNKVQGLKNAKEIWDLLKTAHEGDELTKITKRETIEGELGRFRLRQGEEPQDMYNRLKTLVNQVRNLGSKKWDDHEVVKVILRSLIFLNPTQVQLIHGNPRYTQMTPEEVIGNFVSFECMIKGSKKINELDEPSTSEAQPVAFKATEEKKEESTPSRQPIDASKLDNEEMALIIKSFRQILKQRKGKDYKSRSRKVCYKCGKPDHFIAKCPLSSDSDRDNDKKGKRKEKKRYHKRRGGDAHVCREWNSDESSTDSSSDKDAANIAVTKGLLFPNVGHKCLMAKDSKRKKVKSRSSTKYETSSDEDDASNEEDNLHVLFANLNMEQKEKLNELISAIHEKDDLLDSQEDFLIKENKKHVKVKNAYALEVENCEKLSSELSTCHDTITNLRNENASLNTKVDSHVCNVSIPNLRNDNDDLLAKIEELNISLASLRVENENLIAKAKELDVCNVTISDLRDNNDILRAKIVELNSCKPSTSSVEHVSVCTRCRDVDIDAIHDHMTLIKQQNDHIAILDAKIAEHNLENEKFKFARSMLYNGRRPGIKDGIGFQRGDTVKLNAPPKRLSNFVKGKTPMPQDNEGYILYPAGYPEDKIRRIHSRKSHSGPNHAFMYKGETSSSRQPTRAKLPKKKTPSASNEHSLSFKTFDASYVLTNKSGKVVAKYVGGKHKGSKTCVWVPKVLVSNAKGPKTIWVPKVKN

SEQ ID NO: 314208 - protein, 1385 aa, Zea mays
  unsure (1)..(1385): unsure at all Xaa locations
  Clone ID: MRT4577_49618C.1.pep
MTGGDKSASLGRTHSRESGHKHKEESSSSIKSQRRGDKKKKMKKVVYYETDSSSPSTSGSESASITSKRHERKQYSKMPLRYPCISKRTPLLSVPQGKPPFFDGEDYCMWSDKMRHHLTSLHKAYGTLLSMERRYKLMSHEEVIRKFVSFELMIKGSKQIVEQGGTSTPEVQPVAFKATEEKKEESTSSRLPIDASKLDNEEMALIIKSFRQILKQRRGKDYKPRSKKVCYKCGKSGHFIAKCPLSSDSDRGDDKKGERKEKKSSTDSSFDEDVANIAVNKGLLFPNVGHKCLMAKDGKRKNVKSRASIKYTTSSDEGSSSEDEDDLLTLFANLNMQQKEKLNELIGVIHEKDELLDSQEEFLIKENKKHVKVKNAYAQEVEKCENLTNELSICHDTVSNLRNENASLIAKVEKSNVCNDSIINLRNENANLIVKIDKLNESLSSLKNENDSLILKAKDLIVCNDSISCLRDKNVMLKSKIDELKSCKPSTSTVDHVSICMRCRDINVDAIHDHLALIKEQNDHIAQLTAKINEHKIENENFKFARSMLYNGRRPGINDGIGFQQGSNVKLNVPKRLSNFVKGKAPMAQDNKGYILYPAGYPEHKIRRIHARKSHSVSHHAFMYKNEASISRHSTHVKMPKKKTPTASNEPNVSFKTLDALYVLTNKSGKVVAKYVGGKHKGSKTCVWVPKVYASGGSSWIIDSGCTNHMTGEKRMFSCYEKNDDPQIAITFGDGNQGLEKSQTQETLKGFFRRAQNEFGLRIKKIRSDNETEFKNSQIEGFLEEEGIKHEFSSPYTPQQNGVVERKNRTLLDMARTMLDEYKSPDRFWAEAINTACYSINRLYLYRILKKTSYELLTGKKPNVSYFRVFDSKCFILIKRGRKSKFAPKVVEGFLLGYDSNTRAYRVFNKSTRLVEVSCDIVFDETNGSQVEQVDLDELDDEEALCVALRNMSIGXVCPKESEEPPQAQDQPSSSMQASPPTQDEDQAQDNEEEDQEDESPQEEGNDQGXGDDNDQDKEDDQEVQGPRPPHPRVHQVIQRDHPVNSILGDIHKGPYMVEDALRDSDWVLAMQEELNNFIRNEWVFRNKQDEHGVVIRNKAQLVAKGYSQVEGLDFGETYALVARLESIHILLAYATYHGFKLYQMDVKSAFLNGPIKEEVYVEQPPGFEDSEYPNHVYKLSKAFYGLKQAPRACQTKYIQDLLTKFGMKDAKPIKTPMGTNGHLDLDTGGYSDADWAGCKIDRKSTSGTCQFLGRSLVSWASKKQNSVALSTAEAEYIVACHCCAQLLWMRQTLRDYGYKFSKVPLLCDNESAIRMADNPIEHNRTKHIAIRYHFLRDHQQRGDIEIAYVSTKEQLADIFTKPLDEKIFTKLRNELNNLDSRNFD

SEQ ID NO: 314209 - protein, 112 aa, Zea mays
  Clone ID: MRT4577_49619C.1.pep
MATPLIAGLAVAAAALAGRYSIQAWNAYKARPVVPRMRKFYEGGFQPTMTRREAALILGVRETASAEKVKEAHKRVMVANHPDAGGSHYLASKINEAKDVMTGKTKGGGSAF

SEQ ID NO: 314210 - protein, 69 aa, Zea mays
  unsure (1)..(69): unsure at all Xaa locations
  Clone ID: MRT4577_4961C.1.pep
NASHLIDNRHCVSSPVFFTVLFGFNSLDMVSCYIGFRNIRKLSPQLFVXXKNIVTIFRRFLLPLVNCAR

SEQ ID NO: 314211 - protein, 1445 aa, Zea mays
  Clone ID: MRT4577_49620C.1.pep
MYNRLKTLVNQVRNLGSKKWDDHEMVKVILISLVFLNPTQVQLIRGNPRYTLMSPKEVIGNFVSFELMIKGSRKINELDGPSMFEAQPVIFKATEEKKEESTSSRQPIDASKLDNEEMALIIKSFRQILKQRRGKDYKSRSKKVCYKCGKSGHFIAKCPLSSDSDRGDDKKGRRKEKKRYYKKKGGDAHICREWDSDESSTDSSSDEDAANIAVTKGILFPNVGHKCLMAKDGKRKKVKSRSSTKYETSSDEDNASDEEDNLRTLFANLNMQQKEKLNKLISDIHEKDDLLDSQEDFLIKENKKHVKVKNAYALEVEKCEKLSSELSTCHDVITNLRNENANLIAKVDSNVCDASIPNLTNDNVDLLAKIEELNISLASLRIKNEKLLAKAKELDVCNASTSNLRSENDILHAKIVELKTCKPSTSTVEHVSICTRCRDVDIDAIRDHMVLIKQQNDHIAKLDAKIAEHELENEKFKFARSMLYSGRRPGIKDGIGFQKGDNVKINAPPKRLSNFVKGKAPMPQDNEGYILYPAGYPESKIRRIHSRKSHSSPNHAFMYKGETSSSRQSTRAKLLRNKNPIASNDHNISFKVFDASYVLTNKSGKVYASGGSSWIIDSGCTNHMTGEKKMFSSYEKNHDPQRAITFGDGNQDSLDYNLLSVSQLCKMGYNCLFTDIGVTVFRRSDDSIAFKRVLEGQLYLVDFDRAELDTCLIAKTNMGWLWHRRLAHVGMKNLHKLLKGEHILGLTNVHFEKDRICSACQAGKQVGVHHPHKNIMTTDRPLELLHMDLFGPIAYISIGGSKYCLVIVDDYSRFTWVLFLQEKSHTQETLKGFLRRAQNEFGLRIKKIRSDNGTEFKNSQIEGFLEEEGIKHEFSSPYTPQQNGVVERKNRTLLDMARTVLNEYKTSDRFWAEAVNTACYAINRLYLHRILKKTSYELLTSKKPNISYFRVFGSKCFILVKRGRKSKFAPKTVEGFLLGYDSNTRAYRVFNKSSGQVEVSCDVVFDETNGSQVEQVDLDEIGDQEAPCIALRNMSNGDVCPKESKEPPNAQDQPSSSTQASPPTQDEDKAQNDDGEDQEIEPPQDDENDQGGDANDQDKEDEVPRPPHPRVHQAIQRDHPVDTIIGDIHKGVTTRSRVAHFCEHYSFVSSIEPHRVEEALQDSDWVVAMQEELNNFTRNEVWHLVPRPNQNVVGTKWVFRNKQDEHGVVTRNKARLVAKGYSQVEGLDFGETYAPVARLESIRILLAYATYHGFKLYQMDVKSAFLNGPIKEEVYVEQPPSFEDSEYPNHVYKLSKALYGLKQAPRAWSTNESTCEEFSRIMTQKFEMSMMGELKYFLGFQVKQLQEATFIRQTKYIQDILNKFGMKDAKPIKTPMGTNGHLDLDTGGKSVDQKKEHIGDLPVLGKILGVLGFKEAKFCSSFYRRSRVYCRMPLLRATTLDEANP

SEQ ID NO: 314212 - protein, 692 aa, Zea mays
  Clone ID: MRT4577_49621C.1.pep
MAYSCALWTAASVVAFLVIRVAEARYGGPGQWRGRCPWRPQHPQTRGHGGPRANLSRDHRRVGDGAGWPDKSQTQETLKGFLKRAQNEFVLRIKKIRSDNGMEFKNSQIEGFLEDEGIKHEFSSPYSPQQNGVVERKNRTLLDMARTMLDEYKTSDRFWAEAINTTCYAINRLYLHRILKKTSYELLTGKKPNVSYFRVFGSKCFILVKRGRKSKFAPKAVEGFLLGYDSNTRAYRVFNKSTIKGEMPMIKTRKKIRPYRVEDALRDSDWVLAMQEELNNFTRNDVWHLVPCPNQNVVGTKWVFCNKQDENGVVTRNKARLVAKGYSQVEGLDFDETYAPIARLESIRILLAYATYHGFNLYQMDVKSAFLNGPIKEEVYVEQPPGFEDSEYPNHVYKLSKALYGLKQTPRAWYECLRDFLITNGFKVGKYDPTLFTKTIANDLLVCQIYVDDIIFGSTNKSTCEEFSRIMIQKFEMSMMGELKYFLGFQVKQLQEGTFISQTKYIQDILTKFGMKDAKPIKTPMGINGHLDLDTGGYSDADWAGCKIDRKSTSGICQFLGRSLVSWPSKKQNSVALSTVEAEYIAAGHCCAQLLWMRQTLRDYGYKLTKVPLLCDNESAIRMADNPVEHNRTKHIAIQYHFLRDHQQRGDIEHAYVSTKEQLADIFTKPLDEKTFTKLRNELNILDSRNFD

SEQ ID NO: 314213 - protein, 74 aa, Zea mays
  Clone ID: MRT4577_49622C.1.pep
LGTSRPAGTPVSPFPASFDQPAHLPLSRVPRSHLCHHLSYPIYHLIVVSHVPSQLHSVASSRHDLDPICSSWVW

SEQ ID NO: 314214 - protein, 197 aa, Zea mays
  unsure (1)..(197): unsure at all Xaa locations
  Clone ID: MRT4577_49623C.1.pep
NACVKLLACDVRTIWLQVVVFLLPPGATIPLHNHPGMTVFSKLLLGSLRVTSYDWAXPTNVPSPXRRSPTXRLAKLVLDADLSAPCDALVLFPESGGNMHRFAAATACAVLDVLGPPYSGDRDCTYYQDLPYRRHIDDTDEAAGDEEQKPRLGWLLETRKPKELHMYEVPYRGPPILWKRRPAFDSWRRQQQQHKGQ

SEQ ID NO: 314215 - protein, 1895 aa, Zea mays
  Clone ID: MRT4577_49624C.1.pep
MSGDHAKKEMETGEKPTTSHGSTSSEESRTKRREKKKSSSNKGKEKKSSSHHKEKKERSSSHKPHRSGDKQKRMRKVVYYETDTSSTSTSDSDAPSITSKRQERKKFSKIPLHYPRISKHAPLLSVPLGKPPTFDGEDYAMWSDLMRFHLTSFHKSIWDVVEFGAQVPSVGDKDYDEDEVAQIEHFNSQATTILLASLSREEYNKVQGLKSAKEVWDVLKTAHEGDELTKITKRETIEGELGRFRLRKGEEPQHMYNRLKTLVNQVRNLGSVKWDDHEMVKVILRSLIFLNPTQVQLIRGNPRYTKMTPEEVIGHFVSFECMIEGSRKINELDDPSTSEAQPVAFKATEDKKEESTPSRQPIDASKLDNEEMALVIKSFRQILKQRRGKDYKSRSKKVCYKCGKPGHFIAKCPISSDSDRGDDKKGRRKEKKRYYKKKGGDAHVCREWDSDESSSDSSDDEDAANIAVTKGLLFPNVGHKCLMAKDGKRKKVKSRSSTKYETSSDENASDEEDNLRTLFANLNIAQKEKLNELVSAIHEKDDLLDSQEDLLIKENKKHVKVKNAYALEIEKCEKLSSELSTCREMIDNLRNENASLNTKVNSHVCNVSTSNPKDNNDDLLARIEELNISLASLRIENENLIAKAKDFDVCKVAISDLRDKNDILHAKIVELNSCKPSTSIVEHVSICTRCRDVDINAIHDHMALIKQQNDHIAKLDAKIAEHNLENEKFKFARSMLYNGRRPGIKDGIGFQKGDNVKNNAPPKRLSNFVKGKAPMPQDNEGYILYPAGYPESKIRRIHSRKSHSGPNHAFMYKGETSSSRQPTYAKLPRKKIPNASNDHNISFKTFDASYVLTNKSGKVYASGGSSWILDSGCTNHMTGEKKMFSSYEKNQDPQRAITFGDGNQGLVKGVTVFRRSDDSIAFKGVLEGQLYLVVFDRAELDTCLIAKTNMGWLWHRRLAHVGMKNLHKLLKGEHILGLTNVHFEKDRICSACQAGKQVGSHHPHKNIMTTDRPLELLHMDLFGPIACISIGGSKYYLVIVDDYSRFTWVFFLQEKSQTQETLKGFLRRAQNEFGLRIKKIRSDNGTEFKNSQIEGFLEEEGIKHEFSSPYTPQQNGVVERKNRTLLDMARTMLDEYKTPDRFWAEAVNTACYAINRLYLHRILKKTSYELLTGKKPNISYFRVFGSKCFILVKRGRKSKFAPKTVEGFLLGYDSNTRAYRVFNKSSGLVEVSCDVVFDETNGSQVEQVDLDEIGEKQAPCIALRNMSIGDVCPKESEEPPHTQDQPSSSTLASPPTQNENEAQVDEEEDQSNEPPQDDGNDQGGDANNQEKEDKQEPRPPHPRVHQAIQRDHPVDTILGDIHKGVTTRSRVAHFCEHYSFVSSIEPHRIEEALQDSDWVVAMQEELNNFTRNEVWHLVPRPNQNVVGTKWVFRNKQDEHGVVTRNKARLVAKGYSQVEGLDFGETYAPVARLESIRILLAYATYHGFKLYQMDVKSAFLNGPIKEEVYVEQPPGFEDSEYPNHVYKLSKALYGLKQAPRAWYECLRDFLIDNGFKVGKADPTLFTKTLENDLFVCQIYVDDIIFGSTNESTCEEFSRIMTQKFEMSMMGELKYFLGFQVKQLQEGTFISQTKYTQDILNKFGMKDAKPIKTPMGTNGHLDLDTGGKSVDQKVYRSMIGSLLYLCASRPDIMLSVCMCARFQADPKEAHLTAVKRILRYLAYTPKFGLWYPRGSTFDLIGYSDADWAGCKINRKSTSGTCQFLGRSLVSWASKKQNSVALSTAEAEYIAAGHCCAQLLWMRQTLRDYGYKLTKVPLLCDNESAIKMADNPVEHSRTKHIAIRYHFLRDHQQKGDIEISYINTKDQLADIFTKPLDEQSFNKLRHELNILDSRNFFC

SEQ ID NO: 314216 - protein, 217 aa, Zea mays
  Clone ID: MRT4577_49625C.1.pep
MEEPCAQDAELSNQREPSSDATAMEIEAVALEQDSRIICKNMEATTVEGSHTLDSGLSSDLAKVNETHAAREIKNQEVLDVDMKVAMSVCGEYQINSIGMEDVNSTKGSQNQECLDQKEDHIMEERVECEVREGSGVSYEEACELGGGRVKASGVAVDVSGPVLNKEACNTEELQAREDKKRHGVGHVNEKRVLEETSMIDTGELKSDSTVMENSMA

SEQ ID NO: 314217 - protein, 217 aa, Zea mays
  Clone ID: MRT4577_49626C.1.pep
SGIPASTTRPPKTQQPLGHLSLAPNYALKNLIMQWCDKNKVEIHSGDPPPEPPEDPKVVIPTLVKDLSSPNLDVQRKAVKKIRTLSKENPENRLLVTDNAGIPALIGLLPYPDKKMQENTVTSLLNLSIDEANKLLIARGGAIPLIIDVLRNGSVEGQENSAAALFSLSMVDENKVAIGTLGGIPPLVDLLQNGTVRGKKDASTAIFNLMLNNGNKL

SEQ ID NO: 314218 - protein, 315 aa, Zea mays
  Clone ID: MRT4577_49627C.1.pep
MGEEEKAKEAAPPADKVKEAEEKKGEGGGGEEKKNEAPSLPPPPPEEVVMRVFMHCEGCARKVKKILKGFDGVEDVIADTKAHKVVVKGKKAAADPMKVVERVQKKTGRKVELLSPMPPPKEEKKEEEKKEEPEPPKTEKKEEATVLAVVLKVHMHCEACTQVIKKRILKMKGVQSVEADLKASQVTVKGVFEEAKLSDYVYRRTGKHAAIVKSEPVAAENVDDGNAKDDKKAAEGGEEKKDDGKEEKKDEDKKEADKQKDDGNAGDEGKDKDPGAVANMYMHYPRSNHLSEYGYAYQYPPQLFSDENPNACSLM

SEQ ID NO: 314219 - protein, 51 aa, Zea mays
  Clone ID: MRT4577_49628C.1.pep
ANLPARVLLYYYKDIYYNEPTTYLPICTPAMLIIRTTIFFLALPTYSAINK

SEQ ID NO: 314220 - protein, 187 aa, Zea mays
  unsure (1)..(187): unsure at all Xaa locations
  Clone ID: MRT4577_49629C.1.pep
KKKKNLKLKKKKKKKKKKKKKIKRKTNLKKTKFKGGGFFIGSIFFCAALRNFTFFLLTPKLILLALVLQNLIWXNLGVFKLNGFVQNTLFPSWVKNKKASTIFLSKHFLRLIWNWDPPCLVPLNPVYLGVTYIGTFTFSTAPRPALLSFFLSFFLTGAGFXRXVLNVGFLLGFKFLVLRSLYPKKLF

SEQ ID NO: 314221 - protein, 48 aa, Zea mays
  Clone ID: MRT4577_4962C.1.pep
PVCCPCISSYVAGGVPAITKLRTQTDPVVQMVVFHALKDGAYALSGQG

SEQ ID NO: 314222 - protein, 90 aa, Zea mays
  Clone ID: MRT4577_49630C.1.pep
GRVTIGMINVIAIAFAFARTVYSDNPRWGKFIGGGFFSFWVLAHLYPFAKGLMGRRGKTPTIVFVWSGLISITISLLWVAISPPEASAGG

SEQ ID NO: 314223 - protein, 887 aa, Zea mays
  Clone ID: MRT4577_49631C.1.pep
MRLLPDSPLLLCVVLVFTAIPSEQDSSGVLGTSQSQAGGSNALPAAGCPRSCGNLTFDYPFGIGSNCSRSPAFSLTCDSTTQTPRLYFEDDSITEVVAYGSTWLQISLSQAIPIMHGGVVSTYNMSWKSSGSGFTLFYANLNITGCDFDIYQLQDRHASSVKLCTVTCPDAGITDKVARQNCNGTGCCSVNLDVLEAFQLQFVLRSHGRARLGTHTSRSSLWDSINVTSTDAEILWSIVDQPTCASAMDDSANYACVSNHSNCYDGLGGRLDLGYICRCDGGYRGNPYVPNGCSRDKGYNPKEQKENCQRSCGNISVPFPFGLEEGCFARRLFQLNCTNTASSSLQFDDEHQVTRIHINEGLVDIKYTPLYEQEMFRVYVSNEPGLYIGSGESSSVQWAVANLTCHEAMQNKSGYACVSISSTCLGVNSTDDYIGYRCKCLHGFQGNPYIHNGCQALPINGESTKKQNLLLGIVIGLSSGIGILLLGLCATVLLRKWKRDIKKQQRKKYFQKNKGLLLEQLISSDENASEKTKIFTLEDLEKATNNFDPTRIIGHGGHGMVYKGILSDQRVVAIKRSKNIEEGEISQFINEVAILSQINHRNIVKLFGCCLETEVPLLVYDFISNGSLFEILHSSSSSGFSLSWDDCLRIAAEAAGALYYLHSAASVSIFHRDVKSSNILLDSNYTAKVSDFGASRLVPIDQTHVVTNIQGTFGYLDPEYYHTGQLNDKSDVYSFGVVLVELLLRREPIITSETGSKQNLSNYFLWEMKTRPTKEIVATQVCEEATEEEINSIASLAEMCLRLNSGERPTMKQVEMNLQLLRTKRSNSCHVVQDNAEEIQPLLCTGAESRYETFSITLGGSSNAESQYSQRFNSLEHDFKSSLGTPH

SEQ ID NO: 314224 - protein, 73 aa, Zea mays
  unsure (1)..(73): unsure at all Xaa locations
  Clone ID: MRT4577_49632C.1.pep
PRXRAAGGGGGHPPPQREXRGAXKQSAPPTXGGQXPSLFFXEGVRAREXQHKLXGAAPAHYWSRGDNELQTPK

SEQ ID NO: 314225 - protein, 101 aa, Zea mays
  Clone ID: MRT4577_49633C.1.pep
RAAARAGLKKTKDEDNKTKFFLWLFPFFGPILGEFLKVSFKGAFVWRRAYWGPSSPFWDSLYNSFARVNCENPCVTPVIPHLNHLPLHTCFNSWGARKEVP

SEQ ID NO: 314226 - protein, 152 aa, Zea mays
  Clone ID: MRT4577_49634C.1.pep
MASTAYSRPSKPPGPAAGDRSGPRLAKELGRIEPKKLGIGLVAGCCFALLTYLSFARLFAIYSPVFDSSSSMVLKNMPPATTTVPGTATGALPVEEQKEVRDPEADPHMPNLPEVTEKDQQEEATATKPAGGAIITEAKITCDENGVDEGFP

SEQ ID NO: 314227 - protein, 528 aa, Zea mays
  Clone ID: MRT4577_49635C.1.pep
MASTAYSRPSKPPGPAAGDRSGPRLAKELGRIEPKKLGIGLVAGCCFALLTYLSFARLFAIYSPVFDSSSSMVLKNMPPATTTVPGTATGALPVEEQKEVRDPEADPHMPNLPEVTEKDQQEEATATKPAGGAIITEAKITCDENGVDEGFPYARPPVCELAGDIRVSPKEKTMYFVNPSGAGPFDSNGEKKIRPFARKDDFLLPGVVEVTIKSVSSAAAAPRCTRRHDVPVVVFSVAGYTDNFFHDNTDVLIPLFLTTAHPRVRVQLLVTNYKPWWVRKFTPLLRKLSNYDVIDFGKDDEVHCFRAGHLGMYRDRDLIISPHPTRNPRNYSMVDYNRFLRRAFNLPRDAPAVLGEETSAKPQMLIIERKGTRKLLNLPEVSALCEALGFAVTVAEADADVRVFAEKVNAADVLLAVHGAGLTNQIFLPTGAVLVQIVPWGKMDWMATNFYGQPARDMRLRYVEYYVSEEETTLKDKYPRDHYVFKDPMHIHAQGWPAIAEIIMKQDVMVNMTRFKPFLLQALNELQD

SEQ ID NO: 314228 - protein, 64 aa, Zea mays
  unsure (1)..(64): unsure at all Xaa locations
  Clone ID: MRT4577_49636C.1.pep
IVITQIQGLMFSTSAEFHCVILLRTSLAAVKSSSFFRSSIRAXLALLLXXNLFSKPVKIQFKKK

SEQ ID NO: 314229 - protein, 249 aa, Zea mays
  Clone ID: MRT4577_49637C.1.pep
MASTAYSRPSKPPGPAAGDRSGPRLAKELGRIEPKKLGIGLVAGCCFALLTYLSFARLFAIYSPVFDSSSSMVLKNMPPATTTVPGTATGALPVEEQKEVRDPEADPHMPNLPEVTEKDQQEEATATKPEAKITCDENGVDEGFPYARPPVCELAGDIRVSPKEKTMYFVNPSGAGPFDSNGEKKIRPFARKDDFLLPGVVEVTIKSVSSAAAAPRCTRRHDVPVVVFSVAGYTDNFFHDNTDVLIPLL

SEQ ID NO: 314230 - protein, 102 aa, Zea mays
  Clone ID: MRT4577_49638C.1.pep
VVLPGEGLPNILLGLRGVCMSVVGLEGWAHRVCGCVGEGVVVRGHTGAPSVKEVLADAHCGCYLGMVHGEAALRSSCQVLGRGRWTTAAVGRRKSPGPAGPG

SEQ ID NO: 314231 - protein, 43 aa, Zea mays
  Clone ID: MRT4577_49639C.1.pep
AQTTVTNFSHYMTAGTGTGSNRGPRHSEDEEPVRLAQLANRTP

SEQ ID NO: 314232 - protein, 149 aa, Zea mays; identical to SEQ ID NO: 274315
  Clone ID: MRT4577_4963C.1.pep

SEQ ID NO: 314233 - protein, 261 aa, Zea mays
  unsure (1)..(261): unsure at all Xaa locations
  Clone ID: MRT4577_49640C.1.pep
MASTAYSRPSKPPGPAAGDRSGPRLAKELGRIEPKKLGIGLVAGCCFALLTYLSFARLFAIYSPVFDSSSSMVLKNMPPATTTVPGTATGALPVEQKAQVEEQKEVRDPEADPHMPNLPEVTEKDQQEEATATKPAGGAIITEAKITCDENGVDEGFPYARPPVCELAGDIRVSPKEKTMYFVNPSGAGPFDSNGEKKIRPFARKDDFLLPGVVEVTIKSVSSAAAAPRCTRRHDVPXVVFSVAGYTDNFFHDXTDVLIPL

SEQ ID NO: 314234 - protein, 190 aa, Zea mays
  unsure (1)..(190): unsure at all Xaa locations
  Clone ID: MRT4577_49641C.1.pep
MNRAADSSSSMVLKNMPPATTTVPGTATGALPVEQKAQVEEQKEVRDPEADPHMPNLPEVTEKDQQEEATATKPAGGAIITEAKITCDENGVRRGLPVRTGPPVCELAGDIRVSPKEKTMYFVNPSGAGPFDSNGEKKIRPFARKDDFLLXRRRGGHDQVRVLGAXRAAVRRRHDVPGGGLLPWRVHGHF

SEQ ID NO: 314235 - protein, 80 aa, Zea mays
  Clone ID: MRT4577_49642C.1.pep
LIGGPSRVRGASKAKPSYPIERSLPNRCSGQWVQPPRWFSLSSEHACEKPVRIKIEGPGSQVKSIIFYFFDDPKKRKFPS

SEQ ID NO: 314236 - protein, 68 aa, Zea mays
  Clone ID: MRT4577_49643C.1.pep
GTLGSGMSHQGAPFMVGKKDPNHPSFESSPPPPTPPFISMGAPSVWSINSDGVTPRAVFLQIMNPKGR

SEQ ID NO: 314237 - protein, 121 aa, Zea mays
  Clone ID: MRT4577_49644C.1.pep
MALIIKSFRQILKQRRGEDYKSHSKMVCYKCGKPGHFIAKCPLSSDSDRGDDKKGKRREKKRYYKKKGGDAHVCREWDSNESSTDSSSDKDAANIVVNKGLLFPNVGHKCLMAKDGKKKKK

SEQ ID NO: 314238 - protein, 65 aa, Zea mays
  Clone ID: MRT4577_49645C.1.pep
AGVVLCVNLSSPQYGRTRSSYCRIRLPSPLMRRSLSLYALICTWIFAESLSTSYGKKRSLRELIY

SEQ ID NO: 314239 - protein, 215 aa, Zea mays
  Clone ID: MRT4577_49646C.1.pep
MTQKFEMSMMGELKYFLGFQVKQLQEGTFLSQTKYTQDILTKFGMKDAKPIKTPMGTNGHLDLDAGGCKINRKTTSGTCQFLGRSLVSWASKKQNSVALSTAEAEYIAAGHCCAQLLWMRQTLRDYGYKLTKVPLLCDNESAIRMADNPVEHSRTKHVAIRYHFLRDHQQKGDIEISYINTKDQLADIFTKPLDEQTFTKLRHELNILDSRNFVC

SEQ ID NO: 314240 - protein, 108 aa, Zea mays
  unsure (1)..(108): unsure at all Xaa locations
  Clone ID: MRT4577_49647C.1.pep
VNHTINAVARSFSRRYIVGILDFDCATKGNPKNAGSDYVLIPEHGRVFSLVIXGFRVISNYDAESGSFIFGLECAIWPCSKRLKGHAVSLLVCNNENGDWLTTLTNMI

SEQ ID NO: 314241 - protein, 53 aa, Zea mays
  Clone ID: MRT4577_49648C.1.pep
TRPLFPARFSYSPQSLSRIGEAHSLGTEATGWSFFSPVPQPHPQLYFRTWHPT

SEQ ID NO: 314242 - protein, 558 aa, Zea mays
  unsure (1)..(558): unsure at all Xaa locations
  Clone ID: MRT4577_49649C.1.pep
EKSQTQETLKGFLRRAQNEFGRIKKIRSHNGTEFKNSQIEGFLEEEGIKHEFSSPYTPQQNGVVERKNRTLEDMARTMLDEYKTLDQFWAVAINTACYSINLLYLHRILKKTSYELLTXNMSIGDVCPKESEEPPQAQDQPSSFNQASPPTQDEDQAQEDEDEDQDDEPPQEEDNNQGGDEDDQDKEDDQXFEXRLPHPRVHQAIQRDHPVNSILGEIHKGXVEDALRDLDWVVAMQGELNNFTRNKVWHLVPRPNQNVVGTKWVFRNKEDEHGVVTRNKARLVAKGYSQVEGFDFDETYASVARLESICILLAYATYHGFKLHQMDVKSAFLNGPIKEEVYVEQPPGFEDSEYPNNVYQLSKALYGLKQAPRACQTKYIQHILNKFGMKDDKPIKTPMETNGHLDLDTGGCKIDTKCTSGTCQFLGRSLVSWASKEQNSVALSTAEAEYIAAGHCCAQLLWMRQTLSDYGYKLSKVTLLCDNDSAICMVDNPVEHSRTKHIYIRYHFLRDHQQKGDIEIAYVNSHIQLVDIFTKPVDEKTFSKLRNELNILDSWNFD

SEQ ID NO: 314243 - protein, 585 aa, Zea mays
  unsure (1)..(585): unsure at all Xaa locations
  Clone ID: MRT4577_4964C.1.pep
MEEPTESRPAGAEDLANGAKDPEGPPPEVEEEEVEEPPRSATAKQEEAKEVLGSEGSRPFTMRELLGELREDGETAVGGSSARSAFGDGNGVGSADAEGSSYSQDSTQFSSHHDVAMDLINSVTGVDEEGRSRQRILSFAAKRYVNAIESNPDDPDAYYNWALVLQESADNVDPNSSSSKDALLEEACKKYAEATRLCPTLYDAYYNWAIAIADRAKMRGRTKEAEELWKQAILNYEKAVQLNWNSPQALNNWGLGLQELSAIVPARDKQTIIKTAISKFRAAIQLQFDFHRAIYNLGTVLYGLAEDTMRSGKPDVSPNELYSQSAIYVAAAHALKPNYSVYRSALRLVRSMXINLFCFXNCVSLFCLILLLNSSCSWDMIAAFQFSYPCVLNSIATHILEENNXTLMVFKLFFSERYCVLVFXTFFCSLDVLLSNSXYDSVPLFLLHLIPXLPLPYLKVGYLTAPPANNSIAPHKDWERSQFILNHEGLQQVDASDQPPSQSPGHLDRGRKPVRINIADIVSVSACADLTLPSGAGLCIETISGPTFLVADSWEALESWLDAIRLVYTIFARGKSDVLAGIITG

SEQ ID NO: 314244 - protein, 85 aa, Zea mays
  unsure (1)..(85): unsure at all Xaa locations
  Clone ID: MRT4577_49650C.1.pep
MKLCYGCQCTFAASPTSTSTRCTIGGGLHTLMIKYSRPCQVLDIXEDTKGEVERADSEWVEKDGKLWYGSGLMPNMGGFDVPKAF

SEQ ID NO: 314245 - protein, 140 aa, Zea mays
  Clone ID: MRT4577_49651C.1.pep
VPGRTVAAGQGRRRGRVGRRLDTCQAGRSRGRGTRCSWRSHGRAGRSLTHAGLRPNPPTRIKGMVPRKSMAGQKKKKHTRTRGARCIGGRGRHQTSCWTAEGSRAHGGLAPGRSRRGSVLHTQRSRAQPRPLGGDRMASS

SEQ ID NO: 314246 - protein, 1644 aa, Zea mays
  Clone ID: MRT4577_49652C.1.pep
MSGDHAKKEMETGEKPTTSHGSTSSEESRTKRREKKKSSSNKGKEKKSSSHKPHRSEDKPKRMRKVVYYETDTSSTSTSGSDAPSVTSKRQGRKKFSKIPLHYSRISKHAPLLSVPLGKPPTFDGEDYARWSDLMRFHLTSLHKSIWDVVEFGAQVPSIGDKDYDEDEVAQIKHFNSQATTILLASLSREEYNKVQGLKSAKEVWDVLKTAHEGDELTKITKRETIEGELGRFRLRKGEEPQHMYNRLKTLVNQVRNLGSVKWDDHEVVKVILRSLIFLNPTQVQLIRGNPRYTKMTPEEVIGHFVSFECMIEGSRKINELDDPSTSEAQPVAFKATEEKKEESTPSRQPIDASKLDNEEMTLVIKSFRQILKQRRGKDYKSRSKKVCYKCGKPGHFIAKCPISSDSDRGDDKKGRRKEKKRYYKKKGGDAHICREWDSEESSSDSSDDEDATNIAVTKGLLFPNVGHKCLMAKDGKRKKVKSRSSTKYETSSDENASEEEDNLRTLFANLNMEQKEKLNELTSAIHEKDDLLDSQEDCLIKENKKHVKVKNAYALEVEKCQKLSSELSTCHEMIDNLKHENASLNAKVDSHVCNVSIPNPRDNNDDLFARIEELNISLTSLRVENENLIAKAKELDVCNATISNLRDKNDILHAKIVELNSCKTSTSTVEHVSICTRCRDVNIDAIHDHMALIKQQNDHIAKLDAKIAEHNLENEKFKFARSMLYNGRRPGIKDGIGFQKGDNVKLNAPPKKLSNFVKGKAPMPQDNEGYILYPAGYPESKIRKIHSRKSHSGPNHAFMYKGETSSSRQPTRAKVPKKIPIASNDHDISFKTFDASYVLTNKSGKIVAKYVGGKHKGSKTCVWVPKVLVSNAKGPKTIWGYASGGSSWIIDSGCTNHMTGEKKMFSSYEKNQDPQRAITFGDGNQGVTVFRRSDDSIAFKGVLEGQLYLVDFDRAELDTCLIAKTNMGWLWHRRLAHVGMKNLHKLLKGEHVLGLTNVHFEKDRICSACQAGKQVGTHHPHKNIMTTNRPLELLHMDLFGPIAYISIGGSKYCLVIVDDYSRFTWVFFLQEKSQTQETLKGFLRRAQNEFGLRIKKIRSDNGTEFKNSQIEGFLEEEGIKHEFSSPYTPQQNGVVERKNRTLLDMARTMLDEYKTSDRFWAEAVNTACYAINRLYLHRILKKTSYELLTEQVDLDEIGEEEAPCIALRNMSIGDVCPKESEEPPNAQDQPSSSTQASPPTQNEDEAQVDEVEDQANEPPQDDGIDQGEDANEEDKEEEEQRPPHPRVHQAIQRDHPVDTILGDIHKGVTTRSRVAHFCEHYSFVSYNEPHKVEEALQDSDWVVAMQEELNNFTRNEVWHLVPRPNQNVVGTKWVFRNKQDEHGVVTRNKARLVAKGYSQVEGLDFGETYAPVARLESIRILLAYATYHGFKLYQMDVKSAFLNGPIKEEVYVEQPPGFEDSEYPNHVYKLSKALYGLKQAPRAWYECLRDFLIANGFKVGKADPTLFTKTLENDLFVCQIYVDDIIFGSTNESTCEEFSRIMTQKFEMSMMGELKYFLGFQVKQLQEGTFISQTKYTQDILSKFGMKDAKPIKTPMGTNGHLDLDTGGKSVDQKSISNQVIGILKGNLSLRQRQRLPLRNSSF

SEQ ID NO: 314247 - protein, 784 aa, Zea mays
  Clone ID: MRT4577_49653C.1.pep
MSGDHAKKEMETGEKPTTSHGSTSFEESRTKRKEKKNSSKGKEKKTSSHQKEKKEKTFSHKTRRSGDKKKRMRKVVYYETDSSSPSTSGSDAASVTSKRQERKKYSKIPLRYPRISKHTPLLSVPLGKPPTFDGEDYARWSDLMRFHLTSLHKSIWDVVEFGAQVPSVGDEDYDEDEVAQIEHFNSQATTILLASLSREEYNKVQGLKSAKEVWDVLKTAHEGDELTKITKRETIEGELGRFRLRKGEEPQNMYNRLKTLVNQVRNLGSKKWDDHEVDKVILRSLIFLNPTQVQLIRGNPRYTLMTPEEVIGNFVSFECMIEGSRKINELDDPSTSEAQPVAFKATEEKKEESTPSRQPIDASKLDNEEMALVIKSFRQILKQRRGKDYKSRSRKVCYKCGKPGHFIAKYPLSSDSDRGDDKKGRRKEKKRYYKKKGGDAHVCREWDSDESSSDSSDDEDAANIAVTKGLLFPNIGHKCLMAKDGKKKVKSKSPTRYESSSDDNASDEEDNLCTLFANLNMQQKEKLNELISAIHEKDDLLDTQEDFLIKENKKHVKVKNAYALEIEKCEKLSSELSTCHETIDNLRNENANLLAKVDSHVCNGSTSNPRDVNDDLLARIEELNLYLASLRNENEKLLAKAKDVDVCNATISDLRSKNEILHAKVVELKSCKSSTSTVEHTSICTRCRDVNIDAIHDHMALIKQQNDHIAKLDAKIAEHNLENEKFKFARSMLYNGRRPGIKDGIGFQRGDNVKLSAPPKRLSNFVKGKAPMPQDNEGYILYPA

SEQ ID NO: 314248 - protein, 195 aa, Zea mays
  Clone ID: MRT4577_49654C.1.pep
ARSNPSPMAPGRPFSPCYAPPHLPWRLARTAPYSLLSASQPWPCLPCPWSSLVMAELAVLASSAPSLLLSASCLRVLRDIESETGTREGRKEDAVCACVRARSTVTSLCSSCHRSPSPSPVQALSLLAVDFPARCGRRCSPPRRATHVPAPFVYRCRSLFPAASTHSDPASVKPSCSRRCGLSSFVIASCVQQRR

SEQ ID NO: 314249 - protein, 1070 aa, Zea mays
  unsure (1)..(1070): unsure at all Xaa locations
  Clone ID: MRT4577_49655C.1.pep
MVKVILISLVFLNPTQVQLIRGDPRYKLMSPEEVIGKFVSFELMIKGSKKIIEQGATSTHEVQPVAFKTMEEEKKDSTPSRIPIDASKLDNEEMALMIKSFRQILKQRRGKDYKPRSKKVCYKCXDSDRGDDKKGKRREKXKRYYKKKGGDAHVCREWDSDESSIDSSSDEDAANIAITNGLLFPNVGHKCLMAKDGKKKKKVKSRSSTKYATSSDEASSSDDEDDLLTLFANLNMQQKEKLNELISAIHEKDELLDSQEDFLIKENKKHVKVKNAYALEVEKCEKLTSELSTCHDVISILRNENAKLKDKVEKLDICDDSIVSLRNDNASLITKIDNLNASLSSLKIENEKLFAKAKDLNVCNVSISNIRDENAILHAKIVELNTCKPSTSTVEHVTICTRCRDINVDAIHDHLALIKQQNDHIAQLNTKINEHDLENEKFKFARSMLYSGRRSGIKDGIGFQKGDNVKLNAPKRLSNFVKGKAPMVQDNEGYILYSTGYPEYKIRRIHSRKSHSGSHHAFMYKSEASSSRQSTHAKLPKKKTLIASNKPSISFKTFDASYVLTNKSGKVVAKYVGGKHKGSKTCVWVPKIRSDNGTKFKNSQIEGFLEDEGIKHEFSSPYTPQQNGLVERKNRTLLDMARTMLDEYKTSDRFWAEAINTACYAINRLYLHRILKKTSYELLTGTKWVFHNKQDEHGVVTRNKARLVAKGYSQVEGLDFGETYAPVARLESIRILLAYATYHGFKLYQMDVKSAFLNGPIKEEVYVEQPPGFEDSEYPNHVYKLSKALYGLKQAPRAWYECLRDFLIANGFKVRKADPTLFTKTIANDLFVCQIYVDDIIFGSTNESTCEQFSRIMTQKFEMSMMGELKYFLGFQVKQLQEGTFNSQMKYIQDILTKFGMKDAKPIKTPMGTNGHLDLDTGGCKINRKSTSGTCQFLGRSLVSWASKKQNSVALSTAEAEYIAAGHCCAQLLWMRQTLRDYGYKLTKVPLLCDNESAIRMADNLVEHSRTKHIAIRYHFLRDHQQKGDIEIAYVNTKEQLADIFTKPLDEQTFTKLRHELNILDSRNFD

SEQ ID NO: 314250 - protein, 41 aa, Zea mays
  Clone ID: MRT4577_49656C.1.pep
VLLVQDDPSRLDTGTGPAGKHSCPGAKVDHTTRVLCVVTPA

SEQ ID NO: 314251 - protein, 103 aa, Zea mays
  unsure (1)..(103): unsure at all Xaa locations
  Clone ID: MRT4577_49657C.1.pep
PAGFPAAAAAXSGAGAGSSPSSSSVTTCSVKRRGGVEQGDGCDSPSGGGMVAAACPRCFLYVLISRSDPRCPRCESHVPAPPAPAPAASKKPRIDLNVGYLGT

SEQ ID NO: 314252 - protein, 244 aa, Zea mays
  unsure (1)..(244): unsure at all Xaa locations
  Clone ID: MRT4577_49658C.1.pep
NSARGGDANDQDKEYDEDPRPPHPRVHQAIQRDHPVNTILGDIQKGVTTRSRVAHFCEHYSFVSSIEPHIVEEALQDSDXVLAMQEELNNFTWNEVWHLVPRPNQNIVGTKWVFRNKQDEHGVVTRNKARLVAKGYSQVKGLDFGETYAPVARLESIRILLSYATYHGFNLYQMDVKSAFLNGPIKEEVYVEQPPGFEDSEYPNHVYKLSKAXYGLKQAPRAWYECLXRDSFIAXGFKSRKADP

SEQ ID NO: 314253 - protein, 212 aa, Zea mays
  Clone ID: MRT4577_49659C.1.pep
MGSGAGECNNKREESPPRVKSHRSGDKKKKMKKVVYYEIDSSSPSTSGSDASSVTSKRHEHKKFSKIPLSYPRICKRTPLLSIPLDKPPVFYYEDYCMWSDKMRHHLTSLHASIWDIVEFRVQEPSMGDEGYDSDEVAQIRHFNSQATTILLASLSREEYNKVQGLKSAKEIWDVLKTAHEGDEVTKITKRETIEGDLGRFMLHQGEEPQAM

SEQ ID NO: 314254 - protein, 180 aa, Zea mays
  Clone ID: MRT4577_4965C.1.pep
MRIADVQKKKRNLHSRFASLPSLPQILPQIAMADQLTDDQIAEFKEAFSLFDKDGDGCITTKELGTVMRSLGQNPTEAELQDMINEVDADGNGTIDFPEFLNLMARKMKDTDSEEELKEAFRVFDKDQNGFISAAELRHVMTNLGEKLTDEEVDEMIREADVDGDGQINYEEFVKVMMAK

SEQ ID NO: 314255 - protein, 933 aa, Zea mays
  Clone ID: MRT4577_49660C.1.pep
MAALLLLPGRPLFLKLIFPARPFCSTPCKPRVRVFFAPARSAHPWRAPDFPCRAAVRLAAPLLPLPSPYRVPARTALLLARPDPLSPCRAGTPFMARAQTALGPAPCPNVDHLVAAGSTASDLPCRMFTKCATKSSNILRDSSSIRQNYSVEEKIFSNWLLKKRRPMGDVYLIPDETSEVEFIDVSMEVERLNLGYSFVLLLKMLSAGGLGLLISLSSPSILLIEVYASGGLSWIIDSGCTNHMTGEKRMFSYYEKNQDPQRAITFGDGNQDIGVIVFRRSDDSVAFKEVLEGQLYLVDFNRAELDTCLIAKTNMGWLWHRRLAHVGMKNLHKLLKGEHILGLTNVHFEKDREKSQTQETLKGFLRRAQNEFGLRIKKIRSDNGTKFKNSQIEGFLEEEGIKHEFSSPYTPQQNGVVERKNRTLLDMARTMLDEYKTPDRFWAEAINTACYSINRLYLHRILKKTSYELLTGKKPNVSYFRVFGSKFFILVKRGRKSKFAPKDVEGFLLGYDSNTRAYRVFNKSTRLVVVSCDIVFDETNGSQVEQVDLDELDDEEAPCVALRNMFIRDVCPKESEEATNAQDQPSSSTQESPPTQDEDQAQGDENKDQEDEPPQKEDNDQGGDDNNQDKEDDQEVQGTKWVFRNKQDEHGVVTRNKAQLVAKGYSQVEGLDFGETYAPIARLESIRILLAYATYHDFKLYQMDVKSAFLNGPIKEEVYVEQPPGFEDRFQVKQLQEGTFLSQTKYIQDILTRFGMKDAKPIKTPMETNGHLYLDTGGYSDDDWVGCKIDRKSTSGTYQFLGRSLVSWASKKQNSVALSTTEAEYIAAGHCYAQLLWMRQTLRDYGYKLSKVPLLCDNESAIRMADNPVEHSRTKHIAIQYHFLRDHQQKGDIEIAYVSTKEKLADIFTKPLDEKTFTKLRNELNILDSRNLD

SEQ ID NO: 314256 - protein, 85 aa, Zea mays
  Clone ID: MRT4577_49661C.1.pep
GGKHGRCPRPERQSLNRGPSRGANKTGGALGPPPKSLVCPAFMGSPGNRPFTYPGEPLLKQPPQLDPLAGGPLQGFGNPPKNLER

SEQ ID NO: 314257 - protein, 241 aa, Zea mays
  unsure (1)..(241): unsure at all Xaa locations
  Clone ID: MRT4577_49662C.1.pep
MSGAHAKKEMVTSEKPATSHGKAPSGESDNKKREESPPLVKSHRSGDKKKKMKKVVYYETDSSSPSTSGSDTPSVTSKRHERKKFSKTPPRXPRISKHTPLLSVPLGKPPVFDGEDYCMWSDKMRNHLTSLHASIWDIVEFGAQEPSMGDVGYDSDEVAQIWHFNSQATTILLASLSRDEYNKVQGLKSAKEIWDVLKTAHEGDEVTKITKRETIEGELGRFMLNQGEEPKXMYTRLKTLV

SEQ ID NO: 314258 - protein, 116 aa, Zea mays
  Clone ID: MRT4577_49663C.1.pep
KNRAGVGGRGPVEESRRRRASVLRRRRVSQPLSTGLLLFIQWPRKDLIQPSFLPTMYLIGALEEASLSTVRRFPFPASSPDQDLTQVICRSSHNGRDVMKKLNFVVEMRYSHRESF

SEQ ID NO: 314259 - protein, 90 aa, Zea mays
  Clone ID: MRT4577_49664C.1.pep
VCNGSESKKKKKKKKKKKKKKKKKKKKKKKKKKKKKKKSLPGRPPGQELEEGKIEKVVGLLGKLHLGIAVAKLFNQKGVVFPHNLPNKIP

SEQ ID NO: 314260 - protein, 82 aa, Zea mays
  unsure (1)..(82): unsure at all Xaa locations
  Clone ID: MRT4577_49665C.1.pep
LGTCWXKTSGLNYTRKFFFSFPKGXYHFFCGGGXWSQXNTXTHASAGDTPFPRDVFSPKIGGGGDXLXSLLLVRSPSWNMMG

SEQ ID NO: 314261 - protein, 99 aa, Zea mays
  Clone ID: MRT4577_49666C.1.pep
PQKKTKCLLEFQQKQQQRDLLTTHKNVSQDSGFPCTGRGVESSIFGGPLLNNCGRRGITAYRPSVWTRVAQINLGNKGIHKRWPPPNLGLMATIQNSPV

SEQ ID NO: 314262 - protein, 98 aa, Zea mays
  Clone ID: MRT4577_49667C.1.pep
SSPLRLMQEGGVLPLCGPPAMRMSGLGLKQLSPGSPRGLCDHLSILSRAPANTGLCSMLCELFYPLPHGMLLSFSPHPPMFCWFFPQQAPIVEVFFYA

SEQ ID NO: 314263 - protein, 190 aa, Zea mays
  unsure (1)..(190): unsure at all Xaa locations
  Clone ID: MRT4577_49668C.1.pep
LSFFFSFFILNVRVAFFFLYFPISFLLIIFATPHHDCLPETGAKSEGPPPKKKPHPKMACNFAHAKGETPKKGKKKDPPPQKXKKGPQSKQKITFVGPQEGGAPINTPHILGEKKPPGVPPKNKKKRGXLGRGYPPFSPEKTPNKKXPQKKKPGTPRNPKGPPGXKEPPQRERANPPGNLNSRPPQPQFF

SEQ ID NO: 314264 - protein, 85 aa, Zea mays
  Clone ID: MRT4577_49669C.1.pep
AQGSVFTHHLRAKTLGWHSVNREYKAWILHTADAKRRQDAGRHSTDCPSIAITVQSLVRKTYFIGKMDVLKLGGVKKIRTGKPRP

SEQ ID NO: 314265 - protein, 97 aa, Zea mays
  Clone ID: MRT4577_4966C.1.pep
PITYSLKNGLRPLLLQRHRTSCGLGGVTAKRCRRETGWRGRWSLRLALSSACDATSGSTCRAPAAAFAPTSAAPIASSRSATRTTLAMPAEPPARWI

SEQ ID NO: 314266 - protein, 47 aa, Zea mays
  Clone ID: MRT4577_49670C.1.pep
FIFLFIFRKKRCGIGDKFMTDRYPYNLQRRYRRRVKKQIVWQCACKD

SEQ ID NO: 314267 - protein, 196 aa, Zea mays
  Clone ID: MRT4577_49671C.1.pep
LAFPQRPGKPNPAAPVFPGVGGRLRLALHTAVGFVVGAALPALYILDGLRAGDTAGVAAAAPHAFLLSAQVFTEGIAAAWPGTFSLPVRAAVPVMYSARRMFAASEWLRQELQERDDLGRGPPVPPRRVVAGRALAAANLAFWGLNLFAFLLPFYLPRALRRYYLGNDHEDDGGARAHSKQQQQQQQQQGEAKKDS

SEQ ID NO: 314268 - protein, 82 aa, Zea mays
  Clone ID: MRT4577_49672C.1.pep
TDPLHYPILVYLTTLAGCIMMTPCLTLSIPWSIHSTTAWPIQVAAIPHLHTQSLMYTYFPAFALSALYIKDPTLYSHALLSY

SEQ ID NO: 314269 - protein, 122 aa, Zea mays
  unsure (1)..(122): unsure at all Xaa locations
  Clone ID: MRT4577_49673C.1.pep
DPPSHFLKVPSIGRRIQRLSIPASGAQGQSNSYEVKKVNQVNPPTVLNKLGDQIHLSSSFPESVRDRNICPSISPYERRFATRNYLAQSLWGPSMXVSAGINVPEMPTPLFAKAPNEKGRKN

SEQ ID NO: 314270 - protein, 1527 aa, Zea mays
  unsure (1)..(1527): unsure at all Xaa locations
  Clone ID: MRT4577_49674C.1.pep
MRKVVYYETDTSSTSISDSDAPSVTSKRQERKKFSKIPLHYSRTPRHTPLLSVPLGKPPTFDGEDYARWSDLMKFHLTSLHKSIWNVVEFGAQVPSIGDEDYDTDEVAQIEHFNSQATTILLASLSKEEYNKVQGLKNAKEIWDLLKTAHEGDELTKITKRETIEGELGRFRLRQGEEPQDMYNRLKTLVNQVRNLESKKWDDHEVVKVILRALIFLNPTQVQLIRGNPRYPLMTPEEVIGNFVSFECMIKGSKKINELDEPSTSEAQPVAFKATEEKKEESTPSRQPIDASKLDNEEMALIIKSFRQILKQRRGKDYKPRSKKVCYKCGKPGHFIAKCPMSSDSDRGDDKKGKRKEKKKYYKKKGGDAHVCREWDSDESSTDSSSDDEDAANIAITKGLLFPNVGHKCLMAKDGKKKKVKSNSSTKYESSSDDNASGEEDNLRTLFAELNMEQKEKLNELISAIHEKDDLLDSQEDFLIKENKKHVKVKNAYALEVEKCEKLSSELSTCHETINNLRNENAKLIAKIDSHVCIDSHPRNDNVELLARIDELNDSLTSLRIENENLIAKAKDFDICNTTISDLRTKNDMLHAKVVELKSCKPSTSNVEHVSICTRCRDIDVNAIHDHMSLIKQQNDHIAKLDAKIAEHNLKNEKFKFARSMLYNGRRPGIKDGIGFQRRDNVKLNAPSKNLSNFVKGKAPMPQDNEGYILYPASYPENKIRRTHSRKSHSGPNHAFMYKGETSSSRQPTRAKLPRKKTPNASNDHAISFKTFDASYVLTNKSGKVYASGGSSWILDSGCTNHMTGEKKMFSSYEKNQDPQRAITFGDGNQGVTVFRRSDDSIAFRGVLEGQLYLDKSHTQETLKGFLRRAQNEFGLRIKKIRSDNGTEFKNSQIEGFLEEEGIKHEFSSPYTPQQNGVVERKNRTLLDMARTMLDEYKTPDQFWAEAVNTACYAINQLYLHRILKKTSYELLTGKKPNISYFRVFGSKCFILVKRGRKSKFAPKSVEGFLLGYDSNTRAYRVFNKSSGLVEVSCDVVFDETNGSQVEQVDLDEIGEEQAPCIALRNMSIRDVCPKELEEPPHTQDQPSSSMQASPPTQNEDEAQVDEGEDQRDEPPQDDGNDQGGDANDQDKEDEQPRPPHPRVHQAIQRDHPIDTILGDIHKGXVEEALQDSDWVMAMQEELNNFTRNXGTKWVFRNKQDEHGVVTRNKARLVAMGYSQVEGLDFGETYAPVARLESIRILLAYATYHGFKLYQMDVKSAFLNGPIKEEVYVEQPPGFEDSEYPNHVYRLSKALYGLKQAPRAWYECLRDFLIANGFKVGKADPTLFTKTLDNDLFVCQIYVDDIIFGSTNESTCEEFSRIMTQKFEMSMMGELKYFLGFQVKQLQEGTFICQTKYTQDILTKFGMKNAKPIMTPMGTNGHLDLDTGGAKGSHLANKRPSIEFNKRAKEQPKAPLVWRTGLSGVPPDSVRCTRGLQLKLFALGNIQSQRASVHRTVSGAPKKDAAQELASLGFSLQPLRYNSPNYP

SEQ ID NO: 314271 - protein, 212 aa, Zea mays
  unsure (1)..(212): unsure at all Xaa locations
  Clone ID: MRT4577_49675C.1.pep
FGTRAGAQTTLILGWGTPVASERTVSCWHACCRCGPPGLDRDRTAQVAQALDALVPTSDGARGCARAGAKGANWLGGLSRATFPKELLFGTGTCAHHVXGSASTKGRGPSIWXDXFAHVPQKIAGNKNGDAAVDQYHRYKEDVNLMRSLNFDAYRRSIXWSKIFPDGERKRKPQCARYYNSLSNYTAHEGMTPYINLDHYDHPVALDINMEG

SEQ ID NO: 314272 - protein, 2049 aa, Zea mays
  Clone ID: MRT4577_49676C.1.pep
MGALVRSAFKFPRASSASGVQVKRSAFLKRRYKGNPLSPRREMKRLRAARHPMTLCTPFKSLMGPMLVMAAIFSGLASMPRSETMNPRSMPQGTSKTHFSRLSFNPFARRHPKVTSRSERRCCFTGRAPARISSECSATSLGMPGMSEGLHAKNLGVCAEEVDEHYFLFGVELGADPDVLAGVVAGVEGDGLNRLGRFEVAGVALRIRRLLGEAIQVGDEGLGLGDVLSVLHAFHVALVSVAFALDYEFYRCQSEKTATSHGKAPSSESANKKKDGSPSRIRSHKSGEKKKKMKKVVYYETDSSSPSTSGSDATSVTSKRQERKKYSKIPLRYPRIPKHIPLLSVPLGKPPTFDSEDYSRWSDMMRYHLTSLHKSIWDVVEFGVQVPSVGDEDYDEDEVAQIEHFNSQATTILLTSLSREEYNKVQGLKSAKEIWDMLKTAHEGDEVTKITKRETIEGELSRFRLRQGEEPQEMYNRLKTLVNQVRNLRSTKWDDHEMVKEVIGKFVSFELMIKGSNKIIEQDASSTPEAQPVAFNATEEKKEESTSSRLPIDASKLDNEEMALIIKSFYQILKQRRGKDYKSRSKKVCYKCGKPGHFIAKCPLSSDSDRDNDKKGKRRENNRYHKKKGGDAHVCREWNSDESSTDSSSDEDAANITVTKGLLFPNVGHKCLMAKDDKRKKVKSRSSTKYASSSDEDNSSDKEDNLCTLFANLNMQQKEKLNELIIVIHEKDELLDTQEDFLIKENKKHVKVKNANALEVEKCEKLSSELSTCHDIITNLRNKNARLIAKIDSNVCDDSISNLRDDNVSLLAKIEELNVSLASLRNENEKLIAKTKDLDVCNANISNLRSENDILHAKIVELKSCKPSTSTVEHVSICTRCRDINVDAIHDHLALIKKQNDHIAQLNAKINEHDLENENFKFARSMLYSGRRPGIKDGIGFQKGDNVKLNAPPKKLSNFVKGKAPMAQDNEGYILYPADYPEHKIRRIHYMKFHSGSNHAFMYKSETSSSRQSTRAKLPKKKTPIASNETSISFKTFDASYVLTNKSGKIVAKYIGGKHKGSKTCVWVPKVLVSNVKGPKTIWVYASGGSSWIIDSGCTNHMTGEKKMFSSYEKNQDPQRAITFGDGNQDLVKGLGKIVISPDHSISNVFLVDFLDYNFLSVSQLCKMGYNCLFTDIGVNVFRRSDDSVAFKGVLEGQLYLVDFDRAELDTCLIATTNMGWLWHRRLAHVGMKNLHKLLKGEHILGLTNVHFEKDMICSACQAGKQVGVHHPHKNIMTTDRPLELLHMDLFGPIAYISIDESKYCLVIVDDYSRFTWVFFLQEKSHTQETLKGFLRRAQNEFGLRIKKIRSDNGTEFKNSQIEGFLEEEGIKHEFSSPYTPQQNGVVERKNRTLLDMARTMLDEYKTSDRFWAEAVNTACYAINRLYLHRILKKTSYELLTGKKPNISYFRVFGSKCFILVKRGRKSKFAPKAVKGFLLGYDSNTRAYRVFNKSSGLVEVSCDIVFDETNGSQVEQVDLDELDNEEAPCVALRNMSIGDVCPKESEEPPNTKDQQSSSMQASPPTQDEDEVQDDEGEDQEDEPPQEESNDQGGDAHDQDEEDEQVPKPPHPRVHQAIQRDHPVNTILGDIQKGVTTRSRVAHFCEHYSFVSSIEPHKVEEALQGTKWFFRNKQDEHGVVTRNKARLVAKGYSQVEGLDFGETYAPVARLESIRILLAYATYHGFKLYQMDVKSAFLNGPIKEEVYVEQPPGFEDSEYPNHVYKLSKALYGLKQAPRAWYECLRDFLITNGFKVGKTDPTLFTKTLANDLFVCQIYVDDIIFGSTNESTCEEFSRIMTQKFEMSMMGELKYFLGFQVKQLQKGTFISQTKYIQDILNKFGMKDAKPIKTPMGTNRHLDLDTGGCKINRKSTSGTCQFLGRSLVSWASKKQNSVALSTAEAEYIAVGHCCVQLLWMRQTLRDYGYKLTKVPLLCDNESAIRMADNPVEHSRTKHIAIRYHFLRDHQQKGDIEIAYINTKEQLADIFTKPLDEQTFNKLRHELNILDSRNFF

SEQ ID NO: 314273 - protein, 85 aa, Zea mays
  Clone ID: MRT4577_49677C.1.pep
SFFSSTRQCTVQGPVYTGLCREAPLCPDRDDFENPFPDCTLNLIPTYKHTKEHLLGQVYAPSHILSYFSKYFAIGYVVFRKIVKL

SEQ ID NO: 314274 - protein, 208 aa, Zea mays
  Clone ID: MRT4577_49678C.1.pep
MKKVVYYETDSSSPSTSSSNTPSVTSKRHERKKFSKILLRYPRISKRTPLLSVPLGKSLVFDDEDYYMWSDKMRHHLTSLHASIWDIVEFGAQEPSVGDEGYDSDEVAQIRHFNSQATTILLASLSREEYNKVQGLKSAKEIWDVLKTTHEGDEVTVGAKAKTPPFARRLRCSRWSDRDKTGRDTLRSIQHQTKACGDVSPQHGLVLL

SEQ ID NO: 314275 - protein, 1927 aa, Zea mays
  Clone ID: MRT4577_49679C.1.pep
MSGDHAKKEMETGEKPTTSQGSTSSEESRTKRREKKNISSNKGKEKKSSSHHKEKKEKSSSHKPHRSKDKQKRMRKVVYYETDTSSTSTSGSDTPSVTSKRQERKKFSKIPLHYPRISKHAPLLSVPLGKPPTFDGEDYARWSDFMRFHLTSLHKSIWDIVEFGAQVPSVGDKDYDEDEVAQIEHFNSQATTILLASLSREEYNKVQGLKSAKEVWDVLKTAHEGDELTKITKRETIEGELGRFRLRKGEEPQHMYNRLKTLVNQVRNLGSIKWDDHEMVKVILRSLIFLNPTQVQLIRGNPRYTKMTPEEVIGHFVSFECMIEGSRKINELDDPSTSEAQPVAFKATEDKKEEATPSRQPIDASKLDNEEMALVIKSFRQILKQRRGKDYKSRSKKVCYKCGKPGHFIAKCPISSDSDRGDDKKGRRKEKKRYYKKKGGDAHVCREWDSDESSSNSSSDEDAANIAVTKGLLFPNVGHKCLMAKDGKRKKVKSNSSTKYESSSDDNASDEEDNLRTLFANLNMEQKEKLNELISAIHEKDDLLDSQEDCLIKENKKHVKVKKAYALEIEKCEKLSSELSTCREMIDNLRHENASLNAKVDSHVCNVSIPNPRDNNNDLLARIEELNISLASLRNENENLLAKAKDFDVCKVTISDLRDKNNILHAKIVELNSCKPSTSIVEHISICTRCRDIDVNAIHDHMSLIKQQNDHIAKLDAKIAEHNLEDEKFKFARSMLYNGRRPSIKDGIGFQRGDNVKLNAPPKRLSNFVKGKAPMPQDNEGYILYPAGYPESKIRRIHSRKSHSGPNHAFMYKGETSSSRQPTRAKLPKKTPNTSNDHNISFKTFDASYVLTNKSGKIVAKYVGGKHKGSKTCVWVPKVLVSNAKGPKTIWVYASGGSSWILDSGCTNHMTGEKKMFSSYEKNQDPQRAITFGDGNQGLVKGVTVFRRSDDSIAFKGVLEGQLYLVDFDRAELDTCLIAKTNMGWLWHRRLAHVGMKNLHKLLKGEHILGLTNVHFEKDRICSACQAGKQVGAHHPHKNIMTTDRPLELLHMDLFGPIAYISIGGSKYCLVVVDDYSRFTWVFFLQEKSQTQETLKGFLRRAQNEFGLRIKKIRSDNGTEFKNSQIEGFLEEEGIKHEFSSPYTPQQNGVVERKNRTLLDMARTMLDEYKTSDRFWAEAVNTACYAMNRLYLHRILKKTSYELLIGKKPNISYFRVFGSKCFILVKRGRKSKFAPKTVEGFLLGYDSNTRAYRVFNKSTGLVEVSCDVVFDETNGSQVEQVDLDEIGEEEAPCIALRNMSIGDVCPKESEEPPNAQDQPSSSTQASPPTQDEDEAQVDEVEDQANEPPQDNGNNQGGDANEEDKAEEEQRPPHPRVHQAIQRDHPVDTILGDIHKGVTTRSRVAHFCEHYSFVSSIEPHRVEEALQDSDWVVAMQEELNNFTRNEVWHLVPRPNQNVVGTKWVFRNKQDEHGVVTRNKARLVAKGYSQVEGLDFGETYAPVARLESIRILLAYATYHGFKLYQMDVKSAFLNGPIKEEVYVEQPPGFEDSEYPNHVYKLSKALYGLKQAPRAWYECLRDFLIANGFKVGKADPTLFTKTLENDLFVCQIYVDDIIFGSTNESTCEEFSRIMTQKFEMSMMGELKYFLGFQVKQLQEGTFISQTKYTQDILTKFGMKDAKPIKTPMGTNGHLDLDTGGKSVDQKVYRSMIGSLLYLCASRPDIMLSVCMCARFQADPKEAHLTAVKRILRYLAYTPKFGLWYPRGSTFDLIGYSDADWAGCKINRKSTSGTCQFLGRSLVSWASKKQNSVALSTAEAEYIAAGHCCVQLLWMRQTLRDYGYKLTKVPLLCDNESAIKMADNPVEHSRTKHIAIRYHFLRDHQQKGDIEISYINTKDQLADIFTKPLDEQSFNKLRHELNILDSRNFFC

SEQ ID NO: 314276 - protein, 145 aa, Zea mays
  unsure (1)..(145): unsure at all Xaa locations
  Clone ID: MRT4577_4967C.1.pep
STRGQHNMWLDSNXKTAISHAKSRQTILQFISNVLMIKKHVTQRWRTSRLQLTIVRIERLLRGYVQRRATANASMPRQNLXKHRLRGLQRIVSQHRAREKIHRHLYHDLYHSKKERRFEHQRGQAGAIHLADCAEMPRDPTIIID

SEQ ID NO: 314277 - protein, 357 aa, Zea mays
  Clone ID: MRT4577_49680C.1.pep
MSGASAKREIGTGEKSATSHGKAPSGESANKVNGSPSHNKSRRSGDKKKKMRKVVYYETDSSSPSTSGSDTSSVTSKCHERKKFSKLPLRYPRISKRTPLLSVPLGKPPMFNGEDYNMWSDKMRHHLTSLHTSIWDVVEIGVQVPSPGDEDYDSDEVAQIRHFNSQATTILLASLSREEYNKVQGLKSAKEIWDVLKTAHEGDEVTKITKRETIEGELGRFRLRQGEEPQDMYNRLKTLVNQVCNLGSTKWDDHEMVKVILRSLVFLNPTQVQLIRGNPRYTLMSPEEVIGNFVSFELMIKGSKKIIELDGPSMSEAQPVTFKATKEKKEESTSSRQPIDASKLDNEEMALIIKSFR

SEQ ID NO: 314278 - protein, 46 aa, Zea mays
  Clone ID: MRT4577_49681C.1.pep
MARMQKLAVATAAVVALVLLAAAATSVAAISCGQVASAISPCIFNA

SEQ ID NO: 314279 - protein, 1923 aa, Zea mays
  Clone ID: MRT4577_49682C.1.pep
MSGDHAKKEMETGEKPTTSHGSTSSEESRTKRREKKKSSSNKGKEKKSSSHHKEKKEKSSSHKPHRKGDKHKRMRKVVYYETDTSSTSTSDSDAPSVTSKRQERKKYSKIPLRYPRISKHTPLLSVPLGKPPTFDGEDYARWSDLMRFHLTSLHKSIWDVVEFGAQVPSVGDEDYDEDEVAQIEHFNSQATTILLASLSREEYNKVQGLKSAKEIWDVLKTAHEGDELTKITKRETIEGELDRFRLNKGEEPQHMYNRLKTLVNQVRNLGSKKWDDHEVVNVILRSLIFLNPTQVQLIRGNPRYTKMTPEEVIGHFVSFECMIEGSRKINELGEPSEAQPVAFKATEEKKEESTPSRQPIDASKLDNEEMALVIKSFRQILKQRRGKDYKSRSKKVCYKCGKPGHFIAKCPMSSDSDRGDDKKGRRKEKKRYYKRKGGDAHVCREWDSDESSSDSSDDEDAANIAVTKGLLFPNVGHKCLMAKDGKRKKVKSNSSTKYESSSDENASDEEDNLRILFANLNMEQKEKLNELISAIHEKDDLLDSQEDCLIKENKKHVKVKKAYALEVEKCEKLSSELSTCREIIDNLRNENAILNAKVDSHVCDVSISTPRDNNDDLLARIEELNISLASLRVENEKLITKAKELDVCNVTISDLRTKNDMLHTKVVELKSCKPSTSIVEHVSICTRCRNVDIDAIHDHMILIKQQNDHIAKLDAKIAEHNLENEKFKFARSMLYNGRRPGIKDGIGFQRGDNVKLNAPPKNLSNFVKGKAPMPQDNEGYILYPAGYPESKIRRIHSRKSHSGPNHAFMYKGETSSSRQPTHAKLPRKKTPSASNDHTISFKTFDASYVLTNKSGKVVAKFVGGKHKGSKTCVWVPKVLVSNAKGPKTVWVYASGGSSWILDSGCTNHMTGEKRMFSSYEKNQDPQRAITFGDGNQGVTVFRRSDDSIAFKGVLEGQLYLVDFDRAELDTCLIAKTNMGWLWHRRLAHVGMKNLHKLLKGEHILGLTNVHFEKDRICSACQAGKQVGVHHPHKNIMTTDRPLELLHMDLFGPIAYISIGGSKYCLVIVDDYSRFTWVFFLQEKSQTQETLKGFLRRAQNEFGLRIKKIRSDNGTEFKNSQIEGFLEEEGIKHEFSSPYTPQQNGVVERKNRTLLDMARTMLDEYKTPDRFWAEAVNTACYAINRLYLHRILKKTSYELLTGKKPNISYFRVFGSKCFILVKRGRKSKFAPKTVEGFLLGYNSNTRAYRVFNKSTGLVEVSCDVVFDETNGSQVEQVDLNEIGEEQAPCIALRNMSIGDVCPKESEEPPSTQDQPSSSMQASPPTQNEDEAQNDEEQNQEDEPPQDDSNDQGGDTNDQEKEDEEEPRPPHPRVHQAIQRDHPVDTILGDIHKGVTTRSRVAHFCEHYSFVSSIEPHRVEEALQDSDWVVAMQEELNNFTRNEVWHLVPRPNQNVVGTKWVFRNKQDEHGVVTRNKARLVAKGYSQVEGLDFGETYAPVARLESIRILLAYATYHGFKLYQMDVKSAFLNGPIKEEVYVEQPPGFEDSEYPNHVYRLSKALYGLKQAPRAWYECLRDFLIANGFKVGKVDPTLFTKTLENDLFVCQIYVDDIIFGSTNESTCEEFSRIMTQKFEMSMMGELKYFLGFQVKQLQEGTFICQTKYTQDILTKFGMKDAKPIKTPMGTNGHLDLDTGGKSVDQKVYRSMIGSLLYLCASRPDIMLSVCMCARFQSDPKESHLTAVKRILRYLAYTPKFGLWYPRGSTFDLIGYSDADWAGCKINRKSTSGTCQFLGRSLVSWASKKQNSVALSTAEAEYIAAGHCCAQLLWMRQTLRDYGYKLTKVPLLCDNESAIKMADNPVEHSRTKHIAIRYHFLRDHQQKGDIEISYINTKDQLADIFTKPLDEQSFTRLRHELNILDSRNFFC

SEQ ID NO: 314280 - protein, 1182 aa, Zea mays
  Clone ID: MRT4577_49683C.1.pep
MLNNGRRPGIKDGIGFQRGDNVKINAPPKNLSNFVKGKAPMSQDNEGYILYPAGYPESKIRKIHSRKSHSGPNHAFMYKGETSRSRQPTHAKLPRKKTPNASNDHAISFKTFDASYVLTSKSGKVYASGGSSWILDSGCTNHMTGEKRMFSSYEKNQDPQRAITFGDGNQDSLDYNLLSVSQLCQMGYNCLFTDVGVTVFRRSDDSIAFKGVLEGQLYLVDFDRAELDTCLIAKTNMGWLWHRRLAHVGMKNLHKLLKGEHILGLTNVHFEKDRICSACQAGKQVGVHHPHKNIMTTDRPLELLHMDLFGPIAYISIGGSKYCLVIVDDYSRFTWVFFLQEKSQTQETLKGFLRRAQNEFGLRVKKIRSDNGTEFKNSQIEGFLEEEGIKHEFSSPYTPQQNGVVERKNRTLLDMARTMLDEYKTPDRFWAEAVNTACYAINRLYLHRILKKTSYELLTGKKPNISYFRVFGSKCFILIKRGRKSKFAPKTVEGFLLGYDSNTRAYRVFNKSTGLVEVSCDVVFDETNGSQVEQVDLDEIGEEQAPCIALRNMSIGDVCPKESEEPPSTQDQPSSSMQASPPTQNEDEAQNDEEQNQEDEPPQDDSNDQGGDTNDQEKEDEEEPRPPHPRVHQAIQRDHPVDTILGDIHKGVTTRSRVAHFCEHYSFVSSIEPHRVEEALKDSDWVVAMQEELNNFTRNEVWHLVPRPNQNVVGTKWVFRNKQDEHGVVTRNKARLVAKGYSQVEGLDFGETYAPVARLESIRILLAYATYHGFKLYQMDVKSAFLNGPIKEEVYVEQPPGFEDSEYPNHVYRLSKALYGLKQAPRAWYECLRDFLIANGFKVGKADPTLFTKTLENDLFVCQIYVDDIIFGSTNESTCEEFSRIMTQKFEMSMMGELKYFLGFQVKQLQEGTFICQTKYTQDILTKFGMKDAKPIKTPMGTNGHLDLDTGGKSVDQKVYRSMIGSLLYLCASRPDIMLSVCMCARFQSDPKESHLTAVKRILRYLAYTPKFGLWYPRGSTFDLLGYSDADWAGCKINRKSTSGTCQFLGRSLVSWASKKQNSVALSTAEAEYIAAGHCCAQLLWMRQTLRDYGYKLTKVPLLCDNESAIKMADNPVEHSRTKHIAIRYHFLRDHQQKGDIEISYINTKDQLADIFTKPLDEQSFTRLRHELNILDSRNFFC

SEQ ID NO: 314281 - protein, 637 aa, Zea mays
  Clone ID: MRT4577_49684C.1.pep
MARTMLDEYKTSDRFWAEAVNTACYTINRLYLHRIIKKTSYELLTGRKSKFAPKAVEGFLLGYDSNTRAYRAFNKSTGLVEVSYDIVFDETNGSQVDQVDLDELDDEEAPCVALRNMSIGDVCPKEFEEPPQAQDQPSSSIQASPPTQDEDQAQDDENEDQEDEPPQEEGNDQGRDSHDQDKGDDEDPKPPHPRVHQGIQRDHPVNTNLGDIHKGVTTRSRIAHFCEHYSFVSSIEPYRVEDALRDSDWVLAMQEELNNFTRNEWIFRNKQDEHGVVTRNKARLVAKGYSQVEGLDFGETYAPIARLESIRILLAYATYHGFKLYQMDVKSAFLNGPIKEEVYVEQPPGFEDSEYPNHVYKLSKALYGLKQAPRAWYECLRDFLIANGFKVGKADPTLFTKTLANDLFVCQIYVDDIIFGSTNESTCEEFSRIMTQKFEMSMMGELKYFLGFQYIQDILAKFGMKDVKPIKTPMGTNGHLDLDTGGKSVDQKIDRKSTSGTCQFLGRSLVSWASKKQNSVALSTAEAKYIAAGHCCAQLLWMRQTLRDYGYKLTKVPLLCDNESAIRMADNPVEHSRTKHIAIRYHFLRDHQQRGDIEIAYINTKEQLADIFTKPLDEKIFTKLRHELNILDSRNFD

SEQ ID NO: 314282 - protein, 740 aa, Zea mays
  Clone ID: MRT4577_49685C.1.pep
MLDEYKTSDWFWAEGINTACYAINRLYLHRILKKTSYELLTGKKPNVSYFRVFGSKCFILVKRDRKFKFSPKAVEGFLLGYDSNTKVYRVFNKSTRLVEVSCDIVFDETNGSQVEQVDLDELDDEEASRVALRNMSIGNVCPKEPEEPPHAQDQPSSSNQASPPTEDEDQAQDDENEDQEEAPQEEDNDHRGDANDQDKEDDQVPRPPHPRVHQAIQQDHLVNSILGDINKGVTTRSRVAHFCEHYSFVSSIEPYRVEDTLRDLDWVLAMQEELNNFTRNEQYEHGVVTRNKARLVAKGYSQVEGLDFGETYAPVARLESIRILLAYATYHGFKLYQMDVKSAFLNGPIKEEVYVEQPPDFEDTEYPNHVYKLSKALYGLKQAPRAWYECLRDFLITNGFKVDKVDPTLFTKTIANDLFVCQIYVDDIIFGSTNKSTCEEFSRIMIQKFEMSMMGELKYFLGFQVKQLQEDTFLSQTKYIQDILTKFGMKDAKPIKTPMGTNVHLDLDTRGKSVDQKVYRPMIGSLLYLCASRPNIMLSVCMCARFQADPKEVHLRAVKRILRYLVHTPKFGLWYPKGSTFDLIGYSNADWARCKIDRKSTSGTCQFLGRPLVSWASKKQNSVALSTAEAEYIAAGHCCAQLLWMRQTLRDYGYKLTKVPLLCDNESAIRMTDNPVEHSRTKHIAIQYHFLRDHQQRGDIEIAYVSTKEQLADIFTKPLDEETFTKLTNELNILDSRNFD

SEQ ID NO: 314283 - protein, 780 aa, Zea mays
  Clone ID: MRT4577_49686C.1.pep
MSGASAKREIGTGEKFATSHGKAPSRESANKVKGSPSHDKPRRSSDKKKMMKMVVYYETGSSSPSTSGSDTSSITSKRHERKKFSKIPLRYPRISKRTPLLSVPLGKPPMFDGEDYNMWSDKMRHHLTSLHTSIWDVVEIGVQVPSPGDEDYDSDEVAQIRHFNSQATIILLASLSREEYNKVQGLKSTKEIWDVLKTAHEGDKMTKITKRETIEGKLGRFRLNQGEDPQAMYNRLKTLVNQVRNLGSTKWDDHEMVKLMIKGSKKIIELDGPSTPEAQPVAFKATEEKKEESTSSRQPIDASKLDNEEMALIIKSFRQILKQRRGKDYKPHSKKVYYKCGKPGHFIAKCPLSSDSDKGDDKKGKRREKKRYHKKRGGDAHVCREWDSDESSTDSSSDEDAANIAVTKGLLFPNIGHKCLMAKDDKRKKVKSKSSTKYATSSDEGNSSDEEDNLHILFANLNMQQKEKLNELVSAIHEKDELLDTQEDVLIKENKKHVKVKNAYALEVEKCEKLSSELSTCHDIIANLRNENAKIIAKVDSNACDVSIPNLRDDNVSLLAKIEELNISLASLRNDNEKLIAKAKDLDVCNASISDLRDKNDILRAKIVELNSCKPSTSTVEHVSICTRCRDINVDAIHDHLALIKKQNDHIAQLNAKINEHDLENEKFKFARSMLYSGRRPGIKDGIGFQKGDNVKLNAPPKRLSNFVKGKAPMPQDNEGYILYPADYPEHKIRRIHSRKSHSGPNHAFMYKGETSSSRQSTRAKLPKKKTPIASNDSNM

SEQ ID NO: 314284 - protein, 142 aa, Zea mays
  Clone ID: MRT4577_49687C.1.pep
KKARQGGSYSRSPVKSRSPRRRRSPNRNRSYSRGCSYSRSRSPVRREKSVEDRSRSPKAMERSVSPKGRDQSLSPDRKVIDASPKRGSDYDGSPKENGNGRNSASPIVGGGESPVGLNGQDRSPIDDEAELSRPSPKGSESP

SEQ ID NO: 314285 - protein, 142 aa, Zea mays
  unsure (1)..(142): unsure at all Xaa locations
  Clone ID: MRT4577_49688C.1.pep
KXPXXXNGAXXSKEXXKARQXSQQTXEXGXGPETXTXXXPEXXXKTGAXRATXXXEGEDXQQXXRXXSXXGXXGXXPDDTXNXQXNXPXPXPNXGXEXEXSXXXGKXXXGXXKNKAAXRGGNXXRKKXAERRAQXXEXEERH

SEQ ID NO: 314286 - protein, 95 aa, Zea mays
  Clone ID: MRT4577_49689C.1.pep
PGKVAPLATSFRTMLEPLTPPPRAARDPHIFRCNISIALPIGFKSCSDYPSIFPFHAYMLRLFPPCRSFTCIRPKDLVSLHPISHKSVFKIAPCP

SEQ ID NO: 314287 - protein, 902 aa, Zea mays
  unsure (1)..(902): unsure at all Xaa locations
  Clone ID: MRT4577_4968C.1.pep
MSGGFFRGTSADQDTRFSNKQAKLLKTQKFAPELDHLVDTSKVKMDVMKPWIAKRVTELLGFEDEVLINFIYGLLEEKEADGKKIQIQLTGFMEKNTVKFMRELWXTILLSAQQNASGVPQQFLDEKEAEIQQKKAEDDRIAQEIQKKREMEENDSELVKNKVMDGDAGNSRSYGDPVGSALNSTNFNTEEEKNNDFKRSLRAKNRGSRRSRSISLSPRARQRSISPRNNSRSPPRRSHSIDRHHRSSWRSTSPRRSISPRRHSPRSTPSISRRRSPYSRRGSPSLSRYPSPFTRRRSPLRRKSPSSGPLRSLSPRHRRSPARVPRRSPSPASRRSPVRRRFSPGRRTSPSPVRRRPRSPSPGRRRPRSPSPGRRRPRSPSPRRRRPRSPSPGRRRPRSPSPGRRRLRSPSPGRRRPRSPSPGRRRPRSPSPGRRRPRSPSPGRRRPRSPSPGRRRPWSRSPIRRQSPSPKRQRTSPSSPKTRSANRPLSPEGRRSTSPYNSRSPNRSRQSLSKDTEKETNGTPSVKDRVVHSRGQEQKSDDNNRDGARIVGNNSPDSEHRLSKSLRPPNYEERNSTRDSSYKNSGKPISSQGSTDTSGDEEHSRARENARKANSCRRKTKDLSAGLQPKKMGAGDSSPRDKSPFILQQSGKVVQKKHPDQLSESSEDELAGRRTKHQTDSPDDSRRKQHSPTRIENDESYSKGGRNSEHVMRGLRDDSDDAIDTKKYLSKVNEDSQSDDGSPLKKTKKKTDGNRHIDSGSSGSEEPDKHRTHSEKRRHKKTHKHKKQYDDSSESDSEPDGKDAKRRRRKEEKRLRKEERRRRREERHRRRAERHASKRKLKNTDTVTMPSDSEKDRDSDSDGDVRKRVSNAGREESDQKKLEIELREKALESLRAKKAINN

SEQ ID NO: 314288 - protein, 52 aa, Zea mays
  Clone ID: MRT4577_49690C.1.pep
GPRISKEGSLIHEVLEASISDARGPSRNFLKTISLCKAFAQGVDLKNLYASR

SEQ ID NO: 314289 - protein, 101 aa, Zea mays
  Clone ID: MRT4577_49691C.1.pep
WKKFGEKNIFGYIFPRSYCTCIWRKSTGCSATKILQPNNNDPNTLFVMYISKHNHGFSNEPHLEPSSPEPHLEPSSPPGTGRKREEYDVSIVENTFFFDTL

SEQ ID NO: 314290 - protein, 78 aa, Zea mays
  Clone ID: MRT4577_49692C.1.pep
RGIHDTSYYLLIRCDEPSAGLSFHLLNCFNRIMNTQRIYDNSTIPSLLCHALLLSTYCDHRHSFHDQEREKHILMNCS

SEQ ID NO: 314291 - protein, 54 aa, Zea mays
  Clone ID: MRT4577_49693C.1.pep
RVQGTTEQGFFLKPSTSARGFLTITDVLQYENTKHGILAVPPNFKNPAKKHTVM

SEQ ID NO: 314292 - protein, 74 aa, Zea mays
  unsure (1)..(74): unsure at all Xaa locations
  Clone ID: MRT4577_49694C.1.pep
LLIILSQVAVPSRAYLLTQYQVLPFYQPVEDNPPSLLQLQQLLPYVQLALTYPGGLYQQHXIGAPLFRLLIGAN

SEQ ID NO: 314293 - protein, 73 aa, Zea mays
  Clone ID: MRT4577_49695C.1.pep
LAKFQSCSEESLHQCSSVLIASSVFLLADEADDASLGMRGIQSRYGMHQTGGCAPPTQLRRVTRFVPHDILQP

SEQ ID NO: 314294 - protein, 11 aa, Zea mays
  Clone ID: MRT4577_49696C.1.pep
MPSFVCVHLQI

SEQ ID NO: 314295 - protein, 54 aa, Zea mays
  Clone ID: MRT4577_49697C.1.pep
PTRPPTRPPTRTAKRPPKPSRKPSPTPWPIPFFPSQIQTIITRAFRDLCLKALP

SEQ ID NO: 314296 - protein, 54 aa, Zea mays
  Clone ID: MRT4577_49698C.1.pep
VCSLVQSQSDCCECKKVLGVCVQDIERYLCTPLIILIYPPYKKKKKGRQRTSEL

SEQ ID NO: 314297 - protein, 36 aa, Zea mays
  unsure (1)..(36): unsure at all Xaa locations
  Clone ID: MRT4577_49699C.1.pep
LXARSRQRLSSSLXXHRRAIARXXPXKPPPCRERTA

SEQ ID NO: 314298 - protein, 149 aa, Zea mays; identical to SEQ ID NO: 274315
  Clone ID: MRT4577_4969C.1.pep

SEQ ID NO: 314299 - protein, 66 aa, Zea mays
  Clone ID: MRT4577_496C.1.pep
CKGSKLSKSCLKEDQSQFKVQILPATNMIITPCRITVSQACVSITSVRVCLHIYCSGTRVPRVCTR

SEQ ID NO: 314300 - protein, 53 aa, Zea mays
  Clone ID: MRT4577_49700C.1.pep
MGSQAIQAHRAGAEVYRGAGLCAEKTTELMAEAHLPLGLLSLADMEEVGYNRA

SEQ ID NO: 314301 - protein, 103 aa, Zea mays
  Clone ID: MRT4577_49701C.1.pep
PTRPDSPTLLHILDEQGCIVMGSSTRLWMSWRPWTSISNLLCPTSTWMNALTALLNMEPQLLHLLAALEHLRRWKIPENHNQRPPLPHRLLRPTIPCPYYTMR

SEQ ID NO: 314302 - protein, 85 aa, Zea mays
  Clone ID: MRT4577_49702C.1.pep
KKVNHSFEEKENIFVDSYYKRVSLFKRLNCSWILKGQLVFRGPLNLFTRFLRLLNDKCPPIGFVHFAKNKRPSLNKPGPSWGFST

SEQ ID NO: 314303 - protein, 96 aa, Zea mays
  Clone ID: MRT4577_49703C.1.pep
LSAGPGSFPLSWPPSTGAALHSWFLFIFFRFFSFLPSWPVFFLLPCCPPRLPFLQSWLLPSFFWLSPPLPCLGASRSVWSPSLRHAVSGLVHSFLH

SEQ ID NO: 314304 - protein, 37 aa, Zea mays
  Clone ID: MRT4577_49704C.1.pep
PYTLMFRFRIPTRRHITRLTREQFYANPLICFVAYGR

SEQ ID NO: 314305 - protein, 1567 aa, Zea mays
  Clone ID: MRT4577_49705C.1.pep
MSGDHAKREIVTSGDKSASSGRTHSRESGHKHKEESSSSTKSQRRGDKKKMKKVVYYETDSLSPSTSGFESASVTSKRLERKNIWDIVEYGAQVPKVGDKDYDSDKADQIRHFNSQATTILLTSLCREEYNKVQGLKMGKEIWDVLKTAHEGDEVTKITKQETIEGELGRFILNQGEEPQAMYSRLKTLVNQVRNLKSTKWDDHEMVKVILRSLIFRNPTQVQLIRGDPRYKLMSPEEVIGKFVSFELMIKGSKHIVNLEQGGTFTPKVQPVAFKAIEEEKKEPMPSRIPIDASKLDNEEMALIIKSFRQILKQRRGKDYKPHSKRVCYKCGKLGHFIAKCPMSSDSDRGDDKKGNRKEKKRYYKNKGGDAHVCREWDSDMSSTDTSSDEDAANITVNKGLLFPNVGHKCFMAKDGKKKKVELLDSQEEFLIKENKKHVKVKNAYAQEIEKCENLTKELSICHDTISNLRTENVSLIAKVEKSNVCHDSIVNLKNDNARLIAKIDKLNESIAILKTENEKLISKAKDLNVCNVYISNLRNENVILHAKIDELNACKPSTSTVDHVTICTRCRDINVDAIHDHLASIKEQNDHIAQLTAKINEHEIENEKFKFARSMLYSGRRPGIKDGIGFQQGGNIKLNAPKRLSNFVKGKAPMAQDNEGYILYPAGYPEHKIRRIHARKPHNVSHHAFMYKNEASSSRQSTHVKLPKKKTPTASNEPNVSFKTFDASYVLTNKSGKVVAKYIGGKQKGSKTCVWVPKDYASGGSSWIIDSGCTNHMTGEKRMFSSYEKNEDPQRAITFGDGNQDLGVTVFRRSDDSVAFKGEKSQTQETLKGFLRRAQNEFGLRIKKIRSNNGMEFKNSQIEGFLEEEGIKHEFSSPYTPQQNGVVERKNRTLLDMARTMLDEYKTLDWFWAEAINTACYSINRLYLHRILKKTSYELLTGKKPNVSYFRVFGSKCFILVKRGRKSKFAPKVVEGFLLGYDSNTRAYRVFNKSTGLVEVSCDIVFDETNGSQVENMSIGDMYPKESEEPPQAQDQPSSYMQASPPTQDEDQAQDNEDEDQEDEPPQEEDNDQGGDDHDKDKEDDQEIQGQQPPHPRVHQAIQRDHPVNSILGNIHKGVTTRSRVAHFCEHYSFVSSIEPYRVEDVVRDSNWVLAMQEELNNFTRNEVWHLVPRPNQNVVGTKWVFRNKQDEHGVVTRNKARLVAKGYSQVEGLDFGETYAPIARLESIHILLAYATYHGFKLYQMDVKSAFLNGPIKEEVYVEQPPGFEDSEYPNHVYKLSKALYGLKQAPRAWYKCLRDFLITNGFKVGKANPTLFTKTIAKDLFVCQIYVDDIIFGSTNKSTCEEFSRIMIQKFEMSMMGELKCFLGFQVKQLQEDTFTSQTQYIQDILTKFGMKDAKPIKTPMGTNGHLDLDTGGCKIDRKSTSGTCQFLGRSLVSWASKKQNSVALSNAEAEYIVVGHCCAQLLWMRQTLRDYGYKLSKFPLLCDNESAIRMADNPVEHSHTKHIAIRYHFLRESPTKGGYRGAKGSTQTNKKIKVGVQKKGAKEFEENPGLVHQIVRCAT

SEQ ID NO: 314306 - protein, 79 aa, Zea mays
  unsure (1)..(79): unsure at all Xaa locations
  Clone ID: MRT4577_49706C.1.pep
RGDVVPKDVNAAVATIKAKRTIQLEDWCPTGLKCGIIYHTPSVVPCGDLAQGAMGXCMIFNYTSVEEVFFRIDTRSSSC

SEQ ID NO: 314307 - protein, 219 aa, Zea mays
  Clone ID: MRT4577_49707C.1.pep
LSHSLPWAFLLPHVGPCSTSAWGSGRRLWRSPCSSSPACQPPSSLGASLRAELLRVAAPNRALIPMSESVPQPLLHLPTAPTLCSTVSPCARARRALCFCGVASSGSVFCSPAAPWSPSKFLTRVPSVVALLELVLVAVVWKQTRPHPAPSFFLLMPSRSLSVCRLSVSLVLAARAIPFARLASSSSNQTVCACSPLLRAVAQLAELSCRGRRVPGPSL

SEQ ID NO: 314308 - protein, 470 aa, Zea mays
  unsure (1)..(470): unsure at all Xaa locations
  Clone ID: MRT4577_49708C.1.pep
MTGRKECSPTRKTKIPKKLSHPGMEIKEKSQTQEILKGFLRRTQNEFGLRIKKIRSDNGTEFKNSQIEGFHEDEGIKHEFSSPYTPQQNGVVERKNRTLLDMARTMLDEYKTPDRFWVEAINTACYSINRLYLHRILKKTSYELLTGKKPNVSYFRVFGSKCFILVKRGRKSKFAPKAVEGFLVGYDSNTRAYRVFNKSTGLVEVSCDIVFDETNGSQVEQVNLDELDDEEALCVALRNMSIGDXEDQAQDENEDQEDEPPQEDNDXGGDEENEDKEDDQEIQGQRPPHPRVHQAIQRDHPVNSILGDIHKGXVEDALRDSDWVLAMQEELNNFTRNEVWHLVPHPNKHVVGTKWVFRNKQDEHGVVTRNKARLVAKGYSQVEGLDFGETYAPVARLESIRILLAYATYHDFKLYQMDVKSAFLNGPIKEEVYVEQPPGFEDIEYPNHVFKLSKALYGLKQAPRAWYECL

SEQ ID NO: 314309 - protein, 890 aa, Zea mays
  Clone ID: MRT4577_49709C.1.pep
MSGDHAKKEMETGEKPTTSHGSTSSEESRTKRKEKKKSSSNKGKEKKSSSHHKEMKERSSSHKPHRSGDKKKRMRKVVYYETDSSSASTSGSDAASITSKRQERKKYSKIPLHYPRISKHTPLLSVPLGKPPTFDGEDYARWSDLMRFHLTSLHKSIWDVVEFGAQVPSIGDKDYDEDEVAQIEHFNSQATTILLASLSREEYNKVQGLKSAKEVWDVLKTAHEGDELTKITKRETIEGELGRFRLRKGEEPQHMYSRLKTLVNQVRNLGSKKWDDHEMVKVILRSLIFLNPTQVQLIRGNPRYTKMTPEEVIGNFVSFECMIEGSRKINELDDPSTSEAQPVAFKATEEKKEESTPSRQPIDASKLDNEEMALVIKSFRQILKQRRGKDYKSRSKKVCYKCGKPGHFIAKCPLSSDSDRDNDKKGKRREKKRYYKKKGGDAHVCREWDSDESSSDSSSDEDAANIVVTKGLLFPNVGHKCLMAKDGKRKKDGLLDSQEDLLIKENKKHVKVKNAYALEIEKCEKLSSELSTCREMIDNLRNENASLNAKVDSHVCNVSIPHPRDNNDDLLARIEELNISLASLRSENEKLITKAKDFDVCKVTISDLRDKNDILHAKIVELNSCKPSTSTIEHVTICTRCRDIDVDAIHDHMILIKQQNDHIAKLDAKIAEHNLENEKFKFARSMLYNGRRPGIKDGIGFQRGDNVKISAPPKRLSNFVKGKAPMPQDNEGYILYPAGYPEDKIRKIHSRKSHSGSNHAFMYKSETSSSRQPTRAKLPKKKIPIASNDHNISFKTFDASYVLTNKSGKVYASGGSSWILDSGCTNHMTGEKKMFSSYEKNQDPQRAITFGDGNQDSLDYNLLSVSQLCQMGYNCLFTDVGVTDSRLEGG

SEQ ID NO: 314310 - protein, 103 aa, Zea mays
  unsure (1)..(103): unsure at all Xaa locations
  Clone ID: MRT4577_4970C.1.pep
GGSRGRHDSHGMRCDYISYHTNTEMKTTTTLQLXNGRFGLGPAGNLRENAGLNLDAHDCGLQTGDPTRDTIAVPQLWRDQEHSLTEGVLLNQKNTGTMEQHMG

SEQ ID NO: 314311 - protein, 1877 aa, Zea mays
  Clone ID: MRT4577_49710C.1.pep
MSGDHTKKEMETGEKPTTSYGSTSSEESRTKRREKKKSSSNKGKEKKSSSHHKEKKEKSSSHKPHRKGDKHKRMRKVVYYETDTSSTSTSDSDAPSVTSKRQERKKYSKIPLRYPRISKHTPLLSVPLGKPPTFDGEDYARWSDLMQFHLISLHKGIWDVVEFGVQVPSIGDENYDEDEVAQIEHFNSQATTILLASLSKEEYNKVQGLKNAKEIWDVLKTAHEGDELTKITKRETIEGELGRFRLHKGEEPQHMYNRLKTLVNQVRNLGSKKWDDHEVVNVILRSLIFLNPTQVQLIRGNPRYTKMTPEEVIGHFVSFECMIEGSRKINELGDPSEAQPVAFKATEERKEESTPSRQPIDASKLDNEEMALVIKSFRQILKQRRGKDYKSRSKKVCYKCGKPGHFIAKCPISSDSDRGDDKKGRRKEKKRYYKKKGGDAHVCREWDSDESSSDSSDDEDAANIAVTKRLLFPNVGHKCLMAKDGKKKKVKSNSSTKYESSSDDNASDEEDNLRILFANLNMEQKEKLNELISAIHEKDDLLDSQEDCLIKENKKHVKVKKAYALEVEKCEKLSSELSTCREMIDNLRNENAILNAKVDSHVCNVSIPNLRDDNIDLLAKIDELNASLASLRLENENLIAKAKNFDVCNATISDLRTKNEIKIDAKIAEHNLENEKFKFARSMLYNGRRPGIKDGIGFQRGDNVKLNTPPKNLSNFVKGKAPMPQDNEGYILYPAGYPESKIRKTHSRKSHSGPNHAFMYKGETSSSRQPTRAKLPRKKISNASNEHSISFKTFDASYVLTNKSGKVVAKFVGGKHKGSKTCVWVPKVLVSNAKGPKTVWVYASGGSSWILDSGCTNHMTGEKRMFSSYEKNQDPQRAITFGDGNQGLVKGVTVFRRSDDSIAFKGVLEGQLYLVDFDRAELDTCLIAKTNMGWLWHRRLAHVGMKNLHKLLKGEHILGLTNVHFEKDRICSACQAGKQVGTHHPHKNIMTTDRPLELLHMDLFGPIAYISIGGSKYCLVIVDDYSRFTWVFFLQEKSQTQETLKGFLRRAQNEFALRIKKIRSDNGTEFKNSQIEGFLEEEGIKHEFSSPYTPQQNGVVERKNRTLLDMARTMLDEYKTPDRFWAEAVNTACYAINRLYLHRILKKTSYELLTGKKPNISYFRVFGSKCFILIKRGRKSKFAPKTVEGFLLGYDSNTRAYRVFNKSTGLVEVSCDVVFDETNGSQVEQVDLDEIGEEQAPCIALRNMSIGDVCPKESEEPPSTQDQPSSSMQASPPTQNEDEAQNDEEQNQEDEPPQDDSNDQGGYTNDQEKEDEEEPRPPHPRVHQAIQRDHPVDTILGDIHKGVTTRSRVAHFCEHYSFVSSIEPHRVEEALQDSDWVVAMQEELNNFTRNEVWHLVPRPNQNVVGTKWVFRNKQDEHGVVTRNKARLVAKGYSQVEGLDFGETYAPVARLESIRILLAYATYHGFKLYQMDVKSAFLNGPIKEEVYVEQPPGFEDSEYPNHVYRLSKALYGLKQAPRAWYECLRDFLIANGFKVGKADPTLFTKTLEKDLFVCQIYVDDIIFGSTNESTCEEFSRIMTQKFEMSMMGELKYFLGFQVKQLQEGTFICQTKYTQDILTKFGMKDAKPIKTPMGTNGHLDLDTGGKSVDQKVYRSMIGSLLYLCASRPDIMLSVCMCARFQSDPKESHLTAVKRILRYLAYTPKFGLWYPRGSTFDLIGYSDADWAGCKINRKSTSGTCQFLGRSLVSWASKKQNSVALSTAEAEYIAAGHCCAQLLWMRQTLRDYGYKLTKVPLLCDNESAIKMADNPVEHSRTKHIAIRYHFLRDHQQKGDIEISYINTKDQLADIFTKPLDEQSFTRLRHELNILDSRNFFC

SEQ ID NO: 314312 - protein, 113 aa, Zea mays
  Clone ID: MRT4577_49711C.1.pep
GCFFFFFFFFFRTVGPKNLNFIQNPGPNFFPRLVNGLGWRGNNWYPRLNFWQNFLFFFPFQIPKKTFGRRIKIFGQGPFFFSFPIGKPNRGGRINFFGQGPTPFIKPNGRIPV

SEQ ID NO: 314313 - protein, 445 aa, Zea mays
  Clone ID: MRT4577_49712C.1.pep
MLGDHAKKELETSDKPTTSHGKASSEESRNKGKGKEKKSSSHKSHQSGDKKKKMRKVPFVGDEDYDEDEVAQIEHFNSQATTILLASLSREEYNKVQGLKSAKEVWDVLKTAHEGDELTKITKRETIEGELGRFRLRQGEEPQDMYNRLKTLVNQVRNLGSKKWDDHEMVKVILRSLIFLNPTQVQLIRGNPRYTLMTPEEVIGNFVSFEFMIKGSRKINELDGPSTSEAQLVTFKATEEKKEESTSSRTPIDASKLNNEEMALVIKSFRQIIKQRRGKDYKPRSKKVCYKCGKPGHFIAKCPLSSDSDRGDDKKGRRKEKKRYYKKKGGDAHVCREWDSDKSSSDSSSDEDAANIAVTKGLLFPNVGHKCLMAKDGKKKKVYASGGSSWIIDSGCTNHMTGENKMFSSYEKNQDPQRAITFGDGNQGKISYPRDLKGILKTSSK

SEQ ID NO: 314314 - protein, 1600 aa, Zea mays
  Clone ID: MRT4577_49713C.1.pep
METGDKSTTSHEKASSEESRNKGKGKEKKSSSHKSHRSGDKKKKMRKVVYYETDTSSPSTSGSDAPSITSKRHERKKFSKIPLRYPRISKHTPLLSVPLGKPPTFDGEDYARWSDLMRFHLTSLHKSIWDVVEFGVQVPSVGDKDYDEDEVAQIQHFNPQASTILLASLSREEYNKVQGLKGAKEIWDTLKTAHEGDEVTKITKRETIEGELGRFRLRQGEEPQDMYNRLKTLVNQVRNLGSKKWDDHEMVKVILRSLVFLNPTQVQLIRGNPRYTLMTPEEVIGNFVSFELMIKGSKKINELDGPSTSEAQPVAFKATEEKKEESTPCRTPIDASKLDNEEMALVIKSFRQILKQRRGKDYKPRSKKVCYKCGKPGHFIAKCPISSDSDRGDDKKGRIKEKKKYYKKKGGDAHVCREWDSDESSSDSSSDEDAANIAINKGLLFPNIGHKCLMTKDGKKKKVKSKSSTKYESSGDDNASDEEDNLRTLFANLNMQQKEKLNELISAIHEKDDLLDTQEDFLIKENKKHVKVKNAYALEVEKCEKLISELSTCHDIINNLKNENASLIAKVDSNACNISIPNLRNDNVDLLAKIEELNISLDSLRIENEKLIAKAKELDVCNASISDLRSKNDILHAKVVELKSSKPSTSTVEHTSICTRCRDVDIDAIHDHMVLIKQQNDHIAKLDAKIVEHELENEKFKFARSMLYSGRRPGIKDGIGFQQGGNVKLNAPPKRLSNFVKGKAPMPQDNEGYILYPAGYPESKIRRIHSRKSHFGPNHAFMYKGETSSSRQPTQAKLPKKKTPSASNDHDISFKTFDASYVLTNKSGKVYASGGSSWIIDSGCTNHMTGEKKMFPSYEKNQDPQRAITFEDGNQGVTVFRRSDDSVAFKGVLEGQLYLVDFDRAELDTCLIAKTNMGWLWHRRLAHVGMKNLHKLLKGEHILGLTNVHFEKDRICSACQAGKQVGVHHPHKNMMMTDRPLELLHMDLFGPIAYISIGGSKYCLVIVDDYSRFTWVFFLYDKSHTQETLKGFLRRAQNEFGLRIKKIRSDNGTEFKNSQIEGFLEEEGIKHEFSSPYTPQQNGVVERKNRTLLDMARTMLDEYKTSDRFWAEAVNTACYAINRLYLHRILKKTSYELLTGKKPNISYFRVFGSKCFILVKRGRKSKFAPKTVEGFLLGYDSNTRAYRVFNKSTGQVEVSCDVVFDETNGSQIEQVDLDDIGDEEAPCITLRNMSIGDVCPKQYEEPPNAQDQPSSSTQASPSTRNEDEAQVDEGEEQRDEPPKDDGNDQGGDANNQDKEDEEPRPPHPRVHEAIQRDHLVDTILGDIHKGVTTRSRVAHFCEHYSFVSSIEPHRVEEALQDSDWVVAMQEELNNFTRNEVWHLVPRPNQNVVGTKWVFRNKQDEHGVVTRNKARLVAKGYSQVEGFDFGETYAPVARLESIRILLAYATYHGFKLYQMDVKSAFLNGPIKEEVYVEQPPGFEDSEYPNHVYKLSKALYGLKQAPRAWYECLRDFLITNGFKVGKADPTLFTKTLENDLFVCQIYVDDIIFGSTNESTCEEFSRIMTQKFEMPMMGELKYFLGFQVKQLQEGTFISQTKYT

SEQ ID NO: 314315 - protein, 640 aa, Zea mays
  Clone ID: MRT4577_49714C.1.pep
MSGDHAKKEIETGEKPTTSHESTSSEKSRTKRKEKKKDSSKGKEKRSSSHHKEKKEKSSSHKPHRSGDKKKRMRKVVYYETDSSSASTSGSDAASVTSKRQERKKYSKIPLRYPRISKHTPLLSVPLGKPPTFDGEDYARWSDLMQFHLTSLHKSIWDVVEFGAQVPFVGDENYDEDEVAQIEHFNSQATTILLASLSREEYNKVQGLKNAKEIWDLLKTAHEGDELTKITKRETIEGELGRFRLRQGEEPQDMYNRLKTLVNQVRNLGSKKWDDHEVVKVILRSLIFLNPTQVQLIRGNPRYTLMTPEEVIGNFVSFECMIKGSKKINELDDPSTSEAQPVAFKATEEKKEESTLSRQPIDASKLDNEEMALIIKSFRQILKQRKGKDYKSRSKKVCYKCGKPGHFIAKCPLSSDSDRDNDKKGKRREKKRYHKKRGGDAHVCREWDSDESSIDSSDDEDAANIAVTKGLLFPNVGHKCLMAKDGKRKKVKSKSSTKYESSSDDNASDEEDNLRTLFANLNIEQKEKLNKLISAIHEKDDLLDSQEDFLIKENKKHVKVKNAYALEIEKCEKLSSELSTCHDTITNLRNENAKLIAKVDSHICNVSTSNPRDDNVDLLARIDELNVSIASLRIENEKLQ

SEQ ID NO: 314316 - protein, 187 aa, Zea mays
  Clone ID: MRT4577_49715C.1.pep
KDDYRRDNIEHLRDFFLFVVDPYIWLYACDVRGHYFEPKGQRNTTCSSTNSRYSVQAIHSVFHTKNLSFRHNLHRIIIAYLPPELQTAVPESKNKNPSPRLESSCWNDVLASRSVAAEVLALACRRRRRARGVERSASMTRICQVPGGEKLTGARCIQIQERHRKGTSHRYEQEAEEYSITRNKTSV

SEQ ID NO: 314317 - protein, 785 aa, Zea mays
  unsure (1)..(785): unsure at all Xaa locations
  Clone ID: MRT4577_49716C.1.pep
MKKVVYYETDSSSPSTSGSDAASVTSKRQERKKYSKIPLRYPRIPKHTPLLSVLLGKPPTFDGEDYSRWSDMMRYHLTSLHKNIWDIVEFGVQVPSVGDEDYDEDEVAQIVHFNSQATTILLTSLSREEYNKVQGLKSAKEIWDVLKTTDEGDEVTKITKRETIEGELGRFRLRKXEEPQEMXSKKIIEQDGPSTPEAQSVAFKATEEKKEESTSSRLPIDASKLDNEEMTLIIKSFRQILKQRRGKDYKSRSKKVCYKCGKPGHFIAKCSISSDSDRGDDKKGKRREKKRYYKKKGGDAHVCRERNSDESSSDSSSDEDAANIAVTKGLLFPNIGHKCLMAKDGKRKKVKSRSSTKYASSSDEDNSSDEEDNLRTLFANLNMQQKEKLNELISDIHEKDELLDSQEDFLIKENKKHVKVKNAYALEVEKCEKLSSELSTCHDIIANLRNENAKMITKVDSNLCDDSISNHRDDNVNLLAKIEELNVSLASLRNENERLIAKAKDLDVCNVTISNLRSENDILHAKIVALNSCKPSTSTIEHVTICTRCRDINVDAIHDHLALIKKQNDHIAQLNAKINEHDLENEKFKFARSMLYNGRRPGIKDGIGFQKGDNVKLNAPPKRLSNFVKGKAPMPQDNEGYILYPVGYPEHKIRRIHSRKSHSGPNHAFMYKGETSSSRQSTRAKLPKKKTPIASNDSNISFKTVDASYVLTNKSGKVYASGGSSWIIDSGCPNHMTGEKKMFSSYKKNQDPQRAITFGDGNQGVTVFRRSDDSVAFKGVLEGQL

SEQ ID NO: 314318 - protein, 94 aa, Zea mays
  unsure (1)..(94): unsure at all Xaa locations
  Clone ID: MRT4577_49717C.1.pep
DDPNGRHIRTNLGQHDSCNMDSNVHVVDSTLQIRGMHTLIRDWVISTPDFVXYSDLLIHSAVAHGLGHXPFTEKHVITPTGSCNMGVDLRMKLY

SEQ ID NO: 314319 - protein, 59 aa, Zea mays
  Clone ID: MRT4577_49718C.1.pep
DSQCLTVFNLVVSLFPLLFLVYLMVEWFSSFPVHLDRKKRLEGRIHGRHLFNLFTLVLR

SEQ ID NO: 314320 - protein, 184 aa, Zea mays
  Clone ID: MRT4577_49719C.1.pep
TKQQVAAAAAALVPWWWTGIGTRTCVVLLHSLSSPVRFRPFGTGSLFQTLVLFLVILYSSASCSYRWLVPLRWRSWIWMQRAPVSFSPPGTWQIRVMLAERSTPRARRRRLQARSGFIACRRPLVLPCHGSFVYLSDRHVMCSARTSAATLRDARTSFQQDDSSRGLGFLFLDSGTAVWSSGGK

SEQ ID NO: 314321 - protein, 71 aa, Zea mays
  Clone ID: MRT4577_4971C.1.pep
GEVAERQEDSEKQEGTRSRQNRKTVTQLKTGHIETEETYAPVRIIQPSIHFGLLSFFFVFFFFFFFFFFFF

SEQ ID NO: 314322 - protein, 441 aa, Zea mays
  Clone ID: MRT4577_49720C.1.pep
EKSQTQETLKGFLRQAQNEFGLRIKKIRSDNRMEFKNSQIEGFLEEGIKHEFSSPYTPQQNGVVESKNRTLLDMARTMLDEYKTPDRFWAEAINTACYSISRLYLHRILKKTSYELLTEGFLLGYDSNTRAYRVFNKSTGLVEVSCDFVFDETNGSQVEQVDLDELDDEEALCVALRNMSIGDVCPKESEEPPQAHDQPSSSNQASPPTQDEDQAQDNEEDDQEDELPQEEGNDQGGDDHDKDKEDDQEPYRVEDALRDSDWVLAMQEELNNFTRNEVWHLVPRPNQNVVGTKWVFCNTQDEHGVVTTNKARLVAKGYSQVEGLDFSETYAPVARLESIRILLAYATYHGFKLYQMDVKSAFLNGPIKEEVYVEQPPGFEDSEYPNHVYKLSKALYRLKQAPRAWYECLRDFLITNGFKVGKADPTLCKFPLTREQDLDVA

SEQ ID NO: 314323 - protein, 174 aa, Zea mays
  Clone ID: MRT4577_49721C.1.pep
DSLGRAYPCWSLTKQHVAAAGAALMPWWSTGIGTRTCVALLYPIFAGEVSGRSVQVVYVKHSFYFLSYYILLLPVRTGGGVPLRWRSWIWVQRAPVSFSLPMPPRQRPPAPGRFAVMLAQRSTPRARRRRLQASARTAAATLRDARTSFQQDDSVWTPELRFGVLKANMNCDET

SEQ ID NO: 314324 - protein, 953 aa, Zea mays
  Clone ID: MRT4577_49722C.1.pep
MSGDHAKKEMETGEKPTTNHGSTSSEESRTKRKEKKKISSNKGKEKKSSSHHKEKKEKSSSHKPRRSGDKQKRMRKVVYYETDTSSTSTSDSDAPSVTSKRQERKKFSKIPLHYPRISKHAPLLSVPLGKPPTFDGEDYARWSDLMRFHLTSLHKSIWDVVEFGTQVPSVGDKDYDEDEVAQIEHFNSQATTILLASLSREEYNKVQGLKSAKEVWDVLKTAHEGDELTKITKRETIEGELGRFRLRKGEEPQHMYNRLKTLVNQVRNLGSVKWDDHEVVKVILRSLIFLNPTQVQLIRGNRRYTKMTPEEVIGHFVSFECMIEGSRKINELDDPSTSVAQPVAFKAMEEKKEESTPSRQPIDASKLDNEEMALVIKSFRQILKQRRGKDYKSRSKKVCYKCGKPGHFIAKCPLSSDSDRDNDKKGKRREKKRYYKKKGGDAHVCREWDSDESSSDSSDDEDAANIAVTKGLLFPNVGHKCLMAKDGKRKKVKSNSSTKYESSSDDNASDEEDNLRSLFANLNIAQKEKLNELVSAIHEKDDLLDSQEDCLIKENKKHVKVKNAYALEIEKCEKLSSELSTCREMIDNLRNENASLNAKVDSHICNVSILNPKDNNDNLLARIEELNISLASLRVENENLIAKAKELDVCNAIISNLRDKNDILHAKIVELNSCIPSTSIVEHVSICTRCRDVDVNAIHDHMALIKQQNDHIAKLDAKIAEHNLENEKFKFARSMLYNGRRPGIKDGIGFQRGDNVKISAPPKRLSNFVKGKAPMPQDNEGYILYPAGYPESKIRRIHSRKSHSGPNHAFMYKGETSSSRQPTRAKLPKKTPTASNEHNLSFKTFDASYVLTNKSGKVYASGGSSWILDSGCTNHMTGEKRMFSSYEKNQDPQRAITFGDGNQGLVKDYNLLSVSQLCQMGYNCLFTDVGVTVFRRSDDSIAFKGMLEGQLYL

SEQ ID NO: 314325 - protein, 49 aa, Zea mays
  Clone ID: MRT4577_49723C.1.pep
FCLFKLRTAGGPPNCLGFPRPFRKGGFPPARFCAKNQVPPSKGPTLGLF

SEQ ID NO: 314326 - protein, 153 aa, Zea mays
  Clone ID: MRT4577_49724C.1.pep
GFRPFGTGSLCQTLVLFLVILYSSASCSYRRRCAFAVALLDLDATRARQLLPPHPRVRPRVRGRVGSPSCWLSDRPLALGGVACRPGPVSSHVAARWCFRVMGGSFVYLSDRHVMCSARTAAATLRDARTSFQQDDSVWTPELRFGVLKANKL

SEQ ID NO: 314327 - protein, 41 aa, Zea mays
  Clone ID: MRT4577_49725C.1.pep
HLARTPQNLTTSHDHRSICSHQIWLNNSLKTSYPLIKLPVY

SEQ ID NO: 314328 - protein, 48 aa, Zea mays
  Clone ID: MRT4577_49726C.1.pep
SLIASFLVQIKKKKKKKKKKKKKKKKKKKKKKKPKKKKKKKKGPNLPP

SEQ ID NO: 314329 - protein, 71 aa, Zea mays
  Clone ID: MRT4577_49727C.1.pep
KQRVNRRQSSKVWIGRSTVNDGVPCLSKVLFLCLGGKGWTWGLYSLGNRVEATQFSSSSVKKWNVFYYLLF

SEQ ID NO: 314330 - protein, 83 aa, Zea mays
  unsure (1)..(83): unsure at all Xaa locations
  Clone ID: MRT4577_49728C.1.pep
IRKRKYXKKKKKKKKKKKKKKKKNKKKKNKKKKKKKKHNKIKKKRKIKKIKMNEELQRKKKKKGPPFKKLNLSCGGFQIQKLF

SEQ ID NO: 314331 - protein, 175 aa, Zea mays
  Clone ID: MRT4577_49729C.1.pep
MGLPSFHCFCNAVQWYFSPNEWWTKQQFPKLLPLFLASPKIDVNQQDKNGWTPLMHAAACGWGEMAEALLKDKRVDVTIKSKRDETARSLAVRSDVMWLAAAIEKREKEASGASPQPNTATNAGSDLSALREELEATKKLCAYLARIVQSLDEVKDKENTVGNIRELAAALRVDF

SEQ ID NO: 314332 - protein, 196 aa, Zea mays
  Clone ID: MRT4577_4972C.1.pep
MANEHRHHFVRRHALSAISAIYSLQQGDQLIPDAPELVERALASEQDPAARRNAFLMLLAAGQDRAVGYLFNNADRVAEWPDLLQMAAVDLIRKVCRSKGRADKGRYIRVIISLLSASSAAVVYEGAGALVSLSSAPTAVRAAANTYCQLLSSQSDNNVKLIVLDRLHELCSSCPSTCPCRSRSYIGGRWRLWSRP

SEQ ID NO: 314333 - protein, 56 aa, Zea mays
  Clone ID: MRT4577_49730C.1.pep
MAHSNVWNSHPKSFGKGSRQCRVCAHRAGLIRKYNLNICRQFFREYASDIGFNKFR

SEQ ID NO: 314334 - protein, 140 aa, Zea mays
  unsure (1)..(140): unsure at all Xaa locations
  Clone ID: MRT4577_49731C.1.pep
VQAHRRAKAKNRPKHGGGAPPGHRHHKDHRREKGERRHXHQQHRXRHHQHPDGGHHHHTHRGLEQAHQQDHXHHQCQQSHGHHHEXTKRAHQEPHRAPEAPTXRNHHHRNKRRRHHHICLFETTHHQHXEDHKHHKGHLD

SEQ ID NO: 314335 - protein, 165 aa, Zea mays
  unsure (1)..(165): unsure at all Xaa locations
  Clone ID: MRT4577_49732C.1.pep
AAGPTDPYNFFMSMGXHECTPAYPIYGFYDERRPXERIXLRNTFTDCLNCLPVXSRGKEKIFCVHGGLXSTELNRLDLILXLDRPTDVPETALFCELVWADPCTGASTRAFIERGGAFTSGPRLXPESLDRHELHLICRSHPGVEDGYEFFATRRLXTIFSVPNY

SEQ ID NO: 314336 - protein, 71 aa, Zea mays
  unsure (1)..(71): unsure at all Xaa locations
  Clone ID: MRT4577_49733C.1.pep
SIVXGRVGGGGGGGYIPGAGPDCMFDTLIHCHNDRSVVLSSFLPLFLFCLFLHPIIHKGGGGGSYSSIXHP

SEQ ID NO: 314337 - protein, 80 aa, Zea mays
  unsure (1)..(80): unsure at all Xaa locations
  Clone ID: MRT4577_49734C.1.pep
SERSLYESFLYNGLPYIKGRLQCVHAVPDAQFEEVSDKGQADDPAFTRYLALHPKRFXISSISMTSVGLMITRTKDKALE

SEQ ID NO: 314338 - protein, 76 aa, Zea mays
  Clone ID: MRT4577_49735C.1.pep
GRDYRFLWVPHTLLPCMRPERRSRICSQKRPQRFPLSYRIPHHTYFAHHTNDPALRCHKHSTKITKLLKMKRTIYC

SEQ ID NO: 314339 - protein, 82 aa, Zea mays
  Clone ID: MRT4577_49737C.1.pep
NVRMEQMSIRRIGAGVVHLLLIAPIENRRTRHELEAFPMSRISARENVSHGPSGTVHDAIRDGTRLYAVPQQDSGRPAEELE

SEQ ID NO: 314340 - protein, 160 aa, Zea mays
  Clone ID: MRT4577_49738C.1.pep
CNIFLESRAIARHVLRKHKPELLGGGRLEQTAMVDVWLEVEAHQLSPPAIAIVVECVFAPFLGRERNQAVVDENVEKLKKVLEVYEARLATCTYLAGDFLSLADLSPFTIMHCLMATEYAALVHALPHVSAWWQGLAARPAANKVAQFMPVGAGAPKEQE

SEQ ID NO: 314341 - protein, 254 aa, Zea mays
  unsure (1)..(254): unsure at all Xaa locations
  Clone ID: MRT4577_49739C.1.pep
MATPAVKVYGWAISPFVSRALLALEEAGVDYELVPMSRQDGDHRRPEHLARNXVPRSLDRSTVNSFWWFSLSLPPDXLLLLCXPFGKVPVLEDGDLTLFESRAIARHVLRKHKPELLGGGRLEQTAMVDVWLEVEAHQLSPPAIAIVVECVFAPFLGRERNQAVVDENVEKLKKVLEVYEARLATCTYLAGDFLSLADLSPFTIMHCLMATEYAALVHALPHVSAWWQGLAARPAANKVAQFMPVGAGAPKEQE

SEQ ID NO: 314342 - protein, 105 aa, Zea mays
  Clone ID: MRT4577_4973C.1.pep
ADALRQGRRAPRHPPASLEATCSWRAATMAVVPSVTSSKSSLFLSVYTTKKTTDEGFGRGSQCSHVASFSCSSSVLVHPAEHQKTEKRSDVLTIPPPPMYIYMMA

SEQ ID NO: 314343 - protein, 74 aa, Zea mays
  unsure (1)..(74): unsure at all Xaa locations
  Clone ID: MRT4577_49740C.1.pep
SVXVMPXAAXXAXXPXXGGAAXAPXXAWAHLLXCIAXXACRSXXGWAXVSAFPRLLXWMPYWSLGWKRXVLFFF

SEQ ID NO: 314344 - protein, 279 aa, Zea mays
  unsure (1)..(279): unsure at all Xaa locations
  Clone ID: MRT4577_49741C.1.pep
MATPAGKVYGWAISPFVSRALLALEEAGVDYELVPMSRQDGDHRRPEHLARNXVPRSLDKSTVNXFGGSLSRFRPTDLLLLCXPFGKAPALEDGDLTLFXSRAIARHVLRKHKSELLGGXCWSRRRWRAVPRGSTRAVKHKAADGRLEQTAHQHVWLGIAAHQLSPPAIVIVVECVFAPFLGRERNQAVVDENVEKLKKVLEVYEARLATCTYLAGDFLSLADLSPFTIMHCLMATEYAALVHALPHVSAWWQGLAARPAANKVAQFMPVGAGAPKEQE

SEQ ID NO: 314345 - protein, 230 aa, Zea mays
  unsure (1)..(230): unsure at all Xaa locations
  Clone ID: MRT4577_49742C.1.pep
MPPPVEPYIPSFTAGLSAHEAADADKDYLYFLRHVRLDGDAYTVVIPSKDGASCPPQIIRYEQPPSDHNAGAPVAGSECGRQRAHPPSEENSWATGEAAPHGVKRKVPGASPAGEVRSGAVRMEEDTPTLVAKSAWYDLQPDIDDDYRFFLQNARVVNDKLVFKTGNCSITIGDHSDAEEHDDTEEEEKEEEXEGEEDDEEEADDLPASGQSGGGRYVGGRSCVRDQKDG

SEQ ID NO: 314346 - protein, 52 aa, Zea mays
  Clone ID: MRT4577_49743C.1.pep
IRFEISLHLVFHLTCLIADPCYYPVHTKYHLLRAAHRQQPQVPGRSPGRGSL

SEQ ID NO: 314347 - protein, 175 aa, Zea mays
  unsure (1)..(175): unsure at all Xaa locations
  Clone ID: MRT4577_49744C.1.pep
SVRGVVLGTSTDDRYFNDTXYFGPITGRIAHRVARGRFVLDGKVYHMHRNDGRNTIXHGPHRGGRGHIWTVKEYVVRGESPNMTYYYRIFHGEQGLPANVDPYLTYHVSGAYTLGVHMNDKGLGQXKPEGLVLDVYWNLEREGRGDVLGHTLQIRESXDAVLDDETTGFFRARGA

SEQ ID NO: 314348 - protein, 63 aa, Zea mays
  Clone ID: MRT4577_49745C.1.pep
HSVFGGHGRCKGSLPFASCKAPTLFIYVPIFFCLRMAARSHERTKHLSLIIRRTPAPPPPPPP

SEQ ID NO: 314349 - protein, 58 aa, Zea mays
  Clone ID: MRT4577_49746C.1.pep
KRPTKQLHNHHTVQYSATTKNDIRISSAKDLCIFYRYDLELEPHASAHASAHASAHAS

SEQ ID NO: 314350 - protein, 42 aa, Zea mays
  Clone ID: MRT4577_49747C.1.pep
SFLPSTTMLAPMAGTVSLFRRSLREPCGFSSFVLASSKETGR

SEQ ID NO: 314351 - protein, 75 aa, Zea mays
  Clone ID: MRT4577_49748C.1.pep
ETNRAGKMPIILIKRKAQNWQTTTFRRGLQQKQLLQTKTTLTLSTTTTLYATRAHSSSDNMSTHQKASQHNKDKI

SEQ ID NO: 314352 - protein, 49 aa, Zea mays
  Clone ID: MRT4577_49749C.1.pep
NASHFIPADHKYECNRYRHCKAYRTKFQKHFLISFLFILIHANSQLPRK

SEQ ID NO: 314353 - protein, 985 aa, Zea mays
  Clone ID: MRT4577_4974C.1.pep
PSRLAGVPQIRSPSPSLPRGGQARSTGLADLAAMEKACTLLVYFDKGSPSMANEIKAELESGDGPAKADAMRRAISLLLNGESLPHLFITVVRYVQSCDDHAVQKLLLLYLETVDKRNAATGKILPEMILICQNLRNNLQSPNEYIRGVTLRFLCRLTEPELLEPLVPSILANLEHRHHFVRRHALSAISAIYSLQQGDQLIPDAPELVERALASEQDPAARRNAFLMLLAAGQDRAVGYLFNNADRVAEWPDLLQMAAVDLIRKVCRSKGRADKGRYIRVIISLLSASSAAVVFEGAGALVSLSSAPTAVRAAANTYCQLLSSQSDNNVKLIVLDRLHELCSSHREVMVDMVMDVLRALASPNVDVRRKVLDLVLDLLTLRNVEEVVLYLKKEVVKTQAAEVKGDEYRQMLVQAIHNCAKKYPEVAALVVHLLMDFLGDPNVAAALDVVLFVREIIETNPKLRVSMIQRLIDIFYQIRASHVCSCSLWILGEYSLSLPEVESAISTIKQCLGDLPFYTVSEERETTDSSKPSQPVVSSVTVSSRRPAVLADGTYATQSAATEIAVSAPASALGSLASTQNLRSLILSGDFFLAAVVACSLTKLVLRLEEIQPAKVEVNKVSTEALLIMVSILQLGQSSYLPHPIDNDSYDRIVLCVRLLCNTGDDVRKVWLQSCRQSFVNMLAEKQFRETEEMKAKAQITYAQPDDLIDFYHLKSRKGMSQLELEDAVQDDLKAATGQFTKDADDTDKLNRILQLTGFSDPVYAEAFVTVHHYDIVLDVTVVNRTKETLQNLCLELATMGDLKLVDRPQNYTLAPESSKQIRANIKVSSTETGVIFGNIVYETSNVMERSVVVLNDIHIDIMDYISPATCADVAFRNMWAEFEWENKVAVNTVIQDEKEFLNHIIKSTNMKCLTPPSALDGECGFLAANLYAKSVFGEDALVNISVEKQADGKLTGYIRIRSKTQGIALSLGDKITLKQKGGNS

SEQ ID NO: 314354 - protein, 147 aa, Zea mays
  Clone ID: MRT4577_49750C.1.pep
KGGADGGNKSSKYINDLVIKPLGRPNFLRPKTVESLFVLYRIPGVSKFREWGWQFFQAFEKSPKVDFGGSPPLDDVPSLPPSPKNKMEPFFFGEPLKDLYFLFDETKPPPLDKYVFKTGAPPLPVMRFAEQASHFGGFPQFKAVVLW

SEQ ID NO: 314355 - protein, 145 aa, Zea mays
  Clone ID: MRT4577_49751C.1.pep
RCCRGKYLNFSEPVVRESFSDRACAWSYGVNVFDLQAWRREQCTEQFHRFMEMNENGTLWDPTSVLPVGLMTFYGKTKPLDKSWHVMGLGYIPHIRPEDIRGAAVIHFNGNMKPWLDVAFNQYKHLWTKYVDTEMEFLTLCNFGL

SEQ ID NO: 314356 - protein, 77 aa, Zea mays
  Clone ID: MRT4577_49752C.1.pep
PPAVPSQPSPPPHHAPRPPRWDPAEPTQPNPGPNFNFAPPPDLRDEFAPEVPSPLGARPWIGFWARNGPMKARLLGF

SEQ ID NO: 314357 - protein, 132 aa, Zea mays
  Clone ID: MRT4577_49753C.1.pep
MFRSAVLRSLRVAARPAAVRSFAAPRVASVAVPKIQSFQAVRFYSAGGALNKDEVEGRIMSLLQGFDKVNDVSNIKSSAHFANDLGLDSLDTVEVVMAIEEEFSIEIPDKDADSIHSVNQAVEYILNQPDAA

SEQ ID NO: 314358 - protein, 57 aa, Zea mays
  Clone ID: MRT4577_49754C.1.pep
TRVQRLTHPTVRPVSVISQPDSLILSGIISKYSLTTMLTTLSKVVILCLVCKFGVVT

SEQ ID NO: 314359 - protein, 44 aa, Zea mays
  unsure (1)..(44): unsure at all Xaa locations
  Clone ID: MRT4577_49755C.1.pep
SSKTRNSPNKHHLLGQXXXTHQNDRAPGCSIKKEPHHVKAYKAD

SEQ ID NO: 314360 - protein, 142 aa, Zea mays
  unsure (1)..(142): unsure at all Xaa locations
  Clone ID: MRT4577_49756C.1.pep
LPKAFRPLGEGLEVQVLLRWENQRVPGFGFXVPFSRKKAMGTPFKGITAKKLEAPKFPVKKANSPAALEAAAGGSVGALEAAAYAVAGPLNAGGAYAGAAAYGAAGGXGGGGGGXGGCHRWGGLGQLRGDLKELTVGAGGPK

SEQ ID NO: 314361 - protein, 129 aa, Zea mays
  Clone ID: MRT4577_49757C.1.pep
VTVFFTLQNKTVLLGMIAVGFWKGGESCSAASLPLPGSLPPWKNSLLHLRRPFLHHADLRGYHLKAMFSSSVWTAVFCGPSPPPYPAPPHSSSGFAILFSAVSCTKLCCDCAGGLDMAKRYSEAPSLPT

SEQ ID NO: 314362 - protein, 69 aa, Zea mays
  unsure (1)..(69): unsure at all Xaa locations
  Clone ID: MRT4577_49758C.1.pep
PSXXLLXKXNHXCVLQXQKIQIKKISTGVCXXSQKERADESSKKGXXEGCNXQVSFLKXXLKGNLQXXF

SEQ ID NO: 314363 - protein, 61 aa, Zea mays
  Clone ID: MRT4577_49759C.1.pep
LEVLGCLAPDTYIAVRTENVPWGGLAGARTHEREASGLRRWALALLSHLTARAVDVATIGT

SEQ ID NO: 314364 - protein, 124 aa, Zea mays
  Clone ID: MRT4577_4975C.1.pep
FLGPAVRGLPLFPISVGEKKTARAPFFLTPFPLFFGGSFFRVAPPFFRLGTLPFVPPLFFFFAPSFGPPGFSLFVSGWFGVRDCERKAISLRKQISPPPPPPFKRLPIRNACTPAGTRPDYPGP

SEQ ID NO: 314365 - protein, 105 aa, Zea mays
  Clone ID: MRT4577_49760C.1.pep
MEGANGVGGSESERKPLSEVVGDCVQRWFQDAYKEARKGDIANQVLVAQMFFSGYGTPKNEYKGKQWMDRASRFRSSALKVGMKRPGYNASDSDSDDDANDDANQ

SEQ ID NO: 314366 - protein, 77 aa, Zea mays
  Clone ID: MRT4577_49761C.1.pep
EDSTILKSHGGISGISRKIKASLDDGIKETEIATRQKLYGSNKHTEKPPRSFWTFVWDALHDLTLIILIVCAVVSLM

SEQ ID NO: 314367 - protein, 48 aa, Zea mays
  Clone ID: MRT4577_49762C.1.pep
VCRTSSGPYKRKIVVTLRLNHEAHRCVSVPETYRPTIMVVKLKLSHAL

SEQ ID NO: 314368 - protein, 123 aa, Zea mays
  Clone ID: MRT4577_49763C.1.pep
MAVAAGVSEPPIVEQVITEFFAKSLHIILESRSPYDSSRNFIRPSPPSSPLAGSQPRDRWFNLALRDCPAALENFDLWRQSNLEPLVIDIVLLQRDNTKTTSVGASRIIVEWIIKYETSRSGN

SEQ ID NO: 314369 - protein, 56 aa, Zea mays
  Clone ID: MRT4577_49764C.1.pep
ILKLSLMKGMGKKKLRACELKKIVALAHMQKTRDKRKYPGRHVLIVAKDKLYVLST

SEQ ID NO: 314370 - protein, 146 aa, Zea mays
  unsure (1)..(146): unsure at all Xaa locations
  Clone ID: MRT4577_49765C.1.pep
RXXISGDGRRLAXXRLPPSYHREPAPCXXPPRRRGSXSHSPSGPRHXLPFSSRGGRPARPRACCLGGGAGSLSAPCPKSLSXXFCCHXPVRSLFTGIXEEVGRVRRLGPPVTPSGGGGGGEAXGLDLEVETKNXLGGTQXGDRVVV

SEQ ID NO: 314371 - protein, 74 aa, Zea mays
  Clone ID: MRT4577_49766C.1.pep
ENPEVVLAECTKNFGPWLVTHAMELLTADNDYADIMLHEERPNLGGISIEELHRLVYAQVLCCHPLTWQVSYVT

SEQ ID NO: 314372 - protein, 30 aa, Zea mays
  Clone ID: MRT4577_49767C.1.pep
KIIVIVVRFYSTFEAYESQKLSSFNNTYIY

SEQ ID NO: 314373 - protein, 111 aa, Zea mays
  Clone ID: MRT4577_49768C.1.pep
VTLEGRPGTHPLDHVPRRGSRETEPPDARAQKETTGRRAPRAGKKKTDDYIRWSTEQTHRQQDTGEKHIDQKRPELDKKTQAQDLRRNGGKQNTPRIRPQLAQPNQKGPGT

SEQ ID NO: 314374 - protein, 174 aa, Zea mays
  Clone ID: MRT4577_49769C.1.pep
MATQISKKGRRIRELTSVVQKRFNFPENGVELYAEKVVNRGLCAIAQAESLRYKLLGGLAVRRACYGVLRFVMESGAKGCEVIVSGKLRAQRAKSMKFKDGYMISSGQPVNEYIDSAVRHVLLRQGVLGIKVKIMLDWDPKGKVGPITPLPDLVTIHTPKEEDELRPPVLAAEV

SEQ ID NO: 314375 - protein, 86 aa, Zea mays
  Clone ID: MRT4577_4976C.1.pep
PRIFLATDCLSPSQPKTDGAQGREEARGENRGETRGERHRGRTKRERSVQSRRSGATAESRTELRHFRLQARMILSSNTYTIQLRA

SEQ ID NO: 314376 - protein, 82 aa, Zea mays
  Clone ID: MRT4577_49770C.1.pep
LGTSRPAGELADSLLDGVGVFLGRGVTCQLISSTGGDPNNGNRGKLVAEASLEHGLLNPAALLSSAEPGLVTFHWEREKQGI

SEQ ID NO: 314377 - protein, 221 aa, Zea mays
  unsure (1)..(221): unsure at all Xaa locations
  Clone ID: MRT4577_49771C.1.pep
MATQISKKKKFVSDGVFYAELNEMLTRELAEDGYSGVEVRVTPMRTEIIIRATRTQNVLGEKGRRIRELTSVVQKRFNFPENSVELYAEKVVNRGLCAIAQAESLRYKLLGGLAVRRACYGVLRFVMESGAKGCXRAQRAKSMKFKDGYMISSGQPVNEYIDSAVRHVLLRQGVLGIKVKIMLDWDPKGKVGPITPLPDLVTIHTPKGEDELRPPVLAAEV

SEQ ID NO: 314378 - protein, 193 aa, Zea mays
  unsure (1)..(193): unsure at all Xaa locations
  Clone ID: MRT4577_49772C.1.pep
INFLKKTVPDTDAFPKILNLSSNIFTVLILPEIGQLKGLLSLDISSNSLTGPIPTSICNLTNLXMLDLSSNDLTGKIPVAFENLHFLSTFNVSNNDLEGPIPTGGQFGTFQNSSFLGNPKLCGFMIGRRCDSADVPLVSTGGRNKKAILAIAFGVIMVPQGKVNENKLTFSDIVKATNNFNKENIIGFPFLFI

SEQ ID NO: 314379 - protein, 275 aa, Zea mays
  Clone ID: MRT4577_49773C.1.pep
ECEALRKIRHRNLISVITCCSSTDSEQNNFKAIVFEFMPNQSLDKWLHDLDPDSDASGRVPGLTLLQRLNIAVNVADAMDYLHNNCEPPIVHCDLKPGNVLLNADFVACVGDFGIAKILSDSDGDPVTNSSTFTGIRGTVGYVPPEYGECRQVSSCGDVFSFGVTLLEMFTGKAPTDAMFEDGLTLQGFVEIAFPEKLMDIVDPVLLSTDERFARKPRHRSVGGEEIENAIASVTKLALSCTKLTPSERKPMGDAAAEMRKIRDCYLADLTRANN

SEQ ID NO: 314380 - protein, 228 aa, Zea mays
  Clone ID: MRT4577_49774C.1.pep
MATQISKKKKFVSDGVFYAELNEMLTRELAEDGYSGVEVRVTPMRTEIIIRATRTQNVLGEKGRRIRELTSVVQKRFNFPENGVELYAEKVVNRGLCAIAQAESLRYKLLGGLAVRRACYGVLRFVMESGAKGCEVIVSGKLRAQRAKSMKFKDGYMISSGQPVNEYIDSAVRHVLLRQGVLGIKVKIMLDWDPKGKVGPITPLPDLVTIHTPKEEDELRPPVLAAEV

SEQ ID NO: 314381 - protein, 104 aa, Zea mays
  unsure (1)..(104): unsure at all Xaa locations
  Clone ID: MRT4577_49775C.1.pep
MATQISKKKKFVSDGVFYAELNEMLTRELAEDGYSGVEVRVTPMRTGIIIRATRTQNVLGEKGRMIRELTSVVQKRFNFPENGVELYPXKVGNRGPCAIVQAES

SEQ ID NO: 314382 - protein, 92 aa, Zea mays
  Clone ID: MRT4577_49776C.1.pep
ALFRANLRAWGRCCPGITRRWRFPTGSAGLAPRSSVSRWSASSSGSVCPRPRSRVCPALKQPRFLGAVVACERASSGHRQPAATMVCGSIML

SEQ ID NO: 314383 - protein, 235 aa, Zea mays
  Clone ID: MRT4577_49777C.1.pep
MATQISKKKKVRELLLNFVSDGVFYAELNEMLTRELAEDGYSGVEVRVTPMRTEIIIRATRTQNVLGEKGRRIRELTSVVQKRFNFPENGVELYAEKVVNRGLCAIAQAESLRYKLLGGLAVRRACYGVLRFVMESGAKGCEVIVSGKLRAQRAKSMKFKDGYMISSGQPVNEYIDSAVRHVLLRQGVLGIKVKIMLDWDPKGKVGPITPLPDLVTIHTPKEEDELRPPVLAAEV

SEQ ID NO: 314384 - protein, 57 aa, Zea mays
  unsure (1)..(57): unsure at all Xaa locations
  Clone ID: MRT4577_49778C.1.pep
KILLDWVFFSFILEKQNTSSIAGKQKLVYNPXXCLQKTTXXYNYYIKQYLLHTIHHN

SEQ ID NO: 314385 - protein, 70 aa, Zea mays
  Clone ID: MRT4577_49779C.1.pep
GRPSLGCIPGRAFIVDLFYNLHYWKRTETDWGSERDASSDRLMATPLENHNPNYKMYLSYLNTGNNFATP

SEQ ID NO: 314386 - protein, 50 aa, Zea mays
  Clone ID: MRT4577_4977C.1.pep
LFQGQGVEGNPVFAVSLVKKKNPLGANYQTAFPRGLGDFFKQVGRQVFPL

SEQ ID NO: 314387 - protein, 55 aa, Zea mays
  Clone ID: MRT4577_49780C.1.pep
GVWVLPFGQERLIGRGHFGCPKGRAPGPDRKASRAWAWVWVCVCLNEISSLVPVH

SEQ ID NO: 314388 - protein, 96 aa, Zea mays
  Clone ID: MRT4577_49781C.1.pep
PNWFSYTLKFFQASSFPTRTQVPGGSPKMPSFLTPILFGRDIPPSQRMPHPPRCFSVTKDLSKAKCCVLSIKSSGKKTPLPDLSPKRGRHVFSFQF

SEQ ID NO: 314389 - protein, 122 aa, Zea mays
  Clone ID: MRT4577_49782C.1.pep
MNSRRDFRSHRAALFDGIEEGGVRAPAYSSREIHEHENDQALDSLHDRVSVLKRLTGDIHEEVENHNRMLDRMGNDMDASRGFLSGTVDKFKMVFETKSSNNAEYAGASFIAVFLLIYYLTK

SEQ ID NO: 314390 - protein, 135 aa, Zea mays
  unsure (1)..(135): unsure at all Xaa locations
  Clone ID: MRT4577_49783C.1.pep
APAKVCRPWAGAPPVSHVAVAAGVAPXSRXRPHTPPCTICRRLLRAPERDGIPRPAASRSQHQPPPPRRTHTSRRVESIKGTRSGPAGIREAMRRKGVAGKEEAGEQGAKSGPEGKRSPRGPAGEETENDQVRTT

SEQ ID NO: 314391 - protein, 122 aa, Zea mays
  Clone ID: MRT4577_49784C.1.pep
MNSRRDFRSHRAALFDGIEEGGVRAPAYSSREIHEHENDQALDSLHDRVSVLKRLTGDIHEEVENHNRMLDRMGNDMDASRGFLSGTVDKFKMVFETKSSRRMATMVASFIAVFLLIYYLTK

SEQ ID NO: 314392 - protein, 221 aa, Zea mays
  unsure (1)..(221): unsure at all Xaa locations
  Clone ID: MRT4577_49785C.1.pep
NVVFAAYMYDGTSDVMQAGGTVKAADAFDVGAGHVDPLRALDPGLVYNAGARDHVVFLCSLGYTEAAIRNMVLPQPALDTSCXPRRRRRXGPEEADLNYPAIVLPDLGGRVTVKRTVTNVGANRDAVYRAAVASPQGARAEVWPRELGFSARPGGEQASYYVTVTPAKLSRGRFDFGEVVWSDGFHRVRTPLVVRVTNLPDDGVEVVQTAYATGDGSQAAA

SEQ ID NO: 314393 - protein, 324 aa, Zea mays
  Clone ID: MRT4577_49786C.1.pep
MAVDRVDGEEAFEEVDPTGRFGRYADVLGLGSVKKVYRGFDQEEGIEVAWNRVRLRSLADRDPGMVERLHAEVRLLRSLSHDHIIGFHKVWLDRDAGVLNFITEVCTSGSLREYRHRHRHVSVKALKKWARQILEGLNHLHTHDPCIIHRDLNCSNVFINGNNGQVKIGDLGLAAIVDKTHVAHTILGTPEFMAPELYTETYTESVDIYSYGMCVLEMVTREVPYAECGSVVQIFHNVTRGVPPAALKRLKDAELRGFIERCIGQPRNRPSAADLLQDPFFNGVRGGDDDDDATALADASSVVAATPVPRPRSYVDDLAGLRLD

SEQ ID NO: 314394 - protein, 69 aa, Zea mays
  Clone ID: MRT4577_49787C.1.pep
PLYLPPYMNSERGGFRGKRGQKPSRHRTQEPGNKPPPKTRGRPTKQAQRGEKRPKTKGTAENRGPGRRA

SEQ ID NO: 314395 - protein, 100 aa, Zea mays
  Clone ID: MRT4577_49788C.1.pep
WLALVDDGDDVVALRLFPACATLRQMSHPRSPSPCGMYAIARLGSLHFPLPSIPCSRYLPRLLLHEISLPYCQPTMLHVYFVLLSTYLLRDCHRDRETCL

SEQ ID NO: 314396 - protein, 76 aa, Zea mays
  Clone ID: MRT4577_49789C.1.pep
FLAKDVWSSRVSGPAFDVSTPLMLLSAAPCCATHRHQCLVALCTTAVDPHPLASSNLPCLSSLGSFALFPIGQARL

SEQ ID NO: 314397 - protein, 88 aa, Zea mays
  Clone ID: MRT4577_4978C.1.pep
LQQSPPPPPTAPGSSEAVSFTAASSAFFLSGGATLATPPPVAASDLDLVRTPSTCETSTAATPSPSAPLRLRMYFPILRNAAAAPRVR

SEQ ID NO: 314398 - protein, 98 aa, Zea mays
  Clone ID: MRT4577_49790C.1.pep
SPGFYPPLFRKSWYPSGSRSEFPGWTPGAGRGPPRVLVVGPPRGGGLLKVPQRGPPRVTRMGSALRYLLGARSGTPGGVCRREARGWLTRVVGRGLFS

SEQ ID NO: 314399 - protein, 64 aa, Zea mays
  Clone ID: MRT4577_49791C.1.pep
LLHLYHSKGKGAAPAFFFEHHLPSVPYSTLFHPSFPIYTSTLMLPFLDLTFQAFYLIEIPITPL

SEQ ID NO: 314400 - protein, 96 aa, Zea mays
  Clone ID: MRT4577_49792C.1.pep
LFVAPRHRRRFLSVVSPPAVMLLPVPRPRAPSRLGLPGARLVSPSGCCVSLLRPRLMRGLPGCRRLSLARLLCCWRPRWSPRVRPPGVGRRCGALR

SEQ ID NO: 314401 - protein, 115 aa, Zea mays
  unsure (1)..(115): unsure at all Xaa locations
  Clone ID: MRT4577_49793C.1.pep
GAMILNLAFVVRTIFSKKGIKGKSVSGIKYYACLSIKSVVILLPFAIAMEGPKVWGGGWQTTVPEIGPNFVWWGGGXISVIVGSIIIFQRPVQPIKGVGAAIAILGTFIYSQAKQ

SEQ ID NO: 314402 - protein, 76 aa, Zea mays
  Clone ID: MRT4577_49794C.1.pep
GFSYKQKQVRPGAWFSQRAGLFLTVKGVRKDSPGYVSGVLKCKKAGLGEFGMDPVGLIYEKVVSLLFKNGKWFLPP

SEQ ID NO: 314403 - protein, 110 aa, Zea mays
  Clone ID: MRT4577_49795C.1.pep
LRLLDLVFLGSRRPAEEIQIIMSVAYIFGVYCICAIGDFRHVMMAAAICFYPAGAELAWSCNITIYAAIHHSGNWSLTVTSCAVPFPVGVHHSVSSSAMSWCRSSCHVLV

SEQ ID NO: 314404 - protein, 159 aa, Zea mays
  Clone ID: MRT4577_49796C.1.pep
MASRHLLLLLLAALLPAAATADPDAVQDYCVPDTGGGRGRGRAVDLALLPSYPCRSPANLTAADFAFAGVRAAGNFSADTGFAGVSVTPAQFPALHTLGVSFARADLSAAGGVNPPHYHPRATETALVLAGRVYAGFVDSGGRVFAKVLEKGEVMVFPR

SEQ ID NO: 314405 - protein, 179 aa, Zea mays
  unsure (1)..(179): unsure at all Xaa locations
  Clone ID: MRT4577_49797C.1.pep
TRLSLFSVLTSLLIHPGTRLDFSRRVVCERSGAADLRFLHATPYLTTRQGILLPLARRGGGGGGGGIFGLRAGVSVRRLLAGRARHWRSREEGDRRRDRWGTAWRAGARRRSRRRGRTGGGGGGGWKAPREEQLGSVPGRIFSNDGPXPHXRRVHAAGPEGGQSGRHARLGWVSRGGGR

SEQ ID NO: 314406 - protein, 54 aa, Zea mays
  unsure (1)..(54): unsure at all Xaa locations
  Clone ID: MRT4577_49798C.1.pep
LEYQLVKGGIQSLTSCSLKACNPELASCIHLSLNLDHQGQRMXDLPPISILCLT

SEQ ID NO: 314407 - protein, 203 aa, Zea mays
  Clone ID: MRT4577_49799C.1.pep
MGALKYVEELQKKKQSDVVAFLLRVRCWELRQLNVIHRASRPSRLDKARRLGYKAKQGYVIYRVRVRRGGRKRPAPKGATYGKPTNQGINQLKYQRSLKATAEERVGRRCANLRVLNSYWINQDSTYKYYEVILVDPQHKAIRIDPRINWIVNPVHKHREARGLTATGKKSRGLNKGHRYNKTKAGRRKTWKRHNTLSLWRYR

SEQ ID NO: 314408 - protein, 179 aa, Zea mays
  unsure (1)..(179): unsure at all Xaa locations
  Clone ID: MRT4577_4979C.1.pep
MDIDLVAGVRNIKIFGTAANADDVYRTLLVXLYRLLARRTTIHYYGDILKRIFLTLTNHPPIXSVRRLXKYMKXKXDNTCAESAATASHDNXCQEDPKMNATALMISKTDRRRIDYAXGVECRTVDQIALRAPLGENTDRLTLPTNAREXVRHFSKAPVVXHNHTKTYVRSKARKYEKA

SEQ ID NO: 314409 - protein, 72 aa, Zea mays
  Clone ID: MRT4577_497C.1.pep
FCFFFVFFFFFFFFFFFFFFFFFFGATAIYASSKTLKTTSLEQCDAFYYHYRDQQIGQAPMSSCCQTFSFTA

SEQ ID NO: 314410 - protein, 133 aa, Zea mays
  unsure (1)..(133): unsure at all Xaa locations
  Clone ID: MRT4577_49801C.1.pep
TCMLLCSXAIKMGAYGSIRVNMEXLPHAQYLLAPGQARGGAEQIINAXATPLGQRXFKLRIAYCSVSXMGPIIIGIGSITNMGLNGAIVHIXLSHGFNGATLSLLEVTAXYRXRLDYPEEPGGISIPMPIIGT

SEQ ID NO: 314411 - protein, 86 aa, Zea mays
  Clone ID: MRT4577_49802C.1.pep
LQGCPLRWAGSTLYPGQEGPLLQMGQRAPLGKVQDRQEQGVFYQGPLIDVRPPEESCLTCGFVGSDTPHFCFRVTMNISGLDLGLP

SEQ ID NO: 314412 - protein, 40 aa, Zea mays
  Clone ID: MRT4577_49803C.1.pep
RPPPLILGGTQTNLILTRKWHTTGGSPGFKLYPTKNGSLG

SEQ ID NO: 314413 - protein, 128 aa, Zea mays
  unsure (1)..(128): unsure at all Xaa locations
  Clone ID: MRT4577_49804C.1.pep
PFDLPGTVIPQXNLPLFGQKSSDSLFNIGPGVDGNPNSVSLELGTKPGCFLVGGPNFSPGARIEVPCKSSLESIGGILEQGGSFLQIAPLRQYPPISFFAKGGARNFPLDPLYSLRGEFYPVFFNVRV

SEQ ID NO: 314414 - protein, 114 aa, Zea mays
  unsure (1)..(114): unsure at all Xaa locations
  Clone ID: MRT4577_49805C.1.pep
VDRPTRHPPTHSLGFSRRPSRESDPLGRRAPDRDSFXRPFAEGYIXVTTYXPTYKIGDXVDVXVNGAXHKGMPHKFYHRRTGRVWNVTKRAIGVEVNKQFNGPIIRKPIPVPIE

SEQ ID NO: 314415 - protein, 167 aa, Zea mays
  unsure (1)..(167): unsure at all Xaa locations
  Clone ID: MRT4577_49806C.1.pep
ADNKRLGPGSLGLRVDRLQEDVDLLLLHHRRYHAACWNATAGQEHGDEQAQDDCKWRRIPTFGDWNLRDDMPVTQYLQAGTXFIVVPPAEKDDDEDLFKVPQXPAKPYNYKKVKQNRTLSFSRQLITLREKSFLPPALKIVSVNTVSYFRSISPFPYTLYPVGTSER

SEQ ID NO: 314416 - protein, 141 aa, Zea mays
  unsure (1)..(141): unsure at all Xaa locations
  Clone ID: MRT4577_49807C.1.pep
QILNTSFVKAFTCLKPGSLGLRVDRLQEYVDLLLLHHRRYHAACWNATAGQEHGDEQAQDDCKWRRIPTFGDWNLRDDMPVTXYLQAGTXFIVVLPAEKDDDEDLFKVPQXPAKPYNYKKVLGGFVGWSCELHQTGSQGRY

SEQ ID NO: 314417 - protein, 108 aa, Zea mays
  unsure (1)..(108): unsure at all Xaa locations
  Clone ID: MRT4577_49808C.1.pep
ADNKRLGEDVDLLLLHHHRNHAACWNATTGQEHGDEQAQDDSKWRQIPTFDDWNLQDDMPVTQYLQAGTXFIVVPPAEKDDDDDLFKVPXFPAKPYNYKKVKQNRTLH

SEQ ID NO: 314418 - protein, 67 aa, Zea mays
  Clone ID: MRT4577_49809C.1.pep
EVTGSGVSQMRDTPPHINKKEEMQQHQSVNLDRSNTKNSGARPVILLIVHRQLSFLGRTRLFHGTIK

SEQ ID NO: 314419 - protein, 128 aa, Zea mays
  Clone ID: MRT4577_4980C.1.pep
GRGVSQSRAPSSSARLAARRPESCPVRVRSRQTRVLACQPSSSWSARVRSARPCALVLPSCNRCNPMAPPGNREIRRMQTGPAVAACSCTASPQGPRWIRQPARPPSRARQRRPRWIHPLATAAALKP

SEQ ID NO: 314420 - protein, 72 aa, Zea mays
  Clone ID: MRT4577_49810C.1.pep
PTRPLVLDREPPPFFFFFFFFFLHKSLFSFLFLLTADLPEPKKVNKCAGSLVQWTTTKDHTGKTSKKTTGQA

SEQ ID NO: 314421 - protein, 123 aa, Zea mays
  Clone ID: MRT4577_49811C.1.pep
GRGQRAADTGKKRRIQELLTRMPHLSRTFADAIKAAHGAPVSSTGLPLHIRGMGTEPPALRWVRTGSTKHANTTIQHCCTNELGHHRSVGELLTRMRVHRAYGTTESMGDFAEEPEQVGRVSS

SEQ ID NO: 314422 - protein, 58 aa, Zea mays
  unsure (1)..(58): unsure at all Xaa locations
  Clone ID: MRT4577_49812C.1.pep
TLKKKKKNKKKKKKKKKKKKKKNLKKPKXKKKRRSGKKRGGKPLRRKSRERIKNNKRP

SEQ ID NO: 314423 - protein, 408 aa, Zea mays
  unsure (1)..(408): unsure at all Xaa locations
  Clone ID: MRT4577_49813C.1.pep
MKAVGYNLYDSSGTDDDLPPAQNRGLRGRVFSGNGRASAGAFPYMRANNDLESEIHRVEQDAYTGVLRAFKVQSDAISWEKESLITELRKELRVSDEEHRELLNKVNEDGSIRQMRELRQAGGIPSGLHRGNRVLYDAEPGPTTKRQRASHSIPSQSAGLQSPMMPSHSVSSAKWGPLSARGKKAKMMAPEDIRWEFDGHLSNHDGWGPSGPMLKRHMTNNGAMAGSIRGRGRLSINEPIKDYAPPQNDINRNFDYIDIPNTESVVTEVERVLANPNMPEIEKARKLLKDQEQSLLDAIARLDEASDSDSXTEDMAMEDRRGSAGVLGNGTALLLSCWNWKINMHLCITYLDHRTNKPHYGKKIDMPENGAWKLLMPEMGFAGYTKLSARGAGICKCQNCLNGVSYVA

SEQ ID NO: 314424 - protein, 136 aa, Zea mays
  Clone ID: MRT4577_49814C.1.pep
MCIAKSMNLVVPKLPGVVHAPNGETAIIKAAACICKGVRDGLFDGSNESNGVEVGYAVPNSFAGGVGLSSQDGGCCSLLLAASLSNAQGSPFSILMFAYSWTRMICSFIPHVSIHKHFMFSVFLSFCKKKKKHQKE

SEQ ID NO: 314425 - protein, 194 aa, Zea mays
  unsure (1)..(194): unsure at all Xaa locations
  Clone ID: MRT4577_49815C.1.pep
HRDTRDFDIYKHDPWDLPSXSSISGEKEWYFFCLRGRKYRNSIRPNRVTGTGSGFWKATGIDRPVHSSGRAGGGPVVVVGLKKSLVFYRGSAGKGTKTEWMMHEFRLPPRADDTAHATPASEREAEVWTVCRVFRRNFTYKKHXQQQQQQQXWLQAAARCPPAPXATVAQPGESSSVTGGVESDTXDEYTNTIP

SEQ ID NO: 314426 - protein, 215 aa, Zea mays
  unsure (1)..(215): unsure at all Xaa locations
  Clone ID: MRT4577_49816C.1.pep
NHRVEQDAYTGVLRAFKVQSDAISWXEKESLITXELRXKELRGSDEEHRELLNKVNEDGSIRQMRELRQAGGIPSGLHRGNRVLYDAEPGPTTKRQRASHSIPSQSAGLQSPMMPSHSVSSAKWGPLSARGKKAKMGEHELVYDMGTQAETWEWVRLCDMAPEDIRWEFDGHLSNHDGWGPSGPMLKRHMTNNGAMAGSIRGRGRLSINEPIKDY

SEQ ID NO: 314427 - protein, 83 aa, Zea mays
  Clone ID: MRT4577_49817C.1.pep
RPFPALKFLQVWLYRERPVPPPEPETSRLVDSLCLLPLLSSPPSHAHAAGLSFDLLTCTEDGSVYYLRLKIPTLNIEACKFHV

SEQ ID NO: 314428 - protein, 95 aa, Zea mays
  Clone ID: MRT4577_49818C.1.pep
RYGYGRPKGSAGVLGNGTALLLSCWNWKINMHLCITYLDHRTNKPHYGKKIDMPENGAWKLLMPEMGFAGYTKLSARGAGICKCQNCLNGVSYVA

SEQ ID NO: 314429 - protein, 44 aa, Zea mays
  Clone ID: MRT4577_49819C.1.pep
TRRFRVRTGMEFLLPNRPKNPPLTVLKVPAKKKKKKKKQRAGPL

SEQ ID NO: 314430 - protein, 313 aa, Zea mays
  Clone ID: MRT4577_4981C.1.pep
MQGGATAKQQARDGDRGAAKTPTTEGKGDAAGAKASADVAKGDAAVAKAAGDDVVVGKGDAGNKAGAGAMHHGLSAVEAKDSQTIVALQSPVTVMRPVRGDLEEHLPKPYLARALVAPDIYHPDGTAADEHGHHHMSVLQQHVAFFDRDDNGIIYPWETYSGCRALGFNMILSLLIALVVNGTMSYATLPGWLPSPLFPIYVHNIHKSKHGSDSGTYDNEGRFMPVNFENLFSKYARTSPDRLTYRELWSMTEGFRDAFDLYGWIAAKLEWTILYVLARDDEGYLSREAMRRVYDGSLFEYVERQRAQHAKMS

SEQ ID NO: 314431 - protein, 140 aa, Zea mays
  Clone ID: MRT4577_49820C.1.pep
MVDEAAVHQVSPLLAPMSEEEARRCFFDFMTKVTQYEELVDAGKMFLVKFRQELEHFRRPMIPMESDAVSQLVKSNYTDRLRSYLEAGCHLQHQSIRNINQLQSCEEKLEDHINKAKVLIEELECLAEDVYSTTLTASLS

SEQ ID NO: 314432 - protein, 144 aa, Zea mays
  Clone ID: MRT4577_49821C.1.pep
RGRGKGPLLQTAFSRGLGVFFFQLGRQVFRLERGQLGPPHLFGLGPSFGPPGFSLFVFGLFFFWNFGGVTFFPREQFFPFFPPVWFRGGVPLLRPPVCWNLPFEGPPGGVKKKKKKKKKKKKKKKKKKKKKNKKKKKKKKKLVL

SEQ ID NO: 314433 - protein, 451 aa, Zea mays
  Clone ID: MRT4577_49822C.1.pep
MAAATSRGPASVAICALAVLHAMAALCDSATAAAATCAGLAPAKHRPEVISIADFGGVGDGRTLNTWAFRKAVYRIQHQRRRGGTTLHVPAGTWLAGSFNLTSHMTLFLARGAVLKATQDTRRWPLVEPLPSYGRGRELPGPRYASFIHGDGLRDVVITGDRGVIDGQGEVWWNMWRRRTLEHTRPNLVEFMHSTGIHISNIVLKNSPFWNIHPVYCDNVVVTNMMILAPRDSPNTDGVDPDSSSNVCIEDSYISTGDDLVAIKSGWDEYGIAYGRPSAGVTVRRVRGSSPFSGIAIGSEASGGVRDVLVEDCAIFDSGYGIHIKTNVGRGGYIRNVTVDGVRLTGVRSGVRIAGDVGDHPDAHFSQLAVPTVDAVRISNVWGVNVQQPGSLEGIRASPFTRICLSNVKLFGWRSDAAWKCRDVRGAALGVQPSPCAELATSFASARSSCS

SEQ ID NO: 314434 - protein, 386 aa, Zea mays
  Clone ID: MRT4577_49823C.1.pep
MKAVGYSPYDSSAQNRGLRGRSFSGNVVASAGAFPYMRANNDLESEIHRVEQDAYTGILRAFKVQSDAISWEKESLITELRKELRVSDEEHRELLNKVNEDGTIRRMRELRQAGGSPSGLHHGNMVLYGAEPGSTTKRQRASHSIPLQSAGLQSPMMPSHSVSSAKWGPLQARGTKARTPIPLALPSVDPSSLINHKVYTRWPEDNNFYEATITRYNPVTGEHGLVYDMGTQAESWESVRLCDMAPEDIRWGFDGHLSNRDVWSPSGPMLMRHMTNNGAMAGSIKGRGRLSINETIKDYAPPENGTNRNFDHVDIPNTGSVVMEVKRVLFNPNMPEIEKARKLLKDQEQSLLDAIARLDEASDSDNEDMAMEGRMGSAGERNGITT

SEQ ID NO: 314435 - protein, 82 aa, Zea mays
  Clone ID: MRT4577_49824C.1.pep
SLFMFLVYTAALKLVVSFGGCYIRSIVWNWFYITSPGEQVGGSFSIKAQHYDHVLVGNCVILSRFFCFTKKRGVRSKRGQGF

SEQ ID NO: 314436 - protein, 399 aa, Zea mays
  unsure (1)..(399): unsure at all Xaa locations
  Clone ID: MRT4577_49825C.1.pep
MSARDPMDAWMNRYRAFTKGAVVMVCPLLLAIPLNKDDLNIQEHGGAVPTTMLVLXSVRLPAGICPYIVCCLSNTFFNYNAXPQAPSHAATMXVRPLGTSRPAGLACWIVHLILDSWAFPAVGALVGLCSAIRTVMHFTTRAGQGDAEMEYCDRLESSLDFLVGITALLFLGLEGLALEGQINSSSGRLTTPIGTSFVVCVFAASLMLVETMPPRRLVRYLTETIDILTGFAVSLAMFFIMYPLMGLRALLLLAAPFLILMAYVFYVAIGKDDGNNNHQVASANGDEESSGVSSSRRSGAAADGDNKPASLELTKVTFAGFLAVSIPSISKGSVTIYSECFLHLAAAAVVSGLVWRLLTHYKKSQTTVATVADIASFCTHLCVAVAVIPFTIMAGNALS

SEQ ID NO: 314437 - protein, 136 aa, Zea mays
  unsure (1)..(136): unsure at all Xaa locations
  Clone ID: MRT4577_49826C.1.pep
TGLWRWRNLNRGVPGRRGACPGRPGPMGRRNPSGPKARSGREEAIKPRRPGQRATAMGAAPSALVFLGLRQEAVKNGRTGGEGGVNGEPEDPPVTRTGGXRVXFFFFFFFFFFFFFFFFFFFFFXXFXXFPAGLEV

SEQ ID NO: 314438 - protein, 66 aa, Zea mays
  Clone ID: MRT4577_49827C.1.pep
LCSLLTAFIGIYIIRLADNNFSRLEPNGSFRMCCDKPAVGSPILTGLFPHCSASKVQILAYCNPHR

SEQ ID NO: 314439 - protein, 256 aa, Zea mays
  unsure (1)..(256): unsure at all Xaa locations
  Clone ID: MRT4577_49828C.1.pep
MSDYNRYGHSYSYGGGYGQGPAPSAPXTAHAHRYXAAPPSSSSYGAYAGYPPAYPPPPSQAAGGFGPAGSGYGFVPVAFPPGTHPDVERAFRAADRDCSGAIDERELQGALSSAYHRFSVRTVRLLMFLFNDPSSSTPSRMGPTQFVSLWDCLGQWRGIFDRYDRDRSGKIDSRELTEALRSLGYAVPPSVIELLIANYSNGVPSNGALDFDNFVECGMIVKGLTEKFKEKDTRYTGSATLTYDGFLSMVIPFIVP

SEQ ID NO: 314440 - protein, 62 aa, Zea mays
  Clone ID: MRT4577_49829C.1.pep
APLILTTTHGFLISALHRYESAPARGGCCRSASRVRRPCWIARRICSVTRHGGRRPRLAGST

SEQ ID NO: 314441 - protein, 234 aa, Zea mays
  Clone ID: MRT4577_4982C.1.pep
MQGGATAKLQSPVTVMRPVRGDLEEHLPKPYLARALVAPDIYHPDGTAADEHGHHHMSVLQQHVAFFDRDDNGIIYPWETYSGCRALGFNMILSLLIALVVNGTMSYATLPGWLPSPLFPIYVHNIHKSKHGSDSGTYDNEGRFMPVNFENLFSKYARTSPDRLTYRELWSMTEGFRDAFDLYGWIAAKLEWTILYVLARDDEGYLSREAMRRVYDGSLFEYVERQRAQHAKMS

SEQ ID NO: 314442 - protein, 76 aa, Zea mays
  unsure (1)..(76): unsure at all Xaa locations
  Clone ID: MRT4577_49830C.1.pep
QTPQAWKQXHTVRRYIYVNLIFTYPIINHPYFXYNKYTSLNXLSLIKNXTLSLPXLHXXIXFLQXXLTKPQGGSFL

SEQ ID NO: 314443 - protein, 34 aa, Zea mays
  Clone ID: MRT4577_49831C.1.pep
EHTPLGATALRCKTTVEERPSGYQSGRAFELTPR

SEQ ID NO: 314444 - protein, 317 aa, Zea mays
  Clone ID: MRT4577_49832C.1.pep
MAAPTSAIGFEGYEKRLEITFSEASIFADPHGRGLRALSRAQIDSVLDLARCTIVSELSNKDFDSYVLSESSLFIYSQKIVIKTCGTTMLLLTIPRILELAEELCMPLAAVKYSRGMFIFPGAQPAPHRSFSEEVDVLNRYFGHLKSGGNAYVIGDPAKPGQKWHIYYATEQPEQPMVTLEMCMTGLDKKKASVFFKTQADGHVSCAKEMTKLSGISDIIPEMEVCDFDFEPCGYSMNAINGSAVSTIHVTPEDGFSYASYEVMGMDASALAYGDIVKRVLRCFGPSEFSVAVTIFGGRGHAATWGKKLEAEAYDCN

SEQ ID NO: 314445 - protein, 115 aa, Zea mays
  Clone ID: MRT4577_49833C.1.pep
CGVFFFFFFFFWVFFFFFFFFFFFFFFFFGGGTTSSVGGTWGPSPKRKPGGGGGGSSRVVLQDRPRIQPPAGLEAKALPSFLKRGGAPLDHPLTMPLFLKKNPFLFLYGLIKYRG

SEQ ID NO: 314446 - protein, 119 aa, Zea mays
  Clone ID: MRT4577_49834C.1.pep
NFFFWGLFVDNDDDFYYPVGSDDNKAIWYDAQGLENLEVRFYGGGGLGKSFSGFDWPPSPLGVARKTPLCAWVAGPVLGSCLKTAGGPKSLFVVCPQALLANVSFQSLSSSLQKCKVDC

SEQ ID NO: 314447 - protein, 60 aa, Zea mays
  Clone ID: MRT4577_49835C.1.pep
SHKMTVSESLSASLALINHSFTLFSIVLTLLNTFNNHTIHDLSLTLSHMINIIHLYKLLL

SEQ ID NO: 314448 - protein, 59 aa, Zea mays
  Clone ID: MRT4577_49836C.1.pep
VLISVTDNLIIRAIFLTLDSLFQCGRVELILASVSVGVPPDETWKAARRWPNSSHRRCP

SEQ ID NO: 314449 - protein, 76 aa, Zea mays
  Clone ID: MRT4577_49837C.1.pep
SNGRRGLAAAAPRGDTCDDRHGPPPAGGNLPRRRLNSSTTNPTPPSIRSSAVKPVDLLPWYTAAMADQCLGEICMM

SEQ ID NO: 314450 - protein, 138 aa, Zea mays
  Clone ID: MRT4577_49838C.1.pep
EHRHGDRPGQGGHGLPAQPQVAGAATSRYTRFQIPWEWMKQDTGIVSQIKLQSVKLAMKHLKRVSSELEVIKGGPEEEEQELMLQGVRFAFRVHQFAGGFDVDTMRAFQELKEKASMCRVQRQKQHRHLRQHRLVARA

SEQ ID NO: 314451 - protein, 638 aa, Zea mays
  unsure (1)..(638): unsure at all Xaa locations
  Clone ID: MRT4577_49839C.1.pep
MVTGRVKAAMGFQRSPKSQVPEAASPSRAPTSGSVSTAGSAPSKASALARSFGAYFPRSSAQVRPAARAPPQVAELLRAIEQLQERESRLRVELLEQKILKETVAIVPFLEAELAAKKAELQRCRDTAERLEAENGRLCAELDAAALEVTSRKQRIVELEKEMAELRTRQDAAADADDCSSSASAPSERLESSSAAPKPNRASLAQLDPPAPPAPGPAPLKSKSYFSASSSHPSPASSSPPPSPSSSTSTSSSPAHSRSSSDTAAAPRPRVVELSKLPPIPPPPPXALLRHLPAXKRSSPPNSASVDGSAAAAPPPPPPPPPPPPPPARRQFGAAPAPPAGASSGQGDVRRVPEVVEFYHSLMRRESKRDGSGTASEAANGGGGGAAATRDMIGEIENRSAHLLAIKSDVERQGDFIRFLIKEVEGAAFVDIEDVVSFVKWLDDELSRLVDERAVLKHFEWPENKADALREAAFGYCDLKKLEREAASFRDDARQPCAAALKKMQALFEKLEHGVYNLARVRDAATGRYTRFQIPWEWMKQDTGIVSQIKLQSVKLAMKHLKRVSSELEVIKGGPEEEEQELMLQGVRFAFRVHQFAGGFDVDTMRAFQELKEKASMCRVQRQKQHRHLRQHRLVARA

SEQ ID NO: 314452 - protein, 130 aa, Zea mays
  unsure (1)..(130): unsure at all Xaa locations
  Clone ID: MRT4577_4983C.1.pep
EPPPAPRGFFFPSSSPSSWSPTSARRRGSSPRSPSRTRPTPRSSAPSSPPPPPPMTTRGRRAPSSCAARRSPTASSSCTPPPTSPTTRSRPGPTSSAASWRRSAATPPCAGGPSPRSSPXTDPAXGPPPL

SEQ ID NO: 314453 - protein, 87 aa, Zea mays
  unsure (1)..(87): unsure at all Xaa locations
  Clone ID: MRT4577_49840C.1.pep
GSHDTFLYDKSLQYYEISAXSNYYFYKSFLXYLARKLAGDPNLXYDEAAALMAPQVTIDMTMQPQHEAELAAAAARPLPDDYDDLTD

SEQ ID NO: 314454 - protein, 33 aa, Zea mays
  Clone ID: MRT4577_49841C.1.pep
VDMLFSPCRVVVLSCLWVCVWYCHASSPLLRAT

SEQ ID NO: 314455 - protein, 622 aa, Zea mays
  Clone ID: MRT4577_49842C.1.pep
MDPPPTRDRGEELEPETRAFPDADDPETSRSERDEGIPPPPPPPPLRQQLMGACRADERLRPLLTLNVSCGAADDRLIAHLAQHFEVSEVGMLARCLCVPLVSLRVGKVQREGALLCPTHIRGKLNLVLLPSSSMRLTFVCDDGYPEQLALLSNGFEFSEVMIEEISADNSGRSFLIRISESKVFYYWCAEKSKEHGMELLAKMKNLLDGRPTLSDLTGISNSRLDAFATHLHAYLLASSIGDVTSLGSLNDFLSTSRSHDQYLQLQSDFSKTSRFRASAASAIKPSSVYQASLSPRSGTFKDGVPRASCARVVGRDKLKRRVEWLGPLTAPLDTNPLTINPDSASEKCDADCSKNDVSSVPLDLPLSFPLLPSIYSLGTRPVPEVSLEKQFKPYYCWCPPCPSSLQYTVTHLHLPATPVDPLPLPPLSSLLASEQPPSSTVSVKLDTTDLPSLNLPSILHSPLIPLHGPQVPTFTPLMSDPIVHVPVIDVCSAGQAYLVSCGPSITSAVPLLPSLKPLLPEAESLVERSARETLMRLIASTPPASNPLPGSISRANNNVKKHVDVCPNEKASGTSCVSAAVFGSGIAHAEDEVPSGADSQEPFAEYDGTSNECDVHHWQKF

SEQ ID NO: 314456 - protein, 46 aa, Zea mays
  Clone ID: MRT4577_49843C.1.pep
LPFLTFAHSELIIVLALFLLINLTSFFFYFHLVYFTCLCIFVRFFY

SEQ ID NO: 314457 - protein, 142 aa, Zea mays
  Clone ID: MRT4577_49844C.1.pep
MLTEKAHRDVSPAGKDRSNTFKMAINPPAQTEDKQRDSQTRRNFPTKRSNSPTKRTGAMPVKMLMEQDMWKERRPDEEPLNVVARLMGLHEPPGQQSNFPLGRQLDKKYQCGGFEENYWNLKSKKESKCHQNQKAGPRHQHT

SEQ ID NO: 314458 - protein, 64 aa, Zea mays
  Clone ID: MRT4577_49845C.1.pep
HLQEYAKVSQRGRADWSAMVPVRVIFLGHATWCTYAPRPCYSCRAALPGLVIELVAHSVINITK

SEQ ID NO: 314459 - protein, 156 aa, Zea mays
  Clone ID: MRT4577_49846C.1.pep
KKFLFCHPRVLKLGSFKTPPPVLKTWTPLGFWELVYEWGPPPPFFPFTNLGYFPPCFLFKPWAPKPGGGFFPHWFPPGRFPPFPGAIFYPNFFSGEKKPQAKRFFLKLPFGWGFLIRPPGGFFCMLLALFGGKPPPFSKNFCLFSLYLEKNFTFFP

SEQ ID NO: 314460 - protein, 69 aa, Zea mays
  Clone ID: MRT4577_49847C.1.pep
SLVSVRLESPSPSLTPSTMPARKPTDRPLLLCPDPEHDLSAATRGAISPVMSTASGQCSVRTSMSYQSK

SEQ ID NO: 314461 - protein, 102 aa, Zea mays
  unsure (1)..(102): unsure at all Xaa locations
  Clone ID: MRT4577_49848C.1.pep
GVCAKRIVADARHHMLGRISSNIANELLNGHKEVLAPCKEICMGGGLVRHNMNNLRFLRKRMNTKPCHGPIPFRAPAKIPWHTIXRGMISAKTHRGEEAFAR

SEQ ID NO: 314462 - protein, 76 aa, Zea mays
  Clone ID: MRT4577_49849C.1.pep
RRARISYHLRLYISSLSAPPPPPDPSKTGIAMSDSEEYHFESKADDDSRARATRGNLSWSVRTPSSSSRTVPARLW

SEQ ID NO: 314463 - protein, 59 aa, Zea mays
  Clone ID: MRT4577_4984C.1.pep
SSLTSSELVPIIYANVSGYSACMPSPCRFVPRQRFYSHVRITCSAHGRQIQLCTPRRPS

SEQ ID NO: 314464 - protein, 252 aa, Zea mays
  Clone ID: MRT4577_49850C.1.pep
LTQGNVAEHPQKAMDTLFAMPGYNCWPSTKTFNYVLHMLVCKRQYEVVHEVYSSAPRLGVTLDTCSFNILVKGLCQYGKFDEAISLLHEMPKQGCQPNATTYSTFMHFLCQRSQVDKAFELFERMRKQDIAADTVVYNILISGLCRDERVTEAFDLFKSMTSEGCCPNSGTYQVLLDGLISLGKLFEAKSLVCTMSTEGVRPSFQSYKLLIDGLCSDDCVGDAHLVLKQMVGQGFVPRMGTWTKLLTSMFKF

SEQ ID NO: 314465 - protein, 70 aa, Zea mays
  Clone ID: MRT4577_49851C.1.pep
SKSNYRTPFGDQYHIKIRKWNFLFLVGHTSAGGGGGANSRALAAAAGGSPLGAGLGGFLGVAVPCVGLVF

SEQ ID NO: 314466 - protein, 109 aa, Zea mays
  Clone ID: MRT4577_49852C.1.pep
WRSRLWSGSWCPLALSRTRSLAGRGYAGGLGVHGFLYEGAGVAVRALRVGTLSNFSVVITGGGSGRPSLQYILFIMWNGGINSTLGLRLGEPLCPPAFNPKPVFFRKKR

SEQ ID NO: 314467 - protein, 73 aa, Zea mays
  Clone ID: MRT4577_49853C.1.pep
NSGLTIVSHSGVESAAYACSNSQLESASNVISPNVDVPFVDWDALEIVPITEELVGSIVPVVDEDNFYEHIGL

SEQ ID NO: 314468 - protein, 216 aa, Zea mays
  unsure (1)..(216): unsure at all Xaa locations
  Clone ID: MRT4577_49854C.1.pep
AEPPRPDPPRPVPPWPDRPRQVAGAGXAAEPPRPDPPRRGXPIRPSRXSRACAPPGSPSPPAXPLIAPGSRAPSRKPRRFARACAGGPPSCARPLWGGHAGRIRPPGGAAAPFGPGWPEPGARPRCTGAPPATPRVHAVGRRGYTHSRARAARELRPGRQRHRDAMPPRACAGLRRGTEWPRVGAARTTARGGRGPGSRPPPPGAARRRLEGSAGS

SEQ ID NO: 314469 - protein, 41 aa, Zea mays
  Clone ID: MRT4577_49855C.1.pep
GQAITLVFRTPVISLLSGYHTCSFNLCTMYLIRVPCWSDEF

SEQ ID NO: 314470 - protein, 198 aa, Zea mays
  Clone ID: MRT4577_49856C.1.pep
MPWGTSSPRPPWTAPSRTATTRRPPSASSPPSPPPTPSRKRLNDRLSMLRSVVPKISKMDRTSILGDTIDYMKELLERIKLLQEEIGQQQEEAPGMLSVFRELNPNEMVARNTPKFDVERKEGGDTRVEIYCAAKPGLLLSTVSTLDTLGLDIQQCVVSCFNDFGMHASCSEMQREMISADAIKQELFKNAGYGGGCL

SEQ ID NO: 314471 - protein, 46 aa, Zea mays
  Clone ID: MRT4577_49857C.1.pep
NVRSLASRSIRSSHSLVVSWLLRLTDHLPGLMFFPRSIQVNSPLAI

SEQ ID NO: 314472 - protein, 368 aa, Zea mays
  unsure (1)..(368): unsure at all Xaa locations
  Clone ID: MRT4577_49858C.1.pep
MALASPSLPLPTTPPPSSQAIAAASFCACPLAIFEYDEKAVMELDEQAFLEEILSLRRDAWDCNAMGDFFAPAAMDCTFQDRHHQAPTVSVLPTFTASYAQPQPQPAAAPGFDCLSEVYGAAAFGGPNAGDYGGEMGFLDVVEPKAASAALVDGAAGLGACKVEPGLAESGGAFGAGAGAAPPPALASKKKRVEGMPSKNLMAERRRRKRLNDRLSMLRSVVPKISKMDXRRSILGDTIDYMKELLERIKLLQEEIGQQQEEAPGMLSVFRELNPNEMVARNTPKFDVERKEGGDTRVEIYCAAKPGLLLSTVSTLDTLGLDIQQCVVSCFNDFGMHASCSEMQREMISADAIKQELFKNAGYGGGCL

SEQ ID NO: 314473 - protein, 62 aa, Zea mays
  Clone ID: MRT4577_49859C.1.pep
AREGGPCSLPRGGPLSPFYFLEGADPSGCFPRLGRGCLPTALLEFLAPCFCKLFIKELIPLP

SEQ ID NO: 314474 - protein, 217 aa, Zea mays
  unsure (1)..(217): unsure at all Xaa locations
  Clone ID: MRT4577_4985C.1.pep
MEPTSSSAVARQTWELENNIPAAASDPDAMDAIYRYDEAANARAHQEKPWATDPHHFRRARISALALLKMVVHARAGGTIEIMGLMQGKFEGDSIIVMDAFALPVEGTETRVNAQADAYEYMVEYSTINKQAGRLENVVGWYHSHPGYGCWLSGIDVSTQMLNQQFQEPXLAVVIDPTRTVSAGKVDIXXAFRTYPKDYKPPDEPVSEYQTIPLNKI

SEQ ID NO: 314475 - protein, 70 aa, Zea mays
  Clone ID: MRT4577_49860C.1.pep
GCQKQNPMVSVVNTNHRLTLNDKINVVERIMYGGRAENCSTVSNLGSQKDNSISRKIYNNNFQLITIRSS

SEQ ID NO: 314476 - protein, 68 aa, Zea mays
  unsure (1)..(68): unsure at all Xaa locations
  Clone ID: MRT4577_49861C.1.pep
MTTPRRQADTKRAKPQNNLTKRGAGPETTAKKSNDHPXGPTDRGAXKAEAIGSSLFQIIMTATRGGLT

SEQ ID NO: 314477 - protein, 82 aa, Zea mays
  Clone ID: MRT4577_49862C.1.pep
NLWSMNSSQGATLSSRLARRVMLFSLPPSSSQRCPAASHPCNKTPPVGFPWRAGAVVLVAHVRLRRRHVWRGIVSVFRSAGS

SEQ ID NO: 314478 - protein, 97 aa, Zea mays
  Clone ID: MRT4577_49863C.1.pep
PGSMAEISRLLPPVRVCYRCIDLYDGIGDGDHSSVTEGGAHYLAAQTHWIPGLADGCAIAGQYIGRNLGGTGVHRQPHVLMMRLLSSLTHPDAVTPT

SEQ ID NO: 314479 - protein, 59 aa, Zea mays
  unsure (1)..(59): unsure at all Xaa locations
  Clone ID: MRT4577_49864C.1.pep
SVDVLGLKTAFATFMGKIPINKKNKKDSYXEEPEECIISFVASLFEFMLLFIPLCRNYA

SEQ ID NO: 314480 - protein, 370 aa, Zea mays
  Clone ID: MRT4577_49865C.1.pep
MAAAMCVDDEAASAAAESAGVDKLDLGAAAGGKRSVYLMDCAPVWGCASTRGRSAEMEDACAAAPRFADVPVRLLASRRDLDGLGLDAGALRLPAHLFGVFDGHGGAEVANYCRERLQVLLRQELRLLGEDLGQTSCDVDMKEHWDELFTGCFQRLDDEVSGQASRLVGAVQESRPVAAENVGSTAVVAVVCSSHVVVANCGDSRAVLCRGKEPVELSIDHKPDRKDERARIEALGGKVIQWNGYRVSGILAMSRSIGDRYLKPFVIPKPEVTVVPRAKDDDCLILASDGLWDVVSNEEACKAARRQIQLWHKNNGVTSSLCDEGDESNDPAAQAAADYLMRLALKKGTEDNITVIVVDLKPRKKAKSNS

SEQ ID NO: 314481 - protein, 195 aa, Zea mays
  Clone ID: MRT4577_49866C.1.pep
HWELAAAGNFFSQGTNHSTITMARFQEYQIIGRHLPSEANPAPKIYRMRIFAPNEVVAKSRFWYFLGKLRKIKKANGEIVSVNQIHEKKPQKVKNFGIWIKYDSRSGTHNMYKEYREMSRVAAVEALYQDMAARHRTRFRSVQILKVVEVEKADDLRRPYIKQLLTKNLKFPLPHRINKKAGKKVFAAHRPSTFF

SEQ ID NO: 314482 - protein, 62 aa, Zea mays
  Clone ID: MRT4577_49867C.1.pep
VTETCYLFKISFDTTGLGNTSSDFIHPPTRCCCRLQIHFYMFEAQLCIVVPFNALVARKFLF

SEQ ID NO: 314483 - protein, 46 aa, Zea mays
  Clone ID: MRT4577_49868C.1.pep
MVRTSVLHDALNAMNNAEKAGKRQVLIRPSSKVIIKFLTVMQRHGM

SEQ ID NO: 314484 - protein, 43 aa, Zea mays
  Clone ID: MRT4577_49869C.1.pep
AQFFQALKGSGLKKKKKKKKKKKKKKKKKKKKKKKKKKKKKQN

SEQ ID NO: 314485 - protein, 131 aa, Zea mays
  Clone ID: MRT4577_4986C.1.pep
MQSTGDVSGSSPSAVDHKLAMQEDEFHKLADETIHDLLEKLEEYGDSIQMDGFDIEYGNQVLTLRLGDLGTYVINKQTPNKQIWLSSPVSGPSRFDWDGTANGWIYKRTGVNLVRLLEKEIGELCGTPVEL

SEQ ID NO: 314486 - protein, 206 aa, Zea mays
  Clone ID: MRT4577_49870C.1.pep
MGRLSAVALGEPAGSDDEEEEDLDGEMQKLEKELLEFDPGFTEEMTVEAGKDWSKSLMHAFLRGPWPFEAESTRERHQLHLNVERIRVPEVVFQPGIAGVDQAGVVDIAVGVLESGFRDQGDREKVLKDVFLTGGNTLFEGFEERLGRELRSQLPTELEVKLRKARDPVLDAWKGAAACAREEGWERKSVLGSLRNGGLVSLVHER

SEQ ID NO: 314487 - protein, 104 aa, Zea mays
  unsure (1)..(104): unsure at all Xaa locations
  Clone ID: MRT4577_49871C.1.pep
RTRSRXFPXSTPRPSREHPSTSXAPRSRXCAPXXRSAPCAXSTXEARGAKKGLSELRRYQAHMITEGGSLXCGGPVGARRATXXSTSTHEEGKKGTYKDPPKEG

SEQ ID NO: 314488 - protein, 293 aa, Zea mays
  Clone ID: MRT4577_49872C.1.pep
MRALARAASLLRRAAGSAPTTASLYHPPRNVGPCLVKNLPGFFFNGYSTLLAPPNEVLIPPELLSSRTVWTPDRELGQYEDLVARVTNFHNEDKGFMVLDGDVFDVPIRKDIVHRVVRWQLAKRQQGTHSTKTISEVSGTGRKPYPQKGTGKARHGTLRGAQFRGGATMHGPKPRSHAIKLQKKVRRLGLKIALSARTAEGKLLIFEDLEVPSHKTKNIVQYIRQMDDSKKVLLVDGGDIDKKLKLATQNLHYVNVLPSIGLNVYSILQHDTLVMTRAAINRIVERMHTPINR

SEQ ID NO: 314489 - protein, 35 aa, Zea mays
  Clone ID: MRT4577_49873C.1.pep
NRPYSLNNAGNFEPVKCTIRIYKQPFNNEKILGST

SEQ ID NO: 314490 - protein, 81 aa, Zea mays
  Clone ID: MRT4577_49874C.1.pep
INVRDEVLRLSSSKSSLESVPDDDNCTHDDAALSIKNVETEYTLQLGKILLAALVRHGSLSGNLRQSSREAHREWMKSPDA

SEQ ID NO: 314491 - protein, 60 aa, Zea mays
  Clone ID: MRT4577_49875C.1.pep
RRSATEVLFRGTYWCRFWGLLQRREKDIVRIKVACRTLEVSMMQIFAKPGWSFRNRITSG

SEQ ID NO: 314492 - protein, 61 aa, Zea mays
  Clone ID: MRT4577_49876C.1.pep
VSRTSLKKTARLLLLLRRAGIMCGILAALACSDCHSRKEGSHPRLLQKAEPPALSIGRGLY

SEQ ID NO: 314493 - protein, 123 aa, Zea mays
  Clone ID: MRT4577_49877C.1.pep
MARAPPCFPAPLGNKLILRGPVVPAQSFPGVIPMAAGARISMVVRSLSHGCQPTMVALRSSPALLPASLLAGSAVHASQGHAPTALQYPAVGFCSNSSPSSDLDFVLDVSGASCCALPMPARW

SEQ ID NO: 314494 - protein, 93 aa, Zea mays
  Clone ID: MRT4577_49878C.1.pep
SSSGSHDALYHMPFSFHLMCCLDLDETPFSSSPSLKGSVTIINCEITGRVGIRVGNKRRMTASLVLLWCQLDSFLFVSKLQAATRFTCLIHFA

SEQ ID NO: 314495 - protein, 113 aa, Zea mays
  unsure (1)..(113): unsure at all Xaa locations
  Clone ID: MRT4577_49879C.1.pep
QQIIFCHHTCLDFGGPSEQAFLLSRTQRPFTPLQWMELEHQALMYNLNAMAPVPXSSLLISISKNFISSNRDMHILNHKAKVLYSKTTSICNKTKIEDKNIICTNECLCNVTW

SEQ ID NO: 314496 - protein, 52 aa, Zea mays
  Clone ID: MRT4577_4987C.1.pep
HVLILVKICEVLHVPFNKFSVFLPVNLNSQRKYVGKQNYLPTRNKHIKLPQR

SEQ ID NO: 314497 - protein, 65 aa, Zea mays
  Clone ID: MRT4577_49880C.1.pep
ATIETQQKPLIKVQHVDSCFHLLLSKAKSLDAFHPFKSPFTVSSHVNFGFLLPLFQLVLRLRIHG

SEQ ID NO: 314498 - protein, 35 aa, Zea mays
  Clone ID: MRT4577_49881C.1.pep
HQVPNQVQCFLRIPFLTTQQPGCYLRVFSLCDTAL

SEQ ID NO: 314499 - protein, 68 aa, Zea mays
  Clone ID: MRT4577_49882C.1.pep
KKGSVKKPKWIKTPPIKRPCKLGLPHNPSVYRDVMSPFGLLLVKKKHKAARVACISLAKKAYKKTFGF

SEQ ID NO: 314500 - protein, 280 aa, Zea mays
  Clone ID: MRT4577_49883C.1.pep
MVMAMANSATILTVVLALGLAFLRAAAPASAQNCGCPPGYCCSKFGYCGTSFDYCNANTCQSGPCTAGGAGSGGGANVSGVVTDAFLSGIKSQAGSGCEGSSLSFYSRRAFLSAASSYPGFARAGSEADGKREVAAFFAHVTHETGHFCYVSEINKNNSYCNSSNTQWPCAPGKKYYGRGPLQISWNYNYGPAGRSVGFDGLGNPDMVAQDPVVSFKTALWFWMSNAHQVMPRGFGATIRAINGALECNGEDPAAVNARVGYYKEYCEQFGVGPGNNLTC

SEQ ID NO: 314501 - protein, 131 aa, Zea mays
  Clone ID: MRT4577_49884C.1.pep
PGFGNWAFGCFSKMQKIFKFIRGGEWFAFLFDSFGAPEPQSPPVFRVGRDPGLGSKFNGAFPPLRAGELVIPLPSFSFFPMVRRSWGHGAVGLYILPLLARSTPPPNFRILETQRRDGGGKKKKKRGRVGA

SEQ ID NO: 314502 - protein, 167 aa, Zea mays
  unsure (1)..(167): unsure at all Xaa locations
  Clone ID: MRT4577_49885C.1.pep
GRAGVSHRPIARSPKSSLLLGKAKVEDITERSCCRWTAHGFSWTLPDHPKLPKXNXVAGFALDGWGEANPDQVNCLHVAQTPVMDSLKNEGPEKWRLVKGPGTVAGLPSDDDMGHSVYVHNELGAGRIFDQGAKLVYQGLGSGKTYGGDGVNYIHESFERGTLSPYW

SEQ ID NO: 314503 - protein, 63 aa, Zea mays
  Clone ID: MRT4577_49886C.1.pep
IWLPLQDPFRNSRFSPRDRVLVFTNFFSNPRLFSFLYAGAYISYIPMPFFSPVQDNFSNDSRV

SEQ ID NO: 314504 - protein, 150 aa, Zea mays
  Clone ID: MRT4577_49887C.1.pep
MASPARIDVDKLSVEQLKALKEQTDLEVNLLQDSLPKIRTAATRLENATAALHELSLHPQGKKLLVPLTASLYVPGTLDDAEKVLVDVGTGYYIEKTMTQGKEYCERKINLLKSNFDELLEMATKKKSIADEMGMFLQAKLRQASPSSSS

SEQ ID NO: 314505 - protein, 230 aa, Zea mays
  Clone ID: MRT4577_49888C.1.pep
RPGKIKPDRSRTSPASRSMFFVPLHVIPAGGGSTVWENDAPPLRQYGRTVAPVVAWPHLQSQAHRLIDDDEVHRGYRDGFILVVFFGDKSTGGSSPASSSPSRTASPRRQPTPRPSTSDVIFFLVNLPAFDTNVDYHRHQTQAARQRFVRRRSSTKCLTLPWLMAQRDAAEKAAHTVPGMEMTTLFSAYRRAVFSPIDHLRPSVGTSGWIPSFRLLRTREPRRQSELKRN

SEQ ID NO: 314506 - protein, 88 aa, Zea mays
  Clone ID: MRT4577_49889C.1.pep
RSTQNNNTGAWTCEFRHLVHGYQLSAMGSFPLARSSSGSLGPAFRSTSSSRGFQWLQERDHRELIFGRGNSKLSKSYLPSPENGGECI

SEQ ID NO: 314507 - protein, 229 aa, Zea mays
  Clone ID: MRT4577_4988C.1.pep
MPGLVAYSGLGLGLLALAALESLPLRVPPLRSLPRRLTTPLHLRHLLAAAVSALCLISALVSAHHLSLPTLAASALFLLYSLAPFAPLAAPLPSPLLDLLLAAAFAQELLLFAHRRPSTAAGIENRYFDLLLVPIALCLGATLLAAHRPGEPAPRIARAAGLALQGTWMLQMGFSFFTSAIAQGCALHAASRADYTIKCRTHEDYHRARSVATPQFNGHLALLWIAGAA

SEQ ID NO: 314508 - protein, 52 aa, Zea mays
  unsure (1)..(52): unsure at all Xaa locations
  Clone ID: MRT4577_49890C.1.pep
KAPPPPPPTRRRXAXKRGRAPAVIIEGALRPFPRNKNSILVLPFAAVTGVCL

SEQ ID NO: 314509 - protein, 61 aa, Zea mays
  Clone ID: MRT4577_49891C.1.pep
ISHTSPVLTSPLAALRRSSLASLAMEAGTWAVVVAATDAYLAWFWRMTHALTVPKTSTAHH

SEQ ID NO: 314510 - protein, 108 aa, Zea mays
  Clone ID: MRT4577_49892C.1.pep
GVFNPSVRWAVSVCFLGLLFRVVGCPAQVFDAVGLCGLPCSGCDHLCPLVFRMVLDQCVYNYFCVGRVLCAALRFGVDNFSGAAGLQYSPRAVVACFLLSLRCWVFPS

SEQ ID NO: 314511 - protein, 93 aa, Zea mays
  Clone ID: MRT4577_49893C.1.pep
IGYLEAGRASMQFQTLPVKERRPTLPPISGHIKYITNTPNMPPGHTTCLLTLLRSTSVPRLCSLNNILHDKSEYFRTNEHYCSTVHVAIAHRG

SEQ ID NO: 314512 - protein, 787 aa, Zea mays
  Clone ID: MRT4577_49894C.1.pep
METTSTTNEQTDRGAMWELERNLDQPMDAEAGRLRNMYREKSYPTLVLLQLAFQSLGVVFGDLGTSPLYVFSNIFPHEIEDTEQIIGALSLVIYSLTLIPLVKYVFIVLRANDNGQGGTFALYSLLCRHAKINTIPNQHRTDEELTTYSRHTYDEKSLAAKIKRWLEGHQFRKNVILILVLFGTCMAVGDGILTPAISVLSATGGIQVEEKKMKNDAVVIVSVVILIGLFSMQHFGTDKVSWLFAPIVFVWFILIGVLGAVNISKYDQSVLKAFNPIYVYRYFKRGKTSWASLGGIMLSITGTEALFADLSYFPVQAIQIAFTVVVFPCLLLQYTGQAAYIAQNKDHVSHAFYFSLPDSVLWPSFIVATAAAIVASQATISMTYSIIKQALALGCFPRVRIIHTSKKYLGQIYSPDINWILLVFCIAVTAGFKNQSQIANAYGTAVIMVMLVTTFLMIPIMLLVWRSHWTLVILFTVLSLFVEIPYFTAVVRKIDQGGWVPLVFAVAFLIIMYVWHYGTLKRYEFEMHSKVSMAWILGLGPSLGLVRVPGVGLVYTELASGVPHIFSHFITNLPAIHSTLVFVCVKYLPVYTVPLDERFLVKRIGPKNFHMFRCVARYGYKDIHKKDDDFEQMLFDSLMLFVRLESMMEEYTDSDEYSTRETNLSGSANPRINGISAGSNMDLSYTSHDSIIQVQSPNYTGNSQAVSPGQLYHTVGDEIAFLNACRDAGVVHILGNTVIRARRDSGFIKKIAINYLYAFLRKICRENSAIFNVPHESLLNVGQVFYV

SEQ ID NO: 314513 - protein, 277 aa, Zea mays
  unsure (1)..(277): unsure at all Xaa locations
  Clone ID: MRT4577_49895C.1.pep
SYGRLGPSRPAGPLTEEEKKVYFVHDIEGIDESSLAQAYARARGADRMSSFGDMIALSDVVDVPTARIISKEVSDGVIAPGYEEAALEILKKKKGGRYLVLQIDPEYNPPATETRTVYGINLQQHRNDVEITPKHFNTIITPKDTASLPESAARDLTIATITLKYTQSNSVCYAYNGQVVGLGAGQQSRIHCTRLAGDKADNWWMRFHERVLGIKWKKGTKRPDKSNAIDLLVSGQLPKDGPERKPFEVPFEGVPAXFTAEXRGAWMSSSRTFAFQR

SEQ ID NO: 314514 - protein, 217 aa, Zea mays
  Clone ID: MRT4577_49896C.1.pep
MAATRASPVLLLLLLTVQLSLLFRLPDSPSTLALALALAAEPEQQNAKQHRQPALLVQSTCNSTSFYDLCIAALAADPASSTADVPGLGAIAVSAAANNASGTAAFLGNASDAAATPQADRALLRACAGKYAAARDALVQARASLAEQAYDYAFVHVSAAGEYPAVCRTLFRRRQQQQRGASRTAYPAELAKREEALRRLCTIALDIISLLQNQETY

SEQ ID NO: 314515 - protein, 100 aa, Zea mays
  unsure (1)..(100): unsure at all Xaa locations
  Clone ID: MRT4577_49897C.1.pep
GGFSPDWGPKKTSWEXEVDGSLSPVGAKAGKQPIPFYIWGGFDGPRDGGTKVVLIKKPGTDSHVLFYICKGGPGGCSGMPWKPAVGRFFLIKSPRPFFFF

SEQ ID NO: 314516 - protein, 23 aa, Zea mays
  Clone ID: MRT4577_49898C.1.pep
ALIFSPYICIPFYALNGQMRKLK

SEQ ID NO: 314517 - protein, 159 aa, Zea mays
  unsure (1)..(159): unsure at all Xaa locations
  Clone ID: MRT4577_49899C.1.pep
MAAPETSACGAGPALLFPSSSSSSSSARVEAVVVFTICDSFVRRPDQAERVIGTLLGSVLPDGTVHVRNAYVXPHSESADQVALDIEYHHNMYASHQKVNPKEVLVGWFSTGFGVSGGSTLIHEFYSREVQSPIHLTVDTGFTMGEASIKAYVSSNLSL

SEQ ID NO: 314518 - protein, 77 aa, Zea mays
  unsure (1)..(77): unsure at all Xaa locations
  Clone ID: MRT4577_4989C.1.pep
TRSPTLKIPNLPPLPSNVIIFFSGHLNSINWPDFNNTLTGKTLELPNLIPLKHIPFSPAGLLPXRPPPIIFPNIFPI

SEQ ID NO: 314519 - protein, 212 aa, Zea mays
  unsure (1)..(212): unsure at all Xaa locations
  Clone ID: MRT4577_498C.1.pep
GREGRRRPPEAGAGERAGGSLRVRAGRQVLLRHKLRDNRGERGAAAVRGGVPXMTEDWWVEDLSLLRIDHYRRVIAAMRRSGVRPETIGASVAHYAQTWLKGVDVEQRRRQRACWDGSGPFVGDGQRMVVETLVDVLATENVAAVTLSFLFGMLRVAVEVDASLDCRIELERRVGMRLEMAALDDLLVPAAQASDFMFDVDTVHRVLLNFLT

SEQ ID NO: 314520 - protein, 69 aa, Zea mays
  Clone ID: MRT4577_49900C.1.pep
LQVLGLENGSGLVVTEGLMIILFTILLLAAKVEHRVDEVLRLELLDVGSHPPARHCFRPCGASPSRTAP

SEQ ID NO: 314521 - protein, 47 aa, Zea mays
  Clone ID: MRT4577_49901C.1.pep
KKRGSIPLEKAVPVQWRMTEDLYLWLYPDLEEATLRGRREATLRRRP

SEQ ID NO: 314522 - protein, 40 aa, Zea mays
  Clone ID: MRT4577_49902C.1.pep
KETTKKRKQFYLKTKRSTYRDRAKRAPDDQRPSIRRLKSR

SEQ ID NO: 314523 - protein, 34 aa, Zea mays
  Clone ID: MRT4577_49903C.1.pep
VWSLDSDKGLESAYSLYLVALIMYYARTMLRNEQ

SEQ ID NO: 314524 - protein, 236 aa, Zea mays
  unsure (1)..(236): unsure at all Xaa locations
  Clone ID: MRT4577_49904C.1.pep
KKDLAPRLFAAVPKRILNTRSVQEALTDRRWLTDIRGAVSVGVLVDFLDLWDILSSINLLQNQEDKHIFRFATDGKYSAKAAYESLFIGSTNFGHWERIWHSWAPPKCXFFQWLAAFKRCWTADRLQKRESCPQEPEDXVGCVFARHFWFRLLGQVNLQGFSPQPGESSSMQWWERLSDQLQGVAKEGLNSLIILGFWILWNHRNRYVFDKIPPNLEAPNFWFVLVGLDLFLFLIQ

SEQ ID NO: 314525 - protein, 85 aa, Zea mays
  unsure (1)..(85): unsure at all Xaa locations
  Clone ID: MRT4577_49905C.1.pep
TVVSPIAPDLLAAFERKFPGVHVEDAEGLTXHMCITLTHASGGQLGRCSRLMQAVNNKSVGFILTNLDANFLDPDTGXTLPNNTP

SEQ ID NO: 314526 - protein, 394 aa, Zea mays
  Clone ID: MRT4577_49906C.1.pep
VRETKGSSEEVKKSDSVSISEDFRCPICLELMRDPVIVSTGQTYERAFIGRVGDCGNRTCPKTQQKLQNLSLTPNYVLRSLILQWCEEKGMEPPSRSKSDGSPLEVAGNRLAIEALVRNLSSSSLDDRKSAAAEIRSLAKKSTDNRILLAESSAIPALVKLLSSKDPKTQEHAVTALLNLSIYDQNKELVVVAGAIVPITQVLRTGSMEARENAAAAIFSLSLMDDNKIMIGSTPGAIEALVELLQSGSSRGKKDAATALFNLCIYQANKVRAVRAGILVPLIRMLQDSSRSGAVDEALTILSVLASHHECKTAISKAHAIPFLIDLLRSGQARNRENAAAIILALCKRDAENLACVGRLGAQIPLAELAKTGTDRAKRKATSLLEHLSKLQVL

SEQ ID NO: 314527 - protein, 43 aa, Zea mays
  unsure (1)..(43): unsure at all Xaa locations
  Clone ID: MRT4577_49907C.1.pep
MTKNRRNNGRAKXGTQHVQPIRCTNCARCLPKDKAIKKCVMRN

SEQ ID NO: 314528 - protein, 59 aa, Zea mays
  Clone ID: MRT4577_49908C.1.pep
FPVKLCLRFPALFGVFSLLFCCAVTSLQCGFGEAALSLCPTRPFGLGASFISRGSARSV

SEQ ID NO: 314529 - protein, 78 aa, Zea mays
  Clone ID: MRT4577_49909C.1.pep
CYLIYSNKYKLRRLRPCSFVSDWWVGTIPNRIVSLIYINFDELERFRVQSDKNEQGLTEVLLWSRGREPLGRFCPAKS

SEQ ID NO: 314530 - protein, 56 aa, Zea mays
  Clone ID: MRT4577_4990C.1.pep
IASRVYIISKSKSSPFYKYIVGIESTTSFFLPETGNGEGLEDGLLAKLLPRHPFPY

SEQ ID NO: 314531 - protein, 59 aa, Zea mays
  Clone ID: MRT4577_49910C.1.pep
CHRLIGPPPFFGRESGHLNRGYSLHQWGWSIHQASGKNCHCSTFRPVLLVRLTSETRSQ

SEQ ID NO: 314532 - protein, 35 aa, Zea mays
  Clone ID: MRT4577_49911C.1.pep
PTRPPTHSSTPCYISIKWTTPPTGGSYCHRSAPNQ

SEQ ID NO: 314533 - protein, 66 aa, Zea mays
  Clone ID: MRT4577_49912C.1.pep
TVQCFAIWVDDACVRLRSSLSRRCCVLLYEYMVSCILAYISVVVAYCIWMALPVSPACTECGLFAV

SEQ ID NO: 314534 - protein, 116 aa, Zea mays
  Clone ID: MRT4577_49913C.1.pep
MLPFTPLKLTQAVDQKMVELKDLSDAVVEFGRDLGVADVPLGEYLRSRMRALSGYVRSELREAVHLGVKQVLAVVASHYEINLERACEGYVLSDERNLAEAEMQRLTDVVEGSGSV

SEQ ID NO: 314535 - protein, 508 aa, Zea mays
  Clone ID: MRT4577_49914C.1.pep
MDEYIYQSLFLSVLAVALLQLVKMALKPRPRLPPGPWKLPVIGSMHHLVNVLPHRALRDLADVHGPLMMLQLGQTPLVVASSKETARAVLRTHDTNFATRPKLLAGEIVGYEWVDILFAPSGDYWRKLRQLCAAEILSPKRVLSFRHIREEEVMLRVEEIRAAGPSTPVNLSVMFHSITNSVVSRAAFGKKRKNAAEFLAATKAVVGLSSGFNIPDLFPAWTTVLAKLTGMTRSLKEIHKTVDTILEEIIEERKRIRDEKIMGGAAAEDVDENLVDVLIGLQEKGGFGFQLTNSIIKAIILDMFAGGTGTSGSAMEWGMSELMRNPPVMKKMQALIREAFRGKTAVTEGDLQASNLQYLKLVIKEALRLHPPAPLLVPREESIEECELDGYTIPAKSRVIINAWAIGRDPKYWNDADEFKPERFEDGSRDFTGSSYEFLPFGSGRRMCPDFNYGLASMELAFVGLLYHFDSSLPDGVKEVNMGEVPGLGVCRRTPLMLCATPFVPVPA

SEQ ID NO: 314536 - protein, 150 aa, Zea mays
  unsure (1)..(150): unsure at all Xaa locations
  Clone ID: MRT4577_49915C.1.pep
ISSKDQEPIRQGHQVTPQVGASCHSMSLIPSGNWVGWPNIKKKPKPMLVKIKFVNVLNNKVEMFTPLVKLTVPFPHLNPNNQPAQFVNVGAYPPAFILIPKPRPKCSKXVFVFLIESLNPLVGVKIGKVFPSTPYFLVWSHIPRPKMFNK

SEQ ID NO: 314537 - protein, 42 aa, Zea mays
  Clone ID: MRT4577_49916C.1.pep
MVAVFPSFCHCYTLGTIKYGVLDVPSLQNHDKKKKQKKNKKK

SEQ ID NO: 314538 - protein, 237 aa, Zea mays
  Clone ID: MRT4577_49917C.1.pep
MEYSGGGATLSEMYQSARRLLLSARDGVGRVERLASAPTSSSYSSAPLVGGASGDPAVAEEVRREVAQIQGLCAQMDRLWRSIPAKGQRDLWKRKVEQLSEEVDSLKETLDRHSLRQKKRILEAKERAELFERANGESSHVLRIFDDEAQAKQSARNSSRMLEEAYETGVGILHKYADQRDRLKSAQRKALDVLNTVGLSNSVLKLIERRHRVDRWIAYAGMVITVVVMIAFWRLTH

SEQ ID NO: 314539 - protein, 94 aa, Zea mays
  unsure (1)..(94): unsure at all Xaa locations
  Clone ID: MRT4577_49918C.1.pep
GFVFFFFFFFFWGFFFFFFFFFFFFWXLPGDSQQKGDNHTQGNPFFFSRVCLGSPKQTXSKPFSFKLXQPLNTYIIKXXKPXKTLLKHFILXHI

SEQ ID NO: 314540 - protein, 56 aa, Zea mays
  Clone ID: MRT4577_49919C.1.pep
SLHHIYVIIPSTHDLSKSVILAVSSCSSISGASSLQISDGWLFRSSISKFHALTPY

SEQ ID NO: 314541 - protein, 116 aa, Zea mays
  unsure (1)..(116): unsure at all Xaa locations
  Clone ID: MRT4577_4991C.1.pep
SCRTCCRKYKDVLVKDAGYIGTXGKGILAADECTGTIGKRLSSINVDNVXENSPALRELLLCXPGALQYISGVILLEQTLRQKTKDGXPYRCVLKDGGDLRCIQSGQGTTEVVASD

SEQ ID NO: 314542 - protein, 58 aa, Zea mays
  Clone ID: MRT4577_49920C.1.pep
NGGDCILESRQMEATWVSALSKIYWIISSQKRNRTSTTNKCCMCYNNMFFLSMHVKVK

SEQ ID NO: 314543 - protein, 32 aa, Zea mays
  Clone ID: MRT4577_49921C.1.pep
AGFVVFPLFTVVALNGVFGLGVNKICDDLLSC

SEQ ID NO: 314544 - protein, 62 aa, Zea mays
  Clone ID: MRT4577_49922C.1.pep
CMLYKEIELVLHHGEIILDEMSFRYEVIHAERLDQRYVQRNLPGEVGKEACKLKPCECGSAT

SEQ ID NO: 314545 - protein, 74 aa, Zea mays
  Clone ID: MRT4577_49923C.1.pep
MQGLTPTYKLSSISVVILLLVLTGGGGVAHGRKKKLVSSYDEPCQQMTVYYHDILYDGTNTANATSAVAAQRRC

SEQ ID NO: 314546 - protein, 64 aa, Zea mays
  Clone ID: MRT4577_49924C.1.pep
LDLGGLQGIKTLKKELWPQGGAKSQTKLAPQTYSMDLTKKSRRADGVNDNRGPKSARPGLKLGV

SEQ ID NO: 314547 - protein, 261 aa, Zea mays
  unsure (1)..(261): unsure at all Xaa locations
  Clone ID: MRT4577_49925C.1.pep
VVRLQVPVRNSRVDPRVRKKLTQIQESQVTXHNKERRSKRDEKLDKKSQAMEELKAEREKRKNRTAELLAKKQPLKTSEVYSDDEEEEDDDKSSEKSDRSSRTSSSDEEEEKEEIPPKSQPVSLPEELNRVRLSRHKLERWCHMPFFAKTVTGCFVRIGIGNHNSKPVYRVAEITGVVETAKVYQLGGTRTNKGLQLRHGNDQRVFRLEFVSNQEFTESEFMKWKEAMFSAGMQLPTLDEINKKXLSIKEALNYKFNDQDI

SEQ ID NO: 314548 - protein, 80 aa, Zea mays
  Clone ID: MRT4577_49926C.1.pep
LVGCLSLGLVVKHNHLCYVCHHTNISMMETVVQVCMCTMVFTTVQAISPSSFLISHRSGHFMVSYGRPLNRLADESLSVH

SEQ ID NO: 314549 - protein, 63 aa, Zea mays
  Clone ID: MRT4577_49927C.1.pep
HTDSVIVGSLPNEVSIQPTQLTVLKSHCFQNGTVSKLRLVVGLVAILGEGTCLFFIDGDLVST

SEQ ID NO: 314550 - protein, 40 aa, Zea mays
  Clone ID: MRT4577_49928C.1.pep
VVKFVKSRYYTLINKCLTVVITLNYIYFIIFYLKIKQLIN

SEQ ID NO: 314551 - protein, 448 aa, Zea mays
  Clone ID: MRT4577_49929C.1.pep
HASGAATLSNGAPWITTVGAGTIDRDFPAYVTLGNGKNYTGVSLYSGKPLPTTPMPFIYAGNASNSSMGQLCMSGSLIPEKVAGKIVLCDRGTNARVQKGFVVKDAGGAGMVLANTAANGEELVADAHVLPGSGVGEQAGNAMRDYAMSDPKATATIVFAGTKVGVKPSPVVAAFSSRGPNTVTSSVLKPDIIAPGVNILAAWSGSVGPSGLPGDGRRVGFNIISGTSMSCPHVSGLAALLRAAHPEWSPAAIRSALMTTAYNEYPGGGNGILDVATGRPATPLDVGAGHVDPAKAVDPGLVYDIAAADYVDFLCANNYEAAQIAALTRQHASEGCSANRTYAVTALNYPSFSVAFPAAGGTAKHTRTVTNVGQPGTYKVAASAAAGGTPVTVTVEPSTLSFSRAGEKQSYTVSFTAGGMPSGTNGFGRLVWSSDHHVVASPIAATWT

SEQ ID NO: 314552 - protein, 71 aa, Zea mays
  Clone ID: MRT4577_4992C.1.pep
QEVSLPTKEGYTLFLLSTSCTRVLTIIYSTLIIKKICFFFSIFLLTYNIYYYVYFFLNFFFQINYFSQILL

SEQ ID NO: 314553 - protein, 105 aa, Zea mays
  unsure (1)..(105): unsure at all Xaa locations
  Clone ID: MRT4577_49930C.1.pep
ENERNTTPARPQSDHHHKGNHDPQAHRAAHGQRREGRTAPDLLQQSRAHEEPGXDTHPGARIGSGTPTDHATGNDTGETADRGNDAPILHGDTPGGTGKEAGDPH

SEQ ID NO: 314554 - protein, 34 aa, Zea mays
  Clone ID: MRT4577_49931C.1.pep
HSRDNNEYLIINNSIHQHIEAKGPKGISSKRRCN

SEQ ID NO: 314555 - protein, 76 aa, Zea mays
  Clone ID: MRT4577_49932C.1.pep
QKGPLQNPTWATSRGAPFPHPHKKGGLVPPATRGVFHDIACEKFLSRNRPPPPFFSPWGKESGLSPWSGQPFVKHR

SEQ ID NO: 314556 - protein, 307 aa, Zea mays
  Clone ID: MRT4577_49933C.1.pep
MVFVSLFLVLYFMETILSLVLLFLLLRRSDCIPIPWTPNCLPPLPVRLSRLQHFHPRAAVAGASRAAGRPVGSAAAKMNDADVAKQIQQMVRFIRQEADEKANEISVSAEEEFNIEKLQLVEAEKKKIRQEYERKEKQVEVRKKIEYSMQLNASRIKVLQAQDDLVNKMKDDAMKELLLVSHNHHEYKNLLKDLIVQGLLRLKEPAVLLRCRKEDHHHVESVLHSAKHEYASKADVHEPEIFVDHDVYLPPAPSHHDAHGQFCSGGIVLASRDGKIVFESTLDARLEVVFRKKLPEIRKLLFGQTAA

SEQ ID NO: 314557 - protein, 123 aa, Zea mays
  unsure (1)..(123): unsure at all Xaa locations
  Clone ID: MRT4577_49934C.1.pep
LRSLIRAQSKQQACSRTCESDHCTTPPFLRYGKYCGILYSGCPGEPPCDALDACCMHHDNCVQAKMDYLSTACNEALLDCLARLREGTSTFNGNKCMXITKVIDVISLVIEAAVVAGRVLHKP

SEQ ID NO: 314558 - protein, 81 aa, Zea mays
  Clone ID: MRT4577_49935C.1.pep
TYIYLESKIKLLITDQSYKRVLSSYTYQGRHRLLPIALKQKDPIWRTKSSRIFTPVFLHLIPPWSKSNKNLSLPHRNRLAT

SEQ ID NO: 314559 - protein, 44 aa, Zea mays
  Clone ID: MRT4577_49936C.1.pep
LTDAAVRHSPLLNLMNQATQAFIKRAQPRQNRPLCSLHGRLCQP

SEQ ID NO: 314560 - protein, 71 aa, Zea mays
  Clone ID: MRT4577_49937C.1.pep
VKNDGSLTIAWHVNASDGNGNPTGISYNKSAPEHPKLDASHIGNAAPVKLQFGPFGINGWMNDTDGTSHTG

SEQ ID NO: 314561 - protein, 63 aa, Zea mays
  Clone ID: MRT4577_49938C.1.pep
HQQQGQRFCCIPYFTFFHWHQLLVLFFQVTLASHGVAFSLISPKPKILVAQKPSFTSSQAVSS

SEQ ID NO: 314562 - protein, 55 aa, Zea mays
  Clone ID: MRT4577_49939C.1.pep
FTFHKEMVHPVLDLKQLELSKSCNFLFFSVAAHKEVSKGTRVAATLSIHRFNMKP

SEQ ID NO: 314563 - protein, 65 aa, Zea mays
  Clone ID: MRT4577_4993C.1.pep
DLVGNNRQVLVRLVERQYAEGEREQQANHDRAPGDTLRRNPPQAAWRHLRSTRDRPTPIRSKEFC

SEQ ID NO: 314564 - protein, 402 aa, Zea mays
  unsure (1)..(402): unsure at all Xaa locations
  Clone ID: MRT4577_49940C.1.pep
ILKIQQLYDGSSCIFSHGQQRFRLLRHWLDVDGVPWGEVQIIEEDTPQRTPRDAFAQLAAPNSFRQCASSIMPSLHVYCSTQLDHVDSDMDRDSLSPTSTSSDHSITDKRIYLLGSRSSDLVRCGIADESSNEGQNSVHEQSCQSHDSVKEIDGYGQPDKNTNTGDEDNLCFISSKSFQRXERKIPNSRNTTSQRKMXQAPLSFWPHWAYEMYDSYSLSRRAADLWRQVILNPSMDDHVRKPNYLSYCIGSKLPISESLRQELLEIDGVSYRLQREIQLLKAFNIIRCRNCLIHIARRSDMVVTSSDSPMSLHSRPHGFVKEIITVYNATGLALRGDPSKTHSWFPEYTWTIALCNACQSSIGWLFRVDDKNLHPGSFWAIRSSQISDDTQSRDRTDQTIHV

SEQ ID NO: 314565 - protein, 263 aa, Zea mays
  Clone ID: MRT4577_49941C.1.pep
HASAAAWNNCLARALFVEQYRLRMDWGTRHKICLGIAKGLAYLHEESAIRIVHRDIKASNILLDKDLNAKISDFGLAKLNEDDHTHISTKVAGTIGYMAPEYAMRGYLTDKADVYSFGVVVLEIVSGKSNTNYRPKEDFVYLLDWACVLHERGTLLELVDPDLGSNYSTEEALLMLNVALLCTTAAPTLRPKMSKVVSLLEGSAPLQPLLSDLSLAANSLSSSGVRRNFWQNPGESQSLTAQASCSDTNESSPIDIDGILLVS

SEQ ID NO: 314566 - protein, 62 aa, Zea mays
  Clone ID: MRT4577_49942C.1.pep
WLRSKHGTNVSAFGYMYTLFCPVNESCCPAGGSHLPRTVMVMPFRFGVCSIVVWPHPVSVSV

SEQ ID NO: 314567 - protein, 41 aa, Zea mays
  Clone ID: MRT4577_49943C.1.pep
THSRRLHILTIPYYTHRFDFYTLAEQLAGFGRELVSQEAII

SEQ ID NO: 314568 - protein, 95 aa, Zea mays
  Clone ID: MRT4577_49944C.1.pep
QTPKAQGVLKSPAKNTRGTQNFPQPAPHRGINEIPPLKFVLGGAGFWLPTLPARPWGSPPPWPRRFWRGPINRSAFVRRFPRCPCRSKPPWGLGP

SEQ ID NO: 314569 - protein, 75 aa, Zea mays
  Clone ID: MRT4577_49945C.1.pep
TSWTLRITSAAPRSSPIPQWPVPGSRTLIPYHRRVSPAKKREPRVVSREHAPPSFPDASVPWGGAVTRIRPYREA

SEQ ID NO: 314570 - protein, 109 aa, Zea mays
  Clone ID: MRT4577_49946C.1.pep
HPQRPTEHRKAPGSRASAAEYGGSLPWGPAHGGGWAMPQPNLPIAPCVPPPPSARAGSNFGSYSSRMYQPPSWFALIQNPVLGGKKKKKKEKKKKKKKKKKYSALLPLL

SEQ ID NO: 314571 - protein, 67 aa, Zea mays
  Clone ID: MRT4577_49947C.1.pep
LLFLTRNGRDFVLSLCTNKWKTHDRKLLPFKIIPAVGVFVTKNNKMIEDFWGPVYQKIPYSVSYKQD

SEQ ID NO: 314572 - protein, 115 aa, Zea mays
  unsure (1)..(115): unsure at all Xaa locations
  Clone ID: MRT4577_49948C.1.pep
GRPRRTADMLQTVLRGFYGKPHGTFSGVDIGQVLLSFLCKDNNASHAIEALRRAMFKFLVLLKIIVSRKWCFTKFIRSYYLNYKSDGRIVPDGVNSXLLFNHVILYIRAPGKAFL

SEQ ID NO: 314573 - protein, 104 aa, Zea mays
  unsure (1)..(104): unsure at all Xaa locations
  Clone ID: MRT4577_49949C.1.pep
KRCRQARERCERRPSGRGIDARAGDGRMAGAQVGWDRGLGARRKGLRGMQMWCGGWSAGKRVAGLLEHRSEGGKIHTNTLYTMVFGAAKGYISAGDYISIPXGL

SEQ ID NO: 314574 - protein, 111 aa, Zea mays
  unsure (1)..(111): unsure at all Xaa locations
  Clone ID: MRT4577_4994C.1.pep
KKLPHTDTDVQFKVMFGKYGSMASARVMRDSDGKYRCDGFVKYQNAHAAYQAVQELNGSIFIDXNNCISNDHITTLKXIDSNDKFDMNVHXVAQKFRITDLYLKNLQENID

SEQ ID NO: 314575 - protein, 87 aa, Zea mays
  unsure (1)..(87): unsure at all Xaa locations
  Clone ID: MRT4577_49950C.1.pep
ALPHSETLGPRCISLMKTLASKTITLEEEPSDTIDKGKARIQDKESIPPDQQHLIFVRKQLEDGRTVXDSNHENESSLHQRPDLKGG

SEQ ID NO: 314576 - protein, 97 aa, Zea mays
  Clone ID: MRT4577_49951C.1.pep
QLVWRGKVQVDFNQGSTTAATTTYNNTTVGVMMAAPSGGGCSGCLDCLHDIVHALSMGSCLTVEQRPAMATGGAHKGRDVKERKEKVEGRIIGNGVG

SEQ ID NO: 314577 - protein, 70 aa, Zea mays
  Clone ID: MRT4577_49952C.1.pep
RCEPISFSWWTLKYSSFAQGLVSNNIQPRPRPPTSPICGDHLHFASCRALIQTFSFGRALLLSFCSEAGS

SEQ ID NO: 314578 - protein, 24 aa, Zea mays
  Clone ID: MRT4577_49953C.1.pep
LWCSHVIFFPVNLLRSEMIVPNNP

SEQ ID NO: 314579 - protein, 307 aa, Zea mays
  Clone ID: MRT4577_49954C.1.pep
MERLQRIFGASGMGQPPTDSPLLDSSEQVYISSLALLKMLKHGRAGVPMEVMGLMLGEFVDDYTVRVVDVFAMPQSGTGVSVEAVDHVFQTNMLDMLKQTGRPEMVVGWYHSHPGFGCWLSGVDINTQQSFEALNPRAVAVVIDPIQSVKGKVVIDAFRLINPQTMMLGQEPRQTTSNVGHLNKPSIQALIHGLNRHYYSIAINYRKNELEEKMLLNLHKKKWTDGLILKRFDTHSKTNEQTVQEMLNLAIKYNKAVQEEDELPPEKLAIANVGRQDAKKHLEEHVSNLMSSNIVQTLGTMLDTVVF

SEQ ID NO: 314580 - protein, 87 aa, Zea mays
  Clone ID: MRT4577_49955C.1.pep
GEVIIHWGVCRDNTMTWEIPPEPHPPKTKIFRHKALQTLLQQKADGAGNSISFSLDAEYSCLFFVLKLDEYTWLRNLENGSDFYVPL

SEQ ID NO: 314581 - protein, 469 aa, Zea mays
  unsure (1)..(469): unsure at all Xaa locations
  Clone ID: MRT4577_49956C.1.pep
QAVKTRLITFVRSLSTVLAVAYILTSLIQQVQKFLMDMRNPNDTRNMGFDFTMKALYTLVWIASVSLFMELLGFNTHQWITAGGFGTLVLTLAGNEIFTNFHEMGMXSVAKPIXILNSSMRXNIVLGVVXGRVEHVGLWSPTLIRGVDREAIYIPNHKFTVSILRNNTQRTHWRIKTYLAISHMDAGKIGTIVAHMRKVLAKNPHIEQQKLHRRVFFEKIDPKNQALMIFISCFVKTSHFEEYLNVQEAVMLDLLRIVGHHKARLATQIRTVQKSYGNADFDNIPFGEDMYSRVRGRPLLIDTSARISDDKPRPRPVSSREEQKVKTNGSVDIKSSSPENASSSNSEKQEPKKMVPEDTRVKNIKGDNVMPVTPSLDPATSTSKAGKGKTREPEPTERQGDGPVSVANPKKESRPVFEDNIVLGVALEGSRRTLPIEEGNPHLSLSETEVDTEEAASSPKDKIGQSPKL

SEQ ID NO: 314582 - protein, 307 aa, Zea mays
  Clone ID: MRT4577_49957C.1.pep
MERLQRIFGASGMGQPPTDSPLLDSSEQVYISSLALLKMLKHGRAGVPMEVMGLMLGEFVDDYTVRVVDVFAMPQSGTGVSVEAVDHVFQTNMLDMLKQTGRPEMVVGWYHSHPGFGCWLSGVDINTQQSFEALNPRAVAVVIDPIQSVKGKVVIDAFRLINPQTMMLGQEPRQTTSNVGHLNKPSIQALIHGLNRHYYSIAINYRKNELEEEMLLNLHKKKWTDGLILKRFDTHSKTNEQTVQEMLNLAIKYNKAVQEEDELPPEKLAIANVGRQDAKKHLEEHVSNLMSSNIVQTLGTMLDTVVF

SEQ ID NO: 314583 - protein, 345 aa, Zea mays
  unsure (1)..(345): unsure at all Xaa locations
  Clone ID: MRT4577_49958C.1.pep
MTWFRAASGAARLALRRSLATRTPPAAATRCGRCFHSTAMRPRSAAPVPRAVPLSRLSDSFLDGTSSVYLEELQRAWEVDPSSVDESWDNFFRNFVAQASPSAGVSGQTIQESMQLLLLVRAYQVNGHMMAKLDPLGLDDRAVPEDLRLGLYGFTEADLDREFFLGVWRMSGFLSENRPVLTLREILNKLQQAYCGPIGYEYMHIPDRDKCNWLREKIETAKPKEYNKDRRLVMLDRLIWSTQFENFLATKWATAKRFGLEGGETLIPGMKEMFDRAADLGVENIVIGMPHRGRLNVLGNVVRKPLSQIFSEFTGGTRPVEGEDGLYTGTGDVKYHLGTXYDRPT

SEQ ID NO: 314584 - protein, 269 aa, Zea mays
  unsure (1)..(269): unsure at all Xaa locations
  Clone ID: MRT4577_49959C.1.pep
GRPPPHHRQHGRAGVPMEVMGLMLGEFVDDYTAMPQSGTGVSVEAVDHVFQTNMLDMLKQTGRPEMVVGWYHSHPGFGCWLSGVDINTQQSFEALNPRAVAVVIDPIQSVKGKVVIDAFRLINPQTMMLGQEPRQTTSNVGHLNKPSIQALIHGLNRHYYSIAINYRKNELEEKMLLNLHKKKWTDGLILKRFDTHSKTNEQTVQEMLNLAIKYNKAVQEXEDELPPEKLAIANVGRQDAKKHLEEHVSNLMSSNIVQTLGTMLDTVVF

SEQ ID NO: 314585 - protein, 75 aa, Zea mays
  Clone ID: MRT4577_4995C.1.pep
KADWPRLLSIAVDVAQGLAFLHQVATVHLDVCSGNVFLDSRYNALLGEVEISRLLDPCSGSPCCARSAPPRSGPG

SEQ ID NO: 314586 - protein, 307 aa, Zea mays; identical to SEQ ID NO: 314579
  Clone ID: MRT4577_49960C.1.pep

SEQ ID NO: 314587 - protein, 123 aa, Zea mays
  unsure (1)..(123): unsure at all Xaa locations
  Clone ID: MRT4577_49961C.1.pep
GPTEYQPRHRNCRRGGQGSRERXSQPPQSRVPPAATTTTAMISILAQERLLGFALGSVSMGGFVLHQRRAIYRSIAEADGSSYFYQPGEIAGRRSSTELAHVWNKAVDETLGKLVVYLSSRGW

SEQ ID NO: 314588 - protein, 50 aa, Zea mays
  Clone ID: MRT4577_49962C.1.pep
PRDYYNRMANDWVDTHSNTTLMMDLRTEQWLPSHVLSRYPMTSIERVKED

SEQ ID NO: 314589 - protein, 142 aa, Zea mays
  unsure (1)..(142): unsure at all Xaa locations
  Clone ID: MRT4577_49963C.1.pep
MFTNPLGRERVHLSVTSWCGWWMGRDPLSKWEHELXKKXSESAMIKDRXGGGVPVIVEKAGKTEVPEIEKKKYLVPAELTVGQCVYVGRRRIKVSPEKGLFVFGRRSLGPTAFLMCGIYEENKDEDGXLYMSYSGENSFGFG

SEQ ID NO: 314590 - protein, 34 aa, Zea mays
  Clone ID: MRT4577_49964C.1.pep
QEFLNHPIVKESLPPRDPVFSFFKGLYESLFGSK

SEQ ID NO: 314591 - protein, 96 aa, Zea mays
  Clone ID: MRT4577_49965C.1.pep
RKITMPREQYGVTVHLFIGTGRNPDKLTFISLTFTANHKVSYQGLSSLFPFRSVSSSTFIIILSQSSFSHSFGARSSYLRVVFPYHVYLRLKAKAS

SEQ ID NO: 314592 - protein, 36 aa, Zea mays
  Clone ID: MRT4577_49966C.1.pep
HLNSKESQAKPSGDRPPNRFHRSSHEDFLALHYIIR

SEQ ID NO: 314593 - protein, 43 aa, Zea mays
  Clone ID: MRT4577_49967C.1.pep
HQRLTILRLINLVYLGLRVTISSFTISFTISYSKILSQSISTK

SEQ ID NO: 314594 - protein, 155 aa, Zea mays
  unsure (1)..(155): unsure at all Xaa locations
  Clone ID: MRT4577_49968C.1.pep
PGTQPPTPRTGAEGQAXXPQXXAEXXRXXQRXSSXGDTXXXXGTKEGXKXXTXGEXGXANXGGGGDQXXDKPEEXTXXREQEPXXXTXAXRDRNPXTKAXXRAEQGXXSXAXEXPGXGEDKNXXEGDXRXXXAPKXDXDEEXKPRTTRPAGKRRR

SEQ ID NO: 314595 - protein, 100 aa, Zea mays
  Clone ID: MRT4577_49969C.1.pep
MLLERVRFTDGVECNKIGVGYEAFQNQPNFCASPFESCLNNQLWTFLEGRFQRINQHPDASVHSFSIGVTEVINSNLRIELSADDIEYMYQRYICWPRPY

SEQ ID NO: 314596 - protein, 219 aa, Zea mays
  unsure (1)..(219): unsure at all Xaa locations
  Clone ID: MRT4577_49970C.1.pep
GRRRWGVSACRGSRRRWPVLARTPTAVALLCSNAWPTGLEVVVGPENRTVVSKDNFLRVNLIGDFGGYTSIPAFEDFYLVTPRKSAGSGEPQNLGAEYRKWMLLERVRFTDGVECNKIGVGYEAFQNQPNFCASPFESCLNNQLWTFLESDKNRISMSRQPQYVVQGRFQRINQHPDASVHSFSIGVTEVINSNLRIELSADDIEYMYQXRSPGDITDI

SEQ ID NO: 314597 - protein, 62 aa, Zea mays
  Clone ID: MRT4577_49971C.1.pep
MSRQPQYVVQGRFQRINQHPDASVHSFSIGVTEVINSNLRIELSADDIEYMYQRYICWPRPY

SEQ ID NO: 314598 - protein, 101 aa, Zea mays
  unsure (1)..(101): unsure at all Xaa locations
  Clone ID: MRT4577_49972C.1.pep
QSSQFQVGILPFTYLGLPMGHNRPSMKNFLPLVQKIEKILSTTSLFLSQAGRLQVVNQVLCSLPTYFMCTLRIPKSVIKXIDKYREHCLXTGANIHARKPP

SEQ ID NO: 314599 - protein, 636 aa, Zea mays
  Clone ID: MRT4577_49973C.1.pep
GYLEAGRKDQSIKCRSGGPRVAPAWAALTVVSSSSSPLYLAAVGASRRVVRPAREEGGGGAFRRVVARGGGGLCSRARQRRWHCCAPTRGRPVWFHVFGIGTRSLGFNIRVQVKKGSSVSEVVVGPENRTVVSKDNFLRVNLIGDFGGYTSIPAFEDFYLVTPRKSAGSGEPQNLGAEYRKWMLLERVRFTDGVECNKIGVGYEAFQNQPNFCASPFESCLNNQLWTFLESDKNRISMSRQPQYVVQGRFQRINQHPDASVHSFSIGVTEVINSNLRIELSADDIEYMYQRSPGNITDISVPAFEVLSQYGTAKVTTKNIGTLEASYTLTFHCSSGISFMEEQYYILKPNEESTRLFYLHASTDQAAKYQCTAILKASDSSELDRQECVFSTTATVLDNGTQIIGSNGYKLGFFDTIKGYLVSFWDFLIDLISGKSCRLNKCRSFFDFSCHAQYRCITWLVMLVLLLFMLPAGAIVLYLLHQKGFFDPVYDWWDDLLGADYRAHRRHKKGRRHHHHHHDHHHHRHHHHHGHSHGHDHHPHSHHHAHQRRKIEPSHHHVLHRQQPGTAAEGHRHKHDPALGVQHREAGHLGHKRRHGKAVVAEDALDLEFRERRPYEVRHAGHLHRDHHHHHHSWEV

SEQ ID NO: 314600 - protein, 50 aa, Zea mays
  Clone ID: MRT4577_49974C.1.pep
SSHTIRNLWDLPSKHPVFSSSQYCVVDSFLRNHCSILKILPANMGFTHQK

SEQ ID NO: 314601 - protein, 70 aa, Zea mays
  Clone ID: MRT4577_49975C.1.pep
EGAFYDVASFVSSSSSSAFLKKKLPLLCSAIWHDKAPSIPAFFFRMHHVHMLVHVVLFPQAPNHKYCMIC

SEQ ID NO: 314602 - protein, 62 aa, Zea mays
  Clone ID: MRT4577_49976C.1.pep
SHPIRCGTSCISAGMSDSCSTSSVMRNGLRTIRVDSWRVPVMKQARSSPVQRWAWRRSRESN

SEQ ID NO: 314603 - protein, 56 aa, Zea mays
  Clone ID: MRT4577_49977C.1.pep
PALQAIRHEERARDVIFCTLCLAGTRQWHEMPNLSRYAGCGPSTTDVDHADLTGAS

SEQ ID NO: 314604 - protein, 131 aa, Zea mays
  Clone ID: MRT4577_49978C.1.pep
STMKRWIRGRNFIILFRRQKKYQVFCRCRPLSKDEVSSGQNANGRTTKKTLSLIESSRRRMIKVRRGRSTTPHHAARRRRRRRSVRHGAARASDRRWSVGVSWCRRAPAWASIGQNHPAELATEKATFGFE

SEQ ID NO: 314605 - protein, 72 aa, Zea mays
  unsure (1)..(72): unsure at all Xaa locations
  Clone ID: MRT4577_49979C.1.pep
STRFSHSEATSGYRSGAENGALYEQVSSPVLWSPYQPVHKDQGAYARLNISCAATWWYTSGLYMSXEGFQYI

SEQ ID NO: 314606 - protein, 77 aa, Zea mays
  Clone ID: MRT4577_4997C.1.pep
RDSGRHCLGVLTSTTRSLGYTMGGPRWTGVNPLVTSGWVGSRLDRGKFSLESRAAAGIALRRGRPRRYRFMIEVKCR

SEQ ID NO: 314607 - protein, 268 aa, Zea mays
  unsure (1)..(268): unsure at all Xaa locations
  Clone ID: MRT4577_49980C.1.pep
MSCLRMRRTQLASQLARSFRPSTRAFSSTRPFQRIIATENLRAKEASGFISSKYPVIDHQYDAIVVGAGGAGLRAAFGLAEAGFNTACISKLFPTRSHTVAAQGGINAALGNMHEDDWRWHMYDTVKGSDWLGDQDAIHYMTREAPQSVIELENYGCPFSRTDDGKIYQRAFGGQSQKYGKGGQAYRCCAAADRTGHALLHTLYGQSLRHNTKYFIEFFATDLIMEDGVCKGVVAYXQXDGTIHPFIAKNTXXXALGGYXRXYFSCTS

SEQ ID NO: 314608 - protein, 83 aa, Zea mays
  unsure (1)..(83): unsure at all Xaa locations
  Clone ID: MRT4577_49981C.1.pep
MESGQQGQSGHXGATGHVDQYGNPVXGGVDHGTGGMRHGTXGTGGGMGHLGEHGGXGMAGGQLQPAREEHKTGGILHCLRQLH

SEQ ID NO: 314609 - protein, 167 aa, Zea mays
  Clone ID: MRT4577_49982C.1.pep
MLVYQDLLSGDELLSDSFQYKEIFDGVLWEVEGKWVVKGAVDVDIGANPSAEGGEDEGVDDQTERVVDIVDTFRLQEQPTFDKKTFVTNIKRYIKNLTGKLEPEKADEFKKGIEGATKFLLSKLKDLQFFVGESMHDDGSLVFAYYKEGATDPTFLYFAHGLKEIKC

SEQ ID NO: 314610 - protein, 77 aa, Zea mays
  Clone ID: MRT4577_49983C.1.pep
VSLQTLKPVIDRANPKIGIGMLAFSPDIYFLATRNDNILNAVWVWDIQKLRLFAVLVQLSPVSAFQWDPQHRRMAIC

SEQ ID NO: 314611 - protein, 171 aa, Zea mays
  Clone ID: MRT4577_49984C.1.pep
MAGDGTDAAFEDEVEPTVTISEYMDGIEAEELEADLVLGGDDGNECTYGAGYLKRQAVFSCLTCVPDGVAGVCTACCLACHDGHEVVELWTKRNFRCDCGNSKFGGHLCKLSPEKDPENPANSYNQNFKGSYCTCSRPYPDPEAKEQVEMIQCCICEDWFHEDHIGLDSLE

SEQ ID NO: 314612 - protein, 77 aa, Zea mays
  Clone ID: MRT4577_49985C.1.pep
VLLERRGVPFCVWGASARVDLCALLCVLLTVWRGTKLLASLCGRGTFCYGGPGGSDLKTFFFFWVSQPFHGGVVPVE

SEQ ID NO: 314613 - protein, 102 aa, Zea mays
  unsure (1)..(102): unsure at all Xaa locations
  Clone ID: MRT4577_49986C.1.pep
FGMAXQQREVDDISATLAGISTEIDISIFYRGLDQGSKHTLVSVVWPRRPFVLFYLILECVDGFVDCSFLKSQNYLLLVCVFILLMQQQNHMQLACAFCRPG

SEQ ID NO: 314614 - protein, 153 aa, Zea mays
  Clone ID: MRT4577_49987C.1.pep
MDSPQIPDDLFPEIFLRVPDPADLVRISAACVSFRCLVASRSFLRRYRKRHAPPLVGFFDFQRVFHPAEPPYPSASAAKAVALAADFSFPFLPAPASDWHIFEIRDGRVLLGRDPDDFGELWVCDPLHRRHLLLHRLPVLYKSLPSVTTGGIR

SEQ ID NO: 314615 - protein, 106 aa, Zea mays
  Clone ID: MRT4577_49988C.1.pep
FARLVGTGKPFFLPPIPLIDFGPLSDKGTLLFPSPPWRRAFENPFIGDSQSPHRGNRQTGCKLMFMPQINEAKTPRFKHLWTPLKVLFGLDFQERSGGNLKFIFSP

SEQ ID NO: 314616 - protein, 147 aa, Zea mays
  unsure (1)..(147): unsure at all Xaa locations
  Clone ID: MRT4577_49989C.1.pep
MLRNICQHDLPSDAITCSAADXSSIASCLSYCRLTGCGPSAPCCSTGSNLKRSARTFVDITVAWNCLINCTRGVNTLNVSYSAMIPXKRFLSMPNTIITSTRLCLQQNYNLNHLLRPSTDLINETLHLLRLANKRAATRLYPSTYAG

SEQ ID NO: 314617 - protein, 116 aa, Zea mays
  unsure (1)..(116): unsure at all Xaa locations
  Clone ID: MRT4577_4998C.1.pep
MGGPRWTGVNPLVTSGWVGSRLDRGKFSLESRAAAGIALRRGRPRRYRFMIEVYASGGSSWIIDSGCTNHMTGEKKMFSSYEKNKDPQXAITFGDGNQGEVQVVQEEVYNEGYKLI

SEQ ID NO: 314618 - protein, 219 aa, Zea mays
  unsure (1)..(219): unsure at all Xaa locations
  Clone ID: MRT4577_49990C.1.pep
GLRQADDYITKACHLADRLNIATVPLLPGDRAWSSADTVPVSRAMGRILCAIPAHTSGGDGGPFIDHVDEMVVSMRELEIVTDSVVDVAADSGAAAAAACEVTAGCSKVVGSLVEPASDSEVVELPGSPREHRSTVAATGASQVPLPSPTQAIHGCFFSTPPLPLLKEAPPLPQQRRRRTYDMTKVRRSARLANRPAMPXPKAGPNHPLPTAWAHCRGD

SEQ ID NO: 314619 - protein, 123 aa, Zea mays
  Clone ID: MRT4577_49991C.1.pep
KRASRSKTKLKLPGYLMQKDHRVNLDKTVDTLKRAGVPEDKKATLERKMGSGPSTGPGEKPNGPTFGKKKKKFVKAGIKAQAKKKRQKGGKKEDIELPPEGDHQEPLVKIGEKRGPGGVFGEP

SEQ ID NO: 314620 - protein, 60 aa, Zea mays
  unsure (1)..(60): unsure at all Xaa locations
  Clone ID: MRT4577_49993C.1.pep
GLRSDMDGTIYCXPXNLAVSKLIVFXANIPSMERPXXCXAXVCXSSIEWIIIKRHAGSYY

SEQ ID NO: 314621 - protein, 251 aa, Zea mays
  Clone ID: MRT4577_49994C.1.pep
MISPDTIRTAIGVIGNGTALVLFLSPVPTFIRIWKKGSVEQYSPIPYVATLLNCMMWVLYGLPAVHPHSMLVITINGTGMAIQLTYVALFLLYSAGAARRKVVLLLAAEVGFVGAVAALVLSLAHTHERRVMVVGILCVLFGTGMYAAPLSVMKLVIQTKSVEYMPLFLSLASLANSICWTAYALILCSAGAVRRRVVLLFAAEVAFVVALGALVLTLAHTHERRSMLVGIVSDCDLPKGTMLRCILCVSY

SEQ ID NO: 314622 - protein, 42 aa, Zea mays
  Clone ID: MRT4577_49996C.1.pep
NILGLDYRRYCLTLFLKLIHGMQKRTRKMFNGPKRRYTTREN

SEQ ID NO: 314623 - protein, 193 aa, Zea mays
  Clone ID: MRT4577_49997C.1.pep
RALPLPVPTFIRIWKKGSVEQYSPIPYVALFLLYSAGAARRKVVLLLAAEVGFVGAVAALVLSLAHTHERRSMVVGILCVLFGTGMYAAPLSVMKMVIQTKSVEYMPLFLSLASLVNGICWTAYALIRFDLYITIPNGLGVLFAVAQLVLYAIYYKSTQEIIEARKRKADQIAMTGVVVDGGKTNNQAGAGQY

SEQ ID NO: 314624 - protein, 110 aa, Zea mays; identical to SEQ ID NO: 291220
  Clone ID: MRT4577_49999C.1.pep

SEQ ID NO: 314625 - protein, 117 aa, Zea mays
  unsure (1)..(117): unsure at all Xaa locations
  Clone ID: MRT4577_4999C.1.pep
LAAAMPCTASRHCGRSLSLLADTQCIATLSHIRCARTDFPICPATCANYSLDEHSQHXNMYTATPTSPPHRSVWAAHTIAMAYIQLILLDHCSIRRAPATTADKGSHCICYARRENT

SEQ ID NO: 314626 - protein, 79 aa, Zea mays
  unsure (1)..(79): unsure at all Xaa locations
  Clone ID: MRT4577_499C.1.pep
PAPGPCTWCTCPGTWXXLFSRHSFLLVSPTXXXXXXSTTRAWRSITGCWSGHFFFSIPTKQRRSLVHPRHQTLLQLQTE

SEQ ID NO: 314627 - protein, 1018 aa, Zea mays
  Clone ID: MRT4577_49C.1.pep
MAPKRKTSSSSAVVIPPIDPNSQLPFAGNHMSVISEPELLHLVSIGVLPPRELCSWRICHGFTVPTEDTHESVVYAPFLLRGLGLPISPFFRGLLDFYHLNLTHLNPNSILQISIFVHLCEAFLGVLPHFGLWKYLYHCRPGMAGGQHQLVGGASLEMRRGRKTEYLEIPLKDSIKGWRLEWFIVENYGNSLPSRSGRQPDVRTPSWSESPTDQEVAEAGVLLAEVGLLKERGLTAETMVTDFVFKNIQPLKDRAYPAYLYRGLADSTRVTNRRIPSADLVSRLEMILRGKVSNVGAPVAYSAWNLPPPKAFTLFVSNPPVTDGSLGLRVRPSADEVSAFVASLGEIPDDERQVHFEVPLNPSDAEISAMLDLLAEGSSDAAPAGALVVAPLPEADTTLDTQKPVSTRPRRPCRANQPDPSADEQKKKRRRLRRVSSLDRDAGTSVPATEEVPATGFTDADPNGCTQSVAGPNVGAPSVADPNGGAACVANVDDEEEENEIPLTRKNSRQFIASGESSGVPSPALSALIGLQELSLANFDQTLEDMVPEDLLSEPVDDGAMEVCADVPDAGLRSSRASSTLERDLEGRETDLDRPGPMEVAEGPSTLEVATAENLDPKDGADTCPAPEDVAGDDLARVGSVSHCPAPEGAAGDDPAQVGSANYDPAPEGARARSPSCTSMDVHAGSPPHSGCMVVAQALDQGVALEGSVPADRVLSSVDGIELVPAGLLQAASGGGLTPGYQLISSNLGIPSFFSNLQALVDGMASQLRLQGASVPEVASSLACWNPVSLQHRVSELEATNAGMTRHISTLEEKHSRDQAELVQRCTDFEEKYSQSQTELGQVSAALDDANALSSSLHAQLNSEKEEKRILAASRDSLDRLYRDSSNLLTILERSHRFTMEELDNQRCKLQESADEVTRLKQLISAKDATIKELRASKKSIVQELETARLAAKVAEETSVTLRAQRDRAMDKAIRAGRILMRRPGVVVPEDIRADVNTAPDSSSRPSSSIAPEKNITK

SEQ ID NO: 314628 - protein, 170 aa, Zea mays
  unsure (1)..(170): unsure at all Xaa locations
  Clone ID: MRT4577_4C.1.pep
PPPPPPPPPPSPPAPPXPPPRVPSXPPPPLQLLPPPRPAPPRTPXXPPPQPLPPRPPSQGPPSPPPPPPPLPPPPTPPPPPPTPMAPPXPPPPTSLLGPSPPPPPPPPPPXSPPPTPPPPAAPGPPPPRPPRSTNPSNAREPRSPPPLLRPPRKPRPPLHNGGLHSSRGP

SEQ ID NO: 314629 - protein, 245 aa, Zea mays
  Clone ID: MRT4577_50000C.1.pep
MEKADMCVASTSITNTDDTSLCIGIHSHDSIVECQDYAMQHTLYCEKHLPRFLKRARNGKSRLVSKDIFVNLLKGCTSRKDKICLHQACEFLYWFLRNNLSHQHTSLASEHMPQILAEVSKNPDVGEFLLKLISTEREKLANIWGFDTNRSKQIYSENKEGSLVLHKEGTNLSSGPKCKICAHQFSDDEALGLHWTTVHKKEARWLFRGYSCAACMESFTNKKVLERHVQDVHGAQYLQYSILVM

SEQ ID NO: 314630 - protein, 144 aa, Zea mays
  Clone ID: MRT4577_50001C.1.pep
HWVPRGRPGPGPPRLPVIRLRLHPRRHALFRCDAVSEIAPAASATYGVLLLGGGAFAYARSGSKGSIYGGLAGAALMGAAYYLMQSPETMAAGDAVGFGSAFLFACVFGIRLYNSRKLVPSGLLLALSLGALGVFYSAYLQDKV

SEQ ID NO: 314631 - protein, 79 aa, Zea mays
  Clone ID: MRT4577_50002C.1.pep
HYIVFAPKRKNGSTIGACIFCSSPTQKRQYMAISYYPRHTIGTLLLSGTVRPLLTPSGNQGLILPILWNRHLGTYRIHT

SEQ ID NO: 314632 - protein, 37 aa, Zea mays
  Clone ID: MRT4577_50003C.1.pep
VSQYNSYAVEGTRRDSRDLKSSSPFFFRLFCLYVCYY

SEQ ID NO: 314633 - protein, 47 aa, Zea mays
  unsure (1)..(47): unsure at all Xaa locations
  Clone ID: MRT4577_50004C.1.pep
MVMASSSGLRSCSAVGVPSLLAPSSRSGRLAPICANATTXGRVTMSR

SEQ ID NO: 314634 - protein, 370 aa, Zea mays
  unsure (1)..(370): unsure at all Xaa locations
  Clone ID: MRT4577_50005C.1.pep
MLVKLMNLLRACWRPSSNRHARTGSDVTGRQDGLLWYKDAGQHVNGEFSMAVVQANNLLEDQCQIESGPLSFLDSGPYGTFVGVYDGHGGPETACYINDHLFQNLKRFASEQNAMSADVLKKAYEATEDGFFSIVTKQWXMLYVANVGDSRVVLGKHVKATGEVLAVQLSAEHNVSIASMRKELQSMHPEDRHIVVLKHNVWRVKGLIQVCRSIGDAYLKKQEFNREPLYAKFRLREPFHKPILSSEPSISVQPLQPHDQFLIFASDGLWEQLTNQEAVDIVRSSPRSGCARRLIRAALQEAAKKREMRYSDLKKIDRGVRRHFHDDITVIVVFLDSGLVSQASTHRGPTLSLRGGGGSAGLRSNTLAPT

SEQ ID NO: 314635 - protein, 392 aa, Zea mays
  Clone ID: MRT4577_50006C.1.pep
MLVTLMNLLRACWRPSSNRHARTGSDVTGRQDGLLWYKDAGQHVNGEFSMAVVQANNLLEDQCQIESGPLSFLDSGPYGTFVGVYDGHGGPETACYINDHLFQNLKRFASEQNTMSADVLKKAYEATEDGFFSVVTKQWPVKPQIAAVGSCCLVGVICGGMLYVANVGDSRVVLGRHVKATGEVLAVQLSAEHNVSIESVRKELQSMHPEDRHIVVLKHNVWRVKGLIQVCRSIGDAYLKKQEFNREPLYVKFRLREPFHKPILSSEPSINVQPLQPHDQFLIFASDGLWEHLTNQEAVDIVHSSPRSGCARRLIRAALQVAAKKREMRYSDLKKIDRGVRRHFHDDITVIVVFLDSSLVSKASTHRGPTLSLRGGGASAGLRSNTLAPTSM

SEQ ID NO: 314636 - protein, 67 aa, Zea mays
  Clone ID: MRT4577_50007C.1.pep
MILQTLIRFASVSRSAVSVHLRRNIGVTAVAFNKELDPIQKLFVDKIIEYKSKRQTSGGPVDASAEY

SEQ ID NO: 314637 - protein, 75 aa, Zea mays
  Clone ID: MRT4577_50008C.1.pep
FSSSPPWAPWPTWSSAWAMSPSFKPSFETRFQFLCMGTPLQRHTSNTSLGRKFPRGLRTLVLEKFLNMGHVSPSP

SEQ ID NO: 314638 - protein, 75 aa, Zea mays
  Clone ID: MRT4577_50009C.1.pep
HGSGNSGTSFVLCYPILQLVGLSKDVSTFPFAKYDKNGPLIIMMGYFFIKKKKQNVKKKNKKKYKKKKRAGGLDV

SEQ ID NO: 314639 - protein, 46 aa, Zea mays
  Clone ID: MRT4577_5000C.1.pep
RRGGCFLSFPYAFLMYGLFSGRMPVSFLQGPLSLLSLSFFLNFVYL

SEQ ID NO: 314640 - protein, 66 aa, Zea mays
  Clone ID: MRT4577_50010C.1.pep
SAFPHREGRSNSLMHPSQSFPVMRRQLLARRTLPHPPSGDKSVRIPLPESTSYLASTSPQLFNIGL

SEQ ID NO: 314641 - protein, 99 aa, Zea mays
  Clone ID: MRT4577_50011C.1.pep
DAWADAWALTKRLIEFENTVSASLPIEEFLAPADEYNEASVSKHSPKSGEILCKHKGKDFEHFAHGLCEKCFNKFTKLSGGLEGGANPPAFQRAENKRL

SEQ ID NO: 314642 - protein, 87 aa, Zea mays
  unsure (1)..(87): unsure at all Xaa locations
  Clone ID: MRT4577_50012C.1.pep
GVGSLPARVATRIYGGRSPVSWSPRPSPKYFFSHIAYYFCGCRAXYHWTLSDNREALSRISFRPRVLIVVSSIDMTHHRAGFQDLLA

SEQ ID NO: 314643 - protein, 124 aa, Zea mays
  unsure (1)..(124): unsure at all Xaa locations
  Clone ID: MRT4577_50013C.1.pep
VSATKCCSFIPQXQLAPSCLFIPQFLPXPVTXSMGCRTILAVQALQCYNYALAASCLXQQPIVQLQQQFLAHLNLQTIATQQQQQFLPSLNHLAVVNPVAYLQQQLLASNPLALANVASYQQQQ

SEQ ID NO: 314644 - protein, 88 aa, Zea mays
  Clone ID: MRT4577_50014C.1.pep
SAVALASPSAPPPPAQESEQPLGSPTARLWPDQSSSCRGDACVWTQSVGSSAGSHSREHMPASTQRRTPGLSCALALLAPRERPSGIK

SEQ ID NO: 314645 - protein, 62 aa, Zea mays
  Clone ID: MRT4577_50015C.1.pep
CTYRSLIPPTTYSHASSHSYSYIWLLLSYQQYWVRLLGNGLGHTSHTISLDFTILFLNILLV

SEQ ID NO: 314646 - protein, 51 aa, Zea mays
  Clone ID: MRT4577_50016C.1.pep
SPALSISKELLSICPLLIDQNTDDPLVQEIAHMFKAGRLKYQNPPRVWVHR

SEQ ID NO: 314647 - protein, 177 aa, Zea mays
  Clone ID: MRT4577_50017C.1.pep
MVHSFPPEYINGVKEFMSFIKKKFGEDEDILCPCSRCINQKSFHQALVEKHILMNGMESTYIQWIHHGENFEEDADHSIHGTCVIEDGNYGDDRFDGMLQDLCTVEDQDKEDGENEDGDNTNDDNESFYSVVLKEAKHLIYSGCTKFSRLSFVVKLTLTSCELQTQTLATTLGYVDH

SEQ ID NO: 314648 - protein, 77 aa, Zea mays
  Clone ID: MRT4577_50018C.1.pep
NFLQNDKCWDQKNKGHFSTPQKEPLNPTKNINLHIALEYPPTPLFLDPILFFHLTRAFQFFFWKIGNLGPQKFLLPP

SEQ ID NO: 314649 - protein, 285 aa, Zea mays
  unsure (1)..(285): unsure at all Xaa locations
  Clone ID: MRT4577_50019C.1.pep
LGTSRPAAXPVCGGMQLEPGKTWVLQVPGNTQSGRVWARTGCSFDGPGKKSCQTGDCGGVLACTTSGQPPMTMAEFTLSDSNNMDDYFDITVVDGFNLPMDFLPVPSSKGSSGCSRGPRCAADITSQCPDELKVPGGCRSACNXIFLRRQHGTDYQIIFCPPVDLVSLSPPPTSPLSPPPTSPTATNGTSSITSSSKSKRPRIFGYVLGGSIGGFTLIASLVFFFVLHRRRLHRRQEMQEEEEAEFGRLPGMPRPFTFEQLQEATDQFREKLGEGGFGSVFKGRF

SEQ ID NO: 314650 - protein, 65 aa, Zea mays
  unsure (1)..(65): unsure at all Xaa locations
  Clone ID: MRT4577_5001C.1.pep
GYFRRPLFFXNFDVHSLFFLGGQFQRTIFISWVPPNKIGSPGWHLNFICRGAGQLPLCNMPPLFF

SEQ ID NO: 314651 - protein, 88 aa, Zea mays
  unsure (1)..(88): unsure at all Xaa locations
  Clone ID: MRT4577_50020C.1.pep
GIPSDQXRLIFVGXHLEDGRTLDEYNIQKESTLHLVLRLRGGMHNFLKTLTGKTINSGVESYDTIDNVKAKIQDKEGIPPKQQCMIFP

SEQ ID NO: 314652 - protein, 659 aa, Zea mays
  Clone ID: MRT4577_50021C.1.pep
AGRVAPTRPRSSSTWTQHLLLLFFLVLGVATNSSHSSTINITNRCSYTVWPAATPVGGGMQLEPGKTWVLQVPGNTQSGRVWARTGCSFDGPGKKSCQTGDCGGVLACTTSGQPPMTMAEFTLSDSNNMDDYFDITVVDGFNLPMDFLPVPSSKGSSGCSRGPRCAADITSQCPDELKVPGGCRSACNGSSCDASTVNSNTVFYARMCPDAYTYATDNGPVTYSCPSGTDYQIIFCPPVDLVSLSPPPTSPLSPPPTSPTATNGTSSITSSSKSKRPRIFGYVLGGSIGGFTLIASLVFFFVLHRRRLHRRQEMQEEEEAEFGRLPGMPRRFTFEQLQEATDQFREKLGEGGFGSVFKGRFGEQAIAVKRLDRAGQGKREFLAEVQTIGSIHHINLVRVIGFCAEKTHRLLVYEYMPNGSLDQWIFCRQGQGDDDAPRLHWQTRHKIIAHVAKGLAYLHEECMKRVAHLDVKPQNILLDDNFDAKLSDFGLCKLIDRDKSQVVTRMRGTPGYLAPEWLTSHITEKADVYSFGVVVMEIISGRKNLDTSRSEKSFHLITLLEEKLRSDRLVDLIDMCITSDSQAQEQEAIQMMKLAMWCLQIDCKRRPKMSEVVKVLEGSISVETDIDHNFVVTNPPSFSAPRIVVMSAPPLASEVSGPR

SEQ ID NO: 314653 - protein, 44 aa, Zea mays
  Clone ID: MRT4577_50022C.1.pep
KIWLGSIIQDSRTKKKAAILLPHLFPDRCHLQQQIRSMHEKNVS

SEQ ID NO: 314654 - protein, 67 aa, Zea mays
  unsure (1)..(67): unsure at all Xaa locations
  Clone ID: MRT4577_50023C.1.pep
MYGRRNAMWVHPKVYGYNXPADRRSPSDCFFEGSGYAFVGCCGGLHSRHLLKLXVETMEWSLVTTMG
